(19) United States
(12) Patent Application Publication
(10) Pub. No.: US 2025/0084491 A1
(43) Pub. Date: Mar. 13, 2025

(54) COMPOSITIONS AND METHODS FOR CHARACTERIZING A COMPLEX BIOLOGICAL SAMPLE

(71) Applicant: The Broad Institute, Inc., Cambridge, MA (US)

(72) Inventors: Ashlee M. EARL, Cambridge, MA (US); Timothy J. STRAUB, Cambridge, MA (US); Hayden C. METSKY, Cambridge, MA (US)

(73) Assignee: The Broad Institute, Inc., Cambridge, MA (US)

(21) Appl. No.: 18/580,579

(22) PCT Filed: Jul. 15, 2022
(86) PCT No.: PCT/IB2022/056558

§ 371 Date: Jan. 18, 2024

Related U.S. Application Data
(60) Provisional application No. 63/223,185, filed on Jul. 19, 2021.

(51) Int. Cl. C12Q 1/689; C12Q 1/6806; C12Q 1/6837; G16B 25/20

(52) U.S. Cl. CPC C12Q 1/689; C12Q 1/6806; C12Q 1/6837; G16B 25/20

(57) ABSTRACT

The invention features compositions and methods that are useful for characterizing a complex biological sample.

### CROSS-REFERENCE TO RELATED APPLICATION

[0001] This application claims priority to and the benefit of U.S. Provisional Application No. 63/223, 185, filed Jul. 19, 2021, the entire contents of which are incorporated herein by reference.

### STATEMENT OF RIGHTS TO INVENTIONS MADE UNDER FEDERALLY SPONSORED RESEARCH

[0002] This invention was made with government support under Grant No. U19AI110818 awarded by the National Institutes of Health. The government has certain rights in the invention.

### SEQUENCE LISTING

[0003] This application contains a Sequence Listing which has been submitted electronically in XML format and is hereby incorporated by reference in its entirety. The Sequence Listing XML file, created on Jul. 6, 2022, is named 167741-029001PCT_SL.xml and is 840,431,311 bytes in size.

### BACKGROUND OF THE INVENTION

[0004] Clinically important microbes are often found at low abundance within complex communities, presenting a challenge for their investigation. For example, pathogenic Escherichia coli are commonly minor members of the human gut microbiome, found at an average relative abundance of less than 1%. These low-abundance organisms are difficult to characterize in their metagenomic context using sequencing approaches due to very low signal-to-noise, without massive costs for deep sequencing. Although some bacteria can be cultured, these approaches are slow and can lead to known biases. Furthermore, for many species, multiple conspecific strains are often present within the microbiome, including E. coli, further complicating isolation-based approaches, as well as their study within low-abundance sequence data. E. coli present in the gut constitutes a risk factor for urinary tract infection. Urinary tract infection (UTI) is one of the most common bacterial infections in the world, affecting over 150 million people annually. E. coli cause over 80% of all UTIs and can be remarkably diverse, with two strains sometimes sharing only approximately 50% of their genetic content. Many individuals suffering from UTI go on to develop recurrent UTIs, which are resistant to conventional therapies. Recurrent UTIs within the same individual are frequently associated with different E. coli strains. Current methods for analyzing complex biological samples from the gut and urinary tract microbiomes are inadequate. Thus, there is a need for improved methods to characterize low-abundance organisms in complex biological samples.

### SUMMARY OF THE INVENTION

[0005] As described below, the present invention features compositions and for characterizing complex biological samples (e.g., microbiomes).

[0006] In one aspect, the invention features a method of generating a set of probes. The method involves identifying a plurality of clusters of gene sequences derived from a set of genomes derived from organisms. The gene sequences within each cluster share at least about 25% nucleotide sequence identity. The method further involves generating a set of probes, where each probe within the set contains at least about 25 nucleotides and at least about 80% of said nucleotides are complementary to a target sequence present in the clusters of gene sequences. The probes collectively target at least about 10% of all gene sequences in a gene cluster.

[0007] A method for generating a set of probes for use in pan-genomic or pan-transcriptomic sequencing of polynucleotides derived from organisms present in a microbiome. The method involves identifying a plurality of orthogroup clusters of gene sequences within a set of genomes derived from the organisms, where the organism are present in a microbiome. The method further involves identifying a plurality of gene clusters within the orthogroup clusters, where the gene sequences within each of the gene clusters share at least about 80% nucleotide sequence identity. The method further involves generating a set of probes, where each probe within the set contains from about 50 to about 85 nucleotides, where each probe is complementary to at least about 25 base pairs of a gene sequence present in the gene clusters identified. The probes collectively cover at least about 50% of all gene sequences in the gene clusters, and set of probes excludes probes having 50 or more contiguous nucleotides that are identical to a set of reference sequences. Coverage of each probe is determined using a cover extension of about 20 bp.

[0008] In another aspect, the invention features a polynucleotide array containing the set of probes of any of the above aspects.

[0009] In another aspect, the invention features a set of probes suitable for use in the method of any of the above aspects, where the probes contain a set of sequences each sharing at least 80% nucleotide sequence identity along a span of at least about 65 nucleotides to a sequence selected from SEQ ID NOs: 1 to 892415.

[0010] In another aspect, the invention features a panel of probes containing probes generated according to the method of any one of the above aspects, or the set of probes of any one of the above aspects.

[0011] In another aspect, the invention features a method of characterizing a complex biological sample. The method involves contacting polynucleotides derived from the complex biological sample with the set of probes generated in any of the above aspects, or a subset of such probes, under conditions that permit hybridization of the probes to the polynucleotides, thereby forming polynucleotide/probe complexes, where each probe is coupled to a binding member. The method further involves contacting the polynucleotide/probe complexes with a capture molecule fixed to a solid support, where the capture molecule specifically binds the binding member of the probe, thereby enriching polynucleotides of the complex biological sample. The method further involves characterizing the enriched polynucleotides. In embodiments, the characterizing involves sequencing, qPCR, fluorescent imaging, fluorescence activated cell sorting (FACS), genotyping array, or a NanoString assay.

[0012] In another aspect, the invention features a method of characterizing a complex biological sample. The method involves contacting polynucleotides derived from a complex biological sample with the set of probes of any of the above aspects, or a subset of such probes, under conditions that permit hybridization of the probes to the polynucleotides, thereby forming polynucleotide/probe complexes, where each probe is coupled to a solid support, thereby enriching polynucleotides of the complex biological sample. The method further involves characterizing the enriched polynucleotides, where the characterization involves sequencing, qPCR, fluorescent imaging, FACS, genotyping array, or a NanoString assay.

[0013] In another aspect, the invention features a method for enrichment of polynucleotides derived from a complex biological sample. The method involves contacting polynucleotides derived from the complex biological sample with the set of probes of any of the above aspects, or a subset thereof, under conditions that permit hybridization of the set of probes to the polynucleotides, where each probe is coupled to a binding member and/or to a solid support, thereby forming polynucleotide/probe complexes. If the probe is not coupled to a solid support, the method further involves, contacting the polynucleotide/probe complex with a capture molecule fixed to a solid support, where the capture molecule specifically binds the binding member of the probe. The method provides for enriching the polynucleotides derived from the complex biological sample.

[0014] In another aspect, the invention features a set of enriched polynucleotide sequences obtained by the method of any of the above aspects.

[0015] In any of the above aspects, the complex biological sample contains polynucleotides derived from a host organism and an organism of interest, and the enriched polynucleotides are derived from the organism of interest.

[0016] In any of the above aspects, the enriched polynucleotides are derived from genes associated with a function of interest.

[0017] In any of the above aspects, the complex biological sample is an agricultural sample, biological sample, environmental sample, or food sample. In embodiments, the environmental sample is a drinking water sample, a river water sample, a wastewater treatment sample, a sample from a body of salt water, or a sample from a body of freshwater. In embodiments, the biological sample is a solid or liquid sample. In embodiments, the liquid sample is selected from one or more of a blood, breast milk, bone marrow, cerebrospinal fluid, culture media, lung lavage, plasma, serum, feces, saliva, semen, sweat, tears, urine, and vaginal secretion. In embodiments, the solid sample is selected from one or more of a biopsy, a fixed sample, a hair sample, a fingernail sample, and a toenail sample. In embodiments, the biological sample is part of or is a swab sample, a scrape sample, a skin sample, or an oral sample.

[0018] In any of the above aspects, the sample is collected from a surface of a medical device. In embodiments, the medical device is a catheter. In any of the above aspects, the sample contains a biofilm.

[0019] In any of the above aspects, the set of genomes contains at least 2 genomes. In any of the above aspects, the set of genomes contains at least about 5 genomes. In any of the above aspects, the set of genomes contains at least about 500 genomes.

[0020] In any of the above aspects, the set of genomes are derived from a plurality of strains of a species. In any of the above aspects, the set of genomes are derived from a set of species derived from a common family. In any of the above aspects, the organisms include a eukaryote or a prokaryote. In embodiments, the eukaryote is a fungus. In embodiments, the prokaryote is a bacterium or archaeon.

[0021] In any of the above aspects, the organisms include a pathogen. In embodiments, the pathogen is selected from one or more of Aerobacter, Aeromonas, Acinetobacter, Actinomyces israelii, Agrobacterium, Bacillus, Bacillus anthracis, Bacteroides, Bartonella, Bordetella, Bortella, Borrelia, Brucella, Burkholderia, Calymmatobacterium, Campylobacter, Citrobacter, Clostridium, Corynebacterium, Enterobacter, Enterococcus, Erysipelothrix rhusiopathiae, Escherichia, Faecalibacterium, Francisella, Fusobacterium nucleatum, Gardnerella, Haemophilus, Hafnia, Helicobacter, Klebsiella, Legionella, Leptospira, Listeria, Morganella, Moraxella, Mycobacterium, Neisseria, Pasteurella, Proteus, Providencia, Pseudomonas, Rickettsia, Salmonella, Serratia, Shigella, Staphylococcus, Stentorophomonas, Streptococcus, Treponema, Xanthomonas, Vibrio, and Yersinia. spp.

[0022] In any of the above aspects, the organisms include a species belonging to the genus Akkermansia and/or Bifidobacterium. In any of the above aspects, the organisms include a strain of E. coli selected from one or more of AIEC, DAEC, EAEC, EHEC, EIEC/Shigella, EPEC, ETEC, ExPEC, NMEC, SEPEC, ST131, and UPEC. In any of the above aspects, the set of probes specifically target a pathogenic strain(s) of E. coli.

[0023] In any of the above aspects, the organisms make up less than about 5% of the complex biological sample by relative abundance. In any of the above aspects, the organisms make up less than about 1% of the complex biological sample by relative abundance.

[0024] In any of the above aspects, the polynucleotides are enriched by a factor of at least about 2. In any of the above aspects, the polynucleotides are enriched by a factor of at least about 5.

[0025] In any of the above aspects, the polynucleotide-probe complexes contain a non-biased representation of sequence diversity in the complex biological sample.

[0026] In any of the above aspects, the probes contain DNA, RNA, or modified nucleobases.

[0027] In any of the above aspects, each probe within the set contains from about 50 to about 200 nucleotides.

[0028] In any of the above aspects, each probe shares at least about 90% nucleotide sequence identity across the length thereof with a gene sequence in at least one of the clusters.

[0029] In any of the above aspects, the clusters contain all genes or a subset of genes of the organisms. In any of the above aspects, the subset of genes of the organisms contains, or only contains, those genes associated with a function(s) of interest. In embodiments, the function(s) of interest includes antibiotic resistance and/or pathogenicity. In any of the above aspects, the subset of the set of probes contains probes targeting genes associated with a function(s) of interest. In any of the above aspects, the set of probes contains, or only contains, those genes targeting gene sequences belonging to a subset of the clusters.

[0030] In any of the above aspects, the set of probes or subset thereof contains at least about 1,000 probe sequences. In any of the above aspects, the set of probes or subset thereof contains at least about 10,000 probe sequences. In any of the above aspects, the set of probes or subset thereof contains at least about 50,000 probe sequences. In any of the above aspects, the set of probes or subset thereof contains between 100,000 to 2,000,000 probe sequences. 100. The set of probes of claim 98 or claim 99, where the set of probes contains about or at least about 50,000 sequences. In any of the above aspects, the set of probes contains about or at least about 500,000 sequences. In any of the above aspects, the set of probes contains about or at least about 1,000,000 sequences. In any of the above aspects, the set of probes contains about or at least about 2,500,000 sequences.

[0031] In any of the above aspects, each probe contains a binding member. In any of the above aspects, the binding member is streptavidin, biotin, an antigen-binding molecule, or an antigen. In any of the above aspects, the binding member is biotin. In any of the above aspects, the probes collectively contain a plurality of distinct binding members.

[0032] In any of the above aspects, the solid support contains metal, glass, or a polymeric material. In any of the above aspects, the solid support contains beads. In any of the above aspects, the solid support is a biochip.

[0033] In any of the above aspects, each probe is coupled to the solid support by a direct covalent linkage or by a bridge containing a binding member bound by a capture molecule. In any of the above aspects, the capture molecule is streptavidin, biotin, an antigen-binding molecule, or an antigen. In any of the above aspects, the capture molecule is streptavidin. In any of the above aspects, the solid support contains a plurality of capture molecules.

[0034] In any of the above aspects, the polynucleotides contain RNA or DNA. In any of the above aspects, the polynucleotides contain mRNA. In any of the above aspects, the polynucleotides contain genomic DNA.

[0035] In any of the above aspects, the polynucleotides contain at least part of or are a polynucleotide sequence library. In embodiments, the polynucleotide sequence library contains cDNA or mRNA. In embodiments, the polynucleotide sequence library contains genomic DNA.

[0036] In any of the above aspects, the method involves an amplification step. In any of the above aspects, the polynucleotides are unamplified.

[0037] In any of the above aspects, the gene sequences within each cluster share at least about 50% nucleotide sequence identity. In any of the above aspects, the gene sequences within each cluster share at least about 60% nucleotide sequence identity. In any of the above aspects, the gene sequences within each cluster share at least about 70% nucleotide sequence identity. In any of the above aspects, the gene sequences within each cluster share at least about 80% nucleotide sequence identity.

[0038] In any of the above aspects, the clusters are clusters of homologous gene sequences. In any of the above aspects, the clusters are orthogroup clusters. In embodiments, the orthogroup clusters are identified based upon gene synteny.

[0039] In any of the above aspects, the method further involves excluding from the set of probes those probes with greater than about 80% nucleotide sequence identity to one or more reference sequences. In any of the above aspects, the method further involves excluding from the set of probes those probes having 25 or more contiguous nucleotides that are identical to one or more reference sequences. In embodiments, the reference sequences contain genome sequences. In embodiments, the reference sequences contain genome sequences for bacteria selected from one or more of Citrobacter freundii, Salmonella enterica, and Klebsiella pneumoniae. In embodiments, the reference sequences contain gene sequences derived from Bacteroidetes and/or Firmicutes.

[0040] In any of the above aspects, the probes collectively cover at least 10% of the gene sequences within each cluster. In any of the above aspects, the probes collectively cover at least 50% of the gene sequences within each cluster. In any of the above aspects, the probes collectively cover at least 75% of the gene sequences within each cluster. In any of the above aspects, the probes collectively cover at least 90% of the gene sequences within each cluster. In embodiments, coverage of each probe is determined using a cover extension of at least about 20 bp. In embodiments, coverage of each probe is determined using a cover extension of at least about 50 bp.

[0041] In any of the above aspects, the probes collectively target at least 50% of all gene sequences in each of the gene clusters. In any of the above aspects, the probes collectively target at least 75% of all gene sequences in each of the gene clusters. In any of the above aspects, the probes collectively target at least 95% of all gene sequences in each of the gene clusters. In any of the above aspects, the set of probes enrich sequences derived from the organisms without significant bias.

[0042] In any of the above aspects, the probes capture intergenic regions of the set of genomes.

[0043] In any of the above aspects, the method further involves sequencing the polynucleotides of the polynucleotide/probe complexes.

[0044] In any of the above aspects, the complex biological sample is derived from a subject. In embodiments, the subject is an animal. In embodiments, the animal is a mammal. In embodiments, the mammal is a human. In embodiments, the subject has or has had an infection associated with the organisms. In embodiments, the infection is a chronic or recurring infection.

[0045] In any of the above aspects, each probe contains a unique molecular identifier. In any of the above aspects, each probe contains a bar code. In any of the above aspects, each probe contains a detectable moiety. In any of the above aspects, each probe contains a binding member.

[0046] The invention provides compositions and methods that are useful in the design and use of probes for characterizing organisms present in a complex biological sample. Compositions and articles defined by the invention were isolated or otherwise manufactured in connection with the examples provided below. Other features and advantages of the invention will be apparent from the detailed description, and from the claims.

### Definitions

[0047] Unless defined otherwise, all technical and scientific terms used herein have the meaning commonly understood by a person skilled in the art to which this invention belongs. The following references provide one of skill with a general definition of many of the terms used in this invention: Singleton et al., Dictionary of Microbiology and Molecular Biology (2nd ed. 1994); The Cambridge Dictionary of Science and Technology (Walker ed., 1988); The Glossary of Genetics, 5th Ed., R. Rieger et al. (eds.), Springer Verlag (1991); and Hale & Marham, The Harper Collins Dictionary of Biology (1991). As used herein, the following terms have the meanings ascribed to them below, unless specified otherwise.

[0048] By “pan-genomic” or “pan-genome” is meant a set of genomic sequences from two or more organisms or strains. The genomic sequences can be gene sequences. The organisms can be strains of a species of microorganism. The set of genomic sequences can contain all or a subset of genes encoded by the organisms. The set of genomic sequences can include gene sequences from about or at least about 1, 2, 3, 4, 5, 10, 25, 50, 75, 100, 250, 500, 1000, 1100, 1200, 1300, 1400, 1500, 2000, 5000, or 10000 species. The gene sequences can represent a set of 1%, 5%, 10%, 20%, 30%, 40%, 50%, 60%, 70%, 80%, 90%, 99%, or 100% of all genes encoded by the organisms. The set of genomic sequences can include genomic sequences from a set or subset of known strains of a species of microorganism. The gene sequences may contain introns and/or exons.

[0049] By “pan-transcriptomic” or “pan-transcriptome” is meant a set of sequences corresponding to mRNA transcribed from a pan-genome. The sequences corresponding to mRNA can be DNA sequences (e.g., cDNA) or RNA sequences. The sequences corresponding to mRNA can be sequences of mRNA transcripts transcribed from a set of genomic sequences from a pan-genome.

[0050] By “complex biological sample” is meant a biological sample containing polynucleotides derived from two or more organisms. In embodiments, a complex biological sample contains polynucleotides derived from a first organism (e.g., microorganism, such as a prokaryote, eukaryote), and polynucleotides derived from a second organism (e.g., a host, a subject, a tumor sample, a biopsy, a organism disposed in an environmental sample, and the like) with which the first organism is associated. A non-limiting example of a complex biological sample is a microbiome, optionally associated with a host organism (e.g., disposed within or on a subject). A further non-limiting example of a complex biological sample is a sample comprising a microbe (e.g., a fungus or a prokaryotic organism) and cells from a second organism (e.g., an animal, a mammal, a human, and the like). In embodiments, a complex biological sample contains polynucleotides derived from about or at least about 2, 3, 4, 5, 6, 7, 8, 9, 10, 11, 12, 13, 14, 15, 25, 50, 100, 200, 300, 400, 500, 1000, 2,000, 3,000, 4,000, 5,000, 6,000, 7,000, 8,000, 9,000, or 10,000 organisms. In embodiments, a complex biological sample contains polynucleotides derived from no more than about 2, 3, 4, 5, 6, 7, 8, 9, 10, 11, 12, 13, 14, 15, 25, 50, 100, 200, 300, 400, 500, 1000, 2,000, 3,000, 4,000, 5,000, 6,000, 7,000, 8,000, 9,000, or 10,000 organisms. A further non-limiting example of a complex biological sample is an artificial or natural microbial community comprising two or more microbes, and/or an artificial or natural association or organisms (e.g., in/on an organoid or in/on a plant). In some embodiments, the complex biological sample is a soil sample, water sample, or other environmental sample.

[0051] By “microbiome” is meant the microbial community associated with a sample. The microbiome can be complex, where “complex” can mean that the microbiome contains more than one species of organism. The microbiome can contain, for example, prokaryotes (e.g., bacteria, archaea), and/or eukaryotes (e.g., protists, fungi, yeast).

[0052] By “orthogroup cluster” is meant a set of genomic sequences predicted to be evolutionarily derived from a common ancestor. Orthogroup clusters can be determined based upon sequence data using an algorithm, a non-limiting example of which is SynerClust (Georgescu, Christophe H., Abigail L. Manson, Alexander D. Griggs, Christopher A. Desjardins, Alejandro Pironti, Ilan Wapinski, Thomas Abeel, Brian J. Haas, and Ashlee M. Earl. 2018. “SynerClust: A Highly Scalable, Synteny-Aware Orthologue Clustering Tool.” Microbial Genomics. doi.org/10.1099/mgen.0.000231). An ortholog cluster can include a set of genes descended from a single gene from a common ancestor of a set of species of interest.

[0053] The term “species” has its conventional meaning. In embodiments, a “species” of an organism share about or at least about 60%, 65%, 70%, 75%, 80%, 90%, 95%, 97%, or 99% nucleotide sequence identity across a set of genes encoded by the organisms, where the set of genes can include all or at least about 50%, 60%, 70%, 80%, 90%, 95%, or 99% of all genes encoded by each organism. In embodiments, a “species” of an organism share about or at least about 60%, 65%, 70%, 75%, 80%, 90%, 95%, 97%, or 99% nucleotide sequence identity for a specified gene sequence or a fragment thereof. The specified gene sequence can be a 16S sequence. In embodiments, a species includes those organisms encoding the specified gene sequence (e.g., the 16S gene sequence) where each specified sequence encoded by an organism within the species shares at least 97% nucleotide sequence identity. In embodiments, species of an organism share an average nucleotide identity (ANI) of about or at least about 90%, 95%, 96%, 97%, 98%, 99%, or higher. ANI can be determined using various methods, including, as non-limiting examples, those described in Jain, et al. “High throughput ANI analysis of 90K prokaryotic genomes reveals clear species boundaries” Nature Communications, vol. 9, article no. 5114 (2018), the entire disclosure of which is incorporated herein by reference in its entirety for all purposes.

[0054] By “strains of an organism” or “strains of a species” is meant an organism belonging to a species and that is phenotypically or genetically distinguishable from other members of the species. A strain may be distinguishable from other members of a species based upon an altered genomic sequence and/or based upon the presence or absence of a genomic sequence. A strain may be distinguishable from other members of a species based upon sequences encoded by the organism, where the sequences may be contained within a plasmid or other gene transfer vector.

[0055] By “capture molecule” is meant any polypeptide, polynucleotide, or fragment or analog thereof capable of specifically binding an analyte of interest. In some embodiments, the capture molecule is coupled to a solid support.

[0056] By “agent” is meant any chemical compound or functional group, antibody, nucleic acid molecule, or polypeptide, or fragments thereof.

[0057] By “alteration” is meant an increase or a decrease in the structure, expression levels, or activity of a gene or polypeptide as detected by standard art known methods such as those described herein. As used herein, an alteration includes a change of about or of at least about 1%, 2%, 3%, 4%, 5%, 10%, 15%, 20%, 25%, 30%, 35%, 40%, 45%, 50%, 55%, 60%, 65%, 70%, 75%, 80%, 85%, 90%, 95%, 99%, or 100%. In some embodiments, the alteration is in the relative abundance of a microbe in a complex biological sample (e.g., a microbiome).

[0058] By “analog” is meant a molecule that is not identical, but has analogous functional or structural features.

[0059] By “binding member” is meant an agent capable of being bound by a capture molecule. In some embodiments, a binding member is avidin or streptavidin. In other embodiments, an agent is an antibody or a polypeptide bound by the antibody.

[0060] “Microarray” means a collection of nucleic acid molecules or polypeptides from one or more organisms arranged on a solid support (for example, a chip, plate, or bead). These nucleic acid molecules or polypeptides may be arranged in a grid where the location of each nucleic acid molecule or polypeptide remains fixed to aid in identification of the individual nucleic acid molecules or polypeptides. A microarray may include, for example, nucleic acid molecules representing all, or a subset, of the open reading frames of an organism, or of the polypeptides that those open reading frames encode. In one embodiment, the nucleic acid molecules of the array are defined as having a common region of the genome having limited homology to other regions of an organism's genome. A microarray may also be enriched for a particular type of gene. In some embodiments the microarray is a biochip comprising DNA or RNA, in which case the biochip may be referred to as a DNA microarray chip or an RNA microarray chip, respectively.

[0061] By “NanoString assay” is meant a method involving contacting a sample containing nucleotide molecules with a plurality of labeled target-specific nucleic acid probes for the detection and/or quantification of targeted nucleotide sequences in the sample. In embodiments, a NanoString assay is carried out according to methods described in International Patent Application Publication Nos. WO2003003810. In embodiments, the NanoString assay is used as a non-solid based approach alternative to a microarray-based method.

[0062] In this disclosure, “comprises,” “comprising,” “containing” and “having” and the like can have the meaning ascribed to them in U.S. Patent law and can mean “includes,” “including,” and the like; “consisting essentially of” or “consists essentially” likewise has the meaning ascribed in U.S. Patent law and the term is open-ended, allowing for the presence of more than that which is recited so long as basic or novel characteristics of that which is recited is not changed by the presence of more than that which is recited, but excludes prior art embodiments. Any embodiments specified as “comprising” a particular component(s) or element(s) are also contemplated as “consisting of” or “consisting essentially of” the particular component(s) or element(s) in some embodiments.

[0063] By “consist essentially” it is meant that the ingredients include only the listed components along with the normal impurities present in commercial materials and with any other additives present at levels which do not affect the operation of the disclosure, for instance at levels less than 5% by weight or less than 1% or even 0.5% by weight.

[0064] By “cover” is meant a region of a target sequence to which a probe is predicted to bind. The probe covers a target sequence over that portion of the target sequence with which the probe shares about or at least about 80%, 90%, 95%, 99%, or 100% nucleotide sequence identity over the full length of the capture probe or over a contiguous portion of the capture probe about or at least about 10, 20, 30, 40, 50, 60, 70, 80, 90, 100, 125, 150, 175, or 200 base pairs in length or the full length of the capture probe.

[0065] By “cover extension” is meant an artificial extension of a region of a target sequence considered as being covered by a probe. The cover extension can be an extension at the 3′ and/or 5′ end of the covered region. The cover extension can be about or at least about 1, 2, 3, 4, 5, 6, 7, 8, 9, 10, 11, 12, 13, 14, 15, 16, 17, 18, 19, 20, 21, 22, 23, 24, 25, 26, 27, 28, 29, 30, 40, 50, 55, 60, 75, 80, 85, 90, 95, or 100 base pairs in length. In embodiments, the cover extension is no more than about 1, 2, 3, 4, 5, 6, 7, 8, 9, 10, 11, 12, 13, 14, 15, 16, 17, 18, 19, 20, 21, 22, 23, 24, 25, 26, 27, 28, 29, 30, 40, 50, 55, 60, 75, 80, 85, 90, 95, or 100 base pairs in length.

[0066] “Detect” refers to identifying the presence, absence or amount of the analyte to be detected. The analyte can be a genomic sequence and/or a sequence corresponding to an mRNA molecule or gene sequence.

[0067] By “detectable label” is meant a composition that when linked to a molecule of interest renders the latter detectable, via spectroscopic, photochemical, biochemical, immunochemical, or chemical means. For example, useful labels include radioactive isotopes, magnetic beads, metallic beads, colloidal particles, fluorescent dyes, electron-dense reagents, enzymes (for example, as commonly used in an ELISA), biotin, digoxigenin, or haptens.

[0068] By “disease” is meant any condition or disorder that damages or interferes with the normal function of a cell, tissue, or organ. Examples of diseases include urinary tract infections, Crohn's disease, traveler's diarrhea, E. coli 0157: H7 infection, neonatal meningitis (NMEC), sepsis, a lung infection, a periodontal disease, bacterial vaginosis, H. pylori gastritis, irritable bowel disease (IBD), mastitis, and cirrhosis. In some instances, the disease is associated with a pathogen (e.g., a pathogenic microbe). In some embodiments, the disease is a cancer. Some prokaryotes are tumorigenic and, therefore, are associated with development of a tumor or cancer in a subject. The disease can be chronic or recurring. A chronic infection can be an infection that recurs about or at least about 3, 4, 5, 6, 7, 8, 9, 10, 11, 12, 13, 14, or 15 times in a subject and/or that persists and/or recurs over a period of about or at least about 5 days, 6 days, 7 days, 1 month, 2 months, 3 months, 4 months, 5 months, 6 months, 7 months, 8 months, 9 months, 10 months, 11 months, or 12 months.

[0069] By “fragment” is meant a portion of a polypeptide or nucleic acid molecule. This portion contains, preferably, at least 10%, 20%, 30%, 40%, 50%, 60%, 70%, 80%, or 90% of the entire length of the reference nucleic acid molecule or polypeptide. A fragment may contain 10, 20, 30, 40, 50, 60, 70, 80, 90, or 100, 200, 300, 400, 500, 600, 700, 800, 900, or 1000 nucleotides or amino acids.

[0070] By “homologous” is meant sequences sharing sequence identity. In embodiments, homologous gene sequences share about or at least about 20%, 30%, 40%, 50%, 60%, 70%, 80%, 90%, 95%, or 99% nucleotide sequence identity.

[0071] “Hybridization” means hydrogen bonding, which may be Watson-Crick, Hoogsteen or reversed Hoogsteen hydrogen bonding, between complementary nucleobases. For example, adenine and thymine are complementary nucleobases that pair through the formation of hydrogen bonds.

[0072] The terms “isolated,” “purified,” or “biologically pure” refer to material that is free to varying degrees from components which normally accompany it as found in its native state. “Isolate” denotes a degree of separation from original source or surroundings. “Purify” denotes a degree of separation that is higher than isolation. A “purified” or “biologically pure” nucleic acid molecule is sufficiently free of other materials such that any impurities do not materially affect the biological properties of the nucleic acid molecule or cause other adverse consequences (e.g., interfere with a PCR reaction). That is, a nucleic acid molecule of this invention is purified if it is substantially free of cellular material, viral material, or other impurities. Purity and homogeneity are typically determined using analytical chemistry techniques, for example, polyacrylamide gel electrophoresis or high performance liquid chromatography.

[0073] By “molecular identifier” or “unique molecular identifier” is meant an agent coupled to a molecule that can be used to identify the molecule.

[0074] As used herein, “obtaining” as in “obtaining an agent” includes synthesizing, purchasing, or otherwise acquiring the agent. In embodiments, the agent is an oligonucleotide or a set of oligonucleotides (e.g., a probe set).

[0075] By “reference” is meant a standard or control condition. The reference can be a reference genome or a set of reference genomes. The reference can include a full genome sequence or set of genome sequences, or a set of genes encoded by a genome sequence or set of genome sequences.

[0076] A “reference sequence” is a defined sequence used as a basis for sequence comparison. A reference sequence may be a subset of or the entirety of a specified sequence; for example, a segment of a full-length cDNA or gene sequence, or the complete cDNA or gene sequence.

[0077] Nucleic acid molecules useful in the methods of the invention include any nucleic acid molecule that encodes a polypeptide of the invention or a fragment thereof. Such nucleic acid molecules need not be 100% identical with an endogenous nucleic acid sequence, but will typically exhibit substantial identity. Polynucleotides having “substantial identity” to an endogenous sequence are typically capable of hybridizing with at least one strand of a double-stranded nucleic acid molecule. Nucleic acid molecules useful in the methods of the invention include any nucleic acid molecule that encodes a polypeptide of the invention or a fragment thereof. Such nucleic acid molecules need not be 100% identical with an endogenous nucleic acid sequence, but will typically exhibit substantial identity. Polynucleotides having “substantial identity” to an endogenous sequence are typically capable of hybridizing with at least one strand of a double-stranded nucleic acid molecule. By “hybridize” is meant pair to form a double-stranded molecule between complementary polynucleotide sequences (e.g., a gene described herein), or portions thereof, under various conditions of stringency. (See, e.g., Wahl, G. M. and S. L. Berger (1987) Methods Enzymol. 152:399; Kimmel, A. R. (1987) Methods Enzymol. 152:507).

[0078] For example, stringent salt concentration will ordinarily be less than about 750 mM NaCl and 75 mM trisodium citrate, preferably less than about 500 mM NaCl and 50 mM trisodium citrate, and more preferably less than about 250 mM NaCl and 25 mM trisodium citrate. Low stringency hybridization can be obtained in the absence of organic solvent, e.g., formamide, while high stringency hybridization can be obtained in the presence of at least about 35% formamide, and more preferably at least about 50% formamide. Stringent temperature conditions will ordinarily include temperatures of at least about 30° C., more preferably of at least about 37° C., and most preferably of at least about 42° C. Varying additional parameters, such as hybridization time, the concentration of detergent, e.g., sodium dodecyl sulfate (SDS), and the inclusion or exclusion of carrier DNA, are well known to those skilled in the art. Various levels of stringency are accomplished by combining these various conditions as needed. In a preferred: embodiment, hybridization will occur at 30° C. in 750 mM NaCl, 75 mM trisodium citrate, and 1% SDS. In a more preferred embodiment, hybridization will occur at 37° C. in 500 mM NaCl, 50 mM trisodium citrate, 1% SDS, 35% formamide, and 100 μg/ml denatured salmon sperm DNA (ssDNA). In a most preferred embodiment, hybridization will occur at 42° C. in 250 mM NaCl, 25 mM trisodium citrate, 1% SDS, 50% formamide, and 200 μg/ml ssDNA. Useful variations on these conditions will be readily apparent to those skilled in the art.

[0079] For most applications, washing steps that follow hybridization will also vary in stringency. Wash stringency conditions can be defined by salt concentration and by temperature. As above, wash stringency can be increased by decreasing salt concentration or by increasing temperature. For example, stringent salt concentration for the wash steps will preferably be less than about 30 mM NaCl and 3 mM trisodium citrate, and most preferably less than about 15 mM NaCl and 1.5 mM trisodium citrate. Stringent temperature conditions for the wash steps will ordinarily include a temperature of at least about 25° C., more preferably of at least about 42° C., and even more preferably of at least about 68° C. In a preferred embodiment, wash steps will occur at 25° C. in 30 mM NaCl, 3 mM trisodium citrate, and 0.1% SDS. In a more preferred embodiment, wash steps will occur at 42 C in 15 mM NaCl, 1.5 mM trisodium citrate, and 0.1% SDS. In a more preferred embodiment, wash steps will occur at 68° C. in 15 mM NaCl, 1.5 mM trisodium citrate, and 0.1% SDS. Additional variations on these conditions will be readily apparent to those skilled in the art. Hybridization techniques are well known to those skilled in the art and are described, for example, in Benton and Davis (Science 196:180, 1977); Grunstein and Hogness (Proc. Natl. Acad. Sci., USA 72:3961, 1975); Ausubel et al. (Current Protocols in Molecular Biology, Wiley Interscience, New York, 2001); Berger and Kimmel (Guide to Molecular Cloning Techniques, 1987, Academic Press, New York); and Sambrook et al., Molecular Cloning: A Laboratory Manual, Cold Spring Harbor Laboratory Press, New York.

[0080] By “substantially identical” is meant a polypeptide or nucleic acid molecule exhibiting at least 50% identity to a reference amino acid sequence (for example, any one of the amino acid sequences described herein) or nucleic acid sequence (for example, any one of the nucleic acid sequences described herein). Preferably, such a sequence is at least 60%, more preferably 80% or 85%, and more preferably 90%, 95% or even 99% identical at the amino acid level or nucleic acid to the sequence used for comparison.

[0081] Sequence identity is typically measured using sequence analysis software (for example, Sequence Analysis Software Package of the Genetics Computer Group, University of Wisconsin Biotechnology Center, 1710 University Avenue, Madison, Wis. 53705, BLAST, BESTFIT, GAP, or PILEUP/PRETTYBOX programs). Such software matches identical or similar sequences by assigning degrees of homology to various substitutions, deletions, and/or other modifications. Conservative substitutions typically include substitutions within the following groups: glycine, alanine; valine, isoleucine, leucine; aspartic acid, glutamic acid, asparagine, glutamine; serine, threonine; lysine, arginine; and phenylalanine, tyrosine. In an exemplary approach to determining the degree of identity, a BLAST program may be used, with a probability score between e⁻³ and e⁻¹⁰⁰ indicating a closely related sequence.

[0082] By “subject” is meant an animal. The animal can be a mammal. The mammal can be a human or non-human mammal, such as a bovine, equine, canine, ovine, rodent, or feline.

[0083] Ranges provided herein are understood to be shorthand for all of the values within the range. For example, a range of 1 to 50 is understood to include any number, combination of numbers, or sub-range from the group consisting of 1, 2, 3, 4, 5, 6, 7, 8, 9, 10, 11, 12, 13, 14, 15, 16, 17, 18, 19, 20, 21, 22, 23, 24, 25, 26, 27, 28, 29, 30, 31, 32, 33, 34, 35, 36, 37, 38, 39, 40, 41, 42, 43, 44, 45, 46, 47, 48, 49, or 50.

[0084] Unless specifically stated or obvious from context, as used herein, the term “or” is understood to be inclusive. Unless specifically stated or obvious from context, as used herein, the terms “a”, “an”, and “the” are understood to be singular or plural.

[0085] Unless specifically stated or obvious from context, as used herein, the term “about” is understood as within a range of normal tolerance in the art, for example within 2 standard deviations of the mean. About can be understood as within 10%, 9%, 8%, 7%, 6%, 5%, 4%, 3%, 2%, 1%, 0.5%, 0.1%, 0.05%, or 0.01% of the stated value. Unless otherwise clear from context, all numerical values provided herein are modified by the term about.

[0086] The recitation of a listing of chemical groups in any definition of a variable herein includes definitions of that variable as any single group or combination of listed groups. The recitation of an embodiment for a variable or aspect herein includes that embodiment as any single embodiment or in combination with any other embodiments or portions thereof.

[0087] Any compositions or methods provided herein can be combined with one or more of any of the other compositions and methods provided herein.

### BRIEF DESCRIPTION OF THE DRAWINGS

[0088] FIGS. 1A-1D provide schematic illustrations of a hybrid capture process used for enriching nucleic acids from minor members of a complex community. In brief, the process involved designing a probe set to cover genomes of interest (FIG. 1A), mixing the probe set with a meta'omic (e.g., metatranscriptomic or metagenomic) library to allow for hybridization to complementary sequences (FIG. 1B), binding probes (and hybridized sequences) to capture beads (FIG. 1C), and eluting bound library molecules off of the beads for downstream processing (e.g., PCR amplification and/or sequencing) (FIG. 1D). FIG. 1A is a schematic showing construct sequencing libraries containing a small number of reads from a low-abundance target organism (dark shading) in a metagenomic background (light shading). FIG. 1B shows short oligonucleotide probes representing a bait set attached to biotin (circles) hybridized with complementary library molecules. FIG. 1C shows a sequencing library, biotinylated probes, and capture beads incubated overnight. FIG. 1D shows bound library molecules eluted off the beads. The eluted molecules were further amplified by PCR (embodiments without amplification are contemplated), and then sequenced. This process resulted in a final sequencing library highly enriched for species of interest, ready for sequencing. In FIGS. 1A-1D, biotin is represented by a circle and streptavidin is represented as an open semi-circle.

[0089] FIG. 2 provides a flow chart showing a process used for E. coli pan-genome probe design. The process involved steps a) to g). In step a), all 295 available RefSeq complete E. coli and Shigella genomes and 3,141 additional genomes from the NCBI Pathogens database were downloaded from June to August 2017. In step b), genomes were clustered using a k-mer based algorithm with a threshold of a 95% Jaccard similarity to select a set of non-redundant references for downstream analysis. In step c), these genomes were uniformly annotated with the Broad Institute's prokaryotic genome annotation pipeline (Schreiber, Henry L., 4th, Matt S. Conover, Wen-Chi Chou, Michael E. Hibbing, Abigail L. Manson, Karen W. Dodson, Thomas J. Hannan, et al. 2017. “Bacterial Virulence Phenotypes of Escherichia Coli and Host Susceptibility Determine Risk for Urinary Tract Infections.” Science Translational Medicine 9 (382). doi.org/10.1126/scitranslmed.aaf1283) and then orthogroups were constructed with SynerClust (Georgescu, Christophe H., Abigail L. Manson, Alexander D. Griggs, Christopher A. Desjardins, Alejandro Pironti, Ilan Wapinski, Thomas Abeel, Brian J. Haas, and Ashlee M. Earl. 2018. “SynerClust: A Highly Scalable, Synteny-Aware Orthologue Clustering Tool.” Microbial Genomics. doi.org/10.1099/mgen.0.000231). In step d), orthogroups were filtered to remove rare orthogroups, resulting in 64,580 orthogroups comprising 8, 168,837 genes. In step e), the genes from each remaining orthogroup were then clustered at >80% nucleotide sequence identity with UCLUST (Edgar, Robert C. 2010. “Search and Clustering Orders of Magnitude Faster than BLAST.” Bioinformatics 26 (19): 2460-61) to reduce computational runtime. In step f), These UCLUST clusters were each used as input into CATCH (Metsky, Hayden C., Viral Hemorrhagic Fever Consortium, Katherine J. Siddle, Adrianne Gladden-Young, James Qu, David K. Yang, Patrick Brehio, et al. 2019. “Capturing Sequence Diversity in Metagenomes with Comprehensive and Scalable Probe Design.” Nature Biotechnology. doi.org/10.1038/s41587-018-0006-x) to generate probe sequences. In step g), probes were filtered to remove universal probes, as well as probes that target genomes of major members of the human gut microbiome from the Bacteroidetes and Firmicutes phyla, retaining a total of 892,415 probes for synthesis, which are provided in the Sequence Listing as SEQ ID NOs: 1 to 892415.

[0090] FIGS. 3A-3D provide stacked bar graphs and plots demonstrating that hybrid capture dramatically enriched E. coli DNA without bias from a mock community of known composition, and provided greatly increased sequence information for each of the four component E. coli strains. FIG. 3A is a stacked bar graph presenting results from hybrid capture (HC) performed on sequencing libraries from a mock community consisting of a total of 1% DNA from four known strains of E. coli in a background of 99% human DNA. The four strains represented different phylogenetic groups in an unequal mixture (80:15:4.9:0.1). The total relative abundances of E. coli sequence, as well as the relative proportions of each strain (four colors) are shown. FIG. 3B is a plot presenting depth of coverage pre- and post-HC for each of the four indicated strains. The probe set successfully enriched the mock community of the four diverse E. coli strains. The relative abundance of the E. coli strains was increased by about 40-fold, on average, and there was no change in strain ratios. Therefore, depth of coverage of diverse E. coli strains was enriched using hybrid capture in a non-biased manner. FIG. 3C provides a collection of plots presenting genome coverage pre- and post-HC for each of the four strains. Thin lines represent pre-HC data, while bold lines represent post-HC data. The dashed vertical line represents 5× coverage, a minimum cutoff for depth. Over 70% of all strains genomes was sequenced at a coverage of 5× or greater. FIG. 3D provides a set of four plots showing average depth of coverage for positions along the reference genome, in relation to the closest predicted probe binding site(s), for each of the four indicated strains. “2+ probes” indicates regions where two or more probes are predicted to bind, while “1+ probes” indicates regions in which at least one probe is predicted to bind. Error bars denote standard deviation. Numbers above error bars indicate the number of positions across the genome considered for each genome for each X axis category. Thin lines represent pre-HC data, while bold lines represent post-HC data.

[0091] FIGS. 4A and 4B present a plot and a collection of stacked bar graphs demonstrating that hybrid capture (HC) enriched E. coli from human stool samples and revealed previously missed strains. FIG. 4A is a plot showing pre- and post-HC relative abundance of detected E. coli strains from clinical samples. Strain rank indicates most (1) to least (3) abundant strains in the sample. Dots to the left the dashed vertical line indicate novel strains found exclusively in post-HC data. n.d.=not detected. FIG. 4B provides a set of stacked bar graphs showing detected strains of E. coli in pre- and post-HC samples using StrainGE (Dijk, Lucas R. van, Bruce J. Walker, Timothy J. Straub, Colin J. Worby, Alexandra Grote, Henry L. Schreiber, Christine Anyansi, et al. 2021. “StrainGE: A Toolkit to Track and Characterize Low-Abundance Strains in Complex Microbial Communities.” Cold Spring Harbor Laboratory. doi.org/10.1101/2021.02.14.431013) from clinical samples. Samples marked with a black asterisk show instances in which HC detects additional strain(s) in the given sample. The three samples marked with † indicate the samples used for a single-strain metatranscriptomic analysis.

[0092] FIGS. 5A and 5B present a collection of plots showing that hybrid capture (HC) enriched E. coli transcripts from clinical samples. Pre-HC vs. post-HC expression levels are presented in counts per million (CPM) per detectable transcript (minimum 10 CPM). Each point represents one or more unique transcripts, where the shading represents different E. coli strains and the size represents the number of unique transcripts (i.e., genes) at that given expression value level. Points left of the vertical dashed line represent transcripts undetected pre-HC, while points below the dashed horizontal line represent transcripts undetected post-HC. Points below the diagonal line had higher normalized expression levels pre-HC, while points above the line had higher normalized expression levels post-HC. The number of unique transcripts in each quadrant are indicated. FIG. 5A provides a collection of plots presenting single-strain samples (strains indicated above each respective plot) where reads were aligned (minimum MQ of 5) to the detected strain's reference. FIG. 5B presents a set of plots showing all samples where reads were aligned (minimum MQ of 5) to each participant's concatenated strains' genomes. Due to mapping quality filtering, reads that aligned equally well to all reference genomes within the same participant, and therefore the core E. coli genome, were excluded from analysis.

[0093] FIG. 6 presents a schematic providing details relating to a probe design procedure.

[0094] FIG. 7 presents a set of histograms demonstrating that very few regions of each strain's reference genome were distant from predicted probe binding sites. X axis is the distance between predicted probe binding sites (in kilobases). Y axis is the number of regions at a given distance. Y axis has been truncated to zoom in on the fewer larger distances, as there were thousands of instances where probes were predicted to bind within 10 bases of each other.

[0095] FIGS. 8A-8D each provide box-and-whisker plots showing stool sample library sequence quality pre-vs. post-hybrid capture (HC). FIG. 8A presents box-and-whisker plots showing percent of reads for each stool sample with a given mean sequence quality (PHRED score) for pre- and post-HC data. FIG. 8B presents box-and-whisker plots showing base quality (PHRED score) distributions along reads for pre- and post-HC data. FIG. 8C presents box-and-whisker plots showing percent of adapter content along reads for pre- and post-HC data. Adapter content was directly related to the fragment insert size. Smaller insert sizes lead to more adapter content in the read. FIG. 8D presents box-and-whisker plots showing percent of sequences at varying duplication levels (1=unique sequence) for pre- and post-HC data.

[0096] FIG. 9 is a plot showing post-HC data had high depth and breadth of coverage. Depth of coverage (X) vs. breadth of coverage (%) for all human stool samples, based on StrainGST estimates. Shading indicates the most (darkest shade) to least (lightest shade) abundant strain. In the figure, the most abundant strain ranks cluster in the upper-right portion of the plot, as indicated by the arrow.

[0097] FIGS. 10A and 10B present box-and-whisker plots and a principal coordinate analysis plot demonstrating that non-E. coli community profile was unaltered by HC. FIG. 10A provides box-and-whisker plots showing Bray-Curtis Dissimilarity distributions for various pairwise sample comparisons, comparing the taxonomic profile at the species level for non-E. coli (and Shigella) species. “Different individual” comparisons compare two samples from different study participants. “Same individual” comparisons compare two samples from the same study participant, but different time points. “Same sample” comparisons compare pre-HC to post-HC of the same sample. “Pre-HC” alone values are comparisons of two samples, both pre-HC. “Post-HC alone” values are comparisons of two samples, both post-HC. “Pre-vs post-HC” values are comparisons where one sample was pre-HC and the other was post-HC. FIG. 10B is a plot presenting a Principal Coordinate Analysis (PCoA) using the Bray-Curtis distances. The first two principal coordinates are shown. Each point connected by a line represents a pair of samples, pre-HC (circle) and post-HC (triangle). Each shade and number represents a study participant (subject).

[0098] FIG. 11 provides a schematic illustrating an approach to the design of pan-genome probes for the capture of full E. coli pan-genome diversity. The probes were designed based on 3,436 E. coli and Shigella reference genomes spanning pan-genome diversity.

[0099] FIGS. 12A-12C provide schematics showing the fim operon promoter. FIG. 12A provides a schematic indicating that the fim operon promoter (fimS) is invertible, and that the inversion is mediated by site-specific recombinases encoded upstream of the operon. FIG. 12B provides a schematic showing how sequence alignments can be used to determine the orientation (e.g., on or off) of fimS. FIG. 12C provides a schematic showing fimS phase variation between the on and off configurations as well as the positioning of informative and non-informative sequence alignments (see also FIG. 12B).

[0100] FIG. 13 provides a plot showing a correlation between read and probe coverage of the fimS region. Despite gen-centric design, probes still enriched the boundary region of fimS.

[0101] FIG. 14 provides a plot showing that fimS detection was dependent on sample E. coli content.

[0102] FIG. 15 provides box-and-whisker plots showing that hybrid capture provided 10× enrichment of both inversion phases (i.e., on and off) of the fimS promoter. Hybrid capture samples were compared with pre-hybrid capture samples collected at the same time point and sequenced to the same depth.

[0103] FIG. 16 provides a plot showing the % fimS “on” status (y-axis) for samples from participants (x-axis) in the Urinary Tract Infection Microbiome (UMB) Project.

[0104] FIG. 17 provides a collection of box-and-whisker plots showing the number of reads aligned to the indicated genes (x-axis: fimB, fimE, fimA, fimI, fimC, fimD, fimF, fimG, fimH) for sequenced RNA hybrid-capture samples prepared for stool samples from participants in the UMB Project.

[0105] FIG. 18 provides a plot showing a comparison between the predicted (model) and observed correlation between operon expression and fimS being in the on orientation. “CI” indicates “confidence interval.” The y-axis represents the total expression of the protein-coding region of the fim operon (fimA-fimH, which includes fimI).

[0106] FIG. 19 provides a schematic overview of the experimental design for the Urinary Tract Infection Microbiome (UMB) Project. The control group included 16 healthy women having only had 1 or less urinary tract infections previously. The recurrent urinary tract infection (rUTI) group included 15 women having had at least 3 urinary tract infections over the year prior to participating in the UMB Project.

[0107] FIG. 20 provides stacked bar graphs showing the relative abundance for RNA (top) and DNA (bottom) of fim reads per strain per sample from multi-strain samples. In FIG. 20, the stars indicate samples where the minor strain expressed fim at a greater level than the major strain.

### DETAILED DESCRIPTION OF THE INVENTION

[0108] The invention features compositions and methods useful for characterizing complex biological samples (e.g., microbiomes) comprising a variety of organisms and/or strains of organisms.

[0109] The present invention is based, at least in part, upon the discovery of a hybrid capture strategy involving the use of a custom probe set that specifically and sensitively characterizes diverse E. coli strains in complex metagenomic samples. As described in the examples, a computational approach was taken to design probes for characterizing E. coli present in a complex biological sample. As described in detail below, this approach identified a set of approximately 900,000 oligonucleotide probes that hybridize to the E. coli pan-genome, represented by over 1,700 E. coli reference genomes, encoding more than 8 million genes and encompassing the vast majority of known diversity for the species. This probe set was used to successfully enrich E. coli from a mock metagenomic community consisting of four diverse, known strains of E. coli in a background of 99% human reads, as well as in metagenomic and metatranscriptomic sequencing libraries derived from human stool samples. Hybrid capture was unbiased and enriched E. coli sequence from DNA libraries by an average of approximately 40-fold, and from RNA libraries by approximately 23-fold. This enrichment allowed for observation of multiple E. coli strains within a sample with a high depth and breadth of coverage, detection of additional low abundance E. coli strains, and observation of over one thousand unique E. coli transcripts that could not be detected before hybrid capture. Thus, in embodiments, the methods and probes of the present invention are used to investigate native in vivo biology of diverse E. coli or other microbial species of interest in the gut and other environments, where E. coli or the other microbial species of interest is a minor component of the microbial community using substantially unbiased, culture-free metagenomic and/or metatranscriptomic shotgun sequencing. The methods provided herein can also be generally applied to other highly diverse, but low abundance bacteria; for example, Enterococcus spp. (Enterococcus faecalis, Enterococcus faecium), Ruminococcus spp. (e.g., R. gnavus), probiotic organisms such as Bifidobacterium spp. or Lactobacillus spp., Staphylococcus spp., Akkermansia spp., and Faecalibacterium spp.

### Hybrid capture (HC) probes

### Design

[0110] The disclosure provides methods to design probe sets using a pan-genome approach to characterize complex biological samples comprising highly diverse bacterial species, or a limited number (e.g., 1, 2, 3, 4, 5, or more) of bacterial species associated with a sample (e.g., a sample derived from a host organism). Using a set of reference genes derived from a known pan-genome, probes are designed to selectively and sensitively enrich for genes without strain or reference bias. In embodiments, the reference genes are related by function and/or sequence. Advantageously, such probes are synthesized and conjugated with a capture molecule, such as biotin, allowing for the low-cost, at-scale enrichment of sequences from complex biological samples (e.g., complex microbiome metagenomes). Various methods described in U.S. Patent Application Publications 2019/0330706, 2019/019766, and/or 2018/0340215, which are incorporated herein in their entirety, are suitable for use in the methods of the present invention.

[0111] The present invention features methods for generating probes for use in characterizing a complex biological sample (e.g., a microbiome). In some embodiments, the design method involves (a) constructing candidate probes targeting clusters of gene sequences, where the candidate probes collectively have a hybridization pattern for the clusters of gene sequences; (b) determining an individual hybridization pattern for each candidate probe within each gene cluster to provide a collection of individual hybridization patterns; and (c) subjecting the individual hybridization patterns to a set cover solving process to reduce the number of candidate probes to provide a set of selected probes targeting genes within each gene cluster. A set cover solving process is a process by which a minimum number of probes are selected to target sequences corresponding to a set of target genes. A sequence region considered as targeted by a probe can be extended at the 3′ and/or 5′ end by using a cover extension.

[0112] In some embodiments, the gene sequences are derived from a plurality of strains of an organism present in a complex biological sample (e.g., a microbiome). The organisms can be members of the same or of different species. The gene sequences can be derived from one or more organisms present in a complex biological sample (e.g., a microbiome). The gene sequences can be derived from a representative set of genera that are phylogenetically classified as belonging to a common family. The sequences can be derived from genomes of a set of organisms. The sequences can be derived from about or at least about 2, 3, 4, 5, 10, 15, 20, 25, 50, 100, 150, 200, 250, 500, 1000, 1100, 1200, 1300, 1400, 1500, 1600, 1700, 1800, 1900, 2000, 3000, 4000, 5000, 10000, 15000 or more genomes. The sequences can be derived from one or more of the 3,141 GenBank genomes and/or the 295 RefSeq genomes listed in the Examples.

[0113] Genes sequences within each cluster of gene sequences share a level of nucleotide sequence identity. The level of nucleotide sequence identity within the cluster can be about or at least about 15%, 20%, 25%, 30%, 35%, 40%, 45%, 50%, 55%, 60%, 65%, 70%, 75%, 80%, 85%, 90%, or 95%.

[0114] Probes useful in the methods described herein target at least about 5%, 10%, 15%, 20%, 25%, 50%, 75%, 80%, 85%, 90%, 99%, or 100% of all gene sequences contained within all or a sub-set of the clusters of gene sequences. The probes cover about or at least about 5%, 10%, 15%, 20%, 25%, 50%, 75%, 80%, 85%, 90%, 99%, or 100% of all gene sequences contained within all or a subset of the clusters of gene sequences.

[0115] The subset of clusters of gene sequences are selected in various embodiments to comprise sequences derived from genes associated with a function(s) of interest. Thus, a set of probes can be selected to target a set of genes related by sequence and/or function. The function of interest can be, as non-limiting examples, antibiotic resistance and/or pathogenicity. Therefore, the present invention provides for probe sets targeting a gene(s) across a pan-genome or pan-transcriptome associated with a function(s) of interest. Such probe sets can be designed for use in methods to target sequences from one or more organisms in a non-biased manner.

[0116] The set of gene sequences can contain or consist of sequences useful in identification of an organism of interest, including specific strains thereof. In embodiments, the sequences useful in identification of the organism of interest are sequence-tagged sites. A sequence tagged site is a short (e.g., 100 to 500, or 200 to 500 base pair) DNA or RNA sequence that has a single occurrence in the genome of an organism and whose location and base sequence are known.

[0117] Virtually any organism can be characterized using the methods described herein. In some embodiments, the organisms include pathogenic bacteria, including gram positive and gram negative bacteria. The pathogenic bacteria can be opportunistic pathogens. Exemplary pathogens include, but are not limited to, microbes selected from Aerobacter, Aeromonas, Acinetobacter, Actinomyces israelii, Agrobacterium, Bacillus, Bacillus anthracis, Bacteroides, Bartonella, Bordetella, Bortella, Borrelia (e.g., Borrelia burgdorferi), Brucella, Burkholderia, Calymmatobacterium, Campylobacter, Citrobacter, Clostridium (e.g., Clostridium perfringens, Clostridium tetani), Corynebacterium (e.g., Corynebacterium diphtheriae), Enterobacter (e.g., Enterobacter aerogenes), Enterococcus (e.g., Enterococcus faecalis, Enterococcus faecium), Erysipelothrix rhusiopathiae, Escherichia, Faecalibacterium, Francisella, Fusobacterium nucleatum, Gardnerella, Haemophilus (e.g., Haemophilus influenzae), Hafnia, Helicobacter (e.g., Helicobacter pylori), Klebsiella (e.g., Klebsiella pneumoniae), Legionella, Leptospira, Listeria (e.g., Listeria monocytogenes), Morganella, Moraxella, Mycobacterium (e.g., M. avium, M. gordonae, M. intracellulare, M. kansasii, M. tuberculosis), Neisseria (e.g., Neisseria gonorrhoeae, Neisseria meningitidis), Pasteurella (e.g., Pasturella multocida), Proteus, Providencia, Pseudomonas, Rickettsia, Salmonella, Serratia, Shigella, Staphylococcus (e.g., Staphylococcus aureus), Stentorophomonas, Streptococcus (e.g., Streptobacillus moniliformis, Streptococcus agalactiae, Streptococcus bovis, Streptococcus faecalis, Streptococcus pneumoniae, and Streptococcus pyogenes), Treponema (e.g., Treponema pallidum, Treponema pertenue), Xanthomonas, Vibrio, and Yersinia. Exemplary strains of E. coli include AIEC, DAEC, EAEC, EHEC, EIEC/Shigella, EPEC, ETEC, ExPEC, NMEC, SEPEC, ST131, or UPEC. In embodiments, the organisms include non-pathogenic bacteria. Non-limiting examples of non-pathogenic and/or beneficial bacteria include commensal bacterial, Bifidobacterium spp., Lactobacillus spp., Ruminococcus (e.g., Ruminococcus gnavus), and Akkermansia spp.

[0118] In embodiments, the organism makes up a small fraction of a complex biological sample. For example, the organism and/or the collection of organisms from which the gene sequences in each cluster are derived makes up less than about 0.5%, 1%, 2%, 3%, 4%, 5%, 6%, 7%, 8%, 9%, 10%, 15%, 20%, or 25% of the complex biological sample (e.g. of a microbial community) by relative abundance. Methods for measuring relative abundance of a microbial species within a complex biological sample (e.g., a microbiome) are known in the art. In some embodiments, polynucleotides derived from the organism and/or the collection of organisms from which the community, where the polynucleotides can be DNA, RNA, or a mix thereof, and wherein the percent can be a mass percent or a molar percent.

[0119] The methods for generating probes provided herein comprise a set cover solution. The set cover solution identifies the minimal number of probes needed to cover a cluster of gene sequences or a set of clusters of gene sequences.

[0120] Methods disclosed herein take a pan-transcriptomic or pan-genomic sequence approach to providing a probe set that identifies and facilitates the sequencing of all sequences in a large and/or variable target sequence set. For example, the methods disclosed herein are used to characterize all species of an organism, or multiple different organisms in a microbiome.

[0121] Methods disclosed herein treat each element of the “universe” in a set cover problem as being a nucleotide of a target sequence, and each element is considered “covered” as long as a probe binds to some segment of a target gene sequence that includes the element. Various methods disclosed herein first determine a hybridization pattern—i.e. where a given probe binds to a target sequence or target sequences—and then determines from those hybridization patterns the minimum number of probes needed to cover a cluster(s) of gene sequences to a degree sufficient to enable both enrichment from a sample and sequencing of any and all target gene sequences. These hybridization patterns are determined by defining certain parameters that minimize a loss function.

[0122] Probes described herein (e.g., hybrid capture probes, a candidate probe or a selected probe) comprise, for example, deoxyribonucleic acid (DNA), ribonucleic acid (RNA), peptide nucleic acid (PNA) and/or other non-naturally occurring nucleic acids.

[0123] Methods useful in the invention are described, for example, in Gnirke, et al., Nature biotechnology 27:182-189, 2009, US Patent Publication Nos. 2010/0029498, 2013/0230857, 2014/0200163, 2014/0228223, and 2015/0126377 and International Patent Publication No. WO 2009/099602).

[0124] Probes disclosed herein have about or at least about 50%, 55%, 60%, 65%, 70%, 75%, 80%, 85%, 90%, 95%, 99%, or 100% complementarity along a length thereof to gene sequences contained within the gene clusters. The length along which sequence identity is measured is at least about 10, 15, 20, 25, 30, 35, 40, 45, 50, 55, 60, 65, 70, 75, 80, 85, 80, 95, 100, 150, 200 nucleotides and/or the full length of a probe.

[0125] In embodiments, the methods of the present invention involve selecting probes to exclude from a set of probes. In embodiments, probes are excluded from the hybrid capture probe set if they contain about or at least about 25, 30, 35, 40, 45, 50, 55, 60, 65, 70, 75, 80, 85, 90, 100, 110, 120, 130, 140, or 150 contiguous nucleotides that are identical to a sequence contained in a set of reference sequences. In embodiments, probes are excluded from the hybrid capture probes if they share along a length thereof about or at least about 60%, 70%, 75%, 80%, 85%, 90%, 95%, 99%, or 100% identity to a sequence contained in a set of reference sequences. The length along which sequence identity is measured can be 10, 15, 20, 25, 30, 35, 40, 45, 50, 55, 60, 65, 70, 75, 80, 85, 80, 95, 100, 150, 200 nucleotides and/or the full length of a probe. The reference sequences can comprise genome sequences or sequences derived from a set of genome sequences. The genome sequences can be derived from organisms collectively or individually with a relative abundance of about or at least about 30%, 40%, 50%, 60%, 70%, 80%, 90%, or 95% in the microbial community. In embodiments, the genome sequences are derived from Citrobacter freundii, Salmonella enterica, or Klebsiella pneumoniae. In embodiments, the genome sequences are derived from bacteria belonging to Bacteroidetes and/or Firmicutes. Exclusion of probes can have the advantage of ensuring that sequences derived from particular organisms abundant in a microbiome are not targeted by a probe set to help increase the specificity of a probe set for targeting sequences from an organism of interest.

### Synthesis

[0126] The invention features sets of probes (e.g., hybrid capture probes) and methods for producing sets of hybrid capture probes.

[0127] In some embodiments, the invention features sets of hybrid capture probes including any one of SEQ ID NOs: 1 to 892415. In some embodiments, the invention features probes complementary to any one of SEQ ID NOs: 1 to 892415, or to any portion thereof, where non-limiting examples of portions thereof include sequences resulting from 3′ and/or 5′ truncations. The 3′ and/or 5′ truncations can be 1, 2, 3, 4, 5, 6, 7, 8, 9, or 10 nucleotide truncations. In some embodiments, the invention features probes having at least about 30%, 35%, 40%, 45%, 50%, 55%, 60%, 65%, 70%, 75%, 80%, 85%, 90%, 95%, 99%, or 100% nucleotide sequence identity to sequences provided herein (e.g., SEQ ID Nos. 1-892415). The length along which sequence identity is measured can be 10, 15, 20, 25, 30, 35, 40, 45, 50, 55, 60, 65, 70, 75, 80, 85, 80, 95, 100, 150, 200 nucleotides and/or the full length of a probe.

[0128] In embodiments, a set of probes (e.g., hybrid capture probes) contains about or at least about 10, 20, 30, 40, 50, 100, 200, 300, 400, 500, 600, 700, 800, 900, 1000, 10000, 50000, 100000, 200000, 300000, 400000, 500000, 600000, 700000, 800000, 900000, 1000000, 1500000, 2000000, 2500000, 3000000, 3500000, 4000000, 4500000, 5000000, 10,000,000 or more unique probes. In embodiments, the set of hybrid capture probes contains no more than about 100000, 200000, 300000, 400000, 500000, 600000, 700000, 800000, 900000, 1000000, 1500000, 2000000, 2500000, 3000000, 3500000, 4000000, 4500000, 5000000, 10,000,000 or more unique probes. In embodiments, each unique probe in the set of probes contains a distinct probe sequence.

[0129] Methods for synthesizing a set of hybrid capture probes involve synthesis of oligonucleotides in an array format (e.g., chip). Array synthesis can have the advantages of being customizable and capable of producing long oligonucleotides. TWIST chemistry can also be used to manufacture a set of hybrid capture probes.

[0130] In certain embodiments, the probes contain a binding member. In certain example embodiments, the binding member is biotin, a hapten, or an affinity tag. In cases where the hybrid capture probes are biotinylated, the capture probes are captured using a capture molecule (e.g., streptavidin) fixed to a solid support. The capture molecule and/or the binding member can be streptavidin, biotin, a hapten, an affinity tag, an antigen-binding molecule, or an antigen. The hybrid capture probes and/or the solid support can contain more than one distinct binding member or capture molecule, respectively.

[0131] The solid support can comprise metal, glass, a polymeric material, or any other suitable material. The support can be planar and/or the support can contain particles or beads. The support can be a biochip. The capture molecule can be coupled to the support by covalent or non-covalent bonds. In some embodiments, hybrid capture probes are directly or indirectly covalently coupled to the solid support.

[0132] In other embodiments, the set of probes (e.g., hybrid capture probes) are produced using methods described herein or known to the skilled person. In embodiments, the probes of the present invention include mixed or universal nucleotides, such as inosine or 5-nitroindole (i.e., degeneracy). The mixed or universal base(s) can be included in the bait sequence at the position(s) of a single nucleotide polymorphism (SNP) or mutation, to optimize the bait sequences to catch both alleles (i.e., SNP and non-SNP; mutant and non-mutant). In other embodiments, all known sequence variations (or a subset thereof) can be targeted with multiple probes, rather than by using mixed degenerate probes.

[0133] In embodiments, the set of hybrid capture probes are derived from oligonucleotides synthesized in a microarray and cleaved and eluted from the microarray.

[0134] In some embodiments, the hybrid capture probes are RNA and/or DNA molecules, as well as derivatives or analogs thereof. In some embodiments the probes are chemically or enzymatically modified or in vitro transcribed RNA molecules including but not limited to those that are more stable and resistant to RNase.

[0135] In embodiments, the probes (e.g., hybrid capture probes) comprise about 10, 15, 20, 25, 30, 35, 40, 45, 50, 55, 60, 65, 70, 75, 80, 85, 90, 95, 100, 110, 120, 130, 140, 150, 160, 170, 180, 190, or 200 nucleotides. It can be beneficial in some contexts to use hybrid capture probes having a nucleotide length of no more than about 80, 85, 90, 95, 100, 110, 120, 130, 140, 150, 160, 170, 180, 190, 200, or 250 nucleotides.

[0136] In some embodiments, probes generated according to the methods described herein contain non-naturally occurring linkages such as locked nucleic acid (“LNA”) or peptide nucleotide acids.

### Hybrid Capture (HC)

[0137] Hybrid capture (HC), also called hybrid selection, relies on specific oligonucleotides (i.e., capture probes or simply “probes”) that selectively hybridize (i.e., bind or capture) to sequences from the target organism (FIGS. 1A-1D) (Mamanova et al., 2010. “Target-Enrichment Strategies for next-Generation Sequencing.” Nature Methods 7 (2): 111-18, which is incorporated by reference in its entirety).

[0138] Hybridization between the polynucleotides and hybrid capture probes is conducted under any conditions in which the hybrid capture probes hybridize to target polynucleotides, but do not substantially hybridize to non-target polynucleotides. This can involve selection under high stringency conditions. Following hybridization, the polynucleotide/probe complexes are separated based on the presence of a binding member in each probe, and unbound polynucleotides are removed under appropriate wash conditions that remove the nonspecifically bound polynucleotides, but do not substantially remove polynucleotide probe complexes.

[0139] In one embodiment, hybrid capture is carried out using methods including those described herein and those described in Gnirke, et al., Nature biotechnology 27:182-189, 2009, US patent publications No. US 2010/0029498, US 2013/0230857, US 2014/0200163, US 2014/0228223, and US 2015/0126377 and International Patent Publication No. WO 2009/099602, each of which is incorporated by reference in its entirety.

[0140] For example, the invention encompasses use of hybrid capture probes of the present invention with the SureSelectXT, SureSelectXT2 and SureSelectQXT Target Enrichment System, the SeqCap EZ kit developed by Roche NimbleGen, a TruSeq® Enrichment Kit developed by Illumina, and other hybridization-based target enrichment methods and kits that add sample-specific sequence tags either before or after the enrichment step.

[0141] The hybrid capture methods provided herein can be used for enriching pan-genomic or pan-transcriptomic polynucleotides. The polynucleotides can be related by structure or by function. The polynucleotides can be associated with one or more functions of interest. The pan-genomic or pan-transcriptomic polynucleotides can be enriched by about or at least about 1, 1.1, 1.2, 1.3, 1.4, 1.5, 2, 3, 4, 5, 6, 7, 8, 9, 10, 15, 20, 25, 30, 35, 40, 45, 50, 55, 60, 65, 70, 75, 80, 85, 90, 95, or 100-fold.

[0142] In embodiments, the hybrid capture methods provided herein can be used for enriching for polynucleotides derived from an organism(s) of interest from a host organism (e.g., an animal or human). Thus, the probes of the present invention can be used in a method to separate sequences derived from an organism(s) of interest (e.g., a bacterium) from a host organism(s) (e.g., a human). Therefore, enrichment of the sequences derived from the organism(s) of interest can involve increasing the concentration of polynucleotides derived from the organism(s) of interest in a sample relative to the concentration of polynucleotides derived from host organism(s) in the sample by about or at least about 1, 1.1, 1.2, 1.3, 1.4, 1.5, 2, 3, 4, 5, 6, 7, 8, 9, 10, 15, 20, 25, 30, 35, 40, 45, 50, 55, 60, 65, 70, 75, 80, 85, 90, 95, or 100-fold. As a non-limiting example, the probes and methods of the present disclosure can be used to separate polynucleotides derived from a tumorigenic bacterium from tumor-derived polynucleotides in a tumor sample.

[0143] The hybrid capture probes in various embodiments amplify targeted sequences in a non-biased manner. In some cases, the capture probes minimally amplify non-target sequences. As detailed further in the below Examples, the methods of the present invention utilizing hybrid capture probes of the present invention can be used to enrich for target sequences in a polynucleotide sample while still maintaining a non-biased representation in the sample of relative abundances of non-targeted nucleotide sequences. Thus, in embodiments, the methods of the present invention result in enriched polynucleotide compositions where target sequences are enriched in a substantially non-biased manner and where non-target sequences are reduced relative to the enriched target sequences in a substantially non-biased manner. In embodiments, a non-substantial bias means a lack of any measured statistically significant bias.

[0144] In embodiments, conditions (e.g., salt concentration and/or temperature) are adjusted such that hybridization between a target sequence and a hybridization probe(s), optionally bound to a solid support, occurs with precise complementary matches or with various degrees of less complementarity depending on the degree of stringency employed. For example, stringent salt concentration can include those containing less than about 750 mM NaCl and 75 mM trisodium citrate, less than about 500 mM NaCl and 50 mM trisodium citrate, or less than about 250 mM NaCl and 25 mM trisodium citrate. Low stringency hybridization can be achieved in the absence of organic solvent, e.g., formamide, while high stringency hybridization can be obtained in the presence of at least about 35% formamide, and most preferably at least about 50% formamide. Stringent temperature conditions can include temperatures of at least about 30° C., of at least about 37° C., or of at least about 42° C. Varying additional parameters, such as hybridization time, the concentration of detergent, e.g., sodium dodecyl sulfate (SDS), and the inclusion or exclusion of carrier DNA, are well known to those skilled in the art. Various levels of stringency are accomplished by combining these various conditions as needed.

### Samples

[0145] The methods of the present invention can be used to characterize virtually any complex biological sample (i.e., samples containing polynucleotides derived from more than one organism). In particular, the probes and methods described herein can be used to enrich polynucleotides (e.g., those polynucleotides related by sequence or function) derived from any sample containing a microbe or a microbial community (e.g., a microbiome). The microbial community is a natural or artificial/synthetic microbial community. The microbial community can be grown ex vivo situ or in vivo situ. The sample can be an environmental or biological sample. The sample can be obtained from a subject. The sample can be obtained from a subject at different time points. The samples can be collected from a subject suffering or having suffered an infection (e.g., a urinary tract infection).

[0146] The samples can be gathered from a patient care facility (e.g., a hospital) or a food production facility and characterization of the sample can include monitoring an organism(s) (e.g., a microbe) and/or microbial community within the samples. Characterization of the sample can include monitoring or detecting the presence and/or levels of polynucleotides derived from the sample and associated with a function of interest. The sample can be collected from an organoid. In various instances, the sample can comprise a limited number of microbial species and/or genera; for example, 1, 2, 3, 4, 5, 6, 7, 8, 9, 10, 50, 100, or 500 species and/or genera.

[0147] Some prokaryotic species are known to be tumorigenic. It can be advantageous, therefore, to characterize microbes associated with a tumor sample. Thus, in some embodiments, the sample can contain a biopsy (e.g., a tumor biopsy). In instances, prokaryotes cause a cancer in the gut of a subject.

[0148] Methods for preparing libraries of polynucleotides for sequencing are known to one of skill in the art. Library preparation can include the addition of nucleotide bar codes to the library polynucleotides according to methods known in the art. Libraries can be prepared using commercially available kits. The libraries can contain polynucleotides having a length or an average length of about or of at least about 25, 30, 35, 40, 45, 50, 55, 60, 65, 70, 75, 80, 85, 90, 95, 100, 125, 150, 175, 200, 250, 300, 350, 400, 450, 500, or 1000 nucleotides. In embodiments, the libraries contain polynucleotides having an a length or average length of no more than about 25, 30, 35, 40, 45, 50, 55, 60, 65, 70, 75, 80, 85, 90, 95, 100, 125, 150, 175, 200, 250, 300, 350, 400, 450, 500, or 1000 nucleotides. Not wishing to be bound by theory, libraries of larger length can have the advantage of allowing for hybrid capture of sequences outside of those binding to the hybrid capture probes by means of a neighborhood effect.

### Characterization

[0149] The hybrid capture probes and methods featured in the disclosure can be used for the characterization of a microbe and/or microbiome. The hybrid capture probes can be used to characterize a complex biological sample and/or microbiome which may comprise a target sequence(s) or a fragment thereof. The target sequences can be related by structure and/or function. The method may comprise (a) contacting the selected probes to the target sequence or a fragment thereof; and (b) analyzing the target sequence or fragment thereof that hybridizes to one or more of the selected probes.

[0150] Analyzing the target sequence or fragment thereof that hybridizes to one or more of the selected probes may involve sequencing, FACS, qPCR, RT-PCR, a genotyping array, and/or a NanoString assay (see, e.g., Malkov, et al. “Multiplexed measurements of gene signatures in different analytes using the Nanostring nCounter™ Assay System”, BMC Research Notes, 2: Article No: 80 (2009)), or any of various other techniques known to one of skill in the art. Various characterization methods may be used and are described as follows.

[0151] RNA sequencing (RNA-Seq) is a powerful tool for transcriptome profiling. In embodiments, to mitigate sequence-dependent bias resulting from amplification complications to allow truly digital RNA-Seq, a set of barcode sequences can be used to ensure that every cDNA molecule prepared from an mRNA sample is uniquely labeled by random attachment of barcode sequences to both ends (see, e.g., Shiroguchi K, et al. Proc Natl Acad Sci USA. 2012 Jan. 24;109(4):1347-52). After PCR, paired-end deep sequencing can be applied to read the two barcodes and cDNA sequences. Rather than counting the number of reads, RNA abundance can be measured based on the number of unique barcode sequences observed for a given cDNA sequence. The barcodes may be optimized to be unambiguously identifiable. This method is a representative example of how to quantify a whole transcriptome from a sample.

[0152] Library preparation may involve an amplification step. Amplification may involve thermocycling or isothermal amplification (such as through the methods RPA or LAMP). Cross-linking may involve overlap-extension PCR or use of ligase to associate multiple amplification products with each other. Amplification can refer to any method employing a primer and a polymerase capable of replicating a target sequence with reasonable fidelity. Amplification may be carried out by natural or recombinant DNA polymerases such as TaqGold™, T7 DNA polymerase, Klenow fragment of E. coli DNA polymerase, and reverse transcriptase. A preferred amplification method is PCR. In particular, the isolated RNA can be subjected to a reverse transcription assay that is coupled with a quantitative polymerase chain reaction (RT-PCR) in order to quantify the expression level of a sequence associated with a signaling biochemical pathway.

[0153] Detection of the gene expression level can be conducted in real time in an amplification assay. In one aspect, the amplified products can be directly visualized with fluorescent DNA-binding agents including but not limited to DNA intercalators and DNA groove binders. Because the amount of the intercalators incorporated into the double-stranded DNA molecules is typically proportional to the amount of the amplified DNA products, one can conveniently determine the amount of the amplified products by quantifying the fluorescence of the intercalated dye using conventional optical systems in the art. DNA-binding dyes suitable for this application include, as non-limiting examples, SYBR green, SYBR blue, DAPI, propidium iodine, Hoeste, SYBR gold, ethidium bromide, acridines, proflavine, acridine orange, acriflavine, fluorcoumanin, ellipticine, daunomycin, chloroquine, distamycin D, chromomycin, homidium, mithramycin, ruthenium polypyridyls, anthramycin, and the like.

[0154] In another aspect, other fluorescent labels such as sequence specific probes can be employed in the amplification reaction to facilitate the detection and quantification of the amplified products. Probe-based quantitative amplification relies on the sequence-specific detection of a desired amplified product. It utilizes fluorescent, target-specific probes (e.g., TaqMan® probes) resulting in increased specificity and sensitivity. Methods for performing probe-based quantitative amplification are taught, for example, in U.S. Pat. No. 5,210,015.

[0155] Sequencing may be performed on any high-throughput platform. Methods of sequencing oligonucleotides and nucleic acids are well known in the art (see, e.g., WO93/23564,WO98/28440 and WO98/13523; U.S. Pat. App. Pub. No. 2019/0078232; U.S. Pat. Nos. 5,525,464; 5,202,231; 5,695,940; 4,971,903; 5,902,723; 5,795,782; 5,547,839 and 5,403,708; Sanger et al., Proc. Natl. Acad. Sci. USA 74:5463 (1977); Drmanac et al., Genomics 4:114 (1989); Koster et al., Nature Biotechnology 14:1123 (1996); Hyman, Anal. Biochem. 174:423 (1988); Rosenthal, International Patent Application Publication 761107 (1989); Metzker et al., Nucl. Acids Res. 22:4259 (1994); Jones, Biotechniques 22:938 (1997); Ronaghi et al., Anal. Biochem. 242:84 (1996); Ronaghi et al., Science 281:363 (1998); Nyren et al., Anal. Biochem. 151:504 (1985); Canard and Arzumanov, Gene 11:1 (1994); Dyatkina and Arzumanov, Nucleic Acids Symp Ser 18:117 (1987); Johnson et al., Anal. Biochem. 136:192 (1984); and Elgen and Rigler, Proc. Natl. Acad. Sci. USA 91 (13): 5740 (1994), all of which are expressly incorporated by reference).

[0156] The sequencing of a polynucleotide can be carried out using any suitable commercially available sequencing technology. In another embodiment, the sequencing of a polynucleotide is carried out using chain termination method of DNA sequencing (e.g., Sanger sequencing). In yet another embodiment, commercially available sequencing technology is a next-generation sequencing technology, including as non-limiting examples combinatorial probe anchor synthesis (cPAS), DNA nanoball sequencing, droplet-based or digital microfluidics, heliscope single molecule sequencing, nanopore sequencing (e.g., Oxford Nanopore technologies), GeneGap sequencing, massively parallel signature sequencing (MPSS), microfluidic Sanger sequencing, microscopy-based techniques (e.g., transmission electronic microscopy DNA sequencing), RNA polymerase (RNAP) sequencing, single-molecule real-time (SMRT) sequencing, SOLID sequencing, ion semiconductor sequencing, polony sequencing, Pyrosequencing (454), sequencing by hybridization, sequencing by synthesis (e.g., Illumina™ sequencing), sequencing with mass spectrometry, and tunneling currents DNA sequencing.

[0157] Polynucleotides may be characterized and/or enriched by means of a biochip (also known as a microarray) containing hybrid capture probes of the present invention. Biochips generally comprise solid substrates and have a generally planar surface, to which a capture reagent (also called an adsorbent or affinity reagent) is attached. The capture reagent can be a hybrid capture probe(s) or a binding member. Frequently, the surface of a biochip comprises a plurality of addressable locations, each of which has the capture reagent bound there.

[0158] The array elements are organized in an ordered fashion such that each element is present at a specified location on the substrate. Useful substrate materials include membranes, composed of paper, nylon or other materials, filters, chips, glass slides, and other solid supports. Such solid supports are suitable for use as solid supports generally in embodiments of the present invention. The ordered arrangement of the array elements allows hybridization patterns and intensities to be interpreted as expression levels of particular genes or proteins. Methods for making nucleic acid microarrays are known to the skilled artisan and are described, for example, in U.S. Pat. No. 5,837,832, Lockhart, et al. (Nat. Biotech. 14:1675-1680, 1996), and Schena, et al. (Proc. Natl. Acad. Sci. 93:10614-10619, 1996), herein incorporated by reference. Methods for making polypeptide microarrays are described, for example, by Ge (Nucleic Acids Res. 28: e3. i-e3. vii, 2000), MacBeath et al., (Science 289:1760-1763, 2000), Zhu et al. (Nature Genet. 26:283-289), and in U.S. Pat. No. 6,436,665, hereby incorporated by reference.

[0159] In aspects of the invention, a sample is analyzed by means of a nucleic acid biochip (also known as a nucleic acid microarray). To produce a nucleic acid biochip, oligonucleotides may be synthesized or bound to the surface of a substrate using a chemical coupling procedure and an ink jet application apparatus, as described in PCT application W095/251116 (Baldeschweiler et al.). Alternatively, a gridded array may be used to arrange and link cDNA fragments or oligonucleotides to the surface of a substrate using a vacuum system, thermal, UV, mechanical or chemical bonding procedure.

[0160] Detection system for measuring the absence, presence, and amount of hybridization for all of the distinct nucleic acid sequences are well known in the art. For example, simultaneous detection is described in Heller et al., Proc. Natl. Acad. Sci. 94:2150-2155, 1997. In embodiments, a scanner is used to determine the levels and patterns of fluorescence.

### Molecular Identifiers

[0161] For a convenient detection of polynucleotide/probe complexes, the hybrid capture probes can be coupled to a molecular identifier. Molecular identifiers suitable for use in the present invention include any agent detectable by photochemical, biochemical, spectroscopic, immunochemical, electrical, optical or chemical means. In some embodiments, a probe described herein is linked to a nucleotide sequence that is used for molecular identification.

[0162] A wide variety of appropriate molecular identifiers are known in the art, which include fluorescent or chemiluminescent labels, radioactive isotope labels, enzymatic or other ligands. The molecular identifier can be a fluorescent label or an enzyme tag, such as digoxigenin, β-galactosidase, urease, alkaline phosphatase or peroxidase, avidin/biotin complex.

[0163] Methods used to detect or quantify the hybridization intensity will typically depend upon the molecular identifier. For example, radiolabels may be detected using photographic film or a phosphoimager. Fluorescent markers may be detected and quantified using a photodetector to detect emitted light. Enzymatic labels can be detected by providing the enzyme with a substrate and measuring the reaction product produced by the action of the enzyme on the substrate; and colorimetric labels can be detected by visualizing a colored label.

[0164] Specific non-limiting examples of molecular identifiers include radioisotopes, such as 32P, 14C, 125I, 3H, and 131I, fluorescein, rhodamine, dansyl chloride, umbelliferone, luciferase, peroxidase, alkaline phosphatase, β-galactosidase, β-glucosidase, horseradish peroxidase, glucoamylase, lysozyme, saccharide oxidase, microperoxidase, biotin, and ruthenium. In the case where biotin is employed as a molecular identifier, streptavidin bound to an enzyme (e.g., peroxidase) may further be added to facilitate detection of the biotin.

[0165] Examples of fluorescent molecular identifiers include, but are not limited to, Atto dyes, 4-acetamido-4′-isothiocyanatostilbene-2,2′disulfonic acid; acridine and derivatives: acridine, acridine isothiocyanate; 5-(2′-aminoethyl)aminonaphthalene-1-sulfonic acid (EDANS); 4-amino-N-[3-vinyl sulfonyl)phenyl]naphthalimide-3,5 disulfonate; N-(4-anilino-1-naphthyl) maleimide; anthranilamide; BODIPY; Brilliant Yellow; coumarin and derivatives; coumarin, 7-amino-4-methylcoumarin (AMC, Coumarin 120), 7-amino-4-trifluoromethylcouluarin (Coumaran 151); cyanine dyes; cyanosine; 4′,6-diaminidino-2-phenylindole (DAPI); 5′5″-dibromopyrogallol-sulfonaphthalein (Bromopyrogallol Red); 7-diethylamino-3-(4′-isothiocyanatophenyl)-4-methylcoumarin; diethylenetriamine pentaacetate; 4,4′-diisothiocyanatodihydro-stilbene-2,2′-disulfonic acid; 4,4′-diisothiocyanatostilbene-2,2′-disulfonic acid; 5-[dimethylamino] naphthalene-1-sulfonyl chloride (DNS, dansylchloride); 4-dimethylaminophenylazophenyl-4′-isothiocyanate (DABITC); eosin and derivatives; eosin, eosin isothiocyanate, erythrosin and derivatives; erythrosin B, erythrosin, isothiocyanate; ethidium; fluorescein and derivatives; 5-carboxyfluorescein (FAM), 5-(4,6-dichlorotriazin-2-yl)aminofluorescein (DTAF), 2′,7′-dimethoxy-4′5′-dichloro-6-carboxyfluorescein, fluorescein, fluorescein isothiocyanate, QFITC, (XRITC); fluorescamine; IR144; IR1446; Malachite Green isothiocyanate; 4-methylumbelliferoneortho cresolphthalein; nitrotyrosine; pararosaniline; Phenol Red; B-phycoerythrin; o-phthaldialdehyde; pyrene and derivatives: pyrene, pyrene butyrate, succinimidyl 1-pyrene; butyrate quantum dots; Reactive Red 4 (Cibacron™ Brilliant Red 3B-A) rhodamine and derivatives: 6-carboxy-X-rhodamine (ROX), 6-carboxyrhodamine (R6G), lissamine rhodamine B sulfonyl chloride rhodamine (Rhod), rhodamine B, rhodamine 123, rhodamine X isothiocyanate, sulforhodamine B, sulforhodamine 101, sulfonyl chloride derivative of sulforhodamine 101 (Texas Red); N,N,N′,N′ tetramethyl-6-carboxyrhodamine (TAMRA); tetramethyl rhodamine; tetramethyl rhodamine isothiocyanate (TRITC); riboflavin; rosolic acid; terbium chelate derivatives; Cy3; Cy5; Cy5.5; Cy7; IRD 700; IRD 800; La Jolta Blue; phthalo cyanine; and naphthalo cyanine

[0166] A fluorescent molecular identifier may be a fluorescent protein, such as blue fluorescent protein, cyan fluorescent protein, green fluorescent protein, red fluorescent protein, yellow fluorescent protein or any photoconvertible protein. Colorimetric molecular identifiers, bioluminescent molecular identifiers and/or chemiluminescent molecular identifiers may be used in embodiments of the invention.

[0167] Detection of a molecular identifier may involve detecting energy transfer between molecules in a hybridization complex by perturbation analysis, quenching, or electron transport between donor and acceptor molecules, the latter of which may be facilitated by double stranded match hybridization complexes. The fluorescent molecular identifier may be a perylene or a terrylen. In the alternative, the fluorescent molecular identifier may be a fluorescent bar code.

[0168] The molecular identifier may be light sensitive, wherein the label is light-activated and/or light cleaves the one or more linkers to release the molecular cargo. The light-activated molecular cargo may be a major light-harvesting complex (LHCII). In another embodiment, the fluorescent molecular label may induce free radical formation.

[0169] In an advantageous embodiment, agents may be uniquely labeled in a dynamic manner (see, e.g., international patent application serial no. PCT/US2013/61182 filed Sep. 23, 2012). The unique labels are, at least in part, nucleic acid in nature, and may be generated by sequentially attaching two or more detectable oligonucleotide tags to each other and each unique label may be associated with a separate agent. A detectable oligonucleotide tag may be an oligonucleotide that may be detected by sequencing of its nucleotide sequence and/or by detecting non-nucleic acid detectable moieties to which it may be attached.

[0170] In embodiments, the molecular identifier is a microparticles including as non-limiting examples quantum dots (Empodocles, et al., Nature 399:126-130, 1999), gold nanoparticles (Reichert et al., Anal. Chem. 72:6025-6029, 2000).

[0171] Characterizing a target sequence or fragment thereof that hybridizes to one or more of the hybrid capture probes may be an identifying analysis, wherein hybridization of a selected hybrid capture probe(s) to the target sequence or a fragment thereof indicates the presence of the target sequence within the sample.

### Hardware and Software

[0172] The present invention also relates to a computer system involved in carrying out the methods of the invention relating to both computations and sequencing.

[0173] A computer system (or digital device) may be used to receive, transmit, display and/or store results, analyze the results, and/or produce a report of the results and analysis. A computer system may be understood as a logical apparatus that can read instructions from media (e.g. software) and/or network port (e.g. from the internet), which can optionally be connected to a server having fixed media. A computer system may comprise one or more of a CPU, disk drives, input devices such as keyboard and/or mouse, and a display (e.g. a monitor). Data communication, such as transmission of instructions or reports, can be achieved through a communication medium to a server at a local or a remote location. The communication medium can include any means of transmitting and/or receiving data. For example, the communication medium can be a network connection, a wireless connection, or an internet connection. Such a connection can provide for communication over the World Wide Web. It is envisioned that data relating to the present invention can be transmitted over such networks or connections (or any other suitable means for transmitting information, including but not limited to mailing a physical report, such as a print-out) for reception and/or for review by a receiver. One can record results of calculations (e.g., sequence analysis or a listing of hybrid capture probe sequences) made by a computer on tangible medium, for example, in computer-readable format such as a memory drive or disk, as an output displayed on a computer monitor or other monitor, or simply printed on paper. The results can be reported on a computer screen. The receiver can be but is not limited to an individual, or electronic system (e.g. one or more computers, and/or one or more servers).

[0174] In some embodiments, the computer system may comprise one or more processors. Processors may be associated with one or more controllers, calculation units, and/or other units of a computer system, or implanted in firmware as desired. If implemented in software, the routines may be stored in any computer readable memory such as in RAM, ROM, flash memory, a magnetic disk, a laser disk, or other suitable storage medium. Likewise, this software may be delivered to a computing device via any known delivery method including, for example, over a communication channel such as a telephone line, the internet, a wireless connection, etc., or via a transportable medium, such as a computer readable disk, flash drive, etc. The various steps may be implemented as various blocks, operations, tools, modules and techniques which, in turn, may be implemented in hardware, firmware, software, or any combination of hardware, firmware, and/or software. When implemented in hardware, some or all of the blocks, operations, techniques, etc. may be implemented in, for example, a custom integrated circuit (IC), an application specific integrated circuit (ASIC), a field programmable logic array (FPGA), a programmable logic array (PLA), etc.

[0175] A client-server, relational database architecture can be used in embodiments of the invention. A client-server architecture is a network architecture in which each computer or process on the network is either a client or a server. Server computers are typically powerful computers dedicated to managing disk drives (file servers), printers (print servers), or network traffic (network servers). Client computers include PCs (personal computers) or workstations on which users run applications, as well as example output devices as disclosed herein. Client computers rely on server computers for resources, such as files, devices, and even processing power. In some embodiments of the invention, the server computer handles all of the database functionality. The client computer can have software that handles all the front-end data management and can also receive data input from users.

[0176] A machine readable medium which may comprise computer-executable code may take many forms, including but not limited to, a tangible storage medium, a carrier wave medium or physical transmission medium. Non-volatile storage media include, for example, optical or magnetic disks, such as any of the storage devices in any computer(s) or the like, such as may be used to implement the databases, etc. shown in the drawings. Volatile storage media include dynamic memory, such as main memory of such a computer platform. Tangible transmission media include coaxial cables; copper wire and fiber optics, including the wires that comprise a bus within a computer system. Carrier-wave transmission media may take the form of electric or electromagnetic signals, or acoustic or light waves such as those generated during radio frequency (RF) and infrared (IR) data communications. Common forms of computer-readable media therefore include for example: a floppy disk, a flexible disk, hard disk, magnetic tape, any other magnetic medium, a CD-ROM, DVD or DVD-ROM, any other optical medium, punch cards paper tape, any other physical storage medium with patterns of holes, a RAM, a ROM, a PROM and EPROM, a FLASH-EPROM, any other memory chip or cartridge, a carrier wave transporting data or instructions, cables or links transporting such a carrier wave, or any other medium from which a computer may read programming code and/or data. Many of these forms of computer readable media may be involved in carrying one or more sequences of one or more instructions to a processor for execution.

[0177] The subject computer-executable code can be executed on any suitable device which may comprise a processor, including a server, a PC, or a mobile device such as a smartphone or tablet. Any controller or computer optionally includes a monitor, which can be a cathode ray tube (“CRT”) display, a flat panel display (e.g., active matrix liquid crystal display, liquid crystal display, etc.), or others. Computer circuitry is often placed in a box, which includes numerous integrated circuit chips, such as a microprocessor, memory, interface circuits, and others. The box also optionally includes a hard disk drive, a floppy disk drive, a high capacity removable drive such as a writeable CD-ROM, and other common peripheral elements. Inputting devices such as a keyboard, mouse, or touch-sensitive screen, optionally provide for input from a user. The computer can include appropriate software for receiving user instructions, either in the form of user input into a set of parameter fields, e.g., in a GUI, or in the form of preprogrammed instructions, e.g., preprogrammed for a variety of different specific operations.

### Kits

[0178] The instant disclosure also provides kits containing agents of this disclosure for use in the methods of the present disclosure. Kits of the instant disclosure may include one or more containers comprising an agent for characterization of a complex biological sample (e.g. a microbiome) and/or may contain agents (e.g., oligonucleotide primers, probes, etc.) for enrichment of sequences derived from a complex biological sample. In some embodiments, the kits further include instructions for use in accordance with the methods of this disclosure. In some embodiments, these instructions comprise a description of use of the agent to characterize a complex biological sample and/or enrich polynucleotide sequences according to any of the methods of this disclosure. In some embodiments, the instructions comprise a description of how to enrich polynucleotides from a sample and/or to characterize a complex biological sample (e.g., a microbiome). The kit may further comprise a description of how to analyze and/or interpret data.

[0179] Instructions supplied in the kits of the instant disclosure are typically written instructions on a label or package insert (e.g., a paper sheet included in the kit), but machine-readable instructions (e.g., instructions carried on a magnetic or optical storage disk) are also acceptable. Instructions may be provided for practicing any of the methods described herein.

[0180] The kits of this disclosure are in suitable packaging. Suitable packaging includes, but is not limited to, vials, bottles, jars, flexible packaging (e.g., sealed Mylar or plastic bags), and the like. Kits may optionally provide additional components such as buffers and interpretive information. Normally, the kit comprises a container and a label or package insert(s) on or associated with the container.

[0181] The practice of the present invention employs, unless otherwise indicated, conventional techniques of molecular biology (including recombinant techniques), microbiology, cell biology, biochemistry and immunology, which are well within the purview of the skilled artisan. Such techniques are explained fully in the literature, such as, “Molecular Cloning: A Laboratory Manual”, second edition (Sambrook, 1989); “Oligonucleotide Synthesis” (Gait, 1984); “Animal Cell Culture” (Freshney, 1987); “Methods in Enzymology” “Handbook of Experimental Immunology” (Weir, 1996); “Gene Transfer Vectors for Mammalian Cells” (Miller and Calos, 1987); “Current Protocols in Molecular Biology” (Ausubel, 1987); “PCR: The Polymerase Chain Reaction”, (Mullis, 1994); “Current Protocols in Immunology” (Coligan, 1991). These techniques are applicable to the production of the polynucleotides and polypeptides of the invention, and, as such, may be considered in making and practicing the invention. Particularly useful techniques for particular embodiments will be discussed in the sections that follow.

[0182] The following examples are put forth so as to provide those of ordinary skill in the art with a complete disclosure and description of how to make and use the assay, screening, and therapeutic methods of the invention, and are not intended to limit the scope of what the inventors regard as their invention.

### EXAMPLES

### Example 1: Design and initial validation of E. coli pan-genome probe set

[0183] In order to design a probe set to cover the full scope of genetic diversity present in E. coli, an evolutionarily and functionally diverse species composed of eight main phylogroups (A, B1, B2, C, D, E, F, and G), and which also contains Shigella nested within its phylogeny, 295 RefSeq complete E. coli reference genomes and 3,141 high quality E. coli reference genomes were obtained from Genbank that were listed in the NCBI Pathogen Detection database. After applying a k-mer based clustering algorithm to remove near-identical reference genomes, shared orthogroups were identified. To reduce computational runtime on the probe design, orthogroup genes were grouped into clusters with >80% nucleotide sequence identity, and then these clusters were processed using the CATCH algorithm (Metsky, Hayden C., Viral Hemorrhagic Fever Consortium, Katherine J. Siddle, Adrianne Gladden-Young, James Qu, David K. Yang, Patrick Brehio, et al. 2019. “Capturing Sequence Diversity in Metagenomes with Comprehensive and Scalable Probe Design.” Nature Biotechnology. doi.org/10.1038/s41587-018-0006-x), followed by filtering steps to remove probes likely to target non-E. coli sequences. The remaining set of 892,415 short oligonucleotide probes (provided in the Sequence Listing as SEQ ID NOs: 1 to 892415) was designed to specifically hybridize to and cover the E. coli pan-genome, including the vast majority of the known diversity of E. coli (FIGS. 2 and 6).

[0184] In order to confirm the coverage of the final probe set against the E. coli pan-genome, blastn was used to query the probe sequences against all protein-coding gene sequences of a set of 1,713 references (see Table 2), including genes that had previously been filtered out at the probe design stage. The probe set was considered as capturing a gene sequence if at least one probe had a blast hit of at least >65 bp and no more than 8 mis-matches to a given gene. The final probe set successfully captured 99.95% of the genes included in the design (8,131,231 genes) and 99.54% of the included orthogroups (52,688 orthogroups). Thus, the probe set targeted the vast majority of the diversity of E. coli genes and orthogroups, even after removing thousands of potentially off-target probes. Of the missing genes and orthogroups, 67% were annotated hypothetical proteins, while the remaining genes were annotated as associated with mobile genetic elements. In addition, the probe set captured 29,232 E. coli genes that had been filtered out prior to probe design, suggesting that the probe set was more generalizable and actually able to capture additional sequence diversity outside the genes and orthogroups included in the design process. Probes were designed to selectively and sensitively enrich for genes without strain or reference bias. 892,415 oligonucleotide probes were generated (provided in the Sequence Listing as SEQ ID NOs: 1 to 892415).

TABLE 2
Phylogroup distribution of the 1,713 reference
genomes used in probe design.

| Phylogroup | References |
|---|---|
| A | 410 |
| B1 | 548 |
| B2 | 386 |
| C | 48 |
| D | 146 |
| E | 93 |
| F | 31 |
| G | 16 |
| Shigella | 20 |
| Cryptic clades* | 11 |
| E. albertii† | 1 |
| Unknown‡ | 3 |

*Unnamed lineages in the Escherichia genus (Walk, Seth T., Elizabeth W. Alm, David M. Gordon, Jeffrey L. Ram, Gary A. Toranzos, James M. Tiedje, and Thomas S. Whittam. 2009. “Cryptic Lineages of the Genus Escherichia.” Applied and Environmental Microbiology 75 (20): 6534-44)
†Reference GCA_001286085.1 was mis-labeled as E. coli in NCBI
‡Could not determine phylogroup using ClermonTyping

### Example 2: Enrichment of 4 Strains of E. coli in a Mock Metagenomic Community

[0185] In order to assess the performance of the probe set on a real sample of known composition, a mock community was created and sequenced containing approximately 99% human DNA and 1% E. coli DNA, representing a mixture of four distinct, previously sequenced E. coli strains from different phylogroups, with fully finished reference genomes mixed in unequal (80:15:4.9:0.1) relative abundances (Dijk, Lucas R. van, Bruce J. Walker, Timothy J. Straub, Colin J. Worby, Alexandra Grote, Henry L. Schreiber, Christine Anyansi, et al. 2021. “StrainGE: A Toolkit to Track and Characterize Low-Abundance Strains in Complex Microbial Communities.” Cold Spring Harbor Laboratory. doi.org/10.1101/2021.02.14.431013). A sequencing library was created for this sample and the hybrid capture (HC) protocol was performed using the pan-genome probe set. Both pre-HC and post-HC libraries were sequenced and analyzed for enrichment and bias for each of the four strains (FIGS. 3A-3D). StrainGE, a tool developed for disentangling low-abundance mixtures of strains from within the same species in metagenomic samples, was used to assess performance for each of the four strains individually (Dijk et al. 2021).

[0186] After HC, relative ratios of the four strains to each other were well maintained in the sequencing data (paired t-test, p>0.1, FIG. 3A)-while their relative abundances within the overall metagenomic sample were dramatically increased (one sample t-test of log 2 fold-changes for all four strains, p<0.001), with nearly a 40-fold increase overall. Therefore, enrichment did not introduce bias, as shown by the preservation of relative strain ratios in the post-hybrid capture data (paired t-test, >0.1). The depth of coverage for each of the four strains was also dramatically increased for the same sequencing depth. The most abundant strain increased from 6× coverage to nearly 200× coverage (FIG. 3B), and the least abundant strain (originally only present at 0.05% relative abundance) increased from 0.6× to 27× coverage. Due to increased coverage for each strain, the fraction of the genome covered was also dramatically increased (FIG. 3C). In post-HC data (thick lines), the majority of each strain's reference was covered at least 5× (a standard minimum cutoff for depth; dashed vertical line)—ranging from 99% for the most abundant strain to 72% for the least abundant strain. This represented a dramatic increase compared to pre-HC data (thin lines), in which little of the two more abundant strains (16% and 6%) and nearly none (1% and 0.8%) of the two less abundant strains had at least 5× coverage.

[0187] Although the probe set was designed to cover the E. coli pan-genome as evenly as possible, it was expected that there would be some regions of lower coverage due to their not being included in the probe set design. Due to computational and practical purposes, certain genes were excluded from consideration in the original probe design, including genes and orthogroups found rarely in E. coli, as well as sequences found commonly in other gut bacteria. Further, though E. coli genomes are generally quite gene-dense (>95% genic), intergenic regions were not considered in the probe design process; thus, it was expected that intergenic regions might have lower coverage.

[0188] In order to assess the extent of regions expected to be missed by the probe set in the four reference genomes in the mock community, probe hybridization sites were predicted for each strain and uncaptured regions (i.e., gaps) were characterized (FIG. 7). Most of each reference was relatively well-covered by predicted probe hybridization sites, with between 83% and 86% of each genome predicted to hybridize directly to the probe set. There were 30,076 small (<50 bp) gaps between sites, accounting for a total of 545 kb of sequence (˜3%), across all four strains. This was not unexpected, as CATCH was used with a cover extension value of 25 bp, which caused the algorithm to assume that a probe will capture sequences within 25 bp (on each end) of a given hybridization site. There were 17,042 medium-sized gaps (between 50 bp and 1 kb) across all four references, amounting to a total of 2.37 Mb of sequence (˜12%), which were not necessarily expected to be captured by the probes. There were 81 large gaps (between 1 kb and 5.1 kb), which amounted to a total of 181 kb of sequence (0.9%). Thus, somewhere between 1% and 13% of sequence from these four genomes was expected to go uncaptured, and therefore, unenriched. Notably, the distribution of gap sizes was not significantly different between the four strains (Kruskal Wallis, p>0.1), suggesting limited inter-strain bias in the potentially uncaptured gene content.

[0189] These predictions were then compared to actual post-HC sequence data, to see how much sequence was actually captured or missed by the probes. The probes appeared to enrich sequences well beyond 25 bp from hybridization sites (FIG. 3D). Increases were observed in coverage for post-HC data (thick lines) over pre-HC data (thin lines) for regions of the reference up to approximately 300 bp away from predicted probe hybridization sites, which was similar to the average library insert size. Coverage levels for post-HC decreased to pre-HC levels around 450 bp from predicted probe hybridization sites, indicating that these positions in the genome were covered only at background levels, which was expected for non-enriched sequences. In total, between 0.4% and 3.1% of sequence from these four genomes was unenriched following capture, which was a lower range than expected.

[0190] Finally, as there was a high depth of coverage, an attempt was made to assemble the four strains of E. coli using a metagenomic assembler, MetaSPAdes (Nurk, Sergey, Dmitry Meleshko, Anton Korobeynikov, and Pavel A. Pevzner. 2017. “metaSPAdes: A New Versatile Metagenomic Assembler.” Genome Research 27 (5): 824-34). Basic assembly metrics for pre-HC and post-HC data are shown in Table 1. Substantially more E. coli sequence was assembled from the post-HC sequence data, as compared to the pre-HC sequence data. The pre-HC assembly was only 3.9 Mb in total length (less than the length of a single E. coli genome), and was very fragmented, with 2,107 contigs >1 kb in length. The assembly (7.63 Mb) was longer in length than that of the pre-HC assembly, and it was more contiguous (1,602 contigs >1 kb, including one contig that was nearly 60 kb in length).

TABLE 1
Post-HC E. coli assembly is more contiguous and larger.
Data from contigs that were assigned to E. coli based
on taxonomy of blastn results to nt are reported.

| | | | | Number of |
|---|---|---|---|---|
| | Contig N50 | Largest contig | Assembly size* | Contigs** |
| Pre-HC | 2,048 bp | 21.6 kb | 3.90 Mb | 2,107 |
| Post-HC | 7,073 bp | 58.8 kb | 7.63 Mb | 1,602 |

*It is likely that more than one genome was assembled to constitute the Post-HC assembly, as there were four E. coli strains, each with a genome approximately only 5 Mb in size.
**Only including contigs >1 kb in length

### Example 3: Enrichment of E. coli DNA From Metagenomic Libraries Derived From Human Stool Samples

[0191] Having characterized the behavior of the probe set on a known mixture of E. coli, the technology was next applied to stool samples from healthy human volunteers. Stool was collected monthly from a number of participants over the course of a year (10 samples were selected for use in this study, including some samples from multiple time points from the same participant). Multiple E. coli strains were present in the stool of many of the volunteers. Both DNA and RNA were extracted, libraries were created, and E. coli content was enriched using the hybrid capture (HC) probe set. The libraries included 191 DNA libraries and 192 RNA libraries, where to prepare\ some of the libraries 130 stool samples were each individually used to prepare both a DNA library and an RNA library (i.e., 130 DNA libraries and 130 RNA libraries prepared from each of the same respective 130 stool samples). The resulting libraries were then sequenced using Illumina technology. The mean DNA enrichment was 40-fold and the mean RNA enrichment was 23-fold.

[0192] Sequence quality was assessed both pre- and post-hybrid capture (HC) to ascertain whether HC had a noticeable effect on the quality of sequencing data. Sequence and base quality metrics were slightly better for post-HC data (FIGS. 8A-8D). Adapter content for post-HC data was higher than pre-HC data (on average 0.7% vs. 6.8% pre-vs. post-HC, p<0.001, FIG. 8C), likely reflective of smaller insert sizes of the post-HC libraries, which was expected as Nextera Flex kit for enrichment, which was used to generate HC libraries, generates smaller insert sizes on average than the Nextera XT kit, which was used to generate pre-HC libraries. GC content was unaltered by HC (48.65% pre-HC vs. 48.60% post-HC, p>0.1). Taken together, these results suggest minimal impact on overall sequence quality due to HC.

[0193] In order to assess whether different strains were enriched without bias after HC, strain composition of pre- and post-HC data was analyzed using StrainGE (Dijk, Lucas R. van, Bruce J. Walker, Timothy J. Straub, Colin J. Worby, Alexandra Grote, Henry L. Schreiber, Christine Anyansi, et al. 2021. “StrainGE: A Toolkit to Track and Characterize Low-Abundance Strains in Complex Microbial Communities.” Cold Spring Harbor Laboratory. doi.org/10.1101/2021.02.14.431013) (FIGS. 4A and 4B). As seen also in the mock community, E. coli relative abundance was dramatically increased after HC using multi-strain clinical samples, with an average log₂ fold-change of 5.2 (range 4.0 to 7.0), or about 40 times higher, post-HC vs. pre-HC (FIG. 4A). RNA was enriched by about 23-fold. Further, less abundant strains were more highly enriched, while more abundant strains were modestly enriched. This overall increase in relative abundance of E. coli led to high depth and breadth of coverage in post-HC data (FIG. 9), similar to what was seen for the mock mixture. Sequencing of the enriched DNA and RNA allowed for new strains (DNA sequence data) and transcripts (RNA sequence data) to be uncovered that were below the pre-hybrid capture detection threshold.

[0194] For the vast majority of samples, the same strains that were detected pre-HC were also detected post-hybrid capture (HC) (FIG. 4B), indicating that HC was unbiased in its enrichment. In both pre- and post-HC samples, the same strains were often observed across time points from the same participant. Notably, four additional E. coli strains were discovered in post-HC data (points to the left of the dashed vertical line in FIG. 4A; asterisks in FIG. 4B). One of these strains was also detected in a previous time point from the same participant. Overall, these results highlight the power and ability of HC to unearth low abundance strains that traditional methods would fail to detect.

[0195] Due to the dramatic increase in depth and breadth of coverage across the strain genomes (FIG. 9), metagenomic assembly of these samples was attempted to yield E. coli sequence assemblies, as done for the mock community. These assemblies produced varying amounts and quality of E. coli sequence, all being equivalent to at least one E. coli genome in size, with single-strain samples producing more contiguous assemblies than samples with multiple strains (Table 3). A binning method was then used to generate E. coli metagenome-assembled genomes (MAGs) with high levels of completeness and low levels of non-E. coli contamination, as determined by presence of Enterobacteriaceae CheckM marker genes, for all 10 samples (Table 4). A subset of these samples had higher levels of strain heterogeneity, and all of these samples had multiple strains of E. coli detected in the sample. However, there were samples with multiple strains that did not have any strain heterogeneity detectable by CheckM.

TABLE 3
E. coli metagenomic assembly metrics for post-HC stool samples

| Sample | Contig N50 | | Largest contig | | Total content | | Contigs** |
|---|---|---|---|---|---|---|---|
| 3.1 | 53 | kb | 197 | kb | 5.1 | Mb* | 216 |
| 3.4 | 123 | kb | 271 | kb | 5.2 | Mb* | 160 |
| 3.8 | 13 | kb | 41 | kb | 5.6 | Mb* | 1,325 |
| 3.9 | 17 | kb | 58 | kb | 5.5 | Mb* | 986 |
| 7.6 | 213 | kb | 540 | kb | 4.8 | Mb | 55 |
| 7.11 | 31 | kb | 103 | kb | 5.1 | Mb | 302 |
| 19.4 | 98 | kb | 239 | kb | 4.7 | Mb | 136 |
| 28.4 | 11 | kb | 40 | kb | 6.1 | Mb* | 1,494 |
| 28.6 | 10 | kb | 60 | kb | 5.8 | Mb* | 991 |
| 31.5 | 21 | kb | 116 | kb | 5.9 | Mb* | 978 |

*It is possible that more than one genome (i.e., >5 Mb, which is the approximate size of the E. coli genome) was assembled, as multiple strains were detected in the same
**Only including contigs >1 kb in length

TABLE 4
CheckM metrics for E. coli metagenome-assembled genomes (MAGs)
generated from post-hybrid capture (HC) stool samples

| Sample | Completeness | Contamination | Strain Heterogeneity |
|---|---|---|---|
| 3.1 | 99.67% | 0.16% | 0% |
| 3.4 | 99.97% | 0.16% | 0% |
| 3.8 | 77.2% | 0.14% | 0% |
| 3.9 | 86.82% | 0.59% | 55.56% |
| 7.6 | 99.97% | 0.07% | 0% |
| 7.11 | 96.71% | 0.09% | 0% |
| 19.4 | 99.67% | 0.65% | 0% |
| 28.4 | 76.59% | 0.55% | 62.5% |
| 28.6 | 93.24% | 0.26% | 50% |
| 31.5 | 95.38% | 0.33% | 0% |

[0196] In order to assess the bias that HC may have introduced in the non-E. coli content of the metagenome, taxonomic composition of pre-vs. post-HC data was compared by removing E. coli taxa and recalculating relative abundances of the remaining taxa. Pairwise Bray-Curtis dissimilarity values were then calculated for all samples. Pre-vs. post-HC of the same sample were more similar than different samples from the same individual, which themselves were more similar than samples from different individuals (FIG. 10A). These results indicated that, if HC did introduce bias to non-E. coli content, it was less variable than comparing an individual's gut community from one month to another, and far less than comparing different subjects' microbiomes to one another. This pattern was borne out in principal coordinate analysis (PCoA) as tight clustering by sample and, to a lesser extent, subject, rather than by pre-vs. post-HC libraries (FIG. 10B).

### Example 4: Enrichment of E. coli Transcripts From Metatranscriptomic Libraries Derived From Human Stool Samples

[0197] The probe set was next used to enrich E. coli transcripts from RNA sequencing libraries derived from the same stool samples as discussed in Example 3. The first samples to be analyzed were three samples comprising only a single detected E. coli strain. These three samples, two of which were derived from different time points from the same patient, are indicated in FIG. 4B with a “†”. In order to assess overall level of enrichment, the closest reference genome for each of the three samples selected by StrainGST based on analysis of DNA metagenomic data (FIG. 4B) was used to align pre- and post-HC metatranscriptomic data. Selecting the closest reference was done to increase precision and the chances of detecting unique transcripts for each sample's strain.

[0198] The percentage of aligned reads increased for all three samples, modestly so for two (7.11 and 19.4), both with 3.1 log2 fold-change post-HC, and dramatically so for one (7.6), with a 10.2 log2 fold-change post-HC (348 aligned reads pre-HC [0.003%] and 181,372 aligned reads post-HC [3.4%]). These increases in aligned reads also led to increases in both the number of unique transcripts detected and an overall increase in normalized expression for almost all transcripts in the post-HC data (FIG. 5A). For the two samples where there was sufficient pre-HC expression for detection and analysis, post-HC expression was highly and significantly correlated (log-transformed data, R²=0.74, p<10-15) for transcripts that were detected (≥10 CPM) in both pre- and post-HC data (FIG. 5A).

[0199] The analysis was next expanded to all RNA samples, including those with more than one E. coli strain. Reads were aligned to the concatenated reference of all strains found in each individual (whether or not they were present at a given time point/sample). The percentage of reads aligning to the reference was increased post-HC in all samples, with a mean log₂ fold-change of 4.5 (range 3 to 10.2), or about 23 times higher percent aligned reads post-HC. Due to this successful enrichment, on average 167 (range of 28-366, total of 1,472 unique transcripts across all samples) transcripts per sample were detected post-HC that were not detected pre-HC (FIG. 5B). In contrast, there was minimal transcript drop-out due to HC. Two unique transcripts in one sample (3.4) were detected exclusively in pre-HC data, both of which were multispecies proteins common to Enterobacteriaceae encoded on the same plasmid found in the E. coli 1190 reference.

### Discussion

[0200] Here, it has been demonstrated that the pan-genome-based probe set, which was designed to capture the immense diversity of E. coli, successfully enriched both DNA and RNA sequences from known mixtures and clinical samples, both containing mixes of diverse E. coli strains, in an unbiased fashion. This enrichment allowed for near complete observations of all four known strains of E. coli from a mock mixture, as well as for detection of novel strains in human stool samples that were below the limit of detection pre-HC.

[0201] Further, this enrichment was relatively unbiased, as the diverse set of strains detected pre-HC were also detected, at higher abundance, post-HC. It was further determined that the non-E. coli content of the metagenome was also minimally biased. This suggests that one may be able to perform HC on a sample and not also have to sequence a pre-hybrid capture (HC) library, potentially saving time, money, and precious sample material, while thoroughly investigating the E. coli content of the sample.

[0202] This enrichment of E. coli allowed for a wide range of analyses that were previously impractical and cost-prohibitive due to the required amount of deep sequencing. Large contigs of E. coli sequence were successfully assembled from post-HC data, suggesting that near complete E. coli references may be obtained from clinical samples without the need for culture. Tools that specifically attempt to disentangle strain resolution in metagenomic assemblies, such as DESMAN (Quince, Christopher, Tom O. Delmont, Sébastien Raguideau, Johannes Alneberg, Aaron E. Darling, Gavin Collins, and A. Murat Eren. 2017. “DESMAN: A New Tool for de Novo Extraction of Strains from Metagenomes.” Genome Biology 18 (1): 181) and STRONG (Quince, Christopher, Sergey Nurk, Sebastien Raguideau, Robert James, Orkun S. Soyer, J. Kimberly Summers, Antoine Limasset, A. Murat Eren, Rayan Chikhi, and Aaron E. Darling. 2020. “Metagenomics Strain Resolution on Assembly Graphs.” Cold Spring Harbor Laboratory. doi.org/10.1101/2020.09.06.284828), may be useful for robust assembly of multiple strains.

[0203] Hybrid capture (HC) also enriched E. coli content from metatranscriptomic libraries in an unbiased manner. 1,608 unique transcripts were recovered in post-HC data that were not detected pre-HC. Thus, hybrid capture (HC) can provide the sensitivity required to analyze and compare otherwise cryptic gene expression patterns of low-abundance E. coli in the human gut.

[0204] This probe set can provide a valuable tool to push forward the study and understanding of E. coli in metagenomic contexts, including the gut niche. Understanding how commensal and pathogenic E. coli strains differ in their gene content and expression, how E. coli responds to antibiotics, and the dynamics of E. coli over time and disease in vivo can uncover exciting biology and lead to alternative therapeutic options for diseases caused by E. coli. Further applications outside the gut include detection of E. coli in other specimens and environments in which it would be of low abundance, including the study of other body sites such as the skin or bladder, or even applications such as pathogen surveillance at hospitals and in the food industry.

[0205] The exclusion of a gene from probe design does not necessarily mean that the probe set won't capture the gene, as they could still share enough sequence identity to, or could be found in close enough physical proximity to genes that were included in probe design. Further, data showed that the hybrid capture probes covered some genes and orthogroups that were not specifically part of the design set, so genes may be enriched from genomes not used in probe design.

[0206] The probes can be suitable for use in long read sequencing technologies, such as those discussed in Bertrand, Denis, Jim Shaw, Manesh Kalathiyappan, Amanda Hui Qi Ng, M. Senthil Kumar, Chenhao Li, Mirta Dvornicic, et al. 2019. “Hybrid Metagenomic Assembly Enables High-Resolution Analysis of Resistance Determinants and Mobile Elements in Human Microbiomes.” Nature Biotechnology 37 (8): 937-44. The probes can be applied in some embodiments to long, native strands of metagenomic DNA. A combination of hybrid-captured short-read sequencing and native long-read sequencing may be useful for metagenomic assembly of low-abundant organisms.

[0207] This hybrid capture methodology represents a cost-effective alternative to ultra-deep metagenomic sequencing to examine low-abundance species. Though E. coli was chosen for this study, this pan-genome-based approach for probe design can also be suitable for other sequenced bacteria, including, as a non-limiting example, those that are: 1) at low abundance in their environment; 2) well-studied with numerous representative reference genomes; and/or 3) genetically complex and diverse.

[0208] Computationally designed hybrid capture (HC) probes targeting a pan-genome provide a promising method to enrich sequences derived from low-abundance, highly diverse species in complex metagenomic and metatranscriptomic communities. Using this method, E. coli sequence was successfully enriched from both a mock mixture of four diverse strains of E. coli in 99% human background, as well as from human stool samples. E. coli was enriched, on average, 40-fold (for DNA) and 23-fold (for RNA) post-hybrid capture. This probe set, and the hybrid capture methods described herein, will be useful to many applications where researchers and clinicians are interested in low-abundance but diverse microbes, such as E. coli.

### Example 5: Probe-Based Enrichment Greatly Increased Coverage of the E. coli Pan-Genome in Metagenomic Sequencing Data Exposing Regulation of a Clinically Relevant Urovirulence Factor from Gut Meta'omes

[0209] Clinically important microbes are often found at low abundances (<1%) within complex communities, presenting a challenge for their investigation. In order to gain a high-resolution view of one such gut-associated bacterial species, a set of hybrid capture probes was designed, as described above, to represent the more than 8 million genes of the Escherichia coli pangenome (FIG. 11). The approach enriched E. coli sequence from stool DNA libraries by an average of approximately 40-fold, and from stool RNA libraries by approximately 23-fold with little to no bias in the breadth or depth of sequencing coverage. As a demonstration of the enhanced resolution provided by this approach, experiments were undertaken to evaluate the expression of the fim operon encoding Type 1 fimbriae (also known as “pili”), which is an important urovirulence factor having a role in invasion of bladder urothelial cells in urinary tract infections (UTIs) and is regulated by an invertible promoter, fimS. Type 1 fimbriae are hair-like fimbriae used by E. coli to attach to uroepithelial cells. Increased expression of Type 1 fimbriae in the guts of subjects with recurrent urinary tract infections (rUTIs) could be a contributing factor to increased UTI frequency. Type 1 fimbriae allow for E. coli to bind epithelial cells of a host urinary tract and are upregulated in isolates from urinary tract infections. Using data from libraries enriched with the E. coli pangenome probes, estimates were successfully made of the proportion of fimS in the “on” orientation within the gut microbiota of women with and without a history of recurrent UTI, as well as a recapitulation of the established dependence of fim operon expression on fimS orientation. The fimS orientation (FIGS. 12A-12C) can be observed through alignments to boundary regions. These experiments, which are detailed further below, demonstrated the power of the E. coli hybrid capture methodology to yield unprecedented insight into E. coli dynamics within real world contexts where the genetics of the E. coli are unknown, and their relative abundances are low.

[0210] The genomic region for the fim operon promoter is shown in FIG. 12A and FIG. 12C provides a schematic showing fimS phase variation (i.e., inversion of a region of the fim operon promoter to the on and off configurations). The fim operon promoter (fimS) is invertible, where the inversion is associated with recombinases encoded upstream of the fim operon. The fimS orientation can be determined through alignments to the boundary region of fimS, which does not undergo inversions. To be meaningful, such alignments should span both a portion of fimS and a portion of a surrounding region (FIG. 12B). On account of challenges presented by deep metagenome sequence, variation in gut microbiome fimS orientation was largely unknown previously.

[0211] The E. coli pangenome was sequenced and analyzed for stool samples collected from participants in the Urinary Tract Infection Microbiome (UMB) Project (see Worby, C. J., Schreiber, H. L., Straub, T. J. et al. Longitudinal multi-omics analyses link gut microbiome dysbiosis with recurrent urinary tract infections in women. Nat Microbiol 7, 630-639 (2022)) (FIG. 19). The hybrid capture probes successfully enriched boundary regions of fimS (FIG. 13). Hybrid capture sequencing indicated that the fim operon was carried by almost all subjects participating in the UMB project having gut E. coli (FIG. 14). The fimS reads were detected in 178 out of 191 enriched samples. Samples lacking fimS had extremely low abundances of E. coli. Hybrid capture provided about 10× enrichment of both inversion phases of the fimS promoter (FIG. 15). Only 65 pre-hybrid capture samples had a read aligning to fimS. In the UMB dataset, the average sample had 4.3% fimS activation (from weighted least squared: 4.3% +/−0.74%; n=178) (FIG. 16). There was high inter-patient and inter-sample variability of fimS activation (11/178 samples had fimS-ON%>10% (α=0.05). No significant difference in activation was found between cohorts (i.e., a cohort of women with a history of rUTI and a cohort of matched healthy women) despite significant intra-individual variation. In this analysis, fimS' was overwhelmingly in the “off” configuration in the rUTI cohort stool metagenomes (103/178 samples lacked fimS-O) N reads). Therefore, hybrid capture led to an increase in fimS coverage of about 14× relative to non-enriched samples and allowed for analysis of the regulation of Type 1 fimbriae in stool meta'omes at high resolution.

[0212] Paired RNA hybrid capture samples allowed for analysis of fim operon expression (FIG. 17). Sequencing of RNA enriched using RNA hybrid capture revealed low expression of the fim operon. The average coverage of the protein-coding region of the operon (fimA-fimH) was 138 reads. Samples with lower abundances of E. coli were filtered out prior to analysis using the following filter: 80,000 reads aligning to an E. coli reference genome; E. coli detected in DNA and RNA to a depth of greater than 80 k (71 out of 130 samples met this depth criterion). Sequence data prepared using samples enriched using hybrid capture recapitulated the expected relationship between fimS orientation and operon expression (p<1e-8) (FIG. 18). Operon expression was significantly dependent on operon orientation (i.e., fimS-ON%). Operon expression was determined by aligning RNA sequence reads to the protein coding region of the fim operon and normalizing by sample E. coli content. This relationship was not detected using non-enriched samples.

[0213] Analysis of sequence data prepared using samples enriched using hybrid capture revealed heterogeneity of strain-specific fim expression within multi-strain samples. For strain deconvolution, strain-specific single-nucleotide polymorphisms (SNPs) were detected using the StrainGE suite (van Dijk, L. R., et al., “StrainGE: a toolkit to track and characterize low-abundance strains in complex microbial communities,”0 Genome Biol 23, 74 (2022). doi: 10.1186/s13059-022-02030-0) (FIG. 20). On average >70% fim-aligning DNA and RNA reads per multi-strain sample could be assigned to a strain using strain-specific SNPs.

[0214] Hybrid capture enabled the study of expression and regulation from a metagenomic context. Using the hybrid capture probes, E. coli DNA was enriched by about 40-fold and E. coli RNA was enriched by about 23-fold. Enrichment increased coverage of genomic sites that were up to 450 bp away from a probe-binding site. By sequencing DNA and RNA samples collected from participants in the Urinary Tract Infection Microbiome (UMB) Project enriched using the hybrid-capture probes, it was determined that at least about 3% of fimS promoters detected were in the “on” configuration and that there was a detectable correlation between fimS orientation and fim operon expression.

### METHODS OF THE EXAMPLES

[0215] The following methods were employed in the above examples.

### Probe Design

[0216] In June 2017, all 295 E. coli and Shigella (herein collectively referred to as E. coli) complete genomes were downloaded from NCBI RefSeq. In addition, to obtain a larger diverse collection of references, 3,141 publicly available, high quality (L50<20) genomes of E. coli that were listed in the NCBI Pathogen Detection database were downloaded from GenBank from July to August 2017 (Table 4). Of these, 136 Genbank genomes were redundant with (i.e., identical) RefSeq complete genomes.

[0217] In order to remove redundant and nearly identical genomes, k-mer based clustering was performed. All 3,141 Genbank genomes were k-merized (using 23-mers) with the StrainGST “kmerize” tool from StrainGE (Dijk, Lucas R. van, Bruce J. Walker, Timothy J. Straub, Colin J. Worby, Alexandra Grote, Henry L. Schreiber, Christine Anyansi, et al. 2021. “StrainGE: A Toolkit to Track and Characterize Low-Abundance Strains in Complex Microbial Communities.” (Cold Spring Harbor Laboratory. doi.org/10.1101/2021.02.14.431013), then their pairwise all-vs-all Jaccard similarities were calculated. Single-linkage clustering was performed on these similarities at a 95% threshold to construct genome clusters. This generated 1,485 clusters, of which 1,124 contained a single genome and 361 contained two or more Genbank genomes.

[0218] The GenBank accession numbers for the 3,141 genomes (“the 3, 141 GenBank genomes”) were the following, where the identifier “GCA” (i.e., the designation as GenBank assemblies) that precedes each number has been omitted: 000462285.2; 000249095.2; 000447145.2; 000987875.1; 000778215.1; 000460875.1; 000753515.1; 000407725.1; 001284285.1; 000617245.2; 001269145.1; 000782055.1; 000223035.2; 001059155.1; 001286085.1; 000408605.1; 000776065.1; 000458155.1; 000800215.1; 000768465.1; 000235205.1; 001419885.1; 000713745.1; 000303615.2; 000352265.1; 000351705.1; 000776285.1; 000781715.1; 000459335.1; 000350825.1; 000778055.1; 001281775.1; 000618545.1; 001467005.1; 000713345.1; 000250175.2; 001266435.1; 000316885.2; 000601315.1; 000172015.1; 000819205.1; 000357025.2; 000948055.1; 000494995.1; 000355435.2; 000249815.2; 000326225.1; 000752975.1; 000617765.2; 000711375.1; 000700265.1; 000522325.1; 000617725.2; 000267305.2; 000459135.1; 000785765.1; 000457955.1; 000714385.1; 001446595.1; 001283185.1; 000778235.1; 000704945.1; 000467695.1; 000249355.2; 001266005.1; 001463405.1; 000241995.1; 000614595.1; 001561105.1; 000459795.1; 000352185.1; 000356585.2; 001265655.1; 000714145.1; 000703625.1; 000777815.1; 001012275.1; 000461035.1; 000779995.1; 000258865.1; 001281725.1; 000778015.1; 001284845.1; 001268625.1; 000798055.1; 001277475.1; 000460175.1; 000267865.2; 001309475.1; 000647495.1; 000350745.1; 000618125.1; 000704265.1; 000351865.1; 000351905.1; 000780335.1; 000350005.1; 000703605.1; 000258615.1; 000303995.2; 000358355.2; 001283465.1; 000812715.1; 000418595.1; 000974535.1; 000194705.2; 001262855.1; 000781995.1; 000714135.1; 000777095.1; 000781935.1; 000779675.1; 000618145.2; 001012495.1; 001561285.1; 001284865.1; 000704065.1; 000778895.1; 000356905.1; 000193975.2; 000940035.2; 000459015.1; 001010165.1; 000354735.2; 000352405.1; 000711365.1; 000617565.1; 000356545.1; 000615385.1; 000618785.1; 000320175.1; 001266445.1; 000225205.2; 000753035.1; 000781435.1; 000941935.1; 000711455.1; 000692795.1; 001419845.1; 000622445.2; 000326885.1; 001562375.1; 000350925.1; 000335075.2; 000692815.1; 000357885.2; 000779025.1; 000814525.1; 000780655.1; 000446845.2; 000302715.1; 000247665.4; 001277515.1; 001262865.1; 000458995.1; 000194575.2; 000474825.1; 001284085.1; 000617625.2; 000616405.2; 000498255.1; 000462885.2; 000303855.2; 000622265.1; 000713035.1; 000358495.2; 000714105.1; 000249755.2; 001285765.1; 000704105.1; 000522085.1; 000782815.1; 000617745.1; 000459075.1; 000687085.1; 000184765.2; 000352585.1; 000619545.2; 000458115.1; 000281775.1; 000164495.1; 000690815.1; 000351825.1; 000827105.1; 000462405.2; 001264195.1; 000471245.1; 001485455.1; 000937095.2; 000457285.1; 000782375.1; 000446135.2; 000350725.1; 000350965.1; 000703245.1; 000354975.1; 001268405.1; 000462905.2; 000780835.1; 001265155.1; 000614305.2; 001286185.1; 001281965.1; 000458495.1; 000647455.1; 000462505.2; 000408045.1; 000776255.1; 000249455.2; 000459155.1; 000249775.2; 000224395.2; 000397465.1; 000457555.1; 001191265.1; 000713135.1; 000316445.2; 000622735.2; 000261405.1; 001283585.1; 000945615.2; 000407785.1; 000780435.1; 000779745.1; 000798075.1; 000461635.1; 000233675.2; 000458665.1; 000456925.1; 000768415.1; 000692575.1; 001268785.1; 001191375.1; 000026325.2; 000752835.1; 000615015.1; 000352065.1; 000713685.1; 000303255.2; 000713985.1; 000457225.1; 000171915.1; 001186315.2; 000777135.1; 000176635.2; 000647795.2; 000234255.3; 000352865.1; 000356505.2; 001550005.1; 001265575.1; 000025165.1; 000350025.2; 000462365.2; 000461275.1; 000460595.1; 000797715.1; 000460555.1; 000326725.1; 000714065.1; 000704445.1; 000714595.1; 000461715.1; 000494935.1; 000335135.1; 000352505.1; 001281985.1; 000703265.1; 000460395.1; 000777435.1; 000488555.1; 000215245.2; 001052755.1; 001262935.1; 000619565.2; 000780215.1; 000326525.1; 000703905.1; 000462745.2; 000211395.2; 000461435.1; 001561255.1; 000700185.1; 000619245.1; 001309815.1; 000456265.1; 000358085.2; 000616075.2; 000601155.1; 000616285.1; 000743255.1; 000599665.1; 000974865.1; 001282225.1; 000462105.2; 000351765.1; 001520015.1; 000779255.1; 000351345.1; 000010245.1; 000326945.1; 001309615.1; 000249835.2; 000193995.2; 000355415.2; 000776315.1; 000458355.1; 000235145.1; 000779615.1; 000249135.2; 001282215.1; 001462975.1; 000778075.1; 000356565.1; 001561555.1; 000779095.1; 000632615.2; 000797855.1; 000354855.1; 000458725.1; 000459455.1; 000776655.1; 000456165.1; 000614845.2; 001420065.1; 000408625.1; 000618325.1; 000511565.1; 000178315.1; 001266295.1; 001065165.1; 000937855.1; 000601275.1; 001262775.1; 000295775.2; 000357225.2; 000303715.2; 000778745.1; 000358995.1; 001561375.1; 000460735.1; 000704205.1; 000619125.2; 000326205.1; 000488075.1; 000166615.2; 000351445.1; 000692895.1; 000752735.1; 000618085.1; 001268925.1; 000397245.1; 000304095.2; 000692735.1; 000461475.1; 001012335.1; 000460195.1; 000358555.1; 000357825.2; 000356965.1; 000250335.2; 000456065.1; 000316565.2; 000250515.2; 001561515.1; 000617425.1; 001285565.1; 000704045.1; 000778545.1; 000457775.1; 000782435.1; 000321145.1; 000482065.1; 001519315.1; 000356045.2; 001281685.1; 000408305.1; 000267105.1; 000982435.1; 001519675.1; 000627945.1; 000503635.1; 000460335.1; 000944015.1; 000263895.1; 001413455.1; 000778275.1; 000522205.1; 000215165.1; 000354495.2; 000700225.1; 000753215.1; 000026345.1; 000495095.1; 000948785.1; 001268345.1; 001542675.2; 001284725.1; 000614255.1; 000350845.1; 001561835.1; 000627315.1; 001561785.1; 000617605.2; 001191315.1; 001012085.1; 000459435.1; 000773475.1; 000615175.1; 000978845.1; 000313445.1; 000356805.2; 000461675.1; 000250495.2; 000326545.1; 000164375.1; 000714975.1; 000619365.1; 000176555.2; 000619445.1; 000026245.1; 000780895.1; 000358735.1; 000798155.1; 000616705.2; 001277535.1; 001268365.1; 000303835.2; 000358855.2; 001077945.1; 001286665.1; 000488095.1; 000599685.1; 000981485.1; 000617145.2; 000819245.1; 000446325.2; 000781895.1; 000517245.1; 000456025.1; 000194555.2; 001268585.1; 000522265.1; 001191205.1; 000473725.2; 001419825.1; 000352905.1; 000267185.1; 001039225.1; 000488055.1; 000618065.2; 000951745.1; 000780555.1; 000460155.1; 001284065.1; 000752355.1; 000354815.2; 000462565.2; 000356685.2; 001285825.1; 000178695.1; 001519715.1; 000495075.1; 001297985.1; 000249535.2; 000782035.1; 000618945.2; 001413745.1; 000358615.2; 000692475.1; 000457125.1; 000460495.1; 000194495.2; 000355555.2; 001306605.1; 000785795.1; 000210475.1; 000387865.2; 001062415.1; 000695505.1; 000459195.1; 001284005.1; 000397445.1; 001269065.1; 000459175.1; 000351625.1; 001519875.1; 000752535.1; 000026265.1; 001520775.1; 000711435.1; 000782155.1; 001268705.1; 000459815.1; 000457185.1; 000797655.1; 000458315.1; 000303935.2; 001268905.1; 000953515.1; 001269265.1; 000503655.1; 000356705.1; 000447085.2; 000752875.1; 000778765.1; 000687125.1; 000522305.1; 000753135.1; 000703925.1; 000511505.1; 001519285.1; 000460615.1; 000496995.1; 000354935.2; 001561015.1; 000459515.1; 001012105.1; 001286125.1; 001413875.1; 000616245.1; 000167875.1; 000356005.2; 000974465.1; 000176595.2; 000781695.1; 001413685.1; 000703565.1; 000777675.1; 000461735.1; 001561275.1; 000171975.1; 000457815.1; 000194235.2; 000335215.2; 000355515.2; 000456385.1; 001064885.1; 001561575.1; 000303635.2; 000351185.1; 000458915.1; 001309455.1; 000627855.1; 001268825.1; 000235185.1; 001056975.1; 000352345.1; 000267385.2; 000462485.2; 000601295.1; 000618025.1; 000695135.1; 000194475.2; 001286105.1; 000614515.1; 000460035.1; 000776965.1; 000326645.1; 000331615.1; 000781635.1; 001268485.1; 000352565.1; 000446345.2; 000780295.1; 000713425.1; 000356745.2; 000627175.1; 000777535.1; 000782015.1; 001269045.1; 000493755.1; 000779545.1; 000457695.1; 001561135.1; 000461315.1; 001191215.1; 000352125.1; 000458875.1; 001284025.1; 000701105.2; 000407665.1; 000507665.1; 000447065.2; 000267765.2; 000780135.1; 000616305.2; 000316345.2; 000457935.1; 000704405.1; 000780235.1; 000357985.2; 000326145.1; 000768485.1; 000488435.1; 001268525.1; 000462425.2; 000458035.1; 000460135.1; 000250295.2; 000777845.1; 000495015.1; 000462165.2; 000462645.2; 000459315.1; 000776235.1; 000777735.1; 001519115.1; 000777695.1; 000335415.2; 000352925.1; 001282345.1; 001285125.1; 000351305.1; 000458055.1; 001266335.1; 000619745.2; 000488475.1; 000617965.1; 000700105.1; 000703645.1; 001283965.1; 000267925.2; 000326485.1; 000457515.1; 000616135.2; 000352785.1; 000777475.1; 000357765.2; 000355235.2; 000798575.1; 000714225.1; 000358935.2; 001413885.1; 000326705.1; 000333195.1; 001268865.1; 000456485.1; 000511445.1; 001420165.1; 000616545.2; 000461095.1; 001297725.1; 001055685.1; 000782715.1; 000617265.1; 000326805.1; 000617685.1; 000941895.1; 000407805.1; 000749565.1; 000258145.1; 000407985.1; 000190995.1; 001077935.1; 000304135.2; 000627925.1; 001419925.1; 000617445.2; 000465135.1; 000780395.1; 001419965.1; 000303735.2; 000615695.1; 000619145.1; 001282375.1; 000939195.1; 000781375.1; 000619005.2; 000181775.1; 000304875.2; 000181735.1; 001544635.1; 001056665.1; 000357845.2; 000357665.2; 000194725.2; 001012075.1; 000777325.1; 000616465.2; 001283385.1; 000692615.1; 001012195.1; 000967155.1; 000176535.2; 000831565.1; 000175735.1; 000358375.1; 000713935.1; 000456525.1; 000458175.1; 000305395.2; 000397285.1; 000022225.1; 000316405.2; 001441335.1; 001277415.1; 000459595.1; 001011995.1; 000357705.2; 000264095.1; 000779795.1; 000250395.2; 000807565.1; 000250555.2; 000687045.1; 000303375.2; 000692855.1; 000215205.2; 000617485.2; 000397705.1; 001262965.1; 001265795.1; 000446525.2; 000818995.1; 000408245.1; 000326665.1; 000407965.1; 000408365.1; 001562755.1; 000447005.2; 000356025.2; 001448025.1; 000507685.1; 001285445.1; 001309735.1; 000461395.1; 000700625.1; 000939755.1; 001520875.1; 000714015.1; 000830035.1; 000462525.2; 001056895.1; 000618825.1; 000703345.1; 000357345.2; 000713605.1; 000714415.1; 000460715.1; 001284605.1; 000703865.1; 000829985.1; 000461415.1; 000176615.2; 000482045.1; 000460695.1; 000812785.1; 001277455.1; 000217975.2; 000313405.1; 000305155.2; 000194645.2; 000798395.1; 000408545.1; 000235085.1; 000408445.1; 000703705.1; 000194335.2; 001469815.1; 000492275.1; 000512625.1; 000948905.1; 000617505.2; 000782415.1; 000813165.1; 000782135.1; 000779915.1; 000397265.1; 000021125.1; 000167855.1; 000782395.1; 001269085.1; 000938995.1; 000785775.1; 000358245.2; 001265755.1; 000326185.1; 000485635.1; 000819065.1; 001561675.1; 000714375.1; 001509735.1; 000507645.1; 000776815.1; 000457855.1; 001012535.1; 000408565.1; 000704145.1; 000350985.1; 000782475.1; 000335175.2; 001561495.1; 000713775.1; 000234215.2; 000778465.1; 000459235.1; 001285065.1; 000459975.1; 000807635.1; 000352705.1; 000801185.2; 000752815.1; 000614965.1; 000797795.1; 000615225.2; 000700345.1; 001280405.1; 000249935.2; 001262805.1; 000249875.2; 000462765.2; 000627195.1; 000460215.1; 001284385.1; 000456285.1; 001519975.1; 000619765.2; 001191465.1; 000703325.1; 000522245.1; 000700585.1; 000576655.1; 000713015.1; 001266115.1; 000622465.2; 000485695.1; 000304855.2; 000194685.2; 000267405.2; 000696545.1; 000401755.1; 001284785.1; 001054095.1; 001306715.1; 000159295.1; 000704165.1; 001455385.1; 000713945.1; 000714175.1; 001561335.1; 001309715.1; 000461875.1; 000695155.1; 000446805.2; 000601355.1; 000163215.1; 000352545.1; 001281815.1; 000752935.1; 001285985.1; 000351965.1; 000798475.1; 000326165.1; 000351585.1; 001268945.1; 000777625.1; 000713335.1; 000779975.1; 001432195.1; 000941995.1; 000619425.1; 000418655.1; 000781605.1; 000260475.1; 001420075.1; 000457475.1; 000819085.1; 000752595.1; 000164315.1; 000019425.1; 000936085.2; 000358435.2; 001286225.1; 000522165.1; 000446115.2; 001282035.1; 000357605.2; 001267345.1; 000495035.1; 000350645.1; 001413005.1; 000965575.1; 000223015.2; 000304255.1; 000261385.1; 000273425.1; 000692695.1; 000460015.1; 001286425.1; 001420955.1; 000704705.1; 000776565.1; 000779955.1; 000179795.1; 000408465.1; 001280325.1; 000408105.1; 000714895.1; 000233875.1; 000617985.2; 001563395.1; 000458235.1; 000782575.1; 000351005.1; 000781455.1; 000250195.2; 000782695.1; 001542545.1; 000335155.2; 000781415.1; 001561295.1; 000647475.1; 001014795.1; 000713025.1; 000780755.1; 000965715.1; 000713255.1; 000781875.1; 001283405.1; 000353025.1; 000704365.1; 001561445.1; 001265885.1; 000408685.1; 000194215.2; 000356645.2; 001519755.1; 001268325.1; 001283365.1; 000692555.1; 000304015.2; 001559655.1; 000616225.2; 000471445.1; 000781485.1; 000781555.1; 001283925.1; 001268265.1; 001265295.1; 000752635.1; 000776415.1; 000351545.1; 000353005.1; 001286465.1; 000354555.2; 000615455.2; 000249915.2; 001463205.1; 000616745.1; 000358875.1; 001309645.1; 000776375.1; 000798175.1; 000779275.1; 000249375.2; 000695115.1; 000461995.2; 001284765.1; 001264215.1; 000704785.1; 000768405.1; 000326905.1; 000622285.2; 000614885.2; 000457575.1; 000819355.1; 000617205.1; 000804365.1; 000798095.1; 001309885.1; 000235045.1; 000442065.2; 001269325.1; 000614085.2; 001561635.1; 001056965.1; 000456765.1; 000353145.1; 000713855.1; 000806275.1; 001269025.1; 000461335.1; 000700665.1; 000940255.1; 000782195.1; 000447045.2; 000167915.2; 000704725.1; 000457265.1; 000250315.2; 000798315.1; 000704285.1; 000615085.1; 001420055.1; 001309675.1; 000779175.1; 001412995.1; 000988355.1; 000776855.1; 000249615.2; 000249435.2; 000351605.1; 000459355.1; 000352245.1; 000488835.1; 000703745.1; 000780915.1; 001191115.1; 000456625.1; 000446305.2; 001076455.1; 000352025.1; 001283665.1; 000700305.1; 000616725.2; 001269005.1; 000776505.1; 000965635.1; 000017765.1; 001265165.1; 000225225.2; 000488655.1; 000456865.1; 000692635.1; 000458705.1; 000485715.1; 000522185.1; 000617285.2; 001268985.1; 001519235.1; 000355495.2; 000320155.1; 001561455.1; 001297975.1; 001519475.1; 000166555.2; 000780995.1; 000457595.1; 001266405.1; 000457735.1; 000013265.1; 001283685.1; 000326845.1; 001063835.1; 000798295.1; 000713675.1; 000833635.2; 000188855.2; 000692395.1; 000459755.1; 000488015.1; 000351405.1; 000782595.1; 000193955.2; 000699365.1; 000614725.2; 000408705.1; 000615865.2; 000333215.1; 000316485.1; 000704545.1; 000219515.3; 000704125.1; 000781335.1; 001191195.1; 000713495.1; 001284185.1; 000770275.1; 001183685.1; 000335335.2; 000458475.1; 000262125.1; 000461155.1; 000351425.1; 001309925.1; 001285045.1; 000488715.1; 000704625.1; 000183005.2; 000779265.1; 000770285.1; 000352945.1; 000704525.1; 001266015.1; 000797815.1; 000458255.1; 000776215.1; 001309825.1; 000461255.1; 001561195.1; 000777555.1; 001286565.1; 000616365.1; 000225045.2; 000461295.1; 000704645.1; 000948615.1; 000267085.1; 000303535.2; 001265435.1; 001268385.1; 000708165.1; 000714295.1; 000711485.1; 001563405.1; 000699285.1; 000355395.2; 000007445.1; 000459415.1; 000607285.1; 000488155.1; 001277435.1; 000418635.1; 000458805.1; 000713695.1; 001277715.1; 000364305.1; 000506445.2; 000947315.1; 000951895.1; 001191275.1; 000459115.1; 000408125.1; 001266255.1; 000778705.1; 000782255.1; 000400895.2; 000692595.1; 000690965.1; 001561685.1; 001285965.1; 001419785.1; 000781275.1; 001059795.1; 001284445.1; 000776035.1; 000355475.2; 001285725.1; 000408745.1; 001413415.1; 000713235.1; 000781575.1; 000408205.1; 000701125.2; 001277555.1; 000782535.1; 000351265.1; 000776595.1; 001191425.1; 000358005.2; 000460475.1; 000946755.2; 000704005.1; 000617705.2; 000250095.2; 000249735.2; 000460915.1; 000304835.2; 000779215.1; 000627905.1; 001561755.1; 000267005.2; 000819185.1; 000777065.1; 000408145.1; 000704825.1; 000457205.1; 000352285.1; 001283145.1; 001420125.1; 000714335.1; 001309755.1; 000503335.1; 000351945.1; 000458625.1; 000951755.1; 000351485.1; 000249715.2; 000326745.1; 001285165.1; 000614925.2; 000387805.2; 000503255.1; 000704845.1; 000168095.1; 000249515.2; 000782675.1; 000939955.1; 000354615.2; 001281995.1; 000352425.1; 000503475.1; 000353045.1; 000351285.1; 000164515.1; 000457875.1; 000356125.1; 000711355.1; 000461515.1; 000496345.2; 000529975.1; 000713455.1; 000704425.1; 000226585.1; 000618365.1; 000459275.1; 000316365.2; 000164215.1; 000492255.1; 000408285.1; 000988385.1; 001282155.1; 000457795.1; 001284985.1; 001286365.1; 000305415.2; 001263015.1; 000780115.1; 000618205.2; 000267165.1; 001413605.1; 000460375.1; 000619205.2; 000215265.2; 001282235.1; 001284485.1; 000250255.2; 000354515.2; 000316845.2; 000320215.1; 000496365.2; 000303955.2; 000616425.2; 000831335.1; 000797675.1; 000326365.1; 000948565.1; 000234235.2; 000617225.1; 001183645.1; 000614405.2; 000714955.1; 000460755.1; 000614345.2; 000460055.1; 001012445.1; 000703225.1; 000397725.1; 000187345.2; 000352005.1; 001277575.1; 001285305.1; 000619085.2; 001281915.1; 000459555.1; 000267605.2; 001265255.1; 000488755.1; 000316385.2; 001285205.1; 000692875.1; 000462685.2; 000326565.1; 000627135.1; 000358415.2; 001266225.1; 000179155.1; 000798495.1; 000753115.1; 001284345.1; 000778585.1; 001269285.1; 000627985.1; 001277735.1; 000692435.1; 000779635.1; 000497015.1; 000458375.1; 000456645.1; 000187325.2; 000351045.1; 000782175.1; 000798135.1; 000304035.2; 000351165.1; 000459675.1; 000782555.1; 000008865.1; 000456825.1; 001284825.1; 000358125.1; 000779815.1; 000692835.1; 001421045.1; 000358025.2; 000986635.1; 000511465.1; 000752915.1; 000662395.1; 000948765.1; 000971615.1; 000303775.2; 000460855.1; 000352085.1; 000461815.1; 000714265.1; 001561765.1; 000303515.2; 000249495.2; 000303495.2; 000798455.1; 000488135.1; 000945955.1; 000250435.2; 000459615.1; 000304115.2; 000618245.1; 000458395.1; 000303415.2; 001282065.1; 000704565.1; 000714915.1; 000463605.1; 000148605.1; 001285685.1; 000773435.1; 000267285.2; 001265675.1; 000354475.2; 000599745.2; 000461115.1; 000017985.1; 000355335.2; 001277755.1; 000351085.1; 000163155.1; 000358285.2; 001262895.1; 000488115.1; 000948955.1; 000249295.2; 000285375.1; 000687005.1; 000358045.2; 000352845.1; 000798015.1; 000627885.1; 000326245.1; 001561355.1; 000304055.2; 000777495.1; 001284305.1; 000352745.1; 000308975.2; 000456145.1; 000340275.1; 000461695.1; 001265235.1; 000700365.1; 000777285.1; 000460575.1; 000249275.2; 001052705.1; 000713275.1; 000408025.1; 000700405.1; 000711475.1; 000618305.2; 000267825.2; 000522405.1; 000781315.1; 001309995.1; 000937415.1; 000316905.2; 000506505.1; 001266375.1; 000954045.1; 000618625.1; 000446705.2; 000778095.1; 000462045.2; 000773535.1; 001265315.1; 001463115.1; 000619185.1; 000176695.2; 000456185.1; 000358455.2; 000164255.1; 000617785.1; 001455405.1; 000148365.1; 001268645.1; 000488595.1; 000619065.2; 000458135.1; 000351925.1; 000781515.1; 000410675.2; 000615815.2; 000780375.1; 000355275.2; 001306685.1; 000355175.1; 000461535.1; 000703425.1; 001286045.1; 000752455.1; 000781735.1; 000715035.1; 000462665.2; 000618225.2; 000249195.2; 000618805.1; 000776355.1; 000506825.1; 001284545.1; 000619725.2; 001561815.1; 000619265.2; 000948825.1; 000777975.1; 000776435.1; 001262975.1; 000408665.1; 000779005.1; 000446665.2; 000817375.1; 000354275.2; 001268185.1; 001463455.1; 000818965.1; 001310005.1; 000781045.1; 001267355.1; 000461855.1; 000779515.1; 000358835.2; 001286385.1; 000358315.1; 000711605.1; 000284495.1; 000355595.1; 000214765.3; 000807655.1; 001285605.1; 000617045.2; 000778725.1; 001284105.1; 000222505.2; 001562715.1; 000350685.1; 001265545.1; 000800845.2; 000356945.1; 000776455.1; 001309685.1; 000458825.1; 000773595.1; 000461935.2; 000647815.3; 001058225.1; 000250355.2; 001283285.1; 000268205.1; 000462385.2; 001012585.1; 000446285.2; 000601255.1; 000812645.1; 001284885.1; 000619665.1; 000259695.1; 000316545.2; 000617665.2; 001519555.1; 000797955.1; 000494975.1; 000807575.1; 000617345.1; 000353185.1; 001561705.1; 000781235.1; 000617005.2; 001268445.1; 001309985.1; 000250235.2; 000354875.1; 001285005.1; 000461615.1; 000356065.2; 001266195.1; 000225065.2; 000459095.1; 000316425.2; 001509655.1; 000691085.1; 000833145.1; 001297995.1; 000460995.1; 000457635.1; 000320235.1; 000965655.1; 000462605.2; 000460675.1; 000700505.1; 001191055.1; 001519445.1; 000468515.1; 000353165.1; 001563385.1; 000601175.1; 000618925.2; 000517165.1; 001284665.1; 000352985.1; 000354435.2; 000522105.1; 000800675.1; 000776045.1; 000615655.2; 000350865.1; 000456445.1; 000397645.1; 000780775.1; 000356085.2; 000619625.1; 000250455.2; 000171995.1; 001519685.1; 000457715.1; 000778175.1; 000599825.1; 000778315.1; 001413535.1; 000457975.1; 000355295.1; 000009565.2; 000703365.1; 001191345.1; 000447105.2; 000267945.2; 000780415.1; 000267805.2; 000026545.1; 000352725.1; 001012405.1; 000617465.2; 000461795.1; 000703685.1; 000319975.1; 000782215.1; 000456905.1; 000704805.1; 000446985.2; 000447025.2; 000618465.1; 001283885.1; 000457085.1; 000968515.1; 000781355.1; 000780795.1; 000703305.1; 001285365.1; 000456565.1; 001076105.1; 001441345.1; 000335195.2; 001266075.1; 000316785.2; 001286005.1; 000354755.2; 000800765.1; 000459935.1; 000457495.1; 000242055.1; 000750555.1; 000299255.1; 001191125.1; 000462025.2; 001057065.1; 000798215.1; 000700465.1; 000617185.2; 001440045.1; 000460255.1; 000615415.2; 000704745.1; 000753535.1; 000713265.1; 000462785.2; 000456945.1; 000488535.1; 000190815.1; 000520055.1; 000488635.1; 000250215.2; 000408825.1; 001277595.1; 000167835.1; 000357585.2; 000780075.1; 000407845.1; 000520035.1; 000781035.1; 001284125.1; 000458645.1; 001277675.1; 001039075.1; 000937275.1; 000778915.1; 001519435.1; 001012475.1; 000703985.1; 000632575.1; 000267485.2; 000498275.1; 000305355.1; 000447125.2; 000010765.1; 001057125.1; 000522225.1; 000776775.1; 000326965.1; 000618285.2; 000619105.1; 000407865.1; 000622595.2; 000461355.1; 001561895.1; 000459395.1; 001306675.1; 000947945.1; 000778965.1; 001284425.1; 000485655.1; 000776395.1; 000316805.2; 000614805.2; 000225165.2; 000357785.2; 000194395.2; 000948475.1; 000225145.2; 000462305.2; 000797595.1; 000462345.2; 000780925.1; 001245225.1; 000798335.1; 000714255.1; 000951835.2; 000457755.1; 000172035.1; 000778375.1; 001402805.1; 000952955.1; 000462185.2; 001056025.1; 000456585.1; 000235225.1; 000249175.2; 000457005.1; 000798595.1; 000692375.1; 001265995.1; 000507625.1; 000352145.1; 000779155.1; 000356165.2; 000812765.1; 000459575.1; 000458935.1; 000245515.1; 001441325.1; 000618985.2; 000335015.2; 001283525.1; 000357145.2; 000457895.1; 000704325.1; 000752255.1; 000461495.1; 001562815.1; 001420935.1; 000618585.1; 000966935.1; 001413995.1; 000599785.2; 000215185.2; 000942915.1; 000257275.1; 000355115.2; 000462325.2; 000263915.1; 001268285.1; 000599645.1; 001562345.1; 000319955.1; 000947995.1; 001182885.1; 000614035.2; 000091005.1; 000776635.1; 000819005.1; 000616445.2; 001058205.1; 000249055.2; 001285525.1; 000711595.1; 001455025.1; 001056845.1; 001029125.1; 001265975.1; 000616525.2; 000249475.2; 000614765.2; 000781755.1; 000780535.1; 000780155.1; 000326325.1; 000013305.1; 000456045.1; 000713395.1; 000948515.1; 000781385.1; 000249235.2; 000354375.2; 000817425.1; 000615055.1; 000351225.1; 001309595.1; 001191395.1; 000022345.1; 001012615.1; 001054175.1; 000488675.1; 000456245.1; 000703885.1; 000462145.2; 001286705.1; 000713535.1; 001555495.1; 000460935.1; 000352885.1; 000022665.2; 001413485.1; 000354595.1; 001284525.1; 000725305.1; 000023665.1; 001281885.1; 000618965.1; 000355155.2; 000776675.1; 001012235.1; 000461195.1; 000471145.1; 000457615.1; 000703965.1; 000614465.2; 000782295.1; 001285405.1; 000780675.1; 000408225.1; 001265625.1; 001265735.1; 001283845.1; 001182815.1; 000460075.1; 000357185.2; 000350805.1; 001283825.1; 000619345.1; 000351385.1; 000691045.1; 000614215.2; 000618725.2; 000458685.1; 000471505.1; 000511545.1; 000618685.1; 000357245.1; 000456845.1; 000618265.2; 000350885.1; 000599725.2; 000319935.1; 001283985.1; 000461655.1; 000459855.1; 000460975.1; 000352805.1; 000358535.2; 000940655.1; 000508365.1; 000352165.1; 000615745.2; 001284165.1; 000713105.1; 000692755.1; 000190855.1; 000617025.2; 000778135.1; 000616585.2; 000714025.1; 000488375.1; 001078015.1; 000457165.1; 000147855.3; 000797835.1; 000462125.2; 000618525.1; 001509745.1; 000700085.1; 000781255.1; 001269305.1; 001276585.2; 000352965.1; 000981065.1; 000619485.1; 000326285.1; 000937135.2; 000781215.1; 001281845.1; 000446765.2; 000782755.1; 001012345.1; 000619645.2; 000529355.1; 000357045.2; 000456985.1; 000269645.2; 000242015.1; 000192665.2; 001520375.1; 000461135.1; 000692775.1; 000351845.1; 000704245.1; 000777355.1; 000461575.1; 000974505.1; 000456705.1; 000356225.2; 001281905.1; 000408185.1; 000446685.2; 000488735.1; 000622675.2; 000352685.1; 000700145.1; 000458955.1; 000776995.1; 000303755.2; 000459955.1; 001519735.1; 000618865.1; 000418715.1; 001284265.1; 000488335.1; 000356445.2; 000947935.1; 000965545.1; 000408385.1; 000782655.1; 000326305.1; 000460635.1; 000358595.2; 001286245.1; 000616265.1; 000326445.1; 000459495.1; 000777455.1; 001012315.1; 000190955.1; 000335455.2; 000354955.1; 000267045.1; 001513615.1; 000355315.2; 000355095.2; 000622695.2; 000462585.2; 000617545.2; 001059575.1; 001285145.1; 000303975.2; 000354355.2; 000164355.1; 000415485.1; 000615535.1; 000164275.1; 000397485.1; 000632675.2; 001056815.1; 000616485.2; 000350625.1; 000215145.2; 001244915.1; 000700525.1; 001509675.1; 000713735.1; 000704925.1; 000614685.2; 001262455.1; 000147755.2; 001306575.1; 000819105.1; 000781295.1; 000506585.2; 000163195.1; 000221885.1; 000692715.1; 000798535.1; 000622875.2; 000458215.1; 000005845.2; 000781775.1; 001283545.1; 000249395.2; 001561435.1; 000303795.2; 000459715.1; 000779775.1; 000456725.1; 000700425.1; 000212715.2; 000249215.2; 000777995.1; 000482265.1; 000618565.1; 000619705.2; 001269245.1; 001284945.1; 001077955.1; 000354795.2; 000225025.2; 000614435.2; 000194435.2; 000458455.1; 000414155.2; 000459695.1; 000194535.2; 000461375.1; 000935905.1; 000457325.1; 000354335.2; 000618005.2; 000264215.1; 000781175.1; 001412975.1; 001306585.1; 000026305.1; 001012635.1; 000303475.2; 000456885.1; 000350765.1; 000806175.1; 000351885.1; 000982035.1; 000777195.1; 000250135.2; 001309565.1; 000326385.1; 001563415.1; 000465155.1; 000780475.1; 001007915.1; 000780965.1; 001561605.1; 000457345.1; 001559675.1; 000178755.1; 000456665.1; 000617085.1; 001266275.1; 000316325.2; 000017745.1; 000358955.2; 000817355.1; 001264175.1; 000947975.1; 000297235.3; 000703665.1; 001012255.1; 001039135.1; 000781195.1; 000352605.1; 001291365.1; 000806195.1; 001306655.1; 000946475.1; 000352645.1; 000780275.1; 000460295.1; 000357105.1; 000713525.1; 000615605.2; 000776175.1; 000782515.1; 000936635.1; 000618045.1; 000459535.1; 000618165.2; 000586515.1; 000357505.2; 001283785.1; 000356625.2; 000619405.1; 000943355.2; 000459655.1; 000978815.1; 000781835.1; 001562635.1; 000320195.1; 001285745.1; 000418735.2; 000493595.1; 000407745.1; 001561865.1; 001282295.1; 000316825.2; 001265685.1; 001268885.1; 000619225.2; 000355215.2; 001558995.2; 000299455.1; 000172055.1; 000354915.1; 000819165.1; 000459255.1; 000446905.2; 000619385.1; 000617585.1; 000355075.2; 000351665.1; 001562385.1; 000809145.1; 001265935.1; 000164475.1; 000687105.1; 000267145.1; 000456125.1; 000785865.1; 000948885.1; 000619585.2; 000713045.1; 000167895.2; 000819015.1; 001269185.1; 000408265.1; 000948595.1; 000713615.1; 000753075.1; 001559615.2; 000713095.1; 000597845.1; 000618745.1; 000622635.2; 000617645.2; 000358105.2; 000459995.1; 000936495.1; 000356725.1; 000522385.1; 000446365.2; 000267265.2; 000357965.2; 000615505.1; 000477495.2; 000364365.1; 000320255.1; 000781005.1; 000814145.2; 000831715.1; 000488775.1; 000499485.1; 000460095.1; 001262955.1; 000458765.1; 000711565.1; 001561505.1; 001191525.1; 001559635.1; 000780875.1; 001265765.1; 000358635.2; 000408405.1; 000965565.1; 001052125.1; 000804345.1; 000183345.1; 000191015.1; 000351565.1; 000506465.2; 001012165.1; 000387845.2; 000164575.1; 000456405.1; 000353085.1; 000819345.1; 000356485.2; 000418615.2; 000458555.1; 000784925.1; 000776925.1; 000023365.1; 000190915.1; 000179115.1; 000303915.2; 000988465.1; 001519405.1; 000714055.1; 001413755.1; 001269205.1; 000601195.1; 000408725.1; 000619505.1; 000711515.1; 000462545.2; 001285325.1; 000358775.2; 000778035.1; 000357305.2; 000627235.1; 001077875.1; 000618485.1; 000350185.1; 000285655.3; 000835055.1; 001463645.1; 000261145.1; 000779895.1; 000616325.2; 000458195.1; 000317395.1; 000806265.1; 000457045.1; 000192685.2; 000351325.1; 000699265.1; 000250535.2; 000457245.1; 001052935.1; 000691065.1; 000779715.1; 000776335.1; 001285105.1; 000235105.1; 000320095.1; 000713905.1; 000954035.1; 000233895.1; 001280385.1; 000749545.1; 000194665.2; 000776135.1; 000618665.1; 000461955.2; 000353065.1; 000798275.1; 000780175.1; 000633675.1; 000356985.2; 000358065.2; 000194175.2; 000356665.2; 000781075.1; 001285265.1; 000355455.2; 000319995.1; 000010385.1; 000457105.1; 000326685.1; 000459635.1; 000456505.1; 001268725.1; 001419895.1; 000357365.2; 000498835.2; 000797575.1; 001561215.1; 000354835.2; 000456685.1; 001268245.1; 001285505.1; 001012505.1; 000616605.2; 000522125.1; 000458415.1; 000778785.1; 000235245.1; 000700285.1; 000494955.1; 000446485.2; 001442495.1; 000782775.1; 001562645.1; 001513635.1; 000781095.1; 001281795.1; 000941575.1; 000819225.1; 001520455.1; 000692655.1; 000947985.1; 000352105.1; 000948895.1; 000187365.2; 000458515.1; 000225245.2; 001285845.1; 000457405.1; 000617125.2; 000407945.1; 000027125.1; 000408585.1; 000974405.1; 000249255.2; 000618765.1; 000752155.1; 000459875.1; 000351465.1; 000456085.1; 000267645.2; 000456105.1; 000951955.1; 000782275.1; 000250375.2; 001443175.1; 000171955.1; 000507605.1; 000752755.1; 000498815.2; 000456605.1; 000235065.1; 000190835.1; 000303815.2; 000354775.2; 001268425.1; 000776715.1; 000703765.1; 000781855.1; 001519775.1; 000462845.2; 001447405.1; 001268305.1; 000351365.1; 000446425.2; 000267205.2; 000632635.1; 000249315.2; 000166595.2; 000752895.1; 000617525.2; 001286625.1; 000778395.1; 001191135.1; 000194415.2; 000164595.1; 001309905.1; 000358225.2; 000462065.2; 000615925.2; 001058375.1; 000358145.2; 001012545.1; 001413645.1; 000461215.1; 000351245.1; 000703385.1; 000948605.1; 000692455.1; 000458975.1; 000460515.1; 000303455.2; 001284705.1; 000357525.2; 000397745.1; 000397665.1; 000446385.2; 000267365.2; 000249595.2; 000357645.1; 000622575.2; 000352205.1; 000181755.1; 000564835.2; 000806255.1; 000618105.2; 001182805.1; 000755445.1; 000780455.1; 000752495.1; 000777375.1; 000184185.1; 001285085.1; 000798375.1; 000778955.1; 001043215.1; 001283505.1; 000234275.3; 001561845.1; 000778415.1; 001267335.1; 000446965.2; 001561045.1; 000194295.2; 001561655.1; 000235265.1; 001012175.1; 001309805.1; 000155125.1; 000461595.1; 000458275.1; 000358795.2; 000619285.2; 000267625.2; 001012015.1; 000355015.2; 000618645.1; 000267025.1; 000599805.2; 000267065.1; 000941395.1; 000267705.2; 000249955.2; 000700645.1; 001562655.1; 000249795.2; 000492235.1; 001183665.1; 000713315.1; 000359015.2; 000627795.1; 001268765.1; 000619305.1; 000778685.1; 000146735.1; 000457535.1; 001466755.1; 000164335.1; 000618845.1; 000351145.1; 000457385.1; 000408005.1; 000488815.1; 000320015.1; 000599625.1; 001285645.1; 001284905.1; 000326925.1; 000351065.1; 000357945.2; 000303695.2; 000461015.1; 001521075.1; 000358475.1; 000249415.2; 000460115.1; 001462715.1; 001285025.1; 001308125.1; 001561025.1; 000242035.1; 000488315.1; 000704085.1; 000488695.1; 000408785.1; 000700565.1; 000357265.2; 001283165.1; 001058275.1; 000359055.2; 000408765.1; 001283865.1; 000776155.1; 000352305.1; 000779655.1; 000235125.1; 000622755.2; 001420135.1; 000319855.1; 000752695.1; 000617805.2; 000798115.1; 000965705.1; 000986765.1; 000619605.1; 000462445.2; 001029415.1; 001562855.1; 000460355.1; 000935075.1; 001010195.1; 000446245.1; 000304075.2; 001039215.1; 001562705.1; 000752655.1; 000194255.1; 000258225.1; 000622795.2; 000687065.1; 000319835.1; 000627815.1; 000442085.2; 000513035.1; 000459215.1; 000457915.1; 000461055.1; 000797605.1; 001413565.1; 000615345.1; 001309465.1; 001277615.1; 000352665.1; 001519575.1; 000461755.1; 000522145.1; 000622555.1; 000601215.1; 000460435.1; 000320075.1; 000356825.2; 001562695.1; 000704225.1; 000351785.1; 000798035.1; 000456225.1; 000456745.1; 001521285.1; 000335055.2; 001285245.1; 000319875.1; 000458075.1; 000703805.1; 000354295.1; 000458015.1; 000267505.2; 000352365.1; 000797975.1; 000618345.1; 000779475.1; 001268845.1; 001286485.1; 000458335.1; 001012095.1; 000326605.1; 000351645.1; 000601335.1; 000461075.1; 000340455.2; 000446605.2; 000773575.1; 000006665.1; 000250575.2; 001058935.1; 000460835.1; 000779695.1; 000511525.1; 000355195.2; 000352765.1; 000215225.2; 001309835.1; 000819125.1; 000351725.1; 000622775.2; 000819265.1; 001509665.1; 001432175.2; 000350905.1; 000812325.1; 000619525.1; 001420045.1; 000782735.1; 001283425.1; 001440615.1; 001440525.1; 000713185.1; 000252805.2; 000456465.1; 000798555.1; 000781675.1; 000268125.1; 001268225.1; 000304815.2; 001413825.1; 000778105.1; 001059735.1; 000354415.2; 000471165.1; 000333175.1; 001263065.1; 000320045.1; 000353545.1; 000158395.1; 000776835.1; 000713975.1; 000456005.1; 001561735.1; 001277655.1; 000488395.1; 000798435.1; 000302735.1; 000752135.1; 000025745.1; 001285285.1; 000235165.1; 000357865.2; 000299475.1; 000736735.1; 000753155.1; 001285225.1; 000352485.1; 000965555.1; 000446175.2; 000498235.1; 000734955.1; 000461235.1; 000778565.1; 001059655.1; 000798255.1; 000704345.1; 000267245.2; 001012265.1; 000352445.1; 000714995.1; 000326425.1; 000692495.1; 001519125.1; 000703825.1; 000351105.1; 001286605.1; 000188835.2; 000616385.2; 000358515.2; 000188875.2; 001262905.1; 000779295.1; 000778485.1; 000618185.1; 000176575.2; 000456345.1; 000351205.1; 001063395.1; 000303875.2; 000326265.1; 000303895.2; 000703525.1; 000730345.1; 000704765.1; 000250415.2; 000458095.1; 000691105.1; 000356185.2; 000307205.1; 000633655.1; 000695175.1; 001286025.1; 000779875.1; 000731455.1; 000462865.2; 000457435.1; 000319915.1; 000460895.1; 000267465.2; 000690985.1; 000713505.1; 000948445.1; 000700205.1; 000235285.1; 001265495.1; 000752315.1; 000806245.1; 000632595.2; 000460275.1; 000303315.2; 000460415.1; 000407825.1; 000522345.1; 000782095.1; 000835045.1; 000326345.1; 001519365.1; 000320115.1; 000780595.1; 000777655.1; 000357325.1; 000446645.2; 001056875.1; 000731355.1; 000456965.1; 000948835.1; 000615575.2; 001012025.1; 000458605.1; 000215285.2; 000797935.1; 000358695.2; 000459375.1; 000780815.1; 000305435.2; 000461835.1; 001265925.1; 000703205.1; 000974885.1; 000258025.1; 000249555.2; 000458435.1; 000305375.2; 001284205.1; 000303655.2; 000488295.1; 000320035.1; 000457305.1; 000407705.1; 001191355.1; 000617405.2; 000599705.1; 000408485.1; 001191505.1; 000940115.1; 000350945.1; 000714185.1; 001519525.1; 000713175.1; 000355575.2; 001268205.1; 000622485.2; 001269125.1; 000495055.1; 000618505.1; 000250275.2; 001309535.1; 000175755.1; 000700545.1; 001266175.1; 000690945.1; 001286305.1; 000397685.1; 000358655.2; 000249115.2; 001309775.1; 000627095.1; 000812385.1; 000461175.1; 000249075.2; 001561115.1; 000618905.2; 000458575.1; 001562335.1; 000460535.1; 000241975.1; 000163175.1; 000014845.1; 000618425.1; 001277395.1; 001561415.1; 000456205.1; 000350045.2; 000458295.1; 000460655.1; 000768505.1; 001277775.1; 001283605.1; 001277635.1; 000506485.2; 001463535.1; 000164455.1; 000351685.1; 000462805.2; 000797875.1; 001285625.1; 000303275.2; 001413355.1; 000779075.1; 000407685.1; 000619465.2; 000303295.2; 000711525.1; 001265175.1; 000622535.2; 000616005.2; 000358165.2; 000780695.1; 000522365.1; 000357285.2; 001012575.1; 001519135.1; 001561175.1; 001306635.1; 000303235.2; 000622505.2; 000352625.1; 000358185.2; 000418755.2; 001282025.1; 001266305.1; 000320275.1; 000817345.1; 001012395.1; 001051135.1; 000812345.1; 000798415.1; 000498875.2; 000350785.1; 000187285.4; 000220005.2; 001563715.1; 000354995.2; 001268465.1; 000627075.1; 000316745.2; 000357465.2; 000459915.1; 000777025.1; 000459475.1; 001284745.1; 000357165.1; 000713585.1; 001077865.1; 001058175.1; 001283945.1; 001517685.1; 001191105.1; 000777155.1; 001012005.1; 000692675.1; 000462225.2; 001285485.1; 000777165.1; 000696835.1; 000765435.1; 000614565.2; 000780495.1; 000615785.2; 000780095.1; 000619025.1; 001282195.1; 000446885.2; 001561205.1; 000768425.1; 000357625.2; 001053065.1; 000780845.1; 000498795.2; 000459055.1; 001191045.1; 000352225.1; 001187545.1; 001285185.1; 001268745.1; 001463585.1; 000460815.1; 000258635.1; 000249855.2; 001285345.1; 000352325.1; 000461455.1; 001521455.1; 000460775.1; 001005605.1; 000785255.1; 000780735.1; 000457455.1; 000713575.1; 001309895.1; 001562765.1; 000488415.1; 001268545.1; 000459775.1; 000458845.1; 000320135.1; 000601235.1; 001283745.1; 000700165.1; 000456545.1; 001519355.1; 001519215.1; 000351025.1; 000782315.1; 000249895.2; 001063685.1; 000948555.1; 000711415.1; 001521575.1; 000478705.1; 000622855.2; 001309965.1; 000335115.1; 000782495.1; 000326585.1; 001561035.1; 000227625.1; 000777895.1; 001269225.1; 000259385.1; 001263735.1; 001268685.1; 001561595.1; 000326405.1; 000356785.2; 000026285.1; 000948875.1; 000778355.1; 000354455.1; 001419865.1; 001286685.1; 000692415.1; 000462085.2; 000474845.1; 000418695.2; 000250115.2; 001281925.1; 000326825.1; 000187385.2; 000019385.1; 000326465.1; 000627215.1; 000488795.1; 000352385.1; 000618885.1; 000359095.2; 000358265.2; 000753195.1; 000249335.2; 000781965.1; 000353105.1; 000408345.1; 000249695.2; 001307215.1; 000492655.1; 000632555.1; 000305175.1; 000732965.1; 000752235.1; 000249675.2; 000616685.2; 000407885.1; 000460955.1; 000316765.2; 000700705.1; 000461915.2; 000797585.1; 000357485.2; 000818985.1; 001283805.1; 000457655.1; 000485675.1; 000627255.1; 000010745.1; 000938695.1; 000511485.1; 000356605.2; 000615145.1; 000332755.1; 000446095.2; 000303595.2; 000234315.2; 000408425.1; 000459295.1; 000462245.2; 000408645.1; 000249575.2; 001440495.1; 000506845.1; 000457025.1; 000164435.1; 000456365.1; 001057225.1; 001466815.1; 000935515.1; 000351805.1; 000171935.1; 000355355.1; 000488615.1; 000797775.1; 000713115.1; 001265875.1; 000616345.2; 001280345.1; 000352045.1; 000179075.1; 000408085.1; 000614645.2; 000250075.2; 000619045.2; 000713655.1; 000671295.1; 001191025.1; 000948625.1; 000358205.2; 000622715.2; 000779835.1; 000457065.1; 001413555.1; 000615965.2; 000622615.2; 001283725.1; 000408165.1; 001283265.1; 000458745.1; 000351985.1; 001285705.1; 000335355.2; 000326785.1; 000166575.2; 000632655.1; 000350665.1; 000617365.2; 000782235.1; 000752775.1; 000753275.1; 000762385.1; 000456305.1; 000408505.1; 000446625.2; 000797995.1; 000357925.2; 000460455.1; 000190895.1; 000713825.1; 001284565.1; 000461775.1; 000187305.2; 001021005.2; 000458785.1; 000335095.2; 001269105.1; 000797755.1; 000780315.1; 000777605.1; 000778475.1; 000459835.1; 001266125.1; 000446225.2; 000410655.2; 000692515.1; 000617325.1; 001308065.1; 001266095.1; 001520115.1; 000316465.1; 001521415.1; 000703285.1; 001555635.1; 000782355.1; 000812235.1; 000456805.1; 001265415.1; 000267345.2; 001286325.1; 000776115.1; 001283485.1; 000615305.1; 000387785.2; 000785325.1; 001561095.1; 000276745.1; 000355035.2; 000797895.1; 000456325.1; 000305455.2; 000627835.1; 001268605.1; 000778435.1; 000700445.1; 001413425.1; 000446505.2; 000616645.2; 000776535.1; 000615265.1; 000807555.1; 000704385.1; 001012355.1; 001059485.1; 001286545.1; 000618445.1; 000250475.2; 000776055.1; 000179175.1; 000249975.2; 000303335.2; 000459735.1; 000781115.1; 001262795.1; 000326765.1; 000356845.2; 001286585.1; 000351745.1; 000936245.1; 000359035.2; 000457675.1; 000352825.1; 000446075.2; 001516935.2; 000356105.2; 000446195.2; 000462725.2; 001515725.1; 000713785.1; 000700325.1; 000457995.1; 000752295.1; 000353125.1; 000770055.1; 001284245.1; 000619165.1; 000777415.1; 001561365.1; 000303355.2; 000781955.1; 000779055.1; 000398885.1; 000692535.1; 001005685.1; 000408065.1; 000616665.2; 000965625.1; 000974575.1; 000776195.1; 001268805.1; 000456785.1; 000460315.1; 000019645.1; 001277495.1; 000352465.1; 000326505.1; 000351525.1; 000459035.1; 000267905.2; 000616625.1; 000782635.1; 000357125.1; 000485735.1; 000462465.2; 000457835.1; 000488355.1; 000618705.2; 000779365.1; 000267225.2; 000948005.1; 000522285.1; 001191185.1; 000617065.1; 001191455.1; 000704685.1; 000190795.1; 000258785.1; 000163235.1; 000354535.2; 000351125.1; 001463195.1; 001284225.1; 000713895.1; 001286645.1; 000779125.1; 000974825.1; 000351505.1; 000618385.1; 000781145.1; 000779425.1; 000355055.1; 000357005.2; 000752175.1; 001269165.1; 000462265.2; 000462705.2; 001268505.1; 000458535.1; 001039415.1; 000700605.1; 000616505.2; 000708145.1; 001285665.1; 000461975.2; 000781915.1; 000459895.1; 000700725.1; 000357905.2; 000616035.2; 000270105.1; 000780615.1; 000782335.1; 001446455.1; 000267885.2; 000752435.1; 000267665.2; 000478215.1; 000267125.1; 001281855.1; 000965665.1; 000250155.2; 000782615.1; 001262785.1; 001308165.1; 000010485.1; 000457145.1; 000462825.2; 000460795.1; 000488035.1; 000801165.1; 000798235.1; 000618605.1; 000488495.1; 000700245.1; 000780255.1; 000355255.2; 000461555.1; 000619685.2; 000326625.1; 000939255.1; 001442595.1; 000456425.1; 000335435.2; 000176675.2; 000460235.1; 000267785.2; 000259425.1; 000458895.1; 000488515.1; 000931565.1; 000779585.1; 000462625.2; 000801205.1; 000397625.1; 000777945.1; 000779935.1; 000194355.2; 001562835.1; 000627155.1; 001284625.1; 000752195.1; 000713195.1; 000166535.2; 000178795.1; and 000355615.2.

[0219] To select reference genomes to use for probe design, all 295 RefSeq genomes were included, as they were all high quality, complete, and fairly diverse. Also, 1,418 Genbank genomes were selected for inclusion in the following way. All 1,124 singleton (i.e., not clustered with other genomes) Genbank genomes were retained. Then, the largest Genbank genome from each of the 361 multi-genome clusters were included, if and only if there was no RefSeq-equivalent genome in the cluster. This added an additional 294 Genbank genomes. This final set of 1,713 genomes represented a large, diverse collection, with references from all eight major clades of E. coli (Table 2), as determined by the tool ClermonTyping (Beghain, Johann, Antoine Bridier-Nahmias, Hervé Le Nagard, Erick Denamur, and Olivier Clermont. 2018.“ClermonTyping: An Easy-to-Use and Accurate in Silico Method for Escherichia Genus Strain Phylotyping.” Microbial Genomics 4 (7). doi.org/10.1099/mgen.0.000192), and 515 distinct multi-locus sequence types (data not shown), as determined by the tool mlst (see PubMLST website developed by K. Jolley (Jolley & Maiden 2010, BMC Bioinformatics, 11:595)).

[0220] The RefSeq accession numbers for the 295 RefSeq genomes (“the 295 RefSeq genomes”) were the following, where the identifier “GCF” (i.e., the designation as RefSeq assemblies) that precedes each number has been omitted: 000005845.2; 000006925.2; 000007405.1; 000007445.1; 000008865.1; 000009565.1; 000010245.2; 000010385.1; 000010485.1; 000010745.1; 000010765.1; 000012005.1; 000012025.1; 000013265.1; 000013305.1; 000013585.1; 000014845.1; 000017745.1; 000017765.1; 000017985.1; 000019385.1; 000019425.1; 000019645.1; 000020185.1; 000021125.1; 000022225.1; 000022245.1; 000022345.1; 000022665.1; 000023365.1; 000023665.1; 000025165.1; 000025745.1; 000026245.1; 000026265.1; 000026325.1; 000026345.1; 000026545.1; 000027125.1; 000091005.1; 000092525.1; 000147855.2; 000148365.1; 000148605.1; 000183345.1; 000184185.1; 000210475.1; 000212715.2; 000219515.2; 000227625.1; 000233875.1; 000233895.1; 000245515.1; 000257275.1; 000258025.1; 000258145.1; 000262125.1; 000270105.1; 000283715.1; 000284495.1; 000285655.3; 000299255.1; 000299455.1; 000299475.1; 000332755.1; 000350185.1; 000468515.1; 000493755.1; 000499485.1; 000520035.1; 000520055.1; 000597845.1; 000599625.1; 000599645.1; 000599665.1; 000599685.1; 000599705.1; 000662395.1; 000671295.1; 000714595.1; 000725305.1; 000730345.1; 000732965.1; 000743255.1; 000743955.1; 000743995.1; 000750555.1; 000784925.1; 000800215.1; 000800765.1; 000800845.1; 000801165.1; 000801185.2; 000801205.1; 000803705.1; 000813165.1; 000814145.2; 000819645.1; 000827105.1; 000829985.1; 000830035.1; 000831565.1; 000833145.1; 000931565.1; 000952955.1; 000953035.1; 000953515.1; 000967155.2; 000968515.1; 000971615.1; 000974405.1; 000974465.1; 000974505.1; 000974535.1; 000974575.1; 000974825.1; 000974865.1; 000974885.1; 000981485.1; 000986765.1; 000987875.1; 000988355.1; 000988385.1; 000988465.1; 001007915.1; 001020945.2; 001021005.2; 001021855.1; 001027225.1; 001029125.1; 001039415.1; 001043215.1; 001051135.1; 001183645.1; 001183665.1; 001183685.1; 001276585.2; 001280325.1; 001280345.1; 001280385.1; 001280405.1; 001307215.1; 001308065.1; 001308125.1; 001308165.1; 001420935.1; 001420955.1; 001442495.1; 001455385.1; 001469815.1; 001485455.1; 001513615.1; 001513635.1; 001515725.1; 001518855.1; 001542675.2; 001544635.1; 001558295.1; 001558995.2; 001559615.2; 001559635.1; 001559655.1; 001559675.1; 001566335.1; 001566615.1; 001566635.1; 001566655.1; 001566675.1; 001577325.1; 001578125.1; 001579965.1; 001580175.1; 001593565.1; 001596115.1; 001610755.1; 001612475.1; 001612495.1; 001617565.1; 001618325.1; 001618345.2; 001618365.1; 001644725.1; 001644745.1; 001650275.1; 001650295.1; 001651925.1; 001651945.1; 001651965.1; 001660565.1; 001660585.1; 001663075.1; 001663475.1; 001675145.1; 001677475.1; 001677495.1; 001677515.1; 001678925.1; 001678965.1; 001679985.1; 001682305.1; 001683435.1; 001693315.1; 001693635.1; 001695515.1; 001721125.1; 001721205.1; 001721225.1; 001721525.1; 001723505.1; 001735705.1; 001750845.1; 001753445.1; 001753465.1; 001753485.1; 001753505.1; 001753525.1; 001753545.1; 001753565.1; 001806265.1; 001806285.1; 001860505.1; 001865295.1; 001886535.1; 001886555.1; 001886575.1; 001886755.1; 001886935.1; 001888075.1; 001890205.1; 001890225.1; 001890245.1; 001890265.1; 001890285.1; 001890305.1; 001890325.1; 001890345.1; 001890365.1; 001900295.1; 001900315.1; 001900335.1; 001900355.1; 001900375.1; 001900395.1; 001900415.1; 001900435.1; 001900455.1; 001900475.1; 001900495.1; 001900515.1; 001900535.1; 001900555.1; 001900575.1; 001900595.1; 001900615.1; 001900635.1; 001900655.1; 001900675.1; 001900695.1; 001900715.1; 001900735.1; 001900775.1; 001900795.1; 001900815.1; 001900835.1; 001900885.1; 001900905.1; 001900925.1; 001900945.1; 001900965.1; 001900985.1; 001901005.1; 001901025.1; 001901045.1; 001901065.1; 001901085.1; 001901105.1; 001901125.1; 001901145.1; 001901165.1; 001901185.1; 001901215.1; 001901315.1; 001901365.1; 001901405.1; 001901425.1; 001901445.1; 001901465.1; 001932515.1; 001936315.1; 001938625.1; 001969285.1; 001999185.1; 900092615.1; 900096795.1; and 900096845.1.

[0221] The 1,713 genomes were then uniformly re-annotated with the Broad Institute prokaryotic genome pipeline (Valentino, Michael D., Abigail Manson McGuire, Jason W. Rosch, Paulo J. M. Bispo, Corinna Burnham, Christine M. Sanfilippo, Robert A. Carter, et al. 2014. “Unencapsulated Streptococcus pneumoniae from Conjunctivitis Encode Variant Traits and Belong to a Distinct Phylogenetic Cluster.” Nature Communications 5 (November): 5411; Schreiber, Henry L., 4th, Matt S. Conover, Wen-Chi Chou, Michael E. Hibbing, Abigail L. Manson, Karen W. Dodson, Thomas J. Hannan, et al. 2017. “Bacterial Virulence Phenotypes of Escherichia Coli and Host Susceptibility Determine Risk for Urinary Tract Infections.” Science Translational Medicine 9 (382). doi.org/10.1126/scitranslmed.aaf1283). Genes were clustered into orthogroups using SynerClust (Georgescu, Christophe H., Abigail L. Manson, Alexander D. Griggs, Christopher A. Desjardins, Alejandro Pironti, Ilan Wapinski, Thomas Abeel, Brian J. Haas, and Ashlee M. Earl. 2018. “SynerClust: A Highly Scalable, Synteny-Aware Orthologue Clustering Tool.” Microbial Genomics. doi.org/10.1099/mgen.0.000231), which resulted in a total of 174,584 orthogroups containing 8,334,026 total genes. As the computational time to analyze all these orthogroups using CATCH was prohibitive, orthogroups found in fewer than three genomes were filtered out, leaving 64,146 orthogroups (containing a total of 8,165,358 genes). In order to ensure that the set contained all potential instances of key genes important in clinically relevant E. coli, all instances of orthogroups containing instances of 59 Pfam domains of interest, obtained from a curated list (Table 5), were retained. Using this list, a total of 2,434 orthogroups (3,479 genes) were added back that were found in fewer than three genomes. The 5 final set contained 64,580 orthogroups comprising 8,168,837 genes.

TABLE 5
Pfam domains of interest

| | Pfam Accession |
|---|---|
| Description | No. |
| Usher | PF00577 |
| Chaperone | PF00345 |
| Chaperone | PF02753 |
| Subunit | PF04449 |
| Subunit | PF06551 |
| Subunit | PF00419 |
| Subunit | PF09255 |
| Subunit | PF02432 |
| Subunit | PF05229 |
| Adhesin | PF07434 |
| Adhesin | PF03627 |
| Adhesin | PF05229 |
| Adhesin | PF04619 |
| WaaL | PF04932 |
| WaaJ | PF01501 |
| WaaJ | PF08437 |
| WaaI | PF01501 |
| WaaI | PF0843 |
| WaaA | PF00534 |
| WaaA | PF04413 |
| YibD | PF00535 |
| rfbA | PF00483 |
| WaaY | PF06176 |
| FimE | PF00589 |
| FimB | PF00589 |
| HbiF | PF00589 |
| Fis | PF02954 |
| HU | PF00216 |
| H-NS | PF00816 |
| StpA | PF00816 |
| IHF | PF00216 |
| Lrp | PF01037 |
| ibeA | PF12831 |
| ibeT | PF03553 |
| OmpR | PF00072 |
| OmpR | PF00486 |
| OmpX | PF13505 |
| RpoS | PF00140 |
| RpoS | PF04542 |
| RpoS | PF04539 |
| RpoS | PF04545 |
| CRP | PF00027 |
| CRP | PF00325 |
| SlyA | PF01047 |
| NanR | PF07729 |
| NanR | PF00392 |
| NagC | PF01047 |
| NagC | PF00480 |
| LrhA | PF00126 |
| LrhA | PF03466 |
| RelA | PF13291 |
| RelA | PF13328 |
| RelA | PF04607 |
| RelA | PF02824 |
| DskA | PF01258 |
| PilQ | PF00263 |
| PilQ | PF03958 |
| SfaB | PF03333 |
| SfaX | PF01047 |

[0222] In order to reduce design constraints in CATCH, thereby decreasing computational cost and time, orthogroups were clustered using UCLUST (Edgar, Robert C. 2010. “Search and Clustering Orders of Magnitude Faster than BLAST.” Bioinformatics 26 (19): 2460-61.), with an 80% nucleotide sequence identity threshold. This generated one or more clusters of genes within each orthogroup, in which all cluster members had ≥80% nucleotide sequence identity to one other. This generated 87,218 gene clusters from the 64,580 orthogroups. These gene clusters were the input for CATCH probe design.

[0223] CATCH (Metsky, Hayden C., Viral Hemorrhagic Fever Consortium, Katherine J. Siddle, Adrianne Gladden-Young, James Qu, David K. Yang, Patrick Brehio, et al. 2019. “Capturing Sequence Diversity in Metagenomes with Comprehensive and Scalable Probe Design.” Nature Biotechnology. doi.org/10.1038/s41587-018-0006-x) was run with the following parameters: 2 bp mismatch allowed; 25 bp cover extension; expand “N” to ACGT; 30 bp island of exact match; 60-75 bp length. In addition, three Enterobacteriaceae genomes were used to “blacklist” probes that matched (i.e., ≤ 8 total mismatches) off-target sequences: Citrobacter freundii CFNIH1, Salmonella enterica subsp. enterica serovar Typhi str. CT18, and Klebsiella pneumoniae subsp. pneumoniae HS11286. These genomes were downloaded from NCBI Refseq. CATCH generated 911,618 unique probe sequences (a number of duplicate probes were generated because CATCH was run to generate probes per gene cluster, and all but one copy of each set of duplicate probes were removed from the probe set).

[0224] In addition to using the three genomes to “blacklist” probes, an additional set of filters was applied to remove probes that might still capture off-target sequences. The blastn tool from BLAST+ was used to search for identity against the NCBI prokaryote reference genome database (downloaded in October 2017). Probe sequences were used as queries with the following parameters: max_target_seqs 30; evalue 1e-5; qcov_hsp_perc 80; perc_identity 80. Using these results, probes were removed that had matches of 65 bp or more to: 1)≥100 references in the database (1,798 probes removed); 2) Bacteroidetes references (2,470 probes removed); or 3) Firmicutes references (14,935 probes removed). After this filtering, a total of 892,415 probes (provided in the Sequence Listing as SEQ ID NOs: 1 to 892415) remained that were unlikely to hit other commonly found and abundant bacterial species in the human gut.

### In Silico Probe Set Validation

[0225] In order to verify that the probe set captured the vast majority of genes in the E. coli pangenome, blastn from BLAST+ was used to query the probe sequences against the entire pan-genome from the set of 1,713 references, which included genes that had previously been filtered out at the probe design stage. The probe sequences were used as queries for blastn with the following parameters: max_target_seqs 30; evalue le-5; qcov_hsp_perc 80; perc_identity 80. Alignments with>65 bp length and no more than 8 mis-matches were retained in the entire alignment. The probe set was considered to capture a gene if one or more probes met these criteria for the gene.

### Probe synthesis

[0226] Probes were synthesized by Roche, though the probe set was not specifically tailored to their technology and could be synthesized by other manufacturers. All probes could be synthesized, although 330,387 (37%) probes had one or more bases truncated from the 3′ end. The average number of bases trimmed per probe was 1.27±2.16. Only 5,423 probes had 10 or more bases trimmed. All of the most highly truncated probes had low nucleotide complexity, primarily due to long stretches of homopolymers. The average length of synthesized probes was 73.7±2.16 bp. As these changes were unlikely to affect the performance of the probe set as a whole, this slightly modified probe set was used in the experiments.

### Creation of Four Strain E. coli Mock Community

[0227] Four phylogenetically distinct E. coli strains, namely H10407 (clade A), E24337A (clade B1), UTI89 (clade B2), and Sakai (clade E), were cultured separately overnight at 37° C. in 2 mL of liquid LB media with shaking at 200 rpm. The bacterial number in each culture was estimated via optical density and then combined at a ratio of 80% H10407, 15% UTI89, 4.9% Sakai, and 0.1% E24337A. Genomic DNA was then extracted from this mock community using the Qiagen MagAttract DNA Isolation Kit (Hilden, Germany), following manufacturer's protocols. In two separate tubes, human genomic DNA was then added to the extracted E. coli DNA for final ratios of 99% human/1% E. coli (weight/weight).

### Library Construction and Sequencing for Mock Community

[0228] The Nextera XT library construction kit (Illumina) was used to generate sequencing libraries following the manufacturer's recommended protocol. To enrich E. coli sequences in the mock library (˜100 ng into the HC reaction), hybrid capture (HC) was performed using a Roche SeqCap EZ Hypercap kit with the designed custom capture probe set. Hybridization and target capture followed the SeqCap kit instructions with the modifications that the probe pool was diluted 1:2 to 500 pmol/ul before use and custom Nextera adapter blocking oligonucleotides (Metsky, Hayden C., Viral Hemorrhagic Fever Consortium, Katherine J. Siddle, Adrianne Gladden-Young, James Qu, David K. Yang, Patrick Brehio, et al. 2019. “Capturing Sequence Diversity in Metagenomes with Comprehensive and Scalable Probe Design.” Nature Biotechnology. doi.org/10.1038/s41587-018-0006-x) were substituted for the SeqCap HE Universal adapter and index blocking oligonucleotides. After hybridization (18 h), bead capture and washes, 15 cycles of polymerase chain reaction (PCR) were performed with generic universal Illumina P7 and P5 primers. The final libraries were quantified by Qubit fluorometry (Thermo Fisher Scientific) and the size distribution analyzed by TapeStation electrophoresis (Agilent) prior to Illumina sequencing. Then, pre- and post-HC libraries were run on an Illumina HiSeqX, generating 21,460,598 and 75,576,717 paired-end 151 bp reads for pre- and post-HC libraries, respectively.

### Analysis of Four-Strain E. coli Mock Community

[0229] In order to compare analyses on samples with the same sequencing depth, post-hybrid capture (HC) data was first downsampled to the same sequencing depth (approximately 20,000,000 paired-end reads) as pre-HC data using Picard-Tools (broadinstitute.github.io/picard/). Data were analyzed with FastQC (Andrews, Simon, and Others. 2010. “FastQC: A Quality Control Tool for High Throughput Sequence Data.” Babraham Bioinformatics, Babraham Institute, Cambridge, United Kingdom) and MultiQC (Ewels, Philip, Måns Magnusson, Sverker Lundin, and Max Käller. 2016. “MultiQC: Summarize Analysis Results for Multiple Tools and Samples in a Single Report.” Bioinformatics 32 (19): 3047-48) for quality metrics. As Picard-Tools indicated that post-HC libraries had PCR duplication, both pre- and post-HC data were de novo deduplicated with FastUniq (Xu, Haibin, Xiang Luo, Jun Qian, Xiaohui Pang, Jingyuan Song, Guangrui Qian, Jinhui Chen, and Shilin Chen. 2012. “FastUniq: A Fast de Novo Duplicates Removal Tool for Paired Short Reads.” PloS One 7 (12): e52249).

[0230] Following downsampling and deduplication, relative abundances and depth of coverage for each of the four strains were estimated using the tool StrainGST from the tool suite StrainGE (Dijk, Lucas R. van, Bruce J. Walker, Timothy J. Straub, Colin J. Worby, Alexandra Grote, Henry L. Schreiber, Christine Anyansi, et al. 2021. “StrainGE: A Toolkit to Track and Characterize Low-Abundance Strains in Complex Microbial Communities.” Cold Spring Harbor Laboratory. doi.org/10.1101/2021.02.14.431013). First, a StrainGST database was built containing just the reference genomes of the four strains of E. coli in the mock mixture (i.e., H10407, UTI89, Sakai, and E24377A) all downloaded from NCBI Genbank. Then, both pre- and post-HC data were k-merized and StrainGST was run (without k-mer fingerprinting) against the database to determine the relative abundances and depth of coverages for all four strains.

[0231] Coverage levels for each of the four strains were obtained by aligning downsampled and deduplicated data with Bowtie2 (Langmead, Ben, and Steven L. Salzberg. 2012. “Fast Gapped-Read Alignment with Bowtie 2.” Nature Methods 9 (4): 357-59.) with default parameters to a concatenation of all four strains' reference genomes. Only properly paired aligned reads with a minimum mapping quality (MQ) of 5 were retained with samtools (htslib.org/). This filtering was done to exclude reads and regions of the genomes where reads aligned equally well to different strains, with the goal of reducing bias in less abundant strains due to sequence identity to sequences deriving from the more abundant strains. Then, coverages of MQ>5 reads were assessed using Bedtools (bedtools.readthedocs.io/en/latest/).

[0232] To determine probe hybridization sites on each strain's reference genome, all probe sequences were aligned using Bowtie2 to each of the four reference genomes, individually. The intervals where probes aligned were designated as putative probe hybridization sites. To determine coverage levels in relation to probe hybridization sites, pre- and post-HC calculated coverages were compared with these putative probe hybridization sites using Bedtools and a custom R script.

[0233] Downsampled and deduplicated data were used to generate metagenomic assemblies. First, pre- and post-HC data were digitally normalized with the program khmer (Crusoe, Michael R., Hussien F. Alameldin, Sherine Awad, Elmar Boucher, Adam Caldwell, Reed Cartwright, Amanda Charbonneau, et al. 2015. “The Khmer Software Package: Enabling Efficient Nucleotide Sequence Analysis.” F1000Research 4 (September): 900.). Then, downsampled data were processed with Trim Galore (bioinformatics.babraham.ac.uk/projects/trim_galore/) to remove leftover adapter content. Then, as the background was 99% human DNA, the normalized data were cleaned of human data using Bowtie2 (with “very sensitive” pre-set was used; i.e., -D 20 -R 3 -N 0 -L 20 -i S, 1, 0.50; where -D <int> means give up extending after <int> failed extends in a row, -R <int> means for reads with repetitive seeds, try <int> sets of seeds, -N <int> means max # mismatches in seed alignment can be 0 or 1, -L <int> means length of seed substrings; must be >3, <32, and i <func> means interval between seed substrings w/r/t read len) against the hg38 reference. Reads that did not align to the human genome were then assembled with MetaSPAdes (Nurk, Sergey, Dmitry Meleshko, Anton Korobeynikov, and Pavel A. Pevzner. 2017. “metaSPAdes: A New Versatile Metagenomic Assembler.” Genome Research 27 (5): 824-34.) with default parameters. Contigs and scaffolds smaller than 1 kb were removed. Then, GAEMR (software.broadinstitute.org/software/gaemr/) was used to assess assembly metrics and determine the taxonomy of each contig/scaffold.

### Nucleic Acid Extraction, Library Construction, and Sequencing for Clinical Stool Samples

[0234] Stool was collected at home and stored in ethanol until nucleic acid extraction. Nucleic acids were extracted using the Chemagic Blood Kit (CMG-1091), along with separately purchased lysis reagents for the upfront prep (lysozyme, Pro K, and RLT Buffer from Qiagen). The resulting ˜100 μL of total nucleic acids was split in half, cleaning up ˜50 μL for DNA and ˜50 μL for RNA. For the cleanup of the DNA aliquot, SUPERase was used followed by SPRI clean-up with Agencourt AMPure beads. For the cleanup of the RNA aliquot, DNase was used, followed by a SPRI clean-up with Agencourt AMPure beads. DNA-Seq libraries were prepared from 100-120 ng genomic DNA samples using bead-linked transposomes for tagmentation (Illumina DNA Prep or DNA Prep with Enrichment kits) following the manufacturer's instructions, with the modification generic custom Nextera primer pairs with 8-base unique dual indexes were used for PCR amplification (9 cycles).

[0235] To enrich E. coli sequences in DNA and RNA libraries, multiplex solution hybrid capture (HC) was performed using a Roche SeqCap EZ Hypercap kit with the hybrid capture probe set. DNA-Seq libraries were processed in pools of 8 libraries (˜200 ng each). RNA-Seq libraries were prepared as pools of multiplex RNAtag-Seq libraries from 12 RNA samples (Shishkin, Alexander A., Georgia Giannoukos, Alper Kucukural, Dawn Ciulla, Michele Busby, Christine Surka, Jenny Chen, et al. 2015. “Simultaneous Generation of Many RNA-Seq Libraries in a Single Reaction.” Nature Methods 12 (4): 323-25; Bhattacharyya, Roby P., Nirmalya Bandyopadhyay, Peijun Ma, Sophie S. Son, Jamin Liu, Lorrie L. He, Lidan Wu, et al. 2019. “Simultaneous Detection of Genotype and Phenotype Enables Rapid and Accurate Antibiotic Susceptibility Determination.” Nature Medicine 25 (12): 1858-64) and amplified by 14 cycles of PCR to generate at least 100 (mean 140) ng of each library pool for HC (one 24-plex pool per reaction). Hybridization and target capture was completed according to the SeqCap kit manufacturer instructions except that the probe pool was diluted 1:2 to 500 pmol/ul before use and custom Nextera adapter blocking oligonucleotides (Metsky, Hayden C., Viral Hemorrhagic Fever Consortium, Katherine J. Siddle, Adrianne Gladden-Young, James Qu, David K. Yang, Patrick Brehio, et al. 2019. “Capturing Sequence Diversity in Metagenomes with Comprehensive and Scalable Probe Design.” Nature Biotechnology.doi.org/10.1038/s41587-018-0006-x) were substituted for the SeqCap HE Universal adapter and index blocking oligonucleotides. After hybridization (18 h), bead capture and washes, 15 cycles of PCR were performed with generic universal Illumina P7 and P5 primers. The final libraries were quantified by Qubit fluorometry (Thermo Fisher Scientific) and their size distribution analyzed by TapeStation electrophoresis (Agilent) prior to pooling and Illumina sequencing.

[0236] Pre-hybrid capture (HC) DNA libraries were sequenced on a HiSeqX, generating on average 10.9±2.8 million paired-end 151 bp reads. Pre-HC RNA libraries were sequenced on a NovaSeq, generating on average 95.8±35.5 million paired-end 151 bp reads. All post-HC libraries were run on an Illumina NovaSeq, generating on average 11.6±3.8 million paired-end 151 bp reads for post-HC DNA libraries, and 17.0±5.4 million paired-end 151 bp reads for post-HC RNA libraries, respectively. Sequences were uniformly downsampled to 6.67 million reads for DNA and 10 million reads for RNA for downstream analysis.

### Metagenomic Analysis of Human Stool Samples

[0237] For strain-level analysis of StrainGE, both pre- and post-HC sequence data were downsampled to 2 Gb (6,666,666 paired-end reads) per sample, in order to establish equivalent sequencing depths in the two sample types for comparisons. Duplicate reads were not de novo deduplicated because low PCR duplication was observed in the post-HC libraries for these libraries. Quality was assessed with FastQC and MultiQC. Downsampled data were then processed with Trim Galore and KneadData (huttenhower.sph.harvard.edu/kneaddata/) to remove low quality sequence, adapter content, and human contamination. StrainGST was used to determine strain identities, as well as their relative abundances and depth and breadth of coverage, using a database of 361 diverse Escherichia (including E. coli, Shigella, and other Escherichia species) RefSeq complete chromosomal references (i.e., excluding plasmid sequences) downloaded in June 2020.

[0238] Metagenomic assemblies were generated using the complete sequencing data, rather than downsampled data, in order to maximize assembly quality. Similar to the analysis of mock community data, digital normalization was performed with khmer, adapter trimming with Trim Galore, and assembly with MetaSPAdes. Assembly metrics were calculated as before, using GAEMR. Metrics reported in Table 3 were calculated based on only contigs assigned to E. coli using blastn. After assemblies were produced, a binning program, MetaBat2 (Kang, Dongwan D., Feng Li, Edward Kirton, Ashleigh Thomas, Rob Egan, Hong An, and Zhong Wang. 2019. “MetaBAT 2: An Adaptive Binning Algorithm for Robust and Efficient Genome Reconstruction from Metagenome Assemblies.” PeerJ 7 (July): e7359.), was used to produce metagenome-assembled genomes (MAGs). MAGs were analyzed with CheckM (Parks, Donovan H., Michael Imelfort, Connor T. Skennerton, Philip Hugenholtz, and Gene W. Tyson. 2015. “CheckM: Assessing the Quality of Microbial Genomes Recovered from Isolates, Single Cells, and Metagenomes.” Genome Research 25 (7): 1043-55.) to determine taxonomy and assembly completeness for MAGs that were classified as Enterobacteriaceae by CheckM (Table 4).

[0239] Taxonomic profiles for the metagenomes were calculated using Kraken2 (Wood, Derrick E., Jennifer Lu, and Ben Langmead. 2019. “Improved Metagenomic Analysis with Kraken 2.” Genome Biology 20 (1): 257.) and Bracken (Lu, Jennifer, Florian P. Breitwieser, Peter Thielen, and Steven L. Salzberg. 2017. “Bracken: Estimating Species Abundance in Metagenomics Data.” PeerJ Computer Science 3 (January): e104). E. coli and Shigella relative abundances were removed from the taxonomic table and relative abundances of the remaining taxa were renormalized to sum to 100%. Bray-Curtis Dissimilarity values were calculated with the R package vegan (cran.r-project.org/package=vegan). Principal Coordinate Analysis (PCoA) was performed with the R package ecodist (cran.r-project.org/package=ecodist).

### Metatranscriptomic Analysis of Human Stool Samples

[0240] In order to establish equivalent sequence depths for comparisons, both pre- and post-hybrid capture (HC) sequence data were downsampled to 3.5 Gb (10,000,000 paired-end reads) per sample. Quality was assessed with FastQC and MultiQC. Reads were processed with Trim Galore, SortMeRNA, and KneadData to remove adapter content, low quality sequence, human contamination, and ribosomal RNA content. Then, processed data were aligned with Bowtie2 (default parameters) to the reference of the strain(s) that was detected by StrainGST in the corresponding DNA sample. Properly paired reads with MQ≥5 were retained with samtools. Transcript abundance was calculated with htseq-count and then normalized for total sequencing depth per sample into Counts Per Million (CPM).

[0241] Transcripts were only considered in downstream analysis if they had expression levels of at least 10 CPM in either pre- or post-HC data. Transcripts that had 10 CPM or greater in pre-HC, but not post-HC, were considered drop-out transcripts. Transcripts that had 10 CPM or greater in post-HC, but not pre-HC, were considered novel transcripts.

### Statistical Analysis and Graphical Plotting

[0242] All statistical analysis and plotting was performed in R (Team, R. Core, and Others. 2012. “R: A Language and Environment for Statistical Computing.”) with the following libraries: ggplot2 (Wilkinson, Leland. 2011. “ggplot2: Elegant Graphics for Data Analysis by WICKHAM, H.” Biometrics. doi.org/10.1111/j.1541-0420.2011.01616.x), data.table (rdatatable.gitlab.io/data.table/), Rmisc (cran.r-project.org/package=Rmisc).

### Data Availability

[0243] Sequencing data for the pre-HC mock community was submitted to NCBI's Sequence Read Archive (SRA) under BioProject PRJNA685748 (BioSample SAMN17091845).

### Other Embodiments

[0244] From the foregoing description, it will be apparent that variations and modifications may be made to the invention described herein to adapt it to various usages and conditions. Such embodiments are also within the scope of the following claims.

[0245] The recitation of a listing of elements in any definition of a variable herein includes definitions of that variable as any single element or combination (or subcombination) of listed elements. The recitation of an embodiment herein includes that embodiment as any single embodiment or in combination with any other embodiments or portions thereof.

[0246] All patents and publications mentioned in this specification are herein incorporated by reference to the same extent as if each independent patent and publication was specifically and individually indicated to be incorporated by reference.

The application's sequence listing, which the Patent Office published only in electronic form, follows.

SEQUENCE LISTING (892415 sequences)

SEQ ID NO: 1 - DNA, 75 bp, synthetic construct
  source 1..75: mol_type = other DNA
tgtccgcagccatttgtctggccgtatccggtgcgcctgcatgggcgtctgaacatcagtccacgctgagcgcgg

SEQ ID NO: 2 - DNA, 75 bp, synthetic construct
  source 1..75: mol_type = other DNA
gggctcggtactcctggttcccgcacggtggctgaactggaatctgaaattctgcaactgcgtaaggcgttaaat

SEQ ID NO: 3 - DNA, 75 bp, synthetic construct
  source 1..75: mol_type = other DNA
ctaaagagttcaaagccgaagctgtcagaacggttcttgaaaatcaactttcgatcagtgaaggcgcttcccgat

SEQ ID NO: 4 - DNA, 75 bp, synthetic construct
  source 1..75: mol_type = other DNA
ggtaaaaaggtccgtacgaccatcagccggaaagccgttgccgcaggcgaccgcgtaaaccgtcagttcgtggca

SEQ ID NO: 5 - DNA, 75 bp, synthetic construct
  source 1..75: mol_type = other DNA
gccgcagtaacgatatccttcgccaggcttccgcttattttgcgaaggcggagttcgaccgcctctggaaaaaat

SEQ ID NO: 6 - DNA, 75 bp, synthetic construct
  source 1..75: mol_type = other DNA
ggagcggttattacaactgggtacagcatgaaccctcagacagaaaacaaagtgatgagcggctaaaactggaga

SEQ ID NO: 7 - DNA, 75 bp, synthetic construct
  source 1..75: mol_type = other DNA
gaagctcgccttgagcgagatatattaaaaaaagcaacagcgtattttgcacaggagtcgctgaaaaatacgcgt

SEQ ID NO: 8 - DNA, 75 bp, synthetic construct
  source 1..75: mol_type = other DNA
tgagattttctacaatcgtcagcgtcgtcactctcgtctggggaatatctccccggcagccttcagggaaaaata

SEQ ID NO: 9 - DNA, 75 bp, synthetic construct
  source 1..75: mol_type = other DNA
tctgccagttgcgccaaatctgctgaaccagacgttcgctcctacagcaccaaatcaggtctgggtggcggacct

SEQ ID NO: 10 - DNA, 75 bp, synthetic construct
  source 1..75: mol_type = other DNA
aacgcagacggcgtaccacacaggaaaagatcgcaattgttcagcagagctttgaaccggggatgacggtctccc

SEQ ID NO: 11 - DNA, 75 bp, synthetic construct
  source 1..75: mol_type = other DNA
atgtttatacgtgcgaaattgtcggctacgccatgggagagcgcatgacaaaagagctgacaggtaaagccctgt

SEQ ID NO: 12 - DNA, 75 bp, synthetic construct
  source 1..75: mol_type = other DNA
cagacggagctggcagagaatggcatcatcgttggtcgtgaccgactggcacgtcttcgtaaggagctaaggcta

SEQ ID NO: 13 - DNA, 75 bp, synthetic construct
  source 1..75: mol_type = other DNA
ttcagcgtgacatcattctgtgggccgtacgctggtactgcaaatacggcatcagttaccgtgagctgcaggaga

SEQ ID NO: 14 - DNA, 75 bp, synthetic construct
  source 1..75: mol_type = other DNA
gctgaaaaatgagagcctgagccactatcgttttaataaccgggatgaagccatctcagtaatacgggaatacat

SEQ ID NO: 15 - DNA, 75 bp, synthetic construct
  source 1..75: mol_type = other DNA
gttcagcgttatgcgcctgaaatggaaaaacggctgcgctggtactggcgtaacccttccgatctttgcccgtgg

SEQ ID NO: 16 - DNA, 75 bp, synthetic construct
  source 1..75: mol_type = other DNA
ccgctgctgggggcgaaggtgctgcccggcgagacggaccttgcgctgcccggcccgctgccgttcattctctcc

SEQ ID NO: 17 - DNA, 75 bp, synthetic construct
  source 1..75: mol_type = other DNA
ggaaaatgaactcctcaaagaagccgttgaatatggacgggcaaaaaagtggatagcgcacgcgcccttattgcc

SEQ ID NO: 18 - DNA, 75 bp, synthetic construct
  source 1..75: mol_type = other DNA
tggtatcccgttacgattctctgcgtaacccactgacttctctgggggattacctcgaccccgaactcatctctc

SEQ ID NO: 19 - DNA, 75 bp, synthetic construct
  source 1..75: mol_type = other DNA
ctcgaaatgatggtctggtgtattgttggcatggcgcttgagcgtaaagaacctcttcaccagattgtgaatcgc

SEQ ID NO: 20 - DNA, 75 bp, synthetic construct
  source 1..75: mol_type = other DNA
gcaaaggccaggcctcagcattttattatggtgatcccctgggcgaaatgcgcctggtaagcagagtttttgaaa

SEQ ID NO: 21 - DNA, 75 bp, synthetic construct
  source 1..75: mol_type = other DNA
attaacgtgaaataccgttatgagtttacggacacactggggctggtgacgtcattcagctatgcaggagacaag

SEQ ID NO: 22 - DNA, 75 bp, synthetic construct
  source 1..75: mol_type = other DNA
ggcagtcaggttaaactgctgtggtccaccggtgacggactgtgcctcctgaccaaacggctggagcgtgggcgc

SEQ ID NO: 23 - DNA, 75 bp, synthetic construct
  source 1..75: mol_type = other DNA
ccgggccgtcgacagccggggccgcactgtcgatttttatctctcctcccgtcgtaacagcaaagctgcataccg

SEQ ID NO: 24 - DNA, 75 bp, synthetic construct
  source 1..75: mol_type = other DNA
agcagtacggggtcggaccggtatgcagcgaactgcatattgccccgtcaacgtattaccattgtcagcaacagc

SEQ ID NO: 25 - DNA, 75 bp, synthetic construct
  source 1..75: mol_type = other DNA
cccgaccgaatccgtggccattgatattgcttatgaaggctccggcagtggcgactggcgcactgacggtttcat

SEQ ID NO: 26 - DNA, 75 bp, synthetic construct
  source 1..75: mol_type = other DNA
tattcaggcccgccagcgcctgggaagtgaggctgtccgccgcgtgttcacgaaaacagcgcagctctggcataa

SEQ ID NO: 27 - DNA, 75 bp, synthetic construct
  source 1..75: mol_type = other DNA
agggagatatgactcagtatggcggtcccattgtccagggttcggcaggtgtaagaattggcgcgcccaccggcg

SEQ ID NO: 28 - DNA, 75 bp, synthetic construct
  source 1..75: mol_type = other DNA
aacttcggcagtcgttccgaaaaagtctcccgccgtatcgcacaaatggaagccgatctgaaccggcttcagaaa

SEQ ID NO: 29 - DNA, 75 bp, synthetic construct
  source 1..75: mol_type = other DNA
tgtccgcagtagtctggctggttgccgctggtacgccagcgagcgcagcagagcatcagtccacactaagcgccg

SEQ ID NO: 30 - DNA, 75 bp, synthetic construct
  source 1..75: mol_type = other DNA
cccggggatggggagtaagcttagtcagccgttgtctccgggtgtcgcgtgcgcagttgcacgtcattctcagac

SEQ ID NO: 31 - DNA, 75 bp, synthetic construct
  source 1..75: mol_type = other DNA
ttccggcacgggacgctccgcttcaatggcaatgtcagcgaaaagctcctgactctgctgatacaggaactgaag

SEQ ID NO: 32 - DNA, 75 bp, synthetic construct
  source 1..75: mol_type = other DNA
aacgcagacggcgtactacacaggaaaagatcgctattgttcagcagagttttgaaccgggaatgacggtctccc

SEQ ID NO: 33 - DNA, 75 bp, synthetic construct
  source 1..75: mol_type = other DNA
ctgctgacggctgcagccttcggcacgatgaagaacagcgaaaatgagcttgctgagcaacttatagaacaaacc

SEQ ID NO: 34 - DNA, 75 bp, synthetic construct
  source 1..75: mol_type = other DNA
gtgtgttctggcgcacaccggatacaccagagaacgatgcagccttcccccgccagacacatgccgggaacccgg

SEQ ID NO: 35 - DNA, 75 bp, synthetic construct
  source 1..75: mol_type = other DNA
ccgaagtccgtcaacgggcagtccgtatggttctggaaagtcagagcgaatatgactcacaatgggcgacaattt

SEQ ID NO: 36 - DNA, 75 bp, synthetic construct
  source 1..75: mol_type = other DNA
gtgaagaagtggcagatcccgcgattcatcaacacggataaagcgcccgcctatggtcgcgcgcttgctctgctc

SEQ ID NO: 37 - DNA, 75 bp, synthetic construct
  source 1..75: mol_type = other DNA
catacaccacgtcagcggtggggacgggatactggttactgcagctgctggacaaagtctctccgtcccagtggg

SEQ ID NO: 38 - DNA, 75 bp, synthetic construct
  source 1..75: mol_type = other DNA
aacctcgtaaaaactattcgaatgaattcaaacttcgtatggtggaactggcatcacaacctggagcttgtgttg

SEQ ID NO: 39 - DNA, 75 bp, synthetic construct
  source 1..75: mol_type = other DNA
cagcttgaagaggataaaatgggagagcagttatcgattccctatccgggcagcccgtttacgggccgtaagtaa

SEQ ID NO: 40 - DNA, 75 bp, synthetic construct
  source 1..75: mol_type = other DNA
aaatttggctggttgccggtatcaccgatatgagaaatggcttcaacggcctggctgcgaaagtacagacggcgc

SEQ ID NO: 41 - DNA, 75 bp, synthetic construct
  source 1..75: mol_type = other DNA
aagggccttcccgagagtggtaaaggagaggccctggaaataccccacagccccgaaaaagagccagtcagttgc

SEQ ID NO: 42 - DNA, 75 bp, synthetic construct
  source 1..75: mol_type = other DNA
aaatggcgacaacaatggcgcgagggaaagctgctattaccttcttcagagagcccccagctacttcctgtgact

SEQ ID NO: 43 - DNA, 75 bp, synthetic construct
  source 1..75: mol_type = other DNA
gatcgaggttcacagtactgcgcatacgattaccgggtcatacaggagcagtctggtctgaaaacatcaatgtcg

SEQ ID NO: 44 - DNA, 75 bp, synthetic construct
  source 1..75: mol_type = other DNA
gcgctggagcaggcgttgtgggcccgtcgtccgtctggcaccatccatcacagcgataaaggctctcagtatgtg

SEQ ID NO: 45 - DNA, 75 bp, synthetic construct
  source 1..75: mol_type = other DNA
cgctgcgtcaggcgcgccttgatttattaaccggtaaacgggtggtgtctgtccagaaagatggtcgcagaattg

SEQ ID NO: 46 - DNA, 75 bp, synthetic construct
  source 1..75: mol_type = other DNA
cgcagaaggataagttcggcgcgggtaagaacggttttacccgtggtaacccccagaccggcacacctgccaccg

SEQ ID NO: 47 - DNA, 75 bp, synthetic construct
  source 1..75: mol_type = other DNA
aggaaagacctctgcgaggtacgaatccgaaccggccagacggaggtcgctgtcttcacagcttacgaacctgag

SEQ ID NO: 48 - DNA, 75 bp, synthetic construct
  source 1..75: mol_type = other DNA
gcctctcgctgatcactcaaaataatatcaacaagaaccagtctgcgctgtcgagttctatcgagcgtctgtctt

SEQ ID NO: 49 - DNA, 75 bp, synthetic construct
  source 1..75: mol_type = other DNA
atcaggctgagttcagcatcaaagcaatgtgccgcgtgctccgggtggcccgcagcggctggtatacgtggtgtc

SEQ ID NO: 50 - DNA, 75 bp, synthetic construct
  source 1..75: mol_type = other DNA
cctcagtatcagctgtgaggtaacgttccggcacgggacgctccgcttcaatggcaatgtcagcgaaaagctcct

SEQ ID NO: 51 - DNA, 75 bp, synthetic construct
  source 1..75: mol_type = other DNA
atgcgactagccagtcgttttggttatgcgaaccagatacgccgtgaccgtccgctgacacacgaagaactgatg

SEQ ID NO: 52 - DNA, 75 bp, synthetic construct
  source 1..75: mol_type = other DNA
ccggaacaacgtgattgaatgcgatcatggcaaactgaaacggataatcggcgccacgctgggatttaaatccat

SEQ ID NO: 53 - DNA, 75 bp, synthetic construct
  source 1..75: mol_type = other DNA
aacggagtggagccagaaagctacctccgctatgtccttgacgtcatagccgactggccgataaaccgggtcggc

SEQ ID NO: 54 - DNA, 75 bp, synthetic construct
  source 1..75: mol_type = other DNA
gatgtgcttctccgtatacaccatgttatcggagagctgcccacgtatggttatcgtcgggtatgggcgctgctt

SEQ ID NO: 55 - DNA, 75 bp, synthetic construct
  source 1..75: mol_type = other DNA
atgactaaaaatactcgtttttcccccgaagtccgtcagcgggcgattcgtatggttctggaaagtcaggatgaa

SEQ ID NO: 56 - DNA, 75 bp, synthetic construct
  source 1..75: mol_type = other DNA
gctgtggggtgtcttactggcttataatctggtgagatatcagatgattaaaatggcggaacatctgaaaggtta

SEQ ID NO: 57 - DNA, 75 bp, synthetic construct
  source 1..75: mol_type = other DNA
aaaaagcctctgtttttgaactatggaagaacggaacaggcttcagtgaaatagcgaatatcctgggttcaaaac

SEQ ID NO: 58 - DNA, 75 bp, synthetic construct
  source 1..75: mol_type = other DNA
gtatctggctcgttgccggcgttaccgatatgcgtaaatccttcaacggactgggagaacaggtacaacatgtgc

SEQ ID NO: 59 - DNA, 75 bp, synthetic construct
  source 1..75: mol_type = other DNA
atgagtcagaaatacctcattcgcatcgcagagctggaaaggttgctctctgagcaggctgaagccctccgtcag

SEQ ID NO: 60 - DNA, 75 bp, synthetic construct
  source 1..75: mol_type = other DNA
gcgtaaccgctggttcagcgtgatggcggggccgtctgtgcgcgtgaatgaatggttcagcgcgtatgcgatggc

SEQ ID NO: 61 - DNA, 75 bp, synthetic construct
  source 1..75: mol_type = other DNA
tcttcctgctgaaacagcgcctggccgaacaggaagcgctgatccacgccctgcaggaaaagctgagcaaccggg

SEQ ID NO: 62 - DNA, 75 bp, synthetic construct
  source 1..75: mol_type = other DNA
agtgcaggatattcccggtgtgctggccgtgtttgcagaacgccgtaaggacagttttggtccgtatgtccggct

SEQ ID NO: 63 - DNA, 75 bp, synthetic construct
  source 1..75: mol_type = other DNA
atatttctattatccccgattacagacaagcctggaaagtggaacataaattatcggatattctactgttgacta

SEQ ID NO: 64 - DNA, 75 bp, synthetic construct
  source 1..75: mol_type = other DNA
ggcatcccgtctttttccgttctgtaccggcaaataccgctggcacggcagtgctgaagcgtataccggtcgtga

SEQ ID NO: 65 - DNA, 75 bp, synthetic construct
  source 1..75: mol_type = other DNA
ctgggttatcgctcgccacgggaatatctgcggcagcgggcttgtaatgggttaagtgataacagatgtctggaa

SEQ ID NO: 66 - DNA, 75 bp, synthetic construct
  source 1..75: mol_type = other DNA
agcgttgtcctcgcggcttttacccggtcaaaacagcgttacggtgccccacgcctgacggatgaactgcgtgct

SEQ ID NO: 67 - DNA, 75 bp, synthetic construct
  source 1..75: mol_type = other DNA
gcaaggtgcaccttactccggctcagttatccatgcttcttgaaggtatcaactggaagcacccgaaacgaacgg

SEQ ID NO: 68 - DNA, 75 bp, synthetic construct
  source 1..75: mol_type = other DNA
tgcaggcatttatcggggagctggacggcggcgtatttgaaaccaaaatcggcgcagttctcagtgaagtcgctt

SEQ ID NO: 69 - DNA, 75 bp, synthetic construct
  source 1..75: mol_type = other DNA
ggcacgagaatggctgattctgaacatggcgggactggagcgtgaagagttccgggtgctgtatctgaacaacca

SEQ ID NO: 70 - DNA, 75 bp, synthetic construct
  source 1..75: mol_type = other DNA
atgactagtctaaaaactagtattaagactatcacttatttaagtgatattggttgtctggagattcagggggcc

SEQ ID NO: 71 - DNA, 75 bp, synthetic construct
  source 1..75: mol_type = other DNA
aagagacggaagccttcctgcgctctgcactgacacgtgccgaagaaaagatcgaagaagatgaacgggaaatag

SEQ ID NO: 72 - DNA, 75 bp, synthetic construct
  source 1..75: mol_type = other DNA
cgtctggtacaggcactgggcctggtggatatccgggtgccggaccatctgatagtcggtggcagccaggttttc

SEQ ID NO: 73 - DNA, 75 bp, synthetic construct
  source 1..75: mol_type = other DNA
aagcaataccaggaaggaagtcttactgctgtcgccgccggagaacaggttgttcctgcctctgaacttgctgcc

SEQ ID NO: 74 - DNA, 75 bp, synthetic construct
  source 1..75: mol_type = other DNA
atgagcggaaaaccggcagcgcgtcagggcgacatgacgcagtatggcggtagcattgttcagggttcagccggg

SEQ ID NO: 75 - DNA, 75 bp, synthetic construct
  source 1..75: mol_type = other DNA
gttgcgtcagacccgcacccgtaagccgttccctgaatcactaccccgtgacgaaaagcgactgttgcctgcggc

SEQ ID NO: 76 - DNA, 75 bp, synthetic construct
  source 1..75: mol_type = other DNA
ccatgcgtattcaccaacaacatccgacatcccgtctttttccgttctgtaccggtaaataccgctggcacggca

SEQ ID NO: 77 - DNA, 75 bp, synthetic construct
  source 1..75: mol_type = other DNA
ttgttgcccggcaacacggtgtggcagccagccagttatttctctggcgcaagcaataccaggagggaagtctta

SEQ ID NO: 78 - DNA, 75 bp, synthetic construct
  source 1..75: mol_type = other DNA
aagagagagatacagcgcgtatacgatgaaaatcatcaggtgtacggtgtgcgtaaagtctggcgtcagttgtta

SEQ ID NO: 79 - DNA, 75 bp, synthetic construct
  source 1..75: mol_type = other DNA
tgacctgtgccgggtggtctgcgcgggtcgggatgttgcgcgttgagttcagcgcggagtttaagcaggtggtga

SEQ ID NO: 80 - DNA, 75 bp, synthetic construct
  source 1..75: mol_type = other DNA
ataacatcgctgaaaatgcgttgcggatggtcagtctgggccgcaaaaactacctgttcttcggttcggatcatg

SEQ ID NO: 81 - DNA, 75 bp, synthetic construct
  source 1..75: mol_type = other DNA
gtcccggtgctgttgccaggcaataagaaaacgaagaccgggcggttatggacctacgttcgtgacgaccgtaac

SEQ ID NO: 82 - DNA, 75 bp, synthetic construct
  source 1..75: mol_type = other DNA
ggtgaccagataaaagtgttgtgggctgacagtgacggactgtgcctcttcaccaaacgcctggagcggggccgc

SEQ ID NO: 83 - DNA, 75 bp, synthetic construct
  source 1..75: mol_type = other DNA
tccgctatgtccttgacgtcatagccgactggccgataaaccgggtcggcgaactgctcccctggcgcgtagcac

SEQ ID NO: 84 - DNA, 75 bp, synthetic construct
  source 1..75: mol_type = other DNA
ctcaggctctggcagaacgaagggcgtgtttcgcggcgtcttccggtaacgacctcttctgacactggcgttgaa

SEQ ID NO: 85 - DNA, 75 bp, synthetic construct
  source 1..75: mol_type = other DNA
aatcaaaaaagaataaaactcagtcttgggggactcagcccggtagaataccggactgagtatcaaaaagccggt

SEQ ID NO: 86 - DNA, 75 bp, synthetic construct
  source 1..75: mol_type = other DNA
atgaaaatcatcacccgtggcgaagccatgcgtattcaccgtcagcatccggcatcccgtctttttccgttctgt

SEQ ID NO: 87 - DNA, 75 bp, synthetic construct
  source 1..75: mol_type = other DNA
atgaaaatcatcaggtgtacggtgtgcgtaaagtctggcgtcagttgttacgggaaggaatcagggtggccagat

SEQ ID NO: 88 - DNA, 75 bp, synthetic construct
  source 1..75: mol_type = other DNA
gtggcgcacgtcttcggtgaacgcactctggccacactggagcgtcttctgagcctgctgtcggcctttgaggtc

SEQ ID NO: 89 - DNA, 75 bp, synthetic construct
  source 1..75: mol_type = other DNA
ctgattttacttacgtcagcacatggcagggcttcgtctatgtggcgtttatcattgatgtgtttgccggataca

SEQ ID NO: 90 - DNA, 75 bp, synthetic construct
  source 1..75: mol_type = other DNA
gatgatggctgggctgaggcggacaataacatcgctgaaaatgcgttgcggatggtcagtctgggccgcaaaaac

SEQ ID NO: 91 - DNA, 75 bp, synthetic construct
  source 1..75: mol_type = other DNA
taactgacaacaaggggaaaacgcacgatgtgctgaccggaagtgatgacggtcgccacagcaacacgtctctgg

SEQ ID NO: 92 - DNA, 75 bp, synthetic construct
  source 1..75: mol_type = other DNA
tcagggcggcgtcgccgtcagaccttgcggaaaagctgacacacaaactgaaagagggctggcagccatacggcg

SEQ ID NO: 93 - DNA, 75 bp, synthetic construct
  source 1..75: mol_type = other DNA
tgcccgaaggccctttctcacgcgaacaggctgttgccgtcaaaacagcttaccgcaatgtgtttactgaagatg

SEQ ID NO: 94 - DNA, 75 bp, synthetic construct
  source 1..75: mol_type = other DNA
gcaaagtgttccttacgcaggcgcagctggcgatgctgctggaaggtatcgactggcgacagcctaagcggctgc

SEQ ID NO: 95 - DNA, 75 bp, synthetic construct
  source 1..75: mol_type = other DNA
cgttcgcaccccgtcagccctgacggaggaagcgctgaaacggatcggcgaactgtacgccatcgaggcagagat

SEQ ID NO: 96 - DNA, 75 bp, synthetic construct
  source 1..75: mol_type = other DNA
cgcattgaaatggagaatgaaatattaaaaaaggctaccgcgctcttgatgtcagactccctgaacagttctcga

SEQ ID NO: 97 - DNA, 75 bp, synthetic construct
  source 1..75: mol_type = other DNA
ctcttcaccggcaccatcaaccgcacggaagtccatccccgggaagtgattaaacgcgccctgtatcacaatgcc

SEQ ID NO: 98 - DNA, 75 bp, synthetic construct
  source 1..75: mol_type = other DNA
tcgcctgactattctgcaggaagaccagggacaattactgactcttgccggtgaacctgacggaaaactccgcgc

SEQ ID NO: 99 - DNA, 75 bp, synthetic construct
  source 1..75: mol_type = other DNA
caggtgtgtcatacaccacgtcagcggtgggaacgggctactggttcctgcagttgctggacagggtttccccgt

SEQ ID NO: 100 - DNA, 75 bp, synthetic construct
  source 1..75: mol_type = other DNA
atgctgggagcggtggaacgccgcttcggcaacgatcttccgtcgtctccagtggagtggctgacggataatggt

SEQ ID NO: 101 - DNA, 75 bp, synthetic construct
  source 1..75: mol_type = other DNA
taccgcaatgtgtttactgaagatgaccagggaacatattcccggctggttatccgtaatgctgaaggtcagttg

SEQ ID NO: 102 - DNA, 75 bp, synthetic construct
  source 1..75: mol_type = other DNA
aaatttggctggttgccggtatcaccgatatgagaaatggcttcaacggcctggctgcgaaagtacaaacggcgc

SEQ ID NO: 103 - DNA, 75 bp, synthetic construct
  source 1..75: mol_type = other DNA
tggaagtggacggcctgccgccggatgcttttgcggtggtttcctttcatctgaaccagtcactctcttcgctct

SEQ ID NO: 104 - DNA, 75 bp, synthetic construct
  source 1..75: mol_type = other DNA
atacgtctgaaggttgttttgaaattggtgtcactatcagtaaccctgtatttactgaagatgccattaacaaga

SEQ ID NO: 105 - DNA, 75 bp, synthetic construct
  source 1..75: mol_type = other DNA
tcgttgcccggcaacatggtgtagcagccagccagttatttctctggcgtaagcaataccaggaaggaagtctta

SEQ ID NO: 106 - DNA, 75 bp, synthetic construct
  source 1..75: mol_type = other DNA
tatcggccacgttgaccatggtaaaacaacgctgaccgctgcaatcactaccgtactggctaaaacctacggcgg

SEQ ID NO: 107 - DNA, 75 bp, synthetic construct
  source 1..75: mol_type = other DNA
gcgtggccttcacctccacccgtgcagcacgggaatggctgattctgaacatggcgggactggagcgtgaagaat

SEQ ID NO: 108 - DNA, 75 bp, synthetic construct
  source 1..75: mol_type = other DNA
gctgcgtcaaacccgcacccgcaaaccgttccccgaatcactcccccgcgatgaaaaacggctgctgccggcagc

SEQ ID NO: 109 - DNA, 75 bp, synthetic construct
  source 1..75: mol_type = other DNA
atgcagcagctttcctttctgcccggagaaatgacgcccggcgagcgcagtctcattctgcgggctctgaaaacc

SEQ ID NO: 110 - DNA, 75 bp, synthetic construct
  source 1..75: mol_type = other DNA
ggcagtcaggtaaagctcctctggtctaccggcgatggactgtgtctgctgaccaaacggctggagcgcggccgc

SEQ ID NO: 111 - DNA, 75 bp, synthetic construct
  source 1..75: mol_type = other DNA
ttgttgaagcaccggcgccgtcccgcccgatagagcgtggtatcgcgggccccggattacttgcccgcgtgttaa

SEQ ID NO: 112 - DNA, 75 bp, synthetic construct
  source 1..75: mol_type = other DNA
tcaatgcactgaaacgtctccttgccgaacaggaggcgctgaaccgtgccctgctggaaaagctgaacgagcgtg

SEQ ID NO: 113 - DNA, 75 bp, synthetic construct
  source 1..75: mol_type = other DNA
tgctgatgacattgcagggcgcttcaccgggacgtataccggagctgatgcgcgatcttgcaagtatgggacaac

SEQ ID NO: 114 - DNA, 75 bp, synthetic construct
  source 1..75: mol_type = other DNA
gggactgagggcaaaggcctcccggaagttcagcccggtcagctaccgcgcacacggcctgcctgtgtcagaaaa

SEQ ID NO: 115 - DNA, 75 bp, synthetic construct
  source 1..75: mol_type = other DNA
ggcgaaaaggctgccctaattatcctcccgaatttaaacagcagctcgttgctgcctcctgtgaacccgggatat

SEQ ID NO: 116 - DNA, 75 bp, synthetic construct
  source 1..75: mol_type = other DNA
ccgccgaacagctggagttgatgcgtagcgccttccgggttatccggacggtacgggaaaaacatgcctgtactc

SEQ ID NO: 117 - DNA, 75 bp, synthetic construct
  source 1..75: mol_type = other DNA
attaacgtgaaataccgttatgagtttacggacgcgctggggctgattacgtccttcagttatgccaatgctgag

SEQ ID NO: 118 - DNA, 75 bp, synthetic construct
  source 1..75: mol_type = other DNA
cggccccggctggaaaatgcctgcggatatccgcttacagctgcgcgataacacactgatactcagtgataacgg

SEQ ID NO: 119 - DNA, 75 bp, synthetic construct
  source 1..75: mol_type = other DNA
cattgcgccgtctttatccacttccactcagaccagagtcagtgccagttcctgcaaggtggaattccgtcacgg

SEQ ID NO: 120 - DNA, 75 bp, synthetic construct
  source 1..75: mol_type = other DNA
agatctggctggtcgctggcatcaccgatatgagaaacggcttcaacggcctggcggcaaaggtgcagacgacgc

SEQ ID NO: 121 - DNA, 75 bp, synthetic construct
  source 1..75: mol_type = other DNA
agtgcaggatattcccggtgtgctggccgtgtttgctgaacgccgtaaggacagttttggtccgtatgtccggct

SEQ ID NO: 122 - DNA, 75 bp, synthetic construct
  source 1..75: mol_type = other DNA
gagcgtaagcgggctgtagctcacctgacactgtctgagcgcgaggagatacgagctggtttgtcagccaaaatg

SEQ ID NO: 123 - DNA, 75 bp, synthetic construct
  source 1..75: mol_type = other DNA
tcgctggcctacacacagcggcttaaggaagccggattactggcatcaacaggaagtacaggcgactcgtatgac

SEQ ID NO: 124 - DNA, 75 bp, synthetic construct
  source 1..75: mol_type = other DNA
atgactaaaaatactcgtttttcccccgaagtccgtcagagggcgattcgtatggttctggaaagtcagggcgaa

SEQ ID NO: 125 - DNA, 75 bp, synthetic construct
  source 1..75: mol_type = other DNA
aaagctgcacgttatcagcaagcgttacactcagcgcattgagcgacataatctgaatctgagacaacatctggc

SEQ ID NO: 126 - DNA, 75 bp, synthetic construct
  source 1..75: mol_type = other DNA
tcgcctccatgcgcctgtttgcccgattatccctggatagcgccctgccggatcgcaccaccatcatgaatttcc

SEQ ID NO: 127 - DNA, 75 bp, synthetic construct
  source 1..75: mol_type = other DNA
tgctgaaagatggtgcgggaaaaccaatacagaactgcactattcaactgaaggcaaagcgtaacagcaccacgg

SEQ ID NO: 128 - DNA, 75 bp, synthetic construct
  source 1..75: mol_type = other DNA
agcagtacggggtcggaccgctatgcagcgaactgcatattgccccgtcaacgtattaccactgtcagcaacagc

SEQ ID NO: 129 - DNA, 75 bp, synthetic construct
  source 1..75: mol_type = other DNA
tgtccgcagtagtctggcaggtcgccgctgctacgccagcgagtgcagcagaacatcagtccacgctgagcgcgg

SEQ ID NO: 130 - DNA, 75 bp, synthetic construct
  source 1..75: mol_type = other DNA
aaaaaccccgtaaacagcattcgcctgaatttcgcagtgaagccctgaagcttgctgaacgcatcggtgttactg

SEQ ID NO: 131 - DNA, 75 bp, synthetic construct
  source 1..75: mol_type = other DNA
attgctgggaaggctgggccatactcctccggcagaagcagaaaaagcttattatgcttccatcggaaacgatga

SEQ ID NO: 132 - DNA, 75 bp, synthetic construct
  source 1..75: mol_type = other DNA
caattaatcaaatccatgcccttatttctgctcagggtgttaatgaaattatcagtaagattggtgccgatgctg

SEQ ID NO: 133 - DNA, 75 bp, synthetic construct
  source 1..75: mol_type = other DNA
aagcgttcgcatacgccctgaaccagtggccggcgctgacgtactatgcagatgatggctgggctgaggcggaca

SEQ ID NO: 134 - DNA, 75 bp, synthetic construct
  source 1..75: mol_type = other DNA
gggtagcctggtatttggcctgctgacgtacctgacaaacctttatttcaagattaaagaagataagcgcaaggc

SEQ ID NO: 135 - DNA, 75 bp, synthetic construct
  source 1..75: mol_type = other DNA
atgactagtctaaaaactagtattaagactatcacttatttaagtgatactggttgtctggagattcagggggcc

SEQ ID NO: 136 - DNA, 75 bp, synthetic construct
  source 1..75: mol_type = other DNA
acgtattaccactgtcagcaacagcgacatcatcctgataaacgcagtgcccgtgcgcagcgcgatgactggctg

SEQ ID NO: 137 - DNA, 75 bp, synthetic construct
  source 1..75: mol_type = other DNA
cgttctgaaaaactgcgtcgtgaagttgaactggctgaggctctgctgaaacaacgtgaacaggacagcgatcgt

SEQ ID NO: 138 - DNA, 75 bp, synthetic construct
  source 1..75: mol_type = other DNA
gtgtggtgcggtgatgtgacctatatctggacgggtaagcgctgggcgtacctcgccgttgttctcgacctgttc

SEQ ID NO: 139 - DNA, 75 bp, synthetic construct
  source 1..75: mol_type = other DNA
tgaaccgaagaacacggcggtgcggagtccggagagtaacggaatagcagagagcttcgtgaaaacgataaagcg

SEQ ID NO: 140 - DNA, 75 bp, synthetic construct
  source 1..75: mol_type = other DNA
cttacgtgccgaaaggcaaggagaagcaggctatgaagcagcaaaaggcgatgttaatcgccctgatcgtcatct

SEQ ID NO: 141 - DNA, 75 bp, synthetic construct
  source 1..75: mol_type = other DNA
ggtatcgccggaccggggctgctggcccgcgtgctgacctcgaagtatgcagagcacaccccgctgtatcgccag

SEQ ID NO: 142 - DNA, 75 bp, synthetic construct
  source 1..75: mol_type = other DNA
cgtaaggacagatgcagcaagtgcatgcgcgggtgtgaactgcgcaggaatgtcggcaattttggcggtttcctt

SEQ ID NO: 143 - DNA, 75 bp, synthetic construct
  source 1..75: mol_type = other DNA
tgtccgcagccatctgtctgtccgtatccggtgcgcctgcatgggcgtctgaacatcagtccacactgagcgcgg

SEQ ID NO: 144 - DNA, 75 bp, synthetic construct
  source 1..75: mol_type = other DNA
cttgcggggttcagtggtgtactgcaggcggatgcatacgccgggttcaacgagctgtaccgggatggccggata

SEQ ID NO: 145 - DNA, 75 bp, synthetic construct
  source 1..75: mol_type = other DNA
aagctttacgtcttcactttgaagaacatttaccccgggttgtggccgggcgtcgcctgggtgtaccaaaatcaa

SEQ ID NO: 146 - DNA, 75 bp, synthetic construct
  source 1..75: mol_type = other DNA
actggcaatgctcctcgataagctggactggcgtcagccaaaaacatccagccgtaactcactgacaatgttgta

SEQ ID NO: 147 - DNA, 75 bp, synthetic construct
  source 1..75: mol_type = other DNA
atgtccggcagtgcttttgccgttacgcaccacgccttcagtagcggagcaggaaggacatctgatggaaatgga

SEQ ID NO: 148 - DNA, 75 bp, synthetic construct
  source 1..75: mol_type = other DNA
ccgcgtaaaccgtcagttcgtggcagaacgacctgaccagctgtgggtggctgattttacttacgtcagcacatg

SEQ ID NO: 149 - DNA, 75 bp, synthetic construct
  source 1..75: mol_type = other DNA
accttgcagaggcgttcgagcattataacgaatggcatccgcatagtgcgctgggttatcgctcgccacgggaat

SEQ ID NO: 150 - DNA, 75 bp, synthetic construct
  source 1..75: mol_type = other DNA
cccggcgttgatggcgtgaacaaaacaatgctacaggccagactggctgttgagctgcaaatcctcagggatgaa

SEQ ID NO: 151 - DNA, 75 bp, synthetic construct
  source 1..75: mol_type = other DNA
gtatctggctggttgcaggtatcaccgatatgcgaaatggctttaacggcctggcatcaaaagttcagaacgtcc

SEQ ID NO: 152 - DNA, 75 bp, synthetic construct
  source 1..75: mol_type = other DNA
atgctcgaccggctggaaagtgaaatcctggctgaccgggtgagtgaggaaagccgccgctggctggcatcgtgc

SEQ ID NO: 153 - DNA, 75 bp, synthetic construct
  source 1..75: mol_type = other DNA
gcaaagtgttccttacgcaggcgcagctggcgatgctgctggaaggtatcgactggcgacagcccaagcggctgc

SEQ ID NO: 154 - DNA, 75 bp, synthetic construct
  source 1..75: mol_type = other DNA
gtatcgacaccgctaaagagaaactggatgtcgatgtgttgcgtcctgatggtcgtcatcgcaccaaaaaattcg

SEQ ID NO: 155 - DNA, 75 bp, synthetic construct
  source 1..75: mol_type = other DNA
tctgaaatgtacggccgccagggcgtggagctgagtcgttcactgctgtcgggctgggtggatgcatgctgccgg

SEQ ID NO: 156 - DNA, 75 bp, synthetic construct
  source 1..75: mol_type = other DNA
aaggggaatgacggcggagcagcgccttgccgaacgtcagttgaaaacgaaaccgctgctgaaatccctggaaag

SEQ ID NO: 157 - DNA, 75 bp, synthetic construct
  source 1..75: mol_type = other DNA
tgtccgcagccatttgtctggccgtatccggtgcgcctgcatgggcatctgaacatcagtccacgctgagcgcgg

SEQ ID NO: 158 - DNA, 75 bp, synthetic construct
  source 1..75: mol_type = other DNA
ggaaaatgaactccttaaagaagccgttgaatacgggcgtgcaaaaaagtggatagcgcacgcgcccttattgcc

SEQ ID NO: 159 - DNA, 75 bp, synthetic construct
  source 1..75: mol_type = other DNA
gaaaacaggaaggcagagcgtctgatcaaacatgcacggttcagacttaatgctgagttatcaaagctggattat

SEQ ID NO: 160 - DNA, 75 bp, synthetic construct
  source 1..75: mol_type = other DNA
tggcggctacccgaaggtaatccctatctgaggacggagaccagaaacacgtatacatcgcgctttacagaagtg

SEQ ID NO: 161 - DNA, 75 bp, synthetic construct
  source 1..75: mol_type = other DNA
gtcgcctgaaaatggagcatctgagttatcacgttgaaagcctgctggaacaggcagctaaaaaagagctgaact

SEQ ID NO: 162 - DNA, 75 bp, synthetic construct
  source 1..75: mol_type = other DNA
atagtgaattcagcactaagcgccgtcagacccgaaaagagattttcctctcccgcatggagcagattctgccat

SEQ ID NO: 163 - DNA, 75 bp, synthetic construct
  source 1..75: mol_type = other DNA
gcattggtacaacctgagcgacggtgccatggaagatgccctgtacgaaatcgcctccatgcgcctgtttgcccg

SEQ ID NO: 164 - DNA, 75 bp, synthetic construct
  source 1..75: mol_type = other DNA
gttaaatgcctggagcctggcgggagaacaccgccactggatgatacctctcagaaagggagcgcaatatgaaga

SEQ ID NO: 165 - DNA, 75 bp, synthetic construct
  source 1..75: mol_type = other DNA
agctggttctgccggccggaactctcaggcttaaaggtaaactgacgccggcgttattacagacacttatccgcg

SEQ ID NO: 166 - DNA, 75 bp, synthetic construct
  source 1..75: mol_type = other DNA
gatcgaggttcacagtactgcgcatacgattaccgggtcatacaggagcagtttggtctgaaaacatcaatgtcg

SEQ ID NO: 167 - DNA, 75 bp, synthetic construct
  source 1..75: mol_type = other DNA
gagacatcacgtacttacgtacagatgaaggctggctgtatctggcagtggtcattgacctgtggtcacgtgccg

SEQ ID NO: 168 - DNA, 75 bp, synthetic construct
  source 1..75: mol_type = other DNA
tgctgacaatcaagcagtggcgcgaaacatacggacctggtagcaacgttgtactgccagcagaagaagcggaag

SEQ ID NO: 169 - DNA, 75 bp, synthetic construct
  source 1..75: mol_type = other DNA
agtgcgatgccatcgtgcaggcccccgcgccttcacggcccatcgagcggggtatcgcaggaccggggctgctgg

SEQ ID NO: 170 - DNA, 75 bp, synthetic construct
  source 1..75: mol_type = other DNA
ttgccgccgggcatgagatggcttcggaactgaaagcagaatgtggtgccgttgatatgcgcagtgtggcaaagc

SEQ ID NO: 171 - DNA, 75 bp, synthetic construct
  source 1..75: mol_type = other DNA
cgcagaaggataagttcggcgcgggtaagaacggttttacccgtggtaacccccagaccggcacgcctgccaccg

SEQ ID NO: 172 - DNA, 75 bp, synthetic construct
  source 1..75: mol_type = other DNA
attatatcgaatgtgattacaatcggtggcggcggcacagttggtgtggcggcctcagtccggaacaatttgaaa

SEQ ID NO: 173 - DNA, 75 bp, synthetic construct
  source 1..75: mol_type = other DNA
ccgtgcgcagcgcgatgactggctgaagaaagagatactgcgcgtatacgatgggaatcatcaggtatacggtgt

SEQ ID NO: 174 - DNA, 75 bp, synthetic construct
  source 1..75: mol_type = other DNA
gggtgagcaatatgacccggtactgccatccgccctgcgccagtcttcagcccgtaaaccgttaccggcctcact

SEQ ID NO: 175 - DNA, 75 bp, synthetic construct
  source 1..75: mol_type = other DNA
acgtgaagttcagcgtaatcggggcagacgctattacaaagctgttgatgctaataaccgagccaacagaatggc

SEQ ID NO: 176 - DNA, 75 bp, synthetic construct
  source 1..75: mol_type = other DNA
ccatgcgtattcaccgtcagcatcctgcatcccgtctttttccgttctgtaccggtaaataccgctggcacggta

SEQ ID NO: 177 - DNA, 75 bp, synthetic construct
  source 1..75: mol_type = other DNA
catcctagatcgactggttcatggcagtatcaagatcgaacttaaaggagaatcaatgcggaaaatacaatctcc

SEQ ID NO: 178 - DNA, 75 bp, synthetic construct
  source 1..75: mol_type = other DNA
agggagtacaggcgactcgtatgacaacgcgatggctgagagcatcaatggtctttacaaagcggaggtaataca

SEQ ID NO: 179 - DNA, 75 bp, synthetic construct
  source 1..75: mol_type = other DNA
tacaccggagactctgcgtgtctgggtacgccagcatgagcgggataccggaggcggtgatggcgggctcaccac

SEQ ID NO: 180 - DNA, 75 bp, synthetic construct
  source 1..75: mol_type = other DNA
atcgaaccatttgatgagaaccgtgtgaaaatcaaacacaaactctcatatgttcgcccgactaaccgcgggaaa

SEQ ID NO: 181 - DNA, 75 bp, synthetic construct
  source 1..75: mol_type = other DNA
ttgaagtggacggcctgccaccggacgcgtttgcggtggtttcctttcatctcacccagtcactctcttcacttt

SEQ ID NO: 182 - DNA, 75 bp, synthetic construct
  source 1..75: mol_type = other DNA
caggcgctggctgcacaaaaagccgggatttccgtcgggcagtataaagcggccatgcgaaccctgcccgcacag

SEQ ID NO: 183 - DNA, 75 bp, synthetic construct
  source 1..75: mol_type = other DNA
agggcgacatgacgcagtatggcggtagcattgttcagggttcagccggggtgcgcattggtgcccccaccggcg

SEQ ID NO: 184 - DNA, 75 bp, synthetic construct
  source 1..75: mol_type = other DNA
gaaaacaagaacgggagctattaaataaaatatgcattgtttcaatgctggctcgtttacgtctgatgccaaaag

SEQ ID NO: 185 - DNA, 75 bp, synthetic construct
  source 1..75: mol_type = other DNA
cgggaaggtatcagagtggccagatgcactgtggcacgtctcatggcagttatgggacttgccggtgttctccgg

SEQ ID NO: 186 - DNA, 75 bp, synthetic construct
  source 1..75: mol_type = other DNA
tgcaaagccgataccctcagcagttgtggttacgtttatctggctgtttatccgacgcccgaaatgaaaaattaa

SEQ ID NO: 187 - DNA, 75 bp, synthetic construct
  source 1..75: mol_type = other DNA
gccatgaagcagattaaagaactccagcgcctgctcggcaagaaaacgatggaaaatgaactcctcaaagaagcc

SEQ ID NO: 188 - DNA, 75 bp, synthetic construct
  source 1..75: mol_type = other DNA
aaactggttaaccctgaaacaaaatattttactgaccggggccaccggcagcggtaaaacgttcctggcatgtgc

SEQ ID NO: 189 - DNA, 75 bp, synthetic construct
  source 1..75: mol_type = other DNA
atgaccagatggtcgacatggcatttatcactcaactgaccggcctgaccgataagtggttttacaaactcatca

SEQ ID NO: 190 - DNA, 75 bp, synthetic construct
  source 1..75: mol_type = other DNA
agcagactgaaagctatggcagattcaccggtgaaccggatgagcttcagctggcacgatattttcaccttgatg

SEQ ID NO: 191 - DNA, 75 bp, synthetic construct
  source 1..75: mol_type = other DNA
taaggtcggaactactcgattcacgttttggtgcgaagtctatttccactatcgcagaatcaaaacgttttccgc

SEQ ID NO: 192 - DNA, 75 bp, synthetic construct
  source 1..75: mol_type = other DNA
ttgcccgcaggcatgtcggagcaggaacttgatgcctgcctttacggacaattttccacggtaccagtcgtacgt

SEQ ID NO: 193 - DNA, 75 bp, synthetic construct
  source 1..75: mol_type = other DNA
aaaacgaggcaaacatgacgccggaagagatgaagaatgagctgcgttatcttcgcgcagaaaatgcatatctga

SEQ ID NO: 194 - DNA, 75 bp, synthetic construct
  source 1..75: mol_type = other DNA
gtggcttccatctccatcagttgtccctcctgctcagctactgaaggcgtggtgcgtaacggtaaaagtactgcc

SEQ ID NO: 195 - DNA, 75 bp, synthetic construct
  source 1..75: mol_type = other DNA
ccagccgggatcgggatactggtcgttaccagagccaccgacccgagcaaacccttctctatcagatcgttgacg

SEQ ID NO: 196 - DNA, 75 bp, synthetic construct
  source 1..75: mol_type = other DNA
gttcgccagcatgagcgggataccgggggcggtgatggagggctcaccaccgctgaacgtcagcgtctgaaagag

SEQ ID NO: 197 - DNA, 75 bp, synthetic construct
  source 1..75: mol_type = other DNA
gtcattcagctatgcaggagacaagaatcgccagcttacccgttacagcgatacccgctggcatgaagattccgt

SEQ ID NO: 198 - DNA, 75 bp, synthetic construct
  source 1..75: mol_type = other DNA
ttaaagcgctgatggaacagtgctatcaggggcatgctgatggaagatacagcaaacttttgaccaggctgaata

SEQ ID NO: 199 - DNA, 75 bp, synthetic construct
  source 1..75: mol_type = other DNA
atgaagcagcaaaaggcgatgttaatcgccctgatcgtcatctgtttaaccgtcatagtgacggcactggtaacg

SEQ ID NO: 200 - DNA, 75 bp, synthetic construct
  source 1..75: mol_type = other DNA
cgctgaacgtcagcgtctgaaagagctggaacgtgaaaatcgtgaactgcgccgcagtaacgatatccttcgcca

SEQ ID NO: 201 - DNA, 75 bp, synthetic construct
  source 1..75: mol_type = other DNA
ctgggttatcgctcgccacgggaatatctacggcagcaagccagtaatgggttaagtgataacaggtgtctggaa

SEQ ID NO: 202 - DNA, 75 bp, synthetic construct
  source 1..75: mol_type = other DNA
catgaaggtgcacccgccgctgtggcgtgccggtctgcgccagaacttccgtatcttccagaacgaggacatcaa

SEQ ID NO: 203 - DNA, 75 bp, synthetic construct
  source 1..75: mol_type = other DNA
agtattacccggcattcgctgcgcttatggcagagcagggaaaggaattgccgggctatgtgcaacgggaatttg

SEQ ID NO: 204 - DNA, 75 bp, synthetic construct
  source 1..75: mol_type = other DNA
gcctgtcgtacggagaattatgccatgacggtccattattaccggttgcgggattacgccctgcagcatccggaa

SEQ ID NO: 205 - DNA, 75 bp, synthetic construct
  source 1..75: mol_type = other DNA
gaacagcgtagcgacctgctggaaatagtggatctgatgtaccaacgaggctcaatcatcgtagtgagccagttg

SEQ ID NO: 206 - DNA, 75 bp, synthetic construct
  source 1..75: mol_type = other DNA
atggcagtaaagatttcaggtgtactgaaagacggcacaggaaaaccggtagagaactgcaccattcaactgaaa

SEQ ID NO: 207 - DNA, 75 bp, synthetic construct
  source 1..75: mol_type = other DNA
ctgattaaccagaaacgcattgcaccgctgaatcttctgagtgttgaccctaacaatcagagccagattattgcg

SEQ ID NO: 208 - DNA, 75 bp, synthetic construct
  source 1..75: mol_type = other DNA
cgctgtatgaatcacgcctgaagggaaagctgcacgttatcagcaagcgttacactcagcgcattgagcgacata

SEQ ID NO: 209 - DNA, 75 bp, synthetic construct
  source 1..75: mol_type = other DNA
gtatctggctcgttgccggcgttactgatatgcgtaaatccttcaacggtctgggggagcagatacagcatgtgc

SEQ ID NO: 210 - DNA, 75 bp, synthetic construct
  source 1..75: mol_type = other DNA
tgatatcctccgggctcgccgggcgaccggcctgatgacccgcgacaattacagaacggtaaataacattaccct

SEQ ID NO: 211 - DNA, 75 bp, synthetic construct
  source 1..75: mol_type = other DNA
tggtcaacgcaacagttatgtgaaaacatggggttgcggaggttttttgaatgagacgaacatttacagcagagg

SEQ ID NO: 212 - DNA, 75 bp, synthetic construct
  source 1..75: mol_type = other DNA
agtttaaacgcgaatccgctcaactggttgttgaccagaaatacacggtggcagatgccgccaaagctatggatg

SEQ ID NO: 213 - DNA, 75 bp, synthetic construct
  source 1..75: mol_type = other DNA
cctcttcggcctgtgcaccggagactggcctgcaacaactggttgccaccatagtccctgatgaacagcgcatca

SEQ ID NO: 214 - DNA, 75 bp, synthetic construct
  source 1..75: mol_type = other DNA
tcagggcggcgtcgccgtcagaccttgcggaaaagctgacacacaaactgaaagagggctggcagccgtttggta

SEQ ID NO: 215 - DNA, 75 bp, synthetic construct
  source 1..75: mol_type = other DNA
ggtactacgtcgatacggtgggtaagaacacggcgaagatacaggattacataaagcaccagcttgaagaggata

SEQ ID NO: 216 - DNA, 75 bp, synthetic construct
  source 1..75: mol_type = other DNA
cttcctcatctggcgcaaaacgagcatacagaaaggggaatccgctttctgatgcagagaaacaaagattatcag

SEQ ID NO: 217 - DNA, 75 bp, synthetic construct
  source 1..75: mol_type = other DNA
tccggcacggatcactccgtctgaatggtgccatcagcgaaaatatcctgaacctgctgatacgggagctcaaac

SEQ ID NO: 218 - DNA, 75 bp, synthetic construct
  source 1..75: mol_type = other DNA
tgctgacaatcaagcagtggcgcgaaacatacggaccgggtagcaacgttgtactgccagcagaagaagcggaag

SEQ ID NO: 219 - DNA, 75 bp, synthetic construct
  source 1..75: mol_type = other DNA
gggtggactggtataacaatcgacgattgctgggaaggctgggccatactcctccggcagaagcagaaaaagctt

SEQ ID NO: 220 - DNA, 75 bp, synthetic construct
  source 1..75: mol_type = other DNA
gttaccggttaaaagagaaacgtaaagctggagtgctgaccaaaaacacaacgccaatcagtgatgatgaaatgg

SEQ ID NO: 221 - DNA, 75 bp, synthetic construct
  source 1..75: mol_type = other DNA
atgaaaatcacaaggtatacggtgtgcgtaaagtctggcgtcagttgttacgggaaggtatcagagtggccagat

SEQ ID NO: 222 - DNA, 75 bp, synthetic construct
  source 1..75: mol_type = other DNA
atgctgcaaaccagatacgtcgtgaccgtccactgacacatgaagagctgatgcaccatgtgccggggattttcg

SEQ ID NO: 223 - DNA, 75 bp, synthetic construct
  source 1..75: mol_type = other DNA
atgactaaaaatactcgtttttcccccgaagtccgtcaacgggcagtccgtatggttctggaaagtcagggcgaa

SEQ ID NO: 224 - DNA, 75 bp, synthetic construct
  source 1..75: mol_type = other DNA
gcggcccaacttcccttatgagtttaaaatcgccttagtggagcagtcactgcagcccggagcctgtgtggcgca

SEQ ID NO: 225 - DNA, 75 bp, synthetic construct
  source 1..75: mol_type = other DNA
atgaaaaccatttcacataattccaccacatcttctgtttccgtaaccgctgcatcagggaatgaccagcctcag

SEQ ID NO: 226 - DNA, 75 bp, synthetic construct
  source 1..75: mol_type = other DNA
ataaaacggattcagcagcactgttgccctgtatcgaacaggccagagaggatatccgtaccctgcgccaactgc

SEQ ID NO: 227 - DNA, 75 bp, synthetic construct
  source 1..75: mol_type = other DNA
gccggaaagccgttgccgcaggcgaccgcgtaaaccgtcagtttgtggcagaacgtcctgaccagttgtgggtgg

SEQ ID NO: 228 - DNA, 75 bp, synthetic construct
  source 1..75: mol_type = other DNA
tgctgctggccccgggatccgtcagtgaaatgcaggactatattccggaaaaccgctgttaccgtgcaaccctgg

SEQ ID NO: 229 - DNA, 75 bp, synthetic construct
  source 1..75: mol_type = other DNA
gcggtgattgtcgatggattggcgaaaaggaggctcgttgtcaggaacgttgaaggaccgagaaagggtgacgat

SEQ ID NO: 230 - DNA, 75 bp, synthetic construct
  source 1..75: mol_type = other DNA
tggatatccgggtgccggaccatctgatagtcggtggcaaccaggttttctcctttgccgaacatggtctgcttt

SEQ ID NO: 231 - DNA, 75 bp, synthetic construct
  source 1..75: mol_type = other DNA
atgaaaacattatccgacacacatgtacgggaggtatctcgctgcccgtctcccgtcaccatctggcagacactg

SEQ ID NO: 232 - DNA, 75 bp, synthetic construct
  source 1..75: mol_type = other DNA
gcaaagtgttcctcacaccggcacagctggcgatgctgctggaaggtatcgactggcggcagcctaaaagactgc

SEQ ID NO: 233 - DNA, 75 bp, synthetic construct
  source 1..75: mol_type = other DNA
aaagcctgtacaaaatgtgactgtattgttgaagcaccggcgccgtcccgcccgatagagcgtggtatcgcgggc

SEQ ID NO: 234 - DNA, 75 bp, synthetic construct
  source 1..75: mol_type = other DNA
agtaaacagcaaaatcagcagacgtcttctgaacgtgaactggagatgtctaccgagattgcacgtctcaaacgc

SEQ ID NO: 235 - DNA, 75 bp, synthetic construct
  source 1..75: mol_type = other DNA
atggaacttaaaaaattgatggaacatatttctattatccccgattacagacaagcctggaaagtggaacataaa

SEQ ID NO: 236 - DNA, 75 bp, synthetic construct
  source 1..75: mol_type = other DNA
ggggagtctgctgtttgggctgctgacatatctgactaacctgtatttcaaaatcagagaggaccgtcgtaaggc

SEQ ID NO: 237 - DNA, 75 bp, synthetic construct
  source 1..75: mol_type = other DNA
agctacgtcgctggacatatgctggcggtaagcaatggaaaggtctcatgactcgtcgtgagattgagcgtgaaa

SEQ ID NO: 238 - DNA, 75 bp, synthetic construct
  source 1..75: mol_type = other DNA
tggagctgagtcgttcactgctgtcgggctgggtggatgcatgctgccggctactgtcaccgctggaagaagcgc

SEQ ID NO: 239 - DNA, 75 bp, synthetic construct
  source 1..75: mol_type = other DNA
ctgattttacttacgtcagcacatggcagggcttcgtctatgtggcgttcatcattgatgtgtttgccggataca

SEQ ID NO: 240 - DNA, 75 bp, synthetic construct
  source 1..75: mol_type = other DNA
gtgacgcgcactatctttaccggtatgaccgtcacggcaggctgacggagaaaaccgacctcatcccggaagggg

SEQ ID NO: 241 - DNA, 75 bp, synthetic construct
  source 1..75: mol_type = other DNA
caattgaaaaaccgctctcctccctgccttactcactttcccgtcacatcctggaacatctgcgcaaactcacca

SEQ ID NO: 242 - DNA, 75 bp, synthetic construct
  source 1..75: mol_type = other DNA
cgcattttattttctttctctggttctgaaatccatccctgtcggtgttgcttatgcagtctggtcgggactcgg

SEQ ID NO: 243 - DNA, 75 bp, synthetic construct
  source 1..75: mol_type = other DNA
gaagccgcacagtcactggctgaacacgtacgttcccgtaaccacccggacgcgacactgacagctaaggggttc

SEQ ID NO: 244 - DNA, 75 bp, synthetic construct
  source 1..75: mol_type = other DNA
gccatgaagcagattaaagaactccagcgcctgctcggcaaaaaaacgatggaaaatgaactccttaaagaagcc

SEQ ID NO: 245 - DNA, 75 bp, synthetic construct
  source 1..75: mol_type = other DNA
cttatctgacacgaaaatcgctgtgcgagattcgttacagagacggacacagggaggtggcggctttcatggctt

SEQ ID NO: 246 - DNA, 75 bp, synthetic construct
  source 1..75: mol_type = other DNA
tggatatccgggtgccggaccatctgatagtcggtggcagccaggttttctcctttgccgaacatggtctgcttt

SEQ ID NO: 247 - DNA, 75 bp, synthetic construct
  source 1..75: mol_type = other DNA
acaacagaccgagaaagacactgaagttcaaaacaccgaaagagataattgaaaggggtgttgcattgacagatt

SEQ ID NO: 248 - DNA, 75 bp, synthetic construct
  source 1..75: mol_type = other DNA
atgcgtggggctttgtaggtatggggctcataattgctgcctttttgctcgcccgatccccatcgtggaagtcgc

SEQ ID NO: 249 - DNA, 75 bp, synthetic construct
  source 1..75: mol_type = other DNA
gaactgaaaaactaccttaccagtctgtgtgcagaggaaggggtaactcaggcagagttgatagaaaggcttatc

SEQ ID NO: 250 - DNA, 75 bp, synthetic construct
  source 1..75: mol_type = other DNA
cagcgcggtatggagtccaggctgaagcaggctcgtctgccgtgggtcaaaacgctggagcagttcgactttacc

SEQ ID NO: 251 - DNA, 75 bp, synthetic construct
  source 1..75: mol_type = other DNA
aaaaaagccctaattatcccgttgagttcaaaatcaaaatggttgaactctcgcatcgaccagagatctccgtag

SEQ ID NO: 252 - DNA, 75 bp, synthetic construct
  source 1..75: mol_type = other DNA
attaacgtgaaataccgttatgagtttacggacacactggggatggtgacgtcattcagctatgcaggagacaag

SEQ ID NO: 253 - DNA, 75 bp, synthetic construct
  source 1..75: mol_type = other DNA
ggagaaatggcggatctgtacagtcatcgctgggaaatcgaactgggatacagggagataaaacagacgatgcaa

SEQ ID NO: 254 - DNA, 75 bp, synthetic construct
  source 1..75: mol_type = other DNA
gcgcaggtgctggacaaaatggcctacctgacgatatggcagggcgatgaagtacagcgccgggtgaaaggcgtg

SEQ ID NO: 255 - DNA, 75 bp, synthetic construct
  source 1..75: mol_type = other DNA
cttcctcatcaggtacaaagcgagcatacagaaaaggtaatcctctgacgcttgcagaacgtcagcaggcatccc

SEQ ID NO: 256 - DNA, 75 bp, synthetic construct
  source 1..75: mol_type = other DNA
taacatgacgctggaaaatccatcgccagagctgctcacggtgttgatccgtgaactgaccgggaggggaagatg

SEQ ID NO: 257 - DNA, 75 bp, synthetic construct
  source 1..75: mol_type = other DNA
gacctctgcgaggtacgaatccgaaccggccagacggaggtcgctgtcttcacagcttacgaacctgaggagtaa

SEQ ID NO: 258 - DNA, 75 bp, synthetic construct
  source 1..75: mol_type = other DNA
taccgagattgcacgtctcaaacgccagctggcagaacgggatgaagagctggctatcctccaaaaggccgcgac

SEQ ID NO: 259 - DNA, 75 bp, synthetic construct
  source 1..75: mol_type = other DNA
cgtacggagtgttatgccatgacggtccattattaccggctgcgggattacgccctgcagcatccggaatgcagc

SEQ ID NO: 260 - DNA, 75 bp, synthetic construct
  source 1..75: mol_type = other DNA
gccgcagtaacgatatccttcgccaggcttccgcttattttgcgaaggcggagttcgaccgcctctggaaaaagt

SEQ ID NO: 261 - DNA, 75 bp, synthetic construct
  source 1..75: mol_type = other DNA
tcccgtcaccatctggcagacactgctcatccgactgctggaccagcattatggcctcacactgaatgacacacc

SEQ ID NO: 262 - DNA, 75 bp, synthetic construct
  source 1..75: mol_type = other DNA
tcgcaatagttggcgaagtaatcgcaacatccgcattaaaatctagcgagggctttactaagcttgccccttccg

SEQ ID NO: 263 - DNA, 75 bp, synthetic construct
  source 1..75: mol_type = other DNA
ctgtgcgcctgaagaaataccggtcttaccggggaaatatgggactcgctgcagaaaatatccttcagcggcagt

SEQ ID NO: 264 - DNA, 75 bp, synthetic construct
  source 1..75: mol_type = other DNA
agtttaaacgcgaatccgctcaactggtcgttgaccagaattacaccgtggcagatgcagccagcgctatggatg

SEQ ID NO: 265 - DNA, 75 bp, synthetic construct
  source 1..75: mol_type = other DNA
acacgcctcgtgaggcgaaggataatctcaaatccacgcagatgatgagtgtgattgatgcgattggtgagggac

SEQ ID NO: 266 - DNA, 75 bp, synthetic construct
  source 1..75: mol_type = other DNA
ccattacggtaaaatgatgctggaaaatccttcaccagagctgctcacggtgttgatccgtgagctgaccgggag

SEQ ID NO: 267 - DNA, 75 bp, synthetic construct
  source 1..75: mol_type = other DNA
gattacattgacgcggtgacggcaacagataccagcaccgcgccggatgtcatctggcctgaactgccggaggcg

SEQ ID NO: 268 - DNA, 75 bp, synthetic construct
  source 1..75: mol_type = other DNA
gttgtgagttaatcaacgccgactgcctggaatttatccggtcgttacccgaaaattctgttgacctgatagtca

SEQ ID NO: 269 - DNA, 75 bp, synthetic construct
  source 1..75: mol_type = other DNA
gaaaacttaaagaaattcttaggcttaaatacggtgttggactcagccatcgacaaattggtcgtagtcttgcaa

SEQ ID NO: 270 - DNA, 75 bp, synthetic construct
  source 1..75: mol_type = other DNA
atctggcgcatcttgccggcgggcaggtgtacccgtatgtggtccccctgctggatggcaggccgtcggtggcgc

SEQ ID NO: 271 - DNA, 75 bp, synthetic construct
  source 1..75: mol_type = other DNA
gtgtggttatcctgtccattgcttatactgcagataaatatggctgccatttgttatcacgtattggcgcttatt

SEQ ID NO: 272 - DNA, 75 bp, synthetic construct
  source 1..75: mol_type = other DNA
atgacacagactgaatcagcgattctggcgcatgcccggcggtgtgcgcctgcggagtcgtgcggcttcgtgata

SEQ ID NO: 273 - DNA, 75 bp, synthetic construct
  source 1..75: mol_type = other DNA
gcatgacaaagttgcagccgaatacagtgatccgtgccgccctggacctgttgaacgaggtcggcgtagacggtc

SEQ ID NO: 274 - DNA, 75 bp, synthetic construct
  source 1..75: mol_type = other DNA
atcaataccggaaaggtggcctgctgccttccggaaaaaatatgccggcactgcttcccgtgacgttaacgccgg

SEQ ID NO: 275 - DNA, 75 bp, synthetic construct
  source 1..75: mol_type = other DNA
atgaatccgtctgatgccattgaggcaattgaaaaaccgctctcctccctgccttactcactttcccgtcacatc

SEQ ID NO: 276 - DNA, 75 bp, synthetic construct
  source 1..75: mol_type = other DNA
atgctgggagcggtggaacgccgcttcggcaacgagcttccggcgtctccagtagagtggctgacggataatggt

SEQ ID NO: 277 - DNA, 75 bp, synthetic construct
  source 1..75: mol_type = other DNA
agggagatatgactcagtatggcggtcccattgtccagggttcggcaggtgtaagaattggcgcgccaactggcg

SEQ ID NO: 278 - DNA, 75 bp, synthetic construct
  source 1..75: mol_type = other DNA
tactggcacttcaggaacaagcgggcgctgctcgacgcactggccgaagccatgctggcggagaatcatacgcat

SEQ ID NO: 279 - DNA, 75 bp, synthetic construct
  source 1..75: mol_type = other DNA
tttcggccggggacgccgtcaatgcgctgatgacaatcagctacttcactgttggggccgtgcttgaggagcagg

SEQ ID NO: 280 - DNA, 75 bp, synthetic construct
  source 1..75: mol_type = other DNA
taaaagcaacggcaaactgcgaccactgggtatccccgcgttgcgggatcgtattgttcagcgggccatgctgat

SEQ ID NO: 281 - DNA, 75 bp, synthetic construct
  source 1..75: mol_type = other DNA
agggcgacatgacgcagtatggcggtagcattgtccagggttcagccggggtgcgcatcggtgcccccaccggcg

SEQ ID NO: 282 - DNA, 75 bp, synthetic construct
  source 1..75: mol_type = other DNA
cacacgacaaggactgctggcaaacgccgctttggctttttgatgcactggatattgagtttggattctggctgg

SEQ ID NO: 283 - DNA, 75 bp, synthetic construct
  source 1..75: mol_type = other DNA
cagatcatatccatatgcttgtggagatcccgcccaaaatgagcgtatccggctttatgggatatctgaaaggga

SEQ ID NO: 284 - DNA, 75 bp, synthetic construct
  source 1..75: mol_type = other DNA
ggtgacaccgtcaaaattctttgggctgatgctgatggtctgtgcctgttcaccaaacgcctggaggaaggccag

SEQ ID NO: 285 - DNA, 75 bp, synthetic construct
  source 1..75: mol_type = other DNA
gggctgggtggatgcatgctgccggctgctgtctccgctggaagaggcgcttcatggctatgtcatgactgacgg

SEQ ID NO: 286 - DNA, 75 bp, synthetic construct
  source 1..75: mol_type = other DNA
ctgtgcgcctgaagaaataccggtcttaccggggaaatatgggactcgctgcagaaaatatccttcagcgacagt

SEQ ID NO: 287 - DNA, 75 bp, synthetic construct
  source 1..75: mol_type = other DNA
cacaccggatatcagtaaacttcctcaggacagggaatcactgttttattttaatctccgggaaataccgccgag

SEQ ID NO: 288 - DNA, 75 bp, synthetic construct
  source 1..75: mol_type = other DNA
tatgagcgcaaaaggttgctgctacgataatgcctgcgtggaaagcttctttcattcgctgaaagtggaatgtat

SEQ ID NO: 289 - DNA, 75 bp, synthetic construct
  source 1..75: mol_type = other DNA
agggctggcggacaaaaactgtacctgtccccgatacttgatttgtttaacggggaaatcgtggcgtgggaaacg

SEQ ID NO: 290 - DNA, 75 bp, synthetic construct
  source 1..75: mol_type = other DNA
taacatgacgctggaaaatccatcgccagagctgctcacagtgttgatccgtgaactgaccgggaggggaagatg

SEQ ID NO: 291 - DNA, 75 bp, synthetic construct
  source 1..75: mol_type = other DNA
cgcaggcacgaaaaaagtggccgggactgggaaatgaagtgacagcccgcctgctgaccgtgacgcgcaaaggaa

SEQ ID NO: 292 - DNA, 75 bp, synthetic construct
  source 1..75: mol_type = other DNA
acctgctgcccgtcgtgcggcttatccgtcagccacgcgttgtgtttcctgtcagtcagtctttgaagcaaaaaa

SEQ ID NO: 293 - DNA, 75 bp, synthetic construct
  source 1..75: mol_type = other DNA
agattgttgatgaaatctgcgattttgtggcgaatcagcaggcggttttcctcggtggtcactatatccttcagg

SEQ ID NO: 294 - DNA, 75 bp, synthetic construct
  source 1..75: mol_type = other DNA
ccgcagcttcaggcaggcgctgctcgcctaccgcgatggcgcgcgcatccatgccggcacgcgaccgggcgcacc

SEQ ID NO: 295 - DNA, 75 bp, synthetic construct
  source 1..75: mol_type = other DNA
aagaaagagatacagcgcgtatacgatgaaaatcacaaggtatacggtgtgcgtaaagtctggcgtcagttgtta

SEQ ID NO: 296 - DNA, 75 bp, synthetic construct
  source 1..75: mol_type = other DNA
agcttgccacatgggcagccaccgatccgtccctacggattcaacggctgctgcgtctgataacacaaccagaat

SEQ ID NO: 297 - DNA, 75 bp, synthetic construct
  source 1..75: mol_type = other DNA
gcagaagaattagcctgaaattaaaaggtctgactccaattgaatatcggaatcagacctatatgcctcgtgttt

SEQ ID NO: 298 - DNA, 75 bp, synthetic construct
  source 1..75: mol_type = other DNA
ctgtcaatgcaacacccctttcaattatctctttcggtgttttgaacttcagtgtctttctcggtctgttgttta

SEQ ID NO: 299 - DNA, 75 bp, synthetic construct
  source 1..75: mol_type = other DNA
tggctacgcctctggcaaagagaaggacgtatttctcgtagaatgcctccaactattgtaggccctacagtatca

SEQ ID NO: 300 - DNA, 75 bp, synthetic construct
  source 1..75: mol_type = other DNA
tcgagttctgctgtgataacggagagagactgcgtgtcacgttcgcgctggactgctgtgatcgtgaggcactgc

SEQ ID NO: 301 - DNA, 75 bp, synthetic construct
  source 1..75: mol_type = other DNA
ggggaatttccgccgcaggtgagtcttggcggtaaaaatgtggcctggctgcactctgaagtcaccgcatggatg

SEQ ID NO: 302 - DNA, 75 bp, synthetic construct
  source 1..75: mol_type = other DNA
atgccactgctggataagctgcgtaagctgtacggggtcggaccggtatgcagtgaactacatattgccccgtca

SEQ ID NO: 303 - DNA, 75 bp, synthetic construct
  source 1..75: mol_type = other DNA
aaagtggctgcgttacgtcattgaacatatccaggactggccggcaaaccgggtacgcgatctgttgccctggaa

SEQ ID NO: 304 - DNA, 75 bp, synthetic construct
  source 1..75: mol_type = other DNA
ccgtgagcaggtgctggccgtctatggtccggtacatgcccggttgctgcgtcaggcactggaactgatcgctga

SEQ ID NO: 305 - DNA, 75 bp, synthetic construct
  source 1..75: mol_type = other DNA
gccctgcagatggcgctgtggcggcgtaagaggccccggaacgttatcgttcacacggaccgtggaggccagtac

SEQ ID NO: 306 - DNA, 75 bp, synthetic construct
  source 1..75: mol_type = other DNA
ctgattttacttacggtgtgcccggagttcagggcgggcatggatgcttaaatgaaccgcgagtctgtctggaat

SEQ ID NO: 307 - DNA, 75 bp, synthetic construct
  source 1..75: mol_type = other DNA
ggtgaaatgcgcgtggggtcacgtgtggcatctcaggagatcagcacggcagatgaaggggatggtggtcaggtt

SEQ ID NO: 308 - DNA, 75 bp, synthetic construct
  source 1..75: mol_type = other DNA
actgcgagagagaggggataacacaggctcagttcgttgagaaaatcatcaaagatgaactgcagagactggata

SEQ ID NO: 309 - DNA, 75 bp, synthetic construct
  source 1..75: mol_type = other DNA
tccgctcagaactactcgattcacgttttggcgcaaaggccatttctactatcgcggagtcaaaacgatttccgc

SEQ ID NO: 310 - DNA, 75 bp, synthetic construct
  source 1..75: mol_type = other DNA
tgaacaaaaacagtttacatccttgcttctgcgggaagggattatcggattgttacaacgcttagggattcgcga

SEQ ID NO: 311 - DNA, 75 bp, synthetic construct
  source 1..75: mol_type = other DNA
aagctggcacaggtggcgtatggagtgctgaagtcaggcgtgccgttcgatgcgtcacggcataatccggtagcg

SEQ ID NO: 312 - DNA, 75 bp, synthetic construct
  source 1..75: mol_type = other DNA
tcccgtcaccatctggcagactctgctctcccgactactgggccagcattacggccttacactgaatgacacacc

SEQ ID NO: 313 - DNA, 75 bp, synthetic construct
  source 1..75: mol_type = other DNA
ataaagcagtggcccttacctacaggatgggatgatacaaaactaaaacatgcgttccttcagacccaggttaag

SEQ ID NO: 314 - DNA, 75 bp, synthetic construct
  source 1..75: mol_type = other DNA
tgactaatcagggcgcagcacggctggctaacgcgacgatgctcggcagtaagctgaatctgacgcaaatggccg

SEQ ID NO: 315 - DNA, 75 bp, synthetic construct
  source 1..75: mol_type = other DNA
tacaccagagactctgcgtgtgtgggttcgtcagcatgagcgggataccgggagtggtgatggtggactcaccac

SEQ ID NO: 316 - DNA, 75 bp, synthetic construct
  source 1..75: mol_type = other DNA
atgcaacagctttcctttctgcccggagagatgacgcccggcgagcgcagcctcattcaacgggccctgaaaacc

SEQ ID NO: 317 - DNA, 75 bp, synthetic construct
  source 1..75: mol_type = other DNA
caaactcggccgcagctcccgatggctgaaaagtgaagtggaagcctggttgcaggcgcgtattgcacaatcccg

SEQ ID NO: 318 - DNA, 75 bp, synthetic construct
  source 1..75: mol_type = other DNA
atggaattacaggactggcgaaaagaacctcgtaaaaactattcgaatgaattcaaacttcgtatggtggaactg

SEQ ID NO: 319 - DNA, 75 bp, synthetic construct
  source 1..75: mol_type = other DNA
acacactgatactcagtgataacggcggcagaagcctgtattttgagcacctgtttcccggtgaggacggttaca

SEQ ID NO: 320 - DNA, 75 bp, synthetic construct
  source 1..75: mol_type = other DNA
attaacgtgaaataccgttatgaatttacggacacgctggggctggtgacgtcattcagttatgccaatgccaaa

SEQ ID NO: 321 - DNA, 75 bp, synthetic construct
  source 1..75: mol_type = other DNA
cgcgtgctgccagttaatgacaccggtgaatgatgccctgtaccgttatgtaatgaacacccgcaaggttcacac

SEQ ID NO: 322 - DNA, 75 bp, synthetic construct
  source 1..75: mol_type = other DNA
ggcgggcaggcggagtcctcagtgtcggtgcagatagacgtttatgccgggactgtgacgcaggcgcgtcagata

SEQ ID NO: 323 - DNA, 75 bp, synthetic construct
  source 1..75: mol_type = other DNA
ccccttatctgtcttatattaacgactatggtggtcgcccggtactgtcgtttatctgtaatggcagccgttgct

SEQ ID NO: 324 - DNA, 75 bp, synthetic construct
  source 1..75: mol_type = other DNA
atggacgttgagtacggtcagtacagcgttattctgttggtggaaggattcccgccgtcacatgccgggaccatc

SEQ ID NO: 325 - DNA, 75 bp, synthetic construct
  source 1..75: mol_type = other DNA
catagtttttgcgccaaaataccgaagacaggtgttctacagagagaagcgtagagcaataggcagtattttgag

SEQ ID NO: 326 - DNA, 75 bp, synthetic construct
  source 1..75: mol_type = other DNA
tacagattgtggttgatgagatccgcgacacactggaaaaggcagtcattgactgttgtgatgaggccgatatgt

SEQ ID NO: 327 - DNA, 75 bp, synthetic construct
  source 1..75: mol_type = other DNA
ttaaagatggcacaggaaaaccagtacagaactgcaccattgtgctgaaggccagacgaaccagcagcacggtgg

SEQ ID NO: 328 - DNA, 75 bp, synthetic construct
  source 1..75: mol_type = other DNA
caacaaatgaccagaacacagatctacaacgtaatgcgctgaactgtgcaggatgcgagctgatttttgaagaca

SEQ ID NO: 329 - DNA, 75 bp, synthetic construct
  source 1..75: mol_type = other DNA
gaaagccagcatccgtgccagggtggagcacccgtttcgcatcatcaagcggcagttcggcttcgtgaaagccag

SEQ ID NO: 330 - DNA, 75 bp, synthetic construct
  source 1..75: mol_type = other DNA
cagcatattgaggcaggcatttcactgtgcgatgcggtgaactttctcgttgaaaaatacgcactggtacgtacc

SEQ ID NO: 331 - DNA, 75 bp, synthetic construct
  source 1..75: mol_type = other DNA
atggtgatacgcaaaaagaagtgcagggactgtggaaacgcgattactcataatacatgttgcccgtattgtggt

SEQ ID NO: 332 - DNA, 75 bp, synthetic construct
  source 1..75: mol_type = other DNA
ggctgaaaatctgtccgctctggagcaggatatcaccaatctggaaaaagcagcggcattaagcattgccagaat

SEQ ID NO: 333 - DNA, 75 bp, synthetic construct
  source 1..75: mol_type = other DNA
agcggcataacctgaatctgagacaacatctggcaaggctgggacggaagtcactgtcgttctcaaaatcggtgg

SEQ ID NO: 334 - DNA, 75 bp, synthetic construct
  source 1..75: mol_type = other DNA
tcatgaaagagctggggctggtcagttgccagcagccgactcaccggtataagcgtggcggtcatgagcacgttg

SEQ ID NO: 335 - DNA, 75 bp, synthetic construct
  source 1..75: mol_type = other DNA
tggccccggctggaaagcgccttctgatatccgcttacagctacgcgatgatgcactggtactcaacgacaacgg

SEQ ID NO: 336 - DNA, 75 bp, synthetic construct
  source 1..75: mol_type = other DNA
gcctctcgctgatcactcagaacaacatcaacaaaaaccagtctgcgctgtcgacttctatcgagcgcctctctt

SEQ ID NO: 337 - DNA, 75 bp, synthetic construct
  source 1..75: mol_type = other DNA
aaattgcagggactttacggaaacattctttcctgctatgaggctggcccctgtggttttgggctatatcatcaa

SEQ ID NO: 338 - DNA, 75 bp, synthetic construct
  source 1..75: mol_type = other DNA
aatggcccgaaattcaggcagagatgcgcatctggaaaaaacgtcgcgaaggtgaacgcaaggaaaccggaaaat

SEQ ID NO: 339 - DNA, 75 bp, synthetic construct
  source 1..75: mol_type = other DNA
ttttttatcgcccggcagcaattaaaaccagaccaaatgaagtatggcaggaccagttaattctgaacaaagtca

SEQ ID NO: 340 - DNA, 75 bp, synthetic construct
  source 1..75: mol_type = other DNA
ctggattgcagacacaagcgtagctattctcctgaagataaactttgcgtggttctttatgctctcgggcattct

SEQ ID NO: 341 - DNA, 75 bp, synthetic construct
  source 1..75: mol_type = other DNA
tcgcagaggctggtatggcggcaagggtggtcggtcatgctgttcgtgagatggagcggtggatggtgccgaaca

SEQ ID NO: 342 - DNA, 75 bp, synthetic construct
  source 1..75: mol_type = other DNA
aaagaagccgttgaatatgggcgtgcaaaaaagtggatagcgcacgcgcccttattgcccggggatggggagtaa

SEQ ID NO: 343 - DNA, 75 bp, synthetic construct
  source 1..75: mol_type = other DNA
caaaatgggccgcagctcccgatggctgaaaagcgaagtggaagcctggctgcaggcgcgtattgcacagtcccg

SEQ ID NO: 344 - DNA, 75 bp, synthetic construct
  source 1..75: mol_type = other DNA
ccctgtgaccatcagtggtccggcgtttaatgaagcaattgaacgctggaaaactctgaacgattttggcctgca

SEQ ID NO: 345 - DNA, 75 bp, synthetic construct
  source 1..75: mol_type = other DNA
tgcgtgaaaaggcagagaaagcaactaaaggaagctacatcgtagggcatacatctgttaaccagcacggcaatt

SEQ ID NO: 346 - DNA, 75 bp, synthetic construct
  source 1..75: mol_type = other DNA
cgttgcttctgacatcggtcgctgtactggctgatgtgcagattaacatcaggggaaatgtttatatccccccat

SEQ ID NO: 347 - DNA, 75 bp, synthetic construct
  source 1..75: mol_type = other DNA
agattgttgatgaaatctgcgattttgtggcgaatcagcaggcggttttcctgggcggtcactacatcttacagg

SEQ ID NO: 348 - DNA, 75 bp, synthetic construct
  source 1..75: mol_type = other DNA
ttgttctggaaaagctggagatgaaatggtctccagagcaaatatcaggatggttaaggcgaacaaaaccacgtc

SEQ ID NO: 349 - DNA, 75 bp, synthetic construct
  source 1..75: mol_type = other DNA
atgaacttgccagactgaccggctatagccgccagaccattaataaatgggtacgcaaggaaggctggacaacgt

SEQ ID NO: 350 - DNA, 75 bp, synthetic construct
  source 1..75: mol_type = other DNA
aacttcggcagccgctccgaaaaagtctcccgtcgtatcgcacagatggaagctgacctgaaggcacttcagaaa

SEQ ID NO: 351 - DNA, 75 bp, synthetic construct
  source 1..75: mol_type = other DNA
tactgacaatcaagcagtggcgcgaaacatacggacctggtagcaacgttgtactgccagcagaagaagcggaag

SEQ ID NO: 352 - DNA, 75 bp, synthetic construct
  source 1..75: mol_type = other DNA
agtttaaacgcgaatccgctcaactggttgttgaccagaactacacggtggcagatgccgccaaagctatggatg

SEQ ID NO: 353 - DNA, 75 bp, synthetic construct
  source 1..75: mol_type = other DNA
ggcaggcggccagttctcgcccgtctcctgttgaaatctggcagatactgctgtcccgactgctggaccagcact

SEQ ID NO: 354 - DNA, 75 bp, synthetic construct
  source 1..75: mol_type = other DNA
gcggggccgtctgtgcgcgtgaatgaatggttcagcgcgtatgcgatggcgggtgtggcttacagccgtgtgtcg

SEQ ID NO: 355 - DNA, 75 bp, synthetic construct
  source 1..75: mol_type = other DNA
cagcatattgaggcaggcatttcactgtgtgatgcggtgaactttctcgtggaaaaatacgcgctggtgcgtacc

SEQ ID NO: 356 - DNA, 75 bp, synthetic construct
  source 1..75: mol_type = other DNA
accgccagagcacaaaaaacctcaaatcaggcacacttcaggcgctacagaatgaaatcgaacaacgtctgaaac

SEQ ID NO: 357 - DNA, 75 bp, synthetic construct
  source 1..75: mol_type = other DNA
ggaaagccttgctgaaggggagaaaccgctgctccacagtgatcaaggatggcattaccggataaaaagttatca

SEQ ID NO: 358 - DNA, 75 bp, synthetic construct
  source 1..75: mol_type = other DNA
ttttgtgctgaatgagctgaaagccaaaggcctgtgccgcgattttctcgcccagcagaaagaccggggagacag

SEQ ID NO: 359 - DNA, 75 bp, synthetic construct
  source 1..75: mol_type = other DNA
gctttatgatgatgaaggcgtactcattgcggtggcgaactgcccggaaacgtacaaaccgcagttgcaggaagg

SEQ ID NO: 360 - DNA, 75 bp, synthetic construct
  source 1..75: mol_type = other DNA
ttgctgctgctattggtggcggagcaattgctatagcatcagtgttaatcactggcccaagtggtaacgatggtc

SEQ ID NO: 361 - DNA, 75 bp, synthetic construct
  source 1..75: mol_type = other DNA
ttgctgaactgctggagccgctgtatgacgtcctgcgccagtatgtgctgatgcccggtaaagtccatgctgatg

SEQ ID NO: 362 - DNA, 75 bp, synthetic construct
  source 1..75: mol_type = other DNA
ctgccatccccctgtttgttatatccggggcagacgctgctgtttcgctggacagaacccgcgcggtgtttgacg

SEQ ID NO: 363 - DNA, 75 bp, synthetic construct
  source 1..75: mol_type = other DNA
gggtgtggcttacagccgtgtgtcgactttctccggggattatctccgcgtaactgacaacaaggggaaaacgca

SEQ ID NO: 364 - DNA, 75 bp, synthetic construct
  source 1..75: mol_type = other DNA
gagagatgacgcccggcgagcgcagcctcattcaacgggccctgaaaaccctggaccgccatcttcatgaacccg

SEQ ID NO: 365 - DNA, 75 bp, synthetic construct
  source 1..75: mol_type = other DNA
cttcctcatctggcgcaaaacgagcatacagaaagggtaaacctttgagtgaagcagaacgacagagagcagctt

SEQ ID NO: 366 - DNA, 75 bp, synthetic construct
  source 1..75: mol_type = other DNA
ggtactgtggctgattaaagccgatgaccgtgccctgtctgtggatgagtatttctggcgacacatcctgcaccg

SEQ ID NO: 367 - DNA, 75 bp, synthetic construct
  source 1..75: mol_type = other DNA
atgactaaaaatacacgtttttcccccgaggtccgtcaacgggcagttcgtatggttctggaaagtcagggcgaa

SEQ ID NO: 368 - DNA, 75 bp, synthetic construct
  source 1..75: mol_type = other DNA
tggggggaactggaatggtcttccccgacagatgacgatgagctgccggaagtcaccggacctgcgtggatagtc

SEQ ID NO: 369 - DNA, 75 bp, synthetic construct
  source 1..75: mol_type = other DNA
gagttttacgaagctgaggcgaaaaagcaggcgaagcagtttttcatggatgttgctgccgggttatgtgaaggg

SEQ ID NO: 370 - DNA, 75 bp, synthetic construct
  source 1..75: mol_type = other DNA
tatgactcacaatgggcggcaatttgttccattgccccaaagattggctgtacaccagagactctgcgtgtgtgg

SEQ ID NO: 371 - DNA, 75 bp, synthetic construct
  source 1..75: mol_type = other DNA
cccggcagcaggccatttccggcgggacggaaccgtccgcttttcctgataccctgccgggttacaccgaatatg

SEQ ID NO: 372 - DNA, 75 bp, synthetic construct
  source 1..75: mol_type = other DNA
ggcagtcaggttaaactgctgtggtccaccggtgacgggctgtgcctcctgaccaaacggctggagcgtgggcgc

SEQ ID NO: 373 - DNA, 75 bp, synthetic construct
  source 1..75: mol_type = other DNA
gagctgggactgattacctaccagacggaatatgacccgcttatcgggtgctacattccgaccgacatcacgttc

SEQ ID NO: 374 - DNA, 75 bp, synthetic construct
  source 1..75: mol_type = other DNA
cggtaaaaggtgccggtaccactctgtgggtttacaacggcaagggtgatgcttatgcaaacccgttgtcagacg

SEQ ID NO: 375 - DNA, 75 bp, synthetic construct
  source 1..75: mol_type = other DNA
agaaaacgaagaccgggcggttatggacctacgttcgtgacgaccgtaacgccgggtcaacgctggcgccggcgg

SEQ ID NO: 376 - DNA, 75 bp, synthetic construct
  source 1..75: mol_type = other DNA
cggctgtgggtctacgtccgtgatgaccgtaacgccggttcacagatgcccccggcggtctggttcgcgtacagt

SEQ ID NO: 377 - DNA, 75 bp, synthetic construct
  source 1..75: mol_type = other DNA
gcgccatcgtcgtccgttaccggcacaccttccccgtgaaatacaccgcctggagccagaagaaagctgttgccc

SEQ ID NO: 378 - DNA, 75 bp, synthetic construct
  source 1..75: mol_type = other DNA
ttttattgagcataaatcccgaaacagtctgctttttcagcccacggattctgccgctgaagattttatgaagtc

SEQ ID NO: 379 - DNA, 75 bp, synthetic construct
  source 1..75: mol_type = other DNA
atgatcccgttaccttccgggaccaaaatttggctggttgccggtatcaccgatatgagaaatggcttcaacggc

SEQ ID NO: 380 - DNA, 75 bp, synthetic construct
  source 1..75: mol_type = other DNA
agctgtacggggtcggaccggtatgcagtgaactacatattgccccgtcaacgtattaccactgtcagcaacagc

SEQ ID NO: 381 - DNA, 75 bp, synthetic construct
  source 1..75: mol_type = other DNA
tgcgtcaggtacataaagctggcgaaaaacttttcgttgattactgtggacctaccgttggcgttaccgaccctg

SEQ ID NO: 382 - DNA, 75 bp, synthetic construct
  source 1..75: mol_type = other DNA
acgactggctgagctcagacgccgctgtggatgaggtcctgctcatcaacgaatacacctttaccgaagccggtc

SEQ ID NO: 383 - DNA, 75 bp, synthetic construct
  source 1..75: mol_type = other DNA
atctcaccgaggactccttcttcgatgagagccggcggctagaccccgccggcgctgtcaccgcggcgatcgaaa

SEQ ID NO: 384 - DNA, 75 bp, synthetic construct
  source 1..75: mol_type = other DNA
ggggaaacacatctcgattttttgaagcaatatggtgattttgaaaatggtattcctgttcacgataccattgcc

SEQ ID NO: 385 - DNA, 75 bp, synthetic construct
  source 1..75: mol_type = other DNA
tacactcagcgcattgagcgacataatctgaatctgagacaacatctggcaaggctgggacggaagtcactgtcg

SEQ ID NO: 386 - DNA, 75 bp, synthetic construct
  source 1..75: mol_type = other DNA
cgtctggtacaggcactgggcctggtggatatccgggtgccggaccatctgatagtcggtggcaaccaggttttc

SEQ ID NO: 387 - DNA, 75 bp, synthetic construct
  source 1..75: mol_type = other DNA
taataaatgcgtgacgctgcagctactctgggaagaatactgtgagcgtaatccaggcggtttttacagctataa

SEQ ID NO: 388 - DNA, 75 bp, synthetic construct
  source 1..75: mol_type = other DNA
ctggaacgtgaaaatcgtgaactgcgccgcagtaacgatatccttcgccaggcttccgcttattttgcgaaggcg

SEQ ID NO: 389 - DNA, 75 bp, synthetic construct
  source 1..75: mol_type = other DNA
ggtctgggaggaagtgaaaagcaggcagaggaaggtgagtttgaaaccgtgatgctgtctccccgttcagagcag

SEQ ID NO: 390 - DNA, 75 bp, synthetic construct
  source 1..75: mol_type = other DNA
acagtggtgggcagattttctggatgcgaacagagaacaatgtatcagcccgtttgaatatgcaaagattaacaa

SEQ ID NO: 391 - DNA, 75 bp, synthetic construct
  source 1..75: mol_type = other DNA
cccctgctcggtgcaaaggtccttcccggtgaaaccgacatcgccctgcccggcccgctgccgttcatcctctcc

SEQ ID NO: 392 - DNA, 75 bp, synthetic construct
  source 1..75: mol_type = other DNA
cacaaaggcggagttatcccgcgtggagatagtcgagctgctcagtcaggagtcggaaaaatttcacaatatcgg

SEQ ID NO: 393 - DNA, 75 bp, synthetic construct
  source 1..75: mol_type = other DNA
acctttcacgcgaacgctgccagttaatactgacccagctggttatggcgggtctggcagactatcagttcggtt

SEQ ID NO: 394 - DNA, 75 bp, synthetic construct
  source 1..75: mol_type = other DNA
ccgtctcagcgcgtcatgacgcccgtgaacacctcagcattgaggcttaccataagctcaaccgcgccagcgccg

SEQ ID NO: 395 - DNA, 75 bp, synthetic construct
  source 1..75: mol_type = other DNA
ccacaatttattcagctacaacaccagagaataatccgcctcagttggttgccagcctcgtccctgatgaacagc

SEQ ID NO: 396 - DNA, 75 bp, synthetic construct
  source 1..75: mol_type = other DNA
agccggatatggaggtgaactcgcagccatcggtgcgtgaagtgcgttttggtgacgggtactcacagcgtatgg

SEQ ID NO: 397 - DNA, 75 bp, synthetic construct
  source 1..75: mol_type = other DNA
gttgcgaaactgcaacgtatgcagttcggtaaaagctcagaaaaacttcgtgcaaaaaccgaacggcagatacag

SEQ ID NO: 398 - DNA, 75 bp, synthetic construct
  source 1..75: mol_type = other DNA
aaacggagaacatgtccctgaaatcattctgctcaactcccatgacggtacctccagctaccagatgctgccggg

SEQ ID NO: 399 - DNA, 75 bp, synthetic construct
  source 1..75: mol_type = other DNA
tgccttaaaagaggggatacattggtggtctggaagctggatcggttgggtagaagaatgaaacacctcattgct

SEQ ID NO: 400 - DNA, 75 bp, synthetic construct
  source 1..75: mol_type = other DNA
ttcaatcgataccagcactccgatgggaaggttcttttttcatatgatgggtgcactggcagaaatggagcgtga

SEQ ID NO: 401 - DNA, 75 bp, synthetic construct
  source 1..75: mol_type = other DNA
gaaggtcaccggctggccgcactctggcaggcgctgccggaagaactccgcttaagtccgcatcgttatctggcg

SEQ ID NO: 402 - DNA, 75 bp, synthetic construct
  source 1..75: mol_type = other DNA
cagtgctggatgcactcgagcagcatgaacacggggcgacgctgtttgatggtcgccccgttgtttttgacgaag

SEQ ID NO: 403 - DNA, 75 bp, synthetic construct
  source 1..75: mol_type = other DNA
gggctgcaaagcccactgacaaggcttataaactcactgacggggctggcatgttcctgctggtacatcctaatg

SEQ ID NO: 404 - DNA, 75 bp, synthetic construct
  source 1..75: mol_type = other DNA
atggacacctcacttgctcatgagaacgcccgcctgcgggcactgttgcagacgcaacaggacaccatccgccag

SEQ ID NO: 405 - DNA, 75 bp, synthetic construct
  source 1..75: mol_type = other DNA
cgaacaggaagcgctgatccacgccctgcaggaaaagctgagcaaccgggagcgcgaaatagaccatctgcaggc

SEQ ID NO: 406 - DNA, 75 bp, synthetic construct
  source 1..75: mol_type = other DNA
gcgcacacagacgttccaccgcgaagccgccggtgaattcagcggcgaaatcaccggcgtgacggatggtgccgg

SEQ ID NO: 407 - DNA, 75 bp, synthetic construct
  source 1..75: mol_type = other DNA
atggaccagaagctgttaacggatttccgctcagaactactcgattcacgttttggcgcaaaggccatttctact

SEQ ID NO: 408 - DNA, 75 bp, synthetic construct
  source 1..75: mol_type = other DNA
attaacgtgaaataccgttatgaatttacggacacgctggggctggtgacgtcattcagctatgcaggagacaag

SEQ ID NO: 409 - DNA, 75 bp, synthetic construct
  source 1..75: mol_type = other DNA
cccgaccgaatccgtggccattgatattgcttatgaaggctccggcagtggtgactggcgcactgacggtttcat

SEQ ID NO: 410 - DNA, 75 bp, synthetic construct
  source 1..75: mol_type = other DNA
ccttgcgacggagcggggtcgctgccgaccggctcatcctcgatccggggatgggatttttcttgagccccgcac

SEQ ID NO: 411 - DNA, 75 bp, synthetic construct
  source 1..75: mol_type = other DNA
actttctccggggattatctccgcgtaactgacaacaaggggaaaacgcacgacgtgctgaccggaagtgatgac

SEQ ID NO: 412 - DNA, 75 bp, synthetic construct
  source 1..75: mol_type = other DNA
tgataaagcaaatgcgccagcagggcgcgtacattgtcgatattgcgactcagattggttgctctgaacggacgg

SEQ ID NO: 413 - DNA, 75 bp, synthetic construct
  source 1..75: mol_type = other DNA
aaatgtggtggacagagtcattgaaggggcttacgaggtggtgggcgtgtttgaccggatagaggagaagcgtga

SEQ ID NO: 414 - DNA, 75 bp, synthetic construct
  source 1..75: mol_type = other DNA
gaaaacacgaacgggagctattaaataaaatatgcattctttcaatgctggcccgtttacgtccgatacaaaaag

SEQ ID NO: 415 - DNA, 75 bp, synthetic construct
  source 1..75: mol_type = other DNA
atgagtcggaaatacctcattcgtatcactgagctggaaaggctgctctctgagcaggctgaagccctccgtcag

SEQ ID NO: 416 - DNA, 75 bp, synthetic construct
  source 1..75: mol_type = other DNA
tcgtaaccgctggttcagcgtaatggcggggccgtctgtgcgcgtgaatgaatggttcagcgcgtatgcgatggc

SEQ ID NO: 417 - DNA, 75 bp, synthetic construct
  source 1..75: mol_type = other DNA
tgtccgcagccatttgtctgaccgtatccggtgcgcctgcatgggcgtctgagcagcaggccacgctgagcgcgg

SEQ ID NO: 418 - DNA, 75 bp, synthetic construct
  source 1..75: mol_type = other DNA
gcaaagtgttcctgacgccggcgcaactggcgatgctgatggaaggtatcgactggcgacagccaaagcggttac

SEQ ID NO: 419 - DNA, 75 bp, synthetic construct
  source 1..75: mol_type = other DNA
ggcggactgcaggctggtggttatgcactcagcgcagcgggatggcatcgccacccgcaccggtcaccttcgacc

SEQ ID NO: 420 - DNA, 75 bp, synthetic construct
  source 1..75: mol_type = other DNA
taccggggtatacagcagggcgtgggggcggcaggaggtgccgtcggaagatgccagggctgataatccgttaca

SEQ ID NO: 421 - DNA, 75 bp, synthetic construct
  source 1..75: mol_type = other DNA
atgaatatcagcacagaaacccgcgaaattctgcgtaattacagggccgtgattaatgcgcggcgtcgtgaaatg

SEQ ID NO: 422 - DNA, 75 bp, synthetic construct
  source 1..75: mol_type = other DNA
atggtgatacgcaaaaagaagtgcagggactgtggaaacgcgattactcataatacagtgtgttgcccgtattgt

SEQ ID NO: 423 - DNA, 75 bp, synthetic construct
  source 1..75: mol_type = other DNA
ccatgcgtattcaccaacaacatccggcatcccgtctttttcctttctgtaccggcaaataccgctggcacggca

SEQ ID NO: 424 - DNA, 75 bp, synthetic construct
  source 1..75: mol_type = other DNA
gcaaagtgttcctcacaccggcacagctggcgatgctccttgaaggtatcgactggcggcagcctaaaagactgc

SEQ ID NO: 425 - DNA, 75 bp, synthetic construct
  source 1..75: mol_type = other DNA
gtctggataaacaacctgttcaggatccaaaaccagatctgttatccacgatggaacacgaaaacgtacgcggca

SEQ ID NO: 426 - DNA, 75 bp, synthetic construct
  source 1..75: mol_type = other DNA
cccgccgaaagatccacgatgtgcacgtccgcatcccgtcagcactgacggaagaagccctggagcagatcggtc

SEQ ID NO: 427 - DNA, 75 bp, synthetic construct
  source 1..75: mol_type = other DNA
attaacgtgaaataccgttatgagtttacggacacgctggggctgattacgtcattcagttatgccaacgctgaa

SEQ ID NO: 428 - DNA, 75 bp, synthetic construct
  source 1..75: mol_type = other DNA
attgctggaaaggctgggccatactcctccggcagaagcagaaaaagcttattatgcttccatcggaaacgatga

SEQ ID NO: 429 - DNA, 75 bp, synthetic construct
  source 1..75: mol_type = other DNA
tactgcagataaatatggctgccatttgttatcacgtattggcgcttattgttcgttgatgctgattttctcgtc

SEQ ID NO: 430 - DNA, 75 bp, synthetic construct
  source 1..75: mol_type = other DNA
acagactgatcgcgacactgatgaaagcgaaacaggaaaaccggctggagcgtcagctacagcaactgagttatg

SEQ ID NO: 431 - DNA, 75 bp, synthetic construct
  source 1..75: mol_type = other DNA
ccatgcgtattcaccaacagcatcctgcatcccgtctttttccgttctgtaccggcaaataccgctggcacggca

SEQ ID NO: 432 - DNA, 75 bp, synthetic construct
  source 1..75: mol_type = other DNA
ggaacgtctggtgcgtcagacgctgtttcgcgcaaaccgcctcctgatggaggcatataccgaaattctggaact

SEQ ID NO: 433 - DNA, 75 bp, synthetic construct
  source 1..75: mol_type = other DNA
ggggcttacgaggtggtgggcgtgtttgaccggattgaggaaaagcgtgatgccatgcagtcgctgattctgccg

SEQ ID NO: 434 - DNA, 75 bp, synthetic construct
  source 1..75: mol_type = other DNA
tgtccgcagccatctgtctggccgtatccggtgcgcctgcatgggcgtctgagcagcaggccacactgagcgcag

SEQ ID NO: 435 - DNA, 75 bp, synthetic construct
  source 1..75: mol_type = other DNA
tctcccgccgtatcgcacaaatggaagccgatctgaaccggcttcagaaagagagcgatacgctgactggtaggg

SEQ ID NO: 436 - DNA, 75 bp, synthetic construct
  source 1..75: mol_type = other DNA
gttccattgctccaaagattggctgtacgccggagactctgcgtgtctgggttcgccagcatgagcgggataccg

SEQ ID NO: 437 - DNA, 75 bp, synthetic construct
  source 1..75: mol_type = other DNA
atgacagtaaaaatttctggcgtgcttaaagatggcacaggaaaaccagtacagaactgcaccattgtgctgaag

SEQ ID NO: 438 - DNA, 75 bp, synthetic construct
  source 1..75: mol_type = other DNA
ttggcggtaaaaatgtggcctggctgcactctgaagtcaccgcatggatggccgggcgcattgccggacgcaaac

SEQ ID NO: 439 - DNA, 75 bp, synthetic construct
  source 1..75: mol_type = other DNA
acaggctggtatggaatcacattacgggcaccctggtggtggcttccgaactggcccgctcacggggaaaacgcg

SEQ ID NO: 440 - DNA, 75 bp, synthetic construct
  source 1..75: mol_type = other DNA
cttcgcgcagaaaatgcatatctgaaagccatgcaggagcatcttctggaaaaaaagcgccaggagctggagaaa

SEQ ID NO: 441 - DNA, 75 bp, synthetic construct
  source 1..75: mol_type = other DNA
gctcaagcgcggcgtgggctacctgaacgatatccaaggatttcctgaccctgcgctctatcccgatattgctga

SEQ ID NO: 442 - DNA, 75 bp, synthetic construct
  source 1..75: mol_type = other DNA
ccggacgcgaggcctgtatcgccggccgatgagatcagacgtattgcgccgctcttagacgccctgtccgatcag

SEQ ID NO: 443 - DNA, 75 bp, synthetic construct
  source 1..75: mol_type = other DNA
ccggaacccgccggatattttctaatgaatttaaacttcatatggttgaactggcttcgaaaccaaatgccaatg

SEQ ID NO: 444 - DNA, 75 bp, synthetic construct
  source 1..75: mol_type = other DNA
aacgaaaacctgcccctcaaagaagcaaacttccccgctatgtcgtgaagcttcacgacgatgacttctttgacg

SEQ ID NO: 445 - DNA, 75 bp, synthetic construct
  source 1..75: mol_type = other DNA
ggtgacgtccggccatccggtcaatccgctgctcggtgcaaaggtccttcccggtgaaaccgacatcgccctgcc

SEQ ID NO: 446 - DNA, 75 bp, synthetic construct
  source 1..75: mol_type = other DNA
tgacggatattggcgcggcgaaacttgccagcgccgccgcgctcggtgtgccgctaaaaattacccatatggcgg

SEQ ID NO: 447 - DNA, 75 bp, synthetic construct
  source 1..75: mol_type = other DNA
gtttcgttttcaatcgtgctctggcacgtcagaatgagaatcatgaggccggtaataaatacatcccttacggga

SEQ ID NO: 448 - DNA, 75 bp, synthetic construct
  source 1..75: mol_type = other DNA
cctggttgtccgtaataacggtgcaatggtctggcgtacctggaattttgaggacggtgccgggtactggatgaa

SEQ ID NO: 449 - DNA, 75 bp, synthetic construct
  source 1..75: mol_type = other DNA
cggaatatgacccgcttatcgggtgctacattccgaccgatatcacgttcacatctgcactgtttgctgccctcg

SEQ ID NO: 450 - DNA, 75 bp, synthetic construct
  source 1..75: mol_type = other DNA
cccgcgctgtgctacagatgctcctgctccggaggcattatcagttgcttgtgcagcttcctgccatgtggaatt

SEQ ID NO: 451 - DNA, 75 bp, synthetic construct
  source 1..75: mol_type = other DNA
tcaatgggcgcaagctgtatttgtctccagtaatagatctcttcaacaacgaagttatttcttacagcctttcgg

SEQ ID NO: 452 - DNA, 75 bp, synthetic construct
  source 1..75: mol_type = other DNA
tgcgcgccgaagtggcggaggtggccaatgccatgtgcgacctgcgtacaaccatgaatgagatggagcagcggt

SEQ ID NO: 453 - DNA, 75 bp, synthetic construct
  source 1..75: mol_type = other DNA
cagggcaaaacaccaaaagcctctccgataacaccagaacaaatcgaaatacgtgagctgaggaaaaagctacaa

SEQ ID NO: 454 - DNA, 75 bp, synthetic construct
  source 1..75: mol_type = other DNA
agcgggaagaagtgaaggcgcgcattgtggaattcgtgcgcctgagcggacgagaaacttttcgacaactggcag

SEQ ID NO: 455 - DNA, 75 bp, synthetic construct
  source 1..75: mol_type = other DNA
gattaatgcgcggcgtcgtgaaatggggcagaaaccgctcaccaccgcgcagattgttgatgaaatctgcgattt

SEQ ID NO: 456 - DNA, 75 bp, synthetic construct
  source 1..75: mol_type = other DNA
tggtgcctgagcttgggctggtggtccttaagccgggccgtgaatccatacagatatttcataatcctcgagtgc

SEQ ID NO: 457 - DNA, 75 bp, synthetic construct
  source 1..75: mol_type = other DNA
tttccactgccagcatcgatgactttacccgttattctaaagatcttgcagatgaaggcacccgctgctttatcg

SEQ ID NO: 458 - DNA, 75 bp, synthetic construct
  source 1..75: mol_type = other DNA
aaacgcccgcgccggtggggagcctcggccccggctggaaaatgcctgcggatatccgcttacagctgcgcgata

SEQ ID NO: 459 - DNA, 75 bp, synthetic construct
  source 1..75: mol_type = other DNA
tgcgcaatttcattttattagcgcaaaccaataatattgcccgggcggcagaaaaaatccatatgacggcttcgc

SEQ ID NO: 460 - DNA, 75 bp, synthetic construct
  source 1..75: mol_type = other DNA
cgctggcgctgccggaattctgaacccgatgccggaaaggtgcttaatacgcggctcgccagtgacggtcttctc

SEQ ID NO: 461 - DNA, 75 bp, synthetic construct
  source 1..75: mol_type = other DNA
tcgcgcagaaaatgcatatctgaaagccatgcaggagcatctcctggaaaaaaagcgccaggagctggagaaaaa

SEQ ID NO: 462 - DNA, 75 bp, synthetic construct
  source 1..75: mol_type = other DNA
gttatgctggtatgacttcggtgttcaatattgccaggatgtcaccgcagaaaaggatggcggttctggttgcct

SEQ ID NO: 463 - DNA, 75 bp, synthetic construct
  source 1..75: mol_type = other DNA
ccaccggcacgccaggcgctggcacaggcggcactgacttaccgttatggtgacgaacatcagcccgtcaccacc

SEQ ID NO: 464 - DNA, 75 bp, synthetic construct
  source 1..75: mol_type = other DNA
agtgggaagaaaatatctatcaactggagacatcagatccggttctgggtggtgcagacgggatatcaaatcgag

SEQ ID NO: 465 - DNA, 75 bp, synthetic construct
  source 1..75: mol_type = other DNA
aaaagcgccttgaagtcgtgaatcactacttcacaactgatgatggttacaggatcatctcggcacgttttggtg

SEQ ID NO: 466 - DNA, 75 bp, synthetic construct
  source 1..75: mol_type = other DNA
acgcattgaggatcttgaaaggcaagttcgatttcttgaaacgcggcttatgtatctaaaaaagctgaaagcctt

SEQ ID NO: 467 - DNA, 75 bp, synthetic construct
  source 1..75: mol_type = other DNA
tgactaatcagggcgcggcacgactggctaacgcgacgatgctcggcagtaagctgaatctgacgcaaatggccg

SEQ ID NO: 468 - DNA, 75 bp, synthetic construct
  source 1..75: mol_type = other DNA
acaaacagtccgcaggggccgtggtggctgctcggctggtgtgagcgggtgccggaagcggatgaggtgctgcct

SEQ ID NO: 469 - DNA, 75 bp, synthetic construct
  source 1..75: mol_type = other DNA
ggctggctacagtgccgggcgatatgcgttgtttttattatgatgctgaaacatctgagtatacgggctggtctg

SEQ ID NO: 470 - DNA, 75 bp, synthetic construct
  source 1..75: mol_type = other DNA
tatcttgatggcaacgctcgtcagaacctggccactttctgccagacctgggacgacgaaaacgtccataaattg

SEQ ID NO: 471 - DNA, 75 bp, synthetic construct
  source 1..75: mol_type = other DNA
tgaacgcctgacacgccagacgctgtatcgcgccaatcgcctgttcatggaggcgtataccgaaattctggaact

SEQ ID NO: 472 - DNA, 75 bp, synthetic construct
  source 1..75: mol_type = other DNA
tgtgcttcaggccgatgcttacggtggttaccgggcgttatacgaatccggcagaataacggaagccgcgtgtat

SEQ ID NO: 473 - DNA, 75 bp, synthetic construct
  source 1..75: mol_type = other DNA
atggataagaagcaagtaacggatttaaggtcggaactactcgattcacgttttggtgcgaagtctatttccact

SEQ ID NO: 474 - DNA, 75 bp, synthetic construct
  source 1..75: mol_type = other DNA
tcaccactgccggtgcagcaaagctggcagcggcaaccgcaccgggagggcggaaggtcaacattaccacgatgg

SEQ ID NO: 475 - DNA, 75 bp, synthetic construct
  source 1..75: mol_type = other DNA
taaaaaacttgagcaatgcacgtcaggtgcaattacgaaatctgacttaagaccggatatctatccgaaagatta

SEQ ID NO: 476 - DNA, 75 bp, synthetic construct
  source 1..75: mol_type = other DNA
aaatctggctggttgccggtatcaccgatatgcgcaacggcttcaatggcctcgccgcaaaggtgcagaccgcgc

SEQ ID NO: 477 - DNA, 75 bp, synthetic construct
  source 1..75: mol_type = other DNA
attctgctcaactctcatgacggtacctccagctaccagatgctgccggggtacttcaggttcgtctgccagaac

SEQ ID NO: 478 - DNA, 75 bp, synthetic construct
  source 1..75: mol_type = other DNA
gcgtaaccgctggttcagcgtaatggcggggccgtctgtgcgcgtgaatgaatggttcagcgcgtatgcgatggc

SEQ ID NO: 479 - DNA, 75 bp, synthetic construct
  source 1..75: mol_type = other DNA
atgaccagatggtcgatatggcgtttatcactcagctgaccggcctgaccgataagtggttttacaagctcatca

SEQ ID NO: 480 - DNA, 75 bp, synthetic construct
  source 1..75: mol_type = other DNA
gagctatatggctggctttatcgcttttaatactattcttttccatgcatagactttcactattagactccactc

SEQ ID NO: 481 - DNA, 75 bp, synthetic construct
  source 1..75: mol_type = other DNA
acaccgtccgacagtctgtgttgtgagctggttctgccggccggaactctcaggcttaaaggtaaactgacgccg

SEQ ID NO: 482 - DNA, 75 bp, synthetic construct
  source 1..75: mol_type = other DNA
gttccattgccccaaagattggctgtacaccggagactctgcgtgtctgggtacgccagcatgagcgggataccg

SEQ ID NO: 483 - DNA, 75 bp, synthetic construct
  source 1..75: mol_type = other DNA
acccgtccggtgaagtcacacccagcaaggcagaccgccttatcacggaacgtctggtacaggcactgggcctgg

SEQ ID NO: 484 - DNA, 75 bp, synthetic construct
  source 1..75: mol_type = other DNA
agggagcgaccgcaggcggtacgctggcaatgcgaatgctgtcacagcaggcgatggtcgccagccagatgaaac

SEQ ID NO: 485 - DNA, 75 bp, synthetic construct
  source 1..75: mol_type = other DNA
cggccggcgagcccaaggcgcagcttgcccgcgagttcaacatcagccgggaaaccctctaccagtacctccgca

SEQ ID NO: 486 - DNA, 75 bp, synthetic construct
  source 1..75: mol_type = other DNA
gtggccggcactgacgtactatgcgaacgatggctgggtggaaatcgacaacaacatcgctgaaaatgccctgcg

SEQ ID NO: 487 - DNA, 75 bp, synthetic construct
  source 1..75: mol_type = other DNA
tccgggtgctgtatctgaacaaccagaatcagctgattgcgggtgaaaccctcttcacaggcaccatcaaccgca

SEQ ID NO: 488 - DNA, 75 bp, synthetic construct
  source 1..75: mol_type = other DNA
aagagacggaggccttcctgcgctctgcactggcacgtgccgaagaaaagatcgaagaagatgaacgggaaatag

SEQ ID NO: 489 - DNA, 75 bp, synthetic construct
  source 1..75: mol_type = other DNA
gtcatgctgcccggaatgtggaggctcgctgagctatctgggtgaggatgccgccgaacagctggagctgatgcg

SEQ ID NO: 490 - DNA, 75 bp, synthetic construct
  source 1..75: mol_type = other DNA
cgacagcggtggtgaacatgcggcggtgttgtactcgctgatcggcacatgccgtctgaacaatgtggagccaga

SEQ ID NO: 491 - DNA, 75 bp, synthetic construct
  source 1..75: mol_type = other DNA
ttcgcgccgacgtggcggaggtggccaacaccatgtgtgaccttcgggccaggctgaacgatatggagcatcgct

SEQ ID NO: 492 - DNA, 75 bp, synthetic construct
  source 1..75: mol_type = other DNA
atgcaatatgcgaaacctgtcactctgaatgttgaagagtgcgaccgtctctcctttctgccttacctgtttggc

SEQ ID NO: 493 - DNA, 75 bp, synthetic construct
  source 1..75: mol_type = other DNA
cgtagccgtgaagcgctacaccacctgaatatacagcatctgcgacggtcgcatagccttcgccatggcaggcgt

SEQ ID NO: 494 - DNA, 75 bp, synthetic construct
  source 1..75: mol_type = other DNA
gtgttgatttaatcaacgctgattgcctgcattttattcagtccctgcctgatgattccattgacctgattgtta

SEQ ID NO: 495 - DNA, 75 bp, synthetic construct
  source 1..75: mol_type = other DNA
tccgggtcagcagctttgaccagaacccggaacgccagctggaacaaacccaggtgagcaaggtgttcaccgaca

SEQ ID NO: 496 - DNA, 75 bp, synthetic construct
  source 1..75: mol_type = other DNA
ttggggcttccgctattggtctcggtgtcgcggaaatccttcttgggcgccaccgttggccttcctgtaaaggat

SEQ ID NO: 497 - DNA, 75 bp, synthetic construct
  source 1..75: mol_type = other DNA
tttttgaagccggtgaggccggtcgtggtgcaccggtacaggtacgtgcacttgagcagtggatgatcccgaaca

SEQ ID NO: 498 - DNA, 75 bp, synthetic construct
  source 1..75: mol_type = other DNA
cctcttcggcctgtgcaccggagactgacctgcaaaaactggtagccactcccgtccctgatgaacggcgcatca

SEQ ID NO: 499 - DNA, 75 bp, synthetic construct
  source 1..75: mol_type = other DNA
caacaaatgaccagaatacagacctgcaacgaaacgctcttgtttgtgcaggatgtgaacaaatatttgaagata

SEQ ID NO: 500 - DNA, 75 bp, synthetic construct
  source 1..75: mol_type = other DNA
cttgctgaacgtcagcgaaaaacgaaaccgctgttgaaatccctggaaagctggttgcgtgaaaagatgaagacc

SEQ ID NO: 501 - DNA, 75 bp, synthetic construct
  source 1..75: mol_type = other DNA
caccggctggtgcactacacgcggacacaatatgcagagccgctggtcgaaagccgctatctttacgacccgctg

SEQ ID NO: 502 - DNA, 75 bp, synthetic construct
  source 1..75: mol_type = other DNA
acgcccgcctgcgggcactgttgcagacgcaacaggacaccatccgccagatggctgaatacaaccgcctgctct

SEQ ID NO: 503 - DNA, 75 bp, synthetic construct
  source 1..75: mol_type = other DNA
acccgtccggtgaagtcacacccagtaaggcagaccggcttatcaccgaacgtctggtacaggcactgggcctgg

SEQ ID NO: 504 - DNA, 75 bp, synthetic construct
  source 1..75: mol_type = other DNA
atgccatgacggtccattattaccggctgcgggattacgccctgcagcatccggaatgcagcgccattatgcgca

SEQ ID NO: 505 - DNA, 75 bp, synthetic construct
  source 1..75: mol_type = other DNA
actttctccggggattatctccgcgtaactgacaacaaggggaaaacgcacgatgtgctgaccggaagtgatgac

SEQ ID NO: 506 - DNA, 75 bp, synthetic construct
  source 1..75: mol_type = other DNA
agttttatcctcttgatgagcttctcagggctgcggagataccgcgcagtacgttttattatcatctaaaggctc

SEQ ID NO: 507 - DNA, 75 bp, synthetic construct
  source 1..75: mol_type = other DNA
atgaatatcagcacagaaacccgcgaaattctgcgcaattacaaagccgtgattaatgcgcggcgtcgtgaaatg

SEQ ID NO: 508 - DNA, 75 bp, synthetic construct
  source 1..75: mol_type = other DNA
tatgtggatgacaaggcactggagctgaaggtgtacgcggatgatcagatggcaaaacatcttgccgcaccggac

SEQ ID NO: 509 - DNA, 75 bp, synthetic construct
  source 1..75: mol_type = other DNA
atggcgggactggagcgtgaagaattccgggtgctgtatctgaataaccagaatcaactgattgccggtgaaacc

SEQ ID NO: 510 - DNA, 75 bp, synthetic construct
  source 1..75: mol_type = other DNA
gcgtaaccgtcatgccgcccgtatccgcccagcgtagtgctatcgttcgctggttttcagaaggtgacgggaata

SEQ ID NO: 511 - DNA, 75 bp, synthetic construct
  source 1..75: mol_type = other DNA
tattgatgccacaaacggacagatgccggaagacagggaaagtttgttctgggtgaatgtcaaggccatcccggc

SEQ ID NO: 512 - DNA, 75 bp, synthetic construct
  source 1..75: mol_type = other DNA
gccagcgttgcaacacgtctcgatatcaccacccacagcctttatgcctggataaagaagtacggtccggattct

SEQ ID NO: 513 - DNA, 75 bp, synthetic construct
  source 1..75: mol_type = other DNA
cccgccgtcacatgccgggaccatcaccgtgtatgaagattctcaacccggtacgctgaatgattttctcggtgc

SEQ ID NO: 514 - DNA, 75 bp, synthetic construct
  source 1..75: mol_type = other DNA
gcgtaaagtctggcgtcagttgttacgggaaggaatcagggtggccagatgtacagtggcgcgcctcatggcggt

SEQ ID NO: 515 - DNA, 75 bp, synthetic construct
  source 1..75: mol_type = other DNA
gatgccggaatatgaaggcggattctggcacttcatccgcctgccggacggtggcggttacatgatgccggatgg

SEQ ID NO: 516 - DNA, 75 bp, synthetic construct
  source 1..75: mol_type = other DNA
gatgtctacgttaccggcagtaaccggtggggagatcctcgtgcaagattactacagggtgctgactggcaggca

SEQ ID NO: 517 - DNA, 75 bp, synthetic construct
  source 1..75: mol_type = other DNA
cttccaggcgcgggccagcactgcgaccgaaaccagcgtcaaaccggacgcttgtgattcgccgccgtcaggttg

SEQ ID NO: 518 - DNA, 75 bp, synthetic construct
  source 1..75: mol_type = other DNA
tcaagttacacatgggcagaggccacctggtctcagcagcttgaagactgggtgatgagtcatgttcgctgcttc

SEQ ID NO: 519 - DNA, 75 bp, synthetic construct
  source 1..75: mol_type = other DNA
ggagatctgcgaagcgcaatcaccttctcggaaaccctcgcgaaatttcgcagtcgcgacgccagagaccgaggg

SEQ ID NO: 520 - DNA, 75 bp, synthetic construct
  source 1..75: mol_type = other DNA
agtgcgatgccatcgtgcaggcacctgcaccttcgcggcccatcgagcggggtatcgccggaccggggctgctgg

SEQ ID NO: 521 - DNA, 75 bp, synthetic construct
  source 1..75: mol_type = other DNA
gaacaggttcgtgaatatattcgcaatgctgaacgtccagaaggtcagggagaagcgcctgccctttctggtgat

SEQ ID NO: 522 - DNA, 75 bp, synthetic construct
  source 1..75: mol_type = other DNA
aatatccctggaggatacaccggaggagatattacttataaaacaattaacgattatggtgctctgactgaacag

SEQ ID NO: 523 - DNA, 75 bp, synthetic construct
  source 1..75: mol_type = other DNA
cgcaggcacgaaaaaagtggccgggactgggaaatgaagtgactgcccgcctgctgaccgtgacgcgcaaaggaa

SEQ ID NO: 524 - DNA, 75 bp, synthetic construct
  source 1..75: mol_type = other DNA
ctgatagaagagttgcgccagcgtggtgtgaatttcagaagcctgactgacagtattgataccagtaccccaatg

SEQ ID NO: 525 - DNA, 75 bp, synthetic construct
  source 1..75: mol_type = other DNA
aagttggggaacagcacgggccggccgcgcaaggcgtgctggcagccgtgcagaccctgcgtgagatgaacgccg

SEQ ID NO: 526 - DNA, 75 bp, synthetic construct
  source 1..75: mol_type = other DNA
cgcatacgttcaaataactgctatggacaggttattcgtcgtgaccaggaaagcgcattagcctgttgggggata

SEQ ID NO: 527 - DNA, 75 bp, synthetic construct
  source 1..75: mol_type = other DNA
taaggtcaagcgataccgctcttacagaggagaggtagggcaaaccgcccctaatgttctccaaagagatttcaa

SEQ ID NO: 528 - DNA, 75 bp, synthetic construct
  source 1..75: mol_type = other DNA
ccgcacttaaactcaccggcttccgtgatgcgcttaaaaagcaacttgctcaaccgggcacataccaggagctgg

SEQ ID NO: 529 - DNA, 75 bp, synthetic construct
  source 1..75: mol_type = other DNA
cgttctgaaaaactgcgtcgtgaggttgaacaggctgaagccctgctgaaacaacgcgagcaggaaagcgatcgt

SEQ ID NO: 530 - DNA, 75 bp, synthetic construct
  source 1..75: mol_type = other DNA
cgatgtgctgaccggaagtgatgacggtcgccacagcaacacgtctctggcgtggggagctggcgtgcagtttaa

SEQ ID NO: 531 - DNA, 75 bp, synthetic construct
  source 1..75: mol_type = other DNA
cggtattccgtctgttccggcccgtacatccggttgtggccgtatcggcccgcaccggctgggaactggatacgc

SEQ ID NO: 532 - DNA, 75 bp, synthetic construct
  source 1..75: mol_type = other DNA
ggtataattccatccgccgtgaacgtcctttaacggatgatgaattaatgcagttcgtgccttcggtattttccg

SEQ ID NO: 533 - DNA, 75 bp, synthetic construct
  source 1..75: mol_type = other DNA
gaacatattgaccaccaggagtaccgcaaaattctcgcggacactgagcaggaaaagcacctgaaaaaattacga

SEQ ID NO: 534 - DNA, 75 bp, synthetic construct
  source 1..75: mol_type = other DNA
accggtaagtaccgctggcacggcagtgctgagacgtataccggtcgtgaagtacaggatattcccggtgtgctg

SEQ ID NO: 535 - DNA, 75 bp, synthetic construct
  source 1..75: mol_type = other DNA
ccagcgtgaacacgtactggcgacaccccaacaaaggggcgtttgctggtaagagcctgataagcgcggcggggc

SEQ ID NO: 536 - DNA, 75 bp, synthetic construct
  source 1..75: mol_type = other DNA
tacgccggagactctgcgtgtctgggttcgccagcatgagcgggataccgggggcggtgatggagggctcaccac

SEQ ID NO: 537 - DNA, 75 bp, synthetic construct
  source 1..75: mol_type = other DNA
tgaatctttacttgaacgaatcacccgtaaattacgtgacggatggaaaagagttgaggtcttattatgcgcaat

SEQ ID NO: 538 - DNA, 75 bp, synthetic construct
  source 1..75: mol_type = other DNA
gtttcgttttcaatcgtgctctggcgcttcagaatgagaatcatgaggccggtaataaatacatcccttacggga

SEQ ID NO: 539 - DNA, 75 bp, synthetic construct
  source 1..75: mol_type = other DNA
ggtattacgtcgatacggtgggtaagaacacggcgaagatacaggattacataaagcaccagcttgaagaggata

SEQ ID NO: 540 - DNA, 75 bp, synthetic construct
  source 1..75: mol_type = other DNA
atccctgtggtgagcggaaatggtcagttcgccgcagtggctgaagtcaccgttactgaagcgggcgctgcaggg

SEQ ID NO: 541 - DNA, 75 bp, synthetic construct
  source 1..75: mol_type = other DNA
agggagatatgactcagtatggcggtcctattgtccagggttcggcaggtgtaagaattggcgcgcccaccggcg

SEQ ID NO: 542 - DNA, 75 bp, synthetic construct
  source 1..75: mol_type = other DNA
caacaaatgaccaaaacacagatttgcaacgcaatgcattaatgtgcgcaggatgtgaacagatttttgaggaca

SEQ ID NO: 543 - DNA, 75 bp, synthetic construct
  source 1..75: mol_type = other DNA
taaggcagaccgccttatcacggaacgtctggtacaggcactgggcctggtggatatccgggtgccggaccatct

SEQ ID NO: 544 - DNA, 75 bp, synthetic construct
  source 1..75: mol_type = other DNA
acattcaactgccgtctcaatggcaggatcagtcaatgcaggtcctggtgtccacagataacagtggcatcaacc

SEQ ID NO: 545 - DNA, 75 bp, synthetic construct
  source 1..75: mol_type = other DNA
ttgccgcagcattcaatgaaccgctgcttctggagcccgcctatgcgcgggttttcttttgcgcgctcgggcgcg

SEQ ID NO: 546 - DNA, 75 bp, synthetic construct
  source 1..75: mol_type = other DNA
atgccggacaacgtagattttattcaggaacaacaggctgaattactggagcgccagattaacgcggcaagggta

SEQ ID NO: 547 - DNA, 75 bp, synthetic construct
  source 1..75: mol_type = other DNA
ggaatacagaccgtatcgttaccatactgctggcactgattattgtggtcctgctgactactgtcagcgtcagtc

SEQ ID NO: 548 - DNA, 75 bp, synthetic construct
  source 1..75: mol_type = other DNA
gatgacggtctggcggaggcggataataatgctgcggaaagagcgcttcgtgcagtctgtctcggaaagaaaaac

SEQ ID NO: 549 - DNA, 75 bp, synthetic construct
  source 1..75: mol_type = other DNA
ctgagccggattggtactacgtcatcgtactggccgggcagtccaatgccatggcttacggtgaagggcttccgc

SEQ ID NO: 550 - DNA, 75 bp, synthetic construct
  source 1..75: mol_type = other DNA
actgccttgataatgcggtaatggagaacttctttggtcacctgaaagaagaaatgtactatcgccgggactaca

SEQ ID NO: 551 - DNA, 75 bp, synthetic construct
  source 1..75: mol_type = other DNA
atactcgagggaattagccgatgcgagagctgaaaatgaaactctgcgtgctgatgttgccgctggtcgtaagcg

SEQ ID NO: 552 - DNA, 75 bp, synthetic construct
  source 1..75: mol_type = other DNA
gggtaaaagcggggccggtaaatcctcactctgtaatgcactgtttcagggggaggtcaccccggtcagtgatgt

SEQ ID NO: 553 - DNA, 75 bp, synthetic construct
  source 1..75: mol_type = other DNA
tgaaatctcctgatggtgaggcgatatcaggagcaaatattaccctgacggcgctgacagtttcaccggatgcgc

SEQ ID NO: 554 - DNA, 75 bp, synthetic construct
  source 1..75: mol_type = other DNA
cggttaaaagacaggctgagtgaactggcggatgaggaaggtattactcaggcgcagatgcttgaaaaactgatt

SEQ ID NO: 555 - DNA, 75 bp, synthetic construct
  source 1..75: mol_type = other DNA
aatgccatgaacggcaaccgcgctgaaatgagcccggaagccgccggtattgctgcctgtctgatgacgtacagt

SEQ ID NO: 556 - DNA, 75 bp, synthetic construct
  source 1..75: mol_type = other DNA
gcggacgctgacgtaccggcgtgaggccgccggtgacctggccggggaaatcaccggcgtgacggacggtgccgg

SEQ ID NO: 557 - DNA, 75 bp, synthetic construct
  source 1..75: mol_type = other DNA
cggcagtcggtcattctgcccgccctcaacgccgtcgagcgggcgagtgccgaggcgatcacccgtgctaaccgg

SEQ ID NO: 558 - DNA, 75 bp, synthetic construct
  source 1..75: mol_type = other DNA
atgaaactggccctgacgctggaagccgacagcattaacgtgcaggcactgaacatggggcgcattgtcgttgac

SEQ ID NO: 559 - DNA, 75 bp, synthetic construct
  source 1..75: mol_type = other DNA
gatgcgcgatgcgcagttgtggagccacatcgaatttcaccccgaatgcaacgcgatttacgcggcactggactg

SEQ ID NO: 560 - DNA, 75 bp, synthetic construct
  source 1..75: mol_type = other DNA
gtggcaagcctgatggattttgctgtgccggtggtggcgtgtctgctggtctggctgttggttaatcgtgggtga

SEQ ID NO: 561 - DNA, 75 bp, synthetic construct
  source 1..75: mol_type = other DNA
gacgcaacaggacaccatccgccagatggctgaatacaaccgcctgctctcacagcgggtggcggcttatgcttc

SEQ ID NO: 562 - DNA, 75 bp, synthetic construct
  source 1..75: mol_type = other DNA
gccgacattctgacgccgcgacgccgggaggattacggtaaggacctgtggagcgcatatcagaccatccaggag

SEQ ID NO: 563 - DNA, 75 bp, synthetic construct
  source 1..75: mol_type = other DNA
atgaaatcattaaccacggaaaccgcactggatattctgattgcgtggctacaggacaatatcgactgcgaatcg

SEQ ID NO: 564 - DNA, 75 bp, synthetic construct
  source 1..75: mol_type = other DNA
tcgcatcgaccagagatctccgtagcgcaactcgctcgtgagcatgggatcaacgataatttgctgttcaagtgg

SEQ ID NO: 565 - DNA, 75 bp, synthetic construct
  source 1..75: mol_type = other DNA
gtgaatcgcattctgactggttgcctgtcagaggcggagaatctggtgattttgtttttcgacgtggtgacgggc

SEQ ID NO: 566 - DNA, 75 bp, synthetic construct
  source 1..75: mol_type = other DNA
gcgtggccttcacctccacccgtgcagcacgggaatggctgattctgaacatggcgggactggagcgtgaagagt

SEQ ID NO: 567 - DNA, 75 bp, synthetic construct
  source 1..75: mol_type = other DNA
aacttcggcagccgctcggaaaaagtctcccgtcgtatcgcacagatggaagctgacctgaaggcacttcagaaa

SEQ ID NO: 568 - DNA, 75 bp, synthetic construct
  source 1..75: mol_type = other DNA
tgtcggctgccgttctggcgctgattgccgctggtgcgcctgcgcctgacattctcgaccagtttctggatgaaa

SEQ ID NO: 569 - DNA, 75 bp, synthetic construct
  source 1..75: mol_type = other DNA
ggatggcggcggaggaaggcatcttcttttatgaggagcacgcgcaaaaaagtaccgaccagagcctggtcctgt

SEQ ID NO: 570 - DNA, 75 bp, synthetic construct
  source 1..75: mol_type = other DNA
atacccgctggcatgaagattccgtgcgtaaccgctggttcagcgtgatggcggggccgtctgtacgcgtgaatg

SEQ ID NO: 571 - DNA, 75 bp, synthetic construct
  source 1..75: mol_type = other DNA
cgatgatttacacgcatgtgctgaaagttggcggtgccggagtgcgctcaccgcttgatgcgctgccgcccctca

SEQ ID NO: 572 - DNA, 75 bp, synthetic construct
  source 1..75: mol_type = other DNA
tctggataatgctgtggtggagtgtttctttggaaccttaaagtcggagtgtttttatcttgatgagttcagtaa

SEQ ID NO: 573 - DNA, 75 bp, synthetic construct
  source 1..75: mol_type = other DNA
ccgccgagcgggaaagcctgctggcgttgccggactccaaggacgacctgatccgacattacacattcaacgata

SEQ ID NO: 574 - DNA, 75 bp, synthetic construct
  source 1..75: mol_type = other DNA
tatcacgagaatagaggccgatacggataccgtagggtaacgctgtctcttcatcgagaagggaaacagattaac

SEQ ID NO: 575 - DNA, 75 bp, synthetic construct
  source 1..75: mol_type = other DNA
tgactacgtccgcacccacgcgcctggagatctgcgaagcgcaatcaccttctcggaaaccctcgcgaaatttcg

SEQ ID NO: 576 - DNA, 75 bp, synthetic construct
  source 1..75: mol_type = other DNA
aggtaagggacgaacaaaaaatccccggtgaatgcctcccgttaaaaaaagtatcgctgaacctgaataacgaaa

SEQ ID NO: 577 - DNA, 75 bp, synthetic construct
  source 1..75: mol_type = other DNA
ggggagtctggttctgggcttcctgacttatctgacaaatctgtacttcaaaatcagagaagacaagcgtaaggc

SEQ ID NO: 578 - DNA, 75 bp, synthetic construct
  source 1..75: mol_type = other DNA
tgccatgcagtcgctggtcctgccgccaccggcacgccaggcgctggcacaggcggcactgacttaccgttatgg

SEQ ID NO: 579 - DNA, 75 bp, synthetic construct
  source 1..75: mol_type = other DNA
ctcccgcccctgtgacgccactgatgccgctgccggacatcacgcaggagcgttttttacgtctgccggaagtga

SEQ ID NO: 580 - DNA, 75 bp, synthetic construct
  source 1..75: mol_type = other DNA
aatcacgcctgaagggaaagctgcacgttatcagcaagcgttacactcagcgcattgagcgacataatctgaatc

SEQ ID NO: 581 - DNA, 75 bp, synthetic construct
  source 1..75: mol_type = other DNA
aagcagacccgtctggtgcatgaggtgtggcgacatactgttaatcgcgtcatcctggacgcaacacatcagaac

SEQ ID NO: 582 - DNA, 75 bp, synthetic construct
  source 1..75: mol_type = other DNA
cgtcacccggcaaccttgggcagcagcgaagtcgaggcatttctgtcctggctggcgaacgagcgcaaggtttcg

SEQ ID NO: 583 - DNA, 75 bp, synthetic construct
  source 1..75: mol_type = other DNA
cgcacctacagcagttaccggacaaaaacgcccgcgccggtggggagcctcggccccggctggaaaatgcctgcg

SEQ ID NO: 584 - DNA, 75 bp, synthetic construct
  source 1..75: mol_type = other DNA
aacgcagacggcgtactacacaggaaaagatcgctatcgttcagcagagctttgaaccgggaatgacggtctccc

SEQ ID NO: 585 - DNA, 75 bp, synthetic construct
  source 1..75: mol_type = other DNA
gtatgcaaaagggctgacctgcgaagccgacaccctcggcagttgtggctacgtttatatggctgtttatccgac

SEQ ID NO: 586 - DNA, 75 bp, synthetic construct
  source 1..75: mol_type = other DNA
tcagggcggcgtcgccgtcagatcttgcggaaaagctgacacataaactgaaagagggctggcagccgtttggta

SEQ ID NO: 587 - DNA, 75 bp, synthetic construct
  source 1..75: mol_type = other DNA
atgagcacaaaattttataccctgctgacggatattggcgcggcgaaacttgccagcgccgccgcgctcggtgtg

SEQ ID NO: 588 - DNA, 75 bp, synthetic construct
  source 1..75: mol_type = other DNA
catcgactgctgatgaaggctgtacgccgcaggatcagtgacgcacgtttcatgactctgctgtggaaaaccatc

SEQ ID NO: 589 - DNA, 75 bp, synthetic construct
  source 1..75: mol_type = other DNA
ggagaaatgggggatctgtacagtcatcgctgggaaatcgaactgggatacagggagataaaacagacgatgcaa

SEQ ID NO: 590 - DNA, 75 bp, synthetic construct
  source 1..75: mol_type = other DNA
cgacattcgaaccgtgcaggatctgctcggccattccgacgtctctacgacgatgatttacacgcatgtgctgaa

SEQ ID NO: 591 - DNA, 75 bp, synthetic construct
  source 1..75: mol_type = other DNA
cgggcggagcattcactttgagccgctgctgccgggggaggcggtgtacagccgcagtgagtcaatgtggctggt

SEQ ID NO: 592 - DNA, 75 bp, synthetic construct
  source 1..75: mol_type = other DNA
cggaagtggtcaacgggcatacggacgttatctgctcaaccagtatccgccacattctggctgtacgaaagagta

SEQ ID NO: 593 - DNA, 75 bp, synthetic construct
  source 1..75: mol_type = other DNA
ctctcgccgctgttgcgggccgcgatagacgccttcgacgaagccggtccggacgcagcgttcgagcagggactc

SEQ ID NO: 594 - DNA, 75 bp, synthetic construct
  source 1..75: mol_type = other DNA
ggctttatgggatatctgaaagggaaaagcagtctgatgctttacgagcagtttggtgatttgaaattcaaatac

SEQ ID NO: 595 - DNA, 75 bp, synthetic construct
  source 1..75: mol_type = other DNA
ccatacccgtgccattcacagcattgacactgacattaagctcaaccgcgcattgtgggtgatggcggaaaccct

SEQ ID NO: 596 - DNA, 75 bp, synthetic construct
  source 1..75: mol_type = other DNA
gcgttgcgcttcccgacgcccttgagcggaagtatccgcgcgccgggcattcctggccgtggttctgggtttttg

SEQ ID NO: 597 - DNA, 75 bp, synthetic construct
  source 1..75: mol_type = other DNA
acatcgggctggatgtacataaagaaacgttggcggttgctattgctgcacctgaacggcttggcgaagttcgtt

SEQ ID NO: 598 - DNA, 75 bp, synthetic construct
  source 1..75: mol_type = other DNA
agtcaaaagacgatgctgctggaggtgataaagagcttcaccccgttgccaccggagaatgacatccaaaaggac

SEQ ID NO: 599 - DNA, 75 bp, synthetic construct
  source 1..75: mol_type = other DNA
actacacccgcacggcgcaggtgctgatggacacgatggcagaagcacacatgtgggcggtggataaaccgctta

SEQ ID NO: 600 - DNA, 75 bp, synthetic construct
  source 1..75: mol_type = other DNA
ggaattatctttgacaacaatgaggataaaacggattcagcagcactgttgccctgtatcgaacaggccagagag

SEQ ID NO: 601 - DNA, 75 bp, synthetic construct
  source 1..75: mol_type = other DNA
ccatcatgctcattgaaaaaatactggattacaatcccgaagataatcatggtgcacgctggctactgggaccgg

SEQ ID NO: 602 - DNA, 75 bp, synthetic construct
  source 1..75: mol_type = other DNA
gccgcagcgagtcactgtggctggtgcgcggcggcgtggcgaaactggatgaaggtcaccggctggccgcactct

SEQ ID NO: 603 - DNA, 75 bp, synthetic construct
  source 1..75: mol_type = other DNA
cggccccggctggaaagcgccttctgatatccgcttacagctacgtgatgacggactgatactcaacgacaacgg

SEQ ID NO: 604 - DNA, 75 bp, synthetic construct
  source 1..75: mol_type = other DNA
attcaccagaacgcgtctccctgttacccattgcgccgggggtggattttgcaacagcgctctccctgagaagaa

SEQ ID NO: 605 - DNA, 75 bp, synthetic construct
  source 1..75: mol_type = other DNA
ccgtaagagctggaaaaaccgtgcagaagtggaactggccacactcacgtgggtggactggtataacaatcgacg

SEQ ID NO: 606 - DNA, 75 bp, synthetic construct
  source 1..75: mol_type = other DNA
atatccccgtcccggtccaggagccgggcagcggtaaaacccggacagcccggctgtgggtctacgtccgtgatg

SEQ ID NO: 607 - DNA, 75 bp, synthetic construct
  source 1..75: mol_type = other DNA
gtgaattacaccgacccgcagaacggctggcagacctccacggaactggtggaagacccggaagccatactgcgc

SEQ ID NO: 608 - DNA, 75 bp, synthetic construct
  source 1..75: mol_type = other DNA
ccacggagcgggacaccctgcttgcgctgccggaaagccaggatgacctgatccgctactacaccttcaacgact

SEQ ID NO: 609 - DNA, 75 bp, synthetic construct
  source 1..75: mol_type = other DNA
tgaacgataaccagggctgtttcatatttccggaaacctggtttggctcgttgctggatgagtttgaagaactga

SEQ ID NO: 610 - DNA, 75 bp, synthetic construct
  source 1..75: mol_type = other DNA
catggcaacattcgacggacatatcgttgaagcgttgatgaaaatgccagaagttaacgccatgtatccggagct

SEQ ID NO: 611 - DNA, 75 bp, synthetic construct
  source 1..75: mol_type = other DNA
agggtgatatgacccgcaagggactggatattgtgcagggttcagcgggggtgctgataggtgcgccgacgggag

SEQ ID NO: 612 - DNA, 75 bp, synthetic construct
  source 1..75: mol_type = other DNA
tctcaaccagtcagcagtctcttgatcttcaggtcagagcactcaaagacgcaggtgtgaaagcaaaccgtatat

SEQ ID NO: 613 - DNA, 75 bp, synthetic construct
  source 1..75: mol_type = other DNA
ctaaagagttcaaagccgaagctgtcagaacggttcctgaaaatcaactttcgatcagtgaaggcgcttcccgat

SEQ ID NO: 614 - DNA, 75 bp, synthetic construct
  source 1..75: mol_type = other DNA
atgggatttgaagagcggcgggtattccgacgatataaagggacaggagaacagaatacgtccggaaacgcgcgg

SEQ ID NO: 615 - DNA, 75 bp, synthetic construct
  source 1..75: mol_type = other DNA
acaggctggtatggaatcacattacgggcaccctggtggtggcctccgaactggcccgctcacggggaaaacgcg

SEQ ID NO: 616 - DNA, 75 bp, synthetic construct
  source 1..75: mol_type = other DNA
agccgcaagaatccgtttggcgatatcaaatcggatggcacggtgaaaacggctctcgaaaaccttggtttggga

SEQ ID NO: 617 - DNA, 75 bp, synthetic construct
  source 1..75: mol_type = other DNA
attaacgtgaaataccgttatgagtttacggacacactggggatggtgacgtcgttcagctatgcaggagacaag

SEQ ID NO: 618 - DNA, 75 bp, synthetic construct
  source 1..75: mol_type = other DNA
tcgtggggtggcgggtctcatcgtccatggaaacgacattcgtgctggatgcactggagcaggcgttatgggccc

SEQ ID NO: 619 - DNA, 75 bp, synthetic construct
  source 1..75: mol_type = other DNA
gtatctgtcacaggagcccgcaacgacaaggataaagaacgtatcctgtctctgctggaagaaatctggcaggac

SEQ ID NO: 620 - DNA, 75 bp, synthetic construct
  source 1..75: mol_type = other DNA
aagataaacacacgtcccgaagccagaactatacgtacatccccaccatcaccgtactggaaagcctgcagcggg

SEQ ID NO: 621 - DNA, 75 bp, synthetic construct
  source 1..75: mol_type = other DNA
gctgattttgaagataatgacttcagcggcaaacgctccctgatggagtctgtcgaagcgaagaccaaagacatt

SEQ ID NO: 622 - DNA, 75 bp, synthetic construct
  source 1..75: mol_type = other DNA
gtcgatggtgttactctcgctgaactgattaacgtggtctgcgataacggttactcccttcgtgttgttgatgaa

SEQ ID NO: 623 - DNA, 75 bp, synthetic construct
  source 1..75: mol_type = other DNA
atgccactgctggataagctgcgtgagcagtacggggtcggaccgctatgcagcgaactgcatattgccccgtca

SEQ ID NO: 624 - DNA, 75 bp, synthetic construct
  source 1..75: mol_type = other DNA
ggatggcggcggaggaaggcatcttcttttatgaggagcatgcttacaaaagtaccgaccagagcctggtgctgt

SEQ ID NO: 625 - DNA, 75 bp, synthetic construct
  source 1..75: mol_type = other DNA
atgaacccattcaaaggccggcattttcagcgtgacatcattctgtgggccgtacgctggtactgcaaatacggc

SEQ ID NO: 626 - DNA, 75 bp, synthetic construct
  source 1..75: mol_type = other DNA
tgcgagtcttgccacgccgagcacctggtcgctttcagctgtaagcgtcgcggtttctgcccgagctgtggggcg

SEQ ID NO: 627 - DNA, 75 bp, synthetic construct
  source 1..75: mol_type = other DNA
acaacgctgaccgctgcaatcactaccgtactggctaaaacctacggcggtgctgctcgcgcattcgaccagatc

SEQ ID NO: 628 - DNA, 75 bp, synthetic construct
  source 1..75: mol_type = other DNA
atgcaattagccagtcgttttggtcatgtaaatcagatccgtcgggagcgcccactgacacgcgaagaactgatg

SEQ ID NO: 629 - DNA, 75 bp, synthetic construct
  source 1..75: mol_type = other DNA
ttcgtccgcgaaggcgatacagtggtggtgcacagcatggatcggctggcccgcaacctcgatgacctgcgtcgc

SEQ ID NO: 630 - DNA, 75 bp, synthetic construct
  source 1..75: mol_type = other DNA
aaatgtggtggacagagtcattgaaggggcttacgaggtggtgggcgtgtttgaccggattgaggaaaagcgtga

SEQ ID NO: 631 - DNA, 75 bp, synthetic construct
  source 1..75: mol_type = other DNA
ccattaccccggaacaaattgaaatccgtgagctcaggaaaaagctacaacgcattgaaatggagaatgaaatat

SEQ ID NO: 632 - DNA, 75 bp, synthetic construct
  source 1..75: mol_type = other DNA
cccgaccgaatccgtgaccattgaccttgcttatgaaggttccggtagtggcgactggcgaacggatgcatttat

SEQ ID NO: 633 - DNA, 75 bp, synthetic construct
  source 1..75: mol_type = other DNA
tagcattgttcagggttcagccggggtgcgcattggtgcccccaccggcgtggcctgttcggtgtgccccggcgg

SEQ ID NO: 634 - DNA, 75 bp, synthetic construct
  source 1..75: mol_type = other DNA
agatgaagaatgagctgcgttatcttcgcgcagaaaatgcatatctgaaagccatgcaggagcatctcctggaaa

SEQ ID NO: 635 - DNA, 75 bp, synthetic construct
  source 1..75: mol_type = other DNA
agggcgacatgacccgcaagggactggatattgtgcagggttcagcaggggtgctgataggcgcgccgacggggg

SEQ ID NO: 636 - DNA, 75 bp, synthetic construct
  source 1..75: mol_type = other DNA
gaaggagcgcatcctgaaagcggtttcgatgaagatttccaaatggaacagcaggccaatgctgaattcatcgcc

SEQ ID NO: 637 - DNA, 75 bp, synthetic construct
  source 1..75: mol_type = other DNA
agaaatacgtcgttacaacagacggcagaacataatttgtcgtgagtgccgccagagcgaagttatgcagcgtgt

SEQ ID NO: 638 - DNA, 75 bp, synthetic construct
  source 1..75: mol_type = other DNA
gggcagcaacgccttgccgccgtgcaacgggccatgcagcagggggccgcgaatgatgactggtttatgccggag

SEQ ID NO: 639 - DNA, 75 bp, synthetic construct
  source 1..75: mol_type = other DNA
gttgctgcgtgtgctgcaaggaaatcccgctcgatgccgccttcacgccggaaggggccgagtacgtggagcatt

SEQ ID NO: 640 - DNA, 75 bp, synthetic construct
  source 1..75: mol_type = other DNA
ggaaatatgagccttatctgctcaatgataattccatactttcccgaattgctcttcttgaacttggtattttcg

SEQ ID NO: 641 - DNA, 75 bp, synthetic construct
  source 1..75: mol_type = other DNA
tccaacggggccgaagtacggcggtcagagaaaactggcagtggaaacccgcggtggcgtactgccgctatgccg

SEQ ID NO: 642 - DNA, 75 bp, synthetic construct
  source 1..75: mol_type = other DNA
cgcacggttctgcgtgccgtccgtgactcggtggtctctgttgcccgcgctgtatggaactggattttcttctga

SEQ ID NO: 643 - DNA, 75 bp, synthetic construct
  source 1..75: mol_type = other DNA
ttcgtgaaatcgctgaaaaaacaaaaattgctggtgaagcacctgtaatgcctttcgatcagcgaattaatgcgc

SEQ ID NO: 644 - DNA, 75 bp, synthetic construct
  source 1..75: mol_type = other DNA
cacatgtatgaccagacctttcagcgcgccttcaaacgtgccgtagaacaagcaggcatcacgaagcccgccaca

SEQ ID NO: 645 - DNA, 75 bp, synthetic construct
  source 1..75: mol_type = other DNA
aaattctgcgtaattacagggccgtgattaatgcgcggcgtcgtgaaatggggcagaaaccgctcaccaccgcgc

SEQ ID NO: 646 - DNA, 75 bp, synthetic construct
  source 1..75: mol_type = other DNA
ctttcgtaatggcagcaggacactgaatggcggggatttccggaccacggccagtatgagcatgatttataactg

SEQ ID NO: 647 - DNA, 75 bp, synthetic construct
  source 1..75: mol_type = other DNA
cgctgaaaatgtccgccttaaacgacaactggcggagcaggctgaggaactggccatcctccaaaaggccgcgac

SEQ ID NO: 648 - DNA, 75 bp, synthetic construct
  source 1..75: mol_type = other DNA
ttcgccgtgcagctctgcctgctgcgctaccccggttacgcgctgggaaccgacagcgagctgcccgagccggtc

SEQ ID NO: 649 - DNA, 75 bp, synthetic construct
  source 1..75: mol_type = other DNA
tatactctcagagcatttcgagaatgttaaaaccaaggttcaaggtactgtagtaatgttttccgcttcagggaa

SEQ ID NO: 650 - DNA, 75 bp, synthetic construct
  source 1..75: mol_type = other DNA
gtggtggtgaactcagttctctgggatgtgatgtgtcagagcaactggagcttatcagcagcgcctttaaggtta

SEQ ID NO: 651 - DNA, 75 bp, synthetic construct
  source 1..75: mol_type = other DNA
atggcaaaagatctgaaaacactggcgctggccagactgtcggggttccgtcataaaacggtgaaggtgccggaa

SEQ ID NO: 652 - DNA, 75 bp, synthetic construct
  source 1..75: mol_type = other DNA
atgcagcagctttcctttctgcccggagaaatgacaaccagagagcgcagcctcattctgcgggccctgaaaacc

SEQ ID NO: 653 - DNA, 75 bp, synthetic construct
  source 1..75: mol_type = other DNA
ttcgacacgccgtggtgtcagccggaaagcgacgttgttgcagaattaagccgccgtttcggctgcacgctggag

SEQ ID NO: 654 - DNA, 75 bp, synthetic construct
  source 1..75: mol_type = other DNA
gcttctggcccatgttgtcaccgggaaatatgcagaccatctgccgttataccgccagtcagaaatataccgtcg

SEQ ID NO: 655 - DNA, 75 bp, synthetic construct
  source 1..75: mol_type = other DNA
tgcggaaaagctgacacacaaactgaaagagggctggcagccgtttggtagtccggtggccataaccccttatac

SEQ ID NO: 656 - DNA, 75 bp, synthetic construct
  source 1..75: mol_type = other DNA
tgcgtctcccggatgtaccggcagcaacggacgcagctgtgatatcccgcttcatcaatgccctgaaagcccgaa

SEQ ID NO: 657 - DNA, 75 bp, synthetic construct
  source 1..75: mol_type = other DNA
tgcatcagggaataaccagtctcaactggttgccactcccgtccctgatgaacagcgcatcagcttctggccgca

SEQ ID NO: 658 - DNA, 75 bp, synthetic construct
  source 1..75: mol_type = other DNA
tggctaacgaactggccaaaaacctcaaaacccctgaagacctcagtcagtttgatcggctgctgaaaaagctca

SEQ ID NO: 659 - DNA, 75 bp, synthetic construct
  source 1..75: mol_type = other DNA
ctctcacgtccggtgtggatagcgcaggcgtatcagcagcagatagcggagagtcgcaggccggaagaggagaca

SEQ ID NO: 660 - DNA, 75 bp, synthetic construct
  source 1..75: mol_type = other DNA
aacgccttcttcctgactataaacggatggaagaaaaaatagacgccgtaatccgtgagaaatacgggttacccc

SEQ ID NO: 661 - DNA, 75 bp, synthetic construct
  source 1..75: mol_type = other DNA
accgtggcatttgaagagaagtatggctcccagctggagctgatatttcgttttatcgatcgtgcgctggcaatt

SEQ ID NO: 662 - DNA, 75 bp, synthetic construct
  source 1..75: mol_type = other DNA
acatcaacctgaccggtgattacctatggcgcagcagcgccaagatcggcgcggggaagttcaggccgctacggc

SEQ ID NO: 663 - DNA, 75 bp, synthetic construct
  source 1..75: mol_type = other DNA
aggctggcgagcaaaagaccaagcttgctcgtgaattcggaatcagtcgcgaaaccctgtatcaatacttgagaa

SEQ ID NO: 664 - DNA, 75 bp, synthetic construct
  source 1..75: mol_type = other DNA
agatttaccgttctgccggttttcccgatgtggccgtggtcggcattctggaagacggtattccgtgggaaatgc

SEQ ID NO: 665 - DNA, 75 bp, synthetic construct
  source 1..75: mol_type = other DNA
agggctggcggacaaaaactgtacctgtccccgatacttgatttgtttaacggggaaatcgtggcgtgggaaact

SEQ ID NO: 666 - DNA, 75 bp, synthetic construct
  source 1..75: mol_type = other DNA
ttaaagggataaataattacccggataagattactgttactgtggcactggaaattggtgggtatccgtcactgt

SEQ ID NO: 667 - DNA, 75 bp, synthetic construct
  source 1..75: mol_type = other DNA
ctgctgtagctgcatcagtactgatggcgatgtctgctcaggcagctgaaatttataataaagacagtaacaagc

SEQ ID NO: 668 - DNA, 75 bp, synthetic construct
  source 1..75: mol_type = other DNA
ggaagtgacgaaggcaaagccggtgacgcgcaccattacgtccgcgaacattgaccgcctgcgggtcaccttcgg

SEQ ID NO: 669 - DNA, 75 bp, synthetic construct
  source 1..75: mol_type = other DNA
gaagccagtctgttcttccggctactgaaccgtcgatatgaaaaagcgagcatcatactgacgtcaaacaaaggg

SEQ ID NO: 670 - DNA, 75 bp, synthetic construct
  source 1..75: mol_type = other DNA
aggcggcgctgacttaccgttatggtgatgaacatcagcccgtcaccactaccgacattctgacgccacgacgcc

SEQ ID NO: 671 - DNA, 75 bp, synthetic construct
  source 1..75: mol_type = other DNA
ggttgttgaccagaaatacacggtggcagatgccgccaaagctatggatgttggcctttccacaatgacaagatg

SEQ ID NO: 672 - DNA, 75 bp, synthetic construct
  source 1..75: mol_type = other DNA
cagcgccttccgggttatccggacagtccgtgaaaagcatgcctgccgtcggtgcgatcgcatcgttcaggcccc

SEQ ID NO: 673 - DNA, 75 bp, synthetic construct
  source 1..75: mol_type = other DNA
tggagccagaagaaagctgttgcccggagtgtggcggtgagctggattatctgggggaagtcagcgctgaacagc

SEQ ID NO: 674 - DNA, 75 bp, synthetic construct
  source 1..75: mol_type = other DNA
caccaaacgccttgaggaaggtcagtttatctggcctgcggtgcgtgacggtaagatatccattacccgctcgca

SEQ ID NO: 675 - DNA, 75 bp, synthetic construct
  source 1..75: mol_type = other DNA
ctcaggcgccttgcccgacaggagaatgactttattgatgtacacgctcacttggcatacgtatttctggagcag

SEQ ID NO: 676 - DNA, 75 bp, synthetic construct
  source 1..75: mol_type = other DNA
gagagatgacgcccggcgagcgcagtctcattctgcgggccctgaaaactctggaccgccatcttcatgaacccg

SEQ ID NO: 677 - DNA, 75 bp, synthetic construct
  source 1..75: mol_type = other DNA
atgctcatagatttggttttaccttacccgccgacggtgaacacttactggcgacgccgtggcagcacatatttt

SEQ ID NO: 678 - DNA, 75 bp, synthetic construct
  source 1..75: mol_type = other DNA
agaagtaaaaacgatgtgcctgatggcgatagcgaagacgactatgaggagaaattgcttattgccagatgggaa

SEQ ID NO: 679 - DNA, 75 bp, synthetic construct
  source 1..75: mol_type = other DNA
tggaagtggacggcctgccaccggatgcttttgcggtggtctcctttcatctgaaccagtcactctcttcgcttt

SEQ ID NO: 680 - DNA, 75 bp, synthetic construct
  source 1..75: mol_type = other DNA
atgaaaacattacccgatacacacgtacgggaggcatcgagctgcccgtctcccgtcaccatctggcagactctg

SEQ ID NO: 681 - DNA, 75 bp, synthetic construct
  source 1..75: mol_type = other DNA
tcaaccgaaaactgaaaggctgggccatgttctatcagttcgttgattttaaggccaaagtcttcagttatatcg

SEQ ID NO: 682 - DNA, 75 bp, synthetic construct
  source 1..75: mol_type = other DNA
ttcgccatgtgcttggcgtcatagcagactggccggtcaaccgggtcagcgaactgcttccgtggcgcatagcac

SEQ ID NO: 683 - DNA, 75 bp, synthetic construct
  source 1..75: mol_type = other DNA
agcagcgtggcgcgtaccggggccgcaagaaagccctgtccgatgagcaggctgctaccctgcggcagcgagcga

SEQ ID NO: 684 - DNA, 75 bp, synthetic construct
  source 1..75: mol_type = other DNA
tctgttacgcgcaccgccgataaagattcagctaaaacttttgttcaggaaactctgaaagatacctgggagtct

SEQ ID NO: 685 - DNA, 75 bp, synthetic construct
  source 1..75: mol_type = other DNA
tcagagtgaaggactgcgtaacaagactgataccgtggatgcgcgcatgctggcagagttctgtcgtcagaagcg

SEQ ID NO: 686 - DNA, 75 bp, synthetic construct
  source 1..75: mol_type = other DNA
tggatatccgggtaccggaccatctgatagttggtggcagtcaggttttctcttttgcggaacacggtctgcttt

SEQ ID NO: 687 - DNA, 75 bp, synthetic construct
  source 1..75: mol_type = other DNA
tgtcgcagtggcgatcgctggtttcaaccagatgaatcgtggtggccctgcaggaaatattgtggctgtgcattg

SEQ ID NO: 688 - DNA, 75 bp, synthetic construct
  source 1..75: mol_type = other DNA
agtcctcgacggatgtttactaccgtatccaaagcggcattgatggcgatcgggcagggcgtcaggagggcggca

SEQ ID NO: 689 - DNA, 75 bp, synthetic construct
  source 1..75: mol_type = other DNA
gccggaagcggatgaggtgctgcctgcgccgctgccgccgtaccgggtactgaccgggctggtggaccgcttcgg

SEQ ID NO: 690 - DNA, 75 bp, synthetic construct
  source 1..75: mol_type = other DNA
tgacctgtgccgcctggtcatcacgggttcgcatgctgcgggttgaattcagtgccgagtttaagcaggtggtga

SEQ ID NO: 691 - DNA, 75 bp, synthetic construct
  source 1..75: mol_type = other DNA
atgaaaaccgtttctcagaatacccccacaatttattcagctacaacaccagagaataatccgcctcagttggtt

SEQ ID NO: 692 - DNA, 75 bp, synthetic construct
  source 1..75: mol_type = other DNA
tgcgtgaggcggcggaacgtgcaattccagcaatggaacgcctgttaatgttgccagctgatgatgatttgttaa

SEQ ID NO: 693 - DNA, 75 bp, synthetic construct
  source 1..75: mol_type = other DNA
ccgtccgctgacacatgaagaactgatacgccatgtacccagtatttttggggaagaccggcacacctcccgcag

SEQ ID NO: 694 - DNA, 75 bp, synthetic construct
  source 1..75: mol_type = other DNA
gccacagggcggtgttatatcgccgctattatcgaacatcatgctgaatgagttcgatcaatacctgcatgagcg

SEQ ID NO: 695 - DNA, 75 bp, synthetic construct
  source 1..75: mol_type = other DNA
tgttgcgtcagcggttgttttgtatgaccagatgaatcgcggcggcccggcagggaatgctgtggtgatgcacta

SEQ ID NO: 696 - DNA, 75 bp, synthetic construct
  source 1..75: mol_type = other DNA
cccggcactggcaggactgattaccacgatggttacgcagggctatgagtatcgtcgtgatgacgatatggcgtt

SEQ ID NO: 697 - DNA, 75 bp, synthetic construct
  source 1..75: mol_type = other DNA
accggcctgatggcccgcgacaattacagaacggtaaataacattaccctgggtaaacatccgggggcgaaacaa

SEQ ID NO: 698 - DNA, 75 bp, synthetic construct
  source 1..75: mol_type = other DNA
atgccaaactggtgctcgaatcgtatgtatttttctggtgaaccggcacagattgctgagattaaacgactggcc

SEQ ID NO: 699 - DNA, 75 bp, synthetic construct
  source 1..75: mol_type = other DNA
cgcagaaggataagttcggcgcgggtaagaacggttttacccgtggtaacccccagactggcacgcctgccaccg

SEQ ID NO: 700 - DNA, 75 bp, synthetic construct
  source 1..75: mol_type = other DNA
agcgttggggagcgtgggcggctaataatcatgaagatgtgacctggtcgtccattgccgccggttttaagggat

SEQ ID NO: 701 - DNA, 75 bp, synthetic construct
  source 1..75: mol_type = other DNA
gatatccgcttacagctgcgcgataacacactgatactcagtgataacggcggcagaagcctgtattttgagcac

SEQ ID NO: 702 - DNA, 75 bp, synthetic construct
  source 1..75: mol_type = other DNA
atgcgaaccagatacgtcgtgatcgtccgctgacacacgaagaactgatgcgccatgtaccgagtatttttgggg

SEQ ID NO: 703 - DNA, 75 bp, synthetic construct
  source 1..75: mol_type = other DNA
gtctggagaaaaaaggactgtaccggagagcagctgaacgatgggcaaaagtgatggtacagctaagtgatgacc

SEQ ID NO: 704 - DNA, 75 bp, synthetic construct
  source 1..75: mol_type = other DNA
aagcagacccgtctggtgcatgaggtgtggcgacacactgttaatcgcgtcatcctggacgcaacacatcagaac

SEQ ID NO: 705 - DNA, 75 bp, synthetic construct
  source 1..75: mol_type = other DNA
cgatgtgctgaccggaagtgatgacggtcgccacagcaacacgtctctggcgtggggggctggcgtgcagtttaa

SEQ ID NO: 706 - DNA, 75 bp, synthetic construct
  source 1..75: mol_type = other DNA
cgcgctggaactgcctgaccttgtggcgctggccggtaaggtggtcggttttttgtcgccgaactcggtgcagtg

SEQ ID NO: 707 - DNA, 75 bp, synthetic construct
  source 1..75: mol_type = other DNA
gccggaggcgtattttcgtattgcaccggaagactggctgcgggcagagatgcagggggagattgtggcactggt

SEQ ID NO: 708 - DNA, 75 bp, synthetic construct
  source 1..75: mol_type = other DNA
aagttggcgttcaggttgttgaacgctggatcatggcccgaatcaggcatgagatcttctacagccttgcatcgc

SEQ ID NO: 709 - DNA, 75 bp, synthetic construct
  source 1..75: mol_type = other DNA
atgcttattggctatgtacgcgtgtcaacaaatgaccagaacaccgatttgcaacgtaatgcactgaactgcgcg

SEQ ID NO: 710 - DNA, 75 bp, synthetic construct
  source 1..75: mol_type = other DNA
ggacagcaacgactggccgccgtgcaacgggccatgcagcagggggccgcgaatgataactggtttgaaccggag

SEQ ID NO: 711 - DNA, 75 bp, synthetic construct
  source 1..75: mol_type = other DNA
atgctggtggagtggggaccggttatcccggaagggaaggtcgagatcactatcagtaagtacgagaaaacggcg

SEQ ID NO: 712 - DNA, 75 bp, synthetic construct
  source 1..75: mol_type = other DNA
ttatccagccatcatgcggaatatctttttcagtcatatggagtaaaataaaattaataatctggtatcaatcgg

SEQ ID NO: 713 - DNA, 75 bp, synthetic construct
  source 1..75: mol_type = other DNA
tgcgtctgcggcgggccggagagataaacggagaacatgtccctgaaatcattctgctcaactcccatgacggta

SEQ ID NO: 714 - DNA, 75 bp, synthetic construct
  source 1..75: mol_type = other DNA
aggattcgggcttaactcaaaaagaaatgatagagcactggattttgaaagaaaaagctgcgatgactgatgcga

SEQ ID NO: 715 - DNA, 75 bp, synthetic construct
  source 1..75: mol_type = other DNA
ccgttccctgagtcactcccacgggatgagaagcggctgctgccgactgagccgtgttgcccggagtgcggtggt

SEQ ID NO: 716 - DNA, 75 bp, synthetic construct
  source 1..75: mol_type = other DNA
tgtgtgatgcggtgaactttctcgtggaaaaatacgcgctggtgctaccgaccagccgggattcagcgcctgtac

SEQ ID NO: 717 - DNA, 75 bp, synthetic construct
  source 1..75: mol_type = other DNA
aacgtgattccactggctccaggccatgcctacgggatgtttatggaacgctttaacgaattatcggagttacgc

SEQ ID NO: 718 - DNA, 75 bp, synthetic construct
  source 1..75: mol_type = other DNA
atgaataatctgatggtcattgatggtattgaagttcgtcgtgatgcttatgggcgttacagcctgaacgatctg

SEQ ID NO: 719 - DNA, 75 bp, synthetic construct
  source 1..75: mol_type = other DNA
gtacggccagcgggagcagacccggcgcgagcacctgagcgagctgcaaaccgtgttcggtttccggcccttcac

SEQ ID NO: 720 - DNA, 75 bp, synthetic construct
  source 1..75: mol_type = other DNA
tgtcggctgccgttctggcgctgattggtgctggcgcatctgctcctcagatacttgaccagtttctggacgaaa

SEQ ID NO: 721 - DNA, 75 bp, synthetic construct
  source 1..75: mol_type = other DNA
caggcggtccggatactgccgaagattattatgccacataccacccgttatgggggcaatatccggaagcattgc

SEQ ID NO: 722 - DNA, 75 bp, synthetic construct
  source 1..75: mol_type = other DNA
tccgctgacacacgaagaactgatgcactatgtgccggggattttcggggaagataaacacacgtcccgaagcca

SEQ ID NO: 723 - DNA, 75 bp, synthetic construct
  source 1..75: mol_type = other DNA
cgaatgacggtcacgttaaccggccagcacaacgacaccggccagccactttcgttaaccatccctgtgagttga

SEQ ID NO: 724 - DNA, 75 bp, synthetic construct
  source 1..75: mol_type = other DNA
gcagaattaaactgctctaccgtccacagggactggttattccgccagaacaggcaccgggtaaattagagttca

SEQ ID NO: 725 - DNA, 75 bp, synthetic construct
  source 1..75: mol_type = other DNA
gcggtgctttgcagccagctggtgccgcaggaatttgcttttgaagcgttaatgcatgatgcaacagaagcgtat

SEQ ID NO: 726 - DNA, 75 bp, synthetic construct
  source 1..75: mol_type = other DNA
caatgtattggggatcgaagcccccgaccgcgaacgccttgccttctatctgcgattggaccctctgacttgggg

SEQ ID NO: 727 - DNA, 75 bp, synthetic construct
  source 1..75: mol_type = other DNA
tcgtaccggatgccttacccgtggtgcgtaaagccagctggcactgcagacaatgtcaccacgattattatgggg

SEQ ID NO: 728 - DNA, 75 bp, synthetic construct
  source 1..75: mol_type = other DNA
gttcgtggagcgcagcgaaaacgtgatcctgctgggccctcctggtgtcggaaaaactcatctggccatagctct

SEQ ID NO: 729 - DNA, 75 bp, synthetic construct
  source 1..75: mol_type = other DNA
taataatatggctttattttctgtcaggagggtatattcaatggtttgtattaagtaagcgcattataaacaaat

SEQ ID NO: 730 - DNA, 75 bp, synthetic construct
  source 1..75: mol_type = other DNA
gagtatggcagtgagttcgggggctttttccccgtccaggttcgtttcacgccagcccacgaacgtttccacctg

SEQ ID NO: 731 - DNA, 75 bp, synthetic construct
  source 1..75: mol_type = other DNA
tcagggtcagcaccttcgaccagaacccggaacggcaactggaaggcgtcaaggttgatcgcgcttttagcgaca

SEQ ID NO: 732 - DNA, 75 bp, synthetic construct
  source 1..75: mol_type = other DNA
ggatggcgatgaaatggcgttggcgcaagcgtatggaagctgcaggcaaaccaacggataaaccaaacctggtgt

SEQ ID NO: 733 - DNA, 75 bp, synthetic construct
  source 1..75: mol_type = other DNA
atgccactgctggataagctgcgtgagcagtacggggtcggaccggtatgcagtgaactgcatattgccccgtca

SEQ ID NO: 734 - DNA, 75 bp, synthetic construct
  source 1..75: mol_type = other DNA
acgtattaccattgtcagcagcagcggcatcatcctgataaacgcagtgcccgtgcgcagcgcgatgactggctg

SEQ ID NO: 735 - DNA, 75 bp, synthetic construct
  source 1..75: mol_type = other DNA
tatgtgcttcatatactgaactctcgtccacatccggaacaaagctatcgcttctgccttggactcctgaacctt

SEQ ID NO: 736 - DNA, 75 bp, synthetic construct
  source 1..75: mol_type = other DNA
cagaagttgggttattcacgtgcagaactcttcatccagcttgataaacccgcactgaagcctcttcctgaagcc

SEQ ID NO: 737 - DNA, 75 bp, synthetic construct
  source 1..75: mol_type = other DNA
tcttgcccaatatactcaacatgaactagatctggttgctgctcagctaaacaacagaccgagaaagacactgaa

SEQ ID NO: 738 - DNA, 75 bp, synthetic construct
  source 1..75: mol_type = other DNA
gtgacgcgcactatctttaccggtatgaccgtcacggcaggctgacagagaaaaccgacctcatcccggaagggg

SEQ ID NO: 739 - DNA, 75 bp, synthetic construct
  source 1..75: mol_type = other DNA
gatgcgcgatgcgcagttgtggcgtcacatcgaatttcaccccgaatgcaacgcgatttacgcggcactggactg

SEQ ID NO: 740 - DNA, 75 bp, synthetic construct
  source 1..75: mol_type = other DNA
gggcctggtgttcactggcgaggactcgccgatggccaacctgatgctgtcggtgatgggggccttcgctgagtt

SEQ ID NO: 741 - DNA, 75 bp, synthetic construct
  source 1..75: mol_type = other DNA
cgccacatccagggcatgtaagtatgatcctgacgttaaccctacctaccagcagatgcttgagcattataatgt

SEQ ID NO: 742 - DNA, 75 bp, synthetic construct
  source 1..75: mol_type = other DNA
gaaatgcagaaatatgaatggtgaatatgtctggccctggatattgccgttttcagcggcaggcatgaaacatac

SEQ ID NO: 743 - DNA, 75 bp, synthetic construct
  source 1..75: mol_type = other DNA
atgaaacaacagtatcagacccgctacgaatggctccacgaaagctaccagaaatggctgaccggcttcacccgg

SEQ ID NO: 744 - DNA, 75 bp, synthetic construct
  source 1..75: mol_type = other DNA
attctgctcaactcccatgacggttcatccagctaccagatgttacccggatattttcgtgccatttgtaccaat

SEQ ID NO: 745 - DNA, 75 bp, synthetic construct
  source 1..75: mol_type = other DNA
cgtggaaatcgacaaacattactactcggttccatgttcgctgttaggccagcaactggaagcatggatctccgg

SEQ ID NO: 746 - DNA, 75 bp, synthetic construct
  source 1..75: mol_type = other DNA
aaatggtggagcagtacgggcgcgttcgtcgtttcctgccccatctgctgaataccgttaaattttcatccgcac

SEQ ID NO: 747 - DNA, 75 bp, synthetic construct
  source 1..75: mol_type = other DNA
agtgacgtccggccatccggtcaatcccctgctcggtgcaaaggtccttcccggtgaaaccgacatcgccctgcc

SEQ ID NO: 748 - DNA, 75 bp, synthetic construct
  source 1..75: mol_type = other DNA
cgctggcggtgctggaattttgaacctgatgccggaaaacagctaaattcgtatctcgccagtgagggaattctc

SEQ ID NO: 749 - DNA, 75 bp, synthetic construct
  source 1..75: mol_type = other DNA
atcgggcagagttcagcatcaaagcgatgtgtcgtgtacttcgggttgcccgcagcggctggtatgtctggctca

SEQ ID NO: 750 - DNA, 75 bp, synthetic construct
  source 1..75: mol_type = other DNA
caacgtgatgtagcagaactcgacgccagatacacaaaggagcttgctgatgctaacgcgactatcgaaagtctc

SEQ ID NO: 751 - DNA, 75 bp, synthetic construct
  source 1..75: mol_type = other DNA
cccggattacttgcccgcgtgttaacgggaaaatactgcgaacatctgccactgtatcgtcagagtgaaatcttt

SEQ ID NO: 752 - DNA, 75 bp, synthetic construct
  source 1..75: mol_type = other DNA
ttgttctgattattgcagcgttacttatccggattatcctcagaagtgtaaatcagcattctcctttgctgatgc

SEQ ID NO: 753 - DNA, 75 bp, synthetic construct
  source 1..75: mol_type = other DNA
gtgaacacggcagcggaagccattcgcgccctgtcgatgcagatgccgggctttcgccgtcagatgaacgaaggc

SEQ ID NO: 754 - DNA, 75 bp, synthetic construct
  source 1..75: mol_type = other DNA
gggacatcagcaggtgctgtttgtggtgacgcaggccgacaaaacggagccctgccatgaatgggatatggccgg

SEQ ID NO: 755 - DNA, 75 bp, synthetic construct
  source 1..75: mol_type = other DNA
agcagcagaccaccggttagcggaattaatcaccggaaagttatatgacaggataccaaaagagatatggaaata

SEQ ID NO: 756 - DNA, 75 bp, synthetic construct
  source 1..75: mol_type = other DNA
tcgttatggcgagatgcgagtggtctcaacgatcccgcaggagaaagccagaaacttcgccgcatcgctgacagc

SEQ ID NO: 757 - DNA, 75 bp, synthetic construct
  source 1..75: mol_type = other DNA
ttgctgggttgggcgtttattgcaaaaggctgaaggtgtagttgatggcatgttaatgatgttagaaattgagct

SEQ ID NO: 758 - DNA, 75 bp, synthetic construct
  source 1..75: mol_type = other DNA
taccaggaaacgctggcgctgtaccagggcaaacttgatgggtacaccgaacatgcctgccgggaaatcactctg

SEQ ID NO: 759 - DNA, 75 bp, synthetic construct
  source 1..75: mol_type = other DNA
gcgttaaaagcgcaattgcaggtgatgtgtgaagctgagggcgttacccaggctgagatgattgccgaactgata

SEQ ID NO: 760 - DNA, 75 bp, synthetic construct
  source 1..75: mol_type = other DNA
gtgctgatgccgcaggcatcatcctgacctcccttgtgattaaccgccagttgtggctgtaccacgacagcgggg

SEQ ID NO: 761 - DNA, 75 bp, synthetic construct
  source 1..75: mol_type = other DNA
gaaaaaggtttaattcccaaacctaaaggcgttagtgctgatccagagttgcgtattaaggtcgtgaaagctgtg

SEQ ID NO: 762 - DNA, 75 bp, synthetic construct
  source 1..75: mol_type = other DNA
gatctcactgccatgtcggttgaggttgtcacttttttgttgaagaagtcggtgcttgccggtttaccgacagcc

SEQ ID NO: 763 - DNA, 75 bp, synthetic construct
  source 1..75: mol_type = other DNA
gaataaggatgaggtgtttgagcgaggggtgatcaacgtcttcagagggctgaactggaattacaaaaccaattg

SEQ ID NO: 764 - DNA, 75 bp, synthetic construct
  source 1..75: mol_type = other DNA
aagagcagaagattagccagtctaccctggacgcccttgaatccgagctttaccgcaatctgcgccccctgtatc

SEQ ID NO: 765 - DNA, 75 bp, synthetic construct
  source 1..75: mol_type = other DNA
tgcatcagggaatgaccagcctcagctggttgccaccatagtccctgatgaacagcgcatcagcttctggccgca

SEQ ID NO: 766 - DNA, 75 bp, synthetic construct
  source 1..75: mol_type = other DNA
acgctcagggcgtggcagtccggttcattgatgacgggatcagtaccgacggtgatatggggcaaatggtggtca

SEQ ID NO: 767 - DNA, 75 bp, synthetic construct
  source 1..75: mol_type = other DNA
cgcacctacagcagctaccggacgaagacgcctgcaccggtgggcgttttcggccccggctggaaagcgccttct

SEQ ID NO: 768 - DNA, 75 bp, synthetic construct
  source 1..75: mol_type = other DNA
ttgccgctgtaaatcattacctggctggtcatgcaggcatcatttctacggcaaaactctttcaactttctcaca

SEQ ID NO: 769 - DNA, 75 bp, synthetic construct
  source 1..75: mol_type = other DNA
aagattgaccatgcgcatatctgcatcgaagcgaccggcacctatatggaacctgtcgctgagtgcctttacgat

SEQ ID NO: 770 - DNA, 75 bp, synthetic construct
  source 1..75: mol_type = other DNA
tgtcggctgccgttctggcgctgattggtgcaggggcgtctgcgcctgaaatcctcgaccagtttctggatgaaa

SEQ ID NO: 771 - DNA, 75 bp, synthetic construct
  source 1..75: mol_type = other DNA
atgagcagcaagcttcatggtcttgtctgggaagggtgcgccttcaccggcatgatcttatccagggtggcggtt

SEQ ID NO: 772 - DNA, 75 bp, synthetic construct
  source 1..75: mol_type = other DNA
atatgcaatgtggatcagcccggcattcagcttaaaagtgatacgtacttttgatgcgcttcataattcatcacc

SEQ ID NO: 773 - DNA, 75 bp, synthetic construct
  source 1..75: mol_type = other DNA
gacgccatgctggccgttatcatccgtgacgccagaaagattgggcagaaaaaacggctccgctcgctgaaggat

SEQ ID NO: 774 - DNA, 75 bp, synthetic construct
  source 1..75: mol_type = other DNA
acgtattaccactgtcagcaacagcgacatcatcctgataaacgcagtgcccgtgctcagcgcgatgactggctg

SEQ ID NO: 775 - DNA, 75 bp, synthetic construct
  source 1..75: mol_type = other DNA
caacgtgcctgagctgctcccgataactcttgatgccgaagatgttgtccctacaacctccccccggtcacaacc

SEQ ID NO: 776 - DNA, 75 bp, synthetic construct
  source 1..75: mol_type = other DNA
tacccggaactggcaaaggcttatccgacaaataaattgcctgatttacgtggtgagtttattcgtggctgggat

SEQ ID NO: 777 - DNA, 75 bp, synthetic construct
  source 1..75: mol_type = other DNA
tgaggggaatcaggggcggattagccagatagccgtattccagcggcgtggagatacgctgctgaccttcacttt

SEQ ID NO: 778 - DNA, 75 bp, synthetic construct
  source 1..75: mol_type = other DNA
aagtggcatctgcagatggaatgcgctttgttacgccagtcagaacaatcaatgccggaccgaaccgcaaatact

SEQ ID NO: 779 - DNA, 75 bp, synthetic construct
  source 1..75: mol_type = other DNA
ccatgcgtattcaccaacagcatcctgcatcccgtctttttccgttctgtaccggtaagtatcgctggcacggca

SEQ ID NO: 780 - DNA, 75 bp, synthetic construct
  source 1..75: mol_type = other DNA
tggcaggggcgtaagtatgaggcatacccgattgacggcagcggctttgagatgaacggccggggcagcagtgcc

SEQ ID NO: 781 - DNA, 75 bp, synthetic construct
  source 1..75: mol_type = other DNA
atgagcggaaaaccggcggcgcgtcagggcgacatgacgcagtatggcggtagcattgttcagggttcagccggg

SEQ ID NO: 782 - DNA, 75 bp, synthetic construct
  source 1..75: mol_type = other DNA
tgacaagagtcgccgcaggggagcgattcatgtcattagtgcgttctcaacaatgcacagtctggtcatcggaca

SEQ ID NO: 783 - DNA, 75 bp, synthetic construct
  source 1..75: mol_type = other DNA
agtacaggatattcccggtgtgctggctgtgtttgcagaacgccgtaaggacagttttggtccgtatgtccggct

SEQ ID NO: 784 - DNA, 75 bp, synthetic construct
  source 1..75: mol_type = other DNA
caagctgggccgcagctcccgctggctgaaaagtgaagtggaagcctggctacaggcgcgtattgcacagccccg

SEQ ID NO: 785 - DNA, 75 bp, synthetic construct
  source 1..75: mol_type = other DNA
cgttatctgctcaaccagtatccgccacattctggctgtacgaaagagtacactgctgcaaatcgacacacttat

SEQ ID NO: 786 - DNA, 75 bp, synthetic construct
  source 1..75: mol_type = other DNA
tgctgctcgcgcattcgaccagatcgataacgcgccggaagaaaaagctcgtggtatcaccatcaacacttctca

SEQ ID NO: 787 - DNA, 75 bp, synthetic construct
  source 1..75: mol_type = other DNA
tggcggatgaggaaggtattactcaggcgcagatgcttgaaaaactgattgaatcagagctgaaacgcagagcga

SEQ ID NO: 788 - DNA, 75 bp, synthetic construct
  source 1..75: mol_type = other DNA
cgtacggttctgcgtgccgtccgtgacacggtggtctctgttgcccgcgctgtatggaactggattttcttctga

SEQ ID NO: 789 - DNA, 75 bp, synthetic construct
  source 1..75: mol_type = other DNA
ggtgtacacatccccgccatgaaaaacacggccttcgggcaggtgctccgcacactcgaactgaaacgcgctttt

SEQ ID NO: 790 - DNA, 75 bp, synthetic construct
  source 1..75: mol_type = other DNA
tgtgtgcagaggaaggggtaactcaggcagagttgatagaaaggcttatcgagaaagaggcctgtcaccggaaca

SEQ ID NO: 791 - DNA, 75 bp, synthetic construct
  source 1..75: mol_type = other DNA
accggactgcaactggacgaagaaagaaaacaagtgatgaaaattatgcagaaggtgtgggaagacgacagctgg

SEQ ID NO: 792 - DNA, 75 bp, synthetic construct
  source 1..75: mol_type = other DNA
gacccgacaccggctgaactggacaaaagcgaactatctgcgggctgaaactatcaccagcgctaatgccagact

SEQ ID NO: 793 - DNA, 75 bp, synthetic construct
  source 1..75: mol_type = other DNA
ccttctggcatgatttagcggctccggtcattgctggcattcttgccagtatgatcgtgaactggctgaacaagc

SEQ ID NO: 794 - DNA, 75 bp, synthetic construct
  source 1..75: mol_type = other DNA
gaagctcgccttgagcgagatatattaaaaaaagcaactgtagattttgcacaggagtcgctgaaaaatacgcgt

SEQ ID NO: 795 - DNA, 75 bp, synthetic construct
  source 1..75: mol_type = other DNA
acagtgactgacttaaaggccggaaataaaagtcttgaaaacaccatggtacccccacagggaaaggtcactgtg

SEQ ID NO: 796 - DNA, 75 bp, synthetic construct
  source 1..75: mol_type = other DNA
atgtcattctggttaagaagctcgaccgtcttggccgcgacactgccgatatgatccaactgataaaggaatttg

SEQ ID NO: 797 - DNA, 75 bp, synthetic construct
  source 1..75: mol_type = other DNA
gctgtttggcctgctgacgtatctgacaaatctttatttcaagattaaagaagataagcgtaaggctgcgagagg

SEQ ID NO: 798 - DNA, 75 bp, synthetic construct
  source 1..75: mol_type = other DNA
ttcgcggtgcagctctgttacctgcgctttcccggcgtcatcctgggcgtcgatgaactaccgttcccgcccttg

SEQ ID NO: 799 - DNA, 75 bp, synthetic construct
  source 1..75: mol_type = other DNA
cctgccgttcgccagccgctggcggaggataaatcattactgccatttttcagcgacgaacgagtgattcgtgct

SEQ ID NO: 800 - DNA, 75 bp, synthetic construct
  source 1..75: mol_type = other DNA
tgaccgtttttcttataacgggtgagccacaaaatgtgattaccggaatttatgacagtaagtcatcctgcattc

SEQ ID NO: 801 - DNA, 75 bp, synthetic construct
  source 1..75: mol_type = other DNA
cggccggaagtgccggtaactattataccgacaaggataattactatgtgctgggcagcatgggagaacgctggg

SEQ ID NO: 802 - DNA, 75 bp, synthetic construct
  source 1..75: mol_type = other DNA
ccgttccctgaatcactaccccgtgacgaaaagcgactgttgcctgcggcgccgtgctgcccgaactgcggcggt

SEQ ID NO: 803 - DNA, 75 bp, synthetic construct
  source 1..75: mol_type = other DNA
caatcgtcttatccctgaaggtttcagtggcagaatcatctggatacatcctgacaaccgaccttttcttcgtgc

SEQ ID NO: 804 - DNA, 75 bp, synthetic construct
  source 1..75: mol_type = other DNA
taaaaaacattgtgtctgtcaaattttcaaaggataggcatcttatagaaacgacctctaataagctgaaatcca

SEQ ID NO: 805 - DNA, 75 bp, synthetic construct
  source 1..75: mol_type = other DNA
atggagactgtttttgacgcactgaaagcgatgggaaaagccacgtcggtagagctggctgcgcgacttgatatc

SEQ ID NO: 806 - DNA, 75 bp, synthetic construct
  source 1..75: mol_type = other DNA
cggcaggcagtgccggaaactattacaccgacaaggataattactatgtgctgggcagcatgggagaacgctggg

SEQ ID NO: 807 - DNA, 75 bp, synthetic construct
  source 1..75: mol_type = other DNA
accggcctgatgacccggaacaattacagaatggtaaataacattacccagggcaagcatccggaggcaaaacga

SEQ ID NO: 808 - DNA, 75 bp, synthetic construct
  source 1..75: mol_type = other DNA
gcaagcgtacttatggctacagtacccgcaacgagcacatgcctgaagctcatcgacagcatgccacctggacgc

SEQ ID NO: 809 - DNA, 75 bp, synthetic construct
  source 1..75: mol_type = other DNA
agagaataatccgcctcagttggttgccagcctcgtccctgatgaacagcgcatcagcttctggccgcagcattt

SEQ ID NO: 810 - DNA, 75 bp, synthetic construct
  source 1..75: mol_type = other DNA
ctattcctgacgaactggcaacaagggaagaaggcgctgtggctgtagccacagccattgaagctggcgacgaac

SEQ ID NO: 811 - DNA, 75 bp, synthetic construct
  source 1..75: mol_type = other DNA
cgggaaggaatcagggtggccagatgtacagtggcgcgcctcatggcggttatgggacttgccggtgttctccgg

SEQ ID NO: 812 - DNA, 75 bp, synthetic construct
  source 1..75: mol_type = other DNA
ggaacgctgaagttctgcgaaaaactgatggaaaaggcggtgggcttcacctcccgttttgatttcgccattcat

SEQ ID NO: 813 - DNA, 75 bp, synthetic construct
  source 1..75: mol_type = other DNA
aagcttaatcctcacgagcatcctgttctgcactctgaccagggatggcagtatcgtatgagaagatatcaaaat

SEQ ID NO: 814 - DNA, 75 bp, synthetic construct
  source 1..75: mol_type = other DNA
acacccacatctccgaccaatacgcgccattccacaccaaggtggtcaatgtcggcctgcgcgactcaacctacg

SEQ ID NO: 815 - DNA, 75 bp, synthetic construct
  source 1..75: mol_type = other DNA
cacagtgtgatccgaatgctgaaatatcagctgaagaacgagaatggctggatgcaccggcgactggtcaggagg

SEQ ID NO: 816 - DNA, 75 bp, synthetic construct
  source 1..75: mol_type = other DNA
ggtaaaaaggtccgtactaccgtcagccggaaagccgtttccgcaggcgaccgcgtaaaccgtcagttcgtggca

SEQ ID NO: 817 - DNA, 75 bp, synthetic construct
  source 1..75: mol_type = other DNA
acaggtatcgcttccctgatgaggtggtggtgtaaatcaccgaaaccgggtcagagcaaaacgtgggttttattt

SEQ ID NO: 818 - DNA, 75 bp, synthetic construct
  source 1..75: mol_type = other DNA
caaagctaaaagaatgtccgttttgcggcggtaatgctcgtctgtgggttgaggccggaataaatattgatgtgt

SEQ ID NO: 819 - DNA, 75 bp, synthetic construct
  source 1..75: mol_type = other DNA
gcgcactgcttgccggtgaggaaaacgccaggctgcgtgcagcccactggttacatgagaggggcctgaaagtat

SEQ ID NO: 820 - DNA, 75 bp, synthetic construct
  source 1..75: mol_type = other DNA
tcttaccgcgctttgcgcaaggagaagaaggccatgaaactaccacgaagttcccttgtctggtgtgtgttgatc

SEQ ID NO: 821 - DNA, 75 bp, synthetic construct
  source 1..75: mol_type = other DNA
atgcgtaaagtttgtgcagccattttgtccgcagccatctgtctggccgtatccggtgcgcctgcatgggcgtct

SEQ ID NO: 822 - DNA, 75 bp, synthetic construct
  source 1..75: mol_type = other DNA
ggtgaaatgcgcgtgggatcacgtgtggtatctcaggagatcagcacagcagatgaaggtgatggtggtcaggtt

SEQ ID NO: 823 - DNA, 75 bp, synthetic construct
  source 1..75: mol_type = other DNA
gcgcaggtgctggacaaaatggcctacctgacggtatggcagggcgatgacgtacagcgccgggtgaaaggtgtg

SEQ ID NO: 824 - DNA, 75 bp, synthetic construct
  source 1..75: mol_type = other DNA
ggtgctctatgaagtggaccttatcaacatggtggaaattgtggacggtgtggacctgatggaagcgcaccgcaa

SEQ ID NO: 825 - DNA, 75 bp, synthetic construct
  source 1..75: mol_type = other DNA
cagaaaagagtgacgcccgcgagtgtgcagctccgggcgtcgtggcgttttgtgtctgtggagaaactaacgcat

SEQ ID NO: 826 - DNA, 75 bp, synthetic construct
  source 1..75: mol_type = other DNA
gatgataaaagtagttaccttattcagtcatggattgaaaatgctgaaggaaaaaaggatgccaggtttgtaatt

SEQ ID NO: 827 - DNA, 75 bp, synthetic construct
  source 1..75: mol_type = other DNA
atggatttcgacacaatcatggaaaaggcttacgaagaatacttcgaaggccttgccgaaggcgaagaagctctc

SEQ ID NO: 828 - DNA, 75 bp, synthetic construct
  source 1..75: mol_type = other DNA
gacatcatcctgataaacgcagtgcccgtgcgcagcgcgatgactggctgaagaaagagatactgcgcgtatacg

SEQ ID NO: 829 - DNA, 75 bp, synthetic construct
  source 1..75: mol_type = other DNA
tccgcgaagtgctggatacagacgtgccggacagtgaatgcgtttttgccgtggtgctgacccgtggggatgtgc

SEQ ID NO: 830 - DNA, 75 bp, synthetic construct
  source 1..75: mol_type = other DNA
gtatgcaaaaggtctgacctgcaaagctgacactctcggtagcggtggttacgtttatctggctgtttatccgac

SEQ ID NO: 831 - DNA, 75 bp, synthetic construct
  source 1..75: mol_type = other DNA
ggcgtgcgctatggttttgatccggtcagcgatcgctttgtccagacgaccgacacgcaataccagtacagcgat

SEQ ID NO: 832 - DNA, 75 bp, synthetic construct
  source 1..75: mol_type = other DNA
aaggcagggttaagacgtaagatgcgaaaagcagccatggacagaaactatctggcgtcagtccttgcggggagc

SEQ ID NO: 833 - DNA, 75 bp, synthetic construct
  source 1..75: mol_type = other DNA
gctcaggactgcgcttataaatttattgtctgcgaggataaacctggcataccccgccctgccctcgattcatgg

SEQ ID NO: 834 - DNA, 75 bp, synthetic construct
  source 1..75: mol_type = other DNA
ggtgctgtgcacggatctgccctggcttcaggagatcggaagacctcggccgtcgcggcgcttgccggtggtgct

SEQ ID NO: 835 - DNA, 75 bp, synthetic construct
  source 1..75: mol_type = other DNA
cagccagtctggatttaacaagagcggcagcttttgccattcgtattgtggccattgctgttctggtctgggcaa

SEQ ID NO: 836 - DNA, 75 bp, synthetic construct
  source 1..75: mol_type = other DNA
tgttttccaacaggcatagtattctttattgctctaatatttatagggactgtatcagacattattggcgtaagg

SEQ ID NO: 837 - DNA, 75 bp, synthetic construct
  source 1..75: mol_type = other DNA
aaaccgttatcaccgatacgggtgcaaaaaaattagctcaggcagccgcgccagatggtaagcctgtccgcctga

SEQ ID NO: 838 - DNA, 75 bp, synthetic construct
  source 1..75: mol_type = other DNA
ccaactggcccacctacaataaagccctcatcaaccgtggctccataactttctggctggatgatgaagctattc

SEQ ID NO: 839 - DNA, 75 bp, synthetic construct
  source 1..75: mol_type = other DNA
gaaaatatgaaccttatcttctcaatgataattccatactttccagaattgcccttcttgaacttggtattatcg

SEQ ID NO: 840 - DNA, 75 bp, synthetic construct
  source 1..75: mol_type = other DNA
cctggatcggctgctacatcactcaaccacgctgaatatcaaaggagagagttaccggttaaaagagaaacgtaa

SEQ ID NO: 841 - DNA, 75 bp, synthetic construct
  source 1..75: mol_type = other DNA
tacaccgacacggcgggcttcaccgatcacgtcttcgccctgatgcacctcttgggcttccgcttcgcgccgcgc

SEQ ID NO: 842 - DNA, 75 bp, synthetic construct
  source 1..75: mol_type = other DNA
atgagcggaaaaccggcggcgcgtcagggcgacatgacgcagtatggcggtagcattgtccagggttcagccggg

SEQ ID NO: 843 - DNA, 75 bp, synthetic construct
  source 1..75: mol_type = other DNA
aaggatgtcgctgccgactgggcaatggagcgcctgccggcccagtatcagcccgtcatacttgaagctagacag

SEQ ID NO: 844 - DNA, 75 bp, synthetic construct
  source 1..75: mol_type = other DNA
tccttcacgctggcagaactggtgaccaaaggacatctgagaccattaaaagaggcgtcagaggcagaaaacgtt

SEQ ID NO: 845 - DNA, 75 bp, synthetic construct
  source 1..75: mol_type = other DNA
accgtcctggaaaatctgcagcgggaaggctttcagccgttcttcgcctgccagacccgtgtgcgcgaccagagc

SEQ ID NO: 846 - DNA, 75 bp, synthetic construct
  source 1..75: mol_type = other DNA
tctgcggcttaaacgcctggggctgtcaaaaacgttccgtcgtctggttatcacacttacccgacgttatggcgt

SEQ ID NO: 847 - DNA, 75 bp, synthetic construct
  source 1..75: mol_type = other DNA
aggtcccggcacgggtgagcgccgttcccggcgatcgcttcctgaaggtggaatttattccggcagaggagggca

SEQ ID NO: 848 - DNA, 75 bp, synthetic construct
  source 1..75: mol_type = other DNA
tggattggtgtgttgctgttcatgatatgaatgcagggtttgatgaaaagattttgttcccctcatcagttgaaa

SEQ ID NO: 849 - DNA, 75 bp, synthetic construct
  source 1..75: mol_type = other DNA
acgatggttacgcagggctatgagtatcgtcgtgatgacgatatggcgttatggagttctgcagatctgacttat

SEQ ID NO: 850 - DNA, 75 bp, synthetic construct
  source 1..75: mol_type = other DNA
ggccccctgaaggccgcgccgtcgctgtcctttctcgggctggttgtgatggatgaactctgtgcccgtcacata

SEQ ID NO: 851 - DNA, 75 bp, synthetic construct
  source 1..75: mol_type = other DNA
gaaaacctgaccctgcgccagcgtattaccgataaatacctggcaaatctggtcacctcggttaacagcaattaa

SEQ ID NO: 852 - DNA, 75 bp, synthetic construct
  source 1..75: mol_type = other DNA
agctttattgctgcagctctggcccagtttgtaagtgacaaaacgcaacgggatgtgcttgataatggtgatctg

SEQ ID NO: 853 - DNA, 75 bp, synthetic construct
  source 1..75: mol_type = other DNA
tcttcaggtcagagcactcaaagacgcaggtgtgaaagcaaaccgtatatttaccgataaggcatccggcagttc

SEQ ID NO: 854 - DNA, 75 bp, synthetic construct
  source 1..75: mol_type = other DNA
ctgtccgactgctgattcagttgcagcgtaacggtaactgggtgacggaaaaggatgtcaccattaacggcaaga

SEQ ID NO: 855 - DNA, 75 bp, synthetic construct
  source 1..75: mol_type = other DNA
cgtcaccgccactggcacgcatctgccttcacggggatttacaacgatttggccgccgcctcagcctgtatgtga

SEQ ID NO: 856 - DNA, 75 bp, synthetic construct
  source 1..75: mol_type = other DNA
taaaaatggtcgtcagattgtggctgctgaaggaacggcaaataccactgtggtttatgccggcggcgaccagac

SEQ ID NO: 857 - DNA, 75 bp, synthetic construct
  source 1..75: mol_type = other DNA
tatgactcacaatgggcgacaatttgttccattgccccaaagattggctgtacaccggagactctgcgtgtctgg

SEQ ID NO: 858 - DNA, 75 bp, synthetic construct
  source 1..75: mol_type = other DNA
atgaaactgactctgacgctggaagcagacagcgttaacgtgcaggcgctgaacatgggacgaattgtcgttgac

SEQ ID NO: 859 - DNA, 75 bp, synthetic construct
  source 1..75: mol_type = other DNA
gccgtgctgcccgaactgcggcggttcactgagctatctgggcgaggataccgccgaacagctggagttgatgcg

SEQ ID NO: 860 - DNA, 75 bp, synthetic construct
  source 1..75: mol_type = other DNA
gcggtggctcgtgagttgactggatttatgtgggatattgcacttgctgcccaatcatcattcagtcagcagaag

SEQ ID NO: 861 - DNA, 75 bp, synthetic construct
  source 1..75: mol_type = other DNA
tggtggtcttcagagagtgaatgccggaggaagcgtttcagacacggttatcagtgccggaggcggacagagcct

SEQ ID NO: 862 - DNA, 75 bp, synthetic construct
  source 1..75: mol_type = other DNA
cggttacttacccatcacccgagtcgttggctctggtggctgatgtgcaataccacgaaccatatctgtcagccg

SEQ ID NO: 863 - DNA, 75 bp, synthetic construct
  source 1..75: mol_type = other DNA
catagtatttgcgccaaaataccgaagacaggtgttctacagagagaagcgtagagcaataggctgtattttgag

SEQ ID NO: 864 - DNA, 75 bp, synthetic construct
  source 1..75: mol_type = other DNA
gagagatgacgcccggcgagcgcagcctcattcagcgggccctgaaaaccctggaccgccatcttcatgaacccg

SEQ ID NO: 865 - DNA, 75 bp, synthetic construct
  source 1..75: mol_type = other DNA
ggatatcaacgctggatcagaccaccgaaaatcaacgccgggaaatcgaaagtgcaggttttaaaatcaaacctc

SEQ ID NO: 866 - DNA, 75 bp, synthetic construct
  source 1..75: mol_type = other DNA
tctgtctggagcggatttgctcaaagcgtggccgtcaatggggcagcaacttggcgctgttcacagcctatcggt

SEQ ID NO: 867 - DNA, 75 bp, synthetic construct
  source 1..75: mol_type = other DNA
tcgccagtcttgatgagccggacagtctgaaacgactgagcaaaatgatcagtgatctactccctccggtggatt

SEQ ID NO: 868 - DNA, 75 bp, synthetic construct
  source 1..75: mol_type = other DNA
acctttcacgcgaacgctgccagttaatactgactcagcttgttatggcgggtctggcagattatcagttcggtt

SEQ ID NO: 869 - DNA, 75 bp, synthetic construct
  source 1..75: mol_type = other DNA
atgaatccgtctgatgccattgaggcaattgaaaaaccgctctcctccctgccttactcgctttcccgtcacatc

SEQ ID NO: 870 - DNA, 75 bp, synthetic construct
  source 1..75: mol_type = other DNA
ttatttgatcaccaaggtgcagagccagccttcttattcggccttgaattgatcatatgcggattagaaaaacaa

SEQ ID NO: 871 - DNA, 75 bp, synthetic construct
  source 1..75: mol_type = other DNA
attacagcgcactaagaccgcacgaatataatggtgggttaccaccaaacgaatcggaaaatcgatactggaaaa

SEQ ID NO: 872 - DNA, 75 bp, synthetic construct
  source 1..75: mol_type = other DNA
atgaaaccacagtatcagacccgttacgagctgctccacgaaagctaccagaaatggctgaccggcttcacccgg

SEQ ID NO: 873 - DNA, 75 bp, synthetic construct
  source 1..75: mol_type = other DNA
ttgccccgcgtatggggatcgtattgttcaggccaggttcagagctgatgcccctgtttatgcaggggcgtgtcc

SEQ ID NO: 874 - DNA, 75 bp, synthetic construct
  source 1..75: mol_type = other DNA
ttgtgcagcgaaatacgccgggcgtggaaccaaagtaggggctctgcgggggcgcgcacgctggctgaaatgctg

SEQ ID NO: 875 - DNA, 75 bp, synthetic construct
  source 1..75: mol_type = other DNA
gcagtggacatttcaggtcggggaccttgaaaacgtcaatatcactcactgggcagtaatgccaaaagcaccgga

SEQ ID NO: 876 - DNA, 75 bp, synthetic construct
  source 1..75: mol_type = other DNA
aatcaagacagcgtattgcactgatttttgatgtaggcgtttctaccatttatagaaaatttccggcaaataaga

SEQ ID NO: 877 - DNA, 75 bp, synthetic construct
  source 1..75: mol_type = other DNA
ctgaagcatgcagtcttgccctgtcagacaggcagatgactgtggatatggggcaactcagcagcaatcgatttc

SEQ ID NO: 878 - DNA, 75 bp, synthetic construct
  source 1..75: mol_type = other DNA
attaacgtgaaataccgttatgaattcacggacacgctggggctggtgacgtcattcagctatgcaggagacagg

SEQ ID NO: 879 - DNA, 75 bp, synthetic construct
  source 1..75: mol_type = other DNA
ccctgcagtccatgaacgcacaggaatatgaagatatccgtgctgcgggaagcgatatgcgccgtaatctcactc

SEQ ID NO: 880 - DNA, 75 bp, synthetic construct
  source 1..75: mol_type = other DNA
tccggctttcatggcatcgttataccggggacgctgagggactctatctttgtgctggaaggtcttctggaacag

SEQ ID NO: 881 - DNA, 75 bp, synthetic construct
  source 1..75: mol_type = other DNA
ggttctgtcgaccccttcggctattaccggaatacagaccgtatcgttaccatactgctggcactgattattgtg

SEQ ID NO: 882 - DNA, 75 bp, synthetic construct
  source 1..75: mol_type = other DNA
tgtgtgcagaggaaggggtaactcaggcagagttgatagaaaggcttatcgagaaagaggcctgtcacaggaaca

SEQ ID NO: 883 - DNA, 75 bp, synthetic construct
  source 1..75: mol_type = other DNA
gtgccggaagagcgaagctatgcagcgtgtactggcattttatcaaggaaatgttaggtattttagacgttacta

SEQ ID NO: 884 - DNA, 75 bp, synthetic construct
  source 1..75: mol_type = other DNA
atggagaaacccgaaacagcaatgaaagccattacccggaatcttgatcgcgaaatctggcgtgacctgatgcaa

SEQ ID NO: 885 - DNA, 75 bp, synthetic construct
  source 1..75: mol_type = other DNA
atatccttaacctgactgcaccatggcaggttaaatcccttaccctcgatgaaaatgcaggttccgttactgtta

SEQ ID NO: 886 - DNA, 75 bp, synthetic construct
  source 1..75: mol_type = other DNA
agggaggagtgtcggggtgtgctcgaaggcagtctgaaactcaggctgaacatggataagactaaaatcacccat

SEQ ID NO: 887 - DNA, 75 bp, synthetic construct
  source 1..75: mol_type = other DNA
atggggagacccgactggcgcgccatgcttgccgggatgacatccaccgaatatgccgactggcaccgtttttac

SEQ ID NO: 888 - DNA, 75 bp, synthetic construct
  source 1..75: mol_type = other DNA
atggctttaccacgcaaattaaaacacctgaacctgtttaacgacgggaacaactggcaggggatcgttgagtcg

SEQ ID NO: 889 - DNA, 75 bp, synthetic construct
  source 1..75: mol_type = other DNA
ccatacccgtgccattcacagcatcgacaccgacattaagctcaaccgcgcattgtgggtgatggctgaaacgct

SEQ ID NO: 890 - DNA, 75 bp, synthetic construct
  source 1..75: mol_type = other DNA
cagtgctggatgcactggagctgcatgaacacggggcgacgctgtttgatggtcgccccgttgtttttgacgaag

SEQ ID NO: 891 - DNA, 75 bp, synthetic construct
  source 1..75: mol_type = other DNA
tgcatcagggaatgaccagcctcagttggttgccaccatagtccctgatgaacagcgcatcagcttctggccgca

SEQ ID NO: 892 - DNA, 75 bp, synthetic construct
  source 1..75: mol_type = other DNA
tatgggcccgtcgaccgtccggcacggtccatcacagtgataaaggttctcagtatgtatcgctggcctacacac

SEQ ID NO: 893 - DNA, 75 bp, synthetic construct
  source 1..75: mol_type = other DNA
atgctaaaacagcaggatatgacagaaaccgccagagtggtgtttaatgaattaagcgttaccgaaccggcgaca

SEQ ID NO: 894 - DNA, 75 bp, synthetic construct
  source 1..75: mol_type = other DNA
tcatgaaagaactgggactggtcagttgccagcagcctgcgcaccgttataaacgaggtggtcgtgaacatgtca

SEQ ID NO: 895 - DNA, 75 bp, synthetic construct
  source 1..75: mol_type = other DNA
gaaggagcgcatccagaaagcggtttcgatgaagatttccaaatggaacagcaggccaatgctgaattcatcgcc

SEQ ID NO: 896 - DNA, 75 bp, synthetic construct
  source 1..75: mol_type = other DNA
ctggcactgcgataaccagctgcgcgatcagttcacggaacggctggaatcaatggcaacggataactgtgcccg

SEQ ID NO: 897 - DNA, 75 bp, synthetic construct
  source 1..75: mol_type = other DNA
agtggagtggctgacggataatggttcatgctaccgggctaatgaaacacgccagttcgcccggatgttgggact

SEQ ID NO: 898 - DNA, 75 bp, synthetic construct
  source 1..75: mol_type = other DNA
ccgttctggcatcatttttagtctttttttatattccgcagagctatgccggggttgctctgggtgccacccgtg

SEQ ID NO: 899 - DNA, 75 bp, synthetic construct
  source 1..75: mol_type = other DNA
ggagataatcgaacccacacagaatatggccatcagcgacatacaggcggcgcgctgtgagtcattcaccatcag

SEQ ID NO: 900 - DNA, 75 bp, synthetic construct
  source 1..75: mol_type = other DNA
agcttgccacatgggcagtcaccgatccgtccctacggattcaacggctgctgcgtctgataacacaaccagaat

SEQ ID NO: 901 - DNA, 75 bp, synthetic construct
  source 1..75: mol_type = other DNA
ctgaaacagtgggatgcactgaacgtgtactgcagtaatggctgggtggaaatcgacaacaacatcgcagagaac

SEQ ID NO: 902 - DNA, 75 bp, synthetic construct
  source 1..75: mol_type = other DNA
agaaagacggcagaaagtgcagccggtaatgcagccagggatgcaacgaccgcaacagaaaaagcccgggagtca

SEQ ID NO: 903 - DNA, 75 bp, synthetic construct
  source 1..75: mol_type = other DNA
cagggcgtatctggacgtatgtccgggatgatcgcaatgtgggttcgtcatctcctccagcggtctggttcgcgt

SEQ ID NO: 904 - DNA, 75 bp, synthetic construct
  source 1..75: mol_type = other DNA
ccggcgagacggaccttgcgctgcccggcccgctgccgttcattctctcccgcacctacagcagctaccggacga

SEQ ID NO: 905 - DNA, 75 bp, synthetic construct
  source 1..75: mol_type = other DNA
agagttgtatcctgtatcagtcctgcaaaatttcacgagtgctttattaactggatgcgtgactgccattcttca

SEQ ID NO: 906 - DNA, 75 bp, synthetic construct
  source 1..75: mol_type = other DNA
tgaatgataatcccttctccggccacctgtttatcttccgtggccgacggggtgacaccgttaaaattctttggg

SEQ ID NO: 907 - DNA, 75 bp, synthetic construct
  source 1..75: mol_type = other DNA
agaagacgaagaccgggcggttgtgggcgtatgttcgtgatgaccgcaatgccgggtcagcgttggcacctgcag

SEQ ID NO: 908 - DNA, 75 bp, synthetic construct
  source 1..75: mol_type = other DNA
tggaccgtctgtgcgaagactactgcgggggcatctggaatctgtacaccctgaacaacggtggcgcatttatgg

SEQ ID NO: 909 - DNA, 75 bp, synthetic construct
  source 1..75: mol_type = other DNA
cgccggacgtcaggagtgggaacgcaggcttgccgcgatggtgagccgcaggcggggaaaaccgggatttaaact

SEQ ID NO: 910 - DNA, 75 bp, synthetic construct
  source 1..75: mol_type = other DNA
tcaccacccacagcctttatgcctggataaagaagtacggtccggattcttccactaataaagaacagtcagatg

SEQ ID NO: 911 - DNA, 75 bp, synthetic construct
  source 1..75: mol_type = other DNA
aaacggacaacatgtccctgaaatcatcctgctgaactcccatgacggtacctccagctaccagatgctgccggg

SEQ ID NO: 912 - DNA, 75 bp, synthetic construct
  source 1..75: mol_type = other DNA
tgtccgcagccatctgtctggccgtatccggtgcgcctgcatgggcgtctgaacatcagtccacgctgagcgcgg

SEQ ID NO: 913 - DNA, 75 bp, synthetic construct
  source 1..75: mol_type = other DNA
tactgatattactgaagtggcgaaaaataacacgctgactgatgatgatttttctgcgggaaagtcttcgacggc

SEQ ID NO: 914 - DNA, 75 bp, synthetic construct
  source 1..75: mol_type = other DNA
acctttcacgcgaacgctgccagttaatactgacccagcttgttatggcgggtctggcagactatcagttcggtt

SEQ ID NO: 915 - DNA, 75 bp, synthetic construct
  source 1..75: mol_type = other DNA
ccttgccgaaggcgaagaagctctcagcttcagtgagtttaaacaggcgctttccagctcggcaaaatctaacgg

SEQ ID NO: 916 - DNA, 75 bp, synthetic construct
  source 1..75: mol_type = other DNA
caatgataacctcctgttcaaatggctcaggctctggcagaacgaagggcgtatatcacggcgtcttcaggtaac

SEQ ID NO: 917 - DNA, 75 bp, synthetic construct
  source 1..75: mol_type = other DNA
ctggtcgctgaagagcgttttatctccgccctgccacatttctctttcatccataaacttatcaacacctttaac

SEQ ID NO: 918 - DNA, 75 bp, synthetic construct
  source 1..75: mol_type = other DNA
cggtggctgaactggaatctgaaattctgcaactgcgtaaggcgttaaatgaagctcgccttgagcgagatatat

SEQ ID NO: 919 - DNA, 75 bp, synthetic construct
  source 1..75: mol_type = other DNA
gtgatcgatgccatcagcgaagggccggttgaaggtccggtggatggattaaaaagcgtgctgctgaacagtacg

SEQ ID NO: 920 - DNA, 75 bp, synthetic construct
  source 1..75: mol_type = other DNA
gactgctgtgatcgtgaggcactgcactgggcggtcactaccggcggcttcaacagtgaaacagtacaggacgtc

SEQ ID NO: 921 - DNA, 75 bp, synthetic construct
  source 1..75: mol_type = other DNA
accgccaggtaaagaacccgaatccggtgtttacaccccgtaaaggtgccggaacgctgaagttctgcgaaaaac

SEQ ID NO: 922 - DNA, 75 bp, synthetic construct
  source 1..75: mol_type = other DNA
tctttatgatgataaaggtgtactcattgcggtggcaaactgcccggaaacgtacaaaccgcagttgcaggaagg

SEQ ID NO: 923 - DNA, 75 bp, synthetic construct
  source 1..75: mol_type = other DNA
agcgtgcggaagtacgtatttttgccggtaatgatccggctcataccgccacaggcagcagcgggatttcctcgg

SEQ ID NO: 924 - DNA, 75 bp, synthetic construct
  source 1..75: mol_type = other DNA
gcgcggagagcttgttgatgtgctgtggggggaactggaatggtcttccccgacagatgacgatgagctgccgga

SEQ ID NO: 925 - DNA, 75 bp, synthetic construct
  source 1..75: mol_type = other DNA
cagtgataaaggttctcagtatgtatcgctggcctacacgcagcggcttaaggaagccggattactggcatcaac

SEQ ID NO: 926 - DNA, 75 bp, synthetic construct
  source 1..75: mol_type = other DNA
ccggtcactggaatacgataattttccggaaatcagcgaagcgaacattctgagcacatttaaacaactgcacca

SEQ ID NO: 927 - DNA, 75 bp, synthetic construct
  source 1..75: mol_type = other DNA
tggatgcggataaaaagcagatacagtgcgtggtaagaccgctgcaaatcctgcgtgctgacgggacgtgggaaa

SEQ ID NO: 928 - DNA, 75 bp, synthetic construct
  source 1..75: mol_type = other DNA
ggccgcagctcccgctggctgaaaagtgaagtggaagcctggctgcaggcgcgtattgcacagtcccgtccgtaa

SEQ ID NO: 929 - DNA, 75 bp, synthetic construct
  source 1..75: mol_type = other DNA
cctatggcacatcggcgggtaatgctggtttctgggcattgcagttactcgataaagtaactccgtcacagtggg

SEQ ID NO: 930 - DNA, 75 bp, synthetic construct
  source 1..75: mol_type = other DNA
gcaggacaatattgactgcgaatcagggattatcttcgacaacgatgaggataaaacggattcagcagcactgct

SEQ ID NO: 931 - DNA, 75 bp, synthetic construct
  source 1..75: mol_type = other DNA
gtttgttcgcccagcttctgtatggaacgggcatgcggatcagtgagggtttgcaactgcgggtcaaggatctgg

SEQ ID NO: 932 - DNA, 75 bp, synthetic construct
  source 1..75: mol_type = other DNA
catgaaggtgtgcccaccgctgtggcgcacagggctgcgccagaacttccgtatcttccagaatgaggacatcga

SEQ ID NO: 933 - DNA, 75 bp, synthetic construct
  source 1..75: mol_type = other DNA
taaacgcgccctgtatcacaatgccgctgccgtggtgctggcacacaatcacccgtccggtgaagtcacacccag

SEQ ID NO: 934 - DNA, 75 bp, synthetic construct
  source 1..75: mol_type = other DNA
acacagaattttccattggtggtactgaattgctgctgtttaaacagatgggtaaagccacggtggatggcatcc

SEQ ID NO: 935 - DNA, 75 bp, synthetic construct
  source 1..75: mol_type = other DNA
cgaacttgtctttggccttttctggctgctgggataccagttttctccacgcctggctgatgccggtgcttcggt

SEQ ID NO: 936 - DNA, 75 bp, synthetic construct
  source 1..75: mol_type = other DNA
atgaagtatgtctttattgaaaaacatcaggctgagttcagcatcaaagcaatgtgccgcgtgctccgggtggcc

SEQ ID NO: 937 - DNA, 75 bp, synthetic construct
  source 1..75: mol_type = other DNA
tttttccatgctagtgaagccagtgccagagttgatgatctgcccgtcagcatcagcgccgtgctgatggctgaa

SEQ ID NO: 938 - DNA, 75 bp, synthetic construct
  source 1..75: mol_type = other DNA
ggttaaaaactggataaaaggctaccgcaaatctggtaatgaggcctttatcaggcgcaggaaggagaaaagcat

SEQ ID NO: 939 - DNA, 75 bp, synthetic construct
  source 1..75: mol_type = other DNA
acgactggctgagctcagacgccgctgtggatgaggccctgctcataaacgaatacacctttaccgaaggcggtc

SEQ ID NO: 940 - DNA, 75 bp, synthetic construct
  source 1..75: mol_type = other DNA
accagatggacccggtgtacacgccggcgcgaaaaatccacctgtaccactgcgaccatcgcggcctgccgctgg

SEQ ID NO: 941 - DNA, 75 bp, synthetic construct
  source 1..75: mol_type = other DNA
ccgcacttaaactcaccggcttccgtgatgcgcttaaaaagcaacttgctcagccgggcacataccaggagctgg

SEQ ID NO: 942 - DNA, 75 bp, synthetic construct
  source 1..75: mol_type = other DNA
accgccaggtaaagaacccgaatccggtgtttacaccccgtgaaggtgccggaacgctgaagttctgcgaaaaac

SEQ ID NO: 943 - DNA, 75 bp, synthetic construct
  source 1..75: mol_type = other DNA
ttcatcaatgccctgaaagcccgaatcgacgcttaccagaaacgtaagcatcgggaaggtaaacgcgtgcatccc

SEQ ID NO: 944 - DNA, 75 bp, synthetic construct
  source 1..75: mol_type = other DNA
ggcaaaatggtgaaaatactgtgggccgatcgtgacgggttatgcctgttcgccaaacgcctggaacggggccgc

SEQ ID NO: 945 - DNA, 75 bp, synthetic construct
  source 1..75: mol_type = other DNA
gacagattgacaaaagggccgctgagaaaatcagcgccagtcagtcagccggaagcaaacccgaagagccgctca

SEQ ID NO: 946 - DNA, 75 bp, synthetic construct
  source 1..75: mol_type = other DNA
tccggatgaagccgggcgttacagcatggacgttgagtacggtcagtacagcgttattctgttggtggaaggatt

SEQ ID NO: 947 - DNA, 75 bp, synthetic construct
  source 1..75: mol_type = other DNA
aaagcagtctgatgctttacgagcagtttggtgatttgaaattcaaatacaggaacagagagttctggtgcagag

SEQ ID NO: 948 - DNA, 75 bp, synthetic construct
  source 1..75: mol_type = other DNA
tatcggccacgttgaccacggtaaaactactctgaccgctgcaatcaccaccgtactggctaaaacctacggcgg

SEQ ID NO: 949 - DNA, 75 bp, synthetic construct
  source 1..75: mol_type = other DNA
ttattgacctgagtctggatgcggtccgtttcgatgagcagatgagccgggtaaggcgtcatttttcaggactgg

SEQ ID NO: 950 - DNA, 75 bp, synthetic construct
  source 1..75: mol_type = other DNA
ccgcactggccgtatctctgctgttcacagcacctgtttatgcggctgatgaaggatccggtgaaattcacttta

SEQ ID NO: 951 - DNA, 75 bp, synthetic construct
  source 1..75: mol_type = other DNA
ctggtgcaacggaaattgctcatcagctcagtattgcccgctccacggtttataaaattcttgaagacgaaaggg

SEQ ID NO: 952 - DNA, 75 bp, synthetic construct
  source 1..75: mol_type = other DNA
atgtcgcgccagtgcacgcattatgggcgttggcctcaacacggttttacgtcacttaaaaaactcaggccgcag

SEQ ID NO: 953 - DNA, 75 bp, synthetic construct
  source 1..75: mol_type = other DNA
gtggaggcatccggtgccagcctggagaaggggcggcatgaccagctgcttaccgcgcttcgtgcgctgctgtta

SEQ ID NO: 954 - DNA, 75 bp, synthetic construct
  source 1..75: mol_type = other DNA
gaaaaagtatcgggtattgctgaaccgtgttgatacgtcaactgcacaggatattgaatggccagcactgccgta

SEQ ID NO: 955 - DNA, 75 bp, synthetic construct
  source 1..75: mol_type = other DNA
gtttgatgaaatcaatattgtacgtggtcagccagtatctggtggacggctgggtgtgaagatttacaaaattga

SEQ ID NO: 956 - DNA, 75 bp, synthetic construct
  source 1..75: mol_type = other DNA
atgcgactagccagtcgttttggttatacgaaccagatacgccgtgaccgtccgctgacacacgaagaactgatg

SEQ ID NO: 957 - DNA, 75 bp, synthetic construct
  source 1..75: mol_type = other DNA
attcaaacttcgtatggtggaactggcatcacaaccaggagcctctgttgcccgtattgcccgggaacacgatat

SEQ ID NO: 958 - DNA, 75 bp, synthetic construct
  source 1..75: mol_type = other DNA
atgaatatcagcacggaaacccgcgaaattctgcgtaattacaaaaccgtgattaatgcgcggcgtcgtgagatg

SEQ ID NO: 959 - DNA, 75 bp, synthetic construct
  source 1..75: mol_type = other DNA
tctgggcgtccctgccgggtgccggttacggtcagcgtgagcattcactggaaaaactggtcaccgtctggcgta

SEQ ID NO: 960 - DNA, 75 bp, synthetic construct
  source 1..75: mol_type = other DNA
gccgcagtgagtcaatgtggctggtgcgcggtggtaaggcagcacagccggacggccatacgctggcgcggctgt

SEQ ID NO: 961 - DNA, 75 bp, synthetic construct
  source 1..75: mol_type = other DNA
ctaaaatttacacaccacttaccctaaagctttatgactggtgggttttgggagtatcaaatcggcttgcatggg

SEQ ID NO: 962 - DNA, 75 bp, synthetic construct
  source 1..75: mol_type = other DNA
atgaaccgcgtactgtgcgtggtcatcattgccctgctggtggcctgtggtgcgcttagtctggggctgaatcat

SEQ ID NO: 963 - DNA, 75 bp, synthetic construct
  source 1..75: mol_type = other DNA
cggaaacagtcggaagctggcatgcacgctggagtgaccgggtggcagagcatgacctggaaaccctgttctggc

SEQ ID NO: 964 - DNA, 75 bp, synthetic construct
  source 1..75: mol_type = other DNA
tttggtgacgggccgtggcaggatgttaaggggctggatgaagtgggcagtgatacaggcagaacaggagaatga

SEQ ID NO: 965 - DNA, 75 bp, synthetic construct
  source 1..75: mol_type = other DNA
catcatgcctgtcgtacggagaattatgccatgacggtccattattaccggttgcgggattacgccctgcagcat

SEQ ID NO: 966 - DNA, 75 bp, synthetic construct
  source 1..75: mol_type = other DNA
tgatttacagctctcttttgaacatattgcacgacgctggcatgccagtaataaacaatgggcacaatcacacag

SEQ ID NO: 967 - DNA, 75 bp, synthetic construct
  source 1..75: mol_type = other DNA
tgattaacagcgcattagagctgcttaatgaggtcggaatcgaaggtttaacaacccgtaaactcgcccagaagc

SEQ ID NO: 968 - DNA, 75 bp, synthetic construct
  source 1..75: mol_type = other DNA
gaatctggatcatcgctggcatcacagatatgcgttgtggcttcaacggcctggcttcgaaggtgcagaacacgc

SEQ ID NO: 969 - DNA, 75 bp, synthetic construct
  source 1..75: mol_type = other DNA
tgattaccgccttcattctggggttaacgtggtctgccccactccgggcacaggatcaacgttacatcagtatac

SEQ ID NO: 970 - DNA, 75 bp, synthetic construct
  source 1..75: mol_type = other DNA
cagaacaaagatgaagtgtttgaacggggagtgatcaacgtcttcaaagggctgagctgggattacaaaaccaac

SEQ ID NO: 971 - DNA, 75 bp, synthetic construct
  source 1..75: mol_type = other DNA
tctgaaggaccgcttcgcccatgccagacagttcgccgcttttgcgggtctgacaccacggcgttatgaatcagg

SEQ ID NO: 972 - DNA, 75 bp, synthetic construct
  source 1..75: mol_type = other DNA
agcaataaaatctctgggtcatcagcttgatagtcgttacagacaggttgctgcacgtctttgcgaaaatgaggc

SEQ ID NO: 973 - DNA, 75 bp, synthetic construct
  source 1..75: mol_type = other DNA
gtacagtctggcatcatcagatataacccggctctggatatggctggtgcattgaccacggtaaaacgccagcat

SEQ ID NO: 974 - DNA, 75 bp, synthetic construct
  source 1..75: mol_type = other DNA
ttgatgtggtgtcccgcaatgccgtcaatcccgacttcttaccggacgaggacaagagtacgccgcagctcgatc

SEQ ID NO: 975 - DNA, 75 bp, synthetic construct
  source 1..75: mol_type = other DNA
aagagacggaggccttcctgcgctctgcactggcacgtgccgaagaaaagatcgaagaggaggagcgggaaatag

SEQ ID NO: 976 - DNA, 75 bp, synthetic construct
  source 1..75: mol_type = other DNA
cttcctcatcaggcaccaagcgtacataccggaaaggtaaccctgttccggccagagagaggcaaagagcttctc

SEQ ID NO: 977 - DNA, 75 bp, synthetic construct
  source 1..75: mol_type = other DNA
tccggctgatgcgcgcaaggctggataacgccgcgccggttgctgaaatccgggctgaatctcagctttttgtga

SEQ ID NO: 978 - DNA, 75 bp, synthetic construct
  source 1..75: mol_type = other DNA
gacgtacgttcgagacgaccgcaacgccggatcagcgctggcccccgcagtgtggttcgcttacagcccggacag

SEQ ID NO: 979 - DNA, 75 bp, synthetic construct
  source 1..75: mol_type = other DNA
ttgaggcgctaaatgaaaccttaacgctatggaactcgccgcccgactgggctggcgatgagcgaaatgtagtgc

SEQ ID NO: 980 - DNA, 75 bp, synthetic construct
  source 1..75: mol_type = other DNA
ggaccagtggggatttcatcttatcagtggaatgcaggcagatcgcctggctgacctggaaagaatgttgcatct

SEQ ID NO: 981 - DNA, 75 bp, synthetic construct
  source 1..75: mol_type = other DNA
ccatcctgtcggctgtggcacaggctgaacgccggaggatcctagaacgcacgaatgagggccgacaggaagcaa

SEQ ID NO: 982 - DNA, 75 bp, synthetic construct
  source 1..75: mol_type = other DNA
gtacggcgagcgcgacgtgacccgtcgcgagcatgcccaggaactgcgcacctacctgcaactggccccgttcgg

SEQ ID NO: 983 - DNA, 75 bp, synthetic construct
  source 1..75: mol_type = other DNA
cgtccttccggactgactcaggcaatcattgaagtggggcgcatcaacaaaacgctgtatctgcttaattatatt

SEQ ID NO: 984 - DNA, 75 bp, synthetic construct
  source 1..75: mol_type = other DNA
tttccgccgggcatgagatggcttcggaactgaaagcagaatgtggtgccgttgatatgcgcagtgtggcaaagc

SEQ ID NO: 985 - DNA, 75 bp, synthetic construct
  source 1..75: mol_type = other DNA
cgcatcccgatgacaatgacgaccatccctggtggggactaccctgcacagtgacgccctgtttcggcgcccgtc

SEQ ID NO: 986 - DNA, 75 bp, synthetic construct
  source 1..75: mol_type = other DNA
atgaaactttccctgatgctggaagccgacagaattaatgtgcaggcactgaacatggggcgaattgtcgttgac

SEQ ID NO: 987 - DNA, 75 bp, synthetic construct
  source 1..75: mol_type = other DNA
atgaaaaaggatctgaaaacgctggcgctggccagactgtcagggtttcgtcataaaacggtgaaggtgccggaa

SEQ ID NO: 988 - DNA, 75 bp, synthetic construct
  source 1..75: mol_type = other DNA
atgtaaatcagatccgtcgggagcgcccactgacacgcgaagaactgatgtaccacgtcccgagtatttttggag

SEQ ID NO: 989 - DNA, 75 bp, synthetic construct
  source 1..75: mol_type = other DNA
cccgaccgaatccgtggccattgatgtcgcttatgaaggctccggcagtggtgactggcgcactgacgggttcat

SEQ ID NO: 990 - DNA, 75 bp, synthetic construct
  source 1..75: mol_type = other DNA
acccgggaggaggcccgacatctggaggcattcctggcagagcacggtggctggaaggcgtttctgtggacaccg

SEQ ID NO: 991 - DNA, 75 bp, synthetic construct
  source 1..75: mol_type = other DNA
gcacggggtgacggactgttacacgctgttccgggatgcttaccatctggcggggattgagatgccggattttca

SEQ ID NO: 992 - DNA, 75 bp, synthetic construct
  source 1..75: mol_type = other DNA
taaaactcggcaccagtgtgctaacaggcggatcgcgccgtctgaaccgtgcccatatcgttgaacttgttcgcc

SEQ ID NO: 993 - DNA, 75 bp, synthetic construct
  source 1..75: mol_type = other DNA
acggatcccgcgtgaacttcccaccgggcgtccggccatgctgcatattttcgagccggtggaggacgggcagac

SEQ ID NO: 994 - DNA, 75 bp, synthetic construct
  source 1..75: mol_type = other DNA
cagcagcaaagactctaaatctgtcaaactcctcgaaacttggtgcataccagaaattatcaaaggtagctggtc

SEQ ID NO: 995 - DNA, 75 bp, synthetic construct
  source 1..75: mol_type = other DNA
atgtctagtccacatcaggatagcctcttaccgcgctttgcgcaaggagaagaaggccatgaaactaccacgaag

SEQ ID NO: 996 - DNA, 75 bp, synthetic construct
  source 1..75: mol_type = other DNA
gaaagccagcatccgtgccaaggtagagcacccgtttcgcatcatcaagcggcagttcggcttcgtgaaagccag

SEQ ID NO: 997 - DNA, 75 bp, synthetic construct
  source 1..75: mol_type = other DNA
aaagcagtctgatgctttacgagcagtttggtgatttgaaattcaagtacaggaacagggagttctggtgcagag

SEQ ID NO: 998 - DNA, 75 bp, synthetic construct
  source 1..75: mol_type = other DNA
gggcagaaaccgctcaccaccgcgcagattgttgatgaaatctgcgattttgtggcgaatcagcaggcggttttc

SEQ ID NO: 999 - DNA, 75 bp, synthetic construct
  source 1..75: mol_type = other DNA
cgtgactacgatggtcaggttgcggaggctatggccctggtacgagcgctgaacaaaatgacgaaagcaggtatg

SEQ ID NO: 1000 - DNA, 75 bp, synthetic construct
  source 1..75: mol_type = other DNA
gcggattgttggctggtatcggcggcgtcaactcaaacgctccgagcgtaaatgacatcggcaatacgcttcagc

SEQ ID NO: 1001 - DNA, 75 bp, synthetic construct
  source 1..75: mol_type = other DNA
ggggggcgctgccgccggatatccggttaagcccgcatctttacctggcgaccaacagcgcacaggggccgtggt

SEQ ID NO: 1002 - DNA, 75 bp, synthetic construct
  source 1..75: mol_type = other DNA
atgagtcagaaatacctcattcgcatcgctgagctggaaaggctgctctctgagcaggctgaagccctccgtcag

SEQ ID NO: 1003 - DNA, 75 bp, synthetic construct
  source 1..75: mol_type = other DNA
ggtggttgttgcgaaaagatgcttccgcacgcacgcgcgataaagaggggatagttttcgtgaggacagggagag

SEQ ID NO: 1004 - DNA, 75 bp, synthetic construct
  source 1..75: mol_type = other DNA
tatttcattttcactaatgctggttgctctttttctgtccctcgcctgggtgatgttgtcttcgtcggggctgct

SEQ ID NO: 1005 - DNA, 75 bp, synthetic construct
  source 1..75: mol_type = other DNA
tggtagtggttctgtagccaggtggctgaaggtctatgaagagcgcggagaagctggtttacgcgcgctcaagat

SEQ ID NO: 1006 - DNA, 75 bp, synthetic construct
  source 1..75: mol_type = other DNA
cagcattggagctgtcaaaagaccgacgcattgaggatcttgaaaggcaagttcgatttcttgaaacgcggctta

SEQ ID NO: 1007 - DNA, 75 bp, synthetic construct
  source 1..75: mol_type = other DNA
tttacccgcaaagataataatatcagcctcaataaagccggacaggaactgtatcaaaaactgttcccggtttat

SEQ ID NO: 1008 - DNA, 75 bp, synthetic construct
  source 1..75: mol_type = other DNA
ccgtgatacacggtgtgaccgcggtctggcgtgccggggagcaggagcagacaccaccggaaggctttgagtcct

SEQ ID NO: 1009 - DNA, 75 bp, synthetic construct
  source 1..75: mol_type = other DNA
tgcgcgttgttgaagtcaacgaaggcacccgatccattaccacggtgagcaccgccatcgtgggtatggtctgca

SEQ ID NO: 1010 - DNA, 75 bp, synthetic construct
  source 1..75: mol_type = other DNA
tccgctgacacacgaagaactgatgcactatgttcccagtattttcggtgaagaccggcatacttcccgcagtaa

SEQ ID NO: 1011 - DNA, 75 bp, synthetic construct
  source 1..75: mol_type = other DNA
gcgtgcgtgttatggccacgtttccgggcaatgctgtcgatttcatcctcaccgacccgccgtatctcgtcggtt

SEQ ID NO: 1012 - DNA, 75 bp, synthetic construct
  source 1..75: mol_type = other DNA
atgacggaacgggaactgtccattattcgtgcactgggcgaagaattctccacggtgctggcggatttacagcgc

SEQ ID NO: 1013 - DNA, 75 bp, synthetic construct
  source 1..75: mol_type = other DNA
gaagagttggaggacgtcgcccgaaactgacgaaggagcagcatgagcagatcgcaagattgctccagaaagggt

SEQ ID NO: 1014 - DNA, 75 bp, synthetic construct
  source 1..75: mol_type = other DNA
atacccgctggcatgaagattccgtgcgtaaccgctggttcagcgtgatggcggggccgtctgtgcgcgtgaatg

SEQ ID NO: 1015 - DNA, 75 bp, synthetic construct
  source 1..75: mol_type = other DNA
gcctgtacaacatcgaagaaattatgcgatggatcgaaaaccagaaacaaccaggtgccaaaaatgcaagttccg

SEQ ID NO: 1016 - DNA, 75 bp, synthetic construct
  source 1..75: mol_type = other DNA
ttgttcggtcgcagcagcgagaaaagccgcgagaagatagaaaagaagatcgcacgggcagaaacgcgtataacc

SEQ ID NO: 1017 - DNA, 75 bp, synthetic construct
  source 1..75: mol_type = other DNA
gccggatttgacgaagaggattttaaaaaacccatccgcgtccatttacccgttgtgaatgaccttccaccggaa

SEQ ID NO: 1018 - DNA, 75 bp, synthetic construct
  source 1..75: mol_type = other DNA
agggactgcctgacggtccttttacccgcaaacatgccgaagccgttgccgcacagtaccggaacgtctttatcg

SEQ ID NO: 1019 - DNA, 75 bp, synthetic construct
  source 1..75: mol_type = other DNA
cagcatattgaggcagggatttcactgtgtgacgcggtgaactttctcgttgaaaaatacgcgctggtacgtacc

SEQ ID NO: 1020 - DNA, 75 bp, synthetic construct
  source 1..75: mol_type = other DNA
ccagagggcaatcagatccccgaaaaatagtccttcagtgggacgaaatgatccggaccgctggctccctgaagc

SEQ ID NO: 1021 - DNA, 75 bp, synthetic construct
  source 1..75: mol_type = other DNA
ggagacacgattaaaatcctgtgggctgatgctgatggtctgtgcctgttcaccaaacgccttgaggaaggtcag

SEQ ID NO: 1022 - DNA, 75 bp, synthetic construct
  source 1..75: mol_type = other DNA
caatcgacgattgctggaaaggctgggccatactcctccggcagaagcagaaaaagcttattatgcttccatcgg

SEQ ID NO: 1023 - DNA, 75 bp, synthetic construct
  source 1..75: mol_type = other DNA
gttgacatcatgggagagcagcttcgcccgctgtatgatgaactgaagcactatgtgctgatgccgggtaaagtg

SEQ ID NO: 1024 - DNA, 75 bp, synthetic construct
  source 1..75: mol_type = other DNA
cagccagcaatttcatgcgttgtgccgaagccgtcggaacacgcattacagacattccggtagacctcaacacgc

SEQ ID NO: 1025 - DNA, 75 bp, synthetic construct
  source 1..75: mol_type = other DNA
ttcagcaggtgctggagcgtgctgactatctggcgaaggagagtaccaaagcttacggcaccggtgagcgcaact

SEQ ID NO: 1026 - DNA, 75 bp, synthetic construct
  source 1..75: mol_type = other DNA
gtgactgaaggcagtatcaccatcaatggcgcgggcctggacggcacccggagcgatgccgtatccattattgcc

SEQ ID NO: 1027 - DNA, 75 bp, synthetic construct
  source 1..75: mol_type = other DNA
gggctaattttcgtgaagagttggtgcgttggtatcggtatcgttcatcgtccagtttgccgcttgatgagttgt

SEQ ID NO: 1028 - DNA, 75 bp, synthetic construct
  source 1..75: mol_type = other DNA
agctttattgctgcagctctggcccagtttgtaagtgataaaacgcaacgggatgtgcttgataatggtgatctg

SEQ ID NO: 1029 - DNA, 75 bp, synthetic construct
  source 1..75: mol_type = other DNA
gctaaccgttttacttctaacattaaaggcctgactcaggctgcacgtaacgccaacgacggtatttctgttgca

SEQ ID NO: 1030 - DNA, 75 bp, synthetic construct
  source 1..75: mol_type = other DNA
acgctggagctggtgttcaccgccggcagtgccacggttactccgaaactgaatggagtggctggcccggcattc

SEQ ID NO: 1031 - DNA, 75 bp, synthetic construct
  source 1..75: mol_type = other DNA
tgctgaatattaatcaactggcggctttatctggtctgcaccgccagactgtcgtggcaagactgaaaaacattc

SEQ ID NO: 1032 - DNA, 75 bp, synthetic construct
  source 1..75: mol_type = other DNA
gcagggacggcaggagtgggagcgccgccttgcggctctgattacacgacgacgggggcatcccgggtaccggct

SEQ ID NO: 1033 - DNA, 75 bp, synthetic construct
  source 1..75: mol_type = other DNA
acctggccactttctgccagacctgggacgacgaaaacgtccataaattgatggatttgtcgatcaataaaaact

SEQ ID NO: 1034 - DNA, 75 bp, synthetic construct
  source 1..75: mol_type = other DNA
cctgtattgcattagctctgagtggtcagggttgggcggcagatatcacagaggtagaaaccaccacaggtgaaa

SEQ ID NO: 1035 - DNA, 75 bp, synthetic construct
  source 1..75: mol_type = other DNA
gaaatcattaaatgcgccgaaatgctgatgcaggaagatgatttcgaaatatgcgaaagtattttaagacagcag

SEQ ID NO: 1036 - DNA, 75 bp, synthetic construct
  source 1..75: mol_type = other DNA
tgacactgaagcggaaaacggaaggggagacgcctgtccgcagccggaaaaccatcatcaatgtcaccacgccac

SEQ ID NO: 1037 - DNA, 75 bp, synthetic construct
  source 1..75: mol_type = other DNA
agcccggtgaacccgctactcggtgcgaaggttctgcctgttgaaaccgacctggcactgcccggcccgctgccg

SEQ ID NO: 1038 - DNA, 75 bp, synthetic construct
  source 1..75: mol_type = other DNA
acaccgtggattcgctctgtttccggtactacggcacgacgcagggcgtcaccgaaaaggtgctggatgccaacc

SEQ ID NO: 1039 - DNA, 75 bp, synthetic construct
  source 1..75: mol_type = other DNA
agaagaaacaccggacgaatcgattcgtgctgaggtgttcagctacatcccaaggcaaaagctggctgaaatcat

SEQ ID NO: 1040 - DNA, 75 bp, synthetic construct
  source 1..75: mol_type = other DNA
tggaaaacgctgccattccagatcgccattatgaactgtatgggtaacgaccaggttcgcacggttaacctgatt

SEQ ID NO: 1041 - DNA, 75 bp, synthetic construct
  source 1..75: mol_type = other DNA
atcgaaccgtttgatgagaaccgtgtgaaaatcaaacacaaactctcatatgttcgcccgactaaccgcgggaaa

SEQ ID NO: 1042 - DNA, 75 bp, synthetic construct
  source 1..75: mol_type = other DNA
tcatccttagactcaggggcaaagattctgtctcagtaaatcaggctcttaccgacaaattcctgagtttaccgt

SEQ ID NO: 1043 - DNA, 75 bp, synthetic construct
  source 1..75: mol_type = other DNA
attgcacgacgctggcatgccagtaataaacaatgggcacaatcacacagcgataaagtactcaaaagcctcgag

SEQ ID NO: 1044 - DNA, 75 bp, synthetic construct
  source 1..75: mol_type = other DNA
actgagcacgtatgagaaagagctggcgctgatgggcgaggattatcaggacattttccgccagcaggtcaggga

SEQ ID NO: 1045 - DNA, 75 bp, synthetic construct
  source 1..75: mol_type = other DNA
atgaaccgtgttctgtgtgtggtgattattgtcctgctggtagcctgtggtgtgcttagtctggggctgaatcat

SEQ ID NO: 1046 - DNA, 75 bp, synthetic construct
  source 1..75: mol_type = other DNA
gtaaagaagttcaggccatgatgcaggcggtttgttacggggcaacgggagccagagattattgtcttattctgt

SEQ ID NO: 1047 - DNA, 75 bp, synthetic construct
  source 1..75: mol_type = other DNA
atgaacgacacctcttctgacgacatccttctgctgaaacagcgcctggccgaacaggaagcgttgatccacgcc

SEQ ID NO: 1048 - DNA, 75 bp, synthetic construct
  source 1..75: mol_type = other DNA
cgctgttcagcgagccgcatccttcccgtgagttttgtgtccagtacggtgagactgattacgatttcctgtgcc

SEQ ID NO: 1049 - DNA, 75 bp, synthetic construct
  source 1..75: mol_type = other DNA
agctgcgctttaccggctctatccagcgtgacgataccggggaagtgcaggctgtggagcttgtggtgcgtggac

SEQ ID NO: 1050 - DNA, 75 bp, synthetic construct
  source 1..75: mol_type = other DNA
tcttaccgtgcaaattgcaaggaggagtaaaccatgaaactaccgggaaacgcccttatctggtgcgtattaatc

SEQ ID NO: 1051 - DNA, 75 bp, synthetic construct
  source 1..75: mol_type = other DNA
aggcttacgaagaatacttcgaaggccttgccgaaggcgaagaagctctcagcttcagtgagtttaaacaggcgc

SEQ ID NO: 1052 - DNA, 75 bp, synthetic construct
  source 1..75: mol_type = other DNA
tatgaatctaaagggtggttaactcgacatcttggttaccgtgaagttaccatcacggaaaaaggttatgctgct

SEQ ID NO: 1053 - DNA, 75 bp, synthetic construct
  source 1..75: mol_type = other DNA
cgggccttgatgttacccgagagcttggcacccagcctgcgcgagcagctgtcgcgtgcacgggcatggtggctg

SEQ ID NO: 1054 - DNA, 75 bp, synthetic construct
  source 1..75: mol_type = other DNA
ctttcaggtgaatgccacgaatgaagagctaaccgttgagtgtacgatgaatgccgctaaatgccgcatggtatc

SEQ ID NO: 1055 - DNA, 75 bp, synthetic construct
  source 1..75: mol_type = other DNA
aacaaccatctggatattggtgttggaactgggttttaccttactcacgtacctgagagtagtctgatatcttta

SEQ ID NO: 1056 - DNA, 75 bp, synthetic construct
  source 1..75: mol_type = other DNA
agccttttcagggaacaattccgttccgtattttgcagcgtggtcgtgttcttgttgaaggttcgttcagtggta

SEQ ID NO: 1057 - DNA, 75 bp, synthetic construct
  source 1..75: mol_type = other DNA
ccatccgccctgcgccagtcttcagcccgtaaaccgttaccggcctcacttccccgtgaaacccgggttatccgg

SEQ ID NO: 1058 - DNA, 75 bp, synthetic construct
  source 1..75: mol_type = other DNA
acttcgaggactacctggtaccgcccgagaagttcaccagcctcaagcagtccagcgaattgccgctggccgtgg

SEQ ID NO: 1059 - DNA, 75 bp, synthetic construct
  source 1..75: mol_type = other DNA
cgtattgaaatggaaaatgaaatattaaaaaaggctaccgcgctcttgatgtcagactccctgaacagttctcga

SEQ ID NO: 1060 - DNA, 75 bp, synthetic construct
  source 1..75: mol_type = other DNA
gagcgtcgtgtgaaggagcgcatgattctgtcacgtaaccgtaattacagccggctggccacagcttccccctga

SEQ ID NO: 1061 - DNA, 75 bp, synthetic construct
  source 1..75: mol_type = other DNA
tcaatgcactgaaacgtctccttgccgaacaggaggcgctgaaccgtgccctgcaggaaaagctgaacgagcgtg

SEQ ID NO: 1062 - DNA, 75 bp, synthetic construct
  source 1..75: mol_type = other DNA
atgagcagctcacttcctgacgatatcaatgcactgaaacgtctccttgccgaacaggaggcgctgaaccgtgcc

SEQ ID NO: 1063 - DNA, 75 bp, synthetic construct
  source 1..75: mol_type = other DNA
ctgtctgccctgctggcgcagacggaggaagtgagcgtgccgctggcctcactgattaaatcaccgctgaatgtg

SEQ ID NO: 1064 - DNA, 75 bp, synthetic construct
  source 1..75: mol_type = other DNA
ggcccgttcgctggatgccatcgctgaccaggcaaaacccgtgaccgttgttgtgcgtgtgccgcagggtgaaac

SEQ ID NO: 1065 - DNA, 75 bp, synthetic construct
  source 1..75: mol_type = other DNA
ggggcaaggcaagaagctgttccgctggcggctacccgaaggtaatccctatctgaggacggagaccagaaacac

SEQ ID NO: 1066 - DNA, 75 bp, synthetic construct
  source 1..75: mol_type = other DNA
tgatattctccgggctcgccgggcaacaggcctgatgacccgccacaactacagaacggtgaacaatatcaccct

SEQ ID NO: 1067 - DNA, 75 bp, synthetic construct
  source 1..75: mol_type = other DNA
ccggtgtggcggttgcgctgtctcttgctgctgtcacatcagtcccggcactggctgctgacacggttgtacagg

SEQ ID NO: 1068 - DNA, 75 bp, synthetic construct
  source 1..75: mol_type = other DNA
tgccgtgtggctgacgcacgacccggaatacccggagaatttacctgccgcgccgctggtgcgctatggctggac

SEQ ID NO: 1069 - DNA, 75 bp, synthetic construct
  source 1..75: mol_type = other DNA
tatcccgccgtatcgcgcaaatggaagctgacctgaacctgctgcagcaggaaagcgatacgctgaccggccggg

SEQ ID NO: 1070 - DNA, 75 bp, synthetic construct
  source 1..75: mol_type = other DNA
ctgctctttcttcagccacagcaccagggaataaccagccccaactggttgctactcccgtccctgatgaacaac

SEQ ID NO: 1071 - DNA, 75 bp, synthetic construct
  source 1..75: mol_type = other DNA
cgggctgatcggcacctgccgtctgaacggtatcgatccggaagcgtatctgcgccatatcctgagcgtactgcc

SEQ ID NO: 1072 - DNA, 75 bp, synthetic construct
  source 1..75: mol_type = other DNA
tgaggaggcgaagaagaatgccggagaggcggagacgtcagcgaggaatgccggcatatcagccagtcaggcaga

SEQ ID NO: 1073 - DNA, 75 bp, synthetic construct
  source 1..75: mol_type = other DNA
agaggcctgttcagcgatgcagatgcgtaccacctggaccaggcctttccgctgctgatgaaacaactggaactc

SEQ ID NO: 1074 - DNA, 75 bp, synthetic construct
  source 1..75: mol_type = other DNA
cgtaaggacagatgcagcaagtgcatgcgcgggtgtgagatgcgcggcatggtggctaattttggcggtttcctt

SEQ ID NO: 1075 - DNA, 75 bp, synthetic construct
  source 1..75: mol_type = other DNA
cctatttccggctgacgatggacggtaaggagctggtcgaaatcgacaccatcaacatgattgagaaggtgaacg

SEQ ID NO: 1076 - DNA, 75 bp, synthetic construct
  source 1..75: mol_type = other DNA
agatccggaagtccgttacatccccaacgggggcgcagtggcaaacctgcaggtggccacgtcagaaagctggcg

SEQ ID NO: 1077 - DNA, 75 bp, synthetic construct
  source 1..75: mol_type = other DNA
cgcgcaatgcgctggcccgtgccgtgttcttcaaccgccttggtgaaatccgtgaccgcagtttcgagcagcagc

SEQ ID NO: 1078 - DNA, 75 bp, synthetic construct
  source 1..75: mol_type = other DNA
agaccgacaaaggcttgctgctggccggtcaggccctggagagcctacggcagaaacgacgcatcctgccggcgc

SEQ ID NO: 1079 - DNA, 75 bp, synthetic construct
  source 1..75: mol_type = other DNA
ccgcagcggctgtaaagccccgccgtcatccccgtttcagacgcgaagacatccccgcgccggaaattgaccccg

SEQ ID NO: 1080 - DNA, 75 bp, synthetic construct
  source 1..75: mol_type = other DNA
gctgaaggaacggcaaataccactgtggtttatgccggcggcgaccagactgtacatggtcacgcactggatacc

SEQ ID NO: 1081 - DNA, 75 bp, synthetic construct
  source 1..75: mol_type = other DNA
aaccggtcagcatgtgcctgaaattattctgctcaactcccatgacggttcatccagctaccagatgttacccgg

SEQ ID NO: 1082 - DNA, 75 bp, synthetic construct
  source 1..75: mol_type = other DNA
ggaatgggtacaaaagcgcatgacctctttgtgttgcctttgtgcagaaagcatcacgacgagctgcatgcggat

SEQ ID NO: 1083 - DNA, 75 bp, synthetic construct
  source 1..75: mol_type = other DNA
ttattaaacacgctggaagaagccggtattcaaccggataaaacaaaattaaaccagcttgcactgtccattaaa

SEQ ID NO: 1084 - DNA, 75 bp, synthetic construct
  source 1..75: mol_type = other DNA
atgagcgataagcagactgaaaagaccattcaactggatacccccatcaagcgcggtaaaacagaaatcaccgaa

SEQ ID NO: 1085 - DNA, 75 bp, synthetic construct
  source 1..75: mol_type = other DNA
aacacggtctacctggagcgtgcggcgcatgcgttgcgcggcaatggtcatgccgtcgatgactcgctattgcag

SEQ ID NO: 1086 - DNA, 75 bp, synthetic construct
  source 1..75: mol_type = other DNA
gctaaccgttttacttctaacattaaaggcctgactcaggctgcacgtaacgccaacgacggtatttctgttgcg

SEQ ID NO: 1087 - DNA, 75 bp, synthetic construct
  source 1..75: mol_type = other DNA
gtgaacgcactctggccacactggagcgtcttctaagcctgctgtcggcctttgaggtcgtggtatggatgacgg

SEQ ID NO: 1088 - DNA, 75 bp, synthetic construct
  source 1..75: mol_type = other DNA
aggtggcctggatgaaacgccagacgccgcccacactggagagcaaaattatcctcgtgcagggcagtatcccgg

SEQ ID NO: 1089 - DNA, 75 bp, synthetic construct
  source 1..75: mol_type = other DNA
cttcgcgcagaaaatgcatatctgaaagccatgcaggagcatctcctggaaaaaaagcgccaggagctggagaaa

SEQ ID NO: 1090 - DNA, 75 bp, synthetic construct
  source 1..75: mol_type = other DNA
aaaccgccagagtggtgtttaatgaattaagcgtcaccgaaccggcgaccgtcggggaaattgcgcagaatactt

SEQ ID NO: 1091 - DNA, 75 bp, synthetic construct
  source 1..75: mol_type = other DNA
ccggaccggaaaggtatccatccacaaaatcacctggccggttacagcggtgtgcttcaggccgatgcttacggt

SEQ ID NO: 1092 - DNA, 75 bp, synthetic construct
  source 1..75: mol_type = other DNA
ttgctcgacgccttagccattgagatgttagataggcaccatactcacttttgccctttagaaggggaaagctgg

SEQ ID NO: 1093 - DNA, 75 bp, synthetic construct
  source 1..75: mol_type = other DNA
cgaagcaagcctcgtataaattagcgcaactctccagccgcgaaaaaaatcgcgtgctggaaaaaatcgccgatg

SEQ ID NO: 1094 - DNA, 75 bp, synthetic construct
  source 1..75: mol_type = other DNA
acgactacacgccagtgccgccacttgaaaacctgatgctgcgtcagcgcatcaccgatcagtacctggtgaatt

SEQ ID NO: 1095 - DNA, 75 bp, synthetic construct
  source 1..75: mol_type = other DNA
acgatggttcagcagggctatgactatcgtcgtgatgacgatatggcgttatggagctctgcagatttgacttat

SEQ ID NO: 1096 - DNA, 75 bp, synthetic construct
  source 1..75: mol_type = other DNA
cagaacataatttgtcgtgagtgccgccagagcgaagttatgcagcgtgtgctggcgttctatcggggaaacttt

SEQ ID NO: 1097 - DNA, 75 bp, synthetic construct
  source 1..75: mol_type = other DNA
ggcatttaagtctgaccgatcgccagcttcgcagattgcagaaattgccgggtgccccgatatcgaataagcgag

SEQ ID NO: 1098 - DNA, 75 bp, synthetic construct
  source 1..75: mol_type = other DNA
cgggattatttcatcctcagagaacggttgatgacaatgcagaagcagctggaaggggcacaggactatatccgc

SEQ ID NO: 1099 - DNA, 75 bp, synthetic construct
  source 1..75: mol_type = other DNA
ctaatgcagccggtgcgatagctacagggcttttatctctcattattcctgttccactgacgacagttcagtggg

SEQ ID NO: 1100 - DNA, 75 bp, synthetic construct
  source 1..75: mol_type = other DNA
gtggctgcgggagaaacagaaaaccctctcaaggcactcagaactggcgaaggcgttcgggtatgcgctgaacca

SEQ ID NO: 1101 - DNA, 75 bp, synthetic construct
  source 1..75: mol_type = other DNA
aaggctgagggcataattgaagggatgttaatggcattagatatccggttagagatggatatcgttgttaataac

SEQ ID NO: 1102 - DNA, 75 bp, synthetic construct
  source 1..75: mol_type = other DNA
tggtaccggaactcgggctggtgatcgttaagccgggccgtgaatccatgccggtattccacaatacccgggtac

SEQ ID NO: 1103 - DNA, 75 bp, synthetic construct
  source 1..75: mol_type = other DNA
atcttgacgccatgattcgccacatcacaaaggcggagttatcccgcgtggagatagtcgagctgctcagtcagg

SEQ ID NO: 1104 - DNA, 75 bp, synthetic construct
  source 1..75: mol_type = other DNA
atgcatacagtttctgaaaatcagtgcggtaaatacgcattactgctgcaacaggccagaaccgaagcacaggcc

SEQ ID NO: 1105 - DNA, 75 bp, synthetic construct
  source 1..75: mol_type = other DNA
aacagtatgcgcaggcgcgcctggaaaaggtgcgcagacagaaccggatcaaggatgagctgcgggcgatcctgg

SEQ ID NO: 1106 - DNA, 75 bp, synthetic construct
  source 1..75: mol_type = other DNA
acccgtccggtgaagtcacccccagtaaggcagaccggcttatcactgaacgtctggtacaggcgctggccctgg

SEQ ID NO: 1107 - DNA, 75 bp, synthetic construct
  source 1..75: mol_type = other DNA
atgaccagatggtcgacatggcatttatcactcaactgaccggcctgacagataagtggttttacaggctcatca

SEQ ID NO: 1108 - DNA, 75 bp, synthetic construct
  source 1..75: mol_type = other DNA
atgcaggatattcacgaagaaagtctgaacgagtcggttaaatcagagcagtcaccgcgggtggtactctgggaa

SEQ ID NO: 1109 - DNA, 75 bp, synthetic construct
  source 1..75: mol_type = other DNA
ataaaacggattcagcagcactgttgccctgtatcgaacaggcccgggaggatgtccgtaccctgcgtcatctgc

SEQ ID NO: 1110 - DNA, 75 bp, synthetic construct
  source 1..75: mol_type = other DNA
ccatacccgggccattcacagcattgataccgacattaagctcaatcgcgcattgtgggtgatggcagaaacgat

SEQ ID NO: 1111 - DNA, 75 bp, synthetic construct
  source 1..75: mol_type = other DNA
gaagagctggatgcagatacctggcgggccacactgcatattgaggtgtttttaccggcacaggtaccggattca

SEQ ID NO: 1112 - DNA, 75 bp, synthetic construct
  source 1..75: mol_type = other DNA
atgagcgaatatttcagaatatttcaggggctgcctgacggctcctttacccgcgaacaggctgaagccgttgcc

SEQ ID NO: 1113 - DNA, 75 bp, synthetic construct
  source 1..75: mol_type = other DNA
atccttgccgagctgatgaaagctcctctgcctgtagataacgaggaaatggatcctcatgcgcgtaaagcatgg

SEQ ID NO: 1114 - DNA, 75 bp, synthetic construct
  source 1..75: mol_type = other DNA
actggcaatgctcctcgataagctggactggcgtcagccaaaaacatcccgccttaacgcactgacaatgttgta

SEQ ID NO: 1115 - DNA, 75 bp, synthetic construct
  source 1..75: mol_type = other DNA
agtttaaacgcgaatccgctcaactggttgttgaccagaactacacggtggcagatgccgccaaagctatggata

SEQ ID NO: 1116 - DNA, 75 bp, synthetic construct
  source 1..75: mol_type = other DNA
ttgcgtggcttccatttccatcagatgtccttcctgctccgctactgaaggcgtggtgcgtaacggcaaaagcac

SEQ ID NO: 1117 - DNA, 75 bp, synthetic construct
  source 1..75: mol_type = other DNA
ggccagtcaggattcggcacgctggggggtgggcaagccgttatatcaggatctgatttcccgcacaaaagcggc

SEQ ID NO: 1118 - DNA, 75 bp, synthetic construct
  source 1..75: mol_type = other DNA
acaagcctggaaagtggaacataaattatcggatattctactgttgactatttgtgccgttatttctggtgcaga

SEQ ID NO: 1119 - DNA, 75 bp, synthetic construct
  source 1..75: mol_type = other DNA
atcatatggaaacctggacctcggcgttgcaaacccgttccaccgccgggcgcggcagttccggaaaaattgatt

SEQ ID NO: 1120 - DNA, 75 bp, synthetic construct
  source 1..75: mol_type = other DNA
acacgccggttgaggcaaaggacaatcttaagtccacgcagatgatgagcgtgattgatgccattggtgaagggc

SEQ ID NO: 1121 - DNA, 75 bp, synthetic construct
  source 1..75: mol_type = other DNA
gaagggaaacgcacgtttacggaatttatccgtgaaggtgtgggcgttcatgcgtttaacggcgaaatctttgtg

SEQ ID NO: 1122 - DNA, 75 bp, synthetic construct
  source 1..75: mol_type = other DNA
tcgagcaactgaaggccctgctgatcgcacagcaggctgttatcgtccgtctgtctggtgaaataaccggctatg

SEQ ID NO: 1123 - DNA, 75 bp, synthetic construct
  source 1..75: mol_type = other DNA
gaaaacacgaacgggagttattaaataaagtatgcattgtttcaatgctggcccgtttacgtctgatgccaaaag

SEQ ID NO: 1124 - DNA, 75 bp, synthetic construct
  source 1..75: mol_type = other DNA
tcagcgctgtggggcattttactttaggttgcgtattggaagatcaagagcatcaagtcgctaaagaagaaaggg

SEQ ID NO: 1125 - DNA, 75 bp, synthetic construct
  source 1..75: mol_type = other DNA
atggcctacggtgaagggcttccgttaccggattcttacgatgctccggatccgcgcattaaacagctggcgcgc

SEQ ID NO: 1126 - DNA, 75 bp, synthetic construct
  source 1..75: mol_type = other DNA
caccggcccttatgcgctggttctggtgcctgcgctgatgtatgccagctataaggcgagtgattatgtggagga

SEQ ID NO: 1127 - DNA, 75 bp, synthetic construct
  source 1..75: mol_type = other DNA
tcctgttctgttcacgatcaccgacatcgtaaatggcgccaccttgatacctgccagttcatgacattagtagaa

SEQ ID NO: 1128 - DNA, 75 bp, synthetic construct
  source 1..75: mol_type = other DNA
tatcttgatggcaacgctcgtcagaacctggccactttctgccagacctgggacgacgaaaatgtccacaaattg

SEQ ID NO: 1129 - DNA, 75 bp, synthetic construct
  source 1..75: mol_type = other DNA
ccgcgtaaaccgtcagttcgtggcagaacgtccagaccagttgtgggtggctgattttacctgggtaagcacatg

SEQ ID NO: 1130 - DNA, 75 bp, synthetic construct
  source 1..75: mol_type = other DNA
tcatcgcgatggagcaaaagtacatttaggtacacggcctacagaaaaacagtatgaaactctcgaaaatcaatt

SEQ ID NO: 1131 - DNA, 75 bp, synthetic construct
  source 1..75: mol_type = other DNA
aattcacgaacgttcccgaaatatcgataacagacgctctctggggcattgggagggcgatttagtctcaggtac

SEQ ID NO: 1132 - DNA, 75 bp, synthetic construct
  source 1..75: mol_type = other DNA
ctgtacagggaaatcactaccccgtttctggtacggggattttttcccgacgttctatgcctgtcatcttactgt

SEQ ID NO: 1133 - DNA, 75 bp, synthetic construct
  source 1..75: mol_type = other DNA
ttgcgacggaggcaatccgctggcctgaaagtgtggatgaacacaaaaaggcaaatgcctttgccggcagtgccc

SEQ ID NO: 1134 - DNA, 75 bp, synthetic construct
  source 1..75: mol_type = other DNA
acgtattaccactgtcagcaacagcgacatcatcctgataaacgcagtgcacatgcacagcgcgatgactggctg

SEQ ID NO: 1135 - DNA, 75 bp, synthetic construct
  source 1..75: mol_type = other DNA
tacgccggagactctgcgtgtctgggttcgccagcatgagcgggataccgggggcggtgatggtgggctcaccag

SEQ ID NO: 1136 - DNA, 75 bp, synthetic construct
  source 1..75: mol_type = other DNA
ttattgtcctggcggttggctgtggtgcgctgtggctggcaacaaaccattaccgtgacaacgcgctcacctaca

SEQ ID NO: 1137 - DNA, 75 bp, synthetic construct
  source 1..75: mol_type = other DNA
tcaggcccaccgtgccggactgtgggtgataaagaccgaactgctggaaacgcagacggtggatttcacgctcgg

SEQ ID NO: 1138 - DNA, 75 bp, synthetic construct
  source 1..75: mol_type = other DNA
tggactgatacagaataacccgaacctgaaagcgggcggggaagcgaagggtatcatcaacgaagtgaccggcgg

SEQ ID NO: 1139 - DNA, 75 bp, synthetic construct
  source 1..75: mol_type = other DNA
ctcttcaccggcaccatcaaccgcacggaagtccatccccgtgaagtgattaaacgcgccctgtatcacaatgcc

SEQ ID NO: 1140 - DNA, 75 bp, synthetic construct
  source 1..75: mol_type = other DNA
tcgagttccgctgtgataacggagaaaaactgcgagtcacgttcgcgctggactgctgtgaccgtgaggcactgc

SEQ ID NO: 1141 - DNA, 75 bp, synthetic construct
  source 1..75: mol_type = other DNA
gtgctgaagcgtatactggtcgtgaagtgcaggatattcccggcgttcttgccgtgtttgcagaacgccgtaagg

SEQ ID NO: 1142 - DNA, 75 bp, synthetic construct
  source 1..75: mol_type = other DNA
gaatttcgtgatctgcttgttgagaaattcaaagacagcaaagtagaaacctttattggtactttcaccgcctga

SEQ ID NO: 1143 - DNA, 75 bp, synthetic construct
  source 1..75: mol_type = other DNA
gaaactgcatatgcaggcgaggtataaggccacacattatcccgtcaccgggggaaaggcaaatggacaggtatg

SEQ ID NO: 1144 - DNA, 75 bp, synthetic construct
  source 1..75: mol_type = other DNA
cctgaaacgaaggctcttgtggaattattggaagaagaaactacgggagattcccgtagtattcctgtcatcacc

SEQ ID NO: 1145 - DNA, 75 bp, synthetic construct
  source 1..75: mol_type = other DNA
ccgtgttcggtttccggcccttcaccatgagccattaccggcaggccgtccagatgctgaccgagctggcgatgc

SEQ ID NO: 1146 - DNA, 75 bp, synthetic construct
  source 1..75: mol_type = other DNA
atgacaaccgtttcgcataattccaccacaccttctgtttccgtaaccactgcatcagggaataacccacctcag

SEQ ID NO: 1147 - DNA, 75 bp, synthetic construct
  source 1..75: mol_type = other DNA
agccgcaggatatcgctgtctgacctgcgatttttcatgccgtccctgaccgcagaagaactgcacggcaaccgt

SEQ ID NO: 1148 - DNA, 75 bp, synthetic construct
  source 1..75: mol_type = other DNA
catctagaatttactgtcagcaccggcgttaaagtttacttctgcgatcctcagagtccttggcagcggggaaca

SEQ ID NO: 1149 - DNA, 75 bp, synthetic construct
  source 1..75: mol_type = other DNA
ggcactggcggcgtcactggatgcgcaggggtacagcgttaacgacatcatccatatcctgatggcggaaggagg

SEQ ID NO: 1150 - DNA, 75 bp, synthetic construct
  source 1..75: mol_type = other DNA
gacgctgtcatggttgattcaggtgcggtagttgagcagtacaaacgcatgcaaagccaggaatcaagcgcgaag

SEQ ID NO: 1151 - DNA, 75 bp, synthetic construct
  source 1..75: mol_type = other DNA
acaagctcaagcgggcgataattatttcagcagtgctgcatgtcatcttatttgcggcgctgatctggagttcgt

SEQ ID NO: 1152 - DNA, 75 bp, synthetic construct
  source 1..75: mol_type = other DNA
catactgctggcactgattattgtggtcctgctgactactgtcagcgtcagtgtgtatatactgtgtagctggtg

SEQ ID NO: 1153 - DNA, 75 bp, synthetic construct
  source 1..75: mol_type = other DNA
tgaaagatggcgcaggtaagccgatacaaaactgcaccattcagctaaaggccaggcgcaacagcaccacggtgg

SEQ ID NO: 1154 - DNA, 75 bp, synthetic construct
  source 1..75: mol_type = other DNA
aaccttttcagggaacaattccgttccgtgttttgcaacatggccgtgttctgcttgaagaggtgttcagaggta

SEQ ID NO: 1155 - DNA, 75 bp, synthetic construct
  source 1..75: mol_type = other DNA
gttcgcatgcctcgcctctgctctgcagaacgcctctctgaaagtatggtcgatgaaatatttcagaagggggct

SEQ ID NO: 1156 - DNA, 75 bp, synthetic construct
  source 1..75: mol_type = other DNA
atgactaaaaatactcgtttttcccccgaagtccgtcaacgggcagttcgtatggttctggaaagtcagggcgaa

SEQ ID NO: 1157 - DNA, 75 bp, synthetic construct
  source 1..75: mol_type = other DNA
agcgcaatgacattcttgcaggtatcttcgagccagccacgatcgacattgatctggctatcttgctgacaaaag

SEQ ID NO: 1158 - DNA, 75 bp, synthetic construct
  source 1..75: mol_type = other DNA
cagaaagcggggatcgcgtcattctgtccgtacaacattggtcccggtaagtgtttcccgtcgacgttttataaa

SEQ ID NO: 1159 - DNA, 75 bp, synthetic construct
  source 1..75: mol_type = other DNA
ggcactggcggcgtcactggacgcgcaggggtacagcgtcagtgacatcatccatatcctgatggcggaaggagg

SEQ ID NO: 1160 - DNA, 75 bp, synthetic construct
  source 1..75: mol_type = other DNA
gaaaacaaaggtatggcgtctgtcaggtattaaatcgatcctggaaaaaggtctggataaacaacctgttcagga

SEQ ID NO: 1161 - DNA, 75 bp, synthetic construct
  source 1..75: mol_type = other DNA
atgcagtatgcgaaacctgtcactctgaatgttgaagagtgcgaccgtctgtcttttctgccttacctgtttggc

SEQ ID NO: 1162 - DNA, 75 bp, synthetic construct
  source 1..75: mol_type = other DNA
tgtggggctgcaggtggatgcggagcagttcggcggccagcagatgacggtgaactaccatatccgcggtcgcat

SEQ ID NO: 1163 - DNA, 75 bp, synthetic construct
  source 1..75: mol_type = other DNA
agcagcgcgttgaagaagaacgccagcgccatatccgtgctgcccgtgccaaaacaccgggcgtgtctcgcgtgc

SEQ ID NO: 1164 - DNA, 75 bp, synthetic construct
  source 1..75: mol_type = other DNA
atgaacgacatctcttctgacgacatcttcctgctgaaacagcgcctggccgaacaggaagcgctgatccacgcc

SEQ ID NO: 1165 - DNA, 75 bp, synthetic construct
  source 1..75: mol_type = other DNA
atgaaatcattaaccacggaaaccgcactggatattctgattgcgtggctgcaggacaatatcgactgcgaatcg

SEQ ID NO: 1166 - DNA, 75 bp, synthetic construct
  source 1..75: mol_type = other DNA
aaggctttcagccgttctttgcctgccagacccgcgtgcgcgaccagagccgccgggaatacacaaaacacatgc

SEQ ID NO: 1167 - DNA, 75 bp, synthetic construct
  source 1..75: mol_type = other DNA
cccgccatcagcataccgtcacgctgtatgcaaaagggctgacctgcaaagccgataccctcagcagttgtggtt

SEQ ID NO: 1168 - DNA, 75 bp, synthetic construct
  source 1..75: mol_type = other DNA
ttcctcgccagaaggtggcgatcatctatgatgttggtatatcgacactgtataagaagtttccggtcggagata

SEQ ID NO: 1169 - DNA, 75 bp, synthetic construct
  source 1..75: mol_type = other DNA
tggctgaaggatctttctcatacgggcaggcggttgctgtcataaccgcttaccgcaatgtgtttatccaggatg

SEQ ID NO: 1170 - DNA, 75 bp, synthetic construct
  source 1..75: mol_type = other DNA
aatatgctgaaaggcgggatttccggtcgcagtgccagaggaaaacgtatccatacccgtgccattcacagcatc

SEQ ID NO: 1171 - DNA, 75 bp, synthetic construct
  source 1..75: mol_type = other DNA
aacgcgaaatagaccatctgcaggcacagctggataagctgcgccggatgaacgtcggcagctgctccgaaaaag

SEQ ID NO: 1172 - DNA, 75 bp, synthetic construct
  source 1..75: mol_type = other DNA
tctttgccgccctgcatgttgagggtgtgcagcgtgtggagctggcttctcctctggcggatgtggtcctgaaca

SEQ ID NO: 1173 - DNA, 75 bp, synthetic construct
  source 1..75: mol_type = other DNA
cgatgcgttgcacttgttgagcagattccagaaatcagagattcattcgacaaggttgcaaagcgcgttccggca

SEQ ID NO: 1174 - DNA, 75 bp, synthetic construct
  source 1..75: mol_type = other DNA
ccctatcttgctcaggcatggatagaaaatgaaaatcaggaaaaaattattacagggccggttattgccacccct

SEQ ID NO: 1175 - DNA, 75 bp, synthetic construct
  source 1..75: mol_type = other DNA
ccagaacggcttggccgtcgcgctgcgcgagttgggccgcatcgagcgcacgctgttcatcctcgactggctgca

SEQ ID NO: 1176 - DNA, 75 bp, synthetic construct
  source 1..75: mol_type = other DNA
ttcccttgtctggtgtgtgttgatcgtgtgtctcacactgttgatattcacttatctgacacgaaaatcgctgtg

SEQ ID NO: 1177 - DNA, 75 bp, synthetic construct
  source 1..75: mol_type = other DNA
cagaaagcggggatcgcgtcattctgtccgtacaacattggtcccggtaagtgtttcccgtcgacgttttacaga

SEQ ID NO: 1178 - DNA, 75 bp, synthetic construct
  source 1..75: mol_type = other DNA
ggaaagccttgcagaaggagaaaaaccgctgctccacagtgatcaagggtggcattaccggataaaaagttatca

SEQ ID NO: 1179 - DNA, 75 bp, synthetic construct
  source 1..75: mol_type = other DNA
attccagattatcaatgatgaattatatcttgatggcaacgctcgtcagaacctggccactttctgccagacctg

SEQ ID NO: 1180 - DNA, 75 bp, synthetic construct
  source 1..75: mol_type = other DNA
atggctacgtggcaacagggtattaattctggtggttttctggctggcatcggtacgcaaaatgagaatgcgcca

SEQ ID NO: 1181 - DNA, 75 bp, synthetic construct
  source 1..75: mol_type = other DNA
aaatgtggtggagaaagttatcgaaggggcttacgaagtggtgggggtttttgaccggattgaggaaaagcgtga

SEQ ID NO: 1182 - DNA, 75 bp, synthetic construct
  source 1..75: mol_type = other DNA
ttcaccgcgatgacgtataccaaaagcaaaacgtttaaaaccgaaaatggtgcccgtcgctggctggaaagaaac

SEQ ID NO: 1183 - DNA, 75 bp, synthetic construct
  source 1..75: mol_type = other DNA
gctactcccgtccctgatgaacaacgtatcagcttctggccgcagcattttggcctcattccacagtgggtgacc

SEQ ID NO: 1184 - DNA, 75 bp, synthetic construct
  source 1..75: mol_type = other DNA
gcgtaaccgctggttcagcatgatggcggggccatctgtacgcgtgaatgaatggttcagtgcttatgcgatggc

SEQ ID NO: 1185 - DNA, 75 bp, synthetic construct
  source 1..75: mol_type = other DNA
gaaaattcaacaggaaaaatcagcccggtcattgctgccattcatcgcgaatacaagcagacatggaaaacactg

SEQ ID NO: 1186 - DNA, 75 bp, synthetic construct
  source 1..75: mol_type = other DNA
aatcagtgaaaacaccgtaaataaagccctgagggttatggggtatgacacaacccaggatgtctgtggtcatgg

SEQ ID NO: 1187 - DNA, 75 bp, synthetic construct
  source 1..75: mol_type = other DNA
ttcgcagggcgttgtatatgcccgcaatggtagccaccagtaagactgagtggggacgggcgttccgcgaccgtc

SEQ ID NO: 1188 - DNA, 75 bp, synthetic construct
  source 1..75: mol_type = other DNA
cggaagtccatccccgggaagtgattaaacgcgccctgtatcacaatgccgctgccgtggtgctggcacacaatc

SEQ ID NO: 1189 - DNA, 75 bp, synthetic construct
  source 1..75: mol_type = other DNA
atagaaaagctaattcagattgagcgtaacgcgaaagcgcggatacgcagggcgacaaaatccagaactgaataa

SEQ ID NO: 1190 - DNA, 75 bp, synthetic construct
  source 1..75: mol_type = other DNA
tgtaagtataagtgccattgcccgggaattcaaaacctcgcggcaaaccattttaagagccaaagcaaaacttca

SEQ ID NO: 1191 - DNA, 75 bp, synthetic construct
  source 1..75: mol_type = other DNA
gggaggattacggtaaggacctgtggagtgcttatcagaccattcaggagaatatgctgaaaggcggaatttcag

SEQ ID NO: 1192 - DNA, 75 bp, synthetic construct
  source 1..75: mol_type = other DNA
gacaacatagtgttagtaaaaggactcaaaaaggttgtaaatgttaaattctccagaaacaaacatcttatagag

SEQ ID NO: 1193 - DNA, 75 bp, synthetic construct
  source 1..75: mol_type = other DNA
gccatgacgtataccaaaagcaaaacatttaaaaccgaaactggtgcgcgccgatggttggagaagcacacagta

SEQ ID NO: 1194 - DNA, 75 bp, synthetic construct
  source 1..75: mol_type = other DNA
caacacagatcccgtgctgcctgtccttcagaacgaagccagacaacaaaaacgtgggctctggtcagatgctga

SEQ ID NO: 1195 - DNA, 75 bp, synthetic construct
  source 1..75: mol_type = other DNA
cgcgcgtggcccaatggggctggaagcactgaccacttacaagtggatcggcattggtgattacaccattcgtgc

SEQ ID NO: 1196 - DNA, 75 bp, synthetic construct
  source 1..75: mol_type = other DNA
cacggggcacatcaacccaaaatatggcagcagcccaggacggactttctacacccacatctccgaccaatacgc

SEQ ID NO: 1197 - DNA, 75 bp, synthetic construct
  source 1..75: mol_type = other DNA
gtgcgggtattacttcgacctgttctggtaccggaactcgggctggtgatcgttaagccgggccgtgaatccatg

SEQ ID NO: 1198 - DNA, 75 bp, synthetic construct
  source 1..75: mol_type = other DNA
acgtccgtttaaattacgcctcagcattatcactggcgatcgtcctgtactggttctgcgcattattcagctgga

SEQ ID NO: 1199 - DNA, 75 bp, synthetic construct
  source 1..75: mol_type = other DNA
atgttccgttgtccgctttgtggcgcatctgcccgtatccgcaccagtcgtccggaaaatgattcaaacaccgtg

SEQ ID NO: 1200 - DNA, 75 bp, synthetic construct
  source 1..75: mol_type = other DNA
tgcatcatgtacttgatgtcatcgccgactggcctgtgaaccgggtgggtgctctgctcccgtggcgggttactc

SEQ ID NO: 1201 - DNA, 75 bp, synthetic construct
  source 1..75: mol_type = other DNA
tgactatgaggcgtatgcgcgggatttattcctggactccttcacctttattgacggtcatgtgttccgtcggtg

SEQ ID NO: 1202 - DNA, 75 bp, synthetic construct
  source 1..75: mol_type = other DNA
aatatgactaccttgaccgtcagggtgtttacaacggcagagataatttatcggaaaacagttatcgcattggtg

SEQ ID NO: 1203 - DNA, 75 bp, synthetic construct
  source 1..75: mol_type = other DNA
accggcaccgctggctgcaggtaacctggcatctgataccaataaagaattacttaatacacctgaagctttacc

SEQ ID NO: 1204 - DNA, 75 bp, synthetic construct
  source 1..75: mol_type = other DNA
gctgtttctggccggaagtgccggacttctgcagatcactgaaaatatccgctctgagcagtgccccggagtgac

SEQ ID NO: 1205 - DNA, 75 bp, synthetic construct
  source 1..75: mol_type = other DNA
accggcctgatgacccgcgacaattacagaacggtaaataacattaccctgggtaagtatccggaggcgaaatga

SEQ ID NO: 1206 - DNA, 75 bp, synthetic construct
  source 1..75: mol_type = other DNA
cctgaccacggtatatgccacgaaagcgcaggccatgcgcgccgctcaggcgaagtgggataaactgcaacgggg

SEQ ID NO: 1207 - DNA, 75 bp, synthetic construct
  source 1..75: mol_type = other DNA
cacaaaggcggagttatcccgcgtggagatagtcgagttgctcagtcaggagtctgccaaattccataatctagg

SEQ ID NO: 1208 - DNA, 75 bp, synthetic construct
  source 1..75: mol_type = other DNA
ctggagctagaaaaggccgatccggactttatgacggagcgcgaggacgttgtcagcgacgaaggacgagttaac

SEQ ID NO: 1209 - DNA, 75 bp, synthetic construct
  source 1..75: mol_type = other DNA
agcaggttgaatgcgattacatgttatctgcattaaggcgcatggagttgagagggcaccttaatgaaatatatg

SEQ ID NO: 1210 - DNA, 75 bp, synthetic construct
  source 1..75: mol_type = other DNA
tcagtgccggaggcggacagagccttcaggggcaggcagtgaacaccactctgaacggcggtgagcagtgggtac

SEQ ID NO: 1211 - DNA, 75 bp, synthetic construct
  source 1..75: mol_type = other DNA
ctatggcgcactgtccctgcgcgacgctgaggatgtgggctctgcactgaatgcactgaaaaatctgaacttcta

SEQ ID NO: 1212 - DNA, 75 bp, synthetic construct
  source 1..75: mol_type = other DNA
ccggtaatccgttcctgatgtcgtacttcactcagaccactgacggcagagtgaatctgatgcatcacaggaaag

SEQ ID NO: 1213 - DNA, 75 bp, synthetic construct
  source 1..75: mol_type = other DNA
cggggtatcctgcaggcggatgcgttcacaggttacgacaggttgttcagtgcagaacgtgaaggtggtgcactg

SEQ ID NO: 1214 - DNA, 75 bp, synthetic construct
  source 1..75: mol_type = other DNA
taatcagagcccgtgcagcagctaaacgagacagcagagttgcccgacagcgaattctgagcatgctattgcgaa

SEQ ID NO: 1215 - DNA, 75 bp, synthetic construct
  source 1..75: mol_type = other DNA
ccggaacaacgtgattgaatgcgatcatggcaaactgaaacggataatcaacgccacgctgggatttaaatccat

SEQ ID NO: 1216 - DNA, 75 bp, synthetic construct
  source 1..75: mol_type = other DNA
gtccattattaccggctgcgggattacgccctgcagcatccggaatgcagcgccattatgcgcatcatcgactga

SEQ ID NO: 1217 - DNA, 75 bp, synthetic construct
  source 1..75: mol_type = other DNA
ggctgaaaatctgtccgctctggagcaggatatcaccaggctggaaaaagcagcggcattaagcattgccagaat

SEQ ID NO: 1218 - DNA, 75 bp, synthetic construct
  source 1..75: mol_type = other DNA
ctcgcaagaaattgatgcaatactgggatatgaatacggcccggttgccgttcaccgtgatgacatgattacccg

SEQ ID NO: 1219 - DNA, 75 bp, synthetic construct
  source 1..75: mol_type = other DNA
cactggcagaatggattgaagactgggccgactaccttgtgggctttgatgctaatggtgacgccattcaggcaa

SEQ ID NO: 1220 - DNA, 75 bp, synthetic construct
  source 1..75: mol_type = other DNA
ctcgcatgggtgccttccaactaaatgaatctttacttgaacgaatcacccgtaaattacgtgacggatggaaaa

SEQ ID NO: 1221 - DNA, 75 bp, synthetic construct
  source 1..75: mol_type = other DNA
atgaaaacattgtctcagaacaccacctcttcggcctgtgcaccggagactgacctgcaacaactggttgccacc

SEQ ID NO: 1222 - DNA, 75 bp, synthetic construct
  source 1..75: mol_type = other DNA
tgacctgcaacaactggttgccagcctcgtccctgatgaacaacgtatcagtttctggccgcagcactttggcct

SEQ ID NO: 1223 - DNA, 75 bp, synthetic construct
  source 1..75: mol_type = other DNA
gccgcagcgagtcaatgtggctggtgcgcggtggtaaggcagcgcagccggacggccacacgctggcgcggctgt

SEQ ID NO: 1224 - DNA, 75 bp, synthetic construct
  source 1..75: mol_type = other DNA
cgctgttcagcgagccgcatccttcccgtgagttttgtgtccagtacggcgaaaccgattacgatttcctgtgcc

SEQ ID NO: 1225 - DNA, 75 bp, synthetic construct
  source 1..75: mol_type = other DNA
aaaagcggggacagaatgatgcattccgctacccgcagggcgttaagctcgatcaggaaaacagccgtatttttc

SEQ ID NO: 1226 - DNA, 75 bp, synthetic construct
  source 1..75: mol_type = other DNA
cccgcacctcttcgctatcttcttctgacagttcccgccctctctcagcctcagcgttccccgacacactgcccg

SEQ ID NO: 1227 - DNA, 75 bp, synthetic construct
  source 1..75: mol_type = other DNA
ggaagtgacgaaggcaaaaccggtgacgcgcaccattacgtccgcgaacattgaccgcctgcgggttaccttcgg

SEQ ID NO: 1228 - DNA, 75 bp, synthetic construct
  source 1..75: mol_type = other DNA
tccccagatagccagtttaaagttgtctgatgtctctggtatttttacctcgggttatcactacaataagctgag

SEQ ID NO: 1229 - DNA, 75 bp, synthetic construct
  source 1..75: mol_type = other DNA
ggctggctacagtgccgggcgatatgcgttgtttttattataatgcagtaacgtatgaatataccggctggtctg

SEQ ID NO: 1230 - DNA, 75 bp, synthetic construct
  source 1..75: mol_type = other DNA
tgttgttgaccacgatcctggccgacgcgatcaacctgggcctgaccaagatggccgagtcctgccccggcacga

SEQ ID NO: 1231 - DNA, 75 bp, synthetic construct
  source 1..75: mol_type = other DNA
acactatcggcaggagacactctggttgtctggaagctggacaggttggggcgcagtatgcggcatcttgttacg

SEQ ID NO: 1232 - DNA, 75 bp, synthetic construct
  source 1..75: mol_type = other DNA
atgagtaccacaacacgaaaatttaaaaccattatcactgatactggtgccaaaaaattagctcaggcagccgcg

SEQ ID NO: 1233 - DNA, 75 bp, synthetic construct
  source 1..75: mol_type = other DNA
tactttcgaagcctacaaaaaagcggcgctggatgctgaatttgcatccctgtttgacaccctggactccaccaa

SEQ ID NO: 1234 - DNA, 75 bp, synthetic construct
  source 1..75: mol_type = other DNA
caacttgccaccgtcaaccgcatggcggcagccaacgacctgccggatgccatcatcaccgagtcgggcttgaag

SEQ ID NO: 1235 - DNA, 75 bp, synthetic construct
  source 1..75: mol_type = other DNA
ggcgtcaggcaaggccatcaacgccaaggtacgtctgtacgggcgcatcggtcaggcgctgatcgacgccaagca

SEQ ID NO: 1236 - DNA, 75 bp, synthetic construct
  source 1..75: mol_type = other DNA
ggaggacctgcagagcctggtgggggccacggtggtccgccgccgggtgtatgcccgttttctggatgcggtgaa

SEQ ID NO: 1237 - DNA, 75 bp, synthetic construct
  source 1..75: mol_type = other DNA
aacgcgatggcggagagcatcaatggcctttacaaagcggaggtaatacaccgtaagagctggaaaaaccgtgca

SEQ ID NO: 1238 - DNA, 75 bp, synthetic construct
  source 1..75: mol_type = other DNA
tgattcagcgttatacggaagctgaaatggcggtgctggacggaaaatccgtcacctttaatggtcagcagatga

SEQ ID NO: 1239 - DNA, 75 bp, synthetic construct
  source 1..75: mol_type = other DNA
agaggccggttcagagatgcggatgcgtaccctctggaccaggcctttccgctgctgatgaaacaactgaaatta

SEQ ID NO: 1240 - DNA, 75 bp, synthetic construct
  source 1..75: mol_type = other DNA
cctcattcagcgggccctgaaaaccctggaccgtcatcttcatgagcccggcgtggccttcacctccacgcatgc

SEQ ID NO: 1241 - DNA, 75 bp, synthetic construct
  source 1..75: mol_type = other DNA
tttgcgaagagtgtgacgcgccaatacctgctgcccgtcgtgcggcttatccgtcagccacgcgttgtgtttcct

SEQ ID NO: 1242 - DNA, 75 bp, synthetic construct
  source 1..75: mol_type = other DNA
aataataccacgcaggttgcgaccactgcgtttgtacaggcggcactgacggcccttattaatggtgcgccagcc

SEQ ID NO: 1243 - DNA, 75 bp, synthetic construct
  source 1..75: mol_type = other DNA
cggcggcgtatttgaaaccaaaatcggcgcagttctcagtgaagtcgcttccggtgtgatgaacacgaaaaccaa

SEQ ID NO: 1244 - DNA, 75 bp, synthetic construct
  source 1..75: mol_type = other DNA
aaagcctgtacaaaatgtgactgcatcgttgaagcaccggcaccatcccgtccgatagagcgtggtatcgcgggc

SEQ ID NO: 1245 - DNA, 75 bp, synthetic construct
  source 1..75: mol_type = other DNA
agcgcaatgacattcttgcgggtatcttcgagccagccatgatcgacattgatctagctatcctgcttacaaaag

SEQ ID NO: 1246 - DNA, 75 bp, synthetic construct
  source 1..75: mol_type = other DNA
ccggaatactgggataacggaattacagcggcattgctgaattatgacttcagtggtaatcgggtgcgcgacagc

SEQ ID NO: 1247 - DNA, 75 bp, synthetic construct
  source 1..75: mol_type = other DNA
gcatggcgatgaatgcctgggcgcatccggacggcgaaaaagtaccggctgcgaaaattaccaaagcgtatttcg

SEQ ID NO: 1248 - DNA, 75 bp, synthetic construct
  source 1..75: mol_type = other DNA
tgacgcgcagcacccgggccggatggtggcgcaccgttacgcgggaaggccggagatgcgctaccgctacgacga

SEQ ID NO: 1249 - DNA, 75 bp, synthetic construct
  source 1..75: mol_type = other DNA
agcgggcggtgaagccctgcctgtcacccgtggctgtctggcaaatgttactgacacgtctgctggaacagcact

SEQ ID NO: 1250 - DNA, 75 bp, synthetic construct
  source 1..75: mol_type = other DNA
gtgtcagacacactccccgggacaacacttcccgacgacaatcacgaccgcccctggtgggggctgccctgcacc

SEQ ID NO: 1251 - DNA, 75 bp, synthetic construct
  source 1..75: mol_type = other DNA
atgaaacgtattttacctctgatactggctctggttgccggcatggcacaggctgacagcaacagtgattaccgg

SEQ ID NO: 1252 - DNA, 75 bp, synthetic construct
  source 1..75: mol_type = other DNA
gcgcactgcttgccggtgaggaaaacgcaaggctgcgtgcaacccactggttacatgagagggacctgaaagtat

SEQ ID NO: 1253 - DNA, 75 bp, synthetic construct
  source 1..75: mol_type = other DNA
cgggcattgcctacggcacctccgcaggcagtgctggctactggtttttacagtggcttgatcaggtcagtccgt

SEQ ID NO: 1254 - DNA, 75 bp, synthetic construct
  source 1..75: mol_type = other DNA
tgttcctgcctctgaacttgctgccgccatgaagcagattaaagaactccagcgcctgctcggcaagaaaacgat

SEQ ID NO: 1255 - DNA, 75 bp, synthetic construct
  source 1..75: mol_type = other DNA
tcagcatggctggtaaataactggtatcccacagcaagtatcagcgatttgctggttgtggtgatgaagaaagcc

SEQ ID NO: 1256 - DNA, 75 bp, synthetic construct
  source 1..75: mol_type = other DNA
gctgcggcagcacaaggtgtggtaaacgccgcaacccaacaaccagttcctgcacaaattgccattgcaaatgcc

SEQ ID NO: 1257 - DNA, 75 bp, synthetic construct
  source 1..75: mol_type = other DNA
tttaaactatcactggttttattctgaactaaaacgtcacaatgtctcacattacatttactatttagccacaga

SEQ ID NO: 1258 - DNA, 75 bp, synthetic construct
  source 1..75: mol_type = other DNA
ccagacagccatggtcctgccgcacgtcaagatcaccgaactgctgctcgaagtcgatgagtggacgggcttcac

SEQ ID NO: 1259 - DNA, 75 bp, synthetic construct
  source 1..75: mol_type = other DNA
gggactgtggaaacgcgattactcataatacagtgtgttgcccgtattgtggttctgtcgaccccttcggctatt

SEQ ID NO: 1260 - DNA, 75 bp, synthetic construct
  source 1..75: mol_type = other DNA
ggcatgacatgccaaatgaccctaagtggcgaacaattgccagggtgtcagggcagccaattgcaacagtgatgg

SEQ ID NO: 1261 - DNA, 75 bp, synthetic construct
  source 1..75: mol_type = other DNA
aaatacagaggtgtcatcgacggaatgcctgcatggattgatattccaccgccaactcatgaggaacaaattgcc

SEQ ID NO: 1262 - DNA, 75 bp, synthetic construct
  source 1..75: mol_type = other DNA
gctggattatctggacgcactggaactggtcgatacttccggtgcgccagatattgaatggcctacgcctccggc

SEQ ID NO: 1263 - DNA, 75 bp, synthetic construct
  source 1..75: mol_type = other DNA
atgagcggtaagcgttatcccgaagagtttaaaactgaagcagtcaaacaggttgttgatcgcggttattctgtt

SEQ ID NO: 1264 - DNA, 75 bp, synthetic construct
  source 1..75: mol_type = other DNA
ttcttacctaagcctggcggtgggatgaacctgttaatcacctcagtggatggtgataaaaccgcaggcgcggcg

SEQ ID NO: 1265 - DNA, 75 bp, synthetic construct
  source 1..75: mol_type = other DNA
tactcggttataccgaacaaaaagtgaaatttcgtgcgctgtttctggagctgtttttccgccgtacggtgaatt

SEQ ID NO: 1266 - DNA, 75 bp, synthetic construct
  source 1..75: mol_type = other DNA
agactgatatcaccgatgggataaggctgtctgattggtattataaatataagaagtcatcagagagtaacgtaa

SEQ ID NO: 1267 - DNA, 75 bp, synthetic construct
  source 1..75: mol_type = other DNA
catcagcagcaaaagtgcgacggcagaagaagccctgaagcgaatcagtgaactgtacgccatcgaggatgaaat

SEQ ID NO: 1268 - DNA, 75 bp, synthetic construct
  source 1..75: mol_type = other DNA
catcagctctacattccgcatattttcagctacctgaatgaagatattgattttgtgctgaatgagctgaaagcc

SEQ ID NO: 1269 - DNA, 75 bp, synthetic construct
  source 1..75: mol_type = other DNA
accctgccgggttacaccgaatatggccgggacaacggcatccgtctgtctgccgtgtggctgacgcacgacccg

SEQ ID NO: 1270 - DNA, 75 bp, synthetic construct
  source 1..75: mol_type = other DNA
ctatgacgcgctcaagccgatgatcggcggcacgctcaacatcaagcacgtccgcgcccattgggacgaaatcct

SEQ ID NO: 1271 - DNA, 75 bp, synthetic construct
  source 1..75: mol_type = other DNA
tggctgcactcctgctgtttctggtggtgatggtggatttcaccagcagaatcatgtcggtgctggcggatgggg

SEQ ID NO: 1272 - DNA, 75 bp, synthetic construct
  source 1..75: mol_type = other DNA
cataaattccgctgtgtgccacatctgacaggacggcgctttgagcacggggtgacggactgttacacgctgttc

SEQ ID NO: 1273 - DNA, 75 bp, synthetic construct
  source 1..75: mol_type = other DNA
accattccgcaaagccacatatacccacttccctgaatatatcgacccgcgcctgcgtaattaccgctcacgcta

SEQ ID NO: 1274 - DNA, 75 bp, synthetic construct
  source 1..75: mol_type = other DNA
cgtcatggaggccatgaagcacatcaatgactggcttggcgaagaggtgatccgctttaacccttacgcactgtt

SEQ ID NO: 1275 - DNA, 75 bp, synthetic construct
  source 1..75: mol_type = other DNA
cgctgaatatgctctatatcgacccgcagaacagcagccagattattgctgaacaggtgatccctgaaaacgagg

SEQ ID NO: 1276 - DNA, 75 bp, synthetic construct
  source 1..75: mol_type = other DNA
ctggaccgccatcttcatgaacccggcgtggccttcacctccacccgtgcggcacgggaatggctgattctgaac

SEQ ID NO: 1277 - DNA, 75 bp, synthetic construct
  source 1..75: mol_type = other DNA
gttaagttcgatattggtgctgatgggactgtgacacggatcgtttttctccgctcagagcctcataatttgttt

SEQ ID NO: 1278 - DNA, 75 bp, synthetic construct
  source 1..75: mol_type = other DNA
gaggaggcgctgaaacggatcggcgagctgtatgccatcgagtcggagctcagaggtaaaagagcagaggaacgg

SEQ ID NO: 1279 - DNA, 75 bp, synthetic construct
  source 1..75: mol_type = other DNA
ataacattgccgaaaacgccctacgactggtcagtctggggagaaaaaactggctgttcttcggctcggatcatg

SEQ ID NO: 1280 - DNA, 75 bp, synthetic construct
  source 1..75: mol_type = other DNA
aatacatgcgaaaaacctaaaagagcttgccgataaaaaaggccaatttattgctatttaccgcggctttttatt

SEQ ID NO: 1281 - DNA, 75 bp, synthetic construct
  source 1..75: mol_type = other DNA
tgctgcgcagacctgaatattcccttctttgtggatgccggaaacaaaaagctggtcttctggtttgtacgtgtt

SEQ ID NO: 1282 - DNA, 75 bp, synthetic construct
  source 1..75: mol_type = other DNA
ggattcagacaatggattttcggcgcttgaacaggcgctgctgcggtatatcgccgccggtcttggcgtttccta

SEQ ID NO: 1283 - DNA, 75 bp, synthetic construct
  source 1..75: mol_type = other DNA
ggcagtcaggtaaaactgctctggtccaccggcgatggtctgtgcctgctgacaaagcgactagaacgtggtcgc

SEQ ID NO: 1284 - DNA, 75 bp, synthetic construct
  source 1..75: mol_type = other DNA
atggacacctcacttgctcatgagaatgcccgcctgcgggcactgttgcagacgcaacaggacaccatccgccag

SEQ ID NO: 1285 - DNA, 75 bp, synthetic construct
  source 1..75: mol_type = other DNA
tggcggatgtcatggtggatgatgccgcattaatgatggcttcagcggggattccgggaggtgtgagatatgtcc

SEQ ID NO: 1286 - DNA, 75 bp, synthetic construct
  source 1..75: mol_type = other DNA
aacttcggcagtcgttccgaaaaggtatcccgccgtatcgcgcaaatggaagctgacctgaacctgctgcagcag

SEQ ID NO: 1287 - DNA, 75 bp, synthetic construct
  source 1..75: mol_type = other DNA
cctcatcaaccgtggctccataactttctggctggatgatgaagctattcaggcctggtatgagtcagcaacacc

SEQ ID NO: 1288 - DNA, 75 bp, synthetic construct
  source 1..75: mol_type = other DNA
cggctggataatggcggaaacgatgaaggatttggccccctcaccatcactctgcaactcaaagacaaatatggt

SEQ ID NO: 1289 - DNA, 75 bp, synthetic construct
  source 1..75: mol_type = other DNA
ttattgaaaaacagattgaatgcctggtaaatcaactcaggcaatcagggttattaaaaactcattcagagttga

SEQ ID NO: 1290 - DNA, 75 bp, synthetic construct
  source 1..75: mol_type = other DNA
atgtcagatatcacaatctcccgcccggaactggtcaacggacatacggacgttatctgctcaaccagtatccgc

SEQ ID NO: 1291 - DNA, 75 bp, synthetic construct
  source 1..75: mol_type = other DNA
atgtcccgttttgtcctcggtaactgcatcgatgttatggcccgtattcctgataacgccattgatttcatcctc

SEQ ID NO: 1292 - DNA, 75 bp, synthetic construct
  source 1..75: mol_type = other DNA
tggtgaaacccgcgtgttacgtccgggctacgtcaagccgaaacacgaatttaattaccagcaggcggttgagcg

SEQ ID NO: 1293 - DNA, 75 bp, synthetic construct
  source 1..75: mol_type = other DNA
catgatctggaaacgattttctgggggtggtgcgggcgttttccatcactgtcatcatttgaccggtttttctgg

SEQ ID NO: 1294 - DNA, 75 bp, synthetic construct
  source 1..75: mol_type = other DNA
ggggagtctgctgtttgggctgctgacatatctgacgaacctgtatttcaagattaaagaagaccggcgtaaggc

SEQ ID NO: 1295 - DNA, 75 bp, synthetic construct
  source 1..75: mol_type = other DNA
cccctggtgggggctgccctgcaccgtgacgccctgtttcggggcacgtctggtgcaggagggtaaccggttgca

SEQ ID NO: 1296 - DNA, 75 bp, synthetic construct
  source 1..75: mol_type = other DNA
cccgctgctttcccggcaggatttctcggcgctggcgctggactggtttgtgttcggtaacgcattccttgagct

SEQ ID NO: 1297 - DNA, 75 bp, synthetic construct
  source 1..75: mol_type = other DNA
aaaaatcagtccagaccaggagctaactcccgcaacggttattccacaaagaccgttatcacaggcgacggtcca

SEQ ID NO: 1298 - DNA, 75 bp, synthetic construct
  source 1..75: mol_type = other DNA
gttaaatggctggagcctggcgggagaacaccgccactggatgatacctctcagaaagggagcgcaatatgaaga

SEQ ID NO: 1299 - DNA, 75 bp, synthetic construct
  source 1..75: mol_type = other DNA
accagcctgcaaccactgattgagagcttcacacacccgaacgcgattgtgctggacccgtttgcaggcagcggc

SEQ ID NO: 1300 - DNA, 75 bp, synthetic construct
  source 1..75: mol_type = other DNA
atggcactgactgacgcaaaaatccgggctgcaaagcccactgacaaggcttataaactcactgacggggctggc

SEQ ID NO: 1301 - DNA, 75 bp, synthetic construct
  source 1..75: mol_type = other DNA
accgtgtatgaagattctcaaccggggacgctgaatgattttctcggtgccatgtcggaggatgacgtccggccg

SEQ ID NO: 1302 - DNA, 75 bp, synthetic construct
  source 1..75: mol_type = other DNA
gtgacgcgcactatctttaccggtatgaccgttacggcaggctgacggagaaaaccgacctcatcccggaagggg

SEQ ID NO: 1303 - DNA, 75 bp, synthetic construct
  source 1..75: mol_type = other DNA
gttgagtcttatctgcagcatcagtactcctttaagattgaaaatcctgccaataagcacgagcgtcctcatcat

SEQ ID NO: 1304 - DNA, 75 bp, synthetic construct
  source 1..75: mol_type = other DNA
gggccattgccctgatggacagcaaaaagatgtggcggagcaattatgcccctcctcttctgcgtattctctggc

SEQ ID NO: 1305 - DNA, 75 bp, synthetic construct
  source 1..75: mol_type = other DNA
atgtgaacggcgttccgcttcgtgagagtctcagctacaacgggggcggcgcaggatttggcgggcaaatggcgg

SEQ ID NO: 1306 - DNA, 75 bp, synthetic construct
  source 1..75: mol_type = other DNA
gcaagagaggccggtcacgctgtccgtgagatggagcggtggatggtgccgaacaaactccgggaggcagcgtga

SEQ ID NO: 1307 - DNA, 75 bp, synthetic construct
  source 1..75: mol_type = other DNA
gccgtaagcgtggatgtgcaggtacaaccacagacagttctggttactgcgataaacatcgtggcgaaggatggg

SEQ ID NO: 1308 - DNA, 75 bp, synthetic construct
  source 1..75: mol_type = other DNA
gttaccgtcacatattttcagcgagatcgttatggtcgtattctcgggcaggtttatgcaccagacggaatgaat

SEQ ID NO: 1309 - DNA, 75 bp, synthetic construct
  source 1..75: mol_type = other DNA
ctatccgcgtgaccgtgttcttcgacggttgttcaaactcaacaatgagtttcagcgcaacagaattatccggag

SEQ ID NO: 1310 - DNA, 75 bp, synthetic construct
  source 1..75: mol_type = other DNA
ctcacccggttactggaccagcattacagccttacgctgaatgacacaccgttcgtggatgaacgcgtgattgag

SEQ ID NO: 1311 - DNA, 75 bp, synthetic construct
  source 1..75: mol_type = other DNA
taacatgacgctggaaaatccatcgccagagctgctcacggtgttgatccgcgaactgagcgggaggggaagatg

SEQ ID NO: 1312 - DNA, 75 bp, synthetic construct
  source 1..75: mol_type = other DNA
acggcggtgttctgaacggtgttccttctgcatatcactggtatacagaacggtatggcgtgaagtggccttgtg

SEQ ID NO: 1313 - DNA, 75 bp, synthetic construct
  source 1..75: mol_type = other DNA
cctcgacgatctgctcaagcgccgggacaacggcaagacgacctggttggcttggttgcgccagtctccggccaa

SEQ ID NO: 1314 - DNA, 75 bp, synthetic construct
  source 1..75: mol_type = other DNA
atgcgaattctgaactgttatatggcgaatgacagcaaaggccattttgttacggcgaaagaagcagcgaagcac

SEQ ID NO: 1315 - DNA, 75 bp, synthetic construct
  source 1..75: mol_type = other DNA
gtgaattatctctggctgaattatcctggtgggcggtccgcaatcaggtggcggacgcgctaccggaagcggtat

SEQ ID NO: 1316 - DNA, 75 bp, synthetic construct
  source 1..75: mol_type = other DNA
ttataaactcactgacggggctggcatgttcctgctggtacatcctaatggttcccgttactggcgtctccgtta

SEQ ID NO: 1317 - DNA, 75 bp, synthetic construct
  source 1..75: mol_type = other DNA
atgaaaaaatggatgttagccatctgcctgatgtttataaatgagatctgccaggccactgattgctttgatctt

SEQ ID NO: 1318 - DNA, 75 bp, synthetic construct
  source 1..75: mol_type = other DNA
taccgctgagtctgaaatctgtcagtgactccggtgagtttgaagggtatggctccgtctttggtgtaaaggaca

SEQ ID NO: 1319 - DNA, 75 bp, synthetic construct
  source 1..75: mol_type = other DNA
ctggttgttcatgccctgccaggtgaccgttacggtgtcgccgcaggtggtcgccgactggcagcactcaacatg

SEQ ID NO: 1320 - DNA, 75 bp, synthetic construct
  source 1..75: mol_type = other DNA
gcactgatttttgatgtgggtgtttccacaatttatagaaaatttccggcaaataagagtaatgaatccccctga

SEQ ID NO: 1321 - DNA, 75 bp, synthetic construct
  source 1..75: mol_type = other DNA
tccgcgatgtactggatacagacgtgccggacagtgaatgcgtttttgccgtggtgctgacccgtggggatgtgc

SEQ ID NO: 1322 - DNA, 75 bp, synthetic construct
  source 1..75: mol_type = other DNA
gtatgtctgagtttgttgtgaatgatgcacctgaacaggcagatgacgccgggccagcagagcctgtttctgcgg

SEQ ID NO: 1323 - DNA, 75 bp, synthetic construct
  source 1..75: mol_type = other DNA
cgggattatttcatcctcagagaacggctgatggcaatgcagaagcaactggaaggagcacaggaatatatccgt

SEQ ID NO: 1324 - DNA, 75 bp, synthetic construct
  source 1..75: mol_type = other DNA
atctgaacctgtttaacgacgggaacaactggcaggggatcgtagagtcgctgacgctgccgaaattcacccgca

SEQ ID NO: 1325 - DNA, 75 bp, synthetic construct
  source 1..75: mol_type = other DNA
accggcccgtgtttaccgggtggtgaacggtattgctgtactgccggtgaccggcacgctggtgcaccggctggg

SEQ ID NO: 1326 - DNA, 75 bp, synthetic construct
  source 1..75: mol_type = other DNA
gtgatgcgctgggagacgggaaaaaatccgcccaacacaaagaaaaacttcggctacctgatgtggcgtaaacgt

SEQ ID NO: 1327 - DNA, 75 bp, synthetic construct
  source 1..75: mol_type = other DNA
cgtttttatcttccgtgggcgtaatggcagtcaggtaaagctcctctggtctaccggcgatggactgtgtctgct

SEQ ID NO: 1328 - DNA, 75 bp, synthetic construct
  source 1..75: mol_type = other DNA
agcaggttgagagttatggcaggttcactggcgaacccgatgaacttcagctggcgcgttattttcatcttgatg

SEQ ID NO: 1329 - DNA, 75 bp, synthetic construct
  source 1..75: mol_type = other DNA
aatggaccattacgactctgacgcataccgtcagccccgataacggttttacaaccagtctggagcttgaagtga

SEQ ID NO: 1330 - DNA, 75 bp, synthetic construct
  source 1..75: mol_type = other DNA
tggcacttcatccgcctgccggacggtggcggttacatgatgccggatggcgaccgtttccacatggtgaacggt

SEQ ID NO: 1331 - DNA, 75 bp, synthetic construct
  source 1..75: mol_type = other DNA
aagatgtgctggatgtggcggtggccattgcggaggcagacggcgaaattgagccggaagagcgcaaggtgctgg

SEQ ID NO: 1332 - DNA, 75 bp, synthetic construct
  source 1..75: mol_type = other DNA
ccgcgagccttgatttgacaagggctgcggcctttgcaattcgccttgtggcggtcgctgttctgatttgggctg

SEQ ID NO: 1333 - DNA, 75 bp, synthetic construct
  source 1..75: mol_type = other DNA
tgcccgaaggccctttctcacgcgaacaggcggttgccgtcacaacagcttaccgcaatgtgcttattgaagatg

SEQ ID NO: 1334 - DNA, 75 bp, synthetic construct
  source 1..75: mol_type = other DNA
gatggttcaagccgccctacgctgtcgctgagtgcactgctgaagcagtatggtatccgcctgacggctaatcag

SEQ ID NO: 1335 - DNA, 75 bp, synthetic construct
  source 1..75: mol_type = other DNA
cagaaaggcatcttttcaaacacaaaagattccgaagaaggcttaacacatatactctcagagcatttcgagaat

SEQ ID NO: 1336 - DNA, 75 bp, synthetic construct
  source 1..75: mol_type = other DNA
agtaaacagcagcaacaaatgagttcgtcagagcgcgaaagcgaactggccgctgaaaatgtccgccttaaacga

SEQ ID NO: 1337 - DNA, 75 bp, synthetic construct
  source 1..75: mol_type = other DNA
cttcctcaccgaaacgcatttacagaaaaggtaatccgttaaccggagccgagaaacaacgcatatctgtttccc

SEQ ID NO: 1338 - DNA, 75 bp, synthetic construct
  source 1..75: mol_type = other DNA
aggcactcgatctgcctaccggcatcgagcggctggttcaccagaaccgcctgctcaagattgcccgcgagggcg

SEQ ID NO: 1339 - DNA, 75 bp, synthetic construct
  source 1..75: mol_type = other DNA
aagtataaggccatgctcatgcaaatgtgtcatgaagatggcctgactcaggctgaagttctgaccgcactgata

SEQ ID NO: 1340 - DNA, 75 bp, synthetic construct
  source 1..75: mol_type = other DNA
aaagatgatttgacacagctttgtaaggattcgggcttaactcaaaaagaaatgatagagcactggattttgaaa

SEQ ID NO: 1341 - DNA, 75 bp, synthetic construct
  source 1..75: mol_type = other DNA
atatgaagtgaatgccacgcatgaagaattcaccgttgagtgtgtgatgaatactgataaatgccgaatggtatc

SEQ ID NO: 1342 - DNA, 75 bp, synthetic construct
  source 1..75: mol_type = other DNA
cattggggtgttgccgcgctcgcgctgaccggcttgttcgttctggccgtaacgcggctgctgcgcgccttccgg

SEQ ID NO: 1343 - DNA, 75 bp, synthetic construct
  source 1..75: mol_type = other DNA
ccgtaattttagaggcgcaggatgtgttgataacctacagaggaaaactaccgggaataattactggttctctga

SEQ ID NO: 1344 - DNA, 75 bp, synthetic construct
  source 1..75: mol_type = other DNA
tcaggcagagtatgagtcggcgtggaaactgctgggataacagcccaatggagcgcttcttcaggagtctgaaga

SEQ ID NO: 1345 - DNA, 75 bp, synthetic construct
  source 1..75: mol_type = other DNA
ctcacccgactgctggaccagcactacggcctcacgctgaatgacacaccgttcgccgatgaacgtgtgattgag

SEQ ID NO: 1346 - DNA, 75 bp, synthetic construct
  source 1..75: mol_type = other DNA
gtcgcctaaacataatctgtcgcgagtgccggaagagcgaagttatgcagcgcatactggctttctatcagggta

SEQ ID NO: 1347 - DNA, 75 bp, synthetic construct
  source 1..75: mol_type = other DNA
ggacggtgagggttgtgtgccgtgagtggagtgtcacggataatgcccggtacagtgatttcagttgcacgatag

SEQ ID NO: 1348 - DNA, 75 bp, synthetic construct
  source 1..75: mol_type = other DNA
accttgcagaggcgttcgagcattataacgaatggcatccgcatagtgcactgggttatcgctcgccacgggaat

SEQ ID NO: 1349 - DNA, 75 bp, synthetic construct
  source 1..75: mol_type = other DNA
aatcagcgatggtgctctgacgggttcgagttctgctgtgataacggagagagactgcgtgtcacgttcgcgctg

SEQ ID NO: 1350 - DNA, 75 bp, synthetic construct
  source 1..75: mol_type = other DNA
acgtcgggctggatgtgcataaagaaacgttggcggttgctattgctgcacctgaacggcttggcgaagttcgtt

SEQ ID NO: 1351 - DNA, 75 bp, synthetic construct
  source 1..75: mol_type = other DNA
accccggagtccattattgtcgaaggggattatttccctgccccggccattcatttaattgataatctgagagta

SEQ ID NO: 1352 - DNA, 75 bp, synthetic construct
  source 1..75: mol_type = other DNA
tcaccggcgtgacggacggtgccgggcgggagttccgtctggtgctgaccacgcaggcgcagcgtgcggaagagg

SEQ ID NO: 1353 - DNA, 75 bp, synthetic construct
  source 1..75: mol_type = other DNA
acccgccgacggtgaacacttactggcgacgccgtggcagcacatattttatctcggaggagggaaagcgttatc

SEQ ID NO: 1354 - DNA, 75 bp, synthetic construct
  source 1..75: mol_type = other DNA
agtcgccggatttcgctgaccgatctccgcttttttgcccctgcgctgacgaaggaggaatttcatggcaaccgt

SEQ ID NO: 1355 - DNA, 75 bp, synthetic construct
  source 1..75: mol_type = other DNA
ttcaaatttctgaccggaccagaaaccgtgctggcactactggatgaacgggaaagaaaccagcaatacatcaaa

SEQ ID NO: 1356 - DNA, 75 bp, synthetic construct
  source 1..75: mol_type = other DNA
tgcggaaaagctgacacacaaactgaaagagggctggcagccatacggcggaccggttgccattacgccgtacac

SEQ ID NO: 1357 - DNA, 75 bp, synthetic construct
  source 1..75: mol_type = other DNA
attctcaacacattacattagccgacaattttaaacaaaaaagtgaagttttaaatacctggcgtgttggaatga

SEQ ID NO: 1358 - DNA, 75 bp, synthetic construct
  source 1..75: mol_type = other DNA
gcttctggccgcagcattttggcctcattccacagtgggtcaccctggaaccccgtgtcttcggctggatggacc

SEQ ID NO: 1359 - DNA, 75 bp, synthetic construct
  source 1..75: mol_type = other DNA
tattcctgttcacgataccattgccagagttgtatcctgtatcagtcctgcaaaatttcacgagtgctttattaa

SEQ ID NO: 1360 - DNA, 75 bp, synthetic construct
  source 1..75: mol_type = other DNA
ggcattgccctgcaaattggatgtgtccgttttctgggcaccttcctcaccgatatgaatcatattccttccggc

SEQ ID NO: 1361 - DNA, 75 bp, synthetic construct
  source 1..75: mol_type = other DNA
tcggtaacctcgcgcatacaaccgggcagtgatgtgattgtctgcgctgaaatggacgaacagtggggctacgtc

SEQ ID NO: 1362 - DNA, 75 bp, synthetic construct
  source 1..75: mol_type = other DNA
tcctgtctgataaatcactgaccggctctgctggcgggggtaataacagaatgaaatttaatatactgccgctgg

SEQ ID NO: 1363 - DNA, 75 bp, synthetic construct
  source 1..75: mol_type = other DNA
tcatgcggatccgctggcgttcgaagaaaagcatggttctcaggttgatttaatttttcgttttcttgatcacgc

SEQ ID NO: 1364 - DNA, 75 bp, synthetic construct
  source 1..75: mol_type = other DNA
gcagaaactggtgatgaccgacgccggcatcgaccggcgctactacgaactgtgcgcgctgtccgagttgaagaa

SEQ ID NO: 1365 - DNA, 75 bp, synthetic construct
  source 1..75: mol_type = other DNA
ggcgcggggatgagtaccgtcagaacggctatcgcacggctggaagcagaaggctggttaacgcgtaaggcgcgt

SEQ ID NO: 1366 - DNA, 75 bp, synthetic construct
  source 1..75: mol_type = other DNA
agggtaaggttgtaaatgtaagattttcaaaaaataaatgccttatagaagccaccttaaaaggattcaaatcag

SEQ ID NO: 1367 - DNA, 75 bp, synthetic construct
  source 1..75: mol_type = other DNA
cgccattaaaaaggagaatgttggcgaattttctctgcggggcgtttgtgtttctgacggaaatacgaaggagga

SEQ ID NO: 1368 - DNA, 75 bp, synthetic construct
  source 1..75: mol_type = other DNA
tgcgtgaggtggcggaacgtgcaattccagcaatggaacgcctgttaatgttgccagctgatgatgacttgttaa

SEQ ID NO: 1369 - DNA, 75 bp, synthetic construct
  source 1..75: mol_type = other DNA
tgctgacaatcaggcagtggcgcgaaacatacggacctggtagcaacgttgtactgccagcagaagaagcggaag

SEQ ID NO: 1370 - DNA, 75 bp, synthetic construct
  source 1..75: mol_type = other DNA
ccgctaaaaattacccatatggcggtcggcgatggcggcggagtattgccaacgccagactcaaagcagactgca

SEQ ID NO: 1371 - DNA, 75 bp, synthetic construct
  source 1..75: mol_type = other DNA
ggacagcaacgtctggctgccgtacagcgggccatgcagcagggggccgcaaatgatgactggtttatgccggag

SEQ ID NO: 1372 - DNA, 75 bp, synthetic construct
  source 1..75: mol_type = other DNA
tcgtgtttcacgcatcacccgcacggcttccggtgctaatgctggcggtgggaacaaaaccgatcgcaatccgaa

SEQ ID NO: 1373 - DNA, 75 bp, synthetic construct
  source 1..75: mol_type = other DNA
ccattaccccggaacaaattgaaatccgtgagctcaggaaaaagctacaacgtattgaaatggaaaatgaaatat

SEQ ID NO: 1374 - DNA, 75 bp, synthetic construct
  source 1..75: mol_type = other DNA
gagggaacggtcatccacattgtgccgcgactggccggggccggaaagggtggactgcagattgtgctgggggcg

SEQ ID NO: 1375 - DNA, 75 bp, synthetic construct
  source 1..75: mol_type = other DNA
tgggaagggacatatcggcaggattttccccaccacgtcgcatgccgatttcggaggctgttaaaaaattcatgc

SEQ ID NO: 1376 - DNA, 75 bp, synthetic construct
  source 1..75: mol_type = other DNA
cacggggcggaaaacgactcgaacgggttccggagactatcatgaacgaagttcttggccgcctgtccactattc

SEQ ID NO: 1377 - DNA, 75 bp, synthetic construct
  source 1..75: mol_type = other DNA
atgccactgctggataagctgcgtgagcagtacggggtcggaccggtatgcagcgaactgcatattgccccgtca

SEQ ID NO: 1378 - DNA, 75 bp, synthetic construct
  source 1..75: mol_type = other DNA
gcgaactccgtgcccgcgttgagaattttaatcgcctattcaccgagctactagaagctcgcaaacgtaacaaac

SEQ ID NO: 1379 - DNA, 75 bp, synthetic construct
  source 1..75: mol_type = other DNA
aacagcaatggctggttcccggatacagatggcgcactcatcaccggactgacctttcttgaccccaaagatgcc

SEQ ID NO: 1380 - DNA, 75 bp, synthetic construct
  source 1..75: mol_type = other DNA
atgacctacaaatacaaccccttctggcagcaacgtattcgtgagacggtgcggcacgcactgaatgttcatccc

SEQ ID NO: 1381 - DNA, 75 bp, synthetic construct
  source 1..75: mol_type = other DNA
gatgccttaccggaaagtgcagcccgtaaggcactgagattaccgaagcctgttgtgccgtctgtcacccgggaa

SEQ ID NO: 1382 - DNA, 75 bp, synthetic construct
  source 1..75: mol_type = other DNA
ttatccgtgaaggtgtgggcgttcatgcgtttaacggcgaaatctttgtgcagccggtctgggatacggaaacca

SEQ ID NO: 1383 - DNA, 75 bp, synthetic construct
  source 1..75: mol_type = other DNA
ggaagacctgcagagtctggtgggggccacggtggtccgccgccgggtgtatgcccgttttctggatgcggtgaa

SEQ ID NO: 1384 - DNA, 75 bp, synthetic construct
  source 1..75: mol_type = other DNA
cgtggggagctggcgtgcagtttaacccgaccgaatccgtggccattgatattgcttatgaaggctccggcagtg

SEQ ID NO: 1385 - DNA, 75 bp, synthetic construct
  source 1..75: mol_type = other DNA
ttcacaggtagcggatatctgttacgtaccgatgcgtggtcatatccggttctgcggcttaaacgcctggggctg

SEQ ID NO: 1386 - DNA, 75 bp, synthetic construct
  source 1..75: mol_type = other DNA
atctgcattaaggcgcatggagttgagagggcaccttaatgaaatatatgacggtgtaattgttaataagaaaga

SEQ ID NO: 1387 - DNA, 75 bp, synthetic construct
  source 1..75: mol_type = other DNA
gacatcccgtctttttccgttctgtaccggtaaataccgctggcacggcagtgctgaagcgtataccggtcgtga

SEQ ID NO: 1388 - DNA, 75 bp, synthetic construct
  source 1..75: mol_type = other DNA
ggcgaaaaggctgccctaattatcctcccgaatttaaacagctgctcgttgctgcctcctgtgaacccgggatat

SEQ ID NO: 1389 - DNA, 75 bp, synthetic construct
  source 1..75: mol_type = other DNA
gaaatggctgaccggcttcacccggcacgccgtatcctggggcgtgtgtcatccgaatatctactacttccataa

SEQ ID NO: 1390 - DNA, 75 bp, synthetic construct
  source 1..75: mol_type = other DNA
ttgtggcacccgctatccgcgaagcctgcggagttaatgcgactttcatcgcggacggggtgccacagtttgctc

SEQ ID NO: 1391 - DNA, 75 bp, synthetic construct
  source 1..75: mol_type = other DNA
cttgcttgcttcagcggtgtgctgcaagcggatgcgtacgccgggttcaacgagctgtatcgcaatggtgggata

SEQ ID NO: 1392 - DNA, 75 bp, synthetic construct
  source 1..75: mol_type = other DNA
actgtgcggaaatctgcatccatttccacttgctgtatggcataacttttcaggcggtccggatactgccgaaga

SEQ ID NO: 1393 - DNA, 75 bp, synthetic construct
  source 1..75: mol_type = other DNA
tactcgacagcgttggctgaactggtcaacgctcagtttcggcatccctttgccgggcactggggcgatggcacc

SEQ ID NO: 1394 - DNA, 75 bp, synthetic construct
  source 1..75: mol_type = other DNA
ccacgggcgagcaagatggttatatcgtgaccattgtgaattcaaaaataagctcttaagccgcgccaatgggta

SEQ ID NO: 1395 - DNA, 75 bp, synthetic construct
  source 1..75: mol_type = other DNA
ggggcttacgaggtggtgggcgtgtttgaccggatagaggagaagcatgatgccatgcagtcgctggtcctgtcg

SEQ ID NO: 1396 - DNA, 75 bp, synthetic construct
  source 1..75: mol_type = other DNA
gtttgatgaaatcaatatcgttcgtggtcagccagtatctggtggacgtctgggggtgaagatttaccccataat

SEQ ID NO: 1397 - DNA, 75 bp, synthetic construct
  source 1..75: mol_type = other DNA
tgtgtcatgaagatggtctgactcaggctgaagttctgaccgcactgataaaaagtgaagcgcaaaaacgatgca

SEQ ID NO: 1398 - DNA, 75 bp, synthetic construct
  source 1..75: mol_type = other DNA
atgacgagggcgtgtcatggcctgccattgaaactatccggcgtcagatcggtgcaagaagtgaatccacagtga

SEQ ID NO: 1399 - DNA, 75 bp, synthetic construct
  source 1..75: mol_type = other DNA
tcagaaatatacggccggcaaggtgtggagctgagccgttcactgctgtcgggctgggtggatgcatgctgccgg

SEQ ID NO: 1400 - DNA, 75 bp, synthetic construct
  source 1..75: mol_type = other DNA
gcgttaaaagcgcaattgcaggagatgtgtgaagctgagggtgttactcaggctgagatgattgccgaactgata

SEQ ID NO: 1401 - DNA, 75 bp, synthetic construct
  source 1..75: mol_type = other DNA
gatgcgcgatgcgcagttgtggcgtcacatcgaatttcaccctgaatgcaacgcgatttacgcggctctggactg

SEQ ID NO: 1402 - DNA, 75 bp, synthetic construct
  source 1..75: mol_type = other DNA
ctgaagcatggcgtgatgattatgaagcaggaaaaactccggtcgaagcatattgtgatgagtggggcgatgaat

SEQ ID NO: 1403 - DNA, 75 bp, synthetic construct
  source 1..75: mol_type = other DNA
cccctgcaaatttggcagtaaaattatcgtcaacaacctggtgaggtgggaccggtgggggtttcatcttatcac

SEQ ID NO: 1404 - DNA, 75 bp, synthetic construct
  source 1..75: mol_type = other DNA
taccgggataaaaagcagtaaaggtatccgggttccgaccacgaagaaatcactttcccaaatgaacagtgtgca

SEQ ID NO: 1405 - DNA, 75 bp, synthetic construct
  source 1..75: mol_type = other DNA
atgaaatccatggataagttaacaacgggtgtcgcctatggcacctccgcaggcagtgctggctactggttttta

SEQ ID NO: 1406 - DNA, 75 bp, synthetic construct
  source 1..75: mol_type = other DNA
acagtggtgggccgattttctggatgcaaacagagaaagatttatcagtccatttgaatatgcaaagattaataa

SEQ ID NO: 1407 - DNA, 75 bp, synthetic construct
  source 1..75: mol_type = other DNA
ccaaaacatggcatcgaaattgatttcattcgtatctctggtctgcgtggaaaaggtataaaagcactgatagct

SEQ ID NO: 1408 - DNA, 75 bp, synthetic construct
  source 1..75: mol_type = other DNA
tcagcacgcgcagccagcacgtcagccggacaggccgcgtcgtcggctcagtcagcgtcttccagcgcaggaacg

SEQ ID NO: 1409 - DNA, 75 bp, synthetic construct
  source 1..75: mol_type = other DNA
tctcgcttgatcctaccgcaggtcatgagcagcagggaacgcggccggtgctgattgtcacaccggcggccttta

SEQ ID NO: 1410 - DNA, 75 bp, synthetic construct
  source 1..75: mol_type = other DNA
agaggccggttcagcgacgcggatgcgtaccatctggaccaggcctttccgctgctgatgaaacaactggaactc

SEQ ID NO: 1411 - DNA, 75 bp, synthetic construct
  source 1..75: mol_type = other DNA
atgagcaagaaaaaagggaaaacaccgcaacctgcggcaaaaaaaatgaccgccagcgccccgaaaatggaggca

SEQ ID NO: 1412 - DNA, 75 bp, synthetic construct
  source 1..75: mol_type = other DNA
aacgcagacggcgtaccacacaggaaaagatcgcaattgttcagcagagctttgaaccagggatgacggtctccc

SEQ ID NO: 1413 - DNA, 75 bp, synthetic construct
  source 1..75: mol_type = other DNA
acatcaacctaaccggcgattacgtctggcggcagagccgcagactggaagacgggaagtttcggcccttacgga

SEQ ID NO: 1414 - DNA, 75 bp, synthetic construct
  source 1..75: mol_type = other DNA
cggcccgctgccgttcattctctcccgcacctacagcagttaccggacaaaaacgcccgcgccggtggggagcct

SEQ ID NO: 1415 - DNA, 75 bp, synthetic construct
  source 1..75: mol_type = other DNA
gggtgatgttccaagcgatcaaggcagtcattatacgagcaggcagttccggcagttactgtggcgataccggat

SEQ ID NO: 1416 - DNA, 75 bp, synthetic construct
  source 1..75: mol_type = other DNA
gccctttcgtaatggcagcgggatactgaatggcggggatttccggaccacggccagtatgagcatgatttataa

SEQ ID NO: 1417 - DNA, 75 bp, synthetic construct
  source 1..75: mol_type = other DNA
cacggtgctggcggatttacagcgcacatttgaggggaagatggccgcgcaggcacaagcgtttgaagagaaact

SEQ ID NO: 1418 - DNA, 75 bp, synthetic construct
  source 1..75: mol_type = other DNA
ctgctgtctccgctggaagaggcgcttcatggctatgtcatgactgacggcaaactccatgccgatgataccccg

SEQ ID NO: 1419 - DNA, 75 bp, synthetic construct
  source 1..75: mol_type = other DNA
gtgtggtgcggtgatgtgacctatagtgtgcccggagttcagggcgggcatggatgcttaaatgaaccgcgagtc

SEQ ID NO: 1420 - DNA, 75 bp, synthetic construct
  source 1..75: mol_type = other DNA
atgtaccagatggaaaaaatcacaacaggtgtgtcatacaccacgtcagcggtgggaacgggctactggttcctg

SEQ ID NO: 1421 - DNA, 75 bp, synthetic construct
  source 1..75: mol_type = other DNA
catgcagatgaattttcaccttactggtatgaactcggccttctgcattttcttaatggggaactggtaaaagct

SEQ ID NO: 1422 - DNA, 75 bp, synthetic construct
  source 1..75: mol_type = other DNA
acacctgcacatcactgaattccatgattcagggtgccacattccggtttgatgtcgggcagcagcgattgtacc

SEQ ID NO: 1423 - DNA, 75 bp, synthetic construct
  source 1..75: mol_type = other DNA
gcaggttatcgaacaggtcacgctgatgaaacccaatgccgggacgctgcgcggtgtcagtctggctgcggtcgc

SEQ ID NO: 1424 - DNA, 75 bp, synthetic construct
  source 1..75: mol_type = other DNA
atcgcctggcggttcgcttatcactcattatcagccgactgatggccggagaatctctgtcactaaaaacactgt

SEQ ID NO: 1425 - DNA, 75 bp, synthetic construct
  source 1..75: mol_type = other DNA
gctatgaatatatgctcaatgcgatgtgggtctcggcgatggtcggcggtctctgcgctttcctgtcatgctatc

SEQ ID NO: 1426 - DNA, 75 bp, synthetic construct
  source 1..75: mol_type = other DNA
cctggcagtgtctgccggtggtaaggcaacaggtgtcaccatgacatccggtggtgccctgattgcagacagtgg

SEQ ID NO: 1427 - DNA, 75 bp, synthetic construct
  source 1..75: mol_type = other DNA
tgaatttaccatgacgcagtccgcgccgctgatggtgttgccggacccggatgagtttgtggtggtacaggtgaa

SEQ ID NO: 1428 - DNA, 75 bp, synthetic construct
  source 1..75: mol_type = other DNA
gggaaaacaaccaccctgacggtttcttttgagccggaaagtgcaaccgacaagacgttcagagcggtttccgcc

SEQ ID NO: 1429 - DNA, 75 bp, synthetic construct
  source 1..75: mol_type = other DNA
gcttaaccgggcgatcaatgatgcggagtcggtactggggacaacccgacgtcgccgtcgtccgctgggagtgag

SEQ ID NO: 1430 - DNA, 75 bp, synthetic construct
  source 1..75: mol_type = other DNA
atgtcaaccggattacgtttcacactggaagtggacggcctgccgccggatgcttttgcggtggtttcctttcat

SEQ ID NO: 1431 - DNA, 75 bp, synthetic construct
  source 1..75: mol_type = other DNA
aatggtgctgtgatccatatcgtgccgcgtctggcaggagccaaaagtggcggtgtgtttcaggctgtgctgggg

SEQ ID NO: 1432 - DNA, 75 bp, synthetic construct
  source 1..75: mol_type = other DNA
aaccactggcacgtggagaataagctgcactggcgtctggacgtggtaatgaatgaagacgactgcaaaataaga

SEQ ID NO: 1433 - DNA, 75 bp, synthetic construct
  source 1..75: mol_type = other DNA
catgccggcctgaacaaaggtgaggcgcgcaactcgctggccagggcggtgttcttcaaccgccttggggaaatc

SEQ ID NO: 1434 - DNA, 75 bp, synthetic construct
  source 1..75: mol_type = other DNA
tgtaccgtgggcaggttccggcagtcggtacactctgctgttcgaatcgttcgtgctctcatggcttaaaatcag

SEQ ID NO: 1435 - DNA, 75 bp, synthetic construct
  source 1..75: mol_type = other DNA
atggatcaggtagtcatttttaaacaaatatttgataaagttcgaaacgatttaaactatcaatggttttattct

SEQ ID NO: 1436 - DNA, 75 bp, synthetic construct
  source 1..75: mol_type = other DNA
gtgaggcggcagaaaaggcaacaccagacgaatgggtcgcatttatttcgacggatactggtacttatgcggtgc

SEQ ID NO: 1437 - DNA, 75 bp, synthetic construct
  source 1..75: mol_type = other DNA
gtgacgcaggccgacaaaacggagccctgccatgaatgggatatggccggtattcagccttctcccgcacaggca

SEQ ID NO: 1438 - DNA, 75 bp, synthetic construct
  source 1..75: mol_type = other DNA
atgcctgtaacgaagtgtgaaccagaaaccacccgcaaagcaagccgtaaatatgcaaaaacgcaggaaacagtc

SEQ ID NO: 1439 - DNA, 75 bp, synthetic construct
  source 1..75: mol_type = other DNA
gtacacgtatacggaagccggtgaactgctggcggtatatgaccgcagcaatacgcaggtgcgcgctttcacgta

SEQ ID NO: 1440 - DNA, 75 bp, synthetic construct
  source 1..75: mol_type = other DNA
gcatggctacgaagaagagaagtggagaagaaataaatgaccgacaaatcttatgcgggatgggaattaaactac

SEQ ID NO: 1441 - DNA, 75 bp, synthetic construct
  source 1..75: mol_type = other DNA
atgtccttaaaaggtcttcgctttacgctggaggttgacggccaggagccggacacctttgcagtggtgaatttc

SEQ ID NO: 1442 - DNA, 75 bp, synthetic construct
  source 1..75: mol_type = other DNA
taaggagctggtcgaaattgacaccatcaacatgattgagaaggtgaacggcgtcgaccggctggagcaacaccg

SEQ ID NO: 1443 - DNA, 75 bp, synthetic construct
  source 1..75: mol_type = other DNA
acactgccaagccaaaagagaaggcttacaagttggctgatggtggtggtctgtacctcctggtaaaacctggtg

SEQ ID NO: 1444 - DNA, 75 bp, synthetic construct
  source 1..75: mol_type = other DNA
taacactgggcaactcttcgggttagatggtataaaagcagataatccaataaaagcaaagcaagggagttcaga

SEQ ID NO: 1445 - DNA, 75 bp, synthetic construct
  source 1..75: mol_type = other DNA
gccgttttatcccaaggcgggcaatggccgacggccctatccgctggagaccatgctgcgtattcactgcatgca

SEQ ID NO: 1446 - DNA, 75 bp, synthetic construct
  source 1..75: mol_type = other DNA
gtgctgacgcttcatcagaagggcactggtgcaacggaaattgctcatcagctcagtattgcccgctccacggtt

SEQ ID NO: 1447 - DNA, 75 bp, synthetic construct
  source 1..75: mol_type = other DNA
aagtcggttaatgtcagtttcaaaacgcccacccggggtgaaatcgcacacctggtaattgattccaccgggctg

SEQ ID NO: 1448 - DNA, 75 bp, synthetic construct
  source 1..75: mol_type = other DNA
gaacatgggacgaattgtcgttgacgtcgatggtgttaatctcgctgaactgattaacgtggtctgcgacaatgg

SEQ ID NO: 1449 - DNA, 75 bp, synthetic construct
  source 1..75: mol_type = other DNA
atgctgacgaaatatgcccttgtggcagtcatagtgctgtgtttgacggtactgggatttacgcttctggtcgga

SEQ ID NO: 1450 - DNA, 75 bp, synthetic construct
  source 1..75: mol_type = other DNA
tgaagaaaggtgatgcggctgaacatgcagagcaccatatgaaagacaaccgctgggtgcctggctggatgtgtg

SEQ ID NO: 1451 - DNA, 75 bp, synthetic construct
  source 1..75: mol_type = other DNA
attgtaggtgcaggtgttgatgatgttgccagaagtttattttttgcagttatcgtcattgctatatttcttatc

SEQ ID NO: 1452 - DNA, 75 bp, synthetic construct
  source 1..75: mol_type = other DNA
cttacgtgccgaaaggcaaggagaagcaggctatgaagcagcaaaaggcgatgctaatcgccctgatcgtcatct

SEQ ID NO: 1453 - DNA, 75 bp, synthetic construct
  source 1..75: mol_type = other DNA
ccctacatcattgagcccatgaactgcctggcatcgcgtgaatacgatgcggtgatttttgttggtcctgcgcga

SEQ ID NO: 1454 - DNA, 75 bp, synthetic construct
  source 1..75: mol_type = other DNA
atggctccggaggactggctgcaggcagagatgcagggtgagattgtggcactggtccacagtcatcccggtggt

SEQ ID NO: 1455 - DNA, 75 bp, synthetic construct
  source 1..75: mol_type = other DNA
acccgtccggtgaagtcacacccagcaaggcagaccgccttatcacggaacgtctggtacaggcactggccctgg

SEQ ID NO: 1456 - DNA, 75 bp, synthetic construct
  source 1..75: mol_type = other DNA
tggatgaccacatacagtccgttcagggtaaaggacgctatgaagatgagatgttcatcattaaatactttaaga

SEQ ID NO: 1457 - DNA, 75 bp, synthetic construct
  source 1..75: mol_type = other DNA
gcgtacgacaaagtgaccgtcacggttggtgctgacggtaatgccaccggcgccagcgttgaatttatcggaaaa

SEQ ID NO: 1458 - DNA, 75 bp, synthetic construct
  source 1..75: mol_type = other DNA
atgagtgcacgtggtatcaacaaggtcatcctcgtcgggcgtctgggcaatgatccggaagtccgttacatcccc

SEQ ID NO: 1459 - DNA, 75 bp, synthetic construct
  source 1..75: mol_type = other DNA
ctggatgtcgctgtcacggaaaccgcaagtgacctggtacggctgggacggcgaccggctgaccacgatacagaa

SEQ ID NO: 1460 - DNA, 75 bp, synthetic construct
  source 1..75: mol_type = other DNA
acgtataccaaaagcaaaacgtttaaaaccgaatctggagcgcgtcgctggctggaaagaaattcaggtgggtga

SEQ ID NO: 1461 - DNA, 75 bp, synthetic construct
  source 1..75: mol_type = other DNA
catcgttcagtgatatgctgtccggcttcaaagataaggtcacatcatcccttaacagcgcggccagctccgtta

SEQ ID NO: 1462 - DNA, 75 bp, synthetic construct
  source 1..75: mol_type = other DNA
atccatcacggatatatgttcgaactgaaaggtgaaagctacaggaaaaagacagcgaaggcagtaacaagcgcg

SEQ ID NO: 1463 - DNA, 75 bp, synthetic construct
  source 1..75: mol_type = other DNA
ggtttgggagaaggctctgcattacctgttggtgtccctgttccgtggccttcagccactccgccaacaggctgg

SEQ ID NO: 1464 - DNA, 75 bp, synthetic construct
  source 1..75: mol_type = other DNA
gttgtgagttaatcaacgctgattgcctggaatttatccagaccttaccggaaaactctgtcgatctgatagtca

SEQ ID NO: 1465 - DNA, 75 bp, synthetic construct
  source 1..75: mol_type = other DNA
tcatggcctttagggttctgaccatggcggtagacctgtgcagactgacaacgaggacaatgaatgttaacgctg

SEQ ID NO: 1466 - DNA, 75 bp, synthetic construct
  source 1..75: mol_type = other DNA
gtggcttccatttccatcagatgtccttcctgctccgctactgaaggcgtggtgcgtaacggcaaaagcactgcc

SEQ ID NO: 1467 - DNA, 75 bp, synthetic construct
  source 1..75: mol_type = other DNA
aaatccataactcaggacgttgttcacgagacattgtgataggcatagataatacttatccgaccattatttttg

SEQ ID NO: 1468 - DNA, 75 bp, synthetic construct
  source 1..75: mol_type = other DNA
atgacgatggatccgggggagtatgcggtttcggtgacggtgaaagggaagactgctgtctacggacgtgtgcgt

SEQ ID NO: 1469 - DNA, 75 bp, synthetic construct
  source 1..75: mol_type = other DNA
ccatgcgtattcaccaacaacatccggcatcccgtctttttccgttctgtaccggcaaataccgctggcacggca

SEQ ID NO: 1470 - DNA, 75 bp, synthetic construct
  source 1..75: mol_type = other DNA
gagcgtgaccgcctcatttggctcaaaggtcgaggtgtggcttgccccgaggtcatcaactggcaggaggaacag

SEQ ID NO: 1471 - DNA, 75 bp, synthetic construct
  source 1..75: mol_type = other DNA
tacaccctgaacaacggtggcgcatttatagcacctgaaccggatgaagatgatggagaaacctggatactgttc

SEQ ID NO: 1472 - DNA, 75 bp, synthetic construct
  source 1..75: mol_type = other DNA
acaggctggtatggaatcacattacgggcgctttcgtggttgcctccgaactggcccgcgcacggggtaaacgtg

SEQ ID NO: 1473 - DNA, 75 bp, synthetic construct
  source 1..75: mol_type = other DNA
ctttattcatagaccaaagtatcatttggcctgtgaaacgattacaggcatttaaattccagttaagacccggtg

SEQ ID NO: 1474 - DNA, 75 bp, synthetic construct
  source 1..75: mol_type = other DNA
gatggacacgatggcagaagcacacatgtgggcggtggataaaccgcttaacccgtcgctggcccgcgacattat

SEQ ID NO: 1475 - DNA, 75 bp, synthetic construct
  source 1..75: mol_type = other DNA
aaaggggacgaagattaccttaagtggctggaccactgtctggcccagttctggcgggtgttaaaacctgccgga

SEQ ID NO: 1476 - DNA, 75 bp, synthetic construct
  source 1..75: mol_type = other DNA
cagagatgcgtgctcgagttgagaatttcaacaaactttttgaagaactactcaaagctcgcaaaagaagcgcaa

SEQ ID NO: 1477 - DNA, 75 bp, synthetic construct
  source 1..75: mol_type = other DNA
atgagtcagaaatacctcattcgcattgcagaactggaaagccagctccgtcagaaagaccagcaactgagtctg

SEQ ID NO: 1478 - DNA, 75 bp, synthetic construct
  source 1..75: mol_type = other DNA
aaaattttaagagtacctatcaatcactggttaactcagcacgaatattgtttgttgaaaaaggctatcaagctg

SEQ ID NO: 1479 - DNA, 75 bp, synthetic construct
  source 1..75: mol_type = other DNA
aacggacgcagctgtgatatcccgcttcatcaatgccctgaaagcccgaatcgacgcttaccagaaacgtaagca

SEQ ID NO: 1480 - DNA, 75 bp, synthetic construct
  source 1..75: mol_type = other DNA
gttactatatgactcagcgtaagaaaggtataactcagcatatctcggccatgaaggctggtatctcagtccgtt

SEQ ID NO: 1481 - DNA, 75 bp, synthetic construct
  source 1..75: mol_type = other DNA
gtttggtgatttgaaattcaaatacaggaacagagagttctggtgcagagggtactacgtcgatacggtgggtaa

SEQ ID NO: 1482 - DNA, 75 bp, synthetic construct
  source 1..75: mol_type = other DNA
gtaccaccattgaactggtgaatgccggagatcagaccatcctgagcggtgctgcggtggtggtcggcagtatgg

SEQ ID NO: 1483 - DNA, 75 bp, synthetic construct
  source 1..75: mol_type = other DNA
aacgggcggtggtatgaaaccccggtggactggtacggtctggcaagagctgcccggcaaacgtcctggcatcag

SEQ ID NO: 1484 - DNA, 75 bp, synthetic construct
  source 1..75: mol_type = other DNA
ggcactcatgattgctaacgccgaagagaactgggcagcgccagatgaagcagagcgcgccttcgctgtcctatt

SEQ ID NO: 1485 - DNA, 75 bp, synthetic construct
  source 1..75: mol_type = other DNA
gtgtgcaggaaaatcattaccccgtttctggcccggggattttttcccggtattctacgcctgtcatctggctgt

SEQ ID NO: 1486 - DNA, 75 bp, synthetic construct
  source 1..75: mol_type = other DNA
acacctcagttttactggcgaagactctccgatggcgaacctgatgctctcggtgatgggcgcgttcgccgagtt

SEQ ID NO: 1487 - DNA, 75 bp, synthetic construct
  source 1..75: mol_type = other DNA
tctcattgccgtaaaacatggcaactacagttcacttacaccgcctctcagcccggtacgcaccagaaaatcatt

SEQ ID NO: 1488 - DNA, 75 bp, synthetic construct
  source 1..75: mol_type = other DNA
acccgctggccaaccgcgtccagtgctccatcaccacgctggccattgagtgcggactggcgacggagtctgctg

SEQ ID NO: 1489 - DNA, 75 bp, synthetic construct
  source 1..75: mol_type = other DNA
gcgtaaagtctggcgtcagttgttacgggaaggaatcagggtagccagatgtacagtggcgcgcctcatggcggt

SEQ ID NO: 1490 - DNA, 75 bp, synthetic construct
  source 1..75: mol_type = other DNA
ggcgctcgccgcgacacttgatgcgcagggatacagtgttaacgacatcattcatattttgatggcagaaggagg

SEQ ID NO: 1491 - DNA, 75 bp, synthetic construct
  source 1..75: mol_type = other DNA
ccagcgtgaacacgtactggcgacaccccaacaaaggggcgtttgcaggtaagagcctgataagcgcggcggggc

SEQ ID NO: 1492 - DNA, 75 bp, synthetic construct
  source 1..75: mol_type = other DNA
tcccattgtccagggttcggcaggtgtaagaattggcgcgcccaccggcgtggcgtgctcggtgtgtccgggcgg

SEQ ID NO: 1493 - DNA, 75 bp, synthetic construct
  source 1..75: mol_type = other DNA
tactgtgcgttataccgccagtaatgctgctcgttttgccggattatgggaaagaaataatctcataaacgaaaa

SEQ ID NO: 1494 - DNA, 75 bp, synthetic construct
  source 1..75: mol_type = other DNA
cctttgccgagagcgtcaccgaggcgcagaagctcgcgcaacccgatgacttcgatttcctgcatcgcatcggcg

SEQ ID NO: 1495 - DNA, 75 bp, synthetic construct
  source 1..75: mol_type = other DNA
accgtgatgaattaattgatacaacacaggcaaggccaattcagtattgcattaatgggacgtggtataacgcgg

SEQ ID NO: 1496 - DNA, 75 bp, synthetic construct
  source 1..75: mol_type = other DNA
gcaacgtagtgcgctgaactgcgcgggatgtgagcggatttttgaggataaaatcagcggcactaagtccgacag

SEQ ID NO: 1497 - DNA, 75 bp, synthetic construct
  source 1..75: mol_type = other DNA
gaaactgtcgaaggaaaaatgcgaccaggtcaacgccattgagcgtgataaggcgctggcatgggtggagcgcaa

SEQ ID NO: 1498 - DNA, 75 bp, synthetic construct
  source 1..75: mol_type = other DNA
agcgggaaaaaattaaagggcaggttgttgagctagtacgccggagtgggcgcgagacgttacggcaactggaag

SEQ ID NO: 1499 - DNA, 75 bp, synthetic construct
  source 1..75: mol_type = other DNA
ctgtatgccatcgggcagtactgcgaccagacggtcccggatggtttcgggggcacagagccgcggatgaccttt

SEQ ID NO: 1500 - DNA, 75 bp, synthetic construct
  source 1..75: mol_type = other DNA
attccgccgtcagatgaacgaaggctggtaccagatacgtattcgcggtgaggacacggcaccggaggcggtgta

SEQ ID NO: 1501 - DNA, 75 bp, synthetic construct
  source 1..75: mol_type = other DNA
tgtggggctgcaggtggatgcggagcagtttggcggtcagcagatgacggtgaactaccatatccgcggtcgcat

SEQ ID NO: 1502 - DNA, 75 bp, synthetic construct
  source 1..75: mol_type = other DNA
aatataacggtgtatccgtcacgctttctgagctgtctgcgctgcagcgtattgagcatcttgccctcctgaaac

SEQ ID NO: 1503 - DNA, 75 bp, synthetic construct
  source 1..75: mol_type = other DNA
tgaaaggagtccgtaattttgagaataaagttacggtaactgtagccttacaggacaaagaacgctttgacggtg

SEQ ID NO: 1504 - DNA, 75 bp, synthetic construct
  source 1..75: mol_type = other DNA
atgttaatcgccctgatcgtcatctgtttaaccgtcatagtgacggcactggtaacgaggaaagacctctgcgag

SEQ ID NO: 1505 - DNA, 75 bp, synthetic construct
  source 1..75: mol_type = other DNA
tcgcctgactattctgcaggaagaccagggacaattactgactcttgccggtgaacctgacggaaaactacgcgc

SEQ ID NO: 1506 - DNA, 75 bp, synthetic construct
  source 1..75: mol_type = other DNA
caccgctgcgttcggtcaaggttctggaccagttgcgtgagcgcatacgctacttgcattacagcttacgaaccg

SEQ ID NO: 1507 - DNA, 75 bp, synthetic construct
  source 1..75: mol_type = other DNA
actactctgaccgctgcaatcaccaccgtactggctaaaacctacggcggtgctgctcgtgcattcgaccagatc

SEQ ID NO: 1508 - DNA, 75 bp, synthetic construct
  source 1..75: mol_type = other DNA
tggtttttattcgttccagtgaactcagatatgcccgctggtctgaaattgatattgacaatgccatgtggacta

SEQ ID NO: 1509 - DNA, 75 bp, synthetic construct
  source 1..75: mol_type = other DNA
ttcgtgatggcggagggcagagccttaacggactggcggtgaacaccacgctggataacagaggtgagcagtggg

SEQ ID NO: 1510 - DNA, 75 bp, synthetic construct
  source 1..75: mol_type = other DNA
ataacaagggaagactcactcgtggctgcaaccctgcttactcaaaatctattcacacatggttacgttttgggg

SEQ ID NO: 1511 - DNA, 75 bp, synthetic construct
  source 1..75: mol_type = other DNA
gtcttcagcaggcaatggcggatagccaggtgcggggcgtactgctggacattgacagtccgggcgggcaggccg

SEQ ID NO: 1512 - DNA, 75 bp, synthetic construct
  source 1..75: mol_type = other DNA
gacatcatccggataaacgcagtgcccgtgcgcagcacgatgactggctgaagaaagagatacagcgcgtatacg

SEQ ID NO: 1513 - DNA, 75 bp, synthetic construct
  source 1..75: mol_type = other DNA
gggaggattacggtaaggacctgtggagtgcttatcagaccattcaggagaatatgctgaaaggcgggatttccg

SEQ ID NO: 1514 - DNA, 75 bp, synthetic construct
  source 1..75: mol_type = other DNA
atggaaataaaaccagaggatgagttaagcaatatcgttttatttccggtaaaagaggatgaccctcgtaatcag

SEQ ID NO: 1515 - DNA, 75 bp, synthetic construct
  source 1..75: mol_type = other DNA
tcgaggcgctgagggaaaccttgaagctatggaactcgcagcccgactgggccggcgatgagcgaaatgtagtgc

SEQ ID NO: 1516 - DNA, 75 bp, synthetic construct
  source 1..75: mol_type = other DNA
gcgccatatccgtgcagcccgtgccaaatcaccgggcgtgtcacgcgtactttgcattgaatgtgaagcgccaat

SEQ ID NO: 1517 - DNA, 75 bp, synthetic construct
  source 1..75: mol_type = other DNA
gcggcagtgcactcagataccacccgcaatacgacactgaacgtccctggtttgaacacactgacgacgggctga

SEQ ID NO: 1518 - DNA, 75 bp, synthetic construct
  source 1..75: mol_type = other DNA
atgacctacaaatacaaccccttctggcagcaacgtattcgtgagacggtgcggcacgcactggatgttcatccc

SEQ ID NO: 1519 - DNA, 75 bp, synthetic construct
  source 1..75: mol_type = other DNA
gaatatgccaatatggttgaagatatcagagagaaggtgtcggttgagatggaaaggttctttccaaaaaatgat

SEQ ID NO: 1520 - DNA, 75 bp, synthetic construct
  source 1..75: mol_type = other DNA
atggcaactttgacaaaaaaagaacgggcatggttgaacgaattacaggaagttcttgatcgctgtccatcaccg

SEQ ID NO: 1521 - DNA, 75 bp, synthetic construct
  source 1..75: mol_type = other DNA
taaatggccgggagtggaatggctggacatcggtgcgcatcggtgccggtattgaacggctggcgcgggatttca

SEQ ID NO: 1522 - DNA, 75 bp, synthetic construct
  source 1..75: mol_type = other DNA
ccatacccgtgccattcacagtatcgacaccgacatcaagctcaatcgcgcattgtgggtgatggcggaaacgct

SEQ ID NO: 1523 - DNA, 75 bp, synthetic construct
  source 1..75: mol_type = other DNA
tccaagatgcgaacaccacatcttgtgccactcagcaaacaggctgtagccatactgacagaacttcagacatgg

SEQ ID NO: 1524 - DNA, 75 bp, synthetic construct
  source 1..75: mol_type = other DNA
tgtgccagtcagtgatgtcaggcggtccttttctgtcgtggtgaaagcgatagttcaggtactggaaacctggcc

SEQ ID NO: 1525 - DNA, 75 bp, synthetic construct
  source 1..75: mol_type = other DNA
atgtcagtaacaaagtctgaaccaaaatctacccgtaaagcaagccgtaaacctgcaaaaacgcaggaaactgtc

SEQ ID NO: 1526 - DNA, 75 bp, synthetic construct
  source 1..75: mol_type = other DNA
aagacctcgtgcagggggaactgccgttttctgtgtccgtgctgatttacgatttgcgttgtccgacggtgttat

SEQ ID NO: 1527 - DNA, 75 bp, synthetic construct
  source 1..75: mol_type = other DNA
ctgcctgcagatataacgatattattccggccgaccactgcctgcatgatgtgcaggatatgagtacgctgaatc

SEQ ID NO: 1528 - DNA, 75 bp, synthetic construct
  source 1..75: mol_type = other DNA
aggctgatgcctacgccgggttcaacgagctctaccgcgacggccatataaaggaagccgcgtgctgggcccatg

SEQ ID NO: 1529 - DNA, 75 bp, synthetic construct
  source 1..75: mol_type = other DNA
gcatcgatgttatggcccgtatccctgataacgccattgatttcatcctcaccgacccgccgtacctcgtcggtt

SEQ ID NO: 1530 - DNA, 75 bp, synthetic construct
  source 1..75: mol_type = other DNA
ggtcgttgaccagaattacaccgtggcagatgcagccagcgctatggatgtcggcctttccacaatgacgcgatg

SEQ ID NO: 1531 - DNA, 75 bp, synthetic construct
  source 1..75: mol_type = other DNA
agtgcaggatattcccggcgttcttgccgtgtttgcagaacgccgtaaggacagttttggcccgtatgtccggct

SEQ ID NO: 1532 - DNA, 75 bp, synthetic construct
  source 1..75: mol_type = other DNA
aagctgcgggccgcgcccgccgccaaaaacgtgcttgatgccattgaggtgctgcgcggcatgaacaccgacaac

SEQ ID NO: 1533 - DNA, 75 bp, synthetic construct
  source 1..75: mol_type = other DNA
agtcagcccgttcctggcgaggaggagactgatatcaccgatgggataaggctgtctgattggtattataaatat

SEQ ID NO: 1534 - DNA, 75 bp, synthetic construct
  source 1..75: mol_type = other DNA
aacggcgtggatccggaacgctatctgcatcatgtacttgatgtcatcgccgactggcctgtgaaccgggtgggt

SEQ ID NO: 1535 - DNA, 75 bp, synthetic construct
  source 1..75: mol_type = other DNA
gtgaacacggcagcggaagccatccgtgccctgtcgatgcagatgccgggattccgccgtcagatgaacgaaggc

SEQ ID NO: 1536 - DNA, 75 bp, synthetic construct
  source 1..75: mol_type = other DNA
gtaaccgtaaaagagaagatttaactgttaaaaggatatttgagttactaagtttcgataaatctaccggggtat

SEQ ID NO: 1537 - DNA, 75 bp, synthetic construct
  source 1..75: mol_type = other DNA
gacccggttcctgaacaggatctattcgaggcgctgagggaaaccttgaagctatggaactcgcagcccgactgg

SEQ ID NO: 1538 - DNA, 75 bp, synthetic construct
  source 1..75: mol_type = other DNA
tatcagaggtagttggcgtcatcgagcgccatctcgaaccgacgttgctggccgtacatttgtacggctccgcag

SEQ ID NO: 1539 - DNA, 75 bp, synthetic construct
  source 1..75: mol_type = other DNA
tattgtttactaccctgctggcaggaattgcctttcctgcacaggctgaaagcggacacggtgcattttccgtgg

SEQ ID NO: 1540 - DNA, 75 bp, synthetic construct
  source 1..75: mol_type = other DNA
agactgctgaggataaaggccaggggataccgaaaccgggaacgctttaaactgggagttatgttccactatggg

SEQ ID NO: 1541 - DNA, 75 bp, synthetic construct
  source 1..75: mol_type = other DNA
tgtactgcagtaatggctgggtggaaatcgacaacaacatcgcagagaacgccttacggggagtggccgtaggcc

SEQ ID NO: 1542 - DNA, 75 bp, synthetic construct
  source 1..75: mol_type = other DNA
tgcaggcatttatcggggagctggacggcggcgtatttgaaaccaaaatcggcgctgttctcagtgaagtcgctt

SEQ ID NO: 1543 - DNA, 75 bp, synthetic construct
  source 1..75: mol_type = other DNA
gggaaggctttcagccgttcttcgcctgccagacccgtgtgcgcgacccgggccgccggggatacacaaaacaca

SEQ ID NO: 1544 - DNA, 75 bp, synthetic construct
  source 1..75: mol_type = other DNA
gctgcttgagcagtatcaccgtgccggacagcaacgactggccgccgtgcaacgggccatgcagcagggggccgc

SEQ ID NO: 1545 - DNA, 75 bp, synthetic construct
  source 1..75: mol_type = other DNA
acgaatccctggtgtgcggcgtgttccccaaccaggatggaacgttcactgccatgacgtataccaaaagcaaaa

SEQ ID NO: 1546 - DNA, 75 bp, synthetic construct
  source 1..75: mol_type = other DNA
cgtactggccgggcagtccaatgccatggcttacggtgaagggcttccgctgccggattcatacgatgctccgga

SEQ ID NO: 1547 - DNA, 75 bp, synthetic construct
  source 1..75: mol_type = other DNA
cttcctcattgagtcaaaagcggtttgtgcgcagaggtaagcctatgactgactctgagaaacaaatggccgctg

SEQ ID NO: 1548 - DNA, 75 bp, synthetic construct
  source 1..75: mol_type = other DNA
ccgggaaaacatcactattcgtctggatggtcacatccagtccgttcagggtaaagagcgctatgaagacgagat

SEQ ID NO: 1549 - DNA, 75 bp, synthetic construct
  source 1..75: mol_type = other DNA
aaacgtggtggacagtgtgattgaaggtgcttacgaggtggtgggggtttttgaccggattgaagaaaagcgtga

SEQ ID NO: 1550 - DNA, 75 bp, synthetic construct
  source 1..75: mol_type = other DNA
acaaaggcaacaaaactcccgcattcagcatcagtattgagggcagggatatcaccactgtgctggataaccgcc

SEQ ID NO: 1551 - DNA, 75 bp, synthetic construct
  source 1..75: mol_type = other DNA
agaagccccgtaaacaacatacgcctgaatttcgtaacgaagccctgaaactcgctgaacgcatcggtgtggccg

SEQ ID NO: 1552 - DNA, 75 bp, synthetic construct
  source 1..75: mol_type = other DNA
gattatggaccgcatgaccatgaacggtggtcgatgggtgacgtttaactgggatagctggcgtccaaatgtcag

SEQ ID NO: 1553 - DNA, 75 bp, synthetic construct
  source 1..75: mol_type = other DNA
aggaaaacttattgacaccgggttctgtatttttgccctcagtaagctggcaatggcgttatccagtacgcttga

SEQ ID NO: 1554 - DNA, 75 bp, synthetic construct
  source 1..75: mol_type = other DNA
tgcgaagggggcaaatcagtgtgcgcgggcgggggataaattaccggatttactcgatgaatatatcagagcaac

SEQ ID NO: 1555 - DNA, 75 bp, synthetic construct
  source 1..75: mol_type = other DNA
atgaggcgcttcgcaggcgcatgtcgtttcgttttcaatcgtgctctggcacgtcagaatgagaatcatgaggcc

SEQ ID NO: 1556 - DNA, 75 bp, synthetic construct
  source 1..75: mol_type = other DNA
gcgatgacatataccaaaagcaaaacgtttaaaaccgaatctggcgcgcgttgctggttagccagaaacactgac

SEQ ID NO: 1557 - DNA, 75 bp, synthetic construct
  source 1..75: mol_type = other DNA
cgtccgcatcccgtcagcactgacggaagaagccctggagcagatcggtcagttgtacgccatagaggcggatat

SEQ ID NO: 1558 - DNA, 75 bp, synthetic construct
  source 1..75: mol_type = other DNA
ggtcgccacagcaacacgtctctggcgtggggggctggcgtgcagtttaacccgaccgaatccgtggccattgat

SEQ ID NO: 1559 - DNA, 75 bp, synthetic construct
  source 1..75: mol_type = other DNA
ttgatggcaacggacgtctgacgggggcccgtaccgcacagactgcgccttacgaccgctacacctgccaccttt

SEQ ID NO: 1560 - DNA, 75 bp, synthetic construct
  source 1..75: mol_type = other DNA
tcatcaacacggataaagcgcccgcctatggtcgcgcgcttgctctgctcaaacgcgaaggccggtgcccgtctg

SEQ ID NO: 1561 - DNA, 75 bp, synthetic construct
  source 1..75: mol_type = other DNA
gcggccagtggtgatgtctggctctctggttgcggggtatttccatcagagcaggcgtatcgcgtatggcgtaag

SEQ ID NO: 1562 - DNA, 75 bp, synthetic construct
  source 1..75: mol_type = other DNA
tgtcagctgctgttctggcgctgattgctgcaggcgcgtctgctcctcaaatacttgaccagtttctggatgaaa

SEQ ID NO: 1563 - DNA, 75 bp, synthetic construct
  source 1..75: mol_type = other DNA
cgaatctcccaggacatcagtacccgtgatgaaggcggtgacgggaaggtggtggttatcgggcggcaggcataa

SEQ ID NO: 1564 - DNA, 75 bp, synthetic construct
  source 1..75: mol_type = other DNA
cctctgaaagatctcatggttgagtactgcgagagagaggggataacacaggctcagttcgttgagaaaatcatc

SEQ ID NO: 1565 - DNA, 75 bp, synthetic construct
  source 1..75: mol_type = other DNA
tgaatgttgaagagtgcgaccgtctctcctttctgccgtatctgtttggcaacgattttctgtatgccgaggcgt

SEQ ID NO: 1566 - DNA, 75 bp, synthetic construct
  source 1..75: mol_type = other DNA
cttaccgcctgctgagttaccttatcagtacgattatcgccgggcagccgttgttaccggctgtgggggccgtca

SEQ ID NO: 1567 - DNA, 75 bp, synthetic construct
  source 1..75: mol_type = other DNA
cttatccgatatatgcactaccaccgctggtgagaaatgcaataattgaaactcaaaaaaatacacaggcacctt

SEQ ID NO: 1568 - DNA, 75 bp, synthetic construct
  source 1..75: mol_type = other DNA
ttttgcgatccggatatgcatccctctgatttcagtctgcttgtcccccggcatgaggaagagcaggtggagagg

SEQ ID NO: 1569 - DNA, 75 bp, synthetic construct
  source 1..75: mol_type = other DNA
cgcgactggccggggccggaaagggtggactgcagattgtgctgggggcggcagccatcgtgggctctttcttca

SEQ ID NO: 1570 - DNA, 75 bp, synthetic construct
  source 1..75: mol_type = other DNA
tcccggcagcgataatctgaacgggattaacgtgaaataccgttatgagtttacggacgcgctggggctgattac

SEQ ID NO: 1571 - DNA, 75 bp, synthetic construct
  source 1..75: mol_type = other DNA
aggaaaaagaagagattcgacaccctgattcacctgagggattagtggtagccgcagcaaataacagggcgttcg

SEQ ID NO: 1572 - DNA, 75 bp, synthetic construct
  source 1..75: mol_type = other DNA
ctttccgctgtttgccctggtgtgggggctgaatctgtcccgtcatgcgcatatccggcaaccggccattaaccg

SEQ ID NO: 1573 - DNA, 75 bp, synthetic construct
  source 1..75: mol_type = other DNA
atggcaacaccaaatccccttgagccggtaaaaggtgccggtaccactctgtgggtttacaacggcaagggtgat

SEQ ID NO: 1574 - DNA, 75 bp, synthetic construct
  source 1..75: mol_type = other DNA
cccggacctgcttatccctgttcgtgctgcagaagctaaacaaatttatgaaatcgccagtcgtctgcagcaaag

SEQ ID NO: 1575 - DNA, 75 bp, synthetic construct
  source 1..75: mol_type = other DNA
tgtgcttaacctgggtactattgatgaaccaggtcacgcagataacaccgccactctcaaactgaaaaagacagc

SEQ ID NO: 1576 - DNA, 75 bp, synthetic construct
  source 1..75: mol_type = other DNA
gaacggtgaactgagggtacatgccggcggggaagccactgcagtcacccagaacacgggcggtgcactggttac

SEQ ID NO: 1577 - DNA, 75 bp, synthetic construct
  source 1..75: mol_type = other DNA
gaaatttccgtgaaagtacccaaaacagtggatgagttaatcgaaattatgactccctacaagaacagcgataag

SEQ ID NO: 1578 - DNA, 75 bp, synthetic construct
  source 1..75: mol_type = other DNA
tgaacaggtgattgccgtgtatggcccggtgcatgcgcggcttcttcggcagtctctggaactgatcagtgatgc

SEQ ID NO: 1579 - DNA, 75 bp, synthetic construct
  source 1..75: mol_type = other DNA
atgagcagggtaaccgttattatctccgctctggttatctgcattatcgcctgcctgtcatgggctgttaatcat

SEQ ID NO: 1580 - DNA, 75 bp, synthetic construct
  source 1..75: mol_type = other DNA
tcagttgctgcggcggctgaaaaatggaaccggagagcaggagatgaagcaaacctttctgcttcgcaacgaagc

SEQ ID NO: 1581 - DNA, 75 bp, synthetic construct
  source 1..75: mol_type = other DNA
gaccattcttgccggtatcagcgccggcggcatgtactgcccggagtgtggcacggttcactggccggacggagt

SEQ ID NO: 1582 - DNA, 75 bp, synthetic construct
  source 1..75: mol_type = other DNA
gatctggatgcacttaacgaactttccgagctgatctgtgccgcagaatgcggggaacatattgaaccgtataag

SEQ ID NO: 1583 - DNA, 75 bp, synthetic construct
  source 1..75: mol_type = other DNA
tggtttatgccggcggcgaccagacggtacacgggcatgcgctggataccacactgaatggcggttaccagtatg

SEQ ID NO: 1584 - DNA, 75 bp, synthetic construct
  source 1..75: mol_type = other DNA
tggtttatgccggcggcgaccagactgtacatggtcacgcactggataccacgctgaatggggggtaccagtatg

SEQ ID NO: 1585 - DNA, 75 bp, synthetic construct
  source 1..75: mol_type = other DNA
gtttgttttgcaatcagaatggggagtttcgactacgccgcgcagttccctaattcccctaacctgaaacacttt

SEQ ID NO: 1586 - DNA, 75 bp, synthetic construct
  source 1..75: mol_type = other DNA
ctctgccagcgcctcggcattgatcaggtcccggcacgggtgagcgccgttcccggcgatcgcttcctgaaggtg

SEQ ID NO: 1587 - DNA, 75 bp, synthetic construct
  source 1..75: mol_type = other DNA
tactgtatcttattgcactgtcgctgagtggtttcatccatactttcctgcgggctgaagagcggggtatatacg

SEQ ID NO: 1588 - DNA, 75 bp, synthetic construct
  source 1..75: mol_type = other DNA
ccaccaacatcaagctggcatggactgagaacggcgaacgccgcaacgccatcagcccgaacagcttcaagtcgg

SEQ ID NO: 1589 - DNA, 75 bp, synthetic construct
  source 1..75: mol_type = other DNA
gggtgcgtctgtggccagtctctgggggaagtgcgtgttccacaccggggaaatgtggtggagaaagttatcgaa

SEQ ID NO: 1590 - DNA, 75 bp, synthetic construct
  source 1..75: mol_type = other DNA
ctgcggagttaatgcgactttcatcgcggacggggtgccacagtttgctctggttaatgggctgtacgcaatgga

SEQ ID NO: 1591 - DNA, 75 bp, synthetic construct
  source 1..75: mol_type = other DNA
tactagttgctgaagaagcccgagataagtattacggtgatttttccggcaacgaaaggagcacttatgcgaatc

SEQ ID NO: 1592 - DNA, 75 bp, synthetic construct
  source 1..75: mol_type = other DNA
gatgcgtgaacgtttcaacgtgcttaaccatatcatctgggcgaagccgtccggacgttggaatgggtgtaataa

SEQ ID NO: 1593 - DNA, 75 bp, synthetic construct
  source 1..75: mol_type = other DNA
gctgggtggtggagcagatgtcgcagctgacagccatgacggcctcgtttgtgctggccacaccgaccgagacgg

SEQ ID NO: 1594 - DNA, 75 bp, synthetic construct
  source 1..75: mol_type = other DNA
ttgtccggcaccagttacggcattgccgggctgctgatgctggcagtcagccaccggctgtaccgggcggaagac

SEQ ID NO: 1595 - DNA, 75 bp, synthetic construct
  source 1..75: mol_type = other DNA
cactcctgacccggaatcgtctgtgcgaagtccggctgaaggacggatacagggaggttacggcaagtttggctt

SEQ ID NO: 1596 - DNA, 75 bp, synthetic construct
  source 1..75: mol_type = other DNA
agtgaaaagagtcacggcagagaagaaatccgtcttcatattgtttgcgatgtccctgatgaacttattgatttc

SEQ ID NO: 1597 - DNA, 75 bp, synthetic construct
  source 1..75: mol_type = other DNA
ggtgacggcggctatcgtgctgtggaacacggtgtacctggaacgcgccacccaggggttggtcgaggccggcaa

SEQ ID NO: 1598 - DNA, 75 bp, synthetic construct
  source 1..75: mol_type = other DNA
acatcaccacggaagccctgcagcgtatcggtgaactgtatgccatcgaggcagaggtccggggctgttcagcag

SEQ ID NO: 1599 - DNA, 75 bp, synthetic construct
  source 1..75: mol_type = other DNA
gcaataacggactatatcgttggatattacagcgcactaagaccgcacgaatataatggtgggttaccaccaaac

SEQ ID NO: 1600 - DNA, 75 bp, synthetic construct
  source 1..75: mol_type = other DNA
atggcgcagctgttacagtggattatatcggtgccatcaaagacggttatgtcacgctttcaccgttaacgccat

SEQ ID NO: 1601 - DNA, 75 bp, synthetic construct
  source 1..75: mol_type = other DNA
ccctatcttgctcaggcatggatagaaaatgaaaatcaggaaaaaattattgcagggccggttattgccacccct

SEQ ID NO: 1602 - DNA, 75 bp, synthetic construct
  source 1..75: mol_type = other DNA
tggagtgaatccagattaaacatctcattgctgatgcttgatattgagcatctggcgcgcggtaaggggctgcgt

SEQ ID NO: 1603 - DNA, 75 bp, synthetic construct
  source 1..75: mol_type = other DNA
ctgaaatgcgcgcaagagtagaaaacttcaacaaactcttcgaagaaatgcttaaagcgcgtaaaaataaatcaa

SEQ ID NO: 1604 - DNA, 75 bp, synthetic construct
  source 1..75: mol_type = other DNA
cggtcagttacgggacagacaaggtacttaacgacgtttcactctcactgccaacggggaagatcaccgccctga

SEQ ID NO: 1605 - DNA, 75 bp, synthetic construct
  source 1..75: mol_type = other DNA
tgctggtcattaaacgcgtattcaggctgaccctgcgcgctgcgcagggctttattgattccattttttctctga

SEQ ID NO: 1606 - DNA, 75 bp, synthetic construct
  source 1..75: mol_type = other DNA
ccaaaggtggtgtgggtaagacaacttcatccgtaaacattgttggtgaaatgaagtctgatacagttgatctgg

SEQ ID NO: 1607 - DNA, 75 bp, synthetic construct
  source 1..75: mol_type = other DNA
cgcaccggctgggaactggatacgctggtcagtgcgctcatgacagcgcttcccgaccatgccgccagtcccctg

SEQ ID NO: 1608 - DNA, 75 bp, synthetic construct
  source 1..75: mol_type = other DNA
acgaatctctggtgtacggcgtgtttccaaaccaggacggcacgttcaccgcaatgacgtataccaaaagcaaaa

SEQ ID NO: 1609 - DNA, 75 bp, synthetic construct
  source 1..75: mol_type = other DNA
tcgccataaatccgcgctggtcatgcagaagtacagccgccagcaggcacgggaggcagagcagaaagcccgtgc

SEQ ID NO: 1610 - DNA, 75 bp, synthetic construct
  source 1..75: mol_type = other DNA
atcagcgccctgctccactatgtaccggatctgcaccgcaaaatgttgctggccaccctgtggaacacgggcgca

SEQ ID NO: 1611 - DNA, 75 bp, synthetic construct
  source 1..75: mol_type = other DNA
agcaatatggtgattttgaaaatggtattcctgttcacgataccattgccagagttgtatcctgtatcagtcctg

SEQ ID NO: 1612 - DNA, 75 bp, synthetic construct
  source 1..75: mol_type = other DNA
tggtggatgtcagcgaggatgatgttgcattaatgatggcttcagcggggatttccggaggtgtgagatatgtcc

SEQ ID NO: 1613 - DNA, 75 bp, synthetic construct
  source 1..75: mol_type = other DNA
ccgatgttccgggattatctccgtattttgacaaaagaaataacaaagtttactggcgttacaggcatcccataa

SEQ ID NO: 1614 - DNA, 75 bp, synthetic construct
  source 1..75: mol_type = other DNA
aacacccgtaccgaggtgagcaccctctgcatcagccagttccgctacagcgcacaaatccgcccttcttccgtg

SEQ ID NO: 1615 - DNA, 75 bp, synthetic construct
  source 1..75: mol_type = other DNA
ctgaacaacggtggcgcatttatggcacccgaaccggatgaagatgatggaaaaacctgggtactgttcaatgcc

SEQ ID NO: 1616 - DNA, 75 bp, synthetic construct
  source 1..75: mol_type = other DNA
tggaactggtgagtagcgccctgaaagtgatccgcactgttcgggtaaaaaaagcctgtacaaaatgtgactgta

SEQ ID NO: 1617 - DNA, 75 bp, synthetic construct
  source 1..75: mol_type = other DNA
atacccgctggcatgaagattccgtgcgtaaccgctggttcagcgtaatggcggggccgtctgtgcgcgtgaatg

SEQ ID NO: 1618 - DNA, 75 bp, synthetic construct
  source 1..75: mol_type = other DNA
ttgatctggcgctcctggaattttgaggactgtgccgggtactggatgaaccagtacatcagggatttcgggatt

SEQ ID NO: 1619 - DNA, 75 bp, synthetic construct
  source 1..75: mol_type = other DNA
cgtaacacagtgactcccggtggtgaagtatgcgtatttaacgacatcattcctgctgaccattgtctgcatgat

SEQ ID NO: 1620 - DNA, 75 bp, synthetic construct
  source 1..75: mol_type = other DNA
gcaggggtaaaagctaaccgcatctttaccgacaaggcatccggcagttcaacagatcgggaagggctggatttg

SEQ ID NO: 1621 - DNA, 75 bp, synthetic construct
  source 1..75: mol_type = other DNA
tatggtatgcctcgtattcgctcccgggcgggaaacgaattaaggaatctcttggcacaaaggacaagcggcaag

SEQ ID NO: 1622 - DNA, 75 bp, synthetic construct
  source 1..75: mol_type = other DNA
agcatcgacacggacattaagctcaatcgcgcattgtgggtgatggcagaaacgctgctggagagcatgcgctga

SEQ ID NO: 1623 - DNA, 75 bp, synthetic construct
  source 1..75: mol_type = other DNA
tcgccagttctccgatctgtttaaccgggaaattatctcctacagcttgtcagaaaggtcggtgatggagcatcg

SEQ ID NO: 1624 - DNA, 75 bp, synthetic construct
  source 1..75: mol_type = other DNA
atgacagagcgtgaactgtccattatccgtgcgctgggtgaagaattctccacggtgctggcggatttacagcgc

SEQ ID NO: 1625 - DNA, 75 bp, synthetic construct
  source 1..75: mol_type = other DNA
atgaaccttgaagccttaccaaaatattactccccaaaatctccaaaattgagcgatgacgcaccggcgacaggc

SEQ ID NO: 1626 - DNA, 75 bp, synthetic construct
  source 1..75: mol_type = other DNA
tcaccggcgtgacggatggtgccgggcgtcacttccggctggtactgaccacgcaggcgcagcgggcagaagaag

SEQ ID NO: 1627 - DNA, 75 bp, synthetic construct
  source 1..75: mol_type = other DNA
aatggttcagcgcgtatgcgatggcgggtgtggcttacagccgtgtgtcgactttctccggggattatctccgcg

SEQ ID NO: 1628 - DNA, 75 bp, synthetic construct
  source 1..75: mol_type = other DNA
gtctgacaggaacgccaaccgcgccgacggcagcgcaaggtacaaacagcacgcagatcgcaaatacagcctttg

SEQ ID NO: 1629 - DNA, 75 bp, synthetic construct
  source 1..75: mol_type = other DNA
atgaaaatctccacccaggttgcggaagagccactttccgtcgttgacactgacgacatcttcctgctgaaacag

SEQ ID NO: 1630 - DNA, 75 bp, synthetic construct
  source 1..75: mol_type = other DNA
cgctggaagccgctggtgatcaccccggaaggcctcgaccggaaattctacgaaatctgcgccctgtccgagctg

SEQ ID NO: 1631 - DNA, 75 bp, synthetic construct
  source 1..75: mol_type = other DNA
atgcatcgtatagacacgaaaaccgcgcagaaggataagttcggcgcgggtaagaacggttttacccgtggtaac

SEQ ID NO: 1632 - DNA, 75 bp, synthetic construct
  source 1..75: mol_type = other DNA
gtaccgatgcatggtcgtacccggttctgcggcttaaacgcctgggcctgtcaagaacgttccgtcgtctggtcg

SEQ ID NO: 1633 - DNA, 75 bp, synthetic construct
  source 1..75: mol_type = other DNA
tgggctggaaatattcaggcaatcgtcatcacccgacggaaaagcccgttaccagcctgcaaccgctgattgaga

SEQ ID NO: 1634 - DNA, 75 bp, synthetic construct
  source 1..75: mol_type = other DNA
ctgcgcttagtcaactgtgatctggaaaactccagcaacggttccggtggcaagatttctaaagttgcagtcacc

SEQ ID NO: 1635 - DNA, 75 bp, synthetic construct
  source 1..75: mol_type = other DNA
aaccggatgacgatgatgacgaaacatgggtactgttcaatgccatgaacggtaaccgcgctgaaatgagcccgg

SEQ ID NO: 1636 - DNA, 75 bp, synthetic construct
  source 1..75: mol_type = other DNA
atgaggcgcttcgcaggcgcatgtcgtttcgttttcaatcgtgctctggcgcttcagaatgagaatcatgaggcc

SEQ ID NO: 1637 - DNA, 75 bp, synthetic construct
  source 1..75: mol_type = other DNA
atgatccaactgataaaggaatttgacgctcagggcgtggcagtccggttcattgatgacgggatcagtaccgac

SEQ ID NO: 1638 - DNA, 75 bp, synthetic construct
  source 1..75: mol_type = other DNA
taactgacaacaaggggaaaacgcacgacgtgctgaccggaagtgatgacggtcgccacagcaacacgtctctgg

SEQ ID NO: 1639 - DNA, 75 bp, synthetic construct
  source 1..75: mol_type = other DNA
gcgtctgtgttgcctctgttgtccgtacggccctgcgcgctgttcgtgacacggtggtctctgttgcccgtgcgg

SEQ ID NO: 1640 - DNA, 75 bp, synthetic construct
  source 1..75: mol_type = other DNA
gggtataaaaacagggagagtgagggcgtttattttgtgcccttcatgacagacggtaacggcgtcaataccgcc

SEQ ID NO: 1641 - DNA, 75 bp, synthetic construct
  source 1..75: mol_type = other DNA
gccactctcgtggcgctggccaccgagggcatggccaccgtcaccgacgaaatcatcgacctgcacgaccgcatc

SEQ ID NO: 1642 - DNA, 75 bp, synthetic construct
  source 1..75: mol_type = other DNA
ttgctggagatgcccagctttctaccccatgcactgacagcatcataaacagcattgcaacaggcattcgcatca

SEQ ID NO: 1643 - DNA, 75 bp, synthetic construct
  source 1..75: mol_type = other DNA
cgcattgagcgacataatctgaatctgagacaacatctggcaaggctgggacggaagtcactgtcgttctcaaaa

SEQ ID NO: 1644 - DNA, 75 bp, synthetic construct
  source 1..75: mol_type = other DNA
atgacaacctcttcgcataattccaccacaccttctgtttccgtggccgctgcatcagggaataaccagtctcag

SEQ ID NO: 1645 - DNA, 75 bp, synthetic construct
  source 1..75: mol_type = other DNA
atgaaacgaacgcctgtcctgattgatgtgaacggcgttccgcttcgtgagagtctcagctacaacgggggcggt

SEQ ID NO: 1646 - DNA, 75 bp, synthetic construct
  source 1..75: mol_type = other DNA
tgcccgaaggccctttctcacgcaaccaggctcttgccgtcacaacggcttaccttaatgtgcttattgaagatg

SEQ ID NO: 1647 - DNA, 75 bp, synthetic construct
  source 1..75: mol_type = other DNA
gcagcctgcgtaaactacgcctgacacgagttggagctgaatggcacgctctggaaaaacgagcactggcagaag

SEQ ID NO: 1648 - DNA, 75 bp, synthetic construct
  source 1..75: mol_type = other DNA
caccggctggtgcactacacgcggacacaatatgcagagccgctggtcgaaagtcgctatctttacgacccgctg

SEQ ID NO: 1649 - DNA, 75 bp, synthetic construct
  source 1..75: mol_type = other DNA
acttggcctcacgcgcagatcacttggaagaatttattcgctttgtgaaaggcgagatcatcaagtcagttggta

SEQ ID NO: 1650 - DNA, 75 bp, synthetic construct
  source 1..75: mol_type = other DNA
gcgcttatatcgtttccccggttctgttttgaccgattaccgaatactgaagaattacgccaaaaccctgacagg

SEQ ID NO: 1651 - DNA, 75 bp, synthetic construct
  source 1..75: mol_type = other DNA
acgaccagatgacctcagacgccgctgtggatgaggcccttctcatcaatgaatacatcttcaccgaagccggtc

SEQ ID NO: 1652 - DNA, 75 bp, synthetic construct
  source 1..75: mol_type = other DNA
tatcagaggtgctaagcgtcattgagcgccatctggaatcaacgttgctggccgtgcatttgtacggctccgcag

SEQ ID NO: 1653 - DNA, 75 bp, synthetic construct
  source 1..75: mol_type = other DNA
aaagaggttgaactcggtcaggtgaccaccagccacattaatcagtcacatcacagcgatgccgttgctgtcgac

SEQ ID NO: 1654 - DNA, 75 bp, synthetic construct
  source 1..75: mol_type = other DNA
agattgttgatgaaatctgcgattttgtggcgaatcagcaggctgttttcctgggcggtcactacatcttacagg

SEQ ID NO: 1655 - DNA, 75 bp, synthetic construct
  source 1..75: mol_type = other DNA
agattgttgatgaaatctgcgattttgtggcgaatcagcaggctgtattcctcggcggtcactacatccttcagg

SEQ ID NO: 1656 - DNA, 75 bp, synthetic construct
  source 1..75: mol_type = other DNA
atgtcagacatcacaatctcccgtccggaagtggtcaccgggcatacggacgttatctgctcaaccagtatccgc

SEQ ID NO: 1657 - DNA, 75 bp, synthetic construct
  source 1..75: mol_type = other DNA
gatatccgggtgccggaccatctgatagtcggtggcagccaggttttctcctttgccgaacatggtctgctttaa

SEQ ID NO: 1658 - DNA, 75 bp, synthetic construct
  source 1..75: mol_type = other DNA
tcggcctttccacaatgacgcgatgggtgaaacaattacgtgatgagcggcagggaaaaacaccaaaagcctccc

SEQ ID NO: 1659 - DNA, 75 bp, synthetic construct
  source 1..75: mol_type = other DNA
cagattgtcaaggaaggtggtctggcggatttcaccaccgttaaccagaaaggcaaactgcaggtgaacgccggt

SEQ ID NO: 1660 - DNA, 75 bp, synthetic construct
  source 1..75: mol_type = other DNA
catcattaatgattcgcaaatatcgtcattattcgatgaatacgtggttgctgttgagcatcaacttcgtggctg

SEQ ID NO: 1661 - DNA, 75 bp, synthetic construct
  source 1..75: mol_type = other DNA
ttgtgcagcgaaatacgccgggcgtggaaccaaagtcggggctctgcgggcgcgcgcactctggctgaaatgctg

SEQ ID NO: 1662 - DNA, 75 bp, synthetic construct
  source 1..75: mol_type = other DNA
accccgccctgccctcgattcctgggatgctgaatatatgcaggaaaaccgctgggatgaggagtctgcttcctt

SEQ ID NO: 1663 - DNA, 75 bp, synthetic construct
  source 1..75: mol_type = other DNA
gtacaagcagctctggcgtggcggtcaggtgcttgctgttccgccagcgtacacaagccagcgttgcgcgtgctg

SEQ ID NO: 1664 - DNA, 75 bp, synthetic construct
  source 1..75: mol_type = other DNA
gattcgctttgcggattccgtgtcgagcagggaaacacagtgcttgtggcaacgttagcctacgaagttaaacgt

SEQ ID NO: 1665 - DNA, 75 bp, synthetic construct
  source 1..75: mol_type = other DNA
agtttcccctgagttcgctgcctccactcattcgtgatgccgttattgaagctcagcaaattacgcaggctcccc

SEQ ID NO: 1666 - DNA, 75 bp, synthetic construct
  source 1..75: mol_type = other DNA
tgacagtttttcttgtttccggagagccagttgatattgcagtcagtgttcacaggacaatgcaggagtgtgtga

SEQ ID NO: 1667 - DNA, 75 bp, synthetic construct
  source 1..75: mol_type = other DNA
cgttatggcgtcagtctcattcatctggatgccagcgctgaatgcctgccgggtttacccactttcaactggtaa

SEQ ID NO: 1668 - DNA, 75 bp, synthetic construct
  source 1..75: mol_type = other DNA
ccgtgacgtgcagtttcagatgagtcaggacgggaagcaacttgccccctgcctgagtccggagcatatgagtgc

SEQ ID NO: 1669 - DNA, 75 bp, synthetic construct
  source 1..75: mol_type = other DNA
gtcgatggtgttaatctcactgaactgattaacaaggtcgctgaaaacggttattcactccgcgtggtggaggaa

SEQ ID NO: 1670 - DNA, 75 bp, synthetic construct
  source 1..75: mol_type = other DNA
actcgctgtcacatcagacgaatgacaccggcgaatcagaatggattcatttcacaggtagcggatatctgttac

SEQ ID NO: 1671 - DNA, 75 bp, synthetic construct
  source 1..75: mol_type = other DNA
ccacacccgtgccattcacagcatcgacaccgatattaagctcaaccgcgcattgtgggtgatggcagaaacgct

SEQ ID NO: 1672 - DNA, 75 bp, synthetic construct
  source 1..75: mol_type = other DNA
accgatatggttgtttgccatggtgatccctgcatgccgaacttcatggtggaccctaaaactcttcaatgcacg

SEQ ID NO: 1673 - DNA, 75 bp, synthetic construct
  source 1..75: mol_type = other DNA
atgcaatatgcgaaacctgtcactctgaacgttgaagagtgcgaccgtctctcctttctgccttacctgtttggc

SEQ ID NO: 1674 - DNA, 75 bp, synthetic construct
  source 1..75: mol_type = other DNA
ggcagggtgacatgacccgcaagggactggatattgtgcagggttcagcaggggtgctgataggtgcgccaaccg

SEQ ID NO: 1675 - DNA, 75 bp, synthetic construct
  source 1..75: mol_type = other DNA
caaattttgatggatcaactgttgataaaaaactgccgattaggggggcgatgattgaccccgatccgtcagtat

SEQ ID NO: 1676 - DNA, 75 bp, synthetic construct
  source 1..75: mol_type = other DNA
tactcagtgctttgatggatgggcgagcttggacggccactgagctaagttctgtggcgaatatatcagcttcaa

SEQ ID NO: 1677 - DNA, 75 bp, synthetic construct
  source 1..75: mol_type = other DNA
atgaacctttccctgacgccggaagccgacagcattaacatgcaggcgctgaacatggggcgcattgtcgttgac

SEQ ID NO: 1678 - DNA, 75 bp, synthetic construct
  source 1..75: mol_type = other DNA
acggcatcatgacccgcgcggttaagcgaggcctgtcgcggattaaaaagcctttatcagtgcgtcatatgaatg

SEQ ID NO: 1679 - DNA, 75 bp, synthetic construct
  source 1..75: mol_type = other DNA
gatataattctattcgccgtgagcgcccgttaacggatgacgaattaatgcagtttgttccatctgtcttttctg

SEQ ID NO: 1680 - DNA, 75 bp, synthetic construct
  source 1..75: mol_type = other DNA
cagagccgcgccactgatgcagtcactgtatgactggatacagcaacagatgaaaacactgtcgcgtcactcaga

SEQ ID NO: 1681 - DNA, 75 bp, synthetic construct
  source 1..75: mol_type = other DNA
tcagggagtggagctgagccgtgccacactggggcgctggacaggtgctgttgctgaactgctggagccgctgta

SEQ ID NO: 1682 - DNA, 75 bp, synthetic construct
  source 1..75: mol_type = other DNA
gagcgatgccgtatccattattgcccgtgcaacggaagtgaatgccgcgcttcatgcgaaggatttaactgtcac

SEQ ID NO: 1683 - DNA, 75 bp, synthetic construct
  source 1..75: mol_type = other DNA
ggggaggggatgcttttttactaaaattacgtgagagcgcgctgtcatccggctccatgtctgaagaacaatttt

SEQ ID NO: 1684 - DNA, 75 bp, synthetic construct
  source 1..75: mol_type = other DNA
aattaggaccgacaataggccagaaaatttaagagaatgcctgccaatagaaaattcaagaaatataaggatccg

SEQ ID NO: 1685 - DNA, 75 bp, synthetic construct
  source 1..75: mol_type = other DNA
ggattttcgctgcggctgctggctgatggagaaaccggaaaccgcaatgaaagccatcacacgcaatctcgatcg

SEQ ID NO: 1686 - DNA, 75 bp, synthetic construct
  source 1..75: mol_type = other DNA
cgacagatgatgatgagctgccggaagtcaccgcgccggagtggatagtcgacaaggtggcgcattacgggggat

SEQ ID NO: 1687 - DNA, 75 bp, synthetic construct
  source 1..75: mol_type = other DNA
gctggtgaaaatggtctgatctttacgggagcacatgacccacgtaaaccaatcagtgaaaacaccgtaaataaa

SEQ ID NO: 1688 - DNA, 75 bp, synthetic construct
  source 1..75: mol_type = other DNA
cctggttttaaccggttgcttgctcgcctgaaatgtggtgatcaattgattgtgacaaaactggatcgccttggt

SEQ ID NO: 1689 - DNA, 75 bp, synthetic construct
  source 1..75: mol_type = other DNA
gtcgggatatgcaccctgccgaacagattgccggattccgtgcaatggcgcaggaaggcaaaacacctgcacaaa

SEQ ID NO: 1690 - DNA, 75 bp, synthetic construct
  source 1..75: mol_type = other DNA
cgggcggagcattcactttgagccgctgctgccgggggaggcggtgtacagccgcagcgagtcaatgtggctggt

SEQ ID NO: 1691 - DNA, 75 bp, synthetic construct
  source 1..75: mol_type = other DNA
aggcggcactgacttaccgttatggtgacaaacatcagccagtcaccactgccgacattctgacaccacgacgcc

SEQ ID NO: 1692 - DNA, 75 bp, synthetic construct
  source 1..75: mol_type = other DNA
tttttggccttgtccgtgaacgtccgatcgacattcacaaagaccctgtggcactgaacaaatacattactgaat

SEQ ID NO: 1693 - DNA, 75 bp, synthetic construct
  source 1..75: mol_type = other DNA
cgtcaactcaaacgctccgagcgtaaatgacatcggcaatacgcttcagcttatcaggcagaacaatgatattga

SEQ ID NO: 1694 - DNA, 75 bp, synthetic construct
  source 1..75: mol_type = other DNA
agctcaccaccgccgcacgctactgccagctcattatgaaggagcacaaagaagggaaagatttcaaagagattg

SEQ ID NO: 1695 - DNA, 75 bp, synthetic construct
  source 1..75: mol_type = other DNA
tacactcagcgcattgagcgacataacctgaatctgagacaacatctggcaaggctgggacggaagtcactgtcg

SEQ ID NO: 1696 - DNA, 75 bp, synthetic construct
  source 1..75: mol_type = other DNA
gtgctgatgccgcaggcatcattctgacttcccttgtgattaaccgccagttgtggctgtaccacgacagcgggg

SEQ ID NO: 1697 - DNA, 75 bp, synthetic construct
  source 1..75: mol_type = other DNA
tctggtgatgatttaattctgcgtaaaaaggaagatgatacagaaatccggattgagggattctgggaagaatgc

SEQ ID NO: 1698 - DNA, 75 bp, synthetic construct
  source 1..75: mol_type = other DNA
aaaatggttaagctgaaaccgtttatggattacatcgacatgcgcctggcagagaatgtctggaatagtgaggtt

SEQ ID NO: 1699 - DNA, 75 bp, synthetic construct
  source 1..75: mol_type = other DNA
gtcttcggtacggccaacggaatgaccatcagtaccggtctggagtatgggccggataacgaggccaataccggc

SEQ ID NO: 1700 - DNA, 75 bp, synthetic construct
  source 1..75: mol_type = other DNA
tgcctgcctggaaatatatctacaaaaagctgtgtaatacgcaatgcggcgcaggccttaactgacgatggaact

SEQ ID NO: 1701 - DNA, 75 bp, synthetic construct
  source 1..75: mol_type = other DNA
cgggtaatgctaaaacactggaacagtatgagttaacaaagaaacacggagttatctggctttactctgaggacg

SEQ ID NO: 1702 - DNA, 75 bp, synthetic construct
  source 1..75: mol_type = other DNA
gctgacgcgcgagccaatggccttagcgaagcgatgcttgaccgtctggcactgacgcccgcacggctgaaaggc

SEQ ID NO: 1703 - DNA, 75 bp, synthetic construct
  source 1..75: mol_type = other DNA
atgggaaaaggtggcggtaaggcacacacgcctcgtgaggcgaaggataatctcaaatccacgcagatgatgagt

SEQ ID NO: 1704 - DNA, 75 bp, synthetic construct
  source 1..75: mol_type = other DNA
gtggcaacgccggaagccctgcggacgaagagtgtggtacccggtgattatgaagcaacagccacgtttgaattg

SEQ ID NO: 1705 - DNA, 75 bp, synthetic construct
  source 1..75: mol_type = other DNA
cccgccatcagcataccgtgacactgtatgcgaaggggctgacctgtgaagccgacaccctcggctcctgtggtt

SEQ ID NO: 1706 - DNA, 75 bp, synthetic construct
  source 1..75: mol_type = other DNA
gatgtgcttctccgtatacaccatgttatcggagagctgcccacatatggttatcgtcgggtatgggcgctgctt

SEQ ID NO: 1707 - DNA, 75 bp, synthetic construct
  source 1..75: mol_type = other DNA
agcaatagttgagcagttacgtcgtctgccgaaaccaacgtcggcacctgcttcagtggagatcgtgttgtttcc

SEQ ID NO: 1708 - DNA, 75 bp, synthetic construct
  source 1..75: mol_type = other DNA
ccaccggtgacggactgtgcctcctgaccaaacggctggagcgtgggcgcttcgcctggccgtcagcccgtgatg

SEQ ID NO: 1709 - DNA, 75 bp, synthetic construct
  source 1..75: mol_type = other DNA
gtccggaagccgccggcattgcggcctgtctgatgacgtacagtcatcacgcctgtcgtacggagtgttatgcca

SEQ ID NO: 1710 - DNA, 75 bp, synthetic construct
  source 1..75: mol_type = other DNA
tgattaaagaaatcaaagagcgcataggcagcttggacgttcgagacaatattgagcgccgtgcttatgaaattg

SEQ ID NO: 1711 - DNA, 75 bp, synthetic construct
  source 1..75: mol_type = other DNA
ttattgacctgagtctggatgctgtccgtttcgatgagcagatgagccgggtaaggcgtcatttttcaggtctgg

SEQ ID NO: 1712 - DNA, 75 bp, synthetic construct
  source 1..75: mol_type = other DNA
gcttcataccgcggtgaaggacgacgacagcgaggcggtcgggattatccgctcactgcttgccggtgaggaaaa

SEQ ID NO: 1713 - DNA, 75 bp, synthetic construct
  source 1..75: mol_type = other DNA
ttctgttatctgtcctggcagtgggatgctcgcagcaaaaagctgatgagccccggcaattagtgacggtgtatc

SEQ ID NO: 1714 - DNA, 75 bp, synthetic construct
  source 1..75: mol_type = other DNA
ctattcctgatgaacaggccataaaagaagatagcgctgttgcggtggccactgccattgaagctggtgatgagc

SEQ ID NO: 1715 - DNA, 75 bp, synthetic construct
  source 1..75: mol_type = other DNA
gcaacgcaatgcactgaactgtgcgggatgtgagcggatttttgaggataaaatcagtggcaccaagtccgacag

SEQ ID NO: 1716 - DNA, 75 bp, synthetic construct
  source 1..75: mol_type = other DNA
tggaaggtgtcagctacataccatacaaagatatcgttggcgtatggactgtatgtcacggacacaccggaaaag

SEQ ID NO: 1717 - DNA, 75 bp, synthetic construct
  source 1..75: mol_type = other DNA
cgcttccgtctgagtggccacggtcacagcatggttatcactgacctgcccggggtgggcgagagccgggacagg

SEQ ID NO: 1718 - DNA, 75 bp, synthetic construct
  source 1..75: mol_type = other DNA
cgtattcgttcaaacaactgctacggtcaggtatcccgtcgtgaccaggagagcgcgctggcgtgctggggtatc

SEQ ID NO: 1719 - DNA, 75 bp, synthetic construct
  source 1..75: mol_type = other DNA
catcgttgggatggatatgtcacttaccatattaatagtgatttcaccttcgcatggcaaacgacgctatacagc

SEQ ID NO: 1720 - DNA, 75 bp, synthetic construct
  source 1..75: mol_type = other DNA
acaacgtaatgcgctgaactgtgcaggatgcgagctgatttttgaagacaagataagcggtacaaagtccgaaag

SEQ ID NO: 1721 - DNA, 75 bp, synthetic construct
  source 1..75: mol_type = other DNA
gtggcggttacatgatgccggatggcgaccgtttccacatggtgaacggtgcaaactggtttgaccgtaccgtga

SEQ ID NO: 1722 - DNA, 75 bp, synthetic construct
  source 1..75: mol_type = other DNA
cactgacggcacttacttctgcgccaccaacgtggcgcgggtgaatcttatccgacaggtacaggagccacgcag

SEQ ID NO: 1723 - DNA, 75 bp, synthetic construct
  source 1..75: mol_type = other DNA
tgcagggggagattgtggcactggtccacagtcatcccggtggtctgccctggctgagcgaggccgaccggcggc

SEQ ID NO: 1724 - DNA, 75 bp, synthetic construct
  source 1..75: mol_type = other DNA
caatgtcaccacgattattatggggagcggtactgcacacactgccagaccgggcgcttcagtgaggagggggga

SEQ ID NO: 1725 - DNA, 75 bp, synthetic construct
  source 1..75: mol_type = other DNA
ttgcacgcagttatgccggagcggggcttctggcccatgttgtcaccgggaaatatgcagaccatctgccgttat

SEQ ID NO: 1726 - DNA, 75 bp, synthetic construct
  source 1..75: mol_type = other DNA
ttgatctggcgctcctggaattttgaggactgtgccgggtactggatgaaccggtacatcagggatttcgggatt

SEQ ID NO: 1727 - DNA, 75 bp, synthetic construct
  source 1..75: mol_type = other DNA
ccgtaccggacggctgtgggtctatgttcgtgacgatcgcaacgccggttcgaccatgccggcagcggtgtggtt

SEQ ID NO: 1728 - DNA, 75 bp, synthetic construct
  source 1..75: mol_type = other DNA
atgtcgcagacagaaaatgcagtgacttcctcattgagtcaaaagcggtttgtgcgcagaggtaagcctatgact

SEQ ID NO: 1729 - DNA, 75 bp, synthetic construct
  source 1..75: mol_type = other DNA
cagtacgaccccaaagtttatgacgaatatcgtaaggcaaagcgggcggggcggttgaacaatgaaaatcacccc

SEQ ID NO: 1730 - DNA, 75 bp, synthetic construct
  source 1..75: mol_type = other DNA
ttttgctgatttaaacgcgcaggttgagcaactcagcaagcgttgttcagaggcttttggctcatatggccgtta

SEQ ID NO: 1731 - DNA, 75 bp, synthetic construct
  source 1..75: mol_type = other DNA
ttattgacctgagtctggatgcggtccgtttcgatgagcagatgagccgggtaaggcgtcatttttcaggtctgg

SEQ ID NO: 1732 - DNA, 75 bp, synthetic construct
  source 1..75: mol_type = other DNA
aaatgtggtggacagagtcattgaaggggcttacgaggtggtgggcgtttttgaccggatagaggagaagcgtga

SEQ ID NO: 1733 - DNA, 75 bp, synthetic construct
  source 1..75: mol_type = other DNA
gacgagctgttgccagaaacgcgcccctgttcagaggcgcggtataccataaaaattaacagttctgataactcg

SEQ ID NO: 1734 - DNA, 75 bp, synthetic construct
  source 1..75: mol_type = other DNA
gtgcgcatcggtgcccccaccggcgtggcctgttcggtgtgccccggcggggtgacgtccggccatccggtcaat

SEQ ID NO: 1735 - DNA, 75 bp, synthetic construct
  source 1..75: mol_type = other DNA
ataaaacggattcggcagcactgttgccctgtatcgaacaggccagggagggtatccgtaccctgcgccaactgc

SEQ ID NO: 1736 - DNA, 75 bp, synthetic construct
  source 1..75: mol_type = other DNA
cgggtgggcatggattgcaggcgctgccctctacttgctctgcctgccggcgctgcgtcgcgggctttggagcgg

SEQ ID NO: 1737 - DNA, 75 bp, synthetic construct
  source 1..75: mol_type = other DNA
agtgaaccactgacaaatctgatggatcagtacgtgcttatggcataccgtacatcggttgatgccgctcacagt

SEQ ID NO: 1738 - DNA, 75 bp, synthetic construct
  source 1..75: mol_type = other DNA
gcacgtctgaacttcgtttcgaaattggcgttatcactggagacaaaacatttattgaagacgccattaagcaga

SEQ ID NO: 1739 - DNA, 75 bp, synthetic construct
  source 1..75: mol_type = other DNA
gctaaccgcttcacttctaacatcaaaggtctgactcaggccgcacgtaacgccaacgacggtatctctctggcg

SEQ ID NO: 1740 - DNA, 75 bp, synthetic construct
  source 1..75: mol_type = other DNA
gactcgctgtgtgagtttacggtgaaggaacgtaatattgagtttaaggctgttctcgcttacgaaccgaagaag

SEQ ID NO: 1741 - DNA, 75 bp, synthetic construct
  source 1..75: mol_type = other DNA
ggatttccgtcgggcagtataaagcggccatgcgaaccctgcccgcacagtttacggatatcgccacgcagcttg

SEQ ID NO: 1742 - DNA, 75 bp, synthetic construct
  source 1..75: mol_type = other DNA
ccatacccgtaccattcacagcatcgacaccgacattaagctcaaccgggcgttgtgggtgatggcagaaacact

SEQ ID NO: 1743 - DNA, 75 bp, synthetic construct
  source 1..75: mol_type = other DNA
tatccgcctggggcgttcgcctgcgcagcgttgcgtgaatcacatttctgaaccggacactgaaataccgccggg

SEQ ID NO: 1744 - DNA, 75 bp, synthetic construct
  source 1..75: mol_type = other DNA
gcgaggacgacgacctagcaatgcgcgtcgaagagacggccgcgttcgttcgatatgccaaagcaacgattgaga

SEQ ID NO: 1745 - DNA, 75 bp, synthetic construct
  source 1..75: mol_type = other DNA
cattaaacagagctgcagttacggtagaacaagcagaggctctggctcagcgccttgcggataaaccatacggcg

SEQ ID NO: 1746 - DNA, 75 bp, synthetic construct
  source 1..75: mol_type = other DNA
atgcgtaaagtttgtgcagccattttgtccgcagccatctgtctgtccgtatccggtgcgcctgcatgggcgtct

SEQ ID NO: 1747 - DNA, 75 bp, synthetic construct
  source 1..75: mol_type = other DNA
caatcgacgattgctgggaaggctgaggcatactcctccggcagaagcagaaaaagcgtattatgcttccatcgg

SEQ ID NO: 1748 - DNA, 75 bp, synthetic construct
  source 1..75: mol_type = other DNA
aaggatgtcgctgccgactgggcaataaaacgcctacctgcccagtatcagcccgtcttacttgaagctaagcaa

SEQ ID NO: 1749 - DNA, 75 bp, synthetic construct
  source 1..75: mol_type = other DNA
gtaaagcgggtgagtccggcacgctggcccgttcgctggatgccatcgctgaccaggcaaaacccgtgaccgttg

SEQ ID NO: 1750 - DNA, 75 bp, synthetic construct
  source 1..75: mol_type = other DNA
cggcttcggtggatgacagccgtgaaaaattcacccctgcgcagaacatgattttttcgcgtaaaagtgcgcaac

SEQ ID NO: 1751 - DNA, 75 bp, synthetic construct
  source 1..75: mol_type = other DNA
taccgcgcttcgtgcgctgctgttaagccgcaagaatccgtttggcgatatcaaatcggatggcacggtgaaaac

SEQ ID NO: 1752 - DNA, 75 bp, synthetic construct
  source 1..75: mol_type = other DNA
gaaaagatgctcgatgccctggacgatcaggagctggttaaactggtagccgaacgcagcaaccaaccgctgcat

SEQ ID NO: 1753 - DNA, 75 bp, synthetic construct
  source 1..75: mol_type = other DNA
ccagcgatattctccggtgagattgatgtgttcccaggggataggagaagtcgcttgatatctagtatgacgtct

SEQ ID NO: 1754 - DNA, 75 bp, synthetic construct
  source 1..75: mol_type = other DNA
cttttgtgaaatcggcgattgcaggaatggtgggttctgcacctgctgcactggatacactgaacgaactggcgg

SEQ ID NO: 1755 - DNA, 75 bp, synthetic construct
  source 1..75: mol_type = other DNA
atgtacggaacatgcgaaacgctctgccgtgagctggcagcgcagtatacggagaacacgccgctgatgctggtt

SEQ ID NO: 1756 - DNA, 75 bp, synthetic construct
  source 1..75: mol_type = other DNA
gaacacatcgatgccggtatcaccctagccgatgccgtgaattttctggtagaaaaatacgagctggttcgtatc

SEQ ID NO: 1757 - DNA, 75 bp, synthetic construct
  source 1..75: mol_type = other DNA
ctggatacactgaacgaactggcggcggcactggggaatgatccgaactttgccacgacaatgcttaatgcgctg

SEQ ID NO: 1758 - DNA, 75 bp, synthetic construct
  source 1..75: mol_type = other DNA
aaggctttcagccgttcttcgcctgccagacccgtgtgcgcgacccgggccgccggggatacacaaaacacatgc

SEQ ID NO: 1759 - DNA, 75 bp, synthetic construct
  source 1..75: mol_type = other DNA
ctggctggcagacagtgccggagcatcacgccccgctctggcagcaggtcagtcaggtggaacatcgaccactga

SEQ ID NO: 1760 - DNA, 75 bp, synthetic construct
  source 1..75: mol_type = other DNA
aactggtgtatgcctatgcaatgtggatcagcccgtcattccatctgaaggtgatccgtactttcgatatggtaa

SEQ ID NO: 1761 - DNA, 75 bp, synthetic construct
  source 1..75: mol_type = other DNA
atgcaccatgtgccggggattttcggggaagataaacacacgtcccgaagccagaactatacgtacatccccacc

SEQ ID NO: 1762 - DNA, 75 bp, synthetic construct
  source 1..75: mol_type = other DNA
gggaagtgcgtgttccgcatcggggaaatgtggtggacagagtcattgaaggggcttacgaggtggtgggcgtgt

SEQ ID NO: 1763 - DNA, 75 bp, synthetic construct
  source 1..75: mol_type = other DNA
tctgcatcagccagttccgctacagcgcacaaatccgcccttcttccgtggtgaccaaagactacacctttaaac

SEQ ID NO: 1764 - DNA, 75 bp, synthetic construct
  source 1..75: mol_type = other DNA
ccacaccttctgtttccgtaactactgcatcagggaataaccagtctcaactggttgccactcccgtccctgatg

SEQ ID NO: 1765 - DNA, 75 bp, synthetic construct
  source 1..75: mol_type = other DNA
cgctggcggtgctggaattttgagtctgacgccggaaaacagctaaattcgtacctcgccagtgagggaattctc

SEQ ID NO: 1766 - DNA, 75 bp, synthetic construct
  source 1..75: mol_type = other DNA
ttccagccgaacgcgaacctctgccaggcgtaaaattctcacaccggggatccaagatgcgaacaccacatcttg

SEQ ID NO: 1767 - DNA, 75 bp, synthetic construct
  source 1..75: mol_type = other DNA
acgtcatcgtcgtccgttaccggcacatcttccccgtgaaatacaccgtctggagcctgaagaaagttgttgccc

SEQ ID NO: 1768 - DNA, 75 bp, synthetic construct
  source 1..75: mol_type = other DNA
cgcgacactgacagctaaggggttcacccaactgagcagtgccaccaacagcacctctgaaacgctggccgccac

SEQ ID NO: 1769 - DNA, 75 bp, synthetic construct
  source 1..75: mol_type = other DNA
agggtaatcacgcaggtggtgatactggatgcggataaaaagcagatacagtgcgtggtaagaccgctgcaaatc

SEQ ID NO: 1770 - DNA, 75 bp, synthetic construct
  source 1..75: mol_type = other DNA
aaagttattccactggctccgagccatgcctacgggatgtttatggagcgctttaacgagttatcggagttacgc

SEQ ID NO: 1771 - DNA, 75 bp, synthetic construct
  source 1..75: mol_type = other DNA
agttaaatattaatcaactggcagccctttcaggtctgcaccggcagactgttgccgccagaatggcggatgttc

SEQ ID NO: 1772 - DNA, 75 bp, synthetic construct
  source 1..75: mol_type = other DNA
gcgtaaagccagctggcactgcagacaatgtcaccacgattattatggggagcggtactgcacacactgccagac

SEQ ID NO: 1773 - DNA, 75 bp, synthetic construct
  source 1..75: mol_type = other DNA
agtatgaacacaagatcgatagtctgattgccaaattcaaagaagctggcggggtggttaatgaaacttcgctat

SEQ ID NO: 1774 - DNA, 75 bp, synthetic construct
  source 1..75: mol_type = other DNA
gccgaaggcgtgttcctgctgcccaaacagtctgctgacgacattcagtccggcgcggtggtttatctgaaggac

SEQ ID NO: 1775 - DNA, 75 bp, synthetic construct
  source 1..75: mol_type = other DNA
ggaagaagaaaccacgaccaatatcatcggagcagtgaccgctgaaggtaaaaaaacaggcatgaaagccctgtt

SEQ ID NO: 1776 - DNA, 75 bp, synthetic construct
  source 1..75: mol_type = other DNA
tctttatgatgatgaaggtgtactcattgcggtggcaaactgcccggaaacgtacaaaccgcagttgcaggaagg

SEQ ID NO: 1777 - DNA, 75 bp, synthetic construct
  source 1..75: mol_type = other DNA
gtatgtatgagtttgtggtgaatgatgcccctgaacaggcagaggacgccgggcctgcagagcctgtttctgcgg

SEQ ID NO: 1778 - DNA, 75 bp, synthetic construct
  source 1..75: mol_type = other DNA
ataagatttgtgggcgttgcaatggaaaccggtttagccgtttaccaaccacactggcgcggcatcatgtccaga

SEQ ID NO: 1779 - DNA, 75 bp, synthetic construct
  source 1..75: mol_type = other DNA
cgtacagcgccgggtgaaaggtgtggtgacctggtttgaactgggggagaacgacaaaaaccagatgctgtacag

SEQ ID NO: 1780 - DNA, 75 bp, synthetic construct
  source 1..75: mol_type = other DNA
aatgacatcggcaatacgcttcagcttatcaggcagaacaatgatattgagcgttcaggcgctaacaatgttggg

SEQ ID NO: 1781 - DNA, 75 bp, synthetic construct
  source 1..75: mol_type = other DNA
tctgacgcccgggtgggtgtcattcaatggtgaaaaaccggagattgccatcgtaccccagagtctgcaccggct

SEQ ID NO: 1782 - DNA, 75 bp, synthetic construct
  source 1..75: mol_type = other DNA
tgtcgcagtggcaatcgccggtttcaatcagatgaaccgtggtggcccggcaggaaatgctgtggcagtacattg

SEQ ID NO: 1783 - DNA, 75 bp, synthetic construct
  source 1..75: mol_type = other DNA
tgtgccagccaggtaaaaatgattaaacactgtcaggacgaaaacgatgctcaaacccgacagcctgcgcagggc

SEQ ID NO: 1784 - DNA, 75 bp, synthetic construct
  source 1..75: mol_type = other DNA
tttgcccgcactgccggctttgcggtgtcgttggatggtgttggcatacgtaccacaggtgttgtacgttgcgat

SEQ ID NO: 1785 - DNA, 75 bp, synthetic construct
  source 1..75: mol_type = other DNA
cacaatcgcacgcccttgatttgacggaacactggttaagggtgtcgataaaaatcatcgaccgcaacgccgggg

SEQ ID NO: 1786 - DNA, 75 bp, synthetic construct
  source 1..75: mol_type = other DNA
taccgttttctgacgtccgcgaggagctgccgcgcggcacgtttgcttataccgatgtcccgacgatgattattc

SEQ ID NO: 1787 - DNA, 75 bp, synthetic construct
  source 1..75: mol_type = other DNA
aaagctgagggcgtagtggagggtatgctgatggtgttggatctccgattggagatggatgctgattgttcgaaa

SEQ ID NO: 1788 - DNA, 75 bp, synthetic construct
  source 1..75: mol_type = other DNA
ttcccctcagcacagagcaacaggccgcatggcgggcggtggcggagacggaaaaacgccgccatcagggaaaca

SEQ ID NO: 1789 - DNA, 75 bp, synthetic construct
  source 1..75: mol_type = other DNA
tggcaggggcgtgaatatcaggcgtacccgattgaggggagtggctttgagatgaacgggaagggcagcagtgcc

SEQ ID NO: 1790 - DNA, 75 bp, synthetic construct
  source 1..75: mol_type = other DNA
tggtgatggcaggcggaaccggtggacatgtattcccgggactggcggttgcgcaccatctaatggctcagggtt

SEQ ID NO: 1791 - DNA, 75 bp, synthetic construct
  source 1..75: mol_type = other DNA
atgaaactggccctgacgctggaagccgacagcgttaacgtgcaggcactgaacatggggcgcattgtcgttgac

SEQ ID NO: 1792 - DNA, 75 bp, synthetic construct
  source 1..75: mol_type = other DNA
agtgcaggatattcccggtgtgctggccgtgtttgctgaacgccgtaaggacagttttggcccgtatgtccggct

SEQ ID NO: 1793 - DNA, 75 bp, synthetic construct
  source 1..75: mol_type = other DNA
ccatgcgtattcaccaacagcatcctgcatcccgtctttttccgttctgtaccggtaagtaccgctggcacggca

SEQ ID NO: 1794 - DNA, 75 bp, synthetic construct
  source 1..75: mol_type = other DNA
ccaaaacggtaattcgcattcgcaaaggtagctctaacggtgtggaactaaccggactgcaactggacgaagaaa

SEQ ID NO: 1795 - DNA, 75 bp, synthetic construct
  source 1..75: mol_type = other DNA
actgccattgaagccggtgatgaacgtcgcgcccgcgcaaaatttcactggcaattcctggaacattatccggct

SEQ ID NO: 1796 - DNA, 75 bp, synthetic construct
  source 1..75: mol_type = other DNA
agcacgggaatggctgattctgaacatggcgggactggagcgtgaagagttccgggtgctgtatctgaacaacca

SEQ ID NO: 1797 - DNA, 75 bp, synthetic construct
  source 1..75: mol_type = other DNA
gcattgatgttatggcgcgtattcctgataacggcattgatttcatactgactgacccgccatacctcgtcggtt

SEQ ID NO: 1798 - DNA, 75 bp, synthetic construct
  source 1..75: mol_type = other DNA
tacctggataaagagcagtaaaggcatccgggttccgaccacgaagaaatcactttcccaaattaacagtgtgca

SEQ ID NO: 1799 - DNA, 75 bp, synthetic construct
  source 1..75: mol_type = other DNA
tcaaaaacgttccgccgtctggttgtcacacttacccgacgttatggcgtcagtctcattcatctggatgccagc

SEQ ID NO: 1800 - DNA, 75 bp, synthetic construct
  source 1..75: mol_type = other DNA
gaacgccgcgatctcgggcttgatgatggctctttctggcctgtactggaaggtatcccggcaacagagatgttc

SEQ ID NO: 1801 - DNA, 75 bp, synthetic construct
  source 1..75: mol_type = other DNA
ctggaccgccatcttcatgaacccggtgtggccttcacctccacccgtgcagcacgggaatggctgattctgaac

SEQ ID NO: 1802 - DNA, 75 bp, synthetic construct
  source 1..75: mol_type = other DNA
acaggcctgatgacccgcgacaattacagaatggtaaataacattacccagggtaagcatccggaggcgcaacaa

SEQ ID NO: 1803 - DNA, 75 bp, synthetic construct
  source 1..75: mol_type = other DNA
ccgtgactttattcagttatgtgtggttgccgtaaattttttgagcggtgcggactctggcgggaagaacgaaca

SEQ ID NO: 1804 - DNA, 75 bp, synthetic construct
  source 1..75: mol_type = other DNA
cacccgatccattaccacggtgagcaccgccatcgtgggtatggtctgcacgggcgatgatgccgatgcaaaaat

SEQ ID NO: 1805 - DNA, 75 bp, synthetic construct
  source 1..75: mol_type = other DNA
tccggcaggtcagaaaaagaaacgtgatgcggagcatggcgaatgtggaaccttttgcggcgaacccgaaaaaac

SEQ ID NO: 1806 - DNA, 75 bp, synthetic construct
  source 1..75: mol_type = other DNA
cgtcccggaatgtgttacccgccgtcaggcagtgattaatcaggcccgcaccctgctgaaaaacaacacacacga

SEQ ID NO: 1807 - DNA, 75 bp, synthetic construct
  source 1..75: mol_type = other DNA
ttaacatgctggatattaaaggaaaaatcatcacaactgatgcgatgggttgccagaaagatattgcagagaaga

SEQ ID NO: 1808 - DNA, 75 bp, synthetic construct
  source 1..75: mol_type = other DNA
aataccagaacctgctgatgtgcgagtttgtggacgatctcgcgtccgtgtttccgctcagcgagctgcaggcgt

SEQ ID NO: 1809 - DNA, 75 bp, synthetic construct
  source 1..75: mol_type = other DNA
tccatggacagccagatgctcaatgggcatgggatatccatgcaacttcaggggattgatattgccgaaaggcca

SEQ ID NO: 1810 - DNA, 75 bp, synthetic construct
  source 1..75: mol_type = other DNA
tgacggtccactattaccggctgcgggattacgccctgcaacatccggaatgcaacgccattatgcgcatcattg

SEQ ID NO: 1811 - DNA, 75 bp, synthetic construct
  source 1..75: mol_type = other DNA
atgagcgcacgttcacaggcactggttcctctcagcacagagcaacaggccgcatggcgggcggtggcggagacc

SEQ ID NO: 1812 - DNA, 75 bp, synthetic construct
  source 1..75: mol_type = other DNA
caatgtcatcacgattattatggggagcggtactgcacgcactgccataccgggcacttcagtgaggagggggtg

SEQ ID NO: 1813 - DNA, 75 bp, synthetic construct
  source 1..75: mol_type = other DNA
cggagagacagcgccgaaaacatcagactctcccgtccgcaaagcacttccggcaacacttccccgtgacaggca

SEQ ID NO: 1814 - DNA, 75 bp, synthetic construct
  source 1..75: mol_type = other DNA
gccggacagtgacgaaaacaccggcgggcaatggataaaagcgggtggcacaggcagaaacaccactgtcaccgc

SEQ ID NO: 1815 - DNA, 75 bp, synthetic construct
  source 1..75: mol_type = other DNA
atgaaaactgaactgaccctgaatgtattacagaccatgaacgcacaggaatatgaagatatccgggctgccgga

SEQ ID NO: 1816 - DNA, 75 bp, synthetic construct
  source 1..75: mol_type = other DNA
gtgaggcagaacgacgggaactggaataccagacatgttttgctcaggcgcagattgaccttgcgtttcatactc

SEQ ID NO: 1817 - DNA, 75 bp, synthetic construct
  source 1..75: mol_type = other DNA
ctgacagcgttaacgtacaggcactgaacatggggcgaattgtcgttgacgtcgatggtgttgagcttgccgaac

SEQ ID NO: 1818 - DNA, 75 bp, synthetic construct
  source 1..75: mol_type = other DNA
atgctgggagcagtggaacgccgctttggcagcgagcttccggcgtctccagtggagtggctgacggataatggt

SEQ ID NO: 1819 - DNA, 75 bp, synthetic construct
  source 1..75: mol_type = other DNA
cgaagatcctctgtgtaattgtcggcatttcattttcactaatgctggttgctctttttctttccatggcctgga

SEQ ID NO: 1820 - DNA, 75 bp, synthetic construct
  source 1..75: mol_type = other DNA
cgaatgacagcaaaggccattttgttacggcgaaagaagctgcgaagcacaaccgacaggacgttttgtgctgtg

SEQ ID NO: 1821 - DNA, 75 bp, synthetic construct
  source 1..75: mol_type = other DNA
gtcagcaacatgtcaaagtcagcagcgggtacggtcagccagccggggcgcaatgtccgggcaaaatcaggttta

SEQ ID NO: 1822 - DNA, 75 bp, synthetic construct
  source 1..75: mol_type = other DNA
aaataccttccattatgaaagcctgcgcggtcgttatgtcagtctgatggccggccctgtctggcagctcagtga

SEQ ID NO: 1823 - DNA, 75 bp, synthetic construct
  source 1..75: mol_type = other DNA
tcttcctgctaaaacagcgcctggccgaacaggaagcgctgatccacgccctgcaggaaaagctgagcaaccggg

SEQ ID NO: 1824 - DNA, 75 bp, synthetic construct
  source 1..75: mol_type = other DNA
atgagcgaatatttcagaatacttcagggactgccggacggctcctttacccgcgaacaggcggaagccgttgcc

SEQ ID NO: 1825 - DNA, 75 bp, synthetic construct
  source 1..75: mol_type = other DNA
ctgcagcaaccgaacagaaaattcccggtaactgttacccggtcgataaagttattcaccaggataatatcgaaa

SEQ ID NO: 1826 - DNA, 75 bp, synthetic construct
  source 1..75: mol_type = other DNA
ttattgtcctgctggtagcctgtggtgtgcttagtctggggctgaatcattaccgcgataacgccatcacctaca

SEQ ID NO: 1827 - DNA, 75 bp, synthetic construct
  source 1..75: mol_type = other DNA
ggatctgcacacatcactttcaaaaggctggaactgattgacagaattaacgatataatagccaggtactttcct

SEQ ID NO: 1828 - DNA, 75 bp, synthetic construct
  source 1..75: mol_type = other DNA
ccatccgccctgcgccagtcttcagcccgtaaaccgttaccggcctcacttccccgtgaaacccgggtcatccgg

SEQ ID NO: 1829 - DNA, 75 bp, synthetic construct
  source 1..75: mol_type = other DNA
aacagcgtctggcggcaagaaaagccagagccgcgccactgatgcagtcactgtatgactggatacagcaacaga

SEQ ID NO: 1830 - DNA, 75 bp, synthetic construct
  source 1..75: mol_type = other DNA
aaagccggaaaactcaccatcgactatgactacacgccagtgccgccacttgaaaatctgatgctgcgccagcgc

SEQ ID NO: 1831 - DNA, 75 bp, synthetic construct
  source 1..75: mol_type = other DNA
gctcactgcttgccggtgaggaaaacgccaggctgcgtgcagcccactggttacatgagaggggcctgaaagtat

SEQ ID NO: 1832 - DNA, 75 bp, synthetic construct
  source 1..75: mol_type = other DNA
atggttggtctgccttagaaagtatatttgaacattatcttgattatattattgataataataaaaaccttatcc

SEQ ID NO: 1833 - DNA, 75 bp, synthetic construct
  source 1..75: mol_type = other DNA
cagccgcgcattaaaaacggttcaaaagtggaagtgctgattggtgatgagctggtgatcaccggctgggtggag

SEQ ID NO: 1834 - DNA, 75 bp, synthetic construct
  source 1..75: mol_type = other DNA
ccgatatttttggcgttgatgtcaggaccatcaccgcctggcagagtcaggggttaccactagtttctggtggag

SEQ ID NO: 1835 - DNA, 75 bp, synthetic construct
  source 1..75: mol_type = other DNA
tgacgacacaccagtaaaagtgctggcaccgggcagaaaaaaggcaaaaacaggacgcatctggacgtatgtccg

SEQ ID NO: 1836 - DNA, 75 bp, synthetic construct
  source 1..75: mol_type = other DNA
gggctgggtggatgcatgctgccggctgctgtctccgctggaagaggcgcttcatggctatgtgctgactgacgg

SEQ ID NO: 1837 - DNA, 75 bp, synthetic construct
  source 1..75: mol_type = other DNA
aagtgttactgacgtcgctgcatgaatggatggtggagaagaatggtacgctgtcgaaaaaatccagactgggcg

SEQ ID NO: 1838 - DNA, 75 bp, synthetic construct
  source 1..75: mol_type = other DNA
atgaatatactaaaaaaacttatgcagcgtctgtgtggttgcggaaagcatgatggccgtgaacacgtgcagtcg

SEQ ID NO: 1839 - DNA, 75 bp, synthetic construct
  source 1..75: mol_type = other DNA
ccagtgcaagtgtcagtgaactgaaaaaaaatcctatggctacagtcagtgccggagatggttaccctgtcgcca

SEQ ID NO: 1840 - DNA, 75 bp, synthetic construct
  source 1..75: mol_type = other DNA
atgaaagagacgaaaaacatcgataccgaaaacacggtagttgctgacactgtgaaagaaaccagtgagcgtggc

SEQ ID NO: 1841 - DNA, 75 bp, synthetic construct
  source 1..75: mol_type = other DNA
ttcatctttcgccagtggtgccgttccggcggcatcacaaccgctggcggatgatcctgccgttcgggccgtgtt

SEQ ID NO: 1842 - DNA, 75 bp, synthetic construct
  source 1..75: mol_type = other DNA
ccgagacgcgccaacccgtttccggctacctgtggggtgcgctggccgtgttgacctgcccctgccatctgccga

SEQ ID NO: 1843 - DNA, 75 bp, synthetic construct
  source 1..75: mol_type = other DNA
ttacgacatcggcatatcgacgatttatcgttatcaccctgtaggcgatatacaggctgaagaaacaaccaggca

SEQ ID NO: 1844 - DNA, 75 bp, synthetic construct
  source 1..75: mol_type = other DNA
gaggcactgcgccgttttgaactgatggtggaagaggtggcgcgtaacgcgtccgcggtggcacagaacacggca

SEQ ID NO: 1845 - DNA, 75 bp, synthetic construct
  source 1..75: mol_type = other DNA
atgaccccaggattgctgagaacagtattcagcgtggaagcggaaatacaccccgagccggtatctggcaggccg

SEQ ID NO: 1846 - DNA, 75 bp, synthetic construct
  source 1..75: mol_type = other DNA
ggcaaatctgctgccgtggctggcgtgggcgttttcggtcgacaggtgggatgaaaagtggccggaagcgacaaa

SEQ ID NO: 1847 - DNA, 75 bp, synthetic construct
  source 1..75: mol_type = other DNA
ttatgaaggatggtgcgctgctcaggagttcttcactttttattgcctacatgggatgccttggatgggggagtg

SEQ ID NO: 1848 - DNA, 75 bp, synthetic construct
  source 1..75: mol_type = other DNA
atgggcaaagaatataaaactctcattaacaaagcacttgagcgtttttattttcgcttaagtgcatcaggcgct

SEQ ID NO: 1849 - DNA, 75 bp, synthetic construct
  source 1..75: mol_type = other DNA
cattgcggaggcagacggcgaaattgagccggaagagcgcaaggtgctggaagagattgccggtgttctgggtct

SEQ ID NO: 1850 - DNA, 75 bp, synthetic construct
  source 1..75: mol_type = other DNA
acaacgtgaacaggacagcgatcgttacagtgggcgggaagacgatcctcaggttccccgccagttgcgacagtc

SEQ ID NO: 1851 - DNA, 75 bp, synthetic construct
  source 1..75: mol_type = other DNA
acagcatggttatcactgacctgcccggggtgggcgagagccgggacagggatgcagagtatgaagccctgtacc

SEQ ID NO: 1852 - DNA, 75 bp, synthetic construct
  source 1..75: mol_type = other DNA
aggagttgctcgacagcatttccaggcttcgggaagacgtgaatacccttaccgtcgccttctcatatctggcat

SEQ ID NO: 1853 - DNA, 75 bp, synthetic construct
  source 1..75: mol_type = other DNA
atggtctggcgtacctggaattttgaggacggtgccgggtactggatgaaccatgtcatccgtgatttcgggatt

SEQ ID NO: 1854 - DNA, 75 bp, synthetic construct
  source 1..75: mol_type = other DNA
tataaggcttaaagatatctcggaggcaaagatttactctgctgtaagcagaatgcataacagaaagacgaaaga

SEQ ID NO: 1855 - DNA, 75 bp, synthetic construct
  source 1..75: mol_type = other DNA
atgcaacagatttcctttctgcccggagaaatgacgcccggtgagcgcagcctcattcagcgggccctgaaaacc

SEQ ID NO: 1856 - DNA, 75 bp, synthetic construct
  source 1..75: mol_type = other DNA
tcacccctgagttcaggctggaatgtgcacagctgattgttgataagggctactcatatcgacaggccagtgaag

SEQ ID NO: 1857 - DNA, 75 bp, synthetic construct
  source 1..75: mol_type = other DNA
gaatcatgcaatcccaaatggtctcaggaacaacaagactctttcaggcggcttgctgtattactggatgaaaaa

SEQ ID NO: 1858 - DNA, 75 bp, synthetic construct
  source 1..75: mol_type = other DNA
atcgaagaggaggagcgggaaatagaacatctgagggcccagatagaaaaactgcgccggatgttgttcggtacc

SEQ ID NO: 1859 - DNA, 75 bp, synthetic construct
  source 1..75: mol_type = other DNA
cttcgccgcctggcggaaatggactgtatatctctgaactctgcaattgttcgtttgctggcaaaaggtgttagg

SEQ ID NO: 1860 - DNA, 75 bp, synthetic construct
  source 1..75: mol_type = other DNA
gccaggtgaccgtccctgctgaactgctggcgtccctgattcagaccgctgaacaggcactgtggaaacgtgaat

SEQ ID NO: 1861 - DNA, 75 bp, synthetic construct
  source 1..75: mol_type = other DNA
ctgctgaggcagtgaaggaagtcctgcgctctgaagaagtcctgagcgcactgaaacagaaactccgccagaacc

SEQ ID NO: 1862 - DNA, 75 bp, synthetic construct
  source 1..75: mol_type = other DNA
aaagctgtgtgagtggaaaagtgtacggattctggaagctgaatgctgtgcagatcatatccatatgcttgtgga

SEQ ID NO: 1863 - DNA, 75 bp, synthetic construct
  source 1..75: mol_type = other DNA
aactaccctgtacttactgaatatccagcgaagacacaggaacaggaaatagctgaagcggagggaatgaaaagt

SEQ ID NO: 1864 - DNA, 75 bp, synthetic construct
  source 1..75: mol_type = other DNA
actgtcttgataatgcggtaatggagaatttctttggtcacctgaaagaagaaatgtactatcgccgggactaca

SEQ ID NO: 1865 - DNA, 75 bp, synthetic construct
  source 1..75: mol_type = other DNA
attaccagccgctgggtaacagtgatccggctcatacagcaattgcgcctggcggattgagtgcgaaaacgcctg

SEQ ID NO: 1866 - DNA, 75 bp, synthetic construct
  source 1..75: mol_type = other DNA
gaaaacacgaacgggagttattaaataaaatatgcattctttcaatgctggcccgtttacgtccgatacaaaaag

SEQ ID NO: 1867 - DNA, 75 bp, synthetic construct
  source 1..75: mol_type = other DNA
gatcgcgacgggcgggcactggcattaaccgatgatcgtggcacagagagtcttgccagctatctccgttcgctt

SEQ ID NO: 1868 - DNA, 75 bp, synthetic construct
  source 1..75: mol_type = other DNA
aaagctgtgtaatacgcaatgcggcgcaggccttaactgacgatggaactctatacggagccacaattcttggcg

SEQ ID NO: 1869 - DNA, 75 bp, synthetic construct
  source 1..75: mol_type = other DNA
tccgccagcacgacgccgcgccattccgggagtgcagctttgcattacctgccaggaaatcgcagagctgaaagg

SEQ ID NO: 1870 - DNA, 75 bp, synthetic construct
  source 1..75: mol_type = other DNA
gctccctgtatgcccgtactcaggtcaaaaatgttcagctgatttccatgacgctgccggatatcaatgccggat

SEQ ID NO: 1871 - DNA, 75 bp, synthetic construct
  source 1..75: mol_type = other DNA
ctgatagaagagttgcgtcagcgtggcgtgaatttccgaagcctgactgacagtattgataccagcaccccaatg

SEQ ID NO: 1872 - DNA, 75 bp, synthetic construct
  source 1..75: mol_type = other DNA
ggaagcatttttattatgacaggataaataaagacgacatcgttattaacgatatcgcggtttccctttcaaata

SEQ ID NO: 1873 - DNA, 75 bp, synthetic construct
  source 1..75: mol_type = other DNA
ccacaccttctgtttccgtaaccactgcatcagggaataaccagtctcaactggttgccaccatagtccctgatg

SEQ ID NO: 1874 - DNA, 75 bp, synthetic construct
  source 1..75: mol_type = other DNA
tgctgaccaaggcgaggcaacacagccttgcgcttctaggcccatccgcagccacgtttttcgagccggtgccga

SEQ ID NO: 1875 - DNA, 75 bp, synthetic construct
  source 1..75: mol_type = other DNA
ctccaccctgaaactaccggaagtaccatttcctgacttctcaccggttgcaaacaaagggtcaaccacatctat

SEQ ID NO: 1876 - DNA, 75 bp, synthetic construct
  source 1..75: mol_type = other DNA
ctggtctggcgtacctggaattttgaggacggtgccgggtactggatgaaccatgtcatccggaatttcggcatt

SEQ ID NO: 1877 - DNA, 75 bp, synthetic construct
  source 1..75: mol_type = other DNA
agtgcaggatattcccggtgtgctggctgtgtttgcagaacgccgtaaagacagttttggcccgtatgtccggct

SEQ ID NO: 1878 - DNA, 75 bp, synthetic construct
  source 1..75: mol_type = other DNA
gaacttcttaacatgctggatattaaaggaaaaatcatcacaactgatgcgatgggttgccagaaagatattgca

SEQ ID NO: 1879 - DNA, 75 bp, synthetic construct
  source 1..75: mol_type = other DNA
tgtggcaacgtttctgccaattttatcaacaagatcctttgcagagactgcatcacgctaatgatacagactcgt

SEQ ID NO: 1880 - DNA, 75 bp, synthetic construct
  source 1..75: mol_type = other DNA
tcgcgccagactataccgatgatgaactttatgagtggatgcgccagaaaattaatgcagcgcaggatctgaaat

SEQ ID NO: 1881 - DNA, 75 bp, synthetic construct
  source 1..75: mol_type = other DNA
aatctctgggtatcgtgatgttgttatcggttggactgcttttggcgggctgttcgggtagcaaatcatccgata

SEQ ID NO: 1882 - DNA, 75 bp, synthetic construct
  source 1..75: mol_type = other DNA
ggctccgcgcatatcacattcagaaaaccagaactggttgatcggctaaatgacatcattgcaaagcgttatccg

SEQ ID NO: 1883 - DNA, 75 bp, synthetic construct
  source 1..75: mol_type = other DNA
aggaacaacaagactctttcaggcggcttgctgtattactggatgaaaaatatgctggtaaaattaccatttcgg

SEQ ID NO: 1884 - DNA, 75 bp, synthetic construct
  source 1..75: mol_type = other DNA
tcataaaacggtgaaggtgccggaatggggtaatgtcagcgtggtgctgcgggagccttcggcagaggcctggta

SEQ ID NO: 1885 - DNA, 75 bp, synthetic construct
  source 1..75: mol_type = other DNA
ccggaagactggctgcgggcagagatgcagggggagattgtggcactggtccacagtcatcccggtggtctgccc

SEQ ID NO: 1886 - DNA, 75 bp, synthetic construct
  source 1..75: mol_type = other DNA
tcggtaaaagctcagaaaaacttcgtgcaaaaaccgaacggcagatacaggaagcacaggagcgaatcagcgcac

SEQ ID NO: 1887 - DNA, 75 bp, synthetic construct
  source 1..75: mol_type = other DNA
gggcttatccacgaagtctggcgacatgcgctgaacaaaatcagccaggacaaacgaaacagtaattatattatc

SEQ ID NO: 1888 - DNA, 75 bp, synthetic construct
  source 1..75: mol_type = other DNA
cgaattgtgctgacggggcatccgcaggcgaacctgaaccgggaatggcaggtggtggcaagtgaactgcacggc

SEQ ID NO: 1889 - DNA, 75 bp, synthetic construct
  source 1..75: mol_type = other DNA
aaaagagtcacggcagagaagaaatccgtcttcatattgtttgcgatgtccctgatgaacttattgatttcacgt

SEQ ID NO: 1890 - DNA, 75 bp, synthetic construct
  source 1..75: mol_type = other DNA
gccgtaaagcttgatgaaacgacgcggcgagcattgctcaatgatcttatggaggcttcggctttccctggcgag

SEQ ID NO: 1891 - DNA, 75 bp, synthetic construct
  source 1..75: mol_type = other DNA
gacctgatgcggttgatgggcgaactccggactcaggggaaaacggtggtcgctgtgctgcacgaccttaatcag

SEQ ID NO: 1892 - DNA, 75 bp, synthetic construct
  source 1..75: mol_type = other DNA
cttcagtggagatcgtgttgtttcctccggataaccggatccgcgatctggacaactataacaaggcgctgtttg

SEQ ID NO: 1893 - DNA, 75 bp, synthetic construct
  source 1..75: mol_type = other DNA
cctggaatttatccggtcgttacccgaaaattctgttgacctgatagtcacggacccgccgtactttaaagtgaa

SEQ ID NO: 1894 - DNA, 75 bp, synthetic construct
  source 1..75: mol_type = other DNA
atggaaaaacgctccggcactcttatgacaagagtcgccgcaggggagcgattcatgtcattagtgcgttctcaa

SEQ ID NO: 1895 - DNA, 75 bp, synthetic construct
  source 1..75: mol_type = other DNA
tgacactgaaacggaaaacggaaggggaaacaccgacccggagccggaaaaccatcatcaatgtcaccacgccac

SEQ ID NO: 1896 - DNA, 75 bp, synthetic construct
  source 1..75: mol_type = other DNA
taatgaacgtctttctgaacggctacagctatcagggcgttgcaaagtccgtcacgctgccaaaactgacccgta

SEQ ID NO: 1897 - DNA, 75 bp, synthetic construct
  source 1..75: mol_type = other DNA
tggcgcatgcccggcggtgtgcgcctgcggagtcgtgcggcttcgtggtgagaacgccggagggggagcggtata

SEQ ID NO: 1898 - DNA, 75 bp, synthetic construct
  source 1..75: mol_type = other DNA
atgtctctcactaaattactgccggtcattttgttgatgatggccacaggtgtgcaggcctccacccgggatgaa

SEQ ID NO: 1899 - DNA, 75 bp, synthetic construct
  source 1..75: mol_type = other DNA
gtggtgagcggggagcgctactgtacagcctgatcgggacgtgcaaactgaatgacgtggatccagaaagctacc

SEQ ID NO: 1900 - DNA, 75 bp, synthetic construct
  source 1..75: mol_type = other DNA
aacgattttctgtatgccgaggcgtatgtgtacgcgctggcgcaaaaaatgatgccggaatatcagggaggcttc

SEQ ID NO: 1901 - DNA, 75 bp, synthetic construct
  source 1..75: mol_type = other DNA
ctcaggctctggcagaacgaagggcatgtttcgcggcgtcttccggtaacaacctcttctgacactggcgttgaa

SEQ ID NO: 1902 - DNA, 75 bp, synthetic construct
  source 1..75: mol_type = other DNA
cactgacggcacttacttctgcgccactaatgtggcgcgggtaaaccttatccgacaggtacaggagccacgcag

SEQ ID NO: 1903 - DNA, 75 bp, synthetic construct
  source 1..75: mol_type = other DNA
gatgagcaaaaaacgcattacagcgatacccgctggcatgaagattccgtgcgtaaccgctggttcagcgtgatg

SEQ ID NO: 1904 - DNA, 75 bp, synthetic construct
  source 1..75: mol_type = other DNA
tggtatcacaatgatacttatcgcgccctctgttccggacaaaccagccagtactgacaataccaacgtcaacgg

SEQ ID NO: 1905 - DNA, 75 bp, synthetic construct
  source 1..75: mol_type = other DNA
gtaatgaccttaaagaattgcgggtagctttaaactactcacaaaatttgcgggttactttaagtaactcacaaa

SEQ ID NO: 1906 - DNA, 75 bp, synthetic construct
  source 1..75: mol_type = other DNA
ggatgcagacagtaacctgcagagtctgtgctggccctgtcataaagcaaaaacagcgcgcgaacgcatcaattg

SEQ ID NO: 1907 - DNA, 75 bp, synthetic construct
  source 1..75: mol_type = other DNA
atatctgacctgaaacaacatggtcagatactgctggttgttgatcagccagctaccatcggtgcgttacctgtc

SEQ ID NO: 1908 - DNA, 75 bp, synthetic construct
  source 1..75: mol_type = other DNA
tccgggtgctgtatctgaataaccagaatcaactgattgccggtgaaaccctcttcaccggcaccatcaaccgca

SEQ ID NO: 1909 - DNA, 75 bp, synthetic construct
  source 1..75: mol_type = other DNA
aaaaggtagtatcagaaaagtacctggagggagagttgagtctgaaatctgtagcaaggatgtacggtatcagtc

SEQ ID NO: 1910 - DNA, 75 bp, synthetic construct
  source 1..75: mol_type = other DNA
atgacagcgcgttatctcggaatgaatcgcagtgatggcctgactgtcactgaccttgagcatatcagccagagt

SEQ ID NO: 1911 - DNA, 75 bp, synthetic construct
  source 1..75: mol_type = other DNA
caggcaccagtaccttcaaaacccattgcacgcagttatgccggagcggggcttctggcccatgttgtcaccggg

SEQ ID NO: 1912 - DNA, 75 bp, synthetic construct
  source 1..75: mol_type = other DNA
cgttatggcgtcagtctcattcatctggatgccagcgctgaatgcctgccgggtttacccactttcgactggtaa

SEQ ID NO: 1913 - DNA, 75 bp, synthetic construct
  source 1..75: mol_type = other DNA
atggcaaaagtatttacacaagaagagcgggaaaaaattaaagggcaggttgttgaacttgtacgtctgagcggt

SEQ ID NO: 1914 - DNA, 75 bp, synthetic construct
  source 1..75: mol_type = other DNA
aaagttattccactggcaccgggccatgcctacgggatgtttatggaacgcttcaacgagttatcggaattacgc

SEQ ID NO: 1915 - DNA, 75 bp, synthetic construct
  source 1..75: mol_type = other DNA
ttgttctgtcggctctgtccctcagttccgcagcggctctggccgatactacgacggtaaatggtgggaccgttc

SEQ ID NO: 1916 - DNA, 75 bp, synthetic construct
  source 1..75: mol_type = other DNA
atgacagaaagcggctggcaattatctatgatattggactgtcaacgatctaccgctaccaccctgttgggactg

SEQ ID NO: 1917 - DNA, 75 bp, synthetic construct
  source 1..75: mol_type = other DNA
atgactaaaaatactcgtttttcccctgaagtccgtcaacgggcagtccgtatggttctggaaagtcagggcgaa

SEQ ID NO: 1918 - DNA, 75 bp, synthetic construct
  source 1..75: mol_type = other DNA
ctggcacttggtgtgtatccagaagtatctctctccgaagctcgtacaaaacgggatgaggcccgaaaactgatt

SEQ ID NO: 1919 - DNA, 75 bp, synthetic construct
  source 1..75: mol_type = other DNA
caaactgggccgtagctcccgatggctgaaaagtgaagtggaagcctggttgcaggcacgtattacacagtcccg

SEQ ID NO: 1920 - DNA, 75 bp, synthetic construct
  source 1..75: mol_type = other DNA
attgctgggaaggctgggtcatatccctccggcagaagcagaaaaagcttattatgcttccatcagaaacgatga

SEQ ID NO: 1921 - DNA, 75 bp, synthetic construct
  source 1..75: mol_type = other DNA
caggcagtacgctgacgccggattacatgctgatgctcgacagcagggatattaccggcaatatcagcgaccgtc

SEQ ID NO: 1922 - DNA, 75 bp, synthetic construct
  source 1..75: mol_type = other DNA
tctcaaccagccagcagtccctcgatattcagatcagagcgctcaaagatgcaggggtaaaagctaaccgcatct

SEQ ID NO: 1923 - DNA, 75 bp, synthetic construct
  source 1..75: mol_type = other DNA
gtcattcagctatgcaggagacaagaatcgccagctgacccgttacagcgatacccgctggcatgaagattccgt

SEQ ID NO: 1924 - DNA, 75 bp, synthetic construct
  source 1..75: mol_type = other DNA
atgcagaaacgagaacccgtcatcatcgcgccagactataccgatgatgaactttatgagtggatgcgccagaaa

SEQ ID NO: 1925 - DNA, 75 bp, synthetic construct
  source 1..75: mol_type = other DNA
atgaaatccatggacaaaatttcaacaggcattgcctacggcacctccgcaggcagtgctggctactggttttta

SEQ ID NO: 1926 - DNA, 75 bp, synthetic construct
  source 1..75: mol_type = other DNA
ttgctgatgaagacgggatcactcaggcacagatgcttgagtggctgatagagtcagaggttaagcgcagaaaat

SEQ ID NO: 1927 - DNA, 75 bp, synthetic construct
  source 1..75: mol_type = other DNA
aactcgagcacggcgatgtacttccccatgacatggtcgaatcctctgctgcagcatggcgagatgaaatgagca

SEQ ID NO: 1928 - DNA, 75 bp, synthetic construct
  source 1..75: mol_type = other DNA
ccctggcgattacggacccggtgccagtgctgagcgatgaagagattgccgtagtgctggagaaattcaaaacct

SEQ ID NO: 1929 - DNA, 75 bp, synthetic construct
  source 1..75: mol_type = other DNA
ccgtgaacagtttaccggtgcggtggaccggatatttgacacggcggagagcgtctgtattgcctctgttgcacg

SEQ ID NO: 1930 - DNA, 75 bp, synthetic construct
  source 1..75: mol_type = other DNA
ccatacccgtgccattcacagcattgacactgacattaagctcaaccgcgcattgtgggtgatggcggaaacgct

SEQ ID NO: 1931 - DNA, 75 bp, synthetic construct
  source 1..75: mol_type = other DNA
tactcatcatccttcacatctggctctgtagacagggtggtgatcacttctggagtgaatccagattaaacatct

SEQ ID NO: 1932 - DNA, 75 bp, synthetic construct
  source 1..75: mol_type = other DNA
ctgagtgatgaagatgctgaacttgtggagatagtgaaagaacggcttcgtaatcctaagccagtacgtgtgacg

SEQ ID NO: 1933 - DNA, 75 bp, synthetic construct
  source 1..75: mol_type = other DNA
ggtcgccacagcaacacgtctctggcgtggggagctggcgtgcagtttaacccgaccgaatccgtggccattgat

SEQ ID NO: 1934 - DNA, 75 bp, synthetic construct
  source 1..75: mol_type = other DNA
caaaggtcctgtgtgtgattgtcggtatttcattttcactaatgctggttgctctttttctgtccctcgcctggg

SEQ ID NO: 1935 - DNA, 75 bp, synthetic construct
  source 1..75: mol_type = other DNA
gactctcccgtccgcaaagcacttccggcaacacttccccgtgacaggcaggttatctccccggcagaaaccgaa

SEQ ID NO: 1936 - DNA, 75 bp, synthetic construct
  source 1..75: mol_type = other DNA
tcattgtcctgctggtggcctgtggtgcgcttagtctggggctgaatcattaccgtgatcacgccatcatctaca

SEQ ID NO: 1937 - DNA, 75 bp, synthetic construct
  source 1..75: mol_type = other DNA
tgctggttgatgaagtactgcctgaacaacccatgcgtcagtgggtgttgagcttcccgtttcagctgcgtttcc

SEQ ID NO: 1938 - DNA, 75 bp, synthetic construct
  source 1..75: mol_type = other DNA
tcattgccctgctggtggcctgtggtgcgcttagtctggggctgaatcattaccgtgataacgccataacctaca

SEQ ID NO: 1939 - DNA, 75 bp, synthetic construct
  source 1..75: mol_type = other DNA
tgtgaagccgacaccctcggctcctgtggttacgtttatctggctgtttatccgacacctgaaacgaaaaagtaa

SEQ ID NO: 1940 - DNA, 75 bp, synthetic construct
  source 1..75: mol_type = other DNA
tcagtggtacaaaggatatgcagatgtcattgataaactggttacaaagtgctggcaggaagaagcatatgcaga

SEQ ID NO: 1941 - DNA, 75 bp, synthetic construct
  source 1..75: mol_type = other DNA
ttcacgacggatatcccaggacatcagcacccgtgatgagggcggagacgggaaagtggtggttatcgggcgggg

SEQ ID NO: 1942 - DNA, 75 bp, synthetic construct
  source 1..75: mol_type = other DNA
accaacagcgcacaggggccgtggtggatactggggtggtctgagcgggtgccgggtgctgaggacgtactgcca

SEQ ID NO: 1943 - DNA, 75 bp, synthetic construct
  source 1..75: mol_type = other DNA
ttagcactaggtgtgtatcctgaggtcaccttagctgatgctcctgcaaaacttgaagaagctaaaagaggtatc

SEQ ID NO: 1944 - DNA, 75 bp, synthetic construct
  source 1..75: mol_type = other DNA
agtggcagatcccgcgattcatcaacacggataaagcgcccgcctatggtcgcgcgcttgctctgctcaaacgcg

SEQ ID NO: 1945 - DNA, 75 bp, synthetic construct
  source 1..75: mol_type = other DNA
gaaaggttcaccttactccggctcagttgtccatgcttcttgagggcatcaactggaagcacccgaaacgaacgg

SEQ ID NO: 1946 - DNA, 75 bp, synthetic construct
  source 1..75: mol_type = other DNA
ttccctgcttccgttcttatttgcctgatgctctgcgtttaagatttgaagataaactgaccatccgggccatcg

SEQ ID NO: 1947 - DNA, 75 bp, synthetic construct
  source 1..75: mol_type = other DNA
tggaaaacgctgccgttccagatcgccatcatgaacagtatggggaatgatcagatccgcactgttaatctgatt

SEQ ID NO: 1948 - DNA, 75 bp, synthetic construct
  source 1..75: mol_type = other DNA
gggtcgggctgtgtttgtccgctatttcttgtgcatggcctgtgttagcggtcgatgatgatggcgaaacgatgg

SEQ ID NO: 1949 - DNA, 75 bp, synthetic construct
  source 1..75: mol_type = other DNA
aaaaagcctgtcgggatgccttcaccgcgctgaaaaaagaaaacgtgggggaatttgctctccgtggcgtctgcg

SEQ ID NO: 1950 - DNA, 75 bp, synthetic construct
  source 1..75: mol_type = other DNA
taattgccctgccccacccgctgcttcacctggtcagtttaggtttagtctcgtttatctttacccttttctcgc

SEQ ID NO: 1951 - DNA, 75 bp, synthetic construct
  source 1..75: mol_type = other DNA
tggtgaacacggtggcctctgaaaatccggatgaagccggtcgttacagcatggacgttgagtacggtcagtaca

SEQ ID NO: 1952 - DNA, 75 bp, synthetic construct
  source 1..75: mol_type = other DNA
atggatataacacctttccttcatgcgctttgtgctgtggctgcgcagctactgattggtctttttaccgggaac

SEQ ID NO: 1953 - DNA, 75 bp, synthetic construct
  source 1..75: mol_type = other DNA
atgtgatgtgtcagagcaactggagcttatcagcagcgcctttaaggttatcgaaacacaacgtccgaaacaggc

SEQ ID NO: 1954 - DNA, 75 bp, synthetic construct
  source 1..75: mol_type = other DNA
ggtttttggcctgctgacgtatctgacaaatctttatttcaagattaaagaagacaggcgtaaggctgcgagagg

SEQ ID NO: 1955 - DNA, 75 bp, synthetic construct
  source 1..75: mol_type = other DNA
gaacagtaaacaatggcctggtaaagcggctattggtcgtctgaaaggtgacgaactggcgcaatataatttgtg

SEQ ID NO: 1956 - DNA, 75 bp, synthetic construct
  source 1..75: mol_type = other DNA
aaccattcttgccggtatcagtgccggtggtatgtactgcccggaatgcggcacagttcactggccggatggcgt

SEQ ID NO: 1957 - DNA, 75 bp, synthetic construct
  source 1..75: mol_type = other DNA
tgccgatctcatcatgctggcaaccgaacgccgcgatctcgggcttgatgatggctctttctggcctgtactgga

SEQ ID NO: 1958 - DNA, 75 bp, synthetic construct
  source 1..75: mol_type = other DNA
gaagcacaggagcgaatcagcgcacttcaggaagaaatggcggaaacgctgggtgagcaatatgacccggtactg

SEQ ID NO: 1959 - DNA, 75 bp, synthetic construct
  source 1..75: mol_type = other DNA
taaattaaataatgtcctttataatggcattattgattttaatcgttctgttggtcgccgcggccctgctggtgt

SEQ ID NO: 1960 - DNA, 75 bp, synthetic construct
  source 1..75: mol_type = other DNA
ttgcggaagccagtcttgcagcaagagaggccggtcacgctgtccgtgagatggagcggtggatggtgccgaaca

SEQ ID NO: 1961 - DNA, 75 bp, synthetic construct
  source 1..75: mol_type = other DNA
ggtgattccaaaatgtggcttgaagcaaataaagcgatgaaatcagctatcaaccttccgtggtatcgcaggaaa

SEQ ID NO: 1962 - DNA, 75 bp, synthetic construct
  source 1..75: mol_type = other DNA
gcactgtggcacgtctcatggcggttatgggacttgccggtgttctccggggtaaaaaggtccgtacgaccatca

SEQ ID NO: 1963 - DNA, 75 bp, synthetic construct
  source 1..75: mol_type = other DNA
agctcacggcggcagttttttgacgacgcaccaacggaaattatcagtcggtcatggaaacggctggtgattaac

SEQ ID NO: 1964 - DNA, 75 bp, synthetic construct
  source 1..75: mol_type = other DNA
atggcaaacctgtcgttccgggcatgaagttgtcgaaggaaaaatgcgaccaggttaacgccattgagcgtgata

SEQ ID NO: 1965 - DNA, 75 bp, synthetic construct
  source 1..75: mol_type = other DNA
atgctcaataacaaagtgctacctgtaaccatttacaacgtagtaccattcaataaaacattctggaatttaatc

SEQ ID NO: 1966 - DNA, 75 bp, synthetic construct
  source 1..75: mol_type = other DNA
aatacggaagcatgggtatggtataaaaattgcgatagtaaaaataaaaatgtggcagttgaacttcttcaaatc

SEQ ID NO: 1967 - DNA, 75 bp, synthetic construct
  source 1..75: mol_type = other DNA
gcggctgttatggcggttgctatatggatgccgggggtaggaattatggcgagtaatctgctgttttctctcggt

SEQ ID NO: 1968 - DNA, 75 bp, synthetic construct
  source 1..75: mol_type = other DNA
tgatgacgaaacatgggtactgttcaatgtcatgaacggtaaccgcgctgaaatgagcccggaagccgccggcat

SEQ ID NO: 1969 - DNA, 75 bp, synthetic construct
  source 1..75: mol_type = other DNA
gcgtttctgtgcgccagtacttcgaatctaactactgtcttaacgaccttcagaaagctgctcttcttgccgctg

SEQ ID NO: 1970 - DNA, 75 bp, synthetic construct
  source 1..75: mol_type = other DNA
agcaacgcggggcttaccgtggcaggaagaaatccctgtcgtctgagcgtattgccgaactgcgccaacgtgtcg

SEQ ID NO: 1971 - DNA, 75 bp, synthetic construct
  source 1..75: mol_type = other DNA
gcactggaactggtcgatacttccagtgcgccagatattgaatggcctactcctccggcagttcaggccagatga

SEQ ID NO: 1972 - DNA, 75 bp, synthetic construct
  source 1..75: mol_type = other DNA
tgcctggttcttttttaacgcctccggcaacattacctgttgccattgattacccggctgcgctggcactacgtc

SEQ ID NO: 1973 - DNA, 75 bp, synthetic construct
  source 1..75: mol_type = other DNA
aaagaggcccgtcgtttgcatctgcagggcatgacggttccggattatacggtgaaggtgagaaagtggttttgt

SEQ ID NO: 1974 - DNA, 75 bp, synthetic construct
  source 1..75: mol_type = other DNA
atgaacaccaaaatcaaatacggcctgtcggctgccgttctggcgctgattgccgctggtgcgcctgcgcctgac

SEQ ID NO: 1975 - DNA, 75 bp, synthetic construct
  source 1..75: mol_type = other DNA
cgttgcaggcgcaatgataaccttggtgattggagttacgtatatcatcgagagccagatgattttgagcgcaaa

SEQ ID NO: 1976 - DNA, 75 bp, synthetic construct
  source 1..75: mol_type = other DNA
atccgcagccatcgacctgcgttgcgtaaatatggttgccgatctgtggcatgcgcctgcgccgaaaaatggtca

SEQ ID NO: 1977 - DNA, 75 bp, synthetic construct
  source 1..75: mol_type = other DNA
aacgttatgtcgttaccagtgacagctttcagtttattctccacgagaaaaagagagcggaaagcggtaaaaacg

SEQ ID NO: 1978 - DNA, 75 bp, synthetic construct
  source 1..75: mol_type = other DNA
agttgcgctttaccggctctatccagcgtgacgataccggagaagtgcaggccgtggagcttgtggtgcgtggac

SEQ ID NO: 1979 - DNA, 75 bp, synthetic construct
  source 1..75: mol_type = other DNA
ggtacacaccagaaaattattgatatggccatgaatggcgtcggatgtcgcgccagtgcacgcattatgggcgtt

SEQ ID NO: 1980 - DNA, 75 bp, synthetic construct
  source 1..75: mol_type = other DNA
gcgaatggcttgttactccgtccataaaccaaattagccgcaatgggcgtcaacttacccttgagccgagattaa

SEQ ID NO: 1981 - DNA, 75 bp, synthetic construct
  source 1..75: mol_type = other DNA
gcaacagcctgcgcttcgtgtcatggaaggactacaaagccgtcactcgcgacctgaaagcgatttatcaggctc

SEQ ID NO: 1982 - DNA, 75 bp, synthetic construct
  source 1..75: mol_type = other DNA
attcaggagattcagggagatattttcgcggcggcagcaacttacgacggcgaagtcattaccatttatccggac

SEQ ID NO: 1983 - DNA, 75 bp, synthetic construct
  source 1..75: mol_type = other DNA
tcgggttagatgttcacaaagaatcgattactgtcgcttatgctatcaattcagaacctgttgaactgatgggta

SEQ ID NO: 1984 - DNA, 75 bp, synthetic construct
  source 1..75: mol_type = other DNA
agattgttgatgaaatctgcgattttgtggtgaatcagcaggcggttttcctcggtggtcactatatccttcagg

SEQ ID NO: 1985 - DNA, 75 bp, synthetic construct
  source 1..75: mol_type = other DNA
ttgtgacaatgccggaactgtgctggtggctgattcgtaatgacctggcggatgccttaccggaaagtgcagccc

SEQ ID NO: 1986 - DNA, 75 bp, synthetic construct
  source 1..75: mol_type = other DNA
atgaatatcagcacagaaacccgcgaaattctgcgcaattacaaagccgtgattaatgcgcgacgtcgtgaaatg

SEQ ID NO: 1987 - DNA, 75 bp, synthetic construct
  source 1..75: mol_type = other DNA
ctgacggcaaaaggcaccgtacaactgagcagcgccacggacagtcaatcagaaactgaggctgccacgccgaag

SEQ ID NO: 1988 - DNA, 75 bp, synthetic construct
  source 1..75: mol_type = other DNA
gcgcgtgcaggtgatttaaaagggattaatgtgaaataccgttatgagttcacggatcacctgggcggcattgtc

SEQ ID NO: 1989 - DNA, 75 bp, synthetic construct
  source 1..75: mol_type = other DNA
cattccacagtgggtcaccctggaaccccgtgtcttcggctggatggaccgtctttgcgaaaactactgcggtgg

SEQ ID NO: 1990 - DNA, 75 bp, synthetic construct
  source 1..75: mol_type = other DNA
tgctgatatgggggcagagtgtggccgccgccgatcttggcacctggggcgatctgtggccggtaaaggagccgg

SEQ ID NO: 1991 - DNA, 75 bp, synthetic construct
  source 1..75: mol_type = other DNA
caccacggtgaagcgtaagcgcagaactaagaagcagaagaaagagccagaagcgaagcagggcgattacctggt

SEQ ID NO: 1992 - DNA, 75 bp, synthetic construct
  source 1..75: mol_type = other DNA
tggtgaatcgtattttgtccaacaaccacagccatcgtcgcgatatggatgtaacgatcgttgttcattcgcctg

SEQ ID NO: 1993 - DNA, 75 bp, synthetic construct
  source 1..75: mol_type = other DNA
atggtcaaaaaagccgttcactccatagcagagcgtgatgtgtccgttttacaggcatttggtgtacgaatggaa

SEQ ID NO: 1994 - DNA, 75 bp, synthetic construct
  source 1..75: mol_type = other DNA
gcaaaaatatcaaactcaaccttcgccttccatcacggctgaatgaagaccttcgccgcctggcggaaatggact

SEQ ID NO: 1995 - DNA, 75 bp, synthetic construct
  source 1..75: mol_type = other DNA
ccaaagaacagcagggcgagttggccggaaaagttggctcaacacctggctacttacggctggttttcaatggct

SEQ ID NO: 1996 - DNA, 75 bp, synthetic construct
  source 1..75: mol_type = other DNA
tccgccagcacgccgccgtgccattccgggtgtgcagctttgcattacctgtcaggaaatcgcagagctgaaagg

SEQ ID NO: 1997 - DNA, 75 bp, synthetic construct
  source 1..75: mol_type = other DNA
gggcttatccatgaagtctggcgacatgcgctgaacaaaatcagccaggacaaacgaaacagtaattatattatc

SEQ ID NO: 1998 - DNA, 75 bp, synthetic construct
  source 1..75: mol_type = other DNA
atgaacggtaaccgcgctgaaatgagcccggaagccgccggtattgccgcctgtctgatgacgtacagccatcat

SEQ ID NO: 1999 - DNA, 75 bp, synthetic construct
  source 1..75: mol_type = other DNA
ggagtgagaacgggggcgacggtgacgcattcgtcagggaggaacgcgaagcaatggacgttgtgttacaggcgc

SEQ ID NO: 2000 - DNA, 75 bp, synthetic construct
  source 1..75: mol_type = other DNA
ggtaaccgcgctgaaatgagcccggaagccgccggcattgccgcctgtctgatgacgtacagtcatcacgcctgc

SEQ ID NO: 2001 - DNA, 75 bp, synthetic construct
  source 1..75: mol_type = other DNA
cccggagttccgcacactgtatccggaaaacatctgtatttttggtgttgtcactcacgtgatacacaggacgcg

SEQ ID NO: 2002 - DNA, 75 bp, synthetic construct
  source 1..75: mol_type = other DNA
actgctggatgagcaaaactgcctgatgctgcatgaactctggctgcagagcggtactggacagcgtcgctggga

SEQ ID NO: 2003 - DNA, 75 bp, synthetic construct
  source 1..75: mol_type = other DNA
tgctgaatgaaatgattgagcaggcgtaccatgatttggtggcaaccaggcagaacagccaaatcgattccagat

SEQ ID NO: 2004 - DNA, 75 bp, synthetic construct
  source 1..75: mol_type = other DNA
ttttcaagcagctgtcccacgctcgcgcggtgatcgagcgccatctggctgcgacactggacacaatccacctgt

SEQ ID NO: 2005 - DNA, 75 bp, synthetic construct
  source 1..75: mol_type = other DNA
gtgagtttgtcacttcattacaggcactgaaagagatcggaataaaagcaggcttttcagcttttgcagaagaat

SEQ ID NO: 2006 - DNA, 75 bp, synthetic construct
  source 1..75: mol_type = other DNA
taattctgagcactgtcgcgctcgacgctgtcggcatcggcctgattatgccggtgctgccgggcctcctgcgcg

SEQ ID NO: 2007 - DNA, 75 bp, synthetic construct
  source 1..75: mol_type = other DNA
atgaaaagaaaagttctggcaatgctggtcccggcgttattagttgctggcgcagcaaatgcggctgaaatttat

SEQ ID NO: 2008 - DNA, 75 bp, synthetic construct
  source 1..75: mol_type = other DNA
atgagtaaagtctttatttgcgccgccattccggacgaacaggcaataaaggaagaaggtgccgtcgctgtagcc

SEQ ID NO: 2009 - DNA, 75 bp, synthetic construct
  source 1..75: mol_type = other DNA
tgccagcgccgccgcgctcggtgtgcctttaaaaattacccatatggcggtcggcgatggcggcggaacattgcc

SEQ ID NO: 2010 - DNA, 75 bp, synthetic construct
  source 1..75: mol_type = other DNA
cgatgctgaccgagcaggaagtcgccgcgctggaactgcctgaccttgtggcgctggccggtaaggtggtcggtt

SEQ ID NO: 2011 - DNA, 75 bp, synthetic construct
  source 1..75: mol_type = other DNA
cgctctgattaacggtgcgccagccacgctggacacactgaaagaaattgccgcagccattaacaatgacccgaa

SEQ ID NO: 2012 - DNA, 75 bp, synthetic construct
  source 1..75: mol_type = other DNA
ctgagtctgttcatgggcgctattcggcaggaggtaaggaagttattgccctgatcgaagaaatcaatcatctga

SEQ ID NO: 2013 - DNA, 75 bp, synthetic construct
  source 1..75: mol_type = other DNA
cactatgtgcccagtatttttggggaagaccggcatacctcccgcagtgaacgctatgcgtacattcccaccatc

SEQ ID NO: 2014 - DNA, 75 bp, synthetic construct
  source 1..75: mol_type = other DNA
tacgggatatgctgaagcgtgctgactatctcgcgaaagagtacaccaaagtcaacggtaccggtgagcgcaatt

SEQ ID NO: 2015 - DNA, 75 bp, synthetic construct
  source 1..75: mol_type = other DNA
cgttaacgaatacataacttactggaatcaaaaaagaataaaactcagtcttgggggactcagcccggtagaata

SEQ ID NO: 2016 - DNA, 75 bp, synthetic construct
  source 1..75: mol_type = other DNA
ccgatctggcctgggcaacgatgcacgcattgtttaacgaaccgctgcagggcgaatccgccaataccagcaata

SEQ ID NO: 2017 - DNA, 75 bp, synthetic construct
  source 1..75: mol_type = other DNA
tacaattatcaaccgcgacggttaccagagcgttaaaagtggcgggctggcaacaggaaccatcatcaacaccgg

SEQ ID NO: 2018 - DNA, 75 bp, synthetic construct
  source 1..75: mol_type = other DNA
aagaaaatggtttttttaccgatttaaataaagcaccttcagatgctgttgagataaccacggatgaatggctgt

SEQ ID NO: 2019 - DNA, 75 bp, synthetic construct
  source 1..75: mol_type = other DNA
ccttgagctgtttaatgcactgccagaatcagaacaggatacccagctcgccgaaatgcgagctcgagtaaaaaa

SEQ ID NO: 2020 - DNA, 75 bp, synthetic construct
  source 1..75: mol_type = other DNA
ttcgggtcgcctgctcgggtgatatcgacgaggttgtgcggctgatgcacgacgctgcggcgtggatgtccgcca

SEQ ID NO: 2021 - DNA, 75 bp, synthetic construct
  source 1..75: mol_type = other DNA
atgctttccgcgtttaccgttattctgctggtggtctgtggtgcgcttagtctggggctgaatcattaccgcgat

SEQ ID NO: 2022 - DNA, 75 bp, synthetic construct
  source 1..75: mol_type = other DNA
cttcagtggctgtatgccatcgatgtgctgattgaaacacagggcgaggtctgcctccttccccttcccggtgat

SEQ ID NO: 2023 - DNA, 75 bp, synthetic construct
  source 1..75: mol_type = other DNA
accggggcttaaaaaactgctcaggacactatcggcaggagacactctggttgtctggaagctggacaggttggg

SEQ ID NO: 2024 - DNA, 75 bp, synthetic construct
  source 1..75: mol_type = other DNA
gagctgggactgattacctaccagacggaatatgacccgcttatcgggtgctacattccgaccgatatcacgttc

SEQ ID NO: 2025 - DNA, 75 bp, synthetic construct
  source 1..75: mol_type = other DNA
gtgtttgcgggaaaaaaatcggcccagatccgcgaaattttaatcagcgagtcagcttgggaagaaatgacctgc

SEQ ID NO: 2026 - DNA, 75 bp, synthetic construct
  source 1..75: mol_type = other DNA
caacagtgaaacagtacaggacgtcatgctgggagcggtggaacgccgcttcggcaacgagcttccggcgtctcc

SEQ ID NO: 2027 - DNA, 75 bp, synthetic construct
  source 1..75: mol_type = other DNA
gaaaaagtatcgggtgttgctgaaccgtgttgatacatcaactgcacctgatattgagtggcctacgaaccctgt

SEQ ID NO: 2028 - DNA, 75 bp, synthetic construct
  source 1..75: mol_type = other DNA
ggaggcttcggctttccctggcgagagcgagacgctccgcgctatagaagtcacccttgtcgtgcatgacgacat

SEQ ID NO: 2029 - DNA, 75 bp, synthetic construct
  source 1..75: mol_type = other DNA
gctgtttggcctgctgacgtatctgactaacctgtatttcaaaatcagagaggaccgtcgtaaggcggcgcgggg

SEQ ID NO: 2030 - DNA, 75 bp, synthetic construct
  source 1..75: mol_type = other DNA
ggggagtctgctgtttggtctgctgacgtacctgacgaacctgtatttcaaaatcagagaggacaggcgtaaggc

SEQ ID NO: 2031 - DNA, 75 bp, synthetic construct
  source 1..75: mol_type = other DNA
aaagaagccgttgaatatggacgggcaaaaaagtggatagcgcacgcgcccttattgcccggggatggggagtaa

SEQ ID NO: 2032 - DNA, 75 bp, synthetic construct
  source 1..75: mol_type = other DNA
gcaacgtaatgcactgaactgcgcgggatgtgagcggatttttgaggataaaatcagtggcactaagtccgacag

SEQ ID NO: 2033 - DNA, 75 bp, synthetic construct
  source 1..75: mol_type = other DNA
ggatgtgagcggatttttgaggataaaatcagtggcactaagtccgacagaccggggctgaaaaaactgctcagg

SEQ ID NO: 2034 - DNA, 75 bp, synthetic construct
  source 1..75: mol_type = other DNA
accaacagcgcacaggggccgtggtggatactcggctggtcagagcgggtgccgggtgctgaggacgtgctgcca

SEQ ID NO: 2035 - DNA, 75 bp, synthetic construct
  source 1..75: mol_type = other DNA
ctgcaggggctgtgtttccactatgacccgctggccaaccgcgtccagtgctccatcaccacgctggccattgag

SEQ ID NO: 2036 - DNA, 75 bp, synthetic construct
  source 1..75: mol_type = other DNA
tcatattcttttgcgtcacagatggatatttcaaatttctacatccgtgactatatggattttgcacagaacaag

SEQ ID NO: 2037 - DNA, 75 bp, synthetic construct
  source 1..75: mol_type = other DNA
aacgtggtcaggtactggctaagccgggcaccatcaagccgcacaccaagttcgaatctgaagtgtacattctgt

SEQ ID NO: 2038 - DNA, 75 bp, synthetic construct
  source 1..75: mol_type = other DNA
gctatcgccacgaatgcgcctacatcctggcaaaaggacgtccggcgctgcctcagaagccattgcccgacgtgc

SEQ ID NO: 2039 - DNA, 75 bp, synthetic construct
  source 1..75: mol_type = other DNA
cggaagtggtcaacgagaatacggacgttatctgctccacctcagtcaggtccaggtcactggaatatgataatt

SEQ ID NO: 2040 - DNA, 75 bp, synthetic construct
  source 1..75: mol_type = other DNA
ggctccgcgcacatcacgttcaggaaaccagagctggttgacaggcttaatgatattattgctaagcactatccc

SEQ ID NO: 2041 - DNA, 75 bp, synthetic construct
  source 1..75: mol_type = other DNA
ccagtccggctctgctggcccgcataatcatggctaagttcgccgagcatctgccgctgtaccgtcagtcggaaa

SEQ ID NO: 2042 - DNA, 75 bp, synthetic construct
  source 1..75: mol_type = other DNA
atggcaacaaccgtgctatccgccttccacgcgatctggattttgagggggtgagcgagctggagatcgtccggg

SEQ ID NO: 2043 - DNA, 75 bp, synthetic construct
  source 1..75: mol_type = other DNA
accgtaaggcttgatgaaacaacgcggcgagctttgatcaacgaccttttggaaacttcggcttcccctggagag

SEQ ID NO: 2044 - DNA, 75 bp, synthetic construct
  source 1..75: mol_type = other DNA
cgggtgtcgcctatggcacctcagcaggtagtgccggttactggtttttacagctgctcgataaagtcacgccct

SEQ ID NO: 2045 - DNA, 75 bp, synthetic construct
  source 1..75: mol_type = other DNA
gtgaacacggcagcggaagccatccgggcgctgtcgttacaggtgccgggattccgccgtcagatgaacgaaggc

SEQ ID NO: 2046 - DNA, 75 bp, synthetic construct
  source 1..75: mol_type = other DNA
tataccgccagcaatgcagggcgtttttacggcatctgggatagagccagaggacgacagcgtcacgctgtttta

SEQ ID NO: 2047 - DNA, 75 bp, synthetic construct
  source 1..75: mol_type = other DNA
cgtgagctggcgggttttatctgggatatgggccgaatagcaatgtctgtcgcacaacaaccacaatgtcacaaa

SEQ ID NO: 2048 - DNA, 75 bp, synthetic construct
  source 1..75: mol_type = other DNA
aaatctgcccgtgttggttatacaaagatgttgctgggagtggaggcttattttattgagcataaatcacgcaac

SEQ ID NO: 2049 - DNA, 75 bp, synthetic construct
  source 1..75: mol_type = other DNA
gagctgcgtgagatccctatgcgccccggtcagttgtttatggacccgaaacgcatgattgaagcctgtgacgaa

SEQ ID NO: 2050 - DNA, 75 bp, synthetic construct
  source 1..75: mol_type = other DNA
gcaccagctgtccgtatatcgatgctgtaaaacggcacaaacaacagctcggtgccatagaggaatatacacagt

SEQ ID NO: 2051 - DNA, 75 bp, synthetic construct
  source 1..75: mol_type = other DNA
ctcccgccgtatatcccaggacatcagcacccgtgatgaaggcgggggcggaaaggtcgtggttatcgggcggca

SEQ ID NO: 2052 - DNA, 75 bp, synthetic construct
  source 1..75: mol_type = other DNA
gaaaggatgcttgatgctctggatgaccaggaactggtgaaactggttactgaacgcagcaatcagccactgcat

SEQ ID NO: 2053 - DNA, 75 bp, synthetic construct
  source 1..75: mol_type = other DNA
atggctcaggttgccatttttaaacaaatattcgataaagtgcgaaataatttaaactatcactggttttattct

SEQ ID NO: 2054 - DNA, 75 bp, synthetic construct
  source 1..75: mol_type = other DNA
aacgtaaacccgcctctcaaagaagcaaacttccccgctatgtcgtgaagcttcacgaagatgatttttttgacg

SEQ ID NO: 2055 - DNA, 75 bp, synthetic construct
  source 1..75: mol_type = other DNA
tgcccgaaggccctttctcacgcgaacaggcgatggctgtcacaacagcttaccgcaatgtgcttattgaagatg

SEQ ID NO: 2056 - DNA, 75 bp, synthetic construct
  source 1..75: mol_type = other DNA
tctgggacggcagtctgaaaccggcatacagcaacaacccggcctggtgcctgtgggacatgctgactcacccgc

SEQ ID NO: 2057 - DNA, 75 bp, synthetic construct
  source 1..75: mol_type = other DNA
tggctgagcgaggctgaccggcggctgcagataaaaagcgcactgccctggtggctggtctgccggggtgacatt

SEQ ID NO: 2058 - DNA, 75 bp, synthetic construct
  source 1..75: mol_type = other DNA
agcatcgacaccgacattaagctcaatcgcgcattgtgggtgatggcagaaacgctactggagagcctgcgctga

SEQ ID NO: 2059 - DNA, 75 bp, synthetic construct
  source 1..75: mol_type = other DNA
agggatctgcacacatcactttcaaaaggctggagctgattgacagaattaacgatataatagccaggcactttc

SEQ ID NO: 2060 - DNA, 75 bp, synthetic construct
  source 1..75: mol_type = other DNA
ccgctgacggacacggacggtaatcctgtgatacatggtgtgacagcggtctggcgcgccggggagcaggagcag

SEQ ID NO: 2061 - DNA, 75 bp, synthetic construct
  source 1..75: mol_type = other DNA
gcgtctgtgttgcctctgttgcacgcacggttctgcgtgccgtccgtgacacagtggtctctgttgcccgcgcgg

SEQ ID NO: 2062 - DNA, 75 bp, synthetic construct
  source 1..75: mol_type = other DNA
atggaaaaaatcacaacaggtgtgtcatacaccacgtcagcggtggggacgggatactggttactgcagctgctg

SEQ ID NO: 2063 - DNA, 75 bp, synthetic construct
  source 1..75: mol_type = other DNA
ggatgggcctcttctcaggcttcaggcgcaatgacagactggttaagccgcttcggtaccgcaagaatcacgctg

SEQ ID NO: 2064 - DNA, 75 bp, synthetic construct
  source 1..75: mol_type = other DNA
tggattggtgtgttgctgtccatgatatgaatgcagggtttgatgaaaagattttgttcccctcatcagttgaaa

SEQ ID NO: 2065 - DNA, 75 bp, synthetic construct
  source 1..75: mol_type = other DNA
agtgcccttcttttctatatgccggatcagcgtcaccatatgctgttcgccaccctctggaataccggaatgcgt

SEQ ID NO: 2066 - DNA, 75 bp, synthetic construct
  source 1..75: mol_type = other DNA
ggagattgacctgctgaacttcatttaccggaaggacggcaaggacattgtgcccgatcgcatccgttccgcgct

SEQ ID NO: 2067 - DNA, 75 bp, synthetic construct
  source 1..75: mol_type = other DNA
ctaaaaataaaactaaggttaatatttttatggttgtcacgattattattcatcatattgatattaaatcgtttt

SEQ ID NO: 2068 - DNA, 75 bp, synthetic construct
  source 1..75: mol_type = other DNA
gataacgcgccggaagaaaaagctcgtggtatcaccatcaacacttctcacgttgaatacgacaccccgacccgt

SEQ ID NO: 2069 - DNA, 75 bp, synthetic construct
  source 1..75: mol_type = other DNA
atgttccgtcacccggaaaacgagtacgactggctgagctcagacgccgctgtggatgaggtcctgctcatcaac

SEQ ID NO: 2070 - DNA, 75 bp, synthetic construct
  source 1..75: mol_type = other DNA
atgatccaactgataaaagagtttgatgctcagggtgtagcggttcggtttattgacgacgggatcagtaccgac

SEQ ID NO: 2071 - DNA, 75 bp, synthetic construct
  source 1..75: mol_type = other DNA
cggcaacggtgagctgcttcaccatctgcctgaacaactgagtaaacgggagaggtattccgaaaaatggcaacg

SEQ ID NO: 2072 - DNA, 75 bp, synthetic construct
  source 1..75: mol_type = other DNA
aattcagtgagtatattgcgccactgcaggatgctgtagatctggaaatcgcaacggaggaagaaagatcgttgc

SEQ ID NO: 2073 - DNA, 75 bp, synthetic construct
  source 1..75: mol_type = other DNA
ctaagaccgcacgaatataatggtgggttaccaccaaacgaatcagaaaaccgatactggaaaaactctaacgcg

SEQ ID NO: 2074 - DNA, 75 bp, synthetic construct
  source 1..75: mol_type = other DNA
ttcgcactgagccaggcgcttcagtgctcgccgacttggcttctttttggagatgaagataagcaaccaggcgaa

SEQ ID NO: 2075 - DNA, 75 bp, synthetic construct
  source 1..75: mol_type = other DNA
actatgcagcaggtttttgttccgctaccccggcgttaaggggaaatgaggtcagcatggatactatcgatcttg

SEQ ID NO: 2076 - DNA, 75 bp, synthetic construct
  source 1..75: mol_type = other DNA
gggctatataagagcagcgcgtatccatttacccaatgcggtcgagaaaatcgccttcgatcgcttccatgtggc

SEQ ID NO: 2077 - DNA, 75 bp, synthetic construct
  source 1..75: mol_type = other DNA
tccatttctgatgatgacctgtgcacctggtgtacccgcctgctttaccgttccggagagctcagcctgtgcaga

SEQ ID NO: 2078 - DNA, 75 bp, synthetic construct
  source 1..75: mol_type = other DNA
cgggcatggaactttgagccggatgccggtgaaggtcttaaccgctatatccgcacctcaggcatccgtacagac

SEQ ID NO: 2079 - DNA, 75 bp, synthetic construct
  source 1..75: mol_type = other DNA
aatctgattgatgtctgcagactgaatacactgcgggggccggtctctctttttttcctgacgcttgccgagtcc

SEQ ID NO: 2080 - DNA, 75 bp, synthetic construct
  source 1..75: mol_type = other DNA
aggctgcatacgatctggcaaacggaaaacaaccggcagatgccacgctcactgctctggcaggacttgccactg

SEQ ID NO: 2081 - DNA, 75 bp, synthetic construct
  source 1..75: mol_type = other DNA
gcaggagatgcagttatattccagatacaaaagtgaactggctgtctggaaaaacaaggaagagcttttaaaggc

SEQ ID NO: 2082 - DNA, 75 bp, synthetic construct
  source 1..75: mol_type = other DNA
cctggagtatcagtctgtggccattcgctataacaataccgccatccatgatggcagttataaccacgggagcag

SEQ ID NO: 2083 - DNA, 75 bp, synthetic construct
  source 1..75: mol_type = other DNA
atgcaatatgcgaaacctgtcactctgaacgttgaagagtgcgaccgtctgtcttttctgccttacctgtttggc

SEQ ID NO: 2084 - DNA, 75 bp, synthetic construct
  source 1..75: mol_type = other DNA
aatgatcttgctgaatctgtcgatttatccgcctttactaagggacgcgaggcaccacctggtacatatcgggtc

SEQ ID NO: 2085 - DNA, 75 bp, synthetic construct
  source 1..75: mol_type = other DNA
aacccatgcgactgatgctgcaggctcagcacgcgcagccagcacgtcagccggacaggccgcgtcgtcggctca

SEQ ID NO: 2086 - DNA, 75 bp, synthetic construct
  source 1..75: mol_type = other DNA
cgtattcgctcaaacaactgttacggtcaggtatcccgtcgcgaccaggagagtgcgctggcgtgctggggaatt

SEQ ID NO: 2087 - DNA, 75 bp, synthetic construct
  source 1..75: mol_type = other DNA
attatccaggacattcccggctatctgtatacaggcggtgtggtctgtgatggtgatgttattactgtttatccc

SEQ ID NO: 2088 - DNA, 75 bp, synthetic construct
  source 1..75: mol_type = other DNA
tccggcctgagcgcagtgtccaccacgcgatccgcacggtgaaattacagctcacagactgtggtgaaacccggg

SEQ ID NO: 2089 - DNA, 75 bp, synthetic construct
  source 1..75: mol_type = other DNA
aagcactgaaaagagcctcttcacaggtagtggcggcccgccttggaatcagccgtgaagatgcggtcaacgaac

SEQ ID NO: 2090 - DNA, 75 bp, synthetic construct
  source 1..75: mol_type = other DNA
atgttgacctcaatgacaggccacgactgcgtgttgctgcgtgccgacgatcccctgatcgacatgaactacatc

SEQ ID NO: 2091 - DNA, 75 bp, synthetic construct
  source 1..75: mol_type = other DNA
tcgaagcgaagtagtgccttggcgctatccggcgcggcgtgagcttcagttcggtgagtggctccgccacgacat

SEQ ID NO: 2092 - DNA, 75 bp, synthetic construct
  source 1..75: mol_type = other DNA
aatgccgggtgcggtggatgtggatctggggcttgatgacagtgcgctggacacagaattttccattggtggtac

SEQ ID NO: 2093 - DNA, 75 bp, synthetic construct
  source 1..75: mol_type = other DNA
tttaaggagtgtcgccagagtgccgcgatgaaacgggtattgagggtatataaaagaacatcaatgggtacacaa

SEQ ID NO: 2094 - DNA, 75 bp, synthetic construct
  source 1..75: mol_type = other DNA
atgcctgtaacgaagtgtgaaccagaaaccacccgcaaagcaagccgtaaatctgtaaaaacgcaggaaactgtc

SEQ ID NO: 2095 - DNA, 75 bp, synthetic construct
  source 1..75: mol_type = other DNA
gaacgacctgaccagctgtgggtggctgattttacttacggtgtgcccggagttcagggcgggcatggatgctta

SEQ ID NO: 2096 - DNA, 75 bp, synthetic construct
  source 1..75: mol_type = other DNA
ctggtgataaggagtatgcagaggttcttgttgccattactgaatatgtcaatgctctgcgaagagacttaatgg

SEQ ID NO: 2097 - DNA, 75 bp, synthetic construct
  source 1..75: mol_type = other DNA
tctgcggcttaaacgcctggggctgtcaaaaacgttccgtcgtctggttgtcacactcatccaacgttatggcgt

SEQ ID NO: 2098 - DNA, 75 bp, synthetic construct
  source 1..75: mol_type = other DNA
ccctttaacatccggatggtccgggagacagcggacagcacctcggaccagctgcagaataagacgctctggtcg

SEQ ID NO: 2099 - DNA, 75 bp, synthetic construct
  source 1..75: mol_type = other DNA
cgatgccccctcagtttcgacgccgggcggattgctcgacaagatgcgcgatctgctgggcagaaacgacaagac

SEQ ID NO: 2100 - DNA, 75 bp, synthetic construct
  source 1..75: mol_type = other DNA
aagtataaggccatgctcatgcaaatgtgtcatgaagatggtctgactcaggctgaagttctgaccgcactgata

SEQ ID NO: 2101 - DNA, 75 bp, synthetic construct
  source 1..75: mol_type = other DNA
caactggcaggggatcgttgagtcgctgacgctgccgaaatttacccgcaaatatgagaagtatcgcggcggcgg

SEQ ID NO: 2102 - DNA, 75 bp, synthetic construct
  source 1..75: mol_type = other DNA
tcggcgatggcggcggagtattgccaacgccagactcaaagcagactgcactggtaaatgagaaacgccgggctg

SEQ ID NO: 2103 - DNA, 75 bp, synthetic construct
  source 1..75: mol_type = other DNA
cgtttccgcgatgggctgcgccgcctgctttccagccctcgccagcttcggcgcggccatcgggctgggcttctt

SEQ ID NO: 2104 - DNA, 75 bp, synthetic construct
  source 1..75: mol_type = other DNA
tattttgacgaatgataaggtattcaaggcagggttaagacgtaagatgcgaaaagcagccatggacagaaacta

SEQ ID NO: 2105 - DNA, 75 bp, synthetic construct
  source 1..75: mol_type = other DNA
ggcgcaaggcacaccagaagaggtgatgaccccaggattgctgagaacagtattcagcgtggaagcggaaataca

SEQ ID NO: 2106 - DNA, 75 bp, synthetic construct
  source 1..75: mol_type = other DNA
tcggcgatggcggcggaacattaccaacgccggacgcaaagcagacagcactggtaaatgagaaacgccgggctg

SEQ ID NO: 2107 - DNA, 75 bp, synthetic construct
  source 1..75: mol_type = other DNA
atgaaaaactccgtaaagaggttgaggattacagggctgccagcgaggcagatctccagcctgggactattgagt

SEQ ID NO: 2108 - DNA, 75 bp, synthetic construct
  source 1..75: mol_type = other DNA
tgctcgtgaagcggcgggtggtatgccggacccgacgctgccggaggtgtccggaggtagtggcagagcggacga

SEQ ID NO: 2109 - DNA, 75 bp, synthetic construct
  source 1..75: mol_type = other DNA
gaaaacaaacagcgcaaaaagcaggggctggataccctgggtatggatgaactgatagcgaaagcctggcgtttt

SEQ ID NO: 2110 - DNA, 75 bp, synthetic construct
  source 1..75: mol_type = other DNA
ttttttagttctgacatgagagcaaatgcctctgcactatcggttatctgtgtttttatatttggattggctttt

SEQ ID NO: 2111 - DNA, 75 bp, synthetic construct
  source 1..75: mol_type = other DNA
tccgcgcattaaacagctggcgcgccgcagtacagtgacgccgggcggggctgcctgcagatataacgatattat

SEQ ID NO: 2112 - DNA, 75 bp, synthetic construct
  source 1..75: mol_type = other DNA
ggggtgatcaacgtcttcagagggctgaactggaattacaaaaccaattgcccctgtaaatttggcagtaaaatt

SEQ ID NO: 2113 - DNA, 75 bp, synthetic construct
  source 1..75: mol_type = other DNA
gagtaatctgctgttttctctcggtgccagtatgacgcttggcggtgttgcacagatgctggcccctaaacccaa

SEQ ID NO: 2114 - DNA, 75 bp, synthetic construct
  source 1..75: mol_type = other DNA
gctgtttggcctgctgacgtatctgactaacctgtatttcaaaatcagagaggaccgtcgtaaggtggcgcgggg

SEQ ID NO: 2115 - DNA, 75 bp, synthetic construct
  source 1..75: mol_type = other DNA
gcagctttacttacgatgataaataccggggccggatggtggcgcaccgtcacacgggccggccggaaatccgtt

SEQ ID NO: 2116 - DNA, 75 bp, synthetic construct
  source 1..75: mol_type = other DNA
cccagggcggtcagattgcgtccatgcgtatccgcatgttcagccagatcgccaatatcatgctttactgcctgt

SEQ ID NO: 2117 - DNA, 75 bp, synthetic construct
  source 1..75: mol_type = other DNA
tgattaatcaggccaacgattatatgaacagtaaacaatggcctggtaaagcggctattggtcgtctgaaaggtg

SEQ ID NO: 2118 - DNA, 75 bp, synthetic construct
  source 1..75: mol_type = other DNA
atgactgcccgtcagaatgcactggtccccctgaacgcagagcaacaggccgcatggcgggcggtggcggagacg

SEQ ID NO: 2119 - DNA, 75 bp, synthetic construct
  source 1..75: mol_type = other DNA
aacccgggatggatgtgacatcggctccttccgtcagggaggtgcgctttggtgatggctattcccagcgtgcgc

SEQ ID NO: 2120 - DNA, 75 bp, synthetic construct
  source 1..75: mol_type = other DNA
ggggtgatcaacgtcttcaggggactgagctggaattacaaaaccaattgcccctgcaaatttggcagtaaaatt

SEQ ID NO: 2121 - DNA, 75 bp, synthetic construct
  source 1..75: mol_type = other DNA
atgaactatgccggacacgaaaaacttcgcgccgacgtggcggaggtggccaacaccatgtgtgaccttcgggcc

SEQ ID NO: 2122 - DNA, 75 bp, synthetic construct
  source 1..75: mol_type = other DNA
atgggactgatgacacgcattgccgataaaaccggcgcgctcggcagcgtcgtttccgcgatgggctgcgccgcc

SEQ ID NO: 2123 - DNA, 75 bp, synthetic construct
  source 1..75: mol_type = other DNA
ctgaaaaccgatatagcaaaggcggcaaaccgatgcgcatcaacggcagagaagttaccggagatgctggatgaa

SEQ ID NO: 2124 - DNA, 75 bp, synthetic construct
  source 1..75: mol_type = other DNA
ggctccgcgcacatcaggttcaggaaaccagaactggttgacaggctgaatgatattattgcgaaacactatccg

SEQ ID NO: 2125 - DNA, 75 bp, synthetic construct
  source 1..75: mol_type = other DNA
atgaaacgacatctgaacaccagctacaggctggtatggaatcacattacgggcaccctggtggtggcctccgaa

SEQ ID NO: 2126 - DNA, 75 bp, synthetic construct
  source 1..75: mol_type = other DNA
tggtgcataaccaacgtattgttcagtcaggtcagagctggcagcaagggcctatcgttttgaactggttggata

SEQ ID NO: 2127 - DNA, 75 bp, synthetic construct
  source 1..75: mol_type = other DNA
ttccggtaatgctgggggcagtgttaatgtctcagcatgtacatgcagctgataatctgacctttaaaggaaaac

SEQ ID NO: 2128 - DNA, 75 bp, synthetic construct
  source 1..75: mol_type = other DNA
ccgacagcgttaacgtgcaggcgctgaacatggggcgcattgtcgttgacattgatggtgttaatctcgctgaac

SEQ ID NO: 2129 - DNA, 75 bp, synthetic construct
  source 1..75: mol_type = other DNA
ggagagcgcccgggctgtgctggctgcgggatcaggtaaggcagaaccggtctctgcatccacaaccgccctgtt

SEQ ID NO: 2130 - DNA, 75 bp, synthetic construct
  source 1..75: mol_type = other DNA
cttacaggtaaccctgcaggaagctgatggcagtgtacagcgatttaatgtgccatggtcttcggtgcctgtact

SEQ ID NO: 2131 - DNA, 75 bp, synthetic construct
  source 1..75: mol_type = other DNA
gcctgttgagcatgttgatgctggcagagtaattctgatgcccccctcagtggcaaaagacatggtcaggagcgg

SEQ ID NO: 2132 - DNA, 75 bp, synthetic construct
  source 1..75: mol_type = other DNA
cgtaaggtcggtgggcgtaatgtaagcaatatctatcggcttaatgtggaaaaactcgaagcagctgcggcggcg

SEQ ID NO: 2133 - DNA, 75 bp, synthetic construct
  source 1..75: mol_type = other DNA
atattccagtggaaacagtattcgtcccagaggaataacaaaagttggaaacagcgaactgagacgtctgcttta

SEQ ID NO: 2134 - DNA, 75 bp, synthetic construct
  source 1..75: mol_type = other DNA
gaagggaaagatttcaaagagattgacctgctggcgcgccagtcggaacgccacgcgcggatcggcaagtttaac

SEQ ID NO: 2135 - DNA, 75 bp, synthetic construct
  source 1..75: mol_type = other DNA
atgaagaaaaaatacgaactggttgttaaagagataaataattacccggataagattgctgttactgtggcactt

SEQ ID NO: 2136 - DNA, 75 bp, synthetic construct
  source 1..75: mol_type = other DNA
atggctgatgcaatggatctcgtacagcagcgcgttgaagaagaacgccagcgccatatccgtgctgcccgtgcc

SEQ ID NO: 2137 - DNA, 75 bp, synthetic construct
  source 1..75: mol_type = other DNA
atttaatgaaagcggagagctggtaaaacttaatcagcctccggagaactgggtgcatcttacccgcggagatat

SEQ ID NO: 2138 - DNA, 75 bp, synthetic construct
  source 1..75: mol_type = other DNA
cagaagtatgaaacacctgatcacgcttattgaggaattgcgggaaaaaggtgttaatttccgtagtctgacgga

SEQ ID NO: 2139 - DNA, 75 bp, synthetic construct
  source 1..75: mol_type = other DNA
aaatgttcccggtggtcaacatgcttccagcactccttctggcaatgccgctttccgccgcctggaccgcctggt

SEQ ID NO: 2140 - DNA, 75 bp, synthetic construct
  source 1..75: mol_type = other DNA
tgttgccagatgtggcgattagtcttgaccgtactgaaggtgccacgctggagttttacgaagctgaggcgaaaa

SEQ ID NO: 2141 - DNA, 75 bp, synthetic construct
  source 1..75: mol_type = other DNA
gggccgcgccagcaggagaagctgttaccgttttctgacgtccgcgaggagctgccgcgcggcacgtttgcttat

SEQ ID NO: 2142 - DNA, 75 bp, synthetic construct
  source 1..75: mol_type = other DNA
gcgttttacggggctgaagcggggctaccgtctgacagagctggtcctgatgcatgagccactggcgcaacagcg

SEQ ID NO: 2143 - DNA, 75 bp, synthetic construct
  source 1..75: mol_type = other DNA
gtgattacaatcgctggcgtcgtcacagtgcctgtggcggtctcagcccggaacaatttgaaaaccataatctcg

SEQ ID NO: 2144 - DNA, 75 bp, synthetic construct
  source 1..75: mol_type = other DNA
atacccgctggcatgaagattccgttcgtaaccgctggttcagcgtaatggcggggccgtctgtgcgcgtgaatg

SEQ ID NO: 2145 - DNA, 75 bp, synthetic construct
  source 1..75: mol_type = other DNA
ctggtcaggagctgcccattcgctggcttgcgcaacacggcagcgaaaaaccagtaacgcacgttgcacgggaag

SEQ ID NO: 2146 - DNA, 75 bp, synthetic construct
  source 1..75: mol_type = other DNA
atgaccagatggtcgacatggcgtttatcactcaactgaccggcttaaccgataagtggttttataagctcatca

SEQ ID NO: 2147 - DNA, 75 bp, synthetic construct
  source 1..75: mol_type = other DNA
atgctggtggagtggggaccggttatcccggaggggaaggtcgagatcactatcagtaagtacgaaaaagcgagt

SEQ ID NO: 2148 - DNA, 75 bp, synthetic construct
  source 1..75: mol_type = other DNA
aatatcatcaataagttacgtgatgaaggtttccagccattctttgcctgtcagagtcgggttcgtgatttggga

SEQ ID NO: 2149 - DNA, 75 bp, synthetic construct
  source 1..75: mol_type = other DNA
tggtggagccggaaccgaaaagcatgcgtaatctgccgtccggggtcgttcctgccgttcgccagccgctggtgg

SEQ ID NO: 2150 - DNA, 75 bp, synthetic construct
  source 1..75: mol_type = other DNA
atgcgcatgaatgttttcgaaatggaagggtttcttcgcgggaaatgtgtaccgcgagatctgaaagtgaatgaa

SEQ ID NO: 2151 - DNA, 75 bp, synthetic construct
  source 1..75: mol_type = other DNA
tccacctggaatggctggtgatggagtggcgcgaggaagcctataccctcgatgaactggctgattatctcgatt

SEQ ID NO: 2152 - DNA, 75 bp, synthetic construct
  source 1..75: mol_type = other DNA
gaaaacagacagcgcaaaaagcaggggctggataccctgggtatggatgaactgatagcgaaagcctggcgtttt

SEQ ID NO: 2153 - DNA, 75 bp, synthetic construct
  source 1..75: mol_type = other DNA
gtgatccgtactttcgatatggtaaccagcgcaccggaaaaattatccggacaggctgctgacaagatgcaggct

SEQ ID NO: 2154 - DNA, 75 bp, synthetic construct
  source 1..75: mol_type = other DNA
atgggccaatgacgttcgcacaatgcggatgctggatggcagaactcacagacaaatttgtgaaatgtttgggcg

SEQ ID NO: 2155 - DNA, 75 bp, synthetic construct
  source 1..75: mol_type = other DNA
catgcgccgcatagccgacttacacgccggtgaagctaaaactgatgctcgtgacgctgccatcattgccgaagc

SEQ ID NO: 2156 - DNA, 75 bp, synthetic construct
  source 1..75: mol_type = other DNA
ttgcactggtcagttccactctggccctttcagggtgtggtgcgatgagcacagcaatcaagaagcgtaaccttg

SEQ ID NO: 2157 - DNA, 75 bp, synthetic construct
  source 1..75: mol_type = other DNA
gggcgctggccatgcagatcccggcgtttcgtcagaagctgagcgacggctggtatcaggtacgcattgccgggc

SEQ ID NO: 2158 - DNA, 75 bp, synthetic construct
  source 1..75: mol_type = other DNA
ctctgctggggaccttattactttccggctgtgccggaaccagtacggaatttgagtgtaacgccaccacatccg

SEQ ID NO: 2159 - DNA, 75 bp, synthetic construct
  source 1..75: mol_type = other DNA
gttattaataaactggttacaaagtgctggcaggaagaagcgtatgctgaatcgcaattgagaaaagtgacaaga

SEQ ID NO: 2160 - DNA, 75 bp, synthetic construct
  source 1..75: mol_type = other DNA
taatcggttgtacgctctctttctctgccctggcggcacaacctacggctgagcgctatgtcgtcagttttccag

SEQ ID NO: 2161 - DNA, 75 bp, synthetic construct
  source 1..75: mol_type = other DNA
ggctggaccagtgtctggcgcagttctggcgggtgctgaaacctgccggaagtctttacctgttctgtggtcatc

SEQ ID NO: 2162 - DNA, 75 bp, synthetic construct
  source 1..75: mol_type = other DNA
actgatagttgaacgtaccagggcggggctggctgcagctcgtgctaaaggcagagtaggtggacgccgtcctaa

SEQ ID NO: 2163 - DNA, 75 bp, synthetic construct
  source 1..75: mol_type = other DNA
tcgcagaggctggtatggcggcaagggaggccggtcacgctgtccgtgagatggagcggtggatggtcccgaaca

SEQ ID NO: 2164 - DNA, 75 bp, synthetic construct
  source 1..75: mol_type = other DNA
atggagaaaccggaaaccgcaatgaaagccatcacccgcaatctcgatcgcgaaatctggcgtgacctgatgcaa

SEQ ID NO: 2165 - DNA, 75 bp, synthetic construct
  source 1..75: mol_type = other DNA
gatgccggaatatcagggaggcttctggcacttcatccgcctgccggacggtggcggttacatgatgccggatgg

SEQ ID NO: 2166 - DNA, 75 bp, synthetic construct
  source 1..75: mol_type = other DNA
tactctgctgctttatttttccggcgtcagggaaagatgcaggctggcagtggtataacgagaaaataaatccga

SEQ ID NO: 2167 - DNA, 75 bp, synthetic construct
  source 1..75: mol_type = other DNA
cgtaaaccgaatccccaccgtggtgggacctcccgggccaaagggggaacaggggcccgcgggtcctcaggggcc

SEQ ID NO: 2168 - DNA, 75 bp, synthetic construct
  source 1..75: mol_type = other DNA
aatcgcttccgtttccgtggtgcgctttccactgccagcatcgatgactttacccgttattctaaagatcttgca

SEQ ID NO: 2169 - DNA, 75 bp, synthetic construct
  source 1..75: mol_type = other DNA
ctcgtgaccgtcagcgccgcacctaacgattcgctccggcaggcgctaatgctcgatttgctgaaagtctcatca

SEQ ID NO: 2170 - DNA, 75 bp, synthetic construct
  source 1..75: mol_type = other DNA
gaagttgtcgaaggaaaaatgcgaccaggttaacgccattgagcgtgataaggcgctggcatgggtggagaaaaa

SEQ ID NO: 2171 - DNA, 75 bp, synthetic construct
  source 1..75: mol_type = other DNA
ttgcagctgctattggtggtggggctgttgccatagcgtctgtgctcatcactggtccaggtggtaacgatggtc

SEQ ID NO: 2172 - DNA, 75 bp, synthetic construct
  source 1..75: mol_type = other DNA
cagcatattgaggcaggcatttcactgtgtgatgcggtgaattttctcgtggaaaaatacgcgctggtgcgtacc

SEQ ID NO: 2173 - DNA, 75 bp, synthetic construct
  source 1..75: mol_type = other DNA
taccgccatcgaaacgggcacatacaggcagagtggctgtgaaagaaagtaatcagcgatggtgctctgacgggt

SEQ ID NO: 2174 - DNA, 75 bp, synthetic construct
  source 1..75: mol_type = other DNA
ggagtgtggcggtgagctggattatctgggggaagtcagcgctgaacagctggaactggtgagcagtgccctgaa

SEQ ID NO: 2175 - DNA, 75 bp, synthetic construct
  source 1..75: mol_type = other DNA
tatcatcactttaaaaataaaaaacaattactcagtgcctgttataagcagcaattaattatgattgatgcctac

SEQ ID NO: 2176 - DNA, 75 bp, synthetic construct
  source 1..75: mol_type = other DNA
actcaccggaccatcagggtaaacatccggagcaacaccttcgtcccttccggggtatcctgcaggcagatgcgt

SEQ ID NO: 2177 - DNA, 75 bp, synthetic construct
  source 1..75: mol_type = other DNA
acgatgaacttaaagcgcgttcttacgccgcgcttgaaaaaatgggtgtaactccttctgaagcgcttcgtctca

SEQ ID NO: 2178 - DNA, 75 bp, synthetic construct
  source 1..75: mol_type = other DNA
gaagagctggatgcagatacctggcgggccacgctgcatattgaggtgtttttaccggcacaggtaccggattca

SEQ ID NO: 2179 - DNA, 75 bp, synthetic construct
  source 1..75: mol_type = other DNA
ctgctggcaccgctggatgaagcccttcagcactatgtcctgaccgacggcaaactccatgctgacgatatgcct

SEQ ID NO: 2180 - DNA, 75 bp, synthetic construct
  source 1..75: mol_type = other DNA
aacagcgcatcagcttctggccgcagcattttggcctcattccacagtgggtcaccctggagccccgtgtcttcg

SEQ ID NO: 2181 - DNA, 75 bp, synthetic construct
  source 1..75: mol_type = other DNA
cgggtctaccgcgccctggtcgaaccactcacggactcgcatcgggccaagctggacgagctgttgaagctcaag

SEQ ID NO: 2182 - DNA, 75 bp, synthetic construct
  source 1..75: mol_type = other DNA
tacttctttcaatgcaggtagtaaaaggtttgtcatttatcaatcagcacaagataagaatcttcaggttgatat

SEQ ID NO: 2183 - DNA, 75 bp, synthetic construct
  source 1..75: mol_type = other DNA
aagagacggaggccttcctgcgctctgcactggcacgtgccgaagaaaagatcgaagaagatgagcgagaaatag

SEQ ID NO: 2184 - DNA, 75 bp, synthetic construct
  source 1..75: mol_type = other DNA
ccacctgaaatagcaaatctttatcttggaaaaaaaataccagatgaattaagaaaaaaaggagctatgtccccg

SEQ ID NO: 2185 - DNA, 75 bp, synthetic construct
  source 1..75: mol_type = other DNA
atcgaccaaaccagccagttactgccgcgcatcaagatcaccgaactgctgatggacgtggacgactggacgggc

SEQ ID NO: 2186 - DNA, 75 bp, synthetic construct
  source 1..75: mol_type = other DNA
cagccaccgcaaaagcggtgaaaattgcgatggataatgccaatgcccgtctggcaaaagaccggaacggagcag

SEQ ID NO: 2187 - DNA, 75 bp, synthetic construct
  source 1..75: mol_type = other DNA
cggcatcggttcgccctttcaacccgattttatcggtacagcattcacgaaaaaatattttaaccggagcagact

SEQ ID NO: 2188 - DNA, 75 bp, synthetic construct
  source 1..75: mol_type = other DNA
ccattccggacgaacaggcaataaaggaagaaggtgcagtcgctgtagccactgccattgaagccggtgatgaac

SEQ ID NO: 2189 - DNA, 75 bp, synthetic construct
  source 1..75: mol_type = other DNA
ggacagcaacgactggctgccgtacaacgggccatgcagcagggggccgcgaatgatgactggtttatgccggag

SEQ ID NO: 2190 - DNA, 75 bp, synthetic construct
  source 1..75: mol_type = other DNA
atccgaatatctactacttccataatctgacgcccgggtgggtgtcattcaatggtgaaaaaccggagattgcca

SEQ ID NO: 2191 - DNA, 75 bp, synthetic construct
  source 1..75: mol_type = other DNA
cgctgttcagcgagccacatccttcccgtgagttttgtgtccagtacggtgagactgattacgatttcctgtgcc

SEQ ID NO: 2192 - DNA, 75 bp, synthetic construct
  source 1..75: mol_type = other DNA
gcttatgcaaacccgttgtcagacgatgactggcagcgactggctaaggtgaaggatctgacgccgggcgagatg

SEQ ID NO: 2193 - DNA, 75 bp, synthetic construct
  source 1..75: mol_type = other DNA
gcggcgctgattgcggtggcatggtggaaccctgtgggctggctgggtgccgcggctgtatcgggcatgtatgcg

SEQ ID NO: 2194 - DNA, 75 bp, synthetic construct
  source 1..75: mol_type = other DNA
gaaaatatgagccttatcttctcaatgataattccatactctccagaattgcccttcttgaacttggcattttcg

SEQ ID NO: 2195 - DNA, 75 bp, synthetic construct
  source 1..75: mol_type = other DNA
aatttattgccacaaaggcaggagagattaccgtttataactatgacagtgagacacgggagtatatttctgcat

SEQ ID NO: 2196 - DNA, 75 bp, synthetic construct
  source 1..75: mol_type = other DNA
ggcatgccggaatatcttggcgcattactctcggccagcctgtctcattcggcggacatgttcagaaaactgtat

SEQ ID NO: 2197 - DNA, 75 bp, synthetic construct
  source 1..75: mol_type = other DNA
agctacggcgctggacatacgctggcggtaagcaatggaaagggctgatgactcgccgtgagattgagcgtgaag

SEQ ID NO: 2198 - DNA, 75 bp, synthetic construct
  source 1..75: mol_type = other DNA
gtggtgccctgattgcagacagtggtgccactgttgaggggaccaatgccagcggtaagttcagtattgatggca

SEQ ID NO: 2199 - DNA, 75 bp, synthetic construct
  source 1..75: mol_type = other DNA
ggaaaaatgcgggattcagcgttgttggtcacctggtcttcaccaaaaactacacatcgaaggccgcatatgtgg

SEQ ID NO: 2200 - DNA, 75 bp, synthetic construct
  source 1..75: mol_type = other DNA
tggatggatttctgaaaggtaaatgcatcccacgagatttaaaggttaacgaaacaaacgctgaatatctggtgc

SEQ ID NO: 2201 - DNA, 75 bp, synthetic construct
  source 1..75: mol_type = other DNA
atgccagtggcatttgaatttaaatgcgttccgtttgaaggcctgaaagaacgtccgtttaaattacgcctcagc

SEQ ID NO: 2202 - DNA, 75 bp, synthetic construct
  source 1..75: mol_type = other DNA
tgtgtcatgaagatggcctgactcaggctgaagttctgaccgcactgataaaaagtgaagcgcaaaaacgatgca

SEQ ID NO: 2203 - DNA, 75 bp, synthetic construct
  source 1..75: mol_type = other DNA
tgcgcgaggcggcggaacaggcaacgcaagatgaatgggtagcatatattttgccgggtcataacggcatttatc

SEQ ID NO: 2204 - DNA, 75 bp, synthetic construct
  source 1..75: mol_type = other DNA
atgacgaagaaaaaagcacataaacctggttcagcgaccatcgcgcttaacaagcgcgcccgtcacgaatacttt

SEQ ID NO: 2205 - DNA, 75 bp, synthetic construct
  source 1..75: mol_type = other DNA
cctggtacgtcgaccaccacggcactccctgcaaaatcctgcgttctacccacaacaaagttcactacatccgaa

SEQ ID NO: 2206 - DNA, 75 bp, synthetic construct
  source 1..75: mol_type = other DNA
atagttttttagccaaaggttttattgctgtttctgaacttgcccgtcgcgtttctgttaaagggaaactgaaga

SEQ ID NO: 2207 - DNA, 75 bp, synthetic construct
  source 1..75: mol_type = other DNA
acggaccctacgtaaaactgtcctgggacgcgacaaaagatcttaattttggcattcgctatcgttacgactgga

SEQ ID NO: 2208 - DNA, 75 bp, synthetic construct
  source 1..75: mol_type = other DNA
gctcccggaatgctggctgaaacggacgagtacatggccggaggtaaacgaccggcccgtgtttaccgggtggtg

SEQ ID NO: 2209 - DNA, 75 bp, synthetic construct
  source 1..75: mol_type = other DNA
cggccagcagttcagctacagcggcgtccgtctccccttacccgtctcactgcacgtccgcgacatgacctttgc

SEQ ID NO: 2210 - DNA, 75 bp, synthetic construct
  source 1..75: mol_type = other DNA
ggtatcccgtggcatgagctgccagcttcacacaggggaaacaatcagatgagtttgcctttacctcagaattaa

SEQ ID NO: 2211 - DNA, 75 bp, synthetic construct
  source 1..75: mol_type = other DNA
ttggtatcacgccatcagaatattcatcgggtggaagcagacatcagggcagcattaccaaagccggaaacagct

SEQ ID NO: 2212 - DNA, 75 bp, synthetic construct
  source 1..75: mol_type = other DNA
cgcattcgttcaaataactgttacggtcaggttattcgtcgtgaccaggagagcgcattaacctgctgggggata

SEQ ID NO: 2213 - DNA, 75 bp, synthetic construct
  source 1..75: mol_type = other DNA
tgaccaatcagggcgcggcgcggctggcgaacgcggcggcactcggtaccaaactcaacctgacgcagatggccg

SEQ ID NO: 2214 - DNA, 75 bp, synthetic construct
  source 1..75: mol_type = other DNA
gacccatgatgaacaggaactgtttgaagtcattaataaaaaattactggcacatttttctgatgccagctcata

SEQ ID NO: 2215 - DNA, 75 bp, synthetic construct
  source 1..75: mol_type = other DNA
gtggccgaccgcgtgaccgtgcagtctgccgccatcgttgaataccagataaacgccacgctttacctttaccct

SEQ ID NO: 2216 - DNA, 75 bp, synthetic construct
  source 1..75: mol_type = other DNA
gacgcgctgacggccgctgtagctggactcggttatcgggccacgctggccgatgccccctcagtttcgacgccg

SEQ ID NO: 2217 - DNA, 75 bp, synthetic construct
  source 1..75: mol_type = other DNA
atcagcgtcattacccaggaagacctgcagcgaaaaccggtacagaatctgaaggatgtcctcaaagaagtgcct

SEQ ID NO: 2218 - DNA, 75 bp, synthetic construct
  source 1..75: mol_type = other DNA
tgatgatcatcatcgcaataattctccacttccaccaactccacctgatgatgattcagacgacactccagttcc

SEQ ID NO: 2219 - DNA, 75 bp, synthetic construct
  source 1..75: mol_type = other DNA
gtgagcgcagaactcatgcgactgctgagcaatatcatccgcaccgggatcatctctgaagttgatgagaagtcc

SEQ ID NO: 2220 - DNA, 75 bp, synthetic construct
  source 1..75: mol_type = other DNA
gcgtgagaaacaagcggctgaacaggaacgcctgaagcaacttgagaaagagcggttagcggctcaggagcagaa

SEQ ID NO: 2221 - DNA, 75 bp, synthetic construct
  source 1..75: mol_type = other DNA
tgcatcagggaataacccacctcagctggttgccactcccgtccctgatgaacagcgcatcagcttctggccgca

SEQ ID NO: 2222 - DNA, 75 bp, synthetic construct
  source 1..75: mol_type = other DNA
gatgacgtacagtcatcacgcctgccgtacggagtgttatgccatgacggttcattattaccgtctgcgggatta

SEQ ID NO: 2223 - DNA, 75 bp, synthetic construct
  source 1..75: mol_type = other DNA
atgaaaacattgtctcagaacaccacctcttcggtctcagcaccggagactgacctgcaacaactggttgccagc

SEQ ID NO: 2224 - DNA, 75 bp, synthetic construct
  source 1..75: mol_type = other DNA
caacaaatgaccagaacaccgatttgcaacgcaatgcactgaactgtgcgggatgtgagcggatttttgaggata

SEQ ID NO: 2225 - DNA, 75 bp, synthetic construct
  source 1..75: mol_type = other DNA
atgacagaaagcggctggcaattatctatgatattggactgtcaacgatctaccgctatcaccctgttgggactg

SEQ ID NO: 2226 - DNA, 75 bp, synthetic construct
  source 1..75: mol_type = other DNA
actggcctgatgacccgcgacaattaccgaacggtaaataacattaccctgggtaagtatcaggaggcgaaacga

SEQ ID NO: 2227 - DNA, 75 bp, synthetic construct
  source 1..75: mol_type = other DNA
atgcaacaactttcctttctgcccggagagatgacgcccggcgagcgcagcctcattcaacgggccctgaaaacc

SEQ ID NO: 2228 - DNA, 75 bp, synthetic construct
  source 1..75: mol_type = other DNA
tgatattctccgggctcgcagggcgaccggcctgatgacccggaacaattacagaatggtaaataacattaccca

SEQ ID NO: 2229 - DNA, 75 bp, synthetic construct
  source 1..75: mol_type = other DNA
catgacctggaaaccctgttctggcagtggggcgagcgttttccgtcactggccggaatggaacgctggcagtgg

SEQ ID NO: 2230 - DNA, 75 bp, synthetic construct
  source 1..75: mol_type = other DNA
ggcaaagccacggtggatggcatccagttgcgctttaccggctctatccagcgtgacgataccggggaagtgcag

SEQ ID NO: 2231 - DNA, 75 bp, synthetic construct
  source 1..75: mol_type = other DNA
acacgccggtagaggcaaaggacaatcttaagtccacgcagatgatgagcgtgattgacgccattggtgaagggc

SEQ ID NO: 2232 - DNA, 75 bp, synthetic construct
  source 1..75: mol_type = other DNA
gcaggacccggcaaccgatgcaggtctgctgaaccagaacgacgtcaccacgcttgtgcgtaaagacggtttccg

SEQ ID NO: 2233 - DNA, 75 bp, synthetic construct
  source 1..75: mol_type = other DNA
cgctgaccagcgatgcgccatcggggaaggaaggtgccgcattcatggcgctgatggcagaaaaagcccgtcttg

SEQ ID NO: 2234 - DNA, 75 bp, synthetic construct
  source 1..75: mol_type = other DNA
aggggctgcctgacggctcctttacccgcgaacaggcggaagccgttgccgcacagtaccggaacgtctttatcg

SEQ ID NO: 2235 - DNA, 75 bp, synthetic construct
  source 1..75: mol_type = other DNA
gacgttgctgctgtccgcaatcctcggtgatgcgatcaacctcgggctgaccaagatggccgagtcgagccccgg

SEQ ID NO: 2236 - DNA, 75 bp, synthetic construct
  source 1..75: mol_type = other DNA
acctccctgttgaaagtcgtcgtcaggccaaaggtacccgcttcctgtggcagtacagcgacaaatggatgactg

SEQ ID NO: 2237 - DNA, 75 bp, synthetic construct
  source 1..75: mol_type = other DNA
gaaaaaggtgctggcgctgaaagtggatccggagtcgccggagtcttttatgttacgcccaaaacgtcgccgctg

SEQ ID NO: 2238 - DNA, 75 bp, synthetic construct
  source 1..75: mol_type = other DNA
ggacgccgggcaggaagtggagatgccggagccggagaagaagaaacgagaaatgattcagttgtggggggagta

SEQ ID NO: 2239 - DNA, 75 bp, synthetic construct
  source 1..75: mol_type = other DNA
gatgcaccaggtacacataaagctggttatgcaatctgtcgctctgtagatttaaattcatgggaatatgtgcca

SEQ ID NO: 2240 - DNA, 75 bp, synthetic construct
  source 1..75: mol_type = other DNA
tgcccccaggtgctcctgcggcagctgagttgctcctgcactcggtcatcgctggcgcgacgatgcagtgggccg

SEQ ID NO: 2241 - DNA, 75 bp, synthetic construct
  source 1..75: mol_type = other DNA
atgaccagatggtcgacatggcgtttatcactcaacttaccggcttaaccgataagtggttttacaaactcatca

SEQ ID NO: 2242 - DNA, 75 bp, synthetic construct
  source 1..75: mol_type = other DNA
atgacgacgttaactcaatgccagcagcaggtgctggatatgctgatttcttaccagaaagaacgtggcttcccg

SEQ ID NO: 2243 - DNA, 75 bp, synthetic construct
  source 1..75: mol_type = other DNA
cgcaactcgctcgtgagcatgggatcaacgataatttgctgttcaagtggcgccagtactggcgcgaaggaaaac

SEQ ID NO: 2244 - DNA, 75 bp, synthetic construct
  source 1..75: mol_type = other DNA
acctttcacgcgaacgctgccagttaatactgacccagcttgttatggcgggtctggcagattatcagttcggtt

SEQ ID NO: 2245 - DNA, 75 bp, synthetic construct
  source 1..75: mol_type = other DNA
agctgatggtcatctggccggatttcctcgcatgggatacggtcaccagtaccaccgccaccgcgtatgccaccg

SEQ ID NO: 2246 - DNA, 75 bp, synthetic construct
  source 1..75: mol_type = other DNA
attaacgtgaaataccgttatgagtttacggacacgctggggctggtgacgtcattcagttatgccaatgccaaa

SEQ ID NO: 2247 - DNA, 75 bp, synthetic construct
  source 1..75: mol_type = other DNA
tcacaccgatgaacatgaccacgaaaccctccgatggcagtaaagccggtaagcagaaggataacgccaatgcag

SEQ ID NO: 2248 - DNA, 75 bp, synthetic construct
  source 1..75: mol_type = other DNA
tatggtacgccagtttcacattgccgaacggtaaaagatttaaacagtctcttggaacaaaggacaaaaggcagg

SEQ ID NO: 2249 - DNA, 75 bp, synthetic construct
  source 1..75: mol_type = other DNA
ctgaaaagaattgaggagctggagggcgaacaaatcaaaaccgcccgcagggagatggtgctggctgttgtcggc

SEQ ID NO: 2250 - DNA, 75 bp, synthetic construct
  source 1..75: mol_type = other DNA
gtcggttaaccgagctttccggcggtcagcgccagcgcgcatttctggcgatggtcctggcccagaatacgcccg

SEQ ID NO: 2251 - DNA, 75 bp, synthetic construct
  source 1..75: mol_type = other DNA
atgaataaccagtatttacagtttgtgcgtgagcagctcattatcgccaccgctgatttgagtggggcaacaaaa

SEQ ID NO: 2252 - DNA, 75 bp, synthetic construct
  source 1..75: mol_type = other DNA
atgtgatgtgtcagagcaactggagcttatcagcagcgcctttaaggttatcgaaacacaacgtccgaaactggc

SEQ ID NO: 2253 - DNA, 75 bp, synthetic construct
  source 1..75: mol_type = other DNA
gcccgagtatatcgccatctcatcggaaaccagtgcaactcttattcatcgggttccaccagagaaaaagaagaa

SEQ ID NO: 2254 - DNA, 75 bp, synthetic construct
  source 1..75: mol_type = other DNA
tgaaccgaagaacacggcggtgcggagtccggagagtaacggcatagcagagagcttcgtgaaaacgataaagcg

SEQ ID NO: 2255 - DNA, 75 bp, synthetic construct
  source 1..75: mol_type = other DNA
tcgccataaatccgcgctggtcatgcagaagtacagccgccagcaggcgagggaggcagagcagaaagcccgtgc

SEQ ID NO: 2256 - DNA, 75 bp, synthetic construct
  source 1..75: mol_type = other DNA
gagcagacggaatggcaccgcgtggtgctgttcggcaagctcgcggaagtggcaggtgaatatctgcgcaagggc

SEQ ID NO: 2257 - DNA, 75 bp, synthetic construct
  source 1..75: mol_type = other DNA
atgtacggaacatgcgaaacgctatgccgggagctggcagcaaagtatccgggatatacaccgctgatgctggtt

SEQ ID NO: 2258 - DNA, 75 bp, synthetic construct
  source 1..75: mol_type = other DNA
gtggcgctcgatgccgccctgctggaaaaactccaggctgtcgctgaacaccttcgggaagccgaaggctgggaa

SEQ ID NO: 2259 - DNA, 75 bp, synthetic construct
  source 1..75: mol_type = other DNA
agtcgcgtcatcaacaaatcggtgttcctggcactgggcatcaatatcgaaggtcagaaagaactgctgggtatg

SEQ ID NO: 2260 - DNA, 75 bp, synthetic construct
  source 1..75: mol_type = other DNA
taagcgatgccaaaccatgtagccgtcacatgatcggcatgtccatcaacctgcagaccagcggcccgcattggg

SEQ ID NO: 2261 - DNA, 75 bp, synthetic construct
  source 1..75: mol_type = other DNA
atacagataacgtattgaatgaatgctttaataaccgttgcactctgcaaatatgtccttatggactaaaacaac

SEQ ID NO: 2262 - DNA, 75 bp, synthetic construct
  source 1..75: mol_type = other DNA
gcgtctgtgttgcctctgttgtccgtacggccctgcgcgctgttcgtgacaccgtggtctctgttgcccgcgcgg

SEQ ID NO: 2263 - DNA, 75 bp, synthetic construct
  source 1..75: mol_type = other DNA
acgatggttacgcagggctatgactatcgtcgtgatgacgatatggcattgtggagttctgcagatctgacttat

SEQ ID NO: 2264 - DNA, 75 bp, synthetic construct
  source 1..75: mol_type = other DNA
ctaattctgcaggagcgatagcaaccggcctccttgcgctaaaaattcctgtccctctgacgacagttcagtggg

SEQ ID NO: 2265 - DNA, 75 bp, synthetic construct
  source 1..75: mol_type = other DNA
gcagaggtccggggctgttcagcagaacagcgtctggcggcaagaaaagccagagccgcgccactgatgcagtca

SEQ ID NO: 2266 - DNA, 75 bp, synthetic construct
  source 1..75: mol_type = other DNA
ctattcctgacgaacaggccataaaagaagatagcgctgttgcggtggccactgccattgaagccggtgatgagc

SEQ ID NO: 2267 - DNA, 75 bp, synthetic construct
  source 1..75: mol_type = other DNA
aaacctattcggcggccttggccgagctggtcaaccaccagtatcgccacgcctttgccgcccactggggcgacg

SEQ ID NO: 2268 - DNA, 75 bp, synthetic construct
  source 1..75: mol_type = other DNA
gagagcaccgggcacgtcaacccgaagtacggtagcgagccgggacggctgttctatacccatatctccgaccag

SEQ ID NO: 2269 - DNA, 75 bp, synthetic construct
  source 1..75: mol_type = other DNA
ttgaattgttcattaaaaatccgcttgaaaacgggcttacccgtggtgaacaaatggaactggcacggattgcgc

SEQ ID NO: 2270 - DNA, 75 bp, synthetic construct
  source 1..75: mol_type = other DNA
aagattgaccatgcgcatatctgcatcgaagcgaccggcacctatatggaacctgtcgcagagtgcctttacgat

SEQ ID NO: 2271 - DNA, 75 bp, synthetic construct
  source 1..75: mol_type = other DNA
atgctaaaacagcaggatatgaccgaaacagccagagtggtgtttaatgaattaagcgtcactgaaccggcaaca

SEQ ID NO: 2272 - DNA, 75 bp, synthetic construct
  source 1..75: mol_type = other DNA
tttgctttagcggatgctctgaagtgctcacctacatggctaatgtttggtgacgaagacaaggcaccagtgcct

SEQ ID NO: 2273 - DNA, 75 bp, synthetic construct
  source 1..75: mol_type = other DNA
cgctggtttgaccgtggtgttctgcgggaggtggtcctggaagcccggagtgaaatccgcagcatggcggatgca

SEQ ID NO: 2274 - DNA, 75 bp, synthetic construct
  source 1..75: mol_type = other DNA
ccggcggcgaagacggtggcagtgtggtgttcccgccggtgctggtgcagatgctcgaccggctggaaagtgaaa

SEQ ID NO: 2275 - DNA, 75 bp, synthetic construct
  source 1..75: mol_type = other DNA
gccgtgctaaacctgaagctaaagcctatacacttggggatgggcaagggttgtctttacttgtagagccaaatg

SEQ ID NO: 2276 - DNA, 75 bp, synthetic construct
  source 1..75: mol_type = other DNA
ccgtaattttagaggcgcaggatgtgttgataacctacagaggaaaactaccgggaataattacgggttctctga

SEQ ID NO: 2277 - DNA, 75 bp, synthetic construct
  source 1..75: mol_type = other DNA
ccggtgaaaccgacatcgccctgcccggcccgctgccgttcatcctctcccgcacctacagcagttaccggacaa

SEQ ID NO: 2278 - DNA, 75 bp, synthetic construct
  source 1..75: mol_type = other DNA
tgtacggtgaaatgcgcgtggggtcgcgggtggcttctcaggagatcagcacggcagacgagggggacggtggtc

SEQ ID NO: 2279 - DNA, 75 bp, synthetic construct
  source 1..75: mol_type = other DNA
agtccaggagctggtttcgtatggtcgtaatccctggctgtcactctgggggcgtctctccgctgaagacaatgc

SEQ ID NO: 2280 - DNA, 75 bp, synthetic construct
  source 1..75: mol_type = other DNA
tactgaataacgccttaaaaatcgccgttatgaaaaatggcgatttgtctcttattcaacttggtcttgataaag

SEQ ID NO: 2281 - DNA, 75 bp, synthetic construct
  source 1..75: mol_type = other DNA
ctggtggaggagttgcgcgaacgaggcatcaactttcgtagtctgacggattcaattgataccagtaccccaatg

SEQ ID NO: 2282 - DNA, 75 bp, synthetic construct
  source 1..75: mol_type = other DNA
ttgccccgcgtatggggatcgtattgttcagaccaggttcagagctgatgcccctgtttatgcaggggcgtgtcc

SEQ ID NO: 2283 - DNA, 75 bp, synthetic construct
  source 1..75: mol_type = other DNA
gctggatgaagccaccgggaaactggtggtctgggacggacagaaagccggtagtgcggttggcatactggtact

SEQ ID NO: 2284 - DNA, 75 bp, synthetic construct
  source 1..75: mol_type = other DNA
ccggctcatcaccgcttgaagttgccgccgcaaaagcctgtgcggaaattgaaaaaacgccggtcagtattcgtg

SEQ ID NO: 2285 - DNA, 75 bp, synthetic construct
  source 1..75: mol_type = other DNA
tgacgacacaccggtaaaggtactggcaccgggcctgaaaaagacgaaaacagggcgcatctggacgtatgtccg

SEQ ID NO: 2286 - DNA, 75 bp, synthetic construct
  source 1..75: mol_type = other DNA
gcgttgaaaaccatggaggatcactccgtatatggtttcactataatggcaaacgtgtcagagaaaacctcggtg

SEQ ID NO: 2287 - DNA, 75 bp, synthetic construct
  source 1..75: mol_type = other DNA
acctaccgctctgatgagtgtggttacacgggcggggctgtggcggatgagttcgataaacccaccacggatatc

SEQ ID NO: 2288 - DNA, 75 bp, synthetic construct
  source 1..75: mol_type = other DNA
aatatcacctctgatgccgtatttaacttcttcgataacctgttacccgatagcccgattgtacgtgaccggatc

SEQ ID NO: 2289 - DNA, 75 bp, synthetic construct
  source 1..75: mol_type = other DNA
ctgtacggtgaaatgcgcgtggggtcacgggtgatttcgcaggagatcagcacggcagatgaaggagatggtggt

SEQ ID NO: 2290 - DNA, 75 bp, synthetic construct
  source 1..75: mol_type = other DNA
acgcttcttgagcctgtaataatggaactgcaagaaatagatctattgcacgacagatataaagaacagcacacc

SEQ ID NO: 2291 - DNA, 75 bp, synthetic construct
  source 1..75: mol_type = other DNA
ctgagtacaggcaatggcatctggccatccgtctgtgaccggaacggttacgcgtacggctgtccggaatttcag

SEQ ID NO: 2292 - DNA, 75 bp, synthetic construct
  source 1..75: mol_type = other DNA
agtaccgaccagagcctggtgctgtgcgacacagtccgccatctgcccgaatcttttgaaatcccatggaacccg

SEQ ID NO: 2293 - DNA, 75 bp, synthetic construct
  source 1..75: mol_type = other DNA
aaaccgccgccgcagtccttcatttcttacctgctgacaagtgggtaacgccacgcatgatgacgagaactaccg

SEQ ID NO: 2294 - DNA, 75 bp, synthetic construct
  source 1..75: mol_type = other DNA
aaattttttgtgaagatggcctctatgctgtgtgcgttgaaaatggaaatcttgttagtcattaccgcattatgt

SEQ ID NO: 2295 - DNA, 75 bp, synthetic construct
  source 1..75: mol_type = other DNA
gcttaaccgggcgatcaatgatgcggagtcggtactggggacaacccggcgtcgccgtcgtccgctgggagtgag

SEQ ID NO: 2296 - DNA, 75 bp, synthetic construct
  source 1..75: mol_type = other DNA
tatccagcactgccaccgtggcgcttaccgtggataacaccatggtgatggccacagtggattacgtggatgaca

SEQ ID NO: 2297 - DNA, 75 bp, synthetic construct
  source 1..75: mol_type = other DNA
tcgctttccttctgattgccgcatggggaacatccatgcgtctgtcgtggtcgctgggccgggagaacgccagaa

SEQ ID NO: 2298 - DNA, 75 bp, synthetic construct
  source 1..75: mol_type = other DNA
tcagggcggcatcgccgtcagaccttgctgaacgactgacacaaaaactgaaggagggctggcagccatttggca

SEQ ID NO: 2299 - DNA, 75 bp, synthetic construct
  source 1..75: mol_type = other DNA
cgaacgtttcggtatttcggtggctgagttacgcaaactcaaccagtttcgtacgtttgctcgaggttttgataa

SEQ ID NO: 2300 - DNA, 75 bp, synthetic construct
  source 1..75: mol_type = other DNA
tagagcgtgaggggccgttctacttcctcttcaccgacaaggatggcgaaaaatacggtcgcgcaaacaaacttt

SEQ ID NO: 2301 - DNA, 75 bp, synthetic construct
  source 1..75: mol_type = other DNA
tcgcggcatcgagcgcacttatacccgtgatttgctcgtggaagtttttctcgacggacgcggtaacggcctgaa

SEQ ID NO: 2302 - DNA, 75 bp, synthetic construct
  source 1..75: mol_type = other DNA
tgcggcggatgtggacaaatgggcgctgtatgtcatcggccagaattgcgaccagtcggtgccggatggctttgg

SEQ ID NO: 2303 - DNA, 75 bp, synthetic construct
  source 1..75: mol_type = other DNA
agcagtacggggtcggaccggtatgcagtgagctgcatattgccccgtcaacgtattaccactgtcagcaacagc

SEQ ID NO: 2304 - DNA, 75 bp, synthetic construct
  source 1..75: mol_type = other DNA
gctgtatccggtagtagaggcgctgcaagccatgcgagggattcagtttattactgcggttggattaatttctga

SEQ ID NO: 2305 - DNA, 75 bp, synthetic construct
  source 1..75: mol_type = other DNA
atggcagtaaagatttcaggtgtactgaaagacggtgcaggtaaaccggtacagaactgcacaatccagctgaaa

SEQ ID NO: 2306 - DNA, 75 bp, synthetic construct
  source 1..75: mol_type = other DNA
tggccttgatgattggggtgtcgatctgggacttcgtgtcgccggcgcatcgccgttgcggaccggacggctgcg

SEQ ID NO: 2307 - DNA, 75 bp, synthetic construct
  source 1..75: mol_type = other DNA
tgttgaacttgtacgtctgagcggtcgcgagacgttgcggcaactggaagccaagacaggtgcgacaagatatct

SEQ ID NO: 2308 - DNA, 75 bp, synthetic construct
  source 1..75: mol_type = other DNA
ctaggggatttacctgatgtcacttttgaagaggcctgcctaagatggcttgaggaaaaagctgataaaaaatct

SEQ ID NO: 2309 - DNA, 75 bp, synthetic construct
  source 1..75: mol_type = other DNA
atggcgacgtaagtcgcctcatgaagcgccaccgacgactggtattctttccctttacaatcgtggtgaccgccg

SEQ ID NO: 2310 - DNA, 75 bp, synthetic construct
  source 1..75: mol_type = other DNA
ttaacgtacaggcgctggatatggggcacattgtcgttgacattgatggtgttaatatcactgaactgattaata

SEQ ID NO: 2311 - DNA, 75 bp, synthetic construct
  source 1..75: mol_type = other DNA
atgcagtatgcgaaatctgtcactctgaacgttgaagagtgcgaccgcctttcttttctgccttacctgtttggc

SEQ ID NO: 2312 - DNA, 75 bp, synthetic construct
  source 1..75: mol_type = other DNA
cagttgcaggctcttaaaggtgttggtcagctaattgcaataactctggttgctgaactgggtgatttttcgcga

SEQ ID NO: 2313 - DNA, 75 bp, synthetic construct
  source 1..75: mol_type = other DNA
gctacggcatgggaaaacgtctgggggcggcggatgtggacaagtgggcgctgtatgccatcgggcagtactgcg

SEQ ID NO: 2314 - DNA, 75 bp, synthetic construct
  source 1..75: mol_type = other DNA
cgccggactccggtttcaccggtgaacctgaccgaaataaaacaagcggtcaacagactacattctgagttggga

SEQ ID NO: 2315 - DNA, 75 bp, synthetic construct
  source 1..75: mol_type = other DNA
atgaatatatcagagcaacaactgaataatatgatggctgccgtttcggttgcgctgcagcctctggtcagggtt

SEQ ID NO: 2316 - DNA, 75 bp, synthetic construct
  source 1..75: mol_type = other DNA
ctgattaaccagaaacgcatcgcgccgctgaatcttctgagtgttgacccgaacaaccagagccagattattgcg

SEQ ID NO: 2317 - DNA, 75 bp, synthetic construct
  source 1..75: mol_type = other DNA
cactcctgacccggaatcgcctgtgcgaagtccggctgaaggacggatacagggaagttacggcaacaatggctt

SEQ ID NO: 2318 - DNA, 75 bp, synthetic construct
  source 1..75: mol_type = other DNA
aatgcctttatcaaaatcgcatggtaagcagcatttcaataggcgagtctgcagttaaaagtattttcgaagagt

SEQ ID NO: 2319 - DNA, 75 bp, synthetic construct
  source 1..75: mol_type = other DNA
atgaaacgacatctgaacaccagctacaggctggtatggaatcacattacgggcaccctggtggtggcttccgaa

SEQ ID NO: 2320 - DNA, 75 bp, synthetic construct
  source 1..75: mol_type = other DNA
aagcaatgggaaaagccacatccatagaacttgctgcgcgacttgatatcagtcgtgaagaagtgctgaacgaac

SEQ ID NO: 2321 - DNA, 75 bp, synthetic construct
  source 1..75: mol_type = other DNA
aacctcgtaaaaagtattcgaatgaattcaaacttcgtatggttgaactggcatcacaacccggtgcttgtgtgg

SEQ ID NO: 2322 - DNA, 75 bp, synthetic construct
  source 1..75: mol_type = other DNA
gtagctcaaggcaagcatcgttattttcggctagcaggaaaagatattgctgaattgatggaaagtatgatgggg

SEQ ID NO: 2323 - DNA, 75 bp, synthetic construct
  source 1..75: mol_type = other DNA
gtttctacgcctcatgtgaaaaagttttccgcccggaccttcgcaacgaaccggtcatcgtactcagcaataacg

SEQ ID NO: 2324 - DNA, 75 bp, synthetic construct
  source 1..75: mol_type = other DNA
atgaatgagtttaagcgttttgaagaccggctgaccggactgattgaatcgctgtcaccgtcagggcgtcggcga

SEQ ID NO: 2325 - DNA, 75 bp, synthetic construct
  source 1..75: mol_type = other DNA
ctttcgtggtcgcggtggatgcagaagtggctgctgattgttgtgacgctgccgcattcgtttctgacgttttcg

SEQ ID NO: 2326 - DNA, 75 bp, synthetic construct
  source 1..75: mol_type = other DNA
cccgccgtcacatgccgggaccatcaccgtgtatgaagattctcaaccggggacgctgaatgattttctcggtgc

SEQ ID NO: 2327 - DNA, 75 bp, synthetic construct
  source 1..75: mol_type = other DNA
catgaacactcgcaacgacttctcggtgaactatctcatctcctggtacgagctccaggtgccggagctacgcac

SEQ ID NO: 2328 - DNA, 75 bp, synthetic construct
  source 1..75: mol_type = other DNA
accatgtcagcgatgcggcttgcctataacgggcatcgtcacagagagaacggtcagggcagtaacaccgacaaa

SEQ ID NO: 2329 - DNA, 75 bp, synthetic construct
  source 1..75: mol_type = other DNA
gattcagcggtgatttctcgtttttttgcatccctgaaagcaaaaattcaggcttaccagcgacataaacgacgt

SEQ ID NO: 2330 - DNA, 75 bp, synthetic construct
  source 1..75: mol_type = other DNA
tgccactgttgaggggaccaatgccagcggtaagttcagtattgatggcatatccggtcaggccagcggcctgct

SEQ ID NO: 2331 - DNA, 75 bp, synthetic construct
  source 1..75: mol_type = other DNA
ttgctgataaccgggtatgtcaggtactcacctgtcttcctgaaaaatttgtggttgatttcgcaaacggaatcg

SEQ ID NO: 2332 - DNA, 75 bp, synthetic construct
  source 1..75: mol_type = other DNA
tggccatgaatggcgtcggatgtcgcgccagtgcacgcattatgggcgttggcctcaacacggttttacgtcact

SEQ ID NO: 2333 - DNA, 75 bp, synthetic construct
  source 1..75: mol_type = other DNA
cagtggggaagtcaggaagatttggtgtgcgcacagtggatctggggacgaatcgtgagtctttacgagcaggcg

SEQ ID NO: 2334 - DNA, 75 bp, synthetic construct
  source 1..75: mol_type = other DNA
caggaagggatggctgaggtcgcccggtttattgaaatgaacggctcttttgccgatgagaacagggactggtga

SEQ ID NO: 2335 - DNA, 75 bp, synthetic construct
  source 1..75: mol_type = other DNA
cgcgcaggcgggctatcagtcgccctgttcgtctgacggcagaagaagaccaggaaatcagaaaaagggctgctg

SEQ ID NO: 2336 - DNA, 75 bp, synthetic construct
  source 1..75: mol_type = other DNA
gcaatggtgggccgattttctggatgcgaaccgggagaagggtatcagtccgtttgaatatgcaaagattaacaa

SEQ ID NO: 2337 - DNA, 75 bp, synthetic construct
  source 1..75: mol_type = other DNA
gtacagtctggcatcatcagatataatcctgctctggatatggctggcgcattgactacggtaaaacgccagcat

SEQ ID NO: 2338 - DNA, 75 bp, synthetic construct
  source 1..75: mol_type = other DNA
taccgcaatctgcgccccctgtatccaaaaacggtaattcgtatccgcaaaggtagctctaacggtgtggaactg

SEQ ID NO: 2339 - DNA, 75 bp, synthetic construct
  source 1..75: mol_type = other DNA
cccgaccgaatccgtggccattgaccttgcttatgaaggttccggcagtggtgactggcgcactgacggtttcat

SEQ ID NO: 2340 - DNA, 75 bp, synthetic construct
  source 1..75: mol_type = other DNA
acctacggcggtgctgctcgcgcattcgaccagatcgataacgcgccggaagaaaaagctcgtggtatcaccatc

SEQ ID NO: 2341 - DNA, 75 bp, synthetic construct
  source 1..75: mol_type = other DNA
cggggctggaggacatcagccgcgatttgcagcttctgagtggtgcggaaaataaccgggtgctgcgtgaggcaa

SEQ ID NO: 2342 - DNA, 75 bp, synthetic construct
  source 1..75: mol_type = other DNA
atgccgcccttgccggggtggacagtacgattgttgaagtgatgggcatcagtgcgcagttcacctccggtgcac

SEQ ID NO: 2343 - DNA, 75 bp, synthetic construct
  source 1..75: mol_type = other DNA
tgacttgcgactcgtgcgcagtgcatgtcaaggacgccctggagaaagtgcccggcgtgcaatcagcggatgtct

SEQ ID NO: 2344 - DNA, 75 bp, synthetic construct
  source 1..75: mol_type = other DNA
tgagcagtttgatgaaatcaatatcgttcgtggtcagccagtatctggtggacgtctgggggtgaagatttaccc

SEQ ID NO: 2345 - DNA, 75 bp, synthetic construct
  source 1..75: mol_type = other DNA
aacaggtcgcgcaggagctgcagcagaagtttgacgacttcaaagcaaagaacgacaagcgcgtggatgcgattg

SEQ ID NO: 2346 - DNA, 75 bp, synthetic construct
  source 1..75: mol_type = other DNA
atgacgatgagtttctgtcattagatttgaacgtcaaaatcgtcagcgatcttgacgatgccatcgcccatattc

SEQ ID NO: 2347 - DNA, 75 bp, synthetic construct
  source 1..75: mol_type = other DNA
taccagtaagcaacacatcattacctgtcgccatagactacccagcagcgctggcacttcgccagatggctctcg

SEQ ID NO: 2348 - DNA, 75 bp, synthetic construct
  source 1..75: mol_type = other DNA
atgaccagatggtcgacatggcgtttatcactcaactgaccggcttaaccgataagtggttttacaagctcatca

SEQ ID NO: 2349 - DNA, 75 bp, synthetic construct
  source 1..75: mol_type = other DNA
ggataagccacggtgcaatctggaataacccaccgtacagcaatatcaggccgtgggtggaaaaagccgctgagc

SEQ ID NO: 2350 - DNA, 75 bp, synthetic construct
  source 1..75: mol_type = other DNA
gtttttaggtgttgttttattttttatacactgtcgttttttttctaatctggaatatggtaagacaaaaattat

SEQ ID NO: 2351 - DNA, 75 bp, synthetic construct
  source 1..75: mol_type = other DNA
atgctaaaacagcaggatatgaccgaaaccgccagagtggtgtttaatgaattaagcgtcaccgaaccggcgacc

SEQ ID NO: 2352 - DNA, 75 bp, synthetic construct
  source 1..75: mol_type = other DNA
tgaacacctcagcattgaggcttaccataagctcaaccgcgccagcgccgtatcccagtttgttgggggtgattt

SEQ ID NO: 2353 - DNA, 75 bp, synthetic construct
  source 1..75: mol_type = other DNA
atgtcagttacagagtttaaggtaaaagcggggcgtaaatccagcagtaaaccgtcaaaagtgcaggagactgca

SEQ ID NO: 2354 - DNA, 75 bp, synthetic construct
  source 1..75: mol_type = other DNA
attttcatgaaatgggaattgacgttccttccaaacattcacgtaaaatctgttgtgcgtgtttagattggagtg

SEQ ID NO: 2355 - DNA, 75 bp, synthetic construct
  source 1..75: mol_type = other DNA
gtgcactgctgaagcagtatggtatccgcctgacggctaatcaggcatatcaccagatggtgaagctggggatcg

SEQ ID NO: 2356 - DNA, 75 bp, synthetic construct
  source 1..75: mol_type = other DNA
atggcgaaaaatgactttaaagcgtttgcaacggatcgaaatgccaatgttatatcgcaggaggaatgggaagcg

SEQ ID NO: 2357 - DNA, 75 bp, synthetic construct
  source 1..75: mol_type = other DNA
agcggtggagcatcttcgcgcactggagaaaaaaggcgtcatcacgataaagcgtggcgtggcccgggggataac

SEQ ID NO: 2358 - DNA, 75 bp, synthetic construct
  source 1..75: mol_type = other DNA
aggaagtgagcgtgccgctggcctcactgattaaatcaccgctgaatgtgcgcacggtgccgtattctgcggagt

SEQ ID NO: 2359 - DNA, 75 bp, synthetic construct
  source 1..75: mol_type = other DNA
ccgaaatgcgagctcgagtaaaaaacttcaataaactctttgaagaattactaaaagcccgtcagcggacaaata

SEQ ID NO: 2360 - DNA, 75 bp, synthetic construct
  source 1..75: mol_type = other DNA
gccagacggaccagcagcacggtggtggtgaacacggtggcctctgaaaatccggatgaagccggtcgttacagc

SEQ ID NO: 2361 - DNA, 75 bp, synthetic construct
  source 1..75: mol_type = other DNA
ggaaagcattactttaaaattgaaaaaaacgaattacgcgagtttaagaacagacccgaaacaatcgggttagtt

SEQ ID NO: 2362 - DNA, 75 bp, synthetic construct
  source 1..75: mol_type = other DNA
cacttcccgacgacaatcacgaccgcccctggtgggggctgccctgcaccgtgacgccctgtttcggggcacgtc

SEQ ID NO: 2363 - DNA, 75 bp, synthetic construct
  source 1..75: mol_type = other DNA
tcccattgtccagggttcggcaggtgtaagaattggcgcgccaactggcgtggcgtgctcggtgtgtccgggcgg

SEQ ID NO: 2364 - DNA, 75 bp, synthetic construct
  source 1..75: mol_type = other DNA
cacggtatttcccggggaacatcccggattagtatccgccagaacgggtatgaaatttaccagagtacgctacct

SEQ ID NO: 2365 - DNA, 75 bp, synthetic construct
  source 1..75: mol_type = other DNA
attatcagcaacgtgagcgaaaaccgccaggtgaccgtccctgctgaactgctggcgtccctgattcagaccgct

SEQ ID NO: 2366 - DNA, 75 bp, synthetic construct
  source 1..75: mol_type = other DNA
tgaaaatcaaacacaaactctcatatgttcgcccgactaaccgcgggaaaatttccgaagaagacaccaccgaaa

SEQ ID NO: 2367 - DNA, 75 bp, synthetic construct
  source 1..75: mol_type = other DNA
atgaacacattacccgatacacacgtacgggaggcatcgcattgccagtctcccgtcaccatctggcagacactg

SEQ ID NO: 2368 - DNA, 75 bp, synthetic construct
  source 1..75: mol_type = other DNA
atcattttcttgagggattaacgctcacggaagatggaattcttactcaaggaaatgagcaagtttatattccac

SEQ ID NO: 2369 - DNA, 75 bp, synthetic construct
  source 1..75: mol_type = other DNA
tgatatcctccgggcccgccgggcaaccggcctgatggcccgcgacaattacagaacggtaaataacattaccct

SEQ ID NO: 2370 - DNA, 75 bp, synthetic construct
  source 1..75: mol_type = other DNA
cgcccggacgttcgccgacagagtcgtttgtcatcaggctggaaaactgccatgcaacagcagttggcaaaattg

SEQ ID NO: 2371 - DNA, 75 bp, synthetic construct
  source 1..75: mol_type = other DNA
tggatggttttctgaaaggtaaatgcatcccacgagatttaaaggttaacgaaacaaacgctgaatatctggtgc

SEQ ID NO: 2372 - DNA, 75 bp, synthetic construct
  source 1..75: mol_type = other DNA
ttctttgtgccgccttactgacggtgacgcctgcagcgtcagcggatgtgaacagcgacatgaatcagttcttta

SEQ ID NO: 2373 - DNA, 75 bp, synthetic construct
  source 1..75: mol_type = other DNA
tgccacgcgaaccacagacgcatttctggaaacggagtgcgtggaaaatgtcgccacaaccgaaatcattaaagc

SEQ ID NO: 2374 - DNA, 75 bp, synthetic construct
  source 1..75: mol_type = other DNA
ttcgcccgcaccggcgacaccgtggtggtgcatagcatggatcgcctggcgcgcaatctcgatgatttgcgccgg

SEQ ID NO: 2375 - DNA, 75 bp, synthetic construct
  source 1..75: mol_type = other DNA
cttcgctacatttcatcgccaaatatcgtgctaccgggcgtcgggttactggcggcatcgccaatgcccaggcct

SEQ ID NO: 2376 - DNA, 75 bp, synthetic construct
  source 1..75: mol_type = other DNA
cgcgatacgctgctggtgaggatgatggagcgcggcgtcgagcaggtgcggcattacctgaatgcgataccgata

SEQ ID NO: 2377 - DNA, 75 bp, synthetic construct
  source 1..75: mol_type = other DNA
atggcccgtcttgcagactacagcaatgacgagggcgtgtcatggcctgccattgaaactatccggcgtcagatc

SEQ ID NO: 2378 - DNA, 75 bp, synthetic construct
  source 1..75: mol_type = other DNA
gagttttacgaagctgaggcgaaaaagaaggcgaagcagtttttcatggatattgctgccgggttatgtgaaggg

SEQ ID NO: 2379 - DNA, 75 bp, synthetic construct
  source 1..75: mol_type = other DNA
ggtgaaagcatgcttgtcacaatagaagatctggcattgaggaataaacgcaatggtaaagatccaaaaaatgta

SEQ ID NO: 2380 - DNA, 75 bp, synthetic construct
  source 1..75: mol_type = other DNA
aaatagcctggtatgcttcgatacagcaggagccgaatggctggaagaccgtcaccacacagttctacatccagg

SEQ ID NO: 2381 - DNA, 75 bp, synthetic construct
  source 1..75: mol_type = other DNA
gttgccagtggcgatgtatacaactctggttacgggttattcccgtctgaacaggcgcgtaaggactggcaaaat

SEQ ID NO: 2382 - DNA, 75 bp, synthetic construct
  source 1..75: mol_type = other DNA
aaagcggcgagcatttacgtctaaaaacgctggaagccgtctggatccaggggaaattacggatgtgggggcgtt

SEQ ID NO: 2383 - DNA, 75 bp, synthetic construct
  source 1..75: mol_type = other DNA
gaacgtcctgaccagctgtgggtggctgattttacttacgtcagcacatggcagggcttcgtctatgtggcgttc

SEQ ID NO: 2384 - DNA, 75 bp, synthetic construct
  source 1..75: mol_type = other DNA
aagagacggaggccttcctgcgttctgtgctggcacgtgccgaagaaaagatcgaagaagatgaacgggaaatag

SEQ ID NO: 2385 - DNA, 75 bp, synthetic construct
  source 1..75: mol_type = other DNA
gtggcggacatcagcaggataatccccgttttgctgaaggaacgctgaagtatggtctgccggcaggctggacgg

SEQ ID NO: 2386 - DNA, 75 bp, synthetic construct
  source 1..75: mol_type = other DNA
gaaagcgacatcgtaccgggagagcagaccgccaccagcatactgaagcagcgcacaaaaaatcttgcgccgctg

SEQ ID NO: 2387 - DNA, 75 bp, synthetic construct
  source 1..75: mol_type = other DNA
gcacgcgcctgcatgttaagccacagcgccgggacagacctggacaacctcgcgggcaatatgaacacaaagcgc

SEQ ID NO: 2388 - DNA, 75 bp, synthetic construct
  source 1..75: mol_type = other DNA
ccgtaagagctggaaaaaccggacagaagtggaactggccacactaacgtgggtggactggtataacaatcgacg

SEQ ID NO: 2389 - DNA, 75 bp, synthetic construct
  source 1..75: mol_type = other DNA
aacctttttgccctcagcaaagtattgcaatgctcaccaacatggattctatttggcgatgaagacaagcaacca

SEQ ID NO: 2390 - DNA, 75 bp, synthetic construct
  source 1..75: mol_type = other DNA
gttgaagcactgatgaaaacgcctgaaattaacgctatgtatccggaacgcaaactgttcgctatcggatgggtt

SEQ ID NO: 2391 - DNA, 75 bp, synthetic construct
  source 1..75: mol_type = other DNA
gatttcgccggatgatggcggaagctgtcatctctggcttgggcgtggcgtgccgcctgccgttaaccgtcgccg

SEQ ID NO: 2392 - DNA, 75 bp, synthetic construct
  source 1..75: mol_type = other DNA
taccgtcagccccgataacggttttacaaccagtctggagcttgaagtgaggattgatgatttcgaaatggaatg

SEQ ID NO: 2393 - DNA, 75 bp, synthetic construct
  source 1..75: mol_type = other DNA
tcatgtgctggctcagatcgctgccatcctgtgtttaatgtttcccgaacacgacgatttccaactcctccaggc

SEQ ID NO: 2394 - DNA, 75 bp, synthetic construct
  source 1..75: mol_type = other DNA
gtccataatagcagaacaaaagaaagagccagaaatgacggtcagatattatatcagttctgctgatttaaccgc

SEQ ID NO: 2395 - DNA, 75 bp, synthetic construct
  source 1..75: mol_type = other DNA
atgctcagggtgtagcggttcggtttattgacgacgggatcagtaccgacggtgatatggggcaaatggtggtca

SEQ ID NO: 2396 - DNA, 75 bp, synthetic construct
  source 1..75: mol_type = other DNA
atgtacggaacatgcgaaacgctatgccgggagctggcagcaaagtatccgggagacacgccgctgatgctggtt

SEQ ID NO: 2397 - DNA, 75 bp, synthetic construct
  source 1..75: mol_type = other DNA
atcaaaaattaaacataaaattagccatgatgtttttgaaccttatcccgcggcgttacatggtcaatttgattc

SEQ ID NO: 2398 - DNA, 75 bp, synthetic construct
  source 1..75: mol_type = other DNA
caacaaacatcaaactacagtggcaggaaagcgacggaacaattaaacagcacattagcccgaacagcttcaaac

SEQ ID NO: 2399 - DNA, 75 bp, synthetic construct
  source 1..75: mol_type = other DNA
atggcagttcgtggcattaacaaggtcattctcgtaggccgactgggaaaagatccggaagtccgttacatcccc

SEQ ID NO: 2400 - DNA, 75 bp, synthetic construct
  source 1..75: mol_type = other DNA
accaacagcgcacaggggccgtggtggatactggggtggtcagagcgggtgccgggtgctgaggacgtactgcca

SEQ ID NO: 2401 - DNA, 75 bp, synthetic construct
  source 1..75: mol_type = other DNA
ggaatttactctgcagcccttccggagcgtcagtccggcggcagtctgaaggctcacagcgaccgtgtttccttt

SEQ ID NO: 2402 - DNA, 75 bp, synthetic construct
  source 1..75: mol_type = other DNA
ccatgacgcggatgatgacatgctgatggacaaggttcgtcaggctaccgccgtgctgctggcctacattcaggg

SEQ ID NO: 2403 - DNA, 75 bp, synthetic construct
  source 1..75: mol_type = other DNA
gaaaactcgagcaggacctgttaaatgaagtatgcattccttcaatgctggctcgtctggacctgctgcaaaaag

SEQ ID NO: 2404 - DNA, 75 bp, synthetic construct
  source 1..75: mol_type = other DNA
gaatgctgatatacctgcccccccttcgccggaagtatataaagtatttcaaaatggggtgctggattttaaacc

SEQ ID NO: 2405 - DNA, 75 bp, synthetic construct
  source 1..75: mol_type = other DNA
gcaagatgctgctggcgacgctctggaacacgggcgcgcgaattaacgaagcgctggcgctgacaaggggggatt

SEQ ID NO: 2406 - DNA, 75 bp, synthetic construct
  source 1..75: mol_type = other DNA
ttcgtatcggcgttgagggtgacacctgtgacgggcgtgtcatcagtgcgcaggatattcaggaaatggccgaaa

SEQ ID NO: 2407 - DNA, 75 bp, synthetic construct
  source 1..75: mol_type = other DNA
atgtgatggttgccaacccgtatggtatcacctgtgacggctgtggttttatcaacacgccgcacgcgacgctca

SEQ ID NO: 2408 - DNA, 75 bp, synthetic construct
  source 1..75: mol_type = other DNA
gagtaacgaggatgtatcggtgtggtggaaccgtctgtgtgacaacgtactgccggaaaaaaccatgccgtttga

SEQ ID NO: 2409 - DNA, 75 bp, synthetic construct
  source 1..75: mol_type = other DNA
gctgtttctggccggaagtgccggacttctgcagaccactgaagatgtgcggtttgaaccatgccccggactgac

SEQ ID NO: 2410 - DNA, 75 bp, synthetic construct
  source 1..75: mol_type = other DNA
gggctcggtactcctggttcccgcacgctggctgaactggaatctgaaattctgcaactgcgtaaggcgttaaat

SEQ ID NO: 2411 - DNA, 75 bp, synthetic construct
  source 1..75: mol_type = other DNA
tgtatttttctggtgaaccggcacagatcgctgagattaaacgactggccagcggtgcagtcacaccgctttatc

SEQ ID NO: 2412 - DNA, 75 bp, synthetic construct
  source 1..75: mol_type = other DNA
ttgatcccattaccatcagggacaaagatctggctggtcgctggcatcaccgatatgagaaacggcttcaacggc

SEQ ID NO: 2413 - DNA, 75 bp, synthetic construct
  source 1..75: mol_type = other DNA
atctgaatatttcccaactggccgcattatccggtgctcatcgacagactgttgcggctcgggtaaaaaacataa

SEQ ID NO: 2414 - DNA, 75 bp, synthetic construct
  source 1..75: mol_type = other DNA
ctcggccttgatgacgatgcgctgtcaatggagtggtcgctcggtggcttcccggattcggttatctgggagctt

SEQ ID NO: 2415 - DNA, 75 bp, synthetic construct
  source 1..75: mol_type = other DNA
tttttgtgaatcctgcacttaaggatgattacattaatgcaaattcatggccagatgatgctctggctgtcagtg

SEQ ID NO: 2416 - DNA, 75 bp, synthetic construct
  source 1..75: mol_type = other DNA
gccgcagcaaataacagggcgttcgcagagcgccttgttggtgtttacagactagccaaagcaggagtgaaacat

SEQ ID NO: 2417 - DNA, 75 bp, synthetic construct
  source 1..75: mol_type = other DNA
gagtaattgaacaccttggctggtatgtataccgattgattgatccgagggacggaagcaccttctatgtaggga

SEQ ID NO: 2418 - DNA, 75 bp, synthetic construct
  source 1..75: mol_type = other DNA
catttcattttcactaatgctggttgctctttttctttccatggcctggatgatgttgtcttcgtcggggttgct

SEQ ID NO: 2419 - DNA, 75 bp, synthetic construct
  source 1..75: mol_type = other DNA
cgataacaccagaacaaatcgaaatacgtgagctgaggaaaaagctacaacgcattgaaatggagaatgaaatat

SEQ ID NO: 2420 - DNA, 75 bp, synthetic construct
  source 1..75: mol_type = other DNA
atccccgtgatttccggtaatggtcagtttgccacggtagctgaagtcaccgttactgaagcgggcgctgcaggg

SEQ ID NO: 2421 - DNA, 75 bp, synthetic construct
  source 1..75: mol_type = other DNA
agccagtgctggacactgaaagagctggcaaaaaatatctgggatcgcccctggagcacagaacgcaggaatgac

SEQ ID NO: 2422 - DNA, 75 bp, synthetic construct
  source 1..75: mol_type = other DNA
caccggctggtgcactacacgcggacacaatatgaagagccgctggtcgaaagtcgctatctttacgacccgctg

SEQ ID NO: 2423 - DNA, 75 bp, synthetic construct
  source 1..75: mol_type = other DNA
agggtattacggcgatctggccattgtggtggcgaaaacgtcttatgtggcagaggacggtaccgaaaaacgtta

SEQ ID NO: 2424 - DNA, 75 bp, synthetic construct
  source 1..75: mol_type = other DNA
atgctgacgaaatatgcccttgcggcagtcatagtgctgtgtttaacggtgctgggatttacgcttctggtcggg

SEQ ID NO: 2425 - DNA, 75 bp, synthetic construct
  source 1..75: mol_type = other DNA
cttcagaacgaagccagacaacaaaaacgtgggctctggtcagatgctgatccggttcccccctggatatggaga

SEQ ID NO: 2426 - DNA, 75 bp, synthetic construct
  source 1..75: mol_type = other DNA
atgaaaacattacccgacacgcatgtacgggaggcatcgcgctgcccgtctcccgtcaccatctggcagatactg

SEQ ID NO: 2427 - DNA, 75 bp, synthetic construct
  source 1..75: mol_type = other DNA
ggagagccacaggtcggcccttcatctgagccggattggtactacgtcatcgtactggccgggcagtccaatgcc

SEQ ID NO: 2428 - DNA, 75 bp, synthetic construct
  source 1..75: mol_type = other DNA
ctaaaaagttcaaagccgaagctgtcagaacggttcttgaaaatcaactttcgatcagtgaaggcgcttcccgat

SEQ ID NO: 2429 - DNA, 75 bp, synthetic construct
  source 1..75: mol_type = other DNA
aactcgagcgcggcgatgtgcttccccatgacatggtcgaatcttccgctgctgcatggcgggatgaaatgagca

SEQ ID NO: 2430 - DNA, 75 bp, synthetic construct
  source 1..75: mol_type = other DNA
tgagccgttatcgtgccggacggctgatgaaatacctgaacctgagcagttgtcagcccggaaaacatcaataca

SEQ ID NO: 2431 - DNA, 75 bp, synthetic construct
  source 1..75: mol_type = other DNA
gtcattggtaaactggtaacaaagtgctggcaggaagaagcatacgcggaagcgcaattgaggaaggtgacgaga

SEQ ID NO: 2432 - DNA, 75 bp, synthetic construct
  source 1..75: mol_type = other DNA
ctgtagattcaatctgtcaatgcaacacccctttcaattatctctttcggtgttttgaacttcagtgtctttctc

SEQ ID NO: 2433 - DNA, 75 bp, synthetic construct
  source 1..75: mol_type = other DNA
gggggagcgggttaaaaccgatcgccgtgatgccatcagacttgtgcgttcactgcgtgcaggagatctttctgc

SEQ ID NO: 2434 - DNA, 75 bp, synthetic construct
  source 1..75: mol_type = other DNA
gacatcatccggataaacgcagtgcccgtgcgcagcgcgatgactggctgaagaaagagatacagcgcgtatacg

SEQ ID NO: 2435 - DNA, 75 bp, synthetic construct
  source 1..75: mol_type = other DNA
aaacgcagcgaaaaccattaaaaaacggttatacggaatactgaatgcaatgcgtcatcgcgtctcgaatggaaa

SEQ ID NO: 2436 - DNA, 75 bp, synthetic construct
  source 1..75: mol_type = other DNA
gaggctcagatggagcgtaaagagtcagcgttcaatcaggctgagtttaataaggtacttcttgaatgtgcggta

SEQ ID NO: 2437 - DNA, 75 bp, synthetic construct
  source 1..75: mol_type = other DNA
aacgtcttcgtgaactggctggtctgctggggcgcgaggcggatatgtcggggagtgctgcggatatcgcacagc

SEQ ID NO: 2438 - DNA, 75 bp, synthetic construct
  source 1..75: mol_type = other DNA
cgccggcgcatcgcttctgtttcccgccggtccggtattaatggagtttgccaccatggtgggcgggcgtggcga

SEQ ID NO: 2439 - DNA, 75 bp, synthetic construct
  source 1..75: mol_type = other DNA
agccggatatggaggtgaactcgcagccatcggtgcgtgaagtgcgttttggtgacgggtattcgcagcgtatgg

SEQ ID NO: 2440 - DNA, 75 bp, synthetic construct
  source 1..75: mol_type = other DNA
gtatgccagagggctgacctgcgaagccgacaccctcggcagctgtggttacgtttatatggctgtttatccgac

SEQ ID NO: 2441 - DNA, 75 bp, synthetic construct
  source 1..75: mol_type = other DNA
ctgggttatcgctcgccacgggaatatctgcggcagtgggccagtgatgggttaagtgataacaggtgtctggaa

SEQ ID NO: 2442 - DNA, 75 bp, synthetic construct
  source 1..75: mol_type = other DNA
catgctggcgaacacctgtatgtgggattaccggggagatgaatgcgggtataacggtcctgcggtggcggatga

SEQ ID NO: 2443 - DNA, 75 bp, synthetic construct
  source 1..75: mol_type = other DNA
ctgccactgagcgagtatttcgacacaaacgcacagccggacatggccaacatcaaccgcaaaaaagcgaacgtt

SEQ ID NO: 2444 - DNA, 75 bp, synthetic construct
  source 1..75: mol_type = other DNA
gtatggtgcggcgacgtgacgtacatctggacggggaaacgttgggcataccttgccgttgttctcgacctgttt

SEQ ID NO: 2445 - DNA, 75 bp, synthetic construct
  source 1..75: mol_type = other DNA
ctggcacttggtgtgtatccagaagtttctctctccgaagctcgtacaaaacgggatgaggcccgaaaactgatt

SEQ ID NO: 2446 - DNA, 75 bp, synthetic construct
  source 1..75: mol_type = other DNA
cgttgagcttgaagcagaaaaacagcgggcaaaagttctatttatggaaaatgctcggcttaagtcaggcatagc

SEQ ID NO: 2447 - DNA, 75 bp, synthetic construct
  source 1..75: mol_type = other DNA
gtgaatatatcgaacagtcagattgatattctgcggcgtgatgtacgcgccgggctgcgagccctgttcaggccg

SEQ ID NO: 2448 - DNA, 75 bp, synthetic construct
  source 1..75: mol_type = other DNA
ctctctccccgatcacccataaccagattcctgttattaccaccgaacttttggcgcagctttacggcactgagc

SEQ ID NO: 2449 - DNA, 75 bp, synthetic construct
  source 1..75: mol_type = other DNA
tgagcttcctttcggcgcgtatgttgtggcaacgccggaagccctgcggacgaagagtgtggtacccggtgatta

SEQ ID NO: 2450 - DNA, 75 bp, synthetic construct
  source 1..75: mol_type = other DNA
tatccgaagagcagttaattgcgctgaaaggaataaaaaaaggtacgttaaaaaaggcccgggaaaaatcgttta

SEQ ID NO: 2451 - DNA, 75 bp, synthetic construct
  source 1..75: mol_type = other DNA
tcactctgtaatgcactgtttcagggggaggtcaccccggtcagtgatgttcacgccggcacccgggaagtgcag

SEQ ID NO: 2452 - DNA, 75 bp, synthetic construct
  source 1..75: mol_type = other DNA
caccaggtattcactgactggcctctttccggtgaatattcctgcgggcaactggcccgggctcttttcccgggg

SEQ ID NO: 2453 - DNA, 75 bp, synthetic construct
  source 1..75: mol_type = other DNA
ctgcagcaaccgaacagaaaattcccggtaactgttacccggtcgataaagttattcaccaggataataacgaaa

SEQ ID NO: 2454 - DNA, 75 bp, synthetic construct
  source 1..75: mol_type = other DNA
tgtcggctgccgttctggcactgattgccgtcggtgcgcccgcgcctgatattctcgaccagtttctggatgaaa

SEQ ID NO: 2455 - DNA, 75 bp, synthetic construct
  source 1..75: mol_type = other DNA
tgcgccatatcctgagcgtactgccggaatggccttccaaccgagttgatgaactcctgccatggaacgtagtac

SEQ ID NO: 2456 - DNA, 75 bp, synthetic construct
  source 1..75: mol_type = other DNA
ggcgtatgttcgtgatgaccgcaatgccgggtcagcgttggcacctgcagtgtggttcgcttacagcccggacag

SEQ ID NO: 2457 - DNA, 75 bp, synthetic construct
  source 1..75: mol_type = other DNA
atgaattacatatattccgcgactacaaactctttctatccgctggagatgaaagaggattacactcaagctgac

SEQ ID NO: 2458 - DNA, 75 bp, synthetic construct
  source 1..75: mol_type = other DNA
aagccatcacgctgaaaatcgacccgtctgtggttctggcaacccgcaaatatgtggatgataaaatctcaaagc

SEQ ID NO: 2459 - DNA, 75 bp, synthetic construct
  source 1..75: mol_type = other DNA
atggcatttaaacactatgacgtggtcagggcggcatcgccgtcagaccttgcgaaacgactgacacaaaaactg

SEQ ID NO: 2460 - DNA, 75 bp, synthetic construct
  source 1..75: mol_type = other DNA
ttaccttgccgaccgcgccggtatcagaggcctgttcagcgatgcagatgcgtaccacctggaccaggcctttcc

SEQ ID NO: 2461 - DNA, 75 bp, synthetic construct
  source 1..75: mol_type = other DNA
atgagtaaagtctttatttgcgccgccattccggacgaacaggcaataaaggaagaaggtgcagtcgctgtagcc

SEQ ID NO: 2462 - DNA, 75 bp, synthetic construct
  source 1..75: mol_type = other DNA
caatggtaaagatccaaaaaatgtaagtgccatcgtcagagtagcccttgagcaatacttaaaaacactaacgta

SEQ ID NO: 2463 - DNA, 75 bp, synthetic construct
  source 1..75: mol_type = other DNA
tcaggtcgttgattaccgcgttgtgaagatgcctgttaccaaaggtgggaggctggaactgaccatcaccgaaat

SEQ ID NO: 2464 - DNA, 75 bp, synthetic construct
  source 1..75: mol_type = other DNA
tatcgtatttcgcgcaccacgggaaccagcgtaaaagaactggcgcgactgaacggcatttcccccccttacacc

SEQ ID NO: 2465 - DNA, 75 bp, synthetic construct
  source 1..75: mol_type = other DNA
gcgtaaccgctggttcagcgtgatggcggggccgtctgtacgcgtgaatgaatggttcagcgcgtatgcgatggc

SEQ ID NO: 2466 - DNA, 75 bp, synthetic construct
  source 1..75: mol_type = other DNA
tgaagcgagaggaaaagattgcccgggaaacgcagttaaacaacaccttcaaagatattgcccttgagtggcaca

SEQ ID NO: 2467 - DNA, 75 bp, synthetic construct
  source 1..75: mol_type = other DNA
tcgctgtgtgagttcaccgtaaaggaacgtaatattgagtttaaggctgttctcgcttacgaaccgaagaagtag

SEQ ID NO: 2468 - DNA, 75 bp, synthetic construct
  source 1..75: mol_type = other DNA
tgacgaacatcagccagtcaccaccgctgacattctgacaccacgacgccgggaggattacggtaaagacctgtg

SEQ ID NO: 2469 - DNA, 75 bp, synthetic construct
  source 1..75: mol_type = other DNA
cccgaccgaatccgtggccgttgacgtcgcttatgaaggctccggcagcggtgactggcgtaccaacagtttcat

SEQ ID NO: 2470 - DNA, 75 bp, synthetic construct
  source 1..75: mol_type = other DNA
cagcagcaaccgaacagaaaattccaggcaactgttatccggtcgataaagttattcaccaggataataacgaaa

SEQ ID NO: 2471 - DNA, 75 bp, synthetic construct
  source 1..75: mol_type = other DNA
ccccgctgggtgatgagcgcggggatatccgtaatgcacagatcgtgaaagcggttttcggggcacaggggatga

SEQ ID NO: 2472 - DNA, 75 bp, synthetic construct
  source 1..75: mol_type = other DNA
ttttatctgcgccagcacggtgaggaaaaagggcgtcagatagcctgtgccctgctggaagatttaatggaatcc

SEQ ID NO: 2473 - DNA, 75 bp, synthetic construct
  source 1..75: mol_type = other DNA
atgtctgatcaacaacagtatggcctcttaccgtgcttaatgcaaggaggagtaaaccatgaaactaccgggaaa

SEQ ID NO: 2474 - DNA, 75 bp, synthetic construct
  source 1..75: mol_type = other DNA
cagactgcctggcgggcaacactctcgcagtcagccgggcgtttacatctgtcttttatgacgccggagaaaaaa

SEQ ID NO: 2475 - DNA, 75 bp, synthetic construct
  source 1..75: mol_type = other DNA
gaggcccagactgcctggcgggcagtcctctcacagtcagccgggcgtttacatctttcctatatgccaacggag

SEQ ID NO: 2476 - DNA, 75 bp, synthetic construct
  source 1..75: mol_type = other DNA
cgctatattgcgaagcaaaaaatgacaaagtcagaaaacgtctgggaattaaaggtggtttttactggactacag

SEQ ID NO: 2477 - DNA, 75 bp, synthetic construct
  source 1..75: mol_type = other DNA
ccatacccgggccattcacagcattgataccgacattaagctcaatcgcgcattgtgggtgatggcagaaacgct

SEQ ID NO: 2478 - DNA, 75 bp, synthetic construct
  source 1..75: mol_type = other DNA
atggatgttgagcatggtcagtacagcgtcaccctgctggttgaaggttttccgccttcacatgccgggaccatt

SEQ ID NO: 2479 - DNA, 75 bp, synthetic construct
  source 1..75: mol_type = other DNA
tcacccccgagttcagactggaatgtgcgcaactgattgttgataagggctactcatatcgacaagccagtgaat

SEQ ID NO: 2480 - DNA, 75 bp, synthetic construct
  source 1..75: mol_type = other DNA
agggaccgaaaggagaaacaggtgcggctggcccggtgggggcaaccggacctcagggaccgaagggcgacccgg

SEQ ID NO: 2481 - DNA, 75 bp, synthetic construct
  source 1..75: mol_type = other DNA
tcaccactgccggtgcagcaaagctggcagcggcaaccgcgccgggagggcggaaggtcaacattaccacgatgg

SEQ ID NO: 2482 - DNA, 75 bp, synthetic construct
  source 1..75: mol_type = other DNA
cggcgtggcgacaggtaaggtgcagatccctgtggtgagcggaaatggtcagttcgccgcagtggctgaagtcac

SEQ ID NO: 2483 - DNA, 75 bp, synthetic construct
  source 1..75: mol_type = other DNA
tgacggtttttcttgtttccggagagccagttgatattgcagtcagtgttcacagaacaatgcaggaatgtatgg

SEQ ID NO: 2484 - DNA, 75 bp, synthetic construct
  source 1..75: mol_type = other DNA
gtgaacacggcagcggaagccatccgggcgctgtcgttacaggtgccgggctttcgccgtcagatgaacgaaggc

SEQ ID NO: 2485 - DNA, 75 bp, synthetic construct
  source 1..75: mol_type = other DNA
agggtgacatgacgcagtatggcggtagcattgttcagggttcagccggggtacgtattggtgcccccaccggcg

SEQ ID NO: 2486 - DNA, 75 bp, synthetic construct
  source 1..75: mol_type = other DNA
ctggaccgccatcttcatgaacccggtgtggccttcacctccacgcatgcggcacgggaatggctgattctgaac

SEQ ID NO: 2487 - DNA, 75 bp, synthetic construct
  source 1..75: mol_type = other DNA
ggcagcactgatgcagcaaccggacaaatctctggcactgctggcatggacgctctgccctgatgaatcccctaa

SEQ ID NO: 2488 - DNA, 75 bp, synthetic construct
  source 1..75: mol_type = other DNA
gcgtcgaaaaccacggcggcacattacgcatctggtttaattttaaaggtaaacgtgtcagggaaaatcttggtg

SEQ ID NO: 2489 - DNA, 75 bp, synthetic construct
  source 1..75: mol_type = other DNA
atgtacggaacatgcgaaatactctgccgggagctggcagcaaagtatccggcagacacgccactgatgctggtt

SEQ ID NO: 2490 - DNA, 75 bp, synthetic construct
  source 1..75: mol_type = other DNA
ctggcacttggtgtgtatccggaagtttctctctccgaagctcgtacaaaacgggatgaggcccgaaaactgatt

SEQ ID NO: 2491 - DNA, 75 bp, synthetic construct
  source 1..75: mol_type = other DNA
gtccctataacattggccctggtaagtgttttccgtcgacgttttataagcggcttaatgccggtgatcgtaaag

SEQ ID NO: 2492 - DNA, 75 bp, synthetic construct
  source 1..75: mol_type = other DNA
aaaaggcatccatccgcagactcatcttgcttgcttcagcggtgtgctgcaagcggatgcgtacgccgggttcaa

SEQ ID NO: 2493 - DNA, 75 bp, synthetic construct
  source 1..75: mol_type = other DNA
tcaccacccacagcctttactcctggataaagaagtacggtccggattcttccactaataaagaacagtcagatg

SEQ ID NO: 2494 - DNA, 75 bp, synthetic construct
  source 1..75: mol_type = other DNA
attccgggcgatggcatgtagtgcgttaatagaatcaggtttgtggtcccgcgatgcagttgaacgtcagatgag

SEQ ID NO: 2495 - DNA, 75 bp, synthetic construct
  source 1..75: mol_type = other DNA
ctactgcggtggtatctggaatctgtacaccctgaacaacggcggggcatttatggcacccgaaccggatgacga

SEQ ID NO: 2496 - DNA, 75 bp, synthetic construct
  source 1..75: mol_type = other DNA
tttcttcgctggtgctattgctgttttcgacaagacctggaagggaccggcaatcagctacatcgggcgcgatga

SEQ ID NO: 2497 - DNA, 75 bp, synthetic construct
  source 1..75: mol_type = other DNA
tatgtggatgacaaggtactggagctgaaggtgttcgtggatgataagatggcaaaacatcttgccgcaccggac

SEQ ID NO: 2498 - DNA, 75 bp, synthetic construct
  source 1..75: mol_type = other DNA
tactatttttattgatgcttgcgctgtcaatattttccttcacagtgctatttgctttgtttatatataaagatc

SEQ ID NO: 2499 - DNA, 75 bp, synthetic construct
  source 1..75: mol_type = other DNA
ggctggctacagtaccgggtaatatgcgttgtttttattatgaggcagttacgtatgaatatactggctggtctg

SEQ ID NO: 2500 - DNA, 75 bp, synthetic construct
  source 1..75: mol_type = other DNA
atttagttgtttttaccgatgaaaataactcaaagtatctcaatgtattaaatgactttctttcttatgatatta

SEQ ID NO: 2501 - DNA, 75 bp, synthetic construct
  source 1..75: mol_type = other DNA
tgcagaacgtgaaggtggtgcactgacagaagttgcgtgctgggcccatgcccggcgaaaaatccacgatgtata

SEQ ID NO: 2502 - DNA, 75 bp, synthetic construct
  source 1..75: mol_type = other DNA
atgacgaggtactcgaggccgccaccgtagtgctgaagcgttgcggtcccatagagttcacgctcagcggagtag

SEQ ID NO: 2503 - DNA, 75 bp, synthetic construct
  source 1..75: mol_type = other DNA
agcatcgacaccgatattaaactcaaccgcgcattgtgggtgatggcggaaacgctgctggagagcatgcgctga

SEQ ID NO: 2504 - DNA, 75 bp, synthetic construct
  source 1..75: mol_type = other DNA
gccgacattctgacaccacgacgccgggaggattacggtaaggacctgtggagtgcttatcagaccattcaggag

SEQ ID NO: 2505 - DNA, 75 bp, synthetic construct
  source 1..75: mol_type = other DNA
gctgctgatttggcgaccgttcatcagtcctcgacggatgtttactaccgtatccaaagcggcattgatggcgat

SEQ ID NO: 2506 - DNA, 75 bp, synthetic construct
  source 1..75: mol_type = other DNA
accaggaactggtgaaactggttactgaacgcagcaatcagccactgcatgatgtggacctggacagttatttat

SEQ ID NO: 2507 - DNA, 75 bp, synthetic construct
  source 1..75: mol_type = other DNA
gtcttgccgccctttttctggctggctgcaactccccttctcagcatactcctgttccgcgtaactacggtgctg

SEQ ID NO: 2508 - DNA, 75 bp, synthetic construct
  source 1..75: mol_type = other DNA
atgaacggtaaccgcgcagaaatgagcccggaagccgccggtattgccgcctgtctgatgacgtacagtcatcat

SEQ ID NO: 2509 - DNA, 75 bp, synthetic construct
  source 1..75: mol_type = other DNA
ctcccgccgtatatcccaggacatcagtacccgtgatgaaggcgggggcggaaaggtcgtggttatcgggcggca

SEQ ID NO: 2510 - DNA, 75 bp, synthetic construct
  source 1..75: mol_type = other DNA
aagccgccggcattgccgcctgtctgatgacgtacagtcatcacgcctgccgtacggagtgttatgccatgacgg

SEQ ID NO: 2511 - DNA, 75 bp, synthetic construct
  source 1..75: mol_type = other DNA
cgaaacatgggtactgttcaatgtcatgaacggtaaccgcgctgaaatgagcccggaagccgccggtattgccgc

SEQ ID NO: 2512 - DNA, 75 bp, synthetic construct
  source 1..75: mol_type = other DNA
cacagattgcacgtgaaaatggcgtcaatgataatgttattttcaaatggctcaggctctggcagaacgaagggc

SEQ ID NO: 2513 - DNA, 75 bp, synthetic construct
  source 1..75: mol_type = other DNA
ggcagcacttacggggatgtatgccgccggggccagtatgatcctcggcgggatagcgcagatgctgacaccggc

SEQ ID NO: 2514 - DNA, 75 bp, synthetic construct
  source 1..75: mol_type = other DNA
ctgctgtgctgctttggcgcatcggtggccaatcatgccgccatttactgcggcaacggtgaactgcttcaccat

SEQ ID NO: 2515 - DNA, 75 bp, synthetic construct
  source 1..75: mol_type = other DNA
gcccggactgggcagagcgcctgaaaaaggggctgtcgattattccggctccgatttatccggaccaggctgcac

SEQ ID NO: 2516 - DNA, 75 bp, synthetic construct
  source 1..75: mol_type = other DNA
ctttaagcgcgtcatagacgagcaggactggacaatcactaaggtgacacattttctgaataatagcggcttcac

SEQ ID NO: 2517 - DNA, 75 bp, synthetic construct
  source 1..75: mol_type = other DNA
tccctgacaccggacgggcggctgacggcgaaaaatgccgatatcagcggtaacgtgaatgcgaactccgggacg

SEQ ID NO: 2518 - DNA, 75 bp, synthetic construct
  source 1..75: mol_type = other DNA
ctggtaacccgttcctgatgtcgttcttcacccagaccacagacggcaaactgaatctgatgcatcacaagaaag

SEQ ID NO: 2519 - DNA, 75 bp, synthetic construct
  source 1..75: mol_type = other DNA
tggatgcggataaaaagcagatacagtgtgtggtaagaccgctgcaaatcctgcgtgctgacgggacgtgggaaa

SEQ ID NO: 2520 - DNA, 75 bp, synthetic construct
  source 1..75: mol_type = other DNA
atgcaggtgcgccagcgcgatgttgctgcgctcgatgcaaaatactcgagggaattagccgatgcgagagctgaa

SEQ ID NO: 2521 - DNA, 75 bp, synthetic construct
  source 1..75: mol_type = other DNA
gaccagtgtactgcagattataaattaccgaaggaaagcgccggacagatattaagtcatgtcacggttagttgc

SEQ ID NO: 2522 - DNA, 75 bp, synthetic construct
  source 1..75: mol_type = other DNA
catggcaaactgaaacggataatcggcgccacgctgggatttaaatccatgaagacggcttacgccaccatcaaa

SEQ ID NO: 2523 - DNA, 75 bp, synthetic construct
  source 1..75: mol_type = other DNA
tcttgatgacttgtttgatgtttctgtattctctgattatgtcgtggagctggaaacaccgcttcgggaatggag

SEQ ID NO: 2524 - DNA, 75 bp, synthetic construct
  source 1..75: mol_type = other DNA
atgattgatgtcttagggccggagaaacgcagacggcgtaccacacaggaaaagatcgcaattgttcagcagagc

SEQ ID NO: 2525 - DNA, 75 bp, synthetic construct
  source 1..75: mol_type = other DNA
atgaaactggccctgacactggaagccgacagcgttaacgtgcaggcgctgaacatggggcgaattgtcgttgac

SEQ ID NO: 2526 - DNA, 75 bp, synthetic construct
  source 1..75: mol_type = other DNA
tgctgattgaaactcagggcgaggtctgccttcttccccttcccggcgatgcagcagagcggctgttcccgtcgg

SEQ ID NO: 2527 - DNA, 75 bp, synthetic construct
  source 1..75: mol_type = other DNA
gtcacgaacccgtgattggcattatgggtaaaagcggggccggtaaatcctcactctgtaatgcactgtttcagg

SEQ ID NO: 2528 - DNA, 75 bp, synthetic construct
  source 1..75: mol_type = other DNA
gcatccgcaacctgctgaagtcacgccagatcggcgcgaccttttactttgcccgtgaagccctgattgacgccc

SEQ ID NO: 2529 - DNA, 75 bp, synthetic construct
  source 1..75: mol_type = other DNA
tcgtgaactgacggttcaggcttctaccgggactaactctgattcggatctggactccattcaggacgaaatcaa

SEQ ID NO: 2530 - DNA, 75 bp, synthetic construct
  source 1..75: mol_type = other DNA
aaaatcaccgacagacagaatcaaaaatgatcatcgggacgcaatttctcttgccaggttactgcgggctggtga

SEQ ID NO: 2531 - DNA, 75 bp, synthetic construct
  source 1..75: mol_type = other DNA
atcacggaaacggacaacgcctggttgtactcgctgtcacaccagaccagtgacttcggtgaatcagaatggatt

SEQ ID NO: 2532 - DNA, 75 bp, synthetic construct
  source 1..75: mol_type = other DNA
ctgtttcccggtgaggacggttacagccgcagcgagtcactgtggctggtgcgcggcggcgtggcgaaactggat

SEQ ID NO: 2533 - DNA, 75 bp, synthetic construct
  source 1..75: mol_type = other DNA
tacgggaggcatcgcgctgcccgtctcccgtcaccatctggcagacactgctcacccgactgctggaccagcact

SEQ ID NO: 2534 - DNA, 75 bp, synthetic construct
  source 1..75: mol_type = other DNA
tgatgagaaagtcgttttactcgttattgccgttggaagaagggaaagcagcgaagtctatcagatcgcagattt

SEQ ID NO: 2535 - DNA, 75 bp, synthetic construct
  source 1..75: mol_type = other DNA
gaaccaggtcacgcagataacaccgccactctcaaactgaaaaagacagcaccgttctctgctctgttgtctgtt

SEQ ID NO: 2536 - DNA, 75 bp, synthetic construct
  source 1..75: mol_type = other DNA
accgtcctggaaaatctgcagcaggaaggctttcagccgttctttgcctgccagacccgcgtgcgcgaccagagc

SEQ ID NO: 2537 - DNA, 75 bp, synthetic construct
  source 1..75: mol_type = other DNA
cggcccgctgccgttcatcctctcccgcacctacagcagttaccggacaaaaacgcccgcgccggtggggagcct

SEQ ID NO: 2538 - DNA, 75 bp, synthetic construct
  source 1..75: mol_type = other DNA
accttcgtcctgagatccgagctcctagtcgcgagttgcagcgacggcatcgtcggctgttgcaccttgtcggcc

SEQ ID NO: 2539 - DNA, 75 bp, synthetic construct
  source 1..75: mol_type = other DNA
ttgcctgtcacgaataatgatcctgccagtgtctatctcattcagtcatggatagaaaatgcaggtgaccaaaaa

SEQ ID NO: 2540 - DNA, 75 bp, synthetic construct
  source 1..75: mol_type = other DNA
cggtgaaaggggccgggaccacactgtgggtttataaggggaacggtgacccttatgcgaacccgctttcagacg

SEQ ID NO: 2541 - DNA, 75 bp, synthetic construct
  source 1..75: mol_type = other DNA
ttacgttgattattagtgggattattatcgggtgcactgatgctgtatcgacaaattatcatgaccgtacatcat

SEQ ID NO: 2542 - DNA, 75 bp, synthetic construct
  source 1..75: mol_type = other DNA
tggatatccgggtaccggaccatctgatagttggtggcaaccaggttttctcctttgcggaacacggtctgcttt

SEQ ID NO: 2543 - DNA, 75 bp, synthetic construct
  source 1..75: mol_type = other DNA
atgtcccgttttgtccttggtaactgcatcgatgttatgacgcgtatccctgataacgccattgatttcatatta

SEQ ID NO: 2544 - DNA, 75 bp, synthetic construct
  source 1..75: mol_type = other DNA
aacaaccacgatttcgttattcagttctggcccgctgcgtggcgtgggcaaatatctctgttcaggttctttttc

SEQ ID NO: 2545 - DNA, 75 bp, synthetic construct
  source 1..75: mol_type = other DNA
tttactgaagatgccattaacaagagaaaacacgaacgggagctattaaataaaatatgcattctttcaatgctg

SEQ ID NO: 2546 - DNA, 75 bp, synthetic construct
  source 1..75: mol_type = other DNA
caaaatggggcgcagctcccgctggctgaaaagtgaagtggaagcctggctgcaggcgcgtattgcacagtcccg

SEQ ID NO: 2547 - DNA, 75 bp, synthetic construct
  source 1..75: mol_type = other DNA
atgcgattagcaagtcgttttggttatgctgcaaaccagatacgccgtgaccgtccgctgacacatgaagaactg

SEQ ID NO: 2548 - DNA, 75 bp, synthetic construct
  source 1..75: mol_type = other DNA
aaagtttctttccagccaacaaactgttgagcttgttcatgaattgaccaacacccagaatttgggtgttgaccc

SEQ ID NO: 2549 - DNA, 75 bp, synthetic construct
  source 1..75: mol_type = other DNA
gacccatgatgaacaggaactgtttgaagtcattaataaaaaattactggcgcatcttgatgatgtcagctcata

SEQ ID NO: 2550 - DNA, 75 bp, synthetic construct
  source 1..75: mol_type = other DNA
gtgtgctgcgatattcaggattacctgaaatacaggtgccatttatctgatatggagaataacatgaggaaatat

SEQ ID NO: 2551 - DNA, 75 bp, synthetic construct
  source 1..75: mol_type = other DNA
tgcgcgccgcagtcgtgttgaatgggaaaacagacagcgcaaaaagcaggggctggataccctgggtatggatga

SEQ ID NO: 2552 - DNA, 75 bp, synthetic construct
  source 1..75: mol_type = other DNA
acgctgaccgcacggaacaggtgcaggagaaagcgtcagtggaggaaatcagtctgccactgctgacgaaaatgt

SEQ ID NO: 2553 - DNA, 75 bp, synthetic construct
  source 1..75: mol_type = other DNA
atggtggccgatggcactacagacatctcacctgattccccccagcacggcagcgtgccggagtggtattacgtg

SEQ ID NO: 2554 - DNA, 75 bp, synthetic construct
  source 1..75: mol_type = other DNA
cagtgaactacatattgccccgtcaacgtattaccactgtcagcaacagcgacatcatcctgataaacgcagtgc

SEQ ID NO: 2555 - DNA, 75 bp, synthetic construct
  source 1..75: mol_type = other DNA
tggggtgatattgccactgacctgcttgaatcggcagcggaaaaagcagtaccactggcgaaggcctgggggaac

SEQ ID NO: 2556 - DNA, 75 bp, synthetic construct
  source 1..75: mol_type = other DNA
tccgtgcgctgggtgaagaattttccgcagtgctggcggatttacagcgcacatttgaggggaaaatagccgcgc

SEQ ID NO: 2557 - DNA, 75 bp, synthetic construct
  source 1..75: mol_type = other DNA
ctgtcaaaaacgttccgtcgtctggtcgtcacactcatccggcgttatggtgtcagtctcattcatctggatgcc

SEQ ID NO: 2558 - DNA, 75 bp, synthetic construct
  source 1..75: mol_type = other DNA
agcgggaaaaaattaaagggcaggtggtggaactcgtgcgccagagcggtcgtgagacgttacggcaactggaag

SEQ ID NO: 2559 - DNA, 75 bp, synthetic construct
  source 1..75: mol_type = other DNA
cgtattcgctcaaataactgttacggtcaggtatcccgtcgtgaccaggagagcgcgctggcgtgctggggaatc

SEQ ID NO: 2560 - DNA, 75 bp, synthetic construct
  source 1..75: mol_type = other DNA
agttgttcccctacctgacgatggtcgaagggttgaagctcgcggcgcagaccttcaacaaggatgtgaagcagc

SEQ ID NO: 2561 - DNA, 75 bp, synthetic construct
  source 1..75: mol_type = other DNA
aacgattatgatgaagacgactttaaaaaacccgttcgcgtccatttacccgttgtgaatgaccttccacctgaa

SEQ ID NO: 2562 - DNA, 75 bp, synthetic construct
  source 1..75: mol_type = other DNA
ctttactggaatcactgaaaaagggccctgtgaccatcagtggtccggcgtttaatgaagcaattgaacgctgga

SEQ ID NO: 2563 - DNA, 75 bp, synthetic construct
  source 1..75: mol_type = other DNA
tgcgccatatcctgagcgtactgccggaatggccttccaaccgagttgacgaactcctgccatggaacgtagtac

SEQ ID NO: 2564 - DNA, 75 bp, synthetic construct
  source 1..75: mol_type = other DNA
acgagcagttggccaccgtcacccgcctggccaaggacaacgagctgcccgatgccatcctcaccgagtcagggc

SEQ ID NO: 2565 - DNA, 75 bp, synthetic construct
  source 1..75: mol_type = other DNA
aggacgtactggaatttgttcgtctgttccgtcgtaagaacaaactgcaacgtgaaattcaggacgttgagaaaa

SEQ ID NO: 2566 - DNA, 75 bp, synthetic construct
  source 1..75: mol_type = other DNA
gaaaaaatcagtgaaacgcttttacgatacgttggtggttcggtttgacattgaagaggcatgggcggagcggca

SEQ ID NO: 2567 - DNA, 75 bp, synthetic construct
  source 1..75: mol_type = other DNA
acgccatcgctgcctgtgccattctggtgacgaataatgtgagagagtttgagcgggtaccgggtcttgtgctgg

SEQ ID NO: 2568 - DNA, 75 bp, synthetic construct
  source 1..75: mol_type = other DNA
tcgttgaagcaccggcaccatcccgtccgatagagcgtggtatcgcgggcccggggttacttgcccgcgtgttaa

SEQ ID NO: 2569 - DNA, 75 bp, synthetic construct
  source 1..75: mol_type = other DNA
atggccgcgcttgagcgggaagagttccgggtgttgtatctggacaaccagaatcagttgattgcccatgaaacg

SEQ ID NO: 2570 - DNA, 75 bp, synthetic construct
  source 1..75: mol_type = other DNA
acggcaaaacaaattgccgaagccacaggtaagaaaaatatggtttcccactggtttggtgccagtcagtggcag

SEQ ID NO: 2571 - DNA, 75 bp, synthetic construct
  source 1..75: mol_type = other DNA
ggaacactatttatatgcaggcagccctggatcatctccgggcgcagggtgaaacactgaatgatgaagatatcg

SEQ ID NO: 2572 - DNA, 75 bp, synthetic construct
  source 1..75: mol_type = other DNA
ctcaggtctgggtgctggttctggtgaatgccggtggtgagccgtttgcggtggttcaggtgcagcggcggtttg

SEQ ID NO: 2573 - DNA, 75 bp, synthetic construct
  source 1..75: mol_type = other DNA
gtcgcagcgctaaaggaaaacgtatccatacccgtgccattcacagcattgacactgacattaagctcaaccgcg

SEQ ID NO: 2574 - DNA, 75 bp, synthetic construct
  source 1..75: mol_type = other DNA
gtgaaaactgaaatcgcgaaagcatccgatgtggcttctgaagccggtgagaatgtgcgcaggtggattgatgat

SEQ ID NO: 2575 - DNA, 75 bp, synthetic construct
  source 1..75: mol_type = other DNA
ggggagtctggttctgggcttcctgacatatctgactaacctgtatttcaaaatcagagaggaccgtcgtaaggc

SEQ ID NO: 2576 - DNA, 75 bp, synthetic construct
  source 1..75: mol_type = other DNA
gtaaacatggttgccgatctgtggcatgcgcctgcaccgaaaaatggtcaggccgttggcaccaacaccattggt

SEQ ID NO: 2577 - DNA, 75 bp, synthetic construct
  source 1..75: mol_type = other DNA
tttgaaccggggatgacggtctccctcgttgcccggcaacatggtgtagcagccagccagttatttctctggcgt

SEQ ID NO: 2578 - DNA, 75 bp, synthetic construct
  source 1..75: mol_type = other DNA
tggtggaactgcggaacaaaccagcccatgaactgaaggaagtgggcgatcagtggcgcacgccggacaacattt

SEQ ID NO: 2579 - DNA, 75 bp, synthetic construct
  source 1..75: mol_type = other DNA
ggttgaatgtcctcgttgccagacttgctccttattatactgatagtgtatcagctatagctgaagctgcttccc

SEQ ID NO: 2580 - DNA, 75 bp, synthetic construct
  source 1..75: mol_type = other DNA
ctgtttatgaaccaaagccagtatcaactcagacaaaggcaaagcatcttgccatgataaaggccattctccgtg

SEQ ID NO: 2581 - DNA, 75 bp, synthetic construct
  source 1..75: mol_type = other DNA
gcctccctgaaatatctcagcgatcacccgaaactgcagggtattgcccagcagaacagctttaaacacacctga

SEQ ID NO: 2582 - DNA, 75 bp, synthetic construct
  source 1..75: mol_type = other DNA
gggtacagatgaaaacgtgctggtacttaatcgcacctatgccaaccggagcaacgccgaacgggcggcgaaaat

SEQ ID NO: 2583 - DNA, 75 bp, synthetic construct
  source 1..75: mol_type = other DNA
ttattaccgtctccgaagtggaatcgacaggataaccgcgcaggttaactacctgcaggagtacatcaggacgca

SEQ ID NO: 2584 - DNA, 75 bp, synthetic construct
  source 1..75: mol_type = other DNA
gggggttaaggctggaaaagtgagtatccccgtgatttccggtaatggtcagtttgccacggtagctgaagtcac

SEQ ID NO: 2585 - DNA, 75 bp, synthetic construct
  source 1..75: mol_type = other DNA
atggcagcagtaaaaatctcaggtgtgctgaaagatggtgcgggaaaaccaatacagaactgcactattcaactg

SEQ ID NO: 2586 - DNA, 75 bp, synthetic construct
  source 1..75: mol_type = other DNA
tgcaacagtcactgaaagaccttgagcgggcttacaaaaacttcttccggaagcgggctgcttttccccgattca

SEQ ID NO: 2587 - DNA, 75 bp, synthetic construct
  source 1..75: mol_type = other DNA
gccatcaaatccggcgcagtggcaaccgacacggttgtgaataccggcgcggaagggggaccggatgcggaaaat

SEQ ID NO: 2588 - DNA, 75 bp, synthetic construct
  source 1..75: mol_type = other DNA
taccgcaatgtgcttattgaagatgaccagggaacgcatttccggctggttatccgcaatgccgaagggcagcta

SEQ ID NO: 2589 - DNA, 75 bp, synthetic construct
  source 1..75: mol_type = other DNA
acgaacactgcacacaacgtgaaggccagggaacggataccacagttgaacgataaacagagccctgctctgctg

SEQ ID NO: 2590 - DNA, 75 bp, synthetic construct
  source 1..75: mol_type = other DNA
tttatcgccacgccagcaacctgttgctggcgcagggctggccggaagagacggatgttgaccagcgtaacccga

SEQ ID NO: 2591 - DNA, 75 bp, synthetic construct
  source 1..75: mol_type = other DNA
gcgtaaagtctggcgtcagttgttacgggaaggtatcagagtggccagatgcactgtggcacgtctcatggcggt

SEQ ID NO: 2592 - DNA, 75 bp, synthetic construct
  source 1..75: mol_type = other DNA
actgccatgataatgcggttgcagaaagttttttccagttgttgaaacgtgaacggataaagaaaaagatctacg

SEQ ID NO: 2593 - DNA, 75 bp, synthetic construct
  source 1..75: mol_type = other DNA
tgacagtcccggcggtgatgctggaaaaagtgatggcgctggcaggcagtgaaatgaagcgcctgtatgccgtcg

SEQ ID NO: 2594 - DNA, 75 bp, synthetic construct
  source 1..75: mol_type = other DNA
tttccggagaatatcgacagcgagggtgatggtttctccctggcctcaaaacgtaccaccacatttatgtccgcc

SEQ ID NO: 2595 - DNA, 75 bp, synthetic construct
  source 1..75: mol_type = other DNA
ggcgtgtactgaatatcatcgggcagccgctgccggatgccgccaggacacgccttgaaattctttgtcgtgagg

SEQ ID NO: 2596 - DNA, 75 bp, synthetic construct
  source 1..75: mol_type = other DNA
caccacaggaaaagacggtggtcagcattgccgttgatcctgagtctccggaatctttcatgaaacgacctaaac

SEQ ID NO: 2597 - DNA, 75 bp, synthetic construct
  source 1..75: mol_type = other DNA
gttgttacggtgccattcaggatgcgcaggcgttgtccgaaggtgtggtggcctcttcccgttatccgaaacact

SEQ ID NO: 2598 - DNA, 75 bp, synthetic construct
  source 1..75: mol_type = other DNA
gtgcggtggcagcgggggtagcctgggaaaatgcccctgcaaacagcgccactgtggcggtaaaaatcaatgtct

SEQ ID NO: 2599 - DNA, 75 bp, synthetic construct
  source 1..75: mol_type = other DNA
ttcagggatttttctctgaaaataacagcgatattcccgatgatgctttcgatattgaagatgctctttattatg

SEQ ID NO: 2600 - DNA, 75 bp, synthetic construct
  source 1..75: mol_type = other DNA
tatcgggagctggcgtcttcgggacaacaccagctggagttacagtgccggaaaggggtacagccagaataactg

SEQ ID NO: 2601 - DNA, 75 bp, synthetic construct
  source 1..75: mol_type = other DNA
gaagagcttaaacgcttaccctctgaatgctcctctgtagtcgaacagaacctgatgccatggcttgtcacaggt

SEQ ID NO: 2602 - DNA, 75 bp, synthetic construct
  source 1..75: mol_type = other DNA
cagagtgaaatctttgcccgacagggtgtcgaactgagccgtgcattactctccaactgggttgacgcgtgctgc

SEQ ID NO: 2603 - DNA, 75 bp, synthetic construct
  source 1..75: mol_type = other DNA
tcactggtcagacccagggaaatattactgcaggtgcatttaccgctgattctgtcggcaacatctatgtgcagg

SEQ ID NO: 2604 - DNA, 75 bp, synthetic construct
  source 1..75: mol_type = other DNA
gtgacagtgaactcgatcaccgcattgcacttcagttcggtggtggtaatgaggagacgaatctctggacgctct

SEQ ID NO: 2605 - DNA, 75 bp, synthetic construct
  source 1..75: mol_type = other DNA
agattgttgatgaaatatgtgattttgtggtgaatcagcaggctgttttcctcggtggtcactacatccttcagg

SEQ ID NO: 2606 - DNA, 75 bp, synthetic construct
  source 1..75: mol_type = other DNA
cggtgaaaggtgccgggaccacactgtgggtttataaggggaacggtgacccttatgcgaacccgctttcagacg

SEQ ID NO: 2607 - DNA, 75 bp, synthetic construct
  source 1..75: mol_type = other DNA
cctcatactggcgcaactcgcttgcggatgctgagtcaggaaagggcagttttgaacggaaagacgccaaaaatt

SEQ ID NO: 2608 - DNA, 75 bp, synthetic construct
  source 1..75: mol_type = other DNA
ggcagcaacgtattcgtgagacggtgcggcacgcactgaatgttcatccccgcctgacggcattgcgggttgacc

SEQ ID NO: 2609 - DNA, 75 bp, synthetic construct
  source 1..75: mol_type = other DNA
tttgggctctcaacccactgcttcttaccatgatggcgccagcagtcgctcaacaaaccgatgatgaaacgttcg

SEQ ID NO: 2610 - DNA, 75 bp, synthetic construct
  source 1..75: mol_type = other DNA
atgcaacagatttcctttctgcccggagaaatgacgcccggcgagcgcagtctcattctgcgggccctgaaaacc

SEQ ID NO: 2611 - DNA, 75 bp, synthetic construct
  source 1..75: mol_type = other DNA
cgcgctggaactgcctgaccttgtggcgctggccggtaaggtggtcggttttttgtcgccgaactcggtgcagta

SEQ ID NO: 2612 - DNA, 75 bp, synthetic construct
  source 1..75: mol_type = other DNA
ctgatatcaaacattacatccttattctgaagcgggaaaacggggtgacctggctggataatttcggggaaacag

SEQ ID NO: 2613 - DNA, 75 bp, synthetic construct
  source 1..75: mol_type = other DNA
gaacgcaccggtgactgccgccttcaacatgaaacagaccgtggatgcgttttttgacagcgccagtcagaaaca

SEQ ID NO: 2614 - DNA, 75 bp, synthetic construct
  source 1..75: mol_type = other DNA
gtgacgaaattgtctataaaataaataaaattgtggaaagaagacgtgcagaaggagctaaaagtacagatgtaa

SEQ ID NO: 2615 - DNA, 75 bp, synthetic construct
  source 1..75: mol_type = other DNA
ccggcaactggcagaaatctcagtgctgacagcaggcattggcggcaaaaccgccctggactgggcgatgaaaca

SEQ ID NO: 2616 - DNA, 75 bp, synthetic construct
  source 1..75: mol_type = other DNA
aggaatacgttgccaaaaaattgagattaccattcgagatgataaccgaggcaagaaatggtgataggtacttcg

SEQ ID NO: 2617 - DNA, 75 bp, synthetic construct
  source 1..75: mol_type = other DNA
cctgcaaggtggaattccgtcacggtaacatgacgctggaaaatccatcgccagagctgctcacggtgttgatcc

SEQ ID NO: 2618 - DNA, 75 bp, synthetic construct
  source 1..75: mol_type = other DNA
gatctcgtttcgtatctgcttggatggaatgctcttgttgtaaagtggatcgcttctgatgctaaaggtctgcct

SEQ ID NO: 2619 - DNA, 75 bp, synthetic construct
  source 1..75: mol_type = other DNA
atgtcgcaaaaatcgcttacggccatcacgttctgcgtgacggtaatcctcatcatctggatgctgcacggttcg

SEQ ID NO: 2620 - DNA, 75 bp, synthetic construct
  source 1..75: mol_type = other DNA
tgactaatcagggcgcagcacgactggctaacgcgacgatgctcggcagtaagctgaatctgacgcaaatggccg

SEQ ID NO: 2621 - DNA, 75 bp, synthetic construct
  source 1..75: mol_type = other DNA
ggaacgtctggtgcgtcagacgttgtttcgcgcaaaccgcctcctgatggaggcatataccgaaattctggaact

SEQ ID NO: 2622 - DNA, 75 bp, synthetic construct
  source 1..75: mol_type = other DNA
ttgacagcgacagctatcagctgctcaaggcgtatgacgtgaatatctccggtctggtcagtacgaccatgcaga

SEQ ID NO: 2623 - DNA, 75 bp, synthetic construct
  source 1..75: mol_type = other DNA
ctcagtgggcggcaataggcgtgctggggagtctgctgtttgggctgctgacatatctgactaacctgtatttca

SEQ ID NO: 2624 - DNA, 75 bp, synthetic construct
  source 1..75: mol_type = other DNA
ccgctcactggagtacgataactttccggaaatcagtgaagcgaacatttggagcacatttgagcaactgcacca

SEQ ID NO: 2625 - DNA, 75 bp, synthetic construct
  source 1..75: mol_type = other DNA
aaatctggatcatcgctggcatcacagatatgcgttgtggcttcaatggcctggcttcgaaggtgcagaacacgc

SEQ ID NO: 2626 - DNA, 75 bp, synthetic construct
  source 1..75: mol_type = other DNA
agaaatatcgtttcccggaaacactgaccaaccagagccgctggtttggcctgccactggatgaactgatccccg

SEQ ID NO: 2627 - DNA, 75 bp, synthetic construct
  source 1..75: mol_type = other DNA
ggatgttacaaaaaatgcagcgtatggcgttgagatagaaagtctggtgctggagataaatgcaccggcagcata

SEQ ID NO: 2628 - DNA, 75 bp, synthetic construct
  source 1..75: mol_type = other DNA
ccagtcgtgtaatggccatcgcctttatatttatgtcagtgcttattgttctcagcctctctgttaacgtcattc

SEQ ID NO: 2629 - DNA, 75 bp, synthetic construct
  source 1..75: mol_type = other DNA
ttgacagtttcagaaggatgtttgtttgtattatgttgtcagccatatggtctggagtgatgtggttttttatta

SEQ ID NO: 2630 - DNA, 75 bp, synthetic construct
  source 1..75: mol_type = other DNA
tgaaagacggcacaggaaaaccggtagagaactgcaccattcaactgaaagccagacggaccagcagcacggtgg

SEQ ID NO: 2631 - DNA, 75 bp, synthetic construct
  source 1..75: mol_type = other DNA
tggcattacaatggtatttatcgcgccctctccctccgtgcaggagaaaccagccagtactgacaataccaacgt

SEQ ID NO: 2632 - DNA, 75 bp, synthetic construct
  source 1..75: mol_type = other DNA
atgctctcaataaaaaaagtaaccatgctcttggggtgcctagtcctcacctgctcgatagcatttcaggcgagt

SEQ ID NO: 2633 - DNA, 75 bp, synthetic construct
  source 1..75: mol_type = other DNA
gcaattcctggagcaatatccggctgctcaggactgcgcttataaatttcttgtctgcgaggataaacccggcat

SEQ ID NO: 2634 - DNA, 75 bp, synthetic construct
  source 1..75: mol_type = other DNA
tggattcgacgggatttgcgaaacccaaggtgcatgccgaggggcggttggcctcgtaaaaagccgcaaaaaata

SEQ ID NO: 2635 - DNA, 75 bp, synthetic construct
  source 1..75: mol_type = other DNA
aacgcagacggcgtactacacaggaaaagatcgctattgttcagcagagctttgaaccgggaatgacggtctccc

SEQ ID NO: 2636 - DNA, 75 bp, synthetic construct
  source 1..75: mol_type = other DNA
tcgatgcgctggcagaagaccgcatcaccaccgaacactgtcaggcgctggcgctggagaacgacaccgcgcgtc

SEQ ID NO: 2637 - DNA, 75 bp, synthetic construct
  source 1..75: mol_type = other DNA
atgttgacctcaataacaggccacgacagtgtattgctgcgtgccgacgatcccctgatcgacatgaactacatc

SEQ ID NO: 2638 - DNA, 75 bp, synthetic construct
  source 1..75: mol_type = other DNA
tgcggcatcgagaacgaatggaaaccaggtatcatcaaaccgcccgacacatttcagttcatgggcgcgcaggag

SEQ ID NO: 2639 - DNA, 75 bp, synthetic construct
  source 1..75: mol_type = other DNA
cagttgctggacagggtttccccgtctcagtgggcggcaataggcgtgctggggagtctgctgtttgggctgctg

SEQ ID NO: 2640 - DNA, 75 bp, synthetic construct
  source 1..75: mol_type = other DNA
ggggagtctgctgtttgggctgctgacgtacctgactaacctgtatttcaaaatcaaagaggaccggcgtaaggc

SEQ ID NO: 2641 - DNA, 75 bp, synthetic construct
  source 1..75: mol_type = other DNA
caagcgccagtgtcagcgagctgaagaaaaatccgatggcgacagtcagcgccggtgatggtttcccggtcgcta

SEQ ID NO: 2642 - DNA, 75 bp, synthetic construct
  source 1..75: mol_type = other DNA
gacgtgcgcaggcgattgccgaagacaggtgtttctcgaaaggacgtctgcgcgatgaattcagaatgaagccag

SEQ ID NO: 2643 - DNA, 75 bp, synthetic construct
  source 1..75: mol_type = other DNA
cgattatctgttcagtgctctgcgtcggctggaaatccggggcgtgacggagaacggtgcagatgctgacagggt

SEQ ID NO: 2644 - DNA, 75 bp, synthetic construct
  source 1..75: mol_type = other DNA
tggcgcgagagtgaaaaactgcgtcgttataaaaaggaggcccggttgccagttgccaaaacgctaagcgaatac

SEQ ID NO: 2645 - DNA, 75 bp, synthetic construct
  source 1..75: mol_type = other DNA
attgctggaaaggctgggccatatcccaccggcagaagcagaaaaagcttattatgcttccatcggaaacgatga

SEQ ID NO: 2646 - DNA, 75 bp, synthetic construct
  source 1..75: mol_type = other DNA
tcagccacactcacccgtggagtcagataacgggagtgcctgctgcctcgctgacggcaaaaggcaccgtacaac

SEQ ID NO: 2647 - DNA, 75 bp, synthetic construct
  source 1..75: mol_type = other DNA
gtcaccagtttgacccggtactgaaacagctggcacagcagtacggcttttccgtttttccctacaccctggatg

SEQ ID NO: 2648 - DNA, 75 bp, synthetic construct
  source 1..75: mol_type = other DNA
gccgtcaaatccggcgcagtggcaaccgacacggttgtgaataccggcgcggaagggggaccggatgcagaaaat

SEQ ID NO: 2649 - DNA, 75 bp, synthetic construct
  source 1..75: mol_type = other DNA
tggacaatccggtcaaacgtggtgagcaggttatcgaacaggtcacgctgatgaaacccaatgccgggacgctgc

SEQ ID NO: 2650 - DNA, 75 bp, synthetic construct
  source 1..75: mol_type = other DNA
cgggccttaggtgttgagcttgagtcagagcggtttaaccagacagtgaaagagataaacgagctggtggggaaa

SEQ ID NO: 2651 - DNA, 75 bp, synthetic construct
  source 1..75: mol_type = other DNA
tgcgaagccgataccctgggctcctgtggttacgtttatctggctgtttatccgacgcccgaaatgaaaaattaa

SEQ ID NO: 2652 - DNA, 75 bp, synthetic construct
  source 1..75: mol_type = other DNA
accgtgtatgaagattctcaacccggtacgctgaatgattttctcggtgccatgtcggaggatgacgtccggccg

SEQ ID NO: 2653 - DNA, 75 bp, synthetic construct
  source 1..75: mol_type = other DNA
tgggcttacggggcgatagccggttgtacgttcttcattgcgcgtgaacacacccaggcagaatatcgctggatt

SEQ ID NO: 2654 - DNA, 75 bp, synthetic construct
  source 1..75: mol_type = other DNA
atgtcgggagacgagaataaacttaagaaatatcgtttcccggaaacactgaccaaccagagccgctggtttggc

SEQ ID NO: 2655 - DNA, 75 bp, synthetic construct
  source 1..75: mol_type = other DNA
atgtaccagatggaaaaaatcacaacaggtgtgtcatacaccacgtcagcggtggggacgggatactggttactg

SEQ ID NO: 2656 - DNA, 75 bp, synthetic construct
  source 1..75: mol_type = other DNA
tattcattgtcaggatcatcgtgggaaggccgtttaccgtaaaaaattcacccgaccaaagctaatcgaatttct

SEQ ID NO: 2657 - DNA, 75 bp, synthetic construct
  source 1..75: mol_type = other DNA
aatacagaactgcactattcaactgaaggcaaagcgtaacagcaccacggtactggtgaacacggtggcctctga

SEQ ID NO: 2658 - DNA, 75 bp, synthetic construct
  source 1..75: mol_type = other DNA
ccggacccgcagacggctgaacaggattttttaacccgacaccctgacgcggttgtgttcagtgcgaaaaaacgc

SEQ ID NO: 2659 - DNA, 75 bp, synthetic construct
  source 1..75: mol_type = other DNA
ccatgcgtattcaccaacaacatccgacatcccgtcttttcccgttctgtaccggcaaataccgctggcacggca

SEQ ID NO: 2660 - DNA, 75 bp, synthetic construct
  source 1..75: mol_type = other DNA
gcgccatattcgtgctgcccgtgccaaaacaccgggcgtgtctcgcgtgctttgtattgaatgtgaagcgccaat

SEQ ID NO: 2661 - DNA, 75 bp, synthetic construct
  source 1..75: mol_type = other DNA
agcgagtgaagcggcgagtggtatgcctgatccgacgttgcctgagcttcctgatggcacgctcagggccgacgg

SEQ ID NO: 2662 - DNA, 75 bp, synthetic construct
  source 1..75: mol_type = other DNA
cggaagtggtcaacgggcatacggacgttatctgctccacctcagtcagccacattctggctgtacgaaagagta

SEQ ID NO: 2663 - DNA, 75 bp, synthetic construct
  source 1..75: mol_type = other DNA
aagggtttcttcgcgggaaatgtgtaccgcgagatctgaaagtgaacgaaacaaatgctgagtacctggtacgta

SEQ ID NO: 2664 - DNA, 75 bp, synthetic construct
  source 1..75: mol_type = other DNA
ttcatcaatggcgatgatccggcgcaggtggcctggatgaaacgccagacgccgcccacactggagagcaaaatt

SEQ ID NO: 2665 - DNA, 75 bp, synthetic construct
  source 1..75: mol_type = other DNA
tcgtcacttgtgctctggcaaacaagctggccagaatagcctgggccctaacggcacgacagcaaacttatgtag

SEQ ID NO: 2666 - DNA, 75 bp, synthetic construct
  source 1..75: mol_type = other DNA
ctggctggatgcactgaaagatcccaacggcctgaaaacctttgtgaacaccacgctgggcgagacctgggaaga

SEQ ID NO: 2667 - DNA, 75 bp, synthetic construct
  source 1..75: mol_type = other DNA
cgttcagggatgctttccttaatggatgcacaggcccgtgatacatggtaccgatcactggaatacgataatttt

SEQ ID NO: 2668 - DNA, 75 bp, synthetic construct
  source 1..75: mol_type = other DNA
agccgatctgaaccggcttcagaaagagagcgatacgctgactggtagggtgtatgacccggcagtacagcgtcc

SEQ ID NO: 2669 - DNA, 75 bp, synthetic construct
  source 1..75: mol_type = other DNA
atgagcggaaaaccagcggcgcgtcagggagatatgactcagtatggcggtcccattgtccagggttcggcaggt

SEQ ID NO: 2670 - DNA, 75 bp, synthetic construct
  source 1..75: mol_type = other DNA
gcgtcgacgggctattgatgcgctgctgcaggggctgtgtttccactatgacccgctggccaaccgcgtccagtg

SEQ ID NO: 2671 - DNA, 75 bp, synthetic construct
  source 1..75: mol_type = other DNA
ccgtccaggtctttatcggcgttgatgtcggtaaagatacgcatcacgctgtagccattaatcgttcaggtaaac

SEQ ID NO: 2672 - DNA, 75 bp, synthetic construct
  source 1..75: mol_type = other DNA
atgctcgaatgacagcacatctcccgaacaaaaatgagtcttacgaatgtttaataaagatacagcatgaactaa

SEQ ID NO: 2673 - DNA, 75 bp, synthetic construct
  source 1..75: mol_type = other DNA
atcttgaccatctgaaaacccttattgcgaagggggcaaatcagtgtgcgcgggcgggggataaattaccggatt

SEQ ID NO: 2674 - DNA, 75 bp, synthetic construct
  source 1..75: mol_type = other DNA
cctggttgtccgcaataacagtggcctggtctggcgtacctggaattttgaggacggtgccgggtactggatgaa

SEQ ID NO: 2675 - DNA, 75 bp, synthetic construct
  source 1..75: mol_type = other DNA
agcgtgacctgacggggtggatgtcgctgtcgcgtaaaccggaggagacatggtacggctgggacggcgacaggc

SEQ ID NO: 2676 - DNA, 75 bp, synthetic construct
  source 1..75: mol_type = other DNA
gaacaccgttggcaaatcggcatttgtggaggctgttggccagccgagtgatgatgcatccggctatctggattt

SEQ ID NO: 2677 - DNA, 75 bp, synthetic construct
  source 1..75: mol_type = other DNA
ctgacgtattacaagtcggggacctttgcgacggaggcaatccgctggcctgaaagtgtggatgaacacaaaaag

SEQ ID NO: 2678 - DNA, 75 bp, synthetic construct
  source 1..75: mol_type = other DNA
acgaaaagcacgtacttgctatgatcatttagctggcgaagttgccgttaagatctatgattccctttgtcaaca

SEQ ID NO: 2679 - DNA, 75 bp, synthetic construct
  source 1..75: mol_type = other DNA
ggacgccgacaacgtacatcagtgatttactggttgtggtcatgaaaaaatccacggcagggatcagtatcagct

SEQ ID NO: 2680 - DNA, 75 bp, synthetic construct
  source 1..75: mol_type = other DNA
gcgcgcggaacgaccgcttaacatatatagggcaaatgatgaacataaaaaaagcggccccgaaatggagccacc

SEQ ID NO: 2681 - DNA, 75 bp, synthetic construct
  source 1..75: mol_type = other DNA
ctgctgaaccagaacgacgtcaccacccttatccgcaaagacggttttcgcttctggggttcccgctgcctgagt

SEQ ID NO: 2682 - DNA, 75 bp, synthetic construct
  source 1..75: mol_type = other DNA
ttcagcagggtaaccgctggcttaactggctggagaaacagccggaaggttcagtgcgtccggtggtgactgagt

SEQ ID NO: 2683 - DNA, 75 bp, synthetic construct
  source 1..75: mol_type = other DNA
tatcccacagcaagtatcagcgatttgctggttgtggtgatgaagaaagccaccgcaggcatcagtatcagctga

SEQ ID NO: 2684 - DNA, 75 bp, synthetic construct
  source 1..75: mol_type = other DNA
tcagcatggctggtaaataactggtatcccacagcaagtatcagcgatctgctggttgtggtgatgaaaaaatcc

SEQ ID NO: 2685 - DNA, 75 bp, synthetic construct
  source 1..75: mol_type = other DNA
ccagactcgcgattctgtgaaccagaaccagcatgaatcggaacggaacgaccaaaaagcggaacaaaacagccc

SEQ ID NO: 2686 - DNA, 75 bp, synthetic construct
  source 1..75: mol_type = other DNA
tgtctgcagtagtctggctggtcgccgctggtacgccagcgagtgcagcagagcatcagtccacactaagcggcg

SEQ ID NO: 2687 - DNA, 75 bp, synthetic construct
  source 1..75: mol_type = other DNA
tatattaccgaccggactctgtaacacaatattccaaagatattgcatggaaagctcaacaacgattgtgttctc

SEQ ID NO: 2688 - DNA, 75 bp, synthetic construct
  source 1..75: mol_type = other DNA
attggccagccggaactggcgacaaaactgtctgaacgcaatatggaagtccgtgaagtcgttcagcgctgtgag

SEQ ID NO: 2689 - DNA, 75 bp, synthetic construct
  source 1..75: mol_type = other DNA
tgatattctccgggcacgccgggcaacaggtctgatgacccgcagcaactacagaacggtaaataacattaccct

SEQ ID NO: 2690 - DNA, 75 bp, synthetic construct
  source 1..75: mol_type = other DNA
aataaagaccttgccactgtcgccagacaaattaacccgtacatcaaagtcgatataccggaaacaacgcgcggc

SEQ ID NO: 2691 - DNA, 75 bp, synthetic construct
  source 1..75: mol_type = other DNA
gctgccgtggtactggcacacaatcacccgtccggtgaagtcacacccagtaaggcagaccggcttatcaccgaa

SEQ ID NO: 2692 - DNA, 75 bp, synthetic construct
  source 1..75: mol_type = other DNA
actcagttaagcagtgcaattaacagtgaatcagaaacactggccgcaacaccgaaagcggttaaggctgcatat

SEQ ID NO: 2693 - DNA, 75 bp, synthetic construct
  source 1..75: mol_type = other DNA
aacatctcaatcgtgccgtatacgaaaaaggcggtgatggtggtgcctctaaagctcaggcgaaggcccagcagc

SEQ ID NO: 2694 - DNA, 75 bp, synthetic construct
  source 1..75: mol_type = other DNA
tggagctgagccgttcactgctgtcgggctgggtggatgcatgctgccggctgctgtctccgctggaagaggcgc

SEQ ID NO: 2695 - DNA, 75 bp, synthetic construct
  source 1..75: mol_type = other DNA
acgcgaagctgactataaatggtgaggtgctctatgaagtggaccttatcaacatggtggaaattgtggacggtg

SEQ ID NO: 2696 - DNA, 75 bp, synthetic construct
  source 1..75: mol_type = other DNA
gttcgccagcatgagcgggataccgggggcggtgatggtgggctcaccagcgctgaacgtcagcgtctgaaagag

SEQ ID NO: 2697 - DNA, 75 bp, synthetic construct
  source 1..75: mol_type = other DNA
gtttggggatttgaaattcaaatacagaaacagggagttctggtgccgagggtactatgtcgatacggtgggtaa

SEQ ID NO: 2698 - DNA, 75 bp, synthetic construct
  source 1..75: mol_type = other DNA
gaaggaggaatttcatggcaaccgtctcctgtggctggctgccgtggataaactgattgaaagttttggtgaagt

SEQ ID NO: 2699 - DNA, 75 bp, synthetic construct
  source 1..75: mol_type = other DNA
atgttaatggatcagatataatgagttttggacatattcaaaataattatactgtagtaggagagaacaaccata

SEQ ID NO: 2700 - DNA, 75 bp, synthetic construct
  source 1..75: mol_type = other DNA
tctgggacggcagcctgaaaccggcatacagcaacaacccggcctggtgcctgtgggacatgctgactcacccgc

SEQ ID NO: 2701 - DNA, 75 bp, synthetic construct
  source 1..75: mol_type = other DNA
cagttacaggcccttaaaggtgttggtcagctaaccgcaataaccctggttgctgaactgggtgatttttcacga

SEQ ID NO: 2702 - DNA, 75 bp, synthetic construct
  source 1..75: mol_type = other DNA
cagtatgtgtcactggcctatatggagcgattaaaagaagcaaaactgctggcatcaacagggagtacaggcgac

SEQ ID NO: 2703 - DNA, 75 bp, synthetic construct
  source 1..75: mol_type = other DNA
ggttaaggatggaaaagtcagcatccctgtgatttccggtaatggtcagtttgctgcggtggctgaaattaccgt

SEQ ID NO: 2704 - DNA, 75 bp, synthetic construct
  source 1..75: mol_type = other DNA
tttatctggcctgcggtgcgtgacggtaaggtatccattacccgctcgcagctggcaatgctcctcgataaactg

SEQ ID NO: 2705 - DNA, 75 bp, synthetic construct
  source 1..75: mol_type = other DNA
ctgggcgagcagttctcactgtctggcgatggctgggagctggcggaatcggacgatgttcgccgcatgcttata

SEQ ID NO: 2706 - DNA, 75 bp, synthetic construct
  source 1..75: mol_type = other DNA
acgcaccaacggaaattatcagtcggtcatggaaacggctggtgattaacaaggaaaaacatatcacccgcaggg

SEQ ID NO: 2707 - DNA, 75 bp, synthetic construct
  source 1..75: mol_type = other DNA
cagggcaaaacaccaaaagcctctccgataacaccagaacaaatcgaaatacgtaagctgaggaaaaagctacaa

SEQ ID NO: 2708 - DNA, 75 bp, synthetic construct
  source 1..75: mol_type = other DNA
ggagtgggtgataaccgtttctttgtcagtgacaatcctcagttcgatctggtgttgggaatgatggcaatgaag

SEQ ID NO: 2709 - DNA, 75 bp, synthetic construct
  source 1..75: mol_type = other DNA
ccgctgctgggtgcgaaggtgctgccgggcgagacggaccttgcgctgcccggcccgctgccgtttattctttcc

SEQ ID NO: 2710 - DNA, 75 bp, synthetic construct
  source 1..75: mol_type = other DNA
ttatggaggaagcagaaccgcgagggactcgctggtatcacccgaaaatggggttatttcaggttattggttggc

SEQ ID NO: 2711 - DNA, 75 bp, synthetic construct
  source 1..75: mol_type = other DNA
ctgaagccatccgaaataccaacactgctcggatataccgccagcctggttgataaaaaatggttgcgactggca

SEQ ID NO: 2712 - DNA, 75 bp, synthetic construct
  source 1..75: mol_type = other DNA
ttgatggcaacgggcgtctgacgggtgcccgtaccgcacagactgcaccttacgatcgctacacttgccaccttt

SEQ ID NO: 2713 - DNA, 75 bp, synthetic construct
  source 1..75: mol_type = other DNA
ctcccggcgaatctcccaggacatcagcacccgtgatgaaggtggtggcgggaaggtggtggttatcgggcggca

SEQ ID NO: 2714 - DNA, 75 bp, synthetic construct
  source 1..75: mol_type = other DNA
ctgcctgcagatataacgatattattccggctgaccactgtctgcatgatgtgcaggatatgagtacgctgaatc

SEQ ID NO: 2715 - DNA, 75 bp, synthetic construct
  source 1..75: mol_type = other DNA
aaacggacaacatgtccctgaaattattctgctcaactcccatgacggtacctccagctaccagatgctgccggg

SEQ ID NO: 2716 - DNA, 75 bp, synthetic construct
  source 1..75: mol_type = other DNA
ttgcgctggcggttacaatttcgataagatcttatgggcgatttttatcggtatcatgcttctatgataagccat

SEQ ID NO: 2717 - DNA, 75 bp, synthetic construct
  source 1..75: mol_type = other DNA
ggctgaactggtggggctgctggacaggctggagggggaaatccgggcaaactgcgtgagcagtgaaagccgcca

SEQ ID NO: 2718 - DNA, 75 bp, synthetic construct
  source 1..75: mol_type = other DNA
gcagtcagtggcagtcgctgccggtacttccggcagacggaacgcaggtgtctttcccgtatgccggagaatggc

SEQ ID NO: 2719 - DNA, 75 bp, synthetic construct
  source 1..75: mol_type = other DNA
tgaatactacaacagcagaagaattagcctgaaattaaaaggtctgactccaattgaatatcggaatcagaccta

SEQ ID NO: 2720 - DNA, 75 bp, synthetic construct
  source 1..75: mol_type = other DNA
acagacaaagttttccctaatcccgttaattccagtctggggttaatgactgcttttttcgaagcatacctggac

SEQ ID NO: 2721 - DNA, 75 bp, synthetic construct
  source 1..75: mol_type = other DNA
ttacatattgccaaaaaactgctcccgtatatcccgaataacgcggggatcctgctggtaccatgctgtcgtggt

SEQ ID NO: 2722 - DNA, 75 bp, synthetic construct
  source 1..75: mol_type = other DNA
cagaacaaggcgtggccactctgcctgatgaggcttgggagcgtgcgcgccgtcgtgcggagatcatcagtccgt

SEQ ID NO: 2723 - DNA, 75 bp, synthetic construct
  source 1..75: mol_type = other DNA
ggaaaaatgcgggattcagcgtggttggtcacctggtcttcaccaaaaactacacatcgaaggccgcatatgtgg

SEQ ID NO: 2724 - DNA, 75 bp, synthetic construct
  source 1..75: mol_type = other DNA
aatggtagccaccagtaagactgagtggggacgggcgttccgcgaccgtctggcggctaatggcaagaaaggaaa

SEQ ID NO: 2725 - DNA, 75 bp, synthetic construct
  source 1..75: mol_type = other DNA
tgcgcaggcgcttgctgcgcctttcggcattgaggtggtgaacagcggtgcgccgtcgggtgttattcctgatgt

SEQ ID NO: 2726 - DNA, 75 bp, synthetic construct
  source 1..75: mol_type = other DNA
acgaactgctccacgaaagctaccagaaatggctgaccggcttcacccggcacgccgtatcctggggcgtgtgtc

SEQ ID NO: 2727 - DNA, 75 bp, synthetic construct
  source 1..75: mol_type = other DNA
aaggtggttcagggaaaactaccattgcatcaaacctggctattgctctcgcaaataaaggaagggaagtctgcc

SEQ ID NO: 2728 - DNA, 75 bp, synthetic construct
  source 1..75: mol_type = other DNA
cagataatccggaattgatcctgcgtgtgctacaactgagatttgacgagtcactgtcgtacccgcgcatttctg

SEQ ID NO: 2729 - DNA, 75 bp, synthetic construct
  source 1..75: mol_type = other DNA
atagcgaggctgattaaaaacggtcatgacaggaaacaactggcgatcatttacgacatcggcatatcgacgatt

SEQ ID NO: 2730 - DNA, 75 bp, synthetic construct
  source 1..75: mol_type = other DNA
gttctttctggtgtgctttatcctgaaattacaggtggcgaagtgtcgctgtcgctgctgaccacgcaggcgtat

SEQ ID NO: 2731 - DNA, 75 bp, synthetic construct
  source 1..75: mol_type = other DNA
atgaaggattatctggtcagtggtcattcccgtaaagatgtctgcgagaaataccagatgaataatggatatttc

SEQ ID NO: 2732 - DNA, 75 bp, synthetic construct
  source 1..75: mol_type = other DNA
ggaaagtgcacctgacgccagctcagttatccatgctactggaggggatcgcgtggcaacatcccaaacggacag

SEQ ID NO: 2733 - DNA, 75 bp, synthetic construct
  source 1..75: mol_type = other DNA
tgaacgagtcggttaagtcagagcagtcaccgcgggtggtactctgggaaatcgacctgacggtacagggcggtg

SEQ ID NO: 2734 - DNA, 75 bp, synthetic construct
  source 1..75: mol_type = other DNA
atgaaaaccttccgctggaaagtgaaaccgggtatggatgtggcttcgactccttccgtcagggaggtgcgcttt

SEQ ID NO: 2735 - DNA, 75 bp, synthetic construct
  source 1..75: mol_type = other DNA
gtcccgctggtggacatgacaaactcaagctataccggttgaccgatattctgactgaatttatggggttaccac

SEQ ID NO: 2736 - DNA, 75 bp, synthetic construct
  source 1..75: mol_type = other DNA
cttgcggagcttaaaggtgctgcctttggtaatcccccatacagccgcgccagtcagcatgaggggcaatacatc

SEQ ID NO: 2737 - DNA, 75 bp, synthetic construct
  source 1..75: mol_type = other DNA
cggaagtccatccccgggaagtgattaaacgcgccctgtatcacaatgccgctgctgtggtgctggcacacaatc

SEQ ID NO: 2738 - DNA, 75 bp, synthetic construct
  source 1..75: mol_type = other DNA
cctcaaccgttatttcaaacaactccgccccggaaggaacatcagaaatagccaaaatcacaagacaaattcagg

SEQ ID NO: 2739 - DNA, 75 bp, synthetic construct
  source 1..75: mol_type = other DNA
atacttattgaacaggccaacgaatacatgaacagtaagcaatggcctggtaaagccgctattggtcgtctgaaa

SEQ ID NO: 2740 - DNA, 75 bp, synthetic construct
  source 1..75: mol_type = other DNA
ccgagatgcgcgcccgagtaaaaaatttcaacaaactctttgaagagttattaaaagcccgtcaacgaacaaaca

SEQ ID NO: 2741 - DNA, 75 bp, synthetic construct
  source 1..75: mol_type = other DNA
aggaacaacaggctgaattactggagcgccagattaacgcggcaagggtaaaacattgcggtgcttctgcgctgg

SEQ ID NO: 2742 - DNA, 75 bp, synthetic construct
  source 1..75: mol_type = other DNA
ttattgcggatgcaaaaccagtaagtcgccatctgacggggctggcgatcagcctgagtgtgaacggaaagattt

SEQ ID NO: 2743 - DNA, 75 bp, synthetic construct
  source 1..75: mol_type = other DNA
ctccttgcacacagaaataccctcacatccattacagcgctgttatttctgttctgttgtgcactgtatgcgcct

SEQ ID NO: 2744 - DNA, 75 bp, synthetic construct
  source 1..75: mol_type = other DNA
cggaagtggtcaacgagaatacggacgttatctgctccacctcagtcaggtacaggtcactggaatatgataatt

SEQ ID NO: 2745 - DNA, 75 bp, synthetic construct
  source 1..75: mol_type = other DNA
tgaaaccggagcatggaaagacgctattgactgggtactcaaggaggcctgcctggttgtaaacacgggcatcaa

SEQ ID NO: 2746 - DNA, 75 bp, synthetic construct
  source 1..75: mol_type = other DNA
cagcgtgatccgccatgcgatcaaaaagcgtaaagtgttcccgacagacgactcggtgaaaaaagtggtgtggct

SEQ ID NO: 2747 - DNA, 75 bp, synthetic construct
  source 1..75: mol_type = other DNA
gccaggtgaccgtccctgctgaactgctggcgtccctgattcagaccgctgaacaggcattgtggaaacgtgaat

SEQ ID NO: 2748 - DNA, 75 bp, synthetic construct
  source 1..75: mol_type = other DNA
aacgttggggggcatgggtggcaaataatcacgaggatgtcacctggtcgtctattgctgcaggatttaaaggac

SEQ ID NO: 2749 - DNA, 75 bp, synthetic construct
  source 1..75: mol_type = other DNA
agacggtaagaaaattgattatccggcgcgtcctctgctcggctttaccggtgaggatgtgcagatgattgaaga

SEQ ID NO: 2750 - DNA, 75 bp, synthetic construct
  source 1..75: mol_type = other DNA
gccgtggagcttgtggtgcgtggacgtcacaaagaagtggattccggcgagtggaagacgggcgaaagcaacacc

SEQ ID NO: 2751 - DNA, 75 bp, synthetic construct
  source 1..75: mol_type = other DNA
tattacagaccatgagcgcacaggaatatgaagatatccgggctgccggaagtgatgaacgtcgtgagctgacac

SEQ ID NO: 2752 - DNA, 75 bp, synthetic construct
  source 1..75: mol_type = other DNA
gaaaacgctgctgaaaaaaccggggctgtcactgttgccattcgccgcgaatacaaacagacatggaaaacactc

SEQ ID NO: 2753 - DNA, 75 bp, synthetic construct
  source 1..75: mol_type = other DNA
gaatctggctggttgccggcgttactgatatgcgtaaatccttcaacggtctgggtgaacaggtacaacatgtgc

SEQ ID NO: 2754 - DNA, 75 bp, synthetic construct
  source 1..75: mol_type = other DNA
atggaaacgttattaccaaacgttaatacgtctgaaggttgttttgaaattggtgtcactatcagtaaccctgta

SEQ ID NO: 2755 - DNA, 75 bp, synthetic construct
  source 1..75: mol_type = other DNA
ttgcgacggaggcaatccgctggcctgacagtgtggatgaacacaaaaaggcaaatgcctttgccggcacagccc

SEQ ID NO: 2756 - DNA, 75 bp, synthetic construct
  source 1..75: mol_type = other DNA
aatggtgccgtgatccacatcgtgccgcgtcttgcgggagcaaaaagtggcggtgtgtttcaggcggtgctgggt

SEQ ID NO: 2757 - DNA, 75 bp, synthetic construct
  source 1..75: mol_type = other DNA
agcagtactgcacacactgccagaccggaggattcagtattccccggacaactcaggaggaaatatgcgaattct

SEQ ID NO: 2758 - DNA, 75 bp, synthetic construct
  source 1..75: mol_type = other DNA
atgacagtgatgacgctcaatctcgttgaaaaacagccagcagctatgcgccggataattggtaagcatcttgcc

SEQ ID NO: 2759 - DNA, 75 bp, synthetic construct
  source 1..75: mol_type = other DNA
accatgcccgggatgccgctcagcttcctgttgccatcgattatccggcagcgctggcactccgccagatgtcga

SEQ ID NO: 2760 - DNA, 75 bp, synthetic construct
  source 1..75: mol_type = other DNA
ttgatggtaacggacgtctgacgggggcccgtaccgcacatactgctccttatgcccactacacctgccacttgt

SEQ ID NO: 2761 - DNA, 75 bp, synthetic construct
  source 1..75: mol_type = other DNA
cgccagtgcacgcattatgggcgttggcctcaacacggttttacgtcacttaaaaaactcaggccgcagtcggta

SEQ ID NO: 2762 - DNA, 75 bp, synthetic construct
  source 1..75: mol_type = other DNA
tagcctcccgtaacaggctggaagccagtgtcgctccgtcactggccggaattaaaatcccgcacatcgaccagt

SEQ ID NO: 2763 - DNA, 75 bp, synthetic construct
  source 1..75: mol_type = other DNA
agagagcgctgcaaatgctgacacttcagcaggggaggcatcggagtcagcccggcaggcggcagaaagtgcagc

SEQ ID NO: 2764 - DNA, 75 bp, synthetic construct
  source 1..75: mol_type = other DNA
atgaaatccatggataagttaacaacgggtgtcgcctatggcacctcagcaggtagtgccggttactggttttta

SEQ ID NO: 2765 - DNA, 75 bp, synthetic construct
  source 1..75: mol_type = other DNA
ggcattgacggtgatatccgaatcaacaaagcattatggatgattgccgaacagttcagggagtggaagtcatga

SEQ ID NO: 2766 - DNA, 75 bp, synthetic construct
  source 1..75: mol_type = other DNA
ggtcaccggacggtatgcgtgttgagattattcgggccggtgagtatgaagataaagaattacccgaacgggtac

SEQ ID NO: 2767 - DNA, 75 bp, synthetic construct
  source 1..75: mol_type = other DNA
ggtgaggtgtcggtaaaaatgggaaaactgttgtttctcaaagcggggcagggggtgacggccagcggtaaaaaa

SEQ ID NO: 2768 - DNA, 75 bp, synthetic construct
  source 1..75: mol_type = other DNA
aacgcccagcgttttgttaacgaagtggattcgtccgctgtttacgttaacgcctctacgcgttttaccgacggc

SEQ ID NO: 2769 - DNA, 75 bp, synthetic construct
  source 1..75: mol_type = other DNA
aactgaaagagcatgaacagtcacgacgtcacccggacgcctcgctgaccgcaaaaggctttgttcaactcagta

SEQ ID NO: 2770 - DNA, 75 bp, synthetic construct
  source 1..75: mol_type = other DNA
tcaaaaaagtttgaagcacagtctgcaccagtggctaagataaccagccagatggctgggaatatccgggcgtta

SEQ ID NO: 2771 - DNA, 75 bp, synthetic construct
  source 1..75: mol_type = other DNA
cagcacgaaccgattcaggttatatccttcgcgcaccgagacgaatgcgggttgctgatgccgttgctcagtata

SEQ ID NO: 2772 - DNA, 75 bp, synthetic construct
  source 1..75: mol_type = other DNA
aaggaatgatcaccttgaatctcaaacggatttttctcgccctcaccttacttcccttgtttgctgttgccgctg

SEQ ID NO: 2773 - DNA, 75 bp, synthetic construct
  source 1..75: mol_type = other DNA
tggtaattacgttactcgatgccatggggattggccttatcatgccagtcttgccaacgttattacgtgaattta

SEQ ID NO: 2774 - DNA, 75 bp, synthetic construct
  source 1..75: mol_type = other DNA
tggatatccgggtgccggaccatctgatagtcggtggcaaccaggttttctcctttgcggaacacggcctgcttt

SEQ ID NO: 2775 - DNA, 75 bp, synthetic construct
  source 1..75: mol_type = other DNA
aaggccgcgcagccagagcctcagcctcaacaacagccagaacctccttatggcttcgacgatgatgcgccattc

SEQ ID NO: 2776 - DNA, 75 bp, synthetic construct
  source 1..75: mol_type = other DNA
gcagatatttcgttatcaaaacagcaggcacttgaacgttacggggttaattataaaggagaaaagaaacttatc

SEQ ID NO: 2777 - DNA, 75 bp, synthetic construct
  source 1..75: mol_type = other DNA
ctgccagtggccacacggcgattatcaccacagtgaaaccgtcattcaccgttatggtaccggcgcaatggtgtt

SEQ ID NO: 2778 - DNA, 75 bp, synthetic construct
  source 1..75: mol_type = other DNA
gattcgctttgcggatttcgtatcgagcagggaaatacggtgcttgtggcaacgttagcctacgaagttaaacgt

SEQ ID NO: 2779 - DNA, 75 bp, synthetic construct
  source 1..75: mol_type = other DNA
atgagtgactatcatcacggcgtgcaggtgctggagattaacgacggcacccgcgtcatttccaccgtatccact

SEQ ID NO: 2780 - DNA, 75 bp, synthetic construct
  source 1..75: mol_type = other DNA
gctctctttgccgctttcagcgtcacagggaaaggtacgcaatcatcttatccgagtattgaacaatttaatgaa

SEQ ID NO: 2781 - DNA, 75 bp, synthetic construct
  source 1..75: mol_type = other DNA
atgaaaacattacccgacacgcatgtacgggaggtatcgtgctgcccgtctccagtcaccatctggcagacactg

SEQ ID NO: 2782 - DNA, 75 bp, synthetic construct
  source 1..75: mol_type = other DNA
ttctgcatatcactggtatacagaacggtatggcgtgaagtggccttgtgggtatgacctgaatatcagcagtca

SEQ ID NO: 2783 - DNA, 75 bp, synthetic construct
  source 1..75: mol_type = other DNA
ccgtcttggccgcgacaccgccgacatgatccaactgataaaagagtttgatgctcagggtgtagcggttcggtt

SEQ ID NO: 2784 - DNA, 75 bp, synthetic construct
  source 1..75: mol_type = other DNA
atcacttcatgccaaacttggatataaagggaatatgcagaatttgatagccggtcctttctctgcaacagcaac

SEQ ID NO: 2785 - DNA, 75 bp, synthetic construct
  source 1..75: mol_type = other DNA
gcaattcgatgacattcgcgtaattcgtggtgtgaaagtaccaggcggacggcttggaataaaaatcaccgaact

SEQ ID NO: 2786 - DNA, 75 bp, synthetic construct
  source 1..75: mol_type = other DNA
tgtgaaagaaaccagtgagcgtggcgtaaaacttacccaaccaattgagcgaggcggcgaaaaaatcacgtatgt

SEQ ID NO: 2787 - DNA, 75 bp, synthetic construct
  source 1..75: mol_type = other DNA
ccgcgacttcgacgactacctgctgccggccgagaagttcgccgcactcaagcgcgagcaggccctgcccctggc

SEQ ID NO: 2788 - DNA, 75 bp, synthetic construct
  source 1..75: mol_type = other DNA
atgaccactattaccaaagaacgtattgaattgttcattaaaaatccgcttgaaaacgggcttactcgtggcgaa

SEQ ID NO: 2789 - DNA, 75 bp, synthetic construct
  source 1..75: mol_type = other DNA
cgcttgctatggcgggcgtattttcagcccaggctctggctgataggggtaaaacaggcttttatgtgaccggta

SEQ ID NO: 2790 - DNA, 75 bp, synthetic construct
  source 1..75: mol_type = other DNA
agactggcagatgatgtaaggcacttgcgccaggaggagcgggaaaggcgaaaaaatatagaaaagctaattcag

SEQ ID NO: 2791 - DNA, 75 bp, synthetic construct
  source 1..75: mol_type = other DNA
gtggtcgggaatgccaggtaagaatccctggcgtatgtaatggcaaccctgaaacgtctgtactggcacatatcc

SEQ ID NO: 2792 - DNA, 75 bp, synthetic construct
  source 1..75: mol_type = other DNA
caatccaggagattgcagcacacacacttcgtcatcgtctgaacgaacttgaattggaatcggtaacgaaaaaag

SEQ ID NO: 2793 - DNA, 75 bp, synthetic construct
  source 1..75: mol_type = other DNA
agattattgacacttgcctggaaatgacccgcctgggactgaaccaggggacagcgggtaacgtcagtgtacgtt

SEQ ID NO: 2794 - DNA, 75 bp, synthetic construct
  source 1..75: mol_type = other DNA
atgattcacctgttcaaaacctgcatgattaccgccttcattctggggttaacgtggtctgccccactccgggca

SEQ ID NO: 2795 - DNA, 75 bp, synthetic construct
  source 1..75: mol_type = other DNA
atgaatctggtgatgtcagatattacccgcaacaagctgggttgctatatggcgcagcaggcgtcgcttaacaat

SEQ ID NO: 2796 - DNA, 75 bp, synthetic construct
  source 1..75: mol_type = other DNA
tgagtcggtacagcgatacatcgtgaagccgggagaagtccacgccgtaaggccgcacccgttgccgtcagggca

SEQ ID NO: 2797 - DNA, 75 bp, synthetic construct
  source 1..75: mol_type = other DNA
cgggattatttcaccctcagagaacggttgatgacgatgcagaagcaactggaaggggcacagctatacattcgt

SEQ ID NO: 2798 - DNA, 75 bp, synthetic construct
  source 1..75: mol_type = other DNA
gctgggctgaggcggacaataacatcgctgaaaatgcgttgcggatggtcagtctgggccgcaaaaactacctgt

SEQ ID NO: 2799 - DNA, 75 bp, synthetic construct
  source 1..75: mol_type = other DNA
tgctcggactcgaccccagcagccgccagcgtctgattggcctggcggggcagaagaaagccactaacccgtttc

SEQ ID NO: 2800 - DNA, 75 bp, synthetic construct
  source 1..75: mol_type = other DNA
gcagtgggaacgcctgcaacgcggcgttgcgtcattttcgctacaactggcagaagggcgggcagatctctacac

SEQ ID NO: 2801 - DNA, 75 bp, synthetic construct
  source 1..75: mol_type = other DNA
attcaggaaattccgggggatattttcgcagcggcggcaacttatgacggtgaagttattaccatttatccaggc

SEQ ID NO: 2802 - DNA, 75 bp, synthetic construct
  source 1..75: mol_type = other DNA
tgagcacatttgaacaactacaccagaacaaggatgaggtgtttgagcgaggggtgatcaacgtcttcaggggac

SEQ ID NO: 2803 - DNA, 75 bp, synthetic construct
  source 1..75: mol_type = other DNA
actgataccgtggatgcgcgcatgctggcagagttctgtcgtcagaagcgccctgcagcctgggaagcgcctcac

SEQ ID NO: 2804 - DNA, 75 bp, synthetic construct
  source 1..75: mol_type = other DNA
cgtcccggaatgcgtcacccgccgacaggcggtggttaatcaggcccgcgccctgctgaaaaacaacacacgcga

SEQ ID NO: 2805 - DNA, 75 bp, synthetic construct
  source 1..75: mol_type = other DNA
gttcagccagcctgccagccagttactggcaggtgcgcgcatggatgtgtatgtcatccgtgacggggagggcaa

SEQ ID NO: 2806 - DNA, 75 bp, synthetic construct
  source 1..75: mol_type = other DNA
atgacgacgttaactcaatgccagcagcaggtgctggatatgctgatttcttatcagaaagaacgtggcttcccg

SEQ ID NO: 2807 - DNA, 75 bp, synthetic construct
  source 1..75: mol_type = other DNA
tgcagaatacggtcagagggaaaatacccgccgtgagcatgcagcgctgatacgtcagcactatcagtatcgtga

SEQ ID NO: 2808 - DNA, 75 bp, synthetic construct
  source 1..75: mol_type = other DNA
aaggccgcgcagcccgagcctcagccgcaaccgccggagggggaggattacgggttttcagacgatatcccgttc

SEQ ID NO: 2809 - DNA, 75 bp, synthetic construct
  source 1..75: mol_type = other DNA
atggcaatgccgcgcaaactcaagttaatgaacgtctttctgaacggctacagctatcagggcgttgcaaagtcc

SEQ ID NO: 2810 - DNA, 75 bp, synthetic construct
  source 1..75: mol_type = other DNA
atgctggtggagtggggaccggttatcccgaaagggaaggtcgagatcactatcagtaagtatgagaaaccggcg

SEQ ID NO: 2811 - DNA, 75 bp, synthetic construct
  source 1..75: mol_type = other DNA
caagttcgccgtctggaggaacaaaatacgatattaaaaaaggctaccgcgctcttaatgtccgactcgctgaac

SEQ ID NO: 2812 - DNA, 75 bp, synthetic construct
  source 1..75: mol_type = other DNA
gctgcttgaacagtatcaccgtgccggacagcaacgactggccgccgtgcaacgggccatgcagcagggggccgc

SEQ ID NO: 2813 - DNA, 75 bp, synthetic construct
  source 1..75: mol_type = other DNA
caaaatgggtcgcagctcccgctggctgaaaagcgaagtggaagcctggctgcaggcacgcattgcacagtcccg

SEQ ID NO: 2814 - DNA, 75 bp, synthetic construct
  source 1..75: mol_type = other DNA
actcaggcggttttcttgctggtatcggtgggcaaaactcaaatgcgccaaaggcaagtgatgtaagtgaggcgt

SEQ ID NO: 2815 - DNA, 75 bp, synthetic construct
  source 1..75: mol_type = other DNA
ctgccagataatttcttgtttctttgtggtgcggttatgaatcagtgtgccgtaccggttgtttcaatggcagtc

SEQ ID NO: 2816 - DNA, 75 bp, synthetic construct
  source 1..75: mol_type = other DNA
accgttgctggtgcatcaacggttggtggcaacaatccttaccagacataccgcgactttgcagaaaacaaaggg

SEQ ID NO: 2817 - DNA, 75 bp, synthetic construct
  source 1..75: mol_type = other DNA
aaatttttgacctggacatctcgctggaccgtgttgaaggtgccgcgctggagttttatgaggcagcagccagaa

SEQ ID NO: 2818 - DNA, 75 bp, synthetic construct
  source 1..75: mol_type = other DNA
atcctcgaccagtttctggatgaaaaggaaggtaaccacaccacggcataccgtgatggtgcgggtatctggacc

SEQ ID NO: 2819 - DNA, 75 bp, synthetic construct
  source 1..75: mol_type = other DNA
gaaatcactggttgcaggaaaaacggttaccgtcacatattttcagcgagatcgttatggtcgtattctcgggca

SEQ ID NO: 2820 - DNA, 75 bp, synthetic construct
  source 1..75: mol_type = other DNA
acgaccagatggactcagacgccgctgtggatgaggccattctcgtcaatgcatacatcttcaccgaaaccggtc

SEQ ID NO: 2821 - DNA, 75 bp, synthetic construct
  source 1..75: mol_type = other DNA
gtcagttccggcagcctgaacaacggcgggacactggttgccgggcgcgatgccacggtgaaaaccgggacattc

SEQ ID NO: 2822 - DNA, 75 bp, synthetic construct
  source 1..75: mol_type = other DNA
gttcagctgactaacagcggctctgatccgctggtcggggttgtctgggcagatgccggaaccagtgcagaagaa

SEQ ID NO: 2823 - DNA, 75 bp, synthetic construct
  source 1..75: mol_type = other DNA
cgcgtaaaacatccgtcaaacaaacgctgattaatcctggcgacgtcacggttgttatttatgagccttccgtgg

SEQ ID NO: 2824 - DNA, 75 bp, synthetic construct
  source 1..75: mol_type = other DNA
gacacagggcggcagactgacctgtaagttccgcctgtcaggcgcactgaccaacaatcagttcgggctggggat

SEQ ID NO: 2825 - DNA, 75 bp, synthetic construct
  source 1..75: mol_type = other DNA
ccggtgacaaggaatacgcagaagtgcttgttgccataaccgaacttacaaatacattgcgtaaacagttaatgg

SEQ ID NO: 2826 - DNA, 75 bp, synthetic construct
  source 1..75: mol_type = other DNA
tggcccctgaagtacagaacgctgtcatggttaagttcgacacatgtgaaaacatcaccgttgatatggtgatta

SEQ ID NO: 2827 - DNA, 75 bp, synthetic construct
  source 1..75: mol_type = other DNA
gagaatatgctgaaaggcgggatttccggtcgcagtgcaaaaggaaaacgtatccatacccgggccattcacagc

SEQ ID NO: 2828 - DNA, 75 bp, synthetic construct
  source 1..75: mol_type = other DNA
gccgacgacgcgctcaattctgagtgggtaagccacggtgcaatctggaataacccaccgtacagcaatatcagg

SEQ ID NO: 2829 - DNA, 75 bp, synthetic construct
  source 1..75: mol_type = other DNA
attgaccagccgcagaccccggcgcttgagttgcagattaaggtcgcctgttacatggcggtgctgaaatgggaa

SEQ ID NO: 2830 - DNA, 75 bp, synthetic construct
  source 1..75: mol_type = other DNA
ttgctgctgctattggtggtggggctgttgccatagcgtctgtgctcatcactggtccgagtggtgacgatggcc

SEQ ID NO: 2831 - DNA, 75 bp, synthetic construct
  source 1..75: mol_type = other DNA
aaaccgatatccggcgtggaaggcattgtgttttcctgatgcatgttcacctggtctttgtcaccagataccgac

SEQ ID NO: 2832 - DNA, 75 bp, synthetic construct
  source 1..75: mol_type = other DNA
ttcagcaagtgctggaacgtgctgactatctggcgaaggagcataccaaagctcactgcaccggtgagcgcaatt

SEQ ID NO: 2833 - DNA, 75 bp, synthetic construct
  source 1..75: mol_type = other DNA
accattccgcaaagccacatatacccacttccctgaaattgacccgcgcctgcgtaattaccgctcacgctatgg

SEQ ID NO: 2834 - DNA, 75 bp, synthetic construct
  source 1..75: mol_type = other DNA
gagttttatgaggcagcagccagaaggagcatcagacaggtcttcctggatgttgctgccgggttatgtgaaggg

SEQ ID NO: 2835 - DNA, 75 bp, synthetic construct
  source 1..75: mol_type = other DNA
ggaaacttcggcttcccctggagagagcgagattctccgcgctgtagaagtcaccattgttgtgcacgacgacat

SEQ ID NO: 2836 - DNA, 75 bp, synthetic construct
  source 1..75: mol_type = other DNA
gcaatacgacactgaacttccctggtttgaacacactgacgacaggctgacagagcacggtcaacagtgccctta

SEQ ID NO: 2837 - DNA, 75 bp, synthetic construct
  source 1..75: mol_type = other DNA
ctgatagcagccattgaactggacgaacggattggttatttcggacgaacgcaccggcttacgccggttttacat

SEQ ID NO: 2838 - DNA, 75 bp, synthetic construct
  source 1..75: mol_type = other DNA
tatttctcttgcacttagtgcaggcaagaaatatgcaattgtgctgaagggaagatacctccttggagaagatac

SEQ ID NO: 2839 - DNA, 75 bp, synthetic construct
  source 1..75: mol_type = other DNA
tgaacgagtcggttaagtcagagcagtcaccgcgggtggtgctctgggaaatcgacctgacggtgcagggcggtg

SEQ ID NO: 2840 - DNA, 75 bp, synthetic construct
  source 1..75: mol_type = other DNA
gatccggttcctgaacaggatctatttgaggcgctaaatgaaaccttaacgctatggaactcgccgcccgactgg

SEQ ID NO: 2841 - DNA, 75 bp, synthetic construct
  source 1..75: mol_type = other DNA
attgcttatgaaggctccggcagtggtgactggcgcactgacggtttcatcgtgggtgtcggttataaattctga

SEQ ID NO: 2842 - DNA, 75 bp, synthetic construct
  source 1..75: mol_type = other DNA
cggggcctttcacccggagacaagcgcaagcggtcactaccacgtacagcaatatcacactcgaagacgaccagg

SEQ ID NO: 2843 - DNA, 75 bp, synthetic construct
  source 1..75: mol_type = other DNA
acacgcctcgagaggcgaaggataatctcaaatccacgcagatgatgagtgtgattgatgcgattggtgagggac

SEQ ID NO: 2844 - DNA, 75 bp, synthetic construct
  source 1..75: mol_type = other DNA
tccgcgtcagcagcttcgaccagaacccggaacggcaattggagggtgttcaggtggcgcgggtgttcaccgaca

SEQ ID NO: 2845 - DNA, 75 bp, synthetic construct
  source 1..75: mol_type = other DNA
gacagcgaggcggtcgggattatccgctcactgcttgccggtgaggaaaacgcaaggctgcgtgcaacccactgg

SEQ ID NO: 2846 - DNA, 75 bp, synthetic construct
  source 1..75: mol_type = other DNA
atgtcgccgtcattacgcaaggctgttgcagctgctattggtggtggggctgttgccatagcgtctgtgctcatc

SEQ ID NO: 2847 - DNA, 75 bp, synthetic construct
  source 1..75: mol_type = other DNA
gctgcgcagggctggagcattaaggatggcggaattcagttgtcagatggtgtatttaagatcaccaagcagagc

SEQ ID NO: 2848 - DNA, 75 bp, synthetic construct
  source 1..75: mol_type = other DNA
tgacctgtgccgcctggtcatcacgggttcgcatgctgcgggttgaattcagcgcggagtttaagcaggtggtga

SEQ ID NO: 2849 - DNA, 75 bp, synthetic construct
  source 1..75: mol_type = other DNA
gatgcgcgatgcgcagttgtggagccacatcgaatttcaccccgaatgtaacgcgatttacgcggcgctggactg

SEQ ID NO: 2850 - DNA, 75 bp, synthetic construct
  source 1..75: mol_type = other DNA
atacgtctgaaggttgttttgatattggtgttctgctcagtaaccgggagtttactgaagatgccattaatatga

SEQ ID NO: 2851 - DNA, 75 bp, synthetic construct
  source 1..75: mol_type = other DNA
cgctggcggtgctggaattttgaacctgatgccggaaaacagctaaatccgtatctcgccagtgagggaattctc

SEQ ID NO: 2852 - DNA, 75 bp, synthetic construct
  source 1..75: mol_type = other DNA
tggatatccgggtgccggaccatctgatagtcggtggcagccaggttttctcctttgccgaacacggtctgcttt

SEQ ID NO: 2853 - DNA, 75 bp, synthetic construct
  source 1..75: mol_type = other DNA
tcgcgcttgatccgaacgctaacgtcacctcacaagctgactgggaagcacttccggctctgctttcagggttta

SEQ ID NO: 2854 - DNA, 75 bp, synthetic construct
  source 1..75: mol_type = other DNA
ctgggccgcagcagccgctggtacaaaagcgaagtggagcagtggatgcaacagcgaatcgaggaatcccggggg

SEQ ID NO: 2855 - DNA, 75 bp, synthetic construct
  source 1..75: mol_type = other DNA
gtctcgccgtactctgcctgaacggctgccatctccccccggataatacagctccgaccagaaagtatggtgctg

SEQ ID NO: 2856 - DNA, 75 bp, synthetic construct
  source 1..75: mol_type = other DNA
tgtcctgtggatgcccgttaacacttcagcggggcaatgacggacaaccaccgtggtttgaacatgaccagatga

SEQ ID NO: 2857 - DNA, 75 bp, synthetic construct
  source 1..75: mol_type = other DNA
atttgtctgttactgatgatgttgttgttcctgctactgctactgctactgctactgctactgctactgctactg

SEQ ID NO: 2858 - DNA, 75 bp, synthetic construct
  source 1..75: mol_type = other DNA
atgatttaaatgaagatgcggaatttgatgagaacggagttgaggtttttgacgaaaaggccttagtagaagagg

SEQ ID NO: 2859 - DNA, 75 bp, synthetic construct
  source 1..75: mol_type = other DNA
atagccgaagggtttattgacggatgtttgtctgtgctgggggtaagactggagatggacgactggctgctaaaa

SEQ ID NO: 2860 - DNA, 75 bp, synthetic construct
  source 1..75: mol_type = other DNA
ctcggccttgatgacgatgcgctgtcaatggagtggtcgctcgggggcttcccggattcggttatctgggagctt

SEQ ID NO: 2861 - DNA, 75 bp, synthetic construct
  source 1..75: mol_type = other DNA
aaggctttcagccgttcttcgcctgccagacccgtgtgcgcgaccagagccgccgggaatataccaaacatatgc

SEQ ID NO: 2862 - DNA, 75 bp, synthetic construct
  source 1..75: mol_type = other DNA
ctggctatgcctgtgaaaatccgcattgagtgccacatgccggatcgccgtcgccgtgacctggataatctgcaa

SEQ ID NO: 2863 - DNA, 75 bp, synthetic construct
  source 1..75: mol_type = other DNA
tacaccgacacggccggcttcaccgatcacgtctttgccctgatgcacctgctaggcttccgcttcgcgccgcgc

SEQ ID NO: 2864 - DNA, 75 bp, synthetic construct
  source 1..75: mol_type = other DNA
gcgttactacatccagcccaaacgtaaaatgcgtccgtcaaaaagaacagttcgcttcgaaactcagcctggata

SEQ ID NO: 2865 - DNA, 75 bp, synthetic construct
  source 1..75: mol_type = other DNA
ccattccggacgaacaggcaataaaggaagaaggtgccgtcgctgtagccactgccattgaagccggtgatgaac

SEQ ID NO: 2866 - DNA, 75 bp, synthetic construct
  source 1..75: mol_type = other DNA
aaaaagctgaacttgaacgccttcatgattccagtcgtgacgggcgagtcagagatcgtattaaagccattcttc

SEQ ID NO: 2867 - DNA, 75 bp, synthetic construct
  source 1..75: mol_type = other DNA
agggcgaaaaactctccctgaaagagacgttaaccctgctggacggtgccgcacgtcataacgtacaggtcctga

SEQ ID NO: 2868 - DNA, 75 bp, synthetic construct
  source 1..75: mol_type = other DNA
acaggtctgatgacccgcagcaactacagaacggtaaataacattaccctggggaagcatccggaggcgaaacaa

SEQ ID NO: 2869 - DNA, 75 bp, synthetic construct
  source 1..75: mol_type = other DNA
gtaagaattggcgcgcccaccggcgtggcgtgctcggtgtgtccgggcgggatgacttcgggcaacccggtaaat

SEQ ID NO: 2870 - DNA, 75 bp, synthetic construct
  source 1..75: mol_type = other DNA
cgagagcgccagggtattacgccctctgccacacccattactccagaccagcaacgtatccgcgagctggaaaag

SEQ ID NO: 2871 - DNA, 75 bp, synthetic construct
  source 1..75: mol_type = other DNA
ctggtagtggacagggccgaaaaaccacaacacggggacatcgttatcgctgagatcgacggtgagttcaccgtc

SEQ ID NO: 2872 - DNA, 75 bp, synthetic construct
  source 1..75: mol_type = other DNA
cctgtttgatgagtcaggggcattgattgccgtggggaactgcccggaaagctataaaccgcaactggctgaagg

SEQ ID NO: 2873 - DNA, 75 bp, synthetic construct
  source 1..75: mol_type = other DNA
ttattgatttgagtctggatgcggcccggtttgatgaacagatggcccgggtacgccgtcatttttccagtctgg

SEQ ID NO: 2874 - DNA, 75 bp, synthetic construct
  source 1..75: mol_type = other DNA
tcaatggccgctgggcgtatctgtaccgggccgtcgacagccggggccgcactgtcgatttttatctctcctccc

SEQ ID NO: 2875 - DNA, 75 bp, synthetic construct
  source 1..75: mol_type = other DNA
ttgcaagaaaacgtcttacacacaaagagataaaagtttttgtcaaaaatcctctgaaagatctcatggttgagt

SEQ ID NO: 2876 - DNA, 75 bp, synthetic construct
  source 1..75: mol_type = other DNA
aatcagctggaagaagaattaggtattcagttgtttgttcgttcccatcgcaaagtggaattaacgcacgagggg

SEQ ID NO: 2877 - DNA, 75 bp, synthetic construct
  source 1..75: mol_type = other DNA
gcccgtgaagccctgattgacgccctgctgaccgggcgtaaccagattttcctttctgccagcaaggctcaggcc

SEQ ID NO: 2878 - DNA, 75 bp, synthetic construct
  source 1..75: mol_type = other DNA
atcatgctgcccggaatgtggaggctcactgagctatctgggtgaggatgccgccgaacagctggagttgatgcg

SEQ ID NO: 2879 - DNA, 75 bp, synthetic construct
  source 1..75: mol_type = other DNA
gtccaggtactgctgccgggtaataagaagacgaagaccgggcggttgtgggcgtatgttcgtgatgaccgcaat

SEQ ID NO: 2880 - DNA, 75 bp, synthetic construct
  source 1..75: mol_type = other DNA
atgcgaaccagatacgccgtgaccgtccgctgacacatgaagagctgatgcattatgtacccggtatttttgggg

SEQ ID NO: 2881 - DNA, 75 bp, synthetic construct
  source 1..75: mol_type = other DNA
cctggaccgccgtgaagtgctgcacacgcagggcgaagccgggctgaagcgggtggtgaaaaaggaacacgcgga

SEQ ID NO: 2882 - DNA, 75 bp, synthetic construct
  source 1..75: mol_type = other DNA
attgagggctctgtatggccaaaatccattcgcggctcgacgcctaaaatcaaaggctcctgccagatcgaaaaa

SEQ ID NO: 2883 - DNA, 75 bp, synthetic construct
  source 1..75: mol_type = other DNA
accgggttcatgtggtggctgcactgatggccatcggacgtgaactgagtgagctgagggatgaggtccgtaaac

SEQ ID NO: 2884 - DNA, 75 bp, synthetic construct
  source 1..75: mol_type = other DNA
aagtcgccatgccgttgccagagccatctgtcacggtcaaaaaggtgagataagaaaacgatataccgacggtca

SEQ ID NO: 2885 - DNA, 75 bp, synthetic construct
  source 1..75: mol_type = other DNA
ggccgttggcaccaacaccattggttcttccgaggcctgtatgctcggcgggatggcgatgaaatggcgttggcg

SEQ ID NO: 2886 - DNA, 75 bp, synthetic construct
  source 1..75: mol_type = other DNA
cagcgactgatagaggaaggaaagatggttagtaaaagcaaggcgcattgccgccgcatgctgcaggcattgcaa

SEQ ID NO: 2887 - DNA, 75 bp, synthetic construct
  source 1..75: mol_type = other DNA
ccagcgtgaacacgtactggcgacaccccaacaaaggggcatttgctggtaagagcctgataagcgcggcggggc

SEQ ID NO: 2888 - DNA, 75 bp, synthetic construct
  source 1..75: mol_type = other DNA
gtcgatggtgttaatctcactgaactgattaataacgtcgctgaaaacggttattcactccgtgtggtggaggaa

SEQ ID NO: 2889 - DNA, 75 bp, synthetic construct
  source 1..75: mol_type = other DNA
cgtggggggctggcgtgcagtttaacccgaccgaatccgtggccattgatattgcttatgaaggctccggcagtg

SEQ ID NO: 2890 - DNA, 75 bp, synthetic construct
  source 1..75: mol_type = other DNA
ggtaatcgatggcggcgtactggacagcggcctgcgtcttgagcgtcgtcgcgtaccgctgggggttattggcgt

SEQ ID NO: 2891 - DNA, 75 bp, synthetic construct
  source 1..75: mol_type = other DNA
actacactgtcaccacttcaaacggaagtacctggaccggggccggtattattgtggacaaggatgcctccgtaa

SEQ ID NO: 2892 - DNA, 75 bp, synthetic construct
  source 1..75: mol_type = other DNA
gcattttggcctcattccacagtgggtggccctggagccccgtgttttcggctggatggaccgtctgtgcgaaga

SEQ ID NO: 2893 - DNA, 75 bp, synthetic construct
  source 1..75: mol_type = other DNA
atgaagaaaaaatacgaactggttgttaaagggataaataattacccggataagattactgttactgtggcactg

SEQ ID NO: 2894 - DNA, 75 bp, synthetic construct
  source 1..75: mol_type = other DNA
ccggctgcggtccaggggggcgtgtcacaggcgtcagaagacggtgatgcggacgtgaaaatgctcatggccatg

SEQ ID NO: 2895 - DNA, 75 bp, synthetic construct
  source 1..75: mol_type = other DNA
actaagaagcagaagaaagagccagaagcgaagcagggcgattacctggtgggtacggatgaaaacgtgctggta

SEQ ID NO: 2896 - DNA, 75 bp, synthetic construct
  source 1..75: mol_type = other DNA
tactgtattattatcctgctatcgatgaccttcatgttaacccctcaagctcaggggagtaaacaggagacaagt

SEQ ID NO: 2897 - DNA, 75 bp, synthetic construct
  source 1..75: mol_type = other DNA
gagagatgacgcccggcgagcgcagtctcattctgcgggccctgaaaaccctggaccgtcatcttcatgaacccg

SEQ ID NO: 2898 - DNA, 75 bp, synthetic construct
  source 1..75: mol_type = other DNA
aaatcatggctggataacaaagaattattacaaacagcgatatcagttcttaaagacaaccaaaatttaaatggt

SEQ ID NO: 2899 - DNA, 75 bp, synthetic construct
  source 1..75: mol_type = other DNA
ctggttgagtttgagtttcttttgttacttgcaggagaacatcctgaatacgtgctctgcaaaagggagtcaaaa

SEQ ID NO: 2900 - DNA, 75 bp, synthetic construct
  source 1..75: mol_type = other DNA
atgagcgaatatttcagaatacttcaggggctgcctgacggtccttttacccgcaaacatgccgaagctgttgcc

SEQ ID NO: 2901 - DNA, 75 bp, synthetic construct
  source 1..75: mol_type = other DNA
ctgggtatccccgcgttgcgggatcgtattgttcagcgggccatgctgatggcgatggagccgatatgggagagt

SEQ ID NO: 2902 - DNA, 75 bp, synthetic construct
  source 1..75: mol_type = other DNA
atgcgaaccagatacgccgtgaccgccccttaactcgtgaagaactgatgcaggtcgtccccagcgtattcgggg

SEQ ID NO: 2903 - DNA, 75 bp, synthetic construct
  source 1..75: mol_type = other DNA
gctgaatccggaaaagtcccacccttacattgaggatatggcgatgtttttatcgccattaccggtcgtgctgga

SEQ ID NO: 2904 - DNA, 75 bp, synthetic construct
  source 1..75: mol_type = other DNA
tcggatgtcttcgctgcggaagcagacctcgctgctgcgctggcctgttcagtggcttcgccagccttcgttgtg

SEQ ID NO: 2905 - DNA, 75 bp, synthetic construct
  source 1..75: mol_type = other DNA
aactgcttttagctattgataaaaattttagtaaattaattagttacctcaacacaatcccaccagaaattactt

SEQ ID NO: 2906 - DNA, 75 bp, synthetic construct
  source 1..75: mol_type = other DNA
tggaaggtgcgctggctgttgttgctgttgtgggcgtttactgcctggttgtgtttttgatggatcgactaggga

SEQ ID NO: 2907 - DNA, 75 bp, synthetic construct
  source 1..75: mol_type = other DNA
cgagcagtttgatgaaatcaatattgtgcgcggtcagctcgttcctggtgggcggctggggataaaaatcacaga

SEQ ID NO: 2908 - DNA, 75 bp, synthetic construct
  source 1..75: mol_type = other DNA
cactgctgcaaatcgacacacttatccggcaactggctgaaatctcagcaatgacagaaagtattggcggtaaaa

SEQ ID NO: 2909 - DNA, 75 bp, synthetic construct
  source 1..75: mol_type = other DNA
accgctgatgcagaagatgacacttatctcgatgatgaagatgcagactggaaaacgacaacccaggggcagaaa

SEQ ID NO: 2910 - DNA, 75 bp, synthetic construct
  source 1..75: mol_type = other DNA
atgaccagatggtcgacatggcgtttatcactcaactgaccggcctaaccgataagtggtttgacaaactcatca

SEQ ID NO: 2911 - DNA, 75 bp, synthetic construct
  source 1..75: mol_type = other DNA
accgccgacattctgacgccgcgacgccgggaggattacggtaaggacctgtggagcgcatatcagaccatccag

SEQ ID NO: 2912 - DNA, 75 bp, synthetic construct
  source 1..75: mol_type = other DNA
acacccgctggaactgtaaatatcacatagtttttgcgccgaaataccgaagactggcgttttacggagagaagc

SEQ ID NO: 2913 - DNA, 75 bp, synthetic construct
  source 1..75: mol_type = other DNA
atttctgtggctgtgtcaacgccacgatgtttgaccgttatttgccattttcatgcccgctaagatactttcgtt

SEQ ID NO: 2914 - DNA, 75 bp, synthetic construct
  source 1..75: mol_type = other DNA
ggcgcgaaaaatccacctgtaccactgcgaccatcgcggcctgccgctggcgctcatcagcacggaaggggcaac

SEQ ID NO: 2915 - DNA, 75 bp, synthetic construct
  source 1..75: mol_type = other DNA
ggccttccggttgggataggttctggcctgctgttcaccggtaaacagggcgatgccctgacattcgcaaccatt

SEQ ID NO: 2916 - DNA, 75 bp, synthetic construct
  source 1..75: mol_type = other DNA
gagcagcaggccacgctgagcgcggggtatcttcatgcccggacgaacgctcccggtagcgataatcttaacggg

SEQ ID NO: 2917 - DNA, 75 bp, synthetic construct
  source 1..75: mol_type = other DNA
tcaagtacaaccgagacagcaaaggcgagcgtcacgtaatagttaacggcgtcctgatggtcaaacagggcaaga

SEQ ID NO: 2918 - DNA, 75 bp, synthetic construct
  source 1..75: mol_type = other DNA
cgccgtgagaaccgcgccggacagctcggttaaggcgctgaaatacgccgctgcgattgaacgttcgctgtgtga

SEQ ID NO: 2919 - DNA, 75 bp, synthetic construct
  source 1..75: mol_type = other DNA
aagccatcacgctgaaaatcgacccgtcggtggtactggcgacccgtaaatacgtggatgatgaagtcctggaat

SEQ ID NO: 2920 - DNA, 75 bp, synthetic construct
  source 1..75: mol_type = other DNA
aacttcacgcgatcggcaatggcgctgactacgtccgcacccacgcgcctggagatctgcgggcactgttgcaaa

SEQ ID NO: 2921 - DNA, 75 bp, synthetic construct
  source 1..75: mol_type = other DNA
tcctgctgatcgcaggatttgccattcttcgccttttgttcagagcattaatcagcacggcttctgcgctggcag

SEQ ID NO: 2922 - DNA, 75 bp, synthetic construct
  source 1..75: mol_type = other DNA
tgatcatcatcatcgcaacaattctccactcccaccgacaccccctgatgatgaatcagacgacactccagttcc

SEQ ID NO: 2923 - DNA, 75 bp, synthetic construct
  source 1..75: mol_type = other DNA
tccatcaatgacgcttatgtcgttgaagactatggcaagtgcgcgatggtcactggcctgaagttcgccgacagc

SEQ ID NO: 2924 - DNA, 75 bp, synthetic construct
  source 1..75: mol_type = other DNA
atctggatgatgactactttgatatgttgcaggaagaactctgcagcgtggtggaggcatccggtgccagcctgg

SEQ ID NO: 2925 - DNA, 75 bp, synthetic construct
  source 1..75: mol_type = other DNA
gaatgtgcgtggccgcccgctggtcgtgctggttgacggcgtgcgtctcaactcttcacgtaccgacagccgaca

SEQ ID NO: 2926 - DNA, 75 bp, synthetic construct
  source 1..75: mol_type = other DNA
aaggaaggtcttaatgaaatatacagatataaagtggtggtgaatgaaattagcgatctttatgctggtaagata

SEQ ID NO: 2927 - DNA, 75 bp, synthetic construct
  source 1..75: mol_type = other DNA
catggtacacaaaatggacgatggggagaatgatctcatttaacacatcttcgccttacgccaacgctaatggaa

SEQ ID NO: 2928 - DNA, 75 bp, synthetic construct
  source 1..75: mol_type = other DNA
ggtataattccattcgccgtgagcgtcctttaacggatgatgaattaatgcagtttgtgccgtctgtcttttccg

SEQ ID NO: 2929 - DNA, 75 bp, synthetic construct
  source 1..75: mol_type = other DNA
gaagtacagaccattcgtcgtctggtgaccgaaagtgaagtggcggtggcggggaacagtaaattccgcttcgtg

SEQ ID NO: 2930 - DNA, 75 bp, synthetic construct
  source 1..75: mol_type = other DNA
tcacccctgagttcaggctggaatgtgcacagctgattgttgataagggctattcgtatcgacaagccagtgagg

SEQ ID NO: 2931 - DNA, 75 bp, synthetic construct
  source 1..75: mol_type = other DNA
acgtgaattattcagtctgtttgagtatgcaccgacaattctgacgtcggtaaaaccagagcaatatctgcatta

SEQ ID NO: 2932 - DNA, 75 bp, synthetic construct
  source 1..75: mol_type = other DNA
gcgtaaccgctggttcagcgtgatggtggggccgtctgtgcgcgtgaatgaatggttcagcgcgtatgcgatggc

SEQ ID NO: 2933 - DNA, 75 bp, synthetic construct
  source 1..75: mol_type = other DNA
tgcgaccatcgcggcctgccgctggcgctcatcagcacggaaggggcaacagcgtggtgcgcagaatatgatgaa

SEQ ID NO: 2934 - DNA, 75 bp, synthetic construct
  source 1..75: mol_type = other DNA
tctccagtccggcactgactgcacaggaaatcgcagagatggacccggcagatctcacagccatgtcggttgagg

SEQ ID NO: 2935 - DNA, 75 bp, synthetic construct
  source 1..75: mol_type = other DNA
ccacacccgtgccattcacagcatcgacaccgatattaagctcaaccgcgcattgtgggtaatggcagaaacgct

SEQ ID NO: 2936 - DNA, 75 bp, synthetic construct
  source 1..75: mol_type = other DNA
gatggacagaaaaatgcagagaacaacgctcgtcatgttgccgcgttcaacccaaaggttgcactggagctgctt

SEQ ID NO: 2937 - DNA, 75 bp, synthetic construct
  source 1..75: mol_type = other DNA
cctggcctccgagcaataatcgctattaccgccataatcgcgggcgcacgcacgtcagcgcagaggggcaggcat

SEQ ID NO: 2938 - DNA, 75 bp, synthetic construct
  source 1..75: mol_type = other DNA
gcgaaattgccactgcagctgggattgtctctgataagagaacacctgttgcgcggggggctgataagtctaaaa

SEQ ID NO: 2939 - DNA, 75 bp, synthetic construct
  source 1..75: mol_type = other DNA
tgatttacaactctctttcgaacatattgcacgacgctggcatgccagtaataaacaatgggcacaatcacacag

SEQ ID NO: 2940 - DNA, 75 bp, synthetic construct
  source 1..75: mol_type = other DNA
actgaaaaaccgcggtctgaacgatatcctcatcgcctgtgtggatggcctgaaaggcttcccggatgccatcaa

SEQ ID NO: 2941 - DNA, 75 bp, synthetic construct
  source 1..75: mol_type = other DNA
ccttgccgaaggcgaagaagctctcagcttcagtgagtttaaacaggcgctttccagttcggcaaaatctaacgg

SEQ ID NO: 2942 - DNA, 75 bp, synthetic construct
  source 1..75: mol_type = other DNA
aaaaatggaatgttaggctaggattccatggcaagagtaaacacttcggatgctttgatgatctggagttagcgg

SEQ ID NO: 2943 - DNA, 75 bp, synthetic construct
  source 1..75: mol_type = other DNA
ccgatgaacgtcacttttgacaagctggcccctgaagtacagaacgctgtcatggttaagttcgacacatgtgaa

SEQ ID NO: 2944 - DNA, 75 bp, synthetic construct
  source 1..75: mol_type = other DNA
atgaaactggccctgacgctggaagccgacagcattaatgcgcagacgctgaacatggggcgcattgtcgttgac

SEQ ID NO: 2945 - DNA, 75 bp, synthetic construct
  source 1..75: mol_type = other DNA
tcacctgaagcacaaagccgaaaccagcgggaccagggcgttacccgaaagccgggcgccaccggctgagctgct

SEQ ID NO: 2946 - DNA, 75 bp, synthetic construct
  source 1..75: mol_type = other DNA
acttccggaatgacagcgcattcacaccatgggtatccgcagggattggctacgccagaattcaccagaaaacaa

SEQ ID NO: 2947 - DNA, 75 bp, synthetic construct
  source 1..75: mol_type = other DNA
ccgtgaaaaatccgtggacgtggtctgctatgacgaactttcctcgttcgagccggatgtcgaaaaagagggctc

SEQ ID NO: 2948 - DNA, 75 bp, synthetic construct
  source 1..75: mol_type = other DNA
caacttcactggagcgccgactggcgcagacctgtagcgggatttctgatctgcaggtgccgctgcgtgacttgt

SEQ ID NO: 2949 - DNA, 75 bp, synthetic construct
  source 1..75: mol_type = other DNA
ggtgcaaagttaactttgcggttaatacgctggggttctcccgccgcttccatgtcttcgccgcaccaaaacagg

SEQ ID NO: 2950 - DNA, 75 bp, synthetic construct
  source 1..75: mol_type = other DNA
cgctgggttccaggctggatgtgtgcaccacatccacagacagatgccactgaacgcaccgataacctggctgat

SEQ ID NO: 2951 - DNA, 75 bp, synthetic construct
  source 1..75: mol_type = other DNA
tttttgaccggattgaggaaaagcgtgatgccatgcagtcgctgattctgccgccaccggcacgccaggcgctgg

SEQ ID NO: 2952 - DNA, 75 bp, synthetic construct
  source 1..75: mol_type = other DNA
atgcgattaaccagtcgttttggttatgtaaaccagatacgccgtgaccgtccgctgacacacgaagaactgatg

SEQ ID NO: 2953 - DNA, 75 bp, synthetic construct
  source 1..75: mol_type = other DNA
gataccgattacggtaaattgatacttaaagttttttcgcctaaagtaaaacgcaacgaacgtttctttaaatct

SEQ ID NO: 2954 - DNA, 75 bp, synthetic construct
  source 1..75: mol_type = other DNA
taccgtcagcccggataacggttttacgaccagtctggagcttgaagtgaggattgatgatttcgaaatggaatg

SEQ ID NO: 2955 - DNA, 75 bp, synthetic construct
  source 1..75: mol_type = other DNA
cagattgaccttgcgtttcatactcccgccacggtcggaagctggttgtcccgctggtctggtgttgttgaggag

SEQ ID NO: 2956 - DNA, 75 bp, synthetic construct
  source 1..75: mol_type = other DNA
tcatgatctggaaaaatttaatttaaatcgcttccgtttccgtggtgcgctttccactgccagcatcgatgactt

SEQ ID NO: 2957 - DNA, 75 bp, synthetic construct
  source 1..75: mol_type = other DNA
gagaatgatctcatttaacacatcttcgccttacgccaacgctaatggaagattaagaaagtgggcaaaaaataa

SEQ ID NO: 2958 - DNA, 75 bp, synthetic construct
  source 1..75: mol_type = other DNA
gttattcgttgggagccagaaacacagcgcgttatctatcttcgcaaagactacccgcatgagtgctttagtcct

SEQ ID NO: 2959 - DNA, 75 bp, synthetic construct
  source 1..75: mol_type = other DNA
cctctgattcgggattttatatttcaccagatagccaaaccattcctgagaacgctacgaaaataaactttacta

SEQ ID NO: 2960 - DNA, 75 bp, synthetic construct
  source 1..75: mol_type = other DNA
acgctgatcgtctgacctggaccgtttctgtatatcttcctgttcgtgcacatctgccacggacacatgcctgct

SEQ ID NO: 2961 - DNA, 75 bp, synthetic construct
  source 1..75: mol_type = other DNA
caatattcactggctgagctactggcacagtgtgatccgaatgctgaaatatcagctgaagaacgagaatggctg

SEQ ID NO: 2962 - DNA, 75 bp, synthetic construct
  source 1..75: mol_type = other DNA
atgccatgacggtccattattaccggttgcgggattacgccctgcagcatccggaatgcagcgccattatgcgca

SEQ ID NO: 2963 - DNA, 75 bp, synthetic construct
  source 1..75: mol_type = other DNA
cgcatggcgggcggtggcggagacggaaaaacgccgccatcagggtaacacgctggcggaatatccgtatgcggg

SEQ ID NO: 2964 - DNA, 75 bp, synthetic construct
  source 1..75: mol_type = other DNA
aacaatctccttatctccgggctgcagacattctgcgagcgcggcaggcaactggcttgttgcggcaaagccgta

SEQ ID NO: 2965 - DNA, 75 bp, synthetic construct
  source 1..75: mol_type = other DNA
ctggctgctgacacggttgtacaggcgggagaaaccgtgaacggcggaacactgacaaatcatgacaaccagatt

SEQ ID NO: 2966 - DNA, 75 bp, synthetic construct
  source 1..75: mol_type = other DNA
agatcaaggcacatctgcgtgttgaccatgacgcggatgatgacatgctgatggacaaggttcgtcaggctaccg

SEQ ID NO: 2967 - DNA, 75 bp, synthetic construct
  source 1..75: mol_type = other DNA
ttacagccatgacacaggctgaactgactcaaaaggtgaatgaacatcttgcgaaagggtggcatcttcaggggg

SEQ ID NO: 2968 - DNA, 75 bp, synthetic construct
  source 1..75: mol_type = other DNA
cgatgaaaattcgagtgggtaatccattgcgaaaactggttctgatcaagctggctgataatgccagcgatcagg

SEQ ID NO: 2969 - DNA, 75 bp, synthetic construct
  source 1..75: mol_type = other DNA
taaacaagcccgcaagagagtttcaggccggggaaaatatcggattcaacatccgtgctggcgttcagtattacg

SEQ ID NO: 2970 - DNA, 75 bp, synthetic construct
  source 1..75: mol_type = other DNA
gagtcggattggaagggtgacgagcggaacgtcgttcttgctcttgctcgcatttggtacagcgcttcaactggt

SEQ ID NO: 2971 - DNA, 75 bp, synthetic construct
  source 1..75: mol_type = other DNA
gtccctataacattggccccggtaagtgtttcccgtcgacgttttataagcggctgaatgccggtgatcgtaagg

SEQ ID NO: 2972 - DNA, 75 bp, synthetic construct
  source 1..75: mol_type = other DNA
ataatatgatggctgccgtttcggttgcgctgcagcctctggtcagggttgtaccaatgacggcagttgaatggg

SEQ ID NO: 2973 - DNA, 75 bp, synthetic construct
  source 1..75: mol_type = other DNA
gccatgtgcttggcgtcatagcagactggccggtcaaccgggtcagcgaactgcttccgtggcgcatagcactgc

SEQ ID NO: 2974 - DNA, 75 bp, synthetic construct
  source 1..75: mol_type = other DNA
tgagctggaattacaaaaccaattgcccctgtaaatttggcaataaaattatcgtcaacaatctggtgagatggg

SEQ ID NO: 2975 - DNA, 75 bp, synthetic construct
  source 1..75: mol_type = other DNA
gtcgtgaacattgccacgccgaacggggccgggatttcgcataaccggtttacggattacaacgtcgggaaggaa

SEQ ID NO: 2976 - DNA, 75 bp, synthetic construct
  source 1..75: mol_type = other DNA
tgtctcggtagctacaacgccggatttaataaaaataacactcaccgcagaatgaaatatgcccggctgatttat

SEQ ID NO: 2977 - DNA, 75 bp, synthetic construct
  source 1..75: mol_type = other DNA
gtgaagaagtggcagatcccacgattcatcaacacggataaagcgcccgcctatggtcgcgcgcttgctctgctc

SEQ ID NO: 2978 - DNA, 75 bp, synthetic construct
  source 1..75: mol_type = other DNA
tgggatggctggttcagacttcaggatatggttgagggttacctggtgatgaagtctcttgatcaggagatctga

SEQ ID NO: 2979 - DNA, 75 bp, synthetic construct
  source 1..75: mol_type = other DNA
atgaaaacattacccgacacgcatgtacgggaggtatcgtgctgcccgtctcccgtcaccatctggcagacactg

SEQ ID NO: 2980 - DNA, 75 bp, synthetic construct
  source 1..75: mol_type = other DNA
agcggcagagaagtttcaggaacaacaactggaacaaccacaccaccagctggtggcatcttatgattcactgaa

SEQ ID NO: 2981 - DNA, 75 bp, synthetic construct
  source 1..75: mol_type = other DNA
tataaatataagtgacattgcccaagaattcaaaacctcgcggcaaaccattttaagagctaaagcaaaaaatca

SEQ ID NO: 2982 - DNA, 75 bp, synthetic construct
  source 1..75: mol_type = other DNA
agctacggcgctggacatacgctggcggtaagcaatggaaagggctgatgactcgccgcgagattgagcgtgaag

SEQ ID NO: 2983 - DNA, 75 bp, synthetic construct
  source 1..75: mol_type = other DNA
tcaaaaattttactcagattacagtgagttaagttatgagttgttagtagctgaacttcagactgtaaaaaatga

SEQ ID NO: 2984 - DNA, 75 bp, synthetic construct
  source 1..75: mol_type = other DNA
gcgatgacgtataccaaaagcaaaacgtttaaaaccgaaaatggtgcccgtcgctggctggaaagaaactcaggt

SEQ ID NO: 2985 - DNA, 75 bp, synthetic construct
  source 1..75: mol_type = other DNA
tttatgggacgaaagccaaagtagcgaaagctgctggtgttgatccatctgctgtttctcaatggggggaactgg

SEQ ID NO: 2986 - DNA, 75 bp, synthetic construct
  source 1..75: mol_type = other DNA
ggaagccccggtctacgggccaaacctgcgcgcctcctgccgtcgtctggaggatgccggctggctgcgtaccct

SEQ ID NO: 2987 - DNA, 75 bp, synthetic construct
  source 1..75: mol_type = other DNA
ccctgcactggcagggatgattaccacgatggttcagcagggctatgactatcgtcgtgatgacgatatggcgtt

SEQ ID NO: 2988 - DNA, 75 bp, synthetic construct
  source 1..75: mol_type = other DNA
cgggattatttcaccctcagagagcggctgatgacgatgcagaagcaactggaaggggcgcaggaatatatccgt

SEQ ID NO: 2989 - DNA, 75 bp, synthetic construct
  source 1..75: mol_type = other DNA
ttctgccagacctgggacgacgaaaacgtccataaattgatggatttgtcgatcaataaaaactggatcgacaaa

SEQ ID NO: 2990 - DNA, 75 bp, synthetic construct
  source 1..75: mol_type = other DNA
cgctgaatatgctctatatcgacccgcagaacagcagccagattattgccgaacaggtgatccctgaaaacgagg

SEQ ID NO: 2991 - DNA, 75 bp, synthetic construct
  source 1..75: mol_type = other DNA
taccatgaaagcactggaaatggcatgggaaacccgtggtaagcccgtcggggtgatgttccacagcgatcaagg

SEQ ID NO: 2992 - DNA, 75 bp, synthetic construct
  source 1..75: mol_type = other DNA
ccgggaaattggtgtatttgatgagcacggcgatttaatcgcggtgggcaatactgccgaaagttacaagccagc

SEQ ID NO: 2993 - DNA, 75 bp, synthetic construct
  source 1..75: mol_type = other DNA
atgagtaccgtttatcaccgtccggctgacccttcaggcgatgacagttacgtgcgaccgttgtttgccgatcgt

SEQ ID NO: 2994 - DNA, 75 bp, synthetic construct
  source 1..75: mol_type = other DNA
cgttggtgaatcagaatggattcattttacaggtaccggttatctgttacgtactgatgcgtggtcgtacccggt

SEQ ID NO: 2995 - DNA, 75 bp, synthetic construct
  source 1..75: mol_type = other DNA
cggtgcagtattacagccggattatcatgaatccgccgttcagtcacgggcaggatatccggcatatcctgcggg

SEQ ID NO: 2996 - DNA, 75 bp, synthetic construct
  source 1..75: mol_type = other DNA
ctggctgctgacaaggttgtacaggcgggagaaaccgtgaacgacggaacactgacaaatcatgacaaccagatt

SEQ ID NO: 2997 - DNA, 75 bp, synthetic construct
  source 1..75: mol_type = other DNA
agcgggaaaaaattaaagagcaggtggtcgaacttgtgcgccagagcggtcgcgagacattacgacagttggaag

SEQ ID NO: 2998 - DNA, 75 bp, synthetic construct
  source 1..75: mol_type = other DNA
tgctgttcactgtggcatcattctccgcctccgccggcaactgggctgtcaaaaacggctggtgtcagaccatga

SEQ ID NO: 2999 - DNA, 75 bp, synthetic construct
  source 1..75: mol_type = other DNA
acatctgcacgcacgctgaaaccgtgggaggcattagggatcagtcgcgcctggtattaccaactgaaaaaacga

SEQ ID NO: 3000 - DNA, 75 bp, synthetic construct
  source 1..75: mol_type = other DNA
catcacgcctgccgtacggagtgttatgccatgacggttcattattaccgtctgcgggattacgccctgcagcat

SEQ ID NO: 3001 - DNA, 75 bp, synthetic construct
  source 1..75: mol_type = other DNA
atgaaaacattgtctcagaacaccaccgcttcggcctgtgcaccggagactggcctgcaacaactggttgccacc

SEQ ID NO: 3002 - DNA, 75 bp, synthetic construct
  source 1..75: mol_type = other DNA
tcgtgtttcgcgtatcacccgtacggcttccggtgcaaatgccggtggcgggaacaaaaccgatcgcaatccgaa

SEQ ID NO: 3003 - DNA, 75 bp, synthetic construct
  source 1..75: mol_type = other DNA
atggcgataaaagggcttgatcaggcgattgacaatctgagccgggttcgtaaaaacgccattccggcggcttca

SEQ ID NO: 3004 - DNA, 75 bp, synthetic construct
  source 1..75: mol_type = other DNA
cttgttgatgggatgaagaatattgatacatcaacaccagatattgaatataactttggacacaaccaagaaaca

SEQ ID NO: 3005 - DNA, 75 bp, synthetic construct
  source 1..75: mol_type = other DNA
atgactgaacgcatagaatttgttttgccttacccgccaacggtgaacacttactggcgacgtcgtggcagcaca

SEQ ID NO: 3006 - DNA, 75 bp, synthetic construct
  source 1..75: mol_type = other DNA
atgccagcgcctctgtatggtgcggatgacccgcgccgctgttccggcaattccgtatcggaggtgctggataaa

SEQ ID NO: 3007 - DNA, 75 bp, synthetic construct
  source 1..75: mol_type = other DNA
atgtaaaccagatacgccgtgaccgcccgctgacacatgaagaactgatgcactatgtgcccagtatttttgggg

SEQ ID NO: 3008 - DNA, 75 bp, synthetic construct
  source 1..75: mol_type = other DNA
cggtacaggggaaaagtggtacctgtcgccagttctccgatctgtttaaccgggaaattatctcctacagcttgt

SEQ ID NO: 3009 - DNA, 75 bp, synthetic construct
  source 1..75: mol_type = other DNA
cctgcggatcaacgccacctgctccggtaccgtgcgtgaagccaccggcacctccggcgtggataatgcaaccgg

SEQ ID NO: 3010 - DNA, 75 bp, synthetic construct
  source 1..75: mol_type = other DNA
tggcgcacacgcaaagatcctctggaagctgtgtgggacagcatgcttgttcctctgttgaaagagaggccggct

SEQ ID NO: 3011 - DNA, 75 bp, synthetic construct
  source 1..75: mol_type = other DNA
tggatgatgacatcatcaccacggagcaggcccgcgaaattgcgatccgctgtcatgaacggcagattcagcatc

SEQ ID NO: 3012 - DNA, 75 bp, synthetic construct
  source 1..75: mol_type = other DNA
atgcgtaaattatgtgctgttattctgtccgcagtagtctggctggttgccgctggtacgccagcgagcgcagca

SEQ ID NO: 3013 - DNA, 75 bp, synthetic construct
  source 1..75: mol_type = other DNA
tccggattacttgcccgcgtgttaacgggaaaatactgcgaacacctgccactgtatcgtcagagtgaaatcttt

SEQ ID NO: 3014 - DNA, 75 bp, synthetic construct
  source 1..75: mol_type = other DNA
attgttatattactaacacagtaaaggttgtctctgaactagcccgaagggtatgtaaagggagtacccgcagag

SEQ ID NO: 3015 - DNA, 75 bp, synthetic construct
  source 1..75: mol_type = other DNA
ttcagcagggaaaccgctggcttaactggctggagaaacaaccggaaggttcagtgcgtccggtagtcattgagt

SEQ ID NO: 3016 - DNA, 75 bp, synthetic construct
  source 1..75: mol_type = other DNA
ccacatcttctgtttccgtaaccgctgcatcagggaatgaccagcctcagttggttgccaccatagtccctgatg

SEQ ID NO: 3017 - DNA, 75 bp, synthetic construct
  source 1..75: mol_type = other DNA
gggagcttcgcgccgctcatccgcatcgaaacagacaacggtgaacgggagaaagcgcagtgccgcagcctggcg

SEQ ID NO: 3018 - DNA, 75 bp, synthetic construct
  source 1..75: mol_type = other DNA
cgtcgttcaggaagtggctggctgagcaggggcttatcggtcaggacgtggcgttgtccgccattgctgccgcac

SEQ ID NO: 3019 - DNA, 75 bp, synthetic construct
  source 1..75: mol_type = other DNA
ttttgatattggcctgtccacgctctataaaaaattcccctcatcagcgacaaagaataaattgtgtcatccctt

SEQ ID NO: 3020 - DNA, 75 bp, synthetic construct
  source 1..75: mol_type = other DNA
atggaaacgaagcaaaaagagcgtatccgacgtttgattgaaatacttaagaaaaccgacagaatccatttgaaa

SEQ ID NO: 3021 - DNA, 75 bp, synthetic construct
  source 1..75: mol_type = other DNA
gtcgcctaaacataatctgtcgcgagtgccggatgagtgaagttatgcagcgcatactggcattttatcagggat

SEQ ID NO: 3022 - DNA, 75 bp, synthetic construct
  source 1..75: mol_type = other DNA
atgaaaatcaagcatgaacacatccgcatggcgatgaatgcctgggcgcatccggacggcgaaaaagtaccggct

SEQ ID NO: 3023 - DNA, 75 bp, synthetic construct
  source 1..75: mol_type = other DNA
tgtcgcaacgtcgtgcctgcaggcttacaggtttatccctgtcgacctgccgctatgaggctcaccgtccggctg

SEQ ID NO: 3024 - DNA, 75 bp, synthetic construct
  source 1..75: mol_type = other DNA
ccggtcagttgtttatggacccgaaacgcatgattgaagcctgtgacgaaaacaccatcggcgtggtgccgactt

SEQ ID NO: 3025 - DNA, 75 bp, synthetic construct
  source 1..75: mol_type = other DNA
atgtacgcaaaatcctttatcgctcttgatggcaacggacgtctgacgggcgcccgtactgcacaggccgcacct

SEQ ID NO: 3026 - DNA, 75 bp, synthetic construct
  source 1..75: mol_type = other DNA
tcgtatgacaacgcgatggcggagagcatcaatggcctttacaaagcggaggtaatacaccgtaagagctggaaa

SEQ ID NO: 3027 - DNA, 75 bp, synthetic construct
  source 1..75: mol_type = other DNA
ggaagttatccgccgttttggctttggtgaagtggatctgattgaaggcacaggtcgtctcagttacgacggcaa

SEQ ID NO: 3028 - DNA, 75 bp, synthetic construct
  source 1..75: mol_type = other DNA
ctgccagtggcaacactcaccctaaatttacgcgcggtgatatttaccgcgaccagtacggcggcacggtaatga

SEQ ID NO: 3029 - DNA, 75 bp, synthetic construct
  source 1..75: mol_type = other DNA
acgcttcttgagcctgtaataaatgagttgcaggaaatagagacattgcacgacagatataacgaacagcacacc

SEQ ID NO: 3030 - DNA, 75 bp, synthetic construct
  source 1..75: mol_type = other DNA
attgcggaatgtcatgttaactgcctgattgaatcagatgctcaggcttatgcaaacgctgaattcatagcagag

SEQ ID NO: 3031 - DNA, 75 bp, synthetic construct
  source 1..75: mol_type = other DNA
gccaggcgctggagaaagtggccgccacgggtgactgccggcaggtggctcatgatttactggcagggaaaggag

SEQ ID NO: 3032 - DNA, 75 bp, synthetic construct
  source 1..75: mol_type = other DNA
gcatttcctggggatgtgcaatgtggtttatctactgggggccgtcaggaatggtggcaggtgaggccattatta

SEQ ID NO: 3033 - DNA, 75 bp, synthetic construct
  source 1..75: mol_type = other DNA
cagacaatccggaattgatcctgcgtgtgctacaactgagatttgacgagtcactgtcgtacccgcgcatttctg

SEQ ID NO: 3034 - DNA, 75 bp, synthetic construct
  source 1..75: mol_type = other DNA
aatcaaaaaagaataaaactcagtcttgggggactcagtccggtagaataccggactgagcatcaaaaagccggt

SEQ ID NO: 3035 - DNA, 75 bp, synthetic construct
  source 1..75: mol_type = other DNA
gaaataatgcaaggcctttaaatgtgggtcaatccggaacggggacgctgaatattaaacagaagggtcacgtcg

SEQ ID NO: 3036 - DNA, 75 bp, synthetic construct
  source 1..75: mol_type = other DNA
aatataacggtgtgtctgtcacgctttccgaattgtctgcgctgcagcgtatcgagcatcttgccctcctgaaac

SEQ ID NO: 3037 - DNA, 75 bp, synthetic construct
  source 1..75: mol_type = other DNA
gcatcagccgcagaacactcgttaaatctaccgcgataggttctctggcgctggctgcaggcggtttttctttac

SEQ ID NO: 3038 - DNA, 75 bp, synthetic construct
  source 1..75: mol_type = other DNA
aacgttggcggttgctattgctgcacctgaacggcttggcgaagttcgttattatggtacgattaacaacgaagc

SEQ ID NO: 3039 - DNA, 75 bp, synthetic construct
  source 1..75: mol_type = other DNA
tgtgtgatgcggtgaactttctcgtggaaaaatacgcgctggtgcgtaccgaccagccgggattcagcgcctgta

SEQ ID NO: 3040 - DNA, 75 bp, synthetic construct
  source 1..75: mol_type = other DNA
gatcgaattattcgatgctcttccatcttccgagcaggaagccttgctgtctgaaatgcgcgcaagagtagaaaa

SEQ ID NO: 3041 - DNA, 75 bp, synthetic construct
  source 1..75: mol_type = other DNA
tacggtaatctcatcatgattaaacacagtgaagattacattacggcttacgcccataatgacacgatgctggta

SEQ ID NO: 3042 - DNA, 75 bp, synthetic construct
  source 1..75: mol_type = other DNA
tgcactggcacgtgccgaagaaaagatcgaagaggaggagcgggaaatagaatatctgagggcccagatagaaaa

SEQ ID NO: 3043 - DNA, 75 bp, synthetic construct
  source 1..75: mol_type = other DNA
atgaacaccaaaatcaaatatggcctgtcggctgccgttctggcgttgattgccatcggtgcgcctgcgcctgat

SEQ ID NO: 3044 - DNA, 75 bp, synthetic construct
  source 1..75: mol_type = other DNA
gtgtcagacacactccccgggacaacgcatcccgacgataacaacgaccgcccctggtgggggctaccctgcacc

SEQ ID NO: 3045 - DNA, 75 bp, synthetic construct
  source 1..75: mol_type = other DNA
aagaagcaaaactgctggcatcaacagggagtacaggtgactcgtatgacaacgcgatggcggagagcatcaatg

SEQ ID NO: 3046 - DNA, 75 bp, synthetic construct
  source 1..75: mol_type = other DNA
agagcttcgtgaaaacgataaagcgtgactacatcagtatcatgcccaaaccagacgggttaacggcagcaaaga

SEQ ID NO: 3047 - DNA, 75 bp, synthetic construct
  source 1..75: mol_type = other DNA
atgtgggcggtggataaaccgcttaacccgtcgctggcccgcgacattatcgaaggtatccgcgccaaaatgcgc

SEQ ID NO: 3048 - DNA, 75 bp, synthetic construct
  source 1..75: mol_type = other DNA
aggcaagagacgagcaaaaaatttctggtgaatgcctcccggtaaaaaaagtatcgctgtacctgaataacgaaa

SEQ ID NO: 3049 - DNA, 75 bp, synthetic construct
  source 1..75: mol_type = other DNA
tatgggacttgccggtgttctccgtggtaaaaaggtccgtacgaccatcagccggaaagccgttgtcgcaggcga

SEQ ID NO: 3050 - DNA, 75 bp, synthetic construct
  source 1..75: mol_type = other DNA
tgtttctccggatgacgggggcagctgttatctctggctcaaccgtgggcaaccacccgcagttaaccggcgacg

SEQ ID NO: 3051 - DNA, 75 bp, synthetic construct
  source 1..75: mol_type = other DNA
catgcggtaggggaagatagcgcaccggtgccttttgttattcatttacgggaatgtagcacggtggtgagtgaa

SEQ ID NO: 3052 - DNA, 75 bp, synthetic construct
  source 1..75: mol_type = other DNA
tggatatcgcttatctttctgaaatcgaccccacctggacggacagcagcctgaccaccattctcaatccggaag

SEQ ID NO: 3053 - DNA, 75 bp, synthetic construct
  source 1..75: mol_type = other DNA
aagcatccatgaccagcgttgagatcgcagagctggtgggtagtcagcactcagatgttaaacgtagtatcgaac

SEQ ID NO: 3054 - DNA, 75 bp, synthetic construct
  source 1..75: mol_type = other DNA
acccaaaacggcgtcccgatgagccgttaccgtgccgggcgtctgatgaaatatctgaacctgagcagttgtcag

SEQ ID NO: 3055 - DNA, 75 bp, synthetic construct
  source 1..75: mol_type = other DNA
cttctttgagcggtttgcggcggacagtccggagcagaagctgacgctgtgcgacgatgtggcggggctgtcaca

SEQ ID NO: 3056 - DNA, 75 bp, synthetic construct
  source 1..75: mol_type = other DNA
ctgacacccctcaggggatactgatgtccggtcaggtgccggaatatcagttctggttactggctgagatatcgc

SEQ ID NO: 3057 - DNA, 75 bp, synthetic construct
  source 1..75: mol_type = other DNA
aatggtgccgtgatccacatcgtgccgcgtctggcgggagctaaaagtggcggtgtgtttcaggtggtgctgggg

SEQ ID NO: 3058 - DNA, 75 bp, synthetic construct
  source 1..75: mol_type = other DNA
gggcggcaattattatcccggccgcaatatgagggaatgcagaatgatttcacgctggaaatggatgctgaagca

SEQ ID NO: 3059 - DNA, 75 bp, synthetic construct
  source 1..75: mol_type = other DNA
cctgaaatgctttcttttatacagaataccgggatcgcacggatacttccgctccggaacggacgactgataacc

SEQ ID NO: 3060 - DNA, 75 bp, synthetic construct
  source 1..75: mol_type = other DNA
acgatggttacgcagggctatgagtatcgtcgtgatgacgatatggcgttatggagctctgcggatctgacttat

SEQ ID NO: 3061 - DNA, 75 bp, synthetic construct
  source 1..75: mol_type = other DNA
gcaggttcgagatctgatgaccaaatatcctggtcaattagagaagattcagtctggtatgaagtgggcagacga

SEQ ID NO: 3062 - DNA, 75 bp, synthetic construct
  source 1..75: mol_type = other DNA
tctgttacacgcaccgcagataaggattctgcaaaaacttttgttcaggagactctgaaagatacctgggaatct

SEQ ID NO: 3063 - DNA, 75 bp, synthetic construct
  source 1..75: mol_type = other DNA
gggccagcaacagcagggatagatgatttgggtgaaattttagctaagatgaaacagagaacatcgagaggaata

SEQ ID NO: 3064 - DNA, 75 bp, synthetic construct
  source 1..75: mol_type = other DNA
ttgaaggtacaatctcaaatgaacctacgcttctggtgaacgcgcgtgatttgcatggatttttagaggtaggta

SEQ ID NO: 3065 - DNA, 75 bp, synthetic construct
  source 1..75: mol_type = other DNA
tatgcaagagctaaatgtatttcgcctttattttgctgtggaattattgtttgtgccggcaattattgagttttc

SEQ ID NO: 3066 - DNA, 75 bp, synthetic construct
  source 1..75: mol_type = other DNA
ccgaaattttcaacgtggatccgcgaacgattgaacgctggcagtctcagggactcccttgcgtctccggaggtg

SEQ ID NO: 3067 - DNA, 75 bp, synthetic construct
  source 1..75: mol_type = other DNA
accactatcgacaaacatcgttcggaaaaggatgcacaccacatctacctcactgacggcacttacttctgcgcc

SEQ ID NO: 3068 - DNA, 75 bp, synthetic construct
  source 1..75: mol_type = other DNA
atggggaggcctgactggcgcgccatgcttgccgggatgacatccaccgaatatgccgactggcgacatttttac

SEQ ID NO: 3069 - DNA, 75 bp, synthetic construct
  source 1..75: mol_type = other DNA
accgccatcgtgggtatggtctgcacgggcgatgatgccgatgcaaaaatgtttcctcttaataaacccgtgctg

SEQ ID NO: 3070 - DNA, 75 bp, synthetic construct
  source 1..75: mol_type = other DNA
gagcgacataatctgaatctgagacaacatctggcaaggctgggacggaagtcactgtcgttctcaaaatcggtg

SEQ ID NO: 3071 - DNA, 75 bp, synthetic construct
  source 1..75: mol_type = other DNA
agacacttctacagttaccttgcggatggcgatgcagtcgacaaattattagctctgacggtataaccctccatc

SEQ ID NO: 3072 - DNA, 75 bp, synthetic construct
  source 1..75: mol_type = other DNA
gaaagaaatcgtggtcagcgcgccggatggcgcggtgttccgctacgacgcggacgcaggcgcactgagcgccag

SEQ ID NO: 3073 - DNA, 75 bp, synthetic construct
  source 1..75: mol_type = other DNA
cgcacggttctgcgtgccgtccgtgacacggtggtctctgttgcccgcgctgtatggaactggattttcttctga

SEQ ID NO: 3074 - DNA, 75 bp, synthetic construct
  source 1..75: mol_type = other DNA
tctgggaagggtgcgccttcaccggcatgatcttatccagggtggcggttatggcccgtcttgcagactacagca

SEQ ID NO: 3075 - DNA, 75 bp, synthetic construct
  source 1..75: mol_type = other DNA
aactccatttaatgaggtttcttataagccagaaatgttaaatggctctttcgttcacattgatgactggagtgg

SEQ ID NO: 3076 - DNA, 75 bp, synthetic construct
  source 1..75: mol_type = other DNA
tttttattttaacgattattgctcttgctgctgtttttttctggtctgaagataaaggtccggcatgctatcagg

SEQ ID NO: 3077 - DNA, 75 bp, synthetic construct
  source 1..75: mol_type = other DNA
atacagcaacaacccggcctggtgcctgtgggacatgctgactcacccgcgctacggcatgggaaaacgtctggg

SEQ ID NO: 3078 - DNA, 75 bp, synthetic construct
  source 1..75: mol_type = other DNA
aacgaaacaattatttccggcggcaccgcgcatgaaggcggggcggtccatgttattgacacaatgagagtgaat

SEQ ID NO: 3079 - DNA, 75 bp, synthetic construct
  source 1..75: mol_type = other DNA
gctgacacaggcaatggactatgaccggattctggcaggctcccgcagccatcagaccggtgtaaacggtgaaaa

SEQ ID NO: 3080 - DNA, 75 bp, synthetic construct
  source 1..75: mol_type = other DNA
atgcgtaaactttatgccgccattttgtccgcagccatttgtctggccgtatccggtgcgcctgcatgggcgtct

SEQ ID NO: 3081 - DNA, 75 bp, synthetic construct
  source 1..75: mol_type = other DNA
catactgatatttactcctcatgccgtctgatagtgcggaaaaacggtgctgaaatttataaccgtaccgcgctg

SEQ ID NO: 3082 - DNA, 75 bp, synthetic construct
  source 1..75: mol_type = other DNA
atgagtaaagtctttatttgcgccgctattcctgacgaactggcaacaagggaagaaggcgctgtggctgtagcc

SEQ ID NO: 3083 - DNA, 75 bp, synthetic construct
  source 1..75: mol_type = other DNA
ttgcaaagaagcagaagtgttctgatgggacaataagaaaagagttgcaaacagctcttggttttctggatggtg

SEQ ID NO: 3084 - DNA, 75 bp, synthetic construct
  source 1..75: mol_type = other DNA
gggaaatgtggtggacagagtcattgaaggggcttacgaggtggtgggcgtgtttgaccggatagaggagaagcg

SEQ ID NO: 3085 - DNA, 75 bp, synthetic construct
  source 1..75: mol_type = other DNA
cgttatggcgtcagtctcattcatctggatgccagcgctgaatgtctgccggacctgcccactttcgactggtaa

SEQ ID NO: 3086 - DNA, 75 bp, synthetic construct
  source 1..75: mol_type = other DNA
cgcaacagaaaaagcccgggagtcagcagaaagcgcacagtcagcggaacaaagcaggatagcggcggaagaggc

SEQ ID NO: 3087 - DNA, 75 bp, synthetic construct
  source 1..75: mol_type = other DNA
cgggattatttcaccctcagagaacggttgatgacgatgcagaagcaactggaaggggcgcaggaatatatccgc

SEQ ID NO: 3088 - DNA, 75 bp, synthetic construct
  source 1..75: mol_type = other DNA
gctgctgtactttcagggataccgcgtcgcccgcattgctgaaatgctgggcgagaaagttgcaaccgttcacag

SEQ ID NO: 3089 - DNA, 75 bp, synthetic construct
  source 1..75: mol_type = other DNA
taccccggcttgatattacgggaatgtgggtattttccctgggtgtctggtttcatatcgtcgcccgtcttgttt

SEQ ID NO: 3090 - DNA, 75 bp, synthetic construct
  source 1..75: mol_type = other DNA
tacaccccggaggccattattgtcggaggggattatttcccggcctcggccattcatttaattgataacctgaga

SEQ ID NO: 3091 - DNA, 75 bp, synthetic construct
  source 1..75: mol_type = other DNA
tctggacgggtaagcgctgggcgtacctcgccgttgttctcgacctgttcgcaagaaaaccagtgggctgggcca

SEQ ID NO: 3092 - DNA, 75 bp, synthetic construct
  source 1..75: mol_type = other DNA
gcactggagcaggcgttatgggcccgtcgaccgtccggcacggtccatcacagtgataaaggttctcagtatgta

SEQ ID NO: 3093 - DNA, 75 bp, synthetic construct
  source 1..75: mol_type = other DNA
agtacaggatattcccggtgtgctggctgtgtttgcagaacgccggaaggacagttttggtccgtatgtccggct

SEQ ID NO: 3094 - DNA, 75 bp, synthetic construct
  source 1..75: mol_type = other DNA
gcaagagaggccggtcacgctgtccgtgagatggagcggtggatggtgccgaacaaactccgggaggcggcgtga

SEQ ID NO: 3095 - DNA, 75 bp, synthetic construct
  source 1..75: mol_type = other DNA
atcatcattatggggcgtcccgatgaggaagagacgctgttacgtgtggatgcggcgatcaacaaaaaataccgc

SEQ ID NO: 3096 - DNA, 75 bp, synthetic construct
  source 1..75: mol_type = other DNA
tcgccgactggctgcactcaacatgctggcagagcgtggcatcattccggctgactggcctgtacgcgtgaaggt

SEQ ID NO: 3097 - DNA, 75 bp, synthetic construct
  source 1..75: mol_type = other DNA
aacgtgattccactggcaccgggccatgcctacgggatgtttatggaacgttttaacgagttatcggagttacgc

SEQ ID NO: 3098 - DNA, 75 bp, synthetic construct
  source 1..75: mol_type = other DNA
atgaaaacattgtctcagaacaccacctcttcggtctcagcaccggagactgacctgcaacaactggttgccacc

SEQ ID NO: 3099 - DNA, 75 bp, synthetic construct
  source 1..75: mol_type = other DNA
tttcgggtgacaacggatgctgagcgggaggcactgtccgcgtttctgtcatggcatggtggttaccgggctttt

SEQ ID NO: 3100 - DNA, 75 bp, synthetic construct
  source 1..75: mol_type = other DNA
gggtagtctggtatttggcttgctgacgtatctgacaaacctttatttcaagattaaagaagataagcgtaaggc

SEQ ID NO: 3101 - DNA, 75 bp, synthetic construct
  source 1..75: mol_type = other DNA
caaagatattgttggtgtatggactgtatgtcacgggcatacaggaaaagacatcatgctcggtaaaacgtatac

SEQ ID NO: 3102 - DNA, 75 bp, synthetic construct
  source 1..75: mol_type = other DNA
atggcttacggtgaagggcttccgctgccggattcatacgatgctccggatccgcgcattaaacagctggcgcgc

SEQ ID NO: 3103 - DNA, 75 bp, synthetic construct
  source 1..75: mol_type = other DNA
gctggatttgacgaagaggatttcaaaaaacctgttcgcgtgaatttgcccattgttaatgacctgccgcctgaa

SEQ ID NO: 3104 - DNA, 75 bp, synthetic construct
  source 1..75: mol_type = other DNA
gcgactggccggggccggaaagggtggactgcagattgtgctgggggcggcagccatcgtgggctctttcttcac

SEQ ID NO: 3105 - DNA, 75 bp, synthetic construct
  source 1..75: mol_type = other DNA
gatgaacttatcgataatgtctggaagagaagtattgtcaccaatcacgttgtgacgcagagtatctcagaacta

SEQ ID NO: 3106 - DNA, 75 bp, synthetic construct
  source 1..75: mol_type = other DNA
attcacccacgtcgacactttcaatcccggctgggatccaaccttcatcgcagaacgcctagaactcgaaatcta

SEQ ID NO: 3107 - DNA, 75 bp, synthetic construct
  source 1..75: mol_type = other DNA
caacgttcacctttacttcagtgccctttcgtaatggcagcaggacactgaatggcggggatttccggaccacgg

SEQ ID NO: 3108 - DNA, 75 bp, synthetic construct
  source 1..75: mol_type = other DNA
acctgggttatcgaaaacgccgaactggaacagcagattcagggcggcaaagagcttaaagacgcactggctcag

SEQ ID NO: 3109 - DNA, 75 bp, synthetic construct
  source 1..75: mol_type = other DNA
atgaaactggccctgacgctggaagctgacagcgttaacgtacaggcactgaacatggggcgaattgtcgttgac

SEQ ID NO: 3110 - DNA, 75 bp, synthetic construct
  source 1..75: mol_type = other DNA
atatggtggatctcattacttacactaatcagatgcctaaagaaggagaaactctggaagcacctgccttcaaaa

SEQ ID NO: 3111 - DNA, 75 bp, synthetic construct
  source 1..75: mol_type = other DNA
ggatgactggtggcgcaacggtcagaacctttacctggacaatatggcggtcaccggcttttaccgggtgcccct

SEQ ID NO: 3112 - DNA, 75 bp, synthetic construct
  source 1..75: mol_type = other DNA
atgtgtctgaggatgcagtggcagctgcgcgccgcagtcgtgttgaatgggaaaacagacagcgcaaaaagcagg

SEQ ID NO: 3113 - DNA, 75 bp, synthetic construct
  source 1..75: mol_type = other DNA
taaaacagatgaggctgcagacagagttattgatcatttgatcaagtttcctgatttttataactcggagatatt

SEQ ID NO: 3114 - DNA, 75 bp, synthetic construct
  source 1..75: mol_type = other DNA
agctttatgcttcgcctgaccgtggcagcggatgacggcagtgagcggctggtcagcacggcccggacgacggaa

SEQ ID NO: 3115 - DNA, 75 bp, synthetic construct
  source 1..75: mol_type = other DNA
ttcaaatttctgaccggaccagaaaccgtgctggcactgctggatgaacgggaaagaaacctgcaatacatcaaa

SEQ ID NO: 3116 - DNA, 75 bp, synthetic construct
  source 1..75: mol_type = other DNA
accggcctgatgacccgcgacaattaccgaacagtaaataacattactctgggtaagcatccggaggcgaaacaa

SEQ ID NO: 3117 - DNA, 75 bp, synthetic construct
  source 1..75: mol_type = other DNA
atgcgtgattttcagaatgcctttgatgctgcccttgccggggtggacagcacgattgttgaagtgatggggctc

SEQ ID NO: 3118 - DNA, 75 bp, synthetic construct
  source 1..75: mol_type = other DNA
cccggggatggggagtaagcttcgtcagccgttgtctccgggtgtcgcgtgcgcagttgcacgtcattctcagac

SEQ ID NO: 3119 - DNA, 75 bp, synthetic construct
  source 1..75: mol_type = other DNA
cggataaatactgctttacagaactgaatgagtcttcccgtcttcgcctgcagtggcaggatgtcctggaggagt

SEQ ID NO: 3120 - DNA, 75 bp, synthetic construct
  source 1..75: mol_type = other DNA
taaggagtggtcaaaacaggatcgtgacacgttcgatcctacacatgatattgacctctactgcgaccaggccag

SEQ ID NO: 3121 - DNA, 75 bp, synthetic construct
  source 1..75: mol_type = other DNA
cctgggtataaaggaaaaggcgttgccggtagtcaatgtgaaacagcataacctgagcagttatgagcaactact

SEQ ID NO: 3122 - DNA, 75 bp, synthetic construct
  source 1..75: mol_type = other DNA
tgtttactttgaccagaacggtgtgctctgccagcgcctcggcattgatcaggtcccggcacgggtgagcgccgt

SEQ ID NO: 3123 - DNA, 75 bp, synthetic construct
  source 1..75: mol_type = other DNA
aatctttttgccctcagcaaagtactgcagtgctcgccaacatggattctatttggcgatgaagacaagcagcca

SEQ ID NO: 3124 - DNA, 75 bp, synthetic construct
  source 1..75: mol_type = other DNA
gaatccattcgtcataagcaccgttactccgatgagcaaaaacaggttgccgttgaacattatcttaaccacggc

SEQ ID NO: 3125 - DNA, 75 bp, synthetic construct
  source 1..75: mol_type = other DNA
atgcgaaagtttaaaataattattgaaacgggaatagccggtggagatttcgaggatgaattcgaagtggatgat

SEQ ID NO: 3126 - DNA, 75 bp, synthetic construct
  source 1..75: mol_type = other DNA
tctttgctgctctgcatgttgagggtgttcaacgtgtggaactggcttctccgctggcggatgtggtcctgaaca

SEQ ID NO: 3127 - DNA, 75 bp, synthetic construct
  source 1..75: mol_type = other DNA
cattccaggaaatggcatcgaatgtggttcgctctcaactggcgactcttgacctgagtaccgtagaaaaagaaa

SEQ ID NO: 3128 - DNA, 75 bp, synthetic construct
  source 1..75: mol_type = other DNA
accctaacgtcgccaaccgcaataaaggcccacgccgtcagccggaaaagaatgttttcaccgatgagcagattg

SEQ ID NO: 3129 - DNA, 75 bp, synthetic construct
  source 1..75: mol_type = other DNA
ttccccgtcgggctacggtctctgttaatacgggaatacggcgacgatacagcgcatgatgtgtcaggcttgaat

SEQ ID NO: 3130 - DNA, 75 bp, synthetic construct
  source 1..75: mol_type = other DNA
caaagaggtggctgttgcactggcatcagtctgtcagaagctgcgcgctttcgggtatatcagcgcatggggctg

SEQ ID NO: 3131 - DNA, 75 bp, synthetic construct
  source 1..75: mol_type = other DNA
ccgccgccggagccggtcacccgcccgatggagctttatatcaatggcgaactggtgagcaagtgggatgaatga

SEQ ID NO: 3132 - DNA, 75 bp, synthetic construct
  source 1..75: mol_type = other DNA
ccgtccgcctgctgattcagttacagcgtaacggtaactgggtgacggaaaaggatgtcaccattaacggcaaga

SEQ ID NO: 3133 - DNA, 75 bp, synthetic construct
  source 1..75: mol_type = other DNA
ccgtgatggtgcgggtatctggaccatctgccgtggagccacccgggtggatggtaagcctgttattcctggcat

SEQ ID NO: 3134 - DNA, 75 bp, synthetic construct
  source 1..75: mol_type = other DNA
taaccgcctggacggaacgcgaagcgcgtagccgttgcccgtccggttgtgttgctgtattcgctgcaaaaatcc

SEQ ID NO: 3135 - DNA, 75 bp, synthetic construct
  source 1..75: mol_type = other DNA
ccttctggcatgatttagcggctccggtcattgctggcattcttgccagtatgatcgtgaactggctgaataagc

SEQ ID NO: 3136 - DNA, 75 bp, synthetic construct
  source 1..75: mol_type = other DNA
tggacatcgacctgtcccacagcaatctggcccccggcctgctgtgcgcagacgggcagtaccgccagatagtca

SEQ ID NO: 3137 - DNA, 75 bp, synthetic construct
  source 1..75: mol_type = other DNA
tcgatctgggtaagaactctttccatattcattgtcaggatcatcgtgggaaggccgtttaccgtaaaaaattca

SEQ ID NO: 3138 - DNA, 75 bp, synthetic construct
  source 1..75: mol_type = other DNA
agagcaagttacagagacgcatgtacacgcagcaggcgttaatgtatcgccagaagggagatcgtgaaggtgttc

SEQ ID NO: 3139 - DNA, 75 bp, synthetic construct
  source 1..75: mol_type = other DNA
tgccgagcatcggcccctcatctgcaaggcacgcgcggcgtacctgggtagcgaggacgacgacctagcaatgcg

SEQ ID NO: 3140 - DNA, 75 bp, synthetic construct
  source 1..75: mol_type = other DNA
ctgactggctggatgtaacagagaacgcattatttaaccgccttcgtgccgatggcgatcagattttcccgctgg

SEQ ID NO: 3141 - DNA, 75 bp, synthetic construct
  source 1..75: mol_type = other DNA
tacggcaaaagcgttcgcatacctgctgaaacagtgggatgcactgaacgtgtactgcagtaatggctgggtgga

SEQ ID NO: 3142 - DNA, 75 bp, synthetic construct
  source 1..75: mol_type = other DNA
cagatctattcagaggataatgacgctcccgtcttttttaatgcctcatccggcgcccccctgcaatggaaattt

SEQ ID NO: 3143 - DNA, 75 bp, synthetic construct
  source 1..75: mol_type = other DNA
gatctgtggccggtaaaggagccggacatgctgacggtgatcatgcagcgcctgacggcactggagcagtccggt

SEQ ID NO: 3144 - DNA, 75 bp, synthetic construct
  source 1..75: mol_type = other DNA
ggcggctggtggacgacccgcaggtaaaacagaccagcaagggcacaccgatgacgctggcgcgtatggcggtat

SEQ ID NO: 3145 - DNA, 75 bp, synthetic construct
  source 1..75: mol_type = other DNA
ctgctggttcagcgaagaatccaacgatgcggaaaccctcaaggccggaaaactgtatatcgactacgactatac

SEQ ID NO: 3146 - DNA, 75 bp, synthetic construct
  source 1..75: mol_type = other DNA
gcagggcttcgtctatgtggcgttcatcattgatgtgtttgccggatacattgtggggtggcgggtctcatcgtc

SEQ ID NO: 3147 - DNA, 75 bp, synthetic construct
  source 1..75: mol_type = other DNA
ataaaaatgcgtttttccctgtggagcttaaaatcgcttatcaggaatccggcgaatggcccgatgatggaatcg

SEQ ID NO: 3148 - DNA, 75 bp, synthetic construct
  source 1..75: mol_type = other DNA
gccggataacgaggccaataccggcggacaatggatacaaaatggcggtatcgccaacaacactactgtcaccgg

SEQ ID NO: 3149 - DNA, 75 bp, synthetic construct
  source 1..75: mol_type = other DNA
ggctcatgcccggagaaaaatccacgatgtgcatgcaagagcgcccacctacatcaccacggaagccctgcagcg

SEQ ID NO: 3150 - DNA, 75 bp, synthetic construct
  source 1..75: mol_type = other DNA
cattgacggcagcatccatcgctgggcaaaaaatgaagttatcgacaacgaccgcgaagactggaagcgtatctc

SEQ ID NO: 3151 - DNA, 75 bp, synthetic construct
  source 1..75: mol_type = other DNA
atgaacaccacactgacacccgcagatctcgatccccgtcggcaggccatgctgctgtactttcagggataccgc

SEQ ID NO: 3152 - DNA, 75 bp, synthetic construct
  source 1..75: mol_type = other DNA
ctggtcgtgcataccctgcctggtgaccgttacggtgtcgccgcaggtggtcgccgactggctgcactcaacatg

SEQ ID NO: 3153 - DNA, 75 bp, synthetic construct
  source 1..75: mol_type = other DNA
cctgtaaagttgagttccgccacggtaacatgacgctggaaaatccttcaccagagctgctcacggtgttgatcc

SEQ ID NO: 3154 - DNA, 75 bp, synthetic construct
  source 1..75: mol_type = other DNA
atctggatgatgactactttgacatgttgcaggaggagctttgcagcgtggtggaggcatccggtgccagcctgg

SEQ ID NO: 3155 - DNA, 75 bp, synthetic construct
  source 1..75: mol_type = other DNA
aggaagtacaggcgactcgtatgacaacgcgatggcggagagcatcaatggtctttacaaagcggaggtaataca

SEQ ID NO: 3156 - DNA, 75 bp, synthetic construct
  source 1..75: mol_type = other DNA
aaaatggctgcgttacgtcattgagcatatccaggactggccggcaaaccgggtacgcgatctgttgccctggaa

SEQ ID NO: 3157 - DNA, 75 bp, synthetic construct
  source 1..75: mol_type = other DNA
tcccgaaagcaagggtaaatctgaaattagacctacatacaggtggtgggcagaagaaagtggagcttccgctca

SEQ ID NO: 3158 - DNA, 75 bp, synthetic construct
  source 1..75: mol_type = other DNA
cggaatatgacccgcttatcgggtgctacattccgaccgatatcacgttcacactggcgctgtttgccgcccttg

SEQ ID NO: 3159 - DNA, 75 bp, synthetic construct
  source 1..75: mol_type = other DNA
tacagtgggcgtgaggatgacccgctggttccccgccagttgcgacagtcgcgccatcgtcgtccgttaccggca

SEQ ID NO: 3160 - DNA, 75 bp, synthetic construct
  source 1..75: mol_type = other DNA
ttcgtgaaatcgctgaaaaaacaaaaattgctggtgaagcacctgtaatgcccttcgatcagcgaattaatgcgc

SEQ ID NO: 3161 - DNA, 75 bp, synthetic construct
  source 1..75: mol_type = other DNA
caatcagtttgaagcgttgccggcagaggttcgccaggacatgcagcagcggattgatgcggcgcgccggatgtt

SEQ ID NO: 3162 - DNA, 75 bp, synthetic construct
  source 1..75: mol_type = other DNA
aacggcgaacagtattcatttgatccaatcagcccggatgctgtagtcacaaccaatatcgcatggcaatacagc

SEQ ID NO: 3163 - DNA, 75 bp, synthetic construct
  source 1..75: mol_type = other DNA
tgtcgccacaagggaatcattacaggaaatcacaaaacgtgccggaatgattaacacgaatattcaggggatgct

SEQ ID NO: 3164 - DNA, 75 bp, synthetic construct
  source 1..75: mol_type = other DNA
atggcgacaaagcggttactgatgccgatggcaaagcgaaagtcacgctgaaaggtacaaaagcaggcgctcata

SEQ ID NO: 3165 - DNA, 75 bp, synthetic construct
  source 1..75: mol_type = other DNA
tatgattgcgtgatgcctgtttatcagttccggcgtgatttttctctggtacagaccgcgccgcataacgtgccc

SEQ ID NO: 3166 - DNA, 75 bp, synthetic construct
  source 1..75: mol_type = other DNA
atggatataacacctttccttcatgcactttgtgctgtggctgcgcaggtactggttggtctttttaccggaaac

SEQ ID NO: 3167 - DNA, 75 bp, synthetic construct
  source 1..75: mol_type = other DNA
gtaagaggccccggaacgttatcgttcacacggaccgtggaggccagtactgttcagcagattatcaggcgcaac

SEQ ID NO: 3168 - DNA, 75 bp, synthetic construct
  source 1..75: mol_type = other DNA
gaaggaccggcacacggcggtggaggtgaattacaccgacccgcagaacggctggcagacctccacggaactggt

SEQ ID NO: 3169 - DNA, 75 bp, synthetic construct
  source 1..75: mol_type = other DNA
cacaccacaagctcaaaattcgcggcctgaaaagcccggtggacgtgctgacttttacaggccacgaacagctca

SEQ ID NO: 3170 - DNA, 75 bp, synthetic construct
  source 1..75: mol_type = other DNA
tatcgctcgccacgggaatatctgcggcagcgggcttgtaatgggttaagtgataacagatgtctggaaatatag

SEQ ID NO: 3171 - DNA, 75 bp, synthetic construct
  source 1..75: mol_type = other DNA
actgatagttgaacgtaccagggcggggcttgctgcagctcgcgccaaaggcagagtaggtggacgccgtcctaa

SEQ ID NO: 3172 - DNA, 75 bp, synthetic construct
  source 1..75: mol_type = other DNA
ttcttgaacgtattcgcagacttgcaccacagggggcggttccaccgtaccggacggtggaggagtggcgggaat

SEQ ID NO: 3173 - DNA, 75 bp, synthetic construct
  source 1..75: mol_type = other DNA
acggtggtgttctgaacggtgttccttctgcatatcactggtatacggaacagtatggcgtgaagtggcctgtgg

SEQ ID NO: 3174 - DNA, 75 bp, synthetic construct
  source 1..75: mol_type = other DNA
ccacaccttctgtttccgtaaccgctgtatcagagaataacccgcctcaactggttgccaccctcgtccctgatg

SEQ ID NO: 3175 - DNA, 75 bp, synthetic construct
  source 1..75: mol_type = other DNA
tgaaacgacagactgggttgatgcaggagaaaacgttctgctgttcggagccagcgggttggggaaaagccatct

SEQ ID NO: 3176 - DNA, 75 bp, synthetic construct
  source 1..75: mol_type = other DNA
acaccggcactgtttgccgctctcgatgtgtctgaggtggcggtggcttccgcacgccgcagtcgtgtggaatgg

SEQ ID NO: 3177 - DNA, 75 bp, synthetic construct
  source 1..75: mol_type = other DNA
acgcgggaaaagtgaattcccacacgcgttataaacttacccttgcggagctggaagcctttaactctgccgttg

SEQ ID NO: 3178 - DNA, 75 bp, synthetic construct
  source 1..75: mol_type = other DNA
caatgagcaaactgaacgtttaataagcgagttgcagatttgcaactcggtcaatatagagccagttaacgttat

SEQ ID NO: 3179 - DNA, 75 bp, synthetic construct
  source 1..75: mol_type = other DNA
cgcctccgccggcaactgggctgtcaaaaacggctggtgtcagaccatgacggaagatggtcaggcgctggtaat

SEQ ID NO: 3180 - DNA, 75 bp, synthetic construct
  source 1..75: mol_type = other DNA
gcgcagaaatcatcccgtatcgcgtggaagccaccatttttctctatcctggaccggaagcagagccggtaatgg

SEQ ID NO: 3181 - DNA, 75 bp, synthetic construct
  source 1..75: mol_type = other DNA
cgatggcagcggcgctgaaggccgtcgagcaaggcgcacgtgtcacgctgatcgagcgcggcaccatcggcggca

SEQ ID NO: 3182 - DNA, 75 bp, synthetic construct
  source 1..75: mol_type = other DNA
aaacccgtggtaagcccgtcggggtgatgttccacagcgatcaaggcagtcattatacgagcaggcagttccggc

SEQ ID NO: 3183 - DNA, 75 bp, synthetic construct
  source 1..75: mol_type = other DNA
cttccttaacgttcgagtcgctttatggcacacatcacggctggttgaaaagctggctgacgcgcaaactccagt

SEQ ID NO: 3184 - DNA, 75 bp, synthetic construct
  source 1..75: mol_type = other DNA
ccacacagtcaaaagaaagtgcagcagccagtgcgaagagtgcatctgacagtgcaaagacggcaaccagcaggg

SEQ ID NO: 3185 - DNA, 75 bp, synthetic construct
  source 1..75: mol_type = other DNA
gtcacgctgccaaaactgacccgtaagctcgaaaactatcgcggtgcggggatgaacggcagcgcaccggtagac

SEQ ID NO: 3186 - DNA, 75 bp, synthetic construct
  source 1..75: mol_type = other DNA
gccagtcgccaaagttactggaacacgtcacgcagcgaccagcaaatatcatttggattaaatgtgccgtttggt

SEQ ID NO: 3187 - DNA, 75 bp, synthetic construct
  source 1..75: mol_type = other DNA
gggcgctggccacacaacttccgtcgtttcgtcagaaactgagtgacggctggtatcaggtacgtatcgccgggc

SEQ ID NO: 3188 - DNA, 75 bp, synthetic construct
  source 1..75: mol_type = other DNA
gcttcataccgcggtgaaggacgacgacagcgaggcggtcgggattatccgcgcactgcttgccggtgaggaaaa

SEQ ID NO: 3189 - DNA, 75 bp, synthetic construct
  source 1..75: mol_type = other DNA
tgcggctttatcgggcatgtatgctgcgggggccagtatgatccttggcggtgtggcgcagatgctggcaccgaa

SEQ ID NO: 3190 - DNA, 75 bp, synthetic construct
  source 1..75: mol_type = other DNA
aaataatcagacaccaaaaaaacaaagaccccgcatatccctttcgggaacatttgttgatgcagctctgtattc

SEQ ID NO: 3191 - DNA, 75 bp, synthetic construct
  source 1..75: mol_type = other DNA
atgcaacagatttcctttctgcccggagaaatgacgcccggcgagcgcagtctcattcagcgggccctgaaaacc

SEQ ID NO: 3192 - DNA, 75 bp, synthetic construct
  source 1..75: mol_type = other DNA
tccggcatcatagtccggcctgcgcccggctggtgaaatcgttaatcgaaagccagcggccacgatacgtgttga

SEQ ID NO: 3193 - DNA, 75 bp, synthetic construct
  source 1..75: mol_type = other DNA
gctggtcctgtccagagccgggcaggcggcagggctgacgtttaaccagaccagcgagtcactgacggcgctggt

SEQ ID NO: 3194 - DNA, 75 bp, synthetic construct
  source 1..75: mol_type = other DNA
ctccctgtcttacaaggatgcagaagaggataaatataaatcagaagttgacgttaaaagtcacgacatcatgtt

SEQ ID NO: 3195 - DNA, 75 bp, synthetic construct
  source 1..75: mol_type = other DNA
gtaatgcagccagggatgcaacgaccgcaacagaaaaagcccgggagtcagcagaaagcgcacagtcagcggaac

SEQ ID NO: 3196 - DNA, 75 bp, synthetic construct
  source 1..75: mol_type = other DNA
ccttcgacttccgagaaatggtgcaagccaaaaacggagaggtcgttaccacatccagaaaaattgccaagtact

SEQ ID NO: 3197 - DNA, 75 bp, synthetic construct
  source 1..75: mol_type = other DNA
catcatggctgcgtgatccatcagtctgagcttgaccagagcaacgggcggtggatctgtgaaaacacgggcatg

SEQ ID NO: 3198 - DNA, 75 bp, synthetic construct
  source 1..75: mol_type = other DNA
tccttctgctgaaacagcgcctggccgaacaggaagcgttgatccacgccctgcaggaaaagctgagcaaccggg

SEQ ID NO: 3199 - DNA, 75 bp, synthetic construct
  source 1..75: mol_type = other DNA
gaacctataccgattcatatcagttaggagatggggagctgcttgtttgtacggtgaatatccctgctggtgtat

SEQ ID NO: 3200 - DNA, 75 bp, synthetic construct
  source 1..75: mol_type = other DNA
tggaccgtctgtgcgaagactactgcggtggtatctggaatctgtacaccctgaacaacggcggggcatttatgg

SEQ ID NO: 3201 - DNA, 75 bp, synthetic construct
  source 1..75: mol_type = other DNA
gtgaaaacgggggccgaagccatccgggcgctggccacgcagcttccgtcgtttcgccagaaactgaatgagggc

SEQ ID NO: 3202 - DNA, 75 bp, synthetic construct
  source 1..75: mol_type = other DNA
caccatgtaccgggtattttcggtgaagaccggcatacctcccgcagtgaacgctatacgtacatccccaccatc

SEQ ID NO: 3203 - DNA, 75 bp, synthetic construct
  source 1..75: mol_type = other DNA
cccctgtaaatttggcagtaaaattatcgtcaacaatctggtgagatgggaccggtggggatttcatcttatcac

SEQ ID NO: 3204 - DNA, 75 bp, synthetic construct
  source 1..75: mol_type = other DNA
cgaatccgtggccattgatattgcttatgaaggctccggcagtggcgactggcgcactgacggtttcatcgtggg

SEQ ID NO: 3205 - DNA, 75 bp, synthetic construct
  source 1..75: mol_type = other DNA
ttttctgccaccacgatgctgttttcactgggggccagcatgatactgggcggtgtggcccagatgctggccccg

SEQ ID NO: 3206 - DNA, 75 bp, synthetic construct
  source 1..75: mol_type = other DNA
tcaatctgtctctggaacatgaactgaatgagtggctggcagagagaggttatgccggactggcggataaccgga

SEQ ID NO: 3207 - DNA, 75 bp, synthetic construct
  source 1..75: mol_type = other DNA
tggagtgacagaaaagcgttacctgcgctgctctggcagcaccgcatggatgagcccatcggtgtttacaccgaa

SEQ ID NO: 3208 - DNA, 75 bp, synthetic construct
  source 1..75: mol_type = other DNA
ctgatgcttatctgcctgaacccgaagcccccggcgcgcggaaaaagaaaaaagccagagtacaggaggacccgt

SEQ ID NO: 3209 - DNA, 75 bp, synthetic construct
  source 1..75: mol_type = other DNA
gaagagcttaaacgcttaccctctgaatgctctcctttagtcgaacaaaacctgatgccatggctttccacaggc

SEQ ID NO: 3210 - DNA, 75 bp, synthetic construct
  source 1..75: mol_type = other DNA
tagtatcacaattagcattggcttgcactctggctatcacctctcaggctaatgcagcgaccaacgatatttctg

SEQ ID NO: 3211 - DNA, 75 bp, synthetic construct
  source 1..75: mol_type = other DNA
aaatttggctggttgccggtatcaccgatatgagaaatagcttcaacggcctggctgcgaaagtacaaacggcgc

SEQ ID NO: 3212 - DNA, 75 bp, synthetic construct
  source 1..75: mol_type = other DNA
tgaggtctctgaccccgttctgggcgggcctgacggaatttctaaccgtcagggtaaacaactggccagccgcac

SEQ ID NO: 3213 - DNA, 75 bp, synthetic construct
  source 1..75: mol_type = other DNA
gtcatcatttgaccggtttttctggcaggaggaaccactctggcggctgatttttgaagccggtgaggccggtcg

SEQ ID NO: 3214 - DNA, 75 bp, synthetic construct
  source 1..75: mol_type = other DNA
gccatatccgttcgtacagctggccacgctcaaacaacggactgaaaaagcgaccagaacggcaggccgtgtccc

SEQ ID NO: 3215 - DNA, 75 bp, synthetic construct
  source 1..75: mol_type = other DNA
gttccattgccccaaagattggctgtacgccggagactctgcgtgtctgggttcgccagcatgagcgggataccg

SEQ ID NO: 3216 - DNA, 75 bp, synthetic construct
  source 1..75: mol_type = other DNA
gcagaacagcagccagattattgctgaacaggtgatccctgaaaacgagggcggttggtggatacgtgaagtggg

SEQ ID NO: 3217 - DNA, 75 bp, synthetic construct
  source 1..75: mol_type = other DNA
cgcacctacagcagctaccggaccaggacacccgcgccggtgggagtgtttggccccggctggaaagcgccttct

SEQ ID NO: 3218 - DNA, 75 bp, synthetic construct
  source 1..75: mol_type = other DNA
caaactctttctatccgctggagatgaaagaggattacactcaagctgactcatggccagatgatgctgttgaag

SEQ ID NO: 3219 - DNA, 75 bp, synthetic construct
  source 1..75: mol_type = other DNA
catgcacgggcaaaaaggttctgacctgaacgcaggtaaaaatctgacattcctgggacataatggtcagattga

SEQ ID NO: 3220 - DNA, 75 bp, synthetic construct
  source 1..75: mol_type = other DNA
aagtgtcagccgacggggaaactgctgggataacagtccaatggaacgcttcttccgcagtctgaaaacagaatg

SEQ ID NO: 3221 - DNA, 75 bp, synthetic construct
  source 1..75: mol_type = other DNA
ttgccgctgtaaatcattacctggccggtcatgcaggcatcatttctacggcaaaactctttcaactttctcaca

SEQ ID NO: 3222 - DNA, 75 bp, synthetic construct
  source 1..75: mol_type = other DNA
atggacgtgacaaacgatgattatatccgtctgttgtcggcactgttgccgcccggtccggcgtggtcagtcagc

SEQ ID NO: 3223 - DNA, 75 bp, synthetic construct
  source 1..75: mol_type = other DNA
gtaacgacaataatgtccatgataagacgttcagggatggctcgttccttaaaattggttggccctcggtcaaca

SEQ ID NO: 3224 - DNA, 75 bp, synthetic construct
  source 1..75: mol_type = other DNA
tcgttgaagcaccggcgccgtcccgcccgatagagcgtggtatcgcgggccccggattacttgcccgcgtgttaa

SEQ ID NO: 3225 - DNA, 75 bp, synthetic construct
  source 1..75: mol_type = other DNA
gcggcctatgtctccccggttgttgaaggaaaagtgctgcgtcatcgcggtggtgaaacccgcgtgttacgtccg

SEQ ID NO: 3226 - DNA, 75 bp, synthetic construct
  source 1..75: mol_type = other DNA
gcagaatcaaaacactgaatacccgacgggtgaatattctgaagggtgaacagcgtcgtgtcagtggcagtgcac

SEQ ID NO: 3227 - DNA, 75 bp, synthetic construct
  source 1..75: mol_type = other DNA
ggctgaagatttcagtcatgaaaaatggtgatttgtcgctagctgatattaaacgcgataaaaacactggggata

SEQ ID NO: 3228 - DNA, 75 bp, synthetic construct
  source 1..75: mol_type = other DNA
atagtgctgccactggcggactcattgctgtttctgaattagcgaaaagagtttctggtaaaacaaaccgaaaac

SEQ ID NO: 3229 - DNA, 75 bp, synthetic construct
  source 1..75: mol_type = other DNA
tgctggtggcctgtggtgcgctgtggatggcaacagaccattaccgtgataacgcgattacctacaaagcgcagc

SEQ ID NO: 3230 - DNA, 75 bp, synthetic construct
  source 1..75: mol_type = other DNA
aatactgactcagttagttctggcgggtctggcgaaggataacggcgggtacgggaataaattcagacgctgcca

SEQ ID NO: 3231 - DNA, 75 bp, synthetic construct
  source 1..75: mol_type = other DNA
attgcaatgacgcatggctaaacaccgaaggtgatgacatctccggctcatacgttaagtacaaagaccatcagg

SEQ ID NO: 3232 - DNA, 75 bp, synthetic construct
  source 1..75: mol_type = other DNA
ttatctggacgcactggaactggttgatacctccagtgctccagatattgaatggcctacgcctccggcagttca

SEQ ID NO: 3233 - DNA, 75 bp, synthetic construct
  source 1..75: mol_type = other DNA
tacaccctgaataacggcggcgcatttatggcgcccgaaccggatgaagatgatggagaaacctgggtactgttc

SEQ ID NO: 3234 - DNA, 75 bp, synthetic construct
  source 1..75: mol_type = other DNA
attcaggaaattccgggggatattttcgcagcggcggcaacttatgacggtgaagttattaccatttatccggac

SEQ ID NO: 3235 - DNA, 75 bp, synthetic construct
  source 1..75: mol_type = other DNA
cggtaaaaggttccggcaccacgctctgggtttacaccggtaagggcgatgcttatgcaaacccgctgtcagatg

SEQ ID NO: 3236 - DNA, 75 bp, synthetic construct
  source 1..75: mol_type = other DNA
tgattaacaaggtcgctgaaaacggttattcactccgcgtggtggaggaatccgaccaacagtcaacctgcacac

SEQ ID NO: 3237 - DNA, 75 bp, synthetic construct
  source 1..75: mol_type = other DNA
gctttcccagcaggatttcagccgctttgtgctggattttctggtgttcggtaatgcgtttctggaaaagcgtta

SEQ ID NO: 3238 - DNA, 75 bp, synthetic construct
  source 1..75: mol_type = other DNA
aaagcaggctcagcggcagaaagaatttcagcaggcatacgctaatgcttatgcgtctggtgatcgcggtgcttt

SEQ ID NO: 3239 - DNA, 75 bp, synthetic construct
  source 1..75: mol_type = other DNA
ttaccgctgaacgtattagcgactacatgactgaagcagttaatacagactctatagccgttgcggaaatgtttc

SEQ ID NO: 3240 - DNA, 75 bp, synthetic construct
  source 1..75: mol_type = other DNA
gctgcgtcagacccgcacccgcaaaccgttccctgagtcactcccacgggatgagaagcggctgctgccgactga

SEQ ID NO: 3241 - DNA, 75 bp, synthetic construct
  source 1..75: mol_type = other DNA
gtatgacgacagccatccggaagccctggctcgcaatacccagaaaattttccgctgggtagagaaagacacccc

SEQ ID NO: 3242 - DNA, 75 bp, synthetic construct
  source 1..75: mol_type = other DNA
ttactctcaggccactaccagcccttgcccgccagacgggtttacatccctaaaagcaacggcaaactgcgacca

SEQ ID NO: 3243 - DNA, 75 bp, synthetic construct
  source 1..75: mol_type = other DNA
agatacagccgaagtatacggattactacaatctggcttacaacaagcggggaagggtgcaggtgagtatcagcc

SEQ ID NO: 3244 - DNA, 75 bp, synthetic construct
  source 1..75: mol_type = other DNA
ttcgcctggccgtcagcccgtgatggcaaagtgttccttacgcaggcgcagctggcgatgctgctggaaggtatc

SEQ ID NO: 3245 - DNA, 75 bp, synthetic construct
  source 1..75: mol_type = other DNA
gtgccgtggatttgtggtgacacgacgtattactggaaaaatacatacgctacccagtacgacaccgtgtacggc

SEQ ID NO: 3246 - DNA, 75 bp, synthetic construct
  source 1..75: mol_type = other DNA
gcatcgatgttatggcccgtattcctgataacgccattgatttcatactgactgacccgccgtacctcgtcggtt

SEQ ID NO: 3247 - DNA, 75 bp, synthetic construct
  source 1..75: mol_type = other DNA
taccggaacccgccatcatcgcggagcctgactttgaggcaattctggctgacacaaaggccatgatgattgcgt

SEQ ID NO: 3248 - DNA, 75 bp, synthetic construct
  source 1..75: mol_type = other DNA
atggactatatagatatgcgtctggctgagaacgtctggaacggcgaggtcatcctggcggaaatcaaagcgatg

SEQ ID NO: 3249 - DNA, 75 bp, synthetic construct
  source 1..75: mol_type = other DNA
aaaatcgccttagtggagcagtcactgcagcccggagcctgtgtggcgcagatcgcccgggaaaacggaatcaac

SEQ ID NO: 3250 - DNA, 75 bp, synthetic construct
  source 1..75: mol_type = other DNA
gggaaaagtgctgcccgagttgtggtaccggggtatacagcagggagggggggcaggagggcaactggaaggata

SEQ ID NO: 3251 - DNA, 75 bp, synthetic construct
  source 1..75: mol_type = other DNA
gcaaaaggctttgttcaactcagtagcgccactaacagcgtgtctgaaacgcaggctgcaacgccgaaagcagta

SEQ ID NO: 3252 - DNA, 75 bp, synthetic construct
  source 1..75: mol_type = other DNA
tgcatcagggaatgaccagcctcagttggttgccaccctcgtccctgatgaacagcgcatcagcttctggccgca

SEQ ID NO: 3253 - DNA, 75 bp, synthetic construct
  source 1..75: mol_type = other DNA
gggaaaaatccgcccaacacaaagaaaaacttcggctacctgatgtggcgtaaacgtaactgtgtcttcctgtaa

SEQ ID NO: 3254 - DNA, 75 bp, synthetic construct
  source 1..75: mol_type = other DNA
ctggctgctgactctgttgtaccggcaggagaaaccgtgaacggtggaacgctgataaatcacgaccgccagttt

SEQ ID NO: 3255 - DNA, 75 bp, synthetic construct
  source 1..75: mol_type = other DNA
gtcagggataaaacccagctatgggactcacagctacggctgggcatcatttccgacgagaataaacaaaaatta

SEQ ID NO: 3256 - DNA, 75 bp, synthetic construct
  source 1..75: mol_type = other DNA
ccgcgtcatttccaccgtatccactgccattgtcggcatggtctgcacggccagcgatgcggatgcggaaacctt

SEQ ID NO: 3257 - DNA, 75 bp, synthetic construct
  source 1..75: mol_type = other DNA
agattcgggaattatcactgcggggatgaaagaaacaggcacaggcaacattactgttaaggataagaactccgt

SEQ ID NO: 3258 - DNA, 75 bp, synthetic construct
  source 1..75: mol_type = other DNA
gggagcttcgttatatcgcggattaaagaacctgaaacagtcagactgtatcttggattttacaaactcttattc

SEQ ID NO: 3259 - DNA, 75 bp, synthetic construct
  source 1..75: mol_type = other DNA
tgaactaccatatccgcggtcgcatcatccaggtgccgtcaaactatgacccggaaaaacgcacgtacagtggta

SEQ ID NO: 3260 - DNA, 75 bp, synthetic construct
  source 1..75: mol_type = other DNA
agtgttagttggagtgcttgataaagctccaatgcctgattttagtagcgccacgatgaatacagggacattacc

SEQ ID NO: 3261 - DNA, 75 bp, synthetic construct
  source 1..75: mol_type = other DNA
cagcgaactgcatgttgccccgtcaacgtattaccactgtcagcaacagcgacatcatccggagaaacgcagtgc

SEQ ID NO: 3262 - DNA, 75 bp, synthetic construct
  source 1..75: mol_type = other DNA
tggtgaaaatcccgatggcggccccactgaaacaggcgtttgatgagaatgttgaccgtatccggcgtgaacgcc

SEQ ID NO: 3263 - DNA, 75 bp, synthetic construct
  source 1..75: mol_type = other DNA
cctggtgtacccgtctgctttaccgtcccggagaaatcagtctgtgcagactgagtatacaggcaatggcatctg

SEQ ID NO: 3264 - DNA, 75 bp, synthetic construct
  source 1..75: mol_type = other DNA
atgcaccatgtgccggggattttcggggaagagaaacacacgtcccgaagccagaactatacgtacatccccacc

SEQ ID NO: 3265 - DNA, 75 bp, synthetic construct
  source 1..75: mol_type = other DNA
acccattgcgatacaaacgggcctcatctcctttagttgacgacaattccaatgcggataaaacacgtccaccac

SEQ ID NO: 3266 - DNA, 75 bp, synthetic construct
  source 1..75: mol_type = other DNA
ctgacgtaccggggcatgcgtgttctggtgccatcaccactggcgacagccatgatacagcacggaacggctgag

SEQ ID NO: 3267 - DNA, 75 bp, synthetic construct
  source 1..75: mol_type = other DNA
cagtatgtatcgctggcctacacacagcggcttaaggaagccggattactggcatcaacaggaagtacaggcgac

SEQ ID NO: 3268 - DNA, 75 bp, synthetic construct
  source 1..75: mol_type = other DNA
aagacggggcttttctgatgccccagcagtttcagcagcaggctgcctgggatgttcatctggcagacagcgttg

SEQ ID NO: 3269 - DNA, 75 bp, synthetic construct
  source 1..75: mol_type = other DNA
gggctttagccgaaatggaacgtgaattaattgtagagcgtacactggccgggctggcagcagcacgcgcacaag

SEQ ID NO: 3270 - DNA, 75 bp, synthetic construct
  source 1..75: mol_type = other DNA
gagctggggatcgctatcgaatggggcggggactggaaaacgctgaaagacggacctcactttcagctgaagcga

SEQ ID NO: 3271 - DNA, 75 bp, synthetic construct
  source 1..75: mol_type = other DNA
gccggactttgagacgctgcttgccgaacgcaaggccgaatttgttgcgcttcatccgaaagatgagcaggaagc

SEQ ID NO: 3272 - DNA, 75 bp, synthetic construct
  source 1..75: mol_type = other DNA
atgcacttccgagtcacaggtgaatggaatggagaaccattcaacagagttatcgaagcagagaacatcaacgac

SEQ ID NO: 3273 - DNA, 75 bp, synthetic construct
  source 1..75: mol_type = other DNA
tctgcggcttaaacgcctggggctgtcaaaaatgttccgccgtctggttgtcacacttatccggcgttatggcgt

SEQ ID NO: 3274 - DNA, 75 bp, synthetic construct
  source 1..75: mol_type = other DNA
catatttacgttgatgaaagtgtagagatcgctgaagcattaaaagtgatcgtcaacgcgaaaactcagcgtccg

SEQ ID NO: 3275 - DNA, 75 bp, synthetic construct
  source 1..75: mol_type = other DNA
gtgcgtatattgttgatattgccactcaggttggttgctctgagcggaccgtcagacggtacctgaaatacccgg

SEQ ID NO: 3276 - DNA, 75 bp, synthetic construct
  source 1..75: mol_type = other DNA
atgaccagatggtcgacatggcatttatcactcaactgaacggcctgacagataagtggttttacaggctcatca

SEQ ID NO: 3277 - DNA, 75 bp, synthetic construct
  source 1..75: mol_type = other DNA
ggcccacctgccgccaggctgggcgatgaaattcagcataaaagttttctgggggcactggcaggggccgtgctg

SEQ ID NO: 3278 - DNA, 75 bp, synthetic construct
  source 1..75: mol_type = other DNA
acggataaagaaaaagatctacggaacgcgggaagaagcccgcagtgatatttttgattacatcgaaatgtttta

SEQ ID NO: 3279 - DNA, 75 bp, synthetic construct
  source 1..75: mol_type = other DNA
cttgccgaacgtcagttgaaaacgaaaccgctgctgaaatccctggaaagctggctgcgtgaaaagatgaaaacc

SEQ ID NO: 3280 - DNA, 75 bp, synthetic construct
  source 1..75: mol_type = other DNA
ctggaagcccgtgtccgggaaaatatcaccctgggcgttcaggccggttatgcccacagcgtcagcggcagcagc

SEQ ID NO: 3281 - DNA, 75 bp, synthetic construct
  source 1..75: mol_type = other DNA
cactggatatacagacatcggatttgtggcgcgatgtgagctgggccatctctgacattctgggacgaccgcgaa

SEQ ID NO: 3282 - DNA, 75 bp, synthetic construct
  source 1..75: mol_type = other DNA
gcaggacaatatcgactgtgaatccgggattatcttcgacaacgatgaggataagacggattcagcagcactgtt

SEQ ID NO: 3283 - DNA, 75 bp, synthetic construct
  source 1..75: mol_type = other DNA
gcccgccagggcatcgaactgagccgggcattactctccaactgggttgacgcatgttgtcagttaatgactctg

SEQ ID NO: 3284 - DNA, 75 bp, synthetic construct
  source 1..75: mol_type = other DNA
gaggataatatgctcctgccgatttccggtcaggaactgcccattcgctggcttgcgcaacatggcagcgaaaaa

SEQ ID NO: 3285 - DNA, 75 bp, synthetic construct
  source 1..75: mol_type = other DNA
aaaaatatctcggccaggcggcgaagatgttgattggcattccagactacgacaactacgtcgagcatatgaaga

SEQ ID NO: 3286 - DNA, 75 bp, synthetic construct
  source 1..75: mol_type = other DNA
tgcgccgcgctgcgggagctgaacaagcaccgggatattgttcgacagattactgattcttcccgccgtgttgta

SEQ ID NO: 3287 - DNA, 75 bp, synthetic construct
  source 1..75: mol_type = other DNA
cctttctgccagtaaggcacaggcccacgtcttcaaacagtacatcatcgactttgccaaagaagtggaggtgga

SEQ ID NO: 3288 - DNA, 75 bp, synthetic construct
  source 1..75: mol_type = other DNA
ggggactctccctgccgtcactgcgtcgtcgcctgttccgctgtgtctccatccgggaaaacacggacggcacct

SEQ ID NO: 3289 - DNA, 75 bp, synthetic construct
  source 1..75: mol_type = other DNA
tgcaaatctttcttgtggtggcaagagagcgaagttttaccaaagcagcgagcaaactcggcgtctctcagtctg

SEQ ID NO: 3290 - DNA, 75 bp, synthetic construct
  source 1..75: mol_type = other DNA
atgacaaccgttacgcataattccaccacaccttctgtttccgtaaccgctgcatcagggaataacccacctcag

SEQ ID NO: 3291 - DNA, 75 bp, synthetic construct
  source 1..75: mol_type = other DNA
cagccgccgaagccatcaaaacgctgatgcacgcgctgattgatatttctgttatcgcggacagggcacataagc

SEQ ID NO: 3292 - DNA, 75 bp, synthetic construct
  source 1..75: mol_type = other DNA
tatcgcgatttatcagaatgaattaaacctcctgtctgatgtggtcaatttacttgttaaacgcgctgtatttca

SEQ ID NO: 3293 - DNA, 75 bp, synthetic construct
  source 1..75: mol_type = other DNA
ggcggactctgataacaacaccggcggtcagcagatagcccggggtggaacagccagaaacaccagagtcaccgc

SEQ ID NO: 3294 - DNA, 75 bp, synthetic construct
  source 1..75: mol_type = other DNA
tagctgtgcggcacaaactgaagatggcattgggtaaagacctgtcagataaacccgtggaacatatagaccaga

SEQ ID NO: 3295 - DNA, 75 bp, synthetic construct
  source 1..75: mol_type = other DNA
acggaagcaggatgctgggctcatgcgcggcgcaaaatccacgatgtatatatcagtaccaaaagcgcgacggcg

SEQ ID NO: 3296 - DNA, 75 bp, synthetic construct
  source 1..75: mol_type = other DNA
atgaatccgtctgatgccattgaggcaattgaaaaaccgctttcctccctgccttactcactttcccgtcacatc

SEQ ID NO: 3297 - DNA, 75 bp, synthetic construct
  source 1..75: mol_type = other DNA
taatattcctgtcttctgctgcttatgctgatatcaatctgtatggtcctggtggcccgcatacagccttgcttg

SEQ ID NO: 3298 - DNA, 75 bp, synthetic construct
  source 1..75: mol_type = other DNA
gagtacggcagcgagtttggcggctttttccccgtccaggtccgtttcacgcctgcccacgaacgttttcacctg

SEQ ID NO: 3299 - DNA, 75 bp, synthetic construct
  source 1..75: mol_type = other DNA
atgtgtcaggtatttggtgtatccaggagcggttattacaactgggtacagcatgaaccctcagacagaaaacaa

SEQ ID NO: 3300 - DNA, 75 bp, synthetic construct
  source 1..75: mol_type = other DNA
agcactacaccgacacggccggcttcaccgatcacgtctttgccctgatgcacctgctaggcttccgcttcgcgc

SEQ ID NO: 3301 - DNA, 75 bp, synthetic construct
  source 1..75: mol_type = other DNA
ctgcgtgtgcctgcagcctttgaagggctttcagttgcggggccaactgcagcttatgaatttcatgcccgaagc

SEQ ID NO: 3302 - DNA, 75 bp, synthetic construct
  source 1..75: mol_type = other DNA
cagcatattgaggcaggcatttcactgtgtgatgcggtgaactttctcgtggaaaaatacgcgctggtgctaccg

SEQ ID NO: 3303 - DNA, 75 bp, synthetic construct
  source 1..75: mol_type = other DNA
accgtgaatggggaattactagcgaaaacgaacaccgattcatggtctttggaaaggtcttaatcagtcagtcgc

SEQ ID NO: 3304 - DNA, 75 bp, synthetic construct
  source 1..75: mol_type = other DNA
atgactacacgccagtgccgccacttgaaaatctgatgctgcgccagcgcatcaccgatcagtacctggtgaatt

SEQ ID NO: 3305 - DNA, 75 bp, synthetic construct
  source 1..75: mol_type = other DNA
gcacgcatgatgcccgggccggggatatccgtgatgtggcacagccgtgtgcggaggtgctggttcgcctgggga

SEQ ID NO: 3306 - DNA, 75 bp, synthetic construct
  source 1..75: mol_type = other DNA
agcagcagcgtgcgaaaaataacgcccgtctggcaaacgtctttaaaacaaaacacctcaatatctgggtgtcgg

SEQ ID NO: 3307 - DNA, 75 bp, synthetic construct
  source 1..75: mol_type = other DNA
atgcaggatattccacaggaaacacatcatgagacgacacgcctcactcagtcagcccaggtggtgctctgggaa

SEQ ID NO: 3308 - DNA, 75 bp, synthetic construct
  source 1..75: mol_type = other DNA
atgcacgacccggcatacccggagagcctgcccgctgcgccactggtgcggtacacgtatacggaagccggtgaa

SEQ ID NO: 3309 - DNA, 75 bp, synthetic construct
  source 1..75: mol_type = other DNA
tcagcctctttatctgcgaaaaagtattttactggtaaagaaaggtaatcctaaaaatatccggagtattgacga

SEQ ID NO: 3310 - DNA, 75 bp, synthetic construct
  source 1..75: mol_type = other DNA
ggggtattacggcgatctggccattgtggtggcgaaaacgtcttatatagcagaagacggtatcgaaaaacgtta

SEQ ID NO: 3311 - DNA, 75 bp, synthetic construct
  source 1..75: mol_type = other DNA
aaatgtggtggagaaagttattgaaggggcttacgaggtggtgggcgtgtttgaccggatagaggagaagcgtga

SEQ ID NO: 3312 - DNA, 75 bp, synthetic construct
  source 1..75: mol_type = other DNA
atgatttacccaacgaatacaggaaaaagcggagaacaccttcgtctcaccacgctggaaagtgtctggattcag

SEQ ID NO: 3313 - DNA, 75 bp, synthetic construct
  source 1..75: mol_type = other DNA
aactcgagcacggcgatgtgcttccccatgacatggtcgaatcctctgctgcagcatggcgggatgaaatgagca

SEQ ID NO: 3314 - DNA, 75 bp, synthetic construct
  source 1..75: mol_type = other DNA
aattctgcctaaccgtaaccgccccatgacctctgtaccgacgctcatccgccacgttcccggaaaaactgagcc

SEQ ID NO: 3315 - DNA, 75 bp, synthetic construct
  source 1..75: mol_type = other DNA
gggccgggatttcgcataaccggtttacggattacaacgtcgggaaggaagggctgattctcaataatgccaccg

SEQ ID NO: 3316 - DNA, 75 bp, synthetic construct
  source 1..75: mol_type = other DNA
tcaaaaactgatgcgcatttacaatcagaaaggcatcttttcaaacacaaaagattccgaagaaggcttaacaca

SEQ ID NO: 3317 - DNA, 75 bp, synthetic construct
  source 1..75: mol_type = other DNA
ttgttacctgtccggggcgtaatttcgtcacattaaaaatcaccactgaggacggtattacgggccttggggatg

SEQ ID NO: 3318 - DNA, 75 bp, synthetic construct
  source 1..75: mol_type = other DNA
gaaggaaaacgcacgttcacggaatttatccgtgaaggtgtgggcgttcatgcgtttaacggcgaaatctttgtg

SEQ ID NO: 3319 - DNA, 75 bp, synthetic construct
  source 1..75: mol_type = other DNA
cgctgaatatcagtcaactggcggcactgtcaggtgtacatcgccagactgctgcggcaaggctgcaaaatctac

SEQ ID NO: 3320 - DNA, 75 bp, synthetic construct
  source 1..75: mol_type = other DNA
ttgtcccagctttttcttcctggttcgcaagtaaccaatgtagcgtggcaatactgactggagtccgcgcggatg

SEQ ID NO: 3321 - DNA, 75 bp, synthetic construct
  source 1..75: mol_type = other DNA
cggcactgatatcaaaggttaccgatgccgtgatggagcaggttgtagaatggcaaaaccgaccactggatgctg

SEQ ID NO: 3322 - DNA, 75 bp, synthetic construct
  source 1..75: mol_type = other DNA
aatcatctgatggtaatgctcaaattactgaaggtgctttttctgcagtcgcaacctttaatttaagttaccagt

SEQ ID NO: 3323 - DNA, 75 bp, synthetic construct
  source 1..75: mol_type = other DNA
ggcagaacgtgatggcacagcgcgcaggccgggcgaatgaaggcgtggaccacgccgcgcgtaccgcgcatgaag

SEQ ID NO: 3324 - DNA, 75 bp, synthetic construct
  source 1..75: mol_type = other DNA
catacgctgcagtaccgcacatatcacggaaaaggataacgcctggctgtactcgctgtcgcatcagaccagtga

SEQ ID NO: 3325 - DNA, 75 bp, synthetic construct
  source 1..75: mol_type = other DNA
gtaaccagctcatcaacagctgatatattgaacccttcaaaatactcggcattctacagggctggttcgggaagt

SEQ ID NO: 3326 - DNA, 75 bp, synthetic construct
  source 1..75: mol_type = other DNA
gatagcaatggtcgtaaggcaacgattaatctttggcagattgatgaagcgaataacactgttgcccttgaaggg

SEQ ID NO: 3327 - DNA, 75 bp, synthetic construct
  source 1..75: mol_type = other DNA
gttcggctaagcctgaagcaaaagcctataagctgaccgacggtgaaggcatggttttgctggttcaccctaacg

SEQ ID NO: 3328 - DNA, 75 bp, synthetic construct
  source 1..75: mol_type = other DNA
ctgatttactggtatatgccaacagccctgctgcgcggtatttttcataatgttcccgattcgtgtttccggcag

SEQ ID NO: 3329 - DNA, 75 bp, synthetic construct
  source 1..75: mol_type = other DNA
gaacatggggcgcattgtcgttgacattgatggtgtaaatctcgctgaactgattaatgtggtctgcgataacgg

SEQ ID NO: 3330 - DNA, 75 bp, synthetic construct
  source 1..75: mol_type = other DNA
gactctgagaaacaaatggccgctgttgcaagaaaacgtcttacacacaaagagataaaagtttttgtcaaaaat

SEQ ID NO: 3331 - DNA, 75 bp, synthetic construct
  source 1..75: mol_type = other DNA
aagcaatgggaaaagccacatcggtagaactggccgcgcgacttgatatcagtcgtgaagaggttctcaacgagc

SEQ ID NO: 3332 - DNA, 75 bp, synthetic construct
  source 1..75: mol_type = other DNA
aaattacaggtggcgaagtgtcgctttcgttgctgaccacgcaggcatatacaggacgcccctggcctctgattg

SEQ ID NO: 3333 - DNA, 75 bp, synthetic construct
  source 1..75: mol_type = other DNA
gtaatcaggacatcaaattctccgccgttatcaatgacgatgacagcgccgatctcctgtttacgctccccctgc

SEQ ID NO: 3334 - DNA, 75 bp, synthetic construct
  source 1..75: mol_type = other DNA
atgaaatcattaaccacggaaacagcgctggatattctgattgcgtggctgcaggacaatatcgactgcggatcg

SEQ ID NO: 3335 - DNA, 75 bp, synthetic construct
  source 1..75: mol_type = other DNA
aaaaagactgtgcaggacagcttacgacacctgatggagattgggttaattgttgataccggtgagagaaaaggc

SEQ ID NO: 3336 - DNA, 75 bp, synthetic construct
  source 1..75: mol_type = other DNA
atggcagtgattgacctttcgcagttgcctgcgccgcagattgtggatgtgccggactttgagacgctgcttgcc

SEQ ID NO: 3337 - DNA, 75 bp, synthetic construct
  source 1..75: mol_type = other DNA
atgacggcagggttcaactttaataactatgcagcaggtttttgttccgctaccccggcgttaaggggaaatgag

SEQ ID NO: 3338 - DNA, 75 bp, synthetic construct
  source 1..75: mol_type = other DNA
aagcagaggtgatcacaaccgtctgggcattgccctgcaaattggatgtgtccgttttctgggcaccttcctcac

SEQ ID NO: 3339 - DNA, 75 bp, synthetic construct
  source 1..75: mol_type = other DNA
tttttgagctgcgcacgctgccgcatcagcagttacagcaaaacaaaagctggcggcatgtgaaaaatgaacgcg

SEQ ID NO: 3340 - DNA, 75 bp, synthetic construct
  source 1..75: mol_type = other DNA
gtacagtggcgcgcctcatggcggttatgggacttgccggtgttctccggggtaaaaaggtccgcactaccgtca

SEQ ID NO: 3341 - DNA, 75 bp, synthetic construct
  source 1..75: mol_type = other DNA
agccgtgagtccgaaacgggtggacacgccaggacacggtatcgggaaccgttttctgcgggccggtgtggaggt

SEQ ID NO: 3342 - DNA, 75 bp, synthetic construct
  source 1..75: mol_type = other DNA
tgacggtttttcttataacgggtgaatcacagaatgtgattaccggaatttatgccagtaaagaatcctgcctcc

SEQ ID NO: 3343 - DNA, 75 bp, synthetic construct
  source 1..75: mol_type = other DNA
atcctgcttaattcacatgatggttcatccagttatcagatgatccccggaatttttcgttttgtctgcacaaat

SEQ ID NO: 3344 - DNA, 75 bp, synthetic construct
  source 1..75: mol_type = other DNA
ccagcgcgacgataccggcgaaacggtggccgtcgaagtggtcatgcgtggacgtcagaaagaaatcgacaccgg

SEQ ID NO: 3345 - DNA, 75 bp, synthetic construct
  source 1..75: mol_type = other DNA
ggaaacagggacaaatatccagttaatcggataccgctactccacacggggctatttcagctttgctgataccgc

SEQ ID NO: 3346 - DNA, 75 bp, synthetic construct
  source 1..75: mol_type = other DNA
ctcgaccggctggaaagtgaaatcctggctgaccgggtgagtgaggaaagccgccgctggctggcatcgtgcggc

SEQ ID NO: 3347 - DNA, 75 bp, synthetic construct
  source 1..75: mol_type = other DNA
gcagcagggctgacgtttaaccaggcgagagagtcactggcagccctggtgaatgccggtgtgcgtggtggtgaa

SEQ ID NO: 3348 - DNA, 75 bp, synthetic construct
  source 1..75: mol_type = other DNA
atgaaaacattacctgtattacccgggcaggcggccagttctcgcccgtctcctgttgaaatctggcagatactg

SEQ ID NO: 3349 - DNA, 75 bp, synthetic construct
  source 1..75: mol_type = other DNA
ggatataaccgtatggaggcctgcgggcgtcatggtgtgtcgccgggatatttttctggtgcactgaagcggttt

SEQ ID NO: 3350 - DNA, 75 bp, synthetic construct
  source 1..75: mol_type = other DNA
tgcaacagtcactgaaagaccttgagcgggcttacaaaaacttcttccagaagcgggctgcttttccccgattca

SEQ ID NO: 3351 - DNA, 75 bp, synthetic construct
  source 1..75: mol_type = other DNA
atgaaaacattacccgatacacacgtacgggaggcatcgcgctgcccgtctcccgtcaccatctggcagacactg

SEQ ID NO: 3352 - DNA, 75 bp, synthetic construct
  source 1..75: mol_type = other DNA
aaggcaagcgacattaacgcaacgcttggtctgatccgcgaaaacaatgaactggctcgctcaggtgcaaataac

SEQ ID NO: 3353 - DNA, 75 bp, synthetic construct
  source 1..75: mol_type = other DNA
tggatatccgtgtccctgaccatctgattgtcggtggcaggcaaatctattcgttcgcagaacacggtctgcttt

SEQ ID NO: 3354 - DNA, 75 bp, synthetic construct
  source 1..75: mol_type = other DNA
aatcgccagcttacccgttacagcgatacccgctggcatgaagattccgtgcgtaaccgctggttcagcgtgatg

SEQ ID NO: 3355 - DNA, 75 bp, synthetic construct
  source 1..75: mol_type = other DNA
gccttccggaaaaaatatgccggcactgcttcccgtgacgttaacgccggagccggataataaaatcccggcccc

SEQ ID NO: 3356 - DNA, 75 bp, synthetic construct
  source 1..75: mol_type = other DNA
cagctgttcttacactggattcaacccgtttttctgaagaggctgcacgggtaaagaaagaactgggtgaaacca

SEQ ID NO: 3357 - DNA, 75 bp, synthetic construct
  source 1..75: mol_type = other DNA
atgagtaattcgttgttaccaccatcagccagcaatttcatgcgttgtgccgaagccgtcggaacacgcattaca

SEQ ID NO: 3358 - DNA, 75 bp, synthetic construct
  source 1..75: mol_type = other DNA
cagatatcccaggcgggtattgtccgttccgatattgcctatcagatttatcgtgatttcgccgaaaacaaaggg

SEQ ID NO: 3359 - DNA, 75 bp, synthetic construct
  source 1..75: mol_type = other DNA
taaaacctgatccgtcagataaaagatcttcttgtccggacgcttcgcaaccggacccgcagacggctgaacagg

SEQ ID NO: 3360 - DNA, 75 bp, synthetic construct
  source 1..75: mol_type = other DNA
accagcagggagaaagcacgcgccaatattcaggaaataaaaaagatgcttaacgtattcaggggtaaaaaatga

SEQ ID NO: 3361 - DNA, 75 bp, synthetic construct
  source 1..75: mol_type = other DNA
aaaccaaaggcctggtggcctgtattgccgcagcggatgcgatgtgtaaatccgccaacgttgaactgattggct

SEQ ID NO: 3362 - DNA, 75 bp, synthetic construct
  source 1..75: mol_type = other DNA
tgcgtgaagcggcagagaaagccggtgaagataagtggcaggctaaaaaaataaatggtgattttttcgttattc

SEQ ID NO: 3363 - DNA, 75 bp, synthetic construct
  source 1..75: mol_type = other DNA
accgttaactgcgggagccgctgtctgttacgtttgcatgtgaaagatgacaccgtgtactgggtggagtctgat

SEQ ID NO: 3364 - DNA, 75 bp, synthetic construct
  source 1..75: mol_type = other DNA
atgctgaaacagcaggatatgacagaaaccgccagagcagtttttaatgaattaagtgccaccgaaccggcgaca

SEQ ID NO: 3365 - DNA, 75 bp, synthetic construct
  source 1..75: mol_type = other DNA
ctgcagcagcagaacaaaaaattcccggtaactgttatccggtagataaaactactcacactaataataacgaaa

SEQ ID NO: 3366 - DNA, 75 bp, synthetic construct
  source 1..75: mol_type = other DNA
gtgtttcccgtcgacgttttataaacgaattaatgcaggtgatcgcaggggagcgtgtgaggcgattcgctggtg

SEQ ID NO: 3367 - DNA, 75 bp, synthetic construct
  source 1..75: mol_type = other DNA
gtatgtcacggacacaccggaaaagacatcatgcccggtaaaacgtataccgaagcagaatgcaaagccctcctg

SEQ ID NO: 3368 - DNA, 75 bp, synthetic construct
  source 1..75: mol_type = other DNA
atgcaacagatttcctttctgcccggagaaatgacaaccagagagcgcagcctcattcagcgggccctgaaaacc

SEQ ID NO: 3369 - DNA, 75 bp, synthetic construct
  source 1..75: mol_type = other DNA
gatggagaggatgacgataccctgtcggtggtggcgaaaacccgccgtaacctggaagcggatgtgacgctgttc

SEQ ID NO: 3370 - DNA, 75 bp, synthetic construct
  source 1..75: mol_type = other DNA
ttgatgtttttgacgctgccatggagcgtattgaatgggtgtttgatacgttttcatcagtttgtctttcttttt

SEQ ID NO: 3371 - DNA, 75 bp, synthetic construct
  source 1..75: mol_type = other DNA
ccgggcactcagtcgtgacatcatgaaacagaaccgggtgaccgtacatccggagaaaagtgtcccccggacggc

SEQ ID NO: 3372 - DNA, 75 bp, synthetic construct
  source 1..75: mol_type = other DNA
gccaaaattatcgagcagccacagcttagcgtggatgctgtcgccaacaccctggccgggtggtcgcgagaaacc

SEQ ID NO: 3373 - DNA, 75 bp, synthetic construct
  source 1..75: mol_type = other DNA
ctagagtacgaaaaagccgatccagattttatggcggagcgcgaggatgttgtcagcgacgaagggcgatttaac

SEQ ID NO: 3374 - DNA, 75 bp, synthetic construct
  source 1..75: mol_type = other DNA
ttggcggctcagttatgctgaccgtcccaccggcactgctgaatgcgctgtctctgggcacagataatgaagttg

SEQ ID NO: 3375 - DNA, 75 bp, synthetic construct
  source 1..75: mol_type = other DNA
atgccggcagagcagcggcttgctgaacgtcagcgaaaaacgaaaccgctgttgaaatccctggaaagctggttg

SEQ ID NO: 3376 - DNA, 75 bp, synthetic construct
  source 1..75: mol_type = other DNA
agcgtctgtgcggttgcggaaagcatgatgaccgtgaaaacggggagttacttacagcacagctgcgactgggac

SEQ ID NO: 3377 - DNA, 75 bp, synthetic construct
  source 1..75: mol_type = other DNA
acgacaaaaaccagatgctgtacagcatgaaggtgcacccgccgctgtggcgtgccggtctgcgccagaacttcc

SEQ ID NO: 3378 - DNA, 75 bp, synthetic construct
  source 1..75: mol_type = other DNA
atgactcagagccgccgaccgtcgccactgcagcggagagtgctgattgtgctggctgcccttgatgaaaaacgg

SEQ ID NO: 3379 - DNA, 75 bp, synthetic construct
  source 1..75: mol_type = other DNA
gatacatcgtggggtggtgggtctcatcgtctatggaaacgacattcatgctggatgcgctggagcaggcgttgt

SEQ ID NO: 3380 - DNA, 75 bp, synthetic construct
  source 1..75: mol_type = other DNA
atgagcagaacactcgaacagaagattgctgatgctgaggccagattacagcgcctgaaggcgaagagcaggagt

SEQ ID NO: 3381 - DNA, 75 bp, synthetic construct
  source 1..75: mol_type = other DNA
gggattttatgcgccagaccgttgaacggcagcataatacctggttccgtgaccaggttgaggcaggacgtcagc

SEQ ID NO: 3382 - DNA, 75 bp, synthetic construct
  source 1..75: mol_type = other DNA
ccgtggtttgaacatgaccagatgactgtcgctgagaaaatcctgctgcgatgcacctggcttgacccggcagag

SEQ ID NO: 3383 - DNA, 75 bp, synthetic construct
  source 1..75: mol_type = other DNA
tatttatcttttcatggccggtattgtgtgcagatattcatggacgggttgttcgtgtactggacggtgatacca

SEQ ID NO: 3384 - DNA, 75 bp, synthetic construct
  source 1..75: mol_type = other DNA
cggttgattctgctacgcaagaaatatctgctccagtcgatcagaatctcctggaaacaagaaacaacattaaga

SEQ ID NO: 3385 - DNA, 75 bp, synthetic construct
  source 1..75: mol_type = other DNA
cgcgaagacccgtacttcaaagccagttacgacaacgtggactacagccagatcccggcaggattcagggggtga

SEQ ID NO: 3386 - DNA, 75 bp, synthetic construct
  source 1..75: mol_type = other DNA
gctgattaaatcaccgctgaatgtgcgcacggtgccgtattctgcggagtccgtcagcgaactggcggagtccat

SEQ ID NO: 3387 - DNA, 75 bp, synthetic construct
  source 1..75: mol_type = other DNA
ctgctgtgctgctttggtgcttcggtaccgaaccatgccgccatttactgcggcaacggtgagctgcttcaccat

SEQ ID NO: 3388 - DNA, 75 bp, synthetic construct
  source 1..75: mol_type = other DNA
gcgcagagggaagctgatatcgaaaatgaaaaactccgtaaagaggttgaggattacagggctgccagcgaggca

SEQ ID NO: 3389 - DNA, 75 bp, synthetic construct
  source 1..75: mol_type = other DNA
agcaatatggtgattttgaaaatggtattcctgttcacgatactattgccagagttgtatcctgtatcagtcctg

SEQ ID NO: 3390 - DNA, 75 bp, synthetic construct
  source 1..75: mol_type = other DNA
agggcgacatgacgcagtatggcggtagcattgtccagggttcagccggggtgcgcattggtgcccccaccggcg

SEQ ID NO: 3391 - DNA, 75 bp, synthetic construct
  source 1..75: mol_type = other DNA
tggttatctgacaggaggaatactcccgacatcattcttttatcacggctcagacggcattcagctgtatatggg

SEQ ID NO: 3392 - DNA, 75 bp, synthetic construct
  source 1..75: mol_type = other DNA
aaacagccagacctaaagaaaaagactataaactctctgacgaacgtggtttatatctgctggtaaaaaccacgg

SEQ ID NO: 3393 - DNA, 75 bp, synthetic construct
  source 1..75: mol_type = other DNA
attagtaggacatcttgataaagcgcccatggttgattttagcagtgtgaatgtaagctcaaatcccggcgttgc

SEQ ID NO: 3394 - DNA, 75 bp, synthetic construct
  source 1..75: mol_type = other DNA
tggatggatttctgaaaggtaaatgcatcccacgagatttaaaggttaacgaaacaaacgctgaatatcttgtcc

SEQ ID NO: 3395 - DNA, 75 bp, synthetic construct
  source 1..75: mol_type = other DNA
tacaacggtgggttgacgccggaagaatcagagaacagataccgtttttactgtaaaaccgtggccaatattact

SEQ ID NO: 3396 - DNA, 75 bp, synthetic construct
  source 1..75: mol_type = other DNA
ggcgcttgccgcgacacttgatgcgcaggggtacagtgttaacgacatcatccatatcctgatggcagaaggagg

SEQ ID NO: 3397 - DNA, 75 bp, synthetic construct
  source 1..75: mol_type = other DNA
ttatcggagagctgcccacgtatggttatcgtcgggtatgggcgctgcttcgcagacaggcagaacttgatggta

SEQ ID NO: 3398 - DNA, 75 bp, synthetic construct
  source 1..75: mol_type = other DNA
cgaacgcggtcaacgggcatacagccgttatctgttccacaagtatcagacacatcctggctgtacgaaagagta

SEQ ID NO: 3399 - DNA, 75 bp, synthetic construct
  source 1..75: mol_type = other DNA
ggcgcagtgaaagcatctgtcgattctggacttgagtccgcacagcacatcggggaagtggtgacgtcgctggtt

SEQ ID NO: 3400 - DNA, 75 bp, synthetic construct
  source 1..75: mol_type = other DNA
tcggcgcgatgatgcgcaagctggcacaggtggcgtatggagtgctgaagtcaggcgtgccgttcgatgcgtcac

SEQ ID NO: 3401 - DNA, 75 bp, synthetic construct
  source 1..75: mol_type = other DNA
tcagggcggcgtcgccgtcagaccttgcggaacgaataactcaaaaactgaaggaagggtggcagccttatggta

SEQ ID NO: 3402 - DNA, 75 bp, synthetic construct
  source 1..75: mol_type = other DNA
gcccgtgaagccctgattgacgccctgctaaccgggcgtaaccagattttcctttccgccagcaaggctcaggcc

SEQ ID NO: 3403 - DNA, 75 bp, synthetic construct
  source 1..75: mol_type = other DNA
cccgctctcgtggccgttgctgaaagaaaccctttcccaggcgttacgaggaaaactgcagcacgcggacctgcg

SEQ ID NO: 3404 - DNA, 75 bp, synthetic construct
  source 1..75: mol_type = other DNA
gtccggtggccataaccccttataccctgatgcaggcgattgcagcagaaggtgatgtggtggtcagtggtgcaa

SEQ ID NO: 3405 - DNA, 75 bp, synthetic construct
  source 1..75: mol_type = other DNA
ttaatgcctacctgtcccgtgttgccgaactgaacggcatcgacgccggtgatgtgtcgaaaaaattcaccgttg

SEQ ID NO: 3406 - DNA, 75 bp, synthetic construct
  source 1..75: mol_type = other DNA
ttgaattgttcattaaaaatccgcttgaaaacgggcttactcgtggcgaacaaatggaactggcacgaattgcac

SEQ ID NO: 3407 - DNA, 75 bp, synthetic construct
  source 1..75: mol_type = other DNA
atgaaaaccttccgctggaaagtgaaacccgggatggatgtgacatcggctccttccgtcagggaggtgcgcttt

SEQ ID NO: 3408 - DNA, 75 bp, synthetic construct
  source 1..75: mol_type = other DNA
tttaaaaaacaagaaagaaaaatcgccatatgcggggaacatgtttgtttatgacaatctcatcagaattcgtgg

SEQ ID NO: 3409 - DNA, 75 bp, synthetic construct
  source 1..75: mol_type = other DNA
tgtccgcagccatttgtctggccgtatccggtgcacctgcatgggcgtctgaacatcagtccacgctgagcgcgg

SEQ ID NO: 3410 - DNA, 75 bp, synthetic construct
  source 1..75: mol_type = other DNA
ggcgtaccagcggttccggagccggaaggtatcgcgggtgacgggagtgcttcagatggcggtgaacccacacct

SEQ ID NO: 3411 - DNA, 75 bp, synthetic construct
  source 1..75: mol_type = other DNA
ctgctggggcgaggatgaggataagccggaggtggatccgtttgcggcgctggaagacgcgctgagccttgcagc

SEQ ID NO: 3412 - DNA, 75 bp, synthetic construct
  source 1..75: mol_type = other DNA
gtggcaaaagtttttacacaagaagagcgggaaaaaattaaaggacaggttgttgaactcgtacgccagagtggg

SEQ ID NO: 3413 - DNA, 75 bp, synthetic construct
  source 1..75: mol_type = other DNA
catctcccggagcgttacctgttaacgaccctgactacattatgatttgccctctgaacccgggcagcaccccgc

SEQ ID NO: 3414 - DNA, 75 bp, synthetic construct
  source 1..75: mol_type = other DNA
acaagaaacgtaaaaatagcccgcgaatcgtccagtcaaacgacctcactgaggcggcatatagtctctcccggg

SEQ ID NO: 3415 - DNA, 75 bp, synthetic construct
  source 1..75: mol_type = other DNA
ggagcgagaacgggggcgacggtgacgcatttgtcagggaagaacgtgagattatgcgggtgatgcgtcaggcgc

SEQ ID NO: 3416 - DNA, 75 bp, synthetic construct
  source 1..75: mol_type = other DNA
gcatcgcgtccgtctatgcgttttgtgcagcccagaacggaatctcagcaggcaatgcgggctctgcatcgtgtc

SEQ ID NO: 3417 - DNA, 75 bp, synthetic construct
  source 1..75: mol_type = other DNA
gcatcaatgactgaaaacggtcatcgtcgggatatgcaccctgccgaacagattgccggattccgcgcaatggcg

SEQ ID NO: 3418 - DNA, 75 bp, synthetic construct
  source 1..75: mol_type = other DNA
agatcacgtccatttgttaattaactatcctcccaaactggcgatatccagtctggtaaacagcctcaaaggcgt

SEQ ID NO: 3419 - DNA, 75 bp, synthetic construct
  source 1..75: mol_type = other DNA
aagagagagatacagcgcgtatacgatgaaaatcatcaggtgtacggtgtgcgtaaagtctggcgccagttgtta

SEQ ID NO: 3420 - DNA, 75 bp, synthetic construct
  source 1..75: mol_type = other DNA
ctgggccgcagcagccgctggtacaaaagtgaagtggagcagtggatgcagcagcgaattgaggaatcacgagga

SEQ ID NO: 3421 - DNA, 75 bp, synthetic construct
  source 1..75: mol_type = other DNA
gggaaccttctgcagaagcctggttgcgctggcaggagatcgttaaagcaaaagatgatgagacaccgttatccg

SEQ ID NO: 3422 - DNA, 75 bp, synthetic construct
  source 1..75: mol_type = other DNA
gttgccagtggttatgtatacaactccggctacgggttattcccgtctgaacaggcacgaaaggactggcaaaat

SEQ ID NO: 3423 - DNA, 75 bp, synthetic construct
  source 1..75: mol_type = other DNA
catgccgtctgatagtgcggaaaaacggtgctgaaatttataaccgtaccgcgctggataatacgctgatttaca

SEQ ID NO: 3424 - DNA, 75 bp, synthetic construct
  source 1..75: mol_type = other DNA
ccacatcttctgtttccgtaaccgctgcatcagggaatgaccagcctcagctggttgccaccatagtccctgatg

SEQ ID NO: 3425 - DNA, 75 bp, synthetic construct
  source 1..75: mol_type = other DNA
tatccgcctggggcgttcgcctgcgcagcgttgcgtgaatcacatttctgaaccggacactgaaattccgccggg

SEQ ID NO: 3426 - DNA, 75 bp, synthetic construct
  source 1..75: mol_type = other DNA
attttctgaataatagcggcttcacgacgtccttggagcttgaggtcaggctttctgatgtggagtacgaaacag

SEQ ID NO: 3427 - DNA, 75 bp, synthetic construct
  source 1..75: mol_type = other DNA
tgtcggctgccgttctggcactgattgccgtcggtgcgcctgcgcctgatattctcgaccagtttctggatgaaa

SEQ ID NO: 3428 - DNA, 75 bp, synthetic construct
  source 1..75: mol_type = other DNA
atgaatcacaaagactgggatttggtcaaccgccgcctggtggcaaaaatgttgtctgagctggagtatgagcag

SEQ ID NO: 3429 - DNA, 75 bp, synthetic construct
  source 1..75: mol_type = other DNA
cctgaacaaatctcagtcttctctgagctccgccattgaacgtctctcttctggcctgcgtattaacagtgctaa

SEQ ID NO: 3430 - DNA, 75 bp, synthetic construct
  source 1..75: mol_type = other DNA
aggtcagggcgaatccccttcagcattccgataaccagtttctcgatgaactggtccgtaaacagcaggctgctc

SEQ ID NO: 3431 - DNA, 75 bp, synthetic construct
  source 1..75: mol_type = other DNA
gaacggattgatcaccaggaataccgacaaattctggcagaaacagagcaggaagctcatctgaaaaaattacgg

SEQ ID NO: 3432 - DNA, 75 bp, synthetic construct
  source 1..75: mol_type = other DNA
aaccgccaccgctattatgacccgctgcaggggcggtatatcactcaggatccgattgggctgaaggggggatgg

SEQ ID NO: 3433 - DNA, 75 bp, synthetic construct
  source 1..75: mol_type = other DNA
tttgcattgaatgtgaagcgccaattccgccagcacgacgccgcgccattccgggagtgcagctttgcattacct

SEQ ID NO: 3434 - DNA, 75 bp, synthetic construct
  source 1..75: mol_type = other DNA
ccgaagtgaaaatgaactgctcagtaatgtttgcctgaatatacagacaggtgcatggatccttgcccggcattt

SEQ ID NO: 3435 - DNA, 75 bp, synthetic construct
  source 1..75: mol_type = other DNA
gattctggataatctgcctccccggccctttaacatccggatggtcagggagacggcggacagcaccacggacca

SEQ ID NO: 3436 - DNA, 75 bp, synthetic construct
  source 1..75: mol_type = other DNA
ttcgtccgcgagggcgacaccgtggtggtgcatagcatggacaggctggcacgcaaccttgatgacctgcgccgc

SEQ ID NO: 3437 - DNA, 75 bp, synthetic construct
  source 1..75: mol_type = other DNA
gcctgtcgctgttgacccagaataacctgaacaaatctcagtcttctctgagctccgccattgaacgtctctctt

SEQ ID NO: 3438 - DNA, 75 bp, synthetic construct
  source 1..75: mol_type = other DNA
acaacgcgagcaggaaagcgatcgttacagtgggcgtgaggatgacccgctggttccccgccagttgcgacagtc

SEQ ID NO: 3439 - DNA, 75 bp, synthetic construct
  source 1..75: mol_type = other DNA
aacagtccatgcttttacaacctggaagaaattgatcgctggattgagcgccaggcatcagcgagaccaagacgt

SEQ ID NO: 3440 - DNA, 75 bp, synthetic construct
  source 1..75: mol_type = other DNA
ggctgacacacctgcaggacggtgtactgctggatgagcaaaactgcctgatgctgcatgaactctggctgcaga

SEQ ID NO: 3441 - DNA, 75 bp, synthetic construct
  source 1..75: mol_type = other DNA
tacattgagaaaaagaaaggccgccagacgactcatatcgtattttccttccgcgatatcacttccatgacgaca

SEQ ID NO: 3442 - DNA, 75 bp, synthetic construct
  source 1..75: mol_type = other DNA
gaatggtcttctgctacaggttaaaagagaaagcggtgatcccgatttatgtcgtgaagcgatgaatgcagtaaa

SEQ ID NO: 3443 - DNA, 75 bp, synthetic construct
  source 1..75: mol_type = other DNA
tgaaaaatacgcactggtacgtaccgaccagccgggattcagcgcctgtacccgttctcagttaataaacagtat

SEQ ID NO: 3444 - DNA, 75 bp, synthetic construct
  source 1..75: mol_type = other DNA
gctttttgaggactctgcagcggcagcactttttgatgcttcagtggcctttgttgatgccgttcctgcgctgga

SEQ ID NO: 3445 - DNA, 75 bp, synthetic construct
  source 1..75: mol_type = other DNA
tcattcttgtcggtcgtctgggaaaagatccggaagtccgttacatccccaacgggggcgcagtggcaaacctgc

SEQ ID NO: 3446 - DNA, 75 bp, synthetic construct
  source 1..75: mol_type = other DNA
aatggatagccgatgtggctgacaaacgggaacttcgccagttcaaagaaacgccggaacagcgcttcgcgctgg

SEQ ID NO: 3447 - DNA, 75 bp, synthetic construct
  source 1..75: mol_type = other DNA
tgttattccttctcgccggtcatgtccctgcggcgtctgcggattctgcctgtgaggggcgttttgtaaacccga

SEQ ID NO: 3448 - DNA, 75 bp, synthetic construct
  source 1..75: mol_type = other DNA
gctgctgtggtgctggcacacaatcacccgtccggtgaagtcacacccagcaaggcagaccgccttatcacggaa

SEQ ID NO: 3449 - DNA, 75 bp, synthetic construct
  source 1..75: mol_type = other DNA
gctggcaacagaacgtctgccgctgctccgtccggcggcgcccaatctgacctggtcgatggatttcgtcatgga

SEQ ID NO: 3450 - DNA, 75 bp, synthetic construct
  source 1..75: mol_type = other DNA
aggcggggttcagccacgttctggtgattgaggaggcccacagtctgcccattccgacactgaaacacctcaaac

SEQ ID NO: 3451 - DNA, 75 bp, synthetic construct
  source 1..75: mol_type = other DNA
aagctttccttgatatggtggcttggtcagaaggaacggataacggacgacaaccgacacgtaaccacggttatg

SEQ ID NO: 3452 - DNA, 75 bp, synthetic construct
  source 1..75: mol_type = other DNA
gcacaagctcgcggtgcgacggacacatgcgggccggggtgtcagctccgcgctgatcgaggcttgccgccatgc

SEQ ID NO: 3453 - DNA, 75 bp, synthetic construct
  source 1..75: mol_type = other DNA
ctgcctgtcatgggctgttaatcattaccgtgataacgccatcgcctacaaagagcagcgcgataaagccacatc

SEQ ID NO: 3454 - DNA, 75 bp, synthetic construct
  source 1..75: mol_type = other DNA
ggcccgttatcagaaccttgtctcagcagaagctaccggggggcttggctcaacagctaccagtaaccagttatc

SEQ ID NO: 3455 - DNA, 75 bp, synthetic construct
  source 1..75: mol_type = other DNA
gcaacggaggaagaaagatcgttgctggaggcatggaataaatatcgggtattgttgaatcgtgttgatacatca

SEQ ID NO: 3456 - DNA, 75 bp, synthetic construct
  source 1..75: mol_type = other DNA
atatatccgcactggcgagcctactggcgcgtctttcgggaagtgtcgctagttttttgattgaggaagaaagta

SEQ ID NO: 3457 - DNA, 75 bp, synthetic construct
  source 1..75: mol_type = other DNA
atgaaaacattacctgacacacacgtacgggaggcatcgcgctgcccgtctcccgtcaccatctggcagacactg

SEQ ID NO: 3458 - DNA, 75 bp, synthetic construct
  source 1..75: mol_type = other DNA
aacttgagcgcggtgatgtgctttcccatgacatggtcgaatcctcagctaccgcatggcgggatgaaatgagca

SEQ ID NO: 3459 - DNA, 75 bp, synthetic construct
  source 1..75: mol_type = other DNA
gtcgactgagtacccttcttgaggacagtagtttgcctctttatctcagccagttactgctgaaattacaacagc

SEQ ID NO: 3460 - DNA, 75 bp, synthetic construct
  source 1..75: mol_type = other DNA
gatatccgcttacagctacgcgatgatgcactggtactcaacgacaacggcgggcggagcattcactttgagccg

SEQ ID NO: 3461 - DNA, 75 bp, synthetic construct
  source 1..75: mol_type = other DNA
gtttcgactacgccgcgcagttccctaattcccctaacctgaaacactttggtctgggaaaaagagagataaccg

SEQ ID NO: 3462 - DNA, 75 bp, synthetic construct
  source 1..75: mol_type = other DNA
taattcccctaacctgaaacactttggtctgggaaaaagagagataaccgttaaggcactttcggaaaaatggtt

SEQ ID NO: 3463 - DNA, 75 bp, synthetic construct
  source 1..75: mol_type = other DNA
gtaccgatggctttattcgtaatattcattcccgcaatccctttgatgttatccgggctgatgtggtgatcagca

SEQ ID NO: 3464 - DNA, 75 bp, synthetic construct
  source 1..75: mol_type = other DNA
accttgtacacacacaaacggcctttgtgtggcgttttctggcactgagtgccggagaatctcaaatcatccacg

SEQ ID NO: 3465 - DNA, 75 bp, synthetic construct
  source 1..75: mol_type = other DNA
ggaaccaaagtcggggctctgcgggcgcgcgcactctggctgaaatgctgactcaaaacggcgtcccgatgagcc

SEQ ID NO: 3466 - DNA, 75 bp, synthetic construct
  source 1..75: mol_type = other DNA
tatgacccgctgcaggggcgatatatcactcaggatccgattggactgaaggggggatggaacctgtatggatat

SEQ ID NO: 3467 - DNA, 75 bp, synthetic construct
  source 1..75: mol_type = other DNA
catcagcataaaggaaccaccagtgccgtgcggcgggtggtggaaccgttcggattcctgatccgcattattgag

SEQ ID NO: 3468 - DNA, 75 bp, synthetic construct
  source 1..75: mol_type = other DNA
cggaagtggtcaacgggcatacggacgttatctgctcaaccagcattcgccacattctggctgtacgaaagagta

SEQ ID NO: 3469 - DNA, 75 bp, synthetic construct
  source 1..75: mol_type = other DNA
cgctggccttcctggcgaacgcgctgggttggttcagtcatcggcaatggctgcgcagtctgctcggcatgatcg

SEQ ID NO: 3470 - DNA, 75 bp, synthetic construct
  source 1..75: mol_type = other DNA
tcaccacatcgccaataccattatcgaacatcgccatgatgaagcctggctgcgccagcacatccacaatgacgc

SEQ ID NO: 3471 - DNA, 75 bp, synthetic construct
  source 1..75: mol_type = other DNA
tggccccggctggaaagcgccttctgatatccgcttacagatacgcgatgatgcactggtactcaacgacaacgg

SEQ ID NO: 3472 - DNA, 75 bp, synthetic construct
  source 1..75: mol_type = other DNA
caccgtttcagcggcctgccgctcggggaatacaccctgacggtgcgggcgataaacagctatggccagcagggt

SEQ ID NO: 3473 - DNA, 75 bp, synthetic construct
  source 1..75: mol_type = other DNA
tcgccgaacagctggagttgatgcgtagcgccttccgggttatccggacggtacgggaaaaacatgcctgtactc

SEQ ID NO: 3474 - DNA, 75 bp, synthetic construct
  source 1..75: mol_type = other DNA
gaaaaacggtggcgattgttgccagtgcagccatcagcagcggagatctggtgcaggtgggtgatgtttttgcgg

SEQ ID NO: 3475 - DNA, 75 bp, synthetic construct
  source 1..75: mol_type = other DNA
tttgaacacactgacgacaggctgacagagcacggtcaacagtgcccttatgtcaggccggagcgcagagaaata

SEQ ID NO: 3476 - DNA, 75 bp, synthetic construct
  source 1..75: mol_type = other DNA
tttgtgatgaagccgaccgacttttgcaactgaacattaatctgctccggcaaatggttgaggagccagatgtgt

SEQ ID NO: 3477 - DNA, 75 bp, synthetic construct
  source 1..75: mol_type = other DNA
ccggtcaggaactgcccattcgttggcttgctcaacacggcagcgaaaaaccagtaacgcacgtttcacgcgacg

SEQ ID NO: 3478 - DNA, 75 bp, synthetic construct
  source 1..75: mol_type = other DNA
ttttcataaacgttggtttgggagaaggctctgcattacctgttggtgtgcctgttccatggccttcagccacac

SEQ ID NO: 3479 - DNA, 75 bp, synthetic construct
  source 1..75: mol_type = other DNA
aatggttgtttgaaacattctcttctgtatgtttatctttttctggcggtaaagattccactgtacttttccatc

SEQ ID NO: 3480 - DNA, 75 bp, synthetic construct
  source 1..75: mol_type = other DNA
gaggtgctgcatacagaaggcggggccgggctgaagcgggtggtgaaaaaagaactggcggacggcagcgtcacg

SEQ ID NO: 3481 - DNA, 75 bp, synthetic construct
  source 1..75: mol_type = other DNA
ctaaaagacattgatgcccttataacggctgagatggtttcaggtaaaggcagagtgaatcgttctgatgttgtc

SEQ ID NO: 3482 - DNA, 75 bp, synthetic construct
  source 1..75: mol_type = other DNA
ctcgtgacgaggcagcatttattaacggtggcacggctggccttgataataccaaaaagtcatcagataaatcat

SEQ ID NO: 3483 - DNA, 75 bp, synthetic construct
  source 1..75: mol_type = other DNA
gtgaacaaaccacaatccctgcgccacgccctcaataaagcggtgccttatgtccgcaataacccggacaaactg

SEQ ID NO: 3484 - DNA, 75 bp, synthetic construct
  source 1..75: mol_type = other DNA
cccgcaatggtagccaccagtaagactgagtggggacgggcgttccgcgaccgtctggcggctaatggcaagaaa

SEQ ID NO: 3485 - DNA, 75 bp, synthetic construct
  source 1..75: mol_type = other DNA
tacgcagaacggcgacagtgccggatgcgtggtggtggctccgccagccgtgccgggtggtaagttccgcattct

SEQ ID NO: 3486 - DNA, 75 bp, synthetic construct
  source 1..75: mol_type = other DNA
atgcactctcaaatctgggttgtgagcacgctgcttatcagcatcgtgttaattgtactgaccatcgtgaagttc

SEQ ID NO: 3487 - DNA, 75 bp, synthetic construct
  source 1..75: mol_type = other DNA
cgacgcgccctggctgagctgaacagccagttgacggaaatccgcgcttcagctgccggaacggcgggggcattt

SEQ ID NO: 3488 - DNA, 75 bp, synthetic construct
  source 1..75: mol_type = other DNA
ccgatctggcctgggcaacaatgcacgcactgtttaacgaaccactgcagggcgagtccgccaataccagtaata

SEQ ID NO: 3489 - DNA, 75 bp, synthetic construct
  source 1..75: mol_type = other DNA
ctagcggatttagcccgactgcggtgataaatcgttctcaaacaaaacaggtgccaggccacgaaaaaatccgtg

SEQ ID NO: 3490 - DNA, 75 bp, synthetic construct
  source 1..75: mol_type = other DNA
gcgatgaccgcacactattaccgcctgcgggagtatgccatgcaacatccagaggctcacgccattctgcgtatt

SEQ ID NO: 3491 - DNA, 75 bp, synthetic construct
  source 1..75: mol_type = other DNA
accgacattgcgcagtcattcatggcaatccgtcgcgcaaccaccgccagtggcaaccgcccaacctatgaagcc

SEQ ID NO: 3492 - DNA, 75 bp, synthetic construct
  source 1..75: mol_type = other DNA
aagctgccggcattgccgcctgtctgatggcgtacagtcatcacgcctgtcgtacagagaattatgccatgacgg

SEQ ID NO: 3493 - DNA, 75 bp, synthetic construct
  source 1..75: mol_type = other DNA
cctgccgttcgccagccgctggcggaagacaaaacattgctgccgttttttagtaacgaacgggtgattcgtgct

SEQ ID NO: 3494 - DNA, 75 bp, synthetic construct
  source 1..75: mol_type = other DNA
caggtacgctgaatgattttctcggtgccatgacggaagatgatgtcatgccggaggcattgcgtcgttttgagg

SEQ ID NO: 3495 - DNA, 75 bp, synthetic construct
  source 1..75: mol_type = other DNA
agatatgactggtgggcttatgtatcagctcgcccccgcaatatcgcatttaactatatcgtgagggcggcgtga

SEQ ID NO: 3496 - DNA, 75 bp, synthetic construct
  source 1..75: mol_type = other DNA
tgatgatatttgttagttttggtgttatagctgattgcgaaatacaagctaaagatcatgattgttttactattt

SEQ ID NO: 3497 - DNA, 75 bp, synthetic construct
  source 1..75: mol_type = other DNA
acggcaataaccgcgccatccatctgccccgcgatttggattttgagcgggtgagagagctggagatcgtccgcg

SEQ ID NO: 3498 - DNA, 75 bp, synthetic construct
  source 1..75: mol_type = other DNA
ggagtaattaaaaaagttgatttgaacacaaatgaagcggaaattaaaataaaagaggggggggcagtgagtttt

SEQ ID NO: 3499 - DNA, 75 bp, synthetic construct
  source 1..75: mol_type = other DNA
aatcatgttctggttcggctcagagcgcaacgtgcggtggagtgatgactcccggcgagagtatgaatggtcaca

SEQ ID NO: 3500 - DNA, 75 bp, synthetic construct
  source 1..75: mol_type = other DNA
ggcgacaactggcggcacccaaacgcccgtcggggccaacgccaattgagttgctgaaacaggaatatgaacgcc

SEQ ID NO: 3501 - DNA, 75 bp, synthetic construct
  source 1..75: mol_type = other DNA
tgcggcggcaacagggcttgtacctcggcagtacagcacgggaggtaggacgacattgctgggaattagtaagcg

SEQ ID NO: 3502 - DNA, 75 bp, synthetic construct
  source 1..75: mol_type = other DNA
tagtcttaatgcgaaaatcagagtatttgagcagacaacaacttgctgatttaacaggggttccgtatggcacgc

SEQ ID NO: 3503 - DNA, 75 bp, synthetic construct
  source 1..75: mol_type = other DNA
gcgcgggcaggcttacggtactgtccttaacggtggtgaacaatggatacatgcaggcggcagtgcatccggaac

SEQ ID NO: 3504 - DNA, 75 bp, synthetic construct
  source 1..75: mol_type = other DNA
cctgtattgcattagctctgagtggtcagggttgggcggcagatattacagaaatagaaaccaccacaggtgaaa

SEQ ID NO: 3505 - DNA, 75 bp, synthetic construct
  source 1..75: mol_type = other DNA
tgctgcgctgacctgggtattccgttctttctggatgcaggaaacaaaaagctggtcttctggtttgttcgtgtc

SEQ ID NO: 3506 - DNA, 75 bp, synthetic construct
  source 1..75: mol_type = other DNA
acccgggaggaggcccggcatctggaagcgttcctggcagagcacggtggctggaaggcatttttgtggaagcca

SEQ ID NO: 3507 - DNA, 75 bp, synthetic construct
  source 1..75: mol_type = other DNA
caacaaatgaccagaatacagatttacaacgaaacgcactgaactgcgcaggatgtgaactgatttttgaggata

SEQ ID NO: 3508 - DNA, 75 bp, synthetic construct
  source 1..75: mol_type = other DNA
gaaatatcagaaactgcgggcagaactccatgaagcccggaaaaacattccgccccaaaatcctgtcgatgcaga

SEQ ID NO: 3509 - DNA, 75 bp, synthetic construct
  source 1..75: mol_type = other DNA
cgaaacatatggaacccggcggctccagacggagctggcagagaatggcatcatcgttggtcgtgaccgactggc

SEQ ID NO: 3510 - DNA, 75 bp, synthetic construct
  source 1..75: mol_type = other DNA
agattccacgctttcagcgtttaataaaaccctggttctttccggtaatcagtccggactgactgccgatcgcat

SEQ ID NO: 3511 - DNA, 75 bp, synthetic construct
  source 1..75: mol_type = other DNA
tgaatgccataaagagacaggagctcattgacgccgactttcagcgcctcagaaacctcatctggccggaggatg

SEQ ID NO: 3512 - DNA, 75 bp, synthetic construct
  source 1..75: mol_type = other DNA
cgcgggcaatatgaacacaaagcgcctggttatcactccggcaacggataccaccgacgcggtgatggaaagcga

SEQ ID NO: 3513 - DNA, 75 bp, synthetic construct
  source 1..75: mol_type = other DNA
ttacctgaaaccaaaaacggtcactcacgggatgttcctctgtccagacgtgcccgtaactttcttcagatgatg

SEQ ID NO: 3514 - DNA, 75 bp, synthetic construct
  source 1..75: mol_type = other DNA
cgggagcgagaacgggggcgacggtgacgcatttgtcagggaagaacgtgagattatgcgggtgatgcgtcaggc

SEQ ID NO: 3515 - DNA, 75 bp, synthetic construct
  source 1..75: mol_type = other DNA
aacggcttgatgaactggccctgattctggggcgtgagccggatatatccgggagtgccgcagagatagcgcagc

SEQ ID NO: 3516 - DNA, 75 bp, synthetic construct
  source 1..75: mol_type = other DNA
aagcaataccaggagggaagtcttactgctgtggctgccggagaacaggtcgttcctgcctctgaacttgctgcc

SEQ ID NO: 3517 - DNA, 75 bp, synthetic construct
  source 1..75: mol_type = other DNA
gagagtttgacatgagcgccgccacccacgcacagcaacctgcgctgtttacagccatgctgacacagtttcgtg

SEQ ID NO: 3518 - DNA, 75 bp, synthetic construct
  source 1..75: mol_type = other DNA
accgctggggtgcatgggctgcagcagataacagtggtgtggactggcagcctgttgctgcagggtttaaaggtt

SEQ ID NO: 3519 - DNA, 75 bp, synthetic construct
  source 1..75: mol_type = other DNA
gaacagctaagccaacagataagcaatacaagttaactgatggcagtggtatgcatcttcttgtccaccctaatg

SEQ ID NO: 3520 - DNA, 75 bp, synthetic construct
  source 1..75: mol_type = other DNA
gggctgcaaagcccactgacaaggcttataaactcactgacggggccggcatgttcctgctggttcatcctaatg

SEQ ID NO: 3521 - DNA, 75 bp, synthetic construct
  source 1..75: mol_type = other DNA
agcgtactgccggaatggccttccaaccgagttgacgaactcctgccatggaacgtagtactcaccaataaataa

SEQ ID NO: 3522 - DNA, 75 bp, synthetic construct
  source 1..75: mol_type = other DNA
gcgaatggcgtcgatccgggagacaaaaagaaaaatgataaggttgaacagagtaaagcacgaacctttaaagaa

SEQ ID NO: 3523 - DNA, 75 bp, synthetic construct
  source 1..75: mol_type = other DNA
tggccagccaggacaggaagcgcattcgtgaatacattgcggagcagaacctgatagcagccattgaactggacg

SEQ ID NO: 3524 - DNA, 75 bp, synthetic construct
  source 1..75: mol_type = other DNA
ctgcaaccggcctgtaatgaaatgtaccgcgtgctgaaaaaagatgcgctgatggtgagcttctatggctggaac

SEQ ID NO: 3525 - DNA, 75 bp, synthetic construct
  source 1..75: mol_type = other DNA
atgccggtaattaacacgcatcagaatatcgccgcctttctcgacatgctggccgtgtccgaagggacggcgaat

SEQ ID NO: 3526 - DNA, 75 bp, synthetic construct
  source 1..75: mol_type = other DNA
gttgatttcagaggtaagggaaaaggcgacgttgcgcctgtggaacaaactggcactgataccgtcagccgaaca

SEQ ID NO: 3527 - DNA, 75 bp, synthetic construct
  source 1..75: mol_type = other DNA
tttcacgcgaacgctgtcagttaatactgacccagctggttatggcggggctggcagattaccagttcggctgtt

SEQ ID NO: 3528 - DNA, 75 bp, synthetic construct
  source 1..75: mol_type = other DNA
aaagagggctggcagccgtttggtagtccggtggccataaccccttataccctgatgcaggcgattgcagcagaa

SEQ ID NO: 3529 - DNA, 75 bp, synthetic construct
  source 1..75: mol_type = other DNA
acttggcgtaataaaagacaaatcagagcttattgataacccctgtctcaatatacaaattggcgcgtggattct

SEQ ID NO: 3530 - DNA, 75 bp, synthetic construct
  source 1..75: mol_type = other DNA
ggtgtccgtgtggagcggagtctgaacgctgatcgtctgacctggaccgtttctgtatatcttcctgttcgtgca

SEQ ID NO: 3531 - DNA, 75 bp, synthetic construct
  source 1..75: mol_type = other DNA
aggcggcactgacttaccgttatggtaatgagcatcagcccgtcaccaccgctgatattctgacaccgcgacgcc

SEQ ID NO: 3532 - DNA, 75 bp, synthetic construct
  source 1..75: mol_type = other DNA
tgtcactggagattcatccgcacatgttacgccattcgtgtggttttgctttggcgaatatgggaatagatacgc

SEQ ID NO: 3533 - DNA, 75 bp, synthetic construct
  source 1..75: mol_type = other DNA
ggaggatttgcagagcctggtgggtgccacggtggtccgccgccgggtgtatgcgcgttttctggatgcggtgaa

SEQ ID NO: 3534 - DNA, 75 bp, synthetic construct
  source 1..75: mol_type = other DNA
atggtctggcgtacctggaattttgaggacggtgccgggtactggatgaaccatgtcatcagggatttcgggatt

SEQ ID NO: 3535 - DNA, 75 bp, synthetic construct
  source 1..75: mol_type = other DNA
cgatcactccacgatttaccgctgggttcagcgttatgcgcctgaaatggaaaaacggctgcgctggtactggcg

SEQ ID NO: 3536 - DNA, 75 bp, synthetic construct
  source 1..75: mol_type = other DNA
atgaaactggccctgacgctggaggcagacagcgttaacgtgcaggcgctgaacatggggcgcattgtcgttgac

SEQ ID NO: 3537 - DNA, 75 bp, synthetic construct
  source 1..75: mol_type = other DNA
cccgttaacagttgacccgtcaaatattgacccctcaacggttgacccgtcaaattttgatggatcaactgttga

SEQ ID NO: 3538 - DNA, 75 bp, synthetic construct
  source 1..75: mol_type = other DNA
ccattcaactggatacccccatcatgcgcggtaaaacagaaattaccgaaattgtgttgcgtaaaccgcagtctg

SEQ ID NO: 3539 - DNA, 75 bp, synthetic construct
  source 1..75: mol_type = other DNA
atgagcaagaaaaaagggaaaacaccgcaacctgcggcaaaaacaatgaccgccagcgccccgaaaatggaggca

SEQ ID NO: 3540 - DNA, 75 bp, synthetic construct
  source 1..75: mol_type = other DNA
acgccgcccctggatgatgatctgatagtgaatttatgcaccagtgaacatctgctggttcatcatccgatgctg

SEQ ID NO: 3541 - DNA, 75 bp, synthetic construct
  source 1..75: mol_type = other DNA
gcttcaactgttcgacgcactgcctgagtcagagcaaaaggctctgttgtcagagatgcgtgctcgagttgagaa

SEQ ID NO: 3542 - DNA, 75 bp, synthetic construct
  source 1..75: mol_type = other DNA
ctggctttaggtgtttatcctgacgtgtcgcttgccgatgcacggactcgccgtgacgacgctcgtaatttgttg

SEQ ID NO: 3543 - DNA, 75 bp, synthetic construct
  source 1..75: mol_type = other DNA
gttttattgattttcttatccggcttttgattacagcgattgtcatttccccggtaattatctggtcgtgggata

SEQ ID NO: 3544 - DNA, 75 bp, synthetic construct
  source 1..75: mol_type = other DNA
gatgtggagattgcagcagccacacttccgatggattttaatatttatgaaattccgggcagcgtttatcgtcgc

SEQ ID NO: 3545 - DNA, 75 bp, synthetic construct
  source 1..75: mol_type = other DNA
gcatggctacgaagaagagaagtggagaagaaataaatgaccgacaaatattatgcgggatgggaattaaactac

SEQ ID NO: 3546 - DNA, 75 bp, synthetic construct
  source 1..75: mol_type = other DNA
gtgatgcctttcccgggaatggattgccagtgcggggactgtggagcttaattccggtgttggtggcctttccgt

SEQ ID NO: 3547 - DNA, 75 bp, synthetic construct
  source 1..75: mol_type = other DNA
aacggcggggcatttatggcacccgaaccggatgacgatgatgacgaaacatgggtactgttcaatgccatgaac

SEQ ID NO: 3548 - DNA, 75 bp, synthetic construct
  source 1..75: mol_type = other DNA
acccgcattcacaatacatttttctcccaaaagcaacaactcccgttcactcccggtggcactcactgcccggaa

SEQ ID NO: 3549 - DNA, 75 bp, synthetic construct
  source 1..75: mol_type = other DNA
catgaaggtgtgcccgccgctgtggcgcacagggctgcgccagaacttccgtatcttccagaatgaggacatcga

SEQ ID NO: 3550 - DNA, 75 bp, synthetic construct
  source 1..75: mol_type = other DNA
gctctttactcattcgtttacaacgtgggtgctggcaatttcagaacatcgacgcttcttcgcaaaataaaccag

SEQ ID NO: 3551 - DNA, 75 bp, synthetic construct
  source 1..75: mol_type = other DNA
aggttccccgccagttgcgacagtcacgccatcgtcgtccgttaccggagcatctgccccgcgaaataaaccgcc

SEQ ID NO: 3552 - DNA, 75 bp, synthetic construct
  source 1..75: mol_type = other DNA
tgcttgccgggatgacatccaccgaatatgccgactggcaccgtttttaccgcacgcattattttcaggataccc

SEQ ID NO: 3553 - DNA, 75 bp, synthetic construct
  source 1..75: mol_type = other DNA
catccgctgacgaaaaaccggggctatgacgtgatagtcaccggactggacgggaagccggaaattttcaccgac

SEQ ID NO: 3554 - DNA, 75 bp, synthetic construct
  source 1..75: mol_type = other DNA
ttctgctcagggtgttaatgaaattatcagtaagattggtgccgatgctgtggcattgcctgagaatttccgcat

SEQ ID NO: 3555 - DNA, 75 bp, synthetic construct
  source 1..75: mol_type = other DNA
atggcaacaaccgcgccatccgtctgcctcgtgatctggattttgagggggtgagcgagctcgagatcgtccggg

SEQ ID NO: 3556 - DNA, 75 bp, synthetic construct
  source 1..75: mol_type = other DNA
ctcattggcacgtttcgcaacctgttctcattgcggacaccttttccagcctcgtttggaaagtttcattgccag

SEQ ID NO: 3557 - DNA, 75 bp, synthetic construct
  source 1..75: mol_type = other DNA
atggtctggcgtacctggaattttgaggacggtgccgggtactggatgaaccatgtcatccgtgatttcgggatc

SEQ ID NO: 3558 - DNA, 75 bp, synthetic construct
  source 1..75: mol_type = other DNA
aaagttattccactgtcaccaggccatgcctacgggatgtttatggaacgttttaacgagttatcggagttacgc

SEQ ID NO: 3559 - DNA, 75 bp, synthetic construct
  source 1..75: mol_type = other DNA
accttattgccgtacaggcaggaaacatcgtcgtttataactatgatggtgagacacgggaatatatttccgaat

SEQ ID NO: 3560 - DNA, 75 bp, synthetic construct
  source 1..75: mol_type = other DNA
ccggatatatcgtgggatggtgggtatcatcgtccatggaaacgacattcgtgctggatgcactggagcaggcgt

SEQ ID NO: 3561 - DNA, 75 bp, synthetic construct
  source 1..75: mol_type = other DNA
ttggcggtaaaaatgtggcctggctgcactctgaagtcaccgcatggatggccggacgcattgccggacgcaaac

SEQ ID NO: 3562 - DNA, 75 bp, synthetic construct
  source 1..75: mol_type = other DNA
gccggacagtgaagaaaacaccggtgggcaatggatacagaatggcgggatagccggaaacaccactgtcaccac

SEQ ID NO: 3563 - DNA, 75 bp, synthetic construct
  source 1..75: mol_type = other DNA
atgcaagctgttttttcttccccgtctcccgcccctgtgacgccactgatgccgctgccggacatcacgcaggag

SEQ ID NO: 3564 - DNA, 75 bp, synthetic construct
  source 1..75: mol_type = other DNA
aataattgagccagttactgaattgtataccgacgttgtatgggcgtcgttcaacacactgcacaataaaattaa

SEQ ID NO: 3565 - DNA, 75 bp, synthetic construct
  source 1..75: mol_type = other DNA
gttgttccgggtataggtaatgtcgccggggctattggtggtgggcttattggtcttgttggggggcttggattc

SEQ ID NO: 3566 - DNA, 75 bp, synthetic construct
  source 1..75: mol_type = other DNA
ggagaaagcgtcagtggaggaaatcagtctgccactgctgacgaaaatgtcttccgaacgcacgctggcagtcca

SEQ ID NO: 3567 - DNA, 75 bp, synthetic construct
  source 1..75: mol_type = other DNA
atctgtcgtggtgccacaatggtggatggtaagcccgtcataccgggaatgaagctgtcgaaggaaaaatgcgac

SEQ ID NO: 3568 - DNA, 75 bp, synthetic construct
  source 1..75: mol_type = other DNA
atggcgggactggagcgtgaagagttccgggtgctgtatctgaacaaccagaatcagttgattgccggtgaaacc

SEQ ID NO: 3569 - DNA, 75 bp, synthetic construct
  source 1..75: mol_type = other DNA
acgcagggcgaagccgggctgaagcgggtggtgaaaaaggaacacgcggacggcagcgtcacgcagagtcagttt

SEQ ID NO: 3570 - DNA, 75 bp, synthetic construct
  source 1..75: mol_type = other DNA
gtttggcaaggaaaaaggcaggaaacattatcacgtgatattactgctcaacaaagatacctggtgctcgccagg

SEQ ID NO: 3571 - DNA, 75 bp, synthetic construct
  source 1..75: mol_type = other DNA
tgccgagcctgaatacacccaaaaacgggagtctttaaaggtgggtaaaattggtgctgttaataaaaacagtac

SEQ ID NO: 3572 - DNA, 75 bp, synthetic construct
  source 1..75: mol_type = other DNA
tctgtggcaggaagtgctcaatggtgatggagaggatgacgataccctgtcggtggtggcgaaaacccgccgtaa

SEQ ID NO: 3573 - DNA, 75 bp, synthetic construct
  source 1..75: mol_type = other DNA
gtgacgcaggccgacaaaacggagccctgccatgaatgggatatggccggcattcagccttctcccgcacaggca

SEQ ID NO: 3574 - DNA, 75 bp, synthetic construct
  source 1..75: mol_type = other DNA
caatgtcaccacgattattatggggagcggtactgcacacactgccagaccggaggattcagtattccccggaca

SEQ ID NO: 3575 - DNA, 75 bp, synthetic construct
  source 1..75: mol_type = other DNA
tgctgcacatgcagccgaagtttataataaagacggcaacaaattagatctgtatggcaaagttgatggcctgca

SEQ ID NO: 3576 - DNA, 75 bp, synthetic construct
  source 1..75: mol_type = other DNA
acagaccgcgccgcataacgtgcccaccagcaacgccagggcacgggcaaacatccagaagctgaaaaccatgat

SEQ ID NO: 3577 - DNA, 75 bp, synthetic construct
  source 1..75: mol_type = other DNA
aacgattatgatgaagacgactttaaaaaacccgtccgcgtcaatttgcccgttgttgacgaccttccgccagaa

SEQ ID NO: 3578 - DNA, 75 bp, synthetic construct
  source 1..75: mol_type = other DNA
atcatgtcggtgctggcggatggggtgctggtctgcggcattgtggtattgctgtggccggtgataaaaagaaac

SEQ ID NO: 3579 - DNA, 75 bp, synthetic construct
  source 1..75: mol_type = other DNA
ttcctcgccagaaggtggcgattatctatgatgttggtgtgtcaactttgtataagaggtttcctgcaggggata

SEQ ID NO: 3580 - DNA, 75 bp, synthetic construct
  source 1..75: mol_type = other DNA
atgagtcggaaatacctcattcgtatcactgagctggaaaggctactctctgagcaggctgaagccctccgtcag

SEQ ID NO: 3581 - DNA, 75 bp, synthetic construct
  source 1..75: mol_type = other DNA
gaagggataccttcagaagcatggaactatgctgcgggaagattgtgtaattggagtccaaataatcttagtgat

SEQ ID NO: 3582 - DNA, 75 bp, synthetic construct
  source 1..75: mol_type = other DNA
tcacacttacccgacgttatggcgtcagtctcattcatctggatgccagcgctgaatgcctgccgggtttaccca

SEQ ID NO: 3583 - DNA, 75 bp, synthetic construct
  source 1..75: mol_type = other DNA
atgaataaagctgtattaaatagcgaactcattgccataaaagcgggagatattaccgtttataattatgatggt

SEQ ID NO: 3584 - DNA, 75 bp, synthetic construct
  source 1..75: mol_type = other DNA
taacatgacgctggaaaatccatcgccagagctgctcacgctgttgatccgtgaactgaccgggaggggacgatg

SEQ ID NO: 3585 - DNA, 75 bp, synthetic construct
  source 1..75: mol_type = other DNA
ccctttaacatccggatggtcagggagacggcggacagcaccacggaccagctgcagaataagacgctgtggtcg

SEQ ID NO: 3586 - DNA, 75 bp, synthetic construct
  source 1..75: mol_type = other DNA
agatcatcagtattctccgcgaagccgaagctggggtacccgcccgtgaactctgccgcaagcatgccatttccg

SEQ ID NO: 3587 - DNA, 75 bp, synthetic construct
  source 1..75: mol_type = other DNA
tggcctgttcggtgtgccccggcggggtgacgtccggccatccggtcaatccgctgctcggtgcaaaggtccttc

SEQ ID NO: 3588 - DNA, 75 bp, synthetic construct
  source 1..75: mol_type = other DNA
atctgccgcggtgccatcctggtggatggcaaacctgtcgttccgggcatgaagttgtcgaaggaaaaatgcgac

SEQ ID NO: 3589 - DNA, 75 bp, synthetic construct
  source 1..75: mol_type = other DNA
tacggcccacagaacaaatggaatgaagatgccaaaaaaaatgcagatatcttgtttggcgcatcagaacaatct

SEQ ID NO: 3590 - DNA, 75 bp, synthetic construct
  source 1..75: mol_type = other DNA
tggatatccgggtgccggaccatctgatagtcggtggcagccaggttttctcctttgcggaacacggtctgcttt

SEQ ID NO: 3591 - DNA, 75 bp, synthetic construct
  source 1..75: mol_type = other DNA
gcgtaacgaggggctacattctctcaatgatttttatttgttggcagaacggaaaacattacgttttgtccatac

SEQ ID NO: 3592 - DNA, 75 bp, synthetic construct
  source 1..75: mol_type = other DNA
ggcaaatgaaacgggaaatgttgagtcagtgttatacaactaaatggcgagatattcccctggccaggctgggtt

SEQ ID NO: 3593 - DNA, 75 bp, synthetic construct
  source 1..75: mol_type = other DNA
gcgagcgtggagcactgttgtacgggctgatcggcacctgccgtctgaacggtatcgatccggaagcgtatctgc

SEQ ID NO: 3594 - DNA, 75 bp, synthetic construct
  source 1..75: mol_type = other DNA
cgggcacgttttgatttttatcaggcgcgatcagcctggtcacgggcagagtggattggtgccggaagaatggcc

SEQ ID NO: 3595 - DNA, 75 bp, synthetic construct
  source 1..75: mol_type = other DNA
tcaaagtcatcgcaggtcagtatcgtttatgaagcggggccctgtggttatggactttatcgtcggctggtgaaa

SEQ ID NO: 3596 - DNA, 75 bp, synthetic construct
  source 1..75: mol_type = other DNA
ccaaccaatcaggaggtggcaaccatgctgggataccgttcagtgaatgcagcggtggagcatcttcgcgcactg

SEQ ID NO: 3597 - DNA, 75 bp, synthetic construct
  source 1..75: mol_type = other DNA
ttttcgtgggtggacagcagggacagtgaacagtgtgactggttatggaacgccatgcaggtccggtgtgtggga

SEQ ID NO: 3598 - DNA, 75 bp, synthetic construct
  source 1..75: mol_type = other DNA
gatgaacgaggtacaacaaataacactcatattatcaaccatggccagcagaatgttcatggcggggtatctaat

SEQ ID NO: 3599 - DNA, 75 bp, synthetic construct
  source 1..75: mol_type = other DNA
gggttcagccctggcagccggtggtttttctgccaccacgatgctgttttcactgggggccagcatgattctggg

SEQ ID NO: 3600 - DNA, 75 bp, synthetic construct
  source 1..75: mol_type = other DNA
tgattaaagaaatcaaagagcgtatcagcagcctggacgttcgagacaatattgaacgccgggcttatgaaattg

SEQ ID NO: 3601 - DNA, 75 bp, synthetic construct
  source 1..75: mol_type = other DNA
tctgcgcggacaacagttcagttacagcggcgtgcgtcttcccctgcccgtctcactccatgtacgcgatatgac

SEQ ID NO: 3602 - DNA, 75 bp, synthetic construct
  source 1..75: mol_type = other DNA
tgctcacgatacgggtcacggatgaggaacatgcgcggctgctggcacgttgtgagggaaaacaacttgcgtcat

SEQ ID NO: 3603 - DNA, 75 bp, synthetic construct
  source 1..75: mol_type = other DNA
gcactggaagcttcggcatgtatttgcggcctgttcttaacagaccacaaatataatctggatgtgtacagttat

SEQ ID NO: 3604 - DNA, 75 bp, synthetic construct
  source 1..75: mol_type = other DNA
cgggaagttttactggatgaggtgtctcagcggaatatcccgctctctcataaaaaactgcgcagggcactgaag

SEQ ID NO: 3605 - DNA, 75 bp, synthetic construct
  source 1..75: mol_type = other DNA
cgacagatgatgatgagctgccggaagtcaccggacctgcgtggatagtcgacaaggtggcgcattacggtggat

SEQ ID NO: 3606 - DNA, 75 bp, synthetic construct
  source 1..75: mol_type = other DNA
cttatcagcagcgcctttaaggttatcgaaacacaacgtccgaaactggcctgttgccggtgcgaccatatcgtg

SEQ ID NO: 3607 - DNA, 75 bp, synthetic construct
  source 1..75: mol_type = other DNA
gattcctgttattaccaccgaacttttggcgcagctttacggcactgagccggtgcgtattcgccagaatcatca

SEQ ID NO: 3608 - DNA, 75 bp, synthetic construct
  source 1..75: mol_type = other DNA
aaaggaacttcctgacccatagtgaaatcgaatcactccttaaagcagcaaataccgggcctcatgcagcacgta

SEQ ID NO: 3609 - DNA, 75 bp, synthetic construct
  source 1..75: mol_type = other DNA
ggatgtgtgaacgagtatctggtgctgccagtggggctctttatgccaatgaaagcggggcctattttgccctgc

SEQ ID NO: 3610 - DNA, 75 bp, synthetic construct
  source 1..75: mol_type = other DNA
cctgttcatcttccgcggacgccggggtgaccagataaaagtgttgtgggctgacagtgacggactgtgcctctt

SEQ ID NO: 3611 - DNA, 75 bp, synthetic construct
  source 1..75: mol_type = other DNA
aatatgctgaaaggcgggatttccggtcgcagtgcaaaaggaaaacgtatccatacccgggccattcacagcatt

SEQ ID NO: 3612 - DNA, 75 bp, synthetic construct
  source 1..75: mol_type = other DNA
atggagccatgaagaagaccaccgcaatgagactgtttactcaatcgaaaatggcgcagctgttacagtggatta

SEQ ID NO: 3613 - DNA, 75 bp, synthetic construct
  source 1..75: mol_type = other DNA
atatttctattatccccgattacagacaagcctggaaagtggaacataaattatcggatattctattgttgacta

SEQ ID NO: 3614 - DNA, 75 bp, synthetic construct
  source 1..75: mol_type = other DNA
acaaaggcaacaaaactccggcattcagcatcagtattgaaggcagggatatcaccactgtgctggacaaccgcc

SEQ ID NO: 3615 - DNA, 75 bp, synthetic construct
  source 1..75: mol_type = other DNA
ggaaagtgcacctgacgccagctcagttatccatgctactggaggggatcgcatggcaacatcccaaacggacag

SEQ ID NO: 3616 - DNA, 75 bp, synthetic construct
  source 1..75: mol_type = other DNA
cgatataccggaaacaacgcgcggcgctctttactcgttcgtttacaacgtgggcgctggcaatttcagaacatc

SEQ ID NO: 3617 - DNA, 75 bp, synthetic construct
  source 1..75: mol_type = other DNA
aaggtaaccggagtgaatgccggccggttaggcattgcactgctggacaccgatggcagcagtctgctgaaaccc

SEQ ID NO: 3618 - DNA, 75 bp, synthetic construct
  source 1..75: mol_type = other DNA
tggcctcagtggagctgaccattgacaccacaacggtgatggcgacgcaggattacgttgatgacaaaattgcag

SEQ ID NO: 3619 - DNA, 75 bp, synthetic construct
  source 1..75: mol_type = other DNA
cagctccggctgcgccattatttcctgtgctgaaccagcatgagcgatttttacgtcttcccgaggtgatgcatt

SEQ ID NO: 3620 - DNA, 75 bp, synthetic construct
  source 1..75: mol_type = other DNA
cagagcgttaaaagtggcgggctggcaacaggaaccatcatcaacaccggcgcagaaggcggcccggattctgac

SEQ ID NO: 3621 - DNA, 75 bp, synthetic construct
  source 1..75: mol_type = other DNA
taaaattttcgttacgccagatttcgcgccgctgctgatgacgattcgtgtacaaaacggcaaagcggaggccat

SEQ ID NO: 3622 - DNA, 75 bp, synthetic construct
  source 1..75: mol_type = other DNA
ttgttcggccagagttcagagaaaaagcgtcataagcttgaaaatcagatccgacaggcagaaaaacgactgtcg

SEQ ID NO: 3623 - DNA, 75 bp, synthetic construct
  source 1..75: mol_type = other DNA
ctgaaccagtcactctcttcgctcttttccctcgatctctctctggtcagccagcagtttctctcccttgaattt

SEQ ID NO: 3624 - DNA, 75 bp, synthetic construct
  source 1..75: mol_type = other DNA
tggcccgttcaatggacatcgatatttacaatccacatccggcacacgccaaacgcattgaagaaatcgtttcag

SEQ ID NO: 3625 - DNA, 75 bp, synthetic construct
  source 1..75: mol_type = other DNA
actgggcggtcactacgggcggcttcaacagtgaaacagtacaggacgtcatgctgggagcggtggaacgccgct

SEQ ID NO: 3626 - DNA, 75 bp, synthetic construct
  source 1..75: mol_type = other DNA
attttcaaacatccggccgggaaattattctgggctttaacggatgaaagcaataaagagcaaccggacgttatt

SEQ ID NO: 3627 - DNA, 75 bp, synthetic construct
  source 1..75: mol_type = other DNA
atgctcgaatgacagcacatctcccgaacaaagatgagtcttacgaatgtttaacaaaaatacagcatgaactgc

SEQ ID NO: 3628 - DNA, 75 bp, synthetic construct
  source 1..75: mol_type = other DNA
cttcaacagccacaacgaaggctggcgaagccactgaacaggccagcgcagcagcgaggtctgcttccgcagcga

SEQ ID NO: 3629 - DNA, 75 bp, synthetic construct
  source 1..75: mol_type = other DNA
gctgacattctgacaccacgacgccgggaggattacggtaaagacctgtggagcgcatatcagaccatccaggag

SEQ ID NO: 3630 - DNA, 75 bp, synthetic construct
  source 1..75: mol_type = other DNA
tgcttcccgacgacaatcacgaccgcccctggtgggggctgccctgcaccgtgacgccctgtttcggggcacgtc

SEQ ID NO: 3631 - DNA, 75 bp, synthetic construct
  source 1..75: mol_type = other DNA
tgacaaacagacgggggagatgcgggagcagacagaatggcatcgcgtggtgctgttcggcaagctcgcggaagt

SEQ ID NO: 3632 - DNA, 75 bp, synthetic construct
  source 1..75: mol_type = other DNA
ccgaactgttcccgatgtcgaaaattaacgacgccatccagcatgtgcgcgacggtaaggcgcgttaccgcgtgg

SEQ ID NO: 3633 - DNA, 75 bp, synthetic construct
  source 1..75: mol_type = other DNA
gtgcgcattggtgcccccaccggcgtggcctgttcggtgtgccccggcggagtgacgtccggccatccggtcaat

SEQ ID NO: 3634 - DNA, 75 bp, synthetic construct
  source 1..75: mol_type = other DNA
acggcaaaacagattgcagatgccacaggaaagaaaaacatggtgtcgcactggttcagtgccagtcagtggcag

SEQ ID NO: 3635 - DNA, 75 bp, synthetic construct
  source 1..75: mol_type = other DNA
cgccgaaaaaaacgccgtttttctgtactgtttgttgactgggaggctcagtatcagtgtaccattgagcatgtc

SEQ ID NO: 3636 - DNA, 75 bp, synthetic construct
  source 1..75: mol_type = other DNA
ctgtgggacatgctgactcacccgcgctacggcatgggaaaacgtctgggggcggcggatgtggacaagtgggcg

SEQ ID NO: 3637 - DNA, 75 bp, synthetic construct
  source 1..75: mol_type = other DNA
gatacgcacacgccagaaattcaggctacacgcggtcgcaagggcggttctaagtctaagcgcggcacagtagct

SEQ ID NO: 3638 - DNA, 75 bp, synthetic construct
  source 1..75: mol_type = other DNA
gtaccgatgcgtggtcatatccggttctgcggcttaaacgcctggggctgtcaaaaacgttccgtcgtctggttg

SEQ ID NO: 3639 - DNA, 75 bp, synthetic construct
  source 1..75: mol_type = other DNA
aagagacggaggccttcctgcgctctgcactggcacgtgccgaggaaaagatcgaagaggaggagcgggaaatag

SEQ ID NO: 3640 - DNA, 75 bp, synthetic construct
  source 1..75: mol_type = other DNA
tcagccaactgcagatgatggtggccacgctgaaaatcccactggagcgcagaaacaaacgaaccggaagaatgg

SEQ ID NO: 3641 - DNA, 75 bp, synthetic construct
  source 1..75: mol_type = other DNA
catggctgggtcgtaaacatcgtgacaatactctcacgctgaaacgcttttcatcgggcgtcggtttctggtgcc

SEQ ID NO: 3642 - DNA, 75 bp, synthetic construct
  source 1..75: mol_type = other DNA
acgaagcaatcagaaataacgccatagacgccattctctcactacccatcgacgacaagtcaccccacgaagtcc

SEQ ID NO: 3643 - DNA, 75 bp, synthetic construct
  source 1..75: mol_type = other DNA
gagcttccggattcgtaggaacccgactacttgaaacggcaattgctgactttaatatcaagaacctggacaaac

SEQ ID NO: 3644 - DNA, 75 bp, synthetic construct
  source 1..75: mol_type = other DNA
ttgatggcaacggacgtctgacgggcgcccgtactgcacaggccgcaccttatgctcactacacctgccacttgt

SEQ ID NO: 3645 - DNA, 75 bp, synthetic construct
  source 1..75: mol_type = other DNA
tccggcctggatgttacagcttctgcgtaaagcccgggaccgcattatccacctgctgatcacactgtgggagcg

SEQ ID NO: 3646 - DNA, 75 bp, synthetic construct
  source 1..75: mol_type = other DNA
cagccgtgctgacactggattctgcccgtttttctgaagaggcagcgcgggtaaaaaaagagctgggtgaaacca

SEQ ID NO: 3647 - DNA, 75 bp, synthetic construct
  source 1..75: mol_type = other DNA
tgtaccaaagcgcggctataaattaatggtgccggttatctggtacagcgaagaagagggagaggaaataatgct

SEQ ID NO: 3648 - DNA, 75 bp, synthetic construct
  source 1..75: mol_type = other DNA
ggcactggctgaggcctgcccggcacttgttgacgcggcactggcagacgacgcagccgctgtttttgagcctgc

SEQ ID NO: 3649 - DNA, 75 bp, synthetic construct
  source 1..75: mol_type = other DNA
gtatctggctggttgccggtatcaccgatatgcgaaatggctttaacggcctggcctcaaaagttcagaacgtcc

SEQ ID NO: 3650 - DNA, 75 bp, synthetic construct
  source 1..75: mol_type = other DNA
caagacatatcaaacctgatgacaaaccattgccccatgggggaattaccggactgacccttcatccttcttcag

SEQ ID NO: 3651 - DNA, 75 bp, synthetic construct
  source 1..75: mol_type = other DNA
gctttttgaggactctgcagcagcagcacttttcgatgcttcactggcctttgttgatgccgttcctgcgctgga

SEQ ID NO: 3652 - DNA, 75 bp, synthetic construct
  source 1..75: mol_type = other DNA
atgcagacaatcatctatcagataacccccagcaaatggtgtacggagagagtcctcattgcatcaacagggcta

SEQ ID NO: 3653 - DNA, 75 bp, synthetic construct
  source 1..75: mol_type = other DNA
ttaccctggtcagttccactctggtcctttcagggtgtggtgcgatgagcacagcaatcaagaagcgtaatcttg

SEQ ID NO: 3654 - DNA, 75 bp, synthetic construct
  source 1..75: mol_type = other DNA
ggcagcactgatgcagcaaccggacaaatctctggcactgctggcatggacgctctgcctgaatgtgtttggcag

SEQ ID NO: 3655 - DNA, 75 bp, synthetic construct
  source 1..75: mol_type = other DNA
catactgctggcgctgattattgtggtcctgctgactactgtcagcgtcagtgtgtgtatactgtgtagctggtg

SEQ ID NO: 3656 - DNA, 75 bp, synthetic construct
  source 1..75: mol_type = other DNA
atcagagcgtcagcttcggtgatggtcagaacagttaccatattgtggatcgtaatgaacacagttcatctgatc

SEQ ID NO: 3657 - DNA, 75 bp, synthetic construct
  source 1..75: mol_type = other DNA
aagctttacgtcttcactttgaagaacatttaccacggattgtggccggacgtcgcctgggcgtaccaaaatcaa

SEQ ID NO: 3658 - DNA, 75 bp, synthetic construct
  source 1..75: mol_type = other DNA
cggtaaaaggtgccggtaccaccctgtgggtttataacggtcagggtgacgcctatgcaaacccgttgtcagacg

SEQ ID NO: 3659 - DNA, 75 bp, synthetic construct
  source 1..75: mol_type = other DNA
tcatgcggatccgctggcgttcgaagaaaagcatggttcccaggttgatttaatttttcgttttcttgatcacgc

SEQ ID NO: 3660 - DNA, 75 bp, synthetic construct
  source 1..75: mol_type = other DNA
cctggctggatgtgtgcaccacatccacagacagataccactgaacgcaccgataacctggctgatgccgcctga

SEQ ID NO: 3661 - DNA, 75 bp, synthetic construct
  source 1..75: mol_type = other DNA
atgattaagtcggttattgccggtgcggtagctatggcagtggtgtcttttggtgtaaatgctgctccaactatt

SEQ ID NO: 3662 - DNA, 75 bp, synthetic construct
  source 1..75: mol_type = other DNA
cgccggacgtcaggagtgggaacgcaggcttgccgcgatggtgagccgcaggcggggaaaaccaggatttaaact

SEQ ID NO: 3663 - DNA, 75 bp, synthetic construct
  source 1..75: mol_type = other DNA
actgatagttgaacgtaccatggcagggctggctgcagctcgtgccaaaggcagagtaggtggacgccgtcctaa

SEQ ID NO: 3664 - DNA, 75 bp, synthetic construct
  source 1..75: mol_type = other DNA
tgaatgaatgcattcgtgcggagcagtcggccagcgtggtgctctgggaaatcgacctgaccgaggtaggcgggg

SEQ ID NO: 3665 - DNA, 75 bp, synthetic construct
  source 1..75: mol_type = other DNA
tgaaatggcaatcgactggcgatgtcggcatcagtagcgcaactcttgcctcaatcgcatgtggactgaaaaaga

SEQ ID NO: 3666 - DNA, 75 bp, synthetic construct
  source 1..75: mol_type = other DNA
atgccatgacggtccattattatcggttgcgggattacgccctgcaacatccggaatgcaacgccattatgcgca

SEQ ID NO: 3667 - DNA, 75 bp, synthetic construct
  source 1..75: mol_type = other DNA
cccgagtgctgacctcaaagtatgcagagcacataccgctgtatcgccagtcggagatctatgcccgccagggtg

SEQ ID NO: 3668 - DNA, 75 bp, synthetic construct
  source 1..75: mol_type = other DNA
ccgggaaaatatcatcattcggctggatgatcacatccgctccgttcagggcaaagcgtgctatgaagatgagat

SEQ ID NO: 3669 - DNA, 75 bp, synthetic construct
  source 1..75: mol_type = other DNA
cactgacggcacttacttctgcgccaccaacgtggcgcgagtaaatcttatccgacaggtacaggagccacgcag

SEQ ID NO: 3670 - DNA, 75 bp, synthetic construct
  source 1..75: mol_type = other DNA
cagcgcacgcagtatgaagtgtatgactaccccggacgtttcaagggtgcccacgggcagaactttgcccgctgg

SEQ ID NO: 3671 - DNA, 75 bp, synthetic construct
  source 1..75: mol_type = other DNA
aagaactgcttcagggggagctgccgttttctgtttccgtgctgatttacgatttgcgttgtccgacggtgttat

SEQ ID NO: 3672 - DNA, 75 bp, synthetic construct
  source 1..75: mol_type = other DNA
atggacgtgacaaacgatgattacatccgtctgttgtcggcactgttgccccccggtccggcgtggtcagccagc

SEQ ID NO: 3673 - DNA, 75 bp, synthetic construct
  source 1..75: mol_type = other DNA
gctataagccgcaactggctgaaggcagcgggcgtacccagaccgtgcgtatggtgttgattaccagcagcacgg

SEQ ID NO: 3674 - DNA, 75 bp, synthetic construct
  source 1..75: mol_type = other DNA
ttatcatgccgtattcgacagcagatggcggcaataaagggattgatatctcagctccacggggtacacctattt

SEQ ID NO: 3675 - DNA, 75 bp, synthetic construct
  source 1..75: mol_type = other DNA
cggcagaagcacagcgccagtcactgattgatgcagcaatggcttccattagtctgattcagctgaaattacagg

SEQ ID NO: 3676 - DNA, 75 bp, synthetic construct
  source 1..75: mol_type = other DNA
catctgcccgtatccgcaccagtcgtccggaaaatgattcaaacaccgtgcggcaaaagtattaccagtgtaaca

SEQ ID NO: 3677 - DNA, 75 bp, synthetic construct
  source 1..75: mol_type = other DNA
gcaatgacccgaactttgcgacaacaatgacaaatgcgctggcagggaaacagccacttgatgcaactttaaccg

SEQ ID NO: 3678 - DNA, 75 bp, synthetic construct
  source 1..75: mol_type = other DNA
atgggcaaaggtggcggcagggcgcacacgcctcgagaggcgaaggataatctcaaatccacgcagatgatgagt

SEQ ID NO: 3679 - DNA, 75 bp, synthetic construct
  source 1..75: mol_type = other DNA
ctgggcagcatgggagaacgctgggccggcaggggggctgaacagctgggactgcagggcagtgtcgataaggat

SEQ ID NO: 3680 - DNA, 75 bp, synthetic construct
  source 1..75: mol_type = other DNA
cgccagcgccccgaaaatggaggcattcacctttggtgagccggtgccggtactcgaccgccgtgacattctgga

SEQ ID NO: 3681 - DNA, 75 bp, synthetic construct
  source 1..75: mol_type = other DNA
ccgtgtcacagaacagtgccgacgcctcttatttacagcagatggcgctgtcatttattgccctccgtctgaatg

SEQ ID NO: 3682 - DNA, 75 bp, synthetic construct
  source 1..75: mol_type = other DNA
tgcatttgttctacaataccatatgacgcccgatattacgccatacatagaatatgactaccttgaccgtcaggg

SEQ ID NO: 3683 - DNA, 75 bp, synthetic construct
  source 1..75: mol_type = other DNA
gtatctgtcactggagcccgcaacgacaaggataaagaacgtatcctgtctctgctggaagaaatctggcaggac

SEQ ID NO: 3684 - DNA, 75 bp, synthetic construct
  source 1..75: mol_type = other DNA
aacgtggtctgccccactccgggcacaggatcaacgttacatcagtatacgcaatacagatacgatatggctccc

SEQ ID NO: 3685 - DNA, 75 bp, synthetic construct
  source 1..75: mol_type = other DNA
tcctcgtcctcggcttctgcggccgctcaaaaagccagtgagtcatcacaaagtgcagcagaagctgaattgtca

SEQ ID NO: 3686 - DNA, 75 bp, synthetic construct
  source 1..75: mol_type = other DNA
aacgttaaaaacgccctggtactcaaggcctacgacattatcagtcaccgtcgtctggagtttgacgccggacac

SEQ ID NO: 3687 - DNA, 75 bp, synthetic construct
  source 1..75: mol_type = other DNA
agcggtactgcacacactgccagaccggaggattcagtattccccggacaactcaggaggaaatatgcgaattct

SEQ ID NO: 3688 - DNA, 75 bp, synthetic construct
  source 1..75: mol_type = other DNA
atgagcggaaaaccggcggcgcgtcagggtgacatgacgcagtatggcggtagcattgttcagggttcagccggg

SEQ ID NO: 3689 - DNA, 75 bp, synthetic construct
  source 1..75: mol_type = other DNA
agctcgaaaactatcgcggtgcggggatgaacggcagcgcaccggtagacctcggccttgatgacgatgcgctgt

SEQ ID NO: 3690 - DNA, 75 bp, synthetic construct
  source 1..75: mol_type = other DNA
gcaaggtatccattacccgctcgcaactggcaatgctcctcgataagctggactggcgtcagccaaaaacatccc

SEQ ID NO: 3691 - DNA, 75 bp, synthetic construct
  source 1..75: mol_type = other DNA
cgcatgatgcggtatttaaatcttttttacgccatccagacaccgcgcgggattttattgatattcatcttcccg

SEQ ID NO: 3692 - DNA, 75 bp, synthetic construct
  source 1..75: mol_type = other DNA
ctctcagcctcagcgttccccgacacactgcccggtaccgaatacggccccgacaggggcatccgtctttcggcg

SEQ ID NO: 3693 - DNA, 75 bp, synthetic construct
  source 1..75: mol_type = other DNA
gcggacgctgacgtaccggcgtgaggccgcaggcgacctggccggggaaatcaccggcgtgacggacggtgccgg

SEQ ID NO: 3694 - DNA, 75 bp, synthetic construct
  source 1..75: mol_type = other DNA
gtaccgatgcatggtcgtacccggttctgcggcttaaacgcctgggcctgtccagaacgttccgtcgtctggtcg

SEQ ID NO: 3695 - DNA, 75 bp, synthetic construct
  source 1..75: mol_type = other DNA
gtatggaatacgatgctgccggacgggtcatccgcctgaccagtgaaaacggcagccacaccaccttccgttacg

SEQ ID NO: 3696 - DNA, 75 bp, synthetic construct
  source 1..75: mol_type = other DNA
ggcagcggtaagccggtgagcgtggccatcactgcacaccccgcgccggaccggatacaggtcagcaccctgcct

SEQ ID NO: 3697 - DNA, 75 bp, synthetic construct
  source 1..75: mol_type = other DNA
tacgtggtggaagactacgccgccggttgtctggtggaaaaaattaaggtcggtgatttctccacaccggctaaa

SEQ ID NO: 3698 - DNA, 75 bp, synthetic construct
  source 1..75: mol_type = other DNA
gattgatgctgctatggcttccatcagtctgattcagctgaaattgcaggccgggcggcagctgacgcaagcaga

SEQ ID NO: 3699 - DNA, 75 bp, synthetic construct
  source 1..75: mol_type = other DNA
accggcctgatgacccgcgacaactacagaacggtaaatgacattaccctgggtaagcatccggaggcgaaacaa

SEQ ID NO: 3700 - DNA, 75 bp, synthetic construct
  source 1..75: mol_type = other DNA
atgagcaggaaactccgctatggtttatcggctgccgttctggcgctgattgccgcaggtgcttctgcgcctgaa

SEQ ID NO: 3701 - DNA, 75 bp, synthetic construct
  source 1..75: mol_type = other DNA
gaaaagggcgacacaggagggtgagtattctgatgccaggagcaatccggccatgctgcgtctgagcataaaata

SEQ ID NO: 3702 - DNA, 75 bp, synthetic construct
  source 1..75: mol_type = other DNA
agaagaggcgaattgcgttaaaaatgacgcaaaccgaactggcaaccaaagccggtgttaaacagcaatcaattc

SEQ ID NO: 3703 - DNA, 75 bp, synthetic construct
  source 1..75: mol_type = other DNA
tcccgtcaccatctggcagatactgctgtcccgactgctggaccagcactacggcctcacactgaatgacacacc

SEQ ID NO: 3704 - DNA, 75 bp, synthetic construct
  source 1..75: mol_type = other DNA
caagcgcgcccgtcacgaatactttatcgaagaagagttcgaagcgggacttgccctgcaaggctgggaggttaa

SEQ ID NO: 3705 - DNA, 75 bp, synthetic construct
  source 1..75: mol_type = other DNA
aacaatacacagattgccaccacggcttttgtgaaatcggcaattgcggcaatggtggggtctgcacctgctgca

SEQ ID NO: 3706 - DNA, 75 bp, synthetic construct
  source 1..75: mol_type = other DNA
gattgtcagccgggatctatttacctgcaataaaactttaccaccacgcgaggtagagccgaattttggtgcgat

SEQ ID NO: 3707 - DNA, 75 bp, synthetic construct
  source 1..75: mol_type = other DNA
ttacggacacgctggggctgattacgtcattcagttatgccaacgctgaagatgagcaaaaaacgcattacagcg

SEQ ID NO: 3708 - DNA, 75 bp, synthetic construct
  source 1..75: mol_type = other DNA
gatccgtctcagagatcatctgaaacggtttcctgatttctataacgaagaaatattcagggaggtgaccgaaga

SEQ ID NO: 3709 - DNA, 75 bp, synthetic construct
  source 1..75: mol_type = other DNA
ctggcggatattaatagtcagggtcaggtgcagatggcgatgaacggcggcatctatgatgaaggtgatgctgcc

SEQ ID NO: 3710 - DNA, 75 bp, synthetic construct
  source 1..75: mol_type = other DNA
acccgttccgagtttgatcgctacggtaaggcgaaaaagatagaattttcactgacccttgaacgctgtgatgag

SEQ ID NO: 3711 - DNA, 75 bp, synthetic construct
  source 1..75: mol_type = other DNA
tggcacaattaggaaggaactgcaaactgcaatggggtttgttgacggctgtttagcaatgttagcttatagtat

SEQ ID NO: 3712 - DNA, 75 bp, synthetic construct
  source 1..75: mol_type = other DNA
gaccatcgcggtgaaatcgtctttagcaccgaaacaggagaatcaaaagaaatcacagctccgggtgattaccct

SEQ ID NO: 3713 - DNA, 75 bp, synthetic construct
  source 1..75: mol_type = other DNA
cgcgagataaacggctggctcggtcaggaggtcatccgctttaaaaactactcactggacactgacaacggctga

SEQ ID NO: 3714 - DNA, 75 bp, synthetic construct
  source 1..75: mol_type = other DNA
cactatgtgccggggattttcggggaagataaacacacgtcccgaagccagaactatacgtacatccccaccatc

SEQ ID NO: 3715 - DNA, 75 bp, synthetic construct
  source 1..75: mol_type = other DNA
gaccgtattgcgatgattaacccggaggacggcaacaccacgccgttatttgtggcgcaggggaatcagttgttc

SEQ ID NO: 3716 - DNA, 75 bp, synthetic construct
  source 1..75: mol_type = other DNA
cccctgtttatgcaggggcgtgtcctgctggagcctgagccggaacgttattcatctttcgccagtggtgccgtt

SEQ ID NO: 3717 - DNA, 75 bp, synthetic construct
  source 1..75: mol_type = other DNA
cgctggcgtacgcctggtaccagggggattccacgctttcagcgtttaataaaaccctggttctttccggtaatc

SEQ ID NO: 3718 - DNA, 75 bp, synthetic construct
  source 1..75: mol_type = other DNA
cagaacgcgccacggccagcgccgtcagtccggcttataccgcagacgctgaccataccggtaacgcctcccccc

SEQ ID NO: 3719 - DNA, 75 bp, synthetic construct
  source 1..75: mol_type = other DNA
gggaactcttttgtgccctggcgttttgctggctctcgcgcggtttatccccgctggcgcggggaacactttgcc

SEQ ID NO: 3720 - DNA, 75 bp, synthetic construct
  source 1..75: mol_type = other DNA
taacccactgacttctctgggggattacctcgaccccgaactcatctctcgttgccttgccgaatcaggtactgt

SEQ ID NO: 3721 - DNA, 75 bp, synthetic construct
  source 1..75: mol_type = other DNA
tccggaccttatctggtcgttacctgacggagaaatacgtcgctacgacagtcgcctaaacataatctgtcgcga

SEQ ID NO: 3722 - DNA, 75 bp, synthetic construct
  source 1..75: mol_type = other DNA
tcgtgaatgtcggtatcctgtctggcaggataccgctcatttcccttgttcagttcatcgccgtcgccgagcatc

SEQ ID NO: 3723 - DNA, 75 bp, synthetic construct
  source 1..75: mol_type = other DNA
tgccagcgccgccgcgctcggtgtgcctttaaaaattacccatatggcggtcggcgatggcggcggaacattacc

SEQ ID NO: 3724 - DNA, 75 bp, synthetic construct
  source 1..75: mol_type = other DNA
atgtactgtactgttaaagaaattatccgcgaagtgctggatacagacgtgccggacagtgaatgcgtttttgcc

SEQ ID NO: 3725 - DNA, 75 bp, synthetic construct
  source 1..75: mol_type = other DNA
tgtgtgcagcggaaggtgtaactcaggcagagttgatagaaaggcttatcgagaaagaggcctgtcaccggaata

SEQ ID NO: 3726 - DNA, 75 bp, synthetic construct
  source 1..75: mol_type = other DNA
tgcgcgtgaccgatatcactaaaaatgcgacttacccggtactgattgacagtatcgtggtggaagtgaataacg

SEQ ID NO: 3727 - DNA, 75 bp, synthetic construct
  source 1..75: mol_type = other DNA
tcaataccttcttaacacgagtgagcaaactggaactatctcaacaagagaaagactggatcataaaaatcatct

SEQ ID NO: 3728 - DNA, 75 bp, synthetic construct
  source 1..75: mol_type = other DNA
tgactaatcagggcgcggcacgactggctaacgcgacgatgctcggcagtaagctgaatctgacgcgaatggccg

SEQ ID NO: 3729 - DNA, 75 bp, synthetic construct
  source 1..75: mol_type = other DNA
gagcagggcacgtattctgcagccctgccttcccgccagcccggaggcagcctgcaggctcacagcgggcgggtt

SEQ ID NO: 3730 - DNA, 75 bp, synthetic construct
  source 1..75: mol_type = other DNA
atgaccagatggtcgacatgtcgtttatcactcagctgaccggcctgaccgataaatggttttacaagctcatca

SEQ ID NO: 3731 - DNA, 75 bp, synthetic construct
  source 1..75: mol_type = other DNA
ggcagatgacgcccaaagacctcggtaagttcgagccgcagcgccgctacgcgaccctggccgccgtggtgctgg

SEQ ID NO: 3732 - DNA, 75 bp, synthetic construct
  source 1..75: mol_type = other DNA
tgcaatggctggctaacatttctggccgcgatgacattgacgatatagacggcggtgaaattcgtgagctggcgc

SEQ ID NO: 3733 - DNA, 75 bp, synthetic construct
  source 1..75: mol_type = other DNA
gcctttggcgtgtcctgccgcacgctttactggtggcgtcagttactgaacaaggaaggacctgaggggctaatc

SEQ ID NO: 3734 - DNA, 75 bp, synthetic construct
  source 1..75: mol_type = other DNA
ccgagctctccaaagaacgccgcgatatctccaaaaagctgaaagctatgggcgaaatgaaaaacggcgaagcga

SEQ ID NO: 3735 - DNA, 75 bp, synthetic construct
  source 1..75: mol_type = other DNA
ttgcagagccaccggataagcgtcgtcgtgacctggacaatattctgaaagcaccgctggatgcgctgacgcatg

SEQ ID NO: 3736 - DNA, 75 bp, synthetic construct
  source 1..75: mol_type = other DNA
ctggacgtacgtggtggatatcgtagtggaagccacgcctatgagactcgactcaaagtcagtgagggatggcaa

SEQ ID NO: 3737 - DNA, 75 bp, synthetic construct
  source 1..75: mol_type = other DNA
tgcgtggcctatacgagcggctcggattcacccacgtcgacactttcaatcccggctgggatccaaccttcatcg

SEQ ID NO: 3738 - DNA, 75 bp, synthetic construct
  source 1..75: mol_type = other DNA
agcataagcctgcattctggctccgcaatgagcaaactgaacgtttaataagcgagttgcagatttgcaactcgg

SEQ ID NO: 3739 - DNA, 75 bp, synthetic construct
  source 1..75: mol_type = other DNA
ccctttaacatccggatggtcagggagacggcggacagcaccacggaccagctgcagaacagaacgctgtggtcg

SEQ ID NO: 3740 - DNA, 75 bp, synthetic construct
  source 1..75: mol_type = other DNA
gctggatggaccgtctgtgtgaagactactgcggtggtatctggaatctgtacaccctgaacaacggcggggcat

SEQ ID NO: 3741 - DNA, 75 bp, synthetic construct
  source 1..75: mol_type = other DNA
aaattttaacggtgtcagggggttcagtgtggcgacttcatggaatggcagccggtgcagtattacagccgggtt

SEQ ID NO: 3742 - DNA, 75 bp, synthetic construct
  source 1..75: mol_type = other DNA
tgggggaagtgcgtgttccacaccggggagacgtagtggagaaagttattgaaggggcttacgaggtggtgggcg

SEQ ID NO: 3743 - DNA, 75 bp, synthetic construct
  source 1..75: mol_type = other DNA
aattatcagacaccgtctgaatttgcagcgggctggagaaagggtcattctgagaatgaagattccgacgttact

SEQ ID NO: 3744 - DNA, 75 bp, synthetic construct
  source 1..75: mol_type = other DNA
gttctatacccatatctccgaccagtacgcgccgttcagcacccgcgtggtgaatgtcggcgtccgcgattccac

SEQ ID NO: 3745 - DNA, 75 bp, synthetic construct
  source 1..75: mol_type = other DNA
tcttcgccttttgttcagagcattaatcagcacggcttctgcgctggcagggctcatattgctgtgtctgttcgg

SEQ ID NO: 3746 - DNA, 75 bp, synthetic construct
  source 1..75: mol_type = other DNA
tccataactcagtaaatatagtgcagagttcaccctgtcaaacggtttcttttgcaggaaaggaatatgagttaa

SEQ ID NO: 3747 - DNA, 75 bp, synthetic construct
  source 1..75: mol_type = other DNA
tgcaaatctttcttgtggtggcaagagagcgaagttttaccaaagcagcgggcaaactcggcgtctctcagtctg

SEQ ID NO: 3748 - DNA, 75 bp, synthetic construct
  source 1..75: mol_type = other DNA
acgatggttacgcagggctatgagtatcgtcgtgatgacgatatggcgttatggagttctgcggatctgacttat

SEQ ID NO: 3749 - DNA, 75 bp, synthetic construct
  source 1..75: mol_type = other DNA
atgcgcaatgaaatagccatcaatcaccagatgcttcgtgctgcacagaacaaagcagtaatagccagatttatt

SEQ ID NO: 3750 - DNA, 75 bp, synthetic construct
  source 1..75: mol_type = other DNA
gctgtttggcctgctgacgtatctgactaacctttatttcaagattaaagaagataagcgtaaggtggcgcgggg

SEQ ID NO: 3751 - DNA, 75 bp, synthetic construct
  source 1..75: mol_type = other DNA
gcgcacaggaattgttgcaggaagacatggcaacattcgacggacatatcgttgaagcgttgatgaaaatgccag

SEQ ID NO: 3752 - DNA, 75 bp, synthetic construct
  source 1..75: mol_type = other DNA
tcgcacccgctaaccaacccgaatttgaactgaccgtcacgccggtccccgatgaacagcgtatcgatttctggc

SEQ ID NO: 3753 - DNA, 75 bp, synthetic construct
  source 1..75: mol_type = other DNA
attaagaatgaggttaaagatctcggttattatcttttagtttatcgtaaaaaaatacgtaatcttatgcggcgt

SEQ ID NO: 3754 - DNA, 75 bp, synthetic construct
  source 1..75: mol_type = other DNA
ttacaggtgttgttctgttaatatttgtcattattgccggttatttcttttctgagcgtaatgacaggaaaatgt

SEQ ID NO: 3755 - DNA, 75 bp, synthetic construct
  source 1..75: mol_type = other DNA
gggattgtagtaacgcaattactcataatacggaatgctgcccgagctgcgcgtcaacagcttcctcaggctatt

SEQ ID NO: 3756 - DNA, 75 bp, synthetic construct
  source 1..75: mol_type = other DNA
accggaatacggacaggatcttcacagccctgctggcgctgctggttgtggttttgctggtgacatctgctgtca

SEQ ID NO: 3757 - DNA, 75 bp, synthetic construct
  source 1..75: mol_type = other DNA
cagatatttatcgccgcaccacaactttcagcagtggttcttccctggtccgaatggtgtgaggagccacaggcg

SEQ ID NO: 3758 - DNA, 75 bp, synthetic construct
  source 1..75: mol_type = other DNA
ggctccgcacacatcacgttcaggaaaccagaactggttgatcggctaaatgatattattgccaggcactattcg

SEQ ID NO: 3759 - DNA, 75 bp, synthetic construct
  source 1..75: mol_type = other DNA
cccgtagagacggtggttattgaccttgcttatgaaggttccggcagtggcgactggcgcactgacggtttcatc

SEQ ID NO: 3760 - DNA, 75 bp, synthetic construct
  source 1..75: mol_type = other DNA
atgaaacagatttctttatttattcctctgctgggaaccttattactttccggctgcgcaggaacaaatacggaa

SEQ ID NO: 3761 - DNA, 75 bp, synthetic construct
  source 1..75: mol_type = other DNA
gtgctggcactgcgacaaccagctgcgtgaccagacatccgaatcactcgagcaacttgctcatcaaaacctgtc

SEQ ID NO: 3762 - DNA, 75 bp, synthetic construct
  source 1..75: mol_type = other DNA
atggaaaaacctgaaacggcaatgaaagccatcacccgcaatctcgatcgcgaaatctggcgtgacctgatgcaa

SEQ ID NO: 3763 - DNA, 75 bp, synthetic construct
  source 1..75: mol_type = other DNA
caggatcttgaccttaatgaaggtcgaataaatattcgccgactgaagaacggattttctaccgttcacccgtta

SEQ ID NO: 3764 - DNA, 75 bp, synthetic construct
  source 1..75: mol_type = other DNA
atgagccatcaactcaccttcgccgatagtgaattcagcactaagcgccgtcagacccgaaaagagattttcctc

SEQ ID NO: 3765 - DNA, 75 bp, synthetic construct
  source 1..75: mol_type = other DNA
cgggattatttcatcctcagagaacggttgatgacaatgcagaagcagctggaaggggcgcaggaatatatccgc

SEQ ID NO: 3766 - DNA, 75 bp, synthetic construct
  source 1..75: mol_type = other DNA
tcagcagttacagcaaaacaaaagctggcggcatgtgaaaaatgaacgcgttaaccgttcagcaagctggcagta

SEQ ID NO: 3767 - DNA, 75 bp, synthetic construct
  source 1..75: mol_type = other DNA
atgccgattatcgacctgaaccagctacccgcaccggatgtggtcgaggagctggactttgaaaccattcttgcc

SEQ ID NO: 3768 - DNA, 75 bp, synthetic construct
  source 1..75: mol_type = other DNA
ttccacattgcagaacagcaagttgacggcacaagtgactacctcaaggatggagaatggcctattgataatgga

SEQ ID NO: 3769 - DNA, 75 bp, synthetic construct
  source 1..75: mol_type = other DNA
gtggctacgcagactgaagttgccaggcatttaagtctgaccgatcgccagcttcgcagattgcagaaattgccg

SEQ ID NO: 3770 - DNA, 75 bp, synthetic construct
  source 1..75: mol_type = other DNA
ccggtgaacccggtgctgggtgcaaaggtgctgccgggcgagacggacattgcgctgcccggcccgctgccgttc

SEQ ID NO: 3771 - DNA, 75 bp, synthetic construct
  source 1..75: mol_type = other DNA
atctggatgatgactactttgacatgttgcaggaagaactctgcagcgtggtggaggcatccggtgccagcctgg

SEQ ID NO: 3772 - DNA, 75 bp, synthetic construct
  source 1..75: mol_type = other DNA
cgtccggttcggtggggacggagggcgcgatattttatcgtctgcggatgtggcggatgtcatggtggatgatgc

SEQ ID NO: 3773 - DNA, 75 bp, synthetic construct
  source 1..75: mol_type = other DNA
gtcgtcttaaaatggaacatctgggctaccacgttgaaagcctgctggagcaggcggccaaaaaagaactgaact

SEQ ID NO: 3774 - DNA, 75 bp, synthetic construct
  source 1..75: mol_type = other DNA
aagccattacccgcaaccttgaccgtgaaatctggcgtgacctgatgcaacgctccgggatgctgtcattaatgg

SEQ ID NO: 3775 - DNA, 75 bp, synthetic construct
  source 1..75: mol_type = other DNA
gtgtattgcgatccgccgtatgacggcacgttttccggttatcacactgacggcttcactgaagatgaccagtat

SEQ ID NO: 3776 - DNA, 75 bp, synthetic construct
  source 1..75: mol_type = other DNA
cagcgaactgcatattgccccgtcaacgtattaccactgtcagcaacagcgacatcatccggataaacgcagtgc

SEQ ID NO: 3777 - DNA, 75 bp, synthetic construct
  source 1..75: mol_type = other DNA
gaaggatctgacgccgggcgagatgacggcagaaccctacgatgataactacctggatgatgaagacgcggactg

SEQ ID NO: 3778 - DNA, 75 bp, synthetic construct
  source 1..75: mol_type = other DNA
tacacactgaacaacggtggcgcatttatagcgcccgaaccggatgacgatgatggcgaaacatgggtactgttc

SEQ ID NO: 3779 - DNA, 75 bp, synthetic construct
  source 1..75: mol_type = other DNA
cctcatacccagtatgcacagaaacataatccgacatttaccggagaaccaaaagcgccgacgcctgccgcagga

SEQ ID NO: 3780 - DNA, 75 bp, synthetic construct
  source 1..75: mol_type = other DNA
agtgcaggatattcccggtgtgctggctgtatttgcagaacgccgtaaggacagttttggcccgtatgtccggct

SEQ ID NO: 3781 - DNA, 75 bp, synthetic construct
  source 1..75: mol_type = other DNA
agaaatctggcgtgacctgatgcaacgttcagggatgctttccttaatggatgcacaggcccgtgatacatggta

SEQ ID NO: 3782 - DNA, 75 bp, synthetic construct
  source 1..75: mol_type = other DNA
tgaacgagtcggttaaatcagagcagtcaccgcgggtggtgctctgggaaattgacctgacggtgcagggcggtg

SEQ ID NO: 3783 - DNA, 75 bp, synthetic construct
  source 1..75: mol_type = other DNA
gcggtaaatacgcattactgctgcaacaggccagaaccgaagcacaggccgacgcagcgacgcgcttttcttctc

SEQ ID NO: 3784 - DNA, 75 bp, synthetic construct
  source 1..75: mol_type = other DNA
acatgtgagaaacgtattgcaggttggttagccgtggctgaacacatgctttatgtacctatgcacgattcattt

SEQ ID NO: 3785 - DNA, 75 bp, synthetic construct
  source 1..75: mol_type = other DNA
cggtgaagtggtgacctcccgtgtcatcgcccgcccgcataacgacatcgaaaaaatcgcgtcgcagcataaagc

SEQ ID NO: 3786 - DNA, 75 bp, synthetic construct
  source 1..75: mol_type = other DNA
atgagtgcacgtggtatcaacaaggtcatcctcgtcgggcgtctgggaaaagatccggaagtccgttacatccca

SEQ ID NO: 3787 - DNA, 75 bp, synthetic construct
  source 1..75: mol_type = other DNA
gcatacggataccgtggcatttgaagagaagtatggctcccaactggagctgatttttcgatttatcgatcgcgc

SEQ ID NO: 3788 - DNA, 75 bp, synthetic construct
  source 1..75: mol_type = other DNA
atccgccgacggtgaatacttactggcgacgtcgtggcaacacatattttgtatcaaaagtcggtgagcgttatc

SEQ ID NO: 3789 - DNA, 75 bp, synthetic construct
  source 1..75: mol_type = other DNA
caacaggtaagatggtaaaactaaaattacctgtagatgtggaaagtctattaattgaggcaagtaacagaagcg

SEQ ID NO: 3790 - DNA, 75 bp, synthetic construct
  source 1..75: mol_type = other DNA
agcggttaacgctggtgtttaccgccattcttctgttttgcgccgctgcggcatgtggcatccagatctacagca

SEQ ID NO: 3791 - DNA, 75 bp, synthetic construct
  source 1..75: mol_type = other DNA
tggagcctgaagaaagctgttgcccggagtgtggcggtgagctggattatctgggggaagtcagcgcagaacaac

SEQ ID NO: 3792 - DNA, 75 bp, synthetic construct
  source 1..75: mol_type = other DNA
atgcaggactattttttggagtctttgaagctccagcgcattgatttttttcttaagcttgtagcggctagtgag

SEQ ID NO: 3793 - DNA, 75 bp, synthetic construct
  source 1..75: mol_type = other DNA
cggaagtccatccccgggaagtgattaaacgcgccctgtaccacaatgccgctgccgtggtgctggcgcacaatc

SEQ ID NO: 3794 - DNA, 75 bp, synthetic construct
  source 1..75: mol_type = other DNA
tttttgagctgcgcacattgccgcatcagcagttacagcaaaacaaaagctggcggcatgtgaaaaatgaacgcg

SEQ ID NO: 3795 - DNA, 75 bp, synthetic construct
  source 1..75: mol_type = other DNA
tgcgtgaggtggcggaacgtgcaattccagcaatggaacgcctgttaatgttgccagctgatgatgatttgttaa

SEQ ID NO: 3796 - DNA, 75 bp, synthetic construct
  source 1..75: mol_type = other DNA
atgagtaccacaacacgaaaatttaaaaccgttatcaccgatacgggtgcaaaaaaattagctcaggcagccgcg

SEQ ID NO: 3797 - DNA, 75 bp, synthetic construct
  source 1..75: mol_type = other DNA
cacctcaaacggcatcacagtgcatacgcataaacacggtggcgttaaaggtggcagcgattcgacaggaggccc

SEQ ID NO: 3798 - DNA, 75 bp, synthetic construct
  source 1..75: mol_type = other DNA
aaatattcgatcaagtgcgtaaagatttaaactgtgaattattttattctgagctaaaacgtcacaatgtctcac

SEQ ID NO: 3799 - DNA, 75 bp, synthetic construct
  source 1..75: mol_type = other DNA
ttaccgcttttacagggggcaacggatgccgccggttttatggcgcggatggataccgttctgcagatgtacgga

SEQ ID NO: 3800 - DNA, 75 bp, synthetic construct
  source 1..75: mol_type = other DNA
gaattaagctaccttgattgtgagtgggacaatcattacgcaaaaacacaaaaagaacgcatcttcagtcgatta

SEQ ID NO: 3801 - DNA, 75 bp, synthetic construct
  source 1..75: mol_type = other DNA
acgctctggttatctgcatcatcgtctgtctgttatgggctgttaatcattaccgcgataacgccatcacctaca

SEQ ID NO: 3802 - DNA, 75 bp, synthetic construct
  source 1..75: mol_type = other DNA
cacaaattccgctgtgtgccacatctgacaggacggcgctttgagcacggggtgacggactgttacacgctgttc

SEQ ID NO: 3803 - DNA, 75 bp, synthetic construct
  source 1..75: mol_type = other DNA
atgatatctctccctgcaggttcgcgtatctggctggttgcaggtatcaccgatatgcgaaatggctttaacggc

SEQ ID NO: 3804 - DNA, 75 bp, synthetic construct
  source 1..75: mol_type = other DNA
gtatgcgaaaggactgacctgcgaagccgataccctgggctcctgtgattacgtttatctggctgtttatccgac

SEQ ID NO: 3805 - DNA, 75 bp, synthetic construct
  source 1..75: mol_type = other DNA
acgccctgacccacgcgggtgtgtgggaagacgacagtcaggtgaaaagaatgctggtggagtggggaccggtta

SEQ ID NO: 3806 - DNA, 75 bp, synthetic construct
  source 1..75: mol_type = other DNA
atacgggtactgttttcatattatctcttccgttaagtctgatatatattctttctgttattataaaaaggctgt

SEQ ID NO: 3807 - DNA, 75 bp, synthetic construct
  source 1..75: mol_type = other DNA
tcagataaaaatggttttccagcatggcaggatgcgccaccacttaccagcgaagaattaatctcaatcgctgaa

SEQ ID NO: 3808 - DNA, 75 bp, synthetic construct
  source 1..75: mol_type = other DNA
gaatgaagaaacagacctgggcactgttgatgttctccagtcatcagaaacacaaactgatgcagtggaaactga

SEQ ID NO: 3809 - DNA, 75 bp, synthetic construct
  source 1..75: mol_type = other DNA
gcgcttaatatcagcgtgccgtataaaacaagttatactcaaaatatactatctgttgaaagcagtattaacatc

SEQ ID NO: 3810 - DNA, 75 bp, synthetic construct
  source 1..75: mol_type = other DNA
caccagtcctgcaaatccgcgcgagacgcagccgcatttcttcgaatcccgattccctgagctgttaaagctgct

SEQ ID NO: 3811 - DNA, 75 bp, synthetic construct
  source 1..75: mol_type = other DNA
gttattgatcatttgatcaagtttcctgatttttataactcggagatattcagggaggcagataaagaggaagat

SEQ ID NO: 3812 - DNA, 75 bp, synthetic construct
  source 1..75: mol_type = other DNA
acaggctggtatggaatcacattacaggcgctttcgtggttgcctccgaactggcccgtgcacgggggaaacgcg

SEQ ID NO: 3813 - DNA, 75 bp, synthetic construct
  source 1..75: mol_type = other DNA
cagggggagttgccatgctctgtctgagcggctgtcatcttcccccggataataccgcaccggccaggaagtacg

SEQ ID NO: 3814 - DNA, 75 bp, synthetic construct
  source 1..75: mol_type = other DNA
atgattaatctgttaatcatcgttctcagggctgtggtcgccgttgcaaacgcgctgattgcaattctggaactg

SEQ ID NO: 3815 - DNA, 75 bp, synthetic construct
  source 1..75: mol_type = other DNA
gcaatggtgggcagattttctggatgcaaacagggaggagtgtatcagtccgtttgaatatgcaaaagttaacaa

SEQ ID NO: 3816 - DNA, 75 bp, synthetic construct
  source 1..75: mol_type = other DNA
agggcggcggtagaagcacttaaaacactatcaaaaacagaggtatcacgattgatagcagaagtaaaacaaaga

SEQ ID NO: 3817 - DNA, 75 bp, synthetic construct
  source 1..75: mol_type = other DNA
aggccggtaaaaaaggcacgctggcggcatcgttgcaggccatcgctgaccagtcaaaaccggtcaccgttgtcg

SEQ ID NO: 3818 - DNA, 75 bp, synthetic construct
  source 1..75: mol_type = other DNA
attaacgtgaaataccgttatgagtttacggatacgctggggctggtgacgtcattcagctatgcaggagacaag

SEQ ID NO: 3819 - DNA, 75 bp, synthetic construct
  source 1..75: mol_type = other DNA
atgctgacgaaatatgcccttgtggcagtcatagtgctgtgtttaacggtgctgggatttacgcttctggtcgga

SEQ ID NO: 3820 - DNA, 75 bp, synthetic construct
  source 1..75: mol_type = other DNA
ctgggttgcgttgtgcaacttctgtgatgacggtctggcggaggcggacaataacacagcggaaagagcgcttcg

SEQ ID NO: 3821 - DNA, 75 bp, synthetic construct
  source 1..75: mol_type = other DNA
cgggacaaaaaacgctttgacggtgaaatttttgacctggacatctcgctggaccgtgttgaaggtgccgcgctg

SEQ ID NO: 3822 - DNA, 75 bp, synthetic construct
  source 1..75: mol_type = other DNA
gcaaaagaatgcgcgctggaaggtatggcgagaacgcaggttatctggctgaaagagggggtaattaaggcgtga

SEQ ID NO: 3823 - DNA, 75 bp, synthetic construct
  source 1..75: mol_type = other DNA
attcactcgttgctctgttgaagtctgaaatgaagacgtacgggaacaaagcaccagagacttacagaagaatca

SEQ ID NO: 3824 - DNA, 75 bp, synthetic construct
  source 1..75: mol_type = other DNA
atgcctccatcattacgaaaagccgttgctgctgctattggtggcggagcaattgctatagcatcagtgttaatc

SEQ ID NO: 3825 - DNA, 75 bp, synthetic construct
  source 1..75: mol_type = other DNA
caataagcaaacctgtgaattgattgaacaacttttcaccgagggtggaattccgcctctggaacaaaatcaacc

SEQ ID NO: 3826 - DNA, 75 bp, synthetic construct
  source 1..75: mol_type = other DNA
actcttggtggctggcttggcggtgccttgcagtggcacttcgccctgatgtgggtactggtcatcaacggtgcg

SEQ ID NO: 3827 - DNA, 75 bp, synthetic construct
  source 1..75: mol_type = other DNA
tgaacgagtcggttaaatcagagcagtcaccgcgggtggtgctctgggaaatcgacctgacggtgcagggcggtg

SEQ ID NO: 3828 - DNA, 75 bp, synthetic construct
  source 1..75: mol_type = other DNA
gtgtggctgatgcacgacccggaatacccggaaaatttacctgccgcgccactggtgtgctacgactggacgcca

SEQ ID NO: 3829 - DNA, 75 bp, synthetic construct
  source 1..75: mol_type = other DNA
ctttttgtgcatgagtgcgatgacgctgtttatcgttattcacctgctgatggcgctactggtaccgcgcacact

SEQ ID NO: 3830 - DNA, 75 bp, synthetic construct
  source 1..75: mol_type = other DNA
gcaatgatgcttatgaaaaaataaacgcgattattgaaaaacgtcgacaggagggggcgagagaaaaagatgtca

SEQ ID NO: 3831 - DNA, 75 bp, synthetic construct
  source 1..75: mol_type = other DNA
agtatcccagcgagcaatatcttaatgagctgatcaccaacatagagtttgctgcaagggcaccagttgaagtcg

SEQ ID NO: 3832 - DNA, 75 bp, synthetic construct
  source 1..75: mol_type = other DNA
cattatcacgtgatattactgctcaacaaagatacctggtgctcgccaggggatttcaccgttccttcttcgctg

SEQ ID NO: 3833 - DNA, 75 bp, synthetic construct
  source 1..75: mol_type = other DNA
ggaggacctgcagagtctggtgggggccacggtggtccgccgccgggtgtatgcccgttttctggatgcggtgaa

SEQ ID NO: 3834 - DNA, 75 bp, synthetic construct
  source 1..75: mol_type = other DNA
gaatggccttctactggaggttaaaagagaaagtggagacctcgatttatgtcgtgaagcgatgaatgcgataaa

SEQ ID NO: 3835 - DNA, 75 bp, synthetic construct
  source 1..75: mol_type = other DNA
tgccgcctgtctgatgacgtacagccatcatgcctgtcgtacggagaattatgccatgacggtccattattaccg

SEQ ID NO: 3836 - DNA, 75 bp, synthetic construct
  source 1..75: mol_type = other DNA
gtgaaaactgaaatcgcgaaagcctccaatgttgcagctaaggccggtgaaaacgtgggcgggtggatcgatgat

SEQ ID NO: 3837 - DNA, 75 bp, synthetic construct
  source 1..75: mol_type = other DNA
atgaactatgccggacacgaaaaactgcgcgccgaagtggcggaggtggccaataccatgtgtgaccttcgggcc

SEQ ID NO: 3838 - DNA, 75 bp, synthetic construct
  source 1..75: mol_type = other DNA
agagagcgctgcaaatgctgacacttcagcaggggatgcatcggagtcagcccggcaggcggcagaaagtgcagc

SEQ ID NO: 3839 - DNA, 75 bp, synthetic construct
  source 1..75: mol_type = other DNA
gaagcggtgctgacggaggcagaagaagaacgcctgaacgaactgatgacgcgttacgacgcgctggaaaaccag

SEQ ID NO: 3840 - DNA, 75 bp, synthetic construct
  source 1..75: mol_type = other DNA
gggcagaaaccgctcaccaccgcgcagattgttgatgaaatctgcgattttgtggcgaatcagcaggctgttttc

SEQ ID NO: 3841 - DNA, 75 bp, synthetic construct
  source 1..75: mol_type = other DNA
gcgctgggcttgtctcggcgccaggtatacgttctgatccggcgtgcccggcaaggcagcggcctcgtgacggat

SEQ ID NO: 3842 - DNA, 75 bp, synthetic construct
  source 1..75: mol_type = other DNA
tgatgattgagagcaacatcattcacgccgcgcatcagaacgacgtgaacaaactgctgtttctcggatcgtcct

SEQ ID NO: 3843 - DNA, 75 bp, synthetic construct
  source 1..75: mol_type = other DNA
atggatcatcaaccgtcagaagcagagcgcagcactgacggatctgatggatcagtacgtgctcctggcataccg

SEQ ID NO: 3844 - DNA, 75 bp, synthetic construct
  source 1..75: mol_type = other DNA
aaggctgcgcagccggagcctcagccgcaaccaccggagggggaggattacgggttttcagacgatatcccgttc

SEQ ID NO: 3845 - DNA, 75 bp, synthetic construct
  source 1..75: mol_type = other DNA
cggtaccggaacttgggttggtggtccttaaaccaggccgtgaatccatgcaggtattccataaccctcgagtgc

SEQ ID NO: 3846 - DNA, 75 bp, synthetic construct
  source 1..75: mol_type = other DNA
ggcagtcaggtaaaactgctctggtccaccggcgatggtctgtgcctgctgacaaagcgactggaacgtggtcgc

SEQ ID NO: 3847 - DNA, 75 bp, synthetic construct
  source 1..75: mol_type = other DNA
acgggctgggcatggatgtcattttcagaagacgactgcaccagttgattgggcgtaatggctgttgtgcagcca

SEQ ID NO: 3848 - DNA, 75 bp, synthetic construct
  source 1..75: mol_type = other DNA
agcctggtcagtcagggctatctcattggtggtgattgctggctggatgagtcggtgaacgacaaagacacgctg

SEQ ID NO: 3849 - DNA, 75 bp, synthetic construct
  source 1..75: mol_type = other DNA
gaatgctgatataccatcaccaccgtcttcaggagtatataaagcatttagaaatggcgtgctggattttaaact

SEQ ID NO: 3850 - DNA, 75 bp, synthetic construct
  source 1..75: mol_type = other DNA
tacgcgctgccctttaccgtcgcgctgtcgcctgtgcctggctgaccgtgtgcgaacgtcagcaccgctacccgc

SEQ ID NO: 3851 - DNA, 75 bp, synthetic construct
  source 1..75: mol_type = other DNA
aacgtgattccactggcacctagccatgcctacgggatgtttatggaacgttttaacgagttatcggagttacgc

SEQ ID NO: 3852 - DNA, 75 bp, synthetic construct
  source 1..75: mol_type = other DNA
tgacctgcgactcgtgcgcggctcacgtcaaggaagccttggagaaagtgcccggcgtgcaatcggcgctggtgt

SEQ ID NO: 3853 - DNA, 75 bp, synthetic construct
  source 1..75: mol_type = other DNA
tgaacgagtcggttaagtcagagcagtcaccgcgggtggtactctgggaaatcgacctgacggtgcagggcggtg

SEQ ID NO: 3854 - DNA, 75 bp, synthetic construct
  source 1..75: mol_type = other DNA
ctgccagtggccacacggcgattatcatcacagcgaaaccgtcattcaccgttatggtaccggcgcaatggtgtt

SEQ ID NO: 3855 - DNA, 75 bp, synthetic construct
  source 1..75: mol_type = other DNA
atggcaaaaaatgactttaaagcattcgcaacgggtaaaaatgccaatgttatgtcgcaggaggaatgggaagcg

SEQ ID NO: 3856 - DNA, 75 bp, synthetic construct
  source 1..75: mol_type = other DNA
gtaaacaaaattatgcaggcagccaatatcagccagcctgacgccgataagttacttgctgtatcgcgtggtgaa

SEQ ID NO: 3857 - DNA, 75 bp, synthetic construct
  source 1..75: mol_type = other DNA
tggcattgcctgagaatttccgcattcatgatctggaaaaatttaatttaaatcgcttccgtttccgtggtgcgc

SEQ ID NO: 3858 - DNA, 75 bp, synthetic construct
  source 1..75: mol_type = other DNA
ggcgtctgaatataatctgtcgcgagtgccggaagagcgaagtcatgcagcgtgtactggcgttctatcagggta

SEQ ID NO: 3859 - DNA, 75 bp, synthetic construct
  source 1..75: mol_type = other DNA
cgtacggagtgttatgccatgacggtccattattaccggttgcgggattacgccctgcagcatccggaatgcagc

SEQ ID NO: 3860 - DNA, 75 bp, synthetic construct
  source 1..75: mol_type = other DNA
gcaatctgaacagccttgatacccgtatggtgccacaggccagcgcatgggcgataaaccgtgtggcacagaaag

SEQ ID NO: 3861 - DNA, 75 bp, synthetic construct
  source 1..75: mol_type = other DNA
aggcatatcgtatgcatcaggtgttaataatgcctcgctttgcacggcttaccattgcccttggcttagcaactg

SEQ ID NO: 3862 - DNA, 75 bp, synthetic construct
  source 1..75: mol_type = other DNA
cgcattgaccgctttatggcagcctggaaacgcgccggattcagcgtggttggccacctggtcttcaccaaaaac

SEQ ID NO: 3863 - DNA, 75 bp, synthetic construct
  source 1..75: mol_type = other DNA
aaagacaacaatcacgaacagatagaactccttaacaaaagactatctgaaagtgtcccatgtatgccccataag

SEQ ID NO: 3864 - DNA, 75 bp, synthetic construct
  source 1..75: mol_type = other DNA
gtggctggttcgtaatgacctggcggatgccttaccggaaagtgcagcccgtaaggcactgagattaccgaagcc

SEQ ID NO: 3865 - DNA, 75 bp, synthetic construct
  source 1..75: mol_type = other DNA
cacgtggatgagcttcgtatctgtgcctcctgcgggctgacagaagtacatcatgccccggaaaatcataagccg

SEQ ID NO: 3866 - DNA, 75 bp, synthetic construct
  source 1..75: mol_type = other DNA
ccataattttagaggcgcagggtgtgtggataacctacaaaggaaaactgccgggaagaattactggttcactga

SEQ ID NO: 3867 - DNA, 75 bp, synthetic construct
  source 1..75: mol_type = other DNA
tctgcaactgcgtaaggcgttaaatgaagctcgccttgagcgagatatattaaaaaaagcaacgtattttgcaca

SEQ ID NO: 3868 - DNA, 75 bp, synthetic construct
  source 1..75: mol_type = other DNA
cgggcgttaggtgttgaacttgagtcagagcggtttaatcagacggtgaaagaggtaagtgaactggtggggaaa

SEQ ID NO: 3869 - DNA, 75 bp, synthetic construct
  source 1..75: mol_type = other DNA
gggcagcggtaaaacccggacagcccggctgtgggtctacgtccgtgatgaccgtaacgccggttcacagatgcc

SEQ ID NO: 3870 - DNA, 75 bp, synthetic construct
  source 1..75: mol_type = other DNA
cgtgcgaaaaaccggcagaaatgctgcagcagataatcagcgcgagcagtcgtccgggtgacctggttgcagatt

SEQ ID NO: 3871 - DNA, 75 bp, synthetic construct
  source 1..75: mol_type = other DNA
cgttcagtgatttcgcccgcgatcgtcgtggtgtgcgcgatccggaagcccgttacctcgccggtaatccctggt

SEQ ID NO: 3872 - DNA, 75 bp, synthetic construct
  source 1..75: mol_type = other DNA
ttcaccctcagagagcggctgatgacgatgcacaagcaactggaaggggcacaggactatatccgcactcagtgc

SEQ ID NO: 3873 - DNA, 75 bp, synthetic construct
  source 1..75: mol_type = other DNA
accgacattgcgcagtcatttatggcaatccgtcgcgctaccactgccagtggcaaccgcccgacctatgaagcc

SEQ ID NO: 3874 - DNA, 75 bp, synthetic construct
  source 1..75: mol_type = other DNA
gaatggatgcagacgctgaaggaaaccgggttcgacatccgggcatatcgtgacgcggcggatcagcgtgcggag

SEQ ID NO: 3875 - DNA, 75 bp, synthetic construct
  source 1..75: mol_type = other DNA
ccagatacacaaaggagcttgctgatgctaacgcgactatcgaaagtctccgtgctgatgtttctgctgggcgta

SEQ ID NO: 3876 - DNA, 75 bp, synthetic construct
  source 1..75: mol_type = other DNA
tctcaaatccacgcagatgatgagtgtgattgatgcgattggtgagggaccgatagaaggtccggtgaagggact

SEQ ID NO: 3877 - DNA, 75 bp, synthetic construct
  source 1..75: mol_type = other DNA
catgaccgctttgttgctgtaaccagtaccggagaacagccagatgctatgggattcagaaattcagcatcatgc

SEQ ID NO: 3878 - DNA, 75 bp, synthetic construct
  source 1..75: mol_type = other DNA
agatatacacggacagagccggataccccgtggtgattactcgcatcactgagcactcagtgttctttcgacgga

SEQ ID NO: 3879 - DNA, 75 bp, synthetic construct
  source 1..75: mol_type = other DNA
tgtcccggttgagactgaatccgatccgatgaacgtcacttttgacaagctggcccctgaagtacagaacgctgt

SEQ ID NO: 3880 - DNA, 75 bp, synthetic construct
  source 1..75: mol_type = other DNA
actcaccagacaggcagggaaaacatccggtacaacaccttcgtcccttccggggtatcctgcaggcggatgcat

SEQ ID NO: 3881 - DNA, 75 bp, synthetic construct
  source 1..75: mol_type = other DNA
gatggcgtacagtcatcacgcctgtcgtacagagaattatgccatgacggtccactattaccggctgcgggatta

SEQ ID NO: 3882 - DNA, 75 bp, synthetic construct
  source 1..75: mol_type = other DNA
gtggaggcatccggtgccagcctggagaaggcgcggcacgaccagttgcttaccgcgcttcgtgcgctgctgtta

SEQ ID NO: 3883 - DNA, 75 bp, synthetic construct
  source 1..75: mol_type = other DNA
cggcaggcgaccaaaaaaccttggtggcccgtgacttcggcatcagccgcgaaaccttgtaccagtacctgcggg

SEQ ID NO: 3884 - DNA, 75 bp, synthetic construct
  source 1..75: mol_type = other DNA
gctggtggcgtggaatgtcttgaaagctggttacttcgtgaaaaaggctgccagtggcctcattccgactggcac

SEQ ID NO: 3885 - DNA, 75 bp, synthetic construct
  source 1..75: mol_type = other DNA
ccaataaacattattaccttcctaaagagtcgtcttataccccggggcggtgggaaacactgccgtttcaggttg

SEQ ID NO: 3886 - DNA, 75 bp, synthetic construct
  source 1..75: mol_type = other DNA
ctgaatgacgtgcatgaagcggtgaccgctgttgctgaacatgtgcaggaaaaactgagcgccactgagcagcgc

SEQ ID NO: 3887 - DNA, 75 bp, synthetic construct
  source 1..75: mol_type = other DNA
tatcatgtatttcatcattaatcttttcattgcaacccgcatattcagcgacaacgacccgatttgatgcctgct

SEQ ID NO: 3888 - DNA, 75 bp, synthetic construct
  source 1..75: mol_type = other DNA
acgagtacgactggctgacctcagacgccgctgtagatgaggccattcacatcaatgcatataccttcaccgaag

SEQ ID NO: 3889 - DNA, 75 bp, synthetic construct
  source 1..75: mol_type = other DNA
acagccattgaagctggcgacgaacgccgtgctcgagcaaaatttcactggcaattcctggaacattatccggct

SEQ ID NO: 3890 - DNA, 75 bp, synthetic construct
  source 1..75: mol_type = other DNA
aagtgtgaatggcattaacgtgtgttttgaaaaaaatgaaatgataggttggattaaaaaagaaatccctttgct

SEQ ID NO: 3891 - DNA, 75 bp, synthetic construct
  source 1..75: mol_type = other DNA
atgagccttctttttgctgaacgcccactggttataaacacacagcttgcgatgaagattggcttaaatgaagcc

SEQ ID NO: 3892 - DNA, 75 bp, synthetic construct
  source 1..75: mol_type = other DNA
atattcgctggctggcaggcgtatttctgacgattgccggaatgatcatcagcttcatgtggggacttgatggta

SEQ ID NO: 3893 - DNA, 75 bp, synthetic construct
  source 1..75: mol_type = other DNA
cccgcagagcggcagcggaaattaaaaagtttgagaaacgcgatctggcacaggcggtgattaacgctgcatacc

SEQ ID NO: 3894 - DNA, 75 bp, synthetic construct
  source 1..75: mol_type = other DNA
ggagtgagaacgggggcgacggtgacgcattcgtcagggaagaacgcgaagcaatggacgttgtgttacaggcgc

SEQ ID NO: 3895 - DNA, 75 bp, synthetic construct
  source 1..75: mol_type = other DNA
atgcgcagacccgggacacatggtacaggtcactggaatatgataattttccggaaatcagcgaagcgaacattc

SEQ ID NO: 3896 - DNA, 75 bp, synthetic construct
  source 1..75: mol_type = other DNA
gggccgcgctgctgggtgggatttgattattcgcgtggcgtggacagttctgccgtgtacggagtacgtgcatga

SEQ ID NO: 3897 - DNA, 75 bp, synthetic construct
  source 1..75: mol_type = other DNA
cggcagggctgaatgctgacctgaaaacataccgtgtgacgctttccgtgacccgggaggaggcccggcatctgg

SEQ ID NO: 3898 - DNA, 75 bp, synthetic construct
  source 1..75: mol_type = other DNA
gttcacttacaccgcctctcagcccggtacacaccagaaaattattgatatggccatgaatggcgtcggatgtcg

SEQ ID NO: 3899 - DNA, 75 bp, synthetic construct
  source 1..75: mol_type = other DNA
tattagtcgcatgtatcgcgctactcataggaatgtttgtcgtaaaatttaccccgttcctacaaaaaaaccaca

SEQ ID NO: 3900 - DNA, 75 bp, synthetic construct
  source 1..75: mol_type = other DNA
gctttccgtgggagaggggccagggatagccaccaatattggcgtagcgttgtttgatgatgaaggaaacctcgt

SEQ ID NO: 3901 - DNA, 75 bp, synthetic construct
  source 1..75: mol_type = other DNA
gatatatcccatgacacgctggagaaactcatttttccgcccaaagacacctttgcatcagagcttgtaatgcct

SEQ ID NO: 3902 - DNA, 75 bp, synthetic construct
  source 1..75: mol_type = other DNA
actggatatggctgccacgctggcagtgcctttcacaggtgacgggcgggatgctgcggagatcctgcgtacact

SEQ ID NO: 3903 - DNA, 75 bp, synthetic construct
  source 1..75: mol_type = other DNA
accgtactggaaagcctgcagcaggaaggttttcagccattcttcgcctgccagacccgcgtgcgcgacccgggc

SEQ ID NO: 3904 - DNA, 75 bp, synthetic construct
  source 1..75: mol_type = other DNA
aaagcggcgaacatttacgcctgaacacgctggaagcagtctggatccaggggaaattacggatgtgggggcggt

SEQ ID NO: 3905 - DNA, 75 bp, synthetic construct
  source 1..75: mol_type = other DNA
acagtggttctccattatttggctggaatacggccaaagggcagtgggaactggtcggtgtttactcgggagtag

SEQ ID NO: 3906 - DNA, 75 bp, synthetic construct
  source 1..75: mol_type = other DNA
atctggatgcactggcccgcgccagaagagatgaacaggacgacgatgaaatgactattgaagaaatcgcggctg

SEQ ID NO: 3907 - DNA, 75 bp, synthetic construct
  source 1..75: mol_type = other DNA
ggcaggcggccagttcgcgtccgtctcctgttgaaatctggcagacactgctgtcccgcctgctggaccagcatt

SEQ ID NO: 3908 - DNA, 75 bp, synthetic construct
  source 1..75: mol_type = other DNA
gccacggggcgcgcgcctgacggttctcattggctggaaaggagaaccgctgacagaaaaaggcacttacattgt

SEQ ID NO: 3909 - DNA, 75 bp, synthetic construct
  source 1..75: mol_type = other DNA
ggaagcatttttattatgacaagataaataaagacgacatcgttattaacgatatcgcggtttccctttcaaata

SEQ ID NO: 3910 - DNA, 75 bp, synthetic construct
  source 1..75: mol_type = other DNA
gggcgctggccacgcagcttccgtcgtttcgccagaaactgaatgagggctggtatcaggtgcgcattgccgggc

SEQ ID NO: 3911 - DNA, 75 bp, synthetic construct
  source 1..75: mol_type = other DNA
cggtctggcgtaagaagacaactggcctcaaaacaaaaaagcgtttactgccgctggtgctggcagcggcattat

SEQ ID NO: 3912 - DNA, 75 bp, synthetic construct
  source 1..75: mol_type = other DNA
ggatgggcaactgctcgcggatgctgcgccctcggggcacctcaaacgtcggcgtgtaaatatcgcgccgctgca

SEQ ID NO: 3913 - DNA, 75 bp, synthetic construct
  source 1..75: mol_type = other DNA
attactgatatgcagcagcgccagcgtgatgttgctgcacttgatgccagatactcgagggaattagccgatgcg

SEQ ID NO: 3914 - DNA, 75 bp, synthetic construct
  source 1..75: mol_type = other DNA
ggtatcgccggaccggggctgctggcccgcgtgctgacctcgaagtatgcagagcacaccccgctgtattgccag

SEQ ID NO: 3915 - DNA, 75 bp, synthetic construct
  source 1..75: mol_type = other DNA
atcttgatgaacggcgactgatgctgcagtggtgggctgattttttggatgcgaatagggaaagcgaagttagcc

SEQ ID NO: 3916 - DNA, 75 bp, synthetic construct
  source 1..75: mol_type = other DNA
atttctggcgacacatcctgcaccggggacatcagcaggtgctgtttgtggtgacgcaggccgacaaaacggagc

SEQ ID NO: 3917 - DNA, 75 bp, synthetic construct
  source 1..75: mol_type = other DNA
atggacgttgagtacggtcagtacagcgttattctgttggtggagggattcccgccgtcacatgccgggaccatc

SEQ ID NO: 3918 - DNA, 75 bp, synthetic construct
  source 1..75: mol_type = other DNA
caatcgacgattgctgggaaggctgggccatactcctccggcagaagcagaaaaagcttattatgcttccatcgg

SEQ ID NO: 3919 - DNA, 75 bp, synthetic construct
  source 1..75: mol_type = other DNA
cggataaatactgttttacagaacggaacgaatcgccccgtcttcgccagcagtggcaggatgttctggaggagt

SEQ ID NO: 3920 - DNA, 75 bp, synthetic construct
  source 1..75: mol_type = other DNA
gttgtcgatcgtcagatgagctacatgcgtcagcagctttccgcccgcatgctcagtcgttaccagaacaactat

SEQ ID NO: 3921 - DNA, 75 bp, synthetic construct
  source 1..75: mol_type = other DNA
ctggtctggtcacccggacagcgggatatcatcaaaacggtggcactggtgctgatggtactggaccacatcaat

SEQ ID NO: 3922 - DNA, 75 bp, synthetic construct
  source 1..75: mol_type = other DNA
agcagcgcgttgaagaagaacgccagcgccatatccgtgcagcccgtgccaaatcaccgggcgtgtcacgcgtac

SEQ ID NO: 3923 - DNA, 75 bp, synthetic construct
  source 1..75: mol_type = other DNA
agtcgcaacagttaaatgccagattcccgcatgatgttgttgcagacttagaaaaaaatttagatgaaggtgaaa

SEQ ID NO: 3924 - DNA, 75 bp, synthetic construct
  source 1..75: mol_type = other DNA
tcggctcacgggtgatgcgtcgtgattacggctcgttgctggcgtcaatgattgaccagccgcagaccccggcgc

SEQ ID NO: 3925 - DNA, 75 bp, synthetic construct
  source 1..75: mol_type = other DNA
ccgctcactggagtacgataactttccggaaatcagcgaggcgaatatcctgagtacgtttgaacaactgcacca

SEQ ID NO: 3926 - DNA, 75 bp, synthetic construct
  source 1..75: mol_type = other DNA
aaaatatcaagatattcacactagcgtttacgctcaccgtggtacttattcagctatcccgttttatttcgccac

SEQ ID NO: 3927 - DNA, 75 bp, synthetic construct
  source 1..75: mol_type = other DNA
aaaccgccagagtggtgtttaatgaattaagcgttaccgaaccggcgacagtcggggagatagcgcagaatactt

SEQ ID NO: 3928 - DNA, 75 bp, synthetic construct
  source 1..75: mol_type = other DNA
cgggattatttcactctcagagagcggttgatgctgatgcagaagcagctggaagtggcgcaggaatatatccgc

SEQ ID NO: 3929 - DNA, 75 bp, synthetic construct
  source 1..75: mol_type = other DNA
aggcgtgccatgccgcccggtatgttgtcgcccgggttctgcgaggactgttctggtgtctgaagtacaccgtca

SEQ ID NO: 3930 - DNA, 75 bp, synthetic construct
  source 1..75: mol_type = other DNA
gccggaaagccgttgccgcaggcgaccgcgtaaaccgtcagttcgtggcagaacgacctgaccagctgtgggtgg

SEQ ID NO: 3931 - DNA, 75 bp, synthetic construct
  source 1..75: mol_type = other DNA
aatcatcacaactgatgcgatgggttgccagaaagatattgcagagaagatacaaaaacagggaggtgattattt

SEQ ID NO: 3932 - DNA, 75 bp, synthetic construct
  source 1..75: mol_type = other DNA
acactggaagaacaaccggtgctcaacagtaaatcgtggctgaccagtttgcaaaacgattacagccttcctgac

SEQ ID NO: 3933 - DNA, 75 bp, synthetic construct
  source 1..75: mol_type = other DNA
gttcgccagtatgagcgggataccgggggcggagatggagggctcaccagtgctgaacgtcagcgtctgaaagag

SEQ ID NO: 3934 - DNA, 75 bp, synthetic construct
  source 1..75: mol_type = other DNA
cgtgatgtcggactctcccgtacccaggccaaagcattcatggccgggggctatggcgcactgtccctgcgcgac

SEQ ID NO: 3935 - DNA, 75 bp, synthetic construct
  source 1..75: mol_type = other DNA
gcatgggaacgctacagcgttctggtcagtcgtgtggatcctgcaaatcctgaatggccggaaatgccgcaataa

SEQ ID NO: 3936 - DNA, 75 bp, synthetic construct
  source 1..75: mol_type = other DNA
taggcacgccgggattcttcggtcttggcggtgggatcaacagtgaaaacgacgacaccattctcgtggtgctga

SEQ ID NO: 3937 - DNA, 75 bp, synthetic construct
  source 1..75: mol_type = other DNA
atgttccgtcacccgggaaacgagtacgaccagatgacctcagacgccgctgtggatgaggccattctcatcaat

SEQ ID NO: 3938 - DNA, 75 bp, synthetic construct
  source 1..75: mol_type = other DNA
tgcacaacggaggcacagcctctgacacggttgtaaacagtgacggctggcagattgtcaaggaaggtggtctgg

SEQ ID NO: 3939 - DNA, 75 bp, synthetic construct
  source 1..75: mol_type = other DNA
gtgcgacgtccctgtacggcggcggcagtaccggtggcctgatcaacatcgtgaccaaaaaaggccagccggaaa

SEQ ID NO: 3940 - DNA, 75 bp, synthetic construct
  source 1..75: mol_type = other DNA
ccctgccgtgcagccaggcagatgacggaacggcgacgatgtggttatccgtcctggcgtttggcagacaggccg

SEQ ID NO: 3941 - DNA, 75 bp, synthetic construct
  source 1..75: mol_type = other DNA
acgcgcaccattacgtccgcgaacattgaccgcctgcgggttaccttcggggtgcagtcactggtgcagaccacg

SEQ ID NO: 3942 - DNA, 75 bp, synthetic construct
  source 1..75: mol_type = other DNA
atcaggcattcaaaaagcttaatcctcacgagcatcctgttctgcactctgaccagggatggcagtatcgtatga

SEQ ID NO: 3943 - DNA, 75 bp, synthetic construct
  source 1..75: mol_type = other DNA
ccgcgatggcggcagcactgaaggccgtcgagcaaggcgcgcaggtcacgctgattgagcgcggcaccatcggcg

SEQ ID NO: 3944 - DNA, 75 bp, synthetic construct
  source 1..75: mol_type = other DNA
agctcaagttcgacaagaagctgactaaccgttgtatcggactgacgttacacatcagcgcctcaaccgtttttg

SEQ ID NO: 3945 - DNA, 75 bp, synthetic construct
  source 1..75: mol_type = other DNA
ccgctcgtgacctacaaggtgtgggcggcgagcctcctgccgtgaccgcgccgctggagcagatagaccatacgg

SEQ ID NO: 3946 - DNA, 75 bp, synthetic construct
  source 1..75: mol_type = other DNA
cttgcaaaaaaggctacaagagctgaacgactggctgggcgaagaagtgattaaatttacgccctatattctttc

SEQ ID NO: 3947 - DNA, 75 bp, synthetic construct
  source 1..75: mol_type = other DNA
gcagatgataaaccctggaccacggcgtcacctgaaggtttttactacaccatgtatccgctgtatgactggaaa

SEQ ID NO: 3948 - DNA, 75 bp, synthetic construct
  source 1..75: mol_type = other DNA
cccggcgtgcaatcggcgctggtgtcctatccgaagggcacagcgcaactcgccattgaggcgggcacgtcatcg

SEQ ID NO: 3949 - DNA, 75 bp, synthetic construct
  source 1..75: mol_type = other DNA
ttgcgacggaggcaatccgctggcctgacagtgtggatgaacacaaaaaggcaaatgcctttgccggcagtgccc

SEQ ID NO: 3950 - DNA, 75 bp, synthetic construct
  source 1..75: mol_type = other DNA
ctggagctagaaaaggccgatccgggctttatgacggaacgcgaggacgttgtctgcgacgaaggacgatttaac

SEQ ID NO: 3951 - DNA, 75 bp, synthetic construct
  source 1..75: mol_type = other DNA
atgtacggaacatgcgaaacgctatgccgggagctggcagtaaagtatccgggagacatgccgctgatgctggtt

SEQ ID NO: 3952 - DNA, 75 bp, synthetic construct
  source 1..75: mol_type = other DNA
tttttatgcgccagacgctgccacaccagaccatgcagcgtgaatcagattatcgctggccgtcaaattcccgta

SEQ ID NO: 3953 - DNA, 75 bp, synthetic construct
  source 1..75: mol_type = other DNA
ggatgggcgtgacaaaacggtaattgcagtaatgaaagccatcagggccgcaggaatcaaagaaaagaatttcga

SEQ ID NO: 3954 - DNA, 75 bp, synthetic construct
  source 1..75: mol_type = other DNA
gcgttaatgcaggttatctttgctccttggcttggaaaaatgtctgaccgatttggtcggcgcccagtgctgttg

SEQ ID NO: 3955 - DNA, 75 bp, synthetic construct
  source 1..75: mol_type = other DNA
ccggaatatctcagcgcccttaactctgcctggctgaatgagtcggccacgctgttccgccgcaagtattacgaa

SEQ ID NO: 3956 - DNA, 75 bp, synthetic construct
  source 1..75: mol_type = other DNA
cagacagggccgacttttcggcctttatggagagcattggctattatgatgacgagtcgatgcaggatgatattc

SEQ ID NO: 3957 - DNA, 75 bp, synthetic construct
  source 1..75: mol_type = other DNA
agacgtagtggagaaagttattgaaggggcttacgaggtggtgggcgtttttgaccggatagaggagaagcgtga

SEQ ID NO: 3958 - DNA, 75 bp, synthetic construct
  source 1..75: mol_type = other DNA
tgatgcggttgcgaatattccggtaccggcggacggcaaaagtatcacccccgatgatgtgcgtccgatgcttga

SEQ ID NO: 3959 - DNA, 75 bp, synthetic construct
  source 1..75: mol_type = other DNA
cctgtctggtcgcctcatcttttgaagcagacgcagatgatgccgatgacgccgccgaactggcggacgatgcgg

SEQ ID NO: 3960 - DNA, 75 bp, synthetic construct
  source 1..75: mol_type = other DNA
acgctggacacgctgaaagaaatagccgcagccattaacaatgatccgaatttcagtaccaccattaacaatgcg

SEQ ID NO: 3961 - DNA, 75 bp, synthetic construct
  source 1..75: mol_type = other DNA
atctgcattaaggcgcatggagctaagaggacaccttaatgaaatatatgacggtgtaattgttaataagaaaga

SEQ ID NO: 3962 - DNA, 75 bp, synthetic construct
  source 1..75: mol_type = other DNA
tctcaggctgaaaggtgaactgacaccggcgttattacagacacttatccgcgaaatgaaagggagcagccactg

SEQ ID NO: 3963 - DNA, 75 bp, synthetic construct
  source 1..75: mol_type = other DNA
acttaacgccgtgctggattacattgacgcggtgacggcaacagataccagcaccgcgccggatgtcatctggcc

SEQ ID NO: 3964 - DNA, 75 bp, synthetic construct
  source 1..75: mol_type = other DNA
gctgtttggcctgctgacgtatctgactaacctgtatttcaaaatcagggaggaccgccgtaagacggcgcgggg

SEQ ID NO: 3965 - DNA, 75 bp, synthetic construct
  source 1..75: mol_type = other DNA
atggcaattaagcattttcctgtcgttcgttttacctccagaggacgtgaatacgaagtcgacgaacgcctgatt

SEQ ID NO: 3966 - DNA, 75 bp, synthetic construct
  source 1..75: mol_type = other DNA
atccaggacattcccggctatctgtatacaggcggtgtggtctgtgatggtgatgttattactgtttatcccgga

SEQ ID NO: 3967 - DNA, 75 bp, synthetic construct
  source 1..75: mol_type = other DNA
ctgaccgctgcaatcactaccgtactggctaaaacctacggcggtgctgctcgcgcattcgaccagatcgataac

SEQ ID NO: 3968 - DNA, 75 bp, synthetic construct
  source 1..75: mol_type = other DNA
atgagtaaagtctttatttgcgccgccattccggacgaacaggcaataaaagaagagggcgcagttgctgtagcc

SEQ ID NO: 3969 - DNA, 75 bp, synthetic construct
  source 1..75: mol_type = other DNA
gccgctttggctttttgatgcactggatattgagtttggattctggctggattcggcagcgagcgacaaaaatgc

SEQ ID NO: 3970 - DNA, 75 bp, synthetic construct
  source 1..75: mol_type = other DNA
tcagggcggcatcgccgtcagaccttgcgaaacgactgacacaaaaactgaaggaggggtggcagccatttggca

SEQ ID NO: 3971 - DNA, 75 bp, synthetic construct
  source 1..75: mol_type = other DNA
agagcttatcgttaccattaacaaatatgccagtcagttggcagcagaaccgatagcgactaatgacgttcgaga

SEQ ID NO: 3972 - DNA, 75 bp, synthetic construct
  source 1..75: mol_type = other DNA
ggtaatacaccgtaagagctggaaaaaccgtgcagaagtggaactggccacactcacgtgggtggactggtataa

SEQ ID NO: 3973 - DNA, 75 bp, synthetic construct
  source 1..75: mol_type = other DNA
cgccggggtgacgctgtcgggcactgtcatgcagaccatgcagaatgttgaattaaccatcacgctgagggagta

SEQ ID NO: 3974 - DNA, 75 bp, synthetic construct
  source 1..75: mol_type = other DNA
accgtggcatttgaagagaagtatggctcccagctggagctgatatttcgttttatcgatcgtgcgctggcaata

SEQ ID NO: 3975 - DNA, 75 bp, synthetic construct
  source 1..75: mol_type = other DNA
ggaagacaatacagtgatacagagcgtgatgccattaaccactgaaacagcgctggatatcctcattgcgtggct

SEQ ID NO: 3976 - DNA, 75 bp, synthetic construct
  source 1..75: mol_type = other DNA
aaaattgctggagttggttttgatggttctagcgatatttcaattagtgccaaaaatgtcaatgcatttgcactc

SEQ ID NO: 3977 - DNA, 75 bp, synthetic construct
  source 1..75: mol_type = other DNA
gccacccgcgccccgcgtaagacccggagcgtgacaccggcaaaacgtggacgcccgaaaaagaaagccagttaa

SEQ ID NO: 3978 - DNA, 75 bp, synthetic construct
  source 1..75: mol_type = other DNA
tcactctgtaatgcactgtttcagggggaggtcaccccggtcagtgatgttcacgccggcacccgggaagtgcgg

SEQ ID NO: 3979 - DNA, 75 bp, synthetic construct
  source 1..75: mol_type = other DNA
aggaaaatgcttatcgtgagcttatctggcgtcagcgtgtgaatgaggccgcacgggcggtgatgctggcctgtg

SEQ ID NO: 3980 - DNA, 75 bp, synthetic construct
  source 1..75: mol_type = other DNA
tcactctcacccggcgttatggcgtcagtctcattcatctggacgccggcgcagaatgtctgccggggttcccca

SEQ ID NO: 3981 - DNA, 75 bp, synthetic construct
  source 1..75: mol_type = other DNA
cactatgtacccggtatttttggggaagaccggcatacctcccgcagtgaacgctatacgtatatccccaccatc

SEQ ID NO: 3982 - DNA, 75 bp, synthetic construct
  source 1..75: mol_type = other DNA
agggaataaccagccccaactggttgctactcccgtccctgatgaacaacgtatcagcttctggccgcagcattt

SEQ ID NO: 3983 - DNA, 75 bp, synthetic construct
  source 1..75: mol_type = other DNA
ggaataaatcactcagtgtacatggttctcaccacattattcacagcggagagtcattgtctgtcaccttcagag

SEQ ID NO: 3984 - DNA, 75 bp, synthetic construct
  source 1..75: mol_type = other DNA
cgcattctggctgtacgaaagagttcactgctgcaaatcgacacaattatccggcatcaagtgagcgatatcagt

SEQ ID NO: 3985 - DNA, 75 bp, synthetic construct
  source 1..75: mol_type = other DNA
cctgtttatcttccgtggccgacggggtgacaccgttaaaattctttgggctgatgctgatggtctgtgcctgtt

SEQ ID NO: 3986 - DNA, 75 bp, synthetic construct
  source 1..75: mol_type = other DNA
attgactgggaagcccagtatcaatgcaccattgatcatatacagaagatgcggatgatgtaccaagatgtaaca

SEQ ID NO: 3987 - DNA, 75 bp, synthetic construct
  source 1..75: mol_type = other DNA
atggctgatctccttcaaaaatactattcacaggttaaaaacccgaatccggtgttcacaccccgtgaaggtgcc

SEQ ID NO: 3988 - DNA, 75 bp, synthetic construct
  source 1..75: mol_type = other DNA
aaggcgtgctggcagccgtgcagaccctgcgtgagatgaacgccgacaacctgcgcaaggtgccggccgatgcac

SEQ ID NO: 3989 - DNA, 75 bp, synthetic construct
  source 1..75: mol_type = other DNA
gttaaatgcctggagcctggcgggagaacaccgccactggatgatccctctcagaaagggagcgcaatatgaaga

SEQ ID NO: 3990 - DNA, 75 bp, synthetic construct
  source 1..75: mol_type = other DNA
acgtcaaaacagatagcggaagccaccggaaagaaaaacatggcttcgcactggtttggtaccagtcagtggcag

SEQ ID NO: 3991 - DNA, 75 bp, synthetic construct
  source 1..75: mol_type = other DNA
atgaaaaaaaacacagatgatggggctaaaatttacacaccacttaccctaaagctttatgactggtgggttttg

SEQ ID NO: 3992 - DNA, 75 bp, synthetic construct
  source 1..75: mol_type = other DNA
cagcaaaagtaaaaagacaacgcggaagcctgcaacacgaaaaaccaccgcgacgcagaaggcgaagcgcggtta

SEQ ID NO: 3993 - DNA, 75 bp, synthetic construct
  source 1..75: mol_type = other DNA
gattaaggacggtggcagagactgccgtattcgttcaaacaactgctacggtcaggtatcccgtcgtgaccagga

SEQ ID NO: 3994 - DNA, 75 bp, synthetic construct
  source 1..75: mol_type = other DNA
atcatgagacgacacgcctcactcagtcagcccaggtggtgctctgggaaatcgatctgacagaggtcggtggtg

SEQ ID NO: 3995 - DNA, 75 bp, synthetic construct
  source 1..75: mol_type = other DNA
cgcttccgtctgagtggccatggtcacagcatggttatcactgacctgcccggggtgggcgagagccgggacagg

SEQ ID NO: 3996 - DNA, 75 bp, synthetic construct
  source 1..75: mol_type = other DNA
gtgggtaaagggggcggcaaggggcacacaccgcgtgaggcgaaggacaatctcaaatccacgcagatgatgagc

SEQ ID NO: 3997 - DNA, 75 bp, synthetic construct
  source 1..75: mol_type = other DNA
atgctgaaacagcaggatatgacagaaaccgccagagtggtgtttaatgaattaagtgccaccgcaccggcgaca

SEQ ID NO: 3998 - DNA, 75 bp, synthetic construct
  source 1..75: mol_type = other DNA
gcggcctgttcttaacagaccacaaatataatctggatgtgtacagttatatttacgctgaacacggtccactct

SEQ ID NO: 3999 - DNA, 75 bp, synthetic construct
  source 1..75: mol_type = other DNA
ggcgtttttccgctgtctgaacggaagccgcaggatatcgctgtctgacctgcgatttttcatgccgtccctgac

SEQ ID NO: 4000 - DNA, 75 bp, synthetic construct
  source 1..75: mol_type = other DNA
tgcgtttttatgtgccctgtccgcactgtggggaggagcagtatctgaaatttggcgatgatgcctcgcctttcg

SEQ ID NO: 4001 - DNA, 75 bp, synthetic construct
  source 1..75: mol_type = other DNA
ccgctgacggacacggacggtaatcccgtgatacacggtgtgaccgcggtctggcgtgccggggagcaggagcag

SEQ ID NO: 4002 - DNA, 75 bp, synthetic construct
  source 1..75: mol_type = other DNA
gacgagtcgatgcaggatgatattcttattgacgtgataggtaacgtgtacaaagaaaccggagaactgactgaa

SEQ ID NO: 4003 - DNA, 75 bp, synthetic construct
  source 1..75: mol_type = other DNA
tgaaaacgctcttccggaaccgcctgaatttatcaccggaagcgaatgacgattttctcgatcgttgcctggacg

SEQ ID NO: 4004 - DNA, 75 bp, synthetic construct
  source 1..75: mol_type = other DNA
agaaaacgaagaccgggcggttgtgggcgtatgttcgtgacgaccgtaacgccgggtcaacgctggcgccggcgg

SEQ ID NO: 4005 - DNA, 75 bp, synthetic construct
  source 1..75: mol_type = other DNA
acagtggtgggcagattttctgaatgcgaacagagagaaatgtatcagtccgtttgattatgcaaagatcaacaa

SEQ ID NO: 4006 - DNA, 75 bp, synthetic construct
  source 1..75: mol_type = other DNA
gttcagccacggttgagcatgggaaatactacggtaactgctgataataacgtggagaaaaatgtcgcgtcgttt

SEQ ID NO: 4007 - DNA, 75 bp, synthetic construct
  source 1..75: mol_type = other DNA
gggcagaaaccgctcaccactgcgcagattgttgatgaaatctgcgattttgtggcgaatcagcaggcggttttc

SEQ ID NO: 4008 - DNA, 75 bp, synthetic construct
  source 1..75: mol_type = other DNA
atgtcagtagtaaagtctgaaccagacaccacccgcaaagcaagccgtaaatctgcaaaaacgcaggaaaccgtc

SEQ ID NO: 4009 - DNA, 75 bp, synthetic construct
  source 1..75: mol_type = other DNA
gtgatcgccgaagtatcgactcaactatcagaggtagttggcgtcatcgagcgccatctcgaaccgacgttgctg

SEQ ID NO: 4010 - DNA, 75 bp, synthetic construct
  source 1..75: mol_type = other DNA
acgcttcttgagcctgtaataaatgagttgcaggaaatagagacattacacgaccagtataaagcgccccacacc

SEQ ID NO: 4011 - DNA, 75 bp, synthetic construct
  source 1..75: mol_type = other DNA
cgcctttcagatatttgcaaaatgcaattttcggatatccgggatggttatcttcatgtcgaacagcaaaaaaca

SEQ ID NO: 4012 - DNA, 75 bp, synthetic construct
  source 1..75: mol_type = other DNA
ctggctggggatgcgggagaccgcagcaaaaagctttgtcgatgaggtggaggcggcctggtcggaatacgccga

SEQ ID NO: 4013 - DNA, 75 bp, synthetic construct
  source 1..75: mol_type = other DNA
tgaaagggatccgcaattttgagaataaagttacggtaactttagcgttacgggacaaaaaacgctttgacggtg

SEQ ID NO: 4014 - DNA, 75 bp, synthetic construct
  source 1..75: mol_type = other DNA
ttgtagattcaatctgtcaatgcaacacccctttcaattatctctttcggtgttttgaacttcagtgtctttctc

SEQ ID NO: 4015 - DNA, 75 bp, synthetic construct
  source 1..75: mol_type = other DNA
aagacgcgacagttcagcctgataaaaaagaagagaaaaaagacgatacaaataccgctggcaccattgatattt

SEQ ID NO: 4016 - DNA, 75 bp, synthetic construct
  source 1..75: mol_type = other DNA
gtaatacatcaggcactggcgtctgggaagatattgccggacgtaaagggaatatagaaactgtcgccgcaatcc

SEQ ID NO: 4017 - DNA, 75 bp, synthetic construct
  source 1..75: mol_type = other DNA
atgtggctactgattttctggctttcatctccctttaatgtctcttccggtgatgcccggcagcccacactggcg

SEQ ID NO: 4018 - DNA, 75 bp, synthetic construct
  source 1..75: mol_type = other DNA
cgcgactggccggagccggaaagggcggactgcagattgtgctgggggcggcagccatcgtgggctctttcttca

SEQ ID NO: 4019 - DNA, 75 bp, synthetic construct
  source 1..75: mol_type = other DNA
cccgccgtcacatgccgggaccatcaccgtgtatgaagattcccgacccggtacgctgaatgattttctcggtgc

SEQ ID NO: 4020 - DNA, 75 bp, synthetic construct
  source 1..75: mol_type = other DNA
ggaaccctggttgtacagggaaccggtgttaatgagggcggcctgaaagtcggggatgggaccgttgtcctcaat

SEQ ID NO: 4021 - DNA, 75 bp, synthetic construct
  source 1..75: mol_type = other DNA
gttcaacttagcagtgccacggacagtcaatcagaaactgaggctgccacgccgaaggctgtgaaaatcgcgtat

SEQ ID NO: 4022 - DNA, 75 bp, synthetic construct
  source 1..75: mol_type = other DNA
cgaaacatgggtactgttcagtgccatgaacggtaaccgcgcagaaatgagcccggaagccgccggtattgccgc

SEQ ID NO: 4023 - DNA, 75 bp, synthetic construct
  source 1..75: mol_type = other DNA
cataccatctggaccaggcctttccgctgctgatgaaacaactggagctcatgctcaccagcggtgaactgaatc

SEQ ID NO: 4024 - DNA, 75 bp, synthetic construct
  source 1..75: mol_type = other DNA
cccggggcggaaaacgactcgaacgggttccagagactatcatgaacgaagttcttggccgtctgtccactattc

SEQ ID NO: 4025 - DNA, 75 bp, synthetic construct
  source 1..75: mol_type = other DNA
atggcaatgccgcgcaaactcaagttaatgaacgtctttctgaacggctacagctatcagggcgtcgcgaagtcc

SEQ ID NO: 4026 - DNA, 75 bp, synthetic construct
  source 1..75: mol_type = other DNA
tgagctggaattacaaaaccaattgcccctgcaaatttggcagtaaaattatcgtcaacaacctggtgaggtggg

SEQ ID NO: 4027 - DNA, 75 bp, synthetic construct
  source 1..75: mol_type = other DNA
acggtttggctgcgtgtacagcctgaaggccagcctttctggtgtgccggatacattccggtatcatctgtctca

SEQ ID NO: 4028 - DNA, 75 bp, synthetic construct
  source 1..75: mol_type = other DNA
tgtcgcagtggcgatcgctggtttcaaccagatgaatcgtggtggcccggcgggaaatattgtggttgtgcattg

SEQ ID NO: 4029 - DNA, 75 bp, synthetic construct
  source 1..75: mol_type = other DNA
acttctgatgttagtgaggatatccgtctgtatgcccatcaaatcaagagcgccatcgaaaaacagttcggggat

SEQ ID NO: 4030 - DNA, 75 bp, synthetic construct
  source 1..75: mol_type = other DNA
atggaacatgaacttcattatatcggtatcgacaccgctaaagagaaactggatgtcgatgtgttgcgtcctgat

SEQ ID NO: 4031 - DNA, 75 bp, synthetic construct
  source 1..75: mol_type = other DNA
tcttcatcaggagcgaataactggacaccaacaaccagtatcagcgatctgctggttgtggtgatgaagaaatcc

SEQ ID NO: 4032 - DNA, 75 bp, synthetic construct
  source 1..75: mol_type = other DNA
tggaaggtgtcagctacataccatacaaagatattgttggtgtatggactgtatgtcacgggcatacaggaaaag

SEQ ID NO: 4033 - DNA, 75 bp, synthetic construct
  source 1..75: mol_type = other DNA
acatcaccacggaagccctgcagcgtatcggtgaactgtatgccatagaggcagaagtccggggatgtacagcag

SEQ ID NO: 4034 - DNA, 75 bp, synthetic construct
  source 1..75: mol_type = other DNA
tgtagctgctgcgacacctgaatcactcaatatcagctgtgaagtgacgttccggcacggatcactccgtctgaa

SEQ ID NO: 4035 - DNA, 75 bp, synthetic construct
  source 1..75: mol_type = other DNA
attatcccgacgactataacaaccgcccctggtgggggctgccctgcaccataacaccctgttttggcgcccgtc

SEQ ID NO: 4036 - DNA, 75 bp, synthetic construct
  source 1..75: mol_type = other DNA
ccacaccttctgtttccgtaaccgctgcatcagggaataacccacctcagctggttgctactctcgtccctgatg

SEQ ID NO: 4037 - DNA, 75 bp, synthetic construct
  source 1..75: mol_type = other DNA
ataaagacgtcattgcaattgatggaaaaacgctccggcactcttatgacaagagtcgccgcaggggagcgattc

SEQ ID NO: 4038 - DNA, 75 bp, synthetic construct
  source 1..75: mol_type = other DNA
acattatcggcaggtgacacgctggtggtctggaaactggaccgactggggcgcagtatgcggcatcttgtcgtg

SEQ ID NO: 4039 - DNA, 75 bp, synthetic construct
  source 1..75: mol_type = other DNA
acggcgaacctgatgtacgtcggcctggccttgatgattggggtgtcgatctgggacttcgtgtcgccggcgcat

SEQ ID NO: 4040 - DNA, 75 bp, synthetic construct
  source 1..75: mol_type = other DNA
acagtgttcaggattaccggcgtgatgaagtgaaaccggggtatgtgaaggagaccaccaccgccagtgatggtc

SEQ ID NO: 4041 - DNA, 75 bp, synthetic construct
  source 1..75: mol_type = other DNA
ccgtggaagatgcagtgcgcggcggatgtaaccttttcgacctcgatcagttgcgcatggagtacagcccggacg

SEQ ID NO: 4042 - DNA, 75 bp, synthetic construct
  source 1..75: mol_type = other DNA
gcgagatgacgccacaggaccggcgtctcattcagcgggcgctcagggctctggaccgccacctgcatgagcccg

SEQ ID NO: 4043 - DNA, 75 bp, synthetic construct
  source 1..75: mol_type = other DNA
aatccgcgttttctgtctgatgacccggatgcggttgcggacctgtctgcatttacacaggggcaggagcttccg

SEQ ID NO: 4044 - DNA, 75 bp, synthetic construct
  source 1..75: mol_type = other DNA
actcagggtcgagaatgcctacttaaaaaagctgaaagccttggttcagcagaaaacatgctcaacgttcaggaa

SEQ ID NO: 4045 - DNA, 75 bp, synthetic construct
  source 1..75: mol_type = other DNA
gcgaacagggaacgtcaggatatcgtcaccctggtgaaacggcagctgacgcgtgaaatctcggaagggcgcttc

SEQ ID NO: 4046 - DNA, 75 bp, synthetic construct
  source 1..75: mol_type = other DNA
ttcatggctatgtcatgactgacggcaaactccatgccgatgataccccggtccaggtactgctgccgggtaata

SEQ ID NO: 4047 - DNA, 75 bp, synthetic construct
  source 1..75: mol_type = other DNA
gaatcaactgattgccggtgaaaccctcttcaccggcaccatcaaccgcacggaagtccatccccgggaagtgat

SEQ ID NO: 4048 - DNA, 75 bp, synthetic construct
  source 1..75: mol_type = other DNA
ttcgctttacctccagagggcgcgaatacgaggtcgacgaacgcctgattaccactatcgacaaacatcgttcgg

SEQ ID NO: 4049 - DNA, 75 bp, synthetic construct
  source 1..75: mol_type = other DNA
atgcttagacaacatcaggatagcctcttaccgcgctttgcgcaaggagaagaaggccatgaaactaccacgcag

SEQ ID NO: 4050 - DNA, 75 bp, synthetic construct
  source 1..75: mol_type = other DNA
tcagtgaaatgctgcgtatggataaatacatcgacatgctgatcccgcgtggtggcgctggtttgcataaactgt

SEQ ID NO: 4051 - DNA, 75 bp, synthetic construct
  source 1..75: mol_type = other DNA
cgctttgtgctgtggctgcgcagctactgattggtctttttaccgggaactgggcttacggggcgatagccggtt

SEQ ID NO: 4052 - DNA, 75 bp, synthetic construct
  source 1..75: mol_type = other DNA
gcgcagttgcacgtcattctcagacgaaccgatgactggatggatggccgccgcagtcgtcacactgatgatacg

SEQ ID NO: 4053 - DNA, 75 bp, synthetic construct
  source 1..75: mol_type = other DNA
acacctgcacttcctgcacctggttcgttaatagcaacatgccgtcctgggggcggcaattattatcccggccgc

SEQ ID NO: 4054 - DNA, 75 bp, synthetic construct
  source 1..75: mol_type = other DNA
tcggcaacgatcttccgtcgtctccagtggagtggctgacggataatggttcatgctaccgggctaatgaaacac

SEQ ID NO: 4055 - DNA, 75 bp, synthetic construct
  source 1..75: mol_type = other DNA
tgctggctgaacgcggagtgaatgtcgatcactccacgatttaccgctgggttcagcgttatgcgcctgaaatgg

SEQ ID NO: 4056 - DNA, 75 bp, synthetic construct
  source 1..75: mol_type = other DNA
tcagggcggcgtcgccgtcagaccttgcggaaaagctgacacacaaactgaaagagggctggcagccatatggcg

SEQ ID NO: 4057 - DNA, 75 bp, synthetic construct
  source 1..75: mol_type = other DNA
gctttatgatgatgaaggcgtactcattgcggtggcgaactgcccggaaacgtacaaaccgcagttacaggaagg

SEQ ID NO: 4058 - DNA, 75 bp, synthetic construct
  source 1..75: mol_type = other DNA
cggtgctgtggatgcgttaaaggaagaattaactcgacgcatcagtaagcgttatgacgatgtagaggtgatcgt

SEQ ID NO: 4059 - DNA, 75 bp, synthetic construct
  source 1..75: mol_type = other DNA
gcagatgatggtgatactacttatgcccgtcttggcttcaaaggtgaaacccaaatcaacgatcaactgactggt

SEQ ID NO: 4060 - DNA, 75 bp, synthetic construct
  source 1..75: mol_type = other DNA
gacaaattaacccgtacatcaaagtcgatataccggaaacaacgcgcggcgctctttactcgttcgtttacaacg

SEQ ID NO: 4061 - DNA, 75 bp, synthetic construct
  source 1..75: mol_type = other DNA
tgaagctaatccgtgaatctgaaaggttaaaccgtaaagaattcagtgaattaactggtgtagcctacagctcac

SEQ ID NO: 4062 - DNA, 75 bp, synthetic construct
  source 1..75: mol_type = other DNA
atgtttatttccctgatgaccgaacaaacagaagcaacggagataaaaatgaacatgcgtaatattaatgttatt

SEQ ID NO: 4063 - DNA, 75 bp, synthetic construct
  source 1..75: mol_type = other DNA
catctggctcaggagttgtggacgcagattgataacggtcagcttgcgcctgacctggctgaaatcaggacgtcc

SEQ ID NO: 4064 - DNA, 75 bp, synthetic construct
  source 1..75: mol_type = other DNA
ttacgcaatattatcgaagtcagaaaatggcaggtgaatcaggccgccggtcgttatattcgttcgcatgaagcc

SEQ ID NO: 4065 - DNA, 75 bp, synthetic construct
  source 1..75: mol_type = other DNA
atacgctggggttctcacgtcgcttccatgtcttcgcggcaccaaagcaggatgctgaacatacctatgagtcac

SEQ ID NO: 4066 - DNA, 75 bp, synthetic construct
  source 1..75: mol_type = other DNA
tgaccgtactgaaggtgccacgctggagttttacgaagctgaggcgaaaaagcaggcgaagcagtttttcatgga

SEQ ID NO: 4067 - DNA, 75 bp, synthetic construct
  source 1..75: mol_type = other DNA
gagcgtacaactcgcaaggttacgttaacaaaagcaggaaaaaggttgctcccggaggcgcgggaattaataaag

SEQ ID NO: 4068 - DNA, 75 bp, synthetic construct
  source 1..75: mol_type = other DNA
agaggccggttcagcgacgcggatgcgtaccatctggaccaggcctttccgctgctgatgaaacaactggagctc

SEQ ID NO: 4069 - DNA, 75 bp, synthetic construct
  source 1..75: mol_type = other DNA
gaaaaacgccgccatcagggaaacacgctggcggaatatccgtatgcgggggcgtttttccgctgtctgaacgga

SEQ ID NO: 4070 - DNA, 75 bp, synthetic construct
  source 1..75: mol_type = other DNA
atgaatccgtctgatgccattgaggcaattgaaaaaccactttcttccctgccttactcgctttcccgtcacatc

SEQ ID NO: 4071 - DNA, 75 bp, synthetic construct
  source 1..75: mol_type = other DNA
gaagccagcctgttcttccggctactgaaccgtcgatatgaaaaagcgagcatcatactgacgtcaaacaaaggg

SEQ ID NO: 4072 - DNA, 75 bp, synthetic construct
  source 1..75: mol_type = other DNA
cccggcactggcagacctgattaccacgatggttacgcagggctatgagtatcgtcgtgatgacgatatggcgtt

SEQ ID NO: 4073 - DNA, 75 bp, synthetic construct
  source 1..75: mol_type = other DNA
taccgggataaaaagcagtaaaggtatccggattccggccacgaagaaatcacttccggaaattaacagcgtgca

SEQ ID NO: 4074 - DNA, 75 bp, synthetic construct
  source 1..75: mol_type = other DNA
cgtattcgctcaaacaactgctacggtcaggtctcacggcgtgaccaggagagcgcgctggcgtgctggggaatt

SEQ ID NO: 4075 - DNA, 75 bp, synthetic construct
  source 1..75: mol_type = other DNA
ctccttcagccccaacaaaccccggcactatgaacgttacctgcagcgtatgaatgaaaggaggaaggaatgggg

SEQ ID NO: 4076 - DNA, 75 bp, synthetic construct
  source 1..75: mol_type = other DNA
catcattaatgatgcaaaaaaatcgtcaatattcgatgaatacgtggttgctgttgagcatcaacttcgtggctg

SEQ ID NO: 4077 - DNA, 75 bp, synthetic construct
  source 1..75: mol_type = other DNA
gcacgtttcacgcgacggactccaggcattacacattgctcgggctgaagaactaccggctgttactgccctggc

SEQ ID NO: 4078 - DNA, 75 bp, synthetic construct
  source 1..75: mol_type = other DNA
gctgccggattcttacgatgcgccccacccacgcattaagcaactggcccgtcgcaacacagtgactcccggtgg

SEQ ID NO: 4079 - DNA, 75 bp, synthetic construct
  source 1..75: mol_type = other DNA
attccagattatcaatgacgaattatatcttgatggcaacgctcgtcagaacctggccactttctgccagacctg

SEQ ID NO: 4080 - DNA, 75 bp, synthetic construct
  source 1..75: mol_type = other DNA
atgagtaattcactgttaccgccatcagccagcaatttcatgcgttgcgccgaagctgtcggagcgcgcattaca

SEQ ID NO: 4081 - DNA, 75 bp, synthetic construct
  source 1..75: mol_type = other DNA
aagattcgggcttaactcaaaaagaaatgatagagcactggattttgaaagaaaaagctgcgatggatgatgcga

SEQ ID NO: 4082 - DNA, 75 bp, synthetic construct
  source 1..75: mol_type = other DNA
caaaaaattagctcaggcagccgcgccagatggtaagcctgtccgcctgactcatatggccgtgggcgacggtgg

SEQ ID NO: 4083 - DNA, 75 bp, synthetic construct
  source 1..75: mol_type = other DNA
agcgccataatgcacttgatgacgctcgttaccaggcaaaatacgtttcagctatctggcaaaaactgatcccga

SEQ ID NO: 4084 - DNA, 75 bp, synthetic construct
  source 1..75: mol_type = other DNA
ccatgcgtattcaccaacaacatccgacatcccgtctttttccgttctgtaccggcaaataccgctggcacggca

SEQ ID NO: 4085 - DNA, 75 bp, synthetic construct
  source 1..75: mol_type = other DNA
caccgcttgagggtgatatcagtctcaggacgctgggaagactggcaggacggctggataacatcgacctgagcg

SEQ ID NO: 4086 - DNA, 75 bp, synthetic construct
  source 1..75: mol_type = other DNA
gttcgccgatgaacgtgtgattgagcagcatattgaagctggcatttcactgtgtgatgcggtgaactttctcgt

SEQ ID NO: 4087 - DNA, 75 bp, synthetic construct
  source 1..75: mol_type = other DNA
gatgttgatgataccgttcatgagcaggcatgcaggcacaccggtgaggatgacgttggtattctggaacgtatc

SEQ ID NO: 4088 - DNA, 75 bp, synthetic construct
  source 1..75: mol_type = other DNA
gccgcgccacaaatgaaggtattcagctgtttctggccggaagtgccggacttctgcagaccactgaagatgtgc

SEQ ID NO: 4089 - DNA, 75 bp, synthetic construct
  source 1..75: mol_type = other DNA
catttcattttcactaatgctggttgctatttgcttttccactgcctggcgcgtcttaactttgtcatggctggt

SEQ ID NO: 4090 - DNA, 75 bp, synthetic construct
  source 1..75: mol_type = other DNA
tatcaccctgggcgttcaggccggttatgcccacagcgtcagcggcagcagcgctgaaggttataacggtcaggc

SEQ ID NO: 4091 - DNA, 75 bp, synthetic construct
  source 1..75: mol_type = other DNA
taaaactgccggggcatcagcacagcgtacagcacgtgaaaatctggatatctatgatgccagcctgaacaaaaa

SEQ ID NO: 4092 - DNA, 75 bp, synthetic construct
  source 1..75: mol_type = other DNA
ggatgtttctggtcgggcgtggggcctttccgctgtttgccctggtgtgggggctgaatctgtcccgtcatacgc

SEQ ID NO: 4093 - DNA, 75 bp, synthetic construct
  source 1..75: mol_type = other DNA
gataatccgcttattaatattctggataagttctccacctggtatgacacgaatagcgtgacgctgggcggtgtc

SEQ ID NO: 4094 - DNA, 75 bp, synthetic construct
  source 1..75: mol_type = other DNA
tgatcaggtagctccagaagccgggcaaattgcgcccgctctcgcacactttgggcaaaacgaaacaacgtcgcc

SEQ ID NO: 4095 - DNA, 75 bp, synthetic construct
  source 1..75: mol_type = other DNA
ttcttgaacgggtgcgccgtctggcaccaccgcacgtggcagcaccgttccggacgaccgacgaatggcgggaat

SEQ ID NO: 4096 - DNA, 75 bp, synthetic construct
  source 1..75: mol_type = other DNA
catgggcatctgcccgcgatgatttacggcatgcaaggcaacgtctgaaatcgtttcttctggttcatggggtcc

SEQ ID NO: 4097 - DNA, 75 bp, synthetic construct
  source 1..75: mol_type = other DNA
atgcgtgattttcagaatgcctttgatgctgccctcgccggggtagacagtacgatcgttgaagtgatggggctc

SEQ ID NO: 4098 - DNA, 75 bp, synthetic construct
  source 1..75: mol_type = other DNA
tccagaacgttccgccgtctggttgtcacactcatccggcgttatggcgtcagtctcattcatctggatgccggt

SEQ ID NO: 4099 - DNA, 75 bp, synthetic construct
  source 1..75: mol_type = other DNA
gcactgatttttgatgtgggcgtttctaccatttatagaaaatttccggcaaataagagcagtgaatccccctga

SEQ ID NO: 4100 - DNA, 75 bp, synthetic construct
  source 1..75: mol_type = other DNA
gaaagtgatacccttaccggtcgggttgacgacccggccgtgcagcgcccgctgcgtcaaacccgcacccgcaaa

SEQ ID NO: 4101 - DNA, 75 bp, synthetic construct
  source 1..75: mol_type = other DNA
cagttacttacccatcacccgagtcgttggctctggtggctgatgtgcaataccacgaaccatatctgtcagccg

SEQ ID NO: 4102 - DNA, 75 bp, synthetic construct
  source 1..75: mol_type = other DNA
tcacgctcattcgccgttatggcgtcagtctcattcatctggatgcctgcgctgaatgtctgccgggtctgccca

SEQ ID NO: 4103 - DNA, 75 bp, synthetic construct
  source 1..75: mol_type = other DNA
tggcaggggcgtgaatatcaggcgtacccgattgagggcagcggctttgagatgaacggaaagggcagcagtgcc

SEQ ID NO: 4104 - DNA, 75 bp, synthetic construct
  source 1..75: mol_type = other DNA
ctgacccttcaggcgatgacagttacgtgcgaccgttgtttgccgatcgttgccaggccggttttccttcgcctg

SEQ ID NO: 4105 - DNA, 75 bp, synthetic construct
  source 1..75: mol_type = other DNA
cagaacataatttgtcgtgagtgccgccagagcgaagttatgcagcgtgtgctggctttctatcaggggaatttt

SEQ ID NO: 4106 - DNA, 75 bp, synthetic construct
  source 1..75: mol_type = other DNA
tgatattctccgggcacgccgggcaaccggcctgatgacccgcgataactacagaacggtaaataacattacccg

SEQ ID NO: 4107 - DNA, 75 bp, synthetic construct
  source 1..75: mol_type = other DNA
ctgctgaagcagtgaaggaagtcctgcgctctgaagaagtccggagcgcactgaaacagaaacttcgccataacc

SEQ ID NO: 4108 - DNA, 75 bp, synthetic construct
  source 1..75: mol_type = other DNA
atacaagcagacatggaaaacactggatgacgaactggcctacgctctctggcctggtgatgtggatgccggaaa

SEQ ID NO: 4109 - DNA, 75 bp, synthetic construct
  source 1..75: mol_type = other DNA
taagatgcggccatcgaagaaaacggttcgcttcgaaactcagcccggttaccagctacagcatgactggggaga

SEQ ID NO: 4110 - DNA, 75 bp, synthetic construct
  source 1..75: mol_type = other DNA
tgatgacgaaacatgggtgctgtttaacgtcatgaacggtaaccgcgctgaaatgagcccggaagccgccggcat

SEQ ID NO: 4111 - DNA, 75 bp, synthetic construct
  source 1..75: mol_type = other DNA
tatcagtccgagcgcgagcgtcttaaatttcagcatgaaactgttcagcttgtgccagtcagtgatgtcaggcgg

SEQ ID NO: 4112 - DNA, 75 bp, synthetic construct
  source 1..75: mol_type = other DNA
atgaaactttccctgacgctggaagcagacagcgttaacgtgcaggcgctgaacatgggacgaattgtcgttgac

SEQ ID NO: 4113 - DNA, 75 bp, synthetic construct
  source 1..75: mol_type = other DNA
tgacgaacatcagcccgtcaccactgccgacattctgacaccacgacgccgggaggattacggtaaggacctgtg

SEQ ID NO: 4114 - DNA, 75 bp, synthetic construct
  source 1..75: mol_type = other DNA
actacagaggtatcctgcaggccgatgcatatgcgggttacaatgctctttacgaaagcggtcaggtaaccgaag

SEQ ID NO: 4115 - DNA, 75 bp, synthetic construct
  source 1..75: mol_type = other DNA
tgatgatcccctggcaaaacgcgcacatgcacacatgaaggccggttcgttaaccggcctttctattgggtacgt

SEQ ID NO: 4116 - DNA, 75 bp, synthetic construct
  source 1..75: mol_type = other DNA
atggaaataaaaccagaagatgagttaagtaatattgttttatttccggtaaaagaggatgacccacgtaatcag

SEQ ID NO: 4117 - DNA, 75 bp, synthetic construct
  source 1..75: mol_type = other DNA
gcgcggtaaaacagaaattaccgaaattgtgttgcgtaaaccgcagtctggtgcgctgcgcggcacacgcctgca

SEQ ID NO: 4118 - DNA, 75 bp, synthetic construct
  source 1..75: mol_type = other DNA
cgggtgggcatggattgcaggcgctgccctctacttgctctgcctgccggcgctgcgtcgcgggctttggagaaa

SEQ ID NO: 4119 - DNA, 75 bp, synthetic construct
  source 1..75: mol_type = other DNA
ctgaagtccgtcaacgggcagcccgtatggttctggaaagtcagggcgaatatgactcacaatgggcgacaattt

SEQ ID NO: 4120 - DNA, 75 bp, synthetic construct
  source 1..75: mol_type = other DNA
tttgcggtatccggaatgttctgctgccttcctttgcgaatgcgtttacagaagccgggtttgcaacgattactt

SEQ ID NO: 4121 - DNA, 75 bp, synthetic construct
  source 1..75: mol_type = other DNA
gtgacgccctgtttcggggcacgtctggtgcaggagggtaaccggttgcattaccttgccgaccgcgccggtatc

SEQ ID NO: 4122 - DNA, 75 bp, synthetic construct
  source 1..75: mol_type = other DNA
ttattaaccatggcagaacgcgcccgcgctgcatccattccggatgccaccgagcgagtggcaaatgaagtgagc

SEQ ID NO: 4123 - DNA, 75 bp, synthetic construct
  source 1..75: mol_type = other DNA
gttgccagtggcgatgtatacaattctggctacgggttattcccgtctgaacaggctcgtaaagactggcaaaat

SEQ ID NO: 4124 - DNA, 75 bp, synthetic construct
  source 1..75: mol_type = other DNA
atgctgagttaaacgctgttgctgatgagcgcatgaaaaacccggaaattgtgaaggttaacctggatgacctat

SEQ ID NO: 4125 - DNA, 75 bp, synthetic construct
  source 1..75: mol_type = other DNA
atgacagcacagatagcggcttacgggcggctggtggctgacccgcagttaaagaccaccagcaaagggacacaa

SEQ ID NO: 4126 - DNA, 75 bp, synthetic construct
  source 1..75: mol_type = other DNA
cactgtattacgaagccaaaaatgacaaagtcagaaaacgccttgggattaaaggcggtttttactggcgcacag

SEQ ID NO: 4127 - DNA, 75 bp, synthetic construct
  source 1..75: mol_type = other DNA
ggacggtcagggtggtgtgccgggagtggagtattacggataacgcccggtacagtgatttcagttgcacgatag

SEQ ID NO: 4128 - DNA, 75 bp, synthetic construct
  source 1..75: mol_type = other DNA
gaccgatacctggttgcagtcgtttctggtctggtcacccggacagcgggatatcatcaaaacggtggcactggt

SEQ ID NO: 4129 - DNA, 75 bp, synthetic construct
  source 1..75: mol_type = other DNA
ggtatcttcatgcccgtacgaacgctcccggcagcgataatctgaacgggattaacgtgaaataccgttatgagt

SEQ ID NO: 4130 - DNA, 75 bp, synthetic construct
  source 1..75: mol_type = other DNA
aatcacgattgaagcaaaccagaccgctgattttgaagataatgacttcagcggcaaacgctccctgatggagtc

SEQ ID NO: 4131 - DNA, 75 bp, synthetic construct
  source 1..75: mol_type = other DNA
agcgcgaaatagaccatctgcaggcgcagctggataaactccgccggatgaacttcggcagtcgttccgaaaaag

SEQ ID NO: 4132 - DNA, 75 bp, synthetic construct
  source 1..75: mol_type = other DNA
atgtacgcaaaatcttttctcgcacttgatggcaacggacgtctgaccggtgcccgtaccgcacagactgcacct

SEQ ID NO: 4133 - DNA, 75 bp, synthetic construct
  source 1..75: mol_type = other DNA
gcagcttggaacgcggatggagaagaggagcaacgcgatctagctatcgcggccgcgatcaagcaggtgcgacag

SEQ ID NO: 4134 - DNA, 75 bp, synthetic construct
  source 1..75: mol_type = other DNA
ccggaagactggctgcgggcagagatgcagggggagattgtggcactggtccacagtcatcccggtgggctgccc

SEQ ID NO: 4135 - DNA, 75 bp, synthetic construct
  source 1..75: mol_type = other DNA
agccttgaatacattactggtaaggtaaacgccattgtcagcaaattgatccaagagaaccaacttaaagcttat

SEQ ID NO: 4136 - DNA, 75 bp, synthetic construct
  source 1..75: mol_type = other DNA
gaaaggcatccatccgcagactcatcttgcttgcttcagcggtgtgctgcaagcggatgcgtacgccgggttcaa

SEQ ID NO: 4137 - DNA, 75 bp, synthetic construct
  source 1..75: mol_type = other DNA
acgcggtttacgctgacggggcatccgcagaagatgctgaaccgtgaatggcaggtggtacagagcattctgtca

SEQ ID NO: 4138 - DNA, 75 bp, synthetic construct
  source 1..75: mol_type = other DNA
gatgagcgttctggccagagagctggttgccagtggcgatgtatacaactctggttacgggttattcccgtctga

SEQ ID NO: 4139 - DNA, 75 bp, synthetic construct
  source 1..75: mol_type = other DNA
gcagtgagaaacggcaaaagaatgtcctcattgctgttcgtttttcaccagaagaggctgagattgttaaagaaa

SEQ ID NO: 4140 - DNA, 75 bp, synthetic construct
  source 1..75: mol_type = other DNA
agcggtgcagtcacaccgttttatcgccgcgccacaaatgaaggtattcagctgtttctggccggaagtgccgga

SEQ ID NO: 4141 - DNA, 75 bp, synthetic construct
  source 1..75: mol_type = other DNA
tgacggtccattattaccggttgcgggattacgccctgcagcatccggaatgcagcgccattatgcgcatcatcg

SEQ ID NO: 4142 - DNA, 75 bp, synthetic construct
  source 1..75: mol_type = other DNA
atatgaagatatccgggctgccggaagtgatgaacgccgtgagctgacacacgccgtgatgcgggagctggatgc

SEQ ID NO: 4143 - DNA, 75 bp, synthetic construct
  source 1..75: mol_type = other DNA
tgcctgatgggtatctgaataagactcccttgttccagtttattttgttatcgtgtttattcccgctatggggat

SEQ ID NO: 4144 - DNA, 75 bp, synthetic construct
  source 1..75: mol_type = other DNA
cgacagatgacgatgagctgccggaagtcaccggacctgcgtggatagtcgacaaggtggcgcattatggcggat

SEQ ID NO: 4145 - DNA, 75 bp, synthetic construct
  source 1..75: mol_type = other DNA
cgctgttcagcgagccgcatccttcccgtgagttttgtgtccagtacggtgagactgattacgattttctgtgcc

SEQ ID NO: 4146 - DNA, 75 bp, synthetic construct
  source 1..75: mol_type = other DNA
gcgtaacggtaactgggtgacggaaaaggatgtcaccattaacggcaagaccacctcacagtacctggcgtcggt

SEQ ID NO: 4147 - DNA, 75 bp, synthetic construct
  source 1..75: mol_type = other DNA
ggcaacaaatatagccaattttggtatagcgttgtatcagggaaaaggaatgtcaacacctcttacattaggtaa

SEQ ID NO: 4148 - DNA, 75 bp, synthetic construct
  source 1..75: mol_type = other DNA
ctctatcagaagcgggtatgcgaagggtatcactgtcagaccccgtagcattgcacttaattacattgtgagggc

SEQ ID NO: 4149 - DNA, 75 bp, synthetic construct
  source 1..75: mol_type = other DNA
ggaataccacgctgcccggcggaaatatgcaatttcagggcgtcattattgcggaaacttgccggattgaagccg

SEQ ID NO: 4150 - DNA, 75 bp, synthetic construct
  source 1..75: mol_type = other DNA
gtcgatatctggcgaaccacttactatcaccagatgccgtcgcaccaggcgattatcgattgggtgaccgccact

SEQ ID NO: 4151 - DNA, 75 bp, synthetic construct
  source 1..75: mol_type = other DNA
atgcactcctggaaaaagaaacttgtagtatcacaattagcattggcttgcactctggctatcacctctcaggct

SEQ ID NO: 4152 - DNA, 75 bp, synthetic construct
  source 1..75: mol_type = other DNA
gtaaggtatccattacccgctcgcaactggcaatgctcctcgataagctggactggcgtcagccaaaaacatccc

SEQ ID NO: 4153 - DNA, 75 bp, synthetic construct
  source 1..75: mol_type = other DNA
agagcaagttacagagacgcatgtacacgcagaaagctctctggtatcgccataatggcgaccgcgaaggaatgc

SEQ ID NO: 4154 - DNA, 75 bp, synthetic construct
  source 1..75: mol_type = other DNA
gtgttttttagtccatctttaaatatttttgtgaatcctgcgcttaaggatgactacatcaatgtaaattcatgg

SEQ ID NO: 4155 - DNA, 75 bp, synthetic construct
  source 1..75: mol_type = other DNA
cgctggggaaaaattaagaagcctcagctactggcgagaattgaacgccttgaacagcacgggcaaaccgtaatc

SEQ ID NO: 4156 - DNA, 75 bp, synthetic construct
  source 1..75: mol_type = other DNA
gaactacgagtcaatgaacattgattacgtggtggaagactacgccgccggttgtctggtggaaaaaattaaggt

SEQ ID NO: 4157 - DNA, 75 bp, synthetic construct
  source 1..75: mol_type = other DNA
gcccggatatgaatgtggtatcagagccgaaagtggtgacagtgaagctgggcgatggttatgaacagcgtcgtg

SEQ ID NO: 4158 - DNA, 75 bp, synthetic construct
  source 1..75: mol_type = other DNA
gtcgatggtgttaatctcactgaactgattaacaaggtcgctgaaaacggttattcactccgtgtggtggacgac

SEQ ID NO: 4159 - DNA, 75 bp, synthetic construct
  source 1..75: mol_type = other DNA
tgaaagggatccgcaattttgagaataaagttacggtaactttagcgttacgggacaaagaacgctttgacggtg

SEQ ID NO: 4160 - DNA, 75 bp, synthetic construct
  source 1..75: mol_type = other DNA
gagcgtggcgctttaccgatgattgatcgcggtgatattcgtcaggctatcgaccgttgcagcaatatctgggct

SEQ ID NO: 4161 - DNA, 75 bp, synthetic construct
  source 1..75: mol_type = other DNA
tttacggacgcttttacctggttaatttcgataacgtgaaggtgatttcactggccgaaaataaagaatgtggcg

SEQ ID NO: 4162 - DNA, 75 bp, synthetic construct
  source 1..75: mol_type = other DNA
gccacggtggtccgccgccgggtgtatgcccgttttctggatgcggtgaatttcgttgcgggcaatccggaggcg

SEQ ID NO: 4163 - DNA, 75 bp, synthetic construct
  source 1..75: mol_type = other DNA
aatggtgccgtgatccacattgtgccgcgtctggcgggagccaaaagtggcggtctttttcaggctgtgctgggg

SEQ ID NO: 4164 - DNA, 75 bp, synthetic construct
  source 1..75: mol_type = other DNA
ttgttgatgcggtagcgcgtaatggtagttttagcgctgcggcacaggagctgcatcgcgttccttctgcggtca

SEQ ID NO: 4165 - DNA, 75 bp, synthetic construct
  source 1..75: mol_type = other DNA
ataccaaagcagatcgtctcgctgaattaaaaatccgttcgccctcaattcaactgataaaatttggcgctattg

SEQ ID NO: 4166 - DNA, 75 bp, synthetic construct
  source 1..75: mol_type = other DNA
atgaacgcaaaaatcaaatacggcctgtcagcggccgttctggcgctgattggagcaggcgcatctgctcctgag

SEQ ID NO: 4167 - DNA, 75 bp, synthetic construct
  source 1..75: mol_type = other DNA
ggcgtcagaacataatctgtcgcgagtgccggaagagtgaagttatgcagcgcatactagcattctatcagggaa

SEQ ID NO: 4168 - DNA, 75 bp, synthetic construct
  source 1..75: mol_type = other DNA
ggggacaaaaagaaaccggagaatggcagtggacatttcaggtcggggaccttgaaaacgtcaatatcactcact

SEQ ID NO: 4169 - DNA, 75 bp, synthetic construct
  source 1..75: mol_type = other DNA
atggggtggctaatgatatcagataaactcataacgctggtgaagagcctctgtgtacttgtcggcatttcattt

SEQ ID NO: 4170 - DNA, 75 bp, synthetic construct
  source 1..75: mol_type = other DNA
ggaaaaatcaggaagtggcacactcactgtcagcaacaccacactcacccagaaagccgtcaacctgaatgaagg

SEQ ID NO: 4171 - DNA, 75 bp, synthetic construct
  source 1..75: mol_type = other DNA
cactgacggcacttacttttgcgccactaatgtggcgcgggtgaatcttatccgacaggtacaggatccacgcaa

SEQ ID NO: 4172 - DNA, 75 bp, synthetic construct
  source 1..75: mol_type = other DNA
atgtccaaaatcgtaaaaatcatcggtcgtgaaatcatcgactcccgtggtaacccgactgttgaagccgaagta

SEQ ID NO: 4173 - DNA, 75 bp, synthetic construct
  source 1..75: mol_type = other DNA
ctgatgccgtgccttatcaggagtttgcaaaactcattggtaaaactccaagagctgtaaggggcatgattgaga

SEQ ID NO: 4174 - DNA, 75 bp, synthetic construct
  source 1..75: mol_type = other DNA
atttatgcctgcaagccataaatgagcgggtaaaatcagagtgcctcttactcctcccacaagaacacgatgcag

SEQ ID NO: 4175 - DNA, 75 bp, synthetic construct
  source 1..75: mol_type = other DNA
cataaaaagaagaatgctcgttaatccagcgacacatcctgtcggcgtgagtgtgtcagaacagacgctcccaca

SEQ ID NO: 4176 - DNA, 75 bp, synthetic construct
  source 1..75: mol_type = other DNA
ataaagtcagcagcccataaagctaaattcccggccttcaacaatccggaagtttatagagattttcaaaaatcc

SEQ ID NO: 4177 - DNA, 75 bp, synthetic construct
  source 1..75: mol_type = other DNA
gattatttcaccctcagagagcggctgatgacgatgcagatgcaactggaaggggcacaggagtatatccgcact

SEQ ID NO: 4178 - DNA, 75 bp, synthetic construct
  source 1..75: mol_type = other DNA
atgatgcacttaaagaacataaaagcgggtaacgctaaaacactggaacagtatgagttaacaaagaaacacgga

SEQ ID NO: 4179 - DNA, 75 bp, synthetic construct
  source 1..75: mol_type = other DNA
cttccattatttagcatttgtgcagctaaaagccgatcaggcactggataaggccggaaaaattatcatggctga

SEQ ID NO: 4180 - DNA, 75 bp, synthetic construct
  source 1..75: mol_type = other DNA
gaaggatctgacgccgggcgagatgacggcagaatcctacgatgataactacctggatgatgaagacgcggactg

SEQ ID NO: 4181 - DNA, 75 bp, synthetic construct
  source 1..75: mol_type = other DNA
gtgaaaacgggggctgaagccatccgcgcactggccacacagctcccggtgtttcgtcagaaactgagcgacggc

SEQ ID NO: 4182 - DNA, 75 bp, synthetic construct
  source 1..75: mol_type = other DNA
cgtcgatcctgaagtcagaatggctgaatggatgcagacgctgaaggaaaccgggttcgacatccgggcatatcg

SEQ ID NO: 4183 - DNA, 75 bp, synthetic construct
  source 1..75: mol_type = other DNA
gaaaatacattggcgataaagaagggaaaagacacgctatcgtcaacggtgttcttatggttcaccgcggatggg

SEQ ID NO: 4184 - DNA, 75 bp, synthetic construct
  source 1..75: mol_type = other DNA
cgggagctggtggagacgcgggaacgactggtgagagacgctgatgattttgtcgcagtggcgatcgctggtttc

SEQ ID NO: 4185 - DNA, 75 bp, synthetic construct
  source 1..75: mol_type = other DNA
atgccagaacggctattccattcgaaggtgagcgccataatgcacttgatgacgcccgttaccaggcaaaatacg

SEQ ID NO: 4186 - DNA, 75 bp, synthetic construct
  source 1..75: mol_type = other DNA
gaggcatgtggtgaggcctttctggcgcaggttcgccagcaggcggaaaaactggtcagggagatggcggcatga

SEQ ID NO: 4187 - DNA, 75 bp, synthetic construct
  source 1..75: mol_type = other DNA
ctgtatggtgagatgcgtgtggggtcgcgtgtgatttcacagagtatcagtactgctgatgagggtgatggtggt

SEQ ID NO: 4188 - DNA, 75 bp, synthetic construct
  source 1..75: mol_type = other DNA
cccggttttgttgaattgctgggatcggggtttgctgttgaatacctgagccgcaagaatccgtttggtgatatc

SEQ ID NO: 4189 - DNA, 75 bp, synthetic construct
  source 1..75: mol_type = other DNA
cggatgagtcagaaaccctcagacaactggaagtacttcagaaaaacagtgcggaagaacctgtgaggtataaat

SEQ ID NO: 4190 - DNA, 75 bp, synthetic construct
  source 1..75: mol_type = other DNA
gtggtggtggtgcgtttaaaaacgtgctcattcatgcgcccaacgggggcaaagagggggtgcaaattttgccgt

SEQ ID NO: 4191 - DNA, 75 bp, synthetic construct
  source 1..75: mol_type = other DNA
gccggaggcgtattttcgtatcgcaccggaagactggctgcgggcagagatgcagggggagattgtggcactggt

SEQ ID NO: 4192 - DNA, 75 bp, synthetic construct
  source 1..75: mol_type = other DNA
gtactgaaagatatgatcatcgaatcagtatggaaaaatattattgttagtgacgagtccctgacaagatgtatc

SEQ ID NO: 4193 - DNA, 75 bp, synthetic construct
  source 1..75: mol_type = other DNA
acgtccgctttggactggagtttgagaaatccgcctttggtaagtacaacgttgataatgctgtcaacgctaact

SEQ ID NO: 4194 - DNA, 75 bp, synthetic construct
  source 1..75: mol_type = other DNA
cggtggccacaccgaccaccttcctggtcaacgtcaacacgcttgaggcattaccgcttttacagggggcaacgg

SEQ ID NO: 4195 - DNA, 75 bp, synthetic construct
  source 1..75: mol_type = other DNA
atgtcagaaattacatccctggtcactgctgaagcagtgaaggaagtcctgcgctctgaagaagtccggagcgca

SEQ ID NO: 4196 - DNA, 75 bp, synthetic construct
  source 1..75: mol_type = other DNA
cagagacagattattgacctgatcgacaacgaagccggactcacagaacaggaacgcaaacttctccacgtactg

SEQ ID NO: 4197 - DNA, 75 bp, synthetic construct
  source 1..75: mol_type = other DNA
atggtaacgctgaccattaaccgtaaaccgcagggtattttcagtaagtcaccggcaacgccgctgcaggataaa

SEQ ID NO: 4198 - DNA, 75 bp, synthetic construct
  source 1..75: mol_type = other DNA
ggacgggcccgtctgccttcactttatgccagcttcggtaagctgggtgagacaccgactcatgaagatatcatt

SEQ ID NO: 4199 - DNA, 75 bp, synthetic construct
  source 1..75: mol_type = other DNA
ttgctgcggtgagaagcgaatcatcagaatatggcttatcacaagtcattatttcagcagtgtatgaattaaaag

SEQ ID NO: 4200 - DNA, 75 bp, synthetic construct
  source 1..75: mol_type = other DNA
acgttttttggtgcctcaatcggttttatgggcgcagagaaagcacgcgacaaggttattgcaatatttgatcgc

SEQ ID NO: 4201 - DNA, 75 bp, synthetic construct
  source 1..75: mol_type = other DNA
acgctggacacactgaaagaaattgccgcagccattaacaatgacccgaaattcagtaccaccattaacaatgcg

SEQ ID NO: 4202 - DNA, 75 bp, synthetic construct
  source 1..75: mol_type = other DNA
attacagcgcactaagaccgcacgaatataacggtgggttacccccaaacgaatcggaaaatcgatactggaaaa

SEQ ID NO: 4203 - DNA, 75 bp, synthetic construct
  source 1..75: mol_type = other DNA
tctgatgcattagaacgctacggtatagtcacttctgacggttcaaaaaaaatcataggttttcgtgctggctct

SEQ ID NO: 4204 - DNA, 75 bp, synthetic construct
  source 1..75: mol_type = other DNA
tcaacggcactatcgacaacgaaacaattcttctagttaacgctcgtgatctacactcttttcttggtgtgggca

SEQ ID NO: 4205 - DNA, 75 bp, synthetic construct
  source 1..75: mol_type = other DNA
cggggaagtggtgacgtcgctggttatcgcgcgtcctcacaacgacatcaacaaaatcgttattaaacataaagc

SEQ ID NO: 4206 - DNA, 75 bp, synthetic construct
  source 1..75: mol_type = other DNA
gtgcagatgcctccggtgcgggccggattattcagaggaggtcactttcagggggaagctgtggccagccggctg

SEQ ID NO: 4207 - DNA, 75 bp, synthetic construct
  source 1..75: mol_type = other DNA
tatcaccctgggcgttcaggccggttatgcccacagtgtcagcggcagcagcgctgaaggttataacggtcaggc

SEQ ID NO: 4208 - DNA, 75 bp, synthetic construct
  source 1..75: mol_type = other DNA
cgctggctggcatcgtgcggcctgaccgtggagcagatgcaaaaccagatggacccggtgtacacgccggcgcga

SEQ ID NO: 4209 - DNA, 75 bp, synthetic construct
  source 1..75: mol_type = other DNA
aaccccccgcacacagacaacggataacggcaaacagaacacctatttttcttcactggataatatggttgccca

SEQ ID NO: 4210 - DNA, 75 bp, synthetic construct
  source 1..75: mol_type = other DNA
tgttttacgcgtatgacaggatacggaggacggttgtggcgcacgtcttcggtgaacgcactctggccacactgg

SEQ ID NO: 4211 - DNA, 75 bp, synthetic construct
  source 1..75: mol_type = other DNA
gggatccagacccgcgattctgtgaaccagaaccagcatgaatcggaacggaactaccaaaaagcggaacaaaac

SEQ ID NO: 4212 - DNA, 75 bp, synthetic construct
  source 1..75: mol_type = other DNA
tgatgcggttaaaaaaattcaggcgttgttaccagctatcgaaaaagcaatgccacctctgctggtggcccgaat

SEQ ID NO: 4213 - DNA, 75 bp, synthetic construct
  source 1..75: mol_type = other DNA
actggttatcccgttttgaaagtattctcaacagtgccctggtgcaacaccgtgccgtctcgttaatccgggtgg

SEQ ID NO: 4214 - DNA, 75 bp, synthetic construct
  source 1..75: mol_type = other DNA
agccgatcgcattatggcgtgtgaagaagcgaaaggtcgtgaacaactggcggcaacgctggcggcgatgccgga

SEQ ID NO: 4215 - DNA, 75 bp, synthetic construct
  source 1..75: mol_type = other DNA
atgaaaatcaagcatgaacacatccgcatggcgatgaatgcctgggcgcatccggacggtgaaaaagttccggca

SEQ ID NO: 4216 - DNA, 75 bp, synthetic construct
  source 1..75: mol_type = other DNA
gcaaaagaatgcgcgctggaaggtatggcgagaacacaggttatctggctgaaagagggggttattaaggcgtga

SEQ ID NO: 4217 - DNA, 75 bp, synthetic construct
  source 1..75: mol_type = other DNA
tgttgcggcagcgatcgtgttgttcgatcagatgaatcgtggtggtccggcgggaaatgccgtggtggcgcattg

SEQ ID NO: 4218 - DNA, 75 bp, synthetic construct
  source 1..75: mol_type = other DNA
ttcagtccattattgatgatctgcgcgatcagatagccctgcgggtgactgaagcaggtgcggatgatgaggagg

SEQ ID NO: 4219 - DNA, 75 bp, synthetic construct
  source 1..75: mol_type = other DNA
gtcattgataaactggttacaaagtgctggcaggaggaatcttacgctgaagcacaattgagaaaggtgacgaga

SEQ ID NO: 4220 - DNA, 75 bp, synthetic construct
  source 1..75: mol_type = other DNA
aagaacagcgtgataaaaaagtcagtgagctgaagcaggcgaccgccaccatcgctgacatgcagcagcgtcagc

SEQ ID NO: 4221 - DNA, 75 bp, synthetic construct
  source 1..75: mol_type = other DNA
gctggagcgcatgaccgatgctgagctagcattgcagccgggcgagatcgccgaccaggagcgtgaacgctgccg

SEQ ID NO: 4222 - DNA, 75 bp, synthetic construct
  source 1..75: mol_type = other DNA
ctgcaggtgccgcttcgtgacttgtggaatccggcaacctgtccggtcagtttcctgccttatctcgcctgggcg

SEQ ID NO: 4223 - DNA, 75 bp, synthetic construct
  source 1..75: mol_type = other DNA
cgctgaatcttctgagtgttgacccgaacaaccagagccagattattgcggagcaaatcatccctgagaacgagg

SEQ ID NO: 4224 - DNA, 75 bp, synthetic construct
  source 1..75: mol_type = other DNA
aaaacgtgcccgtgcgcgtcgtgatgcgaacagggaacgtcaggatatcgtcaccctggtgaaacggcagctgac

SEQ ID NO: 4225 - DNA, 75 bp, synthetic construct
  source 1..75: mol_type = other DNA
atggctgtgcttcgtacgttaccgggcagaatcaaaactctgaacacccggcgggtgaatgtcctgaagggtgaa

SEQ ID NO: 4226 - DNA, 75 bp, synthetic construct
  source 1..75: mol_type = other DNA
cgcacacgttcaaataactgctacggacaggttattcgtcgtgaccaggaaagcgcattagcttgttgggggata

SEQ ID NO: 4227 - DNA, 75 bp, synthetic construct
  source 1..75: mol_type = other DNA
cagataatccggaattgatcctgcgtgtgctacagctgagatttgacgagtcactgtcgtacccgcgcatttctg

SEQ ID NO: 4228 - DNA, 75 bp, synthetic construct
  source 1..75: mol_type = other DNA
tgattcgtgaatcagaggatttaacgcgcgaagaattttgcggcctgattgatgtgcctatcggcactttgcgtc

SEQ ID NO: 4229 - DNA, 75 bp, synthetic construct
  source 1..75: mol_type = other DNA
atctgaaagaaatctggggttatctgacccatgatgaacaggaactgtttgaagtcattaataaaaaattactgg

SEQ ID NO: 4230 - DNA, 75 bp, synthetic construct
  source 1..75: mol_type = other DNA
tgagatcgacggtgagttcaccgtcaaacgactgctgttgcgcccacgcccggcactggagccggtttcagacag

SEQ ID NO: 4231 - DNA, 75 bp, synthetic construct
  source 1..75: mol_type = other DNA
tggcgataaagcctattgcgaagcgataaagtcagcagcccataaagctaaattcccggccttcaacaatccgga

SEQ ID NO: 4232 - DNA, 75 bp, synthetic construct
  source 1..75: mol_type = other DNA
tttatgggactggtatccggacgtaagctccgttatgcggaggataaaccctggaccacggcatcggctgaggga

SEQ ID NO: 4233 - DNA, 75 bp, synthetic construct
  source 1..75: mol_type = other DNA
gaacaacgtcgtcgtcagggacgcacactttcagcatggccttatgccagcgctttctttcgctgcctgaatggc

SEQ ID NO: 4234 - DNA, 75 bp, synthetic construct
  source 1..75: mol_type = other DNA
aatatgagaagtatcgcggcggcggtatgccgggggcggtggatgtggatctgggactggatgacagtgcactgg

SEQ ID NO: 4235 - DNA, 75 bp, synthetic construct
  source 1..75: mol_type = other DNA
aaacttattaatgaagccaacgagcacatgaacagcaggcaatggcctggtaaagcggctattggtcgtctgaaa

SEQ ID NO: 4236 - DNA, 75 bp, synthetic construct
  source 1..75: mol_type = other DNA
acagacgcaggcaggcacttcatggagcgtgtcacggcgggtgtcgatcaactcgatcacgcagtgaagaccgcg

SEQ ID NO: 4237 - DNA, 75 bp, synthetic construct
  source 1..75: mol_type = other DNA
acgaatctctggtatgcggcgtgtttcccaaccaggacggcacgtttaccgcgatgacgtataccagaagcaaaa

SEQ ID NO: 4238 - DNA, 75 bp, synthetic construct
  source 1..75: mol_type = other DNA
atgaacaccaaaatcaaatacggcctgtcggctgccgttctggcgctgattgccgcaggtgcgcctgcgcctgaa

SEQ ID NO: 4239 - DNA, 75 bp, synthetic construct
  source 1..75: mol_type = other DNA
catcgctggaaactggcgcggctttactgattgttatgctcctgattgcctggggagcgggcatatggcaggact

SEQ ID NO: 4240 - DNA, 75 bp, synthetic construct
  source 1..75: mol_type = other DNA
gtggcgcaccgttacgcgggaaggccggagatgcgctaccgctacgacgatacggggcgggtggtggagcaactg

SEQ ID NO: 4241 - DNA, 75 bp, synthetic construct
  source 1..75: mol_type = other DNA
tcaaacaactgttacggtcaggtatcccgtcgtgaccaggagagcgcgctggcgtgctggggtatcgacagataa

SEQ ID NO: 4242 - DNA, 75 bp, synthetic construct
  source 1..75: mol_type = other DNA
gatggtcagtctgggccgcaaaaactacctgttcttcggttcggatcatggaggagagcggggagcgctgctgta

SEQ ID NO: 4243 - DNA, 75 bp, synthetic construct
  source 1..75: mol_type = other DNA
atagatctggatatacataaaaagaacaggtatgcaagttatgattttagaagaaaaatcgaaatgcagcatgaa

SEQ ID NO: 4244 - DNA, 75 bp, synthetic construct
  source 1..75: mol_type = other DNA
ctcattaaccagaaacgcatcgcgccgctgaacctgctgaccgttgacccggccaataccagtcagattatcgcg

SEQ ID NO: 4245 - DNA, 75 bp, synthetic construct
  source 1..75: mol_type = other DNA
cgatgaagaacagcgaaaatgagcttgctgagcaacttatagaacaaaccggcgataacactctgacgttaatgg

SEQ ID NO: 4246 - DNA, 75 bp, synthetic construct
  source 1..75: mol_type = other DNA
tctggagtccggtggtcgcctggatgtactggagggccattcagcctggaaaacactggtggatgacggcggaac

SEQ ID NO: 4247 - DNA, 75 bp, synthetic construct
  source 1..75: mol_type = other DNA
atgaagacctttgcgctacagggcgacacgctcgacgccatttgtgtccggtattacgggcgcactgagggcgtg

SEQ ID NO: 4248 - DNA, 75 bp, synthetic construct
  source 1..75: mol_type = other DNA
ggctttatcatgtactggagccggatacatggggcagaatgtgtgctcgcgtatcaggtgctgtagggggagcgc

SEQ ID NO: 4249 - DNA, 75 bp, synthetic construct
  source 1..75: mol_type = other DNA
caggatgaacgattgccgttcctgatagctgaattcctgacagacagcacgtctatgcaggatattcaacgaatt

SEQ ID NO: 4250 - DNA, 75 bp, synthetic construct
  source 1..75: mol_type = other DNA
atagctcccttactggtgggcttatagctgtgtcagaattaagtaagaaggtcacaggaaaaaccggcagaagat

SEQ ID NO: 4251 - DNA, 75 bp, synthetic construct
  source 1..75: mol_type = other DNA
atctgccgtggtgccatcatggtggatggcaaacctgtcgttccgggcatgaagttgtcgaaggaaaaatgcgac

SEQ ID NO: 4252 - DNA, 75 bp, synthetic construct
  source 1..75: mol_type = other DNA
gctgctgcacgaaaggggctttttctgacgatggaagaaaccaggctggcacgggaagcgaaagatgctctgatg

SEQ ID NO: 4253 - DNA, 75 bp, synthetic construct
  source 1..75: mol_type = other DNA
gcccgcagggaaagcagtctgaatccccgggccattaatcataacaggaatgacagaggaaaaattatcagtacc

SEQ ID NO: 4254 - DNA, 75 bp, synthetic construct
  source 1..75: mol_type = other DNA
atcagacatacagacacagacgaaagactcttccgtctgagtaaacaccatcatttatatgagaaaaagaaaaca

SEQ ID NO: 4255 - DNA, 75 bp, synthetic construct
  source 1..75: mol_type = other DNA
ttgatatgccggattttgagcgtgaggatgactggtggcgcaacggtcagaacctttacctggacaatatggcgg

SEQ ID NO: 4256 - DNA, 75 bp, synthetic construct
  source 1..75: mol_type = other DNA
tctgcggcttaaacgcctgggactgtcaaaaacgttccgccgtctggttgtcacacttatccggcgttatggcgt

SEQ ID NO: 4257 - DNA, 75 bp, synthetic construct
  source 1..75: mol_type = other DNA
ctgagacgcacaaaccgatcaccggctacttgtggggcgcgctggccgtgctcacctgtccctgccatttgccga

SEQ ID NO: 4258 - DNA, 75 bp, synthetic construct
  source 1..75: mol_type = other DNA
attccctcgttgctctgttgaagtctgaaatgaagatacacggaaacaaagcaccagagacttacagaagaatca

SEQ ID NO: 4259 - DNA, 75 bp, synthetic construct
  source 1..75: mol_type = other DNA
ttcttgaacgtattcgcagacttgcaccacaggggtcggttccaccgtaccggacggtggaggagtggcgggaat

SEQ ID NO: 4260 - DNA, 75 bp, synthetic construct
  source 1..75: mol_type = other DNA
catcgccctttaatgtctcttccggtgatgcccgtcagcccacactggcggtgcacagccaggcctttcataccg

SEQ ID NO: 4261 - DNA, 75 bp, synthetic construct
  source 1..75: mol_type = other DNA
gggcagaaaccgctcaccaccgcgcagattgttgatgaaatctgcgattttgtggtgaatcagcaggcggttttc

SEQ ID NO: 4262 - DNA, 75 bp, synthetic construct
  source 1..75: mol_type = other DNA
tggatatccgggtaccggaccatctgatagttggtggcagacaggttttctcctttgccgaacatggtctgcttt

SEQ ID NO: 4263 - DNA, 75 bp, synthetic construct
  source 1..75: mol_type = other DNA
gtgacgcaggccgataaaacggagccctgccatgaatgggatatggccggtattcagccttctcccgcacaggca

SEQ ID NO: 4264 - DNA, 75 bp, synthetic construct
  source 1..75: mol_type = other DNA
atgtcgcaaaaatcgcttacggccatcacgttctgcgtgacggcaatcctcatcatctggatgctgcacggttcg

SEQ ID NO: 4265 - DNA, 75 bp, synthetic construct
  source 1..75: mol_type = other DNA
ggcagcggccggcactcgcgccgcgatcaacatgaccggcggtgacgcggccctgaacctgaccgcgatgccggc

SEQ ID NO: 4266 - DNA, 75 bp, synthetic construct
  source 1..75: mol_type = other DNA
gaatcgacgctgaactgaaggatgcttttatggccgctgcaaaaagcatggaccgtaatggctctcagttaatcc

SEQ ID NO: 4267 - DNA, 75 bp, synthetic construct
  source 1..75: mol_type = other DNA
gattaaggacggtggcagagactgccgtattcgttcaaataactgctatggacaggtctcacggcgtgaccagga

SEQ ID NO: 4268 - DNA, 75 bp, synthetic construct
  source 1..75: mol_type = other DNA
atgtcgcagacagaaaatgcagtgacttcctcatcaggtacaaagcgagcatacagaaaaggtaatcctctgacg

SEQ ID NO: 4269 - DNA, 75 bp, synthetic construct
  source 1..75: mol_type = other DNA
gttacccagacatcccgtatcggctccattggcgtgatgatgagccatgtcagctatgccggtcatctggcgcag

SEQ ID NO: 4270 - DNA, 75 bp, synthetic construct
  source 1..75: mol_type = other DNA
aaactggaagtttctggatggtaaagtagtaaagcgggaatatacaaaacaggaactgcaacagcaggcagagtt

SEQ ID NO: 4271 - DNA, 75 bp, synthetic construct
  source 1..75: mol_type = other DNA
gggaagtgcgtgttccacaccggggaaatgtggtggagaaagttatcgaaggggcttacgaagtggtgggggttt

SEQ ID NO: 4272 - DNA, 75 bp, synthetic construct
  source 1..75: mol_type = other DNA
tcttcaatttaaaagtttgatgctcaaagaattaaacttcgtaatgaattacgtgttcactcttgagacttggta

SEQ ID NO: 4273 - DNA, 75 bp, synthetic construct
  source 1..75: mol_type = other DNA
ttccggtaatgctgggggcagtgttaatgtctcagcatgtacatgcagttgataatctgaccttcagaggaaaac

SEQ ID NO: 4274 - DNA, 75 bp, synthetic construct
  source 1..75: mol_type = other DNA
cgtcccggaatgcgtcacccgccgtcaggcggtgattaatcaggcccgcaccctgctgaaaaacaacagacacga

SEQ ID NO: 4275 - DNA, 75 bp, synthetic construct
  source 1..75: mol_type = other DNA
gtcctggcgtttggcagacaggccgacgcactggcaaaacaccacaaaggcgaactggtgagcgtggcgggtaac

SEQ ID NO: 4276 - DNA, 75 bp, synthetic construct
  source 1..75: mol_type = other DNA
cgccgggggtataccaaacacatgctgcgtctgcgccgtgacggggagataaacggacaacatgtccctgaaatc

SEQ ID NO: 4277 - DNA, 75 bp, synthetic construct
  source 1..75: mol_type = other DNA
cacggatgcggcatctgttcgcctgcatttccagattcgttaccgtgcaacggcaattgatccgctacgttactt

SEQ ID NO: 4278 - DNA, 75 bp, synthetic construct
  source 1..75: mol_type = other DNA
agctgtcgcacgaaacgccagaggcgtatacctgcatttgcgtgaaatccatcaaatctggacaagccagcttta

SEQ ID NO: 4279 - DNA, 75 bp, synthetic construct
  source 1..75: mol_type = other DNA
gtggagggtcaggtcatcaactttagcgtaacgccagaaggtgcgacgttaagtggcggaaaagtgggaaccaac

SEQ ID NO: 4280 - DNA, 75 bp, synthetic construct
  source 1..75: mol_type = other DNA
tggagccagaaagctacctccgctatgtccttgacgtcatagccgactggccgataaaccgggtcggcgaactgc

SEQ ID NO: 4281 - DNA, 75 bp, synthetic construct
  source 1..75: mol_type = other DNA
ttttaaaacaggaggaaccacaggagttcctctgatatctgatgcaacaatagtctctaatcccgggcaaactta

SEQ ID NO: 4282 - DNA, 75 bp, synthetic construct
  source 1..75: mol_type = other DNA
acgatatgcgtacattcccaccatcaccgtactggaaagcctgcagcgggaaggctttcagccattcttcgcctg

SEQ ID NO: 4283 - DNA, 75 bp, synthetic construct
  source 1..75: mol_type = other DNA
cgcagaagaactgcacggcaaccgtcttcagtggctgtatgccatcgatgtgctgattgaaacacagggcgaggt

SEQ ID NO: 4284 - DNA, 75 bp, synthetic construct
  source 1..75: mol_type = other DNA
gagcacctgtggaaaagaattgacaagacactttctgaggaaattgtacagaaatgcagaaatatgaacggtgaa

SEQ ID NO: 4285 - DNA, 75 bp, synthetic construct
  source 1..75: mol_type = other DNA
atgaatgagtttaagcgttttgaagaccggctgaccggactgattgagtcgctgtcaccgtcagggcgtcggcga

SEQ ID NO: 4286 - DNA, 75 bp, synthetic construct
  source 1..75: mol_type = other DNA
gcattggcgaatgccgggaatgacaacggtcagggtgttgattacggtagtggatcagctggcgacggctgggtt

SEQ ID NO: 4287 - DNA, 75 bp, synthetic construct
  source 1..75: mol_type = other DNA
aagagcattaccggatttcaggaaaattatcaacgcaatatcaggccaatcaaaacagcatcagaagcccgacta

SEQ ID NO: 4288 - DNA, 75 bp, synthetic construct
  source 1..75: mol_type = other DNA
accgttacggtgtcgccgcaggtggtcgccgactggcagcactcaacatgctggcagagcgtggcatcattccgg

SEQ ID NO: 4289 - DNA, 75 bp, synthetic construct
  source 1..75: mol_type = other DNA
cagttcaggctttctgtcgtgccggaaggaaaaaccatgtatgttctgcttccccagatagccagtttaaagttg

SEQ ID NO: 4290 - DNA, 75 bp, synthetic construct
  source 1..75: mol_type = other DNA
cagcagccatccagtcttgcgcgtggtattggtggggcggcatcaggcgctttagcgggtgcgcaacttggttcc

SEQ ID NO: 4291 - DNA, 75 bp, synthetic construct
  source 1..75: mol_type = other DNA
gaagtatagcactgggtgcctcttcgtattcattgggccaatactcaatggccctcggccgttattcaaaagcat

SEQ ID NO: 4292 - DNA, 75 bp, synthetic construct
  source 1..75: mol_type = other DNA
accgctgacccgcgcagcaatccgcaggcagaactgattaaagatgtttacggcattgatgacgcactgcgcgcg

SEQ ID NO: 4293 - DNA, 75 bp, synthetic construct
  source 1..75: mol_type = other DNA
cgggaggttttactggatgaggtgtttcagcggaatatcccgctctctcataaaaaactcagccgggcgctgaaa

SEQ ID NO: 4294 - DNA, 75 bp, synthetic construct
  source 1..75: mol_type = other DNA
ccggctcatcaccgcttgaagtcgccgccgcaaaagcctgtgcggaaattgaaaaaacgccggtcagtattcgtg

SEQ ID NO: 4295 - DNA, 75 bp, synthetic construct
  source 1..75: mol_type = other DNA
attgacgaacccatgaataacaccacgcgtctgcaatgcatgagtgctgccgtgattgcgctgacacgatgggaa

SEQ ID NO: 4296 - DNA, 75 bp, synthetic construct
  source 1..75: mol_type = other DNA
tatcaatgatcgagcgcgtggtcaccaatttagtggataacgcggtacgccacactccacagggcggcacaatca

SEQ ID NO: 4297 - DNA, 75 bp, synthetic construct
  source 1..75: mol_type = other DNA
ggagcgatttgccatcggcgaactcatccaggatgtggcgcagaaatttgatctcaccatcgaaacccggcaatt

SEQ ID NO: 4298 - DNA, 75 bp, synthetic construct
  source 1..75: mol_type = other DNA
cagcgaactgcatattgccccgtcaacgtattaccattgtcagcaacagcgacatcatccggataaacgcagtgc

SEQ ID NO: 4299 - DNA, 75 bp, synthetic construct
  source 1..75: mol_type = other DNA
agtagagtggctgacggataatggttcatgctaccgggctaatgaaacacggcagtttgcccggatgttggggct

SEQ ID NO: 4300 - DNA, 75 bp, synthetic construct
  source 1..75: mol_type = other DNA
tttacaaatgtcggaaacagtaacctcggggtggcaacctccggacagggtatccgggttgtggatgcacagaat

SEQ ID NO: 4301 - DNA, 75 bp, synthetic construct
  source 1..75: mol_type = other DNA
gggtggcaccatcaatatgcgtgttcgccttgatggcagcaatgcctctgaccagctggtgattaatggtggtca

SEQ ID NO: 4302 - DNA, 75 bp, synthetic construct
  source 1..75: mol_type = other DNA
gcgtttattttgtgcccttcatgacagacggtaacggcgtcaataccgccactaacgcgccggcagaagatccgg

SEQ ID NO: 4303 - DNA, 75 bp, synthetic construct
  source 1..75: mol_type = other DNA
ggcggtggcggcggcagaccggctgatccatcacggatatatgttcgaactgaaaggtgaaagctacaggaaaaa

SEQ ID NO: 4304 - DNA, 75 bp, synthetic construct
  source 1..75: mol_type = other DNA
atgcgctgaacaaaatcagccaggacaaacgaaacagtaattatattatcgcagagctggttattccgccggagg

SEQ ID NO: 4305 - DNA, 75 bp, synthetic construct
  source 1..75: mol_type = other DNA
ccctcgtcgtcgttacttactctaacgtccctgtaataacaacagggttattggcaaatctatacaaaactgaag

SEQ ID NO: 4306 - DNA, 75 bp, synthetic construct
  source 1..75: mol_type = other DNA
aaaatccgtattgccggagatgatgggctgcctgcgtgggcagatattcctccacccacgcatgaagagcttatt

SEQ ID NO: 4307 - DNA, 75 bp, synthetic construct
  source 1..75: mol_type = other DNA
cagggcggatgaaaccagccaggcattcacccgcctgaaaaacagtctcgaccacaccgaaagtctgacccagca

SEQ ID NO: 4308 - DNA, 75 bp, synthetic construct
  source 1..75: mol_type = other DNA
aaattctgcgcaattacaaagccgtgattaatgcgcggcgtcgtgaaatggggcagaaaccgctcaccactgcgc

SEQ ID NO: 4309 - DNA, 75 bp, synthetic construct
  source 1..75: mol_type = other DNA
acagccatattacaggagggttaatcgctgtttctgaattatccggcagagtatcatcaagagcaactggtaaga

SEQ ID NO: 4310 - DNA, 75 bp, synthetic construct
  source 1..75: mol_type = other DNA
aatgccatgaacggtaaccgcgcagaaatgagcccggaagccgccggtattgccgcctgtctgatgacgtacagt

SEQ ID NO: 4311 - DNA, 75 bp, synthetic construct
  source 1..75: mol_type = other DNA
tgctcttggggtgcctagtcctcacctgctcgatagcatttcaggcgagtgcagctgaaaaattcaaggtcatta

SEQ ID NO: 4312 - DNA, 75 bp, synthetic construct
  source 1..75: mol_type = other DNA
cctcttcggcctgtgcaccggagactgacctgcaacaactggttgccaccctcgtccctgatgaacagcgcatca

SEQ ID NO: 4313 - DNA, 75 bp, synthetic construct
  source 1..75: mol_type = other DNA
ctttcgccgtcagatgaacgaaggctggtaccagatacgtattgccggtgatgacacggcaccggaggcggtgta

SEQ ID NO: 4314 - DNA, 75 bp, synthetic construct
  source 1..75: mol_type = other DNA
atgcaacagctttcctttctgcccggagcgatgacgcccggcgagcgcagccttattcagcgggccctgaaaacc

SEQ ID NO: 4315 - DNA, 75 bp, synthetic construct
  source 1..75: mol_type = other DNA
gaacttgaggcttttttgcgggatatgattaacggtaagcaaaagagctggctggcgcattgtactgatgcagag

SEQ ID NO: 4316 - DNA, 75 bp, synthetic construct
  source 1..75: mol_type = other DNA
tttcccgtgtctgctgggacaccggggggatcgatggtgaaattgtctatcagaggtcaaaaaaacacggtgttt

SEQ ID NO: 4317 - DNA, 75 bp, synthetic construct
  source 1..75: mol_type = other DNA
agtctgcagccatggtaccggcagtgtattctgccggacagtctccacaacttcctgttgtcattgattatccgg

SEQ ID NO: 4318 - DNA, 75 bp, synthetic construct
  source 1..75: mol_type = other DNA
atgatttgcagggtattagatataaacatgaaaattccctcattacagtccaacttcaacttttccgccccggca

SEQ ID NO: 4319 - DNA, 75 bp, synthetic construct
  source 1..75: mol_type = other DNA
tctgatacgcgcattgaaaaccagacgggggtgtctacagactggagggggtatgctgtactgccttatgcaaca

SEQ ID NO: 4320 - DNA, 75 bp, synthetic construct
  source 1..75: mol_type = other DNA
gcattcttccggcagaaatgattattcgccaacgcgtaaagccaatgccatcgagagaggaattgcttaagagaa

SEQ ID NO: 4321 - DNA, 75 bp, synthetic construct
  source 1..75: mol_type = other DNA
ggtgaaatgcgtgtggggtcgcgggtggtatctcaggagatcagcacagcagatgaaggggatggtggtcaggtt

SEQ ID NO: 4322 - DNA, 75 bp, synthetic construct
  source 1..75: mol_type = other DNA
actccggttcacccttcagcatcaatggtcgggctggatgctggcgtggctaaactcgccacgctgtcagatggc

SEQ ID NO: 4323 - DNA, 75 bp, synthetic construct
  source 1..75: mol_type = other DNA
caatcagtttgaagccttaccggcagaggttcgccaggacatgcagcagcgcattgatgcggcgcgccggatgtt

SEQ ID NO: 4324 - DNA, 75 bp, synthetic construct
  source 1..75: mol_type = other DNA
cagtttggtggcacggagttgcgcctcaaactggtctggctttgctggcttgatttaatgaccggaaacagcctt

SEQ ID NO: 4325 - DNA, 75 bp, synthetic construct
  source 1..75: mol_type = other DNA
ttttttcctcgctggataatatgatcgcccaggggaatccgttaccggtactgtatggtgagatgcgtgtggggt

SEQ ID NO: 4326 - DNA, 75 bp, synthetic construct
  source 1..75: mol_type = other DNA
acctgccagccattataggcatgatgttgatttgtgccggtgtgttggttattaatttattgtcacgaagcacac

SEQ ID NO: 4327 - DNA, 75 bp, synthetic construct
  source 1..75: mol_type = other DNA
aaatctctggcactgctggcatggacgctctgcctgaatgtgtttggcagcggagcgtacagtaaaccagcacaa

SEQ ID NO: 4328 - DNA, 75 bp, synthetic construct
  source 1..75: mol_type = other DNA
tgcagagcatatgcaggatttgtatgccacgctactgggcgacctgcaactgctgaaggcccgtcgcggactgag

SEQ ID NO: 4329 - DNA, 75 bp, synthetic construct
  source 1..75: mol_type = other DNA
acagaaaaatcagggcagcatcggcagacggcgcttacgacacccggctctgtcacgatgaactgcggcgtaaga

SEQ ID NO: 4330 - DNA, 75 bp, synthetic construct
  source 1..75: mol_type = other DNA
ttaaaatctcggcaaattcccggtcattccagtcagagatctcccgggcttcgcgtatggggcaggattactacc

SEQ ID NO: 4331 - DNA, 75 bp, synthetic construct
  source 1..75: mol_type = other DNA
tggatggcgttcccgatcatggtcctgcttgcttcgggtggcatcggaatgccggcgctgcaagcaatgttgtcc

SEQ ID NO: 4332 - DNA, 75 bp, synthetic construct
  source 1..75: mol_type = other DNA
gtaacgcctacctggagaaacgcacgaaccgattcggtgaagttatcgcccttgagcctgcgctggcaaaataca

SEQ ID NO: 4333 - DNA, 75 bp, synthetic construct
  source 1..75: mol_type = other DNA
gtgctggcgcaactttacctgacgaccctggcgattacggacccggtgccagtgctgagcgatgaagagattgcc

SEQ ID NO: 4334 - DNA, 75 bp, synthetic construct
  source 1..75: mol_type = other DNA
atgtcagttacagagtctaaggcaaaaacggagcgtaaatccagccgtaaacctgcaaaaacgcaggaaacagtc

SEQ ID NO: 4335 - DNA, 75 bp, synthetic construct
  source 1..75: mol_type = other DNA
gcatcacgtccatctatgcgtttcgtgcagcccagaaccgaatctcagcaggcaatgcgagctctgcatcgtgtc

SEQ ID NO: 4336 - DNA, 75 bp, synthetic construct
  source 1..75: mol_type = other DNA
atgaattacatatattccgcgactacaaactctttctatcccttggagatgaaagaggattacacgcaagctgac

SEQ ID NO: 4337 - DNA, 75 bp, synthetic construct
  source 1..75: mol_type = other DNA
tgctgcaccagattgttgatcgccggacagcgtcgatgcgcagcgtggggatgctgacaaacctgaactatgagg

SEQ ID NO: 4338 - DNA, 75 bp, synthetic construct
  source 1..75: mol_type = other DNA
atgattcacctgttcaaaacctgcattattactggcgtcattctggggttaacgtggtctgccccactccgggca

SEQ ID NO: 4339 - DNA, 75 bp, synthetic construct
  source 1..75: mol_type = other DNA
agggctgacctgcgaggccgactccctcggctcgcatggttacgtatacctggcgatttatccgacaccagcggc

SEQ ID NO: 4340 - DNA, 75 bp, synthetic construct
  source 1..75: mol_type = other DNA
gagttttatgaggcagcagccagaaggagcgtccggcaagtcttcctggaagtagcagaaaaattgtcagaaaaa

SEQ ID NO: 4341 - DNA, 75 bp, synthetic construct
  source 1..75: mol_type = other DNA
tttctctctccgaagctcgtacaaaacgggatgaggcccgaaaactgatttcggaggggattgacccttgcgaac

SEQ ID NO: 4342 - DNA, 75 bp, synthetic construct
  source 1..75: mol_type = other DNA
cacctgccggagccaaaaccccgcctgccatcttccgaaggcgactggtcgcatgtattccaggatgtgacgtgg

SEQ ID NO: 4343 - DNA, 75 bp, synthetic construct
  source 1..75: mol_type = other DNA
atggcgatttatcatctcagcatgaaaattatctccagaagcagcggctacagcgccgtagcttccgctgcctat

SEQ ID NO: 4344 - DNA, 75 bp, synthetic construct
  source 1..75: mol_type = other DNA
agccaggacgcccacggcagccagtacagataacggcaaacagaacacctatttctcctcactggataacatggt

SEQ ID NO: 4345 - DNA, 75 bp, synthetic construct
  source 1..75: mol_type = other DNA
ctaccggagacaccaatgagcagacacaatttattgattattttaatctgttctacagtaagcgtggtcaggaac

SEQ ID NO: 4346 - DNA, 75 bp, synthetic construct
  source 1..75: mol_type = other DNA
actgaacatggggcgcattgtcgttgacgtcgatggtattgagctcgctgaactgattaacatggtctgcgataa

SEQ ID NO: 4347 - DNA, 75 bp, synthetic construct
  source 1..75: mol_type = other DNA
tgccggcgataaaaccgatgaatggctgcaaccggcctgtaatgagatgtaccgcgtactcaaaaaagacgcgtt

SEQ ID NO: 4348 - DNA, 75 bp, synthetic construct
  source 1..75: mol_type = other DNA
acaacgacttctttggtctggtcgatggcctgaactttgctgctcagtatcagggtaaaaatgaccgcactgacg

SEQ ID NO: 4349 - DNA, 75 bp, synthetic construct
  source 1..75: mol_type = other DNA
tcatgccccggaaaatcataagccggatccggaatggtactgctcctctctttgtcgcgaaacagaaacactgtg

SEQ ID NO: 4350 - DNA, 75 bp, synthetic construct
  source 1..75: mol_type = other DNA
gaacggtaagcaatggcctggtaaagcagctattggtcgtctgaaaggtgaggaactggcacaatataatttgtg

SEQ ID NO: 4351 - DNA, 75 bp, synthetic construct
  source 1..75: mol_type = other DNA
ctgcggagttaatgcgactttcatcgcggacggggtgccacagtttgctctggtcaatggtttgtacgcaatgga

SEQ ID NO: 4352 - DNA, 75 bp, synthetic construct
  source 1..75: mol_type = other DNA
attgccccgtcaccggggggcttattgctgtctctgaacttgcccgcagggtaataaaaaagacatgccgaagat

SEQ ID NO: 4353 - DNA, 75 bp, synthetic construct
  source 1..75: mol_type = other DNA
atggggcagccctggtttcaggtgagacaaatgcgcctggagaagaaaatacatgtattttccagcaattatgcg

SEQ ID NO: 4354 - DNA, 75 bp, synthetic construct
  source 1..75: mol_type = other DNA
atgaccgacaccaccatgcaattgctcagtcagggcacagaccccgtgaaaatgccggattttgatattctcgcg

SEQ ID NO: 4355 - DNA, 75 bp, synthetic construct
  source 1..75: mol_type = other DNA
gagtgccggaagagtgaagctatgcagcgtgtactggctttctatcagggtaattttcaggaggcggtactgtga

SEQ ID NO: 4356 - DNA, 75 bp, synthetic construct
  source 1..75: mol_type = other DNA
cggaagtggtcaacgagaatacggacgttatctgctcaaccagcatccgccgcattctggctgtacgaaagagtt

SEQ ID NO: 4357 - DNA, 75 bp, synthetic construct
  source 1..75: mol_type = other DNA
acttgtgggaagactgggtaaagccccaatggccgatttcagcagtgtgagctcaaatggcgttgctacgcttgt

SEQ ID NO: 4358 - DNA, 75 bp, synthetic construct
  source 1..75: mol_type = other DNA
ggcgtctgaacataatctgtagcgagtgccggaagagcgaagctatgcagcgtgtactggctttctatcagggta

SEQ ID NO: 4359 - DNA, 75 bp, synthetic construct
  source 1..75: mol_type = other DNA
gggagcgattcatgtcattagtgcgttctcaacaatgcacagtctggtcatcggacagatcaagacggatgagaa

SEQ ID NO: 4360 - DNA, 75 bp, synthetic construct
  source 1..75: mol_type = other DNA
cgctgtcctgacggtgtatatcggctggaaaggttttgccctggtatgcaaagggaaatttaccgttgatgaggt

SEQ ID NO: 4361 - DNA, 75 bp, synthetic construct
  source 1..75: mol_type = other DNA
tccggccgaccactgcctgcatgatgtgcaggatatgagtacgctgaatcatccgaaggcagacctgagcaaagg

SEQ ID NO: 4362 - DNA, 75 bp, synthetic construct
  source 1..75: mol_type = other DNA
tgatgacatgctaattattgcggttgtcgcggtaggtaaacgtgaacgtagtaacgtttataatctcgccagtga

SEQ ID NO: 4363 - DNA, 75 bp, synthetic construct
  source 1..75: mol_type = other DNA
gtagagattcagaccctgagtcaaaatggaaatcacgaaaaagagtttactgtgaatatgcggtgtccttataat

SEQ ID NO: 4364 - DNA, 75 bp, synthetic construct
  source 1..75: mol_type = other DNA
cagcatattgaggcaggcatttcactgtgtgatgcagtgaactttctcgtggaaaaatacgcactggtacgaact

SEQ ID NO: 4365 - DNA, 75 bp, synthetic construct
  source 1..75: mol_type = other DNA
cgacgctggcagaaaatatcagtatgctccgtaacgatttattcgccaggctggacgtcagcgacacgctccggc

SEQ ID NO: 4366 - DNA, 75 bp, synthetic construct
  source 1..75: mol_type = other DNA
gcatcacgacgagctgcatgcggataccgtggcatttgaagagaagtatggctcccagctggagctgatatttcg

SEQ ID NO: 4367 - DNA, 75 bp, synthetic construct
  source 1..75: mol_type = other DNA
atggcactgctggataagctgcgtgagcagtacggggtcagaccggtatgcagtgaactgcatattgccccgtca

SEQ ID NO: 4368 - DNA, 75 bp, synthetic construct
  source 1..75: mol_type = other DNA
gccaaccctgctgggggataagcgtattgagggctcggtatggccaaaatccattcgcggctcgacgcctaaaat

SEQ ID NO: 4369 - DNA, 75 bp, synthetic construct
  source 1..75: mol_type = other DNA
ggctccgcgtatatcacgttcagaaaaccggaactggttgagcgactgaatgatattattgcagaacactatcct

SEQ ID NO: 4370 - DNA, 75 bp, synthetic construct
  source 1..75: mol_type = other DNA
ggcaaaatcatcggccatgaaaatggttacatcatgtgatgataataaaaccttactgaaatatgtttactattg

SEQ ID NO: 4371 - DNA, 75 bp, synthetic construct
  source 1..75: mol_type = other DNA
atgaaatcattaaccacggaaacagcgctggatattctgattacgtggctgcaggacaatatcgactgcgaatcg

SEQ ID NO: 4372 - DNA, 75 bp, synthetic construct
  source 1..75: mol_type = other DNA
gcggaaaaattatatgctcaattgagaagcgggaaggccgcgaggccgaaattggctgctagcttttccgtgaaa

SEQ ID NO: 4373 - DNA, 75 bp, synthetic construct
  source 1..75: mol_type = other DNA
ctggggcttgatgacagtgcgctggacacagaattttccattggtggtactgaactgctgctgtttaagcagatg

SEQ ID NO: 4374 - DNA, 75 bp, synthetic construct
  source 1..75: mol_type = other DNA
gaccttatcaacatggtggaaattgtggatggtgtggacctgatggaagcacaccgcaacgcactcggcctctga

SEQ ID NO: 4375 - DNA, 75 bp, synthetic construct
  source 1..75: mol_type = other DNA
atccgggaaaacacggacggcacctttgccatcacggcggtgcagcacgtaccggaaaaagaagccattgtggat

SEQ ID NO: 4376 - DNA, 75 bp, synthetic construct
  source 1..75: mol_type = other DNA
atgccagcttcggtaagctgggtgagacaccgactcatgaagatatcattgataacaatcgatccatcaactggc

SEQ ID NO: 4377 - DNA, 75 bp, synthetic construct
  source 1..75: mol_type = other DNA
cagcgcggtatggagtcccggctgaaacaggcccgcttcccgtgggtcaaaacgctggagcagttcgacttcggc

SEQ ID NO: 4378 - DNA, 75 bp, synthetic construct
  source 1..75: mol_type = other DNA
aaacccgtggtaagcccggcggggtgatgttccacagcgatcagggcagtcattatacgagcaggcagttccggc

SEQ ID NO: 4379 - DNA, 75 bp, synthetic construct
  source 1..75: mol_type = other DNA
atggagaaaccggaaaccgcaatgaaagccatcacacgcaatctcgatcgcgaaatctggcgtgacctgatgcaa

SEQ ID NO: 4380 - DNA, 75 bp, synthetic construct
  source 1..75: mol_type = other DNA
tgggcggcgctgccgccaaaaactaccgtgaaaaatccgtggacgtggtctgctatgacgaactttcctcgttcg

SEQ ID NO: 4381 - DNA, 75 bp, synthetic construct
  source 1..75: mol_type = other DNA
gcaccgtatgttattgagccgatgaactgcctggcctcgcgtgaatacgacgcagtgatatttgttggcccggca

SEQ ID NO: 4382 - DNA, 75 bp, synthetic construct
  source 1..75: mol_type = other DNA
gaaaacacgaacgggagctattaaatcaaatatgcattgtttcaatgctggcccgtttacgcctgatgcaaaaag

SEQ ID NO: 4383 - DNA, 75 bp, synthetic construct
  source 1..75: mol_type = other DNA
cctggcaaaagttctgaaagcgaaaggcatgaacactgctgttggtgacgaaggtggctatgcgccgaacctggg

SEQ ID NO: 4384 - DNA, 75 bp, synthetic construct
  source 1..75: mol_type = other DNA
ttatgcagacatcaacaatgacagcagctttgatatcagcatcagcctgatgctgaccgagcgcacgctggtcag

SEQ ID NO: 4385 - DNA, 75 bp, synthetic construct
  source 1..75: mol_type = other DNA
ctggtcactaacgccgtcgtgttatggaacactatttatatgcaggcagccctggatcatctccgggcgcagggt

SEQ ID NO: 4386 - DNA, 75 bp, synthetic construct
  source 1..75: mol_type = other DNA
ctggaccgtcatcttcatgagcccggcgtggccttcacctccacgcatgcggcacgggaatggctgattctgaac

SEQ ID NO: 4387 - DNA, 75 bp, synthetic construct
  source 1..75: mol_type = other DNA
tgacgacatcttcctgctgaaacagcgcctggccgaacaggaagcgctgatccacgccctgcaggaaaagctgag

SEQ ID NO: 4388 - DNA, 75 bp, synthetic construct
  source 1..75: mol_type = other DNA
cgcacggagtgttatgccatgacggttcattattaccgtctgcgggactacgccctgcagcatccggaatgcagc

SEQ ID NO: 4389 - DNA, 75 bp, synthetic construct
  source 1..75: mol_type = other DNA
acccgctggccaaccgcgtccagtgctccatcaccacactggccattgagtgcggactggcgacggagtctgctg

SEQ ID NO: 4390 - DNA, 75 bp, synthetic construct
  source 1..75: mol_type = other DNA
gtggcgcatgcccgttcccgtggtctgcgtcggcgcatgccaccggtgctgcgtcgacgggctattgatgcgctg

SEQ ID NO: 4391 - DNA, 75 bp, synthetic construct
  source 1..75: mol_type = other DNA
tgataaagcaaatgcgccagcagggcgcgtacattgtcgatattgcggctcagattggttgctctgaacggacgg

SEQ ID NO: 4392 - DNA, 75 bp, synthetic construct
  source 1..75: mol_type = other DNA
ggcgcaccggcagctccggagccggaaggcatcgcgggtgaggggagtgcttcagatagcggtgaccccacaccg

SEQ ID NO: 4393 - DNA, 75 bp, synthetic construct
  source 1..75: mol_type = other DNA
agttcgatcaatacctgcatgagcgctacctgagcgggaaagccagaaaagatcggtggtactggaataacagta

SEQ ID NO: 4394 - DNA, 75 bp, synthetic construct
  source 1..75: mol_type = other DNA
cctgccgttcgccagccgctggcggaggataaatcattactgccatttttcagcgatgagcgggtgattcgtgct

SEQ ID NO: 4395 - DNA, 75 bp, synthetic construct
  source 1..75: mol_type = other DNA
ggacgggggcaccgaaaggtgcgccggtttccgataacgccggttacgccaaccccgttcagttcaccaccagcg

SEQ ID NO: 4396 - DNA, 75 bp, synthetic construct
  source 1..75: mol_type = other DNA
atgacggacggacagtcagaaacggtgctgaccggtaatctggtgatggcactgtttaaccacgacaccagtcgc

SEQ ID NO: 4397 - DNA, 75 bp, synthetic construct
  source 1..75: mol_type = other DNA
tactgcttttagccttacggtataagaagttgctttcccttttcaaccggttacgcaagcaggcccacaacaaat

SEQ ID NO: 4398 - DNA, 75 bp, synthetic construct
  source 1..75: mol_type = other DNA
aggaagccggattactggcatcaacaggaagtactggtgactcgtatgacaacgcgatggcggagagcatcaatg

SEQ ID NO: 4399 - DNA, 75 bp, synthetic construct
  source 1..75: mol_type = other DNA
cgaaacatgggtgctgtttaacgtcatgaacggtaaccgcgctgaaatgagcccggaagccgccggcattgccgc

SEQ ID NO: 4400 - DNA, 75 bp, synthetic construct
  source 1..75: mol_type = other DNA
atgcatcagcctcccgttcgcttcacttaccgcctgctgagttaccttatcagtacgattatcgccgggcagccg

SEQ ID NO: 4401 - DNA, 75 bp, synthetic construct
  source 1..75: mol_type = other DNA
tcacacccgcagcagatgctcctgctgcggctcagcatcagattatcgctataccggtaaccgatgagaaccgca

SEQ ID NO: 4402 - DNA, 75 bp, synthetic construct
  source 1..75: mol_type = other DNA
gccatgaacggtaaccgcgctgaaatgagcccggaagccgccggcattgctgcctgcctgatgacgtacagtcat

SEQ ID NO: 4403 - DNA, 75 bp, synthetic construct
  source 1..75: mol_type = other DNA
tgcatcagggaataacccacctcagctggttgctactctcgtccctgatgaacagcgcatcagcttctggccgca

SEQ ID NO: 4404 - DNA, 75 bp, synthetic construct
  source 1..75: mol_type = other DNA
ggaaccctgcgacagggaattatactgttaccagcgaaacggcaaaaagccgtggcaagaaatctgggcgcagta

SEQ ID NO: 4405 - DNA, 75 bp, synthetic construct
  source 1..75: mol_type = other DNA
catcggtgcattctgcctcgcggtagttgcattacgtcggggggagcacgtcagcgccctgtggatcgtggtcgc

SEQ ID NO: 4406 - DNA, 75 bp, synthetic construct
  source 1..75: mol_type = other DNA
tttctctctccgaagctcgtacaaaacgggatgaggcccgaaaactgatttcggagggggttgacccttgcgaac

SEQ ID NO: 4407 - DNA, 75 bp, synthetic construct
  source 1..75: mol_type = other DNA
gctcctggcccatgtcgtcaccggaaaatatgcagaccatctgccgttataccgccagtcagagatataccgccg

SEQ ID NO: 4408 - DNA, 75 bp, synthetic construct
  source 1..75: mol_type = other DNA
gtagagcactgaaggaatggcagaaactcggccacaccatccgtgaacaattcaaaaagaaactggcagaacggc

SEQ ID NO: 4409 - DNA, 75 bp, synthetic construct
  source 1..75: mol_type = other DNA
aatgtcgtcacgcgattttattcagttgtgcgctgtggctgtaaattttatgagcgagccagactctggcgcgaa

SEQ ID NO: 4410 - DNA, 75 bp, synthetic construct
  source 1..75: mol_type = other DNA
acccggaccatcacgtcggcaaacattgaccgtctgcgttttactttcggcgtgcaggcactggtggaaaccacc

SEQ ID NO: 4411 - DNA, 75 bp, synthetic construct
  source 1..75: mol_type = other DNA
cgttaccggattcgtttgaccgcccggacccacgcattaagcaactggcacgccgcagtacggtaacgcccaacg

SEQ ID NO: 4412 - DNA, 75 bp, synthetic construct
  source 1..75: mol_type = other DNA
cattcagcagaacgggatcacaccagaagatatcagcaaggaaattaacgggtattactgctgtttttatactgc

SEQ ID NO: 4413 - DNA, 75 bp, synthetic construct
  source 1..75: mol_type = other DNA
ataaccgactgacccggctggaagtcgaagagtcacaaccccttgtaaatgcagtatggattgatcttgtcgaac

SEQ ID NO: 4414 - DNA, 75 bp, synthetic construct
  source 1..75: mol_type = other DNA
accgcggcagactcgtcagcgatgacgtgctgacgctcagtgccacgcagataaacaacagcggtaccctctccg

SEQ ID NO: 4415 - DNA, 75 bp, synthetic construct
  source 1..75: mol_type = other DNA
ggattgatgcccaaacgttgcgctgcacggacgaaccagtactggcgcagacgctgctgatgcagctaaagccgg

SEQ ID NO: 4416 - DNA, 75 bp, synthetic construct
  source 1..75: mol_type = other DNA
atggcgttaacacaccgcgaactctgtcagattgcgtacaagttccttaagcgcaacgggttcaaggtttgtttt

SEQ ID NO: 4417 - DNA, 75 bp, synthetic construct
  source 1..75: mol_type = other DNA
ttcgatcagacggttaatcttggacaggttcgttccgaaagattgaaagtagatggagctaaaagcaatccagtt

SEQ ID NO: 4418 - DNA, 75 bp, synthetic construct
  source 1..75: mol_type = other DNA
cttcacaggacgggccggatgtgcagcaggcggtgacacaggcgattgccggattaagtgaacgaaaagtgcagt

SEQ ID NO: 4419 - DNA, 75 bp, synthetic construct
  source 1..75: mol_type = other DNA
cccggaaaacatcagtataaaaatgcccgtcaggagcataccagcctgccgaatctgcttgagcgtcagttcgca

SEQ ID NO: 4420 - DNA, 75 bp, synthetic construct
  source 1..75: mol_type = other DNA
caggtatgatcctgttcgcaatcgcatgttatgccactgagtcaatggtagctcaggcggggcagcctccgggct

SEQ ID NO: 4421 - DNA, 75 bp, synthetic construct
  source 1..75: mol_type = other DNA
tgcacgaaatgcgcgacgatgtcgcattccagattatcaatgacgaattatatcttgatggcaacgctcgtcaga

SEQ ID NO: 4422 - DNA, 75 bp, synthetic construct
  source 1..75: mol_type = other DNA
acatccggcatgtcatcacactgcaaaacatcagggaatatctgttatgaagccggctctaatgtggagttattg

SEQ ID NO: 4423 - DNA, 75 bp, synthetic construct
  source 1..75: mol_type = other DNA
ggtttgggagaaggctctgcattaccggttggggtgcctgttccgtggccttcagccactccgccaacaggctgg

SEQ ID NO: 4424 - DNA, 75 bp, synthetic construct
  source 1..75: mol_type = other DNA
gcagaagaaagcgccaaaagtaccggaagcgcgcgaaggtgaatacatggccggtgaggctgacaacgtttttgc

SEQ ID NO: 4425 - DNA, 75 bp, synthetic construct
  source 1..75: mol_type = other DNA
aatatattacgcgaaaagttaagggagtcacgcagaccaacgcaacgactactgatgattgcgatgcgtttttat

SEQ ID NO: 4426 - DNA, 75 bp, synthetic construct
  source 1..75: mol_type = other DNA
tatccggcgtgaacgcctgcctaaagaactggcatacgcgctgaaacaacaactgaggattgcgataaaacgatg

SEQ ID NO: 4427 - DNA, 75 bp, synthetic construct
  source 1..75: mol_type = other DNA
tggcaggggcgaaagtatcaggcgtaccccattcagggaagcggctttgagatgaacggtaagggcagcagcgca

SEQ ID NO: 4428 - DNA, 75 bp, synthetic construct
  source 1..75: mol_type = other DNA
tgagcgtcaccagtggcgcggaatggacttccgcgcccaggctgacgccatcaaaaaactgaccgaacagtataa

SEQ ID NO: 4429 - DNA, 75 bp, synthetic construct
  source 1..75: mol_type = other DNA
cagtcctgcactcgccccacttggaatagcggtgttccgtggacggaatggaaagaacgtagtcgtgagggctac

SEQ ID NO: 4430 - DNA, 75 bp, synthetic construct
  source 1..75: mol_type = other DNA
acttcgccaaagaagtggatgtggaactgaaaggcgatccgatggtgcttcctaacggggccacgctttacttcc

SEQ ID NO: 4431 - DNA, 75 bp, synthetic construct
  source 1..75: mol_type = other DNA
gaatgttcatgagttttattgtcggttgtctatcgtggtatatcaccaagccaaaaccgcaaaaggctgaggtcg

SEQ ID NO: 4432 - DNA, 75 bp, synthetic construct
  source 1..75: mol_type = other DNA
atagaacggattcagcagcactgttgccctgcattgaacaggccagggaagatatccgtaccctgcgccaactac

SEQ ID NO: 4433 - DNA, 75 bp, synthetic construct
  source 1..75: mol_type = other DNA
gaattaaactaccttgaatgtgagtgggatcatcattacgccaaatcacaaaaagaacgcatcttccgtcgatta

SEQ ID NO: 4434 - DNA, 75 bp, synthetic construct
  source 1..75: mol_type = other DNA
ggggaaacacatctcgatttcttgaagcaatatggtgattttgaaaatggtattcctgttcacgatactattgcc

SEQ ID NO: 4435 - DNA, 75 bp, synthetic construct
  source 1..75: mol_type = other DNA
aagagaaaatgactaaaatgccaaacggtgctgtggatgcgttaaaggaagaattaactcggcgcatcagtaagc

SEQ ID NO: 4436 - DNA, 75 bp, synthetic construct
  source 1..75: mol_type = other DNA
ctctcaccggaagactgccgtcactccctggcgattgccctgcgccagggacataaagtgaggcatttatctcag

SEQ ID NO: 4437 - DNA, 75 bp, synthetic construct
  source 1..75: mol_type = other DNA
gcttgatgccacgctgtcggcattagctgggctcgcaacaggtgcaaataaactcccatatttcactggaaatga

SEQ ID NO: 4438 - DNA, 75 bp, synthetic construct
  source 1..75: mol_type = other DNA
caggccgagatccacaatttcctgatgctggatattgaacgccgggtttacgacctgagccgcatcaacgacaga

SEQ ID NO: 4439 - DNA, 75 bp, synthetic construct
  source 1..75: mol_type = other DNA
tgccgatctcattatgctggcaaccgaacgccgcgatctcgggcttgatgatggctctttctggcctgtactgga

SEQ ID NO: 4440 - DNA, 75 bp, synthetic construct
  source 1..75: mol_type = other DNA
aatggttttgtatccggttgcaaaatggtatattgaagatacagctctgaaatttacccggcctgatttctggaa

SEQ ID NO: 4441 - DNA, 75 bp, synthetic construct
  source 1..75: mol_type = other DNA
gtggtacagggggcaccggatatcacccgggaaatccagcaggatattgcccggcgaatgagggcggaaccatga

SEQ ID NO: 4442 - DNA, 75 bp, synthetic construct
  source 1..75: mol_type = other DNA
tccgctatgtccttgacgtcatagccgactggccgataaaccgggtcggcgaactgctccccctggcgcgtagca

SEQ ID NO: 4443 - DNA, 75 bp, synthetic construct
  source 1..75: mol_type = other DNA
agcagtcacgcggcataaaacacaaagaaacagaagtcattatttttgcgggtagtgatgcctggtcacacgcaa

SEQ ID NO: 4444 - DNA, 75 bp, synthetic construct
  source 1..75: mol_type = other DNA
ctgggttatcgctcgccacgggaatatctgcggcagcaggccagtaatgggttaagtgataacaggtgtctggaa

SEQ ID NO: 4445 - DNA, 75 bp, synthetic construct
  source 1..75: mol_type = other DNA
cagaacggttcttgaaaatcaactttcgatcagtgaaggcgcttcccgattatctcttcctgaaggcactttagg

SEQ ID NO: 4446 - DNA, 75 bp, synthetic construct
  source 1..75: mol_type = other DNA
cgatgcgccaccgacggacaaccgcgccggcctgctcgacaagatgcgcggctggataggggccgctgataagcc

SEQ ID NO: 4447 - DNA, 75 bp, synthetic construct
  source 1..75: mol_type = other DNA
atggaaacgaagcaaaaagagcgtatccgacgtttgatggaactgcttaagaaaaccgacagaatccatttgaaa

SEQ ID NO: 4448 - DNA, 75 bp, synthetic construct
  source 1..75: mol_type = other DNA
tggttatatcgggaaaaggttacagaaggctgagggcataattgaagggatgttaatggcattagatatccggtt

SEQ ID NO: 4449 - DNA, 75 bp, synthetic construct
  source 1..75: mol_type = other DNA
gagagcgatacgctgactggtagggtgtatgacccggcagtacagcgtccgttgcgtcagacccgcacccgtaag

SEQ ID NO: 4450 - DNA, 75 bp, synthetic construct
  source 1..75: mol_type = other DNA
atttacgatatcggtgtatcgacgatttatcgttatcatcctgtagagaagcgccaaactcaatctgagctgtaa

SEQ ID NO: 4451 - DNA, 75 bp, synthetic construct
  source 1..75: mol_type = other DNA
aagcgatgggtaaagccaattctgttgaactggcggcgcggcttgatatcagccgtgaagaagttctcaacgaac

SEQ ID NO: 4452 - DNA, 75 bp, synthetic construct
  source 1..75: mol_type = other DNA
tggcaagcgacgtgattggctccaccaatgaagtggccttcagcgacacgttacatagactgaagggggataatc

SEQ ID NO: 4453 - DNA, 75 bp, synthetic construct
  source 1..75: mol_type = other DNA
ggtcaaacaactgcgtgatgagcgtcagggcaaaacaccaaaagcctctccgataacaccagaacaaatcgaaat

SEQ ID NO: 4454 - DNA, 75 bp, synthetic construct
  source 1..75: mol_type = other DNA
gcgaaatccgcgttccacataaaggtgatattgtcgggcaggttatcgagggagcgtatgaagtgctcggtgtct

SEQ ID NO: 4455 - DNA, 75 bp, synthetic construct
  source 1..75: mol_type = other DNA
gcaggacaatatcgactgtgaatccgggattatcttcgacaacgatgaggatagaacggattcagcagcactgtt

SEQ ID NO: 4456 - DNA, 75 bp, synthetic construct
  source 1..75: mol_type = other DNA
tgtcggctgccgttctggcgctgattgccgcaggtgcgcctgcgcctgaaatcctcgaccagtttctggatgaaa

SEQ ID NO: 4457 - DNA, 75 bp, synthetic construct
  source 1..75: mol_type = other DNA
acatcagcacgcacgctgaaaccttgggagaaattagggatcagtcgcgcctggtattaccaactgaaaaaacga

SEQ ID NO: 4458 - DNA, 75 bp, synthetic construct
  source 1..75: mol_type = other DNA
tggtgaacacggtggcctctgaaaatccggatgaggcagggcgttacagcatggacgtcgagtatggtcagtaca

SEQ ID NO: 4459 - DNA, 75 bp, synthetic construct
  source 1..75: mol_type = other DNA
aatcacagctccgggtgattaccctgataatacaaccactatcgccccgttaacgccatacgataaatgggatgg

SEQ ID NO: 4460 - DNA, 75 bp, synthetic construct
  source 1..75: mol_type = other DNA
attccctgcaggcaacacagcttcagtcggccatagtgaaggcgatgtatgcagcgacgattgaaagtgaacttg

SEQ ID NO: 4461 - DNA, 75 bp, synthetic construct
  source 1..75: mol_type = other DNA
ctaatgagagtgacggcagttttttgatgcggctggcgcgccagtacggtgccattgcatcggtgaaaaatggca

SEQ ID NO: 4462 - DNA, 75 bp, synthetic construct
  source 1..75: mol_type = other DNA
gtaatgctgtcaatcttgtttatctttggctggcgcggtgtcgttcccgttttatgcgggatgttttgcaccaat

SEQ ID NO: 4463 - DNA, 75 bp, synthetic construct
  source 1..75: mol_type = other DNA
agtttttacgagaactgcaacaccgtatgctcagagaagccattatcgaacagcaaacgggcatgagcgccatag

SEQ ID NO: 4464 - DNA, 75 bp, synthetic construct
  source 1..75: mol_type = other DNA
aaacggtaaaaagcgaaccgtgccgatttctgaggaactggagaaaaaagttaaagaggaggccagcgccaaatt

SEQ ID NO: 4465 - DNA, 75 bp, synthetic construct
  source 1..75: mol_type = other DNA
aggcacaccggcacagcgcaaggtgtggcaggacaaaatagaccagcagggagcagagcttaaggccagaggact

SEQ ID NO: 4466 - DNA, 75 bp, synthetic construct
  source 1..75: mol_type = other DNA
tagcattgatgcgccagggctaaccagttgggctgatgattggcacggcatcacgctgaaagatggcgttgaagt

SEQ ID NO: 4467 - DNA, 75 bp, synthetic construct
  source 1..75: mol_type = other DNA
gagctatgaagaattcttccgcgaacgccagaacgcgcgctacggcggcgatggtaaaggcggtatgcgctgttg

SEQ ID NO: 4468 - DNA, 75 bp, synthetic construct
  source 1..75: mol_type = other DNA
ttcaccaatgccggaagccgtggcgcataccgctttcatgccatgcaggcccatcccaacattgtcgatgttgct

SEQ ID NO: 4469 - DNA, 75 bp, synthetic construct
  source 1..75: mol_type = other DNA
cggtagaagtagttaaaaacgcaatcgaaactgcagatggagcattagatctttataataaatatctcgatcagg

SEQ ID NO: 4470 - DNA, 75 bp, synthetic construct
  source 1..75: mol_type = other DNA
attaacgtgaaataccgttatgagtttacggacactctgggaatggtgacgtcattcagctatgcaggagacaag

SEQ ID NO: 4471 - DNA, 75 bp, synthetic construct
  source 1..75: mol_type = other DNA
ttcttatgggcacggttgtggcaatgcttgccgcctgctcttccaaaccaaccgatcgcggacagcaatataaag

SEQ ID NO: 4472 - DNA, 75 bp, synthetic construct
  source 1..75: mol_type = other DNA
ttgtggaaattcaggcgtgattttgttgagtgtgaaggaccaccagcacattgattctgccattccgggacgtta

SEQ ID NO: 4473 - DNA, 75 bp, synthetic construct
  source 1..75: mol_type = other DNA
aattccaggaaatggcagcgaatatagttcgttcccaactggcgactcttgacctgagtaccgtagaaaaagaaa

SEQ ID NO: 4474 - DNA, 75 bp, synthetic construct
  source 1..75: mol_type = other DNA
cattgacggtaccatccatcgctgggcgacaaatgaggttatcgacaaggatcgcgaagactggaagcgtatctc

SEQ ID NO: 4475 - DNA, 75 bp, synthetic construct
  source 1..75: mol_type = other DNA
cagttgcgacgcaaaactgggggaacagcacgtacaaacaaactgactggaatacttcacatcctgattttgcag

SEQ ID NO: 4476 - DNA, 75 bp, synthetic construct
  source 1..75: mol_type = other DNA
ccctcgctgacggaatggatatttccctgtccgatcatgaaatcaggactgtcctggcgcgcctggaggacatcc

SEQ ID NO: 4477 - DNA, 75 bp, synthetic construct
  source 1..75: mol_type = other DNA
ttgaccgcctgcgggttaccttcggggtgcagtcactggtgcagaccacgtcaaagggcgaccgtaatccttcct

SEQ ID NO: 4478 - DNA, 75 bp, synthetic construct
  source 1..75: mol_type = other DNA
atcgcagtgatggcctgactgtcactgaccttgagcatatcagccagagtatcggcgatatcctgcgcacaccgg

SEQ ID NO: 4479 - DNA, 75 bp, synthetic construct
  source 1..75: mol_type = other DNA
gccttactcactttcccgtcacatcctggaacatctgcgcaaactcaccagtcacgaacccgtgattggcattat

SEQ ID NO: 4480 - DNA, 75 bp, synthetic construct
  source 1..75: mol_type = other DNA
agcgtgcgcggcaactttactggcagggttatccgcccgcagaaatatcacgtctgatgggaataaacccgaaca

SEQ ID NO: 4481 - DNA, 75 bp, synthetic construct
  source 1..75: mol_type = other DNA
atgaatcacaaggactgggattttgttaaccgtcggctggtggcaaaaatgttgtctgagatggagtatgagcag

SEQ ID NO: 4482 - DNA, 75 bp, synthetic construct
  source 1..75: mol_type = other DNA
ctcctgaaacgggcggattctggatccgggaaattggtgtatttgatgagcacggcgatttaatcgcggtgggca

SEQ ID NO: 4483 - DNA, 75 bp, synthetic construct
  source 1..75: mol_type = other DNA
ctttcagtccgtgacctgctgcctcacatgcaggggatgcgtaaggcagatatcatcaggcgactggaaaatgaa

SEQ ID NO: 4484 - DNA, 75 bp, synthetic construct
  source 1..75: mol_type = other DNA
agcatggatgttgagtatggccagtacagcgtcaccctgctggttgaaggttttccgccttcacatgccgggacc

SEQ ID NO: 4485 - DNA, 75 bp, synthetic construct
  source 1..75: mol_type = other DNA
gttagttctattaactattgcagtaacgatcctaatcgccattcaaaatactgtcggcatgagtatggctgtcat

SEQ ID NO: 4486 - DNA, 75 bp, synthetic construct
  source 1..75: mol_type = other DNA
tgagctttggtaatgggaaaaatacatattcccttgttgaccgtaataaccacccttctattgacttccatgctc

SEQ ID NO: 4487 - DNA, 75 bp, synthetic construct
  source 1..75: mol_type = other DNA
atggctgaaaaactgaagctcctcgagaaactgggcatcacccttgatgacctggaaaaactcttcaaatcccgc

SEQ ID NO: 4488 - DNA, 75 bp, synthetic construct
  source 1..75: mol_type = other DNA
tgcgtgaaaaggcagagaaagcaactaaaggaagctacatcgtagggcatacatctgttaaccaacacggcaatt

SEQ ID NO: 4489 - DNA, 75 bp, synthetic construct
  source 1..75: mol_type = other DNA
cctgaccagcaccggcagtattaaaagtggcagcacactcgatatcagcgcccgcaatgccacactgtccggtga

SEQ ID NO: 4490 - DNA, 75 bp, synthetic construct
  source 1..75: mol_type = other DNA
gttttaccatcgctgcatatggcaaaccgcgaattgcgtcgggcgaaaagtcatgtccagaagtgggagcgagtc

SEQ ID NO: 4491 - DNA, 75 bp, synthetic construct
  source 1..75: mol_type = other DNA
tcgtgaactgacggttcaggcgacgaccggaactaactccacctctgacctggactccattcaggacgaaatcaa

SEQ ID NO: 4492 - DNA, 75 bp, synthetic construct
  source 1..75: mol_type = other DNA
ctgacacaggcaatggactatgaccggattctggcaggctcccgcagccatcagaccggtgtaaacggtgaaaat

SEQ ID NO: 4493 - DNA, 75 bp, synthetic construct
  source 1..75: mol_type = other DNA
ccgccaccgctattatgacccgctgcaggggcggtatatcactcaggatccgattgggctgaaggggggatggaa

SEQ ID NO: 4494 - DNA, 75 bp, synthetic construct
  source 1..75: mol_type = other DNA
caatattacaattgttgctgttgcacgtgagctggcgggttttatctgggatatgggccgaatagcaatgtctgt

SEQ ID NO: 4495 - DNA, 75 bp, synthetic construct
  source 1..75: mol_type = other DNA
gacctctgcgaggtacgaatccgaaccggccagacggaggttgctgtcttcgtagactacgaatctgagaagtaa

SEQ ID NO: 4496 - DNA, 75 bp, synthetic construct
  source 1..75: mol_type = other DNA
cggaaacaccggtcaaagtgtcaggctttaagcgcgtcatagacgagcaggactggacaatcactaaggtgacac

SEQ ID NO: 4497 - DNA, 75 bp, synthetic construct
  source 1..75: mol_type = other DNA
actgacaaagttttccctaatcctggtaattcagacctgggactaataactgcttttttcgaagcatacctggac

SEQ ID NO: 4498 - DNA, 75 bp, synthetic construct
  source 1..75: mol_type = other DNA
atgaacacgcagagaaatttatcagtcttttagtgttgggtgttttatattctattgaaaaaaagcaatatctat

SEQ ID NO: 4499 - DNA, 75 bp, synthetic construct
  source 1..75: mol_type = other DNA
atgagcgaatatttcagaatacttcagggactgccggacggtccttttacccgcaaacaggccgaagccgttgcc

SEQ ID NO: 4500 - DNA, 75 bp, synthetic construct
  source 1..75: mol_type = other DNA
gtgataaagcagatttcagggcatttctcaggaaacttaactgggaagaggacgaagagctgcagaatgccgttc

SEQ ID NO: 4501 - DNA, 75 bp, synthetic construct
  source 1..75: mol_type = other DNA
atgtaaaaaaattacgtttaaaagcaggattaacacaaaaggaatgcagtcatatttatggtgttgggctaagaa

SEQ ID NO: 4502 - DNA, 75 bp, synthetic construct
  source 1..75: mol_type = other DNA
ccgaatcggtcgcattcggcaatccagccctgttcgccagtttcgacgccttgcgcgccatcggcgtgcgcttcg

SEQ ID NO: 4503 - DNA, 75 bp, synthetic construct
  source 1..75: mol_type = other DNA
tgattgaagggcttggcggctacatcaacagcagcaagcaggcgattggcgcgggtggcggctggtctgacacgc

SEQ ID NO: 4504 - DNA, 75 bp, synthetic construct
  source 1..75: mol_type = other DNA
ctacaatcgccgcgttgaactgtatcgggagaaggagaaaatcacgtaccactggaagaagccggagcggttacg

SEQ ID NO: 4505 - DNA, 75 bp, synthetic construct
  source 1..75: mol_type = other DNA
aaagttattccactgtcgccaggccatgcctatgggatgtttatggaacgttttaacgagttatcggagttacgc

SEQ ID NO: 4506 - DNA, 75 bp, synthetic construct
  source 1..75: mol_type = other DNA
gcacggataaacaaaaagtgttcagcgtggcccccatccacctgaatggtgagctgcgcggctatttgtacatca

SEQ ID NO: 4507 - DNA, 75 bp, synthetic construct
  source 1..75: mol_type = other DNA
ccggcggtatggttccactggccgccataggcagttctgacacgacacttccccgcctgcagggaaatacggcgt

SEQ ID NO: 4508 - DNA, 75 bp, synthetic construct
  source 1..75: mol_type = other DNA
caatgtcaccacgattattatggggagcggtactgcactcactgccatacagggcacttcagtgaggagggagtg

SEQ ID NO: 4509 - DNA, 75 bp, synthetic construct
  source 1..75: mol_type = other DNA
tgaacaggacagtatgagcgcgatcaaacagctggcaatgcaggagtctgacccgcagcccggcaatgaagtcgc

SEQ ID NO: 4510 - DNA, 75 bp, synthetic construct
  source 1..75: mol_type = other DNA
atggcaacgacgaacgcattctgtctggcgtcaccgccactggtccgcatctgccttcacggggatttacaacga

SEQ ID NO: 4511 - DNA, 75 bp, synthetic construct
  source 1..75: mol_type = other DNA
aaatcgccagtcgtctgcagcaaagaatatctgctgtaatgcgttatgccgtacagtctggcatcatcagatata

SEQ ID NO: 4512 - DNA, 75 bp, synthetic construct
  source 1..75: mol_type = other DNA
gtcgaccgtccggcacggtccatcacagtgataaaggttctcagtatgtatcgctggcctacacacagcggctta

SEQ ID NO: 4513 - DNA, 75 bp, synthetic construct
  source 1..75: mol_type = other DNA
gtccggttctgcaggcgatggtggatgacgctgtgggggccattccggtaccgcgtgatggtcgtgattatgatc

SEQ ID NO: 4514 - DNA, 75 bp, synthetic construct
  source 1..75: mol_type = other DNA
aaataaactgatcagcctcttccgtcagtttggtggcacggagttgcgcctcaaactggtctggctttgctggct

SEQ ID NO: 4515 - DNA, 75 bp, synthetic construct
  source 1..75: mol_type = other DNA
aaaagcggtttttatctgaccggtaaagccggtgcctctgtggtgtcactttcagaccagcgtttcctgtcagga

SEQ ID NO: 4516 - DNA, 75 bp, synthetic construct
  source 1..75: mol_type = other DNA
atggtaacgaaaaccatcactgaacagcgtgcggaagtacgtatttttgccggtaatgatccggctcataccgcc

SEQ ID NO: 4517 - DNA, 75 bp, synthetic construct
  source 1..75: mol_type = other DNA
atggcgcatcatgaagtcatcagtcggtcaggaaatgcgtttttgctgaatatacgcgagagcgtactgttgccc

SEQ ID NO: 4518 - DNA, 75 bp, synthetic construct
  source 1..75: mol_type = other DNA
ctcgtatgacaacgcgatggcggagagcatcaatggcctttacaaagcggaggtaatacaccgtaagagctggaa

SEQ ID NO: 4519 - DNA, 75 bp, synthetic construct
  source 1..75: mol_type = other DNA
gcagcccgcgaactacatgcttgatggcgtgcgctatggttttgatccggtcagcgatcgctttgtccagacgac

SEQ ID NO: 4520 - DNA, 75 bp, synthetic construct
  source 1..75: mol_type = other DNA
gaaatgtatctggaaatggagcggttgattgctgatgcccgcccggtcagccgccacatgacagggctgaatatc

SEQ ID NO: 4521 - DNA, 75 bp, synthetic construct
  source 1..75: mol_type = other DNA
tgatatcctccgggcacgccgggcaaccggcctgatgacccgcgacaattacagaacggtaaataacattaccct

SEQ ID NO: 4522 - DNA, 75 bp, synthetic construct
  source 1..75: mol_type = other DNA
attgagcagctcaaacgcgaaaacagcgccgacgattttaaaaacctgttcatgtgtgaatttgttgacgacaag

SEQ ID NO: 4523 - DNA, 75 bp, synthetic construct
  source 1..75: mol_type = other DNA
tgttattccttctcgccggtcatgtccctgcagcgtctgcggattctgcctgtgaggggcgttttgtaaacccga

SEQ ID NO: 4524 - DNA, 75 bp, synthetic construct
  source 1..75: mol_type = other DNA
aaaccagttcaccatacatggcagagttatgcaatgtttctgctggagtcaatgcctgagaaaacggcggagcat

SEQ ID NO: 4525 - DNA, 75 bp, synthetic construct
  source 1..75: mol_type = other DNA
ccgcacagtaaggcacctctggtgcgacgaaaaaagcactggcatcccgatgtgctgaaagagattcgacgcctc

SEQ ID NO: 4526 - DNA, 75 bp, synthetic construct
  source 1..75: mol_type = other DNA
cagcggccagtattactgacctgaaaaaaaatcctatgggaaccgtagctgaaggtgaaggggacgctgttgcga

SEQ ID NO: 4527 - DNA, 75 bp, synthetic construct
  source 1..75: mol_type = other DNA
gcggataccggcaaaacgctgtacccggcacaggcagaacgtctgctgattgatctgtgggcctatcgcgaaatg

SEQ ID NO: 4528 - DNA, 75 bp, synthetic construct
  source 1..75: mol_type = other DNA
cctcatacccagtatgcgcagaaacataatccgacatttaccggagaaccaaaagcgccgacgcctgccgcagga

SEQ ID NO: 4529 - DNA, 75 bp, synthetic construct
  source 1..75: mol_type = other DNA
gaagggaaagatttcaaagaaattgacctgctggcgcgccagtcggagcgccacgcgcggatcggcaagtttaac

SEQ ID NO: 4530 - DNA, 75 bp, synthetic construct
  source 1..75: mol_type = other DNA
gccgctgtccataaggcattctttgaggcaaagcagcgatacggtgctccccgccttgctgacgaactgccggag

SEQ ID NO: 4531 - DNA, 75 bp, synthetic construct
  source 1..75: mol_type = other DNA
aaacgggaattgcgccggaaattcatactggcgatgatgatgcactgaaggagattttaactcatgtcaccgagg

SEQ ID NO: 4532 - DNA, 75 bp, synthetic construct
  source 1..75: mol_type = other DNA
cctttctgccagtaaggctcaggcccacgtctttaaacaatacatcatcgacttcgccaaagaagtcgaggtgga

SEQ ID NO: 4533 - DNA, 75 bp, synthetic construct
  source 1..75: mol_type = other DNA
caggttcgccgcctggaggaacaaaatacgatattaaaaaaggctactgcactcttgatgtccgactcgctgaac

SEQ ID NO: 4534 - DNA, 75 bp, synthetic construct
  source 1..75: mol_type = other DNA
taccgaaacgcaacaccgcatggggatagcgcaaccgaacggtaacgccttccggttaaatggcggcaagaggca

SEQ ID NO: 4535 - DNA, 75 bp, synthetic construct
  source 1..75: mol_type = other DNA
ccactgcaacgcaggatggcaaatatactgatggaagtgttgctggtggtattgccgcaacgaggctgcgggcag

SEQ ID NO: 4536 - DNA, 75 bp, synthetic construct
  source 1..75: mol_type = other DNA
atcatcaataacgtgagagaaaaccgccaggtgaccgtccctgctgaactgctggcgtccctgattcagaccgcc

SEQ ID NO: 4537 - DNA, 75 bp, synthetic construct
  source 1..75: mol_type = other DNA
ctggcgctggtggataaatccggcgcagtcacagcagcacagactattacctcacatggtgaaaaaagactcctg

SEQ ID NO: 4538 - DNA, 75 bp, synthetic construct
  source 1..75: mol_type = other DNA
cgttttcctgacttttataatctggatgcaataaaggagggagcagaggaaactgattcgataattaaagatctt

SEQ ID NO: 4539 - DNA, 75 bp, synthetic construct
  source 1..75: mol_type = other DNA
gtggatagcgcacgcgcccttattgcccggggatggggagtaagcttagtcagccgttgtctccgggtgtcgcgt

SEQ ID NO: 4540 - DNA, 75 bp, synthetic construct
  source 1..75: mol_type = other DNA
ccagcacatcagcccgtgaggcggcaacccatgcgactgatgctgcaggctcagcacgcgcagccagcacgtcag

SEQ ID NO: 4541 - DNA, 75 bp, synthetic construct
  source 1..75: mol_type = other DNA
gccggcagcagcatcacctggttgacctggctgcgccaggcaccgctgaaacccaactctcggcacatgctggaa

SEQ ID NO: 4542 - DNA, 75 bp, synthetic construct
  source 1..75: mol_type = other DNA
cagcaaggaaactctcacagctgcccggcatacgccggaaaaagatatcctggaagaaattaaccgcgaggtggt

SEQ ID NO: 4543 - DNA, 75 bp, synthetic construct
  source 1..75: mol_type = other DNA
atatgtggtggggatgggtgacggggggatatatgctgtatatgtcatgggattatgattttaaatacagattac

SEQ ID NO: 4544 - DNA, 75 bp, synthetic construct
  source 1..75: mol_type = other DNA
cgctggtttgaccgggatattctgcgggaggtggtcctggaagcccggactgaaatccgcagcatggcggatgca

SEQ ID NO: 4545 - DNA, 75 bp, synthetic construct
  source 1..75: mol_type = other DNA
catatcgcccatctgcgccgggaaagcccgttcgatggcggcatcgccgctaccacgccgaccatccagcgcacg

SEQ ID NO: 4546 - DNA, 75 bp, synthetic construct
  source 1..75: mol_type = other DNA
atgatactttggtctgtgaaaaaagaaaccgatatccggcgtggaaggcattgtgttttcctgatgcatgttcac

SEQ ID NO: 4547 - DNA, 75 bp, synthetic construct
  source 1..75: mol_type = other DNA
aattaatctggcaggaccgccagattttattcattcccggcttgggacagtaatggctccactaatgaaggaggg

SEQ ID NO: 4548 - DNA, 75 bp, synthetic construct
  source 1..75: mol_type = other DNA
aagcggcagcgacccctatgccgccatcgaggcggtgattccctgggacgagttcaccgagagcgtcagcgaggc

SEQ ID NO: 4549 - DNA, 75 bp, synthetic construct
  source 1..75: mol_type = other DNA
tgattttgataatacgccctttaagaaagcacctgttgactggatgcagccggggatgacttatctgaaagggcg

SEQ ID NO: 4550 - DNA, 75 bp, synthetic construct
  source 1..75: mol_type = other DNA
attgcaggccgctgacgtggcttgccgtgcgggtatcgacaccattattgccgcgggcagcaagccgggcgttat

SEQ ID NO: 4551 - DNA, 75 bp, synthetic construct
  source 1..75: mol_type = other DNA
gaataaggatgaggtgtttgagcgaggggtgatcaacgtcttcagagggttgagctggaattacaaaactaattg

SEQ ID NO: 4552 - DNA, 75 bp, synthetic construct
  source 1..75: mol_type = other DNA
ggttctgcggcttaaacgcctggggctgtcaaaaacgttccgtcgtctggtcgtcacactcatccggcgttatgg

SEQ ID NO: 4553 - DNA, 75 bp, synthetic construct
  source 1..75: mol_type = other DNA
gtgagcggaagcgggtgcgtatccccgccatgaaagtcagcgagtgggggcacctgctccgtgcgcttgaaattg

SEQ ID NO: 4554 - DNA, 75 bp, synthetic construct
  source 1..75: mol_type = other DNA
cggcagaagcctgtattttgagcacctgtttcccggtgaggacggttacagccgcagcgagtcactgtggctggt

SEQ ID NO: 4555 - DNA, 75 bp, synthetic construct
  source 1..75: mol_type = other DNA
atgctgcccttgccggggtggacagcacgattgttgaagtgatggggctctgtgcgcagttcacctcgggggcac

SEQ ID NO: 4556 - DNA, 75 bp, synthetic construct
  source 1..75: mol_type = other DNA
ctggaacgcgatgatgacactggctttcagcaggtgctggaacgtgctgactatctggcgaaggaacataccaaa

SEQ ID NO: 4557 - DNA, 75 bp, synthetic construct
  source 1..75: mol_type = other DNA
acttcggcagtattgagaaagttgctgcttttttcggcataacaactgaagccgtttatcagtggcgaaaccgtc

SEQ ID NO: 4558 - DNA, 75 bp, synthetic construct
  source 1..75: mol_type = other DNA
tcgcggaagccagtctggcagcaaaggaggccggtcatgctgtccgtgagatggagcggtggatggtgccgaaca

SEQ ID NO: 4559 - DNA, 75 bp, synthetic construct
  source 1..75: mol_type = other DNA
tcaagggcaaatttttctggtggcactaagcgcggcgctggtggtggtatttttgttctggttagttcttcctca

SEQ ID NO: 4560 - DNA, 75 bp, synthetic construct
  source 1..75: mol_type = other DNA
ctgtttttccgccgtacggtgaatttccacaccgaagaggtgatgctggacaaaattaccggaaaaacgccggtg

SEQ ID NO: 4561 - DNA, 75 bp, synthetic construct
  source 1..75: mol_type = other DNA
gaaactacagttctggcacattaccggatggctggaatttgcggaacgggaatgaagcctgacgacctgatcggc

SEQ ID NO: 4562 - DNA, 75 bp, synthetic construct
  source 1..75: mol_type = other DNA
ggaattagccgatgcgagagctgaaaatgaaactctgcgtgctgatgttgccgctggtcgtaagcgcctgcggat

SEQ ID NO: 4563 - DNA, 75 bp, synthetic construct
  source 1..75: mol_type = other DNA
acgaccctcagagtgaagccactggagaaaccggagtctgacagtgaactgtggattgtgacgctgccggaagcg

SEQ ID NO: 4564 - DNA, 75 bp, synthetic construct
  source 1..75: mol_type = other DNA
ggctggctgaagcggcgcggatcacgctttcatcaaagggggcccatacccccggcgttgatggcgtgaacaaaa

SEQ ID NO: 4565 - DNA, 75 bp, synthetic construct
  source 1..75: mol_type = other DNA
aaggctgcgcagccggagcctcagccgcaaccgccggagggtgaggattactggttttcagacgatatcccgttc

SEQ ID NO: 4566 - DNA, 75 bp, synthetic construct
  source 1..75: mol_type = other DNA
ccgcgaacaggcggaagccgttgccgcacagtaccggaacgtctttatcgaggatgatcagggaacgcattttcg

SEQ ID NO: 4567 - DNA, 75 bp, synthetic construct
  source 1..75: mol_type = other DNA
agatatacacggacagagctggataccccgtggtgattactcgcatcactgagcactcagtgttctttcgacgga

SEQ ID NO: 4568 - DNA, 75 bp, synthetic construct
  source 1..75: mol_type = other DNA
tatcagagtgcattgcttagcattggggggcattgacctgaccagtccaacaggaaaaatgatgatgcaagtaat

SEQ ID NO: 4569 - DNA, 75 bp, synthetic construct
  source 1..75: mol_type = other DNA
caccgtcagggcatgattatggaaaccatcgggaaaaataacgccgtctgtaatgaatatccgtccccaatcctg

SEQ ID NO: 4570 - DNA, 75 bp, synthetic construct
  source 1..75: mol_type = other DNA
caaacgcacagccggacatggccaacatcaaccgcaaaaaagcgaacgtcatgcgcccggtggagtaccagaacg

SEQ ID NO: 4571 - DNA, 75 bp, synthetic construct
  source 1..75: mol_type = other DNA
gttacggcccagcgtcactgtacgactacaaaggcaggggccgaacctttggtctgaactactctgtgctgttct

SEQ ID NO: 4572 - DNA, 75 bp, synthetic construct
  source 1..75: mol_type = other DNA
acatacgttcagaaaatgcagcgaaaccgcacactatgccatctaactatctctgtaaacagattgaaagcacta

SEQ ID NO: 4573 - DNA, 75 bp, synthetic construct
  source 1..75: mol_type = other DNA
aataacaccacgcagattgcgaccaccgcgtttgttcaggcggctctgacggctcttattaatggtgcgccagcc

SEQ ID NO: 4574 - DNA, 75 bp, synthetic construct
  source 1..75: mol_type = other DNA
caagcctacccgacgttgcgcccgctgatcggcggcaccctgaacatcaagcacgtgcgtgcccactgggacgac

SEQ ID NO: 4575 - DNA, 75 bp, synthetic construct
  source 1..75: mol_type = other DNA
atgagcggaaaaccagcggcgcgtcagggagatatgactcagtatggcggtcctattgtccagggttcggcaggt

SEQ ID NO: 4576 - DNA, 75 bp, synthetic construct
  source 1..75: mol_type = other DNA
ccagcgcgacgataccggcgaaacggtggccgtcgaggtggtcatgcgtggacgtcagaaagaaatcgacaccgg

SEQ ID NO: 4577 - DNA, 75 bp, synthetic construct
  source 1..75: mol_type = other DNA
cagcaggccggtaactccgtgctggcaaaagccaaccaggtaccgcagcaggttctgtctctgctgcagggttaa

SEQ ID NO: 4578 - DNA, 75 bp, synthetic construct
  source 1..75: mol_type = other DNA
ttaccggtctggcaaaaagcctgcgtgctgccgtgcatcacagctcaccgatttacgtcaaacgcaatattctgg

SEQ ID NO: 4579 - DNA, 75 bp, synthetic construct
  source 1..75: mol_type = other DNA
ctcacccagtcactctcttcacttttttccctcgacctttctctggtcagtcagcagtttctttcccttgaattt

SEQ ID NO: 4580 - DNA, 75 bp, synthetic construct
  source 1..75: mol_type = other DNA
gattatatagacgagctgaacgcgatggatttaaccacggcaccagatctcaactggcctgaaaaacaactttct

SEQ ID NO: 4581 - DNA, 75 bp, synthetic construct
  source 1..75: mol_type = other DNA
ccgctggccgatatcgtgcttaacagcacgcaggcgtctttctgtaccgaataccgcgtcgtgaccggaggctcg

SEQ ID NO: 4582 - DNA, 75 bp, synthetic construct
  source 1..75: mol_type = other DNA
ccgttcgctaatgctccacgcaggaggtgataatcatgatgaccatcctgaacctctaggtggcggtggtgcaag

SEQ ID NO: 4583 - DNA, 75 bp, synthetic construct
  source 1..75: mol_type = other DNA
gtcttcggtacggccaacggaatgaccatcagtaccgggctggagtatgggccggataacgaggccaataccggc

SEQ ID NO: 4584 - DNA, 75 bp, synthetic construct
  source 1..75: mol_type = other DNA
gtgaaaacgggggctgaagccatccgggcgctggccacacagcttccgtcgtttcgccagaaactgaatgagggc

SEQ ID NO: 4585 - DNA, 75 bp, synthetic construct
  source 1..75: mol_type = other DNA
atgggaaagagtaagaagaaccgcgctgcggcgacgaaacagatccagcttaaaagtcaaactacagccgaagca

SEQ ID NO: 4586 - DNA, 75 bp, synthetic construct
  source 1..75: mol_type = other DNA
tttactcattgtcgatgaagccgggcaggtgcttcctgaagtggctgctgcctcgtttgcattagctaagaaggc

SEQ ID NO: 4587 - DNA, 75 bp, synthetic construct
  source 1..75: mol_type = other DNA
ccgctgaacgtgcgcaccagacagaaattatttgccgccttcttgaggtatacccgaacaaaattacagatgctg

SEQ ID NO: 4588 - DNA, 75 bp, synthetic construct
  source 1..75: mol_type = other DNA
ccgcacaagtgaaatcatatctgacgtttcttcctgaagaaattcgccagaaaatccttgaacatctccacggtg

SEQ ID NO: 4589 - DNA, 75 bp, synthetic construct
  source 1..75: mol_type = other DNA
cgcggtaaaaggaaaccaggggcggctaaataaagcctttgaggaaaaatttccgctgaaagaattaaataatcc

SEQ ID NO: 4590 - DNA, 75 bp, synthetic construct
  source 1..75: mol_type = other DNA
acactttcggttacccgtttgagaagatccgtaatgctatcgctgtacctagtgaaaaaaacgttgatgctgcca

SEQ ID NO: 4591 - DNA, 75 bp, synthetic construct
  source 1..75: mol_type = other DNA
tgtccgcagccatctgtctgtccgtatccggtgcgcctgcatgggcatctgaacatcagtccacgctgagcgcgg

SEQ ID NO: 4592 - DNA, 75 bp, synthetic construct
  source 1..75: mol_type = other DNA
ccttcgggaagccgagggctggggatggtgtgccggacgcatggaggccgttggtgagtgccgtgaagatgcccg

SEQ ID NO: 4593 - DNA, 75 bp, synthetic construct
  source 1..75: mol_type = other DNA
cccgatcgaatccgtggccattgatattgcttatgaaggctccggcagtggcgactggcgcactgacggtttcat

SEQ ID NO: 4594 - DNA, 75 bp, synthetic construct
  source 1..75: mol_type = other DNA
cacctcaaacggcattaccgtgcatacgcataaacacggtggcgtgaaaggcggcagcgattcgacaggaggccc

SEQ ID NO: 4595 - DNA, 75 bp, synthetic construct
  source 1..75: mol_type = other DNA
tcatcctcgtcgggcgtctgggcaatgatccggaagtccgttacatccccaacgggggcgcagtggcaaacctgc

SEQ ID NO: 4596 - DNA, 75 bp, synthetic construct
  source 1..75: mol_type = other DNA
ctggatgcgtgactgccattcttcagatgataaagacgtcattgcaattgatggaaaaacgctccggcactctta

SEQ ID NO: 4597 - DNA, 75 bp, synthetic construct
  source 1..75: mol_type = other DNA
tcattttgttgatgatggccacaggtgtgcaggcctccacccgggatgaaattgaacgactctggaatccgcagg

SEQ ID NO: 4598 - DNA, 75 bp, synthetic construct
  source 1..75: mol_type = other DNA
gccggttgtttgacccgtccgtcagactggctgcggatatccgggataacgaagggcgggtgtttgcccgtcagg

SEQ ID NO: 4599 - DNA, 75 bp, synthetic construct
  source 1..75: mol_type = other DNA
tgccccatcaccacattgaaaatcgaccaatcctttgtcgccaggctcccggatgatgcccgtgaccaaactatc

SEQ ID NO: 4600 - DNA, 75 bp, synthetic construct
  source 1..75: mol_type = other DNA
gcatggcgatgaatgcctgggcgcgtcctgatggcgaaaaagttccggcagctggaataacccaggcttattttg

SEQ ID NO: 4601 - DNA, 75 bp, synthetic construct
  source 1..75: mol_type = other DNA
cacgcaataagcggtacgcaggagcgggaattatctttggctgaattatcctggtgggcggtctgcaatcaggtg

SEQ ID NO: 4602 - DNA, 75 bp, synthetic construct
  source 1..75: mol_type = other DNA
gccaggcagtgatgacctgaagggcattaacgtgaaataccgttatgaatttacggacacgctggggctggtgac

SEQ ID NO: 4603 - DNA, 75 bp, synthetic construct
  source 1..75: mol_type = other DNA
gttgaccgtatccggcgtgaacgtctgcccggagaactggcatacgcgctgaaacaacaactgaggattgcgata

SEQ ID NO: 4604 - DNA, 75 bp, synthetic construct
  source 1..75: mol_type = other DNA
aggcaggccagaggcgtgacggcaaccgaagctgcggatgagcttgcccgctcagtttcacccttcattgatggt

SEQ ID NO: 4605 - DNA, 75 bp, synthetic construct
  source 1..75: mol_type = other DNA
caagcattccaataagttaccggcctcatttgaagaatatgtcgacataaaattacaggaccaccgggataagct

SEQ ID NO: 4606 - DNA, 75 bp, synthetic construct
  source 1..75: mol_type = other DNA
atcgcaccgtctctgttcggctgcatccagctggcaaaccgtgccggagcatcacgccccactctggcagcaggt

SEQ ID NO: 4607 - DNA, 75 bp, synthetic construct
  source 1..75: mol_type = other DNA
ccgacacggttgtgaataccggcgcggaagggggaccggatgcggaaaatggtgataccgggcagaccgtctacg

SEQ ID NO: 4608 - DNA, 75 bp, synthetic construct
  source 1..75: mol_type = other DNA
taggtgcctcacatatatcaaaaacaatgaatattgctcgttcaacagtatataaagtaataaatgaaagcaact

SEQ ID NO: 4609 - DNA, 75 bp, synthetic construct
  source 1..75: mol_type = other DNA
ttttctgctggaatttggcattagcgttccccgaggagctgccgttattagccgactgagtaccattcttgagga

SEQ ID NO: 4610 - DNA, 75 bp, synthetic construct
  source 1..75: mol_type = other DNA
tgagctgcaaatcctcagggatgaattactctcaggccactaccagcccttgcccgccagacgggtttacatccc

SEQ ID NO: 4611 - DNA, 75 bp, synthetic construct
  source 1..75: mol_type = other DNA
accgtttccaatatcatcggcaccaccgacgaaaacggtcagtacaccggactgaaagccctgctggcggcggag

SEQ ID NO: 4612 - DNA, 75 bp, synthetic construct
  source 1..75: mol_type = other DNA
aataccgatcgtcggcgctgtctactgacgtcactgctggtgctgactctgcctgtcggtttatgccgtcaatat

SEQ ID NO: 4613 - DNA, 75 bp, synthetic construct
  source 1..75: mol_type = other DNA
ggatacccgcccggtggccgaccgcctgaccgtacagagcgccagaatcgtgacatggcggctgaatgcaaaact

SEQ ID NO: 4614 - DNA, 75 bp, synthetic construct
  source 1..75: mol_type = other DNA
tcaccctgttgctggcagccgctgccgtgcaggcctccacccgggatgaaattgaacgactctggaatccgcagg

SEQ ID NO: 4615 - DNA, 75 bp, synthetic construct
  source 1..75: mol_type = other DNA
cagcggcaaaagccagtctgcagaagtacattgccagccagacgaggcttggtcgggatattcgccgtagcgcca

SEQ ID NO: 4616 - DNA, 75 bp, synthetic construct
  source 1..75: mol_type = other DNA
aaaactcgaagcagctgcggcggcggcgcgtgagtcatataaaccgaaaagaaaaattagcccggcaaaaaatga

SEQ ID NO: 4617 - DNA, 75 bp, synthetic construct
  source 1..75: mol_type = other DNA
tggggcaacctgctgaatgaagagaacccgcatcagctgcagcagcttatccgcctgccggggcagcagtatgat

SEQ ID NO: 4618 - DNA, 75 bp, synthetic construct
  source 1..75: mol_type = other DNA
acatcaggcgcttctgcaatatatccgcccgggcgcacagaaccagatgaaagttattctggctgaagaagcgaa

SEQ ID NO: 4619 - DNA, 75 bp, synthetic construct
  source 1..75: mol_type = other DNA
tgattaaagaaatcaaagaacgaatcagcagcctagaggttcgagacgatattgagcgccgtgcttatgaaattg

SEQ ID NO: 4620 - DNA, 75 bp, synthetic construct
  source 1..75: mol_type = other DNA
aaccccccgcacacagacaacggataacggcaaacagaacacctatttttcttcactggataacatggttgccca

SEQ ID NO: 4621 - DNA, 75 bp, synthetic construct
  source 1..75: mol_type = other DNA
caatcacatgtatctggtgtgataaatcgcgttacatgacctctcatgttgtgctggtggttatcacgacgttct

SEQ ID NO: 4622 - DNA, 75 bp, synthetic construct
  source 1..75: mol_type = other DNA
cacattctggctgtacgaaagagtacactgctgcaaatcgacacacttatccggcaactggctgaaatctcagca

SEQ ID NO: 4623 - DNA, 75 bp, synthetic construct
  source 1..75: mol_type = other DNA
aatggtgccgtgatccatatcgtgccgcgtctggcaggagccaaaagtggcggtgtgtttcaggctgtgctgggg

SEQ ID NO: 4624 - DNA, 75 bp, synthetic construct
  source 1..75: mol_type = other DNA
ccgtctcagcacgtcatgacgcccgtgaacacctcagcattgaggcttaccataagctcaaccgcgccagcgccg

SEQ ID NO: 4625 - DNA, 75 bp, synthetic construct
  source 1..75: mol_type = other DNA
ggaagacgacagccaggtgaaaagaatgctggtggagtggggaccggttatcccggaagggaaggtcgagatcac

SEQ ID NO: 4626 - DNA, 75 bp, synthetic construct
  source 1..75: mol_type = other DNA
tggacaatccggtcaagcgtggtgagcaggttatcgaacaggtcacgctgatgaaacccaatgccgggacgctgc

SEQ ID NO: 4627 - DNA, 75 bp, synthetic construct
  source 1..75: mol_type = other DNA
ctgtgtacgcgctggcgaaaaaaatgatgccggaatatgaaggcggattctggcacttcatccgcctgccggacg

SEQ ID NO: 4628 - DNA, 75 bp, synthetic construct
  source 1..75: mol_type = other DNA
gcagatagtcgataaccaggacatgacgatatcggtctgggtctttcctgatactgatatttcagatgtatcgcg

SEQ ID NO: 4629 - DNA, 75 bp, synthetic construct
  source 1..75: mol_type = other DNA
attgttaatcaccctcgcttttttaagtacatgaattggcttatgacgggaaaaacaaatgaggctgctgggcag

SEQ ID NO: 4630 - DNA, 75 bp, synthetic construct
  source 1..75: mol_type = other DNA
acaaccagcgggtaggcgagttaacgaagttagccaacggcgcgcacacctttaagtatgcaccggagtggttag

SEQ ID NO: 4631 - DNA, 75 bp, synthetic construct
  source 1..75: mol_type = other DNA
gctgacattctgacaccacgacgcagggaggattacggtaaggacctgtggagcgcatatcagaccatccaggag

SEQ ID NO: 4632 - DNA, 75 bp, synthetic construct
  source 1..75: mol_type = other DNA
tgacgaacatcagcccgtcaccaccgctgacattctgacaccgcgacgcagggaggattacggtaaggacctgtg

SEQ ID NO: 4633 - DNA, 75 bp, synthetic construct
  source 1..75: mol_type = other DNA
tctgcaggtgataccagttttacgctggcctggaaaccgggagaggaaggtcagaaagggcttataggctggttt

SEQ ID NO: 4634 - DNA, 75 bp, synthetic construct
  source 1..75: mol_type = other DNA
cggtgtgtttcaggcggtgctgggtgcggcgttgattgctacggcaatctggatgccggggatcagtatcgcttt

SEQ ID NO: 4635 - DNA, 75 bp, synthetic construct
  source 1..75: mol_type = other DNA
gcgctggctgcggagaatgcgctggctcgtaaagcagttcaggcattttgcgatgttgttggcgacagcaccgag

SEQ ID NO: 4636 - DNA, 75 bp, synthetic construct
  source 1..75: mol_type = other DNA
gttaagcccgcatctttacctggcgaccaacagcgcacaggggccgtggtggatactggggtggtcagagcgggt

SEQ ID NO: 4637 - DNA, 75 bp, synthetic construct
  source 1..75: mol_type = other DNA
ctggctgctgacagtattgtacaggcaggtgaaaccgtgaacggcggaacactggaaaatcatgacaaccagatt

SEQ ID NO: 4638 - DNA, 75 bp, synthetic construct
  source 1..75: mol_type = other DNA
attccgccgtcagatgaacgaaggctggtaccagatacgtattgccggtgatgacacggcaccggaggcggtgta

SEQ ID NO: 4639 - DNA, 75 bp, synthetic construct
  source 1..75: mol_type = other DNA
tatccatacccgggccattcacagcattgataccgacattaagctcaaccgtgcattgtgggtgatggcagaaac

SEQ ID NO: 4640 - DNA, 75 bp, synthetic construct
  source 1..75: mol_type = other DNA
ccatgcgtattcaccaacagcatcctgcatcccgtctttttccgttctgtaccggtaaataccgctggcacggta

SEQ ID NO: 4641 - DNA, 75 bp, synthetic construct
  source 1..75: mol_type = other DNA
ggtggcgcttgaccgcatcatgatcggtttcaacggcacgtctcacgcggatgagtccaacttcagcaccaacaa

SEQ ID NO: 4642 - DNA, 75 bp, synthetic construct
  source 1..75: mol_type = other DNA
ataaaaattgatcagtttgagatcacttatgataattaccttgataattgcaagcattccaataagttaccggcc

SEQ ID NO: 4643 - DNA, 75 bp, synthetic construct
  source 1..75: mol_type = other DNA
ccgccaactcaagttagacattttcaccaaatcacgactccgcatcaaagtcatcgcagacgttccagactcccg

SEQ ID NO: 4644 - DNA, 75 bp, synthetic construct
  source 1..75: mol_type = other DNA
agtgcccttctcttctatatgccggatcagcgtcaccatatgctgttcgccaccctctggaataccggaatgcgt

SEQ ID NO: 4645 - DNA, 75 bp, synthetic construct
  source 1..75: mol_type = other DNA
gtcagcggggtacgggaacaggccatactgacacaggccattcgcagtgagctgaaaacacagggcgtgctcgga

SEQ ID NO: 4646 - DNA, 75 bp, synthetic construct
  source 1..75: mol_type = other DNA
cgcatcagtccggcaatacaaaaaaggcaggaaaatttaccccgccccgtcattgacagagcatgggatgctcaa

SEQ ID NO: 4647 - DNA, 75 bp, synthetic construct
  source 1..75: mol_type = other DNA
cagaccataaaacatggcggactggcaaccggaaccatcgtcaacaccggtgcagaaggtggtccggagtctgaa

SEQ ID NO: 4648 - DNA, 75 bp, synthetic construct
  source 1..75: mol_type = other DNA
cacattgatgtcacgacagaagatttggcaagtgcgctcgacgtgacagaagaggtaattgattcaattttgcag

SEQ ID NO: 4649 - DNA, 75 bp, synthetic construct
  source 1..75: mol_type = other DNA
acgcaccgtgcggtcggggagatgcgcagcgccggcgtggatgcacagacactggcgtcctttctgcatgacacg

SEQ ID NO: 4650 - DNA, 75 bp, synthetic construct
  source 1..75: mol_type = other DNA
atgagtaattcactgttaccgccatcagccagcaatttcatgcgttgtgccgaagctgtcggaacgcgcattaca

SEQ ID NO: 4651 - DNA, 75 bp, synthetic construct
  source 1..75: mol_type = other DNA
tattccgcaggagctggcgactgccgcatcaatgactgaaaacggtcatcgtcgggatatgcaccctgccgaaca

SEQ ID NO: 4652 - DNA, 75 bp, synthetic construct
  source 1..75: mol_type = other DNA
gcttgcgcaacacggcagcgaaaaaccagtaacgcacgttgcacgggaagaacttcaggcattacatatagcacg

SEQ ID NO: 4653 - DNA, 75 bp, synthetic construct
  source 1..75: mol_type = other DNA
tcgtgttttacgcatcagccgcacgccatccggcgctaatgctggcggaggaattcttaccgatcgcggtgaagg

SEQ ID NO: 4654 - DNA, 75 bp, synthetic construct
  source 1..75: mol_type = other DNA
ccaaccaatcaggaggtggcaaccatgctgggataccgttcggtgaatgcagcggtggagcatcttcgcgcactg

SEQ ID NO: 4655 - DNA, 75 bp, synthetic construct
  source 1..75: mol_type = other DNA
ttagcggcggggcacgccgttcttgcctgtggagagatggtgcagtcaggccgcccgttgaagcaggaacccacc

SEQ ID NO: 4656 - DNA, 75 bp, synthetic construct
  source 1..75: mol_type = other DNA
caagtacgaaggcatcctggacggcaattcagccatcaccgttctgcacggtgaagcgcgtttcaaggacgacca

SEQ ID NO: 4657 - DNA, 75 bp, synthetic construct
  source 1..75: mol_type = other DNA
gcccacatcgcccatctgcgccgggaaagcccattcgacggcggcatgccacccacaccgccgacgatcttgcgc

SEQ ID NO: 4658 - DNA, 75 bp, synthetic construct
  source 1..75: mol_type = other DNA
atgcgtaatattgaaaccctcacgactaaaaccggaccggatgacgcagggcttaatattttactgacagaggct

SEQ ID NO: 4659 - DNA, 75 bp, synthetic construct
  source 1..75: mol_type = other DNA
ccataattttagaggcgcaaaatgtgttgataacctacaaaggaaagctaccgggaagaattactgattctctga

SEQ ID NO: 4660 - DNA, 75 bp, synthetic construct
  source 1..75: mol_type = other DNA
tatcagtctgaacgtgagcgtcttaagttcgaacaggaaacggcacaactcattccggccagtgatgtcagacgg

SEQ ID NO: 4661 - DNA, 75 bp, synthetic construct
  source 1..75: mol_type = other DNA
ttccctggtatgaggggaatatcctgtttgcctttgcagtggcggcacaggtgctgacgtggtgtgaaacgcgca

SEQ ID NO: 4662 - DNA, 75 bp, synthetic construct
  source 1..75: mol_type = other DNA
tgtttctccggatgacggagggagttgttatctctggctcaaccgggggcaaccacctgccgccagccgtcgtcg

SEQ ID NO: 4663 - DNA, 75 bp, synthetic construct
  source 1..75: mol_type = other DNA
atataacggtgggttacccccaaacgaatcggaaaatcgatactggaaaaactctaactcggtggccagtttttg

SEQ ID NO: 4664 - DNA, 75 bp, synthetic construct
  source 1..75: mol_type = other DNA
caacggaaattgctcatcagctcagtattgcccgctccacggtttataaaattcttgaagacgaaagggcctcgt

SEQ ID NO: 4665 - DNA, 75 bp, synthetic construct
  source 1..75: mol_type = other DNA
gcagatatggactgcgctgtgaaaaactcgacaagcccctgaatcttggctggggactggacaatagcgcggtgt

SEQ ID NO: 4666 - DNA, 75 bp, synthetic construct
  source 1..75: mol_type = other DNA
caaaaggggatgataagtttatcaccaccgactatttgcaacagtgccatatggggcaaatggtggtcaccatcc

SEQ ID NO: 4667 - DNA, 75 bp, synthetic construct
  source 1..75: mol_type = other DNA
tcaccgttccccgacacactgcccggtaccgaatacggccccgacaggggcatccgtctttcggcggtgtggctg

SEQ ID NO: 4668 - DNA, 75 bp, synthetic construct
  source 1..75: mol_type = other DNA
atgagtgactatcatcacggcgtgcaggtgctggagattaacgacggcacccgcgtcatttccaccgtatccacc

SEQ ID NO: 4669 - DNA, 75 bp, synthetic construct
  source 1..75: mol_type = other DNA
atggctgattcgaatctcaacacccctgttattgtgcaggcgacgcggctcgatacatcaatccttccacgcaat

SEQ ID NO: 4670 - DNA, 75 bp, synthetic construct
  source 1..75: mol_type = other DNA
aaagatcgaagaagatgaacgggaaatagaacatctgcgggctcagatagaaaaactgcgccggatgctgttcgg

SEQ ID NO: 4671 - DNA, 75 bp, synthetic construct
  source 1..75: mol_type = other DNA
tcaccctggtgaaacggcagctgacgcgtgaaatctcggaagggcgcttcactgccaatcgtgaggcggtaaaac

SEQ ID NO: 4672 - DNA, 75 bp, synthetic construct
  source 1..75: mol_type = other DNA
tgactaatcagggcgcggcacggctggctaacgcgacgatgctcggcagtaagctgaatctgacgcaaatggccg

SEQ ID NO: 4673 - DNA, 75 bp, synthetic construct
  source 1..75: mol_type = other DNA
gattagatggaattgaggatgcttcaaaaaaagggtatccagtacgtaatctatacaaaattgcgtgtgagcccg

SEQ ID NO: 4674 - DNA, 75 bp, synthetic construct
  source 1..75: mol_type = other DNA
atgccgtccacgcagggccagaacaaaaggtaaggttgagcggatggtgaaatacctcaaggagaacttcttcgt

SEQ ID NO: 4675 - DNA, 75 bp, synthetic construct
  source 1..75: mol_type = other DNA
gggcgcagcagccgctggtacaaaagtgaggtggagcagtggatgcagcaacgaatcgaggaatcccggggggca

SEQ ID NO: 4676 - DNA, 75 bp, synthetic construct
  source 1..75: mol_type = other DNA
ctgatcggcgtgcaggcagtggccccggaagcgggcgaactgatccagacggccgcactggcgattcgcaaccgg

SEQ ID NO: 4677 - DNA, 75 bp, synthetic construct
  source 1..75: mol_type = other DNA
atacccatatctccgaccagtacgcgccgttcagcacccgcgtggtgaatgtcggcgtccgcgattccacctatg

SEQ ID NO: 4678 - DNA, 75 bp, synthetic construct
  source 1..75: mol_type = other DNA
ccgcccgcgtggataatgcaaccggcccccaactggcagacaccgttacacgggattatttcaccctcagagagc

SEQ ID NO: 4679 - DNA, 75 bp, synthetic construct
  source 1..75: mol_type = other DNA
cccccgactggcagacaccgctgaacgggattatttcatcctcagagaacggttgatgacaatgcagaagcagct

SEQ ID NO: 4680 - DNA, 75 bp, synthetic construct
  source 1..75: mol_type = other DNA
gccagttatgcccgttcgctggaggtgcgtgatcgtattgcaggtgccggagccaccaccacggctgcagggctg

SEQ ID NO: 4681 - DNA, 75 bp, synthetic construct
  source 1..75: mol_type = other DNA
agcaatagataaccacgggaaggaaataacaaacagaaaaggattacctaatgtctgcagagttcatggtaatat

SEQ ID NO: 4682 - DNA, 75 bp, synthetic construct
  source 1..75: mol_type = other DNA
gcgaactttctgaacatgttgcgctggctctcaaaaatcgtaaggcaactttgttacaacatcatgggcttatcg

SEQ ID NO: 4683 - DNA, 75 bp, synthetic construct
  source 1..75: mol_type = other DNA
atgaacacattacccgacacacacgtacgggaggcatcgcgctgctcatctcccgtaaccatctggcagacactg

SEQ ID NO: 4684 - DNA, 75 bp, synthetic construct
  source 1..75: mol_type = other DNA
cactggatatacagacatcggatttgtggcgcgatgtgagctgggccatctctgacattctgtgccgcccgcgaa

SEQ ID NO: 4685 - DNA, 75 bp, synthetic construct
  source 1..75: mol_type = other DNA
actggtatcccacagcaagtatcagcgatttgctggttgtggtgatgaagaaagccaccgcaggcatcagtatca

SEQ ID NO: 4686 - DNA, 75 bp, synthetic construct
  source 1..75: mol_type = other DNA
catcagcacaaaggaaccaccagtgccgtacggcgggtggtggagccgttcggcttcctgatccgcattattgag

SEQ ID NO: 4687 - DNA, 75 bp, synthetic construct
  source 1..75: mol_type = other DNA
cttcggtattagacatgacgattattgttcgttcaaatccgagtaaagccgctattcttgaagagtttttacatg

SEQ ID NO: 4688 - DNA, 75 bp, synthetic construct
  source 1..75: mol_type = other DNA
cggaagtggtcaccgggcatacggacgttatctgctcaaccagtatccgccacattctggctgtacgaaagagta

SEQ ID NO: 4689 - DNA, 75 bp, synthetic construct
  source 1..75: mol_type = other DNA
tctataaaaaggttgctgctgattgtgaggcgtttatatctcgtgccagagctttatttgaggaagcaaacaggg

SEQ ID NO: 4690 - DNA, 75 bp, synthetic construct
  source 1..75: mol_type = other DNA
gattatggatcgcatgaccatgaacggcgggcgatgggtgaattttaactgggagagctggcgtccgaatgtcgt

SEQ ID NO: 4691 - DNA, 75 bp, synthetic construct
  source 1..75: mol_type = other DNA
gcaaagcgtgctatgaagatgagatgttcaacatcagatactttaagaagggctccgcacacatcacgttcagga

SEQ ID NO: 4692 - DNA, 75 bp, synthetic construct
  source 1..75: mol_type = other DNA
atggcaactttaacaaaaaaagaacgggcatggttgaacgaattacaggacgttcttgatcgctgcccatcaccg

SEQ ID NO: 4693 - DNA, 75 bp, synthetic construct
  source 1..75: mol_type = other DNA
gattgatattgagccggaaggagatgttttctttccgaatattcccaataccttcgaagttgtttttgagcaaca

SEQ ID NO: 4694 - DNA, 75 bp, synthetic construct
  source 1..75: mol_type = other DNA
gctgccgtctgccatagccttgatcctttttgcgctcggcatctccagctatggcgattacgtctcgcagggcgc

SEQ ID NO: 4695 - DNA, 75 bp, synthetic construct
  source 1..75: mol_type = other DNA
tttaattaccagttttattggaaatggtccggttcgtcactctcctggaaaggaatattctcatcgcgattgcga

SEQ ID NO: 4696 - DNA, 75 bp, synthetic construct
  source 1..75: mol_type = other DNA
atgcaggtaagccagtggacaggccagaacggcgaaacgcggcagggctggcaggttatcgcagacagcgtaatc

SEQ ID NO: 4697 - DNA, 75 bp, synthetic construct
  source 1..75: mol_type = other DNA
atctgttattcatccggcaggggcagggcaaaagcgccactggtaaacctctgccagtgatcactatcacacgca

SEQ ID NO: 4698 - DNA, 75 bp, synthetic construct
  source 1..75: mol_type = other DNA
ccggcggcatcacaaccgctggcggatgatcctgccgttcgggccgtgttccgcaatgaggcagtgatccgtcgt

SEQ ID NO: 4699 - DNA, 75 bp, synthetic construct
  source 1..75: mol_type = other DNA
gcactgatttgtcgtcacgcccgtaacctgctgctggcgcagggctggccggaagagacggatgttgaccagcga

SEQ ID NO: 4700 - DNA, 75 bp, synthetic construct
  source 1..75: mol_type = other DNA
gatttacagccattacctgcagactgagcacaaaggctttgtgaagctggctgaagaactggctgccgaccgctg

SEQ ID NO: 4701 - DNA, 75 bp, synthetic construct
  source 1..75: mol_type = other DNA
aagcgggctgcttttccccgattcaaaaagcggggacagaatgatgcattccgctacccgcagggcgttaagctc

SEQ ID NO: 4702 - DNA, 75 bp, synthetic construct
  source 1..75: mol_type = other DNA
ggatggtgttattctgggcgcggtgtattcagacgtcgataaaccaccgttcagtgacaaaaatatccggggaac

SEQ ID NO: 4703 - DNA, 75 bp, synthetic construct
  source 1..75: mol_type = other DNA
aatcacaaatgacaactgtcagaatcccacatgaagtaatggatgatattgagcaacttaaagaacctggcgaaa

SEQ ID NO: 4704 - DNA, 75 bp, synthetic construct
  source 1..75: mol_type = other DNA
agaagaagcccgcacttttgaacaactcgcagttgagtggcatgcaacaaataaaaagtggtcggaagaacatag

SEQ ID NO: 4705 - DNA, 75 bp, synthetic construct
  source 1..75: mol_type = other DNA
atgttccgtcacccggaaaacgagtacgaccagatggactcagacgccgctgtggatgaggccattctcgtcaat

SEQ ID NO: 4706 - DNA, 75 bp, synthetic construct
  source 1..75: mol_type = other DNA
aatcacagaaattacaggctcgcgccccgcatgaagttgttgaggctatggagcaagtaaaagaaacaggcgaga

SEQ ID NO: 4707 - DNA, 75 bp, synthetic construct
  source 1..75: mol_type = other DNA
ctgacaaaattaacgacagaacttgccagttattgcgctgatgtatccaggaaacttaacgataaaaggagctga

SEQ ID NO: 4708 - DNA, 75 bp, synthetic construct
  source 1..75: mol_type = other DNA
ttatcggatattctactgttgactatttgtgccgttatttctggtgcagaaggctgggaagatatagaggatttt

SEQ ID NO: 4709 - DNA, 75 bp, synthetic construct
  source 1..75: mol_type = other DNA
gctggataagcaacgaacgtcctggcctgcttttcgatctggcgacagggtggcttatgcaacatcgtattattc

SEQ ID NO: 4710 - DNA, 75 bp, synthetic construct
  source 1..75: mol_type = other DNA
agattctgcctgttcgctggctggcgcaacacaacagcgaaaaaccgctcacgcacgtttcactggacaaactgc

SEQ ID NO: 4711 - DNA, 75 bp, synthetic construct
  source 1..75: mol_type = other DNA
ccggaaatcagtgaagagaatattctgagtacgtttgagcagctacaccagaataaggatgaagtgtttgagcga

SEQ ID NO: 4712 - DNA, 75 bp, synthetic construct
  source 1..75: mol_type = other DNA
tcagatcgcgataacgcagtgggcgtggactgaatttaatgctcaatccggtaccagaaaaattgcaggaaaaac

SEQ ID NO: 4713 - DNA, 75 bp, synthetic construct
  source 1..75: mol_type = other DNA
tgatgagcatgaccctgacggataaccggggctttgaggctgaccagcttgatattgaactgaacgatgccgacg

SEQ ID NO: 4714 - DNA, 75 bp, synthetic construct
  source 1..75: mol_type = other DNA
cctgaatgcgataacctgcgcacaaactggcttaacgtgctgcagcgcaatacccaggataacaaagattactgg

SEQ ID NO: 4715 - DNA, 75 bp, synthetic construct
  source 1..75: mol_type = other DNA
ggcttcgcgttccttgctatgggctttactggcaaacgtgcagcccggttcaaagaggcatacatcaacgccttt

SEQ ID NO: 4716 - DNA, 75 bp, synthetic construct
  source 1..75: mol_type = other DNA
gggcagccaattgcaacagtgatggcagtgtatatccacctcctggtgagcgcgtcacgaaatgtcacgcgaggt

SEQ ID NO: 4717 - DNA, 75 bp, synthetic construct
  source 1..75: mol_type = other DNA
aatcagtgatgcgcattgaggccggactgagcacgtatgagaaagagctggcgctgatgggcgaggattatcagg

SEQ ID NO: 4718 - DNA, 75 bp, synthetic construct
  source 1..75: mol_type = other DNA
acaaatacgcctttatttaaaaaatatacgctctggttaatgactggtgatacgtcaccacaagctggtcagatc

SEQ ID NO: 4719 - DNA, 75 bp, synthetic construct
  source 1..75: mol_type = other DNA
gggatcaactctccgataacgatcggcaacgtcgtgagtttatcgccaatatttcccacgatctgcggacaccat

SEQ ID NO: 4720 - DNA, 75 bp, synthetic construct
  source 1..75: mol_type = other DNA
aatgaccatgcttggaaagcaacattctgtagaggtaaagcagagggaatatgggagaagtactgtgcataaatg

SEQ ID NO: 4721 - DNA, 75 bp, synthetic construct
  source 1..75: mol_type = other DNA
ctggcgaagacggggaagccaatactacatcagcgataaaggccagaaataccgaaaagacgttcagcaaatcat

SEQ ID NO: 4722 - DNA, 75 bp, synthetic construct
  source 1..75: mol_type = other DNA
caacaaatgaccagaacaccgatttgcaacgtaatgcactgaactgcgcgggatgtgagcagatttttgaggaca

SEQ ID NO: 4723 - DNA, 75 bp, synthetic construct
  source 1..75: mol_type = other DNA
tattgattaccggacaacggaaacaccagaagccaccagccagaaacgggaacaactggaaaccgagcgccagcg

SEQ ID NO: 4724 - DNA, 75 bp, synthetic construct
  source 1..75: mol_type = other DNA
aagcgaaaaacggagtgattggttgcggtccacacataccctggtccgcgaaaggagagcagctactctttaaag

SEQ ID NO: 4725 - DNA, 75 bp, synthetic construct
  source 1..75: mol_type = other DNA
ttcgcagggcgttgtatatgcctgcaatggtagccaccagtaagactgagtggggacgggcgttccgcgaccgtc

SEQ ID NO: 4726 - DNA, 75 bp, synthetic construct
  source 1..75: mol_type = other DNA
ctgttcacccctgatcttcactccttacccgccggcattcatggttttcatgtacatgaaaacgcaagttgtgct

SEQ ID NO: 4727 - DNA, 75 bp, synthetic construct
  source 1..75: mol_type = other DNA
gtgacccgctgggaaaccgggaaaaatccgcccaatacaaagaaaaacttcggctacctgatgtggcgtaaacgt

SEQ ID NO: 4728 - DNA, 75 bp, synthetic construct
  source 1..75: mol_type = other DNA
aagctgttgcgggaaagaattgatgagacactttctgaggaaattgtacagaaatgcagaaatattaacggtgaa

SEQ ID NO: 4729 - DNA, 75 bp, synthetic construct
  source 1..75: mol_type = other DNA
tgcgcacaaactcggtgtttccatcagctccgtgaaaaaatacgtggcgaaagccgtcgagcactgcctgctgtt

SEQ ID NO: 4730 - DNA, 75 bp, synthetic construct
  source 1..75: mol_type = other DNA
accggcctgatgacccgcgacaattacagaacggtaaataacattaccctgggtaagcatccggagaaacgatga

SEQ ID NO: 4731 - DNA, 75 bp, synthetic construct
  source 1..75: mol_type = other DNA
aatgtattggcaggatgcgccagttgaaggcagcagcaaagcggctgcatacgctacaggctggaacgattgccg

SEQ ID NO: 4732 - DNA, 75 bp, synthetic construct
  source 1..75: mol_type = other DNA
tatcggacgcatgttcatgtccacgggctttatcaccgtcacagataatccacaggttctggaaacggtccgggc

SEQ ID NO: 4733 - DNA, 75 bp, synthetic construct
  source 1..75: mol_type = other DNA
gctattctgaacgcagccgggcgcacctcagccttcatcagtggtaaggcaccggaaatcaaaccctcgcccggc

SEQ ID NO: 4734 - DNA, 75 bp, synthetic construct
  source 1..75: mol_type = other DNA
agcacgggaatggctgattctgaacatggcgggactggagcgtgaagaattccgggtgctgtatctgaacaacca

SEQ ID NO: 4735 - DNA, 75 bp, synthetic construct
  source 1..75: mol_type = other DNA
ggggtgatcaacgtcttcaggggactgaactggaattacaaaaccaattgcccctgcaaatttggcagtaaaatt

SEQ ID NO: 4736 - DNA, 75 bp, synthetic construct
  source 1..75: mol_type = other DNA
tgattctggctacatcatcctgtggatatgcagccaccaaagatgtaacaatgaatcttgttgatagtgacggaa

SEQ ID NO: 4737 - DNA, 75 bp, synthetic construct
  source 1..75: mol_type = other DNA
cgggtgaatcatgcatgcgcgtcgatgccattgctaaggtcaccgggcgggcacgatatactgacgattatgtta

SEQ ID NO: 4738 - DNA, 75 bp, synthetic construct
  source 1..75: mol_type = other DNA
gaagctcgccttgagcgcgatatattaaaaaaagcaacagcgtattttgcacaggagtcgctgaaaaatacgcgt

SEQ ID NO: 4739 - DNA, 75 bp, synthetic construct
  source 1..75: mol_type = other DNA
tgagacgaagcagcatgacggttctggtcaacgtaattatggttgcagtcgtggagcggggcgtctactggatgg

SEQ ID NO: 4740 - DNA, 75 bp, synthetic construct
  source 1..75: mol_type = other DNA
tggaaggtgcgctggctgttattgctgttgtgggcgtttactgcctggttgtgtttttgatggatcgactaggga

SEQ ID NO: 4741 - DNA, 75 bp, synthetic construct
  source 1..75: mol_type = other DNA
cgcgacagcgccgaaacgggagtactgttcgagttaatagcgcatcgctatgaacgtgggagcctggtgataacc

SEQ ID NO: 4742 - DNA, 75 bp, synthetic construct
  source 1..75: mol_type = other DNA
gtggcaaaagtttttacacaagaagagcgggaaaaaattaaatggcaggtggtggaactcgtgcgccagagcggc

SEQ ID NO: 4743 - DNA, 75 bp, synthetic construct
  source 1..75: mol_type = other DNA
aagccacgatgccagaaaactgctgcagatgaccggagaatggctgaatacaacaggggctgatcagcagtcacc

SEQ ID NO: 4744 - DNA, 75 bp, synthetic construct
  source 1..75: mol_type = other DNA
cggcgcacgctgacccgcaccggctttgtcatcgaccacatccactactacgccgatgggcactgttgcaaatag

SEQ ID NO: 4745 - DNA, 75 bp, synthetic construct
  source 1..75: mol_type = other DNA
atgaattgctaatattaacgggctgcaaatatgcaagccaccagcgaaaatggttaatggaaaacgggcttccgt

SEQ ID NO: 4746 - DNA, 75 bp, synthetic construct
  source 1..75: mol_type = other DNA
tatcgtccagctgaacgggaatatccggccacgatcacgccagtggtggcagttattcaggatggtgtctcagtg

SEQ ID NO: 4747 - DNA, 75 bp, synthetic construct
  source 1..75: mol_type = other DNA
atcatatggaaacctggacctcggcgttgcaaacccgttccaccgccgggcgcggcagttccggtaaaattgatt

SEQ ID NO: 4748 - DNA, 75 bp, synthetic construct
  source 1..75: mol_type = other DNA
atgcaggatatacagcaggaaacactcaatgagtgcactaaaacggagcaatccgcgctggtcgtgctctgggaa

SEQ ID NO: 4749 - DNA, 75 bp, synthetic construct
  source 1..75: mol_type = other DNA
ggaaaactgcgcatgtgggggcgctggtcgtatattggcggcggtaagacggggaatatgttcaaccagttgttg

SEQ ID NO: 4750 - DNA, 75 bp, synthetic construct
  source 1..75: mol_type = other DNA
cttcatctccagaagccatgatgtcatggttgcagaacaactcatctgagcttactcgtgccggagtagaccctc

SEQ ID NO: 4751 - DNA, 75 bp, synthetic construct
  source 1..75: mol_type = other DNA
tcctgacaacccctattgcgatcagctcttttgcttctaccgagactttatcgtttactcctgacaacataaatg

SEQ ID NO: 4752 - DNA, 75 bp, synthetic construct
  source 1..75: mol_type = other DNA
aacttgtttttgcgtggggtgtggtgcttttggtggtgagaaccaccaacctgttgagcctttttgtggagtggg

SEQ ID NO: 4753 - DNA, 75 bp, synthetic construct
  source 1..75: mol_type = other DNA
aaaccaaaggtctggtggcctgtattgaggcggcagacgcgatgtgtaaagccgccaacgttgagttgattggct

SEQ ID NO: 4754 - DNA, 75 bp, synthetic construct
  source 1..75: mol_type = other DNA
caagcaaaaaactgactcgcttcgatactacgctgacaggctgttttgagcgagatatctctcgtgtcgggcatc

SEQ ID NO: 4755 - DNA, 75 bp, synthetic construct
  source 1..75: mol_type = other DNA
gaacatcataaatctggaatggcaacaaatcgacatgcagcgacgagttgcctgggtgaatccagaagagagcaa

SEQ ID NO: 4756 - DNA, 75 bp, synthetic construct
  source 1..75: mol_type = other DNA
atgccgggtaaattcagattcagccgtcgcagtgaaaaaaatctggagggtgtcaaaccacagctggttgctgta

SEQ ID NO: 4757 - DNA, 75 bp, synthetic construct
  source 1..75: mol_type = other DNA
acatccggttgttgccgtatcggcccgcaccggctgggaactggatacgctggtcagtgcgctcatgacagcgct

SEQ ID NO: 4758 - DNA, 75 bp, synthetic construct
  source 1..75: mol_type = other DNA
cctgcaatgcagaccgaagatattatttcagttatcaattgggcagaaaagcaggaatgtattgataatcagcgt

SEQ ID NO: 4759 - DNA, 75 bp, synthetic construct
  source 1..75: mol_type = other DNA
aacgcggtatcatcaaagttggtgaagaagttgaaatcgttggtatcaaagagactcagaagtctacctgtactg

SEQ ID NO: 4760 - DNA, 75 bp, synthetic construct
  source 1..75: mol_type = other DNA
ctgtatgcgttgatgcaatttgcctgcgcacctgtgctgggcgcgctgtcggatcgtttcgggcggcggccggtc

SEQ ID NO: 4761 - DNA, 75 bp, synthetic construct
  source 1..75: mol_type = other DNA
taaggtattcaaggcagggttaagacgtaagatgcgaaaagcagccatggacagaaactatctggcgtcagtcct

SEQ ID NO: 4762 - DNA, 75 bp, synthetic construct
  source 1..75: mol_type = other DNA
tgatcagctaccgtccgaactggcgctggctggggatgcgggagaccgcggcaaaaagttttgtcgatgaggtgg

SEQ ID NO: 4763 - DNA, 75 bp, synthetic construct
  source 1..75: mol_type = other DNA
gccgcaggatcagtgacgcacgtttcatgactctgctgtggaaaaccatcaaggcgggacatatcgatgtcggtc

SEQ ID NO: 4764 - DNA, 75 bp, synthetic construct
  source 1..75: mol_type = other DNA
tcccggcagcgataatctgaacgggattaacgtgaaataccgttatgagtttacggacacgctggggctgattac

SEQ ID NO: 4765 - DNA, 75 bp, synthetic construct
  source 1..75: mol_type = other DNA
ataacgccggcttcagtaaaagtaacactcaccgccggatgaaatacgcccggcagatttacagcgcttacatgc

SEQ ID NO: 4766 - DNA, 75 bp, synthetic construct
  source 1..75: mol_type = other DNA
attctgaagccgacccggaaattaagcaggggaggcgttttcgtgcgcctcagtatggctggtttcactatctgt

SEQ ID NO: 4767 - DNA, 75 bp, synthetic construct
  source 1..75: mol_type = other DNA
gcaatacgacactgaacgtccctggtttgaacacactgacgacgggctgactaagcacggtcatgagtgccctta

SEQ ID NO: 4768 - DNA, 75 bp, synthetic construct
  source 1..75: mol_type = other DNA
cagcatcaggttacgggatcacttacgtaagggacaggcagatggcagctcagctacagacagcactgcaggaaa

SEQ ID NO: 4769 - DNA, 75 bp, synthetic construct
  source 1..75: mol_type = other DNA
gggtaatgatgtcaccgtcaatgtcaacgacgcctctggatatgcaaaaggaatcattattcagggcaaaaacag

SEQ ID NO: 4770 - DNA, 75 bp, synthetic construct
  source 1..75: mol_type = other DNA
ctctgcggtcgatcaccggctggcagaactgaccatgaacaaactttacgatcgtgttcccgcttcagtctggaa

SEQ ID NO: 4771 - DNA, 75 bp, synthetic construct
  source 1..75: mol_type = other DNA
aggaaatcgctggtgctatctggcggttgttatggatctttttgcccgcagggttatcggctggagtctgtcagc

SEQ ID NO: 4772 - DNA, 75 bp, synthetic construct
  source 1..75: mol_type = other DNA
tgtcaggccggagcgcagagaaatacagttgattaaacgtctgcagcaattcgtaccggatgccttacccgtggt

SEQ ID NO: 4773 - DNA, 75 bp, synthetic construct
  source 1..75: mol_type = other DNA
gcttggcctcgcgcgcagatcagttggaagaatttgtccactacgtgaaaggcgagatcaccaaggtagtcggca

SEQ ID NO: 4774 - DNA, 75 bp, synthetic construct
  source 1..75: mol_type = other DNA
aggcagagtggccgtgaaagaaagcaatcagcgatggtgctctgacgggttcgagttctgctgtgataacggaga

SEQ ID NO: 4775 - DNA, 75 bp, synthetic construct
  source 1..75: mol_type = other DNA
gaacgcaaggccgaatttgttgcgcttcatccgaaagatgagcaggaagccgtgatccgcacgctggaactggaa

SEQ ID NO: 4776 - DNA, 75 bp, synthetic construct
  source 1..75: mol_type = other DNA
tatgactcacaatgggcggcaatttgttccatagctccaaagattggctgtacgccagagactctgcgtgtctgg

SEQ ID NO: 4777 - DNA, 75 bp, synthetic construct
  source 1..75: mol_type = other DNA
gacactcagaactggcgaaagcgttcgcatacgccctgaaccagtggccggcgctgacgtactatgcagatgatg

SEQ ID NO: 4778 - DNA, 75 bp, synthetic construct
  source 1..75: mol_type = other DNA
tgacagtttatcttgtttccggcgaatctcttgagctggtgactggcttatacggttcaatgaaagaatgcatgg

SEQ ID NO: 4779 - DNA, 75 bp, synthetic construct
  source 1..75: mol_type = other DNA
tgctgaatcagaagctgacagattatgtcccaatgatgccccatagtcaccaaagtgacaccagaggcttattaa

SEQ ID NO: 4780 - DNA, 75 bp, synthetic construct
  source 1..75: mol_type = other DNA
tgtcggatgctggcgtttagtccgaataagccccgacattatgagcgctacctggccagaatgcgtgaaaaaagg

SEQ ID NO: 4781 - DNA, 75 bp, synthetic construct
  source 1..75: mol_type = other DNA
tttgcggtatcaggaatgttctgctcccttgctttgcgaatgccttcacagaagcaggattcgcaacgattactt

SEQ ID NO: 4782 - DNA, 75 bp, synthetic construct
  source 1..75: mol_type = other DNA
gtgggtaagcatcactggaaagtagaaaaacagcctgagtggtacgtgaaagctgtcagaaaaactatcgcagcg

SEQ ID NO: 4783 - DNA, 75 bp, synthetic construct
  source 1..75: mol_type = other DNA
tcccctgaacggctgcacccgccaggctcatcgtcttaccctgcagctcggtgaacgcagaatgacgctggtcga

SEQ ID NO: 4784 - DNA, 75 bp, synthetic construct
  source 1..75: mol_type = other DNA
ccgccggagtcggtatattccgtcatgaggggaacgatgccaaaggttcctttacaaaaatcgggccgttctttc

SEQ ID NO: 4785 - DNA, 75 bp, synthetic construct
  source 1..75: mol_type = other DNA
agtcgctaaacagcgtgatccgccatgcgatcaaaaagcgtaaagtgttcccgacagacgactcggtgaaaaaag

SEQ ID NO: 4786 - DNA, 75 bp, synthetic construct
  source 1..75: mol_type = other DNA
ttcttctcagtgcgcaaattacggggatgactgtaaccattaaaactaatgcctgtcataatggagggggattca

SEQ ID NO: 4787 - DNA, 75 bp, synthetic construct
  source 1..75: mol_type = other DNA
tcaaaaacgttccgtcgtctggttgtcacactcacccggcgttatggcgtcagtctcattcatctggacgccagc

SEQ ID NO: 4788 - DNA, 75 bp, synthetic construct
  source 1..75: mol_type = other DNA
tcaacgatcccgcaggagaaagccagaaacttcgccgcatcgctgacagcactgttatcaggcaactacagtgaa

SEQ ID NO: 4789 - DNA, 75 bp, synthetic construct
  source 1..75: mol_type = other DNA
ttttgaatttgcgcagtctcagtttgaacataataaagacgttgatcagcggaactttgattacagagccaaagt

SEQ ID NO: 4790 - DNA, 75 bp, synthetic construct
  source 1..75: mol_type = other DNA
tgcgcaggaccaacgcgtaaaatgtattgtcagccagctggcttttgctgacggtgatgttctggttaccggaga

SEQ ID NO: 4791 - DNA, 75 bp, synthetic construct
  source 1..75: mol_type = other DNA
ttttctgctggaatttggtatcagcgttccgcgaggtgctgccgttattagtcgactgagtacccttcttgagga

SEQ ID NO: 4792 - DNA, 75 bp, synthetic construct
  source 1..75: mol_type = other DNA
cgacgccgaagctatttgtgaagctgcatcgcgtccgtctatgcgttttgtgcagcccagaacggaatctcagca

SEQ ID NO: 4793 - DNA, 75 bp, synthetic construct
  source 1..75: mol_type = other DNA
ggtgcggcaggcccggcaggcccacagggaccgaaaggagaaacaggtgcggctggcccggtgggggcaaccgga

SEQ ID NO: 4794 - DNA, 75 bp, synthetic construct
  source 1..75: mol_type = other DNA
aaggtgaatacttcgatgccatgattcgcggagagaaaacggaagagtatcgcctgtgtaatgactactggaata

SEQ ID NO: 4795 - DNA, 75 bp, synthetic construct
  source 1..75: mol_type = other DNA
tccgtggtatgaaacgcctgataatctctttttcagtcagcatactctccatcgtactgacgagcgtacgcagat

SEQ ID NO: 4796 - DNA, 75 bp, synthetic construct
  source 1..75: mol_type = other DNA
ccccgctgggtgatgagcgcggggatatccgtaatgcacagatcgtgaaagcggtttttggggcacaggggatga

SEQ ID NO: 4797 - DNA, 75 bp, synthetic construct
  source 1..75: mol_type = other DNA
gttgcgaaactgcagcgtatgcagttcggtaaaagctcagaaaaacttcgcgcaaaaaccgaacggcagatacag

SEQ ID NO: 4798 - DNA, 75 bp, synthetic construct
  source 1..75: mol_type = other DNA
ccgccgagtatgtaaagcgtctgcgtgaagagtgcctgcgggagaataaacccctgcaccgccatacccgcttca

SEQ ID NO: 4799 - DNA, 75 bp, synthetic construct
  source 1..75: mol_type = other DNA
tcaggggcaggcagtgaacaccactctgaacggcggtgagcagtgggtacatgaaggcgggattgcaacgggtac

SEQ ID NO: 4800 - DNA, 75 bp, synthetic construct
  source 1..75: mol_type = other DNA
tcagtaccgggggagggcagaatttgcgtgggaaggcttccggtactgtccttaacggcggtgatcaatggatac

SEQ ID NO: 4801 - DNA, 75 bp, synthetic construct
  source 1..75: mol_type = other DNA
agcgtctgtgcgggtacggaaagcatgatgaccgtgaacacggggagttacttacagcacaactgcgtctggggc

SEQ ID NO: 4802 - DNA, 75 bp, synthetic construct
  source 1..75: mol_type = other DNA
atgcgtgatatttaccacgaaacaatagaccgcgcatttcttgcactttctcacagtgaaaacatgctggaaata

SEQ ID NO: 4803 - DNA, 75 bp, synthetic construct
  source 1..75: mol_type = other DNA
ccgaagtccgtcaacgggcagttcgtatggttctggaaagtcaggacgaatatgactcacaatgggcggcaattt

SEQ ID NO: 4804 - DNA, 75 bp, synthetic construct
  source 1..75: mol_type = other DNA
ctcttgcaccaggcagtaatgaaaagaaaaaactgtatctcctgacggatttgataacttcgttgctggaaaaac

SEQ ID NO: 4805 - DNA, 75 bp, synthetic construct
  source 1..75: mol_type = other DNA
tcaaaaagcactggcttgcacttactccggatgagcgtgaagccttcgcacaggaagccggaacgacgagtcact

SEQ ID NO: 4806 - DNA, 75 bp, synthetic construct
  source 1..75: mol_type = other DNA
aaccgtctgggcaatttcacggtggaaaacggtaaggctgacggcgttgttctggagtccggcggtcgcctggat

SEQ ID NO: 4807 - DNA, 75 bp, synthetic construct
  source 1..75: mol_type = other DNA
tctcccgccgtatcgcacaaatggaagccgatctgaaccggcttcagaaagagagcgatagagagcgatacgctg

SEQ ID NO: 4808 - DNA, 75 bp, synthetic construct
  source 1..75: mol_type = other DNA
gcgcggtggcaaagaaacgtgtcgcactaacgctgcaacggtggcggtgattcaggacgccctgaaatcctgcgg

SEQ ID NO: 4809 - DNA, 75 bp, synthetic construct
  source 1..75: mol_type = other DNA
ttacaggtgccagcctgtttatcgtgggggttgttggttatttctttacaggaccaaataataaaggagtttatc

SEQ ID NO: 4810 - DNA, 75 bp, synthetic construct
  source 1..75: mol_type = other DNA
atgagtcagaaatacctcattcgcatcgcagagctggaaagattgctctctgagcaggctgaagccctccgtcag

SEQ ID NO: 4811 - DNA, 75 bp, synthetic construct
  source 1..75: mol_type = other DNA
atgaaattattacccgacacacatgtacgggaggcatcatgctgcccgtctcccgtcaccatctggcagacactg

SEQ ID NO: 4812 - DNA, 75 bp, synthetic construct
  source 1..75: mol_type = other DNA
accggcctgatgacccgcgacaattacagaacggtaaataacattaccctgggtaagcatccggaggcgaaatga

SEQ ID NO: 4813 - DNA, 75 bp, synthetic construct
  source 1..75: mol_type = other DNA
cggtagctatggcagtggtgtcttttggtgtaaatgctgctccaactactccacaggggcagggtagagtaacct

SEQ ID NO: 4814 - DNA, 75 bp, synthetic construct
  source 1..75: mol_type = other DNA
attgaccacggtaaaacgccagcatcgccctgctctggatctttcacgcctgcctgaacttctgtcgcgtattga

SEQ ID NO: 4815 - DNA, 75 bp, synthetic construct
  source 1..75: mol_type = other DNA
tatccacacccgtgccattcacagcatcgacaccgatattaagctcaaccgcgcattgtgggtaatggcagaaac

SEQ ID NO: 4816 - DNA, 75 bp, synthetic construct
  source 1..75: mol_type = other DNA
ctgccagcggccccgctcggcctgaaatccgccccggcgatattttccgggataactatggcggcacggtaacga

SEQ ID NO: 4817 - DNA, 75 bp, synthetic construct
  source 1..75: mol_type = other DNA
cgacagaacccgcatccagacgatttatcagccggggagcttcacgccactcatcagggttgaaaccgccaccgg

SEQ ID NO: 4818 - DNA, 75 bp, synthetic construct
  source 1..75: mol_type = other DNA
aaactacgcgattacccgggtaaacgacagggtcagttcactggtcagtgatacagccaggctggcgcattattc

SEQ ID NO: 4819 - DNA, 75 bp, synthetic construct
  source 1..75: mol_type = other DNA
cacactacccggaaatctggctgcatatgtgggaatccccgtccttcagagtgaggagctgtcaaccagcactcc

SEQ ID NO: 4820 - DNA, 75 bp, synthetic construct
  source 1..75: mol_type = other DNA
cagcgggtcagtcagacggtatacaggctggtgcctttttatttcccggaggcgggtcatgaagttcacagggga

SEQ ID NO: 4821 - DNA, 75 bp, synthetic construct
  source 1..75: mol_type = other DNA
atgaacaaagaaaatgtgattaccctggacaatccggtcaagcgtggtgagcaggttatcgaacaggtcacgctg

SEQ ID NO: 4822 - DNA, 75 bp, synthetic construct
  source 1..75: mol_type = other DNA
cctcattcagcgggccctgaaaaccctggaccgccatcttcatgaacccggcgtggccttcacctccacccgtgc

SEQ ID NO: 4823 - DNA, 75 bp, synthetic construct
  source 1..75: mol_type = other DNA
gggatacgttttcccgtcagtttgatgacatgcgcagaaaggctgtaaacggcaaatctgattatctggttgcga

SEQ ID NO: 4824 - DNA, 75 bp, synthetic construct
  source 1..75: mol_type = other DNA
accgtgctggaaagtctgcagcgggagggctttcagcccttcttcgcctgtcagacccgcgtacgtgacccgggc

SEQ ID NO: 4825 - DNA, 75 bp, synthetic construct
  source 1..75: mol_type = other DNA
atgtctgttgttgcacctgctgtatacgttggaacctggcacaaatacaactgtggaagcatcgccggacgctgg

SEQ ID NO: 4826 - DNA, 75 bp, synthetic construct
  source 1..75: mol_type = other DNA
tgaaagatatgacaattacggtaaacggcgtggcgacaggtaaggtgcagatccctgtggtgagcggaaatggtc

SEQ ID NO: 4827 - DNA, 75 bp, synthetic construct
  source 1..75: mol_type = other DNA
tacaccctgaacaacggtggggcatttatggcacccgaaccggatgatgatgacgaaacatgggtactgttcaat

SEQ ID NO: 4828 - DNA, 75 bp, synthetic construct
  source 1..75: mol_type = other DNA
agacctgcagccaccttctttctgcgcgccagcggtgaatcgatgaaccaggctggcgtgcagaatggtgatctg

SEQ ID NO: 4829 - DNA, 75 bp, synthetic construct
  source 1..75: mol_type = other DNA
agcatcgataccgacattaagctcaaccgggcgttgtgggtgatggcagaaacgctgctggagagcatgcgctga

SEQ ID NO: 4830 - DNA, 75 bp, synthetic construct
  source 1..75: mol_type = other DNA
gtggctgcttccctgcgttcctggtatgagaactggaataaacaaagcgcactgccggaaccgccgcagtttgtg

SEQ ID NO: 4831 - DNA, 75 bp, synthetic construct
  source 1..75: mol_type = other DNA
tgatcgtccctgctctgttagtagcaggtactgcaaacgctgcagaaatctataacaaagatggcaacaaagtag

SEQ ID NO: 4832 - DNA, 75 bp, synthetic construct
  source 1..75: mol_type = other DNA
ggtgggaacgggctactggttcctgcagttgctggacagggtttccccgtctcagtgggcggcaataggcgtgct

SEQ ID NO: 4833 - DNA, 75 bp, synthetic construct
  source 1..75: mol_type = other DNA
ggattcagacaatggattttctgcgcttgaacaggcgctgctgcggtatatcgccgccggtcttggcgtttccta

SEQ ID NO: 4834 - DNA, 75 bp, synthetic construct
  source 1..75: mol_type = other DNA
cacaatctcacgcccttgatttgacagaacactggctgagggtggcgataaaaatcatcgaccgcaacgcgggag

SEQ ID NO: 4835 - DNA, 75 bp, synthetic construct
  source 1..75: mol_type = other DNA
aggcaagagacgagcaaaaaatttccggtgaatgtctcccgttaaacaaagtatcgctgtacctgaataacgaaa

SEQ ID NO: 4836 - DNA, 75 bp, synthetic construct
  source 1..75: mol_type = other DNA
taacccaccgtacagcaatatcaggccgtgggtggaaaaagccgctgagcagtgcatacaacagcgacagacggt

SEQ ID NO: 4837 - DNA, 75 bp, synthetic construct
  source 1..75: mol_type = other DNA
aagccatcacgctgaaaatcgacccgtctgtggttctggcaacccgcaaatatgtggatgataaaatatcagagc

SEQ ID NO: 4838 - DNA, 75 bp, synthetic construct
  source 1..75: mol_type = other DNA
ttaaccgcattcagtttcgtgagaaattcacagggcagctactggtcaatgtggataaaggtcgcgtggtgtgta

SEQ ID NO: 4839 - DNA, 75 bp, synthetic construct
  source 1..75: mol_type = other DNA
tgatgacacaccggtaaaggtactggcaccgggtcagaaaaaggcgaaaacagggcgtatctggacgtatgtccg

SEQ ID NO: 4840 - DNA, 75 bp, synthetic construct
  source 1..75: mol_type = other DNA
cgggtgtcgcctatggcacctcagcaggtagtgccgggtactggtttttacagttgctcgataaagtcacgccct

SEQ ID NO: 4841 - DNA, 75 bp, synthetic construct
  source 1..75: mol_type = other DNA
ggatactggcggcataaaaccccatgagcgtaagcgggctgtagctcacctgacactgtctgagcgcgaggagat

SEQ ID NO: 4842 - DNA, 75 bp, synthetic construct
  source 1..75: mol_type = other DNA
accggcctgatgacacgcgacaactacagaacggtaaataacattaccctgggtaaacatccgggggcgaaacaa

SEQ ID NO: 4843 - DNA, 75 bp, synthetic construct
  source 1..75: mol_type = other DNA
cgaatggtctgattctcatgaaactgccggaaacctggagtacaaatgagaaaatgtttgcttccggagggcagg

SEQ ID NO: 4844 - DNA, 75 bp, synthetic construct
  source 1..75: mol_type = other DNA
tcatcggatggtctggtttactgctgacgtctttattgagtaccagcgcactcgcagacaatatcggcaccagcg

SEQ ID NO: 4845 - DNA, 75 bp, synthetic construct
  source 1..75: mol_type = other DNA
acgcatgccattatgatatttatgaaggcgcgttttttgaacgtgtggcggcagtacagacgcaatggtttaaaa

SEQ ID NO: 4846 - DNA, 75 bp, synthetic construct
  source 1..75: mol_type = other DNA
tccagaagctgactgaaagagttgatgaacttgagtcagaattaaagttgttatccgtttcccgaagcgatatcg

SEQ ID NO: 4847 - DNA, 75 bp, synthetic construct
  source 1..75: mol_type = other DNA
atgggtgctgtttaacgtcatgaacggtaaccgcgctgaaatgagcccggaagccgccggcattgccgcctgtct

SEQ ID NO: 4848 - DNA, 75 bp, synthetic construct
  source 1..75: mol_type = other DNA
agtgatccgcactgttcgggtaaaaaaagcctgtacaaaatgtgactgtatagttgaagcgccagcgccgtcccg

SEQ ID NO: 4849 - DNA, 75 bp, synthetic construct
  source 1..75: mol_type = other DNA
atgattaaaaaagcttcgctgctgacggcgtgttccgtcacggcattttccgcttgggcacaggataccagcccg

SEQ ID NO: 4850 - DNA, 75 bp, synthetic construct
  source 1..75: mol_type = other DNA
ccaccggtaccattacgacagtcagcaccggctggtgcactacacgcggacacaatatgcagagccgctggtcga

SEQ ID NO: 4851 - DNA, 75 bp, synthetic construct
  source 1..75: mol_type = other DNA
cggaaagccgttgcagaccttgcggcgcgcgggttcagcattgttaacagtcagggcggcgagagcagaaacccc

SEQ ID NO: 4852 - DNA, 75 bp, synthetic construct
  source 1..75: mol_type = other DNA
acgctgaaaatgccggcctttgaatgggttcatgtgcagctccatcagcaaaaggggatgataagtttatcacca

SEQ ID NO: 4853 - DNA, 75 bp, synthetic construct
  source 1..75: mol_type = other DNA
gggtttatgggatatctgaaagggaaaagcagtctgatgctttacgagcagtttggtgatttgaaattcaaatac

SEQ ID NO: 4854 - DNA, 75 bp, synthetic construct
  source 1..75: mol_type = other DNA
tacgtcagcactatcagtatcgtgaatttgcctggccctggacatttcgccttacccgtcttttatatacccgga

SEQ ID NO: 4855 - DNA, 75 bp, synthetic construct
  source 1..75: mol_type = other DNA
gatgataaagacgtcattgcaattgatggaaaaacgctccggcactcttatgacaagagtcgccgcaggggagcg

SEQ ID NO: 4856 - DNA, 75 bp, synthetic construct
  source 1..75: mol_type = other DNA
caccagaagtagcattccgggctgatgcaggcattcaacttggagaacatggataccataatacatctgccatgt

SEQ ID NO: 4857 - DNA, 75 bp, synthetic construct
  source 1..75: mol_type = other DNA
cgaactaccacgccaccaaacctaaatttcttgcacatgttgatctgatgacccggccgcttattgatgttgcgg

SEQ ID NO: 4858 - DNA, 75 bp, synthetic construct
  source 1..75: mol_type = other DNA
tgcaatgcgaaaactggcatcacagtatcctgagcagtttgacgctgtaagaaacggcatgaaatttgtcgatga

SEQ ID NO: 4859 - DNA, 75 bp, synthetic construct
  source 1..75: mol_type = other DNA
ttgaccggattgaggaaaagcgtgatgccatgcagtctctggtcttaccgccaccggcacgccaggcgctggcac

SEQ ID NO: 4860 - DNA, 75 bp, synthetic construct
  source 1..75: mol_type = other DNA
acggacggatttatcttgcgcgacggtgagtttgtcacttcattacaggcattgaaagagatcggaataaaagct

SEQ ID NO: 4861 - DNA, 75 bp, synthetic construct
  source 1..75: mol_type = other DNA
cttgaacaggcgctgctgcggtatatcgccgccggtcttggcgtttcctacgaacagttgtcccgtgattactcg

SEQ ID NO: 4862 - DNA, 75 bp, synthetic construct
  source 1..75: mol_type = other DNA
atgaacacattacccgatacacacatacgggaggcatcgcattgccagtctcccgtcaccatctggcagacactg

SEQ ID NO: 4863 - DNA, 75 bp, synthetic construct
  source 1..75: mol_type = other DNA
tcttccgaggcctgtatgctcggcgggatggcgatgaaatggcgttggcgcaagcgtatggaagctgcaggcaaa

SEQ ID NO: 4864 - DNA, 75 bp, synthetic construct
  source 1..75: mol_type = other DNA
taaactcccatattttacaggggcagatcgtgccgcgttaaccgcgttgacaagtgttggacgtgccattcttgg

SEQ ID NO: 4865 - DNA, 75 bp, synthetic construct
  source 1..75: mol_type = other DNA
agccgtgagtccgaaacgggtggacacgccaggacacggtatggggaaccgttttctgcgggccggtgtggaggt

SEQ ID NO: 4866 - DNA, 75 bp, synthetic construct
  source 1..75: mol_type = other DNA
cacattgtctttataaatcaaatatagtagatgatgtaataataaataaaacaagacaaaatgagttagtaaaag

SEQ ID NO: 4867 - DNA, 75 bp, synthetic construct
  source 1..75: mol_type = other DNA
ggctgaagaactaccggctgttactgccctggctatttcgcataaaaccagtctgctcgactcgctggagattcg

SEQ ID NO: 4868 - DNA, 75 bp, synthetic construct
  source 1..75: mol_type = other DNA
tcgcctgactattctgcaggaagaccagggacagttactgactcttgccggtgaacctgacggaaaactccgcgc

SEQ ID NO: 4869 - DNA, 75 bp, synthetic construct
  source 1..75: mol_type = other DNA
aatctggcggggatccgtcagtaaaatcaaaacatgatccgtcagataaaaaaccttctcgtccggacgcttcgc

SEQ ID NO: 4870 - DNA, 75 bp, synthetic construct
  source 1..75: mol_type = other DNA
atggcagaagatcgcagcacggtgacggcgacaaccggcatgacggtgacacccgccagtgcttccgtagtgaaa

SEQ ID NO: 4871 - DNA, 75 bp, synthetic construct
  source 1..75: mol_type = other DNA
ggttcacgacggatatcccaggacatcagcacccgtgatgagggcggtgacgggaaagtggtggttatcgggcgg

SEQ ID NO: 4872 - DNA, 75 bp, synthetic construct
  source 1..75: mol_type = other DNA
attaacgtgaaataccgttatgagtttacggacacgctggggctgattacgtccttcagttatgccaatgctgag

SEQ ID NO: 4873 - DNA, 75 bp, synthetic construct
  source 1..75: mol_type = other DNA
aattcaaaagtcctgatgctgactaaagtaggtgatgatatttttgcggataatactattcgtaatctcgaatca

SEQ ID NO: 4874 - DNA, 75 bp, synthetic construct
  source 1..75: mol_type = other DNA
tccgctgacacacgaagaactgatgcaccatgtaccgggtattttcggtgaagaccggcatacctcccgcagtga

SEQ ID NO: 4875 - DNA, 75 bp, synthetic construct
  source 1..75: mol_type = other DNA
attcgtatctccagtaacagggggttgtattgtattttattgtgccggttcaggtgtgcgtttcccggcgcgtct

SEQ ID NO: 4876 - DNA, 75 bp, synthetic construct
  source 1..75: mol_type = other DNA
atgagcgataagcagactgaaaagaccattcaactggatacccccatcatgcgtggtaaaactgaaatcaccgaa

SEQ ID NO: 4877 - DNA, 75 bp, synthetic construct
  source 1..75: mol_type = other DNA
acgctgtgccgcccgttgcggctgtgatggaaagcgatgaagcgttacgcctgcgtgtgcctgcagcctttgaag

SEQ ID NO: 4878 - DNA, 75 bp, synthetic construct
  source 1..75: mol_type = other DNA
atgaccagatggtcgatatgacgtttatcactcagctgaccggcctgaccgataagtggttttacaagctcatca

SEQ ID NO: 4879 - DNA, 75 bp, synthetic construct
  source 1..75: mol_type = other DNA
acatatcaatatgctcggccattattccttcacgctggcagaactggtgaccaaaggacatctgagaccattaaa

SEQ ID NO: 4880 - DNA, 75 bp, synthetic construct
  source 1..75: mol_type = other DNA
agggctgaagttcaccggcgaggactcaccgatggccaatctgatgctgtcggtcatgggagccttcgctgagtt

SEQ ID NO: 4881 - DNA, 75 bp, synthetic construct
  source 1..75: mol_type = other DNA
cagcgattacaccaaagaagaattacgcctgatgcatgcagaaggtgtttttcgcacacaagaaatctggagaaa

SEQ ID NO: 4882 - DNA, 75 bp, synthetic construct
  source 1..75: mol_type = other DNA
tttatctggcctgcggtacgtgacggcaaggtatccattacccgctcgcaactggcaatgctcctcgataagctg

SEQ ID NO: 4883 - DNA, 75 bp, synthetic construct
  source 1..75: mol_type = other DNA
tgagcacatttgaacaactgcaccagaacaaagatgaagtgtttgagcgaggggtgatcaacgtcttcaggggac

SEQ ID NO: 4884 - DNA, 75 bp, synthetic construct
  source 1..75: mol_type = other DNA
ggttgggggtatctgaatttatgttatatgcccccatgcgcatggcttttgttacagagaaaaatgttgcaaact

SEQ ID NO: 4885 - DNA, 75 bp, synthetic construct
  source 1..75: mol_type = other DNA
gttgcccgggaaaatctgctgcagaggcttctgcagcagatggagcgggatatggttcgtgacctgcagaaagag

SEQ ID NO: 4886 - DNA, 75 bp, synthetic construct
  source 1..75: mol_type = other DNA
ggctgcacagggcacaaacaatacgcagatcgctacgactgcttacgtacgggctgctatctctgcattggtcgg

SEQ ID NO: 4887 - DNA, 75 bp, synthetic construct
  source 1..75: mol_type = other DNA
gacgtctcctgggatgcgctgaatgtggcatacagtgaacaccctgagtggttttcagagcttgcctccggggat

SEQ ID NO: 4888 - DNA, 75 bp, synthetic construct
  source 1..75: mol_type = other DNA
tggcacttcatccgcctgccggacggtggcggttacatgatgccggatggcgaccgttttcatctggttaacggt

SEQ ID NO: 4889 - DNA, 75 bp, synthetic construct
  source 1..75: mol_type = other DNA
ttgctaagaagagaaagtgttcggatgggactatcaggaaagagttgcaaacatcgcttggtttcattgaaggca

SEQ ID NO: 4890 - DNA, 75 bp, synthetic construct
  source 1..75: mol_type = other DNA
accagcgaaacacacaatgcttgcatattcgtaagcatcgtttggctggtttttttgtccggctctttgtcgcct

SEQ ID NO: 4891 - DNA, 75 bp, synthetic construct
  source 1..75: mol_type = other DNA
ggatgtgaactgatttttgaagataaaatcagcggaacgaaatcagccagaccgggattgaaaaaactgctcaga

SEQ ID NO: 4892 - DNA, 75 bp, synthetic construct
  source 1..75: mol_type = other DNA
tttcgcgttatggtctgacttttcagggaaatatcctttcagtaaactgtcagtgccggatgctcacccgtgtcc

SEQ ID NO: 4893 - DNA, 75 bp, synthetic construct
  source 1..75: mol_type = other DNA
taccaggacaagagccattacaggtattgatggtgatataagaatcaacaaggcgttatgggtgattgccgaaca

SEQ ID NO: 4894 - DNA, 75 bp, synthetic construct
  source 1..75: mol_type = other DNA
ggatcgacaaagaagaatatccgcaatccgcagccatcgacctgcgttgcgtaaatatggttgccgatctgtggc

SEQ ID NO: 4895 - DNA, 75 bp, synthetic construct
  source 1..75: mol_type = other DNA
aattgctatagcatcagtgttaatcactggcccaagtggtaacgatggtctggaaggtgtcagctacataccata

SEQ ID NO: 4896 - DNA, 75 bp, synthetic construct
  source 1..75: mol_type = other DNA
aatatcaggtgctggcgcgctgggacacgccgaaggtggtgaagggggtgagctttatgcttcgcctgaccgtgg

SEQ ID NO: 4897 - DNA, 75 bp, synthetic construct
  source 1..75: mol_type = other DNA
acgtattaccattgtcagcagcagcggcatcatcctgataaacgcagtgcccgttgtcagcgcgatgactggctg

SEQ ID NO: 4898 - DNA, 75 bp, synthetic construct
  source 1..75: mol_type = other DNA
gtgcagcttcctcggcaacggcggcaggaaattccgcgaaggccgcaaaaacgtctgagacgaatgcggataaca

SEQ ID NO: 4899 - DNA, 75 bp, synthetic construct
  source 1..75: mol_type = other DNA
atgcgcctgcgccgaaaaatggtcaggccgttggcaccaacaccattggttcttccgaggcctgtatgctcggcg

SEQ ID NO: 4900 - DNA, 75 bp, synthetic construct
  source 1..75: mol_type = other DNA
ggcaacggctgaaacagtggaaccgaatgcaactgaacatcatcagaacacgcagccgctggatgctcagtcaca

SEQ ID NO: 4901 - DNA, 75 bp, synthetic construct
  source 1..75: mol_type = other DNA
aacattatcaggggccgtatcgtccgaaagatgccgggtatgaggcgaagggcagggcactgaaacagcatgtga

SEQ ID NO: 4902 - DNA, 75 bp, synthetic construct
  source 1..75: mol_type = other DNA
cggcttgttcctttacagggctttgaactggattcattaagaagctgccggatagcacttctattttgcctgccc

SEQ ID NO: 4903 - DNA, 75 bp, synthetic construct
  source 1..75: mol_type = other DNA
ggcgatggagccgatatgggagagtgattttcatacgctctcatatggcttccggcctgagcgcagtgtccacca

SEQ ID NO: 4904 - DNA, 75 bp, synthetic construct
  source 1..75: mol_type = other DNA
ctgaacggcggtgagcagtgggtacatgaaggcgggattgcaacgggtaccgtcattaatgagaagggctggcag

SEQ ID NO: 4905 - DNA, 75 bp, synthetic construct
  source 1..75: mol_type = other DNA
gcatccgcaacctgctgaagtcacgccagatcggcgcgaccttctattttgcccgtgaagccctgattgacgccc

SEQ ID NO: 4906 - DNA, 75 bp, synthetic construct
  source 1..75: mol_type = other DNA
aggctgagaaagagcggaatgccggtggtgacaacgaccgcggaggtgcatgataatctgacgggaacaacccgc

SEQ ID NO: 4907 - DNA, 75 bp, synthetic construct
  source 1..75: mol_type = other DNA
ttcctcctgtcactagtggcctgtcagggcaggaaaaacaaaaaaaaccgaagagcattaccggatttcaggaaa

SEQ ID NO: 4908 - DNA, 75 bp, synthetic construct
  source 1..75: mol_type = other DNA
aggttaatccagaaccagtcttatccgtttgtgatgagtgtggatgtcgccagcgattcttttatgcagacggcg

SEQ ID NO: 4909 - DNA, 75 bp, synthetic construct
  source 1..75: mol_type = other DNA
ccacacaccttccggcacagctatatcatgcacatgctctatcaccgccagccccggaaagtcatccaggcactg

SEQ ID NO: 4910 - DNA, 75 bp, synthetic construct
  source 1..75: mol_type = other DNA
caacaccatgtgtgaccttcgggccaggctgaacgatatggagcatcgctgtcgctttgattccgatgtgcttgt

SEQ ID NO: 4911 - DNA, 75 bp, synthetic construct
  source 1..75: mol_type = other DNA
tggtcagtgcgctcatgacagcgcttcccgaccatgccgccagtcccctgatgacccgcctgcaggacgagctgc

SEQ ID NO: 4912 - DNA, 75 bp, synthetic construct
  source 1..75: mol_type = other DNA
cttttaatgccgcagtctggcaccgtatttctcggcgataatcccataaatatgctctcatcgcgccagttggcc

SEQ ID NO: 4913 - DNA, 75 bp, synthetic construct
  source 1..75: mol_type = other DNA
ccccctcaataaaccggtgctgattaccaatgtgcagagcgcaattgcaaaggccggtaaaaaaggcacgctggc

SEQ ID NO: 4914 - DNA, 75 bp, synthetic construct
  source 1..75: mol_type = other DNA
ccctcgccgccgctgttgccccggtgtgggccgctacccagaccgtcacgctagcggttcccggcatgacttgcg

SEQ ID NO: 4915 - DNA, 75 bp, synthetic construct
  source 1..75: mol_type = other DNA
gccgcgggtggtgaagggtgtgcgcttcagtctgcgtctgaccagcggaagcggagaagacagccgtctggtgag

SEQ ID NO: 4916 - DNA, 75 bp, synthetic construct
  source 1..75: mol_type = other DNA
gccgcagcgagtcactctggctggtgcgcggcggcgtggcgaaactggatgaaggtcaccggctggccgcactct

SEQ ID NO: 4917 - DNA, 75 bp, synthetic construct
  source 1..75: mol_type = other DNA
gcttggcctcgcgcgcagatcagttggaagaatttgttcactacgtgaaaggcgagatcaccaaggtagtcggca

SEQ ID NO: 4918 - DNA, 75 bp, synthetic construct
  source 1..75: mol_type = other DNA
acatcggggctgatgaagttgaaatcaccgagatcctggtcaaagtgggcgacaaagttgaagccgaacagtcgc

SEQ ID NO: 4919 - DNA, 75 bp, synthetic construct
  source 1..75: mol_type = other DNA
ttctgtgcgtctataaataaacacgactcagagagtgtggcaaataaaattgcagaaacgacagcgcaaaacatc

SEQ ID NO: 4920 - DNA, 75 bp, synthetic construct
  source 1..75: mol_type = other DNA
cgtgatcagtgtaatcaacacctggcctgccaaccgcgtgaaagagttgttgccctggaatgtcactcaatctgt

SEQ ID NO: 4921 - DNA, 75 bp, synthetic construct
  source 1..75: mol_type = other DNA
gatgcgtgatgcgcagttgtggagccacatcgaatttcaccccgaatgtaacgcgatttacgcggcgctggactg

SEQ ID NO: 4922 - DNA, 75 bp, synthetic construct
  source 1..75: mol_type = other DNA
ttcttgaacgtattcgcagacttgcaccacaggcgtcggttccaccgtaccggacggtggaggagtggcgggaat

SEQ ID NO: 4923 - DNA, 75 bp, synthetic construct
  source 1..75: mol_type = other DNA
gttgatcaaaccgttcagttgggacaggttcgtaccgctagcctgaagcaggctggagcaaccagctctgccgtt

SEQ ID NO: 4924 - DNA, 75 bp, synthetic construct
  source 1..75: mol_type = other DNA
ggacctcccgggccaaagggggaacaggggcccgcgggtcctcaggggccgaagggtgataagggagagcgcggt

SEQ ID NO: 4925 - DNA, 75 bp, synthetic construct
  source 1..75: mol_type = other DNA
atgacaacggataacacgaacacgacacgtaacgattcactggctgcacggaccgatacctggttgcagtcgttt

SEQ ID NO: 4926 - DNA, 75 bp, synthetic construct
  source 1..75: mol_type = other DNA
gaatatgccaatatggttgaagatatccgggagaaggtgtcatctgagatggaacgattttttccaaaaaatgat

SEQ ID NO: 4927 - DNA, 75 bp, synthetic construct
  source 1..75: mol_type = other DNA
ggttgtgtgaaaacggtgctggttgataaccagaaggctgcggtgctgaagaataacaacgggaaagtcgtgttc

SEQ ID NO: 4928 - DNA, 75 bp, synthetic construct
  source 1..75: mol_type = other DNA
caaacgtgctctgcacttcaacgcggcggcggtgatactcgcgcataaccatccttccggcgagacgacacctag

SEQ ID NO: 4929 - DNA, 75 bp, synthetic construct
  source 1..75: mol_type = other DNA
atgaggcatatatcaccggaagaacttattgcgcttcatgatgcgaatataagccgctacggcggcctgccggga

SEQ ID NO: 4930 - DNA, 75 bp, synthetic construct
  source 1..75: mol_type = other DNA
aggtatcccggcaacagagatgttcaaagttattccactgtcgccaggccatgcctatgggatgtttatggaacg

SEQ ID NO: 4931 - DNA, 75 bp, synthetic construct
  source 1..75: mol_type = other DNA
aaccggatgacgatgatgacgaaacatgggtactgttcaatgccatgaacggtaaccgcgctgaaatgagtccgg

SEQ ID NO: 4932 - DNA, 75 bp, synthetic construct
  source 1..75: mol_type = other DNA
acgagcaggcagcaagacgcgcagcggcggcaaagtggcagcagctacaacgcggagccgcatcattctccatca

SEQ ID NO: 4933 - DNA, 75 bp, synthetic construct
  source 1..75: mol_type = other DNA
ccggtgccacctggaatatccccgataacgccacggtgcagtcggtggtggatgacctcagccatgccggacaga

SEQ ID NO: 4934 - DNA, 75 bp, synthetic construct
  source 1..75: mol_type = other DNA
aactgtacgccatcgaggatgaaatacggggattaccggagtcagagcgtcttgccgtcaggcagcagcgaagca

SEQ ID NO: 4935 - DNA, 75 bp, synthetic construct
  source 1..75: mol_type = other DNA
aatcgtgagtctttacgagcaggcggccagcgatgatggcgagatcactagaccgaaagaacccaactggacagc

SEQ ID NO: 4936 - DNA, 75 bp, synthetic construct
  source 1..75: mol_type = other DNA
aaagctgcacgtaatcagcaagcgttacactcagcgcattgagcgacataacctgaatctgagacaacatctggc

SEQ ID NO: 4937 - DNA, 75 bp, synthetic construct
  source 1..75: mol_type = other DNA
gatagcacttctattttgcctacccgttctggagttaggactggaatggctggatggttttcatgaagtcttaat

SEQ ID NO: 4938 - DNA, 75 bp, synthetic construct
  source 1..75: mol_type = other DNA
cacctcaaacggcatcacagtgcatacgcataagcacggtggcgttaaaggtggcagcgattcgacaggaggccc

SEQ ID NO: 4939 - DNA, 75 bp, synthetic construct
  source 1..75: mol_type = other DNA
ctctgccgatatcatgacgtctgctgtcgtaataagttcgtggtacacagatgaatataaaaaattatttgcgtt

SEQ ID NO: 4940 - DNA, 75 bp, synthetic construct
  source 1..75: mol_type = other DNA
atgggattgtttacgacccgccagttactcggttataccgaacaaaaagttaaatttcgtgcgctgtttctggag

SEQ ID NO: 4941 - DNA, 75 bp, synthetic construct
  source 1..75: mol_type = other DNA
agtaacgatctccgcctcctaccccggcgctgatgcgaaaacagtgcaggacacggtgacacaggttatcgaaca

SEQ ID NO: 4942 - DNA, 75 bp, synthetic construct
  source 1..75: mol_type = other DNA
tcatcatgcgtgaacagccagaagccgtcctgaagcgtctggagcaggcggtgctacgcggccaccgtatagtgg

SEQ ID NO: 4943 - DNA, 75 bp, synthetic construct
  source 1..75: mol_type = other DNA
tgctgctggtcaatgtcacgtccacctgtaccgaacccggtaccgctggtaacggctggcaacctgcgcaggtca

SEQ ID NO: 4944 - DNA, 75 bp, synthetic construct
  source 1..75: mol_type = other DNA
accgtggcatttgaagagaagtatggctcccagctggagctgatatttcgttttatcgatcgcgcactggcgatt

SEQ ID NO: 4945 - DNA, 75 bp, synthetic construct
  source 1..75: mol_type = other DNA
aatataacggtgtgtccgtcacgctttccgagctgtctgcgctgcagcgtatcgagcatcttgccctgctgaaac

SEQ ID NO: 4946 - DNA, 75 bp, synthetic construct
  source 1..75: mol_type = other DNA
gtggctggattatctggacgcactggaactggtcgatacttccggtgcgccagatattgaatggcctacgcctcc

SEQ ID NO: 4947 - DNA, 75 bp, synthetic construct
  source 1..75: mol_type = other DNA
ccggcatatcagccagtcaggcagaagagagcgctgcaaatgctgacacttcagcaggggatgcatcggagtcag

SEQ ID NO: 4948 - DNA, 75 bp, synthetic construct
  source 1..75: mol_type = other DNA
ggcgagaacttcgccagttcaggcagacaccggaacagcgcttcacgcaggaacaggagcatctgcatccgctgc

SEQ ID NO: 4949 - DNA, 75 bp, synthetic construct
  source 1..75: mol_type = other DNA
tcagcccatacgctgagcacggcaagaagagtgaacaagtcaaaaagattacggtttccattcctcttaaggtgt

SEQ ID NO: 4950 - DNA, 75 bp, synthetic construct
  source 1..75: mol_type = other DNA
tgctcagtttctgcaccgcatgcagccttaacggtgtccagacccgtgagtgtggtcacacgtcacgcagtccgc

SEQ ID NO: 4951 - DNA, 75 bp, synthetic construct
  source 1..75: mol_type = other DNA
gctggttacttcgtgaaaaaggctgccagtggcctcattccgactggcacagcgagaacatgaccacaatgcgac

SEQ ID NO: 4952 - DNA, 75 bp, synthetic construct
  source 1..75: mol_type = other DNA
tggtatggtgacgttagcgtgtattccgaccgcagtattttattttttaccgctggcaatcggtaaatttaatga

SEQ ID NO: 4953 - DNA, 75 bp, synthetic construct
  source 1..75: mol_type = other DNA
cgatctccacaaactggtgcgtgatactgacagagttttccctaatccaggcaattcaagcctggggctgatgac

SEQ ID NO: 4954 - DNA, 75 bp, synthetic construct
  source 1..75: mol_type = other DNA
aaacggagcgtaaatccagccgtaaacctgcaaaaacgcaggaaacagtcctgtctgccctgctggcgcagacgg

SEQ ID NO: 4955 - DNA, 75 bp, synthetic construct
  source 1..75: mol_type = other DNA
aaaacgagtggataccggtgacgggttacatgaacttcagcgatgctgcccatgaaataacggactatatcgttg

SEQ ID NO: 4956 - DNA, 75 bp, synthetic construct
  source 1..75: mol_type = other DNA
gcttaaccttgccaccagtgatgcagcggcggtggccggccttgtgatgacggtgctgaccgttggtctggtgtc

SEQ ID NO: 4957 - DNA, 75 bp, synthetic construct
  source 1..75: mol_type = other DNA
gggctggttatacctctacattgcactgacattaccggatggttccgttattccttatgagtttaaagcagcatt

SEQ ID NO: 4958 - DNA, 75 bp, synthetic construct
  source 1..75: mol_type = other DNA
ttgaacaggctgaggcccaactgaaacaacgcgaacaggaaagcgatcgttacagtgggcgtgaggatgacccgc

SEQ ID NO: 4959 - DNA, 75 bp, synthetic construct
  source 1..75: mol_type = other DNA
aggaattgtcttttcaggcccagcagttactggtaaaacagatgttcttgctttacaaagttctgcagcgggttc

SEQ ID NO: 4960 - DNA, 75 bp, synthetic construct
  source 1..75: mol_type = other DNA
caatgtcaccacgattattatggggagcagtactgcacacactgccagaccgggcgcttcagtgaggaggtggta

SEQ ID NO: 4961 - DNA, 75 bp, synthetic construct
  source 1..75: mol_type = other DNA
atctgacaacagatccctgcatgaacatttataccggtgcttattatctggcaatagcatttaaaaaatggggcg

SEQ ID NO: 4962 - DNA, 75 bp, synthetic construct
  source 1..75: mol_type = other DNA
acgatcctaatcgccattcaaaatactgtcggcatgagtatggctgtcatgatgaatgaaagtccatttattggc

SEQ ID NO: 4963 - DNA, 75 bp, synthetic construct
  source 1..75: mol_type = other DNA
tctcctccagcggtctggttcgcgtactcgccgaaccggcaggggaaacacccggagcaacacctccgccccttc

SEQ ID NO: 4964 - DNA, 75 bp, synthetic construct
  source 1..75: mol_type = other DNA
agtacgtcaggatgcaaatgatgaaacccgtcgatttgcagaatggctacaaaccgatgaagcggcgcctgcatt

SEQ ID NO: 4965 - DNA, 75 bp, synthetic construct
  source 1..75: mol_type = other DNA
aaggaaaaactgcgcacgcaggacggcgatccgcagaaccggttcaccgcaacgggcgcagcctccgaccagctg

SEQ ID NO: 4966 - DNA, 75 bp, synthetic construct
  source 1..75: mol_type = other DNA
cagcctgcagatgcaaagccggctgcggcatcactgccgcgcctggctgaagggaacttccggacaaccacggtg

SEQ ID NO: 4967 - DNA, 75 bp, synthetic construct
  source 1..75: mol_type = other DNA
ccgtatatggtttcactataatggcaaacgtgtcagagaaaacctcggtgttcctgacaccgccaaaaaccggaa

SEQ ID NO: 4968 - DNA, 75 bp, synthetic construct
  source 1..75: mol_type = other DNA
gcctgtacctggtatccggtatcaggtggagtttgacagcgcggacctgttacgggccacacctggcgaacgctt

SEQ ID NO: 4969 - DNA, 75 bp, synthetic construct
  source 1..75: mol_type = other DNA
gcgctctggaatgcgctactgtggtcactgctactggtggccgtgtttggtctgttggccgggatgttggtttgg

SEQ ID NO: 4970 - DNA, 75 bp, synthetic construct
  source 1..75: mol_type = other DNA
ttctacttaactctcgctttaccgcaaaccgtttttacccgatatgggaattcccatatcgtaatgaattcagtt

SEQ ID NO: 4971 - DNA, 75 bp, synthetic construct
  source 1..75: mol_type = other DNA
atgataaaaagcacaggcgctcttttactgtttgccgcactgtctgccgggcaggcaatggcctcagatgtggca

SEQ ID NO: 4972 - DNA, 75 bp, synthetic construct
  source 1..75: mol_type = other DNA
gggtaaaatgtacttcctggctaagtaactttgtgaatcttagagggttgagacaaccggatggccgtcctcttt

SEQ ID NO: 4973 - DNA, 75 bp, synthetic construct
  source 1..75: mol_type = other DNA
ttcgaccacctgcacctggtcggcgagaacttcgccaccctgcgccgttacacgccggccttgctggaggtgctg

SEQ ID NO: 4974 - DNA, 75 bp, synthetic construct
  source 1..75: mol_type = other DNA
agctatgctgacttggtcgcgctttgtcagttcttgccagggcctgcaagcagccaggtcggcatagcggtagga

SEQ ID NO: 4975 - DNA, 75 bp, synthetic construct
  source 1..75: mol_type = other DNA
cgccgagtctgcttagaagctaatcgccatttagataaatatgacgcgatggcgaaagaggtaaataagttgctt

SEQ ID NO: 4976 - DNA, 75 bp, synthetic construct
  source 1..75: mol_type = other DNA
ccagtgggctggcctgcgatgtgctgcgtataccggatgaaccgccccgccgctggtttgaccgtggtgttctgc

SEQ ID NO: 4977 - DNA, 75 bp, synthetic construct
  source 1..75: mol_type = other DNA
atatgccgcaccccgcagtaagcccatcagcagggaaaaagcgcggggaaacatccagaaaatgaaaagcatgat

SEQ ID NO: 4978 - DNA, 75 bp, synthetic construct
  source 1..75: mol_type = other DNA
attactgatatgcaggtacgccagcgtgatgtcgctgcacttgatgccagatactcgagggaattagccgatgcg

SEQ ID NO: 4979 - DNA, 75 bp, synthetic construct
  source 1..75: mol_type = other DNA
ctgaagagcttgtcaaacaggcactttattctgaagaagtgaaccgcgtgctgaaggcgcaggttcgcaaggatt

SEQ ID NO: 4980 - DNA, 75 bp, synthetic construct
  source 1..75: mol_type = other DNA
actactccccaaaatcccctggcctgaccgatgcatcggcctcaacgtcaaaagatgcgctgagtatcactgatg

SEQ ID NO: 4981 - DNA, 75 bp, synthetic construct
  source 1..75: mol_type = other DNA
tggcccctgaagtacagaacgctgtcatggttaagttcgacacatgtgaaaacatcaccgttgatatggttatta

SEQ ID NO: 4982 - DNA, 75 bp, synthetic construct
  source 1..75: mol_type = other DNA
caatattgctcgtgttgaatggggaacctgtcgtactaacccggttgaactggttcgcaagccgaaagtatcctc

SEQ ID NO: 4983 - DNA, 75 bp, synthetic construct
  source 1..75: mol_type = other DNA
gaaagcagatcagcagccagcgggccatgcgactgacggcggttttttcctgcgtcagggtgctggcagagtcgg

SEQ ID NO: 4984 - DNA, 75 bp, synthetic construct
  source 1..75: mol_type = other DNA
atagctcccttactggtgggcttatagctgtgtcagaattaagtaagaaggtcacaggaaaaaccgatagaagat

SEQ ID NO: 4985 - DNA, 75 bp, synthetic construct
  source 1..75: mol_type = other DNA
atgaaacaacagtatcagacccgttacgagctgctccatgaaaactaccagaaatggctgaccggcttcacccgg

SEQ ID NO: 4986 - DNA, 75 bp, synthetic construct
  source 1..75: mol_type = other DNA
cctgtttatcttccgtggccgacggggtgacaccgtcaaaattctttgggctgatgctgatggtctgtgcctgtt

SEQ ID NO: 4987 - DNA, 75 bp, synthetic construct
  source 1..75: mol_type = other DNA
ttgactatttttgccgttatttctggtgcagaaagttgggaagatatagaggatttcggggaaacacatctcgat

SEQ ID NO: 4988 - DNA, 75 bp, synthetic construct
  source 1..75: mol_type = other DNA
gcaaaaaaggccagcaggggcaggccactgacgcactgaacagggcaaaacaacagtcggggaatgatgatccgt

SEQ ID NO: 4989 - DNA, 75 bp, synthetic construct
  source 1..75: mol_type = other DNA
cgacaccaaggccagcgtacagaagctgaccaaggccaccgcagacgccggctatccgtccagcgtcaagcagtg

SEQ ID NO: 4990 - DNA, 75 bp, synthetic construct
  source 1..75: mol_type = other DNA
gctggcaatgctcctcgataaactggactggcgtcagcccaaaacatcccgccttaatgcactgacaatgttgta

SEQ ID NO: 4991 - DNA, 75 bp, synthetic construct
  source 1..75: mol_type = other DNA
gaaagagctgaaacgggttaccgacgaacgggacatattaaaaaaagccgcggcgtacttcgcaaagctgtccga

SEQ ID NO: 4992 - DNA, 75 bp, synthetic construct
  source 1..75: mol_type = other DNA
ccacacccgtgccattcacaacatcgacaccgatattaagctcaaccgcgcattgtgggtaatggcagaaacgct

SEQ ID NO: 4993 - DNA, 75 bp, synthetic construct
  source 1..75: mol_type = other DNA
tccagctggcaaaccgtgccggagcatcacgccccactctggcagcaggtcagtcaggtggaacacagaccgttg

SEQ ID NO: 4994 - DNA, 75 bp, synthetic construct
  source 1..75: mol_type = other DNA
acatcaaaacacacctcctgcgttcactcttcaggggatattccgtggcatgagctgccagcttcacacaaggga

SEQ ID NO: 4995 - DNA, 75 bp, synthetic construct
  source 1..75: mol_type = other DNA
cgattaggaaagcagaaggcttaacacaggcgaaattcagcgaaattagcgggatagctctaggaacagtcaaaa

SEQ ID NO: 4996 - DNA, 75 bp, synthetic construct
  source 1..75: mol_type = other DNA
atcagtccaacgaatatatgaataccaagcaatggcctggtaaagcggctattggtcgtctgaaaggtgaggaac

SEQ ID NO: 4997 - DNA, 75 bp, synthetic construct
  source 1..75: mol_type = other DNA
cagcgattcttttatgcagacggcggagatgctgctggagaagaacgcaacgctgactatctggcagggcgtcat

SEQ ID NO: 4998 - DNA, 75 bp, synthetic construct
  source 1..75: mol_type = other DNA
ggtaaaacactccaaaaggagtacgaaatggtaaagaagtctaaaaagaccgagcaagagattgaggatttcata

SEQ ID NO: 4999 - DNA, 75 bp, synthetic construct
  source 1..75: mol_type = other DNA
cgcgcggcaacctttctgaagtgctcaacaatgttgaagccggggaagaggttgaaatcacccgcagaggccgtg

SEQ ID NO: 5000 - DNA, 75 bp, synthetic construct
  source 1..75: mol_type = other DNA
tgaaaaccggtaatgcggtgatcctgcgcggtggcaaagaaacgtgtcgcactaacgctgcaacggtggcggtga

SEQ ID NO: 5001 - DNA, 75 bp, synthetic construct
  source 1..75: mol_type = other DNA
tccctgagaatcagcgatggatggtcaccagtgaaggggctttttcttatctcgcacgcgatttggggctaaaag

SEQ ID NO: 5002 - DNA, 75 bp, synthetic construct
  source 1..75: mol_type = other DNA
tatggttcagcgctctccattaaggcgaggcatggcaacatactggtttctgaaaggagagatgcaggcgggaca

SEQ ID NO: 5003 - DNA, 75 bp, synthetic construct
  source 1..75: mol_type = other DNA
gctgccaccagcgaagtgtggtggccggaagatgcagaccatattgcttttattcgcgggcgtattggttttgaa

SEQ ID NO: 5004 - DNA, 75 bp, synthetic construct
  source 1..75: mol_type = other DNA
acccaactctcggcacatgctggaacacatcgagcggctgaagacatttcagttggtggacttgcccgaaggcct

SEQ ID NO: 5005 - DNA, 75 bp, synthetic construct
  source 1..75: mol_type = other DNA
ggcacgggaatggctgatactgaacatggcgggactggagcgggaagagttccgggtgctgtatctgaacaacca

SEQ ID NO: 5006 - DNA, 75 bp, synthetic construct
  source 1..75: mol_type = other DNA
ggcactggcggcgtcactggatgaacagggatacagcgtcagtgacatcatccatatcctgatggcggaaggagg

SEQ ID NO: 5007 - DNA, 75 bp, synthetic construct
  source 1..75: mol_type = other DNA
caacaaccctgcgttggctgaggctttaattaccagccagagattttccggagataccacggatatgtttcttat

SEQ ID NO: 5008 - DNA, 75 bp, synthetic construct
  source 1..75: mol_type = other DNA
tcaaaaggccaggggggaacaggccagagatgaaagtgcttcatctgcatctcagtttatccgtggactgaaaca

SEQ ID NO: 5009 - DNA, 75 bp, synthetic construct
  source 1..75: mol_type = other DNA
acgctgaaagaaatagcggctgcgatcaataacgacccgaattacagcacaactatcaacaatgccttggctctc

SEQ ID NO: 5010 - DNA, 75 bp, synthetic construct
  source 1..75: mol_type = other DNA
cgccggatttcagcaacacgctgttcctgctcgatgagagctcaatggtgggcaataccgacatggcacgggcat

SEQ ID NO: 5011 - DNA, 75 bp, synthetic construct
  source 1..75: mol_type = other DNA
aatataacggtgtgtctgtcacgctttccgaattgtctgcgctgcagcgtattgagcatcttgccctcctgaaac

SEQ ID NO: 5012 - DNA, 75 bp, synthetic construct
  source 1..75: mol_type = other DNA
ggaggccgtcggggaagacgcctcgctgaaatcccgggatgtggcggcactggatacgcgaaaatccaaacagca

SEQ ID NO: 5013 - DNA, 75 bp, synthetic construct
  source 1..75: mol_type = other DNA
tggagtgacagaaaagcgttacctgcgctgctctggcagcaccgcatggatgaacccatcggtgtttacaccgaa

SEQ ID NO: 5014 - DNA, 75 bp, synthetic construct
  source 1..75: mol_type = other DNA
accggcctgatgacccgcgataactacagaacggtaaataacattacccaggggaagcatccggaggcgaaacaa

SEQ ID NO: 5015 - DNA, 75 bp, synthetic construct
  source 1..75: mol_type = other DNA
aacggcccggtacctacgtatatcgaccttctgaaggttactaccagtacgctggtacagggaattaaagccggg

SEQ ID NO: 5016 - DNA, 75 bp, synthetic construct
  source 1..75: mol_type = other DNA
taataatttagaaataataaaatcatggagcaaagcaggtagttcatatgtggttgttggtaaacatatacatat

SEQ ID NO: 5017 - DNA, 75 bp, synthetic construct
  source 1..75: mol_type = other DNA
cgctggctgaatatccgtatgcgggggcgtttttccgctgtctgaacggaagccgcaggatatcgctgtctgacc

SEQ ID NO: 5018 - DNA, 75 bp, synthetic construct
  source 1..75: mol_type = other DNA
ggccaatgcggtggccctgcataaggatcacattgtcgggcatatgtttctgatcagctaccgtccgaactggcg

SEQ ID NO: 5019 - DNA, 75 bp, synthetic construct
  source 1..75: mol_type = other DNA
ttgcgatccttcggacatgctcgttgtgcagatgaccgaagataaggcccgcgagcattctaaaaagcgcctcga

SEQ ID NO: 5020 - DNA, 75 bp, synthetic construct
  source 1..75: mol_type = other DNA
gaacaagtctggaaagaaatgcataagcttttgccattctcaccggattcagtcgtcactcatggtgatttctca

SEQ ID NO: 5021 - DNA, 75 bp, synthetic construct
  source 1..75: mol_type = other DNA
gcatggcgatgaatgcctgggcgcgtcctgatggcgaaaaagttccagcagctggaataacccaggcttattttg

SEQ ID NO: 5022 - DNA, 75 bp, synthetic construct
  source 1..75: mol_type = other DNA
ggaagcatttttattatgacaggataaataaagacgacatcgatattaacgatatcgcggtttccctttcaaata

SEQ ID NO: 5023 - DNA, 75 bp, synthetic construct
  source 1..75: mol_type = other DNA
gtgtttgattttagcaaactgattcgggagattcgagtgatggctgaaaaattatccacctggaagttcattctt

SEQ ID NO: 5024 - DNA, 75 bp, synthetic construct
  source 1..75: mol_type = other DNA
ggtaaatcagcaacagaaatcattgctgtttccgggccgcgctgctgggtgggatttgattattcgcgtggcgtg

SEQ ID NO: 5025 - DNA, 75 bp, synthetic construct
  source 1..75: mol_type = other DNA
gcaatacgacactgaacgtccctggtttgaacacactgacgacgggctgacagcgcacggtcagcagtgtcctta

SEQ ID NO: 5026 - DNA, 75 bp, synthetic construct
  source 1..75: mol_type = other DNA
gcatcagcttctggccgcagcattttggcctcattccacagtgggtgaccctggagccccgtgtcttcggctgga

SEQ ID NO: 5027 - DNA, 75 bp, synthetic construct
  source 1..75: mol_type = other DNA
atgaaaacattacccgatacacacgtacgggaggcatcgagctgcccgtcccccgtcaccatctggcagactctg

SEQ ID NO: 5028 - DNA, 75 bp, synthetic construct
  source 1..75: mol_type = other DNA
cttgcgggaacggtcaataatgaactcgggtatcagttatttcgtgattttgctgaaaataaggggatgttccgc

SEQ ID NO: 5029 - DNA, 75 bp, synthetic construct
  source 1..75: mol_type = other DNA
atggaaaataatttggaaaacctgaccattggcgtttttgccaaggcggccggggtcaacgtggagacaatccgc

SEQ ID NO: 5030 - DNA, 75 bp, synthetic construct
  source 1..75: mol_type = other DNA
ctgacacggactacccgcagtgtggctcccacagaagcgggggagagaatcattgcctgccttgaaccgcgtatt

SEQ ID NO: 5031 - DNA, 75 bp, synthetic construct
  source 1..75: mol_type = other DNA
gttttctgcgggccggtgtggaggtcgatcgatatggtcgtgccgttgcgtaccatatctgtgaggatgattttc

SEQ ID NO: 5032 - DNA, 75 bp, synthetic construct
  source 1..75: mol_type = other DNA
atgacaacggataacacgaacacgacacgtaacgattcactggctgcccggaccgatacctggttgcagtcgttg

SEQ ID NO: 5033 - DNA, 75 bp, synthetic construct
  source 1..75: mol_type = other DNA
gcctgtcgtacagagaattatgccatgacggttcattattaccggctgcgggattatgccctgcagcatccggaa

SEQ ID NO: 5034 - DNA, 75 bp, synthetic construct
  source 1..75: mol_type = other DNA
agcagcctgaatccccgggccatcaatcataacagaaatgccagcggaaaaattatcagcacagattatggcctg

SEQ ID NO: 5035 - DNA, 75 bp, synthetic construct
  source 1..75: mol_type = other DNA
taccggaacccgccatcatcgcggagcctgactttgaggcaattctggctgacacaaaggccatgatgattgcgg

SEQ ID NO: 5036 - DNA, 75 bp, synthetic construct
  source 1..75: mol_type = other DNA
attgtttacgatgaaaataatattattgttgccataaccaaagatgcctccacacttaaccctgaaggttatagc

SEQ ID NO: 5037 - DNA, 75 bp, synthetic construct
  source 1..75: mol_type = other DNA
caaaccagataacacgcgcgtcatgggaaaaaacagttaagaaattctatgatgcgctggtgacccggtttgata

SEQ ID NO: 5038 - DNA, 75 bp, synthetic construct
  source 1..75: mol_type = other DNA
ctacccgacgttgcgcccgctgatcggcggcaccctgaacatcaagcacgtgcgtgcccactgggacgacatcct

SEQ ID NO: 5039 - DNA, 75 bp, synthetic construct
  source 1..75: mol_type = other DNA
aaatcgccgaactctccatgctctgcggcttcgatgatgatcttgccgcacagacaacgcaggccagcaaccgta

SEQ ID NO: 5040 - DNA, 75 bp, synthetic construct
  source 1..75: mol_type = other DNA
gctgaaaggcgatccgatggtgcttcccaacggggccacactgtatttcctcggcaccaatgcccgcacggccca

SEQ ID NO: 5041 - DNA, 75 bp, synthetic construct
  source 1..75: mol_type = other DNA
actggcaatgctcctcgataagctggactggcgtcagccaaaaacatcccgccttaactcactgacaatgttgta

SEQ ID NO: 5042 - DNA, 75 bp, synthetic construct
  source 1..75: mol_type = other DNA
actcattaaaaaagataacgtgaattctgcttttttccagaccagtgtccgtgtctggcctcagtatggtcgtgt

SEQ ID NO: 5043 - DNA, 75 bp, synthetic construct
  source 1..75: mol_type = other DNA
attctgctcaactctcatgacggtacctccagctaccagatgctgccgggttacttcaggttcgtctgccagaac

SEQ ID NO: 5044 - DNA, 75 bp, synthetic construct
  source 1..75: mol_type = other DNA
cagaatcagccagaaacggaacagaacgaccagaaagcggaacagaacagcccaaatacgcaacaaaacgagcca

SEQ ID NO: 5045 - DNA, 75 bp, synthetic construct
  source 1..75: mol_type = other DNA
ctggaaaggcgctgaccggaccgacgctatatttatttctcgccgcgggagtcggctttctcgccagcaggccta

SEQ ID NO: 5046 - DNA, 75 bp, synthetic construct
  source 1..75: mol_type = other DNA
atgaaaaaatggatgttagcaatctgcctgatgtttataaatgggatctgcgaagccgccgattgctttgatctt

SEQ ID NO: 5047 - DNA, 75 bp, synthetic construct
  source 1..75: mol_type = other DNA
ccgctaaaaattacccatatggcggtgggcgatggcggtggagtattgccaacgccggacgcaaagcagacggca

SEQ ID NO: 5048 - DNA, 75 bp, synthetic construct
  source 1..75: mol_type = other DNA
tcagggcggcgtcgccgtcagaccttgcggagcgactgactcaaaaactgaaggaggggtggcagccatttggca

SEQ ID NO: 5049 - DNA, 75 bp, synthetic construct
  source 1..75: mol_type = other DNA
atgacccgcctgcaggacgagctgcgcacggaatctgtccggtctcaggcccgtgaacagtttaccggtgcggtg

SEQ ID NO: 5050 - DNA, 75 bp, synthetic construct
  source 1..75: mol_type = other DNA
agcagcgcggtgcctaccggggacgaaagaaatcgctgaacagcgaacaaattgccgagttgaaacggcgagttg

SEQ ID NO: 5051 - DNA, 75 bp, synthetic construct
  source 1..75: mol_type = other DNA
ttttccccgtccaggtccgtttcacgcctgcccacgaacgttttcacctggcgttatgttcaccgggcgatgtct

SEQ ID NO: 5052 - DNA, 75 bp, synthetic construct
  source 1..75: mol_type = other DNA
ccatgcacgaaaggggaatgtttcctgcccgttgatcgcgtcactacagggcgaagcaggcctggcaaggtcagc

SEQ ID NO: 5053 - DNA, 75 bp, synthetic construct
  source 1..75: mol_type = other DNA
tggcatcacaatgacatttatcggcccttccccctctgttcaggacaaaccagccagcactgacaataccaacat

SEQ ID NO: 5054 - DNA, 75 bp, synthetic construct
  source 1..75: mol_type = other DNA
gaaatctacgaacctctgcacagtttactggaacgttttgggccacagcgttcacagtaccgacctgatatgccg

SEQ ID NO: 5055 - DNA, 75 bp, synthetic construct
  source 1..75: mol_type = other DNA
aaggtgtcggcatccctgaagttgcgaaggcttgtggagttagcgaaagggctgtctataagtggctcaaaaacg

SEQ ID NO: 5056 - DNA, 75 bp, synthetic construct
  source 1..75: mol_type = other DNA
tcggcgatggcggcggaacattgccaacgccggacgcaaagcagacagcattagtaaatgagaaacgccgggctg

SEQ ID NO: 5057 - DNA, 75 bp, synthetic construct
  source 1..75: mol_type = other DNA
aaaagtgatggcgctggcaggcagtgaaatgaagcgcctgtatgccgtcgggagtgagaacgggggcgacggtga

SEQ ID NO: 5058 - DNA, 75 bp, synthetic construct
  source 1..75: mol_type = other DNA
ggatcacgccgggtgagcacattatcagtgccgactctgcgctcagcagaaatatccggcattgtttctgccttt

SEQ ID NO: 5059 - DNA, 75 bp, synthetic construct
  source 1..75: mol_type = other DNA
ggcgcagtgaatgccgcggtggattccggtgttgaagcagcaagacgtatcggtgaagtggtgacctcccgtgtc

SEQ ID NO: 5060 - DNA, 75 bp, synthetic construct
  source 1..75: mol_type = other DNA
tgtctgatgtgctgaatctgaaagcggaatccatgtttacgctgctgtcacgcgtgacatcaccgcgactggatg

SEQ ID NO: 5061 - DNA, 75 bp, synthetic construct
  source 1..75: mol_type = other DNA
gggaggattacggtaaggacctgtggagtgcttatcagaccattcaggagaatatgctgaaaggcggaatttccg

SEQ ID NO: 5062 - DNA, 75 bp, synthetic construct
  source 1..75: mol_type = other DNA
aaaatggttaagctgaaaccgtttatggattacatcgacatgcgcctggcagagaatgtctggaatagcgaggtt

SEQ ID NO: 5063 - DNA, 75 bp, synthetic construct
  source 1..75: mol_type = other DNA
tactcccctgtatggatatctccgctctcaacaccacgaatgacatcgaaaaactgcgtgctatggcacttgcca

SEQ ID NO: 5064 - DNA, 75 bp, synthetic construct
  source 1..75: mol_type = other DNA
gtgactgatcttcaacaaacgtattaccgccaggtaaagaacccgaatccggtgtttacaccccgtaaaggtgcc

SEQ ID NO: 5065 - DNA, 75 bp, synthetic construct
  source 1..75: mol_type = other DNA
gttttctttccgaatattcccaataccttcgaagttgtttttgagcaacactttagctcaaacattaactattgc

SEQ ID NO: 5066 - DNA, 75 bp, synthetic construct
  source 1..75: mol_type = other DNA
tgtccctgtcacgcgcactggataagtacctgaaaacagtttctgttcacaagaaagggcatcaacaggagtttt

SEQ ID NO: 5067 - DNA, 75 bp, synthetic construct
  source 1..75: mol_type = other DNA
tgccagcggccgcccgacagtcgtgctggcagacaaccagcaggttaatccggacaatatatcctggggctaccg

SEQ ID NO: 5068 - DNA, 75 bp, synthetic construct
  source 1..75: mol_type = other DNA
aaagcgtgcccgtgcgcgtcgtgatgcgaacagggaacgtcaggatatcgtcaccctggtgaaacggcagctgac

SEQ ID NO: 5069 - DNA, 75 bp, synthetic construct
  source 1..75: mol_type = other DNA
cagctggcgatgctgctggaaggtatcgactggcgacagcccaagcggctgctgacctccctgaccatgctgtaa

SEQ ID NO: 5070 - DNA, 75 bp, synthetic construct
  source 1..75: mol_type = other DNA
tgaacgagtcggttaaatcagagcagtcaccgcgggtggtgctctgggaaattgacctgaaggcccagggtggtg

SEQ ID NO: 5071 - DNA, 75 bp, synthetic construct
  source 1..75: mol_type = other DNA
ggattggcgctcgacattaacgatatgactcaggttttaaaagccattcaaaaactcacactgagccgtgcaaac

SEQ ID NO: 5072 - DNA, 75 bp, synthetic construct
  source 1..75: mol_type = other DNA
gttcgtggagcgcagcgaaaacgtgatcctgctgggacctcctggtgtcggaaaaactcatctggccatagctct

SEQ ID NO: 5073 - DNA, 75 bp, synthetic construct
  source 1..75: mol_type = other DNA
attaatatacggaaatatcgagatattcctgctgaaatgtcgtatgcaccgggagaacacattaagggagggcaa

SEQ ID NO: 5074 - DNA, 75 bp, synthetic construct
  source 1..75: mol_type = other DNA
atggtaagcctgttattcctggcatgaagctgtcaaaggaaaaatgcgaccgggttaatgccatcgaacgtgaca

SEQ ID NO: 5075 - DNA, 75 bp, synthetic construct
  source 1..75: mol_type = other DNA
ctggtgggcggtccgcaatcaggtggcggacgcgctaccggaagcggtattacgtcgttcgctggggttgcgtgc

SEQ ID NO: 5076 - DNA, 75 bp, synthetic construct
  source 1..75: mol_type = other DNA
tttgctttagctgatgcgctgaagtgctcgcctacatggctaatgtttggtgacgaagacaaggcaccagtgcca

SEQ ID NO: 5077 - DNA, 75 bp, synthetic construct
  source 1..75: mol_type = other DNA
tcagctacctgaatgaagatattgattttgtgctgaatgagctgaaagccaaaggcctgtgccgcgattttctcg

SEQ ID NO: 5078 - DNA, 75 bp, synthetic construct
  source 1..75: mol_type = other DNA
gcttctggctcatatcgtcaccgggaagtatgcagaccatctgccgttataccgccagtcagaaatataccttcg

SEQ ID NO: 5079 - DNA, 75 bp, synthetic construct
  source 1..75: mol_type = other DNA
ctggtctaatgattctttagaaacatgtaagatgaagtgctccggaaataacattggacgttttattagatttgt

SEQ ID NO: 5080 - DNA, 75 bp, synthetic construct
  source 1..75: mol_type = other DNA
atgaaatcaaaagacaccctaaagtggttccctgcgcagcttcctgaagtaagaattatcctaggggatgctgta

SEQ ID NO: 5081 - DNA, 75 bp, synthetic construct
  source 1..75: mol_type = other DNA
tcacgttatagtgtctggtggcggggagatttacagagaaacattgcccatggcctctacgctccatatatcgac

SEQ ID NO: 5082 - DNA, 75 bp, synthetic construct
  source 1..75: mol_type = other DNA
gttacacggcggcggtgcctgcccgggtggtttatctgacggcgggcattgactcgcagcgaaaccgttttgaga

SEQ ID NO: 5083 - DNA, 75 bp, synthetic construct
  source 1..75: mol_type = other DNA
catcctgtccactgaaggcgacggcacagcaacggaggcgttgcttaataccgttcgcgccgttctgaatgcaga

SEQ ID NO: 5084 - DNA, 75 bp, synthetic construct
  source 1..75: mol_type = other DNA
tcatgttgagccaacgataagggatgttcctgcattgctggagctggctccatggttcggaagaaaacaccgcga

SEQ ID NO: 5085 - DNA, 75 bp, synthetic construct
  source 1..75: mol_type = other DNA
tgtctctattttctggttcggtactggggatggggcgagtgaatgaattgtgtggaatagatagcgtgaaaacga

SEQ ID NO: 5086 - DNA, 75 bp, synthetic construct
  source 1..75: mol_type = other DNA
cagttacaaggggcaacctgtcacccagcttgccgttatgctgaatttactggtttttattcgttccagtgaact

SEQ ID NO: 5087 - DNA, 75 bp, synthetic construct
  source 1..75: mol_type = other DNA
cgcgactggccggtgcagggaaaggcggactgcagattgtgctgggggcggcagccatcgtgggctctttcttca

SEQ ID NO: 5088 - DNA, 75 bp, synthetic construct
  source 1..75: mol_type = other DNA
ttaacgctagcgcagttttgggtagtggaagttataatgaaaataaatcttctaaacacatggagctactagctc

SEQ ID NO: 5089 - DNA, 75 bp, synthetic construct
  source 1..75: mol_type = other DNA
aacttatagccatacaggcaggaaacattatcgtttataactatgatggtggtaatcgggaatatatttctgcat

SEQ ID NO: 5090 - DNA, 75 bp, synthetic construct
  source 1..75: mol_type = other DNA
tgaagcctgcaggagaaggctggcaacagatgcaacgcatctgcgcccggccagcatgacaaataacgagaaatg

SEQ ID NO: 5091 - DNA, 75 bp, synthetic construct
  source 1..75: mol_type = other DNA
tgaaaggtgaaacgaaaacgcaaagagaaaaaattcagaagctgatcccagcaattctggcaatccttccgcgcg

SEQ ID NO: 5092 - DNA, 75 bp, synthetic construct
  source 1..75: mol_type = other DNA
tcaacaaagcacttgagcgtttttattttcgtttaagcgcatccggcgctcattcagaacgtgcagcccgtgact

SEQ ID NO: 5093 - DNA, 75 bp, synthetic construct
  source 1..75: mol_type = other DNA
aatagactccttaaaaaaactggatcaggaaatcacggttttatcacaggatgttactttagatattgtgcagac

SEQ ID NO: 5094 - DNA, 75 bp, synthetic construct
  source 1..75: mol_type = other DNA
atgattgatgtcttaggaccggagaaacgcagacggcgtactacacaggaaaagatcgctattgttcagcagagc

SEQ ID NO: 5095 - DNA, 75 bp, synthetic construct
  source 1..75: mol_type = other DNA
gtaaggctcgctgtgagcattgtgctggtactggatttcataatgtattgcgcgaagtggtgaaacactccagaa

SEQ ID NO: 5096 - DNA, 75 bp, synthetic construct
  source 1..75: mol_type = other DNA
caacaaaaatggacggcagattatcttattttccgggatagcccgtgacactctcatttacgcaggtggtgacca

SEQ ID NO: 5097 - DNA, 75 bp, synthetic construct
  source 1..75: mol_type = other DNA
atcaggaaccattaccgtcagggtttatgacgatcagccgtttgaccggcagattgttattccggcggtggcatt

SEQ ID NO: 5098 - DNA, 75 bp, synthetic construct
  source 1..75: mol_type = other DNA
ggtgatgtcaccacaccagtggcggtgaccggtaatgagggtaaggcggtggctgtcagtgccaccagcgacccg

SEQ ID NO: 5099 - DNA, 75 bp, synthetic construct
  source 1..75: mol_type = other DNA
atgaaggatgaaatacacagtaccagcattaacccggatgttgttgagcagtttctggcccttatgaacacacat

SEQ ID NO: 5100 - DNA, 75 bp, synthetic construct
  source 1..75: mol_type = other DNA
atgaagctctggcccacgcttggcgtcgctttccttctgattacatccatgcgtctgtcgtggtcgctgggccgg

SEQ ID NO: 5101 - DNA, 75 bp, synthetic construct
  source 1..75: mol_type = other DNA
cgctgggtgcctggctggatgtgttcaccacgtccacagacggatgccactgaacgcgccgataacctggctgat

SEQ ID NO: 5102 - DNA, 75 bp, synthetic construct
  source 1..75: mol_type = other DNA
agctacgtcgctggacatacgctggcggtaagcaatggaaagggctgatgacccgtcgtgatattgagcgtgaag

SEQ ID NO: 5103 - DNA, 75 bp, synthetic construct
  source 1..75: mol_type = other DNA
cgggcgtatgacggcctgagtgttgctggcccgtcaggtgcatacgagtattttgcacgcagcgccagcggtctg

SEQ ID NO: 5104 - DNA, 75 bp, synthetic construct
  source 1..75: mol_type = other DNA
tacgggaggcatcgggctgcccgtctcccgtcaccatctggcagacactgctcacccgactgctggaccagcact

SEQ ID NO: 5105 - DNA, 75 bp, synthetic construct
  source 1..75: mol_type = other DNA
ttcgacacgccgtggtgtcagccggaaagcgacgttattgcagaattaagccgccgtttcagctgcacgctggag

SEQ ID NO: 5106 - DNA, 75 bp, synthetic construct
  source 1..75: mol_type = other DNA
gattcgcgacatcgttgacggcatcaatgccaaattccgtgagctgaaaacaaacggctatatcgtggatgcgac

SEQ ID NO: 5107 - DNA, 75 bp, synthetic construct
  source 1..75: mol_type = other DNA
acctggccactttctgccagacctgggacgacgaaaatgtccacaaattgatggatttatccattaacaaaaact

SEQ ID NO: 5108 - DNA, 75 bp, synthetic construct
  source 1..75: mol_type = other DNA
catacgttgcagcaccgcacatatcacggaaacggacaacgcctggctgtactcgctgtcacaccagactaatga

SEQ ID NO: 5109 - DNA, 75 bp, synthetic construct
  source 1..75: mol_type = other DNA
gcaattgatgaattgcgtggggcattctcaaaacgccgtcaggttggcgcaagtgagtatgcatatattagtttt

SEQ ID NO: 5110 - DNA, 75 bp, synthetic construct
  source 1..75: mol_type = other DNA
accgggactgaaaaaactgctcaggacattatcggcaggtgacactctggttgtctggaagctggacaggttggg

SEQ ID NO: 5111 - DNA, 75 bp, synthetic construct
  source 1..75: mol_type = other DNA
acggaaacggacaacgcctggttgtactcgctgtcacaccagaccagggacgttggtgaatcagaatggattcat

SEQ ID NO: 5112 - DNA, 75 bp, synthetic construct
  source 1..75: mol_type = other DNA
ccagcggtcagaaacaagcgagtcagatggctggaaaaggaggaagcaaaacgccttattgatgagtgccccgaa

SEQ ID NO: 5113 - DNA, 75 bp, synthetic construct
  source 1..75: mol_type = other DNA
gctggcagacctccacggaactggtggaagacccggaagccatactgcgctacggacgcaacctgctgaagatgg

SEQ ID NO: 5114 - DNA, 75 bp, synthetic construct
  source 1..75: mol_type = other DNA
gaatatttggcccgagctggaagataccaaaacgttaacacaaccactttctaggagcttgattcatgaaaatca

SEQ ID NO: 5115 - DNA, 75 bp, synthetic construct
  source 1..75: mol_type = other DNA
ggtgcgtggcctatgagttctggcgacgtgccgtgaaaaatattgccagacagggcaacaccatcaccggtgcaa

SEQ ID NO: 5116 - DNA, 75 bp, synthetic construct
  source 1..75: mol_type = other DNA
ctgccagtggcctaatggcgattaccatcacactgaaacagtcattcaccgttatggtaccggcgcaatggtgtt

SEQ ID NO: 5117 - DNA, 75 bp, synthetic construct
  source 1..75: mol_type = other DNA
cataaagcctggttgttgtggtgttacagcgggagtatttgttgggaatatcagatcgcgataacacagtgggcg

SEQ ID NO: 5118 - DNA, 75 bp, synthetic construct
  source 1..75: mol_type = other DNA
atgaacaagaaaaccaaacgtactttcacccctgagttcaggctggaatgtgcacagctgattgttgataagggc

SEQ ID NO: 5119 - DNA, 75 bp, synthetic construct
  source 1..75: mol_type = other DNA
aacaaccatcacagggacatgtgacgcctcccccgtcccgggatgcacctgtccgttttgtactatgctgcgtag

SEQ ID NO: 5120 - DNA, 75 bp, synthetic construct
  source 1..75: mol_type = other DNA
ccttgccgaaggcgaagaagctcacagcttcaacgaatttaaacaggtgctttccagttcggcaaaatctaatgg

SEQ ID NO: 5121 - DNA, 75 bp, synthetic construct
  source 1..75: mol_type = other DNA
ctgccctgtattgaacaggcctgggaagatatccgtaccctgcgccagttgcagcttccagaccagaaccggtga

SEQ ID NO: 5122 - DNA, 75 bp, synthetic construct
  source 1..75: mol_type = other DNA
acccgtcgatttgcagaatggctacaaaccgatgaagcggcgcctgcattcaaaaaatatggctggaccaggaaa

SEQ ID NO: 5123 - DNA, 75 bp, synthetic construct
  source 1..75: mol_type = other DNA
tttatatcctttccactctgtcattatgcatttctgggatagtttctactgcaaccgcaacttcttcagaaacaa

SEQ ID NO: 5124 - DNA, 75 bp, synthetic construct
  source 1..75: mol_type = other DNA
atgatgcggaaggttatctgaatttttataaagggttgatcaataaaacgcatctcggcaaggaactgctggaaa

SEQ ID NO: 5125 - DNA, 75 bp, synthetic construct
  source 1..75: mol_type = other DNA
gcctactatcgggaactcgctgaagatgctgagttaaacgctgttgctgatgagcgcatgaaaaacccggaaatt

SEQ ID NO: 5126 - DNA, 75 bp, synthetic construct
  source 1..75: mol_type = other DNA
gtgagtgaggggagcatctcatcaccagaggagccaggcaaccgtccgacgacctcagcgccttctgttgcgcca

SEQ ID NO: 5127 - DNA, 75 bp, synthetic construct
  source 1..75: mol_type = other DNA
ccgtgaacagtttaccggtgcggtggaccggatatttgacacggcggagagcgtctgtgttgcctctgttgcccg

SEQ ID NO: 5128 - DNA, 75 bp, synthetic construct
  source 1..75: mol_type = other DNA
tttggcgatccggatatgcatccggcggatttcagtctgcttgctccagcgtgtgaggaagagcagacggagatg

SEQ ID NO: 5129 - DNA, 75 bp, synthetic construct
  source 1..75: mol_type = other DNA
tatgatttttatccgcagttcagtattccggttcgtacagaactggagttttacgctcgtggaaaagctgattcg

SEQ ID NO: 5130 - DNA, 75 bp, synthetic construct
  source 1..75: mol_type = other DNA
gtggaagtagcaaaacagggaagacctatcaataccagaacattgcttgattacattgaaggaaacataaagaaa

SEQ ID NO: 5131 - DNA, 75 bp, synthetic construct
  source 1..75: mol_type = other DNA
acgagtacgactggctgacctcagacgccgctgtggatgaggccctgctcatcaacgaatacaccttcaccgaag

SEQ ID NO: 5132 - DNA, 75 bp, synthetic construct
  source 1..75: mol_type = other DNA
gttccattgctccaaagactggctgtacgccagagactctgcgtgtctggattcgccagcatgagcgggataccg

SEQ ID NO: 5133 - DNA, 75 bp, synthetic construct
  source 1..75: mol_type = other DNA
ggtgttcccgccggtgctggtgcagatgctcgaccggctggaaagtgaaatcctggctgaccgggtgagtgagga

SEQ ID NO: 5134 - DNA, 75 bp, synthetic construct
  source 1..75: mol_type = other DNA
ttcgcctggatggaccgcttctgtgagggctacagcggtggtatctggtcgttctacaccctcagcaatggcggc

SEQ ID NO: 5135 - DNA, 75 bp, synthetic construct
  source 1..75: mol_type = other DNA
agggtaatcacgcaggtggtgatactggatgcggataaaaagcagatacagtgtgtggtaagaccgctgcaaatc

SEQ ID NO: 5136 - DNA, 75 bp, synthetic construct
  source 1..75: mol_type = other DNA
gcgtgatggtggtgatgagttcagccaggcatggaaacaggaagtaaaaatcagcgagggagaaaaaccggaatg

SEQ ID NO: 5137 - DNA, 75 bp, synthetic construct
  source 1..75: mol_type = other DNA
atgaaaatcatcacccgtggtgaagccatgcgtattcaccgtcagcatccggcatcccgtctttttccgttctgc

SEQ ID NO: 5138 - DNA, 75 bp, synthetic construct
  source 1..75: mol_type = other DNA
atgaacatgcgtaatattaatgttattactgcccgctctgtaccggataaaagcgtatcagatgattttatgcat

SEQ ID NO: 5139 - DNA, 75 bp, synthetic construct
  source 1..75: mol_type = other DNA
gacaaatttgtgaaatgtttgggcgtctccagcgggattcgttctgggtaaaaaacatcatgagtccggcaaaac

SEQ ID NO: 5140 - DNA, 75 bp, synthetic construct
  source 1..75: mol_type = other DNA
tgacggtccattattaccggctgcgggattacgccctgcagcatccggaatgcagcgccattatgcgcatcatcg

SEQ ID NO: 5141 - DNA, 75 bp, synthetic construct
  source 1..75: mol_type = other DNA
cggtctgccggacggcggtgttctcacgctggtagagagtttctgctctgatgagaaagtcaggccactcactga

SEQ ID NO: 5142 - DNA, 75 bp, synthetic construct
  source 1..75: mol_type = other DNA
cggctatcgcacggctggaagcagaaggctggttaacgcgtaaggcgcgtcgccagggtaaccgcaatgcgtcga

SEQ ID NO: 5143 - DNA, 75 bp, synthetic construct
  source 1..75: mol_type = other DNA
aactgaatcatcttgaagaaaaactccaccgtgttgaccaggttcagcgggcgcagttacatcttgagcagatat

SEQ ID NO: 5144 - DNA, 75 bp, synthetic construct
  source 1..75: mol_type = other DNA
acctttcccctgttacctataaccagatccccgtaattactactgaactgttggctcacctttacggaacaaaaa

SEQ ID NO: 5145 - DNA, 75 bp, synthetic construct
  source 1..75: mol_type = other DNA
accgaaagtctgacccagcagcgccgcagcaaggccaccggcggtggcggtgacgccctgatgacgaactgctga

SEQ ID NO: 5146 - DNA, 75 bp, synthetic construct
  source 1..75: mol_type = other DNA
taccggattcttacgatgctccggatccgcgcattaaacagctggcgcgccgcagcacggtaactccgggtggag

SEQ ID NO: 5147 - DNA, 75 bp, synthetic construct
  source 1..75: mol_type = other DNA
gggattgtggtaaggcaattactcataatacggatgttgcccattaccggaataccgatcgtcggcgctgtctac

SEQ ID NO: 5148 - DNA, 75 bp, synthetic construct
  source 1..75: mol_type = other DNA
gtaatgaggttcatgaaaaaattaacatgattgttgaaaagcgtcgtcaggagggagcaagagataaagatataa

SEQ ID NO: 5149 - DNA, 75 bp, synthetic construct
  source 1..75: mol_type = other DNA
atgccaaactggtgctcgaatcgtatgtatttttctggtgaaccggcacagatcgctgagattaaacgactggcc

SEQ ID NO: 5150 - DNA, 75 bp, synthetic construct
  source 1..75: mol_type = other DNA
ttgaccccgtattttccggctctatcgctgaatcatggcgtcagcagccgtgcacaccatcctattgttgtgact

SEQ ID NO: 5151 - DNA, 75 bp, synthetic construct
  source 1..75: mol_type = other DNA
tcttgaactggggcttcgtgtatatgaggctcagatggagcgtaaagagtctgcatttaatcagactgagtttaa

SEQ ID NO: 5152 - DNA, 75 bp, synthetic construct
  source 1..75: mol_type = other DNA
gccggaggcgtattttcgtatcgcaccggaagactggctgcgggcagagatgcagggggagattgtggcgctggt

SEQ ID NO: 5153 - DNA, 75 bp, synthetic construct
  source 1..75: mol_type = other DNA
ccgtgatttgtatcacggtagtgctcattatctggatcacccacagttcactgtgcgagttccggttccggatag

SEQ ID NO: 5154 - DNA, 75 bp, synthetic construct
  source 1..75: mol_type = other DNA
atagcaggaaacagttggcaattatttacgatatcggtatatcgacgatttatcgttatcaccctgtagaggaac

SEQ ID NO: 5155 - DNA, 75 bp, synthetic construct
  source 1..75: mol_type = other DNA
atgagtaacgcatcatacccgacaggcgttgaaaaccatggaggatcactccgtatatggtttcactataatggc

SEQ ID NO: 5156 - DNA, 75 bp, synthetic construct
  source 1..75: mol_type = other DNA
cggccaggtctggcgctggcagcgtaccggacacagggctgttaatctggaaatccgtggattctggatggaggc

SEQ ID NO: 5157 - DNA, 75 bp, synthetic construct
  source 1..75: mol_type = other DNA
gattaaggacggtggcagagactgccgtattcgctcaaataactgttacggtcaggtatcccgtcgtgaccagga

SEQ ID NO: 5158 - DNA, 75 bp, synthetic construct
  source 1..75: mol_type = other DNA
aacctcgtaaaaagtattcgaatgaattcaaacttcgtatggttgaactggcatcacaacctggagcttgtgttg

SEQ ID NO: 5159 - DNA, 75 bp, synthetic construct
  source 1..75: mol_type = other DNA
ccagactgaaacgggcgacggtcagaaatccgaatgccagaattatcgttaaccgcggtgatctccctgtgatta

SEQ ID NO: 5160 - DNA, 75 bp, synthetic construct
  source 1..75: mol_type = other DNA
cgggaggtcatgaatgcagagcggctgttcagtacggcacgggaactgcgggacgtggcggcaggccgtgccgtt

SEQ ID NO: 5161 - DNA, 75 bp, synthetic construct
  source 1..75: mol_type = other DNA
ctgcctgaacggtaacgatgcccaaatgagtgcagaagcagcaggtattgctgtctgcctgattgcgtatagcca

SEQ ID NO: 5162 - DNA, 75 bp, synthetic construct
  source 1..75: mol_type = other DNA
cgatgcggccctgctgcccgcgttgcgtctggggaatgcccgggcagatgatctggtgcgcaataacgggatagc

SEQ ID NO: 5163 - DNA, 75 bp, synthetic construct
  source 1..75: mol_type = other DNA
cgagacacagtacgatgcgtggggaaaggcggtcagcaccacgcagggcgggctgacgcgcagtatggagtacga

SEQ ID NO: 5164 - DNA, 75 bp, synthetic construct
  source 1..75: mol_type = other DNA
ttttcataaacgttggtttgggagaaggctctgcattacctgttggtgtccctgttccgtggccttcagccactc

SEQ ID NO: 5165 - DNA, 75 bp, synthetic construct
  source 1..75: mol_type = other DNA
cacatcagcgcagaggggcaggcataccgcgataacgtcgcccgaatcattaaaaacgcaatgctggatatcggc

SEQ ID NO: 5166 - DNA, 75 bp, synthetic construct
  source 1..75: mol_type = other DNA
tactgcagataaatatggctgccatttgttatcacgtattggcgcttattgctcgttgatgctgattttctcgtc

SEQ ID NO: 5167 - DNA, 75 bp, synthetic construct
  source 1..75: mol_type = other DNA
aagcgcaccatgacggcatcaaaactgatagtcgcacgctaacgctggacaacgtgccgcgcgcgctcgccaact

SEQ ID NO: 5168 - DNA, 75 bp, synthetic construct
  source 1..75: mol_type = other DNA
ggcggcacgattgacggcacgctgctgcgttttgcgggtgaatactacaccgatgcagaaagcgacctgtatgaa

SEQ ID NO: 5169 - DNA, 75 bp, synthetic construct
  source 1..75: mol_type = other DNA
gcgtaaccgctggttcagcgtgatggcggggccgtctgtacgcgtgaatgaatggttcagcgcgtatgcgatggt

SEQ ID NO: 5170 - DNA, 75 bp, synthetic construct
  source 1..75: mol_type = other DNA
tgcgtgagcagctcattatcgccaccgctgatttgagtggggcaacaaaaggtcagcttgaagcctggcaggaga

SEQ ID NO: 5171 - DNA, 75 bp, synthetic construct
  source 1..75: mol_type = other DNA
tgaagcggatgttaaataaggggctggaaagccttgctgaaggggagaaaccgctgctccacagtgatcaaggat

SEQ ID NO: 5172 - DNA, 75 bp, synthetic construct
  source 1..75: mol_type = other DNA
gtatcctgaaatggatataaaaatacctttccttacggttatggagacgttgcaatataaaccggcagagagcgc

SEQ ID NO: 5173 - DNA, 75 bp, synthetic construct
  source 1..75: mol_type = other DNA
cacgattcgacatgattgagtgtaacgaaaactgccagtttgtcggaaaggtcatcaaatcgcagtggaatgatg

SEQ ID NO: 5174 - DNA, 75 bp, synthetic construct
  source 1..75: mol_type = other DNA
ggacggaaaaaccagaccgctggggattccaggtggagacgataaactggcgcaagaagtagcaagaattattct

SEQ ID NO: 5175 - DNA, 75 bp, synthetic construct
  source 1..75: mol_type = other DNA
gtacttttcctcgctggataacatgattgcccaggggaacccgatgccggtgccttacggtgaaatgctggttgg

SEQ ID NO: 5176 - DNA, 75 bp, synthetic construct
  source 1..75: mol_type = other DNA
ggcgaaaaagcatgctctggtcacgcgaaaaagcggccagagaatttggcgtgacgcagagaacatggcacgcct

SEQ ID NO: 5177 - DNA, 75 bp, synthetic construct
  source 1..75: mol_type = other DNA
gcatggcgatgaatgcctgggcgcatccggacggtgaaaaagttccggcagctgaaataacccgggcttattttg

SEQ ID NO: 5178 - DNA, 75 bp, synthetic construct
  source 1..75: mol_type = other DNA
gaatgtcggtgtgcaactaggtgataaaggctatagcgatactcagggcatgctgggagtgaaatatagctggta

SEQ ID NO: 5179 - DNA, 75 bp, synthetic construct
  source 1..75: mol_type = other DNA
tagtatcacaattagcattggcttgcactctggctatcacctctcaggctaatgcagcaaactatgatacctggg

SEQ ID NO: 5180 - DNA, 75 bp, synthetic construct
  source 1..75: mol_type = other DNA
tcgcaacgggtaaaaatgccaatgttatgtcgcaggaggaatgggaagcgttgcctgcgcttttatccggattta

SEQ ID NO: 5181 - DNA, 75 bp, synthetic construct
  source 1..75: mol_type = other DNA
atgcgcaggcccgtgagacatggtaccggtcactggaatacgataattttccggaaatcagcgaagcgaacattc

SEQ ID NO: 5182 - DNA, 75 bp, synthetic construct
  source 1..75: mol_type = other DNA
acgcgaagctgaccatcaatggtgaggtgctctatgaagtggaccttatcaacatggtggaaattgtggacggtg

SEQ ID NO: 5183 - DNA, 75 bp, synthetic construct
  source 1..75: mol_type = other DNA
ctcatcccgacgacaatcacgaccgcccctggtgggggcttccctgcacagtgaggccctgttttggcgcccgtc

SEQ ID NO: 5184 - DNA, 75 bp, synthetic construct
  source 1..75: mol_type = other DNA
gaagtaaaagtttttatctgcaagaattgtttccagaatatgaggatgcgggaacgcttcctgatgatgttattg

SEQ ID NO: 5185 - DNA, 75 bp, synthetic construct
  source 1..75: mol_type = other DNA
atgaaatccatggataagttaacaacgggtgtcgcctatggcacctcagcaggtagtgccgggtactggttttta

SEQ ID NO: 5186 - DNA, 75 bp, synthetic construct
  source 1..75: mol_type = other DNA
cgcagaccgtggatttcagcgtgggtgccgaagggcttcgccatgtgccgggtgatgttattgaaatctgcgatg

SEQ ID NO: 5187 - DNA, 75 bp, synthetic construct
  source 1..75: mol_type = other DNA
atgtccatcatttttaatggacactatcgtatgaaacaccggacctggatcactgaagctttacgtcttcacttt

SEQ ID NO: 5188 - DNA, 75 bp, synthetic construct
  source 1..75: mol_type = other DNA
tcaccggcttttaccgggtgcccctgtcctctgcacaggcgggcgatattctgctgtgctgctttggtgcttcgg

SEQ ID NO: 5189 - DNA, 75 bp, synthetic construct
  source 1..75: mol_type = other DNA
taaaaactgtaagatttggcgatggttatgagcaacgaagtccaaatggacttaatcattctctgcgcgttttca

SEQ ID NO: 5190 - DNA, 75 bp, synthetic construct
  source 1..75: mol_type = other DNA
catcattaatgattcgcaaatatcgtcattattcgatgaacacgcggttgctgttgagcatcaactccgtagctg

SEQ ID NO: 5191 - DNA, 75 bp, synthetic construct
  source 1..75: mol_type = other DNA
atgactatgccgggaccctgaccggcggacgtgtcctgtccattgatgctgccacccgcaccctgacgctggacc

SEQ ID NO: 5192 - DNA, 75 bp, synthetic construct
  source 1..75: mol_type = other DNA
atcgcccattacaagaattgtcaccgtatgcgcacaacgccaggacgcacagtactgagcaggtggcacaactgg

SEQ ID NO: 5193 - DNA, 75 bp, synthetic construct
  source 1..75: mol_type = other DNA
aaaaactggatcgacaaagaagaatatccgcaatccgcagccatcgacctgcgttgcgtaaatatggttgccgat

SEQ ID NO: 5194 - DNA, 75 bp, synthetic construct
  source 1..75: mol_type = other DNA
gaaagccagccggaagttcagcccggtcagctaccgtgcacatggcctgcccgtattggagaatctgctggagca

SEQ ID NO: 5195 - DNA, 75 bp, synthetic construct
  source 1..75: mol_type = other DNA
aagcaataccaggagggaagtcttactgctgtggccgcaggagagcaggtcgttcctgcctctgaacttgctgct

SEQ ID NO: 5196 - DNA, 75 bp, synthetic construct
  source 1..75: mol_type = other DNA
gggcgttttttcttccacgtgatgggtgccctggctgaaatggaacgtgaattaattgttgaacgtacactggcc

SEQ ID NO: 5197 - DNA, 75 bp, synthetic construct
  source 1..75: mol_type = other DNA
tggtcccgcgtgaagggatgcaggtgagtgagaaaccgtcggtggtgagggttcggtttggtgacggttatgaac

SEQ ID NO: 5198 - DNA, 75 bp, synthetic construct
  source 1..75: mol_type = other DNA
gaaataatgcgggcaacggtgtttaattatatcgaatgtgattacaatcggtggcggcggcacagttggtgtggc

SEQ ID NO: 5199 - DNA, 75 bp, synthetic construct
  source 1..75: mol_type = other DNA
agaggccggttcagcgacgcggatgcgtaccacctggaccaggcctttccgctgctgatgaaacaactggaactc

SEQ ID NO: 5200 - DNA, 75 bp, synthetic construct
  source 1..75: mol_type = other DNA
ttgacgtcatgttatctcagcatccggtgcgtgtccgtcttgttaatattgatgcacctgaaaagaaacaggact

SEQ ID NO: 5201 - DNA, 75 bp, synthetic construct
  source 1..75: mol_type = other DNA
gattgccggattccgcgcaatggcgcaggaaggcaaaacacctgcacaaatcggtgatttgctgggctattcacc

SEQ ID NO: 5202 - DNA, 75 bp, synthetic construct
  source 1..75: mol_type = other DNA
tcaaagcggaagctccctgtgagaaatgggtgacagatatcaccgaattcagggctggcggacaaaaactgtacc

SEQ ID NO: 5203 - DNA, 75 bp, synthetic construct
  source 1..75: mol_type = other DNA
taccaccgtttgcaacccttgccggcatacgctgcagtaccgcacatatcacggaaaaggataacgcctggctgt

SEQ ID NO: 5204 - DNA, 75 bp, synthetic construct
  source 1..75: mol_type = other DNA
cgaagatgtcaaaggcaatttgtcgaatcgtgaacagagcatggtggtcgttcaggcacctacgctaagccagaa

SEQ ID NO: 5205 - DNA, 75 bp, synthetic construct
  source 1..75: mol_type = other DNA
acatgcgaaaagcgaattgctaattggttggccgttgctgagtatgcgctatacattcccatgcgagaatcattc

SEQ ID NO: 5206 - DNA, 75 bp, synthetic construct
  source 1..75: mol_type = other DNA
cctgacggcgcatctgacggtaataaggcaatcagtgaaacagagcatgatgcggtgaaagcgatgttcaggggg

SEQ ID NO: 5207 - DNA, 75 bp, synthetic construct
  source 1..75: mol_type = other DNA
ggccagccaggattcggcacgctggggtgtgggtaaaccgttatatcaggacctgattgcgcgcactaaagctgc

SEQ ID NO: 5208 - DNA, 75 bp, synthetic construct
  source 1..75: mol_type = other DNA
gggtagtctggtatttggcttgctgacgtatctgacaaacctttatttcaagattaaagaagacaagcgtaaggc

SEQ ID NO: 5209 - DNA, 75 bp, synthetic construct
  source 1..75: mol_type = other DNA
ttgttttttgtatgcggtgctgtttttttgttcgccgacaggcttcaggcgtgcagatgcctccggtgcgggccg

SEQ ID NO: 5210 - DNA, 75 bp, synthetic construct
  source 1..75: mol_type = other DNA
ttcagcaggtgctggaacgtgctggctatctggcgaaggagcataccaaagctcgcggcaccggtgagcgcaact

SEQ ID NO: 5211 - DNA, 75 bp, synthetic construct
  source 1..75: mol_type = other DNA
ctggtcagggttgcggtacaggaggcagcaaagcagaatctggtcgcctttgcccgtgagccgatgattgattac

SEQ ID NO: 5212 - DNA, 75 bp, synthetic construct
  source 1..75: mol_type = other DNA
tgggatgccatacgtgcgcgcatactgaagcgtgataatcatctgtgtcagaactgcctgcgcaatgggagagcc

SEQ ID NO: 5213 - DNA, 75 bp, synthetic construct
  source 1..75: mol_type = other DNA
atgaaatcattaacgacagaaacggcgctggatattctgattgcgtggctgcaggacaatatcgactgtgaatcc

SEQ ID NO: 5214 - DNA, 75 bp, synthetic construct
  source 1..75: mol_type = other DNA
cggcaaaagtattaccagtgtaacaacctggaatgcggcgtatgcttctcaacactggaagctttccataaattc

SEQ ID NO: 5215 - DNA, 75 bp, synthetic construct
  source 1..75: mol_type = other DNA
ttgtcatttttttaattaccctttgtttatttgttgtttaccttgggtttgataacaattcaaattctgacatcg

SEQ ID NO: 5216 - DNA, 75 bp, synthetic construct
  source 1..75: mol_type = other DNA
gtttgtttaccgctatcagatggtgatgtttgtcatggattacgccggggagctggacgacctcacgctgccgct

SEQ ID NO: 5217 - DNA, 75 bp, synthetic construct
  source 1..75: mol_type = other DNA
gaacaccgttggcaaatcggcattcgtggaggctgttggtcagccgagtgatgatgcatccggctatctggattt

SEQ ID NO: 5218 - DNA, 75 bp, synthetic construct
  source 1..75: mol_type = other DNA
atgacgttcaccgtaaaaaccattcctgacatgcttgttgaggcatatggaaatcagaccgaagtggcccgaata

SEQ ID NO: 5219 - DNA, 75 bp, synthetic construct
  source 1..75: mol_type = other DNA
ctgcctgaacaactgagtaaacgggagaggtattccgaaaaatggcaacgacgaacgcattctgtctggcgtcac

SEQ ID NO: 5220 - DNA, 75 bp, synthetic construct
  source 1..75: mol_type = other DNA
aaaccgccagagtggtgtttaatgaattaagcgtcaccgaaccggcgacagtcggggagattgcgcagaatactt

SEQ ID NO: 5221 - DNA, 75 bp, synthetic construct
  source 1..75: mol_type = other DNA
agcgtactgccggaatggccttccaaccgagttgatgaactcctgccatggaacgtagtactcaccaataaataa

SEQ ID NO: 5222 - DNA, 75 bp, synthetic construct
  source 1..75: mol_type = other DNA
tgtccggcagtcagtggcagtcgctgccggtacttccggcagacggaacgcaggtgtctttcccgtatgccggtg

SEQ ID NO: 5223 - DNA, 75 bp, synthetic construct
  source 1..75: mol_type = other DNA
agagaagttcgccacagcaatccgaaaccactggcacgtggagaataagctgcactggcgtctggacgtggtaat

SEQ ID NO: 5224 - DNA, 75 bp, synthetic construct
  source 1..75: mol_type = other DNA
ctggctgctgacacggttgtacaggcgggagaaaccgtgagcggcggaacactgacaaatcatgacaaccagatt

SEQ ID NO: 5225 - DNA, 75 bp, synthetic construct
  source 1..75: mol_type = other DNA
agtgcaggatattcccggtgtgctggccgtgtttgctgaacgccgtaaggacagttttggtccgtatgtccgtct

SEQ ID NO: 5226 - DNA, 75 bp, synthetic construct
  source 1..75: mol_type = other DNA
tcactgcagaacgtattagcgactacatgactgaagcggttaatacagactctaaatctgttgcggaaatgtttc

SEQ ID NO: 5227 - DNA, 75 bp, synthetic construct
  source 1..75: mol_type = other DNA
acaccactgtcggacatcgtggaacactgacgctggctgccgggggaagtctgagtggcagaacacagctcagta

SEQ ID NO: 5228 - DNA, 75 bp, synthetic construct
  source 1..75: mol_type = other DNA
gtcttatcgccatgataacagcaacagtagctctcacagcctgtaccccaaagggcagcgtggaacaacataccc

SEQ ID NO: 5229 - DNA, 75 bp, synthetic construct
  source 1..75: mol_type = other DNA
gggccaatgaagccagggctaagcaggctgaaaatctgtccgctctggagcaggatatcaccaatctggaaaaag

SEQ ID NO: 5230 - DNA, 75 bp, synthetic construct
  source 1..75: mol_type = other DNA
atgcagaaacgagaacccgtcatcatcgcgccagactataccgatgatgaactttatgagtggatgcaccagaaa

SEQ ID NO: 5231 - DNA, 75 bp, synthetic construct
  source 1..75: mol_type = other DNA
gggcttctgtcttttcagacctgtcatttgtctgttactgatgatgttgttgttcctgctactgctactgctact

SEQ ID NO: 5232 - DNA, 75 bp, synthetic construct
  source 1..75: mol_type = other DNA
cgctgtttgtcgcgccagcctggacaccgggccgggaagacgtgctcctctcacttgccggagagattgaggatg

SEQ ID NO: 5233 - DNA, 75 bp, synthetic construct
  source 1..75: mol_type = other DNA
ggaagtgacgaaggcaaagccggtgacgcgcaccattacgtccgcgaacattgaccgcctgcgggttaccttcgg

SEQ ID NO: 5234 - DNA, 75 bp, synthetic construct
  source 1..75: mol_type = other DNA
tgttgatatagagaataccgtggtcagcgtcgtgcccacgcatggtgccgttgtgcgggctgactataaaacccg

SEQ ID NO: 5235 - DNA, 75 bp, synthetic construct
  source 1..75: mol_type = other DNA
cactgacggcacttacttctgcgccacgaatgtggtgcgggtgaaccttatccgacaggtacaggagtcacgcag

SEQ ID NO: 5236 - DNA, 75 bp, synthetic construct
  source 1..75: mol_type = other DNA
gtggtgttcccgccggtgctggtgcagatgctcgaccggctggaaagtgaaatcctggctgaccgggtgagtgag

SEQ ID NO: 5237 - DNA, 75 bp, synthetic construct
  source 1..75: mol_type = other DNA
cggagttcgagaaaaagctgaaagagagagccgaatctacagagaaaatgctgaacgacgagttcaggaagctcg

SEQ ID NO: 5238 - DNA, 75 bp, synthetic construct
  source 1..75: mol_type = other DNA
attcgcggtaaaaggaaaccaggggcggctaaataaagcctttgaggaaaaatttccgctgaaagaattaaataa

SEQ ID NO: 5239 - DNA, 75 bp, synthetic construct
  source 1..75: mol_type = other DNA
gcatacggatacagtggcatttgaagataagtatggctcccaactggagctgatatttcgttttatcgatcgcgc

SEQ ID NO: 5240 - DNA, 75 bp, synthetic construct
  source 1..75: mol_type = other DNA
atggcaattaagcattttcccgtcgttcgctttacctccagagggcgcgaatacgaggtcgacgaacgcctgatt

SEQ ID NO: 5241 - DNA, 75 bp, synthetic construct
  source 1..75: mol_type = other DNA
atgagcactgataaagaagaatttgcgctatattgcgaagcaaaaaatgacaaagtcagaaaacgtctgggaatt

SEQ ID NO: 5242 - DNA, 75 bp, synthetic construct
  source 1..75: mol_type = other DNA
cgttgtgaatgaccttccacctgaaggcgtgtttgataccgaattctgcaaccgatacgaaaaaggcggggaaga

SEQ ID NO: 5243 - DNA, 75 bp, synthetic construct
  source 1..75: mol_type = other DNA
aacgcaaacccgcaccacaaagaagcaaacttccccgctatgttgtgaaacttcatccggatgatttttttgacg

SEQ ID NO: 5244 - DNA, 75 bp, synthetic construct
  source 1..75: mol_type = other DNA
tctataaaaaggttgccgctgattgtgaatcgtttatatctcgcgccagagttttatttgagatcgcaaacaggg

SEQ ID NO: 5245 - DNA, 75 bp, synthetic construct
  source 1..75: mol_type = other DNA
ccagacccgtgtgcgcgacccgggccgccggggatacacaaaacatatgctgcgtctgcggcgggccggagagat

SEQ ID NO: 5246 - DNA, 75 bp, synthetic construct
  source 1..75: mol_type = other DNA
gaaagagctgaagcgggttaccgacgaacgggacatattaaaaaaagccgttgtagattcaatctgtcaatgcaa

SEQ ID NO: 5247 - DNA, 75 bp, synthetic construct
  source 1..75: mol_type = other DNA
tcagatttgtccggcaccgccgccgctgttcaggcgtatcgggctggccattggttactgggagccgatggcgct

SEQ ID NO: 5248 - DNA, 75 bp, synthetic construct
  source 1..75: mol_type = other DNA
atgaaccggaaaatatttgcactttttgctctgacagcagggatgcatcttgctgttcatgcttcagaaaatgtg

SEQ ID NO: 5249 - DNA, 75 bp, synthetic construct
  source 1..75: mol_type = other DNA
gcattacgccagcctgatggcggttattcgtgaaaaggaagaaacactgaaacaacgcgtgatccgcgcgctggc

SEQ ID NO: 5250 - DNA, 75 bp, synthetic construct
  source 1..75: mol_type = other DNA
gtctttacccgccttctggagggcaggttgccagacggggcggatttaagccgcatgcaggatggccgtaacagg

SEQ ID NO: 5251 - DNA, 75 bp, synthetic construct
  source 1..75: mol_type = other DNA
cccggcaggcggcagaaagtgcagcctcagcaaagcagtcagaggatgcgtcctcgtcctcggcttctgcggccg

SEQ ID NO: 5252 - DNA, 75 bp, synthetic construct
  source 1..75: mol_type = other DNA
atgagcagaacgctcgaacagaagattgctgatgctgaggcgagattacagcgcctgaaggcgaagagccggagc

SEQ ID NO: 5253 - DNA, 75 bp, synthetic construct
  source 1..75: mol_type = other DNA
acgctcggtgcgattgttgaggcgatagcctcccgtaacaggctggaagccagtgtcgctccgtcactggccgga

SEQ ID NO: 5254 - DNA, 75 bp, synthetic construct
  source 1..75: mol_type = other DNA
actccaaatttcgtaatggcgtagaacgccatgtacaccacgtcgctaccagtgcatcacgtagtaacagtcgct

SEQ ID NO: 5255 - DNA, 75 bp, synthetic construct
  source 1..75: mol_type = other DNA
gacatcatcctgataaacgcagtgcccgtgcgcagcgcgatgactggctgaagaaagagatacagcgcgtatacg

SEQ ID NO: 5256 - DNA, 75 bp, synthetic construct
  source 1..75: mol_type = other DNA
atctgcattaaggcgcatggagttgagagggcaccttaatgaaatatatgacggtgtgattgttaataagaaaga

SEQ ID NO: 5257 - DNA, 75 bp, synthetic construct
  source 1..75: mol_type = other DNA
tgcagcagaagctgcatatagaacttgcggacggttgccatttaaacctgagctttatgaaaaatctaatggata

SEQ ID NO: 5258 - DNA, 75 bp, synthetic construct
  source 1..75: mol_type = other DNA
atgttatcgccgcctgccctgcgggcggcgatacagggagaacgcttaatcatgaacgaaaacagcacgctgaac

SEQ ID NO: 5259 - DNA, 75 bp, synthetic construct
  source 1..75: mol_type = other DNA
tatgtctgcaaagaactggtgtatgcctatgcaatgtggatcagcccgtcattccatctgaaggtgatccgtact

SEQ ID NO: 5260 - DNA, 75 bp, synthetic construct
  source 1..75: mol_type = other DNA
aaggcgggacatatcgatgtcggtctctttcgggcggccagtgaaggtgtgccacagggcggtgttatatcgccg

SEQ ID NO: 5261 - DNA, 75 bp, synthetic construct
  source 1..75: mol_type = other DNA
actgtcatttgatgtcagcattccgttcagccactggatgcgttcggacagcacatctgcatggagaaacgccag

SEQ ID NO: 5262 - DNA, 75 bp, synthetic construct
  source 1..75: mol_type = other DNA
gagctgcgtgagatccctatgcgccccggtcagttgtttatggacccgaaacgcatgattgaagcctgcgacgaa

SEQ ID NO: 5263 - DNA, 75 bp, synthetic construct
  source 1..75: mol_type = other DNA
gcagcgccctgcatcttgagccctggcaaggcgatggcctggtccatttttccaggtggacgccttcccgtaaac

SEQ ID NO: 5264 - DNA, 75 bp, synthetic construct
  source 1..75: mol_type = other DNA
atcacttcatgccaaacttggatataaagggaatatgcagagtctgaaggctggggatttttctgcgacagcaac

SEQ ID NO: 5265 - DNA, 75 bp, synthetic construct
  source 1..75: mol_type = other DNA
agcgccgcagtagaagcggcagaagcacagcgccagtcgctgattgatgctgcaatggcttccatcagtctgatt

SEQ ID NO: 5266 - DNA, 75 bp, synthetic construct
  source 1..75: mol_type = other DNA
agaggtaattgattcaattttgcagacgatgcaggggcgggtacttgatggtgatttaatcactggatgggaaaa

SEQ ID NO: 5267 - DNA, 75 bp, synthetic construct
  source 1..75: mol_type = other DNA
gcgcggtggtaaggcagcgcagccggacggccacacgctggcgcggctgtggggggcgctgccgccggatatccg

SEQ ID NO: 5268 - DNA, 75 bp, synthetic construct
  source 1..75: mol_type = other DNA
ttccctggtatgaggggaatatcctgtttgcctttgcagtggcggcacaggtgctgacatggtgtgaaacgcgca

SEQ ID NO: 5269 - DNA, 75 bp, synthetic construct
  source 1..75: mol_type = other DNA
ctgacggaaagcatcggaggtaaaactgccccggactgggccatgaaacaggattttcgctgcggctgctggctg

SEQ ID NO: 5270 - DNA, 75 bp, synthetic construct
  source 1..75: mol_type = other DNA
cgaaacgttctcggtatccgggacggaattatccgcgaccaaacagcactgagaacgcttcaggaatacatcagg

SEQ ID NO: 5271 - DNA, 75 bp, synthetic construct
  source 1..75: mol_type = other DNA
ggtaataaatacatcccttacgggaaaatggcttcctggctggttgagtggaaaaatgccactgaaacgcaatgg

SEQ ID NO: 5272 - DNA, 75 bp, synthetic construct
  source 1..75: mol_type = other DNA
gatcagttcacggaacggctggaatcaatggcaacggataactgtgcccgctgggtgttgtctgttgtgcgtcgg

SEQ ID NO: 5273 - DNA, 75 bp, synthetic construct
  source 1..75: mol_type = other DNA
cctggggctgtcagatgaacgagtacgattcatcgaagatggccgatctgctggatgccacccacggctatcaac

SEQ ID NO: 5274 - DNA, 75 bp, synthetic construct
  source 1..75: mol_type = other DNA
aaaccagaactggttgatcggctaaatgatattattgcgaaacattatgcgggaaaagtatcttcttcagtatag

SEQ ID NO: 5275 - DNA, 75 bp, synthetic construct
  source 1..75: mol_type = other DNA
gttctggtccggtgcgctattcaaccgtgggcgcaataaagccgacaaggtggacatcgacctgtcccacagcaa

SEQ ID NO: 5276 - DNA, 75 bp, synthetic construct
  source 1..75: mol_type = other DNA
ttttgaagtgggatcggagaaagtctccaaagtgcagttcagcgttgagagtgaatatctcgaatactttgttat

SEQ ID NO: 5277 - DNA, 75 bp, synthetic construct
  source 1..75: mol_type = other DNA
cggggtcaacgtggagacaatccgcttctatcagcgcaagggcctgttgcgggaaccggacaagccttacggcag

SEQ ID NO: 5278 - DNA, 75 bp, synthetic construct
  source 1..75: mol_type = other DNA
ctatttcctttatggcgacagtgttacttttattgctctttgcttgccatagcaccgttgccaacgcagctgtcg

SEQ ID NO: 5279 - DNA, 75 bp, synthetic construct
  source 1..75: mol_type = other DNA
gaagcgaaaggacgtgaacagcttgccacgatgctggcaggacaacagggcatgagcgttgaacaggcccgggcg

SEQ ID NO: 5280 - DNA, 75 bp, synthetic construct
  source 1..75: mol_type = other DNA
acaggcctgatgatccgcgacaattacagaacggtaaataacattaccctggggaagcatccggaggcgaaacga

SEQ ID NO: 5281 - DNA, 75 bp, synthetic construct
  source 1..75: mol_type = other DNA
tgaagcggcataatctgcgtggaagtatgagcgcaaaaggttgctgctacgataatgcctgcgtggaaagcttct

SEQ ID NO: 5282 - DNA, 75 bp, synthetic construct
  source 1..75: mol_type = other DNA
tcgtcacctgtgctctggcaaacaagctggccagaatagcctgggcactgacggcgcgacagcaaacttacgaag

SEQ ID NO: 5283 - DNA, 75 bp, synthetic construct
  source 1..75: mol_type = other DNA
tctgcaggagataccagttttacgctggcctggaaaccgggagaagaaggtcagaaagggcttataggctggttt

SEQ ID NO: 5284 - DNA, 75 bp, synthetic construct
  source 1..75: mol_type = other DNA
accctgtaaatttggcagtaaaattatcgtcaacaatctggtgaggtgggaccggtggggatttcatctgaacag

SEQ ID NO: 5285 - DNA, 75 bp, synthetic construct
  source 1..75: mol_type = other DNA
ctgcaaccggcctgtaatgagatgtaccgcgtactcaaaaaagacgcgttaatggtgagcttctatggctggaat

SEQ ID NO: 5286 - DNA, 75 bp, synthetic construct
  source 1..75: mol_type = other DNA
atctggcacatcttgccggcgggcaggtgtacccgtatgtggtccccctgctggatggcaggccgtcggtggcgc

SEQ ID NO: 5287 - DNA, 75 bp, synthetic construct
  source 1..75: mol_type = other DNA
tgccatgacggaagatgatgtcatgccggaggcattgcgtcgttttgaggaaatggtggaagaagcggcacgcaa

SEQ ID NO: 5288 - DNA, 75 bp, synthetic construct
  source 1..75: mol_type = other DNA
ggaataaatcactcagcatatatggttctcaccacattattcgcagcggagaaccattgtctgtcaccttcagag

SEQ ID NO: 5289 - DNA, 75 bp, synthetic construct
  source 1..75: mol_type = other DNA
tcgtgggatggcaggtctcatcatccatggaaacaacattcgtgctggatgcactggagcaggcgttgtgggccc

SEQ ID NO: 5290 - DNA, 75 bp, synthetic construct
  source 1..75: mol_type = other DNA
cgccgatggtggcgcgggtctatctgcgcgtcagcaccgacgcgcaggacttggaacgccaagaggcgatcacta

SEQ ID NO: 5291 - DNA, 75 bp, synthetic construct
  source 1..75: mol_type = other DNA
atgcgtaaattatgtgctgttattctgtctgcagtagtctggctggtcgccgctggtacgccagcgagtgcagca

SEQ ID NO: 5292 - DNA, 75 bp, synthetic construct
  source 1..75: mol_type = other DNA
aggcttggcctgttgccgcccggccagttcctgccgctggccgagtcgttcggcctgatgccggaaataggcgcg

SEQ ID NO: 5293 - DNA, 75 bp, synthetic construct
  source 1..75: mol_type = other DNA
ctttttatcagaatgcgatgacatttgaagagtttattccggcatttaatcattggtttgcccgggaaaaaggga

SEQ ID NO: 5294 - DNA, 75 bp, synthetic construct
  source 1..75: mol_type = other DNA
ggtcatccgcctgggacgttcacctgtacagcgttgtgttaatcatatttctgaaccggatacagaaattccgcc

SEQ ID NO: 5295 - DNA, 75 bp, synthetic construct
  source 1..75: mol_type = other DNA
tactggggaacggacaggacggaccgtcagcttaatgctggctttaactcatctgtgaatgacatcagctggtcc

SEQ ID NO: 5296 - DNA, 75 bp, synthetic construct
  source 1..75: mol_type = other DNA
ggcggcggatgtggacaagtgggcgctgtatgccatcgggcagtactgcgaccagacggtcccggatggtttcgg

SEQ ID NO: 5297 - DNA, 75 bp, synthetic construct
  source 1..75: mol_type = other DNA
aatcgaccaggagcagggctggcataaaacgctgtccaacgtcggggtaaacggtgttaccggcatcagcgcatc

SEQ ID NO: 5298 - DNA, 75 bp, synthetic construct
  source 1..75: mol_type = other DNA
ggtaaagaaaaatcagacccgtattaccgggatggataaccagatcctctcgttgtatgccaaagggatgaccac

SEQ ID NO: 5299 - DNA, 75 bp, synthetic construct
  source 1..75: mol_type = other DNA
gagttcacttgccgtgcactggatcaatgggcctttgagcatggtgttgagttgcgcttaatccagccgggcaag

SEQ ID NO: 5300 - DNA, 75 bp, synthetic construct
  source 1..75: mol_type = other DNA
atgtggctactgattttctggctttcatcgccctttaatgtctcttccggtgatgcccgtcagcccacactggcg

SEQ ID NO: 5301 - DNA, 75 bp, synthetic construct
  source 1..75: mol_type = other DNA
ctgccagtggcaaaactcgcactaaattcatgcgcggtgatatttaccgcgaccagtacggcggcacggtaatga

SEQ ID NO: 5302 - DNA, 75 bp, synthetic construct
  source 1..75: mol_type = other DNA
cgctggtttgaccgggatattctgcgggaggttgttctggaggcacgggatgaaatccgcagcatggcggatgca

SEQ ID NO: 5303 - DNA, 75 bp, synthetic construct
  source 1..75: mol_type = other DNA
agcgcgcgtgtgaaagcgctggaggataaccttggtgtcctgctatttgagcgccatgcgcggggcgttcggcta

SEQ ID NO: 5304 - DNA, 75 bp, synthetic construct
  source 1..75: mol_type = other DNA
tttatctggcctgcggtgcgtgacggtaaggtatccattacccgctcgcagctggcaatgctcctcgataagctg

SEQ ID NO: 5305 - DNA, 75 bp, synthetic construct
  source 1..75: mol_type = other DNA
caaaatgtgactgcatcgttgaagcaccggcgccgtcccgcccgatagagcgtggtatcgcgggccccggattac

SEQ ID NO: 5306 - DNA, 75 bp, synthetic construct
  source 1..75: mol_type = other DNA
caagttggccgactgggtcagggagttgttgtgtcggaaaagcaactttgtcgtcacctgtgctctggcaaacaa

SEQ ID NO: 5307 - DNA, 75 bp, synthetic construct
  source 1..75: mol_type = other DNA
cgctgggtgcctggctggatgtgtacaccacgtccacaggcagagacggaaaccacggaataccgtgacaaccag

SEQ ID NO: 5308 - DNA, 75 bp, synthetic construct
  source 1..75: mol_type = other DNA
ggaagcatttttattatgacaagataaataaagacgacatcgtgattaacgatatcgcggtttccctttcaaata

SEQ ID NO: 5309 - DNA, 75 bp, synthetic construct
  source 1..75: mol_type = other DNA
atttcatgataagacacaaaaaaatgcttgggttatctgatgaggatgtagcaatactcaaaatattgaaagaca

SEQ ID NO: 5310 - DNA, 75 bp, synthetic construct
  source 1..75: mol_type = other DNA
tgcggcggcaacagggctggtaccccgacagtacagcacgggaggtcggacgacattgttagggattagcaagcg

SEQ ID NO: 5311 - DNA, 75 bp, synthetic construct
  source 1..75: mol_type = other DNA
atgaaaatcatcaggtatacggtgtgcgtaaagtctggcgccagttgttacgcgaaggtatcagggtggccagat

SEQ ID NO: 5312 - DNA, 75 bp, synthetic construct
  source 1..75: mol_type = other DNA
atgagtgcacgtggtatcaacaaggtcatcgtggttggtcgtctgggtaaagatccggaagtccgttacatcccc

SEQ ID NO: 5313 - DNA, 75 bp, synthetic construct
  source 1..75: mol_type = other DNA
tgtgctgaaagagattcgacgcctcaggacagagctgccgaacctcggtaaagagcagatttttgttcgcctgaa

SEQ ID NO: 5314 - DNA, 75 bp, synthetic construct
  source 1..75: mol_type = other DNA
gaaatttacctatcgacaaccccacattgttatcatggaacattactgacggggatctaaattccaaattaaata

SEQ ID NO: 5315 - DNA, 75 bp, synthetic construct
  source 1..75: mol_type = other DNA
ttaaagatggcacaggaaaaccagtacagaactgcaccattgtgctgaaggccagacggaccagcagcacggtgg

SEQ ID NO: 5316 - DNA, 75 bp, synthetic construct
  source 1..75: mol_type = other DNA
tggatgataaccccttctccggtcacctgtttatcttccgtggccgacggggagacacgattaaaatcctgtggg

SEQ ID NO: 5317 - DNA, 75 bp, synthetic construct
  source 1..75: mol_type = other DNA
ttgctggcggtgtgctggatgcagggagagtttgacatgagcgccgccacccacgcacagcaacctgcgctgttt

SEQ ID NO: 5318 - DNA, 75 bp, synthetic construct
  source 1..75: mol_type = other DNA
tcggatatctgattaatatatttatcagcctactcttcaccgaaatggtggtacccgtaatgctagatatcctcc

SEQ ID NO: 5319 - DNA, 75 bp, synthetic construct
  source 1..75: mol_type = other DNA
tactgacaaataataacagtacatggactggtgccggaattattgtcggtgacgaggcaaatgtcaaatggggag

SEQ ID NO: 5320 - DNA, 75 bp, synthetic construct
  source 1..75: mol_type = other DNA
atgcttcacaaacgtaggttagcctcttacgcgccgaaaggcaaggagaagcaggttatgaagcagcaaaaggcg

SEQ ID NO: 5321 - DNA, 75 bp, synthetic construct
  source 1..75: mol_type = other DNA
atggcaataaccgcgcgatccgtctgccccgcgatctggattttgagggggtgagtgagctggagattgtacggg

SEQ ID NO: 5322 - DNA, 75 bp, synthetic construct
  source 1..75: mol_type = other DNA
catcctggacgcaacacatcagaaccgcattattgcggagctggttattcctcctgaaacgggcggattctggat

SEQ ID NO: 5323 - DNA, 75 bp, synthetic construct
  source 1..75: mol_type = other DNA
gcattttggcctcattccacagtgggtgaccctagagccccgtatcttcggctggatggaccgtctttgcgaaga

SEQ ID NO: 5324 - DNA, 75 bp, synthetic construct
  source 1..75: mol_type = other DNA
aggcaagtaaagagtatggtttatataatcaatgtaagaaactaaatgatgatgaattatttcgcttacttgatg

SEQ ID NO: 5325 - DNA, 75 bp, synthetic construct
  source 1..75: mol_type = other DNA
catgcttactgatacatcaataagcagcttattgttagccactttaatgtcaggaagcttaagctctgttagtgt

SEQ ID NO: 5326 - DNA, 75 bp, synthetic construct
  source 1..75: mol_type = other DNA
gaatggcgggaaattccccgcacggagcctgacccggaaatcaccccggataacagttaccgcaattatctgtaa

SEQ ID NO: 5327 - DNA, 75 bp, synthetic construct
  source 1..75: mol_type = other DNA
agctacgtcgctggacatacgctggcggtaagcaatggaaaggcctgatgactcgtcgtgagattgagcgtgaag

SEQ ID NO: 5328 - DNA, 75 bp, synthetic construct
  source 1..75: mol_type = other DNA
atgaaggagattgtgcgtcagacgccggaactgcgggaggcggtatacagcctgattaaccgggatgtggaaagg

SEQ ID NO: 5329 - DNA, 75 bp, synthetic construct
  source 1..75: mol_type = other DNA
gaaaatatgaaccctacctgctgaatgacaattccatactctccagaattgcccttcttaaactcggtattttcg

SEQ ID NO: 5330 - DNA, 75 bp, synthetic construct
  source 1..75: mol_type = other DNA
gcggatatggactgcgctgtgaaaaactcgacaagcctctgaatcttggctgggggctggacaatagcgcggtgt

SEQ ID NO: 5331 - DNA, 75 bp, synthetic construct
  source 1..75: mol_type = other DNA
ggcagcggtaagccggtgagtgtggacatcaccgcacaccccgcgccggaccggatacaggtcagtaccctgcct

SEQ ID NO: 5332 - DNA, 75 bp, synthetic construct
  source 1..75: mol_type = other DNA
ctgctccactatgtgcccgatctgcaccgtaagatgctgctggccaccctctggaatacgggcgcccgcattaac

SEQ ID NO: 5333 - DNA, 75 bp, synthetic construct
  source 1..75: mol_type = other DNA
atgagtaaaatatttatttgcgccgccattcctgacgaacaggcaataaaaaacgagggcgctgttgctgtggcc

SEQ ID NO: 5334 - DNA, 75 bp, synthetic construct
  source 1..75: mol_type = other DNA
gctctgcactggcacgtgccgaagaaaagatcgaagaagatgaacgggaaatagaacatctgcgggctcagatag

SEQ ID NO: 5335 - DNA, 75 bp, synthetic construct
  source 1..75: mol_type = other DNA
cgttttggctaccgtcgtatttggcagttgctgcgccgtgaagggcttcatgttaatcataagcgcgtgtaccgg

SEQ ID NO: 5336 - DNA, 75 bp, synthetic construct
  source 1..75: mol_type = other DNA
ttttcttattctgtctcccggcgactgccgccgtaaacagtaacacactggatagctgctttattcaggcaggaa

SEQ ID NO: 5337 - DNA, 75 bp, synthetic construct
  source 1..75: mol_type = other DNA
tccgaccagcagtcaaccagtacgccaccaccgttaacaacccttaccggcatacgttgcagtaccgcacatatc

SEQ ID NO: 5338 - DNA, 75 bp, synthetic construct
  source 1..75: mol_type = other DNA
ttattcactccgcgtggtcgataaatccgaccagcagtcaaccagtacgccaccaccgttaacaacccttaccgg

SEQ ID NO: 5339 - DNA, 75 bp, synthetic construct
  source 1..75: mol_type = other DNA
gcgtattaaaaacgataacgtgaactcagcctttttccagaccagtgttcgtgtctggcctcagtatggccgtgt

SEQ ID NO: 5340 - DNA, 75 bp, synthetic construct
  source 1..75: mol_type = other DNA
atggcgacgttacgtgaactgattatcaaaatttcggcaaattcacagtcattccagtcggagatccagcgggcg

SEQ ID NO: 5341 - DNA, 75 bp, synthetic construct
  source 1..75: mol_type = other DNA
cgcaggcacgaaaaaagtggccgggactgggaaatgaggtgacagcccgcctgctgaccgtgacgcgcaaaggaa

SEQ ID NO: 5342 - DNA, 75 bp, synthetic construct
  source 1..75: mol_type = other DNA
ctctgtattgcgacgcgaaaaatgataaaaccagaaaacgcctcggcatcaaaggcggctttttctggacagagg

SEQ ID NO: 5343 - DNA, 75 bp, synthetic construct
  source 1..75: mol_type = other DNA
attgctggaaaggctgggccatattcctccggcagaagcagaaaaagcttattatgcttccatcggaaataatga

SEQ ID NO: 5344 - DNA, 75 bp, synthetic construct
  source 1..75: mol_type = other DNA
ccgacactggcaccgccgctgttgcgccagttcgcttcggtcggcaataacctgaatcagatagcccggaagata

SEQ ID NO: 5345 - DNA, 75 bp, synthetic construct
  source 1..75: mol_type = other DNA
gggaacgaataatacccaaatcgcaagcacggctttcgttatggctgcgattgccgcccttgtagattcgtcacc

SEQ ID NO: 5346 - DNA, 75 bp, synthetic construct
  source 1..75: mol_type = other DNA
ggagagttggaggacgtcgcccgaaactgacgaaggagcagcatgagcagatcgcaagattgctccagaaagggt

SEQ ID NO: 5347 - DNA, 75 bp, synthetic construct
  source 1..75: mol_type = other DNA
ccacaaaagccagtgacaggtcgttctggctggaggtcaaggggcattcaatgaccgcaccgcagggtggtaaac

SEQ ID NO: 5348 - DNA, 75 bp, synthetic construct
  source 1..75: mol_type = other DNA
gtcggggagattgcgcagaatacttacctttcacgcgaacgctgccagttaatactgacccagcttgttatggcg

SEQ ID NO: 5349 - DNA, 75 bp, synthetic construct
  source 1..75: mol_type = other DNA
ctaaaaaggtgaaaaccggcagttcatccagtaagtctgtattgacctggcttgctgatatgtgcggtgccgatt

SEQ ID NO: 5350 - DNA, 75 bp, synthetic construct
  source 1..75: mol_type = other DNA
tcgacgattgctgggaaggctgggccatactcctccggcagaagcagaaaaagcttattatgcttccatcggaaa

SEQ ID NO: 5351 - DNA, 75 bp, synthetic construct
  source 1..75: mol_type = other DNA
caaagtgcgaaatctgtcgctcagttaactagcgctctgagcgaactggcaaaacagttttgggaaaaacgagga

SEQ ID NO: 5352 - DNA, 75 bp, synthetic construct
  source 1..75: mol_type = other DNA
aaatatcaccctgggcgttcaggccggttatgcccacagcgtcagcggcagcagcgctgaaggctataacggtca

SEQ ID NO: 5353 - DNA, 75 bp, synthetic construct
  source 1..75: mol_type = other DNA
acggagtcgcatattgtctttattgatggcaacggtaaacatgaggaaggaaagctcccctcaagcgaatggcgt

SEQ ID NO: 5354 - DNA, 75 bp, synthetic construct
  source 1..75: mol_type = other DNA
ggcgcgccgattaacgccggtgattttgccgagcaaattaaccatatccgtaattcgtcaccgcgtctgtatggc

SEQ ID NO: 5355 - DNA, 75 bp, synthetic construct
  source 1..75: mol_type = other DNA
atgtgggcggtggataaaccgctgaatccgtcgctggcccgcgacattatcgagggtatccgcgccaaaatgcgc

SEQ ID NO: 5356 - DNA, 75 bp, synthetic construct
  source 1..75: mol_type = other DNA
atgcaacagctcggcctgaagtctcctgtgcgcctgaagaaataccggtcttaccggggaaatatgggactcgct

SEQ ID NO: 5357 - DNA, 75 bp, synthetic construct
  source 1..75: mol_type = other DNA
atggacgttgagtacggtcagtacagcgtcattctgttggtggaaggattcccgccgtcacatgccgggaccatc

SEQ ID NO: 5358 - DNA, 75 bp, synthetic construct
  source 1..75: mol_type = other DNA
aagggcgacgatgattacctgaagtggctggaccagtgtctggcgcagttctggcgggtgctgaaacctgccgga

SEQ ID NO: 5359 - DNA, 75 bp, synthetic construct
  source 1..75: mol_type = other DNA
tctacagcgcaggagagttgttgcaggaactacgtaaagccagagcgcagttgaaactgaatgagctgctactga

SEQ ID NO: 5360 - DNA, 75 bp, synthetic construct
  source 1..75: mol_type = other DNA
ggttcattgagaatgtgtacgctaatcagattgcctttggcaggctctaccgggaaaaactgaaagagcaggttg

SEQ ID NO: 5361 - DNA, 75 bp, synthetic construct
  source 1..75: mol_type = other DNA
cgcgaaaacgaaaggccgtggacgtaaggccgcgcagccggagcctcagcagccgtctgaacccgcgtatgactt

SEQ ID NO: 5362 - DNA, 75 bp, synthetic construct
  source 1..75: mol_type = other DNA
acatgctgacggtgatcatgcagcgcctgacggcactggagcagtccggtgagatgggccggaaaatggatgcct

SEQ ID NO: 5363 - DNA, 75 bp, synthetic construct
  source 1..75: mol_type = other DNA
atgaaaatcaaacatgagcacatccgcatggcgatgaatgcctgggcataccctgatggtgagaaagttcctgca

SEQ ID NO: 5364 - DNA, 75 bp, synthetic construct
  source 1..75: mol_type = other DNA
gagagtttttcgatattgtccgcaatggtgatgaatttttcgaaacacagagtcgcaatgtaaccgactggatgc

SEQ ID NO: 5365 - DNA, 75 bp, synthetic construct
  source 1..75: mol_type = other DNA
cgtctggtacaggcactggccctggttgatatccgggtaccggaccatctgatagtcggtggcagccaggttttc

SEQ ID NO: 5366 - DNA, 75 bp, synthetic construct
  source 1..75: mol_type = other DNA
acaggctggtatggaatcacattacgggcaccctggtggtggcttccgaactggcgcgctcacggggaaaacgca

SEQ ID NO: 5367 - DNA, 75 bp, synthetic construct
  source 1..75: mol_type = other DNA
catgaatgcagattaccaaatcacctggctgtaagtaaccacagagaactttacctgactgtggggggcgagttg

SEQ ID NO: 5368 - DNA, 75 bp, synthetic construct
  source 1..75: mol_type = other DNA
gaaaaaatgtggcctgggtacagtcggaggtcagtgcatggatggcggcgcgaattgctgcccgcgagcaaggag

SEQ ID NO: 5369 - DNA, 75 bp, synthetic construct
  source 1..75: mol_type = other DNA
gtgaacacggcagcggaagccatccgtgccctgtcgttacaggtgccgggctttcgccgtcagatgaacgaaggc

SEQ ID NO: 5370 - DNA, 75 bp, synthetic construct
  source 1..75: mol_type = other DNA
tacaaaaactggaacaccagtctggcaagttggccgactgggtcagggagttgttgtgtcggaaaagcaactttg

SEQ ID NO: 5371 - DNA, 75 bp, synthetic construct
  source 1..75: mol_type = other DNA
caagcaaatctcctccgtggatgaactgacgaaattaacgacagaaatcgccagctattgcgctgatgaatttaa

SEQ ID NO: 5372 - DNA, 75 bp, synthetic construct
  source 1..75: mol_type = other DNA
tgaacgcctgacacgccagacgctgtatcgcgccaatcgcctgtttatggaggcgtataccgaaattctggaact

SEQ ID NO: 5373 - DNA, 75 bp, synthetic construct
  source 1..75: mol_type = other DNA
actttatggcacgcaagttggaagagttggggcattccccaaagctgatatcaccacaatttgtccgcccgttcg

SEQ ID NO: 5374 - DNA, 75 bp, synthetic construct
  source 1..75: mol_type = other DNA
gcacggggaatcagggatgcaattaatgctaaacttgatgatccgcaaaaatggaaaaggaaaaaatgcaggttg

SEQ ID NO: 5375 - DNA, 75 bp, synthetic construct
  source 1..75: mol_type = other DNA
atacgtctgacgggtgctttaatattggtgttctgctcagtaacagggatttcaccgaggatgcaatcaatatga

SEQ ID NO: 5376 - DNA, 75 bp, synthetic construct
  source 1..75: mol_type = other DNA
tgattgataagagcgatttcacgaaagcatctggcgttgctaccgatgatatcgttgctgtaggtatggtttacc

SEQ ID NO: 5377 - DNA, 75 bp, synthetic construct
  source 1..75: mol_type = other DNA
gtgaaacacgatacgcgtgaagcggaagatgtgctggatgtggcggtggccattgcggaggcagacggcgaaatt

SEQ ID NO: 5378 - DNA, 75 bp, synthetic construct
  source 1..75: mol_type = other DNA
gcagcgccacgacggcatccacgaaggcgacagaggcagctggcagtgcgacggcggcagctcagagcaaaagta

SEQ ID NO: 5379 - DNA, 75 bp, synthetic construct
  source 1..75: mol_type = other DNA
tcgatataaaccattccatagtaagtcaatatctggaaattcagcataagctgacaagaactcatctgactgacg

SEQ ID NO: 5380 - DNA, 75 bp, synthetic construct
  source 1..75: mol_type = other DNA
tgattttttcactgttatgctcacttccttccgcacaggcatccccacaggacaaacaatatgatcgttgtttta

SEQ ID NO: 5381 - DNA, 75 bp, synthetic construct
  source 1..75: mol_type = other DNA
atgcctgtaccaaatccagcaataccggtgaaaggtgccggaaccaccctgtgggtttataacgggagcggcgac

SEQ ID NO: 5382 - DNA, 75 bp, synthetic construct
  source 1..75: mol_type = other DNA
aagggcgaaattattgcgggtcacggtcgtgttatggcggctgaaatgctcaaaatggattctgttccggtcatt

SEQ ID NO: 5383 - DNA, 75 bp, synthetic construct
  source 1..75: mol_type = other DNA
ctgattttacttacgtcagcacatggcggggcttcgtctatgtggcgttcatcattgatgtgtttgccggataca

SEQ ID NO: 5384 - DNA, 75 bp, synthetic construct
  source 1..75: mol_type = other DNA
ccgcatgcaggatggcagtaataagcatcgtcccggctacgacctgaccttctccgcccccaaaagtgtctccat

SEQ ID NO: 5385 - DNA, 75 bp, synthetic construct
  source 1..75: mol_type = other DNA
aaggcaaagcgtaacagcaccacggtactggtgaacacggtggcctctgaaaatccggatgaagccgggcgttac

SEQ ID NO: 5386 - DNA, 75 bp, synthetic construct
  source 1..75: mol_type = other DNA
cgctgaccagcgatgcaccgtcagggaaggaaggtgccgcattcatggcgctgatggcagaacactctcgttttg

SEQ ID NO: 5387 - DNA, 75 bp, synthetic construct
  source 1..75: mol_type = other DNA
ctattaccccggaacaaattgaaatccgtgagctcaggaaaaagctacaacgtattgaaatggaaaatgaaatat

SEQ ID NO: 5388 - DNA, 75 bp, synthetic construct
  source 1..75: mol_type = other DNA
tattaatgtatcatcatgtcagccattgcccaggactggttacactttctcccgagacattccggaaacaaatga

SEQ ID NO: 5389 - DNA, 75 bp, synthetic construct
  source 1..75: mol_type = other DNA
gcccggaagccgccggtattgccgcctgtctgatgacgtacagccatcatgcctgtcgtacggaatgttatgcca

SEQ ID NO: 5390 - DNA, 75 bp, synthetic construct
  source 1..75: mol_type = other DNA
cggttataaaggccagcctgtcacccgactggcagttatgctgaatttactggtttttattcgttccagtgaact

SEQ ID NO: 5391 - DNA, 75 bp, synthetic construct
  source 1..75: mol_type = other DNA
gcagaccatggtcggtctttcttatttttctgcggcttggattgacatcttttggcggccccattgcgcacttgg

SEQ ID NO: 5392 - DNA, 75 bp, synthetic construct
  source 1..75: mol_type = other DNA
actggttatcccgttttgaaagtattctcaacagtgccctggcgcaacaccgtgccgtctcgttaatccgggtgg

SEQ ID NO: 5393 - DNA, 75 bp, synthetic construct
  source 1..75: mol_type = other DNA
agcaacgcggctatagcgaagatctattgccgaaaacgcaaagccagcggacctggaaaacatttaactatttta

SEQ ID NO: 5394 - DNA, 75 bp, synthetic construct
  source 1..75: mol_type = other DNA
aaggttcaggttgatacaaataataatctgaacagcatgtgggctgtgaagctgcagcagatgcaggacggacgc

SEQ ID NO: 5395 - DNA, 75 bp, synthetic construct
  source 1..75: mol_type = other DNA
atggcaaccgttccgtcttgccatcaatgtgtccgccagccaggttgggccaacgttcgacgacgaggtaaagcg

SEQ ID NO: 5396 - DNA, 75 bp, synthetic construct
  source 1..75: mol_type = other DNA
cagtgactgagcagtccggtcagctgctggggctgggagttggcagcaccattgccggaaccactgacaccaccg

SEQ ID NO: 5397 - DNA, 75 bp, synthetic construct
  source 1..75: mol_type = other DNA
aaataatcagacaccaaaaaaacaaagaccccgcatatccctttcgggagcatttgttgatgcaactctgtattc

SEQ ID NO: 5398 - DNA, 75 bp, synthetic construct
  source 1..75: mol_type = other DNA
ttggtgggggactggctgctatggctttagctgcaggtggcggtggaagcaaacatagacatgaaaatgatgact

SEQ ID NO: 5399 - DNA, 75 bp, synthetic construct
  source 1..75: mol_type = other DNA
cgtctgggcgtttttgtaccgacccttaaatcactgaagaacagtaaaaaaaatacactgtcacgtactgatgcc

SEQ ID NO: 5400 - DNA, 75 bp, synthetic construct
  source 1..75: mol_type = other DNA
agaccgttaatcgcggtgcggtcatgccaggaatgctggtcaaacacaaagatggtacctggactgcatcagcta

SEQ ID NO: 5401 - DNA, 75 bp, synthetic construct
  source 1..75: mol_type = other DNA
acgactatgccgggaccctgaccggcggacgtgtcctgtccattgatgctgccacccgcaccctgacgctggacc

SEQ ID NO: 5402 - DNA, 75 bp, synthetic construct
  source 1..75: mol_type = other DNA
cgagcagtttgatgaaatcaatattgtgcgcggtcagctcgttcctggggggcggctgggcgtgaagatttacaa

SEQ ID NO: 5403 - DNA, 75 bp, synthetic construct
  source 1..75: mol_type = other DNA
ataatccgacatttaccggagaaccaaaagcgccgacgcctgccgcaggaaataacaccacgcggattgcgacca

SEQ ID NO: 5404 - DNA, 75 bp, synthetic construct
  source 1..75: mol_type = other DNA
gtaaggcactgagattaccgaagcctgttgtgccgtctgtcacccgggaaagtgaccttgtgccttcggttcctg

SEQ ID NO: 5405 - DNA, 75 bp, synthetic construct
  source 1..75: mol_type = other DNA
tcgcggcattgagcgcacttatacccgtgacttgctcgtggaagtttttctcgacggacgcggcaacggtctgaa

SEQ ID NO: 5406 - DNA, 75 bp, synthetic construct
  source 1..75: mol_type = other DNA
ttccgggtgacggatgaaccaacccggcgctggctggatgaatttttatcctggcatggtggttaccgtgccttt

SEQ ID NO: 5407 - DNA, 75 bp, synthetic construct
  source 1..75: mol_type = other DNA
ggacggtgagggtggtgtgccgggagtggagcgtcacggataacgcccggtacagtgatttcagctgtacgattg

SEQ ID NO: 5408 - DNA, 75 bp, synthetic construct
  source 1..75: mol_type = other DNA
cggcaccagctgctccggtgctcccggttccggctcagcaggagcgcttcatacgattacctgaagtgatgcacc

SEQ ID NO: 5409 - DNA, 75 bp, synthetic construct
  source 1..75: mol_type = other DNA
atggctaacgcctggctcagattatggcatgacatgccaaatgaccctaagtggcgaacaattgccagggtgtca

SEQ ID NO: 5410 - DNA, 75 bp, synthetic construct
  source 1..75: mol_type = other DNA
ccatctcagtaatacgggaatacattgagattttctacaatcgtcagcgtcgtcactctcgtctggggaatatct

SEQ ID NO: 5411 - DNA, 75 bp, synthetic construct
  source 1..75: mol_type = other DNA
gcgacaggctgccggtcttccgcgtccggtctggataaaggacgcgtttcaacagcagatccgacagacaacggg

SEQ ID NO: 5412 - DNA, 75 bp, synthetic construct
  source 1..75: mol_type = other DNA
ctttagatggaactgcaagctcaacgtttacattaactgacggaaccaacaaaattccatttcaggcggtttact

SEQ ID NO: 5413 - DNA, 75 bp, synthetic construct
  source 1..75: mol_type = other DNA
ttgcgtatggctgaaaagacgacttttttattatacaacaccgtttttttcatcgttgctggcccttcataaggg

SEQ ID NO: 5414 - DNA, 75 bp, synthetic construct
  source 1..75: mol_type = other DNA
gctgacagccatgacggcctcgtttgtgctggctacaccgaccgagacggacggggcgctgtttcccggtcgcat

SEQ ID NO: 5415 - DNA, 75 bp, synthetic construct
  source 1..75: mol_type = other DNA
atatgccgcaccccgcagtaagcccatcagcagggaaaaagcgtggggaaatatccagaaaatgaaaaccatgat

SEQ ID NO: 5416 - DNA, 75 bp, synthetic construct
  source 1..75: mol_type = other DNA
tcaattgccctggtcagtccggttgagttttcgacatcatcatggcgacgcgccgttctgtctcttgaagaacat

SEQ ID NO: 5417 - DNA, 75 bp, synthetic construct
  source 1..75: mol_type = other DNA
cgaccaataaattgcctgatttacgcggtgaatttattcgtggctgggatgacggtcgcgggattgatactggtc

SEQ ID NO: 5418 - DNA, 75 bp, synthetic construct
  source 1..75: mol_type = other DNA
gcgcagtatgcggcatctcgttacgctgatagaagagctgcgccagcgtggcgtgaatttccgaagcctgactga

SEQ ID NO: 5419 - DNA, 75 bp, synthetic construct
  source 1..75: mol_type = other DNA
atgcgaaccagatacgccgtgaccgccccttaactcgcgaagaactgatgcaggtcgtccccagcgtattcgggg

SEQ ID NO: 5420 - DNA, 75 bp, synthetic construct
  source 1..75: mol_type = other DNA
taatcaggttgttatcagactgcagaaagctgaagggtttattgacggttgtctggcaatgttgggggtatcttt

SEQ ID NO: 5421 - DNA, 75 bp, synthetic construct
  source 1..75: mol_type = other DNA
aacgggggcgcagtggcaaacctgcaggtggccacgtcagaaagctggcgtgacaaacagacgggggagatgcgg

SEQ ID NO: 5422 - DNA, 75 bp, synthetic construct
  source 1..75: mol_type = other DNA
accaccaccgcgctgcgggcccgcacagaggacgcatttattgcccgttaccgtccgatgtatatcaggcagaca

SEQ ID NO: 5423 - DNA, 75 bp, synthetic construct
  source 1..75: mol_type = other DNA
ccccgtgtcttcggctggatggaccgtctgtgcgaagactactgcggtggtatctggaatctgtacaccctgaac

SEQ ID NO: 5424 - DNA, 75 bp, synthetic construct
  source 1..75: mol_type = other DNA
gagaagttgcgtgaaagaattgatgagacgctttctgagaaaattgtacagaaatgcagaaatatgaatggtgaa

SEQ ID NO: 5425 - DNA, 75 bp, synthetic construct
  source 1..75: mol_type = other DNA
gaaattgatacgtatagaaatacagctagccgaaggatttattgatggctgcctttccatgctagatctaacatt

SEQ ID NO: 5426 - DNA, 75 bp, synthetic construct
  source 1..75: mol_type = other DNA
tccggtgatgatttaattctgcgtaaaaaggaagaagatactgaggtccggatagagggattctgggaagaatgc

SEQ ID NO: 5427 - DNA, 75 bp, synthetic construct
  source 1..75: mol_type = other DNA
cgtcagttgcgggtggaaaaaattctgaatcgctctggcatccagccattgcaccgcaaatgctcgttttcgaat

SEQ ID NO: 5428 - DNA, 75 bp, synthetic construct
  source 1..75: mol_type = other DNA
tgaacccgaacagatgattgaaaatgccagaatgacgttatccctcatggtgcaacccggtctttttgaccgata

SEQ ID NO: 5429 - DNA, 75 bp, synthetic construct
  source 1..75: mol_type = other DNA
cgccagtactggcgcgaaggaaaactacgtcctccttcaacaacagaaaacaacgtgcctgagctgctcccgata

SEQ ID NO: 5430 - DNA, 75 bp, synthetic construct
  source 1..75: mol_type = other DNA
caattttggacaaagctacattaccggtattgcaaagaacagcaaaacatcccgtctggaagccctgacctgtag

SEQ ID NO: 5431 - DNA, 75 bp, synthetic construct
  source 1..75: mol_type = other DNA
catctgcccgtatccgcaccagtcgtccggaaaatgattcaaacactgtacgacaaaagtattaccagtgtaata

SEQ ID NO: 5432 - DNA, 75 bp, synthetic construct
  source 1..75: mol_type = other DNA
gcccctgcagaagtctccagtgttggagctgtaaatggcgcttatcaagaaggggggcgttttacagccttttat

SEQ ID NO: 5433 - DNA, 75 bp, synthetic construct
  source 1..75: mol_type = other DNA
ggggagtctgctgtttggtctgctgacgtacctgacgaacctgtatttcaaaatcagagaggaccggcgtaaggc

SEQ ID NO: 5434 - DNA, 75 bp, synthetic construct
  source 1..75: mol_type = other DNA
atcacgcacaggcccgggaacgcatcgataccgattatcagcgcctcaaaaaactcatctggtcggagggtgaca

SEQ ID NO: 5435 - DNA, 75 bp, synthetic construct
  source 1..75: mol_type = other DNA
ggagtgtggcggtgagctggattatctgggggaagtcagcgcagaacaactggaactggtgagcagcgccctgaa

SEQ ID NO: 5436 - DNA, 75 bp, synthetic construct
  source 1..75: mol_type = other DNA
ccactgagcgcagttttgacgggcgaatgactgtcactttgaccggccagcacaacgacaccggccagccacttt

SEQ ID NO: 5437 - DNA, 75 bp, synthetic construct
  source 1..75: mol_type = other DNA
tatcatcatgttggcaggggggctggcgatcctcaaactgccggtggcgcaatatcctacgattgcaccgccggc

SEQ ID NO: 5438 - DNA, 75 bp, synthetic construct
  source 1..75: mol_type = other DNA
gacgctcaccggtacgctgatttttggggaagacagcgagattacccccctgccggcgcgtaccactgaccgcga

SEQ ID NO: 5439 - DNA, 75 bp, synthetic construct
  source 1..75: mol_type = other DNA
gggaaaagtgctgcccgcgttgtggtaccggggtatacagcagggataggggggctgcaggagggcaactggaag

SEQ ID NO: 5440 - DNA, 75 bp, synthetic construct
  source 1..75: mol_type = other DNA
ctggtcaagctgttcagcggcgcgaagcacaagcatcagcagcagttccagaagcagggcaaggcgatcaacgac

SEQ ID NO: 5441 - DNA, 75 bp, synthetic construct
  source 1..75: mol_type = other DNA
atgctgagcagagaggacttttacatgataaagcaaatgcgccagcagggcgcgtacattgtcgatattgcgact

SEQ ID NO: 5442 - DNA, 75 bp, synthetic construct
  source 1..75: mol_type = other DNA
gccgcgaagaagtcagccagcgatgccggcacatcagcccgtgaggcggcaacccatgcgactgatgctgcaggc

SEQ ID NO: 5443 - DNA, 75 bp, synthetic construct
  source 1..75: mol_type = other DNA
atctgaagaaaccatctgtggttgatcctgaccttatctggtcattaccagacggagaaatacgccgctacgaca

SEQ ID NO: 5444 - DNA, 75 bp, synthetic construct
  source 1..75: mol_type = other DNA
ggtaagcgaagtggatattgtttgcacacttcctctgacagagtattacgacaggaataaccaacccaatacgga

SEQ ID NO: 5445 - DNA, 75 bp, synthetic construct
  source 1..75: mol_type = other DNA
cgctgaccagcgatgcgccgtcagggaaggaaggtgccgcattcatggcgctgatggcagaaaaagcccgtcttg

SEQ ID NO: 5446 - DNA, 75 bp, synthetic construct
  source 1..75: mol_type = other DNA
tgcgcaagctcggcagctacccgcgccagaacggactggccgtggccctgcgcgagctgggccggatcgagcgca

SEQ ID NO: 5447 - DNA, 75 bp, synthetic construct
  source 1..75: mol_type = other DNA
aaggaagcagcccgtcattatttgtgcggacggatacggttcgtgctgtgcggcgtggtgacacgctgaccatta

SEQ ID NO: 5448 - DNA, 75 bp, synthetic construct
  source 1..75: mol_type = other DNA
ttgacagtttcagaaggatgtttgtttgtattatgttgtcatcagcatggtccggagtgatgtggttttttataa

SEQ ID NO: 5449 - DNA, 75 bp, synthetic construct
  source 1..75: mol_type = other DNA
ggcattatcgccagagcattaacacagcccatgcttatgcgtattaagaccaatataaataactggttgaatgaa

SEQ ID NO: 5450 - DNA, 75 bp, synthetic construct
  source 1..75: mol_type = other DNA
tgcatcagggaataaccagtctcaactggttgccaccatagtccctgatgaacagcgcatcagcttctggccgca

SEQ ID NO: 5451 - DNA, 75 bp, synthetic construct
  source 1..75: mol_type = other DNA
aaaagcggaacagacctggctgcacatatcgcggcagttgacccgcatacccagtacgcgacgaaagccagtccg

SEQ ID NO: 5452 - DNA, 75 bp, synthetic construct
  source 1..75: mol_type = other DNA
tctgttcgtgacaaagccagcgacaaggacaaggagcgggtgctgaaaaaccagaatatcatatgggaggcgctg

SEQ ID NO: 5453 - DNA, 75 bp, synthetic construct
  source 1..75: mol_type = other DNA
taatctctcaattccggatttttctggtgcagcagcgagtggcgcagctaccgcaataggaggttcttatagtgt

SEQ ID NO: 5454 - DNA, 75 bp, synthetic construct
  source 1..75: mol_type = other DNA
tccggcctgagcgcagtgtccaccacgctatccgcacggtgaaattacagctcacagactgtggtgaaacccggg

SEQ ID NO: 5455 - DNA, 75 bp, synthetic construct
  source 1..75: mol_type = other DNA
aagcgggagataccaccgcagagagcggtgaagttcagcctgaatcaccggtcgccgatgcgactgaacctcaac

SEQ ID NO: 5456 - DNA, 75 bp, synthetic construct
  source 1..75: mol_type = other DNA
atgcaattagccagtcgttttggttatgcgaatcagatacgccgtgaccgtccgctgacacacgaagaactgatg

SEQ ID NO: 5457 - DNA, 75 bp, synthetic construct
  source 1..75: mol_type = other DNA
caaagcagtaatagccagatttattggtgattcaaaaatgtggcttgaagcaaataaagcgatgaaatcagctat

SEQ ID NO: 5458 - DNA, 75 bp, synthetic construct
  source 1..75: mol_type = other DNA
ccgccggaaccgattttcaccggagtttaaatggaggcttgttcagcaaactcttttacccggtgcctgtgtcgc

SEQ ID NO: 5459 - DNA, 75 bp, synthetic construct
  source 1..75: mol_type = other DNA
atggcagaagatcgcagtacggtgacggcggcaaccggtatgactgtgacgcctgccagctcctcggtggtgaaa

SEQ ID NO: 5460 - DNA, 75 bp, synthetic construct
  source 1..75: mol_type = other DNA
aagaccggcacacctcccgcagtgaacggtatgcgtacattcccaccatcaccgtcctggaaaatctgcagcggg

SEQ ID NO: 5461 - DNA, 75 bp, synthetic construct
  source 1..75: mol_type = other DNA
atcatgattgacagctgtgttgcgcgattgcggaaatataagcccgaagagtatgagttggttattgctcatttt

SEQ ID NO: 5462 - DNA, 75 bp, synthetic construct
  source 1..75: mol_type = other DNA
gcgggaagttcaattaccgactcgctacgaccttcgatatggacacccgataaatgcagatgagcgacatgtcat

SEQ ID NO: 5463 - DNA, 75 bp, synthetic construct
  source 1..75: mol_type = other DNA
accgtgaatggggaattaccagcgaaaatgaacaccggtttatggtctttggaaaggtcttaatcagccagtcac

SEQ ID NO: 5464 - DNA, 75 bp, synthetic construct
  source 1..75: mol_type = other DNA
tcaggcccaccgtgccgggctgtgggtgataaagaccggactgctggaaacgcagacggtggatttcacgctcgg

SEQ ID NO: 5465 - DNA, 75 bp, synthetic construct
  source 1..75: mol_type = other DNA
atgttatcgccgcctgccctgcgggcggcgatacagggagaacgcttaatcatgaacaaaacgctgaatgcactg

SEQ ID NO: 5466 - DNA, 75 bp, synthetic construct
  source 1..75: mol_type = other DNA
gagaacgcccgcctgatggatgagaccgtcacggccattgaacgggcagagcaggaaaaaaatgcgctggcgcag

SEQ ID NO: 5467 - DNA, 75 bp, synthetic construct
  source 1..75: mol_type = other DNA
agctaggcggaggcagggacaacgccagaacgttgcatcgtaccagtggaagaagcctgacagactgcggcgata

SEQ ID NO: 5468 - DNA, 75 bp, synthetic construct
  source 1..75: mol_type = other DNA
gaatatttcgcccgcaaaaacggtacatactcaggttcacaacaaaatactggtgcatctgacacgaccgcacaa

SEQ ID NO: 5469 - DNA, 75 bp, synthetic construct
  source 1..75: mol_type = other DNA
ggcttttttattctcggcttgtctacctttagtattatgctggcaattatcctcagcgcctttttcattgccgcg

SEQ ID NO: 5470 - DNA, 75 bp, synthetic construct
  source 1..75: mol_type = other DNA
gtggctggattatctggacgcactggaactggttgatacctccagtgctccagatattgaatggcctacgcctcc

SEQ ID NO: 5471 - DNA, 75 bp, synthetic construct
  source 1..75: mol_type = other DNA
aaatctgcccgtgttggctatacaaagatgttgctgggggtggtcgggtattttattgagcataaatcccgaaac

SEQ ID NO: 5472 - DNA, 75 bp, synthetic construct
  source 1..75: mol_type = other DNA
tggcagatgaggaaggtattacccaggcgcagatgcttgaaaaactgattgaatcagagctgaaacgcagagcga

SEQ ID NO: 5473 - DNA, 75 bp, synthetic construct
  source 1..75: mol_type = other DNA
tcctttcatgcggtgtttgcatgtatttcgctgatatcccaggatatcgccaaaatgcggctgcgtcttatgcag

SEQ ID NO: 5474 - DNA, 75 bp, synthetic construct
  source 1..75: mol_type = other DNA
cattatctggatcacccacagttcactgtgcgagttccggttccggatagcgggcgcggagattgcggcgttctt

SEQ ID NO: 5475 - DNA, 75 bp, synthetic construct
  source 1..75: mol_type = other DNA
atgggagcactccctaataggaaatacgcggtcgttactcgctcagcctggacggccgataatgacaacgtaata

SEQ ID NO: 5476 - DNA, 75 bp, synthetic construct
  source 1..75: mol_type = other DNA
cttcctcaccgaaacgcatttacagaaaaggtaatccgttaaccggagccgagaaacaacgtatatctgtttccc

SEQ ID NO: 5477 - DNA, 75 bp, synthetic construct
  source 1..75: mol_type = other DNA
catagctgacgaactgatgaccgggtgcacgaattttgtgttcagcggtaaaaccggcaccgggaaaaatcacct

SEQ ID NO: 5478 - DNA, 75 bp, synthetic construct
  source 1..75: mol_type = other DNA
cgatcctgcctgtcctaactgcagacttctggagccggccttaaaacgcctggccagcgacttcaatgtcgttat

SEQ ID NO: 5479 - DNA, 75 bp, synthetic construct
  source 1..75: mol_type = other DNA
acgacgccgttgcccggttcagttttccggcctggatgttacagcttctgcgtaaagcccgggaccgcattatcc

SEQ ID NO: 5480 - DNA, 75 bp, synthetic construct
  source 1..75: mol_type = other DNA
tgaaagacggtgcaggaaaaccgatacagaactgcaccattcagctcaaagcaaaacgtaacagcaccacggttg

SEQ ID NO: 5481 - DNA, 75 bp, synthetic construct
  source 1..75: mol_type = other DNA
ataaagacgtcattgcaattgatggaaaaacgctccggcactcttatgacaagagtcgtcgcaggggagcgattc

SEQ ID NO: 5482 - DNA, 75 bp, synthetic construct
  source 1..75: mol_type = other DNA
gcgtcgacgggctattgatgcgctgctgcaggggctgtgttttcactatgacccgctggccaaccgcgtccagtg

SEQ ID NO: 5483 - DNA, 75 bp, synthetic construct
  source 1..75: mol_type = other DNA
gcatgagttcacgcattgatctcgctgatgcgctcaggaaagaatcatcgctcagtgcattcacatttgatggtc

SEQ ID NO: 5484 - DNA, 75 bp, synthetic construct
  source 1..75: mol_type = other DNA
ggcctgaccgtggagcagatgcaaaaccagatggacccggtgtacacgccggcgcgaaaaatccacctgtaccac

SEQ ID NO: 5485 - DNA, 75 bp, synthetic construct
  source 1..75: mol_type = other DNA
gcacggcgcgttcgtggaggacgcattgacggaagccgatgccctggccgctgtcggccaggatgagcgccagga

SEQ ID NO: 5486 - DNA, 75 bp, synthetic construct
  source 1..75: mol_type = other DNA
tatgtgaaaacatggggttgcggaggttttttgaatgagacgaacatttacagcagaggaaaaagcctctgtttt

SEQ ID NO: 5487 - DNA, 75 bp, synthetic construct
  source 1..75: mol_type = other DNA
ggcgcctaaacataatctgtcgcgagtgccggaagagtgaagctatgcagcgtgtactggcgttttatcagggga

SEQ ID NO: 5488 - DNA, 75 bp, synthetic construct
  source 1..75: mol_type = other DNA
ctggtgcagatgctcgaccggctggaaagtgaaatcctggctgaccgggtgagtgaggaaagccgccgctggctg

SEQ ID NO: 5489 - DNA, 75 bp, synthetic construct
  source 1..75: mol_type = other DNA
atgaaacgctgggacaacgatgtacaacttcttggtacagaaatcccgaaaattacatgggaaaagattgagaga

SEQ ID NO: 5490 - DNA, 75 bp, synthetic construct
  source 1..75: mol_type = other DNA
cgattaacatgggagtgtgcattctaatttgggttattggatgtgcaaatgctaaagttcttaaacgatgtatat

SEQ ID NO: 5491 - DNA, 75 bp, synthetic construct
  source 1..75: mol_type = other DNA
agtatgaacataaaatcggtgacctgatttccaggtttaaagatgctggtggggtggtaaatgaagctgacttat

SEQ ID NO: 5492 - DNA, 75 bp, synthetic construct
  source 1..75: mol_type = other DNA
agaccattgatgaacttattgatggcggcgtactgacgcagtatgccatcgccagagaggcgggaatttccgacg

SEQ ID NO: 5493 - DNA, 75 bp, synthetic construct
  source 1..75: mol_type = other DNA
agcagtacggggtcggaccggtatgcagtgaactgcatattgccccgtcaacgtattaccactgtcagcaacagc

SEQ ID NO: 5494 - DNA, 75 bp, synthetic construct
  source 1..75: mol_type = other DNA
gtgagagcactactgacccctgaaattgccccgcgtatggggatcgtattgttcagaccaggttcagagctgatg

SEQ ID NO: 5495 - DNA, 75 bp, synthetic construct
  source 1..75: mol_type = other DNA
tgccttacccgccgacggtgaatacctactggcgacgtcatggcaatacgtatttcatctcggaagccggaaagc

SEQ ID NO: 5496 - DNA, 75 bp, synthetic construct
  source 1..75: mol_type = other DNA
atggcagcagtacaaatatcaggcgtgctgaaagatggtgcgggaaaaccaatacagaactgcaccattcaactg

SEQ ID NO: 5497 - DNA, 75 bp, synthetic construct
  source 1..75: mol_type = other DNA
ctgaaatgcgcgcaagagtagagaatttcaataaactcttcgaagaaatgcttaaagcacgtaaaaacaaatcaa

SEQ ID NO: 5498 - DNA, 75 bp, synthetic construct
  source 1..75: mol_type = other DNA
acgggacatgacgacgttcctgtcactcagtcaggaggtgctgttatccctgctcagtttctgcaccgcgtgcag

SEQ ID NO: 5499 - DNA, 75 bp, synthetic construct
  source 1..75: mol_type = other DNA
acccttacagctattggtcgcgctattatcgctaagggcagtataaaagatgtcctcaattaccttggtttgggg

SEQ ID NO: 5500 - DNA, 75 bp, synthetic construct
  source 1..75: mol_type = other DNA
acaaattaacaatgcatataacacgatacagtcagaaaaagatgatatcgaatcacgcattgaaaaactggagaa

SEQ ID NO: 5501 - DNA, 75 bp, synthetic construct
  source 1..75: mol_type = other DNA
ctcgatgcagctgccgaacagccagaatcgctcgcagaggacccggaaaccctcagtatcagctgtgaggtaacg

SEQ ID NO: 5502 - DNA, 75 bp, synthetic construct
  source 1..75: mol_type = other DNA
tttcacgcgaacgctgtcagttaatactgacccagttggttatggcggggctggcagattaccagttcggctgtt

SEQ ID NO: 5503 - DNA, 75 bp, synthetic construct
  source 1..75: mol_type = other DNA
acgggactggaatcgcttcctggacagtcattaccggcggggctggaatgtcaacgtatcccgggtgatggataa

SEQ ID NO: 5504 - DNA, 75 bp, synthetic construct
  source 1..75: mol_type = other DNA
atgtacggaacatgcgaaacgctctgccgggagctggcagcaaagtatccgggagacacgccgctgatgctggtt

SEQ ID NO: 5505 - DNA, 75 bp, synthetic construct
  source 1..75: mol_type = other DNA
cccggcaggcggcagaaagtgcagccgctgcaaagcagtcagaggaggcgtcctcgtcctcggcctctgcggccg

SEQ ID NO: 5506 - DNA, 75 bp, synthetic construct
  source 1..75: mol_type = other DNA
gggcgtcgctgccgccggatatccggttaagcccgcatctttacctggcgaccaacagcgcacaggggccgtggt

SEQ ID NO: 5507 - DNA, 75 bp, synthetic construct
  source 1..75: mol_type = other DNA
atgaactacccaaccgttgttaacgatatagatttcagagacctaatttttgtagcaaacaacgatccggttaca

SEQ ID NO: 5508 - DNA, 75 bp, synthetic construct
  source 1..75: mol_type = other DNA
cgttttacgattattgcattgaagttactcgcaggaattttgtgaagatttttgaggagggtaaatctcttcagt

SEQ ID NO: 5509 - DNA, 75 bp, synthetic construct
  source 1..75: mol_type = other DNA
ggcgtatgaacataatctgtcgcgagtgccggaagagcgaagttatgcagcggattttggcattttataagggaa

SEQ ID NO: 5510 - DNA, 75 bp, synthetic construct
  source 1..75: mol_type = other DNA
gctggttacttcgtgaaaagggctgtcagtggcctcattccgactggcacagcgagaacatgaccacaatgcgac

SEQ ID NO: 5511 - DNA, 75 bp, synthetic construct
  source 1..75: mol_type = other DNA
gatttaccatgcgagaacacgtgctgcctataactctctttatgacctgatgtacagggctggagttcctcttcg

SEQ ID NO: 5512 - DNA, 75 bp, synthetic construct
  source 1..75: mol_type = other DNA
gtttgtcgcaacagctggtggtcagcgtcgctgaacacctgttgttacggcatgaatgcagattaccaaatcacc

SEQ ID NO: 5513 - DNA, 75 bp, synthetic construct
  source 1..75: mol_type = other DNA
ctgacaaaaagcattggtggtaaaagcgcacgggactgggcgatgaaacaggattttcgctgcggatgctggctc

SEQ ID NO: 5514 - DNA, 75 bp, synthetic construct
  source 1..75: mol_type = other DNA
aggaaaccagaactggttgacaggctaaatgacataattgccaggcactatccaaatgtattagcagacaggtaa

SEQ ID NO: 5515 - DNA, 75 bp, synthetic construct
  source 1..75: mol_type = other DNA
gaaactaacgcaaagtccagccagacggcagcgaagaccagcgaaacgaatgccaaagccagtgaaactgcggcg

SEQ ID NO: 5516 - DNA, 75 bp, synthetic construct
  source 1..75: mol_type = other DNA
tttctgccgattttccggcggcggtggcactggctgaggcctgcccggcacttgttgacgcggcactggcagacg

SEQ ID NO: 5517 - DNA, 75 bp, synthetic construct
  source 1..75: mol_type = other DNA
gctgacattctgacaccacgacgcagggaggattacggtcaggacctgtggagcgcatatcagaccatccaggag

SEQ ID NO: 5518 - DNA, 75 bp, synthetic construct
  source 1..75: mol_type = other DNA
aacgcagacggcgtaccacacaggaaaagatcgcaattgttcagcagagctttgaaccggggatgacggtctctc

SEQ ID NO: 5519 - DNA, 75 bp, synthetic construct
  source 1..75: mol_type = other DNA
cttagtattgcgtcggactatgcggaatatgtggcagagacgcgttacagaagaaaattcacggaggatgtaagc

SEQ ID NO: 5520 - DNA, 75 bp, synthetic construct
  source 1..75: mol_type = other DNA
gggctgccgggatgttccctcctggcgacgtatttgtaagactctcataaagaatgatttctggtgccgaacgct

SEQ ID NO: 5521 - DNA, 75 bp, synthetic construct
  source 1..75: mol_type = other DNA
ttcgcgccgaagtggcggaggtggccaatgccatgtgcgacctgcgtacaaccatgaatgagatggagcggcggt

SEQ ID NO: 5522 - DNA, 75 bp, synthetic construct
  source 1..75: mol_type = other DNA
agcatcgacacggacattaagctcaatcgcgcattgtgggtaatgacagaaacgctgctggagaacatgcgctga

SEQ ID NO: 5523 - DNA, 75 bp, synthetic construct
  source 1..75: mol_type = other DNA
aatggcgagcgtaactcccagaagtcactggcagaatggattgaagactgggccgactaccttgtgggctttgat

SEQ ID NO: 5524 - DNA, 75 bp, synthetic construct
  source 1..75: mol_type = other DNA
ctggatttactgtatgaacaaaacagagttgtaccggttattgagggaaaaacgttgtgtgtcgcacctaacttt

SEQ ID NO: 5525 - DNA, 75 bp, synthetic construct
  source 1..75: mol_type = other DNA
ccttgagctttttaatgcattgcctgaatcagaacaggatgctcagctcaccgagatgcgcgcccgagtaaaaaa

SEQ ID NO: 5526 - DNA, 75 bp, synthetic construct
  source 1..75: mol_type = other DNA
actgaacggcaagggcagtgctgcccgtccgacactgacggtttctaacctgcacggcatggtcaccgggatggc

SEQ ID NO: 5527 - DNA, 75 bp, synthetic construct
  source 1..75: mol_type = other DNA
cgcagcggctggtatacgtggtgtcagcggcggacaaggataagcacgcgtcagcagttccgccaacactgcgac

SEQ ID NO: 5528 - DNA, 75 bp, synthetic construct
  source 1..75: mol_type = other DNA
tactggcatcgacccagcatcactttaagttcgatccgctgtttctgcgcctgtttttccgtgaaacctatcctt

SEQ ID NO: 5529 - DNA, 75 bp, synthetic construct
  source 1..75: mol_type = other DNA
catcaatgcccggaaactttactgttaaagtttccggtggtacagcggcatttcttgaggctccctttcctccgg

SEQ ID NO: 5530 - DNA, 75 bp, synthetic construct
  source 1..75: mol_type = other DNA
acagtgaacgtgaatcatttaattcagcagcagaccaccggttagcggaattaatcaccggaaagttatatgaca

SEQ ID NO: 5531 - DNA, 75 bp, synthetic construct
  source 1..75: mol_type = other DNA
tgccaaacgtgaaggtggtgcacagacagaagttgcgtgctgggtccatgcccggcgaaaaatacacgatgtatg

SEQ ID NO: 5532 - DNA, 75 bp, synthetic construct
  source 1..75: mol_type = other DNA
caactggcaggggatcgttgagtcgctgacgctgccgaaattcacccgcaaatatgagaagtatcgcggcggcgg

SEQ ID NO: 5533 - DNA, 75 bp, synthetic construct
  source 1..75: mol_type = other DNA
atgatattttaacgcttgatggctctgtcagtatatcaggagatatgtcaaaacaggacggtgctcttatcttcc

SEQ ID NO: 5534 - DNA, 75 bp, synthetic construct
  source 1..75: mol_type = other DNA
atgaacgcaaaaatcagatacggcctgtcggctgccgttctggcactgattgccgtcggtgcgcccgcgcctgat

SEQ ID NO: 5535 - DNA, 75 bp, synthetic construct
  source 1..75: mol_type = other DNA
attcgctgttaccggacaaccgccacgcggctgattaccaacaattacgcgagcggctcatacaggaactgaatt

SEQ ID NO: 5536 - DNA, 75 bp, synthetic construct
  source 1..75: mol_type = other DNA
gcgcagtatgcggcatcttgtcgtgctggtggaggagttgcgcgaacgaggcatcaactttcgtagtctgacgga

SEQ ID NO: 5537 - DNA, 75 bp, synthetic construct
  source 1..75: mol_type = other DNA
aggacaaaattcacaaacacatactacgtgatcgcttcctgtccagcttcaagcagcctggtcgattccgggctg

SEQ ID NO: 5538 - DNA, 75 bp, synthetic construct
  source 1..75: mol_type = other DNA
gggcgcagcagccgctggtacaaaagtgaagtggagcagtggatgcagcagcgaattgaggaatcacgaggagca

SEQ ID NO: 5539 - DNA, 75 bp, synthetic construct
  source 1..75: mol_type = other DNA
aaggtcagctaaagcatcgtgaaatctttgatgaaataaagaaaaaagtagataacggtgaatggaaagaaggca

SEQ ID NO: 5540 - DNA, 75 bp, synthetic construct
  source 1..75: mol_type = other DNA
atgaaactttccctgacactggaagccgacagcattaacgtgcaggcactgaacatggggcgcattgtcgttgac

SEQ ID NO: 5541 - DNA, 75 bp, synthetic construct
  source 1..75: mol_type = other DNA
aggatgaagttctcaggttgaaacagattagcgggctgacggagctgtttctggaagaggatttcagtccggcat

SEQ ID NO: 5542 - DNA, 75 bp, synthetic construct
  source 1..75: mol_type = other DNA
gattccataagattgatgagatggttacactggtttcgtaaaaatggctaccgccttacccttcgcgagctgtat

SEQ ID NO: 5543 - DNA, 75 bp, synthetic construct
  source 1..75: mol_type = other DNA
ggattgatgctcaaactctgcgctgcgcggacgagccagtactggctcagacgctgctgatgcagctaaagcagg

SEQ ID NO: 5544 - DNA, 75 bp, synthetic construct
  source 1..75: mol_type = other DNA
atgaaacgtgtcggaataaaggctcaggtcggataccgaagcccgcgggcacgtaaaggcgaggccagtatcgtg

SEQ ID NO: 5545 - DNA, 75 bp, synthetic construct
  source 1..75: mol_type = other DNA
cgtacagagaattatgccatgacggttcattattaccggctgcgggattatgccctgcagcatccggaatgcagc

SEQ ID NO: 5546 - DNA, 75 bp, synthetic construct
  source 1..75: mol_type = other DNA
gccatcggtgcgtgaagtgcgttttggtgacgggtactcacagcgtatggcggcagggctgaatgctgacctgaa

SEQ ID NO: 5547 - DNA, 75 bp, synthetic construct
  source 1..75: mol_type = other DNA
ggcgctgcctctgacgaccgttaatggagtgtctcaggtacagcctgagtgggtatgttgggaggacggggctga

SEQ ID NO: 5548 - DNA, 75 bp, synthetic construct
  source 1..75: mol_type = other DNA
ttcgtgcactgggcgaagaattctccacggtgctggcggatttacagcgcacatttgaggggaagatggccgcgc

SEQ ID NO: 5549 - DNA, 75 bp, synthetic construct
  source 1..75: mol_type = other DNA
aggccaacgaatacatgaacagtaaacaatggcctggtaaagcggcgattggtcgtctgaaaggtgaggaactgg

SEQ ID NO: 5550 - DNA, 75 bp, synthetic construct
  source 1..75: mol_type = other DNA
ccatgatggccagccgtatgcgcagtgcagtggaaagctatgcgaaggcgcataatatcagtaatgagcaggcga

SEQ ID NO: 5551 - DNA, 75 bp, synthetic construct
  source 1..75: mol_type = other DNA
tcgctaagtaactttgcttcagcattggtgcagagcgcattttatggaggttattttttaattgcaataccagca

SEQ ID NO: 5552 - DNA, 75 bp, synthetic construct
  source 1..75: mol_type = other DNA
ttgacggacttcgggggaaaaacgagtatttttagtcatcctgtttacctctttctcaggaagtttagtctccag

SEQ ID NO: 5553 - DNA, 75 bp, synthetic construct
  source 1..75: mol_type = other DNA
ggaattgcactctacaggtatttcaggcctgctcggaattaactcgcagggcaggtaaaacatcgacggttaatt

SEQ ID NO: 5554 - DNA, 75 bp, synthetic construct
  source 1..75: mol_type = other DNA
atgcctgccgggtttacccactttcgactggtaaccagaaacaacatgaaatcattaaccacggaaacagcgctg

SEQ ID NO: 5555 - DNA, 75 bp, synthetic construct
  source 1..75: mol_type = other DNA
atgaaaactgaactgaccctgaatgtattacagaccatgagcgcacaggaatatgaagatatccgggctgccgga

SEQ ID NO: 5556 - DNA, 75 bp, synthetic construct
  source 1..75: mol_type = other DNA
tcaaaaaacttaccgaacagtacaacgtgacttatatcggtatcgactcaaccggcgttggtcacggggtttacg

SEQ ID NO: 5557 - DNA, 75 bp, synthetic construct
  source 1..75: mol_type = other DNA
gcgttgtggcggagaagacgcccggaaagcgtcattgttcatacggaccgtggtggtcaatactgttcaggggat

SEQ ID NO: 5558 - DNA, 75 bp, synthetic construct
  source 1..75: mol_type = other DNA
tccccacgaatcctcgctacccttcaattatgctggatgatctatcttgcatattgggcgtatgctttaaaattc

SEQ ID NO: 5559 - DNA, 75 bp, synthetic construct
  source 1..75: mol_type = other DNA
ggtcgggatattcgccgtagcgccatctttgccgccctgcatgttgagggtgtgcagcgtgtggagctggcttct

SEQ ID NO: 5560 - DNA, 75 bp, synthetic construct
  source 1..75: mol_type = other DNA
acggtatgcgtacattcccaccatcaccgtcctggaaaatctgcagcgggaaggctttcagccgttcttcgcctg

SEQ ID NO: 5561 - DNA, 75 bp, synthetic construct
  source 1..75: mol_type = other DNA
gaatctggctggttgccggcgttactgatatgcgtaaatccttcaacggtctgggagaacaggtacaacatgtgc

SEQ ID NO: 5562 - DNA, 75 bp, synthetic construct
  source 1..75: mol_type = other DNA
gaaatgaaaaccgcaatggtgctcaaggcaaaagacgttatccgccgtggctgtctggaatatgacgtcagcgcc

SEQ ID NO: 5563 - DNA, 75 bp, synthetic construct
  source 1..75: mol_type = other DNA
atgggattgtttacgacccgccagttactcggttataccgaacaaaaagtgaaatttcgtgcgctgtttctggag

SEQ ID NO: 5564 - DNA, 75 bp, synthetic construct
  source 1..75: mol_type = other DNA
gatctggatgcacttaatgaactttctgagcttatctgcgccgcagaatgcggggagcatattgagccgtacaaa

SEQ ID NO: 5565 - DNA, 75 bp, synthetic construct
  source 1..75: mol_type = other DNA
gtggcaacgccggaagccctgcggacgaagagtgtggtacccggtgattatgaagcaacagccacgtttgaatta

SEQ ID NO: 5566 - DNA, 75 bp, synthetic construct
  source 1..75: mol_type = other DNA
ggggtgatcaacgtcttcaggggactgagctgggattacaaaaccaactcaccctgtaaatttggcagtaaaatt

SEQ ID NO: 5567 - DNA, 75 bp, synthetic construct
  source 1..75: mol_type = other DNA
ataagctgatcgccacactcatgaaggcaaaacaggaaaaccggctggaaaaacagctacagcagcttggttatg

SEQ ID NO: 5568 - DNA, 75 bp, synthetic construct
  source 1..75: mol_type = other DNA
gggggaatccgttgagcttgcggatgttggtcgggtgattctgattatgtcctcagatgcaaaaacacacgttga

SEQ ID NO: 5569 - DNA, 75 bp, synthetic construct
  source 1..75: mol_type = other DNA
ctgattttacttacgtcagcacatggcagggggtcgtctatgtggcgttcatcattgatgtgtttgccggataca

SEQ ID NO: 5570 - DNA, 75 bp, synthetic construct
  source 1..75: mol_type = other DNA
gcagacataaaatatgcccgtcagttgactataaaaaagaatgatacacagtatgctctgcgatggctgttcata

SEQ ID NO: 5571 - DNA, 75 bp, synthetic construct
  source 1..75: mol_type = other DNA
tcacattaaaagcaagtcatgttggtgcgtttgccttagggaaaacaggaagcaccgttgcgaatgataaagcag

SEQ ID NO: 5572 - DNA, 75 bp, synthetic construct
  source 1..75: mol_type = other DNA
cttcagcagtccggcggcgaagacggtggcagtgtggtgttcccgccggtgctggtgcagatgctcgaccggctg

SEQ ID NO: 5573 - DNA, 75 bp, synthetic construct
  source 1..75: mol_type = other DNA
gggctaacgagcagtttggacatgcccgtctcggtgatccgcgtcgtacacgacgccttgtgtcactggcctctt

SEQ ID NO: 5574 - DNA, 75 bp, synthetic construct
  source 1..75: mol_type = other DNA
gcagtgagaacaggaagagaattgtaaaattcacggcgagattcacggaggatgaggctgaaatcgtaagagaaa

SEQ ID NO: 5575 - DNA, 75 bp, synthetic construct
  source 1..75: mol_type = other DNA
ggacgcctcgctgaccgcaaaaggttttactcagttaagcagtgcgaccaacagcacgtctgaaacactggccgc

SEQ ID NO: 5576 - DNA, 75 bp, synthetic construct
  source 1..75: mol_type = other DNA
ctcaagtccatcccggtcggcattgcttatgctgtttgggctggcctcggcatcgtacttgtggcagctatcgct

SEQ ID NO: 5577 - DNA, 75 bp, synthetic construct
  source 1..75: mol_type = other DNA
tgtcgccatagactacccagcagcgctggcacttcgccagatggctctcgttcaggacgaactcccgaaatacct

SEQ ID NO: 5578 - DNA, 75 bp, synthetic construct
  source 1..75: mol_type = other DNA
gtccatattgatgtggcgggtatagcaggcacagacaacaactacggtgccgttgcacaactgcagttcacattc

SEQ ID NO: 5579 - DNA, 75 bp, synthetic construct
  source 1..75: mol_type = other DNA
gcgaacgcattagatatcgccgaaaaaacctcaaatacacccaaaggtctcttgctaaagccctgaaaatttctc

SEQ ID NO: 5580 - DNA, 75 bp, synthetic construct
  source 1..75: mol_type = other DNA
ctcacggcgaatctcccaggacatcagtacccgtgatgaaggcggtgacgggaaggtggtggttatcgggcggca

SEQ ID NO: 5581 - DNA, 75 bp, synthetic construct
  source 1..75: mol_type = other DNA
cttaacgcgtgcggctgaagttttacatatttctcaacccgcggcgagtaaagcactcaaacatgctgagcactg

SEQ ID NO: 5582 - DNA, 75 bp, synthetic construct
  source 1..75: mol_type = other DNA
caaacatttcgcaccattctgaccgtatccagcactgccaccgtggcgcttaccgtggataacaccatggtgatg

SEQ ID NO: 5583 - DNA, 75 bp, synthetic construct
  source 1..75: mol_type = other DNA
acttaacgctgtgctggattacattgacgcggtgacggcaacagataccagcaccgcgccggatgtcatctggcc

SEQ ID NO: 5584 - DNA, 75 bp, synthetic construct
  source 1..75: mol_type = other DNA
atcttcctgctgaccctctccggtcagccagcagattgtagctctttcctgactgattcgtcattccattcacat

SEQ ID NO: 5585 - DNA, 75 bp, synthetic construct
  source 1..75: mol_type = other DNA
cggcacagcggctggggttcagtctggacgagattgccgagctgttgcggctcgacgatggcacccactgcgagg

SEQ ID NO: 5586 - DNA, 75 bp, synthetic construct
  source 1..75: mol_type = other DNA
tgcgtactatttgtccggaccaaaaaggtctgatcgcacgtattaccaatatttgctacaagcacgagttaaata

SEQ ID NO: 5587 - DNA, 75 bp, synthetic construct
  source 1..75: mol_type = other DNA
gtgtcagacacactccccgggacaacgcttcccgacgacaataacgaccgcacctggtggggactgccctgcacc

SEQ ID NO: 5588 - DNA, 75 bp, synthetic construct
  source 1..75: mol_type = other DNA
gagcagccaagccaacggataagcaatataagctgactgatggtggcggtatgcatctgcttgtccatccaaatg

SEQ ID NO: 5589 - DNA, 75 bp, synthetic construct
  source 1..75: mol_type = other DNA
gcttaacgccgtgcttgattacattgacgcggtgacggcaacagatacgagcaccgcgccggatgtcatctggcc

SEQ ID NO: 5590 - DNA, 75 bp, synthetic construct
  source 1..75: mol_type = other DNA
cttttgcagtcaacaatattacctgtgtgatattgttgtctctgttttgtaacgcagccagtgccgttgagttta

SEQ ID NO: 5591 - DNA, 75 bp, synthetic construct
  source 1..75: mol_type = other DNA
agccggagaagagagcgtggcacaggtcagcggggtacgggaacaggccatactgacacaggccattcgcagtga

SEQ ID NO: 5592 - DNA, 75 bp, synthetic construct
  source 1..75: mol_type = other DNA
cgtattgtctcaggaacaggacggcattaaatcgcacacccacagcgccagcgcatccagtacggatttggggac

SEQ ID NO: 5593 - DNA, 75 bp, synthetic construct
  source 1..75: mol_type = other DNA
ccgtggattttgctgtccgtcaggtggaggcgctggcctccacacgggtgatgacggacggacagtcagaaacgg

SEQ ID NO: 5594 - DNA, 75 bp, synthetic construct
  source 1..75: mol_type = other DNA
caccagatattcgctgactggcctctttccggtgaatattcctgcatgcaactggcccgggctcttttccctggg

SEQ ID NO: 5595 - DNA, 75 bp, synthetic construct
  source 1..75: mol_type = other DNA
atcatgatgacggcgctgttactgaactggcggcaggcggcgggctacaccattctggccccgaccgtggaggtg

SEQ ID NO: 5596 - DNA, 75 bp, synthetic construct
  source 1..75: mol_type = other DNA
tcatgggggaggtttattcgaaccgctggacccagaagaacggggccgcaccttcgaagctctggattgcacaga

SEQ ID NO: 5597 - DNA, 75 bp, synthetic construct
  source 1..75: mol_type = other DNA
tgtcggctgccgttctggcgctgattgccgcaggtgcgcctgcgcctgacattctcgaccagtttctggatgaaa

SEQ ID NO: 5598 - DNA, 75 bp, synthetic construct
  source 1..75: mol_type = other DNA
tatgactgcgtgatgcctgtttatcagttccggcgtgatttttccctggtatatgccgcaccccgcagtaagccc

SEQ ID NO: 5599 - DNA, 75 bp, synthetic construct
  source 1..75: mol_type = other DNA
tcagcgttccccgacacactgcccggtaccgaatacggccccgacaggggtatccgcctttcggcggtgtggctg

SEQ ID NO: 5600 - DNA, 75 bp, synthetic construct
  source 1..75: mol_type = other DNA
gtgcactgctgaagcagtatggtatccgcctgacggctaatcaggcatatcaccagatggcgaagctggggatcg

SEQ ID NO: 5601 - DNA, 75 bp, synthetic construct
  source 1..75: mol_type = other DNA
accgaatgcgacgccatgacggagcactactaccgcctgcgggactacgcgctcaaccacgcggaatgcaacgcc

SEQ ID NO: 5602 - DNA, 75 bp, synthetic construct
  source 1..75: mol_type = other DNA
gccggactttgagacgttgcttgccgaacgcaaggccgaatttgttgcgcttcatccgaaagatgagcaggaagc

SEQ ID NO: 5603 - DNA, 75 bp, synthetic construct
  source 1..75: mol_type = other DNA
tatctgaattaaaggagctcgatggccgttcgctaatgctccacgcaggaggtgataatcatgatgaccatcctg

SEQ ID NO: 5604 - DNA, 75 bp, synthetic construct
  source 1..75: mol_type = other DNA
atggtgtacagacgctcctgggcagccgtatcagtattaacggtaacctgatccccacatcacaaatgtgtaatc

SEQ ID NO: 5605 - DNA, 75 bp, synthetic construct
  source 1..75: mol_type = other DNA
tcgatataagcgaatccgtcgtaagtcaatatctggaaagtcagcataagctgacgaggactcgtctgactgaca

SEQ ID NO: 5606 - DNA, 75 bp, synthetic construct
  source 1..75: mol_type = other DNA
gtgcaggatatgagtacgctgaatcatccgaaggcagacctgagcaaagggcagtacggctgtgtcggccagggc

SEQ ID NO: 5607 - DNA, 75 bp, synthetic construct
  source 1..75: mol_type = other DNA
gggaagagaaacacacgtcccgaagccagaactatacgtacatccccaccatcaccgtactggaaagcctgcagc

SEQ ID NO: 5608 - DNA, 75 bp, synthetic construct
  source 1..75: mol_type = other DNA
ttgcaatatttggtgaggtcgtcgcaacttccgcactgaagtccagccatggattcaccaagttagttccttctg

SEQ ID NO: 5609 - DNA, 75 bp, synthetic construct
  source 1..75: mol_type = other DNA
cttatgttctggaagctcccgccgtggctggttgtcctcggtagcggtgcagctgggtggctgttgagcgtcgct

SEQ ID NO: 5610 - DNA, 75 bp, synthetic construct
  source 1..75: mol_type = other DNA
gtctgacgatgggggacagttatacccggggggatatttttgacggtgtaaatttcaggggtattcaactggcct

SEQ ID NO: 5611 - DNA, 75 bp, synthetic construct
  source 1..75: mol_type = other DNA
atgggtaaaggtggcggcagggcgcacacacctcgtgaggcgaaggacaatctcaaatccacgcagatgatgagc

SEQ ID NO: 5612 - DNA, 75 bp, synthetic construct
  source 1..75: mol_type = other DNA
gataaaagatggtgggcgcgattgccgcatacgttcaaataactgctatggacaggttattcgtcgtgaccagga

SEQ ID NO: 5613 - DNA, 75 bp, synthetic construct
  source 1..75: mol_type = other DNA
atgaatcaaccaatacacaatgcttactggttatcccgttttgacagccttctcgacagtgccctggcgcagcac

SEQ ID NO: 5614 - DNA, 75 bp, synthetic construct
  source 1..75: mol_type = other DNA
ctggcccgctcacggggaaaacgcgccggtgtggcggttgcgctgtctcttgctgctgtcacatcagtcccggca

SEQ ID NO: 5615 - DNA, 75 bp, synthetic construct
  source 1..75: mol_type = other DNA
ggaaaatgaactccttaaagaagccgttgaatatgggcgagcaaaaaagtggatagcgcacgcgcccttattgcc

SEQ ID NO: 5616 - DNA, 75 bp, synthetic construct
  source 1..75: mol_type = other DNA
ttaccgcttttgcagggggcaacggatgccgccagttttatggcgcggatggataccgttctgcagatgtacgga

SEQ ID NO: 5617 - DNA, 75 bp, synthetic construct
  source 1..75: mol_type = other DNA
tactaattgtacgccgaatgctggaattgcatggtggcggcatccacctgatggatgccacacccggtgcctgtt

SEQ ID NO: 5618 - DNA, 75 bp, synthetic construct
  source 1..75: mol_type = other DNA
agggcgacatgacgcagtatggcggtagcattgtccagggttcagccggggtacgcatcggtgcccccaccggcg

SEQ ID NO: 5619 - DNA, 75 bp, synthetic construct
  source 1..75: mol_type = other DNA
caaggcagaccgccttatcacggaacgtctggtacaggcactgggcctggtggatatccgggtgccggaccatct

SEQ ID NO: 5620 - DNA, 75 bp, synthetic construct
  source 1..75: mol_type = other DNA
tctgaccggacatcagcagagcgcacgccaccatctgcggcccttaccggcatacgctgcagtaccgcacatatc

SEQ ID NO: 5621 - DNA, 75 bp, synthetic construct
  source 1..75: mol_type = other DNA
atggcagttcgtggcattaacaaggtcattcttgtcggtcgtctgggaaaagatccggaagtccgttacatcccc

SEQ ID NO: 5622 - DNA, 75 bp, synthetic construct
  source 1..75: mol_type = other DNA
acactggggcgctggacaggtgctgttgctgaactgctggagccgctgtatgacgtcctgcgccagtatgtgctg

SEQ ID NO: 5623 - DNA, 75 bp, synthetic construct
  source 1..75: mol_type = other DNA
agtttattgccacgaaggcgggggatattactgtctataattataatggtgaaacacgagaatatatttccacat

SEQ ID NO: 5624 - DNA, 75 bp, synthetic construct
  source 1..75: mol_type = other DNA
gttctaagtactggcgtttgcagtaccgttatgagggaaagcaaaaaatgctggcacttggggtttatcctgaaa

SEQ ID NO: 5625 - DNA, 75 bp, synthetic construct
  source 1..75: mol_type = other DNA
gcccgccagggtgtcgaactgagccgtgccttactctccaactgggttgatgcgtgctgccagttaatgactccg

SEQ ID NO: 5626 - DNA, 75 bp, synthetic construct
  source 1..75: mol_type = other DNA
tcacagggtgaccgtaacccggcatccgtccgcctgctgattcagctgcagcgtaacggtaactgggtgacggaa

SEQ ID NO: 5627 - DNA, 75 bp, synthetic construct
  source 1..75: mol_type = other DNA
ataaatggctggcgaagattgccaccaaagtgatgcaggcgtttccaggcgctttccctaatgcggaagtggtgg

SEQ ID NO: 5628 - DNA, 75 bp, synthetic construct
  source 1..75: mol_type = other DNA
agccgtttttcatcaccgaggagattgcggccgaaatgatcgccggcggctatgagttcgagctgccgcccattc

SEQ ID NO: 5629 - DNA, 75 bp, synthetic construct
  source 1..75: mol_type = other DNA
gccggaaaaacatttattcttggatacacaaatgagactcatggtatttatcaggcatcaaaggcacctgtaata

SEQ ID NO: 5630 - DNA, 75 bp, synthetic construct
  source 1..75: mol_type = other DNA
tagagtataaagataaaagtaaactaaccgatagtatttataagtttgtaaatgctctagacattgacttttcga

SEQ ID NO: 5631 - DNA, 75 bp, synthetic construct
  source 1..75: mol_type = other DNA
aaatcggtcacccacagcgatgctgcgatgacgctgaatgtgacaacagtggcgctggacggggaaaccagtgcc

SEQ ID NO: 5632 - DNA, 75 bp, synthetic construct
  source 1..75: mol_type = other DNA
atgcaacagatttcctttctgcccggagaaatgacgcccggtgagcacagcctcattcagcgggccctgaaaacc

SEQ ID NO: 5633 - DNA, 75 bp, synthetic construct
  source 1..75: mol_type = other DNA
gactggtgagagacgctgatgattttgtcgcagtggcgatcgctggtttcaaccagatgaatcgtggtggccctg

SEQ ID NO: 5634 - DNA, 75 bp, synthetic construct
  source 1..75: mol_type = other DNA
ggacaataatctgggatacagcatccagagtggttatacccggggagggtatgaggggagcagtaaaacaggata

SEQ ID NO: 5635 - DNA, 75 bp, synthetic construct
  source 1..75: mol_type = other DNA
caaaatggcactacaaggaatgttgtaaaggatcagcagttattgaaacaattacgtaaagtagattcaggaaaa

SEQ ID NO: 5636 - DNA, 75 bp, synthetic construct
  source 1..75: mol_type = other DNA
cgcggctgtatcgggcatgtatgcggcaggggccagtatgatcctgggcggagtggcgcagatgctggcaccgaa

SEQ ID NO: 5637 - DNA, 75 bp, synthetic construct
  source 1..75: mol_type = other DNA
tggtcccggctggaaagcgcccttcgatatccgcttacagatacgcgatgaaggcctgatactcaacgacaacgg

SEQ ID NO: 5638 - DNA, 75 bp, synthetic construct
  source 1..75: mol_type = other DNA
actggctgcggatatccgggataacgaagggcgggtgtttgcccgtcagggtgaagtgatgaatccgctgcagta

SEQ ID NO: 5639 - DNA, 75 bp, synthetic construct
  source 1..75: mol_type = other DNA
gcgggttatgcctgaatccattccggctggctttaaagcactggctgacatgagtccgtttgaatccctgctgat

SEQ ID NO: 5640 - DNA, 75 bp, synthetic construct
  source 1..75: mol_type = other DNA
gtttatgtactcgcctaacggcaaaaaagacgggcttcagatcatcccattgtcagaagtcgcggcgaaggatga

SEQ ID NO: 5641 - DNA, 75 bp, synthetic construct
  source 1..75: mol_type = other DNA
cgtttcttgaggcctatcgctctggctccttttcaaaggcggcagaactactgggcatcactcagcccgcggcgt

SEQ ID NO: 5642 - DNA, 75 bp, synthetic construct
  source 1..75: mol_type = other DNA
acttgtgggcgttcgttggcatgggacttatcgttagtggcgtcgccgttctaaatctgctatccaaggtcagcg

SEQ ID NO: 5643 - DNA, 75 bp, synthetic construct
  source 1..75: mol_type = other DNA
taaagctcatccgtgaatccgaacgccttaaaactaaggaacttgctgaattaattggaattaattactacacat

SEQ ID NO: 5644 - DNA, 75 bp, synthetic construct
  source 1..75: mol_type = other DNA
acgcggcatctacaagggctggggaatcaaaaattaaacataaaattagccatgatgtttttgaaccttatcccg

SEQ ID NO: 5645 - DNA, 75 bp, synthetic construct
  source 1..75: mol_type = other DNA
catttaaaaaagcccgggattctgtggattacaactggcgtgctaatggcaccccaccctctttccatgagcaga

SEQ ID NO: 5646 - DNA, 75 bp, synthetic construct
  source 1..75: mol_type = other DNA
ctggactattcccgcgccgctatttttgcacttatccgaagcgcacaccctgaattttatcactacccgggacgc

SEQ ID NO: 5647 - DNA, 75 bp, synthetic construct
  source 1..75: mol_type = other DNA
actcaggcggctttcttgctggtatcggtgggcaaaactcaaatgcgccaaaggcaagtgatgtaagtgaggcgt

SEQ ID NO: 5648 - DNA, 75 bp, synthetic construct
  source 1..75: mol_type = other DNA
cacactacccggaaatctggctgcatatgtgggaatccccgtccttcagagcggggagctgtcaaccagcactcc

SEQ ID NO: 5649 - DNA, 75 bp, synthetic construct
  source 1..75: mol_type = other DNA
agcttattgccacgaaggcggggaatattaccgtctataactatgatggtaaaactcgggaatatatttctactt

SEQ ID NO: 5650 - DNA, 75 bp, synthetic construct
  source 1..75: mol_type = other DNA
ggatcagaacctggtgctgaaacgcttgcctcattaccgctgattgcttatgacgaagagttgccactgattaga

SEQ ID NO: 5651 - DNA, 75 bp, synthetic construct
  source 1..75: mol_type = other DNA
acgctgacaacaacgttgatatccaggaattcatgattcagccggttggcgcgaaaactgtgaaagaagccatcc

SEQ ID NO: 5652 - DNA, 75 bp, synthetic construct
  source 1..75: mol_type = other DNA
tccggaccttatctggtcattacctgacggagaaatacgtcgctacgacaggcgtcagaacataatctgtcgcga

SEQ ID NO: 5653 - DNA, 75 bp, synthetic construct
  source 1..75: mol_type = other DNA
aacaatacacagattgccactacagcttttgtgaaatcagcgattgcagcaatggtgggttctgcacctgcggca

SEQ ID NO: 5654 - DNA, 75 bp, synthetic construct
  source 1..75: mol_type = other DNA
cattccacagtgggtgaccctggagccccgtgtcttcggctggatggaccgtctgtgcgaagactactgcggtgg

SEQ ID NO: 5655 - DNA, 75 bp, synthetic construct
  source 1..75: mol_type = other DNA
tacaccctttatggctgcgctgttgccactgggtcaatgcagtggccattgcgggtatgttgttcagcggctggc

SEQ ID NO: 5656 - DNA, 75 bp, synthetic construct
  source 1..75: mol_type = other DNA
gccgacttggcgcgcatggaaaccgtgctgtctgaactcgtgtgcgcctgccatgcacgaaaggggaatgtttcc

SEQ ID NO: 5657 - DNA, 75 bp, synthetic construct
  source 1..75: mol_type = other DNA
attaccgcagcaaagaccttaccccgaaaaaatccaggctgctggctgacacgatttctgcggtttatctcgatg

SEQ ID NO: 5658 - DNA, 75 bp, synthetic construct
  source 1..75: mol_type = other DNA
ccaacggacaaggaataaccctggtaagccgtattctgggcgtgtcgcgtgcgcaactggcacaacggatgaaaa

SEQ ID NO: 5659 - DNA, 75 bp, synthetic construct
  source 1..75: mol_type = other DNA
aaaaatcagcttcatgttgccctcaccagggcagacaaaaacgagctggcgcaggtggcactgcgtcaggaactg

SEQ ID NO: 5660 - DNA, 75 bp, synthetic construct
  source 1..75: mol_type = other DNA
gccggacagtgaagaaaacaccggtgggcaatggatacagaatggcgggatagccggaaacaccactgttaccac

SEQ ID NO: 5661 - DNA, 75 bp, synthetic construct
  source 1..75: mol_type = other DNA
tgtgaggaatccgacctgctggaagcagaaatgaagctgatgcgctgcatggcgaaggtcagggcgtggacgccg

SEQ ID NO: 5662 - DNA, 75 bp, synthetic construct
  source 1..75: mol_type = other DNA
cttaaagattcgccctcacagccattgcaacagtcactgaaagaccttgagcgggcttacaaaaacttcttccag

SEQ ID NO: 5663 - DNA, 75 bp, synthetic construct
  source 1..75: mol_type = other DNA
tcacaaaggaatgcctgacggtcactgttgcctttgggatttcaggcgttcaggtcacgcgtattctggacagca

SEQ ID NO: 5664 - DNA, 75 bp, synthetic construct
  source 1..75: mol_type = other DNA
ataaaacggattcggcagcactgttgccctgtatcgaacgggcccgggaggatgtccgtactcttcgtcatctgc

SEQ ID NO: 5665 - DNA, 75 bp, synthetic construct
  source 1..75: mol_type = other DNA
acctgacgatatggcagggcgatgaagtacagcgccgggtgaaaggcgtggtgacctggtttgaactcggggaga

SEQ ID NO: 5666 - DNA, 75 bp, synthetic construct
  source 1..75: mol_type = other DNA
tagcttcctgcccgcattaagcaaacaaatggcggaaagcggcgtgacattacacgcagatgcagctgcactggc

SEQ ID NO: 5667 - DNA, 75 bp, synthetic construct
  source 1..75: mol_type = other DNA
gaagcgaatttgtttgatatggcgatgaatcatctttcccggcttcctctgaaggatcgtccggtattcattggt

SEQ ID NO: 5668 - DNA, 75 bp, synthetic construct
  source 1..75: mol_type = other DNA
ctggttgccactcccgtccctgatgaacagcgcatcagtttctggccgcagcattttggcctcattccacagtgg

SEQ ID NO: 5669 - DNA, 75 bp, synthetic construct
  source 1..75: mol_type = other DNA
tgcaacgggtgttcactccggacgaccgtgagcaggtgctggccgtctatggtccggtacatgcccggttgctgc

SEQ ID NO: 5670 - DNA, 75 bp, synthetic construct
  source 1..75: mol_type = other DNA
tcacccctgaattcaggctggaatgtgcacagctaattgttgataagggctactcatatcgacaagccagtgaag

SEQ ID NO: 5671 - DNA, 75 bp, synthetic construct
  source 1..75: mol_type = other DNA
agaacatcaccagtcccgcaaatccgcgcgagacgcagccgcatttcttcgaatcccgattccctgagctgttaa

SEQ ID NO: 5672 - DNA, 75 bp, synthetic construct
  source 1..75: mol_type = other DNA
tcataaaacggtgaaggtgccggaatggagaaatgtcagcgtggtgctgcgggagccttcggcagaggcctggta

SEQ ID NO: 5673 - DNA, 75 bp, synthetic construct
  source 1..75: mol_type = other DNA
gattaaggacggtggcagagactgccgtatccgttcaaataattgctacggtcaggtctcacggcgtgaccagga

SEQ ID NO: 5674 - DNA, 75 bp, synthetic construct
  source 1..75: mol_type = other DNA
gaccagctcaccatcacgctggatgatgcggatggtcagttgcagctaccgccacggggcgcgcgcctgacggtt

SEQ ID NO: 5675 - DNA, 75 bp, synthetic construct
  source 1..75: mol_type = other DNA
cgaagccagtcagaacccaccccaaatcataccttcgtgaagctgttgaagggtggattcttaacggtggcgtta

SEQ ID NO: 5676 - DNA, 75 bp, synthetic construct
  source 1..75: mol_type = other DNA
attatagctcattacccattaggagttgacgtaggcaaacaaaagttcgtacaggccattggagagcttcctgac

SEQ ID NO: 5677 - DNA, 75 bp, synthetic construct
  source 1..75: mol_type = other DNA
atgacaacggataacacgaacacgacacgtaacgattcactggctgcacggaccgatacctggttgcagtcattt

SEQ ID NO: 5678 - DNA, 75 bp, synthetic construct
  source 1..75: mol_type = other DNA
tgcaatgaaacacatttttcatcggctggatagtgaagctttattgttggtggagggaacacgttcaaaacaaaa

SEQ ID NO: 5679 - DNA, 75 bp, synthetic construct
  source 1..75: mol_type = other DNA
ttgcggctgaactggccaaaggccttaaaaccgaagccgacctcaaccagttttcacgcatgttgacaaagctta

SEQ ID NO: 5680 - DNA, 75 bp, synthetic construct
  source 1..75: mol_type = other DNA
ggtggttttctcagtcgctatggcagctacagtaccgcacagatcagtgccgcaatgagttatatgttcggtgcc

SEQ ID NO: 5681 - DNA, 75 bp, synthetic construct
  source 1..75: mol_type = other DNA
gccttcaataaaatttacatggccggaggtaaaggtacggtaaaaataaatgccaaagacgctttaagcgaaagc

SEQ ID NO: 5682 - DNA, 75 bp, synthetic construct
  source 1..75: mol_type = other DNA
aacatcctgcagaccccacaattcaccaaatacactttatggttcatgaccaatcagatcgctcctgagtccggg

SEQ ID NO: 5683 - DNA, 75 bp, synthetic construct
  source 1..75: mol_type = other DNA
ggaaacaccagaagcgatgcagcgcgaactcatgatgcgcatcgataacgtttttgactttttcctgaataacaa

SEQ ID NO: 5684 - DNA, 75 bp, synthetic construct
  source 1..75: mol_type = other DNA
cgcacacgttcaaataactgctacggacaggttattcgtcgtgaccaggaaagcgcattagcctgttgggggata

SEQ ID NO: 5685 - DNA, 75 bp, synthetic construct
  source 1..75: mol_type = other DNA
gctgaactgttgctggaagactacaaagcctccctgaaatatctcagcgatcacccgaaactgcagggtattgcc

SEQ ID NO: 5686 - DNA, 75 bp, synthetic construct
  source 1..75: mol_type = other DNA
ttccgcagaggtatacctggtgtctggccggaatttgttattcatctcttgccattttaccctcctttttaagct

SEQ ID NO: 5687 - DNA, 75 bp, synthetic construct
  source 1..75: mol_type = other DNA
agcaacggctggatgcgaaggttaacctggcgggcggcatcaacgaggatttttatcttgcacagcttgctgccc

SEQ ID NO: 5688 - DNA, 75 bp, synthetic construct
  source 1..75: mol_type = other DNA
ctacctgagcgggaaagccagaaaagatcggtggtactggaataacagtatccaacggggccgaagtacggcggt

SEQ ID NO: 5689 - DNA, 75 bp, synthetic construct
  source 1..75: mol_type = other DNA
gcatcaacaaaggccactgaagcatcaaaaagtgctgccgctgcagagtcctcaaaaagcgcggcagctaccagt

SEQ ID NO: 5690 - DNA, 75 bp, synthetic construct
  source 1..75: mol_type = other DNA
tgcacgataacaagggttatttcgtatttccggatacctggtttggcccattgctgggggagtttgaagaagtgc

SEQ ID NO: 5691 - DNA, 75 bp, synthetic construct
  source 1..75: mol_type = other DNA
aacgtgctgtcagactgaatatggcaactgatgaggaacgcacacgactggaatcatgggaacgctacagcgtta

SEQ ID NO: 5692 - DNA, 75 bp, synthetic construct
  source 1..75: mol_type = other DNA
atggatttatccattaacaaaaactggatcgacaaagaagaatatccgcaatccgcagccatcgacctgcgttgc

SEQ ID NO: 5693 - DNA, 75 bp, synthetic construct
  source 1..75: mol_type = other DNA
aacggattggttgttcagccagcctcctgttctccctttcttttatcagtgtacaggtgcatgacaacataatca

SEQ ID NO: 5694 - DNA, 75 bp, synthetic construct
  source 1..75: mol_type = other DNA
aagttcctatgtggattctaaaaataagccaagtaaacgggcataaatttacagatagtgctaaaaacctttact

SEQ ID NO: 5695 - DNA, 75 bp, synthetic construct
  source 1..75: mol_type = other DNA
aatacagctttgatcaattgagtccggatgcagtgcgcaccacagaaacgcgttatcagtacagcgacgttaatg

SEQ ID NO: 5696 - DNA, 75 bp, synthetic construct
  source 1..75: mol_type = other DNA
atgaatgggctttttaaagcctgtaaaacaagacaatggctgcgctcaaaagcagaactggcatacttcttctac

SEQ ID NO: 5697 - DNA, 75 bp, synthetic construct
  source 1..75: mol_type = other DNA
gggtggctgattttaattacgtcagcacatggcagggcttcgtctatgtggcgttcatcattgatgtgtttgccg

SEQ ID NO: 5698 - DNA, 75 bp, synthetic construct
  source 1..75: mol_type = other DNA
tggaagccttgtgttgggctttctcacctatctgacaaatctgtacttcaaaatcagagaagacagaagaaaggc

SEQ ID NO: 5699 - DNA, 75 bp, synthetic construct
  source 1..75: mol_type = other DNA
cgactggccgccgtgcaacgggccatgcagcagggggccgcgaatgataactggtttgaaccggaggctgcgtaa

SEQ ID NO: 5700 - DNA, 75 bp, synthetic construct
  source 1..75: mol_type = other DNA
ggatctgattatctggatcctgcgggctgatgaacgtgcgtatgctgccgatattgccatgcatcagtttttact

SEQ ID NO: 5701 - DNA, 75 bp, synthetic construct
  source 1..75: mol_type = other DNA
agtacagcgccgggtgaaaggcgtggtgacctggtttgaactcggggagaacgacaaaaaccagatgctgtacag

SEQ ID NO: 5702 - DNA, 75 bp, synthetic construct
  source 1..75: mol_type = other DNA
atgaccatgtgtctgaaaaaataaatgctattgctgtgcaaaggcgagcagagggagcaaaagagaaagatgtta

SEQ ID NO: 5703 - DNA, 75 bp, synthetic construct
  source 1..75: mol_type = other DNA
tgatggcaatcagctacttcaccgtcggcgctgttcttgagcagcaagctagcgaggcagacgccgaggagcggg

SEQ ID NO: 5704 - DNA, 75 bp, synthetic construct
  source 1..75: mol_type = other DNA
ggatataaaggagatatacagaatttgcgggcgggaacattttctgcaacagcaacgctggttgcatcatattcg

SEQ ID NO: 5705 - DNA, 75 bp, synthetic construct
  source 1..75: mol_type = other DNA
acaggcaatagcctcagatgtggcattcaggggtaatctgcttgacagaccctgccatgtgtccggtgacagtct

SEQ ID NO: 5706 - DNA, 75 bp, synthetic construct
  source 1..75: mol_type = other DNA
gcatgttcggcaagaacatcaccagtcccgcaaatccgcgcgagacgcagccgcatttcttcgaatcccgattcc

SEQ ID NO: 5707 - DNA, 75 bp, synthetic construct
  source 1..75: mol_type = other DNA
cgttccgggatgctgtcattaatggatgtgcaggcccgtgatacatggtacagctcactggagtacgataatttt

SEQ ID NO: 5708 - DNA, 75 bp, synthetic construct
  source 1..75: mol_type = other DNA
cacacgaatggtgatatctgccggacttgatcgcgaaggtgcgacagaagtttacagcggaatatgccgttctgt

SEQ ID NO: 5709 - DNA, 75 bp, synthetic construct
  source 1..75: mol_type = other DNA
gccgctgaagaggctccggctgtatctgcggatgcaacgactgcgacagaaaaaccggtcgcccaaccggcatcc

SEQ ID NO: 5710 - DNA, 75 bp, synthetic construct
  source 1..75: mol_type = other DNA
ccactcccttcgtgttgttgatgaatctgaccgggtctcaacagactgcacgccaccatttgctgccctgaccgg

SEQ ID NO: 5711 - DNA, 75 bp, synthetic construct
  source 1..75: mol_type = other DNA
ggccgtttcttttttcatgtcatgggggccctggctgaaatggagcgcgaactgatagttgaacgtaccagggcg

SEQ ID NO: 5712 - DNA, 75 bp, synthetic construct
  source 1..75: mol_type = other DNA
atgaaaattatcactcgtggtgaagccatgcgtattcaccaacaacatcctgcatcccgtctttttccgttctgc

SEQ ID NO: 5713 - DNA, 75 bp, synthetic construct
  source 1..75: mol_type = other DNA
gttcgtggagcgtagcgagaacgtgatcctgctgggtccgcccggtgtgggtaaaacgcacctggcagtcgctct

SEQ ID NO: 5714 - DNA, 75 bp, synthetic construct
  source 1..75: mol_type = other DNA
gtttatcgccgctacccgcgaatgagttaccgcgaactgtataaaccagatgaaaaaccgttagcgattatggtt

SEQ ID NO: 5715 - DNA, 75 bp, synthetic construct
  source 1..75: mol_type = other DNA
tgtccgcagccatctgtctgtccgtatccggtgcgcctgcatgggcgtctgaacatcagtccacactgagcgcag

SEQ ID NO: 5716 - DNA, 75 bp, synthetic construct
  source 1..75: mol_type = other DNA
agccggtttatttgcctgagcgaaaaatacatctttatcactgtgaccaccggggcctgccgctggcgcttatca

SEQ ID NO: 5717 - DNA, 75 bp, synthetic construct
  source 1..75: mol_type = other DNA
aaatcgacctctgggaagtcagtctggtgacgtttccgtctaacgacgaggcgcggatcagcgacgtcaagaacg

SEQ ID NO: 5718 - DNA, 75 bp, synthetic construct
  source 1..75: mol_type = other DNA
caggttataaaagacagtctgacactgggactgaatgcgctgacgctgacggatgttacaaaaaatgcagcgtat

SEQ ID NO: 5719 - DNA, 75 bp, synthetic construct
  source 1..75: mol_type = other DNA
cgttggtgaatcagaatggattcatttcacaggtagcggatatctgttacgtaccgatgcgtggtcatatccggt

SEQ ID NO: 5720 - DNA, 75 bp, synthetic construct
  source 1..75: mol_type = other DNA
atgtcatctaagatcgaagatacgccccaaaaaaccctgtcctgctggccactggcgttcagtgccggtcttctc

SEQ ID NO: 5721 - DNA, 75 bp, synthetic construct
  source 1..75: mol_type = other DNA
tgctggcctgtggcgcttcctttatatgtcgattatatcggtggcgcaggtaaaaggagcaacgatgatgactaa

SEQ ID NO: 5722 - DNA, 75 bp, synthetic construct
  source 1..75: mol_type = other DNA
tacagaacacgattaccagcattgagtcagcacgggatgaaataccgttcggactcgatgaagatcaaaacaaca

SEQ ID NO: 5723 - DNA, 75 bp, synthetic construct
  source 1..75: mol_type = other DNA
gctgaatgaagagaacccgcatcagctgcagcagcttatccgcctgccggggcagcagtatgatgaggagtccgg

SEQ ID NO: 5724 - DNA, 75 bp, synthetic construct
  source 1..75: mol_type = other DNA
atgtctttaaacgattctaaaatccgcaagttaaaatcttcttcccgtccggtaaaactctccgactctcacggt

SEQ ID NO: 5725 - DNA, 75 bp, synthetic construct
  source 1..75: mol_type = other DNA
gcgttttttcaccaggatggaaagcggcaaggctgcgttcccgtgcggtgatccaggcttatgaggccgtaaaaa

SEQ ID NO: 5726 - DNA, 75 bp, synthetic construct
  source 1..75: mol_type = other DNA
atgcgattagccagtcgttttggttatacaaaccagatacgccgtgaacgtccactgacacatgaagagctgatg

SEQ ID NO: 5727 - DNA, 75 bp, synthetic construct
  source 1..75: mol_type = other DNA
cttatcattgaaaactgtcttgctcgtctgaagcagaaaaaacctgaggagtattcgcttctcattgctcattat

SEQ ID NO: 5728 - DNA, 75 bp, synthetic construct
  source 1..75: mol_type = other DNA
acgctcagtcttcttacaaggttgttgacagaagaaattccaatgattttgagattcagaggttaaataaatttg

SEQ ID NO: 5729 - DNA, 75 bp, synthetic construct
  source 1..75: mol_type = other DNA
tggtgacggtgatacagttcattgcctgttatctggctgattgggggagtgccgaaacagtttttatcctgtgct

SEQ ID NO: 5730 - DNA, 75 bp, synthetic construct
  source 1..75: mol_type = other DNA
aagctggcacaggtggcgtatggcgtgctgaagtcaggggtcccgttcgatgcgtcacggcataatccggtagct

SEQ ID NO: 5731 - DNA, 75 bp, synthetic construct
  source 1..75: mol_type = other DNA
tgaccggctggagagggacagggggtggaccgcatcacaactgaatgaagtacagattgtggttgatgagatccg

SEQ ID NO: 5732 - DNA, 75 bp, synthetic construct
  source 1..75: mol_type = other DNA
ctggtggtggacggtgccgggatgcctggcaatggtgttactgaacgcagccgtcagttacggcattgtcagact

SEQ ID NO: 5733 - DNA, 75 bp, synthetic construct
  source 1..75: mol_type = other DNA
gatgcgtgaacgcttcagtgtgctgaaccatattatctgggcgaagccgtccggacgctggaacgggtgcaacaa

SEQ ID NO: 5734 - DNA, 75 bp, synthetic construct
  source 1..75: mol_type = other DNA
ccatcgacactggacgatttgtactgtctcgtatcaataatgaaaattatcagtttcatcatataagatttgact

SEQ ID NO: 5735 - DNA, 75 bp, synthetic construct
  source 1..75: mol_type = other DNA
ccgcatcaccgtcacggacagcctgaaccggcgtgaggtgctgcatacagaaggcggggccgggctgaagcgggt

SEQ ID NO: 5736 - DNA, 75 bp, synthetic construct
  source 1..75: mol_type = other DNA
tggaaagaatgttgcatctgctcagcggtaaaccgatccccgacaaccgagggaatatcaccattaatctggatg

SEQ ID NO: 5737 - DNA, 75 bp, synthetic construct
  source 1..75: mol_type = other DNA
ccgctgacggacacggacggtaatcctgtgatacatggtgtgaccgcggtctggcgcgccggggagcaggagcag

SEQ ID NO: 5738 - DNA, 75 bp, synthetic construct
  source 1..75: mol_type = other DNA
ataacggtcagcttgcgccggacctggctgaaatcaggacgtccattacgaatgtcagcaatgaaatcacgcaga

SEQ ID NO: 5739 - DNA, 75 bp, synthetic construct
  source 1..75: mol_type = other DNA
atcggcattgatatttcagactctgtaaccagtaccagaagtgatgttgctgcaagttcgctggcagttaaaaaa

SEQ ID NO: 5740 - DNA, 75 bp, synthetic construct
  source 1..75: mol_type = other DNA
tgaatatgccgtggtggggcggttttgatccgcgcgcgtgggatgtggcaagcctgatggattttgctgtgccgg

SEQ ID NO: 5741 - DNA, 75 bp, synthetic construct
  source 1..75: mol_type = other DNA
cgacggtatttctaccaataccaacgccaatagtctgacaatcaaaaacagcactattcacggtatgatttattc

SEQ ID NO: 5742 - DNA, 75 bp, synthetic construct
  source 1..75: mol_type = other DNA
cgctgagtgcactgctgaagcagtatggtatccgcctgacggctaatcaggcatatcaccagatggcgaagctgg

SEQ ID NO: 5743 - DNA, 75 bp, synthetic construct
  source 1..75: mol_type = other DNA
aatattgatatatcaaatgtatgggcgagagactatcttgatcttgcacaaaataaaggtattttccagcccgga

SEQ ID NO: 5744 - DNA, 75 bp, synthetic construct
  source 1..75: mol_type = other DNA
ggcatacaatcctgaagataatcagggtgcccgctggttgttgggttcagaactgttacgaacaggtgatcatga

SEQ ID NO: 5745 - DNA, 75 bp, synthetic construct
  source 1..75: mol_type = other DNA
gccgggggcggacgaggtgctgccgccggagccgcccgcataccgggtgctgacgggcgtggtggacggcttcgg

SEQ ID NO: 5746 - DNA, 75 bp, synthetic construct
  source 1..75: mol_type = other DNA
atgactggcagcgactggctaaggtgaaggatctgacgccgggcgagatgacggcagaatcctacgatgataact

SEQ ID NO: 5747 - DNA, 75 bp, synthetic construct
  source 1..75: mol_type = other DNA
ccgaccgtttcacggtggtgcagggctatgccggtgtgggtaagaccacacagttccgggcggtgatgtcagccg

SEQ ID NO: 5748 - DNA, 75 bp, synthetic construct
  source 1..75: mol_type = other DNA
aagagtcacggcagagaagaaatccgtcttcatattgtttgcgatgtccctgatgaacttattgatttcacgttt

SEQ ID NO: 5749 - DNA, 75 bp, synthetic construct
  source 1..75: mol_type = other DNA
gttagaaatttggttaaaaataaagctatagcattggaattagctgagatatatgttaagaatcgttatggacag

SEQ ID NO: 5750 - DNA, 75 bp, synthetic construct
  source 1..75: mol_type = other DNA
gtgaggaggcgtaacgcgagaggcggtataagcagaacggtctcggtgtatctcgatgaagatacaaataaccga

SEQ ID NO: 5751 - DNA, 75 bp, synthetic construct
  source 1..75: mol_type = other DNA
atctggtccccggaagagattcaggcactggctgacggtatggaaatttctctgaccgatcatgaaatcaggacc

SEQ ID NO: 5752 - DNA, 75 bp, synthetic construct
  source 1..75: mol_type = other DNA
acgtgatcgcttcctgtccagcttcaagcagcctggtcgattccgggctgagttggaaaaagtgaagctgatgca

SEQ ID NO: 5753 - DNA, 75 bp, synthetic construct
  source 1..75: mol_type = other DNA
ccgagacttgatcacccggcggtactcgatcttctccagcgatatccctcaccagaaaaactcgcttcgctgggt

SEQ ID NO: 5754 - DNA, 75 bp, synthetic construct
  source 1..75: mol_type = other DNA
ttacagccctctctgtgccgggtaaaaccgtgtcagatgattttatgcatgctgttctcagtaactgcgccacaa

SEQ ID NO: 5755 - DNA, 75 bp, synthetic construct
  source 1..75: mol_type = other DNA
aggaaaggtgagcactaacctgatttttaaggagtgtcgccagagtgccgcgatgaagcgggtgttgatggtttg

SEQ ID NO: 5756 - DNA, 75 bp, synthetic construct
  source 1..75: mol_type = other DNA
gtatttctgggagcaaagtggctcactggaggtacagaccgcctatctggagcgccagctcaccggtaaacatgc

SEQ ID NO: 5757 - DNA, 75 bp, synthetic construct
  source 1..75: mol_type = other DNA
tggacaagcccatcaccgcaacgctgattcgcgacatcgttgacggcatcaatgccaaattccgtgagctgaaaa

SEQ ID NO: 5758 - DNA, 75 bp, synthetic construct
  source 1..75: mol_type = other DNA
atgccggaccctcactccgtgatcagatcatggcactggatgaggcaaaaggggctgaggcgcaggctgaacagc

SEQ ID NO: 5759 - DNA, 75 bp, synthetic construct
  source 1..75: mol_type = other DNA
gtggttgccggacaatccggtggcggaaaatctgttccggtgaaagaactaatcgacagaattattcagaaatat

SEQ ID NO: 5760 - DNA, 75 bp, synthetic construct
  source 1..75: mol_type = other DNA
atgaaatccatggataagttaacaacgggcattgcctacggcacctccgcaggcagtgctggctactggttttta

SEQ ID NO: 5761 - DNA, 75 bp, synthetic construct
  source 1..75: mol_type = other DNA
atccttgtgcgtatcctcgctgacgggcgcaccacagacatcccgctggggcgttttctgcgggaatttacctgt

SEQ ID NO: 5762 - DNA, 75 bp, synthetic construct
  source 1..75: mol_type = other DNA
ggcactgggtaaagacctgtcggataagcccgtggagcatatagaccagactaatgagagtgacggcagttttct

SEQ ID NO: 5763 - DNA, 75 bp, synthetic construct
  source 1..75: mol_type = other DNA
tgaacaaagcggttacaacccgaagcagcacgatgcgcgcgtcggcctatatgcgggcgtgagtaccagcttcta

SEQ ID NO: 5764 - DNA, 75 bp, synthetic construct
  source 1..75: mol_type = other DNA
gaactgcatggcagcggcacgccgttgggtgacgctatcgaattcgcggccatcaaacgtgtgtttgggacgcca

SEQ ID NO: 5765 - DNA, 75 bp, synthetic construct
  source 1..75: mol_type = other DNA
ctctttgagtctggagcttattttgacctgattggtaaatatctccatcatgataatcggtatacgttgaatttt

SEQ ID NO: 5766 - DNA, 75 bp, synthetic construct
  source 1..75: mol_type = other DNA
gcgatgatgaccgtgatcccccgcatttccagtccggtactgactgcacaggaaatcgcagagatggacccggca

SEQ ID NO: 5767 - DNA, 75 bp, synthetic construct
  source 1..75: mol_type = other DNA
ggcattgtgtgtctgctggctatcttcgcgccctcgttcttgctggtcgtcggatcaatgccattttgggagcgt

SEQ ID NO: 5768 - DNA, 75 bp, synthetic construct
  source 1..75: mol_type = other DNA
actaaagcgaagggagattatgagtggagaaacagtgtgggtgctgatgagtctgatggatatttaagtgagtct

SEQ ID NO: 5769 - DNA, 75 bp, synthetic construct
  source 1..75: mol_type = other DNA
taaaaatggtcgtcagattgtggctgctgaaggaacagcaaataccactgtggtttatgccggcggcgaccagac

SEQ ID NO: 5770 - DNA, 75 bp, synthetic construct
  source 1..75: mol_type = other DNA
ctatgacctggttgagcgtaataacaacatcgttcttgagtaccgcaaatctgaagtgatccgtattgctctgcc

SEQ ID NO: 5771 - DNA, 75 bp, synthetic construct
  source 1..75: mol_type = other DNA
agctgttgcccggagtgtggcggtgagctggattatctgggggaagtcagcgctgaacagctggaactggtgagc

SEQ ID NO: 5772 - DNA, 75 bp, synthetic construct
  source 1..75: mol_type = other DNA
gggtgatgttccacagcgatagtaataatgccgatgtcagtctttaccaccacttagtttgccgtttaaccagat

SEQ ID NO: 5773 - DNA, 75 bp, synthetic construct
  source 1..75: mol_type = other DNA
gcagtttcagcctgagtggatatgctgggagcccggtgtagagtgggttcgacagccaccggaagatgctattac

SEQ ID NO: 5774 - DNA, 75 bp, synthetic construct
  source 1..75: mol_type = other DNA
aaacgcgcgccggtggcgctgaaaggggccgcgctcacgcgccgcccctttcattacgcggacgttctgatgggg

SEQ ID NO: 5775 - DNA, 75 bp, synthetic construct
  source 1..75: mol_type = other DNA
cggataccgttgttaataccggggcggaagggggaccggatgcagaaaacggtgataccgggcagtttgttcgcg

SEQ ID NO: 5776 - DNA, 75 bp, synthetic construct
  source 1..75: mol_type = other DNA
gtcagttactcgatgagattgataacgtcgacctgctggtgagcaatctgacggccagttccggcggttcagaac

SEQ ID NO: 5777 - DNA, 75 bp, synthetic construct
  source 1..75: mol_type = other DNA
ttcctgctggacgtaatgccggaaagaacggctgaacactaccgcaacaagatagcagtctacctgcgctggtat

SEQ ID NO: 5778 - DNA, 75 bp, synthetic construct
  source 1..75: mol_type = other DNA
ctggcctgcgaagggctgctgagcggtcagtgcgatatggcgctagcgggtggcgtcacgtttcgcatggaggag

SEQ ID NO: 5779 - DNA, 75 bp, synthetic construct
  source 1..75: mol_type = other DNA
ttctcactttctcccgaagatgcgatgaaaagatatggcgtaaactacaacggtaaggaacaaataattggcttc

SEQ ID NO: 5780 - DNA, 75 bp, synthetic construct
  source 1..75: mol_type = other DNA
tactgcaccagattgttgaccgccggacggcatcactgcgcagtgtcgggatgctgacaaacctgaatcatgccg

SEQ ID NO: 5781 - DNA, 75 bp, synthetic construct
  source 1..75: mol_type = other DNA
gtgaacacggcagcggaagccatccgggcgctgtcgttacaggtgcccggattccgccgtcagatgaacgaaggc

SEQ ID NO: 5782 - DNA, 75 bp, synthetic construct
  source 1..75: mol_type = other DNA
gctggatctctgcgagatttgtcgctgtctgatgtgctgaatctgaaagcggaatccatgtttacgctgctgtca

SEQ ID NO: 5783 - DNA, 75 bp, synthetic construct
  source 1..75: mol_type = other DNA
gttcaggaaaatgatccggaggaaatggaaggcgctgaacatccacacaaggagaaccctggcggcaatcagcat

SEQ ID NO: 5784 - DNA, 75 bp, synthetic construct
  source 1..75: mol_type = other DNA
tgaaatcgggtatcgttatcacatgtcagaaaatacatgggtggaaccacagatggaactggtttatggttcggt

SEQ ID NO: 5785 - DNA, 75 bp, synthetic construct
  source 1..75: mol_type = other DNA
aatggaccattacgactctgacacataccgtcagcccggataacggttttacaaccagtattgaactcgaagtga

SEQ ID NO: 5786 - DNA, 75 bp, synthetic construct
  source 1..75: mol_type = other DNA
ctactctttcttcagccacagcaccagggaataaccagccccaactggttgctactcccgtccctgatgaacaac

SEQ ID NO: 5787 - DNA, 75 bp, synthetic construct
  source 1..75: mol_type = other DNA
ccgtccgcctgctgattcagttacagcgtaacggtaactgggtgacagaaaaggacgtcaccattaacggcaaga

SEQ ID NO: 5788 - DNA, 75 bp, synthetic construct
  source 1..75: mol_type = other DNA
tcgttgaagcaccggcaccatcccgtccgatagagcgtggtatcgcgggcccggagttacttgcccgcgtgttaa

SEQ ID NO: 5789 - DNA, 75 bp, synthetic construct
  source 1..75: mol_type = other DNA
tattacagaccatgagtgtacaggaatatgaagatatccgggctgccggaagtgatgaacgccgtgagctgacac

SEQ ID NO: 5790 - DNA, 75 bp, synthetic construct
  source 1..75: mol_type = other DNA
tgatacagcggtaccgtgaagcggaaatggccgtactggaggggaagtctgtcaccttcaacgggcagcaactga

SEQ ID NO: 5791 - DNA, 75 bp, synthetic construct
  source 1..75: mol_type = other DNA
atgcaaccacttacataccaacagactagcggatttagcccgactgcggtgataaatcgttctcaaacaaaacaa

SEQ ID NO: 5792 - DNA, 75 bp, synthetic construct
  source 1..75: mol_type = other DNA
cgttctgaaaaactgcgtcgtgaagttgaacaggctgaggccctgctgaagcaacgcgaacaggacagcgatcgt

SEQ ID NO: 5793 - DNA, 75 bp, synthetic construct
  source 1..75: mol_type = other DNA
gagacagtcctgcacggtttattgctccgggacgtaaatatccgcagccgtatgtggcactgccggcgtttgacc

SEQ ID NO: 5794 - DNA, 75 bp, synthetic construct
  source 1..75: mol_type = other DNA
tgctgggataccgttcagtgaatgcagcggtggagcatcttcgcgcactggagaaaaaaggcgtcatcacgataa

SEQ ID NO: 5795 - DNA, 75 bp, synthetic construct
  source 1..75: mol_type = other DNA
gtgaacaagatctatatgctcgacacgaacatctgctcgttcatcatgcgcgagcagcctgaagcagtgcttaag

SEQ ID NO: 5796 - DNA, 75 bp, synthetic construct
  source 1..75: mol_type = other DNA
acgaacgcattctgtctggcgtcaccgccactggtccgcatctgccttcacggggatttacaacgatttggtcgc

SEQ ID NO: 5797 - DNA, 75 bp, synthetic construct
  source 1..75: mol_type = other DNA
ggctccgcacacatcacgttcaggaagccagaactggttggcagacttaatgagattattgcgaaacactatccg

SEQ ID NO: 5798 - DNA, 75 bp, synthetic construct
  source 1..75: mol_type = other DNA
cacctcgctgagactacgggcgcaacgggcatatgacggtctgagtgttgctggcccgtcaggtgcatacgagta

SEQ ID NO: 5799 - DNA, 75 bp, synthetic construct
  source 1..75: mol_type = other DNA
tttttacgctgtttgtggatggtgaaaacgaagtgggtaaggtgacgtccgtcactctgcctaagctgacgcgca

SEQ ID NO: 5800 - DNA, 75 bp, synthetic construct
  source 1..75: mol_type = other DNA
gatgacggtggaaaaagcccgcccgatcctggctgcttcaccgcaggcggatgccggaccctcactccgtgatca

SEQ ID NO: 5801 - DNA, 75 bp, synthetic construct
  source 1..75: mol_type = other DNA
ctgtatgactggatacagcaacagatgaaaacactgtcgcgtcactcagatacggcaaaagcgttcgcatacctg

SEQ ID NO: 5802 - DNA, 75 bp, synthetic construct
  source 1..75: mol_type = other DNA
caaaaagcgggtatcgcgtcattttgtccctataacattggccccggtaagtgtttcccgtcgacgttttataag

SEQ ID NO: 5803 - DNA, 75 bp, synthetic construct
  source 1..75: mol_type = other DNA
tttttcgcctggccttgcagatggcccgcgacgactacgaggacaggcgcgaacgccagcgccaaggcattgagt

SEQ ID NO: 5804 - DNA, 75 bp, synthetic construct
  source 1..75: mol_type = other DNA
ttacggaccgaaaggtcaaggagaagcaggctatgaagcagcaaaaggcgatgttaatcgccctgatcgtcatct

SEQ ID NO: 5805 - DNA, 75 bp, synthetic construct
  source 1..75: mol_type = other DNA
cacccgattgatggcctgtccggtgaatatgcggagaaatccctagaagaatgggcggaacagattcgcaaagga

SEQ ID NO: 5806 - DNA, 75 bp, synthetic construct
  source 1..75: mol_type = other DNA
cagaaatgaagctgattgactgcatggcgaaggtcagggcgtggacgccggagatgcgtgccggaagtggcgtgg

SEQ ID NO: 5807 - DNA, 75 bp, synthetic construct
  source 1..75: mol_type = other DNA
gacggccatacgctggcgcggctgtggggggcgctgccgccggatatccggttaagcccgcatctttacctggcg

SEQ ID NO: 5808 - DNA, 75 bp, synthetic construct
  source 1..75: mol_type = other DNA
tatggagcgaaaaggttctgttgccagggacagtggttttcttgcccgttgtcttatcagtaaacctgcaaccac

SEQ ID NO: 5809 - DNA, 75 bp, synthetic construct
  source 1..75: mol_type = other DNA
tcagcggtaaaccaatccccgacaaccggggaaacatcacccttcgtctggatgatcacattcagtctgttcagg

SEQ ID NO: 5810 - DNA, 75 bp, synthetic construct
  source 1..75: mol_type = other DNA
atgcaatatgcgaaacctgtcactctgaatgttgaagagtgcgaccgtctgttttttctgccttacctgtttggc

SEQ ID NO: 5811 - DNA, 75 bp, synthetic construct
  source 1..75: mol_type = other DNA
ctgctgtgctgctttggcgcatcggtggccaatcatgccgccatatactgcggcaacggtgagctgcttcaccat

SEQ ID NO: 5812 - DNA, 75 bp, synthetic construct
  source 1..75: mol_type = other DNA
gggggaacagccagtgatacggttattcgtgacggcgggggacagagcctgaacggactggcggtgaacaccaca

SEQ ID NO: 5813 - DNA, 75 bp, synthetic construct
  source 1..75: mol_type = other DNA
tttttttatcggggcggaaaacttccccgtaaaagcgttatgttgacatttgatgatggataccttgacaactgg

SEQ ID NO: 5814 - DNA, 75 bp, synthetic construct
  source 1..75: mol_type = other DNA
tggtaccggaactcggtctggttatcgttaagccaggccgtgaatcaatgtcagtattccataacggcagaatat

SEQ ID NO: 5815 - DNA, 75 bp, synthetic construct
  source 1..75: mol_type = other DNA
ggacggtgagggttgtgtgccgtgagtggagtgtcacggataatgcccggtacagtgatttcagctgtacgattg

SEQ ID NO: 5816 - DNA, 75 bp, synthetic construct
  source 1..75: mol_type = other DNA
ccgtgggttatgtcgctataacaagagcgggcatttcaacattccctacggtaattataaaaatccgtatttccc

SEQ ID NO: 5817 - DNA, 75 bp, synthetic construct
  source 1..75: mol_type = other DNA
caagcgcaatattttgatgaggttgttgcccctaaggctggtgacaaatgggctgaagcaagagatcagttttat

SEQ ID NO: 5818 - DNA, 75 bp, synthetic construct
  source 1..75: mol_type = other DNA
ccaacatgaccgccagcacaccgcaaaaaatggaggcgttcacctttggtgtgccttccccggttctggatcgcc

SEQ ID NO: 5819 - DNA, 75 bp, synthetic construct
  source 1..75: mol_type = other DNA
ggacggtgagggtggtatgccgggagtggagcgtcacagataacgccaggtacagtgatttcagttgtacgattg

SEQ ID NO: 5820 - DNA, 75 bp, synthetic construct
  source 1..75: mol_type = other DNA
agcttatgaatttcatgcccgaagcgccgacggtcgggtggcggatgccagtgcaaccagcccggcacctgcaga

SEQ ID NO: 5821 - DNA, 75 bp, synthetic construct
  source 1..75: mol_type = other DNA
cgctgggtgcctggctggatgtgtgcaccacgcccacagacggatgccactgaacgcaccgataacctggctgat

SEQ ID NO: 5822 - DNA, 75 bp, synthetic construct
  source 1..75: mol_type = other DNA
cctctctggcagataaacctactgaagtcatctcgcgattactgaatgccaaggtagatgttaattctgcgacga

SEQ ID NO: 5823 - DNA, 75 bp, synthetic construct
  source 1..75: mol_type = other DNA
ggcaaagccacggtggatggcatccagttgcgcttcaccggctctatccagcgtgacgataccggagaagtgcag

SEQ ID NO: 5824 - DNA, 75 bp, synthetic construct
  source 1..75: mol_type = other DNA
atggcactgactgacgcaaaaatccgggctgcaaagcccactgacaaggcttataaactcactgacggggccggc

SEQ ID NO: 5825 - DNA, 75 bp, synthetic construct
  source 1..75: mol_type = other DNA
cactggcagaatggattgaagactgggccgactaccttgtgggctttgatgctaatggtgacgctattcaggcaa

SEQ ID NO: 5826 - DNA, 75 bp, synthetic construct
  source 1..75: mol_type = other DNA
gcgcgggaatggcgggaaattccccgcacggagcctgacccggaaatcaccccggataacagttaccgcaattat

SEQ ID NO: 5827 - DNA, 75 bp, synthetic construct
  source 1..75: mol_type = other DNA
cggaaccgctcaaataactgttacgggcaggtatcgcggcgtgaccaggagagcgcgctggcgtgctggagtatc

SEQ ID NO: 5828 - DNA, 75 bp, synthetic construct
  source 1..75: mol_type = other DNA
atacgtctgaagggtgttttaatattggtattctgctcagtaaccgggagtttactgaagacgccatcaggatga

SEQ ID NO: 5829 - DNA, 75 bp, synthetic construct
  source 1..75: mol_type = other DNA
ttgtggctgtaccacgacagcggggatgcaggactgacccagctttaccggatgcgcgatgcgcagttgtggcgt

SEQ ID NO: 5830 - DNA, 75 bp, synthetic construct
  source 1..75: mol_type = other DNA
ttattcctggcaaaagttggtgttcaggatcctcagtttgcgattgaaggtctgctcaattacgcgatggcactg

SEQ ID NO: 5831 - DNA, 75 bp, synthetic construct
  source 1..75: mol_type = other DNA
catacccgccgtcggtgaatacctactggcgaagacggggaagccaatactacatcagcgataaaggccagaaat

SEQ ID NO: 5832 - DNA, 75 bp, synthetic construct
  source 1..75: mol_type = other DNA
gctgcatggaaaataaccaaagacacccaaattttccatcaaagacacccaaaaacggatcacggaacccaaagg

SEQ ID NO: 5833 - DNA, 75 bp, synthetic construct
  source 1..75: mol_type = other DNA
ggacggcggccgagttggcgcaggcggcggcgcgcggacagcttgacctgcattaccagccgctggtcgatctgc

SEQ ID NO: 5834 - DNA, 75 bp, synthetic construct
  source 1..75: mol_type = other DNA
cgtttgaagtggtgtcccgtttaacgccttggccggagggcaccacgccacgcaccgctggtgtgagtgcgttcg

SEQ ID NO: 5835 - DNA, 75 bp, synthetic construct
  source 1..75: mol_type = other DNA
ctactgcggtggtatctggaatctgtataccctgaacaatggtggcgcatttatggcccccgaaccggatgacga

SEQ ID NO: 5836 - DNA, 75 bp, synthetic construct
  source 1..75: mol_type = other DNA
gtgccatgcctgaaagacctttccccatggctgggtcgtaaacatcgtgacaatactctcacgctgaaacgcttt

SEQ ID NO: 5837 - DNA, 75 bp, synthetic construct
  source 1..75: mol_type = other DNA
ccatgcgtattcaccgtcagcatcctgcatcccgtctttttccgttctgtaccggcaaataccgctggcacggca

SEQ ID NO: 5838 - DNA, 75 bp, synthetic construct
  source 1..75: mol_type = other DNA
gccgacaccctcggctcctgtggttacgtttatctggctgtttatccgacaccggcagcgcccgcaaccaccgta

SEQ ID NO: 5839 - DNA, 75 bp, synthetic construct
  source 1..75: mol_type = other DNA
atctgtcggggtgccacgatggtggatggaaaacccgtttttcccggtatgaaactgtcgaaggaaaaatgcgac

SEQ ID NO: 5840 - DNA, 75 bp, synthetic construct
  source 1..75: mol_type = other DNA
gtgcatgttattgtgttctcaaggagctggtacacatgcttccatctactcagtatcaacagttagttggcaatt

SEQ ID NO: 5841 - DNA, 75 bp, synthetic construct
  source 1..75: mol_type = other DNA
cagttatagtttcggtgctgtgttttttttacaatattgtgataacacattgctggcgggagttttgatatttct

SEQ ID NO: 5842 - DNA, 75 bp, synthetic construct
  source 1..75: mol_type = other DNA
aattaattgccactatggcaggagaaattactgtttataactttgatgtcatgagtcgggaatatatttcagctt

SEQ ID NO: 5843 - DNA, 75 bp, synthetic construct
  source 1..75: mol_type = other DNA
tcccgtcaccatctggcagacactgctgtcccggttgctggaccagcattacggccttacgctgaatgacacacc

SEQ ID NO: 5844 - DNA, 75 bp, synthetic construct
  source 1..75: mol_type = other DNA
catatgatatacgtgggcgtcttggtgctgaattgaatgatgaaatagcatatagaattggtcgcgcttatggtg

SEQ ID NO: 5845 - DNA, 75 bp, synthetic construct
  source 1..75: mol_type = other DNA
catcgcctggctgaggtattgcaatgttcaccaacttggatactgtttggtgacgaggataaaacaccagatcca

SEQ ID NO: 5846 - DNA, 75 bp, synthetic construct
  source 1..75: mol_type = other DNA
gggcagcaacgccttgccgccgtacaacgggccattcagcagggggccgcgaatgataactggtttgaaccggag

SEQ ID NO: 5847 - DNA, 75 bp, synthetic construct
  source 1..75: mol_type = other DNA
cgtgccggtctgcgccagaacttccgtatcttccagaacgaggacatcaaaagcatcctcggcacgatgttgcag

SEQ ID NO: 5848 - DNA, 75 bp, synthetic construct
  source 1..75: mol_type = other DNA
gtaatacctggaataccattcatgataataaaaaggaaaatgccgcactcaatgatgttcaggttgaagttaatt

SEQ ID NO: 5849 - DNA, 75 bp, synthetic construct
  source 1..75: mol_type = other DNA
cgggaaataaacggctggctcggtcaggaggtcatccgctttaaaaactactcactggacactgacaacggctga

SEQ ID NO: 5850 - DNA, 75 bp, synthetic construct
  source 1..75: mol_type = other DNA
atgggggattctgtgacaccggagatacttggcaacatgattcgtcagtacttcagccaggaacgaccagaagaa

SEQ ID NO: 5851 - DNA, 75 bp, synthetic construct
  source 1..75: mol_type = other DNA
agcggtttgaaactggacgaagataaaaaacgagtaatggaaatcatgcagcaggtatgggaggacgatagctgg

SEQ ID NO: 5852 - DNA, 75 bp, synthetic construct
  source 1..75: mol_type = other DNA
ttccagctccgtatccgtaacgccattatcaaacgccagtcccttgatttcatcatggccggttttaacggcgtg

SEQ ID NO: 5853 - DNA, 75 bp, synthetic construct
  source 1..75: mol_type = other DNA
aaggcagggttaagacgtaagatgcgaaaagcagccatggacagaaactatctcgcgtcagtccttgcggggagc

SEQ ID NO: 5854 - DNA, 75 bp, synthetic construct
  source 1..75: mol_type = other DNA
tgatgcgggtctcggcagcgatgaccgcgcagcgggaagccgccccgctgcgacatgcaactgtctatgagcaga

SEQ ID NO: 5855 - DNA, 75 bp, synthetic construct
  source 1..75: mol_type = other DNA
gatgagaaagaccgcaatggcgatggggcagatgccgtacgccagaaagttccggcaatgctgaacagcgatgtg

SEQ ID NO: 5856 - DNA, 75 bp, synthetic construct
  source 1..75: mol_type = other DNA
ccgctgctcggtgcaaaggtccttcccggtgaaaccgacatcgccctgcccgccccgctgccgttcatcctctcc

SEQ ID NO: 5857 - DNA, 75 bp, synthetic construct
  source 1..75: mol_type = other DNA
acgatacgatacctcaatggtttattgcggtgataacctgaagggtgagattgaggctatttataatagtcttga

SEQ ID NO: 5858 - DNA, 75 bp, synthetic construct
  source 1..75: mol_type = other DNA
acaggacgtggcttacaccctgcgtcacgggcgtttctccgccccggtacgtaagtgtgtcatcgcagagaattg

SEQ ID NO: 5859 - DNA, 75 bp, synthetic construct
  source 1..75: mol_type = other DNA
gcctgttaagctctggtggagtgccatcgtttattggtgggctggtggtgtttgtgtcggcagcgttcaatgcac

SEQ ID NO: 5860 - DNA, 75 bp, synthetic construct
  source 1..75: mol_type = other DNA
tcagtggagaaaaaacagtactgacagccggagcccgtcatacagtaaaggcacaggccggggaacagtatggac

SEQ ID NO: 5861 - DNA, 75 bp, synthetic construct
  source 1..75: mol_type = other DNA
atggctgtaccaaaacatcttcgcttttttacgctgtttgtggatggtgaaaacgaagtgggtaaggtgacgtcc

SEQ ID NO: 5862 - DNA, 75 bp, synthetic construct
  source 1..75: mol_type = other DNA
atgctggacgaaagcggcggcgtggttacccggacacaggattttgagccgggcggacaggttttcagccggggc

SEQ ID NO: 5863 - DNA, 75 bp, synthetic construct
  source 1..75: mol_type = other DNA
cgccaccatttgctgccctgaccggcatacgctgcagtaccgcgcatatcacggcaaaggacaacgcctggctgt

SEQ ID NO: 5864 - DNA, 75 bp, synthetic construct
  source 1..75: mol_type = other DNA
ctgaacagcatcagcggccagaatcccaatgcggaattacttgccgggcagctcatcctgtcatcgcgcaccatt

SEQ ID NO: 5865 - DNA, 75 bp, synthetic construct
  source 1..75: mol_type = other DNA
gattgccggattccgcgcaatggcgcaggaaggcaaaacacctgcgcagactggcgacctgctgggctattcacc

SEQ ID NO: 5866 - DNA, 75 bp, synthetic construct
  source 1..75: mol_type = other DNA
tgagtaatgaatcagggacgctttcgcgattatttaaactacctcagcatgggaccaccgtccgcacagaattga

SEQ ID NO: 5867 - DNA, 75 bp, synthetic construct
  source 1..75: mol_type = other DNA
attatgcagaaactggccgcgctgcagacggcaacaaagcgggcgctgtacgaagccattctgtatcccggcgtg

SEQ ID NO: 5868 - DNA, 75 bp, synthetic construct
  source 1..75: mol_type = other DNA
tcactctcacccggcgttatggcgtcagtctcattcatctggacgccggcgcagaatgtctgccgggtttaccca

SEQ ID NO: 5869 - DNA, 75 bp, synthetic construct
  source 1..75: mol_type = other DNA
atgcgaaccagatacgccgtgaccgtccgctgacacacgaagaactgatgcactatgttcccagtattttcggtg

SEQ ID NO: 5870 - DNA, 75 bp, synthetic construct
  source 1..75: mol_type = other DNA
atgggcaaaggtggcggcaaggcgcacacaccgcgtgaggcgaaagacaatctcaaatccacgcagatgatgagc

SEQ ID NO: 5871 - DNA, 75 bp, synthetic construct
  source 1..75: mol_type = other DNA
agctgaagaaaccatctgcggttgatccggaccttatctggtcattacctgacggagaaatacgtcgctacgaca

SEQ ID NO: 5872 - DNA, 75 bp, synthetic construct
  source 1..75: mol_type = other DNA
atgctaaaacagcaggatatgacagaaaccgccagagtggtgtttaatgaattaagcgttaccgacccggcgaca

SEQ ID NO: 5873 - DNA, 75 bp, synthetic construct
  source 1..75: mol_type = other DNA
cagagtgaaatctttgcccgccagggtgtcgaactgagccgggccttactctccaactgggttgacgcgtgctgc

SEQ ID NO: 5874 - DNA, 75 bp, synthetic construct
  source 1..75: mol_type = other DNA
ttgtgcctgttctggtcgtggctggtggcgcgatatctcgaccgtacacagtcgtctgtcggcggaggtaaatag

SEQ ID NO: 5875 - DNA, 75 bp, synthetic construct
  source 1..75: mol_type = other DNA
atgcctccatcattacgaaaagccgttgctgctgctattggtggtggggctgttgccatagcgtctgtgctcatc

SEQ ID NO: 5876 - DNA, 75 bp, synthetic construct
  source 1..75: mol_type = other DNA
gattcttgtccgtgcaccaggtgcatctgatacgcgcattgaaaaccagacgggggtgtctacagactggagggg

SEQ ID NO: 5877 - DNA, 75 bp, synthetic construct
  source 1..75: mol_type = other DNA
ctacacctcccaaaccggtttcgtttaataatgacgttattctcgataaaacagaaaaaacgttaactattcgcg

SEQ ID NO: 5878 - DNA, 75 bp, synthetic construct
  source 1..75: mol_type = other DNA
tttttttacagcgacctgtgcgtgtggtggagctggttattagcaaccataagatagcggtactccatccatttg

SEQ ID NO: 5879 - DNA, 75 bp, synthetic construct
  source 1..75: mol_type = other DNA
atgttggtgagaataatcaatttactgagaagcctgtaactgaataccccccggtgatacaggataatacagtga

SEQ ID NO: 5880 - DNA, 75 bp, synthetic construct
  source 1..75: mol_type = other DNA
atgcgattagcaagtcgttttggtcatgtaaaccagatacgccgtgaccgcccgctgacacatgaagaactgatg

SEQ ID NO: 5881 - DNA, 75 bp, synthetic construct
  source 1..75: mol_type = other DNA
tcagcccaaacaaaccccgtcactatgaacgttatctgcaaagaatgaaagagaggagaaaggaatgggggatcc

SEQ ID NO: 5882 - DNA, 75 bp, synthetic construct
  source 1..75: mol_type = other DNA
tggacgatgccactgcgggactggcgtatggcaatgagccgctttattatcgagttcggtgaccgcctggacggc

SEQ ID NO: 5883 - DNA, 75 bp, synthetic construct
  source 1..75: mol_type = other DNA
aggcgtgaagcagggcagtgtcagcattgtgggcatgacttctgacggcgattttgtggcagtggctacggtggc

SEQ ID NO: 5884 - DNA, 75 bp, synthetic construct
  source 1..75: mol_type = other DNA
atgagcagaattatcaccaccaccgtgtatacactgcatgagctatcctccaccgcacaggaaaaagcccgcgac

SEQ ID NO: 5885 - DNA, 75 bp, synthetic construct
  source 1..75: mol_type = other DNA
tgagcacgccgcagcagtgcttaatctggttgatgacggtgttatcgaatggaatgacccggaggtcgtgagggc

SEQ ID NO: 5886 - DNA, 75 bp, synthetic construct
  source 1..75: mol_type = other DNA
gtggcagaggtggcccgcaggagaaaacgtcatttctctgttctgttcattgactgggaggcccagtatcggtgc

SEQ ID NO: 5887 - DNA, 75 bp, synthetic construct
  source 1..75: mol_type = other DNA
gtatcagtacacagatcgcccggcaggtagcgcttgatcgcatcatgattggctttaacggcacatcccacgcct

SEQ ID NO: 5888 - DNA, 75 bp, synthetic construct
  source 1..75: mol_type = other DNA
gaggacggttgtggcgcacgtcttcggtgaacgcactctggccacactggaacgtcttctgagcctgctgtcggc

SEQ ID NO: 5889 - DNA, 75 bp, synthetic construct
  source 1..75: mol_type = other DNA
cccaattcaaatatcatcccaagccactggaaacaggcgcatttgaacaggataaaaccgtagagtgcgattgct

SEQ ID NO: 5890 - DNA, 75 bp, synthetic construct
  source 1..75: mol_type = other DNA
atgcgcatgaatgttttcgaaatggaagggtttcttcgtgggagatgtgtaccgcgagatctgaaagtaaatgaa

SEQ ID NO: 5891 - DNA, 75 bp, synthetic construct
  source 1..75: mol_type = other DNA
tgcagcacaggaaaacaaagtaataccagtgtcaactgaactgccaccagcaaatgaaagtgttttgttattcga

SEQ ID NO: 5892 - DNA, 75 bp, synthetic construct
  source 1..75: mol_type = other DNA
cgcgactggtggcagccgacaaaagcaaacttcttcggacacctgaaaaagccgcagattatcgcagccctgaat

SEQ ID NO: 5893 - DNA, 75 bp, synthetic construct
  source 1..75: mol_type = other DNA
ttctcggcggcaaatgttgttccaacagcaaatgaaaatcgtccacgtaacatcgcctttaattatattgtgagg

SEQ ID NO: 5894 - DNA, 75 bp, synthetic construct
  source 1..75: mol_type = other DNA
cgcaaggctgccgatgaactgacctgtatgacagcgcgaattaaccgtggtgagacgatacctgaaccagtaaaa

SEQ ID NO: 5895 - DNA, 75 bp, synthetic construct
  source 1..75: mol_type = other DNA
tgttcatcagttacagcgaagtcagcataaaaaatcccgacaacagcggccaggcgctcccgctcacgtatgtct

SEQ ID NO: 5896 - DNA, 75 bp, synthetic construct
  source 1..75: mol_type = other DNA
ggccgtgtccgaagggacggcgaatcatccgctgacgaaaaaccggggctatgacgtgatagtcaccggactgga

SEQ ID NO: 5897 - DNA, 75 bp, synthetic construct
  source 1..75: mol_type = other DNA
aatatcatcaataagttacgtgatgaaggtttccagccgttctttgcctgtcagagtcgggttcgtgatttggga

SEQ ID NO: 5898 - DNA, 75 bp, synthetic construct
  source 1..75: mol_type = other DNA
ttttttagaaaaagccggatatgtaaaaaggacggatagcagggaggatcgccgtgctaaaaaaatcagtctgac

SEQ ID NO: 5899 - DNA, 75 bp, synthetic construct
  source 1..75: mol_type = other DNA
tgaaaaataatggctacgtgcaggacacgaataatcaacgcaattatatgtttgagcggcttgatcttggcgttg

SEQ ID NO: 5900 - DNA, 75 bp, synthetic construct
  source 1..75: mol_type = other DNA
cgaaggttctgcctgttgaaaccgacctggcactgcccggcccgctgccgtttattcttttccgcgcctacagca

SEQ ID NO: 5901 - DNA, 75 bp, synthetic construct
  source 1..75: mol_type = other DNA
ttgaaaccaggctgaagcccacggtggagttttatggcaaagcgtacagtacacagctcaaaaaagatttcgttc

SEQ ID NO: 5902 - DNA, 75 bp, synthetic construct
  source 1..75: mol_type = other DNA
tcacgtagaaatggcatctggcatcaccagtctcataaaaacggtgctgagtcttactaaccgggtgttttaccc

SEQ ID NO: 5903 - DNA, 75 bp, synthetic construct
  source 1..75: mol_type = other DNA
aggggtgtttggtcccggctggaaagcgcccttcgatatccgcttacagatacgcgatgaaggcctgatactcaa

SEQ ID NO: 5904 - DNA, 75 bp, synthetic construct
  source 1..75: mol_type = other DNA
cctgtgaataaagctgacgcagatcggatagctgaagagatcgaaacagcagaacacattaagaagttacgtgcc

SEQ ID NO: 5905 - DNA, 75 bp, synthetic construct
  source 1..75: mol_type = other DNA
cagctgctcgataaagtcacgccctcacagtgggcagcaataggtgtgctgggtagcctggtatttggcctgctg

SEQ ID NO: 5906 - DNA, 75 bp, synthetic construct
  source 1..75: mol_type = other DNA
gaaaatcaagactatattttgctttccaatttgggaaagcaaacatctggtagaggcggtcacaaccgcaaggat

SEQ ID NO: 5907 - DNA, 75 bp, synthetic construct
  source 1..75: mol_type = other DNA
tatgggaactgaaaaaggctggttttgttgataaaagcgcgtacacctggcgtgtggctgataacaacgttcagc

SEQ ID NO: 5908 - DNA, 75 bp, synthetic construct
  source 1..75: mol_type = other DNA
tgctcgccgtgtgcgccacggtgttgtgtttttcactgatattcagggaacggttatgtgaactgaatattcaca

SEQ ID NO: 5909 - DNA, 75 bp, synthetic construct
  source 1..75: mol_type = other DNA
ttcgcactgagccaagcgcttcagtgctcaccgacttggcttctttttggggatgaagataaacaaccaggcgaa

SEQ ID NO: 5910 - DNA, 75 bp, synthetic construct
  source 1..75: mol_type = other DNA
cgcttttatctgagctcatccccgcagtttgatttagtcatgggaatgataaaaatgaaaggtggtgtgactaat

SEQ ID NO: 5911 - DNA, 75 bp, synthetic construct
  source 1..75: mol_type = other DNA
cggtgtggcccagatgctggccccgaaggcaaaaacaccggattaccgcgcaacggataacggcagacagaacac

SEQ ID NO: 5912 - DNA, 75 bp, synthetic construct
  source 1..75: mol_type = other DNA
gccagaagcgcgaaagccgccatcaaaaaagagttgttgccggacttttccggctggattgagggaacgctggag

SEQ ID NO: 5913 - DNA, 75 bp, synthetic construct
  source 1..75: mol_type = other DNA
agcgcagcctgttgatgtcatcgtcacattgccgatctctgaataccttgacgccaacaatcagaaaaataagca

SEQ ID NO: 5914 - DNA, 75 bp, synthetic construct
  source 1..75: mol_type = other DNA
atctggcgcaggcgaaatgggacacgccgcgggtggtgaagggtgtgcgcttcagtctgcgcctgaccagtggta

SEQ ID NO: 5915 - DNA, 75 bp, synthetic construct
  source 1..75: mol_type = other DNA
gtttggacaaaactataatcccgacttgttaagcgcaagtctttttaatctggactggaaaaacaagagttacat

SEQ ID NO: 5916 - DNA, 75 bp, synthetic construct
  source 1..75: mol_type = other DNA
atcttgaccatctgaaaacccttattgcgaagggggcaaatcagtgtgcgcgggcaggggataaattaccggatt

SEQ ID NO: 5917 - DNA, 75 bp, synthetic construct
  source 1..75: mol_type = other DNA
cgctttatgaatcacgcctgaagggagaactgcacgttatcagcaagcgatatacgcagcgcattgagcggcata

SEQ ID NO: 5918 - DNA, 75 bp, synthetic construct
  source 1..75: mol_type = other DNA
tcaggcgatgatttaattctgcgtaaaaaggaagatgatacagaaatccggattgagggattctgggaagaatgc

SEQ ID NO: 5919 - DNA, 75 bp, synthetic construct
  source 1..75: mol_type = other DNA
ggcggtcagtctgggtcgtaaaaacttcctgttcttcggctctgaccatggtggtggcggggagcgctactgtac

SEQ ID NO: 5920 - DNA, 75 bp, synthetic construct
  source 1..75: mol_type = other DNA
gaggcactgcgccgttttgagctgatggtgaatgaagtggcacgtcatgccggagcgtcatcacagagtgcagcg

SEQ ID NO: 5921 - DNA, 75 bp, synthetic construct
  source 1..75: mol_type = other DNA
tgtgtggcgttttctggcactgagtgccggagaatctcaaatcatccacgtaaccgcctggacggaacgcgaagc

SEQ ID NO: 5922 - DNA, 75 bp, synthetic construct
  source 1..75: mol_type = other DNA
aaaccacaaccatctgacgcaatggcaggtgaacaggcaacaactgaaacaatggaaccggatacaactgaacat

SEQ ID NO: 5923 - DNA, 75 bp, synthetic construct
  source 1..75: mol_type = other DNA
atgaaaatcatcacccgtggtgaagccatgcgtattcaccaacagcatcctgcatcccgtctttttccgttctgt

SEQ ID NO: 5924 - DNA, 75 bp, synthetic construct
  source 1..75: mol_type = other DNA
tgccgcctgtctgatggcgtacagtcatcacgcctgtcgtacggagtgttatgctatgacggtccattattaccg

SEQ ID NO: 5925 - DNA, 75 bp, synthetic construct
  source 1..75: mol_type = other DNA
ggttaatgaaaagtacacgcgctgggttaagacacagccgtgtgcatgttgtggaaagcctgctgatgatcccca

SEQ ID NO: 5926 - DNA, 75 bp, synthetic construct
  source 1..75: mol_type = other DNA
tgacccaactgaaactcccggcgatggccgggagcctgatacggcaacgggaaacgcctcagacttacgacgaac

SEQ ID NO: 5927 - DNA, 75 bp, synthetic construct
  source 1..75: mol_type = other DNA
attccggaagacgatcctgacgggatgcatctgactgatgacgttcgtctggcaatgctgatgctggtcagtcat

SEQ ID NO: 5928 - DNA, 75 bp, synthetic construct
  source 1..75: mol_type = other DNA
atgaccaaagagcatgcacaaggtgtatttatccgttttattgattttcgcggtgaactgttattacgcgcatca

SEQ ID NO: 5929 - DNA, 75 bp, synthetic construct
  source 1..75: mol_type = other DNA
cgaccgtttccacatggtgaacggtgcaaactggtttgaccgtaccgtgagtgctgatgccgcaggcatcattct

SEQ ID NO: 5930 - DNA, 75 bp, synthetic construct
  source 1..75: mol_type = other DNA
ggacaggatccgcgagataaacggctggctcggtcaggaggtcatccgctttaaaaactactcactggacactga

SEQ ID NO: 5931 - DNA, 75 bp, synthetic construct
  source 1..75: mol_type = other DNA
accctaacgttgccaaccgcaacaaaggcccacgtcgtcagccggaaaagaatgttttcaccgatgaacagattg

SEQ ID NO: 5932 - DNA, 75 bp, synthetic construct
  source 1..75: mol_type = other DNA
cagccggcaaggcgcccgtcagccacactcacccgtggagtcagataacgggagtgcctgctgcctcgctgacgg

SEQ ID NO: 5933 - DNA, 75 bp, synthetic construct
  source 1..75: mol_type = other DNA
atagcctggcacccttctggccatcttatcagaacaaagtcatcggcgtccttgagcgtgcgctgcgtgagcagt

SEQ ID NO: 5934 - DNA, 75 bp, synthetic construct
  source 1..75: mol_type = other DNA
atgcaatatgcgaaacctgtcactctgaacgttgaagagtgcgaccgtctctcctttctgccgtatctgtttggc

SEQ ID NO: 5935 - DNA, 75 bp, synthetic construct
  source 1..75: mol_type = other DNA
atgatcatttgtgggtgcatggctcgcctgaaaaagaacaacagcgatttgcacgatttattagtggattattat

SEQ ID NO: 5936 - DNA, 75 bp, synthetic construct
  source 1..75: mol_type = other DNA
caacattgatacgtcaacccccatggggcgcttcttttttcacataatgggtgcgctggcagaaatggagcgtga

SEQ ID NO: 5937 - DNA, 75 bp, synthetic construct
  source 1..75: mol_type = other DNA
tttgtgttacgcaagacttatcagaacgagcaggcagcaagacgcgcagcggcggcaaagtggcagcagctacaa

SEQ ID NO: 5938 - DNA, 75 bp, synthetic construct
  source 1..75: mol_type = other DNA
ttctactatggtttattagatgtggatactgtaagtaaaatatgctcagataataatttagaaataataaaatca

SEQ ID NO: 5939 - DNA, 75 bp, synthetic construct
  source 1..75: mol_type = other DNA
agacagccatcagcatactgaagcagcgcacaaaaaatattgcgctgccacttcacgtccaccagcaacaaaatc

SEQ ID NO: 5940 - DNA, 75 bp, synthetic construct
  source 1..75: mol_type = other DNA
attgcccaggggaacccgatgccggtgccttacggtgaaatgctggttggctcccggcgaatctcccaggacatc

SEQ ID NO: 5941 - DNA, 75 bp, synthetic construct
  source 1..75: mol_type = other DNA
aaacacggcagccagctgttgttgctgattcgttttttaatgcacgcgagaaattcgggtgtcctgaagtggaaa

SEQ ID NO: 5942 - DNA, 75 bp, synthetic construct
  source 1..75: mol_type = other DNA
tacggcgaaagaagcagcgaagcacaaccgccaggacgttttgtgctgtgtgtcctgtggatgcccgttaacact

SEQ ID NO: 5943 - DNA, 75 bp, synthetic construct
  source 1..75: mol_type = other DNA
ctgtatgccattgcgcagtactgcgaccagacggtcccggatggtttcgggggcacagagccgcggatgaccttt

SEQ ID NO: 5944 - DNA, 75 bp, synthetic construct
  source 1..75: mol_type = other DNA
actgattaaatcaccgctgaatgtgcgcacggtgccgtattctgcggagtccgtcagcgaactggctgagtccat

SEQ ID NO: 5945 - DNA, 75 bp, synthetic construct
  source 1..75: mol_type = other DNA
cgttgttgacgaccttccgccagaaggcgtgtttgatactgaattctgcaaccgctatgaaaaaggcgggaaaga

SEQ ID NO: 5946 - DNA, 75 bp, synthetic construct
  source 1..75: mol_type = other DNA
acgtattaccactgtcagcagcagcggcatcatcctgataaacgctgtacccgtgcgcagcgcgatgactggctg

SEQ ID NO: 5947 - DNA, 75 bp, synthetic construct
  source 1..75: mol_type = other DNA
cagcagatcctcgacaaaatggcctacctgacgatatggcagggcgatgacgtacagcgccgggtgaaaggtatg

SEQ ID NO: 5948 - DNA, 75 bp, synthetic construct
  source 1..75: mol_type = other DNA
ctggtctacaaaatcttctgcgctccagaaaagagtgacgcccgcgagtgtgcagctccgggcgtcgtggcgttt

SEQ ID NO: 5949 - DNA, 75 bp, synthetic construct
  source 1..75: mol_type = other DNA
atgaccacaacgcaaaaaacgactgacgttacagccccccgacgcagccactggtggtggacggtgccgggatgc

SEQ ID NO: 5950 - DNA, 75 bp, synthetic construct
  source 1..75: mol_type = other DNA
attcacattgatgtcgccggcctcgtgggcaccgacaacaactacggtgccattgctcagttacagttcaccttc

SEQ ID NO: 5951 - DNA, 75 bp, synthetic construct
  source 1..75: mol_type = other DNA
gcctggttcatcagggcaatacgtggcgttaaaaacggctgttcagtcctttatgtcgcaggttattgcaacaat

SEQ ID NO: 5952 - DNA, 75 bp, synthetic construct
  source 1..75: mol_type = other DNA
tggtatctctccatttgacgtcgtacatatcgatgtttccggcctggtaggaactgaccacgattacggtgcaat

SEQ ID NO: 5953 - DNA, 75 bp, synthetic construct
  source 1..75: mol_type = other DNA
ctgccctgcattgaacaggccagggaagatatccgtacactgcgccagttgcagcttctgcaccagaaccggtga

SEQ ID NO: 5954 - DNA, 75 bp, synthetic construct
  source 1..75: mol_type = other DNA
tgtgtgatgcggtgaattttctcgtggaaaaatacgcgctggtgcgtaccgaccagccgggattcagcacttgtc

SEQ ID NO: 5955 - DNA, 75 bp, synthetic construct
  source 1..75: mol_type = other DNA
aacgtcagcgaaaaacgaaaccgctgttgaaatccctggaaagctggttgcgtgaaaagatgaagaccctgtcgc

SEQ ID NO: 5956 - DNA, 75 bp, synthetic construct
  source 1..75: mol_type = other DNA
tggcgctggacggtgcgacatttagttcagaaacaaccctgaataacggaaccaacaccattccgttccaggcgc

SEQ ID NO: 5957 - DNA, 75 bp, synthetic construct
  source 1..75: mol_type = other DNA
gcgcccttcgatatccgcttacagatacgcgatgaaggcctgatactcaacgacagcggcggcaggagcattcac

SEQ ID NO: 5958 - DNA, 75 bp, synthetic construct
  source 1..75: mol_type = other DNA
ataaaacggattcggcagcactgttgccctgtattgaacaggccagggaggatatccgtaccctgcgccaactgc

SEQ ID NO: 5959 - DNA, 75 bp, synthetic construct
  source 1..75: mol_type = other DNA
gtggctacgccacgtgatcagtgtaatcaacacctggcctgccaaccgcgtgaaagagttgttgccctggaatgt

SEQ ID NO: 5960 - DNA, 75 bp, synthetic construct
  source 1..75: mol_type = other DNA
tctggcccccggcctgctgtgcgcagacgggcaataccgccagatagtcaccgtggaagatgcggtgcgcggcgg

SEQ ID NO: 5961 - DNA, 75 bp, synthetic construct
  source 1..75: mol_type = other DNA
gagcgtgaagtacgttcggtgaactatcaattgcgggtggccaagttccccgtgtatcgggacttggtgggcttt

SEQ ID NO: 5962 - DNA, 75 bp, synthetic construct
  source 1..75: mol_type = other DNA
gatgattaatctgttaatcatcgttctcagggcagtagttgccgttgcaaacgcgctgattgctgttctggaact

SEQ ID NO: 5963 - DNA, 75 bp, synthetic construct
  source 1..75: mol_type = other DNA
aggttgttcacggcactcgctggcacgctaaacgcaagagctacaaagtgttgttctggcgcgagataaccccgc

SEQ ID NO: 5964 - DNA, 75 bp, synthetic construct
  source 1..75: mol_type = other DNA
ctcagtgggcggcaataggcgtgctggggagtctgctgtttggtctgctgacatatctgacgaacctgtatttca

SEQ ID NO: 5965 - DNA, 75 bp, synthetic construct
  source 1..75: mol_type = other DNA
acaacgggcggcgcggacggatgaaaccacctatgtggtgcagggctggcgacagggtaacggtacgctgtggca

SEQ ID NO: 5966 - DNA, 75 bp, synthetic construct
  source 1..75: mol_type = other DNA
tacggaaagcgaaaaaatcatccggtgaacctgacgtcgtcctgtgggcaagcaacgattttgaatcgacctgtg

SEQ ID NO: 5967 - DNA, 75 bp, synthetic construct
  source 1..75: mol_type = other DNA
acagaacctgtagtacgattgaatgtagaatctaggaataatgctattcttatgcaggaaaaaacagaagaaatt

SEQ ID NO: 5968 - DNA, 75 bp, synthetic construct
  source 1..75: mol_type = other DNA
gggagtttggggagtgcaaaggtaaaaaacactatcacctgatgctgctggtcaaccgggatacctggtgtcgtg

SEQ ID NO: 5969 - DNA, 75 bp, synthetic construct
  source 1..75: mol_type = other DNA
atttgtcgattgaggatttcggatattgatcttaaggcaaagtgtatatatatccatcgattaaaaaaaggcttt

SEQ ID NO: 5970 - DNA, 75 bp, synthetic construct
  source 1..75: mol_type = other DNA
ctctaaatcgtgttcaggcgctggcgaagatcgcagaaattaaagctaagttaggactgaaaggagcaagtgtat

SEQ ID NO: 5971 - DNA, 75 bp, synthetic construct
  source 1..75: mol_type = other DNA
gggcatgataaccgcgatcaggctggtgggcaattatcttgcttgttggggccgtattgtgctgccattttcatc

SEQ ID NO: 5972 - DNA, 75 bp, synthetic construct
  source 1..75: mol_type = other DNA
ggtatcttcatgcctcgacgaacgttcccggcagcgatgatctgaacgggattaacgtgaaataccgttatgagt

SEQ ID NO: 5973 - DNA, 75 bp, synthetic construct
  source 1..75: mol_type = other DNA
tgaaggctctgcacttctgggataaacacggtatttctgcggcttctgaagcctttggcgtgtcctgccgcacgc

SEQ ID NO: 5974 - DNA, 75 bp, synthetic construct
  source 1..75: mol_type = other DNA
atgacgggcgctacagcgatatgtaaattttttaatgaattttttgattataaaatcaacaaaaacaacatgctg

SEQ ID NO: 5975 - DNA, 75 bp, synthetic construct
  source 1..75: mol_type = other DNA
atgcttagacaacatcaggatagcctcttactgcgctttgcgcaaggagaagaaggccatgaaactaccacgcag

SEQ ID NO: 5976 - DNA, 75 bp, synthetic construct
  source 1..75: mol_type = other DNA
tatcagccggggagcttcacgccactcatcagggttgaaaccgccaccggtgagcaggcgaaaacgcagcgccgc

SEQ ID NO: 5977 - DNA, 75 bp, synthetic construct
  source 1..75: mol_type = other DNA
tggatggtctgacatacagcgagattgcgcacaaactcggtgtttccatcagctccgtgaaaaaatacgtggcga

SEQ ID NO: 5978 - DNA, 75 bp, synthetic construct
  source 1..75: mol_type = other DNA
atctggacggcgtacagtccgttcaccacctgggtacagattgtctatgactggctggatgcactgaaagatccc

SEQ ID NO: 5979 - DNA, 75 bp, synthetic construct
  source 1..75: mol_type = other DNA
acggtgttaccggcatcagcgcatctgtattctgggatttgcaggagtccggcaccgatgctgacctgcttaacg

SEQ ID NO: 5980 - DNA, 75 bp, synthetic construct
  source 1..75: mol_type = other DNA
aagctgtttaagcatccacgctttcgcaagtatcgtgactggttcatgtttgatgaaacagatccagcagctgga

SEQ ID NO: 5981 - DNA, 75 bp, synthetic construct
  source 1..75: mol_type = other DNA
ccgttctggcatcatttttagtctttttttatattccgcagagctatgccggggttgctctgggggccacccgtg

SEQ ID NO: 5982 - DNA, 75 bp, synthetic construct
  source 1..75: mol_type = other DNA
aaacgcatttttttcccacgacacaggttcaccgctgctcaagccttctgccagtaaatcccgcaggacacctgg

SEQ ID NO: 5983 - DNA, 75 bp, synthetic construct
  source 1..75: mol_type = other DNA
gactgcagcactgtcgtcagtcagcgggtggggatttccttttatggcgtgtcagatattcacgagccggagttg

SEQ ID NO: 5984 - DNA, 75 bp, synthetic construct
  source 1..75: mol_type = other DNA
acctgtaaagtggcacagacaagtcaccataaacgcccgtcagcaatggatacgctgcgctatctggctagaaat

SEQ ID NO: 5985 - DNA, 75 bp, synthetic construct
  source 1..75: mol_type = other DNA
gagggaacggtcatccatattgtgccgcgactggccggggccggaaagggtggactgcagattgtgctgggggcg

SEQ ID NO: 5986 - DNA, 75 bp, synthetic construct
  source 1..75: mol_type = other DNA
cacagcgctggctgaaagaaaatccgaagttcagagtgatttatcagccagtttactcgccgtgggtgaatcatg

SEQ ID NO: 5987 - DNA, 75 bp, synthetic construct
  source 1..75: mol_type = other DNA
ggatttgcccctatatttccagacatctgttatcacttaacccattacaagcccgctgccgcagatattcccgtg

SEQ ID NO: 5988 - DNA, 75 bp, synthetic construct
  source 1..75: mol_type = other DNA
aagcaataccaggagggaagtcttactgctgtggccgcaggagaacaggtcgttcctgcctctgaacttgctgcc

SEQ ID NO: 5989 - DNA, 75 bp, synthetic construct
  source 1..75: mol_type = other DNA
cgctggggcaaaattaagaagccacagctgctggctagaattgaacgccttgaacagcacgggcaaaccgtaatc

SEQ ID NO: 5990 - DNA, 75 bp, synthetic construct
  source 1..75: mol_type = other DNA
gcagagccggaaaagggcatgggagactggcgtttttatctttgtgagccgggcgtgattaccgtggacgattta

SEQ ID NO: 5991 - DNA, 75 bp, synthetic construct
  source 1..75: mol_type = other DNA
gaagaagccctggagcagatcggtcagttgtacgccatagaggcggatataaggggaatgccggcagagcagcgg

SEQ ID NO: 5992 - DNA, 75 bp, synthetic construct
  source 1..75: mol_type = other DNA
ctcagcctgtgctgtatcacatttgcctcgagatgcgttcaaaggggattgagcgccagatgaccgaaggggaat

SEQ ID NO: 5993 - DNA, 75 bp, synthetic construct
  source 1..75: mol_type = other DNA
caacagtgatatcgtcaatcacttcttcagccgcgcagcccggttgttcccggtcggtatcagccagataatcac

SEQ ID NO: 5994 - DNA, 75 bp, synthetic construct
  source 1..75: mol_type = other DNA
gatattctgattgcgtggctgcaggacaatatcgactgcgaatcgggaattatctttgacaacgatgaggataaa

SEQ ID NO: 5995 - DNA, 75 bp, synthetic construct
  source 1..75: mol_type = other DNA
gaacgtcctgaccagctgtgggtggctgattttacttacggtgtgcccggagttcagggcgggcatggatgctta

SEQ ID NO: 5996 - DNA, 75 bp, synthetic construct
  source 1..75: mol_type = other DNA
cgcatcccgatgacaatcacgaccgtccctggtggggactaccctgcaccgtgacgccctgtttcggcgcccgtc

SEQ ID NO: 5997 - DNA, 75 bp, synthetic construct
  source 1..75: mol_type = other DNA
cgatccgctggaagtggcgcagtggctgcaggcctgtcacgatgcaggaatggaggttcgtgtgcaggttaatga

SEQ ID NO: 5998 - DNA, 75 bp, synthetic construct
  source 1..75: mol_type = other DNA
gcgctatttaaccagaagctggcggaatatctggtgctgtataacagcaaaagaccccacaaggcgctcgcacta

SEQ ID NO: 5999 - DNA, 75 bp, synthetic construct
  source 1..75: mol_type = other DNA
gtgtctggggttcctgacatacctgacgaatctgtatttcaagattaaagaagaccggcgcaaagctgcgcgggg

SEQ ID NO: 6000 - DNA, 75 bp, synthetic construct
  source 1..75: mol_type = other DNA
cctgtgggcgaagtttcaggattttcaggtgcgtatccgtgacgccatcgtgaaacgtcaggcactggaccgcat

SEQ ID NO: 6001 - DNA, 75 bp, synthetic construct
  source 1..75: mol_type = other DNA
acccgcatcagctgcagcagcttatccgcctgccggggcagcagtatgatgaggagtccggcctgtattacaacc

SEQ ID NO: 6002 - DNA, 75 bp, synthetic construct
  source 1..75: mol_type = other DNA
gatgctccaggctcacataaagcaggttatgcgattctccgttcagaggatttaagttcatgggagtatgtgcca

SEQ ID NO: 6003 - DNA, 75 bp, synthetic construct
  source 1..75: mol_type = other DNA
gtcctcggtacggccaacggaatgaccatcagtaccggtctggagtatgggccggataacgaggccaataccggc

SEQ ID NO: 6004 - DNA, 75 bp, synthetic construct
  source 1..75: mol_type = other DNA
cgggccccgtcgcccgtgaagatatggggctaacacttcctcatgaacatctgttcaacgatctttcctctgttg

SEQ ID NO: 6005 - DNA, 75 bp, synthetic construct
  source 1..75: mol_type = other DNA
acaacccatgcgtcagtgggtgttgagcttcccgtttcagctgcgtttcctgtttgccagccggcccgagatcat

SEQ ID NO: 6006 - DNA, 75 bp, synthetic construct
  source 1..75: mol_type = other DNA
aacgttggggggcatgggtggcaaataatcacgaggatgtggaatggtcatctgttgctgcaggttttaagggat

SEQ ID NO: 6007 - DNA, 75 bp, synthetic construct
  source 1..75: mol_type = other DNA
acgaaaagcgactgttgcctgcggcgccgtgctgcccgaactgcggcggttcactgagctatctgggcgaggata

SEQ ID NO: 6008 - DNA, 75 bp, synthetic construct
  source 1..75: mol_type = other DNA
ggcactggcggcgtcactggatgcgcaggggtacagcgttaacgacatcattcatatcctgatggcggaaggagg

SEQ ID NO: 6009 - DNA, 75 bp, synthetic construct
  source 1..75: mol_type = other DNA
tgtagtcggcttgctgctggccgcgctgtatcagcctgtatggactagcgccatctttcagccgcaagacttcgg

SEQ ID NO: 6010 - DNA, 75 bp, synthetic construct
  source 1..75: mol_type = other DNA
ccgctgctcggtgcgaaggtccttcccggcgaaaccgaccttgccctgcccggcccgctgccgttcatcctctcc

SEQ ID NO: 6011 - DNA, 75 bp, synthetic construct
  source 1..75: mol_type = other DNA
tgcagcaggctatcaacgattatgaaagcgttcgtgatgagcttcctttcgggcttgatgattaccaggggaata

SEQ ID NO: 6012 - DNA, 75 bp, synthetic construct
  source 1..75: mol_type = other DNA
cggctccatgctgggtatcgccggttatcaggtgattgagattgccattcagcgccgctttaagggcagggggaa

SEQ ID NO: 6013 - DNA, 75 bp, synthetic construct
  source 1..75: mol_type = other DNA
gtggtggcgaactcagttctctgggatgtgatgtgtcagagcaactggagcttatcagcagcgcctttaaggtta

SEQ ID NO: 6014 - DNA, 75 bp, synthetic construct
  source 1..75: mol_type = other DNA
agtgacgagcaacatttatttggcagagctgcactgatggtcaggtatgaagatgaaaataaaacgccagtgacg

SEQ ID NO: 6015 - DNA, 75 bp, synthetic construct
  source 1..75: mol_type = other DNA
caatcagctacatcgggcgcgatgaacttgaggcatgtggtgaggcgtttctggcgcaggttcgccagcaggcgg

SEQ ID NO: 6016 - DNA, 75 bp, synthetic construct
  source 1..75: mol_type = other DNA
tggtctggaaactggaccgactggggcgcagtatgcggcatcttgtcgtgctggtggaggagttgcgcgaacgag

SEQ ID NO: 6017 - DNA, 75 bp, synthetic construct
  source 1..75: mol_type = other DNA
ttagttacagtaaagcgctccagaggtggcgtaataagacgtgagcatcttaaaggaaaagatatctccgtaaaa

SEQ ID NO: 6018 - DNA, 75 bp, synthetic construct
  source 1..75: mol_type = other DNA
aaaagaacggcgagccagctacagccgtgaatttaaggtccgtctggctaagcaggcattacagcccggtgctgt

SEQ ID NO: 6019 - DNA, 75 bp, synthetic construct
  source 1..75: mol_type = other DNA
tggctattttagtcagctttgtggcgggatgtgcgccattacatccttcaaattgccataaaactacagccctgg

SEQ ID NO: 6020 - DNA, 75 bp, synthetic construct
  source 1..75: mol_type = other DNA
atattcccctagtcaatctatttagcttgcacgtttacgaattaattctcgtgacaactaaaccaaaatttgaat

SEQ ID NO: 6021 - DNA, 75 bp, synthetic construct
  source 1..75: mol_type = other DNA
acaggccacaccacgcaaacagcccaccagcaacgcaaaggcacgggcaaatattcagaaaatgaaaaacatgat

SEQ ID NO: 6022 - DNA, 75 bp, synthetic construct
  source 1..75: mol_type = other DNA
gcatccggcgcacgcgccgaccggcctgagctgctgcgcatgatcggcgacctacagcccggcgaggtggtcatt

SEQ ID NO: 6023 - DNA, 75 bp, synthetic construct
  source 1..75: mol_type = other DNA
caggtgaacaggcaacaactgaaacaatggaaccggatacaactgaacatggccagaacgcgcagtcgctggatg

SEQ ID NO: 6024 - DNA, 75 bp, synthetic construct
  source 1..75: mol_type = other DNA
actcggacttgcaccacaagttgctcgccgcatgatgcaagccagtatgaagtttttgggagaaggtgatgagcc

SEQ ID NO: 6025 - DNA, 75 bp, synthetic construct
  source 1..75: mol_type = other DNA
gaacattccctgaaatgtcaacccggcctccaaagcgagggcttctggacccatggagggagtggttaaaagagc

SEQ ID NO: 6026 - DNA, 75 bp, synthetic construct
  source 1..75: mol_type = other DNA
ctgaaaatgccggcctttgaatgggttcatgtgcagctccatcagcaaaaggggatgataagtttatcaccaccg

SEQ ID NO: 6027 - DNA, 75 bp, synthetic construct
  source 1..75: mol_type = other DNA
cgctgtccgttgtcctgctttttctggccagctgtacacaggcatccacacgtgcggaaatcgagcgactctggc

SEQ ID NO: 6028 - DNA, 75 bp, synthetic construct
  source 1..75: mol_type = other DNA
ctggacaacctggcagcgggttcaggagaatatgataaaaggtggattatcggggcgaagtgcctccggtaaaaa

SEQ ID NO: 6029 - DNA, 75 bp, synthetic construct
  source 1..75: mol_type = other DNA
aagctgatttacgaaggaggcatggcgggttctggtggtgaaggtgttaccgcgaccatccatggcaatatcgag

SEQ ID NO: 6030 - DNA, 75 bp, synthetic construct
  source 1..75: mol_type = other DNA
aacgcgatccggtcggaaacggtggtgttcctcgtgtgctctgggaaatcaggagaatgagtaccactggcattc

SEQ ID NO: 6031 - DNA, 75 bp, synthetic construct
  source 1..75: mol_type = other DNA
ttctgggtttttgcgcagcacacgcattcgaccgatccacggagcggtgtcgtgcgtcggcactgttgcaaatag

SEQ ID NO: 6032 - DNA, 75 bp, synthetic construct
  source 1..75: mol_type = other DNA
tcacgctgtgggagttcttccagcagttaggcaaaaccttcatgttacccgtggcattattgtcgttctgcggca

SEQ ID NO: 6033 - DNA, 75 bp, synthetic construct
  source 1..75: mol_type = other DNA
tgaacgagtcggttaagtcagagcagtcaccgcgggtggtactctgggaaatcgacctgacggtacagggtggtg

SEQ ID NO: 6034 - DNA, 75 bp, synthetic construct
  source 1..75: mol_type = other DNA
aggacggggttgttattcgcgagataacccgcttttcccgtctgctggatgtcagtcctgtgacatatcctgcct

SEQ ID NO: 6035 - DNA, 75 bp, synthetic construct
  source 1..75: mol_type = other DNA
acccgccgacggtgaacacttactggcgacgccgtggcagcacatattttgtatcaaaagccggggagcgttatc

SEQ ID NO: 6036 - DNA, 75 bp, synthetic construct
  source 1..75: mol_type = other DNA
catccaggctccggagacacagaccattcgtgatctggtgctggccccgatgcaacgtggagatattaaccagtc

SEQ ID NO: 6037 - DNA, 75 bp, synthetic construct
  source 1..75: mol_type = other DNA
atgaccacaacgcaaaaaacgactgacgttacagcccgtcgacgcagccactggtggtggacggtgccgggatgc

SEQ ID NO: 6038 - DNA, 75 bp, synthetic construct
  source 1..75: mol_type = other DNA
cacacaagaccgcctgtcttattgcacaatacggtgaaaattacatgcatattgcctgcttatttctgcgtaaag

SEQ ID NO: 6039 - DNA, 75 bp, synthetic construct
  source 1..75: mol_type = other DNA
gcgaatctctggtatgtggcgtgttccccaaccaggacggtacgttcaccgcgatgacgtataccaaaagcaaaa

SEQ ID NO: 6040 - DNA, 75 bp, synthetic construct
  source 1..75: mol_type = other DNA
tgaagagccattaactcgtgtccccgcttacgaatatccgttactctcctgcgtacaagctggcgcattctcaat

SEQ ID NO: 6041 - DNA, 75 bp, synthetic construct
  source 1..75: mol_type = other DNA
ggcaacttgctgaaggccagaaacgtagcgaggagatcaaccgcctgaatcgccagttgcgggtggaaaaaattc

SEQ ID NO: 6042 - DNA, 75 bp, synthetic construct
  source 1..75: mol_type = other DNA
atgcaaattggctatattcgtgtgtcaacaaacgaccagaacacggatttacaacgcaatgcactgaactgcgca

SEQ ID NO: 6043 - DNA, 75 bp, synthetic construct
  source 1..75: mol_type = other DNA
ttccttttcgtgaaggtgagcggcgtcgtcagaaaaccacgctgacagagcagaaatacagccgccagcgggaac

SEQ ID NO: 6044 - DNA, 75 bp, synthetic construct
  source 1..75: mol_type = other DNA
cgcctgtttgagctctaccagtttgaccggaaagtgctgctgcaactcaaggccatcaatgccctgaagcgccgg

SEQ ID NO: 6045 - DNA, 75 bp, synthetic construct
  source 1..75: mol_type = other DNA
aatcagcgatggtgctctgacgggttcgagttccgctgtgataacggagaaaaactgcgagtcacgttcgcgctg

SEQ ID NO: 6046 - DNA, 75 bp, synthetic construct
  source 1..75: mol_type = other DNA
tgtgcgtgttgtggtaagccagccgacgatccccatcacctgattggtcatggtcagggcggaatggggacaaaa

SEQ ID NO: 6047 - DNA, 75 bp, synthetic construct
  source 1..75: mol_type = other DNA
accgtggcatttgaagagaagtatggttcccaactggagctgatatttcgttttatcgatcgcgcgctggcgatt

SEQ ID NO: 6048 - DNA, 75 bp, synthetic construct
  source 1..75: mol_type = other DNA
ggtgtggccctacacaaacagtgatgtggtggctgacaatgaaggtgtgggattccgctacagtttcagcgccct

SEQ ID NO: 6049 - DNA, 75 bp, synthetic construct
  source 1..75: mol_type = other DNA
atgtcggacacactccccggaacaacgcttcccgacgacaacaaagacctcccctggtgggggctgccctgcacc

SEQ ID NO: 6050 - DNA, 75 bp, synthetic construct
  source 1..75: mol_type = other DNA
aagaatcagcacatcaaactgcccttccctggcaggaagcactatcgatcccccttttaacgtgtctgacggaac

SEQ ID NO: 6051 - DNA, 75 bp, synthetic construct
  source 1..75: mol_type = other DNA
gtgaggaggcgtaacgcgagaggcgggataagcagaacagtctcagtgtatctcgatgaagatacaaataaccga

SEQ ID NO: 6052 - DNA, 75 bp, synthetic construct
  source 1..75: mol_type = other DNA
gaattgtggtggacagcctttcgccgtcgttcaggtgcaacatatcttcacgcctgtcgctatcagtcacacgct

SEQ ID NO: 6053 - DNA, 75 bp, synthetic construct
  source 1..75: mol_type = other DNA
aatcgccagcttacccgttacagcgatacccgctggcatgaagattccgtgcgtaaccgctggttcagcgtaatg

SEQ ID NO: 6054 - DNA, 75 bp, synthetic construct
  source 1..75: mol_type = other DNA
tcgttcaggaccgcccgtcggatgtggtgtggccgtacaccaacagcgatgtggtggtggatgataacggcgtgg

SEQ ID NO: 6055 - DNA, 75 bp, synthetic construct
  source 1..75: mol_type = other DNA
atgtcagttacagagtttaaggcaaaaactggtcgtaaatccagccgtaaatcgtcaaaagaacaggaaaacgcc

SEQ ID NO: 6056 - DNA, 75 bp, synthetic construct
  source 1..75: mol_type = other DNA
tgcggtatctgcagccagacgcgaggacccgtacttcaaagccagttacgacaacgtggactacagccagatccc

SEQ ID NO: 6057 - DNA, 75 bp, synthetic construct
  source 1..75: mol_type = other DNA
atggctgtgcttcgtacgttaccgggcagaatcaaaactctgaacacccggcgggtgaatattctgaagggtgaa

SEQ ID NO: 6058 - DNA, 75 bp, synthetic construct
  source 1..75: mol_type = other DNA
atgaaatcattaaccgcagtgcgtaaaaaaagccctaattatcccgttgagttcaaaatcaaaatggttgaactc

SEQ ID NO: 6059 - DNA, 75 bp, synthetic construct
  source 1..75: mol_type = other DNA
ctggcgggcgtatgaaaaaacgcacgggatgcggggatgggaatgcctggttgacggggtggcggatattgacgt

SEQ ID NO: 6060 - DNA, 75 bp, synthetic construct
  source 1..75: mol_type = other DNA
ggaaagactggccgcgatgatcccgcccggtcagcccattcttgtggggcatcacagcgaacgccgcgcccgtcg

SEQ ID NO: 6061 - DNA, 75 bp, synthetic construct
  source 1..75: mol_type = other DNA
ggacgtaaggccgcgcagccggagcctcagcagccgtctgaacccgcgtatgacttcgatgacgacattccgttc

SEQ ID NO: 6062 - DNA, 75 bp, synthetic construct
  source 1..75: mol_type = other DNA
gggcgaagccacatcacacacttacgctgtcaaaaacacctactacaagctgagcgttaacgatcgcccgctgtg

SEQ ID NO: 6063 - DNA, 75 bp, synthetic construct
  source 1..75: mol_type = other DNA
cggggaaatcgtggcgtgggaaacggcctgcaggcctacagaggagctggtgaagcggatgttaaataaggggct

SEQ ID NO: 6064 - DNA, 75 bp, synthetic construct
  source 1..75: mol_type = other DNA
ccgtttcgatgagcagatgagccgggtaaggcgtcatttttcaggtctggataccgacgccagaaaaaccgccag

SEQ ID NO: 6065 - DNA, 75 bp, synthetic construct
  source 1..75: mol_type = other DNA
aaatatttgataaagttcgaaacgatttaaactatcaatggttttattctgagctaaaacgtcacaatgtctcac

SEQ ID NO: 6066 - DNA, 75 bp, synthetic construct
  source 1..75: mol_type = other DNA
attaagcgtcaccgaaccggcgacagtcggggagattgcgcagaatacttacctttcacgcgaacgctgccagtt

SEQ ID NO: 6067 - DNA, 75 bp, synthetic construct
  source 1..75: mol_type = other DNA
aaacttgtcacgctaaaccccaaactcaaatcaacagccgccggacgttatcagcttctttcacgctggtgggat

SEQ ID NO: 6068 - DNA, 75 bp, synthetic construct
  source 1..75: mol_type = other DNA
accttgctgcactttacatgctgaaggtacagaaaacaaaaaatggcataccctatgttgccggtattggagcgg

SEQ ID NO: 6069 - DNA, 75 bp, synthetic construct
  source 1..75: mol_type = other DNA
attttcgtgaaacgctgaatacccgccgtgaaaagtcgtggcacaagaccaccgttggggaagtggtgaaggaaa

SEQ ID NO: 6070 - DNA, 75 bp, synthetic construct
  source 1..75: mol_type = other DNA
aaatcgccagtcgtctgcagcaaagaatatctgctgtaatgcgttacgccgtacagtctggcatcatcagatata

SEQ ID NO: 6071 - DNA, 75 bp, synthetic construct
  source 1..75: mol_type = other DNA
atgagcaagaaaaaagggaaaacaccgcgaccagcggcaaaaacaatgaccgccagcgccccgaaaatggaggca

SEQ ID NO: 6072 - DNA, 75 bp, synthetic construct
  source 1..75: mol_type = other DNA
aggcatcgttcaagaacggggtgctcacggtcacgatcgacaagcgcgaggtcagcgcgccgaagcagggacgct

SEQ ID NO: 6073 - DNA, 75 bp, synthetic construct
  source 1..75: mol_type = other DNA
ccaccagcatcatccaggataaggcgaaaaaggtgctggcgctgaaagtggatccggagtcgccggagtctttta

SEQ ID NO: 6074 - DNA, 75 bp, synthetic construct
  source 1..75: mol_type = other DNA
tgattcaacctggcctcaatttgattcacccgcttcaggtgttcgaggttgaacagcaggataatgaaatggtgg

SEQ ID NO: 6075 - DNA, 75 bp, synthetic construct
  source 1..75: mol_type = other DNA
acggaaacagacaacgcctggctgtactcgctgtcgcatcagacgaatgacaccggcgaatcagaatggattcat

SEQ ID NO: 6076 - DNA, 75 bp, synthetic construct
  source 1..75: mol_type = other DNA
tcgtcgcctgttccgctgtgtctccatccgggaaaacacggacggcacctttgccatcacggcggtgcagcacgt

SEQ ID NO: 6077 - DNA, 75 bp, synthetic construct
  source 1..75: mol_type = other DNA
tcactgacgccggttcgataacgttaaccatcgacaatagtcaggccagcgtgcaggttgccaccaccgcaggcg

SEQ ID NO: 6078 - DNA, 75 bp, synthetic construct
  source 1..75: mol_type = other DNA
tttacatcgatagtggtaaaaacaatcgactcatccgttatgatttactgcgaaaagaaaataatgactttgttg

SEQ ID NO: 6079 - DNA, 75 bp, synthetic construct
  source 1..75: mol_type = other DNA
tccggggggcatgggagaagagagagaatgcgcgacttgggctttcagccgccacgttgcaggcagatcttgaaa

SEQ ID NO: 6080 - DNA, 75 bp, synthetic construct
  source 1..75: mol_type = other DNA
gttaatgacggctttatctttctggggcacaggatcattcgcaaacgcagtcgttatggcgagatgcgagtggtc

SEQ ID NO: 6081 - DNA, 75 bp, synthetic construct
  source 1..75: mol_type = other DNA
attaacgtgaaataccgttatgaattcacggacacgctggggctggtgacgtcattcagctatgcaggagacaag

SEQ ID NO: 6082 - DNA, 75 bp, synthetic construct
  source 1..75: mol_type = other DNA
gttatcgccgtgatgtggcgcttattgttcgccagcagcggctgaaattaaacctgtccggaaggctggcgataa

SEQ ID NO: 6083 - DNA, 75 bp, synthetic construct
  source 1..75: mol_type = other DNA
ttccggtaatactgggggcagtgttaatgtctcagcatgcacatgcagctgataatctgacctttaaaggaaaac

SEQ ID NO: 6084 - DNA, 75 bp, synthetic construct
  source 1..75: mol_type = other DNA
attgatgcttatgctgccagtgatcctgctgaatgttttgccgtactttctgaatatttctttagcgccccagaa

SEQ ID NO: 6085 - DNA, 75 bp, synthetic construct
  source 1..75: mol_type = other DNA
cagagctgcgccactgatgcagtcactgtatgactggatacagactcagatgaaaacactgtcgcgtcactcgga

SEQ ID NO: 6086 - DNA, 75 bp, synthetic construct
  source 1..75: mol_type = other DNA
ggtgatggaccgcatgtccatgaacggtggtcgctgggtgacgtttaactgggagagctggcgtccgaacgtcag

SEQ ID NO: 6087 - DNA, 75 bp, synthetic construct
  source 1..75: mol_type = other DNA
ggaaccctgccacagggaattatactgttaccagcgaaacggcaaaaagccgtggcaagaaatctgggcgcagta

SEQ ID NO: 6088 - DNA, 75 bp, synthetic construct
  source 1..75: mol_type = other DNA
cgccggtcactgcgattaaggtaacgccgacaggtacggttgaaaaagggaaaacaaccaccctgaccgttactg

SEQ ID NO: 6089 - DNA, 75 bp, synthetic construct
  source 1..75: mol_type = other DNA
aaagtttctttccagccaacaaactgttgagcttgttcatgaattaaccaacacccagaatttgggtgttgaccc

SEQ ID NO: 6090 - DNA, 75 bp, synthetic construct
  source 1..75: mol_type = other DNA
tactggaccccctttcgttacccgctgctactgaatctggcaagcctgttcgataatgaactggctgaaaaagcg

SEQ ID NO: 6091 - DNA, 75 bp, synthetic construct
  source 1..75: mol_type = other DNA
atgccaataaaatatggagaatttatcgtgacatgaaagggatatgtcttcccggacagggaggcaggcaatgca

SEQ ID NO: 6092 - DNA, 75 bp, synthetic construct
  source 1..75: mol_type = other DNA
atgagcagagtaaccgcgattatttccgctctggttatctgcatcatcgtttgcttgtcatgggctgttaatcat

SEQ ID NO: 6093 - DNA, 75 bp, synthetic construct
  source 1..75: mol_type = other DNA
gaatatgcgaatatggtcgaagatatcagggagaaggtgtcatctgagatggagaggttctttccagaaaatgat

SEQ ID NO: 6094 - DNA, 75 bp, synthetic construct
  source 1..75: mol_type = other DNA
gatgtggcaaaggttcaggggcaactggcaggtatcagccaggtgttttgcgatccacacgtaggcgtttctctg

SEQ ID NO: 6095 - DNA, 75 bp, synthetic construct
  source 1..75: mol_type = other DNA
tcttacgcgctaccatcagatgctggaagagcaatatcccctccaggagaacggacagatattgctggcatttcc

SEQ ID NO: 6096 - DNA, 75 bp, synthetic construct
  source 1..75: mol_type = other DNA
gcttaaccgggcgatcaatgatgcggagtcggtactggggacaacccgccgtcgccgtcgtccgctgggagtgag

SEQ ID NO: 6097 - DNA, 75 bp, synthetic construct
  source 1..75: mol_type = other DNA
ggatgtcgatgtgttgcgtcctgatggtcgtcatcgcaccaaaaaattcgctaacaccactaaagggcacgatga

SEQ ID NO: 6098 - DNA, 75 bp, synthetic construct
  source 1..75: mol_type = other DNA
ctgctgtcgccgccggagaacaggttgttcctgcctctgaacttgctgccgccatgaagcagattaaagaactcc

SEQ ID NO: 6099 - DNA, 75 bp, synthetic construct
  source 1..75: mol_type = other DNA
gttcgccgtgcgctggagctgacggaggttgatttcggtattacggaaggcctgcgcagtaagtatcgccagaaa

SEQ ID NO: 6100 - DNA, 75 bp, synthetic construct
  source 1..75: mol_type = other DNA
acaatattaaaaagcgaaaactatatattcgtaacctgaccacaaaaacatgcattactgaccgcatgattaaag

SEQ ID NO: 6101 - DNA, 75 bp, synthetic construct
  source 1..75: mol_type = other DNA
aggcttacgaagaatacttcgaaggtcttgccgaaggcgaagaagctctcagcttcaacgaatttaaacaggcgc

SEQ ID NO: 6102 - DNA, 75 bp, synthetic construct
  source 1..75: mol_type = other DNA
gttaacggcaactataccggaaacaatggcctgatgacgttcaacgcgacgctgggcggcgataattcgcccacc

SEQ ID NO: 6103 - DNA, 75 bp, synthetic construct
  source 1..75: mol_type = other DNA
gtcattgataaactggttacaaagtgctggcaggaagaagcatatgcagagatacaattgagaaaggtgacaaga

SEQ ID NO: 6104 - DNA, 75 bp, synthetic construct
  source 1..75: mol_type = other DNA
gtgatccagctcagttgttggcagtccttgataattcaatcatggttaaatattttaaagatgagaagccaactt

SEQ ID NO: 6105 - DNA, 75 bp, synthetic construct
  source 1..75: mol_type = other DNA
atgatgaaactggccctgacactggaagccgacagcgttaacgtacaggcactgaatatggggcgaattgtcgtt

SEQ ID NO: 6106 - DNA, 75 bp, synthetic construct
  source 1..75: mol_type = other DNA
ggttaccgggcgttatacgaatccggcagaataacggaagccgcgtgtatggctcatgcccggagaaaaatccac

SEQ ID NO: 6107 - DNA, 75 bp, synthetic construct
  source 1..75: mol_type = other DNA
agctttaccttggtgagattggttattcaccactgttaacggccgaagaagaagtttattttgcgcgtcgcgcac

SEQ ID NO: 6108 - DNA, 75 bp, synthetic construct
  source 1..75: mol_type = other DNA
ccggtgtggcagttgctctgtctcttgctgctgtcacgtcactcccggcactggctgctgacacggttgtccagg

SEQ ID NO: 6109 - DNA, 75 bp, synthetic construct
  source 1..75: mol_type = other DNA
tccggcaggtcagaaaaagaaacgtgatgcggagcatggcgaatgtggaaccttttacggcgaacccgaaaaaac

SEQ ID NO: 6110 - DNA, 75 bp, synthetic construct
  source 1..75: mol_type = other DNA
gttcgtgtactggacggtgataccatcgaggtcatggactcacggaaggcggtgcggatcaggctggtaaatatt

SEQ ID NO: 6111 - DNA, 75 bp, synthetic construct
  source 1..75: mol_type = other DNA
attacataaactattataatcaattgaggataaaggaaaaacttggcggtcttagcccggtacaatatcgattga

SEQ ID NO: 6112 - DNA, 75 bp, synthetic construct
  source 1..75: mol_type = other DNA
atgacacagactgaatcagcgattctggcgcatgcccggcggtgtgcgcctgcggagtcgtgcggcttcgtggtg

SEQ ID NO: 6113 - DNA, 75 bp, synthetic construct
  source 1..75: mol_type = other DNA
tcatccccgtttcagacgcgaagacatccccgcgccggaaattgaccccgtgctgaaagccttcgggcgacacat

SEQ ID NO: 6114 - DNA, 75 bp, synthetic construct
  source 1..75: mol_type = other DNA
aagtccccctgtatgcctccatgctgacacaggcaatggactatgaccggattctggcaggctcccgcagccatc

SEQ ID NO: 6115 - DNA, 75 bp, synthetic construct
  source 1..75: mol_type = other DNA
cgtgcaactggcgttgagctggagactgaacgttttgagcagacggtcagggaagtacaggatttagtcagtcag

SEQ ID NO: 6116 - DNA, 75 bp, synthetic construct
  source 1..75: mol_type = other DNA
gtccaatgacgggatatgaaaatttcaaccgtgaggcgtttcacaaggcggaagaggaactgaaacgggaagggc

SEQ ID NO: 6117 - DNA, 75 bp, synthetic construct
  source 1..75: mol_type = other DNA
ccggtaacgcacgtttcacgggaagaacttcaggcattacatatcgcacgagctgaagaactgcctgctgttact

SEQ ID NO: 6118 - DNA, 75 bp, synthetic construct
  source 1..75: mol_type = other DNA
gcaacaccactgtcggacatcgtggaacactgacgctggctgccgggggaagtctgagtggcagaacacagctca

SEQ ID NO: 6119 - DNA, 75 bp, synthetic construct
  source 1..75: mol_type = other DNA
gttcggctaagccggaagcaaaagcctataaacttactgacggtgaaggcatggttttgttggttcaccctaatg

SEQ ID NO: 6120 - DNA, 75 bp, synthetic construct
  source 1..75: mol_type = other DNA
tcagaccaaattgctggtggggtttttattatagaaataggcaaaaatgatgggagaattctgaattttggccac

SEQ ID NO: 6121 - DNA, 75 bp, synthetic construct
  source 1..75: mol_type = other DNA
cgaacggctaacggtttgcttccatgcgcagttaaaacagcgtcacgcaacgatgcgttttgaagaaatgaacga

SEQ ID NO: 6122 - DNA, 75 bp, synthetic construct
  source 1..75: mol_type = other DNA
gaatttcgtgatctgcttgttgagaaattcaaggacagcaaagtagaaacctttattggtactttcaccgcctga

SEQ ID NO: 6123 - DNA, 75 bp, synthetic construct
  source 1..75: mol_type = other DNA
cagcgattacaccaaagaagaattgcgcctgatgcatgctgaaggggtttttcgcacacaagaaatctggagaaa

SEQ ID NO: 6124 - DNA, 75 bp, synthetic construct
  source 1..75: mol_type = other DNA
aaccgtacctgctctgatgacccgctgttcctctttgaaaactacacccgcaccgcgcaggtgctggccgacacg

SEQ ID NO: 6125 - DNA, 75 bp, synthetic construct
  source 1..75: mol_type = other DNA
tcacggtaacatgacgctggaaaatccttcaccagagctgctcactgtattgattcgtgaactgaccgggagggg

SEQ ID NO: 6126 - DNA, 75 bp, synthetic construct
  source 1..75: mol_type = other DNA
gttggcaagttaagtccttttgagcccaagttaaggcagtggctctccaccgagcacaaaaagacaaagaagctg

SEQ ID NO: 6127 - DNA, 75 bp, synthetic construct
  source 1..75: mol_type = other DNA
atggctcaggattaccaccacggagtgcgcgttgttgaagtcaacgaaggcactcgatccattaccacggtgagc

SEQ ID NO: 6128 - DNA, 75 bp, synthetic construct
  source 1..75: mol_type = other DNA
tcccggagaactcagtctgtgcagactaagtacaggcaatggcatctggtcatccgtctgtgaccggaacggtta

SEQ ID NO: 6129 - DNA, 75 bp, synthetic construct
  source 1..75: mol_type = other DNA
ctacgccatgggagagcgcatgacaaaagagctgacaggtaaagccctgtttatggcgctcaggagccagcgccc

SEQ ID NO: 6130 - DNA, 75 bp, synthetic construct
  source 1..75: mol_type = other DNA
ccgaaattttcaacgtggatccgcgaacgattgaacgctggcagtctcaggggctcccttgcgtctccggaggtg

SEQ ID NO: 6131 - DNA, 75 bp, synthetic construct
  source 1..75: mol_type = other DNA
cgctggtgtacgcctggtaccagggagattccacgctttcagcgtttaataaaaccctggttctttccggtaatc

SEQ ID NO: 6132 - DNA, 75 bp, synthetic construct
  source 1..75: mol_type = other DNA
agcacgacgccagcttaacgcccttaatcagttacaacgcacgggtacagtgctcagcgaaaaacaacaaaagct

SEQ ID NO: 6133 - DNA, 75 bp, synthetic construct
  source 1..75: mol_type = other DNA
gagaaagcagaaaaggcttttgatgaggcggacaaaaaatggcagtggtatcagagccggagccaccggcgcggt

SEQ ID NO: 6134 - DNA, 75 bp, synthetic construct
  source 1..75: mol_type = other DNA
aattgctggatggggttgaagttgagtggttgccattgggggaaataaccaaatatgaacagccaacaaagtatt

SEQ ID NO: 6135 - DNA, 75 bp, synthetic construct
  source 1..75: mol_type = other DNA
ttggtgatggtgaaaaccgttacaatatcgtggaccggaataatgcgccgtcactggattttcatgccccccggc

SEQ ID NO: 6136 - DNA, 75 bp, synthetic construct
  source 1..75: mol_type = other DNA
gcgatgctgtggaacgccagatgagccatcaggagcgtaatggtgtacgtgctgcgtatatccataaagccgaac

SEQ ID NO: 6137 - DNA, 75 bp, synthetic construct
  source 1..75: mol_type = other DNA
gcgggagttccgtctggtgctgaccacgcaggcgcagcgtgcggaagaggcccgcacctcttcgctatcttcttc

SEQ ID NO: 6138 - DNA, 75 bp, synthetic construct
  source 1..75: mol_type = other DNA
acacaccgcgtgaggcgaaagacaatctcaaatccacgcagatgatgagcgtgattgatgcgattggtgagggac

SEQ ID NO: 6139 - DNA, 75 bp, synthetic construct
  source 1..75: mol_type = other DNA
atgccaacaccaaatcctctggcaccggtgaaaggggccgggaccacactgtgggtttataacgggagcggcgac

SEQ ID NO: 6140 - DNA, 75 bp, synthetic construct
  source 1..75: mol_type = other DNA
gcatcgatgttatgacgcgtatccctgataacgccattgatttcatattaactgacccgccatatctcgtcggtt

SEQ ID NO: 6141 - DNA, 75 bp, synthetic construct
  source 1..75: mol_type = other DNA
atgatgaaatatgtgtacccggtaaccccggtgtgcatcgtttttgattattcccgcacactcgcgcagaaggag

SEQ ID NO: 6142 - DNA, 75 bp, synthetic construct
  source 1..75: mol_type = other DNA
gtaattcagacctgggactaataactgcttttttcgaagcatacctggacgctgactacactgatcggggtctgc

SEQ ID NO: 6143 - DNA, 75 bp, synthetic construct
  source 1..75: mol_type = other DNA
cctgtggggatgggctgttgtggcgcagttcgggtactttctggcgggatatccgtggtatgagggcaatattct

SEQ ID NO: 6144 - DNA, 75 bp, synthetic construct
  source 1..75: mol_type = other DNA
tgaaatcaagacaatcacacatccgcacttcggcgataaaccggtaaaggtgttcgcgataaaggtgaatatcgg

SEQ ID NO: 6145 - DNA, 75 bp, synthetic construct
  source 1..75: mol_type = other DNA
ggatctgaatatggcaaaactcatcagcagtcatgaccatatcagcgcctgtttcccgctggatacgtatccgcg

SEQ ID NO: 6146 - DNA, 75 bp, synthetic construct
  source 1..75: mol_type = other DNA
aaagcctgtacaaaatgtgactgcatcgttgaagcaccggcgccgtcccgcccgatagagcgtggtatcgcgggc

SEQ ID NO: 6147 - DNA, 75 bp, synthetic construct
  source 1..75: mol_type = other DNA
cgacgaggaaacgaaactcgcgcagaccgtttccaatatcatcggcaccaccgacgaaaacggtcagtacaccgg

SEQ ID NO: 6148 - DNA, 75 bp, synthetic construct
  source 1..75: mol_type = other DNA
ccggacccgcagaggacgacatcaccgataccgatgatggtgatacccgtatttcagcgggtgcattctggccgg

SEQ ID NO: 6149 - DNA, 75 bp, synthetic construct
  source 1..75: mol_type = other DNA
tcggtaaaagctcagaaaaacttcgcgcaaaaaccgaacgacagatacaggaagcacaggagcgaatcagcgcac

SEQ ID NO: 6150 - DNA, 75 bp, synthetic construct
  source 1..75: mol_type = other DNA
atggttgaactggcatcacaacccggtgcttgtgtggcccagattgcacgagaaaatggcgtcaatgataatgtt

SEQ ID NO: 6151 - DNA, 75 bp, synthetic construct
  source 1..75: mol_type = other DNA
cctcagccttcatcagtggtaaggcaccggaaatcaaaccctcgcccggcggcaacacgccatcgggtccgtctg

SEQ ID NO: 6152 - DNA, 75 bp, synthetic construct
  source 1..75: mol_type = other DNA
accgaccttaacgccggtcgctgccgtgtgcagaccggcggcatgtgcaccgactggcttcagtggctgacccat

SEQ ID NO: 6153 - DNA, 75 bp, synthetic construct
  source 1..75: mol_type = other DNA
tgttcatgtaggcagggatggtgttgtcaggcatatgagcgacatctattacaaaggggctgaatgtgaaaactt

SEQ ID NO: 6154 - DNA, 75 bp, synthetic construct
  source 1..75: mol_type = other DNA
actggtggagtagtgaaggcataccagattcgcccggatcttccgaagttgtttccacacaccgaaaagaacgca

SEQ ID NO: 6155 - DNA, 75 bp, synthetic construct
  source 1..75: mol_type = other DNA
atgttctttggcagcgatcacggcggcgagcgtggagcactgttgtacgggctgatcggcacctgccgtctgaac

SEQ ID NO: 6156 - DNA, 75 bp, synthetic construct
  source 1..75: mol_type = other DNA
aaggcattgcggatgacagtactgtttcagatggcgtcgggtctcagcctgacggtagtgaagagcctcagcctg

SEQ ID NO: 6157 - DNA, 75 bp, synthetic construct
  source 1..75: mol_type = other DNA
atgtcggactgccaccctgttttattgcccgaaggccctttctcacgcgaacaggcggttgccgtcacaacagct

SEQ ID NO: 6158 - DNA, 75 bp, synthetic construct
  source 1..75: mol_type = other DNA
cagtgttcgcccgttatcatacggctttatttcgcaggacgacctggcaaaacagttcctgaacgtttctgaaga

SEQ ID NO: 6159 - DNA, 75 bp, synthetic construct
  source 1..75: mol_type = other DNA
attttgggcatccggttgcttattaccctgggctcgttaaatacatgggaagtccgcacgctgttattttctttg

SEQ ID NO: 6160 - DNA, 75 bp, synthetic construct
  source 1..75: mol_type = other DNA
aatggcgcgccttaacctgaacgataacgggacaaacatttgctgggactttaccaacctttatggcggtacgat

SEQ ID NO: 6161 - DNA, 75 bp, synthetic construct
  source 1..75: mol_type = other DNA
acaccgcgtcgtacacgcttcttgttgccgggaagaaaaaaaacaccggggaagagtgggacgtcctggaattca

SEQ ID NO: 6162 - DNA, 75 bp, synthetic construct
  source 1..75: mol_type = other DNA
atgttgaccacaacaagccacgacagcgtattgctgcgtgccgacgatcccctgatcgacatgaactacatcacc

SEQ ID NO: 6163 - DNA, 75 bp, synthetic construct
  source 1..75: mol_type = other DNA
ccacgggtaccgtgcagatcaccctgacctttgagtctggtactgatgcggatatcgcgcaggttcaggtgcaga

SEQ ID NO: 6164 - DNA, 75 bp, synthetic construct
  source 1..75: mol_type = other DNA
gtaataactttatggtggaaacgcttgaaaagaaccgcagctggacacgctattttctggcgcgggaattgcgta

SEQ ID NO: 6165 - DNA, 75 bp, synthetic construct
  source 1..75: mol_type = other DNA
cgacgtgctgaccggaagtgatgacggtcgccacagcaacacgtctctggcgtggggagctggcgtgcagtttaa

SEQ ID NO: 6166 - DNA, 75 bp, synthetic construct
  source 1..75: mol_type = other DNA
cactgctgtgtgaaaaagatgctcagaaacgtgctgccggctggcaccgactgtattccgcagataacggaatga

SEQ ID NO: 6167 - DNA, 75 bp, synthetic construct
  source 1..75: mol_type = other DNA
taaattcgcccgctactgggatgtggagctgcgtgagatccctatgcgccccggtcagttgtttatggacccgaa

SEQ ID NO: 6168 - DNA, 75 bp, synthetic construct
  source 1..75: mol_type = other DNA
gttatgataatccacacagtgacctcccctgcgcaacggacgatgccaccggcagccggaaaaccatgacgtgga

SEQ ID NO: 6169 - DNA, 75 bp, synthetic construct
  source 1..75: mol_type = other DNA
gctacttcaaacaaaagggcgaaacctttgccgatggtcacggacaggtgatgcatagcaaccgcgactgggagg

SEQ ID NO: 6170 - DNA, 75 bp, synthetic construct
  source 1..75: mol_type = other DNA
catcgctttcatttttttcagcaagtgcgctggcgacgcctgattgtgtaactggaaaggtggagtatacaaaat

SEQ ID NO: 6171 - DNA, 75 bp, synthetic construct
  source 1..75: mol_type = other DNA
aacgcggatgtggaaaatgtgttgtcgcggatgtcccgatttaatgatcggattcaagggttcctgttcagcgaa

SEQ ID NO: 6172 - DNA, 75 bp, synthetic construct
  source 1..75: mol_type = other DNA
gcggttatgcaacttagtgcggatatggcgctgaatgaggccaaagccatcctgattgctgattgtgaaaatggg

SEQ ID NO: 6173 - DNA, 75 bp, synthetic construct
  source 1..75: mol_type = other DNA
ctccgggaatattcggttatctgccggggaacatgccgcgcgaagtctggtctggccgaagctaaaaccttttct

SEQ ID NO: 6174 - DNA, 75 bp, synthetic construct
  source 1..75: mol_type = other DNA
attatccctccagtgcagagaaaatcggccagttttctctgcctgcagtccgcatgccgtatcgggccttgggtt

SEQ ID NO: 6175 - DNA, 75 bp, synthetic construct
  source 1..75: mol_type = other DNA
aaaagcaatacgaattgagatgcagatagccgaagggtttattgacggatgtttgtctgtgctgggggtaagact

SEQ ID NO: 6176 - DNA, 75 bp, synthetic construct
  source 1..75: mol_type = other DNA
tactctttacgcaaaacttggatataaaggaaatatgcagagtttgcaggcgggaacattttctgcaacggcaac

SEQ ID NO: 6177 - DNA, 75 bp, synthetic construct
  source 1..75: mol_type = other DNA
tattttagttcagaatacatcaaacacatcttctgatgggttactcgtttatctttataacagtaatgcaggaaa

SEQ ID NO: 6178 - DNA, 75 bp, synthetic construct
  source 1..75: mol_type = other DNA
cagaacacgatcttgaagctataggtgactggatcgctcaggataatcctgtccgtgcaatcagttttaccgaag

SEQ ID NO: 6179 - DNA, 75 bp, synthetic construct
  source 1..75: mol_type = other DNA
ttgtggctgtaccacgacagcggtgatgcaggactgacccagctttaccggatgcgcgatgcgcagttgtggcgt

SEQ ID NO: 6180 - DNA, 75 bp, synthetic construct
  source 1..75: mol_type = other DNA
ccgcgcgagacgcagccgcatttcttcgaatcccgattccctgagctgttaaagctgctcgataccgttcattga

SEQ ID NO: 6181 - DNA, 75 bp, synthetic construct
  source 1..75: mol_type = other DNA
caaaaatggccggcaggttatctggtcttcggggatagcccgggacactctcatttacacaggaggtgaccagac

SEQ ID NO: 6182 - DNA, 75 bp, synthetic construct
  source 1..75: mol_type = other DNA
gttgtcacattgtacagacacagaggcgttgattattgatcgcgttatcagtgaggtgcttggggaatatcccgg

SEQ ID NO: 6183 - DNA, 75 bp, synthetic construct
  source 1..75: mol_type = other DNA
gcatcgatgttatggcccgtatccctgataacgccattgatctcatacttaccgacccgccttacctggtggggt

SEQ ID NO: 6184 - DNA, 75 bp, synthetic construct
  source 1..75: mol_type = other DNA
atgcagcagctttcctttctgcccggagagatgacgcccggcgagcgcagtctcattctgcgggccctgaaaacc

SEQ ID NO: 6185 - DNA, 75 bp, synthetic construct
  source 1..75: mol_type = other DNA
ggtcgtatattggcggcggtaagacggggaatatgttcaaccagttgttggcctctaaaaagctgacaaaaacgg

SEQ ID NO: 6186 - DNA, 75 bp, synthetic construct
  source 1..75: mol_type = other DNA
cttatcagccaacaggcgatcagcagaaagacgcaatcgcacaaatcgggatcatgcagaatcgtgctgttcagg

SEQ ID NO: 6187 - DNA, 75 bp, synthetic construct
  source 1..75: mol_type = other DNA
tcagctggcaaaagccgcggaagagtcgacagtacatcatgattatgcccgggcgttaatattgtggcggcatgc

SEQ ID NO: 6188 - DNA, 75 bp, synthetic construct
  source 1..75: mol_type = other DNA
gccgtcaaatccggcgcaatggcaaccgacacggttgtgaataccggcgcggaagggggaccggatgcagaaaat

SEQ ID NO: 6189 - DNA, 75 bp, synthetic construct
  source 1..75: mol_type = other DNA
cctttgacacctgtcagaataacaaagcagcatggctgcaacgcaaaaatgagctggcagcggccgaacaggaat

SEQ ID NO: 6190 - DNA, 75 bp, synthetic construct
  source 1..75: mol_type = other DNA
cttcgcatctccggcaaagggcgcgctcttcttgcgcgctacatccagcagaaccagccacatgcgcagttctgg

SEQ ID NO: 6191 - DNA, 75 bp, synthetic construct
  source 1..75: mol_type = other DNA
tgacaagagtcgccgcaagggagcgattcatgtcattagtgcgttctcaacaatgcacagtctggtcatcggaca

SEQ ID NO: 6192 - DNA, 75 bp, synthetic construct
  source 1..75: mol_type = other DNA
atgagtaataccgacgcttcaggtgagaagcgagtgacaggcaccagcgagcgacgagaacagatcattcagcgt

SEQ ID NO: 6193 - DNA, 75 bp, synthetic construct
  source 1..75: mol_type = other DNA
tggcggctaatggcaagaaaggaaaggtgattctcggcgcgatgatgcgcaagctggcacaggtggcgtatggag

SEQ ID NO: 6194 - DNA, 75 bp, synthetic construct
  source 1..75: mol_type = other DNA
cgatatataaagaacaggagttacctgagtatcgtggcaatcccttaattgaagcacttcctgaagcgcttacgg

SEQ ID NO: 6195 - DNA, 75 bp, synthetic construct
  source 1..75: mol_type = other DNA
tccgggtgctgtatctgaacaaccagaatcagctgattgccggtgaaaccctcttcaccggcaccatcaaccgca

SEQ ID NO: 6196 - DNA, 75 bp, synthetic construct
  source 1..75: mol_type = other DNA
gcagtgatgtgattgtctgcgctgaaatggacgaacagtggggctacgtcggtgctaaatcacgtcagcgctggc

SEQ ID NO: 6197 - DNA, 75 bp, synthetic construct
  source 1..75: mol_type = other DNA
caattgaaaaaccgctctcctccctgccttactcgctttcccgtcacatcctggaacatctgcgcaaactcacca

SEQ ID NO: 6198 - DNA, 75 bp, synthetic construct
  source 1..75: mol_type = other DNA
gaggcatgtggtgaggcgtttctggcgcaggttcgccagcaggcggaaaaactggtcagggagatggcggcatga

SEQ ID NO: 6199 - DNA, 75 bp, synthetic construct
  source 1..75: mol_type = other DNA
aaaggaggtgcgctgaccgctcagggagggctgtttacaagtggaagcattgatattggtgacgcttcccttctg

SEQ ID NO: 6200 - DNA, 75 bp, synthetic construct
  source 1..75: mol_type = other DNA
gcgtaaccgctggttcagcgtgatggcggggccatctgtgcgcgtgaatgaatggttcagcgcttatgcgctggc

SEQ ID NO: 6201 - DNA, 75 bp, synthetic construct
  source 1..75: mol_type = other DNA
gtgtgatgtgtcagagcaactggagcttatcagcagcgcctttaaggttatcgaaacacaacgtccgaaactggc

SEQ ID NO: 6202 - DNA, 75 bp, synthetic construct
  source 1..75: mol_type = other DNA
aataaaacctggtccctgacgcatccggtggatgacgcaattaccctgctgacacagggcggcagactgacctgt

SEQ ID NO: 6203 - DNA, 75 bp, synthetic construct
  source 1..75: mol_type = other DNA
tccctttttctggcttgcctttttccggcatttgcggatatagtttttccgctgccgcaaaatcggcagccgggc

SEQ ID NO: 6204 - DNA, 75 bp, synthetic construct
  source 1..75: mol_type = other DNA
aattttaatatggctgctgtcggtgtgatgaagaagggtatgtcgatgagtttattttcttctccggggcatatt

SEQ ID NO: 6205 - DNA, 75 bp, synthetic construct
  source 1..75: mol_type = other DNA
atctgccgtggagccacccgggtggatggtaagcctgttattcctggcatgaagctgtcgaaggaaaaatgcgac

SEQ ID NO: 6206 - DNA, 75 bp, synthetic construct
  source 1..75: mol_type = other DNA
atgatgcactgaaagaatggctcagactggacaagaccattcagcagcagttcgcaaaaaaactgaaaaaatgca

SEQ ID NO: 6207 - DNA, 75 bp, synthetic construct
  source 1..75: mol_type = other DNA
cgtcccggaatgcgtcacccgccgtcaggcggtggttaatcaggcccgcaccctgctgaaaaacaacacacacga

SEQ ID NO: 6208 - DNA, 75 bp, synthetic construct
  source 1..75: mol_type = other DNA
gaaaggttcaccttactccggctcagttgtccatgcttctcgagggcatcgactggaagcacccgaaacgaacgg

SEQ ID NO: 6209 - DNA, 75 bp, synthetic construct
  source 1..75: mol_type = other DNA
agatagcctcaagcacccgcagctattctacttaacttcccattacctcgccaatatgaaatcggtcagaaagac

SEQ ID NO: 6210 - DNA, 75 bp, synthetic construct
  source 1..75: mol_type = other DNA
agagggctggctgacgaaggaagagcgtaaggtcggtgggcgtaatgtaagcaatatctatcggcttaatgtgga

SEQ ID NO: 6211 - DNA, 75 bp, synthetic construct
  source 1..75: mol_type = other DNA
tgctgcctgtctgatgacgtacagtcatcatgcctgtcgtacggagtgttatgccatgacggtccattattaccg

SEQ ID NO: 6212 - DNA, 75 bp, synthetic construct
  source 1..75: mol_type = other DNA
tgctgtctcaactggccggaggacaggtttatccttatgtggtcccgctgacggagggaaagcctgcggtatctc

SEQ ID NO: 6213 - DNA, 75 bp, synthetic construct
  source 1..75: mol_type = other DNA
gccagagctgcgattgatgttaacaatgtcgccttccgtaagttcggatttgccggtaccccatgggtgctgtcc

SEQ ID NO: 6214 - DNA, 75 bp, synthetic construct
  source 1..75: mol_type = other DNA
gcggtccggtacaaatctgctggcataaattcgcccgctactgggatgtggagctgcgtgagatccctatgcgcc

SEQ ID NO: 6215 - DNA, 75 bp, synthetic construct
  source 1..75: mol_type = other DNA
ccatgccttcttccctctggcaatactggcgcggcctttccggctggaacttctattttctggttaagttcggcc

SEQ ID NO: 6216 - DNA, 75 bp, synthetic construct
  source 1..75: mol_type = other DNA
tcccggtggcactcactgcccggaacctgatgtcacccttcgggacttaacgctttcccctggctaccacagtga

SEQ ID NO: 6217 - DNA, 75 bp, synthetic construct
  source 1..75: mol_type = other DNA
atgggcaggataagctcgggaggaatgatgtttaaggcaataacgacagtcgccgctctggtcatcgccaccagt

SEQ ID NO: 6218 - DNA, 75 bp, synthetic construct
  source 1..75: mol_type = other DNA
atgagaaaaaataatacggcaataatattcggcagcctgtttttttcctgcagcgtgatggccgcaaacggtacg

SEQ ID NO: 6219 - DNA, 75 bp, synthetic construct
  source 1..75: mol_type = other DNA
caacgaccgtcagcaaaaaccacgcaatgatagtcattgaggatttgaaggtcagcaacatgtcaaagtcagcag

SEQ ID NO: 6220 - DNA, 75 bp, synthetic construct
  source 1..75: mol_type = other DNA
atggcagaagatcgcagtacggtgacggcggcaaccggtatgaccgtgacgcctgccagctcctcggtggtgaaa

SEQ ID NO: 6221 - DNA, 75 bp, synthetic construct
  source 1..75: mol_type = other DNA
tattcaaatactgccctatcggtaagaatcaattaagtgctcttgcacagcggaaaatctggtactcaaaaccgg

SEQ ID NO: 6222 - DNA, 75 bp, synthetic construct
  source 1..75: mol_type = other DNA
agtgggagcgagtctgcgccgcgctgcgggagctgaacaagtgccgggatattctccgggatattaccgccacca

SEQ ID NO: 6223 - DNA, 75 bp, synthetic construct
  source 1..75: mol_type = other DNA
agccgtgagtccgaaacgggtggacacgccaggacacggtatggggaaccgttttctgcgggccggggtggaggt

SEQ ID NO: 6224 - DNA, 75 bp, synthetic construct
  source 1..75: mol_type = other DNA
acgcccgcctgcgggcactgttgcagacgcaacaggacaccatacgccagatggctgaatacaaccgcctgctct

SEQ ID NO: 6225 - DNA, 75 bp, synthetic construct
  source 1..75: mol_type = other DNA
gtcagcgaaacgctctcgacgatccgcgatcctcgctccttcctctgcactatcgccaaacgcgtgatggtggac

SEQ ID NO: 6226 - DNA, 75 bp, synthetic construct
  source 1..75: mol_type = other DNA
cggtctttttcaggctgtgctgggggcggcgctgattgcggtggcatggtggaaccctgcaggttggttgggggc

SEQ ID NO: 6227 - DNA, 75 bp, synthetic construct
  source 1..75: mol_type = other DNA
atgatgcgctcaaagaatggctgaaactggataaatccattcaacagcagtttgcgaaaaaactaaagaaatgca

SEQ ID NO: 6228 - DNA, 75 bp, synthetic construct
  source 1..75: mol_type = other DNA
taaacgcgccctgtaccacaatgccgctgccgtggtgctggcgcacaatcacccgtccggtgaagtcacacccag

SEQ ID NO: 6229 - DNA, 75 bp, synthetic construct
  source 1..75: mol_type = other DNA
caaattggccgattgggtcagggatttactgtgccggaaaagcaactttgtcgtcacttgtgctctggcaaacaa

SEQ ID NO: 6230 - DNA, 75 bp, synthetic construct
  source 1..75: mol_type = other DNA
cttcttatgtaggaagaggctgtattatattcagtcaactcttttttactaaaaacattatctatgccatcaaag

SEQ ID NO: 6231 - DNA, 75 bp, synthetic construct
  source 1..75: mol_type = other DNA
gcgccatcgtcgtccgttaccggcacatctcccccgtgaaatataccgcctggagcctgaagaaagctgttgccc

SEQ ID NO: 6232 - DNA, 75 bp, synthetic construct
  source 1..75: mol_type = other DNA
tctgcgacttaaacgcctgggactgtcaaaaacgttccgccgtctggttgtcactcttatccggcgttatggcgt

SEQ ID NO: 6233 - DNA, 75 bp, synthetic construct
  source 1..75: mol_type = other DNA
gctggatgtggctgcccggcaccgggtgcagtttgcgatgccggagtctgatgcggttgcgatgctgaaacaatt

SEQ ID NO: 6234 - DNA, 75 bp, synthetic construct
  source 1..75: mol_type = other DNA
caatgtcaccacgattattatggggagcagtactgcacacactgtcatacagggcgtttcagtgaggaggcagtg

SEQ ID NO: 6235 - DNA, 75 bp, synthetic construct
  source 1..75: mol_type = other DNA
cgttggcttgaattacaactgcgtatgctgctggagcaggttgaacagtttgaaaatatggttggcttcttctgg

SEQ ID NO: 6236 - DNA, 75 bp, synthetic construct
  source 1..75: mol_type = other DNA
atgcgtgatattcagatggttcttgagcgttggggagcgtgggcggctaataatcatgaagatgtgacctggtcg

SEQ ID NO: 6237 - DNA, 75 bp, synthetic construct
  source 1..75: mol_type = other DNA
catgacggcgcaactggcctgcgatgccctgcagatggcgctgtggcggcgtaagaggccccggaacgttatcgt

SEQ ID NO: 6238 - DNA, 75 bp, synthetic construct
  source 1..75: mol_type = other DNA
ccactgattatgctgagcaggaactggatctgaacagctattgcatcagcagacctgcagccaccttctttctgc

SEQ ID NO: 6239 - DNA, 75 bp, synthetic construct
  source 1..75: mol_type = other DNA
gatctggatgcacttaacgaactttctgagcttatctgcgccgcagaatgcggggaacatattgaaccgtataag

SEQ ID NO: 6240 - DNA, 75 bp, synthetic construct
  source 1..75: mol_type = other DNA
cgttcgatgcggtacgtgtcgcgctcaatctggtagcaaatatgcagcgcctggaaatgactgcgcgatttttta

SEQ ID NO: 6241 - DNA, 75 bp, synthetic construct
  source 1..75: mol_type = other DNA
atgtcggtgctggcagatggtgtgctggtggcgatggcgctggtcgtgctccggcctttactgcgtaaatctgaa

SEQ ID NO: 6242 - DNA, 75 bp, synthetic construct
  source 1..75: mol_type = other DNA
cttcctggtgggcatattaccacttggcccgcaacgcttatttcttattaggaataccgtgtttacttttatact

SEQ ID NO: 6243 - DNA, 75 bp, synthetic construct
  source 1..75: mol_type = other DNA
actttatggcacgcaagctggaagagttagggcattttccaaagctgatatcaccgcaatttgtccgcccattcg

SEQ ID NO: 6244 - DNA, 75 bp, synthetic construct
  source 1..75: mol_type = other DNA
actcacagctacggctgggcatcatttccgacgagaataaacaaaaattaaccgagtggatgctctatgcgcaga

SEQ ID NO: 6245 - DNA, 75 bp, synthetic construct
  source 1..75: mol_type = other DNA
ggcaccacattccgcgtggaaaagatcaccactgacagtgttgtccttgaacaaaatggtatcagaacaacacta

SEQ ID NO: 6246 - DNA, 75 bp, synthetic construct
  source 1..75: mol_type = other DNA
ttgtccggcaccagttacggcattgccgggctgctgatgctggcggtcagttaccgactgtaccgggcggaagac

SEQ ID NO: 6247 - DNA, 75 bp, synthetic construct
  source 1..75: mol_type = other DNA
atgatgatttgcccactgtgtggaagtgccgcccatactcgcagcagttttcaggtatcttcattgaccaaagag

SEQ ID NO: 6248 - DNA, 75 bp, synthetic construct
  source 1..75: mol_type = other DNA
cccgatgctggcgacactcccgctcatctttctgctgactcctctggtctgccaactgtttgtcatcatttcctg

SEQ ID NO: 6249 - DNA, 75 bp, synthetic construct
  source 1..75: mol_type = other DNA
accggcctgatgacccgcgacaattacagaacggtaaataatattatcctgggtaagcacccggaggtgaaacaa

SEQ ID NO: 6250 - DNA, 75 bp, synthetic construct
  source 1..75: mol_type = other DNA
ctgacgaaattaacgacagaaatcgccagctattgcgctgatgaatttaaaaaactgaacgacaaaaggaactgg

SEQ ID NO: 6251 - DNA, 75 bp, synthetic construct
  source 1..75: mol_type = other DNA
acccgggaggaggcccggcatctggaagcgttcctggcagagcacggaggctggaaggcatttttgtggaagcca

SEQ ID NO: 6252 - DNA, 75 bp, synthetic construct
  source 1..75: mol_type = other DNA
gatctggagctggatgacgctgacggaaaaatcgtgctgccgcgccgtggtgcggttattacgctggcgctgggc

SEQ ID NO: 6253 - DNA, 75 bp, synthetic construct
  source 1..75: mol_type = other DNA
gggtaaaagcgccagcggtaaaccactaccggtgatcactatcacacgtaaggacggcgacagtcaccgctttac

SEQ ID NO: 6254 - DNA, 75 bp, synthetic construct
  source 1..75: mol_type = other DNA
cgggattatttcaccctcagagagcggctgatgacgatgcagaagcaactggaaggggcacaggactatatccgc

SEQ ID NO: 6255 - DNA, 75 bp, synthetic construct
  source 1..75: mol_type = other DNA
atcgggatatcacaacactcaataccccggacctgcttatccctgttcgtgctgcagaagctaaacaaatttatg

SEQ ID NO: 6256 - DNA, 75 bp, synthetic construct
  source 1..75: mol_type = other DNA
acacaatcaggcgcttatcgccctggcgagacgacgctgcgacgttctgttcgccatgatgcgcgacgggacttt

SEQ ID NO: 6257 - DNA, 75 bp, synthetic construct
  source 1..75: mol_type = other DNA
gataatccgcttattaatattctggagaagttctccagctggtatgacacgaataacgtgacgctgggcggtgtc

SEQ ID NO: 6258 - DNA, 75 bp, synthetic construct
  source 1..75: mol_type = other DNA
ggcaacaaccgcgccacgcagtggggcgtgaaggaacggggatccccgctcctgaatccgcgctttcctcctggc

SEQ ID NO: 6259 - DNA, 75 bp, synthetic construct
  source 1..75: mol_type = other DNA
atgcagcagctttcctttctgcccggagaaatgacgcccggcgagcgcagtctcattctgcgggccctgaaaacc

SEQ ID NO: 6260 - DNA, 75 bp, synthetic construct
  source 1..75: mol_type = other DNA
ctgccggggcagcagtatgatgaggagtccggcctgtattacaaccgccaccgctattatgacccgctgcagggg

SEQ ID NO: 6261 - DNA, 75 bp, synthetic construct
  source 1..75: mol_type = other DNA
aagccggtgaactggccgccagggaccgggccgaacgggacgcatcacagctgaagtataccggagaggcgcaga

SEQ ID NO: 6262 - DNA, 75 bp, synthetic construct
  source 1..75: mol_type = other DNA
tcagctatgaacaactgacccggtttgcggaacgacgcatccgggaatgcaatctggacagccagggcgcgattt

SEQ ID NO: 6263 - DNA, 75 bp, synthetic construct
  source 1..75: mol_type = other DNA
ggccattatggatatggatgtaaacgcgatgatgatcgtgatcccccgcatctccagtccggcactgactgcaca

SEQ ID NO: 6264 - DNA, 75 bp, synthetic construct
  source 1..75: mol_type = other DNA
cgcattattgcggagctggttattcctcctgaaacgggcggattctggatccgggaaattggtgtatttgatgag

SEQ ID NO: 6265 - DNA, 75 bp, synthetic construct
  source 1..75: mol_type = other DNA
gcaaaaggctttgttcaactcagtagcgccaccaacagcacgtctgaagcactggccgcaacgccgaaagcggtc

SEQ ID NO: 6266 - DNA, 75 bp, synthetic construct
  source 1..75: mol_type = other DNA
gaatgccggtgtgcgtggtggtgaacagtttgatgccatcaaccagagtgtcgcgcgttttgcgtctgcatccgg

SEQ ID NO: 6267 - DNA, 75 bp, synthetic construct
  source 1..75: mol_type = other DNA
ttcgcagggaagtatgtacccgttcaatggctgggtgagtaatgagtccagtccgttgcagtcctccctgctggt

SEQ ID NO: 6268 - DNA, 75 bp, synthetic construct
  source 1..75: mol_type = other DNA
ttcccgccggtgctggtgcagatgctcgaccggctggaaagtgaaatcctggctgaccgggtgagtgaggaaagc

SEQ ID NO: 6269 - DNA, 75 bp, synthetic construct
  source 1..75: mol_type = other DNA
gagcgagtctgcgccgcgctgcgggagctgaacaagcaccgggatattgttcgacagattactgattcttcccgc

SEQ ID NO: 6270 - DNA, 75 bp, synthetic construct
  source 1..75: mol_type = other DNA
ctggggcttgatgacagtgcgctggacacagaattttccattggtggtactgaattgctgctgtttaaacagatg

SEQ ID NO: 6271 - DNA, 75 bp, synthetic construct
  source 1..75: mol_type = other DNA
tacgctggataaggcagctatgcctgatttcagtgctgtggattcggaaatcggtgtggcgacactgataaaccc

SEQ ID NO: 6272 - DNA, 75 bp, synthetic construct
  source 1..75: mol_type = other DNA
aaccgcgccggacgcaggacaaatcgcaccggctctcgcgcacattgggccagagtcaacagagtccaaccactc

SEQ ID NO: 6273 - DNA, 75 bp, synthetic construct
  source 1..75: mol_type = other DNA
tgtactcgctgtcacaccagaccagtgacttcggtgaatcagaatggattcattttacaggtagcggatatctgt

SEQ ID NO: 6274 - DNA, 75 bp, synthetic construct
  source 1..75: mol_type = other DNA
cgcgagacgttacgacaactggaagctaaaactggggcaacaagatatctgatgagcgttctggccagagagctg

SEQ ID NO: 6275 - DNA, 75 bp, synthetic construct
  source 1..75: mol_type = other DNA
tctgggacttccgcctgccgcgtgtgaaatcgatcagtgcttcaggccataaattcggtctggctccgctgggct

SEQ ID NO: 6276 - DNA, 75 bp, synthetic construct
  source 1..75: mol_type = other DNA
taagaacggttttacccgtggtaacccccagaccggcacgcctgccaccgatctggatgatgactactttgacat

SEQ ID NO: 6277 - DNA, 75 bp, synthetic construct
  source 1..75: mol_type = other DNA
catcattaatgatgtgaaaacaccgtcaatattcgatgaatacgtggttgctgttgagcatcaacttcgtggctg

SEQ ID NO: 6278 - DNA, 75 bp, synthetic construct
  source 1..75: mol_type = other DNA
gtgagtgataaacgtcaaagaagtggtagtgaaagacggcaaaagacgatcctgagagcggtccggttctcaccg

SEQ ID NO: 6279 - DNA, 75 bp, synthetic construct
  source 1..75: mol_type = other DNA
gcctcttatacaggcgtaaaaaattaaaactgtctcaggccgcattaggtaagctggtcaaagtggctcacgtaa

SEQ ID NO: 6280 - DNA, 75 bp, synthetic construct
  source 1..75: mol_type = other DNA
aagaactgattcagggggagctgccgttttctgtttccgtgctgatttacgatttgcgttgtccgacggtgttat

SEQ ID NO: 6281 - DNA, 75 bp, synthetic construct
  source 1..75: mol_type = other DNA
aaggcagtctgaaactcaggctgaacatggataagactaaaatcacccatgttaatgacggctttatctttctgg

SEQ ID NO: 6282 - DNA, 75 bp, synthetic construct
  source 1..75: mol_type = other DNA
cgtgacctatatcggtatcgactcaaccggcgttggtcacggggtttacgagaacgtgaaagcgttttttcctgc

SEQ ID NO: 6283 - DNA, 75 bp, synthetic construct
  source 1..75: mol_type = other DNA
atgagatgccgggggctgattgccctgctgatatgggggcagagtgtggccgccgccgatcttggcacctggggc

SEQ ID NO: 6284 - DNA, 75 bp, synthetic construct
  source 1..75: mol_type = other DNA
aatggcgtggatatgcgcaacatacgaaccagagttcttgagttgctggcctaccgtcgccgcgtggagatgtat

SEQ ID NO: 6285 - DNA, 75 bp, synthetic construct
  source 1..75: mol_type = other DNA
gtggcaaaagtttttacacaagaagagcgggaaaaaattaaagggcaggtggtggaactcgtgcgccagagcggt

SEQ ID NO: 6286 - DNA, 75 bp, synthetic construct
  source 1..75: mol_type = other DNA
gatgagcgttctcgccagagagctggttgccagtggcgatgtatacaactctggttacgggttattcccgtctga

SEQ ID NO: 6287 - DNA, 75 bp, synthetic construct
  source 1..75: mol_type = other DNA
atgcagaacgccagacacccgaaaacacacagggaactgtgcgaactggcctgtcgttttctccgcaacaacggt

SEQ ID NO: 6288 - DNA, 75 bp, synthetic construct
  source 1..75: mol_type = other DNA
cggtggtggcgaaaacccgccgtaacctggaagcggatgtgacgctgttctgcgatgtcctgtgtgatacggatc

SEQ ID NO: 6289 - DNA, 75 bp, synthetic construct
  source 1..75: mol_type = other DNA
taatgaacgtctttctgaacggctacagctatcagggcgtcgcgaagtccgtcacgctgccaaaactgacccgta

SEQ ID NO: 6290 - DNA, 75 bp, synthetic construct
  source 1..75: mol_type = other DNA
ccggtgaaaccgacatcgccctgcccggcccgctgccgttcattctctcccgcacctacagcagttaccggacaa

SEQ ID NO: 6291 - DNA, 75 bp, synthetic construct
  source 1..75: mol_type = other DNA
tagcattgtccagggttcagccggggtgcgcatcggtgcccccaccggcgtggcctgttcggtgtgccccggcgg

SEQ ID NO: 6292 - DNA, 75 bp, synthetic construct
  source 1..75: mol_type = other DNA
aacgcaagcagtacctgtggctggggattgtggttgtcggtgcagcctccgcgattggtggtgcactgtatctgt

SEQ ID NO: 6293 - DNA, 75 bp, synthetic construct
  source 1..75: mol_type = other DNA
aaaggtggcgaatatgccaacctggacgctgtggtgatggatgcggtcaatgagcttatcgacgtggtctaccag

SEQ ID NO: 6294 - DNA, 75 bp, synthetic construct
  source 1..75: mol_type = other DNA
gtagatctggaaatcgcaacggaggaagaaacctcattgctggaagcctggaaaaagtatcgggtgttgctgaac

SEQ ID NO: 6295 - DNA, 75 bp, synthetic construct
  source 1..75: mol_type = other DNA
tgttaatcgtcgtctgtgtgacgatactgtgttttgtctggatggtgagggattcgctttgcggattccgtgtcg

SEQ ID NO: 6296 - DNA, 75 bp, synthetic construct
  source 1..75: mol_type = other DNA
gtacgctgaatgattttctcggtgccatgacggaggatgatgcccgtccggaggcactgcgccgttttgaactga

SEQ ID NO: 6297 - DNA, 75 bp, synthetic construct
  source 1..75: mol_type = other DNA
tgacgacacaccggtaaaagtgctgacaccgggcagaaaaaaggcaaaaacaggacgcatctggacgtatgtccg

SEQ ID NO: 6298 - DNA, 75 bp, synthetic construct
  source 1..75: mol_type = other DNA
tgaaagatggtgcgggaaaaccaatacagaactgcactattcaactgaaggcaaagcgtaacagcaccacggtac

SEQ ID NO: 6299 - DNA, 75 bp, synthetic construct
  source 1..75: mol_type = other DNA
gggcgcggcacctggtactgcaatcagtgtggtgccggtgacggcctgaaactggttgaaaaggtgtttggtgtt

SEQ ID NO: 6300 - DNA, 75 bp, synthetic construct
  source 1..75: mol_type = other DNA
tgatgtcgacagtaatctgcagagtttgtgctggccgtgtcataaggcgaagacggcccgtgaacggctgaagta

SEQ ID NO: 6301 - DNA, 75 bp, synthetic construct
  source 1..75: mol_type = other DNA
acttttgttgattacaaaatcaacttaattgacgatagtaagtttaccaaaacagctggtattgataccgacgac

SEQ ID NO: 6302 - DNA, 75 bp, synthetic construct
  source 1..75: mol_type = other DNA
taaatggatgtttaaagatggcgcagtcattaaacgtgtatataccgaagaagagttgcgcctacagacggaaaa

SEQ ID NO: 6303 - DNA, 75 bp, synthetic construct
  source 1..75: mol_type = other DNA
ggcaaagccacggtggatggcatccagttgcgctttaccggctctatccagcgtgacgataccggagaagtgcag

SEQ ID NO: 6304 - DNA, 75 bp, synthetic construct
  source 1..75: mol_type = other DNA
gcgccattgagctttatttcaaatatggtaagaagctggctcccgtcgtacgcgaactgggctacccttcgaaaa

SEQ ID NO: 6305 - DNA, 75 bp, synthetic construct
  source 1..75: mol_type = other DNA
tgcacgggcagcaatgccgtgtttggtgtgatcactcacattatcaacgacgcaagaagtggcgagtttgatgat

SEQ ID NO: 6306 - DNA, 75 bp, synthetic construct
  source 1..75: mol_type = other DNA
gctggattatctggacgcactggaactggttgatacctccagtgctccagatattgaatggcctacgcctccggc

SEQ ID NO: 6307 - DNA, 75 bp, synthetic construct
  source 1..75: mol_type = other DNA
ttattgtcctgctggtagcctgtggtgtgcttagtctggggctgaatcattaccgcgataacgccattacctaca

SEQ ID NO: 6308 - DNA, 75 bp, synthetic construct
  source 1..75: mol_type = other DNA
tcagacgccgctgtggatgaggccattctcgtcaatgcatacatcttcaccgaaaccggtcagcgcgccggctga

SEQ ID NO: 6309 - DNA, 75 bp, synthetic construct
  source 1..75: mol_type = other DNA
aaacaggagtattcacaggcagcctccgttttagtcggcgatattaaaaccttacttatggatagccaggataag

SEQ ID NO: 6310 - DNA, 75 bp, synthetic construct
  source 1..75: mol_type = other DNA
atgacacagggcaggcgggaggataaatgcccgtctgcccgtgcaggaaaaagaccgcgcgccggtggcgctgaa

SEQ ID NO: 6311 - DNA, 75 bp, synthetic construct
  source 1..75: mol_type = other DNA
aaattttttgtgaagatggcctctatgctgtgtgcgttgaaaatggaaatattgttagtcattaccgcattgtgt

SEQ ID NO: 6312 - DNA, 75 bp, synthetic construct
  source 1..75: mol_type = other DNA
gttatccagagcgagcagcttgcttcaatgaagcactcaagattattgatgaactaagaaaaaatgaaaaagaat

SEQ ID NO: 6313 - DNA, 75 bp, synthetic construct
  source 1..75: mol_type = other DNA
ggcgtctgaacataatctgtctcgagtgccggaagagcgaagttatgcagcgcgtactggcgttttatcagggga

SEQ ID NO: 6314 - DNA, 75 bp, synthetic construct
  source 1..75: mol_type = other DNA
ggcgcgcaaggatggctggcgaataagcaaagacaaaacgcgtgcttttgcgcccgggcataaagttttgaggat

SEQ ID NO: 6315 - DNA, 75 bp, synthetic construct
  source 1..75: mol_type = other DNA
gtcaggtggcttttgccgcaaagcgtaagcctactgcgtcacagaacaggcggaagaaagggtacgctgtaagat

SEQ ID NO: 6316 - DNA, 75 bp, synthetic construct
  source 1..75: mol_type = other DNA
cagcgggataaaaaacagtaaggggatccagcttcgtgcatctgaaaaaccgctttcaaaaatgaacagctcgca

SEQ ID NO: 6317 - DNA, 75 bp, synthetic construct
  source 1..75: mol_type = other DNA
tttacaggtagcggatatctgttacgtaccggtgcgtggtcgtacccggttctgcggcttaaacgcctggggctg

SEQ ID NO: 6318 - DNA, 75 bp, synthetic construct
  source 1..75: mol_type = other DNA
tgatggcgtttgtcgtcgttgcagaggagcgtagcttcactcgtgcagcagcccgcctgagcatggcgcagtcag

SEQ ID NO: 6319 - DNA, 75 bp, synthetic construct
  source 1..75: mol_type = other DNA
gccgctcggctatctcatcaacgtgacggagtggtgggaaaacagtgacccgcccggcaccttccggcttgatat

SEQ ID NO: 6320 - DNA, 75 bp, synthetic construct
  source 1..75: mol_type = other DNA
cctctgcccgttatctggggaccggcagtcagtggagtgtatccggcccgcacattaagcccgggaaggatttct

SEQ ID NO: 6321 - DNA, 75 bp, synthetic construct
  source 1..75: mol_type = other DNA
agatggctggcgttttgttaggaaaagaggtgcgtaaacgtaaaacacctcaggaaaaaatcgcaattattcaac

SEQ ID NO: 6322 - DNA, 75 bp, synthetic construct
  source 1..75: mol_type = other DNA
accgtaggggctgcgaccggagagatatctgtatcttctgtcgccgacacgttacgtagattgtatggttctgcg

SEQ ID NO: 6323 - DNA, 75 bp, synthetic construct
  source 1..75: mol_type = other DNA
atgacgacaccaaccagacggataagtttctatctgaagcctgcggccgtcaagaacgaaagcgaagcatgcgcc

SEQ ID NO: 6324 - DNA, 75 bp, synthetic construct
  source 1..75: mol_type = other DNA
acctatctggaacttgagcggctgataagcgatgccaaaccatgtagccgtcacatgatcggcatgtccatcaat

SEQ ID NO: 6325 - DNA, 75 bp, synthetic construct
  source 1..75: mol_type = other DNA
ggagatccacaggtcggcccttcatctgagccggactggttctacgtggttgtgcttgccggacagtccaacggc

SEQ ID NO: 6326 - DNA, 75 bp, synthetic construct
  source 1..75: mol_type = other DNA
aactcgggcgcggtgatgtgcttccacatgacatggtcgaatcctccgcgactgcatggcgggatgaaatgagca

SEQ ID NO: 6327 - DNA, 75 bp, synthetic construct
  source 1..75: mol_type = other DNA
cctcgccgttgttctcgacctgttcgcaagaaaaccagtgggctgggccatgtcgttctcgccggacagcaggct

SEQ ID NO: 6328 - DNA, 75 bp, synthetic construct
  source 1..75: mol_type = other DNA
acggccatggttcagcagttcagaactgacctggctccgcttgctgcgcagtgcgtgagtggaaatgccaccacg

SEQ ID NO: 6329 - DNA, 75 bp, synthetic construct
  source 1..75: mol_type = other DNA
tgggcgatggcggcggagcattgccgacgccggacgcaaagcagactgcactggtaaatgagaaacgccgggctg

SEQ ID NO: 6330 - DNA, 75 bp, synthetic construct
  source 1..75: mol_type = other DNA
taagaacggttttacccgtggtaacccccagaccggcacacctgccaccgatctggatgatgactactttgacat

SEQ ID NO: 6331 - DNA, 75 bp, synthetic construct
  source 1..75: mol_type = other DNA
agatgctcgaccggctggaaagtgaaatcctggctgaccgggtgagtgaggaaagccgccgctggctggcatcgt

SEQ ID NO: 6332 - DNA, 75 bp, synthetic construct
  source 1..75: mol_type = other DNA
gccaaagccgcagtcgaagcgcagaaaaaagccgaggctgctgctgcggcgctgaagaagaaagctgaagcggca

SEQ ID NO: 6333 - DNA, 75 bp, synthetic construct
  source 1..75: mol_type = other DNA
tgaaacgaagttgcatgatggttcaggtcaacgtaattatggttgcagtcgtgggccggggcgtctactggatgg

SEQ ID NO: 6334 - DNA, 75 bp, synthetic construct
  source 1..75: mol_type = other DNA
tgtcccttgaagtacagaacgcggtcctggttaagttcggtacatgtgaaaacatcaccgttgatatggcgattg

SEQ ID NO: 6335 - DNA, 75 bp, synthetic construct
  source 1..75: mol_type = other DNA
attgccactgtagaaagttcactcataccagaccggataaatcacaacaaagaaaaaggaaaaatattaagcacc

SEQ ID NO: 6336 - DNA, 75 bp, synthetic construct
  source 1..75: mol_type = other DNA
cagccagcactgacaataccaatgttaatggcgaagacatgacggagattgaggagaatatgctactcccgattt

SEQ ID NO: 6337 - DNA, 75 bp, synthetic construct
  source 1..75: mol_type = other DNA
gtgacaggacgggagtttacctctgcaacgctaagtagcactaactggcaatacgcctgttcctgctctgcgggt

SEQ ID NO: 6338 - DNA, 75 bp, synthetic construct
  source 1..75: mol_type = other DNA
cggtgatgcagagcgaatactgtccggcggtgaatactggcaacgtcagaagacgctgctgacagaaagggaagt

SEQ ID NO: 6339 - DNA, 75 bp, synthetic construct
  source 1..75: mol_type = other DNA
acggcagctatacggggatgtatgcgctgcttgttgcagagcaggatgaaagcatcggataccgtccgcgtattc

SEQ ID NO: 6340 - DNA, 75 bp, synthetic construct
  source 1..75: mol_type = other DNA
gcctatatctccagccagcgtaatcatctggaaaacgtagccaacgcgctcgataagcatttgcagtataacgtc

SEQ ID NO: 6341 - DNA, 75 bp, synthetic construct
  source 1..75: mol_type = other DNA
gcactgaacaaatatatctgcgaatacctgacgacaaagggcgtgtttgagaatgaagaaacagacctgggcact

SEQ ID NO: 6342 - DNA, 75 bp, synthetic construct
  source 1..75: mol_type = other DNA
gaggttcgccaggacatgcagcagcggattgatgcggcgcgccggatgtttgccgaaaaagtggcgatgtatacc

SEQ ID NO: 6343 - DNA, 75 bp, synthetic construct
  source 1..75: mol_type = other DNA
ccagagccggtaaaagttaccgctgacgaagtaaacaaaattatgcaggcagccaatatcagccagcctgacgcc

SEQ ID NO: 6344 - DNA, 75 bp, synthetic construct
  source 1..75: mol_type = other DNA
atctgacaacagatccctgcatgaacatttataccggtgcttattatctggcaatagcctttaaaaaatggggcg

SEQ ID NO: 6345 - DNA, 75 bp, synthetic construct
  source 1..75: mol_type = other DNA
gcaaggtgcaccttactccggctcagttatctatgcttcttgaaggtatcaactggaagcacccgaaacgaacgg

SEQ ID NO: 6346 - DNA, 75 bp, synthetic construct
  source 1..75: mol_type = other DNA
acccctgatgccagtgaagaaatccggcagtatgccattcaggtcaggaaagccatagaagaacagttaaaggat

SEQ ID NO: 6347 - DNA, 75 bp, synthetic construct
  source 1..75: mol_type = other DNA
ggcaattgaacataatttgtagtgagtgccgtaacagtgaagtgatgcagcgagttttgatattttacacaggag

SEQ ID NO: 6348 - DNA, 75 bp, synthetic construct
  source 1..75: mol_type = other DNA
gctcaggttgaaggtgcgtaccgcctgatacgtaacccgtctgtgtccccgcaagccattgccgaagccggattt

SEQ ID NO: 6349 - DNA, 75 bp, synthetic construct
  source 1..75: mol_type = other DNA
atgtttgaatgagcactggttcagcgatatcgttcatgccaggaaaattattaatgactggcggcaggattataa

SEQ ID NO: 6350 - DNA, 75 bp, synthetic construct
  source 1..75: mol_type = other DNA
accagagctggttgaaaaaactcgcacgccgcctggggcctggtcatgtcgttaatctctgctttatcgtggtat

SEQ ID NO: 6351 - DNA, 75 bp, synthetic construct
  source 1..75: mol_type = other DNA
gcattgattaacacagcagataattcgcaaatactttatcgtgctgatgagcgctttgcgatgtgcagcaccagt

SEQ ID NO: 6352 - DNA, 75 bp, synthetic construct
  source 1..75: mol_type = other DNA
gcagggtaatggactggttcatttttccaggcggacgcctttccgtaaaccgacatcatctgatgctcgcccttc

SEQ ID NO: 6353 - DNA, 75 bp, synthetic construct
  source 1..75: mol_type = other DNA
tgggcggtttctggatgcgtgagcttggcctgtacgatgatgcgggaacgttaattgccgtggcgaacatggccg

SEQ ID NO: 6354 - DNA, 75 bp, synthetic construct
  source 1..75: mol_type = other DNA
tggtaccggaactcggtctggttatcgttaagccaggccgtgaatcaatgtcagcattccataacggcagaatac

SEQ ID NO: 6355 - DNA, 75 bp, synthetic construct
  source 1..75: mol_type = other DNA
ttcaggtaccagaatcacccgacgccccggaggcgctgccggggtgtcgttccatttctgatgatgacctgtgcg

SEQ ID NO: 6356 - DNA, 75 bp, synthetic construct
  source 1..75: mol_type = other DNA
cgttctgaccttgttgaaaaactgaatgatattattgcacggcattatcctggtgcattgccgccacgagtctga

SEQ ID NO: 6357 - DNA, 75 bp, synthetic construct
  source 1..75: mol_type = other DNA
ggtcagcatcggtatcagcgggcatttattcagcgattaaaaaatggtcgctggcatgtcatgcagcgtgtggcc

SEQ ID NO: 6358 - DNA, 75 bp, synthetic construct
  source 1..75: mol_type = other DNA
gcatggttggttcctgcgcattggattgttaattttaaaccagcaccaaatcagtggttacaggaatggaaacaa

SEQ ID NO: 6359 - DNA, 75 bp, synthetic construct
  source 1..75: mol_type = other DNA
tggcagagctggaagaggagcttgatgacacggatgacgctgccggtcaggacacatctgtcagcccggaaaatg

SEQ ID NO: 6360 - DNA, 75 bp, synthetic construct
  source 1..75: mol_type = other DNA
aggacctggtaagccgcaccaaagtcgcgctggcgaaaaacccgaaaaacaaacttctggctgtggtctggatgc

SEQ ID NO: 6361 - DNA, 75 bp, synthetic construct
  source 1..75: mol_type = other DNA
actggacctgcgcttcagcaacgatcgtaacattctggttggggacaatgagtccgggaaaagcactattctgct

SEQ ID NO: 6362 - DNA, 75 bp, synthetic construct
  source 1..75: mol_type = other DNA
ccatgcgtattcaccgtcagcatccggcatcccgtctttttccgttctgtaccggcaaataccgctggcacggca

SEQ ID NO: 6363 - DNA, 75 bp, synthetic construct
  source 1..75: mol_type = other DNA
gtgttggtgatgctgtttttggcgctgcacttgttgattccaggctgaatggttctgacaaggaggttcgcccat

SEQ ID NO: 6364 - DNA, 75 bp, synthetic construct
  source 1..75: mol_type = other DNA
ctgatagaagagttgcgccagcgcggcgtgaatttcagaagtctgactgacagtattgataccagtaccccaatg

SEQ ID NO: 6365 - DNA, 75 bp, synthetic construct
  source 1..75: mol_type = other DNA
tattggcggcaatattggcgctcgcaagtgcgacgatacaggcagccgatgtcaccatcacggtgaacggtaagg

SEQ ID NO: 6366 - DNA, 75 bp, synthetic construct
  source 1..75: mol_type = other DNA
tgacagacgatgatccggatatgaaacaccgcaggaaactgctggaaagcatcccgggtatcggagagaaaacat

SEQ ID NO: 6367 - DNA, 75 bp, synthetic construct
  source 1..75: mol_type = other DNA
cccgcgaacccgcgaagaaagaaagcactacggtgaagcgtaagcgcaggactaagaagcagaagaaagagccgg

SEQ ID NO: 6368 - DNA, 75 bp, synthetic construct
  source 1..75: mol_type = other DNA
ttccgcgccagaaagttgcgattatctatgatgttggcgtatcgactttgtatcagaggtttccggcaggagata

SEQ ID NO: 6369 - DNA, 75 bp, synthetic construct
  source 1..75: mol_type = other DNA
attaccggcaatatcagcgaccgtctgatgagcatgaccctgacggataaccggggctttgaggctgaccagctt

SEQ ID NO: 6370 - DNA, 75 bp, synthetic construct
  source 1..75: mol_type = other DNA
ctgtcaggtaagcagccactggatgagacgctgactcatttgagtggaaaggatgttgccggtcttctcgcatac

SEQ ID NO: 6371 - DNA, 75 bp, synthetic construct
  source 1..75: mol_type = other DNA
cgttctgaaaaactgcagcgtgaggttgaacaggctgaggcccaactgaaacaacgcgaacaggaaagcgatcgt

SEQ ID NO: 6372 - DNA, 75 bp, synthetic construct
  source 1..75: mol_type = other DNA
aaaaacagcctgagtggtacgtgaaagctgtcagaaaaactatcgcggcgttgccggggggttacgctgaagctg

SEQ ID NO: 6373 - DNA, 75 bp, synthetic construct
  source 1..75: mol_type = other DNA
cccctgtttatgcaggggcgtgtcctgctggagcctgagccggaacgttattcatcttttgccagtggtgccgtt

SEQ ID NO: 6374 - DNA, 75 bp, synthetic construct
  source 1..75: mol_type = other DNA
gatcacagacgggggacgcaactggttgtcgtttaactggcccagctatcgtgcgcatattggaggtgtggctgc

SEQ ID NO: 6375 - DNA, 75 bp, synthetic construct
  source 1..75: mol_type = other DNA
aatgttgcaatgaatggtttataccaaaatatcaaaatcaatattggtgtaatgagatttgtggaaccaagatag

SEQ ID NO: 6376 - DNA, 75 bp, synthetic construct
  source 1..75: mol_type = other DNA
tcgcaacgatatcgaaatgcttcgcgaaaacatggtgaagtcgaaaggccgcaacaactttaaaaacctgtttct

SEQ ID NO: 6377 - DNA, 75 bp, synthetic construct
  source 1..75: mol_type = other DNA
gtgctgctcgcgcattcgaccagatcgataacgcgccggaagaaaaagctcgtggtatcaccatcaacacttctc

SEQ ID NO: 6378 - DNA, 75 bp, synthetic construct
  source 1..75: mol_type = other DNA
tgatgacatgttaattattgcggttgtcgcagtaggtaaacgtgaacgtagtcatgtttacaatctcgccagcga

SEQ ID NO: 6379 - DNA, 75 bp, synthetic construct
  source 1..75: mol_type = other DNA
attatcggcgctatcagatggaagagtacggcggcgtggacgttcgcctgtatcgtattcctgacccgatggcat

SEQ ID NO: 6380 - DNA, 75 bp, synthetic construct
  source 1..75: mol_type = other DNA
ttctttcctgctatgaggctggcccctgtggttttgggctatatcatcaactcacagcgatgaatataaaatgcc

SEQ ID NO: 6381 - DNA, 75 bp, synthetic construct
  source 1..75: mol_type = other DNA
aacgtttcctgggatgcgctgaacacggcatacaatgaacacccggagtggttttcagggcttgtctccggggat

SEQ ID NO: 6382 - DNA, 75 bp, synthetic construct
  source 1..75: mol_type = other DNA
attgagcatcttgccctcctgaaacggcgtgcagaacaggcagaatccagcggcaacctgcaggtaagcgtggaa

SEQ ID NO: 6383 - DNA, 75 bp, synthetic construct
  source 1..75: mol_type = other DNA
acccgattgacggcagtggctttgagatgaacgggaagggcagcagtgcccgcccgtcgctgacggtgtcgaatc

SEQ ID NO: 6384 - DNA, 75 bp, synthetic construct
  source 1..75: mol_type = other DNA
ctatgtggaatgcgtacagatggaccgttggtatgagccgcccgtcagctttgacggactggcgcgcaccttccg

SEQ ID NO: 6385 - DNA, 75 bp, synthetic construct
  source 1..75: mol_type = other DNA
ccgacctcgcctgggcgaccatgcacgccctgttaaatgagccactcaccgccggtatcagcaccccgctgacat

SEQ ID NO: 6386 - DNA, 75 bp, synthetic construct
  source 1..75: mol_type = other DNA
gaacgtcctgaccagttgtgggtggctgattttacttacggtgtgcccggagttcagggcgggcatggatgctta

SEQ ID NO: 6387 - DNA, 75 bp, synthetic construct
  source 1..75: mol_type = other DNA
agcccccactgctgcacagtcggtcaacaatacacagattgccaccacggcttttgtgaaatcggcgattgcagc

SEQ ID NO: 6388 - DNA, 75 bp, synthetic construct
  source 1..75: mol_type = other DNA
tgtttctccggatgacggagggagttgttatctctggctcaaccgtgggcaaccacccgcagttaaccggcgacg

SEQ ID NO: 6389 - DNA, 75 bp, synthetic construct
  source 1..75: mol_type = other DNA
tgaaccgaagagcacggcggtgcggagtccggagagtaacggcatagcagagagcttcgtgaaaacgataaagcg

SEQ ID NO: 6390 - DNA, 75 bp, synthetic construct
  source 1..75: mol_type = other DNA
atgaccatcaccacagacaccactcttttacacgacccgcgtcgtcaggcggcgctgctgtactggcaggggttt

SEQ ID NO: 6391 - DNA, 75 bp, synthetic construct
  source 1..75: mol_type = other DNA
gataccgtagggtttattcgccacctgccgcacgatctggtggcggcatttaaagccacgttacaagagacgcgg

SEQ ID NO: 6392 - DNA, 75 bp, synthetic construct
  source 1..75: mol_type = other DNA
tcttgttgaggtgagcatacccggagagctgctgacagatttccggcagatacagaataatgtggctgatgacct

SEQ ID NO: 6393 - DNA, 75 bp, synthetic construct
  source 1..75: mol_type = other DNA
gaaaactggtttgaccgtacggtcagcgccgatgccgcaggcatcattgtgacttcccttgtgattaaccgtcag

SEQ ID NO: 6394 - DNA, 75 bp, synthetic construct
  source 1..75: mol_type = other DNA
atgaacagtttaacaacacactaccgtcgctcgcaactgattgcgcttcctgtaccgggtggaaaagcgaaggtg

SEQ ID NO: 6395 - DNA, 75 bp, synthetic construct
  source 1..75: mol_type = other DNA
cgtcccggaatgcgtcacccgccgtcaggcggtggttaatcaggtccgcatcctgctgaaaaacaacacacacga

SEQ ID NO: 6396 - DNA, 75 bp, synthetic construct
  source 1..75: mol_type = other DNA
atgggcaaaggtggcggcaaggcgcacacaccgcgcgaggcgaaggacaatctcaaatccacgcagatgatgagt

SEQ ID NO: 6397 - DNA, 75 bp, synthetic construct
  source 1..75: mol_type = other DNA
gacaggcagaacaggcgggatccagtctcaatcgacaggtgagcgtggaagatctcgtcagaaccggtgcttttc

SEQ ID NO: 6398 - DNA, 75 bp, synthetic construct
  source 1..75: mol_type = other DNA
ggtcgtcatcgcaccaaaaaattcgctaacaccactaaagggcacgatgagctggtgagctggctgaaaggtcac

SEQ ID NO: 6399 - DNA, 75 bp, synthetic construct
  source 1..75: mol_type = other DNA
aacatgctgaaaggcgggatttccggccgcagtgcaaaaggaaaacgtatccatacccgtgccattcacagcatc

SEQ ID NO: 6400 - DNA, 75 bp, synthetic construct
  source 1..75: mol_type = other DNA
ggtgtacacatccccgccatgaaaaacacggctttcgggcaggtgctccgcacactcgaactgaaacgcgctttt

SEQ ID NO: 6401 - DNA, 75 bp, synthetic construct
  source 1..75: mol_type = other DNA
ctgacggacattatggacgccggtgcagtggatgccatacgtgcccgcctgagcaatccgggaagtcaccgtaaa

SEQ ID NO: 6402 - DNA, 75 bp, synthetic construct
  source 1..75: mol_type = other DNA
cccgaccgaatccgtggccgttgatgtcgcttatgaaggttccggcagtggcgactggcgcactgacggtttcat

SEQ ID NO: 6403 - DNA, 75 bp, synthetic construct
  source 1..75: mol_type = other DNA
ataatatgatgagtgctgtcacaacagcattacagcccctgataagggcattgccggtgacgccagttgaatggg

SEQ ID NO: 6404 - DNA, 75 bp, synthetic construct
  source 1..75: mol_type = other DNA
gaatcatgggaacgctacagcgttatggtcagccgtgtggatactgcaaagcctgaatggccacagaaaccagaa

SEQ ID NO: 6405 - DNA, 75 bp, synthetic construct
  source 1..75: mol_type = other DNA
gtgccctggctgaaatggaacgagaactgattgttgaacgaacaaaagctggactggaagctgctcgcgcacagg

SEQ ID NO: 6406 - DNA, 75 bp, synthetic construct
  source 1..75: mol_type = other DNA
ctggcgcgttattttcatcttgatgaagcggataaagaatttatcgggaaaagccggggtgatcacaatcgactt

SEQ ID NO: 6407 - DNA, 75 bp, synthetic construct
  source 1..75: mol_type = other DNA
gggctgtgtgcctacggctgcaatgaagttcctgaacgtcctgctgcagggcgtcctcgtaagcctcacttctga

SEQ ID NO: 6408 - DNA, 75 bp, synthetic construct
  source 1..75: mol_type = other DNA
tggcttgcgcagtgcgggctgacggtggagcaactggccagacaggtggagccggaatacacaccggcgcgaaaa

SEQ ID NO: 6409 - DNA, 75 bp, synthetic construct
  source 1..75: mol_type = other DNA
ctgtgttcttcccctgccatccgatgcggggcaccgtctgttcccgtccgtgccttttcgtgaaggtgagcgtcg

SEQ ID NO: 6410 - DNA, 75 bp, synthetic construct
  source 1..75: mol_type = other DNA
acctgacgccagaacaggaaaaagcgtggaatcgccttgtgaaggctgtaaaggatttcagggcagccggaggaa

SEQ ID NO: 6411 - DNA, 75 bp, synthetic construct
  source 1..75: mol_type = other DNA
tcatgtttccgggaatccaaagtttgaatatgcgaatatggtcgaagatatcagggagaaggtgtcatctgagat

SEQ ID NO: 6412 - DNA, 75 bp, synthetic construct
  source 1..75: mol_type = other DNA
cgggttgcacgatctactggagattggggcaccgtttcgttgttgcactcgagacgcttagtgactggctggcgt

SEQ ID NO: 6413 - DNA, 75 bp, synthetic construct
  source 1..75: mol_type = other DNA
acagcatttgcagcaatgctggatataaataatatatggacccgcgattatcttgaccttgctcaaaacagagga

SEQ ID NO: 6414 - DNA, 75 bp, synthetic construct
  source 1..75: mol_type = other DNA
ttttcctgccggtccccggacagagcacaaaggaagtcgccgccggctccgctttacccggccatgcggggcatg

SEQ ID NO: 6415 - DNA, 75 bp, synthetic construct
  source 1..75: mol_type = other DNA
ctccctggaactggttcaagaacgagcagcaagagcagcagaccgcctcttccctgccggtgcagcgcaatgacc

SEQ ID NO: 6416 - DNA, 75 bp, synthetic construct
  source 1..75: mol_type = other DNA
gcgccatcaacaatgatggcggtgcgcgcagtggttataccgtgccgggtgttgatggtcaggaagctgtgatga

SEQ ID NO: 6417 - DNA, 75 bp, synthetic construct
  source 1..75: mol_type = other DNA
ctataaataatgcattttaccctgagcatttgaaacaagaatatattaaatctaattcttttccagcagatgcaa

SEQ ID NO: 6418 - DNA, 75 bp, synthetic construct
  source 1..75: mol_type = other DNA
cactggatatccgcgataattttcgtggcggggttacgtctgaagacagtcatatcaatgtttcttcatcttcag

SEQ ID NO: 6419 - DNA, 75 bp, synthetic construct
  source 1..75: mol_type = other DNA
cggagatacagtctttactgataaaaatgacggaacaggtaatgatgtcatcagtgttgaagggaaatctgctgc

SEQ ID NO: 6420 - DNA, 75 bp, synthetic construct
  source 1..75: mol_type = other DNA
cagctcgaatcaacccggcgcacactggaaagcatggttgctggtggactgcttgagcgggtgacagtgtatgaa

SEQ ID NO: 6421 - DNA, 75 bp, synthetic construct
  source 1..75: mol_type = other DNA
tcctcgtctcgcttggcttcagtgtggatgatgcaggagcgaaaaagttcggttctgtcctcgccggtacaactg

SEQ ID NO: 6422 - DNA, 75 bp, synthetic construct
  source 1..75: mol_type = other DNA
acaatggtgggccgattttctggatgcaaacagagaaagatttatcagtccatttgaatatgcaaagattaataa

SEQ ID NO: 6423 - DNA, 75 bp, synthetic construct
  source 1..75: mol_type = other DNA
atgcgtaaactttatgcagccattttgtccgcagctatttgtctggccgtatccggtgcgtctgcatgggcatct

SEQ ID NO: 6424 - DNA, 75 bp, synthetic construct
  source 1..75: mol_type = other DNA
ttttttatcgatactgttgcatttatttttatgcagttgtatttcatttatgaccgtaggcaattttcaaactgt

SEQ ID NO: 6425 - DNA, 75 bp, synthetic construct
  source 1..75: mol_type = other DNA
gggaatacaccctgacggtgcgggcgataaacagctatggccagcagggtgaacctgccaccaccaccttccgga

SEQ ID NO: 6426 - DNA, 75 bp, synthetic construct
  source 1..75: mol_type = other DNA
atcagtccgtctctctcccctgatgggccaaaaagcacatcgccttctcaaaaaccccgcaagactggcacacag

SEQ ID NO: 6427 - DNA, 75 bp, synthetic construct
  source 1..75: mol_type = other DNA
gaaagaaatggccggagacccggaattacagaaatggcgggagaaatatctggatatttacccgcaggacactgt

SEQ ID NO: 6428 - DNA, 75 bp, synthetic construct
  source 1..75: mol_type = other DNA
cagcggcaaaagccagcctgcagaagtacatcgccagtcagacgcgtcttggtcgggatattcgccgtagcgcca

SEQ ID NO: 6429 - DNA, 75 bp, synthetic construct
  source 1..75: mol_type = other DNA
cgcatcccgatgacaatcacgaccatccctggtggggactaccctgcacagtgacgccctgtttcggcgcccgtc

SEQ ID NO: 6430 - DNA, 75 bp, synthetic construct
  source 1..75: mol_type = other DNA
agacgcagacagcaacctgcagagtctgtgctggccctgccataaagcgaaaacagcgcgcgaacgaatcaggtg

SEQ ID NO: 6431 - DNA, 75 bp, synthetic construct
  source 1..75: mol_type = other DNA
gaaaaaaccagaaatcaggacgtgacgtaagagaggcgggctggaccagcctgtttcaggcggtggctgagccct

SEQ ID NO: 6432 - DNA, 75 bp, synthetic construct
  source 1..75: mol_type = other DNA
gtcatgcagttgagtcagcaggtgcagcacttgagcgagcggacagaacgcttgagccagttatacagcgagaac

SEQ ID NO: 6433 - DNA, 75 bp, synthetic construct
  source 1..75: mol_type = other DNA
aatgacggctcgctcctcgagggacagccgaagtgccagtcttggacctgtggcggtgttacgcggaatgcgtga

SEQ ID NO: 6434 - DNA, 75 bp, synthetic construct
  source 1..75: mol_type = other DNA
atgtcgccatcattacgcaaggctgtagcagctgctattggtggtggggctgttgccatagcgtctgtgctcatc

SEQ ID NO: 6435 - DNA, 75 bp, synthetic construct
  source 1..75: mol_type = other DNA
gggccgtgaaacgcggtatgaatacaacgccgcaggcgacctgactgccgttatcaccccggacggcaaccggag

SEQ ID NO: 6436 - DNA, 75 bp, synthetic construct
  source 1..75: mol_type = other DNA
cacacgacaaggactgctggcaaacgccgctttggctttttgatgcgctggatattgagtttggattctggctgg

SEQ ID NO: 6437 - DNA, 75 bp, synthetic construct
  source 1..75: mol_type = other DNA
atatgatgaaccgggcaggctggtatcggagacatcgcgcagcggggagacagtacgctaccgctacgatgacgc

SEQ ID NO: 6438 - DNA, 75 bp, synthetic construct
  source 1..75: mol_type = other DNA
ctgctgccgggggaggcggtgtacagccgcagtgagtcaatgtggctggtgcgcggtggtaaggcagcacagccg

SEQ ID NO: 6439 - DNA, 75 bp, synthetic construct
  source 1..75: mol_type = other DNA
cgtattatcgaacagatggaagcgcaggggattgtcagcgaacaggggcacaacggtaatcgtgaagtgctggcc

SEQ ID NO: 6440 - DNA, 75 bp, synthetic construct
  source 1..75: mol_type = other DNA
atgcgtgatgatcgttttaattccctgaaacaggaattttccggcgttcctgatgatgcggctgatgcgctttcg

SEQ ID NO: 6441 - DNA, 75 bp, synthetic construct
  source 1..75: mol_type = other DNA
cagccagtctggatttaacaagagcggcagcttttgccattcgtattatagccattgctgttctgatctgggcaa

SEQ ID NO: 6442 - DNA, 75 bp, synthetic construct
  source 1..75: mol_type = other DNA
tctctatgacgatgatggtattctgattgccgtggcgaactgtccggagacctacaagccacaactgcaggaggg

SEQ ID NO: 6443 - DNA, 75 bp, synthetic construct
  source 1..75: mol_type = other DNA
ctaccaacatcaaactggcctgggttgaagacggtgcagtgaaaacgttaattagtccgaatagttttaagccgg

SEQ ID NO: 6444 - DNA, 75 bp, synthetic construct
  source 1..75: mol_type = other DNA
aaaaacggcatggcaccatcttgggcaaaaagtagtgatgatggagtcgccacagacagcactggttgaagctat

SEQ ID NO: 6445 - DNA, 75 bp, synthetic construct
  source 1..75: mol_type = other DNA
atggatataagccccttacttcatgcactttgtgctgtggctgcgcagatactggttggtctttttaccggaaac

SEQ ID NO: 6446 - DNA, 75 bp, synthetic construct
  source 1..75: mol_type = other DNA
cgcccgggcgcacagaaccagatgaaagttattctggctgaagaagcgaagcgtattaaaaacgataacgtgaac

SEQ ID NO: 6447 - DNA, 75 bp, synthetic construct
  source 1..75: mol_type = other DNA
acgaacgcattctgtctggcgtcaccgccactggcacgcatctgccttcacggggatttgcaacgatttggccgc

SEQ ID NO: 6448 - DNA, 75 bp, synthetic construct
  source 1..75: mol_type = other DNA
ccaccagcgtggctatggctcgaaatgggatgccatacgtgcgcgcatactgaagcgtgataatcatctgtgtca

SEQ ID NO: 6449 - DNA, 75 bp, synthetic construct
  source 1..75: mol_type = other DNA
ggatgcgcagttcgtggccctgcagggcagccgtaacggagagagcctgctggctgataatatgcaggatggtgt

SEQ ID NO: 6450 - DNA, 75 bp, synthetic construct
  source 1..75: mol_type = other DNA
atgaagaagaatacccgctttgcttttaacgcttacctgcagcagctggcgcgtctgaacggtgtggcagttgaa

SEQ ID NO: 6451 - DNA, 75 bp, synthetic construct
  source 1..75: mol_type = other DNA
aagagcagaagattagccagtctaccctggacgctctggagtccgagctttaccgcaacctgcaacccatctatc

SEQ ID NO: 6452 - DNA, 75 bp, synthetic construct
  source 1..75: mol_type = other DNA
ggagcaaccaccacgctgacctttacagtaaaacctgacggagccagtgacaaagcgatcagtgtgcattcgtca

SEQ ID NO: 6453 - DNA, 75 bp, synthetic construct
  source 1..75: mol_type = other DNA
attatggtgctgaaatcagcaacgataatcagacagataaatccatagtcacactttcgttatctcctctgaaag

SEQ ID NO: 6454 - DNA, 75 bp, synthetic construct
  source 1..75: mol_type = other DNA
tcactactgccggagccgcaaagctggcagccgccactgtccccggcgggaaaaaagtaaacctgtctgcaatgg

SEQ ID NO: 6455 - DNA, 75 bp, synthetic construct
  source 1..75: mol_type = other DNA
ccggtatcgatgaggccatcagccgtgagcagcttatccccctcgatcgtgagaaggggctgttcacgtccggga

SEQ ID NO: 6456 - DNA, 75 bp, synthetic construct
  source 1..75: mol_type = other DNA
gcgcagagtcacagcctgaccctgcgggatgcgcagggtgaaacgcaggtggtgcgtatttcctccctggacagc

SEQ ID NO: 6457 - DNA, 75 bp, synthetic construct
  source 1..75: mol_type = other DNA
gctggtcgttgattaccgcgttgtgaagatgcctgttaccaaaggtgggaagctggaactgaccatcactgaact

SEQ ID NO: 6458 - DNA, 75 bp, synthetic construct
  source 1..75: mol_type = other DNA
agatatgcacacgcaggaactgaatcgcactgaaacggcgcgggaagtccagagaccgagcattgatgctcacct

SEQ ID NO: 6459 - DNA, 75 bp, synthetic construct
  source 1..75: mol_type = other DNA
ttcgtgaggcagcacaaaactatcagtcgacgctggcgtggtatcaggctatcccggacagcccaaatgctgaac

SEQ ID NO: 6460 - DNA, 75 bp, synthetic construct
  source 1..75: mol_type = other DNA
tagaaaaaatggcatcattttccactgttttgtctgagacagtctcattagctaatgaatactggcatccagaaa

SEQ ID NO: 6461 - DNA, 75 bp, synthetic construct
  source 1..75: mol_type = other DNA
tgcgaccaaaagagcctaactggactgcctgggccaatgacgtgcgcacaatgcggatgctggatggcagaagcc

SEQ ID NO: 6462 - DNA, 75 bp, synthetic construct
  source 1..75: mol_type = other DNA
gcgaagtggagcgtcgtgtgaaggagcgcatgattctgtcacgtaaccgtaattacagccggctggccacagctt

SEQ ID NO: 6463 - DNA, 75 bp, synthetic construct
  source 1..75: mol_type = other DNA
tgccagaaagatattgcagagaagatacaaaaacagggaggtgattatttattcgcggtaaaaggaaaccagggg

SEQ ID NO: 6464 - DNA, 75 bp, synthetic construct
  source 1..75: mol_type = other DNA
aggtatcccggcaacagagatgttcaacgtgattccactggcaccgggccatgcctacgggatgtttatggaacg

SEQ ID NO: 6465 - DNA, 75 bp, synthetic construct
  source 1..75: mol_type = other DNA
gggaattcgatatgacgaatgccagttacgcccagcagccagcagcatttcttgcaatggtacagcagttccgtg

SEQ ID NO: 6466 - DNA, 75 bp, synthetic construct
  source 1..75: mol_type = other DNA
gatccacgcactgccaccacaggcaaccagcgcggtttattcacatatccggggggaaaaccgctctgaacaggc

SEQ ID NO: 6467 - DNA, 75 bp, synthetic construct
  source 1..75: mol_type = other DNA
gataatctacgtcaggctgccgtactccgagcgcccaccgcgtccgtcccgcacattccagcaacgcatctggag

SEQ ID NO: 6468 - DNA, 75 bp, synthetic construct
  source 1..75: mol_type = other DNA
gtatttttcgtcactggacaacatgattgcccaggggaacccgatgccggtgccttacggtgaaatgctggttgg

SEQ ID NO: 6469 - DNA, 75 bp, synthetic construct
  source 1..75: mol_type = other DNA
tgcgctttggatgctgtatttaggccgtttgctttcagggatcacaggagctactggggctgtcgcggcatcggt

SEQ ID NO: 6470 - DNA, 75 bp, synthetic construct
  source 1..75: mol_type = other DNA
tgagaaaaccctgtcacagcgcggcattacccttgcgcagaaaacgcaggttgttgatctgcgctccttgggctg

SEQ ID NO: 6471 - DNA, 75 bp, synthetic construct
  source 1..75: mol_type = other DNA
agtatccgggagcggttttctgtttaccaggtggcggggcagcgtgccggaaacgacgatgatttcggtgaggcc

SEQ ID NO: 6472 - DNA, 75 bp, synthetic construct
  source 1..75: mol_type = other DNA
atggcttccagtaaatcgctacagcaggcaattgccaatataaaaatctggcacaagggtgaacagcgcgcgccg

SEQ ID NO: 6473 - DNA, 75 bp, synthetic construct
  source 1..75: mol_type = other DNA
ctctcgctcagcatgcaggtctttctattgtgaaatcatcccagtccactgctcaggttgaaggtgcgtaccgcc

SEQ ID NO: 6474 - DNA, 75 bp, synthetic construct
  source 1..75: mol_type = other DNA
ctaatggctggcatcaacgccataaatgccagccacgcagcacagcttgctaagatactgaatgtaaaggtcgga

SEQ ID NO: 6475 - DNA, 75 bp, synthetic construct
  source 1..75: mol_type = other DNA
ctaagttggagctcccaaacggggcaaacaaactactattacactcttgttgtgcaccatgttccggtgaagtga

SEQ ID NO: 6476 - DNA, 75 bp, synthetic construct
  source 1..75: mol_type = other DNA
gcacgcatgatgcccgggccggggatatccgtgatgtggcacagccgtgtgcggaggtgctggttcgcctgggaa

SEQ ID NO: 6477 - DNA, 75 bp, synthetic construct
  source 1..75: mol_type = other DNA
caaaacattaactgagaatcaggaagttgaatttggtattgagaacggacctaaaggtcctgccgctgttcatgt

SEQ ID NO: 6478 - DNA, 75 bp, synthetic construct
  source 1..75: mol_type = other DNA
gtgtcagacactctccccgggacaacgcatcccgacgataacaacgaccgcccctggtgggggctaccctgcacc

SEQ ID NO: 6479 - DNA, 75 bp, synthetic construct
  source 1..75: mol_type = other DNA
ggattcaacaatgaagattccattacagaccttcgtgagggcagctttaaaatgccggacgggacaacattcagc

SEQ ID NO: 6480 - DNA, 75 bp, synthetic construct
  source 1..75: mol_type = other DNA
gggattgtgataacgccatccctcataatacggaatgttgcccgggctacgtgtcagcagatcccttcgattatt

SEQ ID NO: 6481 - DNA, 75 bp, synthetic construct
  source 1..75: mol_type = other DNA
tgtatcagttacggcgatgttcatcagtcaatacgctggaaaaaattattcataaaaacagagacagtttatcaa

SEQ ID NO: 6482 - DNA, 75 bp, synthetic construct
  source 1..75: mol_type = other DNA
ttcaccgcctggaaagcagctggcaaaaacaaaatcgactggagcgattactacgagtttgttgctcgctggaag

SEQ ID NO: 6483 - DNA, 75 bp, synthetic construct
  source 1..75: mol_type = other DNA
tatggcaacaaccaatccggttttgaggggaaatgagagaaaagaattccttgaatatcttgaagaattcccaac

SEQ ID NO: 6484 - DNA, 75 bp, synthetic construct
  source 1..75: mol_type = other DNA
tatcttgatggcaacgctcgtcagaacctggccactttctgccagacctgggacgacgataatgtccataagttg

SEQ ID NO: 6485 - DNA, 75 bp, synthetic construct
  source 1..75: mol_type = other DNA
gccgacgggcgtgtcgcggatatctctgtcaccagtccgtctccggcctgcgtcaccatctctgtgctgtcacgt

SEQ ID NO: 6486 - DNA, 75 bp, synthetic construct
  source 1..75: mol_type = other DNA
cgcgcatgtcaaagagttgatagcaacatatcaacccgaaaccataacatttcatcataaagcattaatgatttc

SEQ ID NO: 6487 - DNA, 75 bp, synthetic construct
  source 1..75: mol_type = other DNA
atggcaaataatatgtcgtcccgtcaggcgtgccatgccgcccggtatgttgtcgcccgggttctgcgaggactg

SEQ ID NO: 6488 - DNA, 75 bp, synthetic construct
  source 1..75: mol_type = other DNA
gaggatgccggcgatgaaaaaggctatgaatcttttccctggtttatcaaacgtgcgcacagtccatccagaggg

SEQ ID NO: 6489 - DNA, 75 bp, synthetic construct
  source 1..75: mol_type = other DNA
agacctgtgcgactccggcggcaccaccatgtcagcgatgcggcttgcctataacgggcatcgtcacagagagaa

SEQ ID NO: 6490 - DNA, 75 bp, synthetic construct
  source 1..75: mol_type = other DNA
accaaaaacagaattacggttgttatgctgcagaacctaatgacgtgcaactggcgcgctattttcatcttgatg

SEQ ID NO: 6491 - DNA, 75 bp, synthetic construct
  source 1..75: mol_type = other DNA
gcttcatgagcgcctgtttcgggttcgggatggtcgcgggacctgtgctcggtgggctgatgggcggtttctccc

SEQ ID NO: 6492 - DNA, 75 bp, synthetic construct
  source 1..75: mol_type = other DNA
atggaacgcttcttcaggagtctgaagaacgaatggatgccggtggtgggttacgtaagcttcagcgaggcagct

SEQ ID NO: 6493 - DNA, 75 bp, synthetic construct
  source 1..75: mol_type = other DNA
ctgagctttttggtggggaaggttacgaataccaggaactggcgttactggtgggagtaacaaccaaaaactggt

SEQ ID NO: 6494 - DNA, 75 bp, synthetic construct
  source 1..75: mol_type = other DNA
tatccatacccgtgccattcacagcattgacactgacattaagctcaaccgcgcattgtgggtgatggcggaaac

SEQ ID NO: 6495 - DNA, 75 bp, synthetic construct
  source 1..75: mol_type = other DNA
gctcaccagcctgacctcgatcgtcggacccctcctcttcacggcgatctatgcggcttctataacaacgtggaa

SEQ ID NO: 6496 - DNA, 75 bp, synthetic construct
  source 1..75: mol_type = other DNA
agctgctggtcgccaccggccgcgcgcccaacacacgcaagctggcactggatgcgacgggcgtcacgctcaccc

SEQ ID NO: 6497 - DNA, 75 bp, synthetic construct
  source 1..75: mol_type = other DNA
tgagcgttatgctgctctctgtcagcactacggaatgcagggcgtacacaataatgccggtcggggccacgaaaa

SEQ ID NO: 6498 - DNA, 75 bp, synthetic construct
  source 1..75: mol_type = other DNA
gatacgcacacgccagaaattcaggctgcacgcggtcgcaagggcggttctaagtctaagcgcagcacagtagct

SEQ ID NO: 6499 - DNA, 75 bp, synthetic construct
  source 1..75: mol_type = other DNA
gaacatattgatcaccaggaataccgacaaatactggcagaaacagagcaggaagctcacctgaaaaaattacgc

SEQ ID NO: 6500 - DNA, 75 bp, synthetic construct
  source 1..75: mol_type = other DNA
gtatgcgaaaggtctgacctgcaaagctgacaccctcggtagcggtggttacgtttatctggctgtttatccgac

SEQ ID NO: 6501 - DNA, 75 bp, synthetic construct
  source 1..75: mol_type = other DNA
catagtttttgcgccaaaataccgaagacaagtgttctacagagagaagcgtagagcaataggcagtattttgag

SEQ ID NO: 6502 - DNA, 75 bp, synthetic construct
  source 1..75: mol_type = other DNA
cccgccatcagcataccgtcacgctgtatgcaaaagggctgacctgcgaagccgacaccctcggcagttgtggct

SEQ ID NO: 6503 - DNA, 75 bp, synthetic construct
  source 1..75: mol_type = other DNA
ttgctcgacgcacttgccgaagccatgctgacgataaatcacacgcattcgacgccaagggatgacgacgactgg

SEQ ID NO: 6504 - DNA, 75 bp, synthetic construct
  source 1..75: mol_type = other DNA
cgccgtgagaaccgcgcctgatgcctcggttaaggcgctgaaatatgccgcagcggttgaacgttcgctgtgtga

SEQ ID NO: 6505 - DNA, 75 bp, synthetic construct
  source 1..75: mol_type = other DNA
aaggaaaagtgctgcgtcatcgcggtggtgaaacccgcgtgttacgtccgggctacgtcaagccgaaacacgaat

SEQ ID NO: 6506 - DNA, 75 bp, synthetic construct
  source 1..75: mol_type = other DNA
tgtaaaaggggctgaaacctttggtgcctgggcggaaaagtggctacgtggctaccagatggccgactctacccg

SEQ ID NO: 6507 - DNA, 75 bp, synthetic construct
  source 1..75: mol_type = other DNA
actgtaagggggatcgttcgaggggttttcattgctgataaatggctcaaatcaacacgtgaaaatttccctacg

SEQ ID NO: 6508 - DNA, 75 bp, synthetic construct
  source 1..75: mol_type = other DNA
ggaggaagcgtttcagacacggttatcagtgccggaggcggacagagccttcaggggcaggcagtgaacaccact

SEQ ID NO: 6509 - DNA, 75 bp, synthetic construct
  source 1..75: mol_type = other DNA
acaatggtgggccgattttctggatgcaaacagagaaaaatttatcagtccatttgaatatgcaaagattaataa

SEQ ID NO: 6510 - DNA, 75 bp, synthetic construct
  source 1..75: mol_type = other DNA
cccgcacctcttcgctatcttcttctgacagttcccgccctctctcagcctcaccgttccccgacacactgcccg

SEQ ID NO: 6511 - DNA, 75 bp, synthetic construct
  source 1..75: mol_type = other DNA
tcaacttctttttcgaccacgatcttagccgttaccactcccgcgccggcattggcgcggagtactggcgcgact

SEQ ID NO: 6512 - DNA, 75 bp, synthetic construct
  source 1..75: mol_type = other DNA
caacaccggcactgacgcccctgatgctggatgaagccaccgggaaactggtggtctgggacggacagaaagccg

SEQ ID NO: 6513 - DNA, 75 bp, synthetic construct
  source 1..75: mol_type = other DNA
cacgccgtatcctggggcgtgtgtcatccgaatatctactacttccataatctgacgcccgggtgggtgtcattc

SEQ ID NO: 6514 - DNA, 75 bp, synthetic construct
  source 1..75: mol_type = other DNA
attattctgctcaactctcatgacggtacctccagctaccagatgctgccgggttacttcaggttcgtctgccag

SEQ ID NO: 6515 - DNA, 75 bp, synthetic construct
  source 1..75: mol_type = other DNA
ctgtattttcccagaaccagacggtcagacgggcaatggagcagttgcgcgagattggatatcttgattacacgg

SEQ ID NO: 6516 - DNA, 75 bp, synthetic construct
  source 1..75: mol_type = other DNA
gtcagacgacagaataacagcactggaagaagaaaacgcagaattaagacaaagattatctgcaattgaggcggc

SEQ ID NO: 6517 - DNA, 75 bp, synthetic construct
  source 1..75: mol_type = other DNA
cagtatcagcggacgtcctttccgggtgattcgcacacagccatcgttccgccctgaaacggtgaatcacatcct

SEQ ID NO: 6518 - DNA, 75 bp, synthetic construct
  source 1..75: mol_type = other DNA
aacatatcgcgctggaggctcacacctttgactctgtgaaatttattctgaccaccgctctcgccggtggtctgc

SEQ ID NO: 6519 - DNA, 75 bp, synthetic construct
  source 1..75: mol_type = other DNA
attaataaacccgatgggccagcaacagcagggatagatgatttgggtgaaattttagctaagatgaaacagaga

SEQ ID NO: 6520 - DNA, 75 bp, synthetic construct
  source 1..75: mol_type = other DNA
atgctgtccggcttcaaagataaggtgacatcatctcttaacagcgcggccagttcagttaaagggctgttctga

SEQ ID NO: 6521 - DNA, 75 bp, synthetic construct
  source 1..75: mol_type = other DNA
ctgaaaaacgcacggatcctcggtgataataatgccagaaatggagcagacagactggtcagcggaacagaaatc

SEQ ID NO: 6522 - DNA, 75 bp, synthetic construct
  source 1..75: mol_type = other DNA
cgacagatgatgatgagctgccggaagtcaccggacctgcgtggataatcgacaatgtggcgcattatggcggat

SEQ ID NO: 6523 - DNA, 75 bp, synthetic construct
  source 1..75: mol_type = other DNA
ggcaagtataagtgctattgccagggaattccgaaccacacggcaaacaattctgagagttagagcgaaacagca

SEQ ID NO: 6524 - DNA, 75 bp, synthetic construct
  source 1..75: mol_type = other DNA
atgatcccggaaaagcgaattatacggcgcattcagtctggcggttgtgctatccattgccaggattgcagcatc

SEQ ID NO: 6525 - DNA, 75 bp, synthetic construct
  source 1..75: mol_type = other DNA
tatcaaagtgcattgcttagcattggggggcgttgacctgaccagtccacctggaaaaatgatgatgcaagtaat

SEQ ID NO: 6526 - DNA, 75 bp, synthetic construct
  source 1..75: mol_type = other DNA
acgccatcgccaccggggcaatactggtgacgaataatgtgagagagtttgagcgggtgcctggactggtactgg

SEQ ID NO: 6527 - DNA, 75 bp, synthetic construct
  source 1..75: mol_type = other DNA
attaacgtgaaataccgttatgaatttacggacacgctggggctgattacgtcattcagttatgccaatgctgaa

SEQ ID NO: 6528 - DNA, 75 bp, synthetic construct
  source 1..75: mol_type = other DNA
gatattgaactgaacgatgccgacgggcaggtcgggctgccggttcgtggcgctgtcctgacggtgtatatcggc

SEQ ID NO: 6529 - DNA, 75 bp, synthetic construct
  source 1..75: mol_type = other DNA
gcagtgggaacgcctgcaacgcggcgttgcatcattctcgctacaactggcggaagggcgggcagatctctacac

SEQ ID NO: 6530 - DNA, 75 bp, synthetic construct
  source 1..75: mol_type = other DNA
cttgagcagaccgtcgcccccgcccgtctgcgtgaggccatcaagtcaggcatggcggagacgaatgcggagctg

SEQ ID NO: 6531 - DNA, 75 bp, synthetic construct
  source 1..75: mol_type = other DNA
acgccttgcagcagacatagctcaggcactggccgaacaaaccgtcgtcgttcccggcacgaatgccgctgccgt

SEQ ID NO: 6532 - DNA, 75 bp, synthetic construct
  source 1..75: mol_type = other DNA
ggcataatgcttttttccctgtggatatgattgataaatataaatcagagggatgggatttatcagatgctaagg

SEQ ID NO: 6533 - DNA, 75 bp, synthetic construct
  source 1..75: mol_type = other DNA
catttccagattcgttaccgtgcaacggcaattgatccgctacgttacttgccgccgcagggcagcaagccaaaa

SEQ ID NO: 6534 - DNA, 75 bp, synthetic construct
  source 1..75: mol_type = other DNA
gtcacagacagaaagagcgaggatatcgataccattgatggtaactggcaggtcgatgaaggacgccgttattgg

SEQ ID NO: 6535 - DNA, 75 bp, synthetic construct
  source 1..75: mol_type = other DNA
ggggagtctgctgtttggtctgctgacgtacctgacgaacctgtatttcaagattaaagaagaccggcgtaaggc

SEQ ID NO: 6536 - DNA, 75 bp, synthetic construct
  source 1..75: mol_type = other DNA
gatcgctgagattaaacgactggccagcggtgcagtcacaccgctttatcgccgcgccacaaatgaaggtattca

SEQ ID NO: 6537 - DNA, 75 bp, synthetic construct
  source 1..75: mol_type = other DNA
aaaccgcgcattctcggcgtgccaggtcacgataacaaagccgttgcgactgagttgctgagcgtggcgcaaagc

SEQ ID NO: 6538 - DNA, 75 bp, synthetic construct
  source 1..75: mol_type = other DNA
acagaacgccccgcatcacagccagtatcaaccgcacagataaccagtcagatggccggaaatatccgggcgtta

SEQ ID NO: 6539 - DNA, 75 bp, synthetic construct
  source 1..75: mol_type = other DNA
accggtcgagcgcgtcatccacgagctactgcaaaagcggttcctgaccaagcagaagcgcagcctagcggcctt

SEQ ID NO: 6540 - DNA, 75 bp, synthetic construct
  source 1..75: mol_type = other DNA
cgcatcatcgcgcagcgtaacgaaggtattgcactgttcatgcaggcgatggaatgcctggcgacagcgcgcagg

SEQ ID NO: 6541 - DNA, 75 bp, synthetic construct
  source 1..75: mol_type = other DNA
aagaccggcatacctcccgcagtgaacgctatacgtatatccccaccatcaccgtgctggaaagtctgcagcggg

SEQ ID NO: 6542 - DNA, 75 bp, synthetic construct
  source 1..75: mol_type = other DNA
gctgtggcgcagtctgcaaatggcgtctttgtgtctcttcctgacgtcgaggatgtggacaacgccgatattaac

SEQ ID NO: 6543 - DNA, 75 bp, synthetic construct
  source 1..75: mol_type = other DNA
acttccggagcagaaactgctggcaccacgtccgttgtttacggctgcccgggaagtgaaaacgattgttccggt

SEQ ID NO: 6544 - DNA, 75 bp, synthetic construct
  source 1..75: mol_type = other DNA
ccatggagggagtggttaaaagagcaacgagaaagtggtaattataatgccagccggatatggcgggaaatggtg

SEQ ID NO: 6545 - DNA, 75 bp, synthetic construct
  source 1..75: mol_type = other DNA
agcaatcacttaccgtgaaaacttcagtcagcgtgaaggaatgctgatctggcccgactttactggctgggacac

SEQ ID NO: 6546 - DNA, 75 bp, synthetic construct
  source 1..75: mol_type = other DNA
tctgataattgtaagaacgttaagcgagcacatttgtcttttgaacggagaaaggcggttggtttaccaataaat

SEQ ID NO: 6547 - DNA, 75 bp, synthetic construct
  source 1..75: mol_type = other DNA
gcgacgttgcgcctgtggaacaaactggcactgataccgtcagccgaacagcgttcacagctggagatgctgctg

SEQ ID NO: 6548 - DNA, 75 bp, synthetic construct
  source 1..75: mol_type = other DNA
agcgtctgtgcggttgcggaaagcatgatgaccgtgaacacggggagttacttacagcacagctgcgactggggc

SEQ ID NO: 6549 - DNA, 75 bp, synthetic construct
  source 1..75: mol_type = other DNA
atgaatgaaacgctgaatgcactgatttatcgccacgccagcaacctgttgctggcgcagggctggccggaagaa

SEQ ID NO: 6550 - DNA, 75 bp, synthetic construct
  source 1..75: mol_type = other DNA
actgaaaaaacaccttcctgctggcccgcgactggttgaacctttcgcgggttcctgtgctgtgatgatggagac

SEQ ID NO: 6551 - DNA, 75 bp, synthetic construct
  source 1..75: mol_type = other DNA
tgaaagggacccgcaattttgagaataaagttacggtaatcttaacgttacaggacaaagaacgttttgccggtg

SEQ ID NO: 6552 - DNA, 75 bp, synthetic construct
  source 1..75: mol_type = other DNA
tctcttccgccggtgtcgaagcattgcaggtgattaccggtagccgtaaagcgccgcacccaaagtattttgtag

SEQ ID NO: 6553 - DNA, 75 bp, synthetic construct
  source 1..75: mol_type = other DNA
ggcgcctttcctttgggttctctatatcgggcggatcgtggccggcatcaccggggcgactggggcggtagccgg

SEQ ID NO: 6554 - DNA, 75 bp, synthetic construct
  source 1..75: mol_type = other DNA
ggatttatccggcgatgactgcgatcccggcactggcaggactgattaccacgatggttacgcagggctatgagt

SEQ ID NO: 6555 - DNA, 75 bp, synthetic construct
  source 1..75: mol_type = other DNA
gtgggagtgacatcaaaaaactggtctgagacatttactgaacgctgggttgcaatgaagcacatttttctacag

SEQ ID NO: 6556 - DNA, 75 bp, synthetic construct
  source 1..75: mol_type = other DNA
tatctgctggctccggaagtgagtgccctgctccattacgtcccggatctgcaccgcaagatgctgctggccaca

SEQ ID NO: 6557 - DNA, 75 bp, synthetic construct
  source 1..75: mol_type = other DNA
tggtgcaggagggtaaccgcctgcattaccttgccgaccgcgccggtatcagaggccgcttcagcgacgcagatg

SEQ ID NO: 6558 - DNA, 75 bp, synthetic construct
  source 1..75: mol_type = other DNA
ggagtgcagctttgcattacctgccaggaaatcgcagagctgaaaggcaaacattacaacggaggtgctgtatga

SEQ ID NO: 6559 - DNA, 75 bp, synthetic construct
  source 1..75: mol_type = other DNA
cgctggccagactgtcggggttccgtcataaaacggtgaaggtgccggaatggagaaatgtcagcgtggtgctgc

SEQ ID NO: 6560 - DNA, 75 bp, synthetic construct
  source 1..75: mol_type = other DNA
cgaagccattctgtatcccggcgtggataattttgtgaaatatttccggctgcagaattactggactcagcaggc

SEQ ID NO: 6561 - DNA, 75 bp, synthetic construct
  source 1..75: mol_type = other DNA
tgtatacactgcatgagctatcctccaccgcacaggaaaaagcccgcgactggtaccgtcagcatcatgctgaca

SEQ ID NO: 6562 - DNA, 75 bp, synthetic construct
  source 1..75: mol_type = other DNA
gatgcgcgatgcgcagttgtggagccacatcgaatttcaccccgaatgtaacgcgatttacgcggcactggactg

SEQ ID NO: 6563 - DNA, 75 bp, synthetic construct
  source 1..75: mol_type = other DNA
tggcagacgtttgtgaacggctgtatttactggtggtgtaccacgctggaaggcatgcgggatttaatcaagtcc

SEQ ID NO: 6564 - DNA, 75 bp, synthetic construct
  source 1..75: mol_type = other DNA
tacagtgaccacccgttcgcgcatggccgaccggcgaaggtgtttaaccgtcgcggtgaaaaatccacggcctcc

SEQ ID NO: 6565 - DNA, 75 bp, synthetic construct
  source 1..75: mol_type = other DNA
aactcattgccataaaagcgggagacattaccatttataattatgatggtgaaacgcgggaatatatttccacat

SEQ ID NO: 6566 - DNA, 75 bp, synthetic construct
  source 1..75: mol_type = other DNA
gttaatgatttcatggatagcgtccaccatatttggtgtccactattctctcaggaatttcaggatctgccagac

SEQ ID NO: 6567 - DNA, 75 bp, synthetic construct
  source 1..75: mol_type = other DNA
gcgcagctcgaaaaagccgatccggattttatggcggagcgcgagaatgttgtcagcgacgaaggtcgatttgac

SEQ ID NO: 6568 - DNA, 75 bp, synthetic construct
  source 1..75: mol_type = other DNA
ccagtacctatatccctcatccgctgctcagccagcaggctttttcgcgttttgtgcaggactatctggtatttg

SEQ ID NO: 6569 - DNA, 75 bp, synthetic construct
  source 1..75: mol_type = other DNA
attcagttctgaatcattgccgcacaattttaatatggctgctgtcggtgtgatgaagaagggaatgtcgatgag

SEQ ID NO: 6570 - DNA, 75 bp, synthetic construct
  source 1..75: mol_type = other DNA
caacaatcctgcgttggctgcggctttaattaccagccagggattttccggagaggccacggatatgtttcttat

SEQ ID NO: 6571 - DNA, 75 bp, synthetic construct
  source 1..75: mol_type = other DNA
gaatcgtacttcctgcaccggagaaattcggttctgagtcattgccggacaattttaatatgactgctgtcggtg

SEQ ID NO: 6572 - DNA, 75 bp, synthetic construct
  source 1..75: mol_type = other DNA
tacccggaactggcaaaggcttatccaacaaataaattacctgatttacgcggtgagtttattcgtggctgggat

SEQ ID NO: 6573 - DNA, 75 bp, synthetic construct
  source 1..75: mol_type = other DNA
cgcttaccaatttgagtggaaaggatgtagctggtcttctcacataccttggtttgggagaaggctctgcattac

SEQ ID NO: 6574 - DNA, 75 bp, synthetic construct
  source 1..75: mol_type = other DNA
cctgttccgtggccttcagccactccgccaacaggctggctgaaatgcaatggtgcggctttttctgctgaagaa

SEQ ID NO: 6575 - DNA, 75 bp, synthetic construct
  source 1..75: mol_type = other DNA
ttacatattgccaaaaaactgcttccgtatatcccgaataacgcggggatcctgctggtaccatgctgtcgtggt

SEQ ID NO: 6576 - DNA, 75 bp, synthetic construct
  source 1..75: mol_type = other DNA
gactgcagcactgtcgtcagtcagcgggtggggatttccttttatggcgtatcagatattcacgaaccggagttg

SEQ ID NO: 6577 - DNA, 75 bp, synthetic construct
  source 1..75: mol_type = other DNA
gtggaggcatccggtgccagtctggagaaggcgcggcacgaccagctgcttaccgcgcttcgtgcgctgctgtta

SEQ ID NO: 6578 - DNA, 75 bp, synthetic construct
  source 1..75: mol_type = other DNA
tgctctgattaacggtgcgccagccacgctggacacactgaaagaaattgccgcagccattaacaatgacccgaa

SEQ ID NO: 6579 - DNA, 75 bp, synthetic construct
  source 1..75: mol_type = other DNA
atgtctgcaatcacagtctcccgtccggaagtggtcaacgggcatacggacgttatctgctccacctcagtcagc

SEQ ID NO: 6580 - DNA, 75 bp, synthetic construct
  source 1..75: mol_type = other DNA
cgtttcactgccggacgaaaaacaatcatcaccggttgagcgatttctggagaaacacccggatgcgcatacctg

SEQ ID NO: 6581 - DNA, 75 bp, synthetic construct
  source 1..75: mol_type = other DNA
ctgagcgtcagaccccgactcctgcaatcgtcaagggattgaaacctatagaagacattgctgatgaactgcgcg

SEQ ID NO: 6582 - DNA, 75 bp, synthetic construct
  source 1..75: mol_type = other DNA
atcgtcaacaacctggtgaggtgggaccggtgggggtttcatcttatcaccgggcaacagactgaccgactcgtc

SEQ ID NO: 6583 - DNA, 75 bp, synthetic construct
  source 1..75: mol_type = other DNA
gccatgtgcctggcgtcatagcagactggccggtcaaccgggtcagcgaactgcttccgtggcgcatagcactgc

SEQ ID NO: 6584 - DNA, 75 bp, synthetic construct
  source 1..75: mol_type = other DNA
cgcggtgccctgcattatctggcgaaagaagaacaaaaagacgggctgtgtgcctacggctgcaatgaagttcct

SEQ ID NO: 6585 - DNA, 75 bp, synthetic construct
  source 1..75: mol_type = other DNA
atacttgaccagtttctggatgaaaaagagggtaaccacactacggcataccgcgatggttccggtatatggacc

SEQ ID NO: 6586 - DNA, 75 bp, synthetic construct
  source 1..75: mol_type = other DNA
gtgctggcactgcgacaaccagctgcgcgaccagacctccgaatcactcgggcaacttgctcaccaaaacctgtc

SEQ ID NO: 6587 - DNA, 75 bp, synthetic construct
  source 1..75: mol_type = other DNA
gctgggtcaacaatgaatcctttctcgcggggtacggggcagctcaagcggtgcccggccctttgttcacgttcg

SEQ ID NO: 6588 - DNA, 75 bp, synthetic construct
  source 1..75: mol_type = other DNA
tcattgctctgctggtggcctgtggtgcgcttagtctggggctgaatcattaccgcgataacgccatcacttaca

SEQ ID NO: 6589 - DNA, 75 bp, synthetic construct
  source 1..75: mol_type = other DNA
actgagcgaggccagaaggttgagaacccagcagacctggtgcggccagcaagcattgccaggtttgagccgaga

SEQ ID NO: 6590 - DNA, 75 bp, synthetic construct
  source 1..75: mol_type = other DNA
atgagctgacgctggacggtgcgacatttagtgcacaaacaaccctgaataacggtaccaacaccattccgttcc

SEQ ID NO: 6591 - DNA, 75 bp, synthetic construct
  source 1..75: mol_type = other DNA
agaatcaataacttaggttttaaagttcaatatgagcattacctgtttgaaggagaacaaggtaagcgcgacagc

SEQ ID NO: 6592 - DNA, 75 bp, synthetic construct
  source 1..75: mol_type = other DNA
gctgcttcgggccagagctgaactgacagaagaacaggctgtagctcaaaaacttaaaaatcaggtaaccgaagg

SEQ ID NO: 6593 - DNA, 75 bp, synthetic construct
  source 1..75: mol_type = other DNA
atacagataacgtattgaatgaatgctttaataaccgttgcactctgcaaatatgtccttatgggctaaaacaac

SEQ ID NO: 6594 - DNA, 75 bp, synthetic construct
  source 1..75: mol_type = other DNA
tggcaggggcggcaatatcaggcatacccgattgacggcagtggctttgagatgaacgggaagggcagcagtgcc

SEQ ID NO: 6595 - DNA, 75 bp, synthetic construct
  source 1..75: mol_type = other DNA
gctgaatggctggcagcggtcagcgggcgctaaggcagagctggcactggcggagaaactggggcatgcagtgat

SEQ ID NO: 6596 - DNA, 75 bp, synthetic construct
  source 1..75: mol_type = other DNA
tgtgcgcagttcacctcgggggcacagtgtggcagcgaagttcagggggtttttgacgatccggagtcgctgggg

SEQ ID NO: 6597 - DNA, 75 bp, synthetic construct
  source 1..75: mol_type = other DNA
atgagcgaatatttcagaatacttcaggggctgcctgacggctcctttacccgcgaacaggccgaagccgttgcc

SEQ ID NO: 6598 - DNA, 75 bp, synthetic construct
  source 1..75: mol_type = other DNA
gacgctgatggtcgatgtggaatataaatgcgagcagaccaactttgacacggtactgacctacgcgaagctgga

SEQ ID NO: 6599 - DNA, 75 bp, synthetic construct
  source 1..75: mol_type = other DNA
cgggcattgccgtgatgtgttctgcagttatatcatcaggttatgccagttctgataaaaaagaagatacgcttg

SEQ ID NO: 6600 - DNA, 75 bp, synthetic construct
  source 1..75: mol_type = other DNA
tcgaaatgagtctggaagcgcggctgacccagctcatcatcaaaccgcagaaaaccggcggtgacttcaaggaaa

SEQ ID NO: 6601 - DNA, 75 bp, synthetic construct
  source 1..75: mol_type = other DNA
gcggggagaaaataccgttactcagtacagcgaatacctggaccaatcgacaaacattcagcggtggcctttctg

SEQ ID NO: 6602 - DNA, 75 bp, synthetic construct
  source 1..75: mol_type = other DNA
gtttgcccaacgtcgggaaatctaccctgttcaacgcgctgaccaaagccggtattgaagcggccaactttccat

SEQ ID NO: 6603 - DNA, 75 bp, synthetic construct
  source 1..75: mol_type = other DNA
cagtgataaaggttctcagtatgtatcgctggcctacacacagcggcttaaggaagccggattactggcatcaac

SEQ ID NO: 6604 - DNA, 75 bp, synthetic construct
  source 1..75: mol_type = other DNA
tgcgtggtgctggcaccgccggtggtggccggtggcaaattcagaatacttgagcgtcaccagtggaaaggcatg

SEQ ID NO: 6605 - DNA, 75 bp, synthetic construct
  source 1..75: mol_type = other DNA
gaaaaaaacagttaaacgtttttacgatacgctggtggtgcagtttgatattgaagaagcatgggcagaacaaca

SEQ ID NO: 6606 - DNA, 75 bp, synthetic construct
  source 1..75: mol_type = other DNA
cagagtctgttcatgggcgttattcggccggaggtaaggaagttattgccctgatcgaagaaatcaatcagctga

SEQ ID NO: 6607 - DNA, 75 bp, synthetic construct
  source 1..75: mol_type = other DNA
cgtaccacctggaccaggcctttccgctgctgatgaaacaactggagctcatgctcaccagcggtgaactgaatc

SEQ ID NO: 6608 - DNA, 75 bp, synthetic construct
  source 1..75: mol_type = other DNA
atcaggagctggttaaactggtagccgaacgcagcaaccaaccgctgcatgatgtagacctagataaatacctat

SEQ ID NO: 6609 - DNA, 75 bp, synthetic construct
  source 1..75: mol_type = other DNA
ggcgatatataacaaagccgagtatcgtgatcagcgtacatctatgttgcaggactgggctgatatgattgatga

SEQ ID NO: 6610 - DNA, 75 bp, synthetic construct
  source 1..75: mol_type = other DNA
tcattgctgtacaaactgttgtcatggtgctatttgcctgctttgtcaccttcaaaatgatgggcaaagattatg

SEQ ID NO: 6611 - DNA, 75 bp, synthetic construct
  source 1..75: mol_type = other DNA
cgtaacagctttatcgcccaaattattcatttttaatgatgaagtgataatacaacctttattcccaactgatat

SEQ ID NO: 6612 - DNA, 75 bp, synthetic construct
  source 1..75: mol_type = other DNA
aaggtgagcgtgttaacgaagattatctgcgtcaggctttccgtgaattagacctggacgttgatatttcaacgc

SEQ ID NO: 6613 - DNA, 75 bp, synthetic construct
  source 1..75: mol_type = other DNA
actgttgatgcagccaaaatttgtggcggtgcagaaaatgttgttaaaacagaaactcagcaaacattcgtaaat

SEQ ID NO: 6614 - DNA, 75 bp, synthetic construct
  source 1..75: mol_type = other DNA
gcctcaccacgtcacgtccaactggtcgatgaattctgcgcccgcctcgatgccatcctgccctgggatcgcgcc

SEQ ID NO: 6615 - DNA, 75 bp, synthetic construct
  source 1..75: mol_type = other DNA
acacgaagtgtttgagccgaccgtcgatgtattaggtagcgttgctttatcgcttttcttggcaatggcgttaat

SEQ ID NO: 6616 - DNA, 75 bp, synthetic construct
  source 1..75: mol_type = other DNA
tcctcgtcctcggcctctgcggccgctcaaaaagccagtgagtcattacaaagtgcaacagatgctgagttgtca

SEQ ID NO: 6617 - DNA, 75 bp, synthetic construct
  source 1..75: mol_type = other DNA
cgttatctgctcaaccagtatccgccacattctggctgtacgaaagagtgcgctgctgcaaatcgacacacttat

SEQ ID NO: 6618 - DNA, 75 bp, synthetic construct
  source 1..75: mol_type = other DNA
tggcaggggcggcaatatcaggcatacccgattgacggcagcggttttgagatgaacgggaagggcagcagtgcc

SEQ ID NO: 6619 - DNA, 75 bp, synthetic construct
  source 1..75: mol_type = other DNA
attgttcacgaagcacgtttttatatggcgcagagtgctgaatctatgctggaagcgggtaagcggctgatcatc

SEQ ID NO: 6620 - DNA, 75 bp, synthetic construct
  source 1..75: mol_type = other DNA
cgggctaaccagtatgcgcagatgctgggcattgacgaaaataccctgatggctatgcgtcgcggagtggggcag

SEQ ID NO: 6621 - DNA, 75 bp, synthetic construct
  source 1..75: mol_type = other DNA
ggaaatcagaaaaagagctggaggaatggatcatcaaccgtcagaagcagagcgcagcactgacggatctgatgg

SEQ ID NO: 6622 - DNA, 75 bp, synthetic construct
  source 1..75: mol_type = other DNA
tggaagtattgagcaacatgattcgacagtacttcagtcaggaacgatctgaagaagagaccatacgagccctta

SEQ ID NO: 6623 - DNA, 75 bp, synthetic construct
  source 1..75: mol_type = other DNA
cctccggcatgggcaatgatgccaccgtcgaactctctccagttgctggacgaaacgttctcggtatccgggacg

SEQ ID NO: 6624 - DNA, 75 bp, synthetic construct
  source 1..75: mol_type = other DNA
taccgccgctatgacaaccgtggccggttaacctcggtgaaagacgcacagggccgtgaaacgcggtatgaatac

SEQ ID NO: 6625 - DNA, 75 bp, synthetic construct
  source 1..75: mol_type = other DNA
tgaacgttgaagagtgcgaccgtctgtcttttctgccttacctgtttggccaggattttctgtatgccgaagcgt

SEQ ID NO: 6626 - DNA, 75 bp, synthetic construct
  source 1..75: mol_type = other DNA
ccttaatgaaaatcatgccatcaaaggaacgttgcaggagttgataaatacagcagaaaaaacggcgtttctcgg

SEQ ID NO: 6627 - DNA, 75 bp, synthetic construct
  source 1..75: mol_type = other DNA
gacccggagcaggagctgagcgaccgctgggtggtggagcagatgtcagagctgacggccatgacagcctcgttt

SEQ ID NO: 6628 - DNA, 75 bp, synthetic construct
  source 1..75: mol_type = other DNA
acccgattgacggcagcggctttgagatgaacggccggggcagcagtgcccgcccgtcgctgacggtgtccaatc

SEQ ID NO: 6629 - DNA, 75 bp, synthetic construct
  source 1..75: mol_type = other DNA
tatcaaccagccagcaatctctcgatattcaggttcgggcactcaaagacgcaggcgtgaaagcaaatcgcatct

SEQ ID NO: 6630 - DNA, 75 bp, synthetic construct
  source 1..75: mol_type = other DNA
gtttcactgggacaggtataacccggcaacggaggcgagttcgtgctgggtgagggtgtcacaggcgtgggcggg

SEQ ID NO: 6631 - DNA, 75 bp, synthetic construct
  source 1..75: mol_type = other DNA
attcagtaccaccattaacaatgcgctggcactgaaagcgccgctgtcgagtccggcactcaccggaacgccaac

SEQ ID NO: 6632 - DNA, 75 bp, synthetic construct
  source 1..75: mol_type = other DNA
atcggcgcagtgactgctgaaggtaaaaaaacaggcatgaaagctctgttatctgcccagtcacagctcggcgtt

SEQ ID NO: 6633 - DNA, 75 bp, synthetic construct
  source 1..75: mol_type = other DNA
gagccgaccatcttcgcgtggatggaccgcttctgcacggactacagcggcggcatctggaatttttacacgctg

SEQ ID NO: 6634 - DNA, 75 bp, synthetic construct
  source 1..75: mol_type = other DNA
ctgtacggtgaaatgcgtgtggggtcgcgggtggtatctcaggagatcagcacggcagatgaaggtgatggtggt

SEQ ID NO: 6635 - DNA, 75 bp, synthetic construct
  source 1..75: mol_type = other DNA
agaacgtgaaagcgttttttcctgccgtcagggagtttgtctataaccccaacgttaaaaacgccctggtactca

SEQ ID NO: 6636 - DNA, 75 bp, synthetic construct
  source 1..75: mol_type = other DNA
acgctggacacactgaaagaaattgccgcagccattaacaatgacccgaaattcagcaccaccattaacaatgcg

SEQ ID NO: 6637 - DNA, 75 bp, synthetic construct
  source 1..75: mol_type = other DNA
gggctgaggcggacaataacatcgctgaaaatgcgttgcggatggtcagtctgggccgcaaaaactacctgttct

SEQ ID NO: 6638 - DNA, 75 bp, synthetic construct
  source 1..75: mol_type = other DNA
ctgttcttcggctctggccatggtggtgagcggggagcgctactgtacagcctgatcgggacgtgcaaactgaat

SEQ ID NO: 6639 - DNA, 75 bp, synthetic construct
  source 1..75: mol_type = other DNA
gttcagccacctggtgggaatggatgcatgtcagggaacactcacactgctggatacccccggccctaatgaagc

SEQ ID NO: 6640 - DNA, 75 bp, synthetic construct
  source 1..75: mol_type = other DNA
aacgcaaagaacagcaaatgctggaggaagaaaattcagcgcagccccgggagagaaacgcattcgctttctttc

SEQ ID NO: 6641 - DNA, 75 bp, synthetic construct
  source 1..75: mol_type = other DNA
tggacgatgccgttgaaggactggcgaatggcaatgagccgctttattatcgagttcggtgaccgcctggacggt

SEQ ID NO: 6642 - DNA, 75 bp, synthetic construct
  source 1..75: mol_type = other DNA
cagggatacggcacattgctattaatattttgacgaatgataaggtattcaaggcagggttaagacgtaagatgc

SEQ ID NO: 6643 - DNA, 75 bp, synthetic construct
  source 1..75: mol_type = other DNA
ttttcttaaacgttggtttgggagaaggctctgcattaccggttggggtgcctgttccgtggccttcagccactc

SEQ ID NO: 6644 - DNA, 75 bp, synthetic construct
  source 1..75: mol_type = other DNA
tggcttgcagagaaagaagaacgcgagcgaatttaccagacatcaatccgaccattccgcaaagccacatatacc

SEQ ID NO: 6645 - DNA, 75 bp, synthetic construct
  source 1..75: mol_type = other DNA
gcagtgatgtgattgtctgcgctgaaatggacgaacattggggctacgtcggtgctaaatcacgtcagcgctggc

SEQ ID NO: 6646 - DNA, 75 bp, synthetic construct
  source 1..75: mol_type = other DNA
catggttaagttcgacacatgtgaaaacatcaccgttgatatggttattagcgcacaggaattgttgcaggaaga

SEQ ID NO: 6647 - DNA, 75 bp, synthetic construct
  source 1..75: mol_type = other DNA
gcaggtaaacaaccgctggacaatacgcttaccaatttgagtggaaaggatgtagctggtcttctcacatacctt

SEQ ID NO: 6648 - DNA, 75 bp, synthetic construct
  source 1..75: mol_type = other DNA
caaggcatatgatgtcaatatctccggtctggtaagcaccaccatgcagaatgaagcccgtcgtctgcgtgccga

SEQ ID NO: 6649 - DNA, 75 bp, synthetic construct
  source 1..75: mol_type = other DNA
cgatccgctggaagtggcgcagtggctgcaggcctgtcacgatgcaggaatggaggttcgcgtacagataaatga

SEQ ID NO: 6650 - DNA, 75 bp, synthetic construct
  source 1..75: mol_type = other DNA
acggcagaaccctacgatgataactacctggatgatgaagacgcggactggaccgcgaccgggcaggggcagaag

SEQ ID NO: 6651 - DNA, 75 bp, synthetic construct
  source 1..75: mol_type = other DNA
tttccggtcgcgaatggggcggctggacatccgtccgtatcagtgcgggcattaaccgtattgcccgggatttta

SEQ ID NO: 6652 - DNA, 75 bp, synthetic construct
  source 1..75: mol_type = other DNA
cagcagaaaaaagaaatggctgcattggtacagaagcaaattgaaagcctcagggctcaactggagcagttgtta

SEQ ID NO: 6653 - DNA, 75 bp, synthetic construct
  source 1..75: mol_type = other DNA
gcatggcgatgaatgcctgggcataccctgatggtgagaaagttcctgcagctgaaatagcccggacttatttcg

SEQ ID NO: 6654 - DNA, 75 bp, synthetic construct
  source 1..75: mol_type = other DNA
taacgccaaagctgctgcagctgctaaaggtatgccgctgtacgagcacatcgctgaactgaacggcactccggg

SEQ ID NO: 6655 - DNA, 75 bp, synthetic construct
  source 1..75: mol_type = other DNA
agtatgaacatagaatcggtgacctgattgcccgatttaaagaagcgggtggggtggtaaatgaagctgagatat

SEQ ID NO: 6656 - DNA, 75 bp, synthetic construct
  source 1..75: mol_type = other DNA
agaacacattaagaagttacgtgacatgcgttcaaaaagcagaggtaaccatggaatcatacagcctcacactcg

SEQ ID NO: 6657 - DNA, 75 bp, synthetic construct
  source 1..75: mol_type = other DNA
ggtgatggtggatttcaccagcagaatcatgtcggtgctggcggatggggtgctggtctgcggcattgtggtatt

SEQ ID NO: 6658 - DNA, 75 bp, synthetic construct
  source 1..75: mol_type = other DNA
atgtcgcagacagaaaatgcagtgacttcctcatcaggcaccaagcgtacataccggaaaggtaaccctgttccg

SEQ ID NO: 6659 - DNA, 75 bp, synthetic construct
  source 1..75: mol_type = other DNA
atacggaataattggcgcagtagttggcttatggggaggtgctgggatttggttacaactctatctacaaatgcg

SEQ ID NO: 6660 - DNA, 75 bp, synthetic construct
  source 1..75: mol_type = other DNA
agtgacgaacaacatttatttggcagagctgcattgatggccaggtacgaagatgaaaataaaacgccagtgacg

SEQ ID NO: 6661 - DNA, 75 bp, synthetic construct
  source 1..75: mol_type = other DNA
ggctcatcagtggtggcgctggagctggcgcaggcgttcgcccgactcggagcgaaggtgacgatcctggctcgc

SEQ ID NO: 6662 - DNA, 75 bp, synthetic construct
  source 1..75: mol_type = other DNA
tgtccccgatacttgatttgtttaacggggaaatcgtggcgtgggaaacggcctgcaggcctacagaggagctgg

SEQ ID NO: 6663 - DNA, 75 bp, synthetic construct
  source 1..75: mol_type = other DNA
aaagccgccgaggagatcgggcagctcgtcactgtcgcacgtgaagaactccagcgccgcaagaccaaagaacca

SEQ ID NO: 6664 - DNA, 75 bp, synthetic construct
  source 1..75: mol_type = other DNA
atggaaaccgtatctgacgcactgaaagcactgaaaaaagcctcttcacatgtggtggcagctcgccttggaatc

SEQ ID NO: 6665 - DNA, 75 bp, synthetic construct
  source 1..75: mol_type = other DNA
actggctaagccgggcaccatcaagccgcacaccaagttcgaatctgaagtgtacattctgtccaaagatgaagg

SEQ ID NO: 6666 - DNA, 75 bp, synthetic construct
  source 1..75: mol_type = other DNA
gggaagtgcgtgttccacaccggggaaatgtggtggacagagtcattgaaggggcttacgaggtggtgggcgtgt

SEQ ID NO: 6667 - DNA, 75 bp, synthetic construct
  source 1..75: mol_type = other DNA
accgtgtcgtgttctggaagctggctcactggctggcccgcaaataccgtacaggtatcgcttccctgatgaggt

SEQ ID NO: 6668 - DNA, 75 bp, synthetic construct
  source 1..75: mol_type = other DNA
tacaaaatacgattaccagtattgagtcagcacgagatgaaatgccattcggactcgacaacgatcaagcacaca

SEQ ID NO: 6669 - DNA, 75 bp, synthetic construct
  source 1..75: mol_type = other DNA
tatgccaccgcccgtgcgcttggtctgcgtgccaaaattgatgagcagaccgggtggcacaaaagcctgtccaac

SEQ ID NO: 6670 - DNA, 75 bp, synthetic construct
  source 1..75: mol_type = other DNA
ggggggcaagacgctgttagattggcaattgaattctgcactgacaaaaattatatccgtagagatatcggagca

SEQ ID NO: 6671 - DNA, 75 bp, synthetic construct
  source 1..75: mol_type = other DNA
attcactcgcccaggcaatgatcaccggccctgtagccgcccggctcggcgaaaggcgggcactcatgctcggaa

SEQ ID NO: 6672 - DNA, 75 bp, synthetic construct
  source 1..75: mol_type = other DNA
gtcgcgcccgcgcaaaatttcactggcaattcctggaacattatccggctgctcaggactgcgcttataaatttc

SEQ ID NO: 6673 - DNA, 75 bp, synthetic construct
  source 1..75: mol_type = other DNA
gacgctgtatattggtggttgtacactttttttccctgcctcgcatatggcaacctacactatgttccttgcagc

SEQ ID NO: 6674 - DNA, 75 bp, synthetic construct
  source 1..75: mol_type = other DNA
cagcatattgaggcaggcatttcactgtgtgatgcagtgaactttctcgtggaaaaatacgcactggtacgtacc

SEQ ID NO: 6675 - DNA, 75 bp, synthetic construct
  source 1..75: mol_type = other DNA
cccgctctcagttaataaacagcatcgatatcctccgggctcgccgggcaacaggcctgatgacccgcgacaatt

SEQ ID NO: 6676 - DNA, 75 bp, synthetic construct
  source 1..75: mol_type = other DNA
gggtagttttgacagcacacgttgttctcaacggcgctaaaaaaacatacacattaaaaatgtgggtaattattt

SEQ ID NO: 6677 - DNA, 75 bp, synthetic construct
  source 1..75: mol_type = other DNA
cccgaccgaatccgtggccgttgatgtcgcttatgaaggctccggcagtggcaactggcgcactgacgggttcat

SEQ ID NO: 6678 - DNA, 75 bp, synthetic construct
  source 1..75: mol_type = other DNA
ggagaaatggcggatctgtacagtaatcgctgggaaatcgaactgggatacagggagataaaacagacgatgcaa

SEQ ID NO: 6679 - DNA, 75 bp, synthetic construct
  source 1..75: mol_type = other DNA
agttgagcgacggcactttatcgtggttagggaacgccttgttctggatgccgctaccagaaccgccgcaggagg

SEQ ID NO: 6680 - DNA, 75 bp, synthetic construct
  source 1..75: mol_type = other DNA
gtaaagacaggtgagctcattgggatggacgccattgagctcagaatgggcgaactgcgtcgctatgtcatcacc

SEQ ID NO: 6681 - DNA, 75 bp, synthetic construct
  source 1..75: mol_type = other DNA
tgtatcagttacggcgatgttcatcagtcaatacgctggaaaaaattattcataaaaacagagacagtttattaa

SEQ ID NO: 6682 - DNA, 75 bp, synthetic construct
  source 1..75: mol_type = other DNA
tttgtgatgaagccgaccggcttttgcaactgaatatcaatctgctccggcaaatggttgatgagccggatgtgt

SEQ ID NO: 6683 - DNA, 75 bp, synthetic construct
  source 1..75: mol_type = other DNA
gggcgcagtgccgtattgatacagatgatgcaactgatgatgagttactgatgctgtatttccgggctgcctgcc

SEQ ID NO: 6684 - DNA, 75 bp, synthetic construct
  source 1..75: mol_type = other DNA
gcaggtaaacaaccgctggacaatacgcttaccaatttgagtggaaaggatgtagctggtcttctcgcatacctt

SEQ ID NO: 6685 - DNA, 75 bp, synthetic construct
  source 1..75: mol_type = other DNA
gcccaaattatggtggggcgtgcagggccaacttcggttgggccgggttctttggtgaccggtatttccacccct

SEQ ID NO: 6686 - DNA, 75 bp, synthetic construct
  source 1..75: mol_type = other DNA
acccgccgacggtgaacacctactggcgacgtcgtggcagcacatattttgtatcaaaagccggtgagcgttatc

SEQ ID NO: 6687 - DNA, 75 bp, synthetic construct
  source 1..75: mol_type = other DNA
gtaccgtcacccatcgggcgatattgggggaaacctgtacggtgctggagatggccgcaggaacctggcatgccg

SEQ ID NO: 6688 - DNA, 75 bp, synthetic construct
  source 1..75: mol_type = other DNA
atgaatccgtctgatgccattgaggcaattgaaaaaccactttcttccctgccttactcactttcccgtcacatc

SEQ ID NO: 6689 - DNA, 75 bp, synthetic construct
  source 1..75: mol_type = other DNA
ggtgcaagaagtgaatccacagtgaaatcggctattgcagaactggcgaaagagggctggctgacgaaggaagag

SEQ ID NO: 6690 - DNA, 75 bp, synthetic construct
  source 1..75: mol_type = other DNA
ttgtctggagcctgattcatttgcggtaaatgtttatcatttattgcatgcaacacaggtattacatatgtccag

SEQ ID NO: 6691 - DNA, 75 bp, synthetic construct
  source 1..75: mol_type = other DNA
atgagccccgtacgcagcgcacagtactggagccacgcaccgataaccagcgcctgttccgccatcttgagcctg

SEQ ID NO: 6692 - DNA, 75 bp, synthetic construct
  source 1..75: mol_type = other DNA
ggcgacgcagagtgggaagcgaaaatcctggaactggctggcttcctggattcttacattccggaaccagagcgt

SEQ ID NO: 6693 - DNA, 75 bp, synthetic construct
  source 1..75: mol_type = other DNA
ccgtccaggtctttatcggcgttgatgtcggtaaagatacgcatcacgctgttgccattaatcgttcaggtaaac

SEQ ID NO: 6694 - DNA, 75 bp, synthetic construct
  source 1..75: mol_type = other DNA
gcggcggcaaagaaatccgaaactgcagcggcatcatcgaagaacgcggcgaaaacctcagaaacgaatgcagct

SEQ ID NO: 6695 - DNA, 75 bp, synthetic construct
  source 1..75: mol_type = other DNA
ggcagcggtaagccggtgagtgtggacatcaccgaacaccccgcgccggaccggatacaggtcagtaccctgcct

SEQ ID NO: 6696 - DNA, 75 bp, synthetic construct
  source 1..75: mol_type = other DNA
gcgtgcgtgttatggccacgtttccgggcaatgctgtcgatttcatcctcaccgacccgccatatctcgtcggtt

SEQ ID NO: 6697 - DNA, 75 bp, synthetic construct
  source 1..75: mol_type = other DNA
ttctggtcattaaacgcgtgttcaggttgaccctgcgggctgcacagggttttattgattccatttttacactga

SEQ ID NO: 6698 - DNA, 75 bp, synthetic construct
  source 1..75: mol_type = other DNA
aacctttgggaaagcccggcgactatacaggttattgaccaacaaacattgcagaactccaccaatgcctccata

SEQ ID NO: 6699 - DNA, 75 bp, synthetic construct
  source 1..75: mol_type = other DNA
caccagtgcgttgatgctggagagtatgaccaaaaacgatcgtcatcaggtgctgctggatacgctgatcgcaca

SEQ ID NO: 6700 - DNA, 75 bp, synthetic construct
  source 1..75: mol_type = other DNA
tgcgcgttgttgaagtcaacgaaggtacccgatccattaccacggtgagcaccgccatcgtgggcatggtctgca

SEQ ID NO: 6701 - DNA, 75 bp, synthetic construct
  source 1..75: mol_type = other DNA
cccctaaccagcgtaatggagagggaaaccgccgtatcaccggtgatttttatccggcttttttgttctatggcg

SEQ ID NO: 6702 - DNA, 75 bp, synthetic construct
  source 1..75: mol_type = other DNA
cgcgcccaagttgtcgcgctgcgcaagtccggctacagcatcaacaagaccgccgagctggccgggtacagtgcg

SEQ ID NO: 6703 - DNA, 75 bp, synthetic construct
  source 1..75: mol_type = other DNA
caccggcgaatcagaatggattcatttcacaggtagcggatatctgttacgtaccggtgcgtggtcatacccggt

SEQ ID NO: 6704 - DNA, 75 bp, synthetic construct
  source 1..75: mol_type = other DNA
cagtaagcaatggcccggtaaagccgctattggtcgtctgaaaggtgatgaactggcgcaatataatttgtggct

SEQ ID NO: 6705 - DNA, 75 bp, synthetic construct
  source 1..75: mol_type = other DNA
ggtttatccttatgtggtcccgctgacggagggaaagcctgcggtatctccgccgtggctggtgttttctgtggt

SEQ ID NO: 6706 - DNA, 75 bp, synthetic construct
  source 1..75: mol_type = other DNA
atgaacgtactaaaaaaacttatgcagcgtctgtgcgggtacggaaagcatgatgaccgtgaacacggggagtta

SEQ ID NO: 6707 - DNA, 75 bp, synthetic construct
  source 1..75: mol_type = other DNA
gttaccgtgccgggcgtctgatgaaatatctgaacctgagcagttgtcagcccggaaaacatcagtacaaaaatg

SEQ ID NO: 6708 - DNA, 75 bp, synthetic construct
  source 1..75: mol_type = other DNA
cgttttgcctgaaagagagccagcgcggtgtgcatgtttgtactggctgcatggcgacggttctgtatggaacct

SEQ ID NO: 6709 - DNA, 75 bp, synthetic construct
  source 1..75: mol_type = other DNA
cagtcagtggagtgtctccggtccgcacattaagcccggaaaggatttctggttttatgtgcgcagcgtcaacct

SEQ ID NO: 6710 - DNA, 75 bp, synthetic construct
  source 1..75: mol_type = other DNA
gttatcacgtcaggcgaatggctggacggcgtgaagggcaaacaggcattagccgcactggaacgctacaaaggg

SEQ ID NO: 6711 - DNA, 75 bp, synthetic construct
  source 1..75: mol_type = other DNA
cacagcgggtggcggcttatgcttccgaaatcaaccggctgaaggcgctggttgcgaaactgcagcgcatgcagt

SEQ ID NO: 6712 - DNA, 75 bp, synthetic construct
  source 1..75: mol_type = other DNA
accaccgccaccgcgtatgccaccgcccgtgcgctgggtctgcgcgctaaaatcgaccaggagcagggctggcat

SEQ ID NO: 6713 - DNA, 75 bp, synthetic construct
  source 1..75: mol_type = other DNA
tgtgcaggcctccacccgggatgaaatagagcgactctggaatccgcagggtatggctacgcagcctgcacaacc

SEQ ID NO: 6714 - DNA, 75 bp, synthetic construct
  source 1..75: mol_type = other DNA
tgcagtttatgctggttatgctggctgcatggggcattagttggggagccagatttgtcatggagcaggccgttc

SEQ ID NO: 6715 - DNA, 75 bp, synthetic construct
  source 1..75: mol_type = other DNA
taacgcttgccgcgaaaaacatcacacaggataccgccagccagattaacgcggcccgcgatatcgtgactgtcg

SEQ ID NO: 6716 - DNA, 75 bp, synthetic construct
  source 1..75: mol_type = other DNA
acttcgccaaagaagtcgaggtggagctaaaaggcgatccgatggtgcttcctaacggagccacgctttacttcc

SEQ ID NO: 6717 - DNA, 75 bp, synthetic construct
  source 1..75: mol_type = other DNA
cagaagggagatcgtgaaggtgttcgcgtatttttaaatgcggcaaagactgaagtattaaatcagcgttatttc

SEQ ID NO: 6718 - DNA, 75 bp, synthetic construct
  source 1..75: mol_type = other DNA
ctggcggtcaggcaaatgcagagtaaaccgctactgacttccctgtataagctgatgcaggagaaagaacacacg

SEQ ID NO: 6719 - DNA, 75 bp, synthetic construct
  source 1..75: mol_type = other DNA
agccagcgcgaagggatgctgatctggcccgactttactggctgggacacggtgctgaatgccgaagcaacggca

SEQ ID NO: 6720 - DNA, 75 bp, synthetic construct
  source 1..75: mol_type = other DNA
agtgcaggatattcccggtgtgctggccgtgtttgctgaacgtcgtaaggacagttttggcccgtatgtccggct

SEQ ID NO: 6721 - DNA, 75 bp, synthetic construct
  source 1..75: mol_type = other DNA
agtcacggcagagaagaaacccgtcttcatattgtttgcgatgtccctgatgagcttattgatttcacgtttgaa

SEQ ID NO: 6722 - DNA, 75 bp, synthetic construct
  source 1..75: mol_type = other DNA
tacaccctgaacaacggcggggcatttatggcacccgaaccggatgacgatgatgacgaaacatgggtactgttc

SEQ ID NO: 6723 - DNA, 75 bp, synthetic construct
  source 1..75: mol_type = other DNA
acattcaggtgatcgataatgcaaccgaccgcatccgtaaaatgaacggctatacatacacgcttaaagaaaacg

SEQ ID NO: 6724 - DNA, 75 bp, synthetic construct
  source 1..75: mol_type = other DNA
actggcacaagccgcccagcgaggagaacgcgtccctactcctggcgaacttcctacaaacattgatgaacgggt

SEQ ID NO: 6725 - DNA, 75 bp, synthetic construct
  source 1..75: mol_type = other DNA
gcgatgcacctgaacccgaacgcaggtgtgaaacgcgagattgcaaccctttcccgcgccctgaaaaaagccgat

SEQ ID NO: 6726 - DNA, 75 bp, synthetic construct
  source 1..75: mol_type = other DNA
atcaggagctggttaaactggtagccgaacgcagcaaccaaccgctgcatgatgtagacctggataaatacctat

SEQ ID NO: 6727 - DNA, 75 bp, synthetic construct
  source 1..75: mol_type = other DNA
caggtattgccaactagcggagctatatttgggagaaaactccgctcaactcacaggacggcaggtgttgaggat

SEQ ID NO: 6728 - DNA, 75 bp, synthetic construct
  source 1..75: mol_type = other DNA
aactcattactacaaaggcaggaaacattaccgtttataattttgatgctgagacgaaggaatatctttccacat

SEQ ID NO: 6729 - DNA, 75 bp, synthetic construct
  source 1..75: mol_type = other DNA
ctgcgtgggtttgcctacctgtcagcgtatggctgcaagacggtacaggaggcgatcacttaccgtgaaaacttc

SEQ ID NO: 6730 - DNA, 75 bp, synthetic construct
  source 1..75: mol_type = other DNA
aacctggtaccggaaaaaaccatctggcggcggctatcgggaatcgcctgctgaaagatggccagacagtgattg

SEQ ID NO: 6731 - DNA, 75 bp, synthetic construct
  source 1..75: mol_type = other DNA
accaaaagcggtcaaggctgcatacgacctggcagccggcaaggcgcctgccagccacactcacccgtggagtca

SEQ ID NO: 6732 - DNA, 75 bp, synthetic construct
  source 1..75: mol_type = other DNA
aatctggtgagatatcagatgattaaaatggcggaacatctgaaaggttactggccgaatcaactgagtttctca

SEQ ID NO: 6733 - DNA, 75 bp, synthetic construct
  source 1..75: mol_type = other DNA
tccgccagcacgccgccgtgccattcctggagtgcagctttgcattacctgccaggaaatcgcagagctgaaagg

SEQ ID NO: 6734 - DNA, 75 bp, synthetic construct
  source 1..75: mol_type = other DNA
atgattttgtcctcatcgtcaaaggcaccaaagcacaggcggaagccatcagggaggagtgtcggggtgtgctcg

SEQ ID NO: 6735 - DNA, 75 bp, synthetic construct
  source 1..75: mol_type = other DNA
aacagcgcatcagcttctggccgcagcattttggcctcattccacagtgggtggccctggagccccgtgtcttcg

SEQ ID NO: 6736 - DNA, 75 bp, synthetic construct
  source 1..75: mol_type = other DNA
cctatggcacatcggctggtaatgctggtttctgggcattgcagttactcgataaagtaactccgtcacagtggg

SEQ ID NO: 6737 - DNA, 75 bp, synthetic construct
  source 1..75: mol_type = other DNA
actcccgcaacggttattccacaaagaccgttatcacaggcgacggtccactggaactgcgtactccgcgcgatc

SEQ ID NO: 6738 - DNA, 75 bp, synthetic construct
  source 1..75: mol_type = other DNA
gccatatcctgagcgtactgccggaatggccttccaaccgagttgatgaactcctgccatggaacgtagtactca

SEQ ID NO: 6739 - DNA, 75 bp, synthetic construct
  source 1..75: mol_type = other DNA
agccgcagcgaggaagccagccacgccgacctcgcctgggcgaccatgcacgccctgttaaatgagccactcacc

SEQ ID NO: 6740 - DNA, 75 bp, synthetic construct
  source 1..75: mol_type = other DNA
ggggagtctgctgtttggcctgctgacgtatctgactaacctgtatttcaaaatcagagaggaccgtcgtaaggc

SEQ ID NO: 6741 - DNA, 75 bp, synthetic construct
  source 1..75: mol_type = other DNA
tgcaccgcataccgaagtggccagtctgcaccccaatcatgtctggcagattgacgcctcactctgcacgcttta

SEQ ID NO: 6742 - DNA, 75 bp, synthetic construct
  source 1..75: mol_type = other DNA
atgaaaatcaagcatgaacacatccgcatggcgatgaatgcctgggcgcgtcctgatggcgaaaaagttccagca

SEQ ID NO: 6743 - DNA, 75 bp, synthetic construct
  source 1..75: mol_type = other DNA
tgtgcacggtgcttgcggtcttgtacctaaagaactttctggctcaattgtatcgaatgaatattgtgtgcttac

SEQ ID NO: 6744 - DNA, 75 bp, synthetic construct
  source 1..75: mol_type = other DNA
cgagcacaccattgataacagcggctttaccacgcagcttgagcttgaggcaaaaatcccggaatggatagcaga

SEQ ID NO: 6745 - DNA, 75 bp, synthetic construct
  source 1..75: mol_type = other DNA
aacgtgcggaatactgggaagagcgggcgcggtcggcactgcttcacgcgaagtataaagaacgtccggacgttc

SEQ ID NO: 6746 - DNA, 75 bp, synthetic construct
  source 1..75: mol_type = other DNA
attacaaaaaagaatgaaagaatttaatcattggagcggtgaagaaattataaaattcgagagatatcaaattta

SEQ ID NO: 6747 - DNA, 75 bp, synthetic construct
  source 1..75: mol_type = other DNA
atgcagcagctttcctttctgcccggaaacatgacgcccggcgagcgcagcctcattcagcgggccctgaaaacc

SEQ ID NO: 6748 - DNA, 75 bp, synthetic construct
  source 1..75: mol_type = other DNA
gctggcattttcgcgatggtgcgtcgattcgggaaatagcccgacgaagcggcctgtccaggaacaccgttcgca

SEQ ID NO: 6749 - DNA, 75 bp, synthetic construct
  source 1..75: mol_type = other DNA
atgttccgttgtccgctttgtggcgcatctgcccgaatccgcaccagtcgtccggaaaacgattcaaacactgtg

SEQ ID NO: 6750 - DNA, 75 bp, synthetic construct
  source 1..75: mol_type = other DNA
gctggatggaccgtctgtgcgaagactactgcggtggtatctggaatctgtacaccctgaacaacggcggggcat

SEQ ID NO: 6751 - DNA, 75 bp, synthetic construct
  source 1..75: mol_type = other DNA
cagcatcaggttacggggtgactcacgtaagggacaggcagatggcagctcagccacaggcagcactgcaggaaa

SEQ ID NO: 6752 - DNA, 75 bp, synthetic construct
  source 1..75: mol_type = other DNA
cagaagcagaaaaagcttattatgcttccatcggaaacgatgatctggcagcctgagttcacagataaaacactc

SEQ ID NO: 6753 - DNA, 75 bp, synthetic construct
  source 1..75: mol_type = other DNA
ctgtattttcagccctgaccctgggtgttgcgacaaatgcgtctgctgccaccacggttaatggtggtacagttc

SEQ ID NO: 6754 - DNA, 75 bp, synthetic construct
  source 1..75: mol_type = other DNA
gttatcaacacatggcatcagccgacaatgttaaaccaaaaaatgaagtcttaaatacctggtgtgtgggaatga

SEQ ID NO: 6755 - DNA, 75 bp, synthetic construct
  source 1..75: mol_type = other DNA
tacacactgaacaacggtggcgcatttatggcccccgaaccggatgacgatgatggcgaaaactgggtactgttc

SEQ ID NO: 6756 - DNA, 75 bp, synthetic construct
  source 1..75: mol_type = other DNA
ccgcgcttaaaggactggcggccggtaatcgtctcatcccggaaagtttcagtggtgaaatcatctggatgcatc

SEQ ID NO: 6757 - DNA, 75 bp, synthetic construct
  source 1..75: mol_type = other DNA
ctgtattttcagctctgaccctgggtgttgcgacaaatgcgtctgctgtcaccacggttaatggtggtacagttc

SEQ ID NO: 6758 - DNA, 75 bp, synthetic construct
  source 1..75: mol_type = other DNA
cgcattccgcatggagggcatcgaggtgagggaacacacccaggccagccaggtcgcgtatatcaatggtgaagg

SEQ ID NO: 6759 - DNA, 75 bp, synthetic construct
  source 1..75: mol_type = other DNA
tgacctgaccggtgacccgattgtcctgggcaataacggcgcaaaactgatttttctcggcaccaactccaacac

SEQ ID NO: 6760 - DNA, 75 bp, synthetic construct
  source 1..75: mol_type = other DNA
taaaaacgccattccggcggcttcagcaatggccattaaccgcgtggccacaacggcgattaatcagtcttcatc

SEQ ID NO: 6761 - DNA, 75 bp, synthetic construct
  source 1..75: mol_type = other DNA
gaagagcaatatcccctccaggagaacggacagatattgctggcatttccgcgtctgtttattgttgcccgccgt

SEQ ID NO: 6762 - DNA, 75 bp, synthetic construct
  source 1..75: mol_type = other DNA
agatatacaccgatagcgctggctatccagtaaaaatcattcgtagtactgatcactcagtgttcttcaagagga

SEQ ID NO: 6763 - DNA, 75 bp, synthetic construct
  source 1..75: mol_type = other DNA
caatgctacaggccagactggctgttgagctgcaaatcctcagggatgaattactctcaggccactaccagccct

SEQ ID NO: 6764 - DNA, 75 bp, synthetic construct
  source 1..75: mol_type = other DNA
cgctggtcaaatcaggcatcacaccacaggaggtggatgtggttgtcaccctgccactgagcgagtatttcgaca

SEQ ID NO: 6765 - DNA, 75 bp, synthetic construct
  source 1..75: mol_type = other DNA
agcggtaagttcagtattgatggcatatccggtcaggccagcggcctgctgctggaaaatggcggcagctttacg

SEQ ID NO: 6766 - DNA, 75 bp, synthetic construct
  source 1..75: mol_type = other DNA
ttggcatggcgcttgagcgtaaagaacctcttcaccagattgtgaatcgcctggacatcatgctgccgggcaatc

SEQ ID NO: 6767 - DNA, 75 bp, synthetic construct
  source 1..75: mol_type = other DNA
ttatcgcgatggcgcgcgtattcatgccgggacgcggccagccgcgccgcagatggaaaaagccgacgcgcagct

SEQ ID NO: 6768 - DNA, 75 bp, synthetic construct
  source 1..75: mol_type = other DNA
ataaaacggattcggcagcactgctgccctgcattgaacaggcgagggaggatatccataccctgcgccaactgc

SEQ ID NO: 6769 - DNA, 75 bp, synthetic construct
  source 1..75: mol_type = other DNA
tggattggtgtgttgctgtccatgatatgaatgccggatttgatgaaaagattttattcccctcatcagttgaaa

SEQ ID NO: 6770 - DNA, 75 bp, synthetic construct
  source 1..75: mol_type = other DNA
gcatcacaacctggagcttgtgttgcacagattgcacgtgaaaatggcgtcaatgataatgttattttcaaatgg

SEQ ID NO: 6771 - DNA, 75 bp, synthetic construct
  source 1..75: mol_type = other DNA
ggacaccaacaaccagtatcagcgatctgctggttgtggtgatgaaaaaatccacagcaggtatcagtatcagct

SEQ ID NO: 6772 - DNA, 75 bp, synthetic construct
  source 1..75: mol_type = other DNA
tgcgtattcctgagcgatgaacaggaaagaagaacgcttatttctaacgaaaaaaaatgcggaggggtacatgtg

SEQ ID NO: 6773 - DNA, 75 bp, synthetic construct
  source 1..75: mol_type = other DNA
atggctacaccgcttattcgtgtcatgaacggacacatctacaaagtaccaaatcgtcgtaagcgtaaacctgag

SEQ ID NO: 6774 - DNA, 75 bp, synthetic construct
  source 1..75: mol_type = other DNA
gcatgagcaacggcaccggtgtagtagaaacgaacaatacagcagccaaagcagaaattgaacatttaatgaatg

SEQ ID NO: 6775 - DNA, 75 bp, synthetic construct
  source 1..75: mol_type = other DNA
aggagagccagataacccgccatatctgcgtggaaggatggagcgcgattggagagtggggcggagtaccattcc

SEQ ID NO: 6776 - DNA, 75 bp, synthetic construct
  source 1..75: mol_type = other DNA
ctgaacaatgccaccggcgctgccggggaagggtgtaacgaaaaagcagccttcattactccagggattcagaag

SEQ ID NO: 6777 - DNA, 75 bp, synthetic construct
  source 1..75: mol_type = other DNA
ttctgctccaaattataacagagaccagttatagtttcggtgctgtgttttttttacaatattgtgataacacat

SEQ ID NO: 6778 - DNA, 75 bp, synthetic construct
  source 1..75: mol_type = other DNA
ttgatgataaaatttatgtcaaacgactgcaaatgatacctgacaaactactggtgatttctgataaccagattt

SEQ ID NO: 6779 - DNA, 75 bp, synthetic construct
  source 1..75: mol_type = other DNA
atgacctacaaatacaatcccttctggcagcaacgtattcgtgagacggtgctgcacgcactgaatgttcatcca

SEQ ID NO: 6780 - DNA, 75 bp, synthetic construct
  source 1..75: mol_type = other DNA
aactgcgtcgtgaagttgaacaggctgaggccctgctgaaacaacgcgaacaggacagcgatcgttacagtgggc

SEQ ID NO: 6781 - DNA, 75 bp, synthetic construct
  source 1..75: mol_type = other DNA
cgccagatccgggtggagaaaattatgaagcgttccggtatccaactgttgcaccagaagtgttcgtttgcgaat

SEQ ID NO: 6782 - DNA, 75 bp, synthetic construct
  source 1..75: mol_type = other DNA
cagatatgcccgctggtctgaaattgatattgacaatgccatgtggactattccagccgaacgcgaacctctgcc

SEQ ID NO: 6783 - DNA, 75 bp, synthetic construct
  source 1..75: mol_type = other DNA
gatgatcacattcagtctgttcagggtaaagagagctatgaagatgagatgttcagcatcagatactttaagaag

SEQ ID NO: 6784 - DNA, 75 bp, synthetic construct
  source 1..75: mol_type = other DNA
gatctcgtcagaaccggcgcgtttctggtggcgatgtccctgtggcataaccatccgcagaaaacggggtcaccg

SEQ ID NO: 6785 - DNA, 75 bp, synthetic construct
  source 1..75: mol_type = other DNA
tgacaaaagagtggatgaaaggaaatcgtgtttcacgcatcacgcgcacggcttccggcgctaatgctggcggcg

SEQ ID NO: 6786 - DNA, 75 bp, synthetic construct
  source 1..75: mol_type = other DNA
tgccatcctggacagactggtacataactcacacagagtggtccttcagggagagtccctgaggaaaaatccccc

SEQ ID NO: 6787 - DNA, 75 bp, synthetic construct
  source 1..75: mol_type = other DNA
agagaaaacagtcgtgtggcacggttgagaaaaaatgcctgcctgaaatatcaggcaacaccggaagggctgcgt

SEQ ID NO: 6788 - DNA, 75 bp, synthetic construct
  source 1..75: mol_type = other DNA
tagtgtaaacggaaatgcaaataccgggaacaatcttgtgttctcaggtaatgaagggaaaatcgaactggtatc

SEQ ID NO: 6789 - DNA, 75 bp, synthetic construct
  source 1..75: mol_type = other DNA
ggaaaacacttctttaaagtaagtggctgtgaacttgatagtttgcgaacctctcaaagaggtttacaaatttcc

SEQ ID NO: 6790 - DNA, 75 bp, synthetic construct
  source 1..75: mol_type = other DNA
aagcatccatgaccagcgttgagatcgcagagctggtgggaagccgaccagatagtgttaagagaactattgaaa

SEQ ID NO: 6791 - DNA, 75 bp, synthetic construct
  source 1..75: mol_type = other DNA
aatcaagacagcgtattgcactgatttttgatgtgggcgtttctaccatttatagaaaatttccggcaaataaga

SEQ ID NO: 6792 - DNA, 75 bp, synthetic construct
  source 1..75: mol_type = other DNA
cgccttcaaaaaggtgacacgctggttgtctggaaactggatcgcctcgggcgaagcatgaaacatctgatttct

SEQ ID NO: 6793 - DNA, 75 bp, synthetic construct
  source 1..75: mol_type = other DNA
gcctcaccccggatatcgttaaacagttcaatactcttttgaatacacactgccagtcctcagaagaggcgctcg

SEQ ID NO: 6794 - DNA, 75 bp, synthetic construct
  source 1..75: mol_type = other DNA
atggtcggtgcctttattgttgatatttcaaacagtatcttaattaaaatatttattgaaattggtacatacttt

SEQ ID NO: 6795 - DNA, 75 bp, synthetic construct
  source 1..75: mol_type = other DNA
aggctcagggcgttcgcagacctgccgcatggtcatcatcgtcagcagtgtggcctcagtggagctgaccattga

SEQ ID NO: 6796 - DNA, 75 bp, synthetic construct
  source 1..75: mol_type = other DNA
atgtgtaatgcaacatggcctgatgcagcggtagacgctatcaaaacgctgatggattcacttattgagatttct

SEQ ID NO: 6797 - DNA, 75 bp, synthetic construct
  source 1..75: mol_type = other DNA
gttggccgaactgatgccaagtcaaaccatggcaatggtggattccttctatcgtgtcggatcactggtgttcgg

SEQ ID NO: 6798 - DNA, 75 bp, synthetic construct
  source 1..75: mol_type = other DNA
ggaaattgcagagatggacccggcagatctcactgccatgtcggttgaggttgtcacttttttgttgaagaagtc

SEQ ID NO: 6799 - DNA, 75 bp, synthetic construct
  source 1..75: mol_type = other DNA
ccaggcagcggtatttggtcgcactattcagcaaggctttgaagcggcgaaaaatatcggcactcagccagtggc

SEQ ID NO: 6800 - DNA, 75 bp, synthetic construct
  source 1..75: mol_type = other DNA
gctgcttgagcagtatcaccgtgccggacagcaacgtctggctgccgtacagcgggccatgcagcagggggccgc

SEQ ID NO: 6801 - DNA, 75 bp, synthetic construct
  source 1..75: mol_type = other DNA
tggcaggtgattaaggaaggaggaactgccgcgcataccaccatcaaccagaaaggaaagctgcaggtgaatgcc

SEQ ID NO: 6802 - DNA, 75 bp, synthetic construct
  source 1..75: mol_type = other DNA
aatcgacaacaacatcgcagagaacgccttacggggagtggccgtaggccggaaaaactggatgttcgcgggttc

SEQ ID NO: 6803 - DNA, 75 bp, synthetic construct
  source 1..75: mol_type = other DNA
tccccctcagcgcagaacaacaggccgccatgcaggcggtggctgtcacagaacaacgtcgtcgtcagggacgca

SEQ ID NO: 6804 - DNA, 75 bp, synthetic construct
  source 1..75: mol_type = other DNA
ggcgattaatgccctgaagcgacgggagtccgcccaggcactctacacctttatagagagcctgccccgggatcc

SEQ ID NO: 6805 - DNA, 75 bp, synthetic construct
  source 1..75: mol_type = other DNA
cgcaattagtgaaaagagtcacggcagagaagaaacccgtcttcatattgtttgcgatgtccctgatgagcttat

SEQ ID NO: 6806 - DNA, 75 bp, synthetic construct
  source 1..75: mol_type = other DNA
gacggagaaatacgtcgttatgacaggcaccaaaacataatttgctgtgagtgccggaagagcgaagttatgcag

SEQ ID NO: 6807 - DNA, 75 bp, synthetic construct
  source 1..75: mol_type = other DNA
gaaagccacaaaagcgaaggctggaagcaatacaagccaggacaatcccgtcatcagcgcggttatggttcgaag

SEQ ID NO: 6808 - DNA, 75 bp, synthetic construct
  source 1..75: mol_type = other DNA
agaatcagcccccgccggaataaattcatctgccgtcgaaacacatatccccgaagcgccagccaggaagaagaa

SEQ ID NO: 6809 - DNA, 75 bp, synthetic construct
  source 1..75: mol_type = other DNA
ggatgtgagcggatttttgaggataaaatcagtggcactaagtccgacagaccagggttgaaaaaactgctcagg

SEQ ID NO: 6810 - DNA, 75 bp, synthetic construct
  source 1..75: mol_type = other DNA
agcctatgccacattgcggctcaatatcagccagaccttttatccgattggtgctgcgtctggtattttattggg

SEQ ID NO: 6811 - DNA, 75 bp, synthetic construct
  source 1..75: mol_type = other DNA
caggaaagaaaaacatggtgtcgcactggttcagtgccagtcagtggcagctaccgaacgaaagcgattatctga

SEQ ID NO: 6812 - DNA, 75 bp, synthetic construct
  source 1..75: mol_type = other DNA
accgaaataccgatcgtctgctctttctactgacgttactgcctgtgctgattctggctgtcgtttcagacgtca

SEQ ID NO: 6813 - DNA, 75 bp, synthetic construct
  source 1..75: mol_type = other DNA
ctgccggggcatcgatggcgttatggggttcagccctggcagccggtggtttttctgccaccacgatgctgtttt

SEQ ID NO: 6814 - DNA, 75 bp, synthetic construct
  source 1..75: mol_type = other DNA
ggcgacaactggcggcaccaaaacgcccgttgggaccaacgccaattgagttgctgaaacaggagtatgaacgcc

SEQ ID NO: 6815 - DNA, 75 bp, synthetic construct
  source 1..75: mol_type = other DNA
ctgggcaactcttcgggttagatggtataaaagcagataatccaataaaagcaaagcaagggagttcagatgctt

SEQ ID NO: 6816 - DNA, 75 bp, synthetic construct
  source 1..75: mol_type = other DNA
atgtcagaaattacatccctggtcactgcagaggcagtgaaggaagtcctgcgctctgaagaagtcctgagcgca

SEQ ID NO: 6817 - DNA, 75 bp, synthetic construct
  source 1..75: mol_type = other DNA
cgctgggtgcctggctggatgtgtgcaccacgtccacagacggatgccactgaacacaccgctaacctggctgat

SEQ ID NO: 6818 - DNA, 75 bp, synthetic construct
  source 1..75: mol_type = other DNA
tatgacagacattgagcaggaaaaagtcgcgcaatttttgtcacgtgaaggaattcgcaatttcctcgcccgtct

SEQ ID NO: 6819 - DNA, 75 bp, synthetic construct
  source 1..75: mol_type = other DNA
aatctcacctccggctcgatgatggtttgtacagtgacggcgattttctgaaattgctggcacaggcggtacaga

SEQ ID NO: 6820 - DNA, 75 bp, synthetic construct
  source 1..75: mol_type = other DNA
ccattggcgtgatgatgagccatgtcagctatgccggtcatctggcgcaggccggtgtggatatcacgctgattt

SEQ ID NO: 6821 - DNA, 75 bp, synthetic construct
  source 1..75: mol_type = other DNA
ggaacttttgattccaacggttattcaatgatcatgatagatgggcgtagatataaaactcacgtcttagttttt

SEQ ID NO: 6822 - DNA, 75 bp, synthetic construct
  source 1..75: mol_type = other DNA
atcgctgacatgcagcagcgtcagcgtgatgttgctgcgctcgatgcaaagtactcgagagaattagccaatgcg

SEQ ID NO: 6823 - DNA, 75 bp, synthetic construct
  source 1..75: mol_type = other DNA
gaaggccgcgaaagacagaaagtacctatgcagatactcgtaatgatctgatccgcagtggccttgaactgctga

SEQ ID NO: 6824 - DNA, 75 bp, synthetic construct
  source 1..75: mol_type = other DNA
ctgtaatgactattcgtcgcgatctccatcaggaagatgaacctctgccactgaccctactgggtggctatattg

SEQ ID NO: 6825 - DNA, 75 bp, synthetic construct
  source 1..75: mol_type = other DNA
ctctgcagtgggtttctgaattgactgatgaactcatggcaaaaatcagaagccacgaatacaaccgctcaatgg

SEQ ID NO: 6826 - DNA, 75 bp, synthetic construct
  source 1..75: mol_type = other DNA
cgaatacatgaacagtaaacaatggcccggtaaagcggctattggtcgtctgaaaggtgaggaactggcgcaata

SEQ ID NO: 6827 - DNA, 75 bp, synthetic construct
  source 1..75: mol_type = other DNA
cactctccacgattacttacaagcagatccccgttatcactaccgaacttttggcgcacctttacggcacagaag

SEQ ID NO: 6828 - DNA, 75 bp, synthetic construct
  source 1..75: mol_type = other DNA
gaaatcgaactggcgttccattcaccggaaacagtcggaagctggcatgcacgctggagtgaccgggtggcagag

SEQ ID NO: 6829 - DNA, 75 bp, synthetic construct
  source 1..75: mol_type = other DNA
tggctaacgaactggccaaaaatctcaaaacccctgaagatctcagccagttcgatcgcctgctgaagaaaatca

SEQ ID NO: 6830 - DNA, 75 bp, synthetic construct
  source 1..75: mol_type = other DNA
accgttacggtgtcgccgcaggcggtcgccgactggcagcactcaacatgctggcagagcgcaacatccttccgg

SEQ ID NO: 6831 - DNA, 75 bp, synthetic construct
  source 1..75: mol_type = other DNA
ccgcttgacgcccgggaacaggggtttatttccagcaccaccattcccgtttttaaatatctgattgacccgcag

SEQ ID NO: 6832 - DNA, 75 bp, synthetic construct
  source 1..75: mol_type = other DNA
ttgttttgatattagccagtctgacaactggctgcacaaaagatgtatcgacaaataattatgatgcttctctgt

SEQ ID NO: 6833 - DNA, 75 bp, synthetic construct
  source 1..75: mol_type = other DNA
ccactctcaaactgaaaaagacagcaccgttctctgctctgttgtctgttaacggcgagcgtaactcccagaagt

SEQ ID NO: 6834 - DNA, 75 bp, synthetic construct
  source 1..75: mol_type = other DNA
ttccgggtgacggatgagtcaacccggcgctggctggatgaatttttatcctggcatggtggttaccgtgccttt

SEQ ID NO: 6835 - DNA, 75 bp, synthetic construct
  source 1..75: mol_type = other DNA
tataaaatcaaacttcgtgcatctggctacagacttgtataccaagtcattgatgagaaagtcgttttactcgtt

SEQ ID NO: 6836 - DNA, 75 bp, synthetic construct
  source 1..75: mol_type = other DNA
tgtagtgatgaagagaaggggctggccctgcagtgggtttctgaattgactgatgaactcatggcaaaaatcaga

SEQ ID NO: 6837 - DNA, 75 bp, synthetic construct
  source 1..75: mol_type = other DNA
gcgtgcgaaggtcaggacatgatgtcatggttaaatgcccacagccgttgcctgaccttcctgggcggcgtaccg

SEQ ID NO: 6838 - DNA, 75 bp, synthetic construct
  source 1..75: mol_type = other DNA
gaaatgcagaaatatgaatggtgaatatgtctggccctggatattgccgttttcagcagcaggcaggaaacattc

SEQ ID NO: 6839 - DNA, 75 bp, synthetic construct
  source 1..75: mol_type = other DNA
atacgtctgaaggttgttttgaaattggtgtcagaatcagtaaccctgtatttactgaagatgccattaataaga

SEQ ID NO: 6840 - DNA, 75 bp, synthetic construct
  source 1..75: mol_type = other DNA
tgacgatatgttaattattgcggttgttgcggtaggaaaacgagaacgtagtaacgtttataatctcgccagtga

SEQ ID NO: 6841 - DNA, 75 bp, synthetic construct
  source 1..75: mol_type = other DNA
ctgagcacttttctggtcagctggctgggaaaagatgcgatggccggcgtgggattggcggacagcttcaatatg

SEQ ID NO: 6842 - DNA, 75 bp, synthetic construct
  source 1..75: mol_type = other DNA
acggtggtgttctgaacggtgttccttctgcgtatcactggtatacggaacagtatggcgtgaagtggcctgtgg

SEQ ID NO: 6843 - DNA, 75 bp, synthetic construct
  source 1..75: mol_type = other DNA
tgtattacttctggcatgtctataaagaaggttccgtggttggcgcagcggaggcgctttatttaacaccacaaa

SEQ ID NO: 6844 - DNA, 75 bp, synthetic construct
  source 1..75: mol_type = other DNA
atgagcggaaaaccggcagcgcgtcagggcgacatgacgcagtatggcggtagcattgtccagggttcagccggg

SEQ ID NO: 6845 - DNA, 75 bp, synthetic construct
  source 1..75: mol_type = other DNA
agcaatagttgagcagttacgtcgtctgccaaaaccaacgtcggcacctgcttcagtggagatcgtgttgtttcc

SEQ ID NO: 6846 - DNA, 75 bp, synthetic construct
  source 1..75: mol_type = other DNA
gtgaaaacgggggccgaagccatccgggcgctggccatgcagatcccggcgtttcgtcagaagctgagcgacggc

SEQ ID NO: 6847 - DNA, 75 bp, synthetic construct
  source 1..75: mol_type = other DNA
tggtgaatttatgcaccagcgaacacctgctggttcatcatccgatgctggaagggatcctgctgtctgaatgtg

SEQ ID NO: 6848 - DNA, 75 bp, synthetic construct
  source 1..75: mol_type = other DNA
gttgatattgttgtgactttacctttaggtgagtatctggatgagaacgatcagccaaatctggctaatatcgaa

SEQ ID NO: 6849 - DNA, 75 bp, synthetic construct
  source 1..75: mol_type = other DNA
atgaacagtttaacggcaaataaccgtttgtcgcaacagctggtggtcagcgtcgctgaacacctgttgttacgg

SEQ ID NO: 6850 - DNA, 75 bp, synthetic construct
  source 1..75: mol_type = other DNA
ctaaagtgatatccggaccgtatgaagaatacggaaaatggtgggtggatgtagaatatatttcctggggagttc

SEQ ID NO: 6851 - DNA, 75 bp, synthetic construct
  source 1..75: mol_type = other DNA
gcgtctggcggcgagtctggatgaggccggatattccactgccagcatcatcaacctgctggtcacggaaggagg

SEQ ID NO: 6852 - DNA, 75 bp, synthetic construct
  source 1..75: mol_type = other DNA
acaatgctgaaaaacgtcttcagaaagatcagaacggtgcggatattccgggaaaggataccttcacgaaaaata

SEQ ID NO: 6853 - DNA, 75 bp, synthetic construct
  source 1..75: mol_type = other DNA
actcaaaaaacaggtgttatttccagcaaccaaaaaagcgtttggtcttttccgtgacccgttcgccgacgaagc

SEQ ID NO: 6854 - DNA, 75 bp, synthetic construct
  source 1..75: mol_type = other DNA
gtatgttttgccatccgcacaggaagctttgattatgctgcacagttccctgactcccccaaccttcaggctttt

SEQ ID NO: 6855 - DNA, 75 bp, synthetic construct
  source 1..75: mol_type = other DNA
caaactgcaacgggccggtaaacagctgacggacattatggacgccggtgcagtggatgccatacgtgcccgcct

SEQ ID NO: 6856 - DNA, 75 bp, synthetic construct
  source 1..75: mol_type = other DNA
tatgccggaggggggagcgccttcacctgaggaacgcgaaagccaactcgagaccctacaactcctcgacagcat

SEQ ID NO: 6857 - DNA, 75 bp, synthetic construct
  source 1..75: mol_type = other DNA
atgacagaaagtattggcggtaaaaccgcactggactgggcgatgaaacaggattttcgctgtggttgctggctg

SEQ ID NO: 6858 - DNA, 75 bp, synthetic construct
  source 1..75: mol_type = other DNA
ggaattgatatcacattcgcgttatttcgaaacagtcttcacattcctactgtatggagattactcggaatagtt

SEQ ID NO: 6859 - DNA, 75 bp, synthetic construct
  source 1..75: mol_type = other DNA
tggtcggtcaggtttactaccgcgatgagtcgttgcggttctacccgttcccgacggtaaatgcgaataaacagg

SEQ ID NO: 6860 - DNA, 75 bp, synthetic construct
  source 1..75: mol_type = other DNA
cgcacggtgccgtattctgcggagtccgtcagcgaactggcggactccattaaaggtgtcggcctgttacagaat

SEQ ID NO: 6861 - DNA, 75 bp, synthetic construct
  source 1..75: mol_type = other DNA
gctatcgccacgaatgcgcctacatcctggcaaaaggccgtccacgtctgccacaaaacccgctgccggacgtgc

SEQ ID NO: 6862 - DNA, 75 bp, synthetic construct
  source 1..75: mol_type = other DNA
tgccaggccggttttccttcgcctgccactgattatgctgagcaggaactggatctgaacagctattgcatcagc

SEQ ID NO: 6863 - DNA, 75 bp, synthetic construct
  source 1..75: mol_type = other DNA
ggcatgaaaaggcagggcaggcaaaaccagtggcatggcgatatcgctacgtgaaaaaaggcgttacagactttc

SEQ ID NO: 6864 - DNA, 75 bp, synthetic construct
  source 1..75: mol_type = other DNA
ggcacgtcactggacctgcaggccggactggaagcccgtgtccgggaaaatatcaccctgggcgttcaggccggt

SEQ ID NO: 6865 - DNA, 75 bp, synthetic construct
  source 1..75: mol_type = other DNA
gttttgctggcactaagcggttcagcgtctggtgcaagtctggaagttgataatgatcagattaccaatattgat

SEQ ID NO: 6866 - DNA, 75 bp, synthetic construct
  source 1..75: mol_type = other DNA
actgagccgtgctgttgcaaaaggcgactccccggtaacgttccataaactgacaaccagtaacctcaccggtca

SEQ ID NO: 6867 - DNA, 75 bp, synthetic construct
  source 1..75: mol_type = other DNA
ctgcgcgacagtgcaaaacacagtgtgcgtgaactgccggtgaactggtgggtacagccttctgttatccgcacc

SEQ ID NO: 6868 - DNA, 75 bp, synthetic construct
  source 1..75: mol_type = other DNA
ctacaatcgccgcgtggcactgtatcgggaaacggagaaaattacgtaccactggaagaagccggagcggttacg

SEQ ID NO: 6869 - DNA, 75 bp, synthetic construct
  source 1..75: mol_type = other DNA
taccatgaaagcactggaaatggcatgggaaacccgtggtaagcccgtcggggtgatgttccaagcgatcaaggc

SEQ ID NO: 6870 - DNA, 75 bp, synthetic construct
  source 1..75: mol_type = other DNA
cagcgcactaagaccgcacgaatataacggtgggttacccccaaacgaatcggaaaatcgatactggaaaaactc

SEQ ID NO: 6871 - DNA, 75 bp, synthetic construct
  source 1..75: mol_type = other DNA
ggaactgaaagcagaatgtggtgccgttgatatgcgcagtgtggcaaagctgatcagcgatttggcaacgcaact

SEQ ID NO: 6872 - DNA, 75 bp, synthetic construct
  source 1..75: mol_type = other DNA
tttaccggatttataccgggataaaaagcagtaaaggtatccggcttccggccacgaagaaatcacttccggaaa

SEQ ID NO: 6873 - DNA, 75 bp, synthetic construct
  source 1..75: mol_type = other DNA
cagtgcgattatcgccgggcagccgttgttaccggctgtgggggccgtcatcaccccacaaaacggggccggaat

SEQ ID NO: 6874 - DNA, 75 bp, synthetic construct
  source 1..75: mol_type = other DNA
gtgtttttcactgatattcagggaacggttatgtgagctgaatattcacaggggaaatacagtggtgcaggtaac

SEQ ID NO: 6875 - DNA, 75 bp, synthetic construct
  source 1..75: mol_type = other DNA
gcttttgacgatgtgcttggtgatgatgtacgcgcactgtttaaccacgatcctaattttattcttgggcgtagt

SEQ ID NO: 6876 - DNA, 75 bp, synthetic construct
  source 1..75: mol_type = other DNA
tgtctcaatcgcgctgattgtgacggcattatttgccgctgtattatttaccatagtgtctgcatgtatttggca

SEQ ID NO: 6877 - DNA, 75 bp, synthetic construct
  source 1..75: mol_type = other DNA
aatgaaagctgatgtgctgattgagaatgctggtgttgcctgtaggtttcgcgactgtgagtttgaaaactatca

SEQ ID NO: 6878 - DNA, 75 bp, synthetic construct
  source 1..75: mol_type = other DNA
aaaagattgatgccgcggcggcggaaaaaatcagcgccagccagtcagccggaacaaaacccgaagagcctctca

SEQ ID NO: 6879 - DNA, 75 bp, synthetic construct
  source 1..75: mol_type = other DNA
acaccaagttcgaatctgaagtgtacattctgtccaaagatgaaggcggtcgtcatactccgttcttcaaaggct

SEQ ID NO: 6880 - DNA, 75 bp, synthetic construct
  source 1..75: mol_type = other DNA
aaaacattgccaacaactggaactatattcagcggtaagctgcatttgtcaaataagactggtgaaacggaaaac

SEQ ID NO: 6881 - DNA, 75 bp, synthetic construct
  source 1..75: mol_type = other DNA
aggtgccggcacgggtgagtgctgtcagtggcgatcgtttcctgaaggtggagtttattccggtcggggagggag

SEQ ID NO: 6882 - DNA, 75 bp, synthetic construct
  source 1..75: mol_type = other DNA
ggatcgcgtggcaacatcccaaacggacagaacggcctggcatccggatataacccgtgataaaacaagggaatg

SEQ ID NO: 6883 - DNA, 75 bp, synthetic construct
  source 1..75: mol_type = other DNA
ctcaggctctggcagaacgaagggcgtgtttcacggcgtcttccggtaacgacctcttctgacactggcgttgaa

SEQ ID NO: 6884 - DNA, 75 bp, synthetic construct
  source 1..75: mol_type = other DNA
ggaaaaaatctgctcggtgtaccgcgaaagcgacatcgtaccgggagagcagaccgccaccagcatattgaaaca

SEQ ID NO: 6885 - DNA, 75 bp, synthetic construct
  source 1..75: mol_type = other DNA
ccgatgaacgtcaattttgacaagctgtcccttgaagtacagaacgcggtcctggttaagttcggtacatgtgaa

SEQ ID NO: 6886 - DNA, 75 bp, synthetic construct
  source 1..75: mol_type = other DNA
gcagcgaggtcagcttccgcagcgaagacatccgaaacgaacgcgaaagcgtcggaaaccagcgcagaatcctca

SEQ ID NO: 6887 - DNA, 75 bp, synthetic construct
  source 1..75: mol_type = other DNA
aggcccacgccgtcagccggaaaagaacgttttcaccgatgaacagattgagaagctggaagaaattttccattc

SEQ ID NO: 6888 - DNA, 75 bp, synthetic construct
  source 1..75: mol_type = other DNA
tgtcaactctcagttggcataaggtagtggctttttcattgttgacggtgtctgttgtcctggctgtgcttaatg

SEQ ID NO: 6889 - DNA, 75 bp, synthetic construct
  source 1..75: mol_type = other DNA
tacaaaaactggaacaccagtctggcaaattggccgattgggtcagggatttactgtgccggaaaagcaactttg

SEQ ID NO: 6890 - DNA, 75 bp, synthetic construct
  source 1..75: mol_type = other DNA
taacggactggcggtgaacaccacgctggataacagaggtgagcagtgggtacacgggggagggaaagctgccgg

SEQ ID NO: 6891 - DNA, 75 bp, synthetic construct
  source 1..75: mol_type = other DNA
ttaccggaacgtatccgcgtctccatgacatcaatttttggtctggcatcgctggggattggtattttactggtg

SEQ ID NO: 6892 - DNA, 75 bp, synthetic construct
  source 1..75: mol_type = other DNA
tcgctggcgcgaactggaagaacagatccgtaagccaatgagcgaaatcgaaatggttgccgcgatggctcttga

SEQ ID NO: 6893 - DNA, 75 bp, synthetic construct
  source 1..75: mol_type = other DNA
taaccgcctggacggaacgcgaagcgcgtagccgttgcccgtccggttgtgttgctgtattcgccgcccgtattc

SEQ ID NO: 6894 - DNA, 75 bp, synthetic construct
  source 1..75: mol_type = other DNA
agcaggtgctggatatgctgatttcttatcagaaagaacgtggcttcccgccaaccaatcaggaggtggcaacca

SEQ ID NO: 6895 - DNA, 75 bp, synthetic construct
  source 1..75: mol_type = other DNA
cagtgacattctcttttcaatgggtgcggcgatgacgcttggtggtgtggcgcagatgctggcaccgaaagccag

SEQ ID NO: 6896 - DNA, 75 bp, synthetic construct
  source 1..75: mol_type = other DNA
gcaatgaaagttaccgcttcaaacacagttcaactcagaataagcaggaggaaaaacagacccgcaaactgaaaa

SEQ ID NO: 6897 - DNA, 75 bp, synthetic construct
  source 1..75: mol_type = other DNA
cttaagtccgcatcgttatctggcgacaaacagtccgcaggggccgtggtggctgctcggctggtgtgagcgggt

SEQ ID NO: 6898 - DNA, 75 bp, synthetic construct
  source 1..75: mol_type = other DNA
gcgaaggttatccagaccagtgccaccacctggcaggaaaccgcgcagaccggggacgccatcacccattacatc

SEQ ID NO: 6899 - DNA, 75 bp, synthetic construct
  source 1..75: mol_type = other DNA
aacgtacagcgtgacgctgtctgtctcccgtgaggaggccacggcgctggagtcgtttctggctgagcacggggg

SEQ ID NO: 6900 - DNA, 75 bp, synthetic construct
  source 1..75: mol_type = other DNA
atgtcgggtaaattcagattcagccgtcggagcgagaaaaatctggagggcgtaaaaccacagctggttgctgtc

SEQ ID NO: 6901 - DNA, 75 bp, synthetic construct
  source 1..75: mol_type = other DNA
ctgaaccagtcactctcttcgcttttttccctcgatctctctctggtcagccagcagtttctctcccttgaattc

SEQ ID NO: 6902 - DNA, 75 bp, synthetic construct
  source 1..75: mol_type = other DNA
tggcaaaaggagttgtttttggtagaaaaagaaaaatagatagagatgcagtattaaatatgtggcaacaggggt

SEQ ID NO: 6903 - DNA, 75 bp, synthetic construct
  source 1..75: mol_type = other DNA
caatgataatgttattttcaaatggctcaggctctggcagaacgaagggcgtgtttcgcggcgtcttccggtaac

SEQ ID NO: 6904 - DNA, 75 bp, synthetic construct
  source 1..75: mol_type = other DNA
ttcactggtacaaatacccgctgacgtactggctgaacatcatcacatcgctgggctgtctggaaggtggtgacc

SEQ ID NO: 6905 - DNA, 75 bp, synthetic construct
  source 1..75: mol_type = other DNA
tgagcttattgatgaaagtctggcgatgagtggtgaacgacgttgccttcacttttctcctcaggctgccagaat

SEQ ID NO: 6906 - DNA, 75 bp, synthetic construct
  source 1..75: mol_type = other DNA
caggtagtgcaggagttgcaccagggggtagtgcaggagattcacccagaaccagtcactcttttgaaccagtca

SEQ ID NO: 6907 - DNA, 75 bp, synthetic construct
  source 1..75: mol_type = other DNA
cgtgacctatatcggtatcgactcgacaggtgtcggtcacggagtttacgagaacgtgaaagcgttctttcctgc

SEQ ID NO: 6908 - DNA, 75 bp, synthetic construct
  source 1..75: mol_type = other DNA
ttttgctgatttaaacgcgcaggttgagcaactcagcaggcgttgttcagaggcttttggctcatatggccgtta

SEQ ID NO: 6909 - DNA, 75 bp, synthetic construct
  source 1..75: mol_type = other DNA
cagggatattaagagcacggggcgcaggaaagcgatttggtcgcccacctgtgttaaatgatgaacaaatacaga

SEQ ID NO: 6910 - DNA, 75 bp, synthetic construct
  source 1..75: mol_type = other DNA
tggactataacctgcagtacagccattacaacggcacggtacggaaccagctggcggcagaccaggcgcagcagc

SEQ ID NO: 6911 - DNA, 75 bp, synthetic construct
  source 1..75: mol_type = other DNA
tatccggcgagaacgtctgccaaaagaactgggctatgcgttgaaacaacaactaaggattgtgataaagcgatg

SEQ ID NO: 6912 - DNA, 75 bp, synthetic construct
  source 1..75: mol_type = other DNA
atgaaacaaatgtcactaattgagatggatggatttctgaaaggtaaatgcatcccacgagatttaaaggttaac

SEQ ID NO: 6913 - DNA, 75 bp, synthetic construct
  source 1..75: mol_type = other DNA
cgtaccatctggaccaggcctttccgctgctgatgaaacaactggagctcatgctcaccagcggtgaactgaatc

SEQ ID NO: 6914 - DNA, 75 bp, synthetic construct
  source 1..75: mol_type = other DNA
cgctgatactgcggggcagtaacgacttcagcaccatagaagaatatcaggccttcatcactcagcaggttatgc

SEQ ID NO: 6915 - DNA, 75 bp, synthetic construct
  source 1..75: mol_type = other DNA
tcgatctgggtaaaaactctttccatattcattgccaggatcgtcgcgggaaggctgtttaccgtaaaaaattta

SEQ ID NO: 6916 - DNA, 75 bp, synthetic construct
  source 1..75: mol_type = other DNA
gaagagtaccggcgctggcgcaatgaatcctggcgatacgacgggagtgataaatacccgtggccacagcctgtg

SEQ ID NO: 6917 - DNA, 75 bp, synthetic construct
  source 1..75: mol_type = other DNA
tgacggcgttaaggaatgctgatgctgccggcgatactgagggagcacgtcgcattgctcagatgctgtcttctg

SEQ ID NO: 6918 - DNA, 75 bp, synthetic construct
  source 1..75: mol_type = other DNA
gtgtgtccagcgtggtgtgcagttgcgcagtgaggatgacgtggctgacgacgctgaccgcacggaacaggtgca

SEQ ID NO: 6919 - DNA, 75 bp, synthetic construct
  source 1..75: mol_type = other DNA
aagtaccgtcattctgggaagttctcgggtctttactgacaagaatgatggaaccggtaatgcagtatcttctgt

SEQ ID NO: 6920 - DNA, 75 bp, synthetic construct
  source 1..75: mol_type = other DNA
atgttatatgcatttaagctgggcagaaaactgcgcggcgaggaaccttattgccctgaaaaaggcgggaaaggt

SEQ ID NO: 6921 - DNA, 75 bp, synthetic construct
  source 1..75: mol_type = other DNA
tgaacggagtggagccagaaagctacctccgctatgtccttgacgtcatagccgactggccgataaaccgggtcg

SEQ ID NO: 6922 - DNA, 75 bp, synthetic construct
  source 1..75: mol_type = other DNA
aggtgagcgccataatgcacttgatgacgcccgttaccaggcaaaatacgtttcagttatctggcaaaaactgat

SEQ ID NO: 6923 - DNA, 75 bp, synthetic construct
  source 1..75: mol_type = other DNA
gcccccccatctcttgctgcaacagttaatgcagatatatcgtatcaaacatttcgggattttgccgaaaataaa

SEQ ID NO: 6924 - DNA, 75 bp, synthetic construct
  source 1..75: mol_type = other DNA
atggctgagcttcgtacactccagagcagaatcaaaacactgaatacccgacgggtgaatattctgaagggggaa

SEQ ID NO: 6925 - DNA, 75 bp, synthetic construct
  source 1..75: mol_type = other DNA
ggctggagccgacccatgtgctcatgcgcgaagttgcctgggaacaaaactacccggatcgcgggcgtgagccgc

SEQ ID NO: 6926 - DNA, 75 bp, synthetic construct
  source 1..75: mol_type = other DNA
ggaaaaatacgcgctggtgcgtaccgaccagccgggattcagcgcctgtacccgctctcagttaataaacagcat

SEQ ID NO: 6927 - DNA, 75 bp, synthetic construct
  source 1..75: mol_type = other DNA
ttgatttggggattgatgcggcagagtttaaaaatgaaattccccgtatcaaaaaccttctgaatggtgcagcca

SEQ ID NO: 6928 - DNA, 75 bp, synthetic construct
  source 1..75: mol_type = other DNA
ctgccgaaaccaacgtcggcacctgcttcagtggagatcgtgttgtttcctccggataaccggatccgcgatctg

SEQ ID NO: 6929 - DNA, 75 bp, synthetic construct
  source 1..75: mol_type = other DNA
gtgagcagaagcgggtgcgtatccccgctatgaaagtcagcgaatggggccacctgctccgcgcgcttgaaattg

SEQ ID NO: 6930 - DNA, 75 bp, synthetic construct
  source 1..75: mol_type = other DNA
ggtgccttacggtgaaatgctggttggttcacgacggatatcccaggacatcagcacccgtgatgagggcggtga

SEQ ID NO: 6931 - DNA, 75 bp, synthetic construct
  source 1..75: mol_type = other DNA
accgggatatcacaacactcaataccccggacctgcttatccctgttcgtgctgcagaagcaaaacaaatttatg

SEQ ID NO: 6932 - DNA, 75 bp, synthetic construct
  source 1..75: mol_type = other DNA
taatctgacgctacgcacccacattaagcggttggctcgtaaacaatctgcttctcacgctcagttgagatccac

SEQ ID NO: 6933 - DNA, 75 bp, synthetic construct
  source 1..75: mol_type = other DNA
aagcatccatgaccagcgttgagattgcagagctggtgggcagccaacacaaagatgttaaacgcagcattgaaa

SEQ ID NO: 6934 - DNA, 75 bp, synthetic construct
  source 1..75: mol_type = other DNA
ccgctgacggacacggacggtaatcccgtgatacacggtgtgaccgccgtctggcgtgccggggagcaggagcag

SEQ ID NO: 6935 - DNA, 75 bp, synthetic construct
  source 1..75: mol_type = other DNA
actcaaggtgtatcaacagataccattgatggcttctctatcgaaagagcagagaagctggcaaaaacattgcgg

SEQ ID NO: 6936 - DNA, 75 bp, synthetic construct
  source 1..75: mol_type = other DNA
ctggcagttaccgttatggctgagttctccggcaaaccgggcctccggtgaaatggtttttgatgcagagcgtga

SEQ ID NO: 6937 - DNA, 75 bp, synthetic construct
  source 1..75: mol_type = other DNA
gaagggatgaccggcgatccgagtattttaatcgccaagtcatttcttgatttctttacggcgatgatcttcgcc

SEQ ID NO: 6938 - DNA, 75 bp, synthetic construct
  source 1..75: mol_type = other DNA
cctccgccaatgagtcgtggcgctattttatggggcggcgaaaatttattgcggcccggctggccacgcagatgt

SEQ ID NO: 6939 - DNA, 75 bp, synthetic construct
  source 1..75: mol_type = other DNA
gggtctgcctgggtgagccggttgcccgttccgggaagctgccgacactggcaccgccgttactgcgtcagctgg

SEQ ID NO: 6940 - DNA, 75 bp, synthetic construct
  source 1..75: mol_type = other DNA
tggcatacaatcctgaagataatcagggtgcccgctggttgttgggctcagaactgttacgaacaggcgatcata

SEQ ID NO: 6941 - DNA, 75 bp, synthetic construct
  source 1..75: mol_type = other DNA
cagagaggcatgcaaagaagggaaattgccagaaaattaggcatgccgctgcgcatagtgaataactacgtttat

SEQ ID NO: 6942 - DNA, 75 bp, synthetic construct
  source 1..75: mol_type = other DNA
gctatcctaagtactaccaaacggccgattatgcgttgaggctttcagtgatggctgatatagcaacaatgagaa

SEQ ID NO: 6943 - DNA, 75 bp, synthetic construct
  source 1..75: mol_type = other DNA
gaacgtcctgaccagctgtgggtggctgattttacttacgtcagcacatggcagggcttcgtctatagtggcgtt

SEQ ID NO: 6944 - DNA, 75 bp, synthetic construct
  source 1..75: mol_type = other DNA
ctggaatgcaccggataacgccgggccttccggtagcacgaatggcagcagttcagagccggaatattactttgt

SEQ ID NO: 6945 - DNA, 75 bp, synthetic construct
  source 1..75: mol_type = other DNA
gaccgactttcatgcactggctctgcgcccgtttggctggcgcgaagtgtggatcggttatgacccggcaaaagg

SEQ ID NO: 6946 - DNA, 75 bp, synthetic construct
  source 1..75: mol_type = other DNA
ttactgaactgaaaggtgtagttgtcaccatcgccggtaagttgttggcgcataagttgtatcacttccgtctgg

SEQ ID NO: 6947 - DNA, 75 bp, synthetic construct
  source 1..75: mol_type = other DNA
accgttacggtgtcgccgcaggtggtcgccgactggctgcactcaacatgctggcagagcgtggcatcattccgg

SEQ ID NO: 6948 - DNA, 75 bp, synthetic construct
  source 1..75: mol_type = other DNA
gtcgatggtgttaatctcattgaactgattaacaaggtcgctgaaaacggttattcactccgcgtggtggatgaa

SEQ ID NO: 6949 - DNA, 75 bp, synthetic construct
  source 1..75: mol_type = other DNA
ctgtgtacttgtcggcatttcatttttagtcatgctggttgccattttcttttccaccgcctggcgagtcctgac

SEQ ID NO: 6950 - DNA, 75 bp, synthetic construct
  source 1..75: mol_type = other DNA
tgggcacctggtcttcaccaaaaactacacatcgaaggccgcatatgtgggttatcgccacgaatgcgcctacgt

SEQ ID NO: 6951 - DNA, 75 bp, synthetic construct
  source 1..75: mol_type = other DNA
ttttattgagcataaatcacgcaacagccttctttttcagcccacggactcagctgctgaagattttatgaaatc

SEQ ID NO: 6952 - DNA, 75 bp, synthetic construct
  source 1..75: mol_type = other DNA
acatcctcgaatatgccaggcagcagaggcatattggtcagcattgtaaaattccaccaggagatatggttgaaa

SEQ ID NO: 6953 - DNA, 75 bp, synthetic construct
  source 1..75: mol_type = other DNA
ggaaaactacgtatgtgggggcgctggtcgtatattggcggtggcaggtcagggaatatgttcaatcagttgttg

SEQ ID NO: 6954 - DNA, 75 bp, synthetic construct
  source 1..75: mol_type = other DNA
atgatttacccaacaaatacaggcaaaagcggggaacaccttcgtctcaccacgctggaaagtgtctggattcag

SEQ ID NO: 6955 - DNA, 75 bp, synthetic construct
  source 1..75: mol_type = other DNA
aatgccgggtgcagtggatgtggatctggggctggatgacggcgcactggatacggaattttccattggtggtac

SEQ ID NO: 6956 - DNA, 75 bp, synthetic construct
  source 1..75: mol_type = other DNA
acgtcagaatgagaatcatgaggccggtaataaatacatcccttacgggaaaatggcttcctggctggttgagtg

SEQ ID NO: 6957 - DNA, 75 bp, synthetic construct
  source 1..75: mol_type = other DNA
cgagagagtcactggcagccctggtgaatgccggtgtgcgtggtggtgaacagtttgatgccatcaaccagagtg

SEQ ID NO: 6958 - DNA, 75 bp, synthetic construct
  source 1..75: mol_type = other DNA
tcaaacaactgttacggtcaggtatcccgtcgtgaccaggagagcgcgctggcgtgctggggaatcgacagataa

SEQ ID NO: 6959 - DNA, 75 bp, synthetic construct
  source 1..75: mol_type = other DNA
tcattccgaaagctcatggtggcacggatgcagacagtaacctgcagagtctgtgctggccctgtcataaagcaa

SEQ ID NO: 6960 - DNA, 75 bp, synthetic construct
  source 1..75: mol_type = other DNA
gacgaagcgttgaccgggaaagaatctcaaattttacatccctcacaatcgaggtatgtaaaaaccagcaaggca

SEQ ID NO: 6961 - DNA, 75 bp, synthetic construct
  source 1..75: mol_type = other DNA
tagcattgtccagggttcagccggggtgcgcattggtgcccccaccggcgtggcctgttcggtgtgccccggcgg

SEQ ID NO: 6962 - DNA, 75 bp, synthetic construct
  source 1..75: mol_type = other DNA
cgcgcgccgcagccgtgtggaatgggaaaacagacagcgcaaaaagcaggggctggataccctgggtatggatga

SEQ ID NO: 6963 - DNA, 75 bp, synthetic construct
  source 1..75: mol_type = other DNA
gtttgatgaaatcaatattgtgcgcggactgcctgttcctggtggtcggttggggataaaaatcacagagctgga

SEQ ID NO: 6964 - DNA, 75 bp, synthetic construct
  source 1..75: mol_type = other DNA
ttgctgctgctattggtggcggggctattgctatagcatctgtgttaatcactggcccaagtggtaacgatggtc

SEQ ID NO: 6965 - DNA, 75 bp, synthetic construct
  source 1..75: mol_type = other DNA
tttgatttattcagagtgtcatgtatctataaaggagaaatagattcgctattaagtataattcgtgaattttat

SEQ ID NO: 6966 - DNA, 75 bp, synthetic construct
  source 1..75: mol_type = other DNA
atgaaacagcaacgtaattcacgctttcgcaatggtgcagaacgccacgctaaccgttttgctaccagtgcatca

SEQ ID NO: 6967 - DNA, 75 bp, synthetic construct
  source 1..75: mol_type = other DNA
atggcgataaaagggcttgatcaggcgattgataatctgagccgggttcgtaaaaacgccattccggcggcttca

SEQ ID NO: 6968 - DNA, 75 bp, synthetic construct
  source 1..75: mol_type = other DNA
aaccaggtgaaagggatccccctgaaactggtacgtcagcgtgtccgggtgtttaaagccagtccgtcaggaaaa

SEQ ID NO: 6969 - DNA, 75 bp, synthetic construct
  source 1..75: mol_type = other DNA
taacccttgttgagaaatttgataacctgacacaaacactacaggctctgaatgaaaagttcgatgatgtaatag

SEQ ID NO: 6970 - DNA, 75 bp, synthetic construct
  source 1..75: mol_type = other DNA
agtttattgctacaaaggcggggaatattaccgtctataactatgatggcgaaacacgggaatatatttccacat

SEQ ID NO: 6971 - DNA, 75 bp, synthetic construct
  source 1..75: mol_type = other DNA
ggttcggcatttacccagggcgcggaggggacattcagcgagtccacgggggccagtcaggattcggcacgctgg

SEQ ID NO: 6972 - DNA, 75 bp, synthetic construct
  source 1..75: mol_type = other DNA
aagggtttcttcgtgggagatgtgtaccgcgagatctgaaagtaaatgaaacagatgctgaatacctggtgcgta

SEQ ID NO: 6973 - DNA, 75 bp, synthetic construct
  source 1..75: mol_type = other DNA
ctcttcaatttaaaagtttgatgctcaaagaattaaacttcgtaatgaattacgtgttcactcttgagacttggt

SEQ ID NO: 6974 - DNA, 75 bp, synthetic construct
  source 1..75: mol_type = other DNA
atggaaaaggaactcagtgaggcaaaacaggctgtcattctcaacgcaccacgccaccagaaactgaaggagatg

SEQ ID NO: 6975 - DNA, 75 bp, synthetic construct
  source 1..75: mol_type = other DNA
atcaagattggttccactgctgttgcatatcgtctttcagaagtgcaggcatggattcgaggtgagtgggtagtt

SEQ ID NO: 6976 - DNA, 75 bp, synthetic construct
  source 1..75: mol_type = other DNA
gctgtttctggccggaagtgccggacttctgcagaccactgaagatgtgcagtttgaaccgtgccccggactgac

SEQ ID NO: 6977 - DNA, 75 bp, synthetic construct
  source 1..75: mol_type = other DNA
agagccaccggcgaacgtctgcataagctgatctccacgcatcccaatggctatatgacgccgcaggagttctgg

SEQ ID NO: 6978 - DNA, 75 bp, synthetic construct
  source 1..75: mol_type = other DNA
gtcacatagcccaggactggagtctgacagacgatgagctggaaaccgtcatgcagcggctggacgatgcctttg

SEQ ID NO: 6979 - DNA, 75 bp, synthetic construct
  source 1..75: mol_type = other DNA
ttaccaatcagactttccgttgtcctcgtccgggtcagtggtacaccacgcctgcagggcatgttctacgtgtta

SEQ ID NO: 6980 - DNA, 75 bp, synthetic construct
  source 1..75: mol_type = other DNA
agcactggcttttgccattaagtgggtggcggtcggtgttgctgtgtccccgatgctgtatgggctggcaaaact

SEQ ID NO: 6981 - DNA, 75 bp, synthetic construct
  source 1..75: mol_type = other DNA
ccgatattgatgaaactttaaaaaataaaattcaacaatcaattcgttcattacacgaacacggtatggtatctg

SEQ ID NO: 6982 - DNA, 75 bp, synthetic construct
  source 1..75: mol_type = other DNA
atgaaagtgcgtgcgcatcagtatgacacggtggacgcactttgctggcgtcattacgggcgcacgcagggtgtc

SEQ ID NO: 6983 - DNA, 75 bp, synthetic construct
  source 1..75: mol_type = other DNA
gaaccgggcgattactggaacagttggctcagggacgtgttgatggcagttggctgaaatatctgaaacagttgc

SEQ ID NO: 6984 - DNA, 75 bp, synthetic construct
  source 1..75: mol_type = other DNA
gagcgtggcgctttaccgatgattgatcgcggtgatatccgtcaggctatcgatcgttgcagcaatatctgggcg

SEQ ID NO: 6985 - DNA, 75 bp, synthetic construct
  source 1..75: mol_type = other DNA
ataaagtccgcagctcataaagccaaatttccggccttcaacaatccggaagtctacagagattttcagaaatct

SEQ ID NO: 6986 - DNA, 75 bp, synthetic construct
  source 1..75: mol_type = other DNA
aagtaaagcccagctgccgaatgtggatctgaaaaccatcaatcagaccgtggatctgaaatccgggcagacggt

SEQ ID NO: 6987 - DNA, 75 bp, synthetic construct
  source 1..75: mol_type = other DNA
cgatccgctggaagtggcgcagtggctgcaggcctgtcatgacgcaggaatagaggttcgcgtacagataaatga

SEQ ID NO: 6988 - DNA, 75 bp, synthetic construct
  source 1..75: mol_type = other DNA
agaacaggaccgcctccgggcagaacagcgtgcggcagaagtcgtcgtactgccgctggtcccggcagcaggtct

SEQ ID NO: 6989 - DNA, 75 bp, synthetic construct
  source 1..75: mol_type = other DNA
aacagcacgataaacgttcagatatcaaagaacgcgaatggcaggtggataaagcacgtatcatgaaaaacgccc

SEQ ID NO: 6990 - DNA, 75 bp, synthetic construct
  source 1..75: mol_type = other DNA
cggccggaagtgccggtaactattataccgacaaggataattactatgtactgggcagcatgggagaacgctggg

SEQ ID NO: 6991 - DNA, 75 bp, synthetic construct
  source 1..75: mol_type = other DNA
gtaccgggatcgacgtgagagctgtcgaacagggagatgatgcgtggaacaaattacgactcggcgtcatcacgg

SEQ ID NO: 6992 - DNA, 75 bp, synthetic construct
  source 1..75: mol_type = other DNA
cgtatccgttcaaataattgctacggtcaggtctcacggcgtgaccaggagagcgcgctggcgtgctgggacatc

SEQ ID NO: 6993 - DNA, 75 bp, synthetic construct
  source 1..75: mol_type = other DNA
tcaccctgttgctgagcgccgctgctgtgcaggcctccacccgggatgaaatagagcgactctggaatccgcagg

SEQ ID NO: 6994 - DNA, 75 bp, synthetic construct
  source 1..75: mol_type = other DNA
aagagaaaattggttatggcatgggagacgccgccagccacattattttcgataacgtaatgttatatatgatgt

SEQ ID NO: 6995 - DNA, 75 bp, synthetic construct
  source 1..75: mol_type = other DNA
accatcatcaatgtcaccacgccaccaaaatggaaggtgaaaaagcagaaactggcggagaaggctgcccgggaa

SEQ ID NO: 6996 - DNA, 75 bp, synthetic construct
  source 1..75: mol_type = other DNA
atgaataccagagctctttttcccctgctgttcactgtggcatcattctccgcctccgccggcaactgggctgtc

SEQ ID NO: 6997 - DNA, 75 bp, synthetic construct
  source 1..75: mol_type = other DNA
ttttacccgcccaagatactttcccgggtgatatcatcagaagtttatgtgttgtgtgtccatccatattaatct

SEQ ID NO: 6998 - DNA, 75 bp, synthetic construct
  source 1..75: mol_type = other DNA
gtttatgtactcgcctaacggtaaaaaggacgggcttcagattatcccgttgtcagaagtggcggcgaaggatga

SEQ ID NO: 6999 - DNA, 75 bp, synthetic construct
  source 1..75: mol_type = other DNA
tttatgctgtaatgacttgtggttccttaacgcgtgcggctgaagttttacatatttctcaacccgcggcgagta

SEQ ID NO: 7000 - DNA, 75 bp, synthetic construct
  source 1..75: mol_type = other DNA
ggatgtttctggccgggcgtggagcctttccgctgtttgccctggtgtgggggctgaatctgtcccgtcatgcgc

SEQ ID NO: 7001 - DNA, 75 bp, synthetic construct
  source 1..75: mol_type = other DNA
atgtcattagtgcgttctcaacaatgcatagtctggtcctcggacagatcaagacggatgagaaatccaatgaga

SEQ ID NO: 7002 - DNA, 75 bp, synthetic construct
  source 1..75: mol_type = other DNA
attgtggaaataccgacatccatagctttggtgagctctgttcaggtggccaaattcagaaaaccattacggagg

SEQ ID NO: 7003 - DNA, 75 bp, synthetic construct
  source 1..75: mol_type = other DNA
actgaagctggagaacggctgggtggaaacgcccgggcattccgtcagcgacagtgcgacggtttttgcctccgt

SEQ ID NO: 7004 - DNA, 75 bp, synthetic construct
  source 1..75: mol_type = other DNA
tatatttatgtcagtgcttattgttctcagcctctctgttaacgtcattcagggggtgaataactaccgtcttca

SEQ ID NO: 7005 - DNA, 75 bp, synthetic construct
  source 1..75: mol_type = other DNA
gcattgatttcaaagaactggtttttattaccaacaatgaccctgtcaccgattcatttatggtggcgaaagcat

SEQ ID NO: 7006 - DNA, 75 bp, synthetic construct
  source 1..75: mol_type = other DNA
ggtgatgtggtggtcagtggtgcaactgagccggattggtactacgtcatcgtactggccgggcagtccaatgcc

SEQ ID NO: 7007 - DNA, 75 bp, synthetic construct
  source 1..75: mol_type = other DNA
cgcattcgttcaaataattgttacggtcaggttattcgtcgtgaccaggagagtgcattaacctgctgggggata

SEQ ID NO: 7008 - DNA, 75 bp, synthetic construct
  source 1..75: mol_type = other DNA
gtggcgcttgaggatgcgagcacgacgaaaaaggggatagtacagctcagcagtgcgaccaacagcacttccgag

SEQ ID NO: 7009 - DNA, 75 bp, synthetic construct
  source 1..75: mol_type = other DNA
aacgttaaaaacgccctggtactcaaggcctacgacattattagccaccgccgcctggagtttgacgccgggcac

SEQ ID NO: 7010 - DNA, 75 bp, synthetic construct
  source 1..75: mol_type = other DNA
tttccctcgatctctccctggtcagccagcagtttctctcccttgaatttgcgcaggtgctggacaaaatggcct

SEQ ID NO: 7011 - DNA, 75 bp, synthetic construct
  source 1..75: mol_type = other DNA
atggtccgtttacccgccagcagtcagcggctgtggcgtcacaatacaccaacgttgctacagaggatgaccaga

SEQ ID NO: 7012 - DNA, 75 bp, synthetic construct
  source 1..75: mol_type = other DNA
gaaaggatgcttgatgctatggatgaccaggagctggtgaaactggttactgaacgcagcaatcagccactacat

SEQ ID NO: 7013 - DNA, 75 bp, synthetic construct
  source 1..75: mol_type = other DNA
gtaaaaaaatattgtttaggaactgtgtcattgtatctttgtttgtttttacatacaacacatgggcgcagtgta

SEQ ID NO: 7014 - DNA, 75 bp, synthetic construct
  source 1..75: mol_type = other DNA
tttctgtttgttctcagccatgccgatcgcgtgtttcctgctgaagaatggaatgccacagaaaaatgcccgtcc

SEQ ID NO: 7015 - DNA, 75 bp, synthetic construct
  source 1..75: mol_type = other DNA
gcagtccaggccgtttaccggaaagcgcatttcagcggcggcgggtcttccgacgattctgtcattgttcattaa

SEQ ID NO: 7016 - DNA, 75 bp, synthetic construct
  source 1..75: mol_type = other DNA
atggctgaggcgcacatgtgggcggtggacaagcccatcaccgcaacgctgattcgcgacatcgttgacggcatc

SEQ ID NO: 7017 - DNA, 75 bp, synthetic construct
  source 1..75: mol_type = other DNA
tgaagcctgcagaagaagattaattaatgaaaaatattctcaatttgtacccaacaaagacaaacacgaccagag

SEQ ID NO: 7018 - DNA, 75 bp, synthetic construct
  source 1..75: mol_type = other DNA
tgacgaacatcagccagtcaccaccgctgacattctgacaccacgacgcagggaggattacggtcaggacctgtg

SEQ ID NO: 7019 - DNA, 75 bp, synthetic construct
  source 1..75: mol_type = other DNA
tggctgaaggatctttctcatacgggcaggcggttgctgtcataacagcttaccgcaatgtgtttatccaggatg

SEQ ID NO: 7020 - DNA, 75 bp, synthetic construct
  source 1..75: mol_type = other DNA
ctccgggcaataaagttttactggtattggacgatgctactaatcacaagctcttaggtgcccgggaacgtagtg

SEQ ID NO: 7021 - DNA, 75 bp, synthetic construct
  source 1..75: mol_type = other DNA
gaatgagtggttctggaaaaactaccatgattgagcaagtcatggatcatttccctcagattatagaacacagca

SEQ ID NO: 7022 - DNA, 75 bp, synthetic construct
  source 1..75: mol_type = other DNA
gggactgtggtaacgcgattactcataatacggtgtgttgtccgtactgtggttctgtcgaccccttcggctatt

SEQ ID NO: 7023 - DNA, 75 bp, synthetic construct
  source 1..75: mol_type = other DNA
gcaggccggttattgttcaagccagcgaaagttgttgagcatgaccccctacctatcacggtcagtcaccgggcc

SEQ ID NO: 7024 - DNA, 75 bp, synthetic construct
  source 1..75: mol_type = other DNA
aaacgcaattgccctggggcgtagcagtgtagctagcggtactgacagcctcgcatttggcagacaatcacttgc

SEQ ID NO: 7025 - DNA, 75 bp, synthetic construct
  source 1..75: mol_type = other DNA
ttacttcagattcgtctgccagaacggctgcgtctgcggtcagtctctgggggaagtccgtgtgccccaccgggg

SEQ ID NO: 7026 - DNA, 75 bp, synthetic construct
  source 1..75: mol_type = other DNA
ggatcggacgtagccgtgttgtcagccagcctatctcaggtgtctatttcagctgggataccgacgggcttggat

SEQ ID NO: 7027 - DNA, 75 bp, synthetic construct
  source 1..75: mol_type = other DNA
cagcaattgaaattgagtcattcgaaacagcatataaaggatcaccggaagaaaaacacgagttcacatcatact

SEQ ID NO: 7028 - DNA, 75 bp, synthetic construct
  source 1..75: mol_type = other DNA
ggaagaagagacgacccggccaacccttaaagaactggcagcgaagctgtccggaggagtgaatggttacagtcg

SEQ ID NO: 7029 - DNA, 75 bp, synthetic construct
  source 1..75: mol_type = other DNA
gcggttctggcaattcttccgcgcgagctgcgtcaccgactctgcatcttcgataccctggaacgccgtgcatta

SEQ ID NO: 7030 - DNA, 75 bp, synthetic construct
  source 1..75: mol_type = other DNA
ttacggacacgctggggctggtgacgtcattcagttatgccaatgccaaagatgagcaaaaaacgcattacagcg

SEQ ID NO: 7031 - DNA, 75 bp, synthetic construct
  source 1..75: mol_type = other DNA
gcacatcaaataattgcgccactacagtgttctcaaccagatctggatactcttacagaactagaacaacagata

SEQ ID NO: 7032 - DNA, 75 bp, synthetic construct
  source 1..75: mol_type = other DNA
aaaccggagatatgggaccggaatttagcaagaccatcgatctggatactgctggcggagtcattgatcgtgacg

SEQ ID NO: 7033 - DNA, 75 bp, synthetic construct
  source 1..75: mol_type = other DNA
ctgaagatgaatcttcaggggtatgactaccgccgggatgatgagtttatgatgtggggatcggcagatctcctg

SEQ ID NO: 7034 - DNA, 75 bp, synthetic construct
  source 1..75: mol_type = other DNA
agtcaggcgtcacaacgctgattcgccgcgacggtttccgcttctggggtaaccgtacctgctctgatgacccgc

SEQ ID NO: 7035 - DNA, 75 bp, synthetic construct
  source 1..75: mol_type = other DNA
tggcaggccaagccagctgatcagcgtcggttatccgaactgatagatgcctggtgggtgcttgatggccggaat

SEQ ID NO: 7036 - DNA, 75 bp, synthetic construct
  source 1..75: mol_type = other DNA
aaaatcgctgtaaaaatggcgaccactattgggtaagtgcttatgtaacgccaatagctaagaatggttcgattg

SEQ ID NO: 7037 - DNA, 75 bp, synthetic construct
  source 1..75: mol_type = other DNA
cggtttcctgatttctataatgaagaaatattcagggaggtgaccgaagagagcgagtcaacatttaaagaactt

SEQ ID NO: 7038 - DNA, 75 bp, synthetic construct
  source 1..75: mol_type = other DNA
ctggatgtcgctgtcacggaaaccgcaagtgacctggtacggctgggacggcgaccgcctgaccacgatacagaa

SEQ ID NO: 7039 - DNA, 75 bp, synthetic construct
  source 1..75: mol_type = other DNA
gtcggtgaacgacaaagacactctgaaagctggaaaactcaccatcgactacgactacacaccagtgccgccact

SEQ ID NO: 7040 - DNA, 75 bp, synthetic construct
  source 1..75: mol_type = other DNA
actcgctgtcacaccagaccagtgacttcggtgaatcagaatggattcatttcacaggtagcggatatctgttac

SEQ ID NO: 7041 - DNA, 75 bp, synthetic construct
  source 1..75: mol_type = other DNA
cctggttcagacctggtagggaaggttgaaatgactgagtggttagttgactttgctgcccagcttcgcaaagga

SEQ ID NO: 7042 - DNA, 75 bp, synthetic construct
  source 1..75: mol_type = other DNA
agattcaatctgtcaatgcaacacccctttcaattatctctttcggtgttttgaacttcagtgtctttctcggtc

SEQ ID NO: 7043 - DNA, 75 bp, synthetic construct
  source 1..75: mol_type = other DNA
tccggaaggctggcgataaaggtgattgcagagccaccggataagcgtcgtcgcgacctggacaatatcctgaaa

SEQ ID NO: 7044 - DNA, 75 bp, synthetic construct
  source 1..75: mol_type = other DNA
cgctgggaagcgggcaagaacatgcccaatgaccggcgtaactttgggtatctcttctggcgtaagcgcaactgc

SEQ ID NO: 7045 - DNA, 75 bp, synthetic construct
  source 1..75: mol_type = other DNA
ttcaggtaccagaatcacccgacgccccagaggcgctgccgggggggcgttccatttctgatgatgacctgtgcg

SEQ ID NO: 7046 - DNA, 75 bp, synthetic construct
  source 1..75: mol_type = other DNA
aagtaaaaggcaataaggttgagtttgaagtattcaatcctgaagaccgtgcgtacgacaaagtgaccgtcacgg

SEQ ID NO: 7047 - DNA, 75 bp, synthetic construct
  source 1..75: mol_type = other DNA
ctgattgacttccacaaacagaaaaaactggaacgtctggctgcacgactgggcgtgatttacacgaacgagtaa

SEQ ID NO: 7048 - DNA, 75 bp, synthetic construct
  source 1..75: mol_type = other DNA
cgaaggtatccgcgccaaaatgcgcagcctgatcagtcagggctatctcattggtggcgattgctggctggatga

SEQ ID NO: 7049 - DNA, 75 bp, synthetic construct
  source 1..75: mol_type = other DNA
atgagcgctataaccaaagaacgtatcaaattattcattaaaaatccgcttgataacggacttactcgtggcgaa

SEQ ID NO: 7050 - DNA, 75 bp, synthetic construct
  source 1..75: mol_type = other DNA
gatgttcaggatatgagcgggataaaccacccgaaagctgatctggcaaaaggccagtacgggactgtcggtcag

SEQ ID NO: 7051 - DNA, 75 bp, synthetic construct
  source 1..75: mol_type = other DNA
ccgatgggatttaatatgccctttgcggtatcacagaacagtgctgatgcctcttttttgcagcagatggcgctg

SEQ ID NO: 7052 - DNA, 75 bp, synthetic construct
  source 1..75: mol_type = other DNA
cctctggcggatgtggtcctgaacaaaacacaggcggcatcatgtacgcagtggagcgtaaccaacggaggaacg

SEQ ID NO: 7053 - DNA, 75 bp, synthetic construct
  source 1..75: mol_type = other DNA
cacccgtgccctgacgttcctgtcagagctggggttgattacctaccagacggaatatgacccgcttatcgggtg

SEQ ID NO: 7054 - DNA, 75 bp, synthetic construct
  source 1..75: mol_type = other DNA
agtgagagtttaaagaaatcactctcaaatgggctatgtgatgcaggcgtaaatgtcttagatcttggaatgtgt

SEQ ID NO: 7055 - DNA, 75 bp, synthetic construct
  source 1..75: mol_type = other DNA
gtctccaaatcatggtcggcaatgacaaagatcatttgacgtcccaactggcttaccgcctgaatattaccggcc

SEQ ID NO: 7056 - DNA, 75 bp, synthetic construct
  source 1..75: mol_type = other DNA
gccagagaggccggtcatgctgtccgtgagatggagcggtggatggtgccgaacaaactccgggaggcagcgtga

SEQ ID NO: 7057 - DNA, 75 bp, synthetic construct
  source 1..75: mol_type = other DNA
cagggttacccctttaacgtaaaaaccgtggcggcaagcctgcgccgtcagggactgagggcaaaggcctcccgg

SEQ ID NO: 7058 - DNA, 75 bp, synthetic construct
  source 1..75: mol_type = other DNA
aaagtcagtcagggtaaggtccccgacacggcgaacccgtcgatgcccattcagatttgtccggcaccgccgccg

SEQ ID NO: 7059 - DNA, 75 bp, synthetic construct
  source 1..75: mol_type = other DNA
gtgcaggttgccaccaccgcaggcgataacattattaacgccagcgaacaggccgccgggtttacgctttctggc

SEQ ID NO: 7060 - DNA, 75 bp, synthetic construct
  source 1..75: mol_type = other DNA
agcacgaaagagccattatgggtaatgccggtatccggtaatcccagtgcagaaatcaccagttcaggcgtgact

SEQ ID NO: 7061 - DNA, 75 bp, synthetic construct
  source 1..75: mol_type = other DNA
aaaatgtcaatgatatcaaatggttttgtaaaaacacatggttgttgtatcgctttttatcgatggcttatggag

SEQ ID NO: 7062 - DNA, 75 bp, synthetic construct
  source 1..75: mol_type = other DNA
aacatgaaacagaccgtggatgcgttttttgacagcgccagtcagaaacaactgtcagaagcacagtcaaaagcc

SEQ ID NO: 7063 - DNA, 75 bp, synthetic construct
  source 1..75: mol_type = other DNA
ccgttgcaggggggcatgaaagcaacctcaagctttatcgggtggttgatattgtgtcggcatttctggcattac

SEQ ID NO: 7064 - DNA, 75 bp, synthetic construct
  source 1..75: mol_type = other DNA
aaggctgagggcataattgaagggatgttaatggcattagatatccggttagatatggatatcgttgctaataat

SEQ ID NO: 7065 - DNA, 75 bp, synthetic construct
  source 1..75: mol_type = other DNA
cctgaacaaatctcagtcttctcttagctctgctattgagcgtctgtcttctggtctgcgtattaacagcgcaaa

SEQ ID NO: 7066 - DNA, 75 bp, synthetic construct
  source 1..75: mol_type = other DNA
ccatacccgtgccattcacagcatcgacacggacattaagctcaatcgcgcattgtgggtgatggcagaaacact

SEQ ID NO: 7067 - DNA, 75 bp, synthetic construct
  source 1..75: mol_type = other DNA
tgtgtgcagaggaaggtgtaactcaggcagagttgatagaaaggcttatcgagaaagaagcctgtcaccggaata

SEQ ID NO: 7068 - DNA, 75 bp, synthetic construct
  source 1..75: mol_type = other DNA
atgaataaccagtatttacagtttgttcgtgagcaactcatgattgccaccgccgatttgagtggatcaacaaaa

SEQ ID NO: 7069 - DNA, 75 bp, synthetic construct
  source 1..75: mol_type = other DNA
atatcgccgcctttctcgacatgctggccgtgtccgaagggacggcgaaccatccgctgacgaaaaaccggggct

SEQ ID NO: 7070 - DNA, 75 bp, synthetic construct
  source 1..75: mol_type = other DNA
cggtatcccggcatgttcttgtttagatgcaccagttacacataaagctggttatgcaatctgccgttctgcaga

SEQ ID NO: 7071 - DNA, 75 bp, synthetic construct
  source 1..75: mol_type = other DNA
gagttctggcgcgacgaaaagaattacgcttaacacaacgagaagccgcgcgcctcgctggagttgctcacgtca

SEQ ID NO: 7072 - DNA, 75 bp, synthetic construct
  source 1..75: mol_type = other DNA
ttatcaggtgataccagagggcattaaactgtcgccacggataagaatatacaacatttctgataacaaaacatc

SEQ ID NO: 7073 - DNA, 75 bp, synthetic construct
  source 1..75: mol_type = other DNA
taccatatctgtgaggatgattttccgttctctggtagtggacgatgggaacggatcccgcgtgaacttcccacc

SEQ ID NO: 7074 - DNA, 75 bp, synthetic construct
  source 1..75: mol_type = other DNA
ccgacagcattaatgcgcaggcgctgaacatggggcgcattgtcgttgacgtcgatggtattgagctcgctgaac

SEQ ID NO: 7075 - DNA, 75 bp, synthetic construct
  source 1..75: mol_type = other DNA
tattttcggtgagtgaacaacgcgttatccgccgtgcgatgcgtctgctggagaaatatcaacgcaatcctggcg

SEQ ID NO: 7076 - DNA, 75 bp, synthetic construct
  source 1..75: mol_type = other DNA
agccgcaagaatccgtttggtgatatcaaatcggatggcacggtgaaaacggctctcgaaaaccttggtttggga

SEQ ID NO: 7077 - DNA, 75 bp, synthetic construct
  source 1..75: mol_type = other DNA
aaggttttcagccattcttcgcctgccagacccgcgtgcgcgacccgggccgccggggatacacaaaacacatgc

SEQ ID NO: 7078 - DNA, 75 bp, synthetic construct
  source 1..75: mol_type = other DNA
tcgtgaactgaccgttcaggccactaccggtactaactctgattctgacctgtcttcaatccaggacgaaatcaa

SEQ ID NO: 7079 - DNA, 75 bp, synthetic construct
  source 1..75: mol_type = other DNA
taataaaaaggaaaatgccgcactcaatgatgttcaggttgaagttaattacgcgattaaacttgatgatcaatg

SEQ ID NO: 7080 - DNA, 75 bp, synthetic construct
  source 1..75: mol_type = other DNA
ggttctgtcgaccccttcggctactaccggaatacagaccgtatcgttaccatactgctggcgctgattattgtg

SEQ ID NO: 7081 - DNA, 75 bp, synthetic construct
  source 1..75: mol_type = other DNA
gtggcaaaagtttttacacaagaagagcgggaaaaaattaaagggcaggttcttgaactcgtacgccagagtggg

SEQ ID NO: 7082 - DNA, 75 bp, synthetic construct
  source 1..75: mol_type = other DNA
ggaagtgacgaaggcaaagccggtgacgcgcaccattacatccgcgaacattgaccgcctgcgggtcaccttcgg

SEQ ID NO: 7083 - DNA, 75 bp, synthetic construct
  source 1..75: mol_type = other DNA
gacatcgtgctcaacagtacgcaggcgtctttctgtaccgaataccgcgtcgtgaccggaggctcggatgagtga

SEQ ID NO: 7084 - DNA, 75 bp, synthetic construct
  source 1..75: mol_type = other DNA
gggagtgcagaaacgcacgttaaggatttcatgataagacacaaaaaaatgcttgggttatctgatgaggatgta

SEQ ID NO: 7085 - DNA, 75 bp, synthetic construct
  source 1..75: mol_type = other DNA
ccggctacgggttattcccgtctgaacaggcacgaaaggactggcaaaatgcccgcaaaaaactctctagggcga

SEQ ID NO: 7086 - DNA, 75 bp, synthetic construct
  source 1..75: mol_type = other DNA
ggaattgctccccgggcggactggcgacgatttgcccggctacgcgcagaacgatgccggaaatatggacggaag

SEQ ID NO: 7087 - DNA, 75 bp, synthetic construct
  source 1..75: mol_type = other DNA
ctttcagctcttttggtataagttgccatagagaaaactccttcaggaactctttcctagggaagaatgatgagg

SEQ ID NO: 7088 - DNA, 75 bp, synthetic construct
  source 1..75: mol_type = other DNA
ggaacaccacgctgcccggcggaaatatgcaatttcagggcgtcattattgcggaaacttgccggattgaagccg

SEQ ID NO: 7089 - DNA, 75 bp, synthetic construct
  source 1..75: mol_type = other DNA
tggttgattttctgaacaaaccctccggagaaaaactggatattgaactggtgagtgcaccggggaacagcagta

SEQ ID NO: 7090 - DNA, 75 bp, synthetic construct
  source 1..75: mol_type = other DNA
atactaatgagtcgtctccagagccaacaaaaaaatgaagaactggcttctaaactagaatctttatttcatgga

SEQ ID NO: 7091 - DNA, 75 bp, synthetic construct
  source 1..75: mol_type = other DNA
accaacagatggaatcttcagtctcttcttctcagtgcgcaaattacggggatgactgtaaccattaaaactaat

SEQ ID NO: 7092 - DNA, 75 bp, synthetic construct
  source 1..75: mol_type = other DNA
aatcgaggtaactgcaagccataatccaattgattataatggaatgaaattagtaaccaaaggtgctcgaccaat

SEQ ID NO: 7093 - DNA, 75 bp, synthetic construct
  source 1..75: mol_type = other DNA
gattgctgaccgtggagcctataccggcgtaacggcaaagtggttacacaccaaagacccgaagccgcaaaagca

SEQ ID NO: 7094 - DNA, 75 bp, synthetic construct
  source 1..75: mol_type = other DNA
atacgtctgaaggttgttttgatattggtgttctgctcagtaaccgggagtttacggaagatgccattaagatga

SEQ ID NO: 7095 - DNA, 75 bp, synthetic construct
  source 1..75: mol_type = other DNA
atgacagcacagatagcggcttacgggcggctggtggctgacccgcagttaaagaccaccagcaagggtacacaa

SEQ ID NO: 7096 - DNA, 75 bp, synthetic construct
  source 1..75: mol_type = other DNA
gtgtccattaaaaatgatggacattatttttgtagagccggaggaaacagaccagacggtttaaatgagccggtt

SEQ ID NO: 7097 - DNA, 75 bp, synthetic construct
  source 1..75: mol_type = other DNA
ggttaaaaactggataaaaggctaccgcaaatctggtaatgaggcctttatcaggcgctggaaggagaaaagcat

SEQ ID NO: 7098 - DNA, 75 bp, synthetic construct
  source 1..75: mol_type = other DNA
gcgaaaattaccaaagcgtatttcgagctgggaatgacgttcccggaactgtatgacgacagccatccggaagcc

SEQ ID NO: 7099 - DNA, 75 bp, synthetic construct
  source 1..75: mol_type = other DNA
ggctgcgtctgtggtcagtctctgggggaagtacgtgttccgcaccggggaaatgtggtggacagagtcattgaa

SEQ ID NO: 7100 - DNA, 75 bp, synthetic construct
  source 1..75: mol_type = other DNA
atgaggaaatatattccactggtattatttatcttttcatggccggtattgtctgcagatattcatggacgggtt

SEQ ID NO: 7101 - DNA, 75 bp, synthetic construct
  source 1..75: mol_type = other DNA
cggccattacttactctgaaatgcgcttcggtgcctccggtccgaaggcctccccgcgtcacgtgcaactggttg

SEQ ID NO: 7102 - DNA, 75 bp, synthetic construct
  source 1..75: mol_type = other DNA
gccctggctatttcgcataaaaccagtctgctcgactcgctggagattcgcgacctccacaaactggttcgtgac

SEQ ID NO: 7103 - DNA, 75 bp, synthetic construct
  source 1..75: mol_type = other DNA
gggcaaaagcgccactggtaaacctctgccagtgatcactatcacacgcaaggacggcgacagtcaccgatttac

SEQ ID NO: 7104 - DNA, 75 bp, synthetic construct
  source 1..75: mol_type = other DNA
aagaatatcccggaacctccgccgccggagccagtcaatcgcccgatggagctttatatcaatggtgaactggtg

SEQ ID NO: 7105 - DNA, 75 bp, synthetic construct
  source 1..75: mol_type = other DNA
ggggcggtgatggtgggctcaccagcgctgaacgtcagcgtctgaaagagctggaacgtgaaaatcgtgaactgc

SEQ ID NO: 7106 - DNA, 75 bp, synthetic construct
  source 1..75: mol_type = other DNA
aatgacatcctgccagacgatgaatggcggaggctgtggcgtcgcttatgtaatcatctggaacccgacatggca

SEQ ID NO: 7107 - DNA, 75 bp, synthetic construct
  source 1..75: mol_type = other DNA
cccgagtgctgacctcaaagtatgcagagcacacaccgctgtatcgccagtcggagatctatgcccgccagggtg

SEQ ID NO: 7108 - DNA, 75 bp, synthetic construct
  source 1..75: mol_type = other DNA
tcacgctgatggcgacggcaaccgtcacgctgttgttaggaagtgtgccgctgtatgcgcaaacggcggacgtac

SEQ ID NO: 7109 - DNA, 75 bp, synthetic construct
  source 1..75: mol_type = other DNA
gaacaaggttaacctgaaatttgaagaggcgaagcctgttctcgaagaccagctggccaaatcaatcgcaaatat

SEQ ID NO: 7110 - DNA, 75 bp, synthetic construct
  source 1..75: mol_type = other DNA
aaaagcgtgactggcaatttctcgcgtggtgaagtcatccgcatttgcaacctcgaaggccgcgatatcgcccac

SEQ ID NO: 7111 - DNA, 75 bp, synthetic construct
  source 1..75: mol_type = other DNA
tgccgtcggtgcgcccgcgcctgatattctcgaccagtttctggatgaaaaagaaggtaaccacacaacggcata

SEQ ID NO: 7112 - DNA, 75 bp, synthetic construct
  source 1..75: mol_type = other DNA
gatggctatatcgaggttggcgggaaccgttacagcgtaccggaaagcctgtgtggccagccggtatcaatacgg

SEQ ID NO: 7113 - DNA, 75 bp, synthetic construct
  source 1..75: mol_type = other DNA
gggaaaaggttaccggaaacagtcttgagcttcctttcggcgcgtatgttgtggcaacgccggaagccctgcgga

SEQ ID NO: 7114 - DNA, 75 bp, synthetic construct
  source 1..75: mol_type = other DNA
aaacgtggtggacagggtgattgaaggtgcttacgaagtggtgggcgtgtttgaccggattgaggaaaagcgtga

SEQ ID NO: 7115 - DNA, 75 bp, synthetic construct
  source 1..75: mol_type = other DNA
gtctataaggcaacctataccgcctataccaaaggcagtgggcttactgcgaagctattaatgcaaaactggaat

SEQ ID NO: 7116 - DNA, 75 bp, synthetic construct
  source 1..75: mol_type = other DNA
cgtgggtgtttgacctggtggcggccctgtttggctcctacgatgcgcagaccggtgtacgccatatcaaggaag

SEQ ID NO: 7117 - DNA, 75 bp, synthetic construct
  source 1..75: mol_type = other DNA
atgataaaaagcacaggcgctcttttactgtttgccgcactgtctgccggacaggcaatagcctcagatgtggca

SEQ ID NO: 7118 - DNA, 75 bp, synthetic construct
  source 1..75: mol_type = other DNA
gctggtggcgctggcgcattgtctgactggttactgcgccatgttaaatcctgccagtggccacacggcgattat

SEQ ID NO: 7119 - DNA, 75 bp, synthetic construct
  source 1..75: mol_type = other DNA
atgactggtgtcactcgtcaggtcggtacggtcagtgccgttgatgccgacagggttcaggcccgcgttcgtctg

SEQ ID NO: 7120 - DNA, 75 bp, synthetic construct
  source 1..75: mol_type = other DNA
gccaggcctggtatgccatggcggtgtttctgtgtaccgggatcacacctgctctggctgatttgcctcagatag

SEQ ID NO: 7121 - DNA, 75 bp, synthetic construct
  source 1..75: mol_type = other DNA
ccagctccagcacgactggggcgaagttgaggtggaggttgccgggcaacggtgcaaagttaactttgcggttaa

SEQ ID NO: 7122 - DNA, 75 bp, synthetic construct
  source 1..75: mol_type = other DNA
atggtacaaatgtgacgttaatcactgcaccaaaaggcagtgatgaaaatacattcaaggccggaacccagcaga

SEQ ID NO: 7123 - DNA, 75 bp, synthetic construct
  source 1..75: mol_type = other DNA
atcggctgcttaacggctggcaattatcaaaaatgcatacttttgaagtggctgccaggcatcagtccttcgccc

SEQ ID NO: 7124 - DNA, 75 bp, synthetic construct
  source 1..75: mol_type = other DNA
aaagaggtgactggtgtgacatctggggtaacgaggatgtatcggtgtggtggaaccgtctgtgtgacaacgtac

SEQ ID NO: 7125 - DNA, 75 bp, synthetic construct
  source 1..75: mol_type = other DNA
gattaaggacggtgggcgtgattgccgcacacgttcaaataactgctacggacaggttattcgtcgtgaccagga

SEQ ID NO: 7126 - DNA, 75 bp, synthetic construct
  source 1..75: mol_type = other DNA
ccagatggacccggtgtacacgccggcgcgaaaaatccacctgtaccactgcgaccatcgcggcctgccgctggc

SEQ ID NO: 7127 - DNA, 75 bp, synthetic construct
  source 1..75: mol_type = other DNA
agggttaccggatgatgtcagggaaactatcactgtgcatttcaccgcaaaaagaggtgactggtgtgacatctg

SEQ ID NO: 7128 - DNA, 75 bp, synthetic construct
  source 1..75: mol_type = other DNA
agcaaatcagcaaagtgcagtcagccattatggcgcttaaggcgacgaacacggatgtacaaagcatcaccatca

SEQ ID NO: 7129 - DNA, 75 bp, synthetic construct
  source 1..75: mol_type = other DNA
gcgcggggaatcagagctgcaattaatgccaaacttgatgagccgcataactggaaagggaaaaaatgcaggttg

SEQ ID NO: 7130 - DNA, 75 bp, synthetic construct
  source 1..75: mol_type = other DNA
aaattgcgctcacattgtctgttctcgcggtggccgtgatgtgggtacagcggcacaacgtgatggatttgctgg

SEQ ID NO: 7131 - DNA, 75 bp, synthetic construct
  source 1..75: mol_type = other DNA
ccatcgtgtgctaaaaagtcttgaagataatctttttgcagcgcttggtgaacgtaatatcgctgagttaaaaac

SEQ ID NO: 7132 - DNA, 75 bp, synthetic construct
  source 1..75: mol_type = other DNA
taacaacacagtcatgggatcagacagcatataaagcaagtaacagagtatcatctggcgacttttcggttcatc

SEQ ID NO: 7133 - DNA, 75 bp, synthetic construct
  source 1..75: mol_type = other DNA
atagtcatattacaggtggattagttgctgtttctgaactgacccggaaagttagtgtcggtacatcaagaaaga

SEQ ID NO: 7134 - DNA, 75 bp, synthetic construct
  source 1..75: mol_type = other DNA
ctgatataccacccaatcaggcaacccacatcctgcggcatacattcgcaagccatttcatgatgaatgggggca

SEQ ID NO: 7135 - DNA, 75 bp, synthetic construct
  source 1..75: mol_type = other DNA
gcggcccacagcgattttcagtcccgtatcagtacacagatcgcccggcaggtagcgcttgatcgcatcatgatt

SEQ ID NO: 7136 - DNA, 75 bp, synthetic construct
  source 1..75: mol_type = other DNA
atcgactggggcatgacaacggacccgcgtaatattgattatggcctgccggtgaccattccgtttttactcttc

SEQ ID NO: 7137 - DNA, 75 bp, synthetic construct
  source 1..75: mol_type = other DNA
ctgacgataacgccagaaatcgccgcagagcacgcagacaggctcaacgtgaacaggcaatgcaagagcagcgac

SEQ ID NO: 7138 - DNA, 75 bp, synthetic construct
  source 1..75: mol_type = other DNA
ttttacgaaaatcgctcgtcggttacagacgttgagaaaatggagttgccaatgagctttaactggcttgtcggc

SEQ ID NO: 7139 - DNA, 75 bp, synthetic construct
  source 1..75: mol_type = other DNA
ccgtggcggcaagcctgcgccgtcagggactgagggcaaaggcctcccggaagttcagcccggtcagctaccgcg

SEQ ID NO: 7140 - DNA, 75 bp, synthetic construct
  source 1..75: mol_type = other DNA
gcagtggacatttcaggtcggggaccttgaaaacttcaatatcactcactgggcagtaatacccaaagcgccgga

SEQ ID NO: 7141 - DNA, 75 bp, synthetic construct
  source 1..75: mol_type = other DNA
atgaccagatggtcgacatggcatttctcactcaactgaccggcctgacagataagtggttttacaggctcatca

SEQ ID NO: 7142 - DNA, 75 bp, synthetic construct
  source 1..75: mol_type = other DNA
attgttatcgagccatacatcatcgctatggaagacaacgatgtgaaagggaaaaccctgaaggcagcagcgatt

SEQ ID NO: 7143 - DNA, 75 bp, synthetic construct
  source 1..75: mol_type = other DNA
agggactgcctgacggtccttttacccgcaaacaggccgaagccgttgccgcacagtaccggaacgtctttatcg

SEQ ID NO: 7144 - DNA, 75 bp, synthetic construct
  source 1..75: mol_type = other DNA
gcagtagttttactctttatgaacgtgtaccagcattaacgccaaaaatttttgctgatagtgttaatgcatgta

SEQ ID NO: 7145 - DNA, 75 bp, synthetic construct
  source 1..75: mol_type = other DNA
cccgccatcagcataccgtcacgctgtatgccagagggctgacctgcgaagccgacaccctcggcagctgtggtt

SEQ ID NO: 7146 - DNA, 75 bp, synthetic construct
  source 1..75: mol_type = other DNA
accagcctgcaaccgctcattgagagcttcacacacccgaacgcgattgtgctggacccgtttgcaggcagcggc

SEQ ID NO: 7147 - DNA, 75 bp, synthetic construct
  source 1..75: mol_type = other DNA
atgaccagctggtcgacatggcatttatcactcaactgaccggcttaaccgataagtggttttataagctcatca

SEQ ID NO: 7148 - DNA, 75 bp, synthetic construct
  source 1..75: mol_type = other DNA
caaaatggcgatttgagaaggacaggccgtgtaaaggcgtgaagaaaacgtttatctttagtccttctgcaccct

SEQ ID NO: 7149 - DNA, 75 bp, synthetic construct
  source 1..75: mol_type = other DNA
ataccagttatgacggcacaaaacgccgtaacccgaataacgtggttgatctgaaaaaccgcaaataccagtgcg

SEQ ID NO: 7150 - DNA, 75 bp, synthetic construct
  source 1..75: mol_type = other DNA
ctctgtggtcgtgtggttgacctctgtgacagtgaactcgatcaccgaattgcacttcagttcggtggtggtaat

SEQ ID NO: 7151 - DNA, 75 bp, synthetic construct
  source 1..75: mol_type = other DNA
ggtcttcttcatcatgcaacttgtcggacaggtgccggccgcgctttgggtcattttcggcgaggatcgctttca

SEQ ID NO: 7152 - DNA, 75 bp, synthetic construct
  source 1..75: mol_type = other DNA
tgtggctggattacctggacgcactggaactggtcgatacttccggtgcgccagatattgaatggcctacacctc

SEQ ID NO: 7153 - DNA, 75 bp, synthetic construct
  source 1..75: mol_type = other DNA
ggcctgatgacccgcgacaattacagaacggtaaataacattacccaggggaagcatccggaggcgaaacaatga

SEQ ID NO: 7154 - DNA, 75 bp, synthetic construct
  source 1..75: mol_type = other DNA
gttctggttcttatctatatgataaagaacaacaaaaatgggttttccatggtgttaccagtacagttggtttta

SEQ ID NO: 7155 - DNA, 75 bp, synthetic construct
  source 1..75: mol_type = other DNA
atgacaaaaacagtatcaaccagtaaaaaaccccgtaaacagcattcgcctgaatttcgcagtgaagccctgaag

SEQ ID NO: 7156 - DNA, 75 bp, synthetic construct
  source 1..75: mol_type = other DNA
catcatggctgtgtgatccatcagtctgagcttgaccagagtaacgggcggtggatctgtgaaaacacgggcatg

SEQ ID NO: 7157 - DNA, 75 bp, synthetic construct
  source 1..75: mol_type = other DNA
caaactgcaacgggccggtaaacaactgacggacattatggacgccagcgcagtggatgccatacgtgcccgcct

SEQ ID NO: 7158 - DNA, 75 bp, synthetic construct
  source 1..75: mol_type = other DNA
tctgaccggtcatgaaatcaggaccgtcctggcacgcctggaggacatcccggaagaccagcggattgagtccgg

SEQ ID NO: 7159 - DNA, 75 bp, synthetic construct
  source 1..75: mol_type = other DNA
ggattttcgctgcggctgctggctgatggagaaaacggaaaccgcaatgaaagctatcacccgcaaccttgaccg

SEQ ID NO: 7160 - DNA, 75 bp, synthetic construct
  source 1..75: mol_type = other DNA
cgcccgtcttcacgaacagctgggtgagggaacggtcatccacattgtgccgcgactggccggggccggaaaggg

SEQ ID NO: 7161 - DNA, 75 bp, synthetic construct
  source 1..75: mol_type = other DNA
tgtaatgctaaagaaaatctggagcgggctatcagatgatgaaatgaaaacatttgaactcgccaacaaaaaatt

SEQ ID NO: 7162 - DNA, 75 bp, synthetic construct
  source 1..75: mol_type = other DNA
tgggcgatggtggcggaacattgccgacgccggacgcaaagcagagtgcactggtaaatgagaaacgtcgggctg

SEQ ID NO: 7163 - DNA, 75 bp, synthetic construct
  source 1..75: mol_type = other DNA
agccgatcgcattatggcgtgtgaagaagcgaacggtcgtgaacaactggcggcaacgctggcggcgatgccgga

SEQ ID NO: 7164 - DNA, 75 bp, synthetic construct
  source 1..75: mol_type = other DNA
atatttctattatccccgattacagacaagcctggaaagtagaacataaattgtcagatattctactgttgacta

SEQ ID NO: 7165 - DNA, 75 bp, synthetic construct
  source 1..75: mol_type = other DNA
cctgcggatcaacgccacctgtccaggtcccgtgcgtgaagccaccggcaccgcccgcgtggataatgcaaccgg

SEQ ID NO: 7166 - DNA, 75 bp, synthetic construct
  source 1..75: mol_type = other DNA
gattatttcaccctccgggaacgactggtaatgatgcaggcccaacttgaaggtgctcagcaatacataaccgag

SEQ ID NO: 7167 - DNA, 75 bp, synthetic construct
  source 1..75: mol_type = other DNA
gaacatattgaccaacaggagtaccgcaaaattctggcgggcactgagcaggaaatgcgcctgaaaaaattacgc

SEQ ID NO: 7168 - DNA, 75 bp, synthetic construct
  source 1..75: mol_type = other DNA
tttgacctgccggacgagccaacaggcgatgtcgcgccttcatggctgactgagccgacgccacagattaacggg

SEQ ID NO: 7169 - DNA, 75 bp, synthetic construct
  source 1..75: mol_type = other DNA
atgaaaactgaactgaccctgaatgccctgcagtccatgaacgcacaggaatatgaagatatccgtgctgcggga

SEQ ID NO: 7170 - DNA, 75 bp, synthetic construct
  source 1..75: mol_type = other DNA
aaagaaattttctttaactactgcaattactcatatcacgaaataaaagacgaagaggaagaacaaaatggctga

SEQ ID NO: 7171 - DNA, 75 bp, synthetic construct
  source 1..75: mol_type = other DNA
gaagcgcgcgaaggtgaatacatggccggtgaggctgacaacgtttttgccctgaccacggtatatgccacgaaa

SEQ ID NO: 7172 - DNA, 75 bp, synthetic construct
  source 1..75: mol_type = other DNA
gagtacggcagcgagtttggcggatttttccccgtccaggtgcgtttcagcccgttccatgagcgttttcatatt

SEQ ID NO: 7173 - DNA, 75 bp, synthetic construct
  source 1..75: mol_type = other DNA
cagtacgctaccgctacgatgacgcgcacagtgagttaccggcgacgacaacggatgcgacgggcagcacccggc

SEQ ID NO: 7174 - DNA, 75 bp, synthetic construct
  source 1..75: mol_type = other DNA
caccaggtattcactgactggcctctttccggggaatattcctgcgtgcaactggcccgggctctgttcccgggg

SEQ ID NO: 7175 - DNA, 75 bp, synthetic construct
  source 1..75: mol_type = other DNA
gttcaacgttcacctttacttcagtgccctttcgtaatggcagcgggatactgaatggcggggatttccggacca

SEQ ID NO: 7176 - DNA, 75 bp, synthetic construct
  source 1..75: mol_type = other DNA
agttagcgcaaaaaattaaacagtgggggctggaactgggctttcagcaggtaggtattaccgataccgatctca

SEQ ID NO: 7177 - DNA, 75 bp, synthetic construct
  source 1..75: mol_type = other DNA
ggcgcgatcgccgccggacgtgagcacctgggttacccggaactgccagcgaccatcgcctcgaaacaactgctg

SEQ ID NO: 7178 - DNA, 75 bp, synthetic construct
  source 1..75: mol_type = other DNA
cgttatgccatcgccaccggacgagccactgtcaatccggcatctgaactgaccagtacgctggcggcgccaaaa

SEQ ID NO: 7179 - DNA, 75 bp, synthetic construct
  source 1..75: mol_type = other DNA
aggcttcttaccacgtaaacccgatgccgttcgggtgtagcaatccacttactcacatgtttaaccagctactga

SEQ ID NO: 7180 - DNA, 75 bp, synthetic construct
  source 1..75: mol_type = other DNA
ggtcgcttttcttatcaggtaaacccgatgccgtttgggtgtagcaacccactaacccagatgttcaaccagcta

SEQ ID NO: 7181 - DNA, 75 bp, synthetic construct
  source 1..75: mol_type = other DNA
agtggtatgccggacccgacgctgccggaggtgtccggaggtcatggcagggcagacgatatcatcggactgtga

SEQ ID NO: 7182 - DNA, 75 bp, synthetic construct
  source 1..75: mol_type = other DNA
gtaccgaatgccatcgacaaaagtctgctcgtgaagcggcgggtggtatgccggacccgacgctgccggaggtgt

SEQ ID NO: 7183 - DNA, 75 bp, synthetic construct
  source 1..75: mol_type = other DNA
agtacttgatcagggcatcaccgatgaaatgtatcaggaacttgagcgccttattgcggatgcaaaaccagtaag

SEQ ID NO: 7184 - DNA, 75 bp, synthetic construct
  source 1..75: mol_type = other DNA
catcatctggatgctgcacggttcgctgtgcgaaatacggatgagcttctggggagcggagtttgcggcgttctt

SEQ ID NO: 7185 - DNA, 75 bp, synthetic construct
  source 1..75: mol_type = other DNA
accacagccattaatgctgagttacgccgactttggcgcggcggcttagtcatcagaacaaaccgcagcacaggt

SEQ ID NO: 7186 - DNA, 75 bp, synthetic construct
  source 1..75: mol_type = other DNA
tgcctgcgccgcagattgtcgatgtgccggactttgagacgttgcttgccgaacgcaaggccgaatttgttgcgc

SEQ ID NO: 7187 - DNA, 75 bp, synthetic construct
  source 1..75: mol_type = other DNA
aatttccgctgaaagaattaaataatccagagcatgacagttacgcaattagtgaaaagagtcacggcagagaag

SEQ ID NO: 7188 - DNA, 75 bp, synthetic construct
  source 1..75: mol_type = other DNA
ccatacccgcgcggtgaaaggcatcgacggcgacgttaagctcaaccgggcactctgggtgatggcggaaaaact

SEQ ID NO: 7189 - DNA, 75 bp, synthetic construct
  source 1..75: mol_type = other DNA
ccgtccactgacacatgaagagctgatgcaccatgtgccggggattttcggggaagagaaacacacgtcccgaag

SEQ ID NO: 7190 - DNA, 75 bp, synthetic construct
  source 1..75: mol_type = other DNA
tcaatgaatgaggccgtgatgaagatagagcaggaagtgctcaccacctggcctgccgatgccattgcccgggcg

SEQ ID NO: 7191 - DNA, 75 bp, synthetic construct
  source 1..75: mol_type = other DNA
atgcgattagcaagtcgttttggtcatgtaaaccagatacgccgtgaccgtccgctgacacacgaagaactgatg

SEQ ID NO: 7192 - DNA, 75 bp, synthetic construct
  source 1..75: mol_type = other DNA
agtatgaacataaaatcggtgatttgattgcccggtttaaagaggctggtggggtggtaaatgaagctgagctat

SEQ ID NO: 7193 - DNA, 75 bp, synthetic construct
  source 1..75: mol_type = other DNA
tgaaagacggtgcaggtaaaccggtacagaactgcacaatccagctgaaagcaaaacgtaacagcaccacggtgg

SEQ ID NO: 7194 - DNA, 75 bp, synthetic construct
  source 1..75: mol_type = other DNA
tgcagctcgtaatcctttaaaaagcggaacaattcaatatcttcattactatggaaatgagcgtcctgatattga

SEQ ID NO: 7195 - DNA, 75 bp, synthetic construct
  source 1..75: mol_type = other DNA
aacagcaatggctggttcccggatacagatggtgcgctcatcaccggactgacctttcttgaccccaaagatgcc

SEQ ID NO: 7196 - DNA, 75 bp, synthetic construct
  source 1..75: mol_type = other DNA
gcagaaagcgcacagtcagcggaacaaagcaggatagcggcggaagaggccgtaaaccgaatccccaccgtggtg

SEQ ID NO: 7197 - DNA, 75 bp, synthetic construct
  source 1..75: mol_type = other DNA
ctgaatatcgccgccgattatgcggaatatgtggcagaggcgcgttatagaagaaaatttcctgaggatgtaagc

SEQ ID NO: 7198 - DNA, 75 bp, synthetic construct
  source 1..75: mol_type = other DNA
atgtctgtatatacaactgcagaattactggcatcgacccagcatcactttaagttcgatccgctgtttctgcgc

SEQ ID NO: 7199 - DNA, 75 bp, synthetic construct
  source 1..75: mol_type = other DNA
tcgcctctccacagtatcaggcgttaactgaagaacagaaagcacaggctcaagcgcaatattttgatgaggttg

SEQ ID NO: 7200 - DNA, 75 bp, synthetic construct
  source 1..75: mol_type = other DNA
atgccaaactggtgctcaaatcgtatgcatttttctggtgaaccggcacagattgctgagattaaacgactggcc

SEQ ID NO: 7201 - DNA, 75 bp, synthetic construct
  source 1..75: mol_type = other DNA
gaatacccggagaatttacctgccgcgccgctggtgcgctatggctggacgccgcgcggcgaactggcggtggtg

SEQ ID NO: 7202 - DNA, 75 bp, synthetic construct
  source 1..75: mol_type = other DNA
gcgcacaggaattactacaggaagacatggcaacattcggcggacatatcgttgaagcgttgatgaaaatgccag

SEQ ID NO: 7203 - DNA, 75 bp, synthetic construct
  source 1..75: mol_type = other DNA
gtacgaaatccgttacgaaattaatggccagactatttatgtattgcgtctgtggcacacacgagaaaacaggta

SEQ ID NO: 7204 - DNA, 75 bp, synthetic construct
  source 1..75: mol_type = other DNA
gccagacgaaccagcagcacggtggtggtgaacacggtggcctctgaaaatccggatgaagccggacgttacagc

SEQ ID NO: 7205 - DNA, 75 bp, synthetic construct
  source 1..75: mol_type = other DNA
gcgttcgcctgcctgacgggcggattgtgcactgggatgagaaatcacgaagcctggtggcagcagatcaaccgg

SEQ ID NO: 7206 - DNA, 75 bp, synthetic construct
  source 1..75: mol_type = other DNA
atgtactcaataaaaaaagtaaccatgctcttggggtgcctcgccctcacctgctcgatcgcatttcaggcgagt

SEQ ID NO: 7207 - DNA, 75 bp, synthetic construct
  source 1..75: mol_type = other DNA
gcaggccccggcggggctgtcttcagtggcagatgccgtatggacggggaatcacctgaagatggtccgctttgc

SEQ ID NO: 7208 - DNA, 75 bp, synthetic construct
  source 1..75: mol_type = other DNA
cagaaaaacgttggctatttctttaaagatattgaacgttcggccctgacattaaaggactcactgtatttatta

SEQ ID NO: 7209 - DNA, 75 bp, synthetic construct
  source 1..75: mol_type = other DNA
tgctgacaatcaagcagtggcgcgaaacatacggaccgggtagcaacgttgtgcttccagcagaagaagcggaag

SEQ ID NO: 7210 - DNA, 75 bp, synthetic construct
  source 1..75: mol_type = other DNA
cgatccgctggaagtggcgcagtggctgcaggcctgtcacgatgcaggaatagaagttcgtgtacaggtaaatga

SEQ ID NO: 7211 - DNA, 75 bp, synthetic construct
  source 1..75: mol_type = other DNA
ttactaaagacgtaatgaaaatcttgcgatatggagcaatgagtgcattcatcaatttctggaaagatgagaata

SEQ ID NO: 7212 - DNA, 75 bp, synthetic construct
  source 1..75: mol_type = other DNA
gtgtgaacgtgctgtcgaaaaacgattcgatgaagattcagattggtgccaatgataaccagacgatcagcattg

SEQ ID NO: 7213 - DNA, 75 bp, synthetic construct
  source 1..75: mol_type = other DNA
atgaagctcaacgccagacaggtcgagaccgcaaagccaaaagacaaaacctacaaaatggccgatggcggcggt

SEQ ID NO: 7214 - DNA, 75 bp, synthetic construct
  source 1..75: mol_type = other DNA
ggaaacaccgacccggagccggaaaaccatcatcaatgtcaccacgccaccaaaatggaaggtgaaaaagcagaa

SEQ ID NO: 7215 - DNA, 75 bp, synthetic construct
  source 1..75: mol_type = other DNA
atgcagcggctggacgatgcttttgtatatggcgcatgtgacagagttgtttccgatattgtcaatgaactgatg

SEQ ID NO: 7216 - DNA, 75 bp, synthetic construct
  source 1..75: mol_type = other DNA
agcacttcgtgcaaccccgggtattctggactattcccgcgccgctatttttgcacttatccgaagcgcacaccc

SEQ ID NO: 7217 - DNA, 75 bp, synthetic construct
  source 1..75: mol_type = other DNA
aacgtttcctgggatgcgctgaacacggcatacagtgaacaccctgagtggttttcagggcttgtctccggagat

SEQ ID NO: 7218 - DNA, 75 bp, synthetic construct
  source 1..75: mol_type = other DNA
tggatggatttctgaaaggtaaatgcatcccatgtgatttaaaggttaacgaaacaaacgctgaatatcttgtgc

SEQ ID NO: 7219 - DNA, 75 bp, synthetic construct
  source 1..75: mol_type = other DNA
tgtgggaactgaaaaaggctggcttcgttgataaaagcgtatacacctggcgtgtggctgataacaacgttcagc

SEQ ID NO: 7220 - DNA, 75 bp, synthetic construct
  source 1..75: mol_type = other DNA
gacagacgatgagctggaaaccgtcatgcagcggctggacgatgcctttgagcatggtgcggatgtcagcgttgt

SEQ ID NO: 7221 - DNA, 75 bp, synthetic construct
  source 1..75: mol_type = other DNA
ggcggtcggctggctgcagaaataccgcaatgaagccccggcgcgcgtgatgagcaaggtcactgacgaggaagg

SEQ ID NO: 7222 - DNA, 75 bp, synthetic construct
  source 1..75: mol_type = other DNA
gctgcctgatcgccaccggcgcgagcccggccgtgccgccgattcccggcctgaaagacactccgtactggactt

SEQ ID NO: 7223 - DNA, 75 bp, synthetic construct
  source 1..75: mol_type = other DNA
gtacgaaggcatcttggagggcaatccggcgatcactgtgctgcacggctccgcccgctttaaggacaatcgcaa

SEQ ID NO: 7224 - DNA, 75 bp, synthetic construct
  source 1..75: mol_type = other DNA
caatatggctgatggcggatttaaactgatgtctgattcatcagtactgaaagccagagaccaggcatctgttgt

SEQ ID NO: 7225 - DNA, 75 bp, synthetic construct
  source 1..75: mol_type = other DNA
gttctcctttgtttgcttatgataaacaacaaaaaaaatgggttattgttgctgtattaagagcatatgcaggta

SEQ ID NO: 7226 - DNA, 75 bp, synthetic construct
  source 1..75: mol_type = other DNA
gatgcgacgggcgtcacgctcaccccgcaaggcgctatcgtcatcgaccccggcatgcgtacaagcgtggaacac

SEQ ID NO: 7227 - DNA, 75 bp, synthetic construct
  source 1..75: mol_type = other DNA
acgtcacggcagaacgacgcagccactggtggtggacggtgccgggatgcctggcaatggtgttactgaacgcag

SEQ ID NO: 7228 - DNA, 75 bp, synthetic construct
  source 1..75: mol_type = other DNA
tggagtgaatccagattaaacatctcattgctgatgcttgatattgagcatcttgcgcgcggtaaggggctgcgt

SEQ ID NO: 7229 - DNA, 75 bp, synthetic construct
  source 1..75: mol_type = other DNA
tgaatttcgcagtgaagccctgaagcttgctgaacgcatcggtgttactgccgcagcccgtgaactcagcctgta

SEQ ID NO: 7230 - DNA, 75 bp, synthetic construct
  source 1..75: mol_type = other DNA
gccacaaagtgggtgctgactggatatcagtctgtcgctgatgccagagcctcgaaaatcgcaacggactttatg

SEQ ID NO: 7231 - DNA, 75 bp, synthetic construct
  source 1..75: mol_type = other DNA
tcgtcgtattgtataaacgggaaaccagcgattcttatgcggtatccatcactgatggaagccagaacatgcacg

SEQ ID NO: 7232 - DNA, 75 bp, synthetic construct
  source 1..75: mol_type = other DNA
cgttatcaccacgacctgaccggcaaacttatccgcagcgaggatgaggggctggtcacccactggcactatgac

SEQ ID NO: 7233 - DNA, 75 bp, synthetic construct
  source 1..75: mol_type = other DNA
ttgtcgtttctgtgttggcgatgtcgtctgctgcggtaagcgcagccgagggtgatgaatcagtaacgaccactg

SEQ ID NO: 7234 - DNA, 75 bp, synthetic construct
  source 1..75: mol_type = other DNA
agtctgcagtcatggtaccggcagtgtattctgccgggcagcctgcatcgctgcctgttgccattgattatccgg

SEQ ID NO: 7235 - DNA, 75 bp, synthetic construct
  source 1..75: mol_type = other DNA
agtcggtgaaatttccggagccggtcatcgccttctccagtaattacgcgctatacgcatcgatgtcgaacaggg

SEQ ID NO: 7236 - DNA, 75 bp, synthetic construct
  source 1..75: mol_type = other DNA
ggagtgagaacgggggcgacggtgatgcgttcgtcagggaagaacgcgaagcaatggacgttgtgttacaggcgc

SEQ ID NO: 7237 - DNA, 75 bp, synthetic construct
  source 1..75: mol_type = other DNA
atggcagttcgtggcattaacaaggtcattctcgtaggacgcctgggaaaagatccggaagtccgttacatcccc

SEQ ID NO: 7238 - DNA, 75 bp, synthetic construct
  source 1..75: mol_type = other DNA
ggttttgttgcgtacactggccattgcagcacagaaaggcgaacgtgtcccatctcccggagcgttacctgttaa

SEQ ID NO: 7239 - DNA, 75 bp, synthetic construct
  source 1..75: mol_type = other DNA
cagttgcagcgttttgttaagcagattatgagcaatgctgccggttacttttttgaccttgccctgcagacaacg

SEQ ID NO: 7240 - DNA, 75 bp, synthetic construct
  source 1..75: mol_type = other DNA
gtggggcgggttgttgtactggctggctgcattagtgacgctgctatgggcggccagccagatccaggcgctgaa

SEQ ID NO: 7241 - DNA, 75 bp, synthetic construct
  source 1..75: mol_type = other DNA
ttgccgccgggcatgagatggcttcggaactgaaagcagaatgtggtgccgttgatatgcgtagtgtggcaaagc

SEQ ID NO: 7242 - DNA, 75 bp, synthetic construct
  source 1..75: mol_type = other DNA
ggcaggcggccagttcacgcccgtctccggttgaaatctggcagacactgctcacccgactgctggatcagcact

SEQ ID NO: 7243 - DNA, 75 bp, synthetic construct
  source 1..75: mol_type = other DNA
ccactgacggacacggacggcaatcccgtgatacacggtgtgacggcggtctggcgcgccggggagcaggagcag

SEQ ID NO: 7244 - DNA, 75 bp, synthetic construct
  source 1..75: mol_type = other DNA
tgtgaggaatctgacctgctggcagcagaaatgaagctgattgactgcatggcgaaggtcagggcgtggacgccg

SEQ ID NO: 7245 - DNA, 75 bp, synthetic construct
  source 1..75: mol_type = other DNA
gcagcttgagaacgcgctggcacgctgtgccagccaggtaaaaatgattaaacactgtcaggacgaaaacgatgc

SEQ ID NO: 7246 - DNA, 75 bp, synthetic construct
  source 1..75: mol_type = other DNA
gagaattattaaagagtgatggtgaagcactgattgtcaatcaatacaaaagttcttatttcaagaggtacgaga

SEQ ID NO: 7247 - DNA, 75 bp, synthetic construct
  source 1..75: mol_type = other DNA
ctggtggtggacggtgccgggatgcctggcaatggtgttactgaacgcagccatcagttacggcattgtcagact

SEQ ID NO: 7248 - DNA, 75 bp, synthetic construct
  source 1..75: mol_type = other DNA
atgtggagatggtatcagaatgaggacatcggtgagtattattggcaaacagaactgggtacatgtaaaaataat

SEQ ID NO: 7249 - DNA, 75 bp, synthetic construct
  source 1..75: mol_type = other DNA
gaatatgccaatatggttgaagatatcagggagaaggtatcatctgagatggaacgattttttccaaaaaatgat

SEQ ID NO: 7250 - DNA, 75 bp, synthetic construct
  source 1..75: mol_type = other DNA
atggagaatacgaataatacagccagtgtggtcatgaaaacccgggagtggccggagcgtctgctggtctggtca

SEQ ID NO: 7251 - DNA, 75 bp, synthetic construct
  source 1..75: mol_type = other DNA
tcagaatcaggtgaccggtgatgtcagaatggccatggaggacatcaataccaaaaccggggaattactgacgaa

SEQ ID NO: 7252 - DNA, 75 bp, synthetic construct
  source 1..75: mol_type = other DNA
cagcaggccggtaactccgtgctggcaaaagctaaccaggtaccgcagcaggttctgtctctgctgcagggttaa

SEQ ID NO: 7253 - DNA, 75 bp, synthetic construct
  source 1..75: mol_type = other DNA
tgccatgacggaagatgatgtcatgccggaggcattgcgtcgttttgaggcaatggtggaagaagcggcacgcaa

SEQ ID NO: 7254 - DNA, 75 bp, synthetic construct
  source 1..75: mol_type = other DNA
catcgttcagcgatatgctgtccggcttcaaagataaggtgacatcatctcttaacagcgcggccagttcagtta

SEQ ID NO: 7255 - DNA, 75 bp, synthetic construct
  source 1..75: mol_type = other DNA
atgcctgtaacgaagtgtgaaccagaaaccacccgcaaagcaagccgtaaatctgtaaaaacgcaggaaactgca

SEQ ID NO: 7256 - DNA, 75 bp, synthetic construct
  source 1..75: mol_type = other DNA
tcagtgagacgggttatatcaacaaactcagacgccttgctcaacaggagcctgactttattgatatacacgctc

SEQ ID NO: 7257 - DNA, 75 bp, synthetic construct
  source 1..75: mol_type = other DNA
gacgttttcaccggtggatgcgcagacggtggaacaactgaagatgaccgctgaaattgtctgttcggtgttccg

SEQ ID NO: 7258 - DNA, 75 bp, synthetic construct
  source 1..75: mol_type = other DNA
aagcgtatgcggcagggcgtttggagaaaattcgccgccagaaccggacaaaggcagaacttcaggccgtgcttg

SEQ ID NO: 7259 - DNA, 75 bp, synthetic construct
  source 1..75: mol_type = other DNA
agaaaaatgtgaagaattctgttttgttatttctgattgtttgtttttttccattcagtgttctggcctggaata

SEQ ID NO: 7260 - DNA, 75 bp, synthetic construct
  source 1..75: mol_type = other DNA
ttgcaactgatcgaaatgccaatgttatgtcgcaggaggaatgggaagcgttgcctgcgcttttatccggattta

SEQ ID NO: 7261 - DNA, 75 bp, synthetic construct
  source 1..75: mol_type = other DNA
cagagaaaactggcagtggaaacccgcggtggcgtactgccgctatgccgatgattttgtcctcatcgtcaaagg

SEQ ID NO: 7262 - DNA, 75 bp, synthetic construct
  source 1..75: mol_type = other DNA
aaggaaaatcgaaatgcagcatgaagagtttcagaaaatgacagagcgcgagcaagtgcctttattgaaatcgcc

SEQ ID NO: 7263 - DNA, 75 bp, synthetic construct
  source 1..75: mol_type = other DNA
atggataacgccgtattaaatagcgagcttattgccacgaaggcggggaatattaccgtctataactatgatggt

SEQ ID NO: 7264 - DNA, 75 bp, synthetic construct
  source 1..75: mol_type = other DNA
gggattagtggtgcgatgggttcggttgcactgacgtacttctgggaacgactgacaggggtgaaaaatgcaaaa

SEQ ID NO: 7265 - DNA, 75 bp, synthetic construct
  source 1..75: mol_type = other DNA
gcgccatcaataccggttctgaaaatgtaaacattaacggaaagcccgctgccagggccgccgtcacccttcccc

SEQ ID NO: 7266 - DNA, 75 bp, synthetic construct
  source 1..75: mol_type = other DNA
gctttttgatgactctgcagcagcagcactttttgctgcttcacgggcctttgtcgatgccgttcctgcgctgga

SEQ ID NO: 7267 - DNA, 75 bp, synthetic construct
  source 1..75: mol_type = other DNA
ggcaggctggtattccgttgctcagaagccacgatgccagaaaactgctgcagatgaccggagaatggctgaata

SEQ ID NO: 7268 - DNA, 75 bp, synthetic construct
  source 1..75: mol_type = other DNA
tctgctctggctgaaggtctgcaggaagccctcggacaactgggcggagtgccggtagaacataaaacggacagc

SEQ ID NO: 7269 - DNA, 75 bp, synthetic construct
  source 1..75: mol_type = other DNA
agcgtctgtgtggttgcggaaagcatgatggccgtgaacacgtgcagtcgcttacagcacaactgcgactggggc

SEQ ID NO: 7270 - DNA, 75 bp, synthetic construct
  source 1..75: mol_type = other DNA
atgtcagttacagagtctaagacaaaaacggagcgtaaatccagccgtaaaccgtcaaaagagcaggagactgcc

SEQ ID NO: 7271 - DNA, 75 bp, synthetic construct
  source 1..75: mol_type = other DNA
aaaccgttatcaccgatacgggtgccaaaaaattagctcaggcagccgcgccagatggtaagcctgtccgcctga

SEQ ID NO: 7272 - DNA, 75 bp, synthetic construct
  source 1..75: mol_type = other DNA
aatgttttcaccgatgaacagattgagaaactggaagaaatcttccattcctctatgttcaactaccagcgccac

SEQ ID NO: 7273 - DNA, 75 bp, synthetic construct
  source 1..75: mol_type = other DNA
tatgggatggttgcgctgcgtcaggcatgaaattatccagcgtggcaattatggcccgcctggctgatttcagta

SEQ ID NO: 7274 - DNA, 75 bp, synthetic construct
  source 1..75: mol_type = other DNA
taatccgccgcgttgccggaatcagccagcaggctgacgaacaggccacgcagccggacagcgtgacagccgaaa

SEQ ID NO: 7275 - DNA, 75 bp, synthetic construct
  source 1..75: mol_type = other DNA
gcaacgctgaacgggcagcgaaaatgcagtgggaacgcctgcaacgtggcgttgcgtcattctcgctacaactgg

SEQ ID NO: 7276 - DNA, 75 bp, synthetic construct
  source 1..75: mol_type = other DNA
cactgaatatctgaacaaagtactgactgaaaccgatcatgccaaccctgatccggaaatcgtggatattgcctg

SEQ ID NO: 7277 - DNA, 75 bp, synthetic construct
  source 1..75: mol_type = other DNA
gcgagcgcgaactggctctgtcccgcctgaagggggaagcccgtgagcgtgcccgcctgggttatgctgcggatg

SEQ ID NO: 7278 - DNA, 75 bp, synthetic construct
  source 1..75: mol_type = other DNA
atgaaacgtcttctgccattgctgctggggctggcagtcagtgtggcacaggctgacagcaacagtgattaccgg

SEQ ID NO: 7279 - DNA, 75 bp, synthetic construct
  source 1..75: mol_type = other DNA
ggagtgagaacgggggcgacggtgatgcgttcgtcagggaggaacgcgaagcaatggacgttgtgttacaggcgc

SEQ ID NO: 7280 - DNA, 75 bp, synthetic construct
  source 1..75: mol_type = other DNA
atcacagttctatataattgttggcggtatatctcagggagaaattgtcaaatatgaaaggtcctgtttttgggt

SEQ ID NO: 7281 - DNA, 75 bp, synthetic construct
  source 1..75: mol_type = other DNA
aggttccccgccagttgcgacagtcgcgccatcgtcgtccgttaccggcacaccttccccgtgaaatacaccgcc

SEQ ID NO: 7282 - DNA, 75 bp, synthetic construct
  source 1..75: mol_type = other DNA
gtcatgctgcccggaatgtggaggctcgctgagctatctgggtgaggatgccgccgaacagctggagttgatgcg

SEQ ID NO: 7283 - DNA, 75 bp, synthetic construct
  source 1..75: mol_type = other DNA
atgaactggatgcgatacgtgcaacaggttgagacaactgatacctcggttcttcctgtaacattcccggaacca

SEQ ID NO: 7284 - DNA, 75 bp, synthetic construct
  source 1..75: mol_type = other DNA
gctgttcggaggttcactgacactgcgtgactacgatggtcaggttgcagaggctatggccctggtacgagcgct

SEQ ID NO: 7285 - DNA, 75 bp, synthetic construct
  source 1..75: mol_type = other DNA
taagtatcacgggtggttttttgttcggactgctcatggcctctttccactggtggcgcaggaaagttaaccggc

SEQ ID NO: 7286 - DNA, 75 bp, synthetic construct
  source 1..75: mol_type = other DNA
gtcccgcacttaccggaacgccaacagcacctactgcggcacagtcggtcaacaatacacagattgccaccacgg

SEQ ID NO: 7287 - DNA, 75 bp, synthetic construct
  source 1..75: mol_type = other DNA
tggatgcggataaaaagcagatacagtgcgtggtaagaccgctgcaaattctgcgtgctgacgggacgtgggaaa

SEQ ID NO: 7288 - DNA, 75 bp, synthetic construct
  source 1..75: mol_type = other DNA
ggagtcatggacaagtatcttaaaacgcgcaggtctgagacacagaaaatcgtaccaatccaggcatacttatgc

SEQ ID NO: 7289 - DNA, 75 bp, synthetic construct
  source 1..75: mol_type = other DNA
atatttctattacacccgattacagacaagcctggaaagtggtgcataaattgtcagatattctactgttgacta

SEQ ID NO: 7290 - DNA, 75 bp, synthetic construct
  source 1..75: mol_type = other DNA
aaaccgcagagcggtggcagtatgacgaacgcggctggctgacagacatcagccatatcagcgaagggcaccggg

SEQ ID NO: 7291 - DNA, 75 bp, synthetic construct
  source 1..75: mol_type = other DNA
aatgcccgtctgtccgcgccgggaaaagacagcacgccggtggcgctgaaaggggccgcgcttacgcgccgcccc

SEQ ID NO: 7292 - DNA, 75 bp, synthetic construct
  source 1..75: mol_type = other DNA
gagatgctgctggagaagaaggcaacgctgaccatctggcagggcgtcatcccgcagcgttatgtcacaggcgtg

SEQ ID NO: 7293 - DNA, 75 bp, synthetic construct
  source 1..75: mol_type = other DNA
cgaattttgcgaccaccatgactaacgcgcttgcgggtaagcaaccgaaagatgccaccctgacggcgctggccg

SEQ ID NO: 7294 - DNA, 75 bp, synthetic construct
  source 1..75: mol_type = other DNA
ttcagcaggtgctggaacgttctggctatctggcgaaggagcataccaaagctcgcggcaccggtgagcgcaatt

SEQ ID NO: 7295 - DNA, 75 bp, synthetic construct
  source 1..75: mol_type = other DNA
aagctgaagattccggacttactgtatctgcttacatccgaaatgcagcactgaataagcgaattaactcccgta

SEQ ID NO: 7296 - DNA, 75 bp, synthetic construct
  source 1..75: mol_type = other DNA
tgctgaccgtcgctcgcagatgaacctgaagcaggatgaacggctgtccggtgaactgataaccggacgtcgtca

SEQ ID NO: 7297 - DNA, 75 bp, synthetic construct
  source 1..75: mol_type = other DNA
aggcgtgaagcagggcagtgtcagcattgtgggcatgaccgctgacgggaattttgtggctgtggctgcggtgac

SEQ ID NO: 7298 - DNA, 75 bp, synthetic construct
  source 1..75: mol_type = other DNA
ggtccttgatgaaattggcatgcagcgggatacgcgcaacgagcaggtcatactgaaccagatcgtcgaccgcag

SEQ ID NO: 7299 - DNA, 75 bp, synthetic construct
  source 1..75: mol_type = other DNA
gcactgacgtactatgcgaacgatggctgggtggaaatcgacaacaacatcgctgaaaatgccctgcgggcggtc

SEQ ID NO: 7300 - DNA, 75 bp, synthetic construct
  source 1..75: mol_type = other DNA
ctactggtttgtgcaatacggtatgacaacccagccgtatcagttcacgaaaggcagcatttttcatctgatgga

SEQ ID NO: 7301 - DNA, 75 bp, synthetic construct
  source 1..75: mol_type = other DNA
tctgccagttgcgccaaatctgctgaaccagacgttcactcctacagcaccaaatcaggtctgggtggcggacct

SEQ ID NO: 7302 - DNA, 75 bp, synthetic construct
  source 1..75: mol_type = other DNA
tttctaaattaccagttcgggtttcattttgtccgttctgtggtgaaagtctgaaaacgtgggagaacagaaatg

SEQ ID NO: 7303 - DNA, 75 bp, synthetic construct
  source 1..75: mol_type = other DNA
atggcaaggtccgattacgatattatcaatctgtctctggaacatgaactgaatgagtggctggcagagagaggt

SEQ ID NO: 7304 - DNA, 75 bp, synthetic construct
  source 1..75: mol_type = other DNA
tgttattaatatcgcgtgtttatatgtgcttaccgccagtctctggtttctgtgtggtgcaattatgaatcaggg

SEQ ID NO: 7305 - DNA, 75 bp, synthetic construct
  source 1..75: mol_type = other DNA
ttgctaggccattcgaatcaaaaaatgaccgatatttacaacgacgcacgcggtaaggaatggaaaaaactggtc

SEQ ID NO: 7306 - DNA, 75 bp, synthetic construct
  source 1..75: mol_type = other DNA
attgagtttggtcaggtttctaaagttttactgaataatggtggatcctcaacgcccaagaattttgatataaaa

SEQ ID NO: 7307 - DNA, 75 bp, synthetic construct
  source 1..75: mol_type = other DNA
acaacttcagagcggcaaaaatctcagcatcaacgccagagatgcacgtcttgcaggtacgcaggcagcacaaca

SEQ ID NO: 7308 - DNA, 75 bp, synthetic construct
  source 1..75: mol_type = other DNA
gtacagtctggcatcatcagatataatcctgctctggatatggctggcgcattgaccactgtaaaacgccagcat

SEQ ID NO: 7309 - DNA, 75 bp, synthetic construct
  source 1..75: mol_type = other DNA
ctttgccgtcgaacaccaaagtgtagaacgctggcaggacatgctggcgtttgccgccgaggtaaccaaaaacga

SEQ ID NO: 7310 - DNA, 75 bp, synthetic construct
  source 1..75: mol_type = other DNA
tgtcagctgctgttctggcgctgattgctgcaggcgcgtctgctcctcagatacttgaccagtttctggacgaaa

SEQ ID NO: 7311 - DNA, 75 bp, synthetic construct
  source 1..75: mol_type = other DNA
tctgaccggcaatggcctcgaaggggcgattaaaggtgccgtgattggcggtacgggtggtgcaattctgggtaa

SEQ ID NO: 7312 - DNA, 75 bp, synthetic construct
  source 1..75: mol_type = other DNA
atgagcagaacactcgaacagaagattgccgaagctgaggccagattacagcgcctgaaggcgaagagccggagc

SEQ ID NO: 7313 - DNA, 75 bp, synthetic construct
  source 1..75: mol_type = other DNA
tgatgccatgcagtcgctggtcctgccgccaccggcacgccaggcgctggcacaggcggcactgacttaccgtta

SEQ ID NO: 7314 - DNA, 75 bp, synthetic construct
  source 1..75: mol_type = other DNA
catgaaggtatgcccgccgctgtggcgcacagggctgcgccagaacttccgtatcttccagaatgaggacatcga

SEQ ID NO: 7315 - DNA, 75 bp, synthetic construct
  source 1..75: mol_type = other DNA
cactggggtattgcagccctcacgctgaccggcttgtttgtcctgtctgtgacgcggctgctgcgggccttcaag

SEQ ID NO: 7316 - DNA, 75 bp, synthetic construct
  source 1..75: mol_type = other DNA
ccgcgactggttgaacctttcgcgggttcttgtgctgtgatgatagagacggattaccccagctatcttgttgcg

SEQ ID NO: 7317 - DNA, 75 bp, synthetic construct
  source 1..75: mol_type = other DNA
tggctggcacatcgaacacgggggcgggtgagtacgtatcatcggggacagcggaatcactgcccgccgtcatga

SEQ ID NO: 7318 - DNA, 75 bp, synthetic construct
  source 1..75: mol_type = other DNA
gtagatcagacggttttgcttggccaagtgcgaagcgccacattagggagtgatggaaaaactagtggttctgtt

SEQ ID NO: 7319 - DNA, 75 bp, synthetic construct
  source 1..75: mol_type = other DNA
ccgctatcaaacacctctggacctatccctacacgccaaaaatgaacgctatctgtgaacgttttaaccggacgt

SEQ ID NO: 7320 - DNA, 75 bp, synthetic construct
  source 1..75: mol_type = other DNA
ggattaatcagatacgccgtgaccgcccactgacccatgaagaactgatgcactatgttcccagcatttttgggg

SEQ ID NO: 7321 - DNA, 75 bp, synthetic construct
  source 1..75: mol_type = other DNA
tgacgaccgaattattcgaaatagggagttacggtacgggctcattaaatattacggataagggttacgtcacga

SEQ ID NO: 7322 - DNA, 75 bp, synthetic construct
  source 1..75: mol_type = other DNA
cgggtaaaagccggctcatgtttgactcacgggaacaggcacaggaagtgcaggaaggttttcgatttttaacct

SEQ ID NO: 7323 - DNA, 75 bp, synthetic construct
  source 1..75: mol_type = other DNA
atagaacggattcggcagcactgttgccctgtatcgaacaggccagagaggatgtccgtaccctgcgtcagctgc

SEQ ID NO: 7324 - DNA, 75 bp, synthetic construct
  source 1..75: mol_type = other DNA
gtgaccgggaaaaaaaactgcagcatcgtgtggcggattcagtaggacgctttgctggttttactcatgttatgg

SEQ ID NO: 7325 - DNA, 75 bp, synthetic construct
  source 1..75: mol_type = other DNA
atgacagaaagcattggcggtaaaaccgcactggactgggccatgaaacagaattttcactgcggttgctggctg

SEQ ID NO: 7326 - DNA, 75 bp, synthetic construct
  source 1..75: mol_type = other DNA
tggcgtcaccgccactggcacgcatctgccttcacggggatttacaacgatttggccgccgcctcagcctgtatg

SEQ ID NO: 7327 - DNA, 75 bp, synthetic construct
  source 1..75: mol_type = other DNA
gcaagaaggcagatgaatgcagtggaagtatttgcctgccaaacgtagccatttacgcggcaggctaccggaaat

SEQ ID NO: 7328 - DNA, 75 bp, synthetic construct
  source 1..75: mol_type = other DNA
gtcattgataaactggttacaaagtgctggcaggaggaagcttacgctgaagcacaattgagaagggtgacgaga

SEQ ID NO: 7329 - DNA, 75 bp, synthetic construct
  source 1..75: mol_type = other DNA
tatcaacccgtggctgccgatgactatgcgcactgggctccagcggaaggagaaccaggaaccacggagcttatg

SEQ ID NO: 7330 - DNA, 75 bp, synthetic construct
  source 1..75: mol_type = other DNA
ttgatgacaaaatatacgttaaaagacttcaaatgattcctgacaaactgctggtgatttctgataaccagattt

SEQ ID NO: 7331 - DNA, 75 bp, synthetic construct
  source 1..75: mol_type = other DNA
gccatgacgtataccaaaagcaaaacgtttaaaaccgaagctggcgcgcgtcgctggttagcaagaaactccgac

SEQ ID NO: 7332 - DNA, 75 bp, synthetic construct
  source 1..75: mol_type = other DNA
gtgaggctctggatgcctggatatgtcgaccaggaatgacacaggagcaggcgacgatattaatcactgaagcat

SEQ ID NO: 7333 - DNA, 75 bp, synthetic construct
  source 1..75: mol_type = other DNA
agacagagcttaagtcccggggaataaagcgtgcccgtgcgcgtcgtgatgcgaacagggaacgtcaggatatcg

SEQ ID NO: 7334 - DNA, 75 bp, synthetic construct
  source 1..75: mol_type = other DNA
gatgaactgcgcggggccgactatctggtatggcgcaatgggaggggagcagtccggttgctcggtcgtgagaac

SEQ ID NO: 7335 - DNA, 75 bp, synthetic construct
  source 1..75: mol_type = other DNA
cgggcaacaggctgaccgactcgccgatctggaaagaatgttgcacctgttcagcggtaaaccgatccccgacaa

SEQ ID NO: 7336 - DNA, 75 bp, synthetic construct
  source 1..75: mol_type = other DNA
gcggttgtattcagccctaaaaagcgccagtggggaacgcaggatgatttgacctgcgcacagtggctctggaaa

SEQ ID NO: 7337 - DNA, 75 bp, synthetic construct
  source 1..75: mol_type = other DNA
acggtttggctgcgtgtacagcctgaaggccagcctttctggtgtgccggatacataccggtatcatctgtctca

SEQ ID NO: 7338 - DNA, 75 bp, synthetic construct
  source 1..75: mol_type = other DNA
aagaagccggattactggcatcaacagggagtacaggcgactcgtatgacaacgcgatggctgagagcatcaatg

SEQ ID NO: 7339 - DNA, 75 bp, synthetic construct
  source 1..75: mol_type = other DNA
cctcctggatgtttaccgcgattattgccgtatgcattctgtttattattggaattattttcgccaggctctatc

SEQ ID NO: 7340 - DNA, 75 bp, synthetic construct
  source 1..75: mol_type = other DNA
ggttgagccgtcaacaggctggcaggtacgcgcctatttacgcgcggcgctgggtatgaatcaggttcacggggg

SEQ ID NO: 7341 - DNA, 75 bp, synthetic construct
  source 1..75: mol_type = other DNA
cactgtattacgaagcaaaaaatgacaaagtaagaaaacgtctcggtattaaaggcggtttttactgggctgaag

SEQ ID NO: 7342 - DNA, 75 bp, synthetic construct
  source 1..75: mol_type = other DNA
atggatactatcgatcttggcaacagcgaatctctggtatgtggcgtgttccccaaccaggacggcacgttcacc

SEQ ID NO: 7343 - DNA, 75 bp, synthetic construct
  source 1..75: mol_type = other DNA
ctctttccccgatcacccataaccaaatccctgtcattactaccgagcttttggcacaactttatggcaccgaaa

SEQ ID NO: 7344 - DNA, 75 bp, synthetic construct
  source 1..75: mol_type = other DNA
ttccagccgggcatcgaccgtaaggttgtccgggaactggctggtctggcgttcgtggagcgcagcgaaaacgtg

SEQ ID NO: 7345 - DNA, 75 bp, synthetic construct
  source 1..75: mol_type = other DNA
ttacttcagattcgtttgtcagaacgggtgcgtctgcggtcagtctctgggagaggtgcgtgttccgcaccgggg

SEQ ID NO: 7346 - DNA, 75 bp, synthetic construct
  source 1..75: mol_type = other DNA
gtcctggcgcgcctggaggacatcccggaagaccagcggactgaatccggtatttcttccggcgtggcgatggag

SEQ ID NO: 7347 - DNA, 75 bp, synthetic construct
  source 1..75: mol_type = other DNA
atggtggtttatccccgctggcgcggggaactcgacagaacggcctcagtagtctcgtcaggctccggtttatcc

SEQ ID NO: 7348 - DNA, 75 bp, synthetic construct
  source 1..75: mol_type = other DNA
acctccagactggagctgattgaacctctcatgggggaaatctacggcaacccgcaggctacccagaaaatgctg

SEQ ID NO: 7349 - DNA, 75 bp, synthetic construct
  source 1..75: mol_type = other DNA
gcaacgaaacgctcttgtttgtgcaggatgtgaacaaatatttgaagataaattaagcgggacaaagacagaccg

SEQ ID NO: 7350 - DNA, 75 bp, synthetic construct
  source 1..75: mol_type = other DNA
tcgtgaactgaccgttcaggcctctaccggcacgaactctgattccgacctgtcttctattcaggacgaaatcaa

SEQ ID NO: 7351 - DNA, 75 bp, synthetic construct
  source 1..75: mol_type = other DNA
gggatgaagtgctgagactgaagcagattagcgggctgatagaattgtttcaggaagacgagttcagtccggcat

SEQ ID NO: 7352 - DNA, 75 bp, synthetic construct
  source 1..75: mol_type = other DNA
cggctatgaccagtcatttcagaaaatcgcagcaacagatgcgggaacaaccgtaacgaactcaaacgtgaagca

SEQ ID NO: 7353 - DNA, 75 bp, synthetic construct
  source 1..75: mol_type = other DNA
atgcctaatttctttatcgatcgcccgatttttgcgtgggtgatcgccattatcatcatgttggcaggggggctg

SEQ ID NO: 7354 - DNA, 75 bp, synthetic construct
  source 1..75: mol_type = other DNA
tgctcgtgaagcggcgggtggtatgccggacccgacgctgccggaggtgtccggaggtcatggcagggcagacga

SEQ ID NO: 7355 - DNA, 75 bp, synthetic construct
  source 1..75: mol_type = other DNA
ggaaatcgacctgttgaaccacatctaccggaaggacggcaaggacattgtgcctgaccgtatccgttccgcgct

SEQ ID NO: 7356 - DNA, 75 bp, synthetic construct
  source 1..75: mol_type = other DNA
gagtatgtagagatggtgtatcccgcaagccggtactcctacaaagcacgaattacaaaagacagttttagcgtg

SEQ ID NO: 7357 - DNA, 75 bp, synthetic construct
  source 1..75: mol_type = other DNA
tgggataacagccccatggaacgcttcttccgcagtctgaaaacagaatgggtgccaacgaatggttacgcaggc

SEQ ID NO: 7358 - DNA, 75 bp, synthetic construct
  source 1..75: mol_type = other DNA
atgattgatgcaaaagtgcttgaaggggttaaaaactggctgcgtatttacggacgtctgacctgcggtgttctg

SEQ ID NO: 7359 - DNA, 75 bp, synthetic construct
  source 1..75: mol_type = other DNA
ctccgatggaaagcttctggggaacgctgaaaaatgagagcctgagccactatcgttttaataaccgggatgaag

SEQ ID NO: 7360 - DNA, 75 bp, synthetic construct
  source 1..75: mol_type = other DNA
tactggcgggggcagccacgtttattggcgcgtttctcggcgttctcgggcaaaaaccctcgaaccgcttactgg

SEQ ID NO: 7361 - DNA, 75 bp, synthetic construct
  source 1..75: mol_type = other DNA
cggcaatcaccctgaaaatcgacccggcagtcgtgctggcaacgcgccagtatgtcgacgacaagattatcgagg

SEQ ID NO: 7362 - DNA, 75 bp, synthetic construct
  source 1..75: mol_type = other DNA
attgaaaacctgctgtaccgctggagtaacgggcgtgtgacgctggactgcagcggacgggaggcactggatgac

SEQ ID NO: 7363 - DNA, 75 bp, synthetic construct
  source 1..75: mol_type = other DNA
acactgaactgaatgttgaggttccgctgtcagataacatcaatgtcaatttgaacgctatgacacagcatcgca

SEQ ID NO: 7364 - DNA, 75 bp, synthetic construct
  source 1..75: mol_type = other DNA
tggtcattttcggttgaccgctgggatgataagtggccggaagcgacaaaacgcgctgttatccgcgatgcgtat

SEQ ID NO: 7365 - DNA, 75 bp, synthetic construct
  source 1..75: mol_type = other DNA
gaccggatatttgacacggcggagagcgtctgtattgcctctgttgcacgcacggttctgcgtgccgtccgtgac

SEQ ID NO: 7366 - DNA, 75 bp, synthetic construct
  source 1..75: mol_type = other DNA
gaacaattagtaaataaatttgaaactgtgacatttttagattccagaagacaactagaaagagtgcaaattatc

SEQ ID NO: 7367 - DNA, 75 bp, synthetic construct
  source 1..75: mol_type = other DNA
ggaatatgaagaaatccgtgctgcgggaagcgatatgcgccgtaatctcactcacgaggtgatgcgtgaagtgga

SEQ ID NO: 7368 - DNA, 75 bp, synthetic construct
  source 1..75: mol_type = other DNA
aataataccactcagcttgcgaccaccgcatttgttcaggcggcactgacggccctgattaatggtgcgccagcc

SEQ ID NO: 7369 - DNA, 75 bp, synthetic construct
  source 1..75: mol_type = other DNA
atcgaccggctgttcgatgacgcattccggggcttcggttttccggcgttgaacatgccgcagtggccatccgat

SEQ ID NO: 7370 - DNA, 75 bp, synthetic construct
  source 1..75: mol_type = other DNA
acacggcgaacccgtcgatgcccattcagatttgtccggcaccgccgccgctgttcaggcgtatcgggctggcca

SEQ ID NO: 7371 - DNA, 75 bp, synthetic construct
  source 1..75: mol_type = other DNA
aagaaaaatcgaaatgcagcatgaagagtttcagaaaatgacagagcgtgagcaagtgcctttattgaaattgcc

SEQ ID NO: 7372 - DNA, 75 bp, synthetic construct
  source 1..75: mol_type = other DNA
atccgtatcgctggagaaaatggttttcctgcatggtctgaaattccaccaccaacacatgaggaacagattgct

SEQ ID NO: 7373 - DNA, 75 bp, synthetic construct
  source 1..75: mol_type = other DNA
gtaccgtcgccgcgtgcagatgtaccaagagaaagaaaaaattacttaccactggaagaagccggaacggttacg

SEQ ID NO: 7374 - DNA, 75 bp, synthetic construct
  source 1..75: mol_type = other DNA
tactaattaaccaggccaacgaatacatgaacagtaagcaatggcccggtaaagccgctattggtcgtctgaaag

SEQ ID NO: 7375 - DNA, 75 bp, synthetic construct
  source 1..75: mol_type = other DNA
tccggcctggatgttacagcttctgcgtaaagcccgggaccgcattatccacctgctggtcacactgtgggatcg

SEQ ID NO: 7376 - DNA, 75 bp, synthetic construct
  source 1..75: mol_type = other DNA
ctttttttccctgcctcgcatatggcaacctacactatgttccttgcagctatttttgcgattgcgattggcctg

SEQ ID NO: 7377 - DNA, 75 bp, synthetic construct
  source 1..75: mol_type = other DNA
accaccacgctgaataacggtgccacgcttaccctttccgggaaaacggtgaataacgataccctgaccatccgt

SEQ ID NO: 7378 - DNA, 75 bp, synthetic construct
  source 1..75: mol_type = other DNA
ttcgttgctgaccacgcaggcatatacaggacgcccctggcctctgattgatggtgtcgggcagatttacggcat

SEQ ID NO: 7379 - DNA, 75 bp, synthetic construct
  source 1..75: mol_type = other DNA
aacacgaaaaattacctccaaatgtatacccaaataaatatagttatgtatggaaaccaacatccagagaatctg

SEQ ID NO: 7380 - DNA, 75 bp, synthetic construct
  source 1..75: mol_type = other DNA
ttattgaccttagtctggatgctgtccgtttcgatgagcagatgagccgggtaaggcgtcatttttcaggtctgg

SEQ ID NO: 7381 - DNA, 75 bp, synthetic construct
  source 1..75: mol_type = other DNA
atgatcatttcaagaccaaatattgattctgcaatttcgggacgttacactgtctccgcaccttataaagcgggt

SEQ ID NO: 7382 - DNA, 75 bp, synthetic construct
  source 1..75: mol_type = other DNA
cctgatttacgtggtgagtttattcgtggctgggatgacgggcgtggagtggatagcggtcgtactttattaacg

SEQ ID NO: 7383 - DNA, 75 bp, synthetic construct
  source 1..75: mol_type = other DNA
tgaaaaatacgcgctggtacgtaccgaccagccgggattcagcacctgtacccactctcagttaataaacagcat

SEQ ID NO: 7384 - DNA, 75 bp, synthetic construct
  source 1..75: mol_type = other DNA
gatggcggtgcaaatccagacttcacatctcgcactatcgaagcggtgcgtaaatcgaaggaagcgttagacctg

SEQ ID NO: 7385 - DNA, 75 bp, synthetic construct
  source 1..75: mol_type = other DNA
tcatcatgacgtttaccgttaccagcatcaacgcacgcacaaaggaaaatgccgaaccacgggatttgttatcat

SEQ ID NO: 7386 - DNA, 75 bp, synthetic construct
  source 1..75: mol_type = other DNA
ggtgggcaagacgctgttagattggcaattgagttctgctctgataaaaattatatccgtagagatatcggagca

SEQ ID NO: 7387 - DNA, 75 bp, synthetic construct
  source 1..75: mol_type = other DNA
tgtcgcttttcatgattggggtgctgattgttgtcggcaaggtgcttgccggtggtgaacccatcaccccgcgtc

SEQ ID NO: 7388 - DNA, 75 bp, synthetic construct
  source 1..75: mol_type = other DNA
aaaattccatttcaggcggtttactacgcaactggacaggccactgctggtattgccaacgccgacgccaccttt

SEQ ID NO: 7389 - DNA, 75 bp, synthetic construct
  source 1..75: mol_type = other DNA
actaacaaaattccgttccaggctcgctattatgcaaccggacaggccactgctggtattgccaatgccgacgcc

SEQ ID NO: 7390 - DNA, 75 bp, synthetic construct
  source 1..75: mol_type = other DNA
tctcaacagtgccctggcgcaacaccgtgccgtctcgttaatccgggtggatttacgtttccctgagtatatgcc

SEQ ID NO: 7391 - DNA, 75 bp, synthetic construct
  source 1..75: mol_type = other DNA
cccgttgtcagtcagctcaggtttaccgccatggtcagaaccctaaaggccgtgacagatttcgctgccgtgact

SEQ ID NO: 7392 - DNA, 75 bp, synthetic construct
  source 1..75: mol_type = other DNA
tgactacatcagtatcatgcccaaaccagacgggttaacggcagcaaagaaccttgcagaggcgttcgagcatta

SEQ ID NO: 7393 - DNA, 75 bp, synthetic construct
  source 1..75: mol_type = other DNA
gatgaccaaaaacgtcaagttcctggccggttttgccatcatctctgtatttattgctgtgggtatggccgtcgt

SEQ ID NO: 7394 - DNA, 75 bp, synthetic construct
  source 1..75: mol_type = other DNA
acgcgcaccattacgtccgcgaacattgaccgcctgcgggtcaccttcggggtgcagtcactgttggagaccacc

SEQ ID NO: 7395 - DNA, 75 bp, synthetic construct
  source 1..75: mol_type = other DNA
attggcttgactggaagttatcgttatgaagattttgagctaggtggcacatttaaatacagcggctgggtggaa

SEQ ID NO: 7396 - DNA, 75 bp, synthetic construct
  source 1..75: mol_type = other DNA
atgagcagaaaaaataaaaaagtgcgcatgagttcacgcattgatctcgctgatgcgctcaggaaagaatcgtcg

SEQ ID NO: 7397 - DNA, 75 bp, synthetic construct
  source 1..75: mol_type = other DNA
acgatcctgatcgacccttcggtacagggaaccatttccgtacgcagtaatgatacgtttagccaacaggagtac

SEQ ID NO: 7398 - DNA, 75 bp, synthetic construct
  source 1..75: mol_type = other DNA
tgagcgttaaagctggaaaaccgatccttggaatgctacctacaggatggcaaaagttatcattagaaaagtgct

SEQ ID NO: 7399 - DNA, 75 bp, synthetic construct
  source 1..75: mol_type = other DNA
gagcgatgacgcccggcgagcgcagccttattcagcgggccctgaaaaccctggaccgtcatcttcatgaacccg

SEQ ID NO: 7400 - DNA, 75 bp, synthetic construct
  source 1..75: mol_type = other DNA
ctggcattggggaaataccccgaagtgtcgttggcggatgccagggcacgccgggatgaggctcgtaagctttta

SEQ ID NO: 7401 - DNA, 75 bp, synthetic construct
  source 1..75: mol_type = other DNA
ctcacccgactgctggaccagcactacggcctcacgctaaatgacacaccgttctccgatgaacgtgtgattgag

SEQ ID NO: 7402 - DNA, 75 bp, synthetic construct
  source 1..75: mol_type = other DNA
atggcgtcaggcgaaccgcggctttgaaggcctcacccgtatgccggacgggcgtattattgtcgccgtgcaaag

SEQ ID NO: 7403 - DNA, 75 bp, synthetic construct
  source 1..75: mol_type = other DNA
gctgtcgcacagtctgctggtggggtgtttgtatcgcttcctgaaattgaggaagtagagaacgccgatataaac

SEQ ID NO: 7404 - DNA, 75 bp, synthetic construct
  source 1..75: mol_type = other DNA
agcgggaaaaaattaaagggcaggttgttgaactcgtacgccagagtgggcgcgagacgttacgacaactggaaa

SEQ ID NO: 7405 - DNA, 75 bp, synthetic construct
  source 1..75: mol_type = other DNA
tgcgtatcattaccgataacctcaaacaggaagagcacgccattgtccaggtggaagaaatgcaggcggtgaatg

SEQ ID NO: 7406 - DNA, 75 bp, synthetic construct
  source 1..75: mol_type = other DNA
tctgccgtcagtgcatggaccgctgccgggcgggtgaaacgtggcccccggacctggctgagtttgttgcactga

SEQ ID NO: 7407 - DNA, 75 bp, synthetic construct
  source 1..75: mol_type = other DNA
agtgcattgtccgtttccggggtgtaccaggttgaactggtgacaccggcactgcgggtggtggcagaaaacgaa

SEQ ID NO: 7408 - DNA, 75 bp, synthetic construct
  source 1..75: mol_type = other DNA
ctggagccccgtatcttcggctggatggaccgtctgtgtgaagactactgcgggggtatctggaatctgtacacc

SEQ ID NO: 7409 - DNA, 75 bp, synthetic construct
  source 1..75: mol_type = other DNA
agagtgatgcccattacctggtgaaggatgcagaaaagatacttagccaagacaggcgccgcttactgtgtcagg

SEQ ID NO: 7410 - DNA, 75 bp, synthetic construct
  source 1..75: mol_type = other DNA
gctgccacacggcaccgccgtcgaactgcccgacgttcagaccgcgcccgtggctgaaactgtcaatctgtggga

SEQ ID NO: 7411 - DNA, 75 bp, synthetic construct
  source 1..75: mol_type = other DNA
ctttaacgctttttatggggatgaggatattccgcaggttgagggtagcgattaccaattggagatccgtgggct

SEQ ID NO: 7412 - DNA, 75 bp, synthetic construct
  source 1..75: mol_type = other DNA
ctggccgtgtttgctgaacgccgtaaggacagttttggcccgtatgtccggctgatgagcgtcaccctgaactga

SEQ ID NO: 7413 - DNA, 75 bp, synthetic construct
  source 1..75: mol_type = other DNA
atgagaacgatgctgtcgctacggcagagattaaggtcggcgataacgataacctttctgcgctggcggcgattc

SEQ ID NO: 7414 - DNA, 75 bp, synthetic construct
  source 1..75: mol_type = other DNA
tgaaaaatacgcgctggtacgtaccgaccagtcgggattcagcgcctgtacccactctcagttaataaacagcat

SEQ ID NO: 7415 - DNA, 75 bp, synthetic construct
  source 1..75: mol_type = other DNA
ctggagcaggatttatccccttccggacccttaagcccgtttcggggacatgtttcaaaaaaaacagaaaacatt

SEQ ID NO: 7416 - DNA, 75 bp, synthetic construct
  source 1..75: mol_type = other DNA
tcgaaccaacacttgtcgttcaggcgctgaaagaagcggtgaaaaaattaaacccgcaggcgcaatggcgcaatc

SEQ ID NO: 7417 - DNA, 75 bp, synthetic construct
  source 1..75: mol_type = other DNA
tacacgtaaatcaaccgccaaatcaacgaccaaaaccgcatcggttacaccgtcatcagcggtaccgaaatcttc

SEQ ID NO: 7418 - DNA, 75 bp, synthetic construct
  source 1..75: mol_type = other DNA
accgatacgaaaaaggcggggaagatggcattacaatggtatttatcgcgccctctccctccgtgcaggagaaac

SEQ ID NO: 7419 - DNA, 75 bp, synthetic construct
  source 1..75: mol_type = other DNA
atacgtctgaaggttgttttgatattggtgttctgctcagtaaccgggagtttactgaagatgccattaagatga

SEQ ID NO: 7420 - DNA, 75 bp, synthetic construct
  source 1..75: mol_type = other DNA
agtgataccggcctgctggctgacgtgccggagacggtggcgctctattttgactatgaggcgtatgcgcgggat

SEQ ID NO: 7421 - DNA, 75 bp, synthetic construct
  source 1..75: mol_type = other DNA
taccgccagttaacggcacagtacccggacggcgtaccggaagctgcactggatgaagtcatggccacgctgacc

SEQ ID NO: 7422 - DNA, 75 bp, synthetic construct
  source 1..75: mol_type = other DNA
gttgttctttagctgccatttcatcaatgacggctcgctcctcgagggacagccgaagtgccagtcttggacctg

SEQ ID NO: 7423 - DNA, 75 bp, synthetic construct
  source 1..75: mol_type = other DNA
aatcggctattgcagaactggcgaaagagggctggctgacgaaggaagagcgtaaggtcggtgggcgtaatgtaa

SEQ ID NO: 7424 - DNA, 75 bp, synthetic construct
  source 1..75: mol_type = other DNA
tccgggaaaaatgggatgaactggttatccgcctggggcgttcgcctgcgcagcgttgcgtgaatcacatttctg

SEQ ID NO: 7425 - DNA, 75 bp, synthetic construct
  source 1..75: mol_type = other DNA
cgtgactacgatggtcaggtagcggaagctatggccatggtgcgtgcgttgaacaggatgacaaaggctgggatg

SEQ ID NO: 7426 - DNA, 75 bp, synthetic construct
  source 1..75: mol_type = other DNA
ctggccatcgcgggatggtcggttccgccatcaggcggcagctcgaacagcgcggtgatgtggaactggtattac

SEQ ID NO: 7427 - DNA, 75 bp, synthetic construct
  source 1..75: mol_type = other DNA
gttcccgttactggcgtctccgttatcgtattctgggtaaggagaagactctggcacttggtgtgtatccagaag

SEQ ID NO: 7428 - DNA, 75 bp, synthetic construct
  source 1..75: mol_type = other DNA
gctgtgaaaatcgcgtatgatctggcccggggaaaatacacagcccaggatgcaacaacgacccgtaaagggatc

SEQ ID NO: 7429 - DNA, 75 bp, synthetic construct
  source 1..75: mol_type = other DNA
gttcctgcgcgtccttatatggggctggataagaccggggaacaggaaatttttgatgccatcagaaaacgcgtc

SEQ ID NO: 7430 - DNA, 75 bp, synthetic construct
  source 1..75: mol_type = other DNA
ctgatcattagctctgcgatgacagttcttaagaaaaaggaaccgtatcaatacgaattactggaaatgtattat

SEQ ID NO: 7431 - DNA, 75 bp, synthetic construct
  source 1..75: mol_type = other DNA
acagaagttgcgtgctgggcccatgcccggcgaaaaatccacgatgtatacatcagcagcaaaagtgcgacggca

SEQ ID NO: 7432 - DNA, 75 bp, synthetic construct
  source 1..75: mol_type = other DNA
atgaacggtaaccgcgctgaaatgagcccggaagccgccggcattgccgcctgtctgatgacgtacagtcatcat

SEQ ID NO: 7433 - DNA, 75 bp, synthetic construct
  source 1..75: mol_type = other DNA
gccttcgggaagctgaccactgacccgacgtcgggactgatggcgatggcgcgccagttccgtaacgtgacggca

SEQ ID NO: 7434 - DNA, 75 bp, synthetic construct
  source 1..75: mol_type = other DNA
ccactccttctgtttccgtaaccgctgcatcagggaatgaccagcctcagctggttgccaccatagtccctgatg

SEQ ID NO: 7435 - DNA, 75 bp, synthetic construct
  source 1..75: mol_type = other DNA
ggcgttgcgcttcccgacgcccttgagcggaagtatccgcgcgccgggcattcctggcggcactgttgcaaatag

SEQ ID NO: 7436 - DNA, 75 bp, synthetic construct
  source 1..75: mol_type = other DNA
acaggccgatgcacaggagctgaaaaatgctcgtgaggaaggccttgtcctcgagacggagttatttacctacat

SEQ ID NO: 7437 - DNA, 75 bp, synthetic construct
  source 1..75: mol_type = other DNA
acggggattaccggagtcagagcgtcttgccgtcaggcagcagcgaagcaaagtgttactgacgtcgctgcatga

SEQ ID NO: 7438 - DNA, 75 bp, synthetic construct
  source 1..75: mol_type = other DNA
atgaaggttaataaaaagaggcttgccgaaattttcaacgtggacccgcggacgattgaacgctggcagtctcag

SEQ ID NO: 7439 - DNA, 75 bp, synthetic construct
  source 1..75: mol_type = other DNA
tgggaaacactgccgtttcaggttgccatcatgaacagcatggggaatgaccggatccgcaccgttaatctgatt

SEQ ID NO: 7440 - DNA, 75 bp, synthetic construct
  source 1..75: mol_type = other DNA
ttttacgaaaaccgctcgtcggttacggaagtggagaaactcgacatgccgcagagttttggctggcttgtcggc

SEQ ID NO: 7441 - DNA, 75 bp, synthetic construct
  source 1..75: mol_type = other DNA
tggataccaacacccttgcagataatgttgatatagagaataccgtggtcagcgtcgtgcccacgcatggtgccg

SEQ ID NO: 7442 - DNA, 75 bp, synthetic construct
  source 1..75: mol_type = other DNA
ttagccaatcaatcatttagtcagccatctcaacagattgcttttcaacactattgtcagagtctggagcagatt

SEQ ID NO: 7443 - DNA, 75 bp, synthetic construct
  source 1..75: mol_type = other DNA
ctttcacatgcgcgactggtggcagccgacaaaagcaaacttcttcggacacctgaaaaagccgcagattatcgc

SEQ ID NO: 7444 - DNA, 75 bp, synthetic construct
  source 1..75: mol_type = other DNA
tccgcaaactcaccgaaaaatacaacgtcgaatacatcggtattgatgccaccggcctcggtgtcggcgtgttcc

SEQ ID NO: 7445 - DNA, 75 bp, synthetic construct
  source 1..75: mol_type = other DNA
gggccgcccgggatcatggcctcgccgtcccggaatgcgtcacccgccgtcaggcggtggttaatcaggcccgca

SEQ ID NO: 7446 - DNA, 75 bp, synthetic construct
  source 1..75: mol_type = other DNA
ttcccgcagcagatatccctgggtggaaaaaatgtggcctgggtacagtcggaggtcagtgcatggatggcggcg

SEQ ID NO: 7447 - DNA, 75 bp, synthetic construct
  source 1..75: mol_type = other DNA
atggggccctattctcgctgataaatatggtgtaacaggcgccgttgaattagcgatggcttgtgcaacacttgg

SEQ ID NO: 7448 - DNA, 75 bp, synthetic construct
  source 1..75: mol_type = other DNA
gtcacgctttcaccgttaacgccatatgataaatgggatggtgagaaatgggtgacagatactgaggcacaacac

SEQ ID NO: 7449 - DNA, 75 bp, synthetic construct
  source 1..75: mol_type = other DNA
atcagaagaagcagcataaccgcgccattgaccttacagagcactggctgagagtggcgataaaaatcatcgacc

SEQ ID NO: 7450 - DNA, 75 bp, synthetic construct
  source 1..75: mol_type = other DNA
tgggccacacaaacgcacaaatggtattcaatgtttacggagcatggatgaaagacaacaatcacgaacagatag

SEQ ID NO: 7451 - DNA, 75 bp, synthetic construct
  source 1..75: mol_type = other DNA
tattaagagtcaatctcacgacaggaaatattaccctcgaagattccagtaagtttaaaagttttgtcggtggca

SEQ ID NO: 7452 - DNA, 75 bp, synthetic construct
  source 1..75: mol_type = other DNA
gctgcttgagcagtatcaccgtgccgggcagcaacgccttgccgccgtgcaacgggccatgcagcagggggccgc

SEQ ID NO: 7453 - DNA, 75 bp, synthetic construct
  source 1..75: mol_type = other DNA
ggcataatgcttttttccctgtggatatgattgataaatataaatcagagggatgggatttatcagacgctaagg

SEQ ID NO: 7454 - DNA, 75 bp, synthetic construct
  source 1..75: mol_type = other DNA
tcttgccgaaggcgaagaagctctcagcttcagtgaatttaaacaggcgctttccagttcgggaaaatctaacgg

SEQ ID NO: 7455 - DNA, 75 bp, synthetic construct
  source 1..75: mol_type = other DNA
tgctgacggtgaaatccttcagtgaggatgaacgggtgatcaccgggattgcgtcaacgccttctccggatcggg

SEQ ID NO: 7456 - DNA, 75 bp, synthetic construct
  source 1..75: mol_type = other DNA
atggctgatctccttcaaaaatactattcacaggttaaaaatccgaatccggtgttcacaccccgtgaaggtgcc

SEQ ID NO: 7457 - DNA, 75 bp, synthetic construct
  source 1..75: mol_type = other DNA
cgatccgctggaagtggcgcagtggctgcaggcctgtcatgatgccggaatagaagttcgtgtacaggttaatga

SEQ ID NO: 7458 - DNA, 75 bp, synthetic construct
  source 1..75: mol_type = other DNA
tgcagttcacctttatgagtcacgcactgctgatttcactggtagtttccataccctgtgcgctgctgtcggtct

SEQ ID NO: 7459 - DNA, 75 bp, synthetic construct
  source 1..75: mol_type = other DNA
tggtcttcggggatggcacgggacaccctcatttacgccggtggtgaccagacggtacacggagaggcacataac

SEQ ID NO: 7460 - DNA, 75 bp, synthetic construct
  source 1..75: mol_type = other DNA
gccagtgcggggactgtggagcttaattccggtgttggtggcctttccgttgattttatgccaacagcccccctg

SEQ ID NO: 7461 - DNA, 75 bp, synthetic construct
  source 1..75: mol_type = other DNA
ccagtgtcagctgaactgccaccagcaaatgaaagtgttctgttatttgatgctaacggagaaggctggctgatt

SEQ ID NO: 7462 - DNA, 75 bp, synthetic construct
  source 1..75: mol_type = other DNA
ggaattatctttgacaacgatgaggatagaacggattcggcagcactgttgccctgtatcgaacaggccagagag

SEQ ID NO: 7463 - DNA, 75 bp, synthetic construct
  source 1..75: mol_type = other DNA
gggcagaaatttaatgaagacaatgatgccccggtcacgttcagaacatcggaaggtggtgcactggagtggagc

SEQ ID NO: 7464 - DNA, 75 bp, synthetic construct
  source 1..75: mol_type = other DNA
gatgaccacatccagtctgttcagggtaaagaggactatgaagatgagatgttcagcatcagatactttaagaag

SEQ ID NO: 7465 - DNA, 75 bp, synthetic construct
  source 1..75: mol_type = other DNA
ccaacagtttcggctcacctgcgatgccgctgtccataaggcattctttgaggcaaagcagcgatacggtgctcc

SEQ ID NO: 7466 - DNA, 75 bp, synthetic construct
  source 1..75: mol_type = other DNA
cggtaaaaggtgccggtaccaccctgtgggtttataacggtcagggtgatgcctatgcaaacccgttgtcagacg

SEQ ID NO: 7467 - DNA, 75 bp, synthetic construct
  source 1..75: mol_type = other DNA
cgtcccgatgggatggtggggggatacctggcctgcggtacagaatgaccgttacggctcccgactgtggctgct

SEQ ID NO: 7468 - DNA, 75 bp, synthetic construct
  source 1..75: mol_type = other DNA
atggcgcgttccaaaactgctcagccaaaacactcactgcgtaaaatcgcagttgtagtagccacagcggttagc

SEQ ID NO: 7469 - DNA, 75 bp, synthetic construct
  source 1..75: mol_type = other DNA
ggcatgtctgtttatgcacaggcagcggttgaaccgaaagaagacactatcaccgttaccgctgcacctgcgccg

SEQ ID NO: 7470 - DNA, 75 bp, synthetic construct
  source 1..75: mol_type = other DNA
ctgatgtacctgctgtgtgttttcctggtataccgccgttggatagctccgctaccggtcgttggtcagctgcgc

SEQ ID NO: 7471 - DNA, 75 bp, synthetic construct
  source 1..75: mol_type = other DNA
tctggtctggaacaaaaggacggctaataacagccgaaccgcctatgttcgggattacattcttaaaacgtttcc

SEQ ID NO: 7472 - DNA, 75 bp, synthetic construct
  source 1..75: mol_type = other DNA
gcaccggagctgatgggctacagtgagctgacggccattgcccgaaactgtgccatacagcgtgccacagatgcc

SEQ ID NO: 7473 - DNA, 75 bp, synthetic construct
  source 1..75: mol_type = other DNA
gttgtaaaggaatccccacgtcagtggatcaatccccgtccggtcacggataaaaaccccggtaatgcggtgccc

SEQ ID NO: 7474 - DNA, 75 bp, synthetic construct
  source 1..75: mol_type = other DNA
gtcactggtggtgtttccattgtgaacgggaaactcaccggttcaaaagccttcctgaaagcactctcttcccag

SEQ ID NO: 7475 - DNA, 75 bp, synthetic construct
  source 1..75: mol_type = other DNA
gctcacatcaaagttatggtgggctgggcgggggcatcgaaagatgcgccggtttccttgatcaccggttacgcc

SEQ ID NO: 7476 - DNA, 75 bp, synthetic construct
  source 1..75: mol_type = other DNA
tgatgatgtcagccgtgcacgccagaagctgttccgcttcctcgataacaaattcgattctgaaaaataccgaaa

SEQ ID NO: 7477 - DNA, 75 bp, synthetic construct
  source 1..75: mol_type = other DNA
atgagccggaaatcttaccccaacgtaaatgctgccaatcagtatgcccgggatgtcgtgcgcggaaagattgtg

SEQ ID NO: 7478 - DNA, 75 bp, synthetic construct
  source 1..75: mol_type = other DNA
ggcgtgatgctttattccgtgcattacgtgaattattcagtctgtttgagtatgcaccgacaattctgacgtcgg

SEQ ID NO: 7479 - DNA, 75 bp, synthetic construct
  source 1..75: mol_type = other DNA
actgcgggtggtggcagaaaacgaatgggcaaactgtacggcaatcactcttaacatgactggagtgtctgatga

SEQ ID NO: 7480 - DNA, 75 bp, synthetic construct
  source 1..75: mol_type = other DNA
gcgcggagttggtttctgacgcggtgaattctttgcttgatgatatcagccgcgatcgtgcgcatcagatccgcc

SEQ ID NO: 7481 - DNA, 75 bp, synthetic construct
  source 1..75: mol_type = other DNA
gaccgacaaccggggatttgaggcggaccagctcaccatcacgctggatgatgcggatggtcagttgcagctacc

SEQ ID NO: 7482 - DNA, 75 bp, synthetic construct
  source 1..75: mol_type = other DNA
ttcgcctctgccgcacatctcgctgcttatgctggccttgcgccggtaactcggcgatccggctcgtcaatacgc

SEQ ID NO: 7483 - DNA, 75 bp, synthetic construct
  source 1..75: mol_type = other DNA
gtgtcagacacactttccgggacaacgcatcccgatgacaatgacgaccatccctggtggggactaccctgcaca

SEQ ID NO: 7484 - DNA, 75 bp, synthetic construct
  source 1..75: mol_type = other DNA
gcgcaggtctacatcgaggggcaactccgtacccgtagctgggaagataacggtatcacccgttacgtcactgaa

SEQ ID NO: 7485 - DNA, 75 bp, synthetic construct
  source 1..75: mol_type = other DNA
cggtctggttcgcgtactcaccgaaccggcaggggaaacacccggagcaacacctccgccccttccggggtatcc

SEQ ID NO: 7486 - DNA, 75 bp, synthetic construct
  source 1..75: mol_type = other DNA
gcaaaatggctgaattgctaaatgatgcacacccagagtggtgttttagcacatgcgaaaagcgaattgctaatt

SEQ ID NO: 7487 - DNA, 75 bp, synthetic construct
  source 1..75: mol_type = other DNA
atgaaacgacatctgaatacctgctacaggctggtatggaatcacattacgggcgctttcgtggttgcctccgaa

SEQ ID NO: 7488 - DNA, 75 bp, synthetic construct
  source 1..75: mol_type = other DNA
tgctcttcaccaggatgaagccgatcctgaactgatgtttcaggattatgagggattcccggggaatatggcctc

SEQ ID NO: 7489 - DNA, 75 bp, synthetic construct
  source 1..75: mol_type = other DNA
ctgctgatcgaacagggaagagataaaaacaacagaatgcgtaacctgatttacgaggtcgatctcaataaggcg

SEQ ID NO: 7490 - DNA, 75 bp, synthetic construct
  source 1..75: mol_type = other DNA
tctgcatcagccagtttcgctacagcgcacaaatccgcccttcttccgtggtgaccaaagactacacctttaaac

SEQ ID NO: 7491 - DNA, 75 bp, synthetic construct
  source 1..75: mol_type = other DNA
ctcagtgggcggcaataggcgtgctggggagtctgctgtttggtctgctgacgtacctgacgaacctgtatttca

SEQ ID NO: 7492 - DNA, 75 bp, synthetic construct
  source 1..75: mol_type = other DNA
cgggtgtcgcctatggcacctcagcaggtagtgccgggtactggtttttacagctgctagataaagtcacgccct

SEQ ID NO: 7493 - DNA, 75 bp, synthetic construct
  source 1..75: mol_type = other DNA
ccctatgcataccggcagataaaggtgacctgtgccgggtggtctgcgcgggtcgggatgttgcgcgttgagttc

SEQ ID NO: 7494 - DNA, 75 bp, synthetic construct
  source 1..75: mol_type = other DNA
aaaaagtaatatccgggccatatgaagaatatggaaaatggtggatagatgttgaatacatttcatggggtgttc

SEQ ID NO: 7495 - DNA, 75 bp, synthetic construct
  source 1..75: mol_type = other DNA
ctgctggcaccgctggatgaagcccttcagcactatgtcctgaccgacggcaaactccatgctgacgatacgcct

SEQ ID NO: 7496 - DNA, 75 bp, synthetic construct
  source 1..75: mol_type = other DNA
ctcatccgactgctggaccagcattatggcctcacactgaatgacacaccgtttgccgatgaacgtgtgattgag

SEQ ID NO: 7497 - DNA, 75 bp, synthetic construct
  source 1..75: mol_type = other DNA
gcgtaacggtaactgggtgacggaaaaggatgtcaccattaacggcaagaccacctcgcagtttctggcgtcggt

SEQ ID NO: 7498 - DNA, 75 bp, synthetic construct
  source 1..75: mol_type = other DNA
cgtgatcacattctggaaccctctgccggcaccggggccatactgcgggcgattcgggataccgcgccgggggcc

SEQ ID NO: 7499 - DNA, 75 bp, synthetic construct
  source 1..75: mol_type = other DNA
tgtccgggttgacgaaaaagagcgtcaggtccgctgtaaaatctgcggtgcagttgtggagccatttgactggat

SEQ ID NO: 7500 - DNA, 75 bp, synthetic construct
  source 1..75: mol_type = other DNA
tcccgtcaccatctggcagatactgctcacccgactgctggaccagcattacggcctcacgctgaatgacacacc

SEQ ID NO: 7501 - DNA, 75 bp, synthetic construct
  source 1..75: mol_type = other DNA
gagtggcatcaacattggtagttggcgactgcgcgataactcaacgtggagttataacagtgggagtagcaattc

SEQ ID NO: 7502 - DNA, 75 bp, synthetic construct
  source 1..75: mol_type = other DNA
atggtgacgaaaaccatcactgaacagcgtgcggaagtacgtatttttgccggtaatgatccggctcataccgcc

SEQ ID NO: 7503 - DNA, 75 bp, synthetic construct
  source 1..75: mol_type = other DNA
tgatttacaactctcttttgaacatattgcacgacgctggcatgccagtaataaacaatgggcacaatcacacag

SEQ ID NO: 7504 - DNA, 75 bp, synthetic construct
  source 1..75: mol_type = other DNA
aactacccgatctgagacaggaaaagggaagaatactcctgcaaccacctgtctcaagtggggattctgctaaat

SEQ ID NO: 7505 - DNA, 75 bp, synthetic construct
  source 1..75: mol_type = other DNA
atgaaaatcatcaggtgtacggtgtgcgtaaagtctggcgccagttgttacgcgaaggtatcagggtggccagat

SEQ ID NO: 7506 - DNA, 75 bp, synthetic construct
  source 1..75: mol_type = other DNA
cagcatattgaggcaggcatttcactgtgtgatgcggtgaactttctcgtggaaaaatacgcgctggtacgaact

SEQ ID NO: 7507 - DNA, 75 bp, synthetic construct
  source 1..75: mol_type = other DNA
acattatcggcaggtgacactctggttgtctggaagctggacaggttagggcgcagtatgcggcatcttgttacg

SEQ ID NO: 7508 - DNA, 75 bp, synthetic construct
  source 1..75: mol_type = other DNA
tttgaacacactgacgacgggctgacagagcacggtcaacagtgtccttatgtcagaccggagcgcaaggagata

SEQ ID NO: 7509 - DNA, 75 bp, synthetic construct
  source 1..75: mol_type = other DNA
gcaggctatgaagcagcaaaaggcgatgttaatcgccctgatcgtcatctgtttaaccgtcatagtgacggcact

SEQ ID NO: 7510 - DNA, 75 bp, synthetic construct
  source 1..75: mol_type = other DNA
ctgtccgcctgctgattcagcttgagcgtggtggtaaatggatgacggaaaaggatgtcaccattaacggcaaga

SEQ ID NO: 7511 - DNA, 75 bp, synthetic construct
  source 1..75: mol_type = other DNA
attaacgtgaaataccgttatgaatttacggacacgctggggctggtgacgtcattcagctatgcaggagacagg

SEQ ID NO: 7512 - DNA, 75 bp, synthetic construct
  source 1..75: mol_type = other DNA
tatacccgcctgttccactggtattgacccgggcgaaaacatcccgggaaaagtggcagtatttacgggtaaggg

SEQ ID NO: 7513 - DNA, 75 bp, synthetic construct
  source 1..75: mol_type = other DNA
atggaaggcttcttctacatggcaagccagtacaaagagaagattgctaacggtactgacctgacggcgcagcag

SEQ ID NO: 7514 - DNA, 75 bp, synthetic construct
  source 1..75: mol_type = other DNA
cttgagaatcagcctggagcagatgtctggataacctgggctgactgggcagccagtaatccagaaattggtgat

SEQ ID NO: 7515 - DNA, 75 bp, synthetic construct
  source 1..75: mol_type = other DNA
ttattaccgtctccgaagtggaatcgacaggataaccgcgcaggttaactacctgcaggaatacatcaggacgca

SEQ ID NO: 7516 - DNA, 75 bp, synthetic construct
  source 1..75: mol_type = other DNA
tagttataccggtagacctcttactagacttgccgtcgaactcacgctcctggtattcattcgttcaagtgaact

SEQ ID NO: 7517 - DNA, 75 bp, synthetic construct
  source 1..75: mol_type = other DNA
cagttgctgttacgcttcgaaggtattacccgtggtgaattgggccgggtggagggtgaaaccgaaatccacact

SEQ ID NO: 7518 - DNA, 75 bp, synthetic construct
  source 1..75: mol_type = other DNA
aatgccccgtcagcatctgccactatgaacaacacctggtggcaactaaccggagattctgcgctgaaaacactg

SEQ ID NO: 7519 - DNA, 75 bp, synthetic construct
  source 1..75: mol_type = other DNA
tgataacggtggctgatgtgatgctggcgttacacaacagctacgacaacaaaaactcaggcgaaaaatttttac

SEQ ID NO: 7520 - DNA, 75 bp, synthetic construct
  source 1..75: mol_type = other DNA
atggatataacaccttttcttcatgcgctttgtgctgtggctgcgcaggtactgattggtctttttaccggaaac

SEQ ID NO: 7521 - DNA, 75 bp, synthetic construct
  source 1..75: mol_type = other DNA
gaaggaaccaaagccaatgcttataaatacactgaacgttacaccgctttttatcgggtgggtagtggtacgcag

SEQ ID NO: 7522 - DNA, 75 bp, synthetic construct
  source 1..75: mol_type = other DNA
ggaaaaaatccgctccgtataccgtgaaagcgacatcataccgggagaacagaccgccaccagcatactgaagca

SEQ ID NO: 7523 - DNA, 75 bp, synthetic construct
  source 1..75: mol_type = other DNA
attaactggaactgtgcagcctcgaaatccccaccgaagacccctgatgaaaagcaggatacgccggatatgaga

SEQ ID NO: 7524 - DNA, 75 bp, synthetic construct
  source 1..75: mol_type = other DNA
ggaaaaaacagttaagaaattctatgatgcgctggtgacccggtttgatattgaagaagcatgggctgagcggca

SEQ ID NO: 7525 - DNA, 75 bp, synthetic construct
  source 1..75: mol_type = other DNA
tggccgtcagtaacctggtaatagccgccatgaatctggccgctgaaatcggggttccacaggtcaacgctgacg

SEQ ID NO: 7526 - DNA, 75 bp, synthetic construct
  source 1..75: mol_type = other DNA
atgaatgctattccttatttcgactatagcctggcccccttctggccgtcttatcagagcaaagttatcggcgtc

SEQ ID NO: 7527 - DNA, 75 bp, synthetic construct
  source 1..75: mol_type = other DNA
gaatgccggtgtgcgtggtggtgaacagtttgatgccatcaaccagagtgtcgcgcgttttgcttctgcatccgg

SEQ ID NO: 7528 - DNA, 75 bp, synthetic construct
  source 1..75: mol_type = other DNA
ccgctgacggacacggacggtaatcccgtgatacacggtgtgacggcggtctggcgcgccggggagcaggagcag

SEQ ID NO: 7529 - DNA, 75 bp, synthetic construct
  source 1..75: mol_type = other DNA
tccgtcacaacctcatcatgccggataactttggccgtactgctgccacggtactgaccgaagaaatctgtaatc

SEQ ID NO: 7530 - DNA, 75 bp, synthetic construct
  source 1..75: mol_type = other DNA
ctgataatgccgtaaaaataggtttggggtcgttgctgactattttaggggggtggctgactcttaagctaacac

SEQ ID NO: 7531 - DNA, 75 bp, synthetic construct
  source 1..75: mol_type = other DNA
acagactgatcgcgacactgatgaaagcgaaacaggaaaaccggctggagcgtcagctgcagcaactgagttatg

SEQ ID NO: 7532 - DNA, 75 bp, synthetic construct
  source 1..75: mol_type = other DNA
ttggctggacgtgaaggtccggttcgtgtgttggtagtgggtggttcccagggcgcacgcattcttaaccagaca

SEQ ID NO: 7533 - DNA, 75 bp, synthetic construct
  source 1..75: mol_type = other DNA
aagaaaaaatgactaaaatgccaaccggtgctgtggatgcgttaaaggaagaattaacccgacgcatcagtaaac

SEQ ID NO: 7534 - DNA, 75 bp, synthetic construct
  source 1..75: mol_type = other DNA
ctaaaagtgcatccatcatgtttggtcatgatgaaagcgacctctcgcagttgtctgacagaacctcaaaagggc

SEQ ID NO: 7535 - DNA, 75 bp, synthetic construct
  source 1..75: mol_type = other DNA
tggcctgcaacaactggttgccaccatagtccctgatgaacagcgcatcagtttctggccgcagcattttggcct

SEQ ID NO: 7536 - DNA, 75 bp, synthetic construct
  source 1..75: mol_type = other DNA
tccagcagatcaccgcaaaggatgagttcatgaatgttaaggcggcatcccgtgatgatgtgctggctgcgcacc

SEQ ID NO: 7537 - DNA, 75 bp, synthetic construct
  source 1..75: mol_type = other DNA
gcagagtcaggtgctgctggcggcagacaggattgcgatgattaatcctgcgaatggcaacacaaagccgatgtt

SEQ ID NO: 7538 - DNA, 75 bp, synthetic construct
  source 1..75: mol_type = other DNA
gtggcgcacgtattcggtgaacgcactctggccacactggagcgtcttctgagcctgctgtcggcctttgaggtc

SEQ ID NO: 7539 - DNA, 75 bp, synthetic construct
  source 1..75: mol_type = other DNA
tgatgaacacccgcaaggttcacactgatgacacaccagtaaaagtactggcaccgggcaggaagaaggcgaaaa

SEQ ID NO: 7540 - DNA, 75 bp, synthetic construct
  source 1..75: mol_type = other DNA
gctactgacgcactgaacagggcaaaacaacaggcgggaaatgatgatccgtacggggataacataccgttttaa

SEQ ID NO: 7541 - DNA, 75 bp, synthetic construct
  source 1..75: mol_type = other DNA
atggttttaagctgttccgcgaaaaactggatacccgtcgcggctcaaattcacaactcgaaacggcagtgaaag

SEQ ID NO: 7542 - DNA, 75 bp, synthetic construct
  source 1..75: mol_type = other DNA
acgttgctgaaacagtcgagcaaattaaaaagggcactattcgtgagggctatgccggatatcgccaactgaaag

SEQ ID NO: 7543 - DNA, 75 bp, synthetic construct
  source 1..75: mol_type = other DNA
ttcagggatttttctctgaaaacaacagcgatattcccgatgatgctttcgatattgaagatgctctttattatg

SEQ ID NO: 7544 - DNA, 75 bp, synthetic construct
  source 1..75: mol_type = other DNA
ggatgttacaaaaaatgcagcgtatggcgttgagatagaaagtctgatgctggagataaatgcaccggcagcata

SEQ ID NO: 7545 - DNA, 75 bp, synthetic construct
  source 1..75: mol_type = other DNA
actggacaccaacaaccagtatcagcgatctgctggttgtggtgatgaaaaaatccacagcaggtatcagtatca

SEQ ID NO: 7546 - DNA, 75 bp, synthetic construct
  source 1..75: mol_type = other DNA
tgccgatgagccgtctggagcactatgctggtcaggatgaaattggtctgcgttacaacagtcaccggacaaaac

SEQ ID NO: 7547 - DNA, 75 bp, synthetic construct
  source 1..75: mol_type = other DNA
tgcatcaaacctggctattgctctcgcaaataaaggaagggaagtctgcctgttaaacggagatctacaacgaac

SEQ ID NO: 7548 - DNA, 75 bp, synthetic construct
  source 1..75: mol_type = other DNA
tgaaataaaaacaatcacacatccacacttcggtgataaaccggtaaaggtgttcgcgataaaagtgaagattaa

SEQ ID NO: 7549 - DNA, 75 bp, synthetic construct
  source 1..75: mol_type = other DNA
tttctggctggcgaaggtgaatcccgggtaaccgaagagcggccagtaaaatctgaagcacaggatatgctgacc

SEQ ID NO: 7550 - DNA, 75 bp, synthetic construct
  source 1..75: mol_type = other DNA
cactgcaacagtatgaccgccgataaaccgggggatgcgcatgcatctggctggacgctggctgccaaacgggga

SEQ ID NO: 7551 - DNA, 75 bp, synthetic construct
  source 1..75: mol_type = other DNA
ctggctagcaaactgtacgaccgtgttggtgatgctgtttttggcgctgcacttgttgattccaggctgaatggt

SEQ ID NO: 7552 - DNA, 75 bp, synthetic construct
  source 1..75: mol_type = other DNA
cgggtaatccaaaaacggttgaacaatatcaattgacaaaggactttgatgttgtctggtttttttcagaagatg

SEQ ID NO: 7553 - DNA, 75 bp, synthetic construct
  source 1..75: mol_type = other DNA
gttatggtaccggcgcaatggtgttgtgctggcactgcgacaaccagctgcgtgaccagacatccgaatcactcg

SEQ ID NO: 7554 - DNA, 75 bp, synthetic construct
  source 1..75: mol_type = other DNA
gccgggagctggcagtaaagtatccgggagacatgccgctgatgctggttatctggtccccggaagagattcagg

SEQ ID NO: 7555 - DNA, 75 bp, synthetic construct
  source 1..75: mol_type = other DNA
ctgacctctccgtgtttaacgcgcagtgccatggtggcagtgctgcagatgtgccgtggatttgtggtgacacga

SEQ ID NO: 7556 - DNA, 75 bp, synthetic construct
  source 1..75: mol_type = other DNA
ttattgacctgagtctggatgcggtccgtttcgatgagcagatgagccgggtaaggcgtcatttttccggactgg

SEQ ID NO: 7557 - DNA, 75 bp, synthetic construct
  source 1..75: mol_type = other DNA
atgcaacagatttcctttctgcccggagaaatgacgcccggcgagcgcagtcacattctgcgggccctgaaaacc

SEQ ID NO: 7558 - DNA, 75 bp, synthetic construct
  source 1..75: mol_type = other DNA
gatgacaacgggcgcggtagcttcatctgtaatcagtgcggcgctggtgatgggctggatttaattaaacgcgta

SEQ ID NO: 7559 - DNA, 75 bp, synthetic construct
  source 1..75: mol_type = other DNA
gtgcgggtattacttcgacctgttctggtaccggaactcggtctggttatcgttaagccaggccgtgaatcaatg

SEQ ID NO: 7560 - DNA, 75 bp, synthetic construct
  source 1..75: mol_type = other DNA
ggagtctggttgcgtgaaggtcaggtcattgatcgtaacggcaacgtttccggtgaaccgcgccgctcccgtatc

SEQ ID NO: 7561 - DNA, 75 bp, synthetic construct
  source 1..75: mol_type = other DNA
tgcgtgatcaaataggcaagcatcacaaatgggtgtttgtacataccaaggcggctaagcgagcagatggaacat

SEQ ID NO: 7562 - DNA, 75 bp, synthetic construct
  source 1..75: mol_type = other DNA
tatctggaatctgtataccctgaacaatggcggggcatttatggcccctgaaccggatgacgatgatgacgaaac

SEQ ID NO: 7563 - DNA, 75 bp, synthetic construct
  source 1..75: mol_type = other DNA
tcaataacgacccgaatttcagcacaactatcaacaatgctctggctcttaaagctcctttagcaagtcctgcat

SEQ ID NO: 7564 - DNA, 75 bp, synthetic construct
  source 1..75: mol_type = other DNA
cttacgcgccgaaaggcaaggagaagcaggctatgaagcagcaaaaggcgatgttaatcgccctgatcgtcatct

SEQ ID NO: 7565 - DNA, 75 bp, synthetic construct
  source 1..75: mol_type = other DNA
gggcgaagccacatcacacacttacgccattaaaaacacctactacaagctgagtgttaacgatcgcccgttgtg

SEQ ID NO: 7566 - DNA, 75 bp, synthetic construct
  source 1..75: mol_type = other DNA
ggcccaccgccacaccgccagcaggctggttacagtgcaacggagctacgttcaccaaagaacaatatcctgttc

SEQ ID NO: 7567 - DNA, 75 bp, synthetic construct
  source 1..75: mol_type = other DNA
gccgctgtccataaggcattctttgaggcaaagcagcgatacggtgctccccgccttgctgacgaaatgccggag

SEQ ID NO: 7568 - DNA, 75 bp, synthetic construct
  source 1..75: mol_type = other DNA
cagttcggcggccagcagatgacggtgaactaccatatccgcggtcgcatcatccaggtgccgtcaaactatgac

SEQ ID NO: 7569 - DNA, 75 bp, synthetic construct
  source 1..75: mol_type = other DNA
agtccagctcagtagtgccaccaacagcacgtctgaaacactggccgcgacatcgaaagcggttaaggcggtaat

SEQ ID NO: 7570 - DNA, 75 bp, synthetic construct
  source 1..75: mol_type = other DNA
cttcctcatcgggaaaaaaacgaccttacagaaggggtaatcctgttcctgcgagagaacgacaaaaagcgtctc

SEQ ID NO: 7571 - DNA, 75 bp, synthetic construct
  source 1..75: mol_type = other DNA
tggcaatcaaaatcgaagattttgaaactgcgtataaaactctaccggaagaaaaacatcgattttcttcttact

SEQ ID NO: 7572 - DNA, 75 bp, synthetic construct
  source 1..75: mol_type = other DNA
gtggtcatcggcccttttatcaacgctagtgcagtcttactgggtggcgttctcggcgcactgctcagccaacgc

SEQ ID NO: 7573 - DNA, 75 bp, synthetic construct
  source 1..75: mol_type = other DNA
gtgggagaaggagcagacagaaggcgtatcagatccatttgccggactggaaaacgcgcttttaatagtgtctca

SEQ ID NO: 7574 - DNA, 75 bp, synthetic construct
  source 1..75: mol_type = other DNA
gcgcagtatgcggcatcttgttactctgatagaagagttgcgccagcgcggcgtgaatttcagaagtctgactga

SEQ ID NO: 7575 - DNA, 75 bp, synthetic construct
  source 1..75: mol_type = other DNA
gcatcatattggagtgagtttttttgtagtaattcaggaaagatagactacgaaacattttcatcccctcaatta

SEQ ID NO: 7576 - DNA, 75 bp, synthetic construct
  source 1..75: mol_type = other DNA
cgggtttcgcggaagagtacattattgaaagtatctggaataaccgcttccctcccgggactattttgcccgcag

SEQ ID NO: 7577 - DNA, 75 bp, synthetic construct
  source 1..75: mol_type = other DNA
gaatcctcaaatccttgaaactctttggcatggcacacgccattgaggagttgggcaatcagaattcaccagcat

SEQ ID NO: 7578 - DNA, 75 bp, synthetic construct
  source 1..75: mol_type = other DNA
tggagtgaatccagattaaacatctcattgctgatgcttgaagttgagcatctggcgcgcggtaaggggctgcgt

SEQ ID NO: 7579 - DNA, 75 bp, synthetic construct
  source 1..75: mol_type = other DNA
atgtcatcgaaaaaccggacccgcagaaccacaacccgcaatatccgtttccccaatcacatgattgaacagatc

SEQ ID NO: 7580 - DNA, 75 bp, synthetic construct
  source 1..75: mol_type = other DNA
taaagcggctattggccggctgaaaggtgaggaactggcacaatataatttgtggctggattacctggacgcact

SEQ ID NO: 7581 - DNA, 75 bp, synthetic construct
  source 1..75: mol_type = other DNA
gaagagctggatgcagatacctggcgggccacactgcatattgaggtgtttttaccggcacaggtaccggattcg

SEQ ID NO: 7582 - DNA, 75 bp, synthetic construct
  source 1..75: mol_type = other DNA
gtagagatggtaatgccgggcgacaacatcaaaatggttgttaccctgatccacccgatcgcgatggacgacggt

SEQ ID NO: 7583 - DNA, 75 bp, synthetic construct
  source 1..75: mol_type = other DNA
aacggacaggattgcttagtcatccgcaccaaagtgctggctatactggcagctaggcggaggcagggacaacgc

SEQ ID NO: 7584 - DNA, 75 bp, synthetic construct
  source 1..75: mol_type = other DNA
gcggtaaatacgcattactgctgcaacaggccagaaccgaagcacaggccgacgctgcgacgcgcttttcttctc

SEQ ID NO: 7585 - DNA, 75 bp, synthetic construct
  source 1..75: mol_type = other DNA
agcggtgtacatgatcactttggcgtcagctggtttaatcccgaagatcttgccactaagcgtaaagcgatggcc

SEQ ID NO: 7586 - DNA, 75 bp, synthetic construct
  source 1..75: mol_type = other DNA
atctctgcgagtcagccaaagccggagccgtgctgatcttctggcatgaactggccataaatggctatgcctcaa

SEQ ID NO: 7587 - DNA, 75 bp, synthetic construct
  source 1..75: mol_type = other DNA
aggtgctggaaaacccccttcagcgttcagataaccatttcctggatgagctggttcgtaaacagcaggcttcgc

SEQ ID NO: 7588 - DNA, 75 bp, synthetic construct
  source 1..75: mol_type = other DNA
tccataaaggcaatcagtgggcaggtaatatcaccgactgtacggtgattgtgaccaaaaaagccgcttccggca

SEQ ID NO: 7589 - DNA, 75 bp, synthetic construct
  source 1..75: mol_type = other DNA
tcaccatacagaccaacggcctgcgccgccgtgtgaaggccacccgcatcagcggctgcacggtttactgggagg

SEQ ID NO: 7590 - DNA, 75 bp, synthetic construct
  source 1..75: mol_type = other DNA
atgtacggaacatgcgaaacgctatgccgggagctggcagcaaagtatccgggagacacgccactgatgctggtt

SEQ ID NO: 7591 - DNA, 75 bp, synthetic construct
  source 1..75: mol_type = other DNA
atgccaaactggtgcagtaaccgtatgtatttttctggtgaaccggcacagatcgctgagattaaacgactggcc

SEQ ID NO: 7592 - DNA, 75 bp, synthetic construct
  source 1..75: mol_type = other DNA
tgatccgaaccgcgctcgaactgcttaacgacgtgggcatggaaggtctaacgacgcgccgactggctgagcgcc

SEQ ID NO: 7593 - DNA, 75 bp, synthetic construct
  source 1..75: mol_type = other DNA
ggcatcatcctgataaacgcagtgcccgtgcgcagcgcgatgactggctgaagagagagatacggcgcgtatacg

SEQ ID NO: 7594 - DNA, 75 bp, synthetic construct
  source 1..75: mol_type = other DNA
atgagttcaacgcagaaacccgccgacgtcacggcagaacgacgcagccactggtggtggacggtgccgggatgc

SEQ ID NO: 7595 - DNA, 75 bp, synthetic construct
  source 1..75: mol_type = other DNA
attgataaaacatcaggttattcgtttacttttgatgcttcattgcaaagtttattaatgctcacattcttttcc

SEQ ID NO: 7596 - DNA, 75 bp, synthetic construct
  source 1..75: mol_type = other DNA
accactcacaccacaagctcaaaattcgcggcctgcaaagtccggtggatgtgctgaccttcgaaggccgcgaac

SEQ ID NO: 7597 - DNA, 75 bp, synthetic construct
  source 1..75: mol_type = other DNA
ctacagtaatgagaaactggtggcctcacatcgcctctgttcggcatcgtctggctggcagacagtgccggagca

SEQ ID NO: 7598 - DNA, 75 bp, synthetic construct
  source 1..75: mol_type = other DNA
cgatatgaatcatattccttccggcgtccggcattttaccgccagacagctcgggattcgtgatatcaccgttct

SEQ ID NO: 7599 - DNA, 75 bp, synthetic construct
  source 1..75: mol_type = other DNA
tttatacacaggcaggttttgtcgggatggaatggataatgaactcttatcattataaggcggtaacctcttttt

SEQ ID NO: 7600 - DNA, 75 bp, synthetic construct
  source 1..75: mol_type = other DNA
aataaagaccttgccacggtcgccagacaaattaacccgtacatcaaagtcgatataccggaaacaacgcgcggc

SEQ ID NO: 7601 - DNA, 75 bp, synthetic construct
  source 1..75: mol_type = other DNA
tgttaatcgtcgtctgtgtgacgatactgtgttttgtctggatggtgagggattcgctttgcggatttcgtatcg

SEQ ID NO: 7602 - DNA, 75 bp, synthetic construct
  source 1..75: mol_type = other DNA
cggtgataaagcctattgcgaagcgataaagtccgcagctcataaagccaaatttccggccttcaacaatccgga

SEQ ID NO: 7603 - DNA, 75 bp, synthetic construct
  source 1..75: mol_type = other DNA
gtaaatatggttgccgatctgtggcatgcgcctgcgccgaaaaatggtcaggccgttggcaccaacaccattggt

SEQ ID NO: 7604 - DNA, 75 bp, synthetic construct
  source 1..75: mol_type = other DNA
gacattatgtccagaatattaacaccagccatgcttctacgtctgaaagacaatataaatgactggttaaacgaa

SEQ ID NO: 7605 - DNA, 75 bp, synthetic construct
  source 1..75: mol_type = other DNA
agggattcgctttgcggactccggctccagcagggaaacacagtgcttgtggcaacgttagcctacgaagttaaa

SEQ ID NO: 7606 - DNA, 75 bp, synthetic construct
  source 1..75: mol_type = other DNA
aaagcatcaacggtcagcgcagaaataccatatcagacttttcgtgactttgctgaaaataaaggtgtgtttacc

SEQ ID NO: 7607 - DNA, 75 bp, synthetic construct
  source 1..75: mol_type = other DNA
ccaatgaatgggtttgtgaaagcgttcttatcgcaattaccgggctcaaaccaggcacaattcttcgggcccgga

SEQ ID NO: 7608 - DNA, 75 bp, synthetic construct
  source 1..75: mol_type = other DNA
tgctggatgcatggattgcccgtgtcagccgggaagagcgtgaggcactggaagccaggcaacaggccatgatgg

SEQ ID NO: 7609 - DNA, 75 bp, synthetic construct
  source 1..75: mol_type = other DNA
ctggataaggtggttaactgccgtactgacgaccgtatgattgatgagattatgcgtcttggccgccttcagaag

SEQ ID NO: 7610 - DNA, 75 bp, synthetic construct
  source 1..75: mol_type = other DNA
gctgggagaaaaaataactgcgtttgatgcggttgagattcacaactggctggcagaacgccgcgggaaggtggc

SEQ ID NO: 7611 - DNA, 75 bp, synthetic construct
  source 1..75: mol_type = other DNA
tgacagtttttcttgtttccggagagccagttgatattgcagtcagtgttcacaggacaatgcaggagtgtatga

SEQ ID NO: 7612 - DNA, 75 bp, synthetic construct
  source 1..75: mol_type = other DNA
atgaagtatgtcttcatcgaaaatcatcgggcagagttcagcatcaaagcgatgtgtcgtgtacttcgggttgcc

SEQ ID NO: 7613 - DNA, 75 bp, synthetic construct
  source 1..75: mol_type = other DNA
ctgggactggatgacagtgcactggatacagaattttccattggtggtactgaactgctgctgtttaagcagatg

SEQ ID NO: 7614 - DNA, 75 bp, synthetic construct
  source 1..75: mol_type = other DNA
ttgggttgttgaaggtaccattcactcagaccaaattgctggtggggtttttattatagaaataggcaaaaatga

SEQ ID NO: 7615 - DNA, 75 bp, synthetic construct
  source 1..75: mol_type = other DNA
accggtgggggtttcatcttatcaccgggcaacagactgaccgactcgtcgacctggaaagaatgctacatctgt

SEQ ID NO: 7616 - DNA, 75 bp, synthetic construct
  source 1..75: mol_type = other DNA
cgggcaacaggcagatcgacttgccgatctggaaagaatgctacacctgttcagcggcaaaccgatccccgacaa

SEQ ID NO: 7617 - DNA, 75 bp, synthetic construct
  source 1..75: mol_type = other DNA
gcgtatacgggggtacgcgcttactggcttgatcttaattacgggaaaaagaaaaaagtcagcgtgaaacgccgc

SEQ ID NO: 7618 - DNA, 75 bp, synthetic construct
  source 1..75: mol_type = other DNA
gaggctcttgataatcgttcgtcgatggattggtgtgttgctgttcatgatatgaatgcagggtttgatgaaaag

SEQ ID NO: 7619 - DNA, 75 bp, synthetic construct
  source 1..75: mol_type = other DNA
tgctgacaatcaagcagtggcgcgaaacatacggacctgatagcaacgttgtactgccagcagaagaagcggaag

SEQ ID NO: 7620 - DNA, 75 bp, synthetic construct
  source 1..75: mol_type = other DNA
tctataaaaaggttgccgctgattgtgaatcgtttatatctcgcgccagagttttatttaaggaagcaaacaggg

SEQ ID NO: 7621 - DNA, 75 bp, synthetic construct
  source 1..75: mol_type = other DNA
ggtatcttgccgcgcaacgtaatggcacgctgattcaggttgcaccgcagcaaacgcgcacttttacagtcacca

SEQ ID NO: 7622 - DNA, 75 bp, synthetic construct
  source 1..75: mol_type = other DNA
tcaggacgcccgctttcgccagctgcatcgcgtcctgaaagacagcagccaggcggggttcagccacgttctggt

SEQ ID NO: 7623 - DNA, 75 bp, synthetic construct
  source 1..75: mol_type = other DNA
caccggaacaacttcgtcggcaggcgcaggagatgcttcgttgtgctgaacagatggaaaaaacgagcgtggcaa

SEQ ID NO: 7624 - DNA, 75 bp, synthetic construct
  source 1..75: mol_type = other DNA
ggtggtactgactgtcctgagtcgtgaaggcgacggaacagcagaaaaagacttgctggatgtggtggagaaagc

SEQ ID NO: 7625 - DNA, 75 bp, synthetic construct
  source 1..75: mol_type = other DNA
ctattatcgaacatcatgctgaatgagttcgatcaatacctgcatgagcgctacctgagcgggaaagccagaaaa

SEQ ID NO: 7626 - DNA, 75 bp, synthetic construct
  source 1..75: mol_type = other DNA
tggcctgttcggtgtgccccggcggggtgacgtccggccatccggtcaatcccctgctcggtgcaaaggtccttc

SEQ ID NO: 7627 - DNA, 75 bp, synthetic construct
  source 1..75: mol_type = other DNA
atgatgacgattgaccaacgtgagaaacaaacaagactacaggcgcgaatggatgagttacgggcagaaatggat

SEQ ID NO: 7628 - DNA, 75 bp, synthetic construct
  source 1..75: mol_type = other DNA
attggtgcagcggttctggtttatttcgggattaaaaaactgaaaaaagggcggggcagttcctggttacgtgac

SEQ ID NO: 7629 - DNA, 75 bp, synthetic construct
  source 1..75: mol_type = other DNA
ctttctggcacgacctggcagcaccgatcctggcggggattattaccgcagcgattgtcagctggtggcgtaacc

SEQ ID NO: 7630 - DNA, 75 bp, synthetic construct
  source 1..75: mol_type = other DNA
cggcagaagtacagcgtcagtcactgattaatactgcaatggcttccattagtctgattcaacttaaattgcagg

SEQ ID NO: 7631 - DNA, 75 bp, synthetic construct
  source 1..75: mol_type = other DNA
cttcgtatctccggcaaagggcgcgcgcttcttgcacggtatatccagcagaaccagcctcatgcacagttctgg

SEQ ID NO: 7632 - DNA, 75 bp, synthetic construct
  source 1..75: mol_type = other DNA
agaaaaggcaattgtctggataatgctgtggtggagtgtttctttggaaccttaaagtcggagtgtttttatctt

SEQ ID NO: 7633 - DNA, 75 bp, synthetic construct
  source 1..75: mol_type = other DNA
aatccaaagccttccagtgaatgtatgtataacagaaaagcaatagatgcctgggtcgcctcaatgaaaaacaaa

SEQ ID NO: 7634 - DNA, 75 bp, synthetic construct
  source 1..75: mol_type = other DNA
gtgccatggtggcagtgctgcagatgtgccgtggatttgtggtgacacgacgtattactggaaaaatacatacgc

SEQ ID NO: 7635 - DNA, 75 bp, synthetic construct
  source 1..75: mol_type = other DNA
aagaagaacaaaaagacgggctgtgtgcctacggctgcaatgaagttcctgaacgtcctgctgcaggacgaccac

SEQ ID NO: 7636 - DNA, 75 bp, synthetic construct
  source 1..75: mol_type = other DNA
taattgacgatagtaagtttaccaaaacagctggtattgataccgacgacatcgtcgctgtaggtctggtttatc

SEQ ID NO: 7637 - DNA, 75 bp, synthetic construct
  source 1..75: mol_type = other DNA
aatgggcattatccggagtgagaaagatctgttgaataatgtctgcctgaatattcagaccggagcatggatcct

SEQ ID NO: 7638 - DNA, 75 bp, synthetic construct
  source 1..75: mol_type = other DNA
ttatcttttcatggccggtattgtctgcagatattcatggacgggttgttcgtgtactggacggtgataccatcg

SEQ ID NO: 7639 - DNA, 75 bp, synthetic construct
  source 1..75: mol_type = other DNA
cgccttgatggcagcaatgcctctgaccagctggtgattaatggtggtcaggcaaccggcaaaacctggcttgcg

SEQ ID NO: 7640 - DNA, 75 bp, synthetic construct
  source 1..75: mol_type = other DNA
caccgactatttgcaacagtgccatatggggcaaatggtggtcaccatcctgtcggctgtggcacaggctgaacg

SEQ ID NO: 7641 - DNA, 75 bp, synthetic construct
  source 1..75: mol_type = other DNA
ccgcgtaaaccgtcagttcgtggcagaacgtcctgaccagttgtgggtggctgattctacttacgtcagcacatg

SEQ ID NO: 7642 - DNA, 75 bp, synthetic construct
  source 1..75: mol_type = other DNA
gaaagagctgaagcgggttaccgacgaacgggacatattaaaaaaagccgcggcgtacttcgcaaagctgtccga

SEQ ID NO: 7643 - DNA, 75 bp, synthetic construct
  source 1..75: mol_type = other DNA
agcggcttcacgacgtccttagagcttgaggtcaggctttctgatgtggagtacgaaacagaagatgatgagtga

SEQ ID NO: 7644 - DNA, 75 bp, synthetic construct
  source 1..75: mol_type = other DNA
tgtttctaacagtgatacatccctgatccgttcgctgtatcgcaattttactcaccactacatcaaggcaaaacg

SEQ ID NO: 7645 - DNA, 75 bp, synthetic construct
  source 1..75: mol_type = other DNA
aactcataacgctggtgaagagcctctgtgtacttgtcggcatttcatttttagtcatgctggttgccattttct

SEQ ID NO: 7646 - DNA, 75 bp, synthetic construct
  source 1..75: mol_type = other DNA
ttgagttgcagattaaggtcgcctgttacatggcggtgctgaaatgggaaccccgcgtcaccctgtcatccgtca

SEQ ID NO: 7647 - DNA, 75 bp, synthetic construct
  source 1..75: mol_type = other DNA
cgtcattaatgagaagggctggcaggccgtcaaatccggcgcaatggcaaccgacacggttgtgaataccggcgc

SEQ ID NO: 7648 - DNA, 75 bp, synthetic construct
  source 1..75: mol_type = other DNA
aagtgcaaaaattatattttcggggacccctgtcacagggaaaacaaatgttcttgcattgcaaaactctgcttc

SEQ ID NO: 7649 - DNA, 75 bp, synthetic construct
  source 1..75: mol_type = other DNA
aggccagcatgactgagcttatcgaaatcatgttctggttcggctcagagcgcaacgtgcggtggagtgatgact

SEQ ID NO: 7650 - DNA, 75 bp, synthetic construct
  source 1..75: mol_type = other DNA
ggcattgggtaaagacctgtcagataaacccgtggaacatatagaccagaccaatgagagtgacggcagttttct

SEQ ID NO: 7651 - DNA, 75 bp, synthetic construct
  source 1..75: mol_type = other DNA
tgaaggacggggccggtaagccggtaccgggatgcacgatagagctgaaagcgcgacgcacaacggagacggtga

SEQ ID NO: 7652 - DNA, 75 bp, synthetic construct
  source 1..75: mol_type = other DNA
cctggaggacgcacagtattacccgaaagcccttgcagagctggaagcggtggccgcggaaatcctgaaacgtgc

SEQ ID NO: 7653 - DNA, 75 bp, synthetic construct
  source 1..75: mol_type = other DNA
ccattgttggcatgaactgccggtaccccggcgtgcacagcgttgcggcattcgaaacggtgcttcgcaccggat

SEQ ID NO: 7654 - DNA, 75 bp, synthetic construct
  source 1..75: mol_type = other DNA
acgctgaacaacgtctatgagcacatggcggagttcgatgccaacttttttggctacagccgtgcagaagcagaa

SEQ ID NO: 7655 - DNA, 75 bp, synthetic construct
  source 1..75: mol_type = other DNA
acatgcaggggatgcgcaaggcagatatcatcaggcgtctggaaaatgaactgggggaaacggcagaggatgtgt

SEQ ID NO: 7656 - DNA, 75 bp, synthetic construct
  source 1..75: mol_type = other DNA
ttgcgcatatggcttgaaacacttggcgacaatgaacgcgacaaacaaaaatcaagaattgccacggcattaata

SEQ ID NO: 7657 - DNA, 75 bp, synthetic construct
  source 1..75: mol_type = other DNA
gtagccagtggcgatgtatacaactccggctacgggttattcccctctgaacaggcgcgtaaggactggcaaaac

SEQ ID NO: 7658 - DNA, 75 bp, synthetic construct
  source 1..75: mol_type = other DNA
tgccatagagaattgcactatagtaaaaatgcaaaagaactaatcgagatgctttacgttaatataaaccgatta

SEQ ID NO: 7659 - DNA, 75 bp, synthetic construct
  source 1..75: mol_type = other DNA
aatcacggtgttgggtgactatccggaaaatacaaccactatcgccccgctaacaccatacgacaaatgggatgg

SEQ ID NO: 7660 - DNA, 75 bp, synthetic construct
  source 1..75: mol_type = other DNA
ggtgtgtttatgctgcctaagctgaaaacggatgacatgaaaacgggtaagaaggtttatctgaagtccggaaaa

SEQ ID NO: 7661 - DNA, 75 bp, synthetic construct
  source 1..75: mol_type = other DNA
tgatacagcggtaccgtgaagcggaaatggccgtactggagggaaagtctgtcaccttcaacgggcagcaactga

SEQ ID NO: 7662 - DNA, 75 bp, synthetic construct
  source 1..75: mol_type = other DNA
tgatgatatgttaattattgcggtcgtcgcagtaggtaaacgtgaacgcagcaacgtttatcatctcgccagtga

SEQ ID NO: 7663 - DNA, 75 bp, synthetic construct
  source 1..75: mol_type = other DNA
aatgcgtacctggcacaacagcgtaaggcgtgggacgttctcagtgatttctgctctgcgatgcgctgtatgccg

SEQ ID NO: 7664 - DNA, 75 bp, synthetic construct
  source 1..75: mol_type = other DNA
gggaggtgacactgccggagaccggcacggccactgttaatctgattaacggcagcggtaagccggcgagcgtgg

SEQ ID NO: 7665 - DNA, 75 bp, synthetic construct
  source 1..75: mol_type = other DNA
acaggcagcgccccgcagtaaaccaaccagcagggagaaagcacgcgccaatattcaggaaataaaaaagatgct

SEQ ID NO: 7666 - DNA, 75 bp, synthetic construct
  source 1..75: mol_type = other DNA
taaagattgaagaaatacggatgcataaacatcatgagattcacagggttaagcctcttatgccagctttatgtc

SEQ ID NO: 7667 - DNA, 75 bp, synthetic construct
  source 1..75: mol_type = other DNA
cgcgcaataccgtggccttacggatcgctagccttgacccgcgcaaggtcatccgccggcgggaaggccaggatg

SEQ ID NO: 7668 - DNA, 75 bp, synthetic construct
  source 1..75: mol_type = other DNA
gtgtcgcctgccgtggtacagggggctccggatatcacccgggaaatccagcaggatattgcccggcgaatgagg

SEQ ID NO: 7669 - DNA, 75 bp, synthetic construct
  source 1..75: mol_type = other DNA
atggcaactttgacaaaaaaagaacaagcatggttgagcgaattacaggacgttcttgatcgctgtccatcaccg

SEQ ID NO: 7670 - DNA, 75 bp, synthetic construct
  source 1..75: mol_type = other DNA
gtgtatgagatggcccgcaagggggcacaggatgaactccggctgcagttgcgtgatggcggtatgttatcaggg

SEQ ID NO: 7671 - DNA, 75 bp, synthetic construct
  source 1..75: mol_type = other DNA
caggcgctggcggcacaaaaagccgggatatcagtcggacagtataaggctgccatgcgcacactgcccgcacag

SEQ ID NO: 7672 - DNA, 75 bp, synthetic construct
  source 1..75: mol_type = other DNA
tggtcgtcactattcgtggcagccctttgaccgtggcctgcatctgctggttggtgaacagcaatggcgcggggc

SEQ ID NO: 7673 - DNA, 75 bp, synthetic construct
  source 1..75: mol_type = other DNA
aagacatgactgagattgaggagaatatgctactcccaatttctggccaggaactgcccattcgttggcttgctc

SEQ ID NO: 7674 - DNA, 75 bp, synthetic construct
  source 1..75: mol_type = other DNA
tgtgaaatgggggagtcagaccacggaccagtgtactgcagattataaattaccgaaggaaagcgccggacagat

SEQ ID NO: 7675 - DNA, 75 bp, synthetic construct
  source 1..75: mol_type = other DNA
atgcaactgctattggcaataatgcgaaggcaaaagggactaatagcatggcaatggggttcggaagccttgccg

SEQ ID NO: 7676 - DNA, 75 bp, synthetic construct
  source 1..75: mol_type = other DNA
aggttatgaatgaaagaacaaatgcgtattactcttattatcttggagagcgtaatatctccgtactgcccctta

SEQ ID NO: 7677 - DNA, 75 bp, synthetic construct
  source 1..75: mol_type = other DNA
ttcaggaaaccagaactggttgacaggctgaatgagattattgcgaaacactatccgggagtgttaccttcataa

SEQ ID NO: 7678 - DNA, 75 bp, synthetic construct
  source 1..75: mol_type = other DNA
tgctgagcatatgcaggatttgtatgccacgctgctgggcgacctgcaactactgaaagcccgtcgcgggctgag

SEQ ID NO: 7679 - DNA, 75 bp, synthetic construct
  source 1..75: mol_type = other DNA
aacactggaagctttccataaattcacatcgaaacacgcctccggcgttcactcttcagaaggtatcccgtggca

SEQ ID NO: 7680 - DNA, 75 bp, synthetic construct
  source 1..75: mol_type = other DNA
agggcatggccaccgtcaccgacgaaatcatcgacctgcacgaccgcatcctgggtaagctgtttaacgctgcca

SEQ ID NO: 7681 - DNA, 75 bp, synthetic construct
  source 1..75: mol_type = other DNA
gttatgaatatggatatccgggagcgggaaaccgcggctcatgatgttcgtgaggaaacatccggcgcgttaacg

SEQ ID NO: 7682 - DNA, 75 bp, synthetic construct
  source 1..75: mol_type = other DNA
atgaaaatttgtatcgacgacggctccaccaacatcaagctggcatggactgagaacggcgaacgccgcaacgcc

SEQ ID NO: 7683 - DNA, 75 bp, synthetic construct
  source 1..75: mol_type = other DNA
aacgtgattccactggcaccgggtcatgcctacgggatgtttatggaacgttttaacgatttatcggagttacgc

SEQ ID NO: 7684 - DNA, 75 bp, synthetic construct
  source 1..75: mol_type = other DNA
gacaaataccgcgccatgtatctgagtaaaaacccgttatgcgtgcgatgccttgagaaggggatatatacgccc

SEQ ID NO: 7685 - DNA, 75 bp, synthetic construct
  source 1..75: mol_type = other DNA
tctgacggatgcagagtataccggtgaagagctggatgcagatacctggcgggccacgctgcatattgaggtgtt

SEQ ID NO: 7686 - DNA, 75 bp, synthetic construct
  source 1..75: mol_type = other DNA
ttttgacgatccggagtcgctggggtttgccggtggcggggtccgtattgaaggaagcagcccgtcattatttgt

SEQ ID NO: 7687 - DNA, 75 bp, synthetic construct
  source 1..75: mol_type = other DNA
ctgtgcgatgagtatggcccgttcctgattaacatcgacagtaaagggaaaatcctggcaatccacggtccgcag

SEQ ID NO: 7688 - DNA, 75 bp, synthetic construct
  source 1..75: mol_type = other DNA
ccaaagacccgaagccgcaaaagcagaaggtaaaactgaaacgcaaaaagaaagaaaaacacctgcgcgcactgg

SEQ ID NO: 7689 - DNA, 75 bp, synthetic construct
  source 1..75: mol_type = other DNA
aaaccgacagctaccggggtggtggcatgatgggggcggtaagtattgatctcggtctggacgactccgcgcttg

SEQ ID NO: 7690 - DNA, 75 bp, synthetic construct
  source 1..75: mol_type = other DNA
tcagccatgcgctcggccactggccgcgtattctcccggcgctggggattcaggtgctgaaaaaccgtcatcagc

SEQ ID NO: 7691 - DNA, 75 bp, synthetic construct
  source 1..75: mol_type = other DNA
aattatgcgtggcagtctcctttcggtcaataatagcagaacaaaagaaagagccagaaatgacggtcagatatt

SEQ ID NO: 7692 - DNA, 75 bp, synthetic construct
  source 1..75: mol_type = other DNA
gagtaacgaggatgtatcggtgtggtggaaccgtctgtgtgacaacgtcctgccggaaaaaccatgccgtttgac

SEQ ID NO: 7693 - DNA, 75 bp, synthetic construct
  source 1..75: mol_type = other DNA
gggagccttcggcagaggcctggtatctgtggcaggaagtgctcaatggtgatggagaggatgacgataccctgt

SEQ ID NO: 7694 - DNA, 75 bp, synthetic construct
  source 1..75: mol_type = other DNA
ggggcatggcgcgtaacctatgcacggatgggctgcgagtcaccatcatggcaattgctacctgcgtcgttttac

SEQ ID NO: 7695 - DNA, 75 bp, synthetic construct
  source 1..75: mol_type = other DNA
ctgtttttccgccgtacggtgaatttccataccgaagaggtgatgctggacaaaattaccggaaaaacgccggtg

SEQ ID NO: 7696 - DNA, 75 bp, synthetic construct
  source 1..75: mol_type = other DNA
tgtatttaagatcaccaagcagagcaataaaacctggtccctgacgcatccggtggatgacgcaattaccctgct

SEQ ID NO: 7697 - DNA, 75 bp, synthetic construct
  source 1..75: mol_type = other DNA
acgcttgccggtgtgctttatcccgaactgaccggcggaaagctgacgatgaccacgctcaggctgatggcagag

SEQ ID NO: 7698 - DNA, 75 bp, synthetic construct
  source 1..75: mol_type = other DNA
attcaggagatcccgggagatattttcgcggcggcagcaacttacgacggtgaagtcattaccatttatccggac

SEQ ID NO: 7699 - DNA, 75 bp, synthetic construct
  source 1..75: mol_type = other DNA
cttcttcgtgattttgataatccgccctttaaaaaagtgccggcttactggtttcatccaggactgacttatctt

SEQ ID NO: 7700 - DNA, 75 bp, synthetic construct
  source 1..75: mol_type = other DNA
ggaaacgcgccggattcagcgtggcagggcacctcgtgttcaccaaaaactacacatccaaatctgcgtatgtcg

SEQ ID NO: 7701 - DNA, 75 bp, synthetic construct
  source 1..75: mol_type = other DNA
atggtgaattactgtcttatatcactggcgctgacacgacggattatggtccccaggccagtgcacgtctgttat

SEQ ID NO: 7702 - DNA, 75 bp, synthetic construct
  source 1..75: mol_type = other DNA
ataatcaacaacttaggattgaaaagaaatgtagctgcttacgtattcgaaggtgaacaaggcaaacgcgacagt

SEQ ID NO: 7703 - DNA, 75 bp, synthetic construct
  source 1..75: mol_type = other DNA
tgctggtggtctgtggtgcgcttagtctggggctgaatcattaccgcgataacgccatcacctacaaagcgcagc

SEQ ID NO: 7704 - DNA, 75 bp, synthetic construct
  source 1..75: mol_type = other DNA
ccacgcacagtatctggatggtcgccgtgaaatgatgcagtggtacgccgactacattgattcactctccagcca

SEQ ID NO: 7705 - DNA, 75 bp, synthetic construct
  source 1..75: mol_type = other DNA
accggcctgatgacccgcgataactacagaacggtaaataacattacccgggggaagcatccggaggcgaaacaa

SEQ ID NO: 7706 - DNA, 75 bp, synthetic construct
  source 1..75: mol_type = other DNA
aatgaagctgtagaggccgctgcggccgacggcgtgacgttctctgttccggttaccccacatactttccgccat

SEQ ID NO: 7707 - DNA, 75 bp, synthetic construct
  source 1..75: mol_type = other DNA
acccgattgagggcagtggctttgagatgaacggaaagggcagcagtgcccgcccgtcgctgacggtgtccaatc

SEQ ID NO: 7708 - DNA, 75 bp, synthetic construct
  source 1..75: mol_type = other DNA
ggacagcaacgactggctgccgtacaacgggccatgcagcagggggccgctaatgatgactggtttatgccggag

SEQ ID NO: 7709 - DNA, 75 bp, synthetic construct
  source 1..75: mol_type = other DNA
tcaatgagtgcactaaaacggagcaatccgcgctggtcgtgctctgggaaattgatctgacagaggtcggcggag

SEQ ID NO: 7710 - DNA, 75 bp, synthetic construct
  source 1..75: mol_type = other DNA
ctgttgtgggtggcgtggatacacataaagatctgcacgttgccgctgtcgtagatcagaacaataaagttctgg

SEQ ID NO: 7711 - DNA, 75 bp, synthetic construct
  source 1..75: mol_type = other DNA
tattgatgacggaatcagtaccgatggggagatgggtaaaatggttgtcactattctatctgcagtggcccaggc

SEQ ID NO: 7712 - DNA, 75 bp, synthetic construct
  source 1..75: mol_type = other DNA
ggcccccccgccgccaggctgggcgatgaaattcagcacaagagttttttgggggcgctggcaggggccgtgctg

SEQ ID NO: 7713 - DNA, 75 bp, synthetic construct
  source 1..75: mol_type = other DNA
acgtattaccattgtcagcaacagcgacatcatccggataaacgcagtgcccgtgcgcagcacgatgactggctg

SEQ ID NO: 7714 - DNA, 75 bp, synthetic construct
  source 1..75: mol_type = other DNA
ctgaggatgaaggtggaggaaggtgacgtcatcttggtgaagaaacttgaccgccttgggcgcgatactgctgac

SEQ ID NO: 7715 - DNA, 75 bp, synthetic construct
  source 1..75: mol_type = other DNA
ttgtacacaacggcaaggcttatgttactggcggtgttaaccagaatatcttcaatggctattttgaagatctca

SEQ ID NO: 7716 - DNA, 75 bp, synthetic construct
  source 1..75: mol_type = other DNA
tttattaacaaaatgtgggatggctctgtattgtctgtggacagaaagaatgaacccgaacagatgattgaaaat

SEQ ID NO: 7717 - DNA, 75 bp, synthetic construct
  source 1..75: mol_type = other DNA
ttcccgaagcagatcccgcttggtggtaaaaatgttgcctgggcacagtcagaggtaagcgcatggatggcggat

SEQ ID NO: 7718 - DNA, 75 bp, synthetic construct
  source 1..75: mol_type = other DNA
ctgccaaaaccaacgtcggcacctgcttcagtggagatcgtgttgtttcctccggataaccggatccgcgatctg

SEQ ID NO: 7719 - DNA, 75 bp, synthetic construct
  source 1..75: mol_type = other DNA
tccagtgaggatgaacggtattgtctgcatttttcgcctgaagcgcaaaaaatatttattgagcactataatgtt

SEQ ID NO: 7720 - DNA, 75 bp, synthetic construct
  source 1..75: mol_type = other DNA
tgagcttatcgacgtggtctaccaggacgatgacgatctggtggtgatttgcggtcgtgaactgctgtctgacaa

SEQ ID NO: 7721 - DNA, 75 bp, synthetic construct
  source 1..75: mol_type = other DNA
tcggtaaacaggcggaatcgctcatcggtaaggctggcagtatggcgactaaattcacgggtatgacgggggcgg

SEQ ID NO: 7722 - DNA, 75 bp, synthetic construct
  source 1..75: mol_type = other DNA
agacgaaatgcgtgcatagtcgaagtgcaattgccgaaaaaacagcgtctggttcgggtgattgaaaaagggtta

SEQ ID NO: 7723 - DNA, 75 bp, synthetic construct
  source 1..75: mol_type = other DNA
ttaataaacggggggatcaggatattccggctgaaacgccgtatgcgccgggagaacagtttcagggaggggaat

SEQ ID NO: 7724 - DNA, 75 bp, synthetic construct
  source 1..75: mol_type = other DNA
aaccacagggcattttcagtaaatcaccggcaacgccgctgcaggataaaacgaacactgcacacaacgtgaagg

SEQ ID NO: 7725 - DNA, 75 bp, synthetic construct
  source 1..75: mol_type = other DNA
caccatgaaagcgctggaaatggcatgggaaacccgtggtaagcccggcggggtgatgttccacagcgatcaggg

SEQ ID NO: 7726 - DNA, 75 bp, synthetic construct
  source 1..75: mol_type = other DNA
cagttctgtctgccctgaaagaaaatatttctgagagggtgagctggtttgacggtcgcccggtttttattgatg

SEQ ID NO: 7727 - DNA, 75 bp, synthetic construct
  source 1..75: mol_type = other DNA
ccagtgcaagcgtcagtgagctgaaaaaaaatccgatggcaactgtcagtgccggagaggggtatcctgttgcca

SEQ ID NO: 7728 - DNA, 75 bp, synthetic construct
  source 1..75: mol_type = other DNA
ggctccgcgcatatcacgttcagaaaaccagaactggttgacagactgaatgatattatcgcaaaacactatcct

SEQ ID NO: 7729 - DNA, 75 bp, synthetic construct
  source 1..75: mol_type = other DNA
tgtgatgacaacacacaggattaccccacaaaaactgacctgggcggtcgcagccatttactggtatcaacggag

SEQ ID NO: 7730 - DNA, 75 bp, synthetic construct
  source 1..75: mol_type = other DNA
gacttccgcgcccaggctgacgccatcaaaaaactgactgaacagtacaacgtgacatacatcggtatcgactca

SEQ ID NO: 7731 - DNA, 75 bp, synthetic construct
  source 1..75: mol_type = other DNA
gggggacgcaccggaagcctggcagtcagtggtgcactgctgtcctcaccctgcacgctggtgagtaatgaggtg

SEQ ID NO: 7732 - DNA, 75 bp, synthetic construct
  source 1..75: mol_type = other DNA
cgttccggatatcgccggagtcctcgcggtatacgccgaacgccgccaggaccgcaatgggccctatacctgcct

SEQ ID NO: 7733 - DNA, 75 bp, synthetic construct
  source 1..75: mol_type = other DNA
acccggtgtacacgccggcgcgaaaaatccacctgtaccactgcgaccatcgcggcctgccgctggcgctcatca

SEQ ID NO: 7734 - DNA, 75 bp, synthetic construct
  source 1..75: mol_type = other DNA
caacaaatcgtcatcagcgaaccgctgctggataacaccgggcaggtcaatcgccagacgctaaaaatcctgttt

SEQ ID NO: 7735 - DNA, 75 bp, synthetic construct
  source 1..75: mol_type = other DNA
cgggcgatcaatgatgcggagtcggtactggggacaacccggcgtcgccgtcgtccgctgggagtgaggttatga

SEQ ID NO: 7736 - DNA, 75 bp, synthetic construct
  source 1..75: mol_type = other DNA
atcatgggcatctatggctaacagctaccttgctgccgctggctcgtcagaacgtattgaccatcgttctcttca

SEQ ID NO: 7737 - DNA, 75 bp, synthetic construct
  source 1..75: mol_type = other DNA
ttcccctcagcgcagagcaacaggccgcatggcgggcggtggcggagacggaaaaacgccgccatcagggaaaca

SEQ ID NO: 7738 - DNA, 75 bp, synthetic construct
  source 1..75: mol_type = other DNA
attttcgcgggacgctcaattcccgccgtgaaggctcctggcatgacaccacgctcggtgcgattgttgaggcga

SEQ ID NO: 7739 - DNA, 75 bp, synthetic construct
  source 1..75: mol_type = other DNA
ccaaccgacgtgctgatgactcaggtaaatggatgtttaaggatggtgccgtgattaagcggatttatacggcag

SEQ ID NO: 7740 - DNA, 75 bp, synthetic construct
  source 1..75: mol_type = other DNA
gcccaccgctgtacggtttgttatacccattgatttctctggctcaggcctttcgtgtaattggacatgatgtag

SEQ ID NO: 7741 - DNA, 75 bp, synthetic construct
  source 1..75: mol_type = other DNA
atataacggtgggttgccaccaaatgaatcggaaaaccgatactggaaaaactctaaagcggtggccagtttttg

SEQ ID NO: 7742 - DNA, 75 bp, synthetic construct
  source 1..75: mol_type = other DNA
ggtcatcagaaggacatccggtcattgtttctaacagtgatacatccctgatccgttcgctgtatcgcaatttta

SEQ ID NO: 7743 - DNA, 75 bp, synthetic construct
  source 1..75: mol_type = other DNA
gcgaacgcatcaggtatcgtcggaaaaacctcaaacacacccaaaggtctcttgctaaagccctgaaaatctccc

SEQ ID NO: 7744 - DNA, 75 bp, synthetic construct
  source 1..75: mol_type = other DNA
ggaagcatttttattatgacaggataaataaagacgacatcgtgattaacgatatcgcggtttccctttcaaata

SEQ ID NO: 7745 - DNA, 75 bp, synthetic construct
  source 1..75: mol_type = other DNA
gtgcgcattgcctggaaaaaggaatatacacgcccgccgtggtggtggatcacattatcccaatcgatggcggta

SEQ ID NO: 7746 - DNA, 75 bp, synthetic construct
  source 1..75: mol_type = other DNA
accttctttgttgtctcctggattctggggcgtcagggtaaacaacagagcgaaaatgaagtcacaggtggtcgt

SEQ ID NO: 7747 - DNA, 75 bp, synthetic construct
  source 1..75: mol_type = other DNA
gcgagtcacttcgtctccttcgagagaaacaggcagagtcacgtctccaggtgtcctgcgggatttactggcaga

SEQ ID NO: 7748 - DNA, 75 bp, synthetic construct
  source 1..75: mol_type = other DNA
ccgcgattgggatcctgatgtgtttgtggaaggagctaaagaacgtattctgagcattgatttgaaaaagtcgtg

SEQ ID NO: 7749 - DNA, 75 bp, synthetic construct
  source 1..75: mol_type = other DNA
gcggccagtggtgatgtctggctctctgattgcggggtatttccatcagagcaggcgtatcgcgtatggcgtaag

SEQ ID NO: 7750 - DNA, 75 bp, synthetic construct
  source 1..75: mol_type = other DNA
aaaacgctacttcctgttttagatactatgttgtacaagtttgatgacaatgaaattataacttccgctattgat

SEQ ID NO: 7751 - DNA, 75 bp, synthetic construct
  source 1..75: mol_type = other DNA
cgactgaaagaaaagttaagtgagcttgctgatgaagacgggatcactcaggcacagatgcttgagtggctgata

SEQ ID NO: 7752 - DNA, 75 bp, synthetic construct
  source 1..75: mol_type = other DNA
atgacctacaaatacaaccccttctggcaacaacgtatccgtgagacggtgctgcgcgcactggatgttcatccc

SEQ ID NO: 7753 - DNA, 75 bp, synthetic construct
  source 1..75: mol_type = other DNA
taatgattctttagaaacatgtaagatgaagtgctccggaaataacattggacgttttattagatttgtattcac

SEQ ID NO: 7754 - DNA, 75 bp, synthetic construct
  source 1..75: mol_type = other DNA
gtaaaaatgttgcctgggcacagtcagaggtaagcgcatggatggcggatcgtataagtgcccgcggacggggat

SEQ ID NO: 7755 - DNA, 75 bp, synthetic construct
  source 1..75: mol_type = other DNA
catcgcggcctgccgctggcgctcatcagcacggaaggggcaacagcgtggtgcgcagaatatgatgaatggggc

SEQ ID NO: 7756 - DNA, 75 bp, synthetic construct
  source 1..75: mol_type = other DNA
agagaactgcaccattcaactgaaagccagacggaccagcagcacggtggtggtgaacacggtggcctctgaaaa

SEQ ID NO: 7757 - DNA, 75 bp, synthetic construct
  source 1..75: mol_type = other DNA
tggccagccaggacaggaagcgcattcgtgagtacattgcggagcagaacctgatggccgccattgaactggacg

SEQ ID NO: 7758 - DNA, 75 bp, synthetic construct
  source 1..75: mol_type = other DNA
agcagcgcgttgaagaagaacgccagcgtcatatccgtgctgcccgcgccaaaacgccgggcgtatcccgcgtgc

SEQ ID NO: 7759 - DNA, 75 bp, synthetic construct
  source 1..75: mol_type = other DNA
caatcagatcgctcctgagtccgggcaaattgcgcccgctctcgcacactttgggcaaaacgaaacaacgtcgcc

SEQ ID NO: 7760 - DNA, 75 bp, synthetic construct
  source 1..75: mol_type = other DNA
atgaaaacattacctgacacacacgtacgggaggcatcgtgctgcccgtctcccgtcaccatctggcatacactg

SEQ ID NO: 7761 - DNA, 75 bp, synthetic construct
  source 1..75: mol_type = other DNA
ccaacgtgacgacactggcgaaatcgtggcggtcgaggtggtcatgcgtggccgtcataaagaaatcgacggcgg

SEQ ID NO: 7762 - DNA, 75 bp, synthetic construct
  source 1..75: mol_type = other DNA
ttcgtcggtggaaatgtatctggtcagtgagtgtgtggagcatatcctgtccagtgggctggcctgcgatgtgct

SEQ ID NO: 7763 - DNA, 75 bp, synthetic construct
  source 1..75: mol_type = other DNA
ttaatgatgttactgtcacctggcgtaacgggcacacagcactgcgcgatgcatccttcacagtaccaggcggat

SEQ ID NO: 7764 - DNA, 75 bp, synthetic construct
  source 1..75: mol_type = other DNA
atgagcgtacgttcacaggcactggttcccctcagcacagagcaacaggccgcatggcgggcggtggcggagaca

SEQ ID NO: 7765 - DNA, 75 bp, synthetic construct
  source 1..75: mol_type = other DNA
attgatctttcaggaaaacgggcatctgcacaacgtaaagcgaaagatcgtattgatttagagcgacattatggt

SEQ ID NO: 7766 - DNA, 75 bp, synthetic construct
  source 1..75: mol_type = other DNA
atgtcagttacagagtctaaggcaaaaacggggcgtaaatccagccgtaaatcgtcaaaagaacaggaaaccgcc

SEQ ID NO: 7767 - DNA, 75 bp, synthetic construct
  source 1..75: mol_type = other DNA
cgtgttgcaggaaaaaatggattacccacatgggcactaatacctccaccatcacatgaagaacttattcaacag

SEQ ID NO: 7768 - DNA, 75 bp, synthetic construct
  source 1..75: mol_type = other DNA
ggctggcgggggcggcggtaggtggtggcgcgcttggtgcactgctggcaagcggtggcgatggcgactcgaaaa

SEQ ID NO: 7769 - DNA, 75 bp, synthetic construct
  source 1..75: mol_type = other DNA
ctgttgccggtgcgaccatatcgtgcaggcaccagtaccttcaaaacccattgcacgcagttatgccggagcggg

SEQ ID NO: 7770 - DNA, 75 bp, synthetic construct
  source 1..75: mol_type = other DNA
ccgaccgtctggcaacggcgattctggtgcacgccgggagaaccgctgaattcattaccggaaaacagcctgata

SEQ ID NO: 7771 - DNA, 75 bp, synthetic construct
  source 1..75: mol_type = other DNA
gcaggatttggcgggcaaatggcggagtggttgccaccggcgcagagtgccgatgcggccctgctgcccgcgttg

SEQ ID NO: 7772 - DNA, 75 bp, synthetic construct
  source 1..75: mol_type = other DNA
gagccaccggcggtctggttcgcctactcaccagacaggcagggaaaacatccggtacaacaccttcgtcccttc

SEQ ID NO: 7773 - DNA, 75 bp, synthetic construct
  source 1..75: mol_type = other DNA
gctataagccgcaactggctgaaggtagcgggcgcactcagaccgtgcgcatggtgctgattaccagcagcacgg

SEQ ID NO: 7774 - DNA, 75 bp, synthetic construct
  source 1..75: mol_type = other DNA
gcttctggccgcagcattttggcctcattccacagtgggtgaccctggagccccgtgtcttcggctggatggacc

SEQ ID NO: 7775 - DNA, 75 bp, synthetic construct
  source 1..75: mol_type = other DNA
gttaaaagttactatgatccctccatcgataaaatcctgaatccgctggatgcccgctgtgccgcctgggatttg

SEQ ID NO: 7776 - DNA, 75 bp, synthetic construct
  source 1..75: mol_type = other DNA
atggttacagtcgctgaactgcaggcgctgcgtcaggcgcgccttgatttattaaccggtaaacgggtggtgtct

SEQ ID NO: 7777 - DNA, 75 bp, synthetic construct
  source 1..75: mol_type = other DNA
ggtggtgtaaatcaccgaaaccgggtcagagcaaaacgtgggttttatttggtaaaaccaatcacggcaagctca

SEQ ID NO: 7778 - DNA, 75 bp, synthetic construct
  source 1..75: mol_type = other DNA
ggccattatggatatggatgtgaacgcgatgatgaccgtgatcccccgtatctccagtccggcactgactgcaca

SEQ ID NO: 7779 - DNA, 75 bp, synthetic construct
  source 1..75: mol_type = other DNA
ccgcgaacaggctgaagccgttgccgcacagtaccggaatgtctttatcgaggatgatcagggaacgcattttcg

SEQ ID NO: 7780 - DNA, 75 bp, synthetic construct
  source 1..75: mol_type = other DNA
tgatgaaatcgctcacgaaggaccgccggacaggctgactgtttcagccagaagcgcagattttcgggatgaatt

SEQ ID NO: 7781 - DNA, 75 bp, synthetic construct
  source 1..75: mol_type = other DNA
agaaaaatcatatcccggcagtctttagcgagagtacgatttccgataaaccagcgcgtcaggttgcgcgtgaaa

SEQ ID NO: 7782 - DNA, 75 bp, synthetic construct
  source 1..75: mol_type = other DNA
gaaaactggtttgaccgcacggtcagtgccgatgccgcaggcatcattctgacttcccttgtgattaaccgccag

SEQ ID NO: 7783 - DNA, 75 bp, synthetic construct
  source 1..75: mol_type = other DNA
ctggtaaatgagaaacgtcgggctgcgctgaatatgctctatatcgacccacagaacagcagccagattattgct

SEQ ID NO: 7784 - DNA, 75 bp, synthetic construct
  source 1..75: mol_type = other DNA
tcaccacccggccccgtcgtcgtgaaccattatgggccgtgaccgacgaaaccatgcgcaactggctgaagcagg

SEQ ID NO: 7785 - DNA, 75 bp, synthetic construct
  source 1..75: mol_type = other DNA
cagtcgatcttatcgaacagcagtgctggagtcgtgccacggacacctacggtgttaagcaccagcgaaaagaac

SEQ ID NO: 7786 - DNA, 75 bp, synthetic construct
  source 1..75: mol_type = other DNA
agaaagaagtgatgaacaagctcggtgtttcatcacgtcagacaatctggaactataccaaacggcacggatttc

SEQ ID NO: 7787 - DNA, 75 bp, synthetic construct
  source 1..75: mol_type = other DNA
tgcgcttagtctggggctgaatcattaccgtgataacgccataacctacaaagagcagcgcgataaaaaagtcag

SEQ ID NO: 7788 - DNA, 75 bp, synthetic construct
  source 1..75: mol_type = other DNA
agctggttctgccggccggaactctcaggctgaaaggtgaactgacaccggcgttattacagacacttatccgcg

SEQ ID NO: 7789 - DNA, 75 bp, synthetic construct
  source 1..75: mol_type = other DNA
tatctgctggctccggaagtgagtgccctgctccattacgtcccggatctgcgccgcaagatgctgctggccaca

SEQ ID NO: 7790 - DNA, 75 bp, synthetic construct
  source 1..75: mol_type = other DNA
tctgtatgatttgatgtaccgtgcaggcattcctctacgtaatatgcgtgtctgtgagccttttggcccggaaca

SEQ ID NO: 7791 - DNA, 75 bp, synthetic construct
  source 1..75: mol_type = other DNA
ccgctgctcggtgcaaaggtccttcccggtgaaaccgacatcgccctgcccggcccgctgccgttcattctctcc

SEQ ID NO: 7792 - DNA, 75 bp, synthetic construct
  source 1..75: mol_type = other DNA
gtcgtctaaacataatctgtcgcgagtgccggaagagcgaagttatgcagcgcatattgtcgttttatcagggaa

SEQ ID NO: 7793 - DNA, 75 bp, synthetic construct
  source 1..75: mol_type = other DNA
aagaggcccgtattccacaggcggtggtggcgagagctgtcgatgtttctgaggccacgctggcccagattgtga

SEQ ID NO: 7794 - DNA, 75 bp, synthetic construct
  source 1..75: mol_type = other DNA
ctcgggtacagcggcacgatgaaagtgacgcccgatcgcatcacggactacaaagcaccatcggcagaagaggct

SEQ ID NO: 7795 - DNA, 75 bp, synthetic construct
  source 1..75: mol_type = other DNA
tcagggcggcgtcgccgtcagaccttgcggaaaagctgacacataaactgaaagagggctggcagccgtttggta

SEQ ID NO: 7796 - DNA, 75 bp, synthetic construct
  source 1..75: mol_type = other DNA
atgcgcactgggctccagcggaaggagaaccaggaaccacggagcttatggcctggtatgcgcaagcgcaggtgg

SEQ ID NO: 7797 - DNA, 75 bp, synthetic construct
  source 1..75: mol_type = other DNA
gcgaaggtgatgtgccgaaagttgccgttgataccggcgctctcggtggaatgtacgccaggcgtattcatctga

SEQ ID NO: 7798 - DNA, 75 bp, synthetic construct
  source 1..75: mol_type = other DNA
ctttcctgcgcaagaggaacagtgctcaagtacaaccgagacagcaaaggcgagcgtcacgtaatagttaacggc

SEQ ID NO: 7799 - DNA, 75 bp, synthetic construct
  source 1..75: mol_type = other DNA
acaatggacaataatttccgcctggtgaatgtgtatatcaccgacatgaaaatcacggaaatcccacagaaataa

SEQ ID NO: 7800 - DNA, 75 bp, synthetic construct
  source 1..75: mol_type = other DNA
ctgaaaaaccgcaaataccagtgcgaacaggtgaactacgacacgtttatttcgtatccgcagcttgatgcctgg

SEQ ID NO: 7801 - DNA, 75 bp, synthetic construct
  source 1..75: mol_type = other DNA
gatgacgcccgttaccaggcaaaatacgtttcagttatctggcaaaaactgatcccgagtcaggctgatttttaa

SEQ ID NO: 7802 - DNA, 75 bp, synthetic construct
  source 1..75: mol_type = other DNA
gccggttacaagcctgccgtgaaaagccgtttcagtaagtcagccaatagcaaattctcccatactatcgctttt

SEQ ID NO: 7803 - DNA, 75 bp, synthetic construct
  source 1..75: mol_type = other DNA
gacgctgggtgattgaaggcgacctgtccagttacttcgacaccgtacatcatcgactgctgatgaaggctgtac

SEQ ID NO: 7804 - DNA, 75 bp, synthetic construct
  source 1..75: mol_type = other DNA
acgcctggacacggtatggggaaccgttttctgcgggccggtgtggaggtcgatcgatatggccgtgccgtcgcg

SEQ ID NO: 7805 - DNA, 75 bp, synthetic construct
  source 1..75: mol_type = other DNA
gatcccgatgggcacaaaagaggacccgttctggcagggttcaggacgtaccatttttgcggaagcggcgtacct

SEQ ID NO: 7806 - DNA, 75 bp, synthetic construct
  source 1..75: mol_type = other DNA
atacgctgcttgtcctgcagaagaagcaccggatacggtttgatgtctggcaggtcgttaaacgggatcacgcca

SEQ ID NO: 7807 - DNA, 75 bp, synthetic construct
  source 1..75: mol_type = other DNA
atgaagattgaatatacgccagaacgtgggcggggattcgttcgccctggtgagactggaaaaccacaaaattgg

SEQ ID NO: 7808 - DNA, 75 bp, synthetic construct
  source 1..75: mol_type = other DNA
tccccggagccactacgctgacccggttgatttcagaggtaagggaaaaggcgacgttgcgcctgtggaacaaac

SEQ ID NO: 7809 - DNA, 75 bp, synthetic construct
  source 1..75: mol_type = other DNA
cacattctggctgtacgaaagagtacactgctgcaaatcgacacacttatccggcaactggctgaaatatcagca

SEQ ID NO: 7810 - DNA, 75 bp, synthetic construct
  source 1..75: mol_type = other DNA
atgcgcagcgccttccgggttatccggacggtacgtgaaaagcatgcctgtactcagtgcgatgccatcgtgcag

SEQ ID NO: 7811 - DNA, 75 bp, synthetic construct
  source 1..75: mol_type = other DNA
tgctaatattgtttcttatgaaaatatagataaaataacaaatcattatgatttcatactttgcgcaaacgtgct

SEQ ID NO: 7812 - DNA, 75 bp, synthetic construct
  source 1..75: mol_type = other DNA
aggtccagcggcggaggaactctttgatccggttcctgaacaggatctatttgaggcgctaaatgaaaccttaac

SEQ ID NO: 7813 - DNA, 75 bp, synthetic construct
  source 1..75: mol_type = other DNA
gtcgctgtttaacacgatgaacggcaacggcggtgacatgagtgccgaagctgcagggattgcggtctgtctgat

SEQ ID NO: 7814 - DNA, 75 bp, synthetic construct
  source 1..75: mol_type = other DNA
cagatcgacattattaccttccgaaagagtcatcttacaccccggggcggtgggaaacactgccgtttcaggttg

SEQ ID NO: 7815 - DNA, 75 bp, synthetic construct
  source 1..75: mol_type = other DNA
cagaggtcaaaaaaacacggtgttttccgggtgctgccggtaaaaggcgcatctgtctatggcaagccggtgatc

SEQ ID NO: 7816 - DNA, 75 bp, synthetic construct
  source 1..75: mol_type = other DNA
ttaagttgttacttatatctatagctacttgctctattggaatagtggttagtatctggcttatagctcgggaac

SEQ ID NO: 7817 - DNA, 75 bp, synthetic construct
  source 1..75: mol_type = other DNA
aatgatagtcattgaggatttgaaggtcagcaacatgtcaaagtcagcagcgggtacggtcagccagccggggcg

SEQ ID NO: 7818 - DNA, 75 bp, synthetic construct
  source 1..75: mol_type = other DNA
cctatggtacttctgcgggcagtgcgggttactggtttctacagtggttggatcaggttactccgtcacagtggg

SEQ ID NO: 7819 - DNA, 75 bp, synthetic construct
  source 1..75: mol_type = other DNA
caaccgccacactgacttttattgcgcatgatgcagcaggtaatcctgttgtcgggctggtgctctcgacgcgtc

SEQ ID NO: 7820 - DNA, 75 bp, synthetic construct
  source 1..75: mol_type = other DNA
accatgccaaaaacccgcaatcagcggggcgtgtatctgtgtgaagtggggacggacaccgcaaaagaaattctc

SEQ ID NO: 7821 - DNA, 75 bp, synthetic construct
  source 1..75: mol_type = other DNA
aaggcgtgaaggtggtgaaggacagcgccagtctggggccgcagataattacagctgtatcgaccatcgcatctg

SEQ ID NO: 7822 - DNA, 75 bp, synthetic construct
  source 1..75: mol_type = other DNA
gacatatgacgcgccatgcgtctttttttgtgtcgcaatcaacgccacagagcgccagattatggtgtggtgtgt

SEQ ID NO: 7823 - DNA, 75 bp, synthetic construct
  source 1..75: mol_type = other DNA
tgttacgcccaaaacgtcgccgctgggttaatgaaaagtacacgcgctgggttaagacacagccgtgtgcatgtt

SEQ ID NO: 7824 - DNA, 75 bp, synthetic construct
  source 1..75: mol_type = other DNA
tgccttacggtggcatgcccgaggcagacagcctcaagcacccgcagcaattctacttaactctcgctttaccgc

SEQ ID NO: 7825 - DNA, 75 bp, synthetic construct
  source 1..75: mol_type = other DNA
cattaacccggatgaagggggctgccatgcgactgaccgggatgctgtaccggaatccggatcttgcggagcggg

SEQ ID NO: 7826 - DNA, 75 bp, synthetic construct
  source 1..75: mol_type = other DNA
gaaatgctggatgtcagtgccagtgcgggaaatggccttatccagggcggtgatgtcattgatgtgattcatgcc

SEQ ID NO: 7827 - DNA, 75 bp, synthetic construct
  source 1..75: mol_type = other DNA
tgatgaaacagatccagcagctggacaaatagccccggctctcgcacacattgggcaagactcaacaaccttgca

SEQ ID NO: 7828 - DNA, 75 bp, synthetic construct
  source 1..75: mol_type = other DNA
gacatgtaccgattatccggcatgttcacaaaattaattcaattggatgaattttccgggcaacacccaattcac

SEQ ID NO: 7829 - DNA, 75 bp, synthetic construct
  source 1..75: mol_type = other DNA
atgcgtgatatgtatgaagtaatggatcgttggggagcttgggctgcttcagacaatagcggagtggactggcag

SEQ ID NO: 7830 - DNA, 75 bp, synthetic construct
  source 1..75: mol_type = other DNA
aatgcacaggtagctttgttaaatacacagttaagcgagtttgccccaaccatgccccataacgaagcaatgaaa

SEQ ID NO: 7831 - DNA, 75 bp, synthetic construct
  source 1..75: mol_type = other DNA
tcacactcatccggtgttatggtgtcagtctcattcatctggatgccagtgccggatatctgccgggtttaccca

SEQ ID NO: 7832 - DNA, 75 bp, synthetic construct
  source 1..75: mol_type = other DNA
tggcaggtaagcattgctgctctgatggttatatcgggaaaaggttacagaaggctgagggcataattgaaggga

SEQ ID NO: 7833 - DNA, 75 bp, synthetic construct
  source 1..75: mol_type = other DNA
aatgtgattgtgaccgactttaccggtgattttgacctgctcatcgtgccggtgctggcgtggctgcgggaaaat

SEQ ID NO: 7834 - DNA, 75 bp, synthetic construct
  source 1..75: mol_type = other DNA
atgcagaccttcttcccgaatatcccggtggccacaccgaccaccttcctggtcaacgtcaacacgcttgaggca

SEQ ID NO: 7835 - DNA, 75 bp, synthetic construct
  source 1..75: mol_type = other DNA
cgactccgcttgaaaaccgtaaacgctggattttcggtgcgccgccggcgggtgaaatcacggtagatgaagggg

SEQ ID NO: 7836 - DNA, 75 bp, synthetic construct
  source 1..75: mol_type = other DNA
atgaatcagactttacccactgctgacctgaatactgccggcacgacagatgttattccgtctgtggctatcgac

SEQ ID NO: 7837 - DNA, 75 bp, synthetic construct
  source 1..75: mol_type = other DNA
atgcaatatgcgaaacctgtcactctgaatgttgaagaatgcgaccgcctcttctttctgccttacctgtttggc

SEQ ID NO: 7838 - DNA, 75 bp, synthetic construct
  source 1..75: mol_type = other DNA
gatgaagtgactggaagaatgataacgcgggatagtccaccgataccgggaaaacaatcactggcgaaaggctca

SEQ ID NO: 7839 - DNA, 75 bp, synthetic construct
  source 1..75: mol_type = other DNA
caatcatgccgttcattgcacagcagtttccattcttaaccgaccgatccccgctattcactacatgattgcggc

SEQ ID NO: 7840 - DNA, 75 bp, synthetic construct
  source 1..75: mol_type = other DNA
gaacaccgccactggatgatacctctcagaaagggagcgcaatatgaagagatcagaaaactgggtaaaggcgat

SEQ ID NO: 7841 - DNA, 75 bp, synthetic construct
  source 1..75: mol_type = other DNA
gaagacggcttacgccaccatcaaaggtattgaggtgatgcgtgcactacgcaaaggccaggcctcagcatttta

SEQ ID NO: 7842 - DNA, 75 bp, synthetic construct
  source 1..75: mol_type = other DNA
ggtcgcttttcttaccagataaacccgatgccgttcgggtgcggcaatccacttaccaacatgtttaaccagcta

SEQ ID NO: 7843 - DNA, 75 bp, synthetic construct
  source 1..75: mol_type = other DNA
tgctgaccgtcgctcgcagatgaacctgaagcaggatgaacggctgtccggtgagctgataaccggacgtcgtca

SEQ ID NO: 7844 - DNA, 75 bp, synthetic construct
  source 1..75: mol_type = other DNA
aacttgatgcctgcctttacggacaattttccacggtaccagtcgtacgtcctgaaagcaccgttatatccgaag

SEQ ID NO: 7845 - DNA, 75 bp, synthetic construct
  source 1..75: mol_type = other DNA
acccgtcaggtgaagtcacacccagtaaggctgaccgccttattacggaacgtctggtacaggcactggccctgg

SEQ ID NO: 7846 - DNA, 75 bp, synthetic construct
  source 1..75: mol_type = other DNA
gcttaaccgggcgatcaatgatgcggagtcggtactggggacaacccggtgtcgccgtcgtccgctgggagtgag

SEQ ID NO: 7847 - DNA, 75 bp, synthetic construct
  source 1..75: mol_type = other DNA
gaacaggtgatccctgaaaatgagggtggttggtggatacgtgaagtgggtctgtttgatgagtccggggcattg

SEQ ID NO: 7848 - DNA, 75 bp, synthetic construct
  source 1..75: mol_type = other DNA
aacctggttttgcgcacgttatgcctggtattgccaacagatgatgcaaaccagagaacttgaattagaacactg

SEQ ID NO: 7849 - DNA, 75 bp, synthetic construct
  source 1..75: mol_type = other DNA
tgattgcagccactctgctgcagggctgtaccagtttccgacaggcagagaacaccagaaaagacgccgttgctg

SEQ ID NO: 7850 - DNA, 75 bp, synthetic construct
  source 1..75: mol_type = other DNA
gaacgcaaggcgacactgatttccctttacccggaagaccagcaggaggcggtcgcccgtaccctgacgctggaa

SEQ ID NO: 7851 - DNA, 75 bp, synthetic construct
  source 1..75: mol_type = other DNA
accgaacgcataacccggttgttccatattcgctggctggcaggcgtatttctgacgattgccggaatgatcatc

SEQ ID NO: 7852 - DNA, 75 bp, synthetic construct
  source 1..75: mol_type = other DNA
ccgcgctttttagcggatgatccccaggctgtggccgatttatcgcgttttgaaaatgggcaagaattaccgcca

SEQ ID NO: 7853 - DNA, 75 bp, synthetic construct
  source 1..75: mol_type = other DNA
gaaggccgaaaagattgacgatgattcggcgctgaaaggcaaatgggcgctgtttgcgaaaatcaccccgaccga

SEQ ID NO: 7854 - DNA, 75 bp, synthetic construct
  source 1..75: mol_type = other DNA
aacaaaaagcaagcgtgccgcaggtggatttcgtgaagaggaagaacgggccgctaaccgcaataactggatgta

SEQ ID NO: 7855 - DNA, 75 bp, synthetic construct
  source 1..75: mol_type = other DNA
cgcctgtaactgatgacatcagcagagcactggcttttgccattaagtgggtggcggtcggtgttgctgtgtccc

SEQ ID NO: 7856 - DNA, 75 bp, synthetic construct
  source 1..75: mol_type = other DNA
ttctactggcggtttgtggaaatggggaccgtgaatatgccaccgcacccgtttgtgcgcccggcgtttgatgtg

SEQ ID NO: 7857 - DNA, 75 bp, synthetic construct
  source 1..75: mol_type = other DNA
acgctggttggcggatgtattgggctgattttgtatttgctgtcgcagctcccggctttgttccccctcggcaat

SEQ ID NO: 7858 - DNA, 75 bp, synthetic construct
  source 1..75: mol_type = other DNA
catgggtggcctgcaggcggtgcgtgcgccgttcttcccgccgaatgcgctgctgatcacccgtctggataacct

SEQ ID NO: 7859 - DNA, 75 bp, synthetic construct
  source 1..75: mol_type = other DNA
tgatccggctattgagtacgtacaaacgcactctgcaccacagccaataccggcccgcatcaatcgttttgttac

SEQ ID NO: 7860 - DNA, 75 bp, synthetic construct
  source 1..75: mol_type = other DNA
attgcagcagaagcgaacagccgtcttgcccggcagcaaatggaacaaatgctcagtctgcaggagaaaattatt

SEQ ID NO: 7861 - DNA, 75 bp, synthetic construct
  source 1..75: mol_type = other DNA
ccgatgaccatccgatagtcttgttcggtattcgcaaatcacttgagcaaattgagtgggtgaatgttgtcggcg

SEQ ID NO: 7862 - DNA, 75 bp, synthetic construct
  source 1..75: mol_type = other DNA
cacggtgtcgtcaacgtgaccgataaagggcattggaatttcctcggaacgggcgaagctttccgctatatctat

SEQ ID NO: 7863 - DNA, 75 bp, synthetic construct
  source 1..75: mol_type = other DNA
cggtggcgaacgataacgactttggcgtgaaggtggcgatgcaacatccggtcgagggcaagacattcaaggatt

SEQ ID NO: 7864 - DNA, 75 bp, synthetic construct
  source 1..75: mol_type = other DNA
atgatgcacttaaaaaacattactgctggcaaccctaaaacaaaagagcaataccagctaacaaagcaatttaac

SEQ ID NO: 7865 - DNA, 75 bp, synthetic construct
  source 1..75: mol_type = other DNA
caggttaatggcgatgaaccctatatcgaaattatttgtatggattcagaagctgaaattcagaaagcagattaa

SEQ ID NO: 7866 - DNA, 75 bp, synthetic construct
  source 1..75: mol_type = other DNA
aaagatgatttgacacagctttgtaaagattcgggcttaactcaaaaagaaatgatagagcactggattttgaaa

SEQ ID NO: 7867 - DNA, 75 bp, synthetic construct
  source 1..75: mol_type = other DNA
tctccgccatgcccggagagttttcagtcaaggttgccggtggcacggtggcatttattgaaagccctttccgcc

SEQ ID NO: 7868 - DNA, 75 bp, synthetic construct
  source 1..75: mol_type = other DNA
gtaaaattgatgatgcggcagctgaaaaactcagtaaaacagcacaggcaccgtcatccccaaacgacccgaccc

SEQ ID NO: 7869 - DNA, 75 bp, synthetic construct
  source 1..75: mol_type = other DNA
ttccggacgagcggcttcgcaaagttgctaaaccggtagaagaagtgaatgcagaaattcggcgtatcgtcgatg

SEQ ID NO: 7870 - DNA, 75 bp, synthetic construct
  source 1..75: mol_type = other DNA
tttcttccgtgaacctcctttctctggccagccttgcccggcagaagcatccggcctgtcagattgtccttgccg

SEQ ID NO: 7871 - DNA, 75 bp, synthetic construct
  source 1..75: mol_type = other DNA
agacagaagcagagcttgctcaggcaaaagagaatatggctggcagagccgacccggttgagcgttcacgtctca

SEQ ID NO: 7872 - DNA, 75 bp, synthetic construct
  source 1..75: mol_type = other DNA
tcattgccctgctggtggcctgtggtgcgcttagtctggggctgaatcattaccgtgataacgccattacctaca

SEQ ID NO: 7873 - DNA, 75 bp, synthetic construct
  source 1..75: mol_type = other DNA
gcagaacagcagccagattattgccgaacaggtgatccctgaaaacgagggcggttggtggatacgtgaagtggg

SEQ ID NO: 7874 - DNA, 75 bp, synthetic construct
  source 1..75: mol_type = other DNA
tgccggaaaaaaccatgccgtttgacctgctgacggttctgccgacccgcctggatgttgaagtgaatggcttta

SEQ ID NO: 7875 - DNA, 75 bp, synthetic construct
  source 1..75: mol_type = other DNA
agaaaaaacaacaacacgtcctgttcgtaagcccttgccttcacctcttccccgtgctgaaaaggttatcccgcc

SEQ ID NO: 7876 - DNA, 75 bp, synthetic construct
  source 1..75: mol_type = other DNA
ttaacgcttacctgcagcaactggcacgtctgaacggtgtggcagttgaagaactgtccagcaagttcactgtag

SEQ ID NO: 7877 - DNA, 75 bp, synthetic construct
  source 1..75: mol_type = other DNA
aaggtgtgaaggtggtgaaagatagtgccagcctgtggccgcagatcatcacggcggttttgtctgccggtactg

SEQ ID NO: 7878 - DNA, 75 bp, synthetic construct
  source 1..75: mol_type = other DNA
gaccggcgggactgtcggtagcctgtcatcctatcagaatggagaaatgattagcaccagttcaggtctggtttt

SEQ ID NO: 7879 - DNA, 75 bp, synthetic construct
  source 1..75: mol_type = other DNA
tctgatgactgagcgatggtatccgtcactggagccctgccggctcatttattacagcggtagctggtatctgat

SEQ ID NO: 7880 - DNA, 75 bp, synthetic construct
  source 1..75: mol_type = other DNA
actcttcaggggatattccgtggcatgagctgccagcttcacacaagggaaacaatcagatgagtttgcctttac

SEQ ID NO: 7881 - DNA, 75 bp, synthetic construct
  source 1..75: mol_type = other DNA
aaaaatattttaaccggagcagactttaaacaaccaagaatgaaaagtttgctcgaaaagctttgggatattttg

SEQ ID NO: 7882 - DNA, 75 bp, synthetic construct
  source 1..75: mol_type = other DNA
ctgaaacggcagcggaacagagcgcctcagctgcggcagactctgagacagcagctgcatcatcggcccgtgagg

SEQ ID NO: 7883 - DNA, 75 bp, synthetic construct
  source 1..75: mol_type = other DNA
gaaaaagtatcgggtgttgctgaaccgtgttgatacatcaactgcaccggatattgaatggccagccctaccgta

SEQ ID NO: 7884 - DNA, 75 bp, synthetic construct
  source 1..75: mol_type = other DNA
gaaaataatacgcattgagatacagatggctgagggatttatagaaggttgtctagctattctaaatgttagctt

SEQ ID NO: 7885 - DNA, 75 bp, synthetic construct
  source 1..75: mol_type = other DNA
tgcgtgaaaaggcagagaaagcaacgtgtggtgtgtggtcgctcgaatatggagagggccgatttgatggtgatg

SEQ ID NO: 7886 - DNA, 75 bp, synthetic construct
  source 1..75: mol_type = other DNA
tgactttccgtaaagagctggaaaaaattctgcgtgacccggcactgagtcagacgctgcgtgatgaactgcgtg

SEQ ID NO: 7887 - DNA, 75 bp, synthetic construct
  source 1..75: mol_type = other DNA
gttgcacgacatttggacgatggattaacgcttgaagtaaatcgcacatgtaccacaggagaacgcaacgctaac

SEQ ID NO: 7888 - DNA, 75 bp, synthetic construct
  source 1..75: mol_type = other DNA
aaacaggaattgcgccggaaattcatactggcgatgatgatgcactgaaggagattttaactcatgtcaccgagg

SEQ ID NO: 7889 - DNA, 75 bp, synthetic construct
  source 1..75: mol_type = other DNA
gtattgttcagcgggccatgctgatggcgatggagccgatatgggagagtgattttcatacgctctcatatggct

SEQ ID NO: 7890 - DNA, 75 bp, synthetic construct
  source 1..75: mol_type = other DNA
ggactatatgcagcggctgaacgaatgggagagcgccttcgtggaattgcagaaaatgttttcgcttacgcaacg

SEQ ID NO: 7891 - DNA, 75 bp, synthetic construct
  source 1..75: mol_type = other DNA
ttctggagcgtatccgcagactgaccccaccacatgtaaccgccccattcagaacggttgcggagtggcgcgagt

SEQ ID NO: 7892 - DNA, 75 bp, synthetic construct
  source 1..75: mol_type = other DNA
gcgttaaaagcgcaattacaggagatgtgtgacgctgaaggtgttactcaggctgagatgattgctgaactgata

SEQ ID NO: 7893 - DNA, 75 bp, synthetic construct
  source 1..75: mol_type = other DNA
tgactttttgggtcggttttgttgcgggatgcacacctttacacccttcagattgccacaaaactactgctacag

SEQ ID NO: 7894 - DNA, 75 bp, synthetic construct
  source 1..75: mol_type = other DNA
ctcgaaacgtgggaggacggtcacacactctgggcaagcgtgaacatgatcagcagcaaggaggccatttcatcg

SEQ ID NO: 7895 - DNA, 75 bp, synthetic construct
  source 1..75: mol_type = other DNA
acgacgggcgcaaagttgatacaggacgtaagttgctgtccgcacaaggggcaacgctgttaagaacagcaatgc

SEQ ID NO: 7896 - DNA, 75 bp, synthetic construct
  source 1..75: mol_type = other DNA
atggtctatgaccataacggcgttattatttgtattgaaaaggatgtttcagcaattaatccggaaggcgcaagc

SEQ ID NO: 7897 - DNA, 75 bp, synthetic construct
  source 1..75: mol_type = other DNA
aggttgggaagatatagaggattttggggaaacacatctcgattttttgaagcaatatggtgattttgaaaatgg

SEQ ID NO: 7898 - DNA, 75 bp, synthetic construct
  source 1..75: mol_type = other DNA
atgtttatacgtgcgaaattgtcggctacgccatgggagagcgcatgacaaaagagctgacaggtaaagctctgt

SEQ ID NO: 7899 - DNA, 75 bp, synthetic construct
  source 1..75: mol_type = other DNA
ctggggcgcagcagccgctggtacaaaagtgaagtggagcagtggatgcagcaacgaatcgaggaatcccggggg

SEQ ID NO: 7900 - DNA, 75 bp, synthetic construct
  source 1..75: mol_type = other DNA
cgcagaaggataagttcggcgcgggtaagaacggttttacccgtggtaacccccagacaggcacgcctgccaccg

SEQ ID NO: 7901 - DNA, 75 bp, synthetic construct
  source 1..75: mol_type = other DNA
atgcagtaaacatgctggtaggaaagaaaggacttcgctatgacgatgcatacaatatggttcatcagcgttttg

SEQ ID NO: 7902 - DNA, 75 bp, synthetic construct
  source 1..75: mol_type = other DNA
acgaacatggtcgggtacgggtgaagtttcactgggaccgttatcacgggatgacggaggagagttcgtgctggg

SEQ ID NO: 7903 - DNA, 75 bp, synthetic construct
  source 1..75: mol_type = other DNA
aagccatgacccgttcatgccgatggtgtcaggccaacccggaaaaattcaccattttcgtggagagcggcaaca

SEQ ID NO: 7904 - DNA, 75 bp, synthetic construct
  source 1..75: mol_type = other DNA
acgggctgtttccttttgccggagtcgcacaaaggcgaacgccggccgttacgccgggaggctctcaacccgctc

SEQ ID NO: 7905 - DNA, 75 bp, synthetic construct
  source 1..75: mol_type = other DNA
atgcgcatcagcaacatcgaatggctgaagaaacggatcggattcatcaggaagctcggagaacagaccgcacga

SEQ ID NO: 7906 - DNA, 75 bp, synthetic construct
  source 1..75: mol_type = other DNA
accgcgaagactggaagcgtatctcggcatcaatgcgcaaacagcctgatgcccttcgctacgaccgccagacta

SEQ ID NO: 7907 - DNA, 75 bp, synthetic construct
  source 1..75: mol_type = other DNA
gtacatcacggcacagcaccggctggggcgcgacatccgtctgtctgccatttatgccgctttgcatgtggaagg

SEQ ID NO: 7908 - DNA, 75 bp, synthetic construct
  source 1..75: mol_type = other DNA
tgcgtgaggcggcagagcgtgcaattccggcaatggaacgcctgttaatgttgccagttgatgatgatctgataa

SEQ ID NO: 7909 - DNA, 75 bp, synthetic construct
  source 1..75: mol_type = other DNA
taaatcttacacctaatgccagtaatacagtgcagcctgtggcactgatgcggcttggggtgtttgttcccacgc

SEQ ID NO: 7910 - DNA, 75 bp, synthetic construct
  source 1..75: mol_type = other DNA
catggcaacattcggcggacatatcgttgaagcgttgatgaaaatgccagaagttaacgccatgtatcctgaact

SEQ ID NO: 7911 - DNA, 75 bp, synthetic construct
  source 1..75: mol_type = other DNA
tacttacggctggttttcaatggttataaaaaagccagttttgtgctggctaaaaaacttgagcaatgcacgtca

SEQ ID NO: 7912 - DNA, 75 bp, synthetic construct
  source 1..75: mol_type = other DNA
cggcgagcctcctgccgtgaccgcgccgctggagcagatagaccatacggtcatcgacctgatcgtggtcgatga

SEQ ID NO: 7913 - DNA, 75 bp, synthetic construct
  source 1..75: mol_type = other DNA
ctaccaacattaaacttgcctggttggaggatggtgacgtgaaaacgttaatcagccctaacagctttaaaccgg

SEQ ID NO: 7914 - DNA, 75 bp, synthetic construct
  source 1..75: mol_type = other DNA
aagaccccacaaggcgctcgcactaatgacgcccgtggaatatattttaaaagagaataaaaattgcaatatgtg

SEQ ID NO: 7915 - DNA, 75 bp, synthetic construct
  source 1..75: mol_type = other DNA
gcagaatgatcgctgccgcacatgataaaatgcggatgatacctgtgcgtctgggatcgcgggggaaggcactgc

SEQ ID NO: 7916 - DNA, 75 bp, synthetic construct
  source 1..75: mol_type = other DNA
ccaccggcacaacaggcttttgccagagccgcgctgacgtaccgcttcggggaagagcaccagccggtgacggaa

SEQ ID NO: 7917 - DNA, 75 bp, synthetic construct
  source 1..75: mol_type = other DNA
caaatcgccgggctgatatttcgggtaaatggatgttcaaagatggcgtagtgataaagcgaacttataccgagg

SEQ ID NO: 7918 - DNA, 75 bp, synthetic construct
  source 1..75: mol_type = other DNA
cagtccccggattgccgacaggatcaccgatggcgggcgcaactggttgtcgtttaactggcccagctaccgttc

SEQ ID NO: 7919 - DNA, 75 bp, synthetic construct
  source 1..75: mol_type = other DNA
tttcagtaccaccattaacaatgcgctggcactaaaagcaccgttgtcgagtccggcactcaccggaacgccaac

SEQ ID NO: 7920 - DNA, 75 bp, synthetic construct
  source 1..75: mol_type = other DNA
aatgtatgtgctgattttgaagctgaactggttgaaatggatggcgaaccagatcacgtccatttgttaattaac

SEQ ID NO: 7921 - DNA, 75 bp, synthetic construct
  source 1..75: mol_type = other DNA
ttacggacacactggggctggtgacgtcattcagctatgcaggagacaagaatcgccagctgacccgttacagcg

SEQ ID NO: 7922 - DNA, 75 bp, synthetic construct
  source 1..75: mol_type = other DNA
gaaagaaatggccggagacccggaattacagaaatggcgggagaaatatctggatatttacccgcaggaccctgt

SEQ ID NO: 7923 - DNA, 75 bp, synthetic construct
  source 1..75: mol_type = other DNA
aaactggcctgagccttacattaagatcaacggtaattgctctataattggtacagtgattttctcaggaaaacc

SEQ ID NO: 7924 - DNA, 75 bp, synthetic construct
  source 1..75: mol_type = other DNA
cgcgtctggcgggtgccaaaagtggcggtgtgtttcaggcggtgctgggtgcggcgctgattgcggtggcatggt

SEQ ID NO: 7925 - DNA, 75 bp, synthetic construct
  source 1..75: mol_type = other DNA
tgtaccggtcgaaccagaatccgatccgatgaacgtcaattttgacaagctgtcccctgaagtacagaacgcagt

SEQ ID NO: 7926 - DNA, 75 bp, synthetic construct
  source 1..75: mol_type = other DNA
gactctctgttaccgctttcacggttgaatgccacccgtctgattgttcgtttcccggacggaacgcttattgat

SEQ ID NO: 7927 - DNA, 75 bp, synthetic construct
  source 1..75: mol_type = other DNA
agatggaactataagaaaggagctgcaaactgcattaggctttattgatggatgtatatgcttgattctatcata

SEQ ID NO: 7928 - DNA, 75 bp, synthetic construct
  source 1..75: mol_type = other DNA
gaaaaaactggtatgaggaagtgaagaactttcagccagacacaataaagattgtttacgatgaaaataatatta

SEQ ID NO: 7929 - DNA, 75 bp, synthetic construct
  source 1..75: mol_type = other DNA
gaagcatgggaacgctacagtgttctggtcagccgtgtggatacggcaaatcctgaatggccacaaaagcctgaa

SEQ ID NO: 7930 - DNA, 75 bp, synthetic construct
  source 1..75: mol_type = other DNA
accgttctctgctctgttgtctgttaacggcgagcgtaactcccagaagtcactggcagaatggattgaagactg

SEQ ID NO: 7931 - DNA, 75 bp, synthetic construct
  source 1..75: mol_type = other DNA
atcgggtaggttactgcgacgagatcgaccagatattgcagtcaggtattactacaaaggcgttttgtggagtcc

SEQ ID NO: 7932 - DNA, 75 bp, synthetic construct
  source 1..75: mol_type = other DNA
agcggtgcagtcacaccgctttatcgccgcgccacaaatgaaggtattcagctgtttctggccggaagtgccgga

SEQ ID NO: 7933 - DNA, 75 bp, synthetic construct
  source 1..75: mol_type = other DNA
cagcaattattaatctgggagacagtaatgcaactatcgggaagacggactctccattattcaataccttaatga

SEQ ID NO: 7934 - DNA, 75 bp, synthetic construct
  source 1..75: mol_type = other DNA
atggctacgtggcaacagggtattaattctggtgggtttcttgctggcatcggtgcgcaaaatgagaatgcgcca

SEQ ID NO: 7935 - DNA, 75 bp, synthetic construct
  source 1..75: mol_type = other DNA
tgatgcgtctgccggagtggccggaggagcgactggcagagttgctgcctcttgagggatttaccttctccgggt

SEQ ID NO: 7936 - DNA, 75 bp, synthetic construct
  source 1..75: mol_type = other DNA
ggcaaactttacccttgaaaataacggtattgccatcactcaggccaatggcgaagcgcatgtcaccctcaaagg

SEQ ID NO: 7937 - DNA, 75 bp, synthetic construct
  source 1..75: mol_type = other DNA
aaaagccgctgttgccttcttggggactgcgattgacagtgctcatcctaaagtactggctctgcagagttcagc

SEQ ID NO: 7938 - DNA, 75 bp, synthetic construct
  source 1..75: mol_type = other DNA
acaatatgcgttttggtctggagttggagaagtcggcgtttgggagatataacatagacaactctataaatgcta

SEQ ID NO: 7939 - DNA, 75 bp, synthetic construct
  source 1..75: mol_type = other DNA
cgttgcgtaaatatggttgccgatctgtggcatgcgcctgcgccgaaaaatggtcaggccgttggcaccaacacc

SEQ ID NO: 7940 - DNA, 75 bp, synthetic construct
  source 1..75: mol_type = other DNA
ggatgtttctggccgggcgaggagcctttccgctgtttgccctggtgtgggggctgaatctgtcccgtcatgcgc

SEQ ID NO: 7941 - DNA, 75 bp, synthetic construct
  source 1..75: mol_type = other DNA
aagaatcagcacatcaaactgcccttccctggcaggaagcactatcgatcccccttttaacgtgtctgacagaac

SEQ ID NO: 7942 - DNA, 75 bp, synthetic construct
  source 1..75: mol_type = other DNA
cccctgagcaactggaagacgccaagcgtctgaaaagtatttttaacgctaaaaagaaagagttaggcctgtcgc

SEQ ID NO: 7943 - DNA, 75 bp, synthetic construct
  source 1..75: mol_type = other DNA
gtacgttcttcattgcgcgtgaacacacccaggcagaatatcgctggattgaaatgttcgggcatggcaagcgaa

SEQ ID NO: 7944 - DNA, 75 bp, synthetic construct
  source 1..75: mol_type = other DNA
acctggcctgcggtacagaatgaccgttacggctcccgactgtggctgcttcagcgcagcaaactgaccaatcag

SEQ ID NO: 7945 - DNA, 75 bp, synthetic construct
  source 1..75: mol_type = other DNA
ttactccagaaaatctcgcattagcattaacaggaaagtcagacctgccagtagagctaaagctgcgaaatgttg

SEQ ID NO: 7946 - DNA, 75 bp, synthetic construct
  source 1..75: mol_type = other DNA
cgccacgctgttccgtcgcaagtattacattaacggcagtcatgcgggctttatcatgtacatgaccgatgccgc

SEQ ID NO: 7947 - DNA, 75 bp, synthetic construct
  source 1..75: mol_type = other DNA
cgctggccgatgttccggcacccgtaattaacggagaaagcgtcaatctctggcactggcgcaatgctgtttata

SEQ ID NO: 7948 - DNA, 75 bp, synthetic construct
  source 1..75: mol_type = other DNA
agcagcgcgttgaagaagaacgccagcgccatattcgtgctgcccgtgccaaaacaccgggcgtgtctcgcgtgc

SEQ ID NO: 7949 - DNA, 75 bp, synthetic construct
  source 1..75: mol_type = other DNA
atggcaacgacgaacgcattctgtctggcgtcaccgccactggcacgcatctgccttcacggggatttacaacga

SEQ ID NO: 7950 - DNA, 75 bp, synthetic construct
  source 1..75: mol_type = other DNA
agcggaccgggggtagaagagaatatgcgggcgcaattgttccagcgaccatcagcgctcagccaaaaagcctca

SEQ ID NO: 7951 - DNA, 75 bp, synthetic construct
  source 1..75: mol_type = other DNA
tattttccttgtgtgtgtctggtgagtcctctgcatggaataatattgtcttttactcccttggagacgttaact

SEQ ID NO: 7952 - DNA, 75 bp, synthetic construct
  source 1..75: mol_type = other DNA
tattaaaatatgactactttgatgtaaatgagtataaaaaaacattacttatgacacatcttttattgacaaaga

SEQ ID NO: 7953 - DNA, 75 bp, synthetic construct
  source 1..75: mol_type = other DNA
acggcgatttaagtgccgatatccggcagcttgagaacgcgctggcacgctgtgccagccaggtaaaaatgatta

SEQ ID NO: 7954 - DNA, 75 bp, synthetic construct
  source 1..75: mol_type = other DNA
tgattcaacctggcctcaatttgattcacccgcttcaggtgttcgaggttgaacagcagggtaatgaaatggtgg

SEQ ID NO: 7955 - DNA, 75 bp, synthetic construct
  source 1..75: mol_type = other DNA
ggcgtaccagcggttccggagccggaaggcattgcggatgacagtactgtttcagatggcgtcgggtctcagcct

SEQ ID NO: 7956 - DNA, 75 bp, synthetic construct
  source 1..75: mol_type = other DNA
atcctcgaccagtttcttgacgaaaaagaaggtaaccacaccacggcataccgtgatggtgcgggtatctggacc

SEQ ID NO: 7957 - DNA, 75 bp, synthetic construct
  source 1..75: mol_type = other DNA
ggaatccggcgacaggcagttacaacgtcgccagcgaaacggcgaagagccgtggcaaaaagagcgggcgcagta

SEQ ID NO: 7958 - DNA, 75 bp, synthetic construct
  source 1..75: mol_type = other DNA
atgcatgccattatgatatttatgagggcgcgttttttgaacgtgtagtagctgtgcagacacaatggtttaaac

SEQ ID NO: 7959 - DNA, 75 bp, synthetic construct
  source 1..75: mol_type = other DNA
ttctttgtgccgctttactgacggtcacacccgcagcgtcagcggatgtgaacagcgacatgaatcagttcttta

SEQ ID NO: 7960 - DNA, 75 bp, synthetic construct
  source 1..75: mol_type = other DNA
ctacagaaaagataaaagggttttatctgttttatgcgatgagttaaaaaaaatactgtttatgatgatatcatt

SEQ ID NO: 7961 - DNA, 75 bp, synthetic construct
  source 1..75: mol_type = other DNA
gattttctggatgcaaacagagaaagatttatcagtccatttgaatatgcaaagattaataatccattaaaacag

SEQ ID NO: 7962 - DNA, 75 bp, synthetic construct
  source 1..75: mol_type = other DNA
atgacggtcagatattatatcagttctgctgatttaaccgcagagaagttcgccacagcaatccgaaaccactgg

SEQ ID NO: 7963 - DNA, 75 bp, synthetic construct
  source 1..75: mol_type = other DNA
cgagctgcatcttaaatcaggtgtggtaaaactgtttgaccctctcactccggaaatgttacgggcgctaatccg

SEQ ID NO: 7964 - DNA, 75 bp, synthetic construct
  source 1..75: mol_type = other DNA
agactgagaaagagcggaatgccggtggtgacaacgtccgtggaagcgagcgataacctgacgggaacaacccgc

SEQ ID NO: 7965 - DNA, 75 bp, synthetic construct
  source 1..75: mol_type = other DNA
atctgtattgttgttggtggctatatcagtgcattgtttaaagatacttttctgcaactgcctacttttgtctgg

SEQ ID NO: 7966 - DNA, 75 bp, synthetic construct
  source 1..75: mol_type = other DNA
tgcgccgctgtattcagctatctggcggaagacctcctgtctcttcaggatctcatccagcagcaaaacaaactc

SEQ ID NO: 7967 - DNA, 75 bp, synthetic construct
  source 1..75: mol_type = other DNA
atatgagagccgtgcgctggacacgacgattgaaggcggaactcagtctctgaatagtaagtcaacggcaaaaaa

SEQ ID NO: 7968 - DNA, 75 bp, synthetic construct
  source 1..75: mol_type = other DNA
gataatccgcttattaatattctggagaagttttccagctggtatgacacgaataacgtgacactgggcggtgtc

SEQ ID NO: 7969 - DNA, 75 bp, synthetic construct
  source 1..75: mol_type = other DNA
cacgtaacgattcactggctgcacggaccgatacctggttgcagtcatttctggtctggtcacccggacagcggg

SEQ ID NO: 7970 - DNA, 75 bp, synthetic construct
  source 1..75: mol_type = other DNA
gaagatatcagcaaggaaattaacgggtattactgctgtttttatactgcctttttccttatggcgtgttctgca

SEQ ID NO: 7971 - DNA, 75 bp, synthetic construct
  source 1..75: mol_type = other DNA
gttgcgttaaaaacagtcgcattgtctctggggttaccggttgtgaccgccattacccatcgtccggtacagcgc

SEQ ID NO: 7972 - DNA, 75 bp, synthetic construct
  source 1..75: mol_type = other DNA
atcgagcagcacatgtcccttaatcaggctgctgctcactttatgcttgctggtagtggttctgtagccaggtgg

SEQ ID NO: 7973 - DNA, 75 bp, synthetic construct
  source 1..75: mol_type = other DNA
tggtattgcggaaatcagccctgtccctggtgctggcgacattaccgttcatcttcctgctgaccctctccggtc

SEQ ID NO: 7974 - DNA, 75 bp, synthetic construct
  source 1..75: mol_type = other DNA
tgccgttggtgttcatgcccgaggcagatagcctcaagcacccgcagctattctacttaacttcccattacctcg

SEQ ID NO: 7975 - DNA, 75 bp, synthetic construct
  source 1..75: mol_type = other DNA
gatcgacattcacaaagatcccgtagcactgaacaaatatatctgcgaatacctgacgacaaagggcgtgtttga

SEQ ID NO: 7976 - DNA, 75 bp, synthetic construct
  source 1..75: mol_type = other DNA
cttcggcgaatcagaatggattcattttaccggtagcggatatctgttacgtaccgatgcgtggtcgtacccggt

SEQ ID NO: 7977 - DNA, 75 bp, synthetic construct
  source 1..75: mol_type = other DNA
ggttcttgatgttcccatgcttgatttttccagtctttctcgtgatggtcataccacattgattcatcctggtta

SEQ ID NO: 7978 - DNA, 75 bp, synthetic construct
  source 1..75: mol_type = other DNA
cgctctgcctgaatgtgtttggcagcggagcgtacagtaaaccagcacaaatcagcctggaatgtaaacattatt

SEQ ID NO: 7979 - DNA, 75 bp, synthetic construct
  source 1..75: mol_type = other DNA
gtttgatgaaatcaatattgtgcgcggactgcctgttcctggtggtcggctggggataaaaatcacagaactgga

SEQ ID NO: 7980 - DNA, 75 bp, synthetic construct
  source 1..75: mol_type = other DNA
aaaaggtctctattcctaaaacaaccgagcaagagcgcgacactatcgttgaagcttttgagcaaccaagcgtca

SEQ ID NO: 7981 - DNA, 75 bp, synthetic construct
  source 1..75: mol_type = other DNA
gcagtccaggccgtttaccgtaaagcacatttcagcggcggcggttctcctagcgattctgtcgtagtgcattga

SEQ ID NO: 7982 - DNA, 75 bp, synthetic construct
  source 1..75: mol_type = other DNA
ccaacagcaattgcgaatatgcaaacagtcacaaaagcatttggaccatcacataaagctttccttgtcgttcct

SEQ ID NO: 7983 - DNA, 75 bp, synthetic construct
  source 1..75: mol_type = other DNA
tatggatgatttaaaaaaagtaaaaaatacggaagcatgggtatggtataaaaattgcgatagtaaaaataaaaa

SEQ ID NO: 7984 - DNA, 75 bp, synthetic construct
  source 1..75: mol_type = other DNA
gccgctccggtgcgttaacggtgagtgaaatcgctgcggcaggactaccggcgttgtttgtgccgtttcaacata

SEQ ID NO: 7985 - DNA, 75 bp, synthetic construct
  source 1..75: mol_type = other DNA
tcctctaccaaaggcagtggaattactaatatcatttcaattattcttcagcaagcccaggattatgatgtggcg

SEQ ID NO: 7986 - DNA, 75 bp, synthetic construct
  source 1..75: mol_type = other DNA
ctgctgtgctgttttggttcatcggtgccgaatcatgccgccatttactgtggtgacggcgagctgctgcaccat

SEQ ID NO: 7987 - DNA, 75 bp, synthetic construct
  source 1..75: mol_type = other DNA
tcaggtcgttgattaccgtgttgtgaagatgcccgttaccaaaggtgggaagctggagctgaccatcaccgaact

SEQ ID NO: 7988 - DNA, 75 bp, synthetic construct
  source 1..75: mol_type = other DNA
tggcctggaaaccgggagaagaaggtcagaaagggcttataggctggtttgaaagcggggatgtgcgggcctata

SEQ ID NO: 7989 - DNA, 75 bp, synthetic construct
  source 1..75: mol_type = other DNA
tatctacaacgccagggactgttaagcccagagtcaggggaagaaaacaatcctgtcagtcataacaacaatgta

SEQ ID NO: 7990 - DNA, 75 bp, synthetic construct
  source 1..75: mol_type = other DNA
cgtcttgagaagcagataaaagacctgacagacgatgatccggatatgaaacaccgcaggaaactgctggaaagt

SEQ ID NO: 7991 - DNA, 75 bp, synthetic construct
  source 1..75: mol_type = other DNA
aggcatttgtcatactggcagagtccagttcatttaacaatgccgctaaattactcaatattacgcaacctgcat

SEQ ID NO: 7992 - DNA, 75 bp, synthetic construct
  source 1..75: mol_type = other DNA
aaaacccgctgctgcaggatgtgaacaaaggctggctgcagaaaatccgtgaagatgcaccggatcacgtcatgg

SEQ ID NO: 7993 - DNA, 75 bp, synthetic construct
  source 1..75: mol_type = other DNA
cctgcaggccgatgcatatgcgggttacaatgctctttacgaaagcggtcaggtaaccgaagcggcttgtatggc

SEQ ID NO: 7994 - DNA, 75 bp, synthetic construct
  source 1..75: mol_type = other DNA
gtcaccctggagccccgtatcttcggctggatggaccgtctttgcgaaaactactgcgatggtatctggaatctg

SEQ ID NO: 7995 - DNA, 75 bp, synthetic construct
  source 1..75: mol_type = other DNA
tagcctggcgtgtcatatctcatcccgccagctaaaccacgtggaagcggcagaactgctgcgcgtgactgctga

SEQ ID NO: 7996 - DNA, 75 bp, synthetic construct
  source 1..75: mol_type = other DNA
acctgaacctgtttaacgacgggaacaactggcaggggatcgttgaatcgctgacgctgccgaaattcacccgca

SEQ ID NO: 7997 - DNA, 75 bp, synthetic construct
  source 1..75: mol_type = other DNA
gttgatccgcagcaaaaagcccggctacatgtatctatcgacctgctgatagccgatgcatggagtctggagttg

SEQ ID NO: 7998 - DNA, 75 bp, synthetic construct
  source 1..75: mol_type = other DNA
atgagtgaagccagaattacacctgatgaagtcagggcacatcttcgacttgatgatgatttatccggtgaaggc

SEQ ID NO: 7999 - DNA, 75 bp, synthetic construct
  source 1..75: mol_type = other DNA
gttgaggactatcgctgcgctgcactggtggaaaacatccagattggtgacttcagcgccgccgcagcagaaacc

SEQ ID NO: 8000 - DNA, 75 bp, synthetic construct
  source 1..75: mol_type = other DNA
gcaaagtgttccttacacaggcgcagctggcgatgctgctggaaggtatcgactggcgacagcctaagcggctgc

SEQ ID NO: 8001 - DNA, 75 bp, synthetic construct
  source 1..75: mol_type = other DNA
aactcacacagagtggtccttcagggagagtccctgaggaaaaatcccccgacagtggaaagcagcgaaaaaacg

SEQ ID NO: 8002 - DNA, 75 bp, synthetic construct
  source 1..75: mol_type = other DNA
gcaacttatgatgcaaatcgaattgttaaatgtggtttttatgatgaatacaatttccataaagggacatttaga

SEQ ID NO: 8003 - DNA, 75 bp, synthetic construct
  source 1..75: mol_type = other DNA
agcaaggatgacgggctgataaccctgcaggatgcggaaggtaacacgcggctgatttcgccccgggaggcggtg

SEQ ID NO: 8004 - DNA, 75 bp, synthetic construct
  source 1..75: mol_type = other DNA
aaatcatgacagacactgcgggtagcagcgatattattttcggtctgttctggctactggggtatcagttttccc

SEQ ID NO: 8005 - DNA, 75 bp, synthetic construct
  source 1..75: mol_type = other DNA
agtcgtgtgcgaactacaggggcgtagctacaccatcagttaccctctggcggtatttctgtctggaaaaatgtt

SEQ ID NO: 8006 - DNA, 75 bp, synthetic construct
  source 1..75: mol_type = other DNA
gtgaatctgatgcatcacaggaaagccggaaacacgaagctgggggagttcggcgattacggtaacgactggcag

SEQ ID NO: 8007 - DNA, 75 bp, synthetic construct
  source 1..75: mol_type = other DNA
ctgtcggtaacaccaccataaatcagaacggtgaactgagggtacatgccggcggggaagccactgcagtcaccc

SEQ ID NO: 8008 - DNA, 75 bp, synthetic construct
  source 1..75: mol_type = other DNA
tggatggatttctgaaaggtaaatgcatcccaagtgatttaaaggttaacgaaacaaacgctgaatatctggtgc

SEQ ID NO: 8009 - DNA, 75 bp, synthetic construct
  source 1..75: mol_type = other DNA
ggcccgactttactggctgggacacggtgctgaatgccgaagcaacggcttatgccaccgcccgtgcgcttggtc

SEQ ID NO: 8010 - DNA, 75 bp, synthetic construct
  source 1..75: mol_type = other DNA
cggtggatgacgcagtctccctgctgacacggggtggcagactgagctgtaagtttcgactgtcaggcgcactga

SEQ ID NO: 8011 - DNA, 75 bp, synthetic construct
  source 1..75: mol_type = other DNA
ggacaatggatacaaaatggcggtatcgccaacaacactactgtcaccggtggtggtcttcagagagtgaatgcc

SEQ ID NO: 8012 - DNA, 75 bp, synthetic construct
  source 1..75: mol_type = other DNA
gaatccgtggccattgatattgcttatgaaggctccggcagtggcgactggcgcactgacggtttcatcgtgggt

SEQ ID NO: 8013 - DNA, 75 bp, synthetic construct
  source 1..75: mol_type = other DNA
gtctttacaaagcggaggtaatacaccgtaagagctggaaaaaccgtgcagaagtggaactggccacactcacgt

SEQ ID NO: 8014 - DNA, 75 bp, synthetic construct
  source 1..75: mol_type = other DNA
tcagcgtattgcggctgatgttctgaggctgagaaaggccggaatgccggtggtgaccacgaccgtggaggtgca

SEQ ID NO: 8015 - DNA, 75 bp, synthetic construct
  source 1..75: mol_type = other DNA
atggcgatttatcatctcagcatgaaaatcatctccagaaacagcggctacagcgccgttgcttctgctgcctat

SEQ ID NO: 8016 - DNA, 75 bp, synthetic construct
  source 1..75: mol_type = other DNA
tgagaaatgggtgacggataccgaagcacagcatagcgccgcagtagatgcagcagaagcacagcgccagtcact

SEQ ID NO: 8017 - DNA, 75 bp, synthetic construct
  source 1..75: mol_type = other DNA
ggatgtgaactgatttttgaagataaaataagcggaacaaagtcagccagaccaggcttgaaaaagctgctcaga

SEQ ID NO: 8018 - DNA, 75 bp, synthetic construct
  source 1..75: mol_type = other DNA
atgaaaattaaaactctggcaattgttgttctgtcggctctgtccctgagttctacagcggctctggctgaaact

SEQ ID NO: 8019 - DNA, 75 bp, synthetic construct
  source 1..75: mol_type = other DNA
caggagggagtctgatcccatcaccgacacttcattcacgagggagtatcggtaatactggcgggagtgaaaccc

SEQ ID NO: 8020 - DNA, 75 bp, synthetic construct
  source 1..75: mol_type = other DNA
ctggtctggcgtacctggaattttgaggacggtgccgggtactggatgaatcatgccatcagggatttcgggatt

SEQ ID NO: 8021 - DNA, 75 bp, synthetic construct
  source 1..75: mol_type = other DNA
cgatcgcctgctcaagtgcaggcgcggtcggtaacgctgacgacggtacggcattaatcctggtcacgccggtga

SEQ ID NO: 8022 - DNA, 75 bp, synthetic construct
  source 1..75: mol_type = other DNA
ggcaggcgctggagaaagtggccgccacaggagactgccggcaggtggctcagggactgctggacggcaccgggg

SEQ ID NO: 8023 - DNA, 75 bp, synthetic construct
  source 1..75: mol_type = other DNA
atgctaatgtaaaaggacacatagaggctaaaaactctcaaattgttctgggaaataaaactgcatacattgaca

SEQ ID NO: 8024 - DNA, 75 bp, synthetic construct
  source 1..75: mol_type = other DNA
agcttattgccacgaaggcggggaatattaccgtctataactatgatggtgaaactcgggaatatatttccactt

SEQ ID NO: 8025 - DNA, 75 bp, synthetic construct
  source 1..75: mol_type = other DNA
tggataatgcaaccggcccccgactggcagacaccgctgaacgggattatttcatcctcagagaacggttgatga

SEQ ID NO: 8026 - DNA, 75 bp, synthetic construct
  source 1..75: mol_type = other DNA
agtgatccgcacgctggaactggaatctgaacccgccactaaattgttgcaggagaacgcttaccgtgagttgct

SEQ ID NO: 8027 - DNA, 75 bp, synthetic construct
  source 1..75: mol_type = other DNA
ctgacaaaattaacgacagaactcgccagttattgcgctgatgaatttaagaagctgaacgacaaaaggagctgg

SEQ ID NO: 8028 - DNA, 75 bp, synthetic construct
  source 1..75: mol_type = other DNA
caggacgcaaatttattggtatagaaaccagtgatcattattttgatgtagcaacacaacggctcaaaacggcga

SEQ ID NO: 8029 - DNA, 75 bp, synthetic construct
  source 1..75: mol_type = other DNA
taacgggagaagcgctccgtcgtatcggggaactgtacgctatcgaggctgagatccgcggcagtccggcagaag

SEQ ID NO: 8030 - DNA, 75 bp, synthetic construct
  source 1..75: mol_type = other DNA
cgtcgtgcggagatcatcagtccgttggcgcagtcggagacggtcgggcacgaagcggccgatatggcggctcag

SEQ ID NO: 8031 - DNA, 75 bp, synthetic construct
  source 1..75: mol_type = other DNA
attattaacactttgtgggatggaggttctcttttcatcgacaggaaatcatctcccggaattaatttgaaggag

SEQ ID NO: 8032 - DNA, 75 bp, synthetic construct
  source 1..75: mol_type = other DNA
cagcatagatacatcttctccaatggggcgttttttcttccacgtgatgggtgccctggctgaaatggaacgtga

SEQ ID NO: 8033 - DNA, 75 bp, synthetic construct
  source 1..75: mol_type = other DNA
cccatttatggcgaggccggtgacagcggttcgcctttatttgcttttgatactgttcagaataaatgggtgctg

SEQ ID NO: 8034 - DNA, 75 bp, synthetic construct
  source 1..75: mol_type = other DNA
gcactggagctggttgatacctccagtgcgccagatattgaatggcctacgcctccggcagttcaggccagatga

SEQ ID NO: 8035 - DNA, 75 bp, synthetic construct
  source 1..75: mol_type = other DNA
gggcgtgaccagcagtggcatccgcatatccatttatcgacaactgccggtggtgtgacgtcgggccacacctgg

SEQ ID NO: 8036 - DNA, 75 bp, synthetic construct
  source 1..75: mol_type = other DNA
attcaggaaattccgggagatattttcgcggcggcagcaacttatgacggtgaagttattaccatttatccggac

SEQ ID NO: 8037 - DNA, 75 bp, synthetic construct
  source 1..75: mol_type = other DNA
cattgcgccgtctttatccacttccactcagaccagagtcagtgccagttcctgcaaggtggagttccgtcacgg

SEQ ID NO: 8038 - DNA, 75 bp, synthetic construct
  source 1..75: mol_type = other DNA
cagagcggtatgtacgaagtctgtttacagctaccagccagacttgtttcaggactgcggaggtgcgagtactta

SEQ ID NO: 8039 - DNA, 75 bp, synthetic construct
  source 1..75: mol_type = other DNA
gcagtggctggcgcatatctggataaggagcgctatcctgttttttatcgtctggggtctggtactcagtatatt

SEQ ID NO: 8040 - DNA, 75 bp, synthetic construct
  source 1..75: mol_type = other DNA
ttcatgtgctcgatgagctgtcagtccgggcactcagtcgtgacatcatgaaacagaaccgggtgaccgtacatc

SEQ ID NO: 8041 - DNA, 75 bp, synthetic construct
  source 1..75: mol_type = other DNA
gcataacggcgaatggaagacactgagcagtgacaaagtggggaaaaccggattttccgagaacgtgctcgcgaa

SEQ ID NO: 8042 - DNA, 75 bp, synthetic construct
  source 1..75: mol_type = other DNA
tgtccgcagccatctgtctggccgtatccggtgcgcctgcatgggcgtctgagcagcaggccacgctgagcgcgg

SEQ ID NO: 8043 - DNA, 75 bp, synthetic construct
  source 1..75: mol_type = other DNA
gaagagtgggacgtcctggaattcagcagcctgactgagctgaaaaaatatcgcaaaagccacccggaaaagatg

SEQ ID NO: 8044 - DNA, 75 bp, synthetic construct
  source 1..75: mol_type = other DNA
gagattgaccctaataataaccccagctatggcgtactatgtggaatgtcagtgatgggattcagtttagtgctg

SEQ ID NO: 8045 - DNA, 75 bp, synthetic construct
  source 1..75: mol_type = other DNA
catacccgcaaaggcgaaagaggtacgattaacatagtgaacggaacaccaattcacgaacgttcccgaaatatc

SEQ ID NO: 8046 - DNA, 75 bp, synthetic construct
  source 1..75: mol_type = other DNA
atgtctctcattaaatcactgttgttcaccctgttgctggcagccgctgccgtgcaggcctccacccgggatgaa

SEQ ID NO: 8047 - DNA, 75 bp, synthetic construct
  source 1..75: mol_type = other DNA
cccggtcaaagttgatcgaatttttggcgacatgtccagctacaaccatcgcaatggaagcctgtggtggttctc

SEQ ID NO: 8048 - DNA, 75 bp, synthetic construct
  source 1..75: mol_type = other DNA
cttgatagccaagctttattgcttttaacgaaaacacgttcaaaacaaaagaccacattttcacagcaaaatatt

SEQ ID NO: 8049 - DNA, 75 bp, synthetic construct
  source 1..75: mol_type = other DNA
ccagccgcaacagaacgcagagagccgccgcgatgtgctggcttcagcggcgagaatcatcgccgaagggctgta

SEQ ID NO: 8050 - DNA, 75 bp, synthetic construct
  source 1..75: mol_type = other DNA
atgcaacagctttcctttctgcccggagcgatgacgcccggcgagcgcagcctcattcagcgggccctgaaaacc

SEQ ID NO: 8051 - DNA, 75 bp, synthetic construct
  source 1..75: mol_type = other DNA
ctgtgggtctatgttcgtgacgatcgcaacgccggttcgaccatgccggcagcggtgtggttctcatactctccc

SEQ ID NO: 8052 - DNA, 75 bp, synthetic construct
  source 1..75: mol_type = other DNA
cgttctgaaaaactgcgtcgtgaagttgaactggctgaggccctgctgaaacaacgtgaacaggacagcgatcgt

SEQ ID NO: 8053 - DNA, 75 bp, synthetic construct
  source 1..75: mol_type = other DNA
gcaacgtaatgcactgaactgcgcgggatgtgagcgaatttttgaggataaaatcagtggcactaagtccgacag

SEQ ID NO: 8054 - DNA, 75 bp, synthetic construct
  source 1..75: mol_type = other DNA
agaacgaatggatgccggtggtgggttacgtaagcttcagcgaggcagctcacgccataacggactatatcgttg

SEQ ID NO: 8055 - DNA, 75 bp, synthetic construct
  source 1..75: mol_type = other DNA
aataataaccggtatacggctttttaccgtgcgggcgttggctctcaatatatccgttatgcaaatggcacagat

SEQ ID NO: 8056 - DNA, 75 bp, synthetic construct
  source 1..75: mol_type = other DNA
tctccgcccccaaaagtgtctccatgatggccatgttaggtggcgataagcgcctgattgatgcacataaccagg

SEQ ID NO: 8057 - DNA, 75 bp, synthetic construct
  source 1..75: mol_type = other DNA
ccgtgacggtttccgcttctggggtaaccgtacctgctctgatgacccgctgttcctctttgaaaactacacccg

SEQ ID NO: 8058 - DNA, 75 bp, synthetic construct
  source 1..75: mol_type = other DNA
caaaacctacaccaccagcgtaggcgctaacggtgcctggagcgtgcaggtgccgaccgccgatgcacaggcgtt

SEQ ID NO: 8059 - DNA, 75 bp, synthetic construct
  source 1..75: mol_type = other DNA
agcattaccgctcttttcaccccaaaaagaggtgactggtgcgacatctggagtaacgaggatgtatcggtgtgg

SEQ ID NO: 8060 - DNA, 75 bp, synthetic construct
  source 1..75: mol_type = other DNA
gataccgaatatatgcaggaaaaccgctgggatgaggaatccgcttcctttattccggtcgaaccagaatccgat

SEQ ID NO: 8061 - DNA, 75 bp, synthetic construct
  source 1..75: mol_type = other DNA
ccacaccttctgtttccgtggccgctgcatcagggaataaccagtctcagttggttgccactcccgtccctgatg

SEQ ID NO: 8062 - DNA, 75 bp, synthetic construct
  source 1..75: mol_type = other DNA
gtaatgcgtttctggaaaagcgttacagcaccaccggtaaggtcatcagactggaaacctcaccggcaaaatata

SEQ ID NO: 8063 - DNA, 75 bp, synthetic construct
  source 1..75: mol_type = other DNA
caacaaatgaccagaacacagatctacaacgtaatgcgctgaactgtgcaggatgtgagctgatttttgaagaca

SEQ ID NO: 8064 - DNA, 75 bp, synthetic construct
  source 1..75: mol_type = other DNA
atgctcacctcagaacaacacaggtgccataatgaaaaaagaaatttcagcgcagagtttaaacgcgaatccgct

SEQ ID NO: 8065 - DNA, 75 bp, synthetic construct
  source 1..75: mol_type = other DNA
atgcagcagctttcctttctgcccggaaacatgacgcccggcgagcgcagtctcattctgcgggccctgcaaacc

SEQ ID NO: 8066 - DNA, 75 bp, synthetic construct
  source 1..75: mol_type = other DNA
ggcgccagatggactattgatattagagggaatcagcaattggctgaaattgcacataaatacggacgtcaggtt

SEQ ID NO: 8067 - DNA, 75 bp, synthetic construct
  source 1..75: mol_type = other DNA
aaattcctgaatccgtagcccgatattttgacatcgtagcctatgcgcgggatctgtttattggggatttcagtt

SEQ ID NO: 8068 - DNA, 75 bp, synthetic construct
  source 1..75: mol_type = other DNA
ttgttctgtcggctctgtccctgagttctacagcggctctggccgctgtcacgacggtaaatggtgggacagttc

SEQ ID NO: 8069 - DNA, 75 bp, synthetic construct
  source 1..75: mol_type = other DNA
tgaaggcggcagattatggtgccgtgctggcgaataacgttgataaacgggccactatcacgctggactatgccc

SEQ ID NO: 8070 - DNA, 75 bp, synthetic construct
  source 1..75: mol_type = other DNA
ctgtgatacacggtgtgaccgcggtctggcgcgccggggagcaggagcagacaccaccggaaggctttgagtcct

SEQ ID NO: 8071 - DNA, 75 bp, synthetic construct
  source 1..75: mol_type = other DNA
ctccgacgccttgctcaacgggagccggactttattgatatacacgctcatctggcatatgcatttctggaacag

SEQ ID NO: 8072 - DNA, 75 bp, synthetic construct
  source 1..75: mol_type = other DNA
aaattaggcaagccactcaggttattcatgagcttgaaggtcaaagtaacgagatatcaaaagttcttgacgtta

SEQ ID NO: 8073 - DNA, 75 bp, synthetic construct
  source 1..75: mol_type = other DNA
aaaactcgggaatatatttctacttcaaatgaatatcttgccattggtgtcggtatccctgcatattcctgtctg

SEQ ID NO: 8074 - DNA, 75 bp, synthetic construct
  source 1..75: mol_type = other DNA
aaagatcgcaattgttcagcagagctttgaaccggggatgacggtctccctcgttgcccggcaacatggtgtagc

SEQ ID NO: 8075 - DNA, 75 bp, synthetic construct
  source 1..75: mol_type = other DNA
tgcggagcagtacagaggatgaagccatgctgatgatggtgtctgagggaattccaggaggtgtacgctatggcg

SEQ ID NO: 8076 - DNA, 75 bp, synthetic construct
  source 1..75: mol_type = other DNA
ggtatcagcacagacggataccgtgactgatacggctgctctggtcacggttgtggcactggtgacgctgcatac

SEQ ID NO: 8077 - DNA, 75 bp, synthetic construct
  source 1..75: mol_type = other DNA
cctgatttacgcggtgaatttattcgtggctgggatgatggacgtggagtggatgcggggcgagccttgctaagt

SEQ ID NO: 8078 - DNA, 75 bp, synthetic construct
  source 1..75: mol_type = other DNA
tctccaccgtggatttggtcaatgcactggagcaagagaaatcatctgggcgtcagggacaaatcgcaaaccgtc

SEQ ID NO: 8079 - DNA, 75 bp, synthetic construct
  source 1..75: mol_type = other DNA
ggacaggattcgggaaataaacggctggctcggtcaggaggtcatccgctttaaaaactactcactggacactga

SEQ ID NO: 8080 - DNA, 75 bp, synthetic construct
  source 1..75: mol_type = other DNA
gatccagaatttatgttccaggattgggagggtattccgtctgatatggcgtcagagtgccatatcaactgggat

SEQ ID NO: 8081 - DNA, 75 bp, synthetic construct
  source 1..75: mol_type = other DNA
ctggaccgtcatcttcatgaacccggtgtggccttcacctccacgcatgcggcacgggaatggctgattctgaac

SEQ ID NO: 8082 - DNA, 75 bp, synthetic construct
  source 1..75: mol_type = other DNA
tattactatgcctttgataactcattactatttactgaaagcatccagaaaactacacagatcttaccacgctaa

SEQ ID NO: 8083 - DNA, 75 bp, synthetic construct
  source 1..75: mol_type = other DNA
ggctccgcgcacatcacgttcaggaaaccagaactggttgatcggctaaatgatattatagccagacactatccg

SEQ ID NO: 8084 - DNA, 75 bp, synthetic construct
  source 1..75: mol_type = other DNA
tggcagaggagaagctgagttcttattaccggaaatcgattattccccggtatctggtaactggcgctcccttcc

SEQ ID NO: 8085 - DNA, 75 bp, synthetic construct
  source 1..75: mol_type = other DNA
atgagccggaaattccgctatggtttatcagctgtcgttctggcgctgattgccgcaggggcttctgcgcctgaa

SEQ ID NO: 8086 - DNA, 75 bp, synthetic construct
  source 1..75: mol_type = other DNA
gaagaaagcattattactgacgatgaacgcccttttgtggcacatcgaccgtcagcggtgcagagggaagaaaga

SEQ ID NO: 8087 - DNA, 75 bp, synthetic construct
  source 1..75: mol_type = other DNA
atggacgtcgagtatggtcagtacagcgtcagtctgttggtggagggattcccgccgtcacacgccgggattatc

SEQ ID NO: 8088 - DNA, 75 bp, synthetic construct
  source 1..75: mol_type = other DNA
gccttgcgattctgcgggaaaacgcgggcatcctcacgacagagcagatagcgcaactgcttcacactaatatta

SEQ ID NO: 8089 - DNA, 75 bp, synthetic construct
  source 1..75: mol_type = other DNA
ggaagtgacgaaggcaaagccggtaacgcgcaccattacatccgcgaacattgaccgcctgcgggtcaccttcgg

SEQ ID NO: 8090 - DNA, 75 bp, synthetic construct
  source 1..75: mol_type = other DNA
atgagacattttcttaaggctctttcctttgttgtttccctgttaccagctacattgtgtgcggctgaaatccag

SEQ ID NO: 8091 - DNA, 75 bp, synthetic construct
  source 1..75: mol_type = other DNA
acgcgcaccattacgtccgcgaacattgaccgcctgcgggttaccttcggggtgcagtcactggtggagaccacc

SEQ ID NO: 8092 - DNA, 75 bp, synthetic construct
  source 1..75: mol_type = other DNA
atggtaagcccgtcataccgggaatgaagctgtcgaaggaaaaatgcgaccaggttaacgctattgaacgtgata

SEQ ID NO: 8093 - DNA, 75 bp, synthetic construct
  source 1..75: mol_type = other DNA
tataaaatcaaacttcgcgcatcaggttttcgtctggtttatcaggttattgatgatatgttaattattgcggtc

SEQ ID NO: 8094 - DNA, 75 bp, synthetic construct
  source 1..75: mol_type = other DNA
tatgtggcactgccggcgtttgaccgtaacggcaagtcagccggtatctggctgaacccgctgaccacggatgac

SEQ ID NO: 8095 - DNA, 75 bp, synthetic construct
  source 1..75: mol_type = other DNA
gacgttgacatcaaccggcgttgagaaaagtattaactactggatggggccgcagggatatggtcaattcttaca

SEQ ID NO: 8096 - DNA, 75 bp, synthetic construct
  source 1..75: mol_type = other DNA
ctgctggaaggtcgtgaatgcagccgacgctttacgcgcgaagagcttctggccgtcggtctggatgccgccatc

SEQ ID NO: 8097 - DNA, 75 bp, synthetic construct
  source 1..75: mol_type = other DNA
gataattgcggctgttgggtttgtcgcaggtaaggcgatcttctctgataatgttgtgttcaggagaaggatgta

SEQ ID NO: 8098 - DNA, 75 bp, synthetic construct
  source 1..75: mol_type = other DNA
aaggtgaatacttcgatgccatgattcgcggggagaaaacggaagagtatcgcctgtgtaatgactactggaata

SEQ ID NO: 8099 - DNA, 75 bp, synthetic construct
  source 1..75: mol_type = other DNA
ttcctgaatcagaaactgaacatgatggaatgcctgttttctggagattccaggcgacagttgaagaagatggga

SEQ ID NO: 8100 - DNA, 75 bp, synthetic construct
  source 1..75: mol_type = other DNA
taagggcgttggcctgttgcagaatctggtcgtgcataccctgcctggtgaccgttacggtgtcgccgcaggtgg

SEQ ID NO: 8101 - DNA, 75 bp, synthetic construct
  source 1..75: mol_type = other DNA
ctcagctgcggcaggctcaaaaacagcggctgcgtcgtctgccagtgccgcgtcaacaagtgccgggcaggcctc

SEQ ID NO: 8102 - DNA, 75 bp, synthetic construct
  source 1..75: mol_type = other DNA
aacgggacctgacgggctggatgtcgctgtcacggaaaccgcaagtgacctggtacggctgggacggcgaccggc

SEQ ID NO: 8103 - DNA, 75 bp, synthetic construct
  source 1..75: mol_type = other DNA
cagtgggcttactgcgaagctgttaatgcaaaactggaatgaagatttgcataccgctggatttatcatcgacgc

SEQ ID NO: 8104 - DNA, 75 bp, synthetic construct
  source 1..75: mol_type = other DNA
gccgccaccaccgtatccatggggaatggcggtgtactgctggccgattccggtgccgctgtcagtggtacccgg

SEQ ID NO: 8105 - DNA, 75 bp, synthetic construct
  source 1..75: mol_type = other DNA
gctgagccgtgctgttgcaaaaggcgactccccggtaacgttccataaactgaccaccagtaacctcaccggtca

SEQ ID NO: 8106 - DNA, 75 bp, synthetic construct
  source 1..75: mol_type = other DNA
gatgacgtacagccatcacgcctgtcgtacagaaaattatgccatgacggtccactattaccggctgcgggatta

SEQ ID NO: 8107 - DNA, 75 bp, synthetic construct
  source 1..75: mol_type = other DNA
agtaaaaaccaggcggaaagccaaaggcggagtaagaaaggctaaataccgctttaaggatgaaaatggcgagat

SEQ ID NO: 8108 - DNA, 75 bp, synthetic construct
  source 1..75: mol_type = other DNA
cagtatgatcccaaagtttatgacgaatatcgtaagacgaagcgggcggggcggttgaacaatgaaaatcactcc

SEQ ID NO: 8109 - DNA, 75 bp, synthetic construct
  source 1..75: mol_type = other DNA
cacgccgaaggtggtgaagggcgtgagctttatgcttcgcctgaccgtggcagcggatgacggcagtgagcggct

SEQ ID NO: 8110 - DNA, 75 bp, synthetic construct
  source 1..75: mol_type = other DNA
tggcagtgattatgttgcaggaatgcaaaatacagaagctgatgctgtaaaacaaaacggaaatgcctataaaac

SEQ ID NO: 8111 - DNA, 75 bp, synthetic construct
  source 1..75: mol_type = other DNA
tgctggagcctgagccggaacgttattcatctttcgccagtggtgccgttccggcggcatcacaaccgctggcgg

SEQ ID NO: 8112 - DNA, 75 bp, synthetic construct
  source 1..75: mol_type = other DNA
atgtcggtattgatgagtgggcgtggcatcggggccaccgttacggtacgttaatcgtcaatcttgatactcacc

SEQ ID NO: 8113 - DNA, 75 bp, synthetic construct
  source 1..75: mol_type = other DNA
gagccatgatcaaactcttcaatttaaaagtttgatgctcaaagaattaaacttcgtaatgaattacgtgttcac

SEQ ID NO: 8114 - DNA, 75 bp, synthetic construct
  source 1..75: mol_type = other DNA
tcgcaacccacacactgatagtcgcaagagtcacggcagaagcagccgaaattatcgcaaaacaggatgctgaac

SEQ ID NO: 8115 - DNA, 75 bp, synthetic construct
  source 1..75: mol_type = other DNA
agattgtcaccgaccaggacatgccggacgaagtgcgcgccaaattatgcaaggcgtgcgcctttgcccgccgtg

SEQ ID NO: 8116 - DNA, 75 bp, synthetic construct
  source 1..75: mol_type = other DNA
ctgaaaaaagcgccttccgttgaggtatgccgtgaactggctgtggcgacaccagaactccgcaaagtcacgcca

SEQ ID NO: 8117 - DNA, 75 bp, synthetic construct
  source 1..75: mol_type = other DNA
agtttattgccacgaaggcgggggatattactgtctataattatgatggtgaaacacgggaatatatttccatat

SEQ ID NO: 8118 - DNA, 75 bp, synthetic construct
  source 1..75: mol_type = other DNA
taatttatctacatggaaccccgattatgaaatcggtaagaactatattaaacggagattatcggtaaaatataa

SEQ ID NO: 8119 - DNA, 75 bp, synthetic construct
  source 1..75: mol_type = other DNA
tgtacttctgtacggtggtctgtgtgctgtatctcctttcgggtggataccgggccatgcgtgacttctggcgca

SEQ ID NO: 8120 - DNA, 75 bp, synthetic construct
  source 1..75: mol_type = other DNA
actcttcaatttaaaagtttgatgctcaaagaattaaacttcgtaatgaattacgtgttcactcttgagacttgg

SEQ ID NO: 8121 - DNA, 75 bp, synthetic construct
  source 1..75: mol_type = other DNA
gtgctgagacgtataccggtcgtgaagtacaggatattcccggtgtgctggccgtgtttgctgaacgccgtaagg

SEQ ID NO: 8122 - DNA, 75 bp, synthetic construct
  source 1..75: mol_type = other DNA
ggtgaccagataaaagtgctgtgggctgacagtgacggactgtgcctcttcaccaaacgcctggagcggggccgc

SEQ ID NO: 8123 - DNA, 75 bp, synthetic construct
  source 1..75: mol_type = other DNA
tcagggctggccagcattctcacagtggcttgatgccgtgattcagcgtgtcgaaatgtacaacgcatcgcttcc

SEQ ID NO: 8124 - DNA, 75 bp, synthetic construct
  source 1..75: mol_type = other DNA
gagctgggactgattacctaccagacggaatatgacccgcttattggctgctatattccgaccgacatcacgttc

SEQ ID NO: 8125 - DNA, 75 bp, synthetic construct
  source 1..75: mol_type = other DNA
gggtcatgtcaccctgacgtttaatgtgtcgtcggccggtgcgaacaactggacgccgacaacgtacatcagtga

SEQ ID NO: 8126 - DNA, 75 bp, synthetic construct
  source 1..75: mol_type = other DNA
gctgatcggcacctgccgtctgaacggtatcgatccggaagcgtatctgcgccatattctgagcgtactgccgga

SEQ ID NO: 8127 - DNA, 75 bp, synthetic construct
  source 1..75: mol_type = other DNA
tcgaaatgtacaacgcatcgcttcccgttccgctttctcaggctgaatgtcgggctattggcaagagtattgcga

SEQ ID NO: 8128 - DNA, 75 bp, synthetic construct
  source 1..75: mol_type = other DNA
ggcgtcagaacataatctgccgcgagtgccggaagagtgaagttatgcagcgcatactggcattttatcagggat

SEQ ID NO: 8129 - DNA, 75 bp, synthetic construct
  source 1..75: mol_type = other DNA
tgttatgacgagctttcctcgttcgaaccggatgttgaaaaagagggttcgccaaccctgctgggggataaacgt

SEQ ID NO: 8130 - DNA, 75 bp, synthetic construct
  source 1..75: mol_type = other DNA
atgcattatggcaaagttaaaattgtcgatataagcgaatccgtcgtaagtcaatatctggaaagtcagcataag

SEQ ID NO: 8131 - DNA, 75 bp, synthetic construct
  source 1..75: mol_type = other DNA
ttttctgccaccacgatgctgttttcactgggggccagcatgatactgggtggtgtggctcagatgctggccccg

SEQ ID NO: 8132 - DNA, 75 bp, synthetic construct
  source 1..75: mol_type = other DNA
ctttactccggtgtgctcctgtttattctgtatttttgtttttctgccctgactgacctgcagaaacctgatgaa

SEQ ID NO: 8133 - DNA, 75 bp, synthetic construct
  source 1..75: mol_type = other DNA
atgactgacacgcattctattgcacaaccgttcgaagcagaagtctccccggcaaataaccgtcaattaaccgtg

SEQ ID NO: 8134 - DNA, 75 bp, synthetic construct
  source 1..75: mol_type = other DNA
atgctgtctccgggtgaccgcagtgcaattcagcagcaacagcagcagttgctggatgaaaaccagcgtcagcgt

SEQ ID NO: 8135 - DNA, 75 bp, synthetic construct
  source 1..75: mol_type = other DNA
gcgtggccttcacctccacgcatgcggcacgggagtggctgattctgaacatggcgggactggagcgggaagagt

SEQ ID NO: 8136 - DNA, 75 bp, synthetic construct
  source 1..75: mol_type = other DNA
ttctccgggcagtacagcgcaatggcgaaagctatcggcttcaatgctgacgaggcggccagaagctccaacaaa

SEQ ID NO: 8137 - DNA, 75 bp, synthetic construct
  source 1..75: mol_type = other DNA
agcaggtgctggatatgctgatttcttaccagaaagaacgtggcttcccgccaaccaatcaggaggtggcaacca

SEQ ID NO: 8138 - DNA, 75 bp, synthetic construct
  source 1..75: mol_type = other DNA
cgctgcgccaggtgtgcaagctgtcggcgcgtaaacaaaggcaggtgcaggagtttattggggtgattgcgggta

SEQ ID NO: 8139 - DNA, 75 bp, synthetic construct
  source 1..75: mol_type = other DNA
tggcggactggaacacctcttttaacctgcagtacagccgtcagacatactgggacatacggaaaacggactatt

SEQ ID NO: 8140 - DNA, 75 bp, synthetic construct
  source 1..75: mol_type = other DNA
ggccattcgaatcaaaaaatgaccgatatttacaacgatgtacgcggtaaggagtggaaaaaactggtcatttga

SEQ ID NO: 8141 - DNA, 75 bp, synthetic construct
  source 1..75: mol_type = other DNA
gtatttctgggagcaaagtggctcactggaggtacagatcgcctatctggaacgccagctcaccagtaaacatgc

SEQ ID NO: 8142 - DNA, 75 bp, synthetic construct
  source 1..75: mol_type = other DNA
gcccgcagcaaggttgcgccgactaccgaactgttcccgatgtcgaaaattaacgacgccatccagcatgtgcgc

SEQ ID NO: 8143 - DNA, 75 bp, synthetic construct
  source 1..75: mol_type = other DNA
agtaccgaccagagcctggtcctgtgcgataccgtgcgttatctgccggagtcctttgagatcccctggaatccg

SEQ ID NO: 8144 - DNA, 75 bp, synthetic construct
  source 1..75: mol_type = other DNA
agcatggatgttgagtatggccagtacagcgtcatcctgctggttgaaggttttccgccttcacatgccgggacc

SEQ ID NO: 8145 - DNA, 75 bp, synthetic construct
  source 1..75: mol_type = other DNA
ctggcaaccctaaaacaaaagagcaataccagctaacgaaacaatttaacatcaaatggctttatacagaggatg

SEQ ID NO: 8146 - DNA, 75 bp, synthetic construct
  source 1..75: mol_type = other DNA
cagtgttcgcccgttatcatacggctttatttcgcaggacgacctggcaaaacaattcctgaacgtttctgaaga

SEQ ID NO: 8147 - DNA, 75 bp, synthetic construct
  source 1..75: mol_type = other DNA
gtgctggatgttcatcccagtggtttttacgcctggcttcagcagccgcattcacaacgccatcaggcagacctg

SEQ ID NO: 8148 - DNA, 75 bp, synthetic construct
  source 1..75: mol_type = other DNA
gatggctggccgctgtatgaatcacgcctgaagggaaagctgcacgttatcagcaagcgttacactcagcgcatt

SEQ ID NO: 8149 - DNA, 75 bp, synthetic construct
  source 1..75: mol_type = other DNA
ttattacctgttgagataacgcctgatgagcagaaagagcctatggcggctcttactccgcttttatccactcct

SEQ ID NO: 8150 - DNA, 75 bp, synthetic construct
  source 1..75: mol_type = other DNA
acgaaaatttaccccaccgtccctatcacacggatgatctcgcttttggtcttcgcatctccggcaaagggcgtg

SEQ ID NO: 8151 - DNA, 75 bp, synthetic construct
  source 1..75: mol_type = other DNA
ccgcaggcgagggcgcagcagatggggccttgtgtcgttgtactctcggcaaaaaaccacaatgccctggaacag

SEQ ID NO: 8152 - DNA, 75 bp, synthetic construct
  source 1..75: mol_type = other DNA
cgctggataaagagaaaaatgagctgacttacggattccagagtgcacaaaagcacaaggcggaagcagcgcatt

SEQ ID NO: 8153 - DNA, 75 bp, synthetic construct
  source 1..75: mol_type = other DNA
ttttactgcactgacgttgctggagattgatatgtcgcagggagaaaccttgcaggcgcgggcaaacgtgatcca

SEQ ID NO: 8154 - DNA, 75 bp, synthetic construct
  source 1..75: mol_type = other DNA
cagaaccgcatccagttttttgaactgtggctgaacgccaaactgcgtcacggcaatacggtggtgctgaaaatc

SEQ ID NO: 8155 - DNA, 75 bp, synthetic construct
  source 1..75: mol_type = other DNA
gatgtgcatgcaagagcgcccacctacatcaccacggaagccctgcagcgtatcggtgaactgtatgccatcgag

SEQ ID NO: 8156 - DNA, 75 bp, synthetic construct
  source 1..75: mol_type = other DNA
atgctgtccggcttcaaagataaagtgacatcatcccttaacagcgcggccagttcagttaaagggctgttctga

SEQ ID NO: 8157 - DNA, 75 bp, synthetic construct
  source 1..75: mol_type = other DNA
tcccgcagttgagccctactcaattgatgaaatgttcattgatttgcgggggataaatcattgcatctctccgga

SEQ ID NO: 8158 - DNA, 75 bp, synthetic construct
  source 1..75: mol_type = other DNA
acctgtatctctgtaaagttaatcctaacaagaagaaattccctaagcttgatgcaatcctgccatcgttcaaac

SEQ ID NO: 8159 - DNA, 75 bp, synthetic construct
  source 1..75: mol_type = other DNA
ttgttattattatagctgttttgtctgtccggataatattccggaggagtaaaaactgtcctcccgcactgatac

SEQ ID NO: 8160 - DNA, 75 bp, synthetic construct
  source 1..75: mol_type = other DNA
ctctgggaggatatggcgtaagctttaccctgcttgggctgggaagcgtgctgatggctaccggtgccgtaacaa

SEQ ID NO: 8161 - DNA, 75 bp, synthetic construct
  source 1..75: mol_type = other DNA
gcgtacgacaaagtgaccgtcacggttggtgctgacggtaatgccaccggtgccagcgttgaatttatcggaaaa

SEQ ID NO: 8162 - DNA, 75 bp, synthetic construct
  source 1..75: mol_type = other DNA
gcagcgcgtctggataaaatccgccgccagaaccggataaaggcagaacttcaggccgtgcttgatgagaaataa

SEQ ID NO: 8163 - DNA, 75 bp, synthetic construct
  source 1..75: mol_type = other DNA
actaccccggacgtttcaagggtgcccacgggcagaactttgcccgctggcagatggacggctggcgaaacaatg

SEQ ID NO: 8164 - DNA, 75 bp, synthetic construct
  source 1..75: mol_type = other DNA
ctggctgctgacatcgttgtgcacccgtgtgaaacagtgaatggcggaacactggtaaaccatgacaaccagttt

SEQ ID NO: 8165 - DNA, 75 bp, synthetic construct
  source 1..75: mol_type = other DNA
ggctgacgacggtacagaccgacaccacgcgtatccagacggtatatcagccggggagcttcgcgccgctcatcc

SEQ ID NO: 8166 - DNA, 75 bp, synthetic construct
  source 1..75: mol_type = other DNA
gggcttgtgacggatggttttattttgcgtgcaaatgaatttgtcacatcgttgccgtctctgaaagaagctggg

SEQ ID NO: 8167 - DNA, 75 bp, synthetic construct
  source 1..75: mol_type = other DNA
aagcataaatgtattcctggtgctaaatggcccgaaattcaggcagagatgcgcatctggaaaaaacgtcgcgaa

SEQ ID NO: 8168 - DNA, 75 bp, synthetic construct
  source 1..75: mol_type = other DNA
acggtgcgttgttgcaatggacgaggcaggctacgacgctgatgatttcaaaaaacctgtccgcgtccatttccc

SEQ ID NO: 8169 - DNA, 75 bp, synthetic construct
  source 1..75: mol_type = other DNA
atggatatcacgtcgatacttcatgcgctttgtgccgtagcggtgcaggtactggctggtctttttaccggaaac

SEQ ID NO: 8170 - DNA, 75 bp, synthetic construct
  source 1..75: mol_type = other DNA
cctggccgactggaaggtggtgctgtttatgcaggggcattgcccttactgtcaccagtttgacccggtactgaa

SEQ ID NO: 8171 - DNA, 75 bp, synthetic construct
  source 1..75: mol_type = other DNA
cggctctgcaacgggaagctcagacacagaagcgcggcctgtgggctgacagtaatcccgttcctccgtgggagt

SEQ ID NO: 8172 - DNA, 75 bp, synthetic construct
  source 1..75: mol_type = other DNA
tggatatccgggtgccggaccatctgatagtcggtggcaaccaggtattctcctttgccgaacacggtctgcttt

SEQ ID NO: 8173 - DNA, 75 bp, synthetic construct
  source 1..75: mol_type = other DNA
ctatggttttgaaggtcgagaagccccacctgaaatagcaaatctttatcttggaaaaaaaataccagatgaatt

SEQ ID NO: 8174 - DNA, 75 bp, synthetic construct
  source 1..75: mol_type = other DNA
gtacgttcttcattgcgcgtgaacacacccaggcagaatatcgctggattgaaatgttcgggcatggcaagcgga

SEQ ID NO: 8175 - DNA, 75 bp, synthetic construct
  source 1..75: mol_type = other DNA
tgcgtattcctgagcgatgaacaggaaagaagaacgcttatttctaacgaaaaaaaatgcggaggggtacaccat

SEQ ID NO: 8176 - DNA, 75 bp, synthetic construct
  source 1..75: mol_type = other DNA
acgttgccttctataccacccagtgcgaggatgcgtttcaacagcgttgccgtgagctgcgtgacaccctctcac

SEQ ID NO: 8177 - DNA, 75 bp, synthetic construct
  source 1..75: mol_type = other DNA
cgttcagtgatttcgcccgcgatcgccgtggagtgtgcgatccggaagcccgttgccttgccggcaatcccggtt

SEQ ID NO: 8178 - DNA, 75 bp, synthetic construct
  source 1..75: mol_type = other DNA
taaacttcttcttgagtgtgttgtaaaaacgcagtcaacggtggcaaagattttaggtattgagtctcttagccc

SEQ ID NO: 8179 - DNA, 75 bp, synthetic construct
  source 1..75: mol_type = other DNA
gaaaaaacgccggtcagtattcgtgagctgtggaacccggacacctgcccggcaaatctgctgccgtggctggcg

SEQ ID NO: 8180 - DNA, 75 bp, synthetic construct
  source 1..75: mol_type = other DNA
tagattctgtttctggtggtgcttcagggcgtgatattgcgatggctataggaacactatccgggcaatttgttg

SEQ ID NO: 8181 - DNA, 75 bp, synthetic construct
  source 1..75: mol_type = other DNA
atgaataaccagtatttacagtttgttcgtgagcaactcatgattgccactgcggatctcagtgtgtcgataaaa

SEQ ID NO: 8182 - DNA, 75 bp, synthetic construct
  source 1..75: mol_type = other DNA
acacgcgatttcgtgaactgtatctgacggacggcactttttattgcgcccgcaatattaagtatgaggttttta

SEQ ID NO: 8183 - DNA, 75 bp, synthetic construct
  source 1..75: mol_type = other DNA
attgcagaaaaatcccaaaaacgttctgctggccgtctgctggatgcagggtgagtttgacatgagcgccgccac

SEQ ID NO: 8184 - DNA, 75 bp, synthetic construct
  source 1..75: mol_type = other DNA
gcggcgtcatgtccgctttctacccgcacgaatctgaattatcacgccgagttaaacaattaatcagagcagcaa

SEQ ID NO: 8185 - DNA, 75 bp, synthetic construct
  source 1..75: mol_type = other DNA
gaaataacggactatatcgttgggtattacaacgcgctcaggccgcacgaatataacggtgggttgccaccaaat

SEQ ID NO: 8186 - DNA, 75 bp, synthetic construct
  source 1..75: mol_type = other DNA
cgtcagtggcaaagtcagttgccgggtattgcagataattgcccggcaatagttcgcttgctgggcgatatgtcg

SEQ ID NO: 8187 - DNA, 75 bp, synthetic construct
  source 1..75: mol_type = other DNA
tgcgatctggtctggtattttgccgatggtctgaaagctccgcgctggattcgtaccactgacggcgtgcagccc

SEQ ID NO: 8188 - DNA, 75 bp, synthetic construct
  source 1..75: mol_type = other DNA
atgcaggactgacccagctttaccggatgcgcgatgcgcagttgtggcgtcacatcgaatttcaccccgaatgca

SEQ ID NO: 8189 - DNA, 75 bp, synthetic construct
  source 1..75: mol_type = other DNA
tgctgaacgtcagcgtctgaaagagctggaacgtgaaaatcgtgaactgcgccgcagcaacaatatccttcgcca

SEQ ID NO: 8190 - DNA, 75 bp, synthetic construct
  source 1..75: mol_type = other DNA
ggtcaccggacggtatgcgtgttgaggtcattcgggccggtgagtatgacgacggggcgcttcctgcccgggtgc

SEQ ID NO: 8191 - DNA, 75 bp, synthetic construct
  source 1..75: mol_type = other DNA
atgacggatattactgacagacatacacttcgccgtatgtcctggtcggaactcatcacggcaggacaggaagca

SEQ ID NO: 8192 - DNA, 75 bp, synthetic construct
  source 1..75: mol_type = other DNA
cccgtaacaagctgggctgctacatgacgcagcaggcgtcgcttaacaatatcccggtttctgcgctggtatcgc

SEQ ID NO: 8193 - DNA, 75 bp, synthetic construct
  source 1..75: mol_type = other DNA
accaatgcctaatcctcttagcatgtacgcggttgatgctgttgccgctattgcagaggtgagaggctggaacgc

SEQ ID NO: 8194 - DNA, 75 bp, synthetic construct
  source 1..75: mol_type = other DNA
acagggcgaacaacgtcgccagcgggcagcagacgaccatcaccatgctgaaaaatcagcttcatgttgccctca

SEQ ID NO: 8195 - DNA, 75 bp, synthetic construct
  source 1..75: mol_type = other DNA
cgaatcatcaaacacagtacggcaccgttggccaggcactgcatattgcacggaaattactgccctttattcctg

SEQ ID NO: 8196 - DNA, 75 bp, synthetic construct
  source 1..75: mol_type = other DNA
ggggcttacgaggtggtgggcgtgtttgaccggatagaggagaagcgtgatgccatgcagtcgctggtcctgccg

SEQ ID NO: 8197 - DNA, 75 bp, synthetic construct
  source 1..75: mol_type = other DNA
gattctggataatctgccgccccggccctttaacatccggatggtcagggagacggcggacagcaccacggacca

SEQ ID NO: 8198 - DNA, 75 bp, synthetic construct
  source 1..75: mol_type = other DNA
tcctattccggaagcccggcggaaaatatttcccggtgtgacgttgtgcgttgaatgtcaggcgtatcaggaaag

SEQ ID NO: 8199 - DNA, 75 bp, synthetic construct
  source 1..75: mol_type = other DNA
attcagtgacagaacaactgaccatgacaggaataaaccggatacgccagaaaataaatgctcatggtattcctg

SEQ ID NO: 8200 - DNA, 75 bp, synthetic construct
  source 1..75: mol_type = other DNA
cgaaggtgagcgccataatgcacttgatgacgcccgttaccaggcaaaatacgtttcagctatctggcaaaaact

SEQ ID NO: 8201 - DNA, 75 bp, synthetic construct
  source 1..75: mol_type = other DNA
tcgcgctgggtgcatcgtcgtattcattcggccaatactcaatggcccttggtcgttattccaaagcgctgggta

SEQ ID NO: 8202 - DNA, 75 bp, synthetic construct
  source 1..75: mol_type = other DNA
tgctgaccggtaatctggtgatggcactgtttaaccacgacaccagtcgcgatcaggaaccacagttacacacgc

SEQ ID NO: 8203 - DNA, 75 bp, synthetic construct
  source 1..75: mol_type = other DNA
cgccgcgttggtcagcatctgttgcagatcatgagcggttttcttgaactgaccgatgatgcgcgtattcagcgc

SEQ ID NO: 8204 - DNA, 75 bp, synthetic construct
  source 1..75: mol_type = other DNA
gattatatagacgcgctgaacgcaatggatataaacatggcaccagatatcaacttgccggaaataccactggca

SEQ ID NO: 8205 - DNA, 75 bp, synthetic construct
  source 1..75: mol_type = other DNA
atacacgatgccataccgggcattttcgctggcgataaatcaggataaacatcagctctatatcggacacaccca

SEQ ID NO: 8206 - DNA, 75 bp, synthetic construct
  source 1..75: mol_type = other DNA
aaagtgagtcaggggaaggtgccggatacaataaacccgtcaatgccgatccagttctgtcctgcgccaccgcct

SEQ ID NO: 8207 - DNA, 75 bp, synthetic construct
  source 1..75: mol_type = other DNA
agcttcagcgaggcagctcacgccataacggactatatcgttggatattacagcgcactaagaccgcacgaatat

SEQ ID NO: 8208 - DNA, 75 bp, synthetic construct
  source 1..75: mol_type = other DNA
tgctggttaactccacttttgctgtgaccgctgcgctgggggctgccgggctggacagcgaatcgaatctgatgg

SEQ ID NO: 8209 - DNA, 75 bp, synthetic construct
  source 1..75: mol_type = other DNA
tcctgccggtccccggacagagcacaaaggaagtcgccgccggctccgctttacccggccatgcggagcatggcc

SEQ ID NO: 8210 - DNA, 75 bp, synthetic construct
  source 1..75: mol_type = other DNA
atgttagtcgccctgatcgtcatctgtttaaccgttatagtgacggtactggtaacgaggaaagacctctgcgag

SEQ ID NO: 8211 - DNA, 75 bp, synthetic construct
  source 1..75: mol_type = other DNA
taacaagaagaaattccctaagcttgatgcaatcctgccatcgttcaaacatctgaagctgatgaagagccgcat

SEQ ID NO: 8212 - DNA, 75 bp, synthetic construct
  source 1..75: mol_type = other DNA
ggtcggttctcttaccaggtaaacccgatgccgttcgggtgcagcaacccactcacccgcatgtttaaccagcta

SEQ ID NO: 8213 - DNA, 75 bp, synthetic construct
  source 1..75: mol_type = other DNA
aagtatgcgtatttaacgacatcattcctgctgaccattgtctgcatgatgttcaggatatgagtacgattaacc

SEQ ID NO: 8214 - DNA, 75 bp, synthetic construct
  source 1..75: mol_type = other DNA
ggctgtgggcggaggaggggattttcttctttgagcggtttgcggcggacagtccggagcagaagctgacgctgt

SEQ ID NO: 8215 - DNA, 75 bp, synthetic construct
  source 1..75: mol_type = other DNA
gtgctggatgcactggagcaggcgttatgggcccgtcgaccgtccggcacggtccatcacagtgataaaggttct

SEQ ID NO: 8216 - DNA, 75 bp, synthetic construct
  source 1..75: mol_type = other DNA
tggatatattcccatttgcagaattgaaggagcgcatcctgaaagcggtttcgatgaagatttccaaatggaaca

SEQ ID NO: 8217 - DNA, 75 bp, synthetic construct
  source 1..75: mol_type = other DNA
atttccgcgaaaaaaatctgatgttgtatgtcattttccatcttgcccttgagacagccatgcggcagggcgaaa

SEQ ID NO: 8218 - DNA, 75 bp, synthetic construct
  source 1..75: mol_type = other DNA
atgaataaccagtatttacagtttgttcgtgagcaactcatgattgccactgcggatcttagtgggtcgacaaaa

SEQ ID NO: 8219 - DNA, 75 bp, synthetic construct
  source 1..75: mol_type = other DNA
agatccagcggggacgcaccaaactcttctgcattcattaccgccggcccaagttaaagccacctcatgatgaga

SEQ ID NO: 8220 - DNA, 75 bp, synthetic construct
  source 1..75: mol_type = other DNA
acagagccagttatctcgtgaaatatgagacgaagcagcatgacggttccgggcaacgtaattatggttgcagtc

SEQ ID NO: 8221 - DNA, 75 bp, synthetic construct
  source 1..75: mol_type = other DNA
gtcatgctgcccggaatgtggaggctcactgagctatctgggtgaggatgccgccgaacagctggagttgatgcg

SEQ ID NO: 8222 - DNA, 75 bp, synthetic construct
  source 1..75: mol_type = other DNA
gtcacgctttcaccgttaacgccatacgataaatgggatggtgagaaatgggtgacggataccgaggcacagcat

SEQ ID NO: 8223 - DNA, 75 bp, synthetic construct
  source 1..75: mol_type = other DNA
cgcaccgttttcctgcaaatcaaaaacacatctgacaaggatatgagcggattgcaggcaaaaatcagtgatgcc

SEQ ID NO: 8224 - DNA, 75 bp, synthetic construct
  source 1..75: mol_type = other DNA
catccccctttaatgtctcctccggcgatgcccggcaacccacactggctgttcacagtcaggcgttccgtactg

SEQ ID NO: 8225 - DNA, 75 bp, synthetic construct
  source 1..75: mol_type = other DNA
tgcaaagccgacaccctcggtagttgtggttacgtttatctggctgtttatccaacatccgaaacgaaaaagtaa

SEQ ID NO: 8226 - DNA, 75 bp, synthetic construct
  source 1..75: mol_type = other DNA
tcacacttacccgacgttatggcgtcagtctcattcatctggatgccagcgccgaatgtctgccggatttaccca

SEQ ID NO: 8227 - DNA, 75 bp, synthetic construct
  source 1..75: mol_type = other DNA
atgttgacctcaatgacaggtcacgacagcgtattgctgcgtgccgacgatcccctgatcgacatgaactacatc

SEQ ID NO: 8228 - DNA, 75 bp, synthetic construct
  source 1..75: mol_type = other DNA
attcccatgaacaacatattgaagaactccgcgcagccctggcccggatgctgcatatgcatcatatgatgctgg

SEQ ID NO: 8229 - DNA, 75 bp, synthetic construct
  source 1..75: mol_type = other DNA
gagatgcgtgccggaagtggcgtggtggtgtcctggcgttatggaaacgtatgtgtccagcgtggtgtgcagttg

SEQ ID NO: 8230 - DNA, 75 bp, synthetic construct
  source 1..75: mol_type = other DNA
acattatcagcaggtgacactctggtagtctggaagctggacaggctggggcgtagtatgcggcatctggtcatt

SEQ ID NO: 8231 - DNA, 75 bp, synthetic construct
  source 1..75: mol_type = other DNA
ggttatgcccacagtgtcagcggcagcagcgctgaaggttataacggtcaggccacgctgaatgtgactttctga

SEQ ID NO: 8232 - DNA, 75 bp, synthetic construct
  source 1..75: mol_type = other DNA
gtggtctgggacggacagaaagccggtagtgcagttggcatactggtactgccgcttgaaggcacagagacggta

SEQ ID NO: 8233 - DNA, 75 bp, synthetic construct
  source 1..75: mol_type = other DNA
ggatgtgagcggatttttgaggataaaatcagcggcactaagtccgacagaccggggctgaaaaaactgctcagg

SEQ ID NO: 8234 - DNA, 75 bp, synthetic construct
  source 1..75: mol_type = other DNA
atggaaacgttattaccaaacgtcaatacgtctgaaggttgttttgaaattggtgtcagaatcagtaaccctgta

SEQ ID NO: 8235 - DNA, 75 bp, synthetic construct
  source 1..75: mol_type = other DNA
cgggattatttcaccctcagagaccgattgatgacgatgcagatgcaactggaaggggcgcaggaatatatccgc

SEQ ID NO: 8236 - DNA, 75 bp, synthetic construct
  source 1..75: mol_type = other DNA
gtatgcgaaggggctgacctgtgaagccgacatcctcggctcctgtggttacgtttatctggctgtttatccgac

SEQ ID NO: 8237 - DNA, 75 bp, synthetic construct
  source 1..75: mol_type = other DNA
tgcgactggcggcagaaaatgcaacaccaggcgaatggtgtgctgatgactaccatggagtaattgccgatgccg

SEQ ID NO: 8238 - DNA, 75 bp, synthetic construct
  source 1..75: mol_type = other DNA
cctgagcacgtggacaactcacgtggtgaaatcacaaaaaccataagcatatcctgtacgtataagagtggctca

SEQ ID NO: 8239 - DNA, 75 bp, synthetic construct
  source 1..75: mol_type = other DNA
cgtccgcttgctttacagaagctgcttgatgaggggcatttcatggaagatttcctcattgagaaaactaagccg

SEQ ID NO: 8240 - DNA, 75 bp, synthetic construct
  source 1..75: mol_type = other DNA
gttggctgtgccacatacaacgtcggtggctggtatatctgcaatgggcatagcgaactgttctgatatcagcaa

SEQ ID NO: 8241 - DNA, 75 bp, synthetic construct
  source 1..75: mol_type = other DNA
gcggttcgcctttatttgcttttgatactgttcagaataaatgggtgctggtcggtgttcttactgcggggaatg

SEQ ID NO: 8242 - DNA, 75 bp, synthetic construct
  source 1..75: mol_type = other DNA
aaatcgactggatcatagagcgttaccagctgcctcaaagttaccagcgtatgcctgacttccgccgccgcttcc

SEQ ID NO: 8243 - DNA, 75 bp, synthetic construct
  source 1..75: mol_type = other DNA
ctcagctgcggcaggctcaaaaacagcggctgcatcatctgccagtgccgcgtcaacaagtgccgggcaggcctc

SEQ ID NO: 8244 - DNA, 75 bp, synthetic construct
  source 1..75: mol_type = other DNA
gatcggccagaacgatacggcgattgccgggcctgaagctggaagactgggtaaattaacatcgcccacactctg

SEQ ID NO: 8245 - DNA, 75 bp, synthetic construct
  source 1..75: mol_type = other DNA
caggacccgcagaggacgacatcaccgataccgatgatggcgacactcgcatttcagcaggtgcattctggccgg

SEQ ID NO: 8246 - DNA, 75 bp, synthetic construct
  source 1..75: mol_type = other DNA
gagacttcagcgacagttaagccgcaaggtcaaattcagcaacaactggcagaagcagaaacgcaaaatacagcg

SEQ ID NO: 8247 - DNA, 75 bp, synthetic construct
  source 1..75: mol_type = other DNA
gcaccatcagcctgcgtgtacgcccggatatggcgcagaacaatgctgacagactggtcattgacggtggcaggg

SEQ ID NO: 8248 - DNA, 75 bp, synthetic construct
  source 1..75: mol_type = other DNA
atccgtgagaaatacgggttacctcctgttatgagcacgccagtgaaatatgccgatctcattatgctggcaacc

SEQ ID NO: 8249 - DNA, 75 bp, synthetic construct
  source 1..75: mol_type = other DNA
gacgcactgaccgccgccgtggctggcctgggctacaaagcgatgctcgccgatgccccgccgaccgacaaccgc

SEQ ID NO: 8250 - DNA, 75 bp, synthetic construct
  source 1..75: mol_type = other DNA
aacgtttcctgggatgcgctgaacacggcatacagtgaacacccggagtggttttctgggcttgtctccggggat

SEQ ID NO: 8251 - DNA, 75 bp, synthetic construct
  source 1..75: mol_type = other DNA
gagatgctgctggagaagaacgcaacgctgactatctggcagggcgtcattccgcagcgttatgtcaccggcgtg

SEQ ID NO: 8252 - DNA, 75 bp, synthetic construct
  source 1..75: mol_type = other DNA
cgcgaaaacgaaaggccgtggacgtaaggctgcgcagccggagcctcagccgcaaccgccggagggtgaggatta

SEQ ID NO: 8253 - DNA, 75 bp, synthetic construct
  source 1..75: mol_type = other DNA
tctcagtggctgtatgccgtcgatgtgctgattgaaactcagggcgaggtctgccttcttccccttcccggcgat

SEQ ID NO: 8254 - DNA, 75 bp, synthetic construct
  source 1..75: mol_type = other DNA
atgaaactttccctgatgctggaagccgacagaattaatgtgcaggcactgaacatggggcaaattgtcgttgac

SEQ ID NO: 8255 - DNA, 75 bp, synthetic construct
  source 1..75: mol_type = other DNA
gctgacagccatgacggcctcgtttgtgctggccacaccgaccgagacggacggggcgctgtttcccggtcgcat

SEQ ID NO: 8256 - DNA, 75 bp, synthetic construct
  source 1..75: mol_type = other DNA
ggcggtagacctgtgcagactgacaacgaggacaatgaatgttaacgctggccatgaaagaacctcaaaagcccg

SEQ ID NO: 8257 - DNA, 75 bp, synthetic construct
  source 1..75: mol_type = other DNA
aaacgtacgccgtatgaatgatatttatttccgaccgttacaccgcaatcaatattacgaggaaatgaaagtatg

SEQ ID NO: 8258 - DNA, 75 bp, synthetic construct
  source 1..75: mol_type = other DNA
accgcgggcagcgaagggacatattcagaacggcacggagccagccatgatgcttgtcgttggggaacggatact

SEQ ID NO: 8259 - DNA, 75 bp, synthetic construct
  source 1..75: mol_type = other DNA
actcgctgtcacaccagaccagtgacttcggcgaatcagaatggattcattttaccggtagcggatatctgttac

SEQ ID NO: 8260 - DNA, 75 bp, synthetic construct
  source 1..75: mol_type = other DNA
ggacggtgagggtggtgtgccgggagtggagcgtcacagataacgccaggtacagtgatttcagttgtacgattg

SEQ ID NO: 8261 - DNA, 75 bp, synthetic construct
  source 1..75: mol_type = other DNA
cgcgatcagcctggtcacgggcagagtggattggtgccggaagaatggccattgacgggctcaaggaggttcagg

SEQ ID NO: 8262 - DNA, 75 bp, synthetic construct
  source 1..75: mol_type = other DNA
gcgttttccgttgaccgctgggatcgcaactggccggaagagacaaagcgacaggtaattcgtgatgcatggctg

SEQ ID NO: 8263 - DNA, 75 bp, synthetic construct
  source 1..75: mol_type = other DNA
actattttaagagccgtggataaagaatccgcgcaagagtttgtacaagaaacgcttcaaaatgtctgggaaaca

SEQ ID NO: 8264 - DNA, 75 bp, synthetic construct
  source 1..75: mol_type = other DNA
gctgagccgtgctgttgcaaaaagtaactccccggtaacgttccataaactgaccaccacgaacctcaccggcca

SEQ ID NO: 8265 - DNA, 75 bp, synthetic construct
  source 1..75: mol_type = other DNA
cctggccgccgagcaataaccgctactaccgccataatcgagggcgcacgcacatcagcgcagaagggcaggcat

SEQ ID NO: 8266 - DNA, 75 bp, synthetic construct
  source 1..75: mol_type = other DNA
agtcctgcggtaagtggtacatcagtattcagacagaaagtgaagtatccactccggttcacccttcagcatcaa

SEQ ID NO: 8267 - DNA, 75 bp, synthetic construct
  source 1..75: mol_type = other DNA
gcaggcattgattgacggaaactaccagccgcgggcaatacgccggatggatatcccgaagccggatggcggcgt

SEQ ID NO: 8268 - DNA, 75 bp, synthetic construct
  source 1..75: mol_type = other DNA
tggtttatgccggcggcgaccagactgtacatggctacgcgctggataccacactgaacggcggtaaccagtatg

SEQ ID NO: 8269 - DNA, 75 bp, synthetic construct
  source 1..75: mol_type = other DNA
atccagctgttgtggaacgtgagactgacgagcttatagaaaaagctattgctttcaagcatgcgtatcgtcagc

SEQ ID NO: 8270 - DNA, 75 bp, synthetic construct
  source 1..75: mol_type = other DNA
tggcaggggcgacagtatcaggcgtaccctattcagggaagcggctttgagatgaacggcaaaggagccagtgca

SEQ ID NO: 8271 - DNA, 75 bp, synthetic construct
  source 1..75: mol_type = other DNA
agaagcagaaacgcaaaatacagcgactgcattcctgtatcgcaaatatccgcagggactaccttcacaaagtca

SEQ ID NO: 8272 - DNA, 75 bp, synthetic construct
  source 1..75: mol_type = other DNA
tcctggctgaccgggtgagtgaggaaagccgccgctggctggcatcgtgcggcctgaccgtggagcagatgaaaa

SEQ ID NO: 8273 - DNA, 75 bp, synthetic construct
  source 1..75: mol_type = other DNA
cgttatttatttctgaactcggctcattaccggaaaatgtcacctggttatccccggaaggggagtttcagaagt

SEQ ID NO: 8274 - DNA, 75 bp, synthetic construct
  source 1..75: mol_type = other DNA
aaggaaaagtgctgcgtcatcgtggtggtgaaacccgcgtgttacgtccgggctacgtcaagccgaaacacgaat

SEQ ID NO: 8275 - DNA, 75 bp, synthetic construct
  source 1..75: mol_type = other DNA
tggaggacggaaaggagcctgacgcgccctttaaaggtgtgtttaacgtcaggcttgatccagagctaggcactg

SEQ ID NO: 8276 - DNA, 75 bp, synthetic construct
  source 1..75: mol_type = other DNA
cagtgatcccggttgctgttctgatgatgttgttccctgagttagctatggctgctggtaaaggcgacctgatgg

SEQ ID NO: 8277 - DNA, 75 bp, synthetic construct
  source 1..75: mol_type = other DNA
acctcgctccgactaatcatctttatctggtctggaacaaaaggacggctaataacagccgaaccgcctatgttc

SEQ ID NO: 8278 - DNA, 75 bp, synthetic construct
  source 1..75: mol_type = other DNA
aaaacggccgagggcatgaagcctctgcataagctgttaatgctcgacgggacgacgcttgccttaaaaggcgag

SEQ ID NO: 8279 - DNA, 75 bp, synthetic construct
  source 1..75: mol_type = other DNA
tctgttacacgcaccgcagataaagattctgcaaaaacatttgttcaggagactctgaaagatacctgggagtct

SEQ ID NO: 8280 - DNA, 75 bp, synthetic construct
  source 1..75: mol_type = other DNA
ttgtctgcgaggataaacccggtataccccgccctgccctcgattcctgggatgctgaatatatgcaggaaaacc

SEQ ID NO: 8281 - DNA, 75 bp, synthetic construct
  source 1..75: mol_type = other DNA
ccgtgacaatgccggaactgtgctggtggctgattcgtaatgacctggcggatgccttacctgaaagcgcagccc

SEQ ID NO: 8282 - DNA, 75 bp, synthetic construct
  source 1..75: mol_type = other DNA
ctgaaacgcaggctgcaacgccgaaagcagtaaaggccgcgtatgaccttgctaacgcaaaatataccgctcagg

SEQ ID NO: 8283 - DNA, 75 bp, synthetic construct
  source 1..75: mol_type = other DNA
atgaaagagctgatcactgaaatggcctttaatggtgccggggttcgcgataccgccaggacactgaaaattggt

SEQ ID NO: 8284 - DNA, 75 bp, synthetic construct
  source 1..75: mol_type = other DNA
tacgcaaaacggcgacagcgccgggtgcgtggtggtggcaccgccagccgtgccgggcggtaagttccgcattct

SEQ ID NO: 8285 - DNA, 75 bp, synthetic construct
  source 1..75: mol_type = other DNA
tgaatccgttaacgaagcctatgtggttgaggactaccgctgtgccgcactggtggaaaacatccagattggcga

SEQ ID NO: 8286 - DNA, 75 bp, synthetic construct
  source 1..75: mol_type = other DNA
gtgcagagcatgtcgcgcaagggcaactgccttgataatgcggtaatggagaacttctttggtcacctgaaagaa

SEQ ID NO: 8287 - DNA, 75 bp, synthetic construct
  source 1..75: mol_type = other DNA
tcaatctgtctctggaacatgaactgaatgagtggctggcagagagaggttatgccggactggtggataaccgga

SEQ ID NO: 8288 - DNA, 75 bp, synthetic construct
  source 1..75: mol_type = other DNA
ggactccctgtacccgaaaagacgtcagctggacccgtattctgatctgaattatcagtgtgtggaggacagttt

SEQ ID NO: 8289 - DNA, 75 bp, synthetic construct
  source 1..75: mol_type = other DNA
aggaagagaacaccagactcaagaagctgcttgccgaagccatgctggataaagaggcgcttcaggtggctcttg

SEQ ID NO: 8290 - DNA, 75 bp, synthetic construct
  source 1..75: mol_type = other DNA
cttgcggggttcagtggtgtactgcaggcggatgcatacgccgggttcaacgagctgtaccgggatgaccggata

SEQ ID NO: 8291 - DNA, 75 bp, synthetic construct
  source 1..75: mol_type = other DNA
atgaataaggtttttgttgtttcagtggtggccgcagcctgtgtatttgcagcaaatgcaggagcaaaggaaggt

SEQ ID NO: 8292 - DNA, 75 bp, synthetic construct
  source 1..75: mol_type = other DNA
aaggaaaatcgaaatgcagcatgaagagtttcagaaaatgacagagcgcgagcaagtacctttattgaaatgtat

SEQ ID NO: 8293 - DNA, 75 bp, synthetic construct
  source 1..75: mol_type = other DNA
gaaaaccgggaaaattcctcagatgtcagcaaggcaccagtcccgtttggtttttcttctctgctggagccttat

SEQ ID NO: 8294 - DNA, 75 bp, synthetic construct
  source 1..75: mol_type = other DNA
cacaaggagaacactggcggcaatcagcatcatgccagcgatagtgaaactggcgaggcgtcagatcccttaatt

SEQ ID NO: 8295 - DNA, 75 bp, synthetic construct
  source 1..75: mol_type = other DNA
ctccctgtcttacaaggatgcagaaggggataaatataaatcagaggctgacgttaaaagtcacgacatcatgtt

SEQ ID NO: 8296 - DNA, 75 bp, synthetic construct
  source 1..75: mol_type = other DNA
gcgctggttgccgtcggggttgcccggtactttggcaatatggcctccggagcgatgtctgccacggcaggactt

SEQ ID NO: 8297 - DNA, 75 bp, synthetic construct
  source 1..75: mol_type = other DNA
ctgtttgtaaactggctctataaccattcctctgtgctgcatgaacgagcagaaatcattaaatgcgccgaaatg

SEQ ID NO: 8298 - DNA, 75 bp, synthetic construct
  source 1..75: mol_type = other DNA
gagtcatcgctgacgccctatatgattgaccccattaatacattatcagcccgtgaatatgacgcggtggtgttt

SEQ ID NO: 8299 - DNA, 75 bp, synthetic construct
  source 1..75: mol_type = other DNA
aacatcttcagcgacagaaaaacctggttcggtatggcctttatcgaaaccgtcagtgcgctgatgaatgcaacc

SEQ ID NO: 8300 - DNA, 75 bp, synthetic construct
  source 1..75: mol_type = other DNA
gccgatcggcccgaacgacacggcgattgccgggcacgccatcgccgccggggcgatactggtaacgaataatac

SEQ ID NO: 8301 - DNA, 75 bp, synthetic construct
  source 1..75: mol_type = other DNA
gcacattgtcagagttacgccgggaaatgtccgcatcagaaatcatgatgtgggcagaatttgacaggttcagcc

SEQ ID NO: 8302 - DNA, 75 bp, synthetic construct
  source 1..75: mol_type = other DNA
cgccgttcatacgaacggcaggggatcccctgcccgtggcgttactacaacgatcgcgatgtacgcacaatcgtt

SEQ ID NO: 8303 - DNA, 75 bp, synthetic construct
  source 1..75: mol_type = other DNA
tgaggtctgcagtgagctgcttgcgcgcgttcataccctgggggaccgccgttacattgaattgattaccgatgc

SEQ ID NO: 8304 - DNA, 75 bp, synthetic construct
  source 1..75: mol_type = other DNA
acttcgcgataccaatttacaccgcaaatcccagggacgccctcttatcaaaattggtcaactccactacggtaa

SEQ ID NO: 8305 - DNA, 75 bp, synthetic construct
  source 1..75: mol_type = other DNA
ctgcgttccggcagtacccgtccctggtgggaagtcccgccgtcaacggtttattcctttgccttttatatcttt

SEQ ID NO: 8306 - DNA, 75 bp, synthetic construct
  source 1..75: mol_type = other DNA
gaaccttaaaagatttggcagatacgattatggggtatgccttcagaagtgaagattttgttccaacaggtattc

SEQ ID NO: 8307 - DNA, 75 bp, synthetic construct
  source 1..75: mol_type = other DNA
atgccacgcattaaacctcttctggttctttgtgccgccttactgacggtgacgcctgcagcgtcagcggatgtg

SEQ ID NO: 8308 - DNA, 75 bp, synthetic construct
  source 1..75: mol_type = other DNA
aggcccacgccgtcagccggaaaagaatgttttcaccgatgagcagattgagaagctggaagaaatcttccattc

SEQ ID NO: 8309 - DNA, 75 bp, synthetic construct
  source 1..75: mol_type = other DNA
gggcgcagctcccgctggctgaaaagtgaagtggaagcctggctgcaggcgcgtattgcacagtcccgtccgtaa

SEQ ID NO: 8310 - DNA, 75 bp, synthetic construct
  source 1..75: mol_type = other DNA
atatggcctcctccatcggtatctctgttcaggcatttgataaatggggcgttcctcctgttgaacgtcggggga

SEQ ID NO: 8311 - DNA, 75 bp, synthetic construct
  source 1..75: mol_type = other DNA
ttacgggttggcccggcagatgcttatctccccgagcctgttaccgccaggaagaaaaaaaatgttgaggaggat

SEQ ID NO: 8312 - DNA, 75 bp, synthetic construct
  source 1..75: mol_type = other DNA
gcgttttccgttgaccgctgggatcgcaactggccggaagagacaaagcgacaggtgattcgtgatgcatggctg

SEQ ID NO: 8313 - DNA, 75 bp, synthetic construct
  source 1..75: mol_type = other DNA
ccggcagcggtgcggggtggcgtgtcacagacgtcagcagacggtgatgcggacgtgaaaatgctcatggccatg

SEQ ID NO: 8314 - DNA, 75 bp, synthetic construct
  source 1..75: mol_type = other DNA
cgcgggataatccaccaatcccgggaaagcaatcgctggcgaaggggacgtcaattcctctggtcagtccggttg

SEQ ID NO: 8315 - DNA, 75 bp, synthetic construct
  source 1..75: mol_type = other DNA
atgcctgccgggtttacccactttcaactggtaaccaagaacaacatgaaattattaaccacggaaaccgcactg

SEQ ID NO: 8316 - DNA, 75 bp, synthetic construct
  source 1..75: mol_type = other DNA
gaaaaggccaaaaccgtgcttactggatcaaaatttaccattgcgaaagcttgttctggaaaagctggagatgaa

SEQ ID NO: 8317 - DNA, 75 bp, synthetic construct
  source 1..75: mol_type = other DNA
caagactggaccgcttgcctttggcccggtttcattatcgtatatttggtattataagctttagtctgttattaa

SEQ ID NO: 8318 - DNA, 75 bp, synthetic construct
  source 1..75: mol_type = other DNA
caccagatgcggtttccattgcaaaatatgctcttttgctaacaggagattattgattcctgataccagaaatga

SEQ ID NO: 8319 - DNA, 75 bp, synthetic construct
  source 1..75: mol_type = other DNA
cacgcaataagcggtacgcaggagcgtgaattatctctggctgaattatcctggtgggcggtctgcaatcaggtg

SEQ ID NO: 8320 - DNA, 75 bp, synthetic construct
  source 1..75: mol_type = other DNA
tgcgcttagtctggggctgaatcattaccgcgataacgccatcacctacaaagcgcagcgcgataaaaaagccag

SEQ ID NO: 8321 - DNA, 75 bp, synthetic construct
  source 1..75: mol_type = other DNA
ccgcctggaatttgacgccggacacaccgacattgcgcagtcattcatggcaatccgtcgcgccaccaccgccag

SEQ ID NO: 8322 - DNA, 75 bp, synthetic construct
  source 1..75: mol_type = other DNA
aggttatcagtgcgtctgaaaacaactggcctcatgtgctgggctgcctgaacataaatgtccctgactctccgc

SEQ ID NO: 8323 - DNA, 75 bp, synthetic construct
  source 1..75: mol_type = other DNA
gctcactgcttgccggtgaggaaaacgcaaggctgcgtgcaacccactggttacatgagaggggcctgaaagtat

SEQ ID NO: 8324 - DNA, 75 bp, synthetic construct
  source 1..75: mol_type = other DNA
tcgctaccggacggacaccgaacacgcgcagcctggcactcgacgcggcgggagtcaccgtcaatgcgcagggtg

SEQ ID NO: 8325 - DNA, 75 bp, synthetic construct
  source 1..75: mol_type = other DNA
ccacaccttctgtttccgtaaccactgcatcagggaataaccagtctcaactggttgccactcccgtccctgatg

SEQ ID NO: 8326 - DNA, 75 bp, synthetic construct
  source 1..75: mol_type = other DNA
gaaactgccggtgcatgggaaacatccacgccttacgaatccctgctggtttccatcagtcaggcggtccgtgcc

SEQ ID NO: 8327 - DNA, 75 bp, synthetic construct
  source 1..75: mol_type = other DNA
tatgcaccctggttcagacctggtagggaaggttgaaatgactgagtggttagttgactttgctgcccagcttcg

SEQ ID NO: 8328 - DNA, 75 bp, synthetic construct
  source 1..75: mol_type = other DNA
gggcgcgctgctgttattcctcgcttgccctgaaagcggttcagttatcgctgcggcatattccggcatcactgc

SEQ ID NO: 8329 - DNA, 75 bp, synthetic construct
  source 1..75: mol_type = other DNA
tctgggacggcagcctgaaaccggcatacagcaacaacccggcctggtgtctgtgggacatgctgactcacccgc

SEQ ID NO: 8330 - DNA, 75 bp, synthetic construct
  source 1..75: mol_type = other DNA
atgaatattttgagaaagcttatggagcgtctgtgtggttgcggaaagcatgatgactgtgaacacgggcagtcg

SEQ ID NO: 8331 - DNA, 75 bp, synthetic construct
  source 1..75: mol_type = other DNA
tctggcccccggcctgctgtgcgcagacgggcagtaccgccagatagtcactgtggaagatgcggtgcgcggcgg

SEQ ID NO: 8332 - DNA, 75 bp, synthetic construct
  source 1..75: mol_type = other DNA
gatcaggaaaacagccgtatttttctgccgaaactgggctggatgcgctaccggaatagccgtcaggtcacgggt

SEQ ID NO: 8333 - DNA, 75 bp, synthetic construct
  source 1..75: mol_type = other DNA
gcaggacccggcaaccgatgcaggtctgcttaaccagaacgacgttaccacgcttatccgcaaagacggtttccg

SEQ ID NO: 8334 - DNA, 75 bp, synthetic construct
  source 1..75: mol_type = other DNA
gaccggatatttgacacggcggagagcgtctgtgttgcctctgttgcacgcacggttctgcgtgccgtccgtgac

SEQ ID NO: 8335 - DNA, 75 bp, synthetic construct
  source 1..75: mol_type = other DNA
agaggaggcgaagaagaatgccggagaagcagagacgtccgcgaggaatgccggcatatcagccagtaaggcgga

SEQ ID NO: 8336 - DNA, 75 bp, synthetic construct
  source 1..75: mol_type = other DNA
gctgctgtactttcagggataccgcgtagcccgcattgctgaaatgctgggcgagaaagttgcaaccgttcacag

SEQ ID NO: 8337 - DNA, 75 bp, synthetic construct
  source 1..75: mol_type = other DNA
ttcagcgacggggatttacggcatctcgaccaggcatttccactgctgctcaaacagcttgaactgatgctcacc

SEQ ID NO: 8338 - DNA, 75 bp, synthetic construct
  source 1..75: mol_type = other DNA
ccgccccggaagccgccagccctgtgcagatgtaccgcgcgacctactcaccggatgacaacaaactgcgcctgt

SEQ ID NO: 8339 - DNA, 75 bp, synthetic construct
  source 1..75: mol_type = other DNA
cctttaatggtgccggggttcgcgataccgccaggacactgaaaattggtattaacaccgtcatccggactttaa

SEQ ID NO: 8340 - DNA, 75 bp, synthetic construct
  source 1..75: mol_type = other DNA
gatgctgcgcaagctcggcagctacccgcgccagaacggactggccgtggccctgcgcgagctgggccggatcga

SEQ ID NO: 8341 - DNA, 75 bp, synthetic construct
  source 1..75: mol_type = other DNA
atgagtacccgaaatatccacgttaacactgtgtcgtacacgatttttgttgccgggaagaaaaaaaacacccga

SEQ ID NO: 8342 - DNA, 75 bp, synthetic construct
  source 1..75: mol_type = other DNA
atggtactttctgattgttattcatgggctaacgagcagtttggacatgcccgtctcggtgatccgcgtcgtaca

SEQ ID NO: 8343 - DNA, 75 bp, synthetic construct
  source 1..75: mol_type = other DNA
tcaacttctgtgctaagcgcattctgatgcgtaatcaaatgagcaaaataatcagacatacagacacagacgaaa

SEQ ID NO: 8344 - DNA, 75 bp, synthetic construct
  source 1..75: mol_type = other DNA
atgaagcagcaaaaggcgatgttaatcaccctgatcgtcatctgtttaaccgttatagtgacggtactggtaacg

SEQ ID NO: 8345 - DNA, 75 bp, synthetic construct
  source 1..75: mol_type = other DNA
ccctgtcatatcatgggtacaggccggagcatggaaagaagttggatattctgaggttgatttgagcacagcaga

SEQ ID NO: 8346 - DNA, 75 bp, synthetic construct
  source 1..75: mol_type = other DNA
attccagtcggagatccagcgggcttcccgtatgggcagtgaatattaccggaccctgcagaatggcgggcgtca

SEQ ID NO: 8347 - DNA, 75 bp, synthetic construct
  source 1..75: mol_type = other DNA
ctccagttacctgctgaaatccggaccagaggctacgaggacgattatcaactcagtattctctgaatgggccag

SEQ ID NO: 8348 - DNA, 75 bp, synthetic construct
  source 1..75: mol_type = other DNA
agcgcgttatctatcttcgcaaagactacccgcatgagtgctttagtcctttgtggaaattcaggcgtgattttg

SEQ ID NO: 8349 - DNA, 75 bp, synthetic construct
  source 1..75: mol_type = other DNA
atcctgtacgtataagagtggctcaccctggataaaggtcacaggtaatgcaatggctgggcagactaatgtact

SEQ ID NO: 8350 - DNA, 75 bp, synthetic construct
  source 1..75: mol_type = other DNA
tcatcctttttgagtataattttcattatcaaaatataagatctaaaaatactcttgatatagcatttggtattg

SEQ ID NO: 8351 - DNA, 75 bp, synthetic construct
  source 1..75: mol_type = other DNA
atgattgcgcactctcagatccgacgctgaccgtacaggcgtataccgttaatcctcaaacagagcgggtgaaaa

SEQ ID NO: 8352 - DNA, 75 bp, synthetic construct
  source 1..75: mol_type = other DNA
actggcgcggtacacgtatacggaagccggtgaactgctggcggtatatgaccgcagcaatacgcaggtgcgcgc

SEQ ID NO: 8353 - DNA, 75 bp, synthetic construct
  source 1..75: mol_type = other DNA
gaaagggacaggcctcacgtattgctgcaaccattagacataaccgggccagggggaagcaccagataacttcaa

SEQ ID NO: 8354 - DNA, 75 bp, synthetic construct
  source 1..75: mol_type = other DNA
cacaatatgcagagccgctggtcgaaagtcgctatctttacgacccgctgggccgcagggtggcaaaacgggtgt

SEQ ID NO: 8355 - DNA, 75 bp, synthetic construct
  source 1..75: mol_type = other DNA
ttgaacaggctgaggccctgctgaagcaacgcgaacaggacagcgatcgttacagtgggcgagaggatgacccgc

SEQ ID NO: 8356 - DNA, 75 bp, synthetic construct
  source 1..75: mol_type = other DNA
ctccaccaggtcaataatgagctgcatgacttactggatagcctggagaatcatactcctcttgtcagaaaaaac

SEQ ID NO: 8357 - DNA, 75 bp, synthetic construct
  source 1..75: mol_type = other DNA
gacagcagccaaaaaatcagaaaccaacgcgaaaaatagcgagacagccgcaaagacgagcgaaaccaacgcaaa

SEQ ID NO: 8358 - DNA, 75 bp, synthetic construct
  source 1..75: mol_type = other DNA
ggccgtggacgtaaggccgcgcagcccgagcctcagccgcaaccgccggagggggaggattacgggttttcagac

SEQ ID NO: 8359 - DNA, 75 bp, synthetic construct
  source 1..75: mol_type = other DNA
tggttaccgtggctgatgttatgagtgccctgcacgccagctatgacgatgggcagtcaggcgaaaaatttttgc

SEQ ID NO: 8360 - DNA, 75 bp, synthetic construct
  source 1..75: mol_type = other DNA
ttcctctcagcacagagcaacaggccgcatggcgggcggtggcggagaccgaaaaacgccgccatcagggtaaca

SEQ ID NO: 8361 - DNA, 75 bp, synthetic construct
  source 1..75: mol_type = other DNA
gaataaggatgaggtgtttgagcggggagtgattaacgtcttcaggggactgagctggaattataaaaccaactc

SEQ ID NO: 8362 - DNA, 75 bp, synthetic construct
  source 1..75: mol_type = other DNA
atgaagcagcgtattacagtgacagttgacagcgacagctatcagttgctcaaggcatatgatgtcaatatctcc

SEQ ID NO: 8363 - DNA, 75 bp, synthetic construct
  source 1..75: mol_type = other DNA
ccgtgaacagtttaccggtgcggtggaccggatatttgacacagcggagagcgtctgtgttgcctctgttgtccg

SEQ ID NO: 8364 - DNA, 75 bp, synthetic construct
  source 1..75: mol_type = other DNA
caatgagtacgcttcttggtgagaggattatggaccgcatgaccatgaacggtggtcgatgggtgacgtttaact

SEQ ID NO: 8365 - DNA, 75 bp, synthetic construct
  source 1..75: mol_type = other DNA
agttttatcctcttgatgagcttctcagggctgcggagataccgcgcagtacgttttattaccatctaaaggctc

SEQ ID NO: 8366 - DNA, 75 bp, synthetic construct
  source 1..75: mol_type = other DNA
ctgctatcgccagcctgcgcaaccaactggcagcgggccacattgctaaccttactgacttctggcgcgaagctg

SEQ ID NO: 8367 - DNA, 75 bp, synthetic construct
  source 1..75: mol_type = other DNA
ttgtcattatatctgtttttagtctttctggatgttttgaagaaacaaaatcggttgattggtggcttgcacatc

SEQ ID NO: 8368 - DNA, 75 bp, synthetic construct
  source 1..75: mol_type = other DNA
tcgtaaccgctggttcagcgtgatggcggggccgtctgtgcgcgtgaatgaatggttcagcgcgtatgcgatggc

SEQ ID NO: 8369 - DNA, 75 bp, synthetic construct
  source 1..75: mol_type = other DNA
atgaaaaaattaacctgctttaaagcctatgatattcgcgggaaattaggcgaagaactgaatgaagatatcgcc

SEQ ID NO: 8370 - DNA, 75 bp, synthetic construct
  source 1..75: mol_type = other DNA
tttgccggtggcggggtccgtattgaaggaagcagcccgtcattatttgtgcggacggatacggttcgtgccgtg

SEQ ID NO: 8371 - DNA, 75 bp, synthetic construct
  source 1..75: mol_type = other DNA
ggagcacatcaacctaaccggcgattacgtctggcggcagagccgcagactggaagacgggaagtttcggccctt

SEQ ID NO: 8372 - DNA, 75 bp, synthetic construct
  source 1..75: mol_type = other DNA
gatgcgtgatgcgcagttgtggagccacattgaatttcatcccgaatgtaacgcgatttacgcagcactggactg

SEQ ID NO: 8373 - DNA, 75 bp, synthetic construct
  source 1..75: mol_type = other DNA
atgaaaatcatcacccgtggcgaagccatgcgtattcatcaacaacatcctgcatcccgtcttttcccgttctgt

SEQ ID NO: 8374 - DNA, 75 bp, synthetic construct
  source 1..75: mol_type = other DNA
atgtcattcagccattcttccctctccgcacaagtgaaatcatatctgacgtttcttcctgaagaaattcgccag

SEQ ID NO: 8375 - DNA, 75 bp, synthetic construct
  source 1..75: mol_type = other DNA
gcaccactggatgcgctgacgcatgccggacttctcatagacgacgagcagtttgatgaaatcaatattgtgcgc

SEQ ID NO: 8376 - DNA, 75 bp, synthetic construct
  source 1..75: mol_type = other DNA
atgcgcatgcccgggacacatggtaccggtcactggaatacgataactttccggaaatcagcaaggcgaatatcc

SEQ ID NO: 8377 - DNA, 75 bp, synthetic construct
  source 1..75: mol_type = other DNA
tatgtggtcgaggcgtatgccgccgggtgtctgctggaaaacatcaccctgggcgatttcaccgcacctgcagca

SEQ ID NO: 8378 - DNA, 75 bp, synthetic construct
  source 1..75: mol_type = other DNA
gctcatcgtcttaccctgcagatcggtgaacgcagaatgacgctggtcgatctgcccggcattggagagacgccg

SEQ ID NO: 8379 - DNA, 75 bp, synthetic construct
  source 1..75: mol_type = other DNA
agatgacggcggtgcaccgcgaggaagggctgagccagtaccgcgcatacgacagccgtggacagttaattgccg

SEQ ID NO: 8380 - DNA, 75 bp, synthetic construct
  source 1..75: mol_type = other DNA
tgccatgcacgggcagcagggaaatgacctgaatgctggtaagaacctgatatttcaggggcagaatggtcagat

SEQ ID NO: 8381 - DNA, 75 bp, synthetic construct
  source 1..75: mol_type = other DNA
gcaccactggatgcgctgacgcatgccggactacttatagacgacgagcagtttgatgaaatcaatattgtgcgc

SEQ ID NO: 8382 - DNA, 75 bp, synthetic construct
  source 1..75: mol_type = other DNA
tggtttttattcgttccagtgaactcagatacgcccgctggtctgaaattgatattgacaatgccatgtggacta

SEQ ID NO: 8383 - DNA, 75 bp, synthetic construct
  source 1..75: mol_type = other DNA
ccatatcctgagcgtactgccggaatggccttccaaccgagttgatgaactcctgccatggaacgtagtactcac

SEQ ID NO: 8384 - DNA, 75 bp, synthetic construct
  source 1..75: mol_type = other DNA
tgcaggaaaaactcgccaccccggcaggacagcaggtcgcacagaccctgcagcaaaccggggatacccgcgaac

SEQ ID NO: 8385 - DNA, 75 bp, synthetic construct
  source 1..75: mol_type = other DNA
actacacccgcacggcgcaggtgctgatggacacgatggcagaagcgccaatgtgggcggtcgacaaaccgctga

SEQ ID NO: 8386 - DNA, 75 bp, synthetic construct
  source 1..75: mol_type = other DNA
gaccgatacctggttgcagtcatttctggtctggtcacccggacagcgggatatcatcaaaacggtggcactggt

SEQ ID NO: 8387 - DNA, 75 bp, synthetic construct
  source 1..75: mol_type = other DNA
gttgtgagttaatcaacgctgattgcctggaatttatccagaccttaccggaaaattctgtcgatctgatagtca

SEQ ID NO: 8388 - DNA, 75 bp, synthetic construct
  source 1..75: mol_type = other DNA
gccacagagcgcattctgttcgcggaacattatcaggggccgtatcgtccgaaagatgccgggtatgaggcgaag

SEQ ID NO: 8389 - DNA, 75 bp, synthetic construct
  source 1..75: mol_type = other DNA
gtggctggattatctggacgcactggagctggtcgatacttccggtgcgccagatattgaatggcctacgcctcc

SEQ ID NO: 8390 - DNA, 75 bp, synthetic construct
  source 1..75: mol_type = other DNA
atcgaagaggaggagcgggaaatagaatatctgagggcccagatagaaaaactgcgccggatgctgttcggtacc

SEQ ID NO: 8391 - DNA, 75 bp, synthetic construct
  source 1..75: mol_type = other DNA
cggtaaaaggtgccggtaccacactgtgggtttacaccggcaagggtgatgcttatgcaaacccgttgtcagacg

SEQ ID NO: 8392 - DNA, 75 bp, synthetic construct
  source 1..75: mol_type = other DNA
atggccgatgccgtactgtcggtgatggccactaacggtatgcgcaccagtcaccacatcgccaataccattatc

SEQ ID NO: 8393 - DNA, 75 bp, synthetic construct
  source 1..75: mol_type = other DNA
ggggagtctgctgtttggcctgctgacgtatctgactaacctgtatttcaaaatcagggaggaccgccgtaagac

SEQ ID NO: 8394 - DNA, 75 bp, synthetic construct
  source 1..75: mol_type = other DNA
tttcaagatggttctggtcctcgtctttctgagttgattgctcgttggtttgagatgtacggtaaaaccttgtcc

SEQ ID NO: 8395 - DNA, 75 bp, synthetic construct
  source 1..75: mol_type = other DNA
atgattcgtttatcattatttatatcgttgcttctgacatcggtcgctgtactggctgatgtgcagattaacatc

SEQ ID NO: 8396 - DNA, 75 bp, synthetic construct
  source 1..75: mol_type = other DNA
acaaacagccttcaggggccgtggtggatactcagctggccggagcgggtgccgggggcggacgaggtgctgccg

SEQ ID NO: 8397 - DNA, 75 bp, synthetic construct
  source 1..75: mol_type = other DNA
gtgcttaccgatacaaaattaaaaaacctcaagccgcaggacaaactgtacaaggtctccgatcgtgacgggctg

SEQ ID NO: 8398 - DNA, 75 bp, synthetic construct
  source 1..75: mol_type = other DNA
atgacgtatgcgcatttttcaccggactttttacaggatgcgattagctttaatccgctggctgatagtgtccat

SEQ ID NO: 8399 - DNA, 75 bp, synthetic construct
  source 1..75: mol_type = other DNA
ttacgacaacgctccgatggaaagcttctggggaacgctgaaaaatgagagcctgagccactatcgttttaataa

SEQ ID NO: 8400 - DNA, 75 bp, synthetic construct
  source 1..75: mol_type = other DNA
taggggcaagttttgggcttggtttaatagcggggcctattattggtggttttgcaggagagatttcaccgcata

SEQ ID NO: 8401 - DNA, 75 bp, synthetic construct
  source 1..75: mol_type = other DNA
catcgccctttaatgtctcttccggtgatgcccgtcagcccacactggcagtgcacagtcaggcgtttcataccg

SEQ ID NO: 8402 - DNA, 75 bp, synthetic construct
  source 1..75: mol_type = other DNA
gcgcgtgagtcatataaaccgaaaagaaaaattagcccggcaaaaaatgacccgttaacagttgacccgtcaaat

SEQ ID NO: 8403 - DNA, 75 bp, synthetic construct
  source 1..75: mol_type = other DNA
gcgacgttacttatcaaccgtcacggcggcgtactgccgccgctcctggcctctgccattcagaaactgaccgga

SEQ ID NO: 8404 - DNA, 75 bp, synthetic construct
  source 1..75: mol_type = other DNA
ctctggcaatgcttattacaggatgtgctcaacaaacgtttactgttggaaacaaaccgacagcagtaacaccaa

SEQ ID NO: 8405 - DNA, 75 bp, synthetic construct
  source 1..75: mol_type = other DNA
gccaactggcgcaaacagtggccagggaaacgattattagataacagcggacatcctgcattgaaaatagtacag

SEQ ID NO: 8406 - DNA, 75 bp, synthetic construct
  source 1..75: mol_type = other DNA
gccggataactggacgatgaacggcgagtacggcagcgagtttggcggctttttccccgtccaggtccgtttcac

SEQ ID NO: 8407 - DNA, 75 bp, synthetic construct
  source 1..75: mol_type = other DNA
tcggtaaacaggcggaatcgctcatcggtaaggctggcagtatggcgaccagattcacgggtatgacgggggcgg

SEQ ID NO: 8408 - DNA, 75 bp, synthetic construct
  source 1..75: mol_type = other DNA
agggtaatcacgcaggtggtgatactggatgcggataaaaagcagatacagtgcgtggtaagaccgctgcaaatt

SEQ ID NO: 8409 - DNA, 75 bp, synthetic construct
  source 1..75: mol_type = other DNA
aaaggttccgcgcagtgcacataatagcttgcttaatcagaatcttgttaaactcataccgaagaaaacaaaaat

SEQ ID NO: 8410 - DNA, 75 bp, synthetic construct
  source 1..75: mol_type = other DNA
gcagaagtgtgaaaaacttgcccctgaacgcgacccagcgcaggttcgtcagcgctgtacggtggcggatgtgtt

SEQ ID NO: 8411 - DNA, 75 bp, synthetic construct
  source 1..75: mol_type = other DNA
tgaagaaaggcgatgcggctgaacatgcagagttccatatgaaagacaaccgctgggtgcctggctggatgtgtg

SEQ ID NO: 8412 - DNA, 75 bp, synthetic construct
  source 1..75: mol_type = other DNA
tatcggtgaactgtatgccatcgaggcagaggtccggggctgttcagcagaacagcgtctggcggcaagaaaagc

SEQ ID NO: 8413 - DNA, 75 bp, synthetic construct
  source 1..75: mol_type = other DNA
atgagcagagtaaccgcgattatctacgttctggtcatctgcctcatcgtctgcctttcatgggctgttaatcat

SEQ ID NO: 8414 - DNA, 75 bp, synthetic construct
  source 1..75: mol_type = other DNA
caactgaaattacaggccggacggaagctgacgcaggcagaaacaacccgacttaacgccgtgctggattacatt

SEQ ID NO: 8415 - DNA, 75 bp, synthetic construct
  source 1..75: mol_type = other DNA
catcaaccgcaaaaaagcgaacgttatgcgcccggtggagtaccagaacggcgaagcattcactatccgtaacgt

SEQ ID NO: 8416 - DNA, 75 bp, synthetic construct
  source 1..75: mol_type = other DNA
ccgccacatgacagggctgaatatcattcaggagatcccgggagatattttcgcggcggcagcaacttacgacgg

SEQ ID NO: 8417 - DNA, 75 bp, synthetic construct
  source 1..75: mol_type = other DNA
ggaacggtcaggtctggcgctggcagcgtgccggaagccgggccgttattctggaggtcagtggacgctggatgg

SEQ ID NO: 8418 - DNA, 75 bp, synthetic construct
  source 1..75: mol_type = other DNA
tggtgggcgtgctgggtgcgcttttgctggcgtatggtgcctggctgatttatcccccggcgggttttgttgttg

SEQ ID NO: 8419 - DNA, 75 bp, synthetic construct
  source 1..75: mol_type = other DNA
cgaacaggcaggacagagaaagcgcggatctgggaagtgacggacagaacggtcaggacctggattggggaggcg

SEQ ID NO: 8420 - DNA, 75 bp, synthetic construct
  source 1..75: mol_type = other DNA
gagagtgacagtatgtcaacatctggtgggggagtttccatcccaaatggttcaacagtttttgttgatcccgat

SEQ ID NO: 8421 - DNA, 75 bp, synthetic construct
  source 1..75: mol_type = other DNA
cctacctgaccatggtcgaagggctgaagctcgcggcgcagaccttcagcaaggacgtgaagcagctttcgtgct

SEQ ID NO: 8422 - DNA, 75 bp, synthetic construct
  source 1..75: mol_type = other DNA
atgaaataccacgtcagtgtgtgactcctggcgattatgttcttcatgaaggtcggacatatatcgcctcggcaa

SEQ ID NO: 8423 - DNA, 75 bp, synthetic construct
  source 1..75: mol_type = other DNA
atgattaatatgttaatcatcgttctcagagctgtggtcgccgttgcaaacgcgctgattgcagttctggaactg

SEQ ID NO: 8424 - DNA, 75 bp, synthetic construct
  source 1..75: mol_type = other DNA
cgcattgagcgacataatctgaatctgagacaacatctggcaaggctgggacggaagttactgtcgttctcaaaa

SEQ ID NO: 8425 - DNA, 75 bp, synthetic construct
  source 1..75: mol_type = other DNA
cggtcattgctgccattcatcgcgaatacaagcagacatggaaaacactggatgacgaactggcctacgctctct

SEQ ID NO: 8426 - DNA, 75 bp, synthetic construct
  source 1..75: mol_type = other DNA
tcgattccagccgctgtactggctgtaaaacctgcgaactggcgtgcaaagattttaaagatcttggcccggaag

SEQ ID NO: 8427 - DNA, 75 bp, synthetic construct
  source 1..75: mol_type = other DNA
gcgcgtcctctgctcggctttaccggtgaggatgtgcagatgattgaagagattatcctggctcacctcgaccgt

SEQ ID NO: 8428 - DNA, 75 bp, synthetic construct
  source 1..75: mol_type = other DNA
cgcgcaaggcgtgctggcagccgtgcagaccctgcgtgagatgaacgccgacaacctgcgcaaggtgccggccga

SEQ ID NO: 8429 - DNA, 75 bp, synthetic construct
  source 1..75: mol_type = other DNA
ttcaggcaccagaatcacccgacgccccggaggcgctgccggggtgtcgttccatttctgatgatgacctgtgcg

SEQ ID NO: 8430 - DNA, 75 bp, synthetic construct
  source 1..75: mol_type = other DNA
ggtaaccgcgctgaaatgagcccggaagccgccggcattgccgcctgtctgatgacgtacagtcatcacgcctgt

SEQ ID NO: 8431 - DNA, 75 bp, synthetic construct
  source 1..75: mol_type = other DNA
tattgccagtggccggccgaccgtggtactgactgatgagcggcaggtaaatccggataccgtctcatggggata

SEQ ID NO: 8432 - DNA, 75 bp, synthetic construct
  source 1..75: mol_type = other DNA
tttactgaccatttatcgtgagttgtaccaccgttttgaagttctgagaaaaccaagaaatatccgtctgctacc

SEQ ID NO: 8433 - DNA, 75 bp, synthetic construct
  source 1..75: mol_type = other DNA
attgtgctgcgtaaaccgcagtccggtgcgctgcgcggtacacgcctgcaggccattatggatatggatgtgaac

SEQ ID NO: 8434 - DNA, 75 bp, synthetic construct
  source 1..75: mol_type = other DNA
gtgactgatcttcaacaaacgtattaccgccaggtaaagaacccgaatccggtgttcacaccccgtgaaggtgcc

SEQ ID NO: 8435 - DNA, 75 bp, synthetic construct
  source 1..75: mol_type = other DNA
gtggaaagccagctgatgatccgcatcatctgataggccatggtcagggtggaatgggtacaaaagcgcatgacc

SEQ ID NO: 8436 - DNA, 75 bp, synthetic construct
  source 1..75: mol_type = other DNA
ccatacccgtgccattcacagcatcgacaccgacattaagctcaaccgggcgttgtgggtgatggcagaaacact

SEQ ID NO: 8437 - DNA, 75 bp, synthetic construct
  source 1..75: mol_type = other DNA
ttgaaattaacagaatggtaggagacataatttttaaaggcctttgggcaagtaaaccggaaacatcagggaata

SEQ ID NO: 8438 - DNA, 75 bp, synthetic construct
  source 1..75: mol_type = other DNA
gatttgcgggagcgcctgcaatcctcatcgttcagtgatatgctgtccggcttcaaagataaggtgacatcatct

SEQ ID NO: 8439 - DNA, 75 bp, synthetic construct
  source 1..75: mol_type = other DNA
atgactggacagcgcattgggtatatcagggtcagcaccttcgaccagaacccggaacggcaactggaaggcgtc

SEQ ID NO: 8440 - DNA, 75 bp, synthetic construct
  source 1..75: mol_type = other DNA
gtcattgagactgggatgggaatcactgagtctgttcatgggcgctattcggcaggaggtaaggaagttattgcc

SEQ ID NO: 8441 - DNA, 75 bp, synthetic construct
  source 1..75: mol_type = other DNA
acggcggcagctcagagcaaaagtacggcggaatccgcggcaacgcgcgccgagacagcagcaaaacgggcagag

SEQ ID NO: 8442 - DNA, 75 bp, synthetic construct
  source 1..75: mol_type = other DNA
agtgcaggatattcccggtgtgctggctgtatttgcagaacgccgtaaagacagttttggcccgtatgtccggct

SEQ ID NO: 8443 - DNA, 75 bp, synthetic construct
  source 1..75: mol_type = other DNA
cgtttgcgacagatgctaatgcaaatgttacctcgcaggaggaatgggagacgctaaccgcactgaagaaaggat

SEQ ID NO: 8444 - DNA, 75 bp, synthetic construct
  source 1..75: mol_type = other DNA
cggcgttacatggtcaatttgattccatttccatgttttaccttcttcactgcctgcctggaaatatatctacaa

SEQ ID NO: 8445 - DNA, 75 bp, synthetic construct
  source 1..75: mol_type = other DNA
tactgatccacttcgataaacacggtcaggtcgacttcacggaaaaactacccgccgatgcgatggtatgcactc

SEQ ID NO: 8446 - DNA, 75 bp, synthetic construct
  source 1..75: mol_type = other DNA
cgataacaccagaacaaatcgaaatacgtaagctgaggaaaaagctacaacgcattgaaatggagaatgaaatat

SEQ ID NO: 8447 - DNA, 75 bp, synthetic construct
  source 1..75: mol_type = other DNA
cgctcctgccggacgtgttttcaccggcgacccgcgactggtttcttcgcgcctttaaacagccgaccgctgtcc

SEQ ID NO: 8448 - DNA, 75 bp, synthetic construct
  source 1..75: mol_type = other DNA
cgctgatttgagtggggcaacaaaaggtcagcttgaagcctggcaggagaatgccatgttcgatacagggcgtta

SEQ ID NO: 8449 - DNA, 75 bp, synthetic construct
  source 1..75: mol_type = other DNA
ctgacccgcctcggcgtagacctggtggaatacaccgtggaatgtggtccgggtattgcccgcccggaaaagtac

SEQ ID NO: 8450 - DNA, 75 bp, synthetic construct
  source 1..75: mol_type = other DNA
actacaaagcctccctgaaatatctcagcgatcacccgaaactgcagggtattgcccagcagaacagctttaaac

SEQ ID NO: 8451 - DNA, 75 bp, synthetic construct
  source 1..75: mol_type = other DNA
cttggggtcgaatttaacatcaagcataaaagccaagaaaaatgcgatcaccattctaaacacactaaatttata

SEQ ID NO: 8452 - DNA, 75 bp, synthetic construct
  source 1..75: mol_type = other DNA
gtggaggcctccggtgccagcctggagaaagggcggcatgaccagctgcttaccgcacttcgtgcgctgctgtta

SEQ ID NO: 8453 - DNA, 75 bp, synthetic construct
  source 1..75: mol_type = other DNA
agccagccggggcgcaatgtccgggcaaaatcaggtttaaaccgttcgatactggatcagggctggtatgaaatg

SEQ ID NO: 8454 - DNA, 75 bp, synthetic construct
  source 1..75: mol_type = other DNA
ccctcagcctcgattatcgtctctggataatctacgtcagactcccttattccgaacgcccaccgcgtccgtccc

SEQ ID NO: 8455 - DNA, 75 bp, synthetic construct
  source 1..75: mol_type = other DNA
cttgggcttccgcttcgcgccgcgcatccgcgacctgggcgacaccaagctctacatcccgaagggcgatgccgc

SEQ ID NO: 8456 - DNA, 75 bp, synthetic construct
  source 1..75: mol_type = other DNA
tatccacacccgtgccattcacagcatcgacaccgatattaagctcaaccgcgcattgtgggtgatggcagaaac

SEQ ID NO: 8457 - DNA, 75 bp, synthetic construct
  source 1..75: mol_type = other DNA
agccgggcagcgtgagcgggtggctgaactggtcatgatggcccgggagcaggggcgggaggtgcagattatcgc

SEQ ID NO: 8458 - DNA, 75 bp, synthetic construct
  source 1..75: mol_type = other DNA
tatgtggcactgccggcgtttgaccgtaacggcaagtccgccggtatctggctgaacccactgaccacggatgac

SEQ ID NO: 8459 - DNA, 75 bp, synthetic construct
  source 1..75: mol_type = other DNA
atacttacgggtaaaaaaggacgctattctgctgagttaaaactcacagtagtaaaagaagtcgtggatgactgt

SEQ ID NO: 8460 - DNA, 75 bp, synthetic construct
  source 1..75: mol_type = other DNA
acaagtttcgatgcaatcactattactcaaagcaggtttaaacacagaacaggttgcgcaactggagtccgaaaa

SEQ ID NO: 8461 - DNA, 75 bp, synthetic construct
  source 1..75: mol_type = other DNA
ggttgagatcaccggcccccggctggatatggataacgatttcaagacctgggtggggatcattcattcctttgc

SEQ ID NO: 8462 - DNA, 75 bp, synthetic construct
  source 1..75: mol_type = other DNA
gttatcttggtgaagtggttacatataaaaaaggctatgcatttaattcatcattatatgcagaggaagggatac

SEQ ID NO: 8463 - DNA, 75 bp, synthetic construct
  source 1..75: mol_type = other DNA
accagcgaaacacacaatgcttgcatattcgtaagcatcgtttggctggtttttttgtccggctctttgttgcct

SEQ ID NO: 8464 - DNA, 75 bp, synthetic construct
  source 1..75: mol_type = other DNA
gtacgtaaggttgttgatatagttaagaaaaatcatatcccggcagtctttagcgagagtacgatttccgataaa

SEQ ID NO: 8465 - DNA, 75 bp, synthetic construct
  source 1..75: mol_type = other DNA
ctgttgccggtgcgaccatatcgtgcaggcaccggtgccttcaaaacccattgcacgcagttatgccggagcggg

SEQ ID NO: 8466 - DNA, 75 bp, synthetic construct
  source 1..75: mol_type = other DNA
cgacagatgatgatgagctgccggaagtcaccgcgccggagtggatagtcgacaaggtggcgcattacggtggat

SEQ ID NO: 8467 - DNA, 75 bp, synthetic construct
  source 1..75: mol_type = other DNA
aaccgcatcaacagaaaattcagcaacaaaaacttcagcaacaggttatcaactgggcgggagatgatcctgata

SEQ ID NO: 8468 - DNA, 75 bp, synthetic construct
  source 1..75: mol_type = other DNA
ggcccagtatcagcccgtcatacttgaagctaggcaggcttatcttggacaagaagatcgcttggcctcgcgcgc

SEQ ID NO: 8469 - DNA, 75 bp, synthetic construct
  source 1..75: mol_type = other DNA
accattgtctgcatgatgtgcaggacatgagccgtcttaaccatccgaaagcggacctgtcaaaggggcagtacg

SEQ ID NO: 8470 - DNA, 75 bp, synthetic construct
  source 1..75: mol_type = other DNA
atgactaaaaatatccgtaatctggcactggcaacgatgtcggggtttcgccataaaactgttgatgtgcctgaa

SEQ ID NO: 8471 - DNA, 75 bp, synthetic construct
  source 1..75: mol_type = other DNA
ccggtgctggtgcagatgctcgaccggctggaaagtgaaatcctggctgaccgggtgagtgaggaaagccgccgc

SEQ ID NO: 8472 - DNA, 75 bp, synthetic construct
  source 1..75: mol_type = other DNA
tcattgccctgctggtggcctgtggtgcgcttagtctggggctgaatcattaccgcgataacgccatcacctaca

SEQ ID NO: 8473 - DNA, 75 bp, synthetic construct
  source 1..75: mol_type = other DNA
ttcccgcagaaaacggagaaagaaaggacagcgtgcggccctgaaagggggcggcagtgtgctgattgtggggaa

SEQ ID NO: 8474 - DNA, 75 bp, synthetic construct
  source 1..75: mol_type = other DNA
atggatgttgagccggggttgtaccgggtgacgctgaacacggaagggtacgcgccgtcatatgtgggtgacatt

SEQ ID NO: 8475 - DNA, 75 bp, synthetic construct
  source 1..75: mol_type = other DNA
ttagaaacatgtaagatgaagtgctccggaaataacattggacgttttattagatttgtattcaccggagtgatg

SEQ ID NO: 8476 - DNA, 75 bp, synthetic construct
  source 1..75: mol_type = other DNA
cggcactggggaatgatccgaactttgccacgacaatgcttaatgcgctggcaggtaaacaaccgctggacaata

SEQ ID NO: 8477 - DNA, 75 bp, synthetic construct
  source 1..75: mol_type = other DNA
ctgtgatacatggtgtgacagcggtctggcgcgccggggagcaggagcagacaccacctgaaggctttgagtcct

SEQ ID NO: 8478 - DNA, 75 bp, synthetic construct
  source 1..75: mol_type = other DNA
gcctccatcttagccgggctggcgttgatgcaagcaactgtcttaatgggaggcggttatctgaaaaaagtacgg

SEQ ID NO: 8479 - DNA, 75 bp, synthetic construct
  source 1..75: mol_type = other DNA
caccattccggatttacgtattatccgcgacttggtctgtgacggccacgggtggacagtgctgccggattatca

SEQ ID NO: 8480 - DNA, 75 bp, synthetic construct
  source 1..75: mol_type = other DNA
cttgcctgcttcagcggtgtgctgcaagcggatgcgtacgccgggttcaacgagctgtatcgcaatggtgggata

SEQ ID NO: 8481 - DNA, 75 bp, synthetic construct
  source 1..75: mol_type = other DNA
agaatcctcatacggtgacggcgaatggaaaacgctgccgttccagatcgccatcatgaacagtatggggaatga

SEQ ID NO: 8482 - DNA, 75 bp, synthetic construct
  source 1..75: mol_type = other DNA
ccggtgaccagataccacagttgaacgataaacagaaacctgctgataaaacaccgtggcgacatgacaaaacgc

SEQ ID NO: 8483 - DNA, 75 bp, synthetic construct
  source 1..75: mol_type = other DNA
catcagacgcgggttgaaaaaatcattaaccgctccggtatccagccgcttcaccggaagtgtacgttcggtaac

SEQ ID NO: 8484 - DNA, 75 bp, synthetic construct
  source 1..75: mol_type = other DNA
tgacctgcgcaaaatggacatcgcgggtcagtatgttacgtgttgagttcagcgcagagtttaaacaggtggtga

SEQ ID NO: 8485 - DNA, 75 bp, synthetic construct
  source 1..75: mol_type = other DNA
tcagcgtgacgacaccggcgcgatttctgccgtcgaggtggtgatgcgtggccgtcataaagaatacgacggcgg

SEQ ID NO: 8486 - DNA, 75 bp, synthetic construct
  source 1..75: mol_type = other DNA
gcctacccctggcgatattaaacgtgcgcagggggcacaactgattctcgccaatggtatgaatctggaattgtg

SEQ ID NO: 8487 - DNA, 75 bp, synthetic construct
  source 1..75: mol_type = other DNA
ttctgtatttttgtttttctgccctgactgacctgcagaaacctgatgaaagaaaaagtgatgaaaggaatgaag

SEQ ID NO: 8488 - DNA, 75 bp, synthetic construct
  source 1..75: mol_type = other DNA
gttctttatgcgcaatatcgagacggagagtttttcgatattgtccgcaatggtgatgaatttttcgaaacacag

SEQ ID NO: 8489 - DNA, 75 bp, synthetic construct
  source 1..75: mol_type = other DNA
actatcactgtgcatttcaccgcaaaaagaggtgactggtgtgacatctggggtaacgaggatgtatcggtgtgg

SEQ ID NO: 8490 - DNA, 75 bp, synthetic construct
  source 1..75: mol_type = other DNA
atgggtgctgtttaacgccatgaacggcaaccgcgctgaaatgagcccggaagccgccggcattgctgcctgtct

SEQ ID NO: 8491 - DNA, 75 bp, synthetic construct
  source 1..75: mol_type = other DNA
ctgatcaaaattattatctgcctaaagaatcttcatatggtgagggagaatggaaaacgctgccgttccagatcg

SEQ ID NO: 8492 - DNA, 75 bp, synthetic construct
  source 1..75: mol_type = other DNA
ggtaaaaccaatcacggcaagctcagcggcgaaatactgtaccggttggtggggcaaggcaagaagctgttccgc

SEQ ID NO: 8493 - DNA, 75 bp, synthetic construct
  source 1..75: mol_type = other DNA
acactgctgctcacggggtttgctcaggtgttggcgcgctttagttcctcgccgcactttagccttaacctgacg

SEQ ID NO: 8494 - DNA, 75 bp, synthetic construct
  source 1..75: mol_type = other DNA
gcgggatggtggcgggagcatttgactgtgctgacatcatcgcccgtgtgcgagacataaaaccggtatgggcgc

SEQ ID NO: 8495 - DNA, 75 bp, synthetic construct
  source 1..75: mol_type = other DNA
tggaaatgatggtggccacgctgaagattccgctcgagcgacgtaataagcgtaccggcagaaccgaaaaggcgc

SEQ ID NO: 8496 - DNA, 75 bp, synthetic construct
  source 1..75: mol_type = other DNA
atgagtaaggccggacatgtgtcgcttcgcagggcgttgtatatgcccgcaatggtagccaccagtaagactgag

SEQ ID NO: 8497 - DNA, 75 bp, synthetic construct
  source 1..75: mol_type = other DNA
ctgctccacctcagtcagccacattctggctgtacaaaagagtacacagctgcaaatcgacacacttatccggca

SEQ ID NO: 8498 - DNA, 75 bp, synthetic construct
  source 1..75: mol_type = other DNA
acaggggctagatgaaacagcgttcaaccgcgcgctcaatgcggtgattgcgcggcacagcatgttgcgtgcaat

SEQ ID NO: 8499 - DNA, 75 bp, synthetic construct
  source 1..75: mol_type = other DNA
ctattgctttttcattgtgtgctgttgcacatgcagccaatcaagggcaaggtgttgttaattttaaaggaactg

SEQ ID NO: 8500 - DNA, 75 bp, synthetic construct
  source 1..75: mol_type = other DNA
atgaactatgccggacacgaaaaactgcgcgccgaagtggcggaggtggccaatgccatgtgcgacctgcgtaca

SEQ ID NO: 8501 - DNA, 75 bp, synthetic construct
  source 1..75: mol_type = other DNA
ccgcagtcgtcacactgatgatacggatgtgcttctccgtatacaccatgttatcggagagctgcccacgtatgg

SEQ ID NO: 8502 - DNA, 75 bp, synthetic construct
  source 1..75: mol_type = other DNA
actgatgctctccagccgtcagcagcacaaactgctccagtggagacggcagaatccgatactcaaaaaaatgaa

SEQ ID NO: 8503 - DNA, 75 bp, synthetic construct
  source 1..75: mol_type = other DNA
gaccaggttgcggcaggacgtcagcaactcgagcacggcgatgtgcttccccatgacatggtcgaatcctctgct

SEQ ID NO: 8504 - DNA, 75 bp, synthetic construct
  source 1..75: mol_type = other DNA
aagaatggtttaaaaacaaatatcacgtttcaagtgacgtgatgaagattatgcacatcaaggtcgagattgcat

SEQ ID NO: 8505 - DNA, 75 bp, synthetic construct
  source 1..75: mol_type = other DNA
tctctcgactgctggtacaaactcaccgcgatccggcgaaatcggtgattcctatcgtgttcaccagcttgctca

SEQ ID NO: 8506 - DNA, 75 bp, synthetic construct
  source 1..75: mol_type = other DNA
tgggcgaaacccggcactacggtattccggccacactgcggggcatggtgaacaatgacctgaagaccaccgctg

SEQ ID NO: 8507 - DNA, 75 bp, synthetic construct
  source 1..75: mol_type = other DNA
atgcagagattgccacggtacaggccgtgcggttgatatagccaaaacagagcagtgggggagagttgttgagaa

SEQ ID NO: 8508 - DNA, 75 bp, synthetic construct
  source 1..75: mol_type = other DNA
tctacctccgcgaaggctatgagcatgagtgcttcagtccgctcgaacagtttcgtcgtaaattcagggaaatag

SEQ ID NO: 8509 - DNA, 75 bp, synthetic construct
  source 1..75: mol_type = other DNA
acaaactgagaaaattatccataaacgagggtatctcaaatgaccgggttattgaaagtgctctggacatgattt

SEQ ID NO: 8510 - DNA, 75 bp, synthetic construct
  source 1..75: mol_type = other DNA
agcagagggggtgtagtaatccttgtatatcggagtgaagagaaaaatgacgatcacaaaacaacgagtagaaaa

SEQ ID NO: 8511 - DNA, 75 bp, synthetic construct
  source 1..75: mol_type = other DNA
tcgatacggccctcaacacaggtctggcgcttcttggttatttttacattatgttctgcgccgggcggtggctat

SEQ ID NO: 8512 - DNA, 75 bp, synthetic construct
  source 1..75: mol_type = other DNA
cggaagtggtcaacggggacattatctgctccacctcagtcagccacattctggctgtacaaaagagtacacagc

SEQ ID NO: 8513 - DNA, 75 bp, synthetic construct
  source 1..75: mol_type = other DNA
cctgtattttgtgtcgttttccatacccgaagaggggctgaaaaggatgctgagcgaaacccggcactacggtat

SEQ ID NO: 8514 - DNA, 75 bp, synthetic construct
  source 1..75: mol_type = other DNA
tgatgatattcgttagttttggtgttatagctaattgcgaaacacaagctaaagatcaagattgctttaccattt

SEQ ID NO: 8515 - DNA, 75 bp, synthetic construct
  source 1..75: mol_type = other DNA
agtggttccgtgctggcaaccggtaaccttactgcttcggcaaccggtcagttgaccagtaccggcgatatcatg

SEQ ID NO: 8516 - DNA, 75 bp, synthetic construct
  source 1..75: mol_type = other DNA
gatggggaggtatcacgccccagagagcctaactggacgacctgggcgaatgatgtgcgcatgatgcgtatgctg

SEQ ID NO: 8517 - DNA, 75 bp, synthetic construct
  source 1..75: mol_type = other DNA
ggcatcccctcaacctgcgctgatgaataacggaggttcattgctgaccagcggcgatctgacaatcaccgcagg

SEQ ID NO: 8518 - DNA, 75 bp, synthetic construct
  source 1..75: mol_type = other DNA
agtggcttcgccagccttcgttgtggctgttgaagcggatgatgcggcgctttctgccgattttccggcggcggt

SEQ ID NO: 8519 - DNA, 75 bp, synthetic construct
  source 1..75: mol_type = other DNA
atcacgggcagttcaggaaattcgggcagcacgtgagcagtgggaacgtgaaaacggatttatcagcgacggaaa

SEQ ID NO: 8520 - DNA, 75 bp, synthetic construct
  source 1..75: mol_type = other DNA
gatgagatgtttctcgacgtgcggggtattggcagctgcatcgatttcgaggatttcggccggcagctgcgtgaa

SEQ ID NO: 8521 - DNA, 75 bp, synthetic construct
  source 1..75: mol_type = other DNA
aaaagtataaatatagaatggccggttcaaaatccattgctttctgataaagatattaatggtcaaaaatttgta

SEQ ID NO: 8522 - DNA, 75 bp, synthetic construct
  source 1..75: mol_type = other DNA
agacgctattacaaagctgttgatgctaataaccgagccaacagaatggcgaaaaggccaaaaccgtgcttactg

SEQ ID NO: 8523 - DNA, 75 bp, synthetic construct
  source 1..75: mol_type = other DNA
cccgggactcccgtgcaccggagcggtggccatcagggaccattaccgtcagggtttatgacgatcagccgtttg

SEQ ID NO: 8524 - DNA, 75 bp, synthetic construct
  source 1..75: mol_type = other DNA
ggctggaggcctgtctgaaaaaccgccgttacgaacctcatatccagtcaaggaaagaggagtcggaagccatca

SEQ ID NO: 8525 - DNA, 75 bp, synthetic construct
  source 1..75: mol_type = other DNA
caggcgctggctgcacaaaaagcagggatttccgtcgggcagtataaagcggccatgcgaaccctgcccgcacag

SEQ ID NO: 8526 - DNA, 75 bp, synthetic construct
  source 1..75: mol_type = other DNA
ttaacaaagcacttgagcgtttttattttcgcttaagtgcatcaggcgctcatgctgaacgtgcggcccgtgact

SEQ ID NO: 8527 - DNA, 75 bp, synthetic construct
  source 1..75: mol_type = other DNA
gctccctgtatgcccgcacccaggtcaaaaatatccagctgatttccatgacgctgccggatatcaatgccggat

SEQ ID NO: 8528 - DNA, 75 bp, synthetic construct
  source 1..75: mol_type = other DNA
atctcagcagaaagtttgtcaggacattggcagtgaaagcaatatcttcgccgactgggccgcatctcgtcaggg

SEQ ID NO: 8529 - DNA, 75 bp, synthetic construct
  source 1..75: mol_type = other DNA
ctgccggtgttcaacaccgtgcgtgaagctgttgctgctactggcgctaccgcttctgttatctacgtaccagca

SEQ ID NO: 8530 - DNA, 75 bp, synthetic construct
  source 1..75: mol_type = other DNA
tcttcatcaggagcgaataactggacaccaacaaccagtatcagcgatctgctggttgtggtgatgaaaaaatcc

SEQ ID NO: 8531 - DNA, 75 bp, synthetic construct
  source 1..75: mol_type = other DNA
atggtaacgctgaccattaaccgtaaaccacagggcattttcagtaaatcaccggcaacgccgctgcaggataaa

SEQ ID NO: 8532 - DNA, 75 bp, synthetic construct
  source 1..75: mol_type = other DNA
ggtgctctatgaagtggaccttatcaacatggtggaaattgtggatggtgtggacctgatggaagcacaccgcaa

SEQ ID NO: 8533 - DNA, 75 bp, synthetic construct
  source 1..75: mol_type = other DNA
atctgaaagaaatctgggattatctgacccatgatgaacaggaactgtttgaagtcattaataaaaaattactgg

SEQ ID NO: 8534 - DNA, 75 bp, synthetic construct
  source 1..75: mol_type = other DNA
gaagccgctggtgatcaccccggaaggcctcgaccggaaattctacgaaatctgcgccctgtccgagctgaagaa

SEQ ID NO: 8535 - DNA, 75 bp, synthetic construct
  source 1..75: mol_type = other DNA
cccctatatttccagacatctgttatcacttaacccattacaagcccgctgccgcagatattcccgtggcgagcg

SEQ ID NO: 8536 - DNA, 75 bp, synthetic construct
  source 1..75: mol_type = other DNA
acatggatatccatgacgccgtctacctgctggcacaacgcaacttccctgatgagatgcgcgaactggaagcgc

SEQ ID NO: 8537 - DNA, 75 bp, synthetic construct
  source 1..75: mol_type = other DNA
gctggggcgcgaggcggatatgtcggggagtgctgcggatattgcgcaacgtgtgtctgagtgggaagaggagct

SEQ ID NO: 8538 - DNA, 75 bp, synthetic construct
  source 1..75: mol_type = other DNA
catgaaggtgcccccgccgctgtggcgtgccggtctgcgccagaacttccgtatcttccagaacgaggacatcaa

SEQ ID NO: 8539 - DNA, 75 bp, synthetic construct
  source 1..75: mol_type = other DNA
gtcggcgtccgcgattccacctatgtgctcgacggcctgctgtaccacgagtccgacctgcggatcgaggagcac

SEQ ID NO: 8540 - DNA, 75 bp, synthetic construct
  source 1..75: mol_type = other DNA
tcacagaggctggtatggcggcaagggaggccggtcatgccgtccgtgagatggagcggtggatggtgccgaaca

SEQ ID NO: 8541 - DNA, 75 bp, synthetic construct
  source 1..75: mol_type = other DNA
tcctgttctgttcacgatcaccgtcatcgtaaatggcgccatcttgatacctgccagttcaccactattgttgaa

SEQ ID NO: 8542 - DNA, 75 bp, synthetic construct
  source 1..75: mol_type = other DNA
gaagaacggaacaggcttcagtgaaatagcgaatatcctgggttcaaaacccggaacgatcttcactatgttaag

SEQ ID NO: 8543 - DNA, 75 bp, synthetic construct
  source 1..75: mol_type = other DNA
gggaggcagagcagaaagcccgtgcgtaccaggcgctggtcgctcaggctgaaatcgaactggcattccattcgc

SEQ ID NO: 8544 - DNA, 75 bp, synthetic construct
  source 1..75: mol_type = other DNA
agtagcaatattaagccgggttatgattattacttttatatccgcagcgtgaacaccgttggtaaatcggcattt

SEQ ID NO: 8545 - DNA, 75 bp, synthetic construct
  source 1..75: mol_type = other DNA
atccggtgcgcctgcatgggcatctgaacatcagtccacgctgagcgcggggtatcttcatgcctcgacgaacgt

SEQ ID NO: 8546 - DNA, 75 bp, synthetic construct
  source 1..75: mol_type = other DNA
gaaatcgaactggcattccattcgccggaaacagtcggaagctggcatgcacgctggagtgaccgggtggcagag

SEQ ID NO: 8547 - DNA, 75 bp, synthetic construct
  source 1..75: mol_type = other DNA
atgaacaaaaaaatatacattttattcgccctgactgcaggactgtttatttctgcccacgcttcggaaaacgtg

SEQ ID NO: 8548 - DNA, 75 bp, synthetic construct
  source 1..75: mol_type = other DNA
tcaaaaacgttccgtcgtctggttatcacacttacccgacgttatggcgtcagtctcattcatctggatgccagc

SEQ ID NO: 8549 - DNA, 75 bp, synthetic construct
  source 1..75: mol_type = other DNA
acgaccagatgacctcagacgccgctgtggatgaggccattctcatcaatgcatacatcttcaccgaaaccggtc

SEQ ID NO: 8550 - DNA, 75 bp, synthetic construct
  source 1..75: mol_type = other DNA
acgactggctgagctcagacgccgctgtggatgaggccctactcatcaacgaatacaccttcaccgaagccggtc

SEQ ID NO: 8551 - DNA, 75 bp, synthetic construct
  source 1..75: mol_type = other DNA
aggccggactgactgccgatcgtatgctgacgctctcaagagccgggcaggcagcagggctgacgtttaaccagg

SEQ ID NO: 8552 - DNA, 75 bp, synthetic construct
  source 1..75: mol_type = other DNA
aagccatcacgctgaaaatcgacccggctgtggtactggcaacacgtaaatatgtggatgacaaaatttctgagc

SEQ ID NO: 8553 - DNA, 75 bp, synthetic construct
  source 1..75: mol_type = other DNA
atgaacaaaaaaatatacattttattcgccctgacagcaggattgtttctttctgcccatgcttcggaaaatgtg

SEQ ID NO: 8554 - DNA, 75 bp, synthetic construct
  source 1..75: mol_type = other DNA
tggtattgcggaaatcagccctgtccccgatgctggcgacactcccgctcatctttctgctgactcctctggtct

SEQ ID NO: 8555 - DNA, 75 bp, synthetic construct
  source 1..75: mol_type = other DNA
ctggcacttggggtttatcctgaaatcacactagcggatgccagagtacgtcgtgacgaggcgcgtaagctgctt

SEQ ID NO: 8556 - DNA, 75 bp, synthetic construct
  source 1..75: mol_type = other DNA
aaaaaaattggtttttacaccattggcgataaaagcatttacctgtatgacctgcgccgcatggatgaaatcatg

SEQ ID NO: 8557 - DNA, 75 bp, synthetic construct
  source 1..75: mol_type = other DNA
tgcggaaaagctgacacataaactgaaagagggctggcagccgtttggtagtccggtggccataaccccttatac

SEQ ID NO: 8558 - DNA, 75 bp, synthetic construct
  source 1..75: mol_type = other DNA
atgccatttgcgcgctatttctgcattttcataaacgttggtttgggagaaggttcggcattacccgttggtgtg

SEQ ID NO: 8559 - DNA, 75 bp, synthetic construct
  source 1..75: mol_type = other DNA
aacggctgaatgagctggcaaatcaggctgtgcggtttgaacagcagcagagtgcgaagcaggctgcaatcagcg

SEQ ID NO: 8560 - DNA, 75 bp, synthetic construct
  source 1..75: mol_type = other DNA
gtcatcgcatttggtaagcaggccgacttcctggctaaacatcaaaaaggcgacgttgccagcgtatccggcacg

SEQ ID NO: 8561 - DNA, 75 bp, synthetic construct
  source 1..75: mol_type = other DNA
gagttctggcgcgacgaaaagaattacgcttaacacaacgagaagctgcgcgcctcgctggagttgctcacgtca

SEQ ID NO: 8562 - DNA, 75 bp, synthetic construct
  source 1..75: mol_type = other DNA
gacaggattgcgatgattaatcctgcgaatggcaacacaaagccgatgtttgttggtcagggcgatcagatattc

SEQ ID NO: 8563 - DNA, 75 bp, synthetic construct
  source 1..75: mol_type = other DNA
cgccggcgcgccacaggagcagaaggataatccgcttattaatattctggagaagttctccagctggtatgacac

SEQ ID NO: 8564 - DNA, 75 bp, synthetic construct
  source 1..75: mol_type = other DNA
gccagtgcggggactgtggagcttaattccggtgttggtggcctttccgttgattttgagccaacagccctcctg

SEQ ID NO: 8565 - DNA, 75 bp, synthetic construct
  source 1..75: mol_type = other DNA
agacggcggacagcaccacggaccagctgcagaataagacgctctggtcgtcatacaccgaaatcatcgatgtga

SEQ ID NO: 8566 - DNA, 75 bp, synthetic construct
  source 1..75: mol_type = other DNA
agggaccgaaaggagaaacaggtgcggctggcccggtgggggcaaccggacctcaggggccgaagggcgacccgg

SEQ ID NO: 8567 - DNA, 75 bp, synthetic construct
  source 1..75: mol_type = other DNA
acacgcaccattacgtcagcgaacattgaccgcctgcgggtgaccttcggggtgcagtcactggtggagaccacg

SEQ ID NO: 8568 - DNA, 75 bp, synthetic construct
  source 1..75: mol_type = other DNA
aaacgtgtcagagaaaacctcggtgttcctgacacagccaaaaaccggaagatcgctggtgaacttcgcacttcc

SEQ ID NO: 8569 - DNA, 75 bp, synthetic construct
  source 1..75: mol_type = other DNA
tacaaaattaaactacgtgcatcgggatttcgtctggtttatcaggtgattgacgatatgttaattattgcggtt

SEQ ID NO: 8570 - DNA, 75 bp, synthetic construct
  source 1..75: mol_type = other DNA
gtcacagcagaaggtctgtcaggacattgccggtgagagcaatatttttgctgactgggccgcgtcccgtcaggg

SEQ ID NO: 8571 - DNA, 75 bp, synthetic construct
  source 1..75: mol_type = other DNA
atgcgtcgaacagcaacatttacacacctgtatttgttgagagtattttaaaggttaatataccagttagtattt

SEQ ID NO: 8572 - DNA, 75 bp, synthetic construct
  source 1..75: mol_type = other DNA
ccgcaatgaggcagtgatccgtcgtgctggtggcgtggaatgtcttgaaagctggttacttcgtgaaaagggctg

SEQ ID NO: 8573 - DNA, 75 bp, synthetic construct
  source 1..75: mol_type = other DNA
ggtgatgtcaccacacctgtggtggtgaagccgtcggatggagaaggcgcagttatcagcaccaccagcaacccg

SEQ ID NO: 8574 - DNA, 75 bp, synthetic construct
  source 1..75: mol_type = other DNA
atgctcaccagcggtgaactgaatccccgacatcagcataccgtcacgctgtatgcaaaagggctgacctgcgaa

SEQ ID NO: 8575 - DNA, 75 bp, synthetic construct
  source 1..75: mol_type = other DNA
atgtgaacggcgttccgcttcgtgagagtctcagctacaacgggggcggtgcaggatttggcgggcaaatggctg

SEQ ID NO: 8576 - DNA, 75 bp, synthetic construct
  source 1..75: mol_type = other DNA
atcaaaaaataagccctacgccaccacggaatatgtctcttttgaaacggagaacgccgttcattaccgcgtgca

SEQ ID NO: 8577 - DNA, 75 bp, synthetic construct
  source 1..75: mol_type = other DNA
taaactgggatggaaaaatacagtgtcaggtaaatgtaccggagacagcaatatctgaccagcagttattgcttc

SEQ ID NO: 8578 - DNA, 75 bp, synthetic construct
  source 1..75: mol_type = other DNA
actggcctgagagcgccgacactgacgcgaaaaaatgcgccgcctttgcgggttctggcgtatccgttcagccgc

SEQ ID NO: 8579 - DNA, 75 bp, synthetic construct
  source 1..75: mol_type = other DNA
gcggatcgaccggacattcgcggagaccttcgtcctgagatccgagctcctagggatcgcctcagaaaacggaaa

SEQ ID NO: 8580 - DNA, 75 bp, synthetic construct
  source 1..75: mol_type = other DNA
ggaacgctgaagttctgcgaaaaactgatggaaaaggcggtgggcttcacttcccgttttgatttcgccattcat

SEQ ID NO: 8581 - DNA, 75 bp, synthetic construct
  source 1..75: mol_type = other DNA
aaaaatcagtccagaccaggagctaactcccgcaacggtttttccacaaagaccgttatcacaggcgacggtcca

SEQ ID NO: 8582 - DNA, 75 bp, synthetic construct
  source 1..75: mol_type = other DNA
tggattacatcgacatgcgcctggcagagaatgtctggaatagcgaggttatcttcgcggagattaaggcaatgg

SEQ ID NO: 8583 - DNA, 75 bp, synthetic construct
  source 1..75: mol_type = other DNA
gaaggtcaccggctggccgcactctggcaggcgctgccggaagagcttcgcctgagtccgcatcgttatctggcg

SEQ ID NO: 8584 - DNA, 75 bp, synthetic construct
  source 1..75: mol_type = other DNA
accactataacttcctgccacgggcatgccgtccacgcagggccagaacaaaaggtaaggttgagcggatggtga

SEQ ID NO: 8585 - DNA, 75 bp, synthetic construct
  source 1..75: mol_type = other DNA
cgcatgccggacttctcatagacgacgagcagtttgatgaaatcaatattgtgcgcggtcagctcgttcctggtg

SEQ ID NO: 8586 - DNA, 75 bp, synthetic construct
  source 1..75: mol_type = other DNA
tgccttacccgccgacggtgaatacctactggcgacgtcatggcaatacgtatttcatctcggaggccggaaagc

SEQ ID NO: 8587 - DNA, 75 bp, synthetic construct
  source 1..75: mol_type = other DNA
aagcaatgggaaaagccacgtcggtagagctggctgagcgacttgatatcagtcgtgaagaagtactgaacgagc

SEQ ID NO: 8588 - DNA, 75 bp, synthetic construct
  source 1..75: mol_type = other DNA
ctgggccgcagcagccgctggtacaaaagcgaagtggagcagtggatgcaacagcgaatcgaggagtcacgagga

SEQ ID NO: 8589 - DNA, 75 bp, synthetic construct
  source 1..75: mol_type = other DNA
acctttcacgcgaacgctgccagttaatactgactcagctggttatggcgggtctggcagactatcagttcggtt

SEQ ID NO: 8590 - DNA, 75 bp, synthetic construct
  source 1..75: mol_type = other DNA
cacgccgaaggtggtgaagggcgtgagcttcctgcttcgcctgaccgtggcagcggatgacggcagtgagcggct

SEQ ID NO: 8591 - DNA, 75 bp, synthetic construct
  source 1..75: mol_type = other DNA
tcccgacaaagacaataaattcgagccctcaatatatctgaatgatgcttcttatctactgactgacgactccgc

SEQ ID NO: 8592 - DNA, 75 bp, synthetic construct
  source 1..75: mol_type = other DNA
ctgacgaaattaacgacagaaattgccagctattgcgctgatgaatttaaaaaacttaacgacaaaaggagctgg

SEQ ID NO: 8593 - DNA, 75 bp, synthetic construct
  source 1..75: mol_type = other DNA
gacggatgtgacccgcagtccgggatgtatggtaaatcttggaataacaatcccggagctggggaaaaccgggca

SEQ ID NO: 8594 - DNA, 75 bp, synthetic construct
  source 1..75: mol_type = other DNA
ggtcacctggattattcccgcgcgatagtggttgcgtccgtgaaagaagcaccaattggtatcgaggctactccc

SEQ ID NO: 8595 - DNA, 75 bp, synthetic construct
  source 1..75: mol_type = other DNA
ttcactggtacaaatacccgctgacatactggctgagtattatcacctcagcaggatgtctgatgggcggcgata

SEQ ID NO: 8596 - DNA, 75 bp, synthetic construct
  source 1..75: mol_type = other DNA
gaatatctttattcaatcagaaatcatcgttataccgccacgatgcttcagcatattgctgaagatcgtgacggg

SEQ ID NO: 8597 - DNA, 75 bp, synthetic construct
  source 1..75: mol_type = other DNA
gtgagcgcagaactcatgcgactgctgagcaacatcatccgtaccgggatcatctctgaagttgatgaggaatcc

SEQ ID NO: 8598 - DNA, 75 bp, synthetic construct
  source 1..75: mol_type = other DNA
ttcatacgaacggcaggggatcccctgcccgtggcgttactacaacgatcgcgatgtacgcacaatcgttgagct

SEQ ID NO: 8599 - DNA, 75 bp, synthetic construct
  source 1..75: mol_type = other DNA
atggccgagtcgagccccggcctgacctacgccaagctgtcctggctgcaagcctggcacatccgcgacgaaacc

SEQ ID NO: 8600 - DNA, 75 bp, synthetic construct
  source 1..75: mol_type = other DNA
ccgaagtccgtcagcgggcgattcgtatggttctggaaagtcaggatgaatatgactcacagtgggcggcaattt

SEQ ID NO: 8601 - DNA, 75 bp, synthetic construct
  source 1..75: mol_type = other DNA
attgcttatgaaggttccggtagtggcgactggcgaacggatgcatttattgttggtatcggataccgtttctga

SEQ ID NO: 8602 - DNA, 75 bp, synthetic construct
  source 1..75: mol_type = other DNA
ggatacaactgaacataatcaggacacgcagtcgatggatgctcagccacagataaattctgttgatgcgaaata

SEQ ID NO: 8603 - DNA, 75 bp, synthetic construct
  source 1..75: mol_type = other DNA
tggcatcacaatgatatttatagcgccttccccctcagttcaggacaaaccagccagcactgacaataccaacgt

SEQ ID NO: 8604 - DNA, 75 bp, synthetic construct
  source 1..75: mol_type = other DNA
atggttttttctttgatggtataaacagcgacatgcctgctgacattgttgagataagtacagacttatacaatg

SEQ ID NO: 8605 - DNA, 75 bp, synthetic construct
  source 1..75: mol_type = other DNA
atgtctgatatcacagtctcccgtccggaagttgtcaacgggcatacggacgttatctgctcaaccagtatcctc

SEQ ID NO: 8606 - DNA, 75 bp, synthetic construct
  source 1..75: mol_type = other DNA
ctgatgaaatcagagacccaggataaaaaatcagtcgaaacgctctatcatcgttatattattcaacgccatgtt

SEQ ID NO: 8607 - DNA, 75 bp, synthetic construct
  source 1..75: mol_type = other DNA
ggatactggggtggtcagagcgggtgccgggtgctgaggacgtactgccagcgccgctgccgccgtaccgggtgc

SEQ ID NO: 8608 - DNA, 75 bp, synthetic construct
  source 1..75: mol_type = other DNA
aggcatttgtcatactggcagagtccagttcgtttaacaatgccgctaaattactcaatattacgcaacctgcat

SEQ ID NO: 8609 - DNA, 75 bp, synthetic construct
  source 1..75: mol_type = other DNA
ccggatacatcgtggggtggcgggtctcatcgtctatggaaacgacattcgtgctggatgcgctggagcaggcgt

SEQ ID NO: 8610 - DNA, 75 bp, synthetic construct
  source 1..75: mol_type = other DNA
caaagaagtcatcgagattgacgtgatcaacatggtgctgaaagtcgacggtgtcgaccgtatggcagagcaccg

SEQ ID NO: 8611 - DNA, 75 bp, synthetic construct
  source 1..75: mol_type = other DNA
ttatattgataatcaggatgtttatcatcagccatccagtgtgttttttgttattaaaccgtctgcgtggggaaa

SEQ ID NO: 8612 - DNA, 75 bp, synthetic construct
  source 1..75: mol_type = other DNA
tgcgttgtgggggatggctttgccggagacagaatttacacctgctgaacttgccgccttccgggactactgggc

SEQ ID NO: 8613 - DNA, 75 bp, synthetic construct
  source 1..75: mol_type = other DNA
atgaaacagcaacgtaattcacgctttcgtaatggtgctgaacgccacgctaaccgtttcgctaccagtgcatca

SEQ ID NO: 8614 - DNA, 75 bp, synthetic construct
  source 1..75: mol_type = other DNA
gttgaccgtatccggcgtgaacgcctgcctaaagaactggcatccgcgctgaaacaacaactgaggattgcaata

SEQ ID NO: 8615 - DNA, 75 bp, synthetic construct
  source 1..75: mol_type = other DNA
ttgtttcgtgaaaaatacagagttggtataggtagggataaaaacgaaaacgttggtttgggggaaggctctgca

SEQ ID NO: 8616 - DNA, 75 bp, synthetic construct
  source 1..75: mol_type = other DNA
ccgggccgaacgggacgcatcacagctgaagtataccggagaggcgcagaaggcgtatgagcgtctgctgacgcc

SEQ ID NO: 8617 - DNA, 75 bp, synthetic construct
  source 1..75: mol_type = other DNA
atggctgtaccaaaacatcttcgcttttttacgttgtttgtggatggtgaaaacgaagtgggtaaagtgacatcc

SEQ ID NO: 8618 - DNA, 75 bp, synthetic construct
  source 1..75: mol_type = other DNA
gaccaagacagttcgtgctggatccgtgtggcacaggcgtgggcaggcaccggttttggccacctggcgataccg

SEQ ID NO: 8619 - DNA, 75 bp, synthetic construct
  source 1..75: mol_type = other DNA
tgaaatctggcgtgacttgatgcaacgttccgggatgctttccttaatggatgcacaggcccgtgagacatggta

SEQ ID NO: 8620 - DNA, 75 bp, synthetic construct
  source 1..75: mol_type = other DNA
tgatgagaaagtcgttttactcgttattgctgttggaagaagggaaagcagcgaagtttatcagattgcagatat

SEQ ID NO: 8621 - DNA, 75 bp, synthetic construct
  source 1..75: mol_type = other DNA
tactgcaatagtagagggttgataatttacaacgcggataacagcagtgttatatgtggtaaagaactggaaggc

SEQ ID NO: 8622 - DNA, 75 bp, synthetic construct
  source 1..75: mol_type = other DNA
acctttcccctgtcacttataaccagattcctgtaatcacaactgagttactcgcccgcctttacggaacagaag

SEQ ID NO: 8623 - DNA, 75 bp, synthetic construct
  source 1..75: mol_type = other DNA
ggattacaactggcgtgctaatggcaccccaccctctttccatgagcagagatctttatcagagcgattgttcag

SEQ ID NO: 8624 - DNA, 75 bp, synthetic construct
  source 1..75: mol_type = other DNA
atctgcggctaccttacgaattaaaggaaaaactaaaacagcgagccaaatccaatggccgctctcttaattcag

SEQ ID NO: 8625 - DNA, 75 bp, synthetic construct
  source 1..75: mol_type = other DNA
gtgaaaagctcaataaatcaaagcgcgatatgaccaatttctacacgatcaactatgggagcgagcttttagatg

SEQ ID NO: 8626 - DNA, 75 bp, synthetic construct
  source 1..75: mol_type = other DNA
cgaacaggaagcgttgatccacgccctgcaggaaaagctgagcaaccgggaacgcgaaatagaccatctgcaggc

SEQ ID NO: 8627 - DNA, 75 bp, synthetic construct
  source 1..75: mol_type = other DNA
tggatactcatcctatcatcagaatgtctattgaagttctgttgcaaaaaaacagtgaattgcagattgtcctga

SEQ ID NO: 8628 - DNA, 75 bp, synthetic construct
  source 1..75: mol_type = other DNA
gccgcagggctgacgtttaaccaggcgagtgagtcactggcagccctggtgaatgccggtgtgcgtggtggtgaa

SEQ ID NO: 8629 - DNA, 75 bp, synthetic construct
  source 1..75: mol_type = other DNA
actgcacaggcattcaaatccatgtgggatgcggtgctggatattggtcgcccggactcctctgcagatatgctc

SEQ ID NO: 8630 - DNA, 75 bp, synthetic construct
  source 1..75: mol_type = other DNA
cgctggttataaacacacagctggcgatgaagattggtttaaacgaagccattgtgttgcagcaactgcattact

SEQ ID NO: 8631 - DNA, 75 bp, synthetic construct
  source 1..75: mol_type = other DNA
atgaagcagcgcattacagtcaccgtcgacagtgacagctatcagttgctcaaggcatatgatgtcaatatctcc

SEQ ID NO: 8632 - DNA, 75 bp, synthetic construct
  source 1..75: mol_type = other DNA
acattcggggtctttgataacggatggcacacgctggcttttgagtttgccggaaacaacagcattcaggtgaca

SEQ ID NO: 8633 - DNA, 75 bp, synthetic construct
  source 1..75: mol_type = other DNA
ccagatggtaagcctgtccgcctgactcatatggccgtgggcgacggtggcggcacgttgcccacaccagacagt

SEQ ID NO: 8634 - DNA, 75 bp, synthetic construct
  source 1..75: mol_type = other DNA
cactggttgatttgaaattcatcatggccgatactggcttcggtaaaaccttcatctatgaccggattaagtccg

SEQ ID NO: 8635 - DNA, 75 bp, synthetic construct
  source 1..75: mol_type = other DNA
aagtgattacctgccacagacaaattggccaacaactcaattaccaccaggatatacttgtgcagaaccctattt

SEQ ID NO: 8636 - DNA, 75 bp, synthetic construct
  source 1..75: mol_type = other DNA
taccgccagaatttcagccagcgtgagctgatggtcatctggccggatttcctcgcatgggatacggtcaccagt

SEQ ID NO: 8637 - DNA, 75 bp, synthetic construct
  source 1..75: mol_type = other DNA
cgcagaaggataagttcggcgcgggtaagaacggttttactcgtggtaacccccagaccggcacacctgccaccg

SEQ ID NO: 8638 - DNA, 75 bp, synthetic construct
  source 1..75: mol_type = other DNA
gaatgaacgccgagcaaattcacaactttaaggtgctgatgttagagaacacccttgaaccgtataagtatatga

SEQ ID NO: 8639 - DNA, 75 bp, synthetic construct
  source 1..75: mol_type = other DNA
aaaacattcttcagagcattaagcccttacgactacacactgtattgcaggaagtgggtaaaaccaaatctgact

SEQ ID NO: 8640 - DNA, 75 bp, synthetic construct
  source 1..75: mol_type = other DNA
accgtcgagcacttgttactggcgctgctcagtaacccatctgcccgggaggcgctggaagcgtgttctgtggat

SEQ ID NO: 8641 - DNA, 75 bp, synthetic construct
  source 1..75: mol_type = other DNA
gaaggcgacggaacagcagaaaaagacctgctggatgtggtggagaaagccctgaacagtgagaacgtccgcccg

SEQ ID NO: 8642 - DNA, 75 bp, synthetic construct
  source 1..75: mol_type = other DNA
cgtatcgcgtttattgatccgtctaatggcaacacaagaccaatgtttgttggtcagggcgatcagatattcatg

SEQ ID NO: 8643 - DNA, 75 bp, synthetic construct
  source 1..75: mol_type = other DNA
gccagcggcaacatgcgtgacatggccgctatttttacaggtgtaggccagaagctcagcggtatgccgtattac

SEQ ID NO: 8644 - DNA, 75 bp, synthetic construct
  source 1..75: mol_type = other DNA
ccggatgaggaaaaaatgctgatgcagaaagcggcaggacttgccggaggcgtccggtttggtggggacggaggg

SEQ ID NO: 8645 - DNA, 75 bp, synthetic construct
  source 1..75: mol_type = other DNA
actgatctactggagcagcgtgtaccgatgatgcaggcatgggcggattatgtgatgtctcaaattgtgaataaa

SEQ ID NO: 8646 - DNA, 75 bp, synthetic construct
  source 1..75: mol_type = other DNA
ctggaggaacaaaatacgatattaaaaaaggctaccgcgctcttgatgtccgactcgctgaacggttcacgatag

SEQ ID NO: 8647 - DNA, 75 bp, synthetic construct
  source 1..75: mol_type = other DNA
ttgatggcaacggacgtctgacgggcgcccgtacagcacaggccgcaccttatgctcactacacctgccacttgt

SEQ ID NO: 8648 - DNA, 75 bp, synthetic construct
  source 1..75: mol_type = other DNA
atgtttgtgaaacctgttaaagggcggtcagtgcctgaccctgcccgcggcgaccttttgcccgccgaagggcga

SEQ ID NO: 8649 - DNA, 75 bp, synthetic construct
  source 1..75: mol_type = other DNA
tacgtcaccacaagctggtcagatcgcgccggctctcgcacacattgggcaaaaaccaacagaatcagaccactc

SEQ ID NO: 8650 - DNA, 75 bp, synthetic construct
  source 1..75: mol_type = other DNA
aacctggtaccgggaagaaccatttagcggcagctatcggaaatcgcctgctgaaagacggtcaggcagtgattg

SEQ ID NO: 8651 - DNA, 75 bp, synthetic construct
  source 1..75: mol_type = other DNA
gttttaccagaaacatatcgagccggatattgatattgtaaaactacgaaatgagatcccagattatttgaggtg

SEQ ID NO: 8652 - DNA, 75 bp, synthetic construct
  source 1..75: mol_type = other DNA
ccagtatggtaaaagcaattactactcttttcagcatccccatgaaggaagtaatcagattcctctatttattcg

SEQ ID NO: 8653 - DNA, 75 bp, synthetic construct
  source 1..75: mol_type = other DNA
gacctgacgggctggatgtcgctgtcacggaaaccgcaagtgacctggtacggctgggacggcgaccggctgacc

SEQ ID NO: 8654 - DNA, 75 bp, synthetic construct
  source 1..75: mol_type = other DNA
tcggtaaccggtgttaaaccgcgtattctcggtgtgccgggactggataccaaagaggtggctgttgcactggca

SEQ ID NO: 8655 - DNA, 75 bp, synthetic construct
  source 1..75: mol_type = other DNA
gcttggctggtatcacgaaatctcactggaagcggggcttgccagcacttaccagtggttccttgagaatcaaga

SEQ ID NO: 8656 - DNA, 75 bp, synthetic construct
  source 1..75: mol_type = other DNA
ctgaccaccattctcaacccggaggcggtcatttttgccaatccgatagcccagggggcctgtgcagcggacgcg

SEQ ID NO: 8657 - DNA, 75 bp, synthetic construct
  source 1..75: mol_type = other DNA
aatcgaccaggagcagggctggcataaaacgctgtccaacgtcggggtgaacggtgttaccggcatcagcgcctc

SEQ ID NO: 8658 - DNA, 75 bp, synthetic construct
  source 1..75: mol_type = other DNA
agttagagttaagggaaattccttatattaaaaatagtctacatgccaattacagctataaatctattagtattg

SEQ ID NO: 8659 - DNA, 75 bp, synthetic construct
  source 1..75: mol_type = other DNA
cctgaccaataatgagcagaccgcctccggcggtgtggtggtggccaccgtcaacaaaaagccctttacgttcat

SEQ ID NO: 8660 - DNA, 75 bp, synthetic construct
  source 1..75: mol_type = other DNA
tttgtgctggattttctggtgttcggtaatgcgtttctggaaaagcgttacagcaccaccggtaaggtcatcaga

SEQ ID NO: 8661 - DNA, 75 bp, synthetic construct
  source 1..75: mol_type = other DNA
atgggtattgccgcaagttataccatgcatctctattgtgattgccgccagtgtacggatggcaaatatcagtcg

SEQ ID NO: 8662 - DNA, 75 bp, synthetic construct
  source 1..75: mol_type = other DNA
ggaagctatacccagatcctgaccacaggagcgatgtctggcacgctgacgctgatgccacagctgaatggtgtg

SEQ ID NO: 8663 - DNA, 75 bp, synthetic construct
  source 1..75: mol_type = other DNA
gttgcgattgtatcgcgcacttccaaaatcagagcagcaagcacaaatcagcgaactccgtgcccgcgttgagaa

SEQ ID NO: 8664 - DNA, 75 bp, synthetic construct
  source 1..75: mol_type = other DNA
atgcaaaaggcgtaagcccaatatttgataccagacctctccgcgccgccatgattgtctttctcctgatgcagg

SEQ ID NO: 8665 - DNA, 75 bp, synthetic construct
  source 1..75: mol_type = other DNA
aaccgacggcttacctgttggattcaaggctaacacaccaaatgcatcggagttgattcatgaaaatcaggcatg

SEQ ID NO: 8666 - DNA, 75 bp, synthetic construct
  source 1..75: mol_type = other DNA
gcctgatgtttataaatgagatctgccaggccactgattgctttgatcttgcaggccgggattacaaaatagatc

SEQ ID NO: 8667 - DNA, 75 bp, synthetic construct
  source 1..75: mol_type = other DNA
ccgacaaaagcaaacttcttcggacacctgaaaaagccgcagattatcgcagccctgaatgaggccggactgtcc

SEQ ID NO: 8668 - DNA, 75 bp, synthetic construct
  source 1..75: mol_type = other DNA
cgcacggtgccgtattccgcagagtccgtcagcgaactggcggagtccattaagggcgttggcctgttgcagaat

SEQ ID NO: 8669 - DNA, 75 bp, synthetic construct
  source 1..75: mol_type = other DNA
gcagaacgccacatgttacagacagcccccaccgcacagataaccagtcagatggccggaaatatccgggcgtta

SEQ ID NO: 8670 - DNA, 75 bp, synthetic construct
  source 1..75: mol_type = other DNA
ccaaatatcccaattgcagcgttttgttctcctatggtgggtagtaaagtttcacgtgacgaagggtacgaatca

SEQ ID NO: 8671 - DNA, 75 bp, synthetic construct
  source 1..75: mol_type = other DNA
tgaatgccataaagagacaggagatcattgacgccgaccatcagcgcctcagaaagctcatctggccggaggatg

SEQ ID NO: 8672 - DNA, 75 bp, synthetic construct
  source 1..75: mol_type = other DNA
tcatcgtgatgcggtgaagaccgcagagcagcatgacggcctgaccgccatgcatccccgttatatctggacaga

SEQ ID NO: 8673 - DNA, 75 bp, synthetic construct
  source 1..75: mol_type = other DNA
cgctttaggttatgacgctatagctgaaggccaatatagctctgccatcggctcaaaaacccatgctattggtgg

SEQ ID NO: 8674 - DNA, 75 bp, synthetic construct
  source 1..75: mol_type = other DNA
atgatttcagttatgcttttgaaaaaatccgtaatgcgatttccgcgccaggagaaaataatgtttatgctgcaa

SEQ ID NO: 8675 - DNA, 75 bp, synthetic construct
  source 1..75: mol_type = other DNA
tgacgaacttatagaaaaagcaattgctttcaaacttgcgtatcgacagcaataccaacaaaaagctggatggaa

SEQ ID NO: 8676 - DNA, 75 bp, synthetic construct
  source 1..75: mol_type = other DNA
actgttgtggatggaatacaaggcacaggcgggtgacaaagcgatgggatactcgcacttctgccgttgctaccg

SEQ ID NO: 8677 - DNA, 75 bp, synthetic construct
  source 1..75: mol_type = other DNA
cggtgagggactgccattaccggatacattcgacagtcctgatccacgaattaaacagttagcgcgtcgcagtac

SEQ ID NO: 8678 - DNA, 75 bp, synthetic construct
  source 1..75: mol_type = other DNA
ttgcctgcgcttttatccggatttacagcagggaaagcatccagtgcgcaagtcaataaggttattcggcaggcc

SEQ ID NO: 8679 - DNA, 75 bp, synthetic construct
  source 1..75: mol_type = other DNA
aagcttcgaccaaaaactgataaacacgatttcatctttacatcgagtcaacagtcagcgaagcctttgtcctac

SEQ ID NO: 8680 - DNA, 75 bp, synthetic construct
  source 1..75: mol_type = other DNA
tctcgacaacaaagacgccagactttaccacctcgaaggcgtgatcaggacgcaggcgatactgctgaaggaggg

SEQ ID NO: 8681 - DNA, 75 bp, synthetic construct
  source 1..75: mol_type = other DNA
gcggcagagaatgccaggtacgtatttacggcgtatgcaatggcaatcctgaaactacagttctggcacattacc

SEQ ID NO: 8682 - DNA, 75 bp, synthetic construct
  source 1..75: mol_type = other DNA
actggcaatgctcctcgataagctggactggcgtcagccaaaaacatcccgccgtaactcactgacaatgttgta

SEQ ID NO: 8683 - DNA, 75 bp, synthetic construct
  source 1..75: mol_type = other DNA
gtggccatcgctccattcgccatttcactgatgaacccatttccgaagcgcagcgtgaggcgattattaacagcg

SEQ ID NO: 8684 - DNA, 75 bp, synthetic construct
  source 1..75: mol_type = other DNA
tggttccgggtattgttaaatttctggagaaaaccaatgagcgaaaaaacgacgttgacaaaggcatcaccagtt

SEQ ID NO: 8685 - DNA, 75 bp, synthetic construct
  source 1..75: mol_type = other DNA
atgacatttctgaaccagttaatgctgtacttctgtacggtggtctgtgtgctgtatctcctttcgggtgggtac

SEQ ID NO: 8686 - DNA, 75 bp, synthetic construct
  source 1..75: mol_type = other DNA
tgctgatcatcgacgacggaatgctggacacgcctgctgcgccgttgcctgaagtggctggggatgtcacggatc

SEQ ID NO: 8687 - DNA, 75 bp, synthetic construct
  source 1..75: mol_type = other DNA
atgaccagccagaacaccccggcatggcgtaacgatgacctggaaggcgctgtcatcggtgcgttttttctgcgt

SEQ ID NO: 8688 - DNA, 75 bp, synthetic construct
  source 1..75: mol_type = other DNA
acagatggggatttcatctgaacaacggcccacaggccgatcgacttgccgacctggaaagaatgctgcatctgt

SEQ ID NO: 8689 - DNA, 75 bp, synthetic construct
  source 1..75: mol_type = other DNA
tgatgatcccctcgcaaaacgcgcacatgcacacatgaaggccggttcgttaaccggcctttctattgggtacgt

SEQ ID NO: 8690 - DNA, 75 bp, synthetic construct
  source 1..75: mol_type = other DNA
gtgctccccgccttgctgacgaaatgctggagttcaatatttaaaaccattgctgccagcctgcgtcgtcagggg

SEQ ID NO: 8691 - DNA, 75 bp, synthetic construct
  source 1..75: mol_type = other DNA
gcctgtcgctgttgacccagaataacctgaacaaatctcagtcttctcttagctctgctattgagcgtctgtctt

SEQ ID NO: 8692 - DNA, 75 bp, synthetic construct
  source 1..75: mol_type = other DNA
agccaaaaatgcgggtgatacagcttcagtacccattattgaagcaattcttaatgaagaaaaacaaatggctga

SEQ ID NO: 8693 - DNA, 75 bp, synthetic construct
  source 1..75: mol_type = other DNA
cgtggagtgaacggccggaccgtcattgcagaagtgatttccccggatgcgaagtttttccagatttaccgggaa

SEQ ID NO: 8694 - DNA, 75 bp, synthetic construct
  source 1..75: mol_type = other DNA
tttgtcgccacgcccgtaacctgctgctggcgcagggctggccggaagagacggatgttgaccagcgaaatccga

SEQ ID NO: 8695 - DNA, 75 bp, synthetic construct
  source 1..75: mol_type = other DNA
cgacaaacgtactgacaaagaaacaccgtacgttccaatcccggaaggcggcgtgaagatctcttcgcaccacta

SEQ ID NO: 8696 - DNA, 75 bp, synthetic construct
  source 1..75: mol_type = other DNA
taataaaaaagttcgtgagatactgaaaactccggcatggagaacgctggaaacgagaattcgaagaaacggtat

SEQ ID NO: 8697 - DNA, 75 bp, synthetic construct
  source 1..75: mol_type = other DNA
cgtgaaggatggcaaccatacggcgggccgttttcttcgtatacggatgatggcgcagcacttattcaggcgatt

SEQ ID NO: 8698 - DNA, 75 bp, synthetic construct
  source 1..75: mol_type = other DNA
aggcctgtggtacggggatttattgcagagcggtatgtacgaagtctgtttacagctaccagccagacttgtttc

SEQ ID NO: 8699 - DNA, 75 bp, synthetic construct
  source 1..75: mol_type = other DNA
ggggcgttcgcccgcgcagcgttgcgtgaatcatatttctgaaccggataccgaaattccgcctggtttcagggg

SEQ ID NO: 8700 - DNA, 75 bp, synthetic construct
  source 1..75: mol_type = other DNA
tatacggtgcgttatctgtacctgcttaacataattgcgcttaagataaggtcggttagtaaattttcctgttgg

SEQ ID NO: 8701 - DNA, 75 bp, synthetic construct
  source 1..75: mol_type = other DNA
ctgggctcatgcccgccgaaagatccacgatgtgcacgtccgcatcccgtcagcactgacggaagaagccctgga

SEQ ID NO: 8702 - DNA, 75 bp, synthetic construct
  source 1..75: mol_type = other DNA
acgctcgcggacgtttgtatctgcatcgcggcgtagaaatgacttacaccaaggatttgctggttgaagtttatc

SEQ ID NO: 8703 - DNA, 75 bp, synthetic construct
  source 1..75: mol_type = other DNA
ttctgccagacctgggacgacgaaaatgtccacaaattgatggatttatccattaacaaaaactggatcgacaaa

SEQ ID NO: 8704 - DNA, 75 bp, synthetic construct
  source 1..75: mol_type = other DNA
ggtgaatatgtctggccctggatattgccgttttcagcagcaggaatgaaacactcaagcatccagcatcaatag

SEQ ID NO: 8705 - DNA, 75 bp, synthetic construct
  source 1..75: mol_type = other DNA
tccgctcagaactactcgattcacgttttggtgcaaaggccatttctactatcgcggagtcaaaacgatttccgc

SEQ ID NO: 8706 - DNA, 75 bp, synthetic construct
  source 1..75: mol_type = other DNA
atacggaactggaactgtccggccttaaccgctggctgggcaaaaagacgttcaggcggactacgttttacgagt

SEQ ID NO: 8707 - DNA, 75 bp, synthetic construct
  source 1..75: mol_type = other DNA
ataaaacggattcggcagcactgttgccctgcattgaacaggccagggaagatatccataccctgcgccaactgc

SEQ ID NO: 8708 - DNA, 75 bp, synthetic construct
  source 1..75: mol_type = other DNA
tgagccgttaccgtgccgggcgtctgatgaaatatctgaacctgagcagttgtcagcccggaaaacatcagtaca

SEQ ID NO: 8709 - DNA, 75 bp, synthetic construct
  source 1..75: mol_type = other DNA
acaaacttgggcaccagtgttaaagatggggccaccatcaataagcaagtggcagtaggtgctggcgactttaaa

SEQ ID NO: 8710 - DNA, 75 bp, synthetic construct
  source 1..75: mol_type = other DNA
tgcatgacgggagcgccgatctcgctgttaccgcatctatgcctgatgaccgtctgtacggctatgcacatctac

SEQ ID NO: 8711 - DNA, 75 bp, synthetic construct
  source 1..75: mol_type = other DNA
gaccggttgccattacgccgtacacactgatgcaggcggtggctattgaaggagagccacaggtcggcccttcat

SEQ ID NO: 8712 - DNA, 75 bp, synthetic construct
  source 1..75: mol_type = other DNA
agttgagaacgcttatctaaaaaagctgaaagccttagctcaggaaaaattacgattggaacaaaagaaaaagta

SEQ ID NO: 8713 - DNA, 75 bp, synthetic construct
  source 1..75: mol_type = other DNA
aggagaaatagatatgcaattaagaaagtagcaaaaaatgcagaaagatcttttgcattcccaacgaagaaactt

SEQ ID NO: 8714 - DNA, 75 bp, synthetic construct
  source 1..75: mol_type = other DNA
ccgccgaacagctggagttgatgcgcagcgtcttccgggttatccggactgtacgtgaaaagcatgcctgtactc

SEQ ID NO: 8715 - DNA, 75 bp, synthetic construct
  source 1..75: mol_type = other DNA
gctggggcgcgtttggtgatgtgatacgtcagggcgaaacaggccaggttaaccagctactggatattctcagac

SEQ ID NO: 8716 - DNA, 75 bp, synthetic construct
  source 1..75: mol_type = other DNA
cgagcggctggttcaccagaaccgcctgctcaagattgcccgcgagggcggccagatgacacccgccgacctggc

SEQ ID NO: 8717 - DNA, 75 bp, synthetic construct
  source 1..75: mol_type = other DNA
ctcgtctgaatgatgaagacttacataaactcagttatgtaacaactgcactacgtgctctgcgcaaggtaactc

SEQ ID NO: 8718 - DNA, 75 bp, synthetic construct
  source 1..75: mol_type = other DNA
gccgatacccttggcagttgtggttacgcttatctggctgtttatccgacaccggcagagcccgcaatcaccgta

SEQ ID NO: 8719 - DNA, 75 bp, synthetic construct
  source 1..75: mol_type = other DNA
ttacgctcgtggaaaagctgattcgaagtataacgtagataaagacagctggtcaggcggttactggcgtgatga

SEQ ID NO: 8720 - DNA, 75 bp, synthetic construct
  source 1..75: mol_type = other DNA
tgcaagacgctgaaagagatggcacagagctgccgttatttctacgaagattttgctgagttcgatgccgacgcc

SEQ ID NO: 8721 - DNA, 75 bp, synthetic construct
  source 1..75: mol_type = other DNA
aaatctgcctgtatcaggataatgccgacctgtgtgatgcgcttttccgcggaacccgccggacactcacggttc

SEQ ID NO: 8722 - DNA, 75 bp, synthetic construct
  source 1..75: mol_type = other DNA
actggttatcccgttttgacagccttctcgacagtgccctggcgcagcaccgtgccgtctcgttaatccgggtgg

SEQ ID NO: 8723 - DNA, 75 bp, synthetic construct
  source 1..75: mol_type = other DNA
tccggctttactggctggctatatcactgaacgcataacccggttattccatattcgctggctggcaggcgtatt

SEQ ID NO: 8724 - DNA, 75 bp, synthetic construct
  source 1..75: mol_type = other DNA
agccggggcgtcggcgttatctgacgctggtgatgatctttattacggtggtcatttgttatgttgaccgcgcta

SEQ ID NO: 8725 - DNA, 75 bp, synthetic construct
  source 1..75: mol_type = other DNA
tataatgcagtaagtacagaccctctttataaacatattccatttacaattactcaccgtagcgatattagcttt

SEQ ID NO: 8726 - DNA, 75 bp, synthetic construct
  source 1..75: mol_type = other DNA
atgaggaaatatattccactggtattatttatcttttcatggccggtattgtgtgcagatattcatggacgggtt

SEQ ID NO: 8727 - DNA, 75 bp, synthetic construct
  source 1..75: mol_type = other DNA
acagacggatttatcttgcgcgaaggtgagtttgtcacttcattacaggcactgaaagagatcggaataaaagca

SEQ ID NO: 8728 - DNA, 75 bp, synthetic construct
  source 1..75: mol_type = other DNA
atcagaaaaagtggcgagtgccgccgatgcgcgacgtatcgtcagccattacgagcaacgctggctgatagagga

SEQ ID NO: 8729 - DNA, 75 bp, synthetic construct
  source 1..75: mol_type = other DNA
atgttagatatagtcgaactgtcgcgcttacagtttgccttgaccgcgatgtaccacttcctttttgtgccactg

SEQ ID NO: 8730 - DNA, 75 bp, synthetic construct
  source 1..75: mol_type = other DNA
cggaatatgacccgcttatcgggtgctacattccgaccgacatcacgttcacaccggcactgtttgccgctctcg

SEQ ID NO: 8731 - DNA, 75 bp, synthetic construct
  source 1..75: mol_type = other DNA
gccgcgagaagatagaaaagaagatcgcacgggcagaaacgcgtataaccgagctccagaacaggcttggtgagg

SEQ ID NO: 8732 - DNA, 75 bp, synthetic construct
  source 1..75: mol_type = other DNA
atgcagaacgccagacacccgaaaacacacagggaactgtgtgaactggcctgccgttttctccgcaacaacggc

SEQ ID NO: 8733 - DNA, 75 bp, synthetic construct
  source 1..75: mol_type = other DNA
agaaatcacgatctatccgtatatcaacgaaacaattatttccggcggcaccgcgcatgaaggcggggcggtcca

SEQ ID NO: 8734 - DNA, 75 bp, synthetic construct
  source 1..75: mol_type = other DNA
ggctgacacacctgcagaacggtgtactgctggatgaacaaaactgcctgatgctgcatgaactctggctgcaga

SEQ ID NO: 8735 - DNA, 75 bp, synthetic construct
  source 1..75: mol_type = other DNA
gtaccgcatcacccaagacgacctggatgatctcactgacacaatcgaatatctcatggccactaaccagccaga

SEQ ID NO: 8736 - DNA, 75 bp, synthetic construct
  source 1..75: mol_type = other DNA
atttgccgattgaggatttcggatattgatcttaaggcaaagtgtatatatatccatcgattaaaaaaaggcttt

SEQ ID NO: 8737 - DNA, 75 bp, synthetic construct
  source 1..75: mol_type = other DNA
agccgtgagggttttttatatccgacgccagcgacctccattcccagagacctgcttgaacctttgccaaaagga

SEQ ID NO: 8738 - DNA, 75 bp, synthetic construct
  source 1..75: mol_type = other DNA
gaaccattttgcggtgatcccggcagacagaacatggcgaccacagccgttgctgaaaccgctggtcgacggccc

SEQ ID NO: 8739 - DNA, 75 bp, synthetic construct
  source 1..75: mol_type = other DNA
cagccagcaatttcatgcgttgtgccgaagctgtcggaacgcgcattacagacatcccggtagacctcaacacgc

SEQ ID NO: 8740 - DNA, 75 bp, synthetic construct
  source 1..75: mol_type = other DNA
gttacgccattcgtgtggttttgctttggcgaatatgggaatagatacgcgacttatccaggattatcttgggca

SEQ ID NO: 8741 - DNA, 75 bp, synthetic construct
  source 1..75: mol_type = other DNA
taacaccttatggagagtaaacggacagtcagccctgcaatcattaaaaacccgcgacagtcttttgttgtttag

SEQ ID NO: 8742 - DNA, 75 bp, synthetic construct
  source 1..75: mol_type = other DNA
ccaaagaacagcagggcgagttggccggaaaagttggctcaacacctggctacttacggctggttttcaatggtt

SEQ ID NO: 8743 - DNA, 75 bp, synthetic construct
  source 1..75: mol_type = other DNA
ccgctggccgacatcgtgctcaacaatacgcaggcgtctttctgtaccgaatacagcgtcgtgaccggaggctcg

SEQ ID NO: 8744 - DNA, 75 bp, synthetic construct
  source 1..75: mol_type = other DNA
gggtgatatcatcagaagtttatgtgttgtgtgtccatccatattaatctggtttcagttttcggtatatgtcat

SEQ ID NO: 8745 - DNA, 75 bp, synthetic construct
  source 1..75: mol_type = other DNA
gacttcccttgtgattaaccgccagttgtggctgtaccacgacagcggggatgcaggactgacccagctttaccg

SEQ ID NO: 8746 - DNA, 75 bp, synthetic construct
  source 1..75: mol_type = other DNA
tgacctgcgcaaaatggtcgtcgcaggtcagtatgttgcgtgttgagttcagcgcagagtttaaacaggtggtga

SEQ ID NO: 8747 - DNA, 75 bp, synthetic construct
  source 1..75: mol_type = other DNA
tttgtgccgttatttctggtgcagaaagttgggaagatatagaggatttcggggaaacacatctcgatttcttga

SEQ ID NO: 8748 - DNA, 75 bp, synthetic construct
  source 1..75: mol_type = other DNA
ctgaaggtgacggaggccatttccacggggctgaaaatctccggtgccagtacggcagaggcgggctcggtgatc

SEQ ID NO: 8749 - DNA, 75 bp, synthetic construct
  source 1..75: mol_type = other DNA
aacatacagggtgacgctttccgtgacccgggaggaggcccggcatctggaagcgttcctggcagagcacggtgg

SEQ ID NO: 8750 - DNA, 75 bp, synthetic construct
  source 1..75: mol_type = other DNA
agacgtcttgttgattatgcaacacgtctgcgtaatgaaaaatttgtttccctgattgatgtgatgaaagacggc

SEQ ID NO: 8751 - DNA, 75 bp, synthetic construct
  source 1..75: mol_type = other DNA
atgaaaagcaaagtactggcacttttaattcctgccctgctcgccgcaggtgctgcacatgcagccgaagtttat

SEQ ID NO: 8752 - DNA, 75 bp, synthetic construct
  source 1..75: mol_type = other DNA
aaatggcgatttgaaaagaatcgcccctgtcagggagtgaagagacaatttatctttacgccgtcacgtccttga

SEQ ID NO: 8753 - DNA, 75 bp, synthetic construct
  source 1..75: mol_type = other DNA
actcttcagaaggtatcccgtggcatgaactgccagcttcacacaaaggaaacaatcagatgagtttgcccttac

SEQ ID NO: 8754 - DNA, 75 bp, synthetic construct
  source 1..75: mol_type = other DNA
cctggacgctctggagtccgagctttaccgcaacctgcaacccatctatcccaagaccgctatccgcatccgtaa

SEQ ID NO: 8755 - DNA, 75 bp, synthetic construct
  source 1..75: mol_type = other DNA
atgcgtgattttcagaatgcctttgatgccgcccttgccggggtggacagtacgattgttgaagtgatggggatc

SEQ ID NO: 8756 - DNA, 75 bp, synthetic construct
  source 1..75: mol_type = other DNA
atgaaaacctttcgctggaaagtgaagccggatatggaggtgaactcgcagccgtcggtgcgtgaagtgcgtttt

SEQ ID NO: 8757 - DNA, 75 bp, synthetic construct
  source 1..75: mol_type = other DNA
gataaagatacagatcaagaagatcaaaacactatggtccatggcgtaaaaaacgccacgaaccaggcaggggat

SEQ ID NO: 8758 - DNA, 75 bp, synthetic construct
  source 1..75: mol_type = other DNA
gtgaaggggtgggggtccatacgtttaacggtgaaatttttgtccagcccgtatgggatgcggaatccacgtcat

SEQ ID NO: 8759 - DNA, 75 bp, synthetic construct
  source 1..75: mol_type = other DNA
cgttttcgctggcaacccgcctgaccttttttatcagcctggccaccatcgcggcgtttttcgcctttgcatgga

SEQ ID NO: 8760 - DNA, 75 bp, synthetic construct
  source 1..75: mol_type = other DNA
gtggcagcccgtaatacgtcaggagacgcgggaaaagtgaattcccacacgcgttataaacttacccttgcggag

SEQ ID NO: 8761 - DNA, 75 bp, synthetic construct
  source 1..75: mol_type = other DNA
gtgagcgcagaactcatgcgactgctgagcaacatcatccgcaccgggatcatctctgaagttgatgagaagtcc

SEQ ID NO: 8762 - DNA, 75 bp, synthetic construct
  source 1..75: mol_type = other DNA
gaattatatcttgatggcaacgctcgtcagaacctggccactttctgccagacctgggacgacgaaaacgtccat

SEQ ID NO: 8763 - DNA, 75 bp, synthetic construct
  source 1..75: mol_type = other DNA
gatattttggcaatatggcgtcttctgctggatctgcaactgccggattaattactgcagccagaaacgaagtgg

SEQ ID NO: 8764 - DNA, 75 bp, synthetic construct
  source 1..75: mol_type = other DNA
tggcaacctgcaggtgtctgtagaggatcttatcagaggcggggcgtttctggtggcgatgtctctgtggcataa

SEQ ID NO: 8765 - DNA, 75 bp, synthetic construct
  source 1..75: mol_type = other DNA
gtggcggttacatgatgccggatggcgaccgttttcatctggtcaacggtgaaaactggtttgaccgcacggtca

SEQ ID NO: 8766 - DNA, 75 bp, synthetic construct
  source 1..75: mol_type = other DNA
gaaaagccggctccccgctggttccgcctcagcaacggcaggcaggttaacctggccgactggaaggtggtgctg

SEQ ID NO: 8767 - DNA, 75 bp, synthetic construct
  source 1..75: mol_type = other DNA
gccggaaagccgttgccgcaggcgaccgcgtaaaccgtcagtttgtggcagaacgttctgaccagttgtgggtgg

SEQ ID NO: 8768 - DNA, 75 bp, synthetic construct
  source 1..75: mol_type = other DNA
gtggttgccggacaatccggtggcggaaaatctgctccggtgaaagaactaatcgacagaattattcagaaatat

SEQ ID NO: 8769 - DNA, 75 bp, synthetic construct
  source 1..75: mol_type = other DNA
tcatgccctgtatctcgatggccgccgtgaaatgatgcaatggtacgctgattacattgattcactctccagccg

SEQ ID NO: 8770 - DNA, 75 bp, synthetic construct
  source 1..75: mol_type = other DNA
ataacgctggttttaaagaaagtaacgaacagaaaagaatcaaatacgcacgctatgtctacaataaatacatgg

SEQ ID NO: 8771 - DNA, 75 bp, synthetic construct
  source 1..75: mol_type = other DNA
gacaacggcaagacgacctggttggcttggttgcgccagtctccggccaagccaaattcgcggcatatgctggaa

SEQ ID NO: 8772 - DNA, 75 bp, synthetic construct
  source 1..75: mol_type = other DNA
aagatgtgatgacccgtacggttaaaatcagcggtgtggggcgtccgtatctggctgaggaggggactgaaattg

SEQ ID NO: 8773 - DNA, 75 bp, synthetic construct
  source 1..75: mol_type = other DNA
cgatatgcgtaagtctttcaacgggctgggtgaacaggtacagcatgtgttaaatgttaatcccttctccggtca

SEQ ID NO: 8774 - DNA, 75 bp, synthetic construct
  source 1..75: mol_type = other DNA
cgggcaacaccccccggattttattgtttttattcttttttgttgtttctgcaataaccacaattgcatgcggat

SEQ ID NO: 8775 - DNA, 75 bp, synthetic construct
  source 1..75: mol_type = other DNA
gatgaactggctgatacgcagattcgcttccctgcatttttactgacgactcactactgggaaggtcgttggctg

SEQ ID NO: 8776 - DNA, 75 bp, synthetic construct
  source 1..75: mol_type = other DNA
atgcaggatattcacgaagaaagtctgaacgagtcggttaagtcagagcagtcaccgcgggtggtactctgggaa

SEQ ID NO: 8777 - DNA, 75 bp, synthetic construct
  source 1..75: mol_type = other DNA
ttgctgctgggtgagtctgccagcccggcacgtttgctgagccttgggctgatcgttgctggcattattggtctg

SEQ ID NO: 8778 - DNA, 75 bp, synthetic construct
  source 1..75: mol_type = other DNA
gccactggctgcgtagttgtttcaacgctgtcgcacgctatcgctttggcatccgaactcggcaatgaactctac

SEQ ID NO: 8779 - DNA, 75 bp, synthetic construct
  source 1..75: mol_type = other DNA
tgtttattgccacacacagtagccatatctcctcccgcctcgacctacgtaaggctattctcctcggagctaccc

SEQ ID NO: 8780 - DNA, 75 bp, synthetic construct
  source 1..75: mol_type = other DNA
atgcagaaaaatgtgactcccggcaggcgaaaaggctgccctaattatcctcccgaatttaaacagcagctcgtt

SEQ ID NO: 8781 - DNA, 75 bp, synthetic construct
  source 1..75: mol_type = other DNA
cgccacgagcatgccaaatggtctgactccacatttggctgcgttggccccattggtccgctgaaacatctctca

SEQ ID NO: 8782 - DNA, 75 bp, synthetic construct
  source 1..75: mol_type = other DNA
gtgcatcatcaagctcactcggtgagtattcaatagcgcttggacgatatgcaagttcgggtggtatgttttcgc

SEQ ID NO: 8783 - DNA, 75 bp, synthetic construct
  source 1..75: mol_type = other DNA
gcaggacccggcaactgatgcgggactgcttaaccagaacgatgttaccacacttatccgcaaagacggctttcg

SEQ ID NO: 8784 - DNA, 75 bp, synthetic construct
  source 1..75: mol_type = other DNA
cttaagcgcaccggttttcatctaccggtgtttttgtattccgaacatgctgttgaattacctgcgggcgttacg

SEQ ID NO: 8785 - DNA, 75 bp, synthetic construct
  source 1..75: mol_type = other DNA
cctcattcaacgggccctgaaaaccctggaccgccatcttcatgaacccggcgtggccttcacctccacccgtgc

SEQ ID NO: 8786 - DNA, 75 bp, synthetic construct
  source 1..75: mol_type = other DNA
gaatctgcttgagcgtcagttcgcagtaccggagccagaccgggtatggtgtggagatattacgtatctctgggc

SEQ ID NO: 8787 - DNA, 75 bp, synthetic construct
  source 1..75: mol_type = other DNA
atgaaaatcgccgatctcgctgaagcaataggagtagatgcggcgaacatctcgcgcttagaaacgggtaagcaa

SEQ ID NO: 8788 - DNA, 75 bp, synthetic construct
  source 1..75: mol_type = other DNA
cgtctgcgcggctggcaggttccggccttcactctcggcggtgaagccaccgacatcgtggtgatgcgcattatg

SEQ ID NO: 8789 - DNA, 75 bp, synthetic construct
  source 1..75: mol_type = other DNA
tcaggcggcgctaattcagatatcacgacccgcactatcgaagcggtgcgtaaatcgaaggaagcgttagacctg

SEQ ID NO: 8790 - DNA, 75 bp, synthetic construct
  source 1..75: mol_type = other DNA
tcattgccggaatatccggcatcgcgacgggaataatcgtcagcctgaatatcccctttatccgtcaggggcttt

SEQ ID NO: 8791 - DNA, 75 bp, synthetic construct
  source 1..75: mol_type = other DNA
gcgtggccttcacctccacccgtgcggcacgggaatggctgattctgaacatggcgggactggagcgtgaagaat

SEQ ID NO: 8792 - DNA, 75 bp, synthetic construct
  source 1..75: mol_type = other DNA
aagcatcctcggcacgatgttgcaggaaaacggggtgaccgaatggagtccgctgttcagcgagccgcatccttc

SEQ ID NO: 8793 - DNA, 75 bp, synthetic construct
  source 1..75: mol_type = other DNA
atgggaaagagtaagaaaaaccgcgctgcggcgacgaatcagctcaagcataaaagccagacttcagccgaagca

SEQ ID NO: 8794 - DNA, 75 bp, synthetic construct
  source 1..75: mol_type = other DNA
agcgggaaaaaattaaagggcaggttgttgaacttgtacgtctgagcggtcgcgagacgttacgggctctggagg

SEQ ID NO: 8795 - DNA, 75 bp, synthetic construct
  source 1..75: mol_type = other DNA
tcattgaagtggggcgcatcaacaaaacgctgtatctgcttaattatattgatgatgaagattaccgccggcgca

SEQ ID NO: 8796 - DNA, 75 bp, synthetic construct
  source 1..75: mol_type = other DNA
ccggtgggcttacttttgaaaatgactcaatccttgcctggattcgaaatactgactgggcgaagattggattta

SEQ ID NO: 8797 - DNA, 75 bp, synthetic construct
  source 1..75: mol_type = other DNA
aggaagagaacgccagactcaagaagctgcttgccgaagccatgctggataaagaggcgcttcaggtggctcttg

SEQ ID NO: 8798 - DNA, 75 bp, synthetic construct
  source 1..75: mol_type = other DNA
tggcaggggcggcagtatcaggcttatcccattcagggaagcggatttgagatgaacggcaaaggagccagtgca

SEQ ID NO: 8799 - DNA, 75 bp, synthetic construct
  source 1..75: mol_type = other DNA
agcgaaattaaaagtccctgaaacttttgagcctgatatgatatttattgagatatctgacccagaaggttttat

SEQ ID NO: 8800 - DNA, 75 bp, synthetic construct
  source 1..75: mol_type = other DNA
tcgtgttgttatcgctggcggtggccggtctgtttctggtgaaacacaaaaatgccagcctgcgcgcctcgctgg

SEQ ID NO: 8801 - DNA, 75 bp, synthetic construct
  source 1..75: mol_type = other DNA
cgtgacggacggctatatacgccggggatatatcaccagccgggcctttctgacagagcaggacctttcaggggg

SEQ ID NO: 8802 - DNA, 75 bp, synthetic construct
  source 1..75: mol_type = other DNA
agttattcaggatggtgtctcagtggcatgttgatgtggttatcgttgagcggcgttcgttcagtattgttgcag

SEQ ID NO: 8803 - DNA, 75 bp, synthetic construct
  source 1..75: mol_type = other DNA
gtaacgcggtgaagatggctaccggtgttgcaatcaatacactgccgctgacgccaaaacggttatatgaagagt

SEQ ID NO: 8804 - DNA, 75 bp, synthetic construct
  source 1..75: mol_type = other DNA
atcctgctctggatatggctggcgcattgaccactgtaaaacgccagcatcgccccgctcttgatctttcacgtc

SEQ ID NO: 8805 - DNA, 75 bp, synthetic construct
  source 1..75: mol_type = other DNA
agattgttgatgaaatctgcgattttgtggcgaatcagcaggcggttttcctcggtggtcactacatccttcagg

SEQ ID NO: 8806 - DNA, 75 bp, synthetic construct
  source 1..75: mol_type = other DNA
ggcgccgatatctctggcgcgtctgcgggcccgtcttaacctgaaatcccctgtgttctcacagaaccagacggt

SEQ ID NO: 8807 - DNA, 75 bp, synthetic construct
  source 1..75: mol_type = other DNA
tcgtcgttttaattttcatggcgaaatctatcagataaggatggagaatgtttctttttataatgacgaatctgt

SEQ ID NO: 8808 - DNA, 75 bp, synthetic construct
  source 1..75: mol_type = other DNA
ctcacgtaagaagccagcgcatgaatcttttattcagaattatgtcgcgattattgtcctgttttgcgccagcgg

SEQ ID NO: 8809 - DNA, 75 bp, synthetic construct
  source 1..75: mol_type = other DNA
tcacggcgaatctcccaggacatcagtacccgtgatgaaggcggtgacgggaaggtggtggttatcgggcggcag

SEQ ID NO: 8810 - DNA, 75 bp, synthetic construct
  source 1..75: mol_type = other DNA
tcagagtccttggcagcggggaacaaatgagaacacaaatgggctaattcggcagtactttcctaaaaagacatg

SEQ ID NO: 8811 - DNA, 75 bp, synthetic construct
  source 1..75: mol_type = other DNA
atgactcaaaactatgaactgattgtgaaagggatccgcaattttgagaataaagttacggtaactttagcgtta

SEQ ID NO: 8812 - DNA, 75 bp, synthetic construct
  source 1..75: mol_type = other DNA
gcccattcactggagattgttgtggctatctgtaagcatctgggcggcggtcaggtctacattccacgcggtcag

SEQ ID NO: 8813 - DNA, 75 bp, synthetic construct
  source 1..75: mol_type = other DNA
cagatccccgtcctgcaattccacatgacgaagtaatggctgaaatggaaaaccttattgctcaattagctgcaa

SEQ ID NO: 8814 - DNA, 75 bp, synthetic construct
  source 1..75: mol_type = other DNA
taggcgcaatccggcgtgtggtggagccgctcggctatctcattaacgtaaaggaatggtgggagacaaacgacc

SEQ ID NO: 8815 - DNA, 75 bp, synthetic construct
  source 1..75: mol_type = other DNA
cccgaccgaatccgtggccattgatattgcttatgaaggttccggcagtggcgactggcgcactgacggtttcat

SEQ ID NO: 8816 - DNA, 75 bp, synthetic construct
  source 1..75: mol_type = other DNA
aaaactatcaaaacccaacttacatggagtaattaaaaaagttgatttgaacacaaatgaagcggaaattaaaat

SEQ ID NO: 8817 - DNA, 75 bp, synthetic construct
  source 1..75: mol_type = other DNA
gctttctgctgctggagtgtacggagctgggcgaatgtaggcagagtcacggaggcaacaatgacgacttccttt

SEQ ID NO: 8818 - DNA, 75 bp, synthetic construct
  source 1..75: mol_type = other DNA
aagcatccatgaccagcgttgagatcgcagagctggtgggcagccgccatgacaaagtgaaacaatccattgagc

SEQ ID NO: 8819 - DNA, 75 bp, synthetic construct
  source 1..75: mol_type = other DNA
atgccactgctggataagctgcgtaagctgtacggggtcggaccggtatgcagtgaactgcatattgccccgtca

SEQ ID NO: 8820 - DNA, 75 bp, synthetic construct
  source 1..75: mol_type = other DNA
agaaacatatcacccagctacagtttgggaagctaacgggtttatctcaggtgcatgtaagtcgagtgctggggg

SEQ ID NO: 8821 - DNA, 75 bp, synthetic construct
  source 1..75: mol_type = other DNA
cgctggtttgaccgtggtgttctgcgggaggtggtccgggaagcccgggccgaaatccgcagcatggcggatgcc

SEQ ID NO: 8822 - DNA, 75 bp, synthetic construct
  source 1..75: mol_type = other DNA
gtcgaaacttagaactcccaaaagatgccaatattctttcgactacctcccctcaaagccatatcacgtacgtta

SEQ ID NO: 8823 - DNA, 75 bp, synthetic construct
  source 1..75: mol_type = other DNA
cgcttgggcacaggataccagcccggatactctcgtcgttactgctaaccgttttgaacagccgcgcagcactgt

SEQ ID NO: 8824 - DNA, 75 bp, synthetic construct
  source 1..75: mol_type = other DNA
gcgcagcgcgaagccgatattgaaaacgaaaaactccgcaaagagaccgaggatttgcgtgcggctgcggaatca

SEQ ID NO: 8825 - DNA, 75 bp, synthetic construct
  source 1..75: mol_type = other DNA
tagtggttgcgtccgtgaaagaagcaccaattggtatcgaggctactccccaccgtgttaccgaatatctgaaca

SEQ ID NO: 8826 - DNA, 75 bp, synthetic construct
  source 1..75: mol_type = other DNA
atgcctaaatcttacacaccaaactggttttttaccgctttacttgacaatcacatcaatcaaatgatggcacgc

SEQ ID NO: 8827 - DNA, 75 bp, synthetic construct
  source 1..75: mol_type = other DNA
ctacggcaatcgagtcaacggctcagcgatgcaagaaaaacccaatttattcacctaaaatagtagaacaatctc

SEQ ID NO: 8828 - DNA, 75 bp, synthetic construct
  source 1..75: mol_type = other DNA
ggcgtaacggcaaagtggttacacaccaaagacccgaagccgcaaaagcagaaggtaaaactgaaacgcaaaaag

SEQ ID NO: 8829 - DNA, 75 bp, synthetic construct
  source 1..75: mol_type = other DNA
tttgattacagcgattgtcatttccccggtaattatctggtcgtgggatacggtaaaagaaaccacggcagacgg

SEQ ID NO: 8830 - DNA, 75 bp, synthetic construct
  source 1..75: mol_type = other DNA
atgggtgttcttccaaatcgcaaatatgcagtagtgtcaaagaacggaatttcaagctcaaatgaaaacgtccta

SEQ ID NO: 8831 - DNA, 75 bp, synthetic construct
  source 1..75: mol_type = other DNA
tcaaagggtgaccgtaacccgacgtctgtccgcctgctgattcagcttgagcgtggtggtaaatggatgacggaa

SEQ ID NO: 8832 - DNA, 75 bp, synthetic construct
  source 1..75: mol_type = other DNA
accgctgcctggtcgccacgggtgccagtccggccatgccgccgattccgggcctgaaagagtcaccctactgga

SEQ ID NO: 8833 - DNA, 75 bp, synthetic construct
  source 1..75: mol_type = other DNA
cccgaccgaatccgtggccattgatattgcttatgaaggctccggcagtggcgactggcgaacggatgcatttat

SEQ ID NO: 8834 - DNA, 75 bp, synthetic construct
  source 1..75: mol_type = other DNA
ttggtggtgacagtgagcaactgcacgcccttatcgaccgccttgatgacatccctgatgatgttctcaaaaaga

SEQ ID NO: 8835 - DNA, 75 bp, synthetic construct
  source 1..75: mol_type = other DNA
atcggctcgtcggtggtcgcgctggaactggcgcaagccttcgcccggctgggcagccaggtcacgatcctagct

SEQ ID NO: 8836 - DNA, 75 bp, synthetic construct
  source 1..75: mol_type = other DNA
cattgagctgacgccggggtattttcagataacggcggtcccgcgtcttgcggtgtatgacccgacggtacagtt

SEQ ID NO: 8837 - DNA, 75 bp, synthetic construct
  source 1..75: mol_type = other DNA
gaacatcagtccacgctgagcgcggggtatcttcatgcctcgacgaacgttcccggcagcgatgatctgaacggg

SEQ ID NO: 8838 - DNA, 75 bp, synthetic construct
  source 1..75: mol_type = other DNA
acgcgagcaaaatcgatgcgattataagtcgcaatggcacaaatacggcacaagaggagaacgtagtttacttaa

SEQ ID NO: 8839 - DNA, 75 bp, synthetic construct
  source 1..75: mol_type = other DNA
aagctatcacgctgaaaatcgacccgtcggtggtactggcgacccgtaaatacgtggatgatgaagtcctggaat

SEQ ID NO: 8840 - DNA, 75 bp, synthetic construct
  source 1..75: mol_type = other DNA
tacgcagaacggcgacagcgccggatgcgtggtggtggcaccgccagccgtgccaggcggtaagtttcgcattct

SEQ ID NO: 8841 - DNA, 75 bp, synthetic construct
  source 1..75: mol_type = other DNA
ggatgtgaactgatttttgaagataaaatcagcggaacgaaatcaaccagaccgggattgaaaaaactgctcaga

SEQ ID NO: 8842 - DNA, 75 bp, synthetic construct
  source 1..75: mol_type = other DNA
ggagatccacaggtcggcccttcatctaagccggactggttctacgtggttgtgcttgccggacagtccaacggc

SEQ ID NO: 8843 - DNA, 75 bp, synthetic construct
  source 1..75: mol_type = other DNA
atggctacgggggcaggtacaacaaaaatccggtgacggtggaagggcgggataactggcaggtacagctggatc

SEQ ID NO: 8844 - DNA, 75 bp, synthetic construct
  source 1..75: mol_type = other DNA
ctagaaattctgtttccatgtttcaggccattgtgaatgaggaaatctgcaacggaaagtttggcacagcaagcc

SEQ ID NO: 8845 - DNA, 75 bp, synthetic construct
  source 1..75: mol_type = other DNA
tggatatccgggtaccggaccatctgataatcggtggcagtcaggttttctcctttgccgaacacggcctgcttt

SEQ ID NO: 8846 - DNA, 75 bp, synthetic construct
  source 1..75: mol_type = other DNA
ggcagggagcggggacggcgctggagaaccattttgcggtgatcccggcagacagaacatggcgaccacagccgt

SEQ ID NO: 8847 - DNA, 75 bp, synthetic construct
  source 1..75: mol_type = other DNA
ttgtctggaagctggataggctgggcagaagcatgaaacaccttatcactcttattgaggaactgcggggaaaag

SEQ ID NO: 8848 - DNA, 75 bp, synthetic construct
  source 1..75: mol_type = other DNA
ctggctggagaaacaaccggaaggttcagtgcgtccggtagtcattgagtctgtgacaaaaatcatggcctgcgg

SEQ ID NO: 8849 - DNA, 75 bp, synthetic construct
  source 1..75: mol_type = other DNA
ccgcattcacagtacgcgccaaaagccagcccgacatttaccggaacccccaaagcgccaacgccagcggcgggg

SEQ ID NO: 8850 - DNA, 75 bp, synthetic construct
  source 1..75: mol_type = other DNA
accactgcctgcatgatgttcaggatttgagtaagttttcacacccgaaagccagcgcagctcagtatggatgcg

SEQ ID NO: 8851 - DNA, 75 bp, synthetic construct
  source 1..75: mol_type = other DNA
tgagatggatcggtatgttgagcgtgaattgccgggagggagaacctctgtattttatcagcgaaaaaatagttt

SEQ ID NO: 8852 - DNA, 75 bp, synthetic construct
  source 1..75: mol_type = other DNA
caacgcatcgccctgccggggaccgtttttacaccgcagcgctattgggtcgaggccgtacggcctgccacgttc

SEQ ID NO: 8853 - DNA, 75 bp, synthetic construct
  source 1..75: mol_type = other DNA
agtgagttcacctgatgcctcctctttaattaaagaaaccagaccacggaacctggcatttgcgtatatcgtgag

SEQ ID NO: 8854 - DNA, 75 bp, synthetic construct
  source 1..75: mol_type = other DNA
ttaatttcaccagtaactctgtgggtgatggtgtgaattttgttgctgtcagaccgcgaaatattgcatttaact

SEQ ID NO: 8855 - DNA, 75 bp, synthetic construct
  source 1..75: mol_type = other DNA
gtttaaccgtcatagtgacggcactggtaacgaggaaagacctttgcgaggtacgaatccgaaccggccagacgg

SEQ ID NO: 8856 - DNA, 75 bp, synthetic construct
  source 1..75: mol_type = other DNA
cgggcatatcaatatgttgggccattatacattcacgttgccagaggatattttaaaaggggaactgagagctct

SEQ ID NO: 8857 - DNA, 75 bp, synthetic construct
  source 1..75: mol_type = other DNA
acgaggtggcgcttgaggtagaacagcgagttcttgctcaccctctttacccggtcctgaccagtatgcccggag

SEQ ID NO: 8858 - DNA, 75 bp, synthetic construct
  source 1..75: mol_type = other DNA
cggcggcagaatcactcaacagaatgaaaaactgactgccggccgggatgtaacgcttgccgcgaaaaacatcac

SEQ ID NO: 8859 - DNA, 75 bp, synthetic construct
  source 1..75: mol_type = other DNA
ctggtataacttcgtatctgatcagtactctgggttccatggcattgtggtacccggtacattacgggattcgat

SEQ ID NO: 8860 - DNA, 75 bp, synthetic construct
  source 1..75: mol_type = other DNA
cgctgataaagcacaatataccagcactgacccgccatcggctcagttgggtgaaacagaattaccttcgtgcag

SEQ ID NO: 8861 - DNA, 75 bp, synthetic construct
  source 1..75: mol_type = other DNA
gtttcccgttccggtacactgacctatgaagcggttaaacagaccacggattacggtttcggtcagtcgacctgt

SEQ ID NO: 8862 - DNA, 75 bp, synthetic construct
  source 1..75: mol_type = other DNA
tatttcatctttgatttacaatgctctccctctcacagatgcacatattactcccccaggagaatcatcactctc

SEQ ID NO: 8863 - DNA, 75 bp, synthetic construct
  source 1..75: mol_type = other DNA
atggcccgtatcgggggaacctgttatttcaaaattgacggtcagcagctatcgctgaccggcggcattgaggtg

SEQ ID NO: 8864 - DNA, 75 bp, synthetic construct
  source 1..75: mol_type = other DNA
cttccctgccgggaaaaatcaggaaatgccatgtttatttccctgatgaccgaacaaacagaagcaacggagata

SEQ ID NO: 8865 - DNA, 75 bp, synthetic construct
  source 1..75: mol_type = other DNA
tctcaggctgaaaggtaaactgacgccggcgttattacagacacttatccgtgaaataaaagggagcagccactg

SEQ ID NO: 8866 - DNA, 75 bp, synthetic construct
  source 1..75: mol_type = other DNA
ggtctaacgccagaaaactgagagatggtgttggcgggaattcttcctttgccaccatgattgatcgcgagccaa

SEQ ID NO: 8867 - DNA, 75 bp, synthetic construct
  source 1..75: mol_type = other DNA
atgaacaaagaaaacgtcattaccctggataatccggttaaacgtggtgaacaggttatcgaacaggtcacgctg

SEQ ID NO: 8868 - DNA, 75 bp, synthetic construct
  source 1..75: mol_type = other DNA
tggcgtcaccgggcatggcacgcatctgcctttacggggatttgcaacgatttggccgccgcatcgaccttcgtg

SEQ ID NO: 8869 - DNA, 75 bp, synthetic construct
  source 1..75: mol_type = other DNA
tcgctgatgagcagtcagagcttgttaagaagatggtgtttgatacgctgaaggatttgtacaaaaaacccacct

SEQ ID NO: 8870 - DNA, 75 bp, synthetic construct
  source 1..75: mol_type = other DNA
tgcttacggaaaagcagcaagcgcgctgtatcgggtgatgagtggtatctgtcagggaattacgtgggggcttaa

SEQ ID NO: 8871 - DNA, 75 bp, synthetic construct
  source 1..75: mol_type = other DNA
atgtcccgttttgtcctcggtaactgcattgatgttatggcgcgtattcctgataacggcattgatttcatactg

SEQ ID NO: 8872 - DNA, 75 bp, synthetic construct
  source 1..75: mol_type = other DNA
aacactggaagctttccataaattcacatcaaaacacgcctccggcgttcactcttcagaaggtatcccgtggca

SEQ ID NO: 8873 - DNA, 75 bp, synthetic construct
  source 1..75: mol_type = other DNA
cagtttggcggcacggagttacgtctcaaactggtctggctctgctggcttgacttaatgaccggaaacagcctt

SEQ ID NO: 8874 - DNA, 75 bp, synthetic construct
  source 1..75: mol_type = other DNA
tgataacggcattgatttcatactgactgacccgccatacctcgtcggttttcgtgaccgacaggggcgtaccat

SEQ ID NO: 8875 - DNA, 75 bp, synthetic construct
  source 1..75: mol_type = other DNA
cagtagagctggatgatgccagccatttacgaccggaacgcagacgccgggatattcttctggaagaggttctga

SEQ ID NO: 8876 - DNA, 75 bp, synthetic construct
  source 1..75: mol_type = other DNA
atgaaatttatggaatgtgctgtccgggatgtgatttatgggaccaatgtccgtattgtcaaaccggtcaacatt

SEQ ID NO: 8877 - DNA, 75 bp, synthetic construct
  source 1..75: mol_type = other DNA
aatacatgcgacgcggaagcgatcttgaatcatggtggtatgtgcaggatggcaaggacgcgtttcagtttcgcc

SEQ ID NO: 8878 - DNA, 75 bp, synthetic construct
  source 1..75: mol_type = other DNA
aagactttaaagaggccagcgattactttaccagtcgcaaagtcagtgaatccggcagccatactgacaataatg

SEQ ID NO: 8879 - DNA, 75 bp, synthetic construct
  source 1..75: mol_type = other DNA
ggagaaaacaaaagccagaccgactactggcaggagctgaaagagggcttctccgtggttgtcatactgagtaac

SEQ ID NO: 8880 - DNA, 75 bp, synthetic construct
  source 1..75: mol_type = other DNA
ccgaagtccgtcaacgggcagtccgtatggttctggaaagtcaggatgaatatgactcacagtgggcggcaattt

SEQ ID NO: 8881 - DNA, 75 bp, synthetic construct
  source 1..75: mol_type = other DNA
cttgatatgctaattctggacattatccgcgaagcaaagaaaaccgggcaaaaaaaaagactcaggacactgaaa

SEQ ID NO: 8882 - DNA, 75 bp, synthetic construct
  source 1..75: mol_type = other DNA
tgctgacaatccagcagtggcgcgaaacatacggacctggtagcaacgttgtactgccagcagaagaagcggaag

SEQ ID NO: 8883 - DNA, 75 bp, synthetic construct
  source 1..75: mol_type = other DNA
aagccatcacccgcaatctcgatcgagaaatctggcgtgacctgatgcaacgttccgggatgctgagtctgatgg

SEQ ID NO: 8884 - DNA, 75 bp, synthetic construct
  source 1..75: mol_type = other DNA
gaaaaaatcacaagtagccattacggcggtggctcgtgagttgactggatttatgtgggatattgcacttgctgc

SEQ ID NO: 8885 - DNA, 75 bp, synthetic construct
  source 1..75: mol_type = other DNA
tcacactcatccaacgttatggcgtcagtctcattcatctggatgccagcgctgaatgtctgccggaccagccca

SEQ ID NO: 8886 - DNA, 75 bp, synthetic construct
  source 1..75: mol_type = other DNA
tatgggggatttacgggatagtcagggagatgctggagggtgggcgcgtatcatgaatggtaccggttcaggtga

SEQ ID NO: 8887 - DNA, 75 bp, synthetic construct
  source 1..75: mol_type = other DNA
tcacactcatccggcgttatggcgtcagtctcattcatctggatgccggtgctgaatgtctgcaggatttaccca

SEQ ID NO: 8888 - DNA, 75 bp, synthetic construct
  source 1..75: mol_type = other DNA
ggcgtcataatataatttgtactgagtgtcgtaaaagcgaagttatgcagcggatattgtcgttttatcaggggg

SEQ ID NO: 8889 - DNA, 75 bp, synthetic construct
  source 1..75: mol_type = other DNA
atggctacgtggcaacagggtattaattctggtggttttctggctggcattggtgcgcaaaacgagaatgcgcca

SEQ ID NO: 8890 - DNA, 75 bp, synthetic construct
  source 1..75: mol_type = other DNA
aatcagcaggcacgtcaacaacagcgtaaagcagagtttcagaaagcatatgccggggcttttgagtctggagac

SEQ ID NO: 8891 - DNA, 75 bp, synthetic construct
  source 1..75: mol_type = other DNA
aggagagtgcccgggttctttccacacccatgacgccgggcaatccgcgcagatacagcaataaccgcatgtcgg

SEQ ID NO: 8892 - DNA, 75 bp, synthetic construct
  source 1..75: mol_type = other DNA
cgggataccggacaattaaagagttcgacttcccacataagcgctcgcgcatggtgatggcggatcgtcatcact

SEQ ID NO: 8893 - DNA, 75 bp, synthetic construct
  source 1..75: mol_type = other DNA
ggtgaatttgagtacctgttattacttgcaggggagcaccctgaatacgtcctgcataaaaaagctgaatcccgc

SEQ ID NO: 8894 - DNA, 75 bp, synthetic construct
  source 1..75: mol_type = other DNA
attctctttcgtcagatgaacagcgtatgtttgcatgcgagtgtggtaccagcatcggttatctaagaaaggcat

SEQ ID NO: 8895 - DNA, 75 bp, synthetic construct
  source 1..75: mol_type = other DNA
aaagatattttctttaactactgcaattactcatatcacgaaataaaagacgaagaggaagaacaaaatggctga

SEQ ID NO: 8896 - DNA, 75 bp, synthetic construct
  source 1..75: mol_type = other DNA
tacctgcagagcgcgaagctattgacggagtaaagcattcacagcgtggttcaaaaatgcgtacgcctcatctgg

SEQ ID NO: 8897 - DNA, 75 bp, synthetic construct
  source 1..75: mol_type = other DNA
atctgaaagggaaaagcagtctgatgctttacgagcagtttggtgatttgaaattcaaatacaggaacagggagt

SEQ ID NO: 8898 - DNA, 75 bp, synthetic construct
  source 1..75: mol_type = other DNA
tgcaggaatttatcggggagctggacggcggcgtatttgaaaccaaaatcggcgcagttctcagtgaagtcgctt

SEQ ID NO: 8899 - DNA, 75 bp, synthetic construct
  source 1..75: mol_type = other DNA
cagcatcagtattgaggggaaggatatcaccactgtgctggacaaacgcctgatggggcttacgctgacggataa

SEQ ID NO: 8900 - DNA, 75 bp, synthetic construct
  source 1..75: mol_type = other DNA
tggtatcaggtgcgcattgccgggcgtgatgcaggcgaaaatgaattatctgcccgtcttaatgagccgctggca

SEQ ID NO: 8901 - DNA, 75 bp, synthetic construct
  source 1..75: mol_type = other DNA
tgcccgaaggccctttctcacgcaaacaggcaatggctgccacaacagcttaccgcaatgtgcttattgaagatg

SEQ ID NO: 8902 - DNA, 75 bp, synthetic construct
  source 1..75: mol_type = other DNA
caggatcaacgttacatcagtatacgcaatacagatacgatatggctcccgggaaatatttgtgcttaccagttc

SEQ ID NO: 8903 - DNA, 75 bp, synthetic construct
  source 1..75: mol_type = other DNA
atcaaattccctataatgcctgagaatttcaatttggtttttgaacagttttttatgtctaatataaattataca

SEQ ID NO: 8904 - DNA, 75 bp, synthetic construct
  source 1..75: mol_type = other DNA
aaaatcaccgacagacagaatcaaaaatgatcatcgggacgcaatttctctcgccaggttactgcgggctggaga

SEQ ID NO: 8905 - DNA, 75 bp, synthetic construct
  source 1..75: mol_type = other DNA
gcgttaaaagttcaattacaggagatgtgtgaggctgaaggcgttactcaggctgagatgattgctgaactgata

SEQ ID NO: 8906 - DNA, 75 bp, synthetic construct
  source 1..75: mol_type = other DNA
ggaatccggcgacaggcagttacaccgttgccagtgaaacagcaaaaagtcgtggtaaaaaaagcgggcgcagta

SEQ ID NO: 8907 - DNA, 75 bp, synthetic construct
  source 1..75: mol_type = other DNA
ccgccggaaccgattttcaccggagtttaaatggagacttgttcagcaaactcttttacccggtgcctgtgtcgc

SEQ ID NO: 8908 - DNA, 75 bp, synthetic construct
  source 1..75: mol_type = other DNA
aaggccgcgtatgatcttgctaacggtaaatatactgcgcaggatgccagcacgacgcgaaaaggccttgtccag

SEQ ID NO: 8909 - DNA, 75 bp, synthetic construct
  source 1..75: mol_type = other DNA
acctgattaatccgcattttaactgtgagcatgatattgctaaaaaggtttattccgctgcggatggggctactg

SEQ ID NO: 8910 - DNA, 75 bp, synthetic construct
  source 1..75: mol_type = other DNA
caacccaggaagtctgtggccatggattccgggcgatggcgtgcagtgcattgattgaatcaggtttgtggtccc

SEQ ID NO: 8911 - DNA, 75 bp, synthetic construct
  source 1..75: mol_type = other DNA
gacccgtcttgcagaacgcaacggcggtgaggtgtcggtaaaaatgggaaaactgttgtttctcaaagcggggca

SEQ ID NO: 8912 - DNA, 75 bp, synthetic construct
  source 1..75: mol_type = other DNA
cagcgtcagacctcaccattataacggtgggctgacgccggaagagtcagagaacagataccatttttactgtaa

SEQ ID NO: 8913 - DNA, 75 bp, synthetic construct
  source 1..75: mol_type = other DNA
tgaaatggtttaaccctgaaaaaggttttggtttcatcacgccgaaagatggcagcaaagatgtgtttgtccatt

SEQ ID NO: 8914 - DNA, 75 bp, synthetic construct
  source 1..75: mol_type = other DNA
tgatgttcgcggcggcggcgtgcattccgctgctgctgggcagcgcgccgctttatgcgcagacgagtgcggtgc

SEQ ID NO: 8915 - DNA, 75 bp, synthetic construct
  source 1..75: mol_type = other DNA
catcattaatgatgcaaaaaaatcgtcaatattcgatgaatacgcggttgtagttgaacatcaacttcgtggctg

SEQ ID NO: 8916 - DNA, 75 bp, synthetic construct
  source 1..75: mol_type = other DNA
gcatgaaccctcagacagaaaacaaagtgatgagcggctaaaactggagattaaggtggcacatatccgcactcg

SEQ ID NO: 8917 - DNA, 75 bp, synthetic construct
  source 1..75: mol_type = other DNA
tggacgaaatctacggtggaacatttaccgcaactcatttacagaaacttgtaacgcgtcttgagagtgcgaaac

SEQ ID NO: 8918 - DNA, 75 bp, synthetic construct
  source 1..75: mol_type = other DNA
aataccagaacctgctgatgtgtgagttcgtggacgatctcgcgtctgtgttcccactcagcgagctgcaggcgt

SEQ ID NO: 8919 - DNA, 75 bp, synthetic construct
  source 1..75: mol_type = other DNA
gatggtgagcttctatggctggaaccgcgtcgatcgctttatggccgcctggaaaaatgcgggattcagcgtggt

SEQ ID NO: 8920 - DNA, 75 bp, synthetic construct
  source 1..75: mol_type = other DNA
gtcctctgcacaggcgggcgatattctgctgtgctgctttggtgcttcggtaccgaaccatgccgccatttactg

SEQ ID NO: 8921 - DNA, 75 bp, synthetic construct
  source 1..75: mol_type = other DNA
gctgtcaccgtcagggcgtcggcgactgagtgccgaactggcgaaacgtctgcggcagagtcagcagcgtcgggt

SEQ ID NO: 8922 - DNA, 75 bp, synthetic construct
  source 1..75: mol_type = other DNA
atgaatatatcagagcaacaactgaataatatgatgagcgctgtcacaactgcattacagcccctgataagggca

SEQ ID NO: 8923 - DNA, 75 bp, synthetic construct
  source 1..75: mol_type = other DNA
atggcaaacctgtcgttccgggcatgaagttgtcgaaggaaaaatgcgaccgggttaacgccattgagcgtgata

SEQ ID NO: 8924 - DNA, 75 bp, synthetic construct
  source 1..75: mol_type = other DNA
atgcagcaggtttttgttccgctaccccggcgttaaggggaaatgaggtcagcatggatactatcgatcttggca

SEQ ID NO: 8925 - DNA, 75 bp, synthetic construct
  source 1..75: mol_type = other DNA
cgaagcatctgttaccaggtggcagacgatgcgcggcgtatccgggcggcgctgaccaccaccggtcagacgttg

SEQ ID NO: 8926 - DNA, 75 bp, synthetic construct
  source 1..75: mol_type = other DNA
aaaaaaagtcacccggaaaggtgaaaaaggtaactcaagtaatatctatctccttcatcttgatggtgcaggaga

SEQ ID NO: 8927 - DNA, 75 bp, synthetic construct
  source 1..75: mol_type = other DNA
aggtgcagatggcgatgaacggcggcatctatgatgaaagctatgcgccgctcggtttgtacatcgaaaacggtc

SEQ ID NO: 8928 - DNA, 75 bp, synthetic construct
  source 1..75: mol_type = other DNA
gtcgtttttttctaaattcactcgtctgaatatgcttcgcctggctcgcgctgtgatcccggctgctgttctgat

SEQ ID NO: 8929 - DNA, 75 bp, synthetic construct
  source 1..75: mol_type = other DNA
agtatgaacataaaatcggtgacctgattgcccggtttaaagaggctggtggggtggtaaatgaagttgagctat

SEQ ID NO: 8930 - DNA, 75 bp, synthetic construct
  source 1..75: mol_type = other DNA
tcagaaaaaagcattgttgtcaaaactgaataaagaactccgcaaaggcgcggatgagtcagaaaccctcagaca

SEQ ID NO: 8931 - DNA, 75 bp, synthetic construct
  source 1..75: mol_type = other DNA
cactgggacatcctgtcgatggacgtaaaggtgtgcaacaactggctattcagctggatgagacctggaaagccg

SEQ ID NO: 8932 - DNA, 75 bp, synthetic construct
  source 1..75: mol_type = other DNA
aatggtgccgtgatccacatcgttccgcgtcttgcgggagcaaaaagtggcggtgtgtttcaggcggtgctgggt

SEQ ID NO: 8933 - DNA, 75 bp, synthetic construct
  source 1..75: mol_type = other DNA
atactgtctctgttggtgatatctttgtatcatcatggggctatgagcaaaccaatgtaaccttctaccaggttc

SEQ ID NO: 8934 - DNA, 75 bp, synthetic construct
  source 1..75: mol_type = other DNA
gctatcgccacgaatgcgcttacatcctggcaaaagggcgtccggcgctgcctcagaagccattgcccgacgtgc

SEQ ID NO: 8935 - DNA, 75 bp, synthetic construct
  source 1..75: mol_type = other DNA
gcaattgatgaattgcgtggggcattctcaaaacgccgtcaggtcggtgcaagtgagtatgcatatattagtttt

SEQ ID NO: 8936 - DNA, 75 bp, synthetic construct
  source 1..75: mol_type = other DNA
tccaggagctgcgcaaagtggcttccgggatggctattcacaagaaatggcgacaaacctatttttccacgccat

SEQ ID NO: 8937 - DNA, 75 bp, synthetic construct
  source 1..75: mol_type = other DNA
aaaaatgctcctaaatcaggctctaatacccgtaatggctactcgtcaaaaacggtattgtgcgatgatggcgag

SEQ ID NO: 8938 - DNA, 75 bp, synthetic construct
  source 1..75: mol_type = other DNA
ccggcagcggtacagggtggcgtgccacagacgtcagcagacggtgatgcggacgtgaaaatgctcatggccatg

SEQ ID NO: 8939 - DNA, 75 bp, synthetic construct
  source 1..75: mol_type = other DNA
agaggcggccctcccgggccatctgaaggtaaccggagtgaatgccggccggttaggcattgcactgctggacac

SEQ ID NO: 8940 - DNA, 75 bp, synthetic construct
  source 1..75: mol_type = other DNA
ccagtagtgaaatgcacaataatttaacaattgattattatttagcactttcctctaccaaaggcagtggaatta

SEQ ID NO: 8941 - DNA, 75 bp, synthetic construct
  source 1..75: mol_type = other DNA
atatagccatgatctgttaagtgctagtctatttgaggtcacccaatgggactcatacggcatgatgatttataa

SEQ ID NO: 8942 - DNA, 75 bp, synthetic construct
  source 1..75: mol_type = other DNA
agaggatcaggaacataccacgtggaccctgaccggatataaggtggctgaaaatacagcatcttccggtgcagc

SEQ ID NO: 8943 - DNA, 75 bp, synthetic construct
  source 1..75: mol_type = other DNA
tggcgcatgcccggcggtgtgcgcctgcggagtcttgcggcttcgtgataagcacgccggagggtgaccggtacc

SEQ ID NO: 8944 - DNA, 75 bp, synthetic construct
  source 1..75: mol_type = other DNA
ctctaaagaactggtgtcagcggagcaggatattaccactctggcaaaaagcgcggcattaaacgtttcgcgagt

SEQ ID NO: 8945 - DNA, 75 bp, synthetic construct
  source 1..75: mol_type = other DNA
catgctggctaacacctgcacctggatctatcgcggtgatgagtgcggttataatggcccagctgtcgctgatga

SEQ ID NO: 8946 - DNA, 75 bp, synthetic construct
  source 1..75: mol_type = other DNA
atcgacggcaagcgtgtcggggacagggagtatgcggaggtgctgatcgctattacggagtatcaccgtgccctg

SEQ ID NO: 8947 - DNA, 75 bp, synthetic construct
  source 1..75: mol_type = other DNA
ctggctcaaaaatgaataccacggggaggaggaaatctttaccggactggcatcgttaaacgatctggttcgtct

SEQ ID NO: 8948 - DNA, 75 bp, synthetic construct
  source 1..75: mol_type = other DNA
ctgccaggtagttgagagcccagcaggttcacgcaaatggtacaaatacgagcataagacaggttgtattgcgtc

SEQ ID NO: 8949 - DNA, 75 bp, synthetic construct
  source 1..75: mol_type = other DNA
cgtacggagtgttatgccatgacggttcattattaccgtctgcgggattacgccctgcaacatccggaatacgac

SEQ ID NO: 8950 - DNA, 75 bp, synthetic construct
  source 1..75: mol_type = other DNA
attatccaggacattcccggctgtctgtatacaggcggtgtggtctgtgatggtgatgttattactgtttatccc

SEQ ID NO: 8951 - DNA, 75 bp, synthetic construct
  source 1..75: mol_type = other DNA
gtgaaaaactgtttgcacctgcgaaagagcccggacggtatattcgtgtcagggtggaagacttccggtgtgaag

SEQ ID NO: 8952 - DNA, 75 bp, synthetic construct
  source 1..75: mol_type = other DNA
cgcctggccgaacaggaagcgctgatccacgccctgcaggaaaagctgagcaaccgggagcgcgaaatagaccat

SEQ ID NO: 8953 - DNA, 75 bp, synthetic construct
  source 1..75: mol_type = other DNA
ttaattccagtctggggttaatgactgcttttttcgaagcatacctggacgctgactataccgatcgaggtctgc

SEQ ID NO: 8954 - DNA, 75 bp, synthetic construct
  source 1..75: mol_type = other DNA
ttgcacgcagttatgccggagcggggctcctggcccatgtcgtcaccggaaaatatgcagaccatctgccgttat

SEQ ID NO: 8955 - DNA, 75 bp, synthetic construct
  source 1..75: mol_type = other DNA
cagtgactgagcagtctggtcagttgctggggctgggtgttggcagcaccattgccggaaccactgataccaccg

SEQ ID NO: 8956 - DNA, 75 bp, synthetic construct
  source 1..75: mol_type = other DNA
accttaagccgaaggagaaactctataaagttaatgaccgtgatggtctgtatgttgcggtcactccggctggaa

SEQ ID NO: 8957 - DNA, 75 bp, synthetic construct
  source 1..75: mol_type = other DNA
taccttactccatgaagccggttacaacaccgattggatagagaaatgcctggcacatgagcaaaaaggtgtgag

SEQ ID NO: 8958 - DNA, 75 bp, synthetic construct
  source 1..75: mol_type = other DNA
ctcccccattaccccggaacaaattgaaatccgtgagctcaggaaaaagctacaacgtattgaaatggaaaatga

SEQ ID NO: 8959 - DNA, 75 bp, synthetic construct
  source 1..75: mol_type = other DNA
cagtgactgagcagtccggtcagctgctggggttgggtgttggtagcaccattgccggaaccactgacaccaccg

SEQ ID NO: 8960 - DNA, 75 bp, synthetic construct
  source 1..75: mol_type = other DNA
caggaaaacagtgaaaaactggcagccgatatgattatcagtcagaaacgcatgggcggtctgcaggccgtgcgt

SEQ ID NO: 8961 - DNA, 75 bp, synthetic construct
  source 1..75: mol_type = other DNA
tattccaagcctttgtggcaggaagaatagccactaaatggggcgaaaaaacggcagtactgctcggatttattg

SEQ ID NO: 8962 - DNA, 75 bp, synthetic construct
  source 1..75: mol_type = other DNA
ttgcaactgatcggaatgccaatgttatgtcgcaggaggaatgggaagcgttgcctgcgcttttatccggattta

SEQ ID NO: 8963 - DNA, 75 bp, synthetic construct
  source 1..75: mol_type = other DNA
acaaaaacatgcattaccgactgcatgattaaagttttcatcgggcgcgatggcttacctgtaaaagcagagtag

SEQ ID NO: 8964 - DNA, 75 bp, synthetic construct
  source 1..75: mol_type = other DNA
tctactgggcggcggaagaccgcattggtcgtcactattcgtggcagccctttgaccgtggcctgcatctgctgg

SEQ ID NO: 8965 - DNA, 75 bp, synthetic construct
  source 1..75: mol_type = other DNA
atgcgcgggtgtgagatgcgcggcatggtggctaatttcggcggtttcctttccattaataaactttcgcagtaa

SEQ ID NO: 8966 - DNA, 75 bp, synthetic construct
  source 1..75: mol_type = other DNA
ggcgcagttctcagtgaagtcgcttccggtgtgatgaacacgaaaaccaaaggtaaggtctcactcaacctggaa

SEQ ID NO: 8967 - DNA, 75 bp, synthetic construct
  source 1..75: mol_type = other DNA
gggaagaccggcacacctcccgcagtgaacggtatgcgtacattcccaccattaccgtcctggaaaatctgcagc

SEQ ID NO: 8968 - DNA, 75 bp, synthetic construct
  source 1..75: mol_type = other DNA
catcgttcagcgatatgctgtccggcttcaaagataaagtgacatcatctcttaacagcgcggccagctccgtta

SEQ ID NO: 8969 - DNA, 75 bp, synthetic construct
  source 1..75: mol_type = other DNA
gtaaggcgaaaaagatagaattttcactgactcttgaacgctgtgatgaggatttgcgggagcgcctgcaatcct

SEQ ID NO: 8970 - DNA, 75 bp, synthetic construct
  source 1..75: mol_type = other DNA
ccgcatcacgggcagttcaggaaattcgggcagcacgtgagcagtgggaacgtgaaaacggatttatcagcgacg

SEQ ID NO: 8971 - DNA, 75 bp, synthetic construct
  source 1..75: mol_type = other DNA
cctcctgcgggctgacagaagtacatcatgccccggaaaatcataagccggatccggaatggtactgctcctctc

SEQ ID NO: 8972 - DNA, 75 bp, synthetic construct
  source 1..75: mol_type = other DNA
aaatagcctggtatgcttcaatacagcaggagccgaatggctggaagaccgtcaccacacagttctacatccagg

SEQ ID NO: 8973 - DNA, 75 bp, synthetic construct
  source 1..75: mol_type = other DNA
caaagaaaccggagaactgactgaagatggcgaaccggtatgtgttaaggaagacggatattttgtaaacgtgcg

SEQ ID NO: 8974 - DNA, 75 bp, synthetic construct
  source 1..75: mol_type = other DNA
ctccaaaacaaacatcacacacatcatagacaaattagaaaaaaagaatattgccaaaagaattaataataaaaa

SEQ ID NO: 8975 - DNA, 75 bp, synthetic construct
  source 1..75: mol_type = other DNA
tcatgtcattgtttcaggtggtggggagatatacaaaagcctgatcgatcaagtagatacactacatatatctac

SEQ ID NO: 8976 - DNA, 75 bp, synthetic construct
  source 1..75: mol_type = other DNA
ctcaaaaactaataaacactcaaaatgtaatgctaaagaaaatctggagcgggctatcagatgatgaaatgaaaa

SEQ ID NO: 8977 - DNA, 75 bp, synthetic construct
  source 1..75: mol_type = other DNA
cgtcagcaggaactctcactggcgacagtaacagcccgggtggcaaccctgttcccgtcatcatttccggtactc

SEQ ID NO: 8978 - DNA, 75 bp, synthetic construct
  source 1..75: mol_type = other DNA
atgaaagcgtattgggactctttaaccaaagaacagcagggcgagttggccggaaaagttggctcaacaccaggc

SEQ ID NO: 8979 - DNA, 75 bp, synthetic construct
  source 1..75: mol_type = other DNA
aaaaggatggatagcagggaggatcgccgtgctaaaaaaatcagtctgacatctgaaggtatgttttttattcag

SEQ ID NO: 8980 - DNA, 75 bp, synthetic construct
  source 1..75: mol_type = other DNA
cgccggggatacacaaaacacatgctgcgcctgcgccgtaacggggagataaacggacaacatgtccctgaaatt

SEQ ID NO: 8981 - DNA, 75 bp, synthetic construct
  source 1..75: mol_type = other DNA
acaataccgccatgaacaaattgattgcccagctcggtggcccgggaggcgtgacggcttttgcccgcgcgatcg

SEQ ID NO: 8982 - DNA, 75 bp, synthetic construct
  source 1..75: mol_type = other DNA
ccgatccgttaaaagcactggatgccgcaatcgctaaagtcgacaaattccgctcctccctcggtgccgttcaaa

SEQ ID NO: 8983 - DNA, 75 bp, synthetic construct
  source 1..75: mol_type = other DNA
ctacaatctggcttacaacaagcggggaagggtgcaggtgagtatcagccagcagacgggggaatcgtcaacgtt

SEQ ID NO: 8984 - DNA, 75 bp, synthetic construct
  source 1..75: mol_type = other DNA
gcaggcaatggcctcagatgtggcattcaggggtaatctgcttgacagaccctgccatgtgtccggtgacagtct

SEQ ID NO: 8985 - DNA, 75 bp, synthetic construct
  source 1..75: mol_type = other DNA
accctgctggagaacctgcagcgtgaaggattccagccgttctttgcctgccagacccgcgtcagggaccagagc

SEQ ID NO: 8986 - DNA, 75 bp, synthetic construct
  source 1..75: mol_type = other DNA
tgcgatgccgacaccctcggctcctgtggttacgtttatctggctgtttatccgacgcccgatatgaaaaagtaa

SEQ ID NO: 8987 - DNA, 75 bp, synthetic construct
  source 1..75: mol_type = other DNA
cccctggtgggggcttccctgcacagtgaggccctgttttggtgcccgtctggtgcaggagggtaaccgcctgca

SEQ ID NO: 8988 - DNA, 75 bp, synthetic construct
  source 1..75: mol_type = other DNA
atgagattagccagtcgttttggttatgcgaaccagatacgtcgtgatcgtccgctgacacacgaagaactgatg

SEQ ID NO: 8989 - DNA, 75 bp, synthetic construct
  source 1..75: mol_type = other DNA
atgggcaggcgacattcaatcttaaagtccgtgccgtaagcaaaggtaatgctggtgcgggaagtattaattcac

SEQ ID NO: 8990 - DNA, 75 bp, synthetic construct
  source 1..75: mol_type = other DNA
cgcagaaaatacaaattattacagaaatacaggggatgctactaatatcatggttgagctacaggaacaaggtaa

SEQ ID NO: 8991 - DNA, 75 bp, synthetic construct
  source 1..75: mol_type = other DNA
tcttcttcgtgattttaatactccaccctttaaaaaagtgccggcttactggcttcatccggggctgacttatct

SEQ ID NO: 8992 - DNA, 75 bp, synthetic construct
  source 1..75: mol_type = other DNA
gaaaccgctgattttggctcttacgaagtaaaaggcaataaggttgagtttgaagtattcaatcctgaagaccgt

SEQ ID NO: 8993 - DNA, 75 bp, synthetic construct
  source 1..75: mol_type = other DNA
ggaggcatttctgcagtctgccggtaataatgcaaaaacgatcctgcctgcggttgattctgctacgcaagaaat

SEQ ID NO: 8994 - DNA, 75 bp, synthetic construct
  source 1..75: mol_type = other DNA
tgacgaacatcagtccgtcaccaccgctgacattctgacaccacgacgccgggaggattacggtaaggacctgtg

SEQ ID NO: 8995 - DNA, 75 bp, synthetic construct
  source 1..75: mol_type = other DNA
gcaacaacgaatctctggtgtacggcgtgtttcccaaccaggacggcacgttcaccgcgatgacgtataccaaaa

SEQ ID NO: 8996 - DNA, 75 bp, synthetic construct
  source 1..75: mol_type = other DNA
tttcctgtaacgccctctggcaaaagtgtgtccttgcaactctgtatcgggctgcagccacacatcctgaaatta

SEQ ID NO: 8997 - DNA, 75 bp, synthetic construct
  source 1..75: mol_type = other DNA
cacgtttacagcaaaaatatataaggctgaaggtgttacaattaatagcggggagtttagtgccagtgcacttat

SEQ ID NO: 8998 - DNA, 75 bp, synthetic construct
  source 1..75: mol_type = other DNA
tagtggtcgaaggaaaactgacagacgccgagcgcatgaagcttgaaagcaactacctgcgcggcaccattgcgg

SEQ ID NO: 8999 - DNA, 75 bp, synthetic construct
  source 1..75: mol_type = other DNA
aatggatggtgggcaagcatggaaagtaatacctggaataccattcatgataataaaaaggaaaatgccgcactc

SEQ ID NO: 9000 - DNA, 75 bp, synthetic construct
  source 1..75: mol_type = other DNA
tgaaggctggctgtatctggcagtggtcattgacctgtggtcacgtgccgttattggctggtcaatgtcgccacg

SEQ ID NO: 9001 - DNA, 75 bp, synthetic construct
  source 1..75: mol_type = other DNA
cccggggatggggagtaagcttagtcagccgttgtctccgggtgtcgcgtgcgcagttgcacgtaattctcagac

SEQ ID NO: 9002 - DNA, 75 bp, synthetic construct
  source 1..75: mol_type = other DNA
gcctcgattatcgtcactggataatctctgtcaggctcccttattccgaacatccaccgcgtccgtcccgcacat

SEQ ID NO: 9003 - DNA, 75 bp, synthetic construct
  source 1..75: mol_type = other DNA
atgacaaccgtcttgcataattccaccactccttctgtttccgtaaccgctgcatcagggaatgaccagcctcag

SEQ ID NO: 9004 - DNA, 75 bp, synthetic construct
  source 1..75: mol_type = other DNA
tggagagtgtcgacgaagttcgcattatcactgatggacggattaattttatcgaaccatcgacagggctggaga

SEQ ID NO: 9005 - DNA, 75 bp, synthetic construct
  source 1..75: mol_type = other DNA
aatatgctgaaaggcggaatttccggtcgcagtgccagaggaaaacgtatccatacccgtgccattcacagcatc

SEQ ID NO: 9006 - DNA, 75 bp, synthetic construct
  source 1..75: mol_type = other DNA
tcggtgagtgccgtgaggatgccggaacataccgctgtctgccggagccggaagcggtgctgacggaggcggaag

SEQ ID NO: 9007 - DNA, 75 bp, synthetic construct
  source 1..75: mol_type = other DNA
gaggcacacaatagccctggttctcttgcgtattgtgaacaacgcgaccgctttgaaatgcaattgcaactagca

SEQ ID NO: 9008 - DNA, 75 bp, synthetic construct
  source 1..75: mol_type = other DNA
aagggcgggactcgcacaacctgaataaatacatctggcgttttatcgccctgagcacggcacaaccgcgcgtga

SEQ ID NO: 9009 - DNA, 75 bp, synthetic construct
  source 1..75: mol_type = other DNA
ctgtggcatgcgcctgcgccgaaaaatggtcaggccgttggcaccaacaccattggttcttccgaggcctgtatg

SEQ ID NO: 9010 - DNA, 75 bp, synthetic construct
  source 1..75: mol_type = other DNA
gaggaacgaaaatttcagcggcgttgatatctgatgacggttcatttttgctgaaaaaacagatatcaacacctc

SEQ ID NO: 9011 - DNA, 75 bp, synthetic construct
  source 1..75: mol_type = other DNA
agccagtgccaccgccgccggaaaatcggcagaaagcgccgcatcatccgcttcaacagccacaacgaaggctgg

SEQ ID NO: 9012 - DNA, 75 bp, synthetic construct
  source 1..75: mol_type = other DNA
atgccgatatagcccggcgcgacaggttccgcgaaatgatgcgagcacctgcctaccagtggaagaagccagcgc

SEQ ID NO: 9013 - DNA, 75 bp, synthetic construct
  source 1..75: mol_type = other DNA
atgaaacagatttctttatttattccgctgctggggacgttattactttccggctgtgccggaacgaactccgat

SEQ ID NO: 9014 - DNA, 75 bp, synthetic construct
  source 1..75: mol_type = other DNA
ggtttttggtcatcagctcagggaacaggtaaagagctggacaggactcaccatgggggtgggcattgcgcctac

SEQ ID NO: 9015 - DNA, 75 bp, synthetic construct
  source 1..75: mol_type = other DNA
atgagtatggttgccagaactaaccccggccccgcagaggacgacatcaccgataccgatgatggcgacactcgc

SEQ ID NO: 9016 - DNA, 75 bp, synthetic construct
  source 1..75: mol_type = other DNA
ccgcgagctggaagcatggcagcaggaacagcaggcggctggccatcagacgctggccgatgttccggcacccgt

SEQ ID NO: 9017 - DNA, 75 bp, synthetic construct
  source 1..75: mol_type = other DNA
atgtctaaaatcacagtctcccgtccggaagtggtcaacgggcatacggacgttatctgttccacctcaatctgc

SEQ ID NO: 9018 - DNA, 75 bp, synthetic construct
  source 1..75: mol_type = other DNA
accggtggggatttcatcttatcaccggacaacaggctgaccgactcgccgatctggaaagaatgttgcacctgt

SEQ ID NO: 9019 - DNA, 75 bp, synthetic construct
  source 1..75: mol_type = other DNA
tttgagtgtaacgccaccacatccgatacctgtatgacgatggagcaggccaatgagaaggccaaaaaactggag

SEQ ID NO: 9020 - DNA, 75 bp, synthetic construct
  source 1..75: mol_type = other DNA
ttcagacctggtagggaaggttgaaatgactgagtggttagttgactttgctgcccagcttcgcaaaggaggcaa

SEQ ID NO: 9021 - DNA, 75 bp, synthetic construct
  source 1..75: mol_type = other DNA
ggcaggctgatggtacatgctctgaaactggctgcaggatacgacgatatctcagtcgtggcaaaaggtatggag

SEQ ID NO: 9022 - DNA, 75 bp, synthetic construct
  source 1..75: mol_type = other DNA
caacggtaacggaacctatacccaaatagttaccgccgggaagacgtctggcgcgttatcgctgatgccgcaatt

SEQ ID NO: 9023 - DNA, 75 bp, synthetic construct
  source 1..75: mol_type = other DNA
catcatctggatgctgcacggttcgctgtgtgaaatacggatgagcttctggggagcggagtttgcggcgttctt

SEQ ID NO: 9024 - DNA, 75 bp, synthetic construct
  source 1..75: mol_type = other DNA
cctggttgtccgtaataacggaacaatggtctggcgtacctggaattttgaggacggtgccgggtactggatgaa

SEQ ID NO: 9025 - DNA, 75 bp, synthetic construct
  source 1..75: mol_type = other DNA
aagacgatgcgggagcaactgcccgtttagcccgtgaaacatcacgttataaccaggaactttcgaaacaggagg

SEQ ID NO: 9026 - DNA, 75 bp, synthetic construct
  source 1..75: mol_type = other DNA
cgccctgctctggatctttcacgcctgcctgaacttctgtcgcgtattgacggttataaaggccagcctgtcacc

SEQ ID NO: 9027 - DNA, 75 bp, synthetic construct
  source 1..75: mol_type = other DNA
aacaaattctctggcgttacagaataaagcaaagtgtcagtcggcggggaaactgctgggataatagcccaatgg

SEQ ID NO: 9028 - DNA, 75 bp, synthetic construct
  source 1..75: mol_type = other DNA
cgccggggtgacgctgtcgggcactgtcatgcagaccatgcagaatgttgaattaaccatcacgctgagagagta

SEQ ID NO: 9029 - DNA, 75 bp, synthetic construct
  source 1..75: mol_type = other DNA
ttcgaagctccaggagcatgcagcactggtctacaaaatcttctgcgctccagaaaagagtgacgcccgcgagtg

SEQ ID NO: 9030 - DNA, 75 bp, synthetic construct
  source 1..75: mol_type = other DNA
tctgcaactcaaagacaaatatggtcagacgctggtgaccagaaaaatggaaacggaagcttttggtgacagtaa

SEQ ID NO: 9031 - DNA, 75 bp, synthetic construct
  source 1..75: mol_type = other DNA
gtgtcagacaaactctccgggataactcatcccgacgacaatcacgaccgcccctggtgggggcttccctgcaca

SEQ ID NO: 9032 - DNA, 75 bp, synthetic construct
  source 1..75: mol_type = other DNA
atgcgaaccagatacgccgtgaccgtccgctgacccgtgaagagctgatgcaccatgtgcccgggattttcgggg

SEQ ID NO: 9033 - DNA, 75 bp, synthetic construct
  source 1..75: mol_type = other DNA
cgccgggccattgcggggctgaatgtatcagggctgaagaaaaacgcgcgggatatcagtctgctgaggtatatg

SEQ ID NO: 9034 - DNA, 75 bp, synthetic construct
  source 1..75: mol_type = other DNA
gaccatcaaagcgctgaaaatggcctgggaaatccgcagtaaaccagccggggtaatgttccacagcgatcaggg

SEQ ID NO: 9035 - DNA, 75 bp, synthetic construct
  source 1..75: mol_type = other DNA
gtggtcatcggtccttttatcaacgcaagtgcagtattactgggtggcgttctcggtgcactccttagtcaacgc

SEQ ID NO: 9036 - DNA, 75 bp, synthetic construct
  source 1..75: mol_type = other DNA
gagtgcttatcagaccatacaggagaatatgctgaaaggcgggatttccggccgcagtgcaaaaggaaaacgtat

SEQ ID NO: 9037 - DNA, 75 bp, synthetic construct
  source 1..75: mol_type = other DNA
ccggggaccctttccgctgatatcacgcagtcagtagcccgtattgagggagagagaacgtttcagggaaaatcc

SEQ ID NO: 9038 - DNA, 75 bp, synthetic construct
  source 1..75: mol_type = other DNA
tggtcccggcgttattagttgctggcgcagcaaatgcggctgaaatttataataaagatggcaataaagttgatt

SEQ ID NO: 9039 - DNA, 75 bp, synthetic construct
  source 1..75: mol_type = other DNA
agtatgccaacaccttcagactgcactggctggcggtaaaacgtgaacatatgatctggcgctgtgataacgaga

SEQ ID NO: 9040 - DNA, 75 bp, synthetic construct
  source 1..75: mol_type = other DNA
caatgcaaccggtgttattggcccattactgtttgctgttatttataatcattcactaccaatttgggatggctg

SEQ ID NO: 9041 - DNA, 75 bp, synthetic construct
  source 1..75: mol_type = other DNA
ttacttcagattcgtctgccagaatggctgcgtctgcggtcagtctctgggggaagtgcgtgttccacaccgggg

SEQ ID NO: 9042 - DNA, 75 bp, synthetic construct
  source 1..75: mol_type = other DNA
gattgctcgcgtgagtttagccaacgcaattttgcgtcggctgattatatcgatgagcagggcaaggttcgcccg

SEQ ID NO: 9043 - DNA, 75 bp, synthetic construct
  source 1..75: mol_type = other DNA
ataatatcaactcagatatattccggtcatggagttatacgggagccagcctggaaagcgatgaccggatgctgc

SEQ ID NO: 9044 - DNA, 75 bp, synthetic construct
  source 1..75: mol_type = other DNA
gttcgccgggtatcgtttctcagagcgaaactatatgaccatggagcagtacctgaacgcccgctaccgtaatga

SEQ ID NO: 9045 - DNA, 75 bp, synthetic construct
  source 1..75: mol_type = other DNA
aggtcccggcacgggtgagcgccgttcccggcgatcgcttcctgaaagtggagtttataccggcagaggaggaca

SEQ ID NO: 9046 - DNA, 75 bp, synthetic construct
  source 1..75: mol_type = other DNA
gacaccgttgtcgagtgtgtgcttaacaaactctgcccgtcgcatacctacgtaatttttaaatatccggagtaa

SEQ ID NO: 9047 - DNA, 75 bp, synthetic construct
  source 1..75: mol_type = other DNA
gccgaaggcgaagaagctctcagcttcagtgagtttaaacaggcgctttccagttcggcaaaatctaacggctga

SEQ ID NO: 9048 - DNA, 75 bp, synthetic construct
  source 1..75: mol_type = other DNA
cgttcagtgatttcgcccgcgatcgtcgtggtgtgcacgatccggaagcccgttgcctcgctggtaatccctggt

SEQ ID NO: 9049 - DNA, 75 bp, synthetic construct
  source 1..75: mol_type = other DNA
aacacagaaaatctacgttggcggaagagattacatcaacgaaattgatgcgaaaaatcagacgctgctgcgtac

SEQ ID NO: 9050 - DNA, 75 bp, synthetic construct
  source 1..75: mol_type = other DNA
ccctgagagcaatggtagccggtacgctggctaattttcagcacccaaccctgaaacacaacctgactacgctta

SEQ ID NO: 9051 - DNA, 75 bp, synthetic construct
  source 1..75: mol_type = other DNA
ggaatgtccggtggaacacgtcttcttgttgacacggatggtgtgggaggtgtaccggttgatggcgggcaggtg

SEQ ID NO: 9052 - DNA, 75 bp, synthetic construct
  source 1..75: mol_type = other DNA
tgtagtgatgaagagaaggggctagctctgcagtgggtttctgaattgactgatgagttgatggcgaaaattcga

SEQ ID NO: 9053 - DNA, 75 bp, synthetic construct
  source 1..75: mol_type = other DNA
ctctgcagtgggtttcagagctgactgatgagttgatggcgaaaattcgtgcccatgaatataaccgtgtaatgg

SEQ ID NO: 9054 - DNA, 75 bp, synthetic construct
  source 1..75: mol_type = other DNA
ttgaactgaaagctgagtgttcgataggtgaagaggatggtgtttatggtctaatccttgagtcgtgggggccgg

SEQ ID NO: 9055 - DNA, 75 bp, synthetic construct
  source 1..75: mol_type = other DNA
tgcccgggagcaacaaaaaaggcgtgatgaacgtgctgatggttccgtccctctgaaactgtccggaaaaatcca

SEQ ID NO: 9056 - DNA, 75 bp, synthetic construct
  source 1..75: mol_type = other DNA
cgctggatattctgattgcgtggctgcaggacaatatcgactgtgaatccgggattatcttcgacaacgatgagg

SEQ ID NO: 9057 - DNA, 75 bp, synthetic construct
  source 1..75: mol_type = other DNA
gtgctgttcggcgcataccaggtgctggatgcatggattgcccgtgtcagccgggaagagcgtgaggcactggaa

SEQ ID NO: 9058 - DNA, 75 bp, synthetic construct
  source 1..75: mol_type = other DNA
tcaattgctctggtcagtccggttgagttttcgacatcatcatggcgacgtgcagttctggaactggaagcgcat

SEQ ID NO: 9059 - DNA, 75 bp, synthetic construct
  source 1..75: mol_type = other DNA
gcgacgccgtggcagcacatattttatctcggaggagggaaagcgttatcgccgggctgtggcgcttattgttcg

SEQ ID NO: 9060 - DNA, 75 bp, synthetic construct
  source 1..75: mol_type = other DNA
atatttctattattcccgattacagacaagcctggaaagtggaacataaattatcggatattctactgttgacta

SEQ ID NO: 9061 - DNA, 75 bp, synthetic construct
  source 1..75: mol_type = other DNA
gggttcagccctggcagccggtggtttttctgccaccacgatgctgttttcactgggtgccagcatgatactggg

SEQ ID NO: 9062 - DNA, 75 bp, synthetic construct
  source 1..75: mol_type = other DNA
ggagtgatcaacgtcttcaaagggctgagctgggattacaaaaccaactcaccctgtaaatttggcagtaaaatt

SEQ ID NO: 9063 - DNA, 75 bp, synthetic construct
  source 1..75: mol_type = other DNA
cgaagaagcttttctgattgacaagcagatcatcatggggagaccggaagatgaggacacccttaaacgcgttga

SEQ ID NO: 9064 - DNA, 75 bp, synthetic construct
  source 1..75: mol_type = other DNA
tgattaaagaaatcagagagcgaatcggcagcctggacgtgcgagacaatattgagcgcctggcttatgaaatcg

SEQ ID NO: 9065 - DNA, 75 bp, synthetic construct
  source 1..75: mol_type = other DNA
tgagcacatttgaacaactgcaccagaacaaagatgaagtgtttgagcgtggggtgatcaatgttttcaggggac

SEQ ID NO: 9066 - DNA, 75 bp, synthetic construct
  source 1..75: mol_type = other DNA
gtgcttctgcgcccgtcaaaaagaagtcgtttttttctaaattcactcgtctgaatatgcttcgcctggctcgcg

SEQ ID NO: 9067 - DNA, 75 bp, synthetic construct
  source 1..75: mol_type = other DNA
aaaacgcgtgaagagatacaacacgaaaccggacttacatttgaacaacaggctgtagcgcgtaagcatcttgtg

SEQ ID NO: 9068 - DNA, 75 bp, synthetic construct
  source 1..75: mol_type = other DNA
cattcagaccatcgtcctgggcaatattctggcaatcgatccggcggatatcctgcaactcactatcattggcat

SEQ ID NO: 9069 - DNA, 75 bp, synthetic construct
  source 1..75: mol_type = other DNA
cttttgtgaaatcggcgattgcggcaatggtgggttctgcacctgcggcactggatacactgaacgaactggcgg

SEQ ID NO: 9070 - DNA, 75 bp, synthetic construct
  source 1..75: mol_type = other DNA
ccaattcccaaggggttaaggctgacattggaaccacaggccaacgtgaaccgctatgacagtttaaggagagcc

SEQ ID NO: 9071 - DNA, 75 bp, synthetic construct
  source 1..75: mol_type = other DNA
aatgttgagggagaggactctgttctgacgaccgaattattcgaaatagggagttacggtacgggctcattaaat

SEQ ID NO: 9072 - DNA, 75 bp, synthetic construct
  source 1..75: mol_type = other DNA
gaatttccagccagacactttgaaaatggtctatgaccataacggcgttattatttgtattgaaaaggatgtttc

SEQ ID NO: 9073 - DNA, 75 bp, synthetic construct
  source 1..75: mol_type = other DNA
gcaaaaaaggccaacaggggcaggctactgatgcactgagcagagcaaaacaacaggcgggaaatgatgatccgt

SEQ ID NO: 9074 - DNA, 75 bp, synthetic construct
  source 1..75: mol_type = other DNA
cggctactggaaggtgatgtaccgcacgccggaaggctggaagatgaaagcgctcgcgctggcactgcgtcgctg

SEQ ID NO: 9075 - DNA, 75 bp, synthetic construct
  source 1..75: mol_type = other DNA
gcgctggagaacgacaccgcgcgtcaggtgcaggtgtttgaagccgcctgccagtcgggatggggcggtaaaccg

SEQ ID NO: 9076 - DNA, 75 bp, synthetic construct
  source 1..75: mol_type = other DNA
cgcgaccatccatggcaatatcgagattaaagggaatgcccatgccacgggcagtatgttgtctgatggcgaaaa

SEQ ID NO: 9077 - DNA, 75 bp, synthetic construct
  source 1..75: mol_type = other DNA
accgagtggatgctctatgcgcagaaggtcgaatccacagacacctccagcctgccagtaacgtttccagaacaa

SEQ ID NO: 9078 - DNA, 75 bp, synthetic construct
  source 1..75: mol_type = other DNA
ggtatcttcatgcccggacgaacgctcccggtagcgataatcttaacgggattaacgtgaaataccgttatgaat

SEQ ID NO: 9079 - DNA, 75 bp, synthetic construct
  source 1..75: mol_type = other DNA
cccgaccgaatccgtggccattgatgtcgcttatgaaggctccggcagtggcgactggcgcactgacggtttcat

SEQ ID NO: 9080 - DNA, 75 bp, synthetic construct
  source 1..75: mol_type = other DNA
cgtggggagctggcgtgcagtttaacccgaccgaatccgtggccgttgatgtcgcttatgaaggctccggcagtg

SEQ ID NO: 9081 - DNA, 75 bp, synthetic construct
  source 1..75: mol_type = other DNA
gcggggccgtctgtgcgcgtgaatgaatggttcagcgcgtatgcgatggcgggagtggcttacagccgtgtgtcg

SEQ ID NO: 9082 - DNA, 75 bp, synthetic construct
  source 1..75: mol_type = other DNA
catattcgtttggccgcacgttcgttagttgataaagggctgaacaatattattgttaccatgagcgaaaaaggc

SEQ ID NO: 9083 - DNA, 75 bp, synthetic construct
  source 1..75: mol_type = other DNA
tgtccgcagctatttgtctggccgtatccggtgcgtctgcatgggcatctgaacatcagtccacgctgagcgcgg

SEQ ID NO: 9084 - DNA, 75 bp, synthetic construct
  source 1..75: mol_type = other DNA
ttcgtgacggcgggggacagagcctgaacgggctggcggtgaacaccacgctgaataacagaggcgagcagtggg

SEQ ID NO: 9085 - DNA, 75 bp, synthetic construct
  source 1..75: mol_type = other DNA
accgtactggaaagcctgcagcgggaaggctttcagccattcttcgcctgccagacccgtgtgcgcgacccgggc

SEQ ID NO: 9086 - DNA, 75 bp, synthetic construct
  source 1..75: mol_type = other DNA
tcagcatggctggtgaataactggtatcccacagcaagtatcagcgatttgctggttgtggtgatgaagaaagcc

SEQ ID NO: 9087 - DNA, 75 bp, synthetic construct
  source 1..75: mol_type = other DNA
gaacatggggcgaattgtcgctgacgtcgatggtgttaatctcactgaactgattaacaaggtcgctgaaaacgg

SEQ ID NO: 9088 - DNA, 75 bp, synthetic construct
  source 1..75: mol_type = other DNA
gcggcagggctgacgtttaaccaggcgggagagtcactggcagccctggtcagtgccggtgtgcgtggtggtgaa

SEQ ID NO: 9089 - DNA, 75 bp, synthetic construct
  source 1..75: mol_type = other DNA
gcgagcgcaatccgctgttacagtcatggagcaaagtagtcggcaagcgcacacgagtgtagctcacgcagagga

SEQ ID NO: 9090 - DNA, 75 bp, synthetic construct
  source 1..75: mol_type = other DNA
cattcaagaggttgcgagcaatgcacagcatgctgcagatgcggccggaagagcagacactgagacggcatctgg

SEQ ID NO: 9091 - DNA, 75 bp, synthetic construct
  source 1..75: mol_type = other DNA
aatgagcaacaggtacagtttttactggaaagtaatcccagacggaacagagcgaagtttacgcaggtctccttc

SEQ ID NO: 9092 - DNA, 75 bp, synthetic construct
  source 1..75: mol_type = other DNA
gcacctctgtactacagcccgggttacggccctgcttcactgtacgactacaaaggccggggccgaacctttggt

SEQ ID NO: 9093 - DNA, 75 bp, synthetic construct
  source 1..75: mol_type = other DNA
gttccattgccccaaagattgactgtacaccggagactctgcgtgtctgggtacgccagcatgagcgggataccg

SEQ ID NO: 9094 - DNA, 75 bp, synthetic construct
  source 1..75: mol_type = other DNA
cagaagtacagccgccagcaggcgagggaggcagagcagaaagcccgtgcgtaccaggcgctggtcgctcaggct

SEQ ID NO: 9095 - DNA, 75 bp, synthetic construct
  source 1..75: mol_type = other DNA
gtgaggcgttgtaccagacagcccgtcatggtgggtttatggccgtcatcggtgagtccggtgcgggtaaatcca

SEQ ID NO: 9096 - DNA, 75 bp, synthetic construct
  source 1..75: mol_type = other DNA
ccactaaagactatctgtacagcaataatattgatactgaccttttagtggttatcggagggcttattgttatat

SEQ ID NO: 9097 - DNA, 75 bp, synthetic construct
  source 1..75: mol_type = other DNA
taggtgcaatccggcgtgtggtggagccgctcggctatctcatcaacgtgacggagtggtgggaaaacagtgacc

SEQ ID NO: 9098 - DNA, 75 bp, synthetic construct
  source 1..75: mol_type = other DNA
gagtaaacagagtctggagactgatgaaacgtgtcggaataaaggctcaggtcggataccgaagcccgcgggcac

SEQ ID NO: 9099 - DNA, 75 bp, synthetic construct
  source 1..75: mol_type = other DNA
atgccatgacggtccactattaccggctgcgggattacgccctgcaacatccggaatgcagcgccattatgcgca

SEQ ID NO: 9100 - DNA, 75 bp, synthetic construct
  source 1..75: mol_type = other DNA
ccaaagacccgaagccgcaaaagcagaaggtaaaactgaaacgcaaaaagaaagagaaacacctgcgcgcactgg

SEQ ID NO: 9101 - DNA, 75 bp, synthetic construct
  source 1..75: mol_type = other DNA
cttcctgttcaggacggattatgcctgaacaaaaacgtgagctgaacggacgtggggtctggttgcgggatggtg

SEQ ID NO: 9102 - DNA, 75 bp, synthetic construct
  source 1..75: mol_type = other DNA
taatcatgaagatgtgacctggtcgtccattgccgccggttttaagggattaattccttcaaaagtaaaatctcg

SEQ ID NO: 9103 - DNA, 75 bp, synthetic construct
  source 1..75: mol_type = other DNA
ctggttgttcatgccctgccaggtgaccgccacggtgtcgccgcaggtggtcgccgactggcagcactcaacatg

SEQ ID NO: 9104 - DNA, 75 bp, synthetic construct
  source 1..75: mol_type = other DNA
aggcaagtaaagagtatggtttatataataaatgtaagaaactaaatgatgatgaattatttcgcttacttgatg

SEQ ID NO: 9105 - DNA, 75 bp, synthetic construct
  source 1..75: mol_type = other DNA
aaatgctgttgatactagtggcgctggtgacgcatttattggttgcttttcccattattatgttcaaagcggtga

SEQ ID NO: 9106 - DNA, 75 bp, synthetic construct
  source 1..75: mol_type = other DNA
cagacggagctggcagagaatggcatcatcgttggtcgtgaccgactggcatgtcttcgtaaggagctgaggcta

SEQ ID NO: 9107 - DNA, 75 bp, synthetic construct
  source 1..75: mol_type = other DNA
gccagcattgataacgataagggctaccacactgcaagcgtctatatgcctagcattgatgcgccagggctaacc

SEQ ID NO: 9108 - DNA, 75 bp, synthetic construct
  source 1..75: mol_type = other DNA
ggacgcgcgctcatccctgctggatgaatggcacaaggaagctgacgacctcgtggtgattatggggcgcaacct

SEQ ID NO: 9109 - DNA, 75 bp, synthetic construct
  source 1..75: mol_type = other DNA
cctgtccgatcatgaaatcaggactgtcctggcgcgcctggaggacatcccggaagaccagcggactgaatccgg

SEQ ID NO: 9110 - DNA, 75 bp, synthetic construct
  source 1..75: mol_type = other DNA
attgcagtaaaattagtgggatgacgccacaactcataaaaaaaggtttaattggcggactggagtgcgtctcgc

SEQ ID NO: 9111 - DNA, 75 bp, synthetic construct
  source 1..75: mol_type = other DNA
gaaaactcagcagcaaaaatcaaccctgtcactacagccattcgtcgcgaatacaggcagacatggaaaacactg

SEQ ID NO: 9112 - DNA, 75 bp, synthetic construct
  source 1..75: mol_type = other DNA
gtgatgtgaaatttggtgaaaatgtgaaagtcgtcatgccagtaaacctctatgaatgtgaactgggggatgatg

SEQ ID NO: 9113 - DNA, 75 bp, synthetic construct
  source 1..75: mol_type = other DNA
ggcactggcggcgtcactggatacgcaggggtacagcgttaacgacatcatccatatcctgatggcggaaggagg

SEQ ID NO: 9114 - DNA, 75 bp, synthetic construct
  source 1..75: mol_type = other DNA
atattctcaacctgtccgatccgtggcaggtaaagtccctttctctcgatgaaaatgccggttctgttactgtca

SEQ ID NO: 9115 - DNA, 75 bp, synthetic construct
  source 1..75: mol_type = other DNA
agataagctacagccgcagcgagtcgttctggctggcaaggggcggagtgctgaaacaacacaaaggccatccgc

SEQ ID NO: 9116 - DNA, 75 bp, synthetic construct
  source 1..75: mol_type = other DNA
atgttttggttccgtgaaaccaaaaatacacgtgataatacagataccgaagtaggggttgagacgcaatcgaat

SEQ ID NO: 9117 - DNA, 75 bp, synthetic construct
  source 1..75: mol_type = other DNA
ccggctcatcaccgcttgaagttgctgccgcaaaagcctgtgcggaaattgaaaaaacgccggtcagtattcgtg

SEQ ID NO: 9118 - DNA, 75 bp, synthetic construct
  source 1..75: mol_type = other DNA
aaaagcctaatgtaacagcaatactttgtggtggtacgtatcgtgccagaagtgatgctttttacgatgccagta

SEQ ID NO: 9119 - DNA, 75 bp, synthetic construct
  source 1..75: mol_type = other DNA
caccatcagatattggagcgctgccaacgactggagggactatttcaggtccgttgtctgttactgatgggatca

SEQ ID NO: 9120 - DNA, 75 bp, synthetic construct
  source 1..75: mol_type = other DNA
tgctcgtgaagcggcgagtgatatgccggacccgacgctgccggaggtgtccggaggtagtggcagagaggacga

SEQ ID NO: 9121 - DNA, 75 bp, synthetic construct
  source 1..75: mol_type = other DNA
cggagagtgtgctgcgtgaatcacaacgggagcgggaagcggtccgggaggttgcccgggaaaatctgctgcagg

SEQ ID NO: 9122 - DNA, 75 bp, synthetic construct
  source 1..75: mol_type = other DNA
ctctcccgactactgggccagcattacggccttacactgaatgacacaccgttcgccgatgaacgtgtgattgag

SEQ ID NO: 9123 - DNA, 75 bp, synthetic construct
  source 1..75: mol_type = other DNA
gcggacgctgacgtaccggcgtgaggccgccggtgacctgaccggggaaatcaccggcgtgacggacggtgccgg

SEQ ID NO: 9124 - DNA, 75 bp, synthetic construct
  source 1..75: mol_type = other DNA
tacatcgagaaaaagaaaggccgccagacgacgcatatcgtattttccttccgtgatataacctccatgacgatt

SEQ ID NO: 9125 - DNA, 75 bp, synthetic construct
  source 1..75: mol_type = other DNA
atacaccgacacaaagggaccatcagcgcactgcgaagagccgtggagcctctcggctacctgattgaagtaaag

SEQ ID NO: 9126 - DNA, 75 bp, synthetic construct
  source 1..75: mol_type = other DNA
aacctgtaccgcctgatgcggggctatgcggaaggtggttatgtgggcggtgccggaagtccggcgcagatgcgg

SEQ ID NO: 9127 - DNA, 75 bp, synthetic construct
  source 1..75: mol_type = other DNA
cgctgaaaatgcccgcctgaagcggcaactggcggagcaggcagaggaactggctatcctccaaaaggccgcggc

SEQ ID NO: 9128 - DNA, 75 bp, synthetic construct
  source 1..75: mol_type = other DNA
caaaatggcgattgtcacggcgcgtcacgaaatgtcacgcacatgtcacgacgagtcacgacagataaagataca

SEQ ID NO: 9129 - DNA, 75 bp, synthetic construct
  source 1..75: mol_type = other DNA
atgtcccagccggttggtgatcttgttattgacctgagtctggatgcggtccgtttcgatgagcagatgagccgg

SEQ ID NO: 9130 - DNA, 75 bp, synthetic construct
  source 1..75: mol_type = other DNA
tcatgcaacattcattgaagaaagaaggaaaatgttgaactttttctcttcaacgttatttttaaggaaaatgta

SEQ ID NO: 9131 - DNA, 75 bp, synthetic construct
  source 1..75: mol_type = other DNA
cacgtccgcagaaaaactccttgatccgtgtgaaaacttgtctgttttcgaaaagattatcgtggattgttataa

SEQ ID NO: 9132 - DNA, 75 bp, synthetic construct
  source 1..75: mol_type = other DNA
ttaaggcactttcggaaaaatggttggaccttaagaaaattgagatttgtgcgaatgcacttaatcgttaccagt

SEQ ID NO: 9133 - DNA, 75 bp, synthetic construct
  source 1..75: mol_type = other DNA
ctgggcagcatgggagaacgctgggccggtcagggggctgaacagcttgggctgcagggcagcgtcgataaggat

SEQ ID NO: 9134 - DNA, 75 bp, synthetic construct
  source 1..75: mol_type = other DNA
atgaagaaaagtcggctcaggaaagaatgcccggggctgacagtccacaggaactgatgaaaagggcaaaggaat

SEQ ID NO: 9135 - DNA, 75 bp, synthetic construct
  source 1..75: mol_type = other DNA
tggtgagcttcgatccggcaagcggaaaaaccgcgatgtacggttatcctatcgacagcgcggcctacagcaaaa

SEQ ID NO: 9136 - DNA, 75 bp, synthetic construct
  source 1..75: mol_type = other DNA
cgatatcctccgggctcgccgggcaacaggcctgatgatccgcgacaattacagaacggtaaataacattaccct

SEQ ID NO: 9137 - DNA, 75 bp, synthetic construct
  source 1..75: mol_type = other DNA
tcaatgcctatctgacccgcgtcgctgagctgaacggcatcagcactgatgacgtcagtaaaaaattcaccgtcg

SEQ ID NO: 9138 - DNA, 75 bp, synthetic construct
  source 1..75: mol_type = other DNA
cggaagtggtcaacgggcatacggacgttatctgctcaaccagtatctgccgcattctggctgtacgaaaaagta

SEQ ID NO: 9139 - DNA, 75 bp, synthetic construct
  source 1..75: mol_type = other DNA
ctcgttgtcagtctgcacaggtctaccgccatggtcagaaccctaaaggccatgacagatttcgctgccgtgact

SEQ ID NO: 9140 - DNA, 75 bp, synthetic construct
  source 1..75: mol_type = other DNA
gctgccaaatacaaaagcggaaagcatcgcctggaatgaagatcaaaaaggaatttataccgcaacgtataccgc

SEQ ID NO: 9141 - DNA, 75 bp, synthetic construct
  source 1..75: mol_type = other DNA
aagtaatctcatgttctctcttggggcaggtatggttttaggcggtgttgcgcagatgctggcaccgaaagccaa

SEQ ID NO: 9142 - DNA, 75 bp, synthetic construct
  source 1..75: mol_type = other DNA
gtgctgatgccgcaggcatcatccttacctcccttgtgattaaccgccagttgtggctgtaccacgacagcgggg

SEQ ID NO: 9143 - DNA, 75 bp, synthetic construct
  source 1..75: mol_type = other DNA
tgtgggaactcaaaagaaatggcgtcgttgataaaactggtcacacctggtttctggctggcgaaggtgaatccc

SEQ ID NO: 9144 - DNA, 75 bp, synthetic construct
  source 1..75: mol_type = other DNA
tcaaataactgttacggtcaggtatcccgtcgtgaccaggagagcgcgctggcgtgctggggaatcgacagataa

SEQ ID NO: 9145 - DNA, 75 bp, synthetic construct
  source 1..75: mol_type = other DNA
ccgtgcagatcgatgtctgggcgacagtacctgatgacgcagatgatatccgtgagcaggcgcttgatgcggtaa

SEQ ID NO: 9146 - DNA, 75 bp, synthetic construct
  source 1..75: mol_type = other DNA
atgagcaggaaattccgctatggtttatcagcggtcgttctggcgctgattgctgcaggtgcttctgcgcctgaa

SEQ ID NO: 9147 - DNA, 75 bp, synthetic construct
  source 1..75: mol_type = other DNA
atccgctggactgccccggcgaatgttagagagcagtatgtcgaacgtataaagaaattccgttgccctcaaacc

SEQ ID NO: 9148 - DNA, 75 bp, synthetic construct
  source 1..75: mol_type = other DNA
atgagcactattcttcttccgaaaacgcagcacctggtagtctttcaggaagtcattagaagtggttctatcggc

SEQ ID NO: 9149 - DNA, 75 bp, synthetic construct
  source 1..75: mol_type = other DNA
gatgaaaaagatcgcaatggtgatggtgcggatgccgtacgccagaaggtgccagcaatgctgaacagcgatgtg

SEQ ID NO: 9150 - DNA, 75 bp, synthetic construct
  source 1..75: mol_type = other DNA
atgatatctctccctgccggttcgcgtatctggctggttgccggtatcaccgatatgcgaaatggctttaacggc

SEQ ID NO: 9151 - DNA, 75 bp, synthetic construct
  source 1..75: mol_type = other DNA
tcatcgcccagtatccgttggtaaaggatctggttgctcttaaagaaaccacctggtttaatcctggcacgacct

SEQ ID NO: 9152 - DNA, 75 bp, synthetic construct
  source 1..75: mol_type = other DNA
actgccggaaatttatataaatacaataacccgtacacaaatacgacggattacttcatcctgaagcagagcacc

SEQ ID NO: 9153 - DNA, 75 bp, synthetic construct
  source 1..75: mol_type = other DNA
tgctgtgtgcggcgtcagttcatccggatacgataaatgatattgcacgggtcgagagtggcttcaatccttatg

SEQ ID NO: 9154 - DNA, 75 bp, synthetic construct
  source 1..75: mol_type = other DNA
aaatgaatttattcgactccctgaacagcgcgcgccgtctgaccgaacttgccggtgcggtactggaacgcagta

SEQ ID NO: 9155 - DNA, 75 bp, synthetic construct
  source 1..75: mol_type = other DNA
ctcaccactacatcagggcgaaacgcagcatcggcgttgcagcgggggagggaaaatttgcaacagagatgattg

SEQ ID NO: 9156 - DNA, 75 bp, synthetic construct
  source 1..75: mol_type = other DNA
agccgttgctgaaaccgctggtcgacggcccgcagagcgctgtcgtgacaggaccggcaggcgaggaaatcttct

SEQ ID NO: 9157 - DNA, 75 bp, synthetic construct
  source 1..75: mol_type = other DNA
ttagcggcggggcacgccgttcttgcctgtggagagatggtgcagtcaggccgctcgttgaagcaggaacccacc

SEQ ID NO: 9158 - DNA, 75 bp, synthetic construct
  source 1..75: mol_type = other DNA
cagcgagacgagttacatcaacaaactcaggcatcttgctcaacgggagcctgactttattgatatacacgctca

SEQ ID NO: 9159 - DNA, 75 bp, synthetic construct
  source 1..75: mol_type = other DNA
tcattttcaatgtttaaatattatattgaatcaaatagcataacttgtaaagattatatatatccttcatatatg

SEQ ID NO: 9160 - DNA, 75 bp, synthetic construct
  source 1..75: mol_type = other DNA
gcttctcattttattacaaagataatgataataaatataaagaaatctttgatgaaatactggcctataatttta

SEQ ID NO: 9161 - DNA, 75 bp, synthetic construct
  source 1..75: mol_type = other DNA
ggctctctcaaggcactgatttgcttgcagagggactttaccgtgttttggattttgacagaaaggtcgatttgt

SEQ ID NO: 9162 - DNA, 75 bp, synthetic construct
  source 1..75: mol_type = other DNA
tgcacaaagaattaaatcatcatttttgggtatccttgttattgatgaaatgcagaggcttaaattttcaagaac

SEQ ID NO: 9163 - DNA, 75 bp, synthetic construct
  source 1..75: mol_type = other DNA
ttcaaatttctggccggaccagaaaccgtgctggcactactggatgagatcaacgcattagaggaaacgcgtatc

SEQ ID NO: 9164 - DNA, 75 bp, synthetic construct
  source 1..75: mol_type = other DNA
acctattttgtcagagcgattggcaactcaatgactgatattggcctctattccggcgatctgatggtcgtggat

SEQ ID NO: 9165 - DNA, 75 bp, synthetic construct
  source 1..75: mol_type = other DNA
attccagtcggagatccagcgggcgtcccgtatgggcagtgaatattaccggaccctgcagaatggcggacgtca

SEQ ID NO: 9166 - DNA, 75 bp, synthetic construct
  source 1..75: mol_type = other DNA
gaaaactggtttgaccgtaccgtgagtgctgatgccgcaggcatcattctgacttcccttgtgattaaccgccag

SEQ ID NO: 9167 - DNA, 75 bp, synthetic construct
  source 1..75: mol_type = other DNA
tggacaggtcaccgaagccgtactgactcaggatggcccggtgctggatgatattactgccggacaatcgggaac

SEQ ID NO: 9168 - DNA, 75 bp, synthetic construct
  source 1..75: mol_type = other DNA
ctttagtgccgagcaacggcagggcaaacagggagaaaacgacacccgaattggtatggagttgacgttgcaacc

SEQ ID NO: 9169 - DNA, 75 bp, synthetic construct
  source 1..75: mol_type = other DNA
aagctttcctggatatggtggcatggtcagaaggaacggataacgggcgacaaccgacacgtaaccacggttatg

SEQ ID NO: 9170 - DNA, 75 bp, synthetic construct
  source 1..75: mol_type = other DNA
tcaggcccaccgtgccgggctgtgggtgataaagaccgaactgctggaaacgcagacggtggatttcacgctcgg

SEQ ID NO: 9171 - DNA, 75 bp, synthetic construct
  source 1..75: mol_type = other DNA
cgtctggtacaggcgctggccctggtggatatccgggtgccggaccatctgatagtcggtggcagccaggttttc

SEQ ID NO: 9172 - DNA, 75 bp, synthetic construct
  source 1..75: mol_type = other DNA
tgccctgccggatttcagtccgttgtcacaggacagactcgccattcagttgatccgcgaacgcggtgcactgga

SEQ ID NO: 9173 - DNA, 75 bp, synthetic construct
  source 1..75: mol_type = other DNA
ctacctggctctacggcttaaaagtaatcgcgataacgttagcggtcatcatgttcatcagcgggctggacgatt

SEQ ID NO: 9174 - DNA, 75 bp, synthetic construct
  source 1..75: mol_type = other DNA
ctgcgtgacagcgggcaacagtgcggagtaaacagagtctggagactgatgaaacgtgtcggaataaaggctcag

SEQ ID NO: 9175 - DNA, 75 bp, synthetic construct
  source 1..75: mol_type = other DNA
gatttgcgatcctgctgatatgctgatcattcagatgacggaggaaaaagcccgcgaacactccaaaaaacgact

SEQ ID NO: 9176 - DNA, 75 bp, synthetic construct
  source 1..75: mol_type = other DNA
aacctggttttgcgcacgttatgcctggtattgtcaacagatgatgcaggcaagagagctggagttagagcactg

SEQ ID NO: 9177 - DNA, 75 bp, synthetic construct
  source 1..75: mol_type = other DNA
tcgtaaaaattgtagatattggtagcctgacccaggctgctgaagtattgcatatcgcacaaccagcgctcagcc

SEQ ID NO: 9178 - DNA, 75 bp, synthetic construct
  source 1..75: mol_type = other DNA
atgcgaaagttcaaaataattattgaaacgggaatagctggtggagattttgaggatgtattcgaagtggacgat

SEQ ID NO: 9179 - DNA, 75 bp, synthetic construct
  source 1..75: mol_type = other DNA
atcgtcagttgctgggcaggaaagcggatacgagaaaacgtctgaagggctggctgccagtggcctgtattaatc

SEQ ID NO: 9180 - DNA, 75 bp, synthetic construct
  source 1..75: mol_type = other DNA
ggcgatatcaaaggcgcatgtgaccagctacgtcgctggacatacgctggcggtaagcaatggaaaggcctgatg

SEQ ID NO: 9181 - DNA, 75 bp, synthetic construct
  source 1..75: mol_type = other DNA
atgcaacagatttcctttctgcccggagcgatgacgcccggcgagcgcagtctcattcagcgggccctgaaaacc

SEQ ID NO: 9182 - DNA, 75 bp, synthetic construct
  source 1..75: mol_type = other DNA
ccgggaaaacatcactattcgtctggatgatcacatccggtctgttcagggtaaagaatgctatgaagatgagat

SEQ ID NO: 9183 - DNA, 75 bp, synthetic construct
  source 1..75: mol_type = other DNA
tttaaagcaatagataaccacgggaaggaaataacaaacagaaaaggattacctaatgtctgcagagttcatggt

SEQ ID NO: 9184 - DNA, 75 bp, synthetic construct
  source 1..75: mol_type = other DNA
ggagtgagaacgggggcgacggtgacgcattcgtcagggaagaacgcgaagcgatggacgttgtgttacaggcgc

SEQ ID NO: 9185 - DNA, 75 bp, synthetic construct
  source 1..75: mol_type = other DNA
ctgcacagcagcagttcaacagtcctacggggttgccgctgaccctgcgggactaccgcctgtatatctcctact

SEQ ID NO: 9186 - DNA, 75 bp, synthetic construct
  source 1..75: mol_type = other DNA
gtgcagggctggcggctattgcactggctgccggaggcggtggtggaagcagtcgtcataagcgtgcaactgaag

SEQ ID NO: 9187 - DNA, 75 bp, synthetic construct
  source 1..75: mol_type = other DNA
atgcaggtactaaattcccagcgtaaagctttcctcgatatggtggcatggtcagaaggaacggataacgggcga

SEQ ID NO: 9188 - DNA, 75 bp, synthetic construct
  source 1..75: mol_type = other DNA
tcaccctgggcgttcaggccggttatgcccacagcgtcagcggcagcagcgctgaaggctataacggtcaggcca

SEQ ID NO: 9189 - DNA, 75 bp, synthetic construct
  source 1..75: mol_type = other DNA
acgcctgacggatgaactgcgtgctcagggttacccctttaacgtaaaaaccgtggcggcaagcctgcgccgtca

SEQ ID NO: 9190 - DNA, 75 bp, synthetic construct
  source 1..75: mol_type = other DNA
gggctgggtggatgcatgctgccggctactgtcaccgctggaagaagcgcttcaggactatgtgctgactgacgg

SEQ ID NO: 9191 - DNA, 75 bp, synthetic construct
  source 1..75: mol_type = other DNA
ggtacagccacgaatgtcaccctgaagcagggcggcgcactggttaccagtacggctgcaaccgttaccggcata

SEQ ID NO: 9192 - DNA, 75 bp, synthetic construct
  source 1..75: mol_type = other DNA
gtccggcactcaccggaacgccaacagcacctactgcggcacagtcggtcaacaatacacagattgccaccacgg

SEQ ID NO: 9193 - DNA, 75 bp, synthetic construct
  source 1..75: mol_type = other DNA
actggcccaagtggtaacgatggtctggaaggtgtcagctacataccatacaaagatatcgttggcgtatggact

SEQ ID NO: 9194 - DNA, 75 bp, synthetic construct
  source 1..75: mol_type = other DNA
caacatccgtgaaaccgaagcgatcggtcacgttgttcgctgctttgaaaatgacaacatcattcacgtttccgg

SEQ ID NO: 9195 - DNA, 75 bp, synthetic construct
  source 1..75: mol_type = other DNA
gtgcgcagtgaacaggcggcacaggtggcgattgcgcggatgaaccgggccattgatgaggtactgagacgatga

SEQ ID NO: 9196 - DNA, 75 bp, synthetic construct
  source 1..75: mol_type = other DNA
gaatacatcacccatctggtacagtcagcctactacgatactgaacgggatattgttcagttacaggctgatccc

SEQ ID NO: 9197 - DNA, 75 bp, synthetic construct
  source 1..75: mol_type = other DNA
ccggcagccatgctgtctccgggtgaccgcagtgcaattcagcagcaacagcagcagttgctggatgaaaaccag

SEQ ID NO: 9198 - DNA, 75 bp, synthetic construct
  source 1..75: mol_type = other DNA
accgtaacctatgacttcgagcgtctgatggaaggcgctaaactgctgaaatgttcagaatttggtgatgcgatc

SEQ ID NO: 9199 - DNA, 75 bp, synthetic construct
  source 1..75: mol_type = other DNA
ctgcagagaatgttgttcggtcgcagcagcgagaaaagccgcgagaagatagaaaagaagatcgcacgggcagaa

SEQ ID NO: 9200 - DNA, 75 bp, synthetic construct
  source 1..75: mol_type = other DNA
cacggtgctggcggatttacagcgcacatttgaggggaagatggcctcgcaggcacaagcgtttgaagagaaact

SEQ ID NO: 9201 - DNA, 75 bp, synthetic construct
  source 1..75: mol_type = other DNA
catatttacgttgatgaaagtgcagagatcgctgaagccctgaaagtaatcgtcaacgcgaaaacccagcgtccg

SEQ ID NO: 9202 - DNA, 75 bp, synthetic construct
  source 1..75: mol_type = other DNA
cggatttcagtctgcttgctccagcgtgtgaggaagagcagacggagatgccggacgaggaagaaatgctgatgc

SEQ ID NO: 9203 - DNA, 75 bp, synthetic construct
  source 1..75: mol_type = other DNA
tggtttcagcgctgctgttaccggcaacggcaatggccacaaccggaaacgcagaggaacagagtccccggcaac

SEQ ID NO: 9204 - DNA, 75 bp, synthetic construct
  source 1..75: mol_type = other DNA
cactgacggcagtgtgtcgagcgttgaagctatagcggaacctgatgcacctgaagaaatgtggacggtgaaacg

SEQ ID NO: 9205 - DNA, 75 bp, synthetic construct
  source 1..75: mol_type = other DNA
aagacggatgagaaatccaatgagattacagccattcctgaacttcttaacatgatggatattaaaggaaaaatc

SEQ ID NO: 9206 - DNA, 75 bp, synthetic construct
  source 1..75: mol_type = other DNA
gacacggggtggcagactgagctgtaagtttcgactgtcaggcgcactgaccaacaaccagttcggtctgggaat

SEQ ID NO: 9207 - DNA, 75 bp, synthetic construct
  source 1..75: mol_type = other DNA
tgccgattcgttttgcaggctcttaccagcgcgacgataccggcgaaacggtggccgtcgaagtggtcatgcgtg

SEQ ID NO: 9208 - DNA, 75 bp, synthetic construct
  source 1..75: mol_type = other DNA
atgcgcgggtgtgagatgcgcggcatggtggctaattttggcggtttcctttccattaataaactttcgcagtaa

SEQ ID NO: 9209 - DNA, 75 bp, synthetic construct
  source 1..75: mol_type = other DNA
aatcacagctccgggtgattatcctgaaaatacaaccactatcgccccgttaacgccatacgatgaatgggatgg

SEQ ID NO: 9210 - DNA, 75 bp, synthetic construct
  source 1..75: mol_type = other DNA
cagagcaacatgtacgaagtatgtttacaggtaccagccagatttgtaccaggactgcggaggtgcactcactta

SEQ ID NO: 9211 - DNA, 75 bp, synthetic construct
  source 1..75: mol_type = other DNA
acaggtcggctcgtgatggttatgggtttgaattaggttggtcagatttctataccacgacacgaaaaccttcag

SEQ ID NO: 9212 - DNA, 75 bp, synthetic construct
  source 1..75: mol_type = other DNA
atacctggcgcagctatgcgatgttcctgctggatgtgatgccggaaagaacggcagaacattaccgtaataaaa

SEQ ID NO: 9213 - DNA, 75 bp, synthetic construct
  source 1..75: mol_type = other DNA
aaagagctgaaggccgcgaaaaaacgcgaactgctgccgttctggttgccgtgggtgaacggcgtgctggagcag

SEQ ID NO: 9214 - DNA, 75 bp, synthetic construct
  source 1..75: mol_type = other DNA
cgaggagcactacaccgacacggccggcttcaccgatcacgtctttgccctgatgcacctgctaggcttccgctt

SEQ ID NO: 9215 - DNA, 75 bp, synthetic construct
  source 1..75: mol_type = other DNA
atgaaagtaactgcaaacggtaagacatttacctttcctgatggtacgagcaccgaagatattggcaccgccatt

SEQ ID NO: 9216 - DNA, 75 bp, synthetic construct
  source 1..75: mol_type = other DNA
aaaagaggggggggcagtgagttttatttttaatgaggaaacattgtattttactgtttttggtggggattttat

SEQ ID NO: 9217 - DNA, 75 bp, synthetic construct
  source 1..75: mol_type = other DNA
gacgtcagaaagaaatcgacaccggcgagggtaaacagggagaagacaccgagtcgaaaatctccgtggtctgca

SEQ ID NO: 9218 - DNA, 75 bp, synthetic construct
  source 1..75: mol_type = other DNA
tacatggatatttgcatggcaatgattcgttgtgtggatgcgatttacatgctgaatggctggcagcggtcagcg

SEQ ID NO: 9219 - DNA, 75 bp, synthetic construct
  source 1..75: mol_type = other DNA
cagatggacccggtgtacacgccggcgcgaaaaatccacctgtaccactgcgaccatcgcggcctgccgctggcg

SEQ ID NO: 9220 - DNA, 75 bp, synthetic construct
  source 1..75: mol_type = other DNA
gccggtcgcagactggcgacattagaacaaaagtggctcaggatgcaggcacagcaggagaatatttctgggcaa

SEQ ID NO: 9221 - DNA, 75 bp, synthetic construct
  source 1..75: mol_type = other DNA
atttaggtacagttgagccggattttgaaaataatatcctgcatggaaagctggcatttattcgagatctggtga

SEQ ID NO: 9222 - DNA, 75 bp, synthetic construct
  source 1..75: mol_type = other DNA
acgaccttcgatatggacacccgataaatgcagatgagcgacaagtcatgatacctaaagaaaatggcagttggc

SEQ ID NO: 9223 - DNA, 75 bp, synthetic construct
  source 1..75: mol_type = other DNA
gcctgaagggaaagctgcacgttatcagcaagcgttacactcagcgcattgagcgacataatctgaatctgagac

SEQ ID NO: 9224 - DNA, 75 bp, synthetic construct
  source 1..75: mol_type = other DNA
tgccgggaagaaaaaaaacaccggggaagagtgggacgtcctggaattcagcagcctgactgagctgaaaaaata

SEQ ID NO: 9225 - DNA, 75 bp, synthetic construct
  source 1..75: mol_type = other DNA
attgctcgcagcgtatatttttctatttgatgagtacaatgagaagaaagcatccgcccagaaagacattctcat

SEQ ID NO: 9226 - DNA, 75 bp, synthetic construct
  source 1..75: mol_type = other DNA
cagtggatgagttaatcgaaattatgactccctacaagaacagcgataagacgttacttattgactgtgggggat

SEQ ID NO: 9227 - DNA, 75 bp, synthetic construct
  source 1..75: mol_type = other DNA
tttattgaaagtgagattgatgagtggattgaaaaaatgattgcgaaatctcgctgcgtatctgaatgcaaacat

SEQ ID NO: 9228 - DNA, 75 bp, synthetic construct
  source 1..75: mol_type = other DNA
ccgaacattcatcctcagaaagagtatttgattcgtaagaatgagaatattcgatttgctgaacaacatggtgta

SEQ ID NO: 9229 - DNA, 75 bp, synthetic construct
  source 1..75: mol_type = other DNA
ggggatgtcggaagcagattcacatgcttttattgaagatgttgaggcggcgtggatggaatactgcgatccggt

SEQ ID NO: 9230 - DNA, 75 bp, synthetic construct
  source 1..75: mol_type = other DNA
tgaaatgtggcagcgtatctggcgcgattaccggttaatggcaaaaggctgggcgcgctgctgttattcctcgct

SEQ ID NO: 9231 - DNA, 75 bp, synthetic construct
  source 1..75: mol_type = other DNA
ccctcgctgacggaatggatatttccctgtccgatcatgaaatcagaaccgtcctggcgcgcctggaggacatcc

SEQ ID NO: 9232 - DNA, 75 bp, synthetic construct
  source 1..75: mol_type = other DNA
ccactaaatctgctaattggtttagtgccgattttagtaggggacgtgactctactgttattttcggggtgcaag

SEQ ID NO: 9233 - DNA, 75 bp, synthetic construct
  source 1..75: mol_type = other DNA
cagagcttcttatccagacacgaggcaatcagaccgaagtggcaaggatgctttcctgcgcaagaggaacagtgc

SEQ ID NO: 9234 - DNA, 75 bp, synthetic construct
  source 1..75: mol_type = other DNA
atgagtacccgaaatatccacgttaacaccgcgtcgtacacgattcttgttgccgggagggaaaaaaacaccggg

SEQ ID NO: 9235 - DNA, 75 bp, synthetic construct
  source 1..75: mol_type = other DNA
aaaaagtacacatccggcgtcctgtcctttgccgaaaaggatttaccgcccgggcagcgcgaaaagctgatggcg

SEQ ID NO: 9236 - DNA, 75 bp, synthetic construct
  source 1..75: mol_type = other DNA
caatctgtgaagtttttttacgaattctggaggcaaaagtatggtgtctcgttttgctacagcttctattcatct

SEQ ID NO: 9237 - DNA, 75 bp, synthetic construct
  source 1..75: mol_type = other DNA
cgggaaatacatacagggtttcagatatggatgaatgatcgtcaagagggaggacatccgaggcattatgttata

SEQ ID NO: 9238 - DNA, 75 bp, synthetic construct
  source 1..75: mol_type = other DNA
ctctgcagtgggtttctgaattgactgatgagttgatggcgaaaattcgaagccatgaatacagtaggtcgatgg

SEQ ID NO: 9239 - DNA, 75 bp, synthetic construct
  source 1..75: mol_type = other DNA
atgaaactgatcctgcctttcccgcccagcgtgaatacgtactggcgacaccctaacaaaggggcgtttgctggt

SEQ ID NO: 9240 - DNA, 75 bp, synthetic construct
  source 1..75: mol_type = other DNA
agatcgggagttactcaaagcagattcgttcggcaatcgaagatggggtagtggagccacacgagcagacagcaa

SEQ ID NO: 9241 - DNA, 75 bp, synthetic construct
  source 1..75: mol_type = other DNA
gaaccatgattatgcagacagtactgctaatcagcttgatatcagtaattcagtgattcacggttcgattacttc

SEQ ID NO: 9242 - DNA, 75 bp, synthetic construct
  source 1..75: mol_type = other DNA
agctacggcgctggacatacgctggcggtaatcaatggaaaggactgatgactcgccgtgagattgagcgtgaag

SEQ ID NO: 9243 - DNA, 75 bp, synthetic construct
  source 1..75: mol_type = other DNA
gacgtacgctgtactcagcctgtttttttgcgatccggatatgcatccctctgatttcagtctgcttgtcccccg

SEQ ID NO: 9244 - DNA, 75 bp, synthetic construct
  source 1..75: mol_type = other DNA
cagcgagacgagttacatcaacaaactcagacgccttgctcaacgggagcctgactttattgatatacacgctca

SEQ ID NO: 9245 - DNA, 75 bp, synthetic construct
  source 1..75: mol_type = other DNA
ggactgtccgggttgtctgcagggagtggagcatttcggataatgccatgtataccgattttaactgtacctttg

SEQ ID NO: 9246 - DNA, 75 bp, synthetic construct
  source 1..75: mol_type = other DNA
ggtgtccccgggaagggatgcaggtgacggagaaaccgtcggtggtgacggtgaagtttggcgacggttatcagc

SEQ ID NO: 9247 - DNA, 75 bp, synthetic construct
  source 1..75: mol_type = other DNA
acttcgtgacagtactgcgttttatttcgccactgatggttcgtcttggcgtacctgaaaggcgattttatcaac

SEQ ID NO: 9248 - DNA, 75 bp, synthetic construct
  source 1..75: mol_type = other DNA
aggatcctcagtttgcgattgaaggtctgctcaattacgcgatggcactggataacccgacattgaacaaattga

SEQ ID NO: 9249 - DNA, 75 bp, synthetic construct
  source 1..75: mol_type = other DNA
caaccgaacgagaagcgcgtaactgttgcccgtccggctgtgttgctgtattcgctgcccgtattcgtcaggggg

SEQ ID NO: 9250 - DNA, 75 bp, synthetic construct
  source 1..75: mol_type = other DNA
ttgacggtaaaggcgtcgagatgatgcgagagtacgcgaacaagcaactggtgatgatggggctgaagaaaccag

SEQ ID NO: 9251 - DNA, 75 bp, synthetic construct
  source 1..75: mol_type = other DNA
taagccagaaagattcctcggtatcgttaagtacccagacgttgagcgcggattcccattcaaccgccacactga

SEQ ID NO: 9252 - DNA, 75 bp, synthetic construct
  source 1..75: mol_type = other DNA
acgtttatcggcgcatcaatcggttttatgggtgcagagaaagcacgcgacaaggttattgcggcctttaatcgc

SEQ ID NO: 9253 - DNA, 75 bp, synthetic construct
  source 1..75: mol_type = other DNA
gtccgcacatgccgatactgcactgataagcgatgccctgcggatggcctatgagacgcgtggtcaaccacatga

SEQ ID NO: 9254 - DNA, 75 bp, synthetic construct
  source 1..75: mol_type = other DNA
ggcatccccttctccgacccactggcggatggcccgacgattcaaaacgccacactgcgtgcttttgcggcggga

SEQ ID NO: 9255 - DNA, 75 bp, synthetic construct
  source 1..75: mol_type = other DNA
agtctgcaagttcgtatgccgatcgttgactggcgtcgcctctgtaaacaagaaccggcgttgatcgattacctg

SEQ ID NO: 9256 - DNA, 75 bp, synthetic construct
  source 1..75: mol_type = other DNA
gatccggagtcgccggagtcttttatgttacgccccaaacgtcgccgctgggttaatgaaaagtacacgcgctgg

SEQ ID NO: 9257 - DNA, 75 bp, synthetic construct
  source 1..75: mol_type = other DNA
gtggtgtaatcaccaatgacccgactcagcgtatctcgctgcaatcctggcgttttgtgctggcgaccgcgggag

SEQ ID NO: 9258 - DNA, 75 bp, synthetic construct
  source 1..75: mol_type = other DNA
atccaaattatggtggggcgtgcaggggcatcgaaagatgcgccggggtcatgtgcgaccggttacgccaaccct

SEQ ID NO: 9259 - DNA, 75 bp, synthetic construct
  source 1..75: mol_type = other DNA
taaaacctgcgaactggcgtgcaaagattttaaagatcttggcccggaagtcagtttccgccgtatttatgaata

SEQ ID NO: 9260 - DNA, 75 bp, synthetic construct
  source 1..75: mol_type = other DNA
atacagaaggttcaggttgatacaaataataacctgaacagcatgtgggctgtgaagctgcagcagatgcaggac

SEQ ID NO: 9261 - DNA, 75 bp, synthetic construct
  source 1..75: mol_type = other DNA
atgaatcaaccaatacacaatgcttactggttaacccgttttgacagcattctcgacagtgccctggcgcaacac

SEQ ID NO: 9262 - DNA, 75 bp, synthetic construct
  source 1..75: mol_type = other DNA
gtggaggccgtcggtcgggcgagcgatgatgcggaaggttatctgaatttttataaagggttgatcaataaaacg

SEQ ID NO: 9263 - DNA, 75 bp, synthetic construct
  source 1..75: mol_type = other DNA
atgggcaaaggtggcggcaaggcgcacacaccgcgcgaggcgaaggacaatctcaaatccacgcagatgatgagc

SEQ ID NO: 9264 - DNA, 75 bp, synthetic construct
  source 1..75: mol_type = other DNA
atgcgtgattttcagaatgcctttgatgctgccctcgccggggtggacagtacgatcgttgaagtgatggggctc

SEQ ID NO: 9265 - DNA, 75 bp, synthetic construct
  source 1..75: mol_type = other DNA
agccgctttccgtgccgagggcatcgaggtgctggagcacacgcaagccagccaggtcgcccatatggacggtga

SEQ ID NO: 9266 - DNA, 75 bp, synthetic construct
  source 1..75: mol_type = other DNA
agcgccgccccacagggctgaatcctcaactgaagacgtttcaggcggtgttccgggtgacggatgagtcaaccc

SEQ ID NO: 9267 - DNA, 75 bp, synthetic construct
  source 1..75: mol_type = other DNA
atcggctcgtcggtggtggcgctggagctggcgcaagcctttgcccggctgggcagcaaggtcacggccctggcg

SEQ ID NO: 9268 - DNA, 75 bp, synthetic construct
  source 1..75: mol_type = other DNA
ttactccagaaaatctcgcattagcattaaccggaaagtcagacctgccagtagagctaaagctgcgaaatgttg

SEQ ID NO: 9269 - DNA, 75 bp, synthetic construct
  source 1..75: mol_type = other DNA
aacagcgcatcagcttctggccgcagcattttggcctcattccacagtgggtcaccttggagccccgtgtcttcg

SEQ ID NO: 9270 - DNA, 75 bp, synthetic construct
  source 1..75: mol_type = other DNA
aaatgagcccggaagctgccggcattgccgcctgtctgatggcgtacagtcatcacgcctgtcgtacggagtgtt

SEQ ID NO: 9271 - DNA, 75 bp, synthetic construct
  source 1..75: mol_type = other DNA
agtttaaaactgaagcagtcaaacaggttgttgatcgcggttattctgttgccagcgttgcaacacgtctcgata

SEQ ID NO: 9272 - DNA, 75 bp, synthetic construct
  source 1..75: mol_type = other DNA
aattgcctttcctgcacaggctgaaagcggacacggtgcattttccgtgggatatgctcaggttcacccgggcgg

SEQ ID NO: 9273 - DNA, 75 bp, synthetic construct
  source 1..75: mol_type = other DNA
gtatatgatgactaaaaacgtcaagttcctggccggttttgccattctctctgtatttattgctgtgggtatggc

SEQ ID NO: 9274 - DNA, 75 bp, synthetic construct
  source 1..75: mol_type = other DNA
ggatggcgatgaaatggcgttggcgcaagcgtatggaagccgcaggcaaaccaacggataaaccaaacctggtgt

SEQ ID NO: 9275 - DNA, 75 bp, synthetic construct
  source 1..75: mol_type = other DNA
tgacctgcgactcgtgcgcggcgcacgtcaaggaagcgctggaaaaagtacccggcgtccaatctgccatagtgt

SEQ ID NO: 9276 - DNA, 75 bp, synthetic construct
  source 1..75: mol_type = other DNA
caggtgtgtcatacaccacgtcagcggtggggacgggatactggttactgcagctgctggacaaagtctctccgt

SEQ ID NO: 9277 - DNA, 75 bp, synthetic construct
  source 1..75: mol_type = other DNA
ggtttttggcctgctgacgtatctgacaaacctttatttcaagattaaagaagacaggcgtaaggttgcgagaag

SEQ ID NO: 9278 - DNA, 75 bp, synthetic construct
  source 1..75: mol_type = other DNA
aagaacgcctgaacgaactgatggcacgttacgacgcgctggaaaaccagtgtgaggaatccgacctgctggaag

SEQ ID NO: 9279 - DNA, 75 bp, synthetic construct
  source 1..75: mol_type = other DNA
gcgtgagctgactgttcaggcgaccaccggtactaactctgagtctgacctgtcttctatccaggacgaaatcaa

SEQ ID NO: 9280 - DNA, 75 bp, synthetic construct
  source 1..75: mol_type = other DNA
tgataactcattactatttactgaaagcatccagaaaattactgaaagcatccagaaaactacacagatcttacc

SEQ ID NO: 9281 - DNA, 75 bp, synthetic construct
  source 1..75: mol_type = other DNA
acctttcacgcgaacgctgccagctaatactgacccagcttgttatggcgggtctggcagactatcagtttggtt

SEQ ID NO: 9282 - DNA, 75 bp, synthetic construct
  source 1..75: mol_type = other DNA
gtggcgttcatcattgatgtatttgccggatatatcgtggggtggtgggtctcatcgtctatggaaacgacattc

SEQ ID NO: 9283 - DNA, 75 bp, synthetic construct
  source 1..75: mol_type = other DNA
tcacaaaattaattcaattggatgaattttccgggcaacacccaattcacggactgccgccactggcggaggcca

SEQ ID NO: 9284 - DNA, 75 bp, synthetic construct
  source 1..75: mol_type = other DNA
gtcacgtaaatcacgtcagggcgcaggttaaaccagtcagcaagggggtaaaccatgcagcagcaccaggtggca

SEQ ID NO: 9285 - DNA, 75 bp, synthetic construct
  source 1..75: mol_type = other DNA
aaaggtggtttttactggactacagcaaaaaaattatctgttgccatctcccgctgcattaccgcaatggatgac

SEQ ID NO: 9286 - DNA, 75 bp, synthetic construct
  source 1..75: mol_type = other DNA
ttaccttgccgaccgcgccggtatcagagggcggttcagcgacgcggattcgtaccacctggaccaggcctttcc

SEQ ID NO: 9287 - DNA, 75 bp, synthetic construct
  source 1..75: mol_type = other DNA
agtccgtgccgtaagcaaaggtaatgctggtgcgggaagtattaattcacaaattactgtcacctatacctatgc

SEQ ID NO: 9288 - DNA, 75 bp, synthetic construct
  source 1..75: mol_type = other DNA
acgccattcgtcagtaacgggctgaattccgaccgtattcccggcactgagcggcatttgatcagcctgcagtac

SEQ ID NO: 9289 - DNA, 75 bp, synthetic construct
  source 1..75: mol_type = other DNA
ctgatgcgattccttatcaggagttcgcaaaactaataggaaaatcgacaggagcggttcgtcggatgatcgata

SEQ ID NO: 9290 - DNA, 75 bp, synthetic construct
  source 1..75: mol_type = other DNA
ctgtatgccatcgggcagtactgcgaccagacggtcccggatggtttcggggggaccgagccgcggatgaccttt

SEQ ID NO: 9291 - DNA, 75 bp, synthetic construct
  source 1..75: mol_type = other DNA
atgagagaaaataaaaataatcctgaactcaaaatcagaagtacagaacgagattataaatacatttccagaatt

SEQ ID NO: 9292 - DNA, 75 bp, synthetic construct
  source 1..75: mol_type = other DNA
aaagagctgacaggtaaagccctgtttatggcgctcaggagccagcgcccacctgccgggctaatccaccactct

SEQ ID NO: 9293 - DNA, 75 bp, synthetic construct
  source 1..75: mol_type = other DNA
tgctaagggggcaaatcagtgtgcgcgggcaggggataaattaccggatttactcgatgaatatatcagagcaac

SEQ ID NO: 9294 - DNA, 75 bp, synthetic construct
  source 1..75: mol_type = other DNA
ggcatctctggcgtaacggcggcctgcagccgcccggcgaacatgaaacatcgctacttcccgtgacgttaacgc

SEQ ID NO: 9295 - DNA, 75 bp, synthetic construct
  source 1..75: mol_type = other DNA
ccagacccgcgtgcgcgacccgggccgccggggatacaccaaacacatgctgcgtctgcgccgtgacggggagat

SEQ ID NO: 9296 - DNA, 75 bp, synthetic construct
  source 1..75: mol_type = other DNA
gctgtttggcctgctgacgtatctgacaaacctttatttcaagattaaagaagataagcgtaaggcggcgcgggg

SEQ ID NO: 9297 - DNA, 75 bp, synthetic construct
  source 1..75: mol_type = other DNA
agactgagtggggacgggcgttccgcgaccgtctggcggctaatggcaagaaaggaaaggtgattctcggcgcga

SEQ ID NO: 9298 - DNA, 75 bp, synthetic construct
  source 1..75: mol_type = other DNA
ttgtctggaaactggatcgcctcgggcgaagcatgaaacatctgatttctctcgtcggggaactacgggagcgag

SEQ ID NO: 9299 - DNA, 75 bp, synthetic construct
  source 1..75: mol_type = other DNA
atgcaaattggctatattcgtgtgtcaacaaatgaccagaacacggatttacaacgcaatgcactgaactgcgca

SEQ ID NO: 9300 - DNA, 75 bp, synthetic construct
  source 1..75: mol_type = other DNA
ccaaaatatgagcgcattattgctgatgctattggtgttgcgccggaggagatctggcccagccgttacgctcgt

SEQ ID NO: 9301 - DNA, 75 bp, synthetic construct
  source 1..75: mol_type = other DNA
accgggcagcatcatacggggcaattatggccgcattaccatacatgcaactgtacatagctgattacctggctg

SEQ ID NO: 9302 - DNA, 75 bp, synthetic construct
  source 1..75: mol_type = other DNA
gtcccagaaatggacgatgccgttgaaggactggcgaatggcaatgagccgctttattatcgagttcggtgaccg

SEQ ID NO: 9303 - DNA, 75 bp, synthetic construct
  source 1..75: mol_type = other DNA
tgcatttttctggtgaaccggcacagattgctgagattaaacgactggccagcggtgcagtcacaccgttttatc

SEQ ID NO: 9304 - DNA, 75 bp, synthetic construct
  source 1..75: mol_type = other DNA
gctcgttattacgggcgacaataccacagtaaacaacactggaaaaaccatcgtcgacggcaaaggcgccaccgg

SEQ ID NO: 9305 - DNA, 75 bp, synthetic construct
  source 1..75: mol_type = other DNA
gacgtctttattgggggtgagcaggtcacctatctggatatccagccggagttcccgccatggcagagaatgatc

SEQ ID NO: 9306 - DNA, 75 bp, synthetic construct
  source 1..75: mol_type = other DNA
cgagctgcccgcccgtgccggtttgcccgccacgccggtgccgcactatgtgcccagtgccgtcgtcaacgcctt

SEQ ID NO: 9307 - DNA, 75 bp, synthetic construct
  source 1..75: mol_type = other DNA
cgttgcatcagcgatcgttctgttcgatcagatgaatcgtggtggcccggcaggaaacactctggctgtgcatta

SEQ ID NO: 9308 - DNA, 75 bp, synthetic construct
  source 1..75: mol_type = other DNA
attcaggaaattccgggggatatttttgcagcggcggcaactcatgacggtgaagttattaccatttatccggac

SEQ ID NO: 9309 - DNA, 75 bp, synthetic construct
  source 1..75: mol_type = other DNA
agtggggaaaccttattatactcactataacggtatgaagatgatttcagcaaacccgggaaatacctttgataa

SEQ ID NO: 9310 - DNA, 75 bp, synthetic construct
  source 1..75: mol_type = other DNA
tcaccggcgtgacggacggtgccgggcgtgagttccgtctggtactgaccacacaggcacagcgggcggaagagg

SEQ ID NO: 9311 - DNA, 75 bp, synthetic construct
  source 1..75: mol_type = other DNA
ccttgatccttttatggggtcagggacaacgggtgtggctgcactgaaagcagggcgaaaatttattggtataga

SEQ ID NO: 9312 - DNA, 75 bp, synthetic construct
  source 1..75: mol_type = other DNA
cagtgccggatgctcacccgtgtccggcgcacgcactccacctcacccgtggagaactccttaattaccaacctt

SEQ ID NO: 9313 - DNA, 75 bp, synthetic construct
  source 1..75: mol_type = other DNA
atgtcaaccggattacgtttcacgctggaagtggacggcctgccaccggatgcttttgcggtggtctcctttcat

SEQ ID NO: 9314 - DNA, 75 bp, synthetic construct
  source 1..75: mol_type = other DNA
cgaaacgtgaccggattgaaaattttgaatccgttaacgaagcctacgtggttgaggactaccgctgcgccgcac

SEQ ID NO: 9315 - DNA, 75 bp, synthetic construct
  source 1..75: mol_type = other DNA
ccgctgctcggtgcaaaagtacagcccggcgagacggaccttgcgctgcccgacccgctgccgttcattctctcc

SEQ ID NO: 9316 - DNA, 75 bp, synthetic construct
  source 1..75: mol_type = other DNA
ataaaaatgcgtttttccctgtggagcttaaaatcgcttatcaggaatccggcgaatggcccggtgatggaatcg

SEQ ID NO: 9317 - DNA, 75 bp, synthetic construct
  source 1..75: mol_type = other DNA
atcggccttcaggcgttgcagggacttggtagtgtcgctcaaacatatcaagctgcaaagcaacaggaagcggat

SEQ ID NO: 9318 - DNA, 75 bp, synthetic construct
  source 1..75: mol_type = other DNA
cgattaacatgggagtgtgcattctaattttggttattggatgtgcaaatgctaaagttcttaaacgatgtatat

SEQ ID NO: 9319 - DNA, 75 bp, synthetic construct
  source 1..75: mol_type = other DNA
gtggaggcatccggtgccagcctggagaaggggcggcatgaccagttgcttaccgcacttcgcgcactgctgtta

SEQ ID NO: 9320 - DNA, 75 bp, synthetic construct
  source 1..75: mol_type = other DNA
gcagaccacaactgatgaggcagcggagtttaccgggatgattcctgtttatcattttctggtcagtgccgcgat

SEQ ID NO: 9321 - DNA, 75 bp, synthetic construct
  source 1..75: mol_type = other DNA
atgattgatgtcttaggaccggagaaacgcagacggcgtactacacaggaaaagatcgctattgttcagcagagt

SEQ ID NO: 9322 - DNA, 75 bp, synthetic construct
  source 1..75: mol_type = other DNA
gttgccagtggcgatgtatacaactctggttacgggttattcccgtctgaacaggctcgtaaggactggcaaaat

SEQ ID NO: 9323 - DNA, 75 bp, synthetic construct
  source 1..75: mol_type = other DNA
aaacttgtcacgctaaacccgaagcttaaatcaacagccgcaggccggtatcagcttctttcacgctggtgggat

SEQ ID NO: 9324 - DNA, 75 bp, synthetic construct
  source 1..75: mol_type = other DNA
acgacctctaataagctgaaatccagagagatcacatttcaggaatacagaagaaaccttgctaaagcaggagtt

SEQ ID NO: 9325 - DNA, 75 bp, synthetic construct
  source 1..75: mol_type = other DNA
gtaagctatccggctgtgaccatcttgttatacatgatggtgatacctttttactgtgccggcctgaccggcggc

SEQ ID NO: 9326 - DNA, 75 bp, synthetic construct
  source 1..75: mol_type = other DNA
aagacgaaattatatggcagtaaggcgtggataaagaaggcgtatcgtgtagcgttgcaggaggttaacagtgag

SEQ ID NO: 9327 - DNA, 75 bp, synthetic construct
  source 1..75: mol_type = other DNA
ggtacccttcctggtttgccgccctacgttcgtggcccgcgtgccactatgtataccgcccaaccgtggaccatc

SEQ ID NO: 9328 - DNA, 75 bp, synthetic construct
  source 1..75: mol_type = other DNA
atcggacgcacggagaaatacggcagccggttgtttgacccgtccgtcagactggctgcggatatccgggataac

SEQ ID NO: 9329 - DNA, 75 bp, synthetic construct
  source 1..75: mol_type = other DNA
agcgcatccgtttgcgccaccttcatacattcgtagctgtcgcacaacaaggaactttggggcgcgcggctgaaa

SEQ ID NO: 9330 - DNA, 75 bp, synthetic construct
  source 1..75: mol_type = other DNA
tacacctatagcgcgctcgatcacgccgcgagctgtctggcaaactggatgttagcgaagggtattgaatcaggc

SEQ ID NO: 9331 - DNA, 75 bp, synthetic construct
  source 1..75: mol_type = other DNA
gtgggtaaagggggcggcaaggggcacacgccggtagaggcaaaggacaatcttaagtccacgcagatgatgagc

SEQ ID NO: 9332 - DNA, 75 bp, synthetic construct
  source 1..75: mol_type = other DNA
gtcattgataaactggttacaaagtgctggcaggaagaagcatatgctgaggtgcaattaagaaaagtgacgaga

SEQ ID NO: 9333 - DNA, 75 bp, synthetic construct
  source 1..75: mol_type = other DNA
gtaattgataaactagtaacaaagtgctggcaggaagaagcatatgctgaaacacaattgagaaaggtgacgaga

SEQ ID NO: 9334 - DNA, 75 bp, synthetic construct
  source 1..75: mol_type = other DNA
tcatttttaatgatgccacgacagcagcaattaaagatcagctttgtggtcagtggcgttcagtgggtatcatgt

SEQ ID NO: 9335 - DNA, 75 bp, synthetic construct
  source 1..75: mol_type = other DNA
cacactgctgcctgcggcattctcaatggcaatgctcggcgcaatcgaatctctgctctgcgccgtggtgctgga

SEQ ID NO: 9336 - DNA, 75 bp, synthetic construct
  source 1..75: mol_type = other DNA
cggcagatggaagagtccgtgggattacgcacaataaaatattgtgggattcatccactctgggggcaattctga

SEQ ID NO: 9337 - DNA, 75 bp, synthetic construct
  source 1..75: mol_type = other DNA
gtgagtgatagtgcggtaagaaagaaaagtgaggtacggcaaaagacagttgtcaggacactcagattctctcct

SEQ ID NO: 9338 - DNA, 75 bp, synthetic construct
  source 1..75: mol_type = other DNA
gaggatggcgatttttgcgtggcccgaatgaacggcgatgaatttaccttcaaacgattcattcgtgagagcggt

SEQ ID NO: 9339 - DNA, 75 bp, synthetic construct
  source 1..75: mol_type = other DNA
ggttagccgcagcagtaccatcaatgtgaagcacgtcgtctacagcgtaccttcccggcttgtaggtcaactgtt

SEQ ID NO: 9340 - DNA, 75 bp, synthetic construct
  source 1..75: mol_type = other DNA
gggagttaaaaattatctcggtaatcgctgccagtgaaaatatcagccatgccgcgactgtacttggcatcgcac

SEQ ID NO: 9341 - DNA, 75 bp, synthetic construct
  source 1..75: mol_type = other DNA
cctgtgaataaagctgatgcagatcggatagccgaagagatcgatacagcagaacacattaagaagttacgtgcc

SEQ ID NO: 9342 - DNA, 75 bp, synthetic construct
  source 1..75: mol_type = other DNA
ggaaacactattcccctgaattcaaaatggaactggtcaggctggctcttgaagaagaaggcagtattgccgcac

SEQ ID NO: 9343 - DNA, 75 bp, synthetic construct
  source 1..75: mol_type = other DNA
gtcacgataacaaagccgttgctactgagttgctgagtgtggcgcaaagcctgcgtgggtttgcttacctgtcag

SEQ ID NO: 9344 - DNA, 75 bp, synthetic construct
  source 1..75: mol_type = other DNA
aaacggagcgtaaatccagccgtaaacctgcaaaaacgcaggaaacagtcctgtcggccctgctggcgcagacgg

SEQ ID NO: 9345 - DNA, 75 bp, synthetic construct
  source 1..75: mol_type = other DNA
gattcgctgtgtgagttcaccgtaaaggaacgtaatattgagtttaaggctgttctcgcttacgaaccgaagaag

SEQ ID NO: 9346 - DNA, 75 bp, synthetic construct
  source 1..75: mol_type = other DNA
taccgcgaataccggcacgctcaataatgtcaccattaacgagaactgtgtcatcagagggaaactgtctgcaaa

SEQ ID NO: 9347 - DNA, 75 bp, synthetic construct
  source 1..75: mol_type = other DNA
atgcgtattgagatctgcatagccaaagagaaaatgactaaaatgccaaacggtgctgtggatgcgttaaaggaa

SEQ ID NO: 9348 - DNA, 75 bp, synthetic construct
  source 1..75: mol_type = other DNA
ccatgaactgaaggaagtgggcgatcagtggcgcacgccggacaacattttctggggaattaacaccctgtttgg

SEQ ID NO: 9349 - DNA, 75 bp, synthetic construct
  source 1..75: mol_type = other DNA
gtcgatggtgttaatctcgctgaactgattaacgtggtctgtgataatggccactcccttcgtgttgttgatgca

SEQ ID NO: 9350 - DNA, 75 bp, synthetic construct
  source 1..75: mol_type = other DNA
atatggttacagtgctgatgatgtgctgaaggtgacggaggccatttcgacagggctgaaaatctccggtgccag

SEQ ID NO: 9351 - DNA, 75 bp, synthetic construct
  source 1..75: mol_type = other DNA
aatccaaaaagcttgaggctcgagtaccacacgcaatagctgatgctgtagaaaatttaaaggaagatggcgaaa

SEQ ID NO: 9352 - DNA, 75 bp, synthetic construct
  source 1..75: mol_type = other DNA
aggttgcccgggaagtgaaagcgccccgtgaacggctgaagtatgcactggaggcgggtttactggtgactgcac

SEQ ID NO: 9353 - DNA, 75 bp, synthetic construct
  source 1..75: mol_type = other DNA
gtcaatatgaagtggacgtatggccgcgcggacgtaacggaaaacgtatccgcaggcgatttgagaagaaacaag

SEQ ID NO: 9354 - DNA, 75 bp, synthetic construct
  source 1..75: mol_type = other DNA
aagggattcggatagaaccccttgaaaattgcttcgtaacaagaagcatcaattcttttgattcaaaacaagaga

SEQ ID NO: 9355 - DNA, 75 bp, synthetic construct
  source 1..75: mol_type = other DNA
aaatccgtcttcatattgtttgcgatgtccctgatgaacttattgatttcacgtttgaatggaaagggctgaaga

SEQ ID NO: 9356 - DNA, 75 bp, synthetic construct
  source 1..75: mol_type = other DNA
atgagtacagaaatgaaaacggggctggtgctgtccggtggcggggcggtgggcgcttatcaggcgggagtggtt

SEQ ID NO: 9357 - DNA, 75 bp, synthetic construct
  source 1..75: mol_type = other DNA
attatggaaacctgctaaatgtcgggatgaatgcggcatcagggcaggcaacagcagggcaaaactacgccaata

SEQ ID NO: 9358 - DNA, 75 bp, synthetic construct
  source 1..75: mol_type = other DNA
ccgttactaatatagtggctgacacctttatcaaggtaatcgatgaaaagacaaagccccgcaagtgtcgttacc

SEQ ID NO: 9359 - DNA, 75 bp, synthetic construct
  source 1..75: mol_type = other DNA
cggcatttcatgaacgattaatggaactggccagaggcagtattgaaaaatccagtgaggatgaacggtattgtc

SEQ ID NO: 9360 - DNA, 75 bp, synthetic construct
  source 1..75: mol_type = other DNA
cagagcaggttattgcgtggctctttgaccacctgccaacggtgtatgcagtaggcgcggcggtcagcatttccg

SEQ ID NO: 9361 - DNA, 75 bp, synthetic construct
  source 1..75: mol_type = other DNA
cctgccgttcaccagccgctggcggaagataaatcactactgccatttttcagcgatgagcgggtgatccgtgct

SEQ ID NO: 9362 - DNA, 75 bp, synthetic construct
  source 1..75: mol_type = other DNA
gacggtataaagtggatgttagaccgcgtggccgaagtggacgtcggattcagcggatttttaagaaaaaggcag

SEQ ID NO: 9363 - DNA, 75 bp, synthetic construct
  source 1..75: mol_type = other DNA
atgcctgtaccaaatccagtaatgccggtgaaaggggccgggaccacactgtgggtttataaggggaacggtgac

SEQ ID NO: 9364 - DNA, 75 bp, synthetic construct
  source 1..75: mol_type = other DNA
gtagccaatggcaaaatttatatcggtaaaattgacactgacccggtaaatcctgaaaaccagattcaggtttat

SEQ ID NO: 9365 - DNA, 75 bp, synthetic construct
  source 1..75: mol_type = other DNA
tggcgcatgcccggcggtgtgcgcctgcggagtcgtgcggcttcgtgataagcacgccggagggggagtggtata

SEQ ID NO: 9366 - DNA, 75 bp, synthetic construct
  source 1..75: mol_type = other DNA
aagacaaagactatcacccactaattggtcgaacaggcgtggatgtaggtagagtgttctctggagatacctgga

SEQ ID NO: 9367 - DNA, 75 bp, synthetic construct
  source 1..75: mol_type = other DNA
cgtatccgctcaaataattgctacggtcaggtatcccggcgagaccaggaaagtgcactggcgtgctggggaatt

SEQ ID NO: 9368 - DNA, 75 bp, synthetic construct
  source 1..75: mol_type = other DNA
atgaacgcaaaaatcaaatacggcctgtcggctgccgttctggcgctgattgccgcaggggcttctgcgcctgaa

SEQ ID NO: 9369 - DNA, 75 bp, synthetic construct
  source 1..75: mol_type = other DNA
actgggaaatgaagtgactgcccgcctgctgaccgtgacgcgcaaaggaaaagtctgccatctgctgacgtcgat

SEQ ID NO: 9370 - DNA, 75 bp, synthetic construct
  source 1..75: mol_type = other DNA
ccgtcgacgatggcggctgtactggggcagtttatcgcgaacgccgaactggacgcgctcgatgatggtgacgtt

SEQ ID NO: 9371 - DNA, 75 bp, synthetic construct
  source 1..75: mol_type = other DNA
aagaaggtaaccacaccacggcataccgtgatggtgcgggtatctggaccatctgccgtggagccacccgggtgg

SEQ ID NO: 9372 - DNA, 75 bp, synthetic construct
  source 1..75: mol_type = other DNA
atgaacagtttaacggcaaataaccgtttgtcgcaacagctggtggtcagtgtcgctgaacacctgttgttacgg

SEQ ID NO: 9373 - DNA, 75 bp, synthetic construct
  source 1..75: mol_type = other DNA
cagccgggaagagcgtgaggcactggaagccaggcaacaggccatgatggcagagcagcaggagggcggacatgt

SEQ ID NO: 9374 - DNA, 75 bp, synthetic construct
  source 1..75: mol_type = other DNA
gcttcccgtctcgggatttcctggcgttatgatggttcacatatcacgttctattatcttgatacccggaccttc

SEQ ID NO: 9375 - DNA, 75 bp, synthetic construct
  source 1..75: mol_type = other DNA
tgggttttaaaggcgaaacccaaattaacgatcaactcactggctacggtcaatgggaatacaatattcaggcaa

SEQ ID NO: 9376 - DNA, 75 bp, synthetic construct
  source 1..75: mol_type = other DNA
cacctactccgagatgcgcttcggtgccaccggtccgaaggcctcgccacgccacgtgcaactggttgacgcgtt

SEQ ID NO: 9377 - DNA, 75 bp, synthetic construct
  source 1..75: mol_type = other DNA
aggtcatgagctgcccacgtgtcagaccagaaaaagggaagacgcgggcccgtcgtatcgacttccgacatgtga

SEQ ID NO: 9378 - DNA, 75 bp, synthetic construct
  source 1..75: mol_type = other DNA
agtatcggtaaggccgtgacggcgaaagaagtgatcacccgcacggtgaaagtcactaacgtgggtaaaccttct

SEQ ID NO: 9379 - DNA, 75 bp, synthetic construct
  source 1..75: mol_type = other DNA
tcgcttcggtcttgagtttgagaaatcggcatttggtaaatacaacgtggataacgcgatcaacgccaacttccg

SEQ ID NO: 9380 - DNA, 75 bp, synthetic construct
  source 1..75: mol_type = other DNA
tggctaacgaactggccaaaaatctcaaaacccctgaagatctcagtcagttcgatcgcctgctcaagaaaatca

SEQ ID NO: 9381 - DNA, 75 bp, synthetic construct
  source 1..75: mol_type = other DNA
tgtagtgatgaagagaaggggctggctctgcagtgggtttcagagctgactgatgagttgatggcgaaaattcgt

SEQ ID NO: 9382 - DNA, 75 bp, synthetic construct
  source 1..75: mol_type = other DNA
tgcatctctattgtgactgccgccagtgtacggaaggtgtatatccagtgccagacttcggtgagtatatcggta

SEQ ID NO: 9383 - DNA, 75 bp, synthetic construct
  source 1..75: mol_type = other DNA
ttgatgtatgtctcactggcagttatctccgggaaatatccggtgctgcccggaaaaatgaaatgtatccggggg

SEQ ID NO: 9384 - DNA, 75 bp, synthetic construct
  source 1..75: mol_type = other DNA
aaaggggaaatacaccgttattgacggatttcacagacaaatgcttgggaaaagcacaacaaaactagagaaaaa

SEQ ID NO: 9385 - DNA, 75 bp, synthetic construct
  source 1..75: mol_type = other DNA
aactggaaatagtgagaaacatcataagagagtcattatcaggtaatgcggcttttgctttactggtgtattcat

SEQ ID NO: 9386 - DNA, 75 bp, synthetic construct
  source 1..75: mol_type = other DNA
tcgaaaagctggagcagattttctttgagcagtctttcgactatcagttgcactggtatcgcgccgggcttgagc

SEQ ID NO: 9387 - DNA, 75 bp, synthetic construct
  source 1..75: mol_type = other DNA
aaataaatgtataccttaattctcttaagaaagaagatgaacgcattgatgcaattaataaaataaagattgagt

SEQ ID NO: 9388 - DNA, 75 bp, synthetic construct
  source 1..75: mol_type = other DNA
atcatacgctatcggctggttatgctcagagtaaggtacaggactttaagaatattaaaggagtgaatctgcaat

SEQ ID NO: 9389 - DNA, 75 bp, synthetic construct
  source 1..75: mol_type = other DNA
cctcagaatcagaaattgctggagaacgggtatgcgaattttctccgtattcaaaaggccaggggggaacaggcc

SEQ ID NO: 9390 - DNA, 75 bp, synthetic construct
  source 1..75: mol_type = other DNA
acgaaaatttaccccatcgtccctatcacacggatgatctcgcttttggtcttcgcatctccggcaaagggcgtg

SEQ ID NO: 9391 - DNA, 75 bp, synthetic construct
  source 1..75: mol_type = other DNA
ggtgttaactgtacaggctcctgtagctggaaaatctacgttaaaaatggtctggtgacctgggaaatccaacag

SEQ ID NO: 9392 - DNA, 75 bp, synthetic construct
  source 1..75: mol_type = other DNA
tacctcgaccccgaactcatctctcgttgccttgccgaatcaggtactgtaacgctacgcaagcgccgtcttccc

SEQ ID NO: 9393 - DNA, 75 bp, synthetic construct
  source 1..75: mol_type = other DNA
accgggacgtataccggagctgatgcgcgatcttgcaagtatgggacaacttgtgaaattaccgacaagaaggga

SEQ ID NO: 9394 - DNA, 75 bp, synthetic construct
  source 1..75: mol_type = other DNA
actggcccaagtggtaacgatggtctggaaggtgtcagctacataccatacaaagatattgttggtgtatggact

SEQ ID NO: 9395 - DNA, 75 bp, synthetic construct
  source 1..75: mol_type = other DNA
atgaaaaaggtttttgctgtttcagtggtgggcgcagcctgtgtatttgcagcaaatgcaggtgctgaggacggt

SEQ ID NO: 9396 - DNA, 75 bp, synthetic construct
  source 1..75: mol_type = other DNA
agcgtctgtgtggttgcggaaagcatgatgaccgtgaacacggggagttacttacagcacagctgcgactggggc

SEQ ID NO: 9397 - DNA, 75 bp, synthetic construct
  source 1..75: mol_type = other DNA
cgtcccgcgcttgaattaaagcgcatccctgagttgcttacaaaaatagatagctatactggtaggccgctaacc

SEQ ID NO: 9398 - DNA, 75 bp, synthetic construct
  source 1..75: mol_type = other DNA
aaaaacagcctgagtggtacgtgaaagctgtcagaaaaactatcgcagcgttgccgggtggttacgctgaagcag

SEQ ID NO: 9399 - DNA, 75 bp, synthetic construct
  source 1..75: mol_type = other DNA
attcagtgacagaacaactgaccatgacaggaataaaccggatacgccagaaaataaatgttcatggtattcctg

SEQ ID NO: 9400 - DNA, 75 bp, synthetic construct
  source 1..75: mol_type = other DNA
atgtcgccatcattacgcaaggctgttgctgctgctattggtggtggggctgttgccatagcgtctgtgctcatc

SEQ ID NO: 9401 - DNA, 75 bp, synthetic construct
  source 1..75: mol_type = other DNA
attaccaaacggtaatggcatacaaagtttctgaagtcatcgatgcaatccgcgctactggcattcgcatcaaag

SEQ ID NO: 9402 - DNA, 75 bp, synthetic construct
  source 1..75: mol_type = other DNA
ccgtggcacagcctctgctgctggcagaacaggaccgcctccgggcagaacagcgtgcggcagaagtcgtcgtac

SEQ ID NO: 9403 - DNA, 75 bp, synthetic construct
  source 1..75: mol_type = other DNA
atggtctccagagcaaatatcaggatggttaaggcgaacaaaaccacgtcaaaaaacgctgcgaatatcacctga

SEQ ID NO: 9404 - DNA, 75 bp, synthetic construct
  source 1..75: mol_type = other DNA
ctggcgtcagcgtgtgaatgaggccgcacgggcggtgatgctggcctgtgccgccggtaatgaccttgatgtgat

SEQ ID NO: 9405 - DNA, 75 bp, synthetic construct
  source 1..75: mol_type = other DNA
tggtgggaagccggaaaaaccaatcgcatccgcaacctgctgaagtctcgccagatcggcgcgaccttttacttt

SEQ ID NO: 9406 - DNA, 75 bp, synthetic construct
  source 1..75: mol_type = other DNA
caccaagttcgaatctgaagtgtacattctgtccaaagatgaaggcggtcgtcatactccgttcttcaaaggcta

SEQ ID NO: 9407 - DNA, 75 bp, synthetic construct
  source 1..75: mol_type = other DNA
ggatttttcgcttgcgcctccgtatccgtttgtgcagcttgcgaccctgaaacaacggaccgaaaaagctgccag

SEQ ID NO: 9408 - DNA, 75 bp, synthetic construct
  source 1..75: mol_type = other DNA
gccgggtgctgaggacgtactgccagcgccgctgccgccgtaccgggtgcttaccgggctggcagaccgtttcgg

SEQ ID NO: 9409 - DNA, 75 bp, synthetic construct
  source 1..75: mol_type = other DNA
atggagacatcagcacgaaataaaatgcagaatgagcctgagcaggggggggtaatacacgaaaaagtaagagtg

SEQ ID NO: 9410 - DNA, 75 bp, synthetic construct
  source 1..75: mol_type = other DNA
cgaactgccggaaggcgtagagatggtaatgccgggcgacaacatcaaaatggttgttaccctgatccacccgat

SEQ ID NO: 9411 - DNA, 75 bp, synthetic construct
  source 1..75: mol_type = other DNA
cggttatggtaatttcggtcgtctcgttgaccgtgacgttcgcaaaatttaccgttatgaccgcccggcgctaac

SEQ ID NO: 9412 - DNA, 75 bp, synthetic construct
  source 1..75: mol_type = other DNA
gcgatggtgatgatgaatcgctgaaaattaaactggacgccgtcccgtctgaagttgacaagatcatcttcgttg

SEQ ID NO: 9413 - DNA, 75 bp, synthetic construct
  source 1..75: mol_type = other DNA
cgtgcaattggcgttgagctggagactgaacgttttgagcagacggttcgggaagtacaggatttagtcagccag

SEQ ID NO: 9414 - DNA, 75 bp, synthetic construct
  source 1..75: mol_type = other DNA
gcgtattaaggtcgtgaaagctgtgatcgagcagcacatgtcccttaatcaggctgctgctcactttatgcttgc

SEQ ID NO: 9415 - DNA, 75 bp, synthetic construct
  source 1..75: mol_type = other DNA
ctgaaggtctatgaagagcgcggagaagctggtttacgcgcgctcaagattggcaccaaaagaaacattgcaata

SEQ ID NO: 9416 - DNA, 75 bp, synthetic construct
  source 1..75: mol_type = other DNA
gcagaacagcagccagattattgctgaacaggtgatccctgaaaatgagggtggttggtggatacgtgaagtggg

SEQ ID NO: 9417 - DNA, 75 bp, synthetic construct
  source 1..75: mol_type = other DNA
aggcggcactgacttaccgttatggtgatgaacatcagccggtcaccaccgctgacattctgacaccacgacgca

SEQ ID NO: 9418 - DNA, 75 bp, synthetic construct
  source 1..75: mol_type = other DNA
tgcacagcgccgtgctggcatcagcgatgctgaaattaccgctgctatggaagataaattgaagatcaacatgga

SEQ ID NO: 9419 - DNA, 75 bp, synthetic construct
  source 1..75: mol_type = other DNA
tctgaccggacctcaacagacagcatacccccctctgctgccctgagcggtatacgctgtagtaccgcgcatatc

SEQ ID NO: 9420 - DNA, 75 bp, synthetic construct
  source 1..75: mol_type = other DNA
tctcaaaacgccgtcaggttggcgcaagtgagtatgcatatattagttttttaacagtcagtcagcgtcgtactt

SEQ ID NO: 9421 - DNA, 75 bp, synthetic construct
  source 1..75: mol_type = other DNA
acgctatacgtacatccccaccatcaccgtactggaaagcctgcagcgggaaggctttcagccattcttcgcctg

SEQ ID NO: 9422 - DNA, 75 bp, synthetic construct
  source 1..75: mol_type = other DNA
aaacgtggtggacagggtcatagaaggtgcttacgaagtggtgggcgtgtttgaccggattgaggaaaagcgtga

SEQ ID NO: 9423 - DNA, 75 bp, synthetic construct
  source 1..75: mol_type = other DNA
aaggctttcagcccttctttgcctgccagacccgcgtacgtgacccgggccgccgggggtataccaaacacatgc

SEQ ID NO: 9424 - DNA, 75 bp, synthetic construct
  source 1..75: mol_type = other DNA
ttctgctcgctggtatattttcgtgcggcacatgccaggcgacaggggcagaagtgacgagtgaatctgtattta

SEQ ID NO: 9425 - DNA, 75 bp, synthetic construct
  source 1..75: mol_type = other DNA
aatatgctgaaaggcgggatttccggtcgcagtgcaaaaggaaaacgtatccatacccgggccattcacagcatc

SEQ ID NO: 9426 - DNA, 75 bp, synthetic construct
  source 1..75: mol_type = other DNA
agcagtactgcacaaactgccagaccggaggattcagtattccccggacaactcaggaggaaatatgcgaattct

SEQ ID NO: 9427 - DNA, 75 bp, synthetic construct
  source 1..75: mol_type = other DNA
tatgccggatatcgccaactgaaagcaaaaaccggtttgtcagatgataaatgccgcaatctggtgaacgcctat

SEQ ID NO: 9428 - DNA, 75 bp, synthetic construct
  source 1..75: mol_type = other DNA
tacgaggacattgcagtagttgaattgcagctctgtattagcctgacagtgacagaatgcgatattgactctgtc

SEQ ID NO: 9429 - DNA, 75 bp, synthetic construct
  source 1..75: mol_type = other DNA
atggtctccagagcaaatatcaggatggttaaggcgaacaaaaccacgtcaaaaacgctgcgaatatcacctgag

SEQ ID NO: 9430 - DNA, 75 bp, synthetic construct
  source 1..75: mol_type = other DNA
gccgcgtatattcataaagcagaacatctggaagaacgtcggcttatgctgcaatggtgggcagattttctggat

SEQ ID NO: 9431 - DNA, 75 bp, synthetic construct
  source 1..75: mol_type = other DNA
atcgtcagcgtcgtcactctcgtctggggaatatctccccggcagccttcagggaaaaatatcatcagatggctg

SEQ ID NO: 9432 - DNA, 75 bp, synthetic construct
  source 1..75: mol_type = other DNA
gagtattgtgcgaagactgggcgctgcgaagtacatcatgtcagaaagctaaaagacctgaagaaaggtcgtaag

SEQ ID NO: 9433 - DNA, 75 bp, synthetic construct
  source 1..75: mol_type = other DNA
cacaatcgaaaacacagaacgttatgctgagtttaaaagtggcaacttaagcgcgcgtgtcagcaaaggtgagtt

SEQ ID NO: 9434 - DNA, 75 bp, synthetic construct
  source 1..75: mol_type = other DNA
cagagcagatttttgaatggtggatcgaaagccgttttgcgttccgtctttttggtatcgggagaacgccggaag

SEQ ID NO: 9435 - DNA, 75 bp, synthetic construct
  source 1..75: mol_type = other DNA
atacgaagtcgacgaacgcctgattaccacaatcgacaaacaccgctcagaaaaggatgcacaccacatctatct

SEQ ID NO: 9436 - DNA, 75 bp, synthetic construct
  source 1..75: mol_type = other DNA
gcggcagggctgacgtttaaccagaccagcgagtcactgacggcgctggtgaatgccggtgtgcgtggtggtgag

SEQ ID NO: 9437 - DNA, 75 bp, synthetic construct
  source 1..75: mol_type = other DNA
actcgctgtcgcatcagagcagtaacttcggcgaatcagaatggattcattttacaggtagcggatatctgttac

SEQ ID NO: 9438 - DNA, 75 bp, synthetic construct
  source 1..75: mol_type = other DNA
catcctgtcggctgtggcacaggctgaacgccggaggatcctagaacgcacgaatgagggccgacaggaagcaaa

SEQ ID NO: 9439 - DNA, 75 bp, synthetic construct
  source 1..75: mol_type = other DNA
aaaagcggcgatggcactggggcgttgtgcgattggtgttgagctggagaccggacgttttgaacagacagtcag

SEQ ID NO: 9440 - DNA, 75 bp, synthetic construct
  source 1..75: mol_type = other DNA
ttaccagctattccttaacctgctggaagcacaggggtatgccgtcgtaccgatggaaaacgacgtgctgaaggt

SEQ ID NO: 9441 - DNA, 75 bp, synthetic construct
  source 1..75: mol_type = other DNA
ccggcagccgtgcagggtggcgtgtcacagacgtcggcagacggtgatgcggacgtgaaaatgctcatggccatg

SEQ ID NO: 9442 - DNA, 75 bp, synthetic construct
  source 1..75: mol_type = other DNA
gtcagtctgccgttatcggttttcaatccccaggactaccatccactgctgattaccgtttccggaaaaaacgtt

SEQ ID NO: 9443 - DNA, 75 bp, synthetic construct
  source 1..75: mol_type = other DNA
ccatttttgcggaagcggcgtacctgatgcgtaatgaccccaaccgcagctacagcaaactggtggacacactgc

SEQ ID NO: 9444 - DNA, 75 bp, synthetic construct
  source 1..75: mol_type = other DNA
ttggcggctcagttatgctgaccgtcccaccggcactgctgaatgcgctgtctctgggtacagataatgaagttg

SEQ ID NO: 9445 - DNA, 75 bp, synthetic construct
  source 1..75: mol_type = other DNA
gcgcagttcgagaaggcagacccggactttatggcggagcgcgaggacgttgtcagcgacgaaggacgatttaac

SEQ ID NO: 9446 - DNA, 75 bp, synthetic construct
  source 1..75: mol_type = other DNA
agaacttgctgcgcgacttgatatcagtcgtgaagaagtgctgaacgaactatgggaactgaaaaaggctggttt

SEQ ID NO: 9447 - DNA, 75 bp, synthetic construct
  source 1..75: mol_type = other DNA
taacccgactgttgaagccgaagtacatctggagggtggtttcgtcggtatggcagctgctccgtcaggtgcttc

SEQ ID NO: 9448 - DNA, 75 bp, synthetic construct
  source 1..75: mol_type = other DNA
atctgccgtggtgccattctggtggatggtaagcctgttattcctggcatgaagctgtcaaaggaaaaatgcgac

SEQ ID NO: 9449 - DNA, 75 bp, synthetic construct
  source 1..75: mol_type = other DNA
tccgctgggtagagaaagacacccctgatgcagttgaaaaaattcaggcgttgttaccagcgatcgaaaaggcaa

SEQ ID NO: 9450 - DNA, 75 bp, synthetic construct
  source 1..75: mol_type = other DNA
atgagatgccgggggctgattgccctgctgatatgggggcagagtgtggccgccgccgatcttggtacctggggc

SEQ ID NO: 9451 - DNA, 75 bp, synthetic construct
  source 1..75: mol_type = other DNA
aagcaaagcccagctgccgaatgtggatctgaaaaccatcaaccagacagtggacctgaaatccgggcagacagt

SEQ ID NO: 9452 - DNA, 75 bp, synthetic construct
  source 1..75: mol_type = other DNA
cgttctctgtcccggtcacgccacatacgttccgccattcctatgcgatgcacatgctgtatgccggtataccgc

SEQ ID NO: 9453 - DNA, 75 bp, synthetic construct
  source 1..75: mol_type = other DNA
tgttaccgttcacgcaatcggtaagacccgcagtatcgagcgtatcaacaaagcgctggcttttattgctgaacg

SEQ ID NO: 9454 - DNA, 75 bp, synthetic construct
  source 1..75: mol_type = other DNA
cgggtcttatgaccgagtgtgtgcctttgcccgacagtggaaagattccgaacagttcaaggcgcaaacctcggg

SEQ ID NO: 9455 - DNA, 75 bp, synthetic construct
  source 1..75: mol_type = other DNA
tttgtcgttccgcaatatctgttctggtggctacagcgttatattcacccatagcattggcatcaacagttgagt

SEQ ID NO: 9456 - DNA, 75 bp, synthetic construct
  source 1..75: mol_type = other DNA
tcggagacatcgcgcagcggggagacagtacgctaccgctacgatgacgcgcacagtgagttaccggcgacgaca

SEQ ID NO: 9457 - DNA, 75 bp, synthetic construct
  source 1..75: mol_type = other DNA
cgaatataacggtgggttacccccaaacgaatcggaaaatcgatactggaaaaactctaactcggtggccagttt

SEQ ID NO: 9458 - DNA, 75 bp, synthetic construct
  source 1..75: mol_type = other DNA
cagcgcactaagaccgcacgaatataatggtgggttacccccaaacgaatcggaaaatcgatactggaaaaactc

SEQ ID NO: 9459 - DNA, 75 bp, synthetic construct
  source 1..75: mol_type = other DNA
gcatccgcaacctgctgaagtctcgccagatcggcgcgaccttctattttgcccgtgaagccctgattgacgccc

SEQ ID NO: 9460 - DNA, 75 bp, synthetic construct
  source 1..75: mol_type = other DNA
caatgggcagaaattatagaggctccttcttctccactttcgcttccggtgggaatcgctcaacaggagtccgca

SEQ ID NO: 9461 - DNA, 75 bp, synthetic construct
  source 1..75: mol_type = other DNA
catagtttttgcgccgaaataccgaagactggcgttttacggagagaagcgtagggcgataggcagtattttgag

SEQ ID NO: 9462 - DNA, 75 bp, synthetic construct
  source 1..75: mol_type = other DNA
aatttcgaggttacacctcatgaactccggcctgatatttacccgaatccaaccgacggcttacctgttggattc

SEQ ID NO: 9463 - DNA, 75 bp, synthetic construct
  source 1..75: mol_type = other DNA
ctggtctggtcacccggacagcgggatatcatcaaaacggtggcactggtgctgatggttctggaccatgcaaac

SEQ ID NO: 9464 - DNA, 75 bp, synthetic construct
  source 1..75: mol_type = other DNA
agaacacacgatagaagaaatccgcgcaaaatacggtacaaccggacagcgcagggcgacagggtggcaacgcgt

SEQ ID NO: 9465 - DNA, 75 bp, synthetic construct
  source 1..75: mol_type = other DNA
cggcacaacgtgatggatttgctgggctgggtggccgtgtttgtgcttatcagcctgctggttaatgtccgcaca

SEQ ID NO: 9466 - DNA, 75 bp, synthetic construct
  source 1..75: mol_type = other DNA
gctcaggactgcgcttataaatttattgtctgtgaggataaacccggcataccccgccctgccctcgattcctgg

SEQ ID NO: 9467 - DNA, 75 bp, synthetic construct
  source 1..75: mol_type = other DNA
caagcccaacaggctatctgcacgttggcggcgcgcgtactgctctttactcctggctttttgcacgtaaccacg

SEQ ID NO: 9468 - DNA, 75 bp, synthetic construct
  source 1..75: mol_type = other DNA
aaggccgcgcagccggagcctcagccgcaaccgccggagggtgacgattacgggttttcagatgatatcccgttc

SEQ ID NO: 9469 - DNA, 75 bp, synthetic construct
  source 1..75: mol_type = other DNA
gcaattcctggaacattatccggctgctcaggactgcgcttataaatttattgtctgcgaggataaacctggcat

SEQ ID NO: 9470 - DNA, 75 bp, synthetic construct
  source 1..75: mol_type = other DNA
ttaatagaatcaggattgtggtcccgtgatgcagtggaacgtcagatgagtcatcaggagcgtaatggtgtacgt

SEQ ID NO: 9471 - DNA, 75 bp, synthetic construct
  source 1..75: mol_type = other DNA
agacactgcagcgtaaataccctgatatatcacccgtacatcttgatgctgtgaaaactgaaatcgcgaaagcat

SEQ ID NO: 9472 - DNA, 75 bp, synthetic construct
  source 1..75: mol_type = other DNA
cagaatctttctgatggtctggtcattgagcttccggtaaagcaaaaggcgcaactttcgcagatggcggacagt

SEQ ID NO: 9473 - DNA, 75 bp, synthetic construct
  source 1..75: mol_type = other DNA
ggataggtttacttcccctgtttatgctgagtcttccagtacaggcggaacttcgatgtgttgcaaatgcagttg

SEQ ID NO: 9474 - DNA, 75 bp, synthetic construct
  source 1..75: mol_type = other DNA
aacatcaccgttgatatggttattagcgcacaggaattgttgcaggaagacatggcaacattcgacggacatatc

SEQ ID NO: 9475 - DNA, 75 bp, synthetic construct
  source 1..75: mol_type = other DNA
caggagcgactgcagcagatggagcgggatatggttcgtgacctgcagaaagagaaaaccctgggcggagactga

SEQ ID NO: 9476 - DNA, 75 bp, synthetic construct
  source 1..75: mol_type = other DNA
aatgctccccgagctaccaagggcattgaaagagctgaatgcaagcagtaatcaattatctgcacttcctgaatt

SEQ ID NO: 9477 - DNA, 75 bp, synthetic construct
  source 1..75: mol_type = other DNA
atctttatgagcaggaccgcatcaccgtcaccgacagcctgaaccggcgtgaggtgctgcatacagaaggcgggg

SEQ ID NO: 9478 - DNA, 75 bp, synthetic construct
  source 1..75: mol_type = other DNA
tagtgaatttatgcaccagtgaacatctgctggttcatcatccgatgctggaaggcattctgctgtctgaatgtg

SEQ ID NO: 9479 - DNA, 75 bp, synthetic construct
  source 1..75: mol_type = other DNA
gcagcactgacggatctgatggatcagtacgtgctcctggcataccgcacaacggttgacgataaccgcaactga

SEQ ID NO: 9480 - DNA, 75 bp, synthetic construct
  source 1..75: mol_type = other DNA
tacgccgaatgagcatttgtaaaagtcaggcctggaaagatacccagcgaatactgaagcgtagtggacttgtgt

SEQ ID NO: 9481 - DNA, 75 bp, synthetic construct
  source 1..75: mol_type = other DNA
tccggcatggcggatttcagcgcggcgaaactgacggctgctgatggtacagcaattgctgctgcggatgtcaag

SEQ ID NO: 9482 - DNA, 75 bp, synthetic construct
  source 1..75: mol_type = other DNA
ccagacggaccaacgaatctttccgcatggatgagacttaagaataaagaattacctccttcagtacataactac

SEQ ID NO: 9483 - DNA, 75 bp, synthetic construct
  source 1..75: mol_type = other DNA
cggtttcgaccgttgcggcgctgcaaacggttggtgcctttctggtgatctgtctggtggtgactcccggtgcaa

SEQ ID NO: 9484 - DNA, 75 bp, synthetic construct
  source 1..75: mol_type = other DNA
gaaaacacgaacgggagctattaaataaaatatgcattctttcaatgttggcccgtttacgtccgatacaaaaag

SEQ ID NO: 9485 - DNA, 75 bp, synthetic construct
  source 1..75: mol_type = other DNA
tttaccgttcccggtgaccggattatcgccgtgaacagtctggatggtgccctgaccaataatgagcagaccgcc

SEQ ID NO: 9486 - DNA, 75 bp, synthetic construct
  source 1..75: mol_type = other DNA
ataagagtcagttgttggactattactatcagcggcgcgctgaatcgtccattaacaaaggctctcgatttttaa

SEQ ID NO: 9487 - DNA, 75 bp, synthetic construct
  source 1..75: mol_type = other DNA
tgaaagacgatcccatgtccggccatgttttcattttccggggccgcagcggcagtcaggttaaactgctgtggt

SEQ ID NO: 9488 - DNA, 75 bp, synthetic construct
  source 1..75: mol_type = other DNA
aacagcgttgttggaccgactaacccaccactgccacatcctggaaaccggcaatgaaagttaccgcttcaaaca

SEQ ID NO: 9489 - DNA, 75 bp, synthetic construct
  source 1..75: mol_type = other DNA
ccgccataaggttatcggcgataaagttgagctgccgtttgtcgagttcgccaaactctgcgggatcccctccag

SEQ ID NO: 9490 - DNA, 75 bp, synthetic construct
  source 1..75: mol_type = other DNA
cagcctactacgatactgagcgggatattgttcagttacaggctgatccccgcctgtttgaactgtaccagtttg

SEQ ID NO: 9491 - DNA, 75 bp, synthetic construct
  source 1..75: mol_type = other DNA
tggtaaaacggctgaacctgttctcccgccaggcgctggagatggccgcctctgaatgtatgagtcagcaggcag

SEQ ID NO: 9492 - DNA, 75 bp, synthetic construct
  source 1..75: mol_type = other DNA
ttgttgcccggcaacatggtgtggcagccagccagctatttctctggcgtaagcaataccaggagggaagtctta

SEQ ID NO: 9493 - DNA, 75 bp, synthetic construct
  source 1..75: mol_type = other DNA
ttgatatgccggattttgagcgtgaggatgactggtggcgcaacggtcagaacctgtacctggacaatatggagg

SEQ ID NO: 9494 - DNA, 75 bp, synthetic construct
  source 1..75: mol_type = other DNA
atggcaacaaaagaagaaaatctgaatcgtcttcgtcaactggctggcctgctggggcgcgaggcggatatgtcg

SEQ ID NO: 9495 - DNA, 75 bp, synthetic construct
  source 1..75: mol_type = other DNA
tgagccaccggagtggttcgctgaagaagatctccctctcgccacgatcatgtggcaactgacaaccaaagaact

SEQ ID NO: 9496 - DNA, 75 bp, synthetic construct
  source 1..75: mol_type = other DNA
gaaaatacaaccactatcgccccgttaacgccatacgataaatgggatggtgagaaatgggtgaccgatactgag

SEQ ID NO: 9497 - DNA, 75 bp, synthetic construct
  source 1..75: mol_type = other DNA
caggatcagaagtggtggcctgctgctgccggtattgctgcatatggaagcaaccacgctgggtttactgtttgg

SEQ ID NO: 9498 - DNA, 75 bp, synthetic construct
  source 1..75: mol_type = other DNA
gattgatactgcaatggcctccatcagtctgattcagctgaaattgcaggccggacgtaaactgacgcaggcaga

SEQ ID NO: 9499 - DNA, 75 bp, synthetic construct
  source 1..75: mol_type = other DNA
cctggttttaaccagttgcttgatcgactgaaaagaggtgatgcattgattgtcacaaaactggatcgcctcggt

SEQ ID NO: 9500 - DNA, 75 bp, synthetic construct
  source 1..75: mol_type = other DNA
gcggcactcgaaaaggccgacgcagactttatggcggagcgtgaggacattgtcagcgacgaaggaagatttgac

SEQ ID NO: 9501 - DNA, 75 bp, synthetic construct
  source 1..75: mol_type = other DNA
cgtctatttctcgttcacaagcctggaaactggaacgtgaaggaaaattcccgccacgtaaaactattggaaaga

SEQ ID NO: 9502 - DNA, 75 bp, synthetic construct
  source 1..75: mol_type = other DNA
tccgagatgagcagcacgggggcaatgctcggactcgaccccagcagccgccagcgtctgattggcctggcgggg

SEQ ID NO: 9503 - DNA, 75 bp, synthetic construct
  source 1..75: mol_type = other DNA
atatttctattatccccgattacagacaagcctggaaagtggaacataaattgtcagatattctactgttgacta

SEQ ID NO: 9504 - DNA, 75 bp, synthetic construct
  source 1..75: mol_type = other DNA
tatctgccctgaccggacgtggcggcaaattgtcacgctggaagatgtggttaatcacggctggaaacacaccga

SEQ ID NO: 9505 - DNA, 75 bp, synthetic construct
  source 1..75: mol_type = other DNA
atggaactgtggctgacggtgaacggtaaacgcacctgcgccagcgcaccgctggatccgctgacccgcgccgtg

SEQ ID NO: 9506 - DNA, 75 bp, synthetic construct
  source 1..75: mol_type = other DNA
aggagaagaagtagctgatttcagccaccgggaaaatgacatcaaaaacgctattaatctgacgttctggggaat

SEQ ID NO: 9507 - DNA, 75 bp, synthetic construct
  source 1..75: mol_type = other DNA
aagtggcgacgaaggacgatttttttaatatcaaaaaagccagcgccgctgacctgctggacgcgcaccgcatcc

SEQ ID NO: 9508 - DNA, 75 bp, synthetic construct
  source 1..75: mol_type = other DNA
gaacggataaagaaaaagatctacggaacgcgggaagaagcccgcagtgatatttttgattacatcgaaatgttt

SEQ ID NO: 9509 - DNA, 75 bp, synthetic construct
  source 1..75: mol_type = other DNA
tggcgcatgcccggcggtgtgtgcctgcggagtcgtgcggcttcgtggtgagaacgccggagggggagcggtata

SEQ ID NO: 9510 - DNA, 75 bp, synthetic construct
  source 1..75: mol_type = other DNA
gtaagggcattgaatctgtatttgatactgccatggcaattcagtggtatgcgcagagggaaactgatatcgaaa

SEQ ID NO: 9511 - DNA, 75 bp, synthetic construct
  source 1..75: mol_type = other DNA
tagaaacggccctgaatgtcggcctggcgctccttggttatttttacatcgtgttctgcagcggacggtggctgt

SEQ ID NO: 9512 - DNA, 75 bp, synthetic construct
  source 1..75: mol_type = other DNA
cgttacgggaaaagctattcacctttgaggtggatattctgcgcaacgatgtctgtgatatcagcctgaacctgc

SEQ ID NO: 9513 - DNA, 75 bp, synthetic construct
  source 1..75: mol_type = other DNA
ggcgaacgaacgtgcgaagattgcattgttctgtaatgttccggaaaaagcggttatttctctgaaagacgtcga

SEQ ID NO: 9514 - DNA, 75 bp, synthetic construct
  source 1..75: mol_type = other DNA
gtttcgtcagaagctgagcgacggctggtatcaggtacgcattgccgggcgtgatacaggtgaaacggaattatc

SEQ ID NO: 9515 - DNA, 75 bp, synthetic construct
  source 1..75: mol_type = other DNA
caatgacgatataccgccagcatcctgagtcccgaatctttcgctactgcaccggcaaataccagtggcacggta

SEQ ID NO: 9516 - DNA, 75 bp, synthetic construct
  source 1..75: mol_type = other DNA
aggaaaggtgagcacgaatctgatttttaaggagtgtcgtcaaagtgccgcgatgaagcgggtgttggctttata

SEQ ID NO: 9517 - DNA, 75 bp, synthetic construct
  source 1..75: mol_type = other DNA
gcagctgcaaactttgccacgctgacagaacgggagattgccgaagcggaacaggtgacaaccatcaacgttaaa

SEQ ID NO: 9518 - DNA, 75 bp, synthetic construct
  source 1..75: mol_type = other DNA
tttttatgggttcaggttcaacggtaaaagcggcgatggcactggggcgttgtgcgattggtgttgagctggaga

SEQ ID NO: 9519 - DNA, 75 bp, synthetic construct
  source 1..75: mol_type = other DNA
actggcaacaaatataactcattttggtatagcgctgtatcagggaaaaggaatgtcaacacctcttacattagg

SEQ ID NO: 9520 - DNA, 75 bp, synthetic construct
  source 1..75: mol_type = other DNA
gtttacttctactccacgtgatggtcacccgctgtttgcaggctttgtgaaagccgccagcgagttccagaaacg

SEQ ID NO: 9521 - DNA, 75 bp, synthetic construct
  source 1..75: mol_type = other DNA
tccggactgtgcatggcctctttccactggtggcgcaggaaagttaaccggctgccaccatgggatgatgtgtaa

SEQ ID NO: 9522 - DNA, 75 bp, synthetic construct
  source 1..75: mol_type = other DNA
cgcccttatctggtgcgtattaatcgtgtgctgcacgttgttgatattcacactcctgacccggaatcgcctgtg

SEQ ID NO: 9523 - DNA, 75 bp, synthetic construct
  source 1..75: mol_type = other DNA
tggcgtcaccgccactggtccgcatctgccttcacggggatttacaacgatttggtcgccgcatcagtctgtatg

SEQ ID NO: 9524 - DNA, 75 bp, synthetic construct
  source 1..75: mol_type = other DNA
gtgtatgagatggcccgtaaaggtgcgcaggatgagctccggctgcagttgcgtgatggcggtctgttatcgggg

SEQ ID NO: 9525 - DNA, 75 bp, synthetic construct
  source 1..75: mol_type = other DNA
aaccggtcagcaggtgccggaaattatcctgctcaattcgcatgacggttcgtccagttaccagatgttgccggg

SEQ ID NO: 9526 - DNA, 75 bp, synthetic construct
  source 1..75: mol_type = other DNA
ccatacccgggccattcacagcatcgataccgacattaagctcaaccgggcgttgtgggtgatggcagaaacgct

SEQ ID NO: 9527 - DNA, 75 bp, synthetic construct
  source 1..75: mol_type = other DNA
cggaaaatgctttttatcttgtggcactgaaatatgattatttaactgctggcacatggccgtcagacggcatca

SEQ ID NO: 9528 - DNA, 75 bp, synthetic construct
  source 1..75: mol_type = other DNA
atgccatttgctcgttatttctgcattttcataaacgttggtttgggagaagcggctaaaaggaatgtagggaca

SEQ ID NO: 9529 - DNA, 75 bp, synthetic construct
  source 1..75: mol_type = other DNA
accaaaaaaggccagccggaaaccatgatggagtttgaggctggcacaaaaagtggctttaacagcagtaaagat

SEQ ID NO: 9530 - DNA, 75 bp, synthetic construct
  source 1..75: mol_type = other DNA
tgtccttgacgtcatagccgactggccgataaaccgggtcggcgaactgctcccctggcgcgtagcactgccgac

SEQ ID NO: 9531 - DNA, 75 bp, synthetic construct
  source 1..75: mol_type = other DNA
gggaggattacggtaaggacctgtggagtgcttatcagaccatacaggagaatatgctgaaaggcgggatttccg

SEQ ID NO: 9532 - DNA, 75 bp, synthetic construct
  source 1..75: mol_type = other DNA
atgcgattagccagtcgttttggttatgctgcaaaccagatacgccgtgaccgtccgctgacacatgaagaactg

SEQ ID NO: 9533 - DNA, 75 bp, synthetic construct
  source 1..75: mol_type = other DNA
catgaacggtaagcaatggcctggtaaagcagctatcggtcgtctgaaaggtgaggaactggcacaatataattt

SEQ ID NO: 9534 - DNA, 75 bp, synthetic construct
  source 1..75: mol_type = other DNA
gtggctggattatctggacgcactggagctgatcgatacttccggtgcgccagatattgaatggcctacgcctcc

SEQ ID NO: 9535 - DNA, 75 bp, synthetic construct
  source 1..75: mol_type = other DNA
agcggaatattgcggatctcaaaacccgagacctgctagccccaatcaaagccgttgaactgtcaggacggcttg

SEQ ID NO: 9536 - DNA, 75 bp, synthetic construct
  source 1..75: mol_type = other DNA
tatgagtggctccaggggcagatgagcacgctgtcgcgccactcggatacagcgaaagcgttcacctatctgctg

SEQ ID NO: 9537 - DNA, 75 bp, synthetic construct
  source 1..75: mol_type = other DNA
ccacaccttctgtttccgtaaccactgcatcagggaataacccacctcagctggttgccactcccgtccctgatg

SEQ ID NO: 9538 - DNA, 75 bp, synthetic construct
  source 1..75: mol_type = other DNA
atggcgctgacagaacccgattttattgaacgcgatgccgacaaaatcacggcagaaatgattgcgaagtatgaa

SEQ ID NO: 9539 - DNA, 75 bp, synthetic construct
  source 1..75: mol_type = other DNA
gatggcgatatcaccctggatgccagcggcagactgactgtcaacaacagtctcgccacgggggccgtcactgca

SEQ ID NO: 9540 - DNA, 75 bp, synthetic construct
  source 1..75: mol_type = other DNA
catgcctgtcgtacagagaattatgccatgacggttcattattaccggctgcgggattatgccctgcagcatccg

SEQ ID NO: 9541 - DNA, 75 bp, synthetic construct
  source 1..75: mol_type = other DNA
tgaactgtgttactgcttccctgatgtattattggagcttacctgcactggctgagcagtcgtcaagtgagataa

SEQ ID NO: 9542 - DNA, 75 bp, synthetic construct
  source 1..75: mol_type = other DNA
acagacactgtttctcagactgacttaacgtcagtcggtcgcgatattctggccaaaacaagcgttcttgctgtt

SEQ ID NO: 9543 - DNA, 75 bp, synthetic construct
  source 1..75: mol_type = other DNA
ttgtgacaatgccggaactgtgctggtggctggttcgtaatgacctggcggatgccttaccggaaagtgcagccc

SEQ ID NO: 9544 - DNA, 75 bp, synthetic construct
  source 1..75: mol_type = other DNA
gatcagttcacggaacggctggaatcaatggcaacggataactgtgcccgctgggtgttgtctgtagtccgtcgg

SEQ ID NO: 9545 - DNA, 75 bp, synthetic construct
  source 1..75: mol_type = other DNA
cagtactgctgtgggttatgacgctatagctgaaggccaatatagctctgccatcgggtcaaaaacccatgcgat

SEQ ID NO: 9546 - DNA, 75 bp, synthetic construct
  source 1..75: mol_type = other DNA
atgaaaattatcactcgtggtgaagccatgcgtattcaccaacaacatccgacatcccgtcttttcccgttctgt

SEQ ID NO: 9547 - DNA, 75 bp, synthetic construct
  source 1..75: mol_type = other DNA
atgaaattcatggataagttaacaactggagtcgcctatggcacctcagcaggtagtgccggttactggttttta

SEQ ID NO: 9548 - DNA, 75 bp, synthetic construct
  source 1..75: mol_type = other DNA
gttacgctagagagttaccgaaggagaagcatctgactggtaagatttttactcagcacattgagcgtaacaatc

SEQ ID NO: 9549 - DNA, 75 bp, synthetic construct
  source 1..75: mol_type = other DNA
ccattccggacgaacaggcaataaaagaagagggcgcagttgctgtagccactgccattgaagccggtgatgaac

SEQ ID NO: 9550 - DNA, 75 bp, synthetic construct
  source 1..75: mol_type = other DNA
gaaacattcgatgaagagtatcaggttgaagttcaggaagatgatccggaggaaatggaaggcgctgaacatcca

SEQ ID NO: 9551 - DNA, 75 bp, synthetic construct
  source 1..75: mol_type = other DNA
cggtatccggtggcctgctgcccgtttctggccggcagactttttcccggtattttatgtctgtcatctcgctgt

SEQ ID NO: 9552 - DNA, 75 bp, synthetic construct
  source 1..75: mol_type = other DNA
tgttattccttctcgccggtcatgtccctgcggcatctgcggattctgcctgtgaggggcgttttgtaaacccga

SEQ ID NO: 9553 - DNA, 75 bp, synthetic construct
  source 1..75: mol_type = other DNA
cacgtaatgattcactggctgcccggaccgatacctggttgcagtcgttgctggtctggtcacccggacagcggg

SEQ ID NO: 9554 - DNA, 75 bp, synthetic construct
  source 1..75: mol_type = other DNA
cagccagcactgacaataccaacatcaacggcgaagacatgactgagattgaggagagcatgcttctgcctgtct

SEQ ID NO: 9555 - DNA, 75 bp, synthetic construct
  source 1..75: mol_type = other DNA
tggagccagaagaaagctgttgcccggagtgtggcggtaagctggattatctgggggaagtcagcgctgaacagc

SEQ ID NO: 9556 - DNA, 75 bp, synthetic construct
  source 1..75: mol_type = other DNA
acctgaataaacgaatgggggatctgcgtgacaccaatggcgaggccggtgcatgggcccgcatcatgagcggag

SEQ ID NO: 9557 - DNA, 75 bp, synthetic construct
  source 1..75: mol_type = other DNA
agtacaggatattcccggcgttcttgccgtgtttgcagaacgccgtaaggacagttttggctcgtatgtccggct

SEQ ID NO: 9558 - DNA, 75 bp, synthetic construct
  source 1..75: mol_type = other DNA
gtggacggcaccacggatattaaagtggcactgcgccaggccgggacgccgatcggccagaacgatacggcgatt

SEQ ID NO: 9559 - DNA, 75 bp, synthetic construct
  source 1..75: mol_type = other DNA
ctattgctgatttcaaacggcctaaattggagctcccaaacggggcaaacaaactactactgcactcttgctgtg

SEQ ID NO: 9560 - DNA, 75 bp, synthetic construct
  source 1..75: mol_type = other DNA
tggcctgtacgatgatgcgggaacgttaattgccgtggcgaacatggccgaaagttataagccagctcttgccga

SEQ ID NO: 9561 - DNA, 75 bp, synthetic construct
  source 1..75: mol_type = other DNA
atgacatcaaaacgctaaaatccgatgttagtaaactaaaaactgatcaaggaagctatgcaacaaaatcatatg

SEQ ID NO: 9562 - DNA, 75 bp, synthetic construct
  source 1..75: mol_type = other DNA
aggcagagtggctgtgaaagaaagtaatcagcgatggtgctctgacgggttcgagttccgctgtgataacggaga

SEQ ID NO: 9563 - DNA, 75 bp, synthetic construct
  source 1..75: mol_type = other DNA
gctggacatggccgccacactggctgtgccgttcaccggtgacgggcatgatgccgcgcagatcctgcggacact

SEQ ID NO: 9564 - DNA, 75 bp, synthetic construct
  source 1..75: mol_type = other DNA
ccaaaccaccgcctgaaatattggagggaggattatttaaagtaaaaatgccgattacctttaagttgaaggagt

SEQ ID NO: 9565 - DNA, 75 bp, synthetic construct
  source 1..75: mol_type = other DNA
atgccagcgcctctgtatggtgcggatgacgcgcgccgctgttccggcaattccgtatcggaggtgctggataaa

SEQ ID NO: 9566 - DNA, 75 bp, synthetic construct
  source 1..75: mol_type = other DNA
atgctttgcacatgtaggttagcctcttacgtgccgaaaggcaaggagaagcaggctatgaagcagcaaaaggcg

SEQ ID NO: 9567 - DNA, 75 bp, synthetic construct
  source 1..75: mol_type = other DNA
cgatacatcaatccttccacgcaatatattcagccagtcttacctgctgtatgtcattaatcagggggctgatgt

SEQ ID NO: 9568 - DNA, 75 bp, synthetic construct
  source 1..75: mol_type = other DNA
attttgaagagctcaacctagaaaaaaaagggaatattaccaaatattccacccgagatgcctacataaatcatt

SEQ ID NO: 9569 - DNA, 75 bp, synthetic construct
  source 1..75: mol_type = other DNA
gttccggccatgaagggagtatgacctccattcatgcaggatcagcgaaagaagctatagatgggtttattaccc

SEQ ID NO: 9570 - DNA, 75 bp, synthetic construct
  source 1..75: mol_type = other DNA
ccggggctgtcagccacgctggaatccggcgaacggtgccaggtgattgttcctccggcctgtgagcgcgatacg

SEQ ID NO: 9571 - DNA, 75 bp, synthetic construct
  source 1..75: mol_type = other DNA
ggaagccattgcgcgagccaatcggcgggtctaccgcgccctggtcgaaccactcacggactcgcatcgggccaa

SEQ ID NO: 9572 - DNA, 75 bp, synthetic construct
  source 1..75: mol_type = other DNA
ccgcgactggttgaacctttcgcgggttcttgtgctgtgatgatggcgacggattaccccagctatctggttgcg

SEQ ID NO: 9573 - DNA, 75 bp, synthetic construct
  source 1..75: mol_type = other DNA
gtatgacgacagccatccggaagccctggcccgtaatacccagaaaattttccgttggctggataaagacacccc

SEQ ID NO: 9574 - DNA, 75 bp, synthetic construct
  source 1..75: mol_type = other DNA
gaccattcttgccggtatcagcgccggcggtatgtactgtccggaatgcggcacggttcactggccggacggagt

SEQ ID NO: 9575 - DNA, 75 bp, synthetic construct
  source 1..75: mol_type = other DNA
tcagggcggcgccgccgtcagatcttgcggaaaagctgacacataaactgaaagagggctggcagccgtttggta

SEQ ID NO: 9576 - DNA, 75 bp, synthetic construct
  source 1..75: mol_type = other DNA
acaatgcacgcactgtttaacgaaccgctgcagggcgagtccgccaataccagcaatattgtggagattttttga

SEQ ID NO: 9577 - DNA, 75 bp, synthetic construct
  source 1..75: mol_type = other DNA
agcagcgcgttgaagaagaacgccaacgccatatccgtgctgcccgtgccaaaacgccgggcgtgtcccgcgtgc

SEQ ID NO: 9578 - DNA, 75 bp, synthetic construct
  source 1..75: mol_type = other DNA
taaggtcaagcgataccgctcttacagaggagaggtagggcaaaccgcccccaatgttctccaaagagatttcaa

SEQ ID NO: 9579 - DNA, 75 bp, synthetic construct
  source 1..75: mol_type = other DNA
cgccttgatcgggcacctgcggcggcagtcggtcattctgcccgccctcaacgccgtcgagcgggcgagtgccga

SEQ ID NO: 9580 - DNA, 75 bp, synthetic construct
  source 1..75: mol_type = other DNA
tcgtggtgtgtgcgatccggaagcccgttgcctcgccggtaatcccggctatcccggatctgcaggaccgttctg

SEQ ID NO: 9581 - DNA, 75 bp, synthetic construct
  source 1..75: mol_type = other DNA
ggtttggtatggattttatcgaaaccgtcagtgcgctgatgaatgcgaaacccggacgcgacctttgctggctcc

SEQ ID NO: 9582 - DNA, 75 bp, synthetic construct
  source 1..75: mol_type = other DNA
ctgtagacagggtggtgatcacttctggagtgaatccagattaaacatctcattgctgatgcttgatattgagca

SEQ ID NO: 9583 - DNA, 75 bp, synthetic construct
  source 1..75: mol_type = other DNA
tatttatccgctttattgattttcgcggtgaactgttattacgcgcatcagctattgacggagtagttccatctg

SEQ ID NO: 9584 - DNA, 75 bp, synthetic construct
  source 1..75: mol_type = other DNA
gcgtaaagccagctggcactgcagacaatgtcaccacgattattatggggagcagtactgcacacactgccagac

SEQ ID NO: 9585 - DNA, 75 bp, synthetic construct
  source 1..75: mol_type = other DNA
gtcgaccgtccggcacagtccatcacagtgataaaggttctcagtatgtatcgctggcctacacacagcggctta

SEQ ID NO: 9586 - DNA, 75 bp, synthetic construct
  source 1..75: mol_type = other DNA
atgagtaccacaacacgaaaatttaaaaccgttatcaccgatacaggtgccaaaaaattagctcaggcagccgcg

SEQ ID NO: 9587 - DNA, 75 bp, synthetic construct
  source 1..75: mol_type = other DNA
ccggggccggatggtggcgcaccgtcacacgggccggccggaaatccgttaccgttacgacagcgacgggcgggt

SEQ ID NO: 9588 - DNA, 75 bp, synthetic construct
  source 1..75: mol_type = other DNA
ataaaattgatgcagctgccgaggaaaagataaaaagcggtgctgtaatgccgcagccgaaagactccggtcaga

SEQ ID NO: 9589 - DNA, 75 bp, synthetic construct
  source 1..75: mol_type = other DNA
agcttattgcaacaaaggcaggggatgttaccgtttataactacgatggtgaaacacgggaatatatttccacgt

SEQ ID NO: 9590 - DNA, 75 bp, synthetic construct
  source 1..75: mol_type = other DNA
ctgtattttcagccctgaccctgggtgttgcgacaagtgcgtctgccgcacctgctactgtcaatggtggcactg

SEQ ID NO: 9591 - DNA, 75 bp, synthetic construct
  source 1..75: mol_type = other DNA
agtttaaaattgaagcggtaaaacaggttgttgatcgcggccattctgtttccagcgtggcaacacgtctcggta

SEQ ID NO: 9592 - DNA, 75 bp, synthetic construct
  source 1..75: mol_type = other DNA
attcaggcgcgcttcttgccgggttaggcggcatgaactccaacgctccaagagcaagtgatgcagacgccacgc

SEQ ID NO: 9593 - DNA, 75 bp, synthetic construct
  source 1..75: mol_type = other DNA
gtgagcagagtaaccgcgattatatccgctctgattatctgcatcatcgtcagcctgtcatgggcggtcaatcat

SEQ ID NO: 9594 - DNA, 75 bp, synthetic construct
  source 1..75: mol_type = other DNA
cattcttcgccatattctcgaaggtaaggaggcggtcacgccgctgatggagagagtacctggcgaactcatgga

SEQ ID NO: 9595 - DNA, 75 bp, synthetic construct
  source 1..75: mol_type = other DNA
ccttactcgccagttcgccacggataccaccgccattagccaacaggtggcctggctgttgggtctgtccgcagt

SEQ ID NO: 9596 - DNA, 75 bp, synthetic construct
  source 1..75: mol_type = other DNA
ggtattcaaggcagggttaagacgtaagatgcgaaaagcagccatggacagaaactatctggcgtcagtccttgc

SEQ ID NO: 9597 - DNA, 75 bp, synthetic construct
  source 1..75: mol_type = other DNA
catcgctggaaattggcgcggctttattgattgttatgatcatagttgcctggggtgcaggcatatggcaggact

SEQ ID NO: 9598 - DNA, 75 bp, synthetic construct
  source 1..75: mol_type = other DNA
ttttccggtcaggccggcggtgtggctggaacgcgatgatgacaccggctttcagcaggtgctggagcgtgctga

SEQ ID NO: 9599 - DNA, 75 bp, synthetic construct
  source 1..75: mol_type = other DNA
gtgagttccatgcttgagatttttttcccgctttgcgcttccgctcccatccgttggcagcgtcgtaccgccgac

SEQ ID NO: 9600 - DNA, 75 bp, synthetic construct
  source 1..75: mol_type = other DNA
ttcagcaggtgctggaacgtgctgactatctggcgaaggaacataccaaagctcacgccactggtgagcgcaatt

SEQ ID NO: 9601 - DNA, 75 bp, synthetic construct
  source 1..75: mol_type = other DNA
atgacagacattacagccaatgttgtagtgagtatgccttcgcaactcttcactatggcgcgttcttttaaagcc

SEQ ID NO: 9602 - DNA, 75 bp, synthetic construct
  source 1..75: mol_type = other DNA
tgagagcagtctggcggacagtaatgccagtgtcagagcatcaaatgaggctcagttactgggatatggtgaagg

SEQ ID NO: 9603 - DNA, 75 bp, synthetic construct
  source 1..75: mol_type = other DNA
cgtcatcacagaaagtgctgatggatatcagtcagcggacaggtaccgctttttcggataatgcggccctgtttg

SEQ ID NO: 9604 - DNA, 75 bp, synthetic construct
  source 1..75: mol_type = other DNA
gccatctcaaataaagcagtgcaactcgaaccgctggagattcgggatttgtacaaactggtgcgagacactgac

SEQ ID NO: 9605 - DNA, 75 bp, synthetic construct
  source 1..75: mol_type = other DNA
ctgacgcgaaccacgcgcagcgttgttccaactgaagcgggcgagcatcttttgtctgttcttggccctatgttg

SEQ ID NO: 9606 - DNA, 75 bp, synthetic construct
  source 1..75: mol_type = other DNA
gaaagcgacatcgtaccgggagagcagaccgccaccagcatattgaaacagcgcacaaaaaatcttgcaccgttg

SEQ ID NO: 9607 - DNA, 75 bp, synthetic construct
  source 1..75: mol_type = other DNA
tttgggaaattcctgctgaaaggatgaaaatgcgcagatcacaccttgtgcctttgtcgactcaagcgttagatt

SEQ ID NO: 9608 - DNA, 75 bp, synthetic construct
  source 1..75: mol_type = other DNA
tgaacagaaatattgctgccagaaccgcagcccagaatgcgctgaacagtacaacggcggtgggctcacgtctga

SEQ ID NO: 9609 - DNA, 75 bp, synthetic construct
  source 1..75: mol_type = other DNA
tgataacattggcggcgtcggtgcacaaacggtcaacggtattgaactcattgaggttggcggtaattctgcagg

SEQ ID NO: 9610 - DNA, 75 bp, synthetic construct
  source 1..75: mol_type = other DNA
atggaaaagcaaactactgatttactgaatgtaatcaagacaggacactctggctcaatagctggtaatcctgct

SEQ ID NO: 9611 - DNA, 75 bp, synthetic construct
  source 1..75: mol_type = other DNA
ctgggttatcgctcgccacgggaatatctgcggcagcaagccagtaatgggttaagtgataacaggtgtctggaa

SEQ ID NO: 9612 - DNA, 75 bp, synthetic construct
  source 1..75: mol_type = other DNA
tacattgacgtacagtttccgcgactatgtgctgaccttaaaatcctacgagaaaacgccgcagtttgaacgggc

SEQ ID NO: 9613 - DNA, 75 bp, synthetic construct
  source 1..75: mol_type = other DNA
accggcctcggtgtcggcgtgttccagctcgtgcgctcgttctatcccgccgcgcgcgatatccgctacacgccg

SEQ ID NO: 9614 - DNA, 75 bp, synthetic construct
  source 1..75: mol_type = other DNA
ctgacggtaaaaggcaccgtgcaactcagcagcgccactaacagcacgtcagaaacgcaggctgccacaccaaag

SEQ ID NO: 9615 - DNA, 75 bp, synthetic construct
  source 1..75: mol_type = other DNA
gataacaattcaaattctgacatcgtattttatggacataaaacaccaaagagcgttgagatatatctttctgaa

SEQ ID NO: 9616 - DNA, 75 bp, synthetic construct
  source 1..75: mol_type = other DNA
acatgcgaaaagcgaattgctaattggttggctgttgctgaatatgcgctatacatccctatgcgagaatcgttt

SEQ ID NO: 9617 - DNA, 75 bp, synthetic construct
  source 1..75: mol_type = other DNA
atgatcctgccgttcgggccgtgttccgcaatgaggcagtgatccgtcgtgctggtggcgtggaatgtcttgaaa

SEQ ID NO: 9618 - DNA, 75 bp, synthetic construct
  source 1..75: mol_type = other DNA
tctttatgatgatgaaggcgtacttattgcggtggcaaactgcccggaaacgtacaaaccgcagttgcaggaagg

SEQ ID NO: 9619 - DNA, 75 bp, synthetic construct
  source 1..75: mol_type = other DNA
accatggagggaaattacgtatctggtttgtttataaaggtgtaagagtcagggaaaatctgggggttcctgaca

SEQ ID NO: 9620 - DNA, 75 bp, synthetic construct
  source 1..75: mol_type = other DNA
gcaatacgacactgagcgtccctggtttgaacacactgacgacgggctgacggagcacggtcagcagtgccctta

SEQ ID NO: 9621 - DNA, 75 bp, synthetic construct
  source 1..75: mol_type = other DNA
atgagcaccatcctgaaatgggcgggaaataaaactgccataatgtccgaactgaaaaaacatcttcctgctggc

SEQ ID NO: 9622 - DNA, 75 bp, synthetic construct
  source 1..75: mol_type = other DNA
gctggtgactgagcgatggtatccgtcactggaaccctgccggctcatttattacagcggaagctggtatctgat

SEQ ID NO: 9623 - DNA, 75 bp, synthetic construct
  source 1..75: mol_type = other DNA
tatgcccgcctgttccactggtattgaccctggcgaaaacattccgggaaaagtggcagtatttacgggtaaggg

SEQ ID NO: 9624 - DNA, 75 bp, synthetic construct
  source 1..75: mol_type = other DNA
acgaagcaatcagaaacaacgccatagacgcaatactctcacttccgatcgacgacaagtcacctcacgaagtcc

SEQ ID NO: 9625 - DNA, 75 bp, synthetic construct
  source 1..75: mol_type = other DNA
tccatgaaaaagaaaggctttcgcgttaaaccagccagaaaagccagctccggtttaccgcttgataaccatccg

SEQ ID NO: 9626 - DNA, 75 bp, synthetic construct
  source 1..75: mol_type = other DNA
cagaaaacgcctcaacacaaagctattcaaagtccagccttacccaaaaccacaaacagttaaaactggtttgaa

SEQ ID NO: 9627 - DNA, 75 bp, synthetic construct
  source 1..75: mol_type = other DNA
aaaaatcacataaattctgggcagttgagcaacagggaaacgagttgcatatcagttggggaaaagttggcacca

SEQ ID NO: 9628 - DNA, 75 bp, synthetic construct
  source 1..75: mol_type = other DNA
cgacaataatcaaacccggtaatatgccggttcagtggttgcgttaccaggattcagaaatgacattcgccgaat

SEQ ID NO: 9629 - DNA, 75 bp, synthetic construct
  source 1..75: mol_type = other DNA
atcacaactgatgcgatgggttgccagaaagatattgcagagaagatacaaaaacagggaggtgattatttattc

SEQ ID NO: 9630 - DNA, 75 bp, synthetic construct
  source 1..75: mol_type = other DNA
atggcggtgtactgctggccgattccggtgccgctgtcagtggtacccggagcgacggaaaggcattcagtatcg

SEQ ID NO: 9631 - DNA, 75 bp, synthetic construct
  source 1..75: mol_type = other DNA
tcaccggctgtaccgggcggaagacagaacggaacgtctggcgctggttgcatgcctgctggccgtgattccggc

SEQ ID NO: 9632 - DNA, 75 bp, synthetic construct
  source 1..75: mol_type = other DNA
ccgatgatgtgcgtccgatgcttgaacagatggtgaaggaggcggtaagccatattcctgttccgcgtgatggtc

SEQ ID NO: 9633 - DNA, 75 bp, synthetic construct
  source 1..75: mol_type = other DNA
tgatgcatggttactcaccactgcgatccccgggaaaacagcattccaggtattagaagaatatcctgattcagg

SEQ ID NO: 9634 - DNA, 75 bp, synthetic construct
  source 1..75: mol_type = other DNA
atgctcaccagcgacgactggggcagctatggctgggtggtgccgaaggataagcatctgaccggcaaaatattc

SEQ ID NO: 9635 - DNA, 75 bp, synthetic construct
  source 1..75: mol_type = other DNA
ataacggtcctgcggtggcggatgagttcgacaaccccaccacggatatccgtaaggacagatgcagcaagtgca

SEQ ID NO: 9636 - DNA, 75 bp, synthetic construct
  source 1..75: mol_type = other DNA
agcggccttccgtgccgaagggatcaaggtactggaacacacgcaagccagccaggtcgcgcatgtgaacggcga

SEQ ID NO: 9637 - DNA, 75 bp, synthetic construct
  source 1..75: mol_type = other DNA
tttactgaagatgccattaacaagagaaaacaagaacgggagctattaaataaaatatgcattgtttcaatgctg

SEQ ID NO: 9638 - DNA, 75 bp, synthetic construct
  source 1..75: mol_type = other DNA
tgcgtgcaaatgaatttgtcacatcgttgccgtctctgaaagaagctgggattaaggctggtttttctgcttttg

SEQ ID NO: 9639 - DNA, 75 bp, synthetic construct
  source 1..75: mol_type = other DNA
aatacctatctggcgatgcgcgtagcatactttaatgaactggatagctatgcagaaagtttaggtctgaatact

SEQ ID NO: 9640 - DNA, 75 bp, synthetic construct
  source 1..75: mol_type = other DNA
acgtaactggaaaaaacggcaggacgcagagcgcaaagagactggaaaatacacgtctgttgttgatctcgccag

SEQ ID NO: 9641 - DNA, 75 bp, synthetic construct
  source 1..75: mol_type = other DNA
tagaagaaacgctgccctggctttcctcttttggcgctgacccagcgggtgggatgacccgtttactttattcgc

SEQ ID NO: 9642 - DNA, 75 bp, synthetic construct
  source 1..75: mol_type = other DNA
gatgcgcgatgcgcagttgtggagccacatcgaatttcaccccgaatgcaacgcgatttacgcggcacttgactg

SEQ ID NO: 9643 - DNA, 75 bp, synthetic construct
  source 1..75: mol_type = other DNA
gcgtctgaacggtgtggcagttgaagaactgtccagcaagttcactgtggagccgtctgtgcagcagacgctgga

SEQ ID NO: 9644 - DNA, 75 bp, synthetic construct
  source 1..75: mol_type = other DNA
gggccacactgcatattgaggtgtttttaccggcacaggtaccggattcagagcttgatcagtggatggaaagcc

SEQ ID NO: 9645 - DNA, 75 bp, synthetic construct
  source 1..75: mol_type = other DNA
tatgactgcgtgatgcctgtttatcagttccagcgtgattttacgctggtggatcatcgtgaaaccgtaaatcag

SEQ ID NO: 9646 - DNA, 75 bp, synthetic construct
  source 1..75: mol_type = other DNA
atgacacaagactatgaactggttgtgaaaggagtccgcaattttgagaataaagtggcggtaactgtagcctta

SEQ ID NO: 9647 - DNA, 75 bp, synthetic construct
  source 1..75: mol_type = other DNA
gaaagccacaaaagcgaaggctggaagcaatacaagccaggacaatcccgtcatcagcgcggctacggttcgaag

SEQ ID NO: 9648 - DNA, 75 bp, synthetic construct
  source 1..75: mol_type = other DNA
acgctggaagacctgatggcctccgctgacccctacacgctgattttttcccggcccagcccgctacggggcgtt

SEQ ID NO: 9649 - DNA, 75 bp, synthetic construct
  source 1..75: mol_type = other DNA
tccaacgcgaatagtccaggtttcatttctatcggtattagttggatattcagaggattagccagttcggcttca

SEQ ID NO: 9650 - DNA, 75 bp, synthetic construct
  source 1..75: mol_type = other DNA
tggtgcgaatctttctgattcatgctcgagcgccatattttcgtgctctctgttcgttttttgcgatggtgtatt

SEQ ID NO: 9651 - DNA, 75 bp, synthetic construct
  source 1..75: mol_type = other DNA
tcagggctttaagccacaggagagtatccccggctataacgcgaatccggacgagacaaaatattacggtggcgt

SEQ ID NO: 9652 - DNA, 75 bp, synthetic construct
  source 1..75: mol_type = other DNA
gcgaaacaatgagatattttcgcgctgggaccggggcgagaaaattgaatcccttcgccgccattaccggatgtc

SEQ ID NO: 9653 - DNA, 75 bp, synthetic construct
  source 1..75: mol_type = other DNA
atgcacaaaacagaacccaaaatcgtcgcgcctggctacacagatgaggaaatttatgagtggatgacaaagaag

SEQ ID NO: 9654 - DNA, 75 bp, synthetic construct
  source 1..75: mol_type = other DNA
aacactcatgcacgcggtctgcgcacctatggctgtattcaggatgcggatgcattgagtgagggtattaatgcg

SEQ ID NO: 9655 - DNA, 75 bp, synthetic construct
  source 1..75: mol_type = other DNA
cttaccgcctgctgagttacctggtcagtgcgattatcgccgggcagccgttgttaccggctgtgggggccgtca

SEQ ID NO: 9656 - DNA, 75 bp, synthetic construct
  source 1..75: mol_type = other DNA
ggtacaaacgctgttggcaagccagagtaaccccggacgcacgctgcgagcggcacgtagtgtggatgccttaca

SEQ ID NO: 9657 - DNA, 75 bp, synthetic construct
  source 1..75: mol_type = other DNA
atactattccgtgcagttcagcacattctccggtggtcatttcgcaggcttcagacgctatctgcgccatctgtt

SEQ ID NO: 9658 - DNA, 75 bp, synthetic construct
  source 1..75: mol_type = other DNA
atgacggatattactgacagacatacacttcgccgtatgtcctggtcggaactcttcacggcagcacaggaagcg

SEQ ID NO: 9659 - DNA, 75 bp, synthetic construct
  source 1..75: mol_type = other DNA
atgaatgaatatgagtttgtgcttccctggccgccgacggtgaatacctactggcgaagacggggaagccagtac

SEQ ID NO: 9660 - DNA, 75 bp, synthetic construct
  source 1..75: mol_type = other DNA
ctgaactggcggccagtgctgcccgcaatctgaacggacagggcagcgaaagcgacctcgcggcagagctggcag

SEQ ID NO: 9661 - DNA, 75 bp, synthetic construct
  source 1..75: mol_type = other DNA
ttgtcacgttcaggctctgctgacaacttcgcatggagccttggcgcgggtgtccgctatgacgtaaccccggat

SEQ ID NO: 9662 - DNA, 75 bp, synthetic construct
  source 1..75: mol_type = other DNA
tagtttcagtattaacaccatcaagtattatatcagggattgcgttgatagttctctggggatatttcagtcgtc

SEQ ID NO: 9663 - DNA, 75 bp, synthetic construct
  source 1..75: mol_type = other DNA
aaaaatatttattgtctgatggagcattgcagaaagacggtttttatatttttgataagggatttctaccctcta

SEQ ID NO: 9664 - DNA, 75 bp, synthetic construct
  source 1..75: mol_type = other DNA
gtcccctggatttgtggcgacacgacatacgcgtggaaacaagaacacggtacgcaatatgaagtggtatatggt

SEQ ID NO: 9665 - DNA, 75 bp, synthetic construct
  source 1..75: mol_type = other DNA
tccgcgcattaaacagctggcgcgccgcagcacggtaactccgggtggagagagttgtacgtataacgacatcat

SEQ ID NO: 9666 - DNA, 75 bp, synthetic construct
  source 1..75: mol_type = other DNA
cagatggacggctggcgaaacaatgcagaaaccgcgcggggaatgagtcgctcgccggagatatggccgggacga

SEQ ID NO: 9667 - DNA, 75 bp, synthetic construct
  source 1..75: mol_type = other DNA
ggcggtgataaccatcatgaccatccggagcccctgggcggtggtggtgcgagaatggcctgcggcatcattcaa

SEQ ID NO: 9668 - DNA, 75 bp, synthetic construct
  source 1..75: mol_type = other DNA
aaccccatttcagccagcataccctgaacaagtatgcatcgctgatggcgcaggggaacggctatcttgggcttc

SEQ ID NO: 9669 - DNA, 75 bp, synthetic construct
  source 1..75: mol_type = other DNA
ggggatgcagtttaactacaatggtgtccgcctgccgttaccagtcaaccttcacgtccgggatatgacgttttc

SEQ ID NO: 9670 - DNA, 75 bp, synthetic construct
  source 1..75: mol_type = other DNA
atggtgcccgtcgctggctggaaagaaactcaggtgagtgatatggatttcgacacaatcatggaaaaggcttac

SEQ ID NO: 9671 - DNA, 75 bp, synthetic construct
  source 1..75: mol_type = other DNA
gtggcgcacgttttcggtgaacgcactctggccacactggcgcgtcttctgagcctgctgtcggcctttgaggtc

SEQ ID NO: 9672 - DNA, 75 bp, synthetic construct
  source 1..75: mol_type = other DNA
aacaccaaagatattactatgcctttgataactcattactatttactgaaagcatccagaaaactacacagatct

SEQ ID NO: 9673 - DNA, 75 bp, synthetic construct
  source 1..75: mol_type = other DNA
gactggaagcccgtgtccgggaaaatatcaccctgggcgttcaggccggttatgcccacagcgtcagcggcagca

SEQ ID NO: 9674 - DNA, 75 bp, synthetic construct
  source 1..75: mol_type = other DNA
cgtgaaagccttggcccgaccgccttaggtgaagggttggctgtgccgcatggcaaaactgctgcggtaaaagaa

SEQ ID NO: 9675 - DNA, 75 bp, synthetic construct
  source 1..75: mol_type = other DNA
ggcatcccgtctttttccgttctgtaccggcaaataccgctggcacggcagcactgaagcgtataccggtcgtga

SEQ ID NO: 9676 - DNA, 75 bp, synthetic construct
  source 1..75: mol_type = other DNA
gtgactgatcttcaacaaacgtattaccgccaggtaaagaacccgaatccggtgtttacaccccgtgaaggtgca

SEQ ID NO: 9677 - DNA, 75 bp, synthetic construct
  source 1..75: mol_type = other DNA
actctgcattttggggtgttatggttatagcaggtacagtaattggtggaggtatgtttgctttacctgttgatc

SEQ ID NO: 9678 - DNA, 75 bp, synthetic construct
  source 1..75: mol_type = other DNA
ccggtcgccaaaggacgtcagccggatacgccgaatccttccatgccgatccagttttgcccgatgggcatttta

SEQ ID NO: 9679 - DNA, 75 bp, synthetic construct
  source 1..75: mol_type = other DNA
gcaaactacggagtactggataagttggcccgaggatatgcagatctgtcaaaagcggagagtcagtgggatgag

SEQ ID NO: 9680 - DNA, 75 bp, synthetic construct
  source 1..75: mol_type = other DNA
ggatgataatacagatgtcccagatctcaggcaggttatcttcaagtgcgtacccaaaaacagactggcagaatc

SEQ ID NO: 9681 - DNA, 75 bp, synthetic construct
  source 1..75: mol_type = other DNA
gcctacgatctggcgaaaagcaagtatacggcgcaggatgcaagcacaacgcaaaagggattagttcagctcagt

SEQ ID NO: 9682 - DNA, 75 bp, synthetic construct
  source 1..75: mol_type = other DNA
attgctgggaaggctgggccatactcctccggcagaagcagaaaaagcttattatgcttccatcggaaacaatga

SEQ ID NO: 9683 - DNA, 75 bp, synthetic construct
  source 1..75: mol_type = other DNA
catggaaacgacattcgtgctggatgcactggagcaggcgttatgggcccgtcgaccgtccggcacggtccatca

SEQ ID NO: 9684 - DNA, 75 bp, synthetic construct
  source 1..75: mol_type = other DNA
ttcaggaaaccagaactggttgacaggctgaatgatattattgcgaaacactatccgggagtgttaccttcataa

SEQ ID NO: 9685 - DNA, 75 bp, synthetic construct
  source 1..75: mol_type = other DNA
gacgccgctgaatgatgccctgtatcgttatgtgatgaatacccgcaagcttcacactgacgacacaccggtaaa

SEQ ID NO: 9686 - DNA, 75 bp, synthetic construct
  source 1..75: mol_type = other DNA
ggaggcgctggcttccacacgggtgatgacggacggacagtcagaaacggtgctgaccggtaatctggtgatggc

SEQ ID NO: 9687 - DNA, 75 bp, synthetic construct
  source 1..75: mol_type = other DNA
actgatagttgaacgtaccagggcggggctggctgcagctcgtgataaaggcagagtaggtggacgccgtcctaa

SEQ ID NO: 9688 - DNA, 75 bp, synthetic construct
  source 1..75: mol_type = other DNA
gaaaacggggtgaccgagtggagtccgctgttcagcgagccgcatccttcccgtgagttttgtgtccagtacggt

SEQ ID NO: 9689 - DNA, 75 bp, synthetic construct
  source 1..75: mol_type = other DNA
ccctctctgatggctgattttactggtgaactgcatagactcatttctgaatatttgcagtgcaagacagtccgg

SEQ ID NO: 9690 - DNA, 75 bp, synthetic construct
  source 1..75: mol_type = other DNA
ggcggtaaagcgtctgatgtcacccagaacacgggcggtgcactggttaccagtacagctgcaaccgtcaccggc

SEQ ID NO: 9691 - DNA, 75 bp, synthetic construct
  source 1..75: mol_type = other DNA
gtgcagagcatgtcgcgcaagggcaactgccttgataatgcggtaatggagaatttctttggtcacctgaaagaa

SEQ ID NO: 9692 - DNA, 75 bp, synthetic construct
  source 1..75: mol_type = other DNA
atggtcaactggtcgagtatcgctatgatggcacggttaaaaccgtctcaaactggcctacagacagcggattca

SEQ ID NO: 9693 - DNA, 75 bp, synthetic construct
  source 1..75: mol_type = other DNA
accgcgtactcaaaaaagacgcgctgatggtcagcttctacggctggaaccgtgtcgatcgctttatggccgcct

SEQ ID NO: 9694 - DNA, 75 bp, synthetic construct
  source 1..75: mol_type = other DNA
ttcaaaaggctggaactgattgacagaattaacgatataatagccaggtactttccttctgtgctctcagcctga

SEQ ID NO: 9695 - DNA, 75 bp, synthetic construct
  source 1..75: mol_type = other DNA
acctggccactttctgccagacctgggacgacgataatgtccataagttgatggatttatccattaacaaaaact

SEQ ID NO: 9696 - DNA, 75 bp, synthetic construct
  source 1..75: mol_type = other DNA
atgagatgccgggggctgattgccctggtgatatgggggcagagtgtggccgccgccgatcttggcacctggggt

SEQ ID NO: 9697 - DNA, 75 bp, synthetic construct
  source 1..75: mol_type = other DNA
aaactgctgggataacagcccaatggaacgcttcttcaggagtctgaagaacgaatggatgccggtggtgggtta

SEQ ID NO: 9698 - DNA, 75 bp, synthetic construct
  source 1..75: mol_type = other DNA
ctggaacgcgatgatgacaccggctttcagcaggtgctggagcgtgctgactatctggcgaaggagagtaccaaa

SEQ ID NO: 9699 - DNA, 75 bp, synthetic construct
  source 1..75: mol_type = other DNA
cggacaacaggctgaccgactcgccgatctggaaagaatgttgcacctgttcagcggtaaaccaatccccgacaa

SEQ ID NO: 9700 - DNA, 75 bp, synthetic construct
  source 1..75: mol_type = other DNA
ccgagacacacaagccgttcaccggctacctgtggggtgcgctggcggtgctcacctgtccctgtcatttgccga

SEQ ID NO: 9701 - DNA, 75 bp, synthetic construct
  source 1..75: mol_type = other DNA
caactaatgaaaacacctcgcctccggaagatactcccgacaacactccggccggaggcaataccggacaagcgg

SEQ ID NO: 9702 - DNA, 75 bp, synthetic construct
  source 1..75: mol_type = other DNA
atgaaagatttaacactcaaatttgccgacagggccgacttttcggcctttatggagagtattggctattatgat

SEQ ID NO: 9703 - DNA, 75 bp, synthetic construct
  source 1..75: mol_type = other DNA
cagaaactgatgcagtggaaacggcaattccggacaacgaaaaaaccgaatgcaaagtggaagtcgaaccatctg

SEQ ID NO: 9704 - DNA, 75 bp, synthetic construct
  source 1..75: mol_type = other DNA
ttatcgttgagctaggcttcagcgagaacgttattaagggcttgcaaagagttgaaaaggcagctttgcagtcag

SEQ ID NO: 9705 - DNA, 75 bp, synthetic construct
  source 1..75: mol_type = other DNA
aatcccggacagtggcgttctgacgcagaaagtgaaagagcagattgctgaccagctgaaacaggcaggacagta

SEQ ID NO: 9706 - DNA, 75 bp, synthetic construct
  source 1..75: mol_type = other DNA
ttggccacgctggagcgtcttctgggcctgctgtcggcctttgaggtcgtggtatggatgacggatggctggccg

SEQ ID NO: 9707 - DNA, 75 bp, synthetic construct
  source 1..75: mol_type = other DNA
agatatacacggacagagccggataccctgtggtgattactcgcagtactcagcactcagtgttctttcgacgca

SEQ ID NO: 9708 - DNA, 75 bp, synthetic construct
  source 1..75: mol_type = other DNA
atgttacagatagtcggcgcgctgattctgctgatcgcaggatttgccattcttcgccttttgttcagagcatta

SEQ ID NO: 9709 - DNA, 75 bp, synthetic construct
  source 1..75: mol_type = other DNA
cctgcaaggtggagttccgtcacggtaacatgacgctggaaaatccatcgccagagctgctcacggtgttgatcc

SEQ ID NO: 9710 - DNA, 75 bp, synthetic construct
  source 1..75: mol_type = other DNA
atacagaattttccattggtggtactgaactgctgctgtttaagcagatgggcaaatccacggtggatggcatcc

SEQ ID NO: 9711 - DNA, 75 bp, synthetic construct
  source 1..75: mol_type = other DNA
ttcgacacgccgtggtgtcagccggaaagcgacgttgttgcagaattaagccgccgtttcagctgcacgctggag

SEQ ID NO: 9712 - DNA, 75 bp, synthetic construct
  source 1..75: mol_type = other DNA
gcaggcatttaagcaggctgccgcagagctgggaactgccatcgaatggggcggggactggaaaacactgaaaga

SEQ ID NO: 9713 - DNA, 75 bp, synthetic construct
  source 1..75: mol_type = other DNA
gacaccatcaacatgattgagaaggtgaacggcgtcgaccggctggagcaacaccgccgaaatatcggcctgtga

SEQ ID NO: 9714 - DNA, 75 bp, synthetic construct
  source 1..75: mol_type = other DNA
tattgtgcgcaaaacagcgctggtacgtgagcgccgtaatgcctggcgacgcgggaaaaagcagacgttcaggga

SEQ ID NO: 9715 - DNA, 75 bp, synthetic construct
  source 1..75: mol_type = other DNA
actgaacagtgagaatgtccgcccggtggctgaccgtctgacggttcgcagcgcggaaatcatcccgtaccgcgt

SEQ ID NO: 9716 - DNA, 75 bp, synthetic construct
  source 1..75: mol_type = other DNA
caatggcaacggataactgtgcccgctgggtgttgtctgttgtgcgtcgggatctcggttttgatgacagtcacg

SEQ ID NO: 9717 - DNA, 75 bp, synthetic construct
  source 1..75: mol_type = other DNA
catgactctgctgtggaaaaccatcaaggcgggacatatcgatgtcggtctctttcgggcggccagtgaaggtgt

SEQ ID NO: 9718 - DNA, 75 bp, synthetic construct
  source 1..75: mol_type = other DNA
ggtgacgctggcggagatcagcaaccgtgatcacattctggaaccctctgccggcaccggggccatactgcgggc

SEQ ID NO: 9719 - DNA, 75 bp, synthetic construct
  source 1..75: mol_type = other DNA
gaggtcatgaaaattgctggagatgcccagctttctaccccatgcactgacagcatcataaacagcattgcaaca

SEQ ID NO: 9720 - DNA, 75 bp, synthetic construct
  source 1..75: mol_type = other DNA
aggtgcttgagattaacgacggcacccgcgtcatttccactgttgcaaccgcaatcgtcggcatggtctgtacag

SEQ ID NO: 9721 - DNA, 75 bp, synthetic construct
  source 1..75: mol_type = other DNA
tgtcgcacgaaacgccagaggcgtatacctgcatttgcgtgaaatccatcaaatctggacaagccagctttatcc

SEQ ID NO: 9722 - DNA, 75 bp, synthetic construct
  source 1..75: mol_type = other DNA
cgcttgtgcgcaaggatggtttccgcttctggggttcccgctgtctgagcgatgatccgctttttgccttcgaaa

SEQ ID NO: 9723 - DNA, 75 bp, synthetic construct
  source 1..75: mol_type = other DNA
atgaaaaaattaacctgctttaaagcctatgatattcgcgggaaattaggcgaagaactgaatgaagatattgcc

SEQ ID NO: 9724 - DNA, 75 bp, synthetic construct
  source 1..75: mol_type = other DNA
tgcaggaacttaaccgctggtttcgtgacggaagaggactttatgttcatgttattcgttgggagccagaaacac

SEQ ID NO: 9725 - DNA, 75 bp, synthetic construct
  source 1..75: mol_type = other DNA
gacgctgcgatactttgttgcataaatcaaaggctgtacccggaaacaacccgtgtggttccggtcagcgagtct

SEQ ID NO: 9726 - DNA, 75 bp, synthetic construct
  source 1..75: mol_type = other DNA
tgaaaaatacgcactggtgcgtaccgaccagccggaattcagtgcctgtacccgttctcagttaataaacagtat

SEQ ID NO: 9727 - DNA, 75 bp, synthetic construct
  source 1..75: mol_type = other DNA
cagcatattgaggcaggcatttcactgtgtgatgcagttaattttctcgtggaaaaatacgcgctggtgcgtacc

SEQ ID NO: 9728 - DNA, 75 bp, synthetic construct
  source 1..75: mol_type = other DNA
ggggatgtggagaaggccagtcgcgtatttgtacgtaatgaattaacgcccttgcaaaaaaggctacaagagctg

SEQ ID NO: 9729 - DNA, 75 bp, synthetic construct
  source 1..75: mol_type = other DNA
ataccccgcgcgaagcgaaagataacctgaaatccacgcagctgctgagtgtgattgatgccatcagcgaagggc

SEQ ID NO: 9730 - DNA, 75 bp, synthetic construct
  source 1..75: mol_type = other DNA
atgactgtcagaaaacagccaaacggtaaatggttgtgcgagtgctatcccaatggacgcaatggcaagcgcgtg

SEQ ID NO: 9731 - DNA, 75 bp, synthetic construct
  source 1..75: mol_type = other DNA
gcgttctccgccacgccgctgggcaacctgattaataaaagcctggacgcacaggaaaaacaggacaaaaccatc

SEQ ID NO: 9732 - DNA, 75 bp, synthetic construct
  source 1..75: mol_type = other DNA
aagacaccgttggtactcgtctgaccaactctcgtcatggcctggctgataacggcggcgcatgggtaagctact

SEQ ID NO: 9733 - DNA, 75 bp, synthetic construct
  source 1..75: mol_type = other DNA
ttgtggatgatgaagataatgttcgccgtatgctgagcaccgcttttgcactacaaggattcgaaacacattgtg

SEQ ID NO: 9734 - DNA, 75 bp, synthetic construct
  source 1..75: mol_type = other DNA
ggggcacagtcagggggatgcacagaaactggtagctgaccgtttcaatactgcagggtatctgtttcacggaca

SEQ ID NO: 9735 - DNA, 75 bp, synthetic construct
  source 1..75: mol_type = other DNA
attggagctcccaaacggggcaaacaaactactactgcactcttgctgtgctccatgttccggtgaagtgatgga

SEQ ID NO: 9736 - DNA, 75 bp, synthetic construct
  source 1..75: mol_type = other DNA
atattgagtcctcatcttatatcaaaaataatgatggcagtgagataatgaagtttgttatgaataatcctgaag

SEQ ID NO: 9737 - DNA, 75 bp, synthetic construct
  source 1..75: mol_type = other DNA
tccagtgccaaccaggttaatctgaagtttgaagaagctaaacctcatctggaagaccagctggcaaaatcaatc

SEQ ID NO: 9738 - DNA, 75 bp, synthetic construct
  source 1..75: mol_type = other DNA
aagcgtatgcggcagagcgtctggcgaaaattcgccgtcagaaccggataaaggcagaacttcaggccgtactta

SEQ ID NO: 9739 - DNA, 75 bp, synthetic construct
  source 1..75: mol_type = other DNA
tgcatcccgtctttttccgttctgtaccggtaagtaccgctggcacggcagcgctgaagcgtataccggtcgtga

SEQ ID NO: 9740 - DNA, 75 bp, synthetic construct
  source 1..75: mol_type = other DNA
ctggctggggatgcgggagaccgcggcaaaaagttttgtcgatgaggtggaggcggcctggtcagaatacgcaga

SEQ ID NO: 9741 - DNA, 75 bp, synthetic construct
  source 1..75: mol_type = other DNA
tggcgcgtgcgcgttcgcagcggcgaactggaaacaggctggttgcgctggaacaccacgcgcgcgggagccttc

SEQ ID NO: 9742 - DNA, 75 bp, synthetic construct
  source 1..75: mol_type = other DNA
ttgaactggctgaggctctgctgaaacaacgtgaacaggacagcgatcgttacagtgggcgggaagacgatcctc

SEQ ID NO: 9743 - DNA, 75 bp, synthetic construct
  source 1..75: mol_type = other DNA
agataaggctgataattttatttttattggcagcactgtcatttattggtctttttttcatcattaactatcaac

SEQ ID NO: 9744 - DNA, 75 bp, synthetic construct
  source 1..75: mol_type = other DNA
tgatgaccgtgaacacggggagttacttacagcacaactgcgtctggggccggcagacatcctggagtcagatga

SEQ ID NO: 9745 - DNA, 75 bp, synthetic construct
  source 1..75: mol_type = other DNA
tcctgaccttatctggtcattaccagacggagaaatacgccgctatgacaggcaattgaacataatttgtagtga

SEQ ID NO: 9746 - DNA, 75 bp, synthetic construct
  source 1..75: mol_type = other DNA
cccgtaaaccgcacaccgcttcgttatcttcccctgacagtccccgccctctatcagctccttccttccccgaca

SEQ ID NO: 9747 - DNA, 75 bp, synthetic construct
  source 1..75: mol_type = other DNA
ctgtttgatgcccactggcatgcctttcaaatcttcggtggcattcccaagcgcggcatctacgacaacatgaag

SEQ ID NO: 9748 - DNA, 75 bp, synthetic construct
  source 1..75: mol_type = other DNA
agtgatgagcggctaaaactggagattaaggtggcacatatccgcactcgcgaaacatatggaacccggcggctc

SEQ ID NO: 9749 - DNA, 75 bp, synthetic construct
  source 1..75: mol_type = other DNA
gcagccgcccggcgaacatgaaacatcgctacttcccgtgacgttaactccggagccggataataaaatcccggc

SEQ ID NO: 9750 - DNA, 75 bp, synthetic construct
  source 1..75: mol_type = other DNA
gtttactttcctgaaatccccagcaattttaggccagtttttacccaagacttcgcctctaacataaattatagt

SEQ ID NO: 9751 - DNA, 75 bp, synthetic construct
  source 1..75: mol_type = other DNA
ggcaacctgctgaatgaagagaacccgcatcagctgcagcagcttatccgcctgccggggcagcagtatgatgag

SEQ ID NO: 9752 - DNA, 75 bp, synthetic construct
  source 1..75: mol_type = other DNA
ttaaacatcctgattaccagatggtttttgaatggcggatggaacgcctacagcgcattcgccagaatcctgaaa

SEQ ID NO: 9753 - DNA, 75 bp, synthetic construct
  source 1..75: mol_type = other DNA
agcaacaacaaaattctttcaagtggctggcggtattactggaagaaaaatatgctggtgaaattaccatttcgg

SEQ ID NO: 9754 - DNA, 75 bp, synthetic construct
  source 1..75: mol_type = other DNA
tgcgttttcatgttgcctgcccgcactgcggggaggagcagtaccttaaatttggcgataaagagacgccgtttg

SEQ ID NO: 9755 - DNA, 75 bp, synthetic construct
  source 1..75: mol_type = other DNA
ccgggccatgcctccggataaccgtgacaacctgcccctgctgtatcagaccgaaacattcctgaagacactgag

SEQ ID NO: 9756 - DNA, 75 bp, synthetic construct
  source 1..75: mol_type = other DNA
cattgaccagggcaatccggagtctgtatgacgtggctttttacgctgatgatctggatgcacttaacgaacttt

SEQ ID NO: 9757 - DNA, 75 bp, synthetic construct
  source 1..75: mol_type = other DNA
cgctgaatatgctctatatcgacccacagaacagcagccagattattgctgaacaggtgatccctgaaaacgagg

SEQ ID NO: 9758 - DNA, 75 bp, synthetic construct
  source 1..75: mol_type = other DNA
atgctcaaacccgacagcctgcgcagggcgctgactgatgccgtcacggtgctgaaaaccagtcccgagatgctg

SEQ ID NO: 9759 - DNA, 75 bp, synthetic construct
  source 1..75: mol_type = other DNA
aagcactgaaaaaagcctcttcacatgtggtggcagctcgccttggaatcagtcgtgaagaggctgtcaacgagc

SEQ ID NO: 9760 - DNA, 75 bp, synthetic construct
  source 1..75: mol_type = other DNA
atgagtcggcgtggaaactgctgggataacagcccaatggagcgcttcttcaggagtctgaagaacgaatgggtg

SEQ ID NO: 9761 - DNA, 75 bp, synthetic construct
  source 1..75: mol_type = other DNA
aagaagtgaaactccattgccgcatcgatggcgacgaggaagaccagttaatcagcggatacattgccgcatcgc

SEQ ID NO: 9762 - DNA, 75 bp, synthetic construct
  source 1..75: mol_type = other DNA
actgggaaaaacagttcttaccacacctgccggacgtgaggggctggctccccgaattatattcggaaaaggtat

SEQ ID NO: 9763 - DNA, 75 bp, synthetic construct
  source 1..75: mol_type = other DNA
gtcattgataaactggttacaaagtgctggcaggaagaagcgtatgctgagacacaattgaggaaagtgacgaga

SEQ ID NO: 9764 - DNA, 75 bp, synthetic construct
  source 1..75: mol_type = other DNA
tccgggtgctgtatctgaacaaccagaatcagttgattgccggtgaaaccctcttcaccggcaccatcaaccgca

SEQ ID NO: 9765 - DNA, 75 bp, synthetic construct
  source 1..75: mol_type = other DNA
atgaaaacattacctgtattacccgggcaggcggccagttctcgcccgtctcctgttgaaatctggcagacactg

SEQ ID NO: 9766 - DNA, 75 bp, synthetic construct
  source 1..75: mol_type = other DNA
atagcaaggctgatcaaaaatggctatagcaggaaacagttggcaattatttacgatatcggtatatcgacgatt

SEQ ID NO: 9767 - DNA, 75 bp, synthetic construct
  source 1..75: mol_type = other DNA
atgaaacgaacgcctgtcctgattgatgtgaacggtgttccgcttcgggagagcctcagctacaacgggggcggt

SEQ ID NO: 9768 - DNA, 75 bp, synthetic construct
  source 1..75: mol_type = other DNA
gggccctggctgaaatggagcgcgaactgatagttgaacgtaccagggcggggcttgctgcagctcgcgccaaag

SEQ ID NO: 9769 - DNA, 75 bp, synthetic construct
  source 1..75: mol_type = other DNA
tcaggtattttaaccgacttcacctttcatgatctgaaggcgaaaggaatttcagactatgaaggaagcagccgg

SEQ ID NO: 9770 - DNA, 75 bp, synthetic construct
  source 1..75: mol_type = other DNA
ctgtcccgactgctggaccagcactacggcctcacactgaatgacacaccgtttgccgatgaacgtgtgattgag

SEQ ID NO: 9771 - DNA, 75 bp, synthetic construct
  source 1..75: mol_type = other DNA
accggactgcaactggacgaagaaaggaagcaagtgatgaaaattatgcagaaagtgtgggaagacgacagctgg

SEQ ID NO: 9772 - DNA, 75 bp, synthetic construct
  source 1..75: mol_type = other DNA
aagaaaaaatcactaaaatgccaaacggtgctgtggatgcgttaaaggaagaattaacccgacgcatcagtaaac

SEQ ID NO: 9773 - DNA, 75 bp, synthetic construct
  source 1..75: mol_type = other DNA
ctgcggcgacgaaacagatccagcttaaaagtcaaactacagccgaagcattcagcttcggcgatcccgttcctg

SEQ ID NO: 9774 - DNA, 75 bp, synthetic construct
  source 1..75: mol_type = other DNA
tttccagtccggtactgactgcacaggaaatcgcagagatggacccggcagatctcaccgctatgtcggttgagg

SEQ ID NO: 9775 - DNA, 75 bp, synthetic construct
  source 1..75: mol_type = other DNA
aaacggagcgtaaatccagccgtaaaccgtcaaaagtgcaggagactgccctgtctgccctgctggcgcagacgg

SEQ ID NO: 9776 - DNA, 75 bp, synthetic construct
  source 1..75: mol_type = other DNA
gagcggtaaaggttcgcaacaatccgttgaacaggcgtatgccgaagcggggcaaccgcagcataaagtgacgga

SEQ ID NO: 9777 - DNA, 75 bp, synthetic construct
  source 1..75: mol_type = other DNA
aagcggttggctcgtaaaacaatctgcttctcacgctcagttgagatccacgaaaaagtgatcggagcgtttatc

SEQ ID NO: 9778 - DNA, 75 bp, synthetic construct
  source 1..75: mol_type = other DNA
agggtgacatgacccgcaagggactggatattgtgcagggttcagcaggggtgctgataggtgcgccaaccggtg

SEQ ID NO: 9779 - DNA, 75 bp, synthetic construct
  source 1..75: mol_type = other DNA
tcgatgcgctggcagaagaccgcatcaccacagagcactgtcaggcgctggcgctggagaacgacaccgcgcgtc

SEQ ID NO: 9780 - DNA, 75 bp, synthetic construct
  source 1..75: mol_type = other DNA
atgctgaaacagcaggatatgacagaaaccgccagagttgtgtttgatgaattaagcgtcaccgaaccggcgaca

SEQ ID NO: 9781 - DNA, 75 bp, synthetic construct
  source 1..75: mol_type = other DNA
gccgccagtggtgatgtttacaattccggttacggagtattcccgtctgagcaggcgcgcaaggactggcaaaac

SEQ ID NO: 9782 - DNA, 75 bp, synthetic construct
  source 1..75: mol_type = other DNA
tccggaccttatctggtcattaccagacggagaaatacgccgctacgacaggcgcctgaatataatctgtcgcga

SEQ ID NO: 9783 - DNA, 75 bp, synthetic construct
  source 1..75: mol_type = other DNA
gataaccgtatcgcccgtgacgcgcactatctttaccggtatgaccgtcacggcaggctgacagagaaaaccgac

SEQ ID NO: 9784 - DNA, 75 bp, synthetic construct
  source 1..75: mol_type = other DNA
cttgtccgatatatgcaatgccaccgctggcgagaaatgcaataattgaaactcaaaagaatacacagacaccta

SEQ ID NO: 9785 - DNA, 75 bp, synthetic construct
  source 1..75: mol_type = other DNA
tacggtcgtaatgtcacgaagatggatgcctttggttgtaccagtcgggggcaggcacaccgagccgggctgtgg

SEQ ID NO: 9786 - DNA, 75 bp, synthetic construct
  source 1..75: mol_type = other DNA
tttgacggtgacaggcgaggtatcggtgattgtctggatgaggctgagcaagagcttatcgttaccattaacaaa

SEQ ID NO: 9787 - DNA, 75 bp, synthetic construct
  source 1..75: mol_type = other DNA
tttcagaaaggttgatacgtgaggctgatacacgagaatatgaactatggcgtccggtccgtcgctttttctcca

SEQ ID NO: 9788 - DNA, 75 bp, synthetic construct
  source 1..75: mol_type = other DNA
ttttacctggggttagttttttgtctgacattcctcaagaaaccttgtctgagatacgtaatcagactattcgtg

SEQ ID NO: 9789 - DNA, 75 bp, synthetic construct
  source 1..75: mol_type = other DNA
gggcgtccggccatgctgcatattttcgagccggtggaggacgggcagacccgtggggctaatcagttttacagc

SEQ ID NO: 9790 - DNA, 75 bp, synthetic construct
  source 1..75: mol_type = other DNA
caacgggcaacagattcatgcattctgtacttccttttaccgacaggtgcacgaacgtattactgagcgtaatca

SEQ ID NO: 9791 - DNA, 75 bp, synthetic construct
  source 1..75: mol_type = other DNA
ctcccgttttgatttcgccattcatgtggcgcatgcccgttcccgtggtttgcgtcggcgcatgccaccggtgct

SEQ ID NO: 9792 - DNA, 75 bp, synthetic construct
  source 1..75: mol_type = other DNA
ggatacagcggaaagcgggccagtgaatccgcacaggcacttgatgaagtggaaagactggccgcgatgatcccg

SEQ ID NO: 9793 - DNA, 75 bp, synthetic construct
  source 1..75: mol_type = other DNA
aatctgcccgttatctggggaccggcagtcagtggactgtccaggggagccggattaagccggggacggatttct

SEQ ID NO: 9794 - DNA, 75 bp, synthetic construct
  source 1..75: mol_type = other DNA
gggcgctgactgatgccgtcacggtgctgaaaactaaccccgatatgctgcggatattcgtggataacgggagta

SEQ ID NO: 9795 - DNA, 75 bp, synthetic construct
  source 1..75: mol_type = other DNA
gtgcagagtggtttactggactataaccccgcgcaggagatggttggcgctgttgcttcaagtaacagacagcat

SEQ ID NO: 9796 - DNA, 75 bp, synthetic construct
  source 1..75: mol_type = other DNA
acaactggatatcatcaacaccgcgttcagggtaatcgaaacggttcgcccaaaacgggcctgcagccggtgcga

SEQ ID NO: 9797 - DNA, 75 bp, synthetic construct
  source 1..75: mol_type = other DNA
gcgtgcagcaattgctcgtattgagtggatttttgaaacatttccatcagtttgtctctctttttccggtggtaa

SEQ ID NO: 9798 - DNA, 75 bp, synthetic construct
  source 1..75: mol_type = other DNA
ccgctaaaaattacccatatggcggtgggcgatggcggcggagtattgccaacgccggacgcaaagcagacggca

SEQ ID NO: 9799 - DNA, 75 bp, synthetic construct
  source 1..75: mol_type = other DNA
ttctcgccattgtgctggccggcacgacggccggcgcgttcatcggcgagcactggggtattgcagccctcacgc

SEQ ID NO: 9800 - DNA, 75 bp, synthetic construct
  source 1..75: mol_type = other DNA
cgcacctactgcggcacagtcggtcaacaatacacagattgccaccacggcatttgtgaaatcggcgattgcggc

SEQ ID NO: 9801 - DNA, 75 bp, synthetic construct
  source 1..75: mol_type = other DNA
actgatgttgcttatgatgcctacctggttggctggtatggcactggagtgcttaatattttggctggcggtaat

SEQ ID NO: 9802 - DNA, 75 bp, synthetic construct
  source 1..75: mol_type = other DNA
ggatagtggtgcatataacgccctgattggtggtgcatctgcattaattcttcactttaatataaatgctggtag

SEQ ID NO: 9803 - DNA, 75 bp, synthetic construct
  source 1..75: mol_type = other DNA
gaatgccgatactgccctgataagcagtgccctgcggatggcgtatgaggtgcgtggtcagccgcgggacgtcat

SEQ ID NO: 9804 - DNA, 75 bp, synthetic construct
  source 1..75: mol_type = other DNA
gagagatgacgcccggcgagcgcagtctcattctgcgggccctgaaaaccctggaccgccatcttcatgaacccg

SEQ ID NO: 9805 - DNA, 75 bp, synthetic construct
  source 1..75: mol_type = other DNA
atgccatttaaaaaactctcccgacgcaccttcctgacggcaagctcggcgcttgccttcctccatacccctttc

SEQ ID NO: 9806 - DNA, 75 bp, synthetic construct
  source 1..75: mol_type = other DNA
ccaggtgtgcagctttgcattacctgtcaggaaatcgcagagctgaaaggcaaacattacaacggaggtgctgta

SEQ ID NO: 9807 - DNA, 75 bp, synthetic construct
  source 1..75: mol_type = other DNA
agggcgatatgacccgcaagggactggatattgtgcagggttcagcgggggtgctgataggtgcgccgacgggag

SEQ ID NO: 9808 - DNA, 75 bp, synthetic construct
  source 1..75: mol_type = other DNA
tccgcgaatgcctgcaatggatgattgatgacggcgtggtgtcccgtattgatctggatatccgccgcaccggga

SEQ ID NO: 9809 - DNA, 75 bp, synthetic construct
  source 1..75: mol_type = other DNA
gggcagagcaccacgctgaccgtggcattccagccggaaggcgcaaccgacaagagcttccgtgcggtgtctgcg

SEQ ID NO: 9810 - DNA, 75 bp, synthetic construct
  source 1..75: mol_type = other DNA
cagagcttcttatccagacacgaggcaatcagaccgaagtggcgaggatgctttcctgcgcaagaggaacagtgc

SEQ ID NO: 9811 - DNA, 75 bp, synthetic construct
  source 1..75: mol_type = other DNA
agctatacccaaattatggtgggctgggtgggggcaccgaaaggtgcgccggtttccgtatgcgccggttacgcc

SEQ ID NO: 9812 - DNA, 75 bp, synthetic construct
  source 1..75: mol_type = other DNA
atcattgtcgtcgcacagctctgtcctgaattcactgctcgcctggtagatcgctggcgcgaactggaagaacag

SEQ ID NO: 9813 - DNA, 75 bp, synthetic construct
  source 1..75: mol_type = other DNA
tatctgctggctcccgaggtgagtgccctgcttcattatgtcccggatctgcgccgcaagatgctgctggccact

SEQ ID NO: 9814 - DNA, 75 bp, synthetic construct
  source 1..75: mol_type = other DNA
ctgaaggtattgccctgacatttcgtgtcccggaaggaaatataaaacatcctttgattctcttatgccatggat

SEQ ID NO: 9815 - DNA, 75 bp, synthetic construct
  source 1..75: mol_type = other DNA
cctctgaaactgcaacactgaccaccactgagtccggcggcgtttatcagtccctgtttgataaaattaatttaa

SEQ ID NO: 9816 - DNA, 75 bp, synthetic construct
  source 1..75: mol_type = other DNA
aaatgaaaggggcggggacgacgttctggatgtataccggcaagggcgacgcatttgcgaatcctttgtcagata

SEQ ID NO: 9817 - DNA, 75 bp, synthetic construct
  source 1..75: mol_type = other DNA
ttgcgaagaagcgtaagtgttctgatgggacaattagaaaagatatgcaaacagcattaggttttgttagtggtg

SEQ ID NO: 9818 - DNA, 75 bp, synthetic construct
  source 1..75: mol_type = other DNA
gcacggaatctgtccgcgctcaggcccgtgaacagtttaccggtgcggtggaccggatatttgacacggcggaga

SEQ ID NO: 9819 - DNA, 75 bp, synthetic construct
  source 1..75: mol_type = other DNA
tgcgtcggcgcatgccaccggtactgcgtcgccgggctattgatgcgctgctgcaggggctgtgttttcactatg

SEQ ID NO: 9820 - DNA, 75 bp, synthetic construct
  source 1..75: mol_type = other DNA
tgtggctggattatctggacgcactggaactggtcgatacttccggtgcgccagatattgaatggcctacgcctc

SEQ ID NO: 9821 - DNA, 75 bp, synthetic construct
  source 1..75: mol_type = other DNA
tcatttccctaaacccatcaaactggggcgcagcagccgctggtacaaaagtgaagtggagcagtggatgcagca

SEQ ID NO: 9822 - DNA, 75 bp, synthetic construct
  source 1..75: mol_type = other DNA
aaccgacggcttacctgtcgagtatcaggctaacacacaaccagaggcgggggtgattcatgaaaatcaagcatg

SEQ ID NO: 9823 - DNA, 75 bp, synthetic construct
  source 1..75: mol_type = other DNA
cttggcctcgatgacgatgcgctgtcgcttgagtggacgctcggcggtctgcctgacattgaattgtgggcgcag

SEQ ID NO: 9824 - DNA, 75 bp, synthetic construct
  source 1..75: mol_type = other DNA
actggcagggcagaatactgaactggctaagatgaaatatcaggtcagtcagggcgaattatcaaccctgtcaga

SEQ ID NO: 9825 - DNA, 75 bp, synthetic construct
  source 1..75: mol_type = other DNA
ggtggaaaacaaacaacaggcagtggcgagacgtgcagccacgaatattaaaaaaatccgggcaatgttggttgc

SEQ ID NO: 9826 - DNA, 75 bp, synthetic construct
  source 1..75: mol_type = other DNA
tcggtaaaagctcagaaaaacttcgcgcaaaaaccgaacggcagatacaggaagcacaggagcgaatcagcgcac

SEQ ID NO: 9827 - DNA, 75 bp, synthetic construct
  source 1..75: mol_type = other DNA
tgattatccttggtcgggtaggacaagacccggaagttcgatactcaccatcaggaacagcgttcgctaacctga

SEQ ID NO: 9828 - DNA, 75 bp, synthetic construct
  source 1..75: mol_type = other DNA
tggtgctgttcatctccggactgcagccacataaaaaagatctgcttccggtgtaaaagtcgctcctgcccgcac

SEQ ID NO: 9829 - DNA, 75 bp, synthetic construct
  source 1..75: mol_type = other DNA
aacaccgctgttcgtaattatgttgctgacaatgcatcaacactacttgctggctctttacccaaaacaatcacg

SEQ ID NO: 9830 - DNA, 75 bp, synthetic construct
  source 1..75: mol_type = other DNA
cacctcaatggccggagagacagcgccgaaaacatcagactctcccgtccgcaaagcacttccggcaacacttcc

SEQ ID NO: 9831 - DNA, 75 bp, synthetic construct
  source 1..75: mol_type = other DNA
cactccatgggtgtctgttggactgggttatgcacggatacatcataaggcaacatatactgatacctcctggaa

SEQ ID NO: 9832 - DNA, 75 bp, synthetic construct
  source 1..75: mol_type = other DNA
catcctcaccgagtcagggctgaaaatcaccccgctggatgcggcggtgccggatcgggcgcaggcgctgatcga

SEQ ID NO: 9833 - DNA, 75 bp, synthetic construct
  source 1..75: mol_type = other DNA
acatgcaggggatgcgtaaggcagatatcatcaggcgactggaaaatgaactgggggaaacggcagaggatgtgt

SEQ ID NO: 9834 - DNA, 75 bp, synthetic construct
  source 1..75: mol_type = other DNA
cagcagggaaagcctccagtgcgcaagtcaataaggttattcggcaggccagctttattgctgcagctctggccc

SEQ ID NO: 9835 - DNA, 75 bp, synthetic construct
  source 1..75: mol_type = other DNA
gacacttcattcacgagggagtatcggtaatactggcgggagtgaaacccgtccacgaaatattgcatttaacta

SEQ ID NO: 9836 - DNA, 75 bp, synthetic construct
  source 1..75: mol_type = other DNA
aggctctgcattacctgttggtgtgcctgttccatggccttcagccacaccgccaacaggctggctgaaatgcaa

SEQ ID NO: 9837 - DNA, 75 bp, synthetic construct
  source 1..75: mol_type = other DNA
tgagcaggctgaagccctccgtcagaaagaccagcaactgagtctggttgaagagacggaggccttcctgcgctc

SEQ ID NO: 9838 - DNA, 75 bp, synthetic construct
  source 1..75: mol_type = other DNA
gctgttcgggggttcactgacactgcgtgactacgatggtcaggttgcagaggctatggccctggtacgagcgct

SEQ ID NO: 9839 - DNA, 75 bp, synthetic construct
  source 1..75: mol_type = other DNA
gttgatttgtatttacagtcctgtgtggaggacggaaaggagcctgacacgccctttaaaggtgtgtttaacgtc

SEQ ID NO: 9840 - DNA, 75 bp, synthetic construct
  source 1..75: mol_type = other DNA
cttatcagcagcgcctttaaggttatcgaaacacaacgtccgaaacaggcctgttgccggtgcgaccatatcgtg

SEQ ID NO: 9841 - DNA, 75 bp, synthetic construct
  source 1..75: mol_type = other DNA
aagcttactctatcgcctcgaccatcaggcataacagggccagaggaaagcaccagatagacgcgctctccgata

SEQ ID NO: 9842 - DNA, 75 bp, synthetic construct
  source 1..75: mol_type = other DNA
acgcttcatcagaagggcactggtgcaacggaaattgctcatcagctcagtattgcccgctccacggtttataaa

SEQ ID NO: 9843 - DNA, 75 bp, synthetic construct
  source 1..75: mol_type = other DNA
atgcaacagctttcctttctgcccggatcgatgacgcccggcgagcgcagcctcattcagcgggccctgaaaacc

SEQ ID NO: 9844 - DNA, 75 bp, synthetic construct
  source 1..75: mol_type = other DNA
agaggttaagcctagtatttacagtcgttttgctgttttgcgcagcagtgacatgtggcgttcatatttacagca

SEQ ID NO: 9845 - DNA, 75 bp, synthetic construct
  source 1..75: mol_type = other DNA
ggagtaattaaaaaagttgatttgaacacaaatgaagcggaaattaaaataaaagagggggggggcagtgagttt

SEQ ID NO: 9846 - DNA, 75 bp, synthetic construct
  source 1..75: mol_type = other DNA
atgtcaggctaactatatacgtgatgttcagggagggaccatcgcaccatcctcctcttctaaactgacggggat

SEQ ID NO: 9847 - DNA, 75 bp, synthetic construct
  source 1..75: mol_type = other DNA
cggcggcaccgttgaacaggctccgctctcgccgctgttgcgggccgcgatagacgccttcgacgaagccggtcc

SEQ ID NO: 9848 - DNA, 75 bp, synthetic construct
  source 1..75: mol_type = other DNA
atgagtaatgttattgcatcgcttgaaaaggtactcctcccttttgcagttaaaataggaaagcagccacacgtt

SEQ ID NO: 9849 - DNA, 75 bp, synthetic construct
  source 1..75: mol_type = other DNA
cactgttgtgaacagtgacggctggcagattgtcaaaaacgggggtgtggccgggaataccaccgttaatcagaa

SEQ ID NO: 9850 - DNA, 75 bp, synthetic construct
  source 1..75: mol_type = other DNA
caactgaccgatatatcaaaatcggcgacgtatacgctgctgattgacagcattgcggtggaagtgaacagcaca

SEQ ID NO: 9851 - DNA, 75 bp, synthetic construct
  source 1..75: mol_type = other DNA
ggagcttttgattccaacggttattcaatgatcatgatagatgggcgtagatataaaactcacgtcttagttttt

SEQ ID NO: 9852 - DNA, 75 bp, synthetic construct
  source 1..75: mol_type = other DNA
cccggaaagctggtcgttgaagatccgcttccacccgtcgcccgcgttaatggcatccagtgcagtaccgcgcat

SEQ ID NO: 9853 - DNA, 75 bp, synthetic construct
  source 1..75: mol_type = other DNA
tcgcgccagctttcacttttttcagaaacgcatttttttcccacgacacaggttcaccgctgctcaagccttctg

SEQ ID NO: 9854 - DNA, 75 bp, synthetic construct
  source 1..75: mol_type = other DNA
cacgacgcgaaaaggccttgtccagctcagtagcgccaccaacagcacgtctgaaacgcaggctgcaacgccgaa

SEQ ID NO: 9855 - DNA, 75 bp, synthetic construct
  source 1..75: mol_type = other DNA
cgctgttttatgaggaccatccggcgcgggagttctgtgtccagtacggggaaagcgacctggcgtttctggcgc

SEQ ID NO: 9856 - DNA, 75 bp, synthetic construct
  source 1..75: mol_type = other DNA
ggaaataataactcaggattaaacgttgacctgataacagccccaaaaggaagcaataaagagatatttaaagcc

SEQ ID NO: 9857 - DNA, 75 bp, synthetic construct
  source 1..75: mol_type = other DNA
ccactaatactgctgtgattatgcgggctgatctgagccagtctgtaaatcaatcggataaactcattgttaaaa

SEQ ID NO: 9858 - DNA, 75 bp, synthetic construct
  source 1..75: mol_type = other DNA
ccgaagtattaaccggccacaccgacgtgatttgctccaccagcattgagcgtattgtcacgggacgtaatgccg

SEQ ID NO: 9859 - DNA, 75 bp, synthetic construct
  source 1..75: mol_type = other DNA
tatatttccagcaaacctgcttccactctagcattggtgtgcacatagagaaaatgatttttaagttagatagtt

SEQ ID NO: 9860 - DNA, 75 bp, synthetic construct
  source 1..75: mol_type = other DNA
gcgctggctgataattacgacggtcagggcgttgattacggcgatggctcagctagtgacggctgggttgctatc

SEQ ID NO: 9861 - DNA, 75 bp, synthetic construct
  source 1..75: mol_type = other DNA
gaacatgggacgaattgtcgttgacgtcgatggtgttaatctcgctgaactgattaacgtggcctgcgacaatgg

SEQ ID NO: 9862 - DNA, 75 bp, synthetic construct
  source 1..75: mol_type = other DNA
aatgaccatgcttggaaagcaacattctgtagaggtgaagcagagggaatatgggagaactgctgtgcataaatg

SEQ ID NO: 9863 - DNA, 75 bp, synthetic construct
  source 1..75: mol_type = other DNA
cctaccagtttaagcgaatgatgatccgccactgcctgttaaacggtaatgcttatgcggtgattcagtgggggc

SEQ ID NO: 9864 - DNA, 75 bp, synthetic construct
  source 1..75: mol_type = other DNA
cttcaacagccacaacgaaggctggcgaagccgctgaacaggccagcgcagcagcgaggtctgcatccgcagcga

SEQ ID NO: 9865 - DNA, 75 bp, synthetic construct
  source 1..75: mol_type = other DNA
ccttaatgaaaatcatgcaaccaaaggaacgttgcaggagttgctaaatacagcagaaaaaacggcgtttctcgg

SEQ ID NO: 9866 - DNA, 75 bp, synthetic construct
  source 1..75: mol_type = other DNA
aaagctgcacgttatcagcaagcgttatactcagcgcattgagcggcataacctgaatctgagacaacatctggc

SEQ ID NO: 9867 - DNA, 75 bp, synthetic construct
  source 1..75: mol_type = other DNA
aacaggactggcaccccgcgcatgttgtcgcggcggtgcatgtaaaaggttttactttacgctctctgtccattg

SEQ ID NO: 9868 - DNA, 75 bp, synthetic construct
  source 1..75: mol_type = other DNA
atgtccttaaaaggtcttcgctttacgctggaggttgacggccaggagccggacacctttgcagtggtgagcttc

SEQ ID NO: 9869 - DNA, 75 bp, synthetic construct
  source 1..75: mol_type = other DNA
tccaataatctgggaaatgtatcattaagtgcgctttggcggaattactgggggcgaagtggaaatgctaaagat

SEQ ID NO: 9870 - DNA, 75 bp, synthetic construct
  source 1..75: mol_type = other DNA
ctctggccacactggagcgtcttctgagcctgctgtcggcctttgaggtcgtggtatggatgacggatggctggc

SEQ ID NO: 9871 - DNA, 75 bp, synthetic construct
  source 1..75: mol_type = other DNA
ctgggcattggtcgattaagtgtcttgctttttgcaggattattatccgatcgctttggtcgccgcccttttatc

SEQ ID NO: 9872 - DNA, 75 bp, synthetic construct
  source 1..75: mol_type = other DNA
atgcatcagcctcccgttcgcttcacttaccgcctgctgagttacctggtcagtgcgattatcgccgggcagccg

SEQ ID NO: 9873 - DNA, 75 bp, synthetic construct
  source 1..75: mol_type = other DNA
gatcggcaaagtaatcctcatgccataaccgctggacttaactatacccccttcccgctgatgaccttcagcgcg

SEQ ID NO: 9874 - DNA, 75 bp, synthetic construct
  source 1..75: mol_type = other DNA
tgtggcctttgttgatctgtttaatagcactgatttcgacctgtttagagatgcctatatgggcgaagctaagga

SEQ ID NO: 9875 - DNA, 75 bp, synthetic construct
  source 1..75: mol_type = other DNA
atttgccggaaacagggttcccgatgcgtggcgatctcgccaagcgcgaaccgggaatgctggcgcgttggactg

SEQ ID NO: 9876 - DNA, 75 bp, synthetic construct
  source 1..75: mol_type = other DNA
tgtatggtgaaatgcgcgtggggtcacgtgtggtatctcaggagatcagcacggcagatgaaggggacggtggtc

SEQ ID NO: 9877 - DNA, 75 bp, synthetic construct
  source 1..75: mol_type = other DNA
acactccccgacgacatcgagcaactgaaggccctgctgatcgcacagcaggctgttatcgtctgtctggtgaaa

SEQ ID NO: 9878 - DNA, 75 bp, synthetic construct
  source 1..75: mol_type = other DNA
gaatatgccaatatggttgaagatattcgtgagaaggtgtcatctgagatggaacgattttttccaaaaaatgat

SEQ ID NO: 9879 - DNA, 75 bp, synthetic construct
  source 1..75: mol_type = other DNA
atgaccacatttaccaataaagaactgattaaagaaatcaaagaacgaatcagcagcctagaggttcgagacgat

SEQ ID NO: 9880 - DNA, 75 bp, synthetic construct
  source 1..75: mol_type = other DNA
accgatgaaatcccgttagatgatgcactactgcaattgcgggaatttatcgacgaaaactccggtgaatttttt

SEQ ID NO: 9881 - DNA, 75 bp, synthetic construct
  source 1..75: mol_type = other DNA
tgcaaagttagcgatgaggcagccttttgtcttattcaaaggccttacatttcaaaaactctgcttaccaggcgc

SEQ ID NO: 9882 - DNA, 75 bp, synthetic construct
  source 1..75: mol_type = other DNA
gagatccccggcagtattacggaagaaaatgcgaaaaaactgaagagcaactgggacagcgggtatacaggcgaa

SEQ ID NO: 9883 - DNA, 75 bp, synthetic construct
  source 1..75: mol_type = other DNA
atcataatcatctgacccgtatcgctacgttttgcgcgctgctgtattgcaatagtgctttctgtgctgaacttg

SEQ ID NO: 9884 - DNA, 75 bp, synthetic construct
  source 1..75: mol_type = other DNA
gttacgatccacgtattcgcaggatgctgagtttccgcattgccgatcccgtttctgatgcagaacgtttcaccc

SEQ ID NO: 9885 - DNA, 75 bp, synthetic construct
  source 1..75: mol_type = other DNA
aacgtctgtttgcaatactgcgtcttgctgatggctctcagcccccgtttggtgccagtgtaaccagtgaaaaag

SEQ ID NO: 9886 - DNA, 75 bp, synthetic construct
  source 1..75: mol_type = other DNA
actcgctgtcgcatcagacgaatgacaccggcgaatcagaatggattcatttcacaggtagcggatatctgttac

SEQ ID NO: 9887 - DNA, 75 bp, synthetic construct
  source 1..75: mol_type = other DNA
aacaactttttgcccgctatggcttaccagcaccggtgggttatgcctgtactactccgcgcgaagcagaagaag

SEQ ID NO: 9888 - DNA, 75 bp, synthetic construct
  source 1..75: mol_type = other DNA
ttatgtgaatatggccggctacactgacacgttcaatgacggtctggacagctacagcctgaacgccggccttaa

SEQ ID NO: 9889 - DNA, 75 bp, synthetic construct
  source 1..75: mol_type = other DNA
atgtcccgttttatcctgggtgactgcgtgcgtgttatggccacgtttccgggcaatgctgtcgatttcatcctc

SEQ ID NO: 9890 - DNA, 75 bp, synthetic construct
  source 1..75: mol_type = other DNA
tccgtgaccgttccgggcgcaccatcgccggcgataaaaccgatgaatggctgcaaccggcctgtaatgaaatgt

SEQ ID NO: 9891 - DNA, 75 bp, synthetic construct
  source 1..75: mol_type = other DNA
ggtgaaatgctggttggttcccgacggatatcccaggacatcagtacccgtgatgaaggtggtgacgggaaagtg

SEQ ID NO: 9892 - DNA, 75 bp, synthetic construct
  source 1..75: mol_type = other DNA
agcctctgaagaggtagcagcggaaatggcggcgcaaccctgcccaggtgaagtggcgaaaagcctgatcacaat

SEQ ID NO: 9893 - DNA, 75 bp, synthetic construct
  source 1..75: mol_type = other DNA
tgcgtgaggcggcagagaaggcaacgtggggagactgggactcatataaaccacaccgtggcgcacgtggttatg

SEQ ID NO: 9894 - DNA, 75 bp, synthetic construct
  source 1..75: mol_type = other DNA
gaggcggtgtggctgacacacgacccggcatacccggatgaacagccgactgcgccgctggcgcgctacacgtac

SEQ ID NO: 9895 - DNA, 75 bp, synthetic construct
  source 1..75: mol_type = other DNA
caggtatcatcaaaccgcccgacacatttcagttcatgggcgcgcaggagcattattccggatcgtctggcaacc

SEQ ID NO: 9896 - DNA, 75 bp, synthetic construct
  source 1..75: mol_type = other DNA
acagcaacggaggcgttgcttaataccgttcgcgccgttctgaatgcagaggatacccgcccggtggccgaccgc

SEQ ID NO: 9897 - DNA, 75 bp, synthetic construct
  source 1..75: mol_type = other DNA
attcaatatcgcccgtgtggaatggggaacatgccgcatgaatcctgtcgaactggtcagaaaacccaaaatcag

SEQ ID NO: 9898 - DNA, 75 bp, synthetic construct
  source 1..75: mol_type = other DNA
ccttcggacaaggaatagccccggtaagccgtgttctgggcgtgtcacgtgcgcagttaacattacggatgaagg

SEQ ID NO: 9899 - DNA, 75 bp, synthetic construct
  source 1..75: mol_type = other DNA
cggccactacataatccacaggaaaaacctactgataaccggtccgacaggatgcggtaagagctggatagccaa

SEQ ID NO: 9900 - DNA, 75 bp, synthetic construct
  source 1..75: mol_type = other DNA
cgcagcggaatatcccgctctcgcataaaaaactgcgcagggcgctgaaggccatcacccgttcagaaagctatc

SEQ ID NO: 9901 - DNA, 75 bp, synthetic construct
  source 1..75: mol_type = other DNA
cagtcctgcactcgccccacctggaatagcggtgttccgtggacggaatggaaagaacgtagtcgtgagtgctac

SEQ ID NO: 9902 - DNA, 75 bp, synthetic construct
  source 1..75: mol_type = other DNA
aatggtgtgattgaacgggcacgcgccggtatcgatgaggccatcagccgtgagcagcttatccccctcgatcgt

SEQ ID NO: 9903 - DNA, 75 bp, synthetic construct
  source 1..75: mol_type = other DNA
cagcagtatgatgaggagtccggcctgtattacaaccgccaccgctattatgacccgctgcaggggcggtatatc

SEQ ID NO: 9904 - DNA, 75 bp, synthetic construct
  source 1..75: mol_type = other DNA
tggatgcagataaaaagcagatacagtgtgtggtaagaccgctgcaaatcctgcgtgctgacgggacgtgggaaa

SEQ ID NO: 9905 - DNA, 75 bp, synthetic construct
  source 1..75: mol_type = other DNA
gcgcagaaatcatcccgtatcgcgtggatgccaccatttttctctatcctggaccggaagcagagccggtaatgg

SEQ ID NO: 9906 - DNA, 75 bp, synthetic construct
  source 1..75: mol_type = other DNA
cgttcttcccggattcaacgatgctgatcacctcgttcaacaacctgtcgatttactggcagaaaggttcaatgc

SEQ ID NO: 9907 - DNA, 75 bp, synthetic construct
  source 1..75: mol_type = other DNA
aacgcccagtgtaatgaccttctggagatcacagaggatcgttacggacaaagcagcacgatagtggtaagccag

SEQ ID NO: 9908 - DNA, 75 bp, synthetic construct
  source 1..75: mol_type = other DNA
tgtgcaggcctccacccgggatgaaattgaacgactctggaatccgcagggtatggccgcgcagcctgcacaacc

SEQ ID NO: 9909 - DNA, 75 bp, synthetic construct
  source 1..75: mol_type = other DNA
gctgcacggcgaagcgaaccataatgccgaagaaggcacggttgatcttgagttccacggtgaagaaggggatta

SEQ ID NO: 9910 - DNA, 75 bp, synthetic construct
  source 1..75: mol_type = other DNA
atgtcgcagacagaaaatgcagtgacttcctcatctggcgcaaaacgagcatacagaaagggtaaacctttgagt

SEQ ID NO: 9911 - DNA, 75 bp, synthetic construct
  source 1..75: mol_type = other DNA
ctctaaatcgtgttcaggcgctggcgaagatcgcagaaatcaaagctaagttcgggctgaaaggagtgatgaaat

SEQ ID NO: 9912 - DNA, 75 bp, synthetic construct
  source 1..75: mol_type = other DNA
ctgaaagcgcgcaggagggacttacagccccgcagttactggattaagcaggcacaacaggctgtgaatgcttat

SEQ ID NO: 9913 - DNA, 75 bp, synthetic construct
  source 1..75: mol_type = other DNA
actggatcggttgctacatcactcaaccacgctgaatatcaaaggagagagttaccggttaaaagagaaacgtaa

SEQ ID NO: 9914 - DNA, 75 bp, synthetic construct
  source 1..75: mol_type = other DNA
cgggactggctgaactgggtgcggtgctgccacacggcaccgccgtcgaactgcccgacgttcagaccgcgcccg

SEQ ID NO: 9915 - DNA, 75 bp, synthetic construct
  source 1..75: mol_type = other DNA
ggttttactacaccatgtatccgttgtatgactggaaagcccgcgatatatggatatataacgccaggacccgtg

SEQ ID NO: 9916 - DNA, 75 bp, synthetic construct
  source 1..75: mol_type = other DNA
ctgcgtgtgcctgcagcctttgaagggctttctgttgcggggccaactgcagcttatgaatttcatgcccgaagc

SEQ ID NO: 9917 - DNA, 75 bp, synthetic construct
  source 1..75: mol_type = other DNA
tgttacagagaaggtctcttccggcaggactgcaggcgggtatcaccaccggcatacagggtacacctggtctgt

SEQ ID NO: 9918 - DNA, 75 bp, synthetic construct
  source 1..75: mol_type = other DNA
ccacagagattttacgtcaacttggtggtaatcgttttattgttatgactggtgctaaaagtttttcttactttg

SEQ ID NO: 9919 - DNA, 75 bp, synthetic construct
  source 1..75: mol_type = other DNA
gctgacggccatgacggcctcgtttgtgctggccacaccgaccgagacggacggggcgctgtttcccggtcgcat

SEQ ID NO: 9920 - DNA, 75 bp, synthetic construct
  source 1..75: mol_type = other DNA
aaaaatcgttcacacaatgcgtcagttatctggcccgaaaccattctgaaatctgcttttgttgataactcacat

SEQ ID NO: 9921 - DNA, 75 bp, synthetic construct
  source 1..75: mol_type = other DNA
cggatgccattcgttataatgctcgaacgcctctgcaaggttctttgctgccgttaacccgtctggtttgggcat

SEQ ID NO: 9922 - DNA, 75 bp, synthetic construct
  source 1..75: mol_type = other DNA
acggattcagcagcactgttgccctgcatcgaacaggcccggaaggatgtccgtgctcttcgtcatctgcagctt

SEQ ID NO: 9923 - DNA, 75 bp, synthetic construct
  source 1..75: mol_type = other DNA
gagttctggcacgacgaaaagaattacgcctaacacaacgagaagccgctcgcctcgctggggtagctcacgtca

SEQ ID NO: 9924 - DNA, 75 bp, synthetic construct
  source 1..75: mol_type = other DNA
ccggcgagacggaccttgcgctgcccggcccgctgccgttcattctctcccgcacctacagcagctaccggacca

SEQ ID NO: 9925 - DNA, 75 bp, synthetic construct
  source 1..75: mol_type = other DNA
gattctgacgtgcccatgagcagtgccacgctaaaccgggtgatgacgatgacttacaagctggctcagaaagaa

SEQ ID NO: 9926 - DNA, 75 bp, synthetic construct
  source 1..75: mol_type = other DNA
tcgttacagcgttcccgaagcgctgtgtggtcagccggtatcgatacgaatatcgctggatgacgagttgcggat

SEQ ID NO: 9927 - DNA, 75 bp, synthetic construct
  source 1..75: mol_type = other DNA
ttgagcatttcggagccagaggagcagtatcaggaagaccatttaatcccgaccttgccggtggtccaatagaaa

SEQ ID NO: 9928 - DNA, 75 bp, synthetic construct
  source 1..75: mol_type = other DNA
cagacggagctggcagagaatggcatcatcgttggtcgtgaccgactggcacgtcttcgtaaggagctgaggcta

SEQ ID NO: 9929 - DNA, 75 bp, synthetic construct
  source 1..75: mol_type = other DNA
gctggcccgcataatcatggctaagttcgccgagcatctgccgctgtaccgtcagtcggaaatctatgcccgcca

SEQ ID NO: 9930 - DNA, 75 bp, synthetic construct
  source 1..75: mol_type = other DNA
gggtgagcagtatgatccggtactgccatccgccctgcgccagtcttcagcccgtaaaccgttaccggcctcact

SEQ ID NO: 9931 - DNA, 75 bp, synthetic construct
  source 1..75: mol_type = other DNA
cgccacgctgttccgccggaagtattacattaacggcagtcatgcaggcttcatcatgtacatgaccgatgccgc

SEQ ID NO: 9932 - DNA, 75 bp, synthetic construct
  source 1..75: mol_type = other DNA
tagacgccttcgacgaagccggtccggacgcagcgttcgagcagggactcgcggtgattgtcgatggattggcga

SEQ ID NO: 9933 - DNA, 75 bp, synthetic construct
  source 1..75: mol_type = other DNA
accaataccattccgttccaggcgcgttattttgcaaccggggccgcaaccccgggtgctgctaatgcggatgcg

SEQ ID NO: 9934 - DNA, 75 bp, synthetic construct
  source 1..75: mol_type = other DNA
catcttccccgtgaaatacaccgcctggagcctgaagaaagttgttgcccggagtgtggcagtgagctggattat

SEQ ID NO: 9935 - DNA, 75 bp, synthetic construct
  source 1..75: mol_type = other DNA
atcggtagctgcaaacttaacggaatcgagccggaaacgtggctacgccacgtgatcagtgtaatcaacacctgg

SEQ ID NO: 9936 - DNA, 75 bp, synthetic construct
  source 1..75: mol_type = other DNA
ctgagctttttggtggggaaggttatgaataccgggatctggcatcactggtgggagtgacatcaaaaaactggt

SEQ ID NO: 9937 - DNA, 75 bp, synthetic construct
  source 1..75: mol_type = other DNA
gtaattttaatactccaccctttaaaaaagtgccggcttactggcttcatcccggactgacttatctgaaagtgc

SEQ ID NO: 9938 - DNA, 75 bp, synthetic construct
  source 1..75: mol_type = other DNA
gatgctcctggcacatataaggctggttatgcaatctgccgttcagtagatttaaactcatgggaatatatgcca

SEQ ID NO: 9939 - DNA, 75 bp, synthetic construct
  source 1..75: mol_type = other DNA
gagtcgaggatatccctgctcctggaactggtatcaaatgccgaacatcacggctttatggagcgccttgtaaac

SEQ ID NO: 9940 - DNA, 75 bp, synthetic construct
  source 1..75: mol_type = other DNA
ctcgatagagaatccttgatttgctccgtgaaaataagagcgcaacaaaaagcgaccttttcacgacgagatatt

SEQ ID NO: 9941 - DNA, 75 bp, synthetic construct
  source 1..75: mol_type = other DNA
aaggatgccggggtgaacacatatcgctggcagggcggagaacagcgaccggccaccatcatcagtgaaccggac

SEQ ID NO: 9942 - DNA, 75 bp, synthetic construct
  source 1..75: mol_type = other DNA
gcgtggtgatcctgaccgaaaaagaggtagaggtaagcgtcaataaccatgctacgtttacccttccgaaaaact

SEQ ID NO: 9943 - DNA, 75 bp, synthetic construct
  source 1..75: mol_type = other DNA
cctgaacacgctgttcccgcctgactatgttaaccagttgcgtgtctttgccgtggttaaccagttccgtcttca

SEQ ID NO: 9944 - DNA, 75 bp, synthetic construct
  source 1..75: mol_type = other DNA
aatttctgagccagagcggtaagatggtcaccgccgccgcgctgtttggtacctctgtgccgctcgcccatgcgg

SEQ ID NO: 9945 - DNA, 75 bp, synthetic construct
  source 1..75: mol_type = other DNA
cgtatggttgcaagacagtgcaggaagcaatcacttaccgtgaaaacttcagtcagcgtgaaggaatgctgatct

SEQ ID NO: 9946 - DNA, 75 bp, synthetic construct
  source 1..75: mol_type = other DNA
gctttacgagcagtttggtgatttgaaattcaaatacaggaacagagagttctggtgcagagggtactacgtcga

SEQ ID NO: 9947 - DNA, 75 bp, synthetic construct
  source 1..75: mol_type = other DNA
cctcagtatctgagagaatacgtctgtgcggaactgggcgaaccgggaccattcacccgggctctgtggtttcat

SEQ ID NO: 9948 - DNA, 75 bp, synthetic construct
  source 1..75: mol_type = other DNA
gccgggctgtggcgcttattgttcgccagcagcggctgaaattaagcctgtccggaaggctggcgataaaggtga

SEQ ID NO: 9949 - DNA, 75 bp, synthetic construct
  source 1..75: mol_type = other DNA
caaggcatatcagcactgaagctgtactcatttttagcggagcatatcgatcctacgtgtggcgctgtcgttgcg

SEQ ID NO: 9950 - DNA, 75 bp, synthetic construct
  source 1..75: mol_type = other DNA
gaccttgccgtgggtgaaatctcaaaggggcttaaaggcctggcaaaatccggtggttttccgttgattgcgctg

SEQ ID NO: 9951 - DNA, 75 bp, synthetic construct
  source 1..75: mol_type = other DNA
gcgcaatctacaccggtggtcacgattacgcatggtggcgcggtgcactgattgacgggattggtttactacagg

SEQ ID NO: 9952 - DNA, 75 bp, synthetic construct
  source 1..75: mol_type = other DNA
cactggcaacgatgtcggggtttcgccataaaactgttgatgtgcctgaatgggaaggggcaacggttgtattac

SEQ ID NO: 9953 - DNA, 75 bp, synthetic construct
  source 1..75: mol_type = other DNA
ttgaagtgatccgtggccctatgtcttccctgtatggttctgatgccatcggaggggtcattaatatcataacca

SEQ ID NO: 9954 - DNA, 75 bp, synthetic construct
  source 1..75: mol_type = other DNA
gatgctcctggcacacataaggctggttatgcaatctgccgttcggcagatttaaactcatgggaatatgtgcca

SEQ ID NO: 9955 - DNA, 75 bp, synthetic construct
  source 1..75: mol_type = other DNA
tcattacgggcgcacgcagggtgtcacggagcaggtactgaaggcaaatccggggcttgccgaatacggcccctt

SEQ ID NO: 9956 - DNA, 75 bp, synthetic construct
  source 1..75: mol_type = other DNA
ccagacgtttgtcgtgttgtgtgcctgcgcaatattacgctggcagctggggacgcgttggcgttatggattgac

SEQ ID NO: 9957 - DNA, 75 bp, synthetic construct
  source 1..75: mol_type = other DNA
cgatgcgttttgaagaaatgaacgacgtcgaacgtgaacggctggtttgtgcaattgatgaattgcgtggggcat

SEQ ID NO: 9958 - DNA, 75 bp, synthetic construct
  source 1..75: mol_type = other DNA
atggcgaaaaatgactttaaagcgtttgcaactgatcggaatgccaatgttatgtcgcaggaggaatgggaagcg

SEQ ID NO: 9959 - DNA, 75 bp, synthetic construct
  source 1..75: mol_type = other DNA
agctggggatcaggatgctgggccgtcgtccgaacagcatacttaaagccggtcagcatcggtatcagcgggcat

SEQ ID NO: 9960 - DNA, 75 bp, synthetic construct
  source 1..75: mol_type = other DNA
gtatgtcattaccgggcttaacaccacccgctctgaacttgatcgctatggtcgggcaagaaagattgagtttac

SEQ ID NO: 9961 - DNA, 75 bp, synthetic construct
  source 1..75: mol_type = other DNA
tatatcagttacggcggtgttcatcggtgaatacactggaaaagattatctgtaagaacacctatgatttaccgg

SEQ ID NO: 9962 - DNA, 75 bp, synthetic construct
  source 1..75: mol_type = other DNA
gcgtcataaggggctttgcgggaatgaaattcctgtcagcctcaattactacggctttggtgggggcgaagtgct

SEQ ID NO: 9963 - DNA, 75 bp, synthetic construct
  source 1..75: mol_type = other DNA
ccgtaaaaagctatctgaaagaagatgaagcttttaaccgctatctcagtgaattgtggggggatttacgggaat

SEQ ID NO: 9964 - DNA, 75 bp, synthetic construct
  source 1..75: mol_type = other DNA
cattcaagaatctttttgtaatcacagataataattctgaatttatttgtgataaggaatttgatgatatacgtg

SEQ ID NO: 9965 - DNA, 75 bp, synthetic construct
  source 1..75: mol_type = other DNA
atgccatttgctcgttatttctgcattttcataaacgttggtttgggagaaggttcggcattacccgttggtgtg

SEQ ID NO: 9966 - DNA, 75 bp, synthetic construct
  source 1..75: mol_type = other DNA
ggtatctccatgcctcgacgaacgttcccggtagtgatgatctgaacgggattaacgtgaaataccgttatgagt

SEQ ID NO: 9967 - DNA, 75 bp, synthetic construct
  source 1..75: mol_type = other DNA
atcggcgctgtgactgctgaaggtaaaaaaacaggcatgaaagccctgctatctgcccagtcacagctcggcgtt

SEQ ID NO: 9968 - DNA, 75 bp, synthetic construct
  source 1..75: mol_type = other DNA
aaatgggcacaggaacaacttttaaagaaatttctggtagttctgcgaaaacattaccatttgttcttgtaccgt

SEQ ID NO: 9969 - DNA, 75 bp, synthetic construct
  source 1..75: mol_type = other DNA
ccttcgggaagccgaaggctgggaatggtgcgccggacgcatggagcctgtcggtgagtgccgtgaggatgccgg

SEQ ID NO: 9970 - DNA, 75 bp, synthetic construct
  source 1..75: mol_type = other DNA
gcagaacgctcaggcgcaaccgaagcctcagcagaatgggcagccacagagtgctgacgcgacgaaaaaaggtgg

SEQ ID NO: 9971 - DNA, 75 bp, synthetic construct
  source 1..75: mol_type = other DNA
ttttcagaagccggttatgttctgccggggcaatatcttctggatgtgattgttaacgggcaaagtatttctccc

SEQ ID NO: 9972 - DNA, 75 bp, synthetic construct
  source 1..75: mol_type = other DNA
atgcgtgattttcagaatgccttcgatgctgccctcgccggggtggacagcacgattgttgaagtgatgggactc

SEQ ID NO: 9973 - DNA, 75 bp, synthetic construct
  source 1..75: mol_type = other DNA
aatacccggaactggcaaaggcttatccgacaaataaattgcctgatttacgtggtgagtttattcgtggctggg

SEQ ID NO: 9974 - DNA, 75 bp, synthetic construct
  source 1..75: mol_type = other DNA
tggtaccgtcagcatcatgctgacagcaactggtatgaaaacgtgtatgaggacttcagggaggtctgtggcatt

SEQ ID NO: 9975 - DNA, 75 bp, synthetic construct
  source 1..75: mol_type = other DNA
atgactgaatccgaaatactgcgattaatccgccgtgcttgtggaatcagcaagcagcatgacgaacaggccacg

SEQ ID NO: 9976 - DNA, 75 bp, synthetic construct
  source 1..75: mol_type = other DNA
actttctccggggattatcttcgcgtaactgacaacaaggggaaaacgcacgatgtgctgaccggaagtgatgac

SEQ ID NO: 9977 - DNA, 75 bp, synthetic construct
  source 1..75: mol_type = other DNA
ttcatctgcgatgtggaaacggattttggtaaaaagaaagggcagtccggcctgtattttctggcgacagactgt

SEQ ID NO: 9978 - DNA, 75 bp, synthetic construct
  source 1..75: mol_type = other DNA
aagcgtatgcggcagcgcgtctggataaaatccgccgccagaaccggataaaggcagaacttcaggccgtgcttg

SEQ ID NO: 9979 - DNA, 75 bp, synthetic construct
  source 1..75: mol_type = other DNA
tcaagaatagccgcgaaacgttgtcattacaacacaggcggctatatgacgctcgcagagctgggcatggccttc

SEQ ID NO: 9980 - DNA, 75 bp, synthetic construct
  source 1..75: mol_type = other DNA
tcccgactgtccgtggcagcatattgtgttcacacttccctgccagtactggtccctggtgttccacaaccggtg

SEQ ID NO: 9981 - DNA, 75 bp, synthetic construct
  source 1..75: mol_type = other DNA
tggtgcagtgccctgggagtggatgtcgggtgccatgccacgctggtgcattttccggcctggccggcggtgtgg

SEQ ID NO: 9982 - DNA, 75 bp, synthetic construct
  source 1..75: mol_type = other DNA
ggctggtgaaagatgtggatgattttgtcgctgtagcgatcgcctggggcaccctgactaacagtggtggtcagc

SEQ ID NO: 9983 - DNA, 75 bp, synthetic construct
  source 1..75: mol_type = other DNA
gagcccccagctacttcctgtgactctcgatgcagctgccgaacagccagaatcgctcgcagaggacccggaaac

SEQ ID NO: 9984 - DNA, 75 bp, synthetic construct
  source 1..75: mol_type = other DNA
atttacctggaatgtgggcattactcactgaccagcgctgcgccgtcagggaaggaaggtaccgcattcatggcg

SEQ ID NO: 9985 - DNA, 75 bp, synthetic construct
  source 1..75: mol_type = other DNA
gcagagctggcggcgaagaaagcacaggccagacaggcgctgtccatttatctgacgctgccctcgctggatgag

SEQ ID NO: 9986 - DNA, 75 bp, synthetic construct
  source 1..75: mol_type = other DNA
acactggagcgtcttctgagcctgctgtcggcctttgaggtcgtggtatgggacggatggctggccgctgtatga

SEQ ID NO: 9987 - DNA, 75 bp, synthetic construct
  source 1..75: mol_type = other DNA
aggttcggcattacccgttggcgtgcctgttccgtggccttccgccactccgccaacaggctggctgaaatgcaa

SEQ ID NO: 9988 - DNA, 75 bp, synthetic construct
  source 1..75: mol_type = other DNA
atggacgttgagtacggtcagtacagcgtcattctgttggtggagggcttcccgccgtcacatgccgggaccatc

SEQ ID NO: 9989 - DNA, 75 bp, synthetic construct
  source 1..75: mol_type = other DNA
ggctgttctgtctcttgaagaacatcataaagcctggttgttgtggtgttacagcgggagtatttgttgggaata

SEQ ID NO: 9990 - DNA, 75 bp, synthetic construct
  source 1..75: mol_type = other DNA
ctgcagggagaagcacgacagcagaaacgtggtctgtgggcagacagcgctcctgttccgccctgggtatggcgc

SEQ ID NO: 9991 - DNA, 75 bp, synthetic construct
  source 1..75: mol_type = other DNA
attgagcaggctggatccctgcgtggtctgtcgctgtctgatgtgctgaatctgaaagcggataccatgtttacg

SEQ ID NO: 9992 - DNA, 75 bp, synthetic construct
  source 1..75: mol_type = other DNA
gagactcagatggagcgtaaagagtctgcatttaatcagactgagtttaataaattgcttcttgaatgcgttgta

SEQ ID NO: 9993 - DNA, 75 bp, synthetic construct
  source 1..75: mol_type = other DNA
tgaactggaattacaaaaccaattgcccctgtaaatttggcagtaaaattatcgtcaacaatctggtgagatggg

SEQ ID NO: 9994 - DNA, 75 bp, synthetic construct
  source 1..75: mol_type = other DNA
aaggcaccaacaacggacgtgatgttcgccatgaaaacggtgacggctggggtctttccacaacatatgatttag

SEQ ID NO: 9995 - DNA, 75 bp, synthetic construct
  source 1..75: mol_type = other DNA
atggcaaaagtatttacaccagaagagcgagaaaaaattaaaggacaggttgttgaacttgtacctctgagcggt

SEQ ID NO: 9996 - DNA, 75 bp, synthetic construct
  source 1..75: mol_type = other DNA
gcatggcgatgaatgcgtggctgctttatccgagggtagggcgcaaaaaaatcgctgatgatatagcgacagcat

SEQ ID NO: 9997 - DNA, 75 bp, synthetic construct
  source 1..75: mol_type = other DNA
caacgccaaaagccgttaaggccgcgtatgacctggctaacgggaaatacaccgcacaggatgcaacgacagcac

SEQ ID NO: 9998 - DNA, 75 bp, synthetic construct
  source 1..75: mol_type = other DNA
ctcaaaaagcgcggcagctaccagtgccgctgcggcgaaaacgtcagaaacgaatgcggcagcgtcacaacaatc

SEQ ID NO: 9999 - DNA, 75 bp, synthetic construct
  source 1..75: mol_type = other DNA
tccggaccttatctggtcattacctgacggagaaatacgtcgctacgacagtcgtctaaacataatctgtcgcga

SEQ ID NO: 10000 - DNA, 75 bp, synthetic construct
  source 1..75: mol_type = other DNA
cggatttcaccaccgttaaccagaaaggcaaactgcaggtgaacgccggtggtacagccacgaatgtcaccctga

SEQ ID NO: 10001 - DNA, 75 bp, synthetic construct
  source 1..75: mol_type = other DNA
tgctggtaagctcacaaagtttcaacaacgcttccgggaaactgctggcgttagatagccagttaaccaatgatt

SEQ ID NO: 10002 - DNA, 75 bp, synthetic construct
  source 1..75: mol_type = other DNA
gggcggcagtgacgaactgaccaatctcgagttgttacatccgaactgccaccgacagttacacagcagggaagc

SEQ ID NO: 10003 - DNA, 75 bp, synthetic construct
  source 1..75: mol_type = other DNA
gtgcgggtattacttcgacctgttccggtaccggaacttgggctggtggtccttaagccgggccgtgaatccatg

SEQ ID NO: 10004 - DNA, 75 bp, synthetic construct
  source 1..75: mol_type = other DNA
tcatttttaatgatgccacgactgcggcaattaagaatcagctttgtggtaaatggcgttcagtgggtattatgt

SEQ ID NO: 10005 - DNA, 75 bp, synthetic construct
  source 1..75: mol_type = other DNA
ccataattttagaggcgcagaatgtgtggataacctacaaaggaaagctaccgggaagaattactggttctctga

SEQ ID NO: 10006 - DNA, 75 bp, synthetic construct
  source 1..75: mol_type = other DNA
gcgcaggctgtgatggtggcttacgcgatgggcagcgatcttgaccagctcgctgccaactacaacgtgaaacgc

SEQ ID NO: 10007 - DNA, 75 bp, synthetic construct
  source 1..75: mol_type = other DNA
atgatcatttgcgggtgcatggcccgtctgaaaaagaacaacagcgatttgcacgatttattagtagattattat

SEQ ID NO: 10008 - DNA, 75 bp, synthetic construct
  source 1..75: mol_type = other DNA
gtacttttaccccggcccggaatccgaacctattctggccgcggctgaatcgtcgttcaggaagtggctggctga

SEQ ID NO: 10009 - DNA, 75 bp, synthetic construct
  source 1..75: mol_type = other DNA
cgatatcctccgggctcgccgggcaacaggcctgatgacccgcgacaattacagaacggtaaataacattaccct

SEQ ID NO: 10010 - DNA, 75 bp, synthetic construct
  source 1..75: mol_type = other DNA
gggagtaacagtaatgcggcgggcgcgaaagctattgcgctaggaaatgcagctaaagctactgaaattatgagc

SEQ ID NO: 10011 - DNA, 75 bp, synthetic construct
  source 1..75: mol_type = other DNA
gcatgagcaacggcaccggtgtagtagaaacgaacaatacagcagccagagcagaaattgaacatttaatgaatg

SEQ ID NO: 10012 - DNA, 75 bp, synthetic construct
  source 1..75: mol_type = other DNA
gtaccgtaacaccacgcttcactgctcgactggtacaggaaagacataacctgcattacctggctgatcgggccg

SEQ ID NO: 10013 - DNA, 75 bp, synthetic construct
  source 1..75: mol_type = other DNA
tcagtgccggaggcggacagagccttcagggacgggcagtgaacaccacgctgaatggtggcgaacagtggatgc

SEQ ID NO: 10014 - DNA, 75 bp, synthetic construct
  source 1..75: mol_type = other DNA
gtggtgaccacgaccgtggaggtgcacgataacctgacgggaacaacccgcaaagtaccggcataccatctctga

SEQ ID NO: 10015 - DNA, 75 bp, synthetic construct
  source 1..75: mol_type = other DNA
gcatcaatgactgaaaacggtcatcgtcgggatatgcaccctgccgaacagattgccggattccgtgcaatggcg

SEQ ID NO: 10016 - DNA, 75 bp, synthetic construct
  source 1..75: mol_type = other DNA
ggatcctgacgcagcttaatcgaggagaaggccgccacgctgtggctcgtgcgatttgttacggacaacgcggag

SEQ ID NO: 10017 - DNA, 75 bp, synthetic construct
  source 1..75: mol_type = other DNA
tattcagtcggcagtgctacgcgccaggggagcagttcgccgacccggtttatcggccagtcggctatgacgtca

SEQ ID NO: 10018 - DNA, 75 bp, synthetic construct
  source 1..75: mol_type = other DNA
cccttaccttgtgaattttgcctttgctgattattccaggtctgcggcaagtaaggctcgctgtgagcattgtgc

SEQ ID NO: 10019 - DNA, 75 bp, synthetic construct
  source 1..75: mol_type = other DNA
tggtgcgccggacgcatggagcctgtcggtgagtgccgtgaggatgccggaacataccgctgtctgccggagccg

SEQ ID NO: 10020 - DNA, 75 bp, synthetic construct
  source 1..75: mol_type = other DNA
ctgagtggcagaacacagctcagtaaaggcgccagcatggtactgaatggtgatgtggtcagtaccggcgatatt

SEQ ID NO: 10021 - DNA, 75 bp, synthetic construct
  source 1..75: mol_type = other DNA
gaaaaagtatcgggtgttgctgaaccgtgttgatacgtcaactgcacaggatattgaatggccagcactgccgta

SEQ ID NO: 10022 - DNA, 75 bp, synthetic construct
  source 1..75: mol_type = other DNA
atgcgtacacgaattgactatctggcggataaatactcttttaccgaacggaatgaatctccacgccttcgccgg

SEQ ID NO: 10023 - DNA, 75 bp, synthetic construct
  source 1..75: mol_type = other DNA
tagctctattaacatttccagtggtcgtgcaacagttatactttcagatgctaatcaagttaacccagataaaat

SEQ ID NO: 10024 - DNA, 75 bp, synthetic construct
  source 1..75: mol_type = other DNA
cagccgtaccgcgattaacaacatcaaaaaattctggtcgctgaccgcgaaaggctgcatgttcggcaagaacat

SEQ ID NO: 10025 - DNA, 75 bp, synthetic construct
  source 1..75: mol_type = other DNA
tgaattcaacataggggctgtcaccatgactactctcccaacccaatctcaccctgaaatcacgattatcaatgg

SEQ ID NO: 10026 - DNA, 75 bp, synthetic construct
  source 1..75: mol_type = other DNA
tcatgctcaatatattgataaacgccgtgatatgatgcagtggtattcagattatatttttattaaggagaatgt

SEQ ID NO: 10027 - DNA, 75 bp, synthetic construct
  source 1..75: mol_type = other DNA
gtgccggatatgaccggtgtggtggatacgacctttgatgacaaggtgcgtcagcatgccaccaccgagatgcag

SEQ ID NO: 10028 - DNA, 75 bp, synthetic construct
  source 1..75: mol_type = other DNA
gtgatccgtactttcgatatggtaaccagcgcaccggaaaaattatccgggcaggctgctgacaagatgcaggct

SEQ ID NO: 10029 - DNA, 75 bp, synthetic construct
  source 1..75: mol_type = other DNA
aagtataattacggacccaaatgttaattactataaaggaaatttgtacagtgataaatttgacatttattttca

SEQ ID NO: 10030 - DNA, 75 bp, synthetic construct
  source 1..75: mol_type = other DNA
cagattgtcaaaaacgggggtgtggccgggaataccaccgttaatcagaagggcagactgcaggtggacgccggt

SEQ ID NO: 10031 - DNA, 75 bp, synthetic construct
  source 1..75: mol_type = other DNA
cccctgcctggtgtacgaaccgtgccgaactctggaatgccgttgagaaggccgaacgccggaagaactcacaac

SEQ ID NO: 10032 - DNA, 75 bp, synthetic construct
  source 1..75: mol_type = other DNA
aattcattgaagcccatccggggtgtacttccggagacattgcggatgcttttgcaggttactcacggcagcgcg

SEQ ID NO: 10033 - DNA, 75 bp, synthetic construct
  source 1..75: mol_type = other DNA
accaacaccattccgttccaggcgcgttattttgcaaccggtgccgcaaccccgggtgctgctaatgcggatgcg

SEQ ID NO: 10034 - DNA, 75 bp, synthetic construct
  source 1..75: mol_type = other DNA
ctcccgttttgatttcgccattcatgtggcgcatgcccgttcgcgtggtctgcgtcgacgcatgccaccggtgct

SEQ ID NO: 10035 - DNA, 75 bp, synthetic construct
  source 1..75: mol_type = other DNA
ggtcagcatcgttatcagcgggcatttatccagcgattaaataatgggcgctggcatgttatgcaacgtcttccc

SEQ ID NO: 10036 - DNA, 75 bp, synthetic construct
  source 1..75: mol_type = other DNA
acctgcaaaaacgcaggaaactgtcctgtctgccctgctggcgcagacggaggaagtgagcgtgccgctggcctc

SEQ ID NO: 10037 - DNA, 75 bp, synthetic construct
  source 1..75: mol_type = other DNA
ttattccgggcatagcggcgattattcaaccggggcagcacaggtgatcatgccgcatgtggtcggttctgtaga

SEQ ID NO: 10038 - DNA, 75 bp, synthetic construct
  source 1..75: mol_type = other DNA
cagttataaaggtcagcctgtcacccggcttgctgttatgctgaatttactggtttttattcgctccagtgaact

SEQ ID NO: 10039 - DNA, 75 bp, synthetic construct
  source 1..75: mol_type = other DNA
gcagaagctcgcgcaacccgatgacttcgatttcctgcatcgcatcggcgagagctacgccaccctgcgccgcta

SEQ ID NO: 10040 - DNA, 75 bp, synthetic construct
  source 1..75: mol_type = other DNA
tctgcgagatccatgttgctaaatatgctgaaatattcggattgacctctgcggaagccagtaaggatatacggc

SEQ ID NO: 10041 - DNA, 75 bp, synthetic construct
  source 1..75: mol_type = other DNA
accgagtggatgctctatgcgcagaaagtcgaatccacagacacctccagcctgccagtaacatttcccgaacaa

SEQ ID NO: 10042 - DNA, 75 bp, synthetic construct
  source 1..75: mol_type = other DNA
gtcggtggtactggcgacccgtaaatacgtggatgatgaagtcctggaattaaggctgtatgtggatgaccagat

SEQ ID NO: 10043 - DNA, 75 bp, synthetic construct
  source 1..75: mol_type = other DNA
ctctacttgccgagcggattgagcaagggctgtatcgtcacggggagaaattgccgtcggtgcgcagcttaagtc

SEQ ID NO: 10044 - DNA, 75 bp, synthetic construct
  source 1..75: mol_type = other DNA
tgtggttcagcgctctccattaaggcgaggcatggcaacatactggcttctgaaaggagagaagcaggcggggca

SEQ ID NO: 10045 - DNA, 75 bp, synthetic construct
  source 1..75: mol_type = other DNA
atgagtaataaatattgccaggcgctggtggaactgcggaacaaaccagcccatgaactgaaggaagtgggcgat

SEQ ID NO: 10046 - DNA, 75 bp, synthetic construct
  source 1..75: mol_type = other DNA
aatggaccattacgactctgacgcataccgtcagcccggataacggttttacgaccagtttggagcttgaagtga

SEQ ID NO: 10047 - DNA, 75 bp, synthetic construct
  source 1..75: mol_type = other DNA
aactctgtgggtgatggtgtgaattttgttgctgtcagaccgcgaaatattgcatttaactttctggtgagggct

SEQ ID NO: 10048 - DNA, 75 bp, synthetic construct
  source 1..75: mol_type = other DNA
acctgaccgaaataaaacaagcggtcaacagactacattctgagttgggaatgggatttgaagagcggcgggtat

SEQ ID NO: 10049 - DNA, 75 bp, synthetic construct
  source 1..75: mol_type = other DNA
aataataccacgcagcttgcgaccaccgcatttgttcaggcggcactgacggctcttattaatggtgcgccagcc

SEQ ID NO: 10050 - DNA, 75 bp, synthetic construct
  source 1..75: mol_type = other DNA
ctgatcaaaattattatctgcctaaagaatcttcatatggtgagggagaatggaaaacgctgccattccagatcg

SEQ ID NO: 10051 - DNA, 75 bp, synthetic construct
  source 1..75: mol_type = other DNA
atcatgcacgaaagactcgtagttgcagcccggaaaaaactgccaggacacgacagcagatagcccgggcagcac

SEQ ID NO: 10052 - DNA, 75 bp, synthetic construct
  source 1..75: mol_type = other DNA
cgtgcgaaaacctccaaccgtagtgaaaacccgctgctgcaggatgtgaacaaaggctggctgcagaaaatccgt

SEQ ID NO: 10053 - DNA, 75 bp, synthetic construct
  source 1..75: mol_type = other DNA
cgtcccggaatgcgtcacccgccgtcaggcggtgattaatcaggcccgcaccctgctgaaaaacaacacacacga

SEQ ID NO: 10054 - DNA, 75 bp, synthetic construct
  source 1..75: mol_type = other DNA
taagtaagagaggtgccggacgcgcgaacgtccggcaggacataagcaattataaggggatgattatgcctgtaa

SEQ ID NO: 10055 - DNA, 75 bp, synthetic construct
  source 1..75: mol_type = other DNA
ctatgtcgattccctgagcacagaaaacggcccggtaccgacgtatatcgaccttcttaaggttactaccagtac

SEQ ID NO: 10056 - DNA, 75 bp, synthetic construct
  source 1..75: mol_type = other DNA
ctctgcatagcggaataccggaactggtggaggccgataaatccggctggctggtgcctgagaacgatgctcgcg

SEQ ID NO: 10057 - DNA, 75 bp, synthetic construct
  source 1..75: mol_type = other DNA
gtcctggcgcgcctggaggacatcccggaagaccagcggactgaatccggtatttcttccggtgcggcgatggag

SEQ ID NO: 10058 - DNA, 75 bp, synthetic construct
  source 1..75: mol_type = other DNA
agtggggcgagcgttttccgtcactggccggaatggaacgctggcagtggcaggatatgccattctggcaggtca

SEQ ID NO: 10059 - DNA, 75 bp, synthetic construct
  source 1..75: mol_type = other DNA
atgtcattagtgcgttctcaacaatgcacagtctggtcatcggacagatcaagacggatgagaaatctaatgaga

SEQ ID NO: 10060 - DNA, 75 bp, synthetic construct
  source 1..75: mol_type = other DNA
gctggtggtgctggtgcattgtctgactggctgttgcgccatattaaatcctgccagtggccacacggcgattat

SEQ ID NO: 10061 - DNA, 75 bp, synthetic construct
  source 1..75: mol_type = other DNA
caacgatgaactgttcgggatcatctataccgttgacgaaggcgacgactggaccgacccgcaggtacttgaaaa

SEQ ID NO: 10062 - DNA, 75 bp, synthetic construct
  source 1..75: mol_type = other DNA
gcgattggtcgttgcatgctatttgagaaagaagacacgctgtctgatcacattgagtcctacgggatccgctcg

SEQ ID NO: 10063 - DNA, 75 bp, synthetic construct
  source 1..75: mol_type = other DNA
tgcgtttaacggcgaaatctttgtgcagccggtctgggatacggaaaccacgcagttattccgtacgcgttttaa

SEQ ID NO: 10064 - DNA, 75 bp, synthetic construct
  source 1..75: mol_type = other DNA
ccatgctgagtacactctgctacgaactgatgaggaggagtgggatccatcgtccggtaaaaaagacaaacaagg

SEQ ID NO: 10065 - DNA, 75 bp, synthetic construct
  source 1..75: mol_type = other DNA
aaagtcagccagggaaaggtgccggataccgcaaacccgtcgatgccgatccagttctgcccggcacctcccccc

SEQ ID NO: 10066 - DNA, 75 bp, synthetic construct
  source 1..75: mol_type = other DNA
aaaaacgctccggcactcttatgacaagagtcgccgcaggggagcgattcatgtcattagtgcgttctcaacaat

SEQ ID NO: 10067 - DNA, 75 bp, synthetic construct
  source 1..75: mol_type = other DNA
cacaaacagccagaaaattaagcatcagtttatccactgtaaaaagacactgggataaaggtattgttgatctaa

SEQ ID NO: 10068 - DNA, 75 bp, synthetic construct
  source 1..75: mol_type = other DNA
tgatggttctcgatcgtcgcccggaccttgcgccacctcttgggcgcgccgaacgtcaacagtttcaacggctat

SEQ ID NO: 10069 - DNA, 75 bp, synthetic construct
  source 1..75: mol_type = other DNA
ataccgtcgccgttctcaacaacggagggagagcgcgaaaaatacttaccagtggaagaagccggaacggttgcg

SEQ ID NO: 10070 - DNA, 75 bp, synthetic construct
  source 1..75: mol_type = other DNA
actcaaaaagctgggcgagatgattcagcaacattgtgtttcgctgaattttagaccgtttgtcgattctgcgcc

SEQ ID NO: 10071 - DNA, 75 bp, synthetic construct
  source 1..75: mol_type = other DNA
tctaccgtgaaattatatggttctgctccggttacctgctgaaatccggaccagaggctacgaggacgattatca

SEQ ID NO: 10072 - DNA, 75 bp, synthetic construct
  source 1..75: mol_type = other DNA
atctgaagcaacgaattaatgatgagaacaaaatatcaatagtcaccgaagcaatgaatgaagcacttcgtaaac

SEQ ID NO: 10073 - DNA, 75 bp, synthetic construct
  source 1..75: mol_type = other DNA
tgtgcaggttttagtcccgacccggttaaatttatatccagagccagtactcctggcctcggcgcttcattttta

SEQ ID NO: 10074 - DNA, 75 bp, synthetic construct
  source 1..75: mol_type = other DNA
aaaacaaaagctatcaattctattacgatgaatctaataacgttcgtaaactatatctatccaaacaaattgatg

SEQ ID NO: 10075 - DNA, 75 bp, synthetic construct
  source 1..75: mol_type = other DNA
acttccggcagacggaacgcaggtgtctttcccgtatgccggtgagtggctggcagaggacgaaatcagggccgt

SEQ ID NO: 10076 - DNA, 75 bp, synthetic construct
  source 1..75: mol_type = other DNA
ggaactggcaaaggcttatccgacaaataaattgcctgatttacgtggtgagtttattcgtggctgggatgacgg

SEQ ID NO: 10077 - DNA, 75 bp, synthetic construct
  source 1..75: mol_type = other DNA
atgaacgcacgttcacaggcactggttcctctcagcacagagcaacaggccgcatggcgggcggtggcggagacg

SEQ ID NO: 10078 - DNA, 75 bp, synthetic construct
  source 1..75: mol_type = other DNA
attttcaaatggctcagactctggcaaaacgaagggcgtatatcacggcgtattccggtgacaaccacttctgac

SEQ ID NO: 10079 - DNA, 75 bp, synthetic construct
  source 1..75: mol_type = other DNA
acccgtcgctggcccgcgacattatcgaaggtatccgcgccaaaatgcgcaacctggtcagtcagggctatctca

SEQ ID NO: 10080 - DNA, 75 bp, synthetic construct
  source 1..75: mol_type = other DNA
gacggacacgatggcagaagcgcacatgtgggcggtggataaaccgctgaatccgtcgctggcccgcgacattat

SEQ ID NO: 10081 - DNA, 75 bp, synthetic construct
  source 1..75: mol_type = other DNA
gctctttactcgttcgtttacaacgtgggcgctggcaatttcagaacatcgacgcttcttcgcaaaataaaccag

SEQ ID NO: 10082 - DNA, 75 bp, synthetic construct
  source 1..75: mol_type = other DNA
gccgggagctggcagcaaagtatccgggagacacgccactgatgctggttatctggtccccggaagaaattcagg

SEQ ID NO: 10083 - DNA, 75 bp, synthetic construct
  source 1..75: mol_type = other DNA
atgaccagatggtcgacatggcgtttatcactcaactgactggcctgaccgataagtggttttacaaactcatca

SEQ ID NO: 10084 - DNA, 75 bp, synthetic construct
  source 1..75: mol_type = other DNA
aaatcagtggtactaagtccgacagaccggggcttaaaaaactgctcaggacactatcggcaggtgacacactgg

SEQ ID NO: 10085 - DNA, 75 bp, synthetic construct
  source 1..75: mol_type = other DNA
atctgttggcatttactaccgctgcgcgttttggcagcttcagtaaagccgcagaagagttgggtttaaccactt

SEQ ID NO: 10086 - DNA, 75 bp, synthetic construct
  source 1..75: mol_type = other DNA
tgctcatatctttctgatgaacaattcagcgaagcgccgcaggttatcgatgccctgaaatcagtctttcctcag

SEQ ID NO: 10087 - DNA, 75 bp, synthetic construct
  source 1..75: mol_type = other DNA
ccacaccttctgtttccgtaaccgctgcatcagggaataacccacctcagctggttgccactcccgtccctgatg

SEQ ID NO: 10088 - DNA, 75 bp, synthetic construct
  source 1..75: mol_type = other DNA
tccgggtgctgtatctgaacaaccagaataagctgattgccggtgaaaccctcttcaccggcaccatcaaccgca

SEQ ID NO: 10089 - DNA, 75 bp, synthetic construct
  source 1..75: mol_type = other DNA
gctggagcgaagccgaaaacctgcagagtcatcaggtatcaaaataccgtatcacttataccaagaccaaaggca

SEQ ID NO: 10090 - DNA, 75 bp, synthetic construct
  source 1..75: mol_type = other DNA
gtttacggtgcgcagggggtcaaagtgccactgaatgatgcgcttcttcagtgggagaaggagcagacagaaggc

SEQ ID NO: 10091 - DNA, 75 bp, synthetic construct
  source 1..75: mol_type = other DNA
gcggcgctatctgaatgctgagcgtgaaaatattgccgcagggcttaccatgccggagcagaaaaatacgcaact

SEQ ID NO: 10092 - DNA, 75 bp, synthetic construct
  source 1..75: mol_type = other DNA
gggaattatcgctggctgaattatcctggtgggcggtccgcaatcaggtggcggacgcgctaccggaagcggtat

SEQ ID NO: 10093 - DNA, 75 bp, synthetic construct
  source 1..75: mol_type = other DNA
gcgtaatctgccgtccggggtcgttcctgccgttcgccagccgctggtggaagacaaaacattgctgccgttttt

SEQ ID NO: 10094 - DNA, 75 bp, synthetic construct
  source 1..75: mol_type = other DNA
agctgacgcaggtgatgatttcatctgccccggcgactgctgaaactatggataaggcggaatatctgcgcctgg

SEQ ID NO: 10095 - DNA, 75 bp, synthetic construct
  source 1..75: mol_type = other DNA
atggcaaaagtatttacaccagaagagcgggaaaaaattaaagggcaggttgttgaacttgtacgtctgagcggt

SEQ ID NO: 10096 - DNA, 75 bp, synthetic construct
  source 1..75: mol_type = other DNA
cttacccgtcttttatatacccggagctggataagcaacgaacgtcctggcctgcttttcgatctggcgacaggg

SEQ ID NO: 10097 - DNA, 75 bp, synthetic construct
  source 1..75: mol_type = other DNA
agtgaccttgtgccttcggttcctgccaccagcatcatccaggataaggcgaaaaaggtgctggcgctgaaagtg

SEQ ID NO: 10098 - DNA, 75 bp, synthetic construct
  source 1..75: mol_type = other DNA
attactgatatgcaggtgcgccagcgcgatgttgctgcgctcgatgcaaaatactcgagggaattagccgatgcg

SEQ ID NO: 10099 - DNA, 75 bp, synthetic construct
  source 1..75: mol_type = other DNA
caccgctatacctgttaatttcactatttttacccacgatggccatggctatcgatccacctgaacgcgaacttt

SEQ ID NO: 10100 - DNA, 75 bp, synthetic construct
  source 1..75: mol_type = other DNA
cgggtacggtcagccagccggggcgcaatgtccgggcaaaatcaggtttaaaccgttcgatactggatcagggct

SEQ ID NO: 10101 - DNA, 75 bp, synthetic construct
  source 1..75: mol_type = other DNA
acaatgggttaccgccgccagaaaagggctcggtactcctggttcccgcacggtggctgaactggaatctgaaat

SEQ ID NO: 10102 - DNA, 75 bp, synthetic construct
  source 1..75: mol_type = other DNA
taaatcagcgaatcgaagctatgttaaaatctgatggttttaataacgtagaaacgctgatgctaaaaagatatc

SEQ ID NO: 10103 - DNA, 75 bp, synthetic construct
  source 1..75: mol_type = other DNA
cttacagaaaaggatgcaggaattaaataaatggcttgaagataatatattacaattcaaaccatataaatttta

SEQ ID NO: 10104 - DNA, 75 bp, synthetic construct
  source 1..75: mol_type = other DNA
gcagcgttttgaaaacgcctcaaaggaaagtaccgaatttacgaaaagaattaacgtgatcggcgtgaccgacca

SEQ ID NO: 10105 - DNA, 75 bp, synthetic construct
  source 1..75: mol_type = other DNA
ccgtgatacacggtgtgactgcggtctggcgtgccggggagcaggagcagacaccaccggaaggctttgagtcct

SEQ ID NO: 10106 - DNA, 75 bp, synthetic construct
  source 1..75: mol_type = other DNA
ctggttgcgtgaaaagatgaagaccctgttcttcggctctggccatggtggtgagcggggagcgctactgtacag

SEQ ID NO: 10107 - DNA, 75 bp, synthetic construct
  source 1..75: mol_type = other DNA
ccggtctgggcactgtgcaatgacacggcctgttctgcagccatgctgctggcgtcggcctgctcccgacggctg

SEQ ID NO: 10108 - DNA, 75 bp, synthetic construct
  source 1..75: mol_type = other DNA
tgcaacaacgacccgtaaagggatcgtacaactgagcagtgccaccaacagcacctctgaaacgctggccgccac

SEQ ID NO: 10109 - DNA, 75 bp, synthetic construct
  source 1..75: mol_type = other DNA
ccccttttaacgtgtctgacagaacaggaacaaagcaaattggtcgctcttgccgaacgttttttacagcaaaaa

SEQ ID NO: 10110 - DNA, 75 bp, synthetic construct
  source 1..75: mol_type = other DNA
cgttttatgccagctgtgagacggtgtttcgccctgatttatggggtaaaccggtggttgtgctatcgaataatg

SEQ ID NO: 10111 - DNA, 75 bp, synthetic construct
  source 1..75: mol_type = other DNA
ccaaaacggtaattcgcattcgcaaaggtagctctaacggtgtggaactaaccggactgcaactggatgaagaaa

SEQ ID NO: 10112 - DNA, 75 bp, synthetic construct
  source 1..75: mol_type = other DNA
aagagcaaaaaattagtcaggcaacattggatgcacttgaggctgaactgtaccgcaatcttcaacctatttacc

SEQ ID NO: 10113 - DNA, 75 bp, synthetic construct
  source 1..75: mol_type = other DNA
gccgtccggcatcctgaaagacgccactaccgtcagcctgttcctgaaagccacagataccgaggataatcacaa

SEQ ID NO: 10114 - DNA, 75 bp, synthetic construct
  source 1..75: mol_type = other DNA
ggcgctggctggaagagtttttatcgtggcatggtggttaccgtgcctttttgtggcgaccgccgaaacataacc

SEQ ID NO: 10115 - DNA, 75 bp, synthetic construct
  source 1..75: mol_type = other DNA
ctggatacactgaatgaactggcggcggcgctggggaatgaccctaacttttcaacaacagtgcttaatgcactg

SEQ ID NO: 10116 - DNA, 75 bp, synthetic construct
  source 1..75: mol_type = other DNA
ggtaacgagaaaagacctctgtgaggttcacatccgaactggccagacggaggttgctgttttcacggcttacga

SEQ ID NO: 10117 - DNA, 75 bp, synthetic construct
  source 1..75: mol_type = other DNA
gtgggatgccctctgttattacagtgatgacggtctggcggaggcggataataatgctgcggaaagagcgcttcg

SEQ ID NO: 10118 - DNA, 75 bp, synthetic construct
  source 1..75: mol_type = other DNA
tgaagaagcaactccggaaaacgtagaaatgctctctggctatgtttcaacgtacaaattaaccgatagcgagcg

SEQ ID NO: 10119 - DNA, 75 bp, synthetic construct
  source 1..75: mol_type = other DNA
tacagtgggcgggaagacgatcctcaggttccccgccagttgcgacagtcgcgccatcgtcgtccgttaccggca

SEQ ID NO: 10120 - DNA, 75 bp, synthetic construct
  source 1..75: mol_type = other DNA
atgctgaacacatgtagagtgcctcttactgaccgtaaggtcaaggagaagagagcaatgaagcagcataaggcg

SEQ ID NO: 10121 - DNA, 75 bp, synthetic construct
  source 1..75: mol_type = other DNA
ctggcaccgggccatgcctacgggatgtttatggaacgttttaacgagttatcggagttacgcaaatgcgcatga

SEQ ID NO: 10122 - DNA, 75 bp, synthetic construct
  source 1..75: mol_type = other DNA
tccccctcagcgcagaacaacaggccgccatgcaggctgtggctgtcaccgaacaacgtcgtcgtcagggacgca

SEQ ID NO: 10123 - DNA, 75 bp, synthetic construct
  source 1..75: mol_type = other DNA
cgtgcgaaaaaccggcagaaatgctgcagcagataatcagcgcaagcagtcgtccgggtgacctggttgcagatt

SEQ ID NO: 10124 - DNA, 75 bp, synthetic construct
  source 1..75: mol_type = other DNA
tgaaacttttgttcgttcgattgcaacgccaaaagagtcaaatccggttcagccacatccaatgaaatcaggaca

SEQ ID NO: 10125 - DNA, 75 bp, synthetic construct
  source 1..75: mol_type = other DNA
cgtactccagctgtaatcaaaaaagcaatggatgagcaaggtaaatccctcgacgatttcctgatcaagcaataa

SEQ ID NO: 10126 - DNA, 75 bp, synthetic construct
  source 1..75: mol_type = other DNA
gtgtggccttcacctccacccgtgcagcacgggaatggctgattctgaacatggcgggactggagcgtgaagagt

SEQ ID NO: 10127 - DNA, 75 bp, synthetic construct
  source 1..75: mol_type = other DNA
gccttactcgctttcccgtcacatcctggaacatctgcgcaaactcaccagtcacgaacccgtgattggcattat

SEQ ID NO: 10128 - DNA, 75 bp, synthetic construct
  source 1..75: mol_type = other DNA
acatgaacgcgcaaatagcgactgcggtcgagcagcagggagcagtaagtgaagacataaaccgcagtattatca

SEQ ID NO: 10129 - DNA, 75 bp, synthetic construct
  source 1..75: mol_type = other DNA
ccgttttgctgaaggaacgctgaagtatggtctgccggcaggctggacggtgtatggaggagcctggatagctga

SEQ ID NO: 10130 - DNA, 75 bp, synthetic construct
  source 1..75: mol_type = other DNA
aggccggtaaaaaaggcacgctggcggcgtcgttgcaggccatcgctgaccagtcaaaaccggtcaccgttgtcg

SEQ ID NO: 10131 - DNA, 75 bp, synthetic construct
  source 1..75: mol_type = other DNA
cagcttgaacagtatgaaatatttgattatccgggaaggtacaaggatgaacagcacggcaaggatttcacgctg

SEQ ID NO: 10132 - DNA, 75 bp, synthetic construct
  source 1..75: mol_type = other DNA
tgattaataacgtcgctgaaaacggttattcactccgtgtggtggaggaatccgaccaacagtcaacctgcacac

SEQ ID NO: 10133 - DNA, 75 bp, synthetic construct
  source 1..75: mol_type = other DNA
gtgacgccctgtttcggggcacgtctggtgcaggagggtaaccggttgcattaccttgcagaccgcgccggtatc

SEQ ID NO: 10134 - DNA, 75 bp, synthetic construct
  source 1..75: mol_type = other DNA
gtttctatctgaagcccgccgccgtcaagaacgaaggcgaagcatgcgcctggctggacagccttacaccagaag

SEQ ID NO: 10135 - DNA, 75 bp, synthetic construct
  source 1..75: mol_type = other DNA
gggattcagaaattcagcatcatgcctgatagaggcgaagtgttctcgtgctgacttgttggcagatagaaaaaa

SEQ ID NO: 10136 - DNA, 75 bp, synthetic construct
  source 1..75: mol_type = other DNA
gtcagcttaatgctggctttaactcatctgtgaatgacatcagctggtccctgaactacagcctgtcccggaatg

SEQ ID NO: 10137 - DNA, 75 bp, synthetic construct
  source 1..75: mol_type = other DNA
tgaaacttttgttcgttcgattgcaacaccaaaagagtcgaatccagttcagccgcatccaatgaaatcaggaca

SEQ ID NO: 10138 - DNA, 75 bp, synthetic construct
  source 1..75: mol_type = other DNA
ttgggtaacggacataacctacatcaggacccacgaaggctggctgtatcttgccgttgttgttgatctgttctc

SEQ ID NO: 10139 - DNA, 75 bp, synthetic construct
  source 1..75: mol_type = other DNA
caggaccttgaccttaatgaaggtagaataaatattcgccgactgaagaacggattttctaccgttcacccgtta

SEQ ID NO: 10140 - DNA, 75 bp, synthetic construct
  source 1..75: mol_type = other DNA
gggaatacaccctgacggtcagggcgattaacagttatggccagcagggcgaaccggccaccaccacgttcagga

SEQ ID NO: 10141 - DNA, 75 bp, synthetic construct
  source 1..75: mol_type = other DNA
cgatagaaggtccggtgaagggactgcagagtattctggtgaacaaaaccccgctgacggacacggacggtaatc

SEQ ID NO: 10142 - DNA, 75 bp, synthetic construct
  source 1..75: mol_type = other DNA
gagtcgaaaatctccgtggtctgcacctatttccggctgacgatggacggtaaggagctggtcgaaatcgacacc

SEQ ID NO: 10143 - DNA, 75 bp, synthetic construct
  source 1..75: mol_type = other DNA
atgaataccagaactctttttcccctgcttttcactgttgcatccttctccgcctccgccggtaactgggctgtc

SEQ ID NO: 10144 - DNA, 75 bp, synthetic construct
  source 1..75: mol_type = other DNA
aaatcattttacagcaagcagtattaattcctgtgatttaaagcatcacacatccgatgggaaagttgaatcaaa

SEQ ID NO: 10145 - DNA, 75 bp, synthetic construct
  source 1..75: mol_type = other DNA
agcgtctgtgtggttgcggaaagcatgatgaccgtgaacacggggagttacttacagcacagctgcgactgggac

SEQ ID NO: 10146 - DNA, 75 bp, synthetic construct
  source 1..75: mol_type = other DNA
ggaaggtttccgggaaatgacaaaggcacagtgggccgccctgccccgggactgtaaggccgtgcgcagtgtggc

SEQ ID NO: 10147 - DNA, 75 bp, synthetic construct
  source 1..75: mol_type = other DNA
catgttctatcagttcgttgattttaaggccaaagtcttcagttatatcgaccgtgtcgtgttctggaagctggc

SEQ ID NO: 10148 - DNA, 75 bp, synthetic construct
  source 1..75: mol_type = other DNA
cgaatctggcgtttttgctagatgagcataaaaaaatcgcgggtaacactaatgcaagctttgccgataagcttg

SEQ ID NO: 10149 - DNA, 75 bp, synthetic construct
  source 1..75: mol_type = other DNA
cgcttcccgacgacaataacgaccgcacctggtggggactgccctgcaccgtgacgccctgttttggtgcccgtc

SEQ ID NO: 10150 - DNA, 75 bp, synthetic construct
  source 1..75: mol_type = other DNA
gcaggcactgtagatggcaactatgtaaactatagtggttttgtctattacaacaacaccaatggtgatttcgat

SEQ ID NO: 10151 - DNA, 75 bp, synthetic construct
  source 1..75: mol_type = other DNA
atgaagctgagtatgaaatctctggcagcactgctgatgatgctgaacggggcggttatggcgtcagaaaacgtg

SEQ ID NO: 10152 - DNA, 75 bp, synthetic construct
  source 1..75: mol_type = other DNA
ggaaaccagaatcccggcaatgacgtttagtgagtgggatcaattccggtggtggttaaactacctgcaagggta

SEQ ID NO: 10153 - DNA, 75 bp, synthetic construct
  source 1..75: mol_type = other DNA
gaaagaatcccgttaccgggttaatgccatcggtattaatccggtaacgggatatggcagcggactgatgcaggt

SEQ ID NO: 10154 - DNA, 75 bp, synthetic construct
  source 1..75: mol_type = other DNA
caaaagcacaatatcagtatctcctcagaatggaaaatactctccagcctgagtcgaggatatccctgctcctgg

SEQ ID NO: 10155 - DNA, 75 bp, synthetic construct
  source 1..75: mol_type = other DNA
ctggtcgccacagactgaacatccagctatcactattcagcgtaaagaacacgatgaaagaattaagcttgagca

SEQ ID NO: 10156 - DNA, 75 bp, synthetic construct
  source 1..75: mol_type = other DNA
ttgctgattctcttgtcaaaggctgggaaaccagaatcccggcaatgacgtttagtgagtgggatcaattccggt

SEQ ID NO: 10157 - DNA, 75 bp, synthetic construct
  source 1..75: mol_type = other DNA
tgtgggcccgtcgtccgtccggcaccatccatcacagcgataaaggctctcagtatgtgtcactggcctatacgg

SEQ ID NO: 10158 - DNA, 75 bp, synthetic construct
  source 1..75: mol_type = other DNA
atgccctgttcgatacagggcgttacagacgcaaaaaaattcgttaccgcgatgaggtaaccggaaaaatgatca

SEQ ID NO: 10159 - DNA, 75 bp, synthetic construct
  source 1..75: mol_type = other DNA
tgtggcaactgacaaccaaagaactctgcggtcagggcctgctgtgcgtgactgacctcgcggtgcttgagcggt

SEQ ID NO: 10160 - DNA, 75 bp, synthetic construct
  source 1..75: mol_type = other DNA
caggttcgccgactggaggaacaaaatacgatattaaaaaaggctaccgcgctcttgatgtccgactcactgaac

SEQ ID NO: 10161 - DNA, 75 bp, synthetic construct
  source 1..75: mol_type = other DNA
aaaatcacctggccggttacagcggtgtgcttcaggccgatgcttacggtggttaccgggtgtttgtagtggtca

SEQ ID NO: 10162 - DNA, 75 bp, synthetic construct
  source 1..75: mol_type = other DNA
aggcagcagaacgcgcccaccaaatcgaagttatttgcgcactggcagaggattaccctggcatgatgaccgaca

SEQ ID NO: 10163 - DNA, 75 bp, synthetic construct
  source 1..75: mol_type = other DNA
ccatctccccgattacccataaccagattcctgttattaccaccgagcttttggcacaactttatggcaccgaaa

SEQ ID NO: 10164 - DNA, 75 bp, synthetic construct
  source 1..75: mol_type = other DNA
tatggttctggaaagtcaggatgagtatgattcacagtgggcggcaatttgttccattgccccaaaaattggctg

SEQ ID NO: 10165 - DNA, 75 bp, synthetic construct
  source 1..75: mol_type = other DNA
tctccataatttcatttagtaatatacctgtggtgactacagagcttcttgccagcttatatggcacagaaccag

SEQ ID NO: 10166 - DNA, 75 bp, synthetic construct
  source 1..75: mol_type = other DNA
cgctggcaatgtgcgaaatgccggcgctggtattgtggaaatcagccctgtccctggtgctggcgacactcccgc

SEQ ID NO: 10167 - DNA, 75 bp, synthetic construct
  source 1..75: mol_type = other DNA
gatggaatctgacaccgattatcgtctgcgtattcagcaggcgtttgaaggtttaagcgtcgccgggtcggtggg

SEQ ID NO: 10168 - DNA, 75 bp, synthetic construct
  source 1..75: mol_type = other DNA
tgccgcaaccggcgatcattgaatcgctggattatgaagtgattctggcacagacaaagacattcatgattagcg

SEQ ID NO: 10169 - DNA, 75 bp, synthetic construct
  source 1..75: mol_type = other DNA
gagctgcactgatggtcaggtatgaagatgaaaataaaacgccagtgacgcctgaacaaataattactccccgtc

SEQ ID NO: 10170 - DNA, 75 bp, synthetic construct
  source 1..75: mol_type = other DNA
atagaaacgaagaacgcacgtatctgcaagagcaacacgatttggcaataaaaaggagagatgagaaaagagaaa

SEQ ID NO: 10171 - DNA, 75 bp, synthetic construct
  source 1..75: mol_type = other DNA
attaacgtgaaataccgttatgagtttatggacgcgctggggctgattacgtccttcagttatgccaatgctgag

SEQ ID NO: 10172 - DNA, 75 bp, synthetic construct
  source 1..75: mol_type = other DNA
atggcggatatggagcgagacccaacaaaccgcctacgcccgatccaagtaaattgccggacatagcgaaacaat

SEQ ID NO: 10173 - DNA, 75 bp, synthetic construct
  source 1..75: mol_type = other DNA
ttgccctgagtcgcccgcttcaggccggcgcctttaactacaccctgaaccgtgacagcgatgaagactggtacc

SEQ ID NO: 10174 - DNA, 75 bp, synthetic construct
  source 1..75: mol_type = other DNA
agcgggaaaaaattaaagggcaggttcttgaactcgtacgccagagtgggcgcgagacgttacgacaactggaag

SEQ ID NO: 10175 - DNA, 75 bp, synthetic construct
  source 1..75: mol_type = other DNA
aagacctttgagtctatcggcaagcctctaccgaaccgtcacacattggtaatctcacgccaagctaactaccgc

SEQ ID NO: 10176 - DNA, 75 bp, synthetic construct
  source 1..75: mol_type = other DNA
ctggttacgggttattcccgtctgaacaggcgcgtaaggactggcaaaatgcccgtaaaaagctctcaagggcaa

SEQ ID NO: 10177 - DNA, 75 bp, synthetic construct
  source 1..75: mol_type = other DNA
ccggtgaaaccgacatcgccctgcccgccccgctgccgttcatcctctcccgcacctacagcagttaccggacaa

SEQ ID NO: 10178 - DNA, 75 bp, synthetic construct
  source 1..75: mol_type = other DNA
gatatccgggtgccggaccatctgatagtcggtggcagccaggttttctcctttgccgaacacggtctgctttaa

SEQ ID NO: 10179 - DNA, 75 bp, synthetic construct
  source 1..75: mol_type = other DNA
gccggataacgaggccaataccggcgggcaatgggtacaggatggcggaacagccaacaaaacgactgtcaccag

SEQ ID NO: 10180 - DNA, 75 bp, synthetic construct
  source 1..75: mol_type = other DNA
gacggagaaatacgtcgctacgacagtcgcctaaacataatctgtcgcgagtgccggaagagcgaagttatgcag

SEQ ID NO: 10181 - DNA, 75 bp, synthetic construct
  source 1..75: mol_type = other DNA
ggagttaacacaaccagcgaaggatctggtgatcagcgaaacacaggcggcgcgatgctccgccacagagattcg

SEQ ID NO: 10182 - DNA, 75 bp, synthetic construct
  source 1..75: mol_type = other DNA
cgctatccaaagtttaacagggcagggaatatctatggtaagtcgctggttaagtatctgacaatgcgtctggat

SEQ ID NO: 10183 - DNA, 75 bp, synthetic construct
  source 1..75: mol_type = other DNA
ctgactgccaccacgatgctgttctcactgggtgccagcatgatactgggcggtgtggcccagatgctggcaccg

SEQ ID NO: 10184 - DNA, 75 bp, synthetic construct
  source 1..75: mol_type = other DNA
tgtcggctgctgttctggcactgattgccgccagtgctcctgcccctgacattctcgatcagtttctggatgaaa

SEQ ID NO: 10185 - DNA, 75 bp, synthetic construct
  source 1..75: mol_type = other DNA
tcgaattattcattaaaaatccgcttgataacggacttactcgtggcgaacaaatggaactggcacgaattgcac

SEQ ID NO: 10186 - DNA, 75 bp, synthetic construct
  source 1..75: mol_type = other DNA
gtaagaattggcgcgccaactggcgtggcgtgctcggtgtgtccgggcgggatgacttcgggcaacccggtaaat

SEQ ID NO: 10187 - DNA, 75 bp, synthetic construct
  source 1..75: mol_type = other DNA
atgaatccgtctgatgccattgaggcaattgaaaaacccctttcttccctgccttactcgctttcacgtcacatc

SEQ ID NO: 10188 - DNA, 75 bp, synthetic construct
  source 1..75: mol_type = other DNA
ataacccagcgcactatgcggatgccattcgttataatgctcgaacgcctctgcaaggttctttgctgccgttaa

SEQ ID NO: 10189 - DNA, 75 bp, synthetic construct
  source 1..75: mol_type = other DNA
cagcggcggcgagcgcccgttgcaagtcgccgtgatcggcagcggtggagccgcgatggcggcagcactgaaggc

SEQ ID NO: 10190 - DNA, 75 bp, synthetic construct
  source 1..75: mol_type = other DNA
cgaagcagaatgcaaagccctcctgaataaagaccttgccacggtcgccagacaaattaacccgtacatcaaagt

SEQ ID NO: 10191 - DNA, 75 bp, synthetic construct
  source 1..75: mol_type = other DNA
ggcagaatgtaactcaaggtttattacaggtattcgccttggcggtctgtcatctgttcagacatggaatggtcc

SEQ ID NO: 10192 - DNA, 75 bp, synthetic construct
  source 1..75: mol_type = other DNA
aaccgacgggttgcctgctggagataaggctaacacacaaaatacaccggagttgattcatgaaaatcaagcatg

SEQ ID NO: 10193 - DNA, 75 bp, synthetic construct
  source 1..75: mol_type = other DNA
aaaatgcgtggcattggtgatgatgggttgccttgctgggtagatcttccgtcacctacgcataaagaacaactt

SEQ ID NO: 10194 - DNA, 75 bp, synthetic construct
  source 1..75: mol_type = other DNA
gtcattgataaactggtaacaaagtgctggcaggaagaagcattcgctgaagcacaattgagaaaggtgacgaga

SEQ ID NO: 10195 - DNA, 75 bp, synthetic construct
  source 1..75: mol_type = other DNA
tttgatgcctgtattgattcgtggaaagctgacccggaattaaataattttcgttatatgtggaacatcctgatg

SEQ ID NO: 10196 - DNA, 75 bp, synthetic construct
  source 1..75: mol_type = other DNA
atggtaaacctgtcgtcccgggcatgaagttgtcgaaggaaaaatgcgaccaggttaacgccattgaacgtgata

SEQ ID NO: 10197 - DNA, 75 bp, synthetic construct
  source 1..75: mol_type = other DNA
atgaaagacatcgatactgaaacccggaataacaccgtggcggatgatgtgacggcaggtgaggatatggctgtc

SEQ ID NO: 10198 - DNA, 75 bp, synthetic construct
  source 1..75: mol_type = other DNA
taaagcagttgtacatcacctgatcactccacaaaaaatagaaaatatatactgcccaggaaattctgaagcaga

SEQ ID NO: 10199 - DNA, 75 bp, synthetic construct
  source 1..75: mol_type = other DNA
aggcctgtggtacggggatttattgcagagcggtatgtacaaagtatgtttacaggtaccggtcagatttgctgc

SEQ ID NO: 10200 - DNA, 75 bp, synthetic construct
  source 1..75: mol_type = other DNA
attcccgtataacccagaaagattttgctgaaattgttggggtaacccaagggatggtaagccatgttattactg

SEQ ID NO: 10201 - DNA, 75 bp, synthetic construct
  source 1..75: mol_type = other DNA
tctgcgctggcggatgcaggaaatgccaataaatcagaattagaacatcagttgcaactgacaataaaagcggca

SEQ ID NO: 10202 - DNA, 75 bp, synthetic construct
  source 1..75: mol_type = other DNA
acgccaggacacggtatggggaaccgttttctgcgggccggggtggaggtcgatcgatatggccgtgccgttgcg

SEQ ID NO: 10203 - DNA, 75 bp, synthetic construct
  source 1..75: mol_type = other DNA
aatcactggcacgtggagaataagctgcactggcgtctggacgtggtaatgaatgaagacgactgcaaaataaga

SEQ ID NO: 10204 - DNA, 75 bp, synthetic construct
  source 1..75: mol_type = other DNA
gggaaatatcctttcagtaaactgtcagtgccggatgctcacccgtgtccggcgcacgcactccacctcacccgt

SEQ ID NO: 10205 - DNA, 75 bp, synthetic construct
  source 1..75: mol_type = other DNA
tattcctgttcacgataccatcgccagagttgtatcctgtatcagtcctgcaaaatttcacgagtgctttattaa

SEQ ID NO: 10206 - DNA, 75 bp, synthetic construct
  source 1..75: mol_type = other DNA
atgcaacagctttcctttctgcccggaaacatgacgcccggcgagcgcagcctcattcagcgggccctgaaaacc

SEQ ID NO: 10207 - DNA, 75 bp, synthetic construct
  source 1..75: mol_type = other DNA
atgagcgataagcagactgaaaagactattaaactggatactcccatcatgcgcggtaaaacagaaattaccgaa

SEQ ID NO: 10208 - DNA, 75 bp, synthetic construct
  source 1..75: mol_type = other DNA
cgtatccgctcaaataattgctatggtcaggtatcccgtcgtgaccaggagagcgcgctggcgtgctggggtatc

SEQ ID NO: 10209 - DNA, 75 bp, synthetic construct
  source 1..75: mol_type = other DNA
gtatatcacggcacagcaccggctggggcgcgacatccgtctgtctgccatttatgccgctttgcatgtggaagg

SEQ ID NO: 10210 - DNA, 75 bp, synthetic construct
  source 1..75: mol_type = other DNA
gggccgtgattatcgtgtgactttcgtcgacccgtatacagcgtatggtgccggattcgttcaggcgcattgtga

SEQ ID NO: 10211 - DNA, 75 bp, synthetic construct
  source 1..75: mol_type = other DNA
atgccatcagtgtgatggccacggcgctgaacagtaatgtcagaggaggcactatgccgcaattaactgcaacgg

SEQ ID NO: 10212 - DNA, 75 bp, synthetic construct
  source 1..75: mol_type = other DNA
cgccaacaacgccaactgcgcgacagggaacgaataatacccaaatcgcaagcacggctttcgttatggctgcga

SEQ ID NO: 10213 - DNA, 75 bp, synthetic construct
  source 1..75: mol_type = other DNA
ccgaactgttcccgatgtcgaaaattaacgacgccatccagcatgtgcgcgatggtaaagcgcgctaccgcgtgg

SEQ ID NO: 10214 - DNA, 75 bp, synthetic construct
  source 1..75: mol_type = other DNA
aaaaggtgcgggttactggcccggtgaatatgcagaccgtaaccgtgcagtggctaatcagcgaatgaccgggag

SEQ ID NO: 10215 - DNA, 75 bp, synthetic construct
  source 1..75: mol_type = other DNA
tgcacaacggcctgctccaaccgccggccgcgcgctgggccgaggccgtggcgcgtgtcggcgtaccggccgtcg

SEQ ID NO: 10216 - DNA, 75 bp, synthetic construct
  source 1..75: mol_type = other DNA
tcaaaaacattccgtcgtctggttgtcacactcatccggcgttatggcgtcagtctcattcacctggatgccagc

SEQ ID NO: 10217 - DNA, 75 bp, synthetic construct
  source 1..75: mol_type = other DNA
gtccggcattttaccgccagacagctcgggattcgtgatatcaccgttcttgcagaatacggtcagagggaaaat

SEQ ID NO: 10218 - DNA, 75 bp, synthetic construct
  source 1..75: mol_type = other DNA
gcgggctggtccggtatctgcgggaaaattttaacggtgtcagggttcagtgtggcgacttcatggaatggcagc

SEQ ID NO: 10219 - DNA, 75 bp, synthetic construct
  source 1..75: mol_type = other DNA
ctgccggggcatcaatggcgttatggggttcagccctggcagccggtggtttttctgccaccacgatgctgtttt

SEQ ID NO: 10220 - DNA, 75 bp, synthetic construct
  source 1..75: mol_type = other DNA
ggcgcctgaatataatctgtcgcgagtgccggaagagcgaagctatgcagcgtgtactggctttctatcagggta

SEQ ID NO: 10221 - DNA, 75 bp, synthetic construct
  source 1..75: mol_type = other DNA
gccgaccggcgaaggtgtttaaccgtcgcggtgaaaaatccacggcctccggtcgctatcagcagctttacctgt

SEQ ID NO: 10222 - DNA, 75 bp, synthetic construct
  source 1..75: mol_type = other DNA
tgatattctccgggcccgccgggcaaccggcctgatgacccgcagccactacagaacggtaaatgacattaccct

SEQ ID NO: 10223 - DNA, 75 bp, synthetic construct
  source 1..75: mol_type = other DNA
acacctggaacgacaacggcgaactcatccgcatcagcagcccgcgccagacccggagttacagctacagcacca

SEQ ID NO: 10224 - DNA, 75 bp, synthetic construct
  source 1..75: mol_type = other DNA
tctggctggcgggtttgagcgtactcggttttctggcaaccgatatgtatctgcctgctttcgccgccatacagg

SEQ ID NO: 10225 - DNA, 75 bp, synthetic construct
  source 1..75: mol_type = other DNA
acgacgaaagcgtcagaagccgccacttcagccagagatgcggcggcctccaaagaggcggcaaaatcatcagaa

SEQ ID NO: 10226 - DNA, 75 bp, synthetic construct
  source 1..75: mol_type = other DNA
atcaccactgtgctggacaaacgcctgatggggcttacgctgacggataaccggggctttgaagcggaccagctt

SEQ ID NO: 10227 - DNA, 75 bp, synthetic construct
  source 1..75: mol_type = other DNA
gcaacgccgaacgggcagcgaaaatgcagtgggaacgcctgcaacgcggcgttgcatcattctcgctacaactgg

SEQ ID NO: 10228 - DNA, 75 bp, synthetic construct
  source 1..75: mol_type = other DNA
tttgaccggcaggtcatgataccgccagtgttattccgcggtggtaagcatgagaatttcaacagtaataaccaa

SEQ ID NO: 10229 - DNA, 75 bp, synthetic construct
  source 1..75: mol_type = other DNA
gtattacgctggttgcgggaacaacatggaggagcaacaatacgatgcctgttgctgctcagccagacgagcatt

SEQ ID NO: 10230 - DNA, 75 bp, synthetic construct
  source 1..75: mol_type = other DNA
actgaatggcaaaggcaccagtacgcggcccacgctggcagtctctaacctgtacggcatggtcaccggtatggt

SEQ ID NO: 10231 - DNA, 75 bp, synthetic construct
  source 1..75: mol_type = other DNA
ccacctcacagtacctggcgtcggtgattctggagaatctgcctgagcggccctttaacatccggatggtccggg

SEQ ID NO: 10232 - DNA, 75 bp, synthetic construct
  source 1..75: mol_type = other DNA
ggccggatggtggggcaccgttatgcaggcaggccggagatgcgctaccgctacgacgatgcggggcgggtggtg

SEQ ID NO: 10233 - DNA, 75 bp, synthetic construct
  source 1..75: mol_type = other DNA
acaggcctgatgacccgcgacaattacagaacggtaaataacattaccctggggaagcatccggaggcgaaacga

SEQ ID NO: 10234 - DNA, 75 bp, synthetic construct
  source 1..75: mol_type = other DNA
gaatgaaaaaggggagccggtcacctggcaggggcgtaagtatgaggcatacccgattgacggcagcggctttga

SEQ ID NO: 10235 - DNA, 75 bp, synthetic construct
  source 1..75: mol_type = other DNA
attgacgggctcaaggaggttcaggaatcagtgatgcgcattgaggccggactgagcacgtatgagaaagagctg

SEQ ID NO: 10236 - DNA, 75 bp, synthetic construct
  source 1..75: mol_type = other DNA
aggcctttcctcagccagcaggtgctgcgttaccagtccgggaagccgcaacacaggaagaaattaaaacagaaa

SEQ ID NO: 10237 - DNA, 75 bp, synthetic construct
  source 1..75: mol_type = other DNA
atgcttcgcattaaacctctttttattctttgcgccgccttactgacggccatacccacagcgtcagcggatgtg

SEQ ID NO: 10238 - DNA, 75 bp, synthetic construct
  source 1..75: mol_type = other DNA
cggtagaactgagagatgaaaatgacaaacctgttaaggagcaaaaacagcaactgaataccgcagtcagcatcg

SEQ ID NO: 10239 - DNA, 75 bp, synthetic construct
  source 1..75: mol_type = other DNA
tggcctcagtggcgctgaccattgacaccacaacggtgatggcgacgcaggattacgttgatgacaaaattgcag

SEQ ID NO: 10240 - DNA, 75 bp, synthetic construct
  source 1..75: mol_type = other DNA
acgcttaaagaaatagctgctgcgatcaataacgacccgaatttcagcacaactatcaacaatgctctggctctt

SEQ ID NO: 10241 - DNA, 75 bp, synthetic construct
  source 1..75: mol_type = other DNA
catcacgcctgtcgtacagagaattatgccatgacggttcattattaccggctgcgggattatgccctgcagcat

SEQ ID NO: 10242 - DNA, 75 bp, synthetic construct
  source 1..75: mol_type = other DNA
caccagcttccggtagctatttacagttattgccagtatcaggacggtgcagcccccgggcgtggtgcctggacg

SEQ ID NO: 10243 - DNA, 75 bp, synthetic construct
  source 1..75: mol_type = other DNA
ggcaccagaacataatttgtcgtgagagcaggaggagcgaagttatgcagcgtgtgctggcgttctatcggggaa

SEQ ID NO: 10244 - DNA, 75 bp, synthetic construct
  source 1..75: mol_type = other DNA
ggtaaccgcgctgaaatgagcccggaagccgccggtattgccgcctgtctgatgacgtacagccatcatgcctgt

SEQ ID NO: 10245 - DNA, 75 bp, synthetic construct
  source 1..75: mol_type = other DNA
ccatgcgtattcaccaacagcatcctgcatcccgtctttttccattctgtactggtaagtaccgctggcacggca

SEQ ID NO: 10246 - DNA, 75 bp, synthetic construct
  source 1..75: mol_type = other DNA
cacgtatttttcgtcactggacaacatgattgcccagggtaacccgatgccggtgccttacggtgaaatgctggt

SEQ ID NO: 10247 - DNA, 75 bp, synthetic construct
  source 1..75: mol_type = other DNA
tggagcgaaaaaaaggcgctgcctgcgttgctctggcagcaccgcatggatgagcccatcggtgtgtacaccgaa

SEQ ID NO: 10248 - DNA, 75 bp, synthetic construct
  source 1..75: mol_type = other DNA
gttccgctatgttgatcgtgtattctgggatgatacaacgcctgaagcagtacagacagcaggtgagccacgact

SEQ ID NO: 10249 - DNA, 75 bp, synthetic construct
  source 1..75: mol_type = other DNA
gaagccagtctgttcttccggttgctgaaccgtcgatatgaaaaagcgagcatcgtgctgacgtcaaataaaggg

SEQ ID NO: 10250 - DNA, 75 bp, synthetic construct
  source 1..75: mol_type = other DNA
agccagctttgcatcccgttcacactcaacgaacatgagcttgatcagcttgataatatcattgagcggaagaag

SEQ ID NO: 10251 - DNA, 75 bp, synthetic construct
  source 1..75: mol_type = other DNA
cgtgaccagacatccgaatcactcgagcaacttgctcatcaaaacctgtcagcatggatgattgacgtcatcggt

SEQ ID NO: 10252 - DNA, 75 bp, synthetic construct
  source 1..75: mol_type = other DNA
tcgcggtgaaaaatccacggcctccggtcgctatcagcagctttacctgttctggccgcactaccgcaaacagct

SEQ ID NO: 10253 - DNA, 75 bp, synthetic construct
  source 1..75: mol_type = other DNA
gttcgataaacccaccacggatatccgtaaggacagatgcagcaagtgcatgcgcgggtgtgaactgcgcaggaa

SEQ ID NO: 10254 - DNA, 75 bp, synthetic construct
  source 1..75: mol_type = other DNA
tgagacgaagcagcatgacggttctggtcaacgtaattatggttgcagtcgtgggctggggcgtctactggatgg

SEQ ID NO: 10255 - DNA, 75 bp, synthetic construct
  source 1..75: mol_type = other DNA
gttcgccgatgaacgtgtgattgagcagcatattgaagctggcatttcactgtgtgatgcggtgaattttctcgt

SEQ ID NO: 10256 - DNA, 75 bp, synthetic construct
  source 1..75: mol_type = other DNA
gagctattaaataaaatatgcattctttcaatgctggcccgtttacgtccgatacaaaaaggatgctggcaatga

SEQ ID NO: 10257 - DNA, 75 bp, synthetic construct
  source 1..75: mol_type = other DNA
ggcgtctgaatataatctgtagcgagtgccggcagagtgaggttatgcagcgtgtgctggcgttctatcagggta

SEQ ID NO: 10258 - DNA, 75 bp, synthetic construct
  source 1..75: mol_type = other DNA
cccctcatgaactgcgtcctgatatttaccccaatccaaatgatggattacctgagtgctattcaaaagttagcg

SEQ ID NO: 10259 - DNA, 75 bp, synthetic construct
  source 1..75: mol_type = other DNA
atgctgggcgcaatcaccacggtaaaaagcggtaatctgttattcatcatgcccggcggtggcgtgaacgcacag

SEQ ID NO: 10260 - DNA, 75 bp, synthetic construct
  source 1..75: mol_type = other DNA
tgattgccacgctgatggtgtgggcgattgactgcggcgatcttccgctggcgctgcgtattggtgcgtatgtgg

SEQ ID NO: 10261 - DNA, 75 bp, synthetic construct
  source 1..75: mol_type = other DNA
tgcgcgctacaggtcaaaaccgtcaaacactgtcaggatgaactcgatgcagaagcacaaaagcctgcgcaaagc

SEQ ID NO: 10262 - DNA, 75 bp, synthetic construct
  source 1..75: mol_type = other DNA
agcggtattttttctgtaatgagctgaatgaaaaaggggagccggtcacctggcaggggcgtaagtatgaggcat

SEQ ID NO: 10263 - DNA, 75 bp, synthetic construct
  source 1..75: mol_type = other DNA
gacaactcctcggcctgattgggcgggcagtggtgaaaagcatcagtgccgccacgaaatgtcagaccgtggatg

SEQ ID NO: 10264 - DNA, 75 bp, synthetic construct
  source 1..75: mol_type = other DNA
atgcgtgatatgtatgaagtattggaccgctggggagcatgggctgcagcagacaacagtggtgtggactggcag

SEQ ID NO: 10265 - DNA, 75 bp, synthetic construct
  source 1..75: mol_type = other DNA
gaattatgaataatatagatttattaaaaactataacaaactacaaaaaaatcaaaaatccggcatacccggctc

SEQ ID NO: 10266 - DNA, 75 bp, synthetic construct
  source 1..75: mol_type = other DNA
gtcatgtaaatcgcctgaagatgctgaaacgccagatgtatggtcgagcaggatttgaactactcaggcagaggg

SEQ ID NO: 10267 - DNA, 75 bp, synthetic construct
  source 1..75: mol_type = other DNA
tcagaaaaaattgtaacaatcaggttttctcagtaaaaatggcagtggagaaaagactgtgcagaaaacattatg

SEQ ID NO: 10268 - DNA, 75 bp, synthetic construct
  source 1..75: mol_type = other DNA
ttttcttaaacgttggtttgggagaaggctctgcattacctgttggtgtgcctgttccatggccttcagccacac

SEQ ID NO: 10269 - DNA, 75 bp, synthetic construct
  source 1..75: mol_type = other DNA
attcccggcgacccgagagacaccaccacgccgcgggcgatggcgcagacgttgcgtcagcttacgctgggtcat

SEQ ID NO: 10270 - DNA, 75 bp, synthetic construct
  source 1..75: mol_type = other DNA
atgctggtggagtggggaccggttatcccgaaagggaaggtcgagatcactatcagtaagtacgagaaaacggcg

SEQ ID NO: 10271 - DNA, 75 bp, synthetic construct
  source 1..75: mol_type = other DNA
cacgcaggctgcagaacacttaccggttcgcatgccccgtctctgctctgcagaacgcctctctgaaagtatggt

SEQ ID NO: 10272 - DNA, 75 bp, synthetic construct
  source 1..75: mol_type = other DNA
aacgcaagcagtacctgtggctggggattgtggttgtcggtacagcctccgcgattggtggggcactgtatctgt

SEQ ID NO: 10273 - DNA, 75 bp, synthetic construct
  source 1..75: mol_type = other DNA
gcttgctcaacacggcagcgaaaaaccagtaacgcacgtttcacgcgacgaactccaggcattacacattgcacg

SEQ ID NO: 10274 - DNA, 75 bp, synthetic construct
  source 1..75: mol_type = other DNA
ttgcgaggagatcaaccgtctgaatcgtcagttgcgggtggaaaaaattctgaatcgctctggcatccagccgtt

SEQ ID NO: 10275 - DNA, 75 bp, synthetic construct
  source 1..75: mol_type = other DNA
cgtattcgttcaaataactgctatggacaggtctcacggcgtgaccaggagagcgcgctggcgtgctggggtatc

SEQ ID NO: 10276 - DNA, 75 bp, synthetic construct
  source 1..75: mol_type = other DNA
acagcggggaggtgcgggcggaacaatatgataatgccccgacccacattctggggtatggctcggtatttaaca

SEQ ID NO: 10277 - DNA, 75 bp, synthetic construct
  source 1..75: mol_type = other DNA
caagtgttggacgtgccattcttggtaaaaccagcactcagggagttcttgattaccttggtttgggggaaggct

SEQ ID NO: 10278 - DNA, 75 bp, synthetic construct
  source 1..75: mol_type = other DNA
aaaaaccttcatttttacgcccgtaaggtgatgagtatgtggcgttaccggataacgcggttactgtcacggaaa

SEQ ID NO: 10279 - DNA, 75 bp, synthetic construct
  source 1..75: mol_type = other DNA
aaaattatgatgtgatgggctggaaccaggaacagctgattaatgacatactggaccagtacgaaaaacacctgc

SEQ ID NO: 10280 - DNA, 75 bp, synthetic construct
  source 1..75: mol_type = other DNA
gctgggtggagatcgacaataacctgtgtgaaaacgccctccgggtagttgcactggggcggcgtaactacatgt

SEQ ID NO: 10281 - DNA, 75 bp, synthetic construct
  source 1..75: mol_type = other DNA
acgtcaggttgttgctctgggccgtcaacggctggctgttcagcgcctggaagaacgccagaaaaagctgcagca

SEQ ID NO: 10282 - DNA, 75 bp, synthetic construct
  source 1..75: mol_type = other DNA
ttataaagatgaggatggtgctaaatataaatcctctgttgatgtcagaagtaacgagtttatgttaggtgcaac

SEQ ID NO: 10283 - DNA, 75 bp, synthetic construct
  source 1..75: mol_type = other DNA
atcagcgtcaccatatgctgttcgccaccctctggaataccggaatgcgtattggcgaagcccggatgctgacgc

SEQ ID NO: 10284 - DNA, 75 bp, synthetic construct
  source 1..75: mol_type = other DNA
gcgctcatcgataccgcagataatacgcaggtgctttatcgcggtgatgaacgctttccaatgtgcagtaccagt

SEQ ID NO: 10285 - DNA, 75 bp, synthetic construct
  source 1..75: mol_type = other DNA
tttttcagcgcaattgataggccaaattcccgcaacggtgtgggtgctatttaccgaaaatcgttttggatggaa

SEQ ID NO: 10286 - DNA, 75 bp, synthetic construct
  source 1..75: mol_type = other DNA
gtcgttgaattacctgatattacagcaaatcgccgggctgatatttcgggtaaatggatgttcaaagatggcgta

SEQ ID NO: 10287 - DNA, 75 bp, synthetic construct
  source 1..75: mol_type = other DNA
attcatacggctggcagaaagagcggggtatcagataacagcacctgctcaggaggaaaccggtggcattaacag

SEQ ID NO: 10288 - DNA, 75 bp, synthetic construct
  source 1..75: mol_type = other DNA
ttccgctgtcagatgaacgaaggctggtaccagatacgtattgccggtgaggataccgcgccggaggcggtgtat

SEQ ID NO: 10289 - DNA, 75 bp, synthetic construct
  source 1..75: mol_type = other DNA
gatcttgtcagaaccggcgcgtttctggtggcgatgtccctgtggcataaccatccacagaaaacgcagtcaccg

SEQ ID NO: 10290 - DNA, 75 bp, synthetic construct
  source 1..75: mol_type = other DNA
atattttcgtgccatttgtaccaatggactggtctgcggtcagtctctgggagaattgcgtgttccacaccgggg

SEQ ID NO: 10291 - DNA, 75 bp, synthetic construct
  source 1..75: mol_type = other DNA
atgacaaaatcatggagcgtaccttttcctgaatcagaaactgaacatgatggaatgcctgttttctggagattc

SEQ ID NO: 10292 - DNA, 75 bp, synthetic construct
  source 1..75: mol_type = other DNA
agaaaacggcgatttccatccgtgctgtgctgaccaactacgtgaaagccatccgttacctgcaggggattgagc

SEQ ID NO: 10293 - DNA, 75 bp, synthetic construct
  source 1..75: mol_type = other DNA
atgtaaatcagatccgccgggagcgcccgctgacacgcgaagaactgatgtaccacgtcccgagtatttttggag

SEQ ID NO: 10294 - DNA, 75 bp, synthetic construct
  source 1..75: mol_type = other DNA
gtggccggcgctgacgtactatgcagatgatggctgggctgaggcggacaataacatcgctgaaaatgcgttgcg

SEQ ID NO: 10295 - DNA, 75 bp, synthetic construct
  source 1..75: mol_type = other DNA
atgcgattagcgagtcgttttggtcatgtaaaccagatacgccgtgaccgtccgctgacacacgaagaactgatg

SEQ ID NO: 10296 - DNA, 75 bp, synthetic construct
  source 1..75: mol_type = other DNA
agtgagcaggaagttttgtcgttacaggcagcaccccttgtattcctggatggcctgagcgaacccatcggaaaa

SEQ ID NO: 10297 - DNA, 75 bp, synthetic construct
  source 1..75: mol_type = other DNA
ccggaccggaaaggtatccatccacagaatcacctggccggttacagcggtgtgcttcaggccgatgcttacggt

SEQ ID NO: 10298 - DNA, 75 bp, synthetic construct
  source 1..75: mol_type = other DNA
gaactgtccagcaagttcaccgtagagccgtccgtgcagcagacattggaagaccagatccagcagtccgccgct

SEQ ID NO: 10299 - DNA, 75 bp, synthetic construct
  source 1..75: mol_type = other DNA
tttaccgcgatgacgtataccaaaagtaaaacgtttaaaaccgaagctggcgcgcatcgctggttagcaagaaac

SEQ ID NO: 10300 - DNA, 75 bp, synthetic construct
  source 1..75: mol_type = other DNA
ctggagtttgagaaatccgcctttggtaagtacaacgttgataatgcagtcaacgctaacttccgttactcgttc

SEQ ID NO: 10301 - DNA, 75 bp, synthetic construct
  source 1..75: mol_type = other DNA
gatttttattattggtgtagtaaccaatatgacttggttaaaaatttggctggccccaaagctttaccttatcga

SEQ ID NO: 10302 - DNA, 75 bp, synthetic construct
  source 1..75: mol_type = other DNA
cccccgcgatatacgcttgaagatgtgtggttatcaggcttattttagtcgtacggggagaaaggaaattccttc

SEQ ID NO: 10303 - DNA, 75 bp, synthetic construct
  source 1..75: mol_type = other DNA
agaactcagagtgttcattcctgctgcgttaaaagcgcaattacaggagatgtgtgacgctgaaggtgttactca

SEQ ID NO: 10304 - DNA, 75 bp, synthetic construct
  source 1..75: mol_type = other DNA
cggtgaaaggggccgggaccacactgtgggtttataacgggagcggcgacccttatgcaaacccgctttcagaca

SEQ ID NO: 10305 - DNA, 75 bp, synthetic construct
  source 1..75: mol_type = other DNA
ctcaggaactgtttcaccatttgtgcatagcacacattcgccaccggttctggcatactttatgtgcaggcataa

SEQ ID NO: 10306 - DNA, 75 bp, synthetic construct
  source 1..75: mol_type = other DNA
gccgctgccggacatcacgcaggagcgttttttacgtctgccggaagtgatgcacctgtgcggcctgtcacgctc

SEQ ID NO: 10307 - DNA, 75 bp, synthetic construct
  source 1..75: mol_type = other DNA
gccgaaggcgaagaagctctcagcttcaacgaatttaaacaggcgctttccagttcggcaaaatctaacggctga

SEQ ID NO: 10308 - DNA, 75 bp, synthetic construct
  source 1..75: mol_type = other DNA
gggttatcggctggagcctgtcagcgaatgccgatactgccctgataagcagtgccctgcggatggcgtatgagg

SEQ ID NO: 10309 - DNA, 75 bp, synthetic construct
  source 1..75: mol_type = other DNA
atgagtggtccacaattgctttccctgcctggttcttttttaacgcctccggcaacattacctgttgccattgat

SEQ ID NO: 10310 - DNA, 75 bp, synthetic construct
  source 1..75: mol_type = other DNA
gtaccggagccagaccgggtatggtgtggagatattacgtatctctgggcaggaaatcgctggtgctatctggcg

SEQ ID NO: 10311 - DNA, 75 bp, synthetic construct
  source 1..75: mol_type = other DNA
cattattgagcaaagaacgcaggacagtaatatccgtaatgatgtaaaacatcaggttgataatatggtcacaga

SEQ ID NO: 10312 - DNA, 75 bp, synthetic construct
  source 1..75: mol_type = other DNA
gtagcgaaaatctcagagtgcgatttaaccgcgacgattgaacaacgcggaccacaaacggctgatgagctggct

SEQ ID NO: 10313 - DNA, 75 bp, synthetic construct
  source 1..75: mol_type = other DNA
tacatcaagccagggatgagcgttgaagcaatccagggcatcatcgccagcatgaaaggtgactatgaagatcgc

SEQ ID NO: 10314 - DNA, 75 bp, synthetic construct
  source 1..75: mol_type = other DNA
ccgctgatggatattctgtacacggtgaaaagcgtcacgggggcgttgcgtcgctgggtggaagctaacccggaa

SEQ ID NO: 10315 - DNA, 75 bp, synthetic construct
  source 1..75: mol_type = other DNA
catccattacagcgctgttatttctgttctgttgtgcactgtatgcgcctgccggtatgacgtacggtaaaatca

SEQ ID NO: 10316 - DNA, 75 bp, synthetic construct
  source 1..75: mol_type = other DNA
gggtaacggacataacctacatcaggacccacgaaggctggctgtatcttgccgttgttgttgatctgttctcac

SEQ ID NO: 10317 - DNA, 75 bp, synthetic construct
  source 1..75: mol_type = other DNA
ctgttatttatagcgattatcgctgttgtgatatggctatttctaatcatctatgtttatttttgtgagttattc

SEQ ID NO: 10318 - DNA, 75 bp, synthetic construct
  source 1..75: mol_type = other DNA
gctgatgaaggcggtgtatgacatggcccgcaagggggcgcaggatgagattcaggcgcagatgcgtgatggcgg

SEQ ID NO: 10319 - DNA, 75 bp, synthetic construct
  source 1..75: mol_type = other DNA
tgttcagcagattatcaggcgcaactgaagcggcataatctgcgtggaagtatgagcgcaaaaggttgctgctac

SEQ ID NO: 10320 - DNA, 75 bp, synthetic construct
  source 1..75: mol_type = other DNA
gccagtaatggtgaagttacacgtcagcaactaaggccttttgattggatgaatatttggcccgagctggaagat

SEQ ID NO: 10321 - DNA, 75 bp, synthetic construct
  source 1..75: mol_type = other DNA
tacccagtacgacaccgtgtacggcgggtataaaaacagggagagtgagggcgtttattttgtgcccttcatgac

SEQ ID NO: 10322 - DNA, 75 bp, synthetic construct
  source 1..75: mol_type = other DNA
agacggtaacggcgtcaataccgccactaacgcgccggcagaagatccggatattccggcatcaggatattacgg

SEQ ID NO: 10323 - DNA, 75 bp, synthetic construct
  source 1..75: mol_type = other DNA
gccatgctctgagtcaggcaaaatccatcgcggcagagctgcataccggctgcacgaatttcgtgttcagcggta

SEQ ID NO: 10324 - DNA, 75 bp, synthetic construct
  source 1..75: mol_type = other DNA
taccgcaatgtgtttatccaggatgacccgggaatgcatttccgtcgggttatccgcaacgcggaaggtcagcga

SEQ ID NO: 10325 - DNA, 75 bp, synthetic construct
  source 1..75: mol_type = other DNA
gaatcgacgctgaactgaaggatgcttttatggctgctgcaaaaagcatggaccgtaatggctctcagttaatcc

SEQ ID NO: 10326 - DNA, 75 bp, synthetic construct
  source 1..75: mol_type = other DNA
agtggtgatcgcgattttgttttcatcggcgatcatgaccatcgcaaaccgatgagtgaaaacacggtgaacaag

SEQ ID NO: 10327 - DNA, 75 bp, synthetic construct
  source 1..75: mol_type = other DNA
ggcagcagtatgatgaggagtccggcctgtattacaaccgccaccgctattatgacccgctgcaggggcgatata

SEQ ID NO: 10328 - DNA, 75 bp, synthetic construct
  source 1..75: mol_type = other DNA
gggtggaatcgctcctgtcacagtcagcagtcaggcattttcaggaaggtgagcgccgtgccgatcagttacccg

SEQ ID NO: 10329 - DNA, 75 bp, synthetic construct
  source 1..75: mol_type = other DNA
gctgaccggaagtgatgacggtcgccacagcaacacgtctctggcgtggggggctggcgtgcagtttaacccgac

SEQ ID NO: 10330 - DNA, 75 bp, synthetic construct
  source 1..75: mol_type = other DNA
attctcgaccagtttctggatgaaaaggaaggtaaccacaccacggcataccgtgatggcgcgggtatctggacc

SEQ ID NO: 10331 - DNA, 75 bp, synthetic construct
  source 1..75: mol_type = other DNA
cgctgaaaatgcgttgcggatggtcagtctgggccgcaaaaactacctgttcttcggttcggatcatggaggaga

SEQ ID NO: 10332 - DNA, 75 bp, synthetic construct
  source 1..75: mol_type = other DNA
tttagtgtggagccgattcagggcagtcttcttgaccgtcttggagggaggtgtcgtcgccttgcagagagtctg

SEQ ID NO: 10333 - DNA, 75 bp, synthetic construct
  source 1..75: mol_type = other DNA
cggatgagaaattcgctgctctggaagccgcaggcgtgaaaaccgttcgcagcctggcggatatcggtgaagcac

SEQ ID NO: 10334 - DNA, 75 bp, synthetic construct
  source 1..75: mol_type = other DNA
tgtccgcagccatttgtctggccgtatccggtgcgcctgcatgggcgtctgaacatcagtcaacgctgagcgcgg

SEQ ID NO: 10335 - DNA, 75 bp, synthetic construct
  source 1..75: mol_type = other DNA
atgcaaattatcgctttgaatgctgcaacaggagaatataactggaagatggtttctgaccatcttaaagccatt

SEQ ID NO: 10336 - DNA, 75 bp, synthetic construct
  source 1..75: mol_type = other DNA
ccggtctgggcactgtgtaatgacacggcctgttctgcagccatgctgctggcgtcggcctgctcccgacggctg

SEQ ID NO: 10337 - DNA, 75 bp, synthetic construct
  source 1..75: mol_type = other DNA
gaaattccgcgcagtaggccagggttatgctggtggtctggcatctgtatgtgctcagtacggcattaacgcgtc

SEQ ID NO: 10338 - DNA, 75 bp, synthetic construct
  source 1..75: mol_type = other DNA
cattggcaaaaacagcgagggcttgactcaggtatttaatgacgtacacaaatacaaccccaaaaccaatagctg

SEQ ID NO: 10339 - DNA, 75 bp, synthetic construct
  source 1..75: mol_type = other DNA
ctgcaggtgccgctgcgtgacttgtggaatccggctacctgtccggtcagcttcctgccttatctcgcctgggcg

SEQ ID NO: 10340 - DNA, 75 bp, synthetic construct
  source 1..75: mol_type = other DNA
ccgtgcggcgggtggtggagccgttcggctttctgatccgcattattgagtggtggcaaaccggagaggcaccgg

SEQ ID NO: 10341 - DNA, 75 bp, synthetic construct
  source 1..75: mol_type = other DNA
gatttatgaagcgcgcccgaacgtgacggttgatgtcgcttcgctgtgcctgaaaaccggtaatgcggtgatcct

SEQ ID NO: 10342 - DNA, 75 bp, synthetic construct
  source 1..75: mol_type = other DNA
ccgggaagagcgtgaggcactggaagcccgtcaggccgccattcttgctgcagaaaaggagagcagacatgtctc

SEQ ID NO: 10343 - DNA, 75 bp, synthetic construct
  source 1..75: mol_type = other DNA
agacgctgatgtcatcctgttctgcactggatgactgcatcagtgacagcttcagtggtttcagtatcgatggcg

SEQ ID NO: 10344 - DNA, 75 bp, synthetic construct
  source 1..75: mol_type = other DNA
aaccagtaaaaaaacgtaaacagcattcgcctgaatttctcagtgaagccctgaaacttgctgaacgcatcggtg

SEQ ID NO: 10345 - DNA, 75 bp, synthetic construct
  source 1..75: mol_type = other DNA
tagcttcctgcccgcattaagcaaacaaatggcggaaagcggcgtgacattacacgcagatgcagctgcgctggc

SEQ ID NO: 10346 - DNA, 75 bp, synthetic construct
  source 1..75: mol_type = other DNA
tggatgagctggtggattgcgtggcggaactggaaggccaggtaagccagtttgaaacgctggtgaaggagttta

SEQ ID NO: 10347 - DNA, 75 bp, synthetic construct
  source 1..75: mol_type = other DNA
aatgcagtcgttgtatgagtggctccaggggcagatgagcacgctgtcgcgccactcggatacagcgaaagcgtt

SEQ ID NO: 10348 - DNA, 75 bp, synthetic construct
  source 1..75: mol_type = other DNA
gtgggacggcagggctgcttttcatggtgaggttgtcagacctgcctgtactctggcgatggaagacgcctggca

SEQ ID NO: 10349 - DNA, 75 bp, synthetic construct
  source 1..75: mol_type = other DNA
gggatcgcgaccagcatatcctgacactgcgtattttcagcggtgtgctggccggaattctgatgctggtctgta

SEQ ID NO: 10350 - DNA, 75 bp, synthetic construct
  source 1..75: mol_type = other DNA
agtgccctgcggatggcgtatgaggtgcgtggtcagccgcgggacgtcatgttccatagcgaccagggaagtcaa

SEQ ID NO: 10351 - DNA, 75 bp, synthetic construct
  source 1..75: mol_type = other DNA
gtgaaggtcgtccgtggaatcccggtgccatcaccggtggccgcgtgtggggggatatcccggacaacagcgtcc

SEQ ID NO: 10352 - DNA, 75 bp, synthetic construct
  source 1..75: mol_type = other DNA
atggataaacctacagactggcgctccggaacccgccggatattttctaatgaatttaaacttcatatggttgaa

SEQ ID NO: 10353 - DNA, 75 bp, synthetic construct
  source 1..75: mol_type = other DNA
tgattcttctggcgctatcggggagcttttctaccgctgtagccgctgataaaaaagagactcaaaatttctact

SEQ ID NO: 10354 - DNA, 75 bp, synthetic construct
  source 1..75: mol_type = other DNA
gaggccgcgcgtgctggtgagcaggggcgtggttttgctgttgtcgccgatgaggttcgcagtcttgctgctcgc

SEQ ID NO: 10355 - DNA, 75 bp, synthetic construct
  source 1..75: mol_type = other DNA
gtttgatgaaatcaatattgtgcgcggactgcctgttcctggtgggcggttgggcgtgaagatttacgaaattac

SEQ ID NO: 10356 - DNA, 75 bp, synthetic construct
  source 1..75: mol_type = other DNA
tgaaggatgcgcagaacatgatggcctcactgtcgaccggaaagggcgtcattcagccggttcacattgatgatg

SEQ ID NO: 10357 - DNA, 75 bp, synthetic construct
  source 1..75: mol_type = other DNA
cagagcggtatgtacgaagtctgtttacagctaccagccagacttgtttgaggactgcggaggtgcgagtactta

SEQ ID NO: 10358 - DNA, 75 bp, synthetic construct
  source 1..75: mol_type = other DNA
caagcgtatggaagccgcaggcaaaccaacggataaaccaaacctggtgtgcggtccggtacaaatctgctggca

SEQ ID NO: 10359 - DNA, 75 bp, synthetic construct
  source 1..75: mol_type = other DNA
ggaagatactcccgacaacactccggccggaggcaataccggacaagcggaaaagaccagaaacgcaggactcac

SEQ ID NO: 10360 - DNA, 75 bp, synthetic construct
  source 1..75: mol_type = other DNA
cttaccgggatgggggcgcgacgtcagccactgatgtgggccatcaccaccgccgggtacaacattgaggggccg

SEQ ID NO: 10361 - DNA, 75 bp, synthetic construct
  source 1..75: mol_type = other DNA
gatgaatatttctggatcccgaaattccaggagctgcgcaaagtggcttccggtatggctattcacaaaaaatgg

SEQ ID NO: 10362 - DNA, 75 bp, synthetic construct
  source 1..75: mol_type = other DNA
ctagccgaagaaggaggccgaaaagtcagtcaactcgactggaaattcaataacgctgcaattattaaaggtgca

SEQ ID NO: 10363 - DNA, 75 bp, synthetic construct
  source 1..75: mol_type = other DNA
taaagcggcggcgctgggttccaccttcctgacactgggcgctgcgccagaggttgcagccagtgcagcaaacgc

SEQ ID NO: 10364 - DNA, 75 bp, synthetic construct
  source 1..75: mol_type = other DNA
atgttgagtttcagcgttgttaaatcggcaggcagtgccggaaactattacaccgacaaggataattactatgtg

SEQ ID NO: 10365 - DNA, 75 bp, synthetic construct
  source 1..75: mol_type = other DNA
ggtactgcgttactgcatgcggattcatgagctggaagttccgcaccttacaggaaggcattaagtgggctttcg

SEQ ID NO: 10366 - DNA, 75 bp, synthetic construct
  source 1..75: mol_type = other DNA
gcaccgaaacggaacgccaagctaaccgtttcgctaccagcgcatcacgcagcaacatccgctacagcctgagcg

SEQ ID NO: 10367 - DNA, 75 bp, synthetic construct
  source 1..75: mol_type = other DNA
gacacgaaatcagcacctgctgggcaaaatcaacagtggtcaggtcgatccgctggctgcgcattacatatcccc

SEQ ID NO: 10368 - DNA, 75 bp, synthetic construct
  source 1..75: mol_type = other DNA
ctgatcaaaattattatctgcctaaagaatcttcatatggtgagggcgaatggaaaacgctgccattccagatcg

SEQ ID NO: 10369 - DNA, 75 bp, synthetic construct
  source 1..75: mol_type = other DNA
ccgccacgttcagcgaatgctgaaactggctgaccttgcgcctgtcatcctcgatgcgctggcagaagaccgcat

SEQ ID NO: 10370 - DNA, 75 bp, synthetic construct
  source 1..75: mol_type = other DNA
gcggcaaacgctccctgatggagtctgtcgaagcgaagaccaaagacattatgccagtggcatttgaatttaaat

SEQ ID NO: 10371 - DNA, 75 bp, synthetic construct
  source 1..75: mol_type = other DNA
atgaatgataatatacctacagcgcgaaatcacaaacaatcgacttgtattacagaaaaaaacatgcctatcttt

SEQ ID NO: 10372 - DNA, 75 bp, synthetic construct
  source 1..75: mol_type = other DNA
gaaactaacgcaaagtccagccagacggcagcgaagaccagcgaaacgaatgccaaagccagcgaaactgcggcg

SEQ ID NO: 10373 - DNA, 75 bp, synthetic construct
  source 1..75: mol_type = other DNA
tttttggattatccggcgaattaactgaaaaagatatcaaagcagcatacagaaaagccgctttaaaatatcatc

SEQ ID NO: 10374 - DNA, 75 bp, synthetic construct
  source 1..75: mol_type = other DNA
ttcttcgccaccgctgggggcgtctgcgcttatatcgtttccccggttctgttttgaccgattaccgaatactga

SEQ ID NO: 10375 - DNA, 75 bp, synthetic construct
  source 1..75: mol_type = other DNA
gcaaactatgagattgatggagaaaaatacagctttgatcaattgagtccggatgcagtgcgcaccacagaaacg

SEQ ID NO: 10376 - DNA, 75 bp, synthetic construct
  source 1..75: mol_type = other DNA
acacacacagattcgtgatgaacgttttttcaaaaccaataactctcaatatgatttagttaacggtatgtatct

SEQ ID NO: 10377 - DNA, 75 bp, synthetic construct
  source 1..75: mol_type = other DNA
tgtggcgacatactgttaatcgcgtcatcctggacgcaacacatcagaaccgcattattgcggagctggttattc

SEQ ID NO: 10378 - DNA, 75 bp, synthetic construct
  source 1..75: mol_type = other DNA
gggagaactgagggaatttgaactggcagacggaaactggctactggacaatgcctggtatgaaagaaacatggc

SEQ ID NO: 10379 - DNA, 75 bp, synthetic construct
  source 1..75: mol_type = other DNA
atgcaaatttcaccggttactcttcgtgttgcgaaggcgtttatatccagacatcaccgacacaataaacccccg

SEQ ID NO: 10380 - DNA, 75 bp, synthetic construct
  source 1..75: mol_type = other DNA
aagtgtatgcggcagagcgtctggataaaatccgccgccagaaccggataaaggcagaacttcaggccgtgcttg

SEQ ID NO: 10381 - DNA, 75 bp, synthetic construct
  source 1..75: mol_type = other DNA
ccggaaatcagcgaagcgaacattctgggcacgtttgaacaactgcatcagaataaagatgaggtgtttgagcga

SEQ ID NO: 10382 - DNA, 75 bp, synthetic construct
  source 1..75: mol_type = other DNA
aacgggaagaacttgagtttctgagagttgagaacgcttatctaaaaaagctgaaagccttagctcaggaaaaat

SEQ ID NO: 10383 - DNA, 75 bp, synthetic construct
  source 1..75: mol_type = other DNA
agcgaactccgcgcccgcgttgagaattttaatcgcctgttcaccgagctattagaggctcgcaaacgcaacaag

SEQ ID NO: 10384 - DNA, 75 bp, synthetic construct
  source 1..75: mol_type = other DNA
attcccgtttccgtggatggcgtgattaatccgctgttgccggattcccggactgaccaggggcaggcgcagcgc

SEQ ID NO: 10385 - DNA, 75 bp, synthetic construct
  source 1..75: mol_type = other DNA
ccaggttttaaccggttgcttgatcgtctggaaagtggcgatgtattgatagtcacaaaactggatcgcctcggt

SEQ ID NO: 10386 - DNA, 75 bp, synthetic construct
  source 1..75: mol_type = other DNA
aacggcctgaaaacctttgtgaacaccacgctgggcgagacctgggaagaggccgtgggcgaaaaactcgatcac

SEQ ID NO: 10387 - DNA, 75 bp, synthetic construct
  source 1..75: mol_type = other DNA
ttactctctgattctggctgattccggtgaaaggaaaacgaccgtggataaagtgtttatgaaagcattttatct

SEQ ID NO: 10388 - DNA, 75 bp, synthetic construct
  source 1..75: mol_type = other DNA
aaatatgagttacacataccgacggttgtcattcccggttctgatcataatccgccttctaaccaaggggggatt

SEQ ID NO: 10389 - DNA, 75 bp, synthetic construct
  source 1..75: mol_type = other DNA
gaggagatgtatctggaaatggaacggctgattgccgatgccaaacccgcaagtcgccaccttatcggtctgaac

SEQ ID NO: 10390 - DNA, 75 bp, synthetic construct
  source 1..75: mol_type = other DNA
cacagaaaattattgaagcagccgatgaggttattagtgcgctggccggaactaatgaggatgttaaccctgata

SEQ ID NO: 10391 - DNA, 75 bp, synthetic construct
  source 1..75: mol_type = other DNA
ctgaagtcccgtcagtaccagtgtgagcaggtgaactacgacacgtttatttcgtatccgcagcttgatgcctgg

SEQ ID NO: 10392 - DNA, 75 bp, synthetic construct
  source 1..75: mol_type = other DNA
tagacgtcatttccgctgccgcactgagtgaacaacagctcgcgaaaatttctgctgcgatggaaaaacgtctgt

SEQ ID NO: 10393 - DNA, 75 bp, synthetic construct
  source 1..75: mol_type = other DNA
aaattccacccgtttctggcgctgttgctggccagcttcttcgtgggaacgatgatgggtatgggaccactggat

SEQ ID NO: 10394 - DNA, 75 bp, synthetic construct
  source 1..75: mol_type = other DNA
gcatggcgatgaatgcctgggcgcatccggatggcgagaaagtaccaactgcgaagattaccaaagcgtattttg

SEQ ID NO: 10395 - DNA, 75 bp, synthetic construct
  source 1..75: mol_type = other DNA
taacagtaagcgtcggcatggttctagcgaacagatgtcaccgacagaatatgaaaaccagtattatcaacggct

SEQ ID NO: 10396 - DNA, 75 bp, synthetic construct
  source 1..75: mol_type = other DNA
gtgagcctcgtttgcacattaaagaacccggcaactctccggtaactccggatggttggataagctgtagtgagc

SEQ ID NO: 10397 - DNA, 75 bp, synthetic construct
  source 1..75: mol_type = other DNA
ggaggtgggcgacagcgacaggtcgatgtcctggctggcctgggagccatgtctgacaaattcggtaaatccagt

SEQ ID NO: 10398 - DNA, 75 bp, synthetic construct
  source 1..75: mol_type = other DNA
atgtgtacgcgctggcgcaaaaaatgatgccggaatatcagggaggcttctggcacttcatccgcctgccggacg

SEQ ID NO: 10399 - DNA, 75 bp, synthetic construct
  source 1..75: mol_type = other DNA
atgacagtaagtattgtttcaccttccgcagcggctgtaaagccccgccgtcatccccgtttcagacgcgaagac

SEQ ID NO: 10400 - DNA, 75 bp, synthetic construct
  source 1..75: mol_type = other DNA
ggaaaatgaactccttaaagaagccgttgaatatgggcgtgcaaaaaagtggatagcgcacgcgcccttattgcc

SEQ ID NO: 10401 - DNA, 75 bp, synthetic construct
  source 1..75: mol_type = other DNA
tggcaggggcgtgaatatcaggcgtacccgattgaggggagtggctttgagatgaacggaaagggcagcagtgcc

SEQ ID NO: 10402 - DNA, 75 bp, synthetic construct
  source 1..75: mol_type = other DNA
gtggcgcttgaggatgcgagcacgacgaaaaaggggatagtacagctcagcagtgcgactaacagcacttccgag

SEQ ID NO: 10403 - DNA, 75 bp, synthetic construct
  source 1..75: mol_type = other DNA
ttgcacgtaagcatgggcgatctgattgttgggttggcaggatgctccagaaagctgagggcgtagtggagggta

SEQ ID NO: 10404 - DNA, 75 bp, synthetic construct
  source 1..75: mol_type = other DNA
ccgtccactgacacatgaagagctgatgcaccatgtgccggggattttcggggaagataaacacacgtcccgaag

SEQ ID NO: 10405 - DNA, 75 bp, synthetic construct
  source 1..75: mol_type = other DNA
taagtggatgtttatccagtataagtgccaaagtcagggcgataattcagacagatatatcagcaagctggacgc

SEQ ID NO: 10406 - DNA, 75 bp, synthetic construct
  source 1..75: mol_type = other DNA
aatttctggtcagtatactttattctgtgcagtctcatttttctggtgcgcaaacaatacaactgaatggtaatg

SEQ ID NO: 10407 - DNA, 75 bp, synthetic construct
  source 1..75: mol_type = other DNA
gaccgatacctggttgcagtcgttgctggtctggtcacccggacagcgggatatcatcaaaacggtggcactggt

SEQ ID NO: 10408 - DNA, 75 bp, synthetic construct
  source 1..75: mol_type = other DNA
tgcaaagtcaacgaccggagccagcagcatgggcgatggagaaagcccaagacttacagcagatgctgaactcaa

SEQ ID NO: 10409 - DNA, 75 bp, synthetic construct
  source 1..75: mol_type = other DNA
tgaacgagtcggttaaatcagagcagtcaccgcgggtggtgctctgggaaatcgacctgacggtgcagggtggtg

SEQ ID NO: 10410 - DNA, 75 bp, synthetic construct
  source 1..75: mol_type = other DNA
aacattatcaggggccgtatcgtccgaaagatgccgggtatgcggcgaagggcagtgcactgaaacagcatgtga

SEQ ID NO: 10411 - DNA, 75 bp, synthetic construct
  source 1..75: mol_type = other DNA
gatgcgtgaacgcttcagtgtgctgaaccatattatctgggcgaagccgtccggacgctggaacggatgcaacaa

SEQ ID NO: 10412 - DNA, 75 bp, synthetic construct
  source 1..75: mol_type = other DNA
acggggcgctgtttcccggtcgcatcatgctggcgaacacctgtatgtgggattaccggggagatgaatgcgggt

SEQ ID NO: 10413 - DNA, 75 bp, synthetic construct
  source 1..75: mol_type = other DNA
gaatgaagacgactgcaaaataagaagaggaaatgcagcagaattattttcagggatacggcacatcgctattaa

SEQ ID NO: 10414 - DNA, 75 bp, synthetic construct
  source 1..75: mol_type = other DNA
tccgccactggaagacatggagctttaccagacgtttactgatgaatactttgaacccgcatttgcggtgctggg

SEQ ID NO: 10415 - DNA, 75 bp, synthetic construct
  source 1..75: mol_type = other DNA
gagcgtgaggcactggaagccaggcaacaggccatgatggaagggcagcaggagggcggacatgtctctcactaa

SEQ ID NO: 10416 - DNA, 75 bp, synthetic construct
  source 1..75: mol_type = other DNA
aatgacgaggatcgtcacacataacgggacaaaaggtatcttttgggactttagtgatctttacggaggaacttt

SEQ ID NO: 10417 - DNA, 75 bp, synthetic construct
  source 1..75: mol_type = other DNA
gagccagaaatgacggtcagatattatatcagttctgctgatttaaccgcagagaagttcgccacagcaatccga

SEQ ID NO: 10418 - DNA, 75 bp, synthetic construct
  source 1..75: mol_type = other DNA
cacattctggctgtacgaaagagtgcgctgctgcaaatcgacacacttatccggcaactggcagaaatctcagta

SEQ ID NO: 10419 - DNA, 75 bp, synthetic construct
  source 1..75: mol_type = other DNA
tgtcataaccagaaaacgaaatggcttgatccgtccacaaaaaacaagcgtgctgcgggtggattccgtgaggag

SEQ ID NO: 10420 - DNA, 75 bp, synthetic construct
  source 1..75: mol_type = other DNA
cagaaagtagtgacgcccgcgagtgtgcagctccgggcgccgtggcgtgtcgtgactgtggagaaactaacgcat

SEQ ID NO: 10421 - DNA, 75 bp, synthetic construct
  source 1..75: mol_type = other DNA
gtggaaccgcatgagaagacagcaattaacgacgagctgtacctctcaatttcgaagctgcaggagcatgcagca

SEQ ID NO: 10422 - DNA, 75 bp, synthetic construct
  source 1..75: mol_type = other DNA
tggtcccgcgtgaagggatgcaggtgagtgagaagccgtcggtggtgagggtgcggtttggtgacggttatgaac

SEQ ID NO: 10423 - DNA, 75 bp, synthetic construct
  source 1..75: mol_type = other DNA
cagccatcagcagagcaaattcaggcgcagggtatccttctgcaaggtcaggctgaattgctcaaggcagagaac

SEQ ID NO: 10424 - DNA, 75 bp, synthetic construct
  source 1..75: mol_type = other DNA
tggtaaaccgtgttcatagcaaaattgttattggtgatgatggtttgctgtgcgtgggatcgttcaactggttta

SEQ ID NO: 10425 - DNA, 75 bp, synthetic construct
  source 1..75: mol_type = other DNA
aaggcgccagcatggtactgaatggtgatgtggtcagtaccggcgatattgttaacgcaggggagattcgctttg

SEQ ID NO: 10426 - DNA, 75 bp, synthetic construct
  source 1..75: mol_type = other DNA
ttgatggcaatgggcgtctgacgggtgcccgtaccgcacagactgcaccttacgatcgctacacttgccaccttt

SEQ ID NO: 10427 - DNA, 75 bp, synthetic construct
  source 1..75: mol_type = other DNA
gtgcaacgtcaggctatggcaatggattttagctggcaggtcgcggcgaagtcgtaccgtgagctttactatcgc

SEQ ID NO: 10428 - DNA, 75 bp, synthetic construct
  source 1..75: mol_type = other DNA
cagggttacctatgtcaggtattggtgtggatatcggtggtaattcatatggttatagttcaaaacgatatgatg

SEQ ID NO: 10429 - DNA, 75 bp, synthetic construct
  source 1..75: mol_type = other DNA
taatgctattgctacgtttggtggatttgttattagagctcgtcctaagggaaaccaaatagatccagcttattc

SEQ ID NO: 10430 - DNA, 75 bp, synthetic construct
  source 1..75: mol_type = other DNA
atggacccgaaacgcatgattgaagcctgtgacgaaaacaccatcggcgtggtgccgactttcggcgtgacctac

SEQ ID NO: 10431 - DNA, 75 bp, synthetic construct
  source 1..75: mol_type = other DNA
atgtacgcaaaatcctttctcgcacttgatggcaacggacgtctgaccggtgcccgtaccgcacagacagcgcca

SEQ ID NO: 10432 - DNA, 75 bp, synthetic construct
  source 1..75: mol_type = other DNA
gaaggtacgctgacggtacagggtacaggtattaatgaaggtggcctgaaggtcggggacggaaaggttgtactg

SEQ ID NO: 10433 - DNA, 75 bp, synthetic construct
  source 1..75: mol_type = other DNA
gcgccacgctgggatttaaatccatgaagacggcttacgccaccatcaaaggtattgaggtgatgcgtgcactac

SEQ ID NO: 10434 - DNA, 75 bp, synthetic construct
  source 1..75: mol_type = other DNA
ttgatggcaacggacgtctgacgggcgcccgtactgcacaggccgcaccttatgctaactacacctgccacttgt

SEQ ID NO: 10435 - DNA, 75 bp, synthetic construct
  source 1..75: mol_type = other DNA
ttcgatgcttccagagttgttccaactgcaaacgaaaaccgacctcgtaacattgcctttaattatatcgtgagg

SEQ ID NO: 10436 - DNA, 75 bp, synthetic construct
  source 1..75: mol_type = other DNA
ccacagatgtggctgcgcagtgcttcctgaatgcactgattcgtgaaaccacagactggaaactgacagaatacc

SEQ ID NO: 10437 - DNA, 75 bp, synthetic construct
  source 1..75: mol_type = other DNA
ctccatcaccacgctggccattgagtgcggactggcgacggagtctgctgccggaaaactctccatcacccgtgc

SEQ ID NO: 10438 - DNA, 75 bp, synthetic construct
  source 1..75: mol_type = other DNA
tcttgacgatggatttgatgattccgtgttccgtgagtgggtggttacaccagagcgcccgctcagggagtggtt

SEQ ID NO: 10439 - DNA, 75 bp, synthetic construct
  source 1..75: mol_type = other DNA
tcgtaatttttactgtgtcctggctgacagcacctgcgtatgcatctgacccttgcgcctcggtactttgcttat

SEQ ID NO: 10440 - DNA, 75 bp, synthetic construct
  source 1..75: mol_type = other DNA
cgacccgcacggcaggctggtgattggcggtattggctcaacgcgggcacataccgcgctggtacttggggaaaa

SEQ ID NO: 10441 - DNA, 75 bp, synthetic construct
  source 1..75: mol_type = other DNA
gaagcggatattatcgctgatttgctggatggactggaagaagcaaaatcacaactcaaagagcagcgtgagtat

SEQ ID NO: 10442 - DNA, 75 bp, synthetic construct
  source 1..75: mol_type = other DNA
gtcagcgtcttccagcgcaggaacggcatcaacaaaggctactgaagcatcaaaaagtgctgccgctgcagagtc

SEQ ID NO: 10443 - DNA, 75 bp, synthetic construct
  source 1..75: mol_type = other DNA
acaggtgtgacattaaccagcataaatcaggctgcggcaaaaatggcgcgggcaggaatcctggtcattgatggt

SEQ ID NO: 10444 - DNA, 75 bp, synthetic construct
  source 1..75: mol_type = other DNA
aaatcgacctctgggaagtcagcctggtgacgttcccgtctaacgacgaggcgcggatcagcgacgtcaagaacg

SEQ ID NO: 10445 - DNA, 75 bp, synthetic construct
  source 1..75: mol_type = other DNA
cactgcattatccgtatctgcgccggatgtcctgggcgcagataacggcagcagctgaagatgcggaaatacatc

SEQ ID NO: 10446 - DNA, 75 bp, synthetic construct
  source 1..75: mol_type = other DNA
ataatgtggtcagtgaatggtcaacattacccgaatcaggtaagaaaaataaagtttacctgaaagaggtaaatt

SEQ ID NO: 10447 - DNA, 75 bp, synthetic construct
  source 1..75: mol_type = other DNA
caaatcgccgggctgatatttcggggaaatggatgttcaaagatggcgtagtgataaagcgaacttataccgagg

SEQ ID NO: 10448 - DNA, 75 bp, synthetic construct
  source 1..75: mol_type = other DNA
acactgccaccggcgctgccggggaagggtgtaacgaaaaaagcagccttcattactccagggattcagaaggct

SEQ ID NO: 10449 - DNA, 75 bp, synthetic construct
  source 1..75: mol_type = other DNA
ctgccagacctgtgtgcgcgacccgggccgccggggatacacaaaacacatgctgcgcctgcgccgtaacggaga

SEQ ID NO: 10450 - DNA, 75 bp, synthetic construct
  source 1..75: mol_type = other DNA
tttttggccttgttcgcgaacgtccgatcgatattcacaaagatcccgttgcactgaacaaatatatcagtgaat

SEQ ID NO: 10451 - DNA, 75 bp, synthetic construct
  source 1..75: mol_type = other DNA
ttatttcattattaacaccatcaagtattatatcagggattgcgttgatagttctctggggatatttcagtcgcc

SEQ ID NO: 10452 - DNA, 75 bp, synthetic construct
  source 1..75: mol_type = other DNA
cagcaatcgtagcgttattgctcggcattgaagcttatgcagctgaagaaacctttgatacccattttatgatag

SEQ ID NO: 10453 - DNA, 75 bp, synthetic construct
  source 1..75: mol_type = other DNA
tttttggtcgctcgtgcactggatgcgatttccgatccttgcatggggttgttggccgatcgaacgcgctctcgc

SEQ ID NO: 10454 - DNA, 75 bp, synthetic construct
  source 1..75: mol_type = other DNA
accaacagcgcacaggggccgtggtggatactggggtggtcagagctggtgccgggtgctgaggacgtactgcca

SEQ ID NO: 10455 - DNA, 75 bp, synthetic construct
  source 1..75: mol_type = other DNA
tttgcccctgaccagcagcacctaccttttccgctgactgacgtgcaacaggcctattgggttgggcggcgaaaa

SEQ ID NO: 10456 - DNA, 75 bp, synthetic construct
  source 1..75: mol_type = other DNA
gcaaagcacttccggcaacacttccccgtgacaggcaggttatctccccggcagaaaccgaatgccccgtctgca

SEQ ID NO: 10457 - DNA, 75 bp, synthetic construct
  source 1..75: mol_type = other DNA
gatcaaccttttctcgataaatactgcgtcggctatgacgaaaaaaccttacccgcagatgcacccaaaaatggt

SEQ ID NO: 10458 - DNA, 75 bp, synthetic construct
  source 1..75: mol_type = other DNA
tgagcgacttgaaggagctggtttggattattatgaagttactgcggtaaaacatgccaaacagttcttgagaga

SEQ ID NO: 10459 - DNA, 75 bp, synthetic construct
  source 1..75: mol_type = other DNA
acccggctccaattatgtctggagaacagtgaaacatcgttggacttatcttgtttaggtctcagatctctacca

SEQ ID NO: 10460 - DNA, 75 bp, synthetic construct
  source 1..75: mol_type = other DNA
atggcgctcataaatctggtatacttacctttacacattggggctgattctggattcgacgggatttgcgaaacc

SEQ ID NO: 10461 - DNA, 75 bp, synthetic construct
  source 1..75: mol_type = other DNA
tacattcccggcgaatggatcagcgtctggcaggttgaactgcctgatgtgccccgcaagcagataccgacgatt

SEQ ID NO: 10462 - DNA, 75 bp, synthetic construct
  source 1..75: mol_type = other DNA
cggaagaggcggcagcgaaagcggcggcagatgctaaagcgaaggccgaagcggatgctaaagctgcggaagaag

SEQ ID NO: 10463 - DNA, 75 bp, synthetic construct
  source 1..75: mol_type = other DNA
ataatatgatgagcgctgtcacaactgcattacagcccctgataagggcattgccggtgacgccagttgaatggg

SEQ ID NO: 10464 - DNA, 75 bp, synthetic construct
  source 1..75: mol_type = other DNA
atgagcaccatcctgaaatgggcgggtaataaaaccgccattatgtccgaactgaaaaaacaccttcctgctggc

SEQ ID NO: 10465 - DNA, 75 bp, synthetic construct
  source 1..75: mol_type = other DNA
gtattgaagttcgtcgtgatgcttatgggcgttacagcctgaacgatctgcatcgcgcagcagtagcatctggtg

SEQ ID NO: 10466 - DNA, 75 bp, synthetic construct
  source 1..75: mol_type = other DNA
caggcgtaaaaaaatccggtaccgcgatgaagtgactggaaaaatgataacgcgggataatccaccaatcccggg

SEQ ID NO: 10467 - DNA, 75 bp, synthetic construct
  source 1..75: mol_type = other DNA
cagcagtcgtactggtattccacctgtaagctgcaggtgctgaagaacggggttgagattttccatgaaccggca

SEQ ID NO: 10468 - DNA, 75 bp, synthetic construct
  source 1..75: mol_type = other DNA
ggagtgataaatgtgttcaaaggtttaagctggaattttaagacaaattcccctgcaagtttggggcgaaaatta

SEQ ID NO: 10469 - DNA, 75 bp, synthetic construct
  source 1..75: mol_type = other DNA
atggaagttaaaaccaaagaagactggctgtatcagttccgtcgttgttcatcccgggagacgctggaaaaagtg

SEQ ID NO: 10470 - DNA, 75 bp, synthetic construct
  source 1..75: mol_type = other DNA
cggtaatcctccggcattttccctgacaccggacgggcggctgacggcgaaaaatgccgatatcagcggtaacgt

SEQ ID NO: 10471 - DNA, 75 bp, synthetic construct
  source 1..75: mol_type = other DNA
ttactcctgatacgtgcgcaatgagagcatggaaagggcgacatgcgtttatcagttttgcgcattcaggccaga

SEQ ID NO: 10472 - DNA, 75 bp, synthetic construct
  source 1..75: mol_type = other DNA
tctgcggcttaaacgcctgggcctgtcaagaacgttccgtcgtctggtcgtcactctcacccggcgttatggcgt

SEQ ID NO: 10473 - DNA, 75 bp, synthetic construct
  source 1..75: mol_type = other DNA
tccgaccaacagtcaacctgcacactaccaccgtttgcaacccttgccggcatacgctgcagtaccgcacatatc

SEQ ID NO: 10474 - DNA, 75 bp, synthetic construct
  source 1..75: mol_type = other DNA
aacggcaaagtgcgcggcgattcagatttcatcttctataacaacctgacgtcatccgacggttccgtaacgcac

SEQ ID NO: 10475 - DNA, 75 bp, synthetic construct
  source 1..75: mol_type = other DNA
ctgaatgaagagaacccgcatcagctgcagcagcttatccgcctgccggggcagcagtatgatgaggagtccggc

SEQ ID NO: 10476 - DNA, 75 bp, synthetic construct
  source 1..75: mol_type = other DNA
cgccggagagatccttaagcgggcagaggctgccactgtcagtgctgaagaggccagacgtatggctgagaatgc

SEQ ID NO: 10477 - DNA, 75 bp, synthetic construct
  source 1..75: mol_type = other DNA
ttctcgacctcggccctacggtgatgctgccgattgtcatcattattttttctaaaatattaggcatgaaggcag

SEQ ID NO: 10478 - DNA, 75 bp, synthetic construct
  source 1..75: mol_type = other DNA
ctttgccgatgggcatggccagcttctcaataccaaccgtgactgggaggatggatatcgccagcgttggcagca

SEQ ID NO: 10479 - DNA, 75 bp, synthetic construct
  source 1..75: mol_type = other DNA
acctatatgatggctgtcagcacaaccgggcagtggctgatactcggctggccggagcgtgtgccggaggcggac

SEQ ID NO: 10480 - DNA, 75 bp, synthetic construct
  source 1..75: mol_type = other DNA
gatggcacagaaagccccggacggcacaccctacgcgccacgccagcagcagagcgccagaaaaaagaccggtcg

SEQ ID NO: 10481 - DNA, 75 bp, synthetic construct
  source 1..75: mol_type = other DNA
tcaacggcactatcgccaacgaaacagccctactctgcaatgcccgcgatctgcatgcttttttaggcgtgaaaa

SEQ ID NO: 10482 - DNA, 75 bp, synthetic construct
  source 1..75: mol_type = other DNA
gatgcatgggagcgttacagcgttctggtcagtcgtgtggatcctgcaaatcctgaatggccggaaatgccgcaa

SEQ ID NO: 10483 - DNA, 75 bp, synthetic construct
  source 1..75: mol_type = other DNA
gaattagagaaagacgcaaacaggttggtttaagtcaaaacgatttaagcaaagccgctggcgtatctggctcat

SEQ ID NO: 10484 - DNA, 75 bp, synthetic construct
  source 1..75: mol_type = other DNA
tccgcgcattaaacagctggcgcgccgcagtacagttacgccgggtggggctgcctgcagatataacgatattat

SEQ ID NO: 10485 - DNA, 75 bp, synthetic construct
  source 1..75: mol_type = other DNA
aacacaaaagatattactatacctttgacaactcattattgtttaccgaaagcatccagaacacgactcaaattt

SEQ ID NO: 10486 - DNA, 75 bp, synthetic construct
  source 1..75: mol_type = other DNA
ctggttaaggagattaacttcgtaagacaaacagcacctgccggacagttcccggtcagtgaatgctggttttct

SEQ ID NO: 10487 - DNA, 75 bp, synthetic construct
  source 1..75: mol_type = other DNA
gtgattgatgcgattggtgagggaccgatagaaggtccggtgaagggactgcagagtattctggtgaacaaaacc

SEQ ID NO: 10488 - DNA, 75 bp, synthetic construct
  source 1..75: mol_type = other DNA
cacgctaccaacagcgagctgctgtgcgaagcgtttctgcatgcctttaccgggcaacctctgccggatgatgcc

SEQ ID NO: 10489 - DNA, 75 bp, synthetic construct
  source 1..75: mol_type = other DNA
gcaggttatcgcagacagcgtaatcagtgcgcgaacggcgcgaccgggcggcaaaaaaggccagcaggggcaggc

SEQ ID NO: 10490 - DNA, 75 bp, synthetic construct
  source 1..75: mol_type = other DNA
cgctggatattctgattgcgtggctgcaggacaatattgactgcgaatcagggattatcttcgacaacgatgagg

SEQ ID NO: 10491 - DNA, 75 bp, synthetic construct
  source 1..75: mol_type = other DNA
ctaatgcagccggtgcgatagcaacagggcttgtatctctcaatattccggtaccactgacgacagttcagtggg

SEQ ID NO: 10492 - DNA, 75 bp, synthetic construct
  source 1..75: mol_type = other DNA
caatgctcaacgaaacagaattcgagcttgtctcaaccgaaaccattcaagctgtaattccgtacacccactccg

SEQ ID NO: 10493 - DNA, 75 bp, synthetic construct
  source 1..75: mol_type = other DNA
aaaaaaattggcttttacaccattggcgataaaagcatttacctgtatgacctacgccgcatggatgaaatcatg

SEQ ID NO: 10494 - DNA, 75 bp, synthetic construct
  source 1..75: mol_type = other DNA
ctgtttccggggcgcgctgctgggtgggatttgatccttcgcgtggcgtggatagttctgctgtgtacgaggtgc

SEQ ID NO: 10495 - DNA, 75 bp, synthetic construct
  source 1..75: mol_type = other DNA
gacaccggccctgtcggggcaaccggcgaacggggaccggcaggtgatgctggtccggcaggcccgcaggggccg

SEQ ID NO: 10496 - DNA, 75 bp, synthetic construct
  source 1..75: mol_type = other DNA
aaagcggggaacaccttcgtctcaccacgctggaaagtgtctggattcagggaaaactgcgcatgtgggggcgct

SEQ ID NO: 10497 - DNA, 75 bp, synthetic construct
  source 1..75: mol_type = other DNA
atacaatcaacgttccattccacggaacaaatctctttttggtcagcattaacaatgaaccttacgttcctatga

SEQ ID NO: 10498 - DNA, 75 bp, synthetic construct
  source 1..75: mol_type = other DNA
attgcctgcggtcgctcctctgctccaatgccgcagcgtgtaacaaaagaaggaaaacaggatgatgaagaaaaa

SEQ ID NO: 10499 - DNA, 75 bp, synthetic construct
  source 1..75: mol_type = other DNA
atgagtaagaaaaaagggaaaacaccgcagccagcggtgaaaacaatgactgccagcgccccgaaaatggaggca

SEQ ID NO: 10500 - DNA, 75 bp, synthetic construct
  source 1..75: mol_type = other DNA
tacgcgcagccctttaccgtcgcgctgtcgcctgtgcctggctgaccgtgtgcgaacgtcagcaccgctacccgc

SEQ ID NO: 10501 - DNA, 75 bp, synthetic construct
  source 1..75: mol_type = other DNA
atgaataatctgatggttattgatggtattgaagttcgtcgtgatgcttatgggcgttacagcctgaacgatctg

SEQ ID NO: 10502 - DNA, 75 bp, synthetic construct
  source 1..75: mol_type = other DNA
gcgtcagttggctactcaatatccagaccagattgaatccgttcgtaaaggcatgggattcattgatgaagacca

SEQ ID NO: 10503 - DNA, 75 bp, synthetic construct
  source 1..75: mol_type = other DNA
tggtccggcaggcccgcaggggccgaaaggtgacaggggagagcggggagagaccggtctgacgggaaatgcagg

SEQ ID NO: 10504 - DNA, 75 bp, synthetic construct
  source 1..75: mol_type = other DNA
agaaagcgggccatacccaccaagtggccaagacgggcgcggtcaccctgatccagcgttttggatcggcgctca

SEQ ID NO: 10505 - DNA, 75 bp, synthetic construct
  source 1..75: mol_type = other DNA
gcttcagaatgagaatcatgaggccggtaataaatacatcccttacgggaaaatggcttcctggctggttgagtg

SEQ ID NO: 10506 - DNA, 75 bp, synthetic construct
  source 1..75: mol_type = other DNA
atggtgtgtccgttcgtgttgatgaggatggacgctacaacttaaacgatctccatgcagcagcagttgcaaatg

SEQ ID NO: 10507 - DNA, 75 bp, synthetic construct
  source 1..75: mol_type = other DNA
gtaagcttaatccgacgcagcttggtggactgatacagaataacccgaacctgaaagcgggcggggaagcgaagg

SEQ ID NO: 10508 - DNA, 75 bp, synthetic construct
  source 1..75: mol_type = other DNA
cggtggctgaactggaatctgaaattctgcaactacaaccatcccggaagattaaacatagtgagaacctctgta

SEQ ID NO: 10509 - DNA, 75 bp, synthetic construct
  source 1..75: mol_type = other DNA
gtttggcggtgaaataaaacccgtcaataaagatattgttgatggattaatgaagatttacccggaccctgtgct

SEQ ID NO: 10510 - DNA, 75 bp, synthetic construct
  source 1..75: mol_type = other DNA
aaaagacgtaatgctggattgggaacttacccagaggtcagtattgctgaagctgcacgtactgcccggataatg

SEQ ID NO: 10511 - DNA, 75 bp, synthetic construct
  source 1..75: mol_type = other DNA
gcaagaggcatccggcggggaacttcagtacgaccccaaagtttatgacgaatatcgtaaggcaaagcgggcggg

SEQ ID NO: 10512 - DNA, 75 bp, synthetic construct
  source 1..75: mol_type = other DNA
aacctcgtaaaaagtattcgaatgaattcaaacttcgtatggttgaactggcatcacaacccggtgcttgtgttg

SEQ ID NO: 10513 - DNA, 75 bp, synthetic construct
  source 1..75: mol_type = other DNA
cagttatgtgaaaacatggggttgcggaggttttttgaatgagacgaacatttacagcagaggaaaaagcctctg

SEQ ID NO: 10514 - DNA, 75 bp, synthetic construct
  source 1..75: mol_type = other DNA
ggtataattccatccgccgtgaacgtcctttaacggatgatgaattaatgcagtttgtgccttcggtattttccg

SEQ ID NO: 10515 - DNA, 75 bp, synthetic construct
  source 1..75: mol_type = other DNA
ttgtgaccgtaagtttaacggcaatattactcagctgctcatccgcatgggcggcaggtaaaggcgggattggac

SEQ ID NO: 10516 - DNA, 75 bp, synthetic construct
  source 1..75: mol_type = other DNA
gtgccggacagtgaatgcgtttttgccgtggtgctgacccgtgggaatgtgcgccatatggctcaggactggaac

SEQ ID NO: 10517 - DNA, 75 bp, synthetic construct
  source 1..75: mol_type = other DNA
gacagttgggtattcgattattcaggaagccgctgctatgcccactttcgtcaggataaaatcagcaaccaatta

SEQ ID NO: 10518 - DNA, 75 bp, synthetic construct
  source 1..75: mol_type = other DNA
ggggaacatgctgcacgcagtctggtctggccgaagttaaaatcgttcctcagagaatatcccgaaatcaatgtc

SEQ ID NO: 10519 - DNA, 75 bp, synthetic construct
  source 1..75: mol_type = other DNA
cagccgccgaagcaatcaaaacactgattgatgcgctgattgatatttctgttatcgcggacagggcgcataagc

SEQ ID NO: 10520 - DNA, 75 bp, synthetic construct
  source 1..75: mol_type = other DNA
ccggggcgctgtgcctgttctggtcgtggctggtggcgcgatatctcgaccgtacacagccgtctgtcggcggag

SEQ ID NO: 10521 - DNA, 75 bp, synthetic construct
  source 1..75: mol_type = other DNA
cgtaaaaaatcaggaattggagtagcgccaactctgcatgaaattgcacgagggttaatagataaggcgctggca

SEQ ID NO: 10522 - DNA, 75 bp, synthetic construct
  source 1..75: mol_type = other DNA
gcgagttccagtatcctatttaccgtatgccgccaaaacgtggtcgtctgccgtctcgtgcggagatctacgcgg

SEQ ID NO: 10523 - DNA, 75 bp, synthetic construct
  source 1..75: mol_type = other DNA
aggtggaaaacgcctttatggcctgggtgggtggcgcgaatgaagccagcggagcgacgaaaacgctctccggcg

SEQ ID NO: 10524 - DNA, 75 bp, synthetic construct
  source 1..75: mol_type = other DNA
ccggctacgggttattcccctctgaacaggcgcgtaaggactggcaaaacgcccgcaaaaaactctcgagggcaa

SEQ ID NO: 10525 - DNA, 75 bp, synthetic construct
  source 1..75: mol_type = other DNA
caatcccacggctcagcgcgtttccgctgggtcaaggcgccgaccagcccagagctcacccagctgacgcacacc

SEQ ID NO: 10526 - DNA, 75 bp, synthetic construct
  source 1..75: mol_type = other DNA
tcggtcacaaacagtgacggtaacctcatgctgaacagcgcgtcttccacactggcgggtgaaaccagtgcgggt

SEQ ID NO: 10527 - DNA, 75 bp, synthetic construct
  source 1..75: mol_type = other DNA
ataaggtgaaagccattttcagccgtaagcaggtcagcgacgatgcgcgcctgaatgatgtgcatgaagcggtga

SEQ ID NO: 10528 - DNA, 75 bp, synthetic construct
  source 1..75: mol_type = other DNA
tgcaagcgcggcggctgcttctgccactgcatcagctaacagtcaaaaagcagcaaaaaccagtgaaaccaacgc

SEQ ID NO: 10529 - DNA, 75 bp, synthetic construct
  source 1..75: mol_type = other DNA
ggcaggcgctggagaaagtggccaccgcaggagactgccggcaggtggcccgggcgttgctgaataaccccggag

SEQ ID NO: 10530 - DNA, 75 bp, synthetic construct
  source 1..75: mol_type = other DNA
gacggacgtcacccggtcgccgggatgtatggtcaatctgggaatgacgatcccggcgctggggaaaaccggaca

SEQ ID NO: 10531 - DNA, 75 bp, synthetic construct
  source 1..75: mol_type = other DNA
tattttttaccaccctgccggcagtaatgacttttcctgcacaggctgcaggcggacacggtgcattttccgtgg

SEQ ID NO: 10532 - DNA, 75 bp, synthetic construct
  source 1..75: mol_type = other DNA
ggcgatgaaagaaattcatcttaacagtgacgagcaacatttatttggcagagctgcactgatggtcaggtatga

SEQ ID NO: 10533 - DNA, 75 bp, synthetic construct
  source 1..75: mol_type = other DNA
gccgcgaagaagtcagccagtgatgccagcacatcagcccgtgaggcggcaacccatgcgactgatgctgcaggc

SEQ ID NO: 10534 - DNA, 75 bp, synthetic construct
  source 1..75: mol_type = other DNA
atgaatagtctgctgccaccgggttcaacgccactggagcgccgactggcgcaaacctgcagcgggatttctgat

SEQ ID NO: 10535 - DNA, 75 bp, synthetic construct
  source 1..75: mol_type = other DNA
gctgttatgcaatttagtgctgatatggcactgaatgaggctaaaaccatcctgattactgattgtgaaaatggg

SEQ ID NO: 10536 - DNA, 75 bp, synthetic construct
  source 1..75: mol_type = other DNA
cgaaagttggacgaagatgaggttggacagcgcttgctgagtattccctgcgttggaacgctgactgccagtact

SEQ ID NO: 10537 - DNA, 75 bp, synthetic construct
  source 1..75: mol_type = other DNA
gcgtgaatgttttggctaaagatgggaaaatgaacattcaggttggggcaaatgatggacagactatcactattg

SEQ ID NO: 10538 - DNA, 75 bp, synthetic construct
  source 1..75: mol_type = other DNA
agcaggcgaagcagtttttcatggatgttgctgccgggttatgtgaaggggatggtccgttgccggaaaagcgcc

SEQ ID NO: 10539 - DNA, 75 bp, synthetic construct
  source 1..75: mol_type = other DNA
tttctcaaaacattacatcagccgacaattgtaaacaaaaaaatgaagacttagatacctggtatgtgggaatga

SEQ ID NO: 10540 - DNA, 75 bp, synthetic construct
  source 1..75: mol_type = other DNA
ccggtaaacaaaagctgcagatcatgcccaatatggttggatttcagttcgtattgcgcggtatctgttcccgcc

SEQ ID NO: 10541 - DNA, 75 bp, synthetic construct
  source 1..75: mol_type = other DNA
gtgacaacccgctacacaggaatgaacccggacggaacgggaaacctgaacgatatggagcacctgaaacagtca

SEQ ID NO: 10542 - DNA, 75 bp, synthetic construct
  source 1..75: mol_type = other DNA
tgcagagttccatatgaaagacaaccgctgggtgcctggctggatgtgtgcaccacgtccacagacggatgccac

SEQ ID NO: 10543 - DNA, 75 bp, synthetic construct
  source 1..75: mol_type = other DNA
aggaggcgcgaaaacgaaaggccgtggacgtaaggccgcgcagccggagcctcagcagccgtctgaacccgcgta

SEQ ID NO: 10544 - DNA, 75 bp, synthetic construct
  source 1..75: mol_type = other DNA
gccgacatccggtacggtggcaaaagggaaaacaaccaccctgacggtttcttttgagccggaaagtgcaaccga

SEQ ID NO: 10545 - DNA, 75 bp, synthetic construct
  source 1..75: mol_type = other DNA
gtatatcaatgacatggcaacttttatgcgatgaacatggttttacccgggagcactacaatcagctgaagaagt

SEQ ID NO: 10546 - DNA, 75 bp, synthetic construct
  source 1..75: mol_type = other DNA
atttaaccccgccaccgggtaatagcagtggcaaccttgagcaacagatagccagtacttcacagcaaatcgggt

SEQ ID NO: 10547 - DNA, 75 bp, synthetic construct
  source 1..75: mol_type = other DNA
cagacggagctggcagagaatggcatcattgttggtcgtgaccgactggcacgtcttcgtaaggagctaaggcta

SEQ ID NO: 10548 - DNA, 75 bp, synthetic construct
  source 1..75: mol_type = other DNA
ctggttgttcatgccctgccaggtgaccgttacggtgtcgccgcaggcggtcgccgactggcagcactcaacatg

SEQ ID NO: 10549 - DNA, 75 bp, synthetic construct
  source 1..75: mol_type = other DNA
caacgcttccgggaaactgctggcgttagatagccagttaaccaatgatttttcagaaaaaagcagcttttccag

SEQ ID NO: 10550 - DNA, 75 bp, synthetic construct
  source 1..75: mol_type = other DNA
cagccgccgaagccatcaaaacgctgatgcacgcgctgattgatatttctgttatcgcagacaaggcgcataagc

SEQ ID NO: 10551 - DNA, 75 bp, synthetic construct
  source 1..75: mol_type = other DNA
tcgcagaggctggtatggcggcaagggaggccggtcatgccgtccgtgagatggagcggtggatggtgccgaaca

SEQ ID NO: 10552 - DNA, 75 bp, synthetic construct
  source 1..75: mol_type = other DNA
aggttcgggagggtgggagccagatgaggatggcgaaataagaaatacctacaggtctattaaggatgctcctca

SEQ ID NO: 10553 - DNA, 75 bp, synthetic construct
  source 1..75: mol_type = other DNA
tatatgaaaatgttgataggttatattccggtacatcttcggatatcaacaattgaggacaacccggaaatcacg

SEQ ID NO: 10554 - DNA, 75 bp, synthetic construct
  source 1..75: mol_type = other DNA
aaaaccgacctcatcccggaaggggttatccgcacggatgatgagcgcacccaccggtaccattacgacagtcag

SEQ ID NO: 10555 - DNA, 75 bp, synthetic construct
  source 1..75: mol_type = other DNA
aatgacctgctgatctatatgcaggacggcacggtgatccgctgcaacggttatttcctgcaagcggcgaataca

SEQ ID NO: 10556 - DNA, 75 bp, synthetic construct
  source 1..75: mol_type = other DNA
ccatcatttttagttaccgataatcagggcgatcagcgcggcattctcgccaccaatgacatcaccgatgacacc

SEQ ID NO: 10557 - DNA, 75 bp, synthetic construct
  source 1..75: mol_type = other DNA
tacactcagcgcattgagcgacataatctgaatctgagacaacacctggcaaggccgggacggaagtcactgtcg

SEQ ID NO: 10558 - DNA, 75 bp, synthetic construct
  source 1..75: mol_type = other DNA
accactacgacagccagcaccgcctggtgttctacacgcggatacagcacggcgaaccacaggtggagagccggt

SEQ ID NO: 10559 - DNA, 75 bp, synthetic construct
  source 1..75: mol_type = other DNA
atgaaccgtgttctgtatgtagtgattgctatgctgctggtggcctgtgttgtgcttagtctggggctgaatcat

SEQ ID NO: 10560 - DNA, 75 bp, synthetic construct
  source 1..75: mol_type = other DNA
ccttatctcgtggagaaaatcacaccggacagtgtggtactggagcagtccggcatcagaaaaaccctgcgacca

SEQ ID NO: 10561 - DNA, 75 bp, synthetic construct
  source 1..75: mol_type = other DNA
attgttgcttcctccggtccctacctggaaaaatttgaaagccagagaattcataaaacggttgatgaactggcg

SEQ ID NO: 10562 - DNA, 75 bp, synthetic construct
  source 1..75: mol_type = other DNA
agaactggcggacggcagcgtcacgcacagcgggtatgacgcggcaggaaggctcacggcgcagacggacgcggc

SEQ ID NO: 10563 - DNA, 75 bp, synthetic construct
  source 1..75: mol_type = other DNA
accctgaacggtctggcccgcagcggtcgtgatgtccggctgtattcctcactggatgaaacccgtactgcggaa

SEQ ID NO: 10564 - DNA, 75 bp, synthetic construct
  source 1..75: mol_type = other DNA
atgaaatatccatgagtagtctggattttctgaataacattattaatccagcccgggcagaagccggagaagtcc

SEQ ID NO: 10565 - DNA, 75 bp, synthetic construct
  source 1..75: mol_type = other DNA
gccgcagcgagtcactctggctggtgcgtggcggtgtcctgaaactggatgaaggtcaccggctggccgcactct

SEQ ID NO: 10566 - DNA, 75 bp, synthetic construct
  source 1..75: mol_type = other DNA
ctggggcgcagcagccgctggtacaaaagtgaagtggagcagtggatgcagcatcgaatcgaggcatcacgaggg

SEQ ID NO: 10567 - DNA, 75 bp, synthetic construct
  source 1..75: mol_type = other DNA
ctttcaggtgaatgccacgaatgaagagctaaccgtggagtgtacgatgaatgccgctaaatgccgcatggtatc

SEQ ID NO: 10568 - DNA, 75 bp, synthetic construct
  source 1..75: mol_type = other DNA
cggataacgcccaactggaactgaaatataaaaaaggcaaaacgccgctcagtcatcgtcgctggccgggcgaac

SEQ ID NO: 10569 - DNA, 75 bp, synthetic construct
  source 1..75: mol_type = other DNA
caccgtctcggtcaatgtcgctgatgaaggaagcaacccaatcaatgatcataccgtcacgtttgcggtattaag

SEQ ID NO: 10570 - DNA, 75 bp, synthetic construct
  source 1..75: mol_type = other DNA
tgcgcaggataaaagagtgaaaagtattgtcagccagctggcttttgctgacggtgaggttctggttaccggaga

SEQ ID NO: 10571 - DNA, 75 bp, synthetic construct
  source 1..75: mol_type = other DNA
cgtttctggcccggagattttttcccgacgttctatgcctgtcatctggctgtgctgggcgttctggcactgtga

SEQ ID NO: 10572 - DNA, 75 bp, synthetic construct
  source 1..75: mol_type = other DNA
tacagattgtggttgatgagatccgcgatacactggaaaaggcagtcattgactgttgtgatgaggccgatatgt

SEQ ID NO: 10573 - DNA, 75 bp, synthetic construct
  source 1..75: mol_type = other DNA
gcgcaggtgctggacaaaatggcctacctgacgatatggcagggcgatgacgtacagcgccgggtgaaaggcgtg

SEQ ID NO: 10574 - DNA, 75 bp, synthetic construct
  source 1..75: mol_type = other DNA
agtatgaacataaaattggtgacctgattgccaggtttaaagaggttggcggggtggtaaatgaagttgagctat

SEQ ID NO: 10575 - DNA, 75 bp, synthetic construct
  source 1..75: mol_type = other DNA
gttttatttgaggaagcaaacagtgagctggcttattacaacataagacaggagtttaattactcaactgaaatt

SEQ ID NO: 10576 - DNA, 75 bp, synthetic construct
  source 1..75: mol_type = other DNA
cgagagcgtcaggggattgcgccctctgccacacctattactccagaccagcaacgtatccgcgaactggaaaag

SEQ ID NO: 10577 - DNA, 75 bp, synthetic construct
  source 1..75: mol_type = other DNA
aagccgacagtgttaacgtacaggcactgaatatggggcgaattgtcgttgacattgatggtgttaatctcgctg

SEQ ID NO: 10578 - DNA, 75 bp, synthetic construct
  source 1..75: mol_type = other DNA
tgcgcgccggaaccgcgacggtgaaatatcccttcgcgccactggaggtcagcccaggctttcgcgggaaaccgg

SEQ ID NO: 10579 - DNA, 75 bp, synthetic construct
  source 1..75: mol_type = other DNA
ggcacctggcgattgtatgatagcggaaataatgcaaggcctttaaatgtgggtcaatccggaacggggacgctg

SEQ ID NO: 10580 - DNA, 75 bp, synthetic construct
  source 1..75: mol_type = other DNA
atgcgattagccagtcgttttggttatgctgcaaaccagatacgccgtgaccgtccgctgacacatgaagagctg

SEQ ID NO: 10581 - DNA, 75 bp, synthetic construct
  source 1..75: mol_type = other DNA
tcccttaactcgtgaagaactgatgcaggtcgtccccagcgtattcggggaagataagcacacatccagaagcga

SEQ ID NO: 10582 - DNA, 75 bp, synthetic construct
  source 1..75: mol_type = other DNA
aacggcgagcgtaactcccagaagtcactggcagaatggattgaagactgggccgactaccttgtgggctttgat

SEQ ID NO: 10583 - DNA, 75 bp, synthetic construct
  source 1..75: mol_type = other DNA
ggcggtggagatatcctcctgaaatcctcttttgataatggtgctggcggtcttgtctttaatgataaaaagacc

SEQ ID NO: 10584 - DNA, 75 bp, synthetic construct
  source 1..75: mol_type = other DNA
aaaagaaatcatgcatggtttgatttcttcagaaatttagccttattaaaagcaggagagatattcaggtgcaca

SEQ ID NO: 10585 - DNA, 75 bp, synthetic construct
  source 1..75: mol_type = other DNA
gaggaaactgtaaataatcgcgatcgtgcaatgacattcggtcgcttgtgggaaaaattcctcgccagcgcctat

SEQ ID NO: 10586 - DNA, 75 bp, synthetic construct
  source 1..75: mol_type = other DNA
aattatgcgtggcagtctcctttcgctcaataatagcagagcaaaagaaagagcccgaaatgatggtcagatatt

SEQ ID NO: 10587 - DNA, 75 bp, synthetic construct
  source 1..75: mol_type = other DNA
aggcggcactgacttaccgttatggtgatgaacatcagccagtcaccaccgctgacattctgacaccacgacgca

SEQ ID NO: 10588 - DNA, 75 bp, synthetic construct
  source 1..75: mol_type = other DNA
atgcgattagcaagtcgttttggttatgcgaaccagatacgccgtgaccgtccactggcacgcgaagaactgatg

SEQ ID NO: 10589 - DNA, 75 bp, synthetic construct
  source 1..75: mol_type = other DNA
gaaattgatacgtatagagatacagatggctgaagggtttattgatggatgcctttcaatgctggatgttaaact

SEQ ID NO: 10590 - DNA, 75 bp, synthetic construct
  source 1..75: mol_type = other DNA
gaagttaagcgcctgaagtcgcttgaggaagagaacgccagactcaagaagctgcttgccgaagccatgctggat

SEQ ID NO: 10591 - DNA, 75 bp, synthetic construct
  source 1..75: mol_type = other DNA
gttttggataacgcttacacttctgacctgatagcagccaacagcacctctcagtggaaaaatttttcgttgaca

SEQ ID NO: 10592 - DNA, 75 bp, synthetic construct
  source 1..75: mol_type = other DNA
tggactgctttttcgcagcggtggagatgcgcgacaatcccgccctgcgcgatatccctattgctattggcggca

SEQ ID NO: 10593 - DNA, 75 bp, synthetic construct
  source 1..75: mol_type = other DNA
tttattgcatccggtatcgcatggccattgcccgattcagtttcattagctcagcttgacgccatcctttatgcc

SEQ ID NO: 10594 - DNA, 75 bp, synthetic construct
  source 1..75: mol_type = other DNA
tcgcctgaagggttttattacaccatgtatccgttgtatgactggaaagcccgcgatatctggatatataacgcc

SEQ ID NO: 10595 - DNA, 75 bp, synthetic construct
  source 1..75: mol_type = other DNA
aaggcgcggcgctgacagaaaaacatattaatgcggcctttaaagaggtttataccaaccctgaattactctcac

SEQ ID NO: 10596 - DNA, 75 bp, synthetic construct
  source 1..75: mol_type = other DNA
attacccggtacgtgagctgctgggtatcagccaggcagatgagcgcctgatttataacacggtgctgggccgga

SEQ ID NO: 10597 - DNA, 75 bp, synthetic construct
  source 1..75: mol_type = other DNA
tacctggcaggcatgaagctcggcgacacaccgctggtggatttcacccgcgaccgcctgcaccgggaaacgctg

SEQ ID NO: 10598 - DNA, 75 bp, synthetic construct
  source 1..75: mol_type = other DNA
atgcgattagccagccgttttggttatgtaaatcagatccgccgggagcgcccgctgacacgcgaagaactgatg

SEQ ID NO: 10599 - DNA, 75 bp, synthetic construct
  source 1..75: mol_type = other DNA
atgattaaaaaagcttcgctgctgacggcgtgttctgtcacagccttttccgcttgggcacaggataccagcccg

SEQ ID NO: 10600 - DNA, 75 bp, synthetic construct
  source 1..75: mol_type = other DNA
cgggcgctctatccgccgacggatgaatcatcctgataggttgaaatatcccatgaagcgcgtcggcaagcgcgg

SEQ ID NO: 10601 - DNA, 75 bp, synthetic construct
  source 1..75: mol_type = other DNA
ctttaccattcgtaaagtcagtgtcttgcctgagtccgtgcctgccggttttgacgtgctgaaagatctgaatga

SEQ ID NO: 10602 - DNA, 75 bp, synthetic construct
  source 1..75: mol_type = other DNA
tcctgaaaaagataaaaaaagtcatcaacacaatccctgggcttgaagagcaaatctttgcatgccgaaataaaa

SEQ ID NO: 10603 - DNA, 75 bp, synthetic construct
  source 1..75: mol_type = other DNA
ttggtgtgacggcgcaggtgccgtacacggatgtgtggacacataaaccggtgcagttctatcccgggaaacatc

SEQ ID NO: 10604 - DNA, 75 bp, synthetic construct
  source 1..75: mol_type = other DNA
cccctgcggagctggaagccttctgcggtcgatcggctggcagaactgacgacaaactttacgcgtgtggagcca

SEQ ID NO: 10605 - DNA, 75 bp, synthetic construct
  source 1..75: mol_type = other DNA
ttattcactccgcgtggtggaggaatccgaccaacagtcaacctgcacactaccaccgtttgcaacccttgccgg

SEQ ID NO: 10606 - DNA, 75 bp, synthetic construct
  source 1..75: mol_type = other DNA
ggacgtgaccagcagtggcatccgcacattcacctgtcgacaacgaccggcggcgtgacatcagaccacacctgg

SEQ ID NO: 10607 - DNA, 75 bp, synthetic construct
  source 1..75: mol_type = other DNA
atgagtggtaagcgttatcccgaagagtttaaaattgaagcagtcaaacaggttgttgatcgcggttattctgtt

SEQ ID NO: 10608 - DNA, 75 bp, synthetic construct
  source 1..75: mol_type = other DNA
tatccatacccgggccattcacagcattgataccgacattaagctcaatcgcgcattgtgggtgatggcagaaac

SEQ ID NO: 10609 - DNA, 75 bp, synthetic construct
  source 1..75: mol_type = other DNA
cagaagagattaaattccggattcaatctctgtatgatgatgaacaaaagagagctttaagtgaactggtaaatg

SEQ ID NO: 10610 - DNA, 75 bp, synthetic construct
  source 1..75: mol_type = other DNA
tactgatgtatcatcatgtcagtcgttgtccggggcttgtgacactctcacctgaaacattttgtgaacagatga

SEQ ID NO: 10611 - DNA, 75 bp, synthetic construct
  source 1..75: mol_type = other DNA
tcgcctctccacagtatcaggcgttagcaccagaacaaaaagcgcaggctcaggagcaatacttcaatgaagtcg

SEQ ID NO: 10612 - DNA, 75 bp, synthetic construct
  source 1..75: mol_type = other DNA
cactgacggtacttacttctgcgccactaatgtggcgcgggtgaatcttatccgacaggtacaggatccacgtaa

SEQ ID NO: 10613 - DNA, 75 bp, synthetic construct
  source 1..75: mol_type = other DNA
gacgaaccggcggcagaccccgtcgtctcacgcaggaacaatacgagcaggtcgggcgtttactggccgggggtg

SEQ ID NO: 10614 - DNA, 75 bp, synthetic construct
  source 1..75: mol_type = other DNA
gagaacgacatctgtttggccatattcgcaatttccgcatatggcataaagaattaaatgacaggcaattaaaag

SEQ ID NO: 10615 - DNA, 75 bp, synthetic construct
  source 1..75: mol_type = other DNA
atggcaattaagcattttcctgtcgttcgttttacctccagagggcgtgaatacgaagtcgacgaacgcctgatt

SEQ ID NO: 10616 - DNA, 75 bp, synthetic construct
  source 1..75: mol_type = other DNA
acgccaaatttaacgccggggcgttactgcgcggggatatgaagtcccgttttgaagcctacgccaccgggatca

SEQ ID NO: 10617 - DNA, 75 bp, synthetic construct
  source 1..75: mol_type = other DNA
ggtaaactggtgccgcaggatccgaacgatgaaccggcgtcggagctgctgaagcgtattgcggcggaaaaagca

SEQ ID NO: 10618 - DNA, 75 bp, synthetic construct
  source 1..75: mol_type = other DNA
ccagtacaggtttgctggtgagcgatgatgcactggtgctgaaggcgcaggatgtgacacagaacggtgtgctgt

SEQ ID NO: 10619 - DNA, 75 bp, synthetic construct
  source 1..75: mol_type = other DNA
cttttatggaggcacggcaccgcccggtgtcgcggaatatgtgaacaacggaggaaaacatcatgcaatatgcga

SEQ ID NO: 10620 - DNA, 75 bp, synthetic construct
  source 1..75: mol_type = other DNA
ggttcgctaccagagaagaacgggaaggaaaggtgagcacgaatctgatttttaaggagtgtcgccagagtgccg

SEQ ID NO: 10621 - DNA, 75 bp, synthetic construct
  source 1..75: mol_type = other DNA
ccggtgaacccggtgctgggtgcaaaggtgctgccgggcgagacggacattgcgctgcccggcccgctgccgttt

SEQ ID NO: 10622 - DNA, 75 bp, synthetic construct
  source 1..75: mol_type = other DNA
ccgtgagttttgtgtccagtacggtgagactgattacgatttcctgtgccggatggcggcggaggaaggcatctt

SEQ ID NO: 10623 - DNA, 75 bp, synthetic construct
  source 1..75: mol_type = other DNA
agtaataataaaatatgatgtttccttgccgacaaaaaaagtgacaggaatattattgctgattgtcatttcggg

SEQ ID NO: 10624 - DNA, 75 bp, synthetic construct
  source 1..75: mol_type = other DNA
cagcaggcacgggcggcgctctcatgcattcaaatatgactggtatcagcacgatccctgcaccgaagaacaggc

SEQ ID NO: 10625 - DNA, 75 bp, synthetic construct
  source 1..75: mol_type = other DNA
tcgcgggtaccgtgatctcattttcccgcacaacggaaaagcacaccaaagagtacatcacacatctggtgcagt

SEQ ID NO: 10626 - DNA, 75 bp, synthetic construct
  source 1..75: mol_type = other DNA
tggtatcccgttacgattctctgcgtaacccactgacttctctgggagattacctcgaccccgaactcatctctc

SEQ ID NO: 10627 - DNA, 75 bp, synthetic construct
  source 1..75: mol_type = other DNA
cggaagtggtcaacgggcatacggacgttatctgttccacctcaatctgccacattctggctgtacgaaagaata

SEQ ID NO: 10628 - DNA, 75 bp, synthetic construct
  source 1..75: mol_type = other DNA
agcggtgtgcataatcactttggcgtcagctggtttaaccctgaagatcttgccactaagcgtaaagcgatgaac

SEQ ID NO: 10629 - DNA, 75 bp, synthetic construct
  source 1..75: mol_type = other DNA
tgacggaagcagacatcattaccaaatgcgttatgccagccattctcaatgcaggctgggacaacacaacgcaaa

SEQ ID NO: 10630 - DNA, 75 bp, synthetic construct
  source 1..75: mol_type = other DNA
ccgggaaaacatcaccattcatctggatgaccacatccagtctgttcagggtaaagaggactatgaagatgagat

SEQ ID NO: 10631 - DNA, 75 bp, synthetic construct
  source 1..75: mol_type = other DNA
gctataagccgcaactggctgaaggcagcgggcgcacccagaccgtgcgcatggtgctgattaccagcagcacgg

SEQ ID NO: 10632 - DNA, 75 bp, synthetic construct
  source 1..75: mol_type = other DNA
gtagtctccggacaaccctgtgcaggaaaaacaaatctgacagtagagttaatttctgctgttgtggagagtaat

SEQ ID NO: 10633 - DNA, 75 bp, synthetic construct
  source 1..75: mol_type = other DNA
agggactgccggacggctcctttacccgcgaacaggcggaagccgttgccgcacagtaccggaacgtctttatcg

SEQ ID NO: 10634 - DNA, 75 bp, synthetic construct
  source 1..75: mol_type = other DNA
tccaggagctgcgcaaagtggcttccggtatggctattcacaagaaatggcgacagacctatttttccacgccat

SEQ ID NO: 10635 - DNA, 75 bp, synthetic construct
  source 1..75: mol_type = other DNA
cccgaccgaatccgtgaccattgatattgcttatgaaggttccggtagtggcgactggcgaacggatgcatttat

SEQ ID NO: 10636 - DNA, 75 bp, synthetic construct
  source 1..75: mol_type = other DNA
ttttgacatcgtagcctatgcgcgggatctgtttattggggatttcagtttacatgacggacacgtatttaacat

SEQ ID NO: 10637 - DNA, 75 bp, synthetic construct
  source 1..75: mol_type = other DNA
cgatccgctggaagtggcgcagtggctgcaggcctgtcacgatgccggaatggaggttcgtgtacaggttaatga

SEQ ID NO: 10638 - DNA, 75 bp, synthetic construct
  source 1..75: mol_type = other DNA
ttacagtcagtctgctgatttttatcatgatttcagcagttgcctgcgggatctacactcaaatggtaaaggaac

SEQ ID NO: 10639 - DNA, 75 bp, synthetic construct
  source 1..75: mol_type = other DNA
gaatatgccagtatggttgacgatatcagagagaaagtgtctgttgagatggaccggttttttccaaaaaatgat

SEQ ID NO: 10640 - DNA, 75 bp, synthetic construct
  source 1..75: mol_type = other DNA
tggttatcgcaaaatccatctggatctgcgtgacagcgggcaacagtgcggagtaaacagagtctggagactgat

SEQ ID NO: 10641 - DNA, 75 bp, synthetic construct
  source 1..75: mol_type = other DNA
gaagttgtcgaaggaaaaatgcgaccgggttaacgccattgagcgtgataaggcgctggcatgggtggagaaaaa

SEQ ID NO: 10642 - DNA, 75 bp, synthetic construct
  source 1..75: mol_type = other DNA
tggaggcgctggagcagcagtattattcccagtgcctgcagacgctgattgagtccattgaactgttactggatg

SEQ ID NO: 10643 - DNA, 75 bp, synthetic construct
  source 1..75: mol_type = other DNA
gctcagccagcaggctttttcgcgttttgtgcaggactatctggtttttggtaacgcctacctggagaaacgcac

SEQ ID NO: 10644 - DNA, 75 bp, synthetic construct
  source 1..75: mol_type = other DNA
tgaaacaggaattttccggcgttcctgatgatgcggctgatgcgctttcgtcaatgccagagcttattagagcgg

SEQ ID NO: 10645 - DNA, 75 bp, synthetic construct
  source 1..75: mol_type = other DNA
ccatcattttagaggcgcaggatgtgttgataacctacagaggaaaactaccgggaataattactggttctctga

SEQ ID NO: 10646 - DNA, 75 bp, synthetic construct
  source 1..75: mol_type = other DNA
tcgctggcctacacgcagcggcttaaggaagccggattactggcatcaacagggagcacaggcgactcgtatgac

SEQ ID NO: 10647 - DNA, 75 bp, synthetic construct
  source 1..75: mol_type = other DNA
acatcgccatgccgacacagaagacaccgtgctggaaattcagcggctggctacagtctgccgcgacaccctgaa

SEQ ID NO: 10648 - DNA, 75 bp, synthetic construct
  source 1..75: mol_type = other DNA
cttgatatcaaaaaagcaggaaatggcagtagttttactctttatgaacgtgtaccagcattaacgccaaaaatt

SEQ ID NO: 10649 - DNA, 75 bp, synthetic construct
  source 1..75: mol_type = other DNA
atccgcgcaaagcggcagttgccgcggctattgcccgcgttcaggccaaaaaagccgcccagcaaaaggttgtaa

SEQ ID NO: 10650 - DNA, 75 bp, synthetic construct
  source 1..75: mol_type = other DNA
acagaactgcaccattgtgctgaaggccagacgaaccagcagcacggtggtggtgaacacggtggcctctgaaaa

SEQ ID NO: 10651 - DNA, 75 bp, synthetic construct
  source 1..75: mol_type = other DNA
gatctgcacacatcactttcaaaaggctggagctgattgacagaattaacgatataatagccaggcactttcctt

SEQ ID NO: 10652 - DNA, 75 bp, synthetic construct
  source 1..75: mol_type = other DNA
ttgtgacaactgtcgacgaggcatacgaaccaagaaagaatgcgccatctctcaaaaatgcatgggctaatcgtg

SEQ ID NO: 10653 - DNA, 75 bp, synthetic construct
  source 1..75: mol_type = other DNA
ctgcgcgcctcctgccgtcgtctggaggatgccggctggctgcgtaccctgcgcgctccgaacctgcagctggca

SEQ ID NO: 10654 - DNA, 75 bp, synthetic construct
  source 1..75: mol_type = other DNA
ttcctgtttgtaattgtccttttaacagcgatcgcgtatttcgtctcgctcaggcgcaatcacgaatgaataacg

SEQ ID NO: 10655 - DNA, 75 bp, synthetic construct
  source 1..75: mol_type = other DNA
cagattggttgctctgaacggacggtcagacgctacctcaaataccctgaaccgccagccagaaagacccgccac

SEQ ID NO: 10656 - DNA, 75 bp, synthetic construct
  source 1..75: mol_type = other DNA
tcggcgcaaccgtacaggttattccgcacatcactaacgctatcaaagagcgcgtgctggaaggcggcgaaggtc

SEQ ID NO: 10657 - DNA, 75 bp, synthetic construct
  source 1..75: mol_type = other DNA
gtgaactgtacacaaaaatcaacggcgtgtgggagcaacatgccgttcctttgaactatgaggattgctacaact

SEQ ID NO: 10658 - DNA, 75 bp, synthetic construct
  source 1..75: mol_type = other DNA
gggcgctgtttcacttgtctgccagaatctgattgatgtctgcagactgaatacactgcgggggccggtctctct

SEQ ID NO: 10659 - DNA, 75 bp, synthetic construct
  source 1..75: mol_type = other DNA
atcgttggggagcttgggctgcttcagacaatagcggagtggactggcaaccggtagccgctggcttcaaggggc

SEQ ID NO: 10660 - DNA, 75 bp, synthetic construct
  source 1..75: mol_type = other DNA
acggtcaaaaaagcggaaatcaaggtggagctgctgccgaagtacgccgcctgggcagagggtgtcctggctgcc

SEQ ID NO: 10661 - DNA, 75 bp, synthetic construct
  source 1..75: mol_type = other DNA
ccggctggcttcgtggctgttttcaacagtgatgagtcatcgtggcatctcgttgaagatcatcggggtaaaacg

SEQ ID NO: 10662 - DNA, 75 bp, synthetic construct
  source 1..75: mol_type = other DNA
atttacaataaagacagtaacaagctggatctgtacggaaaagttaatgctaagcactacttctcttctaacgat

SEQ ID NO: 10663 - DNA, 75 bp, synthetic construct
  source 1..75: mol_type = other DNA
gtcttatcagtaaacctgcaaccacgcaggggaaacgctttattaacggagctgtgattccgggaggatcattaa

SEQ ID NO: 10664 - DNA, 75 bp, synthetic construct
  source 1..75: mol_type = other DNA
agtgaggctgtccgccgcgtgttcacgaaaacagcgcagctctggcataacgccacgccgcatccgcactggtgc

SEQ ID NO: 10665 - DNA, 75 bp, synthetic construct
  source 1..75: mol_type = other DNA
gattaaggacggtggcagagactgccgtatccgctcaaataactgttatggtcaggtatcccgtcgtgaccagga

SEQ ID NO: 10666 - DNA, 75 bp, synthetic construct
  source 1..75: mol_type = other DNA
gccgtgagctggcagcgcagtatacggagaacacgccgctgatgctggttgtctggtccccggaagagattcagg

SEQ ID NO: 10667 - DNA, 75 bp, synthetic construct
  source 1..75: mol_type = other DNA
aaacttgtcacgctaaacccgaaactcaaatcaacagctgcaggccgttatcaacttctttcacgctggtgggat

SEQ ID NO: 10668 - DNA, 75 bp, synthetic construct
  source 1..75: mol_type = other DNA
cgaatataacggtgggttgccaccaaatgaatcggaaaaccgatactggaaaaactctaaagcggtggccagttt

SEQ ID NO: 10669 - DNA, 75 bp, synthetic construct
  source 1..75: mol_type = other DNA
ttcattcgctgaaagtggaatgtatccatggagaacactttatcagccgggaaataatgcgggcaacggtgttta

SEQ ID NO: 10670 - DNA, 75 bp, synthetic construct
  source 1..75: mol_type = other DNA
tgcccgccagacgggtttacatccctaaaagcaacggcaaactgcgaccactgggtatccccgcgttgcgggatc

SEQ ID NO: 10671 - DNA, 75 bp, synthetic construct
  source 1..75: mol_type = other DNA
atgaagctgattatttttattctcattgttctgattattgcagcgttacttatccggattatcctcagaagtgta

SEQ ID NO: 10672 - DNA, 75 bp, synthetic construct
  source 1..75: mol_type = other DNA
cgcggcctgccgctggcgctcatcagcacggaaggggcaacagcgtggtgcgcagaatatgatgaatggggcaac

SEQ ID NO: 10673 - DNA, 75 bp, synthetic construct
  source 1..75: mol_type = other DNA
aatgaaagcctggcaggaagcgcgggcgagtggtgcgctgaagaaagctgttaacgaacgaatggcgcgtgagcg

SEQ ID NO: 10674 - DNA, 75 bp, synthetic construct
  source 1..75: mol_type = other DNA
atagtggatataaactccgcatcaagtacggcaactttaagctatgtggcctgcaatggatttacctggactcat

SEQ ID NO: 10675 - DNA, 75 bp, synthetic construct
  source 1..75: mol_type = other DNA
acccgtccggtgaagtcacccccagtaaggcagaccgccttatcacggaacgtctggtacaggcactggccctgg

SEQ ID NO: 10676 - DNA, 75 bp, synthetic construct
  source 1..75: mol_type = other DNA
agaacggtttatccccgctggcgcggggagctcggcatagccaggctgatccggcgacggccttacggtttatcc

SEQ ID NO: 10677 - DNA, 75 bp, synthetic construct
  source 1..75: mol_type = other DNA
gctggcaatttcagaacatcgacgcttcttcgcaaaataaaccagggcgatatcaaaggcgcatgtgatcagcta

SEQ ID NO: 10678 - DNA, 75 bp, synthetic construct
  source 1..75: mol_type = other DNA
gccaggaatgctggtcaaacacaaagatggtacctggactgcatcagctaatttacgcggacggctttatctgca

SEQ ID NO: 10679 - DNA, 75 bp, synthetic construct
  source 1..75: mol_type = other DNA
gtgagcgaaattaattaccaggcactgcgtgaggcggcggaacgtgcaattccagcaatggaacgcctgttaatg

SEQ ID NO: 10680 - DNA, 75 bp, synthetic construct
  source 1..75: mol_type = other DNA
ccgtcgtatatggcgaaagttgcatctggcagttgacagcaacacacatgaaatcatctgtgcagacctgtcgct

SEQ ID NO: 10681 - DNA, 75 bp, synthetic construct
  source 1..75: mol_type = other DNA
attaattgtccatacaattcaagtgtgagagacctttgtgaagagattttacaaaaattagatgatgcaattggt

SEQ ID NO: 10682 - DNA, 75 bp, synthetic construct
  source 1..75: mol_type = other DNA
acctgctggcgcgccagtcggagcgccatgcgcggatcggcaagtttaacaatggcggcaacgaagccgacttaa

SEQ ID NO: 10683 - DNA, 75 bp, synthetic construct
  source 1..75: mol_type = other DNA
gtggagatcaccgacgtgatgcgccttacccgtgctgtgaaaaactgctggcggaatgacagtgaaaaaacagcg

SEQ ID NO: 10684 - DNA, 75 bp, synthetic construct
  source 1..75: mol_type = other DNA
gtgaatccgaaatactggccgcaacaccgaaggctgtgaaggctgcatatgatcttgcagcaggtaaagcatccg

SEQ ID NO: 10685 - DNA, 75 bp, synthetic construct
  source 1..75: mol_type = other DNA
gaagcagaatacgatatcttgaaaggcgcttaaatgaaaatgggttttatttaccatcaagcctggccgataaag

SEQ ID NO: 10686 - DNA, 75 bp, synthetic construct
  source 1..75: mol_type = other DNA
gcattgcaaaacatatttccgtgcaggcaatctggccggatggcaggacagaaattattgccgtccttccacggg

SEQ ID NO: 10687 - DNA, 75 bp, synthetic construct
  source 1..75: mol_type = other DNA
atggtggatttacgtaaagcggcgcgggggcagatgtgcaccgtcagaattcctggctactgcaatcacgatccg

SEQ ID NO: 10688 - DNA, 75 bp, synthetic construct
  source 1..75: mol_type = other DNA
gctgtcatgcaatttagtgctgatacggcgctgaatgaggccaaagctatcctgattgctgattgtgaaaatggg

SEQ ID NO: 10689 - DNA, 75 bp, synthetic construct
  source 1..75: mol_type = other DNA
atcgactgcttaacggctggcaactatcaaaactgcatacttttgaagtggctgccaggcatcagtccttcgctc

SEQ ID NO: 10690 - DNA, 75 bp, synthetic construct
  source 1..75: mol_type = other DNA
tcgctcttgctctcattattagctttctttttctgacattatttatctgcctgttatgccttaaacatgagcgaa

SEQ ID NO: 10691 - DNA, 75 bp, synthetic construct
  source 1..75: mol_type = other DNA
caggaaatccaaaaacaaaagagcaatatcagctaacaaagaattttgatgttatctggttatatacagaagacg

SEQ ID NO: 10692 - DNA, 75 bp, synthetic construct
  source 1..75: mol_type = other DNA
gatgtggtcctgaacaaaacacaggcggcatcatgtacgcagtggagcgtaaccaacggaggaacggatgaatag

SEQ ID NO: 10693 - DNA, 75 bp, synthetic construct
  source 1..75: mol_type = other DNA
gttcctgcattgctggagctggctccatggttcggaagaaaacaccgcgataatacgctcaccctgaagcgtttt

SEQ ID NO: 10694 - DNA, 75 bp, synthetic construct
  source 1..75: mol_type = other DNA
gacgacaactggaaggggcgaaacacccgcaagggccaacgccaattgaacggctgaaacaggaatacgaacgcc

SEQ ID NO: 10695 - DNA, 75 bp, synthetic construct
  source 1..75: mol_type = other DNA
atggcgttaacacaccacgaactctgtcagattgcgtacaagttccttaagcgcaacgggttcaaggtttgcttt

SEQ ID NO: 10696 - DNA, 75 bp, synthetic construct
  source 1..75: mol_type = other DNA
tgaaaggcggtcgtgccagacttattctggtcgatacgcaagtttgcgagtttattcagaacacgccagccttcc

SEQ ID NO: 10697 - DNA, 75 bp, synthetic construct
  source 1..75: mol_type = other DNA
gtaccgcaagaatcacgctgggcgtggatgaagattttagcctgaagaactcccagttcgattttctccatccgt

SEQ ID NO: 10698 - DNA, 75 bp, synthetic construct
  source 1..75: mol_type = other DNA
ttttttgccgcgacggggtgttccgtaccgtttactgccacctgcacggtgagccgacctggaacggtcgcatcc

SEQ ID NO: 10699 - DNA, 75 bp, synthetic construct
  source 1..75: mol_type = other DNA
gcttaccgtaaacagcttggcctgaaagatttttctccagaaagccaggacgctgtagctctgcagcagattaaa

SEQ ID NO: 10700 - DNA, 75 bp, synthetic construct
  source 1..75: mol_type = other DNA
aagatttttctccagaaagccaggacgctgtagctctgcagcagattaaagagcgtggtgctttaccgatgattg

SEQ ID NO: 10701 - DNA, 75 bp, synthetic construct
  source 1..75: mol_type = other DNA
cccagaaggtgatgaaactcgaccccacgcgcgcgacgcctgcggttattaacaacgacggtctgaactacgttc

SEQ ID NO: 10702 - DNA, 75 bp, synthetic construct
  source 1..75: mol_type = other DNA
tggagtaaatccagattaaacatctcattgctgatgcttgatattgagcatctggcgcgcagtaaggggctgcgt

SEQ ID NO: 10703 - DNA, 75 bp, synthetic construct
  source 1..75: mol_type = other DNA
cggtggcgcgaacggacggtgaaggccaccgctggcagtaccgctacgataaagacacgctgcaactgacagaag

SEQ ID NO: 10704 - DNA, 75 bp, synthetic construct
  source 1..75: mol_type = other DNA
taagctacagccgcagcgagtcactctggctggcgcggggcggagtagcggcgcagcacagttcgcagccgctaa

SEQ ID NO: 10705 - DNA, 75 bp, synthetic construct
  source 1..75: mol_type = other DNA
gccgggagctggcagcaaagtatccgggagacacgccgctgatgctggttatctggtccccggaagaaattcagg

SEQ ID NO: 10706 - DNA, 75 bp, synthetic construct
  source 1..75: mol_type = other DNA
tcaccctgggcgttcaggccggttatgcccacagcgtcagcggcagcagcgctgaagggtataacggtcaggcca

SEQ ID NO: 10707 - DNA, 75 bp, synthetic construct
  source 1..75: mol_type = other DNA
taccttccgttttccggataacccggacattttttctgatgttgaagctaaacaactcgtggcagaagagctggt

SEQ ID NO: 10708 - DNA, 75 bp, synthetic construct
  source 1..75: mol_type = other DNA
tctttatacacacacaaacgccccggaaacggaataatccgtttcatagttcggttttgtgcactcatcctggcg

SEQ ID NO: 10709 - DNA, 75 bp, synthetic construct
  source 1..75: mol_type = other DNA
atcctcgaccagtttctggatgaaaaggaaggcaaccacaccacggcataccgtgatggtgcgggtatctggacc

SEQ ID NO: 10710 - DNA, 75 bp, synthetic construct
  source 1..75: mol_type = other DNA
tgcgtttttatgtgccctgcccgcactgtggggaggcgcagtatctgaaatttggcgatgagtccacgccttttg

SEQ ID NO: 10711 - DNA, 75 bp, synthetic construct
  source 1..75: mol_type = other DNA
gccatttttagactcggtgggactggtacttgatgataataaatattatctcttttcgcggagggcgaatgataa

SEQ ID NO: 10712 - DNA, 75 bp, synthetic construct
  source 1..75: mol_type = other DNA
tattaaagtaccactgaccgaaccacaaaaagcgggtatcgcgtcattttgtccctataacattggccccggtaa

SEQ ID NO: 10713 - DNA, 75 bp, synthetic construct
  source 1..75: mol_type = other DNA
agtgaaagcatttggcgaagtggctgaactgctgcccgtcgatcccggctgtgtggtaccgaagcttaacagtag

SEQ ID NO: 10714 - DNA, 75 bp, synthetic construct
  source 1..75: mol_type = other DNA
tattactttgaaccagtgacgatacaggagtcaggaaccagcatattaaaaaatgagttagaaaacagtgaggac

SEQ ID NO: 10715 - DNA, 75 bp, synthetic construct
  source 1..75: mol_type = other DNA
ctgaatgtggagaacacgcttgccggtgatggctctgaagagagcatcagcctgactttccgcaatatgaacgat

SEQ ID NO: 10716 - DNA, 75 bp, synthetic construct
  source 1..75: mol_type = other DNA
actacacccgcacggcgcaggtactgatggacacgatggcagaagcgcatatgtgggcggtggacaaaccgctga

SEQ ID NO: 10717 - DNA, 75 bp, synthetic construct
  source 1..75: mol_type = other DNA
cagaaagtaatgacgcccgcgagtgtgcagctccgggcgccgtggcgtgtcgtgactgtggagaaactaacgcat

SEQ ID NO: 10718 - DNA, 75 bp, synthetic construct
  source 1..75: mol_type = other DNA
cctacatatcacctgcataccgggatgactctcccaaagcattatcacttttggcttcgcgtttacacacccgtt

SEQ ID NO: 10719 - DNA, 75 bp, synthetic construct
  source 1..75: mol_type = other DNA
gccgtggagcttgtcgtgcgtggacgtcacaaagaagtggattccggcgagtggaagacgggcgaaagcaacacc

SEQ ID NO: 10720 - DNA, 75 bp, synthetic construct
  source 1..75: mol_type = other DNA
cagcggacaaccagcagttcagcatcgtcctgggtggtgtcacctggcggattagcatcatatggcgcgatctgt

SEQ ID NO: 10721 - DNA, 75 bp, synthetic construct
  source 1..75: mol_type = other DNA
gtggagcagatgcaaaaccagatggacccggtgtacacgccggcgcgaaaaatccacctgtaccactgcgaccat

SEQ ID NO: 10722 - DNA, 75 bp, synthetic construct
  source 1..75: mol_type = other DNA
cctgagcacgtggacaactcacgtggtgaagtcacaaaaaccataagcatatcctgtacgtataagagtggctca

SEQ ID NO: 10723 - DNA, 75 bp, synthetic construct
  source 1..75: mol_type = other DNA
tggatgaatcgcttccgtcgggtgttgactctctgggagaagaaagtcgaaaattatgtggcaatgctgtatctt

SEQ ID NO: 10724 - DNA, 75 bp, synthetic construct
  source 1..75: mol_type = other DNA
attacccgggacattcccggctacctgttcgccggtggtgtggcttacgacggcgatgtaattacggtttacccc

SEQ ID NO: 10725 - DNA, 75 bp, synthetic construct
  source 1..75: mol_type = other DNA
aatggttcgaaaaagcgcatccttgatgatgcgcctgaacatattatcaccggtccctggaaacgcctcgtatac

SEQ ID NO: 10726 - DNA, 75 bp, synthetic construct
  source 1..75: mol_type = other DNA
gatttatggcattcacgtcgggcaaatgctgctgacccgtgctgatatggaagaccgtgaacgcttcctgaacgc

SEQ ID NO: 10727 - DNA, 75 bp, synthetic construct
  source 1..75: mol_type = other DNA
cccctgctcggtgcaaaggtccttcccggtgaaaccgacatcgccctgcccgccccgctgccgttcatcctctcc

SEQ ID NO: 10728 - DNA, 75 bp, synthetic construct
  source 1..75: mol_type = other DNA
tcaggagcaggtgaccgctgatgtcagaatggccatggaggagatcgatgccagaacccgggaattactgacggg

SEQ ID NO: 10729 - DNA, 75 bp, synthetic construct
  source 1..75: mol_type = other DNA
acgctgtgccacccgttgcggctgtgatggaaagcgatgaagcgttacgcctgcgtgtgcctgcagcctttgaag

SEQ ID NO: 10730 - DNA, 75 bp, synthetic construct
  source 1..75: mol_type = other DNA
gtggaggcatccggtgccagcctggagaaggggcgaaacgaccagttgcttaccgcgcttcgtgctctgctgtta

SEQ ID NO: 10731 - DNA, 75 bp, synthetic construct
  source 1..75: mol_type = other DNA
tcggcgatggcggcggaacattgccaacgccggacgcaaagcagacagcattggtaaatgagaaacgccgggctg

SEQ ID NO: 10732 - DNA, 75 bp, synthetic construct
  source 1..75: mol_type = other DNA
atagtgaattcagcactaagcgccgtcagacccgaaaagagattttcctctcccgcatggagcatattctgccat

SEQ ID NO: 10733 - DNA, 75 bp, synthetic construct
  source 1..75: mol_type = other DNA
cccgtgaaatcaaaaaactcgacggcctgtgggcattcagtctggatcgcgaaaactgtggaattgatcagcgtt

SEQ ID NO: 10734 - DNA, 75 bp, synthetic construct
  source 1..75: mol_type = other DNA
aacaatacacagattgccaccacggcttttgtgaaatcggcgattgcagcaatggtaggttctgcacctgcggca

SEQ ID NO: 10735 - DNA, 75 bp, synthetic construct
  source 1..75: mol_type = other DNA
taaaaacggttttgagctgatttcaccgcgctttaaccacatgcgcaatttcctgacctgcctgccctttatggc

SEQ ID NO: 10736 - DNA, 75 bp, synthetic construct
  source 1..75: mol_type = other DNA
gaggcactgcgccgttttgaactgatggtggaagaggtggcgcgtcacgctgaggaggcgaagaagaatgccgga

SEQ ID NO: 10737 - DNA, 75 bp, synthetic construct
  source 1..75: mol_type = other DNA
aattaattgccactatggcaggagaaattactgtttataactttgacgtcatgagtcgggagtatatttcagctt

SEQ ID NO: 10738 - DNA, 75 bp, synthetic construct
  source 1..75: mol_type = other DNA
tataaaagttccactgaccgagccacaaaaagcaggtatcgcgtcattttgcccctataacattggccccggtaa

SEQ ID NO: 10739 - DNA, 75 bp, synthetic construct
  source 1..75: mol_type = other DNA
tgtcggctgctgttctggcgctgattgccgcaggcgcgtctgctcctcagatacttgaccagtttctggacgaaa

SEQ ID NO: 10740 - DNA, 75 bp, synthetic construct
  source 1..75: mol_type = other DNA
agtgatccgcacgctggaactggaatctgaaccagtcaccaaattgttgcaggagaacgcttaccgtgagttgct

SEQ ID NO: 10741 - DNA, 75 bp, synthetic construct
  source 1..75: mol_type = other DNA
gagcttgctggtcgttggggaggtggagaagtggcatcagctgacggcatgcgctttgtcacaccagtgaagacc

SEQ ID NO: 10742 - DNA, 75 bp, synthetic construct
  source 1..75: mol_type = other DNA
gaaggcggtgaatgatgcggtcgcaaatattccgcagccggcggacggtaaaagtctcaccccggatgatgtgcg

SEQ ID NO: 10743 - DNA, 75 bp, synthetic construct
  source 1..75: mol_type = other DNA
gcgtcagtctgttggtggagggattcccgccgtcacacgccgggattatcaccgtatatgaggactcaaagccgg

SEQ ID NO: 10744 - DNA, 75 bp, synthetic construct
  source 1..75: mol_type = other DNA
tttccaataacccattaagtcaatccctctacactgggcgcaccgatgagtttggccaaatagagtttgctttac

SEQ ID NO: 10745 - DNA, 75 bp, synthetic construct
  source 1..75: mol_type = other DNA
agagcggaacgtctggcgctgcttgcatgcctgctggccgttattccggcacttaaccttgcctccagtgatgca

SEQ ID NO: 10746 - DNA, 75 bp, synthetic construct
  source 1..75: mol_type = other DNA
gaaaattgcgacattatctgccagcaataatggtgtgctcgccaatgagaatgcagcaaacaccgtctcggtcaa

SEQ ID NO: 10747 - DNA, 75 bp, synthetic construct
  source 1..75: mol_type = other DNA
aaggccagatgtgccagatcagaatccctggctactgcaatcacaatcccgaaacctctgtgctggcgcattaca

SEQ ID NO: 10748 - DNA, 75 bp, synthetic construct
  source 1..75: mol_type = other DNA
actccaagacagcagaagaattatacgagtggtatctggatgataaattaattataaatcgaagataccaaagaa

SEQ ID NO: 10749 - DNA, 75 bp, synthetic construct
  source 1..75: mol_type = other DNA
gtacgaaatccgttacgaacttaatggccagactatttatgtattgcgcctgtggcacacacgagaaaacaggta

SEQ ID NO: 10750 - DNA, 75 bp, synthetic construct
  source 1..75: mol_type = other DNA
agaagggaaacagcaaaggctccatgctgctgatttggcgaccgttcatcagtcctcgacggatgtttactaccg

SEQ ID NO: 10751 - DNA, 75 bp, synthetic construct
  source 1..75: mol_type = other DNA
ttcagccactggatgcgttcggacagcacatctgcatggagaaacgccagtgcccgttacagtcagaccctggag

SEQ ID NO: 10752 - DNA, 75 bp, synthetic construct
  source 1..75: mol_type = other DNA
ctcgaaccagcctgtctgcaagatctctcccctgcgcaacggacgtttatcagccagtatgcgctgatcgcgttg

SEQ ID NO: 10753 - DNA, 75 bp, synthetic construct
  source 1..75: mol_type = other DNA
aaaactggtggtcaaaagacaaaagccagttcacgggagacgatgaattaaaagagtttgcctgggtgatatggc

SEQ ID NO: 10754 - DNA, 75 bp, synthetic construct
  source 1..75: mol_type = other DNA
tcaaacacaaagccggtttgctcaatctggctgaagaactcagcaacgtatcaaaagcctgtaaaatcatgggcg

SEQ ID NO: 10755 - DNA, 75 bp, synthetic construct
  source 1..75: mol_type = other DNA
cctgtccgatcatgaaatcaggaccgtcctggcgcgcctggaggacatcccggaagaccagcggattgagtccgg

SEQ ID NO: 10756 - DNA, 75 bp, synthetic construct
  source 1..75: mol_type = other DNA
cactgacggcacttacttctgcgccaccaacgtggcgcgagtaaatcttatccgacaggtacaggagcagcgtaa

SEQ ID NO: 10757 - DNA, 75 bp, synthetic construct
  source 1..75: mol_type = other DNA
gacaaaaccacacgatatgcaggcggcgatagcctgtagctcatgccacgatctaatcgacgggcgggtaaaaac

SEQ ID NO: 10758 - DNA, 75 bp, synthetic construct
  source 1..75: mol_type = other DNA
ggcctggttactaatgcagtggttctgtggaacacgctctatatggaggaagcgttgagctggatgcgccgtaat

SEQ ID NO: 10759 - DNA, 75 bp, synthetic construct
  source 1..75: mol_type = other DNA
cctgccgttcgccagccgctggcagaggataaaacattactgccatttttcagcgatgagcgggttattcgtgca

SEQ ID NO: 10760 - DNA, 75 bp, synthetic construct
  source 1..75: mol_type = other DNA
tcgatctcggcgcatccagtgggcgcgtgatgctggcgcgttacgagcgtgaatgccgcagcctgacgctgcgcg

SEQ ID NO: 10761 - DNA, 75 bp, synthetic construct
  source 1..75: mol_type = other DNA
aagcaatgggaaaagcctcttcccaggaagtggcagcacgtctgggaatgacccgggatgaggcgattaacgagc

SEQ ID NO: 10762 - DNA, 75 bp, synthetic construct
  source 1..75: mol_type = other DNA
gttgcccgataacattatgtataccaaaaacaggcgtttttgttaaaaatgcactgcattcaaaagtctgttctt

SEQ ID NO: 10763 - DNA, 75 bp, synthetic construct
  source 1..75: mol_type = other DNA
aattcacgaacgttcccgaaatatcgataacagacgctctctgggacattgggagggcgatttagtctcaggtac

SEQ ID NO: 10764 - DNA, 75 bp, synthetic construct
  source 1..75: mol_type = other DNA
acatgtgctgtggcagtcgcatgttctggttcgataagaatgacgaccgggcgatatttagcgatatcagaaagg

SEQ ID NO: 10765 - DNA, 75 bp, synthetic construct
  source 1..75: mol_type = other DNA
ctgccagcggccccgctcggcctgaaatccgccccggcgatattttccgggataactacggcggcacggtaacga

SEQ ID NO: 10766 - DNA, 75 bp, synthetic construct
  source 1..75: mol_type = other DNA
tgttgtctcagctggccggaggacaggtttatccttatgtggtcccgctgacggagggaaagcctgcggtatctc

SEQ ID NO: 10767 - DNA, 75 bp, synthetic construct
  source 1..75: mol_type = other DNA
gattaacccggacgtcctggcgatgagcggtcatatcgccagacgctgcagtgagcagaagcgggtacgtatccc

SEQ ID NO: 10768 - DNA, 75 bp, synthetic construct
  source 1..75: mol_type = other DNA
atcggggaggaagtggctgatctcagccaccgagaaaatgacatcaaaaatgccattaacctgatgttctgggga

SEQ ID NO: 10769 - DNA, 75 bp, synthetic construct
  source 1..75: mol_type = other DNA
aaatactcattcgaaagtccctggcgacaattagcttttgacgaacaccgtcgtacaatagaagaccggcaggca

SEQ ID NO: 10770 - DNA, 75 bp, synthetic construct
  source 1..75: mol_type = other DNA
ttactggtgggtgccgtccttcaacgagccgacagccttcgcgcccggctccgtgtttcacctgctggagccgga

SEQ ID NO: 10771 - DNA, 75 bp, synthetic construct
  source 1..75: mol_type = other DNA
atgagcaccatcctgaaatgggcgggtaataaaaccgccattatgccagaactgaaaaaataccttcctgctggc

SEQ ID NO: 10772 - DNA, 75 bp, synthetic construct
  source 1..75: mol_type = other DNA
aaaggtgacaggggagagcggggagagaccggtctgacgggaaatgcaggtccacagggtccaaagggagatacc

SEQ ID NO: 10773 - DNA, 75 bp, synthetic construct
  source 1..75: mol_type = other DNA
cacgatcttgttatcaacagaacagctgaaaagaaaaatacctacgatgctcttcagcgttgcgggcttataaat

SEQ ID NO: 10774 - DNA, 75 bp, synthetic construct
  source 1..75: mol_type = other DNA
tcctcgtcctcggcctctgcggccgctcaaaaagccagtgagtcatcacaaagtgcagcagaagctgaattgtca

SEQ ID NO: 10775 - DNA, 75 bp, synthetic construct
  source 1..75: mol_type = other DNA
tggctgtcgttgttgctaccgcggtaagtccatctgcgtttgcgggtgatactgttgaggcggcaacgacagaat

SEQ ID NO: 10776 - DNA, 75 bp, synthetic construct
  source 1..75: mol_type = other DNA
cacgattgttgaagtgatggggctctgtgcgcagttcacctcgggggcacagtgtggcagcgaagttcagggggt

SEQ ID NO: 10777 - DNA, 75 bp, synthetic construct
  source 1..75: mol_type = other DNA
atgtggtggccttttagtcgtaaaaaaagcgatctgcgtaacctgtccattgatgattttctggcgttgtctggt

SEQ ID NO: 10778 - DNA, 75 bp, synthetic construct
  source 1..75: mol_type = other DNA
actgcagatgcggaagatgacgattatctcgatgatgaaaatgctgactggaaaacgacaactcaggggcaaaaa

SEQ ID NO: 10779 - DNA, 75 bp, synthetic construct
  source 1..75: mol_type = other DNA
aatcacaaaccgttgcggcaagggttccgcatgaagttatgaacaatgttgaggcggtaaaaatgcctggcgaaa

SEQ ID NO: 10780 - DNA, 75 bp, synthetic construct
  source 1..75: mol_type = other DNA
tgccgcccactggggcgacggcacgacctcatcctccgatggccagcgcttccgcgcgggtggccggggcgagag

SEQ ID NO: 10781 - DNA, 75 bp, synthetic construct
  source 1..75: mol_type = other DNA
atttgtctgttactgatgatgttgttgttcctgctactgctactgctactgctactgctactgctcttctttttc

SEQ ID NO: 10782 - DNA, 75 bp, synthetic construct
  source 1..75: mol_type = other DNA
agggcgacatgacgcagtatggcggtagcattgttcagggttcagccggggtgcgcatcggtgccccaaccggtg

SEQ ID NO: 10783 - DNA, 75 bp, synthetic construct
  source 1..75: mol_type = other DNA
gcgggagttccgtctggtgctgaccacgcaggcgcagcgtgcggaagaggcccgtaaacagcgcaccgcttcctt

SEQ ID NO: 10784 - DNA, 75 bp, synthetic construct
  source 1..75: mol_type = other DNA
catatccaaatggattaaaaaatacagtgaggttgatttttcgatgaagggacaaaaggaagatttgaggccgaa

SEQ ID NO: 10785 - DNA, 75 bp, synthetic construct
  source 1..75: mol_type = other DNA
atgccgggccctcacttcgtgatcagatcatggccctggatgaggcaaaaggggcagaagcgcaggctgaaaaac

SEQ ID NO: 10786 - DNA, 75 bp, synthetic construct
  source 1..75: mol_type = other DNA
atgccgccgattatggcgcaactctcggtaacagcagtgataaaacggctaatatcactctggattatcagacgc

SEQ ID NO: 10787 - DNA, 75 bp, synthetic construct
  source 1..75: mol_type = other DNA
cgacagatgacgatgagctgccggaagtcaccggacctgcgtggatagtcgacaatgtggcgcattatggcggat

SEQ ID NO: 10788 - DNA, 75 bp, synthetic construct
  source 1..75: mol_type = other DNA
aataaacaatcacttgggcctcgccgattttctagcgcgtatgtattcgaaggtgaacgaggtaagcgcgacagc

SEQ ID NO: 10789 - DNA, 75 bp, synthetic construct
  source 1..75: mol_type = other DNA
ggaaggagaccagttcgagaaaattgaggtcgattttggcaggtcgacgaagaataacatcactcagggtagtgg

SEQ ID NO: 10790 - DNA, 75 bp, synthetic construct
  source 1..75: mol_type = other DNA
ctttgtccgcagcttattggtcgcgatgcgcaccgtatcgaagatatctggcagtttttctataaaggtgcttac

SEQ ID NO: 10791 - DNA, 75 bp, synthetic construct
  source 1..75: mol_type = other DNA
tggaagtcccccgtgatcagtatgccggcgctgttgaaaccatgaggaataagatccgcgaaggtaaagtacccg

SEQ ID NO: 10792 - DNA, 75 bp, synthetic construct
  source 1..75: mol_type = other DNA
aagcatgtgacggtggatgaggtacatccggttctgcaggcgatggtggatgacgctgtggggaccattccggta

SEQ ID NO: 10793 - DNA, 75 bp, synthetic construct
  source 1..75: mol_type = other DNA
ggctaccagacccgttatgaatacgaccgcttcggccagatgacggcggtccaccgcgaggaaggcatcagcctt

SEQ ID NO: 10794 - DNA, 75 bp, synthetic construct
  source 1..75: mol_type = other DNA
accactcacaccacaaactcaaaatccgtggcctgcaaagtccggtggacgtgctgacttttacaggccacgaac

SEQ ID NO: 10795 - DNA, 75 bp, synthetic construct
  source 1..75: mol_type = other DNA
tgaggaaagcgaagccagactgcaaattaccggataaggcgatgagttatctggagcggaacggactgataagcg

SEQ ID NO: 10796 - DNA, 75 bp, synthetic construct
  source 1..75: mol_type = other DNA
ggccgttttcttcgtatacggatgatggcgcagcacttattcaggcgattgtcgcagaaggtgatgtgagcacac

SEQ ID NO: 10797 - DNA, 75 bp, synthetic construct
  source 1..75: mol_type = other DNA
cagtttgctgcgtttgacgattattgtcggaaagtgatgagcagaaatctcgcagagtgtttcagtattcataat

SEQ ID NO: 10798 - DNA, 75 bp, synthetic construct
  source 1..75: mol_type = other DNA
ttgccttactccgctcgtctgaagtcaactcagaagtccgtcaatccgggactggtgagggcttcggcaaccttt

SEQ ID NO: 10799 - DNA, 75 bp, synthetic construct
  source 1..75: mol_type = other DNA
ttcgtgcactgggcgaagaattcgccatggtgctggcggatttacagcgtacatttgaggagaaaatagccgcgc

SEQ ID NO: 10800 - DNA, 75 bp, synthetic construct
  source 1..75: mol_type = other DNA
ccggaaaatatcgcgttcacccgctggctgacacacctgcagaacggtgtactgctggatgagcaaaactgcctg

SEQ ID NO: 10801 - DNA, 75 bp, synthetic construct
  source 1..75: mol_type = other DNA
cgggaacatttaccgttgaagtcggcacgctggacagtggcgtgacggaggaaatgtatctggaaatggagcggt

SEQ ID NO: 10802 - DNA, 75 bp, synthetic construct
  source 1..75: mol_type = other DNA
gttcttcattatacagctcttgtgaaaaaagcgaatggcggtactgtttctgaaggtgctttttctgcagttgca

SEQ ID NO: 10803 - DNA, 75 bp, synthetic construct
  source 1..75: mol_type = other DNA
ctcggtgaactggtcggtgtataccgtcttgccgcgcagcctgccaccaccacgctccagttctccgtagatgag

SEQ ID NO: 10804 - DNA, 75 bp, synthetic construct
  source 1..75: mol_type = other DNA
gtgttcatgcccgaggcagatagcctcaagcacccgcagccattctacttaactaccgttacctcgccaatgtga

SEQ ID NO: 10805 - DNA, 75 bp, synthetic construct
  source 1..75: mol_type = other DNA
cgcagcgggtatgacgcggcaggaaggctcacggcgcagacggacgcggcgggacggaggacagagtacggtctg

SEQ ID NO: 10806 - DNA, 75 bp, synthetic construct
  source 1..75: mol_type = other DNA
tgagctggagcacgccagaaccacggctcctgccattcgcctgacgctccatcatgaaatcgctgatttctgcgc

SEQ ID NO: 10807 - DNA, 75 bp, synthetic construct
  source 1..75: mol_type = other DNA
cacttaaccgggctcaggctctggcgaagatcgcagaaatcaaagctaagttcggactgaaaggagccagtgtat

SEQ ID NO: 10808 - DNA, 75 bp, synthetic construct
  source 1..75: mol_type = other DNA
cctgtttatcttccgtggccgacggggtgacaccgttaaaattctttgggccgatgctgatggtctgtgcctgtt

SEQ ID NO: 10809 - DNA, 75 bp, synthetic construct
  source 1..75: mol_type = other DNA
ctgcggtgctggcggtgatggattacacccagatgaactcgaaagccgatgaggaggttcgtaaagagcttaatg

SEQ ID NO: 10810 - DNA, 75 bp, synthetic construct
  source 1..75: mol_type = other DNA
atgttaactggggcttttctctatctgccgttggtgttcatgcccgaggcagatagcctcaagcacccgcagcaa

SEQ ID NO: 10811 - DNA, 75 bp, synthetic construct
  source 1..75: mol_type = other DNA
gccacgaaaggctttgatgagcagacccgtcgcctgaaagaaaacatgggaacactggagacctgggcggataaa

SEQ ID NO: 10812 - DNA, 75 bp, synthetic construct
  source 1..75: mol_type = other DNA
gtcgtctaaacataatctgtcgcgagtgccggaagagcgaagttatgcagcgtgttctgacgttttatcagggga

SEQ ID NO: 10813 - DNA, 75 bp, synthetic construct
  source 1..75: mol_type = other DNA
ggaagaagagacgacccggccaaccctgaaagaactggcagcgaagctgtccggaggagtgaatggttacagtcg

SEQ ID NO: 10814 - DNA, 75 bp, synthetic construct
  source 1..75: mol_type = other DNA
gtcccgggtgttgcgggggcatatatgctggggcttccgttttctctgggagccttcttttccggcggactggca

SEQ ID NO: 10815 - DNA, 75 bp, synthetic construct
  source 1..75: mol_type = other DNA
gcgatcaaggcagtcattatacgagcaggcagttccggcagttactgtggcgataccggatcaggcagagtatga

SEQ ID NO: 10816 - DNA, 75 bp, synthetic construct
  source 1..75: mol_type = other DNA
tccggaccttatctggtcattacctgacggagaaatacgtcgctacgacagtcgcctaaacataatctgtcgcga

SEQ ID NO: 10817 - DNA, 75 bp, synthetic construct
  source 1..75: mol_type = other DNA
aaacaacacctttggttaacgccattcgcctgagcctgctgccgctggccggtctctcgttttccgcttttgctg

SEQ ID NO: 10818 - DNA, 75 bp, synthetic construct
  source 1..75: mol_type = other DNA
ataactttgctgttgtttgtggagtggcacttcgtgggcttttacgcccactgcctgtaaccaccgttgaatggg

SEQ ID NO: 10819 - DNA, 75 bp, synthetic construct
  source 1..75: mol_type = other DNA
tcttaactatttgcttatcggttttaattgctttgagctgtttctgttatttatacctttggctgggtttctgat

SEQ ID NO: 10820 - DNA, 75 bp, synthetic construct
  source 1..75: mol_type = other DNA
ggagaagtgggaaaaaggaaagatgcgtctgctgtgggataacaaaaagcggcgtaacgaagcgctggactgcct

SEQ ID NO: 10821 - DNA, 75 bp, synthetic construct
  source 1..75: mol_type = other DNA
atgagtccactccggtatcagaaatggctacgtctcaatgaagtcaggcgaccgatgctgaatgaacattacgat

SEQ ID NO: 10822 - DNA, 75 bp, synthetic construct
  source 1..75: mol_type = other DNA
tcaaacagagtctgagtcgacgaggaaattgctgggataacagcccgatggagcgcttcttcaggagtctgaaaa

SEQ ID NO: 10823 - DNA, 75 bp, synthetic construct
  source 1..75: mol_type = other DNA
cggcactatgggtcacgccagtaaagcgcggactactctggggtatcggtaaagtggttaccgccacttgccgaa

SEQ ID NO: 10824 - DNA, 75 bp, synthetic construct
  source 1..75: mol_type = other DNA
agtggggcgagcgttttccgtcactggccggaatggaacgctggcagtggcaggatatgccgttctggcaggtta

SEQ ID NO: 10825 - DNA, 75 bp, synthetic construct
  source 1..75: mol_type = other DNA
ccttgccgaaggcgaagaagctcacagcttcaacgaatttaaacaggcgctttccagttcggcaaaatctaacgg

SEQ ID NO: 10826 - DNA, 75 bp, synthetic construct
  source 1..75: mol_type = other DNA
gtcgatggtgttaatctcgctgaactgattaacatggtctgcgataacggtcactcccttcgtgttgttgatgaa

SEQ ID NO: 10827 - DNA, 75 bp, synthetic construct
  source 1..75: mol_type = other DNA
tgggatgtggcaagcctgatggattttgctgtgccggtggtggcgtgtctgctgatctggatgttgatccgttaa

SEQ ID NO: 10828 - DNA, 75 bp, synthetic construct
  source 1..75: mol_type = other DNA
ctactgaaattcttaatcagcttggtggaaaccgctttattgctatgacaggcgcaaagaactttgcctgttttg

SEQ ID NO: 10829 - DNA, 75 bp, synthetic construct
  source 1..75: mol_type = other DNA
agccgtccggtgtgaaggtgtctgccggtgagcgccaggaagaccgggcgcatgcagccatgctggcgcttgaaa

SEQ ID NO: 10830 - DNA, 75 bp, synthetic construct
  source 1..75: mol_type = other DNA
ctttccattcaggccgttccccgtgaaggcgcggggcgtaccattcagctggtcagtgacctgcgcggaaccgga

SEQ ID NO: 10831 - DNA, 75 bp, synthetic construct
  source 1..75: mol_type = other DNA
gaagagaacccgcatcagctgcagcagcttatccgcctgccggggcagcagtatgatgaggagtccggcctgtat

SEQ ID NO: 10832 - DNA, 75 bp, synthetic construct
  source 1..75: mol_type = other DNA
tgtgatagtcgatggagaacagtatattcctccaggtaaatatatattctcagtaagtggtaaatgtatggcatc

SEQ ID NO: 10833 - DNA, 75 bp, synthetic construct
  source 1..75: mol_type = other DNA
gcaggaacgcctgaaaaaattaatctggctggcggcgcaggcagtaaaagcagaactttttggtggggaaggtta

SEQ ID NO: 10834 - DNA, 75 bp, synthetic construct
  source 1..75: mol_type = other DNA
tgccactaagcgtaaagcgatgaaccgtggactacggaaaattttgctcgcccgccacgcgttgttcgatgaagt

SEQ ID NO: 10835 - DNA, 75 bp, synthetic construct
  source 1..75: mol_type = other DNA
aacaaaccccgtatatttccgtagtggatattctgcgagcaaggcgctctaccggcttgctaaaaactaatgtga

SEQ ID NO: 10836 - DNA, 75 bp, synthetic construct
  source 1..75: mol_type = other DNA
ggagccggagctaacgcggtgaaatacaatccgaaatataacgaactgtatgtcaccaacttcactagcggcacc

SEQ ID NO: 10837 - DNA, 75 bp, synthetic construct
  source 1..75: mol_type = other DNA
atgaataaaaaatatgaactggttgttaaggggataaataattacggggataaggttactgttactgtgaagccg

SEQ ID NO: 10838 - DNA, 75 bp, synthetic construct
  source 1..75: mol_type = other DNA
ttaaagggataaatatttacccggataagattactgttactgtggcgctggaaactggtgggtatacgtcactgt

SEQ ID NO: 10839 - DNA, 75 bp, synthetic construct
  source 1..75: mol_type = other DNA
aagcggcaactggcggagcaggcagaggaactggctatcctccaaaaggccgcgacatactttgcgaatcgtctg

SEQ ID NO: 10840 - DNA, 75 bp, synthetic construct
  source 1..75: mol_type = other DNA
aaggctatatcagacgcttccgcctggctgaattgctgggcgttagtgtatccaccatcgaccgtaaagtaagaa

SEQ ID NO: 10841 - DNA, 75 bp, synthetic construct
  source 1..75: mol_type = other DNA
aatgcatgatgcaacagaagcgtattgccaggacatccccgcaccactgaaacgccttcttcctgactataaacg

SEQ ID NO: 10842 - DNA, 75 bp, synthetic construct
  source 1..75: mol_type = other DNA
aggctgtaacgaacattatcgaagcgttcgggaaagatttttcacagggcactggtgcaatggccggacgatggt

SEQ ID NO: 10843 - DNA, 75 bp, synthetic construct
  source 1..75: mol_type = other DNA
attttcgggaaacgctgaatacccgccgtgaaaaatcgtggcataagaccaccgtcggggaagtggtgaaggaaa

SEQ ID NO: 10844 - DNA, 75 bp, synthetic construct
  source 1..75: mol_type = other DNA
gcgcaggtctacatcgaaggtcagcttcgcacccgtagctgggaggataacggtatcacccgttacgtcaccgaa

SEQ ID NO: 10845 - DNA, 75 bp, synthetic construct
  source 1..75: mol_type = other DNA
gtgaagtttgatattggtgctgatggtactgtcacccgaattgagtttatccgttcagagccgcaccatctgttt

SEQ ID NO: 10846 - DNA, 75 bp, synthetic construct
  source 1..75: mol_type = other DNA
gtcgatggtgttaatctcgctgaactgtttaataaagtcgcggaaaatggttattcactccgcgtggtggatgag

SEQ ID NO: 10847 - DNA, 75 bp, synthetic construct
  source 1..75: mol_type = other DNA
atataatggtgggttaccaccaaacgaatcagaaaaccgatactggaaaaactctaacgcggaggccagttttag

SEQ ID NO: 10848 - DNA, 75 bp, synthetic construct
  source 1..75: mol_type = other DNA
taaagcaatagataaccacgggaaggaaataacaaacagaaaaggattacctaatgtctgcagagttcatggtaa

SEQ ID NO: 10849 - DNA, 75 bp, synthetic construct
  source 1..75: mol_type = other DNA
gtcgtctaaacataatctgtcgcgagtgccggaaggcaaggagaagcaggctattgttaacaccaagctgtaatg

SEQ ID NO: 10850 - DNA, 75 bp, synthetic construct
  source 1..75: mol_type = other DNA
tggtgccatcgtggtggttggtgttgttctgctggtcgccattatctggctgctgggcaagtcggcctccatcat

SEQ ID NO: 10851 - DNA, 75 bp, synthetic construct
  source 1..75: mol_type = other DNA
cgctgaagccgcctctcagagcgcagcggcggcaaagaaatccgaaactgcagcggcatcatcgaagaacgcggc

SEQ ID NO: 10852 - DNA, 75 bp, synthetic construct
  source 1..75: mol_type = other DNA
ctgtatggtgaaatgcgcgtggggtcacgtgtggtatctcaggagatcagcacggcagatgaaggggacggtggt

SEQ ID NO: 10853 - DNA, 75 bp, synthetic construct
  source 1..75: mol_type = other DNA
gctgggtggtggagcagatgtcagagctgacggccatgacagcctcgtttgtgctggcaacaccgacggagacgg

SEQ ID NO: 10854 - DNA, 75 bp, synthetic construct
  source 1..75: mol_type = other DNA
ggcagagcagtggccagcgtacggaaaaaacattttccctgccggtgatgctctaccgcggtgtgttcagagccg

SEQ ID NO: 10855 - DNA, 75 bp, synthetic construct
  source 1..75: mol_type = other DNA
cctttatttacgctgcgctttttctccccacaggaaggtattgtcggtgtacggattgagcattttcagggggcg

SEQ ID NO: 10856 - DNA, 75 bp, synthetic construct
  source 1..75: mol_type = other DNA
tagcgtcaggcctcaccattataacggagggctgacgccggaagagtcagagaacagatatcatttttactgtaa

SEQ ID NO: 10857 - DNA, 75 bp, synthetic construct
  source 1..75: mol_type = other DNA
cgtgggcgcaacaaagccgacaaggtggacatcgacctgtcccacagcaatctggcccccggcctgctgtgcgca

SEQ ID NO: 10858 - DNA, 75 bp, synthetic construct
  source 1..75: mol_type = other DNA
cctgtttttattgctggcgggaatgtcgaaggtttagagcaatacagtcttttcgaaaacgatataatactctct

SEQ ID NO: 10859 - DNA, 75 bp, synthetic construct
  source 1..75: mol_type = other DNA
ctgttcaggcgtatcgggctggccattggttactgggagccgatggcgctgacggacgtcacccggtcaccggga

SEQ ID NO: 10860 - DNA, 75 bp, synthetic construct
  source 1..75: mol_type = other DNA
cgcaacaacaacatcgttctggaatatcgcaaaaaagaactggttcgcctgaccctgacagaccccgtgacaggg

SEQ ID NO: 10861 - DNA, 75 bp, synthetic construct
  source 1..75: mol_type = other DNA
atgattatccagccggaagcgattctctttggcaacatcatcgcccagggagcctgtgccgctgatgccgtggcc

SEQ ID NO: 10862 - DNA, 75 bp, synthetic construct
  source 1..75: mol_type = other DNA
acgggacatgacgacgttcctgtcactcagccaggaggtgctgttatccctgctcagtttctgcactgcgtgcag

SEQ ID NO: 10863 - DNA, 75 bp, synthetic construct
  source 1..75: mol_type = other DNA
atcagcctggaatgtaaacattattcgctgaccagcgatgcgccgtcagggaaggaaggtgccgcattcatggcg

SEQ ID NO: 10864 - DNA, 75 bp, synthetic construct
  source 1..75: mol_type = other DNA
tcttccgcagtctgaaaacagaatgggtgccaaccgatggctacacaggcaaagacgtggcccggcagcaaatca

SEQ ID NO: 10865 - DNA, 75 bp, synthetic construct
  source 1..75: mol_type = other DNA
gagctgggaatcgccatcgaatggggcggggactggaaaacgttgaaggacgggcctcactttcagttgaaacga

SEQ ID NO: 10866 - DNA, 75 bp, synthetic construct
  source 1..75: mol_type = other DNA
actggccgggatgattaaacaggcgtggtgcagtgccctgggagtggatgtcgggtgccatgccacgctggtgca

SEQ ID NO: 10867 - DNA, 75 bp, synthetic construct
  source 1..75: mol_type = other DNA
cgatgaagaaattatcatccagtgggagagcggagagtatgaaccaactatcagtatgcttatcccactggcaaa

SEQ ID NO: 10868 - DNA, 75 bp, synthetic construct
  source 1..75: mol_type = other DNA
gcacggggtgacggactgttacacgctgttccgggacgcttaccatctggcggggattgagatgccggattttca

SEQ ID NO: 10869 - DNA, 75 bp, synthetic construct
  source 1..75: mol_type = other DNA
tttttaaatcagtgttcaacggcagacccggctgcaatctcactgatcatgagtaagtttggtaagattaagggg

SEQ ID NO: 10870 - DNA, 75 bp, synthetic construct
  source 1..75: mol_type = other DNA
gtaacggtatgttgatgtgtcaggagctatataatcgctctacgagtgaacttactaatgagcaacttcaagccc

SEQ ID NO: 10871 - DNA, 75 bp, synthetic construct
  source 1..75: mol_type = other DNA
atctcgttgctgcgatgggagccaatcgggttattggcaatggtcctaatatcccctggaaaattccgggtgagc

SEQ ID NO: 10872 - DNA, 75 bp, synthetic construct
  source 1..75: mol_type = other DNA
atgtcaaagtcagcagcgggtacggtcagccagccggggcgcaatgtccgggcaaaatcaggtttaaaccgttcg

SEQ ID NO: 10873 - DNA, 75 bp, synthetic construct
  source 1..75: mol_type = other DNA
tcagggaagccaggagcagagccgctacaacggggaaaaaacgacaaacagaaatttcacatggagtcgctttta

SEQ ID NO: 10874 - DNA, 75 bp, synthetic construct
  source 1..75: mol_type = other DNA
aacctttacctggacaatatggcggtcaccggcttttaccgggtgcccctgtcctctgcacaggcgggcgatatc

SEQ ID NO: 10875 - DNA, 75 bp, synthetic construct
  source 1..75: mol_type = other DNA
tcaatcatctgctctccaatgactagtctaaaaactagtattaagactatcacttatttaagtgatattggttgt

SEQ ID NO: 10876 - DNA, 75 bp, synthetic construct
  source 1..75: mol_type = other DNA
gctttctgctgctggagtgtacggagctgggcgaatttacgcagagtcacggaggcaacaatggcgacttccttt

SEQ ID NO: 10877 - DNA, 75 bp, synthetic construct
  source 1..75: mol_type = other DNA
gtttatgacgtagcccgtaaggcggcaatggatgttgtgaccgggcagatgcgcgatggtggtctgttctccgga

SEQ ID NO: 10878 - DNA, 75 bp, synthetic construct
  source 1..75: mol_type = other DNA
acctgcaaaaacgcaggaaacagtcctgtctgccctgctggcgcagacggaggaagtgagcgtgccgctggcctc

SEQ ID NO: 10879 - DNA, 75 bp, synthetic construct
  source 1..75: mol_type = other DNA
acgggtgaatattctgaagggggaacagcgtcgtgtcagtggcagtgcacgtgtttccctcaagcgtcatatctg

SEQ ID NO: 10880 - DNA, 75 bp, synthetic construct
  source 1..75: mol_type = other DNA
attaagcgttaccgaaccggcgacagtcggggagatagcgcagaatacttacctttcacgcgaacgctgccagtt

SEQ ID NO: 10881 - DNA, 75 bp, synthetic construct
  source 1..75: mol_type = other DNA
tgtatgacctgatgtaccgtgccggcgtgccgttacgcaacatgcgtgtctgtgaaccttttggtcctgaacaac

SEQ ID NO: 10882 - DNA, 75 bp, synthetic construct
  source 1..75: mol_type = other DNA
tggccgtagcaatattgctatggtttctgagtacgttaaggcgtaagcccagccaaaagaaaggctgtattgacg

SEQ ID NO: 10883 - DNA, 75 bp, synthetic construct
  source 1..75: mol_type = other DNA
tttatgttggcacttaccataaatacaactgcggaagcattgcgggagcctggctcgatctgaccgattttgata

SEQ ID NO: 10884 - DNA, 75 bp, synthetic construct
  source 1..75: mol_type = other DNA
atgcgggcgaaacttctgggaatagtcctgacaacccctattgcgatcagctcttttgcttctaccgagactata

SEQ ID NO: 10885 - DNA, 75 bp, synthetic construct
  source 1..75: mol_type = other DNA
gtgtgcagcttgtcggagaaatcccggccaatacctttgcagttgttctagagagtgacagtatgtcaacatctg

SEQ ID NO: 10886 - DNA, 75 bp, synthetic construct
  source 1..75: mol_type = other DNA
atcatgcctttcgtgtggaataagccttttgaagacctgaaagagcaatgtagtggtgatctgctccgtatcact

SEQ ID NO: 10887 - DNA, 75 bp, synthetic construct
  source 1..75: mol_type = other DNA
tggtgatgcttcaggtcagaaaggttgaccggagcagggcgacgccccgcagcgccgcgaggagcggtgaactgt

SEQ ID NO: 10888 - DNA, 75 bp, synthetic construct
  source 1..75: mol_type = other DNA
gctggcgcatgactggtcagaacgtcttgcggagcttaaaggtgctgcctttggtaatcccccatacagccgcgc

SEQ ID NO: 10889 - DNA, 75 bp, synthetic construct
  source 1..75: mol_type = other DNA
cccgatgatccttgagatggggctggactggaagtcgatggcgctgaacgccgaggacagccagttcctggaaac

SEQ ID NO: 10890 - DNA, 75 bp, synthetic construct
  source 1..75: mol_type = other DNA
ttgaggttttcaaactcaaacatgtcaatcgcaaccgaacaacgattgtcgatacggaaccgagaaccgcacata

SEQ ID NO: 10891 - DNA, 75 bp, synthetic construct
  source 1..75: mol_type = other DNA
atgacagaagccgaaatactgggattaatccgccgtgctggtggaatcagccagcagactgacgaacaggccacg

SEQ ID NO: 10892 - DNA, 75 bp, synthetic construct
  source 1..75: mol_type = other DNA
ctgcatggcatgatttgtgcttttggacgggagattcagcgtgctgattggctatgtaagggtatcaacaaatga

SEQ ID NO: 10893 - DNA, 75 bp, synthetic construct
  source 1..75: mol_type = other DNA
gctgggaagataacggtatcacccgttacgtcactgaaattcttgttaagaccacgggcaccatgcagatgctgg

SEQ ID NO: 10894 - DNA, 75 bp, synthetic construct
  source 1..75: mol_type = other DNA
ttacaggtggagcagtactgcacacgaactgcccgtatggagctgcaggggagtaccacatgggaaacccggacg

SEQ ID NO: 10895 - DNA, 75 bp, synthetic construct
  source 1..75: mol_type = other DNA
tggttccggaactcgggctggtggtccttaagcccggtcgtgaatcattgccagtttttcatcgcggcagggtgc

SEQ ID NO: 10896 - DNA, 75 bp, synthetic construct
  source 1..75: mol_type = other DNA
tccggcctggatgttacagcttctgcgcaaaacccgggaccgcattatccacctgctggtcacactgtgggatca

SEQ ID NO: 10897 - DNA, 75 bp, synthetic construct
  source 1..75: mol_type = other DNA
caccgctgcgttcggtcaaggttctggaccagttgcgtgagcgcatacgctacttgcattacagcttaccaaccg

SEQ ID NO: 10898 - DNA, 75 bp, synthetic construct
  source 1..75: mol_type = other DNA
taaggagctggtcgaaatcgacaccatcaacatgattgagaaggtgaacggcgtcgaccggctggagcaacaccg

SEQ ID NO: 10899 - DNA, 75 bp, synthetic construct
  source 1..75: mol_type = other DNA
gagagcagctgaacgatgggcaaaagtgatggtacagctaagtgatgaccagaaaagaaaagtggcggcacagaa

SEQ ID NO: 10900 - DNA, 75 bp, synthetic construct
  source 1..75: mol_type = other DNA
cggtatggctattcacaagaaatggcgacagacctatttttccacgccatccagcctgacccacagtgcttatcc

SEQ ID NO: 10901 - DNA, 75 bp, synthetic construct
  source 1..75: mol_type = other DNA
cgacagtaccggatattataaaaaccaggggaccgcgcaaaacatccagttagagctacaggatgacagtggcaa

SEQ ID NO: 10902 - DNA, 75 bp, synthetic construct
  source 1..75: mol_type = other DNA
cgtgaccgttaacgccggtgataacctgacggtagagggttcggatgtggtggctgaccgggatgtgtcactggc

SEQ ID NO: 10903 - DNA, 75 bp, synthetic construct
  source 1..75: mol_type = other DNA
ccatgctcagtgcacagcacctgaaccagacttccgggaccgtgaatgcagctgaaaatgtcacccttaccacca

SEQ ID NO: 10904 - DNA, 75 bp, synthetic construct
  source 1..75: mol_type = other DNA
gccggtctacccaaaccagatggtgttgtcggacgatatggataccctttacattggcatcaaagaaggctttaa

SEQ ID NO: 10905 - DNA, 75 bp, synthetic construct
  source 1..75: mol_type = other DNA
tcggcgctgaaaggcaaatgggcgctgtttgcgaaaatcaccccgaccgatgaccttatcgcgatgaacaaggcc

SEQ ID NO: 10906 - DNA, 75 bp, synthetic construct
  source 1..75: mol_type = other DNA
ttgctgataaccgggtatgtcaggtactcacctgtcttcctgaaaaatttgtggttgatttcgcaaacggtatcg

SEQ ID NO: 10907 - DNA, 75 bp, synthetic construct
  source 1..75: mol_type = other DNA
ggtgatggctattcccagcgtgcgcctgccgggctgaacgctgacctgaaaacgtacagcgtgacgctgtctgtc

SEQ ID NO: 10908 - DNA, 75 bp, synthetic construct
  source 1..75: mol_type = other DNA
ccactacggaatacagaaacgatgtatcagttcgcacggatgtatctgtctggcaccgtcgctataaatccagaa

SEQ ID NO: 10909 - DNA, 75 bp, synthetic construct
  source 1..75: mol_type = other DNA
cggcgctgggcaacgacccgaattttgcgaccaccatgactaacgcgcttgcgggtaagcaaccgaaagatgcca

SEQ ID NO: 10910 - DNA, 75 bp, synthetic construct
  source 1..75: mol_type = other DNA
ataaaaaacaatctaattgaagcaaacgactataatcctaacgtcatggctccctccgaaaaaaggttattaaca

SEQ ID NO: 10911 - DNA, 75 bp, synthetic construct
  source 1..75: mol_type = other DNA
acagcacgtctgaaacactggccgcaacgccgaaagcggtaaaggccgcgtatgaccttgctaacgggaaatata

SEQ ID NO: 10912 - DNA, 75 bp, synthetic construct
  source 1..75: mol_type = other DNA
gtggatggaggaggacggcagcgtaagtctgcaagttcgtatgccgatcgttgactggcgtcgcctctgtaaaca

SEQ ID NO: 10913 - DNA, 75 bp, synthetic construct
  source 1..75: mol_type = other DNA
tgcccgtcttaatgagccgctggcaaatggtgccgtgatccacatcgtgccgcgtctggcgggagctaaaagtgg

SEQ ID NO: 10914 - DNA, 75 bp, synthetic construct
  source 1..75: mol_type = other DNA
ggaaattaccctcaccgtgtcctggcaaagaggtgctggtgacggcagaagttgaagccgggcagcctgcaccgg

SEQ ID NO: 10915 - DNA, 75 bp, synthetic construct
  source 1..75: mol_type = other DNA
attctgcaatttcgggacgttacactgtctccgcaccttataaagcgggtgccgggattggcgtcctgaaattcg

SEQ ID NO: 10916 - DNA, 75 bp, synthetic construct
  source 1..75: mol_type = other DNA
gaaaacacgaacgggagctattaaataaaatatgcattctttcaatgctggcacgtttacgcccgatgcaaaaag

SEQ ID NO: 10917 - DNA, 75 bp, synthetic construct
  source 1..75: mol_type = other DNA
atacaagaagcataaagagcagttggaaaaattatcgattgaacttgatgccgcaaaacagcgcattgcagagct

SEQ ID NO: 10918 - DNA, 75 bp, synthetic construct
  source 1..75: mol_type = other DNA
cagagcaacatgtacgaagtctgtttacagctaccagccagatttgtaccaagactgcggaggtgcgagtactta

SEQ ID NO: 10919 - DNA, 75 bp, synthetic construct
  source 1..75: mol_type = other DNA
ggatcacgccgggtgagcacattatcagtgccgactctgcgctcagcagaaatatccggcagtgtttctgccttt

SEQ ID NO: 10920 - DNA, 75 bp, synthetic construct
  source 1..75: mol_type = other DNA
gggtttggcttgttaatgaaaaagaaagggattcgaatagaaccccttgaaaattactttgcaacaaaaagcatt

SEQ ID NO: 10921 - DNA, 75 bp, synthetic construct
  source 1..75: mol_type = other DNA
gtgcgtgagcgtttccgcagttaccagacagagcttaagtcccgtggaataaagcgtgcccgtgcgcgtcgtgat

SEQ ID NO: 10922 - DNA, 75 bp, synthetic construct
  source 1..75: mol_type = other DNA
agctcctggagtggattgagtgcaatcttgagcaccctatttcaatcgaagatatcgcacagaaatctggctaca

SEQ ID NO: 10923 - DNA, 75 bp, synthetic construct
  source 1..75: mol_type = other DNA
tcgccgccggtcttggcgtttcctacgaacagttgtcccgtgattactcgaaggtcagttattcaagtgcccgcg

SEQ ID NO: 10924 - DNA, 75 bp, synthetic construct
  source 1..75: mol_type = other DNA
atgaaacgaacgcctgtcctgattgatgtgaacggcgttccgcttcgggagagcctcagctaccacgggggcggt

SEQ ID NO: 10925 - DNA, 75 bp, synthetic construct
  source 1..75: mol_type = other DNA
tcaacggcactatcgccaacgaaaccactcttctcgttaatgctcgcgatttacatacttttcttggggtaggta

SEQ ID NO: 10926 - DNA, 75 bp, synthetic construct
  source 1..75: mol_type = other DNA
tgaactggcctgagtctgtaaaagaactgtcggcaaaggttgccgcgtttgttggctcaggtatttctgttcagc

SEQ ID NO: 10927 - DNA, 75 bp, synthetic construct
  source 1..75: mol_type = other DNA
taccgttttctgacgtccgcgaggagctgccgcgtggcacgtttgcctgtaccgatgtcccgacgatgattattc

SEQ ID NO: 10928 - DNA, 75 bp, synthetic construct
  source 1..75: mol_type = other DNA
tctcaataggtgcaatatttttcgatccgcaaaccggagatatgggaccggaatttagtaagactatcgatctgg

SEQ ID NO: 10929 - DNA, 75 bp, synthetic construct
  source 1..75: mol_type = other DNA
gttcgctgatgaacgtgtgattgagcagcatattgaggcagggatttcactgtgtgacgcggtgaactttctcgt

SEQ ID NO: 10930 - DNA, 75 bp, synthetic construct
  source 1..75: mol_type = other DNA
ttttgttgttggttgccagtctgtgcagccacgctgcactacaacccgatcgcactcgtattgtgtttaacgcta

SEQ ID NO: 10931 - DNA, 75 bp, synthetic construct
  source 1..75: mol_type = other DNA
aaacacagcttactttggggattatcactgattcagacagacagcaactgatgaactggatgcgatacgtgcaac

SEQ ID NO: 10932 - DNA, 75 bp, synthetic construct
  source 1..75: mol_type = other DNA
acgaaggataaatgcagtaaatgcctgagtggctgtaagtcacgtcataacgtcggtaactttggcggtttcctt

SEQ ID NO: 10933 - DNA, 75 bp, synthetic construct
  source 1..75: mol_type = other DNA
gacggcacgaaaagggatagtccagctcagcagtgcaaccaacagcacgtctgaaacgctggcagcgacaccaaa

SEQ ID NO: 10934 - DNA, 75 bp, synthetic construct
  source 1..75: mol_type = other DNA
gcactgagccgggctgtaataagcgcgtgaagtccggcaagtgtgaagagcacaggcgggctgcatggcgtgcag

SEQ ID NO: 10935 - DNA, 75 bp, synthetic construct
  source 1..75: mol_type = other DNA
acccgaaacttatccggttgccggaagtaataagaaaaactggatttggcaggacatggatttatgagcttataa

SEQ ID NO: 10936 - DNA, 75 bp, synthetic construct
  source 1..75: mol_type = other DNA
gagaaatgacgcccggcgagcgcagtctcattctgcgggctctgaaaaccctggaccgccatcttcatgaacccg

SEQ ID NO: 10937 - DNA, 75 bp, synthetic construct
  source 1..75: mol_type = other DNA
cgattatctgttcagtgcactgcgtcggctggaaatccgggccgtgacggagaacggtacagacgctgacagggt

SEQ ID NO: 10938 - DNA, 75 bp, synthetic construct
  source 1..75: mol_type = other DNA
agcgtacaaacctgacgtggtgctcggaatgggcggctacgtatcaggtccaggtggtctggccgcgtggtcgtt

SEQ ID NO: 10939 - DNA, 75 bp, synthetic construct
  source 1..75: mol_type = other DNA
ccaaaacggtaattcgtatccgcaaaggtagctctaacggtgtggaacttaccggattgcaactggacgaagaaa

SEQ ID NO: 10940 - DNA, 75 bp, synthetic construct
  source 1..75: mol_type = other DNA
tcagaaactgcgggcagaactccatgaagcccggaaaaccattccgcccaaaaatcctgtcgatgccgacaaatt

SEQ ID NO: 10941 - DNA, 75 bp, synthetic construct
  source 1..75: mol_type = other DNA
aaaccgttatcaccgatacgggtgcaaaaaaattagcgcaggcagccgcgccagatggtaagcctgtccgcctga

SEQ ID NO: 10942 - DNA, 75 bp, synthetic construct
  source 1..75: mol_type = other DNA
caaactccatgccgatgataccccggtccaggtactgctgccgggtaataagaagacgaagaccgggcggttgtg

SEQ ID NO: 10943 - DNA, 75 bp, synthetic construct
  source 1..75: mol_type = other DNA
gatgagctgatttttccgtcccttcgcagggcaaacctggcgctgcgcagggcgaaaagtgatgttcagaagtgg

SEQ ID NO: 10944 - DNA, 75 bp, synthetic construct
  source 1..75: mol_type = other DNA
gcctgcccacgaacgttttcacctggcgttatgttcaccgggcgatgtctctcaggtctgggtgctggttctggt

SEQ ID NO: 10945 - DNA, 75 bp, synthetic construct
  source 1..75: mol_type = other DNA
atgaaatcaaaagacaccctaaagtggttccctgcgcagcttcctgaagtcagaattatcctgggagatgctgtc

SEQ ID NO: 10946 - DNA, 75 bp, synthetic construct
  source 1..75: mol_type = other DNA
gtgcaaataaccgaagccttaatttcagagccgggagacatccggcgttttgttcagcaggcggtggaccactgg

SEQ ID NO: 10947 - DNA, 75 bp, synthetic construct
  source 1..75: mol_type = other DNA
cgcgcgtccagggatttctggtatccgcccggacgttcgccgacagagtcgtttgtcatcaggctggaaaactgc

SEQ ID NO: 10948 - DNA, 75 bp, synthetic construct
  source 1..75: mol_type = other DNA
agaagatccggatgttgcggatattgggtattacggagccggtggtcgaacggacgccaaaacctggacgacggc

SEQ ID NO: 10949 - DNA, 75 bp, synthetic construct
  source 1..75: mol_type = other DNA
gcggtgggggccgcaactggtgaaatccccgtatcttcagtagcggaaaaactacgtgaattatttggttccaat

SEQ ID NO: 10950 - DNA, 75 bp, synthetic construct
  source 1..75: mol_type = other DNA
caagaacgaaggcgaagcatgcgcctggctggacagccttacaccagaagcccgcaaaagcggccaacgcgtggc

SEQ ID NO: 10951 - DNA, 75 bp, synthetic construct
  source 1..75: mol_type = other DNA
cggcacagcactggcggcggcactggcaccggagctgatgggctacagtgagctgacggccattgcccgaaactg

SEQ ID NO: 10952 - DNA, 75 bp, synthetic construct
  source 1..75: mol_type = other DNA
gttatgtctgcgtgctggtgtggtgcgtgaggcgaaaaccgttgaccacatcatccctaaagcgcatggcggcac

SEQ ID NO: 10953 - DNA, 75 bp, synthetic construct
  source 1..75: mol_type = other DNA
gtgagcagaagcgggtacgtatccccgccatgaaagtcagcgaatggggccacctgctccgcgcgcttgaaattg

SEQ ID NO: 10954 - DNA, 75 bp, synthetic construct
  source 1..75: mol_type = other DNA
taactcctttacaggaacggttcaaagaactaaacaactggttagaaatggaagttataagatttaaaaaatatt

SEQ ID NO: 10955 - DNA, 75 bp, synthetic construct
  source 1..75: mol_type = other DNA
tgcctagcatggcaccgcaaaatgataatgctcctcgttcttccgttcctcagcctgtgcagtatcagcagcagc

SEQ ID NO: 10956 - DNA, 75 bp, synthetic construct
  source 1..75: mol_type = other DNA
atgaacaaagaaaatgtcattaccctggacaatccggtcaaacgtggtgagcaggttatcgaacaggtcacgctg

SEQ ID NO: 10957 - DNA, 75 bp, synthetic construct
  source 1..75: mol_type = other DNA
tcagggcggcgtcgccgtcagatcttgcggaaaagctgacacacaaactgaaagagggctggcagccgtttggta

SEQ ID NO: 10958 - DNA, 75 bp, synthetic construct
  source 1..75: mol_type = other DNA
acaacgctgaccgctgcaatcactaccgtactggccaaaacctacggcggtgctgctcgcgcattcgaccagatc

SEQ ID NO: 10959 - DNA, 75 bp, synthetic construct
  source 1..75: mol_type = other DNA
cggagccgaattcagtcccacagtttcatctgtgagaacgtcattttaggtgatggctgtttcatcggtcatggc

SEQ ID NO: 10960 - DNA, 75 bp, synthetic construct
  source 1..75: mol_type = other DNA
atgatttcactcccatcaggtacccgtatctggctcgttgccggcgttaccgatatgcgtaaatccttcaacgga

SEQ ID NO: 10961 - DNA, 75 bp, synthetic construct
  source 1..75: mol_type = other DNA
gcctcagcaacggcaggcaggttaacctggccgactggaaggtggtgctgtttatgcaggggcattgcccttact

SEQ ID NO: 10962 - DNA, 75 bp, synthetic construct
  source 1..75: mol_type = other DNA
ggtggtgctgacagtccttagccgcgaaggcgacggaacagcagaaaaagacctgctggatgtggtggagaaagc

SEQ ID NO: 10963 - DNA, 75 bp, synthetic construct
  source 1..75: mol_type = other DNA
atggcactgactgacgcaaaaattcgggctgcaaagcccactgacaaggcgtataaactcactgacggagctggc

SEQ ID NO: 10964 - DNA, 75 bp, synthetic construct
  source 1..75: mol_type = other DNA
gctggcaatgctcctcgataaactggactggcgtcaacccaaaacatcccgccttaatgcactgacaatgttgta

SEQ ID NO: 10965 - DNA, 75 bp, synthetic construct
  source 1..75: mol_type = other DNA
ggtgacaccgttaaaattctttgggctgatgctgatggtctgtgcctgttcaccaaacgcctggaggaaggccag

SEQ ID NO: 10966 - DNA, 75 bp, synthetic construct
  source 1..75: mol_type = other DNA
tcaatccggatgctcctgatgagcgttgggtaacggacataacctacatcaggacccacgaaggctggctgtatc

SEQ ID NO: 10967 - DNA, 75 bp, synthetic construct
  source 1..75: mol_type = other DNA
gccctgcagatggcgctatggcggcgtaagaggccccggaacgttatcgttcacacggaccgtggaggccagtac

SEQ ID NO: 10968 - DNA, 75 bp, synthetic construct
  source 1..75: mol_type = other DNA
gcaaagtgttccttacacaggcgcagctggcgatgctgctggaaggtatcgactggcgacagcccaagcggctgc

SEQ ID NO: 10969 - DNA, 75 bp, synthetic construct
  source 1..75: mol_type = other DNA
ggaatccggcaacaggtagttacaccgttgccagtgaaacagcaaaaagtcgtggtaaaaaaagcgggcgcagta

SEQ ID NO: 10970 - DNA, 75 bp, synthetic construct
  source 1..75: mol_type = other DNA
ccggatatcgctcttgacctcagctatcgctatctggatgctggtaaatcctccctgtcttacaaggatgcagaa

SEQ ID NO: 10971 - DNA, 75 bp, synthetic construct
  source 1..75: mol_type = other DNA
ttgatgaattgtcaggctgcatatccagacaatgggctggtaatggaacacctataacatcccttcctattgaga

SEQ ID NO: 10972 - DNA, 75 bp, synthetic construct
  source 1..75: mol_type = other DNA
caatgtcaccacgattattatggggagcggtactgcacacactgccagaccgggcgcttcagtgaggaggtggta

SEQ ID NO: 10973 - DNA, 75 bp, synthetic construct
  source 1..75: mol_type = other DNA
cccgctctcagttaataaacagtattgatatcctccgggctcgccgggcgaccggcctgatgacccgcgacaatt

SEQ ID NO: 10974 - DNA, 75 bp, synthetic construct
  source 1..75: mol_type = other DNA
gtggccattgatattgcttatgaaggctccggcagtggcgactggcgcactgacggtttcatcgtgggtgtcggt

SEQ ID NO: 10975 - DNA, 75 bp, synthetic construct
  source 1..75: mol_type = other DNA
cgcgagacaaaaaacgagcaggtggtgctgcaccagattgttgatcgccggacagcgtcgatgcgcagcgtgggg

SEQ ID NO: 10976 - DNA, 75 bp, synthetic construct
  source 1..75: mol_type = other DNA
cgtgccgtctcgttaatccgggtggatttacgtttccctgagtatatgcctgtcaccatcatggatcccgatccg

SEQ ID NO: 10977 - DNA, 75 bp, synthetic construct
  source 1..75: mol_type = other DNA
ctgacgcatcaaaatctgacccgtcaaaatttgatgcgtcgaaatctggcaaaaaagcgggttttcacccgtcag

SEQ ID NO: 10978 - DNA, 75 bp, synthetic construct
  source 1..75: mol_type = other DNA
caatgtcaccacgattattatggggagcagtactgcacacactgccagaccgggcgtttcagtgaggagggggta

SEQ ID NO: 10979 - DNA, 75 bp, synthetic construct
  source 1..75: mol_type = other DNA
tttgcagtggaattgaagccgcgagtattgcctgggaaccgttgggtatgcgtccggcgtggtttgctgaaatcg

SEQ ID NO: 10980 - DNA, 75 bp, synthetic construct
  source 1..75: mol_type = other DNA
gtcatgtgggatggctggttcagacttcaggatatggttgagggttacctggtgatgaagtctcttgatcaggag

SEQ ID NO: 10981 - DNA, 75 bp, synthetic construct
  source 1..75: mol_type = other DNA
agctttatcgcggcagcgttggcgcagtacaccgccaacaaaagcgggctggatgtgcttgatgatggagacctg

SEQ ID NO: 10982 - DNA, 75 bp, synthetic construct
  source 1..75: mol_type = other DNA
cctcatacccagtatgcgcagaaacataatccgacatttaccggagaaccaaaagcgccgacgcctgcagcagga

SEQ ID NO: 10983 - DNA, 75 bp, synthetic construct
  source 1..75: mol_type = other DNA
atgcgtaaagtttgtgcagcaattttgtccgcagccatttgtctggccgtatccggtgcgcctgcatgggcgtct

SEQ ID NO: 10984 - DNA, 75 bp, synthetic construct
  source 1..75: mol_type = other DNA
ggaaaaatacgcgctggtgcgtaccgaccagccgggattcagcacttgtccccgctctcagttaataaacagtat

SEQ ID NO: 10985 - DNA, 75 bp, synthetic construct
  source 1..75: mol_type = other DNA
gaaaaccacggcaaacagcatgaatcacgccgtgcccgtattcttcgcggcgcgctagcgcgtcgtaaacggttg

SEQ ID NO: 10986 - DNA, 75 bp, synthetic construct
  source 1..75: mol_type = other DNA
gataatctacgtcagactcccttattccgaacgcccaccgcgtccgtcccgcacattccagcaacgcatctggag

SEQ ID NO: 10987 - DNA, 75 bp, synthetic construct
  source 1..75: mol_type = other DNA
tgctgcgcagacctgaatattccgttctttgtggatgcgggaaacaaaaagctggtcttctggtttgtacgtgtt

SEQ ID NO: 10988 - DNA, 75 bp, synthetic construct
  source 1..75: mol_type = other DNA
catcatcggcctgatcttctcgtccttttttggcctggggctgtttatggtgtcattgaacccgacatccgtgaa

SEQ ID NO: 10989 - DNA, 75 bp, synthetic construct
  source 1..75: mol_type = other DNA
actgtctcgaagaactgaaaaacctcggcagcctcattacactaatagcaaaagcaacacctgatgctacgctct

SEQ ID NO: 10990 - DNA, 75 bp, synthetic construct
  source 1..75: mol_type = other DNA
tgccgtcgtgctggcaacccgcaagtatgtggatgacaaggtactggagctgaaggtgttcgtggatgataagat

SEQ ID NO: 10991 - DNA, 75 bp, synthetic construct
  source 1..75: mol_type = other DNA
agtttgtaagtgataaaacgcaacgggatgtgcttgataatggtgatctgcccggttttgttgaattgctgggat

SEQ ID NO: 10992 - DNA, 75 bp, synthetic construct
  source 1..75: mol_type = other DNA
ccttgccggcggcaataccaccgtaaccggaacggatgtctcactttcaggggataacaaagccggaggaaatct

SEQ ID NO: 10993 - DNA, 75 bp, synthetic construct
  source 1..75: mol_type = other DNA
ccggacgctggaacgggtgcaataaggaaagtctgcgggcgtattttccggcaacagagcgcattctgtttgcag

SEQ ID NO: 10994 - DNA, 75 bp, synthetic construct
  source 1..75: mol_type = other DNA
ggtgatttgtgaaccgctgggccgtaattaccgcgtcagtatgccgcttatagcctttcgctccggaaaaaacat

SEQ ID NO: 10995 - DNA, 75 bp, synthetic construct
  source 1..75: mol_type = other DNA
tgatgatgtggctgatcgggtgcgccgggccgtctgtgaaatacgtgcctgtgaagccggtgccgatccccgctg

SEQ ID NO: 10996 - DNA, 75 bp, synthetic construct
  source 1..75: mol_type = other DNA
gtatgtcacgggcatacaggaaaagacatcatgctcggtaaaacgtataccaaagcagaatgcaaagccctcctg

SEQ ID NO: 10997 - DNA, 75 bp, synthetic construct
  source 1..75: mol_type = other DNA
caccgatgtctggacgcataaaccggtgcagtactatccagggaaacatccgtgcgaaaaaccggcagaaatgct

SEQ ID NO: 10998 - DNA, 75 bp, synthetic construct
  source 1..75: mol_type = other DNA
attctgataattcagccgtctttgccagcaggcacgggcggcgttctcatgcattcaaatctgactggttccggc

SEQ ID NO: 10999 - DNA, 75 bp, synthetic construct
  source 1..75: mol_type = other DNA
ttttgcacaggagtcgctgaaaaatacgcgttaatcgaacaatggcgacaacaatttcccattgaagcgatgtgt

SEQ ID NO: 11000 - DNA, 75 bp, synthetic construct
  source 1..75: mol_type = other DNA
atgcagcggctggacgatgcctttgagcatggtgcggatgtcagcattgttcacgacgttgttcgtgagctgatg

SEQ ID NO: 11001 - DNA, 75 bp, synthetic construct
  source 1..75: mol_type = other DNA
tctgtttctgttgagctgccgggtgatgccaataaaggcgataccgtggatgtcacctttgaagatgaaaaaggt

SEQ ID NO: 11002 - DNA, 75 bp, synthetic construct
  source 1..75: mol_type = other DNA
gacaagggcgaccgccgggcggacgcactggatatacagacatcggatttgtggcgtgatgtgagctgggccatc

SEQ ID NO: 11003 - DNA, 75 bp, synthetic construct
  source 1..75: mol_type = other DNA
ccatcagtaccgggctggaactggggccggacagtgaagaaaacaccggtgggcaatggatacagaatggcggga

SEQ ID NO: 11004 - DNA, 75 bp, synthetic construct
  source 1..75: mol_type = other DNA
gtacttttcctcgctggataacatgattgcccaggggaacccgatgccggtgccttacggggaaatgctggttgg

SEQ ID NO: 11005 - DNA, 75 bp, synthetic construct
  source 1..75: mol_type = other DNA
ggggtaaaaaggtccgtacgaccatcagccggaaagccgttgccgcaggcgaccgcgtaaaccgtcagttcgtgg

SEQ ID NO: 11006 - DNA, 75 bp, synthetic construct
  source 1..75: mol_type = other DNA
gcagtggacatttcagatcggggaccttgaaaatattaatatcactcactgggcagtaatgccaaaagcaccgga

SEQ ID NO: 11007 - DNA, 75 bp, synthetic construct
  source 1..75: mol_type = other DNA
cgtcaccgccactggcacgcatctgccttcacggggatttgcaacgatttggccgccgcctcagcctgtatgtga

SEQ ID NO: 11008 - DNA, 75 bp, synthetic construct
  source 1..75: mol_type = other DNA
gagttgtttctgaaacatggcaaaggtagcgttgccaatgatgttacagatgagatggtcagactaaactggctg

SEQ ID NO: 11009 - DNA, 75 bp, synthetic construct
  source 1..75: mol_type = other DNA
gtatcaatcagatccgccgcgaccgccccttaacccatgaagaattaatgcaggttgttcccagcgtcttcgggg

SEQ ID NO: 11010 - DNA, 75 bp, synthetic construct
  source 1..75: mol_type = other DNA
tgacgatagccgccgcactgctgtccggctgcacaggccacagggaacatcacccgcaggtgacattcacggtcg

SEQ ID NO: 11011 - DNA, 75 bp, synthetic construct
  source 1..75: mol_type = other DNA
gaaaactggtttgaccgcacggtcagcgccgatgccgcaggcatcattctgacttcccttgtgattaaccgccag

SEQ ID NO: 11012 - DNA, 75 bp, synthetic construct
  source 1..75: mol_type = other DNA
tatccattgccaggattgcagcatcagccagctttgcatcccgttcacactcaacgaacatgagcttgatcagct

SEQ ID NO: 11013 - DNA, 75 bp, synthetic construct
  source 1..75: mol_type = other DNA
caaccggaaccatcgtcaacaccggtgcagaaggtggtccggagtctgaaaatgtgtccagcggtcagatggtcg

SEQ ID NO: 11014 - DNA, 75 bp, synthetic construct
  source 1..75: mol_type = other DNA
ggttatgcccacagcgtcagcggcagcagcgctgaaggctataacggtcaggccacgctgaatgtgactttctga

SEQ ID NO: 11015 - DNA, 75 bp, synthetic construct
  source 1..75: mol_type = other DNA
atggcaattaagcattttcctgtcgttcgcttcacctccagagaccgcgaatacgaggtcgacgaacgactgatt

SEQ ID NO: 11016 - DNA, 75 bp, synthetic construct
  source 1..75: mol_type = other DNA
gtgaaagaaagcaatcagcgatggtgctctgacgggttcgagttctgctgtgataacggagagagactgcgtgtc

SEQ ID NO: 11017 - DNA, 75 bp, synthetic construct
  source 1..75: mol_type = other DNA
tggcagagtcggcagtatcaggcctatcccattcaggggagtggatttgagatgaacggcaagggcagtgctgcc

SEQ ID NO: 11018 - DNA, 75 bp, synthetic construct
  source 1..75: mol_type = other DNA
taatgttattgcagaagcaataaaagccggaggttctcttgatgattttcttatatctcaggatacatcatcttg

SEQ ID NO: 11019 - DNA, 75 bp, synthetic construct
  source 1..75: mol_type = other DNA
cactgacggcacttacttctgcgccactaatgtggcgcgggtaaaccttatccgacaggtacaggagcagcgtaa

SEQ ID NO: 11020 - DNA, 75 bp, synthetic construct
  source 1..75: mol_type = other DNA
gcgatacacagctgaggaaaatcaacggcacacccgcccaaaaaacagcctttcttaatgacggtggaaacctga

SEQ ID NO: 11021 - DNA, 75 bp, synthetic construct
  source 1..75: mol_type = other DNA
gccatgacgtataccaaaagcaaatcgtttaaaaccgaagctggcgcacgtcgctggcttgccaaaaataccagc

SEQ ID NO: 11022 - DNA, 75 bp, synthetic construct
  source 1..75: mol_type = other DNA
ccagtgcaagcgtcagtgaactgaaaaaaaatccaatggcgacagtcagtgccggagaggggtatcctgttgcca

SEQ ID NO: 11023 - DNA, 75 bp, synthetic construct
  source 1..75: mol_type = other DNA
gctgcttaatcagcctgtcgagatcaagcctgccgatctggttaactacaatccgattgccgaaaaacacgtcaa

SEQ ID NO: 11024 - DNA, 75 bp, synthetic construct
  source 1..75: mol_type = other DNA
tacggcggcaaccgtcaccggcagcaaccgtctgggcaatttcactgtggaaaacggtaaggctgacggtgttgt

SEQ ID NO: 11025 - DNA, 75 bp, synthetic construct
  source 1..75: mol_type = other DNA
caccgcttgagggtgatatcagtctcagaacgctgggaagactggccggacggctggataacatcgacctgagcg

SEQ ID NO: 11026 - DNA, 75 bp, synthetic construct
  source 1..75: mol_type = other DNA
tttatcgcgttattctgaaacagcccattactaacgatcaggccgcgatgctgcgtcagacgctggctgcatttg

SEQ ID NO: 11027 - DNA, 75 bp, synthetic construct
  source 1..75: mol_type = other DNA
cttatacccataaccagcgccagacatcgcgcattatgctgttggtgttgctcgcagccgtgccaggaatcgcag

SEQ ID NO: 11028 - DNA, 75 bp, synthetic construct
  source 1..75: mol_type = other DNA
atggcgcataatttcaaatttcgcaattctgattctgcctttgccagcaggcacgggtggcgttctcacgcattc

SEQ ID NO: 11029 - DNA, 75 bp, synthetic construct
  source 1..75: mol_type = other DNA
aaaccgctgccgcttcgtcgcagtgctgactatgatgagctgactgtgagggttagccgcagcagtaccatcaat

SEQ ID NO: 11030 - DNA, 75 bp, synthetic construct
  source 1..75: mol_type = other DNA
gaaattgcttattgccagatgggaactgacagcagaacaggctgttacacagcagttaaaaaatgaggtgtcaaa

SEQ ID NO: 11031 - DNA, 75 bp, synthetic construct
  source 1..75: mol_type = other DNA
agaacaaaccgatccgtgtctggctttccgcacagaccggagcggggataccacagctttttcaggctttgacgg

SEQ ID NO: 11032 - DNA, 75 bp, synthetic construct
  source 1..75: mol_type = other DNA
tagccggaaacaccactgtcaccacaaatggtcgtcaggtcgtgctggaggggggaacagccagtgatacggtta

SEQ ID NO: 11033 - DNA, 75 bp, synthetic construct
  source 1..75: mol_type = other DNA
ttctatactggtgcctaatacatcaactacgacaggtaatggattgcttatctatctttacaacagaaatcaaaa

SEQ ID NO: 11034 - DNA, 75 bp, synthetic construct
  source 1..75: mol_type = other DNA
atggatactatcgagcttggcaacaacgaatctctggtgtacggcgtgtttcccaaccaggacggcacattcacc

SEQ ID NO: 11035 - DNA, 75 bp, synthetic construct
  source 1..75: mol_type = other DNA
attatctgatttttaagcatgatttcataaaaagaagaatgctcgttaatccagcgacacatcctgtcggcgtga

SEQ ID NO: 11036 - DNA, 75 bp, synthetic construct
  source 1..75: mol_type = other DNA
ccatcaaaagccaccattagcgtgaaagatatgacgattactgtgacgggggttaaggatggaaaagtcagcatc

SEQ ID NO: 11037 - DNA, 75 bp, synthetic construct
  source 1..75: mol_type = other DNA
aagaagtgatcacccgcacggtgaaagtcactaacgtgggcaaaccttccgtggcggaagaacgcagcgaaatta

SEQ ID NO: 11038 - DNA, 75 bp, synthetic construct
  source 1..75: mol_type = other DNA
aatctctcaccgttctggcgaaactgaagatgctaccatcgctgacctggctgttggtactgctgcaggccagat

SEQ ID NO: 11039 - DNA, 75 bp, synthetic construct
  source 1..75: mol_type = other DNA
gcaaatgggcttacagggcgattcggcagggctggccagcattctcacagtggcttgatgccgtgattcagcgtg

SEQ ID NO: 11040 - DNA, 75 bp, synthetic construct
  source 1..75: mol_type = other DNA
atgacaccacgatgggctttatgctggaagccattcccatcaatggggcgaatgagtccattgtggaggcgctcg

SEQ ID NO: 11041 - DNA, 75 bp, synthetic construct
  source 1..75: mol_type = other DNA
cgatcaggttgctcccgaagccggtcagatagcaccggccctcgcacactttgggcaagatgtaacaacatcgca

SEQ ID NO: 11042 - DNA, 75 bp, synthetic construct
  source 1..75: mol_type = other DNA
ttttgttgtcttctctggttatgggctgtacgcaacataaaacagatatgccccgacagttggttaaggcattac

SEQ ID NO: 11043 - DNA, 75 bp, synthetic construct
  source 1..75: mol_type = other DNA
gacatcaacccggaaatggagaaccgtctgagtgccgtacttgccgcaagggaagcagaaggtcgtcagatggcc

SEQ ID NO: 11044 - DNA, 75 bp, synthetic construct
  source 1..75: mol_type = other DNA
aaaagctgcactggcgctcgggcgtcgtgcgattggcgttgaactggagaccggacgttttgagcagacagtcag

SEQ ID NO: 11045 - DNA, 75 bp, synthetic construct
  source 1..75: mol_type = other DNA
ttccacaaacagaaaaaactggaacgccttgccgcacggctgggcgtcatgtacaccggagatactgaacaatga

SEQ ID NO: 11046 - DNA, 75 bp, synthetic construct
  source 1..75: mol_type = other DNA
atgctgtgcgccggttgcaccagcgcccggcctgcaccgacgccagtgattgtccacaacgcctgcccgaaagtg

SEQ ID NO: 11047 - DNA, 75 bp, synthetic construct
  source 1..75: mol_type = other DNA
agatgccgccgtcaacactgcggtcagaaaaagatgatgttgaatcacgtattgaaaaactggagagctacgtcg

SEQ ID NO: 11048 - DNA, 75 bp, synthetic construct
  source 1..75: mol_type = other DNA
atgaaaattaaaactctggcaatcgttgttctgtcggctctgtccctcagttctacagcggctctggccgctgcc

SEQ ID NO: 11049 - DNA, 75 bp, synthetic construct
  source 1..75: mol_type = other DNA
tcgattggagtgaggactttgcccgcatagcgggcaaacaggtcaaacttcagattgcccagtttaagttggccc

SEQ ID NO: 11050 - DNA, 75 bp, synthetic construct
  source 1..75: mol_type = other DNA
cacacggcctgcctgtgtcagaaaatctgttggagcaggatttttacgccagtggcccgaaccagaagtgggcag

SEQ ID NO: 11051 - DNA, 75 bp, synthetic construct
  source 1..75: mol_type = other DNA
ctgctgtggctgccggagaacaggtcgttcctgcctctgaacttgctgccgccatgaagcagattaaagaactcc

SEQ ID NO: 11052 - DNA, 75 bp, synthetic construct
  source 1..75: mol_type = other DNA
atgagcgcacgttcacgggcactgatccccctcagcgcagaacaacaggccgccatgcaggctgtggctgtcacc

SEQ ID NO: 11053 - DNA, 75 bp, synthetic construct
  source 1..75: mol_type = other DNA
tgtccctgatgaacttattgatttcacgtttgaatggaaaggactgaagaaattatgcgtggcagtctcctttcg

SEQ ID NO: 11054 - DNA, 75 bp, synthetic construct
  source 1..75: mol_type = other DNA
ccgctggagcaggtgcagatagaccatacggtcatcgacctgatcgtggtcgatgaccgcgaccggcaacctatt

SEQ ID NO: 11055 - DNA, 75 bp, synthetic construct
  source 1..75: mol_type = other DNA
ggctacagcgaagcggaagcgcatcacgacgggatcgaaaccgacagtcgcacgctcacgctcgacaacgtgccg

SEQ ID NO: 11056 - DNA, 75 bp, synthetic construct
  source 1..75: mol_type = other DNA
aaacggcgatgtaccgggtaaaacagctgttcgggggttcactgacgctgcgtgactacgatggtcaggttgcgg

SEQ ID NO: 11057 - DNA, 75 bp, synthetic construct
  source 1..75: mol_type = other DNA
ctcgtaaagctgttatcgaagtcaaaaaaatggagaaccgtgatgcggttgaggccaccgtgtggggcgcgtaca

SEQ ID NO: 11058 - DNA, 75 bp, synthetic construct
  source 1..75: mol_type = other DNA
actggaaccaaaagccgtcgcaggtgttgccggaattacggttaaatcgggaattgaagatttttccattattcc

SEQ ID NO: 11059 - DNA, 75 bp, synthetic construct
  source 1..75: mol_type = other DNA
tttgaaccgggaatgacagtctcccttgttgcccggcaacacggtgtggcagccagccagttatttctctggcgc

SEQ ID NO: 11060 - DNA, 75 bp, synthetic construct
  source 1..75: mol_type = other DNA
atgacgaaggtgtgtcatggcctgcagtggagaccattcgtcgtcagattggggcaaagagtgaatcaacggtta

SEQ ID NO: 11061 - DNA, 75 bp, synthetic construct
  source 1..75: mol_type = other DNA
aatggttcagttacagcttcggaggactgactgcgatgggtggcattctctccctgaatgactgggctgtcatca

SEQ ID NO: 11062 - DNA, 75 bp, synthetic construct
  source 1..75: mol_type = other DNA
ctgctgcgtatcagacctgggcgcaactggtttacaaattactgactgcagaacaggagtatgaagcgacaggaa

SEQ ID NO: 11063 - DNA, 75 bp, synthetic construct
  source 1..75: mol_type = other DNA
ctgatgttgccgctggtcgtaagcgcctgcgcatcaacgccaactgtccaggctccttgcgtaaagcccccatca

SEQ ID NO: 11064 - DNA, 75 bp, synthetic construct
  source 1..75: mol_type = other DNA
atgaataaggtttttgttgtttcagtggtggtcgcagcctgtgtatttgcagcaaatgcaggagcaaaggaaggt

SEQ ID NO: 11065 - DNA, 75 bp, synthetic construct
  source 1..75: mol_type = other DNA
aactcgtatacgggtcagaaggtccagggaacagcagaatccaccaccatcaacaaaaatggacggcagattatc

SEQ ID NO: 11066 - DNA, 75 bp, synthetic construct
  source 1..75: mol_type = other DNA
atgttacagatagtcggcgcgctgatcctgctgatcgcaggatttgccattcttcgccttttgttcagagcatta

SEQ ID NO: 11067 - DNA, 75 bp, synthetic construct
  source 1..75: mol_type = other DNA
ccatacccgggccattcacagcattgataccgatataaaactcaaccgcgcattgtgggtgatggcagaaacgct

SEQ ID NO: 11068 - DNA, 75 bp, synthetic construct
  source 1..75: mol_type = other DNA
aaccagatggacccggtgtacacgccggcgcgaaaaatccacctgtaccactgcgaccatcgcggcctgccgctg

SEQ ID NO: 11069 - DNA, 75 bp, synthetic construct
  source 1..75: mol_type = other DNA
ctggtctggcgcacctggaattttgaggacggtgccgggtactggatgaaccatgtcatccggaatttcggcatt

SEQ ID NO: 11070 - DNA, 75 bp, synthetic construct
  source 1..75: mol_type = other DNA
ctgcgcaggatgccaccacagcgcgaaaaggccttgtccagctcagtagcgccaccaacagcacgtctgaaacgc

SEQ ID NO: 11071 - DNA, 75 bp, synthetic construct
  source 1..75: mol_type = other DNA
tcagagccgaagccaccggcgcggtaaaacgtcagcatttcttgccaatctccggggggcatgggagaagagaga

SEQ ID NO: 11072 - DNA, 75 bp, synthetic construct
  source 1..75: mol_type = other DNA
gtatgtatgggtttgtggtgaatgatgcccctgaccaggcagaggactccgggcctgcagagcctgtttctgcgg

SEQ ID NO: 11073 - DNA, 75 bp, synthetic construct
  source 1..75: mol_type = other DNA
tccggaaggctggcgataaagattattgcagagccaccggataagcgccgtcgtgacctggacaatatcctgaaa

SEQ ID NO: 11074 - DNA, 75 bp, synthetic construct
  source 1..75: mol_type = other DNA
cagacccgccatactttaaagtgaagcccgagggctgggataaccagtggaagggcgacgatgattacctgaaat

SEQ ID NO: 11075 - DNA, 75 bp, synthetic construct
  source 1..75: mol_type = other DNA
atgaatactgttttaagtgttcagggtgcttctgcgcccgttgaaaagaaatcgtttttttctaaattcactcgt

SEQ ID NO: 11076 - DNA, 75 bp, synthetic construct
  source 1..75: mol_type = other DNA
cgctggccagactgtcagggtttcgtcataaaacggtgaaggtgccggaatggggtaatgtcagcgtggtgctgc

SEQ ID NO: 11077 - DNA, 75 bp, synthetic construct
  source 1..75: mol_type = other DNA
gaatgccggtggtgagccgtttgcggtggttcaggtgcagcggcggtttgcaccggaagccgtcagccattcact

SEQ ID NO: 11078 - DNA, 75 bp, synthetic construct
  source 1..75: mol_type = other DNA
atttaaggccccttcctcgggaggggctttcccgtttcagcgtcccgctgaaatcgtcggcttacctcctttcgc

SEQ ID NO: 11079 - DNA, 75 bp, synthetic construct
  source 1..75: mol_type = other DNA
acgagtacgactggctgacctcagatgccgctgtggatgaggccctgctcatcaacgaatacacctttaccgaag

SEQ ID NO: 11080 - DNA, 75 bp, synthetic construct
  source 1..75: mol_type = other DNA
cgaaaccggagcatggaaagacgctgttgactgggtgctcaaagaggcttgccagtctgtaaacattggcatcaa

SEQ ID NO: 11081 - DNA, 75 bp, synthetic construct
  source 1..75: mol_type = other DNA
aacgcagacggcgtactacacaggaaaagatcgctattgttcagcagagttttgaaccgggaatgacagtctccc

SEQ ID NO: 11082 - DNA, 75 bp, synthetic construct
  source 1..75: mol_type = other DNA
tcatctttctgctgacaccctctggtcagccagcggactatcgtcctttcctgaccgattcgtcattccattttt

SEQ ID NO: 11083 - DNA, 75 bp, synthetic construct
  source 1..75: mol_type = other DNA
agcgggagagaatatttaaaaaaaatgacaggaaaatgcagtaaacatttgtgttggccggaaggttattataac

SEQ ID NO: 11084 - DNA, 75 bp, synthetic construct
  source 1..75: mol_type = other DNA
agccgagggagatgcttttgataagttgaaaatatccattcgtatcagggatataactatcacacaggacgtggt

SEQ ID NO: 11085 - DNA, 75 bp, synthetic construct
  source 1..75: mol_type = other DNA
atgtacacaacggtggcacggcaacagagacgctgataaaccgtgatggctggcaggtgattaaggaaggaggaa

SEQ ID NO: 11086 - DNA, 75 bp, synthetic construct
  source 1..75: mol_type = other DNA
gtcttcggtacggccaacggaatgaccatcagtaccgggctggaactggggccggacagtgaagaaaacaccggt

SEQ ID NO: 11087 - DNA, 75 bp, synthetic construct
  source 1..75: mol_type = other DNA
tggtatcccgttacgattctctgcgtaacccactgacttctctgggggattacctcgcccccgaactcatctctc

SEQ ID NO: 11088 - DNA, 75 bp, synthetic construct
  source 1..75: mol_type = other DNA
aagacattgccgaccactggaactatatttagcggtaagattcacttgtcaaataagacaggagaaaccgaaaac

SEQ ID NO: 11089 - DNA, 75 bp, synthetic construct
  source 1..75: mol_type = other DNA
acctcttcaccagattgtgaatcgcctggacatcatgctgccgggcaatcgccccttcgttgcccccagtgccgt

SEQ ID NO: 11090 - DNA, 75 bp, synthetic construct
  source 1..75: mol_type = other DNA
tgtccgcagccatctgtctggccgtatcaggtacgcctgcatgggcgtctgaacaccagtccacactgagcgcag

SEQ ID NO: 11091 - DNA, 75 bp, synthetic construct
  source 1..75: mol_type = other DNA
ataattacacagtaacaacctctaacggaagtacctggaccggtgccggtattgttgtggacaacggggtgtccg

SEQ ID NO: 11092 - DNA, 75 bp, synthetic construct
  source 1..75: mol_type = other DNA
atgtcagaaatcacatccctggtcactgcagaggcagtgaaggaagtcctgcgctctgaagaagtccggagcgca

SEQ ID NO: 11093 - DNA, 75 bp, synthetic construct
  source 1..75: mol_type = other DNA
atgaacaaatccgatgaaatgattcaggaactacccgatggggcattcacccgcgagtgtgctgaaaccgttgtt

SEQ ID NO: 11094 - DNA, 75 bp, synthetic construct
  source 1..75: mol_type = other DNA
atggtctggcgtacctggaattttgaggacggtgccgggtactggatgaaccatgtcatccgggatttcggcatt

SEQ ID NO: 11095 - DNA, 75 bp, synthetic construct
  source 1..75: mol_type = other DNA
cgtatccgctcaaataactgttatggtcaggtatcccgtcgtgaccaggagagcgcgctggcgtgctggggaatc

SEQ ID NO: 11096 - DNA, 75 bp, synthetic construct
  source 1..75: mol_type = other DNA
atctgtcggggtgccacagtggtggatggaaaaaccgtttttcccaatatgaaactgtcgaaggaaaaatgcgac

SEQ ID NO: 11097 - DNA, 75 bp, synthetic construct
  source 1..75: mol_type = other DNA
cataatggtgaccgcgaaggaatgcgggtatgccttaatttgtcccgagtcgaagtattaaatcagcgttatttc

SEQ ID NO: 11098 - DNA, 75 bp, synthetic construct
  source 1..75: mol_type = other DNA
cagcgcactaagaccgcacgaatataatggtgggttaccaccaaacgaatcagaaaaccgatactggaaaaactc

SEQ ID NO: 11099 - DNA, 75 bp, synthetic construct
  source 1..75: mol_type = other DNA
aagaaaaaatcagcaaaatgccaaaaggttctgtttctgccctgcagcaagaaatgcttcgacgtgtcagtaaac

SEQ ID NO: 11100 - DNA, 75 bp, synthetic construct
  source 1..75: mol_type = other DNA
gaagttcgggcatggcagtgcacaacatgtgcgtgccggtttccgtctgggcagccacaacgatatgacctttgg

SEQ ID NO: 11101 - DNA, 75 bp, synthetic construct
  source 1..75: mol_type = other DNA
gttgagtatccgtacttcttatccgcatgctgagagcgagtgggtatttttatcacgtaaggggaatccactttc

SEQ ID NO: 11102 - DNA, 75 bp, synthetic construct
  source 1..75: mol_type = other DNA
ctggaaggtgtgaaacgctacgcgggctgggtatctgcgatgggtaacagcggcacacaatttgtgaaacaggct

SEQ ID NO: 11103 - DNA, 75 bp, synthetic construct
  source 1..75: mol_type = other DNA
aagccgtatgcagaagtcggattgcctgctttacaacaactacaaggactgatgactctggaagggcagaataaa

SEQ ID NO: 11104 - DNA, 75 bp, synthetic construct
  source 1..75: mol_type = other DNA
ctgaaagacggtcaggcagtgattgtggttaccgtggctgatgttatgagtgccctgcatgccagctatgacgac

SEQ ID NO: 11105 - DNA, 75 bp, synthetic construct
  source 1..75: mol_type = other DNA
cacgtctttaagcagtacatcatcgacttcgccaaagaagtggaggtggagctgaaaggcgatccgatggtgctt

SEQ ID NO: 11106 - DNA, 75 bp, synthetic construct
  source 1..75: mol_type = other DNA
atgcccgccgaaagatccacgatgtgcacgtccgcatcccgtcagcactgacggaagaagccctggagcagatcg

SEQ ID NO: 11107 - DNA, 75 bp, synthetic construct
  source 1..75: mol_type = other DNA
gggtttccactctggaacagacgaccgaaaatcaacgtcgggaaatcgaaagcgcgggttttaacgtcagacccc

SEQ ID NO: 11108 - DNA, 75 bp, synthetic construct
  source 1..75: mol_type = other DNA
atgcgtaaagtttgtgcagccattttgtccgcagccatctgtctgtccgtatccggtgcgcctgcatgggcatct

SEQ ID NO: 11109 - DNA, 75 bp, synthetic construct
  source 1..75: mol_type = other DNA
agtgggaagaaaaaatctatcaactggagacatcagatccggttctgggtggtgctgacgggatatcaaatcgag

SEQ ID NO: 11110 - DNA, 75 bp, synthetic construct
  source 1..75: mol_type = other DNA
gattaaggacggtggcagagactgccgtatccgctcaaataattgctacggtcaggtatcccggcgagaccagga

SEQ ID NO: 11111 - DNA, 75 bp, synthetic construct
  source 1..75: mol_type = other DNA
cgtgtttctatctgaggtacatcaaaccttcgagggtgacgccttcttcccaatgctcaacgaaacagaattcga

SEQ ID NO: 11112 - DNA, 75 bp, synthetic construct
  source 1..75: mol_type = other DNA
tgcttttagctggagaacaccctgattatgtactttgtaaaaggaataaaaagaattctgattctggaagtaatt

SEQ ID NO: 11113 - DNA, 75 bp, synthetic construct
  source 1..75: mol_type = other DNA
atgacagaagccgaactactgcgattaatccgccgcgttaccggaatcagccagcagcatgacgaacagggcacg

SEQ ID NO: 11114 - DNA, 75 bp, synthetic construct
  source 1..75: mol_type = other DNA
taaggaaacttcatggtaagccagcggagaaaaacacgttttatagtgatggcggaaacctgagcgtgaaatatt

SEQ ID NO: 11115 - DNA, 75 bp, synthetic construct
  source 1..75: mol_type = other DNA
gttgaccgtatccggcgtgaacgcctgcccggagaactggcatccgcgctgaaacaacaactgaggattgcgata

SEQ ID NO: 11116 - DNA, 75 bp, synthetic construct
  source 1..75: mol_type = other DNA
gaaatgcagaaatatgaacggtgaatatatctggccctggatattgcccttttccgcagcagggataaaacattc

SEQ ID NO: 11117 - DNA, 75 bp, synthetic construct
  source 1..75: mol_type = other DNA
gcactgcgcaatttatcgttacagccatgcgaggcgagatcaaacgccgccagcgccgcaaggccaaagaagcgg

SEQ ID NO: 11118 - DNA, 75 bp, synthetic construct
  source 1..75: mol_type = other DNA
gttgccagtggcgatgtatacaactctggctacgggttattcccgtctgaacaggctcgtaaggactggcaaaat

SEQ ID NO: 11119 - DNA, 75 bp, synthetic construct
  source 1..75: mol_type = other DNA
caacggataacggcagacagaacacgtacttttcctcgctggataacatgattgcccaggggaacccgatgccgg

SEQ ID NO: 11120 - DNA, 75 bp, synthetic construct
  source 1..75: mol_type = other DNA
gttgtctgagatggagtatgagcaggttttccacgcggaatctcagggcgatgaccactactgcattaacctgcc

SEQ ID NO: 11121 - DNA, 75 bp, synthetic construct
  source 1..75: mol_type = other DNA
ccgaatccgtggccattgatattgcttatgaaggctccggcagtggcgactggcgcactgacggtttcatcgtgg

SEQ ID NO: 11122 - DNA, 75 bp, synthetic construct
  source 1..75: mol_type = other DNA
aaacttgtcacgctaaatccgaaactcaaatcaacagccgctggacgttaccagcttctttcacgctggtgggat

SEQ ID NO: 11123 - DNA, 75 bp, synthetic construct
  source 1..75: mol_type = other DNA
ttattattactgctatatcaggtctgctggtatttctcttcatcatcaatatggtcagtgccatttacggcatca

SEQ ID NO: 11124 - DNA, 75 bp, synthetic construct
  source 1..75: mol_type = other DNA
acttgaggcatgtggtgaggcctttctggcgcaggttcgccagcaggcggaaaaactggtcagggagatggcggc

SEQ ID NO: 11125 - DNA, 75 bp, synthetic construct
  source 1..75: mol_type = other DNA
aacacaacgggttatctacctccgcgaaggctatgagcatgagtgcttcagcccgctcgaacagtttcgtcgtaa

SEQ ID NO: 11126 - DNA, 75 bp, synthetic construct
  source 1..75: mol_type = other DNA
cctttctgccagtaaggcacaggctcacgtctttaagcagtacatcatagacttcgccaaagaagtcgaggtgga

SEQ ID NO: 11127 - DNA, 75 bp, synthetic construct
  source 1..75: mol_type = other DNA
gatgaccaaaaacgtcaagttcctggtcggctttgccatcatctctgtatttattgctgtgggtatgagcgtcgt

SEQ ID NO: 11128 - DNA, 75 bp, synthetic construct
  source 1..75: mol_type = other DNA
tatggtgcctatattcggtggacgccgatggacggtttttagtactgcaatcctgattattccttgcgtctggct

SEQ ID NO: 11129 - DNA, 75 bp, synthetic construct
  source 1..75: mol_type = other DNA
gaaaacagggataagagcggtggcattcattgaaagtgagattgatgaatggattgacgcgactattcgaaactc

SEQ ID NO: 11130 - DNA, 75 bp, synthetic construct
  source 1..75: mol_type = other DNA
cgacactcagaactggcgaaagcgttcgcatacgccctgaaccagtggccggcgctgacgtactatgcagatgat

SEQ ID NO: 11131 - DNA, 75 bp, synthetic construct
  source 1..75: mol_type = other DNA
gatactggtgcctaatacttcaaccgcttctggtgatgggctgctcatttatctttacaatagtaataacagtgg

SEQ ID NO: 11132 - DNA, 75 bp, synthetic construct
  source 1..75: mol_type = other DNA
gaacggagtggagccagaaagctacctccgctatgtccttgacgtcatagccgactggccgataaaccgggtcgg

SEQ ID NO: 11133 - DNA, 75 bp, synthetic construct
  source 1..75: mol_type = other DNA
ggctggaccagtgtcttgcgcagttctggcgggtgctgaaacctgccggaagtctttacctgttctgtggccatc

SEQ ID NO: 11134 - DNA, 75 bp, synthetic construct
  source 1..75: mol_type = other DNA
actactggctgatcgcctttgttacgccgaccggcggtatcaggcatgtcatcaccaggtatcgcaacaagagac

SEQ ID NO: 11135 - DNA, 75 bp, synthetic construct
  source 1..75: mol_type = other DNA
ttacaggatgaccttaaaccaattattgttgcttctccggaggagaatatcttacgctgggaatttgatcgttcc

SEQ ID NO: 11136 - DNA, 75 bp, synthetic construct
  source 1..75: mol_type = other DNA
attgaaattcagaatctggtacagagtggcggaaatcagaaagactttaccgtcgacatgaactgcccctatagc

SEQ ID NO: 11137 - DNA, 75 bp, synthetic construct
  source 1..75: mol_type = other DNA
caaatgaaagtgttctgttatttgatgctaacggagaaggctggctaattggctggcgttctctctggtacacct

SEQ ID NO: 11138 - DNA, 75 bp, synthetic construct
  source 1..75: mol_type = other DNA
gcgaggtgcgagtgccacaccggggaaatgtcgtggagaaagtgattgaaggcgcttacgaagtcctcggtgtgt

SEQ ID NO: 11139 - DNA, 75 bp, synthetic construct
  source 1..75: mol_type = other DNA
cgccatcggggcgcaggccgccgccgtgcatggtatcagtgagcaggctctctgcggcgcaccatcatggacaga

SEQ ID NO: 11140 - DNA, 75 bp, synthetic construct
  source 1..75: mol_type = other DNA
gactgtcgctatcctcagataagccgaagctggcaggctaactggccgaatcttgccacgttcttcgcttatcca

SEQ ID NO: 11141 - DNA, 75 bp, synthetic construct
  source 1..75: mol_type = other DNA
cgctggttctggtgacctattttacccagccgcaacagaacgcagagagccgccgcgatgtgctggcttcagcgg

SEQ ID NO: 11142 - DNA, 75 bp, synthetic construct
  source 1..75: mol_type = other DNA
ccagcctcaacctaaggcagaaagccgtcgcgatgtattagcgtcggcggctaaaatcgtcaccgacggtttgta

SEQ ID NO: 11143 - DNA, 75 bp, synthetic construct
  source 1..75: mol_type = other DNA
gtcagtttttaatcggtgccaggagaacctgctcaaaggggggctgccaggacgtactgccaaaggcaaacgcag

SEQ ID NO: 11144 - DNA, 75 bp, synthetic construct
  source 1..75: mol_type = other DNA
atcaccgtactggaaagtctgcagcgggaaggcttccagccattcttcgcctgccagacccgtgtgcgcgacccg

SEQ ID NO: 11145 - DNA, 75 bp, synthetic construct
  source 1..75: mol_type = other DNA
agcatcgacaccgacattaagctcaaccgggcgttgtgggtgatggcagaaacactgctggagagcatgcgctga

SEQ ID NO: 11146 - DNA, 75 bp, synthetic construct
  source 1..75: mol_type = other DNA
gaaggggcttacgaggtggtgggcgtgtttgaccggatagaggagaagcatgatgccatgcagtcgctggtcctg

SEQ ID NO: 11147 - DNA, 75 bp, synthetic construct
  source 1..75: mol_type = other DNA
aggcctggctctcatcatcggcggtcttgaaaaaatgaggctcactacgaacgacattgaggtgctgaagaatgt

SEQ ID NO: 11148 - DNA, 75 bp, synthetic construct
  source 1..75: mol_type = other DNA
accagctggtgattaatggtggtcaggcaaccggcaaaacctggcttgcgttcacaaatgtcggaaacagtaacc

SEQ ID NO: 11149 - DNA, 75 bp, synthetic construct
  source 1..75: mol_type = other DNA
cataatggcgaccgcgaaggaatgcgggtatgccttaatttgtcccgagtcgaagtattaaatcagcgttatttc

SEQ ID NO: 11150 - DNA, 75 bp, synthetic construct
  source 1..75: mol_type = other DNA
cgccagttgcgggtggaaaaaatcctgaatcgttcgggcatccagcctctgcacagcaaatgctcgtttgcgaat

SEQ ID NO: 11151 - DNA, 75 bp, synthetic construct
  source 1..75: mol_type = other DNA
tgtatttctgcacggtggtgtgcacgttatatctggtaagtggcgggtataaggttatccggaactatatacgca

SEQ ID NO: 11152 - DNA, 75 bp, synthetic construct
  source 1..75: mol_type = other DNA
gctcaggactgcgcttataaatttcttgtttgcgaggataaacccggtataccccgccctgccctcgattcctgg

SEQ ID NO: 11153 - DNA, 75 bp, synthetic construct
  source 1..75: mol_type = other DNA
cgtattacacggcggaagacaacgcgctggcgcatgactggtcagaacgtcttgcggagcttaaaggtgctgcct

SEQ ID NO: 11154 - DNA, 75 bp, synthetic construct
  source 1..75: mol_type = other DNA
gcaagagaaaaggtgcgacatgaactcagaaccctggagcagggagaaccagctgagcctgtgcattcacaggaa

SEQ ID NO: 11155 - DNA, 75 bp, synthetic construct
  source 1..75: mol_type = other DNA
ggctggtgaaggatgtcgacgattttgttgcgtcagcggttgttttgtatgaccagatgaatcgcggcggcccgg

SEQ ID NO: 11156 - DNA, 75 bp, synthetic construct
  source 1..75: mol_type = other DNA
tgatgcggttaaaaaaattcaggcgttgttaccagcgatcgaaaaagcaatgccgcctctgctggtggcccgaat

SEQ ID NO: 11157 - DNA, 75 bp, synthetic construct
  source 1..75: mol_type = other DNA
cgccgccgatcttggcacctggggcgatctgtggccggtaaaggagccggacatgctgacggtgatcatgcagcg

SEQ ID NO: 11158 - DNA, 75 bp, synthetic construct
  source 1..75: mol_type = other DNA
aggtgagcgccataatgcacttgatgacgcccgttaccaggcaaaatacgtttcagctatctggcaaaaactgat

SEQ ID NO: 11159 - DNA, 75 bp, synthetic construct
  source 1..75: mol_type = other DNA
attgcggtgaaatgcaacattctgaccagtacctacatccctcacccgcttctcagccagcaggctttttcacgt

SEQ ID NO: 11160 - DNA, 75 bp, synthetic construct
  source 1..75: mol_type = other DNA
tgtggctggattatctggacgcactggaactggttgatacctccagtgctccagatattgaatggcctacgcctc

SEQ ID NO: 11161 - DNA, 75 bp, synthetic construct
  source 1..75: mol_type = other DNA
atggcgcaacgtataaaatcccacaattctgaagccgtcccggccattaagcgggggcggcattcgcacgtattt

SEQ ID NO: 11162 - DNA, 75 bp, synthetic construct
  source 1..75: mol_type = other DNA
aaatgcctggagaatagccacacaacgacttcgcatcgaggacctgcattttcacgatctacggcatgaagcaat

SEQ ID NO: 11163 - DNA, 75 bp, synthetic construct
  source 1..75: mol_type = other DNA
gcgaacgcattaggtatcgtcggaaaaacctcaaacacacccaaaggtctcttgctaaagccctgaaaatctccc

SEQ ID NO: 11164 - DNA, 75 bp, synthetic construct
  source 1..75: mol_type = other DNA
acaactattcgaaaggcaatagaaagtcttaaacaacgcggctacctgcatagtgtccacgggcaaggaacattt

SEQ ID NO: 11165 - DNA, 75 bp, synthetic construct
  source 1..75: mol_type = other DNA
atggcaacgaaagagcaaaatctgaaacggcttgatgaactggccctgattctggggcgtgagccggatatatcc

SEQ ID NO: 11166 - DNA, 75 bp, synthetic construct
  source 1..75: mol_type = other DNA
tgtgatgccctccttggcaggctgatgtgctgcatgtttcagggacgccgttatcttcagattgatgcggaagat

SEQ ID NO: 11167 - DNA, 75 bp, synthetic construct
  source 1..75: mol_type = other DNA
ggttgatgacaatgcagaagcagctggaaggggcgcaggaatatatccgcactcagtgcactaagctggcttttt

SEQ ID NO: 11168 - DNA, 75 bp, synthetic construct
  source 1..75: mol_type = other DNA
cttcctggtgggcatattattaccttgtccgcaacgcttattttttatttggagttccatttttaattttttgtg

SEQ ID NO: 11169 - DNA, 75 bp, synthetic construct
  source 1..75: mol_type = other DNA
acaggtgtgcgaccgttactggtgggttcgccactatgacaaacgttgccgccgtagcgataatcgccgtcatag

SEQ ID NO: 11170 - DNA, 75 bp, synthetic construct
  source 1..75: mol_type = other DNA
ataagatttgtgggcgttgtaatggaaaccggtttagtcgtttaccgaccacgctggcacgacgtcatgtccaga

SEQ ID NO: 11171 - DNA, 75 bp, synthetic construct
  source 1..75: mol_type = other DNA
attgatgctatgtgccgtattgcagagcttgagactaatctcgcggcgctggtggcagagaacgccggactgaaa

SEQ ID NO: 11172 - DNA, 75 bp, synthetic construct
  source 1..75: mol_type = other DNA
aactaaaaaacagaaaaactaaacgggattatgattatgaacgcagggtttctgatatatattttgatctgtttt

SEQ ID NO: 11173 - DNA, 75 bp, synthetic construct
  source 1..75: mol_type = other DNA
ggcggtaagcaatggaaaggcctgatgactcgtcgtgagattgagcgtgaagtctgtttgtgggggcaacaatga

SEQ ID NO: 11174 - DNA, 75 bp, synthetic construct
  source 1..75: mol_type = other DNA
gtggccgaccgcgtgaccgtgcagtctgccgccattgttgaataccagataaacgccacgctttacctttaccct

SEQ ID NO: 11175 - DNA, 75 bp, synthetic construct
  source 1..75: mol_type = other DNA
atggaaacgttattaccaaacgttaatacgtctgaaggttgttttgatattggtgttctgctcagtaaccgggag

SEQ ID NO: 11176 - DNA, 75 bp, synthetic construct
  source 1..75: mol_type = other DNA
cagccctgtgtatttggtaaattggcaagcaagaaaattaaagggcttgatttccatttatctattgtaaatagc

SEQ ID NO: 11177 - DNA, 75 bp, synthetic construct
  source 1..75: mol_type = other DNA
aactaccacaattatcatccagtttttcatttggaaaagatattgataatattcattcatttatctttaacgaaa

SEQ ID NO: 11178 - DNA, 75 bp, synthetic construct
  source 1..75: mol_type = other DNA
ggcaggctctggaaaaagtggccagcgcgggagactgccggcaggtggctcatgatttactggcaggcaaaggag

SEQ ID NO: 11179 - DNA, 75 bp, synthetic construct
  source 1..75: mol_type = other DNA
cgtgcgattggtgttgagctggagaccggacgttttgagcagacagtcagggaagttcaggatttaatcgtttga

SEQ ID NO: 11180 - DNA, 75 bp, synthetic construct
  source 1..75: mol_type = other DNA
actgttaatggtcatggtgagaataaaggtggccttaaagttggggacggcgttgttgttcttgagcaacagcca

SEQ ID NO: 11181 - DNA, 75 bp, synthetic construct
  source 1..75: mol_type = other DNA
aatcctcaaacagagcgggtgaaaatgtactggcaaaaagccaatggcgaagcgtggggaacgttacatgctctg

SEQ ID NO: 11182 - DNA, 75 bp, synthetic construct
  source 1..75: mol_type = other DNA
cgcatagtgcgctgggttatcgctcgccacgggaatatctgcggcagcgggcttgtaatgggttaagtgataaca

SEQ ID NO: 11183 - DNA, 75 bp, synthetic construct
  source 1..75: mol_type = other DNA
cgtatccgttcaaacaactgttacggtcaggtatcaagacgtgaccaggagagtgcgctggcatgctggggtatc

SEQ ID NO: 11184 - DNA, 75 bp, synthetic construct
  source 1..75: mol_type = other DNA
atgcataaatcagaaaatgaaaaaatagattttattctggatgagcatgagcggatattcagaaaacagggttct

SEQ ID NO: 11185 - DNA, 75 bp, synthetic construct
  source 1..75: mol_type = other DNA
agtacagtcgaagagccatcggcaagtatattgatgtctggcattatcctgacggacataaggagctgcgactaa

SEQ ID NO: 11186 - DNA, 75 bp, synthetic construct
  source 1..75: mol_type = other DNA
tgctcgccgtgtgcgccacggtgttgtgtttttcactgatattcagggaacggttatgtgagctgaatattcaca

SEQ ID NO: 11187 - DNA, 75 bp, synthetic construct
  source 1..75: mol_type = other DNA
ggggagtctgctgtttgggctgctgacatatctgactaacctgtatttcaaaatcaaagaggaccggcgtaaggc

SEQ ID NO: 11188 - DNA, 75 bp, synthetic construct
  source 1..75: mol_type = other DNA
atgaacggtaaccgcgctgaaatgagcccggaagccgccggcattgccgcctgtctgatggcgtacagccatcac

SEQ ID NO: 11189 - DNA, 75 bp, synthetic construct
  source 1..75: mol_type = other DNA
ggggagtctgctgtttggcctgctgacgtatctgactaacctgtatttcaaaatcagagaggaccggcgtaaggc

SEQ ID NO: 11190 - DNA, 75 bp, synthetic construct
  source 1..75: mol_type = other DNA
ctgacgaaaacggtcagtacaccggactgaaagccctgctggcggcggagtcggtaaccggtgttaaaccgcgta

SEQ ID NO: 11191 - DNA, 75 bp, synthetic construct
  source 1..75: mol_type = other DNA
acggcggaatcctacgacgataactatctggatgatgaggatgctgactgggtatccaccgggcaggggcagaaa

SEQ ID NO: 11192 - DNA, 75 bp, synthetic construct
  source 1..75: mol_type = other DNA
tttgtattgaatgtgaagcgccaattccgccagcacgacgccgcgccattccgggagtgcagctttgcattacct

SEQ ID NO: 11193 - DNA, 75 bp, synthetic construct
  source 1..75: mol_type = other DNA
atgctaaatttatttgttggccttgatatatacacagggcttttgttattacttgctctggcatttgtgttgttc

SEQ ID NO: 11194 - DNA, 75 bp, synthetic construct
  source 1..75: mol_type = other DNA
gagggaacggtcatccatattgtgccgcgactggccggtgcagggaaaggcggactgcagattgtgctgggggcg

SEQ ID NO: 11195 - DNA, 75 bp, synthetic construct
  source 1..75: mol_type = other DNA
catgttttccactttgactgtttctggatgaaagccttccagtggtgcgattttgagtgggacccgctgactttc

SEQ ID NO: 11196 - DNA, 75 bp, synthetic construct
  source 1..75: mol_type = other DNA
gtgtggcttggggagcagcagttatccgaactggataagctgcaaattgtgccggaaggcagaaaatccgtgcgc

SEQ ID NO: 11197 - DNA, 75 bp, synthetic construct
  source 1..75: mol_type = other DNA
cgtaaaaaatcagaggtaggagttgcgccaacgatccacgaaattgctcggggattaatggataaggcgctggct

SEQ ID NO: 11198 - DNA, 75 bp, synthetic construct
  source 1..75: mol_type = other DNA
cggggcctgccgctggcgcttatcagtgaagacggcaatacggcgtggagcgcggaatatgatgaatggggcaac

SEQ ID NO: 11199 - DNA, 75 bp, synthetic construct
  source 1..75: mol_type = other DNA
tgtggcgctgatttcagaaagcggggccaatccatttggcctgacggtggatgctgtgatggaggagtaccgccg

SEQ ID NO: 11200 - DNA, 75 bp, synthetic construct
  source 1..75: mol_type = other DNA
gctaacggctttatcaccgcaggcagaacagatgaaaccaccagtgagtttttcccgttgtctgaagatgccatc

SEQ ID NO: 11201 - DNA, 75 bp, synthetic construct
  source 1..75: mol_type = other DNA
gcccgtccgaaaatgcaatctacaacgcagcgctatatgaaagttatatcaaggaggggacatggccgcaggatg

SEQ ID NO: 11202 - DNA, 75 bp, synthetic construct
  source 1..75: mol_type = other DNA
catgagcgttgaacaggcccgggcgattctggccgcggcggcaccgcagcagccggtggcatccacgcagagtga

SEQ ID NO: 11203 - DNA, 75 bp, synthetic construct
  source 1..75: mol_type = other DNA
tcaaatcggcttagcgaacacacccgaggcctactaaaggatattgagtcaagcaatgtacttacagttgagcag

SEQ ID NO: 11204 - DNA, 75 bp, synthetic construct
  source 1..75: mol_type = other DNA
aggatcatctcggcacgttttggtgtcccccgaacccaggtcaggacatgggttgccctctatgaaaaacatgga

SEQ ID NO: 11205 - DNA, 75 bp, synthetic construct
  source 1..75: mol_type = other DNA
cttttatgaggagcacgcgcaaaaaagtaccgaccagagcctggtcctgtgcgacaccgtgcgttatctgccgga

SEQ ID NO: 11206 - DNA, 75 bp, synthetic construct
  source 1..75: mol_type = other DNA
ccgctacccgcagggcgttaagctcgatcaggaaaacagccgtatttttctgccgaaactgggctggatgcgcta

SEQ ID NO: 11207 - DNA, 75 bp, synthetic construct
  source 1..75: mol_type = other DNA
atcaacaccgcgttcagggtaatcgaaacggttcgcccaaaactggcctgcagccggtgcgactgtatagttcag

SEQ ID NO: 11208 - DNA, 75 bp, synthetic construct
  source 1..75: mol_type = other DNA
atgggtactgttcaatgccatgaacggtaaccgcgctgaaatgagcccggaagccgccggcattgctgcctgtct

SEQ ID NO: 11209 - DNA, 75 bp, synthetic construct
  source 1..75: mol_type = other DNA
atgacggcattactgacactggaagagatcaaggcacatctgcgtgtcgaccatgacgcggatgatgacatgctg

SEQ ID NO: 11210 - DNA, 75 bp, synthetic construct
  source 1..75: mol_type = other DNA
accagtatgagcaggaccgcatcaccgtcacggacagcctgaaccggcgtgaggtgctgcatacagaaggcgggg

SEQ ID NO: 11211 - DNA, 75 bp, synthetic construct
  source 1..75: mol_type = other DNA
aacattaccaggggccatatcgcggcaaaagtgacggctatgcggcaaaagaaagggaactcaaacagcacataa

SEQ ID NO: 11212 - DNA, 75 bp, synthetic construct
  source 1..75: mol_type = other DNA
tcggcatcaaatgcagcatgtatcttgtggggagcttctttgatttcccgctaaagatatccacctttttcggcg

SEQ ID NO: 11213 - DNA, 75 bp, synthetic construct
  source 1..75: mol_type = other DNA
cagtcggttaatgaacgaacggaagaaagagaagcgtgtcctggctgtcgagcatgaatacatcttgcaggtgac

SEQ ID NO: 11214 - DNA, 75 bp, synthetic construct
  source 1..75: mol_type = other DNA
gccgcacacagcggatttaccctctcggttgacgccagcctgacgcgcggcaagcagagcaacggcctgcacggc

SEQ ID NO: 11215 - DNA, 75 bp, synthetic construct
  source 1..75: mol_type = other DNA
atgtgtgaagctgagggtgttactcaggctgagatgattgccgaactgataaagcagaagagtgcttttagctaa

SEQ ID NO: 11216 - DNA, 75 bp, synthetic construct
  source 1..75: mol_type = other DNA
ctgacctattacaagtcggggacctttgcgacggaggcaatccgctggcctgaaagtgtggatgaacacaaaaag

SEQ ID NO: 11217 - DNA, 75 bp, synthetic construct
  source 1..75: mol_type = other DNA
ccgcctgcatgcaggccatgaatgaacaatttaaatcagcattccttaaactcattcagcaaaaccacgaagcag

SEQ ID NO: 11218 - DNA, 75 bp, synthetic construct
  source 1..75: mol_type = other DNA
actgtcggtgtgatgattgccagcagtgacctgattaatcccattccggaagaatcaacggaaacggcggcaaga

SEQ ID NO: 11219 - DNA, 75 bp, synthetic construct
  source 1..75: mol_type = other DNA
accattgtctgcatgatgtgcaggacatgagccgccttaaccatccgaaagcggacctgtcaaaggggcagtacg

SEQ ID NO: 11220 - DNA, 75 bp, synthetic construct
  source 1..75: mol_type = other DNA
gatggtgagcttctacggctggaaccgcgtcgatcgctttatggccgcctggaaaaatgcgggattcagcgttgt

SEQ ID NO: 11221 - DNA, 75 bp, synthetic construct
  source 1..75: mol_type = other DNA
gcaatgacccgaactttgcgacaacaatgacaaatgcgctggcaggcaaacagcctctggatgcaactttaaccg

SEQ ID NO: 11222 - DNA, 75 bp, synthetic construct
  source 1..75: mol_type = other DNA
ggctccgcgcacatcacgttcaaaaatcaagaactggttgacaggctgaatgacattattgcaagacactatccg

SEQ ID NO: 11223 - DNA, 75 bp, synthetic construct
  source 1..75: mol_type = other DNA
aaggatgtcaccattaacggcaagaccacctcgcagttcctggcctcggtgattctggataatctgcctccccgg

SEQ ID NO: 11224 - DNA, 75 bp, synthetic construct
  source 1..75: mol_type = other DNA
cctattaccagctcacgatcgacggcaaagaagtcatcgagattgacgtgatcaacatggtgctgaaagtcgacg

SEQ ID NO: 11225 - DNA, 75 bp, synthetic construct
  source 1..75: mol_type = other DNA
agccgggcgtggcttgcgcagtgcgggctgacggtggagcaactggccagacaggtggagccggaatacacaccg

SEQ ID NO: 11226 - DNA, 75 bp, synthetic construct
  source 1..75: mol_type = other DNA
agtcggtaaaatggagcagctggtttatctgttctctactgcttcatggactgattttccttgcgtttatctggc

SEQ ID NO: 11227 - DNA, 75 bp, synthetic construct
  source 1..75: mol_type = other DNA
tccagtcaggaaaaaaacacaggacatacgatgatgagcttcttgatttattcagagcgagaaatatcgctgctt

SEQ ID NO: 11228 - DNA, 75 bp, synthetic construct
  source 1..75: mol_type = other DNA
gcgaccgcgcttcttgtttgagattgctatggcgcttaactgtgatccggtttggttacagtacggaactaaacg

SEQ ID NO: 11229 - DNA, 75 bp, synthetic construct
  source 1..75: mol_type = other DNA
aactgcgcgagcaggaagaccgcgaacgccacatcagcaacgcacgcacccgtatcgctgcaccttcccgttttc

SEQ ID NO: 11230 - DNA, 75 bp, synthetic construct
  source 1..75: mol_type = other DNA
tgttacgcccaaaacgtcgccgctgggttaatgaaaagtacacgcgctgggttaagacgcagccgtgtgcatgtt

SEQ ID NO: 11231 - DNA, 75 bp, synthetic construct
  source 1..75: mol_type = other DNA
tgcgtccgtgaaagaagcaccaattgggatcgaggtcatccccgcacacgtcactgaatatctgaacaaagtact

SEQ ID NO: 11232 - DNA, 75 bp, synthetic construct
  source 1..75: mol_type = other DNA
gaaataacaaccgttgatattgctacatacagagacgttcgtttagcagaaatcaacccccgaacgggtaaaccc

SEQ ID NO: 11233 - DNA, 75 bp, synthetic construct
  source 1..75: mol_type = other DNA
gctggaagtgcagaagggcgggacgatgcgcggcaacattgaacacaccggcggtgaactctcatcaaacggtaa

SEQ ID NO: 11234 - DNA, 75 bp, synthetic construct
  source 1..75: mol_type = other DNA
cctggcgctttgcgcaattcaccataaagcctttgataaaggatcgattggcctggatgaaaatatgcgggtact

SEQ ID NO: 11235 - DNA, 75 bp, synthetic construct
  source 1..75: mol_type = other DNA
gagagcagcttcgcccgctgtatgatgaactgaagcactatgtgctgatggcgggtaaagtgcatgccgatgaca

SEQ ID NO: 11236 - DNA, 75 bp, synthetic construct
  source 1..75: mol_type = other DNA
aacttaacggaatcgagccggaaacgtggctacgccacgtgatcagtgtaatcaacacctggcctgccaaccgcg

SEQ ID NO: 11237 - DNA, 75 bp, synthetic construct
  source 1..75: mol_type = other DNA
agcgttatctcaaagcgttaaacccaaactggcctgagccttacattaagatcaacggtaattgctctataattg

SEQ ID NO: 11238 - DNA, 75 bp, synthetic construct
  source 1..75: mol_type = other DNA
ttgatatgccggattttgagcgtgaggatgactggtggcgcaatggtcagaacctgtacctggacaatatggagg

SEQ ID NO: 11239 - DNA, 75 bp, synthetic construct
  source 1..75: mol_type = other DNA
gcgtctggcgggtgccaaaagtggcggtgtttttcaggcagtgctgggtgcggcgctgattgctacggcaatctg

SEQ ID NO: 11240 - DNA, 75 bp, synthetic construct
  source 1..75: mol_type = other DNA
gtacgttttccggctatcacactgatggtttcactgaagatgatcagtatcacctggcatccattcttgaacatc

SEQ ID NO: 11241 - DNA, 75 bp, synthetic construct
  source 1..75: mol_type = other DNA
cgacggcagcctgcaggcgctggaggtgactgaaggcagtatcaccatcaatggcgcgggcctggacggcacccg

SEQ ID NO: 11242 - DNA, 75 bp, synthetic construct
  source 1..75: mol_type = other DNA
acatcgcggcagcagacccgcatgcccagtatgcaccgaaagccagtccggcattcaccggcacaccaacagcac

SEQ ID NO: 11243 - DNA, 75 bp, synthetic construct
  source 1..75: mol_type = other DNA
gggtacagccctgagtgccggtggtttttctgccaccacgatgctgttttcactgggtgccagcatgatactggg

SEQ ID NO: 11244 - DNA, 75 bp, synthetic construct
  source 1..75: mol_type = other DNA
atgaacgtaattaaaacagaaattccagatgtactgatttttgaaccgaaagtttttggtgatgagcgtggtttc

SEQ ID NO: 11245 - DNA, 75 bp, synthetic construct
  source 1..75: mol_type = other DNA
tgaattactgaatgcaaagattggatttgcaacttcaggaaacagccaacagcagcaaagtagcaatcatcaaaa

SEQ ID NO: 11246 - DNA, 75 bp, synthetic construct
  source 1..75: mol_type = other DNA
cagacagtctggcaaacagcggggcgatccaggcggctgacagcctgactgcacgtctgacgggtgagctcgtca

SEQ ID NO: 11247 - DNA, 75 bp, synthetic construct
  source 1..75: mol_type = other DNA
cgcatggcgtcttttataaagatgagcccatcaaagaactggagtcggcgctggtggcgcaaggctttcagatta

SEQ ID NO: 11248 - DNA, 75 bp, synthetic construct
  source 1..75: mol_type = other DNA
cattagactaaaagatcatctcaatcgttttccagacttttataatgcatctttagtaaaggaggaagctgaaag

SEQ ID NO: 11249 - DNA, 75 bp, synthetic construct
  source 1..75: mol_type = other DNA
cgttatccagatttttataatgaagaaatattcagggaggtgatcgaagagaacgagtcaacatttaaagaactt

SEQ ID NO: 11250 - DNA, 75 bp, synthetic construct
  source 1..75: mol_type = other DNA
aataaaattaatattgcttggcctcttcaaggtggttttattctatccgataaagatcgtaatgcatcgtgttta

SEQ ID NO: 11251 - DNA, 75 bp, synthetic construct
  source 1..75: mol_type = other DNA
acaaaagggattagttcagctcagtagcgcaactaacagcgacagcgaaacaatggcggctacccctaaagccgt

SEQ ID NO: 11252 - DNA, 75 bp, synthetic construct
  source 1..75: mol_type = other DNA
accaggagctggtgaaactggttactgaacgcagcaatcagccactacatgatgtggacctggatagttatttat

SEQ ID NO: 11253 - DNA, 75 bp, synthetic construct
  source 1..75: mol_type = other DNA
gtgggcggggattcgttcgccctggtgaaactgaaaaacaacaaaattggggtttttcaggcataaaaaaagcgg

SEQ ID NO: 11254 - DNA, 75 bp, synthetic construct
  source 1..75: mol_type = other DNA
gtaaagagtgctatgaagatgagatgttcatcatcagatactttaagaaaggctccgcgcacatcaggttcagga

SEQ ID NO: 11255 - DNA, 75 bp, synthetic construct
  source 1..75: mol_type = other DNA
gcgaacggggaccggcaggtgatgctggtccggcaggcccgcaggggccgaaaggtgacaggggagagcggggag

SEQ ID NO: 11256 - DNA, 75 bp, synthetic construct
  source 1..75: mol_type = other DNA
ggaatgggtacaaaagcgcatgacctttttgtgttgcctttgtgcagaaagcatcacgacgagctgcatgcggat

SEQ ID NO: 11257 - DNA, 75 bp, synthetic construct
  source 1..75: mol_type = other DNA
cagatcatatccatatgcttgtggagatcccgcccaaaatgagcgtatccgggtttatgggatatctgaaaggga

SEQ ID NO: 11258 - DNA, 75 bp, synthetic construct
  source 1..75: mol_type = other DNA
tggtttcactgaagatgatcagtatcacctggcatccattcttgaacatcggtcatcagaaggacatccggtcat

SEQ ID NO: 11259 - DNA, 75 bp, synthetic construct
  source 1..75: mol_type = other DNA
ctaccgtcgccgcgtggagatgtatcgggagaaggagaaaataacgtaccactggaagaagccggagcggttgcg

SEQ ID NO: 11260 - DNA, 75 bp, synthetic construct
  source 1..75: mol_type = other DNA
atatgttgctattgctgcaaatgagattgcgactaaccagggtttcaaaagttttgcttttccttcagacatttt

SEQ ID NO: 11261 - DNA, 75 bp, synthetic construct
  source 1..75: mol_type = other DNA
ccctgcactggcaggcatgattaccacgatggttacgcagggctatgactatcgtcgtgatgacgatatggcatt

SEQ ID NO: 11262 - DNA, 75 bp, synthetic construct
  source 1..75: mol_type = other DNA
cgacaataacctgtgtgaaaacgccctccgggtagttgcactggggcggcgtaactacatgttcttcggctctga

SEQ ID NO: 11263 - DNA, 75 bp, synthetic construct
  source 1..75: mol_type = other DNA
ccacagtcatcccggtgggctgccctggctgagcgaggctgaccggcggctgcagataaaaagcgcactgccctg

SEQ ID NO: 11264 - DNA, 75 bp, synthetic construct
  source 1..75: mol_type = other DNA
cgtcccggaatgcgttacccgccgtcaggcggtggttaatcaggcccgcaccctgctgaaaaacaacacacacga

SEQ ID NO: 11265 - DNA, 75 bp, synthetic construct
  source 1..75: mol_type = other DNA
gattgagacagaccaggataattacgtcgcgggtaagccgatagtcgttaaagtgaccctgagagatgataacgg

SEQ ID NO: 11266 - DNA, 75 bp, synthetic construct
  source 1..75: mol_type = other DNA
gtgcagatgctcgaccggctggaaagtgaaatcctggctgaccgggtgagtgaggaaagccgccgctggctggca

SEQ ID NO: 11267 - DNA, 75 bp, synthetic construct
  source 1..75: mol_type = other DNA
ggaagacaatacagtgatacagagcgtaatgccattagccacagaaacggcgctggatattctgattgtgtggct

SEQ ID NO: 11268 - DNA, 75 bp, synthetic construct
  source 1..75: mol_type = other DNA
gcagaatcaaaactctgaacacccggcggataaatgtcctgaggggggaacagcgtcgtgtcagtggcagtgccc

SEQ ID NO: 11269 - DNA, 75 bp, synthetic construct
  source 1..75: mol_type = other DNA
ttgaccggattgaggaaaagcgtgatgccatgcagtcgctgattctgccggcaccagcacgccaggcgctggcac

SEQ ID NO: 11270 - DNA, 75 bp, synthetic construct
  source 1..75: mol_type = other DNA
gaatcgacccactgattggtcgtgagaaggagctggagcgtgctattcaggttctctgccgtcgccgtaaaaaca

SEQ ID NO: 11271 - DNA, 75 bp, synthetic construct
  source 1..75: mol_type = other DNA
ctctgctcgccgaggatatgaacagcgagcaagcggcaaatatggcgcgtggatggcctcttctcaggcttcagg

SEQ ID NO: 11272 - DNA, 75 bp, synthetic construct
  source 1..75: mol_type = other DNA
tctacccaagtcagcttttctgcaacgtagctgcgaaagcaaataccaatgacagactgaatgcagatttaaaca

SEQ ID NO: 11273 - DNA, 75 bp, synthetic construct
  source 1..75: mol_type = other DNA
atacatctactgagttgttctatgatcttgcaaagcgttcttttgaagcgagctggaaaacaatgcaggatatgt

SEQ ID NO: 11274 - DNA, 75 bp, synthetic construct
  source 1..75: mol_type = other DNA
gcaggcggtaccgcgtaacgtgcccaccagcaacgtaaaggcactggcaaaaatacagaagatgaaaaagatgat

SEQ ID NO: 11275 - DNA, 75 bp, synthetic construct
  source 1..75: mol_type = other DNA
aactggtaaccagaaacaacatgaaatcattaaccactgaaacagcgctggatatcctcattgcgtggctgcagg

SEQ ID NO: 11276 - DNA, 75 bp, synthetic construct
  source 1..75: mol_type = other DNA
gccttgcaatggctactcacccactcgttcagcgccagagcaatggcagttaaacgagtgacagataacagaggg

SEQ ID NO: 11277 - DNA, 75 bp, synthetic construct
  source 1..75: mol_type = other DNA
gcctcacggcagggacgtgtctgattttctcgcaaaacctgatggccgaggtcagtgtattcaatccggcgcttc

SEQ ID NO: 11278 - DNA, 75 bp, synthetic construct
  source 1..75: mol_type = other DNA
gcgaaggtgatgtgccgaaagttgccgttgataccggcgcgctcggtggaatgtacgccaggcgtattcatctga

SEQ ID NO: 11279 - DNA, 75 bp, synthetic construct
  source 1..75: mol_type = other DNA
gaagcagagcccgtgctttatatgaatcgatttaccggaaagacattctcactggaagagcaacccggtgctgat

SEQ ID NO: 11280 - DNA, 75 bp, synthetic construct
  source 1..75: mol_type = other DNA
atgacagacattacagccaatgtgatcgtatcgatgccttcgcaactcttcactatggcgcgttcttttaaagcc

SEQ ID NO: 11281 - DNA, 75 bp, synthetic construct
  source 1..75: mol_type = other DNA
tggcgtgctcggtgtgtccgggcgggatgacttcgggcaacccggtaaatccgctgctgggggcgaaggtgctgc

SEQ ID NO: 11282 - DNA, 75 bp, synthetic construct
  source 1..75: mol_type = other DNA
atgtagatgagttgtgtaagaaagtgacaagttggatgtattcgcatcctggagagagaattagatatgaacgtt

SEQ ID NO: 11283 - DNA, 75 bp, synthetic construct
  source 1..75: mol_type = other DNA
taaccatacgaacagcgggacaccgcagggaggcatcatatcccctgttctcgccaacatggctctggacggact

SEQ ID NO: 11284 - DNA, 75 bp, synthetic construct
  source 1..75: mol_type = other DNA
cgcctgcggatgaagccacgtcgtatgccatccgttttcctgatgatccggagattttttcgcagacagaggcgc

SEQ ID NO: 11285 - DNA, 75 bp, synthetic construct
  source 1..75: mol_type = other DNA
ttcaaatttctggccggaccagaaaccgtgctggcactactggatgaacgggaaagaaaccagcaatacatcaaa

SEQ ID NO: 11286 - DNA, 75 bp, synthetic construct
  source 1..75: mol_type = other DNA
acacttctacagcgtcgcccaacatgcggtgctttgcagcaaactggttccggaggagtttgcttttgaagcgtt

SEQ ID NO: 11287 - DNA, 75 bp, synthetic construct
  source 1..75: mol_type = other DNA
atgaccaagtcagaattgatagaaagacttgccacccagcaatcgcacattcccgccaagacggttgaagatgca

SEQ ID NO: 11288 - DNA, 75 bp, synthetic construct
  source 1..75: mol_type = other DNA
tgtatttctgctcggtaaggcgctggctctgcctgctgagccatttatgacgaaactttttgccgataagtccat

SEQ ID NO: 11289 - DNA, 75 bp, synthetic construct
  source 1..75: mol_type = other DNA
gcatcaatgaccgagaacggtcatcgtcgggatatgcaccctgccgaacagattgccggattccgcgcaatggcg

SEQ ID NO: 11290 - DNA, 75 bp, synthetic construct
  source 1..75: mol_type = other DNA
tatcatgagaatagaggccgatacggataccgtagggtaacgctgtctcttcatcgagaagggaaacagattaac

SEQ ID NO: 11291 - DNA, 75 bp, synthetic construct
  source 1..75: mol_type = other DNA
catgccgcctgatagtgaagaaaaacggggctgaaatttataaccgaacggctctggataatactctgatttaca

SEQ ID NO: 11292 - DNA, 75 bp, synthetic construct
  source 1..75: mol_type = other DNA
aaggccgcgcagcccgagcctcagcctcagccgcaaccgccggagggggaggattacgggtattcagacgatatc

SEQ ID NO: 11293 - DNA, 75 bp, synthetic construct
  source 1..75: mol_type = other DNA
catgacctggaaaccctgttctggcagtggggtgagcgttttccgtcactggccggaatggaacgctggcagtgg

SEQ ID NO: 11294 - DNA, 75 bp, synthetic construct
  source 1..75: mol_type = other DNA
agtccggagagtaacggaatagcagagagcttcgtgaaaacgataaagcgtgactacatcagtatcatgcccaaa

SEQ ID NO: 11295 - DNA, 75 bp, synthetic construct
  source 1..75: mol_type = other DNA
gcactgaagcgtataccggtcgtgaagtgcaggatattcccggtgtgttggccgtgtttgctgaacgtcgtaagg

SEQ ID NO: 11296 - DNA, 75 bp, synthetic construct
  source 1..75: mol_type = other DNA
aacctcagaaacgaatgcagctaacagcgcacaggcggcagcggcctcgcagactgcatcggcaaactccgcgac

SEQ ID NO: 11297 - DNA, 75 bp, synthetic construct
  source 1..75: mol_type = other DNA
cagatatgcagcatggattaagccggaatttgaaatcgaagtttatgaagttttcaaaacggttgtccgtctcgg

SEQ ID NO: 11298 - DNA, 75 bp, synthetic construct
  source 1..75: mol_type = other DNA
tcagtggagaaaaaacagtactgacagccggagcccgtcatactgtaaaggcacaggccggggaacagtatggac

SEQ ID NO: 11299 - DNA, 75 bp, synthetic construct
  source 1..75: mol_type = other DNA
tggattggtgtgttgctgtccatgatatgaatgccggatttgaagaaaagattttgttcccctcgtcagttgaaa

SEQ ID NO: 11300 - DNA, 75 bp, synthetic construct
  source 1..75: mol_type = other DNA
ctggaacgcgatgatgatgctggtttacgggatatgctgaagcgtgctgactatctcgcgaaagagtacaccaaa

SEQ ID NO: 11301 - DNA, 75 bp, synthetic construct
  source 1..75: mol_type = other DNA
ctggctgctgacatcgttgtgcacccgggagaaaccgtgaacggcggaacactggcaaatcatgacaaccagatt

SEQ ID NO: 11302 - DNA, 75 bp, synthetic construct
  source 1..75: mol_type = other DNA
atcagcacgttcgctgaagccgtgggaggcattagggatcagtcgagcgacgtactaccgaaaattaaaatgtga

SEQ ID NO: 11303 - DNA, 75 bp, synthetic construct
  source 1..75: mol_type = other DNA
gtgataaagaccggactgctggaaacgcagacggtggatttcacgctcgggtcacaggggctgcgtcacacaccc

SEQ ID NO: 11304 - DNA, 75 bp, synthetic construct
  source 1..75: mol_type = other DNA
gtgagagcactactgacccctgaaattgccccgcgtatggggatcgtattgttcaggccaggttcagagctgatg

SEQ ID NO: 11305 - DNA, 75 bp, synthetic construct
  source 1..75: mol_type = other DNA
gcgtaatggccgctgggtgacggaaaaggatgtcaccattaacggcaagaccacctcgcagttcctggcctcggt

SEQ ID NO: 11306 - DNA, 75 bp, synthetic construct
  source 1..75: mol_type = other DNA
cggacggagcattcactttgagccgctgctgccgggtgaggcggtgtacagccgcagcgagtccctgtggctggt

SEQ ID NO: 11307 - DNA, 75 bp, synthetic construct
  source 1..75: mol_type = other DNA
atgcccgccgttgacctttcacagttaccggaccccgccatcatcgcggagcctgactttgaggcaattctggct

SEQ ID NO: 11308 - DNA, 75 bp, synthetic construct
  source 1..75: mol_type = other DNA
atgctgcaaaccagatacgccgtgaccgcccgctgacacatgaagaactgatgcactatgtgcccagtatttttg

SEQ ID NO: 11309 - DNA, 75 bp, synthetic construct
  source 1..75: mol_type = other DNA
gaacacggtaattaacgaggggggctggcaggttgttaaggcaggtggcgctgccggtaacaccaccataaatca

SEQ ID NO: 11310 - DNA, 75 bp, synthetic construct
  source 1..75: mol_type = other DNA
aaattcagccgaattttgccaataccggcaaatgctacctcgtcggccttgctgtcaccgatgacccggcgagcc

SEQ ID NO: 11311 - DNA, 75 bp, synthetic construct
  source 1..75: mol_type = other DNA
agtctaaaaactagtattaagactatcacttatttaagtgatattggttgtctggagattcagggggccagtcta

SEQ ID NO: 11312 - DNA, 75 bp, synthetic construct
  source 1..75: mol_type = other DNA
atgcagaaacagcttgacccgaatgaagtcgctgcacggcgtagccttgcaggcagccgttatgatctggtggat

SEQ ID NO: 11313 - DNA, 75 bp, synthetic construct
  source 1..75: mol_type = other DNA
atgacccagagccgccgaccgtcgccactgcagcggagagtgctgattgtgctggctgcccttgatgaaaaacgg

SEQ ID NO: 11314 - DNA, 75 bp, synthetic construct
  source 1..75: mol_type = other DNA
acgccggacagcctgccgccggtggagtggctgacgtatggcagcggttacctggcgggaatgaagctgggcggg

SEQ ID NO: 11315 - DNA, 75 bp, synthetic construct
  source 1..75: mol_type = other DNA
caagaaaagtattcctgcaccttgctgagttattttatgaaatgagaataaatacgctgaaggaaacacggccta

SEQ ID NO: 11316 - DNA, 75 bp, synthetic construct
  source 1..75: mol_type = other DNA
tacccgttattctaaagatcttgcagatgaaggcacccgctgctttatcgatgccgataatatgcgtgccgtcag

SEQ ID NO: 11317 - DNA, 75 bp, synthetic construct
  source 1..75: mol_type = other DNA
ccgacagccttaacgtacaggcactgaacatgggacgcattgtcgttgacgtcgatggtattgagctcgctgaac

SEQ ID NO: 11318 - DNA, 75 bp, synthetic construct
  source 1..75: mol_type = other DNA
atgacagagcagaagcgaccggtactgacactgaagcggaagacagaaggggagacgcttgtccgcagccggaaa

SEQ ID NO: 11319 - DNA, 75 bp, synthetic construct
  source 1..75: mol_type = other DNA
gctgtttggcctgctgacgtatctgactaacctttatttcaagattaaagaagataagcgtaaggcggcgcgggg

SEQ ID NO: 11320 - DNA, 75 bp, synthetic construct
  source 1..75: mol_type = other DNA
gcgatgcgttgtgtctgaatgcgcgctttaccagccgtgaagaggccatccacgcgttgactcaacgtcttgctg

SEQ ID NO: 11321 - DNA, 75 bp, synthetic construct
  source 1..75: mol_type = other DNA
gtaccatgctatttttgctgagcggatgattcagcacccggcggtacagcgaatctgcaatacggattattctgc

SEQ ID NO: 11322 - DNA, 75 bp, synthetic construct
  source 1..75: mol_type = other DNA
ccaacaaaatcagacgaaaaggttatctggagcgcctgtacagttaactgtggtagtcgctgcccgctacgtatg

SEQ ID NO: 11323 - DNA, 75 bp, synthetic construct
  source 1..75: mol_type = other DNA
atgccctgcagtccatgaatgcccaggaatatgaagaaatccgtgctgcgggaagcgatatgcgccgtaatctca

SEQ ID NO: 11324 - DNA, 75 bp, synthetic construct
  source 1..75: mol_type = other DNA
tcagtcagggcacagaccccgtgaaaatgccggattttgatattctcgcggagggtaaaacgctgtcaggcgtgg

SEQ ID NO: 11325 - DNA, 75 bp, synthetic construct
  source 1..75: mol_type = other DNA
gtgacgccctgtttcggcgcccgtctggtgcaggagggtaaccggttgcattaccttgccgaccgtgccggtatc

SEQ ID NO: 11326 - DNA, 75 bp, synthetic construct
  source 1..75: mol_type = other DNA
atgcgtgattttcagaatgcctttgatgccgcccttgcgggggtggacagcacgattgttgaagtgatggggatc

SEQ ID NO: 11327 - DNA, 75 bp, synthetic construct
  source 1..75: mol_type = other DNA
attggcgcggagtactggcgcgactatctaaaattaagcagtaacggctatttgcgactgaccaactggcgcagc

SEQ ID NO: 11328 - DNA, 75 bp, synthetic construct
  source 1..75: mol_type = other DNA
gtgtcagacacactccccgggacaacacttcccgacgacaatcacgaccgcccctggtgggggctaccctgcacc

SEQ ID NO: 11329 - DNA, 75 bp, synthetic construct
  source 1..75: mol_type = other DNA
atgacccgcctgcaggacgagctgcgcacggaatctgtccgcgctcaggcccgtgaacagtttaccggtgcggtg

SEQ ID NO: 11330 - DNA, 75 bp, synthetic construct
  source 1..75: mol_type = other DNA
ctgtcagtatgaagagaatttgctgccaccgttttatgacacgctgacgcagtacgttgagatgggcaacagcac

SEQ ID NO: 11331 - DNA, 75 bp, synthetic construct
  source 1..75: mol_type = other DNA
ccactttccgtaaagaactggaaaaaattctgcgggatcccgaactgagtcaggccttacgtgacgaactgagtg

SEQ ID NO: 11332 - DNA, 75 bp, synthetic construct
  source 1..75: mol_type = other DNA
actgttatcaggcaactacagtgaaagcaaagtcgatatggctgaacaactcaaccgaaaactgaaaggctgggc

SEQ ID NO: 11333 - DNA, 75 bp, synthetic construct
  source 1..75: mol_type = other DNA
tcaggggcaggcagtgaataccactctgaacggcggtgagcagtgggtacatgaaggcgggattgcaacgggtac

SEQ ID NO: 11334 - DNA, 75 bp, synthetic construct
  source 1..75: mol_type = other DNA
ttctcaccacattattcgcagcggagagtcattgtctgtcaccttcagagataagccagaaacttcagtttacca

SEQ ID NO: 11335 - DNA, 75 bp, synthetic construct
  source 1..75: mol_type = other DNA
gaagagaagcagcactctgataagcatgattcctctgaaaaatacttcctggaattaatggatatcattaacaag

SEQ ID NO: 11336 - DNA, 75 bp, synthetic construct
  source 1..75: mol_type = other DNA
ccgggaaattggtgtatttgatgagcacggcgatttaatcgcggtgggcaatactgccgaaagttacaaaccaac

SEQ ID NO: 11337 - DNA, 75 bp, synthetic construct
  source 1..75: mol_type = other DNA
cgtaacatgcgtgtctgtgaaccctttggtccggaacagcgtaagggactatggctttatcatgttctggagccg

SEQ ID NO: 11338 - DNA, 75 bp, synthetic construct
  source 1..75: mol_type = other DNA
gcagaaaaaactggttcagttgttcgactccggtgaagtctgcgcgtttcgtatcaaatatcccaacggcactgt

SEQ ID NO: 11339 - DNA, 75 bp, synthetic construct
  source 1..75: mol_type = other DNA
accgtaccgattgcgctgtttatgggtatctacatgcgctttattcgtccggggcgtgtgggtgaagtctctgtc

SEQ ID NO: 11340 - DNA, 75 bp, synthetic construct
  source 1..75: mol_type = other DNA
accatgccaaaaaagcgaaaccagcgtggggtgtttttgtgtgaggtgggttccgataccgtcaaggaaatgctg

SEQ ID NO: 11341 - DNA, 75 bp, synthetic construct
  source 1..75: mol_type = other DNA
ctgtggggaggagcagtatctgaaatttggcgatgatgcctcgcctttcggtcttaagtgggagaagaataagcc

SEQ ID NO: 11342 - DNA, 75 bp, synthetic construct
  source 1..75: mol_type = other DNA
tagcgatctttatgctggtaagataattgatttattgcaaatgaagtatttcagaaaagaaaaatataacaatat

SEQ ID NO: 11343 - DNA, 75 bp, synthetic construct
  source 1..75: mol_type = other DNA
ttcctcgccaaaaggtggcgatcatctatgatgttggtatatcgacactgtataagaagtttccggtcggagata

SEQ ID NO: 11344 - DNA, 75 bp, synthetic construct
  source 1..75: mol_type = other DNA
cgtcaccgacagcctgaaccggcgtgaggtgctgcatacagaaggcggggccgggctgaaacgggtggtgaaaaa

SEQ ID NO: 11345 - DNA, 75 bp, synthetic construct
  source 1..75: mol_type = other DNA
cccacagtcttaacattcaaaacaccgcaacgccacctgaacaatccccagttaaaagcaaacgattcactacct

SEQ ID NO: 11346 - DNA, 75 bp, synthetic construct
  source 1..75: mol_type = other DNA
tgtggcaaacaacgatccggttacagattcttttatggtggcaaaagcatttggaaagctgccgaagaacgtagt

SEQ ID NO: 11347 - DNA, 75 bp, synthetic construct
  source 1..75: mol_type = other DNA
atgaaaactgaactgaccctgaatgtcctgcagaccatgaacgcacaggaatatgaagatatccgggctgccgga

SEQ ID NO: 11348 - DNA, 75 bp, synthetic construct
  source 1..75: mol_type = other DNA
cggtggttattggtggtggtatagtaatatacaacaatcgcgaggctgttggggatgcgattgagaaaagtatgg

SEQ ID NO: 11349 - DNA, 75 bp, synthetic construct
  source 1..75: mol_type = other DNA
ggactggaagcggccagagccaaaggtcgtattggtggcagacgtccgaaactcaccgcgagtgagtgggagcag

SEQ ID NO: 11350 - DNA, 75 bp, synthetic construct
  source 1..75: mol_type = other DNA
aaaatcaacagtggtcaggtcgatccgctggctgcgcattacatatcccctgtagacgaggacagctatacgctg

SEQ ID NO: 11351 - DNA, 75 bp, synthetic construct
  source 1..75: mol_type = other DNA
gatagcccagggcagcagcaacgtctttatcaacaatcagcctgccgcgcgcaagggcgacaaactggagtgcag

SEQ ID NO: 11352 - DNA, 75 bp, synthetic construct
  source 1..75: mol_type = other DNA
gtaccacttcctttttgtgccactgacgctcggtatggcgttcctgctggccattatggaaacggtctacgtcct

SEQ ID NO: 11353 - DNA, 75 bp, synthetic construct
  source 1..75: mol_type = other DNA
tggtgtactggaaagcggcatcacagaggcaatgtatcaggaaatggaacggctgattgctgatgccaaacctgc

SEQ ID NO: 11354 - DNA, 75 bp, synthetic construct
  source 1..75: mol_type = other DNA
aaatactcattcgaaagtccctggcgacaattagcttttgacgaacaccgtcgtacaatagaagatcggcaggca

SEQ ID NO: 11355 - DNA, 75 bp, synthetic construct
  source 1..75: mol_type = other DNA
gtcgaaagcaccgcttgggtttgccttattcctggcaaaagttggtgttcaggatcctcagtttgcgattgaagg

SEQ ID NO: 11356 - DNA, 75 bp, synthetic construct
  source 1..75: mol_type = other DNA
agactggcagatgatgtaaggctattgcgccaggaggaacaggaaaggcggaaaaatatagaaaagttaattcag

SEQ ID NO: 11357 - DNA, 75 bp, synthetic construct
  source 1..75: mol_type = other DNA
ttttattgaacacaaatcccgtaacagcctgctttttcagccgacagattctgcggcagaagattttatgaaatc

SEQ ID NO: 11358 - DNA, 75 bp, synthetic construct
  source 1..75: mol_type = other DNA
tcatgtggaacccacgatcagggatgtgccggttttactcgatcttgcaccgtggtttgggcgtaaacatcgtga

SEQ ID NO: 11359 - DNA, 75 bp, synthetic construct
  source 1..75: mol_type = other DNA
cccgacagaaaatatcgtggtcgacctggcttatgaagcctcaggacgtggtgactggcgtacggatgcgtttat

SEQ ID NO: 11360 - DNA, 75 bp, synthetic construct
  source 1..75: mol_type = other DNA
agtacccgtaatccctgggtgtggaagataggagaagggaagtcaaacctgaatgtcaaacattctccggtttca

SEQ ID NO: 11361 - DNA, 75 bp, synthetic construct
  source 1..75: mol_type = other DNA
acggccagcgtgacggcttctgattctgttactgccacggtgccggtggtcatggtgaaagcatcaacccgcgtc

SEQ ID NO: 11362 - DNA, 75 bp, synthetic construct
  source 1..75: mol_type = other DNA
gccgggacaacggcatccgtctgtctgccgtgtggctgacgcacgacccggaatacccggagaatttacctgccg

SEQ ID NO: 11363 - DNA, 75 bp, synthetic construct
  source 1..75: mol_type = other DNA
tgacactgtctgagcgcgaggagatacgagctggtttgtcagccaaaatgagcattcgtgcgatagctactgcgc

SEQ ID NO: 11364 - DNA, 75 bp, synthetic construct
  source 1..75: mol_type = other DNA
gcgccagttccgtaacgtgacggcagagcagattgcgtatgttgcgcagctgcagcgttccggtgatgaggccgg

SEQ ID NO: 11365 - DNA, 75 bp, synthetic construct
  source 1..75: mol_type = other DNA
agtcgtttatcgcagtttgtggtgagcaactggacgaaaacggtcagaacctgattcgggtaatggctgaaaatg

SEQ ID NO: 11366 - DNA, 75 bp, synthetic construct
  source 1..75: mol_type = other DNA
agcaacggctggatgcgaaggttaatctggcgggcggcatcaatgaggatttttaccttgcacagcttgctgccc

SEQ ID NO: 11367 - DNA, 75 bp, synthetic construct
  source 1..75: mol_type = other DNA
cctgcgtatcaacgccacctgtccaggtcccgtgcgtgaagccaccggcaccgcccgcgtggataatgcaaccgg

SEQ ID NO: 11368 - DNA, 75 bp, synthetic construct
  source 1..75: mol_type = other DNA
gcgagtcttgccacgccgagcacctggtcgctttcagctgtaagcgtcgcggtttctgcccgagctgtggggcgc

SEQ ID NO: 11369 - DNA, 75 bp, synthetic construct
  source 1..75: mol_type = other DNA
caacgttggcctgctgccaggataacgggcatcgactcatctccggcgatgattgctgaagcgcgcagtgctttg

SEQ ID NO: 11370 - DNA, 75 bp, synthetic construct
  source 1..75: mol_type = other DNA
tcaacctgcgtggccgccctccagtccggacgccggtatatcggtatcgagctgcttgaacagtatcaccgtgcc

SEQ ID NO: 11371 - DNA, 75 bp, synthetic construct
  source 1..75: mol_type = other DNA
ggcactcgatctgatttttgctaatgcctcgctgcaatggctgcccgaccactacgaattgtttcctcatttggt

SEQ ID NO: 11372 - DNA, 75 bp, synthetic construct
  source 1..75: mol_type = other DNA
tttccgcagccatttgtctggccgtatccggtgcgcctgcatgggcatctgaacatcagtccacgctgagcgcgg

SEQ ID NO: 11373 - DNA, 75 bp, synthetic construct
  source 1..75: mol_type = other DNA
tgggaaacactgccgtttcaggttggcatcatgaactgtatgggcaacgatctgattcgcacggttaacctgatt

SEQ ID NO: 11374 - DNA, 75 bp, synthetic construct
  source 1..75: mol_type = other DNA
gccgccgcgctccatcacgttccatatctggacggcgtacagtccgttcaccacctgggtacagatagtctatga

SEQ ID NO: 11375 - DNA, 75 bp, synthetic construct
  source 1..75: mol_type = other DNA
gtaaaaacggagccgacgaagccacttacgtttatctgaacggcacgcgactgcttgtggaacttccgtaccaga

SEQ ID NO: 11376 - DNA, 75 bp, synthetic construct
  source 1..75: mol_type = other DNA
gcggggccgtctgtacgcgtgaatgaatggttcagcgcgtatgcgatggcgggtgtggcttacagccgtgtgtcg

SEQ ID NO: 11377 - DNA, 75 bp, synthetic construct
  source 1..75: mol_type = other DNA
tttacggatatcgccacgcagcttgccggtggtcagaatccctggctgatcctgctgcaacagggcggtcaggtg

SEQ ID NO: 11378 - DNA, 75 bp, synthetic construct
  source 1..75: mol_type = other DNA
atgcttacaagcgactttttaatggtgaaagccatgcttagcccatcccaatcccttcaataccagaaagaaagc

SEQ ID NO: 11379 - DNA, 75 bp, synthetic construct
  source 1..75: mol_type = other DNA
ttgattctgccattccgggacgttacactgttcaggcaccttataaagcgggtgccgggattggcgtcctggaat

SEQ ID NO: 11380 - DNA, 75 bp, synthetic construct
  source 1..75: mol_type = other DNA
cttgctcggttttgacccgataagccgccgtaaaaatccaccggaaacagaagaagaggacgagcttgaccgcct

SEQ ID NO: 11381 - DNA, 75 bp, synthetic construct
  source 1..75: mol_type = other DNA
gcagaacagcagccagattattgctgaacaggtgatccctgaaaacgagggtggttggtggatacgtgaagtggg

SEQ ID NO: 11382 - DNA, 75 bp, synthetic construct
  source 1..75: mol_type = other DNA
acagtggtgggccgattttctgaatgcaaacagagaaagatttatcagtccatttgaatatgcaaagattaataa

SEQ ID NO: 11383 - DNA, 75 bp, synthetic construct
  source 1..75: mol_type = other DNA
tgagcacatttgaacaactgcaccagaacaaagatgaagtgtttgaacggggagtgatcaacgtcttcaaagggc

SEQ ID NO: 11384 - DNA, 75 bp, synthetic construct
  source 1..75: mol_type = other DNA
ggcggtgaatactggcaacgtcagaagacgctgctgacagaaagggaagtcagttttatgaaaggactgttcaga

SEQ ID NO: 11385 - DNA, 75 bp, synthetic construct
  source 1..75: mol_type = other DNA
ccggaaatcagcgaagcaaatatcctgagcacgtttgaacaactgcaccagaacaaagatgaagtgtttgagcga

SEQ ID NO: 11386 - DNA, 75 bp, synthetic construct
  source 1..75: mol_type = other DNA
acttatcacgtggaaaaaatcacgccggacagtgtggtgctggaacagtctggcaccagaaaaaccctgcgacca

SEQ ID NO: 11387 - DNA, 75 bp, synthetic construct
  source 1..75: mol_type = other DNA
ggggcggtgatggtgggctcaccagcgcggaacgtcagcgtctgaaagagctggaacgtgaaaatcgtgaactgc

SEQ ID NO: 11388 - DNA, 75 bp, synthetic construct
  source 1..75: mol_type = other DNA
ccttttgatttgttaaaacaccttgcggtctggcaactgcaagtgtcaaacaagaaatcaaaagggggtcccaat

SEQ ID NO: 11389 - DNA, 75 bp, synthetic construct
  source 1..75: mol_type = other DNA
ggcaaaccaggtgatctgtattatacgacctttgacggaaattattatctgttgaaaagtaaccgatatggcagc

SEQ ID NO: 11390 - DNA, 75 bp, synthetic construct
  source 1..75: mol_type = other DNA
tgggcgttttcggtcgacaggtgggatgaaaagtggccggaagcgacaaaacgcgccgttatccgcgatgcctat

SEQ ID NO: 11391 - DNA, 75 bp, synthetic construct
  source 1..75: mol_type = other DNA
cggggtgggcgagagccgggacagggatgcagagtatgaagccctgtaccgtgacattctgcctgaacttgacct

SEQ ID NO: 11392 - DNA, 75 bp, synthetic construct
  source 1..75: mol_type = other DNA
tgcacgaaatgcgcgatgatgtcgcattccagattatcaatgatgaattatatcttgatggcaacgctcgtcaga

SEQ ID NO: 11393 - DNA, 75 bp, synthetic construct
  source 1..75: mol_type = other DNA
gcgtgatgaatatgccgccatgccggaaacggtctctgacgggatcacaaaggtggaaaacgcctttatggcctg

SEQ ID NO: 11394 - DNA, 75 bp, synthetic construct
  source 1..75: mol_type = other DNA
ggtgtggataaaaaacatgagctggatggacttgaccttttcactggtctgactatgacgtataccgacagtcat

SEQ ID NO: 11395 - DNA, 75 bp, synthetic construct
  source 1..75: mol_type = other DNA
gagcgtcgtgtgaaggagcgcatgattctgtcacgtaaccgcaattacagccggctggccacagcttccccctga

SEQ ID NO: 11396 - DNA, 75 bp, synthetic construct
  source 1..75: mol_type = other DNA
gcgcaacctacattctgccggaccccggtgaactgaataaacgcgtcctgatccgccagcgggtggatatgcccg

SEQ ID NO: 11397 - DNA, 75 bp, synthetic construct
  source 1..75: mol_type = other DNA
gtaggttcattatatatttataataatccctatactcataccgtcgattattttatcctgaaaacaagtagttat

SEQ ID NO: 11398 - DNA, 75 bp, synthetic construct
  source 1..75: mol_type = other DNA
ggcgtacgcttatgggtgcctttccgcagcttggaacgcggatggagaagaggagcaacgcgatctagctatcgc

SEQ ID NO: 11399 - DNA, 75 bp, synthetic construct
  source 1..75: mol_type = other DNA
atgcaatatgcgaaacctgtcactctgaacgttgaagagtgcgaccgtctctcctttctaccgtatctgtttggc

SEQ ID NO: 11400 - DNA, 75 bp, synthetic construct
  source 1..75: mol_type = other DNA
ggccgcagctcccgctggctgaaaagtgaagtggaagcctggctacaggcgcgtattgcacagtcccgtccgtaa

SEQ ID NO: 11401 - DNA, 75 bp, synthetic construct
  source 1..75: mol_type = other DNA
gccagtacttcacagcaaatcgggtctctgctcgccgaagatatgaacagcgagcaagcggcaaatatggcgcgt

SEQ ID NO: 11402 - DNA, 75 bp, synthetic construct
  source 1..75: mol_type = other DNA
atgtggaagccgttaagagatgagaaccgtttatcaattttgaagatctatggatacacctgtgacagactggta

SEQ ID NO: 11403 - DNA, 75 bp, synthetic construct
  source 1..75: mol_type = other DNA
ctgctggggcgaggatgaggataagccggaggtggatccgtttgcggcgctggaagacgcgctgagcttcgcagc

SEQ ID NO: 11404 - DNA, 75 bp, synthetic construct
  source 1..75: mol_type = other DNA
tacattaacggcagtcatgcgggctttatcatgtacatgaccgatgccgcgcaaaaccaggaggatgtgaacaac

SEQ ID NO: 11405 - DNA, 75 bp, synthetic construct
  source 1..75: mol_type = other DNA
ttcataaactacgaaagaaagtagacggtatggcaactgattctgaatcagaaaaagaagccataaagaaagaaa

SEQ ID NO: 11406 - DNA, 75 bp, synthetic construct
  source 1..75: mol_type = other DNA
caatcaatggctgttcccgctgcacccgtggcagggagaatatcttttgcagcaagtgtggtgccaggcactttt

SEQ ID NO: 11407 - DNA, 75 bp, synthetic construct
  source 1..75: mol_type = other DNA
cgtactgctgtgcaatgagatgccggaacttgccccggtgattaccgacaccggacgcaaaacctgggtgaagtc

SEQ ID NO: 11408 - DNA, 75 bp, synthetic construct
  source 1..75: mol_type = other DNA
caaacatttcgcaccattctgaccgtatccagcactgccaccgtggcgcttaccgtggataacaccatggttatg

SEQ ID NO: 11409 - DNA, 75 bp, synthetic construct
  source 1..75: mol_type = other DNA
gtggtgagtggttgcggaataacctgaacgccattgcggcatttatgagtacgcggacctgggattccatcgaaa

SEQ ID NO: 11410 - DNA, 75 bp, synthetic construct
  source 1..75: mol_type = other DNA
aaaaattcaacaggaaagatatgaaaacggcgagatcaaactcaacacgctgaaacagaaagcggcccctctcag

SEQ ID NO: 11411 - DNA, 75 bp, synthetic construct
  source 1..75: mol_type = other DNA
atgcaacaactttcctttctgcccggagagatgacaaccagagagcgcagtctcattctgcgggccctgaaaacc

SEQ ID NO: 11412 - DNA, 75 bp, synthetic construct
  source 1..75: mol_type = other DNA
gcagcggcatcagcagcaggggggagagatccacgcgctgttgcttgaggagccggagaatcatctcagccatgt

SEQ ID NO: 11413 - DNA, 75 bp, synthetic construct
  source 1..75: mol_type = other DNA
gcgtgatgtagaaagaactatcgctgcttgtcctgaagagtttgatacaaaactcaattttgaggtttgctataa

SEQ ID NO: 11414 - DNA, 75 bp, synthetic construct
  source 1..75: mol_type = other DNA
tgcggtggcctttatgtgggtacagcgccataacgtgatggatttgctgggctgggcggcggtgtttgtacttat

SEQ ID NO: 11415 - DNA, 75 bp, synthetic construct
  source 1..75: mol_type = other DNA
gagatgcggcagttgcagtagaaacagaacctatgcatcaaaattttgtggcgtttcgtatggcgttcacgccat

SEQ ID NO: 11416 - DNA, 75 bp, synthetic construct
  source 1..75: mol_type = other DNA
agttacgaccagtacacgacgaatatgacccgcagccatgaatatgctgaaatggcatcccgtactgaaagcatg

SEQ ID NO: 11417 - DNA, 75 bp, synthetic construct
  source 1..75: mol_type = other DNA
tgaagcaaactatcgctgaatacgaagccaatcgtgatgaattaccgtttggactggataccaacagtgccattg

SEQ ID NO: 11418 - DNA, 75 bp, synthetic construct
  source 1..75: mol_type = other DNA
gctggacagaaagcgtcaaacgccaggtagtgaaggatgctttttatattcatcagcacaaaggaaccaccagtg

SEQ ID NO: 11419 - DNA, 75 bp, synthetic construct
  source 1..75: mol_type = other DNA
gaaggaaaatacaggtgcgttggtgaagatggaatgccatcatgggcagatattccaccaccaacacatgaggaa

SEQ ID NO: 11420 - DNA, 75 bp, synthetic construct
  source 1..75: mol_type = other DNA
atgagcggtaagcgttatcccgaagagtttaaaattgaagcagtcaaacaggttgttgatcgcggttattctgtt

SEQ ID NO: 11421 - DNA, 75 bp, synthetic construct
  source 1..75: mol_type = other DNA
taaccgcgatgagtttgttgtagtgcgtaagatgaagaacattgactggttagatggcgaaggcaatgaccaggt

SEQ ID NO: 11422 - DNA, 75 bp, synthetic construct
  source 1..75: mol_type = other DNA
cagcgcggtatggagtcccggctgaagcaggctcgtctgccgtgggtcaaaacgctggagcagttcgactttacc

SEQ ID NO: 11423 - DNA, 75 bp, synthetic construct
  source 1..75: mol_type = other DNA
gaaagctgctattaccttcttcagagagcccccagctacttcctgtgactctcgatgcagctgccgaacagccag

SEQ ID NO: 11424 - DNA, 75 bp, synthetic construct
  source 1..75: mol_type = other DNA
atgctgaacgatgtttcgcgtcaggtgctatggcatggtcaacggctggcgccggaagactggaaagacctgttc

SEQ ID NO: 11425 - DNA, 75 bp, synthetic construct
  source 1..75: mol_type = other DNA
ggtgctgaatgccgaagcaacggcttatgccaccgcccgtgcgctcggtctgcgcgccaaaattgatgagcagac

SEQ ID NO: 11426 - DNA, 75 bp, synthetic construct
  source 1..75: mol_type = other DNA
gtgcccggactattgctgacaccggcgaattacatctgtggggagataaaacagaacgctggaatgtgtccctgc

SEQ ID NO: 11427 - DNA, 75 bp, synthetic construct
  source 1..75: mol_type = other DNA
gggatcgttgagagattattctgggattttgacgggaaaactattgcgttgccgcaggtgcgtaaaaattaccct

SEQ ID NO: 11428 - DNA, 75 bp, synthetic construct
  source 1..75: mol_type = other DNA
ggcagcgttatgataaccgggatgggcaactggggagtctgacggggggatatgaccggaccctgcgctatgagc

SEQ ID NO: 11429 - DNA, 75 bp, synthetic construct
  source 1..75: mol_type = other DNA
cgcacgttgcctgtaggaaccgcttatgcggtctggaccggtattggcgctgttggggcggccattacagggatt

SEQ ID NO: 11430 - DNA, 75 bp, synthetic construct
  source 1..75: mol_type = other DNA
cgcacggtatttctgcagatcaaaaacacgtctgataaagacatgagtgggctgcagggcaaaattgctgatgct

SEQ ID NO: 11431 - DNA, 75 bp, synthetic construct
  source 1..75: mol_type = other DNA
taaaggtgataaaacctggcttattaatggcgaagccaaaccaggattgcgaacggatgccgtatttgaacttga

SEQ ID NO: 11432 - DNA, 75 bp, synthetic construct
  source 1..75: mol_type = other DNA
aagaaaaaatgactaaaatgccaaacggtgctgtggatgcgttaaaggaagaattaacccgacgcatcagtaagc

SEQ ID NO: 11433 - DNA, 75 bp, synthetic construct
  source 1..75: mol_type = other DNA
cgatgccaagaccaacgtccagaagttgaccaaggcgaccgaggacgcgggctatccgtccagcctcaaacgctg

SEQ ID NO: 11434 - DNA, 75 bp, synthetic construct
  source 1..75: mol_type = other DNA
aggaacaacaaaattctttcaagtggctggcggcattactggaagaaaaatatgctggtaaaattaccatttcgg

SEQ ID NO: 11435 - DNA, 75 bp, synthetic construct
  source 1..75: mol_type = other DNA
agtcctggaatctggttatggatgcaatcactaatccgccagcaccaaatgaccggctgaaacgcgccactaacc

SEQ ID NO: 11436 - DNA, 75 bp, synthetic construct
  source 1..75: mol_type = other DNA
gtctggctctgattctcagaactgtaagaatgttaaacaagcattgtttattcagtctcagaaggatgctccagt

SEQ ID NO: 11437 - DNA, 75 bp, synthetic construct
  source 1..75: mol_type = other DNA
atgcgtacacgaattgactatcttgcggataaatacagttttactgaactgaatgaacttccacgccttcaccag

SEQ ID NO: 11438 - DNA, 75 bp, synthetic construct
  source 1..75: mol_type = other DNA
gatcacagacgggggacgcaactggttgtcgtttaactggcccagctatcgttctcgtatcagaggtgtggctgc

SEQ ID NO: 11439 - DNA, 75 bp, synthetic construct
  source 1..75: mol_type = other DNA
atgagcagagtaaccgcgattatctccgctctggttatttgtatcatcgcctgcctgtcatgggctgttaatcat

SEQ ID NO: 11440 - DNA, 75 bp, synthetic construct
  source 1..75: mol_type = other DNA
ccggcaactgactgaaatctcagtactgacaaaaagcattggtggtaaaagcgcccgggactgggcgatgaaaca

SEQ ID NO: 11441 - DNA, 75 bp, synthetic construct
  source 1..75: mol_type = other DNA
atggcatttaaacactatgatgttgtcagggcggcgtcgccgtcagatcttgcggaaaagctgacacataaactg

SEQ ID NO: 11442 - DNA, 75 bp, synthetic construct
  source 1..75: mol_type = other DNA
gcgagttcctgttgcgctataaacttgtctggagtgaaacatggaaaatccggaagcaattagatactccggtac

SEQ ID NO: 11443 - DNA, 75 bp, synthetic construct
  source 1..75: mol_type = other DNA
ctctccttgaggtattacttgtcatcggcataatggtgatggttatccctaaagtttatgaaaacattgaaaacc

SEQ ID NO: 11444 - DNA, 75 bp, synthetic construct
  source 1..75: mol_type = other DNA
cagcggcaaaagtcagcctgcagaggtacatcgccagtcagacgcggctcggtcgggatattcgccgtagtgcta

SEQ ID NO: 11445 - DNA, 75 bp, synthetic construct
  source 1..75: mol_type = other DNA
atgcttattggctatgtccgcgtatcaacaaatgaccagaatacagaattgcagcgtaacgcgctggagtgcgca

SEQ ID NO: 11446 - DNA, 75 bp, synthetic construct
  source 1..75: mol_type = other DNA
aagtggtcacaacgggtaaagatattctggttaccctgccggcttaccggttcaccagtacgccagaaaccgata

SEQ ID NO: 11447 - DNA, 75 bp, synthetic construct
  source 1..75: mol_type = other DNA
tgttgaataatgtccttaatgcccgtgccccagacgtgccccaaagtgaccaggaggatgaaataaaattatatt

SEQ ID NO: 11448 - DNA, 75 bp, synthetic construct
  source 1..75: mol_type = other DNA
ttgccaaaaagagaaggtgctctgatggcactattaggaaggagttgcaaaccgcaatcggttttatagaggggg

SEQ ID NO: 11449 - DNA, 75 bp, synthetic construct
  source 1..75: mol_type = other DNA
cagaagcatgaaacaccttatcactcttattgaggaactgcggggaaaaggggttaatttccgtagtcttacaga

SEQ ID NO: 11450 - DNA, 75 bp, synthetic construct
  source 1..75: mol_type = other DNA
tccacaatatccaatcatagaaatggacaatgattgcgaaatagtaggtgttgtggttgatgccaggtgggatat

SEQ ID NO: 11451 - DNA, 75 bp, synthetic construct
  source 1..75: mol_type = other DNA
ctgatgttgccgctggtcgtaagcgcctgcggatcaacgccacctgctccggtaccgtgcgtgaagccaccggca

SEQ ID NO: 11452 - DNA, 75 bp, synthetic construct
  source 1..75: mol_type = other DNA
tgtgaggggcgttttgtaaacccgatcacggatatctgctggagctgtattttcccgctctcgctgggcagtatc

SEQ ID NO: 11453 - DNA, 75 bp, synthetic construct
  source 1..75: mol_type = other DNA
gtgaaaacagggctgtctgctttgaatatccatccccgatcatccccaaaagccgctggcgatatcacatggtca

SEQ ID NO: 11454 - DNA, 75 bp, synthetic construct
  source 1..75: mol_type = other DNA
aaagcagccgaggagatcgggcaactcgtcaccgtcgcgcgtgaagaactccagcgacgcaaggtcaaagagcat

SEQ ID NO: 11455 - DNA, 75 bp, synthetic construct
  source 1..75: mol_type = other DNA
ttatcggatattctactgttgactatttgtgccgttatttctggtgcagaaggttgggaagatatagaggatttt

SEQ ID NO: 11456 - DNA, 75 bp, synthetic construct
  source 1..75: mol_type = other DNA
gactgccggcggggatggcggcctgaaaaatgacggcaccacggaatgggcgaccggtgaaaccggaaaaaccat

SEQ ID NO: 11457 - DNA, 75 bp, synthetic construct
  source 1..75: mol_type = other DNA
gcagaaaatatccttcagcggcagttcaaagcggaagctccctgtgagaaatgggtgacagatatcaccgaattc

SEQ ID NO: 11458 - DNA, 75 bp, synthetic construct
  source 1..75: mol_type = other DNA
cgtaatgtccgctatgcccggctggccggagattttgcggccagcgtgaaagccggagaagagagcgtggcacag

SEQ ID NO: 11459 - DNA, 75 bp, synthetic construct
  source 1..75: mol_type = other DNA
acggtaaaaccttccgcatgaacgctgctcaggtactgcatgacaaatatatgatctggtgcagtgagcagttat

SEQ ID NO: 11460 - DNA, 75 bp, synthetic construct
  source 1..75: mol_type = other DNA
ctaaagctactgagattatgagtattgctcttggcgacaccgccaatgcgtcaaaagcgtattcaatggcgctgg

SEQ ID NO: 11461 - DNA, 75 bp, synthetic construct
  source 1..75: mol_type = other DNA
ggttctgataatcaaaagcaggaaagcgatgttaataaacgggtaatttctgtttgcgtgaatggccatgttctt

SEQ ID NO: 11462 - DNA, 75 bp, synthetic construct
  source 1..75: mol_type = other DNA
tgaagcgcatgttaaataaggggctggaaagccttgcagaaggagaaaaaccgctgctccacagtgatcaagggt

SEQ ID NO: 11463 - DNA, 75 bp, synthetic construct
  source 1..75: mol_type = other DNA
gatgcgcgatgcgcagttgtggcgtcacatcgaatttcaccccgaatgcaacgcgatttacgcggctctggactg

SEQ ID NO: 11464 - DNA, 75 bp, synthetic construct
  source 1..75: mol_type = other DNA
caacaaataaccagaatacggaattacagcgtaatgcgctggagtgtgcaggatgtgagctgatttttgaagaca

SEQ ID NO: 11465 - DNA, 75 bp, synthetic construct
  source 1..75: mol_type = other DNA
aaggtacgtctgtacgggcgcatcggtcaggcgctgatcgacgccaagcaatcaggccgcgatgcgtttgccgcc

SEQ ID NO: 11466 - DNA, 75 bp, synthetic construct
  source 1..75: mol_type = other DNA
ccgctgctccacagtgatcaaggatggcattaccggataaaaagttatcagtccgccctggcggacagagggtta

SEQ ID NO: 11467 - DNA, 75 bp, synthetic construct
  source 1..75: mol_type = other DNA
gtccggcactcaccggaacgccaaccgcacctactgcggcacagtcggtcaacaatacacagattgccaccacgg

SEQ ID NO: 11468 - DNA, 75 bp, synthetic construct
  source 1..75: mol_type = other DNA
ctggcagttaccgttatggttgagttcaccggcaaaccgggcctccggtgaaatggtttttgatgcagagcgtga

SEQ ID NO: 11469 - DNA, 75 bp, synthetic construct
  source 1..75: mol_type = other DNA
acagtgccatccgttcgggcgcagtgtgatgcgctgggagacgggaaaaaatccgcccaacacaaagaaaaactt

SEQ ID NO: 11470 - DNA, 75 bp, synthetic construct
  source 1..75: mol_type = other DNA
catctgtttgttcagggaaaaagaaccggtgacaaggaatacgcagaagtgcttgttgccataaccgaacttaca

SEQ ID NO: 11471 - DNA, 75 bp, synthetic construct
  source 1..75: mol_type = other DNA
atgaacgaaacgctgaatgcactgatttgtcgccacgcccgtaacctgctgctggcgcagggctggccggaagag

SEQ ID NO: 11472 - DNA, 75 bp, synthetic construct
  source 1..75: mol_type = other DNA
tttcaaaggcgagatagggaaaacccatctggctcaggagctgtggacgcagattgataacggtcagcttgcgcc

SEQ ID NO: 11473 - DNA, 75 bp, synthetic construct
  source 1..75: mol_type = other DNA
gctggcgcagggctggccggaagagacggatgttgaccagcgtaacccgaagtatccgggctggatcagcattta

SEQ ID NO: 11474 - DNA, 75 bp, synthetic construct
  source 1..75: mol_type = other DNA
atcagcgatgatcataactttgaccgtcaaatcattattccgcccattatctttaacggaatagcgtatagcgat

SEQ ID NO: 11475 - DNA, 75 bp, synthetic construct
  source 1..75: mol_type = other DNA
aggaggctcccgtgtccggtgagggtacggtggtcatcccgcaaccggcaggcgacgagccggtgattaaaaaca

SEQ ID NO: 11476 - DNA, 75 bp, synthetic construct
  source 1..75: mol_type = other DNA
atgacacagggctggcgggaggataaatgcccgtctgtccgcgccgggaaaagaccgcgcgccggtggcgctgaa

SEQ ID NO: 11477 - DNA, 75 bp, synthetic construct
  source 1..75: mol_type = other DNA
atggcagtaaagatttcaggtgtactgaaagacggcacaggaaaaccggtagagaactgtaccattcaactgaaa

SEQ ID NO: 11478 - DNA, 75 bp, synthetic construct
  source 1..75: mol_type = other DNA
atgaacgatgtgttcctgaagcggctgtttgcggtgagtatcacctcgtccggcaatcccccgacgttttccctg

SEQ ID NO: 11479 - DNA, 75 bp, synthetic construct
  source 1..75: mol_type = other DNA
ggaacatgccgcatgaatcctgtcgaactggtcagaaaacccaaaatcagtagcgggcgcgatcgtcgcctgact

SEQ ID NO: 11480 - DNA, 75 bp, synthetic construct
  source 1..75: mol_type = other DNA
aatggtgctgtgatccatatcgtgccgcgtctggcgggagccaaaagtggcggtgtgtttcaggctgtgctgggg

SEQ ID NO: 11481 - DNA, 75 bp, synthetic construct
  source 1..75: mol_type = other DNA
ggggatggtatatatgtatttggttttgatgataaaatttacgtcaaacgactgcaaatgatacctgataaactg

SEQ ID NO: 11482 - DNA, 75 bp, synthetic construct
  source 1..75: mol_type = other DNA
gcgcgaacatccatcaatcaaactttgttctttgacgcacatatgtgatgagttagccgcccagcttcgcaaagg

SEQ ID NO: 11483 - DNA, 75 bp, synthetic construct
  source 1..75: mol_type = other DNA
atactcaataataaagagctccccgtcaccatttacaacgtgaccccatttaataaaaacgtctggaatttaatt

SEQ ID NO: 11484 - DNA, 75 bp, synthetic construct
  source 1..75: mol_type = other DNA
gccctggtgcgcacagcgccatctgacctgcccgagtgtttccaccatcggcagaatgatcgccaccgcacacga

SEQ ID NO: 11485 - DNA, 75 bp, synthetic construct
  source 1..75: mol_type = other DNA
tggactgtcgaagagtgcagggccatcaaggcggagtatcaacagaaacttaaaaaactgcgaaacagcagaagt

SEQ ID NO: 11486 - DNA, 75 bp, synthetic construct
  source 1..75: mol_type = other DNA
ttgcaactgatcgaaatgccaatgttatgtcgcaggaggaatgggaagcgttgcctgcgcttatatccggattta

SEQ ID NO: 11487 - DNA, 75 bp, synthetic construct
  source 1..75: mol_type = other DNA
cagaaatgatcgttggcagagaggagtgttattttgatctaactgatcagcgtttctgcatcatttccgggcagg

SEQ ID NO: 11488 - DNA, 75 bp, synthetic construct
  source 1..75: mol_type = other DNA
cccctcagtcgtgaagcgttttctccagaaatgatcgttggcagagaggagtgttattttgatctaactgatcag

SEQ ID NO: 11489 - DNA, 75 bp, synthetic construct
  source 1..75: mol_type = other DNA
tatgaactggcgtttgataatgccagtaaaaaggtgtttgcagcagtcaccgatcgtgtaaatcgtgaagccaat

SEQ ID NO: 11490 - DNA, 75 bp, synthetic construct
  source 1..75: mol_type = other DNA
ggcgtcggtgttcttccggctgatacgtacggcctgccgtcagcgttttgaggggcgggaaccatgtcaaagctg

SEQ ID NO: 11491 - DNA, 75 bp, synthetic construct
  source 1..75: mol_type = other DNA
accataagaaatgggcgacggaaaatgcatttgttctacaataccatatgacgcccgatattacgccatacatag

SEQ ID NO: 11492 - DNA, 75 bp, synthetic construct
  source 1..75: mol_type = other DNA
acagtctttgagcctgtaaacagttttcagaaaaaccagaagacgctggcgagacttcagcgacagttaagccgc

SEQ ID NO: 11493 - DNA, 75 bp, synthetic construct
  source 1..75: mol_type = other DNA
caatatgcgctttggtctggagtttgagaagtcagcctttggtaaatataacgtggataatgcggtaaacgcgaa

SEQ ID NO: 11494 - DNA, 75 bp, synthetic construct
  source 1..75: mol_type = other DNA
acagtaaatcgtggctgaccagtttgcaaaacgattacagccttcctgactcactgacggagcgcatctggctga

SEQ ID NO: 11495 - DNA, 75 bp, synthetic construct
  source 1..75: mol_type = other DNA
actcatcagaaggtatcccgtggcatgagctgccagcttcacacaggggaaacaatcagatgagtttgcctttac

SEQ ID NO: 11496 - DNA, 75 bp, synthetic construct
  source 1..75: mol_type = other DNA
gaatggtcatcataagctcacatccaccagcagagcggggattcatctgatgatcgaccttgaaaccatgggaaa

SEQ ID NO: 11497 - DNA, 75 bp, synthetic construct
  source 1..75: mol_type = other DNA
gattaccggggagatgaatgcgggtataacggtcctgcggtggcggatgagttcgacaaccccaccacggatatc

SEQ ID NO: 11498 - DNA, 75 bp, synthetic construct
  source 1..75: mol_type = other DNA
gctgggatttacgcttctggtcggagactcgctgtgtgagtttacggtgaaggaacgtaatattgagtttaaggc

SEQ ID NO: 11499 - DNA, 75 bp, synthetic construct
  source 1..75: mol_type = other DNA
acgaaggataagtgcagcaaatgcctgagtggttgcaagttccgcaataacgtcggcaattttggcggctacctt

SEQ ID NO: 11500 - DNA, 75 bp, synthetic construct
  source 1..75: mol_type = other DNA
accaacaccattccgttccaggcgcgttattatgcaattggtgccgcaaccccaggtgctgctaatgcggatgcg

SEQ ID NO: 11501 - DNA, 75 bp, synthetic construct
  source 1..75: mol_type = other DNA
atgaataccagaactctttttcccctgctttttactgttgcatcattctccgcctccgccggtaactgggccgtc

SEQ ID NO: 11502 - DNA, 75 bp, synthetic construct
  source 1..75: mol_type = other DNA
cgcgaaaaagtcgaacacgattttaaccagcaggtgattaatcgagaactcgccagcttgctgcaggctttatag

SEQ ID NO: 11503 - DNA, 75 bp, synthetic construct
  source 1..75: mol_type = other DNA
agcgcgatgaaaatcgtctacgaaggcggtccggacgcggcattcgagcgaggcctggctctcatcatcggcggt

SEQ ID NO: 11504 - DNA, 75 bp, synthetic construct
  source 1..75: mol_type = other DNA
accccattcaggggacgggatttgaactgaacggcaagggcagtgctgcccgtccgacactgacggtttctaacc

SEQ ID NO: 11505 - DNA, 75 bp, synthetic construct
  source 1..75: mol_type = other DNA
tcagagccggaaaagggcatgggagactggcgtttttatctctgcgagccgggggtgattaccgtggccgattta

SEQ ID NO: 11506 - DNA, 75 bp, synthetic construct
  source 1..75: mol_type = other DNA
cgggtcaatcagaaaacaacttcaagcagcaataggagtgattgaaggtattttgttgattattaagcccctgta

SEQ ID NO: 11507 - DNA, 75 bp, synthetic construct
  source 1..75: mol_type = other DNA
ggctgacacacctgcagaacggtgtactgctggatgagcaaaactgcctgatgctgcatgaactctggctgcaga

SEQ ID NO: 11508 - DNA, 75 bp, synthetic construct
  source 1..75: mol_type = other DNA
cgttcagggatgctgtcattaatggatgcacaggcacgtgatacatggtaccgatcactggagtacgataatttt

SEQ ID NO: 11509 - DNA, 75 bp, synthetic construct
  source 1..75: mol_type = other DNA
aacagcgcatcagcttctggccgcagcattttggcctcattccacagtgggtgaccctggagccccgtgtcttcg

SEQ ID NO: 11510 - DNA, 75 bp, synthetic construct
  source 1..75: mol_type = other DNA
ctgccgttttctccgcaacaacggctttaaggtggtgttcagtgaccgttttcacgcatggacgtcctgcggtga

SEQ ID NO: 11511 - DNA, 75 bp, synthetic construct
  source 1..75: mol_type = other DNA
aggcggatgcatacgccgggttcaacgagctgtaccgggatggccggataacggaagccgcctgttgggctcacg

SEQ ID NO: 11512 - DNA, 75 bp, synthetic construct
  source 1..75: mol_type = other DNA
aacttcggcagctgctccgaaaaagtctcccgtcgtatcgcacagatggaagctgacctgaaggcacttcagaaa

SEQ ID NO: 11513 - DNA, 75 bp, synthetic construct
  source 1..75: mol_type = other DNA
cgaaaaaatccagactgggcgaagcgttcagctatgtactgaatcagtgggacgccctctgttattacagtgatg

SEQ ID NO: 11514 - DNA, 75 bp, synthetic construct
  source 1..75: mol_type = other DNA
gctggattacctggacgcactggaactggtcgatacttccggtgcgccagatattgaatggcctacgcctccggc

SEQ ID NO: 11515 - DNA, 75 bp, synthetic construct
  source 1..75: mol_type = other DNA
gtgctggcaacaccgacggagacggacggagcgctgtttcccggtcgcatcatgctggcgaacacctgtatgtgg

SEQ ID NO: 11516 - DNA, 75 bp, synthetic construct
  source 1..75: mol_type = other DNA
gtatgcaaaaaggctgacctgcgaagccgacaccctcggcagttgtggctacgtttatatggctgtttatccgac

SEQ ID NO: 11517 - DNA, 75 bp, synthetic construct
  source 1..75: mol_type = other DNA
atggcagtaaagatttcaggtgtgctgaaagacggcacaggaaaaccaatacagaactgcaccattcaactgaaa

SEQ ID NO: 11518 - DNA, 75 bp, synthetic construct
  source 1..75: mol_type = other DNA
tggatgccatgaccggctaccgtaatgaaccggatccctttaaagccagtgaggcggcgtatctactttgcccgc

SEQ ID NO: 11519 - DNA, 75 bp, synthetic construct
  source 1..75: mol_type = other DNA
atttggcatcaactggtactacaagcgcaaagagcgcgaggacagattgaatggcaatgtcaccggcactacgaa

SEQ ID NO: 11520 - DNA, 75 bp, synthetic construct
  source 1..75: mol_type = other DNA
gcttcaggcagcggcattttctcaactgtcagattctgacccgtcaaaatctgacgcatcaaaatctgacccgtc

SEQ ID NO: 11521 - DNA, 75 bp, synthetic construct
  source 1..75: mol_type = other DNA
ggattttttaactcgccatcctgatgcggttgtattcagccctaaaaagcgccagtggggaacgcaggatgattt

SEQ ID NO: 11522 - DNA, 75 bp, synthetic construct
  source 1..75: mol_type = other DNA
cgattgttaagaagtcgtcagccaataatgcccaagttactgagggtgctttttctgcagtcgcaacctttaatt

SEQ ID NO: 11523 - DNA, 75 bp, synthetic construct
  source 1..75: mol_type = other DNA
ccaccgaatcgctggtctggccggattcggtggatgcggtgaaaaaagccaacgcgtttgtgggaagtgccatca

SEQ ID NO: 11524 - DNA, 75 bp, synthetic construct
  source 1..75: mol_type = other DNA
ccggctcaggaactgtgaatttaacagtcagggtgggaaccttttctctgattcccggataagggtgactttcga

SEQ ID NO: 11525 - DNA, 75 bp, synthetic construct
  source 1..75: mol_type = other DNA
cggcccgctgccgttcattctctcccgcacctacagcagctaccggacgaagacgcctgcaccggtgggcgtttt

SEQ ID NO: 11526 - DNA, 75 bp, synthetic construct
  source 1..75: mol_type = other DNA
acttgcgtaccgatgagggctggttgtatctcgcagtagtcatcgacctgtggtcacgcgccgtcattggctggt

SEQ ID NO: 11527 - DNA, 75 bp, synthetic construct
  source 1..75: mol_type = other DNA
gatgccaccaattcgttaattggtaatgatgattacaactgtctgattgaaggaaataaaaataacaaacgaacg

SEQ ID NO: 11528 - DNA, 75 bp, synthetic construct
  source 1..75: mol_type = other DNA
tatcgaagaatggagttatcgggaatggccctgatattccatggagtgccaaaggtgaacagctcctgtttaaag

SEQ ID NO: 11529 - DNA, 75 bp, synthetic construct
  source 1..75: mol_type = other DNA
taggtttttgtttagttggttgtgcaggtatgaaattacctgagtattcgcaagttaaagcaagtccgtattata

SEQ ID NO: 11530 - DNA, 75 bp, synthetic construct
  source 1..75: mol_type = other DNA
acgatttcaccatcttcaaattcggcgacagtgaaatccgcgtcatcaacaagtgcggtgagccgtggtttgtag

SEQ ID NO: 11531 - DNA, 75 bp, synthetic construct
  source 1..75: mol_type = other DNA
acgaaatggttgagcagtacggtcgggttaaacgttttcttccggcggtgttgcgggacctgcatttccgtgcgg

SEQ ID NO: 11532 - DNA, 75 bp, synthetic construct
  source 1..75: mol_type = other DNA
agatgcccagacaggatttacacatgagtttgcgcatgtcagtgaatctggtgctcgagcgcaagatttgcacat

SEQ ID NO: 11533 - DNA, 75 bp, synthetic construct
  source 1..75: mol_type = other DNA
atgcgtgattttcagaatgcctttgatgctgccctcgccggggtggacagtacgatcgttgaagtgatggggatc

SEQ ID NO: 11534 - DNA, 75 bp, synthetic construct
  source 1..75: mol_type = other DNA
gatcgcaaatgaaaaatatccgcttcccccatgatgtaatcgaggaaatggaaaattcgaaaacggaaggggaaa

SEQ ID NO: 11535 - DNA, 75 bp, synthetic construct
  source 1..75: mol_type = other DNA
tgcgaagcagacaccctcggcagttgtggttacgtttatctggctgtttatccaacatccgaaacgaaaaagtaa

SEQ ID NO: 11536 - DNA, 75 bp, synthetic construct
  source 1..75: mol_type = other DNA
tgtatctctgacattctcaggggttcaagctggtaccgatatgttgcaaacagttggtacgactaatacagcaat

SEQ ID NO: 11537 - DNA, 75 bp, synthetic construct
  source 1..75: mol_type = other DNA
cttctggcccgaatggaaccatcaaccattgtgccaggcgtgtcataaccagaaaacgaaatggcttgatccggc

SEQ ID NO: 11538 - DNA, 75 bp, synthetic construct
  source 1..75: mol_type = other DNA
ttatcctctggtctgtggtaatcaacctcactattggatttggcatttatgacaaattagcaccagtcatttcac

SEQ ID NO: 11539 - DNA, 75 bp, synthetic construct
  source 1..75: mol_type = other DNA
tcacgctcctgttatcggtggagcatctgcaacataccgcaatggagcaacagaaagctgttgctgattctctgg

SEQ ID NO: 11540 - DNA, 75 bp, synthetic construct
  source 1..75: mol_type = other DNA
tattggctgctgaggtgagtcgccgtggtttggtaaaaacgacagcgatcggcggcctggcaatggccagcagcg

SEQ ID NO: 11541 - DNA, 75 bp, synthetic construct
  source 1..75: mol_type = other DNA
gaagctcgctgaatatcatggcagtcctgttacccgcatggcgacaaatctgctgcttctgacaggcctcagaac

SEQ ID NO: 11542 - DNA, 75 bp, synthetic construct
  source 1..75: mol_type = other DNA
ttcctcgccagaaggtagcgatcatctatgatgttggtgtatcgacactgtataagatgtttccggtcggagata

SEQ ID NO: 11543 - DNA, 75 bp, synthetic construct
  source 1..75: mol_type = other DNA
ccgcgactggttgaacctttcgcgggttcttgtgctgtgatgatggagacggattaccccagctatctggttgcg

SEQ ID NO: 11544 - DNA, 75 bp, synthetic construct
  source 1..75: mol_type = other DNA
atggaaatgaaaaattctggctttattgccagcggccccgctcggcctgaatttatgaacggcgatatttaccgc

SEQ ID NO: 11545 - DNA, 75 bp, synthetic construct
  source 1..75: mol_type = other DNA
ataaaacggattcagcagcactgctgccctgcattgaacaggccagggaagatatccgtaccctgcgccaacagc

SEQ ID NO: 11546 - DNA, 75 bp, synthetic construct
  source 1..75: mol_type = other DNA
tacggtcgcgtcaatcgagaaggctataccgtagtggcgctctccctgtactggaaaaatgcctggtgcaaagtg

SEQ ID NO: 11547 - DNA, 75 bp, synthetic construct
  source 1..75: mol_type = other DNA
ttcacccgcctgaaaaacagtctcgaccacaccgaaagtctgacccagcagcgccgcagcaaggccaccggcggt

SEQ ID NO: 11548 - DNA, 75 bp, synthetic construct
  source 1..75: mol_type = other DNA
ctccatcgacaccagtacaccaatggggcgctttttctttcacgtaatgggggcgctggcagaaatggaacgtga

SEQ ID NO: 11549 - DNA, 75 bp, synthetic construct
  source 1..75: mol_type = other DNA
tacgacaccttaatggtcatataaaaaacctccgtttctggaacagagcattgtcagatacgcagcttaaggaat

SEQ ID NO: 11550 - DNA, 75 bp, synthetic construct
  source 1..75: mol_type = other DNA
caacatgtcgaaagcgcagattatccagcaggcgggcaactccgtgctgtctaaagccaaccaggtaccgcagca

SEQ ID NO: 11551 - DNA, 75 bp, synthetic construct
  source 1..75: mol_type = other DNA
gaacatcgccatgatgaagcctggctgcgccagcacatccacaatgacgcgcattacgccagcctgatggcggtt

SEQ ID NO: 11552 - DNA, 75 bp, synthetic construct
  source 1..75: mol_type = other DNA
acctgacgatatggcagggcgatgacgtacagcgccgggtgaaaggtgtggtgacctggtttgaactgggggaga

SEQ ID NO: 11553 - DNA, 75 bp, synthetic construct
  source 1..75: mol_type = other DNA
cgtgcaggatatgcggatggcgctctggttttttgaatatgcgctggggcaggcggaagatatcgccattcgtat

SEQ ID NO: 11554 - DNA, 75 bp, synthetic construct
  source 1..75: mol_type = other DNA
gaacatggggcgcattgtcgttgacgtcgatggtgttaatctcagtgaactgattaacaaggtctctgaaaacgg

SEQ ID NO: 11555 - DNA, 75 bp, synthetic construct
  source 1..75: mol_type = other DNA
ccgacggcattaacgtacaggcgatgaacatggggcgcattgtcgttgacgtcgatggtgttaattttgctgaac

SEQ ID NO: 11556 - DNA, 75 bp, synthetic construct
  source 1..75: mol_type = other DNA
gttgatttgtatttacagtcctgtgtggaggacggaaaggagcctgacgcgccctttaaaggtgtgtttaacgtc

SEQ ID NO: 11557 - DNA, 75 bp, synthetic construct
  source 1..75: mol_type = other DNA
cgggaaggaatcagggtggccagatgtacagtggcacgtctcatggcggttatgggacttgccggtgttctccgg

SEQ ID NO: 11558 - DNA, 75 bp, synthetic construct
  source 1..75: mol_type = other DNA
aggcctacgacattatcagtcaccgccgcctggaatttgacgccggacacaccgacattgcgcagtcattcatgg

SEQ ID NO: 11559 - DNA, 75 bp, synthetic construct
  source 1..75: mol_type = other DNA
atatcgcaaaacatgtcattcagattcacttcatcaatgagcacacaggtgaagtggttgataaacagttgcgta

SEQ ID NO: 11560 - DNA, 75 bp, synthetic construct
  source 1..75: mol_type = other DNA
atggcggtttctggcctgcatggcatgatttgtgcttttggacgggagattcagcgtgctgattggctatgtaag

SEQ ID NO: 11561 - DNA, 75 bp, synthetic construct
  source 1..75: mol_type = other DNA
ctgatgtgctaatttttgaaccaaaagtatttggtgatgagcggggcttttttatggaaagcttcaatcagaaag

SEQ ID NO: 11562 - DNA, 75 bp, synthetic construct
  source 1..75: mol_type = other DNA
gcaaactatgagattgatggagagaaatacagctttgatcaattgagtccggatgcagtgcgcaccacagaaacg

SEQ ID NO: 11563 - DNA, 75 bp, synthetic construct
  source 1..75: mol_type = other DNA
ataaaacggattcggcagcactgttgccctgtattgaacaggccagggaagatatccgtatcctgcgccaactgc

SEQ ID NO: 11564 - DNA, 75 bp, synthetic construct
  source 1..75: mol_type = other DNA
caatctgagaaggaatttaatgacttttgtcgtgaggagtttagcgaatgggaagatgatgttactgaaacccca

SEQ ID NO: 11565 - DNA, 75 bp, synthetic construct
  source 1..75: mol_type = other DNA
ggaaaccagtacagggaaaactacctatatgaaaatgttgataggttatattccggtacatcttcggatatcaac

SEQ ID NO: 11566 - DNA, 75 bp, synthetic construct
  source 1..75: mol_type = other DNA
tctcaggccgtaaaaggcgatggatcctgatggacttggaaacctctctgccgttgctgtatccccttaggtacc

SEQ ID NO: 11567 - DNA, 75 bp, synthetic construct
  source 1..75: mol_type = other DNA
ttaatcgaaggcatggaagtttccattgatgtaagcacttgtgatgctgatttaggtaatcgctatttcggcacc

SEQ ID NO: 11568 - DNA, 75 bp, synthetic construct
  source 1..75: mol_type = other DNA
tgtgggcccgtcgtccgtctggcaccatccatcacagcgataaaggctctcagtatgtgtcactggcctatacgg

SEQ ID NO: 11569 - DNA, 75 bp, synthetic construct
  source 1..75: mol_type = other DNA
tatgactcacagtgggcggcaatttgttccattgccccaaagattggctgtacgccggagactctgcgtgtctgg

SEQ ID NO: 11570 - DNA, 75 bp, synthetic construct
  source 1..75: mol_type = other DNA
gacggcgagaagttttcatttgatccattaagtgctgatgctgtcgtaacgactgaaacacgctatcagtacagt

SEQ ID NO: 11571 - DNA, 75 bp, synthetic construct
  source 1..75: mol_type = other DNA
atgcagacaatcatctatcagataacccccagcaaatggtgtacggagagagtccttattgcatcaacagggcta

SEQ ID NO: 11572 - DNA, 75 bp, synthetic construct
  source 1..75: mol_type = other DNA
cagaaagcgattgagtcaattaagcaggctgatgcggctgttaagttggcacacgagaagttttcggcgctggcg

SEQ ID NO: 11573 - DNA, 75 bp, synthetic construct
  source 1..75: mol_type = other DNA
tggacatcgacctgtcccacagcaatctggctcccggcctgctgtgtgcagacgggcaataccgccagatagtca

SEQ ID NO: 11574 - DNA, 75 bp, synthetic construct
  source 1..75: mol_type = other DNA
taaggcatttcattatgaaagtctgcgtggccgttatgtgagcctgatggcggggccggtctggcaggtcagtga

SEQ ID NO: 11575 - DNA, 75 bp, synthetic construct
  source 1..75: mol_type = other DNA
ccggtgctggacagtgaggggaataccaatatatccggcgtcacggtggtgttccgggccggtgagcaggagcag

SEQ ID NO: 11576 - DNA, 75 bp, synthetic construct
  source 1..75: mol_type = other DNA
acagataaccgccgggcagaatctcacggccagcgccaccacgctgacacaggacggaatattgctggcgaaagg

SEQ ID NO: 11577 - DNA, 75 bp, synthetic construct
  source 1..75: mol_type = other DNA
gcggcgcttaaacagtcggagaaggaatttaataacttctgtcgtcaggagtactacggttgggaggacaacttc

SEQ ID NO: 11578 - DNA, 75 bp, synthetic construct
  source 1..75: mol_type = other DNA
ccgccgatggcatttttttccccgcccttgagcaaaatatgatgggtgcggtgttaattaacgaaaatgatgaag

SEQ ID NO: 11579 - DNA, 75 bp, synthetic construct
  source 1..75: mol_type = other DNA
atgcacaataaaaccacaccggacgcagccgccgaagccatcaaaacgctgatgcacgcgctgattgatatttct

SEQ ID NO: 11580 - DNA, 75 bp, synthetic construct
  source 1..75: mol_type = other DNA
ggatatccggttttgacagagcaaccacctttatcaaaagaaaaccttattgcattggcagagttgaaaaaagga

SEQ ID NO: 11581 - DNA, 75 bp, synthetic construct
  source 1..75: mol_type = other DNA
cgctggtttgaccgtggtgttctgcgggaggtggtccgggaagcccggaacgaaatccgcagcatggcggatgcc

SEQ ID NO: 11582 - DNA, 75 bp, synthetic construct
  source 1..75: mol_type = other DNA
gagatgcgtgccggaagcggtgtggtggtgtcctggcgttacggtaatgtgtgtgtccagcgtggtgtgcagttg

SEQ ID NO: 11583 - DNA, 75 bp, synthetic construct
  source 1..75: mol_type = other DNA
ccgatctggcctgggcaacgatgcacgcactgtttaacgaaccgctgcagggcgaatccgccaataccagcaata

SEQ ID NO: 11584 - DNA, 75 bp, synthetic construct
  source 1..75: mol_type = other DNA
gggaatacaccctgacggtgcgggccattaacagctacggccagcagggcgaacctgcgaccaccaccttccgga

SEQ ID NO: 11585 - DNA, 75 bp, synthetic construct
  source 1..75: mol_type = other DNA
acgactatgccgggaccatgaccggcggacgtatcctgtccatcgatgccgccagccgcaccctgacactggacc

SEQ ID NO: 11586 - DNA, 75 bp, synthetic construct
  source 1..75: mol_type = other DNA
atggcagttcgtggcattaacaaggtcattctcgtgggacgtctgggaaaagatccggatgtccgttacatcccc

SEQ ID NO: 11587 - DNA, 75 bp, synthetic construct
  source 1..75: mol_type = other DNA
ccggaatacaacctctgttgacctgaagcgcttaccggatgatgtggaagcaacccgttctgttgtggaatcggc

SEQ ID NO: 11588 - DNA, 75 bp, synthetic construct
  source 1..75: mol_type = other DNA
acaccggtaacagcgataacaccatgaaggcggataacccgcgcaatgctttctactggcggtttgtggaaatgg

SEQ ID NO: 11589 - DNA, 75 bp, synthetic construct
  source 1..75: mol_type = other DNA
tgatacccgcaatatgcgccagttcggcattgatgcctggcagatggaaggtgccgacaactatggtaacgtgca

SEQ ID NO: 11590 - DNA, 75 bp, synthetic construct
  source 1..75: mol_type = other DNA
ctgatagaagagctgcgccagcgtggcgtgaatttccgaagcctgactgacagtattgataccagcaccccaatg

SEQ ID NO: 11591 - DNA, 75 bp, synthetic construct
  source 1..75: mol_type = other DNA
ttggcatggtgtataacgaagttctgaacccggcagcaccggtcagtacaggcgatctttttgaagccggaattg

SEQ ID NO: 11592 - DNA, 75 bp, synthetic construct
  source 1..75: mol_type = other DNA
tactttacagcgcgattttcatcagcgtctggttcacctggatttagagtacagaaatggcaggtacagcctcag

SEQ ID NO: 11593 - DNA, 75 bp, synthetic construct
  source 1..75: mol_type = other DNA
gatatcgcggtttccctttcaaatatctgtcgctttgcaggacatctttcacacttctacagcgtcgcccaacat

SEQ ID NO: 11594 - DNA, 75 bp, synthetic construct
  source 1..75: mol_type = other DNA
ccgtgatacacggtgtgacggcggtctggcgcgccggggagcaggagcagacaccaccggaaggctttgagtcct

SEQ ID NO: 11595 - DNA, 75 bp, synthetic construct
  source 1..75: mol_type = other DNA
ttattgaaaggaatatgtgttattttgacaccataagtcagcatttcataattatggatgcagaccaacagaaac

SEQ ID NO: 11596 - DNA, 75 bp, synthetic construct
  source 1..75: mol_type = other DNA
ggtaacgaggaaagacctctgcgaggtgcgaatccgaaccggtcagacggaggtcgctgtcttcgtagactacga

SEQ ID NO: 11597 - DNA, 75 bp, synthetic construct
  source 1..75: mol_type = other DNA
ttacagcccgcgctgtgccggataaaaacgtatcagatgattttatgcatgctgttctcagtaactgcaccacaa

SEQ ID NO: 11598 - DNA, 75 bp, synthetic construct
  source 1..75: mol_type = other DNA
gcggtgctttgcagccagctggtaccgcaggaatttgcttttgaagcgttaatgcatgatgcaacagaagcgtat

SEQ ID NO: 11599 - DNA, 75 bp, synthetic construct
  source 1..75: mol_type = other DNA
aatcagatgttacggccgagtcggtattctttatgaagcgtcggcaggtgttaaaagcactgggcatcagcgcag

SEQ ID NO: 11600 - DNA, 75 bp, synthetic construct
  source 1..75: mol_type = other DNA
ggggaaaagcggggccggtaaatcctcactctgtaatgcactgtttcagggggaggtcaccccggtcagtgatgt

SEQ ID NO: 11601 - DNA, 75 bp, synthetic construct
  source 1..75: mol_type = other DNA
atgacaacgaactatatttttgtgaccggcggggtcgtatcctctctgggtaaaggcattgccgcagcctccctc

SEQ ID NO: 11602 - DNA, 75 bp, synthetic construct
  source 1..75: mol_type = other DNA
tgtatatcgatggacagtttgttacctggcgtggagacgcatggattgatgtggtaaaccctgctacagaggctg

SEQ ID NO: 11603 - DNA, 75 bp, synthetic construct
  source 1..75: mol_type = other DNA
gaaaggtcagtggctggaagccgccggttttgccaccggcacggcggtagatgtcaaagtgatggaaggctgtat

SEQ ID NO: 11604 - DNA, 75 bp, synthetic construct
  source 1..75: mol_type = other DNA
atctggatgatgactactttgacatgttgcaggaagaactttgtagcgtggtggaggcctccggtgccagcctgg

SEQ ID NO: 11605 - DNA, 75 bp, synthetic construct
  source 1..75: mol_type = other DNA
cgcgaccaacagcacatctgaaatgctggcggcaacgccaaagtcggtaaaggcagcctatgaccttgctaacgg

SEQ ID NO: 11606 - DNA, 75 bp, synthetic construct
  source 1..75: mol_type = other DNA
cgtgacgtcgagaaaaacgtcttaagtcgtgcgctatacaaagtactggcgcagcgcgtctttgtttacggtaat

SEQ ID NO: 11607 - DNA, 75 bp, synthetic construct
  source 1..75: mol_type = other DNA
atgataaaaagcacaggcgctcttttattgtttgctgcactgtctgccgggcaggcaatggcctcagatgtggca

SEQ ID NO: 11608 - DNA, 75 bp, synthetic construct
  source 1..75: mol_type = other DNA
cgcattatttaaccgccttcgtgccgatggcgatcagttttttccgttgggatgggcaatggttttacagcgtgc

SEQ ID NO: 11609 - DNA, 75 bp, synthetic construct
  source 1..75: mol_type = other DNA
gccgcgccacaaatgaaggtattcagctgtttctggccggaagtgccggacttctgcagatcactgaaaatatcc

SEQ ID NO: 11610 - DNA, 75 bp, synthetic construct
  source 1..75: mol_type = other DNA
accgctgcctggtcgccacgggtgccagcccggcggtcccgccgattccgggcttgaaagagtcaccctactgga

SEQ ID NO: 11611 - DNA, 75 bp, synthetic construct
  source 1..75: mol_type = other DNA
gcgttgaaaatcacggaggaaaactccgaataacgtttaagtacaggggtaaacgagtgcgcgaaaatcttcgcg

SEQ ID NO: 11612 - DNA, 75 bp, synthetic construct
  source 1..75: mol_type = other DNA
gtttgatgaaattaatattgtgcgcggtcagcttgttcctggtgggcggttggggataaaaatcacagaactgga

SEQ ID NO: 11613 - DNA, 75 bp, synthetic construct
  source 1..75: mol_type = other DNA
ttatcagtatttattggctaaacagggaggcaacaaattattggtatacatgcgccagagcagcatttaacgacc

SEQ ID NO: 11614 - DNA, 75 bp, synthetic construct
  source 1..75: mol_type = other DNA
aacttcattatggatgtgcagggtagtgggtatatcgactttggtgatggcagtccgcttaactttttcagctat

SEQ ID NO: 11615 - DNA, 75 bp, synthetic construct
  source 1..75: mol_type = other DNA
gcttaatattttggctggcggtaatgcctccttaaccactattactaccagcgtcattggcgctaatgaggactc

SEQ ID NO: 11616 - DNA, 75 bp, synthetic construct
  source 1..75: mol_type = other DNA
aatggtgtcacgccaccaccacaggtgacgtaccagtctgtgccggtgcctaaccggatacagcgtaaggtgttt

SEQ ID NO: 11617 - DNA, 75 bp, synthetic construct
  source 1..75: mol_type = other DNA
atttctgtggctggcagttgtatgagcgcggagagcttgttgatgtgctgtggggggaactggaatggtcttccc

SEQ ID NO: 11618 - DNA, 75 bp, synthetic construct
  source 1..75: mol_type = other DNA
gtatgggcaaacgccgggaatgacgacggtcagggtattggaacaggcacaggctgggttgctattggtgaaagc

SEQ ID NO: 11619 - DNA, 75 bp, synthetic construct
  source 1..75: mol_type = other DNA
gcccggctaatggcgacacaggtgcctgtcactgcggggcatatcaatgccacggctaccttcactcttgaatat

SEQ ID NO: 11620 - DNA, 75 bp, synthetic construct
  source 1..75: mol_type = other DNA
cactgttgcaaatcgacacacttatccgacaactggctgaaatctcggtgctgacggaaagcatcggaggtaaaa

SEQ ID NO: 11621 - DNA, 75 bp, synthetic construct
  source 1..75: mol_type = other DNA
gatgcggaagtgttagcacgtatccttgatatcatcagcgatatgccgacatatggctatcgtcgtgtctgggcc

SEQ ID NO: 11622 - DNA, 75 bp, synthetic construct
  source 1..75: mol_type = other DNA
cagcactgctgatgatgctgaacggggcggttatggcgtcagaaaacgtgaacactcctgaaaaccgccagttcc

SEQ ID NO: 11623 - DNA, 75 bp, synthetic construct
  source 1..75: mol_type = other DNA
atgatatttaaatgtattcagtgcgagagggatataacagccctgcgttttcacagcgccatcgccgtgatgtcc

SEQ ID NO: 11624 - DNA, 75 bp, synthetic construct
  source 1..75: mol_type = other DNA
tcgaagcgaccggcacctatatggaacctgtcgctgagtgcctttacgatgctggctacatagtgtcagtcatta

SEQ ID NO: 11625 - DNA, 75 bp, synthetic construct
  source 1..75: mol_type = other DNA
atgaccattctggactacatcgctacccatccgggttgtagcggcggagaaatcgccgcagcactgaatacccca

SEQ ID NO: 11626 - DNA, 75 bp, synthetic construct
  source 1..75: mol_type = other DNA
cggcggatgatgcggacgcgaagctgttcccgctgaacaagcccacactgctgacccgcgtcaatgacgtgctgg

SEQ ID NO: 11627 - DNA, 75 bp, synthetic construct
  source 1..75: mol_type = other DNA
aattacttcccgcagggtgaactcatcgctggctatggccatcagcaaaggtcgtctgattcgcgtaaatcagaa

SEQ ID NO: 11628 - DNA, 75 bp, synthetic construct
  source 1..75: mol_type = other DNA
atgaccattctggactacatcactacacatccgggttgtagcggcggagaaatcgccgcagcactgaacacccca

SEQ ID NO: 11629 - DNA, 75 bp, synthetic construct
  source 1..75: mol_type = other DNA
gaaatgcagaaatattaacggtgaatatgtctggccctggatattgccgttttcagcagcaggaatgaaacactc

SEQ ID NO: 11630 - DNA, 75 bp, synthetic construct
  source 1..75: mol_type = other DNA
aataccagaacctgctgatgtgcgagttcgtggacgatctcgcgtccgtgttcccgctcagcgaactgcaggcgt

SEQ ID NO: 11631 - DNA, 75 bp, synthetic construct
  source 1..75: mol_type = other DNA
tcccgacccggttaaatttatatccagagccagtactcctggcctcggcgcttcatttttagcgttaggctgtta

SEQ ID NO: 11632 - DNA, 75 bp, synthetic construct
  source 1..75: mol_type = other DNA
atcctgctctggatatggctggcgcattgactacggtaaaacgccagcatcgccccgctcttgatctttctcgcc

SEQ ID NO: 11633 - DNA, 75 bp, synthetic construct
  source 1..75: mol_type = other DNA
aacctggtgacggcggctatcgtgctgtggaacacggtgtacctggaacgcgccacccaggggttggtcgaggcc

SEQ ID NO: 11634 - DNA, 75 bp, synthetic construct
  source 1..75: mol_type = other DNA
gcgtgcatgccggcctgaacaaaggtgaggcgcgcaactcgctggccagggcggtgttcttcaaccgccttgggg

SEQ ID NO: 11635 - DNA, 75 bp, synthetic construct
  source 1..75: mol_type = other DNA
accacgatatcactgaaccctggtgggggcttaaacgcagtatcacgccctgttttggcgcacggctggtgcagt

SEQ ID NO: 11636 - DNA, 75 bp, synthetic construct
  source 1..75: mol_type = other DNA
tgctaaccgggcgtaaccagattttcctttccgccagcaaggctcaggcccacgtctttaagcagtacatcatcg

SEQ ID NO: 11637 - DNA, 75 bp, synthetic construct
  source 1..75: mol_type = other DNA
aaaatcagcccggtcagtgagtcacccatcgaccccttcggggcgaccgggctgtcacatgaccttgctgatgaa

SEQ ID NO: 11638 - DNA, 75 bp, synthetic construct
  source 1..75: mol_type = other DNA
taaacgccattgtcagcaaattgatccaagagaaccaacttaaagcttatgatgatgatgtgcttaaaaacttac

SEQ ID NO: 11639 - DNA, 75 bp, synthetic construct
  source 1..75: mol_type = other DNA
ctaatgagagtgacggcagttttttgatgcggctggcgcgccagtacggtgctattgcgtcggtgaaaaatggca

SEQ ID NO: 11640 - DNA, 75 bp, synthetic construct
  source 1..75: mol_type = other DNA
ggcattaccggataaaaagttatcagtccgccctggcggacagagggttagtgcagagcatgtcgcgcaagggca

SEQ ID NO: 11641 - DNA, 75 bp, synthetic construct
  source 1..75: mol_type = other DNA
tcaacgttaattattcatttttatatgggagaaggaagttgtcctgcagctcagtttcggattaattataaaaat

SEQ ID NO: 11642 - DNA, 75 bp, synthetic construct
  source 1..75: mol_type = other DNA
ctggaacatctgcgcaaactcaccagtcacgaacccgtgattggcattatgggtaaaagcggggccggtaaatcc

SEQ ID NO: 11643 - DNA, 75 bp, synthetic construct
  source 1..75: mol_type = other DNA
ctggcacgatattttcaccttgatgaagcagacaaggaatttatcggaaaaagcagaggtgatcacaaccgtctg

SEQ ID NO: 11644 - DNA, 75 bp, synthetic construct
  source 1..75: mol_type = other DNA
ctgaatgcgctgacgctgacggatgttacaaaaaatgcagcgtatggcgttgagatagaaagtctggtgctggag

SEQ ID NO: 11645 - DNA, 75 bp, synthetic construct
  source 1..75: mol_type = other DNA
tcatatacaccaatacatgtgaaaagaaagtcagttatattcctgcaacagaagatataaacatcgctataatgc

SEQ ID NO: 11646 - DNA, 75 bp, synthetic construct
  source 1..75: mol_type = other DNA
ccgtgaaaaatccgtggatgtggtctgttatgacgagctttcctcgttcgaaccggatgttgaaaaagagggttc

SEQ ID NO: 11647 - DNA, 75 bp, synthetic construct
  source 1..75: mol_type = other DNA
actcattcgctctttactgaaaagctcgcgcccatcaggactggcacaggcaattatggaagtagggcgtgtaaa

SEQ ID NO: 11648 - DNA, 75 bp, synthetic construct
  source 1..75: mol_type = other DNA
gaaggggcatgggcggataaatacaaaggcagtgacaaaagtgatacggtttttggcgcaggccttgcggtggga

SEQ ID NO: 11649 - DNA, 75 bp, synthetic construct
  source 1..75: mol_type = other DNA
tggtccggtaacgtgctgagtccggccaaactccgcgacaagtggacccagctcgaaatcaaccgtaacaagcaa

SEQ ID NO: 11650 - DNA, 75 bp, synthetic construct
  source 1..75: mol_type = other DNA
tttatatttatccggaacgaaatgcagctgatcgggtggctgacaggtttcttgaaaaattgcctcagaaagaac

SEQ ID NO: 11651 - DNA, 75 bp, synthetic construct
  source 1..75: mol_type = other DNA
atggcgaaacgggtatggcggcgggagcgtgacctgacggggtggatgtcgctgtcgcgtaaaccggaggagaca

SEQ ID NO: 11652 - DNA, 75 bp, synthetic construct
  source 1..75: mol_type = other DNA
tattttgtatcaaaagccggggagcgttatcgccgggcagtggcgcttattgttcgccagcagcggctgaaatta

SEQ ID NO: 11653 - DNA, 75 bp, synthetic construct
  source 1..75: mol_type = other DNA
tcagattgcgataacgcagtgggcgtggaatgaatttaatactcaatccggtaccagaaaaatagctgggaaaac

SEQ ID NO: 11654 - DNA, 75 bp, synthetic construct
  source 1..75: mol_type = other DNA
gtcacagtgggggttaccggcaactgtattatgggctgagtggcggtattctggcacatgccaatggtctgacac

SEQ ID NO: 11655 - DNA, 75 bp, synthetic construct
  source 1..75: mol_type = other DNA
tctgaaaccgcaaatcagcgaaatgctgatggatatcgaaatcgaccacgccgaccagaccgaagaaagcgacat

SEQ ID NO: 11656 - DNA, 75 bp, synthetic construct
  source 1..75: mol_type = other DNA
ctggatagtgaggctttattgtttgtaatgagaacacgttcaaaacaaaaggcggcattttcaaagcaaagtgtt

SEQ ID NO: 11657 - DNA, 75 bp, synthetic construct
  source 1..75: mol_type = other DNA
ctggatgtcgctgtcacggaaaccgcaagtgacctggtacggctgggacggcgaccgcctgaccacaatacagaa

SEQ ID NO: 11658 - DNA, 75 bp, synthetic construct
  source 1..75: mol_type = other DNA
atcggataccgctactccacacggggctatttcagctttgctgataccgcctggaagaaaatgagtggttacagt

SEQ ID NO: 11659 - DNA, 75 bp, synthetic construct
  source 1..75: mol_type = other DNA
atgaaagatttaactttgaagtttcatgacaaactgcagtttaaggccttcctgtcatctcttggctgggcggaa

SEQ ID NO: 11660 - DNA, 75 bp, synthetic construct
  source 1..75: mol_type = other DNA
tttcttaccggcaatctccgccagaaaattgaggatgaattcccagaactgacgcacgggcttattaagatgcta

SEQ ID NO: 11661 - DNA, 75 bp, synthetic construct
  source 1..75: mol_type = other DNA
acttcgccaaagaagtggaggtggagttgaaaggcgatccgatggtgcttcctaacggggccacgctttacttcc

SEQ ID NO: 11662 - DNA, 75 bp, synthetic construct
  source 1..75: mol_type = other DNA
atgctgactactatgacgctaggggctgttggtccggataaaatgctggattatcaggataagatggttggtcgc

SEQ ID NO: 11663 - DNA, 75 bp, synthetic construct
  source 1..75: mol_type = other DNA
ctcaaaaagccagtgagtcatcacaaagtgcagcagaagctgaattgtcaagaaagacggcagaaagtgcagccg

SEQ ID NO: 11664 - DNA, 75 bp, synthetic construct
  source 1..75: mol_type = other DNA
tacgggaacgttattcacctaagccagtacctgaatgctctgtttgtggcgaggaaatgtcaatacagcgtatat

SEQ ID NO: 11665 - DNA, 75 bp, synthetic construct
  source 1..75: mol_type = other DNA
tcgacgcgtcacgaaggtgttcaggacatcaccctttctgactggaaagataatggtgacggaagctatacccag

SEQ ID NO: 11666 - DNA, 75 bp, synthetic construct
  source 1..75: mol_type = other DNA
gcatctgctgccttatctcgcctgggcattttccgttgaccgctgggatcgcaactggccggaagagacaaagcg

SEQ ID NO: 11667 - DNA, 75 bp, synthetic construct
  source 1..75: mol_type = other DNA
atgacacaggcagaacgccgccatgaccggctggctgtcaggctgtcactgataatcagccgtctggtggcaggg

SEQ ID NO: 11668 - DNA, 75 bp, synthetic construct
  source 1..75: mol_type = other DNA
cagtcagcctgacatcagaacggtttgaacggagaggccacatccacagtctggtcgctgaagagcgttttatct

SEQ ID NO: 11669 - DNA, 75 bp, synthetic construct
  source 1..75: mol_type = other DNA
tggcacttcatccgcctgccggacggtggcggttacatgatgccggatggcgaccgttttcatctggtcaacggt

SEQ ID NO: 11670 - DNA, 75 bp, synthetic construct
  source 1..75: mol_type = other DNA
gaaataacattgagcaggctgacggtaaaaaatggtctgagcaggaccgtgatacgtttgatccgacgcatgata

SEQ ID NO: 11671 - DNA, 75 bp, synthetic construct
  source 1..75: mol_type = other DNA
caacgatgaactgttcgggatcatctataccgttgacgaaggcgatgactggaccgacccgcaggtgctggaaaa

SEQ ID NO: 11672 - DNA, 75 bp, synthetic construct
  source 1..75: mol_type = other DNA
cggtggactccgcttctgaccgtgcctttgtggtggtattcgaccatgacgatcgttccggtacaaaagatggac

SEQ ID NO: 11673 - DNA, 75 bp, synthetic construct
  source 1..75: mol_type = other DNA
aaaacggtatcgccactgtagcgggcgatatcactgtatatcactatgacgaggaaacccgggaatacacctcat

SEQ ID NO: 11674 - DNA, 75 bp, synthetic construct
  source 1..75: mol_type = other DNA
cgcatggcgggcggtggcggagacggaaaaacgccgccatcagggaaacacgctggcggaatatccgtatgcggg

SEQ ID NO: 11675 - DNA, 75 bp, synthetic construct
  source 1..75: mol_type = other DNA
gtggatgatgccgcattaatgatggcttcagcggggattccgggaggtgtgagatatgtcccagccggttggtga

SEQ ID NO: 11676 - DNA, 75 bp, synthetic construct
  source 1..75: mol_type = other DNA
gtttgtgcgcccggcgtttgatgtgcgcagtgaacaggcagctcaggtggcgattgcgcggatgaaccgggccat

SEQ ID NO: 11677 - DNA, 75 bp, synthetic construct
  source 1..75: mol_type = other DNA
gagcaccgcagaagcaacatgagttgagtctgtgctgttacgagtattgtcataaaacatgtctctccgttccag

SEQ ID NO: 11678 - DNA, 75 bp, synthetic construct
  source 1..75: mol_type = other DNA
aaatcagtcagaatccctcgccatgaaaatgctgcttgacctggccccgaatgagatggtccgtacacacctgaa

SEQ ID NO: 11679 - DNA, 75 bp, synthetic construct
  source 1..75: mol_type = other DNA
tcgcaccagactataccgaggatgaaatttacgaatggatgtgcggaaagatacgcgccattaatgacctgaagc

SEQ ID NO: 11680 - DNA, 75 bp, synthetic construct
  source 1..75: mol_type = other DNA
gaactgggcatggatacagatgaggtactgagattaaaacaaataagtgggttaacagaactatttgaggaggaa

SEQ ID NO: 11681 - DNA, 75 bp, synthetic construct
  source 1..75: mol_type = other DNA
taccaggacaagagccattacaggtattgatggtgatataagaatcaacaaagcattatggatgattgccgaaca

SEQ ID NO: 11682 - DNA, 75 bp, synthetic construct
  source 1..75: mol_type = other DNA
tcacactcatccggcgttatggcgtcagtctcattcatctggatgccagtgccggatgtctgccgggtctgccca

SEQ ID NO: 11683 - DNA, 75 bp, synthetic construct
  source 1..75: mol_type = other DNA
ggatgattacggcgcgttacgcatgacgacgctcaactgcagcggacaatgccatttacaagccgtggaggcgaa

SEQ ID NO: 11684 - DNA, 75 bp, synthetic construct
  source 1..75: mol_type = other DNA
ccgtaattttagaggcgcagaatgtatggataacctacaaaggaaagctaccgggaagaattactggttctctga

SEQ ID NO: 11685 - DNA, 75 bp, synthetic construct
  source 1..75: mol_type = other DNA
acagtggtgggcagattttctggatgcgaacagagataagggtatcagcccgtttgaatatgcaaagattaacaa

SEQ ID NO: 11686 - DNA, 75 bp, synthetic construct
  source 1..75: mol_type = other DNA
atcgcttccacagccaatcagcgaatagctgcagcagaagctgaatatttcatgcgcaaaattgatgaaagtccg

SEQ ID NO: 11687 - DNA, 75 bp, synthetic construct
  source 1..75: mol_type = other DNA
acggattcggcagcactgttgccctgtatcgaacaggcccgggaggatgtccgtactcttcgtcatctgcagctt

SEQ ID NO: 11688 - DNA, 75 bp, synthetic construct
  source 1..75: mol_type = other DNA
acacgggattgcctgtgggtaaggccagtatccggtgatccgagtgtggaaattaccggagcgggtattggtgcg

SEQ ID NO: 11689 - DNA, 75 bp, synthetic construct
  source 1..75: mol_type = other DNA
gtgacctggtttgaactcggggagaacgacaaaaaccagatgctgtacagcatgaaggtgtgcccgccgctgtgg

SEQ ID NO: 11690 - DNA, 75 bp, synthetic construct
  source 1..75: mol_type = other DNA
ggcgttataaggttgatgtaagaccgcaagggacggaaggaaagcggatccgtaagatttttaccctgaagtcaa

SEQ ID NO: 11691 - DNA, 75 bp, synthetic construct
  source 1..75: mol_type = other DNA
gaaaacgaacaccggtttatggtctttggaaaggtcttaatcagtcagtcacaaacccttaagcgacacaattaa

SEQ ID NO: 11692 - DNA, 75 bp, synthetic construct
  source 1..75: mol_type = other DNA
tggtttctatgctctgttttgtctatgtcggtgtctacttctggcgtgaaagcaaagtacgtaatgcactggctg

SEQ ID NO: 11693 - DNA, 75 bp, synthetic construct
  source 1..75: mol_type = other DNA
cgagagcgccaggggattgccccctctgccacaccgattactccagaccagcaacgtatccgcgagctggaaaag

SEQ ID NO: 11694 - DNA, 75 bp, synthetic construct
  source 1..75: mol_type = other DNA
cctgaacgatataagaaagatgaggttccaatagttaatactaagcagcatccctatttagataatgtcacaaat

SEQ ID NO: 11695 - DNA, 75 bp, synthetic construct
  source 1..75: mol_type = other DNA
gcattgcactctctttcactcttatagcatgtaaggccccgacaccacctaaaggtgtgcagccgattacaaatt

SEQ ID NO: 11696 - DNA, 75 bp, synthetic construct
  source 1..75: mol_type = other DNA
atggcagttcgtggcattaacaaggtcattcttgtcggtcgtctgggaaaagatccggaagtccgttacatccca

SEQ ID NO: 11697 - DNA, 75 bp, synthetic construct
  source 1..75: mol_type = other DNA
ggagcaaccaccacgctgacctttacagtaaaacctgacggagccagtgacaaagcgatcagtgtgcattcgaca

SEQ ID NO: 11698 - DNA, 75 bp, synthetic construct
  source 1..75: mol_type = other DNA
gcgtataatcaccgacgcatagcgcaggttcaggcgctttatgcctctgagacgttgagtctcaaagagatcgcg

SEQ ID NO: 11699 - DNA, 75 bp, synthetic construct
  source 1..75: mol_type = other DNA
cagcaggttgaaaacctgcgcaaccagcttggcggtgtgcctggcgacgttgccagccgggcgttgcacgatacc

SEQ ID NO: 11700 - DNA, 75 bp, synthetic construct
  source 1..75: mol_type = other DNA
ctgtgttgtatggcaaatacaccatggaaggagaccagttcgagaaaattgaggtcgattttggcaggtcgacga

SEQ ID NO: 11701 - DNA, 75 bp, synthetic construct
  source 1..75: mol_type = other DNA
tatccactggaaacgtctctttttacagaactacatcaatcgacaatgttcacaataattatctctccgaatggg

SEQ ID NO: 11702 - DNA, 75 bp, synthetic construct
  source 1..75: mol_type = other DNA
ctcttttttcgccgtagtaaaggcgtgacgttaactgatgccggtgaaagtttttatcagcacgccagtcttatt

SEQ ID NO: 11703 - DNA, 75 bp, synthetic construct
  source 1..75: mol_type = other DNA
ctggctgctgacatcgttgtgcacccgggtgaaacagtgaatggcggaacactggtaaaccatgacaaccagttt

SEQ ID NO: 11704 - DNA, 75 bp, synthetic construct
  source 1..75: mol_type = other DNA
ggcattttatcgccgcaagtgtcattgtgctgacatcttccttccttatttttgaacttgtcgccagcgacagag

SEQ ID NO: 11705 - DNA, 75 bp, synthetic construct
  source 1..75: mol_type = other DNA
cgctgggtgcctggctggatgtgtgcaccacgtccacagacggataccactgaacgcactgataacctggctgat

SEQ ID NO: 11706 - DNA, 75 bp, synthetic construct
  source 1..75: mol_type = other DNA
acagaccgcgccgcataacgtgcccaccagcaacgccagggcacgggcaaacatccagaagctgaaaaccatggt

SEQ ID NO: 11707 - DNA, 75 bp, synthetic construct
  source 1..75: mol_type = other DNA
cttcggtaggtttgatatttatttcattctcttttgtggcaaagtgctctcaactcaaaaatttgaataattact

SEQ ID NO: 11708 - DNA, 75 bp, synthetic construct
  source 1..75: mol_type = other DNA
aaatatccatccctgactatcagttgtctggagaaacaggaagagccaccatcattgcttcgtctaaataatcgg

SEQ ID NO: 11709 - DNA, 75 bp, synthetic construct
  source 1..75: mol_type = other DNA
gtgttgcgaaggcgtttatatccagacatcaccgacacaataaacccccggtggggcataaattcagcattggtc

SEQ ID NO: 11710 - DNA, 75 bp, synthetic construct
  source 1..75: mol_type = other DNA
gtgcgacttcatggaacaagcccagaacgtggtgctgattggtgggccaggcacaggcaagactcacctggccac

SEQ ID NO: 11711 - DNA, 75 bp, synthetic construct
  source 1..75: mol_type = other DNA
aagtggccgctcgtcttcagcagcgcactacagccatcatgcgctatgcagtgcaaagtgggttaattgattata

SEQ ID NO: 11712 - DNA, 75 bp, synthetic construct
  source 1..75: mol_type = other DNA
tcgcgccagactataccgatgatgaactttatgagtggatgcaccagaaaattaatgcagcgcaggatctgaaat

SEQ ID NO: 11713 - DNA, 75 bp, synthetic construct
  source 1..75: mol_type = other DNA
tatcggtgcaggtgatgatcgcatcgttctttctggtgtgctttatcctgaaattacaggtggcgaagtgtcgct

SEQ ID NO: 11714 - DNA, 75 bp, synthetic construct
  source 1..75: mol_type = other DNA
ccctcgctgacggaatggatatttccctgtccgatcatgaaatcaggaccgtcctggcgcgcctggaggacatcc

SEQ ID NO: 11715 - DNA, 75 bp, synthetic construct
  source 1..75: mol_type = other DNA
tcgcgcagaaaatgcatatctgaaagccatgcaggagcatcttctggaaaaaaagcgccaggagctggagaaaaa

SEQ ID NO: 11716 - DNA, 75 bp, synthetic construct
  source 1..75: mol_type = other DNA
acgacgcaatggtcgcggagctgaatcgccgatacgtagcacaaatcccaggctttcaatgctgtggaacagcct

SEQ ID NO: 11717 - DNA, 75 bp, synthetic construct
  source 1..75: mol_type = other DNA
tatacattcacgttgccagaggatattttaaaaggggaactgagagctctaaatttaaatataaacaacgaatta

SEQ ID NO: 11718 - DNA, 75 bp, synthetic construct
  source 1..75: mol_type = other DNA
gggccatcgtaaagccgtaaatcagaaacgtgcagcaagtcatatccgcaaaattcgtgaaatgctggtcgcagg

SEQ ID NO: 11719 - DNA, 75 bp, synthetic construct
  source 1..75: mol_type = other DNA
tgaccgggctggtggaccgcttcgggcgcacacagacgttccaccgcgaagccgccggtgaattcagcggcgaaa

SEQ ID NO: 11720 - DNA, 75 bp, synthetic construct
  source 1..75: mol_type = other DNA
atgacgctaaaaatattcttgttgctgattgtgaaaatggggggggttatgcgtgatgatcgttttaattccctg

SEQ ID NO: 11721 - DNA, 75 bp, synthetic construct
  source 1..75: mol_type = other DNA
tactgagattaaaacaaataagtgggttaacagaactatttgaggaggaaaactttagtccggcatggacaataa

SEQ ID NO: 11722 - DNA, 75 bp, synthetic construct
  source 1..75: mol_type = other DNA
tatcagccggggagcttcacgccactcatcagggttgaaaccgccaccggtgagctggcgaaaacgcagcgccgc

SEQ ID NO: 11723 - DNA, 75 bp, synthetic construct
  source 1..75: mol_type = other DNA
agccaaaccggtggggcactgctgtttcacctgctctcaaagctgtacgaaaaaaccagcgtgatactgaccacc

SEQ ID NO: 11724 - DNA, 75 bp, synthetic construct
  source 1..75: mol_type = other DNA
aatccagcttcagaggaaagacagctttatcaaatagtacacttctccagaaagtttcttttgctggaaaagaat

SEQ ID NO: 11725 - DNA, 75 bp, synthetic construct
  source 1..75: mol_type = other DNA
ggcatacaatcctgaagataatcagggtgcccgctggttgttgggctcagaactgttacgaacaggcgatcataa

SEQ ID NO: 11726 - DNA, 75 bp, synthetic construct
  source 1..75: mol_type = other DNA
tggctatgctgccgccgtactacgaggagactgcacactagagcaagcatggcacaggttgaatgcgggccaacc

SEQ ID NO: 11727 - DNA, 75 bp, synthetic construct
  source 1..75: mol_type = other DNA
aacgttacggcatcacctgtacgctaagcgcattctttgccgatcccaccatcgagggattaagttgctatctgc

SEQ ID NO: 11728 - DNA, 75 bp, synthetic construct
  source 1..75: mol_type = other DNA
gttgcccgggaaaatctgctgcaggagcgactgcagcagatggagcgggatatggttcgtgacctgcagaaagag

SEQ ID NO: 11729 - DNA, 75 bp, synthetic construct
  source 1..75: mol_type = other DNA
gtcagattgcgtacaagttccttaagcgcaacgggttcaaggtttgttttcatgaccgctttatagctgtaacca

SEQ ID NO: 11730 - DNA, 75 bp, synthetic construct
  source 1..75: mol_type = other DNA
cgattgaaaatctgagccgggttcgtaaaaacgccattccggcggcttcagcaatggccattaaccgcgtggcca

SEQ ID NO: 11731 - DNA, 75 bp, synthetic construct
  source 1..75: mol_type = other DNA
tgtgcgtgttgtggtcagccagccgacgatccccatcacctgattggtcacggtcagggagggatgggaacaaag

SEQ ID NO: 11732 - DNA, 75 bp, synthetic construct
  source 1..75: mol_type = other DNA
ccggtattccacaatacccgggtactggtggagccggaaccgaaaagcatgcgtaatctgccgtccggggtcgtt

SEQ ID NO: 11733 - DNA, 75 bp, synthetic construct
  source 1..75: mol_type = other DNA
gtgtcagacacactctccgggacaactcatcccgatgacaacaacagccacccctggtgggggctgccctgcacc

SEQ ID NO: 11734 - DNA, 75 bp, synthetic construct
  source 1..75: mol_type = other DNA
ggatcagatgttccagtgttattgccaactcctgcacgccctagcccagcgaccacagctctggcatgagactca

SEQ ID NO: 11735 - DNA, 75 bp, synthetic construct
  source 1..75: mol_type = other DNA
ggacgctgaatgattttctcggtgccatgtcggaggatgacgtccggccggaggcactgcgtcgttttgaactga

SEQ ID NO: 11736 - DNA, 75 bp, synthetic construct
  source 1..75: mol_type = other DNA
tatcccacagcaagtatcagcgatttgctggttgttgtgatgaagaaagccactgcaggcatcacgattagctga

SEQ ID NO: 11737 - DNA, 75 bp, synthetic construct
  source 1..75: mol_type = other DNA
aagtgcagcagaagctgaattgtcaagaaagacggcagaaagtgcagccggtaatgcagccagggatgcaacgac

SEQ ID NO: 11738 - DNA, 75 bp, synthetic construct
  source 1..75: mol_type = other DNA
gtttcaacgcgtattctgaaagcaactgaaagagcaagtacaattcgcgttaactatttcattaaagatttgtgg

SEQ ID NO: 11739 - DNA, 75 bp, synthetic construct
  source 1..75: mol_type = other DNA
ctatgattggtatggggctggtgtgttccgctctgccagcattggcaatggaagcatggaataaccaacaaggtg

SEQ ID NO: 11740 - DNA, 75 bp, synthetic construct
  source 1..75: mol_type = other DNA
aataactcactggatgcctggcgaaataaccaggcaaataaacccaaagcgcataaaaagaccgaagcggaaaaa

SEQ ID NO: 11741 - DNA, 75 bp, synthetic construct
  source 1..75: mol_type = other DNA
gattcatacttttgatgcgcaggcgagcggtacggtctacagcagtggtttgggcatggtgctgctcaaacgggc

SEQ ID NO: 11742 - DNA, 75 bp, synthetic construct
  source 1..75: mol_type = other DNA
ttgccccgcgtatggggatcgtattgttcaggcccggttcagagctgatgcccctgtttatgcaggggcgtgtcc

SEQ ID NO: 11743 - DNA, 75 bp, synthetic construct
  source 1..75: mol_type = other DNA
gttccacgaggttctgcagttattagtcggctgagcactattcttgaggacaataatttacctctttatctcagc

SEQ ID NO: 11744 - DNA, 75 bp, synthetic construct
  source 1..75: mol_type = other DNA
aggatattgcgctaacggtggggaaactgcgtgttgagctggagacagcaaaaatcaaaactcaacgagcagcgt

SEQ ID NO: 11745 - DNA, 75 bp, synthetic construct
  source 1..75: mol_type = other DNA
atcatatggaaacctggacctcggcgttgcaaacccgttccaccgccgggcgcggcagctccggtaagattgatt

SEQ ID NO: 11746 - DNA, 75 bp, synthetic construct
  source 1..75: mol_type = other DNA
gagcatacttatatgataacaaactagaaaaatgggtattagtcggaacaacccatggtattgccagcgttaatg

SEQ ID NO: 11747 - DNA, 75 bp, synthetic construct
  source 1..75: mol_type = other DNA
caggttggccgactgggtccgggagttactgtgccggaaaagtaactttgtcgtgacttgcgctctggcaaacaa

SEQ ID NO: 11748 - DNA, 75 bp, synthetic construct
  source 1..75: mol_type = other DNA
agggtttatgacgatcagccgtttgaccggcagattgttattccggcggtggcattcagcggcgctaaacatgag

SEQ ID NO: 11749 - DNA, 75 bp, synthetic construct
  source 1..75: mol_type = other DNA
ggggtggggtatagccatggtgccggtgtggaatccccgtggaacgcggtggctggtgtgaactggtcgttctga

SEQ ID NO: 11750 - DNA, 75 bp, synthetic construct
  source 1..75: mol_type = other DNA
ccacggacgagcaagatggttatatcgtgaccattgtgaattcaaaaataagctcttaagccgcgccaatgggta

SEQ ID NO: 11751 - DNA, 75 bp, synthetic construct
  source 1..75: mol_type = other DNA
acaactggctggcagaactgacaatgaacaaactttacgatcgcgcgccggcttccgtctggaaatatgtcacct

SEQ ID NO: 11752 - DNA, 75 bp, synthetic construct
  source 1..75: mol_type = other DNA
agcgtggtcaggcctctgacgtacgcgggccgcgcactgaacaacgtcccatgacttatgtggaggccgcgaaag

SEQ ID NO: 11753 - DNA, 75 bp, synthetic construct
  source 1..75: mol_type = other DNA
aacgccttcttcctgactataaacggatggaagaaaaaatagacgccgtaatccgtgagaaatacgggttacctc

SEQ ID NO: 11754 - DNA, 75 bp, synthetic construct
  source 1..75: mol_type = other DNA
tttcaggacaatggcctgtagttcattgatcgagtctggattgtggtcgagggatgcagtggaaaggcagatgag

SEQ ID NO: 11755 - DNA, 75 bp, synthetic construct
  source 1..75: mol_type = other DNA
gcaggcggtgaatgatgcggttgcgaatattccggtaccggcggacggcaaaagtattacccccgatgatgtgcg

SEQ ID NO: 11756 - DNA, 75 bp, synthetic construct
  source 1..75: mol_type = other DNA
atgacggaacgggaactgtccattattcgtgcactgggagaagaattcgccacggtgctggcggatttacagcgc

SEQ ID NO: 11757 - DNA, 75 bp, synthetic construct
  source 1..75: mol_type = other DNA
tcattctcgtaggacgcctgggaaaagatccggaagtccgttacatccccaacgggggcgcagtggcaaacctgc

SEQ ID NO: 11758 - DNA, 75 bp, synthetic construct
  source 1..75: mol_type = other DNA
tatccggcggttcgctaatacccgcgacaccagacacgcaacgctggttgactgaacgagtcaaaccaggtgctg

SEQ ID NO: 11759 - DNA, 75 bp, synthetic construct
  source 1..75: mol_type = other DNA
gacaatttataaaacgctgtactttcgtagccgtgaagcgctacaccacctgaatatacagcatctgcgacggtc

SEQ ID NO: 11760 - DNA, 75 bp, synthetic construct
  source 1..75: mol_type = other DNA
tcagcagttccgccaacactgcgacagcgttgtcctcgcggcttttacccggtcaaaacagcgttacggtgcccc

SEQ ID NO: 11761 - DNA, 75 bp, synthetic construct
  source 1..75: mol_type = other DNA
acaggcctgatgaccagccacaactacagaacggtgaacaatatcaccctgggtaagcatccggaggcgaaacga

SEQ ID NO: 11762 - DNA, 75 bp, synthetic construct
  source 1..75: mol_type = other DNA
gctaaccgctttacttctaacatcaaaggtctgactcaggccgcacgtaacgccaacgacggtatttctctggcg

SEQ ID NO: 11763 - DNA, 75 bp, synthetic construct
  source 1..75: mol_type = other DNA
tggtttgtcgtaaatggtcggcaagcgtgggggcgctgtgggtaaccataacggcagattttgaacaggtcgtgg

SEQ ID NO: 11764 - DNA, 75 bp, synthetic construct
  source 1..75: mol_type = other DNA
gcgacctgccaaaagccaaagttatccacgggcgagcaagatggttatatcgtgaccattgtgaattcaaaaata

SEQ ID NO: 11765 - DNA, 75 bp, synthetic construct
  source 1..75: mol_type = other DNA
cgtcgatcctgaaatcaaaatgaccgagtggatgcagacgctgaaggaaaccgggttcgatatccgggcgtatcg

SEQ ID NO: 11766 - DNA, 75 bp, synthetic construct
  source 1..75: mol_type = other DNA
ggggaggtatatcactcaggatccgattgggctgaaggggggatggaatttttatcagtatccgctgaatccggt

SEQ ID NO: 11767 - DNA, 75 bp, synthetic construct
  source 1..75: mol_type = other DNA
gataccacctggtactggaaagaaaatttccctcatgcgtatgaagctatttatggcaattatcaaaataatgtt

SEQ ID NO: 11768 - DNA, 75 bp, synthetic construct
  source 1..75: mol_type = other DNA
atccggttctgcaggcgatggtggatgacgctgtggggaccattccggtaccgcgtgatggtcgtgattatgatc

SEQ ID NO: 11769 - DNA, 75 bp, synthetic construct
  source 1..75: mol_type = other DNA
acagaacgggtaaaaaaagcgtgtacaaaatgtgactgcatcgttgaagcaccggcgccgtcccgcccgatagag

SEQ ID NO: 11770 - DNA, 75 bp, synthetic construct
  source 1..75: mol_type = other DNA
agcatctgcgggctcagatagaaaaactgcgccggatgctgttcggaacccgttctgaaaaactgcgtcgtgagg

SEQ ID NO: 11771 - DNA, 75 bp, synthetic construct
  source 1..75: mol_type = other DNA
tttcgtggacgaccctgacgccgggtaaaccaaatacgctgaatttttacgcccggctaatggcgacacaggtgc

SEQ ID NO: 11772 - DNA, 75 bp, synthetic construct
  source 1..75: mol_type = other DNA
catcaatgatggtgctttgtgtccttatttttgttgcggcggcggcatggtttatgctgttccagggagaaatga

SEQ ID NO: 11773 - DNA, 75 bp, synthetic construct
  source 1..75: mol_type = other DNA
ctggagccccgtgtcttcggctggatggaccgtctgtgcgaagactactgcggtggtatctggaatctgtacacc

SEQ ID NO: 11774 - DNA, 75 bp, synthetic construct
  source 1..75: mol_type = other DNA
tctgtatttttgccctcagtaagctggcaatggcgttatccagtacgcttgattccatccctttatccatgcagc

SEQ ID NO: 11775 - DNA, 75 bp, synthetic construct
  source 1..75: mol_type = other DNA
gcaaagtgtgcggctcctcgtttgtgccgttccgctcatatcagaaagtttgctgtggtcagtgcgcactggaac

SEQ ID NO: 11776 - DNA, 75 bp, synthetic construct
  source 1..75: mol_type = other DNA
atgcttaagacaaacagtctgcgagagtccatgcttcatgggtgtcggtggtgccaggctaatcccgagaaattc

SEQ ID NO: 11777 - DNA, 75 bp, synthetic construct
  source 1..75: mol_type = other DNA
gagcgtcagcagccggagagatatcgttctcagcaatggaacgcttaacagcgacaaggacctcagcctgaccgc

SEQ ID NO: 11778 - DNA, 75 bp, synthetic construct
  source 1..75: mol_type = other DNA
acgctttcgggtttgctctacccggaaattacgggcggtgaagtctccctgaccgcactgaccagccaggcttac

SEQ ID NO: 11779 - DNA, 75 bp, synthetic construct
  source 1..75: mol_type = other DNA
tcaatggatctggacatctataaccttcatccggcacacgctaaacgcattgaggaaattatcgctgaaaataaa

SEQ ID NO: 11780 - DNA, 75 bp, synthetic construct
  source 1..75: mol_type = other DNA
agattctcattgttgaagatgagcaggtatttcgctcgcttctggattcatggttttcctcattgggagcgacaa

SEQ ID NO: 11781 - DNA, 75 bp, synthetic construct
  source 1..75: mol_type = other DNA
cgcattgaaatggagaatgaaatattaaaaaaggctactgtagattcaattggtcaacgcaacagttatgtgaaa

SEQ ID NO: 11782 - DNA, 75 bp, synthetic construct
  source 1..75: mol_type = other DNA
ttcaggcatcggggattgcactttgtgcaggcgctgttcccctgaaggccagcgcagccgggcaacagcaaccgc

SEQ ID NO: 11783 - DNA, 75 bp, synthetic construct
  source 1..75: mol_type = other DNA
cgttgccgaagggtccggtcgtgcacaaacatttcgcaccattctgaccgtatccagcactgccaccgtggcgct

SEQ ID NO: 11784 - DNA, 75 bp, synthetic construct
  source 1..75: mol_type = other DNA
atgttccgtcccattcgtttgtttttcatggtacaggtgagagatattttcttatttgtgtggtgaatgtgttgt

SEQ ID NO: 11785 - DNA, 75 bp, synthetic construct
  source 1..75: mol_type = other DNA
tgtacgcagggcgagcgttatctggagctggcagagaaacgcgaggccaatgagtcgtttgtctatggctggatg

SEQ ID NO: 11786 - DNA, 75 bp, synthetic construct
  source 1..75: mol_type = other DNA
gcgcttatatcgtttccccggttctgttttgaccgattaccgaatactgaagaattacgccaaaacactgacagg

SEQ ID NO: 11787 - DNA, 75 bp, synthetic construct
  source 1..75: mol_type = other DNA
tgccggcttttggtaaaacggcacagggaacggcgaaaaaggatgagaagcaggtgaacggggcgttctatcacg

SEQ ID NO: 11788 - DNA, 75 bp, synthetic construct
  source 1..75: mol_type = other DNA
atgaacggtaaccgcgctgaaatgagcccggaagccgccggcattgccgcctgtctgatgacgtacagtcatcac

SEQ ID NO: 11789 - DNA, 75 bp, synthetic construct
  source 1..75: mol_type = other DNA
actcagttaagcagtgcaactaacagtacatctgaaacactggccgcaacaccgaaagcggtaaaggctgcatat

SEQ ID NO: 11790 - DNA, 75 bp, synthetic construct
  source 1..75: mol_type = other DNA
gaccattcttgccggtatcagcgccggcggtatgtactgcccggagtgtggcacggttcactggccggacggagt

SEQ ID NO: 11791 - DNA, 75 bp, synthetic construct
  source 1..75: mol_type = other DNA
ccacacaagcagtacccgttaatcgctaatgctctgaaagaaatggttgacgcgggactggccggcgacgttctt

SEQ ID NO: 11792 - DNA, 75 bp, synthetic construct
  source 1..75: mol_type = other DNA
ggcagataacgtcggcggcgtgtattaccggccgttgcagtatctgttaaatggagcatgggtgacggctgcaag

SEQ ID NO: 11793 - DNA, 75 bp, synthetic construct
  source 1..75: mol_type = other DNA
aatacgtagtttccctggcaacaggtgatcaaagcgtatttgaaaagcttgggtttgcttatgcgacatgttata

SEQ ID NO: 11794 - DNA, 75 bp, synthetic construct
  source 1..75: mol_type = other DNA
ggctgccggacggggcggatttaagccgcatgcaggatggcagtaataagcatcgtcccggctacgacctgacct

SEQ ID NO: 11795 - DNA, 75 bp, synthetic construct
  source 1..75: mol_type = other DNA
tctgttcgtgacaaggccagtgacaaagataaggaacgggtgctgaagaacatcaatatcatctgggactcgctg

SEQ ID NO: 11796 - DNA, 75 bp, synthetic construct
  source 1..75: mol_type = other DNA
atggaagggcgctgcctgaaagtgaactggaagctctgcgtaatatagcaagaagcaatcagagtgatactctga

SEQ ID NO: 11797 - DNA, 75 bp, synthetic construct
  source 1..75: mol_type = other DNA
atgacatcaaaacgctaaaatccgacgttagcaaattaaaaaacgatcaaggaagctacgcaacaaaattatatg

SEQ ID NO: 11798 - DNA, 75 bp, synthetic construct
  source 1..75: mol_type = other DNA
agataactggcaacaggcagtatcagaagaacgcgctattcgttgtgcaaacagattaattcaatgtaaaggata

SEQ ID NO: 11799 - DNA, 75 bp, synthetic construct
  source 1..75: mol_type = other DNA
cgaagtgaccagggcaaaaccggtaacacgcaccattacgtcagcgaacattgaccgcctgcgggtgaccttcgg

SEQ ID NO: 11800 - DNA, 75 bp, synthetic construct
  source 1..75: mol_type = other DNA
ggagaacgtcgggtcgctgggtgatattgagaaagtggcaaaggtctttgtccgcaatgagcttatcccgttaca

SEQ ID NO: 11801 - DNA, 75 bp, synthetic construct
  source 1..75: mol_type = other DNA
tggtcagtgcgctcatgacagcacttcccgaccatgccgccagtcccctgatgacccgcctgcaggacgagctgc

SEQ ID NO: 11802 - DNA, 75 bp, synthetic construct
  source 1..75: mol_type = other DNA
gttgcggcaggctattcgggccgctgtgcgcggcagcaatgctggccattcatcctctggcgccactggggctgc

SEQ ID NO: 11803 - DNA, 75 bp, synthetic construct
  source 1..75: mol_type = other DNA
tcacgtcagatgagggtaaaaagcaggagcacctgacccgttcggacagcggacgccgcagccataccgcactga

SEQ ID NO: 11804 - DNA, 75 bp, synthetic construct
  source 1..75: mol_type = other DNA
gttatcggagggcttattgttatattgtttctcatgatgcttatcatgtactttattaattctctcaggcataag

SEQ ID NO: 11805 - DNA, 75 bp, synthetic construct
  source 1..75: mol_type = other DNA
ggctccgcgcatatcacgttcagaaaaccagaactggttgatcggctaaatgacatcattgcgaagcattatccg

SEQ ID NO: 11806 - DNA, 75 bp, synthetic construct
  source 1..75: mol_type = other DNA
cccctgtaaatttggcaataaaattatcgtcaacaatctggtgaggtgggaccggtggggattgcatcttatcac

SEQ ID NO: 11807 - DNA, 75 bp, synthetic construct
  source 1..75: mol_type = other DNA
tgtcgctgtagcgatcgcctggggcaccctgactaacagtggtggtcagcctggtaatgcagttgttgtgcattg

SEQ ID NO: 11808 - DNA, 75 bp, synthetic construct
  source 1..75: mol_type = other DNA
taacccaacattattacattgtgttatgtcagctttagagcatgaaaaacataaaacatttacttacccggatga

SEQ ID NO: 11809 - DNA, 75 bp, synthetic construct
  source 1..75: mol_type = other DNA
tgactctctgggagaagaaagtcgaaaattatgtggcaatgctgtatcttacctgcggcgtcattgtctggaata

SEQ ID NO: 11810 - DNA, 75 bp, synthetic construct
  source 1..75: mol_type = other DNA
atatatccgcattagctggccttctggcaaaactgtcaggaagtgttgcgctgtggttaattgatgagagagccg

SEQ ID NO: 11811 - DNA, 75 bp, synthetic construct
  source 1..75: mol_type = other DNA
catcattaatgatgcaaaaaaatcgtcaatattcgataaatacgcggttgttgttgagcatcaacttcgtggctg

SEQ ID NO: 11812 - DNA, 75 bp, synthetic construct
  source 1..75: mol_type = other DNA
ggcaccctacaggaacatgacggtatctgcgagatccatgttgctaaatatgctgaaatattcggattgacctct

SEQ ID NO: 11813 - DNA, 75 bp, synthetic construct
  source 1..75: mol_type = other DNA
tgtatgacccggcagtacagcgtccgttgcgtcagacccgcacccgtaagccgttccctgaatcactaccccgtg

SEQ ID NO: 11814 - DNA, 75 bp, synthetic construct
  source 1..75: mol_type = other DNA
ttatatccgtagagatatcggagcatttatactcgggcaaataaaaatttgcaaaaaatgcgaagataatgtttt

SEQ ID NO: 11815 - DNA, 75 bp, synthetic construct
  source 1..75: mol_type = other DNA
gtcgtgaacattgccacgccggacggggccgggatttcgcataaccggtttacggattacaacgtcgggaaggaa

SEQ ID NO: 11816 - DNA, 75 bp, synthetic construct
  source 1..75: mol_type = other DNA
cagcggcatcatcgaagaacgcggcgaaaacctcagaaacgaatgcagctaatagtgcacaggcggcagcgacct

SEQ ID NO: 11817 - DNA, 75 bp, synthetic construct
  source 1..75: mol_type = other DNA
tggaggtgtatacgcgggtgttcgcgctggacatggccgccacactggctgtgccgttcaccggtgacgggcatg

SEQ ID NO: 11818 - DNA, 75 bp, synthetic construct
  source 1..75: mol_type = other DNA
ccggcgaatgcgggcattctgctggttccgtgctgtcgtggtggttcagcgttcaccaccggagctgatggcaca

SEQ ID NO: 11819 - DNA, 75 bp, synthetic construct
  source 1..75: mol_type = other DNA
gactcactgttgattaactggaactgtgcagcctcgaaatccccaccgaagacccctgatgaaaagcaggatacg

SEQ ID NO: 11820 - DNA, 75 bp, synthetic construct
  source 1..75: mol_type = other DNA
cccctgctggctcgatgaagacgacgaaaacctgcccgtggtgctcgatgccatcctgaaccggggagcacgttt

SEQ ID NO: 11821 - DNA, 75 bp, synthetic construct
  source 1..75: mol_type = other DNA
ccggatgaggacaaaatgctgatgcagaaagcggcaggacttgccggaggcgtccggttcggtggggacggaggg

SEQ ID NO: 11822 - DNA, 75 bp, synthetic construct
  source 1..75: mol_type = other DNA
aaacgatgtaccaagggcggtgacatatttcaagacacacagagattgttacgcagatggctggaacgcctgccg

SEQ ID NO: 11823 - DNA, 75 bp, synthetic construct
  source 1..75: mol_type = other DNA
ctgactggatgattcagacaggtatccagaatccagagcagctatcacacatgctgactactatgtctctcggtg

SEQ ID NO: 11824 - DNA, 75 bp, synthetic construct
  source 1..75: mol_type = other DNA
attcaggaaggcggtctggaatatgctactgatgtaataatacatcttcaacaaatatctattgaatgggattat

SEQ ID NO: 11825 - DNA, 75 bp, synthetic construct
  source 1..75: mol_type = other DNA
atgaatgagtttaagcgttttgaagaccggctgaccggacttattgaatcgctgtcaccgtcagggcgtcggcga

SEQ ID NO: 11826 - DNA, 75 bp, synthetic construct
  source 1..75: mol_type = other DNA
cctcttcagcctgtgcaccggagactggcctgcaacaactggttgccaccatagtccctgatgaacagcgcatca

SEQ ID NO: 11827 - DNA, 75 bp, synthetic construct
  source 1..75: mol_type = other DNA
taattttaaagcaatagataaccacgggaaggaaataacaaacagaaaaggattacctaatgtctgcagagttca

SEQ ID NO: 11828 - DNA, 75 bp, synthetic construct
  source 1..75: mol_type = other DNA
aaggcgctgcacggcagaatgccatcaatgcgtcgcttgcacagggcgttgaggcgtccctgcgctggctgacgg

SEQ ID NO: 11829 - DNA, 75 bp, synthetic construct
  source 1..75: mol_type = other DNA
tgtcagaaaatggcgtaatcggtagtggtcctgatatcccgtggtcagtaaaaggtgagcaactactctttaaag

SEQ ID NO: 11830 - DNA, 75 bp, synthetic construct
  source 1..75: mol_type = other DNA
atgaaagcgctggaaatggcatgggaaacccgtggtaaacccggcggggtgatgttccacagcgatcagggtagt

SEQ ID NO: 11831 - DNA, 75 bp, synthetic construct
  source 1..75: mol_type = other DNA
gaaaaacacttcttcaaacttgaaggtgaaactttacgtgagttcaagcacagagtagcttttaactactctgtg

SEQ ID NO: 11832 - DNA, 75 bp, synthetic construct
  source 1..75: mol_type = other DNA
gacaactcctcggcctgattgggcgggccgtggtgaaaagcatcagtgccgccacgaaatgtcagaccgtggatg

SEQ ID NO: 11833 - DNA, 75 bp, synthetic construct
  source 1..75: mol_type = other DNA
gtttgatgaagttaatattatgcgcggtcaggttgttcccggtggtcggctggggataaaaatcacagaactgga

SEQ ID NO: 11834 - DNA, 75 bp, synthetic construct
  source 1..75: mol_type = other DNA
ggcaaagccacggtagatggcattcagctgcgctttaccggctctatccagcgtgacgataccggggaagtgcag

SEQ ID NO: 11835 - DNA, 75 bp, synthetic construct
  source 1..75: mol_type = other DNA
atgtcaaccggattacgtttcacgctggaagtggacggcctgccaccggacgcgtttgcggtggtctcctttcat

SEQ ID NO: 11836 - DNA, 75 bp, synthetic construct
  source 1..75: mol_type = other DNA
atgactatcaaatcaaatacgccagcacacgacaaggactgctggcaaacgccgctttggctttttgatgcactg

SEQ ID NO: 11837 - DNA, 75 bp, synthetic construct
  source 1..75: mol_type = other DNA
aagaccgtttgtgcggatcctgtccgaaaaagtgcgtgcgcgacgcggacgcccgccaaaagatgaagtccgcct

SEQ ID NO: 11838 - DNA, 75 bp, synthetic construct
  source 1..75: mol_type = other DNA
gaatcgggctgagatggggttttctgcgttccttgggaaaatgggcattagtatgaatgacagagagcgggcaac

SEQ ID NO: 11839 - DNA, 75 bp, synthetic construct
  source 1..75: mol_type = other DNA
gtcgcagcagaaggtctgccaggatattgcaggtgagagcaatatcttcgctgactgggccgcttcccgtcaggg

SEQ ID NO: 11840 - DNA, 75 bp, synthetic construct
  source 1..75: mol_type = other DNA
tcatgtatatgtctctggcgggggtcaaatctataatagccttattgaaaaagcagatataattcatttgtctac

SEQ ID NO: 11841 - DNA, 75 bp, synthetic construct
  source 1..75: mol_type = other DNA
gcgtattgctgcgtgccgacgatcccctgatcgacatgaactacatcaccagtttcaccggtatgaccgataaat

SEQ ID NO: 11842 - DNA, 75 bp, synthetic construct
  source 1..75: mol_type = other DNA
tgtccgcagccatctgtctggccgtatccggtgcgcctgcatgggcgtctgagcagcaggccacgctgagtgcgg

SEQ ID NO: 11843 - DNA, 75 bp, synthetic construct
  source 1..75: mol_type = other DNA
gtgggtaaaggtggcggcaaggcgcacacgccggttgaggcaaaggacaatcttaagtccacgcagatgatgagc

SEQ ID NO: 11844 - DNA, 75 bp, synthetic construct
  source 1..75: mol_type = other DNA
atggacactccatacattgagttatttgcaggcagtcagcaggtcgccacgacgctggtacattttgccgctgat

SEQ ID NO: 11845 - DNA, 75 bp, synthetic construct
  source 1..75: mol_type = other DNA
atcattttctggtcagtgccgcgattctggtattcgtggtgattttctggcggacacaccatcgcgaccaccgta

SEQ ID NO: 11846 - DNA, 75 bp, synthetic construct
  source 1..75: mol_type = other DNA
cactatattacgaagccaaaaatgacaaagtcagaaaacgccttgggattaaaggtggtttttactggcgcacag

SEQ ID NO: 11847 - DNA, 75 bp, synthetic construct
  source 1..75: mol_type = other DNA
tcaaaaaactcaccgaacagtacaacgtgacctatatcggtatcgactcaaccggcgttggtcacggggtttatg

SEQ ID NO: 11848 - DNA, 75 bp, synthetic construct
  source 1..75: mol_type = other DNA
atgacaaaacgccagcgtaaaaaccgtaagcgtattaatcgtcttgtggaactctggcctgagttattcaaccgg

SEQ ID NO: 11849 - DNA, 75 bp, synthetic construct
  source 1..75: mol_type = other DNA
atgaataacaccaaaaaatcactaaaagtgctctttattggggaatcctggcatattcatatgattcattcaaaa

SEQ ID NO: 11850 - DNA, 75 bp, synthetic construct
  source 1..75: mol_type = other DNA
acgtgaattattcagcctgtttgagtatgcaccgacaattctgacgtcggtaaaaccagagcaatatctgcatta

SEQ ID NO: 11851 - DNA, 75 bp, synthetic construct
  source 1..75: mol_type = other DNA
tctcaaaacgccgtcaggtcggtgcaagtgagtatgcatatattagctttttaactgtcagtcagcgccgtactt

SEQ ID NO: 11852 - DNA, 75 bp, synthetic construct
  source 1..75: mol_type = other DNA
gtgccggagaggaaggaaataaacgttattttattgcgtctgcacctgataaagatcaggaatgggagtgtaacc

SEQ ID NO: 11853 - DNA, 75 bp, synthetic construct
  source 1..75: mol_type = other DNA
atgacacaaaactatgaactgattgtgaaagggatccgcaattttgagaataaagttgcggtaactgtagcatta

SEQ ID NO: 11854 - DNA, 75 bp, synthetic construct
  source 1..75: mol_type = other DNA
ccatcgggaaaaataacgccgtctgtaatgaatatccgtccccaatcctgcccaaagaacgctggcgttatcaga

SEQ ID NO: 11855 - DNA, 75 bp, synthetic construct
  source 1..75: mol_type = other DNA
aacgtacagcgtgacgctttctgttccccgttgggaggccacggcgctggagtcgtttctggctgagcacggggg

SEQ ID NO: 11856 - DNA, 75 bp, synthetic construct
  source 1..75: mol_type = other DNA
acgtggacgactggacgggcttcagccgccacttcacccacttgaaggacggggccgaggccaaagacaggacgt

SEQ ID NO: 11857 - DNA, 75 bp, synthetic construct
  source 1..75: mol_type = other DNA
cggataaattattaaaaactcttgaagagaaaaaacagtattacaatatgatctacgaagaaatccgtaaaaaga

SEQ ID NO: 11858 - DNA, 75 bp, synthetic construct
  source 1..75: mol_type = other DNA
atggctacaccgcttattcgtgtcatgaacggacacatctacagagtaccaaatcgtcgtaagcgtaaacctgag

SEQ ID NO: 11859 - DNA, 75 bp, synthetic construct
  source 1..75: mol_type = other DNA
tgccgctgcgtaccgaccccacgaagctggaaaaccccacattcgtgcgccgtagctattgtctatctcgtgcta

SEQ ID NO: 11860 - DNA, 75 bp, synthetic construct
  source 1..75: mol_type = other DNA
tgatcttcgaaattaataactttatctcgctcggtggtcgcaccattgttgatgccacagggtctgagtctatcg

SEQ ID NO: 11861 - DNA, 75 bp, synthetic construct
  source 1..75: mol_type = other DNA
actcgccgaaccggcaggggaaacacccggagcaacacctccgccccttccggggtatcctgcaggcggatgcgt

SEQ ID NO: 11862 - DNA, 75 bp, synthetic construct
  source 1..75: mol_type = other DNA
tgagcagtttgatgaaatcaatattgtacgtggccagccagtatctggtggacggctggagataagaattacaga

SEQ ID NO: 11863 - DNA, 75 bp, synthetic construct
  source 1..75: mol_type = other DNA
gaactgaatattccggtggaatggggcggcgactggaagaccctgaaagacggaccgcattttcagttaccacac

SEQ ID NO: 11864 - DNA, 75 bp, synthetic construct
  source 1..75: mol_type = other DNA
atggagaaaccagaaacagcaatgaaagccattacccggaatcttgagcgcgaaatctggcgtaacctgatgcag

SEQ ID NO: 11865 - DNA, 75 bp, synthetic construct
  source 1..75: mol_type = other DNA
atgcgtgatatttaccacgaaacaacagatcgcgtatttcttgcactttctcacagtgaaaatatgatggaaata

SEQ ID NO: 11866 - DNA, 75 bp, synthetic construct
  source 1..75: mol_type = other DNA
acaaccagcgggtaggcgagttaacgaagttagccaacggcgcgcacacctttaagtatgcacctgagtggttag

SEQ ID NO: 11867 - DNA, 75 bp, synthetic construct
  source 1..75: mol_type = other DNA
agcccgtaagttcggtggctgttatgtgtttggtatccagtcctatgcccagctggaagatatctacggtgagaa

SEQ ID NO: 11868 - DNA, 75 bp, synthetic construct
  source 1..75: mol_type = other DNA
gagcctgatggggcacaagtcgattagttcgacagaggtgtacacgaaggtgtttgcgctggatgtggctgcacg

SEQ ID NO: 11869 - DNA, 75 bp, synthetic construct
  source 1..75: mol_type = other DNA
atgcgtaaactttatgccgccattttgtccgcagccatttgtctggccgtatccggtgcgcctgcatgggcatct

SEQ ID NO: 11870 - DNA, 75 bp, synthetic construct
  source 1..75: mol_type = other DNA
tcttactccgcttttatccactccttcacaaagcacagtcagtgccagttcctgtaaagttgagttccgccacgg

SEQ ID NO: 11871 - DNA, 75 bp, synthetic construct
  source 1..75: mol_type = other DNA
tcggagatgaactctgggagtacatagaatctctcatagaatcaggtgattatcgtacacagagtgaggtaatcc

SEQ ID NO: 11872 - DNA, 75 bp, synthetic construct
  source 1..75: mol_type = other DNA
ctggtgcctgagaacgatgctcgcgcactggcgcaacgactggcggcgtttagccaactggacaccgacgaactg

SEQ ID NO: 11873 - DNA, 75 bp, synthetic construct
  source 1..75: mol_type = other DNA
aaaagaaaggcgtgcatacccgctatttaatattactgattatttttattgttaccgccgttaactacgccgatc

SEQ ID NO: 11874 - DNA, 75 bp, synthetic construct
  source 1..75: mol_type = other DNA
tgtaaaaacgtctggaccagccgtgaaggcgtggaatacgcgtggttcaacaacgtggaaaccaagccgggccag

SEQ ID NO: 11875 - DNA, 75 bp, synthetic construct
  source 1..75: mol_type = other DNA
agtggcttaaagcttgatgaagacaaaaagcgggtgatggaaattatgcaacaggtttgggaagacgacagctgg

SEQ ID NO: 11876 - DNA, 75 bp, synthetic construct
  source 1..75: mol_type = other DNA
tgaatttacggtaaaacgcctgcttctgacgccgcggccagccctgcaggcgatgaacccggacttcccttccct

SEQ ID NO: 11877 - DNA, 75 bp, synthetic construct
  source 1..75: mol_type = other DNA
tgccgttcttcgttgttggttgtagtgaagaagtaaaaagtgtggattggtgggggcagcatcttacggaagcta

SEQ ID NO: 11878 - DNA, 75 bp, synthetic construct
  source 1..75: mol_type = other DNA
agtgcccgtgcggcacgtcctggcgggaacagacgcaaaaccacaggcacacagggtaatcagccaccagcggga

SEQ ID NO: 11879 - DNA, 75 bp, synthetic construct
  source 1..75: mol_type = other DNA
ctctgggcattaaaataaaaaacgacaaggaaaataagtttgttattaatttctatgatcccaatcagaccgcga

SEQ ID NO: 11880 - DNA, 75 bp, synthetic construct
  source 1..75: mol_type = other DNA
gcgcatctggaaaaaacgtcgcgaaggtgaacgcaaggaaaccggaaaatacacgtctgttgttgatctcgcccg

SEQ ID NO: 11881 - DNA, 75 bp, synthetic construct
  source 1..75: mol_type = other DNA
caaaatacagaagctgatgctgtaaaacaaaacggaaatgcctataaaaccaacaatgctgtctctgatttatcg

SEQ ID NO: 11882 - DNA, 75 bp, synthetic construct
  source 1..75: mol_type = other DNA
acaccaccacagcccacaccggagcgcaagagcgtcagtctgaagcgggattgtctgccttatctgctttgcgca

SEQ ID NO: 11883 - DNA, 75 bp, synthetic construct
  source 1..75: mol_type = other DNA
taaagaaaagcgcgctggcagtgagtgtggccctgctgctctcggctcaggctcaggctgttttgacagggcctg

SEQ ID NO: 11884 - DNA, 75 bp, synthetic construct
  source 1..75: mol_type = other DNA
ggcttaggtattccggcaataaccaggagcaaaaacattgctgacagttggttatcaaagggctggtatgttcag

SEQ ID NO: 11885 - DNA, 75 bp, synthetic construct
  source 1..75: mol_type = other DNA
tgaaagtattgctgttgtatgtggcaatcctggtgtgggcaaaaccgaagcggcccgtgaatatcgccgcaccaa

SEQ ID NO: 11886 - DNA, 75 bp, synthetic construct
  source 1..75: mol_type = other DNA
gttgaggcggaatctgctatcgccgtccgactgtccagcgcttttgagacgctgtgcgcatattgtgctgaaaac

SEQ ID NO: 11887 - DNA, 75 bp, synthetic construct
  source 1..75: mol_type = other DNA
atgtctgaatttattacggtagctcgcccctacgccaaagcagcttttgactttgccgtcgaacaccaaagtgta

SEQ ID NO: 11888 - DNA, 75 bp, synthetic construct
  source 1..75: mol_type = other DNA
ggggtttgagaggcaaggtaccgtaaccaccccatatggtccagccgtgtacatggttcaaacacgccaggcatt

SEQ ID NO: 11889 - DNA, 75 bp, synthetic construct
  source 1..75: mol_type = other DNA
acggaagcaggatgctgggctcatgcacggcgcaaaatccacgatgtatatatcagtaccaaaagcgcgacggcg

SEQ ID NO: 11890 - DNA, 75 bp, synthetic construct
  source 1..75: mol_type = other DNA
gagtttaccgggatgattcctgtttatcattttctggtcagtgccgcgattctggtattcatggtgattttctgg

SEQ ID NO: 11891 - DNA, 75 bp, synthetic construct
  source 1..75: mol_type = other DNA
acaacgtcagttttgaagaatggcatgaactgttaatggactatgcagagttacgtggtggcagtgctgctgatg

SEQ ID NO: 11892 - DNA, 75 bp, synthetic construct
  source 1..75: mol_type = other DNA
cattgcgccatctttatccactaccactcagaccagagtcagtgccagctcctgcaaggtggaattccgtcacgg

SEQ ID NO: 11893 - DNA, 75 bp, synthetic construct
  source 1..75: mol_type = other DNA
gtggaggcatccggtgccagcctggagaaggggcggcacgaccagttacttaccgcacttcgcgcgctgctgtta

SEQ ID NO: 11894 - DNA, 75 bp, synthetic construct
  source 1..75: mol_type = other DNA
atgtcggactgccaccctgttttattgcccgaaggccctttctcacgcaaacaggcaatggctgccacaacagct

SEQ ID NO: 11895 - DNA, 75 bp, synthetic construct
  source 1..75: mol_type = other DNA
gccggaagactggaaagacctgttcactgccctgtggcttaagaccaaaaaactggagcaacgaagtgtgcctgg

SEQ ID NO: 11896 - DNA, 75 bp, synthetic construct
  source 1..75: mol_type = other DNA
taccgcgataacgccatcacctacaaagcgcagcgcgataaaaaagccagagagctggagctggcaaacgcaacc

SEQ ID NO: 11897 - DNA, 75 bp, synthetic construct
  source 1..75: mol_type = other DNA
cgccccaaaatcctgtcgatgcagacaaattactggctgcctctcgcggagaatttgttgaagggattagcgacc

SEQ ID NO: 11898 - DNA, 75 bp, synthetic construct
  source 1..75: mol_type = other DNA
gtacccggatccggaaactctgcaaattttcggcgtggtgacggccttcattcataaaacccggagggcagactg

SEQ ID NO: 11899 - DNA, 75 bp, synthetic construct
  source 1..75: mol_type = other DNA
accagaaccagcaagaaacggaacagaacgaccagaaagcggaacaaaacagcccaaatacgcaacaaaacgagc

SEQ ID NO: 11900 - DNA, 75 bp, synthetic construct
  source 1..75: mol_type = other DNA
cgaccttgaggttgaatcgtcaactggcgttgcgcagtacgccgaccgcctgttcctctctgcaaccactgacgg

SEQ ID NO: 11901 - DNA, 75 bp, synthetic construct
  source 1..75: mol_type = other DNA
gcgttactacatccagcccaaacgtaaaatgcgtccgtcaaaaagaacaaggagagagttaccggttaaaagaga

SEQ ID NO: 11902 - DNA, 75 bp, synthetic construct
  source 1..75: mol_type = other DNA
aggcatccggcaaggatgtcaagcgtccgcaactggaagcgctgataagcttcgcccgcaccggcgacaccgtgg

SEQ ID NO: 11903 - DNA, 75 bp, synthetic construct
  source 1..75: mol_type = other DNA
ttcaatttaaaaccaatgccgctattggtcgcaggttcccaaagaaaggaaggcctcgtggcagtcaaggtgttg

SEQ ID NO: 11904 - DNA, 75 bp, synthetic construct
  source 1..75: mol_type = other DNA
gtttgatgaaattaatattgtgcgcggtcagcttgttcctggtgggcggttggggataaaaatcacagaactggg

SEQ ID NO: 11905 - DNA, 75 bp, synthetic construct
  source 1..75: mol_type = other DNA
tcatctcaaacttggttcgtggtaatgcaaaccaagtctctataactttggctgatctttttaaatataaattca

SEQ ID NO: 11906 - DNA, 75 bp, synthetic construct
  source 1..75: mol_type = other DNA
caacagtgaaacagtacaggacgtcatgctgggagcggtggaacgccgcttcggcaacgatcttccgtcgtctcc

SEQ ID NO: 11907 - DNA, 75 bp, synthetic construct
  source 1..75: mol_type = other DNA
attctttagatagcctgtttgagttcaaaaatggcttgaacactgaaaaagaacaatatggcaacggttataagt

SEQ ID NO: 11908 - DNA, 75 bp, synthetic construct
  source 1..75: mol_type = other DNA
cacctacggccttgttgcaccatgggttactgcgtcaggcagcactgacgccacaggaaactgcgctgatcagtc

SEQ ID NO: 11909 - DNA, 75 bp, synthetic construct
  source 1..75: mol_type = other DNA
ctggatccgagcattccatatacacacccaagtctagcgaatacagaagatgacaagcccacaggagaccaacaa

SEQ ID NO: 11910 - DNA, 75 bp, synthetic construct
  source 1..75: mol_type = other DNA
cagggataacgtccgctttggactggagtttgagaaatccgcctttggtaagtacaacgttgataatgcagtcaa

SEQ ID NO: 11911 - DNA, 75 bp, synthetic construct
  source 1..75: mol_type = other DNA
tcagtcgcttgttgctggaagagcggatgcgtgttgctgtaaatatgttatgttcccggcatggatatggacagg

SEQ ID NO: 11912 - DNA, 75 bp, synthetic construct
  source 1..75: mol_type = other DNA
aattatgcgtggcagtctcctttcggtccataatagcagaacaaaagaaagagccagaaatgacggtcagatatt

SEQ ID NO: 11913 - DNA, 75 bp, synthetic construct
  source 1..75: mol_type = other DNA
taacgccattcgataaatgggatggtaagaaatgggtgaccgatactgaggcacagcatagcgccgcagtagacg

SEQ ID NO: 11914 - DNA, 75 bp, synthetic construct
  source 1..75: mol_type = other DNA
aatggaaaagccagtacgaggacggcttactgagcgatgatgacatacaggaatgcatgcctgtcccggtggctc

SEQ ID NO: 11915 - DNA, 75 bp, synthetic construct
  source 1..75: mol_type = other DNA
tattggcattcataacattttctgcgcaggccgcagcatttcaggtcactagtaatgaaataaaaacaggagagc

SEQ ID NO: 11916 - DNA, 75 bp, synthetic construct
  source 1..75: mol_type = other DNA
gcaaaagggattagttcagctcagtagcgcaactaacagcgacagcgaaacaatggcggctacccctaaagctgt

SEQ ID NO: 11917 - DNA, 75 bp, synthetic construct
  source 1..75: mol_type = other DNA
acacgatggtgaagaaaaaccgcaaccatcttgcgcaatggcagataaacaggcaacggctgaaacagtggaacc

SEQ ID NO: 11918 - DNA, 75 bp, synthetic construct
  source 1..75: mol_type = other DNA
ttctccggggtaaaaaggtccgtacgaccatcagccggaaagccgttgccgcaggcgaccgcgtaaaccgtcagt

SEQ ID NO: 11919 - DNA, 75 bp, synthetic construct
  source 1..75: mol_type = other DNA
cgtacggagtgttatgccatgacggttcattattaccgtctgcgggattacgccctgcagcatccggaatgcagc

SEQ ID NO: 11920 - DNA, 75 bp, synthetic construct
  source 1..75: mol_type = other DNA
ttataaatctaacgcccagggagtctggagttccgctattggtgcacttaccagtgcacttggtgattcttcaat

SEQ ID NO: 11921 - DNA, 75 bp, synthetic construct
  source 1..75: mol_type = other DNA
taacatgacgctggaaaatccatcgccagagctgctcacgatgttaatccgcgaactgagcgggaggggaagatg

SEQ ID NO: 11922 - DNA, 75 bp, synthetic construct
  source 1..75: mol_type = other DNA
aaggtcttacaacatcctagatttactaaatatactttgtggttcatgactgatcaggtagctccagaagccggg

SEQ ID NO: 11923 - DNA, 75 bp, synthetic construct
  source 1..75: mol_type = other DNA
tattgcagtggtgacggagatatgggaacgcacgcttggtgtcagcattgatgatcaccacgccagcttcttcga

SEQ ID NO: 11924 - DNA, 75 bp, synthetic construct
  source 1..75: mol_type = other DNA
tgatgctggacgacgcggcgagtgatgccaatcgcaccgcgctagaggcgttagggcagttatggttggctggcg

SEQ ID NO: 11925 - DNA, 75 bp, synthetic construct
  source 1..75: mol_type = other DNA
agatgaaaaaggttctatcgttaccccggcgagccttttacgctggaattaccgtatgaaccctgaccgcatttt

SEQ ID NO: 11926 - DNA, 75 bp, synthetic construct
  source 1..75: mol_type = other DNA
acttccggagcagaaactgctgacacctcgcccgctgtttactgcagcccgggaagtgaaaacggttgtcccggt

SEQ ID NO: 11927 - DNA, 75 bp, synthetic construct
  source 1..75: mol_type = other DNA
agatgttcccgctgcttaaaaccggcggtctggctgatgttattggggcattacccgcagcacaaatcgcagacg

SEQ ID NO: 11928 - DNA, 75 bp, synthetic construct
  source 1..75: mol_type = other DNA
gataatacaaccactatcgccccgttaacgccatacgataaatgggatggtgagaaatgggtgacggataccgag

SEQ ID NO: 11929 - DNA, 75 bp, synthetic construct
  source 1..75: mol_type = other DNA
ggtgaccagataaaagtgttgtgggctgacagcgacggactgtgcctcttcaccaaacgcctggagcggggccgc

SEQ ID NO: 11930 - DNA, 75 bp, synthetic construct
  source 1..75: mol_type = other DNA
ccggcggacggcaaaagtatcacccccgatgatgtgcgtccgatgcttgagcagatggtgaaagaggctgtaagc

SEQ ID NO: 11931 - DNA, 75 bp, synthetic construct
  source 1..75: mol_type = other DNA
accacaacagcaggtacagcttgatgctcccggaatgctggctgaaacggacgagtacatggccggaggtaaacg

SEQ ID NO: 11932 - DNA, 75 bp, synthetic construct
  source 1..75: mol_type = other DNA
ttgctgggggagtttgaagaagtgcttgatgcatacgacgctgatgaaatcagcgagacgagttacatcaacaaa

SEQ ID NO: 11933 - DNA, 75 bp, synthetic construct
  source 1..75: mol_type = other DNA
ggcaacttgcaccctccgttatttctaaaactcagggttatgatcctgattcccgtctgagcagagccacgcttg

SEQ ID NO: 11934 - DNA, 75 bp, synthetic construct
  source 1..75: mol_type = other DNA
cgttcagaaagggatgggctttattgatgacgaccagagaaattctattggtcatcttgcgactagtgctcaaat

SEQ ID NO: 11935 - DNA, 75 bp, synthetic construct
  source 1..75: mol_type = other DNA
cagcgttaccgggacaacgggactgacactgaatcagtcccgtctggtgacggataaaaatctggtgctgtcttc

SEQ ID NO: 11936 - DNA, 75 bp, synthetic construct
  source 1..75: mol_type = other DNA
gagtaaagcacgaacctttaaagaagtcgcgattgagtggcatggcaccaataaaaagtggtctgaagatcacgc

SEQ ID NO: 11937 - DNA, 75 bp, synthetic construct
  source 1..75: mol_type = other DNA
cggtgcagatagacgtttatgccgggactgtgacgcaggcgcgtcagatacgtcaggacgcccgtgaagccataa

SEQ ID NO: 11938 - DNA, 75 bp, synthetic construct
  source 1..75: mol_type = other DNA
tcttgttgaggtgagcatacccggagaactgctgacagatttccggcagatacagaacaatgtggcggatgacct

SEQ ID NO: 11939 - DNA, 75 bp, synthetic construct
  source 1..75: mol_type = other DNA
tgatatggatatgatacttacaggtaagcttggtacaatatatgctcctgatggaatttcaatgcatgtggatcg

SEQ ID NO: 11940 - DNA, 75 bp, synthetic construct
  source 1..75: mol_type = other DNA
tcatgtccagaagtgggagcgagtctgcgccgcgctgcgggagctgaacaagcaccgggatattgttcgacagat

SEQ ID NO: 11941 - DNA, 75 bp, synthetic construct
  source 1..75: mol_type = other DNA
ctggaaaggctgagtcatactcctccggcagaagcagaaaaagcttattatgcttccatccattggaaacgatga

SEQ ID NO: 11942 - DNA, 75 bp, synthetic construct
  source 1..75: mol_type = other DNA
gctgatcggcacctgccgtctgaacggtatcgatccggaagcgtatctgcgccatatcctgagcgtactgccgga

SEQ ID NO: 11943 - DNA, 75 bp, synthetic construct
  source 1..75: mol_type = other DNA
gtggctggattatctggatgcactggagctggttgatacctccagtgcaccagatattgaatggcctacgcctcc

SEQ ID NO: 11944 - DNA, 75 bp, synthetic construct
  source 1..75: mol_type = other DNA
cgctgaaaatgccctgcgggcggtcagtctgggtcgtaaaaacttcctgttcttcggctctgaccatggtggtga

SEQ ID NO: 11945 - DNA, 75 bp, synthetic construct
  source 1..75: mol_type = other DNA
cctgccgttcgccagccgctggcggaagataaatcattactgccatttttcagcaatgagcgtgtgattcgtgct

SEQ ID NO: 11946 - DNA, 75 bp, synthetic construct
  source 1..75: mol_type = other DNA
tttgaatggaaagggctgaagaaattatgcgtggcagtctcctttcggtccataatagcagaacaaaagaaagag

SEQ ID NO: 11947 - DNA, 75 bp, synthetic construct
  source 1..75: mol_type = other DNA
gttcctgtgctgtgatgatggcgacggattaccccagctatctggttgctgatattaatcctgatttaatcaacc

SEQ ID NO: 11948 - DNA, 75 bp, synthetic construct
  source 1..75: mol_type = other DNA
gcggtgaactctcatcaaacggtaaggtactgcatacccataaacaccccggcgacagcggcggcacaaccggga

SEQ ID NO: 11949 - DNA, 75 bp, synthetic construct
  source 1..75: mol_type = other DNA
acgacaagggaaggaaaaagcgtaatcgccttcccattcaggtggtgaaaatcccgatggcggccccactgaaac

SEQ ID NO: 11950 - DNA, 75 bp, synthetic construct
  source 1..75: mol_type = other DNA
gaattaagttaccttgattgcgaatgggataatcattacgccaaatcacaaaaagatcgcctgttcagacaatta

SEQ ID NO: 11951 - DNA, 75 bp, synthetic construct
  source 1..75: mol_type = other DNA
atggattttatgagcattttggggcgctgtttacttcttcctttccctgttgcgatgtttgtcggttgcctgttt

SEQ ID NO: 11952 - DNA, 75 bp, synthetic construct
  source 1..75: mol_type = other DNA
gttctccggggtaaaaaggtccgtacgaccatcagccggaaagccgttgccgcaggcgaccgcgtaaaccgtcag

SEQ ID NO: 11953 - DNA, 75 bp, synthetic construct
  source 1..75: mol_type = other DNA
ctaatgagagtgacggtagttttctgatgcggctggcgcgacagtacggtgccatcgcgtcggtgaaaaatggca

SEQ ID NO: 11954 - DNA, 75 bp, synthetic construct
  source 1..75: mol_type = other DNA
ccgggtactgtagatggtaactatgtgaattatagtggctttgtctactataacaacacaaacggtgatttcgat

SEQ ID NO: 11955 - DNA, 75 bp, synthetic construct
  source 1..75: mol_type = other DNA
ccagtgaccctgaacagcttcgcgctctggcaattgccatggtgcaaaaagtcatggctgagaatgcagaacttc

SEQ ID NO: 11956 - DNA, 75 bp, synthetic construct
  source 1..75: mol_type = other DNA
agctgacgcaggcagaaaccacccggcttaacgccgtgcttgattacattgacgcggtgacggcaacagatacga

SEQ ID NO: 11957 - DNA, 75 bp, synthetic construct
  source 1..75: mol_type = other DNA
ttcatgccgggatgcagtggatcccactggtaccagaacagaacaatattttgccttactccgctcgtctgaagt

SEQ ID NO: 11958 - DNA, 75 bp, synthetic construct
  source 1..75: mol_type = other DNA
cgtttcggtaaaaaatgcgaatcgctggccgggatgcagcgttccctgttcgaagaggatgttgacgcggatatc

SEQ ID NO: 11959 - DNA, 75 bp, synthetic construct
  source 1..75: mol_type = other DNA
aaaggccgggcgaaaaaactcaaaaatcatttcacgccggaacagattgccgcactgcgggaaaaaatcatcagc

SEQ ID NO: 11960 - DNA, 75 bp, synthetic construct
  source 1..75: mol_type = other DNA
gaatacccggagaatttacctgccgcgccgctggtgcgctatggctggacgccacgcggcgaactggcggtggtg

SEQ ID NO: 11961 - DNA, 75 bp, synthetic construct
  source 1..75: mol_type = other DNA
gcacctgaactggacaacgattatgaagcacgcccggccaatggctgggatgtacgcgcagaaggctggctaccc

SEQ ID NO: 11962 - DNA, 75 bp, synthetic construct
  source 1..75: mol_type = other DNA
ggcctggtgtgcggaaataattttggcgaaatccgcgttccacataaaggtgatattgtcgggcaggttatcgag

SEQ ID NO: 11963 - DNA, 75 bp, synthetic construct
  source 1..75: mol_type = other DNA
cgtctctccacctgggagacacatcgggacgcacttgccctggtggataatgtgtatcaccggattgccggtatc

SEQ ID NO: 11964 - DNA, 75 bp, synthetic construct
  source 1..75: mol_type = other DNA
tccctaaagaaaggatgaagcggcgaaatcctcacctggtgtttctatccaggcaggccatggacattctcatcg

SEQ ID NO: 11965 - DNA, 75 bp, synthetic construct
  source 1..75: mol_type = other DNA
ctcgccggagatatggccgggacgacgaattgtgctgacggggcatccgcaggcgaacctgaaccgggaatggca

SEQ ID NO: 11966 - DNA, 75 bp, synthetic construct
  source 1..75: mol_type = other DNA
gtcgctatgaagtggacattagacctcgcggtcgcgacggaaaacgcatccgcaggaaattcgaaagaaaagctg

SEQ ID NO: 11967 - DNA, 75 bp, synthetic construct
  source 1..75: mol_type = other DNA
gaatatgcgaatatggtcgaagatatcagggataaggtgtcatctgagatggagaggttctttccagaaaatgat

SEQ ID NO: 11968 - DNA, 75 bp, synthetic construct
  source 1..75: mol_type = other DNA
tggcaccaaaagaaacattgcaatatcagttgatccagaaaaagcggcatcagcattggagctgtcaaaagaccg

SEQ ID NO: 11969 - DNA, 75 bp, synthetic construct
  source 1..75: mol_type = other DNA
tacagaacacgattaccggaattgagtcgataatagacgataaatcgtttgtatgtagtgaaatagcattcgaaa

SEQ ID NO: 11970 - DNA, 75 bp, synthetic construct
  source 1..75: mol_type = other DNA
tgcggtcattacgctggcgctgggctggaaggggcagccgcttttcccgaaaggggcattcacggtggacgagat

SEQ ID NO: 11971 - DNA, 75 bp, synthetic construct
  source 1..75: mol_type = other DNA
atgacggtcagatattatatcagttctgctgatttaaccgctgagaaattcgccacagcgatccgaaatcactgg

SEQ ID NO: 11972 - DNA, 75 bp, synthetic construct
  source 1..75: mol_type = other DNA
acagcacgtctgaaacactcgccgcaacaccaaaagcggtaaaagcagcatatgaccttgctaacgggaaataca

SEQ ID NO: 11973 - DNA, 75 bp, synthetic construct
  source 1..75: mol_type = other DNA
atctcgatccccgtcggcaggccatgctgctgtactttcagggataccgcgtagcccgcattgctgaaatgctgg

SEQ ID NO: 11974 - DNA, 75 bp, synthetic construct
  source 1..75: mol_type = other DNA
atggataaacctgatacagcaatgaaagctatcacccgcaatctcgatcgcgaaatctggcgtgacctgatgcaa

SEQ ID NO: 11975 - DNA, 75 bp, synthetic construct
  source 1..75: mol_type = other DNA
gtaatccagtgcgcccttgaaacaggcacctcgcttaattggctcacaaccgggcatggttcaaagcaaacttca

SEQ ID NO: 11976 - DNA, 75 bp, synthetic construct
  source 1..75: mol_type = other DNA
acaactggatatcatcaacaccgcgttcagggtaatcgaaacggttcgcccaaaactggcctgcagccggtgcga

SEQ ID NO: 11977 - DNA, 75 bp, synthetic construct
  source 1..75: mol_type = other DNA
tttgtgccgttatttctggtgcagaaggttgggaagatatagaggattttggggaaacacatctcgattttttga

SEQ ID NO: 11978 - DNA, 75 bp, synthetic construct
  source 1..75: mol_type = other DNA
ttttcccgcgaggcgctgctgcgcgccctgaaaaccggccataaccagatttttctgtcggccagtaaaacgcag

SEQ ID NO: 11979 - DNA, 75 bp, synthetic construct
  source 1..75: mol_type = other DNA
agctgacctgaacctgctgcagcaggaaagcgatacgctgaccggccgggtggatgacccggcagtgcagcgccc

SEQ ID NO: 11980 - DNA, 75 bp, synthetic construct
  source 1..75: mol_type = other DNA
tatcaccccggacccgattgggttgagaggtggatggaatatgtatcagtatccgttgaatcccatacaagtgat

SEQ ID NO: 11981 - DNA, 75 bp, synthetic construct
  source 1..75: mol_type = other DNA
tagtatcacaattagcattggcttgcactctggctatcacctctcaggctaatgcagcaaactatgatacctgga

SEQ ID NO: 11982 - DNA, 75 bp, synthetic construct
  source 1..75: mol_type = other DNA
ggacgacgaaaacgtccataaattgatggatttgtcgatcaataaaaactggatcgacaaagaagaatatccgca

SEQ ID NO: 11983 - DNA, 75 bp, synthetic construct
  source 1..75: mol_type = other DNA
atcgactgcttaacggctggcaactatcaaaactgcatacttttgaagtggctgccaggcatcagtctttcgccc

SEQ ID NO: 11984 - DNA, 75 bp, synthetic construct
  source 1..75: mol_type = other DNA
gcggggattgtttttctcccggtgcaggtcggtttgatgggattgtgggtatttttgctctcatcggtgattggt

SEQ ID NO: 11985 - DNA, 75 bp, synthetic construct
  source 1..75: mol_type = other DNA
aaaagtattaactactggatggggccgcagggatatggtcaattcttacagcgtcttgccagcgatcgaaataac

SEQ ID NO: 11986 - DNA, 75 bp, synthetic construct
  source 1..75: mol_type = other DNA
atagcagttatgacggcatcaaacgccgtaacccgaataacgtgatcgatatgaagtctcgtcagtaccagtgcg

SEQ ID NO: 11987 - DNA, 75 bp, synthetic construct
  source 1..75: mol_type = other DNA
cgattgataatctgagccgggttcgtaaaaacgccattccggcggcttcagcaatgacgattaaccgcgtggcca

SEQ ID NO: 11988 - DNA, 75 bp, synthetic construct
  source 1..75: mol_type = other DNA
gtgccctggctgaaatggaacgtgaactgattgttgaacgaacaaaagcaggactggaagctgctcgcgcacagg

SEQ ID NO: 11989 - DNA, 75 bp, synthetic construct
  source 1..75: mol_type = other DNA
tctgcgctggccgaacgaatgggattacgcccgtcagccatcagccggctggaaagtaatccttatcagactgat

SEQ ID NO: 11990 - DNA, 75 bp, synthetic construct
  source 1..75: mol_type = other DNA
gcgtcagtgacgttgccagaacgctctgctgcgcccgttcctccgtcaggcgctggattaactggttcacgctgt

SEQ ID NO: 11991 - DNA, 75 bp, synthetic construct
  source 1..75: mol_type = other DNA
ccgattgatgaagcgttgaaagccgggcgttctctggaagattttcgtatcaataagagtttgaacggagtaaca

SEQ ID NO: 11992 - DNA, 75 bp, synthetic construct
  source 1..75: mol_type = other DNA
atccgctgcaatcgacctgcgttgcgtaaacatggttgccgatctgtggcatgcgcctgcaccgaaaaatggtca

SEQ ID NO: 11993 - DNA, 75 bp, synthetic construct
  source 1..75: mol_type = other DNA
ccactgacggacacggacggcaatcccgtgatacacggtgtgaccgcggtctggcgtgccggggagcaggagcag

SEQ ID NO: 11994 - DNA, 75 bp, synthetic construct
  source 1..75: mol_type = other DNA
tttttcagttaagcacactgccacaccaacaaatacaacagtcccgtaactggaggcatgtaaagaacgagcgaa

SEQ ID NO: 11995 - DNA, 75 bp, synthetic construct
  source 1..75: mol_type = other DNA
tatctcagcgatgaaacttatcgtgtcattcttaaagcgaagattgcgattaataactgggacggacggaatgat

SEQ ID NO: 11996 - DNA, 75 bp, synthetic construct
  source 1..75: mol_type = other DNA
ttctgcactctgaccagggatggcagtatcgtatgagaagatatcaaaatatccttaaagaacatggtattaaac

SEQ ID NO: 11997 - DNA, 75 bp, synthetic construct
  source 1..75: mol_type = other DNA
aaacggcgaaagttgtttttaatgaattaagcatcgaaccggcaacagtcggggagattgcacaaaacacatacc

SEQ ID NO: 11998 - DNA, 75 bp, synthetic construct
  source 1..75: mol_type = other DNA
catcctgtccactgagggcgacggcacagcaacggaggcgttgcttaataccgttcgcgccgttctgaatgcaga

SEQ ID NO: 11999 - DNA, 75 bp, synthetic construct
  source 1..75: mol_type = other DNA
gaaaaataaaggcttcttatccgattgatatgttaggagaaattcaaagtaaatataaagttggtgaacgaatat

SEQ ID NO: 12000 - DNA, 75 bp, synthetic construct
  source 1..75: mol_type = other DNA
cgcgagctgggccggatcgagcgcacgctgttcatcctggactggctgcaaagtgttgaactgcgccgccgcgtg

SEQ ID NO: 12001 - DNA, 75 bp, synthetic construct
  source 1..75: mol_type = other DNA
aatcatttttgtgactttattgagtttaaccaccctaatataatcatgaacacaagtcagtatacatgcagttca

SEQ ID NO: 12002 - DNA, 75 bp, synthetic construct
  source 1..75: mol_type = other DNA
cgccgttttgtgaataactcttacctccacctgggagtattcagcggacgcgatctggttggcgttctccagtgg

SEQ ID NO: 12003 - DNA, 75 bp, synthetic construct
  source 1..75: mol_type = other DNA
atggaagaggtggctgccatcaaggatattggcaaccactttgagcgtgccgagtacatcaagtggaatgctttc

SEQ ID NO: 12004 - DNA, 75 bp, synthetic construct
  source 1..75: mol_type = other DNA
atgcgtgatcatttaatgacagacaaaatttggctttgtactaatgttctgcgtgcagcaattgctcgtattgag

SEQ ID NO: 12005 - DNA, 75 bp, synthetic construct
  source 1..75: mol_type = other DNA
gactgaccaggggcaggcgcagcgcctcggcgtgaaatatttcccggccatgatgctggttgacccgaaacaggg

SEQ ID NO: 12006 - DNA, 75 bp, synthetic construct
  source 1..75: mol_type = other DNA
cgtcccggaatgcgtcacccgccgtcaggcagtgattaatcaggcccgcaccctgctgaaaaacaacacacacga

SEQ ID NO: 12007 - DNA, 75 bp, synthetic construct
  source 1..75: mol_type = other DNA
tgctacacggtgaaatggcctgtgccgcgatggatgaagcatggatggaattagagggagatatgttacgcctta

SEQ ID NO: 12008 - DNA, 75 bp, synthetic construct
  source 1..75: mol_type = other DNA
ccgccgagtatgtaaagcgtctgcgtgaagagtgcctgcgggagaacaaacccctgcaccgccatacccgcttca

SEQ ID NO: 12009 - DNA, 75 bp, synthetic construct
  source 1..75: mol_type = other DNA
tcagtggagaaaaaacagtactggcagccggagcccgtcatactgtaaaggcacaggccggggaacggtatggac

SEQ ID NO: 12010 - DNA, 75 bp, synthetic construct
  source 1..75: mol_type = other DNA
ctgtttactctgcgtgagcgtgaactgcctgcattccgtctgtatcgtatgcgcgcccgtagccagtcaatggtg

SEQ ID NO: 12011 - DNA, 75 bp, synthetic construct
  source 1..75: mol_type = other DNA
atgactgttgctgatttcaaacgccccaaattggagctcccaaacggggcaaaaaaactattactgcactcttgc

SEQ ID NO: 12012 - DNA, 75 bp, synthetic construct
  source 1..75: mol_type = other DNA
tggcaggtatcagccaggtgttttgcgatccacacgtaggcgtttccctgatggccgatgccgtactgtcggtga

SEQ ID NO: 12013 - DNA, 75 bp, synthetic construct
  source 1..75: mol_type = other DNA
gtatgccatgacgtttgaagaatttgttccggcattttcttcctggtttgccggtaaccggtgtggagtggcagt

SEQ ID NO: 12014 - DNA, 75 bp, synthetic construct
  source 1..75: mol_type = other DNA
gacttatttcattaatcctgctttgttctcttatttatcccgcccgagcttcatacatcgcccccaaacaaatct

SEQ ID NO: 12015 - DNA, 75 bp, synthetic construct
  source 1..75: mol_type = other DNA
gcctgaaggagccgacccaaattattgctggagggaggttgatccagttgatgctgcaaatgaagctatgagtta

SEQ ID NO: 12016 - DNA, 75 bp, synthetic construct
  source 1..75: mol_type = other DNA
atgagtaaatataaattctctttaccccgccttgatattacaggtgtatgggtgttctccctggggctctggttt

SEQ ID NO: 12017 - DNA, 75 bp, synthetic construct
  source 1..75: mol_type = other DNA
atgaacatagggcgactgcgtgacaggataacgattcagaccctgaaacagaccagagccatgacgggcgaaata

SEQ ID NO: 12018 - DNA, 75 bp, synthetic construct
  source 1..75: mol_type = other DNA
atggctagcgaacgcagtactgatgtgcaggcatttatcggggagctggacggcggcgtatttgaaaccaaaatc

SEQ ID NO: 12019 - DNA, 75 bp, synthetic construct
  source 1..75: mol_type = other DNA
tggcggatctcgacacctgtgaacgtgcgattcatcgcgtacagaagaaagccaaaggtggcgataaagacgcga

SEQ ID NO: 12020 - DNA, 75 bp, synthetic construct
  source 1..75: mol_type = other DNA
cgcagtgaggatgatgtggctgacgacgctgaccgcacggaacaggggctggagagcgcgtcagtggaggaaatt

SEQ ID NO: 12021 - DNA, 75 bp, synthetic construct
  source 1..75: mol_type = other DNA
aatcagtgttgttagccctggcagccgaaaaagggcaggcgtgggtcgctaacgcaattactgaagaatatctgc

SEQ ID NO: 12022 - DNA, 75 bp, synthetic construct
  source 1..75: mol_type = other DNA
ctgcgcaaggtgccggccgatgcacccacggccttcatcaagccgcgctggaagccgctggtgatcaccccggaa

SEQ ID NO: 12023 - DNA, 75 bp, synthetic construct
  source 1..75: mol_type = other DNA
agtattatagaaaatgaattgagcgagtatagaataaacacttcaacatttatggtgttagtttcattatatatg

SEQ ID NO: 12024 - DNA, 75 bp, synthetic construct
  source 1..75: mol_type = other DNA
gctggaacgggaagggataccacaccggaacgcctgaagctgggaaactatcccgatctgagccttaaagcagcc

SEQ ID NO: 12025 - DNA, 75 bp, synthetic construct
  source 1..75: mol_type = other DNA
tatgggcgtcgctgccgggtgcaggttacggccagcgtgagcacagcctcgacaaactggtcactgtgtggcgca

SEQ ID NO: 12026 - DNA, 75 bp, synthetic construct
  source 1..75: mol_type = other DNA
tccttcataaatatccaatggccctatgatgagtgcattattttatctgacaaagataaacatcagcctgggtta

SEQ ID NO: 12027 - DNA, 75 bp, synthetic construct
  source 1..75: mol_type = other DNA
gtcagagggtaatccgctgaggctgatggcgaatgatggctatgtagcgaaagcgggtcaggccgtgaacaacct

SEQ ID NO: 12028 - DNA, 75 bp, synthetic construct
  source 1..75: mol_type = other DNA
attttcctttaattcaacagccgcaacttcatattttgaagcccgcaatgatgcaatggggggaaccggggtagc

SEQ ID NO: 12029 - DNA, 75 bp, synthetic construct
  source 1..75: mol_type = other DNA
atgggggattctgtgacaccggaggtactgggtgaaatgattcgccggtatttcagtcaggcactaactgaagaa

SEQ ID NO: 12030 - DNA, 75 bp, synthetic construct
  source 1..75: mol_type = other DNA
acagctattgattcctgcctgcgccttgaatacctgatggaacgccgcttcagcagaacacctttgttccgtggc

SEQ ID NO: 12031 - DNA, 75 bp, synthetic construct
  source 1..75: mol_type = other DNA
ggtgaaggtgagaaagtggttttgtgtgatgtgtgacgaagattatgagggggaaaagtgctgcccgcgttgtgg

SEQ ID NO: 12032 - DNA, 75 bp, synthetic construct
  source 1..75: mol_type = other DNA
ttcgttgaatacggtattcgtcataacacccttggcacggaatttaaagcctggcttgaagaagagatgggcatt

SEQ ID NO: 12033 - DNA, 75 bp, synthetic construct
  source 1..75: mol_type = other DNA
gcatagccttcgccatggcaggcgtcatacccgcaaaggcgaaagaggtacgattaacatagtgaacggaacacc

SEQ ID NO: 12034 - DNA, 75 bp, synthetic construct
  source 1..75: mol_type = other DNA
atgctaaaacagcaggatatgaccgaaactgccagagtggtgtttaatgaattaagcgtcaccgaaccggcgacc

SEQ ID NO: 12035 - DNA, 75 bp, synthetic construct
  source 1..75: mol_type = other DNA
atcctgcgaatggcaacacaaagccgatgtttgttggtcagggcgatcagatattcatgaacgaagtgttcctga

SEQ ID NO: 12036 - DNA, 75 bp, synthetic construct
  source 1..75: mol_type = other DNA
ttccctggtatgaggggaatatcctgtttgcctttgcagttgcggcacaggtgctgacatggtgtgaaacgcgca

SEQ ID NO: 12037 - DNA, 75 bp, synthetic construct
  source 1..75: mol_type = other DNA
cacgatgtgcacgttcgcaccccgtcagccctgacggaggaagcgctgaaacggatcggcgaactgtacgccatc

SEQ ID NO: 12038 - DNA, 75 bp, synthetic construct
  source 1..75: mol_type = other DNA
tccgccgacggtgcagcagacgctgcacctgctcaggcagaagagaagaaagaagcagctccggcagcagcacca

SEQ ID NO: 12039 - DNA, 75 bp, synthetic construct
  source 1..75: mol_type = other DNA
tcgccgactggctgcactcaacatgctggcagagcgtggcatcattccggctgactggcctgtccgtgtgaaggt

SEQ ID NO: 12040 - DNA, 75 bp, synthetic construct
  source 1..75: mol_type = other DNA
ccggacaggctgactgtttcagccagaagcgcagattttcgggatgaatttaacgttaaacgtgaggtgtcctgg

SEQ ID NO: 12041 - DNA, 75 bp, synthetic construct
  source 1..75: mol_type = other DNA
taccggggtatacagcagggaggggggctgcaggaaggcaactggaaggataggaactgagcggttcagtcgcgg

SEQ ID NO: 12042 - DNA, 75 bp, synthetic construct
  source 1..75: mol_type = other DNA
gaaacttcgccgcatcgctgacagcactgttatcaggcaactacagtgaaagcaaagtcgatatggctgaacaac

SEQ ID NO: 12043 - DNA, 75 bp, synthetic construct
  source 1..75: mol_type = other DNA
ctctgctgctgacagcctctttctccacatttgctgccgcaaaaacagaacaacagattgccgatatcgttaatc

SEQ ID NO: 12044 - DNA, 75 bp, synthetic construct
  source 1..75: mol_type = other DNA
cgtcattaatgagaagggctggcaggccatcaaatccggcgcagtggcaaccgacacggttgtgaataccggcgc

SEQ ID NO: 12045 - DNA, 75 bp, synthetic construct
  source 1..75: mol_type = other DNA
ccgggttcgacatccgggcatatcgtgacgcggcggatcagcgtgcggagatccgcacgcaggcgcccgggcctg

SEQ ID NO: 12046 - DNA, 75 bp, synthetic construct
  source 1..75: mol_type = other DNA
gtcggatggcatccctgatgagcaggataatgaccagggatgtaaagatattccctcctggcgtcgcatctgtaa

SEQ ID NO: 12047 - DNA, 75 bp, synthetic construct
  source 1..75: mol_type = other DNA
atgtcatttattaaaactttttccgggaagcatttttattatgacaggataaataaagacgacatcgttattaac

SEQ ID NO: 12048 - DNA, 75 bp, synthetic construct
  source 1..75: mol_type = other DNA
acaccagaatttcaacagcccgaatcagcagtcgtactggtattccacctgtaagctgcaggtgctgaagaacgg

SEQ ID NO: 12049 - DNA, 75 bp, synthetic construct
  source 1..75: mol_type = other DNA
catcagccttcggatttatgcagacaagctggtgatggctgccgaaggccaacacattgccgagcatccaagatt

SEQ ID NO: 12050 - DNA, 75 bp, synthetic construct
  source 1..75: mol_type = other DNA
atgagactgcgattctctgttccacttttctttttttgctgtgtgtttgttcatggtgtttttgccggtccgttt

SEQ ID NO: 12051 - DNA, 75 bp, synthetic construct
  source 1..75: mol_type = other DNA
cagcttgaagaggataaaatgggagagcagttatcgattccctgtccgggcagcccgtttacggaccgtaagtaa

SEQ ID NO: 12052 - DNA, 75 bp, synthetic construct
  source 1..75: mol_type = other DNA
cgctgggtgcctggctggatgtgtgcaccacgtccacagatggatgccactgaacacaccactaacctggctgat

SEQ ID NO: 12053 - DNA, 75 bp, synthetic construct
  source 1..75: mol_type = other DNA
cccgtaaaccgttaccggcctcacttccccgtgaaacccgggttatccggccggaagaggaatgctgtcctgcct

SEQ ID NO: 12054 - DNA, 75 bp, synthetic construct
  source 1..75: mol_type = other DNA
cgaccttttgcccgccgaagggcgaaatgttgacgagaacaactactggctgcgccgtgaagcagcgggtgatat

SEQ ID NO: 12055 - DNA, 75 bp, synthetic construct
  source 1..75: mol_type = other DNA
ctactgttagttatgagggacaaaattttgcattcacggatagccatgactggagtggttttgctgaacactttg

SEQ ID NO: 12056 - DNA, 75 bp, synthetic construct
  source 1..75: mol_type = other DNA
atgtcgatggcggcagcagttcctttgaatgcaaaatagatgaaattgatatcataggaaaaattagaagcgcga

SEQ ID NO: 12057 - DNA, 75 bp, synthetic construct
  source 1..75: mol_type = other DNA
cggagcaaccaaaaagtgaggagcagcaacaccatgacgcatctcaacaagtttgccccttatctcgcgaagctc

SEQ ID NO: 12058 - DNA, 75 bp, synthetic construct
  source 1..75: mol_type = other DNA
cctccgggataaaaaggcagagcatgaaaaggcgctggattatagcgcttccgcagctgccgagaagatcaaagg

SEQ ID NO: 12059 - DNA, 75 bp, synthetic construct
  source 1..75: mol_type = other DNA
caagactggcaatcgtttattcattatttatggccattacaatggacaaatgttgaaactccattaaatgatgag

SEQ ID NO: 12060 - DNA, 75 bp, synthetic construct
  source 1..75: mol_type = other DNA
tgatggaaaaggcggtgggcttcacttcccgttttgatttcgccattcatgtggcgcatgcccgttcgcgtggtc

SEQ ID NO: 12061 - DNA, 75 bp, synthetic construct
  source 1..75: mol_type = other DNA
caggtaataatgcagataaaactatatcacttcatgccaaacttggatataaagggaatatgcagaatttgatag

SEQ ID NO: 12062 - DNA, 75 bp, synthetic construct
  source 1..75: mol_type = other DNA
atgccatatttgtaatgtcgttcccctaactttgaaaccgggaaaatgtgtttgtgatggttgtgggaaatttta

SEQ ID NO: 12063 - DNA, 75 bp, synthetic construct
  source 1..75: mol_type = other DNA
acaagagcttgcatgaccgagctgttgatgaatttaatcgtctgcatggaacaatgattggcgagattagtgcaa

SEQ ID NO: 12064 - DNA, 75 bp, synthetic construct
  source 1..75: mol_type = other DNA
ctgtaacagttcaggggcgtgaaaactttaccattcgtaaagtcagtgtcttgcctgagtccgtgcctgccggtt

SEQ ID NO: 12065 - DNA, 75 bp, synthetic construct
  source 1..75: mol_type = other DNA
tcccgggggccgcgactgaagatgaggaagctaaatggctctctgcatctaatgagggtgatgcttcggctaaaa

SEQ ID NO: 12066 - DNA, 75 bp, synthetic construct
  source 1..75: mol_type = other DNA
gaaaaaaaccttggcatcgtgatgctggcaaacaaaagctatcctaaccctgtccgtgtcgaggcggcctggcgc

SEQ ID NO: 12067 - DNA, 75 bp, synthetic construct
  source 1..75: mol_type = other DNA
gacgctggtacattttgccgctgatgctggcgttattcaggaatttaccccgctgatgctggcggacaatggcga

SEQ ID NO: 12068 - DNA, 75 bp, synthetic construct
  source 1..75: mol_type = other DNA
gaatattatgctgcgactggttcacaaccgcatcaacagaaaattcagcaacaaaaacttcagcaacaggttatc

SEQ ID NO: 12069 - DNA, 75 bp, synthetic construct
  source 1..75: mol_type = other DNA
cattggtccggatgaagaagcgcagctcaagaaaattgcacaggcgcttcagttaccactggagcagtatctgtg

SEQ ID NO: 12070 - DNA, 75 bp, synthetic construct
  source 1..75: mol_type = other DNA
gttaaatgggttgttctggctgaagttctggtcggtgcggtcatgtacatgatgaccaaaaacgtcaagttcctg

SEQ ID NO: 12071 - DNA, 75 bp, synthetic construct
  source 1..75: mol_type = other DNA
atgcgtacacgaattgactatctggcggataaatactgttttacagagctgaatgaatcctcccgtcttcgccgg

SEQ ID NO: 12072 - DNA, 75 bp, synthetic construct
  source 1..75: mol_type = other DNA
atgaaaaacggctgctgccggcagcgtcatgctgcccggaatgtggaggctcgctgagctatctgggtgaggatg

SEQ ID NO: 12073 - DNA, 75 bp, synthetic construct
  source 1..75: mol_type = other DNA
gtgtggtgactgttacgaatgatgagacagaagtatttatggaaatggcaataaataactttagaaaacatcttc

SEQ ID NO: 12074 - DNA, 75 bp, synthetic construct
  source 1..75: mol_type = other DNA
catggttcggaagaaaacaccgcgataatacgctcaccctgaagcgtttttcctccggtgtggggttctggtgtc

SEQ ID NO: 12075 - DNA, 75 bp, synthetic construct
  source 1..75: mol_type = other DNA
aaatggttttgaccttcagggcggccctgccgccccttggactcgtggcaataactgtccccgtgtacaggaaac

SEQ ID NO: 12076 - DNA, 75 bp, synthetic construct
  source 1..75: mol_type = other DNA
cagtcctcagaagcaaagccggttgcggcatcactgccgcgcctggctgaagggaacttccggacaatgccggtg

SEQ ID NO: 12077 - DNA, 75 bp, synthetic construct
  source 1..75: mol_type = other DNA
aggccaccatgtgtgagaagctgcacgaactcgcagaagaactccagaacagcatacagacacgctttgaagtag

SEQ ID NO: 12078 - DNA, 75 bp, synthetic construct
  source 1..75: mol_type = other DNA
gggcgatactggtaacgaataatacaagagaatttgagcgggtgcctgacctggtgctggaagactgggtgaagt

SEQ ID NO: 12079 - DNA, 75 bp, synthetic construct
  source 1..75: mol_type = other DNA
gtgtttttcactgatattcagggaacggttatgtgaactgaatattcacaggggaaatacagtggtgcaggtaac

SEQ ID NO: 12080 - DNA, 75 bp, synthetic construct
  source 1..75: mol_type = other DNA
atgtcctcacgtaaagagcttgccaatgctattcgtgcgctgagcatggacgcagtacagaaagccaaatccggt

SEQ ID NO: 12081 - DNA, 75 bp, synthetic construct
  source 1..75: mol_type = other DNA
tatttcagttggtgctgccggactggataattttatcaatattcgaaccggctccattgatgccattttcaatct

SEQ ID NO: 12082 - DNA, 75 bp, synthetic construct
  source 1..75: mol_type = other DNA
cacactgaacacaaccatccaggcagataactccagcgtcacgctgggcgacagtcgggtatttatcgacaaaaa

SEQ ID NO: 12083 - DNA, 75 bp, synthetic construct
  source 1..75: mol_type = other DNA
tcacaatggactgacttgcgaagccgatacactcggctcctgtggctatgtctacatcgctatttatcccgacca

SEQ ID NO: 12084 - DNA, 75 bp, synthetic construct
  source 1..75: mol_type = other DNA
atgttgcttaatatgatgtgtggtcgtcggctgtcggcaatcagtttgtgcctggccgtaacattcgctccactg

SEQ ID NO: 12085 - DNA, 75 bp, synthetic construct
  source 1..75: mol_type = other DNA
ggagcgcgctgtccgaaggatgctgcagcgaccggagggcatcgtgatcctctctggccccaccggttccggaaa

SEQ ID NO: 12086 - DNA, 75 bp, synthetic construct
  source 1..75: mol_type = other DNA
aagccgcagacctgattgttaaaggtatggaaggcgcaatcaatgcgaagaccgtaacctatgacttcgagcgtc

SEQ ID NO: 12087 - DNA, 75 bp, synthetic construct
  source 1..75: mol_type = other DNA
tgtcgcaatcgcgctgattatggcggcattatttgcaactatattatttaccattgtgtctgtatttatctggca

SEQ ID NO: 12088 - DNA, 75 bp, synthetic construct
  source 1..75: mol_type = other DNA
gaaaaagtgcgcgcgcgacgcggacgcccgccaaaagatgaagtccgtctggttccgcgtaagcgccccatctgc

SEQ ID NO: 12089 - DNA, 75 bp, synthetic construct
  source 1..75: mol_type = other DNA
ttctttggaaccttaaagtcggagtgtttttatcttgatgagttcagtaatataagcgaactgaaggatgctgtt

SEQ ID NO: 12090 - DNA, 75 bp, synthetic construct
  source 1..75: mol_type = other DNA
tgctgctggccccgggatccgtcagtgaaatgcagagctatattccggaaaaccgctgttaccgtgcaaccctgg

SEQ ID NO: 12091 - DNA, 75 bp, synthetic construct
  source 1..75: mol_type = other DNA
ttacattaactaacgaaatggctgacatggtgcgcgcccgtgtggcttccggtgcctatgcttcagaaagcgagg

SEQ ID NO: 12092 - DNA, 75 bp, synthetic construct
  source 1..75: mol_type = other DNA
aagtaccgccgacaccctgaatatcatcagcgccggggtacaggatatgcagcaggtgctggcgcaactccgcgt

SEQ ID NO: 12093 - DNA, 75 bp, synthetic construct
  source 1..75: mol_type = other DNA
cgtgactgactccgttcgatgcatggataaaccggaagaagcaaaaaagaatatcacccgtcttgccgaccggaa

SEQ ID NO: 12094 - DNA, 75 bp, synthetic construct
  source 1..75: mol_type = other DNA
tgccaccctccgctgccctgagcggtatacgctgcagcaccgcacatatcacggaaacagacaacgcctggctgt

SEQ ID NO: 12095 - DNA, 75 bp, synthetic construct
  source 1..75: mol_type = other DNA
atgcgacggaaaatagtggtgctttttgccctgacagcagggctgtatatttctgcccatgcttcggaaaatatg

SEQ ID NO: 12096 - DNA, 75 bp, synthetic construct
  source 1..75: mol_type = other DNA
gactgaactcattaaaagagattaaagggcgttctctcatgcttcatgctggcggtgataaccatcatgaccatc

SEQ ID NO: 12097 - DNA, 75 bp, synthetic construct
  source 1..75: mol_type = other DNA
tcgcggcatcgaacgaacgtacacaaaagatttgctcgtggaggtttacctgaatggtactggcggtggtctgag

SEQ ID NO: 12098 - DNA, 75 bp, synthetic construct
  source 1..75: mol_type = other DNA
aacactcctgaaaaccgccagttcctgaagcagcaggaaaatttaagcagacaactgcgtgaaaaacctgaccat

SEQ ID NO: 12099 - DNA, 75 bp, synthetic construct
  source 1..75: mol_type = other DNA
aaggccagaaaaagggcttcacgttttatgcagacatcaacaatgacagcagctttgatatcagcatcagcctga

SEQ ID NO: 12100 - DNA, 75 bp, synthetic construct
  source 1..75: mol_type = other DNA
ggatactctgctcccattgctcctaatcgtgctgaaaatgcctatgcggattacgttttggatataggtaagcga

SEQ ID NO: 12101 - DNA, 75 bp, synthetic construct
  source 1..75: mol_type = other DNA
ctgacggaaagcatcggaggtaaaactgccccggactgggccatgaaacaggattttcgctgcggatgctggctc

SEQ ID NO: 12102 - DNA, 75 bp, synthetic construct
  source 1..75: mol_type = other DNA
tgatgatgcgaaagatgcagatacagacgagcataaacatcagcagaacgcagcagcaaagcaatcaaaaccatc

SEQ ID NO: 12103 - DNA, 75 bp, synthetic construct
  source 1..75: mol_type = other DNA
atgtctaaagaaaagtttgaacgtacaaaaccgcacgttaacgtaggtactatcggccacgttgaccaaggtaaa

SEQ ID NO: 12104 - DNA, 75 bp, synthetic construct
  source 1..75: mol_type = other DNA
accgctgaaagttctgcaaagcctgatgggacataagtccatcagttcaacggaagtctacacgaaggtttttgc

SEQ ID NO: 12105 - DNA, 75 bp, synthetic construct
  source 1..75: mol_type = other DNA
ggtgtggcggtggatatgtcccgtgaagcgtcactggagatgcagtctgaaccgaccagcgacagcagcacaccg

SEQ ID NO: 12106 - DNA, 75 bp, synthetic construct
  source 1..75: mol_type = other DNA
acaccaactggtggagcatctgtttatattgatagcggacgcccttttgtccgtagccaaaatgttgattgggga

SEQ ID NO: 12107 - DNA, 75 bp, synthetic construct
  source 1..75: mol_type = other DNA
gcactgatttttgatgtgggcgtttctaccatttatagaaaatttccggcaaataagagcaatgaatccccctga

SEQ ID NO: 12108 - DNA, 75 bp, synthetic construct
  source 1..75: mol_type = other DNA
gctggattatctggacgcactggagctggtcgataccgccagtgcgccagatattgaatggcctacgcctccggc

SEQ ID NO: 12109 - DNA, 75 bp, synthetic construct
  source 1..75: mol_type = other DNA
atcattctggttattagctcagacgctggcttatatacctacagggattgcttatgctatctggtcaggagtcgg

SEQ ID NO: 12110 - DNA, 75 bp, synthetic construct
  source 1..75: mol_type = other DNA
gacagccgcgccgtggatggcatcgacccgaaaacgggcaagccacgcgttgaccacgaaaccggaaaatcaatg

SEQ ID NO: 12111 - DNA, 75 bp, synthetic construct
  source 1..75: mol_type = other DNA
gttctcaaaaaggtgatggtgaataccggagggaacaaaaggcaggtccccgcaaaacgtcaaaaccgcggctcc

SEQ ID NO: 12112 - DNA, 75 bp, synthetic construct
  source 1..75: mol_type = other DNA
ttgttgcccggcaacatggtgtggcagccagccagttatttctctggcgcaagcaataccaggagggaagtctta

SEQ ID NO: 12113 - DNA, 75 bp, synthetic construct
  source 1..75: mol_type = other DNA
ggaggcagaataaatgatcatatcgtcaattattacctccacggggagagcctgagcaaactggcctcaggcatt

SEQ ID NO: 12114 - DNA, 75 bp, synthetic construct
  source 1..75: mol_type = other DNA
acatcgatgaatctcagcaaccagcaacaaacgcagaaaccgcgcgttttatctccggcgctaccagagcgcctg

SEQ ID NO: 12115 - DNA, 75 bp, synthetic construct
  source 1..75: mol_type = other DNA
gatgtggcagatgcctggacgctgaaaggcggtgtgaccacgggatataaggcacccagaatggggcagctacat

SEQ ID NO: 12116 - DNA, 75 bp, synthetic construct
  source 1..75: mol_type = other DNA
ctggtgggcggtctgcaatcaggtggcggacgcgcttccggaggcagtattacgtcgttctctggggttacgtgc

SEQ ID NO: 12117 - DNA, 75 bp, synthetic construct
  source 1..75: mol_type = other DNA
gggttatcggctggagtctgtcagcgcatgccgataccgcactgataagcagtgccctgcggatggcctatgaga

SEQ ID NO: 12118 - DNA, 75 bp, synthetic construct
  source 1..75: mol_type = other DNA
ccatgggggcactgattgccgcggttattctttccggtcgtgcgctggcaccacttggtcagattgcatcactgg

SEQ ID NO: 12119 - DNA, 75 bp, synthetic construct
  source 1..75: mol_type = other DNA
taacagaaaaatcagagtggtgtgtcgaacgtggtcagcgacagaacatatcacctataccgatttttcgtgtca

SEQ ID NO: 12120 - DNA, 75 bp, synthetic construct
  source 1..75: mol_type = other DNA
cagctgaaatactccgatctggcttccactgccgggtatctttccatgatgatcccgccattatcctggatgatg

SEQ ID NO: 12121 - DNA, 75 bp, synthetic construct
  source 1..75: mol_type = other DNA
tggcgcaactgccacacagacccgtgacggtaatatggtgatggatgcaagcggagcgatgtcccggttaccggt

SEQ ID NO: 12122 - DNA, 75 bp, synthetic construct
  source 1..75: mol_type = other DNA
agattgaatggatgaagcgccagacgcctcccacgctggaaagcaaaattatcctggtgcagggcagtatcccgg

SEQ ID NO: 12123 - DNA, 75 bp, synthetic construct
  source 1..75: mol_type = other DNA
aatcaaaagccagcaatggggcaagagagatggctcgctggcgatgggataagccggttattgaagcaaatgttg

SEQ ID NO: 12124 - DNA, 75 bp, synthetic construct
  source 1..75: mol_type = other DNA
gaagggccaaaacacccgccagggccaacgccaattgagttactgaaacaggaatatgagcgccggaaagcggct

SEQ ID NO: 12125 - DNA, 75 bp, synthetic construct
  source 1..75: mol_type = other DNA
caccgtcgcctgctcctcaatgaggagtcctggaatctggttatggatgcaatcactaatccgccagcaccaaat

SEQ ID NO: 12126 - DNA, 75 bp, synthetic construct
  source 1..75: mol_type = other DNA
agcttccgttatcccgccagggcgaacaacatccggcatatgcttcagagcatgaaaacctgcgtggtcctggct

SEQ ID NO: 12127 - DNA, 75 bp, synthetic construct
  source 1..75: mol_type = other DNA
cggagtatgacatgaccggggcatggttctggcgggtactgtggcggttcaggccatattacggacaggtcattc

SEQ ID NO: 12128 - DNA, 75 bp, synthetic construct
  source 1..75: mol_type = other DNA
gcgcacaaaaaatcttgcgccgctgcctcacgcccaccagcaaaacccgccacaggaaaagacggtggtcagcat

SEQ ID NO: 12129 - DNA, 75 bp, synthetic construct
  source 1..75: mol_type = other DNA
tgccttacccgccaacggtgaacacttactggcgacgtcgtggcagcacatattttgtatcaaaagccggtgagc

SEQ ID NO: 12130 - DNA, 75 bp, synthetic construct
  source 1..75: mol_type = other DNA
gtcttcggtacgaccaacggaatgaccatcagtaccgggctggagtatgggccggataacgaggccaataccggc

SEQ ID NO: 12131 - DNA, 75 bp, synthetic construct
  source 1..75: mol_type = other DNA
ttctggcttttttcatttctgacaggatattacaaaccgcagtttaagaaagaatatgaaatgattaattataat

SEQ ID NO: 12132 - DNA, 75 bp, synthetic construct
  source 1..75: mol_type = other DNA
tactgaataacgccttaaaaatcgccgttatgaaaaatggcgatttatctcttattcaacttggtcttgataaag

SEQ ID NO: 12133 - DNA, 75 bp, synthetic construct
  source 1..75: mol_type = other DNA
aaggccgcgcagccggagcctcagccgcaaccgccggagggtgacgattacgggttttcagacgatatcccgttc

SEQ ID NO: 12134 - DNA, 75 bp, synthetic construct
  source 1..75: mol_type = other DNA
atgtcctgttctcattcagttgtattactgaataacgccttaaaaatcgccgttatggaaaatggcgatttgtct

SEQ ID NO: 12135 - DNA, 75 bp, synthetic construct
  source 1..75: mol_type = other DNA
tgaaatatccccatcttgctacagcatatccatcagggaaactacctgatctccgtggtgagtttattcgtggat

SEQ ID NO: 12136 - DNA, 75 bp, synthetic construct
  source 1..75: mol_type = other DNA
tcagtcgggatggggcggtaaaccggaagtacagaccattcgtcgtctggtgaccgaaagtgaagtggcggtggc

SEQ ID NO: 12137 - DNA, 75 bp, synthetic construct
  source 1..75: mol_type = other DNA
caggccatgtcagaggcatcagcagatgaacgtctgaccgcagggatgcaggtgtttatggaatgcctggcgaaa

SEQ ID NO: 12138 - DNA, 75 bp, synthetic construct
  source 1..75: mol_type = other DNA
ccgggaccaaaatctacacacttcatggtgtggagcaacatgataatttcctgaatcagacatttgaaaatacca

SEQ ID NO: 12139 - DNA, 75 bp, synthetic construct
  source 1..75: mol_type = other DNA
aatccgagcaactgataagactgaacgcaacatggcaaacgttaagccaggtacgggctgcgcgtgagcttattg

SEQ ID NO: 12140 - DNA, 75 bp, synthetic construct
  source 1..75: mol_type = other DNA
cccactgacacgcgaagaactgatgtaccacgtcccgagtatttttggagaagaccggcacacctcccgcagtga

SEQ ID NO: 12141 - DNA, 75 bp, synthetic construct
  source 1..75: mol_type = other DNA
gttgatcaccttggaatggctgcacttggtccagaacaatattttcaggcgcaagacagaatcgttgggcgtgag

SEQ ID NO: 12142 - DNA, 75 bp, synthetic construct
  source 1..75: mol_type = other DNA
aatacagctgtttctcgaagataaattaggcgcgctgattgcaggaaatcagtggtctgatcctgaaactatcga

SEQ ID NO: 12143 - DNA, 75 bp, synthetic construct
  source 1..75: mol_type = other DNA
cgcaacacagtgactcccggtggtaaagcatgcgcatttaacgacatcattccggcagaccactgcctgcatgat

SEQ ID NO: 12144 - DNA, 75 bp, synthetic construct
  source 1..75: mol_type = other DNA
atagctttacagccagaggtggttcctatatctacagttctgaggagggattcagagatgatatcggctccttcc

SEQ ID NO: 12145 - DNA, 75 bp, synthetic construct
  source 1..75: mol_type = other DNA
cgcctctcgtgtcgtgccaacagctaatgaaaaccgtccacgtaacatcgcctttaattatattgtgagggctgc

SEQ ID NO: 12146 - DNA, 75 bp, synthetic construct
  source 1..75: mol_type = other DNA
ccatgcgcggcaagggaacgtttcttgcccgctgattgcttcgctgcaaggggagaaagagccgcgtggtgccga

SEQ ID NO: 12147 - DNA, 75 bp, synthetic construct
  source 1..75: mol_type = other DNA
ttgctgggccattcgaatcaaaaaatgaccgatatttacaacgacgcacgcggtaaggaatggaaaaaactggtc

SEQ ID NO: 12148 - DNA, 75 bp, synthetic construct
  source 1..75: mol_type = other DNA
cacgctgacgctgaacgacagtaccgtcaccacggatgtcatcgctcagcgcggcacggccctgaagctgaccgg

SEQ ID NO: 12149 - DNA, 75 bp, synthetic construct
  source 1..75: mol_type = other DNA
aaggccgcgcagcccgagcctcagcctcagccgccggagggggaggattacggattttcagacgatatcccgttc

SEQ ID NO: 12150 - DNA, 75 bp, synthetic construct
  source 1..75: mol_type = other DNA
gggactatttaagtttgcccaggaaaatccagcgtttgttgcacaggcacaacaggcgttttccggtcttaatga

SEQ ID NO: 12151 - DNA, 75 bp, synthetic construct
  source 1..75: mol_type = other DNA
gctgggtggccgtgtttgtgcttatcagcctgctggttaatgtccgcacatcggtgcagattattgataacagtg

SEQ ID NO: 12152 - DNA, 75 bp, synthetic construct
  source 1..75: mol_type = other DNA
gactatgcatccactcacaaacctaatcctgcaatgtctccatccggtttagggggaacaattaagcaaaaaccc

SEQ ID NO: 12153 - DNA, 75 bp, synthetic construct
  source 1..75: mol_type = other DNA
caatgtcatggcgccgggtgagaagaaactgctgaagcagtcactggagaaagatggtttcacacaaccggtggt

SEQ ID NO: 12154 - DNA, 75 bp, synthetic construct
  source 1..75: mol_type = other DNA
gattttgtgcctgacccgccaggctgaagaactggagtccaggggcttataccgtcgtgctgcaacggtgtggat

SEQ ID NO: 12155 - DNA, 75 bp, synthetic construct
  source 1..75: mol_type = other DNA
cggtatggctattcacaagaaatggcgacagacctatttttccacgccatccagcctgacacacagtgcttatcc

SEQ ID NO: 12156 - DNA, 75 bp, synthetic construct
  source 1..75: mol_type = other DNA
gtggtgagtggttgcgtaacaacctgaatgccattgcagcatttatgaatacccggacctgggattcaattgaaa

SEQ ID NO: 12157 - DNA, 75 bp, synthetic construct
  source 1..75: mol_type = other DNA
gggaagtgcgtgttccacaccggggagacgtagtggagaaagttattgaaggggcttacgaggtggtgggcgttt

SEQ ID NO: 12158 - DNA, 75 bp, synthetic construct
  source 1..75: mol_type = other DNA
ggaggccgtcggtgaagacgcctcgctgaaatcccgggatgtggcggcactggatacgcgtaaatccaaacagca

SEQ ID NO: 12159 - DNA, 75 bp, synthetic construct
  source 1..75: mol_type = other DNA
gttctggtccggtgcgctgttcaaccgtggacgcaacaaagctgacaaggtggacatcgacctgtcccacagcaa

SEQ ID NO: 12160 - DNA, 75 bp, synthetic construct
  source 1..75: mol_type = other DNA
atggctacttggcaaggatcaaatggcggattgttggctggtatcggcggcgtcaactcaaacgctccgagcgta

SEQ ID NO: 12161 - DNA, 75 bp, synthetic construct
  source 1..75: mol_type = other DNA
ttaatccaccagaacagggaagagccttatatgatgctgttgcttctggtactaaggaattatacgaggaagctg

SEQ ID NO: 12162 - DNA, 75 bp, synthetic construct
  source 1..75: mol_type = other DNA
gcatgaaagcgtcatcggacaataacgacttccgcgcccggggctggggctggctgggctcactggaaaccggtc

SEQ ID NO: 12163 - DNA, 75 bp, synthetic construct
  source 1..75: mol_type = other DNA
tggctggagcacatcagaaccgacgccagcgagcgcgttatgaatgacgtgacgctgacctcccgcaacatggac

SEQ ID NO: 12164 - DNA, 75 bp, synthetic construct
  source 1..75: mol_type = other DNA
ggtaataaatacatcccttacgggaaaatggcttcctggctggttgagtggaaaaacgccactgaaacgcaatgg

SEQ ID NO: 12165 - DNA, 75 bp, synthetic construct
  source 1..75: mol_type = other DNA
cacttcgagaactgggccacccgacacgtctcagcatataccgggagctggtcagggcgggtcatgaaggcctgc

SEQ ID NO: 12166 - DNA, 75 bp, synthetic construct
  source 1..75: mol_type = other DNA
cggtggtttgaccgtggtgttctgcgggaagttgtccgggaagcccgggccgaaatccgcagcatggcggatgcc

SEQ ID NO: 12167 - DNA, 75 bp, synthetic construct
  source 1..75: mol_type = other DNA
tgacgtcctgcgccagtatgtgctgatgcccggtaaagtccatgctgatgatatccccgtcccggtccaggagcc

SEQ ID NO: 12168 - DNA, 75 bp, synthetic construct
  source 1..75: mol_type = other DNA
cccgtcgccgtcggcagagtggcgtatggggaaccgtttgtcgatggtttggcaccagtgacctgggctgggaaa

SEQ ID NO: 12169 - DNA, 75 bp, synthetic construct
  source 1..75: mol_type = other DNA
attataaacggtaaaaaatgtattcactgttatgaaatcaacagtcctgacgtactgtttaatgagcttgtgttc

SEQ ID NO: 12170 - DNA, 75 bp, synthetic construct
  source 1..75: mol_type = other DNA
tccggatgaagccggtcgttacagcatggacgttgagtacggtcagtacagcgtcattctgttggtggaaggatt

SEQ ID NO: 12171 - DNA, 75 bp, synthetic construct
  source 1..75: mol_type = other DNA
atacacgaaggagttagctgatgcgaaagctgaaaatgatgctcttcggcgcaagcttgataatggtggcagggt

SEQ ID NO: 12172 - DNA, 75 bp, synthetic construct
  source 1..75: mol_type = other DNA
aatgccgggggcggtggatgtggatctggggcttgatgacagtgctctggacacagaattttccattggtggtac

SEQ ID NO: 12173 - DNA, 75 bp, synthetic construct
  source 1..75: mol_type = other DNA
ctgatctgcaccgaatgtcctggtctcagctggcaaaagccgcggaagagtcgacagtacatcatgattatgccc

SEQ ID NO: 12174 - DNA, 75 bp, synthetic construct
  source 1..75: mol_type = other DNA
tgggcgatggcggcggaacattgccaacgccggacgccaagcagacagcattggtaaatgagaaacgccgggctg

SEQ ID NO: 12175 - DNA, 75 bp, synthetic construct
  source 1..75: mol_type = other DNA
gctggtcggtatttgctgaggatgagtggcatctcacggatgcacttgcgctgactgcgggcagccgctatgaac

SEQ ID NO: 12176 - DNA, 75 bp, synthetic construct
  source 1..75: mol_type = other DNA
cgataaagtactcaaaagcctcgagacacacgttttcccctttatcggcaaccgggatatcacaacactcaatac

SEQ ID NO: 12177 - DNA, 75 bp, synthetic construct
  source 1..75: mol_type = other DNA
acagtggtgggccgattttctggatgtaaacagagaaaggtttatcagtccatttgaatatgcaaagattaataa

SEQ ID NO: 12178 - DNA, 75 bp, synthetic construct
  source 1..75: mol_type = other DNA
cgatatgagaaatggcttcaacggcctggctgcgaaagtacaaacggcgctgaaagacgatcccatgtccggcca

SEQ ID NO: 12179 - DNA, 75 bp, synthetic construct
  source 1..75: mol_type = other DNA
gatgtgctttcgataacccgattcagcgcctgattatgttgcgtgttttgatgtcgggttcttcagacggtgaag

SEQ ID NO: 12180 - DNA, 75 bp, synthetic construct
  source 1..75: mol_type = other DNA
gtaaagcgggtgagtccggtactctggcccgttcgctggatgccatcgctgatcaggcaaaacccgtgaccgttg

SEQ ID NO: 12181 - DNA, 75 bp, synthetic construct
  source 1..75: mol_type = other DNA
cggcgcggaacttactggtgaagctgcagggatagtcgcctgtctgatggtatacagccatcatgcctgccgtat

SEQ ID NO: 12182 - DNA, 75 bp, synthetic construct
  source 1..75: mol_type = other DNA
gggctcggtactcctggttcccgcacggtggctgaactggaatctgaaattctgcaactacaaccatcccggaag

SEQ ID NO: 12183 - DNA, 75 bp, synthetic construct
  source 1..75: mol_type = other DNA
atggccggctttgagtcagcctacgtggccctgtcgcgtatgaagcagcatgtgcaggtgtacaccgataaccgt

SEQ ID NO: 12184 - DNA, 75 bp, synthetic construct
  source 1..75: mol_type = other DNA
aagaagtgatcacccgcacggtgaaagtcactaacgtgggtaaaccttctgtagcggaagaacgcagcaaaatta

SEQ ID NO: 12185 - DNA, 75 bp, synthetic construct
  source 1..75: mol_type = other DNA
aacttgatgcccgtctttacgggagtgcctccacagtacctgtcgtacttactgaaaacaccgttatgtccgaag

SEQ ID NO: 12186 - DNA, 75 bp, synthetic construct
  source 1..75: mol_type = other DNA
ctgcaaaccccgtagaggcaacacccagccgacaaagaaagagctgattgataatcaggtagcggggggttttga

SEQ ID NO: 12187 - DNA, 75 bp, synthetic construct
  source 1..75: mol_type = other DNA
ccggtgctggacagtgaggggaataccaacatctccggtgtcacggtggtgttccgggcaggtgagcaggagcag

SEQ ID NO: 12188 - DNA, 75 bp, synthetic construct
  source 1..75: mol_type = other DNA
tcgttggtacgggatgctatcacggcgatgccctgacggtttatccctacaccccggagtccattattgtcgaag

SEQ ID NO: 12189 - DNA, 75 bp, synthetic construct
  source 1..75: mol_type = other DNA
gtatcatcccgaaaagagcaaagtaagaaggagaagaaggaaagagagatcgatcctcgtttcccaaatgctggt

SEQ ID NO: 12190 - DNA, 75 bp, synthetic construct
  source 1..75: mol_type = other DNA
agtacataggacgtatttatattgaagttaagcagcgcccaagatatgttttaaaggatcagaaaaatgattgca

SEQ ID NO: 12191 - DNA, 75 bp, synthetic construct
  source 1..75: mol_type = other DNA
tctttgtccgaaatgaattaattccgttacaaaaaaggcttatagaaattaatacttggctaaatgaaaaaatca

SEQ ID NO: 12192 - DNA, 75 bp, synthetic construct
  source 1..75: mol_type = other DNA
agatggcgctcgtgcaggatgaactcccgaaatacctgctggcgccggaagtcagcgccctgctccattacgtgc

SEQ ID NO: 12193 - DNA, 75 bp, synthetic construct
  source 1..75: mol_type = other DNA
acgctgaccgcacggaacaggtgcaggaaaaagcgtcagtggaggaaatcagcctgccgttgctgacgaaaatgt

SEQ ID NO: 12194 - DNA, 75 bp, synthetic construct
  source 1..75: mol_type = other DNA
tttacgcaattaacgagctgatgcccgtcatggaggccatgaagcacatcaatgactggcttggcgaagaggtga

SEQ ID NO: 12195 - DNA, 75 bp, synthetic construct
  source 1..75: mol_type = other DNA
ggccagcgtatgcgctggcatgaggcgttactgattgctgtcggggaggtcaataaagaccgttctccttatgcc

SEQ ID NO: 12196 - DNA, 75 bp, synthetic construct
  source 1..75: mol_type = other DNA
cgatgggcggcgatcttgaccagctcgctgccaactacaacgtgacacgcctgacggtgacgcctgctgataatg

SEQ ID NO: 12197 - DNA, 75 bp, synthetic construct
  source 1..75: mol_type = other DNA
gaggcggtcaggcggatgccctgatgctggaaaaaggcagttcattcacgctgaacgccggtgatacggccacgg

SEQ ID NO: 12198 - DNA, 75 bp, synthetic construct
  source 1..75: mol_type = other DNA
tgtgaggaatctgacctgctggaagcagaaatgaagctgatgcgctgcatggcgaaggtcagggcgtggacgccg

SEQ ID NO: 12199 - DNA, 75 bp, synthetic construct
  source 1..75: mol_type = other DNA
cagccgggccatgagtaaactgggaattattaacactttgtgggatggaggttctcttttcatcgacaggaaatc

SEQ ID NO: 12200 - DNA, 75 bp, synthetic construct
  source 1..75: mol_type = other DNA
gggctggctgcagctcgtgccaaaggcagagtaggtggacgccgtcctaagttgaccaccgaacagtgggcacag

SEQ ID NO: 12201 - DNA, 75 bp, synthetic construct
  source 1..75: mol_type = other DNA
cgctgaccagcgatgcaccgtcggggaaggaaggtgccgcattcatggcgctgatggcagaacactctcgttttg

SEQ ID NO: 12202 - DNA, 75 bp, synthetic construct
  source 1..75: mol_type = other DNA
ttcctcgccagaaggtggcgatcatctatgatgttggcatatcgactttgtataagaggtttccggtcggagata

SEQ ID NO: 12203 - DNA, 75 bp, synthetic construct
  source 1..75: mol_type = other DNA
cagattatcaaggaaggtggtctggcggatttcaccaccgttaaccagaaaggcaaactgcaggtgaacgccggt

SEQ ID NO: 12204 - DNA, 75 bp, synthetic construct
  source 1..75: mol_type = other DNA
ttattgaccttagtctggatgcggtccgtttcgatgagcagatgagccgggtaaggcgtcatttttcaggtctgg

SEQ ID NO: 12205 - DNA, 75 bp, synthetic construct
  source 1..75: mol_type = other DNA
aagccggtgaactggcggcaagggacagggctgagcgtgaggcgtcacagctgaagtataccggagaggcgcaga

SEQ ID NO: 12206 - DNA, 75 bp, synthetic construct
  source 1..75: mol_type = other DNA
ccggtggtgccctgattgcagacagtggtgccactgttgaggggaccaatgccagcggtaagttcagtattgatg

SEQ ID NO: 12207 - DNA, 75 bp, synthetic construct
  source 1..75: mol_type = other DNA
cagccgccgccgcactcactacgctgatgcacgcgcttattgatattgaatgcacggcagagcttgcacaaaagg

SEQ ID NO: 12208 - DNA, 75 bp, synthetic construct
  source 1..75: mol_type = other DNA
ggattttcgctgcggctgctggctcatggagaaaccggaaaccgcaatgaaagccatcacccgcaatctcgatcg

SEQ ID NO: 12209 - DNA, 75 bp, synthetic construct
  source 1..75: mol_type = other DNA
aggaagtgagcgtgccgctggcctcgctgattaaatcaccgctgaatgtgcgcacggtgccgtattctgcggagt

SEQ ID NO: 12210 - DNA, 75 bp, synthetic construct
  source 1..75: mol_type = other DNA
atggagaaacctgaaacggcaatgaaagccatcacccggaaccttgaccgtgaaatctggcgtgacctgatgcaa

SEQ ID NO: 12211 - DNA, 75 bp, synthetic construct
  source 1..75: mol_type = other DNA
acagaacgccccgtgtcacagccagtaccaaccacacagataaccagtcagatggcagggaatatccgggcatta

SEQ ID NO: 12212 - DNA, 75 bp, synthetic construct
  source 1..75: mol_type = other DNA
tccttacccgccgcagtcggtgaacgtggagcagacaggcgaacacaactggcgctactgcatcactgacgccta

SEQ ID NO: 12213 - DNA, 75 bp, synthetic construct
  source 1..75: mol_type = other DNA
aatgatgcagtggtgggctgattatttggatatgaaccgtaataaatatattacgccttatgattattcaaaata

SEQ ID NO: 12214 - DNA, 75 bp, synthetic construct
  source 1..75: mol_type = other DNA
ttccgcacaggatagcgacattttaacgaccatcggattcaggcctgacgcggcttcggtggatgacagccgtga

SEQ ID NO: 12215 - DNA, 75 bp, synthetic construct
  source 1..75: mol_type = other DNA
cgctggatatcctcattgcgtggctgcaggacaatattgactgcgaatcggaaattatctttgacaacgatgagg

SEQ ID NO: 12216 - DNA, 75 bp, synthetic construct
  source 1..75: mol_type = other DNA
tctggcgtgaagggtaccgctatatgaaggcaggtgtcatgctggctgatttcacaccatcgggtatagcgcagc

SEQ ID NO: 12217 - DNA, 75 bp, synthetic construct
  source 1..75: mol_type = other DNA
ccggggatggatggatggtatcgtttcatcatcaacgaacacagcctccagttatgaaacaagggttctaacgcc

SEQ ID NO: 12218 - DNA, 75 bp, synthetic construct
  source 1..75: mol_type = other DNA
gcagagctggcggcaaaaaaagcgcaggccagacaggcgctgtccatttatctgaacctgcccacgctggatgag

SEQ ID NO: 12219 - DNA, 75 bp, synthetic construct
  source 1..75: mol_type = other DNA
agtgcaggatattcccggtgtgctggccgtgtttgcagaacgccgtaaggacagttttggcccgtatgtccggct

SEQ ID NO: 12220 - DNA, 75 bp, synthetic construct
  source 1..75: mol_type = other DNA
atgagcagcttatttttaaccgaagatgaattgctaatattaacgggctgcaaatatgcaagccaccagcgaaaa

SEQ ID NO: 12221 - DNA, 75 bp, synthetic construct
  source 1..75: mol_type = other DNA
acacttgatgccgaagatgttgtccctacaacctccccccggtcacaacctgtagctactgcgacacctgaatca

SEQ ID NO: 12222 - DNA, 75 bp, synthetic construct
  source 1..75: mol_type = other DNA
ggtcagcttgaagcctggcaggagaatgccatgttcgatacagggcgttacaggcgtaaaaaaatccggtaccgc

SEQ ID NO: 12223 - DNA, 75 bp, synthetic construct
  source 1..75: mol_type = other DNA
ggcatacaatcctgaagataatcagggggctcgctggttgttgggttcagagctgttacgcaccggcgatcatga

SEQ ID NO: 12224 - DNA, 75 bp, synthetic construct
  source 1..75: mol_type = other DNA
ggactgaaatttgcagattacggttctttcgattacggacgtaattatggcgtaatgtacgacatcgaaggctgg

SEQ ID NO: 12225 - DNA, 75 bp, synthetic construct
  source 1..75: mol_type = other DNA
atacaaccgcatcgccacctaccagtccatcaatgacgcttatgtcgttgaagactatggcaagtgcgcgatggt

SEQ ID NO: 12226 - DNA, 75 bp, synthetic construct
  source 1..75: mol_type = other DNA
gcggttggattgtcagcctcaaggtctaaatatctggggcgtgataacgattctgcttacctgcgtatatccgtg

SEQ ID NO: 12227 - DNA, 75 bp, synthetic construct
  source 1..75: mol_type = other DNA
ttcaggaaaccagaactggttgacagactgaatgatattatcgcaaaacactatcctgacatgctggcagtatag

SEQ ID NO: 12228 - DNA, 75 bp, synthetic construct
  source 1..75: mol_type = other DNA
gaacttcgaacagcaaatcaaggccgctttgctggtgacttctcccgtacctggtacccgttatctggttgagtt

SEQ ID NO: 12229 - DNA, 75 bp, synthetic construct
  source 1..75: mol_type = other DNA
tacggatgtctggacgcataaatccgtgcagttttatccgggcaaacatccctgtgaaaaaccggcagatatgtt

SEQ ID NO: 12230 - DNA, 75 bp, synthetic construct
  source 1..75: mol_type = other DNA
gtgatggtgttgcacactatcaaagtcgacgtaatgacgagcgtttttatggacttggtgataaatccggggatc

SEQ ID NO: 12231 - DNA, 75 bp, synthetic construct
  source 1..75: mol_type = other DNA
ttaaaccgcattatctgagcgtgcttcatccctgtattgtctggttcgaggcggatattgtttatgaaaaaggag

SEQ ID NO: 12232 - DNA, 75 bp, synthetic construct
  source 1..75: mol_type = other DNA
agaccgcaaagccaaaagacaaaacatacaaaatggccgatggcggcggtttgtatctcgaggtttcggccaagg

SEQ ID NO: 12233 - DNA, 75 bp, synthetic construct
  source 1..75: mol_type = other DNA
ggcctggtgatgtggatgccggaaacattgacggcagcatccatcgctgggcaaaaaatgaagttatcgacaacg

SEQ ID NO: 12234 - DNA, 75 bp, synthetic construct
  source 1..75: mol_type = other DNA
tacgcgaactggcatttgccctgcaacgaatggcaacgcctcaaaaattactggcatttcgcgcaatgctctcgc

SEQ ID NO: 12235 - DNA, 75 bp, synthetic construct
  source 1..75: mol_type = other DNA
ctgtcaggtatgctggccgaagcgattcgtcgtatcagcaacgaagaatcgatctctgccatgttcgaacactaa

SEQ ID NO: 12236 - DNA, 75 bp, synthetic construct
  source 1..75: mol_type = other DNA
gggattggaagttaatgaagcaaagaccaggatccgccatatctcagaaggagttaattttttaggctatgaaat

SEQ ID NO: 12237 - DNA, 75 bp, synthetic construct
  source 1..75: mol_type = other DNA
tgatacccacacctgtgcgggccgtcattcaggccgtgcgcaccaccgtggtctctgtggcccgcgccgtctggg

SEQ ID NO: 12238 - DNA, 75 bp, synthetic construct
  source 1..75: mol_type = other DNA
gagaaaaaaggcgtcatcacgataaagcgtggcgtggcccgggggatcacgcttcataccgcggtgaaggacgac

SEQ ID NO: 12239 - DNA, 75 bp, synthetic construct
  source 1..75: mol_type = other DNA
ttgccctgtatcgaacaggcccgggaggatgtccgtaccctgcgtcatctgcagcttctgcaccagaaccggtga

SEQ ID NO: 12240 - DNA, 75 bp, synthetic construct
  source 1..75: mol_type = other DNA
atattgtggctgtcgggtattacggtgcagcatcccgaacccagggcagttttgtttcgacacagcgtgacagcc

SEQ ID NO: 12241 - DNA, 75 bp, synthetic construct
  source 1..75: mol_type = other DNA
cgaatgtgacgcgatgacagagcactattatcgcttacgagacttcgcgctaaaccatccagagtgcagtgccat

SEQ ID NO: 12242 - DNA, 75 bp, synthetic construct
  source 1..75: mol_type = other DNA
tgcaatggctggctaacatttctggccgcgatgacattgacgatatagacggcggtgagattcgtgagctggcgc

SEQ ID NO: 12243 - DNA, 75 bp, synthetic construct
  source 1..75: mol_type = other DNA
tggaatgcaggcagatcgcctggctgacctggaaagaatgttgcatctgctcagcggtaaaccgatccccgacaa

SEQ ID NO: 12244 - DNA, 75 bp, synthetic construct
  source 1..75: mol_type = other DNA
gctgccagtggagaccattcggttctgactcagcctacgtcattcagtcaggaggactgggagaaccgcagtttt

SEQ ID NO: 12245 - DNA, 75 bp, synthetic construct
  source 1..75: mol_type = other DNA
cgaaaacatattccgttgttattccaccggcattaattcagtcatttacacctgattcctcagcttacaccttat

SEQ ID NO: 12246 - DNA, 75 bp, synthetic construct
  source 1..75: mol_type = other DNA
cgtcaggacgcccgtgaagccataatgctgctggccccgggatccgtcagtgaaatgcaggactatattccggaa

SEQ ID NO: 12247 - DNA, 75 bp, synthetic construct
  source 1..75: mol_type = other DNA
cgcacggtgccgtattctgcggagtccgtcagcgaactggctgagtccattaagggcgttggcctgttgcagaat

SEQ ID NO: 12248 - DNA, 75 bp, synthetic construct
  source 1..75: mol_type = other DNA
tcattcgaaaaaataaaaatagtattcctgtgccggataaaagcgccatttcagcaccaccactaccaacattaa

SEQ ID NO: 12249 - DNA, 75 bp, synthetic construct
  source 1..75: mol_type = other DNA
aatgcgtactatgacttccggaatgacagcgcattcacaccatgggtatctgcagggattggctacgccagaatt

SEQ ID NO: 12250 - DNA, 75 bp, synthetic construct
  source 1..75: mol_type = other DNA
gctggctgatgttgccggtactgatgatgcagttaatgtgctgtgcctgtgtctggatatcgctgaccaggacgg

SEQ ID NO: 12251 - DNA, 75 bp, synthetic construct
  source 1..75: mol_type = other DNA
aggtcattcttaatgcggttgacaagctcacccgcccatttcgatctgcgcaggccagttcaagagaactggctg

SEQ ID NO: 12252 - DNA, 75 bp, synthetic construct
  source 1..75: mol_type = other DNA
aaaagcggcactggcgctcgggcgtcgtgcaattggcgttgagctggagactgaacgttttgagcagacagtcag

SEQ ID NO: 12253 - DNA, 75 bp, synthetic construct
  source 1..75: mol_type = other DNA
tggatacgtgattatacgagaggtgagttcagaacaatatcaaccctggagaactttcataaaaagattaacgga

SEQ ID NO: 12254 - DNA, 75 bp, synthetic construct
  source 1..75: mol_type = other DNA
ttgcgaagggtgaaaaaattaattattccgcacaggatagcgacattttaacgaccatcggattcaggcctgacg

SEQ ID NO: 12255 - DNA, 75 bp, synthetic construct
  source 1..75: mol_type = other DNA
cgtctggggaatgcccgggcagatgatctggtgcgcaataacggaatagcggccaatgcggtggcactgcataag

SEQ ID NO: 12256 - DNA, 75 bp, synthetic construct
  source 1..75: mol_type = other DNA
gattctggataatctgcctccccgcccctttaacatccggatggtcagggagacggcggacagcaccacggacca

SEQ ID NO: 12257 - DNA, 75 bp, synthetic construct
  source 1..75: mol_type = other DNA
ctggttcagtgcgccagagtatttatacaaaaactggaacaccagtcaggcaggttggccgactgggtccgggag

SEQ ID NO: 12258 - DNA, 75 bp, synthetic construct
  source 1..75: mol_type = other DNA
tttaaactcatgggaatatgtgccagaccatcgcggtgaaatcgtctataacaccgaaacgggagacgccaaaga

SEQ ID NO: 12259 - DNA, 75 bp, synthetic construct
  source 1..75: mol_type = other DNA
gggctcttggtccgctgcttcttgtcgtgctgtcaccagctgtcgcccagcaaaacgatgataatgagatcatag

SEQ ID NO: 12260 - DNA, 75 bp, synthetic construct
  source 1..75: mol_type = other DNA
gcaccgaaacaggagaatcaaaagaaatcacagctccgggtgattaccctgataatacaaccactatcgccccgt

SEQ ID NO: 12261 - DNA, 75 bp, synthetic construct
  source 1..75: mol_type = other DNA
ctgcgggacagcgggcaacagtgcggagtgaacagagtctggcgactgatgaaacgtgtcgggataaaggctcag

SEQ ID NO: 12262 - DNA, 75 bp, synthetic construct
  source 1..75: mol_type = other DNA
atggcaattcctgtttatctgtggctgcaggatgatggcggagcggatattaaaggctccgtggatgtgaaggac

SEQ ID NO: 12263 - DNA, 75 bp, synthetic construct
  source 1..75: mol_type = other DNA
ggcgtcaaaacataatctgtagcgagtgccggaagagcgaagctatgcagcgtgtactggctttctatcagggta

SEQ ID NO: 12264 - DNA, 75 bp, synthetic construct
  source 1..75: mol_type = other DNA
gacctgccgctgtccgtgtttgacccgcagtattatcgtccactaccggtgtcggttgccggaggtaaggcatcc

SEQ ID NO: 12265 - DNA, 75 bp, synthetic construct
  source 1..75: mol_type = other DNA
tcgctgatgctgcgcaagctcggcagctacccgcgccagaacggactggccgtggccctgcgcgagctgggccgg

SEQ ID NO: 12266 - DNA, 75 bp, synthetic construct
  source 1..75: mol_type = other DNA
ctgtcacaaagtcaattcagatgccaggtatgtggatatacagcgaacgccgatgtaaacggcgctcgtaacatt

SEQ ID NO: 12267 - DNA, 75 bp, synthetic construct
  source 1..75: mol_type = other DNA
ggtcgtcactatttcgccaatccggaagcgcgcagtctggcgctgggcttctaccacaaactgtcggcgttgtgc

SEQ ID NO: 12268 - DNA, 75 bp, synthetic construct
  source 1..75: mol_type = other DNA
tgttattaaatccggctccggcattgcgtgagttagatatgtcttatgcctgcaaatgtgatttctttatcccga

SEQ ID NO: 12269 - DNA, 75 bp, synthetic construct
  source 1..75: mol_type = other DNA
gttaccggttaaaagagaaacgtaaagcaggagtgctgaccaaaaacacaacgccaatcagtgatgatgaaatgg

SEQ ID NO: 12270 - DNA, 75 bp, synthetic construct
  source 1..75: mol_type = other DNA
acttaaacgccttagcggtgaggtctgcgtattcctgagcgatgaacaggaaagaagaacgcttatttctaacga

SEQ ID NO: 12271 - DNA, 75 bp, synthetic construct
  source 1..75: mol_type = other DNA
agccccccatcattgtggtgaaaaaacgtcgtactttttcgctgccttccttatccgaaaaaacagatattatcg

SEQ ID NO: 12272 - DNA, 75 bp, synthetic construct
  source 1..75: mol_type = other DNA
ttatcagaacaaaatcatcggtgttctcaaccgtgcgctgcgtgaacagtcctgctcccgggtacggcggatcct

SEQ ID NO: 12273 - DNA, 75 bp, synthetic construct
  source 1..75: mol_type = other DNA
ctattggctaaagctggcggtgacggctccaagcaaggtgctatggcaatgggcgcatactcagaggcaaatggc

SEQ ID NO: 12274 - DNA, 75 bp, synthetic construct
  source 1..75: mol_type = other DNA
gcagtacggctgtgtcggacagggcttacatattgccaaaaaactgcttccgtatatccctaataacgcggggat

SEQ ID NO: 12275 - DNA, 75 bp, synthetic construct
  source 1..75: mol_type = other DNA
gtgaaagtactcaacgagctaaggcagttttatcctcttgatgagcttctcagggctgcggagataccgcgcagt

SEQ ID NO: 12276 - DNA, 75 bp, synthetic construct
  source 1..75: mol_type = other DNA
aaaagcggcgatggcactggggcgttgtgcgattggtgttgagctggagacaggacgttttgaacagacagtcag

SEQ ID NO: 12277 - DNA, 75 bp, synthetic construct
  source 1..75: mol_type = other DNA
gcaggaagcatcagtctggcgctcattggctactggaaagctggagtactggaacatactgacaataatttaact

SEQ ID NO: 12278 - DNA, 75 bp, synthetic construct
  source 1..75: mol_type = other DNA
tccatcgcaataggggaccacagcaatacgggagcggataaagccattgcactaggaaacgcaacaaaagctact

SEQ ID NO: 12279 - DNA, 75 bp, synthetic construct
  source 1..75: mol_type = other DNA
tcgttcaggaccgcccgtcggatgtggtgtggccgtacaccaactgcgatgtggtggtggatgataacggcgtgg

SEQ ID NO: 12280 - DNA, 75 bp, synthetic construct
  source 1..75: mol_type = other DNA
agtaaaccatgaaactaccgggaaacgcccttatctggtgcgtattaatcgtgtgctgcacgttgttaatattca

SEQ ID NO: 12281 - DNA, 75 bp, synthetic construct
  source 1..75: mol_type = other DNA
ctgagccggagtggtactacgtcatcgtactggccgggcagtccaatgccatggcttacggtgaagggcttccgc

SEQ ID NO: 12282 - DNA, 75 bp, synthetic construct
  source 1..75: mol_type = other DNA
tcacgagcatcctgttctgcactctgaccagggatggcagtatcgtatgagaagatatcaaaatatccttaaaga

SEQ ID NO: 12283 - DNA, 75 bp, synthetic construct
  source 1..75: mol_type = other DNA
cgtaccttcagcagcagaaagatctggttcggtatggactttatcgaaaccgtcagtgcgctgatgaatgcaaca

SEQ ID NO: 12284 - DNA, 75 bp, synthetic construct
  source 1..75: mol_type = other DNA
atggaattacaggactggcgaaaagaacctcgtaaaaagtattcgaatgaattcaaacttcgtatggttgaactg

SEQ ID NO: 12285 - DNA, 75 bp, synthetic construct
  source 1..75: mol_type = other DNA
taacgtgatgtatcacaaaggaaacacggcgcagaacacgaagctggggtcattcggcgcatttaataacgaatg

SEQ ID NO: 12286 - DNA, 75 bp, synthetic construct
  source 1..75: mol_type = other DNA
tggtgctgtccggtggcggggcggtgggcgcttatcaggcgggagtggttaaggcactggcagagtgtggtacac

SEQ ID NO: 12287 - DNA, 75 bp, synthetic construct
  source 1..75: mol_type = other DNA
ttcatcctcagagaacggttgatgacaatgcagaagcagctggaaggggcacaggactatatccgcactcagtgc

SEQ ID NO: 12288 - DNA, 75 bp, synthetic construct
  source 1..75: mol_type = other DNA
gagtgccggaagagcgaagttatgcagcgcatattgtcgttttatcagggggatgttcggtatttattgaagtga

SEQ ID NO: 12289 - DNA, 75 bp, synthetic construct
  source 1..75: mol_type = other DNA
ggatcggatatgacccggcgaaaggtacgcagaacggcgacagcgccggatgcgtggtggtggcgccgccagccg

SEQ ID NO: 12290 - DNA, 75 bp, synthetic construct
  source 1..75: mol_type = other DNA
atgattgatgtcttaggaccggagaaacgcagacggcgtaccacacaggaaaagatcgcaattgttcagcagagc

SEQ ID NO: 12291 - DNA, 75 bp, synthetic construct
  source 1..75: mol_type = other DNA
ggagaagaagcacgcccgacacttgctgacgtacaggaacagtacttgccaagcgttttagcgcaagagtccgtc

SEQ ID NO: 12292 - DNA, 75 bp, synthetic construct
  source 1..75: mol_type = other DNA
tctacctccgcgaaggctatgagcatgagtgcttcagcccgctcgaacagtttcgtcgtaaattcagggaaatag

SEQ ID NO: 12293 - DNA, 75 bp, synthetic construct
  source 1..75: mol_type = other DNA
tgaaactgaccaaggaaacaggaagagccccctggtaccttgagcatgatgctggtaatggtgcggacctgctgg

SEQ ID NO: 12294 - DNA, 75 bp, synthetic construct
  source 1..75: mol_type = other DNA
gcggggaatctgttatcaaggaagagtgggtgaaggaactatgtcagcattgtcatggtaagggagaagtcagca

SEQ ID NO: 12295 - DNA, 75 bp, synthetic construct
  source 1..75: mol_type = other DNA
agcgggaaaaaattaaggggcaggttgttgaactcgtgcgccagaatgggcgcgagacgttacgacaacttgaag

SEQ ID NO: 12296 - DNA, 75 bp, synthetic construct
  source 1..75: mol_type = other DNA
ctctgaaaattattgaggcagccgatgaggttattagtgcgcttgccggaactaacgaggatgttcaccctggta

SEQ ID NO: 12297 - DNA, 75 bp, synthetic construct
  source 1..75: mol_type = other DNA
aggcccacgtcgtcagccggaaaagaatgttttcaccgatgaacagattgagaaactggaagaaatcttccattc

SEQ ID NO: 12298 - DNA, 75 bp, synthetic construct
  source 1..75: mol_type = other DNA
ttaccgactgtaccgggcggaagacagagcggaacgtctggcgctgcttgcatgcctgctggccgttattccggc

SEQ ID NO: 12299 - DNA, 75 bp, synthetic construct
  source 1..75: mol_type = other DNA
ttatcccttgcgcactgctactcagtgcctgtaccaccgtcacgccagcttataaagataacggcccccgcaccg

SEQ ID NO: 12300 - DNA, 75 bp, synthetic construct
  source 1..75: mol_type = other DNA
atgcctggcccgcacagttttcggcagattctttccaccaatggacgcatgcctgaggttcttctcgtgcctgat

SEQ ID NO: 12301 - DNA, 75 bp, synthetic construct
  source 1..75: mol_type = other DNA
ctccacgcgatgttccgctatccaggaaagcccgtagttacctgcaaatgctgccgacacagcttaacggtaata

SEQ ID NO: 12302 - DNA, 75 bp, synthetic construct
  source 1..75: mol_type = other DNA
gccgctgaactggctgacgatgcggctgccgccttagaggaagcagcattgtctgctgaagtctttgcatttgtt

SEQ ID NO: 12303 - DNA, 75 bp, synthetic construct
  source 1..75: mol_type = other DNA
atgtttcgaaaaataaaaattcgcaaaatgactctcaaccgggcgctggacaaatacctgaagacagtatccatc

SEQ ID NO: 12304 - DNA, 75 bp, synthetic construct
  source 1..75: mol_type = other DNA
gtgggtgtcatgtattcaatgcagctgcgcaggataaaagagtgaaaagtattgtcagccagctggcttttgctg

SEQ ID NO: 12305 - DNA, 75 bp, synthetic construct
  source 1..75: mol_type = other DNA
agcgagaaaaaattaaagggcaggttgttgaactcgtacgccagagtgggcgtgagacgttacggcaactggaag

SEQ ID NO: 12306 - DNA, 75 bp, synthetic construct
  source 1..75: mol_type = other DNA
accaccacgctgaataacggcgccatacttaccctttccgggaagacggtgaacaacgataccctgaccatccgt

SEQ ID NO: 12307 - DNA, 75 bp, synthetic construct
  source 1..75: mol_type = other DNA
tgtggctggattacctggacgcactggaactggtcgatacttccggtgcgccagatattgaatggcctacgcctc

SEQ ID NO: 12308 - DNA, 75 bp, synthetic construct
  source 1..75: mol_type = other DNA
ggggatgtgaccacgccagtggttgtgcccggcacgggggatggtggctatccgggagtggtcaccacggagcca

SEQ ID NO: 12309 - DNA, 75 bp, synthetic construct
  source 1..75: mol_type = other DNA
cagaagtgggcgggtgacatcacgtacttgcgtaccgatgagggctggttgtatctcgcagtagtcatcgacctg

SEQ ID NO: 12310 - DNA, 75 bp, synthetic construct
  source 1..75: mol_type = other DNA
cgggcgctatgttttcctgatcaaagctgccaccagcgaagtgtggtggccggaagatgcagatcatattgcttt

SEQ ID NO: 12311 - DNA, 75 bp, synthetic construct
  source 1..75: mol_type = other DNA
gagcagacagaatggcatcgcgtggtgctgttcggcaagctcgcggaagtggcaggtgaatatctgcgcaagggc

SEQ ID NO: 12312 - DNA, 75 bp, synthetic construct
  source 1..75: mol_type = other DNA
gctacggcatgggaaaacgtctgggggcggcagacgtggacaaatgggcgctgtatgccattgcgcagtactgcg

SEQ ID NO: 12313 - DNA, 75 bp, synthetic construct
  source 1..75: mol_type = other DNA
cggctaaaagaaatcgacgagtatgtagaaaaatatttgaggggcaggcttaaagatacccccccaccggagtaa

SEQ ID NO: 12314 - DNA, 75 bp, synthetic construct
  source 1..75: mol_type = other DNA
ccgcaagaatccgtttggcgatatcaaatcggatggcacggtgaaaacggctctcgaaaaccttggtttgggaga

SEQ ID NO: 12315 - DNA, 75 bp, synthetic construct
  source 1..75: mol_type = other DNA
ttacttcaggttcgtctgccagaacggatgcgtctgtggtcagtctctgggagaagtgcgtgttccgcaccgggg

SEQ ID NO: 12316 - DNA, 75 bp, synthetic construct
  source 1..75: mol_type = other DNA
attcagcaccaccattaacaatgcgctggcactgaaagcgccgctgtcgagtccggcacttaccggaacgccaac

SEQ ID NO: 12317 - DNA, 75 bp, synthetic construct
  source 1..75: mol_type = other DNA
gttgccagcggcgatgtatacaactctggttacgggttattcccgtctgaacaggcgcgtaaggactggcaaaat

SEQ ID NO: 12318 - DNA, 75 bp, synthetic construct
  source 1..75: mol_type = other DNA
tattggtcgcgctattatcgctaagggcagtataaaagatgtcctcaattaccttggtttgggggaaggctctgc

SEQ ID NO: 12319 - DNA, 75 bp, synthetic construct
  source 1..75: mol_type = other DNA
ttttatcttgcacagcttgctgccctgggcagaccagatgccaccatcacgcgatacgacaaaagcacgttcacc

SEQ ID NO: 12320 - DNA, 75 bp, synthetic construct
  source 1..75: mol_type = other DNA
ggcacgggaatggctgattcttaacatggcgggactggagcgtgaagaattccgggtgctgtatctgaacaacca

SEQ ID NO: 12321 - DNA, 75 bp, synthetic construct
  source 1..75: mol_type = other DNA
attaccgccgaaaggaaaaatccgtatcgctggggaaaatggttttcctgcatggtctgaaattccaccaccaac

SEQ ID NO: 12322 - DNA, 75 bp, synthetic construct
  source 1..75: mol_type = other DNA
gggaagtgcgtgttccgcaccggggaaacgtggtggagaaagttattgaaggggcttacgaagtggtgggcgtgt

SEQ ID NO: 12323 - DNA, 75 bp, synthetic construct
  source 1..75: mol_type = other DNA
tgtgatagtcagttgggccatttaatgcgcagcatgtttcagggacgccgttttattcagctggatctggaagcg

SEQ ID NO: 12324 - DNA, 75 bp, synthetic construct
  source 1..75: mol_type = other DNA
gctggaagtggcgcagtggctgcaggcctgtcacgatgcaggaatggaggttcgcgtacagataaatgaaagtgc

SEQ ID NO: 12325 - DNA, 75 bp, synthetic construct
  source 1..75: mol_type = other DNA
aaaccgccagagtggtgtttaatgaattaagcgtcaccgaaccggcgaccgtcggggagattgcgcagaatactt

SEQ ID NO: 12326 - DNA, 75 bp, synthetic construct
  source 1..75: mol_type = other DNA
ggcgagagaaactattccgcgctttgcgtgagctttttgggttatttgaacacgcgccaacgatattaacctcgg

SEQ ID NO: 12327 - DNA, 75 bp, synthetic construct
  source 1..75: mol_type = other DNA
aagtggtgatgcgccaggaagccacggtgatcaccgttggcggttccgactacaaaaaactggtgaatctgggcg

SEQ ID NO: 12328 - DNA, 75 bp, synthetic construct
  source 1..75: mol_type = other DNA
caggggcagtccgtgacgctgacccgggaggggatcgtggtggacggtgcaggtaaaacgatcacgtttcgcaat

SEQ ID NO: 12329 - DNA, 75 bp, synthetic construct
  source 1..75: mol_type = other DNA
atacagtgtgtggtaagaccgctgcaaatcctgcgtgctgacgggacgtgggaaaatattggcgggatgaagtaa

SEQ ID NO: 12330 - DNA, 75 bp, synthetic construct
  source 1..75: mol_type = other DNA
cgcgagacgttacggcaactggaagccaagacaggtgcgacaagatatctgatgagcgttctcgccagagagctg

SEQ ID NO: 12331 - DNA, 75 bp, synthetic construct
  source 1..75: mol_type = other DNA
cgggcgatcaatgatgcggagtcggtactggggacaacccgccgtcgccgtcgtccgctgggagtgaggttatga

SEQ ID NO: 12332 - DNA, 75 bp, synthetic construct
  source 1..75: mol_type = other DNA
ctgggtgttgtctgtcgtgcgtcgggatctcggttttgatgacagtcacgttgtgacaatgccggaactgtgctg

SEQ ID NO: 12333 - DNA, 75 bp, synthetic construct
  source 1..75: mol_type = other DNA
ataaaacggattcggcagtactgctgccctgcattgaacaggccagggaagatatccgtaccctgcgccaactgt

SEQ ID NO: 12334 - DNA, 75 bp, synthetic construct
  source 1..75: mol_type = other DNA
cgggagatgcttcaatggtatgccgactatatggatgcgctggagaaggaggagaacgttgttcatggttcgttt

SEQ ID NO: 12335 - DNA, 75 bp, synthetic construct
  source 1..75: mol_type = other DNA
cgctggatattctgattgcgtggctacagaacaatatcgactgcgaatccggaattatcttcgacaacgatgagg

SEQ ID NO: 12336 - DNA, 75 bp, synthetic construct
  source 1..75: mol_type = other DNA
accgccgacattctgacgccacgacgtcgggaggattacggtaaagacctgtggagcgcatatcagaccatccag

SEQ ID NO: 12337 - DNA, 75 bp, synthetic construct
  source 1..75: mol_type = other DNA
gagtgcttatcagaccattcaggagaatatgctgaaaggcgggatttccggtcgcagtgccagaggaaaacgtat

SEQ ID NO: 12338 - DNA, 75 bp, synthetic construct
  source 1..75: mol_type = other DNA
ttcaggcattaatccgaattcaggaacgcaataacaacggtggtgaattacgcgagtttatttgcgcccggaaag

SEQ ID NO: 12339 - DNA, 75 bp, synthetic construct
  source 1..75: mol_type = other DNA
tgggaatacgagcaggagtggaggcatgtagttgagcaaggtaatgagttacatccttggcccgcagaattaatt

SEQ ID NO: 12340 - DNA, 75 bp, synthetic construct
  source 1..75: mol_type = other DNA
ctgaatatgcttcgcctggttcgtgcagtgatcccggttgctgttctgatgatgttgttccctgagttagctatg

SEQ ID NO: 12341 - DNA, 75 bp, synthetic construct
  source 1..75: mol_type = other DNA
ggtgttctgcagccaggggcacgacatcatccggggaaatctgcgcgtcaggcaggcgctggagaaagtggccgc

SEQ ID NO: 12342 - DNA, 75 bp, synthetic construct
  source 1..75: mol_type = other DNA
atcacaggggatcttcaccgatcctcagtcatatattacttacgcgaccgcgctggcttatcgtggcgaaaaagc

SEQ ID NO: 12343 - DNA, 75 bp, synthetic construct
  source 1..75: mol_type = other DNA
gtgctggattacattgacgcggtgacggcaacagataccagcaccgcgccggatgtcatctggcctgaactgccg

SEQ ID NO: 12344 - DNA, 75 bp, synthetic construct
  source 1..75: mol_type = other DNA
atgagccggaaaatatttgtactttttgccctgaccacaggactgtttatttctgcccatgcttcggaaaatgtg

SEQ ID NO: 12345 - DNA, 75 bp, synthetic construct
  source 1..75: mol_type = other DNA
tcgttgtacggcgaattcgggcaggaacccttttccgacggtgcggtggaggagggcttcatcagcggggatatt

SEQ ID NO: 12346 - DNA, 75 bp, synthetic construct
  source 1..75: mol_type = other DNA
tcagcgatcgctttgtccagacgaccgacacgcaataccagtacagcgatgtgaatgtcattgccattcatcacg

SEQ ID NO: 12347 - DNA, 75 bp, synthetic construct
  source 1..75: mol_type = other DNA
cagtaaacaatggcccggtaaagccgctattggtcgtctgaaagacgaggaactggcgcaatataatttgtggct

SEQ ID NO: 12348 - DNA, 75 bp, synthetic construct
  source 1..75: mol_type = other DNA
taaaacttttgatgcccgtaaagcatttctgaatcagtgttcaacggctgatcctgctgctatatcgaaaatcat

SEQ ID NO: 12349 - DNA, 75 bp, synthetic construct
  source 1..75: mol_type = other DNA
catccgcgacagcctgaatcagcaggccatcaataacatcgccagaaagctggcacaggatttacgccgcgccca

SEQ ID NO: 12350 - DNA, 75 bp, synthetic construct
  source 1..75: mol_type = other DNA
gctgccgtggtgctggcacacaatcacccgtccggtgaagtcacacccagtaaggcagaccggcttatcaccgaa

SEQ ID NO: 12351 - DNA, 75 bp, synthetic construct
  source 1..75: mol_type = other DNA
atgggaaaaaatcaggaagaaaggaaaactcccgtcattgtggtgaaaaaacgtcgtactttttcgccaccgtcc

SEQ ID NO: 12352 - DNA, 75 bp, synthetic construct
  source 1..75: mol_type = other DNA
aaacggagaacatgtccctgaaattattctgctcaactcccatgacggtacctccagctaccagatgctgccggg

SEQ ID NO: 12353 - DNA, 75 bp, synthetic construct
  source 1..75: mol_type = other DNA
tgtcatgcagtcgctggtcctgccgccaccagcacgccaggcgctggcacaggcggcgctgacttaccgttatgg

SEQ ID NO: 12354 - DNA, 75 bp, synthetic construct
  source 1..75: mol_type = other DNA
gatggcaacactgatggagtgcgacgaaaacaatcagccgctggcaggcgcatatatcgaccgctccggactgga

SEQ ID NO: 12355 - DNA, 75 bp, synthetic construct
  source 1..75: mol_type = other DNA
gtttcatcaaaacggagtttgcgctgcagcggcatcagcagcaggggggagagatccacgcgctgttgcttgagg

SEQ ID NO: 12356 - DNA, 75 bp, synthetic construct
  source 1..75: mol_type = other DNA
ctcttcaccggcaccatcaaccgcacggaagttcatccccgggaagtgattaaacgcgccctgtatcacaatgcc

SEQ ID NO: 12357 - DNA, 75 bp, synthetic construct
  source 1..75: mol_type = other DNA
gaggaggaaatctttaccggactggcatcgttaaacgatctggttcgtcttgctgcggcaatggggactgaattt

SEQ ID NO: 12358 - DNA, 75 bp, synthetic construct
  source 1..75: mol_type = other DNA
atggcgcttacaaaagctgaaatgtcagaatatctgtttgataagcttgggcttagcaagcgggatgccaaagaa

SEQ ID NO: 12359 - DNA, 75 bp, synthetic construct
  source 1..75: mol_type = other DNA
tcctggtactccggcagtgtgcgggaacgatgaaggtaaaaagcatcggtagtctgattggtcgtagtgaggcgg

SEQ ID NO: 12360 - DNA, 75 bp, synthetic construct
  source 1..75: mol_type = other DNA
tgcgtctgcggcgggccggagagataaacggacagcatgtcccggaaatcatcctgctcaattcccatgacggta

SEQ ID NO: 12361 - DNA, 75 bp, synthetic construct
  source 1..75: mol_type = other DNA
atgaagggcgggtaatgatggacggttcccgtgatgaaatactgaaaaaactgtcagggaaacagcagaatgatg

SEQ ID NO: 12362 - DNA, 75 bp, synthetic construct
  source 1..75: mol_type = other DNA
atgctcaaacccgacagcctgcgcagggcgctgactgatgccgtcacggtgctgaaaactaaccccgatatgctg

SEQ ID NO: 12363 - DNA, 75 bp, synthetic construct
  source 1..75: mol_type = other DNA
ctaccgtatagattgtgagcgccttaatgaaattatcaatgaaaacaatcagttttcccgaaatggggaaacccg

SEQ ID NO: 12364 - DNA, 75 bp, synthetic construct
  source 1..75: mol_type = other DNA
gcccgcagacggcacttctgccactgatctggcggtggagctgaacggcatgacgtatcaggcctgccgtgggga

SEQ ID NO: 12365 - DNA, 75 bp, synthetic construct
  source 1..75: mol_type = other DNA
agactgccctgcaggcacagcaaaccgcctttaacgaactggtggacaagctgagtcatgaagacagccgccagg

SEQ ID NO: 12366 - DNA, 75 bp, synthetic construct
  source 1..75: mol_type = other DNA
atgagcagaaagaacctgtggtggccattgcgccatctttatccactaccactcagaccagagtcagtgccagct

SEQ ID NO: 12367 - DNA, 75 bp, synthetic construct
  source 1..75: mol_type = other DNA
aggatgaagtgctgaggctgaaacaaatcagcggactgactgagctgtttcaggatgaagatttcagtccggcat

SEQ ID NO: 12368 - DNA, 75 bp, synthetic construct
  source 1..75: mol_type = other DNA
aaaaatcacataaattctgggcggtggagcaacagggaaataaactgcatatcagttggggaaagatcggtacca

SEQ ID NO: 12369 - DNA, 75 bp, synthetic construct
  source 1..75: mol_type = other DNA
gctatgacgtataccaaaagcaaaacatttaaaacagaaacaggcgcacgtcgctggcttgccagaaatacttgc

SEQ ID NO: 12370 - DNA, 75 bp, synthetic construct
  source 1..75: mol_type = other DNA
tgctcagtttctgcaccgcgtgcagcatccacggcgttcagacccgcgagtatggtcacacgtcacgcagtccgc

SEQ ID NO: 12371 - DNA, 75 bp, synthetic construct
  source 1..75: mol_type = other DNA
aatgacaaggattgtcacacacaatggaacaaaaggtatcttttgggattttagcgatctttacggtggaacatt

SEQ ID NO: 12372 - DNA, 75 bp, synthetic construct
  source 1..75: mol_type = other DNA
cgcattgaaatggagaatgaaatattaaaaaaggctacaaccgcgctcttgatgtcagactccctgaacagttct

SEQ ID NO: 12373 - DNA, 75 bp, synthetic construct
  source 1..75: mol_type = other DNA
gttcgtcagcatgagcgggataccgggagtggtgatggtggactcaccaccgctgaacgtcagcgtctgaaagag

SEQ ID NO: 12374 - DNA, 75 bp, synthetic construct
  source 1..75: mol_type = other DNA
agcggatatctgttacgtaccgatgcgaggtcatacccggttctgcggcttaaacgcctggggctatcaaaaacg

SEQ ID NO: 12375 - DNA, 75 bp, synthetic construct
  source 1..75: mol_type = other DNA
gtccttcagttatgccaatgctgaggatgagcaaaaaacgcgctacagcgatacccgctggcatgaagattccgt

SEQ ID NO: 12376 - DNA, 75 bp, synthetic construct
  source 1..75: mol_type = other DNA
agggagatgatgcagtggtatgcggactatataaacgctaatcataattcatgtatttctttgctggtgaacgct

SEQ ID NO: 12377 - DNA, 75 bp, synthetic construct
  source 1..75: mol_type = other DNA
tgcgtatcattaccgataacctcaaacaggaagagcacgcgattgtccaggtggaagaaatgcaggcggtaaatg

SEQ ID NO: 12378 - DNA, 75 bp, synthetic construct
  source 1..75: mol_type = other DNA
aacggtcgagtacggcggggaaagatgtgcctgcggggtataaactgactgaggtgggcgtgattcctgaggatt

SEQ ID NO: 12379 - DNA, 75 bp, synthetic construct
  source 1..75: mol_type = other DNA
agttcgggcatggcagtgcacaacatgtgcgtgccggcttccgtctgggcagccacaacgatatgaactttggta

SEQ ID NO: 12380 - DNA, 75 bp, synthetic construct
  source 1..75: mol_type = other DNA
acctgaaagaaatctggagtcctctgacctatgatgaacgtgaactgtttaaagacattaatcaaaaattactga

SEQ ID NO: 12381 - DNA, 75 bp, synthetic construct
  source 1..75: mol_type = other DNA
tttccccttttatcagtatgccatgacatttgaagaatttgttcccgcattttcttcctggtttgccagtaacag

SEQ ID NO: 12382 - DNA, 75 bp, synthetic construct
  source 1..75: mol_type = other DNA
gttgggcggcgatgctatcgcccgcggcgaaattaagctcagcgatccggtcacgaaatactggccagaactgac

SEQ ID NO: 12383 - DNA, 75 bp, synthetic construct
  source 1..75: mol_type = other DNA
acacagccaagccaaaagagaaggcttacaagctggccgatggtggcggtttgtatctcttggtaaaacctaatg

SEQ ID NO: 12384 - DNA, 75 bp, synthetic construct
  source 1..75: mol_type = other DNA
cgctgcgtgcccgctgcccgtattttgaaaaccgggtggcaggcgcggcccagttcaaaaatctgccggaggtcg

SEQ ID NO: 12385 - DNA, 75 bp, synthetic construct
  source 1..75: mol_type = other DNA
catcgttcagcgatatgttgtccggcttcaaagataaggtgacatcatcccttaatagcgcggccagctcagtta

SEQ ID NO: 12386 - DNA, 75 bp, synthetic construct
  source 1..75: mol_type = other DNA
acctttcacgcgaacgctgtcagttaatactgacccagcttgttatggcgggtctggcagactatcagttcggtt

SEQ ID NO: 12387 - DNA, 75 bp, synthetic construct
  source 1..75: mol_type = other DNA
cgctcgtagtaagcgtttctgagattcacaatgaaagattaggaacatcacgacgtaactacatggttaaaaaaa

SEQ ID NO: 12388 - DNA, 75 bp, synthetic construct
  source 1..75: mol_type = other DNA
aaaccgccagagtggtgtttaatgaattaagcgttaccgaaccggcgacagtcggggagattgcgcagaatactt

SEQ ID NO: 12389 - DNA, 75 bp, synthetic construct
  source 1..75: mol_type = other DNA
aaacagaatgggtgccagcgaatggttacgtcgacaaggacgaggcccggcagcaaattaatgattacatattga

SEQ ID NO: 12390 - DNA, 75 bp, synthetic construct
  source 1..75: mol_type = other DNA
gttaagacacagccgtgtgcatgttgtggaaagcctgctgatgatccccaccacctgataggccacggtcagggt

SEQ ID NO: 12391 - DNA, 75 bp, synthetic construct
  source 1..75: mol_type = other DNA
atgaaaaaaagtgtcgattttattggtgtagggacagggccatttaatctcagcattgctgcgttgtcacatcag

SEQ ID NO: 12392 - DNA, 75 bp, synthetic construct
  source 1..75: mol_type = other DNA
atgaaaaagttcgaaaacataactgttctccatgttgatgactttgattatacaaacccggaacttctcccggag

SEQ ID NO: 12393 - DNA, 75 bp, synthetic construct
  source 1..75: mol_type = other DNA
ccggtaagggtgcgaaatccatgatgcatgcgtttcttgctctggggctggacggtcgtacggtgagaaatctgt

SEQ ID NO: 12394 - DNA, 75 bp, synthetic construct
  source 1..75: mol_type = other DNA
cgggatacgcgcaacgagcaggtcatactgaaccagatcgtcgaccgcagaacggcatcactgcgcagtgtcggg

SEQ ID NO: 12395 - DNA, 75 bp, synthetic construct
  source 1..75: mol_type = other DNA
gccgtgttcgcggctgccgctctacaaccacagacccgtcaggctactgcgaaagccacaaaagcgaaggctgga

SEQ ID NO: 12396 - DNA, 75 bp, synthetic construct
  source 1..75: mol_type = other DNA
gaaagccataaaagcgaaggctggaagcaatacaagccaggacaatctcgtcatcagcgcggttatggttcgaag

SEQ ID NO: 12397 - DNA, 75 bp, synthetic construct
  source 1..75: mol_type = other DNA
cggcactggagccggtttcagacagcccggagttccgcacactgtatccggaaaacatctgtatttttggtgttg

SEQ ID NO: 12398 - DNA, 75 bp, synthetic construct
  source 1..75: mol_type = other DNA
cgtgacagcgatgaagactggtacctgcgcagtgaaaatgcttatcgtgctgaagtccccctgtatgcctccatg

SEQ ID NO: 12399 - DNA, 75 bp, synthetic construct
  source 1..75: mol_type = other DNA
ccgtcgtatatggcgaaagttgcatctggcagttgacagcaacacacatgaaatcatctgtgcaaacctgtcgct

SEQ ID NO: 12400 - DNA, 75 bp, synthetic construct
  source 1..75: mol_type = other DNA
gcataagttgcctggaaaatgaaatcactgaactgaataaaaaactgtcggtgctgatggtttctgaagatgaaa

SEQ ID NO: 12401 - DNA, 75 bp, synthetic construct
  source 1..75: mol_type = other DNA
actgacaaagttttccctaatcccggtaattcagacctgggactgataactgcttttttcgaggcatacctggac

SEQ ID NO: 12402 - DNA, 75 bp, synthetic construct
  source 1..75: mol_type = other DNA
atgaaggtgcgatagccacaggaaccgtcattaatgataagggctggcaggtcgtcaaacccggcgcagtggcaa

SEQ ID NO: 12403 - DNA, 75 bp, synthetic construct
  source 1..75: mol_type = other DNA
atggttatcactgacctgcccggggtgggcgagagccgggacagggatgcagagtatgaagccctgtaccgtgac

SEQ ID NO: 12404 - DNA, 75 bp, synthetic construct
  source 1..75: mol_type = other DNA
tcctattccggaagcccggcggaaaatatttcccggtgtgacgttatgcgttgaatgtcaggcgtatcaggaaag

SEQ ID NO: 12405 - DNA, 75 bp, synthetic construct
  source 1..75: mol_type = other DNA
cgaagatcctctgtgtaatcgtcggcatttcattttcactaatgctggttgctctttttctttccatgggctgga

SEQ ID NO: 12406 - DNA, 75 bp, synthetic construct
  source 1..75: mol_type = other DNA
cctcaatgtctgatattgtcagggacctgtcacgcctgggctggacggatgaacgcattggtacagagcctgggg

SEQ ID NO: 12407 - DNA, 75 bp, synthetic construct
  source 1..75: mol_type = other DNA
cactatattgcgaagcaaaaaatgacaaagtcagaaaacgcctgggaattaaaggtggtttttactggactacag

SEQ ID NO: 12408 - DNA, 75 bp, synthetic construct
  source 1..75: mol_type = other DNA
ggcgttacatggcagctacgacaacaaaaactcgggcgaaaaatttttgcagggattgtgtggcgttgacctgct

SEQ ID NO: 12409 - DNA, 75 bp, synthetic construct
  source 1..75: mol_type = other DNA
tgcacaacggcggtacggcgtctggcactgttgtaaacagtgacggctggcagattatcaaggaaggtggtctgg

SEQ ID NO: 12410 - DNA, 75 bp, synthetic construct
  source 1..75: mol_type = other DNA
gaatttctcgggaacggcgacaatgtcggtaagctgttagaaggggaatattttacggtgcgtggctaccagaaa

SEQ ID NO: 12411 - DNA, 75 bp, synthetic construct
  source 1..75: mol_type = other DNA
tgccgttgaaggactggcgaatggcaatgagccgctttattatcgagttcggtgaccgcctggacggtcacttct

SEQ ID NO: 12412 - DNA, 75 bp, synthetic construct
  source 1..75: mol_type = other DNA
gcatgaaagcgtcatcggacaataacgacttccgcgcccgcggctggggctggctgggctcactggaaaccggtc

SEQ ID NO: 12413 - DNA, 75 bp, synthetic construct
  source 1..75: mol_type = other DNA
tggttaccgtggctgatgttatgagcgccctgcacgccagctatgacgacgggcagtcaggcgaaaaatttttgc

SEQ ID NO: 12414 - DNA, 75 bp, synthetic construct
  source 1..75: mol_type = other DNA
gccggacagtgaatgcgtttttgccgtggtgctgacccgtggggatgtgcgccatatggctcaggactggaacct

SEQ ID NO: 12415 - DNA, 75 bp, synthetic construct
  source 1..75: mol_type = other DNA
aacggcggacgctgggtgagttttaactgggaaagctggcgcccgaatgtcgtccagccaggaatcacaaagtaa

SEQ ID NO: 12416 - DNA, 75 bp, synthetic construct
  source 1..75: mol_type = other DNA
aattattcagtatgccaacggtatcgtcgacttccagtccgagcagtgcattggctgcggttattgcattgcggg

SEQ ID NO: 12417 - DNA, 75 bp, synthetic construct
  source 1..75: mol_type = other DNA
ttcatgggaagcaggccagaataattatacaaccggattgcactgggatgacgccaaatatttgattcagcgtcg

SEQ ID NO: 12418 - DNA, 75 bp, synthetic construct
  source 1..75: mol_type = other DNA
gaaaaaaccagaaatcaggacgtgacgtaagagaagtgggctggcggtccctgtttcaggcggtggctgagcctt

SEQ ID NO: 12419 - DNA, 75 bp, synthetic construct
  source 1..75: mol_type = other DNA
cccgaccatcacaacacttgcacaacttacatctgtagccggattacagttcactctcagtaaatccagccacta

SEQ ID NO: 12420 - DNA, 75 bp, synthetic construct
  source 1..75: mol_type = other DNA
aggcctgtggtacggggatttattgcagagcggtatgtacgaaatctgtttacagctaccggtcagatttgctgc

SEQ ID NO: 12421 - DNA, 75 bp, synthetic construct
  source 1..75: mol_type = other DNA
ggagccagaaagctacctccgctatgtccttgacgtcatagccgactggccgataaaccgggtcggcgaactgct

SEQ ID NO: 12422 - DNA, 75 bp, synthetic construct
  source 1..75: mol_type = other DNA
atgaacacaacaaaaagcagatatccttcctggtgggcatattattaccttatccgcactgcttattttatattt

SEQ ID NO: 12423 - DNA, 75 bp, synthetic construct
  source 1..75: mol_type = other DNA
aacgtttcctgggatgcgctgaacacggcatacagtgaacacccggagtggttttccgggcttgtctccggggat

SEQ ID NO: 12424 - DNA, 75 bp, synthetic construct
  source 1..75: mol_type = other DNA
accggaatacggacaggatcttcacggccctgctggcgctgctggttgtggttttgctggtgacatctgctgtca

SEQ ID NO: 12425 - DNA, 75 bp, synthetic construct
  source 1..75: mol_type = other DNA
ggctgccggacggagcggatctaagccgcatgcaggatggcagtaataagcatcgtcccggctacgacctgacct

SEQ ID NO: 12426 - DNA, 75 bp, synthetic construct
  source 1..75: mol_type = other DNA
caaatcaggtctgggtggcggacctgacgtatgttgccacacaggagggatggttgtacctcgctggcatcaaag

SEQ ID NO: 12427 - DNA, 75 bp, synthetic construct
  source 1..75: mol_type = other DNA
tccagcgtcaagggtatgaatgaacctgaagacggcatgattaatcttgttaaaaccagcaatggctggaaagcg

SEQ ID NO: 12428 - DNA, 75 bp, synthetic construct
  source 1..75: mol_type = other DNA
agcacttcgcgcaacccctggtatcctggactattcccgcgcagctatttttgcacttatccgaagcgcccaccc

SEQ ID NO: 12429 - DNA, 75 bp, synthetic construct
  source 1..75: mol_type = other DNA
atgataagggacaggaaagctgaagagctggagtcaaaagggctataccggagagctgccgcacgatggatggaa

SEQ ID NO: 12430 - DNA, 75 bp, synthetic construct
  source 1..75: mol_type = other DNA
attgttcagcgggccatgctgatggcgatggagccgatatgggagagtgattttcatacgctctcatatggcttc

SEQ ID NO: 12431 - DNA, 75 bp, synthetic construct
  source 1..75: mol_type = other DNA
ctgagcagacagcaattactgcctctgtggtacctgacgagttacgcatcggcttctggccacagcactttggct

SEQ ID NO: 12432 - DNA, 75 bp, synthetic construct
  source 1..75: mol_type = other DNA
tatcgtcagaacatggcatcaaactccggaagcgccttcaccgctggcgttggtatctctccatttgacgtcgta

SEQ ID NO: 12433 - DNA, 75 bp, synthetic construct
  source 1..75: mol_type = other DNA
gatcaattgcataacagactgcgtagcggtggggatcaaatttttccacttgagtgggccatggttttacaggat

SEQ ID NO: 12434 - DNA, 75 bp, synthetic construct
  source 1..75: mol_type = other DNA
gaaaacatcatgttctccagtcgcggctggctggtgatagatcccgtcggtctggtcggtgaagtgggctttggc

SEQ ID NO: 12435 - DNA, 75 bp, synthetic construct
  source 1..75: mol_type = other DNA
ctcgcatgggtgccttccaattaaatgaatctttacttgaacgaatcacccgtaaattacgtgacggatggaaaa

SEQ ID NO: 12436 - DNA, 75 bp, synthetic construct
  source 1..75: mol_type = other DNA
atcatgtcggtgctggcggatggggtgctggtctgcggcattatggtattgctgtggccggtgataaaaagaaac

SEQ ID NO: 12437 - DNA, 75 bp, synthetic construct
  source 1..75: mol_type = other DNA
aatatccggcagtgtttctgcctttcctgtcatggccggttgattctgcagacagatgctcagggggcgtggttt

SEQ ID NO: 12438 - DNA, 75 bp, synthetic construct
  source 1..75: mol_type = other DNA
ctgtggcactcctgctgtttctggtggtgatggtggatttcaccagcaggatcatgtcggtgctggcggatggag

SEQ ID NO: 12439 - DNA, 75 bp, synthetic construct
  source 1..75: mol_type = other DNA
aaaaaatatagaaaagctaattcagattgagcgtaatgcgaaagcacggatacgcagggtgacaaaatccagaac

SEQ ID NO: 12440 - DNA, 75 bp, synthetic construct
  source 1..75: mol_type = other DNA
cggttgtcctgctcggcgcgttgttctatcaccgcgtgagcttatttatcagcagtctgattttgctcgcctgga

SEQ ID NO: 12441 - DNA, 75 bp, synthetic construct
  source 1..75: mol_type = other DNA
tacccaggcagaatatcgctggattgaaatgttcgggcatggcaagcgaatgaatatgccgtggtggggcggttt

SEQ ID NO: 12442 - DNA, 75 bp, synthetic construct
  source 1..75: mol_type = other DNA
catcgccgatgaactgatgaccgggtgtacaaattttgcgttcagcggaaaacctggtaccgggaagaatcactt

SEQ ID NO: 12443 - DNA, 75 bp, synthetic construct
  source 1..75: mol_type = other DNA
aaacttgtcacgctaaacctcaaactcaaatcaacagcagccggtcgctaccagcttctttcacgctggtgggat

SEQ ID NO: 12444 - DNA, 75 bp, synthetic construct
  source 1..75: mol_type = other DNA
agcagagcgcggaaccagtgcaaaaagcagtaaagcggcaaaagagaaaaaagccacgaccagtaaagagggctg

SEQ ID NO: 12445 - DNA, 75 bp, synthetic construct
  source 1..75: mol_type = other DNA
gaaaaacgccgccatcagggtaacacgctggcggaatatccgtatgcgggggcgtttttccgctgtctgaacgga

SEQ ID NO: 12446 - DNA, 75 bp, synthetic construct
  source 1..75: mol_type = other DNA
atgtgtctgaggtggcggtggcttccgcacgccgcagtcgtgtggaatgggaaaacagacagcgcaagaagcagg

SEQ ID NO: 12447 - DNA, 75 bp, synthetic construct
  source 1..75: mol_type = other DNA
ctcttcacaggcaccatcaaccgcacggaagtccatccccgggaggtaattaaacgtgccctgtaccacaatgcc

SEQ ID NO: 12448 - DNA, 75 bp, synthetic construct
  source 1..75: mol_type = other DNA
agctggtcgctgttccggccggaaaaaatgccggtggcagacggcgagcgtctgagggtgacagggaaaattccc

SEQ ID NO: 12449 - DNA, 75 bp, synthetic construct
  source 1..75: mol_type = other DNA
cccttaatcatctcaaccatgcgttacagctcgatccccgctgtggcgtgaaaaaagacaaacagcagctggagc

SEQ ID NO: 12450 - DNA, 75 bp, synthetic construct
  source 1..75: mol_type = other DNA
atgcgtgatattcagatggttctggatcgttggggtgcatgggcggcgagtgatagttctggggtagactattcg

SEQ ID NO: 12451 - DNA, 75 bp, synthetic construct
  source 1..75: mol_type = other DNA
acttgaggcatgtggtgaggcgtttctggcgcaggttcgcctgcaggcggaaaagctggtcagggagatggcggc

SEQ ID NO: 12452 - DNA, 75 bp, synthetic construct
  source 1..75: mol_type = other DNA
attgcaaagaaggattcaagaacttaacgaatggcttaacatagaagttattatcttttctccatataatttatc

SEQ ID NO: 12453 - DNA, 75 bp, synthetic construct
  source 1..75: mol_type = other DNA
cggcgagctgagggttcatgccggcggtgaagcgtctgatgtcacccagaacacgggaggtgcactggttaccag

SEQ ID NO: 12454 - DNA, 75 bp, synthetic construct
  source 1..75: mol_type = other DNA
ggattgaggatactgatggccagcccctgagcaacatactgctgctggctgaccgtattgcgatgattaacccgg

SEQ ID NO: 12455 - DNA, 75 bp, synthetic construct
  source 1..75: mol_type = other DNA
ggcattaaaattatcccgctcagtgaagtggcaacgaaggacgatttttttaatatcaaaaaagccagcgccgct

SEQ ID NO: 12456 - DNA, 75 bp, synthetic construct
  source 1..75: mol_type = other DNA
tcagcctggttctgtcattgtagtcaccactcaaagcggcatgaccattcagattcataaaccaaaagaggaaaa

SEQ ID NO: 12457 - DNA, 75 bp, synthetic construct
  source 1..75: mol_type = other DNA
accccgccctgccctcgattcatgggatgctgaatatatgcaggaaaaccgctgggatgaggagtctgcttcctt

SEQ ID NO: 12458 - DNA, 75 bp, synthetic construct
  source 1..75: mol_type = other DNA
atcacctgctttgccgctacggtgtcgcgcttattgcacacggacaaaatataacgctcgccatgaaagaggggg

SEQ ID NO: 12459 - DNA, 75 bp, synthetic construct
  source 1..75: mol_type = other DNA
tggtgcatctgacacgaccgcacaaccagggccggtaaaagttaccgctgacgaagtaaacaaaattatgcaggc

SEQ ID NO: 12460 - DNA, 75 bp, synthetic construct
  source 1..75: mol_type = other DNA
atacgaagtcgacgaacgcctgattaccacaatcgacaaacaccgttcagaaaaggatgcacatcacatctatct

SEQ ID NO: 12461 - DNA, 75 bp, synthetic construct
  source 1..75: mol_type = other DNA
acatgccgacgtcgtgttgatcagtggttgcgtgttgctgagttcattttgtattcacctatgagagaagcgttc

SEQ ID NO: 12462 - DNA, 75 bp, synthetic construct
  source 1..75: mol_type = other DNA
gtgactgatcttcaacaaacgtattaccgccaggtaaagaacccgaatccggtgtttacaccccgtgaaggtgcc

SEQ ID NO: 12463 - DNA, 75 bp, synthetic construct
  source 1..75: mol_type = other DNA
tgtcgcagtggcaatcgccggtttcaatcagatgaatcgtggtggcccggcaggaaatgctgtggtgatgcacta

SEQ ID NO: 12464 - DNA, 75 bp, synthetic construct
  source 1..75: mol_type = other DNA
ccgcatgcaggatggcagtaacaggcatcgtcccggctacgacctgaccttctccgcccccaaaagtgtctccat

SEQ ID NO: 12465 - DNA, 75 bp, synthetic construct
  source 1..75: mol_type = other DNA
atgaaaatcaagcatgaacacatccgcatggcgatgaatgtctgggcgcatccggacggcgaaaaagtaccggct

SEQ ID NO: 12466 - DNA, 75 bp, synthetic construct
  source 1..75: mol_type = other DNA
gcaatatctatcggcttaatgtggaaaaacttgaagcagctgcagcggcggcgcgtgaggcatataaaccaaaaa

SEQ ID NO: 12467 - DNA, 75 bp, synthetic construct
  source 1..75: mol_type = other DNA
agcagtgacaaagtggggaaaacggggttcattgagaatgtgtacgctaatcagattgcctttggcaggctctac

SEQ ID NO: 12468 - DNA, 75 bp, synthetic construct
  source 1..75: mol_type = other DNA
cttatcagccaacaggcgatcagcagaaagacgcaatcgcacaaatcgggatcatgcagaataacgctgttaagg

SEQ ID NO: 12469 - DNA, 75 bp, synthetic construct
  source 1..75: mol_type = other DNA
tgatgccattctggatgagctgcttggtgtacaggcagagccaccgactgaagcgggagataccaccgcagagag

SEQ ID NO: 12470 - DNA, 75 bp, synthetic construct
  source 1..75: mol_type = other DNA
gatgcagaagtcttatcgcgcatcctggatatcattggcgatatgccagcatacgggtatcgccgtgtctgggcg

SEQ ID NO: 12471 - DNA, 75 bp, synthetic construct
  source 1..75: mol_type = other DNA
cttttaatgccgcagtctggcaccgtatttctcggcgataatcccataaatatgctctcatcacgccagttggcc

SEQ ID NO: 12472 - DNA, 75 bp, synthetic construct
  source 1..75: mol_type = other DNA
cattgtgatggtgctgaaaaatctcgatgccgcagaagctaaaaaacgcctggatcaacacggcggctttattcg

SEQ ID NO: 12473 - DNA, 75 bp, synthetic construct
  source 1..75: mol_type = other DNA
catgtcatccatcgacacggaatgactgatgaaaagacggcgtacgaagttgaagcagcacttattgatgcctac

SEQ ID NO: 12474 - DNA, 75 bp, synthetic construct
  source 1..75: mol_type = other DNA
atctggaagaacggcgactgatgctacagtggtgggcagattttctggatgcgaacagagaacaatgtatcagcc

SEQ ID NO: 12475 - DNA, 75 bp, synthetic construct
  source 1..75: mol_type = other DNA
ggctatccccggattattgccgccaatccgcacgtggccatcacgccggtgctgccctccgggctgttgttactg

SEQ ID NO: 12476 - DNA, 75 bp, synthetic construct
  source 1..75: mol_type = other DNA
gtggagctgacggacgccggccgggccgtggcacagcctctgctgctggcagaacaggaccgcctccgggcagaa

SEQ ID NO: 12477 - DNA, 75 bp, synthetic construct
  source 1..75: mol_type = other DNA
cgatccgctggaagtggcgcagtggctgcaggcctgtcatgacgcaggaatagaagttcgcgtacagataaatga

SEQ ID NO: 12478 - DNA, 75 bp, synthetic construct
  source 1..75: mol_type = other DNA
cgtccgggagtttgtctacaaccccaatgttaaaaacgccctggtactcaaggcctacgacattatcagccaccg

SEQ ID NO: 12479 - DNA, 75 bp, synthetic construct
  source 1..75: mol_type = other DNA
atgagatgtctagcccatattgctctggtaacggtgatacagtttatcgcctgctatctggttggttgggggaag

SEQ ID NO: 12480 - DNA, 75 bp, synthetic construct
  source 1..75: mol_type = other DNA
cctggccggttatcaccggcatcaatgccatcatcgcggcagcaggcgcaatgggggcaatcttcacgacggttg

SEQ ID NO: 12481 - DNA, 75 bp, synthetic construct
  source 1..75: mol_type = other DNA
cggggattgagatgccggattttcatcgcgaggatgactggtggcgtcacggtcagaatctctatctggataatc

SEQ ID NO: 12482 - DNA, 75 bp, synthetic construct
  source 1..75: mol_type = other DNA
taccgttttctgatgtccgcgaggtgctgccgtgcggcacatttgcttatacccgtgttccgacgatgattattc

SEQ ID NO: 12483 - DNA, 75 bp, synthetic construct
  source 1..75: mol_type = other DNA
ggctcgaagatgcggacaccacaccttgtacctttgtcgcggcaggccctaagtattttggaaaagatcaaaagc

SEQ ID NO: 12484 - DNA, 75 bp, synthetic construct
  source 1..75: mol_type = other DNA
cgagcacaccattgataacagtggctttaccacgcagcttgagcttgaagcaaaaattccggaatggatcgtaga

SEQ ID NO: 12485 - DNA, 75 bp, synthetic construct
  source 1..75: mol_type = other DNA
ccagcttctttcacgctggtgggatgcttaccgtaaacagcttggcctgaaagatttttctccagaaagccagga

SEQ ID NO: 12486 - DNA, 75 bp, synthetic construct
  source 1..75: mol_type = other DNA
aattgaagaatatgtcatggcgtatagtcaatatattaaatcaattctacctaaaagaaggaaggaacaagaaga

SEQ ID NO: 12487 - DNA, 75 bp, synthetic construct
  source 1..75: mol_type = other DNA
gatatgagtacaaggaacgtttcccgcagatgattcggtatcgggttaaagaatgggaaaaagttgccggtgtgc

SEQ ID NO: 12488 - DNA, 75 bp, synthetic construct
  source 1..75: mol_type = other DNA
ttccaacgctgaagctctggctgttatcgctgaagctgttaaagctgctggttatgaactgggcaaagacatcac

SEQ ID NO: 12489 - DNA, 75 bp, synthetic construct
  source 1..75: mol_type = other DNA
cggcagtgctacgcgccaggggagcagttcgccgacccggtttatcggccagtcggctatgacgtcaaggacata

SEQ ID NO: 12490 - DNA, 75 bp, synthetic construct
  source 1..75: mol_type = other DNA
cggtattacccgttacgtcactgaaatccttgtgaaaaccacgggcaccatgcagatgctggggagtgcaccaca

SEQ ID NO: 12491 - DNA, 75 bp, synthetic construct
  source 1..75: mol_type = other DNA
ccacctgaaatagcaaacctttatcttgggaaaaaaataccagatgaattaagaaaaaaaggagctatgtctcca

SEQ ID NO: 12492 - DNA, 75 bp, synthetic construct
  source 1..75: mol_type = other DNA
accagccgaaagacaaaatgacggaggtgattatctttgcgggtagtgatgcctgggcacatgcgaaagagtgga

SEQ ID NO: 12493 - DNA, 75 bp, synthetic construct
  source 1..75: mol_type = other DNA
aagattacaaggcaacagaatcagagcttgaaacgcatctgaataaacctcctgttccgccgcagatacgtcgaa

SEQ ID NO: 12494 - DNA, 75 bp, synthetic construct
  source 1..75: mol_type = other DNA
gtgtcaccctggtctgtccgtactgcagccagcatttttcggcggacgtgcccgtcatggaattctcccgccctg

SEQ ID NO: 12495 - DNA, 75 bp, synthetic construct
  source 1..75: mol_type = other DNA
ttcctctcagcacagagcaacaggccgcatggcgggcggtggcggagacggaaaaacgccgccatcagggtaaca

SEQ ID NO: 12496 - DNA, 75 bp, synthetic construct
  source 1..75: mol_type = other DNA
ttctgatacctctgataacagcaacaatagctcttacaggatgcacaccaaagaccagcctggaacgacataccc

SEQ ID NO: 12497 - DNA, 75 bp, synthetic construct
  source 1..75: mol_type = other DNA
atttgaacattatcttgattatattattgataataataaaaaccttatccctatccaagaagtgatgcctatcat

SEQ ID NO: 12498 - DNA, 75 bp, synthetic construct
  source 1..75: mol_type = other DNA
aaagctggctaaagaccagaacggcgcagatattcctgatcctgcgctgtttgtcaaaaaccttggtttggggga

SEQ ID NO: 12499 - DNA, 75 bp, synthetic construct
  source 1..75: mol_type = other DNA
caaagcgccaacgccagcggaggggaataacaccacgcagattgcgaccaccgcgtttgttcaggcggcactgat

SEQ ID NO: 12500 - DNA, 75 bp, synthetic construct
  source 1..75: mol_type = other DNA
aaacgggaatagctggtggagattttgaggatgtattcgaagtggacgatgacgcaacacctgatgaaattcatg

SEQ ID NO: 12501 - DNA, 75 bp, synthetic construct
  source 1..75: mol_type = other DNA
actaacgaggatgttcaccctggtagcgataacatgctacgcctgtgggatgacctgaatgaccgttacgcgccg

SEQ ID NO: 12502 - DNA, 75 bp, synthetic construct
  source 1..75: mol_type = other DNA
acttaacgccgtgctggattacattgacgcggtgacggtaacagataccagcaccgcgccggatgtcatctggcc

SEQ ID NO: 12503 - DNA, 75 bp, synthetic construct
  source 1..75: mol_type = other DNA
ggcttaggtattccggcaataacgaggagtaaaaacattgctgacagttggttatcaaagggctggtatgttcag

SEQ ID NO: 12504 - DNA, 75 bp, synthetic construct
  source 1..75: mol_type = other DNA
acggagtgttcattgtgacactgcacgatttcgaccttgaaagccgtgctgaaacccgggaactggcaatatctc

SEQ ID NO: 12505 - DNA, 75 bp, synthetic construct
  source 1..75: mol_type = other DNA
aggaattgcagcagcaggcagaaaatcggaaagccagacttcttgcagatgctgaatccgtgattttgccgctgg

SEQ ID NO: 12506 - DNA, 75 bp, synthetic construct
  source 1..75: mol_type = other DNA
gcaaaatctgtaaggaatggtttcacccggcattctcaaatcagtggtggtgcagcccggaacacggaactaaat

SEQ ID NO: 12507 - DNA, 75 bp, synthetic construct
  source 1..75: mol_type = other DNA
gcgcagttgcacgtcattctcagacgagccgatgactggaaggacggccgccgcagccgtcacacggatgatacg

SEQ ID NO: 12508 - DNA, 75 bp, synthetic construct
  source 1..75: mol_type = other DNA
aggacacggcaccggaggcggtgtacgcccgtcttcacgaacagctgggtgagggaacggtcatccacattgtgc

SEQ ID NO: 12509 - DNA, 75 bp, synthetic construct
  source 1..75: mol_type = other DNA
tcagacctggtagggaaggttgaaatgactgagtggttagttgactttgctgcccagcttcgcaaaggaggcaac

SEQ ID NO: 12510 - DNA, 75 bp, synthetic construct
  source 1..75: mol_type = other DNA
attaacgtgaaataccgttatgaatttacggacacgctggggctgattacgtctttcagttatgccgacgcagaa

SEQ ID NO: 12511 - DNA, 75 bp, synthetic construct
  source 1..75: mol_type = other DNA
aatcacaactccgggtgattaccccgaaaaaacaaccactatcgccccgttaacgccatacgataaatgggatgg

SEQ ID NO: 12512 - DNA, 75 bp, synthetic construct
  source 1..75: mol_type = other DNA
cgtttccgtctgagtggacacggtcacagcatggttatcactgacctgcccggggtgggcgagagccgggagcgg

SEQ ID NO: 12513 - DNA, 75 bp, synthetic construct
  source 1..75: mol_type = other DNA
ctgtcaccaggccatgcctacgggatgtttatggaacgttttaacgagttatcggagttacgcaaatgcgcatga

SEQ ID NO: 12514 - DNA, 75 bp, synthetic construct
  source 1..75: mol_type = other DNA
aaagtgattccactggcaccgggccatgcctacgggatgtttatggaacgcttcaacgagttatcggaattacgc

SEQ ID NO: 12515 - DNA, 75 bp, synthetic construct
  source 1..75: mol_type = other DNA
gcgtgcaggaaaatcattaccccgtttctggcccggagattttttcccgacgttctatggctgtcatctggctgt

SEQ ID NO: 12516 - DNA, 75 bp, synthetic construct
  source 1..75: mol_type = other DNA
tggtaccagatacgtattcgcggtgaggacacggcaccggaggcggtgtacgcccgtcttcacgaacagctgggt

SEQ ID NO: 12517 - DNA, 75 bp, synthetic construct
  source 1..75: mol_type = other DNA
cacgtaacgattcactggctgcccggaccgatacctggttgcagtcgttgctggtctggtcacccggacagcggg

SEQ ID NO: 12518 - DNA, 75 bp, synthetic construct
  source 1..75: mol_type = other DNA
gtctgatagtgcggaaaaacggtgctgaaatttataaccgtaccgcgctggataatacgctgatttacagtggcg

SEQ ID NO: 12519 - DNA, 75 bp, synthetic construct
  source 1..75: mol_type = other DNA
aggctgtaacgaacattattgaggcattcgggaaagacttttcgcaaggttcaggtgcgatggccgggcgatggt

SEQ ID NO: 12520 - DNA, 75 bp, synthetic construct
  source 1..75: mol_type = other DNA
ttacggacacactggggctggtgacgtcattcagctatgcaggagacaagaatcgccagcttacccgttacagcg

SEQ ID NO: 12521 - DNA, 75 bp, synthetic construct
  source 1..75: mol_type = other DNA
gtgatgcaggtgaaaccgaattgtctgcccgtcttaatgagccgctggcaaatggtgccgtgatccacatcgtgc

SEQ ID NO: 12522 - DNA, 75 bp, synthetic construct
  source 1..75: mol_type = other DNA
atgccgtctgtatcccgataccgcacctggcttgccgtgcctgcagatgaaatagaagatctcaaacaagcgcat

SEQ ID NO: 12523 - DNA, 75 bp, synthetic construct
  source 1..75: mol_type = other DNA
ctgacaaaattaacgacagaaatcgccagctattgcgctgatgaatttaagaagctgaacgacaaaaggagctgg

SEQ ID NO: 12524 - DNA, 75 bp, synthetic construct
  source 1..75: mol_type = other DNA
ctggtcgtgcataccctgcctggtgaccgttacggtgtcgccgcaggtggtcgccgactggcagcactcaacatg

SEQ ID NO: 12525 - DNA, 75 bp, synthetic construct
  source 1..75: mol_type = other DNA
cggaagtggtcaacgggcatacggacgttatctgctcaacctcagtcagccacattctggctgtacgaaagagta

SEQ ID NO: 12526 - DNA, 75 bp, synthetic construct
  source 1..75: mol_type = other DNA
cacaaatacagggcgaggtggtggcgctggtccacagccatcccggtggtctgccctggctgagtgaagccgacc

SEQ ID NO: 12527 - DNA, 75 bp, synthetic construct
  source 1..75: mol_type = other DNA
tatgcccgcctgttccactggtattgacccgggcgaaaacattccgggaaaagtggcagtatttacgggtaaggg

SEQ ID NO: 12528 - DNA, 75 bp, synthetic construct
  source 1..75: mol_type = other DNA
aggagtgtctgacgatcaccgctgctttcggtatttcaggcgttcaggtcacgcgtattctggacagcatcgcgc

SEQ ID NO: 12529 - DNA, 75 bp, synthetic construct
  source 1..75: mol_type = other DNA
acagaaaaaactgattcagttgtttgattccggtgaagttcgtgcattccgcattaaataccctaacggtaccgt

SEQ ID NO: 12530 - DNA, 75 bp, synthetic construct
  source 1..75: mol_type = other DNA
ccgtaacaattgaaacgtcagattcagataaagaccttaatgttacttttggcggtcacgatattaccgccgcat

SEQ ID NO: 12531 - DNA, 75 bp, synthetic construct
  source 1..75: mol_type = other DNA
acatgagaaggcgaataatggtcagtcttccgttgttcaccagcagcaggctgataagcatcgcagtcagatcac

SEQ ID NO: 12532 - DNA, 75 bp, synthetic construct
  source 1..75: mol_type = other DNA
taatagctcacgcagaggagactattgaagcacagagactgtgcataccgggcacaatcgaccatgacatcatcc

SEQ ID NO: 12533 - DNA, 75 bp, synthetic construct
  source 1..75: mol_type = other DNA
cgtatccgctcaaataattgctacggtcaggtatcaagacgtgaccaggagagtgcgctgtcatgctggggtatc

SEQ ID NO: 12534 - DNA, 75 bp, synthetic construct
  source 1..75: mol_type = other DNA
ctctgcagtgggtttctgagttgactgatgaactcatggcaaaaatcagaactcacgaatacaaccgctcaatgg

SEQ ID NO: 12535 - DNA, 75 bp, synthetic construct
  source 1..75: mol_type = other DNA
gagggagtatcggtaatactggcgggagtgaaacccgtccacgaaatattgcatttaactatatcgtgagggctg

SEQ ID NO: 12536 - DNA, 75 bp, synthetic construct
  source 1..75: mol_type = other DNA
tggatgaacaattcacattcttacagggggtaggatttattgtaactgtgctaagtgtatattttcttaacagaa

SEQ ID NO: 12537 - DNA, 75 bp, synthetic construct
  source 1..75: mol_type = other DNA
ctgcatggcatgatttgcgcttttggacgggagattcagcgtgctgattggctatgtaagggtatcaacaaatga

SEQ ID NO: 12538 - DNA, 75 bp, synthetic construct
  source 1..75: mol_type = other DNA
atgattaccaattatgaagtcactgttgtaactaccgatgacattgttcacgaggttaatctggaaggaaagcgt

SEQ ID NO: 12539 - DNA, 75 bp, synthetic construct
  source 1..75: mol_type = other DNA
atgattaccagttatgaagccactgttgtaactactgatgacattgttcacgaagttaatctggaaggaaagcgt

SEQ ID NO: 12540 - DNA, 75 bp, synthetic construct
  source 1..75: mol_type = other DNA
ggggatgtggaaaaagcgagtttagtgtttgtgaggaacgaattaatacccttacagaaaaggatgcaggaatta

SEQ ID NO: 12541 - DNA, 75 bp, synthetic construct
  source 1..75: mol_type = other DNA
atgaaaacaatccatgacatccggcggtctaacgccagaaaactgagagatggtgttggcgggaattcttccttt

SEQ ID NO: 12542 - DNA, 75 bp, synthetic construct
  source 1..75: mol_type = other DNA
atccttgtgcgtatcctcgccgacgggcgcaccacagacatcccgctggggcgttttctgcgggaatttacctgt

SEQ ID NO: 12543 - DNA, 75 bp, synthetic construct
  source 1..75: mol_type = other DNA
ggtgacggactgttacacgctgttccgggatgcataccatctggcggggactgaaatgccggattttcatcgcga

SEQ ID NO: 12544 - DNA, 75 bp, synthetic construct
  source 1..75: mol_type = other DNA
ggttttacaagctgatcagtgaaggtcatttccctaaacccatcaaactggggcgcagcagccgctggtacaaaa

SEQ ID NO: 12545 - DNA, 75 bp, synthetic construct
  source 1..75: mol_type = other DNA
tatggaagagccgtgcatctggttcagcggattctgcagccagggggacggagcctgttttgaagggcgctggca

SEQ ID NO: 12546 - DNA, 75 bp, synthetic construct
  source 1..75: mol_type = other DNA
tcatttataaaggccctactaagagccgcagagcgtgaatggaaaatgctggataaggcaccaattattaaagtg

SEQ ID NO: 12547 - DNA, 75 bp, synthetic construct
  source 1..75: mol_type = other DNA
ctctctatgggctgttgtatcctgtgctgtccctggcgcaggcatttcgcgttaacggtcatgaagtactgatcg

SEQ ID NO: 12548 - DNA, 75 bp, synthetic construct
  source 1..75: mol_type = other DNA
taatggtttttctgaactggaaaaggcgctgttacgttacattgctgccggactgggtgtgtcgtatgagcagct

SEQ ID NO: 12549 - DNA, 75 bp, synthetic construct
  source 1..75: mol_type = other DNA
ggtcggtaacgctgacgacggtacggcattaatcctggtcacgccggtgaatggtctgccgtcttccggtgtggc

SEQ ID NO: 12550 - DNA, 75 bp, synthetic construct
  source 1..75: mol_type = other DNA
aagcaggtttctggctggatgatgctcaggtcgttgattaccgcgttgtgaagatgcccgttaccaaaggtggga

SEQ ID NO: 12551 - DNA, 75 bp, synthetic construct
  source 1..75: mol_type = other DNA
ggtttgggagaaggctcagcattacctgttggggtgcctgttccgtggccttcagccactccgccaacaggctgg

SEQ ID NO: 12552 - DNA, 75 bp, synthetic construct
  source 1..75: mol_type = other DNA
atagcatggcgcccttctggccgtcttatcagaacaaaatcatcggtgttctcaaccgtgcgctgcgtgaacagt

SEQ ID NO: 12553 - DNA, 75 bp, synthetic construct
  source 1..75: mol_type = other DNA
actcaggccgcccggcagacaacgcaggcggcttcttcggctgcaacagccgcatccgtccatgcgcagacggtg

SEQ ID NO: 12554 - DNA, 75 bp, synthetic construct
  source 1..75: mol_type = other DNA
aacctttctgcgctggcggcgattctggcgggtgccgataaactgttgctgctgaccgatcaaaaaggtttgtat

SEQ ID NO: 12555 - DNA, 75 bp, synthetic construct
  source 1..75: mol_type = other DNA
gtgtttggcagcggagcgtacagtaaaccagcacaaatcagcctggaatgtaaacattattcgctgaccagcgat

SEQ ID NO: 12556 - DNA, 75 bp, synthetic construct
  source 1..75: mol_type = other DNA
gtggggatacattcacaataaaagatgtaaaagtcatgcctgaatctataccggcaggttatgaagttctacaag

SEQ ID NO: 12557 - DNA, 75 bp, synthetic construct
  source 1..75: mol_type = other DNA
agccaaacctcccagagggggatctgcaactgctggttcaaggacatgcttctggcgtgttacgccttacacagg

SEQ ID NO: 12558 - DNA, 75 bp, synthetic construct
  source 1..75: mol_type = other DNA
atcagccgaaggataaattcactgaggtaatcatttttgccgggacggatgcttacgcccatgctcaacactgga

SEQ ID NO: 12559 - DNA, 75 bp, synthetic construct
  source 1..75: mol_type = other DNA
tgtcttcctgtgtaaggttgaagcctgggcgatgaatattggctgccacctgactattccgcagagctgcgagtt

SEQ ID NO: 12560 - DNA, 75 bp, synthetic construct
  source 1..75: mol_type = other DNA
tgtggtcacacgtcacgcagtccgcttgactcgctggaaaccgctatcggattccacatgcgcgactggtggcag

SEQ ID NO: 12561 - DNA, 75 bp, synthetic construct
  source 1..75: mol_type = other DNA
cgaaagacgctggctacactgcagtaatctctcaccgttctggcgaaactgaagatgctaccatcgctgacctgg

SEQ ID NO: 12562 - DNA, 75 bp, synthetic construct
  source 1..75: mol_type = other DNA
atgctgaagcaacgccgtaattttcgtaccggaacagaacgccacgctaaccgtttcactaccagtgcatcacgc

SEQ ID NO: 12563 - DNA, 75 bp, synthetic construct
  source 1..75: mol_type = other DNA
cagaaagcgggtatagcgtcattctgtccctataacattggccccggtaagtgtttcccgtcgacgttttataag

SEQ ID NO: 12564 - DNA, 75 bp, synthetic construct
  source 1..75: mol_type = other DNA
tatgattacatactgaaacgtggtcaggggattaacagcactaactggtatctgattagcagaaaagacattcct

SEQ ID NO: 12565 - DNA, 75 bp, synthetic construct
  source 1..75: mol_type = other DNA
tcagacgctacctcaaataccctgaaccgccagccagaaagacccgccacaaaatggttaagctgaaaccgttta

SEQ ID NO: 12566 - DNA, 75 bp, synthetic construct
  source 1..75: mol_type = other DNA
gttgaggtggaggttgccgggcaacggtgcaaagttaactttgcggttaatacgctggggttctcccgccgcttc

SEQ ID NO: 12567 - DNA, 75 bp, synthetic construct
  source 1..75: mol_type = other DNA
gattaaggacggtggcagagactgccgtattcgctcaaacaactgctacggtcaggtctcacggcgtgaccagga

SEQ ID NO: 12568 - DNA, 75 bp, synthetic construct
  source 1..75: mol_type = other DNA
agttcgggcaggatttcacattatacgaagcgcttcgcacggttgatcgtctgctgcgtggacagagttttatta

SEQ ID NO: 12569 - DNA, 75 bp, synthetic construct
  source 1..75: mol_type = other DNA
cgcccacttcgctcccgaccatctggaagatgctgtaaccaaaaatcctcttgctaaccttggatggagaaaatt

SEQ ID NO: 12570 - DNA, 75 bp, synthetic construct
  source 1..75: mol_type = other DNA
aagaatagggggaagttattcaccccatgcagaaaagcctttgagcgtgcagtaaagcgggctggtatcgatctg

SEQ ID NO: 12571 - DNA, 75 bp, synthetic construct
  source 1..75: mol_type = other DNA
gaaaaggatgatcggtgaatccccccttcggttcgcactggtacatttgccagcgatgaaaaagctaggactgca

SEQ ID NO: 12572 - DNA, 75 bp, synthetic construct
  source 1..75: mol_type = other DNA
tcctttgcgacaagttaaccgctggttcaaagatcactacggagtgcccgtcagagtcattcgttgggagccgga

SEQ ID NO: 12573 - DNA, 75 bp, synthetic construct
  source 1..75: mol_type = other DNA
ccggtgatgctcggcagtaaccaggtcattgttgaagagcagggcaaactctccgggtttgggggcgttgcagga

SEQ ID NO: 12574 - DNA, 75 bp, synthetic construct
  source 1..75: mol_type = other DNA
atcgaagagatttctggtggcaaatatcaagcaagcgaaatgcttgaaataagcaaaaagaaccttctggctgca

SEQ ID NO: 12575 - DNA, 75 bp, synthetic construct
  source 1..75: mol_type = other DNA
cggttcagcgatgcggatgcataccatctggaccaagcctttccactgctgatgaaacaactggaactcatgttc

SEQ ID NO: 12576 - DNA, 75 bp, synthetic construct
  source 1..75: mol_type = other DNA
acacagaatcaggaaagggaaatttcactgatacggagctcacgaaaatcacaattggacaagaaaaaacgccga

SEQ ID NO: 12577 - DNA, 75 bp, synthetic construct
  source 1..75: mol_type = other DNA
ccagtcgtgtactggccattgcttttatatttatgtccctgctcattgttctcagcctgactgttaacgtgattc

SEQ ID NO: 12578 - DNA, 75 bp, synthetic construct
  source 1..75: mol_type = other DNA
ggatattcttgaacgtgactgcggtctgcagcctgccgctgtgagccgtgttcagtccattattgatgatctgcg

SEQ ID NO: 12579 - DNA, 75 bp, synthetic construct
  source 1..75: mol_type = other DNA
atgaatactgttttaagtgttcagggtgcttctgcgcccgtcaaaaagaaatcgtttttttctaaattcactcgt

SEQ ID NO: 12580 - DNA, 75 bp, synthetic construct
  source 1..75: mol_type = other DNA
actgggcggtcactaccggcggcttcaacagtgaaacagtacaggacgtcatgctgggagcggtggaacgccgct

SEQ ID NO: 12581 - DNA, 75 bp, synthetic construct
  source 1..75: mol_type = other DNA
tgaaaaagaaattcgtgcatttgcagaaaaagcccagcgggcaacatttatctgcgccagcttcgatgaaacgct

SEQ ID NO: 12582 - DNA, 75 bp, synthetic construct
  source 1..75: mol_type = other DNA
tggctgattcaggctggtgaaagtgaaccagtgtcaccggtaccgaaagtgacagcgcaaatgctgactgaggcg

SEQ ID NO: 12583 - DNA, 75 bp, synthetic construct
  source 1..75: mol_type = other DNA
accggcggctcgcacacctgctgacagcccgggggttgctgccagatatccgtacccgacttgcccgttactacg

SEQ ID NO: 12584 - DNA, 75 bp, synthetic construct
  source 1..75: mol_type = other DNA
ttacaccctcagaattgtgagaaacggaaaaaaacttgaagccggaaattattttgccgtgctgggattccgggt

SEQ ID NO: 12585 - DNA, 75 bp, synthetic construct
  source 1..75: mol_type = other DNA
gtggcgcgaggaagcctataccctcgatgaactggctgattatctcgatttgagcgcctcagcgcgtcgtagcat

SEQ ID NO: 12586 - DNA, 75 bp, synthetic construct
  source 1..75: mol_type = other DNA
ctgacctggaaagaatgttgcatctgctcagcggtaaaccgatccccgacaaccgagggaatatcaccattaatc

SEQ ID NO: 12587 - DNA, 75 bp, synthetic construct
  source 1..75: mol_type = other DNA
tggagaatggatattctcagaaagctattgcggcgatgttggaggtttctactcgaaccattcgaaactggaaaa

SEQ ID NO: 12588 - DNA, 75 bp, synthetic construct
  source 1..75: mol_type = other DNA
tgtggaaagtattgaagagcttgatgcatctcagataccgcaagccgtagagtacatccacagggtagtgcttga

SEQ ID NO: 12589 - DNA, 75 bp, synthetic construct
  source 1..75: mol_type = other DNA
cagcgcctgctggaagtcatcgaacagatcgggagttactcaaagcagattcgttcggcaatcgaagatggggta

SEQ ID NO: 12590 - DNA, 75 bp, synthetic construct
  source 1..75: mol_type = other DNA
tggattgtgggctacgcggtctgtatgcgcctgcataaaagacttttatttagccgcttcggtatcttcagtata

SEQ ID NO: 12591 - DNA, 75 bp, synthetic construct
  source 1..75: mol_type = other DNA
gctgctgtggtgctggcacacaatcacccgtccggtgaagtcacacccagtaaggcagaccggcttatcaccgaa

SEQ ID NO: 12592 - DNA, 75 bp, synthetic construct
  source 1..75: mol_type = other DNA
gtgcatgcgaggcgattcgctggtggataaaagatggtgggcgcgattgccgcatacgttcaaataactgctatg

SEQ ID NO: 12593 - DNA, 75 bp, synthetic construct
  source 1..75: mol_type = other DNA
cctgaactgatgtttcaggattatgagggattcccggggaatatggcctctgaatgccatatcaactgggcctgg

SEQ ID NO: 12594 - DNA, 75 bp, synthetic construct
  source 1..75: mol_type = other DNA
gtattgaagttcgtcgtgatgcttatgggcgttacagcctgaacgatctgcacagggcagccgggggagaacaaa

SEQ ID NO: 12595 - DNA, 75 bp, synthetic construct
  source 1..75: mol_type = other DNA
tatgaatccgccgttcagtcacgggcaggatatccggcatatcctgcgggctttttccctgttgcgtccgggggg

SEQ ID NO: 12596 - DNA, 75 bp, synthetic construct
  source 1..75: mol_type = other DNA
tttttcagtcaaccaaaagactgctttttcaaaattggaacgagattttgaaaatgtaatgataatctatcggga

SEQ ID NO: 12597 - DNA, 75 bp, synthetic construct
  source 1..75: mol_type = other DNA
ccatcattgcatctgctgtattattttcctttaacgctgcagcagcgacgtcatattttgaagcgcgtaacgatg

SEQ ID NO: 12598 - DNA, 75 bp, synthetic construct
  source 1..75: mol_type = other DNA
gcggtgggggctgcaactggtgaaatccccgtatcttcagtagcggaaaaactacgtgaactatatggttccaat

SEQ ID NO: 12599 - DNA, 75 bp, synthetic construct
  source 1..75: mol_type = other DNA
tgactcaggaacaggcgaatacgctggtgatcaacgccgacgaaaatattctgcaaggctggctggatctgcagc

SEQ ID NO: 12600 - DNA, 75 bp, synthetic construct
  source 1..75: mol_type = other DNA
tgacctcacgcgcattcgggcgtgcagctgtaattaccgacgtcggaatttcatttgccaaagaactggaaacgg

SEQ ID NO: 12601 - DNA, 75 bp, synthetic construct
  source 1..75: mol_type = other DNA
atggaaaaacactccggcattcttatgacaagagtcgccgcaggggagcgattcatgtcattagtgcgttctcaa

SEQ ID NO: 12602 - DNA, 75 bp, synthetic construct
  source 1..75: mol_type = other DNA
atgagattcctcgtcagtgcgtgactcccggtgattatgttattcataaaggaagaacatatattgcttcggtaa

SEQ ID NO: 12603 - DNA, 75 bp, synthetic construct
  source 1..75: mol_type = other DNA
ggcaatccagtctgcgtcccagaaatggacgatgccgttgaaggactggcgaatggcaatgagccgctttattat

SEQ ID NO: 12604 - DNA, 75 bp, synthetic construct
  source 1..75: mol_type = other DNA
atgctgaaacagcaggatatgacagaaaccgccagagtggtgtttaatgaattaagcgtcaccgaaccggcgaca

SEQ ID NO: 12605 - DNA, 75 bp, synthetic construct
  source 1..75: mol_type = other DNA
ggactccgcgtctccggcggtgaccgcctgcaggtggcatccgtcagtgaagatgcgatgacggttgttgtgccg

SEQ ID NO: 12606 - DNA, 75 bp, synthetic construct
  source 1..75: mol_type = other DNA
tggatgagctggtggattgtgtggcagagctggaaaccagagttggtaagtttgaaaaactggtgcaggaggtac

SEQ ID NO: 12607 - DNA, 75 bp, synthetic construct
  source 1..75: mol_type = other DNA
atcgtagtccgctggcaaatttgtccgcgaatattgcatccctgcagaaaggatatacgtctttcggcgtcagtg

SEQ ID NO: 12608 - DNA, 75 bp, synthetic construct
  source 1..75: mol_type = other DNA
aacagaaagaagaatgaatgctcctgctaaaggaactacacggataggaagaataagcaccaaggaacgggaaaa

SEQ ID NO: 12609 - DNA, 75 bp, synthetic construct
  source 1..75: mol_type = other DNA
ttcaaaaacaacctgcagctctacgcgtcgttataggaaagcatcttgcggaacctcgctggcacgatacctgtg

SEQ ID NO: 12610 - DNA, 75 bp, synthetic construct
  source 1..75: mol_type = other DNA
gcaaaaaaggccagcaggggcaggctactgacgcactgaacagggcaaaacaacaggcgggtaacgatgatccgt

SEQ ID NO: 12611 - DNA, 75 bp, synthetic construct
  source 1..75: mol_type = other DNA
atgtaaatcagatacgccgtgatcgtcccttaactcgtgaagaactgatgcaggtcgtccccagcgtattcgggg

SEQ ID NO: 12612 - DNA, 75 bp, synthetic construct
  source 1..75: mol_type = other DNA
ggaaaaggaatttcgccactgtatatggcttgcagagaaagaagaacgcgagcgaatttaccagacatcaatccg

SEQ ID NO: 12613 - DNA, 75 bp, synthetic construct
  source 1..75: mol_type = other DNA
aagtgaacgaaatgttgcaatctggtctggtcgaatttcatgttcatacacatactcatacacgttgggataaaa

SEQ ID NO: 12614 - DNA, 75 bp, synthetic construct
  source 1..75: mol_type = other DNA
actccgcgtctccggcggtgaccgcctgcaggtggcatccgtcagtgaagatgcgatgacggttgttgtgccggg

SEQ ID NO: 12615 - DNA, 75 bp, synthetic construct
  source 1..75: mol_type = other DNA
atgggcaaagaatataaaactctcattaacaaagcacttgaacgattttattttcgcttaagtgcatcaggcgct

SEQ ID NO: 12616 - DNA, 75 bp, synthetic construct
  source 1..75: mol_type = other DNA
gtgaatgaagtctatgtgattgccggtggtgagtggttacgcaataacctgaacgccattgccgcctttatgggg

SEQ ID NO: 12617 - DNA, 75 bp, synthetic construct
  source 1..75: mol_type = other DNA
agaagcagcaggttgcttcggtcgacagtaacacctgggcgcggatgcgcggtatttttgctgcagagcgtattg

SEQ ID NO: 12618 - DNA, 75 bp, synthetic construct
  source 1..75: mol_type = other DNA
tggtggcgatgtccctgtggcataaccatccacagaaaacgcagtcaccgtcaatgaatgaggccgtgatgaaga

SEQ ID NO: 12619 - DNA, 75 bp, synthetic construct
  source 1..75: mol_type = other DNA
tggttctgcgcattattcagctggaagcagtgcaggaagaaatggctaacgaatttcgtgatctgcttgttgaga

SEQ ID NO: 12620 - DNA, 75 bp, synthetic construct
  source 1..75: mol_type = other DNA
tcaaactggtctggctttgctggcttgatttaatgaccggaaacagccttgacgactggacggagaacctgaaac

SEQ ID NO: 12621 - DNA, 75 bp, synthetic construct
  source 1..75: mol_type = other DNA
aaacagaaccgggtgaccgtacatccggagaaaagtgtcccccggacggccggttacagcgatgccgtcagtgtt

SEQ ID NO: 12622 - DNA, 75 bp, synthetic construct
  source 1..75: mol_type = other DNA
aattgtccgtaaaatggcagagaacaaacctgacctgccggatggcaaaacagagcaggctgtcagggagattgc

SEQ ID NO: 12623 - DNA, 75 bp, synthetic construct
  source 1..75: mol_type = other DNA
agtatgaacataaaatcggtgacctgattgcacggtttgaagaggctggtggggtgataaatgaagttgagctat

SEQ ID NO: 12624 - DNA, 75 bp, synthetic construct
  source 1..75: mol_type = other DNA
aggattttcccgcggtcgcggtttatctgacggatgcagagtataccggtgaagagctggatgcagatacctggc

SEQ ID NO: 12625 - DNA, 75 bp, synthetic construct
  source 1..75: mol_type = other DNA
tggtaactgttatccggtcgagaaagttattcgcatggataataacgaaatcccggcaggattaaaaacagcgcc

SEQ ID NO: 12626 - DNA, 75 bp, synthetic construct
  source 1..75: mol_type = other DNA
cgctgaccggacatgaaaatgaggtggtatcagcgcagccggataccgtgattgatacggctgctctggtcacgg

SEQ ID NO: 12627 - DNA, 75 bp, synthetic construct
  source 1..75: mol_type = other DNA
atgcggatgctggatggcagaagccacagacaaatttgcgaaatgtttggtcgggttcagcgagatccattctgg

SEQ ID NO: 12628 - DNA, 75 bp, synthetic construct
  source 1..75: mol_type = other DNA
ctggcgtctggacgtggtaatgaatgaagacgactgcaaaataagaagaggaaatgcagcagaattattttcagg

SEQ ID NO: 12629 - DNA, 75 bp, synthetic construct
  source 1..75: mol_type = other DNA
gaattaattgcgaatcatgacttcgactttcgccagttagttaccgcagcagaaggtcaaccggtaactgacacc

SEQ ID NO: 12630 - DNA, 75 bp, synthetic construct
  source 1..75: mol_type = other DNA
tcgacagtctggcaaaaaagcccggtgcgttctgccatgcaacgctgagaaatgacatcctgccagacgatgaat

SEQ ID NO: 12631 - DNA, 75 bp, synthetic construct
  source 1..75: mol_type = other DNA
gtcggccatagtgaaggcgatgtatgcagcgacgattgaaagtgaacttgataccgaaaaggcctttgaatatat

SEQ ID NO: 12632 - DNA, 75 bp, synthetic construct
  source 1..75: mol_type = other DNA
ttcagtaaatgcccgtctgaagcaggcctcacagtccagtgatgattttcaggcatcacagcgtgaattaatggc

SEQ ID NO: 12633 - DNA, 75 bp, synthetic construct
  source 1..75: mol_type = other DNA
tgctgtgggggcttcccgttgcagcacttattattattttctggctgagtctgttttgctactcggccattcctg

SEQ ID NO: 12634 - DNA, 75 bp, synthetic construct
  source 1..75: mol_type = other DNA
tggcctggaaaccgggagaagaaggtcagaaagggcttataggctggtttgaaagcggcgatgtccgggcctata

SEQ ID NO: 12635 - DNA, 75 bp, synthetic construct
  source 1..75: mol_type = other DNA
gccaaaagccagcgtatccagcttctggaagaaatgctgaaactggtgcgtcagcaacgcttcggtaaaaaatgc

SEQ ID NO: 12636 - DNA, 75 bp, synthetic construct
  source 1..75: mol_type = other DNA
cttcccggatgccatcaacacagtatatccgaaggcccgcatccagttatgcatcgtgcatatggtgcgcaacag

SEQ ID NO: 12637 - DNA, 75 bp, synthetic construct
  source 1..75: mol_type = other DNA
accggcctgatgacccgcagcaactacagaatggtgaacgacatcatccggggtgaacattcggaggcgaaacga

SEQ ID NO: 12638 - DNA, 75 bp, synthetic construct
  source 1..75: mol_type = other DNA
aagacctcgtgcagggggaactgccgttttctgtttccgtgctgatttacgatttgcgttgtccgacggtgttat

SEQ ID NO: 12639 - DNA, 75 bp, synthetic construct
  source 1..75: mol_type = other DNA
acttcgccaaagaagtggaggtggagctgaaaggcgatccgatggtgcttcctaacggggccacgctttacttcc

SEQ ID NO: 12640 - DNA, 75 bp, synthetic construct
  source 1..75: mol_type = other DNA
gtgagtcttgatatgaacgttgccgtggatgtgcgacgtattcagcttgcgctggatgaactgggaaccgtcaca

SEQ ID NO: 12641 - DNA, 75 bp, synthetic construct
  source 1..75: mol_type = other DNA
taaaaacaactaatcagatgcatgcttttttgctggaatttggtatcagcgttccacgaggttctgcagttatta

SEQ ID NO: 12642 - DNA, 75 bp, synthetic construct
  source 1..75: mol_type = other DNA
gtaccgcatcacccaagacgacctggatgacctcactgacacaatcgaatatctcatggcaactaaccagttaga

SEQ ID NO: 12643 - DNA, 75 bp, synthetic construct
  source 1..75: mol_type = other DNA
cagagccgggagatatccggcgttttattcagcaggcggtggaccactggccgcgtctgctggcagtccacttca

SEQ ID NO: 12644 - DNA, 75 bp, synthetic construct
  source 1..75: mol_type = other DNA
gaatattttgcccgaaaaaatggcacatacacgggcttaccgcaaaatgtagataccgctgaagattcagaacaa

SEQ ID NO: 12645 - DNA, 75 bp, synthetic construct
  source 1..75: mol_type = other DNA
agccaatatcagccagcctgacgccgataaattgcttgctgcatcacgtggtgaatttgttgaagggattagcga

SEQ ID NO: 12646 - DNA, 75 bp, synthetic construct
  source 1..75: mol_type = other DNA
tcaggaatgagttagggcatctacaatcgcgaatgaaggaattgaactcatggataggtgaaacagttataacat

SEQ ID NO: 12647 - DNA, 75 bp, synthetic construct
  source 1..75: mol_type = other DNA
gagcttgaggcgctggcgcgtggggcgatggtgatttatgataataaaaaattcaaatatccagtgattgatgag

SEQ ID NO: 12648 - DNA, 75 bp, synthetic construct
  source 1..75: mol_type = other DNA
cgtaaaccgaatccccaccgtggtgggacctcccgggccaaagggggaaccggggcccgcgggtcctcaggggcc

SEQ ID NO: 12649 - DNA, 75 bp, synthetic construct
  source 1..75: mol_type = other DNA
tctaaatcaactaagggtgtgttacgcggactgcactatcagctggaaccttatgctcaaggaaaactggtacgc

SEQ ID NO: 12650 - DNA, 75 bp, synthetic construct
  source 1..75: mol_type = other DNA
tcgcaattccactacgtcctggccgatggttctcagggtaacggtattccgcaactgctgccgcaactggtgctg

SEQ ID NO: 12651 - DNA, 75 bp, synthetic construct
  source 1..75: mol_type = other DNA
cgggcacgttttgatttttatcaggcgcgatcagcctggtcacgggctgagtggattggagccggaagaatggcc

SEQ ID NO: 12652 - DNA, 75 bp, synthetic construct
  source 1..75: mol_type = other DNA
gtcagacgatgagctggaaaccgtcatgcagcggctggacgatgcttttgtatatggcgcatgtgacagagttgt

SEQ ID NO: 12653 - DNA, 75 bp, synthetic construct
  source 1..75: mol_type = other DNA
agagaactgcaccattcaactgaaagccagacgtaacagcgccacggtggtggtgaacacggtggcctctgaaaa

SEQ ID NO: 12654 - DNA, 75 bp, synthetic construct
  source 1..75: mol_type = other DNA
atgaaacagaaaatttctggctttactgccagcggccccgctcggcctgaaatccgccccggcgatattttccgg

SEQ ID NO: 12655 - DNA, 75 bp, synthetic construct
  source 1..75: mol_type = other DNA
tgtattcgaccctccgcatcttgagcgtgttggtgataacgcctggatgggaaagaaatatggacggctgaataa

SEQ ID NO: 12656 - DNA, 75 bp, synthetic construct
  source 1..75: mol_type = other DNA
gcgattcgcacgcatcaaccgctacggccagaccggtaatgaagtggatttaaaccccaacattgcgagccgcaa

SEQ ID NO: 12657 - DNA, 75 bp, synthetic construct
  source 1..75: mol_type = other DNA
tggcaactgaaggggcgacagacctgtgggaaggctcacttatcgatcaactgataacggaagtcatacagagct

SEQ ID NO: 12658 - DNA, 75 bp, synthetic construct
  source 1..75: mol_type = other DNA
taatgtgccggtcggactggcgatgccactttcactgacgacccgtatcgggcatgcaatggtggccagttacga

SEQ ID NO: 12659 - DNA, 75 bp, synthetic construct
  source 1..75: mol_type = other DNA
gccatgacttataccaaaagcaagacattcaaaactgaaacgggcgcacgtcgctggcttgccagaaatacttgc

SEQ ID NO: 12660 - DNA, 75 bp, synthetic construct
  source 1..75: mol_type = other DNA
ataaggtattcaaggcagggttaagacgtaagatgcgaaaagcagccatggacagaaactatctggcgtcagtcc

SEQ ID NO: 12661 - DNA, 75 bp, synthetic construct
  source 1..75: mol_type = other DNA
tccggtctggatgttacagcttctgcgtaaagcccgggaccgcattatccgcctgctggaaacactgtgggatcg

SEQ ID NO: 12662 - DNA, 75 bp, synthetic construct
  source 1..75: mol_type = other DNA
cgccttcgttcaaataactgttacggtcaggttattcgtcgtgatcaggagagcgcattagcctgttgggggata

SEQ ID NO: 12663 - DNA, 75 bp, synthetic construct
  source 1..75: mol_type = other DNA
atgaaaatcaagcatgaacacatccgcatggcaatgaatgcctgggcgtatccagacggtgagaaagttccagca

SEQ ID NO: 12664 - DNA, 75 bp, synthetic construct
  source 1..75: mol_type = other DNA
ctgtcgtgtgtgtagataatgtgtttgttgaagatactccttatggtggagcgggtgaatatagtttgcataaaa

SEQ ID NO: 12665 - DNA, 75 bp, synthetic construct
  source 1..75: mol_type = other DNA
gatcaagacggatgagaaatctaatgagattacagctatcccagaacttcttaacatgctggatattaaaggaaa

SEQ ID NO: 12666 - DNA, 75 bp, synthetic construct
  source 1..75: mol_type = other DNA
caactggcctgagccttacattaagataaacggtaattgctctatcattggtacagttattttctcaggaaaacc

SEQ ID NO: 12667 - DNA, 75 bp, synthetic construct
  source 1..75: mol_type = other DNA
agctggatatgcatttttccgggctgacgtacgccgtactcagcctgtttttttgcgatccggatatgcatccct

SEQ ID NO: 12668 - DNA, 75 bp, synthetic construct
  source 1..75: mol_type = other DNA
atgaaaacattacccgacacgcatgtacgggaggcatcgcgctgcccgcctcccgtcaccatctggcagacactg

SEQ ID NO: 12669 - DNA, 75 bp, synthetic construct
  source 1..75: mol_type = other DNA
ccgccagattggcgcgacgttttatttttcccgcgaggcgctgctgcgcgccctgaaaaccggtcataaccagat

SEQ ID NO: 12670 - DNA, 75 bp, synthetic construct
  source 1..75: mol_type = other DNA
agcttcatcgccaaatctggcaaattgctaacgatgtcagaggttcggtcgatggatgggattttaagcaatacg

SEQ ID NO: 12671 - DNA, 75 bp, synthetic construct
  source 1..75: mol_type = other DNA
gaagggtgataagggagagcgcggtgacaccggccctgtcggggcaaccggcgaacggggaccggcaggtgatgc

SEQ ID NO: 12672 - DNA, 75 bp, synthetic construct
  source 1..75: mol_type = other DNA
tgcaacgctgcatggtcgacacgctggaagaatgggaagactatgcgccgtttgccgccaatccgttcggctccc

SEQ ID NO: 12673 - DNA, 75 bp, synthetic construct
  source 1..75: mol_type = other DNA
acggttggcgcgagtcaaccgctacagccagaccggcaacgaagccgaccttaaccccaacgtcgccaaccgcaa

SEQ ID NO: 12674 - DNA, 75 bp, synthetic construct
  source 1..75: mol_type = other DNA
tcctgttgaaatctggcagatactgctgtcccgactgctggaccagcactacggcctcacactgaatgacacacc

SEQ ID NO: 12675 - DNA, 75 bp, synthetic construct
  source 1..75: mol_type = other DNA
tcggtaacgtgctcatggggttgggtctggtggtaatggtggtcggcgtggggtattcaatcctcaaccagttac

SEQ ID NO: 12676 - DNA, 75 bp, synthetic construct
  source 1..75: mol_type = other DNA
gaaagatgccgggtatgaggcgaagggcagggcactgaaacagcatgtgatggccccgctgatttcttactttcg

SEQ ID NO: 12677 - DNA, 75 bp, synthetic construct
  source 1..75: mol_type = other DNA
ccgagcaggcgctgacggagagcctgaaccgacaactgaatgagaatcgccgttactggcaacagcttgaaattg

SEQ ID NO: 12678 - DNA, 75 bp, synthetic construct
  source 1..75: mol_type = other DNA
tgtttctccggatgacggagggagttgttatctctggctcaaccgggggcaaccacctgccgttaaccgtcgccg

SEQ ID NO: 12679 - DNA, 75 bp, synthetic construct
  source 1..75: mol_type = other DNA
aggtgttgcggcaggtaaagcgcagatccctgttgtcaccggcaatggtgagtttgcggcggtggcggagatcac

SEQ ID NO: 12680 - DNA, 75 bp, synthetic construct
  source 1..75: mol_type = other DNA
tatcttttcctgaaaaatccgggagcaatttgcttaaaccggaggcggtcagctgtaatttgttgtccctgtgtg

SEQ ID NO: 12681 - DNA, 75 bp, synthetic construct
  source 1..75: mol_type = other DNA
tagcctggcgtgtcatatctcatcccgtcagctaaaccacgtggaagcggcagaactgctgcgtgtgactgctga

SEQ ID NO: 12682 - DNA, 75 bp, synthetic construct
  source 1..75: mol_type = other DNA
ggataatgctgaaacacatacccgtccgtcaggaaatgaaactgcttccagctccccttcctggtattacgtggt

SEQ ID NO: 12683 - DNA, 75 bp, synthetic construct
  source 1..75: mol_type = other DNA
tgagcaacatcatccgcaccgggatcatctctgaagttgatgagaagtcctggcgcgtgcgcgttcgcagcggcg

SEQ ID NO: 12684 - DNA, 75 bp, synthetic construct
  source 1..75: mol_type = other DNA
ggccgggattatttgacggtgacacaccccggcttctggcctgcggtatccgggacgtgttactggaagacgtgg

SEQ ID NO: 12685 - DNA, 75 bp, synthetic construct
  source 1..75: mol_type = other DNA
gtgttctatgttgatggcgctgctttccctgtttttgcgtttatcgaagatggcctgtcaatatccgcacctggt

SEQ ID NO: 12686 - DNA, 75 bp, synthetic construct
  source 1..75: mol_type = other DNA
ccgcagcccgctatcttggctcggcgctgtactggatagctgccagtatcaatatcaaaccgggccatgattatt

SEQ ID NO: 12687 - DNA, 75 bp, synthetic construct
  source 1..75: mol_type = other DNA
caactccagaagcgagcaagaatttaaaagccgcatggaatgcaagaaaaaaagagctgaagctgactcaagagc

SEQ ID NO: 12688 - DNA, 75 bp, synthetic construct
  source 1..75: mol_type = other DNA
gtacgtaaggttgttgatatggtgaagaaaaatcatatcccggcagtctttagcgagagtacgatttccgataaa

SEQ ID NO: 12689 - DNA, 75 bp, synthetic construct
  source 1..75: mol_type = other DNA
taatattgatactgaccttttagtggttatcggagggcttattgttatattgtttctcatgatgcttatcatgta

SEQ ID NO: 12690 - DNA, 75 bp, synthetic construct
  source 1..75: mol_type = other DNA
aaactccttaaccagctacgtggactaaacaagctctacgaggaagccttcgagaacatgctggcactaaagaaa

SEQ ID NO: 12691 - DNA, 75 bp, synthetic construct
  source 1..75: mol_type = other DNA
ggttattggcggtattgccgcggccgtctatggtctgggtaaagcctggtatgacggtcagaaggagggggaaga

SEQ ID NO: 12692 - DNA, 75 bp, synthetic construct
  source 1..75: mol_type = other DNA
aaagtgccgcagcggcttatgtgccacaaaaccgcgatgcggtgattaccgatattaaacgcatcggggatttac

SEQ ID NO: 12693 - DNA, 75 bp, synthetic construct
  source 1..75: mol_type = other DNA
atgctgacaaacctgaactatgaggccatgaaaacattgctcggcgagcggattatggatcgcatgaccatgaac

SEQ ID NO: 12694 - DNA, 75 bp, synthetic construct
  source 1..75: mol_type = other DNA
taccaggtgcagaacgacggtcagcgatacgcgttgagccaggcgaaatctatcgctgatgaactgatgaccggg

SEQ ID NO: 12695 - DNA, 75 bp, synthetic construct
  source 1..75: mol_type = other DNA
ctcagccaggaggtgctgttatccctgctcagtttctgtaccgcgtgcagtcttaacggtgtccagacccgcgag

SEQ ID NO: 12696 - DNA, 75 bp, synthetic construct
  source 1..75: mol_type = other DNA
ggcaaaatccggcggttttccgctgattgctctgagccagctctcccgtggcgtggaatccagacccaataaacg

SEQ ID NO: 12697 - DNA, 75 bp, synthetic construct
  source 1..75: mol_type = other DNA
acgcagtccgctggactcgctggagagcgctatcggattccacatgcgcgactggtggcagccgacgaaagcaaa

SEQ ID NO: 12698 - DNA, 75 bp, synthetic construct
  source 1..75: mol_type = other DNA
atgagcgcacgttcacaggcactggttcccctcagcacagagcaacaggccgcatggcgggcagtggcagagacg

SEQ ID NO: 12699 - DNA, 75 bp, synthetic construct
  source 1..75: mol_type = other DNA
cttctgccagccctcatcagttgccggaagacaatacagtgatacagagcgtgatgccattaaccactgaaacag

SEQ ID NO: 12700 - DNA, 75 bp, synthetic construct
  source 1..75: mol_type = other DNA
ggtttttgatgtgtcaaccaacatcaacgcaggggacaaggataataaccggagataattattcatcacagtatc

SEQ ID NO: 12701 - DNA, 75 bp, synthetic construct
  source 1..75: mol_type = other DNA
ctgacgaaattaacgacagaaatcgccagctattgcgctgatgaatttaaaaaccttaacgacaaaaggaactgg

SEQ ID NO: 12702 - DNA, 75 bp, synthetic construct
  source 1..75: mol_type = other DNA
atgagcgcacgttcacaggcactggttcccctcagcacagagcaacaggccgcatggcgggcggtggcggagacg

SEQ ID NO: 12703 - DNA, 75 bp, synthetic construct
  source 1..75: mol_type = other DNA
atgcagcggctggacgatgcctttgagcatggtgcggatgtcagcgttgttcacgacgttgttcgtgaactgatg

SEQ ID NO: 12704 - DNA, 75 bp, synthetic construct
  source 1..75: mol_type = other DNA
cagggatgaagccctggcggaagaatacgcgaaactggttgagaattacagtacagaaaaggaaatatgggagca

SEQ ID NO: 12705 - DNA, 75 bp, synthetic construct
  source 1..75: mol_type = other DNA
caggaagcatcaatctggagtttatcagctactggaattccggtgtattggcagcccctgataatcacctgaccc

SEQ ID NO: 12706 - DNA, 75 bp, synthetic construct
  source 1..75: mol_type = other DNA
ctgctgacaccgtcctaccgtaaccagctggccttcctcgatatctacggggacgggatgggcaacaccaactac

SEQ ID NO: 12707 - DNA, 75 bp, synthetic construct
  source 1..75: mol_type = other DNA
atcggcgagcatgcctggctgattgagaaagctggaatcgtggtccacaaatgcccacgcaatccgtttaccgga

SEQ ID NO: 12708 - DNA, 75 bp, synthetic construct
  source 1..75: mol_type = other DNA
cacattgtacgaagcactacgcacagtcgatcgtctgcttcgcgggcaaagttttattaaacaggctgctttata

SEQ ID NO: 12709 - DNA, 75 bp, synthetic construct
  source 1..75: mol_type = other DNA
acaaataaaattccgttccaggctctttatattgctactggtcaatcaacagctggtacagccaacgccgacgcc

SEQ ID NO: 12710 - DNA, 75 bp, synthetic construct
  source 1..75: mol_type = other DNA
ccggggcgctgtgtctgtgctggtcgtggctggttgcgcgttatctcgatcgcggtcaccgggtcgcctccggag

SEQ ID NO: 12711 - DNA, 75 bp, synthetic construct
  source 1..75: mol_type = other DNA
tgattggtaagtttggtgcggccaaagaccagtggttcagttccttcctgctgcaggtggaaaaccattcctcct

SEQ ID NO: 12712 - DNA, 75 bp, synthetic construct
  source 1..75: mol_type = other DNA
ttgttctgtttgaaattctggccggactgattgtgatcggtatcgccacaccaatgatttattcagaaattgaaa

SEQ ID NO: 12713 - DNA, 75 bp, synthetic construct
  source 1..75: mol_type = other DNA
gaccatcgcggtgaaatcgtctatagcaccaaaacgggagagtcaaaagaaatcacagctccgggtgattaccct

SEQ ID NO: 12714 - DNA, 75 bp, synthetic construct
  source 1..75: mol_type = other DNA
atgaaatcattaaccacggaaacagcactggatattctgattgcgtggctgcaggacaatatcgactgcgaatcg

SEQ ID NO: 12715 - DNA, 75 bp, synthetic construct
  source 1..75: mol_type = other DNA
tccgaccgaatccgtgaccattgaccttgcttatgaaggttccggtagtggcgactggcgaacggatgcatttat

SEQ ID NO: 12716 - DNA, 75 bp, synthetic construct
  source 1..75: mol_type = other DNA
ggacagtcgttcaccggactgcgaagacatcctcaaagagttgatatgggcgttcagtgatttcgcccgcgatcg

SEQ ID NO: 12717 - DNA, 75 bp, synthetic construct
  source 1..75: mol_type = other DNA
cggctgttctatacccatatctccgaccagtacgcgccgttcagcacccgcgtggtgaatgtcggcgtccgcgat

SEQ ID NO: 12718 - DNA, 75 bp, synthetic construct
  source 1..75: mol_type = other DNA
cctgctcgatgagagctcaatggtgggcaataccgacatggcacgggcatacgccctgattgcggccggtggcgg

SEQ ID NO: 12719 - DNA, 75 bp, synthetic construct
  source 1..75: mol_type = other DNA
ccgtgacctggacaatattctgaaagcaccgctggatgcgctgacgcacgcggggttgttaatggacgatgagca

SEQ ID NO: 12720 - DNA, 75 bp, synthetic construct
  source 1..75: mol_type = other DNA
atctggcacaggcgaaatgggacacgccgcgggtggtgaagggtgtgcgcttcagtctgcgtctgaccagcggaa

SEQ ID NO: 12721 - DNA, 75 bp, synthetic construct
  source 1..75: mol_type = other DNA
atgacgacaccaaccagaagaataagtttctatctgaagccagctgccgtcaagaacgaaggagaagcatgcgcc

SEQ ID NO: 12722 - DNA, 75 bp, synthetic construct
  source 1..75: mol_type = other DNA
gatggtgtggagacatacggggtgtggggactctccctgccgtcactgcgccgtcgcctgttccgctgtgtctcc

SEQ ID NO: 12723 - DNA, 75 bp, synthetic construct
  source 1..75: mol_type = other DNA
ggtcagccagtatctggtggacgtctgggggtgaagatttaccccataatgcttgaagggcaggtcaaaaaatga

SEQ ID NO: 12724 - DNA, 75 bp, synthetic construct
  source 1..75: mol_type = other DNA
gagctggatgcggccggtgagctgggaaactgggaatacgatctcgatacctacaatcactgtattgcggtgctg

SEQ ID NO: 12725 - DNA, 75 bp, synthetic construct
  source 1..75: mol_type = other DNA
atgccggttatagcggaaccagtatgacaggcgggaaaggtgccgctgggatttgtattatcgaggagtttgcat

SEQ ID NO: 12726 - DNA, 75 bp, synthetic construct
  source 1..75: mol_type = other DNA
catgattcatgatgcacgggaaaaggccggtgagctggggaaagagcaggtcatggtgcctgtcctgaacacagc

SEQ ID NO: 12727 - DNA, 75 bp, synthetic construct
  source 1..75: mol_type = other DNA
tgcgccttttatggtgggtgcagcgctggtactgccggaagcaggacgggaaaaagatccgcgtcattggcagac

SEQ ID NO: 12728 - DNA, 75 bp, synthetic construct
  source 1..75: mol_type = other DNA
ttttggccatttagtccgggaattacattttaacgccagtgaaaatggactgcatgattacctctggctgccgga

SEQ ID NO: 12729 - DNA, 75 bp, synthetic construct
  source 1..75: mol_type = other DNA
ccggacggaaacgcaactttcggcatagactgtgacgggaaatctgtgtctaggtcggccattgccagaatcgag

SEQ ID NO: 12730 - DNA, 75 bp, synthetic construct
  source 1..75: mol_type = other DNA
taagacgaaagcttggtgaagcaaaacgagacattgatgcttacaagcgactttttaatggtgaaagccatgctt

SEQ ID NO: 12731 - DNA, 75 bp, synthetic construct
  source 1..75: mol_type = other DNA
gtgctgtcgagtatagcctatgttgccacccttatgtgtctggtgaaaaggttgcacctgatccagaacatctca

SEQ ID NO: 12732 - DNA, 75 bp, synthetic construct
  source 1..75: mol_type = other DNA
aaaccattttactgagtgcaacattaattcctgtgatttaaagcatcccacttcagatgggaaagttgaagccaa

SEQ ID NO: 12733 - DNA, 75 bp, synthetic construct
  source 1..75: mol_type = other DNA
atgacgctggagccgggggagtatgcggtttctgtgacggtgaaagggaagactgctgtctacggacgtgtgcgt

SEQ ID NO: 12734 - DNA, 75 bp, synthetic construct
  source 1..75: mol_type = other DNA
gcaaaagttttaggtgtatcacaaaagtggttacaacttggtattgaagacaacgcatccatacctgatcttgtt

SEQ ID NO: 12735 - DNA, 75 bp, synthetic construct
  source 1..75: mol_type = other DNA
aaatggtggacgacagtatgttgaacagagcacagtaggaacaaccaccattaaaaatggcggtgagcaaagagt

SEQ ID NO: 12736 - DNA, 75 bp, synthetic construct
  source 1..75: mol_type = other DNA
aaactggtgcatgaggtctggcgtcacgctctgaataaagtcagcgtggataacaagaataaaaactatatcgtg

SEQ ID NO: 12737 - DNA, 75 bp, synthetic construct
  source 1..75: mol_type = other DNA
ggtcgcagtatggtcatttaccatccgtctggcgctggagttgggcgatatcaacgaacgtgatgcttcaaactt

SEQ ID NO: 12738 - DNA, 75 bp, synthetic construct
  source 1..75: mol_type = other DNA
atatgtgctgtggcagccgcatgttctggttcgataagtctgacgaacgggcgatattcagcgatatcagaaaag

SEQ ID NO: 12739 - DNA, 75 bp, synthetic construct
  source 1..75: mol_type = other DNA
gtcggggagatagcgcagaatacttacctttcacgcgaacgctgccagttaatactgacccagctggttatggcg

SEQ ID NO: 12740 - DNA, 75 bp, synthetic construct
  source 1..75: mol_type = other DNA
gcactgatttttgatgtgggcgtttctaccatttatagaaaatttccggcgaatgagaacaatgaatcgccctga

SEQ ID NO: 12741 - DNA, 75 bp, synthetic construct
  source 1..75: mol_type = other DNA
ccgctgacggacacggacggcaatcctgtgatacacggtgtgaccgcggtctggcgcgccggggagcaggagcag

SEQ ID NO: 12742 - DNA, 75 bp, synthetic construct
  source 1..75: mol_type = other DNA
aaacaacaacccgtaacatccgttttcccaatcacatgattgagcagatcaatatcgcccttgagcataaaggct

SEQ ID NO: 12743 - DNA, 75 bp, synthetic construct
  source 1..75: mol_type = other DNA
agggcgacatgacgcagtatggcggtagcattgttcagggttcagccggggtgcgcatcggtgcccccaccggcg

SEQ ID NO: 12744 - DNA, 75 bp, synthetic construct
  source 1..75: mol_type = other DNA
ttaattaccagcaggcggttgagcgtcttcccggtgaagatccggctcagctgaacgacccggcctaccgtcgtc

SEQ ID NO: 12745 - DNA, 75 bp, synthetic construct
  source 1..75: mol_type = other DNA
atggttaatgccaatccttgcgcacgccaagaattcatctggcgtttctattcctgtaaaaaacaccactatcac

SEQ ID NO: 12746 - DNA, 75 bp, synthetic construct
  source 1..75: mol_type = other DNA
atgggggattctgtgacagcggagatactgggtaacatgattcgtcagtacttcagccaggagcgagcagaagaa

SEQ ID NO: 12747 - DNA, 75 bp, synthetic construct
  source 1..75: mol_type = other DNA
ttgaagttatacgtggccctatgtcttccctgtatggttccgatgctatcggaggagttattaatatcataacca

SEQ ID NO: 12748 - DNA, 75 bp, synthetic construct
  source 1..75: mol_type = other DNA
gcatcacaaagtacagcatcgtgaccaacagcaacgattccgtcacactgcgcctcatgactgagcatgaccttg

SEQ ID NO: 12749 - DNA, 75 bp, synthetic construct
  source 1..75: mol_type = other DNA
tgcgtatcatcactgataacctcaaacaggaagagcacgccattgtccaggtggaagaaatgcaggcggtgaatg

SEQ ID NO: 12750 - DNA, 75 bp, synthetic construct
  source 1..75: mol_type = other DNA
aaaaatgatgaagataacccgcaaccatctggcgcaatggcagatgaacaggcaacggctgaaacaatggcagcg

SEQ ID NO: 12751 - DNA, 75 bp, synthetic construct
  source 1..75: mol_type = other DNA
gggtgacgctgaacacggaagggtacgcgccgtcatatgtgggtgacattctggtgaaggcggattctgcaccgg

SEQ ID NO: 12752 - DNA, 75 bp, synthetic construct
  source 1..75: mol_type = other DNA
cccggaggcgctgccggggtgtcgttccatttctgatgatgacctgtgcgcctggtgtacccgtctgctttaccg

SEQ ID NO: 12753 - DNA, 75 bp, synthetic construct
  source 1..75: mol_type = other DNA
atctgggcaaacgaagcgttacggatatcctcccgctggaaatgctggaaattctgcgccgcatagaaaaacgtg

SEQ ID NO: 12754 - DNA, 75 bp, synthetic construct
  source 1..75: mol_type = other DNA
caccctctcagcagggaaaagatagtaaaagaaatgattattgaaaggaatatgtgttattttgacaccataagt

SEQ ID NO: 12755 - DNA, 75 bp, synthetic construct
  source 1..75: mol_type = other DNA
tgccctgcacgccagctatgacgatgggcagtcaggcgaaaaatttttgcgggaactgtgcgaagtggatctgct

SEQ ID NO: 12756 - DNA, 75 bp, synthetic construct
  source 1..75: mol_type = other DNA
tcggttcctgccgtgaggatgccggaacataccgcagcctgccggagccggaagcggtgctgacggaagctgaag

SEQ ID NO: 12757 - DNA, 75 bp, synthetic construct
  source 1..75: mol_type = other DNA
aatttatgagtggatgacaaagaagctggcagctataaaccagcttcgtgaagtgctgtcttatcgacaggaaac

SEQ ID NO: 12758 - DNA, 75 bp, synthetic construct
  source 1..75: mol_type = other DNA
ttcttgaacgtatccgcagactggccccgtcacatgtaaccgcgccattcaagacggtagcggagtggcgcgagt

SEQ ID NO: 12759 - DNA, 75 bp, synthetic construct
  source 1..75: mol_type = other DNA
atgctgacccaaaacggcgtcccgatgagccgttatcgtgccggacggctgatgaaatacctgaacctgagcagt

SEQ ID NO: 12760 - DNA, 75 bp, synthetic construct
  source 1..75: mol_type = other DNA
ctcaccggaaccggtatccacgcctgttaaaaaacaaaaacggaagaaaacagtaactgacgatgttaacccctg

SEQ ID NO: 12761 - DNA, 75 bp, synthetic construct
  source 1..75: mol_type = other DNA
cgcagaaggataagttcggcgcgggtaagaacggttttacccgtggtaatccccagactggtacgcctgccaccg

SEQ ID NO: 12762 - DNA, 75 bp, synthetic construct
  source 1..75: mol_type = other DNA
tgacaaccgctccgtcctgtgcggggcatcaccggagagatgaggatgagcgaatatttcagaatacttcagggg

SEQ ID NO: 12763 - DNA, 75 bp, synthetic construct
  source 1..75: mol_type = other DNA
gaaggaaggtgccgcattcatggcgctgatggcagaaaaagcccgtcttgctgccctgttaccggagggatggtc

SEQ ID NO: 12764 - DNA, 75 bp, synthetic construct
  source 1..75: mol_type = other DNA
tgaagtggcggtggcggggaacagtaaattccgcttcgtgggggctgatgccttctcgccagacgaactgcgcac

SEQ ID NO: 12765 - DNA, 75 bp, synthetic construct
  source 1..75: mol_type = other DNA
aagcaatggtataaagctctctgctgagtttattacttcgggtaagggattccgcttcagtcgcgcctcactcgc

SEQ ID NO: 12766 - DNA, 75 bp, synthetic construct
  source 1..75: mol_type = other DNA
cggtatcacccgttacgtcaccgaaattcttgttaagaccacgggcaccatgcagatgctgggacgtgccgcagg

SEQ ID NO: 12767 - DNA, 75 bp, synthetic construct
  source 1..75: mol_type = other DNA
tgaaacaactttcagatgaggcaaagaaaaacaccgaggatctcgaagaagcaaagaagaattcaaggtttacac

SEQ ID NO: 12768 - DNA, 75 bp, synthetic construct
  source 1..75: mol_type = other DNA
aatcgccagctgacccattacagcgatacccgctggcatgaagattccgttcgtaaccgctggttcagcgtaatg

SEQ ID NO: 12769 - DNA, 75 bp, synthetic construct
  source 1..75: mol_type = other DNA
ccactttcactgacgacccgtatcgggcatgcaatggtggccagttacgagatgatattcacccagcctgacagc

SEQ ID NO: 12770 - DNA, 75 bp, synthetic construct
  source 1..75: mol_type = other DNA
gaactgaataaccaggggatctggcttcgtgaaggtgaacgggcggcggcggacggcagtatcaccggaacgcca

SEQ ID NO: 12771 - DNA, 75 bp, synthetic construct
  source 1..75: mol_type = other DNA
agccagttttatccagggttaaacgttttgttgaacgaatgccggaaggcgcaacactgacccagatatcacaga

SEQ ID NO: 12772 - DNA, 75 bp, synthetic construct
  source 1..75: mol_type = other DNA
tatgatttttatcaacattacaatgttcctgtgcgcacggaagtggaattctatggccgcggagctgcagactcc

SEQ ID NO: 12773 - DNA, 75 bp, synthetic construct
  source 1..75: mol_type = other DNA
gagttacaaggacgagtggggcgataaatataagtcagaagttgatgttaaaagtcatgacatcatgcttggtat

SEQ ID NO: 12774 - DNA, 75 bp, synthetic construct
  source 1..75: mol_type = other DNA
tgtccgcagccatttgtctggccgtatccggtgcgcctgcatgggcgtctgagcagcaggccacgctgagcgcgg

SEQ ID NO: 12775 - DNA, 75 bp, synthetic construct
  source 1..75: mol_type = other DNA
ctgtgcatgccaagattctgagagatcatcataaagatcctgacaccctaatcattgatgagtttacgatgaatc

SEQ ID NO: 12776 - DNA, 75 bp, synthetic construct
  source 1..75: mol_type = other DNA
cagaaggtgtatgacgctacggtgtcgtttgccttcaacgtggggacgggcaatgcctgtagttccacgctggtg

SEQ ID NO: 12777 - DNA, 75 bp, synthetic construct
  source 1..75: mol_type = other DNA
agaaaagacctctgtgaggttcacatccgaactggccagacggaggttgctgttttcacggcttacgaatccgag

SEQ ID NO: 12778 - DNA, 75 bp, synthetic construct
  source 1..75: mol_type = other DNA
cacttgcaatggcaggcatgttttcggcccagactctggctgatgagaacaaaactggcttttatgtgaccggta

SEQ ID NO: 12779 - DNA, 75 bp, synthetic construct
  source 1..75: mol_type = other DNA
tatggagagtattggctattatgatgacgagtcgatgcaggatgatattcttattgacgtgataggtaacgtgta

SEQ ID NO: 12780 - DNA, 75 bp, synthetic construct
  source 1..75: mol_type = other DNA
ggctggtgaaagatattgatgatttcgttgcatcagcgatcgttctgttcgatcagatgaatcgtggtggcccgg

SEQ ID NO: 12781 - DNA, 75 bp, synthetic construct
  source 1..75: mol_type = other DNA
acagccatattacaggagggttaatcgctgtttctgaattatccggcagagtatcatcaagaacaactggtaaga

SEQ ID NO: 12782 - DNA, 75 bp, synthetic construct
  source 1..75: mol_type = other DNA
tccttcaaacactcaatgctcattgctaaatcagcgggtactaaagatagttcctaaaaataatgcgagctctgg

SEQ ID NO: 12783 - DNA, 75 bp, synthetic construct
  source 1..75: mol_type = other DNA
ataacagcccaatggagcgcttcttcaggagtctgaagaacgaatgggtgccagcgacgggctatgtaagcttca

SEQ ID NO: 12784 - DNA, 75 bp, synthetic construct
  source 1..75: mol_type = other DNA
gataaaaccgtagagtgcgattgctgtgaacaacagacgtcagtttattactcgggtcccttttattgcgttgat

SEQ ID NO: 12785 - DNA, 75 bp, synthetic construct
  source 1..75: mol_type = other DNA
actgccattgaagctggtgatgagcgtcgcgcacgcgcaaaatttcattggcaatttctggagcaattccctgca

SEQ ID NO: 12786 - DNA, 75 bp, synthetic construct
  source 1..75: mol_type = other DNA
atgactaagagcaccacgatgatgatccacttcatcatgaccctttccttatttatggccccttcctcgggaggg

SEQ ID NO: 12787 - DNA, 75 bp, synthetic construct
  source 1..75: mol_type = other DNA
cgcctgcggtcagagcggtggcggcaactgccctgattgtggcgcggtgatgggcgacgcaacataccaggaaac

SEQ ID NO: 12788 - DNA, 75 bp, synthetic construct
  source 1..75: mol_type = other DNA
tcaaattatgtatacctgctgaacacaaaagcaaccatagagaaaggtgctgatgtgacaactcaaagtggtatg

SEQ ID NO: 12789 - DNA, 75 bp, synthetic construct
  source 1..75: mol_type = other DNA
cgtttaaaagaggggctgaccggcgaaggcgctgcacggcagaatgccatcaatgcttcgcttgcacagggcgtt

SEQ ID NO: 12790 - DNA, 75 bp, synthetic construct
  source 1..75: mol_type = other DNA
gtagtcagtgaatttggtggcaccatctttatgaatggtgataattcagtcgagtcgggtggggcatattcagcg

SEQ ID NO: 12791 - DNA, 75 bp, synthetic construct
  source 1..75: mol_type = other DNA
gcaaggaaaccggtaggttgggcaatgtcgttctctccggacagcagactgaccatcaaagcgctgaaaatggcc

SEQ ID NO: 12792 - DNA, 75 bp, synthetic construct
  source 1..75: mol_type = other DNA
tccctcgcggccatctacggcgacctgaaaacgcaggctgataatctggtcacgtctgccggtaactggctcggg

SEQ ID NO: 12793 - DNA, 75 bp, synthetic construct
  source 1..75: mol_type = other DNA
atgatgctcgcgttaggtatgtttgtttttatgcgccagacgctgccacaccagaccatgcagcgtgaatcagat

SEQ ID NO: 12794 - DNA, 75 bp, synthetic construct
  source 1..75: mol_type = other DNA
atgggaaaaggtggcggtaaggcacacacgcctcgtgaggcgaaggataatctcaaatccacgcagatgatgagc

SEQ ID NO: 12795 - DNA, 75 bp, synthetic construct
  source 1..75: mol_type = other DNA
cgggaaggtatcagagtggccaggtgcactgtggcacgtctcatggcggttatggggcttgccggtgttctccgg

SEQ ID NO: 12796 - DNA, 75 bp, synthetic construct
  source 1..75: mol_type = other DNA
atggaggcctgtggaggttctcagcactgggcacgggaactgacaaaacttggtcataaagtccggttgttgcag

SEQ ID NO: 12797 - DNA, 75 bp, synthetic construct
  source 1..75: mol_type = other DNA
gttcactgccatggtcagccactacctgtttgatgcgcagttctgtaatccagcatcgggttgggagaaaggcca

SEQ ID NO: 12798 - DNA, 75 bp, synthetic construct
  source 1..75: mol_type = other DNA
cgggagatgcttcaatggtatgccgactatatggattctctcgagcatggcggaaatgtggtgcatatggtgttt

SEQ ID NO: 12799 - DNA, 75 bp, synthetic construct
  source 1..75: mol_type = other DNA
agaacgaatgggtgccagcgacgggctatgtaagcttcagcgatgcagctcacgcaataacggactatatcgttg

SEQ ID NO: 12800 - DNA, 75 bp, synthetic construct
  source 1..75: mol_type = other DNA
gattccgctacagcttcagtgccctgaaggaccggcacacggcggtggaggtgaattacaccgacccgcagaacg

SEQ ID NO: 12801 - DNA, 75 bp, synthetic construct
  source 1..75: mol_type = other DNA
ggcagtggtgaaaagcatcagtgccgccacgaaatgtcagaccgtggatgtgtccctgattgccggtgaacccaa

SEQ ID NO: 12802 - DNA, 75 bp, synthetic construct
  source 1..75: mol_type = other DNA
gcggtgcggaagcggtggtgttgtttccggatggcgaccgttctcatgcggtggttgttacggtgtcggaccggc

SEQ ID NO: 12803 - DNA, 75 bp, synthetic construct
  source 1..75: mol_type = other DNA
acatgcaacgggccgtggatatgatgcaccagtggtgttctgcccggatgtggagggcgaagcactgaaggaatg

SEQ ID NO: 12804 - DNA, 75 bp, synthetic construct
  source 1..75: mol_type = other DNA
tgatgctctgcgtttaagatttgaagataaactgaccatccgggccatcgctcagcgtctaggtctcagtcattc

SEQ ID NO: 12805 - DNA, 75 bp, synthetic construct
  source 1..75: mol_type = other DNA
acagaataaaacaggcggtgactttaaggaaatagacctgctgacccggcagcttaaaaagctgcatgatggcca

SEQ ID NO: 12806 - DNA, 75 bp, synthetic construct
  source 1..75: mol_type = other DNA
tgcccgtaactttcttcagatgatgcccgttaatctccacggcaatgtttttgattacaccgcatccggctttaa

SEQ ID NO: 12807 - DNA, 75 bp, synthetic construct
  source 1..75: mol_type = other DNA
gttatccgtggaacgcaaaccaatggagtatgtagagatggtgtatcccgcaagccggtactcctacaaagcacg

SEQ ID NO: 12808 - DNA, 75 bp, synthetic construct
  source 1..75: mol_type = other DNA
aacatttttttaccaccagtgataatacagcgttgttttatcggcactggcccgctttacagcccggggcgaaaa

SEQ ID NO: 12809 - DNA, 75 bp, synthetic construct
  source 1..75: mol_type = other DNA
gtgagtcagcccgttcctggcgaggaggagactgataccgccgaacagctggagttgatgcgtagcgccttccgg

SEQ ID NO: 12810 - DNA, 75 bp, synthetic construct
  source 1..75: mol_type = other DNA
aatgtggaatcgcgcggtgatgtgccgctgatggaagcgcgaacgcgaactctgctgacgttgctgaacgagtaa

SEQ ID NO: 12811 - DNA, 75 bp, synthetic construct
  source 1..75: mol_type = other DNA
ttggttttggcaaggctggaaaaacattagccgtcacgctggcaaaagcaggttggcgagtggctctcatcgaac

SEQ ID NO: 12812 - DNA, 75 bp, synthetic construct
  source 1..75: mol_type = other DNA
tgaacacactcacccacacggcagagcatgaggtgccgtaccggatggaaaccactgcagaaggcggcctgcaca

SEQ ID NO: 12813 - DNA, 75 bp, synthetic construct
  source 1..75: mol_type = other DNA
tagtggttctgctgggggcaatctttttgggtgtccgtatgggcgggattggtattggttatgccggtggcattg

SEQ ID NO: 12814 - DNA, 75 bp, synthetic construct
  source 1..75: mol_type = other DNA
cgcattctgcatctggagcagacgtggatgtttctggccgggcggggcgcgtttccgctgtttgcgctggtctgg

SEQ ID NO: 12815 - DNA, 75 bp, synthetic construct
  source 1..75: mol_type = other DNA
ccccgtggttgcccgttcgttttaaagacggaacgacaggcaaactggcgccagtcgatctggcggatgaaaatg

SEQ ID NO: 12816 - DNA, 75 bp, synthetic construct
  source 1..75: mol_type = other DNA
ggcatcagcttgacagacaactacgcgacacgctcgaacagattgagcgcgataaacgcgcccgccagcgtgcca

SEQ ID NO: 12817 - DNA, 75 bp, synthetic construct
  source 1..75: mol_type = other DNA
gtgattcaggacggcgatctggatgtcagcggcggcggtcacggtattgatatcaccggcgacagcgcgacggtg

SEQ ID NO: 12818 - DNA, 75 bp, synthetic construct
  source 1..75: mol_type = other DNA
tcccaccggagcgggagcctattcctggagtgaaacattcccatagaggctcaaaaatgcgtacaacgcatctag

SEQ ID NO: 12819 - DNA, 75 bp, synthetic construct
  source 1..75: mol_type = other DNA
aatatctcaatgtaagttttctgtttgtccagatagccttcagtgtccgcctgaggctgctcaatgtccaattac

SEQ ID NO: 12820 - DNA, 75 bp, synthetic construct
  source 1..75: mol_type = other DNA
aaatcaaaactcaacgagcagcgtgaatattacgaaggtgttatctcggatggaagtaagcgtattgctgaactg

SEQ ID NO: 12821 - DNA, 75 bp, synthetic construct
  source 1..75: mol_type = other DNA
aagtataacgtagataaagacagctggtcaggtggttactggcgtgatgacctgaagaatgaggtgtcagtcaac

SEQ ID NO: 12822 - DNA, 75 bp, synthetic construct
  source 1..75: mol_type = other DNA
gatgacatcactcgatgatgcaggagggcgcgcgcaggttgtcgggagtcgtcttatcgtccttgccgatcagcc

SEQ ID NO: 12823 - DNA, 75 bp, synthetic construct
  source 1..75: mol_type = other DNA
gtcgcgctgggcgcaggttctattgcggatcaagacgatagcgtttctgtcggcagtgactcattacaacgcaag

SEQ ID NO: 12824 - DNA, 75 bp, synthetic construct
  source 1..75: mol_type = other DNA
tagattctgtttctggtggtgcttcagggcgtgatattgcgatggctataggaacactatccggacaatttgttg

SEQ ID NO: 12825 - DNA, 75 bp, synthetic construct
  source 1..75: mol_type = other DNA
atgtcgatgcaggcgattcgtcactggggcgaaacacacagtgaagccgaggttcgcgagctgctggaacagaac

SEQ ID NO: 12826 - DNA, 75 bp, synthetic construct
  source 1..75: mol_type = other DNA
gtcgctcgcaactgattgcgcttcctgtaccgggtggaaaagcgaaggtggagtattgctatgcagtaaatgtac

SEQ ID NO: 12827 - DNA, 75 bp, synthetic construct
  source 1..75: mol_type = other DNA
tcggtgtcagcatggctggtgaataactggtatcccacagcaagtatcagcgatttgctggttgtggtgatgaag

SEQ ID NO: 12828 - DNA, 75 bp, synthetic construct
  source 1..75: mol_type = other DNA
tgaaaggtgtcggcaaagactttcgaaacgccgactatatcgactatctgccagtgaatatgttggctacaccca

SEQ ID NO: 12829 - DNA, 75 bp, synthetic construct
  source 1..75: mol_type = other DNA
gaccgactttcatgcactggcccttcgcccgtttgggtggcgcgaagtgtggatcggttatgacccggcaaaagg

SEQ ID NO: 12830 - DNA, 75 bp, synthetic construct
  source 1..75: mol_type = other DNA
ccaccgtgttgaccaggttcagcgggcacagttacatcttgagcagatattctcatggtggagcgccgggcgata

SEQ ID NO: 12831 - DNA, 75 bp, synthetic construct
  source 1..75: mol_type = other DNA
aacggtcaggatgtggataaagacagactgacctctcaggcttttgcccgtgccgcactggtcaccgatgtgggt

SEQ ID NO: 12832 - DNA, 75 bp, synthetic construct
  source 1..75: mol_type = other DNA
cacgctcggtgatagcggcactgggcggcgttgataacatctcggcggtcacgcactgtatgacgcgtttgcgct

SEQ ID NO: 12833 - DNA, 75 bp, synthetic construct
  source 1..75: mol_type = other DNA
ggattatatccatgaaactactatccgctctttggatgcatatcctgtacactcagaacatcagaatttaaatta

SEQ ID NO: 12834 - DNA, 75 bp, synthetic construct
  source 1..75: mol_type = other DNA
gatggcgatcagattttcccgctgggatgggcaatgattttacagcgcgcggctggcactcactacattgcggat

SEQ ID NO: 12835 - DNA, 75 bp, synthetic construct
  source 1..75: mol_type = other DNA
ttttacacgacccgcgtcgtcaggcggcgctgctgtactggcaggggttttccgtgccgcagattgccgccatgt

SEQ ID NO: 12836 - DNA, 75 bp, synthetic construct
  source 1..75: mol_type = other DNA
gttgaggcatccggtgccagtctggagaaggcgcggcacgaccagctgcttaccgcgcttcgtgcgctgctgtta

SEQ ID NO: 12837 - DNA, 75 bp, synthetic construct
  source 1..75: mol_type = other DNA
gccggatatcactgcaacgttccccgagtgtttctcgcaactcatcctggcaataagacagtgtatccacatctc

SEQ ID NO: 12838 - DNA, 75 bp, synthetic construct
  source 1..75: mol_type = other DNA
atgctgccaatgtccaacgaattattcaagacaatgcagcgctacataatacgttagatactataatggatagat

SEQ ID NO: 12839 - DNA, 75 bp, synthetic construct
  source 1..75: mol_type = other DNA
agaagcattcggcctgatattattgtcaacgcagccgctcacaccgcagtagacaaagcagaatcagaaccggag

SEQ ID NO: 12840 - DNA, 75 bp, synthetic construct
  source 1..75: mol_type = other DNA
tggagagcaacaatccatcaatatccgggcttgttacaggtcagcttcatgcagccggagaaccggaaaaaatga

SEQ ID NO: 12841 - DNA, 75 bp, synthetic construct
  source 1..75: mol_type = other DNA
agcgggcactaaaggaatggcgaaagctgggctcgacggtacgtgaacagttgaaaaagaagctggttgaagtac

SEQ ID NO: 12842 - DNA, 75 bp, synthetic construct
  source 1..75: mol_type = other DNA
tgcgtttttatgtgccctgcccgcactgtggggaggagcagtatctgaaatttggcgatgagtccacgccttttg

SEQ ID NO: 12843 - DNA, 75 bp, synthetic construct
  source 1..75: mol_type = other DNA
gcaccgccctctaccgtctggccctgcagcgtttcgggccggacgcacaggccctgaaactgacagaagaggccg

SEQ ID NO: 12844 - DNA, 75 bp, synthetic construct
  source 1..75: mol_type = other DNA
cgctgaatcagattgttgaccgcagaacggcatcgttactcagtgtggggatgctgacaaatcttaaccatgcag

SEQ ID NO: 12845 - DNA, 75 bp, synthetic construct
  source 1..75: mol_type = other DNA
agagcgtctcagcgatcagcaggattattatgcaaaggctgatgctttacgcagtaactggaatgccggactcca

SEQ ID NO: 12846 - DNA, 75 bp, synthetic construct
  source 1..75: mol_type = other DNA
ccctttaacatccggatggtccgggagacggcggacagcaccacggaccagctgcagaataagacgctctggtcg

SEQ ID NO: 12847 - DNA, 75 bp, synthetic construct
  source 1..75: mol_type = other DNA
gggaactgtgcgaagtggatctgctggttcttgatgaaattggcattcagcgcgagacgaaaaacgagcaggtgg

SEQ ID NO: 12848 - DNA, 75 bp, synthetic construct
  source 1..75: mol_type = other DNA
tcatgcccagtatctcgatggtcgccgtgaaatgatgcagtggtacgcagattatattgattcgctttctaagca

SEQ ID NO: 12849 - DNA, 75 bp, synthetic construct
  source 1..75: mol_type = other DNA
atgcggattatctttctacgcaaggagtatttatctttactcccgtcaatgattgcatctcttttctctgctaac

SEQ ID NO: 12850 - DNA, 75 bp, synthetic construct
  source 1..75: mol_type = other DNA
gccgcagcgagtccctgtggctggtgcgtggcggtaaggcaacgcagccggacggccatacgctggcacggctgt

SEQ ID NO: 12851 - DNA, 75 bp, synthetic construct
  source 1..75: mol_type = other DNA
cagctggcgatgctgctggaaggtatcgactggcgacagcctaagcggctgctgacctccctgaccatgctgtaa

SEQ ID NO: 12852 - DNA, 75 bp, synthetic construct
  source 1..75: mol_type = other DNA
atcatgatagacagttgtgtggctcggttgagaaggtataaaccagaggaatatgagctcatcatcgcccacttt

SEQ ID NO: 12853 - DNA, 75 bp, synthetic construct
  source 1..75: mol_type = other DNA
gagctacgggctcttggggtggaaggtgacacgccggaagacacattacggacgctggtcgcccgtatgaaccag

SEQ ID NO: 12854 - DNA, 75 bp, synthetic construct
  source 1..75: mol_type = other DNA
tcagactgggaacgaggagtgaaacgcccgggaggtgcagctcttcggcttctttcagttgtcgagaaaaacggg

SEQ ID NO: 12855 - DNA, 75 bp, synthetic construct
  source 1..75: mol_type = other DNA
gattcctgttattaccaccgaacttttggcgcagttgtacggtgctgaagttaagaacattcaaaataactacgc

SEQ ID NO: 12856 - DNA, 75 bp, synthetic construct
  source 1..75: mol_type = other DNA
ctggctgctgacatcgttgtacgcccgggagaaaccgtgaacggcggaacactggcaaatcatgacaaccagatt

SEQ ID NO: 12857 - DNA, 75 bp, synthetic construct
  source 1..75: mol_type = other DNA
aacctcttctgacactggcgttgaattattacctgtagaaataacgccggatgagcagaaagaacctgtggcggc

SEQ ID NO: 12858 - DNA, 75 bp, synthetic construct
  source 1..75: mol_type = other DNA
gcaaggtgcaccttactccggcccagttatccatgcttcttgagggcatcgactggaaacatccaaaacgaacgg

SEQ ID NO: 12859 - DNA, 75 bp, synthetic construct
  source 1..75: mol_type = other DNA
ttacccgaccgagccgcgccatgctcgaagcgatgatggccgccccggttggggacgacgtttacggagacgacc

SEQ ID NO: 12860 - DNA, 75 bp, synthetic construct
  source 1..75: mol_type = other DNA
aggttttcgtcacagtagcgcaggagaaaagttttagtcgtgcaggagagcgtatcggcctgagccagtcggcag

SEQ ID NO: 12861 - DNA, 75 bp, synthetic construct
  source 1..75: mol_type = other DNA
tgctcattatattttatttaatcatttcggccagcgcccatgctgccggagggatcgcattaggtgccacgcgta

SEQ ID NO: 12862 - DNA, 75 bp, synthetic construct
  source 1..75: mol_type = other DNA
agacgctttctgagaaaattgtacagaaatgcagaaatatgaatggtgaatatgtctggccctggatattgccgt

SEQ ID NO: 12863 - DNA, 75 bp, synthetic construct
  source 1..75: mol_type = other DNA
gtaccgggctgaccgaccggctggccccggatattgcgcggatcaatttttaccgtttttgccagttgctggaac

SEQ ID NO: 12864 - DNA, 75 bp, synthetic construct
  source 1..75: mol_type = other DNA
gatggcaacactgatggagtgcgacgaaaacaatcagccgctggcaggcgcatatatagaccgctccgggctgga

SEQ ID NO: 12865 - DNA, 75 bp, synthetic construct
  source 1..75: mol_type = other DNA
ggacagccgcgcggtgcatgatttctttgccagcgaacgcattgaccaggtctatctggcggcggcgaaagtggg

SEQ ID NO: 12866 - DNA, 75 bp, synthetic construct
  source 1..75: mol_type = other DNA
cagcatcggtgtggcagctggtgatagtaaatctgcaacagaaatcattgctgtttccggggcgcgctgctgggt

SEQ ID NO: 12867 - DNA, 75 bp, synthetic construct
  source 1..75: mol_type = other DNA
ctgtttctggggcgcgctgctgggtgggatttgatccttcgcgtggcgtggatagttctgccgtgtacggagtgc

SEQ ID NO: 12868 - DNA, 75 bp, synthetic construct
  source 1..75: mol_type = other DNA
tcccccgaacccaggtcaggacatgggttgccctctatgaaaaacatggagaaaaaggtttaattcccaaaccta

SEQ ID NO: 12869 - DNA, 75 bp, synthetic construct
  source 1..75: mol_type = other DNA
gcgtggggagctggcgtgcagtttaacccgaccgaatccgtggccattgatattgcttatgaaggctccggcagt

SEQ ID NO: 12870 - DNA, 75 bp, synthetic construct
  source 1..75: mol_type = other DNA
tgcaaagcacactgccgtatctggctccccattttgatcaaattgccaatcatcactatcgcccggcattcgatg

SEQ ID NO: 12871 - DNA, 75 bp, synthetic construct
  source 1..75: mol_type = other DNA
gtaccactcaagtggtgttttaggacaataccagagcgtatttcagttgaagaaatcaatgaggttaaaatttat

SEQ ID NO: 12872 - DNA, 75 bp, synthetic construct
  source 1..75: mol_type = other DNA
atctgcttttccgcacgaaggcagcattgcagaaaaacccgaaaaacgttttgctggcgatatgctggatgcagg

SEQ ID NO: 12873 - DNA, 75 bp, synthetic construct
  source 1..75: mol_type = other DNA
aatcgcttttagcggctattttgagcgcaaccctgttagccggttgtgatggcggtggttccggatcttcctccg

SEQ ID NO: 12874 - DNA, 75 bp, synthetic construct
  source 1..75: mol_type = other DNA
aaagctgtgtgagtggaaaagcgtacggattctggaagctgaatgctgtgcagatcatatccatatgcttgtgga

SEQ ID NO: 12875 - DNA, 75 bp, synthetic construct
  source 1..75: mol_type = other DNA
cattggtccggatgaagaagcacagctcaagaaaattgcgcaggcgcttcagctaccgctggagcagtacctgtg

SEQ ID NO: 12876 - DNA, 75 bp, synthetic construct
  source 1..75: mol_type = other DNA
ttctggtcattaaacgcgtgttcaggttgaccctgcgggctgcacagggttttattgattccattttttctctga

SEQ ID NO: 12877 - DNA, 75 bp, synthetic construct
  source 1..75: mol_type = other DNA
cgccggcgataaaaccgatgaatggctgcaaccagcctgtaatgaaatgtatcgcgtactcaaaaaagatgcgct

SEQ ID NO: 12878 - DNA, 75 bp, synthetic construct
  source 1..75: mol_type = other DNA
cagtatgggctggaggcgaaaacccgctggctgcaggatgagccatccggaaaagtgaacaagctgcgctaccgt

SEQ ID NO: 12879 - DNA, 75 bp, synthetic construct
  source 1..75: mol_type = other DNA
ttcaactatcatcaatgcccggaaactttaccgttaaagtttccggtggtacagcggcatttcttgaggctccct

SEQ ID NO: 12880 - DNA, 75 bp, synthetic construct
  source 1..75: mol_type = other DNA
gcagatgtaccgcgcgacctactcaccggatgacaacaaactgcgcctgtatgccgcgtcacgtcttgacccgga

SEQ ID NO: 12881 - DNA, 75 bp, synthetic construct
  source 1..75: mol_type = other DNA
tcgctctgggtaatggtagccagtcgagtggcttaaacgctattgccttaggtaaggccagtgttgtaactggcg

SEQ ID NO: 12882 - DNA, 75 bp, synthetic construct
  source 1..75: mol_type = other DNA
acaaaagcaacggggcggtgagttcagtcacaacgccgaattacagttttctcgggtacagcggcacgatgaaag

SEQ ID NO: 12883 - DNA, 75 bp, synthetic construct
  source 1..75: mol_type = other DNA
aggatgcgagcacgacgaaaaaggggatagtacagctcagcagtgcgaccaacagcacttccgagtcactggcgg

SEQ ID NO: 12884 - DNA, 75 bp, synthetic construct
  source 1..75: mol_type = other DNA
acttaatgaaaacgaagattttcgccgctggtacggcgctgacctgcctgatgctgtgcgccggttgcaccagcg

SEQ ID NO: 12885 - DNA, 75 bp, synthetic construct
  source 1..75: mol_type = other DNA
gctttctgctgctggagtgtacggaactgggcgaatttacgcagagtcacggaggcagcaatggcgactcccttt

SEQ ID NO: 12886 - DNA, 75 bp, synthetic construct
  source 1..75: mol_type = other DNA
ggaataaaacatcctgaacatgcaacaataccatatgacaacgacaatgaaagtaataaattgctaaaagcagga

SEQ ID NO: 12887 - DNA, 75 bp, synthetic construct
  source 1..75: mol_type = other DNA
atgaatatcaacttaatttatcgtcatccgtgtgagctggaaattgaatcattgctggggcgtgaagagccatat

SEQ ID NO: 12888 - DNA, 75 bp, synthetic construct
  source 1..75: mol_type = other DNA
gtatgacgtggctttttacgctgatgatctggatgcacttaacgaactttccgagctgatctgtgccgcagaatg

SEQ ID NO: 12889 - DNA, 75 bp, synthetic construct
  source 1..75: mol_type = other DNA
caggcagaaggaagcggagaaaatcccctggtttcttcgctcgatgcactggcgcaggtggaaaaaatcggagtc

SEQ ID NO: 12890 - DNA, 75 bp, synthetic construct
  source 1..75: mol_type = other DNA
aggttgcagccagtgcagcaaacgcgatggtgcgtgaattgtccattgccaccatgcaaagcaagagtttctttg

SEQ ID NO: 12891 - DNA, 75 bp, synthetic construct
  source 1..75: mol_type = other DNA
ctgccgtggcgggaattagtggcaaaatgacagaggttaaccagcaaaatacttaccacatttacggtggcggag

SEQ ID NO: 12892 - DNA, 75 bp, synthetic construct
  source 1..75: mol_type = other DNA
cgtcaacaagtgccgggcaggcctcagccagtgccaccgccgccggaaaatcggcagaaagcgccgcatcgtccg

SEQ ID NO: 12893 - DNA, 75 bp, synthetic construct
  source 1..75: mol_type = other DNA
tgttttatggcaaattaatccgtttcctgattatccattttttgcgttaaatcagagtggaagtaatacaaatac

SEQ ID NO: 12894 - DNA, 75 bp, synthetic construct
  source 1..75: mol_type = other DNA
caggtcaatggtctgcgtgacgataatggcaaccgcactgcacgtttttatgaaatgcaggatgccatcaaggct

SEQ ID NO: 12895 - DNA, 75 bp, synthetic construct
  source 1..75: mol_type = other DNA
aggaaattccgtgaaggcggcaaaaacgtccgagacgaatgccaggtcttctgaaacggcagcggaacagagcgc

SEQ ID NO: 12896 - DNA, 75 bp, synthetic construct
  source 1..75: mol_type = other DNA
tcaccggctttcgctcttatttgccagacgcattacgtctaagattcgacgagcaattatctgtccgggctatcg

SEQ ID NO: 12897 - DNA, 75 bp, synthetic construct
  source 1..75: mol_type = other DNA
cgtagtttccctggcaacaggtgatcaaagcgtatttgaaaagcttgggtttgcttatgcgacatgttataaaaa

SEQ ID NO: 12898 - DNA, 75 bp, synthetic construct
  source 1..75: mol_type = other DNA
ccccgacgcctcccaaaccgatttcgtttaataatgacgttatcctcgataaaacagaaaaaacgttaactattc

SEQ ID NO: 12899 - DNA, 75 bp, synthetic construct
  source 1..75: mol_type = other DNA
gcgaaacaccgcgcacaaaaagcagtggatgagctggtggattgtgtggcagagctggaaaccaaagttggaaag

SEQ ID NO: 12900 - DNA, 75 bp, synthetic construct
  source 1..75: mol_type = other DNA
agtaaatacggtgcggtttccctgcgggagcaggcccgttttctggatatcaatcatgacctggtgattggtgtg

SEQ ID NO: 12901 - DNA, 75 bp, synthetic construct
  source 1..75: mol_type = other DNA
tcacctgatatacaaaaacggctttcccgccttcttttaccactacgcgacacgctaacaaaaatgcatgcggcc

SEQ ID NO: 12902 - DNA, 75 bp, synthetic construct
  source 1..75: mol_type = other DNA
tcaccaacgctacatacacgagggagtattggtaacacaggtgggagcgaaacccgtccacgaaatattgcattt

SEQ ID NO: 12903 - DNA, 75 bp, synthetic construct
  source 1..75: mol_type = other DNA
gcgtattattactgtgcttttcgtcaccattaatttctcaggctgcgacactggacgtacgtggtggatatcgta

SEQ ID NO: 12904 - DNA, 75 bp, synthetic construct
  source 1..75: mol_type = other DNA
gtaaattgctgccgtggtataaccccttgcaaaatctggctgactggctgcgtctggcactcggcagcgccattg

SEQ ID NO: 12905 - DNA, 75 bp, synthetic construct
  source 1..75: mol_type = other DNA
tggctattttgccagtagctgcggaggtgcgccaatatccgtcatccgccaatacattgaacaacagcaaacacc

SEQ ID NO: 12906 - DNA, 75 bp, synthetic construct
  source 1..75: mol_type = other DNA
atatcgatcggttgattgaactggtcggcgggcgcggcaatattgcgacggtgagccactgtattactcgcctgc

SEQ ID NO: 12907 - DNA, 75 bp, synthetic construct
  source 1..75: mol_type = other DNA
ttaccattgaggccaccagcgaacaggaagcgcgtcagcaatctcctgatggctgcgtgatggtattcgctgccc

SEQ ID NO: 12908 - DNA, 75 bp, synthetic construct
  source 1..75: mol_type = other DNA
ggatgttacaaaaaatgcagcgtatggcgttgagatagaaagtctggtgctggagataaatgcaccggcatcatc

SEQ ID NO: 12909 - DNA, 75 bp, synthetic construct
  source 1..75: mol_type = other DNA
cggatattacaggtagtgcagaaacctaccctgtacttattgatacggtggaagttaaagcaaacaaagctggag

SEQ ID NO: 12910 - DNA, 75 bp, synthetic construct
  source 1..75: mol_type = other DNA
ttaccttgccgaccgcgccggtatcagggggcagtttagcgacgcggatgcgtatcatctggaccaggcctttcc

SEQ ID NO: 12911 - DNA, 75 bp, synthetic construct
  source 1..75: mol_type = other DNA
aaaacgatttgcgcacaatgaaggacattgatcggttcattcgtgaaaaagagtgcatagcacttaccacgctgg

SEQ ID NO: 12912 - DNA, 75 bp, synthetic construct
  source 1..75: mol_type = other DNA
taccgctactttgcgcccgctcggtttataaacagtattcaggggtcaatgtcctgaaaggcatcgattttacgt

SEQ ID NO: 12913 - DNA, 75 bp, synthetic construct
  source 1..75: mol_type = other DNA
gcccccatcccttgcgcagtttatgcttatcgatcaggacacacacgatatcaaacgggatgatggacgtttatt

SEQ ID NO: 12914 - DNA, 75 bp, synthetic construct
  source 1..75: mol_type = other DNA
gtgatgcaggcgaaaatgaattatctgcccgtcttaatgagccgctggcaaatggtgccgtgatccacatcgtgc

SEQ ID NO: 12915 - DNA, 75 bp, synthetic construct
  source 1..75: mol_type = other DNA
gtttctatctgaagcccgccgccgtcaagaacgaaggagaagcatgcgcctggctggacagccttacaccagaag

SEQ ID NO: 12916 - DNA, 75 bp, synthetic construct
  source 1..75: mol_type = other DNA
tggtgaagggcttccgctgccggagacatatgaccgtccggacccgcgtattaaacagctggcgcgtcgcagcac

SEQ ID NO: 12917 - DNA, 75 bp, synthetic construct
  source 1..75: mol_type = other DNA
tccgctactgtcccgccaggcgttttccgcgtttgcgctggactggttcgtgttcggtaatgcctatcttgaagt

SEQ ID NO: 12918 - DNA, 75 bp, synthetic construct
  source 1..75: mol_type = other DNA
atgacaaatcgtgaagagtggttaagtgcaaaaattgcctacatcaacggactgaaatcaccgtcagagcagcag

SEQ ID NO: 12919 - DNA, 75 bp, synthetic construct
  source 1..75: mol_type = other DNA
ctgctgatttaaccgcagagaagttcgccacagcaatccgaaaccactggcacgtggagaataagctgcactggc

SEQ ID NO: 12920 - DNA, 75 bp, synthetic construct
  source 1..75: mol_type = other DNA
gtggtctctgtgcaatctggtctgccagttacaggcccttaaaggtgttggtcagctaaccgcaataaccctggt

SEQ ID NO: 12921 - DNA, 75 bp, synthetic construct
  source 1..75: mol_type = other DNA
attgataaactggttacaaagtgctggcaggaagaagcatatgcagagatacaattgagaaaggtgacaagataa

SEQ ID NO: 12922 - DNA, 75 bp, synthetic construct
  source 1..75: mol_type = other DNA
agataccatagaaattgaaaagtataaacttgagtacaatgatgtattattcaatcgtacaaatagtcctgaact

SEQ ID NO: 12923 - DNA, 75 bp, synthetic construct
  source 1..75: mol_type = other DNA
attactccccaaaatctccaaaattgagtgatgacgcaccggcgacaggctcgggtggtttaacaattacagatg

SEQ ID NO: 12924 - DNA, 75 bp, synthetic construct
  source 1..75: mol_type = other DNA
tttccgctagtgatgaaacagcttgaattgatgctgacaaccggtgaactaaatccacgccatcagcattgcgtc

SEQ ID NO: 12925 - DNA, 75 bp, synthetic construct
  source 1..75: mol_type = other DNA
taaaatggtgcttaacctggacaggtctcgtgttccaactgagtgtatagagaaaattgaggccattcttaagga

SEQ ID NO: 12926 - DNA, 75 bp, synthetic construct
  source 1..75: mol_type = other DNA
aaacacccatcattatggtgaaaaaacgtcgcactcttttacccccttccttatctgaaaaaacaggtgttatcg

SEQ ID NO: 12927 - DNA, 75 bp, synthetic construct
  source 1..75: mol_type = other DNA
gcccggcatacaaatctatctgcccctgtcatcgacgctgatgctggccatgtattgcccttccatccgtgaaca

SEQ ID NO: 12928 - DNA, 75 bp, synthetic construct
  source 1..75: mol_type = other DNA
gaactgagcagctacctgatcgacatcaccaaagatatcttcaccaaaaaagatgaagacggtaactacctggtt

SEQ ID NO: 12929 - DNA, 75 bp, synthetic construct
  source 1..75: mol_type = other DNA
ttctctggcgttgcagaataaatcaaagcgtcagtcggcggggaaactgctgggataacagccccatggaacgct

SEQ ID NO: 12930 - DNA, 75 bp, synthetic construct
  source 1..75: mol_type = other DNA
atggcgtacagacgctcctgggcagccgtatcagtattaacggtaacctgatccccacatcacaaatgtgtaatc

SEQ ID NO: 12931 - DNA, 75 bp, synthetic construct
  source 1..75: mol_type = other DNA
ccaataattttcgggaaatcgcggaaacgtcaaccaactatccggtaattcctagtgaggtgttgtccgcaatcc

SEQ ID NO: 12932 - DNA, 75 bp, synthetic construct
  source 1..75: mol_type = other DNA
gctctctgtggcgaaaagagaaaccaggctggcagatgatgtaaagctattgcgccaggaggaacaggaaaggcg

SEQ ID NO: 12933 - DNA, 75 bp, synthetic construct
  source 1..75: mol_type = other DNA
gcgtacaacaccaaaacaggcggtgtactggcctacacttttggtccccgaaccgatcaaacgtgccgggagcta

SEQ ID NO: 12934 - DNA, 75 bp, synthetic construct
  source 1..75: mol_type = other DNA
cttatcccgccgaacagcgtgaagccgtttccgccgcgctggagctggaatcggaaccccttaacgttatcgctc

SEQ ID NO: 12935 - DNA, 75 bp, synthetic construct
  source 1..75: mol_type = other DNA
agaattactggcagattatgcactcagtcggtgcgatcgtgtggcggcgttgagaaaacttccggcagaaataaa

SEQ ID NO: 12936 - DNA, 75 bp, synthetic construct
  source 1..75: mol_type = other DNA
ttacccacatcgccacgttttgcgctctgctgtatagcaatagtgctttatgcgctgaactcgtcgaatatgacc

SEQ ID NO: 12937 - DNA, 75 bp, synthetic construct
  source 1..75: mol_type = other DNA
aggctgagaaaggccggaatgccggtggtgactacaaccgtggaggtacacgataacctgacgggaaccacccgc

SEQ ID NO: 12938 - DNA, 75 bp, synthetic construct
  source 1..75: mol_type = other DNA
ccgggccgtcgacagccggggccgcactgtcgatttttatatctcctcccgtcgtaacagcaaagctgcataccg

SEQ ID NO: 12939 - DNA, 75 bp, synthetic construct
  source 1..75: mol_type = other DNA
ctgcgtagcgatgttgattacttgctggatgaggttatcgatattcaggcgcatctggtcactgttgaccaaaga

SEQ ID NO: 12940 - DNA, 75 bp, synthetic construct
  source 1..75: mol_type = other DNA
cgcgtaattaattctaaggatttcgaaaaatacactatatggcttatgacgggaaaaacaaatgaggctgctggg

SEQ ID NO: 12941 - DNA, 75 bp, synthetic construct
  source 1..75: mol_type = other DNA
atggaacttaaaaaattgatggaacatatttctattattcccgattacagacaagcctggaaagtggaacataaa

SEQ ID NO: 12942 - DNA, 75 bp, synthetic construct
  source 1..75: mol_type = other DNA
atgtcaaagtgatggaaggctgtattgtcctcaccgcccaaccacccgccgccgaagagagcgaactgatgcagt

SEQ ID NO: 12943 - DNA, 75 bp, synthetic construct
  source 1..75: mol_type = other DNA
tgatgacatgttaattattgctgttgttacagtaggtaaacgtgaacgtggtaacgtttataatctcgctagtga

SEQ ID NO: 12944 - DNA, 75 bp, synthetic construct
  source 1..75: mol_type = other DNA
aaccttttcagggaacaattccgttccgtattttgcagcgtggtcgtgttcttgttgaaggttcgttcagtggta

SEQ ID NO: 12945 - DNA, 75 bp, synthetic construct
  source 1..75: mol_type = other DNA
agcgtcatcgcgaccatcatcggcgcgtgggttggtggtggcctcgtcgatcggttcgggcgcgcgcccgtcgca

SEQ ID NO: 12946 - DNA, 75 bp, synthetic construct
  source 1..75: mol_type = other DNA
atggcagggaagtttcgctgcattttgctgttgatagcagggctgtttgtatcatctctaagttatgcagaaaac

SEQ ID NO: 12947 - DNA, 75 bp, synthetic construct
  source 1..75: mol_type = other DNA
cacaggacaatgcaggagtgtatgactgcagcaaccgaacagaaaattcccggtaactgttacccggtcgataaa

SEQ ID NO: 12948 - DNA, 75 bp, synthetic construct
  source 1..75: mol_type = other DNA
caacttcactggagcgccgactggcgcaaacctgtagcgggatttctgatctgcaggtgccgctgcgtgacttgt

SEQ ID NO: 12949 - DNA, 75 bp, synthetic construct
  source 1..75: mol_type = other DNA
cactgctgcaaatcgacacacttatccggcaactggctgaaatatcagcaatgacagaaagtattggcggtaaag

SEQ ID NO: 12950 - DNA, 75 bp, synthetic construct
  source 1..75: mol_type = other DNA
acccgctggccaaccgcgtccagtgttccatcaccacgctggccattgagtgcggactggcgacagagtccggtg

SEQ ID NO: 12951 - DNA, 75 bp, synthetic construct
  source 1..75: mol_type = other DNA
atgtctgatatcacagtctcccgtccggaagtggtcaacgggcatacggacgttatcggctcaaccagtatccga

SEQ ID NO: 12952 - DNA, 75 bp, synthetic construct
  source 1..75: mol_type = other DNA
agccagttacacgctgatactgattgatggtgttcgtcagggcggaagcagtgacgtgactcccaacggtttttc

SEQ ID NO: 12953 - DNA, 75 bp, synthetic construct
  source 1..75: mol_type = other DNA
gaagggacggcaagtcttcgttcgaagacctggtatcctacgtctctgtccgggatgacatgaccgatgaggaac

SEQ ID NO: 12954 - DNA, 75 bp, synthetic construct
  source 1..75: mol_type = other DNA
agaaaacagttacaacgaatggctgcgtgcgaaagtagcaacgagccttgcagatccgcgcccagcaattcccca

SEQ ID NO: 12955 - DNA, 75 bp, synthetic construct
  source 1..75: mol_type = other DNA
gaggatttgcgggagcgggaaagtacggtctattttctccggaagacggagctggcgcagagcattgccggtctg

SEQ ID NO: 12956 - DNA, 75 bp, synthetic construct
  source 1..75: mol_type = other DNA
ccatcgtcggctacagcctcggtgacgtcgccaataacttcgccttcgcaatgggggcgctcttcctgttgagtt

SEQ ID NO: 12957 - DNA, 75 bp, synthetic construct
  source 1..75: mol_type = other DNA
gtgcacacccaaattatggtgggctggacgggggcaccgaaaggtgcgccggtttccgataacgccggttacgcc

SEQ ID NO: 12958 - DNA, 75 bp, synthetic construct
  source 1..75: mol_type = other DNA
aaaacgttattcaaaaaatccagacgcttgagtgctctgttgaattcactgagctgaattttcagcccagtgatt

SEQ ID NO: 12959 - DNA, 75 bp, synthetic construct
  source 1..75: mol_type = other DNA
cgcgcgccgcagtcgtgttgaatgggaaaacagacagcgcaaaaagcaggggctggataccctgggtatggatga

SEQ ID NO: 12960 - DNA, 75 bp, synthetic construct
  source 1..75: mol_type = other DNA
atcaccgaagtggcgaaaaataacgcgctgactgatgatgatttttctgcgggaaagtcttcgacggcgagctga

SEQ ID NO: 12961 - DNA, 75 bp, synthetic construct
  source 1..75: mol_type = other DNA
aaacacttcttgtcccatttaaagctgaaggcccggagggtaagagaatgtattatggcatgtaccattgtgagg

SEQ ID NO: 12962 - DNA, 75 bp, synthetic construct
  source 1..75: mol_type = other DNA
atgccgcacatgcgcgtacaagccgctatatcactgacacgacaaaagagcgttatcaccagtgtcagaacgtga

SEQ ID NO: 12963 - DNA, 75 bp, synthetic construct
  source 1..75: mol_type = other DNA
atgatccgaaatgggtcaaggggatccagactcgcgattctgtgaaccagaaccagcatgaatcggaacggaacg

SEQ ID NO: 12964 - DNA, 75 bp, synthetic construct
  source 1..75: mol_type = other DNA
gaggccggaataaatattgatgtgtggggctatgcagaatgtgacctctgtgaagccagggggggcatgggcacc

SEQ ID NO: 12965 - DNA, 75 bp, synthetic construct
  source 1..75: mol_type = other DNA
gcgtcgacgggctattgatgcgctcctgcaggggctgtgtttccactatgacccgctggccaaccgcgtccagtg

SEQ ID NO: 12966 - DNA, 75 bp, synthetic construct
  source 1..75: mol_type = other DNA
gaaaacaaacagcgcaaaaagcaggggctggataccctgggtatggatgagctgatagcgaaagcctggcgtttt

SEQ ID NO: 12967 - DNA, 75 bp, synthetic construct
  source 1..75: mol_type = other DNA
cggaagtggtcaccgggcatacggacgttatctgctccaccagtatccgacacgttgtgacggtacggaatgcag

SEQ ID NO: 12968 - DNA, 75 bp, synthetic construct
  source 1..75: mol_type = other DNA
gggagtttggggagtgcaaaggtaaaaaacactatcacctgatgctgctggttaaccgggatacctggtgtcgtg

SEQ ID NO: 12969 - DNA, 75 bp, synthetic construct
  source 1..75: mol_type = other DNA
gctggtcgatctgcatgaccgcatcctggtcaagctgttcagcggcgcgaagcacaagcatcagcagcagttcca

SEQ ID NO: 12970 - DNA, 75 bp, synthetic construct
  source 1..75: mol_type = other DNA
agccccgaccgctgaaacgcctgttcacagccaaccagtgctggacatccttcctggatgcgggcggcctgcgcg

SEQ ID NO: 12971 - DNA, 75 bp, synthetic construct
  source 1..75: mol_type = other DNA
tagtatcacaattagcattggcttgcactctggctatcacctctcaggctaatgcaactacttatgacacctgga

SEQ ID NO: 12972 - DNA, 75 bp, synthetic construct
  source 1..75: mol_type = other DNA
aggcaagagacgagcaaaaaatttctggtgaatgcctcccgctaaaaaaagtatcgctgtacctgaataacgaaa

SEQ ID NO: 12973 - DNA, 75 bp, synthetic construct
  source 1..75: mol_type = other DNA
gcggagaagcttgccctgcttgaaaaactgggcatcacgctggatgacctggaaaaactcttcaaatcccgctga

SEQ ID NO: 12974 - DNA, 75 bp, synthetic construct
  source 1..75: mol_type = other DNA
aatatcaatgggttaggtttaactcaaaaaagtaagcattatcttttcgaaggtgaacgaggcaagcgcgacagc

SEQ ID NO: 12975 - DNA, 75 bp, synthetic construct
  source 1..75: mol_type = other DNA
ttgtaactaccgatgacattgttcacgaggtgaatctggaaggaaagcgcattggctacgtaattaaaacagaaa

SEQ ID NO: 12976 - DNA, 75 bp, synthetic construct
  source 1..75: mol_type = other DNA
tatttctcttgcacttagtgcaggcaagaaatatgcaattgtgctgaagggaagatacctccttggagaggatac

SEQ ID NO: 12977 - DNA, 75 bp, synthetic construct
  source 1..75: mol_type = other DNA
gtgaacagcgacatgaatcagttctttaacaagctgggcttcgcctccaataccacacagccgggcgtctggcag

SEQ ID NO: 12978 - DNA, 75 bp, synthetic construct
  source 1..75: mol_type = other DNA
tccgatgcttgaacagatggtgaaggaggcggtaagccatattcctgttccgcgtgatggtcgtgactacgatcc

SEQ ID NO: 12979 - DNA, 75 bp, synthetic construct
  source 1..75: mol_type = other DNA
taagagtcttgcgcttggtagtaatagcagtgccaacggtattaactctgtcgcgctgggcgcagattccattgc

SEQ ID NO: 12980 - DNA, 75 bp, synthetic construct
  source 1..75: mol_type = other DNA
gaattgacgctgaactgaaggatgcttttatggccgctgcaaaaagcatggaccgtaatggctctcagttaatcc

SEQ ID NO: 12981 - DNA, 75 bp, synthetic construct
  source 1..75: mol_type = other DNA
ggtgcatggtggaataacgaccctgtcattgctgcccgtaatattcatatcgaatggggaggtattcagaatgac

SEQ ID NO: 12982 - DNA, 75 bp, synthetic construct
  source 1..75: mol_type = other DNA
cggaagtggtgtctgctgttcaccccgccggaagtgtgtttgttctgccgccacagggtgcgccggggataagtt

SEQ ID NO: 12983 - DNA, 75 bp, synthetic construct
  source 1..75: mol_type = other DNA
aatttttatgaaatgggggatattgaaagagaaaaaatatttaaacatgtcgaagatggtatggtctcgcttgat

SEQ ID NO: 12984 - DNA, 75 bp, synthetic construct
  source 1..75: mol_type = other DNA
cgcggacattatccggcgtaatgccattacgcatcccggctttgtgccggtgatccctctgaaggtgccagtgca

SEQ ID NO: 12985 - DNA, 75 bp, synthetic construct
  source 1..75: mol_type = other DNA
taatgacctggctcaagccatcgatgctgacgatcctgacgcattgtgcgcagcaatagcagcccttgatgttga

SEQ ID NO: 12986 - DNA, 75 bp, synthetic construct
  source 1..75: mol_type = other DNA
tggtattcctgactgccggaattgttttatggacagttatgaatattatttttgatgcctgtattgattcgtgga

SEQ ID NO: 12987 - DNA, 75 bp, synthetic construct
  source 1..75: mol_type = other DNA
atgttctgcagcggacgatggctgtcactgttgttcatgaaaaaatggaataaacgccgtaagcaggagcaacgc

SEQ ID NO: 12988 - DNA, 75 bp, synthetic construct
  source 1..75: mol_type = other DNA
ctgcgttccggcagtacgcgtccgtggtgggaagttcctccgtcaacggtctattcctttgcgttctacattttt

SEQ ID NO: 12989 - DNA, 75 bp, synthetic construct
  source 1..75: mol_type = other DNA
ttgaccatctgaaaacccttattgcaaagggcgcaaatcagtgtgcgcgggcaggggataaattaccggatttgc

SEQ ID NO: 12990 - DNA, 75 bp, synthetic construct
  source 1..75: mol_type = other DNA
caatggggttagatgcgattgagaatatgacatcaggtggactaatttatgccgtatctggtgtacctggattga

SEQ ID NO: 12991 - DNA, 75 bp, synthetic construct
  source 1..75: mol_type = other DNA
accaagagctggtaaaactggttactgaacgcagcagtcagcctctgcatgatgtggacctggacagttatttat

SEQ ID NO: 12992 - DNA, 75 bp, synthetic construct
  source 1..75: mol_type = other DNA
gggccaaagggggaacaggggcccgcgggtcctcaggggccgaagggtgataagggagagcgcggtgacaccggc

SEQ ID NO: 12993 - DNA, 75 bp, synthetic construct
  source 1..75: mol_type = other DNA
cagtaagttagaactcaaccgcaccgagatcatcgagctattggggcaagagtccgaaaaattgcacaactcaat

SEQ ID NO: 12994 - DNA, 75 bp, synthetic construct
  source 1..75: mol_type = other DNA
tcgtaagtacctcgatatctttgatactggcatctggtatggctgcatttgctgctcatgcggcagatgatgtaa

SEQ ID NO: 12995 - DNA, 75 bp, synthetic construct
  source 1..75: mol_type = other DNA
gaagatcttgtaattaagtggcctaatgacccttgtgtcatctcccataaagatagtttggcacaatcatttgct

SEQ ID NO: 12996 - DNA, 75 bp, synthetic construct
  source 1..75: mol_type = other DNA
accggaatacagaccgtatcgttaccatactgctggcactgattattgtggtcctgctgactactgtcagcgtca

SEQ ID NO: 12997 - DNA, 75 bp, synthetic construct
  source 1..75: mol_type = other DNA
attgagcgacataatctgaatctgagacaacatctggcaaggctgggacggaagtcactgtcgttctcaaaatcg

SEQ ID NO: 12998 - DNA, 75 bp, synthetic construct
  source 1..75: mol_type = other DNA
ctgctgaggcagtgaaggaagtcctgcgctctgaagaagtccggagcgcactgaaacagcaacttcggcagaacc

SEQ ID NO: 12999 - DNA, 75 bp, synthetic construct
  source 1..75: mol_type = other DNA
acaaccggctggcagaactgacaatgaacaaactttacgatcgcgcgccggcttccgtctggaaatatgtcacct

SEQ ID NO: 13000 - DNA, 75 bp, synthetic construct
  source 1..75: mol_type = other DNA
tctgtcgaccccttcggctattaccggaatacagaccgtatcgttaccatactgctggcactgattattgtggtc

SEQ ID NO: 13001 - DNA, 75 bp, synthetic construct
  source 1..75: mol_type = other DNA
gggactgtggaaacgcgattactcataatacagtgtgttgcccgtattgtggttctgtcgaccccttcggctact

SEQ ID NO: 13002 - DNA, 75 bp, synthetic construct
  source 1..75: mol_type = other DNA
ctttacctgattgacttagaacacgcattacgcgtcgctggcattcgcatcaaaggagaggagcatggaaataaa

SEQ ID NO: 13003 - DNA, 75 bp, synthetic construct
  source 1..75: mol_type = other DNA
ccctggttgctcccggtaagcggcacgaacaaccagcgttgtgtgaatcatatttctgaaccggataccgaaatt

SEQ ID NO: 13004 - DNA, 75 bp, synthetic construct
  source 1..75: mol_type = other DNA
gtggccgatttgtctcgtttcgaaaaaggacaaaaaataacgccaggggtttatcgtgtcgatattgttctgaat

SEQ ID NO: 13005 - DNA, 75 bp, synthetic construct
  source 1..75: mol_type = other DNA
cggtagccgggctgggcatgcatatgctccctgccaccaaggccattcctaaagagatgctaccgatcgttgaca

SEQ ID NO: 13006 - DNA, 75 bp, synthetic construct
  source 1..75: mol_type = other DNA
ccggtatgaccgtcacggcaggctgacagagaaaaccgacctcatcccggaaggggttatccgcacggatgatga

SEQ ID NO: 13007 - DNA, 75 bp, synthetic construct
  source 1..75: mol_type = other DNA
atttggcgatcgctgctgtcagttgactatcattggcaatgccactgaagttaatgattttacacatgccttatc

SEQ ID NO: 13008 - DNA, 75 bp, synthetic construct
  source 1..75: mol_type = other DNA
atgcttacggatgcgctgaaacagctgtcgaaagatgaacaccccatactgcacagcgatcaaggttggcaatat

SEQ ID NO: 13009 - DNA, 75 bp, synthetic construct
  source 1..75: mol_type = other DNA
atgaaattattaaccacagaaacggcgctggatattctgattgcgtggctgcaggacaatattgactgcgaatca

SEQ ID NO: 13010 - DNA, 75 bp, synthetic construct
  source 1..75: mol_type = other DNA
aaaccaaagcgataagccagtgcgcaagccaaatggctaagtggggcgttggtgggcgaaaaagattgcttcatg

SEQ ID NO: 13011 - DNA, 75 bp, synthetic construct
  source 1..75: mol_type = other DNA
tcgctgcgagtcttgccacgccgagcacctggtcgctttcagctgtaagcgtcgcggtttctgcccgagctgtgg

SEQ ID NO: 13012 - DNA, 75 bp, synthetic construct
  source 1..75: mol_type = other DNA
aagaagagcaaaaagacgggctgtgtgcctacggctgcagtgaagttcctgagcgtcctgcagcagggcgtccac

SEQ ID NO: 13013 - DNA, 75 bp, synthetic construct
  source 1..75: mol_type = other DNA
aacttcagcaccgacagtaacggttttcagaactactatcgtgatttagcccaacgggttaaaaatcaggatatc

SEQ ID NO: 13014 - DNA, 75 bp, synthetic construct
  source 1..75: mol_type = other DNA
atcattaaccacggaaacagcgctggatattctgattgcgtggctgcaggacaatatcgactgcgaatcgggaat

SEQ ID NO: 13015 - DNA, 75 bp, synthetic construct
  source 1..75: mol_type = other DNA
aaaaatcacataaattctgggcggtggagcagcagggaaacgaactgcacatcaactggggtaaagtcggcacca

SEQ ID NO: 13016 - DNA, 75 bp, synthetic construct
  source 1..75: mol_type = other DNA
actgggtattagcagcctgatccgcgttaaaaaataccgttcatataaaggagaacaaggacgaatttgcgataa

SEQ ID NO: 13017 - DNA, 75 bp, synthetic construct
  source 1..75: mol_type = other DNA
cgatgacgctgaatgtgacaacagtggcgctggacggggaaaccagtgccggtgacaccctccgggttcaggcag

SEQ ID NO: 13018 - DNA, 75 bp, synthetic construct
  source 1..75: mol_type = other DNA
gtctaatgattctttagaaacatgtaagatgaagtgctccggaaataacattggacgttttattagatttgtatt

SEQ ID NO: 13019 - DNA, 75 bp, synthetic construct
  source 1..75: mol_type = other DNA
ttgctctgacagcagggatgcatcttgctgttcatgcttcagaaaatgtgaacacaactgaaaaccgccagttcc

SEQ ID NO: 13020 - DNA, 75 bp, synthetic construct
  source 1..75: mol_type = other DNA
gtgtatacaacattgaggaaattatgcgctggatcgaaaaccagaaacaaccaggtgccaaaaatgcaagttccg

SEQ ID NO: 13021 - DNA, 75 bp, synthetic construct
  source 1..75: mol_type = other DNA
atgaggatttttttaagcgtgattttattcctgtttactgcttttcagtctgcaaatgcaggtggaatacctggt

SEQ ID NO: 13022 - DNA, 75 bp, synthetic construct
  source 1..75: mol_type = other DNA
atgaaacctgtcgttgcggggatggggctggcctggcaatcacagttggctaagttaagacagcgttttgcgtca

SEQ ID NO: 13023 - DNA, 75 bp, synthetic construct
  source 1..75: mol_type = other DNA
cagagcacggtcaacagtgcccttatgtcaggccggagcgcagagaaatacagttgattaaacgtctgcagcaat

SEQ ID NO: 13024 - DNA, 75 bp, synthetic construct
  source 1..75: mol_type = other DNA
ccaacaatcagttcgggctggggatttatctgtatacggatgctcccgttcctgatggtgtggcgatgacgggta

SEQ ID NO: 13025 - DNA, 75 bp, synthetic construct
  source 1..75: mol_type = other DNA
aaccgaccctgcaggctcccggcgaaattgtccgggggctggatgatatccggcaggcgattcaaattatcctgc

SEQ ID NO: 13026 - DNA, 75 bp, synthetic construct
  source 1..75: mol_type = other DNA
gcgcagccaggctgcttgtcccggatgcggcaaaacatttactcagggagatgcggggggctgagtacgtcatca

SEQ ID NO: 13027 - DNA, 75 bp, synthetic construct
  source 1..75: mol_type = other DNA
gtgtggttattctgaatgccaccaccgttcggtctccgtcagggcaccctgtggaaacaatgacggagggggcaa

SEQ ID NO: 13028 - DNA, 75 bp, synthetic construct
  source 1..75: mol_type = other DNA
ctgaccacggtaaacggcgtctcgcagtttcagccggagtggatatgctgggagccaggagtgacctgggttcgc

SEQ ID NO: 13029 - DNA, 75 bp, synthetic construct
  source 1..75: mol_type = other DNA
agagttgtacgtataacgacatcatcccggctgaccactgtctgcatgatgtgcaggatatgagtacgctgaatc

SEQ ID NO: 13030 - DNA, 75 bp, synthetic construct
  source 1..75: mol_type = other DNA
ctgttgctggaagactacaaagcctccctgaaatatctcagcgatcacccgaaactgcagggtattgcccagcag

SEQ ID NO: 13031 - DNA, 75 bp, synthetic construct
  source 1..75: mol_type = other DNA
ggatatatggatatacaacgcgaaaacgcatgccatttataaccccctgtatgacctgatgttcagagctggcat

SEQ ID NO: 13032 - DNA, 75 bp, synthetic construct
  source 1..75: mol_type = other DNA
atgcgtgatatgtatgaagtattggaccgctggggagcatgggctgcagcagataacagtggcgtggactggcag

SEQ ID NO: 13033 - DNA, 75 bp, synthetic construct
  source 1..75: mol_type = other DNA
gtctttataagacagttttgtctgtttgtggtgggaaaagagaaaccgaattgttcttttattcactgccagtaa

SEQ ID NO: 13034 - DNA, 75 bp, synthetic construct
  source 1..75: mol_type = other DNA
ggatttattaccgttaccgatggtgcggaaattgattaccgggagatccttgagtctgcgaaagaagcaaatcgc

SEQ ID NO: 13035 - DNA, 75 bp, synthetic construct
  source 1..75: mol_type = other DNA
atggcggttggcagagccatgctgtacgagaaagaagacacgctgtctgaccacattgagtcctatgggatccgc

SEQ ID NO: 13036 - DNA, 75 bp, synthetic construct
  source 1..75: mol_type = other DNA
gtgtcaggcacactccatgagacaaattatcccaacgacaacaacgaccgcccctggtgggggctcccctgcacc

SEQ ID NO: 13037 - DNA, 75 bp, synthetic construct
  source 1..75: mol_type = other DNA
ctgtagctctgggccatggctcacaggtgtcgggagaaaataacgtggtatctgttggtgccgggcctgagggat

SEQ ID NO: 13038 - DNA, 75 bp, synthetic construct
  source 1..75: mol_type = other DNA
aatggccgctactatgacacccccatggactggaatgccattgctcgcgcctcgcgtcgtgcatcatggcaccag

SEQ ID NO: 13039 - DNA, 75 bp, synthetic construct
  source 1..75: mol_type = other DNA
gtggtggcaagccctgactttgtgcgtatcaacggcgtgcccgttctctcagagaacgacgtgcgcggactgatg

SEQ ID NO: 13040 - DNA, 75 bp, synthetic construct
  source 1..75: mol_type = other DNA
atgtacgcaaaatcttttctcgcacttgatggcaacggacgtctgaccggtgcccgtaccgcacagactgctcct

SEQ ID NO: 13041 - DNA, 75 bp, synthetic construct
  source 1..75: mol_type = other DNA
atggttacaatgaattgctattacaggccagagagtctgataatcctgagcaggccgagatccacaatttcctga

SEQ ID NO: 13042 - DNA, 75 bp, synthetic construct
  source 1..75: mol_type = other DNA
ttgatggcaacgggcgtctgactggtgcccgtaccgcacagactgcaccttacgatcgctacacttgccaccttt

SEQ ID NO: 13043 - DNA, 75 bp, synthetic construct
  source 1..75: mol_type = other DNA
agcgatttgcgtcgctggacgaactgaaagcgcagattgcgcgtgatgaattaaccgcccgcgaattttttgggc

SEQ ID NO: 13044 - DNA, 75 bp, synthetic construct
  source 1..75: mol_type = other DNA
aagaaagggattcgaatagaaccccttgaaaattactttgcaacaaaaagcattaattcttttgattcaaaataa

SEQ ID NO: 13045 - DNA, 75 bp, synthetic construct
  source 1..75: mol_type = other DNA
ctgctccacctcagtcagccacattctggctgtacaaaagagtacactgctgcaaatcgacacacttatccggca

SEQ ID NO: 13046 - DNA, 75 bp, synthetic construct
  source 1..75: mol_type = other DNA
aagccgaaaagaaagaagctcaggccgagaattcgggagcatatactttcgaaaccattgctcgtgaatggcatg

SEQ ID NO: 13047 - DNA, 75 bp, synthetic construct
  source 1..75: mol_type = other DNA
ctacagtgacgcttgctcaggcaagagcaaagcgcgacgaagctaaaaagctgttagtgcagggcattgacccaa

SEQ ID NO: 13048 - DNA, 75 bp, synthetic construct
  source 1..75: mol_type = other DNA
gggcggaacgatccgaacaagcctatgagtgaggcgagtattaaccaagttatcaagcgtattggttatggtgga

SEQ ID NO: 13049 - DNA, 75 bp, synthetic construct
  source 1..75: mol_type = other DNA
acaagatttggctgttgtatcaactcttgttgatgggatgaagaatattgatacatcaacaccagatattgaata

SEQ ID NO: 13050 - DNA, 75 bp, synthetic construct
  source 1..75: mol_type = other DNA
tgttgaagggattgctgagtcgtttactggaaaatgcttatccaagccatcaattataaaaagagcagataacaa

SEQ ID NO: 13051 - DNA, 75 bp, synthetic construct
  source 1..75: mol_type = other DNA
gtgtcggttattaccagcgaggatattaaaaagacccctccggtaaacgacctttcagatattattcgtaaaatg

SEQ ID NO: 13052 - DNA, 75 bp, synthetic construct
  source 1..75: mol_type = other DNA
tcttcagttacgatgcgctggaccggctggtacagcagggcggctttgacgggcggacgcaacgttatcattatg

SEQ ID NO: 13053 - DNA, 75 bp, synthetic construct
  source 1..75: mol_type = other DNA
aaccaactggcgatgttattcaccctggccaacctgtttcgggtggaccaaatgatacgtcaggggagagatctc

SEQ ID NO: 13054 - DNA, 75 bp, synthetic construct
  source 1..75: mol_type = other DNA
ttatattgacaaataatttcgattgtttcaaaaacactttgacaatcaatagcattgtcaaaccgttatcaagtg

SEQ ID NO: 13055 - DNA, 75 bp, synthetic construct
  source 1..75: mol_type = other DNA
acgctcaagcagcgcaccgagaaagcggccaggacggcaggtcgtgcccccgcaggcagtcaggtccatcgtctg

SEQ ID NO: 13056 - DNA, 75 bp, synthetic construct
  source 1..75: mol_type = other DNA
ccgcaaatcctcggcgcggcacaaatggacccgaaagtggtgtttgttaccacctgtttgattgccggtatcggc

SEQ ID NO: 13057 - DNA, 75 bp, synthetic construct
  source 1..75: mol_type = other DNA
ggacttcagccgcctggtgctcgattatctggtctttgccaacggctatcttgagaagcgcatgagcgtcaccgg

SEQ ID NO: 13058 - DNA, 75 bp, synthetic construct
  source 1..75: mol_type = other DNA
aaagctaccttcgccatgtgcctggcgtcatagcagactggccggtcaaccgggtcagcgaactgcttccgtggc

SEQ ID NO: 13059 - DNA, 75 bp, synthetic construct
  source 1..75: mol_type = other DNA
gaaagccagttcgcgcaacgacttctggacgggattggcgttcagcgtcagaacggcagcatgaaacgccgtgga

SEQ ID NO: 13060 - DNA, 75 bp, synthetic construct
  source 1..75: mol_type = other DNA
tgacggatattggcgcggcgaaacttgccagcgccgccgcgctcggtgtgcctttaaaaattacccatatggcgg

SEQ ID NO: 13061 - DNA, 75 bp, synthetic construct
  source 1..75: mol_type = other DNA
cgagcacaccattgataacagcggctttaccacgcagcttgagcttgaggcaaaaatcccggaatggatagcgga

SEQ ID NO: 13062 - DNA, 75 bp, synthetic construct
  source 1..75: mol_type = other DNA
ggataaagaaaaagcaattgggttatatactcagatgaaaatgcaggaaagcgctcctttatcatatatatatca

SEQ ID NO: 13063 - DNA, 75 bp, synthetic construct
  source 1..75: mol_type = other DNA
tcgtcaccgttacgaagtcaacaacatgctgttgaaacagattgaagatgcaggtctgcgcgttgcgggccgttc

SEQ ID NO: 13064 - DNA, 75 bp, synthetic construct
  source 1..75: mol_type = other DNA
tgatgagtttgacgctgacggataaccggggctttgaagcggaccagcttgatctggagctggatgacgctgacg

SEQ ID NO: 13065 - DNA, 75 bp, synthetic construct
  source 1..75: mol_type = other DNA
gatgagtacgctatttgcttaccgggcatctgagtctgaaggacggttgacaccacagggttgggctgccggagg

SEQ ID NO: 13066 - DNA, 75 bp, synthetic construct
  source 1..75: mol_type = other DNA
ttattctgctgatagttattctaaaggtgttatgccgagtgtagttgttagtggtggtgatggtattcaaatctc

SEQ ID NO: 13067 - DNA, 75 bp, synthetic construct
  source 1..75: mol_type = other DNA
tcgttctcagggcggttgttgctgtggctaacgcagtgatagctctcctggaactgatccgggaactggttgact

SEQ ID NO: 13068 - DNA, 75 bp, synthetic construct
  source 1..75: mol_type = other DNA
cggacagaacggacagtatcgttacatgggaaatcatggtcccatgcaactggaagtccccgtgatcagtatgcc

SEQ ID NO: 13069 - DNA, 75 bp, synthetic construct
  source 1..75: mol_type = other DNA
ctttcattgcggttgctgaaacaggaagtttttcaaaagcggcagaacgattatgtaaaaccacggcgacgatca

SEQ ID NO: 13070 - DNA, 75 bp, synthetic construct
  source 1..75: mol_type = other DNA
ttaccaaaccaatacttattatgaaaaacacaatacatatcaacttcgctatttttttaataattgcaaatatta

SEQ ID NO: 13071 - DNA, 75 bp, synthetic construct
  source 1..75: mol_type = other DNA
cggagatgcgctaccgctacgacgataccgggcgggtggtggagcagctgaacccggcaggcctgagttaccgct

SEQ ID NO: 13072 - DNA, 75 bp, synthetic construct
  source 1..75: mol_type = other DNA
cgctaccgctggcgagtaaatttaaagccgaagcgcgggcaatggctgacagaggtttatcaacctacgaggccg

SEQ ID NO: 13073 - DNA, 75 bp, synthetic construct
  source 1..75: mol_type = other DNA
catttcagcacggcagcccgtcgggggattatttctgacaggtttgtagaagcaattttgcagttttggcgcgaa

SEQ ID NO: 13074 - DNA, 75 bp, synthetic construct
  source 1..75: mol_type = other DNA
aaggacaaaagcgcatggagcgaatctttctgattcatgctcgagcgccatattttcgtgctctctgttcgtttt

SEQ ID NO: 13075 - DNA, 75 bp, synthetic construct
  source 1..75: mol_type = other DNA
cgcacaaatccgcccttcttccgtggtgaccaaggactacacctttaaacgacccggctgggcagggcgttttga

SEQ ID NO: 13076 - DNA, 75 bp, synthetic construct
  source 1..75: mol_type = other DNA
gataccgacctgaaatcgttcatcgaaaccgtcggcgctaaccttaataaaaccatcattatggggccgggcgta

SEQ ID NO: 13077 - DNA, 75 bp, synthetic construct
  source 1..75: mol_type = other DNA
gaacgaatcgatcaccaggagtaccgcaaaattctggcgggcactgagcaggaaatgcacctgaaaaaattacgc

SEQ ID NO: 13078 - DNA, 75 bp, synthetic construct
  source 1..75: mol_type = other DNA
tttgatgacgtggttaagttgtttgaatttgatacaaccactcaaaagttagaaatcccggcaaaggaggctgcc

SEQ ID NO: 13079 - DNA, 75 bp, synthetic construct
  source 1..75: mol_type = other DNA
acagtgatgcccattacgtggtgaaagatgcagaaaaaatccttgcgccggacagacgtcgtttactccaacagg

SEQ ID NO: 13080 - DNA, 75 bp, synthetic construct
  source 1..75: mol_type = other DNA
ccagtgccaatatgagcgtcgggtttgatgtgctcggggcggcggtgacacccgttgatggtgcattgctcggag

SEQ ID NO: 13081 - DNA, 75 bp, synthetic construct
  source 1..75: mol_type = other DNA
cgaagaactgaatgaagatattgcctggcgcattggtcgcgcctatggcgaatttctcaaaccgaaaaccattgt

SEQ ID NO: 13082 - DNA, 75 bp, synthetic construct
  source 1..75: mol_type = other DNA
gcctccctgaaatatctcagcgatcacccgaaactgcagggtattgcccagcagaacagctttaaacatacctga

SEQ ID NO: 13083 - DNA, 75 bp, synthetic construct
  source 1..75: mol_type = other DNA
ttggcggtaaaaatgtggcctggctgcactctgaagtcaccgcatggatggccgggcgcatcgccggacgcaaac

SEQ ID NO: 13084 - DNA, 75 bp, synthetic construct
  source 1..75: mol_type = other DNA
tgactaatcagggcgcggaacgactggctaacgcgacgatgctcggcagtaagctgaatttgacgcaaatggccg

SEQ ID NO: 13085 - DNA, 75 bp, synthetic construct
  source 1..75: mol_type = other DNA
ggtttgtattatctgggcgaaagaatatacgcagtcctttaaatgtcattatcacgtctgccttttttttaacaa

SEQ ID NO: 13086 - DNA, 75 bp, synthetic construct
  source 1..75: mol_type = other DNA
tcgatgattcggcactgatgcgccagatcatgacagaaatcatcaacagccatagcgacatggaaatggtggcga

SEQ ID NO: 13087 - DNA, 75 bp, synthetic construct
  source 1..75: mol_type = other DNA
ctggatagcggggctttattgcaggttacgcgatcacgttcacaacaaaaggcgacaaatttagactcaagtctt

SEQ ID NO: 13088 - DNA, 75 bp, synthetic construct
  source 1..75: mol_type = other DNA
gccagtcacaatctaccaactttatagtatcacacaaacaacacatccattatgttaaagagcacttaatccatt

SEQ ID NO: 13089 - DNA, 75 bp, synthetic construct
  source 1..75: mol_type = other DNA
aaagcaactggcggctatggcatccggagcaaatgagcatgaaaatgcagtattttcccatctgctcactttctt

SEQ ID NO: 13090 - DNA, 75 bp, synthetic construct
  source 1..75: mol_type = other DNA
ccaaaaatagcagcgtaacgtatcgaaccatcaatgactacggggcggaaacgccgcaactcaactgtaaatcgt

SEQ ID NO: 13091 - DNA, 75 bp, synthetic construct
  source 1..75: mol_type = other DNA
ggcattgcgcttcagctcaccacagcccgttttctgggaacatttctgacggatttaactcaggttctgcctggt

SEQ ID NO: 13092 - DNA, 75 bp, synthetic construct
  source 1..75: mol_type = other DNA
ccacctcacagttcctggcctcggtgattctggataatctgcctccccggccctttaacatccggatggtcaggg

SEQ ID NO: 13093 - DNA, 75 bp, synthetic construct
  source 1..75: mol_type = other DNA
aacagtgctacccgaacacggccattgtggggctgcaggtggatgcggagcagttcggcggccagcagatgacgg

SEQ ID NO: 13094 - DNA, 75 bp, synthetic construct
  source 1..75: mol_type = other DNA
catcatggccggttttaacggtaccacccgcgccgccacctctgaccgcaccaaaaatccgatgctgcaggatgt

SEQ ID NO: 13095 - DNA, 75 bp, synthetic construct
  source 1..75: mol_type = other DNA
agatggtcaggatgtcgtttctgctctgatcatcgaagagtaccaggctcaagggggagacgagatcactttccc

SEQ ID NO: 13096 - DNA, 75 bp, synthetic construct
  source 1..75: mol_type = other DNA
gtgatatgaacgttatgcctgggggggcactgcgtgtcgctaaaaccactatcggcggcaacctggagaatggcg

SEQ ID NO: 13097 - DNA, 75 bp, synthetic construct
  source 1..75: mol_type = other DNA
ggtaattctgcaggtaacttcgcgctgaccaccggaactgtcgaagctggggcttacgtctacacgctggctaaa

SEQ ID NO: 13098 - DNA, 75 bp, synthetic construct
  source 1..75: mol_type = other DNA
tacgtggtggaagactacgccgccggttgtctggtggaaaaaattaaggtcggtgatttctccacaccggctaag

SEQ ID NO: 13099 - DNA, 75 bp, synthetic construct
  source 1..75: mol_type = other DNA
gcagagtattctggtgaacaaaaccccgctgacggacacggacggtaatcccgtgatacacggtgtgaccgcggt

SEQ ID NO: 13100 - DNA, 75 bp, synthetic construct
  source 1..75: mol_type = other DNA
acgcgcaccatcacgtcagcgaacattgaccgtctgcgggtcaccttcggggtgcagtcactggtggagaccacc

SEQ ID NO: 13101 - DNA, 75 bp, synthetic construct
  source 1..75: mol_type = other DNA
cgcacaaatccgcccttcttccgtggtgaccaaagactacacctttaaacgccccggctgggccggacgttttga

SEQ ID NO: 13102 - DNA, 75 bp, synthetic construct
  source 1..75: mol_type = other DNA
accagacggtcccggatggtttcggggggaccgagccgcggatgacctttaatgcgtacctggcacaacagcgta

SEQ ID NO: 13103 - DNA, 75 bp, synthetic construct
  source 1..75: mol_type = other DNA
gaagtgtagaagagctggaaaatgccgttaacgaatacataacttactggaatcaaaaaagaataaaactcagtc

SEQ ID NO: 13104 - DNA, 75 bp, synthetic construct
  source 1..75: mol_type = other DNA
tcagcggcaaaccgatccccgacaacagggaaaacataactattcatctggacgatcacatccggtctcttcagg

SEQ ID NO: 13105 - DNA, 75 bp, synthetic construct
  source 1..75: mol_type = other DNA
ggggtgatcaacgtcttcaggggactgagctggaattacaaaactaattgcccctgtaaatttggcagtaaaatt

SEQ ID NO: 13106 - DNA, 75 bp, synthetic construct
  source 1..75: mol_type = other DNA
cgtaccacctggaccaggcctttccgctgctgatgaaacaactggaactcgtgctcaccagcggtgaactgaatc

SEQ ID NO: 13107 - DNA, 75 bp, synthetic construct
  source 1..75: mol_type = other DNA
cgtttgcgtgtcttgtattggtgatagtgtgttgttggtcatgatactgccctgtaaagcaatgcgccgtagtac

SEQ ID NO: 13108 - DNA, 75 bp, synthetic construct
  source 1..75: mol_type = other DNA
atggacgagcgcttgttgcgatagcagcaaaaaatgcacgtatgtgctgggcaatgttgcacctgagagatgaat

SEQ ID NO: 13109 - DNA, 75 bp, synthetic construct
  source 1..75: mol_type = other DNA
tgaatgttgaagagtgcgaccgtctgttttttctgccttacctgtttggccaggattttctgtatgtcgaagcgt

SEQ ID NO: 13110 - DNA, 75 bp, synthetic construct
  source 1..75: mol_type = other DNA
gaaagccagcatccgtgccaaggtggagcacccgtttcgcatcatcaagcggcagttcggcttcgtgaaagccag

SEQ ID NO: 13111 - DNA, 75 bp, synthetic construct
  source 1..75: mol_type = other DNA
attatccgcaccaaaaaacagagtccgttaaaaaaggctctgacctttctgaaaagccggagggtctggaaatga

SEQ ID NO: 13112 - DNA, 75 bp, synthetic construct
  source 1..75: mol_type = other DNA
ggtaagttttcaaaaaaagggtatgtcgacgcgggtaaatataatttacgtgtatttataaataaacaacccctt

SEQ ID NO: 13113 - DNA, 75 bp, synthetic construct
  source 1..75: mol_type = other DNA
ggtctctttcctgatggcgacttcaaacgcttaggcgatgtggttgaactgaaagctgaaataattgacgacgat

SEQ ID NO: 13114 - DNA, 75 bp, synthetic construct
  source 1..75: mol_type = other DNA
acggatattaccaaaaatgcaacgtatggcgttgagatagaaagtctggtgctggaaataaatagtcctgcagcg

SEQ ID NO: 13115 - DNA, 75 bp, synthetic construct
  source 1..75: mol_type = other DNA
catcagcagcgtataccgtcacgccaatgaccgtggtcatggtttgtttaatcctgcggctgacattaaaccttc

SEQ ID NO: 13116 - DNA, 75 bp, synthetic construct
  source 1..75: mol_type = other DNA
aatgccatgaacggcaaccgcgctgaaatgagcccggaagcagccggcattaccgcctgtctgatggcgtacagc

SEQ ID NO: 13117 - DNA, 75 bp, synthetic construct
  source 1..75: mol_type = other DNA
ccgcgttttttagcggatgatccccaggctgtggctgatttatcgcgttttgaaaatgggcaagaattaccgcca

SEQ ID NO: 13118 - DNA, 75 bp, synthetic construct
  source 1..75: mol_type = other DNA
ggtcatggaagcgatgaagcatgtcaatgaatggcttggggttgaagtgatgcgctttaatccctattcgctgct

SEQ ID NO: 13119 - DNA, 75 bp, synthetic construct
  source 1..75: mol_type = other DNA
cagagcggtatgtacgaagtctgtttacaactaccagccagacttgttcctggactgcggaagtgcgagtactta

SEQ ID NO: 13120 - DNA, 75 bp, synthetic construct
  source 1..75: mol_type = other DNA
aaaacccgctgctgcaggatgtgaataaaggctggctacagaaaatccgtgaggatgcaccggatcacgtcatgg

SEQ ID NO: 13121 - DNA, 75 bp, synthetic construct
  source 1..75: mol_type = other DNA
gcgccgttcttcccgccgaatgcgctgctgatcacccgtctggataacttgtccatctactggcaggaagacacc

SEQ ID NO: 13122 - DNA, 75 bp, synthetic construct
  source 1..75: mol_type = other DNA
accggattctggcaggctcccgcagccatcagaccggtgtaaacggtgaaaataacagcgtccgtctcagcattc

SEQ ID NO: 13123 - DNA, 75 bp, synthetic construct
  source 1..75: mol_type = other DNA
gaacgtgaaaatcgtgaactgcgccgcagtaacgatatccttcgccaggcttccgcttattttgcgaaggcggag

SEQ ID NO: 13124 - DNA, 75 bp, synthetic construct
  source 1..75: mol_type = other DNA
gtccattattaccggctgcgggattatgccctgcagcatccggaatgcaacgccattatgcgcatcattgactga

SEQ ID NO: 13125 - DNA, 75 bp, synthetic construct
  source 1..75: mol_type = other DNA
ggttaacctcggtgaaagacgcacagggccgtgaaacgcagtatgagtacaacgccgcaggcgacctgactgccg

SEQ ID NO: 13126 - DNA, 75 bp, synthetic construct
  source 1..75: mol_type = other DNA
tggtttttctgctggccggtcatatccctgtggtgtcagcggatgcggcctgtgaggggcgtttcgtcaacccga

SEQ ID NO: 13127 - DNA, 75 bp, synthetic construct
  source 1..75: mol_type = other DNA
atgacaaccttttcgcatagctccaccacaccttctgtttccgtaaccactgcatcagggaataaccagtctcaa

SEQ ID NO: 13128 - DNA, 75 bp, synthetic construct
  source 1..75: mol_type = other DNA
aaggtgaacgcaaggaaaccggaaaatacacgtctgttgttgatctcgcccgcgccagagccaatcaacagtaca

SEQ ID NO: 13129 - DNA, 75 bp, synthetic construct
  source 1..75: mol_type = other DNA
catgctggctaatacctgcacctggacctatcgcggtgatgagtgcggttatcacggtccggcggtcgcggatga

SEQ ID NO: 13130 - DNA, 75 bp, synthetic construct
  source 1..75: mol_type = other DNA
caccggtgaaaaaatctggattaaagcctctatcagcccggtttatgacgtgctcgcgcatctgcagaacctggt

SEQ ID NO: 13131 - DNA, 75 bp, synthetic construct
  source 1..75: mol_type = other DNA
cacggttgtaaacagtgacggctggcagattgtcaaggaaggtggtctggcggatttcaccaccgttaaccagaa

SEQ ID NO: 13132 - DNA, 75 bp, synthetic construct
  source 1..75: mol_type = other DNA
cccgcaacaagctgggttgctatatggcgcagcaggcgtcgcttaacaatatcccggtatctgcactggtatcgc

SEQ ID NO: 13133 - DNA, 75 bp, synthetic construct
  source 1..75: mol_type = other DNA
taatcgcctgccgatgaatgctggctgggatgaagatctgttgcggatggagctgtcggacctaatcaatgctga

SEQ ID NO: 13134 - DNA, 75 bp, synthetic construct
  source 1..75: mol_type = other DNA
catgctggcgaacacctgtatgtggacctaccgctctgatgagtgtggttacacgggcggggctgtggcggatga

SEQ ID NO: 13135 - DNA, 75 bp, synthetic construct
  source 1..75: mol_type = other DNA
gattgcctttgcagactgcgttattgtcccttcaaaagactccctgactgaacgtattggtttgatgcattttga

SEQ ID NO: 13136 - DNA, 75 bp, synthetic construct
  source 1..75: mol_type = other DNA
tgaatgaatgtacccgtacggagcagtctgccagcctggtactctgggaaattgatctgacagagattggcgggg

SEQ ID NO: 13137 - DNA, 75 bp, synthetic construct
  source 1..75: mol_type = other DNA
gatgcacctggcatacataaggttggttatgcaatctgtcgttctgtgaatttaaattcatgggaatatgtgcca

SEQ ID NO: 13138 - DNA, 75 bp, synthetic construct
  source 1..75: mol_type = other DNA
atgcgacatttatacggagccattttattctggaccgcactgctgacaggcatttcccttcctgcacaggctgaa

SEQ ID NO: 13139 - DNA, 75 bp, synthetic construct
  source 1..75: mol_type = other DNA
ttgtgatggcaggtggctccggtagccgcttatggccgctttcccgcgtactttaccccaagcagtttttatgcc

SEQ ID NO: 13140 - DNA, 75 bp, synthetic construct
  source 1..75: mol_type = other DNA
aacagcgcatcagcttctggccgcagcattttggcctcattccacagtgggtggccctggagccccgtgttttcg

SEQ ID NO: 13141 - DNA, 75 bp, synthetic construct
  source 1..75: mol_type = other DNA
atggtgctgattaccagcagtacggacaatatcaccctgaaaattgaccctgccgtagtgctgtcaacccgcaag

SEQ ID NO: 13142 - DNA, 75 bp, synthetic construct
  source 1..75: mol_type = other DNA
cagaaagatattgcagaaaagatacaaaaacagggaggtgattatttattcgcggtaaaaggaaaccaggggcgg

SEQ ID NO: 13143 - DNA, 75 bp, synthetic construct
  source 1..75: mol_type = other DNA
aataatattccgttccaggctcgctatattgctactggtcaatcaacagctggtacagccaacgccgacgccacc

SEQ ID NO: 13144 - DNA, 75 bp, synthetic construct
  source 1..75: mol_type = other DNA
tttttcaaactcctgcaactgggtttcgattactggactccggtcggtggggcgatcacgcctcgcgaacgaaaa

SEQ ID NO: 13145 - DNA, 75 bp, synthetic construct
  source 1..75: mol_type = other DNA
ggcgaggtgcagtggcgaaaccgtccgccgtcagtcagcattcgcggggcggataatgtcattgaactgctgaga

SEQ ID NO: 13146 - DNA, 75 bp, synthetic construct
  source 1..75: mol_type = other DNA
gacaggctgatggctgaagggcgtttcccggtacagaccggccttcacctggtgttttctgctgcgttaatccgc

SEQ ID NO: 13147 - DNA, 75 bp, synthetic construct
  source 1..75: mol_type = other DNA
ggcggcgaagacggtggcagtgtggtgttcccgccggtgctggtgcagatgctcgaccggctggaaagtgaaatc

SEQ ID NO: 13148 - DNA, 75 bp, synthetic construct
  source 1..75: mol_type = other DNA
ccgtgggtggaaaaagccgctgagcagtgcatacaacagcgacagacggtagtgatgcttgtgccagaggatatg

SEQ ID NO: 13149 - DNA, 75 bp, synthetic construct
  source 1..75: mol_type = other DNA
gtgaaaaatattcccggtatttccattaaaagcgacattgaggatttttcaataattccttttgagcaggatgtg

SEQ ID NO: 13150 - DNA, 75 bp, synthetic construct
  source 1..75: mol_type = other DNA
atgccatgacggttcattattaccgtctgcgggactacgccctgcagcatccggaatgcaacgccattatgcgca

SEQ ID NO: 13151 - DNA, 75 bp, synthetic construct
  source 1..75: mol_type = other DNA
cggcaattgatgcgcatgatgatgcagtccaggccgtttaccggaaagcacatttcagcggtggtgggtcgcccg

SEQ ID NO: 13152 - DNA, 75 bp, synthetic construct
  source 1..75: mol_type = other DNA
ctcacctgctctatgcactcaatatcgccgtgagaaccgcgcctgatgcgtcggttaaggcgctgaaatatgccg

SEQ ID NO: 13153 - DNA, 75 bp, synthetic construct
  source 1..75: mol_type = other DNA
caaaattaccacttcgatatgctgtttcttggtgtagatgcgatcgatctggagcgcggcgtcagcacgcataat

SEQ ID NO: 13154 - DNA, 75 bp, synthetic construct
  source 1..75: mol_type = other DNA
atggagaaacctgaaacggcaatgaaagccatcacacacaatcttgatcgcgaactctggcgtgatctgatgcaa

SEQ ID NO: 13155 - DNA, 75 bp, synthetic construct
  source 1..75: mol_type = other DNA
cagcgaagccctgcgcgacctggccttctggctgtaccgtcaactggaaaacgagtacgactggctgacctcaga

SEQ ID NO: 13156 - DNA, 75 bp, synthetic construct
  source 1..75: mol_type = other DNA
aggtcaactacagccagatcgatccggcgttatgtcgtgaactctttattcgccacgcgctggtggaaggtgact

SEQ ID NO: 13157 - DNA, 75 bp, synthetic construct
  source 1..75: mol_type = other DNA
cgacagatgatgacgagttgccggaagtcaccggacctgcgtggatagtcgacaaggtggcgcattatggcggat

SEQ ID NO: 13158 - DNA, 75 bp, synthetic construct
  source 1..75: mol_type = other DNA
atcatcacaactgatgcgatgggttgccagaaagatattgcagagaagatacaaaaacagggaggtgattattta

SEQ ID NO: 13159 - DNA, 75 bp, synthetic construct
  source 1..75: mol_type = other DNA
ctgtcaggtaaggacaatattctgttggttgattttctgaacaaaccctccggagaaaaactggatattgaactg

SEQ ID NO: 13160 - DNA, 75 bp, synthetic construct
  source 1..75: mol_type = other DNA
tcactgacagcgcaaacaataagaaattccatacgctgacggtcgatgagctggcaaccagcaacagcgcctatg

SEQ ID NO: 13161 - DNA, 75 bp, synthetic construct
  source 1..75: mol_type = other DNA
ggaaacggtctgcctgataagtcccatgttctgaacacagagcagattcccggattactgcagtcaatgtttgat

SEQ ID NO: 13162 - DNA, 75 bp, synthetic construct
  source 1..75: mol_type = other DNA
tggtgcaggagggtaaccggttgcattaccttgccgaccgcgccggtatcagaggcctgttcagcgatgcagatg

SEQ ID NO: 13163 - DNA, 75 bp, synthetic construct
  source 1..75: mol_type = other DNA
gtgctgccgccggagccgcccgcataccgggtgctgacgggcgtggtggacggcttcgggcggacgctggccttc

SEQ ID NO: 13164 - DNA, 75 bp, synthetic construct
  source 1..75: mol_type = other DNA
tttttagtgaagatggcctctatactgtgcgcgttgagaatggcgctattgtcagccactgccgtattaaatgtt

SEQ ID NO: 13165 - DNA, 75 bp, synthetic construct
  source 1..75: mol_type = other DNA
ggcgggctggatgtattccttgcgccgttcttcccggatgcaacgatgctgatcacctcgttcaacaacctgtca

SEQ ID NO: 13166 - DNA, 75 bp, synthetic construct
  source 1..75: mol_type = other DNA
tgctgtagtactggcaactcgcaagtatgtggatgacaaaatatcagagcacgaacagtcacgacgtcacccgga

SEQ ID NO: 13167 - DNA, 75 bp, synthetic construct
  source 1..75: mol_type = other DNA
taggcgatggcggcggaacattaccaacgccggatgcaaagcagactgcactggtaaatgagaaacgccgggctg

SEQ ID NO: 13168 - DNA, 75 bp, synthetic construct
  source 1..75: mol_type = other DNA
ctgctcaatattctcaaggccgctgggattgatcctgacaaaatggacaacacgcagattctggtcgctctcaaa

SEQ ID NO: 13169 - DNA, 75 bp, synthetic construct
  source 1..75: mol_type = other DNA
tgattaacgcctttccgatgacgagacaggcatataacgattttcgtggctggcagcttcctgccggagaaaacg

SEQ ID NO: 13170 - DNA, 75 bp, synthetic construct
  source 1..75: mol_type = other DNA
ttacggcattggtatatcgacgatttatcgttaccaccccgcaggagaatcaagcggaacaatagagaagagtca

SEQ ID NO: 13171 - DNA, 75 bp, synthetic construct
  source 1..75: mol_type = other DNA
tgaagacgacgaagagtatgaagatgaaaatcacggcaaacagcatgaatcacgccgtgcccgtattcttcgcgg

SEQ ID NO: 13172 - DNA, 75 bp, synthetic construct
  source 1..75: mol_type = other DNA
aaggctgggacggaagttactgtcgttctcaaaatcggtggagttgcatgacaaggtcatcgggcattatctgaa

SEQ ID NO: 13173 - DNA, 75 bp, synthetic construct
  source 1..75: mol_type = other DNA
ctatttcaggccatcgctccctgaacatgttgaaacgatacacacaccttcgggcttatcaacttgtcagtaaac

SEQ ID NO: 13174 - DNA, 75 bp, synthetic construct
  source 1..75: mol_type = other DNA
tatacgtggcctgcatgatgaactggtgttcccttcacccagaaagcagcagatcctttccgatatggtgttgac

SEQ ID NO: 13175 - DNA, 75 bp, synthetic construct
  source 1..75: mol_type = other DNA
ctgatagaagagttgcgccagcgtggcgtgaatttccgaagcctgactgacagtattgataccagcaccccaatg

SEQ ID NO: 13176 - DNA, 75 bp, synthetic construct
  source 1..75: mol_type = other DNA
caggttcactggaatcgctgatcaccagcatgagtgacagcctgaatacggcatataaaaacagcggtcataaaa

SEQ ID NO: 13177 - DNA, 75 bp, synthetic construct
  source 1..75: mol_type = other DNA
acgctgatagccaagctgttggtacggcaaaaattacagatgcgcgtgtagcaggtgtgatgtatggtactccag

SEQ ID NO: 13178 - DNA, 75 bp, synthetic construct
  source 1..75: mol_type = other DNA
gtgcgggtattacttagacctgttctggtgccagagcttgggctggtggtccttaaactaggccgtgaatccatg

SEQ ID NO: 13179 - DNA, 75 bp, synthetic construct
  source 1..75: mol_type = other DNA
agagctggctgagcgacttgatatcagtcgtgaagaagtactgaacgagctgtgggaactgaaaagggctggctt

SEQ ID NO: 13180 - DNA, 75 bp, synthetic construct
  source 1..75: mol_type = other DNA
ttaataaacccgatgggccagcaacagcagggatagatgatttgggtgaaattttagctaagatgaaacagagaa

SEQ ID NO: 13181 - DNA, 75 bp, synthetic construct
  source 1..75: mol_type = other DNA
gcaggtcatcgcagacagcgtaatcagtgcgcgaaccgtgcgaccaggaggcaggaaaggacagcaagggcaggc

SEQ ID NO: 13182 - DNA, 75 bp, synthetic construct
  source 1..75: mol_type = other DNA
ttgttccctccggtattaaccatcacccgtttgagaaccttcgccgcaaggggcatcactgccacggccggaaac

SEQ ID NO: 13183 - DNA, 75 bp, synthetic construct
  source 1..75: mol_type = other DNA
gggtgggtagtgaccccgcacgagattgatagcagtacttaccccaacccaaccgatggcatacctgttgactat

SEQ ID NO: 13184 - DNA, 75 bp, synthetic construct
  source 1..75: mol_type = other DNA
accgtggcatttgaagagatgtatggctcccagctggagctgatatttcgttttatcgatcgtgcgctggcaatt

SEQ ID NO: 13185 - DNA, 75 bp, synthetic construct
  source 1..75: mol_type = other DNA
ttccgtgaatgcccgtctgaaacaggcgtcgcagtcatctgatgaattttcgtcatcacagaaagtgctgatgga

SEQ ID NO: 13186 - DNA, 75 bp, synthetic construct
  source 1..75: mol_type = other DNA
gcactggatgaagtcatggccacgctgaccacgccggcccgcagcagtgttatcagcattgttaacggcaactga

SEQ ID NO: 13187 - DNA, 75 bp, synthetic construct
  source 1..75: mol_type = other DNA
gcgaacaaaggggcattatcccgcgccatccgccgtcgcctgatgggaacgcgtggactggtgattgtggatgag

SEQ ID NO: 13188 - DNA, 75 bp, synthetic construct
  source 1..75: mol_type = other DNA
gaaataaagactggaatgcgaagcgtaatcagctatcttcttagtcctctggaagagtctgtaacagaaagttta

SEQ ID NO: 13189 - DNA, 75 bp, synthetic construct
  source 1..75: mol_type = other DNA
atgaaaaaaatggcaattgttgataaaaagggtctggagtacattcctaacattgaccgaatgatccgtgagaaa

SEQ ID NO: 13190 - DNA, 75 bp, synthetic construct
  source 1..75: mol_type = other DNA
gaatgtcgggagctaaccactcttgcgaacagcacacgctggaagctggagaaggaaggaaaatttcctaagcgg

SEQ ID NO: 13191 - DNA, 75 bp, synthetic construct
  source 1..75: mol_type = other DNA
agagacatgatgaactatgtaaggtgtgacgatacgttagttgtggtagctattgaccgtttagggcgtaatacc

SEQ ID NO: 13192 - DNA, 75 bp, synthetic construct
  source 1..75: mol_type = other DNA
tattttttctattgtcgattcctctggcataacgattttatgatggcatgtgacatgtatttccgttgggggcat

SEQ ID NO: 13193 - DNA, 75 bp, synthetic construct
  source 1..75: mol_type = other DNA
aactggctgtatatgacccgacggtgcagtttgagttctggttctcggaaaagcggattatcgatatcaggcagg

SEQ ID NO: 13194 - DNA, 75 bp, synthetic construct
  source 1..75: mol_type = other DNA
ggcaacaacgtatccgtgagacggtgctgcgcgcactggatgttcatccccgcctgacggcattgcgggttgacc

SEQ ID NO: 13195 - DNA, 75 bp, synthetic construct
  source 1..75: mol_type = other DNA
gtacgctgaatgattttctcggtgccatgacggaggatgatgcccgtccggaggctctgcgccgttttgaactga

SEQ ID NO: 13196 - DNA, 75 bp, synthetic construct
  source 1..75: mol_type = other DNA
gtcaataatagcagaacaaaagaaagagccagaaatgacggtcagatattatatcagttctgctgatttaaccgc

SEQ ID NO: 13197 - DNA, 75 bp, synthetic construct
  source 1..75: mol_type = other DNA
tatcaacacaagaccagactgtagacaaccagaaactacagatagagaaggttcacaaggtcgataaatggttta

SEQ ID NO: 13198 - DNA, 75 bp, synthetic construct
  source 1..75: mol_type = other DNA
tgccgccacggtgaacctgattaacggcagcggtaagccggtgagcgtggccatcactgcacaccccgcgccgga

SEQ ID NO: 13199 - DNA, 75 bp, synthetic construct
  source 1..75: mol_type = other DNA
ggttaagagtgacccgcaatggtcaggagatttttaatcagtccacgacggatgctcagggcgtattttcctcag

SEQ ID NO: 13200 - DNA, 75 bp, synthetic construct
  source 1..75: mol_type = other DNA
gcatttcctgctcgtgctcatttagggaaagtgtctgtttcctggttgctctctgatgtgctctggtgggttatg

SEQ ID NO: 13201 - DNA, 75 bp, synthetic construct
  source 1..75: mol_type = other DNA
tcaaagggcgaccgtaatccctcttctgtccgactgctgattcagttgcagcgtaacggtaactgggtgacggaa

SEQ ID NO: 13202 - DNA, 75 bp, synthetic construct
  source 1..75: mol_type = other DNA
atgcaggttgagccggggcgttatcgtgtgaccctgtgcgtggaaggccgtcagccggcatgcgctggcgagatt

SEQ ID NO: 13203 - DNA, 75 bp, synthetic construct
  source 1..75: mol_type = other DNA
tcgtgcagtagctttcgttgaaagtgagattgatacctggattcagtctgttatcgaaacaagtcgaaataatgt

SEQ ID NO: 13204 - DNA, 75 bp, synthetic construct
  source 1..75: mol_type = other DNA
ggcgcgaaaaatccacctgtaccactgcgaccatcgcggcctgccgctggcgcttgtcagcacggaaggggcaac

SEQ ID NO: 13205 - DNA, 75 bp, synthetic construct
  source 1..75: mol_type = other DNA
cgagcagtatttgttgggcctggtgaaacgggaattgcgccggaaattcatactggcgatgatgatgcactgaag

SEQ ID NO: 13206 - DNA, 75 bp, synthetic construct
  source 1..75: mol_type = other DNA
gcgatcgtcggggcgataacaccatatgtggattgggggatcgtttacgtcgtctgaccgccggtatttgcctga

SEQ ID NO: 13207 - DNA, 75 bp, synthetic construct
  source 1..75: mol_type = other DNA
cgccgacagcagattccattgatgcatcgatcgctcaacactacccggactgcgaacctgtcgcggttatcggct

SEQ ID NO: 13208 - DNA, 75 bp, synthetic construct
  source 1..75: mol_type = other DNA
tcaacggttctatctcaaaccaagcagcccttctatgcaatgctcgcaatctacacgctttccttggggttggta

SEQ ID NO: 13209 - DNA, 75 bp, synthetic construct
  source 1..75: mol_type = other DNA
tcccccataagaccggcgttttcgcctcttcccggatgagtacctaccccggtcgcgaagcattgaacgtgacag

SEQ ID NO: 13210 - DNA, 75 bp, synthetic construct
  source 1..75: mol_type = other DNA
ctgcttcgacgccaccctgtttggctattcgcgacaggaagcggagtcgatggacccgcagcagcgcctgttttt

SEQ ID NO: 13211 - DNA, 75 bp, synthetic construct
  source 1..75: mol_type = other DNA
tctcacgatattttcacgctaccgctgtgtcgggagcatcacaacgagcttcatgcggatccgctggcgttcgaa

SEQ ID NO: 13212 - DNA, 75 bp, synthetic construct
  source 1..75: mol_type = other DNA
tcttcaagttgtgctctgaattcttctggtagccgcatttggtatggaggcgatcgcttttccaatggtgttgac

SEQ ID NO: 13213 - DNA, 75 bp, synthetic construct
  source 1..75: mol_type = other DNA
agtgcaggatattcccggcgtgctggctgtgtttgccgaacgccgtaaggacagttttggcccgtatgtccggct

SEQ ID NO: 13214 - DNA, 75 bp, synthetic construct
  source 1..75: mol_type = other DNA
gaggaaaaatttccgctgaaagaattaaataatccagagcatgacagttacgcaattagtgaaaagagtcacggc

SEQ ID NO: 13215 - DNA, 75 bp, synthetic construct
  source 1..75: mol_type = other DNA
agaccagagtgcggcaatccagcagatacagaaggttcaggttgatacaaataataacctgaacagcatgtgggc

SEQ ID NO: 13216 - DNA, 75 bp, synthetic construct
  source 1..75: mol_type = other DNA
agatggacccggtgtacacgccggcgcgaaaaatccacctgtaccactgcgaccatcgcggcctgccgctggcgc

SEQ ID NO: 13217 - DNA, 75 bp, synthetic construct
  source 1..75: mol_type = other DNA
ggcgtgcaatagataactggtacgacacaacggtagattgttctgaagactctttttggctcgacgttaaaggcg

SEQ ID NO: 13218 - DNA, 75 bp, synthetic construct
  source 1..75: mol_type = other DNA
gggtgtggacaagccgctgtataaggaccttatcggtcgaacaaaagcagcactgaagaagaacccgaaaaatgt

SEQ ID NO: 13219 - DNA, 75 bp, synthetic construct
  source 1..75: mol_type = other DNA
aaaatcacctggccggttacagcggtgtgcttcaggccgatgcttacggtggttaccgggcgttatacgaatccg

SEQ ID NO: 13220 - DNA, 75 bp, synthetic construct
  source 1..75: mol_type = other DNA
tgacgaaaacgtcccttttatcccgtgcgttgtctgtcccctgttgtgatatgttccggcgcggctctccgtgga

SEQ ID NO: 13221 - DNA, 75 bp, synthetic construct
  source 1..75: mol_type = other DNA
gatggcagaagaagccctgaagcgaatcagtgaactgtacgccatcgaggatgaaatacggggattaccagagtc

SEQ ID NO: 13222 - DNA, 75 bp, synthetic construct
  source 1..75: mol_type = other DNA
atagtccctgatgaacagcgcatcagcttctggccgcagcattttggcctcattccacagtgggtgaccctggag

SEQ ID NO: 13223 - DNA, 75 bp, synthetic construct
  source 1..75: mol_type = other DNA
actgtcgggttctgggaaaactgtccgcgaaccagattgaaggcgatctcgttaaaacagtgggcaaagctttcc

SEQ ID NO: 13224 - DNA, 75 bp, synthetic construct
  source 1..75: mol_type = other DNA
tctgcataaagcgattggcgcggtcctgagtgaaagcaatccggcgtctgcccttaatcatctcaaccatgcgtt

SEQ ID NO: 13225 - DNA, 75 bp, synthetic construct
  source 1..75: mol_type = other DNA
gtgtcagacaaactctccgggataactcatcccgatgacaatcacgaccgcccctggtgggggcttccctgcaca

SEQ ID NO: 13226 - DNA, 75 bp, synthetic construct
  source 1..75: mol_type = other DNA
gtacagggcagtttgtaacagcagcattaaagcgagaagttgaataccgccagcgtcgcaaggccaaagagcagg

SEQ ID NO: 13227 - DNA, 75 bp, synthetic construct
  source 1..75: mol_type = other DNA
agcaatagcattcttagaaagtgatattgataagtggattgaagaaaggatttctttatcacgtaataaagtagc

SEQ ID NO: 13228 - DNA, 75 bp, synthetic construct
  source 1..75: mol_type = other DNA
tcaaagggcgaccgtaatccttcctctgtccggattctgattcagttacagcgtaatggccgctgggtgacggaa

SEQ ID NO: 13229 - DNA, 75 bp, synthetic construct
  source 1..75: mol_type = other DNA
gaaaagaggcttctagtgaggaatggaagcgactcgccgcattagcgaaaacttcagttggctatcttgaccaga

SEQ ID NO: 13230 - DNA, 75 bp, synthetic construct
  source 1..75: mol_type = other DNA
ggaggtgacgaaggcaaagccggtgacgcgcaccatcacgtcagcgaacattgaccgtctgcgggtcaccttcgg

SEQ ID NO: 13231 - DNA, 75 bp, synthetic construct
  source 1..75: mol_type = other DNA
aatgccatgaacggtaaccgcgttgaaatgagtccggaagccgccggcattgccgcctgtctgatgacgtacagt

SEQ ID NO: 13232 - DNA, 75 bp, synthetic construct
  source 1..75: mol_type = other DNA
atgaaaagagttttgttctttttgctgatgatatttgttagttttggtgttatagctgattgcgaaatacaagct

SEQ ID NO: 13233 - DNA, 75 bp, synthetic construct
  source 1..75: mol_type = other DNA
ccatgagtcagaaatacctcattcgcattgcagaactggaaagccagctccgtcagaaagaccagcaactgagtc

SEQ ID NO: 13234 - DNA, 75 bp, synthetic construct
  source 1..75: mol_type = other DNA
gcaaaaggctttgttcaactcagtagcgccactaacagcgtgtctgaaacgcaggctgcaacgccgaaagcggtt

SEQ ID NO: 13235 - DNA, 75 bp, synthetic construct
  source 1..75: mol_type = other DNA
acaaaggttttattctgcttgaaatactggcgggactgatagtgattggtatcgccacgccgctgatttattccg

SEQ ID NO: 13236 - DNA, 75 bp, synthetic construct
  source 1..75: mol_type = other DNA
atgagacgaacatttacagcagaggaaaaagcctctgtttttgaactatggaagaacggaacaggcttcagtgaa

SEQ ID NO: 13237 - DNA, 75 bp, synthetic construct
  source 1..75: mol_type = other DNA
tgagcaacaggggatgccggttatccgtaacccctcatacagcggcgatggtggtcttgatggtcaggtggtgat

SEQ ID NO: 13238 - DNA, 75 bp, synthetic construct
  source 1..75: mol_type = other DNA
ccgggaaaacaagactgatgtttgactcaaaggagcaggcactggaagttaaggaagggtacaaatttttaacgt

SEQ ID NO: 13239 - DNA, 75 bp, synthetic construct
  source 1..75: mol_type = other DNA
tcaaaaacgttccgtcgtctggtcgtcactctcacccggcgttatggcttcagtctcattcatctggatgccagc

SEQ ID NO: 13240 - DNA, 75 bp, synthetic construct
  source 1..75: mol_type = other DNA
gttgacaaaagaacaacatgagcaaatagcgaggttgatcgaaaatggctacagcaggaaacagttggcaattat

SEQ ID NO: 13241 - DNA, 75 bp, synthetic construct
  source 1..75: mol_type = other DNA
ccatgcgtattcaccaacagcatcctgcatcccgtctttttccgttctgtaccggtaagtatcgctggcacggta

SEQ ID NO: 13242 - DNA, 75 bp, synthetic construct
  source 1..75: mol_type = other DNA
tgtcgcaacaagggaatcattacaggaactcgcagaacgtgccggaatgattaacgcgaatattcagggggtgag

SEQ ID NO: 13243 - DNA, 75 bp, synthetic construct
  source 1..75: mol_type = other DNA
ggggagtctgctgtttggcctgctgacgtatctgactaacctgtatttcaaaattaaagaggaccgtcgcaaggc

SEQ ID NO: 13244 - DNA, 75 bp, synthetic construct
  source 1..75: mol_type = other DNA
tctttcgatcagacggttcagcttggtcaggttcgtacagaaaagctaaaagccgacggggataaaagtgctgct

SEQ ID NO: 13245 - DNA, 75 bp, synthetic construct
  source 1..75: mol_type = other DNA
gatgacggtctggcggaggcggacaataacacagcagaaagagcgcttcgtgccgtctgtctcgggaaaaagaat

SEQ ID NO: 13246 - DNA, 75 bp, synthetic construct
  source 1..75: mol_type = other DNA
tcgcagagctggaaaggttgctctctgagcaggctgaagccctccgtcagaaagaccagcaactgagtctggttg

SEQ ID NO: 13247 - DNA, 75 bp, synthetic construct
  source 1..75: mol_type = other DNA
tgcagtctgtctcggaaagaaaaactttatgttctttggcagcgatcacggcggcgagcgtggagcactgttgta

SEQ ID NO: 13248 - DNA, 75 bp, synthetic construct
  source 1..75: mol_type = other DNA
aatgccatgaacggtaaccgcactgaaatgagcccggaagccgccggcattgccgcctgtctgatgacgtacagt

SEQ ID NO: 13249 - DNA, 75 bp, synthetic construct
  source 1..75: mol_type = other DNA
gtccctgatgaacagcgcatcagcttctggccgcagcattttggcctcattccacagtgggtgaccctggagccc

SEQ ID NO: 13250 - DNA, 75 bp, synthetic construct
  source 1..75: mol_type = other DNA
aacagcgcatcagcttctggccgcagcactttggcctcattccacagtgggtgaccctggagccccgtgtcttcg

SEQ ID NO: 13251 - DNA, 75 bp, synthetic construct
  source 1..75: mol_type = other DNA
atgactaaaaatacacgtttttcccccgaggtccgtcaacgggcagtccgtatggttctggaaagtcagggcgaa

SEQ ID NO: 13252 - DNA, 75 bp, synthetic construct
  source 1..75: mol_type = other DNA
tcatgaaagagctggggcgggtcagttgccagcagccgactcaccggtataagcgtggcggtcatgagcacgttg

SEQ ID NO: 13253 - DNA, 75 bp, synthetic construct
  source 1..75: mol_type = other DNA
gtgatgtgaacgttatgcctggggggacactgcgtgtcgctaaaaccacaatcggcggcaacctggagaatggcg

SEQ ID NO: 13254 - DNA, 75 bp, synthetic construct
  source 1..75: mol_type = other DNA
ctgtcgttctcaaaatcggtggagttgcatgacaaggtcatcgggcattatttgaacataaaacactatcagtaa

SEQ ID NO: 13255 - DNA, 75 bp, synthetic construct
  source 1..75: mol_type = other DNA
aaagctgcacgttatcagcaagcgatatacgcagcgcattgagcgacataatctgaatctgagacaacatctggc

SEQ ID NO: 13256 - DNA, 75 bp, synthetic construct
  source 1..75: mol_type = other DNA
ttctggaacgtatccgcagactggccccgccacatgtaaccgcgccattcaggacggtggcggagtggcgcgagt

SEQ ID NO: 13257 - DNA, 75 bp, synthetic construct
  source 1..75: mol_type = other DNA
ggtgtacgtaacaccagtccggatgttccttatcttattcagtcatgggtgatgaccccagataataaaaaatca

SEQ ID NO: 13258 - DNA, 75 bp, synthetic construct
  source 1..75: mol_type = other DNA
gcctaccgcaagcaacttggtctgaaagatttttctccagaaagccaggatgctgtagcgctgcagcagattaaa

SEQ ID NO: 13259 - DNA, 75 bp, synthetic construct
  source 1..75: mol_type = other DNA
agacagtaacggcaatactattgccagtactcaggtagacaacaacggtcactggagtgtctcgttacccacgca

SEQ ID NO: 13260 - DNA, 75 bp, synthetic construct
  source 1..75: mol_type = other DNA
gtgcttatgaacgtggtcagcgttatgcaagccgattgcagaatgaatttgctggaaatatttctgcgctggctg

SEQ ID NO: 13261 - DNA, 75 bp, synthetic construct
  source 1..75: mol_type = other DNA
cggaagatgcagatcatattgcttttattcgcgggcgtattggttttgaactgcctgcctggtttatcccgaagg

SEQ ID NO: 13262 - DNA, 75 bp, synthetic construct
  source 1..75: mol_type = other DNA
atatccggaaaaacacagcagacatactgaaagcgttaaccgtggacaatattcctgagcgtcatggctttacgg

SEQ ID NO: 13263 - DNA, 75 bp, synthetic construct
  source 1..75: mol_type = other DNA
gattaaggacggtggcagagactgccgtattcgttcaaacaactgttacggtcaggtatcccgtcgtgaccagga

SEQ ID NO: 13264 - DNA, 75 bp, synthetic construct
  source 1..75: mol_type = other DNA
gttctgaagcggcggtgggatgtgacaccggcaatcatccgtgcggtggaatacctttcccgggtaccggtatca

SEQ ID NO: 13265 - DNA, 75 bp, synthetic construct
  source 1..75: mol_type = other DNA
ccgctatgatacggaaggctatgtgacagaacatatcacacaggaagaagaacagtatgcgcaggcgcgcctgga

SEQ ID NO: 13266 - DNA, 75 bp, synthetic construct
  source 1..75: mol_type = other DNA
gagccactggtcgagagccgctacctctacgacccgctgggacggcgaatggcgaaacgggtatggcggcgggag

SEQ ID NO: 13267 - DNA, 75 bp, synthetic construct
  source 1..75: mol_type = other DNA
gttacagagccagcacctgaacagcctgctgtctgaccgcgattacacctggaacgacaacggcgaactcatccg

SEQ ID NO: 13268 - DNA, 75 bp, synthetic construct
  source 1..75: mol_type = other DNA
ggcgaaagcgttcgcatacgccctgaaccagtggccggcgctgacgtactatgcagatgatggctgggctgaggc

SEQ ID NO: 13269 - DNA, 75 bp, synthetic construct
  source 1..75: mol_type = other DNA
cggagagtctgcacaaccagcaagctgatgaatacctccctaggaagaatcaagctacacaacagcctgtacagc

SEQ ID NO: 13270 - DNA, 75 bp, synthetic construct
  source 1..75: mol_type = other DNA
agatggtatgagccaccggtcagctttaccggtctggcaaaaagcctgcgtgctgccgtgcatcacagctcaccg

SEQ ID NO: 13271 - DNA, 75 bp, synthetic construct
  source 1..75: mol_type = other DNA
cagtctgaacgtgagcgtcttaagttcgaacaggaaacggcacaactcattccggccagtgatgtcagacgggag

SEQ ID NO: 13272 - DNA, 75 bp, synthetic construct
  source 1..75: mol_type = other DNA
ggaataaattactcaacatatatggttctcaccgtattatctacagcagataatcattgtctttcgccttcagag

SEQ ID NO: 13273 - DNA, 75 bp, synthetic construct
  source 1..75: mol_type = other DNA
ctatgtggaatgcgtacagatggatcgctggtatgagccgcccgtcagctttgacggactggcacgaaccttccg

SEQ ID NO: 13274 - DNA, 75 bp, synthetic construct
  source 1..75: mol_type = other DNA
atggatgaagaaagggtgttttcactcagctatgagcaactaacccgaatagcggaaaaaaatatccgtgaatgt

SEQ ID NO: 13275 - DNA, 75 bp, synthetic construct
  source 1..75: mol_type = other DNA
tcgcgccgtaacactcactccggcacaggcagaatatctgataacaggaaaaatattacccactgcgttattcag

SEQ ID NO: 13276 - DNA, 75 bp, synthetic construct
  source 1..75: mol_type = other DNA
ggatgctgaagcttggtctcagcctggtggctatgaccgtcgcagcaagtgttcaggctaaaactctggtttatt

SEQ ID NO: 13277 - DNA, 75 bp, synthetic construct
  source 1..75: mol_type = other DNA
acaattggtgggtatttagttccaggagttggaacggcaggaagcatggctattggatcactggcagaggccgca

SEQ ID NO: 13278 - DNA, 75 bp, synthetic construct
  source 1..75: mol_type = other DNA
ttcgtcgttccgcgactaacggtctgacccccgcgcctcaggcgcgggacttccaggaagaagtggcgaaactca

SEQ ID NO: 13279 - DNA, 75 bp, synthetic construct
  source 1..75: mol_type = other DNA
gcgtaatctgccgtccggggtcgttcctgccgttcgccagccgctggcggaggataaatcattactgccattttt

SEQ ID NO: 13280 - DNA, 75 bp, synthetic construct
  source 1..75: mol_type = other DNA
tatttttatccctgtcaggctgtaatgatgctctggctgcaaaccagagtacaatgttttactcgtttaatgata

SEQ ID NO: 13281 - DNA, 75 bp, synthetic construct
  source 1..75: mol_type = other DNA
acgctatacgccaaaggactaacctgcgaagccgatacgctgggttcctgtggttacgtctatatcgctatttat

SEQ ID NO: 13282 - DNA, 75 bp, synthetic construct
  source 1..75: mol_type = other DNA
aagaagtcacattgacaaagttaagtagcggccgccgccttctggaggcgttgctgatccttattgtcctgtttg

SEQ ID NO: 13283 - DNA, 75 bp, synthetic construct
  source 1..75: mol_type = other DNA
attggcttgactggaagttatcgttatgaagattttgaactcggtggcacatttaaatacagcggctgggtggaa

SEQ ID NO: 13284 - DNA, 75 bp, synthetic construct
  source 1..75: mol_type = other DNA
cgaccgtaaattatgacgggaaacattttacttatcaggtcgctgatgagtggccgggattctcaacagtattag

SEQ ID NO: 13285 - DNA, 75 bp, synthetic construct
  source 1..75: mol_type = other DNA
caatgcacagtctggtcatcggacagatcaagacggatgagaaatctaatgagattacagctatcccagaacttc

SEQ ID NO: 13286 - DNA, 75 bp, synthetic construct
  source 1..75: mol_type = other DNA
tcagactctttgccgtgccgcatttccagattgaagggatggatatcaacctgtcactggtttcccagatgccga

SEQ ID NO: 13287 - DNA, 75 bp, synthetic construct
  source 1..75: mol_type = other DNA
gttaaaaatcctgtgaacggacacgctcacctgctctacgcactcaacatcgccgtgagaaccgcgcctgatgcc

SEQ ID NO: 13288 - DNA, 75 bp, synthetic construct
  source 1..75: mol_type = other DNA
gcgtcctggctggaaagtcaggggattgatacaacgaagagttttgatgctgtacagggcgcggccacgccccgt

SEQ ID NO: 13289 - DNA, 75 bp, synthetic construct
  source 1..75: mol_type = other DNA
accaatcaaaacggcaacaccggcagcggcacgcgggatatcaccatcgacgccaatctgcccggcctgcgggtc

SEQ ID NO: 13290 - DNA, 75 bp, synthetic construct
  source 1..75: mol_type = other DNA
ggaagacgacagtcaggtgaaaagaatgctggtggagtggggaccggttatcccggaagggaaggtcgagatcac

SEQ ID NO: 13291 - DNA, 75 bp, synthetic construct
  source 1..75: mol_type = other DNA
atgaacaggaccagtccctattattgtcgccgctcagtactttccttattgatatctgccttgatatatgccccg

SEQ ID NO: 13292 - DNA, 75 bp, synthetic construct
  source 1..75: mol_type = other DNA
ctcaccacccagaaatcgaaatcacaacaacattctgaaagtgacacagtatccggcagtacgctgaatgccggg

SEQ ID NO: 13293 - DNA, 75 bp, synthetic construct
  source 1..75: mol_type = other DNA
gggcagcagtatgatgaggagtccggcctgtattacaaccgccaccgctattatgacccgctgcaggggcgatat

SEQ ID NO: 13294 - DNA, 75 bp, synthetic construct
  source 1..75: mol_type = other DNA
cagaaagcgggtattgcgtcattctgtccttacaacattggcccaggtaagtgtttcccgtcgacgttttataaa

SEQ ID NO: 13295 - DNA, 75 bp, synthetic construct
  source 1..75: mol_type = other DNA
gatgaatggggcaacctgctgaatgaagagaacccgcatcagctgcagcagcttatccggctgccggggcagcag

SEQ ID NO: 13296 - DNA, 75 bp, synthetic construct
  source 1..75: mol_type = other DNA
cttaaagattcgccctcacagccattgcaacagtcactgaaagaccttgagcgggcttacaaaaacttcttccgg

SEQ ID NO: 13297 - DNA, 75 bp, synthetic construct
  source 1..75: mol_type = other DNA
gtacagttgcacacgccagaacagcagcctatgaagctccgtcagttaaacgctcgtggtatcagtgccagaatc

SEQ ID NO: 13298 - DNA, 75 bp, synthetic construct
  source 1..75: mol_type = other DNA
gatgctccaggcacctacaaagctggttatgcaatctgccgctctgcagattttaactcatgggaatatgtacca

SEQ ID NO: 13299 - DNA, 75 bp, synthetic construct
  source 1..75: mol_type = other DNA
acgaacgcattctgtctggcgtcaccgccactggcacgcatctgccttcacggggatttacaacgatttggccgc

SEQ ID NO: 13300 - DNA, 75 bp, synthetic construct
  source 1..75: mol_type = other DNA
gtggtgaatactgtcaacggcggacgcgtacttgccaccggcagtgccgacgttaaaggaaccacgctgaataat

SEQ ID NO: 13301 - DNA, 75 bp, synthetic construct
  source 1..75: mol_type = other DNA
cagcacatacaccggaacacactaaggtttatcagactgacaatgccacgctctgtcgtgggaatgcgctggaaa

SEQ ID NO: 13302 - DNA, 75 bp, synthetic construct
  source 1..75: mol_type = other DNA
acaatactattgggcagaatcaaattgaattatgtcgagttatcgtgcctagcggcgcaacggctgtgactaaag

SEQ ID NO: 13303 - DNA, 75 bp, synthetic construct
  source 1..75: mol_type = other DNA
gttgtccatgaggcacgcttttatatggcacagagcgctgaggccatgctggaggcaggtaagcggctgataatc

SEQ ID NO: 13304 - DNA, 75 bp, synthetic construct
  source 1..75: mol_type = other DNA
tgaccttcgcgcactgggcgaaaccatgaaatatgcaggtccggtggcgggtaagctgggaatatcgctggagca

SEQ ID NO: 13305 - DNA, 75 bp, synthetic construct
  source 1..75: mol_type = other DNA
cctacattggctgggcaccggacccgtggagtctgcgcgtgcagagcaccacctcctttgacgtgagcgacgcgc

SEQ ID NO: 13306 - DNA, 75 bp, synthetic construct
  source 1..75: mol_type = other DNA
tcgccggtcgtcgatgagaaacccgcgccggtgccgacagcccccgtggcaccccgtcgggtaaaaggctgctac

SEQ ID NO: 13307 - DNA, 75 bp, synthetic construct
  source 1..75: mol_type = other DNA
cgacagcggtggcgaacatgcggcggtgttgtactcgctgatcggcacatgccgtctgaacaatgtggaaccaga

SEQ ID NO: 13308 - DNA, 75 bp, synthetic construct
  source 1..75: mol_type = other DNA
cccttaccggggcagtatgacatcgatatttatgtcaataagcaatggcgcgggaaatatgagattattgttaaa

SEQ ID NO: 13309 - DNA, 75 bp, synthetic construct
  source 1..75: mol_type = other DNA
tcagtctcggcgtcgagtatcaacatacctttaaggcgattaatcaacgtaacggagagcgcaacaacgcgtttc

SEQ ID NO: 13310 - DNA, 75 bp, synthetic construct
  source 1..75: mol_type = other DNA
atcccgatatcgacggagataatgggccgggtcgctctcgcggcggttttggcaccaaaatccatctggcaacag

SEQ ID NO: 13311 - DNA, 75 bp, synthetic construct
  source 1..75: mol_type = other DNA
tcagtatgcttatcccactggcaaatattcttggctgcgatccgatgtggctgttaactggtaaaccaacaggtg

SEQ ID NO: 13312 - DNA, 75 bp, synthetic construct
  source 1..75: mol_type = other DNA
ctgtggcaggggctgttttattgtcgtccgccgcgcaagcgcagacaacgccggaaggttatcaactgcaacaag

SEQ ID NO: 13313 - DNA, 75 bp, synthetic construct
  source 1..75: mol_type = other DNA
aacaaaacgctcaacgttgagcgttttggggaaagccaaactgtacgacctgatggttctggataatgaagaact

SEQ ID NO: 13314 - DNA, 75 bp, synthetic construct
  source 1..75: mol_type = other DNA
gaaaaccaggaaggaaagaagggagtattcatagtaaaaatatcagacagttgaaattgcaggggttcagtcagt

SEQ ID NO: 13315 - DNA, 75 bp, synthetic construct
  source 1..75: mol_type = other DNA
cgaaagtacactatttctggaaaaaaggcgtatttaccagtggatgctttctcctttctatgacatgaaacacag

SEQ ID NO: 13316 - DNA, 75 bp, synthetic construct
  source 1..75: mol_type = other DNA
agagcgcttgtgctgaaaatttatcaccagcacaaaggccgctatggttacagacgcatcaggctggcatgtcgt

SEQ ID NO: 13317 - DNA, 75 bp, synthetic construct
  source 1..75: mol_type = other DNA
tcagaatcatgccgatcgtctgggcattgaaggcagcattcgtcgtattgtctatgaacacgatctcacgctgaa

SEQ ID NO: 13318 - DNA, 75 bp, synthetic construct
  source 1..75: mol_type = other DNA
tgtcgcagctggaaaaccaggtctgcgacgcggtcgtggacaaggtgaatgaaaagctgccggggaatattgatc

SEQ ID NO: 13319 - DNA, 75 bp, synthetic construct
  source 1..75: mol_type = other DNA
aaccgctgttgaaatccctggaaagctggttgcgtgaaaagatgaaaaccctgtcgcgacactcagaactggcga

SEQ ID NO: 13320 - DNA, 75 bp, synthetic construct
  source 1..75: mol_type = other DNA
aagcggatgattaacctgttaatcatcgttctcagggcggttgttgctgtggctaacgcagtgatagctctcctg

SEQ ID NO: 13321 - DNA, 75 bp, synthetic construct
  source 1..75: mol_type = other DNA
ggcctggtctgcggtcagtcgctgggagaagtccgggtgccacaccggggaaacgtggtggacagggtgattgaa

SEQ ID NO: 13322 - DNA, 75 bp, synthetic construct
  source 1..75: mol_type = other DNA
aatatcgtctggaacgcgacggctgcgtttatcgccgtcattatcatcagcctgctgctggatgagtccggcttt

SEQ ID NO: 13323 - DNA, 75 bp, synthetic construct
  source 1..75: mol_type = other DNA
cctgcgagcgcaactgtaaaacggccattgtgatggtgctgaaaaatctcgatgccgcagaagctaaaaaacgcc

SEQ ID NO: 13324 - DNA, 75 bp, synthetic construct
  source 1..75: mol_type = other DNA
gccataatgaaaaaagaaatttcagcgcagagtttaaacgcgaatccgctcaactggtcgttgaccagaaataca

SEQ ID NO: 13325 - DNA, 75 bp, synthetic construct
  source 1..75: mol_type = other DNA
aaacggacaacatgtccctgaaatcatcctgctgaactcccatgacggtacttccagctaccagatgctgccggg

SEQ ID NO: 13326 - DNA, 75 bp, synthetic construct
  source 1..75: mol_type = other DNA
aagaccggcatacttcccgcagtaaacgatatgcgtacattcccactatcaccgtactggaaagtctgcagcggg

SEQ ID NO: 13327 - DNA, 75 bp, synthetic construct
  source 1..75: mol_type = other DNA
tttggtcttgatgatggtgcactggatctctcttttgcggtaggcggcgcagatgcccaccttttctcccgttat

SEQ ID NO: 13328 - DNA, 75 bp, synthetic construct
  source 1..75: mol_type = other DNA
gtgacaacccgctacacaggaatgaatccggacgggacgggaaacctgaacgatatggagcacctgaaacagtca

SEQ ID NO: 13329 - DNA, 75 bp, synthetic construct
  source 1..75: mol_type = other DNA
ctatgcgttatgcgcattttgctccaggtcatttagaggctgctgttgaattgaacccttttgacaatagagggt

SEQ ID NO: 13330 - DNA, 75 bp, synthetic construct
  source 1..75: mol_type = other DNA
atccgcctgccggggcagcagtatgatgaggagtccggcctgtattacaaccgccaccgctattatgacccgctg

SEQ ID NO: 13331 - DNA, 75 bp, synthetic construct
  source 1..75: mol_type = other DNA
tacgaccggcgcagccagcattcgggccggcttaccgacgtcgtggactgtgggtgataagaccggcagcggcga

SEQ ID NO: 13332 - DNA, 75 bp, synthetic construct
  source 1..75: mol_type = other DNA
taacgggcacacagcactgcgcgatgcatccttcacagtaccaagtggatctattgccgctctggttggggtaaa

SEQ ID NO: 13333 - DNA, 75 bp, synthetic construct
  source 1..75: mol_type = other DNA
cagaatacacgccaaaaccagcgtccgttgcaacgaaggctacgcatctttcatttataaaggccctactaagag

SEQ ID NO: 13334 - DNA, 75 bp, synthetic construct
  source 1..75: mol_type = other DNA
tctcatcattatgggatgagctgcgacatatgccagcaggcggcgtctggtggtttaacgtcgatcgccatgaag

SEQ ID NO: 13335 - DNA, 75 bp, synthetic construct
  source 1..75: mol_type = other DNA
ccggtggtgacccccggtcattaccggattatgctgccctgcgcgatgaaatcagcaaactgacccacccggcac

SEQ ID NO: 13336 - DNA, 75 bp, synthetic construct
  source 1..75: mol_type = other DNA
atgaataacacagacacattagaaaaaataatcagacaccaaaaaaacaaagaccccgcatatccctttcgggaa

SEQ ID NO: 13337 - DNA, 75 bp, synthetic construct
  source 1..75: mol_type = other DNA
atcaggactggattattgcaaaagccgagcacaccattgataacagcggctttaccacgcagcttgagcttgagg

SEQ ID NO: 13338 - DNA, 75 bp, synthetic construct
  source 1..75: mol_type = other DNA
actatgcagcaggtttttgttccgctaccccggcgttaaggggaaatgaggtcaacatggatactatcgatcttg

SEQ ID NO: 13339 - DNA, 75 bp, synthetic construct
  source 1..75: mol_type = other DNA
gccggtgctggtgcagatgctcgaccggctggaaagtgaaatcctggctgaccgggtgagtgaggaaagccgccg

SEQ ID NO: 13340 - DNA, 75 bp, synthetic construct
  source 1..75: mol_type = other DNA
aaagtgctcagttgacaggaatgactgtcacaatcaaatccagtacctgtgaatcaggctccggatttgctgaag

SEQ ID NO: 13341 - DNA, 75 bp, synthetic construct
  source 1..75: mol_type = other DNA
attctgattctgcctttgccagcaggcacgggtggcgttctcacgcattcaaatatgactggtatcagcacgatc

SEQ ID NO: 13342 - DNA, 75 bp, synthetic construct
  source 1..75: mol_type = other DNA
gcgctgacgttgctgtttttcgtttggggcatattatcagcaaagcaaattttgtgggcaggagaaaccttaact

SEQ ID NO: 13343 - DNA, 75 bp, synthetic construct
  source 1..75: mol_type = other DNA
ggatcgctattatcaactcggcgtaacttacaatggcgttgattatgacgccaaccagggaaaaagccgcatcga

SEQ ID NO: 13344 - DNA, 75 bp, synthetic construct
  source 1..75: mol_type = other DNA
tatcgttttaataaccgggatgaagccatctcagtaatacgggaatacattgagattttctacaatcgtcagcgt

SEQ ID NO: 13345 - DNA, 75 bp, synthetic construct
  source 1..75: mol_type = other DNA
taacgaatggcatccgcatagtgcgctgggttatcgctcgccacgggaatatctgcggcagcgggcttgtaatgg

SEQ ID NO: 13346 - DNA, 75 bp, synthetic construct
  source 1..75: mol_type = other DNA
gctgacggccatgacagcctcgtttgtgctggcaacaccgacggagacggacggagcgctgtttcccggtcgcat

SEQ ID NO: 13347 - DNA, 75 bp, synthetic construct
  source 1..75: mol_type = other DNA
aaagttcaggttgatacaaataataacctgaacagcatgtgggccgtgaaactgcagcagatgcaggacggacgc

SEQ ID NO: 13348 - DNA, 75 bp, synthetic construct
  source 1..75: mol_type = other DNA
aaggtgcattgctaggcgcaggcgttggtttacttactggcaatggtgttaatggcgtactgaaaggtgcagctg

SEQ ID NO: 13349 - DNA, 75 bp, synthetic construct
  source 1..75: mol_type = other DNA
gccacggtggtccgccgccgggtgtatgcccgttttctggatgcggtgaatttcgttgcgggcaatccggaagcg

SEQ ID NO: 13350 - DNA, 75 bp, synthetic construct
  source 1..75: mol_type = other DNA
cccgcaacttatcggctgctgtcagattgcgcctaaatgaaatcgagaactggctggacagagggctaacgcggc

SEQ ID NO: 13351 - DNA, 75 bp, synthetic construct
  source 1..75: mol_type = other DNA
tggttgccgggcatgaggtgattggtcgcgtggtggcgctcgggagcgccgcgcaggataaaggtttgcaggtcg

SEQ ID NO: 13352 - DNA, 75 bp, synthetic construct
  source 1..75: mol_type = other DNA
acatttacatgtgcgtttatggctgtttttctcaattatcttttttctgatgagttcatgcctgtaaatagcaga

SEQ ID NO: 13353 - DNA, 75 bp, synthetic construct
  source 1..75: mol_type = other DNA
gcatattcatatgattcattcaaaaggatatgacagttttacctcaagtaaatatgaagaaggtgcgacctggtt

SEQ ID NO: 13354 - DNA, 75 bp, synthetic construct
  source 1..75: mol_type = other DNA
aggggggatggaatttttatcagtatccgctgaatccggttcagtatatagattcaatgggactggcatcaaaat

SEQ ID NO: 13355 - DNA, 75 bp, synthetic construct
  source 1..75: mol_type = other DNA
atccggctggaggcggtatggctgacacacgacccggcatacccggatgaacagccgactgcgccgctggcgcgc

SEQ ID NO: 13356 - DNA, 75 bp, synthetic construct
  source 1..75: mol_type = other DNA
ttaacaaagcacttgagcgtttttattttcgcttaagtgcatcaggcgctcatgctgaacgtgcagcccgtgact

SEQ ID NO: 13357 - DNA, 75 bp, synthetic construct
  source 1..75: mol_type = other DNA
ccacgccttacgaatccctgcttgtgaccatcagccaggccgtccgtggcggaaaattacccgcaggctggtatc

SEQ ID NO: 13358 - DNA, 75 bp, synthetic construct
  source 1..75: mol_type = other DNA
tccgtctcctcacaaaaagaactgccgaaatacctctccgatctgcaaaaccaacacgatattatcgaaatcctc

SEQ ID NO: 13359 - DNA, 75 bp, synthetic construct
  source 1..75: mol_type = other DNA
ctttatgataagtatcagaatcagagtattgccgcgcatgtgatgcgcgctctcgctgctgagcagtcggaagtg

SEQ ID NO: 13360 - DNA, 75 bp, synthetic construct
  source 1..75: mol_type = other DNA
tggcgtcagttgttacgggaaggtatcagagtggccagatgcactgtggcacgtctcatggcggttatgggactt

SEQ ID NO: 13361 - DNA, 75 bp, synthetic construct
  source 1..75: mol_type = other DNA
gaaagtgaaatcctggctgaccgggtgagtgaggaaagccgccgctggctggcatcgtgcggcctgaccgtggag

SEQ ID NO: 13362 - DNA, 75 bp, synthetic construct
  source 1..75: mol_type = other DNA
acatcagacaggatattacaaactcaatgacagcctggatattaaaaccacattacaggcaaacgacattccagg

SEQ ID NO: 13363 - DNA, 75 bp, synthetic construct
  source 1..75: mol_type = other DNA
tgaacgagtcggttaaatcagagcagtcaccgcgggtggtactctgggaaatcgacctgacggtgcagggtggtg

SEQ ID NO: 13364 - DNA, 75 bp, synthetic construct
  source 1..75: mol_type = other DNA
ttcagaaattcattgaagcccatccggggtgtacttccggagacattgcggatgcttttgcaggttactcacggc

SEQ ID NO: 13365 - DNA, 75 bp, synthetic construct
  source 1..75: mol_type = other DNA
cgatagcgcattgccagaaggctccgtgcgtgagctgaatcctgccggtcgtcgccggatagtgattctggtcac

SEQ ID NO: 13366 - DNA, 75 bp, synthetic construct
  source 1..75: mol_type = other DNA
cccccccgggggaatcgaggtgtcaaaaagtttgaccctctggatattgctttgccgaactggatttctgtctcg

SEQ ID NO: 13367 - DNA, 75 bp, synthetic construct
  source 1..75: mol_type = other DNA
caagaacaaaaagtcactctactgaagagtgctaaaacggaatggaaaaaatatcgcgccggtgaatcactgatc

SEQ ID NO: 13368 - DNA, 75 bp, synthetic construct
  source 1..75: mol_type = other DNA
ttgagtgccacatgccggatcgccgtcgccgtgacctggataatctgcaaaaagccgcttttgacgcactcacca

SEQ ID NO: 13369 - DNA, 75 bp, synthetic construct
  source 1..75: mol_type = other DNA
cgcggagtactggcgcgactatctaaaattaagcagtaacggctatttgcgactgaccaactggcgcagcgcacc

SEQ ID NO: 13370 - DNA, 75 bp, synthetic construct
  source 1..75: mol_type = other DNA
aggcagcttttcctgaaaaagagtgttcatcccctgaaaaggtcattgaactcctgcatggtcagttggcagcaa

SEQ ID NO: 13371 - DNA, 75 bp, synthetic construct
  source 1..75: mol_type = other DNA
ggggcagttgtagtaaaaccggttgagaacaaaggcatttatgcaggaaacccggcaagactgatcagaatatta

SEQ ID NO: 13372 - DNA, 75 bp, synthetic construct
  source 1..75: mol_type = other DNA
atcatcgaaaaacaggatgctgaactaacggttctcaaaacacaaccaaccaccagactgaatttatctgacatt

SEQ ID NO: 13373 - DNA, 75 bp, synthetic construct
  source 1..75: mol_type = other DNA
tggcagggccggaaatatgaggtgtatcctgttcagggagcagggtttgaaatgaaaggcaagggaagcagcgcc

SEQ ID NO: 13374 - DNA, 75 bp, synthetic construct
  source 1..75: mol_type = other DNA
ctgaaaaatggtcaaaacttaatcgcttaaaatccatgattcagagatattttaaagaaccactattgcagttaa

SEQ ID NO: 13375 - DNA, 75 bp, synthetic construct
  source 1..75: mol_type = other DNA
aggtattgtcctggatgaaaaaagaacccggcttcatggcacgcctgtttataagatttgtgggcgttgcaatgg

SEQ ID NO: 13376 - DNA, 75 bp, synthetic construct
  source 1..75: mol_type = other DNA
acttctgcgcccggcatctgtccgccataaacgacacgctgaaaacgtatcagtttggcgtgcgttccggcgcta

SEQ ID NO: 13377 - DNA, 75 bp, synthetic construct
  source 1..75: mol_type = other DNA
atcaaagggctggcgatgagcggctttggcccggtaacgcagatttatatcggcggcaaaaacaaacgggtcatg

SEQ ID NO: 13378 - DNA, 75 bp, synthetic construct
  source 1..75: mol_type = other DNA
cccaacggggccacactgtatttcctcggcaccaatgcccgcactgcccagagttatcacggcaacctgtatctg

SEQ ID NO: 13379 - DNA, 75 bp, synthetic construct
  source 1..75: mol_type = other DNA
aggcccacgccgtcagcctgaaaagaatgttttcaccgatgaccagattgagaagctggaagaaattttccattc

SEQ ID NO: 13380 - DNA, 75 bp, synthetic construct
  source 1..75: mol_type = other DNA
acatggctggcccggaaatcatcagtgggtggttacggtcgcgaaaccgttcagggcaaacaaacaggctgaatg

SEQ ID NO: 13381 - DNA, 75 bp, synthetic construct
  source 1..75: mol_type = other DNA
tacgccggagactctgcgtgtctgggtacgccagcatgagcgggataccggaggcggtgatggtgggctcaccac

SEQ ID NO: 13382 - DNA, 75 bp, synthetic construct
  source 1..75: mol_type = other DNA
tcagtgccggtggaggacagaatctgcgcgggcaggcttacggtactgtccttaacggtggtgaacaatggatac

SEQ ID NO: 13383 - DNA, 75 bp, synthetic construct
  source 1..75: mol_type = other DNA
cgtttaaaagaggggctgaccggcgaaggcgctgcacggcagaatgccatcaatgcgtcgcttgcacagggcgtt

SEQ ID NO: 13384 - DNA, 75 bp, synthetic construct
  source 1..75: mol_type = other DNA
taataaccttgttgtgtagcttctgtatcggccaggcgcttgcagggggtatcgttttacagcgaacgcgagtga

SEQ ID NO: 13385 - DNA, 75 bp, synthetic construct
  source 1..75: mol_type = other DNA
gaaaaaaccagaaatcaggacgtgatgtaaaagaggtgggctggaccagcctgtttcaggcggtggctgagcctt

SEQ ID NO: 13386 - DNA, 75 bp, synthetic construct
  source 1..75: mol_type = other DNA
tcaatgagtgcactaaaacggagcaatccgcgctgatcgtgctctgggaaattgatctgacagaggtcggcggag

SEQ ID NO: 13387 - DNA, 75 bp, synthetic construct
  source 1..75: mol_type = other DNA
tgaaatgctcacggtctgatttcctggctgaccggaaaaaggtgttccggtcagagccggaaaagggcatgggag

SEQ ID NO: 13388 - DNA, 75 bp, synthetic construct
  source 1..75: mol_type = other DNA
gccggactctgatgacaacaccggcggtcagcagatagcccggggtggcactgccagaaacaccacggtcaccgc

SEQ ID NO: 13389 - DNA, 75 bp, synthetic construct
  source 1..75: mol_type = other DNA
ctgaggcggacaataacatcgctgaaaatgcgttgcggatggtcagtctgggccgcaaaaactacctgttcttcg

SEQ ID NO: 13390 - DNA, 75 bp, synthetic construct
  source 1..75: mol_type = other DNA
cccctctactgacatttttacccttaaccggggtgaacatgccggtgagcaacgcgtcagtctgaaagcccgcct

SEQ ID NO: 13391 - DNA, 75 bp, synthetic construct
  source 1..75: mol_type = other DNA
tatcaggtaatataagcataaatcatattatcaatactacccagcaacataacaataatgccaatctgatctttg

SEQ ID NO: 13392 - DNA, 75 bp, synthetic construct
  source 1..75: mol_type = other DNA
ccgatgccatatctcttgatacatggaaaaaaacagttaaacgtttttacgatacgctggtggtgcagtttgata

SEQ ID NO: 13393 - DNA, 75 bp, synthetic construct
  source 1..75: mol_type = other DNA
atggcgaaggggagaagcgtgattatcgtcaccgtgtccgatgtcatgagtgtgttgcatgacggctacgacaac

SEQ ID NO: 13394 - DNA, 75 bp, synthetic construct
  source 1..75: mol_type = other DNA
gtgctggcgacaccgacggagacggacggtgcgctgtttcccggtcgcatcatgctggcgaacacctgtatgtgg

SEQ ID NO: 13395 - DNA, 75 bp, synthetic construct
  source 1..75: mol_type = other DNA
atacattacacctgaacaatgctgacttttcaatatcacgcaatgccaatgttgaaggaaatatatcagcaaata

SEQ ID NO: 13396 - DNA, 75 bp, synthetic construct
  source 1..75: mol_type = other DNA
cccgaccgaatccgtggccattgatgtcgcttatgaaggttccggcagtggtgactggcgcactgacggtttcat

SEQ ID NO: 13397 - DNA, 75 bp, synthetic construct
  source 1..75: mol_type = other DNA
caccactgcggtgcaggccgatggtagctggagcgtgggcgtcacggcggcgcaggttagcgcctggcctgcggg

SEQ ID NO: 13398 - DNA, 75 bp, synthetic construct
  source 1..75: mol_type = other DNA
cgctcatcagcacggaaggggcaacagcgtggtgcgcagaatatgatgaatggggcaacctgctgaatgaagaga

SEQ ID NO: 13399 - DNA, 75 bp, synthetic construct
  source 1..75: mol_type = other DNA
tcgtcaccgtgtccgatgtcatgagcgtgttgcatgagagctacgacaacggcaaatccggtgaaaaatttttac

SEQ ID NO: 13400 - DNA, 75 bp, synthetic construct
  source 1..75: mol_type = other DNA
tactcagcggactcaaatcagccctgcgaccggcgatgccccggtttaaagtctctgctttctggctgctgatac

SEQ ID NO: 13401 - DNA, 75 bp, synthetic construct
  source 1..75: mol_type = other DNA
gacctatcaggcaacggtgcaggcggacggcagctggagcatcaatattccggcggcagatcttgaggcattgac

SEQ ID NO: 13402 - DNA, 75 bp, synthetic construct
  source 1..75: mol_type = other DNA
tgacgcgcagcacccgggccggatggtggcgcaccgttatgcaggcaggccggagatgcgctaccgctacgacga

SEQ ID NO: 13403 - DNA, 75 bp, synthetic construct
  source 1..75: mol_type = other DNA
acgcagatcgcaaatacagcctttgttaaggcagctataacggcacttatcaacggtgcacctggcacactggat

SEQ ID NO: 13404 - DNA, 75 bp, synthetic construct
  source 1..75: mol_type = other DNA
cgataaagtactcaaaagcctcgagacgcatgttttcccttttatcggcaaccgggatatcacaaaactcaacac

SEQ ID NO: 13405 - DNA, 75 bp, synthetic construct
  source 1..75: mol_type = other DNA
atgaccaaaattaactatcaggcactgcgtgaggcggcagaacgtgcaattccggcaatggaacgcctgttaatg

SEQ ID NO: 13406 - DNA, 75 bp, synthetic construct
  source 1..75: mol_type = other DNA
ctgatgatgcaatcataaatgaattatcaagtgagttagtcagttgtcttggaaatggtaagtttacaccaatta

SEQ ID NO: 13407 - DNA, 75 bp, synthetic construct
  source 1..75: mol_type = other DNA
cttattgaagagggactggccatgaaattagagaacggacgtttcgcaccgggaatccagttactacagatcgcc

SEQ ID NO: 13408 - DNA, 75 bp, synthetic construct
  source 1..75: mol_type = other DNA
tcagagtcgggttcgtgatttgggacgccgcgaatacagtaaacatatgttacgtcttcgcagggaagggcatat

SEQ ID NO: 13409 - DNA, 75 bp, synthetic construct
  source 1..75: mol_type = other DNA
aggaacgccgacaagctacatcgcgaaatatatcagtaagaacattgacggtcgtggtctggctggcgagatcag

SEQ ID NO: 13410 - DNA, 75 bp, synthetic construct
  source 1..75: mol_type = other DNA
aaaatcttatcagtacccggattatcagcgagctggagaaagtccacaaactcactcaaaccacatctgcaatca

SEQ ID NO: 13411 - DNA, 75 bp, synthetic construct
  source 1..75: mol_type = other DNA
tagctctttgtctgacagcatcggggcatgtcctggcccacgatgtctggattacaggtaaacaggcagagaaca

SEQ ID NO: 13412 - DNA, 75 bp, synthetic construct
  source 1..75: mol_type = other DNA
agtctgagttgattaacccgcgcaaaggaacgccgacaagctacatcgcgaaatatatcagtaagaacattgacg

SEQ ID NO: 13413 - DNA, 75 bp, synthetic construct
  source 1..75: mol_type = other DNA
ccgtgatttgcagtgttctattgatccccataattacctttttattcttgtttgcgcaaataacgcatggcaaaa

SEQ ID NO: 13414 - DNA, 75 bp, synthetic construct
  source 1..75: mol_type = other DNA
actgagcgatacagcagccacgcgtattccttatcccacggagtcacagaattataatcttggtgcacgtcttga

SEQ ID NO: 13415 - DNA, 75 bp, synthetic construct
  source 1..75: mol_type = other DNA
tggagctgctgccgaagtacgccgcctgggcagagggcgtcctggctgccggaggcactcaacaggatgacgtgc

SEQ ID NO: 13416 - DNA, 75 bp, synthetic construct
  source 1..75: mol_type = other DNA
ttagcacgatattcatcctggcaggctgcgtgtcgcttgcgcctgaatatcagcggcccgcagcaccggtacccc

SEQ ID NO: 13417 - DNA, 75 bp, synthetic construct
  source 1..75: mol_type = other DNA
gtgagcagagggagaaccagagccgcaccgggtaacaaagtcttattaatactggatgagacaactaatcagaaa

SEQ ID NO: 13418 - DNA, 75 bp, synthetic construct
  source 1..75: mol_type = other DNA
aagaaaaagaccgggaaagaagttaccagtatccagtttactgcacgggaaaaaatgactggtcttgaaagctat

SEQ ID NO: 13419 - DNA, 75 bp, synthetic construct
  source 1..75: mol_type = other DNA
aaattcctggaagatagctcctaacgaacgtggtgataaaaaaggtgtcccagggcttagttgttttcaaccaca

SEQ ID NO: 13420 - DNA, 75 bp, synthetic construct
  source 1..75: mol_type = other DNA
ccgtttcgatgagcagatgagccgggtaaggcgtcatttttcaggactggatactgacgccagaaaaaccgccac

SEQ ID NO: 13421 - DNA, 75 bp, synthetic construct
  source 1..75: mol_type = other DNA
ggcccggagggtaagagaatgtattatggcatgtaccattgtgaggagggatatgttgaatatgcgaatgactaa

SEQ ID NO: 13422 - DNA, 75 bp, synthetic construct
  source 1..75: mol_type = other DNA
aggttatcagggggccgatgtccacactgtatggctctgatgcgatgggcggtgtggtgaatatcattaccagaa

SEQ ID NO: 13423 - DNA, 75 bp, synthetic construct
  source 1..75: mol_type = other DNA
tggatggcggcctgaagccacacagtgatattgatttgctggttacggtgaccgtaaggcttgatgaaacaacgc

SEQ ID NO: 13424 - DNA, 75 bp, synthetic construct
  source 1..75: mol_type = other DNA
aaaagaccagaaacgcaggactcacacccattcctgaaaaacgttcaggaatgcccccggaacatctgcggtttg

SEQ ID NO: 13425 - DNA, 75 bp, synthetic construct
  source 1..75: mol_type = other DNA
atcagataaagataaataacgtcagagtccataagtacacaatcttgtatacatcaaactgcattatggatattg

SEQ ID NO: 13426 - DNA, 75 bp, synthetic construct
  source 1..75: mol_type = other DNA
tcttttgcctttacgctctacggcctggcggctgccctttccgcctgggtttctggggtagtagcggaaatcatc

SEQ ID NO: 13427 - DNA, 75 bp, synthetic construct
  source 1..75: mol_type = other DNA
ctgcaacgcgtctgttcgggcagctgccaaagggacatccattaattcttatgtcaaacgaaggctatgcagcga

SEQ ID NO: 13428 - DNA, 75 bp, synthetic construct
  source 1..75: mol_type = other DNA
cacctcgctgagactgcgggcgcagcgggcgtacgacggcctgagtgttgctggcccgtcaggtgcatacgagta

SEQ ID NO: 13429 - DNA, 75 bp, synthetic construct
  source 1..75: mol_type = other DNA
gcagaatcaaaactctgaatacccggcgggtgaatgtcctgaagggtgaacagcgtcgggtcagtggcagtgccc

SEQ ID NO: 13430 - DNA, 75 bp, synthetic construct
  source 1..75: mol_type = other DNA
gtgacagtgaactcgatcaccgaattgcacttcagttcggtggtggtaatgaggagacgaatctctggacgctct

SEQ ID NO: 13431 - DNA, 75 bp, synthetic construct
  source 1..75: mol_type = other DNA
gcacagaaccaggctgtaacaggcgcgttaaatccggcaagtgtgaggagcacaggcgggcggcatggcgtgcag

SEQ ID NO: 13432 - DNA, 75 bp, synthetic construct
  source 1..75: mol_type = other DNA
atgaaatcaaaagacaccctaaagtggttccccgcgcagcttcctgaagtcagaattatcctgggagatgctgtc

SEQ ID NO: 13433 - DNA, 75 bp, synthetic construct
  source 1..75: mol_type = other DNA
cttcggtaccgcaagaatcacgctgggcgtggatgaagattttagcctgaagaactcccagttcgattttctcca

SEQ ID NO: 13434 - DNA, 75 bp, synthetic construct
  source 1..75: mol_type = other DNA
ttaagttgctccgttattttcttgccgtagcggaagagttgcattttggccgcgcagcagcgcgtttaaatatgt

SEQ ID NO: 13435 - DNA, 75 bp, synthetic construct
  source 1..75: mol_type = other DNA
cgccacgagcatgccaaatggtctgactccacatttggctgcgttggccccattggtccactgaaacacctctca

SEQ ID NO: 13436 - DNA, 75 bp, synthetic construct
  source 1..75: mol_type = other DNA
tgagaaatgggtgaccgatactgaggcacagcatagcgccgcagtagacgcggcagaagcacagcgccagtcact

SEQ ID NO: 13437 - DNA, 75 bp, synthetic construct
  source 1..75: mol_type = other DNA
tggatgtcgcggcgcgccatcgtgtgcagttcgccatgccggaagccgatgcggtagcgctgataaaacaacttg

SEQ ID NO: 13438 - DNA, 75 bp, synthetic construct
  source 1..75: mol_type = other DNA
aaattcgtgcttttgttgaagtggctcgtcagggcagcattcgcggagcgagccgaatgttgaatatgtcgcaac

SEQ ID NO: 13439 - DNA, 75 bp, synthetic construct
  source 1..75: mol_type = other DNA
agtgcgggctgacggtggagcaactggccagacaggtggagccggaatacacaccggcgcgaaaagttcattttt

SEQ ID NO: 13440 - DNA, 75 bp, synthetic construct
  source 1..75: mol_type = other DNA
atgaaaattatcacccgtggtgaagccatgcgcattcaccgtcagcatccggcatcccgtctttttccgttctgc

SEQ ID NO: 13441 - DNA, 75 bp, synthetic construct
  source 1..75: mol_type = other DNA
caatccactgacccgtcagaaagcggcttatgaacagcaggtgaagggatacagcaatgaacagcagaaggcgag

SEQ ID NO: 13442 - DNA, 75 bp, synthetic construct
  source 1..75: mol_type = other DNA
gagaagacaattgcagctctgcctgcgttttctccgtttgctggtgaaattgcccaaatgagcgccaatatccgt

SEQ ID NO: 13443 - DNA, 75 bp, synthetic construct
  source 1..75: mol_type = other DNA
cagggagcaatggggccgcgtggtgaaaccggggccagaggcgaaaaaggagacccgggggggcctcagggacca

SEQ ID NO: 13444 - DNA, 75 bp, synthetic construct
  source 1..75: mol_type = other DNA
ccccatggaacggcgtaataaacgaacaggcaggacagagaaagcgcggatctgggaagtgacggacagaacggt

SEQ ID NO: 13445 - DNA, 75 bp, synthetic construct
  source 1..75: mol_type = other DNA
tttttttgatgtgatggcggacggaaatcaggacattgctcctggtgaataccggttttcggttggcggagcctg

SEQ ID NO: 13446 - DNA, 75 bp, synthetic construct
  source 1..75: mol_type = other DNA
agtctgcagtcatggtaccggcagtgtattctgccggacagcctgcatcgctgcctgttgccattgattatccgg

SEQ ID NO: 13447 - DNA, 75 bp, synthetic construct
  source 1..75: mol_type = other DNA
gaccacgctcaggctgatggcagaggaaggccgggcgtggccgttgctggatggcaccggcatgatttacggcat

SEQ ID NO: 13448 - DNA, 75 bp, synthetic construct
  source 1..75: mol_type = other DNA
gacgaaattttactataacgacgggaaccagctgacggcggtggtgtccccggacgggctggagagccgccggga

SEQ ID NO: 13449 - DNA, 75 bp, synthetic construct
  source 1..75: mol_type = other DNA
aagcaggtcctactttatttctgtatttcaccgctattatggcttcccgccagacagatatgtatccaggcaagg

SEQ ID NO: 13450 - DNA, 75 bp, synthetic construct
  source 1..75: mol_type = other DNA
ttctggcaactgcagactgaaatccaccaccggggacgcgactgccatccgtacagcatggatatcacggttacc

SEQ ID NO: 13451 - DNA, 75 bp, synthetic construct
  source 1..75: mol_type = other DNA
ccacgctgtgcatgttgtcgctgatctccgcgttttatcaggccgataaagttgccgtcacgttgacgttggtca

SEQ ID NO: 13452 - DNA, 75 bp, synthetic construct
  source 1..75: mol_type = other DNA
ttagcaataaatcgctcgatttttataaaaatcaagtattccagtcttttcttgatattgaagggctaacagaaa

SEQ ID NO: 13453 - DNA, 75 bp, synthetic construct
  source 1..75: mol_type = other DNA
tcacctggcgtttctatgcaacgaatgatgtctatatccagacaggtacatgcagggtctcatcgaacaatgtca

SEQ ID NO: 13454 - DNA, 75 bp, synthetic construct
  source 1..75: mol_type = other DNA
tgctggttaactccacttttgccgtaactgctgcgctgggtgctgccgggctggacagcgaagcgaatctgatgg

SEQ ID NO: 13455 - DNA, 75 bp, synthetic construct
  source 1..75: mol_type = other DNA
ttcccgatcagattggcgatgctatggccatctttcctgttattcgggcgcttgaattgcataaaattaagcatc

SEQ ID NO: 13456 - DNA, 75 bp, synthetic construct
  source 1..75: mol_type = other DNA
gaagctggcggcggcaggcgtacaggacgcagactattaccccgaaggtatgcaccataacgagcggcagaactg

SEQ ID NO: 13457 - DNA, 75 bp, synthetic construct
  source 1..75: mol_type = other DNA
aagcgcagcgcgataaaaaagccagagagctggaacaggcgaatgccaccattactgacatgcaggtgcgccagc

SEQ ID NO: 13458 - DNA, 75 bp, synthetic construct
  source 1..75: mol_type = other DNA
atgaccaatgcaccgacggatttaaagtcagttcctccttttataccgaagaaacgttggttgaagaagataaag

SEQ ID NO: 13459 - DNA, 75 bp, synthetic construct
  source 1..75: mol_type = other DNA
gcggtcagtctgggtcgtaaaaacttcctgttcttcggctctgaccatggtggtggcggggagcgctactgtaca

SEQ ID NO: 13460 - DNA, 75 bp, synthetic construct
  source 1..75: mol_type = other DNA
aaactcccgtcattgtggtgaaaaaacgtcgtactttttcgccaccgtccttatccgaaaaaacagatattatcg

SEQ ID NO: 13461 - DNA, 75 bp, synthetic construct
  source 1..75: mol_type = other DNA
cccatgtattttctctgcccgtttttccactgattcacgcaattctctcagttactggtgcctccctgttaacgc

SEQ ID NO: 13462 - DNA, 75 bp, synthetic construct
  source 1..75: mol_type = other DNA
aagcatcctcggcacgatattgcaggaaaacggggtgaccgagtggagcccgctgttcagcgagccacatccttc

SEQ ID NO: 13463 - DNA, 75 bp, synthetic construct
  source 1..75: mol_type = other DNA
ctctgggaggatatggcataagctttaccctgctagggctgggaagcgtgctgatggctaccagcgccataacaa

SEQ ID NO: 13464 - DNA, 75 bp, synthetic construct
  source 1..75: mol_type = other DNA
gaacctgcaagtaatcatgaagagttgccgcttgattatctccaaggtcaaaaagatggtcttgaatgggctgcg

SEQ ID NO: 13465 - DNA, 75 bp, synthetic construct
  source 1..75: mol_type = other DNA
ggcaaaacatcttgccgcaccggacccgcattcacagtatgcacccaaagaaagtccgacgtttaccgggacacc

SEQ ID NO: 13466 - DNA, 75 bp, synthetic construct
  source 1..75: mol_type = other DNA
tggttgccacgggggccagctccatgtcgtgggagtaccgttacaccctgaacgcggtgattgaggatttcagcg

SEQ ID NO: 13467 - DNA, 75 bp, synthetic construct
  source 1..75: mol_type = other DNA
attacctcgggacgcataagaacttctgtgcacaggacgtttccgcggtaacaggcgcaaccgtaaccagcataa

SEQ ID NO: 13468 - DNA, 75 bp, synthetic construct
  source 1..75: mol_type = other DNA
gtggggaaagcaaatttcccttactggcagtaagactgtggtgctgtgggctctgggaggatatggcgtaagctt

SEQ ID NO: 13469 - DNA, 75 bp, synthetic construct
  source 1..75: mol_type = other DNA
cccgcttatcaacttctactgaatgataagctggctgatggcgcaggcgcgggctggctcgctaccagtcacaca

SEQ ID NO: 13470 - DNA, 75 bp, synthetic construct
  source 1..75: mol_type = other DNA
gtgtcagacacactccccgggacaacgcctcccgacgacaatcacgaccgcccctggtgggggctgccctgcacc

SEQ ID NO: 13471 - DNA, 75 bp, synthetic construct
  source 1..75: mol_type = other DNA
atacctaaagaaaatggcagttggctttacctgattgacctagaacacgcattacgcgtcgctgacattcgcatc

SEQ ID NO: 13472 - DNA, 75 bp, synthetic construct
  source 1..75: mol_type = other DNA
atggctgattctggttcaactaaatataacgccagttttgaagaatggcatgaactgttaatggattatgcagag

SEQ ID NO: 13473 - DNA, 75 bp, synthetic construct
  source 1..75: mol_type = other DNA
agtctgattcaactgaaattgcaggccggacgtaaactgacgcaggcagaaacaaccagacttaacgctgtgctg

SEQ ID NO: 13474 - DNA, 75 bp, synthetic construct
  source 1..75: mol_type = other DNA
acggattcggcagcactgttgccctgtattgaacaggccagggaggatatccgtaccctgcgccagctgcagctt

SEQ ID NO: 13475 - DNA, 75 bp, synthetic construct
  source 1..75: mol_type = other DNA
ggacgggaacaggaaattccttgtccttccgtacgggaaatcagcggaggtgattccctttcaggggaaagagtg

SEQ ID NO: 13476 - DNA, 75 bp, synthetic construct
  source 1..75: mol_type = other DNA
ataatttatcaatagatgagattatcgaacgtgctgaaaaaggcgattgcgaggctcaatatattgttgggtttt

SEQ ID NO: 13477 - DNA, 75 bp, synthetic construct
  source 1..75: mol_type = other DNA
tgtcgcagattgacgccatgaaagatcaactgagccgggcagagacgctcagtcgccgccaggaaagcgatatcc

SEQ ID NO: 13478 - DNA, 75 bp, synthetic construct
  source 1..75: mol_type = other DNA
gataagtggttttacaaactcatcaaagatgggggctttcctgcccccatcaaaatggggcgcagctcccgctgg

SEQ ID NO: 13479 - DNA, 75 bp, synthetic construct
  source 1..75: mol_type = other DNA
aaggctttcagccattcttcgcctgccagacccgtgtgcgcgacccgggccgccggggatacacaaaacacatgc

SEQ ID NO: 13480 - DNA, 75 bp, synthetic construct
  source 1..75: mol_type = other DNA
cccgctccagaccgggcaggtgctgaaactcctcttgttcttactgatatgactggaggagtgactatttattat

SEQ ID NO: 13481 - DNA, 75 bp, synthetic construct
  source 1..75: mol_type = other DNA
tgctcgacagcggctcggtggtcaccgccgatgacatcatcatcaccagcggctgccataactcgatgtcgctgg

SEQ ID NO: 13482 - DNA, 75 bp, synthetic construct
  source 1..75: mol_type = other DNA
aaagctgccgaggagatcgggcagctcgtcaccgtcgcacgtgaagaactccagcgccgcaaggccaaagaatca

SEQ ID NO: 13483 - DNA, 75 bp, synthetic construct
  source 1..75: mol_type = other DNA
atccgggaggcggaagaaacaaaaaacagcctgatgcaggcagcgaatgagcatattgcgccacttcaggatgct

SEQ ID NO: 13484 - DNA, 75 bp, synthetic construct
  source 1..75: mol_type = other DNA
ggaaggggtgaaagaggcgatgatgcagcacaggaaggacgtgttaaagctggcagggaatacgggcatgatgtt

SEQ ID NO: 13485 - DNA, 75 bp, synthetic construct
  source 1..75: mol_type = other DNA
aaatgtggtggacagagtcattgaaggggcttacgaggtggtggaggtttttgaccggattgaagagaaacgtga

SEQ ID NO: 13486 - DNA, 75 bp, synthetic construct
  source 1..75: mol_type = other DNA
cttcgggttagatggtataaaagcagataatccaataaaagcaaagcaagggagttcagatgcttcaaattatta

SEQ ID NO: 13487 - DNA, 75 bp, synthetic construct
  source 1..75: mol_type = other DNA
agataacaattctgaatttatttgtgataaagaatttgatgatatacgtgatggtaaatgggtaataagtattga

SEQ ID NO: 13488 - DNA, 75 bp, synthetic construct
  source 1..75: mol_type = other DNA
tgatcgtatggatgaattggataattttctgcctgaagacaaagctgcagcacgagattttctccttgaaatcaa

SEQ ID NO: 13489 - DNA, 75 bp, synthetic construct
  source 1..75: mol_type = other DNA
cccctggtgggggctcccctgcaccgtgacgccctgtttcggggcacgtctggtgcaggagggcaatcagttgca

SEQ ID NO: 13490 - DNA, 75 bp, synthetic construct
  source 1..75: mol_type = other DNA
gccatgctctgctggggcgaggatgaggataagccggaggtggatccgtttgcggcgctggaagacgcgctgagc

SEQ ID NO: 13491 - DNA, 75 bp, synthetic construct
  source 1..75: mol_type = other DNA
aggtatttgcgggatacatttcctgctgactggataatccaatgtgctcttgaaacaggaacctccctcaaatgg

SEQ ID NO: 13492 - DNA, 75 bp, synthetic construct
  source 1..75: mol_type = other DNA
atcatccggggaaacctgcgggtcggccaggcgctggagaaagtggccgccacgggtgactgccggcaggtggct

SEQ ID NO: 13493 - DNA, 75 bp, synthetic construct
  source 1..75: mol_type = other DNA
gaaaaaagtcagccgcgaaacgcctgatttgctcaactttgaaaagagcatgttgatcaaagaaggggcggaaaa

SEQ ID NO: 13494 - DNA, 75 bp, synthetic construct
  source 1..75: mol_type = other DNA
ataggagttgctaaatctacatggacaaaaacacacaggcctcactggttggctatgcggggtagtgcagagatg

SEQ ID NO: 13495 - DNA, 75 bp, synthetic construct
  source 1..75: mol_type = other DNA
ataatccacgttccagcaagttaacgaagcaacttgcagcctctgttttggcacaatcaaacaaagggcgtaagt

SEQ ID NO: 13496 - DNA, 75 bp, synthetic construct
  source 1..75: mol_type = other DNA
atggatcgggaactgaaaaatctgatgctgaacattaaccagctggcggcgatagcgggaatatgtcgccagact

SEQ ID NO: 13497 - DNA, 75 bp, synthetic construct
  source 1..75: mol_type = other DNA
ctcaggtctgggtgctggttctggtgaatgccggtggtgagccgtttgcggtggttcaggtacagcggcggtttg

SEQ ID NO: 13498 - DNA, 75 bp, synthetic construct
  source 1..75: mol_type = other DNA
acaggtctgatgacccgcagcaactacagaacggtaaataacattacccgggggaagcatccggaggcgaaacaa

SEQ ID NO: 13499 - DNA, 75 bp, synthetic construct
  source 1..75: mol_type = other DNA
aaagttagctttaaattgctcgcagcggacacagcaaaagataaccgtaaagataatgaattagatcgctgcttt

SEQ ID NO: 13500 - DNA, 75 bp, synthetic construct
  source 1..75: mol_type = other DNA
cgagtgagtcactggcagccatggtgaatgccggtgtgcgtggtggtgaacagtttgatgccatcaaccagagtg

SEQ ID NO: 13501 - DNA, 75 bp, synthetic construct
  source 1..75: mol_type = other DNA
ggctggatagtaactccgcacgagattgatggcagtacttatcccaacccaaccgacggcttacctgtcgagtat

SEQ ID NO: 13502 - DNA, 75 bp, synthetic construct
  source 1..75: mol_type = other DNA
gccgcagcgagtcactgtggctggtgcgcggcggcgtcctgagactggatgaaggtcaccggctggccgcactct

SEQ ID NO: 13503 - DNA, 75 bp, synthetic construct
  source 1..75: mol_type = other DNA
gccttactcactttcccgtcacatcctggaacatctgcgcaaactcaccagccacgaacccgtgattggcattat

SEQ ID NO: 13504 - DNA, 75 bp, synthetic construct
  source 1..75: mol_type = other DNA
aagaccgcatcaccatcaccgacagcctggaccgccgtgaagtgctgcacacgcagggcgaagccgggctgaagc

SEQ ID NO: 13505 - DNA, 75 bp, synthetic construct
  source 1..75: mol_type = other DNA
gacagcagtgagacccgggcctacaaaatccgcttcccgaacggtacggtggatgtgttccgtggctgggtgagc

SEQ ID NO: 13506 - DNA, 75 bp, synthetic construct
  source 1..75: mol_type = other DNA
gcgacaaggagaacaaaccaccgaggatagcccagggcagtagcaacgtctttatcaacaatcagcctgccgcgc

SEQ ID NO: 13507 - DNA, 75 bp, synthetic construct
  source 1..75: mol_type = other DNA
tgcacggttctgcgtgccgtccgtgacacggtggtctctgttgcccgcgctgtatggaactggattttcttctga

SEQ ID NO: 13508 - DNA, 75 bp, synthetic construct
  source 1..75: mol_type = other DNA
atgaaaaaggtgacgttgtttctgtttgctgccagcctcctgccttcctgtgtactggcctggaacacgccggga

SEQ ID NO: 13509 - DNA, 75 bp, synthetic construct
  source 1..75: mol_type = other DNA
gggcggcaattattatctcggccgcaatatgagggaatgcagaatgatttcacgctggaaatggatgctgaagca

SEQ ID NO: 13510 - DNA, 75 bp, synthetic construct
  source 1..75: mol_type = other DNA
ctggaaacagcaatgcgacagggggaaatcctcacattacgctgggaacacctcgatttgcagcacggagtggcg

SEQ ID NO: 13511 - DNA, 75 bp, synthetic construct
  source 1..75: mol_type = other DNA
caagcagaaggcagcggagaaaatccccttgtgtcgtcactggatgccctggctaaggtcgaacaaatcggcatc

SEQ ID NO: 13512 - DNA, 75 bp, synthetic construct
  source 1..75: mol_type = other DNA
ttccgtcgtctgattgccacactcatccggcgttatggcgtcagtctcattcatctggatgccagtgccggatgc

SEQ ID NO: 13513 - DNA, 75 bp, synthetic construct
  source 1..75: mol_type = other DNA
tacgggaggcatcgcgctgcccgtctcccgtcaccatctggcagacactgctcacccgactgttggaccagcatt

SEQ ID NO: 13514 - DNA, 75 bp, synthetic construct
  source 1..75: mol_type = other DNA
tcccgtcaccatctggcagatactgctgtcccgactgctggaccagcattacggcctcacactgaatgacacacc

SEQ ID NO: 13515 - DNA, 75 bp, synthetic construct
  source 1..75: mol_type = other DNA
agcagcaccagacaacgctcactatcaaggcaataccaacgtcaacggcgaagacatgactgagattgaggagaa

SEQ ID NO: 13516 - DNA, 75 bp, synthetic construct
  source 1..75: mol_type = other DNA
cgatattaaagctcgaggtggtataccagcacagaatattcttgagataggctatgttcctgtcagtgatgttat

SEQ ID NO: 13517 - DNA, 75 bp, synthetic construct
  source 1..75: mol_type = other DNA
gcagcgacaactacgcgggcgatgaaatggtcaccaaagtagtgccggtacgtaatgtgtcggtacgcgagctgg

SEQ ID NO: 13518 - DNA, 75 bp, synthetic construct
  source 1..75: mol_type = other DNA
ttcaacaccacccagcgggagctgagggagttctattaccagatacgtgagatgccgtgggtacacggtcccggt

SEQ ID NO: 13519 - DNA, 75 bp, synthetic construct
  source 1..75: mol_type = other DNA
atgccaatacggtgccctacacccttggagcgctggaaatcggcccaaagcgttgccgaacgtttcggtatttcg

SEQ ID NO: 13520 - DNA, 75 bp, synthetic construct
  source 1..75: mol_type = other DNA
aatcgtgaacagagcatggtggtcgttcaggcacctacgctaagccagaaagattcctcggtatcgttaagtacc

SEQ ID NO: 13521 - DNA, 75 bp, synthetic construct
  source 1..75: mol_type = other DNA
gaagtaaaattgatttaacctttacacagaaagtcactcatacaaccaattggtcaattccacttaatgttactg

SEQ ID NO: 13522 - DNA, 75 bp, synthetic construct
  source 1..75: mol_type = other DNA
atgtggccggataaccgtatcgcccgtgacgcgcactatctttaccggtatgaccgtcacggcaggctgacggag

SEQ ID NO: 13523 - DNA, 75 bp, synthetic construct
  source 1..75: mol_type = other DNA
atgtcgcagacagaaaatgcagtgacttcctcatcaggtaacaagcgtgcataccggaaaggtaaccctgttccg

SEQ ID NO: 13524 - DNA, 75 bp, synthetic construct
  source 1..75: mol_type = other DNA
caccatctggatgttacacggctcgttgtgtgagttccggctgaatttgtggggagcggagtttgcggcgttctt

SEQ ID NO: 13525 - DNA, 75 bp, synthetic construct
  source 1..75: mol_type = other DNA
tcaataaggctggtgaatttgatccggaaaaatggatcgcaagtctgggtattaccagccagaagtcgtgtgagt

SEQ ID NO: 13526 - DNA, 75 bp, synthetic construct
  source 1..75: mol_type = other DNA
gggcaatcagttagaggtgataccggcggaccggacgtggcgtccacggctgcaaagcaaaccgaaggtggacgg

SEQ ID NO: 13527 - DNA, 75 bp, synthetic construct
  source 1..75: mol_type = other DNA
ttatggtttggtggggatatctcatactaaagcgaagggagattatgagtggagaaacagtgtgggtgctgatga

SEQ ID NO: 13528 - DNA, 75 bp, synthetic construct
  source 1..75: mol_type = other DNA
cgacagcggtggcgaacatgcggcggtgttgtactcgctgatcggcacatgccgtctgaacaatgtggagccaga

SEQ ID NO: 13529 - DNA, 75 bp, synthetic construct
  source 1..75: mol_type = other DNA
ttggagcgttcgggaaggattttgcgatcggcattgtgtatatgtacctcatgtattactacaccgatgtcgtcg

SEQ ID NO: 13530 - DNA, 75 bp, synthetic construct
  source 1..75: mol_type = other DNA
ctcggtttacgagaactcggcacaagcggggagaaaataccgttactcagtacagcgaatacctggaccaatcga

SEQ ID NO: 13531 - DNA, 75 bp, synthetic construct
  source 1..75: mol_type = other DNA
tagtcgcggggagattttccttgctctgcgcgatctgagcagcaaactggtggtggaagagtcgcaggaactggc

SEQ ID NO: 13532 - DNA, 75 bp, synthetic construct
  source 1..75: mol_type = other DNA
gcagccgaactggaaaagcagcaattgattaatcaggtcaacgaatacataaacagtaagcaatggcctggtaaa

SEQ ID NO: 13533 - DNA, 75 bp, synthetic construct
  source 1..75: mol_type = other DNA
gtcgtcaagcccggtacagtggcaacggataccgttgttaataccggggcggaagggggaccggatgcagaaaac

SEQ ID NO: 13534 - DNA, 75 bp, synthetic construct
  source 1..75: mol_type = other DNA
caccggtcaccggtattaccgtgacgccactaacggggaatgtggcaaaaggtcagagcaccaccctgactgtgg

SEQ ID NO: 13535 - DNA, 75 bp, synthetic construct
  source 1..75: mol_type = other DNA
agattgaaacagattagcgggctgacggagctgtttcaggaagaggatttcagcccggcatggacggttcgctga

SEQ ID NO: 13536 - DNA, 75 bp, synthetic construct
  source 1..75: mol_type = other DNA
ctgaaggtattgccctgacatttcgtgttcctgaaggaaatataaaacatcctttgattatcttatgccatgggt

SEQ ID NO: 13537 - DNA, 75 bp, synthetic construct
  source 1..75: mol_type = other DNA
cctgccgccccttggactcgtggcaataactgtccccgtgtacaggaaacaggcaacagcgggacagaacagtcg

SEQ ID NO: 13538 - DNA, 75 bp, synthetic construct
  source 1..75: mol_type = other DNA
tgtgaagattcttttttctggcacacctgttgctggaaaaaataacgccttggctatacaaagctcggcatctgg

SEQ ID NO: 13539 - DNA, 75 bp, synthetic construct
  source 1..75: mol_type = other DNA
tggtcagcacatacagtgagctgaaccggcagtatacggaactgctgagtgaatataaaaatttgcggcggtatt

SEQ ID NO: 13540 - DNA, 75 bp, synthetic construct
  source 1..75: mol_type = other DNA
cttcacaggacgggccggatgtgcagcaggcggtgacacaggccattgccggattaagtgaacgaaaagtgcagt

SEQ ID NO: 13541 - DNA, 75 bp, synthetic construct
  source 1..75: mol_type = other DNA
cgtctggggaatgcccgggcagatgatctggtgcgcaataacggaatagcggctaatgcggtggctctgcataag

SEQ ID NO: 13542 - DNA, 75 bp, synthetic construct
  source 1..75: mol_type = other DNA
aactgcgggcggtgtatgaccgcagcgggacgcaggttcgcgggtttacttatgatgcggagcacgccgggcgga

SEQ ID NO: 13543 - DNA, 75 bp, synthetic construct
  source 1..75: mol_type = other DNA
tggtgtccccggacgggctggagagccgccgggaatatgatgaaccgggcaggctggtatcggagacatcgcgca

SEQ ID NO: 13544 - DNA, 75 bp, synthetic construct
  source 1..75: mol_type = other DNA
tggagcaactgttacaggcacgccaacgggagtttgccactaaatggggacgtgccgcgctgccacatgaacgcc

SEQ ID NO: 13545 - DNA, 75 bp, synthetic construct
  source 1..75: mol_type = other DNA
gtccagaaagatggtcgcagaattgaatatacggcggcttctctggatgagcttaaccgggcgatcaatgatgcg

SEQ ID NO: 13546 - DNA, 75 bp, synthetic construct
  source 1..75: mol_type = other DNA
atttgtctgttactgatgatgttgttgttcctgctactgctactgctactgctactgctcttctttttcctgccg

SEQ ID NO: 13547 - DNA, 75 bp, synthetic construct
  source 1..75: mol_type = other DNA
cgagggtggcatatggcgagaaaaaatttacatatccggttgttgatgagtggccggggcttccaataaatcaac

SEQ ID NO: 13548 - DNA, 75 bp, synthetic construct
  source 1..75: mol_type = other DNA
aagtccgggaaatgcgtgattccggactggttgaatttcatgtgcacacccattcacataaacgctgggacaggt

SEQ ID NO: 13549 - DNA, 75 bp, synthetic construct
  source 1..75: mol_type = other DNA
tggggacgggcgttccgcgaccgtctggcggctaatggcaagaaaggaaaggtgattctcggcgcgatgatgcgc

SEQ ID NO: 13550 - DNA, 75 bp, synthetic construct
  source 1..75: mol_type = other DNA
attttcaaacatccggccgggaaattattctgggctttaacggatgaaagcaataaagagcaagcggacgttatt

SEQ ID NO: 13551 - DNA, 75 bp, synthetic construct
  source 1..75: mol_type = other DNA
gcgtattattactgtgcttttcgtcaccactaatttctcaggctgcgacactggacgtacgtggtggatatcgta

SEQ ID NO: 13552 - DNA, 75 bp, synthetic construct
  source 1..75: mol_type = other DNA
gaaaatcaggactatatagctatttcccagaaacgggaaataggttatgggcgagggaaaaaagactaccacctt

SEQ ID NO: 13553 - DNA, 75 bp, synthetic construct
  source 1..75: mol_type = other DNA
atgaaacattcatttgaagtaaaacttgccgctgtaaatcattacctggctggtcatgcaggcatcatttctacg

SEQ ID NO: 13554 - DNA, 75 bp, synthetic construct
  source 1..75: mol_type = other DNA
cgcggttgtgtttagtgcgaaaaaacgccagtggggtagcagggaggatttggcgtgtgcgcagtggatctgggg

SEQ ID NO: 13555 - DNA, 75 bp, synthetic construct
  source 1..75: mol_type = other DNA
gtaaaaaatatcatgagtccgtcaaagcttcgcgaaaaatgggatgaactggttatccgcctggggcgttcgtct

SEQ ID NO: 13556 - DNA, 75 bp, synthetic construct
  source 1..75: mol_type = other DNA
taatggcgggtgcagtggtgatgtccttgctatacgcattttagcagactgtaaaaaaattattagtccagaata

SEQ ID NO: 13557 - DNA, 75 bp, synthetic construct
  source 1..75: mol_type = other DNA
ttagtttgggacttattgctctggcggtgggtaatgcatatgcaacacaattgttggatgattatagtataattt

SEQ ID NO: 13558 - DNA, 75 bp, synthetic construct
  source 1..75: mol_type = other DNA
aaagcggtaatctgttattcatcatgccaggcggtggcgtgaacgcacagggccagccgttgccctcgttcgcca

SEQ ID NO: 13559 - DNA, 75 bp, synthetic construct
  source 1..75: mol_type = other DNA
ggcgaggtgcagtggcgaaaccgtccgccatcagtcagtatccgtggggcggataatgttattgaattactgaga

SEQ ID NO: 13560 - DNA, 75 bp, synthetic construct
  source 1..75: mol_type = other DNA
gccaggcgctgctggaagcgaaggaaagcggcagcgacccctatgccgccatcgaggcggtgattccctgggacg

SEQ ID NO: 13561 - DNA, 75 bp, synthetic construct
  source 1..75: mol_type = other DNA
atctgactaattcagacagtattatcaatctttcgtatgatgatggtcaaacatttacccaaggaaaaacattaa

SEQ ID NO: 13562 - DNA, 75 bp, synthetic construct
  source 1..75: mol_type = other DNA
taaaggccgtgaagacggtctgcgcgatctggagcgtaaggcattgcaggtgggtaccgatgaagacggtggcta

SEQ ID NO: 13563 - DNA, 75 bp, synthetic construct
  source 1..75: mol_type = other DNA
cttggttgcatgcttgaattgtgatagcaaaaccgtggatgtagttagaaatcaaatatcacttgcatgtcttgc

SEQ ID NO: 13564 - DNA, 75 bp, synthetic construct
  source 1..75: mol_type = other DNA
ttggcggcgtgggttgccacctgtatcaggagtttgaaggccattgtctgacggcgtcgcagctggagcaggcca

SEQ ID NO: 13565 - DNA, 75 bp, synthetic construct
  source 1..75: mol_type = other DNA
gtgatggttttggcttccgccagaatattgtgcgtggaaactcacaaggagaaacgctgtttacaggagggatca

SEQ ID NO: 13566 - DNA, 75 bp, synthetic construct
  source 1..75: mol_type = other DNA
ttggtggtgattgctggctggacgagtcggtgaacgacaaagacactctgaaagccggaaaactcaccatcgact

SEQ ID NO: 13567 - DNA, 75 bp, synthetic construct
  source 1..75: mol_type = other DNA
attcttccttatttgtggcttatatgggatgtctcggatggggaagtgcatatttttacgggtggggtgtctctt

SEQ ID NO: 13568 - DNA, 75 bp, synthetic construct
  source 1..75: mol_type = other DNA
aataccgggcttcttttctgcgtatggccacagtcagtgttctgtttatcctgctgtgtgaatacgccatttttg

SEQ ID NO: 13569 - DNA, 75 bp, synthetic construct
  source 1..75: mol_type = other DNA
tttaaactatcaatggttttattctgagctaaaacgtcacaatgtctcacattacatttactatttagccacaga

SEQ ID NO: 13570 - DNA, 75 bp, synthetic construct
  source 1..75: mol_type = other DNA
acccctgccttctgcccttctcccgatccgggatcgctttgcagctttgtttcagcgggcgcgcgatgatcaaaa

SEQ ID NO: 13571 - DNA, 75 bp, synthetic construct
  source 1..75: mol_type = other DNA
gtttggtctgaaaacatcaatgtcgcgtaaaggtaactgttacgacaacgctccgatggaaagcttctggggaac

SEQ ID NO: 13572 - DNA, 75 bp, synthetic construct
  source 1..75: mol_type = other DNA
cacaggagggatggttgtacctcgctggcatcaaagatgtttatacgtgcgaaattgtcggctacgccatgggag

SEQ ID NO: 13573 - DNA, 75 bp, synthetic construct
  source 1..75: mol_type = other DNA
cagcagcaaaaacaggctgaaatggcgctgaatcagttgattaaccgttatcagatggaacacacaggcaatcag

SEQ ID NO: 13574 - DNA, 75 bp, synthetic construct
  source 1..75: mol_type = other DNA
cgtcagagcgcgaaagcgaactggccgctgaaaatgtccgccttaaacgacaactggcggagcaggctgaggaac

SEQ ID NO: 13575 - DNA, 75 bp, synthetic construct
  source 1..75: mol_type = other DNA
tcctagacgcattgcacagatggcggacgcattctctcgtgcgctggacgtcgatccgcgtcgcctgctcgacca

SEQ ID NO: 13576 - DNA, 75 bp, synthetic construct
  source 1..75: mol_type = other DNA
tcgaaatgcttgaagggattgtgcccaatgatgaactgttcgggattatttataccattgacgacggggatgact

SEQ ID NO: 13577 - DNA, 75 bp, synthetic construct
  source 1..75: mol_type = other DNA
tttcacgtatgacgcgcagcacccgggccggatggtggcgcaccgttacgcgggaaggccggagatgcgctaccg

SEQ ID NO: 13578 - DNA, 75 bp, synthetic construct
  source 1..75: mol_type = other DNA
tgctgccacgctgccgggttttcagcagcttcacacctccgtggagggactgaaactgattgccgattacgaagg

SEQ ID NO: 13579 - DNA, 75 bp, synthetic construct
  source 1..75: mol_type = other DNA
cgcagtgaagcaggccacgggggtgagtgacgatcgtttcttcgtcagtgataacccgcaattcgatctggttct

SEQ ID NO: 13580 - DNA, 75 bp, synthetic construct
  source 1..75: mol_type = other DNA
caaagcgctggttcgtatgggattggttgaaatgaaatctgacccagttgtgttctggtttgaaaaatatcaaga

SEQ ID NO: 13581 - DNA, 75 bp, synthetic construct
  source 1..75: mol_type = other DNA
gcacaggataaagctaccaaatggtattgaggcatattttgctaagaaacatcccaaagtatatgaagactttga

SEQ ID NO: 13582 - DNA, 75 bp, synthetic construct
  source 1..75: mol_type = other DNA
gtcttaagtgggagaagaataagccagaaagtgttttctacctttgtgagcatcatggctgtgtgatccatcagt

SEQ ID NO: 13583 - DNA, 75 bp, synthetic construct
  source 1..75: mol_type = other DNA
ttcagcgggcgcgcgatgatcaaaacgcaggttgtcaaactgactacgtccacgcggcgattatagccgatcaaa

SEQ ID NO: 13584 - DNA, 75 bp, synthetic construct
  source 1..75: mol_type = other DNA
atggattcagaaacagttcacggaacggtcaggtctggcgttaccagcgtgccggaagccgggccgttattctgg

SEQ ID NO: 13585 - DNA, 75 bp, synthetic construct
  source 1..75: mol_type = other DNA
atgaagcatcctcacgataatatccgcgtaggcacgatcactttcgtctactccgttacgaagcgaggctgggta

SEQ ID NO: 13586 - DNA, 75 bp, synthetic construct
  source 1..75: mol_type = other DNA
acggcggcggatcatgtggcccgcgccctgttagcgctgggcgtgcagcatggcgaccgcgtggcggtggtgatg

SEQ ID NO: 13587 - DNA, 75 bp, synthetic construct
  source 1..75: mol_type = other DNA
gcaggataccgatcttggcattggcgggcttatattcgataagaaccagacatataaagtgtacggaaaagataa

SEQ ID NO: 13588 - DNA, 75 bp, synthetic construct
  source 1..75: mol_type = other DNA
ggggatattttttactaaacgtggtggcacgctagatttaaatggacacaatcagacttttactagaattgccgc

SEQ ID NO: 13589 - DNA, 75 bp, synthetic construct
  source 1..75: mol_type = other DNA
tttgtcgccacgcccgtaacctgctgctggcgcagggctggccggaagagacggatattgaacaactgaatccgc

SEQ ID NO: 13590 - DNA, 75 bp, synthetic construct
  source 1..75: mol_type = other DNA
ccttatgctcatgaagttttatataactattcaaaaactagatattttccatttgacgatgagaaaatacttgtt

SEQ ID NO: 13591 - DNA, 75 bp, synthetic construct
  source 1..75: mol_type = other DNA
ctgccagtggcaacactcaccctaaatttacgcgcggcgatatttaccgcgaccagtacggcggcacggtaatga

SEQ ID NO: 13592 - DNA, 75 bp, synthetic construct
  source 1..75: mol_type = other DNA
tgcggtctatctgccagtggatccggtgctaccgccacagcgtcgccagcttttgctgacggtgggcgaggtgcg

SEQ ID NO: 13593 - DNA, 75 bp, synthetic construct
  source 1..75: mol_type = other DNA
gtggcagcatgcatatcatgctgccacgctgactctcaacaaaaacctggcagttgctaaaatcgacttctgtat

SEQ ID NO: 13594 - DNA, 75 bp, synthetic construct
  source 1..75: mol_type = other DNA
gccacccgcgccccgcgtaagacccggagtgcgacaccggcaaaacgtggacgcccgaaaaagaaagccagttaa

SEQ ID NO: 13595 - DNA, 75 bp, synthetic construct
  source 1..75: mol_type = other DNA
ccggcatatcagccagtcaggcagaagagagcgctgcaaatgctgacacttcagcaggggaggcatcggagtcag

SEQ ID NO: 13596 - DNA, 75 bp, synthetic construct
  source 1..75: mol_type = other DNA
gagatggttctgtcgctgagcggtatgggagccattgagaatgccggggatttggagcatgaggtgctgacgccg

SEQ ID NO: 13597 - DNA, 75 bp, synthetic construct
  source 1..75: mol_type = other DNA
cagcatcagtattgagggcagggatatcactactgtgctggataaccgtctgatgagtctgacgttgacggacaa

SEQ ID NO: 13598 - DNA, 75 bp, synthetic construct
  source 1..75: mol_type = other DNA
tttcatggcatcgttataccggggacgctgagggactctatctttgtgctggaaggtcttctggaacaggagacc

SEQ ID NO: 13599 - DNA, 75 bp, synthetic construct
  source 1..75: mol_type = other DNA
gcattttccgttgaccgctgggatcgcaactggccggaagagacaaagcgacaggttattcgtgatgcatggctg

SEQ ID NO: 13600 - DNA, 75 bp, synthetic construct
  source 1..75: mol_type = other DNA
aactcgagccgggcaatgaagtccggcttttttctgtcgatggcacagcgttcggtatgtcagatgtactccgct

SEQ ID NO: 13601 - DNA, 75 bp, synthetic construct
  source 1..75: mol_type = other DNA
aacaaacaagactacaggcgcggatggatgagttacggtctgagatggcgtttgcggagactggggaaaaaccgt

SEQ ID NO: 13602 - DNA, 75 bp, synthetic construct
  source 1..75: mol_type = other DNA
gtcttaaccaggatggtttatcgaatgataatatccagattggccttcaatatatagaacatattgaacgtacac

SEQ ID NO: 13603 - DNA, 75 bp, synthetic construct
  source 1..75: mol_type = other DNA
tatgtgtgttattctcgctgcttgcaggatgtgcctctgaatcttctattgatgaaaagaagaaaaaagctcaag

SEQ ID NO: 13604 - DNA, 75 bp, synthetic construct
  source 1..75: mol_type = other DNA
gtgaacggcgaaccggcagagcagtggcagtatgatggccacggctggctgacagacatcagccacctgagcgaa

SEQ ID NO: 13605 - DNA, 75 bp, synthetic construct
  source 1..75: mol_type = other DNA
acctggtggcaactgacaggagactcctcacttcgctcgttaaaaaataccggaagcatgacatattttacagga

SEQ ID NO: 13606 - DNA, 75 bp, synthetic construct
  source 1..75: mol_type = other DNA
agaggaggcgaagaagaatgccggagaggcggagacgtcagcgaggaatgccggcatatcagccagtcaggcaga

SEQ ID NO: 13607 - DNA, 75 bp, synthetic construct
  source 1..75: mol_type = other DNA
ggcaggcgctgccggaagaactccgcttaagtccgcatcgttatctggcgacaaacagtccgcaggggccgtggt

SEQ ID NO: 13608 - DNA, 75 bp, synthetic construct
  source 1..75: mol_type = other DNA
gtaaatggctttgcgaatgttatccctacggggcatcgggaaaacgcattcgtaaacagtttgcgacaaaaagtg

SEQ ID NO: 13609 - DNA, 75 bp, synthetic construct
  source 1..75: mol_type = other DNA
atgacttctgaagtaaaactgaaaacaggtaatgacccccggtcattaccggattatgctgccctgcgcgatgaa

SEQ ID NO: 13610 - DNA, 75 bp, synthetic construct
  source 1..75: mol_type = other DNA
gttatacgggcggacgttccatgctgcgttactacatccagcccaaacgtaaaatgcgtccgtcaaaaagaacag

SEQ ID NO: 13611 - DNA, 75 bp, synthetic construct
  source 1..75: mol_type = other DNA
tatctcttcctgaaggcactttaggacaatgggttaccgccgccagaaaagggctcggtactcctggttcccgca

SEQ ID NO: 13612 - DNA, 75 bp, synthetic construct
  source 1..75: mol_type = other DNA
agtccattattgatgatctgcgcgatcagatagccctgcgggtgaccgaagcaggtgcggatgatgaggaggaat

SEQ ID NO: 13613 - DNA, 75 bp, synthetic construct
  source 1..75: mol_type = other DNA
cagacgtgatgaaattctacgtatgcagtgtgggtgtatccgctggcaacagccagaagaaaataatgtatcccg

SEQ ID NO: 13614 - DNA, 75 bp, synthetic construct
  source 1..75: mol_type = other DNA
aaatgtggtggacagagtcattgaaggggcttacgaggtggtgggcgtttttgaccggattgaggaaaagcgtga

SEQ ID NO: 13615 - DNA, 75 bp, synthetic construct
  source 1..75: mol_type = other DNA
ggttttacaagttgatcagtgaaggccatttccctaaacccatcaaactggggcgcagcagccgctggtacaaaa

SEQ ID NO: 13616 - DNA, 75 bp, synthetic construct
  source 1..75: mol_type = other DNA
cagcgaagaaagcggctgcagacgcaaagaaaaaagcagaagcagaagccgccaaagccgcagccgaagcgcaga

SEQ ID NO: 13617 - DNA, 75 bp, synthetic construct
  source 1..75: mol_type = other DNA
tggtgcaggagggtaaccggttgcattaccttgccgaccgcgccggtatcagaggccggttcagcgatgcggatg

SEQ ID NO: 13618 - DNA, 75 bp, synthetic construct
  source 1..75: mol_type = other DNA
ttagtgagccgggaattatttcaattgaggatttaccacctggctggggattacttcacgttgttaacggaagag

SEQ ID NO: 13619 - DNA, 75 bp, synthetic construct
  source 1..75: mol_type = other DNA
tcggaacccctgaacgttatcgctcaaaccatgtcttttcgtgaaatgctgttacgccagcgggttaacgagggc

SEQ ID NO: 13620 - DNA, 75 bp, synthetic construct
  source 1..75: mol_type = other DNA
tacaaagaaaatttatcgcctaagcgaggacatcatcagtgatgtggctaacacctatgttgataacattcctgc

SEQ ID NO: 13621 - DNA, 75 bp, synthetic construct
  source 1..75: mol_type = other DNA
ctggcttcgaaggtgcagaacacgctgaaagatgacccgttctccgggcatatcttcgtcttccggggccgcagt

SEQ ID NO: 13622 - DNA, 75 bp, synthetic construct
  source 1..75: mol_type = other DNA
ttcgccggagatatggccgggacggcgaattgtgctgacggggcatccgcaggcgaacctgaaccgggaatggca

SEQ ID NO: 13623 - DNA, 75 bp, synthetic construct
  source 1..75: mol_type = other DNA
cagcggcaaaagccagcctgcagaaatacatcgccagtcagacgcggcttggtcgggatattcgccgtagcgcca

SEQ ID NO: 13624 - DNA, 75 bp, synthetic construct
  source 1..75: mol_type = other DNA
ttcaggaaaccagaactggttgacaggcttaatgatattattgccaagcactatcccggagcgttagcgatgtaa

SEQ ID NO: 13625 - DNA, 75 bp, synthetic construct
  source 1..75: mol_type = other DNA
aatcatcaatctcagttatacattcagcaaaagattggcaggaagctatcgatttctcgatggtatcattgctgg

SEQ ID NO: 13626 - DNA, 75 bp, synthetic construct
  source 1..75: mol_type = other DNA
gcagaaacaccacgcggtcattctggtgtcgcctgccgtggtacagggggctccggatatcacccgggaaatcca

SEQ ID NO: 13627 - DNA, 75 bp, synthetic construct
  source 1..75: mol_type = other DNA
gatcgccggagtccaggaagcgcggctgctttctgaaaacttcgaattactggagaaatggaccgaccagcttcc

SEQ ID NO: 13628 - DNA, 75 bp, synthetic construct
  source 1..75: mol_type = other DNA
agatacttagctactttgaaccggataacctcgaatgggtgactggtgagattggtgcgccgccgttcgatgtgt

SEQ ID NO: 13629 - DNA, 75 bp, synthetic construct
  source 1..75: mol_type = other DNA
ggaaaacacttctttaaagctgttggtgatgagctcaaaaatttgcgactagttttaaacgagtcgcaaaatgag

SEQ ID NO: 13630 - DNA, 75 bp, synthetic construct
  source 1..75: mol_type = other DNA
ccagtcggtttatccccgctggcgcggggaactcggacttaaagatcgcatcacagtactggagggcggtttatc

SEQ ID NO: 13631 - DNA, 75 bp, synthetic construct
  source 1..75: mol_type = other DNA
gatggaaagcgatgaagcgttacgcctgcgtgtgcctgcagcctttgaggggctttcagttgcggggccaactgc

SEQ ID NO: 13632 - DNA, 75 bp, synthetic construct
  source 1..75: mol_type = other DNA
cctcagcccgggatgcggcggcctcaaaagaggcagcgaaatcatcagaaacgaacgcatcctcgagcgccagta

SEQ ID NO: 13633 - DNA, 75 bp, synthetic construct
  source 1..75: mol_type = other DNA
aggcggcactgacttaccgttatggtgacgaacatcagcccgtcaccaccgccgacattctgacgccacgacgcc

SEQ ID NO: 13634 - DNA, 75 bp, synthetic construct
  source 1..75: mol_type = other DNA
atggacaaggaattaccgtggctggcggataacgcccaactggaactgaaatataaaaaaggcaaaacgccgctc

SEQ ID NO: 13635 - DNA, 75 bp, synthetic construct
  source 1..75: mol_type = other DNA
tgatgccaagaccagcgtgcagaagctgaccaaggccaccgaagacgcgggctatccgtccagcgtcaagaagtg

SEQ ID NO: 13636 - DNA, 75 bp, synthetic construct
  source 1..75: mol_type = other DNA
gggaagtgcgtgttccacaccggggaaatgtggtggagaaagttattgaaggggcttacgaggtggtgggggttt

SEQ ID NO: 13637 - DNA, 75 bp, synthetic construct
  source 1..75: mol_type = other DNA
gctgaccagctaacaaagaaaacgataactgattatcgcgttgtaatgatgaacgatggtctaaaaccagccagc

SEQ ID NO: 13638 - DNA, 75 bp, synthetic construct
  source 1..75: mol_type = other DNA
agacttcaacgcgttgaaatggaaagggatatattaaaaaaggctaccgcgctcttgatgtcagactccctgaac

SEQ ID NO: 13639 - DNA, 75 bp, synthetic construct
  source 1..75: mol_type = other DNA
atggcagtgattgacctttcgcagttgcctgcaccgcagattgtggatgtgccggactttgagacgctgcttgcc

SEQ ID NO: 13640 - DNA, 75 bp, synthetic construct
  source 1..75: mol_type = other DNA
ccactggccgacatcgtgctcaacagtacgcaggcgtctttctgtaccgaataccgcgtcgtgaccggaggctcg

SEQ ID NO: 13641 - DNA, 75 bp, synthetic construct
  source 1..75: mol_type = other DNA
gtatgcgaaaggactgacctgcgaagccgacaccctcggcagttgtggttacgtttatctggctttttatccaac

SEQ ID NO: 13642 - DNA, 75 bp, synthetic construct
  source 1..75: mol_type = other DNA
tggcattgtccagtacgcttgattccattccgttatccatgcagcgacagttcccggatttaacgccacgtcata

SEQ ID NO: 13643 - DNA, 75 bp, synthetic construct
  source 1..75: mol_type = other DNA
gtggcgagaggaagcctataccctcgatgaactggctgattatctcgatttgagtgcctcagcgcgccgtagcat

SEQ ID NO: 13644 - DNA, 75 bp, synthetic construct
  source 1..75: mol_type = other DNA
aacctgtccggaaggctggcgataaagattattgcagagccaccggataagcgccgccgcgacctggacaatatc

SEQ ID NO: 13645 - DNA, 75 bp, synthetic construct
  source 1..75: mol_type = other DNA
ccagcagcggctgaaattaaacctgtccggaaggctggcgataaagattattgcagagccaccggataagcgccg

SEQ ID NO: 13646 - DNA, 75 bp, synthetic construct
  source 1..75: mol_type = other DNA
taaaaaactgccgattaggggggcgatgattgaccccgatccgtcagtattaaaacctgatccgtcagataaaag

SEQ ID NO: 13647 - DNA, 75 bp, synthetic construct
  source 1..75: mol_type = other DNA
gccgggcagtggcgcttattgttcgccagcagcggctgaaattaagcctgtccggacggctggcaataaaaatta

SEQ ID NO: 13648 - DNA, 75 bp, synthetic construct
  source 1..75: mol_type = other DNA
atatttctattatccccgattacagacaaacctggaaagtggaacataaattatcggatattctactgttgacta

SEQ ID NO: 13649 - DNA, 75 bp, synthetic construct
  source 1..75: mol_type = other DNA
ccactgacgaaaagcgggagttgattaaagcaatgaatcattttcgtgcagtggtgagcttatttcccagacggc

SEQ ID NO: 13650 - DNA, 75 bp, synthetic construct
  source 1..75: mol_type = other DNA
tctctcttgatggctccattcagtcggagggcgatcaggtttcaatcggcattacccaaaaatcaccccgatctc

SEQ ID NO: 13651 - DNA, 75 bp, synthetic construct
  source 1..75: mol_type = other DNA
agtgaaaagagtcacggcagagaagaaatccgtcttcacattgtttgcgatgtccctgatgaacttattgatttc

SEQ ID NO: 13652 - DNA, 75 bp, synthetic construct
  source 1..75: mol_type = other DNA
tcaaactcttcaatttaaaagtttgatgctcaaagaattaaacttcgtaatgaattacgtgttcactcttgagac

SEQ ID NO: 13653 - DNA, 75 bp, synthetic construct
  source 1..75: mol_type = other DNA
gggaaaaattaccgcacaaaccgtactgtacgaacgatttcgcgtacggcgttcgcattctgccgaaaaacattg

SEQ ID NO: 13654 - DNA, 75 bp, synthetic construct
  source 1..75: mol_type = other DNA
aatgccggtattcttctggttccgtgctgccgtggtggttctgcatttttggcgggcgatgaaggtaccttcagc

SEQ ID NO: 13655 - DNA, 75 bp, synthetic construct
  source 1..75: mol_type = other DNA
gatgcgcgatgcgcagttgtggcgtcacatcgaatttcaccccgaatgcaacgcgatttacgcggcgctggactg

SEQ ID NO: 13656 - DNA, 75 bp, synthetic construct
  source 1..75: mol_type = other DNA
acacatctgtaccggatgtgtgatgcgcagttgtggagccacatcgaatttcaccccgaatgcaacgcgatttac

SEQ ID NO: 13657 - DNA, 75 bp, synthetic construct
  source 1..75: mol_type = other DNA
gagctgggaactgccatcgaatggggcggggactggaaaacactgaaagacgggcctcactttcagttgaaacgc

SEQ ID NO: 13658 - DNA, 75 bp, synthetic construct
  source 1..75: mol_type = other DNA
tatcaacggtcgccgcgaaacactggtaatcgggcagtatgggcgtgacggtatcagcctggcagaagcgcgaga

SEQ ID NO: 13659 - DNA, 75 bp, synthetic construct
  source 1..75: mol_type = other DNA
cgtgcgaaaacctccaaccgtagtgaaaacccgctgctgcaggatgtaaacaaaggctggctgcagaaaatccgt

SEQ ID NO: 13660 - DNA, 75 bp, synthetic construct
  source 1..75: mol_type = other DNA
gccgcagtaacaatatccttcgccaggcttccgcttattttgcgaaggcggagttcgaccgcctctggaaaaagt

SEQ ID NO: 13661 - DNA, 75 bp, synthetic construct
  source 1..75: mol_type = other DNA
ggcagcggcaaccgcaccgggagggcggaaggtcaacattaccacgatggccgtcggggatggcggtggtaaatt

SEQ ID NO: 13662 - DNA, 75 bp, synthetic construct
  source 1..75: mol_type = other DNA
gctgggtatctgcgatgggtaacagcggcacacaatttgtgaaacaggctgtcacgttctttggtccggatcgtc

SEQ ID NO: 13663 - DNA, 75 bp, synthetic construct
  source 1..75: mol_type = other DNA
gtagactattatttaatagtgttatactgaacatcactgactgggtttttactcttggaataatctactacagaa

SEQ ID NO: 13664 - DNA, 75 bp, synthetic construct
  source 1..75: mol_type = other DNA
acaccgtcggtgcggttctcacgccgttgccggttccggcctttacgctgattgcgggcgatcgcagtgtctctg

SEQ ID NO: 13665 - DNA, 75 bp, synthetic construct
  source 1..75: mol_type = other DNA
gtattgaagttcgtcgtgatgcttatggacgttacagcctgaacgatctgcatcgcgcagcagtagcatctggtg

SEQ ID NO: 13666 - DNA, 75 bp, synthetic construct
  source 1..75: mol_type = other DNA
gtcagctgtcgcacgaaacgccagaggcgtatacctgcatttgcgtgaaatccatcaaatctggacaagccagct

SEQ ID NO: 13667 - DNA, 75 bp, synthetic construct
  source 1..75: mol_type = other DNA
atgaacgtaattaaaacagagattccagacgtattaattttcgaaccgaaagtttttggtgatgagcgtggtttc

SEQ ID NO: 13668 - DNA, 75 bp, synthetic construct
  source 1..75: mol_type = other DNA
gaaagcgcggcacgggctcactggctgatgcactgaaatcagcgccgtcactcagtgctttcacgtttgacggtc

SEQ ID NO: 13669 - DNA, 75 bp, synthetic construct
  source 1..75: mol_type = other DNA
aatacacgcggcggggcagtgatctcgatacgtactggtacctcaatgatgatggttctgaatttgctttccgta

SEQ ID NO: 13670 - DNA, 75 bp, synthetic construct
  source 1..75: mol_type = other DNA
atcaatgactggcttggcgaagaggtgatccgttttaactcttatgctcttcttgatgaaaaaacagccccgtga

SEQ ID NO: 13671 - DNA, 75 bp, synthetic construct
  source 1..75: mol_type = other DNA
ccacagctttttcaggctttgacggagcggctttccggcgaggtggcgcagcatacattgcgtctgccaccgcag

SEQ ID NO: 13672 - DNA, 75 bp, synthetic construct
  source 1..75: mol_type = other DNA
agacagagcttaagtcccggggaataaagcgtgcccgtgcgcgtcgtgatgcggacagggaacgtcaggatattg

SEQ ID NO: 13673 - DNA, 75 bp, synthetic construct
  source 1..75: mol_type = other DNA
atgaaagcgtattgggactctttaaccaaagaacagcagggcgagttggccggaaaagttggctcaacacctggc

SEQ ID NO: 13674 - DNA, 75 bp, synthetic construct
  source 1..75: mol_type = other DNA
tcgtgacttgcgctctggcaaacaagctggccagaatagcctgggcactaacaacacggcagcaaacttacgaag

SEQ ID NO: 13675 - DNA, 75 bp, synthetic construct
  source 1..75: mol_type = other DNA
caccaccgttaacaacccttacctgcatacgttgcagcaccgcacatatcacggaaacggacaacgcctggctgt

SEQ ID NO: 13676 - DNA, 75 bp, synthetic construct
  source 1..75: mol_type = other DNA
atgctaacttgctttaaagcttatgatattcgcgggaaactaggcgaagaactgaatgaagatatcgcctggcgc

SEQ ID NO: 13677 - DNA, 75 bp, synthetic construct
  source 1..75: mol_type = other DNA
atctgcagcaatcgatctgcgttgcgtaaacatggttgccgatctgtggcatgcgcctgcaccgaaaaatggtca

SEQ ID NO: 13678 - DNA, 75 bp, synthetic construct
  source 1..75: mol_type = other DNA
ctggcaggcaagatggcgctgtatgctgacgttgagccaacggagtccctggtggaactggtgaaaaaaggccag

SEQ ID NO: 13679 - DNA, 75 bp, synthetic construct
  source 1..75: mol_type = other DNA
atgggcagcctttacggcaaagcatgggatattctggtggtggttccgggttcggtgggcaaatggcagaatggc

SEQ ID NO: 13680 - DNA, 75 bp, synthetic construct
  source 1..75: mol_type = other DNA
atgagtcgtggcggtattttatgggaaaacgaaaatttgtggccagtcgcctggcgtcacagatgtttgcctgct

SEQ ID NO: 13681 - DNA, 75 bp, synthetic construct
  source 1..75: mol_type = other DNA
cacgtttgataactgggagggctggaatgagcaacaggtacagtttttactggaaagtaatcccagacggaacag

SEQ ID NO: 13682 - DNA, 75 bp, synthetic construct
  source 1..75: mol_type = other DNA
gcgattatacggtcatggtcaaaggcaccgtcctggcaagcgggccgacagacaccacttttacagccgagaacc

SEQ ID NO: 13683 - DNA, 75 bp, synthetic construct
  source 1..75: mol_type = other DNA
atctggaagaacggcgactgatgctacagtggtgggccgattttctggatgcaaacagagaaagatttatcagtc

SEQ ID NO: 13684 - DNA, 75 bp, synthetic construct
  source 1..75: mol_type = other DNA
gtgcgctcttcgccggcgggctggccgccattcttgcatcgacctgctgcctggggccgctagtactggtcgccc

SEQ ID NO: 13685 - DNA, 75 bp, synthetic construct
  source 1..75: mol_type = other DNA
ggcccgtaaagacgggtggcgaataagtaaagacaaaacacgtgcttttgcgcccgggcataaagttttgaggat

SEQ ID NO: 13686 - DNA, 75 bp, synthetic construct
  source 1..75: mol_type = other DNA
tgattgagtatgaacccgaaaccagtgcactcacggtaagcggaattaaaacggccagcgtgacggcttctgatt

SEQ ID NO: 13687 - DNA, 75 bp, synthetic construct
  source 1..75: mol_type = other DNA
cttgtgtgaagacggtttttatattttcgatagagaatttctaccgtcggcattcaagaatctttttgtaatcac

SEQ ID NO: 13688 - DNA, 75 bp, synthetic construct
  source 1..75: mol_type = other DNA
gcagctgcagagcgccattgtgaaggcgatttatgtctatcatctcaccgtagttgcccgcatcgttcgccaact

SEQ ID NO: 13689 - DNA, 75 bp, synthetic construct
  source 1..75: mol_type = other DNA
ggtcagtgcctgaccctgcccgcggcgaccttttgcccgccgaagggcgaaatgttgacgagaacaactactggc

SEQ ID NO: 13690 - DNA, 75 bp, synthetic construct
  source 1..75: mol_type = other DNA
aaagccaggaagagcgagacaaggtgaacgtagaccttgccgccagcggcgttgcttacaaagaacggctgaata

SEQ ID NO: 13691 - DNA, 75 bp, synthetic construct
  source 1..75: mol_type = other DNA
tgactcgtcatcctgaaaagccggaataccacgtggtgctgtgcgtcagacaggagtatttcgatggctctgaac

SEQ ID NO: 13692 - DNA, 75 bp, synthetic construct
  source 1..75: mol_type = other DNA
ccggaaagcagcggcagctatggcttcgtccgtctggagggtgacctgctcagaacagaggttgccggtatgtct

SEQ ID NO: 13693 - DNA, 75 bp, synthetic construct
  source 1..75: mol_type = other DNA
gagtcatgggaacgctacagcgttctggtcagccgtgtggatcctgcaaatcctgaatggccggaaatgccgcaa

SEQ ID NO: 13694 - DNA, 75 bp, synthetic construct
  source 1..75: mol_type = other DNA
gttcgacaaccccaccacggatatccgtaaggacagatgcagcaagtgcatgcgcgggtgtgaactgcgcaggaa

SEQ ID NO: 13695 - DNA, 75 bp, synthetic construct
  source 1..75: mol_type = other DNA
ttgtcgccatcaccaaagatgcctccacgcttaaccctgaaggttatagcgtcgttgaggttcctgatattacag

SEQ ID NO: 13696 - DNA, 75 bp, synthetic construct
  source 1..75: mol_type = other DNA
aataattgagccagttactgaattgtataacgacgtggtatgggcgtcattcaacacactgcacaataaaattaa

SEQ ID NO: 13697 - DNA, 75 bp, synthetic construct
  source 1..75: mol_type = other DNA
atggcgataaaagggcttgatcaggcgattgaaaatctgagccgggttcgtaaaaacgccattccggcggcttca

SEQ ID NO: 13698 - DNA, 75 bp, synthetic construct
  source 1..75: mol_type = other DNA
acttacccctgtctggatccctgacctgactcatgaagctatgcgggatctaatcagagcccgtgcagcagctaa

SEQ ID NO: 13699 - DNA, 75 bp, synthetic construct
  source 1..75: mol_type = other DNA
gtggtctctgtgcaatctggtctgccagttgcaggctcttaaaggtgttggtcagctaattgcaataactctggt

SEQ ID NO: 13700 - DNA, 75 bp, synthetic construct
  source 1..75: mol_type = other DNA
ggcatacagggtacacctggtctgtttcccacatcatccttttctgccctgttccagattttcccggagtttcat

SEQ ID NO: 13701 - DNA, 75 bp, synthetic construct
  source 1..75: mol_type = other DNA
ttacggacgcgctggggctgattacgtccttcagttatgccaatgctgaggatgagcaaaaaacgcactacagcg

SEQ ID NO: 13702 - DNA, 75 bp, synthetic construct
  source 1..75: mol_type = other DNA
atgcttattggctatgtacgtgtgtcaacaaatgaccagaacacagatctacaacgtaatgcgctgaactgtgca

SEQ ID NO: 13703 - DNA, 75 bp, synthetic construct
  source 1..75: mol_type = other DNA
cgataaatatgaggcagtatacggtggctacaaaggcaaggaagcacagaaaattttctttgtaccgttcctgac

SEQ ID NO: 13704 - DNA, 75 bp, synthetic construct
  source 1..75: mol_type = other DNA
taattcggtcaatgaaagtggtgaccggatcgtacgtgcactggctgcgggtatgggcgtggcccgtaaagatct

SEQ ID NO: 13705 - DNA, 75 bp, synthetic construct
  source 1..75: mol_type = other DNA
actaacgcgccggcagaagatccggatattccggcatcaggatattacggtgcggcatcgagaacgaatggaaac

SEQ ID NO: 13706 - DNA, 75 bp, synthetic construct
  source 1..75: mol_type = other DNA
ccacgcacagcaacctgcgctgtttacagccatgctgacacagtttcgtgctgacctctccgtgtttaacgcgca

SEQ ID NO: 13707 - DNA, 75 bp, synthetic construct
  source 1..75: mol_type = other DNA
tgggaaatggcatggcagataacgtcgttctggaaaatggcggtcgcctggatgtactggaaggccattcagcgc

SEQ ID NO: 13708 - DNA, 75 bp, synthetic construct
  source 1..75: mol_type = other DNA
atacccgctggcatgaagattccgtgcgtaaccgctggttcagcgtgatggtggggccgtctgtgcgcgtgaatg

SEQ ID NO: 13709 - DNA, 75 bp, synthetic construct
  source 1..75: mol_type = other DNA
aaagccaggaagaaaggaataaagttaacgttgacctggctgccaggggggttgcctacaaagagcgattgaaca

SEQ ID NO: 13710 - DNA, 75 bp, synthetic construct
  source 1..75: mol_type = other DNA
aatccgtggccattgatattgcttatgaaggctccggcagtggcgactggcgcactgacggtttcatcgtgggtg

SEQ ID NO: 13711 - DNA, 75 bp, synthetic construct
  source 1..75: mol_type = other DNA
gattacattgacgcggtgacggcaacagataccagcaccgcgccggatgttatctggcctgaactgccggagact

SEQ ID NO: 13712 - DNA, 75 bp, synthetic construct
  source 1..75: mol_type = other DNA
cgccttgatggcagcaatacctctgaccagctggtgattaatggtggtcaggcaaccggcaaaacctggcttgcg

SEQ ID NO: 13713 - DNA, 75 bp, synthetic construct
  source 1..75: mol_type = other DNA
agtttattgccacgaaggcggggaatattactgtctataattatgatggtgaaacacgggaatatatttccatat

SEQ ID NO: 13714 - DNA, 75 bp, synthetic construct
  source 1..75: mol_type = other DNA
cgttatcaatgacgatgacagcgccgatctcctgtttacgctccccctgcgggaacgcgttcgcatcacgcgcaa

SEQ ID NO: 13715 - DNA, 75 bp, synthetic construct
  source 1..75: mol_type = other DNA
gcaagcccttgctgctctacctagacaacgcggccgagttcaagagcgaggccctgcgccggggttgcgagcagc

SEQ ID NO: 13716 - DNA, 75 bp, synthetic construct
  source 1..75: mol_type = other DNA
ctggtactccgttccacacgaactggtcggtcagcgtctgtcactgaaggtggggcagtcggtggtacagctctg

SEQ ID NO: 13717 - DNA, 75 bp, synthetic construct
  source 1..75: mol_type = other DNA
gtgtctggcctcagtatggccgtgtggaaattcgtggtgtgcttaaaacctggattggtgattcaaaacctttca

SEQ ID NO: 13718 - DNA, 75 bp, synthetic construct
  source 1..75: mol_type = other DNA
gcccgacagggtgtcgaactgagccgtgcattactctccaactgggttgacgcgtgctgccagttaatgacgccg

SEQ ID NO: 13719 - DNA, 75 bp, synthetic construct
  source 1..75: mol_type = other DNA
tttcactgcaatattatagcgataatccagtgaatgaaatcatattcacgccgtcaggcatgtttttagctgtaa

SEQ ID NO: 13720 - DNA, 75 bp, synthetic construct
  source 1..75: mol_type = other DNA
cccatcttgcggggttcagtggtgtactgcaggcggatgcatacgccgggttcaacgagctgtaccgggatggcc

SEQ ID NO: 13721 - DNA, 75 bp, synthetic construct
  source 1..75: mol_type = other DNA
gaacgaaaaaggtgagtctgtcacctggcagagtcggcagtatcaggcctatcccattcaggggagtggatttga

SEQ ID NO: 13722 - DNA, 75 bp, synthetic construct
  source 1..75: mol_type = other DNA
aggccgatatttgtgaatcgcttcacgaccacgccgatgagctttaccgcagctgcctcgcacgtttcggggatg

SEQ ID NO: 13723 - DNA, 75 bp, synthetic construct
  source 1..75: mol_type = other DNA
ctgatactacagccccatcgtcaccagcactgaaggcagaggatgacggttctgtttctgttgagctgccgggtg

SEQ ID NO: 13724 - DNA, 75 bp, synthetic construct
  source 1..75: mol_type = other DNA
atgtaacaccaccgctcaacatttatggtgtccccctgccgtttaccatgatttacctgctgttgtttccgtatc

SEQ ID NO: 13725 - DNA, 75 bp, synthetic construct
  source 1..75: mol_type = other DNA
aaaaggtatccaccctcagacccatcttgcaggcttcagtggcgtactgcaggctgatgcctacgccgggttcaa

SEQ ID NO: 13726 - DNA, 75 bp, synthetic construct
  source 1..75: mol_type = other DNA
tggcaggggcggcaatatcaggcatacccgattgacggcagcggttttgagatgagcgggaagggcagcagtgcc

SEQ ID NO: 13727 - DNA, 75 bp, synthetic construct
  source 1..75: mol_type = other DNA
cggcaaactccatgccgatgataccccggtccaggtactgctgccgggtaataagaagacgaagaccgggcggtt

SEQ ID NO: 13728 - DNA, 75 bp, synthetic construct
  source 1..75: mol_type = other DNA
gaggcgtccctgcgctggctgacggagatgacaacgtcacttgccaccacaaactacgcgattacccgggtaaac

SEQ ID NO: 13729 - DNA, 75 bp, synthetic construct
  source 1..75: mol_type = other DNA
gctggcgcattgtactgatgcagaggcgttatgtattgatcgagtcataagtgaggtgctggcagagcatccagg

SEQ ID NO: 13730 - DNA, 75 bp, synthetic construct
  source 1..75: mol_type = other DNA
gtgtgtcagaacagacgatcccacagtgtttccagcaggcggataatgcggtcccgggctttacgcagaagctgt

SEQ ID NO: 13731 - DNA, 75 bp, synthetic construct
  source 1..75: mol_type = other DNA
ggttgagagataccaattccggcatggaatgtgatggtgttcgctggatttacaacacaacggaacaatggctgg

SEQ ID NO: 13732 - DNA, 75 bp, synthetic construct
  source 1..75: mol_type = other DNA
tggcgtcaccgccactggcacgcatctgccttcacggggatttgcaacgatttggccgccgcctcagcctgtatg

SEQ ID NO: 13733 - DNA, 75 bp, synthetic construct
  source 1..75: mol_type = other DNA
gttttggctggtgatgacttacttgtcgcgcttttatgtctgagcactggaggaagatggacggaagttgccacg

SEQ ID NO: 13734 - DNA, 75 bp, synthetic construct
  source 1..75: mol_type = other DNA
tatgcgcaccttgcgcctgactacctgcaaaatgccgtcgctctgaatccactaaaaggcggagtgacgttataa

SEQ ID NO: 13735 - DNA, 75 bp, synthetic construct
  source 1..75: mol_type = other DNA
cggcttgctgaacgtcagcgaaaaacgaaaccgctgttgaaatccctggaaagctggttgcgtgaaaagatgaag

SEQ ID NO: 13736 - DNA, 75 bp, synthetic construct
  source 1..75: mol_type = other DNA
acatgtgaaaagcgaattgctaattggttggctgttgctgagtatgcgctatacattcccatgcgagaatcactt

SEQ ID NO: 13737 - DNA, 75 bp, synthetic construct
  source 1..75: mol_type = other DNA
ggttgaaaatggcagagtttatgctctatctgccgatgcgtgatgcattctcttccggggatctaaaaaccgtct

SEQ ID NO: 13738 - DNA, 75 bp, synthetic construct
  source 1..75: mol_type = other DNA
ccgcatgcaggatggccgtaacaggcatcgtcccggctacgacctgaccttttccgctcccaaaagtgtctccat

SEQ ID NO: 13739 - DNA, 75 bp, synthetic construct
  source 1..75: mol_type = other DNA
ttcccgttttgatttcgccattcatgtggcgcatgcccgttcgcgtggtctgcgtcgacgcatgccaccggtgct

SEQ ID NO: 13740 - DNA, 75 bp, synthetic construct
  source 1..75: mol_type = other DNA
ggtacaggcactgggcctggtggatatccgggtgccggaccatctgatagtcggtggcagccaggttttctcctt

SEQ ID NO: 13741 - DNA, 75 bp, synthetic construct
  source 1..75: mol_type = other DNA
cagcagaatacagggagtcagtccccggtgatatattatttgattttgattcatggactctgacagagagggggc

SEQ ID NO: 13742 - DNA, 75 bp, synthetic construct
  source 1..75: mol_type = other DNA
tattcgtaacttcacaacaaaaacatgcattaccgactgcatgattaaagttttcatcgggcgcgatggcttacc

SEQ ID NO: 13743 - DNA, 75 bp, synthetic construct
  source 1..75: mol_type = other DNA
tcagtgaagaaacacaaaatgacagctgtgagaaaatactggcgccgacagagtggaaattgctgtgggttaagc

SEQ ID NO: 13744 - DNA, 75 bp, synthetic construct
  source 1..75: mol_type = other DNA
gaaaaacggtgctgaaatttataaccgtaccgcgctggataatacgctgatttacagtggtgttattgatatgcc

SEQ ID NO: 13745 - DNA, 75 bp, synthetic construct
  source 1..75: mol_type = other DNA
gccatatcctgagcgtactgccggaatggccttccaaccgagttgacgaactcctgccatggaacgtagtactca

SEQ ID NO: 13746 - DNA, 75 bp, synthetic construct
  source 1..75: mol_type = other DNA
gacgcggggcttcccggatgacatcccggatgaacaggagaatgacctggggagccgggatattccgtcctggcg

SEQ ID NO: 13747 - DNA, 75 bp, synthetic construct
  source 1..75: mol_type = other DNA
ccccgtatcttcggctggatggaccgtctgtgtgaagactactgcggtggtatctggaatctgtacaccctgaac

SEQ ID NO: 13748 - DNA, 75 bp, synthetic construct
  source 1..75: mol_type = other DNA
ggcgtatgaacataatctgtcgcgagtgccggaagagcgaagttatgcagcgtgtattggcgttctatcagggat

SEQ ID NO: 13749 - DNA, 75 bp, synthetic construct
  source 1..75: mol_type = other DNA
tttcgtgtttaaccctcaagtggttagaaaaagcgaacaggtaggttttgtctacaaagtcgattctgtaggtga

SEQ ID NO: 13750 - DNA, 75 bp, synthetic construct
  source 1..75: mol_type = other DNA
gatatccgggtaccggaccatctgatagtcggtggcagccaggttttctcctttgccgaacacggtctgctttaa

SEQ ID NO: 13751 - DNA, 75 bp, synthetic construct
  source 1..75: mol_type = other DNA
gccagacggctgcaaaagcaagtgaagacgcagccagagagtatgcaagccaggctgcggagccgtataaacaag

SEQ ID NO: 13752 - DNA, 75 bp, synthetic construct
  source 1..75: mol_type = other DNA
taatcctccggcattttccctgacaccggacgggcggctgacggcgaaaaatgccgatatcagcggtaacgtgaa

SEQ ID NO: 13753 - DNA, 75 bp, synthetic construct
  source 1..75: mol_type = other DNA
atagatacgacgacagaagacactggaaggttcaggatctgatcagagaggagcttggtaaggatgagcaatccg

SEQ ID NO: 13754 - DNA, 75 bp, synthetic construct
  source 1..75: mol_type = other DNA
tgcgcttagtctggggctgaatcattaccgtgataacgccattacctacaaagcccagcgcgacaaaaatgtcag

SEQ ID NO: 13755 - DNA, 75 bp, synthetic construct
  source 1..75: mol_type = other DNA
catttataccggtgcttattatctggcaatagcctttaaaaaatggggcgtctcctgggaggccgttggtgcata

SEQ ID NO: 13756 - DNA, 75 bp, synthetic construct
  source 1..75: mol_type = other DNA
caatgccggattcaggaagaccgaacgccagaaccagagacgtcttgcctacgcatcagatgtttaccggattta

SEQ ID NO: 13757 - DNA, 75 bp, synthetic construct
  source 1..75: mol_type = other DNA
tgcgcgaaggacttgaagccgcgctgattgtcagtttgattgccagctatcttaagcgtacccagcgaggccgat

SEQ ID NO: 13758 - DNA, 75 bp, synthetic construct
  source 1..75: mol_type = other DNA
gcatggctggtaaatgactggtatcccacagcaagtatcagcgatttgctggttgtggtgatgaagaaagccacc

SEQ ID NO: 13759 - DNA, 75 bp, synthetic construct
  source 1..75: mol_type = other DNA
tgcgctgtggctggcaacaaaccattaccgtgacaacgcgctcacctacaaagcgcagcgcgataaaaaagccag

SEQ ID NO: 13760 - DNA, 75 bp, synthetic construct
  source 1..75: mol_type = other DNA
ggtgccggaccctctccttcagtccgaacaaaccccggcactacgaacgttacctgcagcgtatgaaagaaagga

SEQ ID NO: 13761 - DNA, 75 bp, synthetic construct
  source 1..75: mol_type = other DNA
acaacggctggcagatgcgttatcacctgcgtattgagccgccgttatggcggtgcgggctgcggcggaacttcc

SEQ ID NO: 13762 - DNA, 75 bp, synthetic construct
  source 1..75: mol_type = other DNA
gagcagatgcaaaaccagatggacccggtgtacacgccggcgcgaaaaatccacctgtaccactgcgaccatcgc

SEQ ID NO: 13763 - DNA, 75 bp, synthetic construct
  source 1..75: mol_type = other DNA
gatgaatggggcaacctgctgaatgaagagaacccgcatcagctgcagcagcttatccgcctgccggggcagcag

SEQ ID NO: 13764 - DNA, 75 bp, synthetic construct
  source 1..75: mol_type = other DNA
ggcacgataaacaaggccatctttcacattatatggtgctgatccagcgcagtggtttaagcaaactgctggagc

SEQ ID NO: 13765 - DNA, 75 bp, synthetic construct
  source 1..75: mol_type = other DNA
gttcaacgtctcgccgatttttttgcaggaatacagcaacagcacctacagcaatttcagcgaggcaagccgcgc

SEQ ID NO: 13766 - DNA, 75 bp, synthetic construct
  source 1..75: mol_type = other DNA
gtggaggcatccggtgccagcctggagaaggggcggcacgatcagttgcttaccgcacttcgcgcgctgctgtta

SEQ ID NO: 13767 - DNA, 75 bp, synthetic construct
  source 1..75: mol_type = other DNA
tgttgaacgaaataatttatatgtgacaggatttgttaacaggacaaataatgttttttatcgctttgctgattt

SEQ ID NO: 13768 - DNA, 75 bp, synthetic construct
  source 1..75: mol_type = other DNA
aaacgcccacgggagaaccgctgggcggcgcaaccattacactgacctccctgcacaaccgtgcagggattctga

SEQ ID NO: 13769 - DNA, 75 bp, synthetic construct
  source 1..75: mol_type = other DNA
tccgtaaacagcgcgccacgtctttatcttcccctgccggtccccgttctgcttcctcttcttctgctttccccg

SEQ ID NO: 13770 - DNA, 75 bp, synthetic construct
  source 1..75: mol_type = other DNA
aataatgcacaggtagctttgttaaatacacagttaagcgagtttgccccaaccatgccccataacgaagcaatg

SEQ ID NO: 13771 - DNA, 75 bp, synthetic construct
  source 1..75: mol_type = other DNA
aaaaatcacataaattctgggcggttgagcagcagggaaacgagctgcatatcaactggggcaaagtcggcacta

SEQ ID NO: 13772 - DNA, 75 bp, synthetic construct
  source 1..75: mol_type = other DNA
atgccgataaatctgacatcttatttgtgggtacagggacagaaagttgtcccggcagttgtgttttctaatttt

SEQ ID NO: 13773 - DNA, 75 bp, synthetic construct
  source 1..75: mol_type = other DNA
tgccacattctggctgtacgaaagagtacactgttgccaatcgacacaattatccggcatcaagtaagcgatatc

SEQ ID NO: 13774 - DNA, 75 bp, synthetic construct
  source 1..75: mol_type = other DNA
ttgacgcgtgctgccagttaatgacaccggtgaatgatgccctgtaccgttatgtaatgaatacccgcaaggttc

SEQ ID NO: 13775 - DNA, 75 bp, synthetic construct
  source 1..75: mol_type = other DNA
gtgaaatcacaaaaaccataagcatatcctgtacgtataagagtggctcaccctggataaaggtcacaggtaatg

SEQ ID NO: 13776 - DNA, 75 bp, synthetic construct
  source 1..75: mol_type = other DNA
cttcacgactggagagctttctgaatgatgattgctttgtctggtacgatatcccggtgggacggaaaaaccgac

SEQ ID NO: 13777 - DNA, 75 bp, synthetic construct
  source 1..75: mol_type = other DNA
ctgtcgaaaaaatccagactgggcgaagcgttcagctatgtactgaatcagtgggatgccctctgttattacagt

SEQ ID NO: 13778 - DNA, 75 bp, synthetic construct
  source 1..75: mol_type = other DNA
tgcagtctgtctcggaaagaaaaactcttatgacctttgtcaaatattaagcccaaaaagacctacgcagctccg

SEQ ID NO: 13779 - DNA, 75 bp, synthetic construct
  source 1..75: mol_type = other DNA
accggcaaataccgctggcacggcagcactgaaacgtataccggtcgtgaagtgcaggatattcccggtgtgctg

SEQ ID NO: 13780 - DNA, 75 bp, synthetic construct
  source 1..75: mol_type = other DNA
gaactggcgggtaagttcggtgtcagtactcgcaaggttgcttccacgctggcggtggtaaccgcaacggggcgg

SEQ ID NO: 13781 - DNA, 75 bp, synthetic construct
  source 1..75: mol_type = other DNA
gcagctgggcatgagtaatcaggatgctgaatggctggcctcccgtcgcttcaccattgaagacatcgcccgaat

SEQ ID NO: 13782 - DNA, 75 bp, synthetic construct
  source 1..75: mol_type = other DNA
aaaaatcggtgacagagctgttgctttcattgaaagcgaagttgatgagtggatttataaagctataactgcttc

SEQ ID NO: 13783 - DNA, 75 bp, synthetic construct
  source 1..75: mol_type = other DNA
tgaaagatgacggcggcgcggatatcaaaggttccgtggacgttcaggggcgcgaaggcagcatcgaagtggtgg

SEQ ID NO: 13784 - DNA, 75 bp, synthetic construct
  source 1..75: mol_type = other DNA
gggaaatcagttagaggtgataccggcggaccggacctggcgtccacgggtgcagagcaaaccgaaggtggacgg

SEQ ID NO: 13785 - DNA, 75 bp, synthetic construct
  source 1..75: mol_type = other DNA
gatgtgcgggttatccgcaatctgattacggaaagtgaagtggcggtgaaggacaacactaaattccgcttcgtg

SEQ ID NO: 13786 - DNA, 75 bp, synthetic construct
  source 1..75: mol_type = other DNA
tcgccgactggcagcactcaacatgctggcagagcgcaacatccttccggctgactggcctgtccgcgtgaaggt

SEQ ID NO: 13787 - DNA, 75 bp, synthetic construct
  source 1..75: mol_type = other DNA
taaaggtgacatcatcattgatggtggtaataccttcttccaggacaccattcgtcgtaaccgtgagctttctgc

SEQ ID NO: 13788 - DNA, 75 bp, synthetic construct
  source 1..75: mol_type = other DNA
cgcatggcgcgttacactgagcctcccggaaaattacgccacccagatgtggaacatcccgttcccggagcttga

SEQ ID NO: 13789 - DNA, 75 bp, synthetic construct
  source 1..75: mol_type = other DNA
gatggtaaaaaatacacgtatgatgaagttagcaaccaatctattcttacgactcatattgagtatcaatatacg

SEQ ID NO: 13790 - DNA, 75 bp, synthetic construct
  source 1..75: mol_type = other DNA
aggcctgtggtacggggatttattgcagagcggtatgtacaaagtctgtttacaggtaccagccagatttgctcc

SEQ ID NO: 13791 - DNA, 75 bp, synthetic construct
  source 1..75: mol_type = other DNA
cgtaccatctggaccaggcctttccgctgctgatgaaacaactggaactcatactcaccagcggtgaactgaatc

SEQ ID NO: 13792 - DNA, 75 bp, synthetic construct
  source 1..75: mol_type = other DNA
atgaaagataacatcgtggattttcaacgtatcaggagagacctgggcgctcattcaacagatgttgcaaatgat

SEQ ID NO: 13793 - DNA, 75 bp, synthetic construct
  source 1..75: mol_type = other DNA
ggtgtgggtaaaccgttatatcaggacctgattgcgcgcactaaagctgcattacagaagaacccgaaaaatgtg

SEQ ID NO: 13794 - DNA, 75 bp, synthetic construct
  source 1..75: mol_type = other DNA
cagtgttcgtccgttatcatacggctttatttcgcaggatgacctggcaaaacagttcctgaacgtttctgaaga

SEQ ID NO: 13795 - DNA, 75 bp, synthetic construct
  source 1..75: mol_type = other DNA
cactgaccagcgctgcgccgtcagggaaggaaggtaccgcattcatggcgctgatggcagagcactttcgccttg

SEQ ID NO: 13796 - DNA, 75 bp, synthetic construct
  source 1..75: mol_type = other DNA
caggaaaacagtgaaaaactggctgccgatatgatcatcagccagaaacgcatgggtggcctgcaggccgtgcgt

SEQ ID NO: 13797 - DNA, 75 bp, synthetic construct
  source 1..75: mol_type = other DNA
caaaactgtgtggtataccttcaagccagtcatcccgcaggctgcgtgagcgcatcagcccttccctgaaacgca

SEQ ID NO: 13798 - DNA, 75 bp, synthetic construct
  source 1..75: mol_type = other DNA
ccgggctgctgatgctggcggtcagttaccgactgtaccgggcggaagacagagcggaacgtctggcgctgcttg

SEQ ID NO: 13799 - DNA, 75 bp, synthetic construct
  source 1..75: mol_type = other DNA
gtgctggctacaccgaccgagacggacggggcgctgtttcccggtcgcatcatgctggcgaacacctgtatgtgg

SEQ ID NO: 13800 - DNA, 75 bp, synthetic construct
  source 1..75: mol_type = other DNA
cattccgcaggagctggcgactgccgcatcgatgaccgagaacggtcatcgtcgggatatgcaccctgccgaaca

SEQ ID NO: 13801 - DNA, 75 bp, synthetic construct
  source 1..75: mol_type = other DNA
atgaacctttccctgacgccggaggccgacggcattaacgtacaggcgatgaacatggggcgcattgtcgttgac

SEQ ID NO: 13802 - DNA, 75 bp, synthetic construct
  source 1..75: mol_type = other DNA
actggctgcggatatccgggataacgaaggtcgtatcttcgcccgccagggggaggtgatgaacccgctgcagta

SEQ ID NO: 13803 - DNA, 75 bp, synthetic construct
  source 1..75: mol_type = other DNA
aagatttccttgtttcgctgggattcgatatcgatcaggctggcgctaataagtttgaagccgtgctgaaaggcg

SEQ ID NO: 13804 - DNA, 75 bp, synthetic construct
  source 1..75: mol_type = other DNA
ggaataacaccgtggcggatgatgtgacggcaggtgaggatatggctgtcgaacgtggcgtaaaactgacccgac

SEQ ID NO: 13805 - DNA, 75 bp, synthetic construct
  source 1..75: mol_type = other DNA
ggtggaaatcggacaggcgccggaaatggtcaaaaaagccgttcactccatagcagagcgtgatgtgtccgtttt

SEQ ID NO: 13806 - DNA, 75 bp, synthetic construct
  source 1..75: mol_type = other DNA
tattccgcaggagctggcgacggctgcatcaatgactgaaaacggtcatcgtcgggatatgcaccctgccgaaca

SEQ ID NO: 13807 - DNA, 75 bp, synthetic construct
  source 1..75: mol_type = other DNA
tgacagaaactgatcacgagaatcccacagctgaaacgctcatggctgcccggcatacaccggaaaaagatatcc

SEQ ID NO: 13808 - DNA, 75 bp, synthetic construct
  source 1..75: mol_type = other DNA
gattatccggacagaagggggtgttttttttctcaaagaataaaggacataagcttttgccggcagagttgccgg

SEQ ID NO: 13809 - DNA, 75 bp, synthetic construct
  source 1..75: mol_type = other DNA
ttgcgacggaggcaatccgctggcctgaaagtgtggatgaacacaaaaaggccaacgcctttaccggcagtgccc

SEQ ID NO: 13810 - DNA, 75 bp, synthetic construct
  source 1..75: mol_type = other DNA
gacgtattactggaaaaacacctacggcacgcagtacgacaccatttacggggcgtacaaaaacagggagagcga

SEQ ID NO: 13811 - DNA, 75 bp, synthetic construct
  source 1..75: mol_type = other DNA
gtgtggcgtttgtcgttcgctggctgctgtgggtcgtcaggtttgtggttatctggccgctggcaacaatggccc

SEQ ID NO: 13812 - DNA, 75 bp, synthetic construct
  source 1..75: mol_type = other DNA
atctcagccaggccccgcaagaagggtgtgtgctgactattggtaatttcgacggcgtgcatcgcggtcatcgcg

SEQ ID NO: 13813 - DNA, 75 bp, synthetic construct
  source 1..75: mol_type = other DNA
catcgtttcagtggtctgccgctcggggaatacaccctgacagtcagggcaattaacagttatggccagcagggg

SEQ ID NO: 13814 - DNA, 75 bp, synthetic construct
  source 1..75: mol_type = other DNA
tggtgggtaaatggctggtatcccacagcaagtatcagcgatttgctggttgttgtgatgaagaaagccactgca

SEQ ID NO: 13815 - DNA, 75 bp, synthetic construct
  source 1..75: mol_type = other DNA
tggtgatcaaatgcaacaactctccttactcttccatgaatcaagccaagttctaccattctccaaaagagagac

SEQ ID NO: 13816 - DNA, 75 bp, synthetic construct
  source 1..75: mol_type = other DNA
ccgattaccgaaagttataccgacgaattaaacgactttgatcttcgtcgtcttgaagcactgcatctggcttaa

SEQ ID NO: 13817 - DNA, 75 bp, synthetic construct
  source 1..75: mol_type = other DNA
aaaaagcgtgctgctgaacagtacgccagtgctggacagtgaggggaataccaatatctccggcgtcacggtggt

SEQ ID NO: 13818 - DNA, 75 bp, synthetic construct
  source 1..75: mol_type = other DNA
gtctcaggggctgcggcacacacccggtgacatcattgaaatctgtgataacgactatgccgggaccctgaccgg

SEQ ID NO: 13819 - DNA, 75 bp, synthetic construct
  source 1..75: mol_type = other DNA
aggctgagaaagtacgggatgcggattgcgacggcttctgtggacgtgtatgacaacataaccggaacaactcgt

SEQ ID NO: 13820 - DNA, 75 bp, synthetic construct
  source 1..75: mol_type = other DNA
gatgacgaactggcctacgctctctggcctggtgatgtggatgccggaaacattgacggcagcatccatcgctgg

SEQ ID NO: 13821 - DNA, 75 bp, synthetic construct
  source 1..75: mol_type = other DNA
gcagccggttctgcgacttcagcagctggatcagcaactgctgcggctaacagccagaaagctgcgaagacgagt

SEQ ID NO: 13822 - DNA, 75 bp, synthetic construct
  source 1..75: mol_type = other DNA
tcactctcacccggcgttatggcgtcagtctcattcatctggacgccggcgcagaatgtctgccggggctcccca

SEQ ID NO: 13823 - DNA, 75 bp, synthetic construct
  source 1..75: mol_type = other DNA
caacttagtgattcgtcacagtatactgctttttacagagcaggcgctggcacacagtatattaaagaacgctca

SEQ ID NO: 13824 - DNA, 75 bp, synthetic construct
  source 1..75: mol_type = other DNA
tccggctgaccactgcctgcatgatgtgcaggatatgagtacgctgaatcatccgaaggcagacctgagcaaagg

SEQ ID NO: 13825 - DNA, 75 bp, synthetic construct
  source 1..75: mol_type = other DNA
ccagtatgcggacgtaatgttaactttaagttagagacaattcccgcagataaagttgaaatggcaacaatggta

SEQ ID NO: 13826 - DNA, 75 bp, synthetic construct
  source 1..75: mol_type = other DNA
gcagcagagcggctgttcccgtcggtgcggttccgtgtcagggagcgcagtcgccacaaatccgcactggtcatg

SEQ ID NO: 13827 - DNA, 75 bp, synthetic construct
  source 1..75: mol_type = other DNA
ctggtaaacatgaatcagattaaagttaattttcccgccattgatttagctgataataaaaacatgatagcagtt

SEQ ID NO: 13828 - DNA, 75 bp, synthetic construct
  source 1..75: mol_type = other DNA
gcattcccccactctgcaaatcatcgcatcagcccggctgaattcgacaagttcatttccacctggatgaaaact

SEQ ID NO: 13829 - DNA, 75 bp, synthetic construct
  source 1..75: mol_type = other DNA
gacccgcgattctgtgtaccagaatcagccagaaacggaacagaacgaccagaaagcggaacagaacagcccaaa

SEQ ID NO: 13830 - DNA, 75 bp, synthetic construct
  source 1..75: mol_type = other DNA
cgctgggtgcctggctggatgtgtgcaccacgtccacagacggataccactgaacgcaccgataacctggctgat

SEQ ID NO: 13831 - DNA, 75 bp, synthetic construct
  source 1..75: mol_type = other DNA
aggatgatgaagaaaaaccgcaaccatctggaacaacggcagttgaacagggagaggctgaaacaatggaaccgg

SEQ ID NO: 13832 - DNA, 75 bp, synthetic construct
  source 1..75: mol_type = other DNA
gttgatgttctccagtcatcagaaacacaaactgatgcagtggaaactgaggtatctgatatcccaaaaaatgaa

SEQ ID NO: 13833 - DNA, 75 bp, synthetic construct
  source 1..75: mol_type = other DNA
tgctgacgcttcatcagaagggcactggtgcaacggaaattgctcatcagctcagtattgcccgctccacggttt

SEQ ID NO: 13834 - DNA, 75 bp, synthetic construct
  source 1..75: mol_type = other DNA
tgtgcgtgaaggggcaatgtcggaggtcgaactgttacgtatgcagcgtcagtcagcggagctgcagttacagat

SEQ ID NO: 13835 - DNA, 75 bp, synthetic construct
  source 1..75: mol_type = other DNA
ccggaagctatcgaagccattatggatggcatgaactggctgagcctggagtgggatgaaggtccgtactaccag

SEQ ID NO: 13836 - DNA, 75 bp, synthetic construct
  source 1..75: mol_type = other DNA
acgaacgcattcagcctggcgtcaccgccactggcacgtatctgccttcacggggatttacaacgatttggccgc

SEQ ID NO: 13837 - DNA, 75 bp, synthetic construct
  source 1..75: mol_type = other DNA
gtcctctgcacaggcgggcgatatcctgctgtgctgctttggcgcatcggtggccaatcatgccgccatttactg

SEQ ID NO: 13838 - DNA, 75 bp, synthetic construct
  source 1..75: mol_type = other DNA
tgggctggaaatattcgggcaatcgccatcacccgacggaaaagcccgttaccagcctgcaaccgctgattgaga

SEQ ID NO: 13839 - DNA, 75 bp, synthetic construct
  source 1..75: mol_type = other DNA
aaggcagcatctttcatctgatggaaccggatattaatcaggagatctacggcctgcctggctatctttctgcta

SEQ ID NO: 13840 - DNA, 75 bp, synthetic construct
  source 1..75: mol_type = other DNA
tactcatcatccttcacatctggctctgtagacaggatggtgatcacttctggagtgaatccagattaaacatct

SEQ ID NO: 13841 - DNA, 75 bp, synthetic construct
  source 1..75: mol_type = other DNA
ctgtttccgggccgcgctgctgggtaggatttgatccttcgcgtggcgtggattgttccgtcgtgtacggagtgc

SEQ ID NO: 13842 - DNA, 75 bp, synthetic construct
  source 1..75: mol_type = other DNA
ctgcgtattcagcaggcgtttgagggcttaagcgtcgccgggtcggtgggagcctatcagtatcatggtcgcagt

SEQ ID NO: 13843 - DNA, 75 bp, synthetic construct
  source 1..75: mol_type = other DNA
gcaggcccctgccggaatgtccgcaaaagctgaagccgtatggacggggaatcacctgaagatggtgcgctttac

SEQ ID NO: 13844 - DNA, 75 bp, synthetic construct
  source 1..75: mol_type = other DNA
cctcggcaacggcggcaggaaattccgcgaaggcggcaaaaacgtccgagacgaacgccaggtcttctgaaacgg

SEQ ID NO: 13845 - DNA, 75 bp, synthetic construct
  source 1..75: mol_type = other DNA
tttaaatgatggaaacccatatttggaagtgcatcatgtaattcccctgtcttcaggtggtgctgatacaacaga

SEQ ID NO: 13846 - DNA, 75 bp, synthetic construct
  source 1..75: mol_type = other DNA
acgaacgcattcagtctggcgtcaccgccactggcacgcatctgccttcacggggatttacaacgatttggccgc

SEQ ID NO: 13847 - DNA, 75 bp, synthetic construct
  source 1..75: mol_type = other DNA
caaaatggagcgcagctcccgctggctgaaaagtgaagtggaagcctggctgcaggcgcgtattgcacagtcccg

SEQ ID NO: 13848 - DNA, 75 bp, synthetic construct
  source 1..75: mol_type = other DNA
gtgagctggttctgccggccggaactctcaggctgaaaggtgaactgacaccggcgttattacagacacttatcc

SEQ ID NO: 13849 - DNA, 75 bp, synthetic construct
  source 1..75: mol_type = other DNA
acgggtttacaaaggattcagaagaacataaaaaactaagaatacagcaagagaggaactggaaaggcctgggat

SEQ ID NO: 13850 - DNA, 75 bp, synthetic construct
  source 1..75: mol_type = other DNA
tatactgactgtcggagggaattacactggcagaaatggacttattctcctccagacagaaacaggtggtgacaa

SEQ ID NO: 13851 - DNA, 75 bp, synthetic construct
  source 1..75: mol_type = other DNA
aaactttacgctaaataataatggtagtgtttggggaggagatggatataatggtggaattgctgttagtggcaa

SEQ ID NO: 13852 - DNA, 75 bp, synthetic construct
  source 1..75: mol_type = other DNA
cctacctggatgatatcgccgtgaagcagtggcgggaaaaatcgcggcagcttgcggaacggggagacctgaccc

SEQ ID NO: 13853 - DNA, 75 bp, synthetic construct
  source 1..75: mol_type = other DNA
atgtgcaataacacccgtccggacgcagccgccgaagccatcataacgctaatgcatgcgctgattgatatttct

SEQ ID NO: 13854 - DNA, 75 bp, synthetic construct
  source 1..75: mol_type = other DNA
gactgaaagcccagtttgccttcggcatggtctttttgttcgttcagcccgatgccagcgctgctgacataagtg

SEQ ID NO: 13855 - DNA, 75 bp, synthetic construct
  source 1..75: mol_type = other DNA
cggcgaaattgagccggaagagcgcaaggtgctggaagagattgccggtgttctgggtcttcgtctggagaatca

SEQ ID NO: 13856 - DNA, 75 bp, synthetic construct
  source 1..75: mol_type = other DNA
actcgctgtcacatcagacgaatgacttcggcgaatcagaatggattcattttaccggtagcggatatctgttac

SEQ ID NO: 13857 - DNA, 75 bp, synthetic construct
  source 1..75: mol_type = other DNA
tcaacgataccggagggatcctgctcccccggcgacgtctgttcacaatagaatcaccaccagaggggcgtatcc

SEQ ID NO: 13858 - DNA, 75 bp, synthetic construct
  source 1..75: mol_type = other DNA
atctgcccagacacagctcggcgttaaaccgcgcattctcggcgtgccaggtcacgataacaaagccgttgcgac

SEQ ID NO: 13859 - DNA, 75 bp, synthetic construct
  source 1..75: mol_type = other DNA
cgcaggaggctacatcacgcccgtcaccggtggagatctggcaacggcttctgagccacctgttggatcgtcact

SEQ ID NO: 13860 - DNA, 75 bp, synthetic construct
  source 1..75: mol_type = other DNA
gacggtaccgtctggcgtcttctgaatggttttaagctgttccgcgaaaaactggatacccgtcgcggttcaaat

SEQ ID NO: 13861 - DNA, 75 bp, synthetic construct
  source 1..75: mol_type = other DNA
gctggaaaatctacgtcaaaaacggtctggtcacctgggaaacccagcagactgactatccgcgtactcgcccgg

SEQ ID NO: 13862 - DNA, 75 bp, synthetic construct
  source 1..75: mol_type = other DNA
atcacttatggcatttgatgcggaaataatagatcagaaaaccatattcaaatgggataaaacccccaaaggaat

SEQ ID NO: 13863 - DNA, 75 bp, synthetic construct
  source 1..75: mol_type = other DNA
ggcgtcgccccaagccaacggcgcgcaaggcgctggccggaaaccccggcaagcgagccctgaacaaagatgaac

SEQ ID NO: 13864 - DNA, 75 bp, synthetic construct
  source 1..75: mol_type = other DNA
atgaaaaagatttttgatgtttcagtaattgccattgtctgtgcatttgcagcaaatgcaggagcaaaggaaggt

SEQ ID NO: 13865 - DNA, 75 bp, synthetic construct
  source 1..75: mol_type = other DNA
cggtggccctgctcctgagtgccggagtgttgatgagtggtggtctggctatcatgctctccgaacagctatggt

SEQ ID NO: 13866 - DNA, 75 bp, synthetic construct
  source 1..75: mol_type = other DNA
gctggcactggagcagatggcagaacaggggaaagcatggcccctgattgaaggcagtggcacgatttatggcat

SEQ ID NO: 13867 - DNA, 75 bp, synthetic construct
  source 1..75: mol_type = other DNA
tataacacgacagaacagtggctggagcagtttccgttctggtcagagtccactctgaaacgcacatttgcaagc

SEQ ID NO: 13868 - DNA, 75 bp, synthetic construct
  source 1..75: mol_type = other DNA
attcaccatgattcagtcagctccgctgatgctgctgccagaccctgacgcattcgtctccgtcaaactggcata

SEQ ID NO: 13869 - DNA, 75 bp, synthetic construct
  source 1..75: mol_type = other DNA
agcaaatcccacaaatcctgaaacgttttcgtcaggcggttctgggtgcagcggtgagaggaaaactaactgaag

SEQ ID NO: 13870 - DNA, 75 bp, synthetic construct
  source 1..75: mol_type = other DNA
ctaaattggagctcccaaacggggcaaacaaactactactgcactcttgctgtgctccatgttccggtgaagtga

SEQ ID NO: 13871 - DNA, 75 bp, synthetic construct
  source 1..75: mol_type = other DNA
gaagttaagcgcctgaagtcgcttgaggaagagaacaccagactcaagaagctgcttgccgaagccatgctggat

SEQ ID NO: 13872 - DNA, 75 bp, synthetic construct
  source 1..75: mol_type = other DNA
ggcgcaggaatgtataccttgctgagcgtgccgaaagatgtgcaaatcttcttcccgatggcggctctgcttggg

SEQ ID NO: 13873 - DNA, 75 bp, synthetic construct
  source 1..75: mol_type = other DNA
ataacaacacgcttgggataacagatgaaggtaaacaagccaaaatctgggatgccaaagaaggtgtttgcattg

SEQ ID NO: 13874 - DNA, 75 bp, synthetic construct
  source 1..75: mol_type = other DNA
cttcctggctggcgctactgaagcgaccaccaccctgtgggacaaagtaatggaaggcgttaaactggaaaaccg

SEQ ID NO: 13875 - DNA, 75 bp, synthetic construct
  source 1..75: mol_type = other DNA
tgccggtgacgttaacgatgactggctgcaacctgccagcaatgagatgtaccgcgtgctgaaaaaaaacgcgtt

SEQ ID NO: 13876 - DNA, 75 bp, synthetic construct
  source 1..75: mol_type = other DNA
attcgctggactgctcctgctaaaatcagggagcagtatgtcgatcggataaagaaatttcgatgtccacaaacg

SEQ ID NO: 13877 - DNA, 75 bp, synthetic construct
  source 1..75: mol_type = other DNA
ttgatgctcttaaaagtcaggcggaaatgaccatgcttggaaagcaacattctgtagaggtaaagcagagggaat

SEQ ID NO: 13878 - DNA, 75 bp, synthetic construct
  source 1..75: mol_type = other DNA
gctgcggcaggctattcgggccgctgtgcgcggcggcaatgttggtcattcaccctctggcgccagtgtggatgc

SEQ ID NO: 13879 - DNA, 75 bp, synthetic construct
  source 1..75: mol_type = other DNA
atgactattgctgatttcaaacggcctaaattggagctcccaaacggggcaaacaaactactactgcactcttgc

SEQ ID NO: 13880 - DNA, 75 bp, synthetic construct
  source 1..75: mol_type = other DNA
atggaccgctgccgggcgggtgaaacatggcctccggacctggctgagtttgtggcgctgatttcggaaagcgga

SEQ ID NO: 13881 - DNA, 75 bp, synthetic construct
  source 1..75: mol_type = other DNA
ggctgtatcagttccgtcgttgttcatcccgggagacactggaaaaagtgattacccgcacacgttataaactta

SEQ ID NO: 13882 - DNA, 75 bp, synthetic construct
  source 1..75: mol_type = other DNA
atgatcaaagagactgttacgatgagtcataaggaactccaccgacttcagattattcaggaacaagctgcggca

SEQ ID NO: 13883 - DNA, 75 bp, synthetic construct
  source 1..75: mol_type = other DNA
atacttgaccagtttctggatgaaaaagagggtaaccacactacggcataccgcgatggttccggcatatggacc

SEQ ID NO: 13884 - DNA, 75 bp, synthetic construct
  source 1..75: mol_type = other DNA
attaaaaaagttgatgccagtggcaaacacgatgtcgctcagcgcctgcaacagcgcgtcacagccattatgcgt

SEQ ID NO: 13885 - DNA, 75 bp, synthetic construct
  source 1..75: mol_type = other DNA
agcatgagctgaacggtataaatttattcaccggtgcattactgacctatacagacagcaatgctagcagccagg

SEQ ID NO: 13886 - DNA, 75 bp, synthetic construct
  source 1..75: mol_type = other DNA
gactgggagaacagggagttctcactcaacaatctgaatcttaataatgcggacttcagtctgtcccgtaatgca

SEQ ID NO: 13887 - DNA, 75 bp, synthetic construct
  source 1..75: mol_type = other DNA
ccaataattttcggaaaatcccggaagcgtcaaccagctctccggtaactccggatggttggataagctgtagtg

SEQ ID NO: 13888 - DNA, 75 bp, synthetic construct
  source 1..75: mol_type = other DNA
cagaaactgcgggcagaactccatgaagcccggaaaaacattccgccccaaaatcctgtcgatgcagacaaatta

SEQ ID NO: 13889 - DNA, 75 bp, synthetic construct
  source 1..75: mol_type = other DNA
cgcatacgttcaaataactgctatggacaggttattcgccgtgaccaggaagcggcactggtgtgctggggtatc

SEQ ID NO: 13890 - DNA, 75 bp, synthetic construct
  source 1..75: mol_type = other DNA
gactcgctgtgtgagtttaccgtaaaggaacgtaatattgagtttaaggctgttctcgcttacgaaccgaagaag

SEQ ID NO: 13891 - DNA, 75 bp, synthetic construct
  source 1..75: mol_type = other DNA
aaggcaaaggtaaccgcgtatttgcccatatgcgcggtgaagtggcagcgactgatgatgacgagttactgagca

SEQ ID NO: 13892 - DNA, 75 bp, synthetic construct
  source 1..75: mol_type = other DNA
atgctaataaagtatggagaatttatcgtgacatgaaagggatatgccttcccgggcagggaggcagacaatgca

SEQ ID NO: 13893 - DNA, 75 bp, synthetic construct
  source 1..75: mol_type = other DNA
tcccttgcacacacaaaccgcttccggcggggagtgttgtcagcgttgatgctgacggtgcaattgagtgggaaa

SEQ ID NO: 13894 - DNA, 75 bp, synthetic construct
  source 1..75: mol_type = other DNA
attttttctgtccccaatgtgcgaattaatattcggaaatatcatgatattcctgctgaaacgccgtatgcgccg

SEQ ID NO: 13895 - DNA, 75 bp, synthetic construct
  source 1..75: mol_type = other DNA
cttcctcatcaggtacaaagcgagcataccgaaaaggtaatcctctgacgcttgcagaacgtcagcaggcgtcct

SEQ ID NO: 13896 - DNA, 75 bp, synthetic construct
  source 1..75: mol_type = other DNA
gacacccttgaactgaccgccacggctgacatgcctgatgaagtgcgcgcaaagctgcacaaaatcaccggtctg

SEQ ID NO: 13897 - DNA, 75 bp, synthetic construct
  source 1..75: mol_type = other DNA
cacttgtagaccgaaaatcacgttatacgatcatccttagactcaggggcaaagattctgtctcagtaaatcagg

SEQ ID NO: 13898 - DNA, 75 bp, synthetic construct
  source 1..75: mol_type = other DNA
gcaaaaagctttgtcgatgaggtggaggcggcctggtcggaatacgccgaagggatgtctggcgagatcgacgtg

SEQ ID NO: 13899 - DNA, 75 bp, synthetic construct
  source 1..75: mol_type = other DNA
cacggccagtccatcctcgccggtggtattacgctggttgcgggaacaacatggaggagcaacaatacgatgcct

SEQ ID NO: 13900 - DNA, 75 bp, synthetic construct
  source 1..75: mol_type = other DNA
ctctggcgtcgtgacggaccggtaatgatttcttttgatgatctgtggagtgcgataacgcatggcggacagtga

SEQ ID NO: 13901 - DNA, 75 bp, synthetic construct
  source 1..75: mol_type = other DNA
gtgcgctgcgcggtacacgcctgcaggcgattatggatatggatgtgaacgcgatgatgaccgtgatcccccgca

SEQ ID NO: 13902 - DNA, 75 bp, synthetic construct
  source 1..75: mol_type = other DNA
ggagagagctggtatgaagacgacgaggggattgttatccgggaaatcacgcgcatttctcgtctgtatgacgtc

SEQ ID NO: 13903 - DNA, 75 bp, synthetic construct
  source 1..75: mol_type = other DNA
tgaagctaacccaggtccaggtatgggcgtgctgctggcgtacatgttctttggtcgtggtagcgctaaacagtc

SEQ ID NO: 13904 - DNA, 75 bp, synthetic construct
  source 1..75: mol_type = other DNA
gagtagcggagcctataacgcaactattagtggtgcatcaacgttaattattcatttttatatgggagaaggaag

SEQ ID NO: 13905 - DNA, 75 bp, synthetic construct
  source 1..75: mol_type = other DNA
acaccgtatctgctgaatccggaaaaacatggacgggtgccggcattattactgacaaggggacgaatgtaacct

SEQ ID NO: 13906 - DNA, 75 bp, synthetic construct
  source 1..75: mol_type = other DNA
caggtttgctcgaagttgtctgggcgattggcctgaaatacacccacggttttacgcgtcttacgccaagcatta

SEQ ID NO: 13907 - DNA, 75 bp, synthetic construct
  source 1..75: mol_type = other DNA
cgtacctggaattttgaggacggtgccgggtactggatgaaccatgtcatccgggatttcggcattcttaagtaa

SEQ ID NO: 13908 - DNA, 75 bp, synthetic construct
  source 1..75: mol_type = other DNA
tgaaaaacatttccttgatcctgatttgatggtgcttggcaatacggctcttcaggggattgtcgcctatggcgg

SEQ ID NO: 13909 - DNA, 75 bp, synthetic construct
  source 1..75: mol_type = other DNA
aataataatgaattgctcgagagtgaatgcagatccatctattatagaaaaccaactcctgagaatattatcaat

SEQ ID NO: 13910 - DNA, 75 bp, synthetic construct
  source 1..75: mol_type = other DNA
ttgataaaacaattgattacatagtaaaaaaacatagcattaacaatttttacaggttagatgttgataatttct

SEQ ID NO: 13911 - DNA, 75 bp, synthetic construct
  source 1..75: mol_type = other DNA
acatacaaaaataaatattctttatagcaataagactgagcataatatttttataaaggatttattctccttcgc

SEQ ID NO: 13912 - DNA, 75 bp, synthetic construct
  source 1..75: mol_type = other DNA
ttgctgaacttgtggcaatgaaagccagagcgctcatgaaagatatgaacatgagttccggggttattaaaggta

SEQ ID NO: 13913 - DNA, 75 bp, synthetic construct
  source 1..75: mol_type = other DNA
tctggcatatgcatttctggaacagaatgccccgcgtaaggcactgaacgccgctcttaaaggactggcggcagg

SEQ ID NO: 13914 - DNA, 75 bp, synthetic construct
  source 1..75: mol_type = other DNA
ggatgactggtggcgtaacggtcagaacctttacctggacaatatggcggtcaccggcttttaccgggtgcccct

SEQ ID NO: 13915 - DNA, 75 bp, synthetic construct
  source 1..75: mol_type = other DNA
cagaaagcggggatcgcgtcattctgcccgtataacattggccccggtaagtgtttcccgtcgacgttttataaa

SEQ ID NO: 13916 - DNA, 75 bp, synthetic construct
  source 1..75: mol_type = other DNA
aggagttgctcgactgcatttccaggcttcgggatgatgtaaatgcccttactgtcgcattttcatatctggcat

SEQ ID NO: 13917 - DNA, 75 bp, synthetic construct
  source 1..75: mol_type = other DNA
acaaatgctgagtacctggtacgtaaattcgatgcgcttgaagctaaatgtgcggcactggaaaacaaaataata

SEQ ID NO: 13918 - DNA, 75 bp, synthetic construct
  source 1..75: mol_type = other DNA
atgaaaaaattaacagtggcaatttctgctgtagctgcatcagtactgatggcgatgtctgctcaggcagcagag

SEQ ID NO: 13919 - DNA, 75 bp, synthetic construct
  source 1..75: mol_type = other DNA
gctcatcctgtcatcgcgcaccattggcgggctgggcgtgttccttgcgccgttcttcccggatgcaacgatgct

SEQ ID NO: 13920 - DNA, 75 bp, synthetic construct
  source 1..75: mol_type = other DNA
aacaggtgaactacgacacgtttatttcgtatccgcagcttgatgcctgggcggcacaccctgattttcagtccc

SEQ ID NO: 13921 - DNA, 75 bp, synthetic construct
  source 1..75: mol_type = other DNA
atcgaagttccgaatcacccgtggttcgtggcttgccagttccatccggagtttacttctactccacgtgatggt

SEQ ID NO: 13922 - DNA, 75 bp, synthetic construct
  source 1..75: mol_type = other DNA
cggtaccatgtcatcaaatggctcatcaggtggaacagcatcggatgccatttccggtgatgccagtaataccca

SEQ ID NO: 13923 - DNA, 75 bp, synthetic construct
  source 1..75: mol_type = other DNA
aacccagtgataacgatttggccgaagaggaactgttatcgcagggagccacacagcgtgtgctggacgcgactc

SEQ ID NO: 13924 - DNA, 75 bp, synthetic construct
  source 1..75: mol_type = other DNA
tggaacccgtatccgagaccactgctgaccataacagctatggtttcagaccaatgcgcagcacgcatgacgcca

SEQ ID NO: 13925 - DNA, 75 bp, synthetic construct
  source 1..75: mol_type = other DNA
gcattcctgaactttcagcacttccaccttcattaagaaagaaaaattttactgacgcatataatgctgcatctt

SEQ ID NO: 13926 - DNA, 75 bp, synthetic construct
  source 1..75: mol_type = other DNA
tgacatggcggctgaatgcaaaactgtacttttaccccggcccggaatccgaacctattctggccgcggctgaat

SEQ ID NO: 13927 - DNA, 75 bp, synthetic construct
  source 1..75: mol_type = other DNA
cggaatcgctcaaataactgttacgggcaggtatcgcggcgtgaccaggagagcgcgctggcgtgctggggaatt

SEQ ID NO: 13928 - DNA, 75 bp, synthetic construct
  source 1..75: mol_type = other DNA
cgggaataacctgaatcagacagcgaggaaggtgaacagcgggcagtggtcttccggtgaccgggttcaggtggt

SEQ ID NO: 13929 - DNA, 75 bp, synthetic construct
  source 1..75: mol_type = other DNA
acccccggtgttttcggctgctctggtatccccgtccaacacaggcaattattataaacggtaaaaaatgtattc

SEQ ID NO: 13930 - DNA, 75 bp, synthetic construct
  source 1..75: mol_type = other DNA
atttcggttcaaaaacaaaacttgcacaagcagcaggtattcgtttggcttcgctttatagctggaaaggggatt

SEQ ID NO: 13931 - DNA, 75 bp, synthetic construct
  source 1..75: mol_type = other DNA
gtacagtggcgcgcctcatggcggttatgggacttgccggtgttctccggggtaaaaaggtccgtactaccgtca

SEQ ID NO: 13932 - DNA, 75 bp, synthetic construct
  source 1..75: mol_type = other DNA
cggacggcgtaccggaagccgcactggatgaagtcatggccacgctgaccacgccggcccgcagcagcgttatca

SEQ ID NO: 13933 - DNA, 75 bp, synthetic construct
  source 1..75: mol_type = other DNA
aactgtataccgacagtgccggttacccggtaaaaattattcgctgcataaataacactgtgttgtacagaagaa

SEQ ID NO: 13934 - DNA, 75 bp, synthetic construct
  source 1..75: mol_type = other DNA
tatccagcactgccaccgtggcgcttaccgtggataacaccatggttatggccacagtggattacgtgaatgaca

SEQ ID NO: 13935 - DNA, 75 bp, synthetic construct
  source 1..75: mol_type = other DNA
ggtattgtcggtgaagtcgatggtgatgaccccgcagtattcaggccaatacaaaaatacatcaatggcacatgg

SEQ ID NO: 13936 - DNA, 75 bp, synthetic construct
  source 1..75: mol_type = other DNA
tgttgccacatgcgcatccgcaggatttaatgcaaaaatcggtgcagccgttgccaaaatcgatcaagcgcacag

SEQ ID NO: 13937 - DNA, 75 bp, synthetic construct
  source 1..75: mol_type = other DNA
tcccgtcaccatctggcagacactgctcatccgtctgctggaccagcactatggcctcacactgaatgacacacc

SEQ ID NO: 13938 - DNA, 75 bp, synthetic construct
  source 1..75: mol_type = other DNA
cagcatattgaagcgggcatttcactgtgtgatgcggtgaactttctcgttgagaaatacgcgctggtacgtacc

SEQ ID NO: 13939 - DNA, 75 bp, synthetic construct
  source 1..75: mol_type = other DNA
cacattctggctgtacgaaagagtgcgctgctgcaaatcgacacacttatccggcaactggctgaaatctcggta

SEQ ID NO: 13940 - DNA, 75 bp, synthetic construct
  source 1..75: mol_type = other DNA
aactgctggttgccggtgatttcagtaacggacaggaagagcgtccactatcggagcgcgtaaaaacggacatca

SEQ ID NO: 13941 - DNA, 75 bp, synthetic construct
  source 1..75: mol_type = other DNA
actgccgcctcccctggcatgaggtggagagctcccggacggatgaagaacgacgcctggtggaaaacttctgcc

SEQ ID NO: 13942 - DNA, 75 bp, synthetic construct
  source 1..75: mol_type = other DNA
tacgggaggcatcgcgctgcccgtctcccgtcatcatctggcagattctgctcacccgactgctggaccagcatt

SEQ ID NO: 13943 - DNA, 75 bp, synthetic construct
  source 1..75: mol_type = other DNA
aaaataagcaatgtggcttttgatggttcctccgatatcacattaaaagcaagtcatgttggtgcgtttgcctta

SEQ ID NO: 13944 - DNA, 75 bp, synthetic construct
  source 1..75: mol_type = other DNA
tcagccaggggactggtggatctgatcgacagcagggttgtgtcaattatgcagtcatcacgtcgggacggagga

SEQ ID NO: 13945 - DNA, 75 bp, synthetic construct
  source 1..75: mol_type = other DNA
tggtaacggtgatacagtttatcgcctgttatctggctggttgggggaatgccgaaacaatttttatgctgttct

SEQ ID NO: 13946 - DNA, 75 bp, synthetic construct
  source 1..75: mol_type = other DNA
cctacgccaagctgtcctggctgcaagcctggcacatccgcgacgaaacctattcggcggccttggccgagctgg

SEQ ID NO: 13947 - DNA, 75 bp, synthetic construct
  source 1..75: mol_type = other DNA
tcgatctgagattaaatgaagacgacaaacacatgatcgaagaagctgcagcaatgactaaccagtccatttcgc

SEQ ID NO: 13948 - DNA, 75 bp, synthetic construct
  source 1..75: mol_type = other DNA
attatagctcattacccattaggagttgacgtaggcaaacaaaaattcgtacaggccattagagagcttcctgac

SEQ ID NO: 13949 - DNA, 75 bp, synthetic construct
  source 1..75: mol_type = other DNA
atgaaatctttaggtgaacgcctcatcaacgcacgacaaaaagctgggttaacgcaagatgcgttggctaaaaaa

SEQ ID NO: 13950 - DNA, 75 bp, synthetic construct
  source 1..75: mol_type = other DNA
agctgacggagcgtgtgctggtcagcactgacggaagtgtgtcgagcgttgaagcgataacggaacccgatgaac

SEQ ID NO: 13951 - DNA, 75 bp, synthetic construct
  source 1..75: mol_type = other DNA
tgaggtggatattctgcgcaacgatgtctgtgatatcagcctgaacctgcaactgacggaacgtgtgctggtcag

SEQ ID NO: 13952 - DNA, 75 bp, synthetic construct
  source 1..75: mol_type = other DNA
acgccggtttcagcaaaaataacacagcccggcgcatgatatatgcccgaaaaatccacaaccggtatttcagac

SEQ ID NO: 13953 - DNA, 75 bp, synthetic construct
  source 1..75: mol_type = other DNA
gatgctgaggctggcaggatgtggggacggtggtgcacttctgcccggaaaacggggcgttgcgatgacagtctc

SEQ ID NO: 13954 - DNA, 75 bp, synthetic construct
  source 1..75: mol_type = other DNA
tgaaaagcaaagcctgttgcaacttgtcagggataaaacccagctatgggactcacagctacggctgggcatcat

SEQ ID NO: 13955 - DNA, 75 bp, synthetic construct
  source 1..75: mol_type = other DNA
agctgatctccacgcatcccaatggctatatgacgccgcaggagttctgggagctggtggtcacctgtctgtgcc

SEQ ID NO: 13956 - DNA, 75 bp, synthetic construct
  source 1..75: mol_type = other DNA
gacggagaaatacgtcgctacgacaggcgtcagaacataatctgtcgcgagtgccggaagagtgaagttatgcag

SEQ ID NO: 13957 - DNA, 75 bp, synthetic construct
  source 1..75: mol_type = other DNA
agcgggaaaaaatcaagggacaggttgttgagctagtacgccggagtgggcgcgagacgttacggcaactggaag

SEQ ID NO: 13958 - DNA, 75 bp, synthetic construct
  source 1..75: mol_type = other DNA
atgcaacaactttcctttctgcccggagagatgacacccggcgagcgcagcctcattcagcgggccctgaaaacc

SEQ ID NO: 13959 - DNA, 75 bp, synthetic construct
  source 1..75: mol_type = other DNA
gcaataaaaactggtgttttcgactatgcaaaacagtttccctcctcacgcaatctggaaaaatttggtgaggcc

SEQ ID NO: 13960 - DNA, 75 bp, synthetic construct
  source 1..75: mol_type = other DNA
gtcgcctaaacataatctgtcgcgagtgccggaagagtgaagctatgcagcgtgtactggctttctatcagggta

SEQ ID NO: 13961 - DNA, 75 bp, synthetic construct
  source 1..75: mol_type = other DNA
ggcaccaaaacataatttgctgtgagtgccggaagagcgaagttatgcagcgcatactggcattttatcagagaa

SEQ ID NO: 13962 - DNA, 75 bp, synthetic construct
  source 1..75: mol_type = other DNA
gctggccctgtccagatccgggcaggcggcagggctgacgtttaaccagaccagcgagtcactgacggcgctggt

SEQ ID NO: 13963 - DNA, 75 bp, synthetic construct
  source 1..75: mol_type = other DNA
catggcctccggacctggctgagtttgtggcgctgatttcggaaagcggagccaatccattcggtctgacggtgg

SEQ ID NO: 13964 - DNA, 75 bp, synthetic construct
  source 1..75: mol_type = other DNA
ccgtgaacggctgaagtatgcactggaggcgggtttactggtgactgcactggacggcctgttctggtttggcag

SEQ ID NO: 13965 - DNA, 75 bp, synthetic construct
  source 1..75: mol_type = other DNA
atgcaacagctttcctttctgcccgtagcgatgacgcccggtgagcgcagcctcattcagcgggccctgaaaacc

SEQ ID NO: 13966 - DNA, 75 bp, synthetic construct
  source 1..75: mol_type = other DNA
aaacgtccgcatcaattctcatccctccgtactcccactggtgatatttcagggcaaaataaaaacaacctgatc

SEQ ID NO: 13967 - DNA, 75 bp, synthetic construct
  source 1..75: mol_type = other DNA
atgataaaataactaggccgatgaattacaatgataattatccatcgatacaggcaagttcaattttaaatgaag

SEQ ID NO: 13968 - DNA, 75 bp, synthetic construct
  source 1..75: mol_type = other DNA
acagtgactgacttaaaggccggaaataaaagtcttgaaaacaccatggtacccccacagggaaaggtcactgtt

SEQ ID NO: 13969 - DNA, 75 bp, synthetic construct
  source 1..75: mol_type = other DNA
gtgggagcgagtctgcgccgcgctgcgggagctgaacaagcaccgggatattgttcgacagattactgattcttc

SEQ ID NO: 13970 - DNA, 75 bp, synthetic construct
  source 1..75: mol_type = other DNA
acaccgttgacttactctgccagcgtcattacggcatgacaaagggcgtgacagagcgcgttctggctgccaatc

SEQ ID NO: 13971 - DNA, 75 bp, synthetic construct
  source 1..75: mol_type = other DNA
gggctgcctgggtatatgagcagtacaacacagatcttcgtcacaattctcaagtcgctgatttcaaaaaactgt

SEQ ID NO: 13972 - DNA, 75 bp, synthetic construct
  source 1..75: mol_type = other DNA
atcggccttcaggcgttgcagggacttggtagtgtcgctcaaacatatcaagccgcaaagcaacaggaagcggat

SEQ ID NO: 13973 - DNA, 75 bp, synthetic construct
  source 1..75: mol_type = other DNA
tcgatgttctgttctggtgtgccggttcgcagggcagtatgtacccgttcaatggctgggtgagtaatgagtcca

SEQ ID NO: 13974 - DNA, 75 bp, synthetic construct
  source 1..75: mol_type = other DNA
ccaggctcttgccgtcacaacggcttaccttaatgtgcttattgaagatgaccagggaacgcatttccggctggt

SEQ ID NO: 13975 - DNA, 75 bp, synthetic construct
  source 1..75: mol_type = other DNA
gtaaaaagctgattgcccttgttctggccggtgccgggacgttcacgattgccacgcattacaccggttactggg

SEQ ID NO: 13976 - DNA, 75 bp, synthetic construct
  source 1..75: mol_type = other DNA
gaataagctgattgccggtgaaaccctcttcaccggcaccatcaaccgcacggaagtccatccccgggaagtgat

SEQ ID NO: 13977 - DNA, 75 bp, synthetic construct
  source 1..75: mol_type = other DNA
ctctatctcaacacccaaaagattttccgttggctggataaagacactcctgatgctgttgagaaaattcaggca

SEQ ID NO: 13978 - DNA, 75 bp, synthetic construct
  source 1..75: mol_type = other DNA
tgcacttcagttcggtggtggtaatgaggagacgaatctctggacgctctgtaccgaatgccatcgacaaaagtc

SEQ ID NO: 13979 - DNA, 75 bp, synthetic construct
  source 1..75: mol_type = other DNA
agaaggcgagccgattcatcttcgctgcttcgaatccacccacgaaatgctgctggagcaattaagtcagcataa

SEQ ID NO: 13980 - DNA, 75 bp, synthetic construct
  source 1..75: mol_type = other DNA
taaggctgaccgccttattacggaacgtctggtacaggcactggccctggttgacatccgggtgccggaccatct

SEQ ID NO: 13981 - DNA, 75 bp, synthetic construct
  source 1..75: mol_type = other DNA
tggaaaggctgggccatactcctccggcagaagcagaaaaagcttattatgcttccatcggaaacgatgatctgg

SEQ ID NO: 13982 - DNA, 75 bp, synthetic construct
  source 1..75: mol_type = other DNA
atgaacaaagaaaatgtcattaccctggaaaatccggtcaaacgtggtgagcaggttatcgaacaggtcacgctg

SEQ ID NO: 13983 - DNA, 75 bp, synthetic construct
  source 1..75: mol_type = other DNA
ctcccattatttagcatttgtgcagctaaaagccgatcaggcactggataaggccggaaaaattatcatggctga

SEQ ID NO: 13984 - DNA, 75 bp, synthetic construct
  source 1..75: mol_type = other DNA
gaaaacctgaccctgcgccagcgtattaccgataaatacctggcaaatctggtcacttcggttaacagcaattaa

SEQ ID NO: 13985 - DNA, 75 bp, synthetic construct
  source 1..75: mol_type = other DNA
ccaaaagtgattggccttgatgcttcaagaattgttccaactgcaaacgaaaaccgtcctcgtaacattgccttt

SEQ ID NO: 13986 - DNA, 75 bp, synthetic construct
  source 1..75: mol_type = other DNA
ggcgatcacttaccgtgaaaacttcagtcagcgtgaagggatgctgatttggcctgactttactggctgggacac

SEQ ID NO: 13987 - DNA, 75 bp, synthetic construct
  source 1..75: mol_type = other DNA
agagatggctcgctggcgatgggataagccggttattgaagcaaatgttgagtactggcgcgagcaactgcagtt

SEQ ID NO: 13988 - DNA, 75 bp, synthetic construct
  source 1..75: mol_type = other DNA
cgatggttgaacgtaacgaaaaaggccgccagatacgccgctacttcatcgagtgcgaaaagaaacttcgcaaca

SEQ ID NO: 13989 - DNA, 75 bp, synthetic construct
  source 1..75: mol_type = other DNA
tggtgccaattacaacaccacacgcctgattatcaccccggcagatgattcgaccatcccgccgacaccggcagt

SEQ ID NO: 13990 - DNA, 75 bp, synthetic construct
  source 1..75: mol_type = other DNA
ctggatccaggccaatgtcctgaaggcagacaaaatggatttgcgggagtcccagacctggctgaacagcggtta

SEQ ID NO: 13991 - DNA, 75 bp, synthetic construct
  source 1..75: mol_type = other DNA
tgatgcgcaagctggcacaggtggcgtatggagtgctgaagtcaggcgtgccgttcgatgcgtcacggcataatc

SEQ ID NO: 13992 - DNA, 75 bp, synthetic construct
  source 1..75: mol_type = other DNA
tcgtggtgaccgtaccacgctttatctggttgatgaggctgcattccttcagcgtcctctgctgattgatgcggc

SEQ ID NO: 13993 - DNA, 75 bp, synthetic construct
  source 1..75: mol_type = other DNA
tctggaaatttgacaatgaatggtgttacttcttatttcggtgtccgtccacgcaacatcgcatttaactacatt

SEQ ID NO: 13994 - DNA, 75 bp, synthetic construct
  source 1..75: mol_type = other DNA
gcggtttacggggctgaagcggggataccgtctggcagagctggttatgatgcatgagccgctggcccgaatgca

SEQ ID NO: 13995 - DNA, 75 bp, synthetic construct
  source 1..75: mol_type = other DNA
gtagatgttgaggagaaaacagttaatgatttctttaaaaactacacactctcacctttttctgtaagaaggttt

SEQ ID NO: 13996 - DNA, 75 bp, synthetic construct
  source 1..75: mol_type = other DNA
tttttgtgtccgcacttacaggaaacttggggtcgaatttaacatcaagcataaaagccaagaaaaatgcgatca

SEQ ID NO: 13997 - DNA, 75 bp, synthetic construct
  source 1..75: mol_type = other DNA
tgcgtttttatgtgccctgcccgcactgtggggaggcgcagtatctgaaatttggcgatgaatccacgccttttg

SEQ ID NO: 13998 - DNA, 75 bp, synthetic construct
  source 1..75: mol_type = other DNA
cagataatgctctgatttacgtcgataatattcgtgatgcgttgataaaatacgatccggcaaatgcacaaacct

SEQ ID NO: 13999 - DNA, 75 bp, synthetic construct
  source 1..75: mol_type = other DNA
aagtgaatctgcatatattagttttctaacggtgggtcagcgccgctctttatttctacacgcgggattgagtga

SEQ ID NO: 14000 - DNA, 75 bp, synthetic construct
  source 1..75: mol_type = other DNA
gatggacacgatggcagaagcgcatatgtgggcggtggacaaaccgctgaacccgtcgctggcccgcgacattat

SEQ ID NO: 14001 - DNA, 75 bp, synthetic construct
  source 1..75: mol_type = other DNA
acggtgttaccggcatcagcgcctctgtattctgggatttgcaggagtccggcaccgatgctgacctgcttaacg

SEQ ID NO: 14002 - DNA, 75 bp, synthetic construct
  source 1..75: mol_type = other DNA
cgaacggctaacggtttgctttcatgcgcagttaaaacagcgtcacgcaacgatgcgttttgaagaaatgaacga

SEQ ID NO: 14003 - DNA, 75 bp, synthetic construct
  source 1..75: mol_type = other DNA
cgatgcgttttgaagaaatgaacgacgtcgaacgtgaacgactggtatgtgcaattgatgaattgcgtggggcat

SEQ ID NO: 14004 - DNA, 75 bp, synthetic construct
  source 1..75: mol_type = other DNA
gatttacgcggtgagtttattcgtggctgggatgacggacgtggagtggataacggaaggggattattaacgctt

SEQ ID NO: 14005 - DNA, 75 bp, synthetic construct
  source 1..75: mol_type = other DNA
gaaggcgacggaacagcagaaaaagacttgctggatgtggtggagaaagccctgaacagtgagaacgtccgcccg

SEQ ID NO: 14006 - DNA, 75 bp, synthetic construct
  source 1..75: mol_type = other DNA
aaaaaatgaggtgcttgcagcagacgaaatgaaagaagctattcctgatcgcgcggcgaatctaagctgcgcttc

SEQ ID NO: 14007 - DNA, 75 bp, synthetic construct
  source 1..75: mol_type = other DNA
ggacgttgtgatatcaacaagccaatgagcgaagccagcatcaatatggtgctcaaacgtatcggttacgatggc

SEQ ID NO: 14008 - DNA, 75 bp, synthetic construct
  source 1..75: mol_type = other DNA
atgttgcactgaaggacgccatgctctgctggggcgaggatgaggataagccggaggtggatccgtttgcggcgc

SEQ ID NO: 14009 - DNA, 75 bp, synthetic construct
  source 1..75: mol_type = other DNA
caaaggtaaggttgaacggatggtgaaatacctcaaggaaaacttcttcgtccggtaccgccggttcgacagctt

SEQ ID NO: 14010 - DNA, 75 bp, synthetic construct
  source 1..75: mol_type = other DNA
gcaggtagcagctgagattgaaatgatggccagtggtgctgacaatgatgcagttgtgctggaggctcttctgcg

SEQ ID NO: 14011 - DNA, 75 bp, synthetic construct
  source 1..75: mol_type = other DNA
ggctaaataatcacgtaatacagcacattggccctatgccgctggataaatgcgagctacggcactggctggcct

SEQ ID NO: 14012 - DNA, 75 bp, synthetic construct
  source 1..75: mol_type = other DNA
caccgatccgcaagtagcaaccgtgggctacagcgaagcggaagcgcatcacgacgggatcgaaaccgacagtcg

SEQ ID NO: 14013 - DNA, 75 bp, synthetic construct
  source 1..75: mol_type = other DNA
ccatgcacaatatttagagaagagaaaagatatgatgcaatggtatgcggactttttatacaaatcattggagcg

SEQ ID NO: 14014 - DNA, 75 bp, synthetic construct
  source 1..75: mol_type = other DNA
ggtgaaggtgagaaagtggttttgtgtgatgtgtgacgaagattatgagggggaaaagtgctgcccacgctgcgg

SEQ ID NO: 14015 - DNA, 75 bp, synthetic construct
  source 1..75: mol_type = other DNA
tgctcttggggtgcctcgccctcacctgctcgatcgcatttcaggcgagtgcaactgaaaaattcaaggtcatta

SEQ ID NO: 14016 - DNA, 75 bp, synthetic construct
  source 1..75: mol_type = other DNA
gatatgccaggggcaatggctgagtacggaaaggagtacaagcgggctaaatgcactaaaggtccagataaaggg

SEQ ID NO: 14017 - DNA, 75 bp, synthetic construct
  source 1..75: mol_type = other DNA
catgaccgctttatagctgtaaccagtaccggagaacagccagatgctatgggattcagaaattcagcatcatgc

SEQ ID NO: 14018 - DNA, 75 bp, synthetic construct
  source 1..75: mol_type = other DNA
tgaaaggagtccgcaattttgagaataaagtggcggtaactgtagccttacgggacaaaaaacgctttgacggtg

SEQ ID NO: 14019 - DNA, 75 bp, synthetic construct
  source 1..75: mol_type = other DNA
gatgatttatcggggggcacaattaaaggttatcggtagcggcaatgaaatcatcactggcgcagtcttgtcggc

SEQ ID NO: 14020 - DNA, 75 bp, synthetic construct
  source 1..75: mol_type = other DNA
acaccggctgaactggacaaaagcgaactatctgcgggctgaaactatcaccagcgctaatgccagactggttga

SEQ ID NO: 14021 - DNA, 75 bp, synthetic construct
  source 1..75: mol_type = other DNA
ctgcgtcgacgaaccagatccagcataaaagtcaaactacagccgaagcattcagcttcggtgatcccgttcctg

SEQ ID NO: 14022 - DNA, 75 bp, synthetic construct
  source 1..75: mol_type = other DNA
ctatttttacccggggccggaatcagaacccatacttcaggccgcacgggcacaactggaggcgtggctggcaga

SEQ ID NO: 14023 - DNA, 75 bp, synthetic construct
  source 1..75: mol_type = other DNA
gttgcccacgccatatgccgtaaaacatacggctacggtaaaaagatggatcgcatctctgatagtcagttagct

SEQ ID NO: 14024 - DNA, 75 bp, synthetic construct
  source 1..75: mol_type = other DNA
gatcaccaatggcgggcgcaactggttgtcgtttaactggcccagctaccgttctcgtatcggaggtgttgccgc

SEQ ID NO: 14025 - DNA, 75 bp, synthetic construct
  source 1..75: mol_type = other DNA
tatctctggaagcaggatattcatggaaggctggagagtttaccgacaattacaagggaagtcatgaatggtatg

SEQ ID NO: 14026 - DNA, 75 bp, synthetic construct
  source 1..75: mol_type = other DNA
gctgccctccgggctgttgttactgatcccggtgattgaggctgaagaagcccgtacagaagaggatattgcccc

SEQ ID NO: 14027 - DNA, 75 bp, synthetic construct
  source 1..75: mol_type = other DNA
taagattactgttactgtggcactggaaattggtgggtatccgtcactgttgttgccagatgtggcgattagtct

SEQ ID NO: 14028 - DNA, 75 bp, synthetic construct
  source 1..75: mol_type = other DNA
atctggtaaaacctttttcattttctgagttgctggcaagggttcgggcacaattaaggcaacatcacgctctga

SEQ ID NO: 14029 - DNA, 75 bp, synthetic construct
  source 1..75: mol_type = other DNA
gtaacgcctacctggaaaaacgcacgaaccgcttcggagaggtcatcgctcttgagcctgcgctggcaaaataca

SEQ ID NO: 14030 - DNA, 75 bp, synthetic construct
  source 1..75: mol_type = other DNA
cgctgccgtgcatcacagttcaccaattgcggtgaaatgcaacattctgaccagtacctacatccctcacccgct

SEQ ID NO: 14031 - DNA, 75 bp, synthetic construct
  source 1..75: mol_type = other DNA
gaagagaagcagctctctgataaccaggatttacatgaaaaatacttcctggatctaatggacatcattgataag

SEQ ID NO: 14032 - DNA, 75 bp, synthetic construct
  source 1..75: mol_type = other DNA
ggcaggcagtaatgccgcatatgaactgaccagcacatacacccccgcaggccagttacagagccagcacctgaa

SEQ ID NO: 14033 - DNA, 75 bp, synthetic construct
  source 1..75: mol_type = other DNA
tacgtctcaaggagtggtttaaagataaaactctgccacccaaagagaagagctacctatctcaactaatgagtg

SEQ ID NO: 14034 - DNA, 75 bp, synthetic construct
  source 1..75: mol_type = other DNA
ttgaaatttttcatgcggtaatgaccgccggaagcctgactgaggcggcacacctgctacacacctcacagccaa

SEQ ID NO: 14035 - DNA, 75 bp, synthetic construct
  source 1..75: mol_type = other DNA
ttcccgtgattattcacaggtcagttattccagtgccagggcatccgccaatgagtcgtggcggtattttatggg

SEQ ID NO: 14036 - DNA, 75 bp, synthetic construct
  source 1..75: mol_type = other DNA
atgaacaggctattcgtcgctttctgcgcacggcgctggagggcgacgggatgcgcgtctttgaggccgaaacgc

SEQ ID NO: 14037 - DNA, 75 bp, synthetic construct
  source 1..75: mol_type = other DNA
gattcagcggtgatttctcgttttttcgaatccctgaaagcaaaaattcaggcttaccagcggaaaaaacgacgt

SEQ ID NO: 14038 - DNA, 75 bp, synthetic construct
  source 1..75: mol_type = other DNA
atatccagaaagctatcgtcagcaatgcttttacagaacaaaaattctgcaatcaacaaccgtcttcgcacccaa

SEQ ID NO: 14039 - DNA, 75 bp, synthetic construct
  source 1..75: mol_type = other DNA
atgcacttccgagtcacaggtgaatggaatggagaaccattcaacagagttatcgaagcagaggacatcaacgac

SEQ ID NO: 14040 - DNA, 75 bp, synthetic construct
  source 1..75: mol_type = other DNA
atcactactgtgctggataaccgtctgatgagtctgacgttgacggacaatcggggctttgacgcggaccagctt

SEQ ID NO: 14041 - DNA, 75 bp, synthetic construct
  source 1..75: mol_type = other DNA
catcgtcagaactgacacaggacgaagcagtgaaagctcttggattcctgaaacaaaaagccactgaacagaagg

SEQ ID NO: 14042 - DNA, 75 bp, synthetic construct
  source 1..75: mol_type = other DNA
atcattaccccgtttctggcccggggattttttcccggtattctacgcctgtcatctggctgtgctgggcgttct

SEQ ID NO: 14043 - DNA, 75 bp, synthetic construct
  source 1..75: mol_type = other DNA
aaggtgcggcgctgacagaaaaacatattaatgcggcctttaaagaggtttataccaaccctgaattactctcac

SEQ ID NO: 14044 - DNA, 75 bp, synthetic construct
  source 1..75: mol_type = other DNA
cacggtcagcaaaatcgaccagttgcgtaaagatattgatgcgattgttgctgagattgaaggtagcgaggtaca

SEQ ID NO: 14045 - DNA, 75 bp, synthetic construct
  source 1..75: mol_type = other DNA
gctaatggtgtcgatcccagtgaaaacaagaaagctgttaaggtagaacaggaacaagaggcgataacgttgaag

SEQ ID NO: 14046 - DNA, 75 bp, synthetic construct
  source 1..75: mol_type = other DNA
cgagtcgctccgcaacgcgatgcgtgactcgaaaggactcgggaatttcaaaaacttgtttttctacgcgcccaa

SEQ ID NO: 14047 - DNA, 75 bp, synthetic construct
  source 1..75: mol_type = other DNA
atggatacgctcaatcttggcaacaacgaatctctggtatgcggcgtgtttcccaaccaggacggcacgtttacc

SEQ ID NO: 14048 - DNA, 75 bp, synthetic construct
  source 1..75: mol_type = other DNA
tctgttaaatcagcgagttgagatcaaaaaatctgaccttgttaactataatccgattgcggaaaagcacgtcaa

SEQ ID NO: 14049 - DNA, 75 bp, synthetic construct
  source 1..75: mol_type = other DNA
cccgctatgtctggcttaatcgactgcattactatgcgatcagttatgtggcgatgctggtttatgatgccataa

SEQ ID NO: 14050 - DNA, 75 bp, synthetic construct
  source 1..75: mol_type = other DNA
gctttttgaggactctgcagcggcagcactttttgaggcttcagtggcctttgttgatgccgttcctgcgctgga

SEQ ID NO: 14051 - DNA, 75 bp, synthetic construct
  source 1..75: mol_type = other DNA
agcaatggagctacgttggcagtaaagcccggcaacactggctctggtacgcgtacaacaccaaaacaggcggtg

SEQ ID NO: 14052 - DNA, 75 bp, synthetic construct
  source 1..75: mol_type = other DNA
attattggtcgagtgcaggttacagataaacaacttgaaggctaccagctgaagtatggtgatgtgctatttaat

SEQ ID NO: 14053 - DNA, 75 bp, synthetic construct
  source 1..75: mol_type = other DNA
acccgctggccaaccgcgtccagtgctccatcaccacactggccattgagtgcggactggcgacagagtccggtg

SEQ ID NO: 14054 - DNA, 75 bp, synthetic construct
  source 1..75: mol_type = other DNA
actgccaatcgtgaggcggtaaaacgcgaagtggagcgtcgtgtgaaggagcgcatgattctgtcacgtaaccgc

SEQ ID NO: 14055 - DNA, 75 bp, synthetic construct
  source 1..75: mol_type = other DNA
gaaattattgccgtccttccacgggatgccctgtcagggctggtaacacgaaataatcaactgattcatatagcc

SEQ ID NO: 14056 - DNA, 75 bp, synthetic construct
  source 1..75: mol_type = other DNA
ctccagagttaagtcgattaaaaagagaatatcacattgctgaggctcgttactggcgtaaagcgggagataaat

SEQ ID NO: 14057 - DNA, 75 bp, synthetic construct
  source 1..75: mol_type = other DNA
gaactcatatcattaacaacagaccttctgctatggcgttcatcatggccaacccttgcaactgccatacgccag

SEQ ID NO: 14058 - DNA, 75 bp, synthetic construct
  source 1..75: mol_type = other DNA
tgaacctgttaatcacctcagtggatggtgataaaaccgcaggcgcggcgtcggtggatattggtgaattctacc

SEQ ID NO: 14059 - DNA, 75 bp, synthetic construct
  source 1..75: mol_type = other DNA
gtcagcagcaggcgctggcttatgacgacccgcacggcaggctggtgattggcggtattggctcaacgcgggcac

SEQ ID NO: 14060 - DNA, 75 bp, synthetic construct
  source 1..75: mol_type = other DNA
gtatctgttttctgatccctccagcgtcaaactaccgttgtaatggtgaggtctggtgctattgtaataattcag

SEQ ID NO: 14061 - DNA, 75 bp, synthetic construct
  source 1..75: mol_type = other DNA
cagttcgcatattatctggcaggctttccctggtatgaggggaatatcctgtttgcctttgcagtggcggcacag

SEQ ID NO: 14062 - DNA, 75 bp, synthetic construct
  source 1..75: mol_type = other DNA
gacccatgatgaacaggaactgtttgaagtcattaataaaaagttactggcacatttttctgatgccagctcata

SEQ ID NO: 14063 - DNA, 75 bp, synthetic construct
  source 1..75: mol_type = other DNA
tggtatagaggctactccccaccgtgtcaccgaatacctgaataaggtgctgactgaaaccgatcatgccacccc

SEQ ID NO: 14064 - DNA, 75 bp, synthetic construct
  source 1..75: mol_type = other DNA
accgaaccggtggtgcggttgaatgtggaatcgcgcggtgatgtgccgctgatggaagcgcgaacgcgaactctg

SEQ ID NO: 14065 - DNA, 75 bp, synthetic construct
  source 1..75: mol_type = other DNA
tcggatgtcttcgctgcggaagctgacctcgctgctgccgtggcctgctcagtggcttcgccagccttcgttgtg

SEQ ID NO: 14066 - DNA, 75 bp, synthetic construct
  source 1..75: mol_type = other DNA
cgttatgaccatgaccgcttcgggcagatgacggcggtgcaccgcgaggaagggctgagccagtaccgcgcatac

SEQ ID NO: 14067 - DNA, 75 bp, synthetic construct
  source 1..75: mol_type = other DNA
aaccctgctcagttcaccaccagcgaaattggcgtttccggtggtggaagttatccattgcatacggaggctgcc

SEQ ID NO: 14068 - DNA, 75 bp, synthetic construct
  source 1..75: mol_type = other DNA
gaagcccggaaaaccattccgcccaaaaatcctgtcgatgccgacaaattgctggctgcctctcgcggagaattt

SEQ ID NO: 14069 - DNA, 75 bp, synthetic construct
  source 1..75: mol_type = other DNA
ggatcgacaaagaagaatatccgcaatctgcagcaatcgatctgcgttgcgtaaacatggttgccgatctgtggc

SEQ ID NO: 14070 - DNA, 75 bp, synthetic construct
  source 1..75: mol_type = other DNA
taaagtcagagaaataattaaacgcaatccgacgctcccggcatggaaactgataggccagctaaacccggtgat

SEQ ID NO: 14071 - DNA, 75 bp, synthetic construct
  source 1..75: mol_type = other DNA
atcactgctgactacaccgacgaactgaacgacttcgacctgcgccgccttgaagcgctgcgtactcaggcataa

SEQ ID NO: 14072 - DNA, 75 bp, synthetic construct
  source 1..75: mol_type = other DNA
gacctatgatgaacgtgaactgtttaaagacattaatcaaaaattactgacgcattttgctgatgtacgttcata

SEQ ID NO: 14073 - DNA, 75 bp, synthetic construct
  source 1..75: mol_type = other DNA
atttcagattatcaatgatgaattatatcttgatggcaacgctcgtcagaacctggccactttctgccagacctg

SEQ ID NO: 14074 - DNA, 75 bp, synthetic construct
  source 1..75: mol_type = other DNA
tccggcgcttcgtgatctgctgcaggcaaaacaccgcacacaaaaggcggtggatgagctggtggattgcgtggc

SEQ ID NO: 14075 - DNA, 75 bp, synthetic construct
  source 1..75: mol_type = other DNA
ttagcccggcatgaaggctataaatcttttttttggcgcccgccgggtattaacagaaaaatcagagtggtgtgt

SEQ ID NO: 14076 - DNA, 75 bp, synthetic construct
  source 1..75: mol_type = other DNA
gaaagcccgtcagcaatccccggctggctgcgtgatggtatttactgctcgcatccgtcagggggaatactatgc

SEQ ID NO: 14077 - DNA, 75 bp, synthetic construct
  source 1..75: mol_type = other DNA
cgctgcacagggtacgaataacacgcagattgctacgaccgcttatgtaagagctgccatatccgcattggttgg

SEQ ID NO: 14078 - DNA, 75 bp, synthetic construct
  source 1..75: mol_type = other DNA
atgaataaggttattgcggtttcagcgcttgccatggcaggcatgttttcgacccaggctctggctgatgagagc

SEQ ID NO: 14079 - DNA, 75 bp, synthetic construct
  source 1..75: mol_type = other DNA
ttaccattgaggccaccagcgaacaggaagcacgccagcaatccccggctggctgcgtgatggtattcgctgccc

SEQ ID NO: 14080 - DNA, 75 bp, synthetic construct
  source 1..75: mol_type = other DNA
tggcaggctctgatttgtatgtgttcaggccggtggcacatacggtggattttcatatccgcgtgacgccggaca

SEQ ID NO: 14081 - DNA, 75 bp, synthetic construct
  source 1..75: mol_type = other DNA
tcggcaacgagcttccggcgtctccagtagagtggctgacggataatggttcatgctaccgggctaatgaaacac

SEQ ID NO: 14082 - DNA, 75 bp, synthetic construct
  source 1..75: mol_type = other DNA
caatgaacatgctgcctgacctgtgcgatgagtcctggctggcgcgacatgctgcgatgaaacggtgtccgcgca

SEQ ID NO: 14083 - DNA, 75 bp, synthetic construct
  source 1..75: mol_type = other DNA
cgacgtattccggtccggtgatgccgtggatcgacccggttaaggaagctgaagcctggagaattcagatccggg

SEQ ID NO: 14084 - DNA, 75 bp, synthetic construct
  source 1..75: mol_type = other DNA
taacgcaggatttaacgcaatttctcgccagcttgccggaagatgatcgcatcaaagcgattaatgaaatccgca

SEQ ID NO: 14085 - DNA, 75 bp, synthetic construct
  source 1..75: mol_type = other DNA
acttgcgtaccgatgagggctggttgtatctcgcagtagtcatcgacctgtggtcacgcgccgttattggctggt

SEQ ID NO: 14086 - DNA, 75 bp, synthetic construct
  source 1..75: mol_type = other DNA
caaaaagctggtcaatgaagaggtggaaaacaatgccgcgaccgataaagcgccatccactcatacttcaccggt

SEQ ID NO: 14087 - DNA, 75 bp, synthetic construct
  source 1..75: mol_type = other DNA
gataatctacgtcaggctgccgtactccgagcgcccaccgcgtccgtctcgcacattccagcaacgcatctggag

SEQ ID NO: 14088 - DNA, 75 bp, synthetic construct
  source 1..75: mol_type = other DNA
aaagcgattgagtcaattaagcaggctgatgcagctgttaagttggcacacgagaagttttcggcgctggcggcg

SEQ ID NO: 14089 - DNA, 75 bp, synthetic construct
  source 1..75: mol_type = other DNA
tttatttctgcgctgtggtcagtgcgttatatctggtgagcggcggttataaggtcatcagaaattatattcgcc

SEQ ID NO: 14090 - DNA, 75 bp, synthetic construct
  source 1..75: mol_type = other DNA
tttcccgcgtctgctgggataccggtggtattgaccaggacattgtgtatcagcgatccagaaaacacggcactt

SEQ ID NO: 14091 - DNA, 75 bp, synthetic construct
  source 1..75: mol_type = other DNA
acccggctctggatatggctggtgcattgaccacggtaaaacgccagcatcgccctgctctggatctttcacgcc

SEQ ID NO: 14092 - DNA, 75 bp, synthetic construct
  source 1..75: mol_type = other DNA
ttgtgactctggaaggtatggaaaaagcggtgcaggtgatcgtccgtattgccgagttgacggcgcaacggaagt

SEQ ID NO: 14093 - DNA, 75 bp, synthetic construct
  source 1..75: mol_type = other DNA
ctgtcgttaatgacctgcccgctgaaggtgagatcgattttacctggagtgaacgctatcaactcagcaaagact

SEQ ID NO: 14094 - DNA, 75 bp, synthetic construct
  source 1..75: mol_type = other DNA
aaatgtccctcagccgggcactggacaaatacctgaagactgtttccgtccataaaaaaggtcatctgcaggagt

SEQ ID NO: 14095 - DNA, 75 bp, synthetic construct
  source 1..75: mol_type = other DNA
gccatatacgtgacgacgaacctgtcaaaaaaatcgaagaaatggtttcgatagcaaatcgcaggaacatgcagt

SEQ ID NO: 14096 - DNA, 75 bp, synthetic construct
  source 1..75: mol_type = other DNA
aggcatttgtcatactggcagagtccagttcatttaacaatgctgctaaattactcaatattacgcaacctgcat

SEQ ID NO: 14097 - DNA, 75 bp, synthetic construct
  source 1..75: mol_type = other DNA
ttacaaagagcttacgcctgagattatgcgcaaccatttagctgtattcgagcgatatggaatagccccaaacga

SEQ ID NO: 14098 - DNA, 75 bp, synthetic construct
  source 1..75: mol_type = other DNA
gtcgttgaccgtcagatgagctacatgcgccagcagttgtctgcccgtatgctcagccgttaccagaataattat

SEQ ID NO: 14099 - DNA, 75 bp, synthetic construct
  source 1..75: mol_type = other DNA
atgccacgcattaaacctcttctggttctttgtgctgctttactgacggtcacacccgcagcgtcagcggatgtg

SEQ ID NO: 14100 - DNA, 75 bp, synthetic construct
  source 1..75: mol_type = other DNA
aaaacgatccacaaagagcatcagaagcagggaaaaaaggtggtcagaatagccatggtggcggccgtaaatctg

SEQ ID NO: 14101 - DNA, 75 bp, synthetic construct
  source 1..75: mol_type = other DNA
accttggtaattggataacatatgggccatctgggcaccccatttctaatatgcaaggtacgccagaaaaaccca

SEQ ID NO: 14102 - DNA, 75 bp, synthetic construct
  source 1..75: mol_type = other DNA
ttgcccctatatttccagacatctgttatcacttaacccattacaagcccgctgccgcagatattcccgtggcga

SEQ ID NO: 14103 - DNA, 75 bp, synthetic construct
  source 1..75: mol_type = other DNA
atgtttgagttttatatggcagaacttcttcgccaccgctggatgcgcctgcgcttatatcgtttccccggttct

SEQ ID NO: 14104 - DNA, 75 bp, synthetic construct
  source 1..75: mol_type = other DNA
atgttgtccgcttttactccccgcccgctgaaacgtctgttcacggccaaccagtgctggacatccttcctggat

SEQ ID NO: 14105 - DNA, 75 bp, synthetic construct
  source 1..75: mol_type = other DNA
atgccgcccggaaacgggggcaggaacccggtatcttctgcgccatccacacgtatggccgtcgtctcaactggc

SEQ ID NO: 14106 - DNA, 75 bp, synthetic construct
  source 1..75: mol_type = other DNA
tgctgaccatctgttgtgcccagaccttgatgacactatccgtgactttgctgcccagcttcgcaaaggaggcaa

SEQ ID NO: 14107 - DNA, 75 bp, synthetic construct
  source 1..75: mol_type = other DNA
tatttgcaatggcgggtatgttttcagcccaggccttggctgatgagagcaaaacaggtttttatatgaccggta

SEQ ID NO: 14108 - DNA, 75 bp, synthetic construct
  source 1..75: mol_type = other DNA
ggcgtggcatttcgctatcgcatcctcggcattggcccgtgggaacgacgcctgcgcaccctcatcgaacaatat

SEQ ID NO: 14109 - DNA, 75 bp, synthetic construct
  source 1..75: mol_type = other DNA
gaacctataccgattcatatcagttaggagatggggagctgcttgtttgtacggtgaatatccctgctggcgtat

SEQ ID NO: 14110 - DNA, 75 bp, synthetic construct
  source 1..75: mol_type = other DNA
aatccgattatcccttacattgaaggtgatggaatcggtgtagatgtaaccccagccatgctgaaagtggtcgac

SEQ ID NO: 14111 - DNA, 75 bp, synthetic construct
  source 1..75: mol_type = other DNA
ggcgtcaaaaaagagattgaacgactggagcgggagctgaaaccgaagccggagccgcagcccaaagcggccacc

SEQ ID NO: 14112 - DNA, 75 bp, synthetic construct
  source 1..75: mol_type = other DNA
agttgtagtagccacagcggtaagcggcatgtctgtttatgcacaggcagcggttgaaccgaaagaagacactat

SEQ ID NO: 14113 - DNA, 75 bp, synthetic construct
  source 1..75: mol_type = other DNA
atcgtcgccgtatagctgttgcggcactccatcgaataaaacgtaaaacaggtggtaatctgcttattgttgacc

SEQ ID NO: 14114 - DNA, 75 bp, synthetic construct
  source 1..75: mol_type = other DNA
cgccacagcaatccgaaaccactggcacgtggagaataagctgcactggcgtctggacgtggtaatgaatgaaga

SEQ ID NO: 14115 - DNA, 75 bp, synthetic construct
  source 1..75: mol_type = other DNA
aaattcgaacggattagctgggatgaagccctggatactatcgccagtagcctgaaaaaaaccgtcgaacaatat

SEQ ID NO: 14116 - DNA, 75 bp, synthetic construct
  source 1..75: mol_type = other DNA
ggtggtatgccggacccgacgctgccggaggtgtccggaggtcatggcagggcagacgatatcatcggactgtga

SEQ ID NO: 14117 - DNA, 75 bp, synthetic construct
  source 1..75: mol_type = other DNA
ttttgaggaaggaataaaacatcctgaacatgcaacaataccatatgacaacgacaatgaaagtaataaattgct

SEQ ID NO: 14118 - DNA, 75 bp, synthetic construct
  source 1..75: mol_type = other DNA
agatgcaacgattaagccgggtaatggtattgagcaagcaactcactggatgccgctaccggaaccgccgcagga

SEQ ID NO: 14119 - DNA, 75 bp, synthetic construct
  source 1..75: mol_type = other DNA
agtcccgtaaacaaatcgcactgatatttgatattggcctttccaccctttatcgttattttcctgcctcaccag

SEQ ID NO: 14120 - DNA, 75 bp, synthetic construct
  source 1..75: mol_type = other DNA
gcgtgaggatgttatggatcagatcgtccaggaaggcggtctggaatatgctactgatgtaataatacaccttca

SEQ ID NO: 14121 - DNA, 75 bp, synthetic construct
  source 1..75: mol_type = other DNA
gttgtctcactgtactgatgcagaggcgttacgcattgatggggtgataagtaaagcgcttgcacgttatcctgg

SEQ ID NO: 14122 - DNA, 75 bp, synthetic construct
  source 1..75: mol_type = other DNA
agaactcagagtgttcattcctgctgcgttaaaagcgcaattgcaggtgatgtgtgaagctgagggcgttaccca

SEQ ID NO: 14123 - DNA, 75 bp, synthetic construct
  source 1..75: mol_type = other DNA
aaagatgatgagacaccgttatccgttgcggagcgcgcccgccgaaatctggaggcagatgttgaactgttcatt

SEQ ID NO: 14124 - DNA, 75 bp, synthetic construct
  source 1..75: mol_type = other DNA
cgctggccagactgtcagggttccgtcataaaacggtgaaggtgccggaatggggaaatgtcagcgtggtgctgc

SEQ ID NO: 14125 - DNA, 75 bp, synthetic construct
  source 1..75: mol_type = other DNA
gcggttgtattcagccctaaaaagcgccagtgggggacgcaggatgatttgacctgcgcacagtggctctggaaa

SEQ ID NO: 14126 - DNA, 75 bp, synthetic construct
  source 1..75: mol_type = other DNA
ttgacatccgggtgccggaccatctgatagtcggtggcagccaggttttctcctttgcggaacacggtctgcttt

SEQ ID NO: 14127 - DNA, 75 bp, synthetic construct
  source 1..75: mol_type = other DNA
taatcacgaaacgaaaacactcggcagcgaaattctgaattttgcatgtgagtatgcaaaaactgctgccgaaaa

SEQ ID NO: 14128 - DNA, 75 bp, synthetic construct
  source 1..75: mol_type = other DNA
cgcttgccatggcaggcatgttttcgacccaggctctggctgatgaaagcaaaacaggcttttatgtgaccggta

SEQ ID NO: 14129 - DNA, 75 bp, synthetic construct
  source 1..75: mol_type = other DNA
gggaatactgctgcagatgggatccgttgttacggtgccattcaggatgcgcaggcgttgtccgaaggtgtggtg

SEQ ID NO: 14130 - DNA, 75 bp, synthetic construct
  source 1..75: mol_type = other DNA
aaggccaaagtcttcagttatatcgaccgtgtcgtgttctggaagctggctcactggctggcccgcaaataccgt

SEQ ID NO: 14131 - DNA, 75 bp, synthetic construct
  source 1..75: mol_type = other DNA
ccggaagtgccttttttgccatgtcagcgcaagccgctgatagagtatcaattgacgttaaggtgactctggaag

SEQ ID NO: 14132 - DNA, 75 bp, synthetic construct
  source 1..75: mol_type = other DNA
ccaccggtcttattaactgtattgcattttcagcacaggcagtggatacgacgattactgttacagggagggtat

SEQ ID NO: 14133 - DNA, 75 bp, synthetic construct
  source 1..75: mol_type = other DNA
aaatcgccgaactctccatgctttgcggcttcgatgatgatcttgccgcacagacaacacaggccagcaaccgca

SEQ ID NO: 14134 - DNA, 75 bp, synthetic construct
  source 1..75: mol_type = other DNA
gtgcaggatatgagtggaaaaaatcacccgaaagcggatgtggctaaagggcaatatggcaccgtgggtcagggg

SEQ ID NO: 14135 - DNA, 75 bp, synthetic construct
  source 1..75: mol_type = other DNA
tgctgtagcgctgcagcagattaaagagcgtggcgctttgccgatgattgatcgcggtgatatccgtcaggctat

SEQ ID NO: 14136 - DNA, 75 bp, synthetic construct
  source 1..75: mol_type = other DNA
caccgatgcccgttgtatccgtgaaatgcatgaagctccattacaggcgctcaatattctggccagatacccgca

SEQ ID NO: 14137 - DNA, 75 bp, synthetic construct
  source 1..75: mol_type = other DNA
ccgcaagaatccgtttggtgatatcaaatcggatggcacggtgaaaacggctctcgaaaaccttggtttgggaga

SEQ ID NO: 14138 - DNA, 75 bp, synthetic construct
  source 1..75: mol_type = other DNA
agcgggaaaaaattaaagggcaggttgttgaactcgtacgccagagtgggcgcgagacgttacgacaactggaag

SEQ ID NO: 14139 - DNA, 75 bp, synthetic construct
  source 1..75: mol_type = other DNA
tggctgtccattgccattcgtggtctgctggcaatgggagaaaaccgtaaccgtcgtgtgtggtttttctgtgat

SEQ ID NO: 14140 - DNA, 75 bp, synthetic construct
  source 1..75: mol_type = other DNA
ctggttacgggttattcccgtctgaacaggcgcgtaaggactggcaaaatgcccgcaaaaaactctcaagggcaa

SEQ ID NO: 14141 - DNA, 75 bp, synthetic construct
  source 1..75: mol_type = other DNA
cgttttccggaagatattgatggtgagggggatgccttctctcttgcctcaaaacgtaccaccacatttatgtcc

SEQ ID NO: 14142 - DNA, 75 bp, synthetic construct
  source 1..75: mol_type = other DNA
aggaagtattggctatcgagaaaataaaagctgctttttcagtcaacgtatctaagcctgacaagcctttccgta

SEQ ID NO: 14143 - DNA, 75 bp, synthetic construct
  source 1..75: mol_type = other DNA
actggcttatgaaagccgtcctaaagagattcgtgacggctggttgatgtggttaggtctcggtgaaccacgtta

SEQ ID NO: 14144 - DNA, 75 bp, synthetic construct
  source 1..75: mol_type = other DNA
attcgacgcatctcgctcagttcgcacagcatctgaaacccgctcccgtaacatcgcctttaattatattgtgag

SEQ ID NO: 14145 - DNA, 75 bp, synthetic construct
  source 1..75: mol_type = other DNA
cagaagcagagcgcagcactgacggatctgatggatcagtacgtgctcctggcataccgcacaacggttgacgat

SEQ ID NO: 14146 - DNA, 75 bp, synthetic construct
  source 1..75: mol_type = other DNA
agcgcagcactgacggatctgatggatcagtacgtgctcctggcataccgcacaacggttgacgataagcgcacc

SEQ ID NO: 14147 - DNA, 75 bp, synthetic construct
  source 1..75: mol_type = other DNA
acaggaagagcacgccattgtccaggtggaagaaatgcaggcggtgaatgccgtgctgtatggcaaatacaccat

SEQ ID NO: 14148 - DNA, 75 bp, synthetic construct
  source 1..75: mol_type = other DNA
tgaaaattgctggagatgcccagctttctaccccatgcactgacagcatcataaacagcattgcaacaggcattc

SEQ ID NO: 14149 - DNA, 75 bp, synthetic construct
  source 1..75: mol_type = other DNA
atgcctaaatcttacacaccaaactggttttttaccgctttacttgacaatcacatcaatcagttggtcgcacgc

SEQ ID NO: 14150 - DNA, 75 bp, synthetic construct
  source 1..75: mol_type = other DNA
tggatttcttctacaggaaagatacgcctgatttcttacaacctgatcatcgctggcttgaattgcagttgcgta

SEQ ID NO: 14151 - DNA, 75 bp, synthetic construct
  source 1..75: mol_type = other DNA
attcgaacgtctggagcgcaccgatcaccgctggctgacaccgggttatcgctcccttgccggacgcgaacgcct

SEQ ID NO: 14152 - DNA, 75 bp, synthetic construct
  source 1..75: mol_type = other DNA
ctgtccgtaccgggcatgacctgctccgcttgtccgatcaccgttaagaaggcgatttccaaggtcgaaggcgtc

SEQ ID NO: 14153 - DNA, 75 bp, synthetic construct
  source 1..75: mol_type = other DNA
tgtcggctgtggcacaggctgaacgccggaggatcctagaacgcacgaatgagggccgacaggaagcaaagctga

SEQ ID NO: 14154 - DNA, 75 bp, synthetic construct
  source 1..75: mol_type = other DNA
agcgttggggggcatgggcggcgagtgatagttcaggcgttgattattcacctatagccgctgggtttaagggac

SEQ ID NO: 14155 - DNA, 75 bp, synthetic construct
  source 1..75: mol_type = other DNA
tgatcagctaccgtccgaactggcgctggctggggatgcgggagaccgcagcaaaaagctttgtcgatgaggtgg

SEQ ID NO: 14156 - DNA, 75 bp, synthetic construct
  source 1..75: mol_type = other DNA
tgtttctccggatgacgggggcagctgttatctctggctcaaccgtggtcaaccacccgcagttaaccggcgacg

SEQ ID NO: 14157 - DNA, 75 bp, synthetic construct
  source 1..75: mol_type = other DNA
gacggtgagctgatcccgggcgaggcattaacccggatgaagggggctgccatgcgactgaccgggatgctgtac

SEQ ID NO: 14158 - DNA, 75 bp, synthetic construct
  source 1..75: mol_type = other DNA
cagagccgggggaaatccggcgttttgttcagcaggcggtggaccactggccaaatctgttggcatttcacttca

SEQ ID NO: 14159 - DNA, 75 bp, synthetic construct
  source 1..75: mol_type = other DNA
aaccattaatggcaatacggtgacgtggtcaaatcttgagcaggggatggggtcatatatttatacattctgggg

SEQ ID NO: 14160 - DNA, 75 bp, synthetic construct
  source 1..75: mol_type = other DNA
tcgccggatgatggcggaagctgtcatctctggcttgggcgtggcgtgccgcctgccgttaaccgtcgccgctga

SEQ ID NO: 14161 - DNA, 75 bp, synthetic construct
  source 1..75: mol_type = other DNA
gtctgaaaaagaacaacagcgatttgcacgatttattagtagattattatgtagtcggtatgacattcatgtcac

SEQ ID NO: 14162 - DNA, 75 bp, synthetic construct
  source 1..75: mol_type = other DNA
ggcgctttaaggaaacgaagaaatccggtctgatgggtaccggcggtattggtttcaccattggcagcagtaaga

SEQ ID NO: 14163 - DNA, 75 bp, synthetic construct
  source 1..75: mol_type = other DNA
tgtctgcgataccattccgctgagcgatgaaatcaaatcactgccgaacgtgcgtactctgaccctgtcaggtat

SEQ ID NO: 14164 - DNA, 75 bp, synthetic construct
  source 1..75: mol_type = other DNA
atggaaactgtatttgacgcactgaaagcaatgggaaaagccacgtcggtagaactggctgcgcgacttgatatc

SEQ ID NO: 14165 - DNA, 75 bp, synthetic construct
  source 1..75: mol_type = other DNA
ccgaaattttcaacgtggacccgcggacgattgaacgctggcagtctcagggactcccttgcgcctccaaaggta

SEQ ID NO: 14166 - DNA, 75 bp, synthetic construct
  source 1..75: mol_type = other DNA
tcccgtcaccatctggcatacactgctcacccgactgctggaccagcattacggcctcacactgaatgacacacc

SEQ ID NO: 14167 - DNA, 75 bp, synthetic construct
  source 1..75: mol_type = other DNA
gtgaaccgcgacggaacattgaaaggttatagtctggatgttctgtctaacaccggcgcttatgcatctcacggg

SEQ ID NO: 14168 - DNA, 75 bp, synthetic construct
  source 1..75: mol_type = other DNA
taccgttttctgacatccgcgaggagctgccgcgcggcacgtttgcttatacccatgttccgacgatgattattc

SEQ ID NO: 14169 - DNA, 75 bp, synthetic construct
  source 1..75: mol_type = other DNA
atcgcagtgatggcctgactgtcactgaccttgagcatatcagccagagtatcggcgatatcctgcgcacgccgg

SEQ ID NO: 14170 - DNA, 75 bp, synthetic construct
  source 1..75: mol_type = other DNA
tcagccaggtaaagcaaaaactgcttaatactccagaagctgttaaagggtatgaagatgctgacaaagaactgg

SEQ ID NO: 14171 - DNA, 75 bp, synthetic construct
  source 1..75: mol_type = other DNA
atccgcatcacatcattggtcatggactgggagggatgggaacaaaggctgatgatttgtttgttattccgctgt

SEQ ID NO: 14172 - DNA, 75 bp, synthetic construct
  source 1..75: mol_type = other DNA
gtgggtgaaggaactatgtcagcattgccatggtaagggagaagtcagcacagcgtgcagagggtgtaagggtaa

SEQ ID NO: 14173 - DNA, 75 bp, synthetic construct
  source 1..75: mol_type = other DNA
atggatgaagaaagggtgttttcactcagctatgagcagttgacccgaatagcggaaaaaaatatccgtgaatgt

SEQ ID NO: 14174 - DNA, 75 bp, synthetic construct
  source 1..75: mol_type = other DNA
gggcgtaaaggtgatccaggtagcgagtatcgcgtatggggtgaggatgaaagcatgggtaacgcggcaatcacg

SEQ ID NO: 14175 - DNA, 75 bp, synthetic construct
  source 1..75: mol_type = other DNA
gcgttttgctcgttggtcagagatcgatttcgaagcgtctatatggactatcccaccggagcgggagcctattcc

SEQ ID NO: 14176 - DNA, 75 bp, synthetic construct
  source 1..75: mol_type = other DNA
attactccccgaaatctccaaaactgagcgatgacgcaccggcgacaggctctggtggtttaacaattacggatg

SEQ ID NO: 14177 - DNA, 75 bp, synthetic construct
  source 1..75: mol_type = other DNA
gggaactggttattcacccgcattttgttctggtttatgaggtcgacagccagtggggaaaagtgtatatcctgc

SEQ ID NO: 14178 - DNA, 75 bp, synthetic construct
  source 1..75: mol_type = other DNA
taactactccatataccgcaaagccgtcgaagaccttgccacgcgcgggttcagcattgttaacagtcagggcag

SEQ ID NO: 14179 - DNA, 75 bp, synthetic construct
  source 1..75: mol_type = other DNA
tccagcaaatcaccgcgaaggacgaattccttaacatcaaggggagtgcccgcgacgatatccttgcggctcacc

SEQ ID NO: 14180 - DNA, 75 bp, synthetic construct
  source 1..75: mol_type = other DNA
gaaaaccgtaaccgaatcgcagtctcttgcgtcaccgctggatgtaaaaacatcatattcagttgatggaattca

SEQ ID NO: 14181 - DNA, 75 bp, synthetic construct
  source 1..75: mol_type = other DNA
tattcaaccggctttccggtaccctggtgatcagagcgcgctgcggcaataacattactggcctggcatgttgca

SEQ ID NO: 14182 - DNA, 75 bp, synthetic construct
  source 1..75: mol_type = other DNA
gtaacgagctggagcaatataatttatggctggattatctggacgcactggaactggttgatccctccagtgctc

SEQ ID NO: 14183 - DNA, 75 bp, synthetic construct
  source 1..75: mol_type = other DNA
tcccggagcagaagcggattgtgaatttacgctctcaggtgacgatggcgctgaaaaaatatcgcccacaggccg

SEQ ID NO: 14184 - DNA, 75 bp, synthetic construct
  source 1..75: mol_type = other DNA
cagagcaacatgtacgaagtctgtttacagctaccagccagacttgtttcaggactgcggaggtgcgagtactta

SEQ ID NO: 14185 - DNA, 75 bp, synthetic construct
  source 1..75: mol_type = other DNA
tctcctggagcatttttggagtttttggcaaaaatatttaccctgggttatgtggattttagcaaacgctccaac

SEQ ID NO: 14186 - DNA, 75 bp, synthetic construct
  source 1..75: mol_type = other DNA
aattggcaccggcaaagcactttctcccatcatttctgaacaagccagaaagcaaggcagttacatcattgtcag

SEQ ID NO: 14187 - DNA, 75 bp, synthetic construct
  source 1..75: mol_type = other DNA
ttgtcctttggtgtctatccaacagtcaccctcgcagatgccagacaaaaacgcgaagacgcaaagaaactactc

SEQ ID NO: 14188 - DNA, 75 bp, synthetic construct
  source 1..75: mol_type = other DNA
ggcggatatcgcacgtaaacagagttgtgtattcgctggcaccttattatgcagatccgggcaatgatttttttg

SEQ ID NO: 14189 - DNA, 75 bp, synthetic construct
  source 1..75: mol_type = other DNA
caaagcagtaatagccagatttattggtgattccaaaatgtggcttgaagcaaataaagcgatgaaatcagctat

SEQ ID NO: 14190 - DNA, 75 bp, synthetic construct
  source 1..75: mol_type = other DNA
catccggaaaacatactgggcctggacacaagaagagtggttagaagttatttgcaacagcgaaggggaatttcg

SEQ ID NO: 14191 - DNA, 75 bp, synthetic construct
  source 1..75: mol_type = other DNA
ttcggtcagtgggaatatgaattcaaaggcaaccgtgctgaatctcaaggttcttccaaagacaaaacccgtctt

SEQ ID NO: 14192 - DNA, 75 bp, synthetic construct
  source 1..75: mol_type = other DNA
tggaggtgaaatcaggcagaacagaatatatcctctcaccggtttttgagcctgtatggaatcagaccgggaaaa

SEQ ID NO: 14193 - DNA, 75 bp, synthetic construct
  source 1..75: mol_type = other DNA
cgatgaaaattcgagtgggaaatccattgcgaaaactggttctgattaagctggctgataatgccagcgatcagg

SEQ ID NO: 14194 - DNA, 75 bp, synthetic construct
  source 1..75: mol_type = other DNA
ggcaactggatctggatgcctggcgcgatttttacatatcgtatctgaggagaagtaaaaacgatgtgcctgatg

SEQ ID NO: 14195 - DNA, 75 bp, synthetic construct
  source 1..75: mol_type = other DNA
ttcttattatttcggtggtttgtgcaattggtattatgcgaattattaattcagtaaaaaagattgaacgctttt

SEQ ID NO: 14196 - DNA, 75 bp, synthetic construct
  source 1..75: mol_type = other DNA
cacccttctgataagctttccttggatgattaccagactgaatacacagccaaagatttttacctcattctgctc

SEQ ID NO: 14197 - DNA, 75 bp, synthetic construct
  source 1..75: mol_type = other DNA
tggccacgctgattgccgccagtgtgaatgcagcgacggtcgatctgcgtatcatggaaaccactgatctgcata

SEQ ID NO: 14198 - DNA, 75 bp, synthetic construct
  source 1..75: mol_type = other DNA
gtgtggcgcagatgctggcaccgaaagccaggacgcccacggcagccagtacagataacggcaaacagaacacgt

SEQ ID NO: 14199 - DNA, 75 bp, synthetic construct
  source 1..75: mol_type = other DNA
tgtacggtgaaatgcgtgtggggtcacgggtaatttcgcaggaaatcagcacggcagacgaaggggatggtggtg

SEQ ID NO: 14200 - DNA, 75 bp, synthetic construct
  source 1..75: mol_type = other DNA
atgtcccgttttatcctgggtgactgcgtgcgtgttatggccacgattcctgataacgccattgatttcatctta

SEQ ID NO: 14201 - DNA, 75 bp, synthetic construct
  source 1..75: mol_type = other DNA
tgttcgaagaaagtgctgggtgtctgtctggagaaaaaacgcagctactgtcagtttgattcgaagctggcgcag

SEQ ID NO: 14202 - DNA, 75 bp, synthetic construct
  source 1..75: mol_type = other DNA
cggtttcctgatttctataatgaagaaatattcagggaggtgatcgaagagaacgagtcaacatttaaagaactt

SEQ ID NO: 14203 - DNA, 75 bp, synthetic construct
  source 1..75: mol_type = other DNA
gacgagctgttgccagaaacgcgcccctgttcagaggcgcggtataccataaaaattaacagttcagataactcg

SEQ ID NO: 14204 - DNA, 75 bp, synthetic construct
  source 1..75: mol_type = other DNA
ttccgctgtatggatgactattacaccagtattgatatggcgaccgcactgcatccacagaccctactgacgctg

SEQ ID NO: 14205 - DNA, 75 bp, synthetic construct
  source 1..75: mol_type = other DNA
ttggtaatacatcgggcgtcatcccgggcaaaaccattacggaacgacaggcagcggaagggctgatctccaacg

SEQ ID NO: 14206 - DNA, 75 bp, synthetic construct
  source 1..75: mol_type = other DNA
caccgactatttgcaacagtgccacttcgacgactacctgctgccggccgagaagttcgccgcactcaagcgcga

SEQ ID NO: 14207 - DNA, 75 bp, synthetic construct
  source 1..75: mol_type = other DNA
gacggtgcggtgatccacattgttccccggcttgccggtgcaaagcatggcggaatttttcagaccatcctgggt

SEQ ID NO: 14208 - DNA, 75 bp, synthetic construct
  source 1..75: mol_type = other DNA
tcactttcatcaacgggttttcaaaaactcccttcaggtctgattattcagtggggtattgtcagtggagcatca

SEQ ID NO: 14209 - DNA, 75 bp, synthetic construct
  source 1..75: mol_type = other DNA
gggagagctgagggaatttgaactggcagacggaaactggctactggacaatgcctggtatgaaagaaacatggc

SEQ ID NO: 14210 - DNA, 75 bp, synthetic construct
  source 1..75: mol_type = other DNA
agagcgcggtgagaccggacctgcggggccgaaaggggaacccggggaacgtggtccgcaaggattacagggccc

SEQ ID NO: 14211 - DNA, 75 bp, synthetic construct
  source 1..75: mol_type = other DNA
tcactgcgacgctgaccgggccgaccggttcgattgacctcgggtacggttcggcaagttctgaagaggggattg

SEQ ID NO: 14212 - DNA, 75 bp, synthetic construct
  source 1..75: mol_type = other DNA
tgaccttggattcgacgcctctcgtgtcgtgccaacagctaatgaaaaccgtcctcgtaatattgcctttaatta

SEQ ID NO: 14213 - DNA, 75 bp, synthetic construct
  source 1..75: mol_type = other DNA
ggatgagtggctccggaaaaaccaccatgattgagcaaattatggactactttccccaggtcattgagcacagta

SEQ ID NO: 14214 - DNA, 75 bp, synthetic construct
  source 1..75: mol_type = other DNA
cgttataaacgttaccctggcgatgccagaaaacgtgcacgaaccggcacagccgtcgtgacttttaccgtaaac

SEQ ID NO: 14215 - DNA, 75 bp, synthetic construct
  source 1..75: mol_type = other DNA
tcttgttgaggttagcatacccggagaactgctgacagatttccggcagatacagaataatgtggctgatgacct

SEQ ID NO: 14216 - DNA, 75 bp, synthetic construct
  source 1..75: mol_type = other DNA
cgttttcgcgaagtggagcgtattgttgccgcgcgtggactggaaatgacaggtgttgacctcgaaacaatggaa

SEQ ID NO: 14217 - DNA, 75 bp, synthetic construct
  source 1..75: mol_type = other DNA
aggggctgccggacggctcctttacccgcgaacaggcggaagccgttgccgcacagtaccggaacgtctttatcg

SEQ ID NO: 14218 - DNA, 75 bp, synthetic construct
  source 1..75: mol_type = other DNA
atgaaccagctacctcgccgtgcgctttcgcgttatggtctgacttttcagggaaatatcctttcagtaaactgt

SEQ ID NO: 14219 - DNA, 75 bp, synthetic construct
  source 1..75: mol_type = other DNA
tgaaccgtcgatatgaaaaagcgagcatcatactgacgtcaaacaaagggttcgcagactggggagaaatgttcg

SEQ ID NO: 14220 - DNA, 75 bp, synthetic construct
  source 1..75: mol_type = other DNA
tgccacgacaatgcttaatgcgctagcaggtaaacaaccgctggacaatacgctgactaatttgagtggaaagga

SEQ ID NO: 14221 - DNA, 75 bp, synthetic construct
  source 1..75: mol_type = other DNA
gcgtgcgagttatggccacgtttccggacaatgttgtcgatttcatcatcaccgacccaccttatctggtcggtt

SEQ ID NO: 14222 - DNA, 75 bp, synthetic construct
  source 1..75: mol_type = other DNA
cggcagaaaccaagcgccagtcactggctgatgcggcaatggcttccataagtctgattcagttgaagttgcagg

SEQ ID NO: 14223 - DNA, 75 bp, synthetic construct
  source 1..75: mol_type = other DNA
cacgtttgataactgggaaggctggaatgagcaacaggtacagtttttactggaaagtaatcccagacggaacag

SEQ ID NO: 14224 - DNA, 75 bp, synthetic construct
  source 1..75: mol_type = other DNA
ctgatggaaaacgcggcgaagcaatttaacaacattggcgcgacgactcctgttgttccatttcgtattttgctg

SEQ ID NO: 14225 - DNA, 75 bp, synthetic construct
  source 1..75: mol_type = other DNA
cgatgaatctaataacgttcgtaaactatatctatccaaacaaattgatggttataacattgaccatgatccaga

SEQ ID NO: 14226 - DNA, 75 bp, synthetic construct
  source 1..75: mol_type = other DNA
ccttacctccaaatgtgatcgtaccaactctggcagacaggggtatttatattgcttctgaatcaagcttttatc

SEQ ID NO: 14227 - DNA, 75 bp, synthetic construct
  source 1..75: mol_type = other DNA
gtgaacagtgtgactggttatggaacgccatgcaggtccggtgtgtgggaaccccgctgaatccccttaccccgg

SEQ ID NO: 14228 - DNA, 75 bp, synthetic construct
  source 1..75: mol_type = other DNA
ttcacgtttgaatggaaaggtctgaagaaattatgcgtggcagtctcctttcggtcaataatagcagaacaaaag

SEQ ID NO: 14229 - DNA, 75 bp, synthetic construct
  source 1..75: mol_type = other DNA
tttcattacgcggacgttctgatgggggcttctgtcttttcagacctgtcatttgtctgttactgatgatgttgt

SEQ ID NO: 14230 - DNA, 75 bp, synthetic construct
  source 1..75: mol_type = other DNA
atgagcgccgcgcttcaatacttcgaagaaaatttaccccaccgtccctatcacacggatgatctcgctttcggc

SEQ ID NO: 14231 - DNA, 75 bp, synthetic construct
  source 1..75: mol_type = other DNA
cgggctattggcaagagcattgcgaaatatacacacaggaaattctcaccagagggattttccgctgtacaggcc

SEQ ID NO: 14232 - DNA, 75 bp, synthetic construct
  source 1..75: mol_type = other DNA
ggggaaacacatcccgattttttgaagcaatatggtgattttgaaaatggtattcctgttcacgataccattgcc

SEQ ID NO: 14233 - DNA, 75 bp, synthetic construct
  source 1..75: mol_type = other DNA
agttattagtgaacggaaaagtcagggaacggattgccacacatatcgtgacaggcgctcacgggtatgaaacgc

SEQ ID NO: 14234 - DNA, 75 bp, synthetic construct
  source 1..75: mol_type = other DNA
taaatgctgccaatcagtatgcccgggatgtcgtgcgcggaaagattgtggcctgccagtttgtgattcaggcct

SEQ ID NO: 14235 - DNA, 75 bp, synthetic construct
  source 1..75: mol_type = other DNA
taacgatgaactgttcgggatcatctataccgttgatgaaggtgacgactggaccgacccgcaggtgctggaaaa

SEQ ID NO: 14236 - DNA, 75 bp, synthetic construct
  source 1..75: mol_type = other DNA
cctgtccaccctggtagctgcgcatatgagtatgtgccttgatgccgcttgtggcgatttgtatgccaccgatga

SEQ ID NO: 14237 - DNA, 75 bp, synthetic construct
  source 1..75: mol_type = other DNA
tgtgcgactggatgtatcccggctggcgacgttacttatcagccgccatgatggcgtgctgccgccggtcctggc

SEQ ID NO: 14238 - DNA, 75 bp, synthetic construct
  source 1..75: mol_type = other DNA
actatccgggctggatcagcatttatgtgcgactggatatatcccggctggcgacgttacttatcagccgccatg

SEQ ID NO: 14239 - DNA, 75 bp, synthetic construct
  source 1..75: mol_type = other DNA
ctgccagtgacttctctcggcctgaaatccgccccggcgatattttccgtgataactacggcggtacggtaacga

SEQ ID NO: 14240 - DNA, 75 bp, synthetic construct
  source 1..75: mol_type = other DNA
tctcatgaactggtgaacgaagagggcgacacgctggatatggaagacgtggtaaacgccagcagcagcaacccg

SEQ ID NO: 14241 - DNA, 75 bp, synthetic construct
  source 1..75: mol_type = other DNA
cggcaggccaaacccgacctggaccaacgcgacagtaagacaaagcagcgattatctggtcggcatgtttgctgc

SEQ ID NO: 14242 - DNA, 75 bp, synthetic construct
  source 1..75: mol_type = other DNA
accgtggcatttgaagagaagtatggttcccaactggagctgatatttcgttttatcgatcgcgcactggcgatt

SEQ ID NO: 14243 - DNA, 75 bp, synthetic construct
  source 1..75: mol_type = other DNA
gaacagccaagccaacggataagcaatataagctgaccgatggcaacggtatgcaccttcttgttcatccaaatg

SEQ ID NO: 14244 - DNA, 75 bp, synthetic construct
  source 1..75: mol_type = other DNA
ctggctctgggtgtttaccctgacgtatctcttgcagatgccagagctcgtcgcgatgacgctcgtaagctttta

SEQ ID NO: 14245 - DNA, 75 bp, synthetic construct
  source 1..75: mol_type = other DNA
gctggcggtcagcgtggctattccgggatggcagtttctgacacagccatcaccggaggagcagcattttacctg

SEQ ID NO: 14246 - DNA, 75 bp, synthetic construct
  source 1..75: mol_type = other DNA
ggccggacatatattgcctcggcaaacaatattaaaaagcgaaagctttatattcgtaacctgaccacaaaaaca

SEQ ID NO: 14247 - DNA, 75 bp, synthetic construct
  source 1..75: mol_type = other DNA
cgtagcggtgatgtccgggatggtgtgttcggctggtttatgttccgactcgtcctgctgctgatctgcagtatc

SEQ ID NO: 14248 - DNA, 75 bp, synthetic construct
  source 1..75: mol_type = other DNA
gcgtatacgggggtacgcgcctactggcttgatcttaattacgggaaaaagaaaaaagtcagcgtgaaacgccgc

SEQ ID NO: 14249 - DNA, 75 bp, synthetic construct
  source 1..75: mol_type = other DNA
atggacgtgacaaacgatgattacatccgcctgttatcggcactgttgccgcccggtccggcgtggtcagccagc

SEQ ID NO: 14250 - DNA, 75 bp, synthetic construct
  source 1..75: mol_type = other DNA
cgtgatataggtattgtatggggtgatacagataatgtcctactttcagaaaaagaccaaaaacagccttctctt

SEQ ID NO: 14251 - DNA, 75 bp, synthetic construct
  source 1..75: mol_type = other DNA
gttcctcctgttgaacgtcgggggagggaagttttatatgacgttaaaactgtactggagatagatcgcgagcgg

SEQ ID NO: 14252 - DNA, 75 bp, synthetic construct
  source 1..75: mol_type = other DNA
tccgacttttggaaaatgggttggcgtgaatctttccgctgagaataaacgtcagttgtggatcccagaagggtt

SEQ ID NO: 14253 - DNA, 75 bp, synthetic construct
  source 1..75: mol_type = other DNA
tttgcaacttcaggaaacagccaacagcagcaaagtagcaatcatcaaaatcatcctgaatacgacgattcaatt

SEQ ID NO: 14254 - DNA, 75 bp, synthetic construct
  source 1..75: mol_type = other DNA
tgtcggtcgtccccatgaccgcatcgacggaccgctgaaaactaccggcacggcacgctacgcctacgaatggca

SEQ ID NO: 14255 - DNA, 75 bp, synthetic construct
  source 1..75: mol_type = other DNA
ctgtcgccaggccatgcctacgggatgtttatggaacgttttaacgagttatcggagttacgcaaatgcgcatga

SEQ ID NO: 14256 - DNA, 75 bp, synthetic construct
  source 1..75: mol_type = other DNA
agtataccaacaccttcagactgcactggctggcggtaaaacgtgaacatatgatctggcgctgcgataacgatc

SEQ ID NO: 14257 - DNA, 75 bp, synthetic construct
  source 1..75: mol_type = other DNA
ttctgtctcagtaaatcaggctcttaccgacaaattcctgagtttaccgtcagaactcagaaaatcactgacatg

SEQ ID NO: 14258 - DNA, 75 bp, synthetic construct
  source 1..75: mol_type = other DNA
atccacggtattgctcgtggtactgcacaggtcactattaaacaaaatgggtatgacatttataatagtacggtg

SEQ ID NO: 14259 - DNA, 75 bp, synthetic construct
  source 1..75: mol_type = other DNA
aacggtctgaaaaaaatccgtttcccggagaagagcggcaggatgcaggatcacggtgtgattgctgttgatacc

SEQ ID NO: 14260 - DNA, 75 bp, synthetic construct
  source 1..75: mol_type = other DNA
atcctgtgatgacatggtgtgtcagcaacgtgattggaaagcacattcccggcgacgatgatgttgttcgtccga

SEQ ID NO: 14261 - DNA, 75 bp, synthetic construct
  source 1..75: mol_type = other DNA
tttgtgccgttatttctggtgcagaaggctgggaagatatagaggattttggggaaacacatcccgatgttttga

SEQ ID NO: 14262 - DNA, 75 bp, synthetic construct
  source 1..75: mol_type = other DNA
agcgctggcttttgctattaagtgggtggcggtcggtattgctgtgtctccgatgctgtatgggctggcaaaact

SEQ ID NO: 14263 - DNA, 75 bp, synthetic construct
  source 1..75: mol_type = other DNA
tgaaacgaagttgcataacggttccgggcaacgtaattatggttgcagtcgtgggccgggacgtctactggatgg

SEQ ID NO: 14264 - DNA, 75 bp, synthetic construct
  source 1..75: mol_type = other DNA
agaaaaactacgcacttacttttcaaatgtatgtgctgattttgaagctgaactggttgaaatggatggcgaacc

SEQ ID NO: 14265 - DNA, 75 bp, synthetic construct
  source 1..75: mol_type = other DNA
gtgcataaggccgtggaactggtcgccactgagcagcagaacctgagtgcgcgcaccgaaaaatccctgtctgag

SEQ ID NO: 14266 - DNA, 75 bp, synthetic construct
  source 1..75: mol_type = other DNA
caaagcgccaacgccagcagcagggaataacaccacgcagattgcgaccaccgcgtttgttcaggcggctctgac

SEQ ID NO: 14267 - DNA, 75 bp, synthetic construct
  source 1..75: mol_type = other DNA
ttgtccctccgtcagcatttgccgcaggcaccggtaaggcgtttaccggtgcttatgcatggaacgcgccacgcg

SEQ ID NO: 14268 - DNA, 75 bp, synthetic construct
  source 1..75: mol_type = other DNA
ttccccgggttaatccggcaaacccaccggaaaatcaggtcagccgccgccgatggcgcttacgatacccggcta

SEQ ID NO: 14269 - DNA, 75 bp, synthetic construct
  source 1..75: mol_type = other DNA
aacagcacttccgagtcacaggcggcaacgccaaaagccgttaaggccgcgtatgacctggctaacgggaaatac

SEQ ID NO: 14270 - DNA, 75 bp, synthetic construct
  source 1..75: mol_type = other DNA
cgcagtgtcagttgccgggtggcagaagatgcgcggcgtatccgggcggcgctgaccacaaccggtcagacgttg

SEQ ID NO: 14271 - DNA, 75 bp, synthetic construct
  source 1..75: mol_type = other DNA
agcgtctggtcattctgcggtcgctggcagattacaacggtgaactgggtgaatccgtgctccaggactgtctgg

SEQ ID NO: 14272 - DNA, 75 bp, synthetic construct
  source 1..75: mol_type = other DNA
gagaacgataatgttcttacaaatttatttaacagcgttaaaaacttcctgattgggttaggaaaggaaggcgac

SEQ ID NO: 14273 - DNA, 75 bp, synthetic construct
  source 1..75: mol_type = other DNA
accggccgggggcaggatgtggcggaaggccgcgccagcgttccgggtgtgaagaaaccacgcgcaagggggtaa

SEQ ID NO: 14274 - DNA, 75 bp, synthetic construct
  source 1..75: mol_type = other DNA
atgaaaattaaaactctggcaatcgttgttctgtcggctctgtccctcagttccgcagcggctctggccgatact

SEQ ID NO: 14275 - DNA, 75 bp, synthetic construct
  source 1..75: mol_type = other DNA
gcgtcacttccggctggtactgaccacgcaggcgcagcgggcagaagaagcccggcagcaggccatttccggcgg

SEQ ID NO: 14276 - DNA, 75 bp, synthetic construct
  source 1..75: mol_type = other DNA
aacggctggttcgccgcgcgtccgtcaggcacggaagacgcatataagatctactgcgaaagcttcctcggtgaa

SEQ ID NO: 14277 - DNA, 75 bp, synthetic construct
  source 1..75: mol_type = other DNA
ttaaacttcacagcaggcagtatcttacctgagaatgagctagcatctttacgttatattgtgcagcaaaatcaa

SEQ ID NO: 14278 - DNA, 75 bp, synthetic construct
  source 1..75: mol_type = other DNA
gggagttcttgattatcttggtttgggagaaggctctgcattgcctgttggtgtacctgttccgtggccctccgc

SEQ ID NO: 14279 - DNA, 75 bp, synthetic construct
  source 1..75: mol_type = other DNA
aaggctgcatgttcggcaagaacatcaccagtcctgcaaatccgcgcgagacgcagccgcatttcttcgaatccc

SEQ ID NO: 14280 - DNA, 75 bp, synthetic construct
  source 1..75: mol_type = other DNA
caggcagtatcttacctgagaatgagctagcatctttacgttatattgtgcagcaaaatcaaaatgatactgtaa

SEQ ID NO: 14281 - DNA, 75 bp, synthetic construct
  source 1..75: mol_type = other DNA
ctccaggaggctgttggcttaccgaatctggcaccgcgctatgccattgatgctcctgctgacgcgcctgatggc

SEQ ID NO: 14282 - DNA, 75 bp, synthetic construct
  source 1..75: mol_type = other DNA
atggataacctacaaaggaaatctaccgggaagaattactggttctctgaagactccaccggaatcacaacctta

SEQ ID NO: 14283 - DNA, 75 bp, synthetic construct
  source 1..75: mol_type = other DNA
atcgggcagagttcagcatcaaagcgatgtgtcgtgtacttcgggttgcccgcagcggctggtatgtctggctct

SEQ ID NO: 14284 - DNA, 75 bp, synthetic construct
  source 1..75: mol_type = other DNA
ccggaaaccccaaaaccattgagcagtatcagcttacgaaaaaagctggcgttatctggctatatacagaagacg

SEQ ID NO: 14285 - DNA, 75 bp, synthetic construct
  source 1..75: mol_type = other DNA
aacggagcacacatcgccgggttagccgtgggtttagcgatggcttttgttgattcgctcaatgcgcgaaaacga

SEQ ID NO: 14286 - DNA, 75 bp, synthetic construct
  source 1..75: mol_type = other DNA
acgagacagcagagttgcccgacagcgaattctgagcatgctattgcgaacagacaaacgttatgcagggaagca

SEQ ID NO: 14287 - DNA, 75 bp, synthetic construct
  source 1..75: mol_type = other DNA
gcctgcccgctgcgccactggtgcggtacacgtatacggaagccggtgaactgctggcggtatatgaccgcagca

SEQ ID NO: 14288 - DNA, 75 bp, synthetic construct
  source 1..75: mol_type = other DNA
ggatggtcagggtggtatgccgtgagtggagcgtcacggataacgtccggtacagtgatttcagttgtacgattg

SEQ ID NO: 14289 - DNA, 75 bp, synthetic construct
  source 1..75: mol_type = other DNA
ctgcgctctctgcttctccggtactgacagcctgcctggttctcagcctgctggctgttgtcctggggccggcac

SEQ ID NO: 14290 - DNA, 75 bp, synthetic construct
  source 1..75: mol_type = other DNA
ttccagactaggagttatggcacatagagatatagatgctgagaaccatcgggggactggttccgattttcactg

SEQ ID NO: 14291 - DNA, 75 bp, synthetic construct
  source 1..75: mol_type = other DNA
gctggacaatatgtactgtgctgataacgggcggtggtatgaaaccccggtggactggtacggtctggcaagagc

SEQ ID NO: 14292 - DNA, 75 bp, synthetic construct
  source 1..75: mol_type = other DNA
atgaccccggcactgactgaaaaactggttgaaacagcccgcgcggcacgtgacgcggggcatggtaaacgcggt

SEQ ID NO: 14293 - DNA, 75 bp, synthetic construct
  source 1..75: mol_type = other DNA
ttgtcgcgctgcaaaaaggcgacacacaaaacacccacgcggcatggacgaaatacaaccttgccgccagaaccc

SEQ ID NO: 14294 - DNA, 75 bp, synthetic construct
  source 1..75: mol_type = other DNA
ctggatattgaagtgaatggctttaacggcggtgttctgaacggtgttccttctgcatatcactggtatacagaa

SEQ ID NO: 14295 - DNA, 75 bp, synthetic construct
  source 1..75: mol_type = other DNA
aagatgcgcggcgtatccgtgcggcgctgaccaccaccggtcagacgttgctgacccgccagacgcgccgctttc

SEQ ID NO: 14296 - DNA, 75 bp, synthetic construct
  source 1..75: mol_type = other DNA
tggaaattctgagtatccggaaaacccgtaatgagcaggcaggtatcgactggaacgcagtcttcagcgacagaa

SEQ ID NO: 14297 - DNA, 75 bp, synthetic construct
  source 1..75: mol_type = other DNA
atggagaaaactgaaacggcaatgaaagccatcacacacaatcttgatcgcgaactctggcgtgatctgatgcaa

SEQ ID NO: 14298 - DNA, 75 bp, synthetic construct
  source 1..75: mol_type = other DNA
tcagcggcaaaccgatccccgacagccgggaaaatatcatcattcggctggatgatcacatccgctccgttcagg

SEQ ID NO: 14299 - DNA, 75 bp, synthetic construct
  source 1..75: mol_type = other DNA
acatgcgaaaagcgaattgctaattggttggctgttgctgagtatgcgctgtacgttcccatgcgagaatcattc

SEQ ID NO: 14300 - DNA, 75 bp, synthetic construct
  source 1..75: mol_type = other DNA
caacacagcgagaaattgatcgcgctgaaactgatttactcatcaacctgtcaacgcttacccagcgcggtctgg

SEQ ID NO: 14301 - DNA, 75 bp, synthetic construct
  source 1..75: mol_type = other DNA
cataccggtgaattctcaccctgctggtatgaactcggccttctgcattttctgaacggggaacatgttaaggct

SEQ ID NO: 14302 - DNA, 75 bp, synthetic construct
  source 1..75: mol_type = other DNA
atgctcggtatctccaacagcgtggtttatcagctgacggactatatcggctacgacatcatgctgcagtatatt

SEQ ID NO: 14303 - DNA, 75 bp, synthetic construct
  source 1..75: mol_type = other DNA
taagaaccagcgacaggttaagttttaaagcggcaaacgctgcagattcgcgttttgagcattttcgccatatgg

SEQ ID NO: 14304 - DNA, 75 bp, synthetic construct
  source 1..75: mol_type = other DNA
tcacccttgccctggcgggctgtgcgctgttatcactccatatgggagtgatccccgtgccgtggcgcgcgctgc

SEQ ID NO: 14305 - DNA, 75 bp, synthetic construct
  source 1..75: mol_type = other DNA
tatgacatgtacctgaaatccctgcctgtaccgcagctcgctgacggaaagattgttattgatggtcgctacatg

SEQ ID NO: 14306 - DNA, 75 bp, synthetic construct
  source 1..75: mol_type = other DNA
cccgaccgaatccgtggccattgatattgcttatgaaggttccggcagtggtgactggcgcactgacggtttcat

SEQ ID NO: 14307 - DNA, 75 bp, synthetic construct
  source 1..75: mol_type = other DNA
gttcattcgcccggctttcgatacgacagaggaactggcagcacagattgccatacagcgaatgaatcaggctat

SEQ ID NO: 14308 - DNA, 75 bp, synthetic construct
  source 1..75: mol_type = other DNA
gtgctggcactgcgacaaccagctgcgcgaccagacctccgaatcactggaacatctggctcaacaaaacctggc

SEQ ID NO: 14309 - DNA, 75 bp, synthetic construct
  source 1..75: mol_type = other DNA
gtcgggatatgcaccctgccgaacagattgccggattccgcgcaatggcgcaggaaggcaaaacgcctgcacaaa

SEQ ID NO: 14310 - DNA, 75 bp, synthetic construct
  source 1..75: mol_type = other DNA
gactctgttcatagttgtcgtcggcgccggatacagcatctaccctgctcagggcagacgctatggcttgtattt

SEQ ID NO: 14311 - DNA, 75 bp, synthetic construct
  source 1..75: mol_type = other DNA
cagatgtactgatttttgaaccaaaagtgtttggggatgaacgtggtttttttatggaaagctttaatcaacgac

SEQ ID NO: 14312 - DNA, 75 bp, synthetic construct
  source 1..75: mol_type = other DNA
atgcgtaaactttatgccgccattttttccgcagccatttgtctggccgtatccggtgcgcctgcatgggcatct

SEQ ID NO: 14313 - DNA, 75 bp, synthetic construct
  source 1..75: mol_type = other DNA
tcgccacaaatccgcactggtcatgcagaagtacagccgtcagcaggcacgggaggcagagcagaaagcccgtgc

SEQ ID NO: 14314 - DNA, 75 bp, synthetic construct
  source 1..75: mol_type = other DNA
ggttgagccgtcaacaggctggcaggtacgctcctatttacgcgcggcgctgggcataaatcagactcatggggg

SEQ ID NO: 14315 - DNA, 75 bp, synthetic construct
  source 1..75: mol_type = other DNA
aaaatgtaatgataatctatcgggaagatgttgacttcagtatgtatgacagaaaactatcagatatttatcatg

SEQ ID NO: 14316 - DNA, 75 bp, synthetic construct
  source 1..75: mol_type = other DNA
atgaaactggaagatttaccaaaatactattccccaaaatcaccgggtctgacggatgcatcggcctcaacgtca

SEQ ID NO: 14317 - DNA, 75 bp, synthetic construct
  source 1..75: mol_type = other DNA
cattgcggcagagctggaaggcggctgtacgaattttgttttcagtggcaggcctggcacaggaaaaaaccacct

SEQ ID NO: 14318 - DNA, 75 bp, synthetic construct
  source 1..75: mol_type = other DNA
ggattatctggacgcactggagctgatcgatacttccggtgcgccagatattgaatggcctacgcctccggcagt

SEQ ID NO: 14319 - DNA, 75 bp, synthetic construct
  source 1..75: mol_type = other DNA
caacttcctgtcatgggcggcagacctctaaatcgtgttcaggcgctggcgaagatcgcagaaattaaagctaag

SEQ ID NO: 14320 - DNA, 75 bp, synthetic construct
  source 1..75: mol_type = other DNA
ggctgatcggtgtcgatgctattcgtggggctgcaatgcgagtaatcggtaacaaatttggtagctcgaaggagt

SEQ ID NO: 14321 - DNA, 75 bp, synthetic construct
  source 1..75: mol_type = other DNA
atatcgtcgccgttctcaacaacggagggagagcgcgaaaaatacttaccagtggaagaagccggaacgattgcg

SEQ ID NO: 14322 - DNA, 75 bp, synthetic construct
  source 1..75: mol_type = other DNA
agttccatcatggtgggggataaagcaagttacgcaaggtgcacggcaaggtatccatttaaaaacaattcgaac

SEQ ID NO: 14323 - DNA, 75 bp, synthetic construct
  source 1..75: mol_type = other DNA
atcagacaacgattgatcaccatatcagcgaattcctgaataaaggaaaactgaagcccgaaaacggcggctcag

SEQ ID NO: 14324 - DNA, 75 bp, synthetic construct
  source 1..75: mol_type = other DNA
cgccattcatcgtgaagagtcggtaaaacgtggtatgcctgttatcagagactgccagcgttgtggtggtcgtgg

SEQ ID NO: 14325 - DNA, 75 bp, synthetic construct
  source 1..75: mol_type = other DNA
tcccggtagcgataatcttaacgggattaacgtgaaataccgttatgaattcacggacacgctggggctggtgac

SEQ ID NO: 14326 - DNA, 75 bp, synthetic construct
  source 1..75: mol_type = other DNA
tccggatggcgagaaagtaccaactgcgaagattaccaaagcgtattttgaactgggaatgacatttccggaact

SEQ ID NO: 14327 - DNA, 75 bp, synthetic construct
  source 1..75: mol_type = other DNA
gcttgataatgtctggattgctataggtaaaggttcgaaggcctcatcagtgtcagcaggaggaactgcgagtgt

SEQ ID NO: 14328 - DNA, 75 bp, synthetic construct
  source 1..75: mol_type = other DNA
tgccacctttgctggtggccagaatgcgcagccacagttcagcttattttcgggagctggtggagacgcgggagc

SEQ ID NO: 14329 - DNA, 75 bp, synthetic construct
  source 1..75: mol_type = other DNA
tccggaaggctggcgataaagattattgccgagccaccggataagcgccgccgtgacctggacaatattctgaaa

SEQ ID NO: 14330 - DNA, 75 bp, synthetic construct
  source 1..75: mol_type = other DNA
gtttgatgaaatcaatattgtgcgcggtcagcgcgttcctggggggcggctgggcgtgaagatttaccccataat

SEQ ID NO: 14331 - DNA, 75 bp, synthetic construct
  source 1..75: mol_type = other DNA
ggttattcgactgtggcgtggtcccgcgcagcgttgcgtgaatcatatttctgaaccggataccgaaattccgcc

SEQ ID NO: 14332 - DNA, 75 bp, synthetic construct
  source 1..75: mol_type = other DNA
atgcacaaaacagaacccaaaatcgtcgcgcccggatacacaaatgaggaaatttacgagtggatggcaaagaag

SEQ ID NO: 14333 - DNA, 75 bp, synthetic construct
  source 1..75: mol_type = other DNA
ggtcggtaagcacggtatgtgggagatgccgggcgtaccggtggaagccttctccggacgctcacaggctatccg

SEQ ID NO: 14334 - DNA, 75 bp, synthetic construct
  source 1..75: mol_type = other DNA
acgctggcaggctgaaaatcaggaagggatggcagaggtcgccaggtttattgaaatgaacggctcttttgccga

SEQ ID NO: 14335 - DNA, 75 bp, synthetic construct
  source 1..75: mol_type = other DNA
aaatccagggcgctgatgaccggtattgatgaactggacgcaaaaacgggcggtatggagccaggcgacctggta

SEQ ID NO: 14336 - DNA, 75 bp, synthetic construct
  source 1..75: mol_type = other DNA
gatacttctggtgccctgttgtcgtggcgggtcagcattcaccactggagccgacggctcattcagtgaggccag

SEQ ID NO: 14337 - DNA, 75 bp, synthetic construct
  source 1..75: mol_type = other DNA
gtttaagccgtgggatggtcaggcgtccggaaaggctgtttatctgacttcgtaccccgtggacacgtcaaagca

SEQ ID NO: 14338 - DNA, 75 bp, synthetic construct
  source 1..75: mol_type = other DNA
gacaaagtctctccgtcccagtgggtggcaataggtgtgctgggaagtctgctgtttggcctgctgacgtatctg

SEQ ID NO: 14339 - DNA, 75 bp, synthetic construct
  source 1..75: mol_type = other DNA
tcaaagtcaaaaaaaggtgttttacgtggccttcattatcagttgcctccatttgcacaaggtaaattagttaga

SEQ ID NO: 14340 - DNA, 75 bp, synthetic construct
  source 1..75: mol_type = other DNA
tgaaaccggatgaaagtccggttctgatggcaacactgatggagtgcgacgaaaacaatcagccgctggcaggcg

SEQ ID NO: 14341 - DNA, 75 bp, synthetic construct
  source 1..75: mol_type = other DNA
accactgtctgcatgatgttcaggacatgagcgcacttaaccatcctcatgcagacctgagtaagggccagtacg

SEQ ID NO: 14342 - DNA, 75 bp, synthetic construct
  source 1..75: mol_type = other DNA
ataatcacgagtatcagtaaggatgtgtcgatgctgtggccagtgggacagagtgtggtggaggttgaggataca

SEQ ID NO: 14343 - DNA, 75 bp, synthetic construct
  source 1..75: mol_type = other DNA
taccagcgtcagctggctcgcgctatcaaacgcgctcgctacctgtccctgctgccgtacactgatcgccatcag

SEQ ID NO: 14344 - DNA, 75 bp, synthetic construct
  source 1..75: mol_type = other DNA
cggtgagggactgccattaccggatacattcgacagccctgatccacgtattaaacagttagcgcgtcgcagtac

SEQ ID NO: 14345 - DNA, 75 bp, synthetic construct
  source 1..75: mol_type = other DNA
aaaaccgcatttattcgtcagctgaaagaacagacaagtcgccagaaaatgaccacgacggaactgcttcgggca

SEQ ID NO: 14346 - DNA, 75 bp, synthetic construct
  source 1..75: mol_type = other DNA
gttggcttgcaggctttgcagggcatttcatctgtcatggatatgtataagcagatggatcagcagaagcgacag

SEQ ID NO: 14347 - DNA, 75 bp, synthetic construct
  source 1..75: mol_type = other DNA
actgcgccggatgctgttcggaacccgttctgaaaaactgcgtcgtgaggttgaacaggctgaagccctgctgaa

SEQ ID NO: 14348 - DNA, 75 bp, synthetic construct
  source 1..75: mol_type = other DNA
tgccggagacggtggcgctctattttgactatgaggcgtatgcgcgggatttattcctggactccttcaccttta

SEQ ID NO: 14349 - DNA, 75 bp, synthetic construct
  source 1..75: mol_type = other DNA
tgaagcagcaggaaaatttaagcagacaactgcgtgaaaaacctgaccatcagctgaaagcctgggcggagaaac

SEQ ID NO: 14350 - DNA, 75 bp, synthetic construct
  source 1..75: mol_type = other DNA
ctgaacaacccatgcgtcagtgggtgttgagcttcccgtttcagctgcgtttcctgtttgccagccggcccgaga

SEQ ID NO: 14351 - DNA, 75 bp, synthetic construct
  source 1..75: mol_type = other DNA
atcggtctgcaggctctgcagggaataacaagcacaatgcaaggattgcagcaatatgatcagcagaagcaagag

SEQ ID NO: 14352 - DNA, 75 bp, synthetic construct
  source 1..75: mol_type = other DNA
agctcaagttcgataagaagctgactaaccgttgtatcggactgacgttacacatcagcgcctcaaccgtttttg

SEQ ID NO: 14353 - DNA, 75 bp, synthetic construct
  source 1..75: mol_type = other DNA
atttaggtacggttgagccggattttgaaaataatatcctgtatggaaagctggcatttattcgtgatctggtga

SEQ ID NO: 14354 - DNA, 75 bp, synthetic construct
  source 1..75: mol_type = other DNA
gtgagcggggagcgctactgtacagcctgatcgggacgtgcaaactgaatgacgtggatccagaaagctaccttc

SEQ ID NO: 14355 - DNA, 75 bp, synthetic construct
  source 1..75: mol_type = other DNA
ctcagtgcgatgccatcgtgcaggcacctgcaccttcgcggcccatcgagcggggtatcgccggaccggggctgc

SEQ ID NO: 14356 - DNA, 75 bp, synthetic construct
  source 1..75: mol_type = other DNA
tatgtctcgccggggaaattgtcttgataatgcagttatagagagcttttttggaacattgaaatcagaatgtta

SEQ ID NO: 14357 - DNA, 75 bp, synthetic construct
  source 1..75: mol_type = other DNA
gggaggattacggtaaggacctgtggagtacttaccagaccatccaggagaacatgctgaaaggcgggatttccg

SEQ ID NO: 14358 - DNA, 75 bp, synthetic construct
  source 1..75: mol_type = other DNA
gaaagcgacatcataccgggagagcagaccgccaccagcatactgaagcagcgcacaaaaaatattgcgccgccg

SEQ ID NO: 14359 - DNA, 75 bp, synthetic construct
  source 1..75: mol_type = other DNA
tggtgaacacggtggcctctgaaaatccggatgaagccggacgttacagcatggatgttgagtacggtcagtaca

SEQ ID NO: 14360 - DNA, 75 bp, synthetic construct
  source 1..75: mol_type = other DNA
gcagaaagcgcacagtcagcggaacaaagcaggatagcggcggaagacgccgtaaaccgaatccccaccgtggtg

SEQ ID NO: 14361 - DNA, 75 bp, synthetic construct
  source 1..75: mol_type = other DNA
aaagcaggatagcggcggaagaagccgtaaaccgaatccccaccgtggtgggacctcccgggccaaagggggaac

SEQ ID NO: 14362 - DNA, 75 bp, synthetic construct
  source 1..75: mol_type = other DNA
atattctgaccggaagcgcaaagtcttttgctgatttaaacgcgcaggttgagcaactcagcaagcgttgttcag

SEQ ID NO: 14363 - DNA, 75 bp, synthetic construct
  source 1..75: mol_type = other DNA
atgaaatcattaaccacagaaacggcgctggatattctgattgtgtggctgcaggacaatatcgactgcgaatcg

SEQ ID NO: 14364 - DNA, 75 bp, synthetic construct
  source 1..75: mol_type = other DNA
ataaaacggattcggcagcactgttgtcctgtattgaacaggcgagggaggatatccataccctgcgccaactgc

SEQ ID NO: 14365 - DNA, 75 bp, synthetic construct
  source 1..75: mol_type = other DNA
taactcccgatacctgtgcgttgaaagcctggaaaggcagacacgcattcatcagttttgctaatccagctcaga

SEQ ID NO: 14366 - DNA, 75 bp, synthetic construct
  source 1..75: mol_type = other DNA
cgggcaacctttgccggatgatgccgatctgcgtaaagagcgcagcgacgaaatcccggaagcggcaaaagagat

SEQ ID NO: 14367 - DNA, 75 bp, synthetic construct
  source 1..75: mol_type = other DNA
tggattggtgtgttgctgttcatgatatgaatgccggatttgatgaaaagattttattcccctcatcagttgaaa

SEQ ID NO: 14368 - DNA, 75 bp, synthetic construct
  source 1..75: mol_type = other DNA
tgttttcagtcctgctgttaccggccacggcaatggccacaaccggaaatgcagagcaacagaacacacagcaaa

SEQ ID NO: 14369 - DNA, 75 bp, synthetic construct
  source 1..75: mol_type = other DNA
agagtctgtgcggttgcggaaagcatgatgactgtgaaaacgggcagtcgcttacagcacaactgcgactgggac

SEQ ID NO: 14370 - DNA, 75 bp, synthetic construct
  source 1..75: mol_type = other DNA
gagcataaggcatcatcagctcttgataatccacgttccagcaagttaacgaagcaacttgcagcctctgttttg

SEQ ID NO: 14371 - DNA, 75 bp, synthetic construct
  source 1..75: mol_type = other DNA
tcactctcatccggcgttatggcgtcagtcttattcatctggatgccagcgccgggtgtctgccggatttaccca

SEQ ID NO: 14372 - DNA, 75 bp, synthetic construct
  source 1..75: mol_type = other DNA
tggtaccggaactcgggatggtgctccttaagccgggccgtgaatcaatgtcagcattccataacggcagaatat

SEQ ID NO: 14373 - DNA, 75 bp, synthetic construct
  source 1..75: mol_type = other DNA
ttcaatgcgcaggccgatgagcctgaagtaatccctggcgacagcccggtggctgtcagtgaacagggcgaggca

SEQ ID NO: 14374 - DNA, 75 bp, synthetic construct
  source 1..75: mol_type = other DNA
atgttaacaaacctgaatcatgccgcaatgagtacacttcttggtgagaggattatggaccgcatgaccatgaac

SEQ ID NO: 14375 - DNA, 75 bp, synthetic construct
  source 1..75: mol_type = other DNA
cgtgagacgaaaaacgagcaggtggtactgcaccagattgttgaccgccggacggcatcactgcgcagtgtcggg

SEQ ID NO: 14376 - DNA, 75 bp, synthetic construct
  source 1..75: mol_type = other DNA
tcactggctggcccgcaaataccgtacaggtatcgcttccctgatgaggtggtggtgtaaatcaccgaaaccggg

SEQ ID NO: 14377 - DNA, 75 bp, synthetic construct
  source 1..75: mol_type = other DNA
aaacttattaatgaagccaacgagcacatgaacagcagacaatggccaggtaaagcggcgattggtcgcctgaaa

SEQ ID NO: 14378 - DNA, 75 bp, synthetic construct
  source 1..75: mol_type = other DNA
tacgtcatagcgcagaaagcataatcggcattctggaaaacattgccgggttcgaaccatctgatatcgacggcg

SEQ ID NO: 14379 - DNA, 75 bp, synthetic construct
  source 1..75: mol_type = other DNA
taaagaagcgcattgccttggcgatttgttgatgaaagccaattacggcggcctggatgtcgaaatcgcggcagt

SEQ ID NO: 14380 - DNA, 75 bp, synthetic construct
  source 1..75: mol_type = other DNA
ggtgctgaagttaaagatatttcaagattcgataatatctattgtgatcagttagcgcgtttatttacacaggaa

SEQ ID NO: 14381 - DNA, 75 bp, synthetic construct
  source 1..75: mol_type = other DNA
cgtttgagctggtaagccatgaagggttaagccgcaacgagcacgatcaaaagatggcggatgccattgatgctt

SEQ ID NO: 14382 - DNA, 75 bp, synthetic construct
  source 1..75: mol_type = other DNA
cggcaaaagtattaccagtgtaacaatctggaatgcggcgtatgcttctcaacactggaagctttccataaattc

SEQ ID NO: 14383 - DNA, 75 bp, synthetic construct
  source 1..75: mol_type = other DNA
actgggcgaaactcggtatcctggtcggttctatctcttcggcggtaattggatacagctggttacgcgttcgtt

SEQ ID NO: 14384 - DNA, 75 bp, synthetic construct
  source 1..75: mol_type = other DNA
tggcagctacgtagccttcgttccagaaaaaaaccttggcatcgtgatgctggcaaacaaaagctatcctaaccc

SEQ ID NO: 14385 - DNA, 75 bp, synthetic construct
  source 1..75: mol_type = other DNA
tctctgggcgacaattccgttctgacacagcccacctcatttacacaggatgactgggagaacaggacgttcagc

SEQ ID NO: 14386 - DNA, 75 bp, synthetic construct
  source 1..75: mol_type = other DNA
ccggcaatgcagaccgaagatattatttcagttatcaattgggcagaaaagcaggtatgtattgataatcagcgt

SEQ ID NO: 14387 - DNA, 75 bp, synthetic construct
  source 1..75: mol_type = other DNA
ggtctgtttggcgcgctggcggtgaaaccctcaggaatgagttacgaagaggcaatgaccagacgcgtcctgcaa

SEQ ID NO: 14388 - DNA, 75 bp, synthetic construct
  source 1..75: mol_type = other DNA
ctgtatgactggatacagactcagatgaaaacactgtcgcgtcactcggatacggcaaaagcgttcgcatacctg

SEQ ID NO: 14389 - DNA, 75 bp, synthetic construct
  source 1..75: mol_type = other DNA
atcggcattgatatttcagactctgtaaccagtaccagaagtgatgttgctgcgagttcgctggcagttaaaaaa

SEQ ID NO: 14390 - DNA, 75 bp, synthetic construct
  source 1..75: mol_type = other DNA
acaaccctgcattacgtctgggcccgggagtttggggagtgcaaaggtaaaaaacactatcacctgatgctgctg

SEQ ID NO: 14391 - DNA, 75 bp, synthetic construct
  source 1..75: mol_type = other DNA
accactacgacagccagcaccgtctggtgttctacacgcggatacagcacggtgagccgcaggtggagagccgct

SEQ ID NO: 14392 - DNA, 75 bp, synthetic construct
  source 1..75: mol_type = other DNA
atccaggacattcctggctatctgtatacaggcggtgtggtctgtgatggtgatgttattactgtttatcccgga

SEQ ID NO: 14393 - DNA, 75 bp, synthetic construct
  source 1..75: mol_type = other DNA
cggctttctgatccgcattattgagtggtggcataccggagaaacaccgggcacgtttcgtctggatatcggcgt

SEQ ID NO: 14394 - DNA, 75 bp, synthetic construct
  source 1..75: mol_type = other DNA
cgcggaatatgatgaatggggcaaccagcttaatgaggagaacccgcatcacctgcaccagccgtaccggctgcc

SEQ ID NO: 14395 - DNA, 75 bp, synthetic construct
  source 1..75: mol_type = other DNA
tgcatgtgcacggtgtgcaacgcgtggagataatcgaacccacacagaatatggccatcagcgacatacaggcgg

SEQ ID NO: 14396 - DNA, 75 bp, synthetic construct
  source 1..75: mol_type = other DNA
tgatgttaatcgtcgtctgtgtgacgattctgtgttttgtctggatggtgagggattcgctttgcggactccggc

SEQ ID NO: 14397 - DNA, 75 bp, synthetic construct
  source 1..75: mol_type = other DNA
caggatttattggttctgctgtagttcgtcacattataaataatacgcaggatagtgttgttaatgtcgataaat

SEQ ID NO: 14398 - DNA, 75 bp, synthetic construct
  source 1..75: mol_type = other DNA
tcttccgccagcgcgggatcactttcacccgctgggcagaagaaaacggctacaaccgcaatgaggtataccgcg

SEQ ID NO: 14399 - DNA, 75 bp, synthetic construct
  source 1..75: mol_type = other DNA
accgttacgacagcgacgggcgggtgacagaacagctaaacccggcaggcttaagctacacgtatcagtatgaga

SEQ ID NO: 14400 - DNA, 75 bp, synthetic construct
  source 1..75: mol_type = other DNA
gctatatctcacgcgaagtttatacattactgcgtaatcaaaacaggcagatcaacagcatcccgataacggctt

SEQ ID NO: 14401 - DNA, 75 bp, synthetic construct
  source 1..75: mol_type = other DNA
acgtcgcctgaatcagttccgtacctttgcgcggggctttgacaatgtgcgtcagggcgatgaaatagatgtgcc

SEQ ID NO: 14402 - DNA, 75 bp, synthetic construct
  source 1..75: mol_type = other DNA
atgtacggaacatgcgaaatactctgccgggagctggcagcaaagtatcagggagacacgccgctgatgctggtt

SEQ ID NO: 14403 - DNA, 75 bp, synthetic construct
  source 1..75: mol_type = other DNA
gtggtgttccaggacggcttccagctgaaaaccgtggaagagatggcgctggaacgcacgcagagcagagcggaa

SEQ ID NO: 14404 - DNA, 75 bp, synthetic construct
  source 1..75: mol_type = other DNA
ccctggctttgcttaaatcgcgcggatggctggtaatgccacgagatgaactggccggaaaattaatggagcttt

SEQ ID NO: 14405 - DNA, 75 bp, synthetic construct
  source 1..75: mol_type = other DNA
gtttccgtattttacggggaatgatgtcgccagcctggcaaccctgacaaaagtcgggcgggatattcttgcgaa

SEQ ID NO: 14406 - DNA, 75 bp, synthetic construct
  source 1..75: mol_type = other DNA
cgttatggtgtcactttcaatacggtttacaaggccattcgccggatgcgacggctgaaataccgccagtaccag

SEQ ID NO: 14407 - DNA, 75 bp, synthetic construct
  source 1..75: mol_type = other DNA
atgcagaaaaaacgcctgatacagcttatccatattgcccgtaatgaactgggtatggatgaagacacctaccgc

SEQ ID NO: 14408 - DNA, 75 bp, synthetic construct
  source 1..75: mol_type = other DNA
cgtggaaaataaaacgctgtctgccctgaatatccgggaaagtgatttctggcagccgggaacccgtgccgtgat

SEQ ID NO: 14409 - DNA, 75 bp, synthetic construct
  source 1..75: mol_type = other DNA
gccgtgagctggcagcgcagtatccgggaaacacaccgctgatgctggttgtctggtccccggaagagattcagg

SEQ ID NO: 14410 - DNA, 75 bp, synthetic construct
  source 1..75: mol_type = other DNA
gactcgcagcgaaaccgttttgagatgtatgtctggggatgggctccgggagaggaagcctttctggtggataaa

SEQ ID NO: 14411 - DNA, 75 bp, synthetic construct
  source 1..75: mol_type = other DNA
cgtctgctgtgggataacaaaaagcggcgtaacgaagcgctggactgcctggtgtatgcctacgcggcattacgt

SEQ ID NO: 14412 - DNA, 75 bp, synthetic construct
  source 1..75: mol_type = other DNA
ccacctgggtacagattgtttatgactggcttgatgcactgaaggatccgaatggcgtcaagacgttcattaaca

SEQ ID NO: 14413 - DNA, 75 bp, synthetic construct
  source 1..75: mol_type = other DNA
ataatatggtggccgccgtttcggttgcgctgcagcctctggtcagggttgtaccgatgacggcagttgaatggg

SEQ ID NO: 14414 - DNA, 75 bp, synthetic construct
  source 1..75: mol_type = other DNA
atttacggccttttctcctggccgggactgggatttgtcggggctgggttgggtttaaccatttctcgttatatt

SEQ ID NO: 14415 - DNA, 75 bp, synthetic construct
  source 1..75: mol_type = other DNA
acttcctcaacggcgatccggaccagccgattattatggggcgtacctaccaccaggaaaaccgcacacccggca

SEQ ID NO: 14416 - DNA, 75 bp, synthetic construct
  source 1..75: mol_type = other DNA
acaaaacggattcggcagcactgttgccctgtattgaacaggccagggaggatatccgtaccctgcgccaactgc

SEQ ID NO: 14417 - DNA, 75 bp, synthetic construct
  source 1..75: mol_type = other DNA
gcccggaagccgccggcattgccgcctgtctgatgacgtacagtcatcacgcctgtcgtacggagtgttatgcca

SEQ ID NO: 14418 - DNA, 75 bp, synthetic construct
  source 1..75: mol_type = other DNA
ctatgtcgattccctgagcacagaaaacggcccggtacctacgtatatcgaccttctgaaggttactaccagtac

SEQ ID NO: 14419 - DNA, 75 bp, synthetic construct
  source 1..75: mol_type = other DNA
agattataaatacatttccagaattactgacaggtatgctggattgtctctggtattcctgactgccggaattgt

SEQ ID NO: 14420 - DNA, 75 bp, synthetic construct
  source 1..75: mol_type = other DNA
atgaaaacattgtctcagaacaccaccgcttcggcctgtgcaccggagactgacctgcaacaactggttgccacc

SEQ ID NO: 14421 - DNA, 75 bp, synthetic construct
  source 1..75: mol_type = other DNA
acagaaccggtttacgcagtttcggcttagtgaaacaaaagaaatcaccaatccgtatgccatgcgtttatacga

SEQ ID NO: 14422 - DNA, 75 bp, synthetic construct
  source 1..75: mol_type = other DNA
gttgcgacaaacccgccgggcatacgcttcagaacccggtggacggtgtgacggcttattacggacgtgacagtg

SEQ ID NO: 14423 - DNA, 75 bp, synthetic construct
  source 1..75: mol_type = other DNA
cgcgggcggcgaagccttgcctgtcgcccgtggcagtctggcaaatgctgctgatccgactgctcgaaaagcact

SEQ ID NO: 14424 - DNA, 75 bp, synthetic construct
  source 1..75: mol_type = other DNA
caagatagcaatgggcgtaaggcgactattaatctttggcagattgatgaaacgaataacacggttgcccttgaa

SEQ ID NO: 14425 - DNA, 75 bp, synthetic construct
  source 1..75: mol_type = other DNA
ctggtactccgttccacacgaactggtcggtcagcgtctgtcactgaaggcggggcagtcggtggtacagctctg

SEQ ID NO: 14426 - DNA, 75 bp, synthetic construct
  source 1..75: mol_type = other DNA
gagttatatgtggaatatcctgatatatgccattccgtatgcgttatatgcgcttgcagccgggtttcttgttac

SEQ ID NO: 14427 - DNA, 75 bp, synthetic construct
  source 1..75: mol_type = other DNA
cgaagaacctccacccaaaccgattccaattcccaaggggttaaggctgacattggaaccacaggccaacgtgaa

SEQ ID NO: 14428 - DNA, 75 bp, synthetic construct
  source 1..75: mol_type = other DNA
acgaaaaaacctcaattgcttgcaaagctggaacgtctggagagacagggacagtttttattaccgggattcgat

SEQ ID NO: 14429 - DNA, 75 bp, synthetic construct
  source 1..75: mol_type = other DNA
acagcggatcaacaccggactggtacgaaaaagtaagcagggcgtttattacgccaaatttaacgccggggcgtt

SEQ ID NO: 14430 - DNA, 75 bp, synthetic construct
  source 1..75: mol_type = other DNA
ctattggcgttttcgccaaggcggccggggtcaacgtggaaacaatccggttctatcagcgcaagggcttgttgc

SEQ ID NO: 14431 - DNA, 75 bp, synthetic construct
  source 1..75: mol_type = other DNA
tgtgagttgggaaactggtccgtgacccctcatgaactgcgtcctgatatttaccccaatccaaatgatggatta

SEQ ID NO: 14432 - DNA, 75 bp, synthetic construct
  source 1..75: mol_type = other DNA
tgctgacaatcaaacagtggcgcgaaacatacggacctggtagcaacgttgtactgccagcagaagaagcggaag

SEQ ID NO: 14433 - DNA, 75 bp, synthetic construct
  source 1..75: mol_type = other DNA
cttgagctttatatattccctcatatcggttcgtccgacattcggcagcttaaaaccagccacctgttagccccg

SEQ ID NO: 14434 - DNA, 75 bp, synthetic construct
  source 1..75: mol_type = other DNA
gatgatgcaatggtgggcggatttcctatcagcaaatcgtgagactttcgtaacaccatttgattttgcaaaaaa

SEQ ID NO: 14435 - DNA, 75 bp, synthetic construct
  source 1..75: mol_type = other DNA
aacgaactggctgcggcgctgggcaatgacccgaattttgcgaccaccatgactaacgcgcttgcgggtaagcaa

SEQ ID NO: 14436 - DNA, 75 bp, synthetic construct
  source 1..75: mol_type = other DNA
attccggtataactcagaagcattttgctgaaattgttggggtaacccaagggatggtaagccatgtcattaccg

SEQ ID NO: 14437 - DNA, 75 bp, synthetic construct
  source 1..75: mol_type = other DNA
atgtttgtcatggattacgccggggagctggacgacctcacgctgccgctgctggcgtggttatccgaaaatcag

SEQ ID NO: 14438 - DNA, 75 bp, synthetic construct
  source 1..75: mol_type = other DNA
gcgcgattctgagtatagacggtccgccgataccggatgctcgtgccacacggcttgagatactctgttctcaga

SEQ ID NO: 14439 - DNA, 75 bp, synthetic construct
  source 1..75: mol_type = other DNA
tactggatcaaaatttaccattgcgaaagcttgttctggaaaagctggagatgaaatggtctccagagcaaatat

SEQ ID NO: 14440 - DNA, 75 bp, synthetic construct
  source 1..75: mol_type = other DNA
ctgtctcatcaatgctgacgccgggtattggtcgcatgttcatgtcgacgggctttatcaccgtcacggacaccc

SEQ ID NO: 14441 - DNA, 75 bp, synthetic construct
  source 1..75: mol_type = other DNA
ggtttcgctacagcttcagcgccctgaaggaccgccacacggcggtggaggtgaattacaccgacccgcagaacg

SEQ ID NO: 14442 - DNA, 75 bp, synthetic construct
  source 1..75: mol_type = other DNA
acgcatggccgaactgcagtccggtatccagacatggtgtgaggcgcaccgtgatgaactgaccggcaacgggaa

SEQ ID NO: 14443 - DNA, 75 bp, synthetic construct
  source 1..75: mol_type = other DNA
ggcgaagacggtggcagtgtggtgttcccgccggtgctggtgcagatgctcgaccggctggaaagtgaaatcctg

SEQ ID NO: 14444 - DNA, 75 bp, synthetic construct
  source 1..75: mol_type = other DNA
ttttgacgatccggagtcgctggggtttgccggtagcggggtccgtattgaaggaagcagcccgtcattatttgt

SEQ ID NO: 14445 - DNA, 75 bp, synthetic construct
  source 1..75: mol_type = other DNA
agtaaatctgcaacagaaatcattgccaccaaatcagctgggtggtttggtgtcgattttgccagcggctctgac

SEQ ID NO: 14446 - DNA, 75 bp, synthetic construct
  source 1..75: mol_type = other DNA
ccaaacaggatcaaaaagaacttggtattatttggtggcatagcagacttcccgaaaaaagtaaccggggccgac

SEQ ID NO: 14447 - DNA, 75 bp, synthetic construct
  source 1..75: mol_type = other DNA
cactggctaaaaagggaatcatccaatttccacagactgtggaaattgagaataaacaatcacttgggcctcgcc

SEQ ID NO: 14448 - DNA, 75 bp, synthetic construct
  source 1..75: mol_type = other DNA
tggtcaccatgatcaaaacgctttccggtgtcagcctcggcagcgatctgcaaccgcgcggcgtctggaaaacgg

SEQ ID NO: 14449 - DNA, 75 bp, synthetic construct
  source 1..75: mol_type = other DNA
agccagtacggggccgtgtcgttacgtgagcaggcccgttaccttgataacaaccacgatctggtcattggtgta

SEQ ID NO: 14450 - DNA, 75 bp, synthetic construct
  source 1..75: mol_type = other DNA
atttgatgccatgaagaagggggctttaaaatctgccgatactcttcagaaggtcactcaggaactgaataaaca

SEQ ID NO: 14451 - DNA, 75 bp, synthetic construct
  source 1..75: mol_type = other DNA
tgtggctggattatctggacgcactggagctggtcgatacttccagtgcgccagatattgaatggcctacgcctc

SEQ ID NO: 14452 - DNA, 75 bp, synthetic construct
  source 1..75: mol_type = other DNA
taagctacagccgcagcgagtcgttctggctggcaaggggcggggtggcggagcagcacagttcgcagccgctaa

SEQ ID NO: 14453 - DNA, 75 bp, synthetic construct
  source 1..75: mol_type = other DNA
tcagggtaattttttatctgtgatgatgttatctggcatgttccccatggcctttatatatgtgttatactgtgc

SEQ ID NO: 14454 - DNA, 75 bp, synthetic construct
  source 1..75: mol_type = other DNA
accgacccgccatatctcgtcggtttccgtgaccgtcaggggcgtaccatcgccggcgataaaaccgatgaatgg

SEQ ID NO: 14455 - DNA, 75 bp, synthetic construct
  source 1..75: mol_type = other DNA
gcgaacaggtggtaattgcctgcattggcggcaacccggaaaccgccatgataattggcagtctgtggagtgatg

SEQ ID NO: 14456 - DNA, 75 bp, synthetic construct
  source 1..75: mol_type = other DNA
acaaacagtccgcaggggccgtggtgggtactcggctggtgtgagcgggtgccggaagcggatgaggtgctgcct

SEQ ID NO: 14457 - DNA, 75 bp, synthetic construct
  source 1..75: mol_type = other DNA
ggcggcaagctggtctatgaacaatattatggcgatgaagtggcgctgtttggtaaagacgagcgacaaaatgat

SEQ ID NO: 14458 - DNA, 75 bp, synthetic construct
  source 1..75: mol_type = other DNA
tgaggcaggtagctatgttgccagtattgctgctgcaaataatctgtttgtaacgaatctgtatgaacgacaggg

SEQ ID NO: 14459 - DNA, 75 bp, synthetic construct
  source 1..75: mol_type = other DNA
ggggcagcagtatgataaggagtcggggctgtactataaccgtcaccggtactacgatccgttgcaggggcggta

SEQ ID NO: 14460 - DNA, 75 bp, synthetic construct
  source 1..75: mol_type = other DNA
gaaagctgaaataattgacgacgattctgcgcttaacggcaaatgggcgttgttcgccagaatcaccccaaccga

SEQ ID NO: 14461 - DNA, 75 bp, synthetic construct
  source 1..75: mol_type = other DNA
caggttctgggatatgtgcctcgtgatagtcggaacaacggcatcagaaatgccatgtgtatggcaatgcttctg

SEQ ID NO: 14462 - DNA, 75 bp, synthetic construct
  source 1..75: mol_type = other DNA
ttctgattatttcagtggtctgcgcaattggcattgtgcgaattattcattcagtaaaaaagattgaacgttttt

SEQ ID NO: 14463 - DNA, 75 bp, synthetic construct
  source 1..75: mol_type = other DNA
ctgctttctgaaaacttcgaattactggagaaatggaccgaccagcttccacggctacgggagacatgggagaga

SEQ ID NO: 14464 - DNA, 75 bp, synthetic construct
  source 1..75: mol_type = other DNA
atggtctggcgcacctggaattttgaggacggtgccgggtactggatgaaccggtatatcagggatttcgggatt

SEQ ID NO: 14465 - DNA, 75 bp, synthetic construct
  source 1..75: mol_type = other DNA
tcttccatcagttgggtcgctggaaactgttaaaagagaagaatccagacctgattatcggcgtcggcggctgcg

SEQ ID NO: 14466 - DNA, 75 bp, synthetic construct
  source 1..75: mol_type = other DNA
tgggatttatggttctttagaagaagcccagctaaaaaaggccgagcttgaagaaaaattaaagtctactttaag

SEQ ID NO: 14467 - DNA, 75 bp, synthetic construct
  source 1..75: mol_type = other DNA
gtaaaaacacttgatgaaggtgtcaaaaaaatgtgcctggtgcatatcggaaagaatctgcccgcagaaaaaaaa

SEQ ID NO: 14468 - DNA, 75 bp, synthetic construct
  source 1..75: mol_type = other DNA
taaccgctggacttaactatacccccttcccgctgatgaccttcagcgcggagcaacgccagggtaaacagggcg

SEQ ID NO: 14469 - DNA, 75 bp, synthetic construct
  source 1..75: mol_type = other DNA
atggctggaacacagcataccccacgtctggcgcacacacaaactgcctttgtgtggcgttttctggcactaagt

SEQ ID NO: 14470 - DNA, 75 bp, synthetic construct
  source 1..75: mol_type = other DNA
aaattcgggcttttgttgaagtggctcgtcagggcagcattcgcggagcgagccgaatgttgaatatgtcgcaac

SEQ ID NO: 14471 - DNA, 75 bp, synthetic construct
  source 1..75: mol_type = other DNA
aatatgactacctggaccgtcagggtgtttacaacggcagagataatttatcggaaaacagttatcgcattggtg

SEQ ID NO: 14472 - DNA, 75 bp, synthetic construct
  source 1..75: mol_type = other DNA
atgaaaaacaccgattttgaaatccgcacatctgaactgaccgccagcaataaaaagctggtggggtatgccgtt

SEQ ID NO: 14473 - DNA, 75 bp, synthetic construct
  source 1..75: mol_type = other DNA
atgaaaaaggctaaaatactttctggcgtattattactgtgcttttcgtcaccactgatttcccaggctgcgaca

SEQ ID NO: 14474 - DNA, 75 bp, synthetic construct
  source 1..75: mol_type = other DNA
ctgatcgtggaacttccgtaccagaccgtacgcgaaatcattagcgaagctgaaaaggctcgtcaggttaatggc

SEQ ID NO: 14475 - DNA, 75 bp, synthetic construct
  source 1..75: mol_type = other DNA
cgactggctaatggactggataactttgccctattggcaatcccctttttcatctttgccggaacgctgatgaac

SEQ ID NO: 14476 - DNA, 75 bp, synthetic construct
  source 1..75: mol_type = other DNA
atgggtgacagatatcaccgaattcagggctggcggacaaaaactgtacctgtccccgatacttgatttgtttaa

SEQ ID NO: 14477 - DNA, 75 bp, synthetic construct
  source 1..75: mol_type = other DNA
ggcccgggaatggctgattctgaacatggctggactggagcgtgaagaattccgggtgctgtatctgaacaacca

SEQ ID NO: 14478 - DNA, 75 bp, synthetic construct
  source 1..75: mol_type = other DNA
gtggcaaaagtttttacacaagaagagcgagaaaaaattaaagggcaggttattgaacttgtacgtctgagcggt

SEQ ID NO: 14479 - DNA, 75 bp, synthetic construct
  source 1..75: mol_type = other DNA
ggcgtcagaacataatctgtcgcgagtgccggaagagcgaagctatgcagcgtgtgctggcgttctatcagggta

SEQ ID NO: 14480 - DNA, 75 bp, synthetic construct
  source 1..75: mol_type = other DNA
aacgctgggggcacctggcgaaccggaaacgccggaagcaatgcagcaagagctgctgcaacgcatcgataacgt

SEQ ID NO: 14481 - DNA, 75 bp, synthetic construct
  source 1..75: mol_type = other DNA
ggcaggccgtaaacaaatccgcattcgtggcgaagcatcctcccgtgttttaattctcattgatggtcaggaggt

SEQ ID NO: 14482 - DNA, 75 bp, synthetic construct
  source 1..75: mol_type = other DNA
cgatataattaaacaccgtttcccgcattatttcccggctgctaaagcgttccccgtggatacattccaccttca

SEQ ID NO: 14483 - DNA, 75 bp, synthetic construct
  source 1..75: mol_type = other DNA
cgtgaaaacggatttatcagcgacggaaacggtctggaagctgtgggaactcatgggggaggtttattcgaaccg

SEQ ID NO: 14484 - DNA, 75 bp, synthetic construct
  source 1..75: mol_type = other DNA
acaggcctgatgacccgcgacaattacagaatggtaaatgacattagccaggggaagcatccggaggcgaaacaa

SEQ ID NO: 14485 - DNA, 75 bp, synthetic construct
  source 1..75: mol_type = other DNA
tgtgtgacgcggtgaactttctcgttgaaaaatacgcgctggtacgtaccgaccagccgggattcagcgcaggag

SEQ ID NO: 14486 - DNA, 75 bp, synthetic construct
  source 1..75: mol_type = other DNA
ttcctcgcctgaaggtagcgatcatctatgatgttggcatatcgactttgtataagaggtttccggtgggagata

SEQ ID NO: 14487 - DNA, 75 bp, synthetic construct
  source 1..75: mol_type = other DNA
gcagcgacgattgaaagtgaacttgataccgaaaaggcctttgaatatatcgccggcgcgccacaggagcagaag

SEQ ID NO: 14488 - DNA, 75 bp, synthetic construct
  source 1..75: mol_type = other DNA
atataacggtgggttacccccaaacgaatcggaaaatcgatactggaaaaactctaacgcggtggccagtttttg

SEQ ID NO: 14489 - DNA, 75 bp, synthetic construct
  source 1..75: mol_type = other DNA
aagcaatgggaaaagccacatccatagaacttgcggcgcgacttgatgtcagtcgtgaagaagtgcttaacgaac

SEQ ID NO: 14490 - DNA, 75 bp, synthetic construct
  source 1..75: mol_type = other DNA
gcccgcaaaaaattatcgagggcaaagctgaagaaaccggttgtggttgatccggaccttatctggtcgttacct

SEQ ID NO: 14491 - DNA, 75 bp, synthetic construct
  source 1..75: mol_type = other DNA
ggcgtcataatatgatttgtactgagtgtcgtaaaagcgaagttatgcagcgcatattgtcgttttatcaggggg

SEQ ID NO: 14492 - DNA, 75 bp, synthetic construct
  source 1..75: mol_type = other DNA
cgtctggtacaggcgctggccctggttgacatccgggtgccggaccatctgatagtcggtggcagccaggttttc

SEQ ID NO: 14493 - DNA, 75 bp, synthetic construct
  source 1..75: mol_type = other DNA
gctttgcaggagcgcgaagtttttattgttttatatcttgataatcagaaccgtcttctgcaatgcgagacgcta

SEQ ID NO: 14494 - DNA, 75 bp, synthetic construct
  source 1..75: mol_type = other DNA
gcaaaagaattcagcttggacttaaccaggctgaacttgctcaaaaggtggggactacccagcagtctatagagc

SEQ ID NO: 14495 - DNA, 75 bp, synthetic construct
  source 1..75: mol_type = other DNA
tggtgaaattgagccggaagagcgtaaggttctggaagagattgctggtgttcttggcctgcgactggagaacca

SEQ ID NO: 14496 - DNA, 75 bp, synthetic construct
  source 1..75: mol_type = other DNA
tttttgacagcgccagccagaaaaaactgtcagaagcgcagtcgaaggcgctggctgaccgttttaacgcggcac

SEQ ID NO: 14497 - DNA, 75 bp, synthetic construct
  source 1..75: mol_type = other DNA
tgcgccaggaggaacaggaaaggcggaaaaatatagaaaagttaattcagattgagcgtaacgcgaaagcgcgga

SEQ ID NO: 14498 - DNA, 75 bp, synthetic construct
  source 1..75: mol_type = other DNA
ggcgcagcgtgactatttcggtgcgcatacctataagcgcattgataaagaaggtgtattccacaccgaatggct

SEQ ID NO: 14499 - DNA, 75 bp, synthetic construct
  source 1..75: mol_type = other DNA
ttccgatggattttaatatttatgaaattccgggcagcgtttatcgtcgcgcaaaagaagtagtcctgaacaaag

SEQ ID NO: 14500 - DNA, 75 bp, synthetic construct
  source 1..75: mol_type = other DNA
ccggaaaactctccatcacccgtgccacccgggccctgacgttcctgtcagagctgggactgattacctaccaga

SEQ ID NO: 14501 - DNA, 75 bp, synthetic construct
  source 1..75: mol_type = other DNA
gacctgtttaactacaacgtgctggttaaaaattacgacagcagcgctttcaaaggcgaccgttaccacaacacc

SEQ ID NO: 14502 - DNA, 75 bp, synthetic construct
  source 1..75: mol_type = other DNA
gactgacctctcaggcttttgcccgtgccgcactggtcaccgatgtgggtattgctctggctactgaactggaaa

SEQ ID NO: 14503 - DNA, 75 bp, synthetic construct
  source 1..75: mol_type = other DNA
tgacggaattagcgacccgaacgatccgaaatgggttaaggggatccagactcgcgattctgtgtaccagaacca

SEQ ID NO: 14504 - DNA, 75 bp, synthetic construct
  source 1..75: mol_type = other DNA
cacacatcactcgcacggcttccggtgctaatgctggcggcggaaacctcaccgatcgcggcgaaggtttcgtac

SEQ ID NO: 14505 - DNA, 75 bp, synthetic construct
  source 1..75: mol_type = other DNA
gctaccgattaaaggaaaaacgcaaagcgggagtgctggcaaaaaacgccacgccaatcagtgatgatgaaatgg

SEQ ID NO: 14506 - DNA, 75 bp, synthetic construct
  source 1..75: mol_type = other DNA
cttcactcagaccactgacggcagagtgaatctgatgcatcacaggaaagccggaaacacgaagctgggggagtt

SEQ ID NO: 14507 - DNA, 75 bp, synthetic construct
  source 1..75: mol_type = other DNA
cacactacccggaaatctggctgcatatgtgggaatccccgtccttcagagcagggagctgtcaaccagcactcc

SEQ ID NO: 14508 - DNA, 75 bp, synthetic construct
  source 1..75: mol_type = other DNA
ttgtctgttactgatgttgttgttcctgctactgctactgctactgctactgctactgctactgttcttcttttt

SEQ ID NO: 14509 - DNA, 75 bp, synthetic construct
  source 1..75: mol_type = other DNA
aacgcgaaaaatagcgagacagccgcaaagacgagcgaaaccaacgcaaagtccagccagacggcagcgaaaacc

SEQ ID NO: 14510 - DNA, 75 bp, synthetic construct
  source 1..75: mol_type = other DNA
attcaccagaacgcgtctccctgctgccgatcgccccgggcgttgattttgcgaccgcggtggcactccggcgga

SEQ ID NO: 14511 - DNA, 75 bp, synthetic construct
  source 1..75: mol_type = other DNA
gtgtcagacacactccccgggacaacgcatcccgacaacaacaacgaccgcccctggtgggggctgccctgcacc

SEQ ID NO: 14512 - DNA, 75 bp, synthetic construct
  source 1..75: mol_type = other DNA
atgaacgagaaaactttaggtcaacgaattagagaaagacgcaaacaggttggtttaagtcaaaacgatttaagc

SEQ ID NO: 14513 - DNA, 75 bp, synthetic construct
  source 1..75: mol_type = other DNA
gtcattgataaactggtgacaaagtgctggcaggaagaagcatatgctgaggcgcaattaagaaaagtgacgaga

SEQ ID NO: 14514 - DNA, 75 bp, synthetic construct
  source 1..75: mol_type = other DNA
ctggtctacaaaatcttttgcgctccagaaaagagtgacgcccgcgagtgtgcagctccgggcgtcgtggcgttt

SEQ ID NO: 14515 - DNA, 75 bp, synthetic construct
  source 1..75: mol_type = other DNA
ggagaaactgttttacaggatgcttctggtaaaaaacacttcaaaggtgaaaaagacagcaggatgctaatgaac

SEQ ID NO: 14516 - DNA, 75 bp, synthetic construct
  source 1..75: mol_type = other DNA
gcgcaggcggtgatggtggcttatgccatagggggcgatctggaccagctcgccgccaactacaacgtgaaacgc

SEQ ID NO: 14517 - DNA, 75 bp, synthetic construct
  source 1..75: mol_type = other DNA
cggctatctctaacgtctctgtatggcgtcagggtgatgtatgcgcgccgcataaaccgttgctgctgctgtatg

SEQ ID NO: 14518 - DNA, 75 bp, synthetic construct
  source 1..75: mol_type = other DNA
ctgcttaaccagaacgatgttaccacacttatccgcaaagacggctttcgcttctggggttcccgctgcctgagt

SEQ ID NO: 14519 - DNA, 75 bp, synthetic construct
  source 1..75: mol_type = other DNA
accgtggtatttgaagaaaagtatggctctcagttggagctgatatttcgttttatcgatcgtgcgctggcaatt

SEQ ID NO: 14520 - DNA, 75 bp, synthetic construct
  source 1..75: mol_type = other DNA
acggtggggaaagcctttccccggaataacagttatgccagcgggacggtaaccgtcacagtttacgatgaccag

SEQ ID NO: 14521 - DNA, 75 bp, synthetic construct
  source 1..75: mol_type = other DNA
tacattaacggcagtcatgcaggcttcatcatgtacatgaccgatgccgcgcagaaccaggaggatgtgaacaac

SEQ ID NO: 14522 - DNA, 75 bp, synthetic construct
  source 1..75: mol_type = other DNA
acgtttgaccttgaggccgctccatcgggtaacgatgcccccgcctggctgaccgaaccggaacctgaaatcaac

SEQ ID NO: 14523 - DNA, 75 bp, synthetic construct
  source 1..75: mol_type = other DNA
atcgttcacgaagcacgtttttatatggcgcagagtgctgaatctatgttggaagcgggtaagcggctgatcatc

SEQ ID NO: 14524 - DNA, 75 bp, synthetic construct
  source 1..75: mol_type = other DNA
caggactggcagtcgtttattcattatttatggccattacaatggacaaatattgaaactccgttaagtgatgag

SEQ ID NO: 14525 - DNA, 75 bp, synthetic construct
  source 1..75: mol_type = other DNA
ccgctagtaggctcaatgacaaaattgcaatgcgtcttaaagagcgcaggcagaagcttggtttatctcaaggaa

SEQ ID NO: 14526 - DNA, 75 bp, synthetic construct
  source 1..75: mol_type = other DNA
gggcttgagacactggcttttaacgacggcatgccgtttgccgatgacgtgacgctgagctggatacagcagcag

SEQ ID NO: 14527 - DNA, 75 bp, synthetic construct
  source 1..75: mol_type = other DNA
gctgtttggcctgctgacgtatctgactaacctgtatttcaaaatcagagaggaccgtcgcaaggctgcccgggg

SEQ ID NO: 14528 - DNA, 75 bp, synthetic construct
  source 1..75: mol_type = other DNA
cagtatgaccccaaagtttatgacgaatatcgtaagacgaagcgggcggggcggttgaacaatgaaaatcaccct

SEQ ID NO: 14529 - DNA, 75 bp, synthetic construct
  source 1..75: mol_type = other DNA
agacaacgtgcaatcgataaccaacatcctttacgtgatttcatggagttgagattaaaaggtgttttggtcgat

SEQ ID NO: 14530 - DNA, 75 bp, synthetic construct
  source 1..75: mol_type = other DNA
aatgatggaattgccgatgctggcggcatggacccgatgggttcagatggtaactacgtaacttacaatggtttt

SEQ ID NO: 14531 - DNA, 75 bp, synthetic construct
  source 1..75: mol_type = other DNA
gtaaagcgggtgagtcaggcacgctggctcgttcgctggatgccatcgctgaccaggcaaaacccgtgaccgttg

SEQ ID NO: 14532 - DNA, 75 bp, synthetic construct
  source 1..75: mol_type = other DNA
tccattatcatggcggttatcgccgctatttctgccatgcaggttgctggcggtctggactatctggttcatcag

SEQ ID NO: 14533 - DNA, 75 bp, synthetic construct
  source 1..75: mol_type = other DNA
ccagcgatgcggatgcggaaaccttccccctcaataaaccggtgctgattaccaatgtgcagagcgcaattgcaa

SEQ ID NO: 14534 - DNA, 75 bp, synthetic construct
  source 1..75: mol_type = other DNA
ctggtgggcggcctgcaatcaggtggtggatgcactacctgaggcagtagcgcgtcgttcgctgggattaccagc

SEQ ID NO: 14535 - DNA, 75 bp, synthetic construct
  source 1..75: mol_type = other DNA
gtgctggcactgcgacaaccagctgcgcgaccagacatccgaatcactcgggcagcttgctcaacaaaatctgac

SEQ ID NO: 14536 - DNA, 75 bp, synthetic construct
  source 1..75: mol_type = other DNA
atgagcgaagcacttaaaattctgaacaacatccgtactcttcgtgcgcaggcaagagaatgtacacttgaaacg

SEQ ID NO: 14537 - DNA, 75 bp, synthetic construct
  source 1..75: mol_type = other DNA
tcagatatccaaacgtttttggcaaatggtgcaaaccaaattataattcttttgttgcgactttttgctataata

SEQ ID NO: 14538 - DNA, 75 bp, synthetic construct
  source 1..75: mol_type = other DNA
atacagaaggttcaggttgatacaaataataatctgaacagcatgtgggctgtgaagctgcagcagatgcaggac

SEQ ID NO: 14539 - DNA, 75 bp, synthetic construct
  source 1..75: mol_type = other DNA
atgacgcgttatcaacatctggcgactctacttgccgagcggattgagcaagggctgtatcgtcacggggagaaa

SEQ ID NO: 14540 - DNA, 75 bp, synthetic construct
  source 1..75: mol_type = other DNA
ggacgcctcgctgaccgcaaaaggttttactcagttaagcagcgcgaccaacagcacgtctgaaacactggccgc

SEQ ID NO: 14541 - DNA, 75 bp, synthetic construct
  source 1..75: mol_type = other DNA
gatggcgatcagattttcccgctgggatgggcaatgattttgcaacgtgctggtggaactcacttcattgctgac

SEQ ID NO: 14542 - DNA, 75 bp, synthetic construct
  source 1..75: mol_type = other DNA
tgcttgccgggatgacatccaccgaatatgccgactggcgacatttttaccgcacgcattattttcacgataccc

SEQ ID NO: 14543 - DNA, 75 bp, synthetic construct
  source 1..75: mol_type = other DNA
cagtgttattccgcggtggtaagcatgagaatttcaacagtaataaccaacagtcatactggtattcaacctgcc

SEQ ID NO: 14544 - DNA, 75 bp, synthetic construct
  source 1..75: mol_type = other DNA
tacgggcgcaacctgctgaagatggatgcgttcggttgcaccagtcgcggtcaggcccaccgtgccgggctgtgg

SEQ ID NO: 14545 - DNA, 75 bp, synthetic construct
  source 1..75: mol_type = other DNA
tcattggcactgacgagctgaagcttgagctattcaaaattcacttccagtcaggcggcgctaattcagatatca

SEQ ID NO: 14546 - DNA, 75 bp, synthetic construct
  source 1..75: mol_type = other DNA
tcgggaaaaaataggaaaactgcatctggctcaggggctgtgggagctgatagacaacagccagcttgcggatga

SEQ ID NO: 14547 - DNA, 75 bp, synthetic construct
  source 1..75: mol_type = other DNA
aacgagcagagcgtgaacggaaacgtcaggaactgcttcagttaatcgccggagagggtttctcaccggaagaac

SEQ ID NO: 14548 - DNA, 75 bp, synthetic construct
  source 1..75: mol_type = other DNA
ggaaaatgaactccttaaagaagccgttgaatatgggcgtgcaaaaaagtggatagcgcacgcgaccttattgcc

SEQ ID NO: 14549 - DNA, 75 bp, synthetic construct
  source 1..75: mol_type = other DNA
gcccgctatggaattaagccggaacatctgacaacagatccctgcatgaacatttataccggtgcttattatctg

SEQ ID NO: 14550 - DNA, 75 bp, synthetic construct
  source 1..75: mol_type = other DNA
atgggtaaaggtggcagcaaggggcacactcctcgcgaagcgaaagataacctgaaatccacgcagttactgagc

SEQ ID NO: 14551 - DNA, 75 bp, synthetic construct
  source 1..75: mol_type = other DNA
cagatataaaaatgaccatggtctatgcacacttcgccccagaccatttagaagatgccgtaactaaaaatcctt

SEQ ID NO: 14552 - DNA, 75 bp, synthetic construct
  source 1..75: mol_type = other DNA
ctttgcagcggatgctgcaccggcaggtatgaagcggggcgtcggtgcggaaaaaatgccggtctgggtgccggt

SEQ ID NO: 14553 - DNA, 75 bp, synthetic construct
  source 1..75: mol_type = other DNA
ggaggcgctggcctccacacgggtgatgacggacggacagtcagaaacggtgctgaccggtaatctggtgatggc

SEQ ID NO: 14554 - DNA, 75 bp, synthetic construct
  source 1..75: mol_type = other DNA
aaagctgaaaatgatgctcttcggcgcaagcttgataatggtggtcgggtgctcgtcaaaggaaaatgccctgtg

SEQ ID NO: 14555 - DNA, 75 bp, synthetic construct
  source 1..75: mol_type = other DNA
tggcacaggtggcgtatggagtgctgaagtcaggcgtgccgttcgatgcgtcacggcataatccggtagcggcgt

SEQ ID NO: 14556 - DNA, 75 bp, synthetic construct
  source 1..75: mol_type = other DNA
aagagaagctgtttctgcattgataaagcttggcaatttacgcagtaaagactatttgttccgatctcgggtcgg

SEQ ID NO: 14557 - DNA, 75 bp, synthetic construct
  source 1..75: mol_type = other DNA
cccgaccgaatccgtggccattgaccttgcttatgaaggttccggcagtggcgactggcgcactgacggtttcat

SEQ ID NO: 14558 - DNA, 75 bp, synthetic construct
  source 1..75: mol_type = other DNA
tgtccgcagccatttgtctggccgtatccggtgcgcctgcatgggcgtctgaacatcagtccactctaagcgccg

SEQ ID NO: 14559 - DNA, 75 bp, synthetic construct
  source 1..75: mol_type = other DNA
gcatcgtaaatgctcgtttgcaaattaccaggtgcagaacgacggccagcgatacgcgttaagccaggcgaaatc

SEQ ID NO: 14560 - DNA, 75 bp, synthetic construct
  source 1..75: mol_type = other DNA
gaatcccttacgcaggcactgtatggaaagctgcatcatacgaatatgcaggaatacaatatggtgcaaaaagtc

SEQ ID NO: 14561 - DNA, 75 bp, synthetic construct
  source 1..75: mol_type = other DNA
atattatcacgaaactatctattaaacagcagattagcagatacaacatgaataaaatttactcactaaaatata

SEQ ID NO: 14562 - DNA, 75 bp, synthetic construct
  source 1..75: mol_type = other DNA
ggaattatcttcgacaacgatgaggataaaacaggttcggcagcactgttgcgctgtatcgaacaggccagggag

SEQ ID NO: 14563 - DNA, 75 bp, synthetic construct
  source 1..75: mol_type = other DNA
tgtgatggaccgcatggtcatgaacggtggtcgctgggtgaattttaactgggagagctggcgttcgaatgtcag

SEQ ID NO: 14564 - DNA, 75 bp, synthetic construct
  source 1..75: mol_type = other DNA
atgaacgtttatgaccgggtcatacccaatcgctcctgggaaacgttatggatgctgagtatcggggtgattgca

SEQ ID NO: 14565 - DNA, 75 bp, synthetic construct
  source 1..75: mol_type = other DNA
cgacctggtgatctggttgctgatttttttatgggatccggttccacaataaaagcagcaatggcgctggggcgt

SEQ ID NO: 14566 - DNA, 75 bp, synthetic construct
  source 1..75: mol_type = other DNA
agaaacccagatttataccgtcatacgtgaacagcgccgtctgcatctggcaagaacgcaaccgccacttttctg

SEQ ID NO: 14567 - DNA, 75 bp, synthetic construct
  source 1..75: mol_type = other DNA
ggcagaagagaaacatcagcgcggtgaactggaaaagccccaccaccagctggtggatacgtatacgtcactgaa

SEQ ID NO: 14568 - DNA, 75 bp, synthetic construct
  source 1..75: mol_type = other DNA
acgttgatgcgcggtttgcagcgtatcgatcgtgttgagatcgactctcctcgccgtgccagcagcggtgatagc

SEQ ID NO: 14569 - DNA, 75 bp, synthetic construct
  source 1..75: mol_type = other DNA
ggtcagtgatgcgggggctacgggaggtaaggccctgcaactgaataaaccggaaaaccacatctggtttctgga

SEQ ID NO: 14570 - DNA, 75 bp, synthetic construct
  source 1..75: mol_type = other DNA
cagggtaaaaatgaccgcactgacgtaactgaagctaatggtgatggtttcggtttctccactacttatgagtat

SEQ ID NO: 14571 - DNA, 75 bp, synthetic construct
  source 1..75: mol_type = other DNA
tttgacaaaaaagcagaagattatttcttcaataagtttctgttgtcttttgatccctcaacacagcaatggagt

SEQ ID NO: 14572 - DNA, 75 bp, synthetic construct
  source 1..75: mol_type = other DNA
gcctggcatctgatatcgaaatcatgatgcgtgaacgcttcagtgtgctgaaccatattatctgggcgaagccgt

SEQ ID NO: 14573 - DNA, 75 bp, synthetic construct
  source 1..75: mol_type = other DNA
gcctggcatctgacaccgaaatcatgatgcgtgagcgctttaatgtgctgaaccacattatctgggcgaagccgt

SEQ ID NO: 14574 - DNA, 75 bp, synthetic construct
  source 1..75: mol_type = other DNA
ccggcagtatgtggagctgcagagtgaatataagcatctgcggcggtattttggtgtgacggcgcaggtgccgta

SEQ ID NO: 14575 - DNA, 75 bp, synthetic construct
  source 1..75: mol_type = other DNA
cgacacatcagtccttccacgcaatatcttctcgcagtcgtatctgctttacgttatcgcacagggcactgatgt

SEQ ID NO: 14576 - DNA, 75 bp, synthetic construct
  source 1..75: mol_type = other DNA
aacagtcgcgcaaaagccgaattaaacggagcattctttaacataacccgcccccgcaatatcgcgtttaactat

SEQ ID NO: 14577 - DNA, 75 bp, synthetic construct
  source 1..75: mol_type = other DNA
acatgagttatccctggagcgtgagcgccagctggaaatacaggaacggacactggatggcccttcgctgggatg

SEQ ID NO: 14578 - DNA, 75 bp, synthetic construct
  source 1..75: mol_type = other DNA
atgaaataccacgtcagtgtgtgactcctggtgattatgttcttcataacggccggacatatattgcctcggcaa

SEQ ID NO: 14579 - DNA, 75 bp, synthetic construct
  source 1..75: mol_type = other DNA
tggatgaggtgcgtccggttctgcaggcgatggtggatgacgctgtgggggccattccggtaccgcgtgatggtc

SEQ ID NO: 14580 - DNA, 75 bp, synthetic construct
  source 1..75: mol_type = other DNA
cttcctggtggggatattattatcttattcgcaacacttactttatatttggcattccttttttattgttatgtt

SEQ ID NO: 14581 - DNA, 75 bp, synthetic construct
  source 1..75: mol_type = other DNA
agcagccacttctgcatccaccgcgactacgaaagcgtcagaagctgccacctcagcccgggatgcggcggcttc

SEQ ID NO: 14582 - DNA, 75 bp, synthetic construct
  source 1..75: mol_type = other DNA
gattatttcaccctccgggaacgactggtaatgatgcaggcccaacttgaaggtgctcagcaatacataaccgaa

SEQ ID NO: 14583 - DNA, 75 bp, synthetic construct
  source 1..75: mol_type = other DNA
cacacagggaactgtgtgaactggcctgccgttttctccgcaacaacggctttaaggtggtgttcagtgaccgtt

SEQ ID NO: 14584 - DNA, 75 bp, synthetic construct
  source 1..75: mol_type = other DNA
tacccgcaaacattgatgaacgggtcatgatttgtccgttaacaaacagccagttcatgacaaaagcgaacagta

SEQ ID NO: 14585 - DNA, 75 bp, synthetic construct
  source 1..75: mol_type = other DNA
agtcagagggaagcctgaaagtacagggatggtcagccagtggcggcagggcagaagtggtcagcgatgcggagg

SEQ ID NO: 14586 - DNA, 75 bp, synthetic construct
  source 1..75: mol_type = other DNA
gacgcaacaggacaccatccgccagatggccgaatataaccgcctgctctcactgcgggtggcggcttatgcttc

SEQ ID NO: 14587 - DNA, 75 bp, synthetic construct
  source 1..75: mol_type = other DNA
attatttcaggttcccggagaacactgattattcagtgggggcaggcgagatttggtgggtctggtggtgaagat

SEQ ID NO: 14588 - DNA, 75 bp, synthetic construct
  source 1..75: mol_type = other DNA
agaagacgaagaccaggcggttgtgggcgtatgttcgtgatgaccgcaatgccgggtcagcgttggcacctgcag

SEQ ID NO: 14589 - DNA, 75 bp, synthetic construct
  source 1..75: mol_type = other DNA
gtcttttaacatccgtactgaaacaatctcccgcatcaagagttaatctgagctcacgtcatcagtttgctccag

SEQ ID NO: 14590 - DNA, 75 bp, synthetic construct
  source 1..75: mol_type = other DNA
atgacggcggagcagcgccttgccgaacgtcagttgaaaacgaaaccgctgctgaaatccctggaaagctggctg

SEQ ID NO: 14591 - DNA, 75 bp, synthetic construct
  source 1..75: mol_type = other DNA
agcacctactgcggcacagtcggtcaacaatacacagattgccaccacggcatttgtgaaatcggcgattgcggc

SEQ ID NO: 14592 - DNA, 75 bp, synthetic construct
  source 1..75: mol_type = other DNA
atggaaataaaaccagaagatgagttaagcaatatcgttttatttccggtaaaagaggatgacccacgtaatcag

SEQ ID NO: 14593 - DNA, 75 bp, synthetic construct
  source 1..75: mol_type = other DNA
ctggcccccaccgtggtgccaatggtgaacggtggtcaggccagtattgccatcagcaataccagcccgaatctg

SEQ ID NO: 14594 - DNA, 75 bp, synthetic construct
  source 1..75: mol_type = other DNA
attaaatatggacgtggttgccagaaatgcgctgggaatatgaagttatcgcatgaagaacaaatatcggctatt

SEQ ID NO: 14595 - DNA, 75 bp, synthetic construct
  source 1..75: mol_type = other DNA
aatagataattatcatacaacttaccgccgttggcaggctgaggcgggagatattgattattatcttttcactgg

SEQ ID NO: 14596 - DNA, 75 bp, synthetic construct
  source 1..75: mol_type = other DNA
cagaatcgtgtacagggtcgaagttctggctcaatgtgctgactgaactgaaaaaccgcggtctgaacgatatcc

SEQ ID NO: 14597 - DNA, 75 bp, synthetic construct
  source 1..75: mol_type = other DNA
tgttgcaccgatctttgttaatgccaactcgagcaatagtatattaataattaagggagcgaataaatttctttc

SEQ ID NO: 14598 - DNA, 75 bp, synthetic construct
  source 1..75: mol_type = other DNA
gaaaacaagaacgggagctattaaataaaatatgcattgtttcaatgctggcccgtttacgcctgatgcaaaaag

SEQ ID NO: 14599 - DNA, 75 bp, synthetic construct
  source 1..75: mol_type = other DNA
cggtagttgcctctactgcggtatccggttctgctatggctggtttaggtgcttgggaggaaaattctgcaggag

SEQ ID NO: 14600 - DNA, 75 bp, synthetic construct
  source 1..75: mol_type = other DNA
acccgctggccaaccgcgtccagtgctccatcactacgctggccattgagtgcggactggcgacggagtctgctg

SEQ ID NO: 14601 - DNA, 75 bp, synthetic construct
  source 1..75: mol_type = other DNA
aagctggtcctactttatttctgtatttcaccgctattatggcttcccgccagacagatatgtatccaggcaagg

SEQ ID NO: 14602 - DNA, 75 bp, synthetic construct
  source 1..75: mol_type = other DNA
ttctgattatttcggtggcctgcgccattgggattatgcgaattattcattcagtaaaaaagattgaacgctttt

SEQ ID NO: 14603 - DNA, 75 bp, synthetic construct
  source 1..75: mol_type = other DNA
tgcttcagcattcctgctggcctcaaacggcaaagtgcgcggcgattcagatttcatcttctataacaacctgac

SEQ ID NO: 14604 - DNA, 75 bp, synthetic construct
  source 1..75: mol_type = other DNA
taaaaaataatgcctcagcgtctttttcagtcggctctgatgtgccagtactgggcagtgttacggtgaataaca

SEQ ID NO: 14605 - DNA, 75 bp, synthetic construct
  source 1..75: mol_type = other DNA
aattcttgatatcaaaaatcaggagttatcgggaacgttaactctgtattcccggccctctatcgcccaatgctg

SEQ ID NO: 14606 - DNA, 75 bp, synthetic construct
  source 1..75: mol_type = other DNA
tatctgaggggctgttccggcgcgtctgtctgcgcaccgggaaggaatggtcggaggcatccgagcaggcctgga

SEQ ID NO: 14607 - DNA, 75 bp, synthetic construct
  source 1..75: mol_type = other DNA
acgctctccggagatccaccacaggaattgtgcagctcttcgttcctgacaatatagccgctaaattttgtcacc

SEQ ID NO: 14608 - DNA, 75 bp, synthetic construct
  source 1..75: mol_type = other DNA
tgctgcctgtctgatgacgtacagccatcatgcctgccgtacggaatgttatgccatgacggtccattattaccg

SEQ ID NO: 14609 - DNA, 75 bp, synthetic construct
  source 1..75: mol_type = other DNA
aaccgaaagaagaatgaactgtcctgaaaatggttcattacgcatagggcgtatcagcaccaaagagcgggaaca

SEQ ID NO: 14610 - DNA, 75 bp, synthetic construct
  source 1..75: mol_type = other DNA
agcaactccggaaaacgtagaaatgctctctggctatgtttccacgtacaaattaaccgatagcgagcgcgatat

SEQ ID NO: 14611 - DNA, 75 bp, synthetic construct
  source 1..75: mol_type = other DNA
atgacgacaccaaccagacggataagtttctatctgaagcccgccgccgtcaagaacgaaggcgaagcatgcgcc

SEQ ID NO: 14612 - DNA, 75 bp, synthetic construct
  source 1..75: mol_type = other DNA
acaaagggacgccgtggtcaatcagggaaattatccgccgtttcggcttcggcgaagtggatctgattgaaggca

SEQ ID NO: 14613 - DNA, 75 bp, synthetic construct
  source 1..75: mol_type = other DNA
gtcgccacaaccgaaatcattaaagcaactgaagaaagtaacggccatcgtgtcagtctgccgttatcggttttc

SEQ ID NO: 14614 - DNA, 75 bp, synthetic construct
  source 1..75: mol_type = other DNA
caggtgcttcctgaagtggctgctgcctcgtttgcattagctaagaaggcattagtgattggcgatacggagcag

SEQ ID NO: 14615 - DNA, 75 bp, synthetic construct
  source 1..75: mol_type = other DNA
cgacagcggcgatactattttgtcgatcagtgggatcttctccggcacgctctcctggctgttcctgcaattcga

SEQ ID NO: 14616 - DNA, 75 bp, synthetic construct
  source 1..75: mol_type = other DNA
gatgaccaaaaacatcaagttcctggtcggctttgccatactctctgtatttattgcagtaggtatgtctgttgc

SEQ ID NO: 14617 - DNA, 75 bp, synthetic construct
  source 1..75: mol_type = other DNA
cgctaaaggggtaaccgcccgttggcaacgtcgaatgaaactcactccatgtgtggtgatgacatgctatatgct

SEQ ID NO: 14618 - DNA, 75 bp, synthetic construct
  source 1..75: mol_type = other DNA
aaagttatttgtatgattttgccgatttactcattgtcgatgaagccgggcaggtgcttcctgaagtggctgctg

SEQ ID NO: 14619 - DNA, 75 bp, synthetic construct
  source 1..75: mol_type = other DNA
tcgtcacactcatccggcgttatggtgtcagtctcattcatctggatgccagtgccggatatctgccgggtttac

SEQ ID NO: 14620 - DNA, 75 bp, synthetic construct
  source 1..75: mol_type = other DNA
ggcgatctttattctttcagtcttatgtctgccggggcggcatcggcctggcatgatgttgcgcttgagttgact

SEQ ID NO: 14621 - DNA, 75 bp, synthetic construct
  source 1..75: mol_type = other DNA
cgaatgacggggcgtaatatctggatggtggaccaggcaaacctgaccattgatgagatatgtgcaaccacgaag

SEQ ID NO: 14622 - DNA, 75 bp, synthetic construct
  source 1..75: mol_type = other DNA
ttcatggcgaatcattcaccggcagcggtgcggggtggcgtgtcacagacgtcagcagacggtgatgcggacgtg

SEQ ID NO: 14623 - DNA, 75 bp, synthetic construct
  source 1..75: mol_type = other DNA
attgcttgaattactggaaaaacaatctggtctccatacgtctgtggattgcagtactcctcttacagagcagag

SEQ ID NO: 14624 - DNA, 75 bp, synthetic construct
  source 1..75: mol_type = other DNA
aaagcaaagtgtcagtcggcggggaaactgctgggataatagcccaatggaacgcttcttccgcagtctgaaaac

SEQ ID NO: 14625 - DNA, 75 bp, synthetic construct
  source 1..75: mol_type = other DNA
atgaaatcaaaagacaccctaaagtggttccctgcgcagcttcctgaagtcagaattatcctaggggatgctgta

SEQ ID NO: 14626 - DNA, 75 bp, synthetic construct
  source 1..75: mol_type = other DNA
tcatcagggttgaaaccgccaccggtgagctggcgaaaacgcagcgccgcagcctggcggatacccttcagcagt

SEQ ID NO: 14627 - DNA, 75 bp, synthetic construct
  source 1..75: mol_type = other DNA
cctaccttttcgaacgttgtcgcagaattacggacattcagagacgtatgtaatgctctgctcccatactttcgt

SEQ ID NO: 14628 - DNA, 75 bp, synthetic construct
  source 1..75: mol_type = other DNA
gctgacattctgacaccgcgacgccgggaggattacggtaaggacctgtggagcgcatatcagaccatccaggag

SEQ ID NO: 14629 - DNA, 75 bp, synthetic construct
  source 1..75: mol_type = other DNA
gtggcgaacaattgccagggtgtcagggcagccaattgcaacagtgatggcagtgtatatccacctcctggtgag

SEQ ID NO: 14630 - DNA, 75 bp, synthetic construct
  source 1..75: mol_type = other DNA
gactggataccctgggtatggatgaactgatagcgaaagcctggcgttttgtgcgtgagcgtttccgcagttacc

SEQ ID NO: 14631 - DNA, 75 bp, synthetic construct
  source 1..75: mol_type = other DNA
cgggcaatacaccccggattttattgtttttattcttttttgttgtttctgtcataaccacaattgcatgcggat

SEQ ID NO: 14632 - DNA, 75 bp, synthetic construct
  source 1..75: mol_type = other DNA
caccggaagccgtcagccattcactggcactggcggcgtcactggatgcgcaggggtacagcgttaacgacatca

SEQ ID NO: 14633 - DNA, 75 bp, synthetic construct
  source 1..75: mol_type = other DNA
ttgtccgcgcttatctgagagcttcaacagcagaacaggatgcttcgcgtgccctggaaactatcgaggcttttg

SEQ ID NO: 14634 - DNA, 75 bp, synthetic construct
  source 1..75: mol_type = other DNA
aaatgagcccggaagccgccggcattgctgcctgtctgatgacatacagccatcatgcctgtcgtacggagtgtt

SEQ ID NO: 14635 - DNA, 75 bp, synthetic construct
  source 1..75: mol_type = other DNA
tttccttatttaaggccccttcctcgggaggggctttcccgtttcagcgtcccgctgaaatcgtcggcttacctc

SEQ ID NO: 14636 - DNA, 75 bp, synthetic construct
  source 1..75: mol_type = other DNA
gtggccatcagggaccattaccgtcagggtttatgacgatcagccgtttgaccggcagattgttattccggcggt

SEQ ID NO: 14637 - DNA, 75 bp, synthetic construct
  source 1..75: mol_type = other DNA
tcggtatcagcgtggctggtaaatgactggtatcccacagccagtatcagtgatttgctggttgtggtgatgaag

SEQ ID NO: 14638 - DNA, 75 bp, synthetic construct
  source 1..75: mol_type = other DNA
accggcagtgcagcacctgacggtggaggtgagcgcggctgacggtcagtatctggcacaggcgaaatgggacac

SEQ ID NO: 14639 - DNA, 75 bp, synthetic construct
  source 1..75: mol_type = other DNA
ttccgtcagccctgctcaacgagtccgccacgctgttccgtcgcaagtattacattaacggcagtcatgcgggct

SEQ ID NO: 14640 - DNA, 75 bp, synthetic construct
  source 1..75: mol_type = other DNA
catccaggtgccgtcaaactatgacccggaaaaacgcacgtacagtggtatctgggacggcagtctgaaaccggc

SEQ ID NO: 14641 - DNA, 75 bp, synthetic construct
  source 1..75: mol_type = other DNA
ccggtgctggacagtgaggggaataccaatatctccggtgtcacggtggtgttccgggcaggtgagcaggagcag

SEQ ID NO: 14642 - DNA, 75 bp, synthetic construct
  source 1..75: mol_type = other DNA
gccgtcctgttgtttatgaagtcggtgttgatggtggcgcttatatgttctatgcgcagaaaaataccgataaca

SEQ ID NO: 14643 - DNA, 75 bp, synthetic construct
  source 1..75: mol_type = other DNA
cggggctgaaatttataaccgaacggctctggataatactctgatttacacgggtgttattgatatgcctgcagg

SEQ ID NO: 14644 - DNA, 75 bp, synthetic construct
  source 1..75: mol_type = other DNA
ttcctcgccagaaggtggcgatcatttatgatgttggcgtatcgactttgtataagaagtttccggtcggagata

SEQ ID NO: 14645 - DNA, 75 bp, synthetic construct
  source 1..75: mol_type = other DNA
gcggaagcggtggtggcgcgtctggatacagactttgtggacccgaaaaaagcggcggtggcagatgtctcccct

SEQ ID NO: 14646 - DNA, 75 bp, synthetic construct
  source 1..75: mol_type = other DNA
tgcggagcgctggatcaactggcgtcgtcgccgtaccgcggcggtggctgtgatcaccggtgtgaactacggaac

SEQ ID NO: 14647 - DNA, 75 bp, synthetic construct
  source 1..75: mol_type = other DNA
ggatgtgagcggatttttgaggataaaatcagtggcactaagtccgacagaccggggcttaaaaaactgctcagg

SEQ ID NO: 14648 - DNA, 75 bp, synthetic construct
  source 1..75: mol_type = other DNA
gccaatcaggtttgatccggaggcgctgcagatatggggtgtggttacgttcactgtcatgagacaccgcccgtg

SEQ ID NO: 14649 - DNA, 75 bp, synthetic construct
  source 1..75: mol_type = other DNA
gagcgttagttggttatatgcttaatgccaataaaattgcaaccgctgagataacaccagtttatgagataaagt

SEQ ID NO: 14650 - DNA, 75 bp, synthetic construct
  source 1..75: mol_type = other DNA
gtctgatagtgcggaaaaacggtgctgaaatttataaccgtaccgcgctggataatacgctgatttacagtggtg

SEQ ID NO: 14651 - DNA, 75 bp, synthetic construct
  source 1..75: mol_type = other DNA
aacaccaaacggtacggttacagtcaccatcagcgatgatcataactttgaccgccagattattattccgcccat

SEQ ID NO: 14652 - DNA, 75 bp, synthetic construct
  source 1..75: mol_type = other DNA
attgcggatatcaggcaggttgaaaccgcagcccgctatcttggctcggcgctgtactggatagctgccagtatc

SEQ ID NO: 14653 - DNA, 75 bp, synthetic construct
  source 1..75: mol_type = other DNA
caccgccatcactgcggatacagagcatcgtttcagtggtctgccgctcggggaatacaccctgacagtcagggc

SEQ ID NO: 14654 - DNA, 75 bp, synthetic construct
  source 1..75: mol_type = other DNA
gactgaaatcaaccgcagactttcccgcgcatcacgcgtcgcgcaaatcatgcacatcaatatgctgcatgagcg

SEQ ID NO: 14655 - DNA, 75 bp, synthetic construct
  source 1..75: mol_type = other DNA
tcagagcgcataaaaatggatgttaataaaaataactttaatgctgttctggctgatatctcgccgtcagtacgc

SEQ ID NO: 14656 - DNA, 75 bp, synthetic construct
  source 1..75: mol_type = other DNA
gcactgaagcgtataccggtcgtgaagtgcaggatattcccggtgtgctggctgtgtttgcagaacgccgtaagg

SEQ ID NO: 14657 - DNA, 75 bp, synthetic construct
  source 1..75: mol_type = other DNA
gcactttggtctcattccacagtgggtcaccctggagccccgtgttttcggctggatggaccgtctgtgcgaaga

SEQ ID NO: 14658 - DNA, 75 bp, synthetic construct
  source 1..75: mol_type = other DNA
atgccatgacggtccattattatcggttgcgggattacgccctgcagcatcctgaatgctgcgccattatgcgca

SEQ ID NO: 14659 - DNA, 75 bp, synthetic construct
  source 1..75: mol_type = other DNA
gtgaccctggagccccgtgtcttcggctggatggaccgtctgtgtgaagactactgcggtggtatctggaatctg

SEQ ID NO: 14660 - DNA, 75 bp, synthetic construct
  source 1..75: mol_type = other DNA
cgtccgttaccggcacaccttccccgtgaaatacagcgtctggaatctgaagaaagctgttgcccggagtgtggc

SEQ ID NO: 14661 - DNA, 75 bp, synthetic construct
  source 1..75: mol_type = other DNA
ttcgcatcggcgtcgagggtgacacctgcgacggccgcattatcagcggcaacgatattcaggaaatggccgaat

SEQ ID NO: 14662 - DNA, 75 bp, synthetic construct
  source 1..75: mol_type = other DNA
ctgaacaacggcggggcatttatggcacccgaaccggatgacgatgatgacgaaacatgggtactgttcaatgcc

SEQ ID NO: 14663 - DNA, 75 bp, synthetic construct
  source 1..75: mol_type = other DNA
tggagcctgaagaaagttgttgcccggagtgtggcagtgagctggattatctgggtgaagtcagtgctgagcagc

SEQ ID NO: 14664 - DNA, 75 bp, synthetic construct
  source 1..75: mol_type = other DNA
aaaacagggcgtatctggacgtatgtccgggatgatcgcaatgtgggttcgtcatctcctccagcggtctggttc

SEQ ID NO: 14665 - DNA, 75 bp, synthetic construct
  source 1..75: mol_type = other DNA
ccaccagcatcatccaggataaagcgaaaaaggtgctggcgctgaaagtggatccggagtcgccggagtctttta

SEQ ID NO: 14666 - DNA, 75 bp, synthetic construct
  source 1..75: mol_type = other DNA
cctgccgctcgccagccgctggtggaagacaaaacattgctgccgtttttcagtaacgcacgggtgattcgtgct

SEQ ID NO: 14667 - DNA, 75 bp, synthetic construct
  source 1..75: mol_type = other DNA
agtgaccttgtgccttcggttcctgccaccagcatcatccaggataaagcgaaaaaggtgctggcgctgaaagtg

SEQ ID NO: 14668 - DNA, 75 bp, synthetic construct
  source 1..75: mol_type = other DNA
ccacatcttctgtttccgtaaccgctgcatcagggaatgaccagcctcagttggttgccaccctcgtccctgatg

SEQ ID NO: 14669 - DNA, 75 bp, synthetic construct
  source 1..75: mol_type = other DNA
cggtcacatgacgctggagttttcggtgtcagcatggctggtaaataactggtatcccacagcaagtatcagcga

SEQ ID NO: 14670 - DNA, 75 bp, synthetic construct
  source 1..75: mol_type = other DNA
aaggtgcgtccttacttaacggtgactcctggcacagtatcaactggcgtcagtgctatcgggaagtgcggagac

SEQ ID NO: 14671 - DNA, 75 bp, synthetic construct
  source 1..75: mol_type = other DNA
atgggtactgttcaatgccatgaacggtaaccgcgctgaaatgagtccggaagctgccggcattgctgcctgtct

SEQ ID NO: 14672 - DNA, 75 bp, synthetic construct
  source 1..75: mol_type = other DNA
ccacaccttctgtttccgtaactactgcatcagggaataaccagtctcaactggttgccaccatagtccctgatg

SEQ ID NO: 14673 - DNA, 75 bp, synthetic construct
  source 1..75: mol_type = other DNA
atgaaaatcatcacccgtggcgaagccatgcgtattcaccgtcagcatcctgcatcccgtctttttccgttctgt

SEQ ID NO: 14674 - DNA, 75 bp, synthetic construct
  source 1..75: mol_type = other DNA
tggtaccggaactcgggctggtggtccttaggccgggccgtgaatccatgcaagtatttcataaccctcgagtgc

SEQ ID NO: 14675 - DNA, 75 bp, synthetic construct
  source 1..75: mol_type = other DNA
gaaagcgacatcataccgggagaacagaccgccaccagcatactgaagcagcgcacaaaaaatattgcgctaccg

SEQ ID NO: 14676 - DNA, 75 bp, synthetic construct
  source 1..75: mol_type = other DNA
gccgtctgcgtcggcggatgccctgcatatccgtttccctgacggggcggtgattgagtatgaacccgaaaccag

SEQ ID NO: 14677 - DNA, 75 bp, synthetic construct
  source 1..75: mol_type = other DNA
tcaggtcgttgattatcgcgttgtgaagatgcccgttaccaaaggtggaaagctggaactgacaatcaccgggct

SEQ ID NO: 14678 - DNA, 75 bp, synthetic construct
  source 1..75: mol_type = other DNA
ctttgcctaacggtctacatgctcgtccggcgtgggaacttaaagaacagtgcagccagtggcaaagcgaaatca

SEQ ID NO: 14679 - DNA, 75 bp, synthetic construct
  source 1..75: mol_type = other DNA
ctttcctgtattcagggctggcgaaaaatgggctcaaaagaagtagtgtaaggttgctggcaatttctgagaaca

SEQ ID NO: 14680 - DNA, 75 bp, synthetic construct
  source 1..75: mol_type = other DNA
atggctgaaaaattatctacctggaagttcattcttatctggctggtgtttgtgattatggtctccggttatttc

SEQ ID NO: 14681 - DNA, 75 bp, synthetic construct
  source 1..75: mol_type = other DNA
caggacagcgatcgttacagtgggcgggaagacgatccacaggttccccgccagttgcgacagtcgcgccatcgt

SEQ ID NO: 14682 - DNA, 75 bp, synthetic construct
  source 1..75: mol_type = other DNA
atgaagaccgtgaaaacgaaggtgatatgatcttcccggcagaaaccatgactgttgagcagatggcgctgacca

SEQ ID NO: 14683 - DNA, 75 bp, synthetic construct
  source 1..75: mol_type = other DNA
cgggcaacaggcagatcgactcgccgacctggaaagaatgctgtatctgttcagcggcaaaccgatccctgacaa

SEQ ID NO: 14684 - DNA, 75 bp, synthetic construct
  source 1..75: mol_type = other DNA
tctaatgatcgaccttgaaaccatgggaaaaaatcctgatgccccgattatctcaataggtgcaatatttttcga

SEQ ID NO: 14685 - DNA, 75 bp, synthetic construct
  source 1..75: mol_type = other DNA
gtgagcttcatcgtatctcggatgccctgcaggtggtgcagaaacgtaacttctggcaactgcagactgaaatcc

SEQ ID NO: 14686 - DNA, 75 bp, synthetic construct
  source 1..75: mol_type = other DNA
tatgactcacaatgggcggcaatttgttccattgccccaaagattggctgtacaccggagactctgcgtgtctgg

SEQ ID NO: 14687 - DNA, 75 bp, synthetic construct
  source 1..75: mol_type = other DNA
gaaagagctgaaacgggttaccgacgaacgggacatattaaaaaaagccactgtagattcaatctgtcaatgcaa

SEQ ID NO: 14688 - DNA, 75 bp, synthetic construct
  source 1..75: mol_type = other DNA
atgactaaaaatacacgtttttcccccgaggtccgtcaacgagcagttcgtatggttctggaaagtcagggcgaa

SEQ ID NO: 14689 - DNA, 75 bp, synthetic construct
  source 1..75: mol_type = other DNA
attcatgtcattagtgcgttctcaacaatgcacagtctggtcatcggacagatcaagacggatgagaaatctaat

SEQ ID NO: 14690 - DNA, 75 bp, synthetic construct
  source 1..75: mol_type = other DNA
tggaacgctacgggcgggagctgccgccggaatcgctggccgtgaagattgtcacgtcgctgtttttgcagccgg

SEQ ID NO: 14691 - DNA, 75 bp, synthetic construct
  source 1..75: mol_type = other DNA
ctgaaaatttgaaccaacaagggaaagacaaatcagctgatggggactccagaacggatattacccgtatgaatg

SEQ ID NO: 14692 - DNA, 75 bp, synthetic construct
  source 1..75: mol_type = other DNA
atctcgctggtcgctgccgggtggatttttaccgcgctgatttatctcgtggcgtcggtgttcttccggctgata

SEQ ID NO: 14693 - DNA, 75 bp, synthetic construct
  source 1..75: mol_type = other DNA
tgcactggcgtctggacgtggtaatgaatgaagacgactgcaaaataagaagaggaaacgccgcagaattatttt

SEQ ID NO: 14694 - DNA, 75 bp, synthetic construct
  source 1..75: mol_type = other DNA
cgcatctggcgctgaataaagaagacgagaagattcgcttccgcgatattcaggcacagccgcgcaaaatcatct

SEQ ID NO: 14695 - DNA, 75 bp, synthetic construct
  source 1..75: mol_type = other DNA
ctcatcccgacgacaatcacgaccgcccctggtgggggcttccctgcacagtgaggccctgttttggtgcccgtc

SEQ ID NO: 14696 - DNA, 75 bp, synthetic construct
  source 1..75: mol_type = other DNA
cccgctatcagcataccgtcacgctgtatgcgaaaggactgacctgcgaagccgataccctgggctcctgtggtt

SEQ ID NO: 14697 - DNA, 75 bp, synthetic construct
  source 1..75: mol_type = other DNA
cttttggctctgtcgttacggccagaaacggggggagcagtatcgccggagagaatggtcaggtttatctgagcg

SEQ ID NO: 14698 - DNA, 75 bp, synthetic construct
  source 1..75: mol_type = other DNA
atctaatcccgcgtcacatgcgcccgtttgaaatgctcgagcatgtcaacaggcatacggactatcttcttatgc

SEQ ID NO: 14699 - DNA, 75 bp, synthetic construct
  source 1..75: mol_type = other DNA
caccgacgagctgcgcggcgtggacgggatgagtgaacagcttgagtcccgtattaaggggattctgttgggtaa

SEQ ID NO: 14700 - DNA, 75 bp, synthetic construct
  source 1..75: mol_type = other DNA
tgcactggcacgtgccgaagaaaagatcgaagaagatgaacgggaaatagagcatctgcgggctcagatagaaaa

SEQ ID NO: 14701 - DNA, 75 bp, synthetic construct
  source 1..75: mol_type = other DNA
atgccccctcgaactccaaaagcctgccgcgttcgcggctgccgtaataccacgacagacccgtcaggctactgc

SEQ ID NO: 14702 - DNA, 75 bp, synthetic construct
  source 1..75: mol_type = other DNA
gttatgtctgcgtgccggtgtggtgcgtgaggcgaaaaccgttgaccacatcatccctaaagcgcatggcggcac

SEQ ID NO: 14703 - DNA, 75 bp, synthetic construct
  source 1..75: mol_type = other DNA
gccagacggcagctaaagcaagcgaagatgcagccagagagtacgcaagccaggctgcggagccgtataaatatg

SEQ ID NO: 14704 - DNA, 75 bp, synthetic construct
  source 1..75: mol_type = other DNA
ctttcaacggtgtcggaattcgcgatactgcccctatgctgaaaatcggcattaatactgtcatccggactttaa

SEQ ID NO: 14705 - DNA, 75 bp, synthetic construct
  source 1..75: mol_type = other DNA
ggggcgtgtgggtgaagtctctgtcattggtatcgtgctgctggttgcctctatctacttcggtggcgtgattgc

SEQ ID NO: 14706 - DNA, 75 bp, synthetic construct
  source 1..75: mol_type = other DNA
agcttcatgtggggacttgatggtaaacatatcgcactggaggctcatacttttgactctgtaaaatttattctg

SEQ ID NO: 14707 - DNA, 75 bp, synthetic construct
  source 1..75: mol_type = other DNA
tggccaggtaactgaagctgtcctgacccaggatggtcctgtactggagaatttcactgcaggacaatccgggac

SEQ ID NO: 14708 - DNA, 75 bp, synthetic construct
  source 1..75: mol_type = other DNA
ttatttgaaggaactgaaggttgttttttactttacgatgcatccacaaacgctgaaattgctcaattcaataaa

SEQ ID NO: 14709 - DNA, 75 bp, synthetic construct
  source 1..75: mol_type = other DNA
ggattagtaattattctcaaaaaaaaatcccaatcccctgcccggataatccggaaaaatcccttgccatccagt

SEQ ID NO: 14710 - DNA, 75 bp, synthetic construct
  source 1..75: mol_type = other DNA
ttgcgacggaggcaatccgctggcctgaaagtgtggatgaacacaaaaaggccaacgcctttgccggcagtgccc

SEQ ID NO: 14711 - DNA, 75 bp, synthetic construct
  source 1..75: mol_type = other DNA
tgctgttcactgtggcatccttctccgcctccgccggcaactgggctgtcaaaaacggctggtgtcagaccatga

SEQ ID NO: 14712 - DNA, 75 bp, synthetic construct
  source 1..75: mol_type = other DNA
gtatgaactggctagatccagaatgaaagagctcggcataactcaagagaagttagctgaagagcttggtatgac

SEQ ID NO: 14713 - DNA, 75 bp, synthetic construct
  source 1..75: mol_type = other DNA
tatcaggtattctctggattgctatggtatgaaattgatggaaaggaaatggctgaggcaaccttccatttacaa

SEQ ID NO: 14714 - DNA, 75 bp, synthetic construct
  source 1..75: mol_type = other DNA
cccgtgaaattggcatttccggtggtggagatcatcatcactcactggaggctgcccctatggcaactaccctca

SEQ ID NO: 14715 - DNA, 75 bp, synthetic construct
  source 1..75: mol_type = other DNA
gcccgtaaggcggcaatggatgttgtgaccgggcagatgcgcgatggtggtctgttctccggaggtggacgatga

SEQ ID NO: 14716 - DNA, 75 bp, synthetic construct
  source 1..75: mol_type = other DNA
acagaacgccccgcgtcacagccagtatcaaccgcacagataaccagtcagatggccggaaatatccgggcgtta

SEQ ID NO: 14717 - DNA, 75 bp, synthetic construct
  source 1..75: mol_type = other DNA
gatggggctctacaatcagtgagctgatgctaacactggctgatattccttatcagttcgttgatgtcagtggtt

SEQ ID NO: 14718 - DNA, 75 bp, synthetic construct
  source 1..75: mol_type = other DNA
caatgtcaccacgattattatggggagcagtactgcacacactgtcatacagggcgcttcagtgaggaggtggtt

SEQ ID NO: 14719 - DNA, 75 bp, synthetic construct
  source 1..75: mol_type = other DNA
gcttctttcattcgctgaaagtggaatgtatccatggagaacactttatcagccgggaaataatgcgggcaacgg

SEQ ID NO: 14720 - DNA, 75 bp, synthetic construct
  source 1..75: mol_type = other DNA
ctggtctggataaggcactggctgctggcgccactgaaatcacaaaagaagaatattttgcccgaaaaaatggca

SEQ ID NO: 14721 - DNA, 75 bp, synthetic construct
  source 1..75: mol_type = other DNA
tccgttggctggataaagacacccctgatgctgttgaaaaaatgcaggctctgttaccggcgatcgaaaaggcga

SEQ ID NO: 14722 - DNA, 75 bp, synthetic construct
  source 1..75: mol_type = other DNA
atgaaaatcaagcatgaacacatccgcatggcgatgaatgcctgggcacatcctgatggtgagaaagttcccgca

SEQ ID NO: 14723 - DNA, 75 bp, synthetic construct
  source 1..75: mol_type = other DNA
tgatgctgttgaaaaaattcaggctctgttaccggcgatcgaaaaggcgatgccgcctttgctggtggcccgtat

SEQ ID NO: 14724 - DNA, 75 bp, synthetic construct
  source 1..75: mol_type = other DNA
caatcacgcgaagcgcaatctgccattatgaccgatgaaatcccgttagatgatgcactgttacaattgcgggaa

SEQ ID NO: 14725 - DNA, 75 bp, synthetic construct
  source 1..75: mol_type = other DNA
agccaacttcgacaacacgattttgcgccgttcatacgaacggcaggggatcccctgcccgtggcgttactacaa

SEQ ID NO: 14726 - DNA, 75 bp, synthetic construct
  source 1..75: mol_type = other DNA
ctgagtggcagaacacagctcagtaaaggtgccagcatggtactgaatggcgatgtggtcagtaccggcgatatt

SEQ ID NO: 14727 - DNA, 75 bp, synthetic construct
  source 1..75: mol_type = other DNA
ctggatacactgaacgaactggcggcggcgctggggaatgacccgaactttgccacgacaatgcttaatgcactg

SEQ ID NO: 14728 - DNA, 75 bp, synthetic construct
  source 1..75: mol_type = other DNA
ggcaccaccacgctgaataacggcgccatacttaccctttccgggaagacggtgaacaacgataccctgaccatc

SEQ ID NO: 14729 - DNA, 75 bp, synthetic construct
  source 1..75: mol_type = other DNA
ataatcagacgacacaggatgccgtgctgagccgtgctgttgcaaaaggcgactccccggtaacgttccataaac

SEQ ID NO: 14730 - DNA, 75 bp, synthetic construct
  source 1..75: mol_type = other DNA
cggcttctgcaattacatcaaatcagttccgcggtttttcaagcatagcgactgctgcaaacgctgtattaggtc

SEQ ID NO: 14731 - DNA, 75 bp, synthetic construct
  source 1..75: mol_type = other DNA
tatccggctgtggtttttgatgacagtgaagtggtctacggaaccacagacgtggtgctggcagaacaactgcgt

SEQ ID NO: 14732 - DNA, 75 bp, synthetic construct
  source 1..75: mol_type = other DNA
gagctgggaactgccatcgaatggggcggggactggaaaacactgaaagacggacctcactttcagttgaaacgc

SEQ ID NO: 14733 - DNA, 75 bp, synthetic construct
  source 1..75: mol_type = other DNA
atgtcaccgaggccacgaaaaaacagcactgacgtagccggtctttacgaaaagtttgatcgcagaactggcaga

SEQ ID NO: 14734 - DNA, 75 bp, synthetic construct
  source 1..75: mol_type = other DNA
actgacaaatcatgacaaccagattgtcttcggtacggccaacggaatgaccatcagtaccggtctggagtatgg

SEQ ID NO: 14735 - DNA, 75 bp, synthetic construct
  source 1..75: mol_type = other DNA
ggactggaagcccgtgtccgggaaaatatcaccctgggcgttcaggccggttatgcccacagcgtcagcggcagc

SEQ ID NO: 14736 - DNA, 75 bp, synthetic construct
  source 1..75: mol_type = other DNA
cgggattatttcaccctcagagagcggctgatgacgatgcacaagcaactggaaggggcgcaggaatatatccgt

SEQ ID NO: 14737 - DNA, 75 bp, synthetic construct
  source 1..75: mol_type = other DNA
aaatgagcccggaagctgccggcattgccgcctgtctgatggcgtacagccatcatgcctgtcgtacggagtgtt

SEQ ID NO: 14738 - DNA, 75 bp, synthetic construct
  source 1..75: mol_type = other DNA
ctgaattcaataccccaaacattgagctgtcagctgtatgccaaaagtatttcggtatgagccctaacacagcag

SEQ ID NO: 14739 - DNA, 75 bp, synthetic construct
  source 1..75: mol_type = other DNA
atgtcggtactggctgatggtgtgctggtggcgatggtaacggtcttactctggcctttacttcgcaaatctgaa

SEQ ID NO: 14740 - DNA, 75 bp, synthetic construct
  source 1..75: mol_type = other DNA
tgaaggtccggagggtaagagaatgtattatggcatgtaccattgtgaggagggatatgttgaatatgcgaatga

SEQ ID NO: 14741 - DNA, 75 bp, synthetic construct
  source 1..75: mol_type = other DNA
tttctgtatcggctgctgttccgtatacggatgtctggatgtataagcctgtacagtattatccgggcaaacacc

SEQ ID NO: 14742 - DNA, 75 bp, synthetic construct
  source 1..75: mol_type = other DNA
gcgtcccatctcccggagctttgcctgtaaacgaccctgactacataatgatttgcccactgaacccgggcaaca

SEQ ID NO: 14743 - DNA, 75 bp, synthetic construct
  source 1..75: mol_type = other DNA
atggtgctgattaccagcagtacgggcaatatcatcctgaaaatcgaccctgctgtagtgctggcaacccgcaag

SEQ ID NO: 14744 - DNA, 75 bp, synthetic construct
  source 1..75: mol_type = other DNA
ctggtctggacaaggcgctggctgccggcggtaccgaaatctcaaaagaagaatattttgcccgaaaaaatggca

SEQ ID NO: 14745 - DNA, 75 bp, synthetic construct
  source 1..75: mol_type = other DNA
tgctgcctgtctgatgacgtacagccatcatgcctgtcgtacggagaattatgccatgacggtccattattaccg

SEQ ID NO: 14746 - DNA, 75 bp, synthetic construct
  source 1..75: mol_type = other DNA
ccggcagaccaagacagttcgtgctggatccgtgtggcacaggcgtgggcaggcaccggttttggccacctggcg

SEQ ID NO: 14747 - DNA, 75 bp, synthetic construct
  source 1..75: mol_type = other DNA
gaagggaaagatttcaaagaaattgacctgctggcacgccagtctgagcgccacgcgcggatcggcaagtttaac

SEQ ID NO: 14748 - DNA, 75 bp, synthetic construct
  source 1..75: mol_type = other DNA
gcactgacccggtcagaggcggtattgcagaaaagcctggatataacggaagaggcagatttggcactgagaaac

SEQ ID NO: 14749 - DNA, 75 bp, synthetic construct
  source 1..75: mol_type = other DNA
gatgctgaatatatgcaggaaaaccgctgggatgaggagtctgcttcctttgtcccggttgagactgaatcagat

SEQ ID NO: 14750 - DNA, 75 bp, synthetic construct
  source 1..75: mol_type = other DNA
aggcggctaattcagatattcgcgtatctgatgttacgccccttacaaaatcccttcaagcaccaaagcgcacac

SEQ ID NO: 14751 - DNA, 75 bp, synthetic construct
  source 1..75: mol_type = other DNA
tcgcgggaaaacaccacgtttcacccagaattattcgtcactgagcgctgtacagaagaaagtgtatgatgagaa

SEQ ID NO: 14752 - DNA, 75 bp, synthetic construct
  source 1..75: mol_type = other DNA
aggcgtaccccacaatgcgctggacgatgcccgtcaccaggcaaaacaagtttcagcaatctggcaaaaactgat

SEQ ID NO: 14753 - DNA, 75 bp, synthetic construct
  source 1..75: mol_type = other DNA
ccaaagcacaaaatctgtttcgtcactcacgtaagaagccagcgcatgaatcttttattcagaattatgtcgcga

SEQ ID NO: 14754 - DNA, 75 bp, synthetic construct
  source 1..75: mol_type = other DNA
cttgagcgtgcgctgcgtgagcagtccggctcccggatacggcggatcctgcttcgtctgccgtgtgaatatgac

SEQ ID NO: 14755 - DNA, 75 bp, synthetic construct
  source 1..75: mol_type = other DNA
cagagcattgacggtaaatggcggagccactcagggaaccattcaggcagtgattagcatcacctatacctacag

SEQ ID NO: 14756 - DNA, 75 bp, synthetic construct
  source 1..75: mol_type = other DNA
ggacagtcgttcaccggactgcgaagagagactcaaagagttgatatgggcgttcagtgatttcgcccgcgatcg

SEQ ID NO: 14757 - DNA, 75 bp, synthetic construct
  source 1..75: mol_type = other DNA
ttgcagcgtcaatttttccatttcaccggaaacacaggtgattgattttggtaaatttaatttgctggatattcg

SEQ ID NO: 14758 - DNA, 75 bp, synthetic construct
  source 1..75: mol_type = other DNA
gttgaccgtatccggcgtgaacgcctgcctaaagaactggcatacgcgctgaaacaacaactgaggattgcaata

SEQ ID NO: 14759 - DNA, 75 bp, synthetic construct
  source 1..75: mol_type = other DNA
aatcttgctgaatatatgctctatctgccgatgcgtgatgcattctcttccgggtatttaaaaactgtctgttga

SEQ ID NO: 14760 - DNA, 75 bp, synthetic construct
  source 1..75: mol_type = other DNA
tggcgaaccccggtgctgaatacgccgcaacgcgacataatgctggtgcctggttcgttgacttactggcagagc

SEQ ID NO: 14761 - DNA, 75 bp, synthetic construct
  source 1..75: mol_type = other DNA
gtgtttccctcaagcgtcatatctggctcagggatgccgggcagtgctgtctctgtggtcgtgtggttgacctct

SEQ ID NO: 14762 - DNA, 75 bp, synthetic construct
  source 1..75: mol_type = other DNA
cggtgatatgtctcgtgataacgttcatcgttgggatggatatgtcacttaccatattaatagtgatttcacctt

SEQ ID NO: 14763 - DNA, 75 bp, synthetic construct
  source 1..75: mol_type = other DNA
atggcaagtcaacacattaatatccataacagcggtgtgatgtcgggaaatgtcaccactgcaggtgatatgaac

SEQ ID NO: 14764 - DNA, 75 bp, synthetic construct
  source 1..75: mol_type = other DNA
caatatctgtatgactcagagaggctactgaagagcgttgccggcgactggattgaaaaacctgagcaatatgaa

SEQ ID NO: 14765 - DNA, 75 bp, synthetic construct
  source 1..75: mol_type = other DNA
ccggattgcccgtgataatcctgacagcggtgtggtggtgagaatcgccggtgaaggtcgtccgtggaatcccgg

SEQ ID NO: 14766 - DNA, 75 bp, synthetic construct
  source 1..75: mol_type = other DNA
gctggctacatagtgtcagtcattaatcctgcgctgggtaaagctttcgctcagagtgaaggactgcgtaacaag

SEQ ID NO: 14767 - DNA, 75 bp, synthetic construct
  source 1..75: mol_type = other DNA
ctatgccggtgtgggtaagaccacacagttccgggcggtgatgtcagccgtgaacatgctgccggagagtgagcg

SEQ ID NO: 14768 - DNA, 75 bp, synthetic construct
  source 1..75: mol_type = other DNA
ctgactcatgaagctatgcgggatctaatcagagcccgtgcagcagctaaacgagacagcagagttgcccgacag

SEQ ID NO: 14769 - DNA, 75 bp, synthetic construct
  source 1..75: mol_type = other DNA
gagcgtgacctgacggggtggatgtcgctgtcgcgtaaaccggaggtgacatggtacgggtgggacggtgacagg

SEQ ID NO: 14770 - DNA, 75 bp, synthetic construct
  source 1..75: mol_type = other DNA
catcgttcagcgatatgctgtccggcttcaaagataaggtggcgtcatcccttaacagtgcggtcagttctgtta

SEQ ID NO: 14771 - DNA, 75 bp, synthetic construct
  source 1..75: mol_type = other DNA
tggtgaaaatcccgatggcggccccactgaaacaggcgtttgatgagaatgttgaccgtatccggcgtgaacgtc

SEQ ID NO: 14772 - DNA, 75 bp, synthetic construct
  source 1..75: mol_type = other DNA
ctctgatgtgctctggtgggttatgcatccgccaggagtaaaggaagtaaacagcccatacaaaaacgccaataa

SEQ ID NO: 14773 - DNA, 75 bp, synthetic construct
  source 1..75: mol_type = other DNA
tgacaggaaggttaaagtttcaccaacacttgatgtcccgttacctgaaaatattccaagaaaatattccaagta

SEQ ID NO: 14774 - DNA, 75 bp, synthetic construct
  source 1..75: mol_type = other DNA
ggtctcagaaactgaagcacagagtgctgttcaaagactggcgataatagaacaacggtggctcaggatgaagga

SEQ ID NO: 14775 - DNA, 75 bp, synthetic construct
  source 1..75: mol_type = other DNA
atcaagattggttccactgctgttgcatatcgtctttcagaagtgcaggcatggattcgaggtgagtgggaaaca

SEQ ID NO: 14776 - DNA, 75 bp, synthetic construct
  source 1..75: mol_type = other DNA
gtatcttccagaatgaggacatcgaaagcatcctcggcacgatattgcaggaaaacggggtgaccgagtggagcc

SEQ ID NO: 14777 - DNA, 75 bp, synthetic construct
  source 1..75: mol_type = other DNA
cctttatatacgtgttatactgtgcatttgattttgaccagagtgttaaagataactctggctggttatctattt

SEQ ID NO: 14778 - DNA, 75 bp, synthetic construct
  source 1..75: mol_type = other DNA
cagacaaagatgccatgcaccaggctgttgttcagtatgcagagcgggccgcagagaaactacgtggggagcgtc

SEQ ID NO: 14779 - DNA, 75 bp, synthetic construct
  source 1..75: mol_type = other DNA
gagactcagaagtctacctgtactggcgttgaaatgttccgcaaactgctggacgaaggccgtgctggtgagaac

SEQ ID NO: 14780 - DNA, 75 bp, synthetic construct
  source 1..75: mol_type = other DNA
cagcatgaacggtaatgatgctcaaatgagcgcggaagccgcaggcatcgcggtctgcctgattgaatatagcca

SEQ ID NO: 14781 - DNA, 75 bp, synthetic construct
  source 1..75: mol_type = other DNA
atgtctaaagaaaagtttgaacgtacaaaaccgcacgttaacgtgggtactatcggccacgttgaccaaggtaaa

SEQ ID NO: 14782 - DNA, 75 bp, synthetic construct
  source 1..75: mol_type = other DNA
tctctgactcctggtacgtcagccagctgcagacgatggtggcaacactgaaaatacccatggagcggcgtaacc

SEQ ID NO: 14783 - DNA, 75 bp, synthetic construct
  source 1..75: mol_type = other DNA
cagcagactcaccggctggttccgctctccgactcctggtacgtcagccagctgcagacgatggtggcaacactg

SEQ ID NO: 14784 - DNA, 75 bp, synthetic construct
  source 1..75: mol_type = other DNA
atgtctaaagaaaagtttgaacgtacaaaaccgcacgttaacgtaggtactatcggccacgttgaccagggtaaa

SEQ ID NO: 14785 - DNA, 75 bp, synthetic construct
  source 1..75: mol_type = other DNA
tgatgccgacagtaatctacagagcctgtgttggccgtgtcataaggcgaagacggcccgtgaatggctgaagta

SEQ ID NO: 14786 - DNA, 75 bp, synthetic construct
  source 1..75: mol_type = other DNA
cagagacggcggagttaagcaagccacagctacgcatggtcgatctcaacttattaaccgttttcgatgccgtga

SEQ ID NO: 14787 - DNA, 75 bp, synthetic construct
  source 1..75: mol_type = other DNA
ccatcaatgaagccctgcgcagattgaaaaaagcgggaattgataaaccagagttggaagcatttttgcgtgaga

SEQ ID NO: 14788 - DNA, 75 bp, synthetic construct
  source 1..75: mol_type = other DNA
ctgacatgcctgatgaagtgcgcgcaaagctgcacaaaatcaccggtctgtttctgcgtgacgctggtgatgccg

SEQ ID NO: 14789 - DNA, 75 bp, synthetic construct
  source 1..75: mol_type = other DNA
acagaacggacggaagaaaacctttcaggtcgatacggcctcggttccttatctgacgcgtccgggacaggtccg

SEQ ID NO: 14790 - DNA, 75 bp, synthetic construct
  source 1..75: mol_type = other DNA
gtctgaagaccacgaccactgcgcagacgcagggcaacagtgtcagcgtggatgtgcagaacgcacagcttgacg

SEQ ID NO: 14791 - DNA, 75 bp, synthetic construct
  source 1..75: mol_type = other DNA
atgagtacccgaaatatccacgttaacaccgcgtcgtacacgcttcttgttgccgggaagaaaaaaaacaccggg

SEQ ID NO: 14792 - DNA, 75 bp, synthetic construct
  source 1..75: mol_type = other DNA
gtttcgtcagaaactgaatgagggctggtatcaggtgcgcattgccgggcgtgatgcaggcgaaaatgaattatc

SEQ ID NO: 14793 - DNA, 75 bp, synthetic construct
  source 1..75: mol_type = other DNA
ctcttgcaccaggcagtaatgaaaagaaaaaactgtatctcctgacggatttgattatttcgttgctggaaaaac

SEQ ID NO: 14794 - DNA, 75 bp, synthetic construct
  source 1..75: mol_type = other DNA
cgaaaaatccacctgtaccactgcgaccatcgcggcctgccgctggcccttatcagtaaggaaggggcaacagaa

SEQ ID NO: 14795 - DNA, 75 bp, synthetic construct
  source 1..75: mol_type = other DNA
tcccggagaaatcagtctgtgcagactgagtatacaggcaatggcatctggccatccgtctgtgaccggaacggt

SEQ ID NO: 14796 - DNA, 75 bp, synthetic construct
  source 1..75: mol_type = other DNA
agggggagatgctatttctggaaatcaaatcactttgaataataacggtattgttcaggggggatatggccccga

SEQ ID NO: 14797 - DNA, 75 bp, synthetic construct
  source 1..75: mol_type = other DNA
ggactcaggactattacacattattgtcgtcagacacaggtatctcgatcgctgataatagtcacattgtacaat

SEQ ID NO: 14798 - DNA, 75 bp, synthetic construct
  source 1..75: mol_type = other DNA
ccatccgccctgcgccagtcttcagcccgtaaaccgttaccggcctcacttccacgtgaaacccgggttatccgg

SEQ ID NO: 14799 - DNA, 75 bp, synthetic construct
  source 1..75: mol_type = other DNA
ttgaatggaaagggctgaagaaattatgcgtggcagtctcctttcggtccataatagcagaacaaaagaaagagc

SEQ ID NO: 14800 - DNA, 75 bp, synthetic construct
  source 1..75: mol_type = other DNA
gaaacagaaccagcttgaatcatggataaacagcttttgtgacacggacggcgccatcaataccggttctgaaaa

SEQ ID NO: 14801 - DNA, 75 bp, synthetic construct
  source 1..75: mol_type = other DNA
cgcattcgttcaaataactgttatggtcaggttattcgtcgtgaccaggaaagcgcattagcctgttgggggata

SEQ ID NO: 14802 - DNA, 75 bp, synthetic construct
  source 1..75: mol_type = other DNA
gcttctggcccatgtcgtcaccgggaagtatgcagaccatctgccgttataccgccagtcagaaatataccgtcg

SEQ ID NO: 14803 - DNA, 75 bp, synthetic construct
  source 1..75: mol_type = other DNA
aaggcagaacatgtatcgccagcatgttccgctttaatcatgactttgaacctgtgaataaagctgatgcagatc

SEQ ID NO: 14804 - DNA, 75 bp, synthetic construct
  source 1..75: mol_type = other DNA
atatcagtggttatggtaatgttcgcaagacgggagcaggtgcactgaacattagcgataacgcaaaatggaccg

SEQ ID NO: 14805 - DNA, 75 bp, synthetic construct
  source 1..75: mol_type = other DNA
atatgaagcggtggtatctgtgtccgcaggtacgggtcgcggatatcgtccagctgaacgggaatatccggccac

SEQ ID NO: 14806 - DNA, 75 bp, synthetic construct
  source 1..75: mol_type = other DNA
atgtcagacatcacaatctcccgtccggaagtggtcaccgggcatacggacgttatctgctccaccagtatccga

SEQ ID NO: 14807 - DNA, 75 bp, synthetic construct
  source 1..75: mol_type = other DNA
atcggcgatatcctgcgcacaccggtcggctcacgggtgatgcgtcgtgattacggctcgttgctggcgtcaatg

SEQ ID NO: 14808 - DNA, 75 bp, synthetic construct
  source 1..75: mol_type = other DNA
agggatcgtacaactgagcagtgccaccaacagcacctctgaaacgctggccgccacaccaaaagccgtcaaggc

SEQ ID NO: 14809 - DNA, 75 bp, synthetic construct
  source 1..75: mol_type = other DNA
gtgtgagtgaactgccggtgaactggtgggtacagccttctgttatccgcaccttcagctcccggggtgacatga

SEQ ID NO: 14810 - DNA, 75 bp, synthetic construct
  source 1..75: mol_type = other DNA
caatatactgtttacacctctgccgcctgcaacggttgatttccactcatcgcttaaatacgttgcccgccttcc

SEQ ID NO: 14811 - DNA, 75 bp, synthetic construct
  source 1..75: mol_type = other DNA
atgagtcagaaatacctcattcgcattgcagaactggaaagcctgctccgtcagaaagaccagcaactgagtctg

SEQ ID NO: 14812 - DNA, 75 bp, synthetic construct
  source 1..75: mol_type = other DNA
ttggtaatcccccatacagccgcgccagtcagcatgaggggcaatacatcaccggcatgcgttacatcatgaagc

SEQ ID NO: 14813 - DNA, 75 bp, synthetic construct
  source 1..75: mol_type = other DNA
gctggacaccatcgcgctatcttctgacgctatgcaatgaagaactcctgtggcgcgagagtgaaaaactgcgtc

SEQ ID NO: 14814 - DNA, 75 bp, synthetic construct
  source 1..75: mol_type = other DNA
ccagatgaagagtatgtctgcggagcggatattgctgaggggcttgagcacggggaccgctcatcgctggatatc

SEQ ID NO: 14815 - DNA, 75 bp, synthetic construct
  source 1..75: mol_type = other DNA
cgggaaaatactgcgaacacctgccactgtatcgtcagagtgaaatctttgcccgccagggtgtcgaactgagcc

SEQ ID NO: 14816 - DNA, 75 bp, synthetic construct
  source 1..75: mol_type = other DNA
acctgctgcccgtcgtgcggcttatccgtcagccacgcgttgtgtttcctgccagtcagtctttgaagcaaaaaa

SEQ ID NO: 14817 - DNA, 75 bp, synthetic construct
  source 1..75: mol_type = other DNA
gggcgggggcatcgaaagatgcgccggtttccttgatcaccggttacgccaaccccgttcagttcaccaccagcg

SEQ ID NO: 14818 - DNA, 75 bp, synthetic construct
  source 1..75: mol_type = other DNA
tgacgctgtggggaccattccggtaccgcgtgatggtcgtgattatgatccggatgtactgcagcaggcggtgaa

SEQ ID NO: 14819 - DNA, 75 bp, synthetic construct
  source 1..75: mol_type = other DNA
ctgattaatcagaaacgcattgcaccgctgaatcttctgagtgttgacccgaacaaccagagccagattattgcg

SEQ ID NO: 14820 - DNA, 75 bp, synthetic construct
  source 1..75: mol_type = other DNA
tggaactatcagttcgatgaaaacggctatgcgaaacgcgatgaaacactgactcatccgcgctgtgtgtggaac

SEQ ID NO: 14821 - DNA, 75 bp, synthetic construct
  source 1..75: mol_type = other DNA
ccgcagctgatgaaggcggtgtatgacatggcccgcaagggggcgcaggatgagattcaggcgcagatgcgtgat

SEQ ID NO: 14822 - DNA, 75 bp, synthetic construct
  source 1..75: mol_type = other DNA
agccagcgcccacctgccgggctaatccaccactctgatcgaggttcacagtactgcgcatacgattaccgggtc

SEQ ID NO: 14823 - DNA, 75 bp, synthetic construct
  source 1..75: mol_type = other DNA
gaaaacgatgattttgtgcgcaagttgccacgacaagttacatagcggaaaactacccgatctgagacaggaaaa

SEQ ID NO: 14824 - DNA, 75 bp, synthetic construct
  source 1..75: mol_type = other DNA
actgtgggggctgcgaccggagaggtatccgtatctactgtcgttgccacgttacgtagattgtatggtacggcg

SEQ ID NO: 14825 - DNA, 75 bp, synthetic construct
  source 1..75: mol_type = other DNA
ggtgaaggccggtctgaagcataactgcgccgctgtcattgtcgcccatagccatccctccggggaggctgaacc

SEQ ID NO: 14826 - DNA, 75 bp, synthetic construct
  source 1..75: mol_type = other DNA
tggttgatatccgcttgctggaccacctggtggtcggcggcatggagatcacctcgtttgcagatcgtggctggc

SEQ ID NO: 14827 - DNA, 75 bp, synthetic construct
  source 1..75: mol_type = other DNA
agataatcaaatatcaacaaaacaaagatcccctgtatccctgtcaggaacatcttttgatacaactctgtatcc

SEQ ID NO: 14828 - DNA, 75 bp, synthetic construct
  source 1..75: mol_type = other DNA
tctgggcgtcgttaccgggtgccggttacggccaacgtgagcacagcctcgacaaactggtcaccgtatggcgca

SEQ ID NO: 14829 - DNA, 75 bp, synthetic construct
  source 1..75: mol_type = other DNA
ttctcttgaccgcgaagctattgctgttttagaacgcgctcaaccacttcccaaaccaccgcctgaaatattgga

SEQ ID NO: 14830 - DNA, 75 bp, synthetic construct
  source 1..75: mol_type = other DNA
agcagcagaccaccgtcttgctgaattaacgatgaacaggttatatgacagagttcccaaagaggtctgggcata

SEQ ID NO: 14831 - DNA, 75 bp, synthetic construct
  source 1..75: mol_type = other DNA
cgagcgcgccctgatccgcgagcgtcagcgcgagggtattgcgctcgccaagcaacgcggggcttaccgtggcag

SEQ ID NO: 14832 - DNA, 75 bp, synthetic construct
  source 1..75: mol_type = other DNA
gtaccccaacagccttcgaagaacaatgcaacggcgggtccgcgaatggaagctacagtatggtgcagagcagga

SEQ ID NO: 14833 - DNA, 75 bp, synthetic construct
  source 1..75: mol_type = other DNA
tgctggcggcgaatctggcgcttcccgctcaccatctggtgacgttcacctggggcaatgtcagcgcggtagacg

SEQ ID NO: 14834 - DNA, 75 bp, synthetic construct
  source 1..75: mol_type = other DNA
catcgcgtcctgaaagacagcagccaggcggggttcagccacgttttggtgattgaggaggcccacagtctgccc

SEQ ID NO: 14835 - DNA, 75 bp, synthetic construct
  source 1..75: mol_type = other DNA
atgcccggtaaagtccatgctgatgatatccccgtcccggtccaggagccgggcagcggtaaaacccggacagcc

SEQ ID NO: 14836 - DNA, 75 bp, synthetic construct
  source 1..75: mol_type = other DNA
ggtgctcttgaaactttacaaaaaatgatgtctgaatgtatatatcaagaaggcaacgcctttgtcattatggga

SEQ ID NO: 14837 - DNA, 75 bp, synthetic construct
  source 1..75: mol_type = other DNA
aagtcagaaagcacggcaaagagcgccgtcgtatctggcgaaagttgcatcttgctgttgacagcaacacacatg

SEQ ID NO: 14838 - DNA, 75 bp, synthetic construct
  source 1..75: mol_type = other DNA
caacaattccactattgattaatctgttaaaagatccaaatggagatgtcagaaactgggccgcatttgcaataa

SEQ ID NO: 14839 - DNA, 75 bp, synthetic construct
  source 1..75: mol_type = other DNA
aagagcctgataagcgcggcggggcgaaaattccagagcgcggcgtgcgcagcaatagttgagcagttacgtcgt

SEQ ID NO: 14840 - DNA, 75 bp, synthetic construct
  source 1..75: mol_type = other DNA
ttggcctggatggagcgtttctgtgcgacctacagcggcggtatctggtcgttctacaccctcagtaatggcggc

SEQ ID NO: 14841 - DNA, 75 bp, synthetic construct
  source 1..75: mol_type = other DNA
ggggctgcgactggcgagatatctgtatcttctgtcgccgacacgttacgtagattgtatggttctgcggagtag

SEQ ID NO: 14842 - DNA, 75 bp, synthetic construct
  source 1..75: mol_type = other DNA
agcatggatgttgagtatggtcagtacagcgtcaccctgctggttgaaggttttccgccttcacatgccgggacc

SEQ ID NO: 14843 - DNA, 75 bp, synthetic construct
  source 1..75: mol_type = other DNA
attcagccatctggtggggatggatgcatgccagggaacactcacactgctggatacccccggccctaatgaggc

SEQ ID NO: 14844 - DNA, 75 bp, synthetic construct
  source 1..75: mol_type = other DNA
gatgtgttgataacctacagaggaaaactaccgggaataattactggttctctgaagactccaccgctggcctga

SEQ ID NO: 14845 - DNA, 75 bp, synthetic construct
  source 1..75: mol_type = other DNA
acgcgctcaatatcgccgtgagaaccgcgccggacagctcggttaaggcgctgaaatacgccgctgcgattgaac

SEQ ID NO: 14846 - DNA, 75 bp, synthetic construct
  source 1..75: mol_type = other DNA
ggcactggcggcgtcactggatgcgcaggggtacagcgttaatgacatcatccatatcctgatggcggaaggagg

SEQ ID NO: 14847 - DNA, 75 bp, synthetic construct
  source 1..75: mol_type = other DNA
cactggcagaatggattgaagactgggccgactatcttgtgggctttgatgctaatggtgacgctattcaggcaa

SEQ ID NO: 14848 - DNA, 75 bp, synthetic construct
  source 1..75: mol_type = other DNA
ctggcgggtactgaagcctgccggaagtctttacctgttctgtggtcatcgcctggcatctgacaccgaaatcat

SEQ ID NO: 14849 - DNA, 75 bp, synthetic construct
  source 1..75: mol_type = other DNA
attatctggagacgcacaagagcttctgtgcgccggacgttgctgcgacaacaggtgtgacattaaccagcataa

SEQ ID NO: 14850 - DNA, 75 bp, synthetic construct
  source 1..75: mol_type = other DNA
attctgctcaactcccatgacggttcatccagctaccagatgttacccggatattttcgtgccatctgcaccaat

SEQ ID NO: 14851 - DNA, 75 bp, synthetic construct
  source 1..75: mol_type = other DNA
aagttgcagctatcgcgaaagttaatcctgatgttgaagtgttaggggaaattgttaataacagtacaaaagtat

SEQ ID NO: 14852 - DNA, 75 bp, synthetic construct
  source 1..75: mol_type = other DNA
ctggagctcgaaaaggccgatccggactttatggcgaagcgtgaggacattgtcagcgacgaaggacgatttaac

SEQ ID NO: 14853 - DNA, 75 bp, synthetic construct
  source 1..75: mol_type = other DNA
agcgtctggtcattttgaaagcttatgggattgaatgcgacagactggtacgtgaaaaggaacgatatgagatca

SEQ ID NO: 14854 - DNA, 75 bp, synthetic construct
  source 1..75: mol_type = other DNA
ccactttctttgccgtggcccgtaatcaaagctttcgtgcagcgggcgatgagttaggcttatcctcgtccgcca

SEQ ID NO: 14855 - DNA, 75 bp, synthetic construct
  source 1..75: mol_type = other DNA
gctgttcgggggttcactgacgctgcgtgactacgatggtcaggttgcggaggctatggccctggtacgagcgct

SEQ ID NO: 14856 - DNA, 75 bp, synthetic construct
  source 1..75: mol_type = other DNA
atgaacgcaaaaatcagatacggcctgtcggctgccgttctggcgctgattgctgcaggctcgtctgctcctcaa

SEQ ID NO: 14857 - DNA, 75 bp, synthetic construct
  source 1..75: mol_type = other DNA
tttcagcattgaaaggaaatcataaacgctttgattctttatttgaaaagcataataaacttgatcacgaaataa

SEQ ID NO: 14858 - DNA, 75 bp, synthetic construct
  source 1..75: mol_type = other DNA
cacggttcgctgtgtgaaatacggatgagcttctggggagcggagtttgcggcgttcttacagtgtaagcagtaa

SEQ ID NO: 14859 - DNA, 75 bp, synthetic construct
  source 1..75: mol_type = other DNA
aagcataataagctttttctgcttctgccggaggagtatggcccagcctttccagcaatcgtcgattgttatacc

SEQ ID NO: 14860 - DNA, 75 bp, synthetic construct
  source 1..75: mol_type = other DNA
gctgcttgagcagtatcaccgtgccggacagcaacgactggctgccgtacaacgggccatgcagcagggggccgc

SEQ ID NO: 14861 - DNA, 75 bp, synthetic construct
  source 1..75: mol_type = other DNA
gacgcttcttcgcaaaataaaccagggcgatatcaaaggcgcatgtgatcagctacgtcgctggacatatgctgg

SEQ ID NO: 14862 - DNA, 75 bp, synthetic construct
  source 1..75: mol_type = other DNA
gtgcagggaaccggtgaaattgaaatcaccatacagaccaacggcctgcgccgccgtgtgaaggccacccgcatc

SEQ ID NO: 14863 - DNA, 75 bp, synthetic construct
  source 1..75: mol_type = other DNA
gatgccagtctgttattgtggcgtggtgttgagatggtggagatcctctcgacattaagtatggacattgacacg

SEQ ID NO: 14864 - DNA, 75 bp, synthetic construct
  source 1..75: mol_type = other DNA
gaaacgtccatgtctccggaagcgatgtccggagtactgaaacaacggcgtcgtgattttcgtcagccggacgtg

SEQ ID NO: 14865 - DNA, 75 bp, synthetic construct
  source 1..75: mol_type = other DNA
atcgctgggaaatcgaactgggatacagggagataaaacagacgatgcaacggagcaggctgacgctgagaagta

SEQ ID NO: 14866 - DNA, 75 bp, synthetic construct
  source 1..75: mol_type = other DNA
tgctgatgacattgcagggcgcttcaccgggacgtataccggagctgatgagcgatcttgcaagtatgggacaac

SEQ ID NO: 14867 - DNA, 75 bp, synthetic construct
  source 1..75: mol_type = other DNA
tgacacggatgacgctgccggtcaggacacatctgtcagcccggaaaatgcgctgaccggacatgaaaatgaggt

SEQ ID NO: 14868 - DNA, 75 bp, synthetic construct
  source 1..75: mol_type = other DNA
gaaatgaagcgcctgtatgccgtcgggagtgagaacgggggcgacggtgacgcattcgtcagggaagaacgcgaa

SEQ ID NO: 14869 - DNA, 75 bp, synthetic construct
  source 1..75: mol_type = other DNA
atgtcccgttttgtcctcggtaactgcatcgatgttatggcccgtatccctgataacgccattgatttcatcctc

SEQ ID NO: 14870 - DNA, 75 bp, synthetic construct
  source 1..75: mol_type = other DNA
cgctgaccggacatgaaaatgaggtggtatcagcacagacggataccgtgactgatacggctgctctggtcacgg

SEQ ID NO: 14871 - DNA, 75 bp, synthetic construct
  source 1..75: mol_type = other DNA
gtcctctgcacaggcaggcgatgtgctgctgtgctgctttggttcatcggtgccgaatcatgccgccgtttactg

SEQ ID NO: 14872 - DNA, 75 bp, synthetic construct
  source 1..75: mol_type = other DNA
aaacgaaaggtgcgggaacgacgttctggatgtataccggcaagggcgatgcgtttgcgaaccctttatcggaca

SEQ ID NO: 14873 - DNA, 75 bp, synthetic construct
  source 1..75: mol_type = other DNA
tgtgtccgcaggtacgggtcgcggatatcgtccagctgaacgggaatatccggccacgatcacgccagtggtggc

SEQ ID NO: 14874 - DNA, 75 bp, synthetic construct
  source 1..75: mol_type = other DNA
tataaaagttccactgaccgagccacagaaagccggtatcgcgtcattctgtccctataacattggccctggtaa

SEQ ID NO: 14875 - DNA, 75 bp, synthetic construct
  source 1..75: mol_type = other DNA
agcggtgaatactggcagcgtcagaaaacgttgctgacagaaagagaggtcagtttcatgaaagggttgttcagg

SEQ ID NO: 14876 - DNA, 75 bp, synthetic construct
  source 1..75: mol_type = other DNA
atctggcagttgtgctggggagttgcagtatgaacggtgtctcacaggcggatgaattgttgacgcgggatgatt

SEQ ID NO: 14877 - DNA, 75 bp, synthetic construct
  source 1..75: mol_type = other DNA
caccttccccgtgaaatacaccgcctggagccagaagaaagctgttgcccggagtgtggcggtgagctggattat

SEQ ID NO: 14878 - DNA, 75 bp, synthetic construct
  source 1..75: mol_type = other DNA
atgcccgttgactttctgaccactgagcagactgaaagctatggcagattcaccggtgaaccggatgagcttcag

SEQ ID NO: 14879 - DNA, 75 bp, synthetic construct
  source 1..75: mol_type = other DNA
cagcctggtgcagggtaaacaggcgtcaggccgtccctggtggtaccggcatcgcacagaattaccccgtgaatg

SEQ ID NO: 14880 - DNA, 75 bp, synthetic construct
  source 1..75: mol_type = other DNA
tactgcaccagattgttgatcgccggacagcgtcgatgcgcagcgtggggatgctgacaaacctgaactatgagg

SEQ ID NO: 14881 - DNA, 75 bp, synthetic construct
  source 1..75: mol_type = other DNA
gattatggaccggatgaccatgaacggtggtcgttgggtgaattttaactgggagagctggcggtcaaacgttgg

SEQ ID NO: 14882 - DNA, 75 bp, synthetic construct
  source 1..75: mol_type = other DNA
cctattaccgcctcacgattgatggtagcgacgtcatcgaaatcgacaccgtcaacatggttgagaaggtgaacg

SEQ ID NO: 14883 - DNA, 75 bp, synthetic construct
  source 1..75: mol_type = other DNA
tagcgacgtcatcgaaatcgacaccgtcaacatggttgagaaggtgaacggcgtcgaccgtctggaacagcaccg

SEQ ID NO: 14884 - DNA, 75 bp, synthetic construct
  source 1..75: mol_type = other DNA
atgattaacctgttaatcatcgttctcagggctgtggtcgccgttgcaaacgcgctgattgcagttctggaactg

SEQ ID NO: 14885 - DNA, 75 bp, synthetic construct
  source 1..75: mol_type = other DNA
gacagcccgtcctatgtgcgttttgatgtgacggttgccggtaaagaggcaacttccctgattgcccgctgccag

SEQ ID NO: 14886 - DNA, 75 bp, synthetic construct
  source 1..75: mol_type = other DNA
tggcgtgtgcgcagtggatctgggggcgaatcgtgagtctttacgagcaggccgccagcgatgatggcgagattt

SEQ ID NO: 14887 - DNA, 75 bp, synthetic construct
  source 1..75: mol_type = other DNA
gtaatcaatagctggctacaaaaagttacctccctgatagatatcagtttaatcgatgcggagagtgcgaaatga

SEQ ID NO: 14888 - DNA, 75 bp, synthetic construct
  source 1..75: mol_type = other DNA
ctaccaacatcaaactggcctgggttgaagacggtgcagtgaaaacgttaattagtccgaatagttttaaaccgg

SEQ ID NO: 14889 - DNA, 75 bp, synthetic construct
  source 1..75: mol_type = other DNA
acaggcggttgccgtcacaacagcttaccgcaatgtgcttattgaagatgaccagggaacgcatttccggctggt

SEQ ID NO: 14890 - DNA, 75 bp, synthetic construct
  source 1..75: mol_type = other DNA
aagagatgatcaataagacaatcatcttcgatgaaaggccagcggcgtcagtggcatcatcattccatgttgctt

SEQ ID NO: 14891 - DNA, 75 bp, synthetic construct
  source 1..75: mol_type = other DNA
acatgataagacatcactcgcacgagatgtagccaccggcgttctggcccgttcaatggatgtggatatttataa

SEQ ID NO: 14892 - DNA, 75 bp, synthetic construct
  source 1..75: mol_type = other DNA
ttcctatgttgcattccatacttgcatctgaaggcctgagagaaggatatctaacgttgtatgatggaacaattt

SEQ ID NO: 14893 - DNA, 75 bp, synthetic construct
  source 1..75: mol_type = other DNA
ttatctgtataccgatgtagcgttacctgacgtcgtggcgatgaccgggactggtaacccgttcctgatgtcgtt

SEQ ID NO: 14894 - DNA, 75 bp, synthetic construct
  source 1..75: mol_type = other DNA
tgagaaatacaggatttctatcttagaccagttaactgaatggtgtgtggatgcaaaaggcgtaagcccaatatt

SEQ ID NO: 14895 - DNA, 75 bp, synthetic construct
  source 1..75: mol_type = other DNA
gcgttcctggggaaaatgggcatcagtatgaatgacagggcgcgggcaacagaattactggcagattatgcactc

SEQ ID NO: 14896 - DNA, 75 bp, synthetic construct
  source 1..75: mol_type = other DNA
ggtatcttcatgcccggacgaacgttcccggcagtgatgatctgaacgggattaacgtgaaataccgttatgagt

SEQ ID NO: 14897 - DNA, 75 bp, synthetic construct
  source 1..75: mol_type = other DNA
ctcccgctatgctgaacgggacactacccttagagaacatactgcattaattaaggaatattacggctatcatga

SEQ ID NO: 14898 - DNA, 75 bp, synthetic construct
  source 1..75: mol_type = other DNA
ggttctttatgctctcgggcattctgagtctctaccccgggtagctgcccggtttaacattcccagccacaacac

SEQ ID NO: 14899 - DNA, 75 bp, synthetic construct
  source 1..75: mol_type = other DNA
tggcaggggcggcagtatcaggcctatcccattcagggaagtggatttgagatgaacggcaaaggagccagtgca

SEQ ID NO: 14900 - DNA, 75 bp, synthetic construct
  source 1..75: mol_type = other DNA
gttttgtttggcccttgctgggcgacgatctatgcaggaacactggatacagttgataaccaacatacagaaatg

SEQ ID NO: 14901 - DNA, 75 bp, synthetic construct
  source 1..75: mol_type = other DNA
acacaccttcacgcatcctgcgtatggctgaacttacccggctgctgggtatatccaggtccacgatttacgtga

SEQ ID NO: 14902 - DNA, 75 bp, synthetic construct
  source 1..75: mol_type = other DNA
caggcggatgctgtcacgaacggtgcaatagtgctccacacccaacgcctgaaatcagatccagggggtaatctg

SEQ ID NO: 14903 - DNA, 75 bp, synthetic construct
  source 1..75: mol_type = other DNA
cgatcaccaactgccccgccgggatcgctcacacctacatggtggcggaagccctggaacagaaagcccgttctc

SEQ ID NO: 14904 - DNA, 75 bp, synthetic construct
  source 1..75: mol_type = other DNA
gaggcggtgctgcagtcggtgcataacccggtgttacagcaacttagcattgcgatcagttcgctgcagcgggcg

SEQ ID NO: 14905 - DNA, 75 bp, synthetic construct
  source 1..75: mol_type = other DNA
gcgtctgaatggtgtggcagttgaagaactgtccagcaaattcactgtggagccgtctgtgcagcagacgctgga

SEQ ID NO: 14906 - DNA, 75 bp, synthetic construct
  source 1..75: mol_type = other DNA
tgaatccgttaacgaagcctatgtggttgaggactatcgctgcgctgcactggtggaaaacatccagattggtga

SEQ ID NO: 14907 - DNA, 75 bp, synthetic construct
  source 1..75: mol_type = other DNA
tgcggatgccctgatgcgggagctggatccgcgcaccaccactgaactgataaaccgctgggagcgtctgtgcgg

SEQ ID NO: 14908 - DNA, 75 bp, synthetic construct
  source 1..75: mol_type = other DNA
catttccaggtggaacgaagcaagctaacttatcggctaagcagctacaagagttaccagtacttattccccccg

SEQ ID NO: 14909 - DNA, 75 bp, synthetic construct
  source 1..75: mol_type = other DNA
atgaagtctttaggtgaacgtctcatcaacgcacggcaaaaagctgggttaacacaagatgcgttggctaaaaaa

SEQ ID NO: 14910 - DNA, 75 bp, synthetic construct
  source 1..75: mol_type = other DNA
acgctggggcgctggacaggtgccgttgctgaactgctggagccgctgtatgacgtcctgcgccagtatgtgctg

SEQ ID NO: 14911 - DNA, 75 bp, synthetic construct
  source 1..75: mol_type = other DNA
cgctatcgaggctgagatccgcggcagtccggcagaagagcgactggcggtcagaaaagccagaacggtaccgct

SEQ ID NO: 14912 - DNA, 75 bp, synthetic construct
  source 1..75: mol_type = other DNA
ttgcacgcagttatgccggagcggggcttctggctcatatcgtcaccgggaagtatgcagaccatctgccgttat

SEQ ID NO: 14913 - DNA, 75 bp, synthetic construct
  source 1..75: mol_type = other DNA
atgtgactgtattgttgaagcaccggcgccgtcccgcccgatagagcgtggtatcgcgggccccggattacttgc

SEQ ID NO: 14914 - DNA, 75 bp, synthetic construct
  source 1..75: mol_type = other DNA
aagaaaactctctggaagatgttgtttctttaggtgaaatgattcagaaggaaatttatgggcatgaacaaagaa

SEQ ID NO: 14915 - DNA, 75 bp, synthetic construct
  source 1..75: mol_type = other DNA
tggctgggctgaggcggacaataacatcgctgaaaatgcgttgcggatggtcagtctgggccgcaaaaactacct

SEQ ID NO: 14916 - DNA, 75 bp, synthetic construct
  source 1..75: mol_type = other DNA
gtgctgttgccaggcaataagaaaacgaagaccgggcggttatggacctacgttcgtgacgaccgtaacgccggg

SEQ ID NO: 14917 - DNA, 75 bp, synthetic construct
  source 1..75: mol_type = other DNA
aagtctcccgccgtatcgcacaaatggaagccgatctgaaccggcttcagaaagagagcgatacgctgactggta

SEQ ID NO: 14918 - DNA, 75 bp, synthetic construct
  source 1..75: mol_type = other DNA
tattgatattgatgacacgtccggtcacggactggatgtgaatgtctggaacggagggaattatggcctctggtg

SEQ ID NO: 14919 - DNA, 75 bp, synthetic construct
  source 1..75: mol_type = other DNA
cgctatcggcaataaagcgcatgcaaaaggagtgaatagcatcgcgttgggtaatggcagccaggctctggcaga

SEQ ID NO: 14920 - DNA, 75 bp, synthetic construct
  source 1..75: mol_type = other DNA
gctggctacgatgaagatgactttaaaaaacctgttcgcgtcaatttgcccgttgttgatgaccttccaccagaa

SEQ ID NO: 14921 - DNA, 75 bp, synthetic construct
  source 1..75: mol_type = other DNA
tcttgccgaaggcgaagaagctctcagcttcaacgaatttaaacaggcgctttccagttcggcaaaatctaacgg

SEQ ID NO: 14922 - DNA, 75 bp, synthetic construct
  source 1..75: mol_type = other DNA
tcgaagatggcgtttactggtacgtgtcgaactacacccagccgcacccgttcgcacccgattccgttttccatc

SEQ ID NO: 14923 - DNA, 75 bp, synthetic construct
  source 1..75: mol_type = other DNA
cctacctgacgatggtcgaggggctgaagctcgcggcgcagaccttcaccaaggatgtcaaacaattgtcctgct

SEQ ID NO: 14924 - DNA, 75 bp, synthetic construct
  source 1..75: mol_type = other DNA
tcgatggcaacggacgcctgaccggtgcccgtactgcacagacagcgccttacgatcgatacacctgtcaccttt

SEQ ID NO: 14925 - DNA, 75 bp, synthetic construct
  source 1..75: mol_type = other DNA
ggtgtgttttccggccaacttccggtttcaacggggtctcatcttctgacagctaacagcgatcgcctttccttt

SEQ ID NO: 14926 - DNA, 75 bp, synthetic construct
  source 1..75: mol_type = other DNA
ttgccatgctgacagcagcatcatgcggatacgcagcagaacaggaagtcccaatgaaccttgtcagtgctgacg

SEQ ID NO: 14927 - DNA, 75 bp, synthetic construct
  source 1..75: mol_type = other DNA
tgacggcgctaatcagcatggccacacaggccattgtggcgaccaacggaaaggaggctgccctgcaggtactga

SEQ ID NO: 14928 - DNA, 75 bp, synthetic construct
  source 1..75: mol_type = other DNA
caatgtcgccacgcttattatggggagcagtactgtacacactgccagaccggaggattcagtgaggaggcagtg

SEQ ID NO: 14929 - DNA, 75 bp, synthetic construct
  source 1..75: mol_type = other DNA
caatgtcaccacgattatcatggggagcagtactgtacacgctgccagaccggaagttttagtgagaaggtggtg

SEQ ID NO: 14930 - DNA, 75 bp, synthetic construct
  source 1..75: mol_type = other DNA
caaaacgttcgtgtgaaactgcgctcagatctattcgtccagtctggaacggagttaaatggatcgtggatgttg

SEQ ID NO: 14931 - DNA, 75 bp, synthetic construct
  source 1..75: mol_type = other DNA
attgataacctacaaaggaaagctaccgggaagaattacttgttctctgaagatgccgccgtcaacactgcggtc

SEQ ID NO: 14932 - DNA, 75 bp, synthetic construct
  source 1..75: mol_type = other DNA
cgcagtccggcgacggtaaatcctgtggtattgcacttgatgaagccgggggtgaaggcgacgtcattcgtatcc

SEQ ID NO: 14933 - DNA, 75 bp, synthetic construct
  source 1..75: mol_type = other DNA
tcaacattcaggatcttgcggaatatattgacaaaagacgggaagaagggcgagctgagtgggaaaaagtcagaa

SEQ ID NO: 14934 - DNA, 75 bp, synthetic construct
  source 1..75: mol_type = other DNA
ttttaatcgccaagtcatttcttgatttctttacggcgatgatcttcgcctgctcgctgggtattgcggtgtcgg

SEQ ID NO: 14935 - DNA, 75 bp, synthetic construct
  source 1..75: mol_type = other DNA
atgaaataccagtaaaaataaccgcgagtaatcctgagacagcaaactttactactgatgttataaatacctata

SEQ ID NO: 14936 - DNA, 75 bp, synthetic construct
  source 1..75: mol_type = other DNA
ttatggtgaaattagtgaaaatgtaggtacagaaactcgtcctcgtaacatcgcttttaattatattgtgagggc

SEQ ID NO: 14937 - DNA, 75 bp, synthetic construct
  source 1..75: mol_type = other DNA
ataaacaatgggcacaatcacacagcgataaagtactcaaaagcctcgagacacacgttttcccctttatcggca

SEQ ID NO: 14938 - DNA, 75 bp, synthetic construct
  source 1..75: mol_type = other DNA
cgactggcagttatgctgaatttactggtttttattcgttccagtgaactcagatatgcccgctggtctgaaatt

SEQ ID NO: 14939 - DNA, 75 bp, synthetic construct
  source 1..75: mol_type = other DNA
tggaatatcacctcgcgcgttctgcgttacctgattgttgaccggacggccgcgcctgccgggatatctgcggag

SEQ ID NO: 14940 - DNA, 75 bp, synthetic construct
  source 1..75: mol_type = other DNA
gctggtgaaaatggtctggtctttacgggagcacatgacccgcataaaccaatcagtgaaaacaccgtaaataaa

SEQ ID NO: 14941 - DNA, 75 bp, synthetic construct
  source 1..75: mol_type = other DNA
attctggaacgggaagcactgcgaacaggccagacaaaaacagcaataatgaaagcggctcttgcagcttacgaa

SEQ ID NO: 14942 - DNA, 75 bp, synthetic construct
  source 1..75: mol_type = other DNA
gaagaactggagtccaggggcttataccgtcgtgctgcaacggtgtggatggcggcattccgtgaaagccactcc

SEQ ID NO: 14943 - DNA, 75 bp, synthetic construct
  source 1..75: mol_type = other DNA
tataaaatcaagcttcgtgcatctggttacaggctcgtctatcaggtgattgatgagaaaattgttttgctcgtt

SEQ ID NO: 14944 - DNA, 75 bp, synthetic construct
  source 1..75: mol_type = other DNA
cgagccggttttatgacacgcattgcccctaaccagcgcaacgggaaggggaaccggatgatctctggtgacttc

SEQ ID NO: 14945 - DNA, 75 bp, synthetic construct
  source 1..75: mol_type = other DNA
atgatgcgctcaaggaatggctgaaactggataagaccattcaacaacagtttgtgaaaaaactaaaaaaatgca

SEQ ID NO: 14946 - DNA, 75 bp, synthetic construct
  source 1..75: mol_type = other DNA
agtttatgatggtgggcgcagggactaactataagtccatggcttatgttggaaacattgttgagtttatcaagt

SEQ ID NO: 14947 - DNA, 75 bp, synthetic construct
  source 1..75: mol_type = other DNA
tggttttgctgctgactggccatgttcccgcagcgtcagcggacgctgcctgtgaagggcggtttgttaacccga

SEQ ID NO: 14948 - DNA, 75 bp, synthetic construct
  source 1..75: mol_type = other DNA
ccgtgcgcagcgcgatgactggctgaagaaagagatacagcgcgtatacgatgaaaatcacaaggtatacggtgt

SEQ ID NO: 14949 - DNA, 75 bp, synthetic construct
  source 1..75: mol_type = other DNA
atggctgattcgaatctcaacacaccggttattgttcaggcgacgcggctcgatacatcaatccttccacgcaat

SEQ ID NO: 14950 - DNA, 75 bp, synthetic construct
  source 1..75: mol_type = other DNA
atgaagaaaaatcgggtcaggaaagaatgcccggggctgacagtccacaggaactgatgaaaagagcaaaggagt

SEQ ID NO: 14951 - DNA, 75 bp, synthetic construct
  source 1..75: mol_type = other DNA
ctgtatgtttctcagtgcgatcgaaataagggcacgggtaaagcgataatgcgctttatagcccggcttgcgctt

SEQ ID NO: 14952 - DNA, 75 bp, synthetic construct
  source 1..75: mol_type = other DNA
ggcaaagccacggtggatggtatccagttgcgctttaccggctctatccagcgtgacgataccggggaagtgcag

SEQ ID NO: 14953 - DNA, 75 bp, synthetic construct
  source 1..75: mol_type = other DNA
atgacaattcaggaaattccgctgacagcggacaaccagcagttcagcatcgtcctgggtggtgtcacctggcgg

SEQ ID NO: 14954 - DNA, 75 bp, synthetic construct
  source 1..75: mol_type = other DNA
ctgctgttcacaccagcccttcactctctgtctgaaggcattcatggttttcatgtgcacgaaaaaggaaattgc

SEQ ID NO: 14955 - DNA, 75 bp, synthetic construct
  source 1..75: mol_type = other DNA
gcaattgaggctggcgatcaggaggctgcaacgcgtctgttcgggcagctgccaaagggacatccattaattctt

SEQ ID NO: 14956 - DNA, 75 bp, synthetic construct
  source 1..75: mol_type = other DNA
tattgaaatccgcggtttcggcagtttctctttgcactaccgcgcaccacgtaccggacgtaatccgaagactgg

SEQ ID NO: 14957 - DNA, 75 bp, synthetic construct
  source 1..75: mol_type = other DNA
tggaatatcaccgaacatgttctgcgttacctgattgttgaccggacggctgcgcctgccgggatatctgcggag

SEQ ID NO: 14958 - DNA, 75 bp, synthetic construct
  source 1..75: mol_type = other DNA
gatgcgccgtgatggtatccagcttaatgatgtggatatgcgcaacatacggatccgcgttcttgaaatgctggc

SEQ ID NO: 14959 - DNA, 75 bp, synthetic construct
  source 1..75: mol_type = other DNA
cagtacacaagccatgagtggcagtcgttcctgaaatcacacggcctggagggtagcatgagccgtcgcggtaac

SEQ ID NO: 14960 - DNA, 75 bp, synthetic construct
  source 1..75: mol_type = other DNA
tgctgcgggtggattccgtgaggaggaagaacgggccgctaaccgcaataactggatgtatggcgctgatgaatg

SEQ ID NO: 14961 - DNA, 75 bp, synthetic construct
  source 1..75: mol_type = other DNA
cctgtgggcgaaatttcaggatttccaggtgcgtatccgtgacgccatcgtgaaacgtcaggcactggaccgcat

SEQ ID NO: 14962 - DNA, 75 bp, synthetic construct
  source 1..75: mol_type = other DNA
tcatctggtggctgctgattggcgtgatcctggtggtctttatgatctccgacggatttgacatggggatcggct

SEQ ID NO: 14963 - DNA, 75 bp, synthetic construct
  source 1..75: mol_type = other DNA
acgccttcaggatgcactgcgccgccgggacatctggcttgaaaacagtgatcgctggggagatcctcgcgagaa

SEQ ID NO: 14964 - DNA, 75 bp, synthetic construct
  source 1..75: mol_type = other DNA
atgaaaaaatggatgttagtaatctgcctgatgtttataaatgggatctgcgaagccgccgattgctttgatctt

SEQ ID NO: 14965 - DNA, 75 bp, synthetic construct
  source 1..75: mol_type = other DNA
gcctgatgtttataaatgggatctgcgaagccgccgattgctttgatcttgcaggtcgggattacaaaatagacc

SEQ ID NO: 14966 - DNA, 75 bp, synthetic construct
  source 1..75: mol_type = other DNA
taatgggtggataaaagatgaacggatagtatatccctcaagggtgatcaaccaggagattgataattactgttt

SEQ ID NO: 14967 - DNA, 75 bp, synthetic construct
  source 1..75: mol_type = other DNA
cctgatttacgcggtgaatttattcgtggctgggatgacggacgtggagtggataacggaaggggattattaacg

SEQ ID NO: 14968 - DNA, 75 bp, synthetic construct
  source 1..75: mol_type = other DNA
gagctggccgtcggaggaggagtatattcatccccgctggtatatatcagtgactgatgcggcggatttgttcta

SEQ ID NO: 14969 - DNA, 75 bp, synthetic construct
  source 1..75: mol_type = other DNA
ttggctatgataaaaataattatactgtagtaaagaacaacaaacattcgggccttgatttttctctgcatcggt

SEQ ID NO: 14970 - DNA, 75 bp, synthetic construct
  source 1..75: mol_type = other DNA
gtgtcagacaaactccatgagacaaattatcccgacgaccataacgaccgcctctggtggggactgccctgcacc

SEQ ID NO: 14971 - DNA, 75 bp, synthetic construct
  source 1..75: mol_type = other DNA
atgaaacagaaaaattctggctttactgccagtggtctccctcggcctgaaatccgccccggcgatattttccgg

SEQ ID NO: 14972 - DNA, 75 bp, synthetic construct
  source 1..75: mol_type = other DNA
gcagtactgggccgcctgttttggaccggcaccgtttttgccgatgtctcgtgaagagatggatcaacttggctg

SEQ ID NO: 14973 - DNA, 75 bp, synthetic construct
  source 1..75: mol_type = other DNA
ttctgctgatcgcaggatttgccattcttcgccttttgttcagagcattaaccagcacagcgtctgcgctggcag

SEQ ID NO: 14974 - DNA, 75 bp, synthetic construct
  source 1..75: mol_type = other DNA
ccggaccgtaacgcttcgtccggcacaggcagaatatctgatgacaggaaaaatattacctgctgagttattcag

SEQ ID NO: 14975 - DNA, 75 bp, synthetic construct
  source 1..75: mol_type = other DNA
ccgccggtcaacttctcggggctggcaaaaagcctgcgcgcctccgttcatcacagctcgccgatttacgtgaaa

SEQ ID NO: 14976 - DNA, 75 bp, synthetic construct
  source 1..75: mol_type = other DNA
aagccgcgcagcgcgctcggcagtccgccgccggtgagcgcaaaattgaactggtgctggataagcaggagcagg

SEQ ID NO: 14977 - DNA, 75 bp, synthetic construct
  source 1..75: mol_type = other DNA
agcgcacttaattctgcctggctgaatgagtccgctacgctgtttcgccgcaagtattaccagaacggcgcgcac

SEQ ID NO: 14978 - DNA, 75 bp, synthetic construct
  source 1..75: mol_type = other DNA
cgccccgctgccgttcatcctctcccgcacctacagcagttaccggacaaaaacgcccgcgccggtggggagcct

SEQ ID NO: 14979 - DNA, 75 bp, synthetic construct
  source 1..75: mol_type = other DNA
tggtgttcttatggctgcgtatcattggtggcgaaaggtcgttaacaacctgccagactgggatagtcttggatg

SEQ ID NO: 14980 - DNA, 75 bp, synthetic construct
  source 1..75: mol_type = other DNA
aaattggtagatcagctagatggtcgcttgaggaggttgaagcttggatccagaacaaacttgattcgcgggctg

SEQ ID NO: 14981 - DNA, 75 bp, synthetic construct
  source 1..75: mol_type = other DNA
aggcgcgttattatgcaatcggcgaggcaaccccgggtgctgctaatgcggatgcgaccttcaaggttcagtatc

SEQ ID NO: 14982 - DNA, 75 bp, synthetic construct
  source 1..75: mol_type = other DNA
ccgtggtttatgtcgctataacaagagcgggcatttcaacattccctacggtaattataaaaatccgtatttccc

SEQ ID NO: 14983 - DNA, 75 bp, synthetic construct
  source 1..75: mol_type = other DNA
atgtcgctgtcgcgtaaaccggaggtgacgtggtatggctgggacggagacaggctgacgacggtgcagactgac

SEQ ID NO: 14984 - DNA, 75 bp, synthetic construct
  source 1..75: mol_type = other DNA
acgttacagccccccgacgcagccactggtggtggaccgtgccgggatgcctggcaatggtgttactgaacgcag

SEQ ID NO: 14985 - DNA, 75 bp, synthetic construct
  source 1..75: mol_type = other DNA
gcgtaatggccgctgggtgacggaaaaggacgtcaccattaacggcaagaccacctcacagttcctggcctcggt

SEQ ID NO: 14986 - DNA, 75 bp, synthetic construct
  source 1..75: mol_type = other DNA
acacgcctcgtgaggcgaaggataatctcaaatccacgcagatgatgagcgtgattgatgcgattggtgagggac

SEQ ID NO: 14987 - DNA, 75 bp, synthetic construct
  source 1..75: mol_type = other DNA
tcgccctgatcgtcatctgtttaaccgtcatagtgacggcactggtaacgaggaaagacctctgcgaggtacgaa

SEQ ID NO: 14988 - DNA, 75 bp, synthetic construct
  source 1..75: mol_type = other DNA
cagaggccaccggagccgccaacggagaactatgcagacctgagaaatgcagtaaatcgcacttacgcagacatg

SEQ ID NO: 14989 - DNA, 75 bp, synthetic construct
  source 1..75: mol_type = other DNA
atcacctgtaagaatgaataaggaaaaagaaaactggtttcacactgcccgcaatttatatgcaaagacatccgt

SEQ ID NO: 14990 - DNA, 75 bp, synthetic construct
  source 1..75: mol_type = other DNA
cattaacagcattgaacacatcctgcgtgacaagctgtctccgtatgacaccgaagagatgcttgaggctatgcg

SEQ ID NO: 14991 - DNA, 75 bp, synthetic construct
  source 1..75: mol_type = other DNA
gggcacagagccgcggatgacctttaatgcgtacctgtcacaacagcgtaaggcgtgggacgttctcagtgattt

SEQ ID NO: 14992 - DNA, 75 bp, synthetic construct
  source 1..75: mol_type = other DNA
ctgattcgtatcgaagaagctctgggcgaaaaagcaccgtacaacggtcgtaaagagatcaaaggccaggcataa

SEQ ID NO: 14993 - DNA, 75 bp, synthetic construct
  source 1..75: mol_type = other DNA
tggatggttttctgaaaggtaaatgcatcccaagtgatttaaaggttaacgaaacaaacgctgaatatctggtgc

SEQ ID NO: 14994 - DNA, 75 bp, synthetic construct
  source 1..75: mol_type = other DNA
gctctggagcaggcgttatgggcccgtcgaccgtccggcacagtccatcacagtgataaaggttctcagtatgta

SEQ ID NO: 14995 - DNA, 75 bp, synthetic construct
  source 1..75: mol_type = other DNA
aaagtctggcgtcagttgttacgggaaggtatcagagtggccagatgcactgtggcacgtctcatggcggttatg

SEQ ID NO: 14996 - DNA, 75 bp, synthetic construct
  source 1..75: mol_type = other DNA
caccgtacaacctgtggcgctgatgcgtctgggcgtctttgtaccgacccttaaatcactgaagaacagtaaaaa

SEQ ID NO: 14997 - DNA, 75 bp, synthetic construct
  source 1..75: mol_type = other DNA
atgccactgctggataagctgcgtgagcagtacggggtcagaccggtatgcagcgaactgcatattgccccgtca

SEQ ID NO: 14998 - DNA, 75 bp, synthetic construct
  source 1..75: mol_type = other DNA
gacgtataaaaaagtgcatgatgccggttttcgctgggcaccaaaacaggcgctgtttgtcgcgccagcctggac

SEQ ID NO: 14999 - DNA, 75 bp, synthetic construct
  source 1..75: mol_type = other DNA
ttacggcattggcacatcgacgatttatcgttatcaccctgtaggcgatatacagactgaagaaacaaccgggca

SEQ ID NO: 15000 - DNA, 75 bp, synthetic construct
  source 1..75: mol_type = other DNA
tcgccctgatcgtcatctgtatcaccgccgtagtggcggcgctggtaacgagaaaagacctctgtgaggttcaca

SEQ ID NO: 15001 - DNA, 75 bp, synthetic construct
  source 1..75: mol_type = other DNA
gtatcttccagaacgaggacatcaaaagcatcctcggcacgatgttgcaggaaaacggggtgaccgaatggagtc

SEQ ID NO: 15002 - DNA, 75 bp, synthetic construct
  source 1..75: mol_type = other DNA
caataggagtggatgcggcgaatatctcgcgcctcgaaacaggtaagcagaaacaattcactgaacaagccctga

SEQ ID NO: 15003 - DNA, 75 bp, synthetic construct
  source 1..75: mol_type = other DNA
ggatgcgagctgatttttgaagacaagataagcggtacaaagtccgaaaggccgggactgaaaaaactgctcagg

SEQ ID NO: 15004 - DNA, 75 bp, synthetic construct
  source 1..75: mol_type = other DNA
ccgctacccgcagggcgttaagctcgatcaggaaaacagccgtatttttctgccgaaacttggctggatgcgcta

SEQ ID NO: 15005 - DNA, 75 bp, synthetic construct
  source 1..75: mol_type = other DNA
tcaacctgaagtgtcagcgagagtaaaaaattatggtgaccattttaccgttgactcaataaggcagatgtggga

SEQ ID NO: 15006 - DNA, 75 bp, synthetic construct
  source 1..75: mol_type = other DNA
ctggtttttgacgttgaccgcgtgggggcagcgatcgactggagcgaccggaactcacccgcaccgaacgtcacc

SEQ ID NO: 15007 - DNA, 75 bp, synthetic construct
  source 1..75: mol_type = other DNA
ttcggaattgacctccgccagcgcgttttccggctcagcaacggcaggtttatggaagagccgtgcatctggttc

SEQ ID NO: 15008 - DNA, 75 bp, synthetic construct
  source 1..75: mol_type = other DNA
ttactatcatgtcagacggcttgctgctcctgaccggtatcagtctgccagagcgcttgtgctgaaaatttatca

SEQ ID NO: 15009 - DNA, 75 bp, synthetic construct
  source 1..75: mol_type = other DNA
atatgccggaccagtcacgggcacgtctgcataaagcgattggcgctgtcctgagtgaaagcaatccggcttccg

SEQ ID NO: 15010 - DNA, 75 bp, synthetic construct
  source 1..75: mol_type = other DNA
acctttcacgcgaacgctgccagttaatactgacccagcttgttatggcgggtctggcagactatcagtgcggtt

SEQ ID NO: 15011 - DNA, 75 bp, synthetic construct
  source 1..75: mol_type = other DNA
atacgagaaagagctggccctgatgggggatgactatcaggagattttccgccagcagctacgggaaactcagga

SEQ ID NO: 15012 - DNA, 75 bp, synthetic construct
  source 1..75: mol_type = other DNA
gccggtgttctccggggtaaaaaggtccgtacgaccatcagccggaaagccgttgccgcaggcgaccgcgtaaac

SEQ ID NO: 15013 - DNA, 75 bp, synthetic construct
  source 1..75: mol_type = other DNA
gtcgttatgaagtggacgtcagaccgcagggtgcagatggaaaacgtatcaggcggaaatttaaaactaaaggtg

SEQ ID NO: 15014 - DNA, 75 bp, synthetic construct
  source 1..75: mol_type = other DNA
aacaagctgcggccccggttcgtgggggagatgaaacgaaggtagctgaagttactgaaatgaagaattcagaga

SEQ ID NO: 15015 - DNA, 75 bp, synthetic construct
  source 1..75: mol_type = other DNA
taaaaaaggctactgtagattcaattggtcaacgcaacagttatgtgaaaacatggggttgcggaggttttttga

SEQ ID NO: 15016 - DNA, 75 bp, synthetic construct
  source 1..75: mol_type = other DNA
gcgcgcgacgtagccactggcgtactggctcgttcaatggacgtggacatttataaccttcatccggcacacgct

SEQ ID NO: 15017 - DNA, 75 bp, synthetic construct
  source 1..75: mol_type = other DNA
tgtaccggacgatgaaattggtaaacaccttttctggctggcagagaaactagggcgaaccccgtacagtgtagc

SEQ ID NO: 15018 - DNA, 75 bp, synthetic construct
  source 1..75: mol_type = other DNA
tattcgtgatttttccacacaacactgtattaaggaaaccatgattaaagtcttccttggtcgtgatggtttacc

SEQ ID NO: 15019 - DNA, 75 bp, synthetic construct
  source 1..75: mol_type = other DNA
ttacctgttcaactttaccggaccggagggggattatacctgccagtacaagatactgtttgaccggaacatgga

SEQ ID NO: 15020 - DNA, 75 bp, synthetic construct
  source 1..75: mol_type = other DNA
aggctgaaaaactgaaaaacctggtggattctgccagattacaaacttcttcttctgccgtaacagcaacagccc

SEQ ID NO: 15021 - DNA, 75 bp, synthetic construct
  source 1..75: mol_type = other DNA
ggggtgaagatagaaggatttacggaccatcttggcgggcaggcgtataaccggctcctgtcagagaaacgggcg

SEQ ID NO: 15022 - DNA, 75 bp, synthetic construct
  source 1..75: mol_type = other DNA
atgtcagatatcacaatctcccgcctggaagtggtcaacggacatacggacattatctgctccacctcagtcagc

SEQ ID NO: 15023 - DNA, 75 bp, synthetic construct
  source 1..75: mol_type = other DNA
atgcgcaggcccgtgatacatggtaccgctcactggagtacgataactttccggaaatcagtgaagcgaacattt

SEQ ID NO: 15024 - DNA, 75 bp, synthetic construct
  source 1..75: mol_type = other DNA
ggtgatggatggatgaaattacccaacgggaaaatcctgcaatatggtcgtggtgcggttacgccgacattatcg

SEQ ID NO: 15025 - DNA, 75 bp, synthetic construct
  source 1..75: mol_type = other DNA
ttggtacgcctttcgaacgtgttgaaaatgcactggctgcgctgcgtgaaggacgcggtgtaatggtgcttgatg

SEQ ID NO: 15026 - DNA, 75 bp, synthetic construct
  source 1..75: mol_type = other DNA
gctcacgctggcgcagcactctttcatcactacattcagaaagataatactctgttacgaatgatgcctcgccgc

SEQ ID NO: 15027 - DNA, 75 bp, synthetic construct
  source 1..75: mol_type = other DNA
catcgtcaagttcagtgggtcaattttcgatggcacttgggcgatacgcgaattcgggtggtgattattcgatcg

SEQ ID NO: 15028 - DNA, 75 bp, synthetic construct
  source 1..75: mol_type = other DNA
ctgatgagaaacgggaaagcagttccttttggctctgtcgttacggccagaaacggggggagcagtatcgccgga

SEQ ID NO: 15029 - DNA, 75 bp, synthetic construct
  source 1..75: mol_type = other DNA
gcgctggcaacaggtaatgaacctggtacacctgttggcacaggatctggctgggttgctataggccaggattca

SEQ ID NO: 15030 - DNA, 75 bp, synthetic construct
  source 1..75: mol_type = other DNA
cctattatatgaaagcggcagcgacacagtttccgctgccggaggggatgaatctgcccctgaccctgcgccatt

SEQ ID NO: 15031 - DNA, 75 bp, synthetic construct
  source 1..75: mol_type = other DNA
gaagcatggctcgaaagtagcttaaaaatttcaccagaagaacaaattcaattcctgcgtaaaattattaatcac

SEQ ID NO: 15032 - DNA, 75 bp, synthetic construct
  source 1..75: mol_type = other DNA
atgaacactctcgcaaatattcaggaactcgcgcgcgcactgcgcaacatgattcgcaccggccttgtcgtcgaa

SEQ ID NO: 15033 - DNA, 75 bp, synthetic construct
  source 1..75: mol_type = other DNA
gcatcaacaaaggctactgaagcatcaaaaagtgctgccgctgcagagtcctcaaaaagcgcggcggctaccagt

SEQ ID NO: 15034 - DNA, 75 bp, synthetic construct
  source 1..75: mol_type = other DNA
tgaacgttaaaggctggtttttaaaagaatctgattatcgccttgctattatggcaggttatcaggaaagccgtt

SEQ ID NO: 15035 - DNA, 75 bp, synthetic construct
  source 1..75: mol_type = other DNA
tacggcaacactgccttccggacgaccgggaatgatccatgtgtttcagccacaggaagacgggcagacccgcgg

SEQ ID NO: 15036 - DNA, 75 bp, synthetic construct
  source 1..75: mol_type = other DNA
agcagccacttctgcatccaccgcgaccacgaaagcgtcagaagctgccacctcagcccgggatgcggcggcctc

SEQ ID NO: 15037 - DNA, 75 bp, synthetic construct
  source 1..75: mol_type = other DNA
gtgctgcaagcggatgcgtacgccgggttcaacgagctgtatcgcaatggtgggataacggaagctgcctgctgg

SEQ ID NO: 15038 - DNA, 75 bp, synthetic construct
  source 1..75: mol_type = other DNA
atgatcatgctgattctcgcgcctctggtgggcgtgctgggggcgcttttgctggcgtatggtgcctggctgatt

SEQ ID NO: 15039 - DNA, 75 bp, synthetic construct
  source 1..75: mol_type = other DNA
cgtcttgagaagcagataaaagacctgacagacgatgatccggatatgaaacaccgcaggaaactgctggaaagc

SEQ ID NO: 15040 - DNA, 75 bp, synthetic construct
  source 1..75: mol_type = other DNA
tacaacctgcatcttggcggcaaccgcattgggacacgtatcccacggatgtataaagaaaacatcaccgagccg

SEQ ID NO: 15041 - DNA, 75 bp, synthetic construct
  source 1..75: mol_type = other DNA
cactatattgcgaagcaaaaaatgacaaagtaagaaaacgcctaggaattaaaggtggtttttactggactacag

SEQ ID NO: 15042 - DNA, 75 bp, synthetic construct
  source 1..75: mol_type = other DNA
tgcaccgcctgcggtcagaccggcggcggcaactgccctgattgtggcgcggtgatgggcgacgcaacataccag

SEQ ID NO: 15043 - DNA, 75 bp, synthetic construct
  source 1..75: mol_type = other DNA
gctggattatctggacgcactggagctggtcgatacttccagtgcgccagatattgaatggcctactcctccggc

SEQ ID NO: 15044 - DNA, 75 bp, synthetic construct
  source 1..75: mol_type = other DNA
ttgtctgcgaggataaacccggcatgccccgccctgccatcgactcctgggataccgaatatatgctggaaaacc

SEQ ID NO: 15045 - DNA, 75 bp, synthetic construct
  source 1..75: mol_type = other DNA
acgaagtaaacaaaattatgcaggcagccaatatcagccagcctgacgccgataagttgcttgctgcctctcgcg

SEQ ID NO: 15046 - DNA, 75 bp, synthetic construct
  source 1..75: mol_type = other DNA
ccacaaattattattcaaaagaaagtgaaagaggcatacgttggaatgatccaacgataaatatccaatggccaa

SEQ ID NO: 15047 - DNA, 75 bp, synthetic construct
  source 1..75: mol_type = other DNA
ttaaaattaggcttccttcattaaaagaacaaaaacgcattgctgctattcttgataaagctgatgctatacgcc

SEQ ID NO: 15048 - DNA, 75 bp, synthetic construct
  source 1..75: mol_type = other DNA
tgtatcaccgatacaaccgttgcccccgagtggggcagtggtttaccaccagcaacggcctcgttctgcgggttt

SEQ ID NO: 15049 - DNA, 75 bp, synthetic construct
  source 1..75: mol_type = other DNA
atccgtggatgaactgacaaaattaacgacagaaatcgccagctattgcgctgatgaatttaagaaactgaacga

SEQ ID NO: 15050 - DNA, 75 bp, synthetic construct
  source 1..75: mol_type = other DNA
gcactgaacaaatacatcactgaatacctgactaccaagggcgtgtttgaagatgacgaaggaacaaatcagggc

SEQ ID NO: 15051 - DNA, 75 bp, synthetic construct
  source 1..75: mol_type = other DNA
taacgtcgcccaactgacggcgcaatattatgtactgaaaccagaagcagggaatgcggagcacgcggtgaaatt

SEQ ID NO: 15052 - DNA, 75 bp, synthetic construct
  source 1..75: mol_type = other DNA
gtttcttcctgaagaaattcgccagaaaatccttgaacatctccacggtgttattcattacgagcccgtgattgg

SEQ ID NO: 15053 - DNA, 75 bp, synthetic construct
  source 1..75: mol_type = other DNA
attacttgtctgtgcttcagaagaaacctggggcgttgcgcaatggtgcgccatttgctgaattgccacccgcgt

SEQ ID NO: 15054 - DNA, 75 bp, synthetic construct
  source 1..75: mol_type = other DNA
cattatgggtaaatccggcaccggcaaaagcagtctgtgtaatgccatttttcagtcccgtatctgcgccacgca

SEQ ID NO: 15055 - DNA, 75 bp, synthetic construct
  source 1..75: mol_type = other DNA
atgcgcatgaatgttttcgaaatggaagggtttcttcgcgggaaatgtgtaccgcgagatctgaaagtgaacgaa

SEQ ID NO: 15056 - DNA, 75 bp, synthetic construct
  source 1..75: mol_type = other DNA
gttgttcctggaataggaactgcggccggcgctattggtggtgggcttattggtcttgttggggggcttggattc

SEQ ID NO: 15057 - DNA, 75 bp, synthetic construct
  source 1..75: mol_type = other DNA
ctgtcacaaagtaaattcagatgccaggtatgtggatatacagcgaacgccgatgtaaacggcgctcgtaacatt

SEQ ID NO: 15058 - DNA, 75 bp, synthetic construct
  source 1..75: mol_type = other DNA
gggctggcgaccagcggtaagggtattcaggtggtggaagccattaacggtgccaccacggaggaaggggccttt

SEQ ID NO: 15059 - DNA, 75 bp, synthetic construct
  source 1..75: mol_type = other DNA
ctcatgatcgatgggtgcgtagctagattaagaaagtacaaaccagaagagtatgaattagttatagcccatttt

SEQ ID NO: 15060 - DNA, 75 bp, synthetic construct
  source 1..75: mol_type = other DNA
tgccgagtcgcttgctcccttcgccggttcacaccagcagtcttcacaggcgttacaaaatttacaacgtcaact

SEQ ID NO: 15061 - DNA, 75 bp, synthetic construct
  source 1..75: mol_type = other DNA
gggtgatgttccaggcgatcaaggcagtcattatacgagcaggcagttccggcagttactgtggcgataccggat

SEQ ID NO: 15062 - DNA, 75 bp, synthetic construct
  source 1..75: mol_type = other DNA
ccaaatcaacgatcaactgactggtttcggtcagtgggaatatgaattcaaaggcaaccgtgctgaatctcaagg

SEQ ID NO: 15063 - DNA, 75 bp, synthetic construct
  source 1..75: mol_type = other DNA
gtgaccacaatgtcattacagcaggcttttgaggtctgccagaataacaaagcggcatggctgcaacgcaaaaat

SEQ ID NO: 15064 - DNA, 75 bp, synthetic construct
  source 1..75: mol_type = other DNA
ttcatcataaagcattaatgatttccgttaacagaagtgcaaaggattcagagctttatgatgcggttcgattta

SEQ ID NO: 15065 - DNA, 75 bp, synthetic construct
  source 1..75: mol_type = other DNA
cgggggacattattcaggaatcactggacgaacttaatgtcagcctgcgcgagtttgccagagcaatggaaattg

SEQ ID NO: 15066 - DNA, 75 bp, synthetic construct
  source 1..75: mol_type = other DNA
tattgagatcggtgattttgataaccttcacgtcactgccacaacgaaagaggaagcagttcaccgcgccagtga

SEQ ID NO: 15067 - DNA, 75 bp, synthetic construct
  source 1..75: mol_type = other DNA
cctgttccgccgcagatacgtcgaacaatttttaatgagacaacgatagagggaatgttaaaatattactccgat

SEQ ID NO: 15068 - DNA, 75 bp, synthetic construct
  source 1..75: mol_type = other DNA
tcgcaaatattctgaattgctggatgagtttaaatctctccggcgctatttctccgtatcagtctccgtgcctta

SEQ ID NO: 15069 - DNA, 75 bp, synthetic construct
  source 1..75: mol_type = other DNA
gaactggaaaagccacaccaccagctggtcagcacatacagtgagctgaaccggcagtatacggaactgctgagt

SEQ ID NO: 15070 - DNA, 75 bp, synthetic construct
  source 1..75: mol_type = other DNA
tattgcgtctaactcagtgtttcttgtacatgtaaacaatggccaggctgaccagttgaatgttaccggcaaact

SEQ ID NO: 15071 - DNA, 75 bp, synthetic construct
  source 1..75: mol_type = other DNA
caatttttaatgagacaacgatagagggaatgttaaaatattattccgacagcaatcgctcttttgctcttgtat

SEQ ID NO: 15072 - DNA, 75 bp, synthetic construct
  source 1..75: mol_type = other DNA
aacagtatggtatccgcctgacggctaatcaggcatatcaccagatggtgaagctggggatcgtcgagcagcgcg

SEQ ID NO: 15073 - DNA, 75 bp, synthetic construct
  source 1..75: mol_type = other DNA
cctggaatttatccagaccttaccggaaaactctgtcgatctgatagtcacagacccgccatactttaaagtgaa

SEQ ID NO: 15074 - DNA, 75 bp, synthetic construct
  source 1..75: mol_type = other DNA
gcctcttgcttatgcttacaaagagcttacgcctgagattatgcgcaaccatttagctgtattcgagcgatatgg

SEQ ID NO: 15075 - DNA, 75 bp, synthetic construct
  source 1..75: mol_type = other DNA
atgaataaaaatattgccgtgacgggcaaggggtacgctcgttcagtaaaaaaattctgcgatattcgtgatctt

SEQ ID NO: 15076 - DNA, 75 bp, synthetic construct
  source 1..75: mol_type = other DNA
gactgcgcacgcttgtagaaaatgaagaaaccacctttaaacaaattgctcttgagagcggactttctaccggaa

SEQ ID NO: 15077 - DNA, 75 bp, synthetic construct
  source 1..75: mol_type = other DNA
atcatggaccgtgcgttgccgtttattggtgatggtctgaaacctgttcagcgccgcattgtgtatgcgatgtct

SEQ ID NO: 15078 - DNA, 75 bp, synthetic construct
  source 1..75: mol_type = other DNA
ggtaccgtgcgtgaagccaccggcacctccggcgtggataatgcaaccggcccccgactggcagacaccgctgaa

SEQ ID NO: 15079 - DNA, 75 bp, synthetic construct
  source 1..75: mol_type = other DNA
gcaccattaataacgggcagaatattgttgtcgattttgggaatattaatcctgagcacgtggacaactcacgtg

SEQ ID NO: 15080 - DNA, 75 bp, synthetic construct
  source 1..75: mol_type = other DNA
ctggctgctgacacggtcgtacaggcgggagaaaccgtgagcggcggaacactgacaaatcatgacaaccagatt

SEQ ID NO: 15081 - DNA, 75 bp, synthetic construct
  source 1..75: mol_type = other DNA
agggcgaaaaactctccctgaaagagacgttaaccctgctggatggtgccgcacgtcataacgtacaggtcctga

SEQ ID NO: 15082 - DNA, 75 bp, synthetic construct
  source 1..75: mol_type = other DNA
tgcagtaattatttttgatgcccctgaaattcaggagcataaaaatagatataaagagatgccaattatctcatg

SEQ ID NO: 15083 - DNA, 75 bp, synthetic construct
  source 1..75: mol_type = other DNA
aatgtcttactgaactggcgtttgagctgggaatgaatgacgcaccacgccgtaaagggccgctctcccgcgccc

SEQ ID NO: 15084 - DNA, 75 bp, synthetic construct
  source 1..75: mol_type = other DNA
taacgccacggttcagtcggtggtggatgacctcagccatgccggacagattcatttcacctccgcccgcacagg

SEQ ID NO: 15085 - DNA, 75 bp, synthetic construct
  source 1..75: mol_type = other DNA
tgacgaacaattaattatcgctgttgtagctgtgggtaaacgtgagcgcagtgacgtttataatcttgccagtga

SEQ ID NO: 15086 - DNA, 75 bp, synthetic construct
  source 1..75: mol_type = other DNA
tgcgtcgtgctcgcgccgccggtggtctctggtggcaagttccgcatgctggagcgccaccagtggaagggcatg

SEQ ID NO: 15087 - DNA, 75 bp, synthetic construct
  source 1..75: mol_type = other DNA
accagcctgcaaccgctgattgagagcttcacacacccgaacgcgattgtgctggacccgtttgcaggcagcggc

SEQ ID NO: 15088 - DNA, 75 bp, synthetic construct
  source 1..75: mol_type = other DNA
ccgtatgacacggtgtacagcgtcgagaaaaatgaagatcgacggacagccgaacgctttcagaaatgggtggaa

SEQ ID NO: 15089 - DNA, 75 bp, synthetic construct
  source 1..75: mol_type = other DNA
actggataaatccattcaacagcagtttgcgaaaaaactaaagaaatgcagcgaaaatcctcatattccttccgc

SEQ ID NO: 15090 - DNA, 75 bp, synthetic construct
  source 1..75: mol_type = other DNA
ggtatgaacttggtcttctgcattttctgaatggggaacatgttaaggctgccacagcttttcgtcatggctttg

SEQ ID NO: 15091 - DNA, 75 bp, synthetic construct
  source 1..75: mol_type = other DNA
tgtttgtaaactggctctataaccattcctctgtgctgcatgaacgagcagaaatcattaaatgcgccgaaatgc

SEQ ID NO: 15092 - DNA, 75 bp, synthetic construct
  source 1..75: mol_type = other DNA
aatgagcaaggaaggcccggtgctggtcagttccccgtcccggatgggactggaaatgctgcgccgacagattgc

SEQ ID NO: 15093 - DNA, 75 bp, synthetic construct
  source 1..75: mol_type = other DNA
gtgggtatatcgactttggtgatggcagtccgcttaactttttcagctatgcagggaaaaacggtcatgcctatc

SEQ ID NO: 15094 - DNA, 75 bp, synthetic construct
  source 1..75: mol_type = other DNA
atagcatggcgcccttctggccatcttatcagaacaaaatcatcggcgttctcaaccgtgtgttgcgcgagcagt

SEQ ID NO: 15095 - DNA, 75 bp, synthetic construct
  source 1..75: mol_type = other DNA
atggcaagaccaccgaaagcccccgcctacctggatgatatcgccgtgaagcagtggcgggaaaaatcgcggcag

SEQ ID NO: 15096 - DNA, 75 bp, synthetic construct
  source 1..75: mol_type = other DNA
aaaggtttactcgactcccttatccacgccggatttgcggaagacgacgagcaattcgatgacattcgcgtaatt

SEQ ID NO: 15097 - DNA, 75 bp, synthetic construct
  source 1..75: mol_type = other DNA
caaattgcaggacagcttttatatcaacgtttcctgggatgcgctgaacacggcatacagtgaacacccggagtg

SEQ ID NO: 15098 - DNA, 75 bp, synthetic construct
  source 1..75: mol_type = other DNA
tgagaaatgggtgaccgatactgaggcacagcatagcgccgcagtagaagcggcagaagcacagcgccagtcgct

SEQ ID NO: 15099 - DNA, 75 bp, synthetic construct
  source 1..75: mol_type = other DNA
atacctgttaatggtacaaatgaattaattattaaaaacatcaataacgcaacagcaattaatggtgggctaatg

SEQ ID NO: 15100 - DNA, 75 bp, synthetic construct
  source 1..75: mol_type = other DNA
accgaaaagacgtacagcaaatcatccggcaactcagattagacattttcactaaatcacgacttcgcatcacaa

SEQ ID NO: 15101 - DNA, 75 bp, synthetic construct
  source 1..75: mol_type = other DNA
aagatgagagagaagaacttgaacaactcagggtcgagaatgcctacttaaaaaagctgaaagccttggttcagc

SEQ ID NO: 15102 - DNA, 75 bp, synthetic construct
  source 1..75: mol_type = other DNA
atgcccagctttctaccccatgcactgacagcatcataaacagcattgcaacaggcattcgcatcaaaggagagt

SEQ ID NO: 15103 - DNA, 75 bp, synthetic construct
  source 1..75: mol_type = other DNA
tctggatgtataataaaggaaaacataatcgctggcgtgacaacagtagtcagctgagaacccgggggaatagct

SEQ ID NO: 15104 - DNA, 75 bp, synthetic construct
  source 1..75: mol_type = other DNA
tcagtgccggaggcggacagagccttcaggggcaggcagtgaataccactctgaacggcggtgagcagtgggtac

SEQ ID NO: 15105 - DNA, 75 bp, synthetic construct
  source 1..75: mol_type = other DNA
aagcaataccaggagggaagtcttactgctgtggccgcaggagaacaggtcgttcctgcctctgaacttgctgct

SEQ ID NO: 15106 - DNA, 75 bp, synthetic construct
  source 1..75: mol_type = other DNA
tcattgcagacgcttcgaccccggcgggtcgtgctggaatgagtgagagcgagtggcgagaagcgatcaaattcg

SEQ ID NO: 15107 - DNA, 75 bp, synthetic construct
  source 1..75: mol_type = other DNA
ggaagcacgccagcaatctccggctggctgcgtgatggtatttgctgcccgtattcgtcagggggtaggcttatg

SEQ ID NO: 15108 - DNA, 75 bp, synthetic construct
  source 1..75: mol_type = other DNA
accaacatttggcaagtgggttggtgtaaatttgtcggcggagaataagcgtcaattatggataccggaaggatt

SEQ ID NO: 15109 - DNA, 75 bp, synthetic construct
  source 1..75: mol_type = other DNA
gcattacaacagcctgatggcggttattcgtgaaaaggaggagacactgaaacaacgagtgatccgcgcgctggc

SEQ ID NO: 15110 - DNA, 75 bp, synthetic construct
  source 1..75: mol_type = other DNA
gttttgttacataacaacgacgtgagttttgttttccacgtttttattgatgatatccctgaagccgatatccag

SEQ ID NO: 15111 - DNA, 75 bp, synthetic construct
  source 1..75: mol_type = other DNA
taataccaggacaaaaaacagaacaaaccaatgcagacacagcccgattcatcaatgaagctacccgcaaaaaat

SEQ ID NO: 15112 - DNA, 75 bp, synthetic construct
  source 1..75: mol_type = other DNA
cactgttgtaaacagtgacggctggcagattgtcaaaaacgggggtgtggccgggaataccaccgttaatcagaa

SEQ ID NO: 15113 - DNA, 75 bp, synthetic construct
  source 1..75: mol_type = other DNA
gatgcaccggaaaagaaacagccctttggacgctggtctgcctctcagttaaaagacctggtggccggtaagcct

SEQ ID NO: 15114 - DNA, 75 bp, synthetic construct
  source 1..75: mol_type = other DNA
cgcccgtcgtggaatgcacagaccttctgagaacggcgacgcttgacgtcacaaaagggggaaagatgagcggca

SEQ ID NO: 15115 - DNA, 75 bp, synthetic construct
  source 1..75: mol_type = other DNA
tgtgtgccatgaaagccggtgcctgccggtatgacacggaagggtatgtgacggagcatatttctcaggaggagg

SEQ ID NO: 15116 - DNA, 75 bp, synthetic construct
  source 1..75: mol_type = other DNA
aggccagacaggcgctgtccatttatctgaacctgcccacgctggatgaggccgtgaacaccctgaagccctggt

SEQ ID NO: 15117 - DNA, 75 bp, synthetic construct
  source 1..75: mol_type = other DNA
tggtggtcttcagagagtgaaccccggtggaagtgtctcagacacggttatcagtgccggaggcggacagagcct

SEQ ID NO: 15118 - DNA, 75 bp, synthetic construct
  source 1..75: mol_type = other DNA
atggcaaaccgcaaacagcaccgcgctatcgcggagcgtcgtcacatccagactgaaatcaaccgcagactttcc

SEQ ID NO: 15119 - DNA, 75 bp, synthetic construct
  source 1..75: mol_type = other DNA
cgttcctgcctctgaacttgctgccgccatgaagcagattaaagaactccagcgcctgctcggcaaaaaaacgat

SEQ ID NO: 15120 - DNA, 75 bp, synthetic construct
  source 1..75: mol_type = other DNA
atgccaccacgaaccccaaaagcctgccgttttcgcggttgccgcaataccacgactgatccgtcaggctattgc

SEQ ID NO: 15121 - DNA, 75 bp, synthetic construct
  source 1..75: mol_type = other DNA
cttaatcgcgtaatgggacgtgatttattcgatctcagtatgccgcccgccctgattcagtggcgcagcggcacc

SEQ ID NO: 15122 - DNA, 75 bp, synthetic construct
  source 1..75: mol_type = other DNA
tcatgattttctgcgcagctcactgaccggggaaattttcgcaaccaaccgtgagcaggtggaagcgatgatcga

SEQ ID NO: 15123 - DNA, 75 bp, synthetic construct
  source 1..75: mol_type = other DNA
ctgctgaagcagtgaaggacgtcctgcgctctgaagaagtcctgagcgcactgaaacagaaacttcgccataacc

SEQ ID NO: 15124 - DNA, 75 bp, synthetic construct
  source 1..75: mol_type = other DNA
accggtatatacaaatggtggtttcctaaccggaggtactatcagtgctttaaactcatataacaatggccaaat

SEQ ID NO: 15125 - DNA, 75 bp, synthetic construct
  source 1..75: mol_type = other DNA
gaaagtgactatcactatctggaaacgaagaaaaaaagcggaggttttctcagtaagaaaaccacccgcaccatc

SEQ ID NO: 15126 - DNA, 75 bp, synthetic construct
  source 1..75: mol_type = other DNA
tgctcagtttctgcactgcatgcagcatccacggtgttcagacccgtgagtatggtcacacgtcacgcagtccgc

SEQ ID NO: 15127 - DNA, 75 bp, synthetic construct
  source 1..75: mol_type = other DNA
ccagtacaggttcgctggtgagcgatgatgtactggtgctgaaggcgcaggatgtgacacagaacggtgtgctgt

SEQ ID NO: 15128 - DNA, 75 bp, synthetic construct
  source 1..75: mol_type = other DNA
aatgacctgctgatctatatgcaggacggcacggtgatccgctgcaacggttatttcctgcaagcggcgaatacc

SEQ ID NO: 15129 - DNA, 75 bp, synthetic construct
  source 1..75: mol_type = other DNA
ggctatatatcgtgactggatagcaagaaaagatgacgtcagatattttgcaggtatagttagaaatgccgaaaa

SEQ ID NO: 15130 - DNA, 75 bp, synthetic construct
  source 1..75: mol_type = other DNA
atgccggtaattaacacgcatcagaatatcgccgcctttctcgacatgctggccgtgtccgaagggacggcgaac

SEQ ID NO: 15131 - DNA, 75 bp, synthetic construct
  source 1..75: mol_type = other DNA
cggttacgccaaccccgttcgggctgccaccagtgaaattggcgtttccggtggtagcaataaccgctacttatt

SEQ ID NO: 15132 - DNA, 75 bp, synthetic construct
  source 1..75: mol_type = other DNA
ctcccggcgaatctcccaggacatcagtacccgtgatgaaggcggtggcggaaaggtcgtggttatcgggcggca

SEQ ID NO: 15133 - DNA, 75 bp, synthetic construct
  source 1..75: mol_type = other DNA
accacgggcaccatgcagatgctggggagtgcaccacagcagaacgctcaggtgcaaccgcagcctcagcagaat

SEQ ID NO: 15134 - DNA, 75 bp, synthetic construct
  source 1..75: mol_type = other DNA
caacggtcagcaaattatcaccgccatggctgccggagttgcatatgttgcgatgaagccaatcgttgaaaacct

SEQ ID NO: 15135 - DNA, 75 bp, synthetic construct
  source 1..75: mol_type = other DNA
acatcatgctcggtaaaacgtataccaaagcagaatgcaaagccctcctgaataaagaccttgccacggtcgcca

SEQ ID NO: 15136 - DNA, 75 bp, synthetic construct
  source 1..75: mol_type = other DNA
aagacttctcccccaaaagccaggacgcagtggcattgcagcagattaaagagcgtggcgctttaccgatgattg

SEQ ID NO: 15137 - DNA, 75 bp, synthetic construct
  source 1..75: mol_type = other DNA
agtatgaacataaaatcggtgacctgattgcccgatttaaaaaagctggtggggtagtaaatgaagctgagatat

SEQ ID NO: 15138 - DNA, 75 bp, synthetic construct
  source 1..75: mol_type = other DNA
gtgctgacgcgacgaaaaaagggagcgcgaaaacgaaaggccgtggacgtaaggctgcgcagccggagcctcagc

SEQ ID NO: 15139 - DNA, 75 bp, synthetic construct
  source 1..75: mol_type = other DNA
gagagttttgatgagttattgagtgcaaactctgtaaaaaacgatgacatgtttgtctttgcagatgatgcaagt

SEQ ID NO: 15140 - DNA, 75 bp, synthetic construct
  source 1..75: mol_type = other DNA
ttgctcgggacctttgccgtccttgccgcctttggcttctcgataaacacgctaacaatgttcgggatggtgctc

SEQ ID NO: 15141 - DNA, 75 bp, synthetic construct
  source 1..75: mol_type = other DNA
ttcagcgctcagtattcagaaatggtgaaagcgatcggatttaatgccgatcaggctgccttatcgtcaaaccgg

SEQ ID NO: 15142 - DNA, 75 bp, synthetic construct
  source 1..75: mol_type = other DNA
tttaccatcaacctgtcatccggtcatgaacgaaccctgtacgcatttctcgatcctgcctgtcctaactgcaga

SEQ ID NO: 15143 - DNA, 75 bp, synthetic construct
  source 1..75: mol_type = other DNA
tcagggcggcgtcgccgtcagatcttgcggaaaagctgacacaaaaactgaaggaggggtggcagccatttggca

SEQ ID NO: 15144 - DNA, 75 bp, synthetic construct
  source 1..75: mol_type = other DNA
ggcagttatgacttaaaatatcttattaaaaaaggtgatttactagttgggatggatggagatttcaaccgtgag

SEQ ID NO: 15145 - DNA, 75 bp, synthetic construct
  source 1..75: mol_type = other DNA
ggacgtggcggcaggccgtgccgttctccgtcaggcagggctggccgggggagacagtcctgcacggtttattgc

SEQ ID NO: 15146 - DNA, 75 bp, synthetic construct
  source 1..75: mol_type = other DNA
atccgcgttcttcatttactccatcttcgtcggcagatattcccgtgccaccagatggattagttcaacgcagta

SEQ ID NO: 15147 - DNA, 75 bp, synthetic construct
  source 1..75: mol_type = other DNA
attcattcgcccggctttcgatacgacagaggagctggcggcgcaggttgccatacagcgaatgaatcaggctat

SEQ ID NO: 15148 - DNA, 75 bp, synthetic construct
  source 1..75: mol_type = other DNA
cccctgaagcgtggaaaatgcgttttctggccaacgggacatccggtacatggttttacactgacgacattgctg

SEQ ID NO: 15149 - DNA, 75 bp, synthetic construct
  source 1..75: mol_type = other DNA
gctgaatggctggcagcggtcagcgggcgctaaggcagagctggcactggcggagaaactggggcatgcggtgat

SEQ ID NO: 15150 - DNA, 75 bp, synthetic construct
  source 1..75: mol_type = other DNA
taatccgccgcgtcgccggaatcagccagcaggttgacgaacaggccacgcagccggacagcatgaccgcagata

SEQ ID NO: 15151 - DNA, 75 bp, synthetic construct
  source 1..75: mol_type = other DNA
atgaacgaatatcagtttgtgcttccatacccgccgtcggtgaatacctactggcgaagacggggaagccaatac

SEQ ID NO: 15152 - DNA, 75 bp, synthetic construct
  source 1..75: mol_type = other DNA
gatgcgtaatgaccccaaccgcagctacagcaaactggtggacacactgctttccatcaaaatcgaaaaactgcg

SEQ ID NO: 15153 - DNA, 75 bp, synthetic construct
  source 1..75: mol_type = other DNA
atggcttctaaaaaattttactcagatgatgacatccagctggcaaaagctgctttatcggaattgccggacctc

SEQ ID NO: 15154 - DNA, 75 bp, synthetic construct
  source 1..75: mol_type = other DNA
ctggaaatcaacggaagcgcccatgcaacgggtaacatatttgctgatggtcagaactctaatcaccattcccat

SEQ ID NO: 15155 - DNA, 75 bp, synthetic construct
  source 1..75: mol_type = other DNA
taatccgccgcgtctctggaatcagccagcaggctgacgaacagaccacgcagccggacagcgtgacagccgaaa

SEQ ID NO: 15156 - DNA, 75 bp, synthetic construct
  source 1..75: mol_type = other DNA
tgggcgatgaatattggttgccatctgactattccgcagagctgcgagttccagcagctccgtgacaagcaggag

SEQ ID NO: 15157 - DNA, 75 bp, synthetic construct
  source 1..75: mol_type = other DNA
atggcagttcgtggaattaacaaggtcattcttgtcggtcgtctgggaaaagatccggaagtccgttacatcccc

SEQ ID NO: 15158 - DNA, 75 bp, synthetic construct
  source 1..75: mol_type = other DNA
tgggcgatgaatattggctgccacctgactattccgcagagctgcgagttccagctgctgcgcgacaagcaggag

SEQ ID NO: 15159 - DNA, 75 bp, synthetic construct
  source 1..75: mol_type = other DNA
ttcacgagagccgatgattgattacctcggagaactggttggtgtataccgccttgccgcgcagcctgccaccac

SEQ ID NO: 15160 - DNA, 75 bp, synthetic construct
  source 1..75: mol_type = other DNA
agtcattgcggctgttgggtttatagctggtaaggcaattttctctgataatgttgtgttcaggagaagaatgta

SEQ ID NO: 15161 - DNA, 75 bp, synthetic construct
  source 1..75: mol_type = other DNA
tcttaccgcgctttgcgcaaggagaagaaggccatgaaactaccacgcagctcccttgtctggtgtgtgttgatc

SEQ ID NO: 15162 - DNA, 75 bp, synthetic construct
  source 1..75: mol_type = other DNA
aggtggccacgtcagaaagctggcgtgacaaacagacgggggagatgcgggagcagacagaatggcatcgcgtgg

SEQ ID NO: 15163 - DNA, 75 bp, synthetic construct
  source 1..75: mol_type = other DNA
gtggtttacgggactgaagaggggctaccgtctggcagagctggtcgggatgcatgagccactggcgcgacagcg

SEQ ID NO: 15164 - DNA, 75 bp, synthetic construct
  source 1..75: mol_type = other DNA
tgtagtgatgaagagaaggggctggctctgcagtgggtttctgaactaacagatgaactcatggcaaaaatcaga

SEQ ID NO: 15165 - DNA, 75 bp, synthetic construct
  source 1..75: mol_type = other DNA
gattaaagccagagattcattttcctgagtggttgccagagtttatattggctaatttgttttttgtgtctctgg

SEQ ID NO: 15166 - DNA, 75 bp, synthetic construct
  source 1..75: mol_type = other DNA
acccttcgtacgaccgcaatcagcgaagcggcgtatgccgtcacccgattgcctgcgccaacaacttccgcggtg

SEQ ID NO: 15167 - DNA, 75 bp, synthetic construct
  source 1..75: mol_type = other DNA
cagcttccggtgggtacactcagcttcagcattgaaaacctcttcgaccgtgactacaccactgtctgggggcag

SEQ ID NO: 15168 - DNA, 75 bp, synthetic construct
  source 1..75: mol_type = other DNA
cgctgaccagcgatgcgccgtcagggaaggaaggtgccgcattcctggcgctgatggcagaaaaagcccgtcttg

SEQ ID NO: 15169 - DNA, 75 bp, synthetic construct
  source 1..75: mol_type = other DNA
cgccggggatacacaaaacacatgctgcgtctgcggcgggccggagagataaacggagaacatgtccctgaaatt

SEQ ID NO: 15170 - DNA, 75 bp, synthetic construct
  source 1..75: mol_type = other DNA
gtaaacgcacctgcgccagcgcaccgctggatccgctgacccgcgccgtggtgatttccctgtttacctggcggc

SEQ ID NO: 15171 - DNA, 75 bp, synthetic construct
  source 1..75: mol_type = other DNA
gcttcgggatgatgtaaatgcccttactgtcgcattttcatatctggcattctcaattcccaaggaacaaatgca

SEQ ID NO: 15172 - DNA, 75 bp, synthetic construct
  source 1..75: mol_type = other DNA
atgtctgacaacaccatccctgaatatctgcaacccgcgctggcacaactggaaaaggccagagccgcccatctt

SEQ ID NO: 15173 - DNA, 75 bp, synthetic construct
  source 1..75: mol_type = other DNA
gaccgtcctgacctgtttaaacgcagccccgtaaaccggcatgcggtactgaaagaaatggccggagacccggaa

SEQ ID NO: 15174 - DNA, 75 bp, synthetic construct
  source 1..75: mol_type = other DNA
tcccgcacatggattatgaggtggcaggcacaccggcacagcgcaaggtgtggcaggacaaaatagaccagcagg

SEQ ID NO: 15175 - DNA, 75 bp, synthetic construct
  source 1..75: mol_type = other DNA
tgtcgacagttccgcgctgccatggctgggcgagcagttctcactgttcggcgatggctgggagctggcggaatc

SEQ ID NO: 15176 - DNA, 75 bp, synthetic construct
  source 1..75: mol_type = other DNA
ttccggctggctgaaacgacgccttttttattatacaacgccacttttttcttcagtactggctcttcataaggg

SEQ ID NO: 15177 - DNA, 75 bp, synthetic construct
  source 1..75: mol_type = other DNA
aggtctggacgcaatcctcgtacctggcggtttcggctatcgtggcgtagaaggcatgattacgaccgcgcgttt

SEQ ID NO: 15178 - DNA, 75 bp, synthetic construct
  source 1..75: mol_type = other DNA
caatttttaatgatacaacgatagagggaatgttaaaatattattctgatagcaaccgctcttttgctcttgtat

SEQ ID NO: 15179 - DNA, 75 bp, synthetic construct
  source 1..75: mol_type = other DNA
aattctgggaatggtgcagctggtcctgttattgatgctattgaggaatgctttttacggaacaatattccgatt

SEQ ID NO: 15180 - DNA, 75 bp, synthetic construct
  source 1..75: mol_type = other DNA
tgcagatcgttgttgatgagatccgtgacacgctggaaaaggcagtgattgcctgctgtgatgaggctgatatgt

SEQ ID NO: 15181 - DNA, 75 bp, synthetic construct
  source 1..75: mol_type = other DNA
ggcggaactggctaagaaagtagccagaatgctgacaaaagaaaaagccccgaagaacggcgaattcttcgaggc

SEQ ID NO: 15182 - DNA, 75 bp, synthetic construct
  source 1..75: mol_type = other DNA
cagcattctgagaggggccatcgcctccggtcgtccatggtggtatcgccaccatacggaatcaccacgagactg

SEQ ID NO: 15183 - DNA, 75 bp, synthetic construct
  source 1..75: mol_type = other DNA
gtataaaccagatacgccgtgaccggcctctgacccatgaagagctgatgagtcatgtacccagcgtgttcggga

SEQ ID NO: 15184 - DNA, 75 bp, synthetic construct
  source 1..75: mol_type = other DNA
ttaaagggataaataattacccggataagattactgttactgtggcgctggaaacgggtgggtatacgtcactgt

SEQ ID NO: 15185 - DNA, 75 bp, synthetic construct
  source 1..75: mol_type = other DNA
ttggtgatcacgattcgcacaagcccatgagtgagaatacagtaaatagtgcgttacgggtcatggggtatgata

SEQ ID NO: 15186 - DNA, 75 bp, synthetic construct
  source 1..75: mol_type = other DNA
gatttcgaagcgtctatatggactatcccaccggagcgggagcctattcctggagtgaaacattcccatagaggc

SEQ ID NO: 15187 - DNA, 75 bp, synthetic construct
  source 1..75: mol_type = other DNA
gataaacggagaacatgtccctgaaattattctgctcaactcccatgacggtacctccagctaccagatgctgcc

SEQ ID NO: 15188 - DNA, 75 bp, synthetic construct
  source 1..75: mol_type = other DNA
attgcagtaaagtgcaacattctgaccagtacctatatccctcatccgctgctcagccagcaggctttttcgcgt

SEQ ID NO: 15189 - DNA, 75 bp, synthetic construct
  source 1..75: mol_type = other DNA
tggctggtggttccggcactcgtctttatcctgtgacgatggcagtaagtaaacaactgctgccgatttatgata

SEQ ID NO: 15190 - DNA, 75 bp, synthetic construct
  source 1..75: mol_type = other DNA
gcggacggatacggttcgtgccgtgcggcgtggtgacacgctgaccattaatggtgagacattctgggtggatcg

SEQ ID NO: 15191 - DNA, 75 bp, synthetic construct
  source 1..75: mol_type = other DNA
aagcatccatgaccagccttgaaatcgcagagttggtgggcagccaacacaaagatgttaagcgcagcattgaaa

SEQ ID NO: 15192 - DNA, 75 bp, synthetic construct
  source 1..75: mol_type = other DNA
ctggaaacctcaccggcaaaatatacccgccgtggtgtggaagaggatgtttactggtgggtgccgtccttcaac

SEQ ID NO: 15193 - DNA, 75 bp, synthetic construct
  source 1..75: mol_type = other DNA
gtccatggcgtgaccggatcctgaacgttgtcgggctgcccgtgccggatgcgaccggcgggcgtctggaaattc

SEQ ID NO: 15194 - DNA, 75 bp, synthetic construct
  source 1..75: mol_type = other DNA
tgccacacgtctggaggcctggcaggcattgcaggtgtttctgaaacattatccggcaaaacgtattgatgtcgg

SEQ ID NO: 15195 - DNA, 75 bp, synthetic construct
  source 1..75: mol_type = other DNA
gtgattgaatggacggctgatcatggttttcatgcgcatgcggttttctggatcgatcgtcagagggttaaaaaa

SEQ ID NO: 15196 - DNA, 75 bp, synthetic construct
  source 1..75: mol_type = other DNA
cttgctggaaagaaaaatatactgccgcacggtttacccgtgacctgattgccgggataaccgtcgggattattg

SEQ ID NO: 15197 - DNA, 75 bp, synthetic construct
  source 1..75: mol_type = other DNA
gttttcatgcgcatgtcgttttctggatcgatcgtcagagggttaaaaaaatatatatccctttgcggagcggat

SEQ ID NO: 15198 - DNA, 75 bp, synthetic construct
  source 1..75: mol_type = other DNA
acgacgccgttgcccgtttcagttttccggcctggatgttacagcttctgcgcaaaacccgggaccgcattatcc

SEQ ID NO: 15199 - DNA, 75 bp, synthetic construct
  source 1..75: mol_type = other DNA
aaaagcagtctgtgtaatgccatttttcagtcccgtatctgcgccacgcatcccctgaacggctgcacccgccag

SEQ ID NO: 15200 - DNA, 75 bp, synthetic construct
  source 1..75: mol_type = other DNA
ggatctgattatctggatcctgcgggcagatgaacgcgcgtatgccgccgacattaccatgcatcagtttttact

SEQ ID NO: 15201 - DNA, 75 bp, synthetic construct
  source 1..75: mol_type = other DNA
caacaaatgaccagaatacggcgctacaaagaaatgcgctggaatgtgcaggatgtgagctgtttttcgaagaca

SEQ ID NO: 15202 - DNA, 75 bp, synthetic construct
  source 1..75: mol_type = other DNA
gcataacggtgagtggaagacactgagcagtgacaaagtggggaaaacggggttcattgagaatgtgtacgctaa

SEQ ID NO: 15203 - DNA, 75 bp, synthetic construct
  source 1..75: mol_type = other DNA
gcgatgacgtataccagaagcaaaacgtttaaaactgaagctggcgcgcgtcgctggttagccagaaacactgac

SEQ ID NO: 15204 - DNA, 75 bp, synthetic construct
  source 1..75: mol_type = other DNA
ttttttagaaaaagccggatatacagaaagaactgatagcaaagaggaccgccgtgctaaaaaaatcagtctgac

SEQ ID NO: 15205 - DNA, 75 bp, synthetic construct
  source 1..75: mol_type = other DNA
gcacaaataaaagaatgcaggataatatatctgaatttctgggggcgtatggaataaatcactcagcatatatgg

SEQ ID NO: 15206 - DNA, 75 bp, synthetic construct
  source 1..75: mol_type = other DNA
accacctcccgcctgctgcataccgccaccggggccgtggcacacgttacccgcgagctggaagcatggcagcag

SEQ ID NO: 15207 - DNA, 75 bp, synthetic construct
  source 1..75: mol_type = other DNA
cgctgattctggtcacttacttcacccagcctcaacctaaggcagaaagccgtcgcgatgtattagcgtcggcgg

SEQ ID NO: 15208 - DNA, 75 bp, synthetic construct
  source 1..75: mol_type = other DNA
cttctgaacgtgaactggagatgtctaccgagattgcacgtctcaaacgccagctggcagaacgggatgaagagc

SEQ ID NO: 15209 - DNA, 75 bp, synthetic construct
  source 1..75: mol_type = other DNA
gagacaagcaaaattgataaattccgctgggatacagaggcattgctgattgcaggcaatgcgaatgttggtgag

SEQ ID NO: 15210 - DNA, 75 bp, synthetic construct
  source 1..75: mol_type = other DNA
gcagatgcctacaataccgcagccagaaattacattgccgataacaatgccactctgcacaacggcagccttccg

SEQ ID NO: 15211 - DNA, 75 bp, synthetic construct
  source 1..75: mol_type = other DNA
ggacacccgcgccggtgggagtgtttggccccggctggaaagcgccttctgatatccgcttacagctacgcgatg

SEQ ID NO: 15212 - DNA, 75 bp, synthetic construct
  source 1..75: mol_type = other DNA
agcgcagattatccagcaggccggtaactccgtgctggcaaaagccaaccaggtaccgcagcaggttctgtctct

SEQ ID NO: 15213 - DNA, 75 bp, synthetic construct
  source 1..75: mol_type = other DNA
cggtatcacccgttacgtcactgaaattcttgttaagaccacgggcaccatgcagatgctggggagtgcaccaca

SEQ ID NO: 15214 - DNA, 75 bp, synthetic construct
  source 1..75: mol_type = other DNA
tctcagcgctcactgaacgaagatgacctacttgaagccatgataaagcttcagggaagctctgaggccatcttt

SEQ ID NO: 15215 - DNA, 75 bp, synthetic construct
  source 1..75: mol_type = other DNA
tgttattacgggtgataatgccacagtaaacaacaatggcaaaaccaccgttgacggtaaagattccaccggtac

SEQ ID NO: 15216 - DNA, 75 bp, synthetic construct
  source 1..75: mol_type = other DNA
tcctgttttagatgtcgagttatcggcaggtaacggatgtctggctgaaatagttgaatcagctattgactggtt

SEQ ID NO: 15217 - DNA, 75 bp, synthetic construct
  source 1..75: mol_type = other DNA
tatccagatgaaatactcaccttcgaagataggcgttccagaattcacgttataggtagagtattctggtcatcg

SEQ ID NO: 15218 - DNA, 75 bp, synthetic construct
  source 1..75: mol_type = other DNA
gaaactaatacgcattgagatacagatggctgagggatttatcgatggttgccttagtatgctcgatatacgttt

SEQ ID NO: 15219 - DNA, 75 bp, synthetic construct
  source 1..75: mol_type = other DNA
acttaatcagccggacaaaagcggcactggcgaagaacccgaaaaaccgcctgcttgctgtggtgtggatgcagg

SEQ ID NO: 15220 - DNA, 75 bp, synthetic construct
  source 1..75: mol_type = other DNA
tgctggcggtcaatgagaagaaattcaaattcgatccgcttttcctgcgtatctttttccgcgaaacctatccct

SEQ ID NO: 15221 - DNA, 75 bp, synthetic construct
  source 1..75: mol_type = other DNA
gatatccgcttacagatacgcgatgatgcactggtactcaacgacaacggcggacggagcattcactttgagccg

SEQ ID NO: 15222 - DNA, 75 bp, synthetic construct
  source 1..75: mol_type = other DNA
caaccgagatggttaacttttatcaagattcagatattatttgtttcccatcgaaactagaaacgtggggattac

SEQ ID NO: 15223 - DNA, 75 bp, synthetic construct
  source 1..75: mol_type = other DNA
atgaaaacctggatctttatatgtatggccgtagcaatattgctatggtttctgagtacgttaaggcgtaagccc

SEQ ID NO: 15224 - DNA, 75 bp, synthetic construct
  source 1..75: mol_type = other DNA
atggcactgactgacgcaaaaatccgggcagcaaagcctactgacaaggcttataaactcactgacggggctggc

SEQ ID NO: 15225 - DNA, 75 bp, synthetic construct
  source 1..75: mol_type = other DNA
ccgctccggtaacgggcagtgatgaaatcgatattggtcgcctggtcggcaccgtcattgaagcgcgctggtggg

SEQ ID NO: 15226 - DNA, 75 bp, synthetic construct
  source 1..75: mol_type = other DNA
aaacgccaactgcgttttatataaaagttcacgacacagataatgtggcaattattgttaatgataatggcctga

SEQ ID NO: 15227 - DNA, 75 bp, synthetic construct
  source 1..75: mol_type = other DNA
gttccttcaaagccgtcagggagaagctggatacccgtcgcggctctcattccgagctggagacagcggtaaaag

SEQ ID NO: 15228 - DNA, 75 bp, synthetic construct
  source 1..75: mol_type = other DNA
ttcagtgatactgccggacggcaggacggtgcggtatggctataacagccagttgcaactgacttcagtgacata

SEQ ID NO: 15229 - DNA, 75 bp, synthetic construct
  source 1..75: mol_type = other DNA
ctgtgcacttttatgaacaactaaaacgcgaaaatccaccagcatccggcaaccagattaatgggttaactatgc

SEQ ID NO: 15230 - DNA, 75 bp, synthetic construct
  source 1..75: mol_type = other DNA
catgaacagtaagcaatggcccggtaaagccgctattggtcgtctgaaagatgatgaactggcgcaatataattt

SEQ ID NO: 15231 - DNA, 75 bp, synthetic construct
  source 1..75: mol_type = other DNA
actcagcaaaaagtgaagatagctatgcctatgataacgaaactttgcatgtacggttacgcacattaagaggag

SEQ ID NO: 15232 - DNA, 75 bp, synthetic construct
  source 1..75: mol_type = other DNA
gcttcagtcgtctggaaaatgaaattgctgaactgaataaaaaactgtcgacgctgatgccttctgaagatgaaa

SEQ ID NO: 15233 - DNA, 75 bp, synthetic construct
  source 1..75: mol_type = other DNA
gcttgccctcctgagtttgatacaaagctcaactttgagctttgctataaaaacaatgagttacagaatggtaag

SEQ ID NO: 15234 - DNA, 75 bp, synthetic construct
  source 1..75: mol_type = other DNA
atgcagaatgcagaaaatgtcagcgaatatctgtcattacgtcatcaggggctgcagcaaagcattcagtcacta

SEQ ID NO: 15235 - DNA, 75 bp, synthetic construct
  source 1..75: mol_type = other DNA
tttaaattcatgggaatatgtgccagaccatcgcggtgaagttgtctatagtaccgaaacgggagataccaaaga

SEQ ID NO: 15236 - DNA, 75 bp, synthetic construct
  source 1..75: mol_type = other DNA
tattcctgttcacgatactattgccagagttgtatcctgtatcagtcctgcaaaatttcatgagtgctttattaa

SEQ ID NO: 15237 - DNA, 75 bp, synthetic construct
  source 1..75: mol_type = other DNA
cttctacactagggcggcagcttgtaggtatcgcaagtcgagtgagctctgcggggggaactggattttctgtag

SEQ ID NO: 15238 - DNA, 75 bp, synthetic construct
  source 1..75: mol_type = other DNA
agcggtgcaggaagaaatggctaacgaatttcgtgatctgcttgttgagaaattcaaagacagcaaagtagaaac

SEQ ID NO: 15239 - DNA, 75 bp, synthetic construct
  source 1..75: mol_type = other DNA
atgcaaaatagcctgatgcgctacgcttatcaggccttgtattatccctccagtgcagagaaaatcggccagttt

SEQ ID NO: 15240 - DNA, 75 bp, synthetic construct
  source 1..75: mol_type = other DNA
accgactcggtctgacccgcgaattactcgatctactcgtgctaagaggcattgatttacgcggtattgagattg

SEQ ID NO: 15241 - DNA, 75 bp, synthetic construct
  source 1..75: mol_type = other DNA
cccgtcgccattgtagataacaagagacttggccatgtgttggatgttgcccgtcaggtccagagaaaacgggac

SEQ ID NO: 15242 - DNA, 75 bp, synthetic construct
  source 1..75: mol_type = other DNA
acaagcctggaaagtggtgcataaattgtcagatattctactgttgactatttgtgccgttatttctggtgcaga

SEQ ID NO: 15243 - DNA, 75 bp, synthetic construct
  source 1..75: mol_type = other DNA
gctcaggcggggcagcctccgggctggccggtattcttcgaggccggtattcctacccccgtctgggctatcgcc

SEQ ID NO: 15244 - DNA, 75 bp, synthetic construct
  source 1..75: mol_type = other DNA
agaaaatgaaatgctgcgcaagcggggcacggatgtttccggtcaggtcagtgaggcagtggcaggattgcagaa

SEQ ID NO: 15245 - DNA, 75 bp, synthetic construct
  source 1..75: mol_type = other DNA
ccagcagtacattattccgtccagcctgggctggcgtaacggcgataacgcctggtttgacttcatcagcaatat

SEQ ID NO: 15246 - DNA, 75 bp, synthetic construct
  source 1..75: mol_type = other DNA
ggaaaagccctgtccggcgggatgaatgaaaccgcggaatgggtgaagcagcgatacgggcagacgtttgatgcc

SEQ ID NO: 15247 - DNA, 75 bp, synthetic construct
  source 1..75: mol_type = other DNA
tcgcgggcgctactttgctgacgggcaagtcgcctttttggggcgcaacgatacccaagtgaaggtgaatggtta

SEQ ID NO: 15248 - DNA, 75 bp, synthetic construct
  source 1..75: mol_type = other DNA
caccgaatataggtggtcaggaattacaggctgttgctcaaatgaaggccctgaagaaaatggggcattcagttc

SEQ ID NO: 15249 - DNA, 75 bp, synthetic construct
  source 1..75: mol_type = other DNA
ttccgtgaatgcccgactgaaacaggcgtcgcagtcatccgatgaattttcgtcatcacagaaagtgctgatgga

SEQ ID NO: 15250 - DNA, 75 bp, synthetic construct
  source 1..75: mol_type = other DNA
gactgaccagcgcttccgtcaggactttggggatgatgtttataagtataagggcggtgataaaaacgatactgt

SEQ ID NO: 15251 - DNA, 75 bp, synthetic construct
  source 1..75: mol_type = other DNA
atgcagcgttcctggtttaataaccggcttacatcagctaagcaaaagtcattgctctataaatcattggctgat

SEQ ID NO: 15252 - DNA, 75 bp, synthetic construct
  source 1..75: mol_type = other DNA
aattagctgcattgagggcagaaaatgcccgtctggtctcattacttgaagctcatgggattgaatggcgacgta

SEQ ID NO: 15253 - DNA, 75 bp, synthetic construct
  source 1..75: mol_type = other DNA
gatacggtttcatcctctgcaaccaaagttgaaaacgcctttatggcctgggttggtggtgcgaacgaggcaagc

SEQ ID NO: 15254 - DNA, 75 bp, synthetic construct
  source 1..75: mol_type = other DNA
cggcatggtcgtcacgctggaagcgccgtctgccgtttcggttggcctgtgcctcgtgcatgtcgcctgcgacaa

SEQ ID NO: 15255 - DNA, 75 bp, synthetic construct
  source 1..75: mol_type = other DNA
atggatgaagaaagggtgttttcactcagctatgaacaactgacccggtttgcggaaaaacgcatccgggaatgc

SEQ ID NO: 15256 - DNA, 75 bp, synthetic construct
  source 1..75: mol_type = other DNA
gaaatgcagttagctcatgtggataaaaacgccatcaggggtacctataatcatgcccagtatctcgatggtcgc

SEQ ID NO: 15257 - DNA, 75 bp, synthetic construct
  source 1..75: mol_type = other DNA
tacgaaagcggtcaggtaaccgaagcggcttgtatggcccatgcccggagaaaaatccacgatgtgcatgcaaga

SEQ ID NO: 15258 - DNA, 75 bp, synthetic construct
  source 1..75: mol_type = other DNA
cattttatttaggtacgcccagtggtaattttaaagcaatagataaccacgggaaggaaataacaaacagaaaag

SEQ ID NO: 15259 - DNA, 75 bp, synthetic construct
  source 1..75: mol_type = other DNA
tgcgacacagctcgactgtcaggcaggcgtcaaaaaagagattgaacgactggagcgggagctgaaaccgaagcc

SEQ ID NO: 15260 - DNA, 75 bp, synthetic construct
  source 1..75: mol_type = other DNA
ctgctcaagctggcccgcgagggtgggcagatgacgcccaaagacctcggtaagttcgagccgcagcgccgctac

SEQ ID NO: 15261 - DNA, 75 bp, synthetic construct
  source 1..75: mol_type = other DNA
aatttctcaaaccgaaaaccattgtgttaggcggtgacgtccgcctcaccagcgaaaccttaaaactggcgctgg

SEQ ID NO: 15262 - DNA, 75 bp, synthetic construct
  source 1..75: mol_type = other DNA
aatattacaagataaaaatattcatttttatcttacttttgatggtactgaaaataagtatgcaaaaagaatata

SEQ ID NO: 15263 - DNA, 75 bp, synthetic construct
  source 1..75: mol_type = other DNA
ctcagggtgacagcggttcagcactgttcgtctatgataaccaaaagaaaaagtgggttgtcgctggaactgtct

SEQ ID NO: 15264 - DNA, 75 bp, synthetic construct
  source 1..75: mol_type = other DNA
cgtacagcgccgggtgaaaggtatggtgacctggtttgaactgggggagaacgacaaaaaccagatgctgtacag

SEQ ID NO: 15265 - DNA, 75 bp, synthetic construct
  source 1..75: mol_type = other DNA
cgctatccgatgaaagtgatgcggatggagggcgatccggagcgtaatccgtttggtcttgtgctggactgctac

SEQ ID NO: 15266 - DNA, 75 bp, synthetic construct
  source 1..75: mol_type = other DNA
ttttgtggggcaggctaataatacaaccattaacggtggcagacagtcaattcatgacgggggtatttccacagg

SEQ ID NO: 15267 - DNA, 75 bp, synthetic construct
  source 1..75: mol_type = other DNA
gccaggggggcggcgaattgcccctggtaccaggcaaggactggaataatcagcagaatatctatcaccgttggt

SEQ ID NO: 15268 - DNA, 75 bp, synthetic construct
  source 1..75: mol_type = other DNA
ttgcatgctggtaaaaatattaccggtgatggttttggcttccgccagaatattgtgcgtggaaactcacaagga

SEQ ID NO: 15269 - DNA, 75 bp, synthetic construct
  source 1..75: mol_type = other DNA
tctgtggtgggagatatacactccactaaaagtgcatccatcatgtttggtcatgatgaaagcgacctctcgcag

SEQ ID NO: 15270 - DNA, 75 bp, synthetic construct
  source 1..75: mol_type = other DNA
atgttcaggatatgagcgcactgaatcacccgaatgcagacctgagcaaagggcagtatggctgtgtcggacagg

SEQ ID NO: 15271 - DNA, 75 bp, synthetic construct
  source 1..75: mol_type = other DNA
ataaagataggtgaaggaaatgttattcttaatgaagaaggaacatttaacaatatataccttgcaagcggaaat

SEQ ID NO: 15272 - DNA, 75 bp, synthetic construct
  source 1..75: mol_type = other DNA
tctcaactcgaaacggcagtgaaagatctgggcgcagtggtgtccttcaaggggtattacggcgatctggccatt

SEQ ID NO: 15273 - DNA, 75 bp, synthetic construct
  source 1..75: mol_type = other DNA
ttgctcagggaggcaacacgaattgaccagacaagcgccattttcgaacgggcaagaccaatgttaaaaagcctt

SEQ ID NO: 15274 - DNA, 75 bp, synthetic construct
  source 1..75: mol_type = other DNA
caacaaatgaccagaataccgatctacaacgtaatgcgttgaactgtgcaggatgcgagctgatttttgaagaca

SEQ ID NO: 15275 - DNA, 75 bp, synthetic construct
  source 1..75: mol_type = other DNA
accatccccgccacccgcgaggccatcgacaaagttcggttttcggggcgtggcgcaaaaatgcgtactccgcat

SEQ ID NO: 15276 - DNA, 75 bp, synthetic construct
  source 1..75: mol_type = other DNA
atgatcgaccaccgtgcggccatgaacacgctggaagacatcaacgaacgctttggcctcaatgcgcaggatagg

SEQ ID NO: 15277 - DNA, 75 bp, synthetic construct
  source 1..75: mol_type = other DNA
gatatccgcttacagctacgtgatgacggactgatactcaacgacaacggcgggcggagcattcactttgagccg

SEQ ID NO: 15278 - DNA, 75 bp, synthetic construct
  source 1..75: mol_type = other DNA
gacgaattggtggacgtcgtcccaaacttacaccagaacaatgggaacaggccggacgattaattgcatcaggag

SEQ ID NO: 15279 - DNA, 75 bp, synthetic construct
  source 1..75: mol_type = other DNA
atcccggtcctgggcaaccccgtgttgcaggctatctttacctggatgagtaagattggctcgtttgcttttagt

SEQ ID NO: 15280 - DNA, 75 bp, synthetic construct
  source 1..75: mol_type = other DNA
attttagtcggaaaaccggctgtatcacggcgtacttcgcatccggataaaacggcagcgttatttaaacgtgca

SEQ ID NO: 15281 - DNA, 75 bp, synthetic construct
  source 1..75: mol_type = other DNA
cgacgcgctgaccgtttacccctacacccccgaggaaattgtcgtcggcggtgaatattacccggcctcggccat

SEQ ID NO: 15282 - DNA, 75 bp, synthetic construct
  source 1..75: mol_type = other DNA
cgcgaagacccgtacttcaaatccagttacgacaacgtggactacagccagatcccggcaggattcagggggtga

SEQ ID NO: 15283 - DNA, 75 bp, synthetic construct
  source 1..75: mol_type = other DNA
tcctgtatctcaatcgtcacggttaccgtgggttatgtcgctataacaagagcgggcatttcaacattccctacg

SEQ ID NO: 15284 - DNA, 75 bp, synthetic construct
  source 1..75: mol_type = other DNA
ggaaatcgacctgttgaaccacatctaccggaaggacggcaaggacattgtgcctgaccgcattcgttccgcgct

SEQ ID NO: 15285 - DNA, 75 bp, synthetic construct
  source 1..75: mol_type = other DNA
gggctttagcggaaatggagcgcgaattaatagttgaacgaacactggccggacttgaggcagcacgtgcacagg

SEQ ID NO: 15286 - DNA, 75 bp, synthetic construct
  source 1..75: mol_type = other DNA
tgtaaattacttcacgccggacagaacctgcaggagtcggatttaccaaactgtgttgcatatccttatttttat

SEQ ID NO: 15287 - DNA, 75 bp, synthetic construct
  source 1..75: mol_type = other DNA
tcgatgaagatttccaaatggaacagcaggccaatgctgaattcatcgccgcagccaatccggctaccgtcttgg

SEQ ID NO: 15288 - DNA, 75 bp, synthetic construct
  source 1..75: mol_type = other DNA
aatctgacgaagggaactcagtttaccctcctgatttagctaaggctatctttgaactcgatattcctgatcgaa

SEQ ID NO: 15289 - DNA, 75 bp, synthetic construct
  source 1..75: mol_type = other DNA
gctggccgagaaagcagcccgggaagcagagctggcggcaaaaaaagcgcaggccagacaggcgctgtccattta

SEQ ID NO: 15290 - DNA, 75 bp, synthetic construct
  source 1..75: mol_type = other DNA
ccgtacgtcgggcgtgggtgatgttcagttgttcggttcacagtacgcgatgcgtatctggatgaacccgaatga

SEQ ID NO: 15291 - DNA, 75 bp, synthetic construct
  source 1..75: mol_type = other DNA
atgaaccgtgttctgtgcgtggttatcattgtcctgctggtggcctgtggtgcgcttagtctggggctgaatcat

SEQ ID NO: 15292 - DNA, 75 bp, synthetic construct
  source 1..75: mol_type = other DNA
gctcggctttctgattgaggtgcgcgagtggtggcaactcgacgaggagccaggcacattccgcctcgttgttgg

SEQ ID NO: 15293 - DNA, 75 bp, synthetic construct
  source 1..75: mol_type = other DNA
ctgaacgcactgctgatggctgtatggcggcgtaatcccgaaaaacaggtgctggttcattcggatcagggcagt

SEQ ID NO: 15294 - DNA, 75 bp, synthetic construct
  source 1..75: mol_type = other DNA
tgacggctcccaccattaccagcggcggtaatcctccggcattttccctgacaccggacgggcggctgacggcga

SEQ ID NO: 15295 - DNA, 75 bp, synthetic construct
  source 1..75: mol_type = other DNA
aatgctgttccgatgaaatcgcaaacatcattctggaagccgtgaaacgttacaccagtacggagcctgctcatg

SEQ ID NO: 15296 - DNA, 75 bp, synthetic construct
  source 1..75: mol_type = other DNA
ggggtagccgtcaatgcgcagggggccatcgtcatcgacaagggcatgcgcaccagtagcccgaacatctacgcg

SEQ ID NO: 15297 - DNA, 75 bp, synthetic construct
  source 1..75: mol_type = other DNA
atggtgaggtacttcgggttccttgccaaccgggtgtgtggagagaagctgccgcaggtgtaccgtgctctgggg

SEQ ID NO: 15298 - DNA, 75 bp, synthetic construct
  source 1..75: mol_type = other DNA
cagcgtcgtgaagaggtgaacatcaatgtgcaccgggagcgcggggaggatgttgagccgggagatgatttctga

SEQ ID NO: 15299 - DNA, 75 bp, synthetic construct
  source 1..75: mol_type = other DNA
atgaataaaaaatatgaactggttgttaaggggataaataattacggggataaggttactgttactgtgaagtcg

SEQ ID NO: 15300 - DNA, 75 bp, synthetic construct
  source 1..75: mol_type = other DNA
acccccgaggagattgtcgtcggcggtgaatattacccggcctcggccatccatttgattgataacctgagagtg

SEQ ID NO: 15301 - DNA, 75 bp, synthetic construct
  source 1..75: mol_type = other DNA
tatatgatccaattagttatattcatcctcaacgagtaagcttgaataatacacctattaacaatccggtgctta

SEQ ID NO: 15302 - DNA, 75 bp, synthetic construct
  source 1..75: mol_type = other DNA
gcagggccctgaaagaatggcataagctcggtcatacagtccgtgagcagttcaaaaagaaactgtcagaacgcc

SEQ ID NO: 15303 - DNA, 75 bp, synthetic construct
  source 1..75: mol_type = other DNA
agctcaccaccgccgcacgctactgccagctcatcatgaaggagcacaaagaagggaaagatttcaaagagattg

SEQ ID NO: 15304 - DNA, 75 bp, synthetic construct
  source 1..75: mol_type = other DNA
gtccggtggccatcacgccttataccctgatgcaggccattgcggcggaaggtgatgtcaccacaccagtggcgg

SEQ ID NO: 15305 - DNA, 75 bp, synthetic construct
  source 1..75: mol_type = other DNA
tgctgacaatccagcattggcgcgaaacatacggaccgggtagcaacgttgtgcttccagcagaagaagcggaag

SEQ ID NO: 15306 - DNA, 75 bp, synthetic construct
  source 1..75: mol_type = other DNA
gcaattcgatgacattcgcgtaattcgcggcgtgaaagtgcctggcggtagagtggggataaaaatcaccgaact

SEQ ID NO: 15307 - DNA, 75 bp, synthetic construct
  source 1..75: mol_type = other DNA
atgcaggtcagccagtggaccggacagaacggggaaacgcggcagggttatcaggttattgcagacagcgtaatc

SEQ ID NO: 15308 - DNA, 75 bp, synthetic construct
  source 1..75: mol_type = other DNA
aaacggcaacgccgccgcgctctccggcgatatcagcgcacgtaacggtacgttctctggcgcaatttcaggaaa

SEQ ID NO: 15309 - DNA, 75 bp, synthetic construct
  source 1..75: mol_type = other DNA
tgtgacacgctccccttactgcatggtgaatctggggggctttaatatcaatattggtaatgtgggtagcggcag

SEQ ID NO: 15310 - DNA, 75 bp, synthetic construct
  source 1..75: mol_type = other DNA
gaccacgctcgactacgaaaactatcatatctttgttggcacctaccccaacgaccccgatactcagcgtgatgt

SEQ ID NO: 15311 - DNA, 75 bp, synthetic construct
  source 1..75: mol_type = other DNA
gcgagaaagttgcaaccgttcacagctggaagaaacgcgacaagtggggtgactatgggccgctggatcagatgc

SEQ ID NO: 15312 - DNA, 75 bp, synthetic construct
  source 1..75: mol_type = other DNA
acgaaggtaacgcggtacagatggtgattgagcaggaagtctcgaaggtggaaggacagaccagcctcgacgtgg

SEQ ID NO: 15313 - DNA, 75 bp, synthetic construct
  source 1..75: mol_type = other DNA
ttattttccgggatagcccgtgacactctcatttacgcaggtggtgaccagtcggtacacggaagggccctgaat

SEQ ID NO: 15314 - DNA, 75 bp, synthetic construct
  source 1..75: mol_type = other DNA
gacagcgttgcccccatcagccgtgtcgaaatgagtctggaagcgcggctgacccagctcatcatcaaaccgcag

SEQ ID NO: 15315 - DNA, 75 bp, synthetic construct
  source 1..75: mol_type = other DNA
ccgccacatgacagggctgaatatcattcaggaaattccgggggatattttcgcagcggcggcaacttatgacgg

SEQ ID NO: 15316 - DNA, 75 bp, synthetic construct
  source 1..75: mol_type = other DNA
cactggcaacgatgtcggggtttcgccataaaaccgttgatgtgcctgaatgggagggagcaacggttgtgttac

SEQ ID NO: 15317 - DNA, 75 bp, synthetic construct
  source 1..75: mol_type = other DNA
acaggctggtatggaatcacatgacgggcgctttcgtggttgcctccgaactggcccgcgcacggggtaaacgtg

SEQ ID NO: 15318 - DNA, 75 bp, synthetic construct
  source 1..75: mol_type = other DNA
aggttgctcaaagagcaaacagaatgctcaatgttctgactgaacaagtacagttgcaaaaggatgagctacacg

SEQ ID NO: 15319 - DNA, 75 bp, synthetic construct
  source 1..75: mol_type = other DNA
cccctgtaattctcggttttgttatcgtgccattattggtatggccgacggttattgtcttagccgtacttatat

SEQ ID NO: 15320 - DNA, 75 bp, synthetic construct
  source 1..75: mol_type = other DNA
aatcagaaagttgttcgcgtatcttatacatggaagctggcagatgtcccttcatgggtggacaaaagcgcgttc

SEQ ID NO: 15321 - DNA, 75 bp, synthetic construct
  source 1..75: mol_type = other DNA
gtgccgcactgtatctgacgggatgtggcgaaaaaggtgactttgagaaagcgatcaacgcgaagattggtcaat

SEQ ID NO: 15322 - DNA, 75 bp, synthetic construct
  source 1..75: mol_type = other DNA
caacgatgtcacattcccaatccagctctctaaaccgcgcttcgatgaaacaggcactggaacagggtctgtgat

SEQ ID NO: 15323 - DNA, 75 bp, synthetic construct
  source 1..75: mol_type = other DNA
ataccggaaaggtaaccctgttccggccagagagaggcaaagggcttctctggctcgcagaagcaacactcataa

SEQ ID NO: 15324 - DNA, 75 bp, synthetic construct
  source 1..75: mol_type = other DNA
tcgctgatgagcagtccgaacttgttaagaagatggtgtttgatacgctgaaggatttgtacaaaaaacccacct

SEQ ID NO: 15325 - DNA, 75 bp, synthetic construct
  source 1..75: mol_type = other DNA
ttatgctggcgggtgtactgctcgcgagctttaatgcctctgcgatcccggggttctggcagcagggttacggtc

SEQ ID NO: 15326 - DNA, 75 bp, synthetic construct
  source 1..75: mol_type = other DNA
acggacagggtgtggtggctgaccagcgcttatgcccagtggtcaccggaccgtcttcatggtgtggaacaactg

SEQ ID NO: 15327 - DNA, 75 bp, synthetic construct
  source 1..75: mol_type = other DNA
aaagtgtttccttcgctggtattacctgaagcccgcggtgatttcattcgtatctgggatgacgggcgaggtgca

SEQ ID NO: 15328 - DNA, 75 bp, synthetic construct
  source 1..75: mol_type = other DNA
atttcagaaacagcagtgcattcacgccatggatatctgctggtctgggttatgcacgggttcatcataaaactt

SEQ ID NO: 15329 - DNA, 75 bp, synthetic construct
  source 1..75: mol_type = other DNA
gcattttccgttgaccgctgggatcgcaactggccggaagagacaaagcgacaggtgattcgtgatgcatggctg

SEQ ID NO: 15330 - DNA, 75 bp, synthetic construct
  source 1..75: mol_type = other DNA
acatgcaggggatgcgcaaggcagatatcatcaggcgtctggaaaatgaactgggggaaacggcagggaatgtgt

SEQ ID NO: 15331 - DNA, 75 bp, synthetic construct
  source 1..75: mol_type = other DNA
cactatattgcgaagcaaaaaatgacaaagtaagaaaacgcctgggaattaaaggtggtttttactggactacag

SEQ ID NO: 15332 - DNA, 75 bp, synthetic construct
  source 1..75: mol_type = other DNA
aggttcggcattacccgttggtgtgcctgttccgtggccttccgccactccgccaacaggctggctgaaatgcaa

SEQ ID NO: 15333 - DNA, 75 bp, synthetic construct
  source 1..75: mol_type = other DNA
tggtgatgaatttttcgaaacacagagccgcaatgtaaccgactggatgccgctaccagaaccgccgcaggaggt

SEQ ID NO: 15334 - DNA, 75 bp, synthetic construct
  source 1..75: mol_type = other DNA
aatgcagcactcatcgaccagaaaaagattcgtgagcagcttgctgcgtatgagagcagtctggcggacagtaat

SEQ ID NO: 15335 - DNA, 75 bp, synthetic construct
  source 1..75: mol_type = other DNA
ggggaaacacatctcgattttttgaagcaatatggtgattttgataatggtattcctgttcacgataccattgcc

SEQ ID NO: 15336 - DNA, 75 bp, synthetic construct
  source 1..75: mol_type = other DNA
cttgatagcgaagctttattgcttctaacgagaacacgttcaaaacaaaaggcgacattttcacagcaaaatatt

SEQ ID NO: 15337 - DNA, 75 bp, synthetic construct
  source 1..75: mol_type = other DNA
cattccaggaaatggcagcgaatatagttcgttcccaactggcgactcttgacctgagtaccgtagaaaaagaaa

SEQ ID NO: 15338 - DNA, 75 bp, synthetic construct
  source 1..75: mol_type = other DNA
ccgcagtagcaaatgatattgttaaggcacttggtggcaattttacccgccatgatggctggtttgaaagtgata

SEQ ID NO: 15339 - DNA, 75 bp, synthetic construct
  source 1..75: mol_type = other DNA
caaatgtcgaaaactatataccactccgccagcgccgatagcgttagaggccattgaaaacgcaattgaatacat

SEQ ID NO: 15340 - DNA, 75 bp, synthetic construct
  source 1..75: mol_type = other DNA
accagtcacgacacacttatgcgtgctggtcattatctgccggagcaaacccaagcttcattgccagccagatgg

SEQ ID NO: 15341 - DNA, 75 bp, synthetic construct
  source 1..75: mol_type = other DNA
ttgagcagaaaaataacgagctgctgagacagtatcaggccggagaaattgaagaagccctgtggaaacaggaga

SEQ ID NO: 15342 - DNA, 75 bp, synthetic construct
  source 1..75: mol_type = other DNA
atgataaccattcccattacgcttcgtatgttgatagcaaagtatctctgtctgttgaagcccttttggctgcgt

SEQ ID NO: 15343 - DNA, 75 bp, synthetic construct
  source 1..75: mol_type = other DNA
aaataatgatggtagtgagataatgaagtttgttatgaataatcctgaaggggagcgagcggatttatctaaggt

SEQ ID NO: 15344 - DNA, 75 bp, synthetic construct
  source 1..75: mol_type = other DNA
taagctcatcgattcagacttctgcgttttcgccctcagcaaactggcgatggcattgtccagtacgcttgattc

SEQ ID NO: 15345 - DNA, 75 bp, synthetic construct
  source 1..75: mol_type = other DNA
tccagtaatagatctcttcaacaacgaagttatttcttacagcctttcggaaagaccagtgatgaacatggttga

SEQ ID NO: 15346 - DNA, 75 bp, synthetic construct
  source 1..75: mol_type = other DNA
cagatgtcactgaatttaaagtgaatggcaagaagctgtatttgtcgcccatcatggatctttataatggagaaa

SEQ ID NO: 15347 - DNA, 75 bp, synthetic construct
  source 1..75: mol_type = other DNA
ttgaccgcctgcgggttaccttcggggtgcagtcactggtggagaccacctcaaagggtgaccgtaacccggcat

SEQ ID NO: 15348 - DNA, 75 bp, synthetic construct
  source 1..75: mol_type = other DNA
aagcgaagcagggcgattacctggtgggtacagatgaaaacgtgctggtacttaatcgcacctatgccaaccgga

SEQ ID NO: 15349 - DNA, 75 bp, synthetic construct
  source 1..75: mol_type = other DNA
tcgtcatctgtctgttatttctgccgttgaagtctgcgcttgccctgaactgctactttggttcatccggtggct

SEQ ID NO: 15350 - DNA, 75 bp, synthetic construct
  source 1..75: mol_type = other DNA
aagccgtgttgtccctggtgaaagacggcgcgactgatggtgttcagatcgacccgacgctgttttcacagtacg

SEQ ID NO: 15351 - DNA, 75 bp, synthetic construct
  source 1..75: mol_type = other DNA
ccgctgctcggtgcaaaggtgctgcccggcgaaaccgatttcgcgctacccggcccgttaccgttcattctttcc

SEQ ID NO: 15352 - DNA, 75 bp, synthetic construct
  source 1..75: mol_type = other DNA
tatattgccacccgcgccgcgtacaaactcaacctgcacggcccggcgttatcggtacagaccgcctgctccagc

SEQ ID NO: 15353 - DNA, 75 bp, synthetic construct
  source 1..75: mol_type = other DNA
tttatcgcgttattctgaaacagcccattactaacgatcaggccgcgatgctgcgtcagacgctcgctgcatttg

SEQ ID NO: 15354 - DNA, 75 bp, synthetic construct
  source 1..75: mol_type = other DNA
acctgctgctggcgcagggctggccggaagagacggatgttgaccagcgtaacccgaagtatccgggctggatca

SEQ ID NO: 15355 - DNA, 75 bp, synthetic construct
  source 1..75: mol_type = other DNA
acaatcgacgattgctggaaaggctgggccatactcctccggcagaagcagaaaaagcttattatgcttccatcg

SEQ ID NO: 15356 - DNA, 75 bp, synthetic construct
  source 1..75: mol_type = other DNA
tcacgctttccctcggtctggccgtcatgccgatggtcgaggcagcaccaaccgctcagcaacagttgctggagc

SEQ ID NO: 15357 - DNA, 75 bp, synthetic construct
  source 1..75: mol_type = other DNA
taccctatgttgccggtattggagcggggattgaggatactgatggccagcccctgagcaacatactgctgctgg

SEQ ID NO: 15358 - DNA, 75 bp, synthetic construct
  source 1..75: mol_type = other DNA
ttactatggacgatgtgaaaggttggtttaatagtgcagctatgaatcttgctaacttccagcatccagaattaa

SEQ ID NO: 15359 - DNA, 75 bp, synthetic construct
  source 1..75: mol_type = other DNA
gtgcactgctgaaacagtatggtatccgcctgacggctaatcaggcatatcaccagatggtgaagctggggatcg

SEQ ID NO: 15360 - DNA, 75 bp, synthetic construct
  source 1..75: mol_type = other DNA
tgtcaatatttcccgggtggtagccctgtatctgagaaaacatggcatcccggggcggccgggaacacatatcag

SEQ ID NO: 15361 - DNA, 75 bp, synthetic construct
  source 1..75: mol_type = other DNA
tctgcaacgtgtggcacaggagatttcggggatacttgtgcgtgtgccgttgacattacagcgtaaatatccgga

SEQ ID NO: 15362 - DNA, 75 bp, synthetic construct
  source 1..75: mol_type = other DNA
tggtctgtatgacgatgccggaacactgattgcggtatccaacatggcagaaagctataagccagaactggctga

SEQ ID NO: 15363 - DNA, 75 bp, synthetic construct
  source 1..75: mol_type = other DNA
ccacgttgagccgaccatccgcgatattccgtcgctgctggcgctggctccgtggtatggcaaaaagcaccggga

SEQ ID NO: 15364 - DNA, 75 bp, synthetic construct
  source 1..75: mol_type = other DNA
ataaaacggattcgacagccctgttgtcctgtattgaacaggccagggaggatatccgtaccctgcgccaactgc

SEQ ID NO: 15365 - DNA, 75 bp, synthetic construct
  source 1..75: mol_type = other DNA
caggccttatctgaagacctgtctgacccgtgagatgctggcgcgttacggggtcaggattgaggaatatccggc

SEQ ID NO: 15366 - DNA, 75 bp, synthetic construct
  source 1..75: mol_type = other DNA
ttggacgcaaagggaaaccgacgcgtccggtcaaacaaaaggtaagccgtcgtcgttacgaagatgacgatgatt

SEQ ID NO: 15367 - DNA, 75 bp, synthetic construct
  source 1..75: mol_type = other DNA
cagagatgcgtgctcgagttgaaaatttcaacaaactttttgaagaactacttaaagctcgcaaaagaagcgcaa

SEQ ID NO: 15368 - DNA, 75 bp, synthetic construct
  source 1..75: mol_type = other DNA
taattcggtcaatgaaagcggagaccggatcgtacgtgcactggctgcgggtatgggcgtggcccgtaaagacct

SEQ ID NO: 15369 - DNA, 75 bp, synthetic construct
  source 1..75: mol_type = other DNA
gttattgaggataagggctttctggaagtcgcgtcccgcacgcggcagcaactcagcaacatcatgcgctatgcc

SEQ ID NO: 15370 - DNA, 75 bp, synthetic construct
  source 1..75: mol_type = other DNA
caccgcttttaccaagatatcgaggccatccgcgccctgaaaaaactgcctgccctcaccggcgacagctggacg

SEQ ID NO: 15371 - DNA, 75 bp, synthetic construct
  source 1..75: mol_type = other DNA
agtctgattcaactgaaattgcaggccgggcggaagctgacgcaggcagaaaccacccgacttaacgctgtgctg

SEQ ID NO: 15372 - DNA, 75 bp, synthetic construct
  source 1..75: mol_type = other DNA
aaccctgtgtatttacctgattcctttaaagttgactataaaagattcttggtgtcgccaggtgatttggtcatg

SEQ ID NO: 15373 - DNA, 75 bp, synthetic construct
  source 1..75: mol_type = other DNA
aactggtacgtcagcgtgtccgggtgtttaaagccagtccgtcaggaaaaatgacggccaggatccgcgttaacc

SEQ ID NO: 15374 - DNA, 75 bp, synthetic construct
  source 1..75: mol_type = other DNA
aggcatatcgtatgcatcaggtgttaatactgcctcgctttgcacggcttacctttgcccttggcttagcaactg

SEQ ID NO: 15375 - DNA, 75 bp, synthetic construct
  source 1..75: mol_type = other DNA
aaccggcgtgaggtgctgcatacagagggcggggccgggctgaaacgggtggtgaaaaaagaactggcggacggc

SEQ ID NO: 15376 - DNA, 75 bp, synthetic construct
  source 1..75: mol_type = other DNA
gtgaaagagtattgtctgaaagtgaactggaggctttacgtcatgtcggaagagttagtcagagtgaacagcttg

SEQ ID NO: 15377 - DNA, 75 bp, synthetic construct
  source 1..75: mol_type = other DNA
ttccaccgcgaggccgcaggcgagctggctggcgaaatcaccggggtgacggacggcgcgggccgccgttttcac

SEQ ID NO: 15378 - DNA, 75 bp, synthetic construct
  source 1..75: mol_type = other DNA
cgccaagtagaaaggttttacttacccttgatgaggaaacgaataaattattacttggagccagagagcgtagtg

SEQ ID NO: 15379 - DNA, 75 bp, synthetic construct
  source 1..75: mol_type = other DNA
gatgggccagcaacagcagggatagatgatttgggtgaaattttagctaagatgaaacagagaacatcgagagga

SEQ ID NO: 15380 - DNA, 75 bp, synthetic construct
  source 1..75: mol_type = other DNA
ttccggaaatgattgtcagcaaagatgaatgccattttaatctaatagaacaatatttttgcatattagccacac

SEQ ID NO: 15381 - DNA, 75 bp, synthetic construct
  source 1..75: mol_type = other DNA
ccacgctgtttttaattttgattctctgcgggatcttgcagattggcagtaacggcatgtctttttgggcatttc

SEQ ID NO: 15382 - DNA, 75 bp, synthetic construct
  source 1..75: mol_type = other DNA
gatgtcggtattcgtattgaaaatctcggcggcggagttgcaaatattccttttcagaacggtatccttcccgtt

SEQ ID NO: 15383 - DNA, 75 bp, synthetic construct
  source 1..75: mol_type = other DNA
caaagatattgtgttcacaaatgggggaaatgtcctgtttaaggataatttggattttggtagcggtggtattat

SEQ ID NO: 15384 - DNA, 75 bp, synthetic construct
  source 1..75: mol_type = other DNA
tgtgtgcagaggaaggggtaactcaggcagagttgatagaaaggcttatcgagaaagaggcctgtcaccggaata

SEQ ID NO: 15385 - DNA, 75 bp, synthetic construct
  source 1..75: mol_type = other DNA
acgccaaaatccatggacaggctaaagcagccagtgactttggtgtaatccagtgcgctatcagcaaggccattc

SEQ ID NO: 15386 - DNA, 75 bp, synthetic construct
  source 1..75: mol_type = other DNA
gtcgctcgcaactgattgcgcttcctgtaccgggtggaaaagcgaaggtggagtattgctatgcagtgaatgtac

SEQ ID NO: 15387 - DNA, 75 bp, synthetic construct
  source 1..75: mol_type = other DNA
gcactgggcaatttatcgtttcggcgcttgaaggtgagatcaaacgccgccagcgccgaaaggccaaagagcagg

SEQ ID NO: 15388 - DNA, 75 bp, synthetic construct
  source 1..75: mol_type = other DNA
tgaatccggtattcacacgggggatgccctggttcggcgcagaaagcgaccacgggaaaaggggagacctgcccg

SEQ ID NO: 15389 - DNA, 75 bp, synthetic construct
  source 1..75: mol_type = other DNA
atgcacgacccggcatacccggagagcctgcccgctgcgccactggtgcggtacacatatacggaagccggtgaa

SEQ ID NO: 15390 - DNA, 75 bp, synthetic construct
  source 1..75: mol_type = other DNA
atttacaggatcatttaatttagcaagggcagcaacaagactattatggcgatacgctatgctaatggagatagc

SEQ ID NO: 15391 - DNA, 75 bp, synthetic construct
  source 1..75: mol_type = other DNA
cgaacgcttcggtatttcggtggctgagttacgcaaactcaaccagtttcgtacgtttgctcgaggttttgataa

SEQ ID NO: 15392 - DNA, 75 bp, synthetic construct
  source 1..75: mol_type = other DNA
atgcacgcaaaagaagaaggtatcatcagagcactgaaagaaatttcaaagacagaaaacgaagtagcgaaaaaa

SEQ ID NO: 15393 - DNA, 75 bp, synthetic construct
  source 1..75: mol_type = other DNA
agattgctggtggtattcgtccgctagggcgtgcaataggggcttggccgtctcaaatacacaaatgggcaaatg

SEQ ID NO: 15394 - DNA, 75 bp, synthetic construct
  source 1..75: mol_type = other DNA
aattaaccccgccgccgggtaatagcagtgacaacctcgagcaacagatagccagtacttcacagcaaatcgggt

SEQ ID NO: 15395 - DNA, 75 bp, synthetic construct
  source 1..75: mol_type = other DNA
cggatttacccaaaggtcaggcgactcacgttatgcgtcacacgttcgccacgcatttcatgatgaacggcggaa

SEQ ID NO: 15396 - DNA, 75 bp, synthetic construct
  source 1..75: mol_type = other DNA
cactgtattacgaagcaaaaaatgacaaagtaagaaaacgtctcggtattaaaggcggtttctactgggctgaag

SEQ ID NO: 15397 - DNA, 75 bp, synthetic construct
  source 1..75: mol_type = other DNA
tctaaatcctgcaagggtgtgcttcgcggtttacattatcaactggaaccgtatgcgcagggaaaactggtgcgc

SEQ ID NO: 15398 - DNA, 75 bp, synthetic construct
  source 1..75: mol_type = other DNA
acgcaggcgcagcgggcagaagaagcccggcagcaggccatttccggcgggacggaaccgtccgcttttcctgat

SEQ ID NO: 15399 - DNA, 75 bp, synthetic construct
  source 1..75: mol_type = other DNA
catcaacaaaaaccagtctgcgctgtcgacttctatcgagcgcctctcttctggtctgcgcattaacagcgctaa

SEQ ID NO: 15400 - DNA, 75 bp, synthetic construct
  source 1..75: mol_type = other DNA
atccgctgcctgcgggggcatcgggtaaggttcagtggaaggtgataacggattacggcgggaccagtaagcagt

SEQ ID NO: 15401 - DNA, 75 bp, synthetic construct
  source 1..75: mol_type = other DNA
gctgctgtactttcagggataccgtgtagcccgcattgctgaaatgctgggcgagaaagttgcaaccgttcacag

SEQ ID NO: 15402 - DNA, 75 bp, synthetic construct
  source 1..75: mol_type = other DNA
tcaaaaaactgaccgagcagtacaacgtgacctatatcggcattgactcgacaggcgtcggtcacggggtttatg

SEQ ID NO: 15403 - DNA, 75 bp, synthetic construct
  source 1..75: mol_type = other DNA
ataccggccagctttcgcctgcgcagttgctgcatctggtggatcgcggtgaatatgtgatgcatcagtggctgt

SEQ ID NO: 15404 - DNA, 75 bp, synthetic construct
  source 1..75: mol_type = other DNA
aacgttaaaaacgccctggtactcaaggcctacgacattatcagtcaccgccgcctggaatttgacgccggacac

SEQ ID NO: 15405 - DNA, 75 bp, synthetic construct
  source 1..75: mol_type = other DNA
cagatgtacttatttttgagccaaaagtttttggtgacgatcgtggttttttctttgagagtttcagccagaaag

SEQ ID NO: 15406 - DNA, 75 bp, synthetic construct
  source 1..75: mol_type = other DNA
gctcaggactgcgcttataaatttattgtctgcgaggataaacccggcataccccgccctgccctcgattcctgg

SEQ ID NO: 15407 - DNA, 75 bp, synthetic construct
  source 1..75: mol_type = other DNA
aacgcggtaaaaacccggtgtgcatcgtttttgattattcccgcacactcacgcagaaggaattccccgtcgggc

SEQ ID NO: 15408 - DNA, 75 bp, synthetic construct
  source 1..75: mol_type = other DNA
cctgttaaaaaacaaaaacggaagaaaacagtaactgacgatgttaacccctggctgacttccggaggatggtta

SEQ ID NO: 15409 - DNA, 75 bp, synthetic construct
  source 1..75: mol_type = other DNA
agcaatacagtaataatcacagcgcccccaagatccggtggtgctatttaccaaacagttcctcctgaatcgcgt

SEQ ID NO: 15410 - DNA, 75 bp, synthetic construct
  source 1..75: mol_type = other DNA
cctgaaaggctataacgtcgaagccaccgctctggaagctgccggtggtaaagtggttacaacgggtaaagatat

SEQ ID NO: 15411 - DNA, 75 bp, synthetic construct
  source 1..75: mol_type = other DNA
gtgaccaaggactacacctttaaacgacccggctgggcagggcgttttgatcaggaaggccagtaccaggattac

SEQ ID NO: 15412 - DNA, 75 bp, synthetic construct
  source 1..75: mol_type = other DNA
tcggcggtcaaacgcctgatgaactgctacggcggttcactcaatcagtatggctcctacagcaccgcgcaaatt

SEQ ID NO: 15413 - DNA, 75 bp, synthetic construct
  source 1..75: mol_type = other DNA
gcgcagcacagttcgcagccgctaagcgcgctctggcaggtgctgccggaagatgttcgcctgagtccgcatgtg

SEQ ID NO: 15414 - DNA, 75 bp, synthetic construct
  source 1..75: mol_type = other DNA
tacctggcgacaaacagccttcaggggccgtggtggatactcagctggccggagcgggtgccgggggcggacgag

SEQ ID NO: 15415 - DNA, 75 bp, synthetic construct
  source 1..75: mol_type = other DNA
ccgccacgtaaaactattggaaagaaatcctgtggatggttattaagtgatctattgtggtggattagtcagtat

SEQ ID NO: 15416 - DNA, 75 bp, synthetic construct
  source 1..75: mol_type = other DNA
atcgtactgacgagcgtacgcagattaacaacggcttaggttggcgtcatttcactcccacatggatgtcgggca

SEQ ID NO: 15417 - DNA, 75 bp, synthetic construct
  source 1..75: mol_type = other DNA
cctgccgttcgccagccgctggtggaagacaaaacattgctgccgtttttcagtaacgcacgggtgattcgtgct

SEQ ID NO: 15418 - DNA, 75 bp, synthetic construct
  source 1..75: mol_type = other DNA
tacccagatgaaatactcacctttgaagatagacgagccagaattcatgttataggtagggtattctggtcatcg

SEQ ID NO: 15419 - DNA, 75 bp, synthetic construct
  source 1..75: mol_type = other DNA
gcatacggatacagtggcatttgaagagaagtatggctcccaactggagctgatatttcgttttatcgatcgcgc

SEQ ID NO: 15420 - DNA, 75 bp, synthetic construct
  source 1..75: mol_type = other DNA
cctcgggagttcccgttctggaagctgtgccggtgaaacagagtggtacaacgttagcggcagctgaatttaacg

SEQ ID NO: 15421 - DNA, 75 bp, synthetic construct
  source 1..75: mol_type = other DNA
acaatgtgattaaccaggtcattgatgatatggcgcggggtcatatcccttccccacttccatcgcaaagtgcgc

SEQ ID NO: 15422 - DNA, 75 bp, synthetic construct
  source 1..75: mol_type = other DNA
cttgtctggtcgcctcatcttttgaagcagacgcagatgatgccgatgacgccgctgaactggctgacgatgcgg

SEQ ID NO: 15423 - DNA, 75 bp, synthetic construct
  source 1..75: mol_type = other DNA
tacggcaaaagcgttcgcatacctgctgaaacagtgggaggccctgaacgtgtactgcagtaatggctgggtgga

SEQ ID NO: 15424 - DNA, 75 bp, synthetic construct
  source 1..75: mol_type = other DNA
cagttaatgacgccgctgaatgatgccctgtaccgttatgtgatgaatacccgcaagcttcacactgacgacaca

SEQ ID NO: 15425 - DNA, 75 bp, synthetic construct
  source 1..75: mol_type = other DNA
cgttctgaaaaactgcgtcgtgaagttgaacaggctgaagccctgctgaaacgacgcgaacagaacagcgatcgt

SEQ ID NO: 15426 - DNA, 75 bp, synthetic construct
  source 1..75: mol_type = other DNA
aacgccattgccctgggaaatgccactaaagctactgagattatgagtattgctcttggcgacaccgccaatgcg

SEQ ID NO: 15427 - DNA, 75 bp, synthetic construct
  source 1..75: mol_type = other DNA
atgaaaatcgtttctcagaacacaactactctttcttcagccacagcaccagggaataaccagccccaactggtt

SEQ ID NO: 15428 - DNA, 75 bp, synthetic construct
  source 1..75: mol_type = other DNA
ggaatgccatgtggggcgtcaaaattgagcagaccgaagacggcaggcattatgtcgcggggcttggcctcagca

SEQ ID NO: 15429 - DNA, 75 bp, synthetic construct
  source 1..75: mol_type = other DNA
cgttccgtggtgtgccgttcctcgtctggcgtgagcagcgcgaacgtggcgggcgaaacattgtccgtcgggaat

SEQ ID NO: 15430 - DNA, 75 bp, synthetic construct
  source 1..75: mol_type = other DNA
ccggtgctggacagtgaggggaataccaatatctccggcgtcacggtggtgttccgggcaggtgagcaggagcag

SEQ ID NO: 15431 - DNA, 75 bp, synthetic construct
  source 1..75: mol_type = other DNA
gtggcaccgagcgtcagccgaaggacttctcgaagctggcgtccaacaagtacgaatgcgaccagattaacttcg

SEQ ID NO: 15432 - DNA, 75 bp, synthetic construct
  source 1..75: mol_type = other DNA
ggttaatgaaaagtacacgcgctgggttaagacgcagccgtgtgcatgttgtggaaagcctgctgatgatcccca

SEQ ID NO: 15433 - DNA, 75 bp, synthetic construct
  source 1..75: mol_type = other DNA
cgtgcttccgcaggtcgtatcaccgctgttatcccctactttggctatgcgcgccaggaccgtcgcgtccgttcc

SEQ ID NO: 15434 - DNA, 75 bp, synthetic construct
  source 1..75: mol_type = other DNA
atccggaaatcgtggatattgcctgcggtcgctcctctgccccgatgccgcagcgagtaacagaagaaggaaaac

SEQ ID NO: 15435 - DNA, 75 bp, synthetic construct
  source 1..75: mol_type = other DNA
ccgtaattttagaggcgcaggatgtgttgataacctacaaaggaaagctaccgggaagaattacttgttctctga

SEQ ID NO: 15436 - DNA, 75 bp, synthetic construct
  source 1..75: mol_type = other DNA
ggtacagaaaacaaaaaatggcataccctatgttgccggtattggagcggggattgaggatactgatggccagcc

SEQ ID NO: 15437 - DNA, 75 bp, synthetic construct
  source 1..75: mol_type = other DNA
ggctatccgaattagtgatttcaggttgtatcgtgagatcagtgatggaaaaagcattacgtacatgatcgccgg

SEQ ID NO: 15438 - DNA, 75 bp, synthetic construct
  source 1..75: mol_type = other DNA
cgatgccggaggaactctgattccatcaccaacgctacatacacgagggagtattggtaacacaggtgggagcga

SEQ ID NO: 15439 - DNA, 75 bp, synthetic construct
  source 1..75: mol_type = other DNA
catacgctgcagcaccgcacatatcacggaaacagacaacgcctggttgtactcgctgtcacaccagaccagtga

SEQ ID NO: 15440 - DNA, 75 bp, synthetic construct
  source 1..75: mol_type = other DNA
cgaagccactgagcaagccactgcagcagcgaggtctgcttctgcagcaaaaacctctgaaacaaatgcaaagac

SEQ ID NO: 15441 - DNA, 75 bp, synthetic construct
  source 1..75: mol_type = other DNA
tggcttatgcaacatcgtattattctccccggagccactacgctgacccggttgatttcagaggtaagggaaaag

SEQ ID NO: 15442 - DNA, 75 bp, synthetic construct
  source 1..75: mol_type = other DNA
agcgggaaaaaattaaatggcaggtggtggaactcgtgcgccagagcggccgtgagacgttacggcaactggaag

SEQ ID NO: 15443 - DNA, 75 bp, synthetic construct
  source 1..75: mol_type = other DNA
cagatacgtccgttcgcacaatctccctgctgccggcagccggagaggctgctgcgcagggctggagcattaagg

SEQ ID NO: 15444 - DNA, 75 bp, synthetic construct
  source 1..75: mol_type = other DNA
gggacaggtaaaagtgctttatttattcagctaaatgagcattggaagaaagacaaaaaaatattaatcctgagt

SEQ ID NO: 15445 - DNA, 75 bp, synthetic construct
  source 1..75: mol_type = other DNA
ggggtgggcaagccgttatatcaggatctgatttcccgcacaaaagcggcattgcagaaaaatcccaaaaacgtt

SEQ ID NO: 15446 - DNA, 75 bp, synthetic construct
  source 1..75: mol_type = other DNA
atgtcgattaaacattatgatgttgtcagggcggcgtcgccgtcagaccttgcggaaaagctgacacacaaactg

SEQ ID NO: 15447 - DNA, 75 bp, synthetic construct
  source 1..75: mol_type = other DNA
gacagaacagctaaacccggcaggcttaagctacacgtatcagtatgagaaagaccgcatcaccatcaccgacag

SEQ ID NO: 15448 - DNA, 75 bp, synthetic construct
  source 1..75: mol_type = other DNA
agagggcaccgttaatgttttgggtggcacctggcgattgtatgatagcggaaataatgcaaggcctttaaatgt

SEQ ID NO: 15449 - DNA, 75 bp, synthetic construct
  source 1..75: mol_type = other DNA
aaagctgcacgttatcagcaagcgttacactcagcgcattgagcgacataacctgaatctgagacaacatctggc

SEQ ID NO: 15450 - DNA, 75 bp, synthetic construct
  source 1..75: mol_type = other DNA
ccatccgccgtcgcctgatgggaacgcgtggactggtgattgtggatgaggcggatcatcttggtattgacggtc

SEQ ID NO: 15451 - DNA, 75 bp, synthetic construct
  source 1..75: mol_type = other DNA
gcccggaatgtggcggcgagctggattatctgggggaagtcagtactgagcaactggaactggtgagcagcgccc

SEQ ID NO: 15452 - DNA, 75 bp, synthetic construct
  source 1..75: mol_type = other DNA
accacgaaagcgtcagaagctgccacctcagcccgggatgcgtcggcttcaaaagaggcggcaaaatcatcagaa

SEQ ID NO: 15453 - DNA, 75 bp, synthetic construct
  source 1..75: mol_type = other DNA
atcggcattgatatttcagactctgtaaccagtagcagaagtgatgttgctgcaagttcgctggcagttaaaaaa

SEQ ID NO: 15454 - DNA, 75 bp, synthetic construct
  source 1..75: mol_type = other DNA
gagagggaaaaattacgaaaacagaatgaggggtgtcacgacgagtcacgcatatgtcacgacatgtcacgacga

SEQ ID NO: 15455 - DNA, 75 bp, synthetic construct
  source 1..75: mol_type = other DNA
aggcatgcgggatttaatcaagtcccagccggtatatgagatccagtattacggcaaaaccttccggatgaacgc

SEQ ID NO: 15456 - DNA, 75 bp, synthetic construct
  source 1..75: mol_type = other DNA
gtcgtcggccggtgcgaacaactggacgccgacaacgtacatcagtgatttactggttgtggtcatgaaaaaatc

SEQ ID NO: 15457 - DNA, 75 bp, synthetic construct
  source 1..75: mol_type = other DNA
ttttataacagtaagcgtcggcatggttccagcgatcagatgtcaccgacagaatatgaaaaccagtattatcaa

SEQ ID NO: 15458 - DNA, 75 bp, synthetic construct
  source 1..75: mol_type = other DNA
cgcactggaactgcctgaccttgtggcgctggccggtaaggtggtcggttttttgtcgccgaactcggtgcagtg

SEQ ID NO: 15459 - DNA, 75 bp, synthetic construct
  source 1..75: mol_type = other DNA
atgcaatattttggtgattctgaaaagataaagtatgcatgctccgtgataaatcatattgattttagccgcgat

SEQ ID NO: 15460 - DNA, 75 bp, synthetic construct
  source 1..75: mol_type = other DNA
ttggtcgaatcaggtttgtggtctcgtgatgctgttgaacgtcagatgagccacatggagcgaaattcagtgagg

SEQ ID NO: 15461 - DNA, 75 bp, synthetic construct
  source 1..75: mol_type = other DNA
gggaggatgcaaaatcgggggcatgtactaatggtctttgcggcacactatccgctatgataggtccagataaat

SEQ ID NO: 15462 - DNA, 75 bp, synthetic construct
  source 1..75: mol_type = other DNA
gaatctgttacgcattatgtacattggtgcgccgttggcgaaagacagagaaacccttttcttcactagcgtacg

SEQ ID NO: 15463 - DNA, 75 bp, synthetic construct
  source 1..75: mol_type = other DNA
cagttataaaggtcagcctgtcacccggcttgccgttatgctgaatttactggtttttattcgttccagtgaact

SEQ ID NO: 15464 - DNA, 75 bp, synthetic construct
  source 1..75: mol_type = other DNA
ctggtggtggatggttttcatcgccaggtgctgggcagggaagcaggtacgggaaaacgtctgaagggctggctg

SEQ ID NO: 15465 - DNA, 75 bp, synthetic construct
  source 1..75: mol_type = other DNA
agcttccattatcccgccagggcgaacaacatccggcatatgcttcagagcatgaaaacctgcgtggtccgggct

SEQ ID NO: 15466 - DNA, 75 bp, synthetic construct
  source 1..75: mol_type = other DNA
gctgaaaaataacggtataaaggcagtaatcccccgaaagtcaaatgagaaaatggcatcggatggacgtgcaca

SEQ ID NO: 15467 - DNA, 75 bp, synthetic construct
  source 1..75: mol_type = other DNA
ctgaaccagtcactctcttcgcttttttccctcgatctctctctggtcagccagcagtttctctcccttgaattt

SEQ ID NO: 15468 - DNA, 75 bp, synthetic construct
  source 1..75: mol_type = other DNA
actccgttgcagcacaaaactggggaaactctacatacaaacaggtagactggtacacttcacaaccagattttg

SEQ ID NO: 15469 - DNA, 75 bp, synthetic construct
  source 1..75: mol_type = other DNA
ttggtttatattgatgatgtttgtgctaaagcgatagagcttctctcgggggcaactgaaagcggatataaagct

SEQ ID NO: 15470 - DNA, 75 bp, synthetic construct
  source 1..75: mol_type = other DNA
gtgagtttgtcacttcattacaggcattgaaagagatcggaataaaagctggcttttctgctttttcagaagaat

SEQ ID NO: 15471 - DNA, 75 bp, synthetic construct
  source 1..75: mol_type = other DNA
ataaaaaatggtgagctggttgaagtgcttatcggggatgagcccgtgctcaccggatatgtggaggcactaccg

SEQ ID NO: 15472 - DNA, 75 bp, synthetic construct
  source 1..75: mol_type = other DNA
cgcgacgacacccgcaatgcggtcatcaaacacggcgcggatatgggcattgcctttgatggcgattttgaccgc

SEQ ID NO: 15473 - DNA, 75 bp, synthetic construct
  source 1..75: mol_type = other DNA
taagtggatgtttatccagcataagtgccaaagtcagggcgataattcagacagatatatcagcaagctggacgc

SEQ ID NO: 15474 - DNA, 75 bp, synthetic construct
  source 1..75: mol_type = other DNA
gtacagggcaatttatcgtttcggcacttgaaggcgagatcaaacgccgccagcgccgcaaggccaaagaatcag

SEQ ID NO: 15475 - DNA, 75 bp, synthetic construct
  source 1..75: mol_type = other DNA
ccgtggaagatatgaaagtcctgttcgaccagatcccgctggataaaatgtcggtttcgatgaccatgaatggcg

SEQ ID NO: 15476 - DNA, 75 bp, synthetic construct
  source 1..75: mol_type = other DNA
gtcgtccggcgctgccgcccgcgtggtccttcggcctgtggctaaccacttcatttaccaccaactacgacgaag

SEQ ID NO: 15477 - DNA, 75 bp, synthetic construct
  source 1..75: mol_type = other DNA
aaaggtgaaaaggacagccgtatgctgatgtccgttggcctgaatgcagaaatcagggataacgtccgctttgga

SEQ ID NO: 15478 - DNA, 75 bp, synthetic construct
  source 1..75: mol_type = other DNA
aatcacaatcactgacagctcggatcccgcatgatgttattgaaggcatggaatccgtaaaactggacggtgaaa

SEQ ID NO: 15479 - DNA, 75 bp, synthetic construct
  source 1..75: mol_type = other DNA
atgtgggtaaatccttctctggtaaggactggaaagtgacagcccgtgccggtctgggctaccagttcgacctgc

SEQ ID NO: 15480 - DNA, 75 bp, synthetic construct
  source 1..75: mol_type = other DNA
gattcgatcatcaacggcagcgacagcaaagtggcattggcagcgcttcccgccgttgaggtaaacccgcccgcc

SEQ ID NO: 15481 - DNA, 75 bp, synthetic construct
  source 1..75: mol_type = other DNA
atgccatttgctcgttatttctgcattttcataaacgttggtttgggagaaggttcggcattacccgttggcgtg

SEQ ID NO: 15482 - DNA, 75 bp, synthetic construct
  source 1..75: mol_type = other DNA
taactgggaccgttataacccgtcaaaccaggacagttcatgctggatccgtgtggcacaggcgtgggcaggcac

SEQ ID NO: 15483 - DNA, 75 bp, synthetic construct
  source 1..75: mol_type = other DNA
gtgaaagtcatcattgttgaagacgaattcctggcacaacaggaactgagctggctaattaaagagcacagccag

SEQ ID NO: 15484 - DNA, 75 bp, synthetic construct
  source 1..75: mol_type = other DNA
cttttatgaggagcatgcttacaaaagtaccgaccagagcctggtgctgtgcgacacagtccgccatctgcccga

SEQ ID NO: 15485 - DNA, 75 bp, synthetic construct
  source 1..75: mol_type = other DNA
tcagccaccgggccagacgggctggaaatgcgccgcaaatatgatgagtacggacgtctgattcaggaaaccgcc

SEQ ID NO: 15486 - DNA, 75 bp, synthetic construct
  source 1..75: mol_type = other DNA
gaaatgaagggaacagcggagcgatttgcagtagcatcaacagggattattaataatggagtattgacagctctg

SEQ ID NO: 15487 - DNA, 75 bp, synthetic construct
  source 1..75: mol_type = other DNA
ctgctgatttaaccgctgagaagttcgccacagcaatccgaaaccactggcacgtggagaataagctgcactggc

SEQ ID NO: 15488 - DNA, 75 bp, synthetic construct
  source 1..75: mol_type = other DNA
aaacgaaatggtcattaccgcgccggacggtgcggaatttcgctataacgcacaggaaagcagcctgacggccag

SEQ ID NO: 15489 - DNA, 75 bp, synthetic construct
  source 1..75: mol_type = other DNA
ctcttgttgctattacttacaaccaaatccctgtaattaccactgagttgttggcgcatctttatggtgcagacg

SEQ ID NO: 15490 - DNA, 75 bp, synthetic construct
  source 1..75: mol_type = other DNA
gccgccaggcagatgtggtgccggggatattcacggtgatccacacatggggacgtgaccagcagtggcatccgc

SEQ ID NO: 15491 - DNA, 75 bp, synthetic construct
  source 1..75: mol_type = other DNA
gtacgccagcatgagcgggataccggaggcggtgatggcgggctcaccaccgctgaacgtcagcgtctgaaagag

SEQ ID NO: 15492 - DNA, 75 bp, synthetic construct
  source 1..75: mol_type = other DNA
ttaactggaactgtggtgccacacaacctgtaccggatgcgcctgtgccgaaagatttaccccccggaatgccgg

SEQ ID NO: 15493 - DNA, 75 bp, synthetic construct
  source 1..75: mol_type = other DNA
acactgaactgaacgccgatgtaccgctgtcggatgatctcaacgtcagcctgaatgccatgacacagcatcgca

SEQ ID NO: 15494 - DNA, 75 bp, synthetic construct
  source 1..75: mol_type = other DNA
tggaggtactgagtgacatgattcgtcagtacttcagccaggaacgatcagaaaaagagactatacaggctctga

SEQ ID NO: 15495 - DNA, 75 bp, synthetic construct
  source 1..75: mol_type = other DNA
cggatgtactgcagcaggcggtgaatgatgcggttgcgaatattccggtaccggcggacggcaaaagtatcaccc

SEQ ID NO: 15496 - DNA, 75 bp, synthetic construct
  source 1..75: mol_type = other DNA
tcgatgtttcgtgtggacccggatctggctggtccactgatggcgatggtcaccaccatgctgggggcaatatga

SEQ ID NO: 15497 - DNA, 75 bp, synthetic construct
  source 1..75: mol_type = other DNA
tctcaggttaatgtgtctgaatctagcttgatttctgatagcatcgctctgaccaatggttcttctttgaacatt

SEQ ID NO: 15498 - DNA, 75 bp, synthetic construct
  source 1..75: mol_type = other DNA
cgcactcgcaggaatcgcagagctaccgcgcaaccatccaaaatggcaggaatgggaaaaacgcgggaaagagct

SEQ ID NO: 15499 - DNA, 75 bp, synthetic construct
  source 1..75: mol_type = other DNA
gggggtgtttggtcccggctggaaagcgcccttcgatatccgcttacagatacgcgatgaaggcctgatactcaa

SEQ ID NO: 15500 - DNA, 75 bp, synthetic construct
  source 1..75: mol_type = other DNA
atgtcgctgtcacggaaaccgcaagtgacctggtacggctgggacggcgaccggctgaccacgatacagaacgac

SEQ ID NO: 15501 - DNA, 75 bp, synthetic construct
  source 1..75: mol_type = other DNA
gccgttatctaccagggaaaaccctattatttcacctggggtaaagccgatatcgccaataaccacccagtcacg

SEQ ID NO: 15502 - DNA, 75 bp, synthetic construct
  source 1..75: mol_type = other DNA
ataatcctgtttaaccctgacacagttgaagcatacgcaaaacgtgcggaaatatcacctaaaccactattctcc

SEQ ID NO: 15503 - DNA, 75 bp, synthetic construct
  source 1..75: mol_type = other DNA
ctgaaacaacacaaaggccatccgcttgcgcggctctggcgggcgttgccggaagcggtccgtctgagtccacac

SEQ ID NO: 15504 - DNA, 75 bp, synthetic construct
  source 1..75: mol_type = other DNA
attatccgggaaggttcaaggatgagcagcacggcaaggatttcacgctgtaccggatggagagcctgcgcagtg

SEQ ID NO: 15505 - DNA, 75 bp, synthetic construct
  source 1..75: mol_type = other DNA
ttaaagagataaataattacccggataagattgctgttactgtggcacttgaaattggcgggcatccgtcgttgt

SEQ ID NO: 15506 - DNA, 75 bp, synthetic construct
  source 1..75: mol_type = other DNA
gccaatgggagaaaccacaaagctgattctggaaatggcccgcagccagctttttaaggccatgatgcggcaaat

SEQ ID NO: 15507 - DNA, 75 bp, synthetic construct
  source 1..75: mol_type = other DNA
gccggagcgaaaagaatttgcagggcgtaaatcctgatctggtgaaagtgacccgacgggcactggaaatctcgg

SEQ ID NO: 15508 - DNA, 75 bp, synthetic construct
  source 1..75: mol_type = other DNA
aaatcccgggggggatgatgctcgtcccgctattccttggcgcactgtgccacaccttctcgccgggggcgggga

SEQ ID NO: 15509 - DNA, 75 bp, synthetic construct
  source 1..75: mol_type = other DNA
gtgcagggccaacttcggttgggccgggttctttggtgaccggtatttccacccctgtacgtctcaccaccaata

SEQ ID NO: 15510 - DNA, 75 bp, synthetic construct
  source 1..75: mol_type = other DNA
ccgtgcgcagcacgacgactggctgaagagagagatacagcgcgtatacgatgaaaatcatcaggtgtacggtgt

SEQ ID NO: 15511 - DNA, 75 bp, synthetic construct
  source 1..75: mol_type = other DNA
ctgtactgctgatgggctggtcggtaaatgcctggtcattcgcctgtaaaaccgccaatggtaccgctatcccta

SEQ ID NO: 15512 - DNA, 75 bp, synthetic construct
  source 1..75: mol_type = other DNA
gactgattaataacaaagaatattcattggtgggcgttcaggacggttcccacggtgtcgtcaacgtgaccgata

SEQ ID NO: 15513 - DNA, 75 bp, synthetic construct
  source 1..75: mol_type = other DNA
ggagatctcagtcaccagccagaccgccggaaccagtgcggtcaccgccagcatcaacaacagcagccagagccg

SEQ ID NO: 15514 - DNA, 75 bp, synthetic construct
  source 1..75: mol_type = other DNA
cacctttgccgatactgctgcgggtggattagcccccgtagaactgactgcccagaccactgcgattgaaagcat

SEQ ID NO: 15515 - DNA, 75 bp, synthetic construct
  source 1..75: mol_type = other DNA
aaattacaatatcattaaagatcttgtagatgacagaatgtttctgttcgactatgcattacataaaaagtcgca

SEQ ID NO: 15516 - DNA, 75 bp, synthetic construct
  source 1..75: mol_type = other DNA
gtacgcgctgatggacgcctctatacaggcgagtatttacagcttgaaaaaacagcaacggctggcgcttcctgc

SEQ ID NO: 15517 - DNA, 75 bp, synthetic construct
  source 1..75: mol_type = other DNA
gccgggtgctgaggacgtactgccagcgccgctgccgccgtaccgggtgcttaccgggctggcagaccgcttcgg

SEQ ID NO: 15518 - DNA, 75 bp, synthetic construct
  source 1..75: mol_type = other DNA
ggaaacgtaaccgtatttaatgctgatgttaatccaacaaatattgatgatttctttaagtctgttctgaatgct

SEQ ID NO: 15519 - DNA, 75 bp, synthetic construct
  source 1..75: mol_type = other DNA
ttccgctctattcgatcacggattggcatcgaagtccgatcagcgattcgcatccattcgatcaaccgggaactt

SEQ ID NO: 15520 - DNA, 75 bp, synthetic construct
  source 1..75: mol_type = other DNA
agtaatgcattcagtcggtatcaatccgtggtgagaaacatgcttcctcgcataggggaaaaacgtcttgcttcg

SEQ ID NO: 15521 - DNA, 75 bp, synthetic construct
  source 1..75: mol_type = other DNA
gtattgctaagggttaaaatacttatcaacttacctgacggtggcttgattcttagaagcttcaacaaagatgag

SEQ ID NO: 15522 - DNA, 75 bp, synthetic construct
  source 1..75: mol_type = other DNA
cggtattccgtctgttccggcccgtacatccggttgttgccgtatcggcccgcaccggctgggaactggatacgc

SEQ ID NO: 15523 - DNA, 75 bp, synthetic construct
  source 1..75: mol_type = other DNA
aaatggaaggcgctgaacatccacacaaggagaatgctggcagcgctcaggaccacgccagcgatagtgaaactg

SEQ ID NO: 15524 - DNA, 75 bp, synthetic construct
  source 1..75: mol_type = other DNA
tatggttctggaaagtcaggacgaatatgactcacaatgggcggcaatttgttccattgccccaaagattggctg

SEQ ID NO: 15525 - DNA, 75 bp, synthetic construct
  source 1..75: mol_type = other DNA
cgtgaacggataaagaaaaagatctacggaacgcgggaagaagcccgcagtgatatttttgattacatcgaaatg

SEQ ID NO: 15526 - DNA, 75 bp, synthetic construct
  source 1..75: mol_type = other DNA
ccgccgcgtgcatgccggcctgaacaaaggtgaggcgcgcaactcgctggccagggcggtgttcttcaaccgcct

SEQ ID NO: 15527 - DNA, 75 bp, synthetic construct
  source 1..75: mol_type = other DNA
ggtatttcagtacaacactggggagacttatacggctgaatgctcttgcagcaaggcttgcaccttattatacag

SEQ ID NO: 15528 - DNA, 75 bp, synthetic construct
  source 1..75: mol_type = other DNA
gaacggtgtggatgcggctaaagcccccgccgtggtgaatatcatttctgtttcgtcatcccggactcactcgtc

SEQ ID NO: 15529 - DNA, 75 bp, synthetic construct
  source 1..75: mol_type = other DNA
tgggatgtgattctaattattgcatcggtaatttctgctatttcggccatgcaactggcgggaggactggactat

SEQ ID NO: 15530 - DNA, 75 bp, synthetic construct
  source 1..75: mol_type = other DNA
atgcattatggcaaagttaaaattttcgatataaaccattccatagtaagtcaatatctggaaattcagcataag

SEQ ID NO: 15531 - DNA, 75 bp, synthetic construct
  source 1..75: mol_type = other DNA
gaccgtgccctgtctgtggatgagtatttctggcgacacatcctgcaccggggacatcagcaggtgctgtttgtg

SEQ ID NO: 15532 - DNA, 75 bp, synthetic construct
  source 1..75: mol_type = other DNA
caaggcatatcaaacctgatgacaaaccattgccccatgggggaattacaggactgactcttcatccttcttcag

SEQ ID NO: 15533 - DNA, 75 bp, synthetic construct
  source 1..75: mol_type = other DNA
gacgtttactatgatggttatgtaggctggaacaactatgccgctgatagctattacaacggcgatatctacccg

SEQ ID NO: 15534 - DNA, 75 bp, synthetic construct
  source 1..75: mol_type = other DNA
aagaaacggcagcaccgttgagtggaatatccggtatgataataaagacaaccttcacaaaattggtgatggcac

SEQ ID NO: 15535 - DNA, 75 bp, synthetic construct
  source 1..75: mol_type = other DNA
cggcaaaatatgccgacattctgctgccagacctgatgaccgttgagcaggaagatattattcctaacgactacg

SEQ ID NO: 15536 - DNA, 75 bp, synthetic construct
  source 1..75: mol_type = other DNA
tatccatgatgcagaatgtattcgtgaaattcacgaagctcccctgcaggctcccggcattctggaaaaatacaa

SEQ ID NO: 15537 - DNA, 75 bp, synthetic construct
  source 1..75: mol_type = other DNA
ttgcgcggctctggcgggcgttgccggaagcggtccgtctgagtccacacacctatatgatggctgtcagcacaa

SEQ ID NO: 15538 - DNA, 75 bp, synthetic construct
  source 1..75: mol_type = other DNA
gtggcttctgtttctatcagctgtccttcctgctccgctactgaaggcgtggtgcgtaacggcaaaagcactgcc

SEQ ID NO: 15539 - DNA, 75 bp, synthetic construct
  source 1..75: mol_type = other DNA
tgcgcgcacgtctgagggtaggcattgcggatactttattgactggcctggcgtctgtcaggggcgggagagcat

SEQ ID NO: 15540 - DNA, 75 bp, synthetic construct
  source 1..75: mol_type = other DNA
aaaaggccttgttcagctcagtagtgcgactaacagcacgtctgaaacgctcgccgcaacgccgaaagcggtaaa

SEQ ID NO: 15541 - DNA, 75 bp, synthetic construct
  source 1..75: mol_type = other DNA
gcgtgaactgaccgttcaggcgaccaccggtaccaactcccagtctgatctggactctatccaggacgaaatcaa

SEQ ID NO: 15542 - DNA, 75 bp, synthetic construct
  source 1..75: mol_type = other DNA
gtgaatagtgacggtaatttcgtcaatgatttgtcgggcagacgtggaatataccaggcaggtattaaagcctca

SEQ ID NO: 15543 - DNA, 75 bp, synthetic construct
  source 1..75: mol_type = other DNA
cagcatattgaagctggcatttcactgtgtgatgcggtgaattttctcgtggaaaaatacgcgctggtgcgtacc

SEQ ID NO: 15544 - DNA, 75 bp, synthetic construct
  source 1..75: mol_type = other DNA
gtgtcgctgttactcaggccggtggtactggtgcagagacacttaatgggattgaagtgattcacgtcagtggca

SEQ ID NO: 15545 - DNA, 75 bp, synthetic construct
  source 1..75: mol_type = other DNA
agcagcagatcaccggttagcagaattaatcaccggaaagttatatgacagtataccaaaagaaatatggaaata

SEQ ID NO: 15546 - DNA, 75 bp, synthetic construct
  source 1..75: mol_type = other DNA
caaaccggttttcttgattccatgattgcggcgtgttcacgtggaattaacgtcacgatagtcactgacagaagc

SEQ ID NO: 15547 - DNA, 75 bp, synthetic construct
  source 1..75: mol_type = other DNA
taaaaaatggtctgagcaggaccgtgatacgtttgatccgacgcatgatattgacctctactgcgatcaggccag

SEQ ID NO: 15548 - DNA, 75 bp, synthetic construct
  source 1..75: mol_type = other DNA
ctgcaaccggcctgtaatgaaatgtaccgcgtgctgaaaaaagatgcgctgatggtcagcttctacggctggaac

SEQ ID NO: 15549 - DNA, 75 bp, synthetic construct
  source 1..75: mol_type = other DNA
gcactggccattgatgtgctgatcccggcaggcacccgcgtcagcgcttccgacagcgttatttttgccaccgat

SEQ ID NO: 15550 - DNA, 75 bp, synthetic construct
  source 1..75: mol_type = other DNA
tgatcatccggggcggcattgagcatattgtcattgagtgtggtgctgatgtggtattgaaaacacagaaagcca

SEQ ID NO: 15551 - DNA, 75 bp, synthetic construct
  source 1..75: mol_type = other DNA
ggattccacgctttcagcgtttaataaaaccctggttctttccggtaatcagtccggactgactgccgatcgcat

SEQ ID NO: 15552 - DNA, 75 bp, synthetic construct
  source 1..75: mol_type = other DNA
cagctgaaatactctgacctggcctctactgccgggtatctttcagccatgatccccccgttgtcatggatgatg

SEQ ID NO: 15553 - DNA, 75 bp, synthetic construct
  source 1..75: mol_type = other DNA
gcgtgagctttttgggttatttgaacacgcgccaacgatattaacctcggtaaagcctgagcagtatttacatta

SEQ ID NO: 15554 - DNA, 75 bp, synthetic construct
  source 1..75: mol_type = other DNA
ccaaaccggagaatcttacctgccaggagtggggactaaagcgcacgatcaccccctgttttggcgctcgtctgg

SEQ ID NO: 15555 - DNA, 75 bp, synthetic construct
  source 1..75: mol_type = other DNA
ttgccggtaccgtgatctcgttttcccgtaccgatgagaagcacacccgggaatacatcacccatctggtacagt

SEQ ID NO: 15556 - DNA, 75 bp, synthetic construct
  source 1..75: mol_type = other DNA
cctccgggataaaaaagccgaacaggaaaaagcgaagaattatagcgctgctgcatcagccgaagagatcagagg

SEQ ID NO: 15557 - DNA, 75 bp, synthetic construct
  source 1..75: mol_type = other DNA
aatgattaaaattacaacagcagagaatagctttgaatgtgcattttctgatattgaagtggttgcttgtataag

SEQ ID NO: 15558 - DNA, 75 bp, synthetic construct
  source 1..75: mol_type = other DNA
cgtgcaacggaagtgaatgccgcgcttcatgcgaaggatttaactgtcactgcaggcgctaaccgtgtaactgca

SEQ ID NO: 15559 - DNA, 75 bp, synthetic construct
  source 1..75: mol_type = other DNA
atgccccacaggcccgtaacgacttccgcgatgcggtgatccagaagctaacgacgcttgggatcgctgcagata

SEQ ID NO: 15560 - DNA, 75 bp, synthetic construct
  source 1..75: mol_type = other DNA
ttcgaacccatttcatgcgctctgaaatagcaaaaacagctagtggtgtaacacgctttaatatttcaaaatcaa

SEQ ID NO: 15561 - DNA, 75 bp, synthetic construct
  source 1..75: mol_type = other DNA
gaaattgctgtttatcaggagaaagttattcgtgaggttaaatcaggtaaaaaagataaatataatcattgggat

SEQ ID NO: 15562 - DNA, 75 bp, synthetic construct
  source 1..75: mol_type = other DNA
gggcagcaacgccttgccgccgtgcagcgggccatgcagcagggggccgcgaatgataactggtttgaaccggag

SEQ ID NO: 15563 - DNA, 75 bp, synthetic construct
  source 1..75: mol_type = other DNA
gttcgtatgccccgtctctgctctgcagagcgcctctctgaaagtatggttgatgaaatatttcagaagggggcg

SEQ ID NO: 15564 - DNA, 75 bp, synthetic construct
  source 1..75: mol_type = other DNA
acgggaatggaatcgcttcctggacacacattaccgccgtggctggaatgtcaacgtatccagggtgatggataa

SEQ ID NO: 15565 - DNA, 75 bp, synthetic construct
  source 1..75: mol_type = other DNA
ggtcatccgcctggggcgttcacctgtacagcgttgtgtgaatcatatttctgaaccagacaccgaaattccgcc

SEQ ID NO: 15566 - DNA, 75 bp, synthetic construct
  source 1..75: mol_type = other DNA
gtttacaaggctgaaaaatcagactccctgccgccacaaaacggcaccatgcaacagcaatacgcagaaaactct

SEQ ID NO: 15567 - DNA, 75 bp, synthetic construct
  source 1..75: mol_type = other DNA
ggagagtggcggtagtgcaaccgtgcgtctgaacactctggactggcttggtggtcagggccgggagcaggcaga

SEQ ID NO: 15568 - DNA, 75 bp, synthetic construct
  source 1..75: mol_type = other DNA
actcgtttacccggtggaagaatcttcgttgaaggtggaaacagagccttcgagtgcaagatagaagatgttgaa

SEQ ID NO: 15569 - DNA, 75 bp, synthetic construct
  source 1..75: mol_type = other DNA
ccgccgaacagctggagttgatgcgtagcgcattccgggttatccggacggtacgggaaaaacatgcctgtactc

SEQ ID NO: 15570 - DNA, 75 bp, synthetic construct
  source 1..75: mol_type = other DNA
cggttggcgaactgcagaagcaccttgagattcctgcctccacgctcagccatcatctttcagcgctgatatccg

SEQ ID NO: 15571 - DNA, 75 bp, synthetic construct
  source 1..75: mol_type = other DNA
aaactacgcgattacccgggtaaacgacagggtcagttcactggtcagtgatactgccaggctggcgcattattc

SEQ ID NO: 15572 - DNA, 75 bp, synthetic construct
  source 1..75: mol_type = other DNA
aaaacgctctcaatggacatgaatgcaggctatataagagcagcgcgtatccacttaccctgtgcggttgagaaa

SEQ ID NO: 15573 - DNA, 75 bp, synthetic construct
  source 1..75: mol_type = other DNA
cgtgaagacccgtacttcaaagccagttacgacaacgtggactacagccagatcccggcaggattcagggggtga

SEQ ID NO: 15574 - DNA, 75 bp, synthetic construct
  source 1..75: mol_type = other DNA
gcggggccatctgtacgcgtgaatgaatggttcagtgcttatgcgatggcaggtgtggcttacagccgtgtttcg

SEQ ID NO: 15575 - DNA, 75 bp, synthetic construct
  source 1..75: mol_type = other DNA
cggctgccacacctgttcagtgacctgtaaaaacgtctggaccagccgtgaaggcgtggaatacgcgtggttcaa

SEQ ID NO: 15576 - DNA, 75 bp, synthetic construct
  source 1..75: mol_type = other DNA
ttatgtaacggtactgaaaaattaagtgaatcagaaaaatcatttatgcgaagagtcggtaatatatctgagtct

SEQ ID NO: 15577 - DNA, 75 bp, synthetic construct
  source 1..75: mol_type = other DNA
cgtatatcccgaataacgcggggatcctgctggtaccatgctgtcgtggtggttcggcattcacccagggcgcgg

SEQ ID NO: 15578 - DNA, 75 bp, synthetic construct
  source 1..75: mol_type = other DNA
atgaaaacattacccgacacgcatgtacgggaggtatcgtgctgcccgtctctcgtcaccatctggcagacactg

SEQ ID NO: 15579 - DNA, 75 bp, synthetic construct
  source 1..75: mol_type = other DNA
caccagttgcgggtggaaaaaatcctgaatcgttcgggcatccagcctctgcacagcaaatgctcgtttgcgaat

SEQ ID NO: 15580 - DNA, 75 bp, synthetic construct
  source 1..75: mol_type = other DNA
ctgatgaaagcggtgtatgagatggcccgcaagggggcacaggatgaactccggctgcagttgcgtgatggcggt

SEQ ID NO: 15581 - DNA, 75 bp, synthetic construct
  source 1..75: mol_type = other DNA
gcagctggtcagatggttactggcgtgatgaccttaagaatgaggtatcactcaacactctgatgctgaatgcat

SEQ ID NO: 15582 - DNA, 75 bp, synthetic construct
  source 1..75: mol_type = other DNA
cgacgtcggggctgatggcgatggcgcgccagttccgtaacgtgacggcagagcagattgcgtatgttgcgcagc

SEQ ID NO: 15583 - DNA, 75 bp, synthetic construct
  source 1..75: mol_type = other DNA
cactccatgggtatctgttggcctaggttatgcacgagtacatcataaggcgacatatactgatacctcctggaa

SEQ ID NO: 15584 - DNA, 75 bp, synthetic construct
  source 1..75: mol_type = other DNA
gcggcaaactttgccacgctgacagaacgggagattgccgaagcggaacaggtaacaaccatcaacgttaaaacc

SEQ ID NO: 15585 - DNA, 75 bp, synthetic construct
  source 1..75: mol_type = other DNA
accggattacgcatctgtggcattaaaatgttcccggtggtcaacatgcttccagcactccttctggcaatgccg

SEQ ID NO: 15586 - DNA, 75 bp, synthetic construct
  source 1..75: mol_type = other DNA
gcggctgcaaactttgccactctgaccgaacgggagattgctgaagcggaggaagtgacaacaatcaatattaag

SEQ ID NO: 15587 - DNA, 75 bp, synthetic construct
  source 1..75: mol_type = other DNA
aaagaatctgcccgcagaaaaaaaagccgaatttctggcaactctaattgcaatgaaattaaaaggtgaaatctg

SEQ ID NO: 15588 - DNA, 75 bp, synthetic construct
  source 1..75: mol_type = other DNA
ggcatcactgcgaaacactcgatgttgaggggtatacctaccgcacggaaacgcagaacggtgatgtgctgatta

SEQ ID NO: 15589 - DNA, 75 bp, synthetic construct
  source 1..75: mol_type = other DNA
gccagtgcgcagaaggcatttgatgaggcggataaaaaatggcagtggtaccagagccggagccagcgccgggga

SEQ ID NO: 15590 - DNA, 75 bp, synthetic construct
  source 1..75: mol_type = other DNA
tgatgagtgaagcagagccacgaggtgcacgctggtatcacccgaaaatggggttgttccaggcgctgggctggc

SEQ ID NO: 15591 - DNA, 75 bp, synthetic construct
  source 1..75: mol_type = other DNA
tcatatccgaaaaattgcaacgcttactattgatgcaaaagccagactacaacctgcgcgtggctacacaattct

SEQ ID NO: 15592 - DNA, 75 bp, synthetic construct
  source 1..75: mol_type = other DNA
atgtcccagccggttggtgatcttgttattgacctgagtctggatgctgtccgtttcgatgagcagatgagccgg

SEQ ID NO: 15593 - DNA, 75 bp, synthetic construct
  source 1..75: mol_type = other DNA
aaacagtaagcaatggcctggtaaagcggcgattggtcgcctgaaaggtgaggaactggcgcaatataatttgtg

SEQ ID NO: 15594 - DNA, 75 bp, synthetic construct
  source 1..75: mol_type = other DNA
ggctcatggataaggggattattcgaagtgcgccaatggcgaatttcgaaataatcaacaacttaggattaaaac

SEQ ID NO: 15595 - DNA, 75 bp, synthetic construct
  source 1..75: mol_type = other DNA
catcgcggcctgccgctggcccttatcagcaaggaagggacaacagaatggtgcgcagaatacgatgaatggggc

SEQ ID NO: 15596 - DNA, 75 bp, synthetic construct
  source 1..75: mol_type = other DNA
ggaccggttatcccggaagggaaggtcgagatcactatcagtaagtacgagaaaacggcgggtgcagccgcctga

SEQ ID NO: 15597 - DNA, 75 bp, synthetic construct
  source 1..75: mol_type = other DNA
caaccaaggaagtctgtggccatggattccgggcgatggcgtgcagtgcattgattgaatccggcttatggtcaa

SEQ ID NO: 15598 - DNA, 75 bp, synthetic construct
  source 1..75: mol_type = other DNA
cggactgcagattgtgctgggggcagcagccatcgtgggctctttcttcaccgccggcgcaacgatggcgttgtg

SEQ ID NO: 15599 - DNA, 75 bp, synthetic construct
  source 1..75: mol_type = other DNA
ttataaactcactgacggggccggcatgttcctgctggttcatcctaatggttcccgttactggcgtctccgtta

SEQ ID NO: 15600 - DNA, 75 bp, synthetic construct
  source 1..75: mol_type = other DNA
tcagggcggcatcgccgtcagaccttgcgaaacgactgacacaaaaactgaaggagggctggcagccgtttggta

SEQ ID NO: 15601 - DNA, 75 bp, synthetic construct
  source 1..75: mol_type = other DNA
tcttaagcttgtagcggccagtgagtgtagtgatgaagagaagggactggctctgcagtgggtttctgaattgac

SEQ ID NO: 15602 - DNA, 75 bp, synthetic construct
  source 1..75: mol_type = other DNA
gtccgatgaccgggtataaaaatttcaaccgtgaggcgttccacaaggcggaagaggaactgaaacgggaagggc

SEQ ID NO: 15603 - DNA, 75 bp, synthetic construct
  source 1..75: mol_type = other DNA
gctgattttctggatcgtggccgtgctggtcctggtcgcgcttggatttccctatgtcgttccatttttctatta

SEQ ID NO: 15604 - DNA, 75 bp, synthetic construct
  source 1..75: mol_type = other DNA
tacatcctctgtggttacgctgttgccaccggattaatgctgttactgtcgcaggcatgatatgtagtggatggc

SEQ ID NO: 15605 - DNA, 75 bp, synthetic construct
  source 1..75: mol_type = other DNA
aatgttgacgagaacaactactggctgcgccgtgaagcagcgggtgatatccggcgcgtgaataaaaaggtgaac

SEQ ID NO: 15606 - DNA, 75 bp, synthetic construct
  source 1..75: mol_type = other DNA
cttctcagggcccaatggccgccctgccagtgaccatcgactatcccgcagcactggccttgcggcagatggcgc

SEQ ID NO: 15607 - DNA, 75 bp, synthetic construct
  source 1..75: mol_type = other DNA
gtggcgctgcccttcgctgctgacgcctgtctggtcgcctcatcttttgaagcagacgccgatgatgccgatgac

SEQ ID NO: 15608 - DNA, 75 bp, synthetic construct
  source 1..75: mol_type = other DNA
ccgacggggtgacgttctcagtaccggtgaccccccatacgttccgtcactcctacgcgatgcacatgctgtatg

SEQ ID NO: 15609 - DNA, 75 bp, synthetic construct
  source 1..75: mol_type = other DNA
tttgactaactcacgcaaggcgcttactgcacttgatgacgatgaaaagggagtaactttaagttacacccttgg

SEQ ID NO: 15610 - DNA, 75 bp, synthetic construct
  source 1..75: mol_type = other DNA
atgaaccatgaagaaatgaatcagcgcttcagtcgtctggaaaatgaaattgctgaactgaataaaaaactgtcg

SEQ ID NO: 15611 - DNA, 75 bp, synthetic construct
  source 1..75: mol_type = other DNA
tggtatcaaagagactcagaagtctacctgtactggcgttgaaatgttccgcaaactgctggacgaaggccgtgc

SEQ ID NO: 15612 - DNA, 75 bp, synthetic construct
  source 1..75: mol_type = other DNA
atgaaacaaatgtcactaattgagatggatggttttctgaaaggtaaatgcatcccaagtgatttaaaggttaac

SEQ ID NO: 15613 - DNA, 75 bp, synthetic construct
  source 1..75: mol_type = other DNA
acgcggtatcatcaaagttggtgaagaagttgaaatcgttggtatcaaagagactcagaagtctacctgtactgg

SEQ ID NO: 15614 - DNA, 75 bp, synthetic construct
  source 1..75: mol_type = other DNA
gcagtgatcgcgttattatcgtcggcagtggcccaagcgccgcaaactttgttgcgccgcgcggagtgccgatta

SEQ ID NO: 15615 - DNA, 75 bp, synthetic construct
  source 1..75: mol_type = other DNA
aagcaagcgatattcagggaaaccctggcactggaaagagctggttatcttcatatccgaaaaattgcaacgctt

SEQ ID NO: 15616 - DNA, 75 bp, synthetic construct
  source 1..75: mol_type = other DNA
gaaagcaacaaatggggtaacagcagccagtttaatttctggagcagtggtccccttgtggatgattctgtcagc

SEQ ID NO: 15617 - DNA, 75 bp, synthetic construct
  source 1..75: mol_type = other DNA
tagtcattccctgtctcggattttcagccagcagcatagctgctgcagaggatgtgatgattgtctcggcatccg

SEQ ID NO: 15618 - DNA, 75 bp, synthetic construct
  source 1..75: mol_type = other DNA
cggtttacccggtcagtgcgctgttatgcgcgatactggcggcgctgacaacgcaatatcaggtgaatacatgcg

SEQ ID NO: 15619 - DNA, 75 bp, synthetic construct
  source 1..75: mol_type = other DNA
gtaacccgattacctatgacggcggcacgctgctggatctgaatcgtcatgagctgatttatcagttcgattttt

SEQ ID NO: 15620 - DNA, 75 bp, synthetic construct
  source 1..75: mol_type = other DNA
gttcagccagcctgtcagccagttactggccgctgcccgtatggatgtgtacgtcattcgtgacggggagggcaa

SEQ ID NO: 15621 - DNA, 75 bp, synthetic construct
  source 1..75: mol_type = other DNA
ttataaactcactgacggggctggcatgttcctgctggttcatcctaatggttcccgttactggcgtctccgtta

SEQ ID NO: 15622 - DNA, 75 bp, synthetic construct
  source 1..75: mol_type = other DNA
gcgcagagggaagctgatattgaaaacgaaaaactccgtaaagagatcgaggatttgagggctgccagcgaatca

SEQ ID NO: 15623 - DNA, 75 bp, synthetic construct
  source 1..75: mol_type = other DNA
tccaagatgcgaacaccacatcttgtgccactcagcaaacaggttgtagccatactggcagaacttcagacatgg

SEQ ID NO: 15624 - DNA, 75 bp, synthetic construct
  source 1..75: mol_type = other DNA
atgtcgcagacagaaaatgcagtgacttcctcatcaggtacaaagcgagcataccgaaaaggtaatcctctgacg

SEQ ID NO: 15625 - DNA, 75 bp, synthetic construct
  source 1..75: mol_type = other DNA
acggtggtgttctgaacggtgttccttctgcatatcactggtatacagaacggtatggcgtgaagtggccttgtg

SEQ ID NO: 15626 - DNA, 75 bp, synthetic construct
  source 1..75: mol_type = other DNA
cgaaagcatatcacgttaatattccaccggaattaattccgtcatttgcgtcacctttttcagagtatagcttat

SEQ ID NO: 15627 - DNA, 75 bp, synthetic construct
  source 1..75: mol_type = other DNA
ctatggaagacaacgatgtgaaagggaaaaccctgaaggcagcagcgattgccgaagccattatcagtaccatcg

SEQ ID NO: 15628 - DNA, 75 bp, synthetic construct
  source 1..75: mol_type = other DNA
acgcgcagtatcagggcgcagaccgcgtgaaagcgctgctgggcctgagcggtatttttgccgatgatctgccgc

SEQ ID NO: 15629 - DNA, 75 bp, synthetic construct
  source 1..75: mol_type = other DNA
tctacaagatctggataatagtacaaaactgtatgggaaaactggtgcaggattcacagcaaatagaaccttaca

SEQ ID NO: 15630 - DNA, 75 bp, synthetic construct
  source 1..75: mol_type = other DNA
ggcaacgccccgtcatggaatatgatgcatcccatctcggcaatatggttaaccgactggaagaagcattacccc

SEQ ID NO: 15631 - DNA, 75 bp, synthetic construct
  source 1..75: mol_type = other DNA
ctgttcagtccactgggaccatttggtgcactgacagggcgtgtggttggcggtgttctggggggaatgattgcc

SEQ ID NO: 15632 - DNA, 75 bp, synthetic construct
  source 1..75: mol_type = other DNA
tttgctaacgacccggattatgaccgtcacggtatcgtcactccggcaggtttgatgaatccgaaccactacctg

SEQ ID NO: 15633 - DNA, 75 bp, synthetic construct
  source 1..75: mol_type = other DNA
attgccagtgcctttaatatgcctctcgatgttctgttctggtgtgccggttcgcagggcagtatgtacccgttc

SEQ ID NO: 15634 - DNA, 75 bp, synthetic construct
  source 1..75: mol_type = other DNA
gtgttaaatgaagaacagaaacaggtggtattcgaacgaattaagtcaggtgtaagtataagtgccattgcccgg

SEQ ID NO: 15635 - DNA, 75 bp, synthetic construct
  source 1..75: mol_type = other DNA
tgcaggccacgcaactgcagtcggcggtggttcgcgccatgtatgccgccacgattgaatccacactggattcgg

SEQ ID NO: 15636 - DNA, 75 bp, synthetic construct
  source 1..75: mol_type = other DNA
ggtggcgctggtttgcataaactgtgccgtgaacagtcgacaatcccggtgatcacaggtggtataggcgtatgc

SEQ ID NO: 15637 - DNA, 75 bp, synthetic construct
  source 1..75: mol_type = other DNA
gtgcttctgcgcccgtcaaaaagaaatcgtttttttctaaattcactcgtctgaatatgcttcgcctggctcgcg

SEQ ID NO: 15638 - DNA, 75 bp, synthetic construct
  source 1..75: mol_type = other DNA
ttcaggacgccctgaaatcctgcggcttaccggcgggtgccgtgcaggcgattgataatcctgaccgtgcgctgg

SEQ ID NO: 15639 - DNA, 75 bp, synthetic construct
  source 1..75: mol_type = other DNA
atcgaaccatcgacagggctggagaagaagggaaacagcaaaggctccatgctgctgatttggcgaccgttcatc

SEQ ID NO: 15640 - DNA, 75 bp, synthetic construct
  source 1..75: mol_type = other DNA
ccggtatcgacatcgacatgcacatcgacgctgccagcggtggcttcctggcaccgttcgtcgccccggatatcg

SEQ ID NO: 15641 - DNA, 75 bp, synthetic construct
  source 1..75: mol_type = other DNA
ctggggcttgatgacagtgcgctggacacagaattttccattggtggtactgaactgctgctgtttaaacagatg

SEQ ID NO: 15642 - DNA, 75 bp, synthetic construct
  source 1..75: mol_type = other DNA
gagttgcgtgagatccctatgcgccccggtcagttgtttatggacccgaaacgcatgattgaagcctgcgacgaa

SEQ ID NO: 15643 - DNA, 75 bp, synthetic construct
  source 1..75: mol_type = other DNA
ggacgacgaaaatgtccacaaattgatggatttatccattaacaaaaactggatcgacaaagaagaatatccgca

SEQ ID NO: 15644 - DNA, 75 bp, synthetic construct
  source 1..75: mol_type = other DNA
caagcgtatggaagctgcaggtaagccgactaacaaaccgaacctggtgtgcggtccggtacaaatctgctggca

SEQ ID NO: 15645 - DNA, 75 bp, synthetic construct
  source 1..75: mol_type = other DNA
gctggattatctggacgcactggagctggtcgatacttccggtgcgccagatattgaatggcctacgcctccggc

SEQ ID NO: 15646 - DNA, 75 bp, synthetic construct
  source 1..75: mol_type = other DNA
aaagcattacgtacatgatcgccgggttaaacaaagaatatggcgatgtggtggagtccgggctgctttttgcgg

SEQ ID NO: 15647 - DNA, 75 bp, synthetic construct
  source 1..75: mol_type = other DNA
acacctgcacttcctgcacctggttcgttaatagcaacatgccgtcctgggggcggcaattattatctcggccgc

SEQ ID NO: 15648 - DNA, 75 bp, synthetic construct
  source 1..75: mol_type = other DNA
cgcatcccgatgacaatcatgaccgtccctggtggggactaccctgcaccgtgacgccctgtttcggcgcccgtc

SEQ ID NO: 15649 - DNA, 75 bp, synthetic construct
  source 1..75: mol_type = other DNA
gattatttcaccctcagagcgcgactgataataatgcaaaaacaacttgaaggggcacagctatacattcgagag

SEQ ID NO: 15650 - DNA, 75 bp, synthetic construct
  source 1..75: mol_type = other DNA
agttattgcgtaacgaaagccccagggcgattgacttcaccatcacccacggtaaggggcgtaagggaatcatta

SEQ ID NO: 15651 - DNA, 75 bp, synthetic construct
  source 1..75: mol_type = other DNA
gtggcaccgtatacgctgtcgcaaggtctggatcgaactctgcagtatgaattcgtccatgccaaaaaagacgac

SEQ ID NO: 15652 - DNA, 75 bp, synthetic construct
  source 1..75: mol_type = other DNA
tctaaaggcagcgctggccgcattcgataacctggacgagaacctgaaaaaccactggctgcttgaatctgcaaa

SEQ ID NO: 15653 - DNA, 75 bp, synthetic construct
  source 1..75: mol_type = other DNA
tgatccgcgaacgcggtgcactggatgacatccgggcgggacgcattgagcgcgccatttcacgctgtcgcaata

SEQ ID NO: 15654 - DNA, 75 bp, synthetic construct
  source 1..75: mol_type = other DNA
tctgaaactggtaagcatatttctcgaagctgaagatgatgcccaaataatttttgaaacattaaatgggcgagg

SEQ ID NO: 15655 - DNA, 75 bp, synthetic construct
  source 1..75: mol_type = other DNA
ggtttcgtctggtctatcaggttattgatgacatgctaattattgcggttgtcgcggtaggtaaacgtgaacgta

SEQ ID NO: 15656 - DNA, 75 bp, synthetic construct
  source 1..75: mol_type = other DNA
tgggacggtcactgttgccggaaaccgaaacgacgctgaccgggttactgtgcgatctggtctggtattttgccg

SEQ ID NO: 15657 - DNA, 75 bp, synthetic construct
  source 1..75: mol_type = other DNA
ccgggatagtaagagcccgcggcgcagggaaacgttttggtcgaccacctgtgttaaatgaagaacagaaacagg

SEQ ID NO: 15658 - DNA, 75 bp, synthetic construct
  source 1..75: mol_type = other DNA
actttaaaggggaagttgttaacgccgcttgcgcagttgatgcaggctctgttgatcaaaccgttcagttaggac

SEQ ID NO: 15659 - DNA, 75 bp, synthetic construct
  source 1..75: mol_type = other DNA
aattacatcgcggtaacttcaccgctatcggtcggcagatccagccttatctggaggagggcaaatgctttcgca

SEQ ID NO: 15660 - DNA, 75 bp, synthetic construct
  source 1..75: mol_type = other DNA
gtatgcgaaggggctgacctgtgaagcagacaccctcggctcctgtggttacgtttatctggctgtttatccgac

SEQ ID NO: 15661 - DNA, 75 bp, synthetic construct
  source 1..75: mol_type = other DNA
agaggccggttcagcgatgcggatgcgtaccatccggaccaggcctttccgctgctgatgaaacaaccggaactc

SEQ ID NO: 15662 - DNA, 75 bp, synthetic construct
  source 1..75: mol_type = other DNA
gactatgcatccactcacaaacctaatcctgcaatgtctccatccggtttaggaggaacaattaagcaaaaaccc

SEQ ID NO: 15663 - DNA, 75 bp, synthetic construct
  source 1..75: mol_type = other DNA
tggatatccgggtaccggaccatctgatagtcggtggcagccaggttttctcctttgcggaacacggtctgcttt

SEQ ID NO: 15664 - DNA, 75 bp, synthetic construct
  source 1..75: mol_type = other DNA
agatgactggaattttgctggggcaggagcttcgtaaacgtaaaactcctcaggaaaaaatcgccattattcagc

SEQ ID NO: 15665 - DNA, 75 bp, synthetic construct
  source 1..75: mol_type = other DNA
gtgctggccacaccgaccgagacggacggggcgctgtttcccggtcgtatcatgctggcgaacacctgtatgtgg

SEQ ID NO: 15666 - DNA, 75 bp, synthetic construct
  source 1..75: mol_type = other DNA
tggcaggggcggcaatatcaggtatacccgattgacggcagcggttttgagatgaacgggaagggcagcagtgcc

SEQ ID NO: 15667 - DNA, 75 bp, synthetic construct
  source 1..75: mol_type = other DNA
aacttcgacaacacgattttgcgccgttcatacgaacggcaggggatcccctgcccgtggcgttactacaacgat

SEQ ID NO: 15668 - DNA, 75 bp, synthetic construct
  source 1..75: mol_type = other DNA
tcgcttcacgaccacgccgatgagctttaccgcagctgcctcgcacgcttcggggatgacggtgaaaacctctga

SEQ ID NO: 15669 - DNA, 75 bp, synthetic construct
  source 1..75: mol_type = other DNA
acctgctgcccgtcgtgcggcttacccgtcagccacgcgttgtgtttcctgtcagtcagtctttgaagcaaaaaa

SEQ ID NO: 15670 - DNA, 75 bp, synthetic construct
  source 1..75: mol_type = other DNA
acaatattaaaaagcgaaagctttatattcgtaacctgaccacaaaaacatgcattactgactgcatgattaaag

SEQ ID NO: 15671 - DNA, 75 bp, synthetic construct
  source 1..75: mol_type = other DNA
gttgataacctacaaaggaaagctaccgggaagaattactggttctctgaagatgccgccgtcaacactgcggtc

SEQ ID NO: 15672 - DNA, 75 bp, synthetic construct
  source 1..75: mol_type = other DNA
cgaaacgtgaccggattgaaaattttgaatccgttaacgaagcctatgtggttgaggactatcgctgcgctgcac

SEQ ID NO: 15673 - DNA, 75 bp, synthetic construct
  source 1..75: mol_type = other DNA
tggatccagaaagctaccttcgccatgtgcttggcgtcatagcagactggccggtcaaccgggtcagcgaactgc

SEQ ID NO: 15674 - DNA, 75 bp, synthetic construct
  source 1..75: mol_type = other DNA
ctaatccgtttggtgatacgacagcagaaaatgataaaaagatgttgagtaatgctttcattgaaactgctgact

SEQ ID NO: 15675 - DNA, 75 bp, synthetic construct
  source 1..75: mol_type = other DNA
aaaatggctgcgttacgttattgagcatatccaggactggccggcaaaccgggtacgcgatctgttgccctggaa

SEQ ID NO: 15676 - DNA, 75 bp, synthetic construct
  source 1..75: mol_type = other DNA
tactcagtgcgatgccatcgtgcaggcacctgcaccttcgcggcccatcgagcggggtatcgccggaccggggct

SEQ ID NO: 15677 - DNA, 75 bp, synthetic construct
  source 1..75: mol_type = other DNA
ttttcctgctgaaacagcgcctggccgaacaggaagcgctgatccacgccctgcaggaaaagctgagcaaccggg

SEQ ID NO: 15678 - DNA, 75 bp, synthetic construct
  source 1..75: mol_type = other DNA
atgcgaaagttcaaaataattattgaaacgggaatggctggtggagatttcgaggatgaattcgaagtggatgct

SEQ ID NO: 15679 - DNA, 75 bp, synthetic construct
  source 1..75: mol_type = other DNA
agcgtgaagaactgaaggcccgaattatcgggctggtacgcaaaaatgaacgcatgacgatatcacaactggaga

SEQ ID NO: 15680 - DNA, 75 bp, synthetic construct
  source 1..75: mol_type = other DNA
tggcgaaataacaatccgcgacatcactcgtttacccggtggaagaattttcgttgaaggtggaaacagagcctt

SEQ ID NO: 15681 - DNA, 75 bp, synthetic construct
  source 1..75: mol_type = other DNA
ctgacagacatcagccatatcagcgaagggcaccgggtgacggtgcactatggttatgacagtaaaggccgcctc

SEQ ID NO: 15682 - DNA, 75 bp, synthetic construct
  source 1..75: mol_type = other DNA
tggcaggggcggaagtaccaggcatacccgattgacggcagtggctttgagatgaacgggaagggcagcagtgcc

SEQ ID NO: 15683 - DNA, 75 bp, synthetic construct
  source 1..75: mol_type = other DNA
tttcgtcagaaactgaatgagggctggtatcaggtgcgcattgccgggcgtgatgcaggcgaaaccgaattatct

SEQ ID NO: 15684 - DNA, 75 bp, synthetic construct
  source 1..75: mol_type = other DNA
atggctcacagtcacgagatggcgcgtgcacaggatcgtattaacgaaatcaaccaacgagttatttcaggtagt

SEQ ID NO: 15685 - DNA, 75 bp, synthetic construct
  source 1..75: mol_type = other DNA
tggcctgatgatcttacagagaatacaacagagattactacagagaataaaaacacttttcgtccggaagcttcg

SEQ ID NO: 15686 - DNA, 75 bp, synthetic construct
  source 1..75: mol_type = other DNA
agcgagattctccgcgctgtagaagtcaccattgttgtgcacgacgacatcattccgtggcgttatccagctaag

SEQ ID NO: 15687 - DNA, 75 bp, synthetic construct
  source 1..75: mol_type = other DNA
gattatgaatcgcggtggctttgccgagaagttgcgtgcggactggcaatgggtgattccactgccagaaaatat

SEQ ID NO: 15688 - DNA, 75 bp, synthetic construct
  source 1..75: mol_type = other DNA
gccgttcagcacccgcgtggtgaatgtcggcgtccgcgattccacctatgtgctcgacggcctgctgtaccacga

SEQ ID NO: 15689 - DNA, 75 bp, synthetic construct
  source 1..75: mol_type = other DNA
attccgcttctttggtattccggggcgtcaggcttaccgtgaacttcgcttgctggctggtcaggcggcaaggca

SEQ ID NO: 15690 - DNA, 75 bp, synthetic construct
  source 1..75: mol_type = other DNA
cagtctcccaataacaaacactaccctggtgaaatacggaaaactaggatacatcgttccaagaccacaaaaaat

SEQ ID NO: 15691 - DNA, 75 bp, synthetic construct
  source 1..75: mol_type = other DNA
ctgccatcctgttgtttctggtagtggcagtggatttcactggatggctgatgtcggtactggctgatggtgtgc

SEQ ID NO: 15692 - DNA, 75 bp, synthetic construct
  source 1..75: mol_type = other DNA
acgatatgcggcgatgatttccacaatgagttttgcgaaagcatgtgaatatttccagacgtatttgaaaaaaca

SEQ ID NO: 15693 - DNA, 75 bp, synthetic construct
  source 1..75: mol_type = other DNA
gcgaatggcgggaagagcagttgcgcgctgtctgcctggtcagcaaaaaagcatctccctatgtcagctatgaag

SEQ ID NO: 15694 - DNA, 75 bp, synthetic construct
  source 1..75: mol_type = other DNA
tcgcggaagccagtctggcagccagagaggccggtcatgctgtccgtgagatggagcggtggatggtgccgaaca

SEQ ID NO: 15695 - DNA, 75 bp, synthetic construct
  source 1..75: mol_type = other DNA
tgaacgttctgattgccgccgtgttgtggggaagttcaggggtctgcgcgcaatacatcatggagcaaagccaga

SEQ ID NO: 15696 - DNA, 75 bp, synthetic construct
  source 1..75: mol_type = other DNA
atccgtgctggcgttcagtattacgatcgccagacaaaaaagaaagaatggacaaactacagcgccgttgtattt

SEQ ID NO: 15697 - DNA, 75 bp, synthetic construct
  source 1..75: mol_type = other DNA
gatgaactgcttgcagtatcacgtggtgaatttgttgaagggattagcgacccgaatgatccgaaatgggttaag

SEQ ID NO: 15698 - DNA, 75 bp, synthetic construct
  source 1..75: mol_type = other DNA
gagaaaagtgctgcccgcgttgtggtaccggggtatacagcagggagggggggctgcaggaaggcaactggaagg

SEQ ID NO: 15699 - DNA, 75 bp, synthetic construct
  source 1..75: mol_type = other DNA
gatctcgtcagaaccggcgcgtttctggtggcgatgtccctgtggcataaccatccacagaaaacgcagtcaccg

SEQ ID NO: 15700 - DNA, 75 bp, synthetic construct
  source 1..75: mol_type = other DNA
ttttctctttttatatgctgggtgttggtcacgcaacaattgccagagagttgggtattacagacagagcatctg

SEQ ID NO: 15701 - DNA, 75 bp, synthetic construct
  source 1..75: mol_type = other DNA
tgcgtgcccactgggacgacatcctgcgcctggccagctcgatcaagcagggcaccgtcaccgcctcgctgatgc

SEQ ID NO: 15702 - DNA, 75 bp, synthetic construct
  source 1..75: mol_type = other DNA
gccggcgactgcacggaccagccacaattcgtctatgtggcggcagcggccggcacccgtgccgcgatcaacatg

SEQ ID NO: 15703 - DNA, 75 bp, synthetic construct
  source 1..75: mol_type = other DNA
aagaaaatttaccccgccgtccctatcacacggatgatctcgcttttggtcttcgcatctccggcaaagggcgtg

SEQ ID NO: 15704 - DNA, 75 bp, synthetic construct
  source 1..75: mol_type = other DNA
gaacgctcccgcgccgaacatcaccgtaaaaaatcctgtgaacggtcatgctcacctgctctacgcgctcaatat

SEQ ID NO: 15705 - DNA, 75 bp, synthetic construct
  source 1..75: mol_type = other DNA
tgggcaacaaagcaatggccacagttttccggtgtggtcgcgctgacggcagaaaaccgtaatcggatcttgaag

SEQ ID NO: 15706 - DNA, 75 bp, synthetic construct
  source 1..75: mol_type = other DNA
ctaaagacgcatttggagagcgtggtaaaaacgagtttgtcaaaattaataaagaacgcgaaggcaacgaaaaaa

SEQ ID NO: 15707 - DNA, 75 bp, synthetic construct
  source 1..75: mol_type = other DNA
acgtcatatccgtgctgcccgtgccaaaacaccgggcgtgtcccgcgtgctttgcgttgagtgtgaagcgccaat

SEQ ID NO: 15708 - DNA, 75 bp, synthetic construct
  source 1..75: mol_type = other DNA
tacaccctgaacaacggtggcgcatttatggcacccgaaccggatgaagatgatggaaaaacctgggtactgttc

SEQ ID NO: 15709 - DNA, 75 bp, synthetic construct
  source 1..75: mol_type = other DNA
aagctggtttacgcgcgctcaagattggcaccaaaagaaacattgcaatatcagttgatccagaaaaagcggcat

SEQ ID NO: 15710 - DNA, 75 bp, synthetic construct
  source 1..75: mol_type = other DNA
gatgaacgaggtacaacaaataacactcatattatcaaccatggccggcaggaggtctatggtgggatatctaat

SEQ ID NO: 15711 - DNA, 75 bp, synthetic construct
  source 1..75: mol_type = other DNA
aacggcctgagcgttccgccagtccggcgacaactggcggcccccaaacgcccgtcggggccaacgccaattgag

SEQ ID NO: 15712 - DNA, 75 bp, synthetic construct
  source 1..75: mol_type = other DNA
cgttacggtcagtttgattacccgttatcgacccttccccgccgcgaacggctggtaaaacgcgcccgtgagcag

SEQ ID NO: 15713 - DNA, 75 bp, synthetic construct
  source 1..75: mol_type = other DNA
cagcatattgaggcaggcatttcactgtgtgatgcagtgaattttctcgttgaaaaatacgcactggtacgtacc

SEQ ID NO: 15714 - DNA, 75 bp, synthetic construct
  source 1..75: mol_type = other DNA
gaacacattaatgccgggatcactctggccgatgctgtgaattttctggtggagaaatacgaactagtgcgtatc

SEQ ID NO: 15715 - DNA, 75 bp, synthetic construct
  source 1..75: mol_type = other DNA
atgactgagcagcaaatccggctggtctgccgccagtgcatggaccgctgccgggcgggtgaaacatggcctccg

SEQ ID NO: 15716 - DNA, 75 bp, synthetic construct
  source 1..75: mol_type = other DNA
ggccggtactgatgaatgaactttccgctgagactgccgccttcttcatgaaagcaccggataataacgtgctgg

SEQ ID NO: 15717 - DNA, 75 bp, synthetic construct
  source 1..75: mol_type = other DNA
agatcggcagttattcaaaacagattcgttcagcaattgaagacggtgtagtggaaccgcatgagaagacagcaa

SEQ ID NO: 15718 - DNA, 75 bp, synthetic construct
  source 1..75: mol_type = other DNA
ggcaggcaaaatctggcgggtatcgatgcggatggtctcagaatgcgcattgctcccatgatggaggaatacggt

SEQ ID NO: 15719 - DNA, 75 bp, synthetic construct
  source 1..75: mol_type = other DNA
tcgtgtcgcggcccttcgcgacaatgacggcaactatcagcaaaattgcgatgaacgctatgctgacgtgctttg

SEQ ID NO: 15720 - DNA, 75 bp, synthetic construct
  source 1..75: mol_type = other DNA
cagcagatcctcgacaaaatggcctacctgacgatatggcagggcgatgacgtacagcgccgggtgaaaggtgtg

SEQ ID NO: 15721 - DNA, 75 bp, synthetic construct
  source 1..75: mol_type = other DNA
ttacaatgaaaaccatccgcatagtgcgttgggttatcgctctccgcgagaatatcgacgtcagcgggtaatgtt

SEQ ID NO: 15722 - DNA, 75 bp, synthetic construct
  source 1..75: mol_type = other DNA
cccgtagagacggtggttattgaccttgcttatgaaggctccggcagtggcgactggcgcactgacggtttcatt

SEQ ID NO: 15723 - DNA, 75 bp, synthetic construct
  source 1..75: mol_type = other DNA
tttcgtgtcacagatgaatattcccgtgccgcgctggacagttttttatcccgtcatgccgggattcgtgctttt

SEQ ID NO: 15724 - DNA, 75 bp, synthetic construct
  source 1..75: mol_type = other DNA
cgggtttattgatagcgataacagcatgctgaatgttgcagtctcccgtgcgaaggatagcttcctggtcttcgg

SEQ ID NO: 15725 - DNA, 75 bp, synthetic construct
  source 1..75: mol_type = other DNA
accatggagggaaattacgtatctggtttgtttataaaggcgtaagagtcagggaaaatctgggggttcctgaca

SEQ ID NO: 15726 - DNA, 75 bp, synthetic construct
  source 1..75: mol_type = other DNA
gtgcgagttcgttcaaaccgaccggaatactctccggagtttgagcaggcatggctggcatatcccaaacgtgct

SEQ ID NO: 15727 - DNA, 75 bp, synthetic construct
  source 1..75: mol_type = other DNA
gtgaacaggaacttaaagattacggtgtggatattgatgcgctcaacgccttcaaatttctgaccggaccagaaa

SEQ ID NO: 15728 - DNA, 75 bp, synthetic construct
  source 1..75: mol_type = other DNA
agcatttgctctgggatacattgctttaaatcgtggggaacagatcaacgcgctgtggattgtggtggcgtcggt

SEQ ID NO: 15729 - DNA, 75 bp, synthetic construct
  source 1..75: mol_type = other DNA
agaaatttctggtagttctgcgaaaacattaccatttgttcttgtaccgtttgccgaacaaaaaatcatcgctga

SEQ ID NO: 15730 - DNA, 75 bp, synthetic construct
  source 1..75: mol_type = other DNA
aacccggtatggatgtggcttcggccccttccgtcaggaaagtgcgctttggtgatggctattcccagcgagcgc

SEQ ID NO: 15731 - DNA, 75 bp, synthetic construct
  source 1..75: mol_type = other DNA
agccagccagttatttctctggcgcaagcaataccaggagggaagtcttactgctgtggccgcaggagagcaggt

SEQ ID NO: 15732 - DNA, 75 bp, synthetic construct
  source 1..75: mol_type = other DNA
atgtctctcactaaatcactgctgttcaccctgttgctgagcgccgctgctgtgcaggcctccacccgggatgaa

SEQ ID NO: 15733 - DNA, 75 bp, synthetic construct
  source 1..75: mol_type = other DNA
ggtgacctgcgtgacatcaacggcgaagccggtgcatgggcacgcatcatgagcggtaccggctctgccagtggt

SEQ ID NO: 15734 - DNA, 75 bp, synthetic construct
  source 1..75: mol_type = other DNA
ccacatgatcggcatgtccatcaacctgcagaccagcggtccatattgggtgggggctgcaagctatcttggcga

SEQ ID NO: 15735 - DNA, 75 bp, synthetic construct
  source 1..75: mol_type = other DNA
gcctgagggctgggataaccagtggaagggcgacgatgattacctgaagtggctggaccagtgtctggcgcagtt

SEQ ID NO: 15736 - DNA, 75 bp, synthetic construct
  source 1..75: mol_type = other DNA
gctggttccgcctcagcaacggcaggcaggttaacctggccgactggaaggtggtgctgtttatgcaggggcatt

SEQ ID NO: 15737 - DNA, 75 bp, synthetic construct
  source 1..75: mol_type = other DNA
gccgctgtccataaggcattctttgaggcaaagcagcgatacggtgctccccgccttgctgacgaaatgctggag

SEQ ID NO: 15738 - DNA, 75 bp, synthetic construct
  source 1..75: mol_type = other DNA
agaagcgagtgacaggcaccagcgagcgacgagaacagatcattcagcgtctgcgacagcaagggagtgtgcagg

SEQ ID NO: 15739 - DNA, 75 bp, synthetic construct
  source 1..75: mol_type = other DNA
agcgcctgctcggcaagaaaacgatggaaaatgaactcctcaaagaatcaaagaagccgttgaatatggacgggc

SEQ ID NO: 15740 - DNA, 75 bp, synthetic construct
  source 1..75: mol_type = other DNA
tgacgaagtttgattttgaatccatcaccttcagtcatgcgaaggtgtcggccattgcggtactgacggaagaat

SEQ ID NO: 15741 - DNA, 75 bp, synthetic construct
  source 1..75: mol_type = other DNA
aaaaggcgctcggcaggattggcgggaagcagcatattttttacgtgctgatgttccagcctgaagcagaagatt

SEQ ID NO: 15742 - DNA, 75 bp, synthetic construct
  source 1..75: mol_type = other DNA
ttgttcccgcgggttttacgctaatgtggatgacggtgtttggtaacagcgcgatctatctcattatgaaccagg

SEQ ID NO: 15743 - DNA, 75 bp, synthetic construct
  source 1..75: mol_type = other DNA
accggtaagtaccgctggcacggcagcactgagacgtataccggtcgtgaagtacaggatattcccggtgtgctg

SEQ ID NO: 15744 - DNA, 75 bp, synthetic construct
  source 1..75: mol_type = other DNA
cttggtgaaatacctgatataacgttcgaggaagcgtgtgtcaggtggcttgaagagaaagcacataaaaaatca

SEQ ID NO: 15745 - DNA, 75 bp, synthetic construct
  source 1..75: mol_type = other DNA
gccgaaacagtttttatgctgttcttcatagtgctatggcagggactgtttatatggttgttctctcaaatacga

SEQ ID NO: 15746 - DNA, 75 bp, synthetic construct
  source 1..75: mol_type = other DNA
gttcgattaacgaaccggagcagttctgggccgagcaggcccggcgtattgactggcagacgccctttacgcaaa

SEQ ID NO: 15747 - DNA, 75 bp, synthetic construct
  source 1..75: mol_type = other DNA
tatcaccctgggcgttcaggccggttatgcccacagcgtcagcggcagcagcgctgaaggctataacggtcaggc

SEQ ID NO: 15748 - DNA, 75 bp, synthetic construct
  source 1..75: mol_type = other DNA
ttgcagagccaccggataagcgtcgtcgcgacctggacaatatcctgaaagcaccgctggatgcgctgacgcatg

SEQ ID NO: 15749 - DNA, 75 bp, synthetic construct
  source 1..75: mol_type = other DNA
atactcctgagaagtcggatgttccgggggcaatgtacctgaaggcagaggatggccgtgactggtatgaaagcc

SEQ ID NO: 15750 - DNA, 75 bp, synthetic construct
  source 1..75: mol_type = other DNA
gaagctgaataatgcagttaactgggtccagcgccgctgggatggatatacagccagtgtcgcccgctcgtccat

SEQ ID NO: 15751 - DNA, 75 bp, synthetic construct
  source 1..75: mol_type = other DNA
tgttctgtcgcgagtacctcatcgatttaaacgccacgcaagcggctattcgggcggggtacagcgcaaagacag

SEQ ID NO: 15752 - DNA, 75 bp, synthetic construct
  source 1..75: mol_type = other DNA
ctgctggggcgaggatgaggataagccggaggtggatccgtttgcggcgctggaagacgcgctgagctttgcagc

SEQ ID NO: 15753 - DNA, 75 bp, synthetic construct
  source 1..75: mol_type = other DNA
tatccgcctggggcgttcgcccgcgcagcgttgcgtgaatcacatttctgaaccggacactgaaataccgccggg

SEQ ID NO: 15754 - DNA, 75 bp, synthetic construct
  source 1..75: mol_type = other DNA
aatacacactttatctgcatccggaaaaagctgcagactttcaaactttggaagcgatagagtccgttccgcgtt

SEQ ID NO: 15755 - DNA, 75 bp, synthetic construct
  source 1..75: mol_type = other DNA
gatcgaattattcgatgctcttccatcctccgagcaggaagccttgctgtctgaaatgcgcgcaagagtagagaa

SEQ ID NO: 15756 - DNA, 75 bp, synthetic construct
  source 1..75: mol_type = other DNA
agggacagctaagcgcggcgggatggttaagccagcaacgttaaccgttgcatttaaaaaagcccgggattctgt

SEQ ID NO: 15757 - DNA, 75 bp, synthetic construct
  source 1..75: mol_type = other DNA
aattaattatggtaaatgggtaggcatcattctttctgctgaaaataagaagcagctatggataccagaaggttt

SEQ ID NO: 15758 - DNA, 75 bp, synthetic construct
  source 1..75: mol_type = other DNA
cggctttctgatccgcattattgagtggtggcagaccggagagacaccgggcacgtttcgtctggatatcggcgt

SEQ ID NO: 15759 - DNA, 75 bp, synthetic construct
  source 1..75: mol_type = other DNA
gccgactgagtaccattcttgaggataatagtttgcctctttacctcagccagttattgctgaaattacaacagc

SEQ ID NO: 15760 - DNA, 75 bp, synthetic construct
  source 1..75: mol_type = other DNA
ggcgacatgtccagctacaaccatcgcaatggaagcctgtggtggttctcactttatggcccgtaagctggaaga

SEQ ID NO: 15761 - DNA, 75 bp, synthetic construct
  source 1..75: mol_type = other DNA
taaagagctggaatcccagttgaaacgaaagctggacgaagatgaagtaggtcagcgtttactgagtattccctg

SEQ ID NO: 15762 - DNA, 75 bp, synthetic construct
  source 1..75: mol_type = other DNA
tcccctgatcgacatgaactacatcaccagtttcaccggcatgaccgataaatggttttacaagctgatcagtga

SEQ ID NO: 15763 - DNA, 75 bp, synthetic construct
  source 1..75: mol_type = other DNA
ttgatttaagcattgataccgccgattttaaagagcagcttccgcgtgtaaaaaatctgctgaatggtacagcaa

SEQ ID NO: 15764 - DNA, 75 bp, synthetic construct
  source 1..75: mol_type = other DNA
ccatgggggcactgattgccgcagttattctttccggtcgtgcgctggcaccgcttggtcagatagcatcactgg

SEQ ID NO: 15765 - DNA, 75 bp, synthetic construct
  source 1..75: mol_type = other DNA
gcagagctggcggcaaaaaaagcgcaggccagacaggcgctgtccatttatctgaacctgcccacactggatgag

SEQ ID NO: 15766 - DNA, 75 bp, synthetic construct
  source 1..75: mol_type = other DNA
ttccagattgccagggcatttggtaaacgccatcagcatgtgattagggctattaaatgtttgagatgttctgag

SEQ ID NO: 15767 - DNA, 75 bp, synthetic construct
  source 1..75: mol_type = other DNA
gcgtgcaagcctacccgacgttgcgcccgctgatcggcggcaccctgaacatcaagcacgtgcgtgcccactggg

SEQ ID NO: 15768 - DNA, 75 bp, synthetic construct
  source 1..75: mol_type = other DNA
aagtggcagtatttacgggtaagggatggagccatgaagaagaccatcgcaatgagaccgtttactcaactgaaa

SEQ ID NO: 15769 - DNA, 75 bp, synthetic construct
  source 1..75: mol_type = other DNA
tcgtgacattgaacgaaccatagaagcttgccctcctgagtttgatacaaagctcaactttgagctttgctataa

SEQ ID NO: 15770 - DNA, 75 bp, synthetic construct
  source 1..75: mol_type = other DNA
atgaaactttccctgacgccggaagccgacagcgttaacgtacaggcactgaatatggggcgcattgtcgttgac

SEQ ID NO: 15771 - DNA, 75 bp, synthetic construct
  source 1..75: mol_type = other DNA
caggagtatttcgacggccctgaactggaccggctgattctggatgcctggagcaacgtactgggcttcgcgtca

SEQ ID NO: 15772 - DNA, 75 bp, synthetic construct
  source 1..75: mol_type = other DNA
agtctgattcaactgaaattacaggccggacggaagctgacgcaggcagaaacaacccgccttaacgctgtgctg

SEQ ID NO: 15773 - DNA, 75 bp, synthetic construct
  source 1..75: mol_type = other DNA
atgtctgataatcgttcccggcatgatcgcctggcggttcgcttatcactcattatcagccgactgatggccgga

SEQ ID NO: 15774 - DNA, 75 bp, synthetic construct
  source 1..75: mol_type = other DNA
ttttcggataatgcggccctgtttgcccgttcggctgcctcgatgcgtgaatatggttacagtgctgatgatgtg

SEQ ID NO: 15775 - DNA, 75 bp, synthetic construct
  source 1..75: mol_type = other DNA
gcactggcgttggctgctgaaggtgcgaaagttggtattttggatgccgatatctatggtccatcaattccaacc

SEQ ID NO: 15776 - DNA, 75 bp, synthetic construct
  source 1..75: mol_type = other DNA
atgaactcatcgccacaaaggccggagacattaccgtttataattatgatggtgaaacacgggaatatatttcca

SEQ ID NO: 15777 - DNA, 75 bp, synthetic construct
  source 1..75: mol_type = other DNA
ggcggcatgacggcggggtgctcaagcccgccgtgctggagaggcagcgcaagagcaagggggtgccccgtggtg

SEQ ID NO: 15778 - DNA, 75 bp, synthetic construct
  source 1..75: mol_type = other DNA
tatatttatgtcagtgcttattgttctcagcctctctgttaacctcattcagggggtgaataactaccgtcttca

SEQ ID NO: 15779 - DNA, 75 bp, synthetic construct
  source 1..75: mol_type = other DNA
taacggtgcagagattgttgccaacagtctggtgctgatgccgtcggcagactatgcacgccagatttgtggtgc

SEQ ID NO: 15780 - DNA, 75 bp, synthetic construct
  source 1..75: mol_type = other DNA
cacggtttgcgttcaaacgtgacactgacggaggaatcagaagactggatgccatcatgtgtatcggtcactaat

SEQ ID NO: 15781 - DNA, 75 bp, synthetic construct
  source 1..75: mol_type = other DNA
atgaataaactcattgaactcagacgcgccaaaatgttggcgctctctttactgcttatcgccgctgctaccttt

SEQ ID NO: 15782 - DNA, 75 bp, synthetic construct
  source 1..75: mol_type = other DNA
ggtgggtaagcacggtatgtgggagatgccgggcgtaccggtggaggccttttccggacgctcacaggctatccg

SEQ ID NO: 15783 - DNA, 75 bp, synthetic construct
  source 1..75: mol_type = other DNA
tggtgaaaatcccgatggcggccccactgaaacaggcatttgatgagaatgttgaccgtatccggcgtgaacgcc

SEQ ID NO: 15784 - DNA, 75 bp, synthetic construct
  source 1..75: mol_type = other DNA
taaccgtttcgctaccagtgcatcacgcagcaacatccgctacagcctgagtgatacacacgcaacgccggatgg

SEQ ID NO: 15785 - DNA, 75 bp, synthetic construct
  source 1..75: mol_type = other DNA
cgtaaatgtgaacacccatctttaaaagcctttctggaacggcacggtggcgtccgcgcatttcagtggacgcca

SEQ ID NO: 15786 - DNA, 75 bp, synthetic construct
  source 1..75: mol_type = other DNA
gtcgtgatattgagtcagcaggtgcagagattagccgggcaagtggatcgcttgagtcggttatttatcgcgaac

SEQ ID NO: 15787 - DNA, 75 bp, synthetic construct
  source 1..75: mol_type = other DNA
aacgtacagcgtgacgctttctgttccccgcgaggaggccacggcactggaatcgtttctggctgagcacggggg

SEQ ID NO: 15788 - DNA, 75 bp, synthetic construct
  source 1..75: mol_type = other DNA
ctggctcgcaatacccagaaaattttccgctgggtagagaaagacacccctgatgcagttgaaaaaattcaggcg

SEQ ID NO: 15789 - DNA, 75 bp, synthetic construct
  source 1..75: mol_type = other DNA
cctgtgaataaagctgatgcagatcggatagcagaagagatcgaaacggcagaacacattaagaagttacgtgac

SEQ ID NO: 15790 - DNA, 75 bp, synthetic construct
  source 1..75: mol_type = other DNA
cggtattctgttcgaagccctgttcatcctgaccgcgctggatgcgggtacccgttctggccgctttatgctgca

SEQ ID NO: 15791 - DNA, 75 bp, synthetic construct
  source 1..75: mol_type = other DNA
atgaaattctccaaattttctgagttggtgaatcgtattttgttgaatcgtattttgtccaacaaccacagccat

SEQ ID NO: 15792 - DNA, 75 bp, synthetic construct
  source 1..75: mol_type = other DNA
cactgacggaagtgtgtcgagcgttgaagcgataacggaacccgatgaacctgaagaaatgtggacggtgaaacg

SEQ ID NO: 15793 - DNA, 75 bp, synthetic construct
  source 1..75: mol_type = other DNA
atgagtattacagaaatacagatgaataatttcgtattggcagtgaaggcgggtctctcagtcctgaaaagacca

SEQ ID NO: 15794 - DNA, 75 bp, synthetic construct
  source 1..75: mol_type = other DNA
attccgccgtgaccaaaaacctgaccccggtaccgatgcagattgccaatcagcagagctacattgagagtgtga

SEQ ID NO: 15795 - DNA, 75 bp, synthetic construct
  source 1..75: mol_type = other DNA
cactgcagcggagagtgctgattgtgctggctgcccttgatgaaaaacggccaggacccgtgctgacgcgggaca

SEQ ID NO: 15796 - DNA, 75 bp, synthetic construct
  source 1..75: mol_type = other DNA
gcaatacagatacgatatggctcccgggaaatatttgtgcttaccagttccggctggataatggcggaaacgatg

SEQ ID NO: 15797 - DNA, 75 bp, synthetic construct
  source 1..75: mol_type = other DNA
gttttattgattttcttatccggcttttgattacagcgattgtcatttctccggtaattatctggtcgtgggata

SEQ ID NO: 15798 - DNA, 75 bp, synthetic construct
  source 1..75: mol_type = other DNA
cgctggtgaaagcctgcagttcagcgcctctgagtttggcgcagtgaaaccgctggatgacgagagtacaagctg

SEQ ID NO: 15799 - DNA, 75 bp, synthetic construct
  source 1..75: mol_type = other DNA
gcagtggacatttcaggtcggggaccttgaaaacgtcaatatcactcactgggcagtaatgccgaaagcaccgga

SEQ ID NO: 15800 - DNA, 75 bp, synthetic construct
  source 1..75: mol_type = other DNA
gtcatcaatgattgtaagtcaagaacaatgtatttatgaccaaaccaaaggaaactttgtcataaaggataagtg

SEQ ID NO: 15801 - DNA, 75 bp, synthetic construct
  source 1..75: mol_type = other DNA
acagaatcgccggctggaagaagcacccggcaagctcttcgaactgccggaagtcctggcaaccgcgggaagcca

SEQ ID NO: 15802 - DNA, 75 bp, synthetic construct
  source 1..75: mol_type = other DNA
aaagcgcggcggatgtgcgttttgatgcgcatcagcgcaccgtccggctctggtacggtgaaatcgccattacta

SEQ ID NO: 15803 - DNA, 75 bp, synthetic construct
  source 1..75: mol_type = other DNA
aattcgacgcgcttgaagctaaatgtgcggcactggaaaacaaaataataccagtgtcagctgaactgccaccag

SEQ ID NO: 15804 - DNA, 75 bp, synthetic construct
  source 1..75: mol_type = other DNA
tcgaaacagacaacggtgaacgggagaaagcgcagtgccgcagcctggcggagaagatacagcaggaagggagcg

SEQ ID NO: 15805 - DNA, 75 bp, synthetic construct
  source 1..75: mol_type = other DNA
catttacctttcctgatggtacgagcaccgaagatattggcaccgccattgatgagtattttgctggtcaggctg

SEQ ID NO: 15806 - DNA, 75 bp, synthetic construct
  source 1..75: mol_type = other DNA
ccatcattgatgcaacaagctggcgattggctcactggtggtcaaagtgcagggcaaattgcagaacaggctggt

SEQ ID NO: 15807 - DNA, 75 bp, synthetic construct
  source 1..75: mol_type = other DNA
aggggctgcctgacggctcctttacccgcgaacaggctgaagccgttgccgcacagtaccggaatgtctttatcg

SEQ ID NO: 15808 - DNA, 75 bp, synthetic construct
  source 1..75: mol_type = other DNA
cgcataacggtctgcgcatccagatgaacggaaccacccctgatatcgcccgtgttcaggtcattaatacaactc

SEQ ID NO: 15809 - DNA, 75 bp, synthetic construct
  source 1..75: mol_type = other DNA
atgcatcagaaaacagcagaacacgaacaaaccagagtattgctgaccatcaaaaacgggaaagtaatattaatt

SEQ ID NO: 15810 - DNA, 75 bp, synthetic construct
  source 1..75: mol_type = other DNA
gttgaagttcgtagcgagaagagcgatctcggcggtaccatgcgtctcggcgcacagcagtgccagttggttgac

SEQ ID NO: 15811 - DNA, 75 bp, synthetic construct
  source 1..75: mol_type = other DNA
taaaggcattgccgcagcctccctcgcagccattcttgaagcccgtggcctcaatgtgaccatcatgaaactgga

SEQ ID NO: 15812 - DNA, 75 bp, synthetic construct
  source 1..75: mol_type = other DNA
cgtatccgctcaaataattgctacggtcaggtatcccggcgagatcaggaaagtgcgctggcgtgctggggaatt

SEQ ID NO: 15813 - DNA, 75 bp, synthetic construct
  source 1..75: mol_type = other DNA
ccacagtcatcccggtggtctgccctggctgagcgaggccgaccggcggctgcagataaaaagtgcactgtcctg

SEQ ID NO: 15814 - DNA, 75 bp, synthetic construct
  source 1..75: mol_type = other DNA
tggcgttaattgattacgctcgccatgttgccaacatggagaacgccaactctacggaatttgtgccagactgta

SEQ ID NO: 15815 - DNA, 75 bp, synthetic construct
  source 1..75: mol_type = other DNA
gtggctggtctgccggggggaaattcataaattccgctgtgtgccacatctgacaggacggcgctttgagcacgg

SEQ ID NO: 15816 - DNA, 75 bp, synthetic construct
  source 1..75: mol_type = other DNA
cggcaacggtgaactgcttcaccatctgcctgaacaactgagtaaacgggagaggtattccgaaaaatggcaacg

SEQ ID NO: 15817 - DNA, 75 bp, synthetic construct
  source 1..75: mol_type = other DNA
agcaaagcgcgacgaagctaaaaagcttttagtgcagggcattgatccaaaagccgaacagaaagaagctcaggc

SEQ ID NO: 15818 - DNA, 75 bp, synthetic construct
  source 1..75: mol_type = other DNA
tgcgaaacgactgacacaaaaactgaaggagggctggcagccgtttggtagtccggtggccataaccccttatac

SEQ ID NO: 15819 - DNA, 75 bp, synthetic construct
  source 1..75: mol_type = other DNA
ttaatcagtattacaactctcagcagtataaagaccttgcaggtcaggctcgttaccagagtcttgctgctgcgg

SEQ ID NO: 15820 - DNA, 75 bp, synthetic construct
  source 1..75: mol_type = other DNA
agttcgagcataaggctgacagtctgatttcaaaattcaaagaagcaggcggaacggtcagagagattgaggcat

SEQ ID NO: 15821 - DNA, 75 bp, synthetic construct
  source 1..75: mol_type = other DNA
gttaatcctgacgcagccagaaatcttgcggcctgtcgccgctatgcggagaactggccagatatgctggagaac

SEQ ID NO: 15822 - DNA, 75 bp, synthetic construct
  source 1..75: mol_type = other DNA
tcacatccaccagcaggacgtgtgaccatctaatgatcgaccttgaaaccatgggaaaaaatcctgatgccccga

SEQ ID NO: 15823 - DNA, 75 bp, synthetic construct
  source 1..75: mol_type = other DNA
ctgccagcggtaaaactcgtcctgaattcatgcacggcgatatttaccgcgataaatacggcagcacggtaatga

SEQ ID NO: 15824 - DNA, 75 bp, synthetic construct
  source 1..75: mol_type = other DNA
cacggtaaatatcgtacgcatatactggtgtgggatgatcggcaggggggcgctgtctcaaaaatttcccgctgt

SEQ ID NO: 15825 - DNA, 75 bp, synthetic construct
  source 1..75: mol_type = other DNA
tgtcagcagccgttctggcgctgattgctgcaggcgcgtctgctcctcaaatactcgaccagtttctggacgaaa

SEQ ID NO: 15826 - DNA, 75 bp, synthetic construct
  source 1..75: mol_type = other DNA
atggtggcaggtgaggccattattataagtatcacgggggggggttttgtccggactgtgcatggcctctttcca

SEQ ID NO: 15827 - DNA, 75 bp, synthetic construct
  source 1..75: mol_type = other DNA
tgccgccagtgctcctgcccctgacattctcgatcagtttctggatgaaaaagaggggaatcacaccactgcata

SEQ ID NO: 15828 - DNA, 75 bp, synthetic construct
  source 1..75: mol_type = other DNA
cgctgcgcccggaagtgatcgccatcatgcataaactgcgtgagcaggggcatcgcgtggtggtgctttccaata

SEQ ID NO: 15829 - DNA, 75 bp, synthetic construct
  source 1..75: mol_type = other DNA
ttgttttgatattagccagtctgacaactggctgcacaaaagatgtatcgacaaataatcatgatgcttctctgt

SEQ ID NO: 15830 - DNA, 75 bp, synthetic construct
  source 1..75: mol_type = other DNA
tctgcaggtgataccagttttacgctggcctggaaaccgggagaggaaggccagaaagggcttataggctggttt

SEQ ID NO: 15831 - DNA, 75 bp, synthetic construct
  source 1..75: mol_type = other DNA
ttggtcgtatcggtcgactggtgttgcgtcgattacttgaagtcaaaagcaacatagacgttgtcgctattaatg

SEQ ID NO: 15832 - DNA, 75 bp, synthetic construct
  source 1..75: mol_type = other DNA
ttcacgatctacggcatgaagcaataagccgcttcttcgaactgggtagcctgaatgtaatggagattgctgcaa

SEQ ID NO: 15833 - DNA, 75 bp, synthetic construct
  source 1..75: mol_type = other DNA
cttcgggcatggcaactggtcggtaaacttgatgcccgccgacggcagacacaaaaagtggcagcatggtttgtg

SEQ ID NO: 15834 - DNA, 75 bp, synthetic construct
  source 1..75: mol_type = other DNA
ccggcagcggtacagggtggcgtggcacagacgtcagcagacggtgatgcggacgtgaaaatgctcatggccatg

SEQ ID NO: 15835 - DNA, 75 bp, synthetic construct
  source 1..75: mol_type = other DNA
tcgatgtggcagcaaggcacagggtgcagttttcgatgcctgagtccgatgctgtcacaatgctgaaaaacagac

SEQ ID NO: 15836 - DNA, 75 bp, synthetic construct
  source 1..75: mol_type = other DNA
actgcgagcaaaaagggataacacaggctcagttcattgagaaaattatcaaagatgaactgcagaggctggata

SEQ ID NO: 15837 - DNA, 75 bp, synthetic construct
  source 1..75: mol_type = other DNA
gtagcggaagaacgcagcaaaattacgccggtcagtgcgattaaggtgacgccgacatccggtacggtggcaaaa

SEQ ID NO: 15838 - DNA, 75 bp, synthetic construct
  source 1..75: mol_type = other DNA
cattgacggcagcatccttcgctgggctaaaaatgaagttatcgccagagatcgcgaagactggaagcgcatctc

SEQ ID NO: 15839 - DNA, 75 bp, synthetic construct
  source 1..75: mol_type = other DNA
accccgccctgccctcgattcatgggatgctgaatatatgcaggaaaaccgctgggatgaggagtctgcttcttt

SEQ ID NO: 15840 - DNA, 75 bp, synthetic construct
  source 1..75: mol_type = other DNA
ctgtaactgccgccattcatcgcgaatacaagcagacatggaaaaccctggacagggagctggcctactatctct

SEQ ID NO: 15841 - DNA, 75 bp, synthetic construct
  source 1..75: mol_type = other DNA
aaattgtgaaacgttctgaaggcagatcttccgttgcgaaagctgcctatcatgctcgtacacgtataacagatg

SEQ ID NO: 15842 - DNA, 75 bp, synthetic construct
  source 1..75: mol_type = other DNA
caaccagagccggtaaaagttaccgctgacgaagtaaacaaaattatgcaggcagccaatatcagccagcctgac

SEQ ID NO: 15843 - DNA, 75 bp, synthetic construct
  source 1..75: mol_type = other DNA
gaaaaaccgtatcagtgaaaccaccgcacagcttaaccgtcagcgtgacgcgctggcgcgtgtcagtgcgcaaca

SEQ ID NO: 15844 - DNA, 75 bp, synthetic construct
  source 1..75: mol_type = other DNA
taagcatctgaccggcaaaatattcacccaacgcattgagcgtaataatctgacgctacgcacccgtattaagcg

SEQ ID NO: 15845 - DNA, 75 bp, synthetic construct
  source 1..75: mol_type = other DNA
ctacttccgtactactgacgtgactggtaccatcgaactgccggaaggtgtagagatggtaatgccgggcgacaa

SEQ ID NO: 15846 - DNA, 75 bp, synthetic construct
  source 1..75: mol_type = other DNA
aatcctagttttatcgcaagccagatgggccacacaaacgcacaaatggtattcaatgtttacggagcatggatg

SEQ ID NO: 15847 - DNA, 75 bp, synthetic construct
  source 1..75: mol_type = other DNA
aatcagcgatggtgctctgacgggttcgagttccgctgtgataacggagaaaaactgcgggtcacgttcgcgctg

SEQ ID NO: 15848 - DNA, 75 bp, synthetic construct
  source 1..75: mol_type = other DNA
attctgataattcagccgcctttgccagcaggcacgggcggcgctctcatgcattcaaatatgactggtatcagc

SEQ ID NO: 15849 - DNA, 75 bp, synthetic construct
  source 1..75: mol_type = other DNA
gatgcgccggaaaagaaacaggattatggccggtggtcgacagacatgatgaaatcactggttgcaggaaaaacg

SEQ ID NO: 15850 - DNA, 75 bp, synthetic construct
  source 1..75: mol_type = other DNA
tggcgcagcacttattcaggcgattgtcgcagaaggtgatgtgagcacacctgttgtggtgaagccgacaggtgg

SEQ ID NO: 15851 - DNA, 75 bp, synthetic construct
  source 1..75: mol_type = other DNA
acgattaccgggtcatacaggagcagtttggtctgaaaacatcaatgtcgcgtaaaggtaactgttacgacaacg

SEQ ID NO: 15852 - DNA, 75 bp, synthetic construct
  source 1..75: mol_type = other DNA
acgttatcagaaggagatacgctcgttgtctggaagctggacaggctgggcagaagcatgaaacacctcatcact

SEQ ID NO: 15853 - DNA, 75 bp, synthetic construct
  source 1..75: mol_type = other DNA
agcgcagcactgacggatctgatggatcagtacgtgctcctgtcataccgcacaacggttgacgataagcgcacc

SEQ ID NO: 15854 - DNA, 75 bp, synthetic construct
  source 1..75: mol_type = other DNA
gcgatgacgtataccaaaagtaaaaagtttaaaaccgaagctggcgcgcgtcgctggttagccagaaacactaac

SEQ ID NO: 15855 - DNA, 75 bp, synthetic construct
  source 1..75: mol_type = other DNA
acgactggcagagctcagacgccgctgtggatgaggtcctgctcatcaacgaatacacctttaccgaagccggtc

SEQ ID NO: 15856 - DNA, 75 bp, synthetic construct
  source 1..75: mol_type = other DNA
tgaccaacggtatgaacgtggctaatgcgttgctggaagcggaaggcgttgagctgctgatgaccggcgggcatt

SEQ ID NO: 15857 - DNA, 75 bp, synthetic construct
  source 1..75: mol_type = other DNA
ctgcaacctgccagcaatgagatgtaccgcgtactcaaaaaagacgcgctgatggtcagcttctacggctggaac

SEQ ID NO: 15858 - DNA, 75 bp, synthetic construct
  source 1..75: mol_type = other DNA
tggtcacctggtcttcaccaaaaactacacatcgaaggccgcatatgtgggctatcgccacgaatgcgcctacat

SEQ ID NO: 15859 - DNA, 75 bp, synthetic construct
  source 1..75: mol_type = other DNA
gaatgccggtggtgagccgtttgcggtggttcaggtacagcggcggtttgcaccggaagccgtcagccattcact

SEQ ID NO: 15860 - DNA, 75 bp, synthetic construct
  source 1..75: mol_type = other DNA
tgatcaaaatggcttctttgctgggttttgacccggtaagtcgccgcagaaatccaccggaaacagaggaagagg

SEQ ID NO: 15861 - DNA, 75 bp, synthetic construct
  source 1..75: mol_type = other DNA
gagtacggcagcgagttcggcggctttttccccgtccaggtccgtttcacgcctgcccacgaacgttttcacctg

SEQ ID NO: 15862 - DNA, 75 bp, synthetic construct
  source 1..75: mol_type = other DNA
ttgaccggattgaggaaaagcgtgatgccatgcagtctctggttctgccgccaccggcacgtcaggcgctggcac

SEQ ID NO: 15863 - DNA, 75 bp, synthetic construct
  source 1..75: mol_type = other DNA
ctggacgtcgatccgcgtcgcctgctcgaccaggcgtacgcttatgggggcactgttgcaaatagtcggtggtga

SEQ ID NO: 15864 - DNA, 75 bp, synthetic construct
  source 1..75: mol_type = other DNA
ggagaatacattcgcaaacgaaggctttgtcgtgccgccattcttgtccggctcaccgcgaaatctatgcttgat

SEQ ID NO: 15865 - DNA, 75 bp, synthetic construct
  source 1..75: mol_type = other DNA
gtgggaaaacaatgtctgacggaaaagctggggttctgtagttcccatctgtgctggcctgaaggatattataat

SEQ ID NO: 15866 - DNA, 75 bp, synthetic construct
  source 1..75: mol_type = other DNA
atgatggagatattctggaccatgctggccagccaggacaggaagcgcattcgtgagtacattgcggagcagaac

SEQ ID NO: 15867 - DNA, 75 bp, synthetic construct
  source 1..75: mol_type = other DNA
aagtggtgatgcgccaggaagccacggtgatcaccgttggtggttccgactacaaaaaactggtgaatctgggcg

SEQ ID NO: 15868 - DNA, 75 bp, synthetic construct
  source 1..75: mol_type = other DNA
ccgcgtaaaccgtcagttcgtggcagaacgtcctgaccagttgtgggtggctgattttacttacgtcagtacatg

SEQ ID NO: 15869 - DNA, 75 bp, synthetic construct
  source 1..75: mol_type = other DNA
tggcctcagtggagctgaccattgacaccacaacggtgatggcaacgcaggattacgttgatgacaaaattgcag

SEQ ID NO: 15870 - DNA, 75 bp, synthetic construct
  source 1..75: mol_type = other DNA
cgaacgcccgtggtttgaacaccggcccgatgatctaacggagaacgggcgacagcactgcccgtatgtaaatcc

SEQ ID NO: 15871 - DNA, 75 bp, synthetic construct
  source 1..75: mol_type = other DNA
tcatcagcctgaccaacgagaacggcagccacagcgtcttcagttacgatgcgctggaccggctggtacagcagg

SEQ ID NO: 15872 - DNA, 75 bp, synthetic construct
  source 1..75: mol_type = other DNA
tggtacggctgggacggcgaccggctgaccacgatacagaacgacaggagccgcatccagacgatttatcagccg

SEQ ID NO: 15873 - DNA, 75 bp, synthetic construct
  source 1..75: mol_type = other DNA
gagcatgacagttacgcaatgagtgaaaagagtcacggcagagaagaaatccgtcttcatattgtttgcgatgtc

SEQ ID NO: 15874 - DNA, 75 bp, synthetic construct
  source 1..75: mol_type = other DNA
tcagtggtacaaaggatatgcagatgtcattgataaactggttacaaagtgctggcaggaagaagcatatgctga

SEQ ID NO: 15875 - DNA, 75 bp, synthetic construct
  source 1..75: mol_type = other DNA
tttccgtgggttgaatttatagagtatccagaagtcaagtcttcgtgggttaaaagattatatttcgaatatata

SEQ ID NO: 15876 - DNA, 75 bp, synthetic construct
  source 1..75: mol_type = other DNA
gaagatatttgcccttttgaaagtgatggtttggtaagaaataataataaaaaggatgtgaggatattttaccca

SEQ ID NO: 15877 - DNA, 75 bp, synthetic construct
  source 1..75: mol_type = other DNA
acttcgcatggagccttggcgcgggtgtccgctatgacgtaaccccggatatcgctctggacctcagctatcgct

SEQ ID NO: 15878 - DNA, 75 bp, synthetic construct
  source 1..75: mol_type = other DNA
ggcgatgctgcaggtgggggatgtggtgtattgcgatccgccttatgacggtacgttttccggttatcacactga

SEQ ID NO: 15879 - DNA, 75 bp, synthetic construct
  source 1..75: mol_type = other DNA
cggctgttaattttacaaccggaggcccctttaccgtactaaaaaatgtgcttacagcaactaaagatagagccg

SEQ ID NO: 15880 - DNA, 75 bp, synthetic construct
  source 1..75: mol_type = other DNA
acaggaagagcatgccattgtccaggtggaagaaatgcaggcggtgaatgccgtgctgtatggcaaatacaccat

SEQ ID NO: 15881 - DNA, 75 bp, synthetic construct
  source 1..75: mol_type = other DNA
aattgctggatggggttgaggttgaatggaaagcagtgggcgatatcgccgggtattcaacaaccaaagttgatg

SEQ ID NO: 15882 - DNA, 75 bp, synthetic construct
  source 1..75: mol_type = other DNA
caaaaaacttacgccaaatgaggcttttttacctcttttttcaacatgttgaaattcgccagacagtgtctggcg

SEQ ID NO: 15883 - DNA, 75 bp, synthetic construct
  source 1..75: mol_type = other DNA
atggcacaagtcattaataccaacagcctctcgctgatcactcagaacaacatcaacaaaaaccagtctgcgctg

SEQ ID NO: 15884 - DNA, 75 bp, synthetic construct
  source 1..75: mol_type = other DNA
atggcacaagtcattaataccaacagcctctcgctgatcactcaaaataatatcaacaagaaccagtctgcgctg

SEQ ID NO: 15885 - DNA, 75 bp, synthetic construct
  source 1..75: mol_type = other DNA
cctggcagacactggtgaatcaccattacgggctgcacgacccgaacgcaccggagaacaggcggacacttgtca

SEQ ID NO: 15886 - DNA, 75 bp, synthetic construct
  source 1..75: mol_type = other DNA
ttcagttgtttgttcgttcccatcgcaaagtggaattaacgcacgaggggaaacgcgtttattgggcgctaaaat

SEQ ID NO: 15887 - DNA, 75 bp, synthetic construct
  source 1..75: mol_type = other DNA
ccattgtgataaatcgtgatcttgcatgccgtattggtctgaatgaggcaattgtgttgcagcagcttcattact

SEQ ID NO: 15888 - DNA, 75 bp, synthetic construct
  source 1..75: mol_type = other DNA
ctgacagacatcagccatatcagcgaagggcaccgggtgacggtgcattacgggtatgatgagaaaggccggctg

SEQ ID NO: 15889 - DNA, 75 bp, synthetic construct
  source 1..75: mol_type = other DNA
ccaaaggtacggcaaaaagccgctataaagctcgcagggaagaacttattgcagagcggcgcagtagtgaaagac

SEQ ID NO: 15890 - DNA, 75 bp, synthetic construct
  source 1..75: mol_type = other DNA
atcttcttgtccggacgcttcgcaaccggacccgcagacggctgaacaggattttttaacccgacaccctgacgc

SEQ ID NO: 15891 - DNA, 75 bp, synthetic construct
  source 1..75: mol_type = other DNA
aaagtgacacgatgaagacgggtgaaaataccttccattatgaaagcctgcgcggtcgttatgtcagtctgatgg

SEQ ID NO: 15892 - DNA, 75 bp, synthetic construct
  source 1..75: mol_type = other DNA
cggatcattcgtgcactggctgcaggcatgggcgtggcccgtaaagatctgaaggcgatggcggacgatggtcaa

SEQ ID NO: 15893 - DNA, 75 bp, synthetic construct
  source 1..75: mol_type = other DNA
atacaccggatcaattgtttcatgatggtgaccccactcaggggatagaaggaaccctcgtgactgctggttatt

SEQ ID NO: 15894 - DNA, 75 bp, synthetic construct
  source 1..75: mol_type = other DNA
cagctgcagcagcttatccgcctgccggggcagcagtatgatgaggagtccggcctgtattacaaccgccaccgc

SEQ ID NO: 15895 - DNA, 75 bp, synthetic construct
  source 1..75: mol_type = other DNA
agcggcacagacaacgctgaatactgtcacgtcagtggggagtcgtctgttaagtggtgcgctggggttggttgg

SEQ ID NO: 15896 - DNA, 75 bp, synthetic construct
  source 1..75: mol_type = other DNA
taattcggtcaatgaaagtggtgaccggatcattcgtgcactggctgcaggcatgggcgtggcccgtaaagatct

SEQ ID NO: 15897 - DNA, 75 bp, synthetic construct
  source 1..75: mol_type = other DNA
agagttaccgtgcggtagataaagatgcagggcaaagcagaagttacattattccattcgcgctgctgtgctcac

SEQ ID NO: 15898 - DNA, 75 bp, synthetic construct
  source 1..75: mol_type = other DNA
catccagctaccagatgttacccggatattttcgtgccatttgtaccaatggcctggtctgcggtcagtcgctgg

SEQ ID NO: 15899 - DNA, 75 bp, synthetic construct
  source 1..75: mol_type = other DNA
gaatacccggagaatttacctgccgcgccgctggtgcgctatggctggacgccacgcggcgaactggcggcggtg

SEQ ID NO: 15900 - DNA, 75 bp, synthetic construct
  source 1..75: mol_type = other DNA
tacccggaactggcaaaggcttacccgacaaataaattgccagatttacgtggtgagtttattcgtggctgggat

SEQ ID NO: 15901 - DNA, 75 bp, synthetic construct
  source 1..75: mol_type = other DNA
tgatcgcgatgtaagaacgatggttgctctgggactggtgatggatttcgacgcaagaacgactattccattcga

SEQ ID NO: 15902 - DNA, 75 bp, synthetic construct
  source 1..75: mol_type = other DNA
gaaaaactcgctattaaacctttagaagcaacagaaattatctctgcccggcttccctcgccccttgagcgtcaa

SEQ ID NO: 15903 - DNA, 75 bp, synthetic construct
  source 1..75: mol_type = other DNA
atgggtgacagcatcagtagctggtttaaacagtgctgggctgacattcaggaagcctttaacggcggtatcgcg

SEQ ID NO: 15904 - DNA, 75 bp, synthetic construct
  source 1..75: mol_type = other DNA
attacggataagggttacgtcacgagttcaatcgtcgccattttaggctatcaggcgggcagtaatggccaggtt

SEQ ID NO: 15905 - DNA, 75 bp, synthetic construct
  source 1..75: mol_type = other DNA
aaccacgaacagaaaaaacaattaagcaaaaaatagcttcggcacagatgcgtttgaatagtctcaagaccaaag

SEQ ID NO: 15906 - DNA, 75 bp, synthetic construct
  source 1..75: mol_type = other DNA
gtcattgataaactggttacaaagtgctggcaggaagaagcatatgcagagacacaattgagaaaagtgacaaga

SEQ ID NO: 15907 - DNA, 75 bp, synthetic construct
  source 1..75: mol_type = other DNA
ttgacggacttcaggggaaaaacgagtatttttagtcatcctgtttacctctttctcaggaagtttagtctccag

SEQ ID NO: 15908 - DNA, 75 bp, synthetic construct
  source 1..75: mol_type = other DNA
taagagactttgcattaatactggatgagtggctggataaagacatggtcagcacagcgagagtaaatcgtggat

SEQ ID NO: 15909 - DNA, 75 bp, synthetic construct
  source 1..75: mol_type = other DNA
ttttcataaacgttggtttgggagaaggctctgcattaccggttggggtgcctgttccgtggccttcagccactc

SEQ ID NO: 15910 - DNA, 75 bp, synthetic construct
  source 1..75: mol_type = other DNA
gaacttattacggcaaattcaatttctacggtatcggttggtggttctgaaacccggccgcgcaacgtcgcattt

SEQ ID NO: 15911 - DNA, 75 bp, synthetic construct
  source 1..75: mol_type = other DNA
ttcctcaactgggagcaaaaacgctggattcgattacggctgcggacgtggcagaaacactgcgtccagtctggt

SEQ ID NO: 15912 - DNA, 75 bp, synthetic construct
  source 1..75: mol_type = other DNA
atgccatttgctcgttatttctgcattttcataaacgttggtttgggagaaggctctgcattacctgttggtgtg

SEQ ID NO: 15913 - DNA, 75 bp, synthetic construct
  source 1..75: mol_type = other DNA
aaaccgacaaaggcatcgtgctggccagcgccttgatcgggcacctgcggcggcagtcggtcattctgcccgccc

SEQ ID NO: 15914 - DNA, 75 bp, synthetic construct
  source 1..75: mol_type = other DNA
cctggctgcgccaggcaccgctgaaacccaactctcggcacatgctggaacacatcgagcggctgaagacatttc

SEQ ID NO: 15915 - DNA, 75 bp, synthetic construct
  source 1..75: mol_type = other DNA
aaagagtgttaacaaacagctcaagccttatgccagacgatctgtcgcaattttccttattggcgtcatcctggt

SEQ ID NO: 15916 - DNA, 75 bp, synthetic construct
  source 1..75: mol_type = other DNA
gcctgtatctgtgtactgggtgtggcatggttgggggacacttttgtatctggtcattcaggagaaattaaggag

SEQ ID NO: 15917 - DNA, 75 bp, synthetic construct
  source 1..75: mol_type = other DNA
gttcaaccatgctttctttattccgggtgtactggctattgctttctcagtgcttctgggatttcttgtggtgag

SEQ ID NO: 15918 - DNA, 75 bp, synthetic construct
  source 1..75: mol_type = other DNA
ggcaacggctgaaacaatggcagcggatacagttgaacatcatcaggacccgcagccgctggatgacaagtcaca

SEQ ID NO: 15919 - DNA, 75 bp, synthetic construct
  source 1..75: mol_type = other DNA
cggtgctgtggatgcgttaaaggaagaattaacccgacgcatcagtaaacgttatgacgatgtagaggtgatcgt

SEQ ID NO: 15920 - DNA, 75 bp, synthetic construct
  source 1..75: mol_type = other DNA
cggacagcgacgatgactgttctgagtgtgaaattcccgtcgccactctgagccttactcatcgcttccttcacc

SEQ ID NO: 15921 - DNA, 75 bp, synthetic construct
  source 1..75: mol_type = other DNA
tcaatggcttcctcggcgcagggaaaaccactctgctgaaaaacctgctcatacaggcacacgaaaaacagcttt

SEQ ID NO: 15922 - DNA, 75 bp, synthetic construct
  source 1..75: mol_type = other DNA
tcagccctatgaatttaagaatttcatttcagcctggctggataccgaacacattgatcgcggtcttctgacaaa

SEQ ID NO: 15923 - DNA, 75 bp, synthetic construct
  source 1..75: mol_type = other DNA
gtattggtgctcatacgcactccgttgcgattggttcacatggacacaccatcaccgttaacgctgctggtaacg

SEQ ID NO: 15924 - DNA, 75 bp, synthetic construct
  source 1..75: mol_type = other DNA
cagcgcacacagtatgaagtgtatgactaccccggacgtttcaagggtgcccacgggcagaactttgcccgctgg

SEQ ID NO: 15925 - DNA, 75 bp, synthetic construct
  source 1..75: mol_type = other DNA
ggcatttagtctcggtaagcgggatcgacgacgagcgagggtggcgacgcggcagtcattggtgatcatgacgtt

SEQ ID NO: 15926 - DNA, 75 bp, synthetic construct
  source 1..75: mol_type = other DNA
ggcagcgggtttaatgaactgaagtttgacgatgcgacagggaaagaacaggtctacatccacgcgcagaagaac

SEQ ID NO: 15927 - DNA, 75 bp, synthetic construct
  source 1..75: mol_type = other DNA
gcactatggaatgcactgtactggtcgctgtttctggtagtgatatgtggtctgctgtcgggtatgctggtctgg

SEQ ID NO: 15928 - DNA, 75 bp, synthetic construct
  source 1..75: mol_type = other DNA
cctggatcgactgctccaccactcaaccacactgaacatcaaaggagaaagctaccgattaaaggaaaaacgcaa

SEQ ID NO: 15929 - DNA, 75 bp, synthetic construct
  source 1..75: mol_type = other DNA
acatcgtattgaaatcggtgattttgataaccttcatgtcacagcaacaacgaaagaggaagccgtccaccgcgc

SEQ ID NO: 15930 - DNA, 75 bp, synthetic construct
  source 1..75: mol_type = other DNA
ggccgttatcagttaagcgaactggacaacctgcagattgttgatgaggggcgatacagggtaacggtgatacgc

SEQ ID NO: 15931 - DNA, 75 bp, synthetic construct
  source 1..75: mol_type = other DNA
acggacggatttatcttgcgcgaaggtgagtttgtcacttcattacaggcactgaaagagatcggaataaaagca

SEQ ID NO: 15932 - DNA, 75 bp, synthetic construct
  source 1..75: mol_type = other DNA
aatcgcttttagcggctattttgagtgcaaccctgttagccggttgtgatggcggtggctccggatcttcctccg

SEQ ID NO: 15933 - DNA, 75 bp, synthetic construct
  source 1..75: mol_type = other DNA
atcgggttgccagtctggtggttctgccttcagaaaacgaatcttttggtatggtgctggcagaagcatcggcat

SEQ ID NO: 15934 - DNA, 75 bp, synthetic construct
  source 1..75: mol_type = other DNA
ggcattattccgcgaactgtatccggcattaaaacaaattcaatcgaactattccggcagatgctacgactacgg

SEQ ID NO: 15935 - DNA, 75 bp, synthetic construct
  source 1..75: mol_type = other DNA
gcgctggttgccgtcggggttgcccggtactttggcaatatggcctccggagcggtgtctgccacggcaggactt

SEQ ID NO: 15936 - DNA, 75 bp, synthetic construct
  source 1..75: mol_type = other DNA
gccaccgctattatgacccgctgcaggggaggtatatcactcaggatccgattgggctgaaggggggatggaatt

SEQ ID NO: 15937 - DNA, 75 bp, synthetic construct
  source 1..75: mol_type = other DNA
tggcgcgaaaaattgcgctaaagctctctggttgcgtcagagcagataaagcagcatcactcggaagccttcgct

SEQ ID NO: 15938 - DNA, 75 bp, synthetic construct
  source 1..75: mol_type = other DNA
gcggtaaaaggaaaccaggggcggctaaataaagcctttgaggaaaaatttccgctgaaagaattaaataatcca

SEQ ID NO: 15939 - DNA, 75 bp, synthetic construct
  source 1..75: mol_type = other DNA
gaatggcacaaggaagctgacgacctcgtggtgattatggggcgcaacctgtttaactcgctgcgtctgcccgtg

SEQ ID NO: 15940 - DNA, 75 bp, synthetic construct
  source 1..75: mol_type = other DNA
ttctacgaaaaccgctcaacggttacagacgttgagaaaatggagttgccaatgagttttaactggttggttgct

SEQ ID NO: 15941 - DNA, 75 bp, synthetic construct
  source 1..75: mol_type = other DNA
aactggttgaaatggatggcgaaccagatcacgtccatttgttaattaactatcctcccaaactggcgatatcca

SEQ ID NO: 15942 - DNA, 75 bp, synthetic construct
  source 1..75: mol_type = other DNA
aagtacaccatattaactctcttgatgatttaaagcaatataatcaatatttgataaagtcactagaggacaaaa

SEQ ID NO: 15943 - DNA, 75 bp, synthetic construct
  source 1..75: mol_type = other DNA
tccgctgacacatgaagagctgatgcactatgtacccggtatttttggggaagaccggcatacctcccgcagtga

SEQ ID NO: 15944 - DNA, 75 bp, synthetic construct
  source 1..75: mol_type = other DNA
gagtacatccacagggtagtgcttgaaggcgagtttatcggcaaacaagagaagaaagcaaacgagctttctgca

SEQ ID NO: 15945 - DNA, 75 bp, synthetic construct
  source 1..75: mol_type = other DNA
aaggagcaaaaacagcaactgaataccgcagtcagcatcgacaacgtgaaacctggtgtcactacagactggaaa

SEQ ID NO: 15946 - DNA, 75 bp, synthetic construct
  source 1..75: mol_type = other DNA
atgcagaatgcagaaaatatcagtgaatacctgtcgttacgccatcaggggctgatgcaaagtattcagtcactg

SEQ ID NO: 15947 - DNA, 75 bp, synthetic construct
  source 1..75: mol_type = other DNA
atgggaacaggctactttctggtcaggggggacaaaaccacctgcggcgggaagattattgaaggcgcggacgac

SEQ ID NO: 15948 - DNA, 75 bp, synthetic construct
  source 1..75: mol_type = other DNA
tggaagcataataagctttttctgcttctgccggaggagtatggcccagcctttccagcaatcgtcgattgttat

SEQ ID NO: 15949 - DNA, 75 bp, synthetic construct
  source 1..75: mol_type = other DNA
caccagtcctgcaaatccgcgcgagacgcagccgcatttcttcgaatcccgatttcctgagctgttaaagctgct

SEQ ID NO: 15950 - DNA, 75 bp, synthetic construct
  source 1..75: mol_type = other DNA
agctgcgtcaccgactctgcatcttcgataccctggaacgccgtgcattactggcggcgcaggaagcgttgagta

SEQ ID NO: 15951 - DNA, 75 bp, synthetic construct
  source 1..75: mol_type = other DNA
ggcagacatacccaactggatggtgcggtgattgcctccactgccacaccggataaaaaccacctggataccgga

SEQ ID NO: 15952 - DNA, 75 bp, synthetic construct
  source 1..75: mol_type = other DNA
catatagcccaatatactcatcgaaaactaaagctccccaaacatgggacaccaacaactatctaagaaagctat

SEQ ID NO: 15953 - DNA, 75 bp, synthetic construct
  source 1..75: mol_type = other DNA
gtcttgccgtgttgttatcaggctgcggtgaaaaaggggattttgagaaagcgatcaacgccaagattggtcaat

SEQ ID NO: 15954 - DNA, 75 bp, synthetic construct
  source 1..75: mol_type = other DNA
cttcacgaagatgatttttttgacgaagaagacgcagaagttctgcgctttgatagttttgacgatgccgttgaa

SEQ ID NO: 15955 - DNA, 75 bp, synthetic construct
  source 1..75: mol_type = other DNA
ctattattttttcaggttccctctgcgctgcacagattcagggaaacgttatccgcgttcttgatggtgatacac

SEQ ID NO: 15956 - DNA, 75 bp, synthetic construct
  source 1..75: mol_type = other DNA
aaacagctgacgcatcggagatgcaagcgttaagtggtttatgggcttacagtattccagatcatgttgatagcg

SEQ ID NO: 15957 - DNA, 75 bp, synthetic construct
  source 1..75: mol_type = other DNA
tattaacgggcaagctaataatacaaccattaatggaggcagacagtcaattgagtacggaggaatttctactgg

SEQ ID NO: 15958 - DNA, 75 bp, synthetic construct
  source 1..75: mol_type = other DNA
agcaatattagcgccggaggctcgctgattgtctataccggcggtattgcacatggggttaaccaggagacgggc

SEQ ID NO: 15959 - DNA, 75 bp, synthetic construct
  source 1..75: mol_type = other DNA
cgctaaccgtttttatcaggctctgggaggcagaataaatgatcatatcgtcaattattacctccacggggagag

SEQ ID NO: 15960 - DNA, 75 bp, synthetic construct
  source 1..75: mol_type = other DNA
ttcaactgggaccgttataacccggcagaccaagacagttcgtgctggatccgtgtggcacaggcgtgggcaggc

SEQ ID NO: 15961 - DNA, 75 bp, synthetic construct
  source 1..75: mol_type = other DNA
gagatggttctgtcgctgagcggtatgggggccattgataatgccggggatgatgagcatgaggcgctgacgccg

SEQ ID NO: 15962 - DNA, 75 bp, synthetic construct
  source 1..75: mol_type = other DNA
atcgtcacaggacgaagcccgttacgaagtgcgccttgaaccccgtatggcgctgcttacccgcagccgccagaa

SEQ ID NO: 15963 - DNA, 75 bp, synthetic construct
  source 1..75: mol_type = other DNA
gcacctcgcttaattggctaacaacagggcatggttcaaagcaagcatcagcaaatacaaatactatagaagtag

SEQ ID NO: 15964 - DNA, 75 bp, synthetic construct
  source 1..75: mol_type = other DNA
tgaaggataaaaatattgtgactttttttgatttctggggaaaaacccgacgcggcgagaaagacgggggcgacg

SEQ ID NO: 15965 - DNA, 75 bp, synthetic construct
  source 1..75: mol_type = other DNA
gcgccatagagcgcatggtagaagcttatggattcaagactcgacaggcgttgtgcgatcatttaggaatctcta

SEQ ID NO: 15966 - DNA, 75 bp, synthetic construct
  source 1..75: mol_type = other DNA
aatttttttactaaccaaaattggtattactcagatttagaattagatcaagacaagtattgtgataacggtgac

SEQ ID NO: 15967 - DNA, 75 bp, synthetic construct
  source 1..75: mol_type = other DNA
cgaatttgatgtgctgaattttatctggcgcattgacggtaaggatgtgctgccggatcgcacccgctcgatgct

SEQ ID NO: 15968 - DNA, 75 bp, synthetic construct
  source 1..75: mol_type = other DNA
acgaattacttcggctctccgatatccagctggaagagctgatcgctcggctagcagaagctgaagtggcaatgc

SEQ ID NO: 15969 - DNA, 75 bp, synthetic construct
  source 1..75: mol_type = other DNA
caggaaaacagtgaaaaactggctgccgatatgatcatcagtcagaaacgcatgggtggcctgcaggccgtgcgt

SEQ ID NO: 15970 - DNA, 75 bp, synthetic construct
  source 1..75: mol_type = other DNA
ttataactcattatatgtcaacatgggtcactataacggaagcagttgagatcactaccaaagccataaaacaaa

SEQ ID NO: 15971 - DNA, 75 bp, synthetic construct
  source 1..75: mol_type = other DNA
caccgcttgcctaccggtacttttgacgcaaacgggaccagtacagtcgttgatgtggtgctgatgcgcaaacat

SEQ ID NO: 15972 - DNA, 75 bp, synthetic construct
  source 1..75: mol_type = other DNA
aatcgtttccgtttccgtggtgcgctttccactgccagcatcgatgactttacccgttattctaaagatcttgca

SEQ ID NO: 15973 - DNA, 75 bp, synthetic construct
  source 1..75: mol_type = other DNA
ggatgagctagttgttatgctttgggcaaatgaaatatttaatcgttctgaaccagatactatagcgagagtttt

SEQ ID NO: 15974 - DNA, 75 bp, synthetic construct
  source 1..75: mol_type = other DNA
aaagtcaggaagaacgggataaggttaacgttgatctggctgccagcggtgtggcgtacaaagagcgattgaaca

SEQ ID NO: 15975 - DNA, 75 bp, synthetic construct
  source 1..75: mol_type = other DNA
actggggatcgaccaatctgcgcgcctggctttatcagggcgaccactgcctggagagcaggcaatcagaagcag

SEQ ID NO: 15976 - DNA, 75 bp, synthetic construct
  source 1..75: mol_type = other DNA
aggatcgtgatcagcatattctgacgctgagggtgttcagcggtgtgctgtgcggacttcttcttatggtcacta

SEQ ID NO: 15977 - DNA, 75 bp, synthetic construct
  source 1..75: mol_type = other DNA
gaactggaaaagccccaccaccagctgctggagacgtatacttcactgaaccggcagtatgcggaactgcagagt

SEQ ID NO: 15978 - DNA, 75 bp, synthetic construct
  source 1..75: mol_type = other DNA
atgtctgctcaagtaacaagtgagcaattaaatcagttgcttagttttggttctcttgctgcggttattgcaggt

SEQ ID NO: 15979 - DNA, 75 bp, synthetic construct
  source 1..75: mol_type = other DNA
cacgggccatgaactttatgctggaaaataacccggatatgttcatgctgtggatgggcggcgataacctatcca

SEQ ID NO: 15980 - DNA, 75 bp, synthetic construct
  source 1..75: mol_type = other DNA
caaaaggggatgataagtttatcaccaccgactatttgcaacagtgccacttcgacgactacctgctgccggccg

SEQ ID NO: 15981 - DNA, 75 bp, synthetic construct
  source 1..75: mol_type = other DNA
aaagcagcgctcaaatcgctggagcgtggactggagcgtggtcacgcctctgcccgggtcttccgtttcatccgc

SEQ ID NO: 15982 - DNA, 75 bp, synthetic construct
  source 1..75: mol_type = other DNA
atgatcatttcaagaccaaatattgattctgcaatttcgggacgttacactgtctctgcaccttataaagcgggt

SEQ ID NO: 15983 - DNA, 75 bp, synthetic construct
  source 1..75: mol_type = other DNA
agtatgatgaggagtccggcctgtattacaaccgccaccgctattatgacccgctgcaggggcgatatatcactc

SEQ ID NO: 15984 - DNA, 75 bp, synthetic construct
  source 1..75: mol_type = other DNA
cacagatgataagtgttctgaacccggtgttaacccgtaatgctgccggagaaatgacggaagaatgggtgtcat

SEQ ID NO: 15985 - DNA, 75 bp, synthetic construct
  source 1..75: mol_type = other DNA
aaaatatttggttatttagatgtgaatgattaccctactgattatgtatatattagtgagggagaaagacaaaat

SEQ ID NO: 15986 - DNA, 75 bp, synthetic construct
  source 1..75: mol_type = other DNA
aagaccgtttgttagggtgctgtcggagaaagtgcgcgcgcggcgcgggcggccaccaaaagatgaagtgcgact

SEQ ID NO: 15987 - DNA, 75 bp, synthetic construct
  source 1..75: mol_type = other DNA
tggcggcgtttcccggaatgacggtggaggctgcccgcgacattctgtcctcatcgccggataaagcagaaccgg

SEQ ID NO: 15988 - DNA, 75 bp, synthetic construct
  source 1..75: mol_type = other DNA
atgttgcggcgctgaacggggtggatgtccgtgctttcaccggtcaggcgaaattttgtaagaaggctgcagccg

SEQ ID NO: 15989 - DNA, 75 bp, synthetic construct
  source 1..75: mol_type = other DNA
atctgaacatgttcaatgacggccttagctacatgggcgttgttgaatccgtgacgctgccgaagctgacccgca

SEQ ID NO: 15990 - DNA, 75 bp, synthetic construct
  source 1..75: mol_type = other DNA
agcaaggagctggggaaactgacaaaaacagaatgtacggaggctggcgggaacaggacgctggtgaaagacggt

SEQ ID NO: 15991 - DNA, 75 bp, synthetic construct
  source 1..75: mol_type = other DNA
ggctggctgattattttcgtcaattagggatttctgacaaggaacaggcggctcaatttttcgcctggttgctgt

SEQ ID NO: 15992 - DNA, 75 bp, synthetic construct
  source 1..75: mol_type = other DNA
cgtacccgtggaacgccccgctaccggttatcgatcctgaaacgttcggcagagcgcaaccaaccgcattacgcc

SEQ ID NO: 15993 - DNA, 75 bp, synthetic construct
  source 1..75: mol_type = other DNA
aaatataacgacatcattccggcggaccattgtctgcatgatgtgcaggacatgagccgccttaaccatccgaaa

SEQ ID NO: 15994 - DNA, 75 bp, synthetic construct
  source 1..75: mol_type = other DNA
aaccggaaagttaattatagacaaccttttacaagaggttattgattacgcgaaagaaaaatatatcagcggagg

SEQ ID NO: 15995 - DNA, 75 bp, synthetic construct
  source 1..75: mol_type = other DNA
atggccgaacggctgggggagatacagaaacaggtaatcactgtctgtgaccgggaagcggatatctggcattac

SEQ ID NO: 15996 - DNA, 75 bp, synthetic construct
  source 1..75: mol_type = other DNA
acaaaaatgacaacaacgtttatgacagaacattccttgctggcaactacctgaaaatcggctggccgtcagtca

SEQ ID NO: 15997 - DNA, 75 bp, synthetic construct
  source 1..75: mol_type = other DNA
aaaaaaattcgccctgatgttattgttaatgcggctgctcacactgcagtagacaaagcggaatcagaaccggaa

SEQ ID NO: 15998 - DNA, 75 bp, synthetic construct
  source 1..75: mol_type = other DNA
ccggcgcgtttgactgcgctgacatgatttaccgcctccgtcagcagaagccggtctgggcactgtgcaatgaca

SEQ ID NO: 15999 - DNA, 75 bp, synthetic construct
  source 1..75: mol_type = other DNA
ttacatttggcaaaaacgatgtagaaattattgcacgagaaacactttatcgcggctttttttcattagatcttt

SEQ ID NO: 16000 - DNA, 75 bp, synthetic construct
  source 1..75: mol_type = other DNA
ctgccagtgatcactatcacacgcaaggacggcgacagtcaccgatttaccctggcagatcgcggagcctacacg

SEQ ID NO: 16001 - DNA, 75 bp, synthetic construct
  source 1..75: mol_type = other DNA
atgaacagaaaatattattttaataatatgtggtggggatgggtgacggggggatatatgctgtatatgtcatgg

SEQ ID NO: 16002 - DNA, 75 bp, synthetic construct
  source 1..75: mol_type = other DNA
ctggcgctggtcgcctgcctgctggctgttattccggcgcttaaccttgccaccagtgatgcagcggcggtggcc

SEQ ID NO: 16003 - DNA, 75 bp, synthetic construct
  source 1..75: mol_type = other DNA
cggcatacaccggaaaaagatatcctggaagaaattaacggcggactggctgctgagtgcaaaacagaagaagaa

SEQ ID NO: 16004 - DNA, 75 bp, synthetic construct
  source 1..75: mol_type = other DNA
cgatatttgcatgggtgctggccattattctgatgatggcgggcgcactggcgatcctacaattgcccgtcgccc

SEQ ID NO: 16005 - DNA, 75 bp, synthetic construct
  source 1..75: mol_type = other DNA
ttgttgttagtcgtgatgcggctattatgagtctcatgctactggttggcggattcattacccttttctgtaaag

SEQ ID NO: 16006 - DNA, 75 bp, synthetic construct
  source 1..75: mol_type = other DNA
aaatattcgataaagtgcgaaataatttaaactatcactggttttattctgaactaaaacgtcacaatgtctcac

SEQ ID NO: 16007 - DNA, 75 bp, synthetic construct
  source 1..75: mol_type = other DNA
gaagacggtggcagtgtggtgttcccgccggtgctggtgcagatgctcgaccggctggaaagtgaaatcctggct

SEQ ID NO: 16008 - DNA, 75 bp, synthetic construct
  source 1..75: mol_type = other DNA
atgcgaaagataattgctcatttcaagattgttttaaccttacttctacccgtaaccgtatctgcccagcagatc

SEQ ID NO: 16009 - DNA, 75 bp, synthetic construct
  source 1..75: mol_type = other DNA
aatcacaagctctaaaggctcgtgtaccacacgaaatagtaaacgccatggaatcagtgaaagaatcaggcgaaa

SEQ ID NO: 16010 - DNA, 75 bp, synthetic construct
  source 1..75: mol_type = other DNA
catgacggaagatgatgtcatgccggaggcattgcgtcgttttgaggcaatggtggaagaagcggcacgcaacgc

SEQ ID NO: 16011 - DNA, 75 bp, synthetic construct
  source 1..75: mol_type = other DNA
ggtaaaagttaccgctgacgaagtaaacaaaattatgcaggcagccaatatcagccagcctgacgccgataagtt

SEQ ID NO: 16012 - DNA, 75 bp, synthetic construct
  source 1..75: mol_type = other DNA
tggcactacgatgcgtcggaccgcatcacgcaccggacggtgaacggcgacccggcagagcagtggcagtatgat

SEQ ID NO: 16013 - DNA, 75 bp, synthetic construct
  source 1..75: mol_type = other DNA
atgaaagatttaactttgaagtttcatgacaaactgcagtttaaggccttcctgtcatctcttgactgggaggag

SEQ ID NO: 16014 - DNA, 75 bp, synthetic construct
  source 1..75: mol_type = other DNA
atgtcagatatcaccgcaaatgttgtggtaagcatgccttcgcaactcttcactatggctcgttcttttaaagcc

SEQ ID NO: 16015 - DNA, 75 bp, synthetic construct
  source 1..75: mol_type = other DNA
attcatccccgctggtatatatcagtgactgatgcggcggatttgttctatctgctgttgtggctgggagagggg

SEQ ID NO: 16016 - DNA, 75 bp, synthetic construct
  source 1..75: mol_type = other DNA
gagctacatcaacgactacggcggacgtccggttctgcagttcagctgcagcggagaccgttgtacggcggtgaa

SEQ ID NO: 16017 - DNA, 75 bp, synthetic construct
  source 1..75: mol_type = other DNA
aatgcaatcgccataggccagggcaacaaagctgatggcgtggatgccatcgctctgggtaatggtagccagtcg

SEQ ID NO: 16018 - DNA, 75 bp, synthetic construct
  source 1..75: mol_type = other DNA
acgctattgccatcatggaaagcaagaggatgtggcgaagtaattatgcccctcctttgctacacctcgcatgga

SEQ ID NO: 16019 - DNA, 75 bp, synthetic construct
  source 1..75: mol_type = other DNA
tcacttatgactgtggtgatacttcaaagattaaaaactcgttgcaaatgcgcatcgacggtacaactggggtag

SEQ ID NO: 16020 - DNA, 75 bp, synthetic construct
  source 1..75: mol_type = other DNA
atgcgattagcaagtcgttttggttatgcgaaccagatacgccgtgaccgtccgctgacacatgaagagctgatg

SEQ ID NO: 16021 - DNA, 75 bp, synthetic construct
  source 1..75: mol_type = other DNA
ctggcgtgaaccggcaaaaacggctcaacaaagtaacattccggtgaccgttgaacgccagttgtatcggcttat

SEQ ID NO: 16022 - DNA, 75 bp, synthetic construct
  source 1..75: mol_type = other DNA
gaaggggcttacgaggtggtgggcgtgtttgaccggatagaggagaagcgtgatgccatgcagtcgctggtcctg

SEQ ID NO: 16023 - DNA, 75 bp, synthetic construct
  source 1..75: mol_type = other DNA
acccggtgtacacgccggcgcgaaaaatccacctgtaccactgcgaccatcgcggcctgccgctggcccttatca

SEQ ID NO: 16024 - DNA, 75 bp, synthetic construct
  source 1..75: mol_type = other DNA
gttgcgccatgagaacggcaatttatcccgctcctttgagacagcaaaccgcgtcgcgagcgaacaaaagacgac

SEQ ID NO: 16025 - DNA, 75 bp, synthetic construct
  source 1..75: mol_type = other DNA
tgggcattgacgaaaataccctgatggccatgcgtcgtggtgtggggcagttcagcgctcagtattcagaaatgg

SEQ ID NO: 16026 - DNA, 75 bp, synthetic construct
  source 1..75: mol_type = other DNA
gaaaatacattgatgataaagatgcgaaaaagcacgccgtcgtcaatggcgtccttatggttcatcgcggatggg

SEQ ID NO: 16027 - DNA, 75 bp, synthetic construct
  source 1..75: mol_type = other DNA
ttaaatacctggcgtgttggaatgaataattttgcccgtaatgccgaggggcaggataacacaagaaatatcctt

SEQ ID NO: 16028 - DNA, 75 bp, synthetic construct
  source 1..75: mol_type = other DNA
ttttgctggcgatcttcttgggcgccagattggggggaataggtattggttttgcaggcggattgggggtgctgg

SEQ ID NO: 16029 - DNA, 75 bp, synthetic construct
  source 1..75: mol_type = other DNA
ttctttaggtgaaatgattcagaaggaaatttatgggcatgaacaaagaacattttcaccagttcatcatacagg

SEQ ID NO: 16030 - DNA, 75 bp, synthetic construct
  source 1..75: mol_type = other DNA
atggcaactttgacaaaaaaggaacaggcatggttgagcgaattacagaacgttcttgatcgctgcccgtcaccg

SEQ ID NO: 16031 - DNA, 75 bp, synthetic construct
  source 1..75: mol_type = other DNA
ccatacccgggccattcacagcatcgacaccgatattaaactcaaccgcgcattgtgggtgatggcagaaacgat

SEQ ID NO: 16032 - DNA, 75 bp, synthetic construct
  source 1..75: mol_type = other DNA
ctgcgcgcacgtctgagggtaggcattgtgcggatactttattgactggcctggcgtctgtcaggggcgggagag

SEQ ID NO: 16033 - DNA, 75 bp, synthetic construct
  source 1..75: mol_type = other DNA
tttcctggctgcgatgcttctgtattcacaggctgcaactgccaaagctatcactccggctattgtgactgcatt

SEQ ID NO: 16034 - DNA, 75 bp, synthetic construct
  source 1..75: mol_type = other DNA
aaagcgcacagttaacaggaatgacggtaacaatcaaatcaaatacctgtgcgtcaggttcaggatttgctgaag

SEQ ID NO: 16035 - DNA, 75 bp, synthetic construct
  source 1..75: mol_type = other DNA
atgtggcctcagcgtcgtgtgcgggctgtgccgtgcctccatcgtagccgggcttctgcgggcgggttgcaaggt

SEQ ID NO: 16036 - DNA, 75 bp, synthetic construct
  source 1..75: mol_type = other DNA
ttaacgcttacctgcagcaactggcgcgtctgaacggtgtggcagttgaagaactgtccagcaagttcaccgtag

SEQ ID NO: 16037 - DNA, 75 bp, synthetic construct
  source 1..75: mol_type = other DNA
cgccagttgcgggtggaaaaaattctgaatcgctcaggcatccagccgttgcaccgtaaatgctcgtttgcgaat

SEQ ID NO: 16038 - DNA, 75 bp, synthetic construct
  source 1..75: mol_type = other DNA
aatatgctgaaaggcgggatttccggtcgcagtgccagaggaaaacgtatccatacccgggccattcacagcatc

SEQ ID NO: 16039 - DNA, 75 bp, synthetic construct
  source 1..75: mol_type = other DNA
ctgcctgctgggctcatgcccgccgaaagatccacgatgtgcacgtccgcatcccgtcagcactgacggaagaag

SEQ ID NO: 16040 - DNA, 75 bp, synthetic construct
  source 1..75: mol_type = other DNA
aaatcagaccgaggtagcccgaatactgaactgcaatcgtgccacagtcagaaaatacattggcgataaagaagg

SEQ ID NO: 16041 - DNA, 75 bp, synthetic construct
  source 1..75: mol_type = other DNA
tccgctgacacatgaagaactgatgcactatgtacccagtatttttggggaagatcggcatacctcccgcagtga

SEQ ID NO: 16042 - DNA, 75 bp, synthetic construct
  source 1..75: mol_type = other DNA
gatcgcctcgcttttggtgtttggcctacagtgacgcttgctcaggcaagagcaaagcgcgacgaagctaaaaag

SEQ ID NO: 16043 - DNA, 75 bp, synthetic construct
  source 1..75: mol_type = other DNA
cgcagaatacgatgaatggggcaacctgctgaatgaagagaacccgcatcagctgcagcagcttatccgcctgcc

SEQ ID NO: 16044 - DNA, 75 bp, synthetic construct
  source 1..75: mol_type = other DNA
cgggtgtgctgtccctgatgcttgcaggatgtggaaatctgagtcatgtcacggatgaaggaacgacggaagaag

SEQ ID NO: 16045 - DNA, 75 bp, synthetic construct
  source 1..75: mol_type = other DNA
atccgttgaatcccatacaagtgatagacccaatggggttagatgcgattgagaatatgacatcaggtggactaa

SEQ ID NO: 16046 - DNA, 75 bp, synthetic construct
  source 1..75: mol_type = other DNA
ctgttccgggatgcttaccatctggcggggattgagatgccggattttcatcgcggggatgactggtggcgtcac

SEQ ID NO: 16047 - DNA, 75 bp, synthetic construct
  source 1..75: mol_type = other DNA
cggcttaaacgcctggggctgtcaaaaacgttccgtcgtctggttatcacacttacccgacgttatggcgtcagt

SEQ ID NO: 16048 - DNA, 75 bp, synthetic construct
  source 1..75: mol_type = other DNA
ggcggtaagcaatggaaagggctgatgactcgccgtgagattgagcgtgaagtctgtttgtgggggcaacaatga

SEQ ID NO: 16049 - DNA, 75 bp, synthetic construct
  source 1..75: mol_type = other DNA
cccgttctgcagcttccatgcgggagtatggttacagttctgaggaggtactgaaagtcaccgaggcgatctcca

SEQ ID NO: 16050 - DNA, 75 bp, synthetic construct
  source 1..75: mol_type = other DNA
ttcggcggtggaaatgtatctggtcagcgattgtattgagcatatcctgtccagtgggctggcctgcgatgtgct

SEQ ID NO: 16051 - DNA, 75 bp, synthetic construct
  source 1..75: mol_type = other DNA
gtgaacgatagctaccgacagtttgaaaactggtggtcaaaagacaaaagccagttcacgggagacgatgaatta

SEQ ID NO: 16052 - DNA, 75 bp, synthetic construct
  source 1..75: mol_type = other DNA
ctgaccgtggagcagatgcaaaaccagatggacccggtgtacacgccggcgcgaaaaatccacctgtaccactgc

SEQ ID NO: 16053 - DNA, 75 bp, synthetic construct
  source 1..75: mol_type = other DNA
tacactcagcgcattgagcgacataatctgaatctgagacaacatctggcaaggctgggacggaagtcgctgtcg

SEQ ID NO: 16054 - DNA, 75 bp, synthetic construct
  source 1..75: mol_type = other DNA
ctggaaatccaaaaacaaaagaacaatatcagctaacaaagaattttgatgttatctggttatggtccgaagacg

SEQ ID NO: 16055 - DNA, 75 bp, synthetic construct
  source 1..75: mol_type = other DNA
ggctgggacggaagtcactgtcgttctcaaaatcggtggagttgcatgacaaggtcatcgggcattatttgaaca

SEQ ID NO: 16056 - DNA, 75 bp, synthetic construct
  source 1..75: mol_type = other DNA
aacccgacaggtgggacaaggccttccgttttgtggacggggtgtgtgagcttcacctttacaccaacggtgtgg

SEQ ID NO: 16057 - DNA, 75 bp, synthetic construct
  source 1..75: mol_type = other DNA
ggtgacagactgttatacgctgttccgcgatgcctatcatcttgcaggtatcgatttgccggatttttaccgaca

SEQ ID NO: 16058 - DNA, 75 bp, synthetic construct
  source 1..75: mol_type = other DNA
atgaatagcgaaggggggaaaccggggaatgtactgaccgttaacggcaactataccggaaacaatggcctgatg

SEQ ID NO: 16059 - DNA, 75 bp, synthetic construct
  source 1..75: mol_type = other DNA
attgcgctgggaaatgccgctaaggcggctggtattatgagcatcggtctcggtgataatgccaatgcgtcacaa

SEQ ID NO: 16060 - DNA, 75 bp, synthetic construct
  source 1..75: mol_type = other DNA
agcctgtgggggaatgtcggtgtgcaactaggtgataaaggctatagcgatactcagggcatgctgggagtgaaa

SEQ ID NO: 16061 - DNA, 75 bp, synthetic construct
  source 1..75: mol_type = other DNA
atatgaagatatccgggctgccggaagtgatgaacgccgtgagctgacacacgccgtgatgcgggaactggatgc

SEQ ID NO: 16062 - DNA, 75 bp, synthetic construct
  source 1..75: mol_type = other DNA
ggggacagcccgggtcagactggcccggcgtggtggaaaactgcagtaccgtggcagtgtgctgaaggtgggtaa

SEQ ID NO: 16063 - DNA, 75 bp, synthetic construct
  source 1..75: mol_type = other DNA
tgacacgtccactggtcatgcctgccccggaaaaggttccggatgtcagcgaaccggtaaccgctccggataact

SEQ ID NO: 16064 - DNA, 75 bp, synthetic construct
  source 1..75: mol_type = other DNA
tgatcgtgttgaaggtgccccgctggagttttacgaagctgaggcgaaaaagaaggcgaagcagtttttcatgga

SEQ ID NO: 16065 - DNA, 75 bp, synthetic construct
  source 1..75: mol_type = other DNA
atgaacgcaaaaatcagatacggcctgtcggctgccgttctggcgctgattggtgcagggacgtctgcgcctgaa

SEQ ID NO: 16066 - DNA, 75 bp, synthetic construct
  source 1..75: mol_type = other DNA
atgcaacaactttcctttctgcccggcgcgatgacgcccggcgagcgcagcctcattctgcgggccctgaaaacc

SEQ ID NO: 16067 - DNA, 75 bp, synthetic construct
  source 1..75: mol_type = other DNA
atgaaaggtgattgggcggacagtcatcgcgatgaagctgacgatttttacagacatcaggctgatattaaatat

SEQ ID NO: 16068 - DNA, 75 bp, synthetic construct
  source 1..75: mol_type = other DNA
gatgaacgaggtacaacaaataacactcatattatcaaccatggccagcagaatgtttatggcggggtatctaat

SEQ ID NO: 16069 - DNA, 75 bp, synthetic construct
  source 1..75: mol_type = other DNA
tacgcgatgaaggcctgatactcaacgacagcggcggcaggagcattcactttgagccgctgtttcccggcgaga

SEQ ID NO: 16070 - DNA, 75 bp, synthetic construct
  source 1..75: mol_type = other DNA
agccatcagttgcttgcaccggcggacaatatctccattgcaaaaaatgaactggcggttctggggacgatttca

SEQ ID NO: 16071 - DNA, 75 bp, synthetic construct
  source 1..75: mol_type = other DNA
aaacccgcatgagcggcggtggcatcacttatcttcttgaaaaagcgcgcgagaaatcgaacgccaaaatgattg

SEQ ID NO: 16072 - DNA, 75 bp, synthetic construct
  source 1..75: mol_type = other DNA
aagttcgccacagcaatccgaaaccactggcacgtggagaataagctgcactggcgtctggacgtggtaatgaat

SEQ ID NO: 16073 - DNA, 75 bp, synthetic construct
  source 1..75: mol_type = other DNA
gatttccggtgcgaacggggaatacagccatcagttgcttgcaccggcggacaatatctccattgcaaaaaatga

SEQ ID NO: 16074 - DNA, 75 bp, synthetic construct
  source 1..75: mol_type = other DNA
tcgcttctccacagtatcaggcgttaactgaagaacagaaagcacaggctcaagcgcaatattttgatgaggttg

SEQ ID NO: 16075 - DNA, 75 bp, synthetic construct
  source 1..75: mol_type = other DNA
gattaaggacggtggcagagactgccgtattcgctcaaataactgttatggtcaggtatcccgtcgtgaccagga

SEQ ID NO: 16076 - DNA, 75 bp, synthetic construct
  source 1..75: mol_type = other DNA
ggcacgagaatggctgattctgaacatggcgggactggagcgtgaagaattccgggtgctgtatctgaataacca

SEQ ID NO: 16077 - DNA, 75 bp, synthetic construct
  source 1..75: mol_type = other DNA
gtcgacccgtatacagcgtatggtgccggattcgttcaggcgcattgtgagttgctgccgtttgatgggggaatt

SEQ ID NO: 16078 - DNA, 75 bp, synthetic construct
  source 1..75: mol_type = other DNA
aagcggaagagcagaacatggtgaatagtcgtcgacgcaatgctatataccctgcctggtactggctgacagttc

SEQ ID NO: 16079 - DNA, 75 bp, synthetic construct
  source 1..75: mol_type = other DNA
ggaacgttgcaggagttgataaatacagcagaaaaaacggcgtttctcggcgatcggtttagaagttatataaga

SEQ ID NO: 16080 - DNA, 75 bp, synthetic construct
  source 1..75: mol_type = other DNA
ccaataaagtcatcagatgggtaacagatcctgtcgatccggtaaccggcgcgtactgcgacgaacgtaccgact

SEQ ID NO: 16081 - DNA, 75 bp, synthetic construct
  source 1..75: mol_type = other DNA
actttaccgatagtgctgagctacatcttgttctgcacgatatatcaggcaatccgatcaaagtttctgaagggc

SEQ ID NO: 16082 - DNA, 75 bp, synthetic construct
  source 1..75: mol_type = other DNA
gaaactgtcgaaggaaaaatgcgaccaggttaatgccattgaacgggataaggcgctggcatgggtggagcgcaa

SEQ ID NO: 16083 - DNA, 75 bp, synthetic construct
  source 1..75: mol_type = other DNA
aatggtcaatgggcatggctagaaaatgaaacgaatattaatgtgtcaagtgagttagtgaggtttttaaatgaa

SEQ ID NO: 16084 - DNA, 75 bp, synthetic construct
  source 1..75: mol_type = other DNA
gaaactgtcgaaggaaaaatgcgctcaggttaatgccattgagcgtgataaggcgctggcatgggtggagcgcaa

SEQ ID NO: 16085 - DNA, 75 bp, synthetic construct
  source 1..75: mol_type = other DNA
ttgaccgcctgcgggtcaccttcggggtgcagtcactgttggagaccacctcaaagggcgaccgtaatccctctt

SEQ ID NO: 16086 - DNA, 75 bp, synthetic construct
  source 1..75: mol_type = other DNA
ttactgaccgtaaggtcaaggagaagagagcaatgaagcagcataaggcgatgattgtcgccctgatcgtcatct

SEQ ID NO: 16087 - DNA, 75 bp, synthetic construct
  source 1..75: mol_type = other DNA
gcttaaccttgccaccagtgatgcagcggcggtggccggtcttgtgatgacggtgctgaccgttggtctggtgtc

SEQ ID NO: 16088 - DNA, 75 bp, synthetic construct
  source 1..75: mol_type = other DNA
ttaaggggaaactgtcagccaaccagattgaaggcgatattgtcaaaacggtcagcaagtctttcccccgcacga

SEQ ID NO: 16089 - DNA, 75 bp, synthetic construct
  source 1..75: mol_type = other DNA
ttaagggcatgctggaggcgacccaggtcagaggggatttcgttaaagctgtatcaaaagccttcccgaaaaaag

SEQ ID NO: 16090 - DNA, 75 bp, synthetic construct
  source 1..75: mol_type = other DNA
atttatgaacggcgatatttaccgcgataaatacggcggcacggtaacgattaaaggcgtggcagaacggcgcat

SEQ ID NO: 16091 - DNA, 75 bp, synthetic construct
  source 1..75: mol_type = other DNA
gcactgatttttgatgtaggcgtttctactatttatagaaaatttccggcaaataagagcaatgaatctccctga

SEQ ID NO: 16092 - DNA, 75 bp, synthetic construct
  source 1..75: mol_type = other DNA
acatgggacagaggaatggaactggccagacatctagaatttactgtcagcaccggcgttaaagtttacttctgc

SEQ ID NO: 16093 - DNA, 75 bp, synthetic construct
  source 1..75: mol_type = other DNA
tatcgttatcaccctgtaggcgatatacaggctgaagaaacaaccaggcagactcaggaaaatgaaaaccgctaa

SEQ ID NO: 16094 - DNA, 75 bp, synthetic construct
  source 1..75: mol_type = other DNA
ttaccgatcgtggtgaaggattcaaacatgataagacatcactcgcacgagatgtagccaccggcgttctggccc

SEQ ID NO: 16095 - DNA, 75 bp, synthetic construct
  source 1..75: mol_type = other DNA
cgtatatcccaggacatcagcacccgtgatgaaggcgggggcggaaaggtcgtggttatcgggcggcaggggtaa

SEQ ID NO: 16096 - DNA, 75 bp, synthetic construct
  source 1..75: mol_type = other DNA
caacaaatgaccagaacacggaattgcagcgtaacgcgctggagtgcgcaggatgtgagctgatttttgaggata

SEQ ID NO: 16097 - DNA, 75 bp, synthetic construct
  source 1..75: mol_type = other DNA
atgtgtgaagctgagggcgttacccaggctgagatgattgccgaactgataaagcagaagagtgcttttagctaa

SEQ ID NO: 16098 - DNA, 75 bp, synthetic construct
  source 1..75: mol_type = other DNA
ggaaaaaataggaaaactgcatctggctcaggggctgtgggagctgatagacaacagccagcttgcggatgagat

SEQ ID NO: 16099 - DNA, 75 bp, synthetic construct
  source 1..75: mol_type = other DNA
cgacgtcagaacgggagttttggcagttcacgtatcagtaaccttcaggcgatagtggtgaagaaaaacagcgcg

SEQ ID NO: 16100 - DNA, 75 bp, synthetic construct
  source 1..75: mol_type = other DNA
agggaacggatgccagactggtgaccaccgccatcaccgcagacacggagcaccgtttcagcggcctgccgctcg

SEQ ID NO: 16101 - DNA, 75 bp, synthetic construct
  source 1..75: mol_type = other DNA
gccgcgggtggtgaagggcgtgcgcttcagtctgcgcctgaccagtggcagtggtgaaaacagccgcctggtgac

SEQ ID NO: 16102 - DNA, 75 bp, synthetic construct
  source 1..75: mol_type = other DNA
atgaaaacattgtctcagaacaccacctcttcggcctgtgcaccggagactggcctgcaacaactggttgccacc

SEQ ID NO: 16103 - DNA, 75 bp, synthetic construct
  source 1..75: mol_type = other DNA
gtgaccctggagccccgtgtcttcggctggatggaccgtctgtgcgaagactactgcggtggtatctggaatctg

SEQ ID NO: 16104 - DNA, 75 bp, synthetic construct
  source 1..75: mol_type = other DNA
gcgtatctgcgccatattctgagcgtactgccggaatggccctccaaccgtgttgacgaactcctgccatggaac

SEQ ID NO: 16105 - DNA, 75 bp, synthetic construct
  source 1..75: mol_type = other DNA
ttcacgacgtatctctcaggacatcagcacccgtgatgaaggcggagacggaaaggtggtggttattggtcgaca

SEQ ID NO: 16106 - DNA, 75 bp, synthetic construct
  source 1..75: mol_type = other DNA
tgccgcctgtctgatggcgtacagtcatcacgcctgtcgtacggagtgttacgccatgacggtccactattaccg

SEQ ID NO: 16107 - DNA, 75 bp, synthetic construct
  source 1..75: mol_type = other DNA
gcggcgtactgccgccgctcctggcctctgccattcagaaactgaccggaaccggagcggaacttgttctgtccg

SEQ ID NO: 16108 - DNA, 75 bp, synthetic construct
  source 1..75: mol_type = other DNA
ctcccggcgaatctctcaggacatcagtacccgtgatgaaggcggtggcgggaaggtcgtggttatcgggcggca

SEQ ID NO: 16109 - DNA, 75 bp, synthetic construct
  source 1..75: mol_type = other DNA
ttcacgacgtatctctcaggacatcagcacccgtgatgaaggcgggggcggaaaggtggtggttattggtcgaca

SEQ ID NO: 16110 - DNA, 75 bp, synthetic construct
  source 1..75: mol_type = other DNA
cgcgtgctgccagttaatgacaccggtgaatgatgccctgtaccgttatgtaatgaacacccgcaagattcacac

SEQ ID NO: 16111 - DNA, 75 bp, synthetic construct
  source 1..75: mol_type = other DNA
gtgaaatacagcgtctggaatctgaagaaagctgttgcccggagtgtggcggtgagctggattatctgggggaag

SEQ ID NO: 16112 - DNA, 75 bp, synthetic construct
  source 1..75: mol_type = other DNA
tcagctatgaacaactgacccggtttgcggaaaaacgcatccgggaatgcaatctggacagccagggcgtaactt

SEQ ID NO: 16113 - DNA, 75 bp, synthetic construct
  source 1..75: mol_type = other DNA
ggaacgcggatatcagcggagcaattaccgcgaataccggcacgctcaataatgtcaccattaacgagaactgtg

SEQ ID NO: 16114 - DNA, 75 bp, synthetic construct
  source 1..75: mol_type = other DNA
gaaacccgcaatgaaatcacacagacggtcagtaaaacgctggaggaccagagcgccaccatacagcagatacag

SEQ ID NO: 16115 - DNA, 75 bp, synthetic construct
  source 1..75: mol_type = other DNA
agaaacagatttactcatcaacctgtcaacgcttacccagcgcggtctggcaaagatgattggctgtcatgaatc

SEQ ID NO: 16116 - DNA, 75 bp, synthetic construct
  source 1..75: mol_type = other DNA
gccgaagtcaccgcagacagcggggagtatcaggtactggcccgctgggacacgccgaaggtggtgaagggcgtg

SEQ ID NO: 16117 - DNA, 75 bp, synthetic construct
  source 1..75: mol_type = other DNA
gggaacaggcgacagtaatcactagctggctacaaaaagttacctctctgatagatatcagtttaatcgatgcgg

SEQ ID NO: 16118 - DNA, 75 bp, synthetic construct
  source 1..75: mol_type = other DNA
gtgcgggtattacttcgacctgttctggttccggaactcgggctggtggtccttaagccaggccgtgaatccatg

SEQ ID NO: 16119 - DNA, 75 bp, synthetic construct
  source 1..75: mol_type = other DNA
cctgccgttcgccagccgctggcggaagacaaatctctgctgccatttttcagcgatgagcgggtgattcgtgct

SEQ ID NO: 16120 - DNA, 75 bp, synthetic construct
  source 1..75: mol_type = other DNA
cacgcaactgagtctgaacgcgcgtaatactaatgagaacggtattgctgaagttacccttaagggcacggtttt

SEQ ID NO: 16121 - DNA, 75 bp, synthetic construct
  source 1..75: mol_type = other DNA
atcgaaccactggacacactttgggaaattgtcgccaaccaggatatgccggacgaagtgcgcgccaaattatgc

SEQ ID NO: 16122 - DNA, 75 bp, synthetic construct
  source 1..75: mol_type = other DNA
gtgcgggtattacttcgacctgttcttgtgccagaactcgggctggtgatcgttaagccgggccatgaatccatg

SEQ ID NO: 16123 - DNA, 75 bp, synthetic construct
  source 1..75: mol_type = other DNA
gcgatggtcgccagccagatgaaacgggcagccaacgacaaagccattgcacagatgctggcagcaaagaagtcc

SEQ ID NO: 16124 - DNA, 75 bp, synthetic construct
  source 1..75: mol_type = other DNA
ccgcatcagctgcagcagcttatccgcctgccggggcagcagtatgatgaggagtccggcctgtattacaaccgc

SEQ ID NO: 16125 - DNA, 75 bp, synthetic construct
  source 1..75: mol_type = other DNA
atctccactgagcgtagctgggcgatgacgcacagtatcagcggtagcggtgatgtgacaaaactgggtaccggg

SEQ ID NO: 16126 - DNA, 75 bp, synthetic construct
  source 1..75: mol_type = other DNA
ccgacaatgggggcttaccgtgaactacgcaaattgcctcgcggcgtcagcattgctgatgagtttgacgagcgc

SEQ ID NO: 16127 - DNA, 75 bp, synthetic construct
  source 1..75: mol_type = other DNA
ctcttacgcgataggcgtgggtgatttggtggcgacatcacttaacaccttctccacctttatggtgcatgacaa

SEQ ID NO: 16128 - DNA, 75 bp, synthetic construct
  source 1..75: mol_type = other DNA
ttgctgaacgtcagcgaaaaacgaaaccgctgttgaaatccctggaaagctggttgcgtgaaaagatgaagaccc

SEQ ID NO: 16129 - DNA, 75 bp, synthetic construct
  source 1..75: mol_type = other DNA
cggaacggcgacgatgtggttatccgtcctggcgtttggcagacaggccgacgcactggcaaaacaccacaaagg

SEQ ID NO: 16130 - DNA, 75 bp, synthetic construct
  source 1..75: mol_type = other DNA
ggaatgcgtacagatggatcgctggtatgagccgcccgtcagctttgacggactggcgcgcaccttccgcgccgc

SEQ ID NO: 16131 - DNA, 75 bp, synthetic construct
  source 1..75: mol_type = other DNA
ccgtggtgctgacccgtgggaatgtgcgccatatggctcaggactggaacctgtcagacgatgagctggaaaccg

SEQ ID NO: 16132 - DNA, 75 bp, synthetic construct
  source 1..75: mol_type = other DNA
ctatgccccacaggggaaagccgacggcattaaaattatcccgctcagtgaagtggcaacgaaggacgatttttt

SEQ ID NO: 16133 - DNA, 75 bp, synthetic construct
  source 1..75: mol_type = other DNA
attgcaaaaaaggcttcaagaagtaaatgaatggataaaggagccaataatgcaatttaatgaatataaccttgc

SEQ ID NO: 16134 - DNA, 75 bp, synthetic construct
  source 1..75: mol_type = other DNA
gatgccgaacgcggtgatctgacagcacaggctgacctggcctttgatatggaagaaaaggacacccaccttttt

SEQ ID NO: 16135 - DNA, 75 bp, synthetic construct
  source 1..75: mol_type = other DNA
agccagaccggcaacgaggcagaccttaatccgaacatcgctaaccgcaacaaaggcgggcgtcgcaaaccgaaa

SEQ ID NO: 16136 - DNA, 75 bp, synthetic construct
  source 1..75: mol_type = other DNA
cgccgggcaaatgaaccgaccgttcttcccgttcatattgcgccaccactgcatgctgatgtaccacagcccgtc

SEQ ID NO: 16137 - DNA, 75 bp, synthetic construct
  source 1..75: mol_type = other DNA
catgctgcagcagggggggcagatcagcgattcattcggtggaccgctcagcctgcttaccctgctgaaggagga

SEQ ID NO: 16138 - DNA, 75 bp, synthetic construct
  source 1..75: mol_type = other DNA
acccgtgtccggcgcacgcactccacctcacccgtggagaactccttaattaccaaccttagcttcgttggttag

SEQ ID NO: 16139 - DNA, 75 bp, synthetic construct
  source 1..75: mol_type = other DNA
actggcaggactgctggttgcgaccttgctgtcggggatctttttgattctgatggggctggcacgctttggtcg

SEQ ID NO: 16140 - DNA, 75 bp, synthetic construct
  source 1..75: mol_type = other DNA
atgtcggactgtcaccctgttttattgcccgaaggccctttctcacgcaaacaggcaatggctgccacaacagct

SEQ ID NO: 16141 - DNA, 75 bp, synthetic construct
  source 1..75: mol_type = other DNA
gcaccgaccggctccgggaaaacgctggcagcatttctctacgccctcgatcggctcttccgcgaaggcggcgaa

SEQ ID NO: 16142 - DNA, 75 bp, synthetic construct
  source 1..75: mol_type = other DNA
aatgtggattacgtcaccagttttgaactgccttttcgcttgttgcttacccgtacaccacaactgattgccgcg

SEQ ID NO: 16143 - DNA, 75 bp, synthetic construct
  source 1..75: mol_type = other DNA
ttatccgcctgccggggcagcagtatgatgaggagtccggcctgtattacaaccgccaccgctattatgacccgc

SEQ ID NO: 16144 - DNA, 75 bp, synthetic construct
  source 1..75: mol_type = other DNA
cggccttccgggctgcttcaggtgaagtggatctcagtgtgctgcatctcatcacgctgggatttctgctggcag

SEQ ID NO: 16145 - DNA, 75 bp, synthetic construct
  source 1..75: mol_type = other DNA
atgagcgataagcagactgaaaagactattcaactggatacccctatcaagcgcggtaaaacggaaatcaccgaa

SEQ ID NO: 16146 - DNA, 75 bp, synthetic construct
  source 1..75: mol_type = other DNA
gtggctaacgataccactccttatcttatggtgctgctacttaataacgatgtctggtgtaagagtcgtgaggtg

SEQ ID NO: 16147 - DNA, 75 bp, synthetic construct
  source 1..75: mol_type = other DNA
gcggcagagaatgccaggtacgtatttacggcgtatgcaatggtaatcctgaaactacagttctggcacattacc

SEQ ID NO: 16148 - DNA, 75 bp, synthetic construct
  source 1..75: mol_type = other DNA
ggatgcagacagtaatctgcagagtctgtgctggccctgccataaagcaaaaactgcgcgcgaacgtatcaactg

SEQ ID NO: 16149 - DNA, 75 bp, synthetic construct
  source 1..75: mol_type = other DNA
aaaaccacgaacgccacgctccgctctgtctcctatcagaacgaactgctgctggagcaggctgtaaggaaaaaa

SEQ ID NO: 16150 - DNA, 75 bp, synthetic construct
  source 1..75: mol_type = other DNA
ccgtcaccaccgccgacattctgacaccacgacgccgggaggattacggtaaggacctgtggagtgcttatcaga

SEQ ID NO: 16151 - DNA, 75 bp, synthetic construct
  source 1..75: mol_type = other DNA
gtgtaaataagaaaaaagttttcagtaccgcaccgctttacctgagggatgatctgaaaggatatctgtatatta

SEQ ID NO: 16152 - DNA, 75 bp, synthetic construct
  source 1..75: mol_type = other DNA
gaactgtatgacgcagatgtttcaccggcactgatatcaaaggttaccgatgccgtgatggagcaggttgtagaa

SEQ ID NO: 16153 - DNA, 75 bp, synthetic construct
  source 1..75: mol_type = other DNA
aacagaaaaggcagcacgttgctgcctggcgcgccagtggtcttacacgtcagcaatactgtgaactcaacgata

SEQ ID NO: 16154 - DNA, 75 bp, synthetic construct
  source 1..75: mol_type = other DNA
gcagcatcactcggaagccttcgctgcaagaaggcagatgaatgcagtggaagtatttgcctgccaaacgtagcc

SEQ ID NO: 16155 - DNA, 75 bp, synthetic construct
  source 1..75: mol_type = other DNA
ctttcagcgccgttgacaggctgacccggcctgccgaaaacgcccgccgcctgatggggcagtttggtgactcca

SEQ ID NO: 16156 - DNA, 75 bp, synthetic construct
  source 1..75: mol_type = other DNA
gaaaaaatgttgcctgggtacagtcggaggtcagtgcatggatggcggcgcgaattgcagcccgcgagcaaggag

SEQ ID NO: 16157 - DNA, 75 bp, synthetic construct
  source 1..75: mol_type = other DNA
acaccgttcgtcggcgtgccggtgggtattttcgtcggcatttatgtctttgccaaagtggtacgtctgatttca

SEQ ID NO: 16158 - DNA, 75 bp, synthetic construct
  source 1..75: mol_type = other DNA
cgaacggacgcggcgatattgcacaggatggcattgatatgctgaccgacgacagcctgacaaccgatgtgacaa

SEQ ID NO: 16159 - DNA, 75 bp, synthetic construct
  source 1..75: mol_type = other DNA
atgctgcgaaccagatacgccgtgaccgtccactgacacatgaagagctgatgcaccatgtgccggggattttcg

SEQ ID NO: 16160 - DNA, 75 bp, synthetic construct
  source 1..75: mol_type = other DNA
tttcttgcatccggtatcgcatggccattgcccgattcagtttcattcgctcaacttgacgccatcctttatgcc

SEQ ID NO: 16161 - DNA, 75 bp, synthetic construct
  source 1..75: mol_type = other DNA
taccgctgaacctgaaatccgtcagtgattccggggaatttgaaggttacggttctgtttttggtgttaaggaca

SEQ ID NO: 16162 - DNA, 75 bp, synthetic construct
  source 1..75: mol_type = other DNA
tggtgagcatgctttaatcactgtacctcatctagccaatcaaaggtttacatgtttggctttaaaagagtctta

SEQ ID NO: 16163 - DNA, 75 bp, synthetic construct
  source 1..75: mol_type = other DNA
ggatgcgtctgtggtcagtctctgggggaagtgcgtgttccgcaccggggaaatgtggtggagaaagttattgaa

SEQ ID NO: 16164 - DNA, 75 bp, synthetic construct
  source 1..75: mol_type = other DNA
tttcagaatttgaaacaatcgaacaagaaaacagctataacgaatggttacgcaccaaagtggcagcaagcctcg

SEQ ID NO: 16165 - DNA, 75 bp, synthetic construct
  source 1..75: mol_type = other DNA
cagcctgagcaatagcgaaaaacgtttaaccgaactcgaaaccgcatttgcgcagtttaagcaggatgtgacccg

SEQ ID NO: 16166 - DNA, 75 bp, synthetic construct
  source 1..75: mol_type = other DNA
gtgtacagggaaatcattaccccgtttctggcccggagattttttcccggtattctacgcctgtcatcttactgt

SEQ ID NO: 16167 - DNA, 75 bp, synthetic construct
  source 1..75: mol_type = other DNA
ggcatctctggcgtaacggcggcctgcagccgcccggcgaacatgaaacatcgctacttcccgtgacgttaactc

SEQ ID NO: 16168 - DNA, 75 bp, synthetic construct
  source 1..75: mol_type = other DNA
cacctgcagctgaacaacctgcgcaacaaccttactacgctcctgcggcggaacaacctgttcagcaaccgtatt

SEQ ID NO: 16169 - DNA, 75 bp, synthetic construct
  source 1..75: mol_type = other DNA
gctgaatttattgctgcctttaatccaaaggttgctttggcactactggatgaacgggaaaggaaccagcaatac

SEQ ID NO: 16170 - DNA, 75 bp, synthetic construct
  source 1..75: mol_type = other DNA
cgtcccggaatgcgtcacccgccgtcaggaggtggttaatcaggcccgcaccctgctgaaaaacaacacacacga

SEQ ID NO: 16171 - DNA, 75 bp, synthetic construct
  source 1..75: mol_type = other DNA
atgagcaccatcctgaaatgggcaggaaataaaaccgccataatgtccgaactgaaaaagcatcttcctgctggc

SEQ ID NO: 16172 - DNA, 75 bp, synthetic construct
  source 1..75: mol_type = other DNA
gggcggcatttgatccttacaccagtctgaatacggcagcggtcattctgcaggaatgccggcgtcgccatccgg

SEQ ID NO: 16173 - DNA, 75 bp, synthetic construct
  source 1..75: mol_type = other DNA
ccggatgagatgaaactctcccgttccggtctgaaccgttacgcgacgaacgtcgagcaggtaggccataacctg

SEQ ID NO: 16174 - DNA, 75 bp, synthetic construct
  source 1..75: mol_type = other DNA
gcagcggcaaactttgccacgctgacagaacgggagattgccgaagcggaacaggtgacaaccatcaacgttaaa

SEQ ID NO: 16175 - DNA, 75 bp, synthetic construct
  source 1..75: mol_type = other DNA
gcggtactggacagcgtcgctgggaaggattaccggacgatgtcagggataccatcaccgcacttttcaccgcaa

SEQ ID NO: 16176 - DNA, 75 bp, synthetic construct
  source 1..75: mol_type = other DNA
agcaaaaatccggaagccgcagctgcgcgacataatctggctactgttctgaagcggaacgccgatcggggcatg

SEQ ID NO: 16177 - DNA, 75 bp, synthetic construct
  source 1..75: mol_type = other DNA
aaccaaggttcgtctggagaaacattggcagtcattaatgagcatgattatccgatattagttcaggcagaggtg

SEQ ID NO: 16178 - DNA, 75 bp, synthetic construct
  source 1..75: mol_type = other DNA
caggatccgattggactgaaggggggatggaacctgtatggatatcaattgaatccgatatcagacatcgacccc

SEQ ID NO: 16179 - DNA, 75 bp, synthetic construct
  source 1..75: mol_type = other DNA
gacagaaatatttggtgtacagcctcagctgagcgcccggatagaactttcgggtggacacatcaccgatgtgaa

SEQ ID NO: 16180 - DNA, 75 bp, synthetic construct
  source 1..75: mol_type = other DNA
attgcatgaactggcggaacgttacggtatatccgcagagcgcgtgagacaacttgaaaataacgcgatgaaaaa

SEQ ID NO: 16181 - DNA, 75 bp, synthetic construct
  source 1..75: mol_type = other DNA
ctggcatcgtgcggcctgaccgtggagcagatgcaaaaccagatggacccggtgtacacgccggcgcgaaaaatc

SEQ ID NO: 16182 - DNA, 75 bp, synthetic construct
  source 1..75: mol_type = other DNA
taacgtatcaggcctgccgtggggattttgtggtgcgtctcgacggcagcacctgtctgcagttatggaataaag

SEQ ID NO: 16183 - DNA, 75 bp, synthetic construct
  source 1..75: mol_type = other DNA
atatcacggacatcaccacaccggacgggcgggagacgaaattttactataacgacgggaaccagctgacggcgg

SEQ ID NO: 16184 - DNA, 75 bp, synthetic construct
  source 1..75: mol_type = other DNA
gcacagagatacagggctaaatattcttgatattgccgctaactatgctgatttcgtgacagaggttattttaag

SEQ ID NO: 16185 - DNA, 75 bp, synthetic construct
  source 1..75: mol_type = other DNA
gattttcatcaccaggtcagatgtctggcgactcattaaaccgacagagaagacttattgctgaatggttaaagg

SEQ ID NO: 16186 - DNA, 75 bp, synthetic construct
  source 1..75: mol_type = other DNA
accggcagagcagtggcagtatgatggccacggctggctgacagacatcagccacctgagcgaaggccaccgtgt

SEQ ID NO: 16187 - DNA, 75 bp, synthetic construct
  source 1..75: mol_type = other DNA
ccgtatgttcagattaaacgagagtattgatcaagctctacaccatttcttaagcaaagaaggtggtaaaaatga

SEQ ID NO: 16188 - DNA, 75 bp, synthetic construct
  source 1..75: mol_type = other DNA
acgccgtggtgatggatgccgttaatgagcttatcgacgtggtctatcaggacgatgacgatctggtggtgattt

SEQ ID NO: 16189 - DNA, 75 bp, synthetic construct
  source 1..75: mol_type = other DNA
tgacgacggtacagaccgacaccacgcgtatccagacggtataccagccggggagcttcgcgccgctcatccgca

SEQ ID NO: 16190 - DNA, 75 bp, synthetic construct
  source 1..75: mol_type = other DNA
ggaacggctgaatcccttgaactggggcggctggcgaatgtgaatccgcctgaattattgcgctacgatgcgcaa

SEQ ID NO: 16191 - DNA, 75 bp, synthetic construct
  source 1..75: mol_type = other DNA
gaactgaaggccctgggcgtggaaggagacacacctgaagataccctgcgcacactgattgggcgtatgaatcag

SEQ ID NO: 16192 - DNA, 75 bp, synthetic construct
  source 1..75: mol_type = other DNA
ttatgaagagcaaggccgccgtgtgcgttatgacttcgccctgccgggtgaagcaaacgaccacggggggcttga

SEQ ID NO: 16193 - DNA, 75 bp, synthetic construct
  source 1..75: mol_type = other DNA
tgagccttatatctctggtcagcgttattgcacgtgccggggaatataaaaattacagccgggatgaaataaaat

SEQ ID NO: 16194 - DNA, 75 bp, synthetic construct
  source 1..75: mol_type = other DNA
ggcaggggatagacaaggtcagccagctaaagaaagaatcatggatcttaaaaataacactgtcggtattgcttg

SEQ ID NO: 16195 - DNA, 75 bp, synthetic construct
  source 1..75: mol_type = other DNA
tacaggcactggatgcggtgatacgtgaacgaggatttgagcgcgcggcacaaaagctgtgcattacacaatcag

SEQ ID NO: 16196 - DNA, 75 bp, synthetic construct
  source 1..75: mol_type = other DNA
tgctgatgacattgcagggcgcttcaccgggacgtataccggagctgatgcacgatcttgcaagtatgggacaac

SEQ ID NO: 16197 - DNA, 75 bp, synthetic construct
  source 1..75: mol_type = other DNA
aaaccgatatccggcgtggaaggcattgtgttttcctgatgcatgttcacctggtctttgtcaccaaataccgac

SEQ ID NO: 16198 - DNA, 75 bp, synthetic construct
  source 1..75: mol_type = other DNA
ctgacgacggtacagaccgacaccacgcgtatccagacggtataccagccggggagcttcgcgccgctcatccgc

SEQ ID NO: 16199 - DNA, 75 bp, synthetic construct
  source 1..75: mol_type = other DNA
tttctgtaaatactcatcgagtgatatgtttggtacagagtatgattctcctgagattctacggagatatgcaaa

SEQ ID NO: 16200 - DNA, 75 bp, synthetic construct
  source 1..75: mol_type = other DNA
taccgtcagcccggataacggttttacaaccagtattgaactcgaagtgaagattgatgatcttgaaatggaata

SEQ ID NO: 16201 - DNA, 75 bp, synthetic construct
  source 1..75: mol_type = other DNA
ctctgcttgccgagcggattgagcaagggctgtatcgtcacggggagaaattgccgtcggtgcgcagcttaagtc

SEQ ID NO: 16202 - DNA, 75 bp, synthetic construct
  source 1..75: mol_type = other DNA
atccgttgaatccgatctcaaatatagatccattaggattagaaacactaaaatgcattaagccactgcattcaa

SEQ ID NO: 16203 - DNA, 75 bp, synthetic construct
  source 1..75: mol_type = other DNA
tttctgaatttgaaacagtcgaacaagaaaacagctataacgaatggttgcgaaccaaagtggcagcaagcctct

SEQ ID NO: 16204 - DNA, 75 bp, synthetic construct
  source 1..75: mol_type = other DNA
gggcggaagccttccgtaaacagcgcgtcacgtctttatcctcccctgccggtccccgttctgtttcctcttctc

SEQ ID NO: 16205 - DNA, 75 bp, synthetic construct
  source 1..75: mol_type = other DNA
gtgtggtcatgaaaacccgggagtggccggagcgtctgctggtctggtcacccggacagcgggatatcatcaaaa

SEQ ID NO: 16206 - DNA, 75 bp, synthetic construct
  source 1..75: mol_type = other DNA
ctctggataaaagttacgggaaatactatgggaggaggtcagaataatgtactggcaacaaatataactcatttt

SEQ ID NO: 16207 - DNA, 75 bp, synthetic construct
  source 1..75: mol_type = other DNA
ccctgacacgggctattgatattctcaatttgattgcccgcattggcccctgtagtgctgcgacgatcattgaca

SEQ ID NO: 16208 - DNA, 75 bp, synthetic construct
  source 1..75: mol_type = other DNA
ggatgtcgaaaacagctatctggcctcggatgcggtggatgacgacccgatgacacccctgctggggcactcgat

SEQ ID NO: 16209 - DNA, 75 bp, synthetic construct
  source 1..75: mol_type = other DNA
cctcgtctccagaagcaatgcaatcatggctgcaaaacaacgccaaggaactgactcgcgtcggtgttgacccta

SEQ ID NO: 16210 - DNA, 75 bp, synthetic construct
  source 1..75: mol_type = other DNA
ttaacccgaactacccgtagcgtggcccccacggaagcaggggagagaattattgcctgtcttgagccacgtata

SEQ ID NO: 16211 - DNA, 75 bp, synthetic construct
  source 1..75: mol_type = other DNA
gcgtacaaaaacagggagagtgagggcgtttattttgtgcccttcatgacagacggtaacggcgtcaataccgcc

SEQ ID NO: 16212 - DNA, 75 bp, synthetic construct
  source 1..75: mol_type = other DNA
aggtcagggtggctgatgaaccggcaacaccagcacaacggcgagcgtcgatgacatgggcgcaacggctcaagc

SEQ ID NO: 16213 - DNA, 75 bp, synthetic construct
  source 1..75: mol_type = other DNA
gccacctgagcgaaggccaccgtgtcgctgtccactacggctacgacgataagggccgcctgaccggcgaacggc

SEQ ID NO: 16214 - DNA, 75 bp, synthetic construct
  source 1..75: mol_type = other DNA
cccgcgttcaggcactgacgcgaatcgaccagaacagcccgcagtttaaggcgctgcgtgagcaggcgttaaaac

SEQ ID NO: 16215 - DNA, 75 bp, synthetic construct
  source 1..75: mol_type = other DNA
gtgtctatcaccatccgtaagccatcgaaggtacaaatcccgcatcagtcatacatcgatgcgggattttataac

SEQ ID NO: 16216 - DNA, 75 bp, synthetic construct
  source 1..75: mol_type = other DNA
cttataataatgctgaagggttagaaaaaactttaagtagtttatcaattttaaaaataaaaccttttgagatta

SEQ ID NO: 16217 - DNA, 75 bp, synthetic construct
  source 1..75: mol_type = other DNA
atagaacggattcggcagcactgttgccctgtatcgaacaggccagagaggatgtccgtaccctgcgtcatctgc

SEQ ID NO: 16218 - DNA, 75 bp, synthetic construct
  source 1..75: mol_type = other DNA
cctgaccagcaccggcagtattaaaagtggcagcacactcgatatcagcgtccgcaatgccacactgtccggtga

SEQ ID NO: 16219 - DNA, 75 bp, synthetic construct
  source 1..75: mol_type = other DNA
tgctgcagacctgacgctggatataccggacatccgcaacagcgggcttatcaccggtgataatggtttaatgtt

SEQ ID NO: 16220 - DNA, 75 bp, synthetic construct
  source 1..75: mol_type = other DNA
ttctggctgaaacagaccagcgttacttcgattccttaccatctgaggatgatcttaactggtatcgtaatgatg

SEQ ID NO: 16221 - DNA, 75 bp, synthetic construct
  source 1..75: mol_type = other DNA
atggcaaatctacctgaaaccccacagtgggaagacggcatctaccagattgaggtctctgaccccgttctgggc

SEQ ID NO: 16222 - DNA, 75 bp, synthetic construct
  source 1..75: mol_type = other DNA
gctcgtaacttcctggtaccgcagggtaaagctgttccagctaccaagaaaaacattgaattcttcgaagcacgt

SEQ ID NO: 16223 - DNA, 75 bp, synthetic construct
  source 1..75: mol_type = other DNA
cagaacgcgccactgccagcgccgtcagtccggcttataccgcagacgctgaccataccggtaacgcctcccccc

SEQ ID NO: 16224 - DNA, 75 bp, synthetic construct
  source 1..75: mol_type = other DNA
agcaatatcgcgaaatgctgatcgctgacggtattgacccgaacgaactgctgaatagccttgctgccgttaaat

SEQ ID NO: 16225 - DNA, 75 bp, synthetic construct
  source 1..75: mol_type = other DNA
caggcgaaaaaaaatccggtaccgcgatgaagtgactggaaaaatgataacgcgggataatccaccaatcccggg

SEQ ID NO: 16226 - DNA, 75 bp, synthetic construct
  source 1..75: mol_type = other DNA
ctggcgctggggaaataccctgaagtctcgctggtcgatgccagaggtcgccgggatgaagcccgtaagttgtta

SEQ ID NO: 16227 - DNA, 75 bp, synthetic construct
  source 1..75: mol_type = other DNA
gtggggatcacgatggggtgcacggccgtcgtgctgaccggttttgtggcgggtgtggcgatggtgtacaccggc

SEQ ID NO: 16228 - DNA, 75 bp, synthetic construct
  source 1..75: mol_type = other DNA
ctggggcgggtggagtgtatccgttgccagccacagagggtgggtctgaacagcagtgtggcggtgatgctggaa

SEQ ID NO: 16229 - DNA, 75 bp, synthetic construct
  source 1..75: mol_type = other DNA
tggtggaagaggtggcgcgtcacgctgaggaggcgaagaagaatgccggagaggcggagacgtcagcgaggaatg

SEQ ID NO: 16230 - DNA, 75 bp, synthetic construct
  source 1..75: mol_type = other DNA
gtatgcaaaagggctgacctgcgatgccgataccctgggcagttgtggttacgtgtatatcgccatttatccgac

SEQ ID NO: 16231 - DNA, 75 bp, synthetic construct
  source 1..75: mol_type = other DNA
acaccctacgcgccacgccagcagcagagcgccagaaaaaagaccggtcgtgttaagcgaaaaatgtttgcgaaa

SEQ ID NO: 16232 - DNA, 75 bp, synthetic construct
  source 1..75: mol_type = other DNA
agctgctcgacccgctggagattcgcgaccttcacaaactggtacgcgacacagacaaagttttccctaatcccg

SEQ ID NO: 16233 - DNA, 75 bp, synthetic construct
  source 1..75: mol_type = other DNA
aaaattctccagcaccccagatttagcaaatacacgttgtggtttatgaccgatcaggttgctcccgaagccggt

SEQ ID NO: 16234 - DNA, 75 bp, synthetic construct
  source 1..75: mol_type = other DNA
gtgtcagacacactccatgagacaaattatcccaacgacaatcacgaccgcccctggtggggactgccctgcacc

SEQ ID NO: 16235 - DNA, 75 bp, synthetic construct
  source 1..75: mol_type = other DNA
tggagtcattaaagacaaaaatgacctgcttaataatccctgcctgaatattcagaccggggcctggatactggc

SEQ ID NO: 16236 - DNA, 75 bp, synthetic construct
  source 1..75: mol_type = other DNA
aagaagatcacaatcccaccccgctcggggatgtcgctcaggcgctgatcaacgtggtggaagaaaacctgctgt

SEQ ID NO: 16237 - DNA, 75 bp, synthetic construct
  source 1..75: mol_type = other DNA
gtgcaaagtgggttaattgattataacccggcacaagagatggctggggcggttgcttcctgtaatcgacaacat

SEQ ID NO: 16238 - DNA, 75 bp, synthetic construct
  source 1..75: mol_type = other DNA
tggtacaggaaggcaaccggttgcattaccttgccgaccgcgccggtatcagagggcggttcagcgacgcggatt

SEQ ID NO: 16239 - DNA, 75 bp, synthetic construct
  source 1..75: mol_type = other DNA
tagcagtgtgagaggggcgagccggatgagtaaggccggacatgtgtcgcttcgcagggcgttgtatatgcccgc

SEQ ID NO: 16240 - DNA, 75 bp, synthetic construct
  source 1..75: mol_type = other DNA
ccattttggtcatgatgaccgggcgcggctgttgcttgaggatcaactgaaacgtcacccaggagatgcccgact

SEQ ID NO: 16241 - DNA, 75 bp, synthetic construct
  source 1..75: mol_type = other DNA
ctgacatgctcgttgaggcatatgaaaatcagaccgaggtagccagaatactgaactgtagtcgcaacacggtca

SEQ ID NO: 16242 - DNA, 75 bp, synthetic construct
  source 1..75: mol_type = other DNA
ggcttccctgtcggcggtattacagaagcatgtgacggtggatgaggtacatccggttctgcaggcgatggtgga

SEQ ID NO: 16243 - DNA, 75 bp, synthetic construct
  source 1..75: mol_type = other DNA
ctggacgaccatcaatattgttgaagccgtggtcggggcagtgctgctacgtaaattgctgccgtggtataaccc

SEQ ID NO: 16244 - DNA, 75 bp, synthetic construct
  source 1..75: mol_type = other DNA
cgtggtttggcagaaaacatcgggacaacacgcttaccctgaaacgtttctcctccggtgtgggattctggtgtc

SEQ ID NO: 16245 - DNA, 75 bp, synthetic construct
  source 1..75: mol_type = other DNA
tagcgacgtcatcgaaatcgacaccgtcaacatggtcgagaaggtgaacggcgtcgaccgtctggaacagcaccg

SEQ ID NO: 16246 - DNA, 75 bp, synthetic construct
  source 1..75: mol_type = other DNA
tgaacacactcacccacacggcagagcacgaggtgccgtaccgggtggaaaccactgcagaaggcggcctgaaca

SEQ ID NO: 16247 - DNA, 75 bp, synthetic construct
  source 1..75: mol_type = other DNA
accacgaaggcgtcagaagctgccacctcagcccgggatgcggcggcctcaaaagaggcagcgaaatcatcagaa

SEQ ID NO: 16248 - DNA, 75 bp, synthetic construct
  source 1..75: mol_type = other DNA
acaactgcgtaacacgctgattcagagctctgaagatcataaacgcgatcagcaggcgcaggaacggcttaccgg

SEQ ID NO: 16249 - DNA, 75 bp, synthetic construct
  source 1..75: mol_type = other DNA
ttattcagcaatctttccgatcaggatggtggcgcaattgtcagccaactgacgcaaatgaatattccttaccgc

SEQ ID NO: 16250 - DNA, 75 bp, synthetic construct
  source 1..75: mol_type = other DNA
ggggctgaggcgcaggctgaaaaactggcggcgtttcccggaatgacggtggaggctgcccgcgacattctgtcc

SEQ ID NO: 16251 - DNA, 75 bp, synthetic construct
  source 1..75: mol_type = other DNA
tatgtcgcaggaggaatgggaagcgttgcctgcgcttttatccggatttacagcagggaaagcatccagtgcgca

SEQ ID NO: 16252 - DNA, 75 bp, synthetic construct
  source 1..75: mol_type = other DNA
gcatttctgaatcagtgttcaacggctgatcctgctgctatatcgaaaatcatgagtaagtttggtcgtgtcaga

SEQ ID NO: 16253 - DNA, 75 bp, synthetic construct
  source 1..75: mol_type = other DNA
agataagcggtacaaagtccgaaaggccgggactgaaaaaactgctcaggacattatcggcaggtgacactctgg

SEQ ID NO: 16254 - DNA, 75 bp, synthetic construct
  source 1..75: mol_type = other DNA
atttctggcgacacatcctgcaccggggacatcagcgggtactgtttgtggtgacgcaggccgacaaaacggagc

SEQ ID NO: 16255 - DNA, 75 bp, synthetic construct
  source 1..75: mol_type = other DNA
tatgagtacccggtggtatcttgatggtgataaaagttttggctttgccctgggggcagtaaaaataaaacccag

SEQ ID NO: 16256 - DNA, 75 bp, synthetic construct
  source 1..75: mol_type = other DNA
aaaacagaactaagccacgtattaaaaagacattagaacagcagttggcttcagctcagatgcgtttaaatcgct

SEQ ID NO: 16257 - DNA, 75 bp, synthetic construct
  source 1..75: mol_type = other DNA
aaatttaatcagtatcgctacatcagattcctgaacaagcgagcaaggaagcggctaaataccaaactattcagg

SEQ ID NO: 16258 - DNA, 75 bp, synthetic construct
  source 1..75: mol_type = other DNA
tggatggttttctgaaaggtaaatgcttcccacgagatttaaaggttaacgaaacaaacgctgaatatctggtgc

SEQ ID NO: 16259 - DNA, 75 bp, synthetic construct
  source 1..75: mol_type = other DNA
atgccgctgctggataagctgcgtgagcagtacggggtcggaccggtatgcagtgaactgcatattgccccgtca

SEQ ID NO: 16260 - DNA, 75 bp, synthetic construct
  source 1..75: mol_type = other DNA
gcactggagcaggcgttgtgggcccgtcggccgtccggcacagtccatcacagtgataaaggttctcagtatgta

SEQ ID NO: 16261 - DNA, 75 bp, synthetic construct
  source 1..75: mol_type = other DNA
cagtaacctgcgctctgctgataagtttttccgcccatgccgctaacgccgacaattataaaaacgtgattaacc

SEQ ID NO: 16262 - DNA, 75 bp, synthetic construct
  source 1..75: mol_type = other DNA
acagtgttcaggattaccggcgtgatgaagtgacaccgggggatgtcagggtgaccaccactgccagtgatggtc

SEQ ID NO: 16263 - DNA, 75 bp, synthetic construct
  source 1..75: mol_type = other DNA
ggtcgtatattggcggcggtaagacgggaaatatgttcaaccaattactgacctctaaaaagctgacaaaaacgg

SEQ ID NO: 16264 - DNA, 75 bp, synthetic construct
  source 1..75: mol_type = other DNA
gctgacaaaagaacagcatgagcaaatagcaaggctgatcaaaaacgggcacgacagaaaacaactggcaataat

SEQ ID NO: 16265 - DNA, 75 bp, synthetic construct
  source 1..75: mol_type = other DNA
atgattgtcgccctgatcgtcatctgtatcaccgccgtagtggcggcgctggtaacgagaaaagacctctgtgag

SEQ ID NO: 16266 - DNA, 75 bp, synthetic construct
  source 1..75: mol_type = other DNA
atgcatgacaacatcaggttagcctcttatgtgccgaaaggcaaggagaagcaggctatgaagcagcaaaaggcg

SEQ ID NO: 16267 - DNA, 75 bp, synthetic construct
  source 1..75: mol_type = other DNA
atgcttattggctatgtacgcgtgtcaacaaatgaccagaacaccgatttgcaacgtagtgcgctgaactgcgcg

SEQ ID NO: 16268 - DNA, 75 bp, synthetic construct
  source 1..75: mol_type = other DNA
atgctttccagaggtgacaccctggtcgtatggaagttagatcgtcttgggcgcagcatgcgtcacttggttgtg

SEQ ID NO: 16269 - DNA, 75 bp, synthetic construct
  source 1..75: mol_type = other DNA
gcggtatgaatacaacgccgccggtgacctgaccgccgtcattgccccggacggcagcagaaacgggacacagta

SEQ ID NO: 16270 - DNA, 75 bp, synthetic construct
  source 1..75: mol_type = other DNA
ttttatgaaaatcgctcaacgatcaccgatgtggagaaactggaaacgccaatgagtttcagatggcttgctggc

SEQ ID NO: 16271 - DNA, 75 bp, synthetic construct
  source 1..75: mol_type = other DNA
atgaaactggccctgacactggaagccgacagcattaacgtgcaggcactgaacatggggcgcattgtcgttgac

SEQ ID NO: 16272 - DNA, 75 bp, synthetic construct
  source 1..75: mol_type = other DNA
aatcgtgaacagagcatggtagtcgttcaggcacctacgctaagccagaaagattcctcggtatcgttaagtacc

SEQ ID NO: 16273 - DNA, 75 bp, synthetic construct
  source 1..75: mol_type = other DNA
aaattgaaagcacgacgcaaatagacattatccgccaggcttatcttgctcgcttaccgttatgtcatcccgaaa

SEQ ID NO: 16274 - DNA, 75 bp, synthetic construct
  source 1..75: mol_type = other DNA
gtattggtttgttgtgcaactatactatcattggctatgatagtatttatcttttttataacctctttttttata

SEQ ID NO: 16275 - DNA, 75 bp, synthetic construct
  source 1..75: mol_type = other DNA
cggtaactgggttactgatatgttgtgttggtagcggctttgcagttgcagcgagtaagtcagtaagtatgaatt

SEQ ID NO: 16276 - DNA, 75 bp, synthetic construct
  source 1..75: mol_type = other DNA
aggtataaaagttaatttccgtggaacctccgtcacgctaagcagcaccagcgttgaaacggatgatcaggtttt

SEQ ID NO: 16277 - DNA, 75 bp, synthetic construct
  source 1..75: mol_type = other DNA
aacagcgaaaacgaagatacctcctatgctcgtttcggtgttaaaggtgaaacccaaatcaccagcgaactgact

SEQ ID NO: 16278 - DNA, 75 bp, synthetic construct
  source 1..75: mol_type = other DNA
aaattaaaacaggtgaatatctcagcaaagggcttacagaggcagggttcgtagtggatcacgctgataatggtc

SEQ ID NO: 16279 - DNA, 75 bp, synthetic construct
  source 1..75: mol_type = other DNA
tacgtcttcgcagggaagggcatattaacgggcaggaagttcctgaaattatcctgcttaattcacatgatggtt

SEQ ID NO: 16280 - DNA, 75 bp, synthetic construct
  source 1..75: mol_type = other DNA
aagttcagcccggtcagctaccgcgcacacggcctgcctgtgtcagaaaatctgttggagcaggatttttacgcc

SEQ ID NO: 16281 - DNA, 75 bp, synthetic construct
  source 1..75: mol_type = other DNA
ggatccggtgctaccgccacagcgtcgccagcttttgctgacggtgggcgaggtgcgggtacaagtaacgcagcc

SEQ ID NO: 16282 - DNA, 75 bp, synthetic construct
  source 1..75: mol_type = other DNA
ggttggggatatctgaatttatgttacatgcccccatgcgtatggcttttgttacagagaaaaaaatgttgcaaa

SEQ ID NO: 16283 - DNA, 75 bp, synthetic construct
  source 1..75: mol_type = other DNA
ccgtgaaaaatctgtggatgtggtctgctatgacgaactctcctcgtttgaaccggatgtggaaaaagaaggttc

SEQ ID NO: 16284 - DNA, 75 bp, synthetic construct
  source 1..75: mol_type = other DNA
gtccataacagtattatcgatagtaatcctgcacaggacttagcaggtgccattgcaacagcaaaacgagtccat

SEQ ID NO: 16285 - DNA, 75 bp, synthetic construct
  source 1..75: mol_type = other DNA
acagtggtgggctgattttctggatgcgaaccgggagaagggtatcagtccgtttgactatgcaaaaattaacaa

SEQ ID NO: 16286 - DNA, 75 bp, synthetic construct
  source 1..75: mol_type = other DNA
atgaatccatcaatcgttaaacgctgccttgtcggggccgtgctggctattgctgccacgctgccgggttttcag

SEQ ID NO: 16287 - DNA, 75 bp, synthetic construct
  source 1..75: mol_type = other DNA
ggtgtatgacatggcccgcaagggggcgcaggatgagattcaggcgcagatgcgtgatggcggcgtcttttccgg

SEQ ID NO: 16288 - DNA, 75 bp, synthetic construct
  source 1..75: mol_type = other DNA
ccaccggtcttattaactgtattgcgttttcagcacaggcagtggatagtactattaccatcactggtaatgttc

SEQ ID NO: 16289 - DNA, 75 bp, synthetic construct
  source 1..75: mol_type = other DNA
tgaaatcgcctgatggtcaggttgtatcagatgcgaacattacgctgacggcgctgactgtttcaccggatgcac

SEQ ID NO: 16290 - DNA, 75 bp, synthetic construct
  source 1..75: mol_type = other DNA
tcgctggcctacacgcagcggcttaaggaagccggattactggcatcaacagggagtactggcgactcgtatgac

SEQ ID NO: 16291 - DNA, 75 bp, synthetic construct
  source 1..75: mol_type = other DNA
aagccatcacgctgaaaatcgacccgtctgtggttctggcaacccgcaaatatgtggatgataaaatctcagagc

SEQ ID NO: 16292 - DNA, 75 bp, synthetic construct
  source 1..75: mol_type = other DNA
atgactaagaaaataaaatgtgcttaccacctttgcaataaaggaattgaagaaagcaaaagcattaaaagacca

SEQ ID NO: 16293 - DNA, 75 bp, synthetic construct
  source 1..75: mol_type = other DNA
cgcctgtttgaactgtaccagtttgacagaaaggtccttcttcagcttaaggcgattaatgccctgaagcgacgg

SEQ ID NO: 16294 - DNA, 75 bp, synthetic construct
  source 1..75: mol_type = other DNA
cccgccatcagcataccgtcacgctgtatgcaaaaggtctgacctgcaaagctgacactctcggtagcggtggtt

SEQ ID NO: 16295 - DNA, 75 bp, synthetic construct
  source 1..75: mol_type = other DNA
tgacattaaattcggatcaaagcgcagtatatacattgacagacggaactaataatattccgttccaggctcgct

SEQ ID NO: 16296 - DNA, 75 bp, synthetic construct
  source 1..75: mol_type = other DNA
atgcgtgatatttaccacgaaacaatagaccgcgcatttagtgcccttgcttacgctgaaggtatgtacgaaata

SEQ ID NO: 16297 - DNA, 75 bp, synthetic construct
  source 1..75: mol_type = other DNA
gcttaaccgtgcgatcaatgatgctgagttggtactggggacaacccgccgtcgccgtcgtccgctgggagtgag

SEQ ID NO: 16298 - DNA, 75 bp, synthetic construct
  source 1..75: mol_type = other DNA
tactgtcccggaaatacccggagctggtaataccggatgaactggcagtggaaggaaacagcaaacgggactgga

SEQ ID NO: 16299 - DNA, 75 bp, synthetic construct
  source 1..75: mol_type = other DNA
agattgttgatgaaatctgcgattttgtggtgaatcagcaggcggttttcctcggcggtcactacatcttacagg

SEQ ID NO: 16300 - DNA, 75 bp, synthetic construct
  source 1..75: mol_type = other DNA
atgaatatcagcacagaaacccgcgaaattctgcgtaattacaaagccgtgattaatgcgcggcgtcgtgaaatg

SEQ ID NO: 16301 - DNA, 75 bp, synthetic construct
  source 1..75: mol_type = other DNA
caaactcggccgcagctcccgctggctgaaaagtgaagtggaagcctggctacaggcgcgtattgcacagtcccg

SEQ ID NO: 16302 - DNA, 75 bp, synthetic construct
  source 1..75: mol_type = other DNA
gccaataaacgattcatagccgccgccaatcctgccaccgtcttggcgctgctggatgagctggaagcagcagag

SEQ ID NO: 16303 - DNA, 75 bp, synthetic construct
  source 1..75: mol_type = other DNA
ctgttagccatctgtattcagcatgagatggatcacctggtcggcaaactgtttatggattatctgtcaccgttg

SEQ ID NO: 16304 - DNA, 75 bp, synthetic construct
  source 1..75: mol_type = other DNA
agattgttgatgaaatctgtgattttgtggcgaatcagcaggcggttttcctcggtggtcactatatccttcagg

SEQ ID NO: 16305 - DNA, 75 bp, synthetic construct
  source 1..75: mol_type = other DNA
gcctgaaaggcgtgaagcgtatctccctcgacgaagcgatggcatccggtcatgtgaaagagcaggatctggtgc

SEQ ID NO: 16306 - DNA, 75 bp, synthetic construct
  source 1..75: mol_type = other DNA
aatcctgtatgcagtaatcatttctccatatttatggcgagacaaaacactattgctcgcaacctggaacagcag

SEQ ID NO: 16307 - DNA, 75 bp, synthetic construct
  source 1..75: mol_type = other DNA
gggagagctgagggaatttgaactggcagacggaaactggttactgaacaatgcctggtatgaaagaaacatggc

SEQ ID NO: 16308 - DNA, 75 bp, synthetic construct
  source 1..75: mol_type = other DNA
aaaccatattgtcgacagagtccgtctgaaaaacgcacggatcctcggtgataataatgccagaaatggagcaga

SEQ ID NO: 16309 - DNA, 75 bp, synthetic construct
  source 1..75: mol_type = other DNA
ttgttacttgcccagggcgtaatttcgttacgcttaaaataaccactgaaagcggactttgtggattaggagatg

SEQ ID NO: 16310 - DNA, 75 bp, synthetic construct
  source 1..75: mol_type = other DNA
ctgtccaggctggaccgctggctgccccggccacaggacgtctccatgaacggcagtgatccggtcaccgagttt

SEQ ID NO: 16311 - DNA, 75 bp, synthetic construct
  source 1..75: mol_type = other DNA
ttctttgttgtcttcccgctgatctctatccgcttcgttgatcaaatgggctgggccgccgtcatggtcggtatt

SEQ ID NO: 16312 - DNA, 75 bp, synthetic construct
  source 1..75: mol_type = other DNA
gatgctggaaaaacaccgccatattgttgttgccaatgatggttacgacacaaaagatgaatgggaactggctac

SEQ ID NO: 16313 - DNA, 75 bp, synthetic construct
  source 1..75: mol_type = other DNA
accggtttctcaatcaccttactgaaagttgatgacgaaacgctggcactctgggacgcccctgtccacaccccg

SEQ ID NO: 16314 - DNA, 75 bp, synthetic construct
  source 1..75: mol_type = other DNA
gacgttggaggcgccaggcgaaccggaaacgccggaagcaatacagcaagagctgctgcaacgcattgacaaggt

SEQ ID NO: 16315 - DNA, 75 bp, synthetic construct
  source 1..75: mol_type = other DNA
acttccgtatgcctatggaagtaagggagaaattaaaattcagggcggaggcgaatgggagatcaatgaactccg

SEQ ID NO: 16316 - DNA, 75 bp, synthetic construct
  source 1..75: mol_type = other DNA
ccattcatcagtggggcggtacacccgatatggcaccccgcccggcaggcgttcctgcgcgtccttatatggggc

SEQ ID NO: 16317 - DNA, 75 bp, synthetic construct
  source 1..75: mol_type = other DNA
aaatcgctcgccaggttcacgaatcaatgcctaaaggaatcagggagttcggggaagatgtggagaaaaaaatcc

SEQ ID NO: 16318 - DNA, 75 bp, synthetic construct
  source 1..75: mol_type = other DNA
cggaatgctggcggtctattacgcataacagcggttcggcacaccgctgtacatatcagccgcattatacataca

SEQ ID NO: 16319 - DNA, 75 bp, synthetic construct
  source 1..75: mol_type = other DNA
gtgtattgcgatccgccttatgacggtacgttttccggctatcacgctgacggctttactgaagatgaccagtat

SEQ ID NO: 16320 - DNA, 75 bp, synthetic construct
  source 1..75: mol_type = other DNA
tttcggtgtacataagccccgacatcgtgaaggcgctcaaggaacgccaccagcagaacgtaaaagcaggcattg

SEQ ID NO: 16321 - DNA, 75 bp, synthetic construct
  source 1..75: mol_type = other DNA
gttaccgcgaactgtataaaccagatgaaaaaccgttagcgattatggttccggcgtggaatgaaacgggcgtca

SEQ ID NO: 16322 - DNA, 75 bp, synthetic construct
  source 1..75: mol_type = other DNA
tcaatatcgttggttcacaaaagaaactgggcgctgcttgcgaagtttcacagcaggccgtctataagtggcttc

SEQ ID NO: 16323 - DNA, 75 bp, synthetic construct
  source 1..75: mol_type = other DNA
aggtgtgaaagcgggcagcacctcgattgtggggatgactgcgggtggtgcgcaggttgctgtggccggtattac

SEQ ID NO: 16324 - DNA, 75 bp, synthetic construct
  source 1..75: mol_type = other DNA
cagcgccaaaatataaagcgttagacatgacagagcacgctttaaaggtggcaatcagaacgatagaccgccacg

SEQ ID NO: 16325 - DNA, 75 bp, synthetic construct
  source 1..75: mol_type = other DNA
gccatcaacaagtggaacggtacactgccgcaatacatgaccagtggtgccaatacaccatttatccagattaaa

SEQ ID NO: 16326 - DNA, 75 bp, synthetic construct
  source 1..75: mol_type = other DNA
aagttcatggtcacaagcccggactttatcagcattgacggcgtgccctacctgtcagcccgtgacacccgcgat

SEQ ID NO: 16327 - DNA, 75 bp, synthetic construct
  source 1..75: mol_type = other DNA
ccattataccagcttataacgaaggcccgtgtctggcgcagtcactggataatctgctgcgtaacccttattttt

SEQ ID NO: 16328 - DNA, 75 bp, synthetic construct
  source 1..75: mol_type = other DNA
ggctgccggacgtggtgttgtatcgccggaaaatatcgcgttcacccgctggctgacacacctgcagaacggtgt

SEQ ID NO: 16329 - DNA, 75 bp, synthetic construct
  source 1..75: mol_type = other DNA
gcgctttacgtctcgccgattgtctccggcaaagtgatccgctcccgtggcggcagcacgtctgaattcacgccg

SEQ ID NO: 16330 - DNA, 75 bp, synthetic construct
  source 1..75: mol_type = other DNA
aacagcgccatacagaactgggtggcatcacgtgccgccacgctggggcgcgatattgtccccagccagattatc

SEQ ID NO: 16331 - DNA, 75 bp, synthetic construct
  source 1..75: mol_type = other DNA
atgagaaagtcaggccactcactgatacagtgcgggctaaaacaccagtgaaggtggattacaccattgaagcca

SEQ ID NO: 16332 - DNA, 75 bp, synthetic construct
  source 1..75: mol_type = other DNA
ggggtgagcgttgagaaatcatccagcagcttcctgatggttgtcggcgttatcaacaccgatggcaccatgacg

SEQ ID NO: 16333 - DNA, 75 bp, synthetic construct
  source 1..75: mol_type = other DNA
caataaaaatggccggcaggttatctggtcttcggggatggcacgggacaccctcatttacgccggtggtgacca

SEQ ID NO: 16334 - DNA, 75 bp, synthetic construct
  source 1..75: mol_type = other DNA
atgagcaccatcctgaaatgggcgggtaataaaactgccattatgtccgaactgaaaaaacatcttcctgctggc

SEQ ID NO: 16335 - DNA, 75 bp, synthetic construct
  source 1..75: mol_type = other DNA
ggggcgaggaaccgcccctgaatggcaaatgaaacgggaaatgctttctcctgcgtataccaccagatggacaga

SEQ ID NO: 16336 - DNA, 75 bp, synthetic construct
  source 1..75: mol_type = other DNA
caacaagccggatgtgatgctgattgaaacctccggaagcagtcatccgcttcctctggtcaaatacctgcgtcg

SEQ ID NO: 16337 - DNA, 75 bp, synthetic construct
  source 1..75: mol_type = other DNA
tcagcgatcgccgacgcacggatgacggcaggggtggtaaacgctattgctgcatatcatctggaactgctgcag

SEQ ID NO: 16338 - DNA, 75 bp, synthetic construct
  source 1..75: mol_type = other DNA
ttattgaaaaagcaaatgcaatgactgtatttcagtctgccgaccagattgaagaaatccttcaaaaggttgaac

SEQ ID NO: 16339 - DNA, 75 bp, synthetic construct
  source 1..75: mol_type = other DNA
tgaacgtggctctcaggattcggactggtcccctctaaaagaagctgcccgcaaaattgcggctgcagaggacca

SEQ ID NO: 16340 - DNA, 75 bp, synthetic construct
  source 1..75: mol_type = other DNA
acagggctaaaagaaaaggatgttgacgtcgtcaataatatcatcagaataaaggactctcgtgaaggacttctt

SEQ ID NO: 16341 - DNA, 75 bp, synthetic construct
  source 1..75: mol_type = other DNA
atttagctaaaaatgtgttcgctgtgcatggcgttaatgctgcaggaaaagctgttttagttaagcctcttgtgc

SEQ ID NO: 16342 - DNA, 75 bp, synthetic construct
  source 1..75: mol_type = other DNA
gacccgttctgatgatacccatgaaaacgaggcaaacatgacgccggaagagatgaagaatgagctgcgttatct

SEQ ID NO: 16343 - DNA, 75 bp, synthetic construct
  source 1..75: mol_type = other DNA
gggaagcattatttcaaaatcgttggcgatgatctgaaaaatttgcgagtaacttttagttacctgcaaatttcc

SEQ ID NO: 16344 - DNA, 75 bp, synthetic construct
  source 1..75: mol_type = other DNA
ggtacaaatacccgttgacctactggctgaacattatcacgtcgatgggctgcctgcagggtggcgacctggata

SEQ ID NO: 16345 - DNA, 75 bp, synthetic construct
  source 1..75: mol_type = other DNA
ttgcgacggaggcaatccgctggcctgaaagtgtggatgaacacaaaaaggccaacgcctttgtcggcacagccc

SEQ ID NO: 16346 - DNA, 75 bp, synthetic construct
  source 1..75: mol_type = other DNA
cttcgggtgtgacgccagtagggatcactgaaggcccctatgagggcaaacctaacccccatgcctggatgtcgc

SEQ ID NO: 16347 - DNA, 75 bp, synthetic construct
  source 1..75: mol_type = other DNA
caccgctgcgttcggtcaaggttctggaccagttgcgtgagcgcatacgctacttgcattacagtttacgaaccg

SEQ ID NO: 16348 - DNA, 75 bp, synthetic construct
  source 1..75: mol_type = other DNA
tggaagaactggaaagtggctatgttccaccggaaaactgggagcggggtattaatgcgttttatacctcttatt

SEQ ID NO: 16349 - DNA, 75 bp, synthetic construct
  source 1..75: mol_type = other DNA
gccaaccctgctgggggataaacgtattgagggctctgtatggccaaaatccattcgcggctcgacgcctaaaat

SEQ ID NO: 16350 - DNA, 75 bp, synthetic construct
  source 1..75: mol_type = other DNA
aagaaatatgcaattgtgctgaagggaagatacctccttggagaagatacctatcaggtgaataccgcgtcacat

SEQ ID NO: 16351 - DNA, 75 bp, synthetic construct
  source 1..75: mol_type = other DNA
cccttgtcgtgaatggattcaccggagacggagctggcgaaaagcgcgtcgttctcatcacacctcacgtgcgtt

SEQ ID NO: 16352 - DNA, 75 bp, synthetic construct
  source 1..75: mol_type = other DNA
agccggatatggaggtgaactcgcagccgtcggtgcgtgaagtgcgttttggtgacgggtactcacagcgtatgg

SEQ ID NO: 16353 - DNA, 75 bp, synthetic construct
  source 1..75: mol_type = other DNA
cagaagataacggtggggttgggccagacggtgaatgtggggagcaaaaaggaaggtggtcatgaccagaaagtg

SEQ ID NO: 16354 - DNA, 75 bp, synthetic construct
  source 1..75: mol_type = other DNA
atgaagtcagcgagaagctggaatatattccggcacaggtcgtggtcaaccgctatatccgcccgcagtacagct

SEQ ID NO: 16355 - DNA, 75 bp, synthetic construct
  source 1..75: mol_type = other DNA
catggctggggcgtaaacatcgtgacaatactctcacgctgaaacgcttttcatcgggtgtgggcttctggtgcc

SEQ ID NO: 16356 - DNA, 75 bp, synthetic construct
  source 1..75: mol_type = other DNA
tgagggatgcagtaaaagatgatcctaacgaaagttatcttcatcttgatttctacgaccgctccaaactcatcc

SEQ ID NO: 16357 - DNA, 75 bp, synthetic construct
  source 1..75: mol_type = other DNA
atggctacgtggcaacagggtattaattctggtggttttctggctggaattggtgcgcaaaatgagaatgcgcca

SEQ ID NO: 16358 - DNA, 75 bp, synthetic construct
  source 1..75: mol_type = other DNA
cagttgggaatgattttcaactatatgaaatcgctggatccgcaatctgtggtacgcgaaggtgagcaagtgcag

SEQ ID NO: 16359 - DNA, 75 bp, synthetic construct
  source 1..75: mol_type = other DNA
gagattctctccccagcggactaactaagcaattgcaatccagaaaagccaagctgtatgaagatattcagcagc

SEQ ID NO: 16360 - DNA, 75 bp, synthetic construct
  source 1..75: mol_type = other DNA
ttcacgaactaacgaccagactctggaaagttttacaggcaccacgattttaaaacaaatcacgcccctgtctcc

SEQ ID NO: 16361 - DNA, 75 bp, synthetic construct
  source 1..75: mol_type = other DNA
gcgcaggccatgcgcgccgctcaggcgaagtgggataaactgcaacggggcgttgcggagttctccatcagcctg

SEQ ID NO: 16362 - DNA, 75 bp, synthetic construct
  source 1..75: mol_type = other DNA
attaatgctgagccgggattttatgatgtatttttgtcccgctcagggcatcctcctgtaaaggcgggggaaatt

SEQ ID NO: 16363 - DNA, 75 bp, synthetic construct
  source 1..75: mol_type = other DNA
gcccgaaagccgtatcacccggcatggcatacgacggcagaaaccagggcgatgaaggcgacgtcgatcgcatac

SEQ ID NO: 16364 - DNA, 75 bp, synthetic construct
  source 1..75: mol_type = other DNA
acgcatcagatgtttaccggatttataccgggataaaaagcagtaaaggtatccggattccggccacgaagaaat

SEQ ID NO: 16365 - DNA, 75 bp, synthetic construct
  source 1..75: mol_type = other DNA
ccgtgaaaaatcgtggcacaagaccactgtcggggaagtggtgaaggaaatagccgcgcgtcataagctgaagat

SEQ ID NO: 16366 - DNA, 75 bp, synthetic construct
  source 1..75: mol_type = other DNA
aaacctcttccggattacttctcccggcgacgccggagagttgcgattttctgcatcaaatcaaaataggtgagt

SEQ ID NO: 16367 - DNA, 75 bp, synthetic construct
  source 1..75: mol_type = other DNA
gatcagaaaaacggctggctgtttatctcgtcgaatgccgacacccatgcctccctgaagccggtgatctccatg

SEQ ID NO: 16368 - DNA, 75 bp, synthetic construct
  source 1..75: mol_type = other DNA
gcgacggcgaccgtcatcattttgcgattgctgaccgtggagcctataccggcgtaacggcaaagtggttacaca

SEQ ID NO: 16369 - DNA, 75 bp, synthetic construct
  source 1..75: mol_type = other DNA
caccagcacagtgaggagctcattgaatttgccattgattacctgaagaacaataaaaagcaggggctgatgaag

SEQ ID NO: 16370 - DNA, 75 bp, synthetic construct
  source 1..75: mol_type = other DNA
gatgaaccgtcaccggaaaagcgccccgtaattttagatgcgcaggatgtattgataacctacaaaggaaagcta

SEQ ID NO: 16371 - DNA, 75 bp, synthetic construct
  source 1..75: mol_type = other DNA
ccaggaacataaggcgctgttcgatgcgatacggcatcaggacggcgatgcggcagagcaggcggcgcttaccat

SEQ ID NO: 16372 - DNA, 75 bp, synthetic construct
  source 1..75: mol_type = other DNA
atgggtttaccgccgcttagcaaaattcctttcattttacgtccgcaggcgtggctgcatcgtcgccattacggc

SEQ ID NO: 16373 - DNA, 75 bp, synthetic construct
  source 1..75: mol_type = other DNA
cagttgctgttgcgctttgaagatattacccgtggtgaattgggtcgagtggagggtgaaacagaattccgaact

SEQ ID NO: 16374 - DNA, 75 bp, synthetic construct
  source 1..75: mol_type = other DNA
cgtttatccagaccggcagggatgtggtgaaccgggctgacagcattgtgggaaacaccgggcagcagtgcagtg

SEQ ID NO: 16375 - DNA, 75 bp, synthetic construct
  source 1..75: mol_type = other DNA
ccttcaatggcgccggggttcgcgataccgccaggacactgaaaattggcattaacaccgtcatccggactttaa

SEQ ID NO: 16376 - DNA, 75 bp, synthetic construct
  source 1..75: mol_type = other DNA
cgcctccaccggtggcagcgctggctcgacgacgattcgtcgtggccagatttctccgtggtggtgcatggcgat

SEQ ID NO: 16377 - DNA, 75 bp, synthetic construct
  source 1..75: mol_type = other DNA
tcgccaccggccggacaccgaacacgcgcagcctggcattggaagcggcgggggtagccgtcaatgcgcaggggg

SEQ ID NO: 16378 - DNA, 75 bp, synthetic construct
  source 1..75: mol_type = other DNA
ggaaggtagcggacggctcatcggcgtgcaggtcgtcgccccggaagccggcgaattgatccagacggctgttct

SEQ ID NO: 16379 - DNA, 75 bp, synthetic construct
  source 1..75: mol_type = other DNA
tcagctggcatggcatacgatggcagaaaccagggcgatgacggcgacatcgatcgcatactgaaaaccatctga

SEQ ID NO: 16380 - DNA, 75 bp, synthetic construct
  source 1..75: mol_type = other DNA
cgacgtacgtgtcggcaaatttgatgaactgcatcagcgctgtattgatcagcgtatcggtatcgatgtgcgtcc

SEQ ID NO: 16381 - DNA, 75 bp, synthetic construct
  source 1..75: mol_type = other DNA
cgctgttgcctttttaggtacggcgattgatgcgggtcataccaacgttctggctctgcagagttcagctgcggg

SEQ ID NO: 16382 - DNA, 75 bp, synthetic construct
  source 1..75: mol_type = other DNA
ccgtggagcagatgcaaaaccagatggacccggtgtacacgccggcgcgaaaaatccacctgtaccactgcgacc

SEQ ID NO: 16383 - DNA, 75 bp, synthetic construct
  source 1..75: mol_type = other DNA
tggatatccgggtaccggaccatctgataatcggtggcagccaggttttctcctttgcggaacacggtctgcttt

SEQ ID NO: 16384 - DNA, 75 bp, synthetic construct
  source 1..75: mol_type = other DNA
cgtgacatacatcggcatcgactcaactggcgtcggccacggggtttacgagaacgtgaaagcattctttcctgc

SEQ ID NO: 16385 - DNA, 75 bp, synthetic construct
  source 1..75: mol_type = other DNA
ttattaccgtctccgaagtggaatcgacaagataaccgcgcaggttaactacctgcaggaatacatcaggacgca

SEQ ID NO: 16386 - DNA, 75 bp, synthetic construct
  source 1..75: mol_type = other DNA
atatagtgattagaggaaagagaattgtcaaaaacaggctcgcatgcacttcaggagcaatgacagaaacaacct

SEQ ID NO: 16387 - DNA, 75 bp, synthetic construct
  source 1..75: mol_type = other DNA
accaaacattcggatgcgttcagtattgcgggtgataaagataccgccaaaatcgctgcgatgcagatcaccgcg

SEQ ID NO: 16388 - DNA, 75 bp, synthetic construct
  source 1..75: mol_type = other DNA
agcggcggacaaggataagcacgcgtcagcagttccgccaacactgcgacagcgttgtcctcgcggcttttaccc

SEQ ID NO: 16389 - DNA, 75 bp, synthetic construct
  source 1..75: mol_type = other DNA
ttgagcgttggggagcgtgggtggcaaataatcatgaggatgtcacatggccatcgattgctgctggctttaaag

SEQ ID NO: 16390 - DNA, 75 bp, synthetic construct
  source 1..75: mol_type = other DNA
acccgtccggtgaagtcacccccagtaaggcagaccgccttatcacggaacgtctggtacaggcgctggccctgg

SEQ ID NO: 16391 - DNA, 75 bp, synthetic construct
  source 1..75: mol_type = other DNA
cgatagtaaaacggtgaactttgttgctgatgttagcacggcgcaggtcgcggagctggtggtcattaaggatgg

SEQ ID NO: 16392 - DNA, 75 bp, synthetic construct
  source 1..75: mol_type = other DNA
tgcaacagtcactgaaagaccctgagcgggcttacaaaaacttcttccggcttcgtcaccacgctcaaacggtgt

SEQ ID NO: 16393 - DNA, 75 bp, synthetic construct
  source 1..75: mol_type = other DNA
gtgacggagttcagtcacagccaggaagcgaaactggcagaagcgcagcagaaggcgatgctgaaaggcgaggct

SEQ ID NO: 16394 - DNA, 75 bp, synthetic construct
  source 1..75: mol_type = other DNA
aacgttcagtaattttgaaagcctatgggactgagggtgacagactggtacgtgaaaaggaacgaaaagagatca

SEQ ID NO: 16395 - DNA, 75 bp, synthetic construct
  source 1..75: mol_type = other DNA
atcgggcaaatagaactactcaataagcagttgacggagagtgtcccatacatgccccatagagccagactctga

SEQ ID NO: 16396 - DNA, 75 bp, synthetic construct
  source 1..75: mol_type = other DNA
gtaaggcgaaaaagatagaattttcactgacccttgaacgctgtgatgaggatttgcgggagcgcctgcaatcct

SEQ ID NO: 16397 - DNA, 75 bp, synthetic construct
  source 1..75: mol_type = other DNA
tgttgaacttgtacgtctgagcggtcgcgagacgttacggcaactggaagccaagacaggtgcgacaagatatct

SEQ ID NO: 16398 - DNA, 75 bp, synthetic construct
  source 1..75: mol_type = other DNA
cgaagccactgaacaggccagcgcagcagcgaggtcagcttccgcagcgaagacatccgaaacgaacgcgaaagc

SEQ ID NO: 16399 - DNA, 75 bp, synthetic construct
  source 1..75: mol_type = other DNA
ggtgcgtatttcctccctggacagcagctggtcgctgttccggccggaaaaaatgccggtggcagacggcgagcg

SEQ ID NO: 16400 - DNA, 75 bp, synthetic construct
  source 1..75: mol_type = other DNA
aaagcggaagtacaaaactttctctgggctgatgtggtgatctggcagatgccaggctggtggatgggcgcgccg

SEQ ID NO: 16401 - DNA, 75 bp, synthetic construct
  source 1..75: mol_type = other DNA
gacaaataccgcgccctgtacctgagcaaaaacccgttatgcgtgcgttgtctggctaaggggatttatacgcca

SEQ ID NO: 16402 - DNA, 75 bp, synthetic construct
  source 1..75: mol_type = other DNA
ggcggggattcgttcgccctggtgaatctgaaaagccatgctatagggtattttcaggcataaaaaaagcggtcc

SEQ ID NO: 16403 - DNA, 75 bp, synthetic construct
  source 1..75: mol_type = other DNA
gcgcaatgacagactggttaagccgcttcggtaccgcaagaatcacgctgggcgtggatgaagattttagcctga

SEQ ID NO: 16404 - DNA, 75 bp, synthetic construct
  source 1..75: mol_type = other DNA
cttcaccgcgcttgagtccaacaagtacgagtgcgaccagattaactttgacttccatctgaaatataaaaccct

SEQ ID NO: 16405 - DNA, 75 bp, synthetic construct
  source 1..75: mol_type = other DNA
caacaagtcgtactcatggttcattctcaactataaaatcatgggacacaatgaattatattaaacatttaatca

SEQ ID NO: 16406 - DNA, 75 bp, synthetic construct
  source 1..75: mol_type = other DNA
tcacgttatagtgtctggtggcggagaaatttaccgagaaacattacccatggcctctacgctccacttatcgac

SEQ ID NO: 16407 - DNA, 75 bp, synthetic construct
  source 1..75: mol_type = other DNA
ctgatgttgccgctggtcgtaagcgcctgcgggtcaatgccagttgctccgcagccgtgcgtgaagccaccggac

SEQ ID NO: 16408 - DNA, 75 bp, synthetic construct
  source 1..75: mol_type = other DNA
ctggcgcaggcaaccatgatgaaatcgataaaagggattggcagtgtactgggatttgatctcagcagcctttcc

SEQ ID NO: 16409 - DNA, 75 bp, synthetic construct
  source 1..75: mol_type = other DNA
ttatcaccccggacggcaaccggagcgagacacagtacgatgcgtggggaaaggcggtcagcaccacgcagggcg

SEQ ID NO: 16410 - DNA, 75 bp, synthetic construct
  source 1..75: mol_type = other DNA
gcgtgaacgtactggcaaaagacggttcgatgaaaattcaggttggtgcgaatgacggccagactatcactattg

SEQ ID NO: 16411 - DNA, 75 bp, synthetic construct
  source 1..75: mol_type = other DNA
gcgccgctgccgccgtaccgggtgcttaccgggatggcggaccgcttcgggcggacgctgacgtaccggcgtgag

SEQ ID NO: 16412 - DNA, 75 bp, synthetic construct
  source 1..75: mol_type = other DNA
gtggtaattttaaagcaatagataaccacgggaaggaaataacaaacagaaaaggattacctaatgtctgcagag

SEQ ID NO: 16413 - DNA, 75 bp, synthetic construct
  source 1..75: mol_type = other DNA
tttgtcgttccgcaatatctgttctggtggctacagcgttatattcacccatagcattggcatcaactgttgagt

SEQ ID NO: 16414 - DNA, 75 bp, synthetic construct
  source 1..75: mol_type = other DNA
ttccagaaatcagagattcattcgacaaggttgcaaagcgcgttccggcattcaaaggaatcctcaacgaatggg

SEQ ID NO: 16415 - DNA, 75 bp, synthetic construct
  source 1..75: mol_type = other DNA
aatcacagctccgggtgattatcctgaaaatacaaccactatcgccccgttaacgccattcgataaatgggatgg

SEQ ID NO: 16416 - DNA, 75 bp, synthetic construct
  source 1..75: mol_type = other DNA
acccggaccatcacgtcggcaaacattgaccgactgcgttttaccttcggcgtgcaggcactggtggaaaccacc

SEQ ID NO: 16417 - DNA, 75 bp, synthetic construct
  source 1..75: mol_type = other DNA
taccgttttctgacgtccgcgaggagctgcctcgcggtacgtttgcttataccagtgttccgacgatgattattc

SEQ ID NO: 16418 - DNA, 75 bp, synthetic construct
  source 1..75: mol_type = other DNA
ccgatagattctacgcagcaggaaggcctgttctccgtgagaattggcgaatgtggcgtgagtttctggtgtaca

SEQ ID NO: 16419 - DNA, 75 bp, synthetic construct
  source 1..75: mol_type = other DNA
atggacccggtgtacacgccggcgcgaaaaatccacctgtaccactgcgaccatcgcggcctgccgctggcgctc

SEQ ID NO: 16420 - DNA, 75 bp, synthetic construct
  source 1..75: mol_type = other DNA
gcacgggacagtttataaacgcagccatgcgcggcgaaatcaaacgccgccagcgccgcaaggccaaagagcagg

SEQ ID NO: 16421 - DNA, 75 bp, synthetic construct
  source 1..75: mol_type = other DNA
ggaatgtgatggtgttcgctggatttataacacaacggaacaatggctggaacagttcccattctggtcagagtc

SEQ ID NO: 16422 - DNA, 75 bp, synthetic construct
  source 1..75: mol_type = other DNA
atgcaaaacagaaaatggattttgacctcgctggtaatgacttttttcggcatccccattctggcgcagtttttg

SEQ ID NO: 16423 - DNA, 75 bp, synthetic construct
  source 1..75: mol_type = other DNA
acaggtattcgccttggcggtctgtcatctgttcagacatggaatggtcccggctggtctgacaggtcaggttat

SEQ ID NO: 16424 - DNA, 75 bp, synthetic construct
  source 1..75: mol_type = other DNA
catcacagtgaaaccgtcatacatcgttacggtaccggcgcgatggtgttgtgctggcactgcgacaaccagctg

SEQ ID NO: 16425 - DNA, 75 bp, synthetic construct
  source 1..75: mol_type = other DNA
tcagggcggcgtcgccgtcagaccttgcgaaacgaataactcaaaaactgaaggaagggtggcagccttatggta

SEQ ID NO: 16426 - DNA, 75 bp, synthetic construct
  source 1..75: mol_type = other DNA
cgaattttcaggtactgcgtaaggtggcatcaggtatggcctcacagagtcacctgcgctcgacctatttctcca

SEQ ID NO: 16427 - DNA, 75 bp, synthetic construct
  source 1..75: mol_type = other DNA
cagatgaatttggcgttacagaacgtactttacagcgcgattttcatcagcgtctggttcacctggatttagagt

SEQ ID NO: 16428 - DNA, 75 bp, synthetic construct
  source 1..75: mol_type = other DNA
tggtggagccggaaccgaaaagcatgcgtaatctgccgtccggggtcgttcctgccgttcgccagccgctggcgg

SEQ ID NO: 16429 - DNA, 75 bp, synthetic construct
  source 1..75: mol_type = other DNA
ggtcgatttttagaaaggacagggaatagtgcagccgcacaaaattatctgattgcgcatgattaccggacaacg

SEQ ID NO: 16430 - DNA, 75 bp, synthetic construct
  source 1..75: mol_type = other DNA
gaggtgactgtccgtgatgttcagcgataccggcgttatgtcctgaaagagcagaagcgcagggaggtgacctgg

SEQ ID NO: 16431 - DNA, 75 bp, synthetic construct
  source 1..75: mol_type = other DNA
gtgaaaagtgcgcgccttgtgctggctgtcatcctgttgtttctggtagtggtggttgatttcaccggacgactg

SEQ ID NO: 16432 - DNA, 75 bp, synthetic construct
  source 1..75: mol_type = other DNA
gctcagtatctccagcgccagaaaccacaacgggaagagatgcctgtatacacgcgctgggtaaaaacgcagaaa

SEQ ID NO: 16433 - DNA, 75 bp, synthetic construct
  source 1..75: mol_type = other DNA
ccatgcgtattcaccaacaacatccgacatcccgtctttttccgttctgtaccggtaagtatcgctggcacggca

SEQ ID NO: 16434 - DNA, 75 bp, synthetic construct
  source 1..75: mol_type = other DNA
taatgaacacccgcaaggttcacactgatgacacaccggtaaaggtactggcaccgggtcagaaaaaggcgaaaa

SEQ ID NO: 16435 - DNA, 75 bp, synthetic construct
  source 1..75: mol_type = other DNA
ccgcttcggcctgtgcaccggagactggcctgcaacaactggttgccaccatagtccctgatgaacagcgcatca

SEQ ID NO: 16436 - DNA, 75 bp, synthetic construct
  source 1..75: mol_type = other DNA
cactcacccgtggagtcagataacgggagtgcctgctgcctcgctgacggcaaaaggcaccgtacaactgagcag

SEQ ID NO: 16437 - DNA, 75 bp, synthetic construct
  source 1..75: mol_type = other DNA
gcccgtgaagccctgattgacgccctgctaaccgggcgtaaccagattttcctttccgccagcaaggcacaggcc

SEQ ID NO: 16438 - DNA, 75 bp, synthetic construct
  source 1..75: mol_type = other DNA
ggcacgagaatggctgattctgaacatggcgggactggagcgtgaagagttccgggtgctgtatctgaataacca

SEQ ID NO: 16439 - DNA, 75 bp, synthetic construct
  source 1..75: mol_type = other DNA
gtggcgcatgtattcggtgaacgcacgttggccacgctggagcgtcttctgagcctgctgtcggcctttgaggtc

SEQ ID NO: 16440 - DNA, 75 bp, synthetic construct
  source 1..75: mol_type = other DNA
gctggcaacccttacagctattggtcgcgctattatcgctaagggcagtataaaagatgtcctcaattaccttgg

SEQ ID NO: 16441 - DNA, 75 bp, synthetic construct
  source 1..75: mol_type = other DNA
atttggaaacagaattatttgatggcaacactaacggtttcttcatggtatcaggccttgagaaagactgggatg

SEQ ID NO: 16442 - DNA, 75 bp, synthetic construct
  source 1..75: mol_type = other DNA
ggatctgaaacgaatggaaatctctgcaaatgcattcaatcgctatgaatccgttgcaagaacgatggttccgaa

SEQ ID NO: 16443 - DNA, 75 bp, synthetic construct
  source 1..75: mol_type = other DNA
aggttcccgtgtggatgcgacctctgttgccgttgctctgcaataccggtggtaatgatccggaggaactgctga

SEQ ID NO: 16444 - DNA, 75 bp, synthetic construct
  source 1..75: mol_type = other DNA
atgtggacgtctcctgggatgcgctgaatgtggcatacagtgaacaccctgagtggttttcagagcttgcctccg

SEQ ID NO: 16445 - DNA, 75 bp, synthetic construct
  source 1..75: mol_type = other DNA
atcaacactatcagcgtcaaacgtgtaccggacttgtgcagaaatcctccagcctgcctgcttctgatatatatt

SEQ ID NO: 16446 - DNA, 75 bp, synthetic construct
  source 1..75: mol_type = other DNA
gtgtcagcatggctggtaaataactggtatcccacagcaagtatcagcgatttgctggttgtggtgatgaagaaa

SEQ ID NO: 16447 - DNA, 75 bp, synthetic construct
  source 1..75: mol_type = other DNA
agcgggaaaaaattaaagggcaggtggttgaactcgtgcgccagagcggtcgtgagacgttacggcaactggaag

SEQ ID NO: 16448 - DNA, 75 bp, synthetic construct
  source 1..75: mol_type = other DNA
atatgatgaatggggcaacctgctgaatgaagagaacccgcatcagctgcagcagcttatccggctgccggggca

SEQ ID NO: 16449 - DNA, 75 bp, synthetic construct
  source 1..75: mol_type = other DNA
gcttccggtgtgacggtgggttacagcggcgtggccgcacgtattgcacgcgttcatcagttcggtgagcgcgat

SEQ ID NO: 16450 - DNA, 75 bp, synthetic construct
  source 1..75: mol_type = other DNA
tggcctgtacgatgatgcgggaacattaattgccgtggcgaacatggccgaaagttataagccagctcttgccga

SEQ ID NO: 16451 - DNA, 75 bp, synthetic construct
  source 1..75: mol_type = other DNA
tgacggatattggcgcggcgaaacttgccagcgccgccgcactcggtgtgccgttaaaaattacccatatggcgg

SEQ ID NO: 16452 - DNA, 75 bp, synthetic construct
  source 1..75: mol_type = other DNA
atggagccatgaggaagaccatcgcaatgagactgtttactcaatcgaaaatggtgcagctgttacagtggatta

SEQ ID NO: 16453 - DNA, 75 bp, synthetic construct
  source 1..75: mol_type = other DNA
ttgatagcagtacttaccccaacccaaccgatggcatacctgttgactatcaggctaacacacaacccgcgctgg

SEQ ID NO: 16454 - DNA, 75 bp, synthetic construct
  source 1..75: mol_type = other DNA
ccggacgtaaactgacgcaggcagaaacaacccgccttaacgctgtgctggattacattgacgcggtgacggcaa

SEQ ID NO: 16455 - DNA, 75 bp, synthetic construct
  source 1..75: mol_type = other DNA
cttgagcgtgcgctgcgtgagcagtccggctcacggatacggcggatcctgcttcgtctgccgtgggaacatgac

SEQ ID NO: 16456 - DNA, 75 bp, synthetic construct
  source 1..75: mol_type = other DNA
gagcaacgtactgggcttcgcgtcaccgggtgaagcggcaccgtaccagaaacagataacccgggatgtggtgct

SEQ ID NO: 16457 - DNA, 75 bp, synthetic construct
  source 1..75: mol_type = other DNA
tcagtagatcagacagttttgctcggtcaagttcgtacgaaaaagttagctaatcttgatgatgttagtggaccg

SEQ ID NO: 16458 - DNA, 75 bp, synthetic construct
  source 1..75: mol_type = other DNA
cgtaagccatttcagcgatactgctcttcgccagattgaaggtgtttatggtgcccggactattgctgacaccgg

SEQ ID NO: 16459 - DNA, 75 bp, synthetic construct
  source 1..75: mol_type = other DNA
gccctgatgcaggggcagacttttgacaaatctgcatacccgaaacttgcagccgcttatccgtcaggcgtgatc

SEQ ID NO: 16460 - DNA, 75 bp, synthetic construct
  source 1..75: mol_type = other DNA
tcgtgaactgacggttcaggccactacagggactaactccgattctgacctggactccatccaggacgaaatcaa

SEQ ID NO: 16461 - DNA, 75 bp, synthetic construct
  source 1..75: mol_type = other DNA
tatgagacacgttatggctggctgggatggcgtctgtgtctttacagtgcgatcggatggctggggtggaggatc

SEQ ID NO: 16462 - DNA, 75 bp, synthetic construct
  source 1..75: mol_type = other DNA
acatggatatcccgatgatattcctgatgagcaggataatgatctggggagtcgtgatgttccgtcatggcggcg

SEQ ID NO: 16463 - DNA, 75 bp, synthetic construct
  source 1..75: mol_type = other DNA
aaacggcgaaagttgtttttaatgaattaagcatcgaaccggcaacagtcggggagattgcacaaaacacatatc

SEQ ID NO: 16464 - DNA, 75 bp, synthetic construct
  source 1..75: mol_type = other DNA
gctgcttgctggcagcactactcatgccttgtgcaggacacgctgagaacgaacaatacggcgcgaacttcaata

SEQ ID NO: 16465 - DNA, 75 bp, synthetic construct
  source 1..75: mol_type = other DNA
taaccgtggttggtggaggacagagtggtgcagacctgttccttaatgcattacgcggggaatggggagaagcgg

SEQ ID NO: 16466 - DNA, 75 bp, synthetic construct
  source 1..75: mol_type = other DNA
caccgcctgcggtcagaggagtggcggcaactgccctgattgtggcgcggtgatgggcgacgcaacataccagga

SEQ ID NO: 16467 - DNA, 75 bp, synthetic construct
  source 1..75: mol_type = other DNA
gtatgccatgacgtttgaagaatttgttccggcattttcttcctggtttgccggtaaccggtgtggagtggcaat

SEQ ID NO: 16468 - DNA, 75 bp, synthetic construct
  source 1..75: mol_type = other DNA
atggcagtaaagatttcaggtgtactgaaagacggcgcaggtaaaccggtacagaactgcacaatccagctgaaa

SEQ ID NO: 16469 - DNA, 75 bp, synthetic construct
  source 1..75: mol_type = other DNA
atgagtaacaatgtaaaattacaggtattgctcagggctgttgaccaggcatcccgcccgtttaaatccatccgc

SEQ ID NO: 16470 - DNA, 75 bp, synthetic construct
  source 1..75: mol_type = other DNA
gctgagcagtcgtcaagtgagataaagattgttcgcgatgaatacggcatgccgcatatttatgccaatgataca

SEQ ID NO: 16471 - DNA, 75 bp, synthetic construct
  source 1..75: mol_type = other DNA
gtcatggaacggctgaagatgctcgattccctgcaggcaacacagcttcagtcggccatagtgaaggcgatgtat

SEQ ID NO: 16472 - DNA, 75 bp, synthetic construct
  source 1..75: mol_type = other DNA
gtcggggaagaccccggctaccacgacgatttcctgcgtatccgcgacgagatgaacaaactttccggcgcggat

SEQ ID NO: 16473 - DNA, 75 bp, synthetic construct
  source 1..75: mol_type = other DNA
tttcgtatttagcagataataaaaaagaaaacgccccagagctaaatgtttcctacggtatcgataagaattttt

SEQ ID NO: 16474 - DNA, 75 bp, synthetic construct
  source 1..75: mol_type = other DNA
ttctggcctgatgtataggctcagcgaactctctgttctcagctacgaagctgtcgtgtgtgtagataatgtgtt

SEQ ID NO: 16475 - DNA, 75 bp, synthetic construct
  source 1..75: mol_type = other DNA
atgaacacattacccgacacacacgtacgggaggcatcgcgctgcccatctcccgtaaccatctggcagacactg

SEQ ID NO: 16476 - DNA, 75 bp, synthetic construct
  source 1..75: mol_type = other DNA
agattcaattggtcaacgcaacagttatgtgaaaacatggggttgcggaggttttttgaatgagacgaacattta

SEQ ID NO: 16477 - DNA, 75 bp, synthetic construct
  source 1..75: mol_type = other DNA
aacagccacgcgacagactgacagaggtaatcatctttgcaggtagtgatgcgtggagccatgcgaaagagtggc

SEQ ID NO: 16478 - DNA, 75 bp, synthetic construct
  source 1..75: mol_type = other DNA
tctgcgccctgtccgagctgaagaacgccctgcgctccggcgacatctgggtcaagggctcgcggcagttccgcg

SEQ ID NO: 16479 - DNA, 75 bp, synthetic construct
  source 1..75: mol_type = other DNA
tctcaattgcggttgtatcatctcaaattgcaattacagcatcacctgtatcggctgccgttatctatatgtctg

SEQ ID NO: 16480 - DNA, 75 bp, synthetic construct
  source 1..75: mol_type = other DNA
ctaactaccatgctaccaagccactcttttttgaccatatagatctgagcacccgcccgctgattgatgtgtcca

SEQ ID NO: 16481 - DNA, 75 bp, synthetic construct
  source 1..75: mol_type = other DNA
tgtaacgacagaccaaactatgaaattcaggcgttattcacggccccgccagcttcggtgacatcagaaggactg

SEQ ID NO: 16482 - DNA, 75 bp, synthetic construct
  source 1..75: mol_type = other DNA
gcgctatttactatgtcgttgcgctgcaaatctgggaatattttagcttttacggcatgcgtgccctgctgattc

SEQ ID NO: 16483 - DNA, 75 bp, synthetic construct
  source 1..75: mol_type = other DNA
tctgagcacatttgaacaactgcaccagaacaaagatgaagtgtttgaacggggagtgatcaacgtcttcaaagg

SEQ ID NO: 16484 - DNA, 75 bp, synthetic construct
  source 1..75: mol_type = other DNA
aaggacgtcaccattaacggcaagaccacctcacagttcctggcctcggtgattctggataatctgcctccccgg

SEQ ID NO: 16485 - DNA, 75 bp, synthetic construct
  source 1..75: mol_type = other DNA
tgcacgataaccagggttatttcgtatttccggatacctggtttggcccattgctgggggagtttgaagaagtgc

SEQ ID NO: 16486 - DNA, 75 bp, synthetic construct
  source 1..75: mol_type = other DNA
atggctgattttggttcaactaaatataacgccagttttgaagaatggcatgaactgttaatggattatgcagag

SEQ ID NO: 16487 - DNA, 75 bp, synthetic construct
  source 1..75: mol_type = other DNA
gaggtgagcgcagctgacggccagtatctggcgcaggcgaaatgggacacgccgcgggtggtgaagggtgtgcgc

SEQ ID NO: 16488 - DNA, 75 bp, synthetic construct
  source 1..75: mol_type = other DNA
atgtggtggccttttagtcgtaaaaaaagcgagcagcgtaacctgtccattgatgattttctggcgctgtccggc

SEQ ID NO: 16489 - DNA, 75 bp, synthetic construct
  source 1..75: mol_type = other DNA
ttgtaactggtttgttagctgcgaacgtagcacacgctgccgaagtctataacaaggatggtaataaactcgacc

SEQ ID NO: 16490 - DNA, 75 bp, synthetic construct
  source 1..75: mol_type = other DNA
ctggtggatctgatcgacagcagggttgtgtcaattatgcagtcatcgcgtcgggatggaggattgtacagtgcc

SEQ ID NO: 16491 - DNA, 75 bp, synthetic construct
  source 1..75: mol_type = other DNA
ctctgataaaaaaatttgaaggttgtcggctgactgcttaccccgaccccggaacgggagatgcgccgtggacca

SEQ ID NO: 16492 - DNA, 75 bp, synthetic construct
  source 1..75: mol_type = other DNA
cgctggcggtgctggaattttgaacctgatgccggaaaacagcttaatgcggggctcgccagtgagggaattctc

SEQ ID NO: 16493 - DNA, 75 bp, synthetic construct
  source 1..75: mol_type = other DNA
tcgagccggtggaggacgggcagacccgtggggctaatcagttttacagcgtcatggaacggctgaagatgctcg

SEQ ID NO: 16494 - DNA, 75 bp, synthetic construct
  source 1..75: mol_type = other DNA
cgccattaaaaaggagaatgttggtgaattttctctgcggggcgtttgtgttcctgacggaaaatcgaaggagac

SEQ ID NO: 16495 - DNA, 75 bp, synthetic construct
  source 1..75: mol_type = other DNA
taatgaatatccgtccccaatcctgcccaaagaacgctggcgttatcagatggtgaatatgtatccggacagcgg

SEQ ID NO: 16496 - DNA, 75 bp, synthetic construct
  source 1..75: mol_type = other DNA
tctgagtgcttacagtaacactattgtggatacaccgacgtattttgcttttgcgaaaggtgccgggctgatggg

SEQ ID NO: 16497 - DNA, 75 bp, synthetic construct
  source 1..75: mol_type = other DNA
aaagccgaattaaacggagcattctttaacataacccgcccccgcaatatcgcgtttaactatatcgtgagggcg

SEQ ID NO: 16498 - DNA, 75 bp, synthetic construct
  source 1..75: mol_type = other DNA
gtcggccgtccggcacagtccatcacagtgataaaggttctcagtatgtatcactggcctatacggagcgactaa

SEQ ID NO: 16499 - DNA, 75 bp, synthetic construct
  source 1..75: mol_type = other DNA
taacagtaagcgtcggcatggttccagcgatcagatgtcaccgacagaatatgaaaaccagtattatcaacggct

SEQ ID NO: 16500 - DNA, 75 bp, synthetic construct
  source 1..75: mol_type = other DNA
cggatggcagggcatcggcgttttactataaccaccacagccagttaacgtcagccaccgggcctgacgggctgg

SEQ ID NO: 16501 - DNA, 75 bp, synthetic construct
  source 1..75: mol_type = other DNA
tgcgccgcgctgcgtgagttgaacaagcacagggatattgtacgacagattactgattcttcccgccatgttgca

SEQ ID NO: 16502 - DNA, 75 bp, synthetic construct
  source 1..75: mol_type = other DNA
atgatgctgaaaattaaacccgcagcgggaaaagccatccgtgacccgctcacgatgaaattactggctccggag

SEQ ID NO: 16503 - DNA, 75 bp, synthetic construct
  source 1..75: mol_type = other DNA
tctacttcgttatatgcgggacttgttggtggaaatcaccaggctacagatattgatacagccgaagatattctt

SEQ ID NO: 16504 - DNA, 75 bp, synthetic construct
  source 1..75: mol_type = other DNA
gcgctggaaaaccagtgtgaggaatccgacctgctggaagcagaaatgaagctgatgcgctgcatggcgaaggtc

SEQ ID NO: 16505 - DNA, 75 bp, synthetic construct
  source 1..75: mol_type = other DNA
tccacaatacccaatgattgaaatcaatgggaactgtaaaatcattggcgttgtcgttgatgccaagctagcaaa

SEQ ID NO: 16506 - DNA, 75 bp, synthetic construct
  source 1..75: mol_type = other DNA
ggccgggattatttgacggtgacacgccccggcttctggcctgcggtatccgggacgtgttactggaagacgtgg

SEQ ID NO: 16507 - DNA, 75 bp, synthetic construct
  source 1..75: mol_type = other DNA
ggaaagatgaattgctttccctattaagtgatgtaggggagctacagaatttgaaaaataaacctaaacgcgtct

SEQ ID NO: 16508 - DNA, 75 bp, synthetic construct
  source 1..75: mol_type = other DNA
aaataacagtgattgcttttgttatcaattatctgttcttttatattccggtgtcattatatcttagttattact

SEQ ID NO: 16509 - DNA, 75 bp, synthetic construct
  source 1..75: mol_type = other DNA
tgtcagcagaactccgtaagtacagcgaaagttatgaagcagaacgtaacgccgtaatgctggagtacatgaaag

SEQ ID NO: 16510 - DNA, 75 bp, synthetic construct
  source 1..75: mol_type = other DNA
caatctatttgcgaagataaagagttcgctggtttaatatgtaaggataatagtggcagatatttctcaacagca

SEQ ID NO: 16511 - DNA, 75 bp, synthetic construct
  source 1..75: mol_type = other DNA
tggcctcagtggcgctgaccattgacaccacaacggtgatggcaacgcaggattacgttgatgacaaaattgcag

SEQ ID NO: 16512 - DNA, 75 bp, synthetic construct
  source 1..75: mol_type = other DNA
gagattacagctatcccagaacttcttaacatgctggatattaaaggaaaaatcatcacaactgatgcgatgggt

SEQ ID NO: 16513 - DNA, 75 bp, synthetic construct
  source 1..75: mol_type = other DNA
ttttttctatggtccttcctgcacatgccggaattgttatctacgggacgcgcattatttacccggcagaaaata

SEQ ID NO: 16514 - DNA, 75 bp, synthetic construct
  source 1..75: mol_type = other DNA
atatagtgattgcatggcttccgttaaggaaaatacagccatttataacctagctggtagtgttcgcaagaaaat

SEQ ID NO: 16515 - DNA, 75 bp, synthetic construct
  source 1..75: mol_type = other DNA
tcactggacagcctgatgctcaacggagaaggtatattgatacaattacagggggctgatattcgcgaaaaaaca

SEQ ID NO: 16516 - DNA, 75 bp, synthetic construct
  source 1..75: mol_type = other DNA
gaaggaaggtgccgcattcatggcgctgatggcagaacactctcgttttgctgccctgctgccggaaggatggga

SEQ ID NO: 16517 - DNA, 75 bp, synthetic construct
  source 1..75: mol_type = other DNA
cataggtgatataccagtgagcaggatgagcaaaagggctttgatggattatcgttccatgcgactacgtgatgg

SEQ ID NO: 16518 - DNA, 75 bp, synthetic construct
  source 1..75: mol_type = other DNA
ctggatgtgtacaccacgtccacaggcagagacggaaaccacggagtaccgtgacgaccaggcagaagccgcctg

SEQ ID NO: 16519 - DNA, 75 bp, synthetic construct
  source 1..75: mol_type = other DNA
ggatatccagtacttcatattttattagattgtttaataaacattttggtgttactccaaaacaattcgtttctt

SEQ ID NO: 16520 - DNA, 75 bp, synthetic construct
  source 1..75: mol_type = other DNA
acgactatgccgggaccatgaccggcggacgtgtcctgtccatcgatgccgccagccgtaccctgacgctggacc

SEQ ID NO: 16521 - DNA, 75 bp, synthetic construct
  source 1..75: mol_type = other DNA
gacctggaaaggatgctgcatctcttcagtggcatccccactcccgacaaccgggaaaatatcataattcgtctg

SEQ ID NO: 16522 - DNA, 75 bp, synthetic construct
  source 1..75: mol_type = other DNA
agcgaggggatcgtggagatgtatcgcgttgaccctgggttaaccggtccgttgatggaaatggtgcagattatg

SEQ ID NO: 16523 - DNA, 75 bp, synthetic construct
  source 1..75: mol_type = other DNA
atgacatttaaacattacgatgtggtcagggcggcatcgccgtcagaccttgctgatgcacttgcgcaaaaaatt

SEQ ID NO: 16524 - DNA, 75 bp, synthetic construct
  source 1..75: mol_type = other DNA
ttttattcatcctgaataaacatgaacgggcatacagacgcctgatccccgtatatatttttttagctatagtat

SEQ ID NO: 16525 - DNA, 75 bp, synthetic construct
  source 1..75: mol_type = other DNA
gtaaagagtgctatgaagatgagatgttcagcatcagatactttaagaaaggctccgcgcacatcacgttcagga

SEQ ID NO: 16526 - DNA, 75 bp, synthetic construct
  source 1..75: mol_type = other DNA
gtaccgcccgggagacatgatttttgttgatcctgaagtccctgcctgccacggtgacgacgttattgcattgat

SEQ ID NO: 16527 - DNA, 75 bp, synthetic construct
  source 1..75: mol_type = other DNA
tggtgctactaaaaatatcggtgacagcatggcacgacacatcgaaaaatgtttcgacctgcctgtcggatggct

SEQ ID NO: 16528 - DNA, 75 bp, synthetic construct
  source 1..75: mol_type = other DNA
aaacatcaggtggtgctggttttggtgctctggccggagaagaactgtctataactgacactatagaaaacgtgg

SEQ ID NO: 16529 - DNA, 75 bp, synthetic construct
  source 1..75: mol_type = other DNA
cgtgttggtgataacgcctggatgggaaagaaatatggacggctgaataaagatacctggcgtgatgatttgcgg

SEQ ID NO: 16530 - DNA, 75 bp, synthetic construct
  source 1..75: mol_type = other DNA
ttcttcgccaccgctgggggcatctgcgcttatatcgtttccccggttctgttttgaccgattaccgaatactga

SEQ ID NO: 16531 - DNA, 75 bp, synthetic construct
  source 1..75: mol_type = other DNA
tattgattactggtgcaaatggttttattggccgtaatttaagtttgaggcttgaggaactaggttacaagaatc

SEQ ID NO: 16532 - DNA, 75 bp, synthetic construct
  source 1..75: mol_type = other DNA
atgaaaattttagttactggtgcttcagggtttatcggccgtaatttggttttccgccttaaggaggctggttat

SEQ ID NO: 16533 - DNA, 75 bp, synthetic construct
  source 1..75: mol_type = other DNA
cattcactctggcatctctaatgctggccgggcatgcactggcagaagatggtgttgttcacttcgtcggtgaaa

SEQ ID NO: 16534 - DNA, 75 bp, synthetic construct
  source 1..75: mol_type = other DNA
atgtttctgaaacagggcacgtttaattatgaaaagcagtccgtggtgctcagtgagctgtccgggctgcagaga

SEQ ID NO: 16535 - DNA, 75 bp, synthetic construct
  source 1..75: mol_type = other DNA
ataccgtcgccgttctcaacaacggagggagagcgcgaaaaatacttaccagtggaagacgccggaacggctgcg

SEQ ID NO: 16536 - DNA, 75 bp, synthetic construct
  source 1..75: mol_type = other DNA
tggagggcgatccggagcgtaatccgtttggtcttgtgctggactgctacagctccacgccacagcgtctggaag

SEQ ID NO: 16537 - DNA, 75 bp, synthetic construct
  source 1..75: mol_type = other DNA
agtttataaagattcttgaaagtgagttggggctggcataccggacatctgtgagaatgatgcaagcatcgacaa

SEQ ID NO: 16538 - DNA, 75 bp, synthetic construct
  source 1..75: mol_type = other DNA
atagttcatgaggctcggttttatatggcacagagcgctgaggccatgctggaagcaggtaaacgacttattatt

SEQ ID NO: 16539 - DNA, 75 bp, synthetic construct
  source 1..75: mol_type = other DNA
ccaaaggtacggcaaaaagccgctacaaagctcgcagagcagaacttattgccgagcgacgcagtaatgaagcac

SEQ ID NO: 16540 - DNA, 75 bp, synthetic construct
  source 1..75: mol_type = other DNA
cgggacaagaagaaaccgcttatcgccaactcatgggttgcggtgtataccgtacaaggatgtgggaaaattctt

SEQ ID NO: 16541 - DNA, 75 bp, synthetic construct
  source 1..75: mol_type = other DNA
tggacggtgattcgtgcccgtattctgaagcgcgataaaggtctgtgtcagttgtgtctgcgtgccggtgtggtg

SEQ ID NO: 16542 - DNA, 75 bp, synthetic construct
  source 1..75: mol_type = other DNA
atgccaacaccaaatcctctggcaccggtgaaaggggccgggaccacactgtgggtttataacgggaacggcgac

SEQ ID NO: 16543 - DNA, 75 bp, synthetic construct
  source 1..75: mol_type = other DNA
tggaaaacattgtgcggattggtgtggttacggaaatcaacaccgacacctgggaggtgcgtgtgcagaccggcg

SEQ ID NO: 16544 - DNA, 75 bp, synthetic construct
  source 1..75: mol_type = other DNA
tgtttcaaaaaaaacagaaaacattgcaagaattgcagcgttatttcagtatttcagctatggtgaagggaaaat

SEQ ID NO: 16545 - DNA, 75 bp, synthetic construct
  source 1..75: mol_type = other DNA
cgcaaaaagggcttgttcagctcagtagtgcaaccaacagcacatctgaaacactggctgcaacgccaaaagcgg

SEQ ID NO: 16546 - DNA, 75 bp, synthetic construct
  source 1..75: mol_type = other DNA
ctgaacacgctgaacgagctggcggcggcgctgggcaacgacccgaattttgcgaccaccatgactaacgcgctt

SEQ ID NO: 16547 - DNA, 75 bp, synthetic construct
  source 1..75: mol_type = other DNA
gccacagtggattacgtggatgacaaactgaaagagcatgaacagtcacgacgtcacccggacgcctcgctgacc

SEQ ID NO: 16548 - DNA, 75 bp, synthetic construct
  source 1..75: mol_type = other DNA
gtcagagtgaaatctttgcccgccagggtgtcgaactgagccgggccttactctccaactgggttgacgcgtgct

SEQ ID NO: 16549 - DNA, 75 bp, synthetic construct
  source 1..75: mol_type = other DNA
taagtggatgtttaaggacggagctgtggttaaacggatttatacggctgacgaacagcaacaacaggccgaatc

SEQ ID NO: 16550 - DNA, 75 bp, synthetic construct
  source 1..75: mol_type = other DNA
ggctgggctgaggcggacaataacatcgctgaaaatgcgttgcggatggtcagtctgggccgcaaaaactacctg

SEQ ID NO: 16551 - DNA, 75 bp, synthetic construct
  source 1..75: mol_type = other DNA
ctggcaaccctaaaacaaaagagcaataccagctaacaaagcaatttaacatcaaatggctttattcagatgatg

SEQ ID NO: 16552 - DNA, 75 bp, synthetic construct
  source 1..75: mol_type = other DNA
gtcccggtgctgttgccgggcaataagaagacgaagaccgggcgcttatggacgtacgttcgagacgaccgcaac

SEQ ID NO: 16553 - DNA, 75 bp, synthetic construct
  source 1..75: mol_type = other DNA
gggtagcagaaatggcgatggaagaagatttatcgttgaatgcctttgttaataaggctctggaaaaagaagtca

SEQ ID NO: 16554 - DNA, 75 bp, synthetic construct
  source 1..75: mol_type = other DNA
tacgtggagttgagcgacggcactttatcgtggttagggaacgccttgttctggatgccgctaccagaaccgccg

SEQ ID NO: 16555 - DNA, 75 bp, synthetic construct
  source 1..75: mol_type = other DNA
catgccgaagaattcttgagtaatgaacaagttgagcggcagttgaaaagtgcgatggaacgctggattattaac

SEQ ID NO: 16556 - DNA, 75 bp, synthetic construct
  source 1..75: mol_type = other DNA
cagagccgggagacatccggcgttttattcaacatgctgttgaccactggccgcgtctgctggcagtccacttca

SEQ ID NO: 16557 - DNA, 75 bp, synthetic construct
  source 1..75: mol_type = other DNA
aatcagcgcacttcccgttacaggtcagagcattgacggtaaatggcggagccactcagggaaccattcaggcag

SEQ ID NO: 16558 - DNA, 75 bp, synthetic construct
  source 1..75: mol_type = other DNA
ttagctaatcaatcatttagtcagccatctcaacagattgcttttcaacactattgtcaaagtctggagcagatt

SEQ ID NO: 16559 - DNA, 75 bp, synthetic construct
  source 1..75: mol_type = other DNA
ggcgcggagatgcaacgattaagccgggtaatggtattgagcaagcaactcactggatgccgctaccggaaccgc

SEQ ID NO: 16560 - DNA, 75 bp, synthetic construct
  source 1..75: mol_type = other DNA
ttaaaagcttagctacgggtgaaaaatcagtatctataggacaattggcgatcgcttcaggaagtcgaggtgtcg

SEQ ID NO: 16561 - DNA, 75 bp, synthetic construct
  source 1..75: mol_type = other DNA
gaaggcaaaagggactaatagcatggcaatggggttcggaagccttgccgataaagtcaatactatcgcattagg

SEQ ID NO: 16562 - DNA, 75 bp, synthetic construct
  source 1..75: mol_type = other DNA
gcggttggtggatacgtgaagtgggcctgtttgatgagtcaggggcattgattgccgtggggaactgcccggaaa

SEQ ID NO: 16563 - DNA, 75 bp, synthetic construct
  source 1..75: mol_type = other DNA
tcgggcaactctccggtaactccggatggttggataagctgtagtgagcgaatgccggacgacaggcaggaggtg

SEQ ID NO: 16564 - DNA, 75 bp, synthetic construct
  source 1..75: mol_type = other DNA
acattgatcaaataaagcagaccaacgcgggcgcggtttatcgcctgattgatcagcttggtccagtctcgcgta

SEQ ID NO: 16565 - DNA, 75 bp, synthetic construct
  source 1..75: mol_type = other DNA
atgctggatgcgctgacatttgatgcaggcagtacgctgacgccggattacatgctgatgctcgacagcagggat

SEQ ID NO: 16566 - DNA, 75 bp, synthetic construct
  source 1..75: mol_type = other DNA
ctgtttcctttatggcgacagtgttacttttattgctctttgcttgccatagcaccattgccaacgcagctgtcg

SEQ ID NO: 16567 - DNA, 75 bp, synthetic construct
  source 1..75: mol_type = other DNA
cgtcagaaaacccgatagacgacataagcaagctttacgataagttcgaagcactactcgataaaaagtttgctg

SEQ ID NO: 16568 - DNA, 75 bp, synthetic construct
  source 1..75: mol_type = other DNA
aaggggcattcacggtggacgagattgaacacaccggcgcaccggatcgcctgactatccgggcgcgaagtgctg

SEQ ID NO: 16569 - DNA, 75 bp, synthetic construct
  source 1..75: mol_type = other DNA
aatggaccattacgactctgacacataccgtcagcccggataacggttttacaaccagtctggagcttgaagtga

SEQ ID NO: 16570 - DNA, 75 bp, synthetic construct
  source 1..75: mol_type = other DNA
tcgatctgcgtttaactgacgatgacaaaagtatgattgaggaagcggcagcgatatctaatcagtccgtcagcc

SEQ ID NO: 16571 - DNA, 75 bp, synthetic construct
  source 1..75: mol_type = other DNA
aagaccagttcgttgacatggcatttatcaccagtctgctgcaaatgacagataagtggatttataagctcatta

SEQ ID NO: 16572 - DNA, 75 bp, synthetic construct
  source 1..75: mol_type = other DNA
cactggctgacggtatggaaatttctctgaccgatcatgaaatcaggactgtcctggcgcgcctggaggacatcc

SEQ ID NO: 16573 - DNA, 75 bp, synthetic construct
  source 1..75: mol_type = other DNA
gataagtggttttacaaactcatcaaggatggtgactttcctgcgcccatcaaaatgggccgcagctcccgatgg

SEQ ID NO: 16574 - DNA, 75 bp, synthetic construct
  source 1..75: mol_type = other DNA
ggcttgatcttaattacgggaaaaagaaaaaagtcagcgtgaaacgccgcaaaccgccaaaacccaaaaaggaga

SEQ ID NO: 16575 - DNA, 75 bp, synthetic construct
  source 1..75: mol_type = other DNA
ggctcatgcccggagaaaaatccacgatgtgcatgcaagagcgcccaccgacatcaccacggaagccctgcagcg

SEQ ID NO: 16576 - DNA, 75 bp, synthetic construct
  source 1..75: mol_type = other DNA
atgaaatggtatacaccggaacacgtcgtagaggcatttaaaaaaggtgagctaacacgacatcaagtaaggatg

SEQ ID NO: 16577 - DNA, 75 bp, synthetic construct
  source 1..75: mol_type = other DNA
tggcagaagatacgcggcgtatccgggcggcgctgaccaccaccggtcagacgttactgacccgccagacgcgcc

SEQ ID NO: 16578 - DNA, 75 bp, synthetic construct
  source 1..75: mol_type = other DNA
atgagcgactatcatcatggcgtgcaggtgctggagattaacgacggcacccgcgtcatttccaccgtatccacc

SEQ ID NO: 16579 - DNA, 75 bp, synthetic construct
  source 1..75: mol_type = other DNA
actgttgtggatggaatacaaggcacaggcgggtgacaaagcgatgggatactcacacttctgccgttgctaccg

SEQ ID NO: 16580 - DNA, 75 bp, synthetic construct
  source 1..75: mol_type = other DNA
acaagaattcgtcaaccaataattttcgggaaatcgcggaaacgtcaaccaactatccggcaattcctagtgagg

SEQ ID NO: 16581 - DNA, 75 bp, synthetic construct
  source 1..75: mol_type = other DNA
ccgcaacccgattaacgctgtcgacctgaagtcccgtcagtaccagtgtgagcaggtgaactacgacacgtttat

SEQ ID NO: 16582 - DNA, 75 bp, synthetic construct
  source 1..75: mol_type = other DNA
caggaacagcaccagccagaaagattactctttacgcaaaacttggatataaaggaaatatgcagagtttgcagg

SEQ ID NO: 16583 - DNA, 75 bp, synthetic construct
  source 1..75: mol_type = other DNA
ccaggaatttttaaactcactccggggcacaactcaatttgcgggtactgattaccgcagcaaagaccttacccc

SEQ ID NO: 16584 - DNA, 75 bp, synthetic construct
  source 1..75: mol_type = other DNA
cgcaggaatttgcttttgaagcgttaatgcatgatgcaacagaagcgtattgccaggacatccccgcaccactga

SEQ ID NO: 16585 - DNA, 75 bp, synthetic construct
  source 1..75: mol_type = other DNA
gtaagaagttcaattatatcaactccaccattgacgatatttatatcgaggatatcgccggtgcgctttcaaata

SEQ ID NO: 16586 - DNA, 75 bp, synthetic construct
  source 1..75: mol_type = other DNA
tacgttgttgcatgaggctggttatccttcagactggattgaaaaggctctggcacatgagcagaaaggtgtgcg

SEQ ID NO: 16587 - DNA, 75 bp, synthetic construct
  source 1..75: mol_type = other DNA
agcctacctggtcggcctggctgccactgatgaccctgccagtctgggcactgaaatgctgacattcagcgccag

SEQ ID NO: 16588 - DNA, 75 bp, synthetic construct
  source 1..75: mol_type = other DNA
tgagttgctgagtgtggcgcaaagcctgcgtgggtttgcctacctgtcagcatatggctgcaagacggtacagga

SEQ ID NO: 16589 - DNA, 75 bp, synthetic construct
  source 1..75: mol_type = other DNA
atggctgaggcgcacatgtgggctattgataagcccatcaccgcaacgctgattcgcgacatcattgacggcatc

SEQ ID NO: 16590 - DNA, 75 bp, synthetic construct
  source 1..75: mol_type = other DNA
ggcggcagcgatcgtggatggcgtagtaggccagggctaccgggcccggttctacagcgcaggagagttgttgca

SEQ ID NO: 16591 - DNA, 75 bp, synthetic construct
  source 1..75: mol_type = other DNA
gttcggcaagatgtatggcaggaaacattatcacgtgatattactgctcaacaaagatacctggtgctcgctcgg

SEQ ID NO: 16592 - DNA, 75 bp, synthetic construct
  source 1..75: mol_type = other DNA
atgtctaacactagttctaattttgaggtggctggagttttgttagggaaagaggtgcgtaaacgtaaaacacct

SEQ ID NO: 16593 - DNA, 75 bp, synthetic construct
  source 1..75: mol_type = other DNA
gcggctgcgtcgtctgccagtgccgcgtcaacaagtgccgggcaggcctcagccagtgccaccgccgccggaaaa

SEQ ID NO: 16594 - DNA, 75 bp, synthetic construct
  source 1..75: mol_type = other DNA
gatgatttatcgcagggcacaattaaaagttattggaagcggcaatgaactgatcagtagtgtagtgttgtcgtc

SEQ ID NO: 16595 - DNA, 75 bp, synthetic construct
  source 1..75: mol_type = other DNA
gtactcgcaaggttgcttccacgctggcggtggtaaccgcaacggggcggctggcacgcgttaatcagaacggta

SEQ ID NO: 16596 - DNA, 75 bp, synthetic construct
  source 1..75: mol_type = other DNA
cggtaactgttatccggtcgataaagttattcacatggataataacgaaatcccggcaggacttaaaacagcacc

SEQ ID NO: 16597 - DNA, 75 bp, synthetic construct
  source 1..75: mol_type = other DNA
ctgacggaaagtattggcggtaaagccgccccggactgggcgatgaaacagaattttcgctgtggttgctggatg

SEQ ID NO: 16598 - DNA, 75 bp, synthetic construct
  source 1..75: mol_type = other DNA
gtaaatctacccttttcaatcgcatcaccgaagcgcgggtctacgcggcagaccagttgtttgccaccctcgacc

SEQ ID NO: 16599 - DNA, 75 bp, synthetic construct
  source 1..75: mol_type = other DNA
ctcctttctgccttacctgtttggcaacgattttctgtatgccgaggcgtatgtgtacgcgctggcgcaaaaaat

SEQ ID NO: 16600 - DNA, 75 bp, synthetic construct
  source 1..75: mol_type = other DNA
gcgtaatcgcatcgtgcagatacagtcgcgcctggaaagagttgaaaagcagcgtgagcaggggcggcaatcgcg

SEQ ID NO: 16601 - DNA, 75 bp, synthetic construct
  source 1..75: mol_type = other DNA
ggctccgcgcacatcacgttcaggaaaccagagctggttgacagactgaatgatattattgcgaaatactatccg

SEQ ID NO: 16602 - DNA, 75 bp, synthetic construct
  source 1..75: mol_type = other DNA
accgtgttggtgatgctgtttttggcgctgcacttgttgattccaggctgaatggttctgacaaggaggttcgcc

SEQ ID NO: 16603 - DNA, 75 bp, synthetic construct
  source 1..75: mol_type = other DNA
ccgcctgacggctaatcaggcatatcaccagatggcgaagctggggatcgttgaacaacgcgaacgatacagccg

SEQ ID NO: 16604 - DNA, 75 bp, synthetic construct
  source 1..75: mol_type = other DNA
accgaaccggtggtgcggttgaatgtggaatcgcgcggtgatgtgccgctgatggaagaaaagacaaaacttatc

SEQ ID NO: 16605 - DNA, 75 bp, synthetic construct
  source 1..75: mol_type = other DNA
gtcattttccgtccgctcaaacagcgcatccctgcagatttatatattgtttatgaaacacagcaggtgacgccc

SEQ ID NO: 16606 - DNA, 75 bp, synthetic construct
  source 1..75: mol_type = other DNA
gatgcgcgatgcacagttgtggagccacatcgaatttcaccctgaatgcaacgcgatttacgcggcgctggactg

SEQ ID NO: 16607 - DNA, 75 bp, synthetic construct
  source 1..75: mol_type = other DNA
atggctacatcaacagtaattccgggagacatcaccacgctgaagggagatgttagtaaagcaaaggaagatatt

SEQ ID NO: 16608 - DNA, 75 bp, synthetic construct
  source 1..75: mol_type = other DNA
cacgctgcggctgcactggcacaccactatttctggaaggacaacacacttctacgcatgatgccacgtaaacgt

SEQ ID NO: 16609 - DNA, 75 bp, synthetic construct
  source 1..75: mol_type = other DNA
agcttctgacgctggtcgtaaaggcggccaacatagtggcggtaattttaaaaacgatccacaaagagcatcaga

SEQ ID NO: 16610 - DNA, 75 bp, synthetic construct
  source 1..75: mol_type = other DNA
gcggtcggcattccggtggtttctactctgcatagcggaataccggaactggtggaggccgataaatccggctgg

SEQ ID NO: 16611 - DNA, 75 bp, synthetic construct
  source 1..75: mol_type = other DNA
tggttctttgtgctgctttactgacggtcacacccgcagcgtcagcggatgtgaacagcgacatgaatcagttct

SEQ ID NO: 16612 - DNA, 75 bp, synthetic construct
  source 1..75: mol_type = other DNA
cacatattatcgatgctactgtagattttatggcatcaagccaggcatttcgtgagtatctgaaaaaacttcccc

SEQ ID NO: 16613 - DNA, 75 bp, synthetic construct
  source 1..75: mol_type = other DNA
acgcagctttttattcgccattcgcgcagcgtcgtactgacacacgcgggcaaaatcttgatggaagaatcgcgt

SEQ ID NO: 16614 - DNA, 75 bp, synthetic construct
  source 1..75: mol_type = other DNA
ctgtaccacagcatgagccaacgggttatggctgttctggagtcgctttctcccgcagttgagccctactcaatt

SEQ ID NO: 16615 - DNA, 75 bp, synthetic construct
  source 1..75: mol_type = other DNA
gaaacccgtgcgcctgacaaaaatacagatgctgttttaccgtggctggcgaaagatattgctgtcgtttttccg

SEQ ID NO: 16616 - DNA, 75 bp, synthetic construct
  source 1..75: mol_type = other DNA
gctggcgcattgtactgatgcagaggcgttatgtattgatcgggtgattagtgaagtgctggcagaacacccagg

SEQ ID NO: 16617 - DNA, 75 bp, synthetic construct
  source 1..75: mol_type = other DNA
aagcgaaaaacggcgtgattggttgcggtccagacataccctggtccgcgaaaggggagcagctactttttaaag

SEQ ID NO: 16618 - DNA, 75 bp, synthetic construct
  source 1..75: mol_type = other DNA
cagcatattgaggccggcatttcactgtgcgatgcagtgaactttctcgttgaaaaatacgccctggtacgtacc

SEQ ID NO: 16619 - DNA, 75 bp, synthetic construct
  source 1..75: mol_type = other DNA
tgaatgaatgcatccgtgtggagcagacggccagcgtggtgctctgggaaattgatctgacagaggtcggtgggg

SEQ ID NO: 16620 - DNA, 75 bp, synthetic construct
  source 1..75: mol_type = other DNA
cagcataaagaatttgcacaaaaaattgatgaggctatgcaaaatttcgaaagtaaaatcatatctttcgatcgg

SEQ ID NO: 16621 - DNA, 75 bp, synthetic construct
  source 1..75: mol_type = other DNA
ggaaaaatacgcactggtacgaactgaccagccgggattcagcgcaggagcctcgtcgcagttaatcaacagcat

SEQ ID NO: 16622 - DNA, 75 bp, synthetic construct
  source 1..75: mol_type = other DNA
catttccagattcgttaccgtgcaacggcaattgatccgctacgttacttgccgcctcagggcagcaagccaaaa

SEQ ID NO: 16623 - DNA, 75 bp, synthetic construct
  source 1..75: mol_type = other DNA
gctgggtggtggagcagatgtcgcagctgacagccatgacggcctcgtttgtgctggctacaccgaccgagacgg

SEQ ID NO: 16624 - DNA, 75 bp, synthetic construct
  source 1..75: mol_type = other DNA
tttggccctgcgggggtaaccgcagcaaaactacgcgaactgggtgtcattcgcggcaaaattgccactatcttc

SEQ ID NO: 16625 - DNA, 75 bp, synthetic construct
  source 1..75: mol_type = other DNA
ctcacccgactgctggaccagcactacggcctcacgctgaatgacactccgttcgctgatgaacgtgtgattgag

SEQ ID NO: 16626 - DNA, 75 bp, synthetic construct
  source 1..75: mol_type = other DNA
catttcattttcactaatgctggttgctctttttctttccatgggctggatgatgttgtcttcgtcggggctgct

SEQ ID NO: 16627 - DNA, 75 bp, synthetic construct
  source 1..75: mol_type = other DNA
cgaagatcctctgtgtaatcgtcggcatttcattttcactaatgctggttgctatttgcttttccactgcctggc

SEQ ID NO: 16628 - DNA, 75 bp, synthetic construct
  source 1..75: mol_type = other DNA
ctacaaattactaccaccctgaaagcgatagggggcttatctggaatgatcgtgatataggtattgtatggggtg

SEQ ID NO: 16629 - DNA, 75 bp, synthetic construct
  source 1..75: mol_type = other DNA
ccgacagcattaacgtgcaggcactgaacatggggcgaattgtcgctgacgtcgatggtgttaatctcactgaac

SEQ ID NO: 16630 - DNA, 75 bp, synthetic construct
  source 1..75: mol_type = other DNA
agggtaatcacacaggtggtgatactggatgcagataaaaagcagatacagtgtgtggtaagaccgctgcaaatc

SEQ ID NO: 16631 - DNA, 75 bp, synthetic construct
  source 1..75: mol_type = other DNA
tgattaacgtggtctgcgataatggctactcccttcgtgttgttgatgaatctgaccggacctcaacagacagca

SEQ ID NO: 16632 - DNA, 75 bp, synthetic construct
  source 1..75: mol_type = other DNA
cgctaccatttgccgcccttaccggcatacgctgcagtaccgctcatatcacagaaagggacaacgcctggctgt

SEQ ID NO: 16633 - DNA, 75 bp, synthetic construct
  source 1..75: mol_type = other DNA
atgaaactggccctgacgctggaagctgacagcgttaacgtgcaggcactgaacatggggcgcattgtcgttgac

SEQ ID NO: 16634 - DNA, 75 bp, synthetic construct
  source 1..75: mol_type = other DNA
gccgccgcgctccatcacgttccatatctggacggcgtacagtccgttcaccacctgggtacagattgtctatga

SEQ ID NO: 16635 - DNA, 75 bp, synthetic construct
  source 1..75: mol_type = other DNA
aatgatttctggtgccggaccctctccttcagtccgaacaaaccccggcactatgaacgttatctgcagcgtatg

SEQ ID NO: 16636 - DNA, 75 bp, synthetic construct
  source 1..75: mol_type = other DNA
caatccaggagattgcagcacacacacttcgtcatcgtctgaacgaacttgaattggaatcggtaacaaaaaaag

SEQ ID NO: 16637 - DNA, 75 bp, synthetic construct
  source 1..75: mol_type = other DNA
aggtcgttcggttggctgggttaagtctgaggttatggaatgggttaaaagccgggatcgcattaattcaggaaa

SEQ ID NO: 16638 - DNA, 75 bp, synthetic construct
  source 1..75: mol_type = other DNA
aacctgattctcatggaagctaccggtggccttgaagcagccattgcctgtaagcttcagtcagaaggatacgat

SEQ ID NO: 16639 - DNA, 75 bp, synthetic construct
  source 1..75: mol_type = other DNA
tgggtggcacttcccctgactacagtaaacggtgtctctcagtttcagccggaatggatatgctgggaacccggt

SEQ ID NO: 16640 - DNA, 75 bp, synthetic construct
  source 1..75: mol_type = other DNA
cggatggcacaaaagcctgtccaacgtgggcgtgaacggtgtcaccggaatttctgcagatgtgttctgggatct

SEQ ID NO: 16641 - DNA, 75 bp, synthetic construct
  source 1..75: mol_type = other DNA
atgaaaattacggatcacaaactctctgaaggtattgccctgacatttcgtgttcctgaaggaaatataaaacat

SEQ ID NO: 16642 - DNA, 75 bp, synthetic construct
  source 1..75: mol_type = other DNA
gctccgtcatgctggagatgatagtgctgtcggcgactgagtcggttgtcgggatggtcaatccggttcttcccg

SEQ ID NO: 16643 - DNA, 75 bp, synthetic construct
  source 1..75: mol_type = other DNA
atgccagccacgttcaggagaaaacgctccagcagggcattgcgcttgcgcagtctcgctactggcgtattggcg

SEQ ID NO: 16644 - DNA, 75 bp, synthetic construct
  source 1..75: mol_type = other DNA
ccttctggcatgatttagcggctccggtcattgctggtattcttgccagtatgatcgtgaactggctgaacaagc

SEQ ID NO: 16645 - DNA, 75 bp, synthetic construct
  source 1..75: mol_type = other DNA
gaggagctcattacaattttaaaaattagtttattaggtgtaccaaccggtttggtcttctggatttttggtgtc

SEQ ID NO: 16646 - DNA, 75 bp, synthetic construct
  source 1..75: mol_type = other DNA
tgaatgcgccggaatggcggtattactggcaggtcaacatgccagccgccaccaacaccacctggatgacatgtg

SEQ ID NO: 16647 - DNA, 75 bp, synthetic construct
  source 1..75: mol_type = other DNA
gataaccagaaagccgcagttctgaaaaataacaatgggaaggtggtgttcaactccgggttcctgctgctggcc

SEQ ID NO: 16648 - DNA, 75 bp, synthetic construct
  source 1..75: mol_type = other DNA
aggctgggaagatatagaggattttggggaaacacatctcgattttttgaagcaatatggtgattttgaaaatgg

SEQ ID NO: 16649 - DNA, 75 bp, synthetic construct
  source 1..75: mol_type = other DNA
tcgcggcgtagaaatgacttacaccaaggatttgctggttgaagtttatctgaacggtctggggcatggactcag

SEQ ID NO: 16650 - DNA, 75 bp, synthetic construct
  source 1..75: mol_type = other DNA
ggcagcactgatgcagcaaccggacaaatccctgacactgctggcatggacgctctgcctgaatgtgtttggcag

SEQ ID NO: 16651 - DNA, 75 bp, synthetic construct
  source 1..75: mol_type = other DNA
acgtaagactaatggcgatgaaccctatatcgaaattatttgtatggattcagaagcagaaattcagaaagcaga

SEQ ID NO: 16652 - DNA, 75 bp, synthetic construct
  source 1..75: mol_type = other DNA
ctggggggaataacaccggcgcagtggctgatggaggaatacaggcggggaaaggcggcaggatttatcaagtaa

SEQ ID NO: 16653 - DNA, 75 bp, synthetic construct
  source 1..75: mol_type = other DNA
gaaaaggcggtggcagtggtccggttgattacctgctgggccgggagcgtaaccgggaaggggcgagagttctgc

SEQ ID NO: 16654 - DNA, 75 bp, synthetic construct
  source 1..75: mol_type = other DNA
atgccatccgtgatttcgggattcttaagtaagagaggtgccggacgcgcgaacgtccggcaggacataagcaat

SEQ ID NO: 16655 - DNA, 75 bp, synthetic construct
  source 1..75: mol_type = other DNA
tgctatgacgaactttcctcgttcgagccggatgtcgaaaaagagggctcgccaaccctgctgggggataagcgt

SEQ ID NO: 16656 - DNA, 75 bp, synthetic construct
  source 1..75: mol_type = other DNA
gtacagaaaaggaaatatgggagcaaaaacaaaaagcgctggaatcaaaatttcataaagagattcgtgccggta

SEQ ID NO: 16657 - DNA, 75 bp, synthetic construct
  source 1..75: mol_type = other DNA
gaacgcgatgcgttgcgggaggaagtcgcccgactgaatcaggaaatacgccgccggcagatggagctggatatt

SEQ ID NO: 16658 - DNA, 75 bp, synthetic construct
  source 1..75: mol_type = other DNA
cgcacggtgccgtattctgcggagtccgtcagcgaactggcggagtccattaagggcgttggcctgttgcagaat

SEQ ID NO: 16659 - DNA, 75 bp, synthetic construct
  source 1..75: mol_type = other DNA
gtgagtttgacatgagcgccgccacccacgcacagcaacctgcgctgtttacagccatgctgacacagtttcgtg

SEQ ID NO: 16660 - DNA, 75 bp, synthetic construct
  source 1..75: mol_type = other DNA
ttgaaatcggagatagcaaaagcatctaacaagtgtgcggatactgcagatgggttaccagatatgcttgcagac

SEQ ID NO: 16661 - DNA, 75 bp, synthetic construct
  source 1..75: mol_type = other DNA
aggttgctggcaatttctgagaacaagcgaatagggcattattccggagcaggacagggtaatcacgcaggtggt

SEQ ID NO: 16662 - DNA, 75 bp, synthetic construct
  source 1..75: mol_type = other DNA
aattcagggatatattgcagatatgttccactcactacagctttcattcctggtttctatgctctgttttgtcta

SEQ ID NO: 16663 - DNA, 75 bp, synthetic construct
  source 1..75: mol_type = other DNA
caacagttcagcggtcagcctcagccgcaaccgccggagggtgacgattacgggttttcagacgatatcccgttc

SEQ ID NO: 16664 - DNA, 75 bp, synthetic construct
  source 1..75: mol_type = other DNA
gcgaccggctgaccacgatacagaacgacaggagccgcatccagacgatttatcagccggggagcttcacaccac

SEQ ID NO: 16665 - DNA, 75 bp, synthetic construct
  source 1..75: mol_type = other DNA
ctggcgcacctaagtcgtcattcagcttcgggcgtatctgggatcagtacggcatgctggtggtgtttgcggtgc

SEQ ID NO: 16666 - DNA, 75 bp, synthetic construct
  source 1..75: mol_type = other DNA
ttttctggcacgacctggcagcaccgatcctggcgggaattattaccgcagcgattgtcagctggtggcgtaacc

SEQ ID NO: 16667 - DNA, 75 bp, synthetic construct
  source 1..75: mol_type = other DNA
aagatgaggggctggaattactgggggccacctattccggaatgactgacgtcataaagggaacacagtttgatc

SEQ ID NO: 16668 - DNA, 75 bp, synthetic construct
  source 1..75: mol_type = other DNA
acaggaagtggatgtggttgtcaccctgccactgagcgagtatttcgacacaaacgcacagccggacatggccaa

SEQ ID NO: 16669 - DNA, 75 bp, synthetic construct
  source 1..75: mol_type = other DNA
taacagtactaaatatgcggtcgttgattctgcaaccggtaaatacatggaagccactgtagtcattaccggtac

SEQ ID NO: 16670 - DNA, 75 bp, synthetic construct
  source 1..75: mol_type = other DNA
ctgctgccgggggaggcggtgtacagccgcagcgagtcaatgtggctggtgcgcggtggtaaggcagcgcagccg

SEQ ID NO: 16671 - DNA, 75 bp, synthetic construct
  source 1..75: mol_type = other DNA
ctgaacgacgagttcagcaagctcgaaaaatctgtaagcaaggctgtgacatcaaacgagacgaaaatcaaagac

SEQ ID NO: 16672 - DNA, 75 bp, synthetic construct
  source 1..75: mol_type = other DNA
aagatggggggttagtatcatttcgaaaggtaataataaatgtgaaatttattttgatgcttttggtgaatgtgg

SEQ ID NO: 16673 - DNA, 75 bp, synthetic construct
  source 1..75: mol_type = other DNA
ggcggctggtggctgacccgcagttaaagaccaccagcaaagggacacaaatggcgatggcgagtatggcggttc

SEQ ID NO: 16674 - DNA, 75 bp, synthetic construct
  source 1..75: mol_type = other DNA
ggcggttggtggacgacccgcagacaaaacagaccagcaagggcacccccatgacgctggcgcgtatggcggtat

SEQ ID NO: 16675 - DNA, 75 bp, synthetic construct
  source 1..75: mol_type = other DNA
gtgatggcatttggtaagcaggccgacttcctggctaaacatcaaaaaggcgacgttgccagcgtatccggcacg

SEQ ID NO: 16676 - DNA, 75 bp, synthetic construct
  source 1..75: mol_type = other DNA
atagaacggattcggcagcactgttgccctgtatcgaacaggccagagaggatgtccataccctgcgccagttgc

SEQ ID NO: 16677 - DNA, 75 bp, synthetic construct
  source 1..75: mol_type = other DNA
gtttcggcttgatgctctacaatctagtcgtcttcgtattattcaaactggaggtgatttcccgacagatcgtga

SEQ ID NO: 16678 - DNA, 75 bp, synthetic construct
  source 1..75: mol_type = other DNA
gaatggcactgcgtatgccatgcgtacggacctgaaaaatgcggataagctggtagtaaaccaaaagctgtcagg

SEQ ID NO: 16679 - DNA, 75 bp, synthetic construct
  source 1..75: mol_type = other DNA
ctcggtctggacgactccgcgcttgatgcgagctttgtcatggggggcgcagttcgtgagctgttccttaagtat

SEQ ID NO: 16680 - DNA, 75 bp, synthetic construct
  source 1..75: mol_type = other DNA
tttgaacgtgaacgggaccggatgtaccgggaaaaattaccggcgcagatgatgaaagccatgacgcatcagtta

SEQ ID NO: 16681 - DNA, 75 bp, synthetic construct
  source 1..75: mol_type = other DNA
caatttataaagagccgggcttgcctgaatatcggggcaatcccttaattgaggcacttcctgaagcgctttccg

SEQ ID NO: 16682 - DNA, 75 bp, synthetic construct
  source 1..75: mol_type = other DNA
accgatggctgctcttactccgtccttatccactcagactactgtcagtgccagctcctgcaaggtggagttccg

SEQ ID NO: 16683 - DNA, 75 bp, synthetic construct
  source 1..75: mol_type = other DNA
gcgacaaggagaacaaaccaccgaggatagcccagggcagcagcaacgtctttatcaacaatcagcctgccgcgc

SEQ ID NO: 16684 - DNA, 75 bp, synthetic construct
  source 1..75: mol_type = other DNA
cgaatgcggcagcgtcacaacaatcagcagccacttctgcatccaccgcgaccacgaaagcgtcagaagctgcca

SEQ ID NO: 16685 - DNA, 75 bp, synthetic construct
  source 1..75: mol_type = other DNA
ccttctggcatgatttagcggttccggtcattgctggcattcttgccagtatgatcgtgaactggctgaacaagc

SEQ ID NO: 16686 - DNA, 75 bp, synthetic construct
  source 1..75: mol_type = other DNA
tgtttattgctggctccaaactggtttggcatggtgtataacgaagttctgaacccggcagcaccggtcagtaca

SEQ ID NO: 16687 - DNA, 75 bp, synthetic construct
  source 1..75: mol_type = other DNA
gaaagaatgcttgatgccttggatgaccaagagctggtaaaactggttactgaacgcagcagtcagcctctgcat

SEQ ID NO: 16688 - DNA, 75 bp, synthetic construct
  source 1..75: mol_type = other DNA
aacatactccagctatggtggcaggtggcctggtatttctgttcattgttctgctgacatttttctggaaaaaag

SEQ ID NO: 16689 - DNA, 75 bp, synthetic construct
  source 1..75: mol_type = other DNA
tctgcaactgcgtaaggcgttaaatgaagctcgccttgagcgagatatattaaaaaagcaacagcgtattttgca

SEQ ID NO: 16690 - DNA, 75 bp, synthetic construct
  source 1..75: mol_type = other DNA
accgttatctggagtatggcctgcagcagatgcttgaggggtacaggataatactggcgagggagttttttacac

SEQ ID NO: 16691 - DNA, 75 bp, synthetic construct
  source 1..75: mol_type = other DNA
gaagaagtatcgggtattgctgaaccgtgttgatacatcaactgcacctgatattgagtggccgacttcacctgc

SEQ ID NO: 16692 - DNA, 75 bp, synthetic construct
  source 1..75: mol_type = other DNA
ggacgggtcagggccgtactcctaaagtgatcgctgctgctattgaagcaggtaaaacactggaagacttcgcaa

SEQ ID NO: 16693 - DNA, 75 bp, synthetic construct
  source 1..75: mol_type = other DNA
ccgctggcggatgtggttttgaacaaaacgcaggcggcatcatgtacggagtggagcgtgaccaacgggggaacg

SEQ ID NO: 16694 - DNA, 75 bp, synthetic construct
  source 1..75: mol_type = other DNA
tgggggaagtgcgtgttccacaccggggaaatgtagtggagaaagttatcgaaggggcttacgaggtggtgggcg

SEQ ID NO: 16695 - DNA, 75 bp, synthetic construct
  source 1..75: mol_type = other DNA
ctgctcgatcgcatttcaggcaagtgcaactgaaaaattcaaggtcattacaacatttaccatcatcgcggatat

SEQ ID NO: 16696 - DNA, 75 bp, synthetic construct
  source 1..75: mol_type = other DNA
ggtattgatggtgatataagaatcaacaaggcgttatgggtgattgccgaacagttcagaaagtggaagtcatga

SEQ ID NO: 16697 - DNA, 75 bp, synthetic construct
  source 1..75: mol_type = other DNA
atacggtacaaattgccttccctgaagatgtggcacagttagaacaatatgatgccatcgttattagtgatattg

SEQ ID NO: 16698 - DNA, 75 bp, synthetic construct
  source 1..75: mol_type = other DNA
catcgtcccggctacgacctgaccttctccgcccccaaaagtgtctccatgatggccatgttaggtggcgataag

SEQ ID NO: 16699 - DNA, 75 bp, synthetic construct
  source 1..75: mol_type = other DNA
agattatgcctggggctatcgcgaagggaagcccgtacacgtttctccgggacaacttgacgccgaagcctatgg

SEQ ID NO: 16700 - DNA, 75 bp, synthetic construct
  source 1..75: mol_type = other DNA
tacgatccggcaaatgcacaaacctaccaacgtaatgccgatacttataaagccaagattacccaaacccttgcc

SEQ ID NO: 16701 - DNA, 75 bp, synthetic construct
  source 1..75: mol_type = other DNA
tacccgcaccggatgtggtcgaggagctggactttgaaaccattcttgccgaacgcaaggcgacactgatttccc

SEQ ID NO: 16702 - DNA, 75 bp, synthetic construct
  source 1..75: mol_type = other DNA
gcactggagaaatttaatggcgataaaacagcagcggcgaattatttaggcatcagccggacgacgttctggcgg

SEQ ID NO: 16703 - DNA, 75 bp, synthetic construct
  source 1..75: mol_type = other DNA
tatctccaggatggtgttgtgctgtttggtcttgtgctcagtgcagttgcttttgtgaaggtggcggaagcggcg

SEQ ID NO: 16704 - DNA, 75 bp, synthetic construct
  source 1..75: mol_type = other DNA
ataaaacggattcggcagcactgttgccctgtatcgaacaggcccgggaggatgtccgtactcttcgtcatctgc

SEQ ID NO: 16705 - DNA, 75 bp, synthetic construct
  source 1..75: mol_type = other DNA
aacgcgttcgctatatgggaagtacccccctgggtattcagacatcatggcttgcattaaatgacaggcaagaaa

SEQ ID NO: 16706 - DNA, 75 bp, synthetic construct
  source 1..75: mol_type = other DNA
actccggtggttttctggctggaattggtgcgcaaaatgagaatgcgccaaaggcgagtgatgtaaatgagacac

SEQ ID NO: 16707 - DNA, 75 bp, synthetic construct
  source 1..75: mol_type = other DNA
atgccatgttcgatacagggcgttacaggcgtaaaaaaatccggtaccgcgatgaagtgactggaaaaatgataa

SEQ ID NO: 16708 - DNA, 75 bp, synthetic construct
  source 1..75: mol_type = other DNA
aatacgcccgaaaaccgccagttcctgaagcagcaggaaacactgagtcagcagttacgtgaaaagccggacaca

SEQ ID NO: 16709 - DNA, 75 bp, synthetic construct
  source 1..75: mol_type = other DNA
gttcgtaaaccggcaattacaattatggctcttgttattggatatattgcattattttcgcgtcaacataccgca

SEQ ID NO: 16710 - DNA, 75 bp, synthetic construct
  source 1..75: mol_type = other DNA
ttacttaatctaaaagaattgcctgggcatttaggtattttgggcggcggatatattggcgttgagttcgcctct

SEQ ID NO: 16711 - DNA, 75 bp, synthetic construct
  source 1..75: mol_type = other DNA
ctcacgccagcatgcagcgtggattacgcctttaattatcgggattatcatctttattgttgcgccatatctgcc

SEQ ID NO: 16712 - DNA, 75 bp, synthetic construct
  source 1..75: mol_type = other DNA
caccaaacgcctggaggaaggcctgtttatctggcctgcggtgcgtgacggtaaggtatccattacccgctcgca

SEQ ID NO: 16713 - DNA, 75 bp, synthetic construct
  source 1..75: mol_type = other DNA
tcagactcctgcaggcagagctgagagaatacggattccgtactgaaatcgccggatatgatgccctccggctgc

SEQ ID NO: 16714 - DNA, 75 bp, synthetic construct
  source 1..75: mol_type = other DNA
gttaatgcacttctcgctgatgcatatcctctttaacctgctctggtggtggtatctcggcggtgcggtggaaaa

SEQ ID NO: 16715 - DNA, 75 bp, synthetic construct
  source 1..75: mol_type = other DNA
tcagcggcaaaccgatccccgacaatcgggaaaacatcaccattcatctggatgagcacatccagtctgttcagg

SEQ ID NO: 16716 - DNA, 75 bp, synthetic construct
  source 1..75: mol_type = other DNA
gcggggagaaaataccgttactcagtacagcgaatacctggactaatcgacaaacattcagcggtggcctttctg

SEQ ID NO: 16717 - DNA, 75 bp, synthetic construct
  source 1..75: mol_type = other DNA
ccatctcaaaacttgctcttgaaaatggcattaacgccaatctgttgttcaaatggcgacaacaatggcgcgagg

SEQ ID NO: 16718 - DNA, 75 bp, synthetic construct
  source 1..75: mol_type = other DNA
tgtatttctgcacggtggtttgttgtctgttgcttgtcagcggtggttataaaattattcgcaattattttcgaa

SEQ ID NO: 16719 - DNA, 75 bp, synthetic construct
  source 1..75: mol_type = other DNA
atcgggtggaagcagacatcagggcagcattaccaaagccggaaacagctatgccagaaagctattggtcgaggc

SEQ ID NO: 16720 - DNA, 75 bp, synthetic construct
  source 1..75: mol_type = other DNA
ggacatcagcgctatctctgctctcattgccgtaaaacatggcaactacagttcacttacaccgcctctcagccc

SEQ ID NO: 16721 - DNA, 75 bp, synthetic construct
  source 1..75: mol_type = other DNA
atgacatcaaaacgctaaagggagatgtcagtaaggcaaaggaagatatttcctcaattaacgtaaaagtatcaa

SEQ ID NO: 16722 - DNA, 75 bp, synthetic construct
  source 1..75: mol_type = other DNA
ttgccggtatcatcggtactgcgggctgtgtgggtctgtggggctacctgctgtatcagggcgtggtcgatccgc

SEQ ID NO: 16723 - DNA, 75 bp, synthetic construct
  source 1..75: mol_type = other DNA
aagccggggtgatcacaatcgacttggtattgccctgcaaatcgggtgtgtgcgttttctgggcacttttcttac

SEQ ID NO: 16724 - DNA, 75 bp, synthetic construct
  source 1..75: mol_type = other DNA
ttcgccagagcagatcctgcaaaccgcgaaagacattggtgagccttctgtcctgaaccgtgcaggtggtgcgcc

SEQ ID NO: 16725 - DNA, 75 bp, synthetic construct
  source 1..75: mol_type = other DNA
ggggatgtagagaaagctagtaaggtatttgtgcggaatgagcttttacctttgcaaaaattgatgcaagcgctt

SEQ ID NO: 16726 - DNA, 75 bp, synthetic construct
  source 1..75: mol_type = other DNA
aggttattgccccttcccgcataccaaaatcaccgacagacagaatcaaaaatgatcatcgggacgcaatttctc

SEQ ID NO: 16727 - DNA, 75 bp, synthetic construct
  source 1..75: mol_type = other DNA
aattcgggtggtgattattcgatcgcgcaaggggataaatccaatgctgctggtctgaatgccattgcagtggga

SEQ ID NO: 16728 - DNA, 75 bp, synthetic construct
  source 1..75: mol_type = other DNA
ccgttaaaaagggatatagtgcggcacatggtacagatgccaccagcaccatcaccaacgttaaagccggcacta

SEQ ID NO: 16729 - DNA, 75 bp, synthetic construct
  source 1..75: mol_type = other DNA
cttcactggataatatggttgcccagggcaatgttctgcccgttctgtacggtgaaatgcgcgtgggatcacgtg

SEQ ID NO: 16730 - DNA, 75 bp, synthetic construct
  source 1..75: mol_type = other DNA
tgccggtgacgttaatgatgactggctgcaacctgccagcaatgagatgtaccgcgtactcaaaaaagacgcgct

SEQ ID NO: 16731 - DNA, 75 bp, synthetic construct
  source 1..75: mol_type = other DNA
catgattgttgaaaagcgtcgtcaggagggagcaagagataaagatataagcctttcaggaactgcttcaatgct

SEQ ID NO: 16732 - DNA, 75 bp, synthetic construct
  source 1..75: mol_type = other DNA
atttccgaagaagacaccaccgaaacgccgatgtatgtcaatcgcggtggtcgcctgactattctgcaggaagac

SEQ ID NO: 16733 - DNA, 75 bp, synthetic construct
  source 1..75: mol_type = other DNA
acttcaactgttcgacgcactgcctgactcagagcaaaaggccctgttgtcagagatgcgtgctcgagttgaaaa

SEQ ID NO: 16734 - DNA, 75 bp, synthetic construct
  source 1..75: mol_type = other DNA
ccagtaatgctgcacctcaggctctggtcgaatcgtcccgtattgctgcgccttttaacagtgactcaacaaagc

SEQ ID NO: 16735 - DNA, 75 bp, synthetic construct
  source 1..75: mol_type = other DNA
taatgaatatcccaggcatgcaacaacttacatcaaccaaatcctttgttggtgatgtagtcggaacctgcaacc

SEQ ID NO: 16736 - DNA, 75 bp, synthetic construct
  source 1..75: mol_type = other DNA
atctgcccagtcacagctcggtgttaaaccgcgcattctcggcgtgccggggcacgataataaagccgttgctac

SEQ ID NO: 16737 - DNA, 75 bp, synthetic construct
  source 1..75: mol_type = other DNA
ggcggtggcagcggatttggtgggcagttgcgggcgtggaacccaccgggtgaaagtgtggatgcagccctgctg

SEQ ID NO: 16738 - DNA, 75 bp, synthetic construct
  source 1..75: mol_type = other DNA
tacgttaccggcagtaaccggtggggagatcctcgtgcaagattactacagggtgctgactggcaggcaaaccgg

SEQ ID NO: 16739 - DNA, 75 bp, synthetic construct
  source 1..75: mol_type = other DNA
cgtccctgccggagggggtgacgctgtcaggagaaggtaacgatatgctgatgtctttcttcctgcagacggata

SEQ ID NO: 16740 - DNA, 75 bp, synthetic construct
  source 1..75: mol_type = other DNA
tgcggcgatcaacaaaaaataccgccatgcggatggcaccgaaatgaccatttcccgtgtctgctgggacaccgg

SEQ ID NO: 16741 - DNA, 75 bp, synthetic construct
  source 1..75: mol_type = other DNA
gcaactgaaaaattcaaggtcattacaacatttaccatcatcgcagatatggccaaaaacgtggctggagatgct

SEQ ID NO: 16742 - DNA, 75 bp, synthetic construct
  source 1..75: mol_type = other DNA
agaccgttaatcgaggtgcggtcatgccaggaatgctggtcaaacacaaagatggtacctggactgcatcagcta

SEQ ID NO: 16743 - DNA, 75 bp, synthetic construct
  source 1..75: mol_type = other DNA
actggcaatgctcctcgataagctggactggcgtcagccaaaaacatcccgccttaacgccctgacaatgttgta

SEQ ID NO: 16744 - DNA, 75 bp, synthetic construct
  source 1..75: mol_type = other DNA
tgggggtatctatggttttttgtggaaatcatccttttgacgagacgctgacaaagaaaatgagaattgccaggc

SEQ ID NO: 16745 - DNA, 75 bp, synthetic construct
  source 1..75: mol_type = other DNA
ataaaacggattcggtagcactgttgccctgtatcgaacaggcccgggaggatgtccgtactcttcgtcatctgc

SEQ ID NO: 16746 - DNA, 75 bp, synthetic construct
  source 1..75: mol_type = other DNA
cgggagataaagagtatgcagaggttctcgttgctattacagaacttgctaatactctgcgaagagatttaatgg

SEQ ID NO: 16747 - DNA, 75 bp, synthetic construct
  source 1..75: mol_type = other DNA
gtcttgatgagccggacagtctgaaacgactgagcaaaatgatcagtgatctactccctccggtggatttaacgg

SEQ ID NO: 16748 - DNA, 75 bp, synthetic construct
  source 1..75: mol_type = other DNA
ttgcggcagctaaggaagcaatgcgtctgacctttttccactggggactgcacgcatgggcaatttatgccattg

SEQ ID NO: 16749 - DNA, 75 bp, synthetic construct
  source 1..75: mol_type = other DNA
ttcgtgattggtgtgttgcatcaactggtgacacctatccagtgggtaatgatgtccgataccgtcgactacggc

SEQ ID NO: 16750 - DNA, 75 bp, synthetic construct
  source 1..75: mol_type = other DNA
atggctacatcgacagtaattccaggagatatcaccacgctaaagggagatgtcagtaaaactaaggaagatatt

SEQ ID NO: 16751 - DNA, 75 bp, synthetic construct
  source 1..75: mol_type = other DNA
atggttacaaaaacagtaattccgggagacatcaccacgctaaagggagatatttcctcaattaacggaaaagta

SEQ ID NO: 16752 - DNA, 75 bp, synthetic construct
  source 1..75: mol_type = other DNA
atcgccaaactggggccgtatgagttcatctgtacgggtcgcccggacgaaggcatcccggcggtttgcttcaaa

SEQ ID NO: 16753 - DNA, 75 bp, synthetic construct
  source 1..75: mol_type = other DNA
aggcagaggtgacacggcaggctgatgtgacgcgaatactgccgctgattaacgagctggaggcgctgccagagc

SEQ ID NO: 16754 - DNA, 75 bp, synthetic construct
  source 1..75: mol_type = other DNA
gtcttgttgattttcttatccggcttttgattacagcgattgtcatttccccggtaattatctggtcgtgggata

SEQ ID NO: 16755 - DNA, 75 bp, synthetic construct
  source 1..75: mol_type = other DNA
actcacggaaggcagtgcggatcaggctggtaaatattgatgcgccggaaaagaaacaggattatggccggtggt

SEQ ID NO: 16756 - DNA, 75 bp, synthetic construct
  source 1..75: mol_type = other DNA
tgacaccgatgaacatgaccaccagtccctctgctggcgatgacaacggtaagaaaaaggagagtggagatgcag

SEQ ID NO: 16757 - DNA, 75 bp, synthetic construct
  source 1..75: mol_type = other DNA
atgaagaaatatataccagtggtattatttgttttttcatgtcaggtattttctgctgatattcatggacgggtt

SEQ ID NO: 16758 - DNA, 75 bp, synthetic construct
  source 1..75: mol_type = other DNA
ctgccgttcctcgaagcgattcgccagatggctgttgaaattggccgtgagcacaccctgtttatgcacctgacg

SEQ ID NO: 16759 - DNA, 75 bp, synthetic construct
  source 1..75: mol_type = other DNA
actcaagattttcttcatcagcaactaaaacatgattttgataaaacaatatcatatgactctaaaaaggggagc

SEQ ID NO: 16760 - DNA, 75 bp, synthetic construct
  source 1..75: mol_type = other DNA
cgataaagtactcaaaagcctcgagactcacgttttcccctttatcggcaaccgggatatcacaacactcagtac

SEQ ID NO: 16761 - DNA, 75 bp, synthetic construct
  source 1..75: mol_type = other DNA
gtctacagtgattacctgttatctcaacagcgcgcggcaattaacaacccacgaaaagtgggcgtgttcaaaacg

SEQ ID NO: 16762 - DNA, 75 bp, synthetic construct
  source 1..75: mol_type = other DNA
gtgaatatgaacaatgctctgtggcactctgatagaaattcggaaatcaaagagctgaaagccaacgactcccaa

SEQ ID NO: 16763 - DNA, 75 bp, synthetic construct
  source 1..75: mol_type = other DNA
tgctgattgtacgcaggatgctggtactacacggtggtgatatcaggttgactgattcaacgactggagcctgct

SEQ ID NO: 16764 - DNA, 75 bp, synthetic construct
  source 1..75: mol_type = other DNA
ggtgattctcggcgcgatgatgcgcaagctggcacaggtggcgtatggagtgctgaagtcaggcgtgccgttcga

SEQ ID NO: 16765 - DNA, 75 bp, synthetic construct
  source 1..75: mol_type = other DNA
ggagcaattttctgtctgtgaacttattcaggatgtagctcaaaaatttgagctcagcatagaaacccgtcgatt

SEQ ID NO: 16766 - DNA, 75 bp, synthetic construct
  source 1..75: mol_type = other DNA
caccattgatgagctgtggcgggatatgcgctgggcggtggcgcgtatccaggacaagccgcgctgcatcgtgag

SEQ ID NO: 16767 - DNA, 75 bp, synthetic construct
  source 1..75: mol_type = other DNA
tcatcatgtacatgaccgatgctgcgcagaaccaggaggacgtgaacaacctccgcaatgcaatgaaaagtgcca

SEQ ID NO: 16768 - DNA, 75 bp, synthetic construct
  source 1..75: mol_type = other DNA
tttctaaatcgcctattcgagtttcattttgcccgttctgtggtgaaagtctgaaaacgtgggaagcggaggcaa

SEQ ID NO: 16769 - DNA, 75 bp, synthetic construct
  source 1..75: mol_type = other DNA
atctgcactttgccgctgaacgatcgcgtccggcggtggagctgcttgccagggtgccgctggagaatatcgaat

SEQ ID NO: 16770 - DNA, 75 bp, synthetic construct
  source 1..75: mol_type = other DNA
ctgggtgccggggacacgcgaagaggtcattgagggaatcagactgcttggtgacgcgcaacgtgaactggtcag

SEQ ID NO: 16771 - DNA, 75 bp, synthetic construct
  source 1..75: mol_type = other DNA
tcagaaagttttaaaaggcttggaaaaagccgagaaacaaacgatgcaaatcgcatcaagaattgaaaaacgact

SEQ ID NO: 16772 - DNA, 75 bp, synthetic construct
  source 1..75: mol_type = other DNA
atggcaacaaaagaagaaaatcagaaacgtcttcgtcaactggctggcctgctggggcgcgaggcggatatgtcg

SEQ ID NO: 16773 - DNA, 75 bp, synthetic construct
  source 1..75: mol_type = other DNA
attatggcgaaccgctacgactggcagatgttcattgaggccaccggagacgggggaagcggtaagagtacattt

SEQ ID NO: 16774 - DNA, 75 bp, synthetic construct
  source 1..75: mol_type = other DNA
tgaaccgctgatcggtaaccccggtgatggttcatcaccccactgtgcggtggtggatgaatatcacgagcacgc

SEQ ID NO: 16775 - DNA, 75 bp, synthetic construct
  source 1..75: mol_type = other DNA
agattgacggtaaaacgcattattattgtgtcgcacccaagttttttgttccctacgacacaatctatagcgctg

SEQ ID NO: 16776 - DNA, 75 bp, synthetic construct
  source 1..75: mol_type = other DNA
acagcgcgtcacggccattatgcggtatgccgtacagaacgattatatcgactcgaacccggctagcgatatggc

SEQ ID NO: 16777 - DNA, 75 bp, synthetic construct
  source 1..75: mol_type = other DNA
ggatgtcgtgcgcggaaagattgtggcctgccagtttgtgattcaggcctgccagcgccatcttgatgacctgat

SEQ ID NO: 16778 - DNA, 75 bp, synthetic construct
  source 1..75: mol_type = other DNA
gtggcgcaccgttacgcgggaaggccggagatgcgctaccgctacgacgataccgggcgggtggtggagcagctg

SEQ ID NO: 16779 - DNA, 75 bp, synthetic construct
  source 1..75: mol_type = other DNA
gagaaccaagatgaggattacagtttagcccccagcaactgtgaaagaaaatacgaaatatctaatgaaaagcag

SEQ ID NO: 16780 - DNA, 75 bp, synthetic construct
  source 1..75: mol_type = other DNA
gcgcgggctgctggctcactctgtcctgatgtacgcccccgacagcgccctgccagtcggtcttatcgaacagca

SEQ ID NO: 16781 - DNA, 75 bp, synthetic construct
  source 1..75: mol_type = other DNA
cccctgaacaattacgcaaacaggcgcaggaaatgctgcgacaggcggaacaactggaaaaatcaggcgtaacaa

SEQ ID NO: 16782 - DNA, 75 bp, synthetic construct
  source 1..75: mol_type = other DNA
cgtacctggaattttgaggacggtgccgggtactggatgaaccatgtcatcagggatttcgggattcttaagtaa

SEQ ID NO: 16783 - DNA, 75 bp, synthetic construct
  source 1..75: mol_type = other DNA
gctgtggacatttcaggtcggggaccttgaaaacgtcaatatcactcactgggcagtaatgccgaaagcaccgaa

SEQ ID NO: 16784 - DNA, 75 bp, synthetic construct
  source 1..75: mol_type = other DNA
ggtgtccccgggaagggatgcaggtgacggagaaaccgtcggtgatgacggtgaagtttggcgacggttatcagc

SEQ ID NO: 16785 - DNA, 75 bp, synthetic construct
  source 1..75: mol_type = other DNA
ggaaccctgtgggctggctgggtgccgcggctgtatcgggcatgtatgcggcaggggccagtatgatcctgggcg

SEQ ID NO: 16786 - DNA, 75 bp, synthetic construct
  source 1..75: mol_type = other DNA
ccccagaccggcacgcctgccaccgatctggatgatgactactttgacatgttgcaggaggagctttgcagcgtt

SEQ ID NO: 16787 - DNA, 75 bp, synthetic construct
  source 1..75: mol_type = other DNA
accctgtaaatttggcagtaaaattatcgtcaacaatctggtgaggtgggacagatggggatttcatctgaacaa

SEQ ID NO: 16788 - DNA, 75 bp, synthetic construct
  source 1..75: mol_type = other DNA
atgatgaacatcgaagaactgcgtaaaattttttgtgaagatggcctctatgctgtgtgcgttgaaaatggaaat

SEQ ID NO: 16789 - DNA, 75 bp, synthetic construct
  source 1..75: mol_type = other DNA
accgctggggagcatgggcggcagcagataacagtggtgtggactggcaaccgatagctgcaggcttcaaggggc

SEQ ID NO: 16790 - DNA, 75 bp, synthetic construct
  source 1..75: mol_type = other DNA
gaataaggatgaggtgtttgagcggggggtgatcaacgttttcagaggactgagctgggattacaaaaccaattg

SEQ ID NO: 16791 - DNA, 75 bp, synthetic construct
  source 1..75: mol_type = other DNA
aggtggtggccgcactgatggccatcgagagagagttgcgcagcttacggcaggtcgtcagggaacagggagcgc

SEQ ID NO: 16792 - DNA, 75 bp, synthetic construct
  source 1..75: mol_type = other DNA
gggccatcgtaaagccgtaaatcagaaacgtgcagcaagctatatccgcaaaatccgtgaaatgctggtcgcagg

SEQ ID NO: 16793 - DNA, 75 bp, synthetic construct
  source 1..75: mol_type = other DNA
atgttccgttgtccactttgtggcgcatctgcccgtatccgcactagtcgtccggaaaatgattcaaacactgtg

SEQ ID NO: 16794 - DNA, 75 bp, synthetic construct
  source 1..75: mol_type = other DNA
atctgcaacccgcactggcacaactggaaaaggccagagccgcccatcttgagaacgcccgcctgatggatgaga

SEQ ID NO: 16795 - DNA, 75 bp, synthetic construct
  source 1..75: mol_type = other DNA
agactcctgaaaactgggaagggagggtaatgttacaaagatatctcgaattaaaaatgaaagatcatcttagtt

SEQ ID NO: 16796 - DNA, 75 bp, synthetic construct
  source 1..75: mol_type = other DNA
atggctacttggcaaggaacaaatggcggattgttggctggtatcggtggtgtcaactcaaacgctccgagcgta

SEQ ID NO: 16797 - DNA, 75 bp, synthetic construct
  source 1..75: mol_type = other DNA
aaatggcgttcagtgggtattatgtcagatgaagccggtattatatttgatggatataccctgtctgagttgcct

SEQ ID NO: 16798 - DNA, 75 bp, synthetic construct
  source 1..75: mol_type = other DNA
cggtaaaccgatccccgacaaccgagggaatatcaccattaatctggatgaccacatacagtccgttcagggtaa

SEQ ID NO: 16799 - DNA, 75 bp, synthetic construct
  source 1..75: mol_type = other DNA
ttcttccaaagacaaaacccgtcttgcatttgcaggcctgaaatttggtgattacggctcaatcgattacggccg

SEQ ID NO: 16800 - DNA, 75 bp, synthetic construct
  source 1..75: mol_type = other DNA
tatttgcttttttatgtcatcagagttgccggatggtgatgatattcctgtggtactcaccgggatgattttacc

SEQ ID NO: 16801 - DNA, 75 bp, synthetic construct
  source 1..75: mol_type = other DNA
acccgtccggtgaagtcacccccagtaaggctgaccgccttattacggaacgtctggttcaggcgctggccctgg

SEQ ID NO: 16802 - DNA, 75 bp, synthetic construct
  source 1..75: mol_type = other DNA
ctggaccgccatcttcatgaacccggtgtggccttcacctccacgcatgcggcacgggaatggctgatactgaac

SEQ ID NO: 16803 - DNA, 75 bp, synthetic construct
  source 1..75: mol_type = other DNA
tactgcaacgcgagaagatgatttgattttgccatcgctgcatatggcaaatcgcgaactgcgtagggcgaagaa

SEQ ID NO: 16804 - DNA, 75 bp, synthetic construct
  source 1..75: mol_type = other DNA
accggcctgatgacccgcagccactacagaacggtaaatgacattaccctgggtaaacgcacggaggcaaaacga

SEQ ID NO: 16805 - DNA, 75 bp, synthetic construct
  source 1..75: mol_type = other DNA
aagtggcttcaacgctggcaatggcaatcagcaaaggccgtctgattcgcgttaatcagaacggtaaatttcgtt

SEQ ID NO: 16806 - DNA, 75 bp, synthetic construct
  source 1..75: mol_type = other DNA
gagtgccggaagagtgaagttatgcagcgcatattgtcgttttatcagggtgatgttcggtatttattgaagtga

SEQ ID NO: 16807 - DNA, 75 bp, synthetic construct
  source 1..75: mol_type = other DNA
cctcgacaacaaagacgccagactttaccacctcgaaggcgtgatcaggacgcaggcgatactgctgaaggaggg

SEQ ID NO: 16808 - DNA, 75 bp, synthetic construct
  source 1..75: mol_type = other DNA
ggcacgggagtggctgattctgaacatggcgggactggagcgggaagagttccgggtgctgtatctgaataacca

SEQ ID NO: 16809 - DNA, 75 bp, synthetic construct
  source 1..75: mol_type = other DNA
ttctttctccagtgatggagaagcggatgattaatctgttaatcatcgttctcagggcagtagttgccgttgcaa

SEQ ID NO: 16810 - DNA, 75 bp, synthetic construct
  source 1..75: mol_type = other DNA
ccgaactgttcccgatgtcgaaaattaacgacgccatccagcatgtgcgggatggtaaggcgcgttatcgcgtgg

SEQ ID NO: 16811 - DNA, 75 bp, synthetic construct
  source 1..75: mol_type = other DNA
cacctcgctgagactgcgggcgcagcgggcgtacgatggcctgagtgttgctggcccgtcaggtgcatacgagta

SEQ ID NO: 16812 - DNA, 75 bp, synthetic construct
  source 1..75: mol_type = other DNA
gcaaaaggctttgttcaactcagtagcgccactaacagcgattctgaaacgctggctgcaacgccgaaagcggtt

SEQ ID NO: 16813 - DNA, 75 bp, synthetic construct
  source 1..75: mol_type = other DNA
atgcagcatttaaaaaatattactgcgggtaatccaaaaactgttgcccaatatcaactgacaaaaaattttgat

SEQ ID NO: 16814 - DNA, 75 bp, synthetic construct
  source 1..75: mol_type = other DNA
gtcattcgaaaagcgttacacgctcaatgtgattgtgaccgactttaccggtgattttgacctgctcatcgtgcc

SEQ ID NO: 16815 - DNA, 75 bp, synthetic construct
  source 1..75: mol_type = other DNA
atgagggggcgatagccacaggaaccgtcattaatgataagggctggcaggtcgtcaagcccggtacagtggcaa

SEQ ID NO: 16816 - DNA, 75 bp, synthetic construct
  source 1..75: mol_type = other DNA
accattttaagagctgtagataaagaatccgcgcacgaatttgtacaggaaacactgcaggaagcctgggaaacc

SEQ ID NO: 16817 - DNA, 75 bp, synthetic construct
  source 1..75: mol_type = other DNA
acaattttaagagccgtggataaagaatccgcgcaagaatttgtacaggaaacgctgcaggaagtctgggaaaca

SEQ ID NO: 16818 - DNA, 75 bp, synthetic construct
  source 1..75: mol_type = other DNA
cgcgggcaatatgaacacaaagcgcctggttatcactccggcaacggataccaccgacgcggtgatggagagcga

SEQ ID NO: 16819 - DNA, 75 bp, synthetic construct
  source 1..75: mol_type = other DNA
cactccattcggcagaaggaaatatcaacgggcaacagattcatgcattctgtacttccttttaccgacaggtgc

SEQ ID NO: 16820 - DNA, 75 bp, synthetic construct
  source 1..75: mol_type = other DNA
cagagccgggagacatccggcgttttgttcagcaggcggtggaccactggccacatctgttggcatttcgtttca

SEQ ID NO: 16821 - DNA, 75 bp, synthetic construct
  source 1..75: mol_type = other DNA
ctctgcggtcgatcaccggctggcagaactaaccatgaacaaactttacgatcgcgttccggcttctgtctggaa

SEQ ID NO: 16822 - DNA, 75 bp, synthetic construct
  source 1..75: mol_type = other DNA
atggcgggactggagcgtgaagaattccgggtgctgtatctgaacaaccagaatcagttgattgccggtgaaacc

SEQ ID NO: 16823 - DNA, 75 bp, synthetic construct
  source 1..75: mol_type = other DNA
cgcgttgtcagtggtgatgcttgatgcgcatagcgtgcaggtgatcatcggaccgcaggtacagagcgtcaaaac

SEQ ID NO: 16824 - DNA, 75 bp, synthetic construct
  source 1..75: mol_type = other DNA
acatgcaacacgacaaagcgcagttacttaaccgcaaggcagacctggaagaggagctggcatttgtccgtggcg

SEQ ID NO: 16825 - DNA, 75 bp, synthetic construct
  source 1..75: mol_type = other DNA
cctgttcgttatcgggctgatatttgcccgcctgtaccgccgggcatcggcagagcaggcctttgtccgcacagg

SEQ ID NO: 16826 - DNA, 75 bp, synthetic construct
  source 1..75: mol_type = other DNA
atgaacggtataaaaacggggctggggatcacgccgggtgaacacattatcagtgcggcctcagcccttagcaga

SEQ ID NO: 16827 - DNA, 75 bp, synthetic construct
  source 1..75: mol_type = other DNA
cgcgtacaaaaagttgcccgctttcttcagacagagataaggcaataactcagttccatgagctattatcaaaat

SEQ ID NO: 16828 - DNA, 75 bp, synthetic construct
  source 1..75: mol_type = other DNA
gatattgatgaaaccatcagtcattactggccgacaggcagtctccgtccaccgcgctacatgctgggcctgatg

SEQ ID NO: 16829 - DNA, 75 bp, synthetic construct
  source 1..75: mol_type = other DNA
tgctaagcaggaaacagaagaagaaaatgatgaagaaaaaccgcaaccatcttgcgcaatggcagatgaacaggc

SEQ ID NO: 16830 - DNA, 75 bp, synthetic construct
  source 1..75: mol_type = other DNA
agcaggctaccgctgtcatgtcactgaggatacctggattgagccacaggcagaactggtttacggtgctgtatc

SEQ ID NO: 16831 - DNA, 75 bp, synthetic construct
  source 1..75: mol_type = other DNA
cgcgagacgttacgggctctggaggctaaaaccggtgcatcaaggtattacataagcactctcgccagagaactg

SEQ ID NO: 16832 - DNA, 75 bp, synthetic construct
  source 1..75: mol_type = other DNA
ggcgtcaggcgcgggcgattatgaaagcgtacaaacctgacgtggtgctcggtatgggcggctacgtatcaggtc

SEQ ID NO: 16833 - DNA, 75 bp, synthetic construct
  source 1..75: mol_type = other DNA
tgcttctgcacgcgcgcgataaagacagggatgattttcgtgaggaagaggggaaaactggcgttctgataattg

SEQ ID NO: 16834 - DNA, 75 bp, synthetic construct
  source 1..75: mol_type = other DNA
ggtatgacgcagggtgggattggacactggttgcgcggatctcgtcatccatctcttagtgatattggtgtggtg

SEQ ID NO: 16835 - DNA, 75 bp, synthetic construct
  source 1..75: mol_type = other DNA
aggctgagaaaggccggaatgccggtggtgaccacgaccgtggaggtgcacgataacctgacaggaacaacccgc

SEQ ID NO: 16836 - DNA, 75 bp, synthetic construct
  source 1..75: mol_type = other DNA
atcatttaaaaaaccacaagattattttttttatcaacaagagatgctattaagatggaactacgccgctgcatc

SEQ ID NO: 16837 - DNA, 75 bp, synthetic construct
  source 1..75: mol_type = other DNA
tcagtctgtcagaagctgcgcgctttcgggtatatcagcgcatggggctgtaagaccatttccgaggtgaaagcc

SEQ ID NO: 16838 - DNA, 75 bp, synthetic construct
  source 1..75: mol_type = other DNA
tatgccaccgcccgtgcgcttggtctgcgtgccaaaattgatgagcagacagggtggcacaaaagcctgtccaac

SEQ ID NO: 16839 - DNA, 75 bp, synthetic construct
  source 1..75: mol_type = other DNA
acgtatcgttaacctgcctggttcggaaattacccaacagcgtggtggtatccataactcggtcacccgtatcac

SEQ ID NO: 16840 - DNA, 75 bp, synthetic construct
  source 1..75: mol_type = other DNA
ttcttttctggtatatgtacgcaggatcatgcagcgcaagacttcatcgttccctgggctatggcaggcactacg

SEQ ID NO: 16841 - DNA, 75 bp, synthetic construct
  source 1..75: mol_type = other DNA
tatggacacaatggcagaagcgcatatgtgggcggtggacaaaccgctgaacccgtcgttggcccgcgacattat

SEQ ID NO: 16842 - DNA, 75 bp, synthetic construct
  source 1..75: mol_type = other DNA
taggtttcgaatgccatccaataggcaagaccttgagaattatcagtccattcacttactgtgatgatggagagc

SEQ ID NO: 16843 - DNA, 75 bp, synthetic construct
  source 1..75: mol_type = other DNA
tgtgatgcgtaccctggaactggaatctgaacccgtcaccaaattgctgcaggagaatacttaccgtgagttgct

SEQ ID NO: 16844 - DNA, 75 bp, synthetic construct
  source 1..75: mol_type = other DNA
tgcatgtgcccggagttcagcgggtggagttaacacaaccagcgaaggatctggtgatcagcgaaacacaggcgg

SEQ ID NO: 16845 - DNA, 75 bp, synthetic construct
  source 1..75: mol_type = other DNA
ggattatcgtttagtaaattaattcttgaagaacgaatgatgatggcgcaaagattattgatctacagtaaccat

SEQ ID NO: 16846 - DNA, 75 bp, synthetic construct
  source 1..75: mol_type = other DNA
gcctatggcgatcacggcattcgtatttatggcatctggtcacctattgcagagggcaagatctgcactcatgcc

SEQ ID NO: 16847 - DNA, 75 bp, synthetic construct
  source 1..75: mol_type = other DNA
tgaacgcctggcacgccagacgctgtatcgcgccaatcgcctgttcatggaggcgtataccgaaattctggaact

SEQ ID NO: 16848 - DNA, 75 bp, synthetic construct
  source 1..75: mol_type = other DNA
gaaaataacggtgtcgcatccgaagacctgctggcggtggtgcgtaacgcccttaatggcgaggacgtcaggccg

SEQ ID NO: 16849 - DNA, 75 bp, synthetic construct
  source 1..75: mol_type = other DNA
agaaaacatcgaagcggtgaatacggttcttgaagagatcgacgctcacgagatcccaaccctgctggtgatgaa

SEQ ID NO: 16850 - DNA, 75 bp, synthetic construct
  source 1..75: mol_type = other DNA
cctgtttatcttccgtggccgacggggagacacgattaaaatcctgtgggctgatgctgatggtctgtgcctgtt

SEQ ID NO: 16851 - DNA, 75 bp, synthetic construct
  source 1..75: mol_type = other DNA
tacccggcaacggtcgagaacagaaacgggcaagtcgttgtgactctgagtgatttcgacctggaaacaagcgca

SEQ ID NO: 16852 - DNA, 75 bp, synthetic construct
  source 1..75: mol_type = other DNA
gacattgtgctcaacagtacgcaggcgtctttctgtaccgaataccgcgtcgtgaccggaggctcggatgagtga

SEQ ID NO: 16853 - DNA, 75 bp, synthetic construct
  source 1..75: mol_type = other DNA
gatctctctttcgtcgatgccactgtttgtgattactacggcatcaataatgttcatcaaattaaggaaaacgcc

SEQ ID NO: 16854 - DNA, 75 bp, synthetic construct
  source 1..75: mol_type = other DNA
agagtgcgtctgcaacctgatatggaacatcttcttgccgggcttattgctattgatgctgccagagctgctgtg

SEQ ID NO: 16855 - DNA, 75 bp, synthetic construct
  source 1..75: mol_type = other DNA
ggtggaactggtgaaaaaaggccagaaattattcacatctatggaagttagcccgaagttcgctgatacgggcaa

SEQ ID NO: 16856 - DNA, 75 bp, synthetic construct
  source 1..75: mol_type = other DNA
ggacagagattttaggttatctgattgataactactctaaagatgcagcagaagatctcatgtctgccaaacaaa

SEQ ID NO: 16857 - DNA, 75 bp, synthetic construct
  source 1..75: mol_type = other DNA
cgccgatcacaggcttgcagaactcacaatgaataaactctacgataaaatccccccatccgtctggaaatatgt

SEQ ID NO: 16858 - DNA, 75 bp, synthetic construct
  source 1..75: mol_type = other DNA
agagagccctttatctcgtgaagtatgagacgaagcagcatgacggttctggtcaacgtaattatggttgcagtc

SEQ ID NO: 16859 - DNA, 75 bp, synthetic construct
  source 1..75: mol_type = other DNA
atttattccaactatcggttaagactcacactgcatatcagactgctgccatgacatcagataaaaattacagta

SEQ ID NO: 16860 - DNA, 75 bp, synthetic construct
  source 1..75: mol_type = other DNA
gacttcagtcaggtgccggaactgaatggagctcagttccggcaactctgtgaaacgacagactgggttgatgca

SEQ ID NO: 16861 - DNA, 75 bp, synthetic construct
  source 1..75: mol_type = other DNA
aatctcggatccgtcacgacattttgcgattatacggtcatggtcaaaggcaccgtcctggcaagcgggccgaca

SEQ ID NO: 16862 - DNA, 75 bp, synthetic construct
  source 1..75: mol_type = other DNA
ggcgatcacttaccgtgaaaacttcagccagcgcgaaggaatgctgatctggcccgactttactggctgggacac

SEQ ID NO: 16863 - DNA, 75 bp, synthetic construct
  source 1..75: mol_type = other DNA
aacagtattatggcgatgaagtcgggctgtttggtaaagataagcgccagaaagacccgcatgctatttctgccg

SEQ ID NO: 16864 - DNA, 75 bp, synthetic construct
  source 1..75: mol_type = other DNA
agtaccgaccagagcctggtcctgtgcgacaccgtgcgttatctgccggagtcctttgagatcccctggaatccg

SEQ ID NO: 16865 - DNA, 75 bp, synthetic construct
  source 1..75: mol_type = other DNA
cagagcggtatgtacgaagtctgtttacaggtaccagccagatttgtaccaggactgcggaggtgcgagtactta

SEQ ID NO: 16866 - DNA, 75 bp, synthetic construct
  source 1..75: mol_type = other DNA
cgctaatgacgtgataaaaatgcctgatgttccccgctatactgaagaatatcgcaagcatcttgtggaaatttt

SEQ ID NO: 16867 - DNA, 75 bp, synthetic construct
  source 1..75: mol_type = other DNA
ggaatccatgtttacgctgctgtcacgcgtgacatcaccgcgactggatgaagtgacgatcaaaaaaatggcatc

SEQ ID NO: 16868 - DNA, 75 bp, synthetic construct
  source 1..75: mol_type = other DNA
atggcgttaacacaccgcgaactctgtcagattgcgtacaagttccttaagcgcaacgggttcaaggtttgcttt

SEQ ID NO: 16869 - DNA, 75 bp, synthetic construct
  source 1..75: mol_type = other DNA
ttcatccgaaagatgaacaggaggctgtgatgcgtaccctggaactggaatctgaacccgtcaccaaattgctgc

SEQ ID NO: 16870 - DNA, 75 bp, synthetic construct
  source 1..75: mol_type = other DNA
agctggtaccagacctgactgattatcagtggtacaaaggatatgcagatgtcattgataaactggttacaaagt

SEQ ID NO: 16871 - DNA, 75 bp, synthetic construct
  source 1..75: mol_type = other DNA
accgagtggatgctctatgcgcagaaagtcgaatctacagacacttccggcctgccagtaacgtttcccgaacaa

SEQ ID NO: 16872 - DNA, 75 bp, synthetic construct
  source 1..75: mol_type = other DNA
ttaccatcgacaccgccgacaataaaatcctcagccgtaaaaagctgctggatgacggcaaagagcacttcttta

SEQ ID NO: 16873 - DNA, 75 bp, synthetic construct
  source 1..75: mol_type = other DNA
accaatgcctaacgctctaagcatgcttgaaagagagatcacacaactgattggtgatgcgcaggaagccactgt

SEQ ID NO: 16874 - DNA, 75 bp, synthetic construct
  source 1..75: mol_type = other DNA
cgagaatcgccagctggtagcggataacgcaaaaacgcgcgtacccatgacgattggcgcgctctggacggctta

SEQ ID NO: 16875 - DNA, 75 bp, synthetic construct
  source 1..75: mol_type = other DNA
caggcggttattaatgctgcctatctggtggcctatgcagatggtgaatgtgaggcttcagagaaagcgaagatc

SEQ ID NO: 16876 - DNA, 75 bp, synthetic construct
  source 1..75: mol_type = other DNA
ctactggtttgtgcaatacggcatgactacgcagccgtatcagttcacgaaaggcaacatttttcatctgatgga

SEQ ID NO: 16877 - DNA, 75 bp, synthetic construct
  source 1..75: mol_type = other DNA
tatatcaggcagcagacacgtttatcggagagccatgatgagaattacagctcacggcaggagaatacgtgggtg

SEQ ID NO: 16878 - DNA, 75 bp, synthetic construct
  source 1..75: mol_type = other DNA
tgaaggatgacccgttctccggacacctgttcatcttccgcggacgccggggtgaccagataaaagtgttgtggg

SEQ ID NO: 16879 - DNA, 75 bp, synthetic construct
  source 1..75: mol_type = other DNA
tgtctttggccttttctggctgctgggataccagttttctccacgcctggctgatgccggtgcttcggttttctg

SEQ ID NO: 16880 - DNA, 75 bp, synthetic construct
  source 1..75: mol_type = other DNA
caaaagtaattaccgcgcatgtgccattacctatggctgataaagtcgaccagatggccgccagactggaacgct

SEQ ID NO: 16881 - DNA, 75 bp, synthetic construct
  source 1..75: mol_type = other DNA
ccgccggtgctggtgcagatgctcgaccggctggaaagtgaaatcctggctgaccgggtgagtgaggaaagccgc

SEQ ID NO: 16882 - DNA, 75 bp, synthetic construct
  source 1..75: mol_type = other DNA
tcgtgtttcacgcatcacccgcacggcttccggtgctaatgccggtggagggaacaaaaccgatcgcaatccgaa

SEQ ID NO: 16883 - DNA, 75 bp, synthetic construct
  source 1..75: mol_type = other DNA
cgggcgtacgacggcctgagtgttgctggcccgtcaggtgcatacgagtattttgcccgcagcgccagcggtctg

SEQ ID NO: 16884 - DNA, 75 bp, synthetic construct
  source 1..75: mol_type = other DNA
agacagagcttaagtcccggggaataaagcgtgcccgtgcgcgtcgtgatgcgggcagggaacgtcaggatatcg

SEQ ID NO: 16885 - DNA, 75 bp, synthetic construct
  source 1..75: mol_type = other DNA
caagctgggccgcagctcccgctggctgaaaagtgaagtggaagcctggctacaggagcgtattgcacagccccg

SEQ ID NO: 16886 - DNA, 75 bp, synthetic construct
  source 1..75: mol_type = other DNA
cgttccgggatgctgtcattaatggatacgcaggcccgtgatacatggtaccggtcactggagtacgataatttt

SEQ ID NO: 16887 - DNA, 75 bp, synthetic construct
  source 1..75: mol_type = other DNA
gcgcagcgttgtgctccagcagcaacagcaactgtggagcacgatcaggatggcagaggagaagctgagttctta

SEQ ID NO: 16888 - DNA, 75 bp, synthetic construct
  source 1..75: mol_type = other DNA
atgcgcaggcccatgatacatggtaccgctcactggagtacgataactttccggaaatcagcgaggcgaatatcc

SEQ ID NO: 16889 - DNA, 75 bp, synthetic construct
  source 1..75: mol_type = other DNA
ggtgacgttgagaaggcggcgagggtatttttcatcaacgagttgcaaccggtcatggaagcgatgaagcatgtc

SEQ ID NO: 16890 - DNA, 75 bp, synthetic construct
  source 1..75: mol_type = other DNA
atgttatgtggcctccctctgcacggcctttccgatacactatcgccaacgaggttggtattgttgaaagccaga

SEQ ID NO: 16891 - DNA, 75 bp, synthetic construct
  source 1..75: mol_type = other DNA
atttctggactggcagaaattcttggtggtgtgctggcgtggttaatcctcggtagcatgatttccccggtggtc

SEQ ID NO: 16892 - DNA, 75 bp, synthetic construct
  source 1..75: mol_type = other DNA
atgctgcatgaactctggctgcagagtggtactggccagcgtcgctgggaaggattaccggatgaggtcagggaa

SEQ ID NO: 16893 - DNA, 75 bp, synthetic construct
  source 1..75: mol_type = other DNA
cggaaatgtttaatgttgatccgcgtacaattgaacgctggcaaactcaggggctccctcagatatctggtggag

SEQ ID NO: 16894 - DNA, 75 bp, synthetic construct
  source 1..75: mol_type = other DNA
ccgcactggactgggcgatgaaacaggattttcgctgtggctgctggctcatggaaaaacctgaaacggcaatga

SEQ ID NO: 16895 - DNA, 75 bp, synthetic construct
  source 1..75: mol_type = other DNA
aaaacggctgccgcatcgtccgccagttcggcggcgtcatcggcatcatctgcgtctgcttcaaaagatgaggcg

SEQ ID NO: 16896 - DNA, 75 bp, synthetic construct
  source 1..75: mol_type = other DNA
tcatcagggttgaaaccgccaccggtgagcaggcgaaaacgcagcgccgcagcctggcggatacccttcagcagt

SEQ ID NO: 16897 - DNA, 75 bp, synthetic construct
  source 1..75: mol_type = other DNA
gtgaaatgtgccaaccttccagcgatggttttagctacgctacttggcgctctaattggcgaaatttgtttgctg

SEQ ID NO: 16898 - DNA, 75 bp, synthetic construct
  source 1..75: mol_type = other DNA
taaaacagcgtgataaataccatgctgacaacatggagacgatgagcatcaatgattaccgcgcattcctggaga

SEQ ID NO: 16899 - DNA, 75 bp, synthetic construct
  source 1..75: mol_type = other DNA
atgacagaagccgaaatactgggattaatccgccgcgtcgccggaatcagccagcaggctgacgaacaggccacg

SEQ ID NO: 16900 - DNA, 75 bp, synthetic construct
  source 1..75: mol_type = other DNA
tacgacaacggatcccacgccgggtgcatcatctacatcggtgcagcgcaggtaaaccgcgaaagcatggactcc

SEQ ID NO: 16901 - DNA, 75 bp, synthetic construct
  source 1..75: mol_type = other DNA
gctcattcatgcgcccaacgggggcaaagagggggtgcaaattttgccgttccagcagatcaccgcaaaggatga

SEQ ID NO: 16902 - DNA, 75 bp, synthetic construct
  source 1..75: mol_type = other DNA
gtgagcagggacaatatcagtattacactgacgcgcaaggagtttcagttactttggctactggcctccagagct

SEQ ID NO: 16903 - DNA, 75 bp, synthetic construct
  source 1..75: mol_type = other DNA
tcacacttacccgacgttatggcgtcagtctcattcatctggatgccggtgctgaatgtctgcaggatttaccca

SEQ ID NO: 16904 - DNA, 75 bp, synthetic construct
  source 1..75: mol_type = other DNA
cgaggctcgcttcagggctgcgggtatcatggtggattgtgagacgctcagccggacatggcgctgttcagctac

SEQ ID NO: 16905 - DNA, 75 bp, synthetic construct
  source 1..75: mol_type = other DNA
tggaaccgtctgtgtgacaacgtactgccggaaaaaaccatgccgtttgacctgctgacggttttgccgacccgc

SEQ ID NO: 16906 - DNA, 75 bp, synthetic construct
  source 1..75: mol_type = other DNA
tcaataaagcccttgagcgctttaactttcgcctgagtatgtcaggagttgccgcagaacatgcagcaagagact

SEQ ID NO: 16907 - DNA, 75 bp, synthetic construct
  source 1..75: mol_type = other DNA
gtaatcatcctgctctacttgagggactttcttttatgcatagtaaagtagatgctcatccatattatgatggtt

SEQ ID NO: 16908 - DNA, 75 bp, synthetic construct
  source 1..75: mol_type = other DNA
atttgcccgttggtgtgatgctcgttttgctgtgtggtgcgacctgcacattgatagtctgcttcgcggtgaact

SEQ ID NO: 16909 - DNA, 75 bp, synthetic construct
  source 1..75: mol_type = other DNA
gatggaaagcgatgaagcgttacgcctgcgtgtgcctgcagcctttgaagggctttcagttgcggggccaactgc

SEQ ID NO: 16910 - DNA, 75 bp, synthetic construct
  source 1..75: mol_type = other DNA
agatgagtcctcgcagtttgatgacgaaatcgttgacaatatcttcggtgcactcaccagagactttctgaagta

SEQ ID NO: 16911 - DNA, 75 bp, synthetic construct
  source 1..75: mol_type = other DNA
gcatgggatggtcagaaagccggaacggctgtgggggtgctggtactggcgctggccgggaccgagcccacactg

SEQ ID NO: 16912 - DNA, 75 bp, synthetic construct
  source 1..75: mol_type = other DNA
caataattattgatagcactggagcgaaaaataatgctgacaatctgacctcctcattagtcaaaatgacgcagg

SEQ ID NO: 16913 - DNA, 75 bp, synthetic construct
  source 1..75: mol_type = other DNA
actttgttgatgggtggatggtttggtccggcatgggggatctgtatgtggttttttacttggaaggatacaggg

SEQ ID NO: 16914 - DNA, 75 bp, synthetic construct
  source 1..75: mol_type = other DNA
actgaacgcataacccggttattccatattcgctggctggcaggcgtatttctgacgattgccggaatgatcatc

SEQ ID NO: 16915 - DNA, 75 bp, synthetic construct
  source 1..75: mol_type = other DNA
attcatatggctggcagaaagagcggggtatcagataacagcacctgctcaggaggaaaccagtgacattaacag

SEQ ID NO: 16916 - DNA, 75 bp, synthetic construct
  source 1..75: mol_type = other DNA
gccagactacagccgggttacgtcatttatttggtcatgtcaggaatttcagaatatggcacaaggcattgactg

SEQ ID NO: 16917 - DNA, 75 bp, synthetic construct
  source 1..75: mol_type = other DNA
aaaaaatcatatatcgccatgaaatgggactgaacagcgatgtcactgccgaagaggtttatgacctggctgtac

SEQ ID NO: 16918 - DNA, 75 bp, synthetic construct
  source 1..75: mol_type = other DNA
ttgtttgggtttcgcaagaaataacccaaaaaattggattaaataaaatcaagaattatctcaaagattttgatt

SEQ ID NO: 16919 - DNA, 75 bp, synthetic construct
  source 1..75: mol_type = other DNA
atttgaaggtcagcaacatgtcaaagtcagcagcgggtacggtcagccagccggggcgcaatgtccgggcaaaat

SEQ ID NO: 16920 - DNA, 75 bp, synthetic construct
  source 1..75: mol_type = other DNA
atgatgaaactggccctgacactggaagccgacagtgttaacgtacaggcactgaatatggggcgaattgtcgtt

SEQ ID NO: 16921 - DNA, 75 bp, synthetic construct
  source 1..75: mol_type = other DNA
aaagaggtgactggtgtggcttctggagtaacgaggatgtatcggtgtggtggaaccgtctgtgtgacaacgtac

SEQ ID NO: 16922 - DNA, 75 bp, synthetic construct
  source 1..75: mol_type = other DNA
tagtctcccctcttgcaactcacacccaaaactgcctaacgaaaagttattaattttcaatcatattgctatcag

SEQ ID NO: 16923 - DNA, 75 bp, synthetic construct
  source 1..75: mol_type = other DNA
tagcctcgcggcataagctgaagatggcactgggtaaagacctgtcggataagctcgtagagcatatagaccaga

SEQ ID NO: 16924 - DNA, 75 bp, synthetic construct
  source 1..75: mol_type = other DNA
cagcaactggcgaatggtcgctggcatgtgatgcggcgtattgatggcaaaaatcgttaccccattgatgtggtg

SEQ ID NO: 16925 - DNA, 75 bp, synthetic construct
  source 1..75: mol_type = other DNA
cggagtatgacatgagcgggggatggttctggcgggttctgtggcgcttcaggccatattacggacaggttattc

SEQ ID NO: 16926 - DNA, 75 bp, synthetic construct
  source 1..75: mol_type = other DNA
cacaggtaacggcattactgggtacacctgtatctgctgaggctttggctgccagtactgtccggacagatgtat

SEQ ID NO: 16927 - DNA, 75 bp, synthetic construct
  source 1..75: mol_type = other DNA
gagcaggccctgcccctggcgatcaacccgaacagcgaccagtacctggaagagcgtttgcagctgctggacgag

SEQ ID NO: 16928 - DNA, 75 bp, synthetic construct
  source 1..75: mol_type = other DNA
cgcgcagaacgcttccgcatgctggatgcaccagcactctctccgctgcctctggagccttatgaatacacggaa

SEQ ID NO: 16929 - DNA, 75 bp, synthetic construct
  source 1..75: mol_type = other DNA
cgtcacgtttatcttcattggctatgcaagtcgtaatacaaggtgggacaaaactgagacacataaggcctcgca

SEQ ID NO: 16930 - DNA, 75 bp, synthetic construct
  source 1..75: mol_type = other DNA
atcgcctgcgcgttcaggctgaacaggccgcccgcgagggcggcagtgttcgccacgcgtcgggctatgacctga

SEQ ID NO: 16931 - DNA, 75 bp, synthetic construct
  source 1..75: mol_type = other DNA
tcttgacgatggctttgatgaatccgtgttccgtgagtgggtggttacaccagagcgcccgctcagggagtggtt

SEQ ID NO: 16932 - DNA, 75 bp, synthetic construct
  source 1..75: mol_type = other DNA
atgggtgatgacctgcaggaaagcgatcgcctgtatcgctttcaggtaccgggacgaccggagctgaaccagatg

SEQ ID NO: 16933 - DNA, 75 bp, synthetic construct
  source 1..75: mol_type = other DNA
aaccgctgttgaaatccctggaaagctggttgcgtgaaaagatgaagaccctgtcgcgacactcagagttggcga

SEQ ID NO: 16934 - DNA, 75 bp, synthetic construct
  source 1..75: mol_type = other DNA
aacacacaaccaatccgcttcacatgccagaacgccaccggcggcatgggacatggacaccggaacgccttatcg

SEQ ID NO: 16935 - DNA, 75 bp, synthetic construct
  source 1..75: mol_type = other DNA
gcgaaaagctctttatcgacttctgtggtcctacggtccctgttattaatccggacaccggagagatacgccgcg

SEQ ID NO: 16936 - DNA, 75 bp, synthetic construct
  source 1..75: mol_type = other DNA
tatggttctggaaagtcagagcgaatatgactcacaatgggcgacaatttgttccattgctccaaagattggctg

SEQ ID NO: 16937 - DNA, 75 bp, synthetic construct
  source 1..75: mol_type = other DNA
tatttatcttttcatggccggtattgtctgcagatattcatggacgggttgttcgtgtactggacggtgatacca

SEQ ID NO: 16938 - DNA, 75 bp, synthetic construct
  source 1..75: mol_type = other DNA
taacgttacgacgaacagaaaacggcaatgtgattgcccacgacagtcgggacgatcaggaattcatttttgcag

SEQ ID NO: 16939 - DNA, 75 bp, synthetic construct
  source 1..75: mol_type = other DNA
gaacatcagtccacgctgagcgcggggtatcttcatgtctcgacgaacgttcctggcagcgatgaactgaacggg

SEQ ID NO: 16940 - DNA, 75 bp, synthetic construct
  source 1..75: mol_type = other DNA
accgaatccgtggccattgatattgcttatgaaggctccggcagtggtgactggcgcactgacggtttcatcgtg

SEQ ID NO: 16941 - DNA, 75 bp, synthetic construct
  source 1..75: mol_type = other DNA
gatggctacatggtgggggatcatcgttgcgcgatccttatgctcctcgacaaggctggaaaccaactatgggat

SEQ ID NO: 16942 - DNA, 75 bp, synthetic construct
  source 1..75: mol_type = other DNA
tcggtgagtgccgtgaagatgcccgggcataccgcaacctgccggagccggaagcggtgctgacggaggcggaag

SEQ ID NO: 16943 - DNA, 75 bp, synthetic construct
  source 1..75: mol_type = other DNA
tgcagatgctgggacgtgccgcaggtactcagactcagccggaagaggcgcaacagttcagcggtcagcctcagc

SEQ ID NO: 16944 - DNA, 75 bp, synthetic construct
  source 1..75: mol_type = other DNA
gggcagtcaggcgaaaaatttttgcgtgaactgtgcgaagtggacctcctggttcttgacgaaattggcatccag

SEQ ID NO: 16945 - DNA, 75 bp, synthetic construct
  source 1..75: mol_type = other DNA
ctgtctggtgagaacaatattttactcgttgatttccttcagaaaccaacgcctgaaaaacaactgaatattgaa

SEQ ID NO: 16946 - DNA, 75 bp, synthetic construct
  source 1..75: mol_type = other DNA
ccgccacgtccagcgaatgctgaaactggcagaccttgcacccgtcatccttgatgcgctggcagaagaccgcat

SEQ ID NO: 16947 - DNA, 75 bp, synthetic construct
  source 1..75: mol_type = other DNA
tgaacgagtcggttaaatcagagcagtcaccgcgggtggtactctgggaaatcgacctgacggtacagggtggtg

SEQ ID NO: 16948 - DNA, 75 bp, synthetic construct
  source 1..75: mol_type = other DNA
atccggtgcgcctgcatgggcgtctgaacatcagtccacgctgagcgcggggtatcttcatgcctcgacgaacgt

SEQ ID NO: 16949 - DNA, 75 bp, synthetic construct
  source 1..75: mol_type = other DNA
ggcagagaagaaatccgtcttcatattgtttgcgatgtccctgatgaacttattgatttcacgtttgaatggaaa

SEQ ID NO: 16950 - DNA, 75 bp, synthetic construct
  source 1..75: mol_type = other DNA
tattgttggtttggtacggttttttacctggaaacatccattcagaattatcaggcaaaagacatatttgacacg

SEQ ID NO: 16951 - DNA, 75 bp, synthetic construct
  source 1..75: mol_type = other DNA
cgccgtgagaaccgcaccggacagttcggttaaggcactgaaatacgctgccgcaattgaacgctcgttgtgtga

SEQ ID NO: 16952 - DNA, 75 bp, synthetic construct
  source 1..75: mol_type = other DNA
ttatctgaccctgggcggaagccagcgggtaactggtgctacctgtaatggtgaatccagcgatggctttacatt

SEQ ID NO: 16953 - DNA, 75 bp, synthetic construct
  source 1..75: mol_type = other DNA
ctggttacgggttattcccgtctgaacaggcgcgtaaggactggcaaaacgcccgcaaaaaactctcaagggcaa

SEQ ID NO: 16954 - DNA, 75 bp, synthetic construct
  source 1..75: mol_type = other DNA
caaggaaacgggtaaatctctgcgtgataacgctgaatacgtgaatgcctgggcgtctttgcatcgtgttcagca

SEQ ID NO: 16955 - DNA, 75 bp, synthetic construct
  source 1..75: mol_type = other DNA
atgacagaagccgaaataacgggattaatccgccgcgttgccggaatcagccagcaggctgacgaacaggccacg

SEQ ID NO: 16956 - DNA, 75 bp, synthetic construct
  source 1..75: mol_type = other DNA
acggcgctccgtttcaatcctctggcaacgctgccaagtggcgacaaagtggcggcagcggttggcattaccccg

SEQ ID NO: 16957 - DNA, 75 bp, synthetic construct
  source 1..75: mol_type = other DNA
cgtgatctcgccaccttcaaacaacaagccgacgtcattatttccaaccgtatggcagaagagcttaaggatgtg

SEQ ID NO: 16958 - DNA, 75 bp, synthetic construct
  source 1..75: mol_type = other DNA
gcaaactggtttgaccgtactgtgagtgctgatgccgcaggtgtcattctgacttcccttgtgattaaccgtcag

SEQ ID NO: 16959 - DNA, 75 bp, synthetic construct
  source 1..75: mol_type = other DNA
atgattgctcatcacttcggaaccgatgaaataccacgccagtgcgtgactcctggcgattatgttcttcatgaa

SEQ ID NO: 16960 - DNA, 75 bp, synthetic construct
  source 1..75: mol_type = other DNA
aaaggtggcgaatatgccaacctggacgctgtagtgatggatgcggtcaatgagcttatcgacgtggtctaccag

SEQ ID NO: 16961 - DNA, 75 bp, synthetic construct
  source 1..75: mol_type = other DNA
tagccgttaccactcccgcgccggcattggcgcggagtactggcgcgactatctaaaattaagcagtaacggcta

SEQ ID NO: 16962 - DNA, 75 bp, synthetic construct
  source 1..75: mol_type = other DNA
gcggggccgtctgtgcgcgtgaatgaatggttcagcgcgtatgcgatggcgggtatggcttacagccgtgtgtcg

SEQ ID NO: 16963 - DNA, 75 bp, synthetic construct
  source 1..75: mol_type = other DNA
gtcaaacacgcatatttaactcaattaaccatgacaccaaatataaaatatgtatttttactccaaaaaacatta

SEQ ID NO: 16964 - DNA, 75 bp, synthetic construct
  source 1..75: mol_type = other DNA
cccgaccgaatccgtggccgttgatgtcgcttatgaaggctccggcagtggcgactggcgcactgacgggttcat

SEQ ID NO: 16965 - DNA, 75 bp, synthetic construct
  source 1..75: mol_type = other DNA
aaacggtttatccccgctggcgcggggaacacgaggcaattagtaaaactccggcaattgctgccggtttatccc

SEQ ID NO: 16966 - DNA, 75 bp, synthetic construct
  source 1..75: mol_type = other DNA
atgaatgagtttaagcgttttgaagaccggctgaccgggctgattgaatcactgtcaccatcagggcgtcggcga

SEQ ID NO: 16967 - DNA, 75 bp, synthetic construct
  source 1..75: mol_type = other DNA
caaggactccgatatccggattggcgacctgccgattatccgggattccgaaatccagaacttctgtctgcacgg

SEQ ID NO: 16968 - DNA, 75 bp, synthetic construct
  source 1..75: mol_type = other DNA
ctgctaagtaaggactggtacctcctggaaaccaggccagaacatccgttctatgtgtcagacaatccggtggta

SEQ ID NO: 16969 - DNA, 75 bp, synthetic construct
  source 1..75: mol_type = other DNA
ctggcttgcgtattaacagcgcgaaggatgacgccgcaggtcaggcgattgctaaccgttttacttctaacatta

SEQ ID NO: 16970 - DNA, 75 bp, synthetic construct
  source 1..75: mol_type = other DNA
ccggcggatttcatctaccagaacatgatgattgagagcaacatcattcacgccgcgcatcagaacgacgtgaac

SEQ ID NO: 16971 - DNA, 75 bp, synthetic construct
  source 1..75: mol_type = other DNA
cattgcaaggctggccgccctggtaccgaagcccagagtcaacctaacccgcttccacggggtgttcgcacccaa

SEQ ID NO: 16972 - DNA, 75 bp, synthetic construct
  source 1..75: mol_type = other DNA
aacatctggcaaggctgggacggaagttactgtcgttctcaaaatcggtggagttgcatgacaaggtcatcgggc

SEQ ID NO: 16973 - DNA, 75 bp, synthetic construct
  source 1..75: mol_type = other DNA
ctcgaaggcacaccggagcagcacaaagcgcaggacgtttacaacatcagacgagacgaattagaaggagcggct

SEQ ID NO: 16974 - DNA, 75 bp, synthetic construct
  source 1..75: mol_type = other DNA
cattaatactgaattgtcatcatcatgcatcgcgagttgccagaatggcatctgatgagtttccttctatgtgtc

SEQ ID NO: 16975 - DNA, 75 bp, synthetic construct
  source 1..75: mol_type = other DNA
tcctggctgaccgggtgagtgaggaaagccgccgctggctggcatcgtgcggcctgaccgtggagcagatgcaaa

SEQ ID NO: 16976 - DNA, 75 bp, synthetic construct
  source 1..75: mol_type = other DNA
taccagaggagctcatagtggactgcctttttatcgggtggatggaccgttgcagacgatgaaaataacgggtac

SEQ ID NO: 16977 - DNA, 75 bp, synthetic construct
  source 1..75: mol_type = other DNA
agtgtgtcagtatgttccgttatgaggcgcatgtccgcccgtcgtcggtgcagagccaggattacacgtttaagg

SEQ ID NO: 16978 - DNA, 75 bp, synthetic construct
  source 1..75: mol_type = other DNA
aacaaaaacaaatctgaattaacacttaaattacaaacactaaatgaaaatgacattagtgttgatgtgaagaca

SEQ ID NO: 16979 - DNA, 75 bp, synthetic construct
  source 1..75: mol_type = other DNA
cataaacgacacgctgaaaacgtatcagtttggcgtgcgttccggcgctaaatcaggtcttgaggcgaacctgga

SEQ ID NO: 16980 - DNA, 75 bp, synthetic construct
  source 1..75: mol_type = other DNA
gattgcatctcttttctctgctaacggtgtcgcggcggtcactgattcatgccagggatatgatgtcaaagcgag

SEQ ID NO: 16981 - DNA, 75 bp, synthetic construct
  source 1..75: mol_type = other DNA
gatgcgttcacaggttacgacaggctgttcagtgcagaacgcgaaggtggtgcgctgacagaagttgcgtgctgt

SEQ ID NO: 16982 - DNA, 75 bp, synthetic construct
  source 1..75: mol_type = other DNA
ggggctgttgtggtaaaaaacattgagaaaaaaggcatttatgcaggaaacccggcaagattgatcagaacatta

SEQ ID NO: 16983 - DNA, 75 bp, synthetic construct
  source 1..75: mol_type = other DNA
gcggcgagcgtggagcactgttgtacgggctgatcggcacctgccgtctgaacggtatcgatccggaagcgtatc

SEQ ID NO: 16984 - DNA, 75 bp, synthetic construct
  source 1..75: mol_type = other DNA
caatatttgccctgtctgcagccggcgctgcgggtgatgcactgagtgaggggcagtacacctcacagaacaacg

SEQ ID NO: 16985 - DNA, 75 bp, synthetic construct
  source 1..75: mol_type = other DNA
ccgatgaatttgttgctttttctgagcctcagaaatcactgaccgcgcagattgcctcccgcagccgcgcgatcg

SEQ ID NO: 16986 - DNA, 75 bp, synthetic construct
  source 1..75: mol_type = other DNA
gagaaacggcaggagggcatgccgcagggcggcccgctgtcgccgttactgtcgaacatcctgctggatgaactg

SEQ ID NO: 16987 - DNA, 75 bp, synthetic construct
  source 1..75: mol_type = other DNA
cctgcgtattgagccgccgttatggcggtgcgggctgcggcagaacttccgcatcttccagcagcaggatatccg

SEQ ID NO: 16988 - DNA, 75 bp, synthetic construct
  source 1..75: mol_type = other DNA
tatatgaatttaaatcaaaaaatatagatgatattggaatatttgcattggcaatgtgtaatggagaatcaatta

SEQ ID NO: 16989 - DNA, 75 bp, synthetic construct
  source 1..75: mol_type = other DNA
agggattgttcagctcagtagcgccacgaacagcacgtctgaaacgctggcagcgacaccaaaagctgttaaggc

SEQ ID NO: 16990 - DNA, 75 bp, synthetic construct
  source 1..75: mol_type = other DNA
gagccggacactgatttatgactatgagcagaaccctgactccggcaacaacgtggtggcgctggcagcaaaagc

SEQ ID NO: 16991 - DNA, 75 bp, synthetic construct
  source 1..75: mol_type = other DNA
atggcctatgcgcaccttgcgcctgactatctgcaaaatgccgtcgctctgaatccactaaaaggcggagtgacg

SEQ ID NO: 16992 - DNA, 75 bp, synthetic construct
  source 1..75: mol_type = other DNA
ctgaaaatgtggcttctactgctgcaaaaacgctggctaatcctaatgcttctgccatccagaaaagcctcgctg

SEQ ID NO: 16993 - DNA, 75 bp, synthetic construct
  source 1..75: mol_type = other DNA
gtcgccgctcagtactttccttattgatatctgccttgatatatgccccgcctgggatgacggccttcactcctg

SEQ ID NO: 16994 - DNA, 75 bp, synthetic construct
  source 1..75: mol_type = other DNA
gagaacggcgtcacggagtggacgccgctgttttatgaggaccatccggcgcgggagttctgtgtccagtacggg

SEQ ID NO: 16995 - DNA, 75 bp, synthetic construct
  source 1..75: mol_type = other DNA
tgaaaaataccaaagaaactgaaatcggcggcgccactggcgttggcgtacgtattctggacagccagagcggcg

SEQ ID NO: 16996 - DNA, 75 bp, synthetic construct
  source 1..75: mol_type = other DNA
ccatcggcattaacttaattggtgactatacccatgctgacttaggcacaggcagcaccattaagagtaacgatg

SEQ ID NO: 16997 - DNA, 75 bp, synthetic construct
  source 1..75: mol_type = other DNA
gaacaagctatcaacagtagcgtgaatcttgtccccttcggtttatctgcatcggactggaaagtgcatcgtggc

SEQ ID NO: 16998 - DNA, 75 bp, synthetic construct
  source 1..75: mol_type = other DNA
atcctgggagcgagaagtattcttttaatggctgggaaatatttaatagtaattttgaacggatgattaaagaaa

SEQ ID NO: 16999 - DNA, 75 bp, synthetic construct
  source 1..75: mol_type = other DNA
tggtaagcatgccttcgcaactcttcactatggctcgttcttttaaagccgtagccaatggcaaaatttatatcg

SEQ ID NO: 17000 - DNA, 75 bp, synthetic construct
  source 1..75: mol_type = other DNA
aaagctacggaagaactcgggcaacttatcgccatcgctcgtgaagaactacagcgccgcaaggccaaagaatca

SEQ ID NO: 17001 - DNA, 75 bp, synthetic construct
  source 1..75: mol_type = other DNA
accaacagcgcacaggggccgtggtggatactggggtggtctgagcgggtgccgggtgctgaggacttactgcca

SEQ ID NO: 17002 - DNA, 75 bp, synthetic construct
  source 1..75: mol_type = other DNA
gttaccgctaccagtatgagcaggaccgcatcaccgtcacggacagcctgaaccggcgtgaggtgctgcatacag

SEQ ID NO: 17003 - DNA, 75 bp, synthetic construct
  source 1..75: mol_type = other DNA
tggtgggcgtgctgggggcgcttttgctggcgtatggtgcctggctgatttatcccccggcggggtttgttgttg

SEQ ID NO: 17004 - DNA, 75 bp, synthetic construct
  source 1..75: mol_type = other DNA
aaactatgcctgcctgacacctgagttagtggcggcgctggggctgaaagaagggatagcaaaaagcctgcagtg

SEQ ID NO: 17005 - DNA, 75 bp, synthetic construct
  source 1..75: mol_type = other DNA
tgcaggaaaaactcgccaccccggcagggcagcaagtcgcacagtccctgcagcaaaccggggatacccgcgaac

SEQ ID NO: 17006 - DNA, 75 bp, synthetic construct
  source 1..75: mol_type = other DNA
ggtttccgacgctttcgcgttcgtttcggatgtcttcgctgcggaagcagacctcgctgctgcgctggcctgttc

SEQ ID NO: 17007 - DNA, 75 bp, synthetic construct
  source 1..75: mol_type = other DNA
atcaacaaactgcacaaagcacactacgttctgatgaacgttgaagctccgcaggaagtgatcgatgagctggaa

SEQ ID NO: 17008 - DNA, 75 bp, synthetic construct
  source 1..75: mol_type = other DNA
aggtggagctgcgctacgagaaaatcacctggacttataaggacggtaacatcattcattctgacgcgtggaatg

SEQ ID NO: 17009 - DNA, 75 bp, synthetic construct
  source 1..75: mol_type = other DNA
ttcagtctgcgcctgaccagtggtaagggaacggatgccagactggtgaccaccgccatcaccgcagacacggag

SEQ ID NO: 17010 - DNA, 75 bp, synthetic construct
  source 1..75: mol_type = other DNA
cggcgctggggaatgacccgaactttgccacgacaatgcttaatgcactggcaggtaaacaaccgctggacaata

SEQ ID NO: 17011 - DNA, 75 bp, synthetic construct
  source 1..75: mol_type = other DNA
gtatcaccgccgtagtggcggcgctggtaacgagaaaagacctctgtgaggttcacatccgaactggccagacgg

SEQ ID NO: 17012 - DNA, 75 bp, synthetic construct
  source 1..75: mol_type = other DNA
atgctgaaacagcaggatatgacagaaaccgccagagttgtgtttgatgaattaagcgttaccgaaccggcgaca

SEQ ID NO: 17013 - DNA, 75 bp, synthetic construct
  source 1..75: mol_type = other DNA
atgaataaccagtatttacagtttgttcgtgagcagctcattatcgccaccgccgatttgagtggggcaacaaaa

SEQ ID NO: 17014 - DNA, 75 bp, synthetic construct
  source 1..75: mol_type = other DNA
aacggggcccgctttgagccgcagtcaggcaccctgaacagcgttatcccaccggcagtgcagcacctgacggtg

SEQ ID NO: 17015 - DNA, 75 bp, synthetic construct
  source 1..75: mol_type = other DNA
aaggatgtcaccattaacggcaagaccacctcacagtacctggcgtcggtgattctggagaatctgcctgagcgg

SEQ ID NO: 17016 - DNA, 75 bp, synthetic construct
  source 1..75: mol_type = other DNA
agcagtctggacagcttccgaaagctgcaggcagaaaatcagaaattaggcgacaggctgaactatgcccgccag

SEQ ID NO: 17017 - DNA, 75 bp, synthetic construct
  source 1..75: mol_type = other DNA
tggccatcgcgcaggtgagccagaaagtggaccgggtgagcagtgaaatctcacagactgtcagccaggggcagt

SEQ ID NO: 17018 - DNA, 75 bp, synthetic construct
  source 1..75: mol_type = other DNA
ggatgtgagcggatttttgaggataaaatcagcggcactaagtccgacagactggggctgaaaaaactgctcagg

SEQ ID NO: 17019 - DNA, 75 bp, synthetic construct
  source 1..75: mol_type = other DNA
gaccagtgtactgcagattataaattaccgaaggaaagcgccggacagatattaagtcatgtcacggctagttgc

SEQ ID NO: 17020 - DNA, 75 bp, synthetic construct
  source 1..75: mol_type = other DNA
agagggcagttcagcgacgcggatgcataccatctggaccaggcttttccactgctgatgaaacaactggaactc

SEQ ID NO: 17021 - DNA, 75 bp, synthetic construct
  source 1..75: mol_type = other DNA
tcgcaatggcaaacaagctggcgcgaacggtgtgggcaatagccgctcacggacgtaaatacgacaaaaatcatg

SEQ ID NO: 17022 - DNA, 75 bp, synthetic construct
  source 1..75: mol_type = other DNA
cactggcgaatcagaatggattcatttcacaggtagcggatatctgttacgtaccggtgcgtggtcatacccggt

SEQ ID NO: 17023 - DNA, 75 bp, synthetic construct
  source 1..75: mol_type = other DNA
gcctgctgatgccattgcccgggcggaagatgtggtgttgcgtctgtccgggatgagcgggcctgttcatgtgga

SEQ ID NO: 17024 - DNA, 75 bp, synthetic construct
  source 1..75: mol_type = other DNA
caggttcgccgcctggaggaacaaaatacgatattaaaaaaggctaccgcgctcttgatgtccgactcgctgaac

SEQ ID NO: 17025 - DNA, 75 bp, synthetic construct
  source 1..75: mol_type = other DNA
actggttcgacaactacgtctctacaactctcagagaaaagacccaggcactttaccgatcaacggttatgaagc

SEQ ID NO: 17026 - DNA, 75 bp, synthetic construct
  source 1..75: mol_type = other DNA
gtgtcagacacattctccgggacaacgcatcccgatgacaatcacgaccgcccctggtgggggctgccctgtacc

SEQ ID NO: 17027 - DNA, 75 bp, synthetic construct
  source 1..75: mol_type = other DNA
gcagttatattctgaattattacaatagcgtcaggcctcaccattataacggagggctgacgccggaagagtcag

SEQ ID NO: 17028 - DNA, 75 bp, synthetic construct
  source 1..75: mol_type = other DNA
gccgacaccctcgggtcctgtggttacgtttatctggctgtttatcctgcgaccgaaacggaaagtaaccctccg

SEQ ID NO: 17029 - DNA, 75 bp, synthetic construct
  source 1..75: mol_type = other DNA
atgctgattgaaggggcggatgccaatgcctcagtcaccggtaatgaatccacggtggccgtgtttgtgcttatc

SEQ ID NO: 17030 - DNA, 75 bp, synthetic construct
  source 1..75: mol_type = other DNA
gcattttccgttgaccgctgggatcgcaactggccggaagagacaaaacgacaggtgattcgtgatgcatggctg

SEQ ID NO: 17031 - DNA, 75 bp, synthetic construct
  source 1..75: mol_type = other DNA
ctgtagaattgaattcagatgcagcatccgaatatacattgactgatggcactaacaaaattccgttccaggctc

SEQ ID NO: 17032 - DNA, 75 bp, synthetic construct
  source 1..75: mol_type = other DNA
actggttattacgtcacgtgaaatcctgccagtggccacacggcgattatcatcacagcgaaaccgtcattcacc

SEQ ID NO: 17033 - DNA, 75 bp, synthetic construct
  source 1..75: mol_type = other DNA
ggaatgggtacaaaagcgcatgacctttttgtgttgcctttgtgcagaaaacaccatgacgaactgcatgcggat

SEQ ID NO: 17034 - DNA, 75 bp, synthetic construct
  source 1..75: mol_type = other DNA
aaccgcgctgaaatgagcccggaagccgccggtattgccgcctgtctgatgacgtacagccatcatgcctgtcgt

SEQ ID NO: 17035 - DNA, 75 bp, synthetic construct
  source 1..75: mol_type = other DNA
tgggtggatatgatttttacactgatgcggttgttgatacacactggcgtgatggtgatgttttcactttgaaca

SEQ ID NO: 17036 - DNA, 75 bp, synthetic construct
  source 1..75: mol_type = other DNA
ctttgatgccgatctgttgctgcagaccctggagctgacagacggtatggatatgccggaccagtcacgggcgcg

SEQ ID NO: 17037 - DNA, 75 bp, synthetic construct
  source 1..75: mol_type = other DNA
ggatacgcgcagtcggtggtaaaggaattataaccacaggggaaatcaaaggaggaaaagtcagtggggggacag

SEQ ID NO: 17038 - DNA, 75 bp, synthetic construct
  source 1..75: mol_type = other DNA
ggggagtctgctgtttggtctgctgacgtacctgacgaacctgtatttcaaaatcagagaggaccgtcgtaaggc

SEQ ID NO: 17039 - DNA, 75 bp, synthetic construct
  source 1..75: mol_type = other DNA
taacgttcgacggaaatactccaacagctagctatacattatctgacggaacaaataaaattccgttccaggctc

SEQ ID NO: 17040 - DNA, 75 bp, synthetic construct
  source 1..75: mol_type = other DNA
ctgaacaggtttatggggctggcttcgcagcataagctacgctatgcggatgataaaccatggacgactgcatca

SEQ ID NO: 17041 - DNA, 75 bp, synthetic construct
  source 1..75: mol_type = other DNA
cgtatatcaaagcctgaccatcatacctggcgcagctatgcgatgtttttactgaatgtgatgccggaaaaaacg

SEQ ID NO: 17042 - DNA, 75 bp, synthetic construct
  source 1..75: mol_type = other DNA
gatgctcatgctgaatggggggttaaacctaaaattcttggtgttggtggtggcgtaggtgttagaggtggtggt

SEQ ID NO: 17043 - DNA, 75 bp, synthetic construct
  source 1..75: mol_type = other DNA
acgcgccaggcgcaatccgtctgtgctggcactgtgacaatcttctccgtgaccagttcacggaacggctggaag

SEQ ID NO: 17044 - DNA, 75 bp, synthetic construct
  source 1..75: mol_type = other DNA
ctgggtgttgtctgtagtccgtcgggatctcggttttgatgataaccatgccgtgacaatgccggaactgtgctg

SEQ ID NO: 17045 - DNA, 75 bp, synthetic construct
  source 1..75: mol_type = other DNA
cggtgatagatatgccggcagggcggggtcatgtcaccctgacgtttaatgtgtcgtcggccggtgcgaacaact

SEQ ID NO: 17046 - DNA, 75 bp, synthetic construct
  source 1..75: mol_type = other DNA
ccggtgctggacagtgaggggaataccaatatctccggcgtcacggtggtgttccgggccggtgagcaggagcag

SEQ ID NO: 17047 - DNA, 75 bp, synthetic construct
  source 1..75: mol_type = other DNA
caaacatcgaaagcggaaatcattgggaatggcgtggatgagacgaccctgacagcaacagtgaaagatcctttt

SEQ ID NO: 17048 - DNA, 75 bp, synthetic construct
  source 1..75: mol_type = other DNA
ccggaatagccgtcaggtcacgggtgttgtgaaaaatgtcactgtcagccagtcctgcggtaagtggtacatcag

SEQ ID NO: 17049 - DNA, 75 bp, synthetic construct
  source 1..75: mol_type = other DNA
cagcaggtgaaatcatcgctggaacagaaaataaaacagatgcaaatcagcctcaccggcgagccggttctccgg

SEQ ID NO: 17050 - DNA, 75 bp, synthetic construct
  source 1..75: mol_type = other DNA
caccgcttgagggtgatatcagtctcaggacgctgggaagactggcagggcggctggataacatcgacctgagcg

SEQ ID NO: 17051 - DNA, 75 bp, synthetic construct
  source 1..75: mol_type = other DNA
cccattattatgttcaaagcggtgatgttgaagccgctttgaaaaaagccgctctctttgccgctttcagcgtca

SEQ ID NO: 17052 - DNA, 75 bp, synthetic construct
  source 1..75: mol_type = other DNA
acatttacatgtgcgtttgtggctgtttttctcaattatcttttttctgatgagttcatgcctgtaaatagcaga

SEQ ID NO: 17053 - DNA, 75 bp, synthetic construct
  source 1..75: mol_type = other DNA
aggcgctgggctatgaaaccgaagtggtcggtaagcacggtatgtgggagatgccgggcgtaccggtggaggcct

SEQ ID NO: 17054 - DNA, 75 bp, synthetic construct
  source 1..75: mol_type = other DNA
ggaaacgggctgcggggattcagtggtgaaggccgggtgaaaggcagcggggatgcgcagttcgtggccctgcag

SEQ ID NO: 17055 - DNA, 75 bp, synthetic construct
  source 1..75: mol_type = other DNA
atagtatatccctcaagggtgatcaaccaggagattgataattactgttttcaaaaaaatgcaaaaatttccact

SEQ ID NO: 17056 - DNA, 75 bp, synthetic construct
  source 1..75: mol_type = other DNA
cgggaaaatactgcgaacatctgccactgtatcgtcagagtgaaatctttgcccgccagggtgtcgaactgagcc

SEQ ID NO: 17057 - DNA, 75 bp, synthetic construct
  source 1..75: mol_type = other DNA
catcacgtcggcgttttctggcacaactcggcggcttaaccgtcgccgggatgctggggccgtcattgttaacgc

SEQ ID NO: 17058 - DNA, 75 bp, synthetic construct
  source 1..75: mol_type = other DNA
acctacgcactcttcgccctcgactcgggtaacgaagagtacctcgctgcggcgaaggcgcagctcgccgcagcg

SEQ ID NO: 17059 - DNA, 75 bp, synthetic construct
  source 1..75: mol_type = other DNA
tggcggcatgtgaaaaatgaacgcgttaaccgttcagcaagctggcagtatatcggtgcaggtgatgatcgcatc

SEQ ID NO: 17060 - DNA, 75 bp, synthetic construct
  source 1..75: mol_type = other DNA
cgtcccggaatgcgttacccgccgtcaggcggtggttaatcaggcccgcatcctgctgaaaaacaacacacacga

SEQ ID NO: 17061 - DNA, 75 bp, synthetic construct
  source 1..75: mol_type = other DNA
ctgtcgctgaaaaaatcctgctgcgatgtacctggcttgacccggcagagaaagaggcccgtcgtttgcatctgc

SEQ ID NO: 17062 - DNA, 75 bp, synthetic construct
  source 1..75: mol_type = other DNA
ttcgtaaaatctctgacaggatccgtagttctggaatgtcagtcagtgaatatctacaacgccagggactgttaa

SEQ ID NO: 17063 - DNA, 75 bp, synthetic construct
  source 1..75: mol_type = other DNA
tgcggaagaagaaattgccaaagagttccgtgacctgctgaaagagcgtttcgaagaagaagatatcttaacctt

SEQ ID NO: 17064 - DNA, 75 bp, synthetic construct
  source 1..75: mol_type = other DNA
gtggatccagaaagctaccttcgccatgtgcttggcgtcatagcagactggccggtcaaccgggtcagcgaactg

SEQ ID NO: 17065 - DNA, 75 bp, synthetic construct
  source 1..75: mol_type = other DNA
gggcgctatccgtcatatgacatcaccaatctggcggccttcctgcaatccagctatgacattaatgatattttt

SEQ ID NO: 17066 - DNA, 75 bp, synthetic construct
  source 1..75: mol_type = other DNA
catggtggtgagcggggagcgctactgtacagcctgatcgggacgtgcaaactgaatgacgtggatccagaaagc

SEQ ID NO: 17067 - DNA, 75 bp, synthetic construct
  source 1..75: mol_type = other DNA
aaggttttcagccattcttcgcctgccagacccgcgtacgtgacccgggccgccggggatacacaaaacacatgc

SEQ ID NO: 17068 - DNA, 75 bp, synthetic construct
  source 1..75: mol_type = other DNA
atgcgaattctgaactgttatatggcgaatgacagcaaaggccattttgttacggcgaaagaagctgcgaagcac

SEQ ID NO: 17069 - DNA, 75 bp, synthetic construct
  source 1..75: mol_type = other DNA
accagcgcggtttattcacatatccggggggaaaaccgctctgaacaggcccggaaacacgcacaacagactttt

SEQ ID NO: 17070 - DNA, 75 bp, synthetic construct
  source 1..75: mol_type = other DNA
tcccggtaatcgctcaggcttatttacgggaaatacatcagccactacagcaagccatgacccaactgattcagg

SEQ ID NO: 17071 - DNA, 75 bp, synthetic construct
  source 1..75: mol_type = other DNA
tggtagtccgccaccaggcgctgacagatatgcacacgcaggaactgaatcgcactgaaacggcgcgggaagtcc

SEQ ID NO: 17072 - DNA, 75 bp, synthetic construct
  source 1..75: mol_type = other DNA
cgaaaacagcgcagctctggcataacgccacgccgcatccgcactggtgcggcctgaccctgctggccatcgatg

SEQ ID NO: 17073 - DNA, 75 bp, synthetic construct
  source 1..75: mol_type = other DNA
acgtttttcggcgcatctatcggttttatgggcgcagaaaaagcacgcgacaagatcattgccgcctttaaccgc

SEQ ID NO: 17074 - DNA, 75 bp, synthetic construct
  source 1..75: mol_type = other DNA
gttgccttgccgaatcaggtactgtaacgctacgcaagcgccgtcttcccctcgaaatgatggtctggtgtattg

SEQ ID NO: 17075 - DNA, 75 bp, synthetic construct
  source 1..75: mol_type = other DNA
ggaatgggtgcatcttcggattgaggaagatctggcatcagtcagggaaaaattaaccaaaaaatcagccgcagg

SEQ ID NO: 17076 - DNA, 75 bp, synthetic construct
  source 1..75: mol_type = other DNA
gattatcggtggcaatgccaccggtatcggaaccctgaatgtgcaggatcaagactctgtcatcacggtacgcag

SEQ ID NO: 17077 - DNA, 75 bp, synthetic construct
  source 1..75: mol_type = other DNA
tcgacagtgacagctatcagttgctcaaggcatatgatgtcaatatctccgggctggtaagcaccaccctgcaga

SEQ ID NO: 17078 - DNA, 75 bp, synthetic construct
  source 1..75: mol_type = other DNA
caggcgaaacgggacgcactgaatctatgggttgagcgtcttgatatgattgcaggatataatgaaaatattgtg

SEQ ID NO: 17079 - DNA, 75 bp, synthetic construct
  source 1..75: mol_type = other DNA
catttcccttcctgcacaagctaaaaccggacacggtgcattttctgtggggtacacacaggtgcacccggacgg

SEQ ID NO: 17080 - DNA, 75 bp, synthetic construct
  source 1..75: mol_type = other DNA
tgaaaacactgtcgcgtcactcagatacggcaaaagcgttcgcatacctgctgaaacagtgggatgcactgaacg

SEQ ID NO: 17081 - DNA, 75 bp, synthetic construct
  source 1..75: mol_type = other DNA
attccgggcgatccgcgtgataccacttcacctcgggcaatggcgcaaactctgcggaatctgacgctgggtaaa

SEQ ID NO: 17082 - DNA, 75 bp, synthetic construct
  source 1..75: mol_type = other DNA
ctcagtcgtggcaaaaggtatggagcagatgctgaataccccgggaaacgtggatctgcaccggctgatgcgctt

SEQ ID NO: 17083 - DNA, 75 bp, synthetic construct
  source 1..75: mol_type = other DNA
ataacgtggcgatgaataagctgattgctcacgttggcggcccggctagcgtcaccgcgttcgcccgacagctgg

SEQ ID NO: 17084 - DNA, 75 bp, synthetic construct
  source 1..75: mol_type = other DNA
ctgcggttctggctgtgatggattacacccagatgaactcaaaagcggatgaagacgtccgtaaagagcttaatg

SEQ ID NO: 17085 - DNA, 75 bp, synthetic construct
  source 1..75: mol_type = other DNA
gcttacagcccggacagaaaaggcatccatccgcagacccatcttgcggggttcagtggtgtactgcaggcggat

SEQ ID NO: 17086 - DNA, 75 bp, synthetic construct
  source 1..75: mol_type = other DNA
agcctgctgtcgggtatgatgataatggcccatccggcgatgtcagcaaacctgccgaccggtggccagattgtg

SEQ ID NO: 17087 - DNA, 75 bp, synthetic construct
  source 1..75: mol_type = other DNA
gatgcgttaccacactggctgcctttacaaaaaatcgccaacggggcggtcgggcattgcctgggggcgaaagga

SEQ ID NO: 17088 - DNA, 75 bp, synthetic construct
  source 1..75: mol_type = other DNA
gcatgatgattctgatcctggcaccgaccgtccttattggtttattgctgagtatctttttcgtcgtgcatcgct

SEQ ID NO: 17089 - DNA, 75 bp, synthetic construct
  source 1..75: mol_type = other DNA
attgcagaatgtcatgttaactgcctggttgaaacagatgctcaggcttacgcaaacgctgaatttattgctgcc

SEQ ID NO: 17090 - DNA, 75 bp, synthetic construct
  source 1..75: mol_type = other DNA
gttacaaaaaaggcttatagaaattaatacttggctaaatgaaaaaatcatagcatttaatgattactcattaaa

SEQ ID NO: 17091 - DNA, 75 bp, synthetic construct
  source 1..75: mol_type = other DNA
aaaaatttagcgtgatggacaaacaggctggatattacatggggaaattgtcggtaatctttacgccttccttgc

SEQ ID NO: 17092 - DNA, 75 bp, synthetic construct
  source 1..75: mol_type = other DNA
attaaaaaagttgatgccagtggaaagcatgacgtcgctcagcgcttgcaacagcgcgttacggccattatgcgt

SEQ ID NO: 17093 - DNA, 75 bp, synthetic construct
  source 1..75: mol_type = other DNA
cttgaggcattaccgcttttacagggggcaacggatgccgccggttttatggcgcggatggataccgttctgcag

SEQ ID NO: 17094 - DNA, 75 bp, synthetic construct
  source 1..75: mol_type = other DNA
acagaccaaaaacctctggacagtggctgtttttacagggatgcgacacggtgaaattgccgcacttgcatggga

SEQ ID NO: 17095 - DNA, 75 bp, synthetic construct
  source 1..75: mol_type = other DNA
aatttattgaaggatactacattgttggtttattagcggaagtttttttagggaaatatccaaacgcaaaaatca

SEQ ID NO: 17096 - DNA, 75 bp, synthetic construct
  source 1..75: mol_type = other DNA
gacgaaaaagaagaacgctatggcctgaactggcatggtaagcgtcaggctcgtcagcttgctcttaccccttcc

SEQ ID NO: 17097 - DNA, 75 bp, synthetic construct
  source 1..75: mol_type = other DNA
ctgcaaatcgatctcaatgagccggacctctttctcgacagcgactctctgagccagcttcccaaagatctcctc

SEQ ID NO: 17098 - DNA, 75 bp, synthetic construct
  source 1..75: mol_type = other DNA
cattttatagtggaagagatctttattggttacgtcctaaagttgaactgactctggaagagaaattgtactact

SEQ ID NO: 17099 - DNA, 75 bp, synthetic construct
  source 1..75: mol_type = other DNA
gctaaaaatgaagttatcgccagagatcgcgaagactggaagcgcatctccgcatcaatgcgcaaacaacctgat

SEQ ID NO: 17100 - DNA, 75 bp, synthetic construct
  source 1..75: mol_type = other DNA
ggttcgcaatcaacagctaacctaaaaaacatcataaatgagtgcgaaaaatatagtcttaactttgatcttact

SEQ ID NO: 17101 - DNA, 75 bp, synthetic construct
  source 1..75: mol_type = other DNA
aatcacaatctgtaactgcacgtattgcccatgaaattattgaaggcatggagaacgtgaaagaagaaggcgaaa

SEQ ID NO: 17102 - DNA, 75 bp, synthetic construct
  source 1..75: mol_type = other DNA
caaaactagccacctattagccccgattaaaaaagttgatgtcagtggtaaacacgacgtcgctcagcgcctgca

SEQ ID NO: 17103 - DNA, 75 bp, synthetic construct
  source 1..75: mol_type = other DNA
acgctgaatggggggtaccagtatgtgcacaacggcggtacggcgtctggcactgttgtaaacagtgacggctgg

SEQ ID NO: 17104 - DNA, 75 bp, synthetic construct
  source 1..75: mol_type = other DNA
atatcaccctgggcgttcaggccggttatgcccacagcgtcagcggcagcagcgctgaaggctataacggtcagg

SEQ ID NO: 17105 - DNA, 75 bp, synthetic construct
  source 1..75: mol_type = other DNA
gattgatactgcaatggcttcaatcagtctgattcagctgaaattgcaggccggacgtaaactgacgcaggcaga

SEQ ID NO: 17106 - DNA, 75 bp, synthetic construct
  source 1..75: mol_type = other DNA
ttagccatgagggctaacgtcgctctttctcagggaccggaagcctacagtaaattcattactgacaacaaggac

SEQ ID NO: 17107 - DNA, 75 bp, synthetic construct
  source 1..75: mol_type = other DNA
cagactttcaaagccttgctgatttgaatgtgtggcttgagcatcgctgcaaagcgctgtggtctgagctgcgcc

SEQ ID NO: 17108 - DNA, 75 bp, synthetic construct
  source 1..75: mol_type = other DNA
attattatctggaatatggtttgcgtttgttactgaaaggatgccgtgtaattctggctcaagaattttttatgc

SEQ ID NO: 17109 - DNA, 75 bp, synthetic construct
  source 1..75: mol_type = other DNA
atagcctggcgcccttctggccgtcttatcagaacaaaatcatcggtgttctcaaccgtgcgctgcgtgaacagt

SEQ ID NO: 17110 - DNA, 75 bp, synthetic construct
  source 1..75: mol_type = other DNA
acaggcatttaagcaggctgccgcagagctggggatcgctatcgaatggggcggggactggaaaacgctgaaaga

SEQ ID NO: 17111 - DNA, 75 bp, synthetic construct
  source 1..75: mol_type = other DNA
cgtacgctggtactgcaaatacggcatcagttaccgtgagctgcaggagatgctggctgaacgcggagtgaatgt

SEQ ID NO: 17112 - DNA, 75 bp, synthetic construct
  source 1..75: mol_type = other DNA
gtgctggccacaccgaccgagacggacggggcgctgtttcccggtcgcatcatgctggcgaacacctgtatgtgg

SEQ ID NO: 17113 - DNA, 75 bp, synthetic construct
  source 1..75: mol_type = other DNA
gtcatattacagccgcataacctgtctgaatgaatcatcagaaatatcagaggaaacttataatgaaagaaaaaa

SEQ ID NO: 17114 - DNA, 75 bp, synthetic construct
  source 1..75: mol_type = other DNA
gaagccctatgctgacctgtaaagagctttttagctattcggcaagtgagttatcagatgaagcgctaaaagccc

SEQ ID NO: 17115 - DNA, 75 bp, synthetic construct
  source 1..75: mol_type = other DNA
aaatccttaccggagaaaatgttttgcgtgccgcaatcgcccgcattgagtggatttttgaaacatttccgtcgg

SEQ ID NO: 17116 - DNA, 75 bp, synthetic construct
  source 1..75: mol_type = other DNA
acccctgatgccagtgaagaaatcaggcagtatgccattcaggtcaggaaagccatagaagaacagttaaaggat

SEQ ID NO: 17117 - DNA, 75 bp, synthetic construct
  source 1..75: mol_type = other DNA
ggcaccgaagagatctatttcgccacgttccatctcggcgtggatggcggcattgaagttaccgccagccataat

SEQ ID NO: 17118 - DNA, 75 bp, synthetic construct
  source 1..75: mol_type = other DNA
atagatatagatatacataaaaagaacaggtatgcgagttatgatcttagaaggaaaatcgaaatgcagcatgaa

SEQ ID NO: 17119 - DNA, 75 bp, synthetic construct
  source 1..75: mol_type = other DNA
ccgtggtttgaacatgaccagatgactgtcgctgaaaaaatcctgctgcgatgtacctggcttgacccggcagag

SEQ ID NO: 17120 - DNA, 75 bp, synthetic construct
  source 1..75: mol_type = other DNA
gaacagaggctgccgtttttgaaggtcagtccggcattgaggccgggctggcggatgaattaatcaatgcgtcgg

SEQ ID NO: 17121 - DNA, 75 bp, synthetic construct
  source 1..75: mol_type = other DNA
aactggtccgaaaaccgaaaatcagtaatggccgcgaccgccgactgacttctggtgaagaacgccgcctttccc

SEQ ID NO: 17122 - DNA, 75 bp, synthetic construct
  source 1..75: mol_type = other DNA
aacacaaaaggtattactatacctttgacaactcattattgtttaccgaaagcattcagaacacgacacaatttt

SEQ ID NO: 17123 - DNA, 75 bp, synthetic construct
  source 1..75: mol_type = other DNA
ctcggtatcagagacggaatcatcagcgaccaggctgcattgagaatgcttcaggaatatatccgcactcagtgt

SEQ ID NO: 17124 - DNA, 75 bp, synthetic construct
  source 1..75: mol_type = other DNA
gaagctaggcaggcttatcttggacaagaagatcgcttggcctcgcgcgcagatcagttggaagaatttgttcac

SEQ ID NO: 17125 - DNA, 75 bp, synthetic construct
  source 1..75: mol_type = other DNA
ctgcctgtcgtgggcggtcaatcattaccgtgataacgccatcgcctacaaagaacagcgtgataaaaaagtcag

SEQ ID NO: 17126 - DNA, 75 bp, synthetic construct
  source 1..75: mol_type = other DNA
cgaaacgttctcggtatccgggacggaatcatcagagaccagacagcactgagaacgcttcaggaatatatcagg

SEQ ID NO: 17127 - DNA, 75 bp, synthetic construct
  source 1..75: mol_type = other DNA
gacatggtcgccccacaaaagcgctcactggctaatacaggtatccagttacaggatgtggtcgatgagaaagtc

SEQ ID NO: 17128 - DNA, 75 bp, synthetic construct
  source 1..75: mol_type = other DNA
cgattgaaaatctgagccgggttcgtaaaaacgccattcctgctgcttcagcaatggccattaaccgcgtggcca

SEQ ID NO: 17129 - DNA, 75 bp, synthetic construct
  source 1..75: mol_type = other DNA
aaatatttgatcaagtgcggaaagatttaaactgtgaccgattttactctgaactaaaacgtcacaatgtctcac

SEQ ID NO: 17130 - DNA, 75 bp, synthetic construct
  source 1..75: mol_type = other DNA
gaatgaaaaaggggagccggtgacctggcaggggcgtgaatatcaggcgtacccgattgagggcagcggctttga

SEQ ID NO: 17131 - DNA, 75 bp, synthetic construct
  source 1..75: mol_type = other DNA
ccactataaataattctggtatccagttcatcagcagtggaggaagtgctacagcaaccactattaatagtggcg

SEQ ID NO: 17132 - DNA, 75 bp, synthetic construct
  source 1..75: mol_type = other DNA
agtgggaagcgaaaatcctggaactggctggcttcctggattcttacattccggaaccagagcgtgcgattgaca

SEQ ID NO: 17133 - DNA, 75 bp, synthetic construct
  source 1..75: mol_type = other DNA
ccgcaaactgctggacgaaggccgtgctggtgagaacgtaggtgttctgctgcgcggtatcaaacgtgaagaaat

SEQ ID NO: 17134 - DNA, 75 bp, synthetic construct
  source 1..75: mol_type = other DNA
agctcgacggaagtctatacgaaggtgtttgcacttgatgttgctgcgcggcatcgagttcagtttcagatgccc

SEQ ID NO: 17135 - DNA, 75 bp, synthetic construct
  source 1..75: mol_type = other DNA
acgctaaaggggcaaagatgcctcgaggcagtaaagatgcaattttaaactatcaaatacccatcccttgtccca

SEQ ID NO: 17136 - DNA, 75 bp, synthetic construct
  source 1..75: mol_type = other DNA
ctgttgaacgagatggggcgcgagtccacgccatccaataaaaataccccggctcatatttatgccggtaacggt

SEQ ID NO: 17137 - DNA, 75 bp, synthetic construct
  source 1..75: mol_type = other DNA
ttggttgattctggtgtatcccaagtcgtagtatatctggcgtcatcatcagtcagaaaacatatgcattctttg

SEQ ID NO: 17138 - DNA, 75 bp, synthetic construct
  source 1..75: mol_type = other DNA
acccagttcagccaggcactggcacagggtgtactgcgtggcgaagaatttaatgctgttaacgaaaatggcgac

SEQ ID NO: 17139 - DNA, 75 bp, synthetic construct
  source 1..75: mol_type = other DNA
ccctgttcgaagaggatgttgatgccgatatcgccgcgcttaccgcacatctggataaactgctcccgcaatccc

SEQ ID NO: 17140 - DNA, 75 bp, synthetic construct
  source 1..75: mol_type = other DNA
ccccggaaaatctcgatgtgctttccggcgtgtttgccccggaactacaacagcgtattggcatgcctgattcaa

SEQ ID NO: 17141 - DNA, 75 bp, synthetic construct
  source 1..75: mol_type = other DNA
agtggcccgaaccagaagtgggcaggagacatcacgtacttacgtacagatgaaggctggctgtatctggcagtg

SEQ ID NO: 17142 - DNA, 75 bp, synthetic construct
  source 1..75: mol_type = other DNA
atgatgcgctcggctccatgcagaaagaatccgacattaacaaggattcactttctgcgcagtggttgctggtca

SEQ ID NO: 17143 - DNA, 75 bp, synthetic construct
  source 1..75: mol_type = other DNA
aaacagcggaactgaaagcggcagagatgtgtgaaaccatctcaatgaaaggtagcccggttaaatacgtaacta

SEQ ID NO: 17144 - DNA, 75 bp, synthetic construct
  source 1..75: mol_type = other DNA
tgcgtgatcgtattgcaggtgccggagccaccaccacggctgcagggctggcaatgggtgcgccagtgatggcgg

SEQ ID NO: 17145 - DNA, 75 bp, synthetic construct
  source 1..75: mol_type = other DNA
aaaagccattctggcatggttgcgaagtcactgtgaatattgaaacactcaaaataaacatcgactttaaatatg

SEQ ID NO: 17146 - DNA, 75 bp, synthetic construct
  source 1..75: mol_type = other DNA
gtctacacgaaggtgtttgcactggatgtggctgcacggcaccgggtgcagttttcgatgcctgagtccgatgcg

SEQ ID NO: 17147 - DNA, 75 bp, synthetic construct
  source 1..75: mol_type = other DNA
cgaacctggagcattgctccggaaaaggatgtcccgtgggaagggcgtcatcgcgaagatattagcggtttttca

SEQ ID NO: 17148 - DNA, 75 bp, synthetic construct
  source 1..75: mol_type = other DNA
aatcccgcttagtttgcaacatttgttcgccatgtttggtgcaaccgtcctggtgcccgtcttatttcatattaa

SEQ ID NO: 17149 - DNA, 75 bp, synthetic construct
  source 1..75: mol_type = other DNA
gttcagcacatcagcatccgcgaccggctgaatgattttatgcagcagcacggcacagcactggcggcggcactg

SEQ ID NO: 17150 - DNA, 75 bp, synthetic construct
  source 1..75: mol_type = other DNA
tctgcctgctattacaggcctgttcagccacgactaaagagctgggcaattcactgtgggacagtctgttcggca

SEQ ID NO: 17151 - DNA, 75 bp, synthetic construct
  source 1..75: mol_type = other DNA
ccccgtggtgattactcgcatcactgagcactcagtgttctttcgacggatggacggacgatccgggcgggtacg

SEQ ID NO: 17152 - DNA, 75 bp, synthetic construct
  source 1..75: mol_type = other DNA
atttcagttcatgggcgcgcaggagcattattccggatcgtctggcaaccgctattctgaacgcagccgggcgca

SEQ ID NO: 17153 - DNA, 75 bp, synthetic construct
  source 1..75: mol_type = other DNA
gctattatgctccatgcagggcgcacggctgaactgatgcgcgggcagaccgtgacaccaccggatgagaagccg

SEQ ID NO: 17154 - DNA, 75 bp, synthetic construct
  source 1..75: mol_type = other DNA
ggtgatggatcgcatggtcatgaacggcgggcgctgggtgaattttaactgggagagctggcgtccgaatgttag

SEQ ID NO: 17155 - DNA, 75 bp, synthetic construct
  source 1..75: mol_type = other DNA
cgtgaacgggacctgacgggctggatgtcgctgtcacggaaaccgcaagtgacctggtacggctgggacggcgac

SEQ ID NO: 17156 - DNA, 75 bp, synthetic construct
  source 1..75: mol_type = other DNA
atgtcggttacagagtctaagacaaaaacggagcgtaaatccagccgtaaaccgtcaaaagagcaggagactgcc

SEQ ID NO: 17157 - DNA, 75 bp, synthetic construct
  source 1..75: mol_type = other DNA
atgaaaattcgttcacaagtcggcatggtgctgaatctcgataagtgcatcggctgccacacctgttcagtgacc

SEQ ID NO: 17158 - DNA, 75 bp, synthetic construct
  source 1..75: mol_type = other DNA
atgacagaaaacgttaaatcagagttacttcttctgatggcagataataacgaagcaacaagcagcattcttgca

SEQ ID NO: 17159 - DNA, 75 bp, synthetic construct
  source 1..75: mol_type = other DNA
ggtcctggatgaaataggcgttcagcgggagacgaaaaacgagcaggtggtattgcaccagataattgatcgccg

SEQ ID NO: 17160 - DNA, 75 bp, synthetic construct
  source 1..75: mol_type = other DNA
cttataaccagtctccttcgctgcatattattctctgctggctactttggcgtcactttcgtcagcatctggctg

SEQ ID NO: 17161 - DNA, 75 bp, synthetic construct
  source 1..75: mol_type = other DNA
ttcgcctgcaacttacagcagaggaacttgatgcgttaacggcggattttatttcctataagcgtgacggtgttt

SEQ ID NO: 17162 - DNA, 75 bp, synthetic construct
  source 1..75: mol_type = other DNA
aatgattctttagaaacatgtaagatgaagtgctccggaaataacattggacgttttattagatttgtattcacc

SEQ ID NO: 17163 - DNA, 75 bp, synthetic construct
  source 1..75: mol_type = other DNA
cgaaagttggacgaagatgaggttggacagcgcttgctgagcattccctgcgtcggaacactgacagcgagtact

SEQ ID NO: 17164 - DNA, 75 bp, synthetic construct
  source 1..75: mol_type = other DNA
tgccagtcggtcttatcgaacagcagcgctggagtcgtgccacggacacctacggtgttaagcaccagcgaaaag

SEQ ID NO: 17165 - DNA, 75 bp, synthetic construct
  source 1..75: mol_type = other DNA
gatctggagctggacgacgccgatggaaaaatcgtgctgccgcgccgtggtgcggtcattacgctggcgctgggc

SEQ ID NO: 17166 - DNA, 75 bp, synthetic construct
  source 1..75: mol_type = other DNA
ttctgcagtcagcaagcaagttacgtcagagtgggcgtgtggctcaccgttgtgaaggagatacacgcagacatt

SEQ ID NO: 17167 - DNA, 75 bp, synthetic construct
  source 1..75: mol_type = other DNA
atggtgctgattaccagcagcacggacaatatcaccctgaaaatcgaccctgccgtagtgctggcaacccgcaag

SEQ ID NO: 17168 - DNA, 75 bp, synthetic construct
  source 1..75: mol_type = other DNA
ccgctgctcggtgcaaaagtacagcccggcgagacggaccttgcgctgcccggcccgctgccgttcattctctcc

SEQ ID NO: 17169 - DNA, 75 bp, synthetic construct
  source 1..75: mol_type = other DNA
cggcaggctgaagaggccatccgccgtgaaacggaacgccgcgcagatgaaattgtccgtaaaatggcagagaac

SEQ ID NO: 17170 - DNA, 75 bp, synthetic construct
  source 1..75: mol_type = other DNA
atgaaatttatggaatgtactgtccgggatgtgatttatggaaccaatgtacgtattgttaaaccggtcaacatt

SEQ ID NO: 17171 - DNA, 75 bp, synthetic construct
  source 1..75: mol_type = other DNA
cgagcagtttgatgaaattaatattgtgcgcggtcagcttgttcctggtgggcggttggggataaaaatcacaga

SEQ ID NO: 17172 - DNA, 75 bp, synthetic construct
  source 1..75: mol_type = other DNA
ggaggaagcacgtacttttgagcagcttgctattgagtggcatgccacaaataaaaagtggtcggaagaacatag

SEQ ID NO: 17173 - DNA, 75 bp, synthetic construct
  source 1..75: mol_type = other DNA
ttttctgccaccacgatgctgttttcacttggagccagcatgattctgggcggtgtggcccagatgctggccccg

SEQ ID NO: 17174 - DNA, 75 bp, synthetic construct
  source 1..75: mol_type = other DNA
cacaaattccgctgcgtgccgcacctgacgggacggcgctttgagcacggggtgacggactgttacaccctgttc

SEQ ID NO: 17175 - DNA, 75 bp, synthetic construct
  source 1..75: mol_type = other DNA
aaagtggtaatgagcggtggcgcaatcgtgatgccgatctttcatgaaataatccccatcaatatgaatactctg

SEQ ID NO: 17176 - DNA, 75 bp, synthetic construct
  source 1..75: mol_type = other DNA
tcattcaggtttgctggctaatggctgcccatctgcggaagatactcatctgctacacggtgaaatggcctgtgc

SEQ ID NO: 17177 - DNA, 75 bp, synthetic construct
  source 1..75: mol_type = other DNA
caatgcctgtagttccacgctggtgaaattgctcaatcagcggcgctgggcggatgcatgccgacagttgccgcg

SEQ ID NO: 17178 - DNA, 75 bp, synthetic construct
  source 1..75: mol_type = other DNA
cgaccgttgttcatcggcgcggcgctagtggcgctgttcttcgcctggaagcggatttaccggcccgtgcaggca

SEQ ID NO: 17179 - DNA, 75 bp, synthetic construct
  source 1..75: mol_type = other DNA
gtttgatgaaatcaatattgtgcgcggtcagcctgtgccaggtggacggctgggcgtgaagatttacgaaatcag

SEQ ID NO: 17180 - DNA, 75 bp, synthetic construct
  source 1..75: mol_type = other DNA
gtgtgtcagaacagacgctcccacagtgtgatcagcaggtggataatgcggtcccgggctttacgcagaagctgt

SEQ ID NO: 17181 - DNA, 75 bp, synthetic construct
  source 1..75: mol_type = other DNA
gccatcatggctacgatcccaaccctcactcaacctgaaattgccatcgttgatggtcaggctgttacttcatcc

SEQ ID NO: 17182 - DNA, 75 bp, synthetic construct
  source 1..75: mol_type = other DNA
gacgaagagctgcagaatgccgttctggttgatgagattggttttacgttcagggagacagatgtttctgatgac

SEQ ID NO: 17183 - DNA, 75 bp, synthetic construct
  source 1..75: mol_type = other DNA
cccgcgtcattgagcggtattactggacgcctcagggcggggctgacggggactatgtcgtctgggctaaagaag

SEQ ID NO: 17184 - DNA, 75 bp, synthetic construct
  source 1..75: mol_type = other DNA
agccgaatatcattcatccctgatattaccgggtcatcacggtcagtgatgaacgtgatgttgccagctcccgac

SEQ ID NO: 17185 - DNA, 75 bp, synthetic construct
  source 1..75: mol_type = other DNA
atcgcagtgatggcctgacggtcactgaccttgagcatatcagccagagtatcggcgatatcctgcgcacaccgg

SEQ ID NO: 17186 - DNA, 75 bp, synthetic construct
  source 1..75: mol_type = other DNA
atgaacatggttgagaatatgctcgatcaggcattcaaaaagcttaatcctcacgagcatcctgttctgcactct

SEQ ID NO: 17187 - DNA, 75 bp, synthetic construct
  source 1..75: mol_type = other DNA
gctcagtctgcaggagaaaattattagtgataccggcggttcatcaaccgttaccatttttctgaataattacag

SEQ ID NO: 17188 - DNA, 75 bp, synthetic construct
  source 1..75: mol_type = other DNA
cagccctggcaagttttaccgtacacgcacagcccccctcacagaccgtagaacaaacagtccggcatatttatc

SEQ ID NO: 17189 - DNA, 75 bp, synthetic construct
  source 1..75: mol_type = other DNA
ggtcagaatctctatcttgacaatatggaggctactggtttttaccgtgtcgcactgacagaggcgcagccgggc

SEQ ID NO: 17190 - DNA, 75 bp, synthetic construct
  source 1..75: mol_type = other DNA
cgatataccggaaacaacgcgcggcgctctttactcgttcgtctataacgtgggcgcaggcaatttcagaacatc

SEQ ID NO: 17191 - DNA, 75 bp, synthetic construct
  source 1..75: mol_type = other DNA
ttgctgctgctattggtggcggagcaattgctatagcatcagtgttaatcactggcccaagtggtgacgatggcc

SEQ ID NO: 17192 - DNA, 75 bp, synthetic construct
  source 1..75: mol_type = other DNA
atggttcggcgagtttcaatatgcaagtacgggccattaaaacagggaacagagtaacctcagggacgattcagt

SEQ ID NO: 17193 - DNA, 75 bp, synthetic construct
  source 1..75: mol_type = other DNA
aaatcgtatctgaactggaacgagacagaaaataaaggtcgtgagctcgtacgcagtgtactgaagcgcgacaaa

SEQ ID NO: 17194 - DNA, 75 bp, synthetic construct
  source 1..75: mol_type = other DNA
tgctttccgtcctgatcctgccgacaacggtcgcggccagcaccatcagcaacatgcaacagaataaccggcaac

SEQ ID NO: 17195 - DNA, 75 bp, synthetic construct
  source 1..75: mol_type = other DNA
ccgcgttatttattccaacagggtggttaccgaacgagacgctggcgaagctggtcgggccgatgatcacttatc

SEQ ID NO: 17196 - DNA, 75 bp, synthetic construct
  source 1..75: mol_type = other DNA
gcactgaaggctgtttatgacgtagcccgtaaggcggcaatggatgttgtgaccgggcagatgcgcgatggtggt

SEQ ID NO: 17197 - DNA, 75 bp, synthetic construct
  source 1..75: mol_type = other DNA
cagaaagctggctgaagtttccagggagatcatcgtggcgagtgcgcaggaaattgcatggacgccggggagcag

SEQ ID NO: 17198 - DNA, 75 bp, synthetic construct
  source 1..75: mol_type = other DNA
gcaagaagcctgtttcatgcaattactataatggtcatcctgtttctctcatggggcgcgggagtacttttcttt

SEQ ID NO: 17199 - DNA, 75 bp, synthetic construct
  source 1..75: mol_type = other DNA
cggtgattacttccagacgggagcctcgacaacgggctatgtgatacctgagcgaaattactggatgtcgctgaa

SEQ ID NO: 17200 - DNA, 75 bp, synthetic construct
  source 1..75: mol_type = other DNA
cgtcggcaaaatattctcagcgtgatattgagctggcgcggcaactgcatcagagaggcatgcaaagaagggaaa

SEQ ID NO: 17201 - DNA, 75 bp, synthetic construct
  source 1..75: mol_type = other DNA
caggaggaattgcagtccagccagtaccacgatctggcggaggctctgagatcagtagagggtgtggatgttgaa

SEQ ID NO: 17202 - DNA, 75 bp, synthetic construct
  source 1..75: mol_type = other DNA
ctaaagatgcagataaaagcgtcttcaacggcaccgtcaacctggataatcagtcagtgctgaatatcaatgaga

SEQ ID NO: 17203 - DNA, 75 bp, synthetic construct
  source 1..75: mol_type = other DNA
ctatcggtagttgtggcgactatgacgtaaagcgcccaactcttgcggtagccagaatgaaagacctgattcgtc

SEQ ID NO: 17204 - DNA, 75 bp, synthetic construct
  source 1..75: mol_type = other DNA
aaaattggtacgcatagaaatacaactagccgaaggatttattgatggttgcctttcaatgttggatgttaacct

SEQ ID NO: 17205 - DNA, 75 bp, synthetic construct
  source 1..75: mol_type = other DNA
gccggagccgtcgataggttcacttgtgcgctcttatttacttgcggcgcttgggatgcataaaaattatggggg

SEQ ID NO: 17206 - DNA, 75 bp, synthetic construct
  source 1..75: mol_type = other DNA
tacacaagtgacttttcaggcagtaatgctgcatctgcatggcatgatgcagtattaaccttaactaactgtcag

SEQ ID NO: 17207 - DNA, 75 bp, synthetic construct
  source 1..75: mol_type = other DNA
acccgccgacggtgaacacttactggcgacgtcgtggcagcacatattttgtatcaaaagccggtgagcgttatc

SEQ ID NO: 17208 - DNA, 75 bp, synthetic construct
  source 1..75: mol_type = other DNA
aacactggagacctgggcggataaaacagggaaggcattcaaatcgatgtgggatgccattctggatatcggtcg

SEQ ID NO: 17209 - DNA, 75 bp, synthetic construct
  source 1..75: mol_type = other DNA
tcagcacgtgcagccagcacgtcagccggacaggccgcgtcgtcggctcagtcagcgtcttccagcgcaggaacg

SEQ ID NO: 17210 - DNA, 75 bp, synthetic construct
  source 1..75: mol_type = other DNA
aagccacgatgccagaaaactgctgcagatgaccggagaatggctgaatacaacaggggctgcccagcagtcacc

SEQ ID NO: 17211 - DNA, 75 bp, synthetic construct
  source 1..75: mol_type = other DNA
acatgatattacagcaaatgttagtgtaccctatagatttgtttattgccacaatcctgcaccgttctataaata

SEQ ID NO: 17212 - DNA, 75 bp, synthetic construct
  source 1..75: mol_type = other DNA
tcagcagcgccactaacagcacgtcagaaacgcaggctgccacaccaaaggcagtgaaggcggcatatgaccttg

SEQ ID NO: 17213 - DNA, 75 bp, synthetic construct
  source 1..75: mol_type = other DNA
gctgaatggctggcctcccgtcgcttcaccattgaagacatcgcccgaatgttcaacgtctcgccgatttttttg

SEQ ID NO: 17214 - DNA, 75 bp, synthetic construct
  source 1..75: mol_type = other DNA
ttcagtgcttggtgcctgtcagaaactccaggaggctgttggcttaccgaatctggcaccgcgctatgccattga

SEQ ID NO: 17215 - DNA, 75 bp, synthetic construct
  source 1..75: mol_type = other DNA
cactgacgcactgaacagggcaaaacagcagacgggtcagcacgatgatccgtacggggacaacataccgtttta

SEQ ID NO: 17216 - DNA, 75 bp, synthetic construct
  source 1..75: mol_type = other DNA
ttctattaaataatcatcagttgaactggaaggacgcaattgattataacgagttattagaaaagccattagcca

SEQ ID NO: 17217 - DNA, 75 bp, synthetic construct
  source 1..75: mol_type = other DNA
aatgagaacacaaatgggctaattcggcagtactttcctaaaaagacatgtcttgcccaatatactcaacatgaa

SEQ ID NO: 17218 - DNA, 75 bp, synthetic construct
  source 1..75: mol_type = other DNA
tgacgttctctgtcccggtcacgccacatacgttccgccattcctatgcgatgcacatgctgtatgccggtatac

SEQ ID NO: 17219 - DNA, 75 bp, synthetic construct
  source 1..75: mol_type = other DNA
gaggcggagacgtcagcgaggaatgccggcatatcagccagtcaggcagaagagagcgctgcaaatgctgacact

SEQ ID NO: 17220 - DNA, 75 bp, synthetic construct
  source 1..75: mol_type = other DNA
aaagatttcaggtgtactgaaagacggcacaggaaaaccggtagagaactgcaccattcaactgaaagccagacg

SEQ ID NO: 17221 - DNA, 75 bp, synthetic construct
  source 1..75: mol_type = other DNA
gacggaggaattgacatccatgttcaggttccaattgatcaactgaaagcaggctttcttgtaagacctgatacg

SEQ ID NO: 17222 - DNA, 75 bp, synthetic construct
  source 1..75: mol_type = other DNA
cgatgaggtcgaaccaaaggccgggcaggtggtaccggctctcgcacacattgggcaaagcgaagcggaatcatc

SEQ ID NO: 17223 - DNA, 75 bp, synthetic construct
  source 1..75: mol_type = other DNA
gacgacctttggaaagatggtgaagaaggtgcttatgcgatgggttatgaggatgggcgtgacaaaacggtaatt

SEQ ID NO: 17224 - DNA, 75 bp, synthetic construct
  source 1..75: mol_type = other DNA
atgtaaaaaacgaaactccgtacaatattcccttattgattaacgaaaatgtgatctccagcggaatttctctga

SEQ ID NO: 17225 - DNA, 75 bp, synthetic construct
  source 1..75: mol_type = other DNA
gaattaattgatacaactcaggcaaggccaattcagtattgcattaatgggacgtggtataacgcggggagtatt

SEQ ID NO: 17226 - DNA, 75 bp, synthetic construct
  source 1..75: mol_type = other DNA
tttataatggcttacgggaaacagaataccctaacactttcaacagagatggtataaaaagtactaactctttta

SEQ ID NO: 17227 - DNA, 75 bp, synthetic construct
  source 1..75: mol_type = other DNA
tatcacccgctggaatcaggaataccagaagctgctggggatctcgacggaagaggagctccgccggttggtact

SEQ ID NO: 17228 - DNA, 75 bp, synthetic construct
  source 1..75: mol_type = other DNA
gtgcgactggaagcgccggggcgtgattatcggcgctatcagatggaagagtacggcggcgtggacgttcgcctg

SEQ ID NO: 17229 - DNA, 75 bp, synthetic construct
  source 1..75: mol_type = other DNA
tatcactcaggatccgattgggctgaaggggggatggaatttttatcagtatccgttgaatccagttacgaatac

SEQ ID NO: 17230 - DNA, 75 bp, synthetic construct
  source 1..75: mol_type = other DNA
atgattgatttaacagaacgctatgaaactattaagtctgtttgtgaaaacttaaagttacaaactaagccagcc

SEQ ID NO: 17231 - DNA, 75 bp, synthetic construct
  source 1..75: mol_type = other DNA
agaccgccaccagcatactgaagcagcgcacaaaaaatcttgcgccgctgcctcacgcccaccagcaaaacccgc

SEQ ID NO: 17232 - DNA, 75 bp, synthetic construct
  source 1..75: mol_type = other DNA
tggccagccaggacaggaagcgcattcgtgagtacattgcggagcagaacctgatagccgccattgaactggacg

SEQ ID NO: 17233 - DNA, 75 bp, synthetic construct
  source 1..75: mol_type = other DNA
tcatgcagacccgctggagtttgagaaaaagtacggctctcagattgagttaatttttcgttttcttgatcacgc

SEQ ID NO: 17234 - DNA, 75 bp, synthetic construct
  source 1..75: mol_type = other DNA
cagatcagtccctctctctcccctgatgggccagaaaacacatcgtcttctcaaaaatcccgcaagactggtaca

SEQ ID NO: 17235 - DNA, 75 bp, synthetic construct
  source 1..75: mol_type = other DNA
aggttcagtccgtcaccgacggacttaaggtgaaagtgaaccgggttcctgacggcgttgcagaatacagtgtgt

SEQ ID NO: 17236 - DNA, 75 bp, synthetic construct
  source 1..75: mol_type = other DNA
cagcccgcgtaagccgctacacgcaccggaactcattgagttattcgcctggagcgaagagaagtttttaaaagt

SEQ ID NO: 17237 - DNA, 75 bp, synthetic construct
  source 1..75: mol_type = other DNA
ctgacgctgccgaaattcacccgcaaatatgagaagtatcgcggtggcggaatgccgggggcagtggatgtggat

SEQ ID NO: 17238 - DNA, 75 bp, synthetic construct
  source 1..75: mol_type = other DNA
ttctgtctcgatggcgaatgcgataaggctcagagcgggaagagtaatgattttgccgaagccgtttctcagctg

SEQ ID NO: 17239 - DNA, 75 bp, synthetic construct
  source 1..75: mol_type = other DNA
aaccgggaaggggcaacggtgcttcagggtaatccggaagaagtccgggaactcatcgatgccacgccatttgcg

SEQ ID NO: 17240 - DNA, 75 bp, synthetic construct
  source 1..75: mol_type = other DNA
tgccagcgccgccgcgctcggtgtgccgctaaaaattacccatatggcggtgggcgatggcggcggagtattgcc

SEQ ID NO: 17241 - DNA, 75 bp, synthetic construct
  source 1..75: mol_type = other DNA
tgtttgcgctggatgtggctgcacggcaccgggtgcagttttcgatgcctgagtccgatgctgtcacaatgctga

SEQ ID NO: 17242 - DNA, 75 bp, synthetic construct
  source 1..75: mol_type = other DNA
aaatcgtcgtaagcgtaaacctgagctgaagccatccgaaataccaacactgctcggatataccgccagcctggt

SEQ ID NO: 17243 - DNA, 75 bp, synthetic construct
  source 1..75: mol_type = other DNA
gccgcgggtggtgaagggcgtgcgcttcagtctgcgcctgaccagtggtaagggaacggatgccagactggtgac

SEQ ID NO: 17244 - DNA, 75 bp, synthetic construct
  source 1..75: mol_type = other DNA
acaccgccggagggatttgaatcatcaggttccgagacggtactgggtacggaagtgaaatacgacacgccgatc

SEQ ID NO: 17245 - DNA, 75 bp, synthetic construct
  source 1..75: mol_type = other DNA
gttaaaaatatcatctttaccagttccgttgctgtttatggtttgaacaaacacaaccctgacgaaaaccatcca

SEQ ID NO: 17246 - DNA, 75 bp, synthetic construct
  source 1..75: mol_type = other DNA
gggaagcactacataattgcgaaaggcgcagacctccaaaatttgaaaatctctttaagggattttcaaacgatc

SEQ ID NO: 17247 - DNA, 75 bp, synthetic construct
  source 1..75: mol_type = other DNA
ggagatttttaatcagtccacgacggatgctcagggcgtattttcctcagttatagatatgcctgccggacaggg

SEQ ID NO: 17248 - DNA, 75 bp, synthetic construct
  source 1..75: mol_type = other DNA
actaccggcagttaagcctccagttgccaaaagggagcgatccggtgtatcagaacgaggatgcaccaaaaaaat

SEQ ID NO: 17249 - DNA, 75 bp, synthetic construct
  source 1..75: mol_type = other DNA
cgattgaaggtccggtgaaggggctgcagagtattctggtgaacaaaaccccgctgacggacacggacggtaatc

SEQ ID NO: 17250 - DNA, 75 bp, synthetic construct
  source 1..75: mol_type = other DNA
caggtgaatggcgcgttctatcacgttcactggtacaaatacccggtgacgtactggctgaacattatcacgtct

SEQ ID NO: 17251 - DNA, 75 bp, synthetic construct
  source 1..75: mol_type = other DNA
tactgacgcactgaacagaacaaagcagcagacgggccagcaggatgacccgtatgaggacgaaataccatttta

SEQ ID NO: 17252 - DNA, 75 bp, synthetic construct
  source 1..75: mol_type = other DNA
ctgggctgtctggaaggtggtgacctggatatcgcttatctttctgaaatcgaccccacctggacggacagcagc

SEQ ID NO: 17253 - DNA, 75 bp, synthetic construct
  source 1..75: mol_type = other DNA
agacgcttttgaacgataccgtaaagcggctcttgatgctgagtttgctgagatcatgcaaagtcatgggacggc

SEQ ID NO: 17254 - DNA, 75 bp, synthetic construct
  source 1..75: mol_type = other DNA
atgaaccgtgttctgtgtgtggtgattattgtcctggcggttggctgtggtgcgctgtggctggcaacaaaccat

SEQ ID NO: 17255 - DNA, 75 bp, synthetic construct
  source 1..75: mol_type = other DNA
atgaacaaaaaaatatacattttattcgccctgactacaggactgtttatctctgcccacgcttcggaaagcgtg

SEQ ID NO: 17256 - DNA, 75 bp, synthetic construct
  source 1..75: mol_type = other DNA
cccacaggggcgacaccgtggcggcatatgaccaaacgccagggcaaaaaccgcaggcgcgttaaccgtcttatt

SEQ ID NO: 17257 - DNA, 75 bp, synthetic construct
  source 1..75: mol_type = other DNA
tattgtcatcacgcctctgttcgggttgacgaaaaagagcgccaggtccgctgtaaaatctgcggtgcggttgtg

SEQ ID NO: 17258 - DNA, 75 bp, synthetic construct
  source 1..75: mol_type = other DNA
ctggttcgtaaacagcaggcttcgcaggacgggaaaccccggcagggtgccctgtattttgtgtcgttttccatt

SEQ ID NO: 17259 - DNA, 75 bp, synthetic construct
  source 1..75: mol_type = other DNA
atgtccgggatgatcgcaatgcgggttcgtcatctcctccggcggtctggttcgcgtactcaccgaacaggcagg

SEQ ID NO: 17260 - DNA, 75 bp, synthetic construct
  source 1..75: mol_type = other DNA
aaagtggccgccacaggagactgccggcaggtggctcagggactgctggacggcaccggggataagtcgcaatga

SEQ ID NO: 17261 - DNA, 75 bp, synthetic construct
  source 1..75: mol_type = other DNA
agaacgtgtacaggtcgtttttcctcctgcatgtgagagaaatactatttcaatcactatacgtaaaccatcgac

SEQ ID NO: 17262 - DNA, 75 bp, synthetic construct
  source 1..75: mol_type = other DNA
tatcgtgaacgcccgtgccgggggaagttttcggctatgataatactgaggataatgatgaggcggcatctgatt

SEQ ID NO: 17263 - DNA, 75 bp, synthetic construct
  source 1..75: mol_type = other DNA
ttctgcccatgcttcggaaaacgtgaatacgcccgaaaaccgccagttcctgaagcagcaggaaacactgagtca

SEQ ID NO: 17264 - DNA, 75 bp, synthetic construct
  source 1..75: mol_type = other DNA
aggacggttgttgcgcacgtattcggtgaacgcacgctggccacgctggagcgtcttctgggcctgctgtcggcc

SEQ ID NO: 17265 - DNA, 75 bp, synthetic construct
  source 1..75: mol_type = other DNA
cctggcttgccgtgcctgcagatgaaatagaagatctcaaaaaagcacatcccccgatgaacgggcacacgcccg

SEQ ID NO: 17266 - DNA, 75 bp, synthetic construct
  source 1..75: mol_type = other DNA
ctttaaaacttattcgcttatcagaagtaataaggaaaaccgggttcggcaaaacgtggatttataaacttatca

SEQ ID NO: 17267 - DNA, 75 bp, synthetic construct
  source 1..75: mol_type = other DNA
gataccaattatgctaagttcttctatacaagcagaacttgacaatgcttatggggtaagcaaagctttagctga

SEQ ID NO: 17268 - DNA, 75 bp, synthetic construct
  source 1..75: mol_type = other DNA
tccacaccattgataaggttaagtgccgcgtgttcatacttacacaactcaatatcaaccaacggcagcgtttat

SEQ ID NO: 17269 - DNA, 75 bp, synthetic construct
  source 1..75: mol_type = other DNA
gccgggaaattattctgggctttaacggatgaaagcaataaagagcaaccggacgttattcctgtttatgctgcc

SEQ ID NO: 17270 - DNA, 75 bp, synthetic construct
  source 1..75: mol_type = other DNA
agtgggaaagcggcatctaccagattgaggtctctgaccccgttctgggcggacctgacggaatttctaaccgcc

SEQ ID NO: 17271 - DNA, 75 bp, synthetic construct
  source 1..75: mol_type = other DNA
ttgatggcaacggacgtctgaccggtgcccgtaccgcacagaccgcaccttatgcttactacacctgccaccttt

SEQ ID NO: 17272 - DNA, 75 bp, synthetic construct
  source 1..75: mol_type = other DNA
gctggatgtggctgcacggcaccgggtgcagttttcgatgcctgagtccgatgcggtcacaatgctgaaaaacag

SEQ ID NO: 17273 - DNA, 75 bp, synthetic construct
  source 1..75: mol_type = other DNA
atgctcgaatgacagcacatctcccgaacaaagatgagtcttacgaatgtttaacaaaagtacagcatgaactgc

SEQ ID NO: 17274 - DNA, 75 bp, synthetic construct
  source 1..75: mol_type = other DNA
tttagatgtgctgtggaattatattttgttccgcacgtttgcctctcaggaggccgctgaaaatgctgccgcgca

SEQ ID NO: 17275 - DNA, 75 bp, synthetic construct
  source 1..75: mol_type = other DNA
aaaaccacaggcacacagggtaatcagccaccagcgggaggcgatgacccttacggtgatgatattccgttctga

SEQ ID NO: 17276 - DNA, 75 bp, synthetic construct
  source 1..75: mol_type = other DNA
gaagaagcactgaaactaatcggcgaactgtacgccattgagcacgaaatacgcgggttgccggtgtctgaacgc

SEQ ID NO: 17277 - DNA, 75 bp, synthetic construct
  source 1..75: mol_type = other DNA
aagaatttctccaatgcgggcggctggagcatggctttctacgggttcgctgcgagtcttgccacgccgagcacc

SEQ ID NO: 17278 - DNA, 75 bp, synthetic construct
  source 1..75: mol_type = other DNA
ctggttgccactcccgtccctgatgaacagtgcatcagcttctggccacagcactttggcctcattccacagtgg

SEQ ID NO: 17279 - DNA, 75 bp, synthetic construct
  source 1..75: mol_type = other DNA
acctgaatatgttcaacgatggcctcagctatatgggcgttgttgaatccgtcaccctgccaaaactgacccgca

SEQ ID NO: 17280 - DNA, 75 bp, synthetic construct
  source 1..75: mol_type = other DNA
gcatcagcttctggccgcagcattttggcctcattccacagtgggtcaccctggagccccgtgtcttcggctgga

SEQ ID NO: 17281 - DNA, 75 bp, synthetic construct
  source 1..75: mol_type = other DNA
tgtcaggccggaacgcagagaaatacggttgattaaacgtctgcagcaattcgtcccggatgccttacccgtggt

SEQ ID NO: 17282 - DNA, 75 bp, synthetic construct
  source 1..75: mol_type = other DNA
ggacgggagaaggaaatttctggtcatcccgcaggggaaatcggcaacggtgattccctatcaggggaaggactg

SEQ ID NO: 17283 - DNA, 75 bp, synthetic construct
  source 1..75: mol_type = other DNA
tagcgttagttcgtgagtctgagcgactaaaccggaagcaattcgctgaaataacaggagttccttacagttctc

SEQ ID NO: 17284 - DNA, 75 bp, synthetic construct
  source 1..75: mol_type = other DNA
tatcgaagcatacctgggcgctgactacaccgatcgcggtctgcttacaaaagagtggatgaaaggaaatcgtgt

SEQ ID NO: 17285 - DNA, 75 bp, synthetic construct
  source 1..75: mol_type = other DNA
ggggagtctgctgtttgggctgctgacatatctgactaacctgtatttcaaaatcagagaggaccggcgtaaggc

SEQ ID NO: 17286 - DNA, 75 bp, synthetic construct
  source 1..75: mol_type = other DNA
ttcgtgagcaactcatgattgccactgcggatctcagtggggcgacaaaaggccagctggaagcctggcaggaga

SEQ ID NO: 17287 - DNA, 75 bp, synthetic construct
  source 1..75: mol_type = other DNA
cggacggaaaaagccgccaggacggcaggaagaatgcccgccggtcagcagactcaccggctggttccgctctcc

SEQ ID NO: 17288 - DNA, 75 bp, synthetic construct
  source 1..75: mol_type = other DNA
tcagatcgcgataacacagtgggcgtggaatgaatttaatactcaatccggtaccagaaaaattgcagggaaaac

SEQ ID NO: 17289 - DNA, 75 bp, synthetic construct
  source 1..75: mol_type = other DNA
agtggcggaaaagtgagaaccaactcttcaggtcaggctccagtcgttctgaccagcaataaagtcggtacatat

SEQ ID NO: 17290 - DNA, 75 bp, synthetic construct
  source 1..75: mol_type = other DNA
gacccggcaggtaaccgcctgcccgacccggagctgcacccggacagcaccctcagcatgtggccggataaccgt

SEQ ID NO: 17291 - DNA, 75 bp, synthetic construct
  source 1..75: mol_type = other DNA
tatcggtgaactgtatgccatcgaggcagaagtccggggatgttcagcagaacagcgtctggcggcaagaaaagc

SEQ ID NO: 17292 - DNA, 75 bp, synthetic construct
  source 1..75: mol_type = other DNA
tcctgaccatcgtattggttatctggcagccgaaaggtttaggcatcggctggagtgcaacgctcggcgcagtac

SEQ ID NO: 17293 - DNA, 75 bp, synthetic construct
  source 1..75: mol_type = other DNA
gttcattattaccgtctgcgggattacgccctgcagcatccggaatgcagcgccattatgcgcatcatcgactga

SEQ ID NO: 17294 - DNA, 75 bp, synthetic construct
  source 1..75: mol_type = other DNA
ccgcttcggcctgtgcaccggagactggcctgcaacaactggttgccaccattgtccctgatgaacagcgcatca

SEQ ID NO: 17295 - DNA, 75 bp, synthetic construct
  source 1..75: mol_type = other DNA
tgatgacgaaacatgggtactgttcaatgccatgaacggtaaccgcgctgaaatgagcccggaagccgccggcat

SEQ ID NO: 17296 - DNA, 75 bp, synthetic construct
  source 1..75: mol_type = other DNA
aaagcaggctcagcggcagaaagaatttcagcaggcgtacgctaatgcttatgcgtctggtgatcgcggtgcttt

SEQ ID NO: 17297 - DNA, 75 bp, synthetic construct
  source 1..75: mol_type = other DNA
gatcgccgttatgcgattgatgctgagaagattagccgcgaattgggctggaaaccgcaggaaacgtttgagagc

SEQ ID NO: 17298 - DNA, 75 bp, synthetic construct
  source 1..75: mol_type = other DNA
gcagaatcaaaactctgaacacccggcgggtgaatattctgaagggtgaacagcgtcgtgtcagtggcagtgcac

SEQ ID NO: 17299 - DNA, 75 bp, synthetic construct
  source 1..75: mol_type = other DNA
tggcctcattccacagtgggtgaccctggagccccgtgtcttcggctggatggaccgtctgtgcgaagactactg

SEQ ID NO: 17300 - DNA, 75 bp, synthetic construct
  source 1..75: mol_type = other DNA
gcacgggaaaccgttctcgcctttgtcagagaaaactttgtcagtcagggcatgattgctgatgtggcgttccat

SEQ ID NO: 17301 - DNA, 75 bp, synthetic construct
  source 1..75: mol_type = other DNA
ttgctaagaaaagaaaatgctctgatggcacaattaggaaggagttgcaaactgcagtaggatttataaacggtg

SEQ ID NO: 17302 - DNA, 75 bp, synthetic construct
  source 1..75: mol_type = other DNA
tgctgttgccttcttaggtacaacaattgacacgaatcataccaacgtactggctctgcagagttctgctgcggg

SEQ ID NO: 17303 - DNA, 75 bp, synthetic construct
  source 1..75: mol_type = other DNA
gctgtcggttttaacattcagctgaatgattgcgataccagtgttgccacaaaagccgctgttgccttcttgggg

SEQ ID NO: 17304 - DNA, 75 bp, synthetic construct
  source 1..75: mol_type = other DNA
cctgctggttcatcatccgatgctggaagggatcctgctgtctgaatgtgagcgcctgaagcaacattctctggc

SEQ ID NO: 17305 - DNA, 75 bp, synthetic construct
  source 1..75: mol_type = other DNA
ccgtgaaaaatcgtggcacaagaccacagttggggaagtggtgaaggaaatagccgcgcgtcacaagctgaagat

SEQ ID NO: 17306 - DNA, 75 bp, synthetic construct
  source 1..75: mol_type = other DNA
aggaaagccggggtattattcacctgtgatctcgactacagaaggaattcatctcggtgagcgggccagcctttc

SEQ ID NO: 17307 - DNA, 75 bp, synthetic construct
  source 1..75: mol_type = other DNA
taacggagactgatcacgagaaccccagcaaggaaactctcactgctgcacgacatacaccggaaaaagatatcc

SEQ ID NO: 17308 - DNA, 75 bp, synthetic construct
  source 1..75: mol_type = other DNA
accctgaccataaacggaacaggtgtaaacccgggaggactgaaaacgggagacggtatcgttgtacttaaccag

SEQ ID NO: 17309 - DNA, 75 bp, synthetic construct
  source 1..75: mol_type = other DNA
gcgtgttttcccccgggtggaaagcagccagactgcgttcaagggcgttaatcatggcctatgaggcggtgaaac

SEQ ID NO: 17310 - DNA, 75 bp, synthetic construct
  source 1..75: mol_type = other DNA
gaaatatgtaccgacaaaagaggattgcaacgacaggccgagctatgagattcaggccttattcactgccccgcc

SEQ ID NO: 17311 - DNA, 75 bp, synthetic construct
  source 1..75: mol_type = other DNA
attttcgtgaaacgctgaatacccgccgtgaaaagtcgtggcacaagaccaccgtcggggaagtggtgaaggaaa

SEQ ID NO: 17312 - DNA, 75 bp, synthetic construct
  source 1..75: mol_type = other DNA
acacacgttttcccctttatcggcaaccgggatatcacaacactcaataccccggacctgcttatccctgttcgt

SEQ ID NO: 17313 - DNA, 75 bp, synthetic construct
  source 1..75: mol_type = other DNA
atgggttatacgccctggagattttagcccaataccataacgtctctgttaacccggaagaaattaaacatagat

SEQ ID NO: 17314 - DNA, 75 bp, synthetic construct
  source 1..75: mol_type = other DNA
tgcgtcacccgccgtcaggcggtggttaatcaggcccgcgccctgctgaaaaacaacacacacgaaaacgactga

SEQ ID NO: 17315 - DNA, 75 bp, synthetic construct
  source 1..75: mol_type = other DNA
ctgtcgactacgccatcatggcgacggcgcctttcctttgggttctctatatcgggcggatcgtggccggcatca

SEQ ID NO: 17316 - DNA, 75 bp, synthetic construct
  source 1..75: mol_type = other DNA
tgaccaatttgcccgataatattttacgtcgttttggcggtggacttgtggttgcgggcgttgtggtctactaca

SEQ ID NO: 17317 - DNA, 75 bp, synthetic construct
  source 1..75: mol_type = other DNA
atgaatatcagcacggaaacccgcgaaattctgcgtaattacaaagctgtgattaatgcacgacgtcgtgaaatg

SEQ ID NO: 17318 - DNA, 75 bp, synthetic construct
  source 1..75: mol_type = other DNA
aacgttgcgcctcttactttgtcgggtgaaccctggcgcttattgagcagtatctttctgcacagtagtgtttct

SEQ ID NO: 17319 - DNA, 75 bp, synthetic construct
  source 1..75: mol_type = other DNA
gactgtgcagccgaaccgacacagtttaacggacgatcgctggtacagattgcgcaggcgcttgctgcgcctttc

SEQ ID NO: 17320 - DNA, 75 bp, synthetic construct
  source 1..75: mol_type = other DNA
tgtacttctgtacggtggtctgtgtgctgtatctcctttcgggcggataccgggccatgcgtgacttctggcgca

SEQ ID NO: 17321 - DNA, 75 bp, synthetic construct
  source 1..75: mol_type = other DNA
ttgctaccttcgacacccagtcagaagctgcgcgtagcctgcgtgcggttgaaaaagtgtcgtttagtcttgagg

SEQ ID NO: 17322 - DNA, 75 bp, synthetic construct
  source 1..75: mol_type = other DNA
ttcagcaggtgctggaacgtgctgactatctggcgaaggaacataccaaagctcacgccactggtgagcgcaact

SEQ ID NO: 17323 - DNA, 75 bp, synthetic construct
  source 1..75: mol_type = other DNA
ccggcgattaccgcgatccggggtcactggccgggatgattaaacaggcctggtgcagtgccctgggggtggatg

SEQ ID NO: 17324 - DNA, 75 bp, synthetic construct
  source 1..75: mol_type = other DNA
atgctgcatgaactctggctgcagagcggtactggacagcgtcgctgggaaggattaccggacgatgtcagggat

SEQ ID NO: 17325 - DNA, 75 bp, synthetic construct
  source 1..75: mol_type = other DNA
ccacggcgcgcagttttgacgggcgaatgacggtcacgttaaccggccagcacaacgacaccggccagccacttt

SEQ ID NO: 17326 - DNA, 75 bp, synthetic construct
  source 1..75: mol_type = other DNA
tggaaccgtctgtgtgacaacgtcctgccggaaaaaccatgccgtttgacctgctgtcggttctgtccactcgcc

SEQ ID NO: 17327 - DNA, 75 bp, synthetic construct
  source 1..75: mol_type = other DNA
ttttatgcttcaattatcttcaaatataggatggaaaaaaggggccgaaaacgcccttaaaaataaaatccattc

SEQ ID NO: 17328 - DNA, 75 bp, synthetic construct
  source 1..75: mol_type = other DNA
ccggatgctcatcagttacagcgaagtcagcataaaaaatcccgacaacagcggccaggcgctctcgctcacgta

SEQ ID NO: 17329 - DNA, 75 bp, synthetic construct
  source 1..75: mol_type = other DNA
aaggggaatacgtggagttgagcgacggcactttatcgtggttagggaacgccttgtactggatgcctctaccgg

SEQ ID NO: 17330 - DNA, 75 bp, synthetic construct
  source 1..75: mol_type = other DNA
cgaaaagctcaaagatttcagagacagggagtttaatcttcttaacgcacagatatcaatggtgctttatatctg

SEQ ID NO: 17331 - DNA, 75 bp, synthetic construct
  source 1..75: mol_type = other DNA
cgcgtcgatcgctttatggccgcctggaaaaatgcgggattcagcgtggttggccacctggtgtttaccaaaacc

SEQ ID NO: 17332 - DNA, 75 bp, synthetic construct
  source 1..75: mol_type = other DNA
gaaggcttcataccgaacagttacccgttccgcatgcttcggtaggctacaggcgacggaacgcctggttttact

SEQ ID NO: 17333 - DNA, 75 bp, synthetic construct
  source 1..75: mol_type = other DNA
attactatgttcttaccgttgctggtcagtctaatgccatggcgtatggcgaaggactgccattaccggacaggg

SEQ ID NO: 17334 - DNA, 75 bp, synthetic construct
  source 1..75: mol_type = other DNA
atgctgaaacagcaggatatgacagaaaccgccagagcagtgtttaatgaattaagcgtcaccgaaccggcgaca

SEQ ID NO: 17335 - DNA, 75 bp, synthetic construct
  source 1..75: mol_type = other DNA
tctggtgcaggggggactacgtcgatacagtgggtaagaacacggcgaagatacaggattacataaagcaccagc

SEQ ID NO: 17336 - DNA, 75 bp, synthetic construct
  source 1..75: mol_type = other DNA
cgcacagggctgcgccagaacttccgtatcttccagaatgaggacatcgaaagcatcctcggcacgatattgcag

SEQ ID NO: 17337 - DNA, 75 bp, synthetic construct
  source 1..75: mol_type = other DNA
ttgtgccggcaattattgagttttctatattgagacagaagattcaggtacctcttttgctactgtcagcagcga

SEQ ID NO: 17338 - DNA, 75 bp, synthetic construct
  source 1..75: mol_type = other DNA
catgaaattatccagcgtggcaattatggcccgcctggctgatttcagtaatgacgaaggtgtgtgctggccatc

SEQ ID NO: 17339 - DNA, 75 bp, synthetic construct
  source 1..75: mol_type = other DNA
gcaatatctatcggcttaatgtggaaaaactcgaagcagctgcggcggcggcgcgtgagtcatataaaccgaaaa

SEQ ID NO: 17340 - DNA, 75 bp, synthetic construct
  source 1..75: mol_type = other DNA
ccgcgtaaaccgtcagttcgtggcagaacgtcctgaccagttgtgggtggctgattttacttacgtcagcacatg

SEQ ID NO: 17341 - DNA, 75 bp, synthetic construct
  source 1..75: mol_type = other DNA
cagttcattacgcgtaattattcacaagcctttatggcttgaatggcattataaggataatgctggtcagtggca

SEQ ID NO: 17342 - DNA, 75 bp, synthetic construct
  source 1..75: mol_type = other DNA
ctacgatgtggccctgtcaactctgtataaaaaacaccccgcgaaacgaacgcatatagaaaacgacgatcgaat

SEQ ID NO: 17343 - DNA, 75 bp, synthetic construct
  source 1..75: mol_type = other DNA
actcgtatgacaacgcgatggcggagagcatcaatggcctttacaaagcggaggtaatacaccgtaagagctgga

SEQ ID NO: 17344 - DNA, 75 bp, synthetic construct
  source 1..75: mol_type = other DNA
tatctggaatctgtacaccctgaacaacggcggggcatttatggcacccgaaccggatgacgatgatgacgaaac

SEQ ID NO: 17345 - DNA, 75 bp, synthetic construct
  source 1..75: mol_type = other DNA
actgattgttgaacgaacaaaagctggactggaagcagctcgcgcacagggacgaattggtggacgtcgtcccaa

SEQ ID NO: 17346 - DNA, 75 bp, synthetic construct
  source 1..75: mol_type = other DNA
tgaattcaccatgacgcagtccgcaccgctgatggtgctgccggatccggatgagtttgtggtggtgcaggtgaa

SEQ ID NO: 17347 - DNA, 75 bp, synthetic construct
  source 1..75: mol_type = other DNA
gggtgatgtgtattttgttgaaaatgaatcttggggaagcgttatatataacctttttcttcaacttgagaaaga

SEQ ID NO: 17348 - DNA, 75 bp, synthetic construct
  source 1..75: mol_type = other DNA
gcacgaatctgaattatcacgccgagttaaacaattaatcagagcagcaaagaaacaactggaggcgttatgcgc

SEQ ID NO: 17349 - DNA, 75 bp, synthetic construct
  source 1..75: mol_type = other DNA
tgccgttggtgtccatgcccgaggcagatagcctcaagcacccgcagtcattctacttaactaagatttccccgc

SEQ ID NO: 17350 - DNA, 75 bp, synthetic construct
  source 1..75: mol_type = other DNA
attccgacattcagtctctgccggatctgacctgttatgtcaccctgcccggaccgtatccggcagtaaaactct

SEQ ID NO: 17351 - DNA, 75 bp, synthetic construct
  source 1..75: mol_type = other DNA
gaaatgaaagaaactattcttgaattagctgcgcgcctgaactgcgcttcactgttgaaagagcattttcagcag

SEQ ID NO: 17352 - DNA, 75 bp, synthetic construct
  source 1..75: mol_type = other DNA
aatatcacctcagatgccgtatttaacttcttcgataacctgttacccgatagcccgattgtacgtgaccggatc

SEQ ID NO: 17353 - DNA, 75 bp, synthetic construct
  source 1..75: mol_type = other DNA
cagtattgatacgtcatctccaatggggcgttttttcttccacgttatgggtgccctggctgagatggaacgaga

SEQ ID NO: 17354 - DNA, 75 bp, synthetic construct
  source 1..75: mol_type = other DNA
tgcgaagggggcaaatcagtgtgcgcgggcaggggataaattaccggatttactcgatgaatatatcagagcaac

SEQ ID NO: 17355 - DNA, 75 bp, synthetic construct
  source 1..75: mol_type = other DNA
ctgttggtgtgcctgttccatggccttcagccacaccgccaacaggctggctgaaatgcaacggtgcggcttttt

SEQ ID NO: 17356 - DNA, 75 bp, synthetic construct
  source 1..75: mol_type = other DNA
cgcattgagcgacataatctgagacaacatctggcaaggctgggacggaagtcactgtcgttctcaaaatcggtg

SEQ ID NO: 17357 - DNA, 75 bp, synthetic construct
  source 1..75: mol_type = other DNA
ttgcccgttggcgtgcccgttccgtggcccttagaaacaccgccaacggggtggctgaaatgtaacggagcagca

SEQ ID NO: 17358 - DNA, 75 bp, synthetic construct
  source 1..75: mol_type = other DNA
gttccttcaaagccgtcagggagaagctggatacccgtcgcggctctcattccgaactggagacagcggtaaaag

SEQ ID NO: 17359 - DNA, 75 bp, synthetic construct
  source 1..75: mol_type = other DNA
gagatcgcttctctggcgtataaagttgcgcagacgaaaacatatctcgatggtcttggcaaagaccttgttgct

SEQ ID NO: 17360 - DNA, 75 bp, synthetic construct
  source 1..75: mol_type = other DNA
ttgattttatagtttttgatggtgaatggttcttcttagagatgaatgcaaatggtcaatgggcatggctagaaa

SEQ ID NO: 17361 - DNA, 75 bp, synthetic construct
  source 1..75: mol_type = other DNA
tgcaatggcttccatcagtctgattcagctgaaattacgggccgggcggaagctgacgcaggcagaaaccacccg

SEQ ID NO: 17362 - DNA, 75 bp, synthetic construct
  source 1..75: mol_type = other DNA
agctgttacgcaccggcgatcatgagcgagccttcagtgtactgaaagagcatgctgatgaattttcaccttact

SEQ ID NO: 17363 - DNA, 75 bp, synthetic construct
  source 1..75: mol_type = other DNA
aaagcgacgttgttgcagaattaagccgccgtttcggctgcacgctggagcactggtacgccgaacagggctgca

SEQ ID NO: 17364 - DNA, 75 bp, synthetic construct
  source 1..75: mol_type = other DNA
tctgagcgtactgccggaatggccctccaaccgggttgatgaactcctgccatggaacgtagtactcaccaataa

SEQ ID NO: 17365 - DNA, 75 bp, synthetic construct
  source 1..75: mol_type = other DNA
agtgaattgcaatgacgcatggctaaacaccgaaggtgatgacatctccggctcatacgttaagtacaaagacca

SEQ ID NO: 17366 - DNA, 75 bp, synthetic construct
  source 1..75: mol_type = other DNA
aaaatgtcagatcatggctttatgccgccgaatttaaagctaaaacacgccatggtcgcgcatgtgggaaaggcg

SEQ ID NO: 17367 - DNA, 75 bp, synthetic construct
  source 1..75: mol_type = other DNA
gcggtactaaacttgccgccgcgctgattggcgctgacgggcagatccgcgatcgccgagaacttcctacgcctg

SEQ ID NO: 17368 - DNA, 75 bp, synthetic construct
  source 1..75: mol_type = other DNA
aacaaccatcacagggacatgtgacgcctcccccgtcccgggatgcacctgcccgttttgtactatgctgcgtag

SEQ ID NO: 17369 - DNA, 75 bp, synthetic construct
  source 1..75: mol_type = other DNA
aaagcatcaacggtcagtgcagaaataccatatcagacttttcgtgactttgctgaaaataaaggtgtgtttacc

SEQ ID NO: 17370 - DNA, 75 bp, synthetic construct
  source 1..75: mol_type = other DNA
ctcaccactatatcaaggcaaaacgcagcatcggcgtgtcagctggcgagggtaaatctgcaacagaaatcattg

SEQ ID NO: 17371 - DNA, 75 bp, synthetic construct
  source 1..75: mol_type = other DNA
ctgtttccgggccgagctgctggttgggatttgatccttcgcgtggcgtggatagttctgccgtgtacggagtgt

SEQ ID NO: 17372 - DNA, 75 bp, synthetic construct
  source 1..75: mol_type = other DNA
ggtcaggtactggctaagccgggcaccatcaagccgcacaccaagttcgaatctgaagtgtacattctgtccaaa

SEQ ID NO: 17373 - DNA, 75 bp, synthetic construct
  source 1..75: mol_type = other DNA
tgacactgacaccaaacaataacaacaccgtacaacctgtggcgctgatgcgtctgggcgtctttgtaccgaccc

SEQ ID NO: 17374 - DNA, 75 bp, synthetic construct
  source 1..75: mol_type = other DNA
tacaaaatcagtcagcccatcatatagagctattagttgatggtcagcattctctttgcctgtatatactcgaag

SEQ ID NO: 17375 - DNA, 75 bp, synthetic construct
  source 1..75: mol_type = other DNA
aaaaggatatgattcggcttggatagaaatacagcttgctcatatagataagaataatattagaggtacgtataa

SEQ ID NO: 17376 - DNA, 75 bp, synthetic construct
  source 1..75: mol_type = other DNA
tacgcttgatgtgccaatgattgacttcagcagcgtgtcacggcggggctcactgaccctgttgtcgcagggata

SEQ ID NO: 17377 - DNA, 75 bp, synthetic construct
  source 1..75: mol_type = other DNA
aacttattgccacgaaggcggggaatattaccgtctataactatgatggtgaaacacgggaatatatttccactt

SEQ ID NO: 17378 - DNA, 75 bp, synthetic construct
  source 1..75: mol_type = other DNA
tcccgcatggagcatattctgccatggcagaatatgaccgctgtcatcgagccgttttatcccaaggcgggcaat

SEQ ID NO: 17379 - DNA, 75 bp, synthetic construct
  source 1..75: mol_type = other DNA
gctggattatctggacgcactggaactggtcgatacttccagtgcgccagatattgaatggcctacgcctccggc

SEQ ID NO: 17380 - DNA, 75 bp, synthetic construct
  source 1..75: mol_type = other DNA
attgcaacgccaaaagagtcaaatccggttcagccgcatccaatgaaatcaggacaggtggcgctctctctttga

SEQ ID NO: 17381 - DNA, 75 bp, synthetic construct
  source 1..75: mol_type = other DNA
gcgaaagagggcctggtggtcgattttattcagcaaacgaacctggatgatttaccagacaaagccagcatcatt

SEQ ID NO: 17382 - DNA, 75 bp, synthetic construct
  source 1..75: mol_type = other DNA
gacaccggctggcatctgcctacaggaattctgcaggaaactggcacgcttaatttattcctgaaaaccaccgac

SEQ ID NO: 17383 - DNA, 75 bp, synthetic construct
  source 1..75: mol_type = other DNA
agagcgcaatgcttgccgccaccggctttgatgccgatctgttgctgcagacgctggagctgacagacggtctgg

SEQ ID NO: 17384 - DNA, 75 bp, synthetic construct
  source 1..75: mol_type = other DNA
tctagaaaatggccacaacgtccagtcaaatgtgttgtctttaacgagagtcacaaaagccaatagcttaactca

SEQ ID NO: 17385 - DNA, 75 bp, synthetic construct
  source 1..75: mol_type = other DNA
tggcgagatccctatggtgctttttccagcgtgtttggaaatgatgattcatcaaaagagaatccaaatgtcggg

SEQ ID NO: 17386 - DNA, 75 bp, synthetic construct
  source 1..75: mol_type = other DNA
tgcgtgtcacctgcgggatgttactgatggtcatgagtggtgtgtcgcaggcggctgagctccacctggagagcc

SEQ ID NO: 17387 - DNA, 75 bp, synthetic construct
  source 1..75: mol_type = other DNA
gtaattattgatgaagtccacgcggtagcgggcagtaaacgtggtgcgcatctggcgttaagtctggagcggctc

SEQ ID NO: 17388 - DNA, 75 bp, synthetic construct
  source 1..75: mol_type = other DNA
gctgaacgggattatttcatcctcagagaacggctgatggcaatgcagaagcaactggaaggagcacaggaatat

SEQ ID NO: 17389 - DNA, 75 bp, synthetic construct
  source 1..75: mol_type = other DNA
tcggcaaattcggcttgctctcgctgacttttgccgccgtttacagctttaacaacgttatcaataataatattg

SEQ ID NO: 17390 - DNA, 75 bp, synthetic construct
  source 1..75: mol_type = other DNA
agatgagttgtgtaagaaagtgacaagttggatgtattcgcatcctggagagagaattagatatgaacgttttaa

SEQ ID NO: 17391 - DNA, 75 bp, synthetic construct
  source 1..75: mol_type = other DNA
gaagatgctgaacgtgaagcggctgaacgccaggaacttgaagccaaacgtcagcaggccattgaatacatcata

SEQ ID NO: 17392 - DNA, 75 bp, synthetic construct
  source 1..75: mol_type = other DNA
aaaaatcatcgtgatgacttacctattgcaattctggctgccggaatggttaatgaaaatgatctgatcttcttt

SEQ ID NO: 17393 - DNA, 75 bp, synthetic construct
  source 1..75: mol_type = other DNA
cggcagcagtaacgcacaggcaaaaaataacagcagtacaggaggcattggctggatttcggatgatgacgggat

SEQ ID NO: 17394 - DNA, 75 bp, synthetic construct
  source 1..75: mol_type = other DNA
tagagctggatggcgataatagccgctttgtggggcaattcaacattgatacaggcagcgcgctcagcgtcaacg

SEQ ID NO: 17395 - DNA, 75 bp, synthetic construct
  source 1..75: mol_type = other DNA
caaacgaaacagtaattatattatcgcagagctggttattccgccggaggtgggcggtttctggatgcgtgagct

SEQ ID NO: 17396 - DNA, 75 bp, synthetic construct
  source 1..75: mol_type = other DNA
attcagtggcggtatcgcagccggttatgatttttatccgcagttcagtattccggttcgtacagaactggagtt

SEQ ID NO: 17397 - DNA, 75 bp, synthetic construct
  source 1..75: mol_type = other DNA
tggacatcgacctgtcccacagcaatctggctccaggcctgctgtgtgcagacgggcaataccgccagatagtca

SEQ ID NO: 17398 - DNA, 75 bp, synthetic construct
  source 1..75: mol_type = other DNA
gctcctggacacaggtacagaaagtgctagggtgcagccgtggcacaatcagtaatgcgctaaaacgtaaaaccg

SEQ ID NO: 17399 - DNA, 75 bp, synthetic construct
  source 1..75: mol_type = other DNA
aataccagaacctgctgatgtgtgagttcgtggacgatctcgcgtccgtgttcccgctcagcgagctgcaggcgt

SEQ ID NO: 17400 - DNA, 75 bp, synthetic construct
  source 1..75: mol_type = other DNA
accggcaacgccgctgcaggataaaacgaacactgcacacaacgtgaaggccagggaacggataccacagttgaa

SEQ ID NO: 17401 - DNA, 75 bp, synthetic construct
  source 1..75: mol_type = other DNA
tgccgattcgttttgcaggctcttaccagcgcgacgataccggcgaaacggtggccgtcgaggtggtcatgcgtg

SEQ ID NO: 17402 - DNA, 75 bp, synthetic construct
  source 1..75: mol_type = other DNA
tggagcgtaatggtcgcaaaaccaaaggtatgattgaggcggattccgcgcgtcatgcccgccagttgttgcgcg

SEQ ID NO: 17403 - DNA, 75 bp, synthetic construct
  source 1..75: mol_type = other DNA
cgccggtgctggtgcagatgctcgaccggctggaaagtgaaatcctggctgaccgggtgagtgaggaaagccgcc

SEQ ID NO: 17404 - DNA, 75 bp, synthetic construct
  source 1..75: mol_type = other DNA
aggccagacaggcgctgtccatttatctgacgctgccctcgctggatgaggcggtgaacactctgaaaccctggt

SEQ ID NO: 17405 - DNA, 75 bp, synthetic construct
  source 1..75: mol_type = other DNA
cgccgggacgcctgattcgtgatcccgacacaatgcgcccgctggcacaggagggggaggaaaagccctttacgc

SEQ ID NO: 17406 - DNA, 75 bp, synthetic construct
  source 1..75: mol_type = other DNA
aaacggatgaatccggggaggcccgggggcgggcctctgtttttccggagtcagtccggtctgtggtttatgcga

SEQ ID NO: 17407 - DNA, 75 bp, synthetic construct
  source 1..75: mol_type = other DNA
attaatacgctgtttccttttattgagaatccgacaccgttacagcaaaaggtgctggatctggatatcagccag

SEQ ID NO: 17408 - DNA, 75 bp, synthetic construct
  source 1..75: mol_type = other DNA
ccagccgttgaaatctatagctatatagctggattcaatgaacaagggcaagaatgttacgccactcaaaaaaca

SEQ ID NO: 17409 - DNA, 75 bp, synthetic construct
  source 1..75: mol_type = other DNA
tgcgcagaatatgatgaatggggcaacctgctgaatgaagagaacccgcatcagctgcagcagcttatccggctg

SEQ ID NO: 17410 - DNA, 75 bp, synthetic construct
  source 1..75: mol_type = other DNA
gttgctggcgttcaccgactgctcgggctaccagacccgttatgaatacgaccgcttcggccagatgacggcggt

SEQ ID NO: 17411 - DNA, 75 bp, synthetic construct
  source 1..75: mol_type = other DNA
accgatcgctttgatggctacgttagctggagtccaaaagaagtattcgaaaaggcttatcgtccggtatcaggg

SEQ ID NO: 17412 - DNA, 75 bp, synthetic construct
  source 1..75: mol_type = other DNA
atgaaaacatttcgctggaaagtgaagccggatatggaggtgaactcgcagccatcggtgcgtgaagtgcgtttt

SEQ ID NO: 17413 - DNA, 75 bp, synthetic construct
  source 1..75: mol_type = other DNA
ccggcacatcagcccgtgaggcggcaacccatgcgactgatgctgcaggctcagcacgcgcagccagcacgtcag

SEQ ID NO: 17414 - DNA, 75 bp, synthetic construct
  source 1..75: mol_type = other DNA
gaacagctagaaaagctgccggcagagtgtaaatcagttgaagataatgagttattaccctgggctgcagtgggg

SEQ ID NO: 17415 - DNA, 75 bp, synthetic construct
  source 1..75: mol_type = other DNA
ggcctgtatttgcgaccggagaggcgtcctgggggctcagtaaccagtggtcgctgtatggcggggctgtgcttg

SEQ ID NO: 17416 - DNA, 75 bp, synthetic construct
  source 1..75: mol_type = other DNA
aacgtaaagggcttcacattcattttgtgggctatctgaacggtcagagccacaggagttcgtatctggtatcca

SEQ ID NO: 17417 - DNA, 75 bp, synthetic construct
  source 1..75: mol_type = other DNA
tcctggcactgggcatcaatatcgaaggtcagaaagaactgctgggtatgtggctggccgaaaatgaaggggcga

SEQ ID NO: 17418 - DNA, 75 bp, synthetic construct
  source 1..75: mol_type = other DNA
aaatacactgcacaggacgccaccacagcgcgaaaaggtcttgtccagctcagtagcgccaccaacagcgattct

SEQ ID NO: 17419 - DNA, 75 bp, synthetic construct
  source 1..75: mol_type = other DNA
atgagcgagattaattatcaggaagggcatgaaacggcagggcaggcaaaaccagttgcatggcgatatcgctac

SEQ ID NO: 17420 - DNA, 75 bp, synthetic construct
  source 1..75: mol_type = other DNA
gcgccgctgccgccgtaccgggtactgaccgggctggtggaccgcttcgggcgcacacagacgttccaccgcgaa

SEQ ID NO: 17421 - DNA, 75 bp, synthetic construct
  source 1..75: mol_type = other DNA
atgacctatgcgcacctcgctcctgatttcctccaggatgcaatttcacttaatccgttaaaaggaggcatccac

SEQ ID NO: 17422 - DNA, 75 bp, synthetic construct
  source 1..75: mol_type = other DNA
aggattacaggacattcagcgaccatctttacgaaaatgataaacactatcatcagagtgattatgatgattttt

SEQ ID NO: 17423 - DNA, 75 bp, synthetic construct
  source 1..75: mol_type = other DNA
ggtccccgttctgtttcctcttctcaggttttccccgacacgctgcccgccggtacagagtacggtgccgataac

SEQ ID NO: 17424 - DNA, 75 bp, synthetic construct
  source 1..75: mol_type = other DNA
atcagcctttaccgccgctatgacaaccgtggccggttaacctcggtgaaagacgcacagggccgtgaaacgcgg

SEQ ID NO: 17425 - DNA, 75 bp, synthetic construct
  source 1..75: mol_type = other DNA
gttgctggcgttcactgactgctcgggctaccagacccgctatgaatacgaccgcttcggccagatgacggcggt

SEQ ID NO: 17426 - DNA, 75 bp, synthetic construct
  source 1..75: mol_type = other DNA
agaagctggaagaaatcttccattcctccatgttcaactaccagcgtcactggtgggaagccggaaaaaccaacc

SEQ ID NO: 17427 - DNA, 75 bp, synthetic construct
  source 1..75: mol_type = other DNA
agacgagaaagttgtcgttttcgtgatttctgttgggaaaagagaacgctcggaagtatatagcgaggcggtcaa

SEQ ID NO: 17428 - DNA, 75 bp, synthetic construct
  source 1..75: mol_type = other DNA
agccgcaaaatctgcctgctgcatgagctgttccagcccgtacatccggtgtgtgctgtgtcggtccgtctacaa

SEQ ID NO: 17429 - DNA, 75 bp, synthetic construct
  source 1..75: mol_type = other DNA
ggcattacttcaggttttgcctttctggatcgcggcgctggcttcggtattgtccagcatttgatcgattaccag

SEQ ID NO: 17430 - DNA, 75 bp, synthetic construct
  source 1..75: mol_type = other DNA
tgaccgtcacggcaggctgacggagaaaaccgacctcatcccggaaggggttatccgcacggatgatgagcgcac

SEQ ID NO: 17431 - DNA, 75 bp, synthetic construct
  source 1..75: mol_type = other DNA
ggtatctgcgaaatgcagaacgtggcccccgatggcaaaggcattcggctggagctaatcggcttcaggggaaat

SEQ ID NO: 17432 - DNA, 75 bp, synthetic construct
  source 1..75: mol_type = other DNA
cgggtaacgctaaaacactggaacagtatgagttaacaaagaaacacggagttatctggctttactctgaggacg

SEQ ID NO: 17433 - DNA, 75 bp, synthetic construct
  source 1..75: mol_type = other DNA
aataccagaacctgctgatgtgcgagttcgttgacgatctcgcatctgtgttcccgctcagcgaattgcaggcgt

SEQ ID NO: 17434 - DNA, 75 bp, synthetic construct
  source 1..75: mol_type = other DNA
tcagctcgtgccgccagcacgtcagccggacaggctgcatcatctgctcagtcagcatcttccagcgcaggaacg

SEQ ID NO: 17435 - DNA, 75 bp, synthetic construct
  source 1..75: mol_type = other DNA
aactgattaacatggtctgcgataacggctactcccttcgtgttgttgatgaatctgaccggacctcagcagact

SEQ ID NO: 17436 - DNA, 75 bp, synthetic construct
  source 1..75: mol_type = other DNA
agcttgccaacaaggaattgagccgtcgggagaaaactgtcgactcgctggttcagcaaaccgcggaagggatcg

SEQ ID NO: 17437 - DNA, 75 bp, synthetic construct
  source 1..75: mol_type = other DNA
gctggcgcatcatgttcgcctaacggccttgtaggccgcgataatacaggggcaatactttcgtgccaatccggt

SEQ ID NO: 17438 - DNA, 75 bp, synthetic construct
  source 1..75: mol_type = other DNA
cggatgttattgaagtttattctggtggcgtgcttgatgttagtggtggtacggcaacaaatgttacccagcacg

SEQ ID NO: 17439 - DNA, 75 bp, synthetic construct
  source 1..75: mol_type = other DNA
ccgctgctgggtgcaaaggtccttcccggtgaaaccgacatcgccctgcccggcccgctgccgttcattctctcc

SEQ ID NO: 17440 - DNA, 75 bp, synthetic construct
  source 1..75: mol_type = other DNA
tgctcatcggcctgtactgacgcggtgaatgcgccggaatggcggtattactggcaggtcaacatgccagccgcc

SEQ ID NO: 17441 - DNA, 75 bp, synthetic construct
  source 1..75: mol_type = other DNA
ctccgcagcagcagactcaaaaacagcggctgcatcatctgccagcgccgcgtcaacaagtgccgggcaggcctc

SEQ ID NO: 17442 - DNA, 75 bp, synthetic construct
  source 1..75: mol_type = other DNA
acgccggatggcattcagctacaggtcggggaatcgacggtaatcaggctgtcgaaggatggcatcaccatcgtg

SEQ ID NO: 17443 - DNA, 75 bp, synthetic construct
  source 1..75: mol_type = other DNA
aaggctcactctcctttgccaaccctacggttcgtgcctggttattccagatccttgccgttgttgctgttgtcg

SEQ ID NO: 17444 - DNA, 75 bp, synthetic construct
  source 1..75: mol_type = other DNA
ttcatgacttgcaggaatggggatggatacctgtacgattcagcccagaaagagttttcagggcaccgcgtagct

SEQ ID NO: 17445 - DNA, 75 bp, synthetic construct
  source 1..75: mol_type = other DNA
aattctgcccaaccgtaaccgccccatgacctcggtaccgacattgatccgccacgttcccggaaaaacggaacc

SEQ ID NO: 17446 - DNA, 75 bp, synthetic construct
  source 1..75: mol_type = other DNA
gatgaacctggtatacataaggcgggttatgctatctgccgttcgatggatttaaactcatgggaatatgtgcca

SEQ ID NO: 17447 - DNA, 75 bp, synthetic construct
  source 1..75: mol_type = other DNA
gatgataaaagtagttaccttattcagtcatggattgaaaatgctgagggaaaaaaggatgcccggtttgtaatt

SEQ ID NO: 17448 - DNA, 75 bp, synthetic construct
  source 1..75: mol_type = other DNA
atgctgacgaaagaaccatcatttgcatcgctgctggtaaaacaaagcccggcaatgcactacggtcacggctgg

SEQ ID NO: 17449 - DNA, 75 bp, synthetic construct
  source 1..75: mol_type = other DNA
tgacactgacaccaaacaataacaacaccgtacaacctgtggcgctgatgcgtctgggcgtttttgtaccgaccc

SEQ ID NO: 17450 - DNA, 75 bp, synthetic construct
  source 1..75: mol_type = other DNA
cccgcgaacgtgaaggactgtcaccgcgtgatggtggtgatgagttcagccaggcatggaaacaggaagtaaaaa

SEQ ID NO: 17451 - DNA, 75 bp, synthetic construct
  source 1..75: mol_type = other DNA
cccgtattgtcgccgcctggttcccgacgaaagaacgtggtactgcctccgccatctttaactcggcgcaatatt

SEQ ID NO: 17452 - DNA, 75 bp, synthetic construct
  source 1..75: mol_type = other DNA
ttaatggttaaaagaaattgcttcgggctggctgattattttcgtcaattagggatttctgacaaggaacaggcg

SEQ ID NO: 17453 - DNA, 75 bp, synthetic construct
  source 1..75: mol_type = other DNA
taaattaccttcacagatggtttcggattccgatgattctgataaccagtcttatgatacttttccttctgagcc

SEQ ID NO: 17454 - DNA, 75 bp, synthetic construct
  source 1..75: mol_type = other DNA
taatccgtgaggatgaatgtcgtaagttaactggagtgtgtcgcactacacgctacgaactggagaaaaaaggga

SEQ ID NO: 17455 - DNA, 75 bp, synthetic construct
  source 1..75: mol_type = other DNA
aacaatctaccggaaaggttatcgtttcagcgggcaggttttcaaaactaaaattaatgaagataatacttcaga

SEQ ID NO: 17456 - DNA, 75 bp, synthetic construct
  source 1..75: mol_type = other DNA
acgcccctgcgccagaacaaccggtggcaggtaacgcctggcaagccgaagagcagcaatccacttttgctccac

SEQ ID NO: 17457 - DNA, 75 bp, synthetic construct
  source 1..75: mol_type = other DNA
atccgcacgctgtcggtaatgaggttgcacgtcggcaacagtctgcaaatgctcaggtcatgcgaagtaatcagg

SEQ ID NO: 17458 - DNA, 75 bp, synthetic construct
  source 1..75: mol_type = other DNA
attacggagacctgaaaaaggcggtcgatcgcacttatgccgaaatgggtatggatggtgctggtgatgaaatat

SEQ ID NO: 17459 - DNA, 75 bp, synthetic construct
  source 1..75: mol_type = other DNA
gagaaaaccattgcagcacttcctgcctttgcgccgttctccggtgagattgcccagatgagcgccaatatccgc

SEQ ID NO: 17460 - DNA, 75 bp, synthetic construct
  source 1..75: mol_type = other DNA
gtttacctttcctggtgcaaacagaagttatctacaatcaagtaacaccgatgttgctgccgcagcagctataag

SEQ ID NO: 17461 - DNA, 75 bp, synthetic construct
  source 1..75: mol_type = other DNA
gattatccagcagtgtcgttttggctgcctcattgttcagcgtaccctcttatgcggcaacagacagcattgggc

SEQ ID NO: 17462 - DNA, 75 bp, synthetic construct
  source 1..75: mol_type = other DNA
gaaggaaggaaaatttcctaagcggatcaagattggttccactgctgttgcatatcgtctttcagaagtgcaggc

SEQ ID NO: 17463 - DNA, 75 bp, synthetic construct
  source 1..75: mol_type = other DNA
gatgtttttggcataacaccaagagcagcagaagaaagggttaagaaattgctcgaaatgggattaattataaaa

SEQ ID NO: 17464 - DNA, 75 bp, synthetic construct
  source 1..75: mol_type = other DNA
acccactgacccgggagccaataacgtcatcaatgattgtaagtcaagaacaatgtatttatgatcaagccaaag

SEQ ID NO: 17465 - DNA, 75 bp, synthetic construct
  source 1..75: mol_type = other DNA
ccacgccttacgaatccctgcttgtgaccatcagccaggctgtccgtggcggaaaattacctgcaggctggtatc

SEQ ID NO: 17466 - DNA, 75 bp, synthetic construct
  source 1..75: mol_type = other DNA
gccgtaacgtgctcagcccgtcgaagctgcgggaaaaatgggatgagctttccctgcgcttatcgccgtccgtca

SEQ ID NO: 17467 - DNA, 75 bp, synthetic construct
  source 1..75: mol_type = other DNA
aggtcgtgatgtcaatgagcaggatggtttgatactggatgccattgatcgctatcaggctaaatttgaagctga

SEQ ID NO: 17468 - DNA, 75 bp, synthetic construct
  source 1..75: mol_type = other DNA
ttatttgcctgacggctgcctctggccttacctctgcttatgcggcgcaactggctgacgatgaagcgggactac

SEQ ID NO: 17469 - DNA, 75 bp, synthetic construct
  source 1..75: mol_type = other DNA
gcggacgctggcgtaccggcgtgaggccgccggtgacctggccggggaaatcaccggcgtgacggacggtgccgg

SEQ ID NO: 17470 - DNA, 75 bp, synthetic construct
  source 1..75: mol_type = other DNA
cgagagctgtattgaagcattccatgaggctgaaaccgtccagggtcactccgcgttccgtcgtaatcaacggga

SEQ ID NO: 17471 - DNA, 75 bp, synthetic construct
  source 1..75: mol_type = other DNA
atcattctaggtgcagaagttgctaaagcattagattgtgatgttttcacggttgataaggaactggttttagga

SEQ ID NO: 17472 - DNA, 75 bp, synthetic construct
  source 1..75: mol_type = other DNA
ttatgatgataacttttcaggcaaaggatggaggctggtcaatgaagaacaggcagagttacttaacctcttcga

SEQ ID NO: 17473 - DNA, 75 bp, synthetic construct
  source 1..75: mol_type = other DNA
gccgcagcgagtcactctggctggcgcggggcggggtggcggagcagcacagttcgcagccgctaagcgcactct

SEQ ID NO: 17474 - DNA, 75 bp, synthetic construct
  source 1..75: mol_type = other DNA
acggttacgctttaaatgatggggaaatcatcgtacataactatgatggcgaaacgcgggaatatatttctacat

SEQ ID NO: 17475 - DNA, 75 bp, synthetic construct
  source 1..75: mol_type = other DNA
taaatttcttgctattaacctgctgaaacggcgtggttacaaaccacagccacttaagcgggtttatatacctaa

SEQ ID NO: 17476 - DNA, 75 bp, synthetic construct
  source 1..75: mol_type = other DNA
gttcccgccggtgctggtgcagatgctcgaccggctggaaagtgaaatcctggctgaccgggtgagtgaggaaag

SEQ ID NO: 17477 - DNA, 75 bp, synthetic construct
  source 1..75: mol_type = other DNA
aaaccacgcagtgaaatgggtgtgacttgctcaggccgccagaaacaacgcggaaaatcaattccggcttattac

SEQ ID NO: 17478 - DNA, 75 bp, synthetic construct
  source 1..75: mol_type = other DNA
cccctgctcggtgcaaaggtccttcccggtgaaaccgacatcgccctgcccggcccgctgccgttcattctctcc

SEQ ID NO: 17479 - DNA, 75 bp, synthetic construct
  source 1..75: mol_type = other DNA
ttggcccggtaacgcagatttatatcggcggcaaaaacaaacgggtcatgcgcaacctgaccatcgataacctca

SEQ ID NO: 17480 - DNA, 75 bp, synthetic construct
  source 1..75: mol_type = other DNA
gcaactcgtttacaaactgcttactgcagaacaggaatacgagacaaccggaagtgaagaaacactcaagacggt

SEQ ID NO: 17481 - DNA, 75 bp, synthetic construct
  source 1..75: mol_type = other DNA
ccttcgcagggatttaccggggcgtattatcagttgaataatgacaactttgcaccaggaaaaacggcggctgat

SEQ ID NO: 17482 - DNA, 75 bp, synthetic construct
  source 1..75: mol_type = other DNA
aattgttatgaaagtcacgaaacattagctaagatttttaagtcttcagcgtcaacaattaaacgtaagataaac

SEQ ID NO: 17483 - DNA, 75 bp, synthetic construct
  source 1..75: mol_type = other DNA
ggtcttacgcctcaaacgtctcggtctgtcgaaagcctgccgtcggttagtagtgacgcttatccgtcgctacgc

SEQ ID NO: 17484 - DNA, 75 bp, synthetic construct
  source 1..75: mol_type = other DNA
gaaataggtacaacgaaggaagtaaagaaaaaggattcaaccgaccttaattttgaccataactccccggtagcg

SEQ ID NO: 17485 - DNA, 75 bp, synthetic construct
  source 1..75: mol_type = other DNA
cggtggtatctggaatctgtacactctgaacaacggcggggcatttatggcccccgaaccggatgacgatgatga

SEQ ID NO: 17486 - DNA, 75 bp, synthetic construct
  source 1..75: mol_type = other DNA
gtgttccggttatgccacaaccgtctcctgtcaccagtgagaccgagcttttctttactgaaggaggtaatggcg

SEQ ID NO: 17487 - DNA, 75 bp, synthetic construct
  source 1..75: mol_type = other DNA
tgtgccggtgaaacagagtggtacaacgttagcggcagctgaatttaacgccagtgccacaattgtggtggatta

SEQ ID NO: 17488 - DNA, 75 bp, synthetic construct
  source 1..75: mol_type = other DNA
tggatgatgcagaacttatcgacatgctgacccgtgccatttttgttgccgatatatgggggcgtctggatgccg

SEQ ID NO: 17489 - DNA, 75 bp, synthetic construct
  source 1..75: mol_type = other DNA
tctggctctcaggacgtagtacaaggaagtctggcaacgaacacaaccataaatggtggtcgacagtatgttgaa

SEQ ID NO: 17490 - DNA, 75 bp, synthetic construct
  source 1..75: mol_type = other DNA
atgtggcttttgcatgggcaatgtttaagatcttcaaaattcctgtaaataaatggaccattcccacagcggccc

SEQ ID NO: 17491 - DNA, 75 bp, synthetic construct
  source 1..75: mol_type = other DNA
attataaatgctgcaaaaatagaaaatgagcgtataatcggtgtgctggtagatggaaattttacttatgaacaa

SEQ ID NO: 17492 - DNA, 75 bp, synthetic construct
  source 1..75: mol_type = other DNA
agattatgttgtgcaacaggacgcgttacagaaagagggtgatgcggtttccggcggcgtaacgttgcggaggaa

SEQ ID NO: 17493 - DNA, 75 bp, synthetic construct
  source 1..75: mol_type = other DNA
cgctggcaatggctttagggctggcttgcgcttcttcgtgggccgctgaactggcgaagcctcttacacttgacc

SEQ ID NO: 17494 - DNA, 75 bp, synthetic construct
  source 1..75: mol_type = other DNA
gtagtgaactggtatcccgactttcttctcatcgtcgcgtggtggcgttgggagatactgattttacggacgtcg

SEQ ID NO: 17495 - DNA, 75 bp, synthetic construct
  source 1..75: mol_type = other DNA
gtggtcaggtactggctaagccgggcaccatcaagccgcacaccaagttcgaatctgaagtgtacattctgtcca

SEQ ID NO: 17496 - DNA, 75 bp, synthetic construct
  source 1..75: mol_type = other DNA
attgaagagcagagagaacgccagcgcaaacaggaggccacgcagccggacagcgtgagcgctgaaaatcaggct

SEQ ID NO: 17497 - DNA, 75 bp, synthetic construct
  source 1..75: mol_type = other DNA
ggtacgcaccagaaaatcattgatatggccatgaatggcgttggcctcaacacgattttacgtcacttaaaaaac

SEQ ID NO: 17498 - DNA, 75 bp, synthetic construct
  source 1..75: mol_type = other DNA
tggcggcaaaagaaaccgaagcgctggttaccggtacagacaacgccgcagatgcagccgccgcacgcaaggcga

SEQ ID NO: 17499 - DNA, 75 bp, synthetic construct
  source 1..75: mol_type = other DNA
tattctggaccgcactgctgacaggcatttcccttcctgcacaagctaaaaccggacacggtgcattttctgtgg

SEQ ID NO: 17500 - DNA, 75 bp, synthetic construct
  source 1..75: mol_type = other DNA
gctgagcctgtttcattccgcaaggagaacagagcaaggcacgaagcaaacacaaggctccgcttgtttgtgaga

SEQ ID NO: 17501 - DNA, 75 bp, synthetic construct
  source 1..75: mol_type = other DNA
attatcagttgaataatgacaactttgcaccaggaaaaacggcggctgattattcgtttcaaactcggcctcttg

SEQ ID NO: 17502 - DNA, 75 bp, synthetic construct
  source 1..75: mol_type = other DNA
cgcggcatccaaatctccgccgggaatgctgtctcctttgtggcgctgactaacattgagatgaagcgtgcgtcg

SEQ ID NO: 17503 - DNA, 75 bp, synthetic construct
  source 1..75: mol_type = other DNA
atgataacgctgccgaccggtaccaaaatctggatcatcgctggcatcacagatatgcgttgtggcttcaatggc

SEQ ID NO: 17504 - DNA, 75 bp, synthetic construct
  source 1..75: mol_type = other DNA
ccggaaatcagcgaggcgaacattctgagcacatttgaacaactacaccagaataaggatgaagtgtttgagcga

SEQ ID NO: 17505 - DNA, 75 bp, synthetic construct
  source 1..75: mol_type = other DNA
gaaagtaccgaatttacgaaaagaattaacgtgatcggcgtgaccgaccagaaaggcgaaaaaatcctcctggac

SEQ ID NO: 17506 - DNA, 75 bp, synthetic construct
  source 1..75: mol_type = other DNA
ccggtaaacccgctgctgggagcgaaggtgctgcctgctgaaaccgacctggcactgtccggcccgctgccgttt

SEQ ID NO: 17507 - DNA, 75 bp, synthetic construct
  source 1..75: mol_type = other DNA
tgttaccgaaagataaacacactgaggcggttatttttgcgggtgataatgctcactcctttgcagaacattaca

SEQ ID NO: 17508 - DNA, 75 bp, synthetic construct
  source 1..75: mol_type = other DNA
gtacgctgaatgattttctcggtgccatgacggaggatgatgcccgtccggaggcactgcgccgctttgaactga

SEQ ID NO: 17509 - DNA, 75 bp, synthetic construct
  source 1..75: mol_type = other DNA
ggatgtgcgtggctctgactgcaccatcaaagggctggcgatgagcggctttggcccggtaacgcagatttatat

SEQ ID NO: 17510 - DNA, 75 bp, synthetic construct
  source 1..75: mol_type = other DNA
cagagggcgatttgtcttacaggacggcagccaggtgacaggggaggagggcggcagtatgcataacatcaccct

SEQ ID NO: 17511 - DNA, 75 bp, synthetic construct
  source 1..75: mol_type = other DNA
ccgctggcgcggggaacacctgttttcgcaaatctatggactattgctattcggtttatccccgctggcgcgggg

SEQ ID NO: 17512 - DNA, 75 bp, synthetic construct
  source 1..75: mol_type = other DNA
gggggatggaacctgtatacatatccgctgagcccggtgaatagcatggatccattaggattatatgaatttaaa

SEQ ID NO: 17513 - DNA, 75 bp, synthetic construct
  source 1..75: mol_type = other DNA
ggagattgacctgctgaacttcatttaccggaaggacggcaaggacattgtgcctgaccgtatccgttccgcgct

SEQ ID NO: 17514 - DNA, 75 bp, synthetic construct
  source 1..75: mol_type = other DNA
tggtgttgaactcgtttgatgtccgaattggtaaagaagatattttgtttaaaaaaggaagtgctgttctcattg

SEQ ID NO: 17515 - DNA, 75 bp, synthetic construct
  source 1..75: mol_type = other DNA
aaaccgcaaaacccaaagacaaaccctataagcttgctgatggcggcggtatgtatctactgattaacactaatg

SEQ ID NO: 17516 - DNA, 75 bp, synthetic construct
  source 1..75: mol_type = other DNA
ttcgccgctcagtactttccttattgatatctgccttaatatatgcccagcccgggatggcggccttcactacta

SEQ ID NO: 17517 - DNA, 75 bp, synthetic construct
  source 1..75: mol_type = other DNA
tatcacttagctggtatcaatagacctaagactgatgatgagtttatttctggaaacagtgatttaacaaagcat

SEQ ID NO: 17518 - DNA, 75 bp, synthetic construct
  source 1..75: mol_type = other DNA
ggtctgccagcgtctctgatgctgtctggctgtttgttgctgctttatgcactggtggtgtccatgaggagaaaa

SEQ ID NO: 17519 - DNA, 75 bp, synthetic construct
  source 1..75: mol_type = other DNA
ccgggctgatcggtttcggtctgctcactgctggcgtttatctgtatgcaggtctgccagcgtctctgatgctgt

SEQ ID NO: 17520 - DNA, 75 bp, synthetic construct
  source 1..75: mol_type = other DNA
atgcccgcctgcgggcactgttgcagacgcaacaggacaccatccgccagatggctgaatacaaccgcctgctct

SEQ ID NO: 17521 - DNA, 75 bp, synthetic construct
  source 1..75: mol_type = other DNA
ttaaggcagctataacggcacttatcaacggtgcacctggcacactggatacgcttaaagaaatagctgctgcga

SEQ ID NO: 17522 - DNA, 75 bp, synthetic construct
  source 1..75: mol_type = other DNA
cgtataaaactgcctgcctcattgcacaacatggagattcttatcttcatatagccaacctgtatttgcgcaaag

SEQ ID NO: 17523 - DNA, 75 bp, synthetic construct
  source 1..75: mol_type = other DNA
ctggttgccacagggagtggttatactaatttcgctaataatggtaccgacttggtaaatggtaacgaattatct

SEQ ID NO: 17524 - DNA, 75 bp, synthetic construct
  source 1..75: mol_type = other DNA
gtggcgtttatcattgatgtgtttgccggatacatcgtggggtggcgggtctcatcgtctatggaaacgacattc

SEQ ID NO: 17525 - DNA, 75 bp, synthetic construct
  source 1..75: mol_type = other DNA
ttcgcagggcagcatgtacccgttcaacggctgggtgagcaatgaatccagcccgctgcagtcctccctgctggt

SEQ ID NO: 17526 - DNA, 75 bp, synthetic construct
  source 1..75: mol_type = other DNA
ctccagaagcaatgcaatcatggctgcaaaacaacgccaaggaactgactcgcgtcggtgttgaccctaacagcg

SEQ ID NO: 17527 - DNA, 75 bp, synthetic construct
  source 1..75: mol_type = other DNA
actggtgtgctacgactggacgccacgcggtgagctggcggcggtgtatgaccgcagcggtacgcagatgcgcca

SEQ ID NO: 17528 - DNA, 75 bp, synthetic construct
  source 1..75: mol_type = other DNA
ttggtgtacctgttccgtggcccactgccacaccgccagcaggctggttacagtgcaacggagctacgttcacca

SEQ ID NO: 17529 - DNA, 75 bp, synthetic construct
  source 1..75: mol_type = other DNA
gagtgcttatcagaccatccaggagaacatgctgaaaggcgggatttccggccgcagtgcaaaaggaaaacgtat

SEQ ID NO: 17530 - DNA, 75 bp, synthetic construct
  source 1..75: mol_type = other DNA
cttgtgcagctgattgaccagcgggtgcaggcggtgatgctgtccatgcgacgtgacggaggaatgctgagtggc

SEQ ID NO: 17531 - DNA, 75 bp, synthetic construct
  source 1..75: mol_type = other DNA
gtatcactgggcaagatggctcctatttggcagaattattgttagaaaaaggttatgaagttcatggtattaaac

SEQ ID NO: 17532 - DNA, 75 bp, synthetic construct
  source 1..75: mol_type = other DNA
ggacgggtcagggccgtactcctaaagcaatcgccgctgctatcgaagctggtaagacactggaagactttgcta

SEQ ID NO: 17533 - DNA, 75 bp, synthetic construct
  source 1..75: mol_type = other DNA
tgctggaattttgaacctgatgccggaaaacagctaaatccgtatctcgccagtgagggaattctcaggcaataa

SEQ ID NO: 17534 - DNA, 75 bp, synthetic construct
  source 1..75: mol_type = other DNA
ttgctgctgtgtctgctttatttgtgttaccaacttacccaacccttctgggggcggtgcaaatggatgacacag

SEQ ID NO: 17535 - DNA, 75 bp, synthetic construct
  source 1..75: mol_type = other DNA
aagaccgtttgtgcggatcctgtccgaaaaagtgcgtgcgcgacgcggacgcccgccaaaagatgaagtgcgcct

SEQ ID NO: 17536 - DNA, 75 bp, synthetic construct
  source 1..75: mol_type = other DNA
ccggcgcgaaaaatccacctgtaccactgcgaccatcgcggcctgccgctggcgcttgtcagcacggaaggggca

SEQ ID NO: 17537 - DNA, 75 bp, synthetic construct
  source 1..75: mol_type = other DNA
aacggtggggcatttatggcccccgaaccggatgacgatgatgaaacctggatactgttcagtgccatgaacggt

SEQ ID NO: 17538 - DNA, 75 bp, synthetic construct
  source 1..75: mol_type = other DNA
cacgtcgcggtcattagcatggacagcgatccggcgaaaatctttcaattagatgattctcaagggccggaaaaa

SEQ ID NO: 17539 - DNA, 75 bp, synthetic construct
  source 1..75: mol_type = other DNA
ccatcaaaatgacaagcattgaaatcgctgagttggtgggtaagcgtcatgacaatgtgaaacgtaccatcgaaa

SEQ ID NO: 17540 - DNA, 75 bp, synthetic construct
  source 1..75: mol_type = other DNA
ttattaccgtctccgaagtggaatcgacaggataaccgcgcaggttaactacctgcaggagtacatcaggactca

SEQ ID NO: 17541 - DNA, 75 bp, synthetic construct
  source 1..75: mol_type = other DNA
gcgttaaaagcgcaattacaggagatgtgtgaagctgaaggtgttactcaggctgagatgattgctgaactgata

SEQ ID NO: 17542 - DNA, 75 bp, synthetic construct
  source 1..75: mol_type = other DNA
ggcatttaagtctgaccgatcgccagcttcgcagattgcagaaattgccgggtgccccgatatcaaataagcgag

SEQ ID NO: 17543 - DNA, 75 bp, synthetic construct
  source 1..75: mol_type = other DNA
attaaagagctgatcactgaaatggccttcaatggcgccggggttcgcgataccgccaggacactgaaaattggc

SEQ ID NO: 17544 - DNA, 75 bp, synthetic construct
  source 1..75: mol_type = other DNA
tatcgggtgttgctgaaccgtgttgatacatcaactgcaccggatattgaatggccagtagcacctatagggtaa

SEQ ID NO: 17545 - DNA, 75 bp, synthetic construct
  source 1..75: mol_type = other DNA
cctgaacgttatcgcgcaaacgcttcccgttaaaattcagtctattacgcggtactggataaacatttcaccact

SEQ ID NO: 17546 - DNA, 75 bp, synthetic construct
  source 1..75: mol_type = other DNA
aaagatgcgctgagtatcactgatgtgatggccgcgcagggcatgacacagaatcgggctgagatggggttttct

SEQ ID NO: 17547 - DNA, 75 bp, synthetic construct
  source 1..75: mol_type = other DNA
gaagaagtatcgggtgttgctgaaccgtgttaatacaacaactgcaccggatattgaatggccagtagcacctat

SEQ ID NO: 17548 - DNA, 75 bp, synthetic construct
  source 1..75: mol_type = other DNA
atgacttatacggttaaattcagggatgatgccctcagggaatggctcagactggataaggccattcagcagcag

SEQ ID NO: 17549 - DNA, 75 bp, synthetic construct
  source 1..75: mol_type = other DNA
tgtatgcaactggcttgaaaaatatagaaaatatggcgaagatgctttcattcgaaaaaataaaaagagtattcc

SEQ ID NO: 17550 - DNA, 75 bp, synthetic construct
  source 1..75: mol_type = other DNA
ctctgagtgtctggcagtcagtgagcacagtcatgttttccggcaattgagatactggtatcagaaacgcaaaac

SEQ ID NO: 17551 - DNA, 75 bp, synthetic construct
  source 1..75: mol_type = other DNA
taccaccggtgcagcgagcattcaggctggactgcctgcttcctgggttgtgggggataaaaccggcagcggtgg

SEQ ID NO: 17552 - DNA, 75 bp, synthetic construct
  source 1..75: mol_type = other DNA
ctctttccccgattacccacaaccagatccctgtcataaccaccgagctattggcgcatctttatggaacggatg

SEQ ID NO: 17553 - DNA, 75 bp, synthetic construct
  source 1..75: mol_type = other DNA
cgattaaggtcaagcgataccgctcttacagaggagaggtagggcaaaccgcccctaatgttctccaaagagatt

SEQ ID NO: 17554 - DNA, 75 bp, synthetic construct
  source 1..75: mol_type = other DNA
gcgtgagaaacaagcggctgaacaggaacgcctgaagcaacttgagaaagagcggttagctgctcaggaacagaa

SEQ ID NO: 17555 - DNA, 75 bp, synthetic construct
  source 1..75: mol_type = other DNA
aacagccacacgacaaaatgaccgaagtcattatttttgcgggtagtgatgcctgggcgcacgcgaaacaatggc

SEQ ID NO: 17556 - DNA, 75 bp, synthetic construct
  source 1..75: mol_type = other DNA
atctgtgcttggggcttgtcagaaactccaggaggctgttggcttaccgaatctggctccgcgctatgcaattga

SEQ ID NO: 17557 - DNA, 75 bp, synthetic construct
  source 1..75: mol_type = other DNA
atgaaaaaatggatgttagccatctgcctgatgtttataaatgagatctgccatgccactgattgctttgatctt

SEQ ID NO: 17558 - DNA, 75 bp, synthetic construct
  source 1..75: mol_type = other DNA
tgcctctttcaacgcaagctcttgcaattttaaagcagataaaacagttttatggggcccatgacttgatattta

SEQ ID NO: 17559 - DNA, 75 bp, synthetic construct
  source 1..75: mol_type = other DNA
ggccgcagctcccgatggctgaaaagcgaagtggaagcctggctgcaggcgcgtattgcacagtcccgtccgtaa

SEQ ID NO: 17560 - DNA, 75 bp, synthetic construct
  source 1..75: mol_type = other DNA
ggccgcagttcccgctggctgaaaagtgaagtggaaacctggctgcaggcgcgtattgcacagtcccgtccgtaa

SEQ ID NO: 17561 - DNA, 75 bp, synthetic construct
  source 1..75: mol_type = other DNA
aacagcaacggctggcgcttcctgctcccctaacgggcttgtaggccgcgacagtacaggggcgatactttcgtg

SEQ ID NO: 17562 - DNA, 75 bp, synthetic construct
  source 1..75: mol_type = other DNA
cgcagcggcggcgtgtcacgccggcgggtgattattcacttcccggaacagatagccccgcaggagcgcgacccg

SEQ ID NO: 17563 - DNA, 75 bp, synthetic construct
  source 1..75: mol_type = other DNA
tcagggcggcgtcgccgtcagatcttgcggaaaagctgacacacaaactgaaagagggctggcagccatacggcg

SEQ ID NO: 17564 - DNA, 75 bp, synthetic construct
  source 1..75: mol_type = other DNA
agcaatccggcaacaggtgcgccgtctgtatacatcatcggctccggtcaggtatcaccaatcgccagcgcgagc

SEQ ID NO: 17565 - DNA, 75 bp, synthetic construct
  source 1..75: mol_type = other DNA
attcagtaccaccattaacaatgcgctgtcaggtaagcagccactggatgagacgctgactcatttgagtggaaa

SEQ ID NO: 17566 - DNA, 75 bp, synthetic construct
  source 1..75: mol_type = other DNA
taaccgtgcgcttcatgagttacggaaaaacggaacccttcctgttgatgaagcctgggtcgatgattttgtcag

SEQ ID NO: 17567 - DNA, 75 bp, synthetic construct
  source 1..75: mol_type = other DNA
tgagacttcagagaaagcgaagatcgaacaggtattacgtaaccagccagcattgtccgcatttacgtcagaaat

SEQ ID NO: 17568 - DNA, 75 bp, synthetic construct
  source 1..75: mol_type = other DNA
ataacgaatcatcgcaggatatgcattatcaggtgataccagagggcattaaactgtcgccacggataagaatat

SEQ ID NO: 17569 - DNA, 75 bp, synthetic construct
  source 1..75: mol_type = other DNA
aaccatgcagcagcaccaggtggcaccgcatcacgggcagttcaggaaattcgggcagcacgtgagcagtgggaa

SEQ ID NO: 17570 - DNA, 75 bp, synthetic construct
  source 1..75: mol_type = other DNA
atgttccccctgaatttcttccccacatatccccattgggctgggcgcacattctactgactggcgaatatcttt

SEQ ID NO: 17571 - DNA, 75 bp, synthetic construct
  source 1..75: mol_type = other DNA
ggttttttaccgctttacttgacaatcacatcaatcaaatgatggcacgctattcctgcctgcgggccttacgga

SEQ ID NO: 17572 - DNA, 75 bp, synthetic construct
  source 1..75: mol_type = other DNA
tcgggattcgtgatatcaccgttcttgcagaatacggtcagagggaaaatacccgccgtgagcatgcagcgctga

SEQ ID NO: 17573 - DNA, 75 bp, synthetic construct
  source 1..75: mol_type = other DNA
catgctagtgaagccagtgccagagttgatgatctgcccgtcagcatcagcgccgtgctgatggctgaagcctgc

SEQ ID NO: 17574 - DNA, 75 bp, synthetic construct
  source 1..75: mol_type = other DNA
gccgacaccctcggctcctgtggttacgtttatctggctgtttatccgacaccggcacccgcaaccacctcataa

SEQ ID NO: 17575 - DNA, 75 bp, synthetic construct
  source 1..75: mol_type = other DNA
gtgaggctctggatgcctgggtatgtcgaccaggaatgacacaggagcaggcgacgatattaatcacggaagcat

SEQ ID NO: 17576 - DNA, 75 bp, synthetic construct
  source 1..75: mol_type = other DNA
tggaaaaaagtgtctccacgcgggactacaactaccgtgaagccacggcggaaatgaccacaggccagcatgacg

SEQ ID NO: 17577 - DNA, 75 bp, synthetic construct
  source 1..75: mol_type = other DNA
gcggcaagagccagctaaacctcggtcatctggtggatgccgggaaacagcagcgcggggaaggctttgaactgc

SEQ ID NO: 17578 - DNA, 75 bp, synthetic construct
  source 1..75: mol_type = other DNA
aatgtcgcgtatgtcggctgattccaagtccatgcgcagttggttgactgctctggatgaggtgacaatcgagcg

SEQ ID NO: 17579 - DNA, 75 bp, synthetic construct
  source 1..75: mol_type = other DNA
ccaagactggtctaatgattctttagaaacatgtaagatgaagtgctccggaaataacattggacgttttattag

SEQ ID NO: 17580 - DNA, 75 bp, synthetic construct
  source 1..75: mol_type = other DNA
aaagcctctcaagcgtctcaaagtgcatccgctgcggcatcctcacaaagtgccgcaagtgcgagtgcaactgct

SEQ ID NO: 17581 - DNA, 75 bp, synthetic construct
  source 1..75: mol_type = other DNA
aaatggcggaacatctgaaaggttactggccgaatcaactgagtttctcagaatcatgcggaatggtgatgagaa

SEQ ID NO: 17582 - DNA, 75 bp, synthetic construct
  source 1..75: mol_type = other DNA
attgccagcgcctttaatatgcctctcgatgttctgttctggtgtgccggttcgcagggcagtatgtacccgttc

SEQ ID NO: 17583 - DNA, 75 bp, synthetic construct
  source 1..75: mol_type = other DNA
tgtgcttgccggacagtccaacggcatggcctacggtgaagggcttccgttaccggattcttacgatgctccgga

SEQ ID NO: 17584 - DNA, 75 bp, synthetic construct
  source 1..75: mol_type = other DNA
gcgtggttaacgcattcagccgccccctctcttgattctatccgcgaaaacccaaacaacggacgctccatttca

SEQ ID NO: 17585 - DNA, 75 bp, synthetic construct
  source 1..75: mol_type = other DNA
gtactggctgaacatcatcacatcgctgggctgtctggaaggtggtgacctggatatcgcttatctttctgaaat

SEQ ID NO: 17586 - DNA, 75 bp, synthetic construct
  source 1..75: mol_type = other DNA
ccgtttgagcatatctgcacattgtttcgtgaactgataaaacactctcccggatattttggctatcagcgttca

SEQ ID NO: 17587 - DNA, 75 bp, synthetic construct
  source 1..75: mol_type = other DNA
ggttcaggacgcagagccaaacttcgatgtaaatggcaactctccgggaactccggatagttggataagctgtag

SEQ ID NO: 17588 - DNA, 75 bp, synthetic construct
  source 1..75: mol_type = other DNA
gctgcgttatcatttgcgctgccggttgtgagcggaatcacgaagcacccggtgcagagtgctgctctggtttcc

SEQ ID NO: 17589 - DNA, 75 bp, synthetic construct
  source 1..75: mol_type = other DNA
gatgcaccagttacacataaagctggttatgcaatctgccgttctgcagattttaactcatgggaatatgtgcca

SEQ ID NO: 17590 - DNA, 75 bp, synthetic construct
  source 1..75: mol_type = other DNA
gttttctgcgggccggtgtggaggtcgatcgatatggccgtgccgttgcgtaccatatctgtgaggatgattttc

SEQ ID NO: 17591 - DNA, 75 bp, synthetic construct
  source 1..75: mol_type = other DNA
tcgccggtgatgaacgcagcgcccgccgttcccttgtccgtgactatgtgctctcccttgctgcccgtctgccgg

SEQ ID NO: 17592 - DNA, 75 bp, synthetic construct
  source 1..75: mol_type = other DNA
tgatgtcacatttaatacgggcgacagtgaacaagggattgttccctgcctgacacgcgcgcaactcgccagtat

SEQ ID NO: 17593 - DNA, 75 bp, synthetic construct
  source 1..75: mol_type = other DNA
aagtccttactggagagaatgttctgcgtgcagcaattgctcgtattgagtggatttttgaaacatttccatcag

SEQ ID NO: 17594 - DNA, 75 bp, synthetic construct
  source 1..75: mol_type = other DNA
gcgcggagatgcaacgattaagccgggtaatggtattgagcaagcaactcactggatgccgctaccggaaccgcc

SEQ ID NO: 17595 - DNA, 75 bp, synthetic construct
  source 1..75: mol_type = other DNA
acctgaaggactcgaccaaaattattgctggtgggatgttgatccagttgatgctgcaaatgaaactatgagtta

SEQ ID NO: 17596 - DNA, 75 bp, synthetic construct
  source 1..75: mol_type = other DNA
acggatcccgcgtgaactacccaccgggcgtccggccatgctgcatattttcgagccggtggaggacgggcagac

SEQ ID NO: 17597 - DNA, 75 bp, synthetic construct
  source 1..75: mol_type = other DNA
ttctgactggaaagataatggtgacggaagctatacccagatcctgaccacaggagcgatgtctggcacgctgac

SEQ ID NO: 17598 - DNA, 75 bp, synthetic construct
  source 1..75: mol_type = other DNA
ggcctgatgacccgcgacaattacagaacggtaaataacattaccctgggtaaacatccgggggcgaaacaatga

SEQ ID NO: 17599 - DNA, 75 bp, synthetic construct
  source 1..75: mol_type = other DNA
atgagcgggttttagatagaattagaaacctcgaatgttccgctgaatttactgaacacaattttgtgttaagtg

SEQ ID NO: 17600 - DNA, 75 bp, synthetic construct
  source 1..75: mol_type = other DNA
aatcacagctccgggtgattaccctgaaaatacaaccactatcgcccctttatctccatacgataaatgggatgg

SEQ ID NO: 17601 - DNA, 75 bp, synthetic construct
  source 1..75: mol_type = other DNA
ttttgacgatccggagtcgctggggtttgccggtagcggggtccgtattgaaggaagctgcccgtcattatttgt

SEQ ID NO: 17602 - DNA, 75 bp, synthetic construct
  source 1..75: mol_type = other DNA
agacaaattgcgcgtgaccgatatcactagcggtgcgacatatccggtgctgattgaaagtataacagtggaagt

SEQ ID NO: 17603 - DNA, 75 bp, synthetic construct
  source 1..75: mol_type = other DNA
tcgttaatgtgaaaaatggcgcgatcaagtctgacagttacgatgccattaatggttcacagctttatgccatta

SEQ ID NO: 17604 - DNA, 75 bp, synthetic construct
  source 1..75: mol_type = other DNA
atgggggagcggatggcaaccggtgaatcacgacaaagcgtatcaaaaacgtatggagtagggctctcaactctg

SEQ ID NO: 17605 - DNA, 75 bp, synthetic construct
  source 1..75: mol_type = other DNA
ttatttttgttgctttgagttcattcttgctggcagggtgtgattcaccaaaagatgctaataagcaaaactttg

SEQ ID NO: 17606 - DNA, 75 bp, synthetic construct
  source 1..75: mol_type = other DNA
cactccatggtattcaggaaataatttaatatcaagctctccaggtgacacctataataaatcacagggaccatt

SEQ ID NO: 17607 - DNA, 75 bp, synthetic construct
  source 1..75: mol_type = other DNA
aagaatggtttgaaaattacaccggatgtgatcctaaaaataaaatatacgccaatatggttgagatgtattggc

SEQ ID NO: 17608 - DNA, 75 bp, synthetic construct
  source 1..75: mol_type = other DNA
accagaacgaactgaacgaaatccgccgccagtgggttctggctttccgggaaaacgggatcaccacaatggaac

SEQ ID NO: 17609 - DNA, 75 bp, synthetic construct
  source 1..75: mol_type = other DNA
tcggtaccagcggtgaaaagatccccctgttgagcacggctaacacatggagtgcgcgccagactttcaacggcg

SEQ ID NO: 17610 - DNA, 75 bp, synthetic construct
  source 1..75: mol_type = other DNA
ggcaagagaatgtacacttgaaacgctggaagaaatgctggaaaaattagaagttgttgttaacgaacgtcgcga

SEQ ID NO: 17611 - DNA, 75 bp, synthetic construct
  source 1..75: mol_type = other DNA
gaacaggtgatccctgaaaacgagggcggttggtggatacgtgaagtgggcctgtttgatgagtccggggcattg

SEQ ID NO: 17612 - DNA, 75 bp, synthetic construct
  source 1..75: mol_type = other DNA
tgaggatttaccacctggctggggattacttcacgttgttaacggaagagtacggaaagtacatgggtggcccaa

SEQ ID NO: 17613 - DNA, 75 bp, synthetic construct
  source 1..75: mol_type = other DNA
aattaacggagaaagcgtcaatctctggcactggcgcaatgctgtttataccgccacacgcgccctgattctgga

SEQ ID NO: 17614 - DNA, 75 bp, synthetic construct
  source 1..75: mol_type = other DNA
tcgttgctgtaactattctgttctctgtcttcgctactgcgaaacaagtaaaactgccaaataacatcaaatacg

SEQ ID NO: 17615 - DNA, 75 bp, synthetic construct
  source 1..75: mol_type = other DNA
atggaagaacaagcaaacaagattctcgtagaactactgcaaaaagccagcaatggaatagacgcggctgtttca

SEQ ID NO: 17616 - DNA, 75 bp, synthetic construct
  source 1..75: mol_type = other DNA
caatcacattaaagttatcaacgttcgtggggacagtatgtgtccaaccattgagccaggagatctcatcttcgt

SEQ ID NO: 17617 - DNA, 75 bp, synthetic construct
  source 1..75: mol_type = other DNA
ttccgacgagaataaacaaaaattaaccgagtggatgctctatgcgcagaaagtcgaatctacagacacctccag

SEQ ID NO: 17618 - DNA, 75 bp, synthetic construct
  source 1..75: mol_type = other DNA
ataaattcagcgtgatggataaacaggccgggtactacatgggcaaattgtcagtaatctttacgccttccttgc

SEQ ID NO: 17619 - DNA, 75 bp, synthetic construct
  source 1..75: mol_type = other DNA
gcccggaggtggtcagcgggcatacggacgttatctattccacctcagtctgccacattctggctgtacgaaaga

SEQ ID NO: 17620 - DNA, 75 bp, synthetic construct
  source 1..75: mol_type = other DNA
atcaaatggctttattcagatgatggaaaaaactggtatgaggaacaaaagaatttccagccagacactttgaaa

SEQ ID NO: 17621 - DNA, 75 bp, synthetic construct
  source 1..75: mol_type = other DNA
cctgatcgacatgaactacatcaccagtttcaccggtatgaccgataaatggttttacaagctgatcagtgaagg

SEQ ID NO: 17622 - DNA, 75 bp, synthetic construct
  source 1..75: mol_type = other DNA
gtgcgcattggtgcccccaccggcgtggcctgttcggtgtgccccggcggggtgacgtccggccatccggtcaat

SEQ ID NO: 17623 - DNA, 75 bp, synthetic construct
  source 1..75: mol_type = other DNA
ctggcaaccctaaaacaaaagagcaataccagctaacaaagcaatttaacatcaaatggctttattcagctgatg

SEQ ID NO: 17624 - DNA, 75 bp, synthetic construct
  source 1..75: mol_type = other DNA
gcattgtgaatgaactaaggcaggaatggccattgtcccgattgttaattgtttccgggctgccccggagtacat

SEQ ID NO: 17625 - DNA, 75 bp, synthetic construct
  source 1..75: mol_type = other DNA
atgtctttaaacgattctaaaatccgcaagttaaaaccctattcccgtccggtaaaactctccgactctcacggt

SEQ ID NO: 17626 - DNA, 75 bp, synthetic construct
  source 1..75: mol_type = other DNA
tgctgcccgaaatcctttaaaaagtggtactgttcagtacctgcattactatggtaacgagcgacctgacataga

SEQ ID NO: 17627 - DNA, 75 bp, synthetic construct
  source 1..75: mol_type = other DNA
atccactctctggtaaggatgtgctgactcttgatggttctgttaatctgcctgaaggggtgataacgaaaaagt

SEQ ID NO: 17628 - DNA, 75 bp, synthetic construct
  source 1..75: mol_type = other DNA
atcacaggtggtgtttccattgtggacggtaaactcaccggttcaaaagccttcctgaaagcattgtcttcccag

SEQ ID NO: 17629 - DNA, 75 bp, synthetic construct
  source 1..75: mol_type = other DNA
ctatttatgatatgtttgagagactggaaaaaaaggaattctttttgttgatacaacagaaacaaatgttttata

SEQ ID NO: 17630 - DNA, 75 bp, synthetic construct
  source 1..75: mol_type = other DNA
taagtcaggaggctgaacgcctgttacagctttctcgccaacagttgcagttactggaaaaaatgcctctctctg

SEQ ID NO: 17631 - DNA, 75 bp, synthetic construct
  source 1..75: mol_type = other DNA
tttacggtacgaaagccaaagtagcgaaagctgctggcgttgacccatctgctgtttctcaatggcaagagctgg

SEQ ID NO: 17632 - DNA, 75 bp, synthetic construct
  source 1..75: mol_type = other DNA
agcgtggtggacgacaaacgccgtatttacggcgtggaaggtgcggtggactacctgattcctgatactgactgg

SEQ ID NO: 17633 - DNA, 75 bp, synthetic construct
  source 1..75: mol_type = other DNA
gaaagaggattacactcaagctgactcatggccagatgatgctgttgaagttgatgagcaagtgtatattgagtt

SEQ ID NO: 17634 - DNA, 75 bp, synthetic construct
  source 1..75: mol_type = other DNA
gggagggcgatttagtctcaggtacaaaaaactctcatatagccacacttgtagaccgaaaatcacgttatacga

SEQ ID NO: 17635 - DNA, 75 bp, synthetic construct
  source 1..75: mol_type = other DNA
ttccgccatcagcgggagcagcacaccatacgtcagtaaggggctgaattctgaccgcattcccggcactgagcg

SEQ ID NO: 17636 - DNA, 75 bp, synthetic construct
  source 1..75: mol_type = other DNA
tcgatatttccgattcagaattaactcaacgcgtgattagccacgttgaggcagaggcaaagattgatgatgcag

SEQ ID NO: 17637 - DNA, 75 bp, synthetic construct
  source 1..75: mol_type = other DNA
acggcagaaatccagtgggcattaaaacacgatccttattgctgcgctgataatatggaccgcaaacctattgaa

SEQ ID NO: 17638 - DNA, 75 bp, synthetic construct
  source 1..75: mol_type = other DNA
gaaggagcgcatcctgaaagcggtttcgatgaagatttccaaatagaacagcaggccaatgctgaattcatcgcc

SEQ ID NO: 17639 - DNA, 75 bp, synthetic construct
  source 1..75: mol_type = other DNA
gtgaaaactgaaatcgcaaaagcctccaacgttgcagctaaagctggtgagaacgtaggcgggtggattgatgat

SEQ ID NO: 17640 - DNA, 75 bp, synthetic construct
  source 1..75: mol_type = other DNA
acaggcagatgcacaggaactgaaaaatgcccgcgacagtgggcaggtcattgatacagggttttgcctttttgc

SEQ ID NO: 17641 - DNA, 75 bp, synthetic construct
  source 1..75: mol_type = other DNA
atagaaggtccaccaataccggatgcacgcgctacccggcttgaaatactctgcagcctgaaggggaatgtgtga

SEQ ID NO: 17642 - DNA, 75 bp, synthetic construct
  source 1..75: mol_type = other DNA
gcagaaaatgtggcgtaccgggaaacgcctttatggtaacgccagcgacctggtcaccatgatcaaaacgctttc

SEQ ID NO: 17643 - DNA, 75 bp, synthetic construct
  source 1..75: mol_type = other DNA
ctggaaaggcgctgaccggactgacgctatatttatttctcgccgcgggagtcggctttctcgccagcaggccta

SEQ ID NO: 17644 - DNA, 75 bp, synthetic construct
  source 1..75: mol_type = other DNA
gggctactggagctgtcattacagattggcgaccggaagatcctgcgttctggcaacaacgcggtcaacgtattg

SEQ ID NO: 17645 - DNA, 75 bp, synthetic construct
  source 1..75: mol_type = other DNA
acggcaataaccgcgccattcgtctgccccgcgatctggattttgagggagtgagcgagctggagatcgtccggg

SEQ ID NO: 17646 - DNA, 75 bp, synthetic construct
  source 1..75: mol_type = other DNA
taaccgtgcgcttcatgagttacggaaaaacggaacccttcctgttgatgaagcctgggtcgatgattttatcag

SEQ ID NO: 17647 - DNA, 75 bp, synthetic construct
  source 1..75: mol_type = other DNA
ggcgggttactggctgtgggtcggtattgatggctttgtactgctcgcccaggatgctaacggtccttccaatcc

SEQ ID NO: 17648 - DNA, 75 bp, synthetic construct
  source 1..75: mol_type = other DNA
ccggagctgaaaccgcactgggcgtggaagtgacgaaggcaaagccggtgacgcgcaccattacgtccgcgaaca

SEQ ID NO: 17649 - DNA, 75 bp, synthetic construct
  source 1..75: mol_type = other DNA
ggtggtttatctgacggcgggcattgactcgcagcgaaaccgttttgagatgtatgtctggggatgggctccggg

SEQ ID NO: 17650 - DNA, 75 bp, synthetic construct
  source 1..75: mol_type = other DNA
tggaaaacgctgccgttccagatcgccatcatgaacagcatggggaatgatcagatccggactgttaatctgatt

SEQ ID NO: 17651 - DNA, 75 bp, synthetic construct
  source 1..75: mol_type = other DNA
tgcgggccaaggcagaaaaagcaacgtgtggtgagtggtcgctcgaatatggagagagccgatttgatggtgatg

SEQ ID NO: 17652 - DNA, 75 bp, synthetic construct
  source 1..75: mol_type = other DNA
gtggctcaggaagtagcggaggtgcagggttaagcggggatgatattatagttgataattacagaagtatatacg

SEQ ID NO: 17653 - DNA, 75 bp, synthetic construct
  source 1..75: mol_type = other DNA
atctgtctatggcaagccggtgatcaccatgccaaaaacccgcaatcagcggggcgtgtatctgtgtgaagtggg

SEQ ID NO: 17654 - DNA, 75 bp, synthetic construct
  source 1..75: mol_type = other DNA
taatggaaattattccgctggaagaccagttgctgattgaagcttatataaatccacgggatgttgcctatgtca

SEQ ID NO: 17655 - DNA, 75 bp, synthetic construct
  source 1..75: mol_type = other DNA
cagtggaaaaagctgagcttcctgaaagacgcgatgcgttcacggtggatgtggaatatgcggcagctgcttctg

SEQ ID NO: 17656 - DNA, 75 bp, synthetic construct
  source 1..75: mol_type = other DNA
atgaaactgacgcctgttattgctgcgctgcgtgcccgctgcccgtattttgaaaaccgggtggcaggcgcggca

SEQ ID NO: 17657 - DNA, 75 bp, synthetic construct
  source 1..75: mol_type = other DNA
agtacgcgcctgtttgcgcggtcgctccatccgccggcgtattaatcatcccgatcgcttgaattacccaatgaa

SEQ ID NO: 17658 - DNA, 75 bp, synthetic construct
  source 1..75: mol_type = other DNA
cgcaagaaacgcgccaacacatcctcgatgtggctctacgtcttttctcacagcagggggtatcatccacctcgc

SEQ ID NO: 17659 - DNA, 75 bp, synthetic construct
  source 1..75: mol_type = other DNA
agcaactggtcgcggaagagcttgtggagaagtgggaaaaaggaaagatgcgtctgctgtgggataacaaaaagc

SEQ ID NO: 17660 - DNA, 75 bp, synthetic construct
  source 1..75: mol_type = other DNA
tatctttgacaacgatgaagataaaacggattcggcagcactgttgccctgtattgaacaggccagggaggatat

SEQ ID NO: 17661 - DNA, 75 bp, synthetic construct
  source 1..75: mol_type = other DNA
aagccgacagcgttaacgtacaggcactgaatatggggcgaattgtcgttgacattgatggtgttaatctcgctg

SEQ ID NO: 17662 - DNA, 75 bp, synthetic construct
  source 1..75: mol_type = other DNA
agctatgcacctgagccaccattacccgagccggtgacgcgaccgactgagctgtatatcaatggcgaactggtg

SEQ ID NO: 17663 - DNA, 75 bp, synthetic construct
  source 1..75: mol_type = other DNA
accgcaaagcgattgttagtaaaggtataccacccgctctattaaataggctcaccaattcggatgttcaggtga

SEQ ID NO: 17664 - DNA, 75 bp, synthetic construct
  source 1..75: mol_type = other DNA
cgtattgaccgctttatggcggcctggaaacgcgccggattcagcgtggcagggcacctcgtgttcaccaaaaac

SEQ ID NO: 17665 - DNA, 75 bp, synthetic construct
  source 1..75: mol_type = other DNA
agggcacctcgtgttcaccaaaaactacacatccaaatctgcgtatgtcgcgtaccgtcacgaatgcgcttacat

SEQ ID NO: 17666 - DNA, 75 bp, synthetic construct
  source 1..75: mol_type = other DNA
atgtcccgttttgtcctcggtaactgcatcgatgttatggcccgtattcctgataacgccattgatttcatactg

SEQ ID NO: 17667 - DNA, 75 bp, synthetic construct
  source 1..75: mol_type = other DNA
tataccaccaagcgcaccggcggcatgctggtcgattcgcaggccatcaaactgctgaagattgcagcggcgtaa

SEQ ID NO: 17668 - DNA, 75 bp, synthetic construct
  source 1..75: mol_type = other DNA
gtgtccgtgcaacgctggcagcttgatctggctgtactggcaaaatcccgggaagaagagacgacccggccaacc

SEQ ID NO: 17669 - DNA, 75 bp, synthetic construct
  source 1..75: mol_type = other DNA
caaagcgagtaacatttgatgcttccagagttgttccaactgcaaacgaaaaccgtcctcgaaacattgccttta

SEQ ID NO: 17670 - DNA, 75 bp, synthetic construct
  source 1..75: mol_type = other DNA
atggcgaaaaatgactttaaagcgtttgcaactgatcgaaatgccaatgttatgtcgcaggaggaatgggaagcg

SEQ ID NO: 17671 - DNA, 75 bp, synthetic construct
  source 1..75: mol_type = other DNA
agcaagaccgacgtaagtttcgacaagcgccaggccgtcgtcaccttcgacgatgccaagaccaacgtccagaag

SEQ ID NO: 17672 - DNA, 75 bp, synthetic construct
  source 1..75: mol_type = other DNA
acagggactacaatccgctgattggtcgtaccggtgtggatgtgggtaaatccttctcaggtaaggactggaaag

SEQ ID NO: 17673 - DNA, 75 bp, synthetic construct
  source 1..75: mol_type = other DNA
gggtgacctgcgtgacatcaatggtgaagctggcgcatgggcacgtatcatgagcggaaccggctctgccggtgg

SEQ ID NO: 17674 - DNA, 75 bp, synthetic construct
  source 1..75: mol_type = other DNA
ttacgaacaaaggctatatcccgattgttcatttttttgttgtgatgaccggcaatgcagatttcagcgcgctgc

SEQ ID NO: 17675 - DNA, 75 bp, synthetic construct
  source 1..75: mol_type = other DNA
ccgggccttccggctcatatgagtattttgcacgcagcgcaagcggaaaagtggcagatgccagagcaaccagcc

SEQ ID NO: 17676 - DNA, 75 bp, synthetic construct
  source 1..75: mol_type = other DNA
tcaaagtttctgaagggatggaatttgtgcaatcaggtactaacgtgccctatatgaaaattagcgcaattgatt

SEQ ID NO: 17677 - DNA, 75 bp, synthetic construct
  source 1..75: mol_type = other DNA
tgattctcccgtgctggtggaacttgcggtgggggctgcaactggtgaaatccccgtatcttcagtagcggaaaa

SEQ ID NO: 17678 - DNA, 75 bp, synthetic construct
  source 1..75: mol_type = other DNA
gagcgttctggctcgttttgctgatcatcgcaggttggggcggtctggtccgctacctgatagatgtgaagcaga

SEQ ID NO: 17679 - DNA, 75 bp, synthetic construct
  source 1..75: mol_type = other DNA
tgtcgctaccgcaggaaacgaaagaggaaaaggaatttcgccattgtatatggcttgcagagaaagaagaacgcg

SEQ ID NO: 17680 - DNA, 75 bp, synthetic construct
  source 1..75: mol_type = other DNA
acaatatcaccctgaaaatcgaccctgctgtagtgctggcaacccgtaaatacgtggatgatgaagtcctggaat

SEQ ID NO: 17681 - DNA, 75 bp, synthetic construct
  source 1..75: mol_type = other DNA
cctgatttacgcggtgaatttattcgtggctgggatgacggtcgcgggattgatactggtcgcgctttgcttaat

SEQ ID NO: 17682 - DNA, 75 bp, synthetic construct
  source 1..75: mol_type = other DNA
tgccagcgccgccgcgctcggtgtgccgctaaaaattacccatatggcggtgggcgatggcggtggagtattgcc

SEQ ID NO: 17683 - DNA, 75 bp, synthetic construct
  source 1..75: mol_type = other DNA
gctaggcttccgcttcgcgccgcgcatccgcgacctcggcgaaaccaagctgtacgtgccgcagggcgtgcaagc

SEQ ID NO: 17684 - DNA, 75 bp, synthetic construct
  source 1..75: mol_type = other DNA
atccgtttgccaacatctctaacatcaatgagtccggggaacgtatccgtgaccagctggctgtgctggcaagcc

SEQ ID NO: 17685 - DNA, 75 bp, synthetic construct
  source 1..75: mol_type = other DNA
aatgggaaattaacaccgccatcgcaccagcatagtgaggcgctcattgaatttgccattgattacctgaagaac

SEQ ID NO: 17686 - DNA, 75 bp, synthetic construct
  source 1..75: mol_type = other DNA
gtgaaaaaaaacgccgtgatgagcagttcgcggcgttttacgattattgccggaaagtgatgagcagaaatctcg

SEQ ID NO: 17687 - DNA, 75 bp, synthetic construct
  source 1..75: mol_type = other DNA
gctcaggcactgattggcaaagatgccaaagatcaggctggcattgacaagatcatgatcgacctggacggcacc

SEQ ID NO: 17688 - DNA, 75 bp, synthetic construct
  source 1..75: mol_type = other DNA
cctgatttacgtggtgagtttattcgtggctgggatgacgggcgcggtattgatgcaggacgtgttttattgagc

SEQ ID NO: 17689 - DNA, 75 bp, synthetic construct
  source 1..75: mol_type = other DNA
tggcaaccctgacagaagtcgggcgggatattcttgcgaaatcgaccgttgccgctgttatcgaatacctcggtt

SEQ ID NO: 17690 - DNA, 75 bp, synthetic construct
  source 1..75: mol_type = other DNA
ccagacgggttaacggcagcaaagaaccttgcagaggcgttcgagcattataacgaatggcatccgcatagtgcg

SEQ ID NO: 17691 - DNA, 75 bp, synthetic construct
  source 1..75: mol_type = other DNA
gccacgacaccaaggcggtagctactgagttgctgagcgtggcgcaaagcctgcgtggatttgcttacctgtcag

SEQ ID NO: 17692 - DNA, 75 bp, synthetic construct
  source 1..75: mol_type = other DNA
acggcgagatgttctgggtggaccgtgtttctccggatgacggagggagttgttatctctggctcaaccgggggc

SEQ ID NO: 17693 - DNA, 75 bp, synthetic construct
  source 1..75: mol_type = other DNA
actgaaaaaacatcttcctgctggtccgcgactagttgaacctttcgcgggttcctgtgctgtgatgatggagac

SEQ ID NO: 17694 - DNA, 75 bp, synthetic construct
  source 1..75: mol_type = other DNA
atgacccgaagtggtggtgattttcagccccgaccgctgaaacgcctgttcacagccaaccagtgctggacgtcc

SEQ ID NO: 17695 - DNA, 75 bp, synthetic construct
  source 1..75: mol_type = other DNA
aaaaagggcgtcagatagcctgtgccctgctggaagatttaatggaatccggccccctgaaggccgcgccgtcgc

SEQ ID NO: 17696 - DNA, 75 bp, synthetic construct
  source 1..75: mol_type = other DNA
gcaactggggtgactcctcatgaattgcgaccagatttatatccgaatccaaccgacgggttgcctgctggagat

SEQ ID NO: 17697 - DNA, 75 bp, synthetic construct
  source 1..75: mol_type = other DNA
aattcaaaatcagaaaaattagacggaatattgagtatagtttcagaggttctgacagatattttgatttgttta

SEQ ID NO: 17698 - DNA, 75 bp, synthetic construct
  source 1..75: mol_type = other DNA
acgtcgcgcaattgttgctgtggaaccgtttatggctgctttttatcgggttatggaggaagcagaaccgcgagg

SEQ ID NO: 17699 - DNA, 75 bp, synthetic construct
  source 1..75: mol_type = other DNA
atgacaacgtttgggacaatccaatcgcctggcagcaaatttatgcacctcaaaaagaaaaacgcaggagtgcgg

SEQ ID NO: 17700 - DNA, 75 bp, synthetic construct
  source 1..75: mol_type = other DNA
ccctgctccattacgtcccggatctgcgccgcaagatgctgctggccacactgtggaacaccggtgcgcgcatta

SEQ ID NO: 17701 - DNA, 75 bp, synthetic construct
  source 1..75: mol_type = other DNA
aaaccgcgcattctcggcgtgccaggtcacgataacaaagccgttgcgactgagttgctgagtgtggcgcaaagc

SEQ ID NO: 17702 - DNA, 75 bp, synthetic construct
  source 1..75: mol_type = other DNA
ccgccgaatgtgacggcgaggtggttcgtcccaaagaaccgaactggacagcctgggcaaacgaaattcgcctga

SEQ ID NO: 17703 - DNA, 75 bp, synthetic construct
  source 1..75: mol_type = other DNA
ctttttgcctaaaagaaagtcagagaggcgtccatgtctgcaccggctgcatggcgacggttctgtatggaacct

SEQ ID NO: 17704 - DNA, 75 bp, synthetic construct
  source 1..75: mol_type = other DNA
ctgggttatcgctcgccacgggaatatctacggcagcgggccagtaatgggttaagtgataacaggtgtctggaa

SEQ ID NO: 17705 - DNA, 75 bp, synthetic construct
  source 1..75: mol_type = other DNA
caacatatactgatacctcctggaataaatctggtgaggtgagcgatatttctgcgttgcattactcgggatatg

SEQ ID NO: 17706 - DNA, 75 bp, synthetic construct
  source 1..75: mol_type = other DNA
agtatgaacataaaatcggtgacctgatttcccggtttaaagaggctggtggggtggtaaatgaagttgagctat

SEQ ID NO: 17707 - DNA, 75 bp, synthetic construct
  source 1..75: mol_type = other DNA
ctgatcgccaacacagatattgtagatgcaaaagacaataatttcgtaagtatcaccgcagacagcatcagcagc

SEQ ID NO: 17708 - DNA, 75 bp, synthetic construct
  source 1..75: mol_type = other DNA
atcggcgcagtgactgctgaaggtaaaaaaacaggtatgaaagccctgttatctgcacaggctcagctcggcgtt

SEQ ID NO: 17709 - DNA, 75 bp, synthetic construct
  source 1..75: mol_type = other DNA
tcctggctactgcaatcacgatccggaaacgtctgtgctggcgcattaccgactggcgggaacgtgcggaacagc

SEQ ID NO: 17710 - DNA, 75 bp, synthetic construct
  source 1..75: mol_type = other DNA
aaccagacgttcgctcctacagcaccaaatcaggtctgggtggcggacctgacgtatgttgccacacaggaggga

SEQ ID NO: 17711 - DNA, 75 bp, synthetic construct
  source 1..75: mol_type = other DNA
tggcttgaaaagccaacagagcaacgtcatctctcagatctgcttccgttatggtgggaattgggtggacgcaat

SEQ ID NO: 17712 - DNA, 75 bp, synthetic construct
  source 1..75: mol_type = other DNA
cggtactggcccggttacgcgagaagctgccgcaactgcaggtggagtacttcccggagaaaccggctgaatatc

SEQ ID NO: 17713 - DNA, 75 bp, synthetic construct
  source 1..75: mol_type = other DNA
atattgagtcctcatcttatatcaaaaataatgatggcagtgaaataatgaattttgttatgaataatcctgaag

SEQ ID NO: 17714 - DNA, 75 bp, synthetic construct
  source 1..75: mol_type = other DNA
aatgcccgtctgtccgcgccgggaaaagaccgcgcgccggtggcgctgaaaggggccgcgctcacgcgccgcccc

SEQ ID NO: 17715 - DNA, 75 bp, synthetic construct
  source 1..75: mol_type = other DNA
tactgtacgttataccgccagtaatgctgctcgttttgccggattatgggaaagaaataatctcataaacgaaaa

SEQ ID NO: 17716 - DNA, 75 bp, synthetic construct
  source 1..75: mol_type = other DNA
tgtacaaattttgcgtttagcggaaaacctggtaccggaaaaaaccatctggcggcggctatcgggaatcgcctg

SEQ ID NO: 17717 - DNA, 75 bp, synthetic construct
  source 1..75: mol_type = other DNA
tacacgtaaatcaaccgccaaatcaacgaccaaaaccgcatcggttacaccgtcatcagcggtaccgaaatcatc

SEQ ID NO: 17718 - DNA, 75 bp, synthetic construct
  source 1..75: mol_type = other DNA
tcctggggtactccatgcgtggtctttggcaactgatcattgcataagcaaatctgctttcacttttacggtgtt

SEQ ID NO: 17719 - DNA, 75 bp, synthetic construct
  source 1..75: mol_type = other DNA
tggcggtaagcacacaaaaactccacgcgcgtggcccaatggggctggaagcactgaccacttacaagtggatcg

SEQ ID NO: 17720 - DNA, 75 bp, synthetic construct
  source 1..75: mol_type = other DNA
ctggagatcgggcgtcacgccctgcgtcatggctgggtgatgccgttaggtaaccgcaacgtgcagaccgtgctg

SEQ ID NO: 17721 - DNA, 75 bp, synthetic construct
  source 1..75: mol_type = other DNA
ggctaaaggtggcagaatttattttgtacaaaccaatggttatggcttttggtatagagaaaaaagttattgctt

SEQ ID NO: 17722 - DNA, 75 bp, synthetic construct
  source 1..75: mol_type = other DNA
gagtccggcctgtattacaaccgccaccgctattatgacccgctgcaggggcgatatatcactcaggatccgatt

SEQ ID NO: 17723 - DNA, 75 bp, synthetic construct
  source 1..75: mol_type = other DNA
gccgccggtgaattcagcggcgaaatcaccggcgtgacggatggtgccgggcgtcacttccggctggtactgacc

SEQ ID NO: 17724 - DNA, 75 bp, synthetic construct
  source 1..75: mol_type = other DNA
ctctgcagtgggtttctgaactgacagatgaactcatggcaaaaatcagaacccacgaatacaaccgctcaatgg

SEQ ID NO: 17725 - DNA, 75 bp, synthetic construct
  source 1..75: mol_type = other DNA
acgcagaaggaattccccgtcgggctacggtcatggttaatgcgggaatacggcgacgatacagcgcagctaaaa

SEQ ID NO: 17726 - DNA, 75 bp, synthetic construct
  source 1..75: mol_type = other DNA
actggtatcccacagccagtatcagtgatttgctggttgtggtgatgaagaaatccacagcaggtatcacgatta

SEQ ID NO: 17727 - DNA, 75 bp, synthetic construct
  source 1..75: mol_type = other DNA
tcttcagttccgcaattttttgattattcgtctgttgttaaattatggtttacgaacaggtgagctattgttgtt

SEQ ID NO: 17728 - DNA, 75 bp, synthetic construct
  source 1..75: mol_type = other DNA
ctattatgacccgctgcaggggcgatatatcactcaggatccgattggactgaaggggggatggaacctgtatgg

SEQ ID NO: 17729 - DNA, 75 bp, synthetic construct
  source 1..75: mol_type = other DNA
gcagagtatcctggtgaacaaaaccccgctgacggacacggacggtaatcccgtgatacacggtgtgaccgcggt

SEQ ID NO: 17730 - DNA, 75 bp, synthetic construct
  source 1..75: mol_type = other DNA
atgaactatgccggacacgaaaaacttcgcgccgaagtggcggaggtggccaatgccatgtgcgacctgcgtaca

SEQ ID NO: 17731 - DNA, 75 bp, synthetic construct
  source 1..75: mol_type = other DNA
tgcagataaaaagcgcactgccctggtggctggtctgccggggtgacattcacaaattccgctgtgtgccacatc

SEQ ID NO: 17732 - DNA, 75 bp, synthetic construct
  source 1..75: mol_type = other DNA
atgccatgtatatgctgaaggtgcagaaaacaaaaaacggtattccctatgtggccgggattggtgcggggattg

SEQ ID NO: 17733 - DNA, 75 bp, synthetic construct
  source 1..75: mol_type = other DNA
acataaagaaattacgtaaaaaaattggccttacccagacagagtgcggtgagatttttggcgtaggcttaagta

SEQ ID NO: 17734 - DNA, 75 bp, synthetic construct
  source 1..75: mol_type = other DNA
tggcgcatgcccggcggtgtgcgcctgcggagtcgtgcggcttcgtgataagcacgccggagggggagcggtata

SEQ ID NO: 17735 - DNA, 75 bp, synthetic construct
  source 1..75: mol_type = other DNA
ctgaaccagtcactctcttcgctcttttccctcgatctctccctggtcagccagcagtttctctcccttgaattt

SEQ ID NO: 17736 - DNA, 75 bp, synthetic construct
  source 1..75: mol_type = other DNA
tcagcacgtttgagcaactgcatctgaacaagggcgaggtgtttgagcgcggagtgataaatgtgttcaaaggtt

SEQ ID NO: 17737 - DNA, 75 bp, synthetic construct
  source 1..75: mol_type = other DNA
ccggtcactggagtacgataattttccggaaatcagtgaagcgaacattctgagcacatttgaacaactgcacca

SEQ ID NO: 17738 - DNA, 75 bp, synthetic construct
  source 1..75: mol_type = other DNA
tgagccgggattacaaaaccaggtcgccctgcaaatttagtaataaaattatcatcaacaacctggtgagatggg

SEQ ID NO: 17739 - DNA, 75 bp, synthetic construct
  source 1..75: mol_type = other DNA
actcagggggcaatacatcgtacagacgatcgtactcagtcaaatattggttttggctggcgtcatttttcagga

SEQ ID NO: 17740 - DNA, 75 bp, synthetic construct
  source 1..75: mol_type = other DNA
tatgtttgttgatatgggagttctttctgtagaggctcgggacgggcaaacatcactctataaagcattaccatt

SEQ ID NO: 17741 - DNA, 75 bp, synthetic construct
  source 1..75: mol_type = other DNA
tggcaagatttaagtaaatttctgggtgacaaatcaaagtctcatgcattagtgtggaaaaattttggtcaggag

SEQ ID NO: 17742 - DNA, 75 bp, synthetic construct
  source 1..75: mol_type = other DNA
gtggctgaactggaatctgaaattctgcaactgcgtaaggcgttaaatgaagctcgccttgagcgagatatatta

SEQ ID NO: 17743 - DNA, 75 bp, synthetic construct
  source 1..75: mol_type = other DNA
atccgaaggcagacctgagcaaagggcagtacggctgtgtcggccagggcttacatattgccaaaaaactgcttc

SEQ ID NO: 17744 - DNA, 75 bp, synthetic construct
  source 1..75: mol_type = other DNA
cggccacgatcacgccagtggtggcagttattcaggatggtgtctcagtggcatgttgatgtggttatcgttgag

SEQ ID NO: 17745 - DNA, 75 bp, synthetic construct
  source 1..75: mol_type = other DNA
ggcttaccagcggaaaaaaagatgtgccaatcagcgtgtgcatgcaaccagcctgcgttatttctggtgccggga

SEQ ID NO: 17746 - DNA, 75 bp, synthetic construct
  source 1..75: mol_type = other DNA
gaagatctccctctcgccacgatcatgtggcaactgacaaccaaagaactctgcggtcagggcctgctgtgcgtg

SEQ ID NO: 17747 - DNA, 75 bp, synthetic construct
  source 1..75: mol_type = other DNA
cctgctggtaccatgctgtcgtggtggttcggcatttacccagggcgcggaggggacattcagcgagtccacggg

SEQ ID NO: 17748 - DNA, 75 bp, synthetic construct
  source 1..75: mol_type = other DNA
aatacatgcactgtcggcctatctgacaccgtcatgccgggagatcctggagacggatgcccgtcgtcgtaagga

SEQ ID NO: 17749 - DNA, 75 bp, synthetic construct
  source 1..75: mol_type = other DNA
gtaggtgaatatgctcttaatattcttggtcaaaatgtttcaagagtcacaacagggaaaaaaccttatgatata

SEQ ID NO: 17750 - DNA, 75 bp, synthetic construct
  source 1..75: mol_type = other DNA
taccgtcagggtttatgacgatcagccgtttgaccggcagattgttattccggcggtggcattcagcggcgctaa

SEQ ID NO: 17751 - DNA, 75 bp, synthetic construct
  source 1..75: mol_type = other DNA
cgccaaaggtggaatgtacgcagttgctgaagacaaagacattcgagctgaccagcggcggaacaatgaaaggca

SEQ ID NO: 17752 - DNA, 75 bp, synthetic construct
  source 1..75: mol_type = other DNA
aagacggggaaacgatgattgttagtgatgaaaacctcattaaggttgccgcactgttgggagttactcccgaaa

SEQ ID NO: 17753 - DNA, 75 bp, synthetic construct
  source 1..75: mol_type = other DNA
aagccgtgttgtccctggtgaaagacggcgcaactgatggtgttcagatcgacccgacgctgttttcacagtacg

SEQ ID NO: 17754 - DNA, 75 bp, synthetic construct
  source 1..75: mol_type = other DNA
cgcaatctcagttaatcgtcactctaccgatgtaattgtcacctggaatgcccgtaaggctgatgatgtccatat

SEQ ID NO: 17755 - DNA, 75 bp, synthetic construct
  source 1..75: mol_type = other DNA
tgacggcggacagtaccacggaccagctgcagaacagaacgctgtggtcgtcatacaccgaaatcatcgatgtga

SEQ ID NO: 17756 - DNA, 75 bp, synthetic construct
  source 1..75: mol_type = other DNA
tttctgcagacgattaatattctgccggtcgcagaaatgaagggtgagaaaatcggcgtcggtgtgaccggtact

SEQ ID NO: 17757 - DNA, 75 bp, synthetic construct
  source 1..75: mol_type = other DNA
gggaatccgcccaccttgccgggtgccggtgccgtgtggaaatccgcccaccttgccgggcgccggtgccgtgtg

SEQ ID NO: 17758 - DNA, 75 bp, synthetic construct
  source 1..75: mol_type = other DNA
ggatattgtgcagggttcagcaggggtgctgataggcgcgccgacgggggttgcctgctcggtgtgtcctaaaaa

SEQ ID NO: 17759 - DNA, 75 bp, synthetic construct
  source 1..75: mol_type = other DNA
atgaccgggaaaatgcccgtctggggctggcagcggccacgctgcagtcggatatggaaaaagccggtgaactgg

SEQ ID NO: 17760 - DNA, 75 bp, synthetic construct
  source 1..75: mol_type = other DNA
ttaattaccggtggtctgacagagttggctttcgccggattaacccctgcaggtggtgttcagccgcccaacccg

SEQ ID NO: 17761 - DNA, 75 bp, synthetic construct
  source 1..75: mol_type = other DNA
accatcatcaatgtcaccacgccaccaaaatggaaggtgaaaaagcagaagctggccgagaaagcagcccgggaa

SEQ ID NO: 17762 - DNA, 75 bp, synthetic construct
  source 1..75: mol_type = other DNA
ttgataacttcgttgctggaaaaaccaccatcttccgaagatgaggatatggatcctcacgctcgtaaggcatgg

SEQ ID NO: 17763 - DNA, 75 bp, synthetic construct
  source 1..75: mol_type = other DNA
aaactcggcgataagatttgggaatctgacgatattaaaattcccgtctattgtgacaacaataccaacggcaat

SEQ ID NO: 17764 - DNA, 75 bp, synthetic construct
  source 1..75: mol_type = other DNA
agtgaattcatggtccgtgcgagtgacaaaaatgacactgaaaatgtcaaaaaagcgctgatgataataaatcct

SEQ ID NO: 17765 - DNA, 75 bp, synthetic construct
  source 1..75: mol_type = other DNA
gcttgtccgggcaatgcatctgagcattctggtacaggaaaatccgctcgccaacaccaccggccatcagggcta

SEQ ID NO: 17766 - DNA, 75 bp, synthetic construct
  source 1..75: mol_type = other DNA
cgggcagaccgcgtgagcagtgaaagccgggcgtggcttgcgcagtgcgggctgacggtggagcaactggccaga

SEQ ID NO: 17767 - DNA, 75 bp, synthetic construct
  source 1..75: mol_type = other DNA
gtggcttgcgcagtgcgggctgacggtggagcggctggcggcacagatagagccggtttatttgcctgagcgaaa

SEQ ID NO: 17768 - DNA, 75 bp, synthetic construct
  source 1..75: mol_type = other DNA
aggtgaagaaggggtatgtggagcaagcgaaggataattctttgcaaccttcccaaacggtaacgggctctctca

SEQ ID NO: 17769 - DNA, 75 bp, synthetic construct
  source 1..75: mol_type = other DNA
gatgacgtacagtcatcatgcctgtcgcacggagtgttatgccatgacggttcattattaccgtctgcgggacta

SEQ ID NO: 17770 - DNA, 75 bp, synthetic construct
  source 1..75: mol_type = other DNA
gaagaggaactgaaacgggaagggcataccgtcttaaacccggcagtacttccggacgggctgacacagccgcac

SEQ ID NO: 17771 - DNA, 75 bp, synthetic construct
  source 1..75: mol_type = other DNA
tgaaatttgtggtgcccgctgttgttctggtggggcttgcagtcacgatgaaaagctgcaaaacgcaggaaaatg

SEQ ID NO: 17772 - DNA, 75 bp, synthetic construct
  source 1..75: mol_type = other DNA
atgaaaatcatcacccgtggtgaagccatgcgtattcaccgtcagcatcctgcatcccgtctttttccgttctgt

SEQ ID NO: 17773 - DNA, 75 bp, synthetic construct
  source 1..75: mol_type = other DNA
cgattgacaatctgagccgggttcgtaaaaacgccattccggctgcttctgcaatgaccattaaccgcgtggcca

SEQ ID NO: 17774 - DNA, 75 bp, synthetic construct
  source 1..75: mol_type = other DNA
tccgcgagcaactcattgtggctaccgctgatttgagcggagcaacgaaaggccagcttgaagcctggctggagc

SEQ ID NO: 17775 - DNA, 75 bp, synthetic construct
  source 1..75: mol_type = other DNA
gctgtaagtctgtatgaccgcatcaacgacgcggcgctactggccagtctcataaatttgtcgctgaacccttca

SEQ ID NO: 17776 - DNA, 75 bp, synthetic construct
  source 1..75: mol_type = other DNA
aaatatgcagaccatctgccgttataccgccagtcagaaatataccgtcgtcagggagtggagctgagccgtgcc

SEQ ID NO: 17777 - DNA, 75 bp, synthetic construct
  source 1..75: mol_type = other DNA
gggcgatgacagcgcttctgggacgggttccggtgaacggaaccgtgacggatccctatccgttcaagatcctgg

SEQ ID NO: 17778 - DNA, 75 bp, synthetic construct
  source 1..75: mol_type = other DNA
aaatattcgatcaagtgcgtaaagatttaaactgtgaattattttattctgagctaaaacgtcacaatatctcac

SEQ ID NO: 17779 - DNA, 75 bp, synthetic construct
  source 1..75: mol_type = other DNA
cccggcggtctggttcgcgtacagtccggaccggaaaggtatccatccacaaaatcacctggccggttacagcgg

SEQ ID NO: 17780 - DNA, 75 bp, synthetic construct
  source 1..75: mol_type = other DNA
gtggataacctacaaaggaaagctaccaggaagaattactggttctctgaagactcctccggaatcacaacctta

SEQ ID NO: 17781 - DNA, 75 bp, synthetic construct
  source 1..75: mol_type = other DNA
atagcttatgaccagaaggggattattcgttgtattgagaaagacgtatcaatgcttaaccctgacgggttaagt

SEQ ID NO: 17782 - DNA, 75 bp, synthetic construct
  source 1..75: mol_type = other DNA
tgaagtatgtggtgccctgtgtggtggtggcggggatcctgacgggattaaaaagctgtggaggagataccgggg

SEQ ID NO: 17783 - DNA, 75 bp, synthetic construct
  source 1..75: mol_type = other DNA
tttactgacaggttgcgcaggcacgcagaacgcgccacggccagcgccgtcagtccggcttataccgcagacgct

SEQ ID NO: 17784 - DNA, 75 bp, synthetic construct
  source 1..75: mol_type = other DNA
aatgataaggtattcaaggcagggttaagacgtaagatgcgaaaagcagccatggacagaaactatctggcgtca

SEQ ID NO: 17785 - DNA, 75 bp, synthetic construct
  source 1..75: mol_type = other DNA
tccaggtgctgttaccgtgaaagaatattcgctatttttccagggtacttttttattctggctaattttgacatt

SEQ ID NO: 17786 - DNA, 75 bp, synthetic construct
  source 1..75: mol_type = other DNA
aaggcagcatttttcatctgatggaaccggacatcaaccaggagatctacggcctgcccggttatctttctgcca

SEQ ID NO: 17787 - DNA, 75 bp, synthetic construct
  source 1..75: mol_type = other DNA
cccttgttctgccgaccattggccttgtcggttgcgatcgcgttgagcctggtaatgtgggcatcaaagtaaaca

SEQ ID NO: 17788 - DNA, 75 bp, synthetic construct
  source 1..75: mol_type = other DNA
caaggcaataccaacgtcaacggcgaagacatgactgagattgaggagaatatgctactcccaatttctggccag

SEQ ID NO: 17789 - DNA, 75 bp, synthetic construct
  source 1..75: mol_type = other DNA
atgctgttggagaccccaaatctacatcctgacgataaggtgagatttagaaaaaatgggttgttatttctggct

SEQ ID NO: 17790 - DNA, 75 bp, synthetic construct
  source 1..75: mol_type = other DNA
gcagaagtggctaaagcaattggctgtagagtagaagatgttgataaagaatttatattaggactggtattacaa

SEQ ID NO: 17791 - DNA, 75 bp, synthetic construct
  source 1..75: mol_type = other DNA
ttggtaatacgtcgggcgtcattcccggcaaaaccattacggagcgacaggcagcagaagggctgatctccaacg

SEQ ID NO: 17792 - DNA, 75 bp, synthetic construct
  source 1..75: mol_type = other DNA
cagcttcacacctccgtggagggactgaaactgattgccgattacgaaggctgtcgtctgcagccgtatcagtgc

SEQ ID NO: 17793 - DNA, 75 bp, synthetic construct
  source 1..75: mol_type = other DNA
agtacgggccattaaaacagggaacagagtaacctcagggacgattcagtccgttattacggtcacatatactta

SEQ ID NO: 17794 - DNA, 75 bp, synthetic construct
  source 1..75: mol_type = other DNA
cgcaaattatttcaaaaatacagcaggtaactcacctgccaccggattggctattcagttagaggataaggattc

SEQ ID NO: 17795 - DNA, 75 bp, synthetic construct
  source 1..75: mol_type = other DNA
atgaaaattccctcattacagtccaacttcaacttttccgccccggcaggatactctgctcccattgctcctaat

SEQ ID NO: 17796 - DNA, 75 bp, synthetic construct
  source 1..75: mol_type = other DNA
agccgagatcagaaaaaaccattaagcaaaaaatagcatcagctcaaatgcgtctgaatcgccttaagagtaaag

SEQ ID NO: 17797 - DNA, 75 bp, synthetic construct
  source 1..75: mol_type = other DNA
gcagtatcactcggaagccttcgctgcaagaaggcagaagaagtcgagagtaaacagaaccgtatttactaccgc

SEQ ID NO: 17798 - DNA, 75 bp, synthetic construct
  source 1..75: mol_type = other DNA
ataaagcaattaacaatacaagagttaaaaatgttagtactgatgttaaacatggccaaattcaagagagaaaaa

SEQ ID NO: 17799 - DNA, 75 bp, synthetic construct
  source 1..75: mol_type = other DNA
agattacccgggaagtgaaagcgccccgtgaacggctgaagcatgcgctggaggcggggttgctggtgactgcac

SEQ ID NO: 17800 - DNA, 75 bp, synthetic construct
  source 1..75: mol_type = other DNA
gtcaattatctcaaacccaactcagtcagacatttgcagaaaaatttactgtgaccgaggaattactgcagtctt

SEQ ID NO: 17801 - DNA, 75 bp, synthetic construct
  source 1..75: mol_type = other DNA
ccgtattcggcgggtggttgcgaatgaaaacacatcatcgccataccaactgattgcccgggaagtgaaagcgcc

SEQ ID NO: 17802 - DNA, 75 bp, synthetic construct
  source 1..75: mol_type = other DNA
aaagacgggcttcagatcatcccattgtcagaagtcgcggcgaaggatgagtttttgaatatcaaaaatgtcagc

SEQ ID NO: 17803 - DNA, 75 bp, synthetic construct
  source 1..75: mol_type = other DNA
tcggtaacctcgcgcatacaaccgggcagtgatgtgattgtctgcgctgaaatggacgaacattggggctacgtc

SEQ ID NO: 17804 - DNA, 75 bp, synthetic construct
  source 1..75: mol_type = other DNA
gtgatttaatccaatatttagatacagtaaaagaactaaaaaattatattccgatagaagaataccgaaatgaat

SEQ ID NO: 17805 - DNA, 75 bp, synthetic construct
  source 1..75: mol_type = other DNA
gacatcatccggataaacgcagtgcccgtgcgcagcacgacgactggctgaagagagagatacagcgcgtatacg

SEQ ID NO: 17806 - DNA, 75 bp, synthetic construct
  source 1..75: mol_type = other DNA
aagctttccttgatatggtggcatggtcagaaggaacagataacggacggcagaaaaccagaaatcacggttatg

SEQ ID NO: 17807 - DNA, 75 bp, synthetic construct
  source 1..75: mol_type = other DNA
atgacacggatcgcagtcgagctttccttactgacttttgtgcgttccagtgagttacgtttcgcgcgttggaat

SEQ ID NO: 17808 - DNA, 75 bp, synthetic construct
  source 1..75: mol_type = other DNA
aaagctgagggcgtagtggagggcatgctgatggtgttggatctccgattggagatggatgctgattgttcgaaa

SEQ ID NO: 17809 - DNA, 75 bp, synthetic construct
  source 1..75: mol_type = other DNA
gcccgcgccctgttagcgctgggcgtgcagcatggcgaccgcgtggcggtggtgatggaaaaaggctggcagcag

SEQ ID NO: 17810 - DNA, 75 bp, synthetic construct
  source 1..75: mol_type = other DNA
cgttcccacatgcagcaatggcggcactgacggaacttcttgggcaaaaagaagagaacagttggcgcattatgc

SEQ ID NO: 17811 - DNA, 75 bp, synthetic construct
  source 1..75: mol_type = other DNA
atatagttgtaacacttgagccaaacccttgggccgctttttactttgatattaacattgctaatacagggaacg

SEQ ID NO: 17812 - DNA, 75 bp, synthetic construct
  source 1..75: mol_type = other DNA
tcgtggaagacattgtgaagttacagccatcggtcaccgaaacgaaagcagatgacctgattctaccatcgctgc

SEQ ID NO: 17813 - DNA, 75 bp, synthetic construct
  source 1..75: mol_type = other DNA
aagggtttcttcgcgggaaatgtgtaccacgagatctgaaagtgaatgaaacaaatgctgaatatctggtgcgta

SEQ ID NO: 17814 - DNA, 75 bp, synthetic construct
  source 1..75: mol_type = other DNA
ttcacctttggtgagccggtgccggtactcgaccgccgtgacattctggattacgtcgagtgcatcagtaacggc

SEQ ID NO: 17815 - DNA, 75 bp, synthetic construct
  source 1..75: mol_type = other DNA
cgggaaggaatcagggtagccagatgtacagtggcgcgcctcatggcggttatgggacttgccggtgttctccgg

SEQ ID NO: 17816 - DNA, 75 bp, synthetic construct
  source 1..75: mol_type = other DNA
gccatgaacacgctggaagacatcaacgaacgctttggcctcaatgcgcaggatagggtgttcgggctgtcatca

SEQ ID NO: 17817 - DNA, 75 bp, synthetic construct
  source 1..75: mol_type = other DNA
gactgctgtgaccgtgaggcactgcactgggcggtcactacgggcggcttcaacagtgaaacagtacaggacgtc

SEQ ID NO: 17818 - DNA, 75 bp, synthetic construct
  source 1..75: mol_type = other DNA
ttaacctcgacctcgatctgctgagaacatttgttgctgttgccgatctgaacacttttgctgccgcagctgccg

SEQ ID NO: 17819 - DNA, 75 bp, synthetic construct
  source 1..75: mol_type = other DNA
cgagtgccggaagagcgaagttatgcagcgtgttctgacgttttatcaggggaattatcgggaggtgatgctgtg

SEQ ID NO: 17820 - DNA, 75 bp, synthetic construct
  source 1..75: mol_type = other DNA
ggtggaactcgtgcgccagagcggtcgtgagacgttacggcaactggaagctaaaacaggtgcgactagatatct

SEQ ID NO: 17821 - DNA, 75 bp, synthetic construct
  source 1..75: mol_type = other DNA
gataatctttttgcagcgcttggtgaacgtaatatcgctgagttaaaaactcgagatttattagcacctattaag

SEQ ID NO: 17822 - DNA, 75 bp, synthetic construct
  source 1..75: mol_type = other DNA
ggtaaaaaggtccgtacgaccatcagccggaaagccgttgtcgcaggcgaccgcgtaaaccgtcagttcgtggca

SEQ ID NO: 17823 - DNA, 75 bp, synthetic construct
  source 1..75: mol_type = other DNA
aagaaagagatacagcgcgtatacgatgaaaatcatcaggtgtacggtgtgcgtaaagtctggcgtcagttgtta

SEQ ID NO: 17824 - DNA, 75 bp, synthetic construct
  source 1..75: mol_type = other DNA
gtactgaccgaagaaatctgcaacccggtactgacgcaggccgggacggatgccgacgcggatttgtccgccttt

SEQ ID NO: 17825 - DNA, 75 bp, synthetic construct
  source 1..75: mol_type = other DNA
tttactgcggatacgctcactgcgcaggttaatcttaacgttaccgaggacaatttcatcgccaataacattgga

SEQ ID NO: 17826 - DNA, 75 bp, synthetic construct
  source 1..75: mol_type = other DNA
agatgcctgccaggtacagccaggcagattcagagtggattaagcggcagttacagagcctgccttcctcactga

SEQ ID NO: 17827 - DNA, 75 bp, synthetic construct
  source 1..75: mol_type = other DNA
tgccagaaagatattgcagagaagatacaaaaacagggaggtgattatttattcgctgtaaaaggaaaccagggg

SEQ ID NO: 17828 - DNA, 75 bp, synthetic construct
  source 1..75: mol_type = other DNA
aggcaccaaaacataatttgctgtgagtgccggaagagcgaagttatgcagcgcatactggcattttatcagtga

SEQ ID NO: 17829 - DNA, 75 bp, synthetic construct
  source 1..75: mol_type = other DNA
ttctgaccatcctggttgtaaaacgtatatcatcccttccgcttcgcctgcttgttgccgcaccatttgtgttac

SEQ ID NO: 17830 - DNA, 75 bp, synthetic construct
  source 1..75: mol_type = other DNA
aggcctgtggcacggggatctattccagagcaacatgtacgaagtctgtttacagctaccagccagatttgtacc

SEQ ID NO: 17831 - DNA, 75 bp, synthetic construct
  source 1..75: mol_type = other DNA
cgggccaggaactttgagccggaggcgggttactggctgaaccgctatctcaccagcgatggcattcgcagagcc

SEQ ID NO: 17832 - DNA, 75 bp, synthetic construct
  source 1..75: mol_type = other DNA
gcgcagtatgcggcatcttgttacgctgatagaagagttgcgccagcgtggcgtgaatttccgaagcctgactga

SEQ ID NO: 17833 - DNA, 75 bp, synthetic construct
  source 1..75: mol_type = other DNA
ctggtaatctgtccatgacaggcaatcccgacaaagacaataaattcgagccctcaatatatctgaatgatgctt

SEQ ID NO: 17834 - DNA, 75 bp, synthetic construct
  source 1..75: mol_type = other DNA
ggatgtgagcggatttttgaggataaaatcagtggcaccaagtccgacagaccggggctgaaaaagctgctcagg

SEQ ID NO: 17835 - DNA, 75 bp, synthetic construct
  source 1..75: mol_type = other DNA
gtcgaaagcaccacttgggttggccttatttctggcaaaagttggtgttcaggaccctcagtttgcgattgaagg

SEQ ID NO: 17836 - DNA, 75 bp, synthetic construct
  source 1..75: mol_type = other DNA
tcaggcgggcagtaatggccaggttgtcgttgaaaagggtggcgagtggctaataaaaaataacgattcctcaat

SEQ ID NO: 17837 - DNA, 75 bp, synthetic construct
  source 1..75: mol_type = other DNA
cggcagcgtcacgcagagtcagtttgacgcggtgggcaggcttaaggcacagacggatgccgcaggccggacaac

SEQ ID NO: 17838 - DNA, 75 bp, synthetic construct
  source 1..75: mol_type = other DNA
aatatccggcattgtttctgcctttcctgtcatggccggttgattttgcagacagatgctcagggggcgtggttt

SEQ ID NO: 17839 - DNA, 75 bp, synthetic construct
  source 1..75: mol_type = other DNA
tggtggcgtgcctgacgggtatgacatcgcttctggcgcatcgctcggcggctgtttttcatgacggcatccgcc

SEQ ID NO: 17840 - DNA, 75 bp, synthetic construct
  source 1..75: mol_type = other DNA
attccgccgtcagatgaacgaaggctggtaccagatacgtattgccggtgaggacacggcaccggaggcggtgta

SEQ ID NO: 17841 - DNA, 75 bp, synthetic construct
  source 1..75: mol_type = other DNA
gtgattgatgccattggtgaagggccgattgaaggtccggtgaaggggctgcagagtatcctggtgaacaaaacc

SEQ ID NO: 17842 - DNA, 75 bp, synthetic construct
  source 1..75: mol_type = other DNA
ccatcattttagaggcgcaggatgtgttgataacctacagaggaaaactaccgggaataattacgggttctctga

SEQ ID NO: 17843 - DNA, 75 bp, synthetic construct
  source 1..75: mol_type = other DNA
tggctcgcctggcaaaacaggatatagaagagcggtttgatattaataaaactgcgttaaaaatactcacattag

SEQ ID NO: 17844 - DNA, 75 bp, synthetic construct
  source 1..75: mol_type = other DNA
cagtctcggcgtcgagtatcaacatacctttaaggcgattaatcaacgtaacggagagcgcaacaacgcgtttct

SEQ ID NO: 17845 - DNA, 75 bp, synthetic construct
  source 1..75: mol_type = other DNA
atgggaaagagtaagaagaaccgcgctgcgtcgacgaaccagaaccagcataaaagccagacttcagccgaagca

SEQ ID NO: 17846 - DNA, 75 bp, synthetic construct
  source 1..75: mol_type = other DNA
ttacctggctccggttgtcacttatgtgctgacaatctttgccggtacgggacatactgcattttcaatgatccc

SEQ ID NO: 17847 - DNA, 75 bp, synthetic construct
  source 1..75: mol_type = other DNA
actcgtggtgtttatagattaggtgccaacggagggaatacaggaacggaaaaccgcccccgtaatattgcgttt

SEQ ID NO: 17848 - DNA, 75 bp, synthetic construct
  source 1..75: mol_type = other DNA
tcaaattattcattaaaaatccgcttgataacggacttactcgtggcgaacaaatggaactggcacgaattgcac

SEQ ID NO: 17849 - DNA, 75 bp, synthetic construct
  source 1..75: mol_type = other DNA
ccctgttctggtattgttttgtcggttggtgtactgctgaactgcaccgccgttcagggttttattcacgttaca

SEQ ID NO: 17850 - DNA, 75 bp, synthetic construct
  source 1..75: mol_type = other DNA
attcatttctcaagtggggtctgaatcgtaatgtgacaccttgctttggcgctcgtctggtacaggagggaaacc

SEQ ID NO: 17851 - DNA, 75 bp, synthetic construct
  source 1..75: mol_type = other DNA
atgacagagcgtgaactgtccattatccgtgcgctgggtgaagaattcgctgcggtgctggcggatttacagcgc

SEQ ID NO: 17852 - DNA, 75 bp, synthetic construct
  source 1..75: mol_type = other DNA
aaggagcaggaattgatatcggaaaagaaagcattgtaaactggaatgcattgtattccagtgatgatgttttac

SEQ ID NO: 17853 - DNA, 75 bp, synthetic construct
  source 1..75: mol_type = other DNA
tcgcgacgctgttcgcggcgacctttctcttccggatcggcaacgcggtggcggccctcgcgcttccatggttcg

SEQ ID NO: 17854 - DNA, 75 bp, synthetic construct
  source 1..75: mol_type = other DNA
ttcgatgaagattcaggttggcgcgaatgatgggcagactattagcattgatttgcagaagattgactcttctac

SEQ ID NO: 17855 - DNA, 75 bp, synthetic construct
  source 1..75: mol_type = other DNA
ttggagttaattcagaaacatattcgtcagcgcgatctgttgggattagtcgaccaaattgtttcgctgctagtt

SEQ ID NO: 17856 - DNA, 75 bp, synthetic construct
  source 1..75: mol_type = other DNA
atgcgtacacgaattgactatctggcggataaatacagttttactgagctgaatgagtcttcccgtcttcgccag

SEQ ID NO: 17857 - DNA, 75 bp, synthetic construct
  source 1..75: mol_type = other DNA
ttgggcaacagaaaaggatgtcggtgcgattacatcgaacataattagagctggtatactcgcatcaactttgtc

SEQ ID NO: 17858 - DNA, 75 bp, synthetic construct
  source 1..75: mol_type = other DNA
atatggcgctttatccctgcgtgatgctgaggatgtggatgtcgcactgaatgcactgaaaaatcttaaatttta

SEQ ID NO: 17859 - DNA, 75 bp, synthetic construct
  source 1..75: mol_type = other DNA
caacaaatgaccagaatacagaattgcagcgtaacgcgctggagtgcgcaggatgtgaactgatttttgaagata

SEQ ID NO: 17860 - DNA, 75 bp, synthetic construct
  source 1..75: mol_type = other DNA
accagccgcgtgacaaaatgacggaagtcatcatttttgcgggtagtgatgcgtgggcacatgcgaagcagtggc

SEQ ID NO: 17861 - DNA, 75 bp, synthetic construct
  source 1..75: mol_type = other DNA
ggcatgaaacggcagggcaggcaaaaccagttgcatggcgatatcgctacgtgaaaaaaggcgttacggactttc

SEQ ID NO: 17862 - DNA, 75 bp, synthetic construct
  source 1..75: mol_type = other DNA
atgggaaagtataaacgaattctgttgagattgactatgaaaaacggccttgaactgaaagcgcctgtaactgat

SEQ ID NO: 17863 - DNA, 75 bp, synthetic construct
  source 1..75: mol_type = other DNA
cagtggtcttccggtgaccgggttcaggtggtggccgcactgatggccatcggggatgagctgcgccggctgcgt

SEQ ID NO: 17864 - DNA, 75 bp, synthetic construct
  source 1..75: mol_type = other DNA
cctgtgggtggagcaccaggacaaggggcgtcttgagctgaattttgtcatcccgaatatggagctggcgagcgg

SEQ ID NO: 17865 - DNA, 75 bp, synthetic construct
  source 1..75: mol_type = other DNA
ctacctgagcaatggacacaaagggctgcaggtgatggacagcgcgaaattctacaagaacaagcccgctaacct

SEQ ID NO: 17866 - DNA, 75 bp, synthetic construct
  source 1..75: mol_type = other DNA
aagatttttctaactggatacgggccaggctaaacgagtatggattcgtagaaaatttagactacattctatttt

SEQ ID NO: 17867 - DNA, 75 bp, synthetic construct
  source 1..75: mol_type = other DNA
gaaagccaggactatattttgatttgccaaaatgggcaaaccaaagggcgaggaggtgatcgccgtagcaaggac

SEQ ID NO: 17868 - DNA, 75 bp, synthetic construct
  source 1..75: mol_type = other DNA
cagactatttcatcaggaggtacgtctttactgatgattgatagtggcacaggggataatttgtttgcagttgat

SEQ ID NO: 17869 - DNA, 75 bp, synthetic construct
  source 1..75: mol_type = other DNA
tgttgtatggaactcggtcaatgatttttattttcagcctggtgcaaccatgcaggggggcggcgttactcaaaa

SEQ ID NO: 17870 - DNA, 75 bp, synthetic construct
  source 1..75: mol_type = other DNA
gataaaggcggtcgcattgatgccacctatcagcctaatacggcacgtttaactgcctatgagccaggtgatatt

SEQ ID NO: 17871 - DNA, 75 bp, synthetic construct
  source 1..75: mol_type = other DNA
aattcaaaatcagaaaaattaaacgggatattgagcgtggttgtgataatgccataaaacacttctggctttttg

SEQ ID NO: 17872 - DNA, 75 bp, synthetic construct
  source 1..75: mol_type = other DNA
tgcggatgccgaggccgcgtttggccagtttgtgacggcaaatctgcagcccaccggtgcggtctggctgatgtc

SEQ ID NO: 17873 - DNA, 75 bp, synthetic construct
  source 1..75: mol_type = other DNA
ggaaatggaaggcactgcgcatcagcacaaggagaacactggcggcaatcagcatcatgccagcgatagtgaaac

SEQ ID NO: 17874 - DNA, 75 bp, synthetic construct
  source 1..75: mol_type = other DNA
ccctactgcggtgacggcgcagggggcagtggctggcgcatatctggataaggagcgctatcctgttttttatcg

SEQ ID NO: 17875 - DNA, 75 bp, synthetic construct
  source 1..75: mol_type = other DNA
atcggccttcaggcgttgcagggactgggtagtgtcgctcaaacatatcaagccgcaaagcaacaggaagcggat

SEQ ID NO: 17876 - DNA, 75 bp, synthetic construct
  source 1..75: mol_type = other DNA
gacattccggtagacctcaacacgctgtggtcgccggacacctgcccggtgcatctgctgccttatctcgcctgg

SEQ ID NO: 17877 - DNA, 75 bp, synthetic construct
  source 1..75: mol_type = other DNA
ttatgaaatcaacgaagagccgaccgcctatggcgatcacggcattcgtatttatggcatctggtcacctattgc

SEQ ID NO: 17878 - DNA, 75 bp, synthetic construct
  source 1..75: mol_type = other DNA
aaagctgctattggtcgtctgaaaggcgaggaactggcgcaatataattcgtggctggattatctggacgcactg

SEQ ID NO: 17879 - DNA, 75 bp, synthetic construct
  source 1..75: mol_type = other DNA
tgatattgtcgggcaggttatcgagggagcgtatgaagtgctcggtgtctttgataaggtcactgataatatgga

SEQ ID NO: 17880 - DNA, 75 bp, synthetic construct
  source 1..75: mol_type = other DNA
ggtttgggagaagcggcaaaacgggatgtggggacaggggaaaatcagataccggacatggcctcttttgccagt

SEQ ID NO: 17881 - DNA, 75 bp, synthetic construct
  source 1..75: mol_type = other DNA
taaccggctttaattctgcttacagaacgtcatcaaccagcgacacggtatcgatgaattacagttggtgggctg

SEQ ID NO: 17882 - DNA, 75 bp, synthetic construct
  source 1..75: mol_type = other DNA
ggtgggcgaaaaagattgcttcatgttgcacgtgagagagcggcaaatgaagtgcaaatgtatttgcccggaatg

SEQ ID NO: 17883 - DNA, 75 bp, synthetic construct
  source 1..75: mol_type = other DNA
ttggtgtacctgttccgtggcccactgccacaccgccagcaggctggttaaagtgcgacgggcgcgcctttacaa

SEQ ID NO: 17884 - DNA, 75 bp, synthetic construct
  source 1..75: mol_type = other DNA
ggtttgggagaaggttcggcattacccgttggcgtgcctgttccgtggccttccgccactccgccaacaggctgg

SEQ ID NO: 17885 - DNA, 75 bp, synthetic construct
  source 1..75: mol_type = other DNA
caaccgtaaattatgacgggaaacatttcacttatcaggtcgctgatgagtggcttggatttccttctgttgatt

SEQ ID NO: 17886 - DNA, 75 bp, synthetic construct
  source 1..75: mol_type = other DNA
actatccagagttacgttccagaattgagcagcacattagcgaaacaaagaaccagctttcacagcttgaaagca

SEQ ID NO: 17887 - DNA, 75 bp, synthetic construct
  source 1..75: mol_type = other DNA
atggcttcttaaccatattcctgacaccactgagcaattcatggtcagatctgaaattgatggagttgaagccaa

SEQ ID NO: 17888 - DNA, 75 bp, synthetic construct
  source 1..75: mol_type = other DNA
gggcatggttgaacgaattacaggacgttcttgatcgctgcccatcaccgaaaaaaattggtttttacaccattg

SEQ ID NO: 17889 - DNA, 75 bp, synthetic construct
  source 1..75: mol_type = other DNA
cgtttaaaaaaccttttgtcatcacagataacaattctgaatttatttgtgataaagaatttgatgatatacgtg

SEQ ID NO: 17890 - DNA, 75 bp, synthetic construct
  source 1..75: mol_type = other DNA
gtccggaagccgccggcattgcagcctgtctgatggcatacagtcatcatgcctgtcgtacggagaattatgcca

SEQ ID NO: 17891 - DNA, 75 bp, synthetic construct
  source 1..75: mol_type = other DNA
cagagagcgattgagtcaattaagcaggctgatgcagctgttaagttggcacacgagaagttttcggcgcttgcg

SEQ ID NO: 17892 - DNA, 75 bp, synthetic construct
  source 1..75: mol_type = other DNA
cgttcttgatcgctgcccatcaccgaaaaaaattggtttttacaccattggcgataaaagcatttacctgtatga

SEQ ID NO: 17893 - DNA, 75 bp, synthetic construct
  source 1..75: mol_type = other DNA
atttcgccttaagcgaatggaaagacaacggtaacggaacctatacccaaatagttaccgccgggaagacgtctg

SEQ ID NO: 17894 - DNA, 75 bp, synthetic construct
  source 1..75: mol_type = other DNA
atgcacttccgagtcacaggtgaatggaatggagaaccattcaacagagttatcgaagccgagaacatcagcgac

SEQ ID NO: 17895 - DNA, 75 bp, synthetic construct
  source 1..75: mol_type = other DNA
ccgccacttcacccacttgaaggacggggccgaggccaaagacaggacgttgctgctgtccgcaatcctcggtga

SEQ ID NO: 17896 - DNA, 75 bp, synthetic construct
  source 1..75: mol_type = other DNA
atgcacttccgagtcacaggtgaatggaatggagagccattcgacagggttatcgaagcagaggacatcaacgac

SEQ ID NO: 17897 - DNA, 75 bp, synthetic construct
  source 1..75: mol_type = other DNA
cctgcgtattgagccgccgttatggcggtgcgggctgcggcggaacttccgtatcttccagcagcaggatatccg

SEQ ID NO: 17898 - DNA, 75 bp, synthetic construct
  source 1..75: mol_type = other DNA
acactgaaagttcttcgttcttcactggatgcggcaaaaattttcacacagacggcagatgctcaggaactggcc

SEQ ID NO: 17899 - DNA, 75 bp, synthetic construct
  source 1..75: mol_type = other DNA
gtgaaaaacctgaacggacagaatggcaccatcagcctgcgtgtacgcccggatatggcacagaacaatgctgac

SEQ ID NO: 17900 - DNA, 75 bp, synthetic construct
  source 1..75: mol_type = other DNA
ccgccgacaggagcgaccattcctgccgtcgcccggccagttcgtagcgtggtgtaagcagagtggcggggcgtt

SEQ ID NO: 17901 - DNA, 75 bp, synthetic construct
  source 1..75: mol_type = other DNA
gcgcaggtctacatcgaaggtcagcttcgcacccgtagctgggaagataacggtatcacccgttacgtcactgaa

SEQ ID NO: 17902 - DNA, 75 bp, synthetic construct
  source 1..75: mol_type = other DNA
acagctcgatccccgctgtggcgtgaaaaaagacaaacagcagctggagcgcagactgcgcaatgacagccgctg

SEQ ID NO: 17903 - DNA, 75 bp, synthetic construct
  source 1..75: mol_type = other DNA
ctggctggagaagcagccggaagggtctgtgcgtccggtggtgattgagtcggtgacaaaaatcatggcgtgcgg

SEQ ID NO: 17904 - DNA, 75 bp, synthetic construct
  source 1..75: mol_type = other DNA
actgaacatggggcgcattgtcgttgacgtcgatggtgttaatcttgctgaactgattaacgtggcctgcgacaa

SEQ ID NO: 17905 - DNA, 75 bp, synthetic construct
  source 1..75: mol_type = other DNA
gataatttatttcaccatacccgcgatgttattgcgtttgtcacccggacatggaacatcattttcagcattccg

SEQ ID NO: 17906 - DNA, 75 bp, synthetic construct
  source 1..75: mol_type = other DNA
tcccgtaagcatcgaaatagacacaaatacgataaccggtgaactcgttaccgccggagtcggtatattccgtca

SEQ ID NO: 17907 - DNA, 75 bp, synthetic construct
  source 1..75: mol_type = other DNA
tctgagcgtaatgacaggaaaatgtttctcctgagctcactggttttccttgttattaatatcgcgtgtttatat

SEQ ID NO: 17908 - DNA, 75 bp, synthetic construct
  source 1..75: mol_type = other DNA
gggagtgtgataacgcgattactcataatacggtgtgttgtccgtactgtggttctgtcgaccccttcggctatt

SEQ ID NO: 17909 - DNA, 75 bp, synthetic construct
  source 1..75: mol_type = other DNA
tttggggatgatgtttataagtataagggcggtgataaaaacgatactgtatttggtgcaggccttgcggtgggc

SEQ ID NO: 17910 - DNA, 75 bp, synthetic construct
  source 1..75: mol_type = other DNA
gatccggcgattgccggtgcggcaccgtcattaacccgcgttcatcagcgtgcggatgccctgatgcgggagctg

SEQ ID NO: 17911 - DNA, 75 bp, synthetic construct
  source 1..75: mol_type = other DNA
tttaccggcagcggatatctgttacgtatcggtgcgtggtcgtacccggttctgcgacttaaacggctgggcctg

SEQ ID NO: 17912 - DNA, 75 bp, synthetic construct
  source 1..75: mol_type = other DNA
gcatcccgaaatggatataaaaatacctttccttacggtcatggaaacgttgcaatataaaccggcagagagtgc

SEQ ID NO: 17913 - DNA, 75 bp, synthetic construct
  source 1..75: mol_type = other DNA
attctggataattttttaaaggggacgcatctcgccagtgattgtttcattgctcattcttttggtggctttcat

SEQ ID NO: 17914 - DNA, 75 bp, synthetic construct
  source 1..75: mol_type = other DNA
caaaatgacacgatggaagaggtcaaaatgaaacgctccattggttcaaaacgacccaatgtcatcgggtcaaaa

SEQ ID NO: 17915 - DNA, 75 bp, synthetic construct
  source 1..75: mol_type = other DNA
tttaaatttgataaagataaagctgagcgggtggcgaaatttatccagcttttgccacacaccaaaggggagtgg

SEQ ID NO: 17916 - DNA, 75 bp, synthetic construct
  source 1..75: mol_type = other DNA
ttctcaccaccttgctgatgaaaacttaaaccctattaccatcattcagaactacaccaatatgtcggatcccat

SEQ ID NO: 17917 - DNA, 75 bp, synthetic construct
  source 1..75: mol_type = other DNA
cgccattatttgtgtccaggaagactcgctgtatgtgggcaaaacatataccgcagttatggccataaacacgac

SEQ ID NO: 17918 - DNA, 75 bp, synthetic construct
  source 1..75: mol_type = other DNA
ttcccgcagcagatctccctgggtggaaaaaatgttgcctgggtacagtcggaggtcagtgcatggatggcggcg

SEQ ID NO: 17919 - DNA, 75 bp, synthetic construct
  source 1..75: mol_type = other DNA
atgctgccctcgccggggtggacagcacgattgttgaagtgatggggctctgtgcgcagttcacctcgggggcac

SEQ ID NO: 17920 - DNA, 75 bp, synthetic construct
  source 1..75: mol_type = other DNA
cgcgccggacgttcgcgcacatggtgggcaccttccgtgggggaacaggtgctgattctggccgtgggcggtgaa

SEQ ID NO: 17921 - DNA, 75 bp, synthetic construct
  source 1..75: mol_type = other DNA
gctgattctggccgtgggcggtgaactcgacacggcgttcgttctgccggggatttattccggcgataaccccgc

SEQ ID NO: 17922 - DNA, 75 bp, synthetic construct
  source 1..75: mol_type = other DNA
gcattcaagaggatgcccatcacgctggagccgtggcagctctttgtgatctgctgtgcgtttggctgggtcaat

SEQ ID NO: 17923 - DNA, 75 bp, synthetic construct
  source 1..75: mol_type = other DNA
ggcagagccatgctgtacgagaaagaagacacgctgtctgaccacattgagtcctacgggatccgctcgctttaa

SEQ ID NO: 17924 - DNA, 75 bp, synthetic construct
  source 1..75: mol_type = other DNA
ttccgccgtcagatgaacgaaggctggtaccagatacgtattcgcggtgaggacacggcaccggaggcggtgtac

SEQ ID NO: 17925 - DNA, 75 bp, synthetic construct
  source 1..75: mol_type = other DNA
aaaatctggatccccccatcaccggacgaacaggtgtttctcctatgcccgggcggcaatccggaaaccgcagtc

SEQ ID NO: 17926 - DNA, 75 bp, synthetic construct
  source 1..75: mol_type = other DNA
cgaatcaaacggcatcaccgtacacacccacgtacacagcggagtgaagagcggtagcgatacgagcggaggccc

SEQ ID NO: 17927 - DNA, 75 bp, synthetic construct
  source 1..75: mol_type = other DNA
aggccttgttcaactcagtagcgccacaaacagcacgtctgaaacactggctgcaacgccaaaagcggtcaaggc

SEQ ID NO: 17928 - DNA, 75 bp, synthetic construct
  source 1..75: mol_type = other DNA
tgactttggcgactggtgggattgcgtcattgtgctggagaagcaaacacacgatacgagtaatcagcccattag

SEQ ID NO: 17929 - DNA, 75 bp, synthetic construct
  source 1..75: mol_type = other DNA
actgggatgctggaaaaacaccgccatattgttgttgccaacgatgggtatgattcaaaagaggaatgggaactg

SEQ ID NO: 17930 - DNA, 75 bp, synthetic construct
  source 1..75: mol_type = other DNA
tttttgtgaatcctgcgcttaaggatgattacattaatgcaaattcatggccagatgatgctctggctgtcagtg

SEQ ID NO: 17931 - DNA, 75 bp, synthetic construct
  source 1..75: mol_type = other DNA
ccggtcagttgtttatggacccgaaacgcatgattgaagcctgcgacgaaaacaccatcggcgtggtgccgactt

SEQ ID NO: 17932 - DNA, 75 bp, synthetic construct
  source 1..75: mol_type = other DNA
taccggctggcaacgttttgtgcgccgtaacggtattgttgatccgctgttcattcccggaggccattcagtgga

SEQ ID NO: 17933 - DNA, 75 bp, synthetic construct
  source 1..75: mol_type = other DNA
gtctgatgctgcgtacctggctgcgcgatggtgaggtgtttgcccagatggtttccgggcgcataaacagcctga

SEQ ID NO: 17934 - DNA, 75 bp, synthetic construct
  source 1..75: mol_type = other DNA
atggtggaaattctggcccttgtattgcaccacgatgaaggtgcggtactcagtgctgtggaattggcattggag

SEQ ID NO: 17935 - DNA, 75 bp, synthetic construct
  source 1..75: mol_type = other DNA
aatgcaatcaaaaatggctttattcgcttaatgccgttaacccttgcgggggccatgtttgtattaattaacaac

SEQ ID NO: 17936 - DNA, 75 bp, synthetic construct
  source 1..75: mol_type = other DNA
gggccgcccgtgataacggcctcgccgtcccggaatgcgtcacccgccgtcaggcggtggttaatcaggcccgca

SEQ ID NO: 17937 - DNA, 75 bp, synthetic construct
  source 1..75: mol_type = other DNA
tcatcctcagactcaggggcaaagattctgtctcagtaaatcaggctcttaccgacaaattcctgagtttaccgt

SEQ ID NO: 17938 - DNA, 75 bp, synthetic construct
  source 1..75: mol_type = other DNA
tcagaccggtgtaaacggtgaaaataacagcgtccgtctcagcattcagggcggtcatctcggtcacgataacaa

SEQ ID NO: 17939 - DNA, 75 bp, synthetic construct
  source 1..75: mol_type = other DNA
gcccatatcgttgaacttgttcgccagtgcgcgcagttacatgccgccgggcatcggattgttattgtgacgtcg

SEQ ID NO: 17940 - DNA, 75 bp, synthetic construct
  source 1..75: mol_type = other DNA
atgttcccttggaaaggttatgcaggttttcgatttgttgaggcaaaaaaagagggggaattcgatttagttatt

SEQ ID NO: 17941 - DNA, 75 bp, synthetic construct
  source 1..75: mol_type = other DNA
tgagctggagctggcaaatgcaaccattactgatatgcagcagcgccagcgtgatgttgctgcacttgatgccag

SEQ ID NO: 17942 - DNA, 75 bp, synthetic construct
  source 1..75: mol_type = other DNA
gaccgactttcatgcactggcgctgcgcccgtttggctggcgcgaagtgtggatcggttatgacccggcaaaagg

SEQ ID NO: 17943 - DNA, 75 bp, synthetic construct
  source 1..75: mol_type = other DNA
attcaggagatcccgggggatattttcgcggcggcagcaacttacgacggtgaagtcattaccatttatccggac

SEQ ID NO: 17944 - DNA, 75 bp, synthetic construct
  source 1..75: mol_type = other DNA
atgagtgattcgcgactgctgccgaccggctcatcaccgcttgaagttgccgccgcaaaagcctgtgcggaaatt

SEQ ID NO: 17945 - DNA, 75 bp, synthetic construct
  source 1..75: mol_type = other DNA
tgttcgccagcagcggctgaaattaaacctgtccggaaggctggcgataaagattattgcagagccaccggataa

SEQ ID NO: 17946 - DNA, 75 bp, synthetic construct
  source 1..75: mol_type = other DNA
gaggtcgattttggcaggtcgacgaagaataacatcactcagggtagtggtaaggagtggtcaaaacaggatcgt

SEQ ID NO: 17947 - DNA, 75 bp, synthetic construct
  source 1..75: mol_type = other DNA
aattcaaacgcgaatcagctcaactggttgtcgaccaaaattacaccgtctctgacgctgctaaggctatggatg

SEQ ID NO: 17948 - DNA, 75 bp, synthetic construct
  source 1..75: mol_type = other DNA
tcatcatgacgttcaccgttaccagcatcaacgcacgcacaaagggaaacacccatacacaggatttgtcatcac

SEQ ID NO: 17949 - DNA, 75 bp, synthetic construct
  source 1..75: mol_type = other DNA
gatgagggacccccgcgccagtgagatgacgcgaaagtttatgctcgggtatcgttcagataaattacaggccgg

SEQ ID NO: 17950 - DNA, 75 bp, synthetic construct
  source 1..75: mol_type = other DNA
ttttcttgcctcattcttattgtttgttccggtggtgattgagttctctgtgctaaagaatcatctggcattaaa

SEQ ID NO: 17951 - DNA, 75 bp, synthetic construct
  source 1..75: mol_type = other DNA
caaagaactggacctattaatcgggaaaaacattctggtcatgcaggctgccattatcgaatggcaggcaactgg

SEQ ID NO: 17952 - DNA, 75 bp, synthetic construct
  source 1..75: mol_type = other DNA
atactgatcggaatgtctacaggtatggcgggagctactataagcctaccagtcattgcggctgttgggtttata

SEQ ID NO: 17953 - DNA, 75 bp, synthetic construct
  source 1..75: mol_type = other DNA
ggatttttacagcgtggcgcagcattccgttctgtgcagtcaacttgtggcgccagagttcgcctttgaagcgtt

SEQ ID NO: 17954 - DNA, 75 bp, synthetic construct
  source 1..75: mol_type = other DNA
gcgaagcgagcgagaagaaaccgttcaactttgcgctgttctgggataaatacggcaccttttttatcctggcga

SEQ ID NO: 17955 - DNA, 75 bp, synthetic construct
  source 1..75: mol_type = other DNA
aatcatttttgtgactttattgagtttaaacacaaaaatattattatgaacacaagtcagtacacaggaagttca

SEQ ID NO: 17956 - DNA, 75 bp, synthetic construct
  source 1..75: mol_type = other DNA
atggggagacccgactggcgcgccatgcttgccgggatgacatccaccgaatatgccgactggcgacgtttttac

SEQ ID NO: 17957 - DNA, 75 bp, synthetic construct
  source 1..75: mol_type = other DNA
cccggtatcaaaagtcagatttactatcgctcaagttaataacgatacaaaagtgtgggccgatatgtggatgga

SEQ ID NO: 17958 - DNA, 75 bp, synthetic construct
  source 1..75: mol_type = other DNA
cgtggacgcaacaaagctgacaaggtggacatcgacctgtcccacagcaatctggcccccggcctgctgtgcgca

SEQ ID NO: 17959 - DNA, 75 bp, synthetic construct
  source 1..75: mol_type = other DNA
cggatattgcgtgggcgaccatgcacgccctgttaaacgaaccgctttccgccggtagcggcatgcaatcaacct

SEQ ID NO: 17960 - DNA, 75 bp, synthetic construct
  source 1..75: mol_type = other DNA
aggcccgcgccgtcagccggaaaagaacgttttcaccgatgaacagattgagaagttggaagaaatcttccattc

SEQ ID NO: 17961 - DNA, 75 bp, synthetic construct
  source 1..75: mol_type = other DNA
tgaacctgttaatcacctctgtggatggtgataaaactgctggcgcagcgtcagtggatattggtgaattctacc

SEQ ID NO: 17962 - DNA, 75 bp, synthetic construct
  source 1..75: mol_type = other DNA
ggtgcacgctggctactgggaccggaactgttacgcactggcgctcatgaacaggcacgccatatactgcaggaa

SEQ ID NO: 17963 - DNA, 75 bp, synthetic construct
  source 1..75: mol_type = other DNA
cgggagttgcagcagatccgcgacagcttccgccagaaggatgcggaccttcagtctcagtatcagaccggggat

SEQ ID NO: 17964 - DNA, 75 bp, synthetic construct
  source 1..75: mol_type = other DNA
gactgtcggtcttgttgcccagaacatcattccacgcagtattgatactaaagtcgtcaatggctttaaagaaac

SEQ ID NO: 17965 - DNA, 75 bp, synthetic construct
  source 1..75: mol_type = other DNA
aagccggtccggaagatgacttcagtcttctgcttccgtccgttggtgggcaattgtccgatccgggtaatatca

SEQ ID NO: 17966 - DNA, 75 bp, synthetic construct
  source 1..75: mol_type = other DNA
tgttgcatgacccgcgacggcaggcatcgctgctttactggcagggtttttccgtgccacagattgccgaaatgc

SEQ ID NO: 17967 - DNA, 75 bp, synthetic construct
  source 1..75: mol_type = other DNA
aacacaacgggttatctacctccgcgaaggctatgagcatgaatgcttcagcccgctcgaacagtttcgtcgtaa

SEQ ID NO: 17968 - DNA, 75 bp, synthetic construct
  source 1..75: mol_type = other DNA
tgcgggaagaagtgaaggcgcgcattgtggaactggtacgcagagatgggcgaaaaacgcgtaaacaactggaaa

SEQ ID NO: 17969 - DNA, 75 bp, synthetic construct
  source 1..75: mol_type = other DNA
gacacttcattcacgagggagtatcggtaatactggcgggagtgaaacccgtccacgaaatattgcatttaactt

SEQ ID NO: 17970 - DNA, 75 bp, synthetic construct
  source 1..75: mol_type = other DNA
gcgcagcgctggcaacccttacagctattggtcgcgctattatcgctaagggcagtataaaagatgtcctcaatt

SEQ ID NO: 17971 - DNA, 75 bp, synthetic construct
  source 1..75: mol_type = other DNA
ctccggcagaagcagaaaaagcttattatgcttccatcagaaacgatgatctggcagcctgagttcacagataaa

SEQ ID NO: 17972 - DNA, 75 bp, synthetic construct
  source 1..75: mol_type = other DNA
cgtgcggcggtttatcgtgcgcaacaggcggttgttgctgctcgcggtaccgaaaggcaggcagccgcagaagcg

SEQ ID NO: 17973 - DNA, 75 bp, synthetic construct
  source 1..75: mol_type = other DNA
ggcatcgccgcacacacatgaattccttaccgacgctgaaagaactcattcaacacgagatcgctgatttctgcg

SEQ ID NO: 17974 - DNA, 75 bp, synthetic construct
  source 1..75: mol_type = other DNA
aagccgctaaaggaaaagagaagagctataagctatctgatggaggtggcctgtaccttcaggttgaacctaatg

SEQ ID NO: 17975 - DNA, 75 bp, synthetic construct
  source 1..75: mol_type = other DNA
ccgggcggaagctgacgcaggcagaaaccacccgacttaacgctgtgctggattacattgacgcggtgacggcaa

SEQ ID NO: 17976 - DNA, 75 bp, synthetic construct
  source 1..75: mol_type = other DNA
agtggtgaaatcatctggatgcatcccgaaaaccggccttatctgcgcgcgctttatgcagcaattctcgcaaat

SEQ ID NO: 17977 - DNA, 75 bp, synthetic construct
  source 1..75: mol_type = other DNA
tgcatcctgcccgcgtccgctcattatgccgcagagtcaatggtagctcaggcggggcagcctccgggctggccg

SEQ ID NO: 17978 - DNA, 75 bp, synthetic construct
  source 1..75: mol_type = other DNA
aggaatatccggacatgaccctgctgggcgggaccttccaggggctgccggtgattgtctcccagtatgtgggtg

SEQ ID NO: 17979 - DNA, 75 bp, synthetic construct
  source 1..75: mol_type = other DNA
gatggtcaggctgaatccagaattaccgtgcagatcgatgtctgggcaacagtacctgatgacgcagatgatatc

SEQ ID NO: 17980 - DNA, 75 bp, synthetic construct
  source 1..75: mol_type = other DNA
ttatcggatattctattgttgactatttgtgccgttatttctggtgcagaaagttgggaagatatagaggatttc

SEQ ID NO: 17981 - DNA, 75 bp, synthetic construct
  source 1..75: mol_type = other DNA
atttggaaacagaattatttgatggcaacactaacggtttcttcatggtatcaggccttgataaagactgggatg

SEQ ID NO: 17982 - DNA, 75 bp, synthetic construct
  source 1..75: mol_type = other DNA
ggacgctgcgcgatcttctctggaaaacctctcccggtttattcgtaataatcccggggcggagggatttctgaa

SEQ ID NO: 17983 - DNA, 75 bp, synthetic construct
  source 1..75: mol_type = other DNA
cgatgatgactccaatcttgagtcgttatgcagggaatgccacagagagaagacagcaagggaacgtattcgatg

SEQ ID NO: 17984 - DNA, 75 bp, synthetic construct
  source 1..75: mol_type = other DNA
ctggatcaactggctgaaatcgtaaaaccgcagcgtacacttcccacgaccatggaatttgtcgatatcgccggt

SEQ ID NO: 17985 - DNA, 75 bp, synthetic construct
  source 1..75: mol_type = other DNA
acagcgctgtggcccggggctttattgccgtatctgagtttgctaggaaatgtgttcataagtctgtcagacgtc

SEQ ID NO: 17986 - DNA, 75 bp, synthetic construct
  source 1..75: mol_type = other DNA
cgcgcggcaacctttctgaagtgctcaacaatgttgaggccggggaagaggttgaaatcacccgcagaggccgtg

SEQ ID NO: 17987 - DNA, 75 bp, synthetic construct
  source 1..75: mol_type = other DNA
caaaatcggatcgaatcttgcggacggactggcggggcagattgataacctgcgcaaaaagataattgaaaattt

SEQ ID NO: 17988 - DNA, 75 bp, synthetic construct
  source 1..75: mol_type = other DNA
caggttggcgaattaacaatgtgggttaaacgactggtcagtcaactgaaaaaagctaatccagactgcaaatta

SEQ ID NO: 17989 - DNA, 75 bp, synthetic construct
  source 1..75: mol_type = other DNA
agaccagactcattcacaacgcatggatttcgcgaatcttatgcgtcaagttcaaatcccctccggcggagtagc

SEQ ID NO: 17990 - DNA, 75 bp, synthetic construct
  source 1..75: mol_type = other DNA
gttgactgggtgctcagagaggcctgctgcgctgccattctgggtaagccgacaatccaccagcatccggcaatc

SEQ ID NO: 17991 - DNA, 75 bp, synthetic construct
  source 1..75: mol_type = other DNA
atttccggatacctggtttggcccattactgggggagtttgaagaagtgctcgatgcatacgacactgatgaaat

SEQ ID NO: 17992 - DNA, 75 bp, synthetic construct
  source 1..75: mol_type = other DNA
ccaacagtggtccttcacaaatcctctacattgttcgatattaagatggccgtaaccaatctggcttctgtagat

SEQ ID NO: 17993 - DNA, 75 bp, synthetic construct
  source 1..75: mol_type = other DNA
ccgtgcgtcgggtggtggagccgttcggctttctgatccgcattattgagtggtggcagaccggagagacaccgg

SEQ ID NO: 17994 - DNA, 75 bp, synthetic construct
  source 1..75: mol_type = other DNA
ccgggagtgcagctttgcattacctgtcaggaaatcgcagaactgaaaggcaaacattacaacggaggtgctgta

SEQ ID NO: 17995 - DNA, 75 bp, synthetic construct
  source 1..75: mol_type = other DNA
gcgcggatgtgcacatttttgccggaaacgatccggcgcataccgcaaaagccaccagtggtatcagtgccgcca

SEQ ID NO: 17996 - DNA, 75 bp, synthetic construct
  source 1..75: mol_type = other DNA
aatccgacgcctgccaatccatgaagcctgctcacacgtcatatgggacgccaacagcaagcagatggataagag

SEQ ID NO: 17997 - DNA, 75 bp, synthetic construct
  source 1..75: mol_type = other DNA
atgaatgcggccattgttaacggactgaagtcactctccggtgccggagggtggcttggtacggtcggcggatgg

SEQ ID NO: 17998 - DNA, 75 bp, synthetic construct
  source 1..75: mol_type = other DNA
aggaagtgagcgtgccgctggcctcgctgattaagtcaccgctgaatgtgcgcacggtgccgtattctgcggagt

SEQ ID NO: 17999 - DNA, 75 bp, synthetic construct
  source 1..75: mol_type = other DNA
attccacatgcgtgactggtggcagccaaccagagggaattattttggagcgttaaaaaaacagcagattatcgc

SEQ ID NO: 18000 - DNA, 75 bp, synthetic construct
  source 1..75: mol_type = other DNA
caccacaggaaaagacggtggtcagcattgccgttgatccggagtctccggaatccttcatgaaacgacctaaac

SEQ ID NO: 18001 - DNA, 75 bp, synthetic construct
  source 1..75: mol_type = other DNA
acgccatcgcggcgggcgccatcctggtgacgaacaatgtgagagagtttgcgcgggtcccgggcctggtgctgg

SEQ ID NO: 18002 - DNA, 75 bp, synthetic construct
  source 1..75: mol_type = other DNA
cgaccacggagattaaggtggcactgcgtctcgccggcacgccgatcggtccgaacgacacggcgatagccggac

SEQ ID NO: 18003 - DNA, 75 bp, synthetic construct
  source 1..75: mol_type = other DNA
tgatgagaaaattgttttgctcgttattgctgtaggaaaaagggaaagcagtgaggtctaccagatggctgatat

SEQ ID NO: 18004 - DNA, 75 bp, synthetic construct
  source 1..75: mol_type = other DNA
agcagtatgccagtagccgagactttgccgccgcaacagggttggtacctcgacaatacagcacgggggggcgga

SEQ ID NO: 18005 - DNA, 75 bp, synthetic construct
  source 1..75: mol_type = other DNA
ttgtggcgaccgccgaaacataaccggacggtgagggttgtgtgccgtgagtggagtgtcacggataatgcccgg

SEQ ID NO: 18006 - DNA, 75 bp, synthetic construct
  source 1..75: mol_type = other DNA
cgatgacggtcgaaagcattgggaggctgaccggtcgtacaggtgatgctgtcagaacgaaagcgcgggaactgg

SEQ ID NO: 18007 - DNA, 75 bp, synthetic construct
  source 1..75: mol_type = other DNA
caccacagagcactgtcaggcgctggcgctggagaacgacaccgcgcgtcaggtgcaggtgtttgaagccgcctg

SEQ ID NO: 18008 - DNA, 75 bp, synthetic construct
  source 1..75: mol_type = other DNA
atgactgaagccgaactactgggattaatccgccgcgtcgtcggaatcagccagcagcatgacgaacaggccaca

SEQ ID NO: 18009 - DNA, 75 bp, synthetic construct
  source 1..75: mol_type = other DNA
gttgtgaaaaatgtcactgtcagccagtcctgcggtaagtggtacatcagtattcagacagaaagtgaagtatca

SEQ ID NO: 18010 - DNA, 75 bp, synthetic construct
  source 1..75: mol_type = other DNA
gcgacacgctggatatggaagacgtggtaaacgccagcagcagcaacccggcgcaccgccgcaatgagatgatgg

SEQ ID NO: 18011 - DNA, 75 bp, synthetic construct
  source 1..75: mol_type = other DNA
ttcagcaaggaaatcgggctggcgttctggcgatacattctgactaacaccaccgttcagtgcgtcacatcgttc

SEQ ID NO: 18012 - DNA, 75 bp, synthetic construct
  source 1..75: mol_type = other DNA
tgtctgtatacgccgcttttttcttcctgaactcccgttataccttcatgaatacaacctttaatgtcggcctgg

SEQ ID NO: 18013 - DNA, 75 bp, synthetic construct
  source 1..75: mol_type = other DNA
tggtcgggctggatgctggcgtggctaaactcgccacgctgtcagatggcacagtctttgagcctgtaaacagtt

SEQ ID NO: 18014 - DNA, 75 bp, synthetic construct
  source 1..75: mol_type = other DNA
ggcattatccgcgacagtggacttctggtcgttgcgaatgatggaagaactacaacgttacatcatcctaaattt

SEQ ID NO: 18015 - DNA, 75 bp, synthetic construct
  source 1..75: mol_type = other DNA
gcggtcatcctaaattcgtttttaataaaggtcgccgtggctggggcaaagaggcgctggaacgatatgcgccag

SEQ ID NO: 18016 - DNA, 75 bp, synthetic construct
  source 1..75: mol_type = other DNA
ggcttgctactgcggcagacaggtttccgtattttacggggaatgatgtcgccagcctggcaactctgacaaaag

SEQ ID NO: 18017 - DNA, 75 bp, synthetic construct
  source 1..75: mol_type = other DNA
gttgttctggtgcagtttcctgacctgtcactgcctgcggtgtgcggcatcggctccatgctgggtatcgccggt

SEQ ID NO: 18018 - DNA, 75 bp, synthetic construct
  source 1..75: mol_type = other DNA
tcactttgacccgaaaaacaccggcaaacatcttggcccctggtctccggatggacacctgggcgacctccctgc

SEQ ID NO: 18019 - DNA, 75 bp, synthetic construct
  source 1..75: mol_type = other DNA
tattcattgccaggatcgtcgcgggaaggctgtttaccgtaaaaaatttacccggccaaagttgatcgaattttt

SEQ ID NO: 18020 - DNA, 75 bp, synthetic construct
  source 1..75: mol_type = other DNA
gtgaaggccgggtgaaaggcagcggggatgcgcagttcgtggccctgcagggcagccgtaacggagagagcctgc

SEQ ID NO: 18021 - DNA, 75 bp, synthetic construct
  source 1..75: mol_type = other DNA
cgggcaggagcgtgaacgggctgtcacttctgaacgggaagccgcgctgccggagagtgtactgcgtgaaccaca

SEQ ID NO: 18022 - DNA, 75 bp, synthetic construct
  source 1..75: mol_type = other DNA
atcgttggggagcttgggctgcttcagacaatagcggagtggactggcagccgatagcggctggtttcaagggac

SEQ ID NO: 18023 - DNA, 75 bp, synthetic construct
  source 1..75: mol_type = other DNA
ctggttcgataagaatgacgaccgggcgatatttagcgatatcagaaaggaagagcacacattgtgtgatggacg

SEQ ID NO: 18024 - DNA, 75 bp, synthetic construct
  source 1..75: mol_type = other DNA
ctgaaaatttgcaatctgcggctatcatcggcgaaatggtgggtaaaaagcgagagatgcaggcacgtctggaac

SEQ ID NO: 18025 - DNA, 75 bp, synthetic construct
  source 1..75: mol_type = other DNA
tggtctgccgtaaatggtcgtccagtgtgggggcgctgtgggtcacggtaaccgcaaattttgaacaggtcgtgg

SEQ ID NO: 18026 - DNA, 75 bp, synthetic construct
  source 1..75: mol_type = other DNA
cccgcagtttgctgaccctgccaaatatcccgaagcgcaaatccagtttcgtctgaatctggccgatgaactgct

SEQ ID NO: 18027 - DNA, 75 bp, synthetic construct
  source 1..75: mol_type = other DNA
atgatgatgatctacggcatgtttgtttttgagctgcgcacactgccgcatcagcagttacagcaaaacaaaagc

SEQ ID NO: 18028 - DNA, 75 bp, synthetic construct
  source 1..75: mol_type = other DNA
ttatggcacccgaaccggatgacgatgatgacgaaacatgggtactgttcaatgccatgaacggtaaccgcgctg

SEQ ID NO: 18029 - DNA, 75 bp, synthetic construct
  source 1..75: mol_type = other DNA
gtatgtactgactgaaacgaatacgacccgttccgagtttgatcgctacggtaaggcgaaaaagatagaattttc

SEQ ID NO: 18030 - DNA, 75 bp, synthetic construct
  source 1..75: mol_type = other DNA
ttggcaaacatatagacatattgtccgggtgtgcattcccttcaagtggattcaataggaacaatggtgttccac

SEQ ID NO: 18031 - DNA, 75 bp, synthetic construct
  source 1..75: mol_type = other DNA
gaaagcggctcttgcagcttacgaacacggcctggacgaaaacggaaaaaatcactggattctacagtcagccag

SEQ ID NO: 18032 - DNA, 75 bp, synthetic construct
  source 1..75: mol_type = other DNA
acctgaaggagccaacccaaattattgctggtgggatgttgatccagttgatgctgcaaatgaagccatgagtta

SEQ ID NO: 18033 - DNA, 75 bp, synthetic construct
  source 1..75: mol_type = other DNA
ccgctatgatacagaaggctatgtgacagaacatatcacacaggaagaagaacagtatgcgcaggcgcgcctgga

SEQ ID NO: 18034 - DNA, 75 bp, synthetic construct
  source 1..75: mol_type = other DNA
caaataatttctattcaaaaatgcaagagcgtgggattttatggagcgacaaaagtataaatatagaatggccgg

SEQ ID NO: 18035 - DNA, 75 bp, synthetic construct
  source 1..75: mol_type = other DNA
aatgtgtggctgccgccatcaccaggcgaacaggtggtaattgcctgcattggcggcaacccggaaaccgccatg

SEQ ID NO: 18036 - DNA, 75 bp, synthetic construct
  source 1..75: mol_type = other DNA
agagttgtatcctgtatcagtccttcaaaatttcacgagtgctttattaactggatgcgagattgccatacttca

SEQ ID NO: 18037 - DNA, 75 bp, synthetic construct
  source 1..75: mol_type = other DNA
gtactctcatcgcgtctgccgttttattttcctttaattcgactgcagcaacgtcatattttgaagcccgcaatg

SEQ ID NO: 18038 - DNA, 75 bp, synthetic construct
  source 1..75: mol_type = other DNA
attgactacggtaaaacgccagcatcgccccgctcttgatctttctcgcctgcctgaacttttgtcgcgtattgg

SEQ ID NO: 18039 - DNA, 75 bp, synthetic construct
  source 1..75: mol_type = other DNA
agcagcagatccgacaggccagaaacagtggcgggattgctcagcaggattatctggccctgatttctgaggtga

SEQ ID NO: 18040 - DNA, 75 bp, synthetic construct
  source 1..75: mol_type = other DNA
tgtgctgtcagatatgtccagaatcatggctcagatagctttaatgaaagcggtaaaaggcattgcttccgcgct

SEQ ID NO: 18041 - DNA, 75 bp, synthetic construct
  source 1..75: mol_type = other DNA
gacatctatcagaattaattgagctgtggtattccctgtatggtcaaacactcgcagaccccaagcgcctcatgg

SEQ ID NO: 18042 - DNA, 75 bp, synthetic construct
  source 1..75: mol_type = other DNA
atgaatgaccgtgaaacgcgctgttacagcggggaagtgcgggcagaacaatatgataatgccccgactcatatt

SEQ ID NO: 18043 - DNA, 75 bp, synthetic construct
  source 1..75: mol_type = other DNA
ccgatataaaaatgacgatgatttacgcccacttttcgcccgatcaccttgaagatgcggtaactaaaaaccctt

SEQ ID NO: 18044 - DNA, 75 bp, synthetic construct
  source 1..75: mol_type = other DNA
ttgggatcgtctgggtaaagttcagcatatgtgtgtcacctggctggtggcgctcggttcaaacctgtccgcact

SEQ ID NO: 18045 - DNA, 75 bp, synthetic construct
  source 1..75: mol_type = other DNA
atcgaagagatttctggtggcaaatatcaagcaagcgaaatgcttgaaataagcaaaaagaaccttctggcagca

SEQ ID NO: 18046 - DNA, 75 bp, synthetic construct
  source 1..75: mol_type = other DNA
acaggctggtatggaatcacattacgggcaccctggtggtggcctccgaactggcccgctcacggggaaaaggcg

SEQ ID NO: 18047 - DNA, 75 bp, synthetic construct
  source 1..75: mol_type = other DNA
cgccagaaccagagacgtcttgcctacgcatcagaggtttaccggatttatacctggataaagagcagtaaaggc

SEQ ID NO: 18048 - DNA, 75 bp, synthetic construct
  source 1..75: mol_type = other DNA
gtcagcagcaggcgctggcttacgacgacccgcacggcaggctggtgattggcggtattggctcaacgcgggcac

SEQ ID NO: 18049 - DNA, 75 bp, synthetic construct
  source 1..75: mol_type = other DNA
ttgctgcggctattggtggcggggctattgctatagcatctgtgttaatcactggcccaagtggtaacgatggtc

SEQ ID NO: 18050 - DNA, 75 bp, synthetic construct
  source 1..75: mol_type = other DNA
gttgtgctggctgatgaacaactgaaagagatcggaaatctgcaaatagtgcctgatgggcgcacatccgcgcgc

SEQ ID NO: 18051 - DNA, 75 bp, synthetic construct
  source 1..75: mol_type = other DNA
gttgccagcttcttttcacatcgtagagaagtcctgaaacctctgtttggcgcaatgctggcggcaccctgttcg

SEQ ID NO: 18052 - DNA, 75 bp, synthetic construct
  source 1..75: mol_type = other DNA
cttatctgacacgaaaatcgctgtgcgagattcgttacagagacggatacagggaggtggcggctttcatggctt

SEQ ID NO: 18053 - DNA, 75 bp, synthetic construct
  source 1..75: mol_type = other DNA
gcaccgttgtgctgattaagatgaagcgcacccaatacatctgggtaactgttgttccggctgtatggctgctta

SEQ ID NO: 18054 - DNA, 75 bp, synthetic construct
  source 1..75: mol_type = other DNA
gaaagacccgagttaggggctgggatcagaggttgttcgtatggtcgttaccttctgctgttcagggtactggat

SEQ ID NO: 18055 - DNA, 75 bp, synthetic construct
  source 1..75: mol_type = other DNA
agcggttataaagagaaatatatctcacatggtgccagagatttaactacactaggctattcctcttgttcagca

SEQ ID NO: 18056 - DNA, 75 bp, synthetic construct
  source 1..75: mol_type = other DNA
ggtgggaacagattgaaataggcgacattgctgatgtcatctctggtgggacaccaaaatcgggagtcgctgaaa

SEQ ID NO: 18057 - DNA, 75 bp, synthetic construct
  source 1..75: mol_type = other DNA
gataagtggttttacaggctcatcagggatggggcctttccggctcccatcaagctgggccgcagctcccgctgg

SEQ ID NO: 18058 - DNA, 75 bp, synthetic construct
  source 1..75: mol_type = other DNA
gaaaatatgagccttatcttctcaatgataattccatactctccagaattgcccttcttaaacttggtattttcg

SEQ ID NO: 18059 - DNA, 75 bp, synthetic construct
  source 1..75: mol_type = other DNA
gcatggcaactggtcagtaagcttgatgcccgccggcggcagacacaaaaagtggcagcatggtttgtgccgtat

SEQ ID NO: 18060 - DNA, 75 bp, synthetic construct
  source 1..75: mol_type = other DNA
gctggtccgctggtgggtccggttctcgccgcgcagatgggctacctgcctggcacgctgtggctgctggcgggg

SEQ ID NO: 18061 - DNA, 75 bp, synthetic construct
  source 1..75: mol_type = other DNA
cagctcgcgtcactggagcgggaagagtttaccgcgctctttctcgataaccagcatcgcctgatagcccacgaa

SEQ ID NO: 18062 - DNA, 75 bp, synthetic construct
  source 1..75: mol_type = other DNA
ccgaacagtatcacccggtgataccgattggtgcgggcaacgaagtgaccgtggtgttccaggacggcttccagc

SEQ ID NO: 18063 - DNA, 75 bp, synthetic construct
  source 1..75: mol_type = other DNA
agtggttgccaccggcgcagagtgccgatgcggccctgctgcccgcgttgcgtctggggaatgcccgggcagatg

SEQ ID NO: 18064 - DNA, 75 bp, synthetic construct
  source 1..75: mol_type = other DNA
actgagcacgtatgagaaagagctggcgctgatgggtgaggattatcaggacattttccgccagcaggtcaggga

SEQ ID NO: 18065 - DNA, 75 bp, synthetic construct
  source 1..75: mol_type = other DNA
gcgttaaaaacagctgcgatattgttgatattaccggttatatccacaacaatcaggggctgtgtgatcggtgac

SEQ ID NO: 18066 - DNA, 75 bp, synthetic construct
  source 1..75: mol_type = other DNA
atttgtggaggcacactggttgcacaatagtcgtgttttcggcaccagtatgaatggtgtaagtatataccagga

SEQ ID NO: 18067 - DNA, 75 bp, synthetic construct
  source 1..75: mol_type = other DNA
ccaccacgtaagtctatcggaaagaaatcttgcggatggttgttaagtgaccttctctgctggatacagaccaga

SEQ ID NO: 18068 - DNA, 75 bp, synthetic construct
  source 1..75: mol_type = other DNA
ggcgtacttgttccacgcaaagactacctgattcgcaccgcctacgacctcgcagatgagctgaacgattacggc

SEQ ID NO: 18069 - DNA, 75 bp, synthetic construct
  source 1..75: mol_type = other DNA
ggcaaaatctcaacgacttgatcgaccgtgaattcaatggtgttcagacgcggatggcagaaaaacttggaactc

SEQ ID NO: 18070 - DNA, 75 bp, synthetic construct
  source 1..75: mol_type = other DNA
catggcctcgctgcgcctgctgccgtcctatctgcgcgatccgcttattcgccacctctccttcctgcgcaaaaa

SEQ ID NO: 18071 - DNA, 75 bp, synthetic construct
  source 1..75: mol_type = other DNA
ccagttaacgctggcgtgggctgccgcgctgatattaccgctgaccacaccgtcgatgatggcagacttcagcgc

SEQ ID NO: 18072 - DNA, 75 bp, synthetic construct
  source 1..75: mol_type = other DNA
atgatagtagctatgtattggttattgttctttctcacgttagaaacatatttcggggtgttttcctttaaaaga

SEQ ID NO: 18073 - DNA, 75 bp, synthetic construct
  source 1..75: mol_type = other DNA
actgacgagcgtacgcagattaacaacggcttaggttggcgtcatttcactcccacatggatgtcgggcatcaac

SEQ ID NO: 18074 - DNA, 75 bp, synthetic construct
  source 1..75: mol_type = other DNA
gatgaattatttcgcttacttgatgatcacaattccttgaaaaggatttcatctgccagagtattacagttaaga

SEQ ID NO: 18075 - DNA, 75 bp, synthetic construct
  source 1..75: mol_type = other DNA
aggaacagggagttctggtgcagagggtattacgtcgatacggtgggtaagaacacggcgaagatacaggattac

SEQ ID NO: 18076 - DNA, 75 bp, synthetic construct
  source 1..75: mol_type = other DNA
tgtcggctgccattctggcgctgattactgcaggcgcatctgcgcctgacattctcgaccagtttctggatgaaa

SEQ ID NO: 18077 - DNA, 75 bp, synthetic construct
  source 1..75: mol_type = other DNA
gaactgaaaaactgccttaccagtctgtgtgcagaggaaggggtaactcaggcagagttgatagaaaggcttatc

SEQ ID NO: 18078 - DNA, 75 bp, synthetic construct
  source 1..75: mol_type = other DNA
ttgccgccgggcatgagatggcttcggaactgaaagctgaatgtggtgccgttgatatgcgcagtgtggcaaagc

SEQ ID NO: 18079 - DNA, 75 bp, synthetic construct
  source 1..75: mol_type = other DNA
cgcagcgttacgccgggaactgaaagcccgtatcacagttgccagctactttaagccaatgtgtgccgcgctgga

SEQ ID NO: 18080 - DNA, 75 bp, synthetic construct
  source 1..75: mol_type = other DNA
cactgacggcagtgtgtcgagcgttgaagctgtagcagaacccgatgaacctgaagaaatgtggacggtgaaacg

SEQ ID NO: 18081 - DNA, 75 bp, synthetic construct
  source 1..75: mol_type = other DNA
gtgatttttgaagatgatgtctacggcgaactggcaacggagtatccgcgcccgcggaccattcattcctgggat

SEQ ID NO: 18082 - DNA, 75 bp, synthetic construct
  source 1..75: mol_type = other DNA
gtcagggataaaacccagctatgggactcacagctacggctgggtatcatttccgacgagaataaacaaaaatta

SEQ ID NO: 18083 - DNA, 75 bp, synthetic construct
  source 1..75: mol_type = other DNA
cagttcgcatattatctggccggctttccctggtatgaggggaatatcctgtttgcctttgcagtggcggcacag

SEQ ID NO: 18084 - DNA, 75 bp, synthetic construct
  source 1..75: mol_type = other DNA
tgctaacgacccgataaatattcttgagcgtctggaaatggagggcgttcaggcaaggatgattgcagatccgca

SEQ ID NO: 18085 - DNA, 75 bp, synthetic construct
  source 1..75: mol_type = other DNA
caccgccagcaaccgcatcacgtttgagcgcgacagccagtaccggatcacgggtgtcagtcacaccgacgggat

SEQ ID NO: 18086 - DNA, 75 bp, synthetic construct
  source 1..75: mol_type = other DNA
ggactgtttggtgcgcgctactcccactatccgtgtgtgggcggactctatgccgtactgcgtctgatcaaggat

SEQ ID NO: 18087 - DNA, 75 bp, synthetic construct
  source 1..75: mol_type = other DNA
cgccggggtgacgctgtcgggcactgtcatgcagaccatgcagaatgttgagttaaccatcacgctgagggagta

SEQ ID NO: 18088 - DNA, 75 bp, synthetic construct
  source 1..75: mol_type = other DNA
aggatgggttgatgcttttggttatgtcctacaccaaaaaagaagcaatgcgtatcaaaattgcttacatcaacg

SEQ ID NO: 18089 - DNA, 75 bp, synthetic construct
  source 1..75: mol_type = other DNA
accactctggcggattactgcgagcatttcgctgaaacgatcatcgagtgccacgatctggcgctgaaaatggcg

SEQ ID NO: 18090 - DNA, 75 bp, synthetic construct
  source 1..75: mol_type = other DNA
aatttctcaaaccgaaaaccattgtgttaggcggtgatgtccgcctcaccagcgaaaccttaaaactggcgctgg

SEQ ID NO: 18091 - DNA, 75 bp, synthetic construct
  source 1..75: mol_type = other DNA
atggttaaactggctttacaaccaagggattctgttgcctgtattgcccgggagcacgatatcaatgataatctt

SEQ ID NO: 18092 - DNA, 75 bp, synthetic construct
  source 1..75: mol_type = other DNA
ccgtgccggtggtaacggtcaaggcagatacgcgcgttaccctggacacgccggaagtggtctgcaccaacaagc

SEQ ID NO: 18093 - DNA, 75 bp, synthetic construct
  source 1..75: mol_type = other DNA
ctcctcccccacctggagcaatacctgaagtcccacagggggaaccctcatggggtgatattgccactgacctgc

SEQ ID NO: 18094 - DNA, 75 bp, synthetic construct
  source 1..75: mol_type = other DNA
gtgttcttttcgggattatttcaacgaaaaagtgacgcaccggtgaccacgccagcagagctggcggatgccatc

SEQ ID NO: 18095 - DNA, 75 bp, synthetic construct
  source 1..75: mol_type = other DNA
ccaacaggaaaaatgctgggaatggtttcagggacccttgcatgggttgatgagccgccgctttcaccagaacag

SEQ ID NO: 18096 - DNA, 75 bp, synthetic construct
  source 1..75: mol_type = other DNA
gtggttcaggtgcagcggcggtttgcaccggaagccgtcagccattcactggcactggcggcgtcactggatgcg

SEQ ID NO: 18097 - DNA, 75 bp, synthetic construct
  source 1..75: mol_type = other DNA
tactgcaaaacttcccgaaccgcgtggttgccgggctgctgaatgtggtgatcttcccgaccggacgtcattatc

SEQ ID NO: 18098 - DNA, 75 bp, synthetic construct
  source 1..75: mol_type = other DNA
atgactaagaaaataaaatgtgcttaccacctttgcgataaagaagttaaagaaagcaaaagcattaaaagacca

SEQ ID NO: 18099 - DNA, 75 bp, synthetic construct
  source 1..75: mol_type = other DNA
gctttacctcgcctctgccgttctgaagcgttatgacgacgaaggccgtaatgaagccgacctgccgctggtgca

SEQ ID NO: 18100 - DNA, 75 bp, synthetic construct
  source 1..75: mol_type = other DNA
tgtgtgatgcggtgaactttctcgttgaaaaatacgcactggtgcgtaccgaccagccgggattcagcgcctgta

SEQ ID NO: 18101 - DNA, 75 bp, synthetic construct
  source 1..75: mol_type = other DNA
ccaataaagtcatcagatgggtaacagatcctgtcgatccggtaaccggcgcatactgcgacgaacgtaccgact

SEQ ID NO: 18102 - DNA, 75 bp, synthetic construct
  source 1..75: mol_type = other DNA
caaagtgttcggcaacctgatggtcgatgtggtcgccaccaacgaaaaactgcatgtgcgccaggtcaatatcgt

SEQ ID NO: 18103 - DNA, 75 bp, synthetic construct
  source 1..75: mol_type = other DNA
ggcactggcggcatcactggatgcccaggggtacagcgttaatgacatcattcatatcctgatggcggaaggagg

SEQ ID NO: 18104 - DNA, 75 bp, synthetic construct
  source 1..75: mol_type = other DNA
ttaatgtgaaataccgttatgagttcacggatcacctgggcggcattgtcgcgctgagttatgcatcggtgaaga

SEQ ID NO: 18105 - DNA, 75 bp, synthetic construct
  source 1..75: mol_type = other DNA
agctatgcccctgagccgccgctgcctgagccggtgacgcgcccggtcgagctgtacgttaacggcgaactggtg

SEQ ID NO: 18106 - DNA, 75 bp, synthetic construct
  source 1..75: mol_type = other DNA
atggctttttccccatatcggagaaagaaaaatttgaggcatcaggtctgtggcctgatgatggtgtaatagtca

SEQ ID NO: 18107 - DNA, 75 bp, synthetic construct
  source 1..75: mol_type = other DNA
gaactggaaaagccccaccaccagctggtggatacgtatacgtcactgaaccggcagtatgtggagctgcagagt

SEQ ID NO: 18108 - DNA, 75 bp, synthetic construct
  source 1..75: mol_type = other DNA
acggcgaacgaagcactgattaacgaagtgaaagccgtactgaacgacgaaacagttcgccccgtggcggacaga

SEQ ID NO: 18109 - DNA, 75 bp, synthetic construct
  source 1..75: mol_type = other DNA
gtggctgaccgtctgacggttcgcagcgcagaaatcatcccgtatcgcgtggaagccaccatttttctctatccg

SEQ ID NO: 18110 - DNA, 75 bp, synthetic construct
  source 1..75: mol_type = other DNA
gcaggggcttatcggtcaggacgtggcgttgtccgccattgctgccgcactgcatgtgcacggtgtgcaacgcgt

SEQ ID NO: 18111 - DNA, 75 bp, synthetic construct
  source 1..75: mol_type = other DNA
aaaatctctgggtcatcagcttgatagtcgttacagacaggttgctgcacgtctttgcgaaaatgaggctgtcga

SEQ ID NO: 18112 - DNA, 75 bp, synthetic construct
  source 1..75: mol_type = other DNA
cgcgataccaatctacaccgcaaatctcagggacgccctcttatcaaaattggccaactccactacggaaaagaa

SEQ ID NO: 18113 - DNA, 75 bp, synthetic construct
  source 1..75: mol_type = other DNA
gagtttataaaaaaaccaagttacggaacgtcatctaagtctaataaagaaggactcattcctgtattaagaatg

SEQ ID NO: 18114 - DNA, 75 bp, synthetic construct
  source 1..75: mol_type = other DNA
tctccgtatcagtctccgtgccttataccgatgtctggacgcataagcccgttcagttctacccgggtaaacatc

SEQ ID NO: 18115 - DNA, 75 bp, synthetic construct
  source 1..75: mol_type = other DNA
tggcgtacccttatgccctccagtctgtttacgctgcaaaaggccaatggcccgaaggtaaaggcgtggatatag

SEQ ID NO: 18116 - DNA, 75 bp, synthetic construct
  source 1..75: mol_type = other DNA
tcagcgaggggaatctcctgtctcgcgaaaatgaaagcctcgacaatgaaattaccgctgcactggaagttggtt

SEQ ID NO: 18117 - DNA, 75 bp, synthetic construct
  source 1..75: mol_type = other DNA
gaaaatcaggactatattttggtttccccaaatcgggaaatcaaaggtcgaggaggcgatcgccgtagcaaagac

SEQ ID NO: 18118 - DNA, 75 bp, synthetic construct
  source 1..75: mol_type = other DNA
gctggctgcaacgccgaaagcggttaaggtcgcgtatgatcttgctaacggaaaatatacagcgcaggatgccac

SEQ ID NO: 18119 - DNA, 75 bp, synthetic construct
  source 1..75: mol_type = other DNA
tcatgctcagaacgggcttcaagaaaacggcaatctactcatgggttaagacgggcacgtttccacagccagtta

SEQ ID NO: 18120 - DNA, 75 bp, synthetic construct
  source 1..75: mol_type = other DNA
gctggtggcgtggaatgtcttgaaagctggttacttcgtgaaaaaggctgtcagtggcctcattccgactggcac

SEQ ID NO: 18121 - DNA, 75 bp, synthetic construct
  source 1..75: mol_type = other DNA
tgctccatgaagattacaatgatgggaaaaaactgatccccactcttcaggaaaatctccggcataacaaacgcg

SEQ ID NO: 18122 - DNA, 75 bp, synthetic construct
  source 1..75: mol_type = other DNA
tgtattctgggatttgcaggagtccggcaccgatgctgacctgcttaacgagtcaggcgtcacaacgctgattcg

SEQ ID NO: 18123 - DNA, 75 bp, synthetic construct
  source 1..75: mol_type = other DNA
aacggaacggccagcagttacaccttcctcacgacaaatcgctgtggcccactgaacaatacgtcggctggcatc

SEQ ID NO: 18124 - DNA, 75 bp, synthetic construct
  source 1..75: mol_type = other DNA
cgaatgacagttacgttaaccggccagcacaacgacaccggccagccactttcgttaaccatccctgtgagttga

SEQ ID NO: 18125 - DNA, 75 bp, synthetic construct
  source 1..75: mol_type = other DNA
aagagctactgactggataccagatccccaaaagtaactatattgttacacaaccagggagatcggctgtaactg

SEQ ID NO: 18126 - DNA, 75 bp, synthetic construct
  source 1..75: mol_type = other DNA
tttacgatatctacccgtacatttgtgcgacggtgtttttcctcggcagctggctgcgctacgactacgggcagt

SEQ ID NO: 18127 - DNA, 75 bp, synthetic construct
  source 1..75: mol_type = other DNA
gccacctctccttcctgcgcaaaaaacaggaagccgatcgccggaaaggcaaaaagagctggcaggctgaacgct

SEQ ID NO: 18128 - DNA, 75 bp, synthetic construct
  source 1..75: mol_type = other DNA
ttcccgggccttatccggcagactcacagaaaaatcagggcagccgcggcagacggggcttacgatacccggctc

SEQ ID NO: 18129 - DNA, 75 bp, synthetic construct
  source 1..75: mol_type = other DNA
tggatgtttttgatgacagaacaagcgaatgtctttctgaagagattaagatatatcaagaatgctatgaaaaat

SEQ ID NO: 18130 - DNA, 75 bp, synthetic construct
  source 1..75: mol_type = other DNA
tattctgaccttgccatcaccaccgttctggtcattaaacgcgtgttcaggttgaccctgcgggctgcacagggt

SEQ ID NO: 18131 - DNA, 75 bp, synthetic construct
  source 1..75: mol_type = other DNA
ggccacttaacagtcaatctgtaaataaatacatccttaacgttcagaatatctacagaaattctcccgttccgg

SEQ ID NO: 18132 - DNA, 75 bp, synthetic construct
  source 1..75: mol_type = other DNA
tggcacacacccggcggtgtgtgcctgcggagtcgtgcggcttcgtggtgagaacgccggagggggagcggtatc

SEQ ID NO: 18133 - DNA, 75 bp, synthetic construct
  source 1..75: mol_type = other DNA
ttctgtatttttgtttttctgccctgactgacctgcagaaacctgatgaaagaaaaaatgatgaaaggaatgaag

SEQ ID NO: 18134 - DNA, 75 bp, synthetic construct
  source 1..75: mol_type = other DNA
tgtcgcagtggcgatcgctggtttcaatcagatgaatcgtggcggcccagcgggaaatgccgtggtcgcgcattg

SEQ ID NO: 18135 - DNA, 75 bp, synthetic construct
  source 1..75: mol_type = other DNA
tatcagcgcttattggcacgtctggattatctgacgaagctcgacactaaagcatcaggtcagcgtaactttggc

SEQ ID NO: 18136 - DNA, 75 bp, synthetic construct
  source 1..75: mol_type = other DNA
tcagggcatcatcgccgtcagacctcgcaggaaaactgacgcaaaaactgaaggaaggctggcaaccctatggta

SEQ ID NO: 18137 - DNA, 75 bp, synthetic construct
  source 1..75: mol_type = other DNA
gtcgctgaaggggatatgacctctccggtagtttcaccggggggagatggtacccggactgttgttgttgaacca

SEQ ID NO: 18138 - DNA, 75 bp, synthetic construct
  source 1..75: mol_type = other DNA
cacaaggagaacactggcggcaatcagcatcacgatagcgataatgaaactggcgagacggcagatcactcaatt

SEQ ID NO: 18139 - DNA, 75 bp, synthetic construct
  source 1..75: mol_type = other DNA
gcattagcgaatcagacgctgatcaaacatacatttactctaaagaaacaggtcggatgctgtgtagtgactgcg

SEQ ID NO: 18140 - DNA, 75 bp, synthetic construct
  source 1..75: mol_type = other DNA
tcccgcaaatccgcgcgagacgcagccgcatttcttcgaatcccgattccctgagctgttaaagctgctcgatac

SEQ ID NO: 18141 - DNA, 75 bp, synthetic construct
  source 1..75: mol_type = other DNA
gggcaggggagccgaaaggctcgccggtctccgttgacgccggtactgcgaaccctgttcagtctgccaccagtg

SEQ ID NO: 18142 - DNA, 75 bp, synthetic construct
  source 1..75: mol_type = other DNA
ccgccgtttcggctgcacgctggagcactggtacgccgaacagggctgcaatttctgtggctggcagttgtatga

SEQ ID NO: 18143 - DNA, 75 bp, synthetic construct
  source 1..75: mol_type = other DNA
tatatatatgcatatggaagttggacgttactcatcatcccatcactctggctatatctgaaaaccagagcgaag

SEQ ID NO: 18144 - DNA, 75 bp, synthetic construct
  source 1..75: mol_type = other DNA
agacggcagcattatggatagcgccttatattgataatcaggatgtttatcatcagccatccagtgtgttttttg

SEQ ID NO: 18145 - DNA, 75 bp, synthetic construct
  source 1..75: mol_type = other DNA
tggtgaaacccgcgtgttacgtccgggctacgtcaagcccaaacacgaatttaattaccagcaggcggttgagcg

SEQ ID NO: 18146 - DNA, 75 bp, synthetic construct
  source 1..75: mol_type = other DNA
tgagacgaagcagcatgacggttccgggcaacgtaattatggttgcagtcgtggggtagggcgtctactggatgg

SEQ ID NO: 18147 - DNA, 75 bp, synthetic construct
  source 1..75: mol_type = other DNA
tgtgctctgggtcaagcgtggtgatgtggaagcgatgcagaaagccatggagagagcccgttatctcgtgaagta

SEQ ID NO: 18148 - DNA, 75 bp, synthetic construct
  source 1..75: mol_type = other DNA
atgtcagacaaactcataacgctggcgaagatcctctgtgtaattgtcggcatttcattttcactaatgctggtt

SEQ ID NO: 18149 - DNA, 75 bp, synthetic construct
  source 1..75: mol_type = other DNA
cgcgtggccaaccccgggatgtcgtgttccatagcgaccagggaagccagtatacaggccttaaatatcaacaac

SEQ ID NO: 18150 - DNA, 75 bp, synthetic construct
  source 1..75: mol_type = other DNA
ctgcccgcaggtatgtcggagcgggaacttgatgcccgtctttacgggagtgcctccacagtacctgtcgtactt

SEQ ID NO: 18151 - DNA, 75 bp, synthetic construct
  source 1..75: mol_type = other DNA
agaagaattctccacagtgctggcggatttacagcgcacatttgaggggaagatggcctcgcaggcacaagcgtt

SEQ ID NO: 18152 - DNA, 75 bp, synthetic construct
  source 1..75: mol_type = other DNA
actgctcccggaacgtagcagcatgcttcatcgaacagattttcacgatgattaccaaacggtaatggcatacaa

SEQ ID NO: 18153 - DNA, 75 bp, synthetic construct
  source 1..75: mol_type = other DNA
atgagacactttatctatcaggacgaaaaatcacataaattctgggcagttgagcaacagggaaacgagttgcat

SEQ ID NO: 18154 - DNA, 75 bp, synthetic construct
  source 1..75: mol_type = other DNA
gttgtctggtttttttcagaagatggtaagaactggtacgaagaacaaaagtattttgctgatgacacgataaaa

SEQ ID NO: 18155 - DNA, 75 bp, synthetic construct
  source 1..75: mol_type = other DNA
ggcaaacgctgaaagcgtggaagccatcaagaaaacactcacggaatcccgtggcaagggggcgttccgcaatat

SEQ ID NO: 18156 - DNA, 75 bp, synthetic construct
  source 1..75: mol_type = other DNA
tacaccatgccagccgtctgttaaatcatggcccaactgtcttgatcaccagtttcgatgagcaatcccagcggc

SEQ ID NO: 18157 - DNA, 75 bp, synthetic construct
  source 1..75: mol_type = other DNA
atgaaacaccggacctggatcactgaagctttacgtcttcactttgaagaacatttaccccgggttgtggccggg

SEQ ID NO: 18158 - DNA, 75 bp, synthetic construct
  source 1..75: mol_type = other DNA
gagtcatgggaacgctacagcgttctggtcagccgtgtggatacagcaaatcccgaatggccacaaaagcctgag

SEQ ID NO: 18159 - DNA, 75 bp, synthetic construct
  source 1..75: mol_type = other DNA
atgcgcaggcccgtgatacagggttcaggtcactggagtacgataactttccggaaatcagtgaagcgaacattc

SEQ ID NO: 18160 - DNA, 75 bp, synthetic construct
  source 1..75: mol_type = other DNA
atgatgccacgcattaaacctcttctggttctttgtgccgccttactgacggtgacgcctgcagcgtcagcggat

SEQ ID NO: 18161 - DNA, 75 bp, synthetic construct
  source 1..75: mol_type = other DNA
tgtgcaggcctccacccgggatgaaattgaacgactctggaatccgcagggcatggccgcgcagcctgcacaacc

SEQ ID NO: 18162 - DNA, 75 bp, synthetic construct
  source 1..75: mol_type = other DNA
cgggcgcggtgacgggggtgacggacggcgcgggccgccgttttcacctggtgctgaccacacaggcacagcggg

SEQ ID NO: 18163 - DNA, 75 bp, synthetic construct
  source 1..75: mol_type = other DNA
atgatatcggataaactcataacgctggcgaagatcctctgtgtaatcgtcggcatttcatttttagtcatgctg

SEQ ID NO: 18164 - DNA, 75 bp, synthetic construct
  source 1..75: mol_type = other DNA
caaatcttcacgaatgccagctggttctacatccttgctgtggccctgattttactgagtgtcacgttccttgga

SEQ ID NO: 18165 - DNA, 75 bp, synthetic construct
  source 1..75: mol_type = other DNA
tgctgggataacagcccaatggaacgcttcttcaggagtctgaagaacgaatggatgccggtggtgggttacgta

SEQ ID NO: 18166 - DNA, 75 bp, synthetic construct
  source 1..75: mol_type = other DNA
aggttcccgcgtggatgcgacctctgttgccgttgctctgcaacaccggggggaacgatccggaagaactgctga

SEQ ID NO: 18167 - DNA, 75 bp, synthetic construct
  source 1..75: mol_type = other DNA
gtacaggtcgcaatgcgaaaatgacaggcgtgactggggattctacggattgattgccgaggaagtaggagaaat

SEQ ID NO: 18168 - DNA, 75 bp, synthetic construct
  source 1..75: mol_type = other DNA
gggaccgccagagtttatcactgcaacgattctgataaatgcctgaaagtggtggcggattcaccggtaaccatc

SEQ ID NO: 18169 - DNA, 75 bp, synthetic construct
  source 1..75: mol_type = other DNA
gatgatcacatccggtctgttcagggtaaagaatgctatgaagatgagatgttcagcatcagatactttaagaaa

SEQ ID NO: 18170 - DNA, 75 bp, synthetic construct
  source 1..75: mol_type = other DNA
gaaactgtcgaaggaaaaatgcgcccaggttaacgccattgagcgggataaggcgctggcatgggtggagcgcaa

SEQ ID NO: 18171 - DNA, 75 bp, synthetic construct
  source 1..75: mol_type = other DNA
ctgctggatgcattacctgccgtcatagagaagtccacagaaccaatgaaatccattgacggtattaaaatcatt

SEQ ID NO: 18172 - DNA, 75 bp, synthetic construct
  source 1..75: mol_type = other DNA
aggctgaacgatatggagcatcgctgtcgctttgattccgatgtgcttgttgaacgcctgacacgccagacgctg

SEQ ID NO: 18173 - DNA, 75 bp, synthetic construct
  source 1..75: mol_type = other DNA
ggcatcataatataatttgtagtgagtgccgtaaaagcgaagttatgcagcgcatattgtcgttttatcaggggg

SEQ ID NO: 18174 - DNA, 75 bp, synthetic construct
  source 1..75: mol_type = other DNA
atgaaccgtgttctgtgtgtggtgattattgtcctgctggtggcctgtggtgcgcttagtctggggctgaatcat

SEQ ID NO: 18175 - DNA, 75 bp, synthetic construct
  source 1..75: mol_type = other DNA
ccgccgagcgcgaaagcctgctggcgttgccggacaccaaggatgagttgatccgtcactacacgttcagcgaaa

SEQ ID NO: 18176 - DNA, 75 bp, synthetic construct
  source 1..75: mol_type = other DNA
taccgcaatctgcgccctctgtatcccaaaacggtaattcgtatccgcaaaggtagctctaacggtgtggaactt

SEQ ID NO: 18177 - DNA, 75 bp, synthetic construct
  source 1..75: mol_type = other DNA
ttgcggattcacttgtcaaaggatgggaaacgagaatcccagcaatgaaatttacggattgggatcaattcaggt

SEQ ID NO: 18178 - DNA, 75 bp, synthetic construct
  source 1..75: mol_type = other DNA
tcgtaatttttactgtgtcctgttttatagcgccaacgtatgccgctgatccctgtaaatccgttttttgtcttt

SEQ ID NO: 18179 - DNA, 75 bp, synthetic construct
  source 1..75: mol_type = other DNA
ccggctacgggttattcccgtctgaacaggcgcgtaaggactggcaaaacgcccgcaaaaaactctcgagggcaa

SEQ ID NO: 18180 - DNA, 75 bp, synthetic construct
  source 1..75: mol_type = other DNA
cgccagttgcgggtggaaaaaatcctgaatcgttcgggcatccagcctctgcacagcaaatgctcgtttgcaaat

SEQ ID NO: 18181 - DNA, 75 bp, synthetic construct
  source 1..75: mol_type = other DNA
ggtgaaatgctggttggttcacgacggatatcccaggacatcagcacccgtgatgagggcggtgacgggaaagtg

SEQ ID NO: 18182 - DNA, 75 bp, synthetic construct
  source 1..75: mol_type = other DNA
gattacctcccgccgggcgaattcatcgctggccatggcaatcagcaaagggcgtctgattcgcgtgaatcaggg

SEQ ID NO: 18183 - DNA, 75 bp, synthetic construct
  source 1..75: mol_type = other DNA
ggacgctggctgactccgggttatcgctcccttgccggacgtgaacgtctggacgatttactttacctgccgcag

SEQ ID NO: 18184 - DNA, 75 bp, synthetic construct
  source 1..75: mol_type = other DNA
tgttgaactcgtacgccagagtgggcgtgagacgttacggcaactggaagtcaagacaggtgcgacaagatatct

SEQ ID NO: 18185 - DNA, 75 bp, synthetic construct
  source 1..75: mol_type = other DNA
gacggagaaatacgccgctacgacaggcgcctgaatataatctgtcgcgagtgccggaagagcgaagctatgcag

SEQ ID NO: 18186 - DNA, 75 bp, synthetic construct
  source 1..75: mol_type = other DNA
cggctggattgagggaacgctggaggctgacggcgggcagcaggatgaagtgattgccacgctgatggtgtgggc

SEQ ID NO: 18187 - DNA, 75 bp, synthetic construct
  source 1..75: mol_type = other DNA
cctcattcagcgggccctgaaaactctggaccgtcatcttcatgaacccggtgtggccttcacctccacgcatgc

SEQ ID NO: 18188 - DNA, 75 bp, synthetic construct
  source 1..75: mol_type = other DNA
ggtacaggcactgggcctggtggatatccgggtgccggaccatctgatagtcggtggcaaccaggttttctcctt

SEQ ID NO: 18189 - DNA, 75 bp, synthetic construct
  source 1..75: mol_type = other DNA
tagaccgcgcatcacttgcactttctcacagtgaaaacatgatggaaatattgcggatgtgccttgaatcctttg

SEQ ID NO: 18190 - DNA, 75 bp, synthetic construct
  source 1..75: mol_type = other DNA
tggaaccgtctgtgtgacaacgtactgccggaaaaaaccatgccgtttgacctgctgacggttctgcccacccgc

SEQ ID NO: 18191 - DNA, 75 bp, synthetic construct
  source 1..75: mol_type = other DNA
ttattaccgtctccgaagtggaatcgacaagataaccgcgcaggttaactacctgcaggagtacatcaggacgca

SEQ ID NO: 18192 - DNA, 75 bp, synthetic construct
  source 1..75: mol_type = other DNA
gagctggcgcacgaagtctggctggagaacacccagccgatgctgtcgcacattaacgtcggcacgggcgttgac

SEQ ID NO: 18193 - DNA, 75 bp, synthetic construct
  source 1..75: mol_type = other DNA
tgtcatggtaagggagaagtcagcacagcgtgcagagggtgtaagggtaaaggtattgtcctggatgaaaaaaga

SEQ ID NO: 18194 - DNA, 75 bp, synthetic construct
  source 1..75: mol_type = other DNA
cgtgactgattccgttcgtcgcatggataagccggaagaagcgaaaaggaatatcacccgtcttgccgaccggaa

SEQ ID NO: 18195 - DNA, 75 bp, synthetic construct
  source 1..75: mol_type = other DNA
gcacttcccgttctacttcaacagtcagacgctggaaatggcggaccgtggctcgattgggcaactgttggtcaa

SEQ ID NO: 18196 - DNA, 75 bp, synthetic construct
  source 1..75: mol_type = other DNA
tgactgtttttcttaatactggcgaacctgttgatgtggttactggtatatatggttcaatgaaagaatgtatgg

SEQ ID NO: 18197 - DNA, 75 bp, synthetic construct
  source 1..75: mol_type = other DNA
acatctgcactgtttgctgccctcgatgtatcagaggaggcagtggccgccgcgcgccgcagccgtgtggaatgg

SEQ ID NO: 18198 - DNA, 75 bp, synthetic construct
  source 1..75: mol_type = other DNA
agcatgggcgatggagaaagcccaagacttacagcagatgctgaactcaattattaccgtctccgaagtggaatc

SEQ ID NO: 18199 - DNA, 75 bp, synthetic construct
  source 1..75: mol_type = other DNA
cacccgtgccctgacgttcctgtcagagctgggactgattacctaccagacggaatatgacccgcttatcgggtg

SEQ ID NO: 18200 - DNA, 75 bp, synthetic construct
  source 1..75: mol_type = other DNA
aaactgcctaaatcagttgttgctcttttttctcatcccggtgaactatctgcccggtcaggtgatgcacttcaa

SEQ ID NO: 18201 - DNA, 75 bp, synthetic construct
  source 1..75: mol_type = other DNA
gtgagcagagtcgcagcgattatttatactctggttatctgcaccatcgtctgcctgtcgtgggcggtcaatcat

SEQ ID NO: 18202 - DNA, 75 bp, synthetic construct
  source 1..75: mol_type = other DNA
ctaacagcaataatccaaccatctctttgtctgcagtgatctatttccctccaaaatttgatgaaacccgtcagt

SEQ ID NO: 18203 - DNA, 75 bp, synthetic construct
  source 1..75: mol_type = other DNA
acatcaagcgtgaaacacggaggaagctggaatagtgcttactcattgcttgggaaactaattgatcttaaagct

SEQ ID NO: 18204 - DNA, 75 bp, synthetic construct
  source 1..75: mol_type = other DNA
ttatgaaggatggtgcactgctcaggagttcttcactttttattgcctacatgggatgccttggatgggggagtg

SEQ ID NO: 18205 - DNA, 75 bp, synthetic construct
  source 1..75: mol_type = other DNA
aggtggtggccgcactgatggccatcggggatgagctgcgccggctgcgtctggccgtcagggaacagggggcgc

SEQ ID NO: 18206 - DNA, 75 bp, synthetic construct
  source 1..75: mol_type = other DNA
aggcggtactgtgagtgaaattagctatcaggcttcaattaccgctggcattcgcatcaaaggagaggagcatgg

SEQ ID NO: 18207 - DNA, 75 bp, synthetic construct
  source 1..75: mol_type = other DNA
aaggatttcttcgcgggaaatgtgtaccgcgagatctgaaagtgaatgaaacggatgctgaatacctggtgcgta

SEQ ID NO: 18208 - DNA, 75 bp, synthetic construct
  source 1..75: mol_type = other DNA
gtatgtcacgggcatacaggaaaagacatcattcccggtaaaacgtataccgaagcagaatgcaaagccctcctg

SEQ ID NO: 18209 - DNA, 75 bp, synthetic construct
  source 1..75: mol_type = other DNA
gcgcttatatcgttttcctggttctgttttgaccgattaccggatactgaagaattacgccaaaacactgaaagg

SEQ ID NO: 18210 - DNA, 75 bp, synthetic construct
  source 1..75: mol_type = other DNA
attttcgggaaacgctgaatacccgccgtgaaaaatcgtggcataacaccaccatcggggaagtggtgaaggaaa

SEQ ID NO: 18211 - DNA, 75 bp, synthetic construct
  source 1..75: mol_type = other DNA
ttcgtgaccgttccgggcgcaccatcgccggcgataaaaccgatgaatggctgcaaccggcctgtaatgaaatgt

SEQ ID NO: 18212 - DNA, 75 bp, synthetic construct
  source 1..75: mol_type = other DNA
agtgctgggagaaaccatcaaggatgcgttgggagaacacattcttgaacgcgtagaaactatccgtaagttgtc

SEQ ID NO: 18213 - DNA, 75 bp, synthetic construct
  source 1..75: mol_type = other DNA
tacacatcgaaggccgcatatgtgggctatcgccacgaatgcgcctacatcctggcaaaaggacgtccggcgctg

SEQ ID NO: 18214 - DNA, 75 bp, synthetic construct
  source 1..75: mol_type = other DNA
gaccggttgccattacgccgtacacactgatgcaggcggtggctattgaaggagatccacaggtcggcccttcat

SEQ ID NO: 18215 - DNA, 75 bp, synthetic construct
  source 1..75: mol_type = other DNA
caaaaagccgacacaacacgaatgatggtgcctttttttcggcagttctgggatatgggagctaaagataaagcg

SEQ ID NO: 18216 - DNA, 75 bp, synthetic construct
  source 1..75: mol_type = other DNA
gcttctggccgcagcattttggcctcattccacagtgggtgaccctggagccccgggtcttcggctggatggacc

SEQ ID NO: 18217 - DNA, 75 bp, synthetic construct
  source 1..75: mol_type = other DNA
atggcatttaaacactatgatgttgtcagggcggcgtcgccgtcagaccttgcggaaaagctgacacacaaactg

SEQ ID NO: 18218 - DNA, 75 bp, synthetic construct
  source 1..75: mol_type = other DNA
agtggtttaagcaaactgctggagccattgttgtttgccgctaccagcgacagccagttaagcaaaacggaatca

SEQ ID NO: 18219 - DNA, 75 bp, synthetic construct
  source 1..75: mol_type = other DNA
acctgattgcgcgcactaaagctgcattacagaagaacccgaaaaatgtgttgctggcggtgtgctggatgcagg

SEQ ID NO: 18220 - DNA, 75 bp, synthetic construct
  source 1..75: mol_type = other DNA
agcacccgaaagcgaaaccggtcacgcagaagaaagcgccaaaagtaccggaagcgcgcgaaggtgaatacatgg

SEQ ID NO: 18221 - DNA, 75 bp, synthetic construct
  source 1..75: mol_type = other DNA
caatactcttaactaccagcgccaattctgaatgctggattgtcacaaacctgcacgggtacggggcaatgaatg

SEQ ID NO: 18222 - DNA, 75 bp, synthetic construct
  source 1..75: mol_type = other DNA
acggaaatcgccgtcaaccgtccaggtgaactgtacacaaaaatcaacggcgtgtgggagcaacatgccgttcct

SEQ ID NO: 18223 - DNA, 75 bp, synthetic construct
  source 1..75: mol_type = other DNA
ttgataatcagacgacaccgaatgccgcgctgagccgtgctgttgcaaaaagtaactccccggtaacgttccata

SEQ ID NO: 18224 - DNA, 75 bp, synthetic construct
  source 1..75: mol_type = other DNA
gcgctgaccatcacggtcaccaacaatgacaaggagcgtacctttggtggtcaggcctgggtggacaatatcgtg

SEQ ID NO: 18225 - DNA, 75 bp, synthetic construct
  source 1..75: mol_type = other DNA
gtggtggcgcagacactgctgtttcttttagcatttgtctttgcgcccacccatgggcttttggcaaatcgtcgg

SEQ ID NO: 18226 - DNA, 75 bp, synthetic construct
  source 1..75: mol_type = other DNA
ttgctgcacctgatgctcttggtcggactgagtatttatatttatcccgtggcgcagaactggatatgaatgggt

SEQ ID NO: 18227 - DNA, 75 bp, synthetic construct
  source 1..75: mol_type = other DNA
tttagcggcaatatactggatacagtgaacaggcagaatactaaagatattaatgggtggataaaagatgaacgg

SEQ ID NO: 18228 - DNA, 75 bp, synthetic construct
  source 1..75: mol_type = other DNA
acatgggaaaaggtggcagcggaaaccctgcgtctggatgttatcccgcctgcgtttgagcaactccgtcggaaa

SEQ ID NO: 18229 - DNA, 75 bp, synthetic construct
  source 1..75: mol_type = other DNA
cggatttcaccaccgttaaccagaaaggcaaactgcaggtgaacgccggtggtaccgccacacatgtcaccctga

SEQ ID NO: 18230 - DNA, 75 bp, synthetic construct
  source 1..75: mol_type = other DNA
gcccggcaacgatgacctgaagggcattaacgtgaaataccgttatgaatttacggacacgctggggctggtgac

SEQ ID NO: 18231 - DNA, 75 bp, synthetic construct
  source 1..75: mol_type = other DNA
agaccggtctgacgggaaatgcaggtccacagggtccaaagggagataccggtgcggcaggcccggcaggcccac

SEQ ID NO: 18232 - DNA, 75 bp, synthetic construct
  source 1..75: mol_type = other DNA
cagattgctacgaccgcttatgtaagagctgccatatccgcattggttggttcatcaccagaagctcttgatacc

SEQ ID NO: 18233 - DNA, 75 bp, synthetic construct
  source 1..75: mol_type = other DNA
aacagggtggagcactggttaccagtactgcggcaacggttcttggcagcaaccgtctgggcaatttcacggtgg

SEQ ID NO: 18234 - DNA, 75 bp, synthetic construct
  source 1..75: mol_type = other DNA
aaagcggggaacatctccgtctcgcaacactggaaagtgtgtggattcagggaaagttacgcatgtggggacgct

SEQ ID NO: 18235 - DNA, 75 bp, synthetic construct
  source 1..75: mol_type = other DNA
ctcatcgcagcttttcatgatgtatgaggaactctgcgatgcctgggtggatgcgcatggcgaaaaagaatcgct

SEQ ID NO: 18236 - DNA, 75 bp, synthetic construct
  source 1..75: mol_type = other DNA
cgaccgtaaattatgacgggaaaaaattcacgtatccggtcgctgatggttgggggggattcatagggcgctttg

SEQ ID NO: 18237 - DNA, 75 bp, synthetic construct
  source 1..75: mol_type = other DNA
ccgttgctgaactgggcatttttgcaggctaactgggttggctcaacgcgtgccgactgcacaaaagccggtgcc

SEQ ID NO: 18238 - DNA, 75 bp, synthetic construct
  source 1..75: mol_type = other DNA
agattgacccaaaacttgttcgagatctgaatagtgatattaatgggttctcaaagaattattctgcaatgcgca

SEQ ID NO: 18239 - DNA, 75 bp, synthetic construct
  source 1..75: mol_type = other DNA
actttatgatgatgaaggcgtactcattgcggtggcgaactgcccggaaacgtacaaaccgcagttgcaggaagg

SEQ ID NO: 18240 - DNA, 75 bp, synthetic construct
  source 1..75: mol_type = other DNA
tcggtatcgttggcttagggtcaatgggaatgggagcagcactgtcatgtgtccgcgcaggtctttctacctggg

SEQ ID NO: 18241 - DNA, 75 bp, synthetic construct
  source 1..75: mol_type = other DNA
gggccatagagcgcatggttgaagcctatggtttcaagacaagacaagctttgtgtgatcatttgggcatttcta

SEQ ID NO: 18242 - DNA, 75 bp, synthetic construct
  source 1..75: mol_type = other DNA
atttgtctgttactgatgatgttgttgttcctgctactgctactgctactgctactgctactgctactgttcttc

SEQ ID NO: 18243 - DNA, 75 bp, synthetic construct
  source 1..75: mol_type = other DNA
tacagagtgatattgcactactccagctttatatcgcgcaacgcaaacaggcaggctttcatgacatggaaagaa

SEQ ID NO: 18244 - DNA, 75 bp, synthetic construct
  source 1..75: mol_type = other DNA
aatggtgccgtgatccacatcgtaccgcgtctggcgggtgccaaaagtggcggtatttttcaggcagtgctgggt

SEQ ID NO: 18245 - DNA, 75 bp, synthetic construct
  source 1..75: mol_type = other DNA
cggcaaaaatggaagcaaagcccctttatcttctgtgccgacaacgatcatgcacgccaggttaacaaaggtatc

SEQ ID NO: 18246 - DNA, 75 bp, synthetic construct
  source 1..75: mol_type = other DNA
aatttcctataacctcgctactcgtcctcaaccttcaatggtgcagactatgcttacggatgcgctgaaacagct

SEQ ID NO: 18247 - DNA, 75 bp, synthetic construct
  source 1..75: mol_type = other DNA
aactggtttgcgctgggcacaccgcgcaacggtcagccggtactgtttgccgagggctatgccactgcggcctcc

SEQ ID NO: 18248 - DNA, 75 bp, synthetic construct
  source 1..75: mol_type = other DNA
acatgcgaaaaacggattgctaattggttagctgttgctgagtatgccctatatattcccatgcgtgaatcattt

SEQ ID NO: 18249 - DNA, 75 bp, synthetic construct
  source 1..75: mol_type = other DNA
caaacgacggtggagagagcgtaacgtataccctgcggaacatccccgctgacaccgaccgggtgatcaccgacc

SEQ ID NO: 18250 - DNA, 75 bp, synthetic construct
  source 1..75: mol_type = other DNA
tcagctatgagcagttgacccgaatagcggaaaaaaatatccgtgaatgtgggctggacagccagagcgccaggt

SEQ ID NO: 18251 - DNA, 75 bp, synthetic construct
  source 1..75: mol_type = other DNA
cggcagtgatccggtcaccgagtttgcccaggtactggaaaatgccggactggttctgaaagaactgccggccat

SEQ ID NO: 18252 - DNA, 75 bp, synthetic construct
  source 1..75: mol_type = other DNA
gatgaaactgatcccgctggcggacaaatagccccggcgctcgcgcacattgggcaagactcaacaaccttgcac

SEQ ID NO: 18253 - DNA, 75 bp, synthetic construct
  source 1..75: mol_type = other DNA
tgctgaagaagccagacgtatggctgagaatgcacgaggacctaaaggcgatacagggccgaaaggtgatgctgg

SEQ ID NO: 18254 - DNA, 75 bp, synthetic construct
  source 1..75: mol_type = other DNA
atgacagcacagatagcagcttacgggcggctggtggacgacccgcaggtaaaacagaccagcaagggcacacca

SEQ ID NO: 18255 - DNA, 75 bp, synthetic construct
  source 1..75: mol_type = other DNA
aaggtgtgtgaagcaacagccgccgcagaaggtgtatgacgctacggtgtcgtttgccttcaacgtggggacggg

SEQ ID NO: 18256 - DNA, 75 bp, synthetic construct
  source 1..75: mol_type = other DNA
atgcagatcagccagtggactgggcagaacggagaaacgcggcagggctggcaggttatcgcagacagtgtaatc

SEQ ID NO: 18257 - DNA, 75 bp, synthetic construct
  source 1..75: mol_type = other DNA
aaagcgaaagagaaaaagcaggaatgagtcaggcgcaactagctgaaaaaattgggctttcacaacaatccgtag

SEQ ID NO: 18258 - DNA, 75 bp, synthetic construct
  source 1..75: mol_type = other DNA
aattgctagcggcgaacggcctgaaacatcaggacttgttcgcgatcctcggtcaactggccgaacgtcgccttg

SEQ ID NO: 18259 - DNA, 75 bp, synthetic construct
  source 1..75: mol_type = other DNA
tgggcgttttcggttgatcgctgggatgagagctggccggaagaaaccaaacgcgaggttatccgcagcgcgtgg

SEQ ID NO: 18260 - DNA, 75 bp, synthetic construct
  source 1..75: mol_type = other DNA
aagcgcggcagaacgccgtcagtggtttgacgtgcttcttgccgggcagctggacgatcggatcctggcactgca

SEQ ID NO: 18261 - DNA, 75 bp, synthetic construct
  source 1..75: mol_type = other DNA
atgctttccgcgtttatcgttattctgctggtggcctgtggtgcgctgtggatggcaacagaccattaccgtgat

SEQ ID NO: 18262 - DNA, 75 bp, synthetic construct
  source 1..75: mol_type = other DNA
agcagcgagttgaagaagaacgccaacgtcatatccgtgctgcccgtgccaaaacaccgggcgtgtcccgcgtgc

SEQ ID NO: 18263 - DNA, 75 bp, synthetic construct
  source 1..75: mol_type = other DNA
accaacaccattccgttccaggcgcgttattatgcaatcggcgaggcaaccccgggtgcagctaatgcggatgca

SEQ ID NO: 18264 - DNA, 75 bp, synthetic construct
  source 1..75: mol_type = other DNA
gtagtactgtattagtgagcttattgtttgggcttgctttggttttggtgaatagttggtttaatcagccaggcg

SEQ ID NO: 18265 - DNA, 75 bp, synthetic construct
  source 1..75: mol_type = other DNA
tgatttcccgggctgtcatcacggcggtggattccgccagaaagtgtcagtctgtagggttgaaaatgatagccg

SEQ ID NO: 18266 - DNA, 75 bp, synthetic construct
  source 1..75: mol_type = other DNA
taactgcgctaaaaaatatatcggagaccgcaaacagagccattcaggatgcaacaaatgcaggaatgattgggc

SEQ ID NO: 18267 - DNA, 75 bp, synthetic construct
  source 1..75: mol_type = other DNA
cagaaattctgacaaatctccgcctgatagagcgctctcaagtcgcattcattgatgacgcacagcgcaccgtat

SEQ ID NO: 18268 - DNA, 75 bp, synthetic construct
  source 1..75: mol_type = other DNA
gcagaagtggctaaagctgttggctgcaaagtagaagaagtggataaagagttaatattaggattgatattacaa

SEQ ID NO: 18269 - DNA, 75 bp, synthetic construct
  source 1..75: mol_type = other DNA
tcttcaaatattaatgcgaatgataaagcaagacttaaacttcgtggcaaaaggtttctggctgatatagtgggt

SEQ ID NO: 18270 - DNA, 75 bp, synthetic construct
  source 1..75: mol_type = other DNA
cctatagctgctgggtttaaagggcttcttccctatacaagcaaaacacgtcaggcttgttcagatagtgatgca

SEQ ID NO: 18271 - DNA, 75 bp, synthetic construct
  source 1..75: mol_type = other DNA
tagtagggtgaattttaataatgatgcattgactggttttgaacagtttattgaatatatcctcaaggggaactg

SEQ ID NO: 18272 - DNA, 75 bp, synthetic construct
  source 1..75: mol_type = other DNA
ttttttatgggcttttatacaatatcaatataaaaaagaacacagcagtttttgttcagcagcagtggctaaaaa

SEQ ID NO: 18273 - DNA, 75 bp, synthetic construct
  source 1..75: mol_type = other DNA
ctggaacaaaaaagcacgggcactgacgatgtcagagatggtggtgatgtttggatatatctaccgtcagttgcg

SEQ ID NO: 18274 - DNA, 75 bp, synthetic construct
  source 1..75: mol_type = other DNA
atcgtccgttaccggcagattatgttacgcactgccggaatgcttctgtaaagatcattacacctgattcagaag

SEQ ID NO: 18275 - DNA, 75 bp, synthetic construct
  source 1..75: mol_type = other DNA
ctctctatgggctgttgtatcctgtgctgtctctggcgcaggcatttcgcgttaacggtcatgaagtgctgatcg

SEQ ID NO: 18276 - DNA, 75 bp, synthetic construct
  source 1..75: mol_type = other DNA
tgtgcagttttatcattcggacttgaagctccatttctgccgctttgcatcacaattgccggtgtggcaagtatc

SEQ ID NO: 18277 - DNA, 75 bp, synthetic construct
  source 1..75: mol_type = other DNA
accgtgtatgaagattctcaacccggtacgctgaatgattttctcggtgccatgacggaggatgatgcccgtccg

SEQ ID NO: 18278 - DNA, 75 bp, synthetic construct
  source 1..75: mol_type = other DNA
agccagttatgggcagatgggtgacagcgggtcgccattatttgcttatgattctctcagtgaaaaaatggtctc

SEQ ID NO: 18279 - DNA, 75 bp, synthetic construct
  source 1..75: mol_type = other DNA
caggaacagcaggacgcggaagcacgactgatggcactgaaagagaagcgcaaacgtaagtcgaacaaggagcaa

SEQ ID NO: 18280 - DNA, 75 bp, synthetic construct
  source 1..75: mol_type = other DNA
tggtggaagatgattacgacatcgccaccctgttgcggctgaatctgcaggatgagggctatcagattgtccatg

SEQ ID NO: 18281 - DNA, 75 bp, synthetic construct
  source 1..75: mol_type = other DNA
gctgacagcctccggtggcgtgaacaaccgttccggtggtgttctgatgagccggaatgcactgaatgtcagtac

SEQ ID NO: 18282 - DNA, 75 bp, synthetic construct
  source 1..75: mol_type = other DNA
acggtgaaaaaagcggaaataaaggtggagctgctgccgaaatatgccgcctgggcggagggcgtcctggctgcc

SEQ ID NO: 18283 - DNA, 75 bp, synthetic construct
  source 1..75: mol_type = other DNA
tatggtggtcttgacggagtggtaacactggtaagtccggatactttacgtgatcagaaacgtccgggagattta

SEQ ID NO: 18284 - DNA, 75 bp, synthetic construct
  source 1..75: mol_type = other DNA
cgctgttggtaatggtgctgggggtattcgcactgttacagcttatttccggcagtctgtttttttcttcccttc

SEQ ID NO: 18285 - DNA, 75 bp, synthetic construct
  source 1..75: mol_type = other DNA
gttgagtttggtaatgtattcattaataagatcaatggggttgattataaacgtcccattgactactcgcttgtt

SEQ ID NO: 18286 - DNA, 75 bp, synthetic construct
  source 1..75: mol_type = other DNA
atccgggaatattcgtttatcagccggggaacatgctgcacgcagtctggtctggccgaagttaaaatcgttcct

SEQ ID NO: 18287 - DNA, 75 bp, synthetic construct
  source 1..75: mol_type = other DNA
ttctgattatttcggtggtctgcgccattgggattatgcgaattattaattcagtgaaaaagatcgagcgttttt

SEQ ID NO: 18288 - DNA, 75 bp, synthetic construct
  source 1..75: mol_type = other DNA
ccatgctcagtgcacagcacctgaaccagacttccgggaccgtgaatgcagctgaaaatgtcaccttgaccacca

SEQ ID NO: 18289 - DNA, 75 bp, synthetic construct
  source 1..75: mol_type = other DNA
ggagacgcctgtccgcagccggaaaaccatcatcaatgtcaccacgccaccaaagtggaaggtgaaaaagcagaa

SEQ ID NO: 18290 - DNA, 75 bp, synthetic construct
  source 1..75: mol_type = other DNA
gctgctcatttgaacttttcccggatgaacggacaggagataagatagcagatgagctcattgcaaatgaaaaac

SEQ ID NO: 18291 - DNA, 75 bp, synthetic construct
  source 1..75: mol_type = other DNA
ccagcggcttaggtcgaaacgcggtagagtttttatgccagaaaggcatcagcgtgcgagcgaccggtcgcaacg

SEQ ID NO: 18292 - DNA, 75 bp, synthetic construct
  source 1..75: mol_type = other DNA
ctgtggcgactcttcccggtgacaccctcgctgccgctctgatgctgaaaagctacggtacggtcagtgtcgacg

SEQ ID NO: 18293 - DNA, 75 bp, synthetic construct
  source 1..75: mol_type = other DNA
atggcagtaaagatttcaggtgtactgaaagacggtgcaggtaaaccggtacagaactgtacaatccagctgaaa

SEQ ID NO: 18294 - DNA, 75 bp, synthetic construct
  source 1..75: mol_type = other DNA
tgattacatggcgacgcagggtgttatcctcacgattcaacaacataaccaaagcgatgtctggctggcggatga

SEQ ID NO: 18295 - DNA, 75 bp, synthetic construct
  source 1..75: mol_type = other DNA
tctggagtgaaagggatgaatgaatctgctgatggtgccatgaatcttgttaaaaccagcaatggttggaaagcg

SEQ ID NO: 18296 - DNA, 75 bp, synthetic construct
  source 1..75: mol_type = other DNA
ctgcagaggcagtgaaggaagtcctgcgctctgaagaagtcctgagcgcactgaaacagaaactccgccagaacc

SEQ ID NO: 18297 - DNA, 75 bp, synthetic construct
  source 1..75: mol_type = other DNA
tgaatttaccatgacgcagtccgcaccgctgatggtgctgccggatccggatgagtttgtggtggtgcaggtgaa

SEQ ID NO: 18298 - DNA, 75 bp, synthetic construct
  source 1..75: mol_type = other DNA
gatcgatcgtcagagggttaaaaaaatatatccctttgcggagcggattacggaatgctggcggtctattacgca

SEQ ID NO: 18299 - DNA, 75 bp, synthetic construct
  source 1..75: mol_type = other DNA
ggttttttaccgctttacttgacaatcacatcaatcaaatgatggcacgctattcctgcctgcgggccttacgca

SEQ ID NO: 18300 - DNA, 75 bp, synthetic construct
  source 1..75: mol_type = other DNA
aggcgatcagtcagatcgacggcctgaaaacaacacagctaccatcaccagtaatggctgtactcacggcacttg

SEQ ID NO: 18301 - DNA, 75 bp, synthetic construct
  source 1..75: mol_type = other DNA
attgttaagacactggatttggtgaaagtgagggtgctggatcatttcattattggggcgggggatgtcctctct

SEQ ID NO: 18302 - DNA, 75 bp, synthetic construct
  source 1..75: mol_type = other DNA
ccaccgcgtaagactatcggaaagaaatcttgtggctggttactaagtgaccttctctggtggattcagaccaga

SEQ ID NO: 18303 - DNA, 75 bp, synthetic construct
  source 1..75: mol_type = other DNA
gtatctcgctgggtgcatcgtcaatagcagcaggtgggtactcaatagcactcggcactgaggcagaatcgaacg

SEQ ID NO: 18304 - DNA, 75 bp, synthetic construct
  source 1..75: mol_type = other DNA
tgaaatcttcaaggttttatttgctgaagccaagaaaaggcaaattatggtcagtgatttgatgttagaaatcat

SEQ ID NO: 18305 - DNA, 75 bp, synthetic construct
  source 1..75: mol_type = other DNA
atgaacaaaatatttaaagttatctggaatccggcaacaggtagttacaccgttgccagtgaaacagcaaaaagt

SEQ ID NO: 18306 - DNA, 75 bp, synthetic construct
  source 1..75: mol_type = other DNA
tggcgaacagaaatttgttgcctggtatggtttccggtcagtacgcattcaggatccgtaccttatctcaggtgg

SEQ ID NO: 18307 - DNA, 75 bp, synthetic construct
  source 1..75: mol_type = other DNA
tctcaggaaacttaactgggaagaggacgaagagctgcagaatgccgttctggttgatgagattggttttacgtt

SEQ ID NO: 18308 - DNA, 75 bp, synthetic construct
  source 1..75: mol_type = other DNA
ctgtcagattctgacccgtcaaaatctgacgcatcaaaatctgacccgtcaaaatttgatgcgtcgaaatctggc

SEQ ID NO: 18309 - DNA, 75 bp, synthetic construct
  source 1..75: mol_type = other DNA
aaaaaagcgggttttcacccgtcagaatctggcggggatccgtcagtaaaatcaaaacatgatccgtcagataaa

SEQ ID NO: 18310 - DNA, 75 bp, synthetic construct
  source 1..75: mol_type = other DNA
cccgccatcagcataccgtcacgctgtatgcgaaaggactgacctgcgaagccgacaccctcggcagttgtggtt

SEQ ID NO: 18311 - DNA, 75 bp, synthetic construct
  source 1..75: mol_type = other DNA
acaaaaggccgcattgctttccgaagctgaatcagtcatccagccgctggaacgcgctgtcaggctgaatatggc

SEQ ID NO: 18312 - DNA, 75 bp, synthetic construct
  source 1..75: mol_type = other DNA
ccagacgggttaacggcagcaaagaaccttgcagaggcgttcgagcattataacgaatggcatccgcatagtgca

SEQ ID NO: 18313 - DNA, 75 bp, synthetic construct
  source 1..75: mol_type = other DNA
aaatgaatttcgcgattctgaaagatgtgaatgaacacatggaaggtctgtttcaacgtttttctaaactgttac

SEQ ID NO: 18314 - DNA, 75 bp, synthetic construct
  source 1..75: mol_type = other DNA
gaaatccgtgagctcaggaaaaagctacaacgtattgaaatggaaaatgaaatattaaaaaggctaccgcgctct

SEQ ID NO: 18315 - DNA, 75 bp, synthetic construct
  source 1..75: mol_type = other DNA
tgctgacaatcaaggagtggcgcgaaacatacggacctggtagcaacgttgtactgccagcagaagaagcggaag

SEQ ID NO: 18316 - DNA, 75 bp, synthetic construct
  source 1..75: mol_type = other DNA
caaaactacgcgaactgggtgtcattcgcggcaaaattgccactatcttccacggtattgatatctccagtcggg

SEQ ID NO: 18317 - DNA, 75 bp, synthetic construct
  source 1..75: mol_type = other DNA
caggccgccgggtatgcctatggtggctccctgtatgcccgcacccaggtcaaaaatatccagctgatttccatg

SEQ ID NO: 18318 - DNA, 75 bp, synthetic construct
  source 1..75: mol_type = other DNA
tgtgggccggaaggctgcaaaaaatgggctgcccgagggaaaaaatcgccgtatcgcgcatgggcgtggacatga

SEQ ID NO: 18319 - DNA, 75 bp, synthetic construct
  source 1..75: mol_type = other DNA
catttcattttcactaatgctggttgctctttttctttccatggcctggatgatgttgtcttcgtcggggctgct

SEQ ID NO: 18320 - DNA, 75 bp, synthetic construct
  source 1..75: mol_type = other DNA
atatttgtaaacgattcagcttaaactgcccggaagcgaatctgtccgaatgggaacaggttatcttcgaagaag

SEQ ID NO: 18321 - DNA, 75 bp, synthetic construct
  source 1..75: mol_type = other DNA
tgattgccgccgctctgttacagggctgtgccagttacagacagcttgagagcacaagaaaggaagccgttgcgg

SEQ ID NO: 18322 - DNA, 75 bp, synthetic construct
  source 1..75: mol_type = other DNA
aattcacactttatctgcatccggaaaaagctgcagactttcaaactttggaagcgatagagtccgttccgcgtt

SEQ ID NO: 18323 - DNA, 75 bp, synthetic construct
  source 1..75: mol_type = other DNA
accatcaccaccggttttaacatgacccttctgccgttcattctcccggactcacagacactgcagttgctctat

SEQ ID NO: 18324 - DNA, 75 bp, synthetic construct
  source 1..75: mol_type = other DNA
aaaatcacacagacgatggtgagcagttgcacaacactgatgctacggatgatgttaaagcggtccgtgtgcgga

SEQ ID NO: 18325 - DNA, 75 bp, synthetic construct
  source 1..75: mol_type = other DNA
gtgctggcactgcgacaaccagctgcgggagcagacatctgattcactggatcaacttgctcaacagaatctggc

SEQ ID NO: 18326 - DNA, 75 bp, synthetic construct
  source 1..75: mol_type = other DNA
catacagcaagcgtggaagtaacgcgcttattaaatttgattacaccgacacattacagatcaaatatgccaatc

SEQ ID NO: 18327 - DNA, 75 bp, synthetic construct
  source 1..75: mol_type = other DNA
gggcgaccacgctggatggtgacggcctgttgcagggcgccggtgcactggcgcttgctggcgacaccctctcac

SEQ ID NO: 18328 - DNA, 75 bp, synthetic construct
  source 1..75: mol_type = other DNA
tactgatgagcacgtaccgttatatatacgaaggctggaatactatcgtctgctttatcgaccaaagcagacaga

SEQ ID NO: 18329 - DNA, 75 bp, synthetic construct
  source 1..75: mol_type = other DNA
ggtggtgaaggatgctttttatattcatcagcataaagggaccaccagtgccgtgcggcgggtggtggagccgtt

SEQ ID NO: 18330 - DNA, 75 bp, synthetic construct
  source 1..75: mol_type = other DNA
ggcacagcaaaaatttatcactgcaacgattctgataaatgcctgaaagtggtggcagacacaccggtgaccatc

SEQ ID NO: 18331 - DNA, 75 bp, synthetic construct
  source 1..75: mol_type = other DNA
cggatattcctgctgaaacgccgtatgcgccgggagaacacattaagggagggcagcaataatgcttcgcattaa

SEQ ID NO: 18332 - DNA, 75 bp, synthetic construct
  source 1..75: mol_type = other DNA
tcgctggtgtgactgcgccgaaaggcaaacgtatgggccacgcgggtgccatcattgccggtgggaaagggactg

SEQ ID NO: 18333 - DNA, 75 bp, synthetic construct
  source 1..75: mol_type = other DNA
cacaggcaaaatataaagcgttagacatgacagagctttccttaaaggtggcaatcaaagcgatagaccaccaca

SEQ ID NO: 18334 - DNA, 75 bp, synthetic construct
  source 1..75: mol_type = other DNA
atgaaagatttaacactcaaatttgccgacagggccgacttttcggcctttatggatagcactggctattatgat

SEQ ID NO: 18335 - DNA, 75 bp, synthetic construct
  source 1..75: mol_type = other DNA
tgcgaagcatcctgactgtcgggggattacggttgatgagctgcagaaaattcagttcgacagactggatttcac

SEQ ID NO: 18336 - DNA, 75 bp, synthetic construct
  source 1..75: mol_type = other DNA
cgcaggaaatttgaaagaaaagctgaggctgtagcatttgagcgatacacaatcgcctacgccagccagaaagaa

SEQ ID NO: 18337 - DNA, 75 bp, synthetic construct
  source 1..75: mol_type = other DNA
cgaccccacctggacggacagcagcctgaccaccattctcaacccggaagccgtcatttttgccaatccgatagc

SEQ ID NO: 18338 - DNA, 75 bp, synthetic construct
  source 1..75: mol_type = other DNA
tgcatggtgaacctgggcttcagcctgccggcttttggtaaaacggcacagggaacggcgaaaaaggatgagaag

SEQ ID NO: 18339 - DNA, 75 bp, synthetic construct
  source 1..75: mol_type = other DNA
caggtgaacggggcgttctatcacgttcactggtacaaatacccgctgacgtactggctgaacatcatcacatcg

SEQ ID NO: 18340 - DNA, 75 bp, synthetic construct
  source 1..75: mol_type = other DNA
tgttctggcagccctgattttcgccggttgtggcacccatactcccgatcagtccactgcttatatgcagggcac

SEQ ID NO: 18341 - DNA, 75 bp, synthetic construct
  source 1..75: mol_type = other DNA
atgcggaaaaatataacgagtgggcaagaaaattctctgagcagatttttaaaattactggcgatgagaatgcgg

SEQ ID NO: 18342 - DNA, 75 bp, synthetic construct
  source 1..75: mol_type = other DNA
tgaactgctgctgtttaagcagatgggcaaagccacggtggatggcatccagttgcgctttaccggctctatcca

SEQ ID NO: 18343 - DNA, 75 bp, synthetic construct
  source 1..75: mol_type = other DNA
ggtgctctatgaagtggaccttatcaacatggtggaaattgtgaacggtgtggacctgatggaagcgcaccgcaa

SEQ ID NO: 18344 - DNA, 75 bp, synthetic construct
  source 1..75: mol_type = other DNA
cttggtctcgacgatgatgcgctcaccgtcgaatggtctgtcggtggcctgcctgatgtggcgctgtgggcgcag

SEQ ID NO: 18345 - DNA, 75 bp, synthetic construct
  source 1..75: mol_type = other DNA
aaaaccatcgagccggagtcggtgctgatgcaggatggcgcattcagcctgagcgccccgccggtacagggcatg

SEQ ID NO: 18346 - DNA, 75 bp, synthetic construct
  source 1..75: mol_type = other DNA
taccgcattcaacatcgcagcaatgacattaccgccctgcgcccctatttgagtgacaaactggcaaccctactt

SEQ ID NO: 18347 - DNA, 75 bp, synthetic construct
  source 1..75: mol_type = other DNA
taatccagccagcatgtgacatatcattttcagccatatggtgtaacataaaattaatattatggtatcagtctg

SEQ ID NO: 18348 - DNA, 75 bp, synthetic construct
  source 1..75: mol_type = other DNA
ctgcactatctgctgaacactcaggccgataaaaggctgaatatcgggcgagaccgcctgtttaacctgctcgat

SEQ ID NO: 18349 - DNA, 75 bp, synthetic construct
  source 1..75: mol_type = other DNA
ctggaaggtccggaagaacaggttaaaatgatatatcgggctatatgccaggatccacggcactataatattgtt

SEQ ID NO: 18350 - DNA, 75 bp, synthetic construct
  source 1..75: mol_type = other DNA
ccatcctgaaccggggcgctcgtttttcgtcggtggaaatgtatctggtcagtgagtgtgtggagcatatcctgt

SEQ ID NO: 18351 - DNA, 75 bp, synthetic construct
  source 1..75: mol_type = other DNA
attgaagtacatgctcaaagcatgagccgtccggaggacggtgcccgttttgaaccgttgattggagatcccgga

SEQ ID NO: 18352 - DNA, 75 bp, synthetic construct
  source 1..75: mol_type = other DNA
accactcacaccacaagctcaaaattcgcggcctgaaaagcccggcggatgtgctgacgtttacgggccacgaac

SEQ ID NO: 18353 - DNA, 75 bp, synthetic construct
  source 1..75: mol_type = other DNA
gattaatgcgcggcgtcgtgaaatggggcagaaaccgctcaccactgcgcagattgttgatgaaatctgcgattt

SEQ ID NO: 18354 - DNA, 75 bp, synthetic construct
  source 1..75: mol_type = other DNA
ccgtcaaagagcaggcggaaaacaaaatcgatggtgcagttgcgctgattatggcggttggcagagccatgctgt

SEQ ID NO: 18355 - DNA, 75 bp, synthetic construct
  source 1..75: mol_type = other DNA
aaacacctcaatatctgggtgtcggcgcgttcggcgtatttcaacctggtgagctggcagagctgcgaggataaa

SEQ ID NO: 18356 - DNA, 75 bp, synthetic construct
  source 1..75: mol_type = other DNA
ccagttacatgccggaaccgttcgccgctggttgccattagtcgggcttgtgtggcgcagggctgcgccaaccct

SEQ ID NO: 18357 - DNA, 75 bp, synthetic construct
  source 1..75: mol_type = other DNA
ctggcggatgcctcacccgatgagcgcgtgacagcggcgattcacgttctactttcctgtctggcgaaatcaggc

SEQ ID NO: 18358 - DNA, 75 bp, synthetic construct
  source 1..75: mol_type = other DNA
gatttatgaccgttcaggggaatttgttaaaagttactatgatccctccatcgataaaatcctgaatccgctgga

SEQ ID NO: 18359 - DNA, 75 bp, synthetic construct
  source 1..75: mol_type = other DNA
cagaacataatttgtcgtgagagcaggaggagcgaagttatgcagcgtgtgctggcgttctatcggggaaacttt

SEQ ID NO: 18360 - DNA, 75 bp, synthetic construct
  source 1..75: mol_type = other DNA
cctgatttacgtggtgagtttattcgcggctgggatgacggaagaggaattgatactaaccgtagcttgctttca

SEQ ID NO: 18361 - DNA, 75 bp, synthetic construct
  source 1..75: mol_type = other DNA
gttgataacctacaaaggaaagctaccgggaagaattacttgttctctgaagatgccgccgtcaacactgcggtc

SEQ ID NO: 18362 - DNA, 75 bp, synthetic construct
  source 1..75: mol_type = other DNA
agccagccagttatttctctggcgtaagcaataccaggaaggaagtcttactgctgtcgccgccggagaacaggt

SEQ ID NO: 18363 - DNA, 75 bp, synthetic construct
  source 1..75: mol_type = other DNA
cgttcttcctctaaaacagcacctaaaaagacagattcaggcaggaaagatggcatcgatatgaacaacaattga

SEQ ID NO: 18364 - DNA, 75 bp, synthetic construct
  source 1..75: mol_type = other DNA
atgcgaaagttcaaaataattattgaaacgggaatcgccggtggagatttcgaggatgaattcgaagtgaatgat

SEQ ID NO: 18365 - DNA, 75 bp, synthetic construct
  source 1..75: mol_type = other DNA
ccccgtagaacctcctacccgcacgactcagctcttattcatgatgacaatacagtgagtctgggattccaacag

SEQ ID NO: 18366 - DNA, 75 bp, synthetic construct
  source 1..75: mol_type = other DNA
atatatcagcagattgaagcagcactcgataagattggctctacagagacagggcgtgtactcctgaatgctatt

SEQ ID NO: 18367 - DNA, 75 bp, synthetic construct
  source 1..75: mol_type = other DNA
gacggccacacgctggcgcggctgtggggggcgctgccgccggatatccggttaagcccgcatctttacctggcg

SEQ ID NO: 18368 - DNA, 75 bp, synthetic construct
  source 1..75: mol_type = other DNA
cggcttgttcctttacagggctttgagctgaattcattaagaagctgccggatagcacttctattttgcctgccc

SEQ ID NO: 18369 - DNA, 75 bp, synthetic construct
  source 1..75: mol_type = other DNA
cggtacgcaaaatgagaatgcgccaaaggcaagcgacattaacgcaacgcttggtctgatccgcgaaaacaatga

SEQ ID NO: 18370 - DNA, 75 bp, synthetic construct
  source 1..75: mol_type = other DNA
tggagttggtccagagctggtggcgtggagacacaccgctgggcgcagtgattatgtcgatcgttatggctggct

SEQ ID NO: 18371 - DNA, 75 bp, synthetic construct
  source 1..75: mol_type = other DNA
ccgccacggtcggaagctggttgtcccgctggtctggtgttgttgaggagcatgatctggaaacgattttctggg

SEQ ID NO: 18372 - DNA, 75 bp, synthetic construct
  source 1..75: mol_type = other DNA
agaacttcgccaccctgcgccgttacacgccggccttgctggaggtgctggaactgcgcgccgcgccggccgcgc

SEQ ID NO: 18373 - DNA, 75 bp, synthetic construct
  source 1..75: mol_type = other DNA
atgagtaataacccacttgaggccgtcactcaggcggttaactccctcgtcacagcactgaaactgcctgacgaa

SEQ ID NO: 18374 - DNA, 75 bp, synthetic construct
  source 1..75: mol_type = other DNA
tggatgagctggtggattgcgtggcggaactggaaggacaggtaagccagtttgaaacgctggtgaaggagttta

SEQ ID NO: 18375 - DNA, 75 bp, synthetic construct
  source 1..75: mol_type = other DNA
gcggagcgtgtccgtgaccagttgtcggtgatggccagccccaacggtaacctggatgaagtgcatgaaggtctg

SEQ ID NO: 18376 - DNA, 75 bp, synthetic construct
  source 1..75: mol_type = other DNA
gttgccgacaacctcccacagatactggctgattacttgaaagaaacaaccggaaacgtaccggaaaagttgcta

SEQ ID NO: 18377 - DNA, 75 bp, synthetic construct
  source 1..75: mol_type = other DNA
tggtccggcaggcccgcaggggccgaaaggcgacaggggagagcggggagagaccggtctgacgggaaatgcagg

SEQ ID NO: 18378 - DNA, 75 bp, synthetic construct
  source 1..75: mol_type = other DNA
tatgagttgaagagcaagagtgataacttgctcagattaccagcgcaggtgcaacattactcatcagtgatggat

SEQ ID NO: 18379 - DNA, 75 bp, synthetic construct
  source 1..75: mol_type = other DNA
gtatcttccagaatgaggacatcgaaagcatcctcgctacgatcctgaaggaaaacggtgtgaccgagtggagtc

SEQ ID NO: 18380 - DNA, 75 bp, synthetic construct
  source 1..75: mol_type = other DNA
atggatttcagtcttgatttttccggcctggcggatattgcacgggatctggagacgctcagcagggcagaaaac

SEQ ID NO: 18381 - DNA, 75 bp, synthetic construct
  source 1..75: mol_type = other DNA
atgagtacgatcgcttacgtgagcatggtgttgctgtgcatgaagagcggcgtgacagcaatggcaaaaaggagc

SEQ ID NO: 18382 - DNA, 75 bp, synthetic construct
  source 1..75: mol_type = other DNA
aagaatatcccggaacctccgccgccggagccggtcacccgcccggtggagctttatatcaatggcgaactggtg

SEQ ID NO: 18383 - DNA, 75 bp, synthetic construct
  source 1..75: mol_type = other DNA
ttcccggtgcacagtatccagaacgtatcattcagtttggtgaaggtaacttcctgcgcgcctttgttgactggc

SEQ ID NO: 18384 - DNA, 75 bp, synthetic construct
  source 1..75: mol_type = other DNA
tttgacgccatgggcacccgtaacagagaaaccgtcctgattgataaacaggagcataacgctgaccagatactt

SEQ ID NO: 18385 - DNA, 75 bp, synthetic construct
  source 1..75: mol_type = other DNA
tgtgattaaaaagaccgttactccggatgaattacgcaggcatgctgaggagctgatcagggctgcggaagaagc

SEQ ID NO: 18386 - DNA, 75 bp, synthetic construct
  source 1..75: mol_type = other DNA
gcgcagaaggctggctacccgcctggccgcaccttggcggtaaactggtctatgaacagtattatggcgatgaag

SEQ ID NO: 18387 - DNA, 75 bp, synthetic construct
  source 1..75: mol_type = other DNA
cggaagtattccgtaaacagcgcgccacgtctttatcttcccctgccggtccccgttctgcttcctcttctctgg

SEQ ID NO: 18388 - DNA, 75 bp, synthetic construct
  source 1..75: mol_type = other DNA
ggcagattgataaaagggccgcagagaaaatcagcgccagtcagtcagccggaagcaaacccgaagagccgctca

SEQ ID NO: 18389 - DNA, 75 bp, synthetic construct
  source 1..75: mol_type = other DNA
taaaaatggtcgtcagattgtggctgttgaaggaacagcaaataccactgtggtttatgccggcggcgaccagac

SEQ ID NO: 18390 - DNA, 75 bp, synthetic construct
  source 1..75: mol_type = other DNA
gaacacggtaattaacgaggggggctggcaggttgttaaggcaggtggtgctgtcggtaacaccaccataaatca

SEQ ID NO: 18391 - DNA, 75 bp, synthetic construct
  source 1..75: mol_type = other DNA
atgacgacgttaactcaatgccagcagcaggtgctggatatgctgatttcttaccagaaagagcgtggctttccg

SEQ ID NO: 18392 - DNA, 75 bp, synthetic construct
  source 1..75: mol_type = other DNA
taccgggatcgctacagcgaagcgtatgtgattttcatctccaatcttaaaggcggtgtgtcaaaaactgtatcg

SEQ ID NO: 18393 - DNA, 75 bp, synthetic construct
  source 1..75: mol_type = other DNA
tgttggtagtgctgatgcattgaagaacgcgcgaattgccgcggaagattttgctaaagcagtttttgaccgtat

SEQ ID NO: 18394 - DNA, 75 bp, synthetic construct
  source 1..75: mol_type = other DNA
cccgcgtacatatggaaataatgtctcaagcgggcaaataatgagccgagtcaaaatcgtggttatgtacaacta

SEQ ID NO: 18395 - DNA, 75 bp, synthetic construct
  source 1..75: mol_type = other DNA
ggcagaagagaaacatcagcggggagaactggaaaagtcccattaccaactggtcagcacatacagtgagctgaa

SEQ ID NO: 18396 - DNA, 75 bp, synthetic construct
  source 1..75: mol_type = other DNA
tggcaccgctgatatcgtatttcagggatgctcgtgccgaactgggtataacggcaaaacaaattgccgaagcca

SEQ ID NO: 18397 - DNA, 75 bp, synthetic construct
  source 1..75: mol_type = other DNA
gctcactgcttgccggtgaggaaaacgcaaggctgcgtgcaactcactggttacatgagagaggcctgaaagtat

SEQ ID NO: 18398 - DNA, 75 bp, synthetic construct
  source 1..75: mol_type = other DNA
atggcagatatcattgattcagcatcagaaattgaagaattacagcgcaatacagcaataaaaatgcgtcgcctg

SEQ ID NO: 18399 - DNA, 75 bp, synthetic construct
  source 1..75: mol_type = other DNA
caccggtcaccggtattaccgtgacgccaccaacgggcaatgtggcaaaaggtcagaatatcaccctgaccgtgg

SEQ ID NO: 18400 - DNA, 75 bp, synthetic construct
  source 1..75: mol_type = other DNA
atgctaaaacagcaggatatgaccgaaaccgccagagtggtgtttaatgagttaagcgtcaccgaaccggcgaca

SEQ ID NO: 18401 - DNA, 75 bp, synthetic construct
  source 1..75: mol_type = other DNA
gggcagggcatgaaaaagcccgtagcgggctgctacgggcgtctgacgcggtggaaagggggaggggatgttgtc

SEQ ID NO: 18402 - DNA, 75 bp, synthetic construct
  source 1..75: mol_type = other DNA
gtacgcgtcccgtacttcccggcggatgcgatgctcatcacgaagctggaaaacctgtccatctactacatggat

SEQ ID NO: 18403 - DNA, 75 bp, synthetic construct
  source 1..75: mol_type = other DNA
agggcaaatcagcggctgtggaaaaagctggccgcactgccgaacaaatggcaggcagctcaagtgatggagctt

SEQ ID NO: 18404 - DNA, 75 bp, synthetic construct
  source 1..75: mol_type = other DNA
cgcacggaactggaagggatttttaatgattccaccctgctggcggatctcgatagcgcattgccagaaggctcc

SEQ ID NO: 18405 - DNA, 75 bp, synthetic construct
  source 1..75: mol_type = other DNA
tggacgagtcggaatcgcagaccgataccaggatcttgccatcctatggaactgcctcggtgagttttctccttc

SEQ ID NO: 18406 - DNA, 75 bp, synthetic construct
  source 1..75: mol_type = other DNA
ctgctggcggtatatgaccgcagcaatacgcaggtgcgcgctttcacgtatgacgcgcagcacccgggccggatg

SEQ ID NO: 18407 - DNA, 75 bp, synthetic construct
  source 1..75: mol_type = other DNA
catccccctttaatgtctcctccggcgatgcccggcaacccacactggccgttcacagtcaggagttccgtactg

SEQ ID NO: 18408 - DNA, 75 bp, synthetic construct
  source 1..75: mol_type = other DNA
tggcccgcaggaagaaccgtcgtttctctgtattgttcattgactgggaagcccagtaccagtgcacaattgcgc

SEQ ID NO: 18409 - DNA, 75 bp, synthetic construct
  source 1..75: mol_type = other DNA
ggaactgaaagcacagtacaaccgacaggccgcgtatgcccgccgctatgtcaacaaatggccgcaggccacagc

SEQ ID NO: 18410 - DNA, 75 bp, synthetic construct
  source 1..75: mol_type = other DNA
ctttattgagcataaaaaccgtaacagtcttctgtttcagcctacggattctgccgctgaagattttatgaagtc

SEQ ID NO: 18411 - DNA, 75 bp, synthetic construct
  source 1..75: mol_type = other DNA
catttggtggtgtgtggtacgggcagtggcggataacacagcgagaggaggaagctgcaacagcgaagctggtca

SEQ ID NO: 18412 - DNA, 75 bp, synthetic construct
  source 1..75: mol_type = other DNA
acgctgtatgaagaacagtggctcaaaccactggcgaaccgctggctggcaacggcggcgtgggggattattgcc

SEQ ID NO: 18413 - DNA, 75 bp, synthetic construct
  source 1..75: mol_type = other DNA
tttcccgtgtctgctgggacaccggggggatcgatggcgaaatcgtttatcagaggtcaaaaaaacacggtgttt

SEQ ID NO: 18414 - DNA, 75 bp, synthetic construct
  source 1..75: mol_type = other DNA
ctcgaaccacaatccattgattgccattgatgaacttacagccttttttcattatctggaaaatacgcatttata

SEQ ID NO: 18415 - DNA, 75 bp, synthetic construct
  source 1..75: mol_type = other DNA
ggtcgcagtatggtcatttaccatccgtctggcactggagttgggcgatatcaacgaacgtgatgcttcaaactt

SEQ ID NO: 18416 - DNA, 75 bp, synthetic construct
  source 1..75: mol_type = other DNA
acactggatacgctgaaagaaattgccgctgccattaataatgacccgaaattcagtaccaccattaacaatgcg

SEQ ID NO: 18417 - DNA, 75 bp, synthetic construct
  source 1..75: mol_type = other DNA
tggtttctatgctctgctttgtctatgtcggagtctacttctggcgtgaaagcaaagtacgtaccgcactggctg

SEQ ID NO: 18418 - DNA, 75 bp, synthetic construct
  source 1..75: mol_type = other DNA
cggcatcactgccgcgcctggctgacgggaacttccggaccacgtcggtgcaggccgttgcggcgacaacgccgt

SEQ ID NO: 18419 - DNA, 75 bp, synthetic construct
  source 1..75: mol_type = other DNA
tcgtactttgaagcacggctaaaagctacgatgctggaatccatacagggttactctcgcctaagaaatctgtgg

SEQ ID NO: 18420 - DNA, 75 bp, synthetic construct
  source 1..75: mol_type = other DNA
ggttgtctgccaggtgcaggggcgtacttataccctgagttacccgctggtggcgtttcagtccggaaaaatgtt

SEQ ID NO: 18421 - DNA, 75 bp, synthetic construct
  source 1..75: mol_type = other DNA
cacagaagaccgctttgcttaccgaagcggagtctgtcatccggcagccggggcgtgctgtcaggctgaacaggg

SEQ ID NO: 18422 - DNA, 75 bp, synthetic construct
  source 1..75: mol_type = other DNA
gatgtgcatgcaagagcgcccaccgacatcaccacggaagccctgcagcgtatcggtgaactgtatgccatcgag

SEQ ID NO: 18423 - DNA, 75 bp, synthetic construct
  source 1..75: mol_type = other DNA
tctccgtatcagtctccgtgccttataccgatgtctggatgcataaacccgttcagttctacccgggtaaacatc

SEQ ID NO: 18424 - DNA, 75 bp, synthetic construct
  source 1..75: mol_type = other DNA
gcaaaaacaggattgtccttatcgctggcattctgatgattgccacaacattacgcgtcacctttaccggcgcag

SEQ ID NO: 18425 - DNA, 75 bp, synthetic construct
  source 1..75: mol_type = other DNA
tggaagtggacggcctgccgccggacgcttttgcggtggtttcctttcatctgaaccagtcactctcttcgctct

SEQ ID NO: 18426 - DNA, 75 bp, synthetic construct
  source 1..75: mol_type = other DNA
tttgattacctgctgagggaagattcgttaacgggagttcgggaagggaagtttgcagacagggggattgcatga

SEQ ID NO: 18427 - DNA, 75 bp, synthetic construct
  source 1..75: mol_type = other DNA
aacataccgctgtctgccggagccggaagcggtgctgacggaggcagaagaagaacgcctgaacgaactgatgac

SEQ ID NO: 18428 - DNA, 75 bp, synthetic construct
  source 1..75: mol_type = other DNA
acggctgcatctcagagcaaagttgctgctgaatccgcggcaacgcgtgccgaaacagcggcaaaacgggcagag

SEQ ID NO: 18429 - DNA, 75 bp, synthetic construct
  source 1..75: mol_type = other DNA
ttattgtcctgctggtggcctgtggtgcgcttagtctggggctgaatcattaccgcgataacgccatcacctaca

SEQ ID NO: 18430 - DNA, 75 bp, synthetic construct
  source 1..75: mol_type = other DNA
aagagacggaggccttcctgcgctctgcactggcacgtgccgaagaaaagatcgaagaggaggagcgggaaacag

SEQ ID NO: 18431 - DNA, 75 bp, synthetic construct
  source 1..75: mol_type = other DNA
ccatatcaacattgcggaagccgatcacttcaaacagttcctgcgtcagattaagcgtgccggcctcgatatccg

SEQ ID NO: 18432 - DNA, 75 bp, synthetic construct
  source 1..75: mol_type = other DNA
atggatggtggagaagaatggtacgctgtcgaaaaaatccagactgggcgaagcgttcagctatgtactgaatca

SEQ ID NO: 18433 - DNA, 75 bp, synthetic construct
  source 1..75: mol_type = other DNA
tgcgccatatcctgagcgtactgccggaatggccctccaaccgtgttgacgaactgctgccatggaacgtagttt

SEQ ID NO: 18434 - DNA, 75 bp, synthetic construct
  source 1..75: mol_type = other DNA
agtgcaggatattcccggcgttcttgccgtgtttgccgaacgccgtaaggacagttttggtccgtatgtccggct

SEQ ID NO: 18435 - DNA, 75 bp, synthetic construct
  source 1..75: mol_type = other DNA
aagtggcacacatagaatttatttcatatggtacgtctcgaatttttgataggcgtatgagatccttagactgga

SEQ ID NO: 18436 - DNA, 75 bp, synthetic construct
  source 1..75: mol_type = other DNA
ctggttcgcctactcaccggaccatcagggtaaacatccggagcaacaccttcgtcccttccggggtatcctgca

SEQ ID NO: 18437 - DNA, 75 bp, synthetic construct
  source 1..75: mol_type = other DNA
aaaaatttgagcgaagggagcaggaagacttaactttgtgtgtgagtgataaagaacttcgttatgcaaaccgta

SEQ ID NO: 18438 - DNA, 75 bp, synthetic construct
  source 1..75: mol_type = other DNA
gtattacttagagttaaaatattgatcaatttacctgacggtggtctgattctaagaagtttcaataaagatgag

SEQ ID NO: 18439 - DNA, 75 bp, synthetic construct
  source 1..75: mol_type = other DNA
gaactgtccagcaaattcactgtggagccgtctgtgcagcagacgctggaggaccagatccagcagtccgccgct

SEQ ID NO: 18440 - DNA, 75 bp, synthetic construct
  source 1..75: mol_type = other DNA
tcgatgcgctggcagaagaccgcatcaccaccgagcactgtcaggcgctggcgctggagaacgacaccgcgcgtc

SEQ ID NO: 18441 - DNA, 75 bp, synthetic construct
  source 1..75: mol_type = other DNA
tgaccgaaagtgaagtggcggtggcggggaacagtaaattccgcttcgtgggggctgatgccttctcgccagacg

SEQ ID NO: 18442 - DNA, 75 bp, synthetic construct
  source 1..75: mol_type = other DNA
tgcctgttacgggggaagatagccatcggattggtcattttacgtttcgtatgcaggcggcaggacttatgcggc

SEQ ID NO: 18443 - DNA, 75 bp, synthetic construct
  source 1..75: mol_type = other DNA
ccaccgcccgtaattactgccaggagcaaccaaacacctggatgatcaccctgtcacccgcgcactccagcgtca

SEQ ID NO: 18444 - DNA, 75 bp, synthetic construct
  source 1..75: mol_type = other DNA
atgagcgcacgttcacaggcactggttcccctcagcgcagagcaacaggccgcatggcgggcggtggcggagacg

SEQ ID NO: 18445 - DNA, 75 bp, synthetic construct
  source 1..75: mol_type = other DNA
tggcactcataatttcagcaacatccagccctgttgttttagctggtgataccattgaagcggcggcaacagagc

SEQ ID NO: 18446 - DNA, 75 bp, synthetic construct
  source 1..75: mol_type = other DNA
aaacccccgtcattgtggtgaaaaaacgtcgaactttttcgccaccatccttatccgaacaaacagatattatcg

SEQ ID NO: 18447 - DNA, 75 bp, synthetic construct
  source 1..75: mol_type = other DNA
tggcctgttcggtgtgccccggcggagtgacgtccggccatccggtcaatcccctgctcggtgcaaaggtccttc

SEQ ID NO: 18448 - DNA, 75 bp, synthetic construct
  source 1..75: mol_type = other DNA
ctataaccaccacaaccagttaacgtcagccaccgggcctgacgggctggaattgcgccgggaatatgatgaatc

SEQ ID NO: 18449 - DNA, 75 bp, synthetic construct
  source 1..75: mol_type = other DNA
attcttgttaagaccacgggcaccatgcagatgctgggacgtgccgcaggtactcagactcagccggaagaggcg

SEQ ID NO: 18450 - DNA, 75 bp, synthetic construct
  source 1..75: mol_type = other DNA
agtgcataaacgctggtcatgaaatgacgaaggctatcgccattgcacagtttaatgatgacagcccggaagcga

SEQ ID NO: 18451 - DNA, 75 bp, synthetic construct
  source 1..75: mol_type = other DNA
atgcttattggctatgtacgcgtatcaacaaatgaccagaataccgatctacaacgtaatgcgttgaactgtgca

SEQ ID NO: 18452 - DNA, 75 bp, synthetic construct
  source 1..75: mol_type = other DNA
tggtgaaggccttccgctgccggagacatatgaccgtccggacccgcgtattaagcagctggcgcgccgcagtac

SEQ ID NO: 18453 - DNA, 75 bp, synthetic construct
  source 1..75: mol_type = other DNA
atgagtgcacgtggtatcaacaaggtcatcctcgtcgggcgtctgggtaaagatccggaagtccgttacatcccc

SEQ ID NO: 18454 - DNA, 75 bp, synthetic construct
  source 1..75: mol_type = other DNA
cggtagatggaagagtgcgtgggattacgcacaataaaatattgtgggactcatccactctgggggcaattttga

SEQ ID NO: 18455 - DNA, 75 bp, synthetic construct
  source 1..75: mol_type = other DNA
ggaaaaatatcccgcgcgggatctccctgaccttctccctgtttgccgagatcgccggccgggacagggaaacca

SEQ ID NO: 18456 - DNA, 75 bp, synthetic construct
  source 1..75: mol_type = other DNA
atgtcagttacagagtctaagacaaaaacggagcgtaaatccagccgtaaacctgcaaaaacgcaggaaacagtc

SEQ ID NO: 18457 - DNA, 75 bp, synthetic construct
  source 1..75: mol_type = other DNA
ggggaacagtaaattccgcttcgtgggggctgatgctttctcacctgacgaactgcgtactgatttgttcagcga

SEQ ID NO: 18458 - DNA, 75 bp, synthetic construct
  source 1..75: mol_type = other DNA
cggacgtgtattcacaacaggcggtagtgaggctaaccgctttatggtgcaatcgggtgctgcatgggtgtatga

SEQ ID NO: 18459 - DNA, 75 bp, synthetic construct
  source 1..75: mol_type = other DNA
aaacggtgcgtaaatccagccgtaaatcgtcaaaagaacaggaaaccgccctgtctgccctgctggcgcagacgg

SEQ ID NO: 18460 - DNA, 75 bp, synthetic construct
  source 1..75: mol_type = other DNA
ggcgtttttccgctgtctgaacggaagccgcaggatttcgctgtctgacctgcgatttttcatgccgtccctgac

SEQ ID NO: 18461 - DNA, 75 bp, synthetic construct
  source 1..75: mol_type = other DNA
ttcaatcgtgctctggcgcttcagaatgagaatcatgaggccggtaataaatacatcccttacgggaaaatggct

SEQ ID NO: 18462 - DNA, 75 bp, synthetic construct
  source 1..75: mol_type = other DNA
ggccattgattatgaagatcaggggcgccgggtacgttacgacttcactctgccgggggaagtccacggtaccgg

SEQ ID NO: 18463 - DNA, 75 bp, synthetic construct
  source 1..75: mol_type = other DNA
gctggacaatggttttctgaaagtggttcgctcagctaatgtaaaaacatcgccagggatgattgctgacagttc

SEQ ID NO: 18464 - DNA, 75 bp, synthetic construct
  source 1..75: mol_type = other DNA
accgatgaaatcccgttagatgatgcactgttacaattgcgggaatttatcgacgaaaactccggtgaatttttt

SEQ ID NO: 18465 - DNA, 75 bp, synthetic construct
  source 1..75: mol_type = other DNA
cgctggacatgcagattgaagatatgtggcgcgatgcacgctgggcaatatccgatattcgcggcgtcagacgga

SEQ ID NO: 18466 - DNA, 75 bp, synthetic construct
  source 1..75: mol_type = other DNA
gaaaccggctatatcaattgccttccgtggagccaggaaaaactcagtcgtgcatgccgtgaacttgaacttaag

SEQ ID NO: 18467 - DNA, 75 bp, synthetic construct
  source 1..75: mol_type = other DNA
ttgtttaccacattcgttggttgcatgcttaccgcatttataatcagtctgatttctgacatgaaattagacaat

SEQ ID NO: 18468 - DNA, 75 bp, synthetic construct
  source 1..75: mol_type = other DNA
gaaattgatacgtatagagatacagttggctgaagggtttatagatggttgtctctcgatgctggatattcgttt

SEQ ID NO: 18469 - DNA, 75 bp, synthetic construct
  source 1..75: mol_type = other DNA
ggaaccggatacaactgaacataatcaggacacgcagtcgatggatgctcagccacagataaattctgttgatgc

SEQ ID NO: 18470 - DNA, 75 bp, synthetic construct
  source 1..75: mol_type = other DNA
tcgaaatgtacaacgcatcgcttcccgttccgctttcaccgcctgaatgtcgggctattggcaggagcattgcga

SEQ ID NO: 18471 - DNA, 75 bp, synthetic construct
  source 1..75: mol_type = other DNA
tgacactgaagcggaagacagagggaacagcgcctgtccgcagccggaaaaccatcatcaatgtcaccacgccac

SEQ ID NO: 18472 - DNA, 75 bp, synthetic construct
  source 1..75: mol_type = other DNA
tcgtatgacaacgcgatggcggagagcatcaatggtctttacaaagcggaggtaatacaccgtaagagctggaaa

SEQ ID NO: 18473 - DNA, 75 bp, synthetic construct
  source 1..75: mol_type = other DNA
gtgccgcaacgaaacgacaggagccgcagcacaccgacgaccagtccgaagaataattcctggttcaggatgcag

SEQ ID NO: 18474 - DNA, 75 bp, synthetic construct
  source 1..75: mol_type = other DNA
ctagcggatttagcccgactgcggtgataaatcgttctcaaacaaaacaggcgccaggccacgaaaaaatccgtg

SEQ ID NO: 18475 - DNA, 75 bp, synthetic construct
  source 1..75: mol_type = other DNA
gaacgttctgaccagttgtgggtggctgattttacttacggtgtgcccggagttcagggcgggcatggatgctta

SEQ ID NO: 18476 - DNA, 75 bp, synthetic construct
  source 1..75: mol_type = other DNA
gatctcgtcagaaccggtgcttttctggtggcgatgtccctgtggcatagccatccgcagaagacaaagatgccg

SEQ ID NO: 18477 - DNA, 75 bp, synthetic construct
  source 1..75: mol_type = other DNA
ctcatgggaaacagccattaagcgtgcagggatcaggcatcgaaaggcataccagtcacgacacacttatgcgtg

SEQ ID NO: 18478 - DNA, 75 bp, synthetic construct
  source 1..75: mol_type = other DNA
atgtcgcaaaaatcgctcatcaccgtcacaatttgtatgacggtaatcttcaccatctggatgttacacggctcg

SEQ ID NO: 18479 - DNA, 75 bp, synthetic construct
  source 1..75: mol_type = other DNA
tggtagtggttctgtagccaggtggctgaaggtttatgaagagcgcggagaagctggtttacgcgcgctcaagat

SEQ ID NO: 18480 - DNA, 75 bp, synthetic construct
  source 1..75: mol_type = other DNA
gggaaacactacttcaaattggaaggggctgagttgcgggaatttaagaacaaggttactcaaagtaacttagtt

SEQ ID NO: 18481 - DNA, 75 bp, synthetic construct
  source 1..75: mol_type = other DNA
caggcggcctaccgctgcagatccccgatgacgttagggataaagccgcattactgcatttttatcaaaactggc

SEQ ID NO: 18482 - DNA, 75 bp, synthetic construct
  source 1..75: mol_type = other DNA
actgagggtgacagggaaaattcccggactccgcgtctccggcggtgaccgcctgcaggtggcatccgtcagtga

SEQ ID NO: 18483 - DNA, 75 bp, synthetic construct
  source 1..75: mol_type = other DNA
atgaataaagccgtattaaataacgaactcattgccataaaagcgggagacattaccatttataattatgatggt

SEQ ID NO: 18484 - DNA, 75 bp, synthetic construct
  source 1..75: mol_type = other DNA
agtggatctggggacgggttgttgcgttgtatgaacaggccgccagtgatgatggggaggtatcacgccccagag

SEQ ID NO: 18485 - DNA, 75 bp, synthetic construct
  source 1..75: mol_type = other DNA
tcggtcttgagtttgagaaatcggcatttggtaaatacaacgtggataacgcgatcaacgccaacttccgttact

SEQ ID NO: 18486 - DNA, 75 bp, synthetic construct
  source 1..75: mol_type = other DNA
ctttaccgatagtgctgagctacatcttgttctgcacgatatatcaggcaatccgatcaaagtttctgaagggat

SEQ ID NO: 18487 - DNA, 75 bp, synthetic construct
  source 1..75: mol_type = other DNA
atgaataagtattggctgtcaggaattatttttcttgcctatggattggcttctcccgcgttctcttcagagact

SEQ ID NO: 18488 - DNA, 75 bp, synthetic construct
  source 1..75: mol_type = other DNA
attgcgtcattctggatggagggtccggcagctgcttaccagacactctcgcaactcgtttacaaactgcttact

SEQ ID NO: 18489 - DNA, 75 bp, synthetic construct
  source 1..75: mol_type = other DNA
atgaacaaatcagggaaatacctcgtctggacagtgctctctgtaatgggagcatttgctctgggatacattgct

SEQ ID NO: 18490 - DNA, 75 bp, synthetic construct
  source 1..75: mol_type = other DNA
gcaggacaatatcgactgcgaatcggggattatctttgacaacgatgaagataaaacggattcggcagtactgct

SEQ ID NO: 18491 - DNA, 75 bp, synthetic construct
  source 1..75: mol_type = other DNA
cttccacgcgctgatctcttccggtacgacgccgaaactgctggctaatgaaaccgacgcgcgtttcatcggcta

SEQ ID NO: 18492 - DNA, 75 bp, synthetic construct
  source 1..75: mol_type = other DNA
ctggtaaacaatttaaaaaagaatttcacaaacactatgcagctggatggtaaaaaacaagagttatcatcgatt

SEQ ID NO: 18493 - DNA, 75 bp, synthetic construct
  source 1..75: mol_type = other DNA
tacatcagccgcccggcggtatccgagaagcggctgtcgttaacacgaggcggcaacgtgcgctaccagctcaag

SEQ ID NO: 18494 - DNA, 75 bp, synthetic construct
  source 1..75: mol_type = other DNA
tcaacggcactatcgccaacgaaaccactcttctcgttaatgcccgtgatttacatacttttcttggagtaggta

SEQ ID NO: 18495 - DNA, 75 bp, synthetic construct
  source 1..75: mol_type = other DNA
atatgcgcgcctggccagttaatctggtcggtggtgagctggaaacaggaaaatttcagggcacagccaccatta

SEQ ID NO: 18496 - DNA, 75 bp, synthetic construct
  source 1..75: mol_type = other DNA
gttatttaacgctttctctatttatggctgcgttgatgctttgtgttgcagaacctgcttttgcggatgatgtgt

SEQ ID NO: 18497 - DNA, 75 bp, synthetic construct
  source 1..75: mol_type = other DNA
atgaagaaaaaccccgtaagtataccacacaccgtctggtacgccgacgatatccgccgcggagaacgcgaggcg

SEQ ID NO: 18498 - DNA, 75 bp, synthetic construct
  source 1..75: mol_type = other DNA
gttcgatggtatgaacagactaatgacatgtttgtactggcatcggtattgattgaaagtctgattcagaatcat

SEQ ID NO: 18499 - DNA, 75 bp, synthetic construct
  source 1..75: mol_type = other DNA
agcaaactgcagcaacagatgacctcgtctgagcgtgaaagtgaactggccgctgaaaatgcccgcctgaagcgg

SEQ ID NO: 18500 - DNA, 75 bp, synthetic construct
  source 1..75: mol_type = other DNA
gttatttgattagggttcaatgtttacctgatttaaaccctgactatcttaactaccatttaaatagcattttgg

SEQ ID NO: 18501 - DNA, 75 bp, synthetic construct
  source 1..75: mol_type = other DNA
ccgttcactttaaaggggaagttgttaacgccgcttgcgcagttgatgcaggctctgttgatcaaaccgttcagt

SEQ ID NO: 18502 - DNA, 75 bp, synthetic construct
  source 1..75: mol_type = other DNA
atctgtactgaatgtgctgtggaactggatcctgttccgtaaattttcctctccggaggaagtcgaaaatgtggc

SEQ ID NO: 18503 - DNA, 75 bp, synthetic construct
  source 1..75: mol_type = other DNA
atgtgggtcactcgctacctgatggaacgcaccagctttacactgcccctccagcgccagtagtacctgaagaaa

SEQ ID NO: 18504 - DNA, 75 bp, synthetic construct
  source 1..75: mol_type = other DNA
tacggattcttccgtggtgcattgcgctggcaatgtcagggagttatagcagtgtctgggctgaagacgacattc

SEQ ID NO: 18505 - DNA, 75 bp, synthetic construct
  source 1..75: mol_type = other DNA
aatcacgacagcgtgtggcattaatttacgatgttgggatatcgacgctatataaaaaatttccggcaaccaggt

SEQ ID NO: 18506 - DNA, 75 bp, synthetic construct
  source 1..75: mol_type = other DNA
atgactaaaaaaacacgtttttcccccgaagtccgtcaacgggcagttcgtatggttctggaaagtcagggcgaa

SEQ ID NO: 18507 - DNA, 75 bp, synthetic construct
  source 1..75: mol_type = other DNA
taccgtgataacgccatcgcctacaaagagcagcgcgataaagccacatccatcatcgctgatatgcagaagcgg

SEQ ID NO: 18508 - DNA, 75 bp, synthetic construct
  source 1..75: mol_type = other DNA
gctgaacgtcagcgtctgaaagagctggaacgtgaaaatcgtgaactgcgccgcagcaacaatatccttcgccag

SEQ ID NO: 18509 - DNA, 75 bp, synthetic construct
  source 1..75: mol_type = other DNA
ttttggtagccttgccagacatcagtaatggatcgaataatattgttggatattgtcttgttgttgccggtgtgt

SEQ ID NO: 18510 - DNA, 75 bp, synthetic construct
  source 1..75: mol_type = other DNA
cgcagatcgcgttgctgcccaaatgtattggcaaggtgaagtaatacctggcgaaatcgcattccgcgcagtgtg

SEQ ID NO: 18511 - DNA, 75 bp, synthetic construct
  source 1..75: mol_type = other DNA
gatctgcgtaaagagcgcagcgacgaaatcccggaagcggcaaaagagatcatgcgtgagatggggattaacccg

SEQ ID NO: 18512 - DNA, 75 bp, synthetic construct
  source 1..75: mol_type = other DNA
catacgctgcagtaccgcacatatcacggaaacggacaatgcctggttgtactcgctgtcacatcagacgaatga

SEQ ID NO: 18513 - DNA, 75 bp, synthetic construct
  source 1..75: mol_type = other DNA
atgcaaattggctacattcgtgtgtcaacaaatgaccaaaacacagatttacaaagaaatgcactgaactgcgca

SEQ ID NO: 18514 - DNA, 75 bp, synthetic construct
  source 1..75: mol_type = other DNA
agagctgaaaatgaaactctgcgtgctgatgttgccgctggtcgtaagcgcctgcggatcaacgccacctgctcc

SEQ ID NO: 18515 - DNA, 75 bp, synthetic construct
  source 1..75: mol_type = other DNA
atgattgtctctcccggcaaatgggtatccgaagagcagttaattgcgctgaaaggaataaaaaaaggtacgtta

SEQ ID NO: 18516 - DNA, 75 bp, synthetic construct
  source 1..75: mol_type = other DNA
ttagtaacggtaagcgaaaagaaaaagaatttaataatacaagttatgttgagcgaattggttatacagggaacg

SEQ ID NO: 18517 - DNA, 75 bp, synthetic construct
  source 1..75: mol_type = other DNA
ggcgagaaaaaattatccaggccacgctggaggcggtgaaactttacggaatacatgctgttacgcaccgcaaaa

SEQ ID NO: 18518 - DNA, 75 bp, synthetic construct
  source 1..75: mol_type = other DNA
gaaggtgatcctgaaggggtgcttatagctgatgatgttttgctggcgctcatgttgctggtcgggcactggtac

SEQ ID NO: 18519 - DNA, 75 bp, synthetic construct
  source 1..75: mol_type = other DNA
atcacagcgaacgccgcgcccgtcgtgatgcgcagcgtattgaaaacggcatgaaacgtgccgtgatgctctttg

SEQ ID NO: 18520 - DNA, 75 bp, synthetic construct
  source 1..75: mol_type = other DNA
tggctggagcacatcagaaccgatgccagcgagcgcgtaatgaatgacgtgacgctgacctcccgcaacatggac

SEQ ID NO: 18521 - DNA, 75 bp, synthetic construct
  source 1..75: mol_type = other DNA
tacaataccgcagccagaaactatattgccgacaacaatgcccgtctgcatagcggcagccttccggcaaatttc

SEQ ID NO: 18522 - DNA, 75 bp, synthetic construct
  source 1..75: mol_type = other DNA
tgatgcccggttatgagtttgcgcagaaaaactcagaattgcaggccgtgctcggtgtggcaaaagactccgccg

SEQ ID NO: 18523 - DNA, 75 bp, synthetic construct
  source 1..75: mol_type = other DNA
atatccagagtacaaatcaccgttgtactctgactcgttgcaacgattgactccgcatacaacccgacatacttg

SEQ ID NO: 18524 - DNA, 75 bp, synthetic construct
  source 1..75: mol_type = other DNA
acgtaactttattaccggaatggccacagctaaagctaaccaggaaatacaggagtggctcgggaaatatggtac

SEQ ID NO: 18525 - DNA, 75 bp, synthetic construct
  source 1..75: mol_type = other DNA
ggccagacggtagagacctggaaccgggacggcggcacaagtactgaacaggcgtataaaaatatcccgttctac

SEQ ID NO: 18526 - DNA, 75 bp, synthetic construct
  source 1..75: mol_type = other DNA
gacgccatcagaaccggtgcttttgtggtggcgatgtccctgtggcataaccatccgcagaagacaaagcagcct

SEQ ID NO: 18527 - DNA, 75 bp, synthetic construct
  source 1..75: mol_type = other DNA
cgttatccgataaaggtggtgcgcatggagggggatcctgaacgtaatccgttcgggctggcgctggactgctac

SEQ ID NO: 18528 - DNA, 75 bp, synthetic construct
  source 1..75: mol_type = other DNA
cgtgtgtgctctcggtacatctggcgcaagcgttgcgcgatgcgcagctcgataccgcgacccgtttatcctctc

SEQ ID NO: 18529 - DNA, 75 bp, synthetic construct
  source 1..75: mol_type = other DNA
atgacccgcctgcaggacgagctgcgcacggaatctgtccggggtcaggcccgtgaacagtttaccggtgcggtg

SEQ ID NO: 18530 - DNA, 75 bp, synthetic construct
  source 1..75: mol_type = other DNA
acatccggttgtggccgtatcggcccgcaccggctgggaactggatacgctggtcagtgcgctcatgacagcgct

SEQ ID NO: 18531 - DNA, 75 bp, synthetic construct
  source 1..75: mol_type = other DNA
cggtattccggctgttccggcccgtacatccggttgttgccgtatcggcccgcaccggctgggaactggatacgc

SEQ ID NO: 18532 - DNA, 75 bp, synthetic construct
  source 1..75: mol_type = other DNA
aacaatccccttatcttcgggctgtcgatattctgcgagcgcgacaggcaactggcctgttgcgacgaaatcgaa

SEQ ID NO: 18533 - DNA, 75 bp, synthetic construct
  source 1..75: mol_type = other DNA
gcacggaatctgtccgctctcaggcccgtgaacagtttaccggtgcggtggaccggatatttgacacagcggaga

SEQ ID NO: 18534 - DNA, 75 bp, synthetic construct
  source 1..75: mol_type = other DNA
ttatttcgggagtactgattctttcagtattgctgcctgtcggcttaagcatctggctggcccatcagcaggtag

SEQ ID NO: 18535 - DNA, 75 bp, synthetic construct
  source 1..75: mol_type = other DNA
catgccggaatgggccagggataatccttcccatttctggcaggcggctgaccagtttgaacgtgcgaacggttc

SEQ ID NO: 18536 - DNA, 75 bp, synthetic construct
  source 1..75: mol_type = other DNA
ccgaagcgaaagccaaatgtctaaatcagaaagatggtaaacaaaaatatgtagtcgttgagcagtggttgaaga

SEQ ID NO: 18537 - DNA, 75 bp, synthetic construct
  source 1..75: mol_type = other DNA
ggcaatgccggacaacgaaaaaaccgaatgcgaagtggaagacgaaccatctgtagagcgtgagggaccgttcta

SEQ ID NO: 18538 - DNA, 75 bp, synthetic construct
  source 1..75: mol_type = other DNA
cggttgggtagttatgtgggatggctggttcagacatcaggatatggctgagggttacctggtgatgaagtctct

SEQ ID NO: 18539 - DNA, 75 bp, synthetic construct
  source 1..75: mol_type = other DNA
gaagctactcgtaatttcacgggttataaacctgtgaaaaaggaaaacctagtgttcgtatcgcgtagagcatcg

SEQ ID NO: 18540 - DNA, 75 bp, synthetic construct
  source 1..75: mol_type = other DNA
atggagactgtttttgacgcactgaaagcaatgggaaaagccacgtcggtagaactggctgcgcgacttgatatc

SEQ ID NO: 18541 - DNA, 75 bp, synthetic construct
  source 1..75: mol_type = other DNA
ccgctgatggcgctgttcaatgcggtctccctgatgtcccttaacccggaaccgaaaaagaaagaatatgcggtt

SEQ ID NO: 18542 - DNA, 75 bp, synthetic construct
  source 1..75: mol_type = other DNA
ggacaccattaaatggtggcttaagcaatcacgcgaagcgcaatctgccattatgaccgatgaaatcccgttaga

SEQ ID NO: 18543 - DNA, 75 bp, synthetic construct
  source 1..75: mol_type = other DNA
ctgattctacttacgtcagcacatggcagggggtcgtctatgtggcgttcatcattgatgtgtttgccggataca

SEQ ID NO: 18544 - DNA, 75 bp, synthetic construct
  source 1..75: mol_type = other DNA
gcaggccgggcagattgtctacctgccagagatccagccgccagcccagcgggaaaccgtgcagctatgggatta

SEQ ID NO: 18545 - DNA, 75 bp, synthetic construct
  source 1..75: mol_type = other DNA
tccgcgcattaaacagctggcgcgccgcagtacagtgacgccgggtggggctgcctgcagatataacgatattat

SEQ ID NO: 18546 - DNA, 75 bp, synthetic construct
  source 1..75: mol_type = other DNA
caactggcagaagcagaaacgcaaaatacagcgactgcattcctgtatcgcaaatatccgcagggactaccttca

SEQ ID NO: 18547 - DNA, 75 bp, synthetic construct
  source 1..75: mol_type = other DNA
acctccggcaatcgtcgcccgtatggccgcaaccatcgactccatctctggcgggcgttttggcgtcaacctcgt

SEQ ID NO: 18548 - DNA, 75 bp, synthetic construct
  source 1..75: mol_type = other DNA
cggcaaatgttatctggtggggctggccgtcaccgatgacccggcaagcctcggcacggaatacctggaattctg

SEQ ID NO: 18549 - DNA, 75 bp, synthetic construct
  source 1..75: mol_type = other DNA
gaatatgccaatatggttgaagatatcagagagaaggtgtcggctgagatggaaaggttctttccaaaaaatgat

SEQ ID NO: 18550 - DNA, 75 bp, synthetic construct
  source 1..75: mol_type = other DNA
ctgcatttaaccagacagagtttaataaacttcttcttgaatgtgttgtaaaaacacagtcaacggtggcaaaga

SEQ ID NO: 18551 - DNA, 75 bp, synthetic construct
  source 1..75: mol_type = other DNA
ggggccgggaaacattattgagacaaacagcaatggctggttcccggatacagatggcgcactcatcaccggact

SEQ ID NO: 18552 - DNA, 75 bp, synthetic construct
  source 1..75: mol_type = other DNA
gtgccggaaataaaaaccgcaaaagacttcctgcagaaaatggcaagcgacattaacagtatgaacctcagttcc

SEQ ID NO: 18553 - DNA, 75 bp, synthetic construct
  source 1..75: mol_type = other DNA
tttggcgacgggccgtggcaggatgttaagggactggatgaagtgggcagtgatacaggcagaacaggagaatga

SEQ ID NO: 18554 - DNA, 75 bp, synthetic construct
  source 1..75: mol_type = other DNA
tcactcaggcggttaactccctcgtcacagcactgaaactgcctgacgaatccgcaaaggccaatgaagttctgg

SEQ ID NO: 18555 - DNA, 75 bp, synthetic construct
  source 1..75: mol_type = other DNA
ggttcaaactggcaactgtaacaatgccacaagccagttccgtggtttacataagcctgattggtggcgcagggt

SEQ ID NO: 18556 - DNA, 75 bp, synthetic construct
  source 1..75: mol_type = other DNA
ctgcttaaccagaacgacgtcaccacgcttgtgcgcaaggatggtttccgcttctggggttcccgctgtctgagc

SEQ ID NO: 18557 - DNA, 75 bp, synthetic construct
  source 1..75: mol_type = other DNA
aacgtgattccactggcaccgggccatgcctacgggatgtttatggaacgctttaacgagttatcggagttacgc

SEQ ID NO: 18558 - DNA, 75 bp, synthetic construct
  source 1..75: mol_type = other DNA
tgccaggacatccccgcaccactgaaacgccttcttcctgactataaacggatggaagaaaaaatagacgccgta

SEQ ID NO: 18559 - DNA, 75 bp, synthetic construct
  source 1..75: mol_type = other DNA
ataaaagttctccggtgggacaaacatggcgtatggctgtgtacccgacgactgcaccggggaagcttccgctgg

SEQ ID NO: 18560 - DNA, 75 bp, synthetic construct
  source 1..75: mol_type = other DNA
atgacgctcgcagagctgggcatggccttctggcatgatttagcggctccggtcattgctggcattcttgccagt

SEQ ID NO: 18561 - DNA, 75 bp, synthetic construct
  source 1..75: mol_type = other DNA
ggagaacgcggaagaagaaacgccgcccgacgaatcatcctggccgaacatgaccgaaagtacccccttcccatt

SEQ ID NO: 18562 - DNA, 75 bp, synthetic construct
  source 1..75: mol_type = other DNA
gtccgcttatcggtgtcaatgctcctaaaggcgctactctgacggcaacgctaacctctgcaaatggcactccag

SEQ ID NO: 18563 - DNA, 75 bp, synthetic construct
  source 1..75: mol_type = other DNA
cgtgaaggttactggcaacccaagcaccgcacatgttgctagctttatcgctgatccgtcgactatcgccgccac

SEQ ID NO: 18564 - DNA, 75 bp, synthetic construct
  source 1..75: mol_type = other DNA
gggcaaaagcgccagcggtaaaccactgccggtgatctcaatcacacgtaaggacggcgacagtcaccgctttac

SEQ ID NO: 18565 - DNA, 75 bp, synthetic construct
  source 1..75: mol_type = other DNA
cagaaagcagacaccatacgtatgatgctcccgttctttcagcagttccgggatatggggatgaaagacaaagca

SEQ ID NO: 18566 - DNA, 75 bp, synthetic construct
  source 1..75: mol_type = other DNA
tatgccaccgcccgtgcgcttggtctgcgtgccaaaattgatgagcagactgggtggcacaaaagcctgtccaac

SEQ ID NO: 18567 - DNA, 75 bp, synthetic construct
  source 1..75: mol_type = other DNA
atgctgcatgaactctggctgcagagcggtactggacagcgtcgctgggaaggattaccggatgatgtcagggaa

SEQ ID NO: 18568 - DNA, 75 bp, synthetic construct
  source 1..75: mol_type = other DNA
ggtttgggagaaggctctgcattacctgttggtgtgcctgttccatggccttcagccacaccgccaacaggctgg

SEQ ID NO: 18569 - DNA, 75 bp, synthetic construct
  source 1..75: mol_type = other DNA
cgaccaggactacttcatccgctcttatgacgacaacaacaaaggcatctatgcaggccagccgcgcacgctgta

SEQ ID NO: 18570 - DNA, 75 bp, synthetic construct
  source 1..75: mol_type = other DNA
ggcgaacacgaagtgagcttccaggttcacagcgaagtattcgcgaaagtgatcgtaaacgtagtagctgaataa

SEQ ID NO: 18571 - DNA, 75 bp, synthetic construct
  source 1..75: mol_type = other DNA
cgtgaacagctacgcaacgatattgcaaaagatgaatgcgcccacgctttgcctgacgctcgttttactgacagg

SEQ ID NO: 18572 - DNA, 75 bp, synthetic construct
  source 1..75: mol_type = other DNA
aggaagagacgctgttacgtgtggatgcggcgatcaacaaaaaataccgccatgcggatggcaccgaaatgacca

SEQ ID NO: 18573 - DNA, 75 bp, synthetic construct
  source 1..75: mol_type = other DNA
cggcagaagcacagcgtcagtcactgattgatactgcaatggcttccattagtctgattcagctgaaattgcagg

SEQ ID NO: 18574 - DNA, 75 bp, synthetic construct
  source 1..75: mol_type = other DNA
taactctttctgtatttatggctgcattgatgctttgtgtagcagaacccgcctttgctgatgatgtatccacta

SEQ ID NO: 18575 - DNA, 75 bp, synthetic construct
  source 1..75: mol_type = other DNA
catgcccggtggcctgtctcgcgcggattacgacgccgatcgctggcaatccacccgcccgtatgaccgcttctg

SEQ ID NO: 18576 - DNA, 75 bp, synthetic construct
  source 1..75: mol_type = other DNA
aagccagcaatcaccatcattgcgctggtaattggttatatcgctatcttctcacgccagcatgcagcgtggatt

SEQ ID NO: 18577 - DNA, 75 bp, synthetic construct
  source 1..75: mol_type = other DNA
atgaacaaaaaaatatacattttattcgccctgacagcaggactgtttatctctgctcatgcttcagaaaatgtg

SEQ ID NO: 18578 - DNA, 75 bp, synthetic construct
  source 1..75: mol_type = other DNA
gtaatgatgtctatgataaagtaaatgcgatagttgaacagcgtcgtcaggagggggcaagagataaagatataa

SEQ ID NO: 18579 - DNA, 75 bp, synthetic construct
  source 1..75: mol_type = other DNA
ataaaacggattcagcagcactgctgccctgcattgaacaggccagggaagatatccgtaccctgcgccaactgc

SEQ ID NO: 18580 - DNA, 75 bp, synthetic construct
  source 1..75: mol_type = other DNA
ggacgggagaaggaaatttctggtccttccgtacgggaaatcggcaacggtgattccctatcaggagaaggactg

SEQ ID NO: 18581 - DNA, 75 bp, synthetic construct
  source 1..75: mol_type = other DNA
cgatgatgtgcgtccgatgcttgagcagatggtgaaagaggccgtaagccatatccctgctccgcgtgatggtcg

SEQ ID NO: 18582 - DNA, 75 bp, synthetic construct
  source 1..75: mol_type = other DNA
ggcggctggtggctgacccgcagttaaagaccaccagcaagggtacacaaatgacgatggcgagtatggcggtcc

SEQ ID NO: 18583 - DNA, 75 bp, synthetic construct
  source 1..75: mol_type = other DNA
caccagtgaaggggctttttcttatctcgcacgcgatttggggctaaaagagctttatctgtggccgattaatgc

SEQ ID NO: 18584 - DNA, 75 bp, synthetic construct
  source 1..75: mol_type = other DNA
tgaagcagcaggaaacactgagtcagcagttacgtgaaaagccggacacacagttgcaggcatgggcagagcagc

SEQ ID NO: 18585 - DNA, 75 bp, synthetic construct
  source 1..75: mol_type = other DNA
acctgaagatccgttttccttcagacttgagatccataaatgctctgaattatttacaggttccgtctatcgact

SEQ ID NO: 18586 - DNA, 75 bp, synthetic construct
  source 1..75: mol_type = other DNA
tatgtggatgacaaggtactggagctgaaggtgtacgtagatgacctgatggcaaaacatcttgctgcacaggac

SEQ ID NO: 18587 - DNA, 75 bp, synthetic construct
  source 1..75: mol_type = other DNA
actgaccacagagctgacagcactgaaggaaaaactgcgcacgcaggacggcgatccgcagaaccggttcaccgc

SEQ ID NO: 18588 - DNA, 75 bp, synthetic construct
  source 1..75: mol_type = other DNA
gaaaactataatcctgaatacaaagagtggaagattgaaacactccctttgcgtctttatcccgtaaaataccag

SEQ ID NO: 18589 - DNA, 75 bp, synthetic construct
  source 1..75: mol_type = other DNA
aaacaatttaccgaacaaacactgagtaatattgccaagagcttaggtgttgatattgctgatctctttacctct

SEQ ID NO: 18590 - DNA, 75 bp, synthetic construct
  source 1..75: mol_type = other DNA
gttcttggtggtgcacatattcaacctgaccccaaaaaaacggatcagctacttaccgcgcttcgcgcgttgctg

SEQ ID NO: 18591 - DNA, 75 bp, synthetic construct
  source 1..75: mol_type = other DNA
tgcggcagagtcagcagcgtcgggtgatggcacagaaagccccggacggcacaccctacgcgccacgccagcagc

SEQ ID NO: 18592 - DNA, 75 bp, synthetic construct
  source 1..75: mol_type = other DNA
gttttcttcccgagtattccaaataccttcgaagttgtttttgagcaacactttacttcaaacattaactattgc

SEQ ID NO: 18593 - DNA, 75 bp, synthetic construct
  source 1..75: mol_type = other DNA
tttggatcagaaaatcagtaaacagcttgatgcggtcatgcaccatcctgaattccagaaagtcgagtcgctgtg

SEQ ID NO: 18594 - DNA, 75 bp, synthetic construct
  source 1..75: mol_type = other DNA
atgccatcacgaatcccccgcgcatgtcgtaagcgaggctgcgcaggcacaacaacagacagttcgggctactgc

SEQ ID NO: 18595 - DNA, 75 bp, synthetic construct
  source 1..75: mol_type = other DNA
accaaaccaaaggcaaatacagcgctgctcatggtactagtagcccaactgccagcgtaatcaccgatgttgcgg

SEQ ID NO: 18596 - DNA, 75 bp, synthetic construct
  source 1..75: mol_type = other DNA
aaaagcgaagccggactgcaaattaccggataaggcgatggactacctgaagcgaaacggactgataaacgagga

SEQ ID NO: 18597 - DNA, 75 bp, synthetic construct
  source 1..75: mol_type = other DNA
ttgcgggtaataaaccgcaacggattcgtcgtattcagacagtgaccctggttttattatttatggcggggatcg

SEQ ID NO: 18598 - DNA, 75 bp, synthetic construct
  source 1..75: mol_type = other DNA
atgaaaaagatttctttatttattcctctgctggggacgttattactttctggctgtgccggaactaatacggaa

SEQ ID NO: 18599 - DNA, 75 bp, synthetic construct
  source 1..75: mol_type = other DNA
aagcagaagaacgaatccacgtaccagacggtgtacggcagctataaaaacaaaacggaaaagaatatccatttc

SEQ ID NO: 18600 - DNA, 75 bp, synthetic construct
  source 1..75: mol_type = other DNA
aaacaatgggcaacgggccatacgcgccagttatttctattggggcggtattctttgacccgaataccggagaaa

SEQ ID NO: 18601 - DNA, 75 bp, synthetic construct
  source 1..75: mol_type = other DNA
atgagaaaatggcttctgacgatctgcctgatgtttataaatgtgacctgcaaggctggtgattgctttgatctg

SEQ ID NO: 18602 - DNA, 75 bp, synthetic construct
  source 1..75: mol_type = other DNA
gatattcttctggaagaggttctgaggcaggctggtattccgttgctcagaagccacgatgccagaaaactgctg

SEQ ID NO: 18603 - DNA, 75 bp, synthetic construct
  source 1..75: mol_type = other DNA
tatgatgaatggtggaaacatattggttttgcgggatatcctaggacattcagatataaaaatgaccatggtcta

SEQ ID NO: 18604 - DNA, 75 bp, synthetic construct
  source 1..75: mol_type = other DNA
aatttccactgtcgtctgaaacctttgtactcaatcaaatcaccgcgtttatcgatatgggatatgacgtggaaa

SEQ ID NO: 18605 - DNA, 75 bp, synthetic construct
  source 1..75: mol_type = other DNA
tgatccggctattgaatatgtgcagacacattcagcaccacagccaataccggcccgcatcaatcgttttgttac

SEQ ID NO: 18606 - DNA, 75 bp, synthetic construct
  source 1..75: mol_type = other DNA
cgaaactggtcggtgaaatggtcagggcagaattggaacgacgcgaccgtgccggacgtggcagtttttacgata

SEQ ID NO: 18607 - DNA, 75 bp, synthetic construct
  source 1..75: mol_type = other DNA
ccagggcagacaaaaacgagctggcgcaggtggcactgcgtcaggaactggagaacgccgcgaagcgtgaagcac

SEQ ID NO: 18608 - DNA, 75 bp, synthetic construct
  source 1..75: mol_type = other DNA
caacggaaattatcagtcggtcatggaaacggctggtgattaacaaggaaaaacatatcacccgcaggggataca

SEQ ID NO: 18609 - DNA, 75 bp, synthetic construct
  source 1..75: mol_type = other DNA
atgattaagtcggttattgccggtgcggcagctatggcagtggtgtcttttggtgcaaatgcagctccacagggg

SEQ ID NO: 18610 - DNA, 75 bp, synthetic construct
  source 1..75: mol_type = other DNA
agcaaattttccaaaatcaacgacaatatcgtgttccattctatcaacgtgcctacgtatggacgcaacgaaacc

SEQ ID NO: 18611 - DNA, 75 bp, synthetic construct
  source 1..75: mol_type = other DNA
ttttctgttcgtgaagtaacggtaaagcacggaataccagcctttggtactgtatgcaactggcttgaaaaatat

SEQ ID NO: 18612 - DNA, 75 bp, synthetic construct
  source 1..75: mol_type = other DNA
taccgcttcgacaaggacctggctgaacgggccgcgaaatttattcagctgttgccgcacaccaagggtgagtgg

SEQ ID NO: 18613 - DNA, 75 bp, synthetic construct
  source 1..75: mol_type = other DNA
agcaactcatcaaaattcgtgatgagaaatgcgatggtaaagcggttaacgtggccagaaagatcgggcgcgagc

SEQ ID NO: 18614 - DNA, 75 bp, synthetic construct
  source 1..75: mol_type = other DNA
gtgccccttcagaggagcgaaagctcctcctgccgtccacttcacaggggtttctccccgcagtggacctttccg

SEQ ID NO: 18615 - DNA, 75 bp, synthetic construct
  source 1..75: mol_type = other DNA
ggaaatcaacggtaataacgggaaagtgattcaggacggcgatctggatgtcagcggcggcggtcacggtattga

SEQ ID NO: 18616 - DNA, 75 bp, synthetic construct
  source 1..75: mol_type = other DNA
gaccgccgtcatgttgttctggccagtcaccctgccagctgcaaccgacattgttgccgacagactgaaaaaaag

SEQ ID NO: 18617 - DNA, 75 bp, synthetic construct
  source 1..75: mol_type = other DNA
gtggtgttgatggatatccgcatgccagagatggacggcatcaaggcactaaaggagatgcgcagccatgagacc

SEQ ID NO: 18618 - DNA, 75 bp, synthetic construct
  source 1..75: mol_type = other DNA
gctcgtcgcgccgtttggcgatatgacggtgaaatgccatcagcattattacatcaccacattaccgggcaggca

SEQ ID NO: 18619 - DNA, 75 bp, synthetic construct
  source 1..75: mol_type = other DNA
tttaatgcaaaaatcggtgcagccgttgccaaaatcgatcaagcgcacagccattctgctcactctcggcatcag

SEQ ID NO: 18620 - DNA, 75 bp, synthetic construct
  source 1..75: mol_type = other DNA
gatctgcgtgaacgtcttcagtcctcgtcgcttggtgatcttgcgaataacgtcaaaggtgccctgaataatctg

SEQ ID NO: 18621 - DNA, 75 bp, synthetic construct
  source 1..75: mol_type = other DNA
atgataccaggatcaactggcaattactcgccattcgtgcactggtgaaagaaggtaaaaccgggcaggcggttg

SEQ ID NO: 18622 - DNA, 75 bp, synthetic construct
  source 1..75: mol_type = other DNA
ccacagcacaaggaattcgtaggaaaaatagacgaggttttgcgcaatttcgacgagaaaatactgtctcttgac

SEQ ID NO: 18623 - DNA, 75 bp, synthetic construct
  source 1..75: mol_type = other DNA
ccgtgatgaattaattgatacaactcaggcaaggccaattcagtattgcattaatgggacgtggtataacgcggg

SEQ ID NO: 18624 - DNA, 75 bp, synthetic construct
  source 1..75: mol_type = other DNA
ctgtgttgtgtttgggtgggtgagaaaaaagagcggtctgcgtcgatttcgcgaggcttacaacgaaataccccg

SEQ ID NO: 18625 - DNA, 75 bp, synthetic construct
  source 1..75: mol_type = other DNA
gacctgaaccccatcactatcattcagaactacaccaacatgtccgacccgatgaaagagctggaagcggcaatt

SEQ ID NO: 18626 - DNA, 75 bp, synthetic construct
  source 1..75: mol_type = other DNA
aaccgcaggtgcggatatcaagacagcgactgacttttgatgagtggatgatgatttataacgcagcggaaaagg

SEQ ID NO: 18627 - DNA, 75 bp, synthetic construct
  source 1..75: mol_type = other DNA
agcgcagagaattaaatcatcgtttttgggtattcttgttattgatgaaatgcagcggctgaaattttccagaac

SEQ ID NO: 18628 - DNA, 75 bp, synthetic construct
  source 1..75: mol_type = other DNA
acatgacgctatagatagacagatggggaaacttttaactttatatgaaacatcatatatggctattaaaagcac

SEQ ID NO: 18629 - DNA, 75 bp, synthetic construct
  source 1..75: mol_type = other DNA
gaaaatacaaccactatcgccccgttaacgccatacgataaatgggatggtgagaaatgggtgacggataccgag

SEQ ID NO: 18630 - DNA, 75 bp, synthetic construct
  source 1..75: mol_type = other DNA
cccttacactgcagaaatggcgagagaattagcaatatggtacggtaatgagtatgtgcggttgtctaatccgtt

SEQ ID NO: 18631 - DNA, 75 bp, synthetic construct
  source 1..75: mol_type = other DNA
tacttgttaaacgcgctgtattccacaagcaaatttcctcagtggatgaactgacaaaattaacgacagaactcg

SEQ ID NO: 18632 - DNA, 75 bp, synthetic construct
  source 1..75: mol_type = other DNA
acgttccggatatcggcagcgacgaagttgaagtgaccgaaatcctggtgaaagttggcgataaagttgaagctg

SEQ ID NO: 18633 - DNA, 75 bp, synthetic construct
  source 1..75: mol_type = other DNA
ttcccctcagcacagagcaacaggccgcatggcgggcggtggcggagaccgaaaaacgccgccatcagggtaaca

SEQ ID NO: 18634 - DNA, 75 bp, synthetic construct
  source 1..75: mol_type = other DNA
cgcgtattgctcgtgaaattgctgtacccaatagcgatgtccgaaaaaaacctccgttctcacatgaaacagcca

SEQ ID NO: 18635 - DNA, 75 bp, synthetic construct
  source 1..75: mol_type = other DNA
gttgatcaaaccgttcagttgggccaggttcgtaccgcttcgctggaccaggatggagcgaccagctctgctgtc

SEQ ID NO: 18636 - DNA, 75 bp, synthetic construct
  source 1..75: mol_type = other DNA
aaaaaccttctgaatggtgcagccagcgatgcagaacggtcttctgcccgtatgcagcgttttatggagcgtcag

SEQ ID NO: 18637 - DNA, 75 bp, synthetic construct
  source 1..75: mol_type = other DNA
cctgcctgatatcttggggatggagattgccataaatggtgaggttttctcgttatcccgcgaagcctggcagcg

SEQ ID NO: 18638 - DNA, 75 bp, synthetic construct
  source 1..75: mol_type = other DNA
gaaaaaacttgagcaatgcacgtcaggtgcaattacgaaatctgacttaagaccggatatctatccgaaagatta

SEQ ID NO: 18639 - DNA, 75 bp, synthetic construct
  source 1..75: mol_type = other DNA
gcgaacaggtggtaattgcctgcattggcggcaacccggaaaccgccatgataattggcagcctgtggagtgatg

SEQ ID NO: 18640 - DNA, 75 bp, synthetic construct
  source 1..75: mol_type = other DNA
gatgtgcgggttatccgcaacctgattaccgaaagtgaagtggcggtggcggggaacagtaaattccgcttcgtg

SEQ ID NO: 18641 - DNA, 75 bp, synthetic construct
  source 1..75: mol_type = other DNA
atgagcgcacgttcacaggcactggttcccctcagcgcagagcaacaggccgcatggcgggcggtggcggagaca

SEQ ID NO: 18642 - DNA, 75 bp, synthetic construct
  source 1..75: mol_type = other DNA
tgatatgactaatttttacacaattaactacgatagcgcgcttttagatgatggcaaagtgaacgaatccatcgg

SEQ ID NO: 18643 - DNA, 75 bp, synthetic construct
  source 1..75: mol_type = other DNA
cgaaccgggaaactgaagaaaaatgtggttgttctcactcagcgttcaaagcgtcggggggaaattatctcgggt

SEQ ID NO: 18644 - DNA, 75 bp, synthetic construct
  source 1..75: mol_type = other DNA
ctttgctgacgctggagttatccggcgtaaaaacgtatgagtcccaggaggaggcctggggcgctcgtttatatg

SEQ ID NO: 18645 - DNA, 75 bp, synthetic construct
  source 1..75: mol_type = other DNA
tgcagatgctggggagtgcaccacagcagaacgctcaggcgcaaccgaagcctcagcagaatgggcagccacaga

SEQ ID NO: 18646 - DNA, 75 bp, synthetic construct
  source 1..75: mol_type = other DNA
gtggcaaacctgcaggtggccacgtcagaaagctggcgtgacaaacagacgggggagatgcgggagcagacagaa

SEQ ID NO: 18647 - DNA, 75 bp, synthetic construct
  source 1..75: mol_type = other DNA
ctggcgcgtaatgatgacaccggctttcagcaagtgctggaacgtgctgactatctggcgaaggagcataccaaa

SEQ ID NO: 18648 - DNA, 75 bp, synthetic construct
  source 1..75: mol_type = other DNA
aacggacgcagctgtgatatcccgcttcatcaatgccctgaaagcccgaatcgacgcttaccagaagcgtaagcg

SEQ ID NO: 18649 - DNA, 75 bp, synthetic construct
  source 1..75: mol_type = other DNA
aaaaactccaggctgtcgctgaacaccttcgggaagccgaaggctgggaatggtgcgccggacgcatggagcctg

SEQ ID NO: 18650 - DNA, 75 bp, synthetic construct
  source 1..75: mol_type = other DNA
cgggagtggatattcgtcctgataccggagcgggcgtattacgcatcaatatgccgcaggcctggcttgagtatt

SEQ ID NO: 18651 - DNA, 75 bp, synthetic construct
  source 1..75: mol_type = other DNA
atctagtcattgacatcctgaatgatttgatctgtgaaggaaaaatgctgaacgatgtggagcgcagatctctgc

SEQ ID NO: 18652 - DNA, 75 bp, synthetic construct
  source 1..75: mol_type = other DNA
tctaaagagcgcctggaagcgctgcgcgaagagcaaatggcgaaaggtgagaagccgcgttatgacggtcgctgc

SEQ ID NO: 18653 - DNA, 75 bp, synthetic construct
  source 1..75: mol_type = other DNA
gtaatccaatgtgcacttgaaaccggcacgtcgctagagtggctaactactgggcaaggttcaaaagaaagttca

SEQ ID NO: 18654 - DNA, 75 bp, synthetic construct
  source 1..75: mol_type = other DNA
tgaccggatgcgcttcacgaagagtgaccgggagcgcggttatgtggccaacagcgtctggacggtgacagcggt

SEQ ID NO: 18655 - DNA, 75 bp, synthetic construct
  source 1..75: mol_type = other DNA
aagcgaaactggcagaagcgcagcagaaggcgatgctgaaaggcgaggctttcccggatgtccccatgacactgt

SEQ ID NO: 18656 - DNA, 75 bp, synthetic construct
  source 1..75: mol_type = other DNA
atgcaacacgaactacaacctgattcactggttgatttgaaattcatcatggctgatactggcttcggtaagacc

SEQ ID NO: 18657 - DNA, 75 bp, synthetic construct
  source 1..75: mol_type = other DNA
ttctgattatttcggtgatctgcgctattggcattatgcgaattattcattcagtgaaaaagattgagcgttttt

SEQ ID NO: 18658 - DNA, 75 bp, synthetic construct
  source 1..75: mol_type = other DNA
ctgatgctggattataacctcaacgggacggtttcccgtaattatcagggaggagactctcatcagttcagttat

SEQ ID NO: 18659 - DNA, 75 bp, synthetic construct
  source 1..75: mol_type = other DNA
ttcacagactcagctaattcaggtgctgcaaaggtactcaagtcgggtaatgctttacggaagttttctgtgaat

SEQ ID NO: 18660 - DNA, 75 bp, synthetic construct
  source 1..75: mol_type = other DNA
gggcacagcttataaatgctattgctctaaagagcgcctggaagcgctgcgcgaagagcaaatggcgaaaggtga

SEQ ID NO: 18661 - DNA, 75 bp, synthetic construct
  source 1..75: mol_type = other DNA
acgctggttggcggttgtattggacttattttgtatttgctgtcgcagctcccggccttgttccccctcggcaat

SEQ ID NO: 18662 - DNA, 75 bp, synthetic construct
  source 1..75: mol_type = other DNA
atgaaaagcaaagtactggcactcttaattcctgccctgctcgctgcaggtgctgcacatgcagccgaagtttat

SEQ ID NO: 18663 - DNA, 75 bp, synthetic construct
  source 1..75: mol_type = other DNA
tgtacgtgaaggggcgatgtcagaagtcgaactgttacgtatgcagcgccagtcagctgaactgcagttgcagat

SEQ ID NO: 18664 - DNA, 75 bp, synthetic construct
  source 1..75: mol_type = other DNA
ggatttttaagcttgccaacttactgggcaccggcaagcccgtttccgctgccgacattataaccagtctggaat

SEQ ID NO: 18665 - DNA, 75 bp, synthetic construct
  source 1..75: mol_type = other DNA
atgcggaaaaatataacgagtgggcaagaaaattctctgagcagatttttaaaattactggcgatgagaatgtgg

SEQ ID NO: 18666 - DNA, 75 bp, synthetic construct
  source 1..75: mol_type = other DNA
tgaaatggcaatcgactggcgatgttggcatcagtagcgcaactcttgcctcaatcgcatgtggactgaaaaaga

SEQ ID NO: 18667 - DNA, 75 bp, synthetic construct
  source 1..75: mol_type = other DNA
tttgcagctatagataaacgtcttcctttgctgatatcggagttactgacagaaaatacgactctggatgatatt

SEQ ID NO: 18668 - DNA, 75 bp, synthetic construct
  source 1..75: mol_type = other DNA
cgcgtggcctttggcacatcacgcgaacagcaattcaacctgcatactcaggagacctggaccggcagcgtgctg

SEQ ID NO: 18669 - DNA, 75 bp, synthetic construct
  source 1..75: mol_type = other DNA
atgctgaagcagctgggcaacctgaatccgcagcagtttatgtccggcagccagggagggggcaacgatggcaaa

SEQ ID NO: 18670 - DNA, 75 bp, synthetic construct
  source 1..75: mol_type = other DNA
gtgccggatatgaccggtgtggtggatacgacctttgatgacaaggtgcgtcagcatgccaccacagagatgcag

SEQ ID NO: 18671 - DNA, 75 bp, synthetic construct
  source 1..75: mol_type = other DNA
acctcatcctccgatggccagcgcttccgcgcgggtggccggggcgagagcaccgggcacgtcaacccgaagtac

SEQ ID NO: 18672 - DNA, 75 bp, synthetic construct
  source 1..75: mol_type = other DNA
aaaacgtgcttgatgccattgaggtgctgcgcggcatgaacaccgacaacgcccgcaagctgccagccgatgcac

SEQ ID NO: 18673 - DNA, 75 bp, synthetic construct
  source 1..75: mol_type = other DNA
tgccgcgaccacgaaatcgacctgatgatcgacattctctgccgccgccgcaagaacaacccggtggtggtgggc

SEQ ID NO: 18674 - DNA, 75 bp, synthetic construct
  source 1..75: mol_type = other DNA
tttctgtccacgctgaataaaatggcagagaagaagaaaaacaccgggaaagagatgtttgtgggggttacccgg

SEQ ID NO: 18675 - DNA, 75 bp, synthetic construct
  source 1..75: mol_type = other DNA
atgatgacactggaagccgacagcgttaacgtacaggcgctggatatggggcgcattgtcattgacgtcgatggt

SEQ ID NO: 18676 - DNA, 75 bp, synthetic construct
  source 1..75: mol_type = other DNA
gtatcggtgcgtggtcgtacccggttctgcgacttaaacggctgggcctgtcaaaaacgttccgtcgtctggttg

SEQ ID NO: 18677 - DNA, 75 bp, synthetic construct
  source 1..75: mol_type = other DNA
ctggcaggtcaacatgccagccgccaccaacaccacctggatgacatgtggcgatccctgtgattccgcactgcg

SEQ ID NO: 18678 - DNA, 75 bp, synthetic construct
  source 1..75: mol_type = other DNA
cttctggggggacaccgttgtcgagtgtgttcttaacaaactctgcccgtcgcatacctatgtgatttttaaata

SEQ ID NO: 18679 - DNA, 75 bp, synthetic construct
  source 1..75: mol_type = other DNA
gaagacagcttccgcgacgtcatcgacagctttgccctgaagaacccgctcatcgcctccctggatgaggagctg

SEQ ID NO: 18680 - DNA, 75 bp, synthetic construct
  source 1..75: mol_type = other DNA
accggaataccgatcgtctgctttgtctactgacgttactgcctgtgctgattctggctgtcgtttcaggcgtca

SEQ ID NO: 18681 - DNA, 75 bp, synthetic construct
  source 1..75: mol_type = other DNA
atcgtggaacggatcatcggcacggcgatgcagatgattcacgacgaactgccgggaacgaccttctccaaccct

SEQ ID NO: 18682 - DNA, 75 bp, synthetic construct
  source 1..75: mol_type = other DNA
gtatccatacccgggccattcacagcattgataccgacattaagctcaatcgcgcattgtgggtgatggcagaaa

SEQ ID NO: 18683 - DNA, 75 bp, synthetic construct
  source 1..75: mol_type = other DNA
tgcgtctgcgccgtgacggggagataaacggacaacatgtccctgaaatcatcctgctgaactcccatgacggta

SEQ ID NO: 18684 - DNA, 75 bp, synthetic construct
  source 1..75: mol_type = other DNA
atttcagcgggtgcattctggccggatattgtgctgcgtgagctgcgtctggcggtacgactgccgggccgcgtg

SEQ ID NO: 18685 - DNA, 75 bp, synthetic construct
  source 1..75: mol_type = other DNA
tggaaaccgcattctgtactttcgtgctgtcgcgtatagcaagggaaatatccagtattctcgacggtattcctc

SEQ ID NO: 18686 - DNA, 75 bp, synthetic construct
  source 1..75: mol_type = other DNA
ccatacgcggctcaacgcccaaaattaaaggtttttgccagattgaaaaagccgcgaacgaatctgcacatttta

SEQ ID NO: 18687 - DNA, 75 bp, synthetic construct
  source 1..75: mol_type = other DNA
gcgctctgaagaagtccggagcgcactgaaacagaaacttcgccataacctggaagcgcgtcttgatgcagaagt

SEQ ID NO: 18688 - DNA, 75 bp, synthetic construct
  source 1..75: mol_type = other DNA
ggatgccattctggatgaactgctgggcgcaccggcagctccggagccggaaggcatcgcgggtgaggggagtgc

SEQ ID NO: 18689 - DNA, 75 bp, synthetic construct
  source 1..75: mol_type = other DNA
gtaccgatgcatggtcgtacccggttctgcggcttaaacgcctggggctgtcaaaaacgttccgccgtctggttg

SEQ ID NO: 18690 - DNA, 75 bp, synthetic construct
  source 1..75: mol_type = other DNA
ccattaatcaaatttgagcgagttgctcatattcatctggcaaatgtgaataatccatttccgccacagttgcgc

SEQ ID NO: 18691 - DNA, 75 bp, synthetic construct
  source 1..75: mol_type = other DNA
tttctgctggagctatgccgcgcggaaatctcagtgctgtgctgcggggatttttatcagcatacctttgacaca

SEQ ID NO: 18692 - DNA, 75 bp, synthetic construct
  source 1..75: mol_type = other DNA
gtccagccagacggcagcgaagaccagcgaaacgaatgccaaagccagtgaaactgcggcaaaaaacagccaggt

SEQ ID NO: 18693 - DNA, 75 bp, synthetic construct
  source 1..75: mol_type = other DNA
ggtatttgatgaacgttttggcaccagaccgttagatgccataaccgtaaaagatgtggtatcggtgctggaaga

SEQ ID NO: 18694 - DNA, 75 bp, synthetic construct
  source 1..75: mol_type = other DNA
ataatgtggcgggaaatgcggtttctgaaacgcattccggcgacagcgtatatgcttccctgtttgaaaaaatta

SEQ ID NO: 18695 - DNA, 75 bp, synthetic construct
  source 1..75: mol_type = other DNA
ccagcaggctgacgaacaggccacgcagccggacagcgtgacagccgaaaactatgcgcgtgttgttgctgaggt

SEQ ID NO: 18696 - DNA, 75 bp, synthetic construct
  source 1..75: mol_type = other DNA
atggctttaccacgcaaattaaaacacctgaacctgtttaatgacgggaacaactggcaggggatcgttgagtcg

SEQ ID NO: 18697 - DNA, 75 bp, synthetic construct
  source 1..75: mol_type = other DNA
ccgacagaaagcctgttatcggtcaacgaacaggaaagggtgacaagacccactggattatttttatgaaggagg

SEQ ID NO: 18698 - DNA, 75 bp, synthetic construct
  source 1..75: mol_type = other DNA
atgcgtgcactacgcaaaggccaggcctcagcattttattatggtgatcccctgggcgaaatgcgcctggtaagc

SEQ ID NO: 18699 - DNA, 75 bp, synthetic construct
  source 1..75: mol_type = other DNA
atggctgagcttcgtacactccagagcagaatcaaaacactgaatacccgacgggtgaatattctgaagggtgaa

SEQ ID NO: 18700 - DNA, 75 bp, synthetic construct
  source 1..75: mol_type = other DNA
aaaaattcaacaggaaagatatgaaaacggagagatcaaactcaacacactgaaacagaaagcatcccctctcag

SEQ ID NO: 18701 - DNA, 75 bp, synthetic construct
  source 1..75: mol_type = other DNA
cgggctgaggtggcagcttctgacgctttcgtggtcgcggtggatgcagaagtggctgctgattgttgtgacgct

SEQ ID NO: 18702 - DNA, 75 bp, synthetic construct
  source 1..75: mol_type = other DNA
atacagtgcgtggtaagaccgctgcaaatcctgcgtgctgacgggacgtgggaaaatattggcgggatgaagtaa

SEQ ID NO: 18703 - DNA, 75 bp, synthetic construct
  source 1..75: mol_type = other DNA
gaacatggggcgcattgtcgttgacgtcgatggtattgagcttgctgaactgattaacgtggtctgcgataacgg

SEQ ID NO: 18704 - DNA, 75 bp, synthetic construct
  source 1..75: mol_type = other DNA
cgcagaaaaatgattatccggcatccgttgatcacaatgctgccatgattgaagaattgcgcgcagatcctgatt

SEQ ID NO: 18705 - DNA, 75 bp, synthetic construct
  source 1..75: mol_type = other DNA
taagacgaaagctcggtgaagcaaaacgagacattgatgcttacaagcgactttttaatggtgaaagccatgctt

SEQ ID NO: 18706 - DNA, 75 bp, synthetic construct
  source 1..75: mol_type = other DNA
tcagtcggatggttcagcaaggctctggagagtgtcgacgaagttcgcattatcactgatggacggattaatttt

SEQ ID NO: 18707 - DNA, 75 bp, synthetic construct
  source 1..75: mol_type = other DNA
ttttgctccccgcccgatggggaatcgtccggtatggattgggtatgacgcaaacggcagcagtggcaacggcga

SEQ ID NO: 18708 - DNA, 75 bp, synthetic construct
  source 1..75: mol_type = other DNA
tgcgtgaggcggcagaacgtgcaattccggcaatggaacgcctgttaatgttgccagttgatgatgatctgataa

SEQ ID NO: 18709 - DNA, 75 bp, synthetic construct
  source 1..75: mol_type = other DNA
tgattgaatcagatgctcaggcttatgcaaacgctgaattcatagcagaggctaacccggctaccgtgctggcac

SEQ ID NO: 18710 - DNA, 75 bp, synthetic construct
  source 1..75: mol_type = other DNA
gtcgctggctattggtgtgcttgctggcccgctggcaaaactgcgtcttggtttttccctcctgaccggatcaat

(The sequence listing continues in the following parts.)

1-109. (canceled)

110. A method of generating a set of probes, the method comprising:
(a) identifying a plurality of clusters of gene sequences derived from a set of genomes derived from organisms, and wherein the gene sequences within each cluster share at least about 25% nucleotide sequence identity;
(b) generating a set of probes, wherein each probe within the set comprises at least about 25 nucleotides and at least about 80% of said nucleotides are complementary to a target sequence present in the clusters of gene sequences, wherein the probes collectively target at least about 10% of all gene sequences in a gene cluster.

111. A method of characterizing a complex biological sample, the method comprising:
(a) contacting polynucleotides derived from the complex biological sample with the set of probes generated in claim 111, or a subset of such probes, under conditions that permit hybridization of the probes to the polynucleotides, thereby forming polynucleotide/probe complexes, wherein each probe is coupled to a binding member;
(b) contacting the polynucleotide/probe complexes with a capture molecule fixed to a solid support, wherein the capture molecule specifically binds the binding member of the probe, thereby enriching polynucleotides of the complex biological sample; and
(c) characterizing the enriched polynucleotides.

112. The method of claim 111, wherein the characterizing comprises sequencing, qPCR, fluorescent imaging, fluorescence activated cell sorting (FACS), genotyping array, or a NanoString assay.

113. A method for enrichment of polynucleotides derived from a complex biological sample, the method comprising:
(a) contacting polynucleotides derived from the complex biological sample with the set of probes of claim 110, or a subset thereof, under conditions that permit hybridization of the set of probes to the polynucleotides, wherein each probe is coupled to a binding member and/or to a solid support, thereby forming polynucleotide/probe complexes; wherein, if the probe is not coupled to a solid support, the method further comprises,
(b) contacting the polynucleotide/probe complex with a capture molecule fixed to a solid support, wherein the capture molecule specifically binds the binding member of the probe, thereby enriching the polynucleotides derived from the complex biological sample.

114. The method of claim 110, wherein the complex biological sample comprises polynucleotides derived from a host organism and an organism of interest, and wherein the enriched polynucleotides are derived from the organism of interest.

115. The method of claim 111, wherein the complex biological sample is an agricultural sample, biological sample, environmental sample, or food sample.

116. The method of claim 115, wherein the sample is collected from a surface of a medical device.

117. The method of claim 111, wherein the set of genomes comprises at least about 2, 5, 100, 250, or 500 genomes.

118. The method of claim 111, wherein the set of genomes are derived from a plurality of strains of a species.

119. The method of claim 111, wherein the organisms comprise a pathogen.

120. The method of claim 119, wherein the pathogen is selected from the group consisting of
Aerobacter, Aeromonas, Acinetobacter, Actinomyces israelii, Agrobacterium, Bacillus, Bacillus anthracis, Bacteroides, Bartonella, Bordetella, Bortella, Borrelia, Brucella, Burkholderia, Calymmatobacterium, Campylobacter, Citrobacter, Clostridium, Corynebacterium, Enterobacter, Enterococcus, Erysipelothrix rhusiopathiae, Escherichia, Faecalibacterium, Francisella, Fusobacterium micleatum, Gardnerella, Haemophilus, Hafnia, Helicobacter, Klebsiella, Legionella, Leptospira, Listeria, Morganella, Moraxella, Mycobacterium, Neisseria, Pasteurella, Proteus, Providencia, Pseudomonas, Rickettsia, Salmonella, Serratia, Shigella, Staphylococcus, Stentorophomonas, Streptococcus, Treponema, Xanthomonas, Vibrio, and Yersinia. spp.

121. The method of claim 111, wherein the organisms comprise a species belonging to the genus Akkermansia and/or Bifidobacterium.

122. The method of claim 120, wherein the organisms comprise a strain of E. coli selected from the group consisting of AIEC, DAEC, EAEC, EHEC, EIEC/Shigella, EPEC, ETEC, EXPEC, NMEC, SEPEC, ST131, and UPEC.

123. The method of claim 112, wherein the polynucleotides are enriched by a factor of at least about 2.

124. The method of claim 112, wherein the polynucleotide-probe complexes comprise a non-biased representation of sequence diversity in the complex biological sample.

125. The method of claim 111, wherein each probe shares at least about 90% nucleotide sequence identity across the length thereof with a gene sequence in at least one of the clusters.

126. The method of claim 112, wherein the subject has or has had an infection associated with the organisms.

127. The method of claim 126, wherein the infection is a chronic or recurring infection.

128. A method for generating a set of probes for use in pan-genomic or pan-transcriptomic sequencing of polynucleotides derived from organisms present in a microbiome, the method comprising:
(a) identifying a plurality of orthogroup clusters of gene sequences within a set of genomes derived from the organisms, wherein the organism are present in a microbiome;
(b) identifying a plurality of gene clusters within the orthogroup clusters, wherein the gene sequences within each of the gene clusters share at least about 80% nucleotide sequence identity; and
(c) generating a set of probes, wherein each probe within the set comprises from about 50 to about 85 nucleotides, wherein each probe is complementary to at least about 25 base pairs of a gene sequence present in the gene clusters identified in (b), wherein the probes collectively cover at least about 50% of all gene sequences in the gene clusters, and wherein the set excludes probes having 50 or more contiguous nucleotides that are identical to a set of reference sequences, and wherein coverage of each probe is determined using a cover extension of about 20 bp.

129. A polynucleotide array comprising the set of probes of claim 110.

130. A set of probes suitable for use in the method of claim 111, wherein the probes comprise a set of sequences each sharing at least 80% nucleotide sequence identity along a span of at least about 65 nucleotides to a sequence selected from SEQ ID NOs: 1 to 892415.

131. A set of enriched polynucleotide sequences obtained by the method of claim 111.

132. A panel of probes comprising probes generated according to the method of claim 110.

133. The panel of claim 132, wherein each probe comprises a unique molecular identifier, a bar code, a detectable moiety, and/or a binding member.
